(19) United States
(12) Patent Application Publication
(10) Pub. No.: US 2006/0046253 A1
(43) Pub. Date: Mar. 2, 2006

(54) Method for analyzing genes of industrial yeasts

(75) Inventors: Yoshihiro Nakao, Kyoto (JP); Norihisa Nakamura, Kyoto (JP); Yukiko Kodama, Osaka (JP); Tomoko Fujimura, Osaka (JP); Toshihiko Ashikari, Osaka (JP)

Correspondence Address: BUCHANAN INGERSOLL PC;(INCLUDING BURNS, DOANE, SWECKER & MATHIS), POST OFFICE BOX 1404, ALEXANDRIA, VA, 22313-1404, US

(73) Assignee: SUNTORY LIMITED, Osaka-shi (JP)

(21) Appl. No.: 10/932,182

(22) Filed: Sep. 2, 2004

(51) Int. Cl. C12Q 1/68; C12N 1/18; C12N 15/74

(52) U.S. Cl. 435/6; 435/483; 435/254.21

(57) ABSTRACT

An object of the present invention is to provide a method for analyzing gene of an industrial yeast. The method of the present invention comprises (a) determining the whole genome sequence of the industrial yeast; and
(c-1) selecting a gene of the industrial yeast encoding an amino acid sequence having 70 to 97% identity to an amino acid sequence encoded by the gene of Saccharomyces cerevisiae, or
(c-2) selecting a gene of the industrial yeast consisting of a nucleotide sequence having 60 to 94% identity to the nucleotide sequence of the gene of Saccharomyces cerevisiae.

### SEQUENCE LISTING

[0001] The Sequence Listing is submitted on one compact disc including a duplicate. The material on the compact disc including the duplicate copy is hereby incorporated by reference in its entity. The compact disc including the duplicate copy contains a file named “YCT966 sequence listing”, which was created on Aug. 23, 2004 (and stored on the compact disc on Sep. 2, 2004) and is 52,018 kilobytes.

[0002] Summary of the sequence listing is as follows:

[0003] SEQ ID NO: 1 represents the nucleic acid sequence for the nonSc-SSU1 gene.

[0004] SEQ ID NO: 2 represents the nucleic acid sequence for the nonSc-MET14 gene.

[0005] SEQ ID NO: 3 represents the amino acid sequence for the nonSc-SSU1 protein deduced from the nucleic acid sequence.

[0006] SEQ ID NO: 4 represents the amino acid sequence for the nonSc-MET14 protein deduced from the nucleic acid sequence.

[0007] SEQ ID NOs: 5-32 represent oligonucleotide primers for amplification.

[0008] SEQ ID NOs: 33-6236 represent 6204 DNA sequences of non-Sc type ORFs, which can be preferably used as probes of the microarry.

[0009] SEQ ID NOs: 6237-75336 represent sequences of oligonucleotides based on DNA sequences of SEQ ID NOs: 33-6236, which can be preferably used as probes of the microarry.

[0010] SEQ ID NOs: 75337-82784 represent 7448 DNA sequences of Sc type ORFs.

[0011] SEQ ID NOs: 82785-166153 represent sequences of oligonucleotides based on DNA sequences of SEQ ID NOs: 75337-82784.

[0012] SEQ ID NOs: 166154-166181 represent 28 DNA sequences of mtochondrial ORFs from 34/70 strain, which can be preferably used as probes of the microarry.

[0013] SEQ ID NOs: 166182-166489 represent sequences of oligonucleotides based on DNA sequences of SEQ ID NOs: 166154-166181, which can be preferably used as probes of the microarry.

[0014] SEQ ID NOs: 166490-167042 represent 553 DNA sequences which have not been identified as the above non-Sc ORFs but have significant similarity to the proteins of S. cerevisiae using NCBI-BlastX homology searching.

[0015] SEQ ID NOs. 167043-173124 represent sequences of oligonucleotides based on DNA sequences of SEQ ID NOs: 166490-167042.

[0016] SEQ ID NOs: 173125-174603 represent 1479 DNA sequences ORFs which have not been identified as the above, but have significant similarity to the proteins of S. cerevisiae using NCBI-BlastP homology searching.

[0017] SEQ ID NOs. 174604-190810 represent sequences of oligonucleotides based on DNA sequences of SEQ ID NOs: 173125-174603.

[0018] SEQ ID NOs: 190811-191213 represent 403 S. cerevisiae ORFs from SGD which are not identified as Sc type ORFs in strain 34/70.

[0019] SEQ ID NOs: 191214-195587 represent sequences of oligonucleotides based on DNA sequences of SEQ ID NOs: 190811-191213.

[0020] SEQ ID NOs: 195588-195651 represent 64 DNA sequences of genes from Saccharomyces cerevisiae, Bacillus subtulis, Escherichia coli., or Bacteriophage P1, used as internal standard.

[0021] SEQ ID NOs: 195652-197021 represent sequences of oligonucleotides based on DNA sequences of SEQ ID NOs: 195588-195651.

[0022] The character “n” in various nucleotides sequences of the Sequence Listing is used in accordance with its well known meaning in the art to mean or represent a or g or c or t/u, unknown, or other.

### TECHNICAL FIELD

[0023] The present invention relates to a method analyzing genes of an industrial yeast used for the production of an alcoholic beverage such as beer or sake, a fuel alcohol, etc. and particularly for genes of brewing yeast used for the production of an alcoholic beverage. More particularly, it relates to a method where, in the production of an alcoholic beverage, DNA sequence information of brewing yeast is compiled in a database so that the gene which participates in increase in productivity and/or improvement in flavor such as stabilization, reinforcement, etc. of the flavor is selected; a method for breeding yeast suitable for the brewing in which expression of a gene is controlled, such as yeast in which the selected gene is disrupted or yeast in which the gene is overexpressed; and a method for the production of an alcoholic beverage using the bred yeast.

### BACKGROUND ART

[0024] Development of techniques for production of fuel alcohols, alcoholic beverages such as beer or sake, etc. has been carried out using industrial yeast. Especially in the production of an alcoholic beverage using brewing yeast, there has seen a brisk development in the techniques for increasing productivity and improving flavor such as stabilization or enhancement of flavor of an alcoholic beverage.

[0025] The most consumed alcoholic beverage in the world is beer and the amount of beer produced in the world in 2001 was about 140,000,000 kL. Type of beer is roughly classified into three depending upon type of yeast and fermentation method. The three types are, naturally fermented beer where fermentation is carried out utilizing yeast and microorganisms inhabiting in breweries; ale-type beer where fermentation is carried out using a top fermenting yeast belonging to Saccharomyces cerevisiae (hereinafter, abbreviated as S. cerevisiae) at the temperature of 20 to 25° C. and the following aging period is shortened; and lager-type beer where fermentation is carried out using a bottom fermenting yeast belonging to Saccharomyces pastorianus at the temperature of 6 to 15° C. and then subjected to a low-temperature aging. At present, not less than 90% of the beer produced in the world is a lager-type beer and, therefore, the bottom fermenting yeast that is used for brewing of the lager-type beer has been most widely used in beer brewing.

[0026] In the so-called fermentation production where production is carried out using a microorganism including the above-mentioned brewing yeast, it is important that the fermentation process is optimized and that the useful strain is selected and bred, in order to increase productivity and improve quality of the product.

[0027] In the case of optimization of beer brewing, there has been conducted a method where an amount of yeast metabolites such as alcohol (e.g. ethanol), ester, organic acid, etc. are monitored, and then temperature, quantity of airflow, content of raw material, etc. are controlled. In such a case, material uptake and excretion by yeast cells and metabolism in the cells are handled as a black box and only very superficial control is carried out. In addition, for the purpose of giving, for example, high flavor to an alcoholic beverage, a process control method for suppressing the amount of oxygen supply during beer brewing or the like has been tried. In such a method, however, growth rate of the yeast itself is reduced due to insufficient oxygen, and adverse effect such as retardation of fermentation and/or deterioration of beer quality may arise. Accordingly, there has been a limit on the improvement in productivity and quality of beer by means of optimization of fermentation processes.

[0028] On the other hand, with regard to a method of breeding useful industrial yeast such as useful beer yeast, a technique for selecting desirable strain has widely been used rather than actual breeding. Beer brewing per se has been performed since well before the discovery of microorganisms by Pasteur. In the beer brewing, a method of selecting more suitable strain of beer yeast from many strains of yeast used in the beer brewery has been traditionally carried out while there have been few cases where beer yeast with good traits is positively bred.

[0029] As an example of a positive breeding method, there is a method where artificial mutagenesis by chemicals or radioactive rays is used. However, brewing yeast, particularly a bottom fermenting yeast which is widely used in beer brewing, is in many cases a polyploid. In that case, it is not possible to produce the desired mutant unless mutation takes place in all of the alleles to be mutated. Accordingly, although it is possible to induce desirable mutation in the case of a haploid laboratory yeast, it is substantially impossible in the case of beer yeast which is a polyploid.

[0030] In recent years, there has been tried a breeding where mutation or cross-breeding is carried out by using spores isolated from bottom fermenting yeast (c.f., for example, Non-Patent Document 1). However, the bottom fermenting yeast is a polyploid, and has complicated chromosome structure. Therefore, isolation of spores having proliferation ability is difficult, and moreover, it is almost impossible to obtain a strain with good traits from them.

[0031] On the other hand, it has recently become possible that desired genes are introduced and expressed in the brewing yeast using a genetic engineering technique, whereby it has become possible to breed yeast with the desired character by using the results of functional analysis of genes and the genes which have been functionally analyzed. However, as compared with the baker's yeast (S. cerevisiae; c.f., for example, Non-Patent Document 2) of which the whole genome sequence is already clarified, the whole genome sequence of the bottom fermenting yeast has not been clarified and there have been only a very few findings about the gene participating in brewing character specific to bottom fermenting yeast and about the function of the said gene in beer brewing.

[0032] In recent years, transcriptome analysis has been conducted using DNA array where DNA fragments or nucleotide oligomers, each of which has a partial sequence of structural gene or internal region of the chromosome are fixed on solid support. For example, Olesen, et al. conducted a comprehensive genetic expression analysis of bottom fermenting yeast during the brewing using GeneFilters (manufactured by Research Genetics Co.) (c.f., for example, Non-Patent Document 3). However, since the whole genome sequence of bottom fermenting yeast has not been clarified yet, it is ambiguous that what gene is monitored for its expression precisely. As a result, such information is quite insufficient to apply to metabolic analysis of bottom fermenting yeast, and to breeding of useful yeast, and to control of beer brewing process.

[0033] At present, the whole genome sequences of more than 100 species of microorganisms have been determined (c.f., for example, Non-Patent Document 6) including S. cerevisiae, Escherichia coli (c.f., for example, Non-Patent Document 4) and Mycobacterium tuberculosis (c.f., for example, Non-Patent Document 5). On the basis of the determined DNA sequences, genes of these microorganisms are identified and function of an enormous number of genes have been predicted without conducting genetic, biochemical and molecular biological experiments. However, industrial yeast such as brewing yeast which has high ploidy and complicated chromosome structure, and thus an assembly (an operation for connecting the DNA sequences) is presumed to be difficult. Therefore, the whole genome sequence of bottom fermenting yeast which contains two different types of genome (c.f., for example, Non-Patent Document 7) has not been reported yet.

[0034] In the production of specific alcohols or alcoholic beverages, there is a technique to increase concentration of sulfite in the product for control of flavor. Sulfite is known as a compound which has anti-oxidative activity, and has been widely used as an antioxidant in the fields of food, beverage and pharmaceuticals, and also in an alcoholic beverage. For example, in the case of wine that requires a long aging period, sulfite plays an important role for the preservation of its quality. It is also known that, in beer brewing, the quality preservation period becomes long in accordance with the increase in concentration of sulfite contained in the product. Thus, when the amount of sulfite in the product is increased, it is possible to prepare a product that has excellent flavor stability and a long quality preservation period.

[0035] The simplest way to increase the amount of sulfite in the product is addition of sulfite. In Japan, so far as wine is concerned, it is permitted by the Ministry of Health, Labor and Welfare to add sulfite to an extent of not more than 350 ppm in terms of residual sulfite concentration. In that case, however, since sulfite is categorized as food additives, it is not appropriate to add sulfite to beer when a negative image of consumers to food additives is taken into consideration.

[0036] However, the yeast used in brewing produces hydrogen sulfide by the reduction of sulfate in the medium in order to synthesize sulfur-containing metabolites such as sulfur-containing amino acids. Sulfite is an intermediate metabolite of this pathway. If sulfite is efficiently excreted outside the cells during fermentation period, the amount of sulfite both in the wort and in the product can be increased.

[0037] There are two methods for increasing sulfite concentration in the wort during fermentation. One is control of fermentation process and another is breeding of brewing yeast. As for control of fermentation process, amount of sulfite produced during fermentation is inversely proportional to the concentration of dissolved oxygen and, therefore, there has attempted, a method where the concentration of dissolved oxygen is reduced so that amount of sulfite is increased and at the same time the oxidation of sulfite is suppressed. However, in that method, growth rate of yeast is reduced due to lack of oxygen, which has negative effects such as retardation of fermentation and deterioration of quality. Therefore that method is not practical.

[0038] On the other hand, as mentioned above, a genetic engineering technique has been developed for breeding brewing yeast. For example, there are some reports focused on sulfur metabolism of yeast. Sulfite (SO₂) is an intermediate product of sulfur-containing amino acid and vitamin synthesis and is produced via a pathway of sulfate ion (SO₄²⁻)→APS (adenyl sulfate)→PAPS (phosphoadenylyl sulfate)→sulfite ion (SO₃²⁻) where the sulfate ion is incorporated from outside of the cells. There is an attempt that copy numbers of MET 3 gene participating in the reaction of sulfate ion (SO₄²⁻)→APS (adenylyl sulfate) and of MET 14 gene participating in the reaction of APS (adenylyl sulfate)→PAPS (phosphoadenylyl sulfate) are increased to improve the ability of the yeast for the production of sulfite (c.f., for example, Non-Patent Document 8). There is another example of an attempt where reduction of sulfite ion (SO₃²⁻) is inhibited by disruption of MET 10 gene whereby amount of sulfite produced by the yeast is increased (c.f., for example, Non-Patent Document 9). According to such attempts, amount of sulfite produced by an MET 10 gene disruptant is increased to an extent of not less than ten-fold of the parental strain, but on the other hands some retardation in fermentation and increase in the amounts of acetaldehyde and 1-propanol in the beer are noted, which has become a problem for the practical use.

[0039] Accordingly, although development of breeding methods for industrial yeast such as brewing yeast using genetic engineering have been in progress, it is the current status that, due to insufficient genomic information of brewing yeast, selection of the gene participating in a brewing character of brewing yeast, analysis of function of protein encoded by the gene and utilization of those findings for breeding have not been sufficiently carried out.

[0040] Thus, a method for breeding yeast which shows the desired character without deterioration of fermentation speed and product quality has not been established yet and there has been a big demand for the development of such a method not only in the brewing industry but also in the industries where yeast is used.

[0041] (Non-Patent Document 1) C. Gjermansen: “Construction of a hybrid brewing strain of Saccharomyces carlsbergensis by mating of meiotic segregants”, Carlsberg Res. Commun., volume 46, pages 1 to 11 (1981).

[0042] (Non-Patent Document 2) A. Goffeau, et al.: “The Yeast Genome Directory”, Nature, volume 387, pages 5 to 105 (1997).

[0043] (Non-Patent Document 3) K. Olesen, et al.: “The dynamics of the Saccharomyces carlsbergensis brewing yeast transcriptome during a production-scale lager beer fermentation”, FEMS Yeast Research, volume 2, pages 563 to 573 (2000).

[0044] (Non-Patent Document 4) F. R. Blattner, et al.: “The Complete Genome Sequence of Escherichia coli K-12”, Science, volume 277, pages 1453-1462 (1997).

[0045] (Non-Patent Document 5) S. T. Cole, et al.; “Deciphering the biology of Mycobacterium tuberculosis from the complete genome sequence”, Nature, volume 393, pages 537-544 (1998).

[0046] (Non-Patent Document 6) The National Center for Biotechnology Information, http://www.ncbi.nlm.nih.gov/PMGifs/Genomes/micr.html.

[0047] (Non-Patent Document 7) Y. Tamai et al.:“Co-existence of two types of chromosome in the fermenting yeast, Sacchaomyces cerevisiae”, Yeast, volume 10, pages 923-933 (1998).

[0048] (Non-Patent Document 8) C. Korch, et al.: Proc. Eur. Brew. Conv. Congress, Lisbon, pages 201-208 (1991).

[0049] (Non-Patent Document 9) J. Hansen, et al.: “Inactivation of MET 10 in brewer's yeast specifically increases SO₂ formation during beer production”, Nature Biotech., volume 14, pages 1587-1591 (1996).

[0050] (Non-Patent Document 10) T. Sijen, et al.: “Transcriptional and posttranscriptional gene silencing are mechanistically related”, Curr. Biol., volume 11, pages 436-440 (2001)

[0051] (Non-Patent Document 11) N. Goto, et al.: “SSU1-R, a sulphite resistance gene of wine yeast, is an allele of SSU 1 with a different upstream sequence”, J. Ferment. Bioeng., volume 86, pages 427-433 (1998).

[0052] (Non-Patent Document 12) D. Avram, et al.: “SSU 1 encodes a plasma membrane protein with a central role in a network of proteins conferring sulfite tolerance in Saccharomyces cerevisiae”, J. Bacteriol., volume 179, pages 5971-5974 (1997).

[0053] (Non-Patent Document 13) H. Park, et al.; “SSU 1 mediates sulphite efflux in Saccharomyces cerevisiae”, Yeast, volume 16, pages 881-888 (2000).

### DISCLOSURE OF THE INVENTION

[0054] An object of the present invention is to provide a method of analyzing and selecting genes participating in the desired brewing character, which is achieved in such a manner that a database compiling the whole genome sequence (hereinafter, may be abbreviated as genomic DB) of industrial yeast, particularly brewing yeast used for an alcoholic beverage such as beer, is prepared; gene that the brewing yeast possesses is selected from the database; functional analysis of the gene may be carried out by disruption or overexpression. Another object of the present invention is to provide a DNA array which is useful for analyzing method of genes of an industrial yeast. Further object is to provide a breeding method of the yeast showing the brewing character which the said gene participates in and also a method of producing an alcohol or an alcoholic beverage where productivity and quality are improved using the said yeast. Still another object is to provide genes mentioned above and peptides encoded by the said genes.

[0055] It has been known that brewing yeast widely used for industrial purpose is a polyploid and especially, bottom fermenting yeast is an allopolyploid which is composed of at least two kinds of genomes. One of the genomes is thought to be a genome derived from S. cerevisiae of which the whole genome sequence has been clarified, while the source of another genome(s) has not been clarified yet.

[0056] The present inventors have determined the whole genome sequence of the bottom fermenting yeast in order to find unidentified genes displaying essential functions for excellent brewing. The amino acid sequences of the bottom fermenting yeast were then compared with those registered in the genomic DB for S. cerevisiae, and functions of proteins encoded by genes of the brewing yeast were estimated. As a result, it has been clarified that the genes of the bottom fermenting yeast are roughly classified into Sc type genes showing nearly 100% amino acid identity to S. cerevisiae and non-Sc type genes showing around 70 to 97% amino acid identify (this corresponds to around 60 to 94% identity in nucleotide level). Moreover, it has been clarified that the bottom fermenting yeast has complicated chromosome structure consists of Sc-type chromosomes, non-Sc-type chromosomes and Sc/non-Sc-type chimera chromosomes. Structure of the whole chromosomes of the bottom fermenting yeast is shown in FIG. 1. On the basis of genomic information clarified by the present invention, the present inventors have found such an unexpectedly complicated structure of chromosomes, and developed a screening method for the genes of bottom fermenting yeast.

[0057] To be more specific, there has been achieved a method for analyzing gene of an industrial yeast comprising

[0058] (a) determining nucleotide sequence of the whole genome of the industrial yeast, particularly bottom fermenting yeast which is one of the brewing yeasts,; and

[0059] (c-1) selecting a gene of the industrial yeast encoding an amino acid sequence having 70 to 97% identity to an amino acid sequence encoded by the gene of Saccharomyces cerevisiae, or

[0060] (c-2) selecting a gene of the industrial yeast consisting of a nucleotide sequence having 60 to 94% identity to the nucleotide sequence of the gene of Saccharomyces cerevisiae.

[0061] Preferably, the method of the present invention comprises,

[0062] (b) comparing the genome sequence with the whole genome sequence of Saccharomyces cerevisiae after the step (a) and before the step (c-1) or (c-2).

[0063] Preferably, the analyzing method of the present invention comprises, (d) carrying out functional analysis of the selected gene, after the step (c-1) or (c-2), whereby the brewing character given to the yeast by the genes are identified. The present inventors have repeatedly carried out intensive investigations on the basis of those findings and accomplished the present invention.

[0064] Thus, the present invention includes the following embodiments:

[0065] 1. A method for analyzing gene of an industrial yeast comprising

[0066] (a) determining nucleotide sequence of the whole genome sequence of the industrial yeast; and

[0067] (c-1) selecting a gene of the industrial yeast encoding an amino acid sequence having 70 to 97% identity to an amino acid sequence encoded by the gene of Saccharomyces cerevisiae, or

[0068] (c-2) selecting a gene of the industrial yeast consisting of a nucleotide sequence having 60 to 94% identity to the nucleotide sequence of the gene of Saccharomyces cerevisiae.

[0069] 2. The analyzing method according to Embodiment 1, comprising,

[0070] (b) comparing the genome sequence with the whole genome sequence of Saccharomyces cerevisiae after the step (a) and before the step (c-1) or (c-2).

[0071] 3. The analyzing method according to Embodiment 1 or 2, comprising

[0072] (d) carrying out functional analysis of the selected gene after the step (c-1) or (c-2).

[0073] 4. The analyzing method according to Embodiment 3, which comprises screening genes participating in increase in productivity and/or improvement in flavor in the production of an alcohol or an alcoholic beverage by the functional analysis of the step (d).

[0074] 5. The analyzing method according to Embodiment 3 or 4, wherein functional analysis is, performed by disruption of a gene or overexpression of a gene.

[0075] 6. The analyzing method according to any of Embodiments 1-5, wherein the industrial yeast is a brewing yeast.

[0076] 7. The analyzing method according to Embodiment 6, wherein the brewing yeast is a beer yeast.

[0077] 8. The analyzing method according to Embodiment 7, wherein the beer yeast is a bottom fermenting yeast.

[0078] 9. A gene of the industrial yeast encoding an amino acid sequence having 70 to 97% identity to an amino acid sequence encoded by the gene of Saccharomyces cerevisiae, or consisting of a nucleotide sequence having 60 to 94% identity to the nucleotide sequence of the gene of Saccharomyces cerevisiae, which is obtained by the analyzing method according to any one of Embodiments 1-8.

[0079] 10. A gene library comprising one or more of genes of the industrial yeast each of which encodes an amino acid sequence having 70 to 97% identity to an amino acid sequence encoded by the gene of Saccharomyces cerevisiae, or consists of a nucleotide sequence having 60 to 94% identity to the nucleotide sequence of the gene of Saccharomyces cerevisiae, which is obtained by the analyzing method according to any one of Embodiments 1-8.

[0080] 11. The gene library according to Embodiment 10, wherein the gene of the industrial yeast is comprised in, consists of or has any nucleotide sequence selected from SEQ ID NOs:33 to 6236, SEQ ID NOs:166154 to 166181, SEQ ID NOs:166490 to 167042 and SEQ ID NOs:173125 to 174603.

[0081] 12. A DNA array comprising one or more of DNAs, wherein each DNA is selected from at least one group of (1) to (4):

[0082] (1) DNA consisting of a nucleotide sequence of an open reading frame of the genome sequence of an industrial yeast which encodes an amino acid sequence having 70 to 97% identity to an amino acid sequence encoded by the gene of Saccharomyces cerevisiae, or a nucleotide sequence complementary to the above nucleotide sequence, or a nucleotide sequence of continuous 10 or more nucleotides selected from the above nucleotide sequences;

[0083] (2) DNA consisting of a nucleotide sequence of the genome sequence of an industrial yeast other than from open reading frames which consists of a nucleotide sequence having 60 to 94% identity to the nucleotide sequence of the gene of Saccharomyces cerevisiae, or a nucleotide sequence complementary to the above nucleotide sequence, or a nucleotide sequence of continuous 10 or more nucleotides selected from the above nucleotide sequences;

[0084] (3) DNA having a nucleotide sequence of any of SEQ ID NOs:166490 to 167042, or DNA having a nucleotide sequence of any of SEQ ID NOs:167043 to 173124; and

[0085] (4) DNA having a nucleotide sequence of any of SEQ ID NOs:173125 to 174603, or DNA having a nucleotide sequence of any of SEQ ID NOs:174604 to 190810.

[0086] 13. The DNA array according to Embodiment 12 comprising DNAs wherein at least one DNA is selected from every group of (1) to (4).

[0087] 14. The DNA array according to Embodiment 12 or 13, wherein the DNAs of (1) is comprised in, consists of or has any nucleotide sequence selected from SEQ ID NOs:33 to 6236 and SEQ ID NOs:166154 to 166181, and SEQ ID NOs:6237 to 75336 and SEQ ID NOs:166182 to 166489.

[0088] 15. The DNA array according to any one of Embodiments 12-14, which further comprises, in addition to at least one group of DNAs selected from (1) to (4), DNAs of the following (5) and/or (6),:

[0089] (5) DNA consisting of a nucleotide sequence of an open reading frame of the genome sequence of an industrial yeast which encodes an amino acid sequence having identity of more than 97% to an amino acid sequence encoded by the gene of Saccharomyces cerevisiae, or a nucleotide sequence complementary to the above nucleotide sequence, or a nucleotide sequence of continuous 10 or more nucleotides selected from the above nucleotide sequences; and

[0090] (6) DNA consisting of a nucleotide sequence of the genome sequence of an industrial yeast other than from open reading frames which consists of a nucleotide sequence having identity of more than 94% to the nucleotide sequence of the gene of Saccharomyces cerevisiae, or a nucleotide sequence complementary to the above nucleotide sequence, or a nucleotide sequence of continuous 10 or more nucleotides selected from the above nucleotide sequences, and optionally DNAs of the following (5′) and/or (6′):

[0091] (5′) DNA consisting of a nucleotide sequence which contains mismatch of 1 or more base(s) to the DNA of (5), or a nucleotide sequence complementary to the above nucleotide sequence; and

[0092] (6′) DNA consisting of a nucleotide sequence which contains mismatch of 1 or more base(s) to the DNA of (6), or a nucleotide sequence complementary to the above nucleotide sequence.

[0093] 16. The DNA array according to Embodiment 15, wherein the DNAs of (5) has a nucleotide sequence of any one of SEQ ID NOs:75337 to 82784, or SEQ ID NOs:82785 to 166153.

[0094] 17. The DNA array according to any one of Embodiments 12-16, which comprises, in addition to at least one group of DNAs selected from (1) to (4), DNAs selected from at least one group of (7) to (10):

[0095] (7) DNA consisting of a nucleotide sequence which contains mismatch of 1 or more base(s) to the DNA of (1), or a nucleotide sequence complementary to the above nucleotide sequence;

[0096] (8) DNA consisting of a nucleotide sequence which contains mismatch of 1 or more base(s) to the DNA of (2), or a nucleotide sequence complementary to the above nucleotide sequence;

[0097] (9) DNA consisting of a nucleotide sequence which contains mismatch of 1 or more base(s) to the DNA of (3), or a nucleotide sequence complementary to the above nucleotide sequence; and

[0098] (10) DNA consisting of a nucleotide sequence which contains mismatch of 1 or more base(s) to the DNA of (4), or a nucleotide sequence complementary to the above nucleotide sequence.

[0099] 18. The DNA array according to Embodiment 17, which comprises, in addition to at least one group of DNAs selected from (1) to (4), DNAs selected from at least one group of (7-1) to (10-1):

[0100] (7-1) DNA consisting of a nucleotide sequence which contains mismatch of 1 base to the DNA of (1), or a nucleotide sequence complementary to the above nucleotide sequence;

[0101] (8-1) DNA consisting of a nucleotide sequence which contains mismatch of 1 base to the DNA of (2), or a nucleotide sequence complementary to the above nucleotide sequence;

[0102] (9-1) DNA consisting of a nucleotide sequence which contains mismatch of 1 base to the DNA of (3), or a nucleotide sequence complementary to the above nucleotide sequence; and

[0103] (10-1) DNA consisting of a nucleotide sequence which contains mismatch of 1 base to the DNA of (4), or a nucleotide sequence complementary to the above nucleotide sequence.

[0104] 19. The DNA array according to any one of Embodiments 12-18, which comprises at least one group of DNAs selected from (1) to (4), at least one group of DNAs selected from (7) to (10), DNAs of (5) and/or (6) and DNAs of (5′) and/or (6′).

[0105] 20. The DNA array according to any one of Embodiments 12-19, wherein the DNAs are oligonucleotides consisting of 10-30 nucleotides.

[0106] 21. Use of the DNA array according to any one of Embodiments 12-20 for an analyzing method of genes of an industrial yeast.

[0107] 22. A method for classifying an industrial yeast comprising

[0108] (a) hybridizing genomic DNA prepared from the industrial yeast to the DNA array of any one of Embodiments 15-20; and

[0109] (b) calculating percentage to hybridize DNAs of any of (1) to (4), and percentage to hybridize DNAs of (5) and/or (6).

[0110] 23. The method for classification according to Embodiment 22, wherein the DNA array of Embodiment 19 is used, and

[0111] percentage of genes which hybridize to DNAs of (1) and/or (2), but not to DNAs of (7) and/or (8) is determined as percentage to hybridize DNAs of any of (1) to (4), and

[0112] percentage of genes which hybridize to DNAs of (5) and/or (6), but not to DNAs of (5′) and/or (6′) is determined as percentage to hybridize DNAs of any of (5) and/or (6).

[0113] 24. A method for detecting nucleotide polymorphism in genome of an industrial yeast comprising

[0114] (a) hybridizing genomic DNA prepared from the industrial yeast to the DNA array of any one of Embodiments 17-20; and

[0115] (b) selecting a gene wherein hybridization intensity to the DNAs of any of (7) to (10) is higher than hybridization intensity to the DNAs of any of (1) to (4).

[0116] 25. A method for screening a useful strain of industrial yeast, comprising

[0117] (a) hybridizing genomic DNA prepared from the industrial yeast strain to the DNA array of any one of Embodiments 12-20; and

[0118] (b) determining the industrial yeast strain as useful when the strain contain 1 or more genes wherein hybridization intensity thereof is 1.5 times higher, or ⅔ or less compared to an average hybridization intensity to the DNAs of any of (1) to (4).

[0119] 26. A method for screening a gene of an industrial yeast, comprising

[0120] (a) hybridizing genomic DNA prepared from the industrial yeast strain to the DNA array of any one of Embodiments 12-20; and

[0121] (b) selecting a gene wherein hybridization intensity thereof is 1.5 times higher, or ⅔ or less compared to an average hybridization intensity to the DNAs of any of (1) to (4).

[0122] 27. A method for screening a gene of an industrial yeast, comprising

[0123] (a-1) hybridizing genomic DNA, cDNA or cRNA prepared from the industrial yeast to the DNA array of any one of Embodiments 12-20;

[0124] (a-2) independently from the step of (a-1), hybridizing genomic DNA, cDNA or cRNA prepared from the industrial yeast of the strain used for preparing the DNA array to the DNA array of any one of Embodiments 12-20; and

[0125] (b) selecting a gene wherein hybridization intensity thereof to the DNAs of any of (1) to (4) in the step (a-1) is significantly different from hybridization intensity thereof in the step (a-2).

[0126] 28. A method for screening a gene of an industrial yeast, comprising

[0127] (a-1) hybridizing cDNA or cRNA prepared from the industrial yeast to the DNA array of any one of Embodiments 12-20;

[0128] (a-2) independently from the step of (a-1), hybridizing cDNA or cRNA prepared from another industrial yeast to the DNA array of any one of Embodiments 12-20, wherein the industrial yeast of (a-2) has been cultured in a different condition from the culture condition for the industrial yeast of (a-1); and

[0129] (b) selecting a gene wherein hybridization intensity thereof to the DNAs of any of (1) to (4) in the step (a-1) is significantly different from hybridization intensity thereof in the step (a-2).

[0130] 29. A gene obtained by the screening method of any one of Embodiments 26-28.

[0131] 30. The gene according to Embodiment 9 or 29 characterized in that concentration of sulfite in a culture medium of an industrial yeast increases when the gene is expressed in the yeast.

[0132] 31. A nucleic acid encoding a polypeptide of any one of the following i) and ii):

[0133] i) a polypeptide having the amino acid sequence represented by SEQ ID NO:3, and

[0134] ii) a polypeptide having an amino acid sequence wherein one or more amino acid residue(s) is deleted, substituted and/or added to the amino acid sequence represented by SEQ ID NO:3, and having an activity to increase concentration of sulfite in a culture medium of an industrial yeast when the gene is expressed in the yeast.

[0135] 32. The nucleic acid according to Embodiment 31, which is selected from the following a) and b):

[0136] (a) a nucleic acid having the nucleotide sequence represented by SEQ ID NO:1; and

[0137] (b) a nucleic acid having a nucleotide sequence which hybridizes to the nucleotide sequence complementary to the nucleotide sequence represented by SEQ ID NO:1 under a stringent condition, and encodes a polypeptide having an activity to increase concentration of sulfite in a culture medium of an industrial yeast when the gene is expressed in the yeast.

[0138] 33. A recombinant vector containing the gene of Embodiment 9 or Embodiments 29-30, or the nucleic acid of Embodiment 31-32.

[0139] 34. A transformant comprising the recombinant vector of Embodiment 33.

[0140] 35. The transformant according to Embodiment 34, which is a yeast of genus Saccharomyces.

[0141] 36. A polypeptide of any one of the following i) and ii):

[0142] i) a polypeptide having the amino acid sequence represented by SEQ ID NO:3; and

[0143] ii) a polypaptide having an amino acid sequence wherein one or more amino acid residue(s) is deleted, substituted and/or added to the amino acid sequence represented by SEQ ID N:3, and having an activity to increase concentration of sulfite in a culture medium of an industrial yeast when the gene is expressed in the yeast.

[0144] 37. The polypeptide according to Embodiment 36, which is encoded by a nucleic acid selected from the following a) and b):

[0145] (a) a nucleic acid having the nucleotide sequence represented by SEQ ID NO:1; and

[0146] (b) a nucleic acid having a nucleotide sequence which hybridizes to the nucleotide sequence complementary to the nucleotide sequence represented by SEQ ID No.1 under a stringent condition, and encodes a polypeptide having an activity to increase concentration of sulfite in a culture medium of an industrial yeast when the gene is expressed in the yeast.

[0147] 38. A method for producing an alcohol or an alcoholic beverage, using the transformant of Embodiment 34 or 35.

[0148] 39. A breeding method of yeast which is suitable for the production of an alcohol or an alcoholic beverage, characterized in that, expression of the gene of Embodiment 9 or Embodiments 29-30, or the nucleic acid of Embodiments 31-32 is controlled.

[0149] 40. The breeding method according to Embodiment 39, wherein the yeast belongs to the genus Saccharomyces.

[0150] 41. Yeast obtained by the breeding method of Embodiment 39 or 40.

[0151] 42. A method for producing an alcohol or an alcoholic beverage using the yeast mentioned in Embodiment 41.

[0152] 43. An alcohol or an alcoholic beverage which is produced by the producing method of Embodiment 42.

### BRIEF DESCRIPTION OF THE DRAWING

[0153] FIG. 1 shows total chromosome structures of bottom fermenting yeast. A white bar represents an Sc type chromosome while a black bar represents a non-Sc type chromosome. An ellipse represents a centromere. Roman numerals show chromosome numbers for the corresponding S. cerevisiae. In a drawing which shows a non-Sc chromosome, a part marked out in black shows that ligation takes place at the region. For example, in nonScII-nonScIV, it is shown that nonScII and nonScIV are ligated at the part marked out in black (300 kb).

[0154] FIG. 2 shows a distribution of identify of the DNA sequence at both ends of 3648 cosmids prepared from the genomic DNA of strain 34/70 with the genome sequence of S. cerevisiae. The X-axis shows the identity to S. cerevisiae and, for example, 84% on the X-axis shows an identity of more than 82% and not more than 84%. The Y-axis shows the numbers of cosmid end sequences showing the identity.

[0155] FIG. 3 shows a mapping example of cosmid and shotgun clones to genome sequence of S. cerevisiae. (1) and (2) show genes existing on Watson strand and Crick strand on the chromosome XVI of S. cerevisiae, respectively. (3) and (4) show Sc type and non-Sc type DNA fragments inserted in cosmid clones, respectively. (5) and (6) show Sc-type and non-Sc type DNA fragments inserted in shotgun clones, respectively.

[0156] FIG. 4 shows a mapping example of contigs to the genome sequence of S. cerevisiae. (A) is a schematic depiction of Chromosome XVI of S. cerevisiae. (B) is a drawing where the parts of 857 to 886 kb of the Chromosome XVI of S. cerevisiae is enlarged. Y-axis indicates % identity of contigs against S. cerevisiae genome sequence. X-axis indicates position of contigs against S. cerevisiae genome sequence. Contigs (solid lines) are connected with the forward-reverse links (dot lines) from the shotgun and cosmid reads, respectively.

[0157] FIG. 5 shows the result of DNA array-based comparative genomic hybridization. The genomic DNA of strain 34/70 was hybridized to a DNA array (Affymetrix Gene Chip Yeast Genome S98 Array) and the signal of each ORF (open reading frame) was normalized to that of the haploid strain S288C and shown as Signal Log Ratio (2ⁿ). Signal Log Ratios were lined following gene order in Chromosome XVI. The non-Sc type genes do not hybridize to this Sc type array, therefore, the points (indicated by arrows) where the Signal Log Ratios show vigorous changes were considered to be translocation sites.

[0158] FIG. 6 shows the structure of the Chromosome XVI of strain 34/70 deduced from DNA array and PCR analysis.

[0159] FIG. 7 shows the fermentation profiles of SSU1 disruptants and parental strain (BH96). a) shows yeast growth (OD 600), b) shows the change of apparent extract (w/w %) and c) shows sulfite concentration (ppm).

[0160] FIG. 8 shows the fermentation profiles of SSU1 overexpressed strains and parental strain (BH225). a) shows yeast growth (OD 600), b) shows the change of apparent extract (w/w %) and c) shows sulfite concentration (ppm).

[0161] FIG. 9 shows the change of sulfite concentration during fermentation using MET14 overexpressed strains and parental strains (KN009F and FOY227).

[0162] FIG. 10 shows DNA sequences of ScSSU1 and non-ScSSU1.

[0163] FIG. 11 shows DNA sequences of ScMET14 and non-ScMET14.

[0164] FIG. 12 shows the fermentation profiles of strain 34/70a) shows yeast growth (OD 600) and b) shows the change of apparent extract (w/w %).

### EMBODIMENTS FOR CARRYING OUT THE INVENTION

### I. A Method for Analyzing Gene of an Industrial Yeast

[0165] The present invention provides a method for analyzing gene of an industrial yeast. The present method comprises

[0166] (a) determining nucleotide sequence of the whole genome sequence of the industrial yeast; and

[0167] (c-1) selecting a gene of the industrial yeast encoding an amino acid sequence having 70 to 97% identity to an amino acid sequence encoded by the gene of Saccharomyces cerevisiae, or

[0168] (c-2) selecting a gene of the industrial yeast consisting of a nucleotide sequence having 60 to 94% identity to the nucleotide sequence of the gene of Saccharomyces cerevisiae.

[0169] In a preferred embodiment, the method of the present invention comprises, (b) comparing the genome sequence with the whole genome sequence of Saccharomyces cerevisiae, after the step (a) and before the step (c-1) or (c-2).

[0170] In a preferred embodiment, the analyzing method of the present invention further comprises the step of d) carrying out functional analysis of the selected gene, after the step (c-1) or (c-2).

[0171] With regard to the industrial yeast in the present invention, brewing yeast for beer, wine, sake, etc. and yeasts used for the production of fuel alcohols are exemplified. To be more specific, yeast of genus Saccharomyces, etc. may be listed, and in the present invention beer yeasts such as Saccharomyces pastorianus Weihenstephan 34/70, NCYC456, NBRC 1951, NBRC 1952, NBRC 1953, NBRC 1954, etc. may be used. It is also possible to use whisky yeasts such as S. cerevisiae NCYC 90, etc., wine yeasts such as Kyokai wine yeast No. 1, No. 3, No. 4, etc., sake yeasts such as Kyokai sake yeast No. 7, No. 9, etc. and the like.

[0172] Preferably, the industrial yeast of the present invention is a brewing yeast, more preferably, a beer yeast. Most preferably, the industrial yeast of the present invention is a bottom fermenting yeast. The bottom fermenting yeast means a yeast used for the lager beer production. Some strains of beer yeasts, such as Saccharomyces pastorianus Weihenstephan 34/70, NCYC456 or the like are classified as bottom fermenting yeasts. The strain used in the following Examples is one of the bottom fermenting yeasts commonly used for the lager beer production. The most of the bottom fermenting yeasts seem to have almost the same genome with that of strain 34/70.

[0173] It is also possible to breed yeast having an excellent brewing character when the gene obtained by the method of the present invention is used for carrying out an expression control in such a way that the gene is overexpressed in the yeast, and/or the gene is disrupted. Accordingly, the gene which is obtained by the method of the present invention, peptide which is encoded by the gene, a breeding method of an industrial yeast using the gene, yeast which is obtained by the breeding method, and a method for the production of an alcohol or an alcoholic beverage using the yeast are also within a scope of the present invention.

[0174] (A) Determination of Nucleotide Sequence of the Whole Genome Sequence of Industrial Yeast

[0175] Determination of the whole genome sequence of an industrial yeast can be achieved by any conventional methods. For example, it includes the steps of (a) genomic DNA is prepared from yeast, (b) shotgun library and (c) cosmid library are prepared from those genomic DNA, (d) DNA fragments to be used for determination of DNA sequence are prepared from those library clones, (e) DNA sequence of the library DNA fragments is determined by a sequence reaction and (f) the sequences of those DNA fragments are assembled to reconstruct the whole genome sequence. Both or only one of (b) shotgun library and (c) cosmid library may be prepared for this purpose.

[0176] There is no particular limitation for the methods used for (a) to (f) and the method may be conducted according to the known means, while preferred method for each of them is mentioned below.

[0177] (a) Preparation such as extraction, purification, etc. of the genomic DNA is preferably carried out in accordance with the known methods, for example, in “Yeast, a practical approach (IRL Press, 6.2.1, p. 228)” and “Seibutukagakujikkennhou, No. 39, Experiments in Yeast Molecular Genetics (edited by Yasuharu Oshima, Gakkai Shuppan Center, pages 84 to 85, 1996)”. The specific examples of the preferred method for the preparation of DNA are mentioned below.

[0178] Yeast cells for the preparation of genomic DNA are cultured by a common method. With regard to a medium, any of natural and synthetic media may be used so far as the medium contains carbon source,-nitrogen source, inorganic salt, etc. which are able to be metabolized by the yeast, whereby cultivation of the microorganism can be efficiently carried out. For example, YPD medium (2% (w/w) glucose, 1% (w/w) yeast extract and 2% (w/w) polypeptone) may be used. With regard to a method of incubation, incubation by shaking at about 25 to 35° C. through the night is recommended.

[0179] After the cultivation, cells are recovered from the culture medium by centrifugation. The resulting cell pellet is washed with a washing solution. Example of the washing solution is buffer A (50 mM sodium phosphate, 25 mM EDTA and 1% (v/v) β-mercaptoethanol; pH 7.5), etc. Preparation of the genomic DNA from the washed cells may be carried out according to a common preparation method of genomic DNA where cell walls are lysed using Zymolyase and SDS; protein, etc. are removed using a phenol and phenol/chloroform solution; and genomic DNA is precipitated using ethanol or the like. To be more specific, the following method may be exemplified.

[0180] Cultivated cells are washed and resuspended in buffer A, then about 5 to 10 mg of Zymolyase 100T (Seikagaku Kogyo) are added and the mixture is gently shaken at about 25 to 40° C. for about 30 minutes to 2 hours. After the shaking, buffer containing SDS such as buffer B (0.2 M Tris-HCl, 80 mM EDTA and 1% SDS; pH 9.5) is added thereto and the mixture is allowed to stand at about 60 to 70° C. for about 30 minutes to lyse the cells. After that, the cell lysate is cooled on ice, mixed with 5 M potassium acetate and allowed to stand on ice for about 60 minutes further. The resulting solution is centrifuged (for example, at 5,000 g for 10 minutes at 15° C.) to take supernatant. The same volume of ethanol is added to the supernatant to precipitate DNA and the mixture is immediately centrifuged (for example, at 5,000 g for 10 minutes at 15° C.) to obtain DNA. The resulting precipitate is washed with 70% (v/v) ethanol, subjected to natural drying and dissolved in a solution such as TE buffer (10 mM Tris-HCl and 1 mM EDTA; pH 8.0) to give a crude genomic DNA solution. Cesium chloride and bisbenzimide are added to and dissolved in the crude genomic DNA solution, the mixed solution is subjected to an ultracentrifugal separation (for example, at 100,000 g for 17 hours at 25° C.), irradiation with UV light is conducted so that the DNA bands are visualized and the lower band is recovered. Bisbenzimide is removed by extracting the recovered DNA solution with isopropanol which is saturated with cesium chloride solution, then 4-fold by volume of 0.3 M sodium acetate are added to the recovered aqueous layer followed by mixing and the DNA is precipitated by ethanol and recovered by centrifugation. The recovered DNA is treated with RNase and extracted with phenol/chloroform and DNA is purified from the recovered aqueous layer by precipitation with ethanol again. The precipitate recovered by centrifugation is washed with 70% (v/v) ethanol, subjected to natural drying and dissolved in a TE buffer to prepare the genomic DNA solution.

[0181] (b) Preparation of a Shotgun Library

[0182] As to a method for the preparation of a genomic DNA library using the genomic DNA of yeast prepared in the above (a), a method mentioned in “Molecular Cloning, A, Laboratory Manual, Third Edition-(2001)” (hereinafter, abbreviated as “Molecular Cloning, Third Edition”) may be used and, with regard to a method for the preparation of a shotgun library which is particularly suitable for the determination of the whole genome sequence, the following method may be exemplified.

[0183] A TE buffer is added to the genomic DNA prepared in (a) and the genomic DNA is fragmented using Hydroshear (manufactured by GeneMachines) or the like. Terminal of the genome fragment is blunted using a DNA Blunting Kit (manufactured by Takara Shuzo) or the like, and fractionated by means of an agarose gel electrophoresis. Then, genome fragments of about 1.5 to 2.5 kb are excised from the gel and a buffer for the elution of DNA such as an MG-elution buffer (0.5 mol/L ammonium acetate, 10 mmol/L magnesium acetate, 1 mmol/L EDTA and 0.1% SDS) or the like is added to the gel followed by shaking at about 25 to 40° C. through the night to elute DNA. The DNA eluate is treated with phenol/chloroform and precipitated with ethanol to give a genomic library insert. All of the above-mentioned insert and an appropriate vector such as pUC 18 SmaI/BAP (manufactured by Amersham Biosciences) are subjected to ligation using T4 ligase (manufactured by Takara Shuzo) at about 10 to 20° C. for about 20 to 50 hours. The ligation reaction product is precipitated with ethanol and the resulting recombinant vector DNA is dissolved in an appropriate amount of TE buffer. By means of electroporation or the like, the recombinant vector DNA is transformed to Escherichia coli such as an Electro Cell DH5Q strain (manufactured by Takara Shuzo). It is recommended that the electroporation is carried out under the condition mentioned in the attached experimental manual.

[0184] The transformants into which recombinant vector containing the genomic DNA fragments is inserted are selected on an appropriate selective medium. For example, when pUC 18 SmaI/BAP is used as a vector, the transformants form white colonies on an LB plate medium (an LB medium (10 g/L of bactotryptone, 5 g/L of yeast extract and 10 g/L of sodium chloride; pH 7.0) which contains 1.6% of agar) containing about 0.01 to 0.1 mg/mL of ampicillin, about 0.1 mg/mL of X-gal and about 1 mmol/L of isopropyl-β-D-thiogalactopyranoside (IPTG) upon incubation through the night at about 30 to 37° C. and, therefore, the selection is easy. The transformants are cultured in LB medium containing about 0.1 mg/mL of ampicillin through the night at about 30 to 37° C. using a 384-well titer plate, a 50% aqueous solution of glycerol in the same volume as the LB is added thereto and the mixture is stirred to give a glycerol stock. Usually, the glycerol stock can be preserved at about −80° C.

[0185] (c) Preparation of a Cosmid Library

[0186] The genomic DNA prepared in (a) is subjected to a partial digestion using an appropriate restriction enzyme such as Sau3AI (manufactured by Takara Shuzo). It is possible to insert the DNA fragment digested by Sau3AI into a BamHI site of a cosmid vector such as Super CosI vector (manufactured by Stratagene). The treatment with the restriction enzyme and the ligation may be carried out according to the protocol attached thereto. The ligated product obtained by such a method is subjected to a packaging using, for example, Gigapack III Gold (manufactured by Stratagene), and according to the manual for the experimental procedure attached thereto, it is introduced into Escherichia coli such as an XL1-Blue MR strain (manufactured by Stratagene). That is spread on an LB plate medium containing ampicillin and incubated through the night at about 30 to 37° C. to get transformants. The resultant transformants are cultured in LB medium containing about 0.1 mg/mL of ampicillin through the night at about 30 to 37° C. using a 96-well titer plate, a 50% aqueous solution of glycerol in the same volume as the LB is added thereto and the mixture is stirred to give a glycerol stock. Usually, the glycerol stock can be preserved at about −80° C.

[0187] (d) Preparation of DNA Fragment for Determination of DNA Sequence

[0188] The whole genome sequence of industrial yeast can be determined mainly using the whole genome shotgun method. The DNA fragment of which DNA sequence is determined can be prepared by a PCR using the shotgun library prepared in the above (b). To be specific, clone of the genome shotgun library is inoculated using a replicator (manufactured by Gene Solution) to a 384-well titer plate where about 50 μl each of an ampicillin-containing LB medium is placed to each well and cultured without shaking through the night at about 30 to 37° C. The culture is transferred using a replicator (manufactured by Gene Solution) or the like to a 384-well reaction plate (manufactured by AB Gene) where about 10 μl each of a reaction solution for PCR (TaKaRa Ex Taq manufactured by Takara Shuzo) is placed, and PCR is carried out according to a protocol by Makino, et al. (DNA Research, volume 5, pages 1 to 9 (1998)) or the like using a GeneAmp PCR System 9700 (manufactured by Applied Biosystems) or the like, whereupon amplification of the inserted fragment is carried out.

[0189] Excessive primer and nucleotide are removed using a kit for the purification of PCR products (manufactured by Amersham Bioscience), etc. and a sequence reaction is carried out using the sample as a template.

[0190] Determination of the genome sequence can also be performed by preparing and using a cosmid library. Cosmid DNA from the cosmid library of (c) can be prepared by the following method. That is, clone derived from cosmid library is inoculated to each well of a 96-well plate where about 1.0 mL each of an ampicillin-containing appropriate medium such as a 2×YT medium (1.6% bactotryptone, 1% yeast extract and 0.5% sodium chloride; pH 7.0) is placed and cultured with shaking through-the night at about 30 to 37° C. Cosmid DNA from the said culture can be prepared using KURABO PI-1100 AUTOMATIC DNA ISOLATION SYSTEM (manufactured by KURABO) according to a manual of KURABO or the like, and they can be used as templates for sequencing reaction.

[0191] (e) Sequencing Reaction

[0192] A Sequencing reaction can be carried out using a commercially available sequence kit, etc. Preferred examples of the present invention are shown below.

[0193] A sequence reaction mixture can be prepared as follows. The PCR product or cosmid DNA prepared in the above (d) is mixed with about 2 μl of DYEnamic ET Terminator Sequencing Kit (manufactured by Amersham Bioscience) and appropriate primers to give about 8 μl of reaction mixture. An M13 forward (M13-21) primer and an M13 reverse (M13RV) primer (manufactured by Takara Bio), etc. are used for the sequence reaction of a PCR product derived from shotgun DNA, while a forward primer such as SS-cos F.1 (SEQ ID NO: 7) and a reverse primer such as SS-cos R.1 (SEQ ID NO: 8), etc. are used for cosmid DNA. Amounts of the primer and the DNA fragment are about 1 to 4 pmole and about 50 to 200 ng, respectively.

[0194] A dye terminator sequence reaction of about 50 to 70 cycles can be carried out using the reaction solution and GeneAmp PCR System 9700 (manufactured by Applied Biosciences). When a commercially available kit such as DYEnamic ET Terminator Sequencing Kit is used, a cycle parameter follows a manual attached thereto. Purification of the sample is carried out according to the manual of Millipore using MultiScreen HV plate (manufactured by Millipore), etc. The purified reaction product is precipitated with ethanol and the resulting precipitate is dried and stored in a dark place of about 4° C. The dried product is analyzed using commercially available sequencer and analyzer such as MegaBACE 1000 Sequencing System (manufactured by Amersham Bioscience) and ABI PRISM 3700 DNA Analyzer (manufactured by Applied Biosystems), etc. according to the manuals attached thereto.

[0195] (f) Reconstruction of Genome Sequence by Means of Assembly (A Process whereby the Order of Multiple Sequenced DNA Fragments is Determined)

[0196] Reconstruction of genomic DNA may be carried out from sequence information of DNA fragments obtained in the above (e). All operations of the reconstruction of genomic DNA sequence can be carried out on an UNIX® platform. Base call can be conducted by a software such as phred (The University of Washington) or the like, masking of vector sequence can be carried out by a software such as Cross Match (The University of Washington) or the like and assembly can be carried out by a software such as Phrap (The University of Washington) or the like. Contig obtained as a result of assembly can be analyzed using a graphical editor such as consed, a graphical editor (The University of Washington) or the like. A series of works from base call to assembly can be carried out en bloc utilizing phredPhrap, a script attached to the consed.

[0197] (B) Comparison of the Whole Genome Sequence of the Industrial Yeast with that of S. cerevisiae

[0198] Optionally, comparison of the whole genome sequence obtained in (A) with that of S. cerevisiae can be carried our by any known means for comparing two sequences. It may include (g) Preparation of a comparative database compiling the comparison data of each of DNA sequences of both ends of cosmid and shotgun clone and contig with S. cerevisiae genome sequence, and mapping of them on S. cerevisiae genome sequence.

[0199] (g) Preparation of a Comparative Database Compiling the Comparison Data of Each of DNA Sequences of Both Ends of Cosmid and Shotgun Clone and a DNA Sequence of Contig with Genomic DNA Sequence of S. cerevisiae, and Mapping of them on S. cerevisiae Genome Sequence.

[0200] Widely used industrial yeast such as bottom fermenting yeast (S. pastorianus) has been regarded as a natural hybrid of S. cerevisiae and its closely related species (such as S. bayanus) “Int. J. Syst. Bacteriol. volume 35, pages 508-511 (1985)”. In view of the above, DNA sequences of the both ends of cosmid clone prepared in (e) are subjected to a homology searching against S. cerevisiae genome sequence by a homology searching algorithm, whereupon the homologous region and the identity of each DNA sequence to S. cerevisiae genome sequence can be determined, thus database can be prepared.

[0201] The S. cerevisiae genome sequences are accessible from public available data bank, such as, Saccharomyces Genome Database (SGD: http://genome-www.stanford.edu/Saccharomyces/).The percent identity of two amino acid or two nucleic acid sequences can be determined by visual inspection and mathematical calculation, or more preferably, the comparison is done by comparing sequence information using a computer program. An exemplary, preferred computer program is the Genetics Computer Group (GCG; Madison, Wis.) Wisconsin package version 10.0 program, ‘GAP’ (Devereux et al., 1984, Nucl. Acids Res. 12: 387). The preferred default parameters for the ‘GAP’ program includes: (1) The GCG implementation of a unary comparison matrix (containing a value of 1 for identities and 0 for non-identities) for nucleotides, and the weighted amino acid comparison matrix of Gribskov and Burgess, Nucl. Acids Res. 14:6745, 1986, as described by Schwartz and Dayhoff, eds., Atlas of Polypeptide Sequence and Structure, National Biomedical Research Foundation, pp. 353-358, 1979; or other comparable comparison matrices; (2) a penalty of 30 for each gap and an additional penalty of 1 for each symbol in each gap for amino acid sequences, or penalty of 50 for each gap and an additional penalty of 3 for each symbol in each gap for nucleotide sequences; (3) no penalty for end gaps; and (4) no maximum penalty for long gaps. Other programs used by those skilled in the art of sequence comparison can also be used, such as, for example, the BLASTN program version 2.0.9, available for use via the National Library of Medicine website ncbi.nlm.nih.gov/gorf/wblast2.cgi, or the WU-BLAST 2.0 algorithm. Standard default parameter settings for WU-BLAST 2.0 are described at the following Internet site: sapiens.wust1.edu/blast/blast/#Features. In addition, the BLAST algorithm uses the BLOSUM62 amino acid scoring matix, and optional parameters that can be used are as follows: (A) inclusion of a filter to mask segments of the query sequence that have low compositional complexity (as determined by the SEG program of Wootton and Federhen (Computers and Chemistry, 1993); also see Wootton and Federhen, 1996, Analysis of compositionally biased regions in sequence databases, Methods Enzymol. 266: 554-71) or segments consisting of short-periodicity internal repeats (as determined by the XNU program of Claverie and States (Computers and Chemistry, 1993)), and (B) a statistical significance threshold for reporting matches against database'sequences, or E-score (the expected probability of matches being found merely by chance, according to the stochastic model of Karlin and Altschul (1990); if the statistical significance ascribed to a match is greater than this E-score threshold, the match will not be reported.); preferred E-score threshold values are 0.5, or in order of increasing preference, 0.25, 0.1, 0.05, 0.01, 0.001, 0.0001, 1e-5, 1e-10, 1e-15, 1e-20, 1e-25, 1e-30, 1e-40, 1e-50, 1e-75, or 1e-100.

[0202] An example of identity percentages distribution graph of cosmid DNA sequence corresponding to S. cerevisiae genomic DNA sequence is shown in FIG. 2. The DNA sequence of cosmid is roughly classified into a DNA sequence group showing more than 94% identity to S. cerevisiae genome sequence and a DNA sequence group showing around 84% identity thereto. Accordingly, a DNA sequence having identity of more than 94% to the nucleotide sequence of the gene of Saccharomyces cerevisiae is named an Sc-type DNA sequence derived from S. cerevisiae. While a DNA sequence having 94% or less identity, more preferably, 60 to 94% identity, most preferably around 84% identity to the nucleotide sequence of the gene of Saccharomyces cerevisiae is named a non-Sc-type DNA sequence derived from a closely-related species of S. cerevisiae. A gene with the Sc type DNA sequence or the non-Sc type DNA sequence is named Sc type gene or non-Sc type gene, respectively.

[0203] Similarly, a comparative database of the DNA sequence of both ends of shotgun clone prepared in (e) with genomic DNA sequence of S. cerevisiae is prepared. On the basis of the information obtained from the prepared comparative database, a mapping of cosmid clone and shotgun clone on S. cerevisiae genome sequence is carried out (refer, for example, to FIG. 3). A comparative database of the DNA sequence of the contig prepared in (f) with S. cerevisiae genome sequence is also prepared and mapping is carried out. Although the mapping technique is nearly the same as that mentioned above, when contigs linked by paired forward-reverse DNA sequence from the same cosmid and shotgun clone, those contigs are linked (refer, for example, to FIG. 4).

[0204] (C)

[0205] (C-1) Selection of a gene of the industrial yeast encoding an amino acid sequence having 70 to 97% identity to an amino acid sequence encoded by the gene of Saccharomyces cerevisiae, and

[0206] (C-2) selection of-a gene of the industrial yeast consisting of a nucleotide sequence having 60 to 94% identity to the nucleotide sequence of the gene of Saccharomyces cerevisiae.

[0207] A stage for the selection of the gene of bottom fermenting yeast encoding an amino acid sequence having 70 to 97% identity to an amino acid sequence encoded by the gene of S. cerevisiae may include (h) a process of identification of ORF (open reading frame) and assignment of function.

[0208] (h) Identification of ORF and Assignment of its Function

[0209] Identification of ORF in the DNA sequence assembled in (f) is carried out. Preferred examples are specifically mentioned below. With regard to a certain length DNA sequence (such as not less than 150 base) embraced by initiation codon and termination codon, there can be carried out identification of ORF existing in a DNA sequence assembled in (f) using a program, such as ORF finder (http://www.ncbi.nih.gov/gorf/gorf.html) or the like for the identification of ORF for six kinds of reading frames including complementary sequence.

[0210] Assignment of function of protein encoded by the identified ORF can be carried out using a homology searching such as BLAST (http://www.ncbi.nlm.nih.gov/BLAST/) or the like to an amino acid sequence of ORF of S. cerevisiae that has been registered and published in the Saccharomyces Genome Database (SGD: http://genome-www.stanford.edu/Saccharomyces/). If necessary, it is possible to analyze the chromosomal structure of an industrial yeast by DNA array-based comparative genomic hybridization and PCR. In the Example 8 in the present specification, the choromosome structure of the S. pastorianus strain 34/70 was analyzed by using a DNA array containing the DNA probes of known S. cerevisiae nucleotide sequences.

[0211] Yeast genomic DNA is prepared using a Quiagen Genomic Tip 100/G (#10243) and Qiagen Genomic DNA Buffer Set (#19060) according to the manual attached to the kit. The DNA (e.g., 10 μg) is digested with DNase I (manufactured by Invitrogen) according to a method of Winzeler, et al. (Science, volume 281, pages 1194-1197 (1998)), biotinylated using a terminal transferase (manufactured by Roche) and hybridized to a DNA array (Affymetrix Gene Chip Yeast Genome S98 Array). The DNA array contains the DNA probes of known S. cerevisiae nucleotide sequences. Hybridization and detection of the signal intensity of DNA array are carried out using a Gene Chip Analysis Basic System and analysis soft ware (Microarray Suite 5.0) manufactured by Affymetrix.

[0212] The signal of each probe hybridized with the DNA of brewing yeast is normalized to that of the haploid laboratory yeast strain S288C using an analysis soft ware (Microarray Suite 5.0) and shown as signal log ratio (2ⁿ). Signal log ratios were lined following genes order in each chromosome using a spreadsheet program (Microsoft Excel 2000) and the signal log ratios are shown in bar graphs (refer, for example, to FIG. 5). The non-Sc type genes do not hybridize to the S. cerevisiae array, therefore, the Sc type gene dosage affect the signal log ratio and the points where the signal log ratios show vigorous changes are considered to be translocation sites between Sc type and non-Sc type chromosome.

[0213] The chimera chromosome structure can be confirmed by PCR, wherein a genomic DNA derived from brewing yeast is used as a template and Sc type and non-Sc type shotgun sequences are used as primers.

[0214] PCR may be carried out using a Takara PCR Thermal Cycler SP according to the attached manual using a Takara LA Taq™ and a buffer attached thereto.

[0215] As a result of the PCR, it is confirmed by 0.8% agarose electrophoresis, for example, that a certain length of DNA fragment is amplified from the brewing yeast. When a genomic DNA of S. cerevisiae which is a laboratory strain is used as a template for the PCR, no amplification of DNA fragment is detected. If DNA sequences of the both ends of the DNA fragment amplified from the brewing yeast are further confirmed, it is consistent with the genome sequences determined by a shotgun method and it can be confirmed that, within such region, translocation between Sc type and non-Sc type chromosome takes place, whereupon a chimera chromosome is formed.

[0216] Alternatively, a gene of the industrial yeast consisting of a nucleotide sequence having 60 to 94% identity to the nucleotide sequence of the gene of Saccharomyces cerevisiae can be selected. Identity of 60 to 94% in nucleotide sequence level corresponds approximately 70 to 97% in amino acid sequence level. Some nucleotide sequences in non-Sc type chromosome other than open reading frames may have identity of less than 60% to the corresponding nucleotide sequences of Sc type chromosome.

[0217] (D) Functional Analysis of the Selected Genes

[0218] Further, selected genes may optionally be subjected to functional analysis. For example, the stage of functional analysis of gene may include (i) selection of the gene, (i′) cloning of the gene, (j) functional analysis of the gene by disruption or (k) functional analysis of the gene by overexpression.

[0219] (i) Selecting of the Gene

[0220] There is no particular limitation for the methods used for the selection of gene(s) for functional analysis. While preferred methods are, for example, a method using the assignment of the function obtained in the above (h) and a method using a DNA array as described below.

[0221] One of the purposes of the present invention is to identify genes from industrial yeasts participating in increase in productivity and/or improvement in flavor in the production of an alcohol or an alcoholic beverage. The whole genome sequence of Saccharomyces cerevisiae has been identified, and function of each gene of the of Saccharomyces cerevisiae has already been identified. As mentioned above for the step (h), functions of proteins encoded by the non-Sc type genes can be assigned by a homology searching. As for target genes for functional analysis, non-Sc type genes which are expected from the assignment to have an useful activity, e.g., participating in increase in productivity and/or improvement in flavor in the production of an alcohol or an alcoholic beverage.

[0222] For example, the SSU1 gene and the MET14 gene are known to have the sulfite transporting activity, and the adenylsulfate kinase activity, respectively. Both genes are known to play an important role for stabilizing flavor of beer. Other genes from the Sc gene which are known to play some role in a step for producing beer are listed in Table 2 in the following Example 7. These genes, however, do not exert sufficient activity enough for producing tasty beer. Therefore, without any limitation, for the purpose of identifying genes from industrial yeasts participating in increase in productivity and/or improvement in flavor in the production of an alcohol or an alcoholic beverage, non-Sc genes corresponding to these Sc type genes can be selected.

[0223] Alternatively, the method using DNA array is, for example, gene expression analysis to identify genes, which show characteristic expression profile under some conditions, or comparative genomic hybridization to identify genes, which have different copy numbers or different DNA sequences, by detecting deference of signal intensities of probes.

[0224] (i′) Cloning of the Gene

[0225] Genes selected in the above (i) can be obtained from the bottom fermenting yeast according to a common method mentioned, for example, in Molecular Cloning, Third Edition. That is, oligonucleotides having sequences adjacent to the gene are synthesized and a common PCR cloning method is carried out using a genomic DNA prepared from a bottom fermenting yeast as a template, whereupon the selected gene can be isolated and obtained. With regard to DNA sequences obtained as such, for example, SEQ ID NO: 1 may be listed.

[0226] When the gene is named, for example, a gene (1), the gene (1) or primer for amplifying the gene (1) by a PCR method may be also synthesized using a polynucleotide synthesizer on the basis of the above-mentioned sequence information.

[0227] In addition, gene (1) means not only a DNA fragment having the same DNA sequence as gene (1) but also a DNA fragment hybridizing to the above gene under stringent condition as is defined in the present specification.

[0228] The DNA fragment which hybridizes under stringent condition means a DNA fragment which is obtained by a colony hybridization method, a plaque hybridization method, a southern blot hybridization method or the like, using the DNA fragment containing the sequence of the gene (1) identified in the above as a probe.

[0229] The term “under stringent condition” means that two nucleic acid fragments can hybridize under a moderately stringent condition or a highly stringent condition. An artisan can easily choose an appropriate moderately or highly stringent condition.

[0230] The basic parameters affecting the choice of hybridization conditions and guidance for devising suitable conditions are set forth by Sambrook, Fritsch, and Maniatis (2001, Molecular Cloning: A Laboratory Manual, third edition, Cold Spring Harbor Laboratory Press, Cold Spring Harbor, N.Y., chapters 6 and 7; and Current Protocols in Molecular Biology, 1995, Ausubel et al., eds., John Wiley & Sons, Inc., sections 2.10 and 6.3-6.4), and can be readily determined by those having ordinary skill in the art based on, for example, the length and/or base composition of the DNA.

[0231] One way of achieving moderately stringent conditions involves the use of a prewashing solution containing 5×SSC, 0.5% SDS, 1.0 mM EDTA (pH 8.0), hybridization buffer of about 50% formamide, 6×SSC, and a hybridization temperature of about 40-55° C. (or other similar hybridization solutions, such as one containing about 50% formamide, with a hybridization temperature of about 42° C.), and washing conditions of about 60° C., in 0.5×SSC, 0.1% SDS. Preferably, a moderately stringent condition may include hybridization at about 50° C. and 2×SSC.

[0232] Highly stringent conditions can also be appropriately selected based on factors like length of DNAs to be hybridized. Generally, such conditions include hybridization and/or washing at higher temperature and/or lower salt concentration (such as hybridization at about 65° C., 6×SCC-0.2×SSC, preferably, 6×SCC, more preferably 2×SSC, most preferably, 0.2×SSC), compared to the moderately stringent condition. For example, highly stringent conditions may include hybridization as defined above, and washing at approximately 68° C., 0.2×SSC, 0.1% SDS. SSPE (1×SSPE is 0.15M NaCl, 10 mM NaH.sub.2 PO.sub.4, and 1.25 mM EDTA, pH 7.4) can be substituted for SSC (1×SSC is 0.15M NaCl and 15 mM sodium citrate) in the hybridization and wash buffers; washes are performed for 15 minutes after hybridization is complete.

[0233] It should be understood that the wash temperature and wash salt concentration can be adjusted as necessary to achieve a desired degree of stringency by applying the basic principles that govern hybridization reactions and duplex stability, as known to those skilled in the art and described further below (see, e.g., Sambrook et al., 2001). When hybridizing a nucleic acid to a target nucleic acid of unknown sequence, the hybrid length is assumed to be that of the hybridizing nucleic acid. When nucleic acids of known sequence are hybridized, the hybrid length can be determined by aligning the sequences of the nucleic acids and identifying the region or regions of optimal sequence complementarity.

[0234] The hybridization temperature for hybrids anticipated to be less than 50 base pairs in length should be 5 to 25° C., preferably 5 to 10° C. less than the melting temperature (Tm) of the hybrid, where Tm is determined according to the following equations. For hybrids less than 18 base pairs in length, Tm (° C.)=2(number of A+T bases)+4(number of G+C bases). For hybrids above 18 base pairs in length, Tm (° C.)=81.5+16.6(log₁₀ [Na⁺])+0.41(% G+C)−0.63(% formamide−(500/N), where N is the number of bases in the hybrid, and [Na⁺] is the concentration of sodium ions in the hybridization buffer ([Na⁺] for 1×SSC=0.165M) Preferably, each such hybridizing nucleic acid has a length that is at least 15 nucleotides (or more preferably at least 18 nucleotides, or at least 20 nucleotides, or at least 25 nucleotides, or at least 30 nucleotides, or at least 40 nucleotides, or most preferably at least 50 nucleotides), or at least 25% (more preferably at least 50%, or at least 60%, or at least 70%, and most preferably at least 80%) of the length of the nucleic acid of the present invention to which it hybridizes, and has at least 60% sequence identity (more preferably at least 70%, at least 75%, at least 80%, at least 85%, at least 90%, at least 95%, at least 97.5%, or at least 99%, and most preferably at least 99.5%) with the nucleic acid of the present invention to which it hybridizes, where sequence identity is determined by comparing the sequences of the hybridizing nucleic acids when aligned so as to maximize overlap and identity while minimizing sequence gaps as described in more detail above.

[0235] The hybridization may be carried out according to a method mentioned in “Molecular Cloning, Third Edition”, “Current Protocols in Molecular Biology, John Wiley & Sons (1987-1997) (hereinafter, abbreviated as Current Protocols in Molecular Biology), “DNA Cloning 1: Core Techniques, A Practical Approach, Second Edition, Oxford University (1995)”, and the like.

[0236] To be more specific, shotgun clone containing full-length of the above-mentioned gene (1) can be retrieved using the comparative database obtained in (g) and, on the basis of homology and positional information, etc. When there is no clone containing full-length of the gene in the shotgun library, a DNA fragment encoding the full length of the gene is prepared by a PCR method. For example, a DNA fragment containing the above-mentioned gene is obtained using synthetic DNA primer pair represented by SEQ ID NO: 13 and SEQ ID NO: 14, etc. Similarly, PCR is carried out using a primer pair designed on the basis of the published information of SGD and using genomic DNA of S. cerevisiae or bottom fermenting yeast as a template, whereupon the full length of the Sc type gene corresponding to the non-Sc type gene is prepared. For example, using synthetic oligonucleotides of SEQ ID NO: 15 and NO: 16 as the primer pair, the DNA fragment containing the Sc type gene can be obtained.

[0237] Sc or non-Sc type DNA fragment prepared as mentioned above is inserted into, for example, pCR 2.1-TOPO vector attached to a TA cloning kit (Invitrogen) using a TA cloning kit or the like, whereupon a recombinant vector TOPO/Sc gene and TOPO/non-Sc gene containing the DNA fragment having the Sc and the non-Sc type gene, respectively, are able to be prepared. DNA sequences of the Sc and non-Sc type DNA fragments can be comfirmed by a Sanger's method “F. Sanger, Science, volume 214, page 1215, 1981”.

[0238] (j) Functional Analysis of the Gene by Disruption

[0239] Functional analysis of the selected non-Sc gene may be performed by disruption of the gene, for example. Functional analysis by disruption of the gene can be done by any known conventional methods. In the present specification, “method for disruption of a gene” includes any methods which stop, block, inhibit or suppress at least part of function of the gene, including deletion of the gene, blocking of the gene by antisense nucleic acid, RNAi method or the like. As an example, we will explain disruption of the non-Sc SSU1 gene, which has been identified by the present invention.

[0240] According to a method of the document “Goldstein, et al., Yeast, volume 15, page 1541, (1999)”, it is possible to prepare a DNA fragment for gene disruption by PCR where a plasmid containing a drug-resistance gene (such as pFA 6a (G418^{r}), pAG 25 (nat1)) is used as a template. As a primer pair for the PCR, non-ScSSU1_for (SEQ ID NO: 17)/non-ScSSU1_rv (SEQ ID NO: 18) or the like may be used for the non-ScSSU1 disruption. While for the Sc SSU1 disruprion, ScSSU1_for (SEQ ID NO: 19)/ScSSU1_rv (SEQ ID NO: 20) or the like may be used. For the non-Sc type gene disruption, it is also possible to use a plasmid such as pPGAPAUR (AUR1-C) and a primer pair such as non-ScSSU1_for+PGAPAUR (SEQ ID NO: 21)/non-ScSSU1_rv+AURI-C (SEQ ID NO: 22).

[0241] An industrial yeast is transformed with the DNA fragment for the gene disruption prepared by the above-mentioned method. The transformation may follow a method mentioned in the Japanese Patent Laid-Open Gazette No. 07/303,475, for example. Further, the concentration of the drug for the selection of transformants may be appropriately determined by investigating the sensitivity of the yeast used as a host.

[0242] With regard to the transformant prepared here, it is comfirmed that each of the drug-resistance genes is introduced and the said gene is disrupted correctly using a Southern analysis. To be specific, the genomic DNA extracted from the parental strain and the transformant are firstly digested by an appropriate restriction enzyme to distinguish Sc and non-Sc type gene (for example, at 37° C. for 18 hours), then fractionated with 1.5% agarose gel electrophoresis and transferred to a membrane. After that, they are hybridized to a probe specific to an Sc-type or a non-Sc type gene for example at 55° C. for 18 hours according to a protocol of Alkphos Direct Labelling Reagents (Amersham) and a signal is detected by CDP-Star.

[0243] The function of the gene obtained in (i′) can be studied by fermentation test using a parental strain and non-Sc SSU1 disruptants prepared in the above (j) and comparison of their fermentation character. Fermentation test can be carried out, for example, using wort under the following condition.

[0244] Original extract: about 10 to 15%

[0245] Fermentation scale: 1 to 3 liters

[0246] Dissolved oxygen concentration: about 8 to 10 ppm

[0247] Fermentation temperature: about 15° C.

[0248] Pitching rate: about 4 to 6 g of wet yeast cells/L

[0249] Wort is periodically sampled and monitored in cell growth (OD 600), apparent extract, the concentration of the substance participating in the function of the gene obtained in (i′), etc. is analyzed.

[0250] For example, when the function of the gene obtained in (i′) participates in discharge of sulfite, the sulfite concentration in the wort during the fermentation is analyzed. Quantitative analysis of sulfite is carried out in such a manner that sulfite is captured in a hydrogen peroxide solution by means of distillation under an acidic condition and subjected to titration with an alkali (Revised Method for BCOJ Beer Analysis by the Brewing Society of Japan).

[0251] As candidates for useful genes participating in increase in productivity and/or improvement in flavor in the production of an alcohol or an alcoholic beverage, we may select genes wherein cell growth, apparent extract, and/or the concentration of the substance participating in the function of the gene were substantially changed by disruption of the gene. Especially, change in the concentration of the substance participating in the function of the gene is important and should be monitored.

[0252] The “substance participating in the function of the gene” includes, without any limitation, sulfite, ethanol, ester and fusel alcohol or the like. Substances, which are considered to have a negative effect on production of tasty beer, can also be a target of analysis, including diacetyl and phenolic compounds or the like.

[0253] (k) Functional Analysis of the Gene by Overexpression

[0254] Alternatively, functional analysis of a gene can be achieved by overexpression of the gene.

[0255] A DNA fragment containing the full-length of the non-Sc type gene is excised by an appropriate restriction enzyme from the plasmid TOPO/non-Sc gene prepared in (i′). The DNA fragment is inserted into a cloning site of a vector for gene expression such as pNI-NUT to construct a vector (pYI-non-Sc type gene) for overexpression of the non-Sc type gene. The vector pNI-NUT contains URA3 as a homologous recombination site and nourseothricin-resistance gene (nat1) and ampicillin-resistance gene (Amp^{r}) as selective markers. On the other hand, a vector for overexpression of the Sc type gene (pNI-Sc type gene) has a structure where the above-mentioned pYI-non-Sc type gene is substituted by the corresponding Sc type gene. For overexpression of the Sc or non-Sc type gene introduced here, it is preferred to be driven by promoter and terminator of constitutively expressing gene, for example, glyceraldehyde-3-phosphate dehydrogenase gene (TDH3).

[0256] An industrial yeast is transformed using the overexpression vector, which is prepared by the above-mentioned method. The transformation is carried out by the method mentioned in the Japanese Patent Laid-Open Gazette No. 07/303,475 and transformants are selected on an appropriate selective medium. Confirmation of the overexpression may be carried out by RT-PCR method, etc. Extraction of the total RNA may be carried out using an RNeasy Mini Kit (Qiagen) or the like, according to the manual of “for total RNA isolation from yeast” attached to the kit. Regarding the SSu1 gene, for example, it is possible to use ScSSU1_for331 (SEQ ID NO: 23)/ScSSU1_{—}982rv (SEQ ID NO: 24) and nonSc-SSU1_for329 (SEQ ID NO: 25)/nonSc-SSU1_{—}981rv (SEQ ID NO: 26) as specific primerpairs for the amplification of Sc and non-ScSSU1 gene, respectively.

[0257] To amplify the constitutively expressed gene, for example PDA1, as an internal standard, PDA1_for1 (SEQ ID NO: 27)/PDA1_{—}730rv (SEQ ID NO: 28) etc. may be used as a specific primer pair. PCR product is fractionated with 1.2% agarose gel electrophoresis and detected with ethidium bromide staining. The overexpression of the said gene in the transformant is confirmed by comparison of quantity of the PCR products.

[0258] The functional analysis of the gene obtained in (i′) can be carried out by a fermentation test using the parental strain and the overexpressed strain prepared in the above (k). Fermentation test may be carried out under the condition mentioned in (j).

[0259] According to the same method mentioned in (j), the wort is periodically sampled and monitored in the cell growth (OD600), apparent extract and the concentration of the substance participating in the function of the gene obtained in (i′).

[0260] As candidates for useful genes participating in increase in productivity and/or improvement in flavor in the production of an alcohol or an alcoholic beverage, we may select genes wherein cell growth, apparent extract, and/or the concentration of the substance participating in the function of the gene were substantially changed by overexpression of the gene. Especially, change in the concentration of the substance participating in the function of the gene is important and should be monitored.

[0261] (E) Genes and the Gene Library

[0262] The present invention also provides genes obtained by the analyzing method of the present invention. The genes of the present invention include both nucleotides of ORF encoding proteins, as well as nucleotides from non-coding regions. Nucleotides from non-coding regions may include regulatory regions, such as promoter, enhancer, silencer, terminator or the like, which are important for regulation of expression of a gene.

[0263] Specifically, one embodiment of the present invention is a gene of the industrial yeast encoding an amino acid sequence having 70 to 97% identity to an amino acid sequence encoded by the gene of Saccharomyces cerevisiae, or consisting of a nucleotide sequence having 60 to 94% identity to the nucleotide sequence of the gene of Saccharomyces cerevisiae, which is obtained by the present analyzing method.

[0264] The present invention also provides a gene library comprising one or more of genes of the industrial yeast as described above.

[0265] Preferably, the gene of the industrial yeast is comprised in, consists of or has any nucleotide sequence selected from SEQ ID NOs:33 to 6236, SEQ ID Nos:166154 to 166181, SEQ ID Nos:166490 to 167042 and SEQ ID Nos:173125 to 174603.

[0266] SEQ ID NOs: 33-6236 represent 6204 DNA sequences of non-Sc type ORFs, which can be preferably used as probes of the microarry.

[0267] SEQ ID NOs: 166154-166181 represent 28 DNA sequences of mtochondrial ORFs from 34/70 strain, which can be preferably used as probes of the microarry.

[0268] SEQ ID NOs: 166490-167042 represent 553 DNA sequences which have not been identified as the above non-Sc ORFs but have significant similarity to the proteins of S. cerevisiae using NCBI-BlastX homology searching.

[0269] SEQ ID NOs: 173125-174603 represent 1479 DNA sequences ORFs which have not been identified as the above, but have significant similarity to the proteins of S. cerevisiae using NCBI-BlastP homology searching.

[0270] The genes of the present invention also include variants of the natural genes, which may include some modification in one or more nucleotide sequence(s) and/or amino acid sequence(s). The genes of the present invention will be described in detail in the section IV of the present specification.

### II. DNA Array

[0271] Embodiments of the Present DNA Array

[0272] The present invention also provides a DNA array which is useful for an analyzing method of genes. “Genes” which can be analyzed by using the DNA array of the present invention may include genomic DNA, cDNA or cRNA or the like of an industrial yeast. The present DNA array can also be applied to the ChIP (Chromatin Immuno-Precipitation)-chip method for analyzing binding between DNA and a protein.

[0273] The DNA array of the present invention comprises probe(s) of DNA(s) based on the nucleotide sequences of non-Sc genes which have been identified by the present invention. In the present specification, DNA oligonucleotide or cDNA which is fixed on a DNA array, is sometimes called “probe”.

[0274] Preferably, the DNA array of the present invention comprises one or more of DNAs, wherein each DNA is selected from at least one group of (1) to (4):

[0275] (1) DNA consisting of a nucleotide sequence of an open reading frame of the genome sequence of an industrial yeast which encodes an amino acid sequence having 70 to 97% identity to an amino acid sequence encoded by the gene of Saccharomyces cerevisiae, or a nucleotide sequence complementary to the above nucleotide sequence, or a nucleotide sequence of continuous 10 or more nucleotides selected from the above nucleotide sequences;

[0276] (2) DNA consisting of a nucleotide sequence of the genome sequence of an industrial yeast other than from open reading frames which consists of a nucleotide sequence having 60 to 94% identity to the nucleotide sequence of the gene of Saccharomyces cerevisiae, or a nucleotide sequence complementary to the above nucleotide sequence, or a nucleotide sequence of continuous 10 or more nucleotides selected from the above nucleotide sequences;

[0277] (3) DNA having a nucleotide sequence of any of SEQ ID Nos.166490 to 167042, or DNA having a nucleotide sequence of any of SEQ ID Nos.167043 to 173124; and

[0278] (4) DNA having a nucleotide sequence of any of SEQ ID Nos.173125 to 174603, or DNA having a nucleotide sequence of any of SEQ ID Nos.174604 to 190810. In a preferred embodiment of the present invention, the DNA array comprises DNAs wherein at least one DNA is selected from every group of (1) to (4).

[0279] In a preferred embodiments of the present invention, wherein the DNAs of (1) is comprised in, consists of or has any nucleotide sequence selected from SEQ ID NOs:33 to 6236 and SEQ ID NOs:166154 to 166181, and SEQ ID NOs:6237 to 75336 and SEQ ID NOs:166182 to 166489.

[0280] SEQ ID NOs: 33 to 6236 correspond to ORF encoding non-SC proteins of the present invention. These sequences can be fixed to the DNA array as cDNA probes. SEQ ID NOs:6237 to 75336 are short nucleotide sequences of about 25 continuous nucleotides selected from each of SEQ ID NOs:1 to 6236 SEQ ID Nos: 166182-166489 represent sequences of oligonucleotides based on DNA sequences of SEQ ID NOs: 166154 to 166181.

[0281] The ORF sequences from yeast in the present specification may include intron. Such intron sequences can be easily recognized for an artisan. The term “comprised in”, therefore, means that the nucleotide sequences of the DNA probes on the DNA array can include only exon sequences (without intron) which can be easily selected by referring to the ORF sequences disclosed in the present specification.

[0282] The term “have (has)” or “having” means that the nucleotide sequence of the present invention may include additional sequence which does not substantially affect the function of the DNA of the present invention. For example, DNAs encoding ORF may contain additional signal or tag sequence which can facilitate secretion and/or purification of the protein encoded by the ORF. Alternatively, oligonucleotides may contain additional one or several nucleotide sequences at its terminal which does not affect hybridization specificity of the oligonucleotides.

[0283] SEQ ID Nos. 167043-173124 represent sequences of oligonucleotides based on DNA sequences of SEQ ID NOs: 166490-167042 SEQ ID NOs: 174604-190810 represent sequences of oligonucleotides based on DNA sequences of SEQ ID NOs: 173125-174603. These sequence can be fixed to the DNA array as oligonucleotide probes.

[0284] Another embodiment of the DNA array of the present invention is that of further comprising, in addition to at least one group of DNAs selected from (1) to (4), DNAs of the following (5) and/or (6):

[0285] (5) DNA consisting of a nucleotide sequence of an open reading frame of the genome sequence of an industrial yeast which encodes an amino acid sequence having identity of more than 97% to an amino acid sequence encoded by the gene of Saccharomyces cerevisiae, or a nucleotide sequence complementary to the above nucleotide sequence, or a nucleotide sequence of continuous 10 or more nucleotides selected from the above nucleotide sequences; and

[0286] (6) DNA consisting of a nucleotide sequence of the genome sequence of an industrial yeast other than from open reading frames which consists of a nucleotide sequence having identity of more than 94% to the nucleotide sequence of the gene of Saccharomyces cerevisiae, or a nucleotide sequence complementary to the above nucleotide sequence, or a nucleotide sequence of continuous 10 or more nucleotides selected from the above nucleotide sequences.

[0287] DNAs of (5) correspond to ORF of Sc genes, and DNAs of (6) correspond to non-coding regions of Sc genes, respectively. The DNA array comprising to DNAs of (5) and/or (6) in addition to DNAs of any of (1) to (4), is useful for a method of classifying an industrial yeast, for example. In a preferred embodiment, the DNAs of (5) has a nucleotide sequence of any one of SEQ ID NOs: 75337 to 82784, or SEQ ID NOs: 82785 to 166153. SEQ ID NOs: 75337 to 82784 correspond to ORF encoding non-SC proteins of the present invention. SEQ ID NOs: 82785 to 166153 are short nucleotide sequences of about 25 continuous nucleotides selected from each of SEQ ID NOs: 33 to 6236.

[0288] In a preferred embodiment, the DNA array comprises DNAs selected from the group of (1) and/or (2), together DNAs selected from the group of (5) and/or (6). Hybridization intensity of a sample to a DNA probe of (1) is compared to the corresponding DNA probe of (5). Similarly, hybridization intensity of a sample to a DNA probe of (2) is compared to the corresponding DNA probe of (6).

[0289] Optionally, the present DNA array of this embodiment may further comprise DNAs of the following (5′) and/or (6′):

[0290] (5′) DNA consisting of a nucleotide sequence which contains mismatch of 1 or more base(s) to the DNA of (5), or a nucleotide sequence complementary to the above nucleotide sequence; and

[0291] (6′) DNA consisting of a nucleotide sequence which contains mismatch of 1 or more base(s) to the DNA of (6), or a nucleotide sequence complementary to the above nucleotide sequence.

[0292] As described above, DNAs of (5) correspond to ORF of Sc genes, and DNAs of (6) correspond to non-coding regions of Sc genes, respectively. DNAs of (5′) and (6′) contain mismatch of one or more base(s), preferably one base to (5) and (6), respectively. In general, a sample of DNAs shows a different hybridization intensity to a probe having mismatch of one or more base(s) in the DNA array hybridization assay. In a preferred embodiment, if a sample DNA hybridizes to a DNA probe of (5) (or (6)) and does not hybridize to the corresponding DNA probe of (5′) (or (6′)), it can be concluded that the sample DNA is positive as regards the DNA probe of (5) of Sc type gene. On the contrary, if a sample DNA hybridizes to a DNA probe of (5) (or (6)) but also hybridizes to the corresponding DNA probe of (5′) (or (6′)), it can be concluded that the sample DNA is negative or pseudopositive as regards the DNA probe of (5) of Sc type gene.

[0293] Accordingly, DNAs of (5′) and/or (6′) may be optionally used as DNA probes of the present DNA array for determining and confirming hybridization specificity of a sample to the DNAs of (5) and/or (6).

[0294] Still another aspect of the DNA array of the present invention is that of further comprising, in addition to at least one group of DNAs selected from (1) to (4), DNAs selected from at least one group of (7) to (10):

[0295] (7) DNA consisting of a nucleotide sequence which contains mismatch of 1 or more base(s) to the DNA of (1), or a nucleotide sequence complementary to the above nucleotide sequence;

[0296] (8) DNA consisting of a nucleotide sequence which contains mismatch of 1 or more base(s) to the DNA of (2), or a nucleotide sequence complementary to the above nucleotide sequence;

[0297] (9) DNA consisting of a nucleotide sequence which contains mismatch of 1 or more base(s) to the DNA of (3), or a nucleotide sequence complementary to the above nucleotide sequence; and

[0298] (10) DNA consisting of a nucleotide sequence which contains mismatch of 1 or more base(s) to the DNA of (4), or a nucleotide sequence complementary to the above nucleotide sequence.

[0299] In general, a sample of DNAs shows a different hybridization intensity to a probe having mismatch of one or more base(s) in the DNA array hybridization assay. This type of DNA array, therefore, is useful for a detecting nucleotide polymorphism in genome of an industrial yeast. It can also be useful for the method of screening a useful strain of industrial yeast or useful genes themselves.

[0300] In a preferred embodiment, the DNAs of (7) to (10) includes mismatch of only one base. That is, the DNAs of (7) and (10) are the following DNAs of (7-1) to (10-1), respectively.

[0301] (7-1) DNA consisting of a nucleotide sequence which contains mismatch of 1 base to the DNA of (1), or a nucleotide sequence complementary to the above nucleotide sequence;

[0302] (8-1) DNA consisting of a nucleotide sequence which contains mismatch of 1 base to the DNA of (2), or a nucleotide sequence complementary to the above nucleotide sequence;

[0303] (9-1) DNA consisting of a nucleotide sequence which contains mismatch of 1 base to the DNA of (3), or a nucleotide sequence complementary to the above nucleotide sequence; and

[0304] (10-1) DNA consisting of a nucleotide sequence which contains mismatch of 1 base to the DNA of (4), or a nucleotide sequence complementary to the above nucleotide sequence.

[0305] Preferably, mismatch of one base is at the center or near the center of each DNA.

[0306] One of the most preferred embodiments of the present DNA array comprises at least one group of DNAs selected from (1) to (4) (preferably (1)/and/or (2)), at least one group of DNAs selected from (7) to (10) (preferably (7) and/or (8)), DNAs of (5) and/or (6) and DNAs of (5′) and/or (6′). The DNA array of this embodiment if especially useful for the present method for classifying an industrial yeast, as well as a method for analyzing the chromosomal structure of an industrial yeast by DNA array-based comparative genomic hybridization as discussed in the present specification below. Preferably, at least one group of DNAs selected from (7) to (10), and DNAs of (5′) and/or (6′) has a mismatch of only one base.

[0307] Probes which are attached to the DNA arrays of the present invention can be cDNA probes or oligonucleotids. There is no limitation to the length of cDNA probes, but preferably, no longer than 1,000 bases. Oligonucleotide probes range form about 5 to about 50 nucleotides, preferably, 10-30 nucleotides.

[0308] Production of a DNA Array of this Invention

[0309] A DNA array of the present invention can be produced based on the DNA sequence information of the ORFs and/or non-coding regions (intergenic DNA sequence between two ORFs) obtained in the above (f). Examples include a DNA array comprising a solid-support to which at least one of a polynucleotide comprising the DNA sequence obtained above items (f).

[0310] DNA arrays of the present invention include substrates known in the art, such as a DNA microarray, a DNA chip, polynucleotide array and a DNA macroarray, or the like, and comprises a solid support and plural polynucleotides of fragments thereof which are adhered to the surface of the solid support. As the polynucleotides or oligonucleotides adhered to the solid support, the polynucleotides or oligonucleotides of the present invention obtained in the above items (f) and (h) can be used.

[0311] The analysis described below can be efficiently performed by adhering the polynucleotides or oligonucleotides to the solid support at a high density, though a high fixation density is not always necessary. Apparatus for achieving a high density, such as an arrayer robot or the like, is commercially available from Takara Shuzo (GMS417 Arrayer), and the commercially available product can be used. Also, the oligonucleotide of the present invention can be synthesized directly on the solid support by the photolithography method or the like (Nat. Genet. 21, 20-24 (1999)). In this method, a linker having a protective group which can be removed by light irradiation is first adhered to a solid support, such as slide glass or the like. Then, it is irradiated with light through a mask (a photolithograph mask) permeating light exclusively at a definite part of the adhesion part. Next, an oligonucleotide having a protective group which can be removed by light irradiation is added to the part. Thus, a ligation reaction with the nucleotide arises exclusively at the irradiated part.

[0312] By repeating this procedure, oligonucleotides, each having a desired sequence, different from each other can be synthesized in respective parts. Usually, the oligonucleotides to be synthesized have a length of 10 to 30 nucleotides.

[0313] Alternatively, cDNA probes which can be prepared by any known conventional methods based on the nucleotide sequences of mRNA obtained from the industrial yeast can be used. A cDNA probe is fixed to the DNA array after it has been prepared. Examples of general methods for preparing and fixing the cDNA probes to the DNA array are explained in “Science volume 270, pages 467-470 (1995)”, for example.

[0314] There is no particular limitation for the methods used for the production of DNA array and the method may be conducted according to the known means, while preferred method for each of them is mentioned below.

[0315] (1) Production of a DNA Array

[0316] (1)-1 Solid Support

[0317] Any materials which the polynucleotids or fragments can be adhere to the surface of can be used as the solid supports using the invention DNA array. There is no particular limitation for the material and shape used for the solid support, while preferred materials are some resinoids, such as polycarbonate, plastics or the like, as a material and a plate-like and film-like as a solid.

[0318] (1)-2 Selection of an Oligonucleotide

[0319] The example of oligonucleotides to be fixed on the plate of a DNA array of this invention are as follows. Based on the DNA sequences of ORFs obtained in the above (h) and/or intergenic DNA sequences deduced from the above (h), unique and perfect complementary probes (PM Probe; Perfect Match Probe) against whole genome sequence of brewing yeast can be designed using a certain method of probe production, such as GeneChip® (Affymetrix) technology or the like.

[0320] The oligonucleotide probes range form about 5 to about 50 nucleotides, preferably from about 5 to about 45 nucleotides, still more preferably from about 10 to about 40 nucleotides and most preferably from about 10 to 30 nucletides in length. Particularly preferred arrays contain probes ranging from about 20 to about 25 oligonucleotides in length. The array may comprise more than 10, preferably more than 50, more preferably more than 100, and most preferably more than 1000 oligonucleotide probes specific for each target gene (Where the array refers to the DNA array to be fixed the oligonucleitide probes using a certain method of probe production, such as GeneChip® (Affymetrix) technology or the like). In a preferred embodiment, the array comprises at least 10 different oligonucleotide probes for each gene. In another preferred embodiment, the array 20 or fewer oligonucleotides complementary each gene.

[0321] Widely used industrial yeast such as bottom fermenting yeast (S. pastorianus) has been regarded as a natural hybrid of S. cerevisiae and its closely related species (such as S. bayanus) as described above. So the bottom fermenting yeast has at least two different genes whose DNA sequences are similar to each other. Thereby, it is desirable to remove probes that hybridize to transcription products of more than one gene. One can then remove any probes that are similar to any other genes, and make the probe set a probe set for that genes using a certain method of probe production, such as GeneChip® (Affymetrix) technology or the like)

[0322] The array may further comprise mismatch control probes. Where such mismatch controls are present, the quantifying step may comprise calculating the difference in hybridization signal intensity between each of the oligonucleotide probes and its corresponding mismatch control probe. The quantifying may further comprise calculating the average difference in hybridization signal intensity between each of the oligonucleotide probes and its corresponding mismatch control probe for each gene. The term mismatch probe refer to probes whose sequence is deliberately selected not to be perfectly complementary complementary to a particular target sequences. For each mismatch (MM) control in a high-density array there typically exists a corresponding perfect match (PM) probe that is perfectly complementary to the same particular target sequences. The mismatch may comprise one or more bases, preferably one base.

[0323] While the mismatch(es) may be located anywhere in the mismatch probe, terminal mismatches are less desirable as a terminal mismatch is less likely to prevent hybridization of the target sequences. In a particularly preferred embodiment, the mismatch is located at or near the center of the probe so that the mismatch is most likely to destabilize the duplex with the target sequence under the optimal hybridization conditions. Preferably, the mismatch is adenine (A) to thymine (T) and vice versa, or guanine (G) to cytosine (c) and vice versa.

[0324] Nucleotides number of these oligonucleotides are not limited, but 10 to 30 nucleotides are preferable. 8-51 probes an each locus can be designed with focus on 3′ prime side of each locus as the use of sets of probes for each locus provided redundancy in the detection and analysis of the data, can mitigate the potentially confounding effects of occasional cross-hybridization, and can make it so all probes do not have to hybridize identity in order to obtain quantitative information. To further increase the sensitivity and specificity of detection, each PM probe can be designed with a closely related mismatch probe (MM probe) that is identical to PM probe with the exception of a mismatched base, i.e. base 13. The preferable length of oligonucleotide which is used in this invention is 25 base, but no particular limitation. for the length of oligonucleotide. Preferably, the mismatch is adenine (A) to thymine (T) and vice versa, or guanine (G) to cytosine (c) and vice versa.

[0325] (1)-3 Adhering Oligonucleotides to Solid Support

[0326] There is no particular limitation for the methods used for adhering oligonucleotides to solid support, and the method may be conducted according to the known means, while preferred method is mentioned below. For example, all of designed PM and MM probes as above ((1)-2) can be adhered to the surface of solid support to produce a DNA array using a certain method, such as GeneChip® technology or the like.

[0327] There is no particular limitation for the methods used for analysis using DNA maicroarray, while preferred methods for each of them is mentioned below, i.e., the example of gene expression analysis to identify genes, which show characteristic expression profile under some conditions, classification of industrial yeast, detection of nucleotide polymorphism and selection of genes for functional analysis are mentioned below.

### III. Analyzing Methods using the DNA Array

[0328] The arrays of the invention can be used for various methods for analyzing genomic DNA, cDNA or cRNA of an industrial yeast. The analyzing methods include, for example, 1) a method for determining expression of each gene of non-Sc type, 2) a method for classifying an industrial yeast, 3) a method for detecting nucleotide polymorphism in genome of an industrial yeast, 4) a method for screening a useful strain of industrial yeasts, and 5) a method for screening a gene of an industrial yeast.

[0329] (m) Gene Expression Analysis

[0330] Gene expression analysis of an industrial yeast can be carried out using the DNA array of the present invention produced according to the method described in (1). It is possible to identify the highly inducible or reducible gene(s) according to change of not only medium but also environment using the DNA array. It is also possible to identify the specific gene(s) for lager brewing yeast in brewing using the DNA array. But it is not limited for these examples.

[0331] Gene expression analysis includes culturing of a industrial yeast, preparation of mRNA, synthesis of labeled cRNA(or cDNA), hybridization, and data analysis. There is no particular limitation for the methods of Gene expression, while preferred methods for each of them is mentioned below.

[0332] (m)-1 Culturing a Industrial Yeast in a Various Condition

[0333] Industrial yeast can be cultivated under various conditions for any purpose. For example, the cultivation for identification of genes which respond to the change of composition of culture medium can be carried out as mentioned below. Industrial yeast can be grown overnight in a Zinc replete medium, such as LZMM medium+40 μM zinc sulfate at 30° C. with shaking. LZMM medium contains 0.17% yeast nitrogen base w/o amino acids (manufactured by DIFCO), 0.5% ammonium sulfate, 20 mM sodium citrate (pH 4.2), 125 μM MnCl2, 10 μM FeCl2, 2% maltose, 10 mM EDTA (pH 8.0), or the like. Cells are harvested and washed three times with sterile distilled water An adequate amount of cells, are inoculated to an optical density (OD600) of 0.25, or the like, in 1) zinc depleted medium (LZMM medium) or the like, 2) zinc replete medium (LZMM+40 μM zinc sulfate) or the like, 3) oxidative stress medium (LZMM+40 μM zinc sulfate+2 mM H₂O₂) or the like, 4) carbon starvation medium (deleting maltose from above LZMM+40 μM zinc sulfate) or the like. Cells are grown at 30° C. for 6 hours and harvested for RNA preparation. Cells withdrawn from fermentation tube under beer fermenting condition can be used for the following experiments.

[0334] (m)-2 Preparation of mRNA

[0335] Preparations of total RNA from each cell can be carried out using an RNeasy® Mini Kit (manufactured by QIAGEN) or the like according to a manual. Preparations of Poly (A)+mRNA from each total RNA are carried out using an Oligotex Direct mRNA kit (manufactured by QIAGEN) or the like according to a manual. There is no particular limitation for the methods used for preparation of mRNA and the method may be conducted according to the known means.

[0336] (m)-3 Synthesis of Labeled cRNA

[0337] Synthesis of Labeled cRNA can be carried out using a BioArray HighYield RNA Transcript Labeling Kit (manufactured by Affymetrix) or the like according to a manual. Biotin can be used for labeling. There is no particular limitation for the methods used for syntheses of Labeled cRNA and the method may be conducted according to the known means.

[0338] (m)-4 Hybridization

[0339] 5 μg of Biotin-Labeled cRNA, 1.7 μl of 3 nM Control Oligonucleotide B2 (manufactured by Affymetrix), 5 μl of 20× Eukaryotic Hybridization Controls (manufactured by Affymetrix), 1 μl of 10 mg/ml Herring Sperm DNA (manufactured by Affymetrix), 1 μl of 50 mg/ml Acetylated BSA (manufactured by Affymetrix), 50 μl of 2× Hybridization buffer (manufactured by Affymetrix), and water (manufactured by Affymetrix) to give final volume of 100 μl are mixed and hybridized to the DNA array according to a Technical Manual of Affymetrix. After 16 hours of hybridization, hybridization cocktail are removed and the DNA array is washed using the a GeneChip® Fludics Station (manufactured by Affymetrix) or the like, and stained with a Streptavidin Phycoerythrin (300 μl of 2× MES Stain Buffer (manufactured by Affymetrix), 24 μl of 50 mg/ml acetylated BSA (manufactured by Affymetrix), 6 μl of 1 mg/ml StreptAvidin-Phycoerythrin (manufactured by Affymetrix), 270 μl of DI Water (manufactured by Affymetrix)) according to a Technical Manual of Affymetrix. There is no particular limitation for the methods used for hybridization and the method may be conducted according to the known means.

[0340] (m)-5 Data Analysis

[0341] Data analysis of the DNA array can be carried out using a commercially available software (for example, a GCOS (GeneChip Operating Software manufactured by Affymetrix; GeneSpring manufactured by Silicon Genetics; ImaGene manufactured by Takara Shuzo; Array Gauge manufactured by Fuji Photo Film; ImageQuant manufactured by Amersham Pharmacia Biotech, or the like) according to a Technical Manual. Genes which show characteristic expression profile can be identified and selected for functional analysis.

[0342] Furthermore, the identified gene can be used as a gene marker to figure out condition of the yeast cells. A fluctuation in the expression amount of a specific gene can be monitored using a nucleic acid molecule obtained in the time course of culture as the nucleic acid molecule derived from brewing yeast. The culture conditions can be optimized by analyzing the fluctuation. The expression profile of the brewing yeast at the total gene level (namely, which genes among a great number of genes encoded by the genome have been expressed and the expression ratio thereof) can be determined using a nucleic acid molecule having the sequences of many genes determined from the whole genome sequence of the yeast. Thus, the expression amount of the genes determined by the whole genome sequence can be analyzed and, in its turn, the biological conditions of the yeast can be recognized as the expression pattern at the full gene level.

[0343] As a result of gene expression analysis, a group of genes which shows distinctive expression under a certain condition can be identified as target genes for further functional analysis. “A certain condition” may include, without any limitation, changes in environment, such as, temperature, pH, or osmotic pressure, as well as changes in components of medium. As a screening method for identifying genes showing distinctive expression under the certain condition, for example, a gene wherein significant changes in expression of the gene are recognized according as changes in environment, can be selected. “Significant changes” mean preferably, 1.5 times higher, or ⅔ or less, more preferably, 2 times higher, or ½ or less, even more preferably 3 times higher, or ⅓ or less, but not limited thereto.

[0344] There is no particular limitation for the methods used for analysis of data and the method may be conducted according to the known means.

[0345] Comparative Hybridization Analysis

[0346] The DNA array of the present invention can also be used for comparative hybridization analysis using genomic DNA, cDNA or cRNA as a sample/for hybridization.

[0347] (n) Classification of Industrial Yeast

[0348] An embodiments of the present invention includes a method for classifying an industrial yeast comprising

[0349] (a) hybridizing genomic DNA prepared from the industrial yeast to the DNA array of the present invention; and

[0350] (b) calculating percentage to hybridize DNAs of any of (1) to (4), and percentage to hybridize DNAs of (5) and/or (6).

[0351] For the purpose of this embodiment, the DNA array comprises, in addition to the DNAs of any of (1) to (4), DNAs of the (5) and/or (6) is preferably used (Embodiment 15 or 16).

[0352] Preferably, hybridization intensity to the DNAs of (1) to the DNAs of (5) is compared. Alternatively, hybridization intensity to the DNAs of (2) to the DNAs of (6) is compared.

[0353] The present DNA array may optionally comprise DNAs of the (5′) and/or (6′) and/or (7) and/or (8)having one or more mismatch(es) to the DNA of (5) and/or (6) and/or.1 and/or (2), respectively. DNAs of (5′) and/or (6′) and/or . . . and/or . . . may be optionally used as DNA probes of the present DNA array for determining and confirming hybridization specificity of a sample to the DNAs of (5) and/or (6) and/or.1.and/or (2), respectively.

[0354] Specifically, in one of preferred embodiment of the present invention, the DNA array comprises at least one group of DNAs selected from (1) to (4) (preferably (1) and/or (2)), at least one group of DNAs selected from (7) to (10) (preferably (7) and/or (8)), DNAs of (5) and/or (6) and DNAs of (5′) and/or (6′). In the method using the above DNA array, percentage of genes which hybridize to DNAs of (1) and/or (2), but not to DNAs of (7) and/or (8) is determined as percentage to hybridize DNAs of any of (1) to (4), and percentage of genes which hybridize to DNAs of (5) and/or (6), but not to DNAs of (5′) and/or (6′) is determined as percentage to hybridize DNAs of any of (5) and/or (6).

[0355] It is possible to classify industrial yeast using a DNA array mentioned above. Preparation of yeast genomic DNA and hybridization to a DNA array may be carried out as described before. Detection of the signal intensity of array is carried out using a Gene Chip Analysis Basic System and analysis soft ware (GCOS; GeneChip Operating Software 1.0) manufactured by Affymetrix. The percentage of probes, to which the DNA of an industrial yeast hybridizes, is calculated. The identity between the strain from which the DNA probes of the DNA array are derived (e.g. 34/70) and the tested strain is estimated from the calculation result.

[0356] Industrial yeast strains can be classified on the basis of the identity. A strain of industrial yeasts which shows hybridization percentage to the non-Sc genes and the Sc-gene on the DNA array similar to that of another strain can be classified as a close strain of the other strain.

[0357] (o) Detection of Nucleotide Polymorphism

[0358] An embodiments of the present invention includes a method for detecting nucleotide polymorphism in genome of an industrial yeast comprising

[0359] (a) hybridizing genomic DNA prepared from the industrial yeast to the DNA array of the present invention; and

[0360] (b) selecting a gene wherein hybridization intensity to the DNAs of any of (7) to (10) is higher than hybridization intensity to the DNAs of any of (1) to (4).

[0361] For the purpose of this embodiment, the DNA array comprises, in addition to the DNAs of any of (1) to (4), DNAs of any of (7) to (10) is preferably used (Embodiments 17-19).

[0362] It is possible to detect nucleotide polymorphism of a industrial yeast by comparative genomic hybridization with the DNA array mentioned above. For this embodiment, the probes on the array are preferably oligonuclotide probes.

[0363] As an illustrative example, the sets of oligonucleotides for each probe consist of Perfect Match oligonucleotide (PM) which is identical to the sequence of strain 34/70 and MisMatch oligonucleotide (MM) which contains a single base mismatch, e.g., in the central position of the oligonucleotide. It is possible to detect nucleotide polymorphism from the gene whose signal intensity in MM is higher (for example, more than 5-fold) than that in PM.

[0364] Genes comprising one or more mismatche(s) can be preferable candidates of target genes for further functional analysis.

[0365] (p) Selection of Useful Yeast Strains and Genes

[0366] An embodiments of the present invention includes a method for screening a useful strain of industrial yeast, comprising

[0367] (a) hybridizing genomic DNA prepared from the industrial yeast strain to the DNA array of the present invention; and

[0368] (b) determining the industrial yeast strain as useful when the strain contain 1 or more genes, preferably, 2 or more genes, wherein hybridization intensity thereof is 1.5 times higher or less than ⅔ compared to an average hybridization intensity to the DNA of any of (1) to (4).

[0369] A gene of genomic DNA which shows hybridization intensity which shows significantly different from other genes may be selected as candidate of useful genes for further functional analysis. Therefore, strains of industrial yeasts comprising 1 or more genes, preferably 2 or more genes can be selected as candidate of useful strains. Preferably, hybridization intensity of such gene is significantly different from that of other genes, more preferably, thereof is 1.5 times higher or less than ⅔ compared to an average hybridization intensity to the DNA of (1) and/or (2). More preferably, the difference in hibridization intensity is 2 times higher, or ½ or less, even more preferably 3 times higher, or ⅓ or less, but not limited thereto.

[0370] Further embodiment of the present invention is a method for screening a gene of an industrial yeast, comprising

[0371] (a) hybridizing genomic DNA prepared from the industrial yeast strain to the DNA array of the present invention; and

[0372] (b) selecting a gene wherein hybridization intensity thereof is 1.5 times higher or less than ⅔ compared to an average hybridization intensity to the DNA of any of (1) to (4).

[0373] Further another embodiment of the present invention is a method for screening a gene of an industrial yeast, comprising

[0374] (a-1) hybridizing genomic DNA, cDNA or cRNA prepared from the industrial yeast to the DNA array of the present invention;

[0375] (a-2) independently from the step of (a-1), hybridizing genomic DNA, cDNA or cRNA prepared from the industrial yeast of the strain used for preparing the DNA array to the DNA array of the present invention; and

[0376] (b) selecting a gene wherein hybridization intensity thereof to the DNA any of (1) to (4) in the step (a-1) is significantly different from hybridization intensity thereof in the step (a-2).

[0377] The above screening method enable to select genes which hybridization intensity to the DNA array are different between strains. From the results of comparative genomic hybridization analysis, a gene which has probe sets showing low signal intensities may be lost or have different sequence from that of the strain of the probes of the array (e.g., 34/70). In contrast, a gene which has probe sets showing high signal intensities may be high in copy number. For example, as for a gene, which show hybridization intensity of 2 times higher in the step (a-1) than that of the strain used for preparing the DNA array in the step (a-2), the strain of (a-1) is likely to have two or copies of the gene.

[0378] Another embodiment of the present invention is a method for screening a gene of an industrial yeast, comprising

[0379] (a-1) hybridizing cDNA or cRNA prepared from the industrial yeast to the DNA array of the present invention;

[0380] (a-2) independently from the step of (a-1), hybridizing cDNA or cRNA prepared from another industrial yeast to the DNA array of any one of Embodiments 10-19, wherein the industrial yeast of (a-2) has been cultured in a different condition from the culture condition for the industrial yeast of (a-1); and

[0381] (b) selecting a gene wherein hybridization intensity thereof to the DNA of any of (1) to (4) in-the step (a-1) is significantly different from hybridization intensity thereof in the step (a-2).

[0382] The above screening method enable to select genes wherein expression of the genes may be changed due to difference in culture condition. The “industrial yeast cultured in a different condition” includes yeasts cultured in different medium or temperature, or sequential samples during the process of producing an alcohol or an alcoholic beverage, for example.

[0383] Genes obtained by the various screening method of the present invention may be subject for further functional analysis, because differences in hybridization intensity may contribute to the difference of fermentation character between strains. The genes which have nucleotide polymorphism detected by the method mentioned above can be also selected for functional analysis.

[0384] As another alternative, the DNA array of the present invention may be used to analyze the chromosomal structure of an industrial yeast by DNA array-based comparative genomic hybridization. Following descriptions are an example of the chromosome structure analysis using the DNA array.

[0385] Yeast genomic DNA is prepared using a Quiagen Genomic Tip 100/G (#10243) and Qiagen Genomic DNA Buffer Set (#19060) according to the manual attached to the kit. The DNA (10 μg) is digested with DNase I (manufactured by Invitrogen) according to a method of Winzeler, et al. (Science, volume 281, pages 1194-1197 (1998)), biotinylated using a terminal transferase (manufactured by Roche) and hybridized to a DNA array (Affymetrix Gene Chip Yeast Genome S98 Array). The DNA array of the present invention may include DNAs of any one of (1) to (4) and (7) to (10) from Non-Sc type genes as well as (5) and/or (6) and/or (5′) and/or (6′) of the Sc type. Hybridization and detection of the signal intensity of DNA array are carried out using a Gene Chip Analysis Basic System and analysis soft ware (GCOS; GeneChip Operating Software 1.0) manufactured by Affymetrix.

[0386] The signals of probes hybridized with the DNA of brewing yeast were lined following genes order in each chromosome using a spreadsheet program (Microsoft Excel 2000) and the signals are shown in bar graphs. The Sc type genes do not hybridize to the non-Sc type DNA probes (i.e., DNAs of (1) to (4)). Contrary, the non-Sc type genes do not hybridize to the Sc type DNA probes (i.e., DNAs of (5) and/or (6)). Therefore, the gene dosage of Sc type DNA and/or non-Sc type DNA affect the signal and the points where the signals show vigorous changes are considered to be translocation sites between Sc type and non-Sc type chromosome. In a preferred embodiment, hybridization to DNAs of any of (1) to (4) can be determined by hybridization to DNAs of (1) and/or (2), but not to DNAs of (7) and/or (8), and hybridization to DNAs of any of (5) and/or (6) can be determined by hybridization to DNAs of (5) and/or (6), but not to DNAs of (5′) and/or (6′).

### IV. Genes and Polypeptides

[0387] The present invention further provides a non-Sc gene obtained by the analyzing method and the screening method of the present invention. Preferably, genes of the present invention participating in increase in productivity and/or improvement in flavor in the production of an alcohol or an alcoholic beverage. For example, genes of the present invention are, preferably, characterized in that concentration of sulfite in a culture medium of an industrial yeast increases when the gene is expressed in the yeast.

[0388] The present invention also provides polypeptides or proteins encoded by the gene. The polypeptides of the present invention may be obtained by any known conventional methods including expression of the gene by genetic engineering, or via polypeptide synthesizing technique.

[0389] The genes of the present invention may include both ORF and non-coding regions (non-ORF regions). “Gene” includes DNA, cDNA, mRNA, cRNA, without any limitation. The gene of the present invention can be prepared by any known conventional methods, for example, by screening a cDNA library, or via polynucleotide synthesizing techniques. In the present specification, the term “nucleic acid” is use interchangeably with “gene”. In the following explanation, “DNA” will be explained as an example of gene.

[0390] With regard to the DNA which can be obtained by the method of the present invention, a DNA containing the DNA sequence of the non-Sc type gene obtained in the above and a DNA which hybridizes to the said DNA under stringent condition and a protein having the substantially the same biological activity may be listed.

[0391] The DNA obtained by the method of the present invention includes single-stranded and double-stranded DNAs although they are non-limitative. A DNA which hybridizes to the DNA containing a DNA sequence of the non-Sc type gene obtained in the above under stringent condition includes a degenerated mutant of codon of the protein encoded by the said gene, for example. A degenerated mutant means a polynucleotide fragment encoding the same amino acid sequence by degeneration of codon, although in terms of a DNA sequence, it is different from a DNA sequence of the non-Sc type selected by the present invention.

[0392] As an example, the gene of the present invention includes a nucleic acid encoding a polypeptide of any one of the following i) and ii):

[0393] i) a polypeptide having the amino acid sequence represented by SEQ ID NO:3; and

[0394] ii) a polypaptide having an amino acid sequence wherein one or more amino acid residue(s) is deleted, substituted and/or added to the amino acid sequence represented by SEQ ID NO:3, and having an activity to increase concentration of sulfite in a culture medium of an industrial yeast when the gene is expressed in the yeast.

[0395] More preferably, the nucleic acid according to the present invention is selected from the following a) and b):

[0396] (a) a nucleic acid having the nucleotide sequence represented by SEQ ID NO:1; and

[0397] (b) a nucleic acid having a nucleotide sequence which hybridizes to the nucleotide sequence complementary to the nucleotide sequence represented by SEQ ID NO:1 under a stringent condition, and encodes a polypeptide having an activity to increase concentration of sulfite in a culture medium of an industrial yeast when the gene is expressed in the yeast.

[0398] Specific example thereof his a DNA with a sequence as shown by SEQ ID NO:1, a DNA which hybridizes to the said DNA under stringent condition, etc. The DNA which hybridizes under stringent condition means a DNA which is prepared by a colony hybridization method, a plaque hybridization method, a southern blot hybridization method or the like using a DNA fragment with the sequence of the non-Sc type identified hereinabove as a probe. An appropriate stringent condition can be selected as described above.

[0399] Hybridization may be carried out according to a method mentioned in “Molecular Cloning, Third Edition”, “Current Protocols in Molecular Biology”, “DNA Cloning 1: Core Techniques, A Practical Approach, Second Edition, Oxford University (1995)”, etc.

[0400] Specific examples of the hybridizable DNA is a DNA which shows at least not less than 60% identity, preferably a DNA which shows not less than 80% identity and, more preferably, a DNA which shows not less than 95% identity to a DNA sequence as shown in SEQ ID NO:1 when calculation is conducted using a parameter of the default setting (initial setting) by a software for homology searching such as FASTA, BLAST, Smith-Waterman “Meth. Enzym., volume 164, page 765 (1988)”, etc.

[0401] An example of the DNA obtained by the screening method of the present invention is a DNA encoding a polypeptide comprising an amino acid sequence as shown by SEQ ID NO:3, or a DNA which hybridizes to the said DNA under stringent condition.

[0402] An example of the polypeptide which is encoded by the DNA obtained by the screening method of the present invention is a polypeptide encoded by the DNA containing the DNA sequence of ORF obtained in the above and a polypeptide encoded by the DNA which is hybridized to the said DNA under stringent condition or a polypeptide comprising an amino acid sequence as shown by SEQ ID NO:3.

[0403] Further, a polypeptide having an amino acid sequence wherein one or more amino acid residue(s) is deleted, substituted and/or added to the amino acid sequence of the said polypeptide, and has substantially same biological activity as the activity of the said polypeptide is also included in the present invention. The expression reading “substantially same activity as the activity of the said polypeptide” means the same activity as the activity which is represented by enzymatic activity or the function inherent to the polypeptide before the deficiency, substitution or addition. The said polypeptide can be prepared by a site-specific mutation introduction which is mentioned in “Molecular Cloning, Third Edition”, “Current Protocols in Molecular Biology”, “Nuc. Acids. Res., volume 10, page 6487 (1982)”, “Proc. Natl. Acad. Sic. USA, volume 79, page 6409 (1982)”, “Gene, volume 34, page 315 (1985)”, “Nuc. Acids. Res., volume 13, page 4431 (1985)”, “Proc. Natl. Acad. Sci. USA, volume 82, page 488 (1985)”, etc. For example, it is able to be prepared by introducing a site-specific mutation into a DNA encoding a polypeptide comprising an amino acid sequence as shown in SEQ ID NO:3 or 4. Although there is no particular limitation for the number of the amino acid residue(s) which is/are deficient and/or substituted and/or added, the number is within such an extent that is able to be deficient and/or substituted and/or added by known methods such as the above-mentioned site-specific mutation method and is one to several tens, preferably 1 to 20, more preferably 1 to 10 and, still more preferably, 1 to 5.

[0404] A polypeptide having an amino acid sequence wherein one or more amino acid residue(s) is deleted, substituted and/or added to the amino acid of the polypeptide of the present invention means that there is/are one or more deficiency (ies) and/or substitution(s) and/or addition(s) of one or more amino acid residue(s) in any one or more position(s) of the amino acid sequence in the same sequence. Those deficiency (ies) and/or substitution(s) and/or addition(s) may take place at the same time and the substituted or added amino acid residue may be either naturally occurring type or a non-naturally occurring type. Examples of the amino acid residue of a natural type are L-alanine, L-asparagine, L-aspartic acid, L-glutamine, L-glutamic acid, glycine, L-histidine, L-isoleucine, L-leucine, L-lysine, L-methionine, L-phenylalanine, L-proline, L-serine, L-threonine, L-tryptophan, L-tyrosine, L-valine and L-cysteine, etc.

[0405] Examples of the amino acid residue which is able to be substituted each other will be shown below. Amino acid residues in the same group may be substituted each other (conservative substitution).

[0406] Group A: leucine, isoleucine, norleucine, valine, norvaline, alanine, 2-aminobutanoic acid, methionine, O-methylserine, tert-butylglycine, tert-butylalanine and cyclohexylalanine.

[0407] Group B: aspartic acid, glutamic acid, isoaspartic acid, isoglutamic acid, 2-aminoadipic acid and 2-aminosuberic acid.

[0408] Group C: asparagine and glutamine.

[0409] Group D: lysine, arginine, ornithine, 2,4-diaminobutanoic acid and 2,3-diaminopropionic acid.

[0410] Group E: proline, 3-hydroxyproline and 4-hydroxyproline.

[0411] Group F: serine, threonine and homoserine.

[0412] Group G: phenyl alanine and tyrosine.

[0413] For the purpose that the resulting mutated polypeptide has the substantially same activity as the activity of the polypeptide before the mutation, it is preferred that the mutated one has at least 60% or more, usually 80% or more or, particularly, 95% or more of identity to the amino acid sequence of the polypeptide before the mutation when calculation is carried out using a parameter of the default setting (initial setting) by a software for the analysis such as BLAST and FASTA. Identity between two amino acid sequence can be determined as discussed above.

[0414] It is also possible to produce the polypeptide of the present invention by a chemical synthetic method such as Fmoc method (fluorenylmethyloxycarbonyl method), tBoc method (tert-butyloxycarbonyl method), etc. It is further possible to chemically synthesize by using a peptide synthesizers manufactured by Advanced ChemTech, Perkin-Elmer, Pharmacia, Protein Technology Instrument, Synthecell-Vega, PerSeptive, Shimadzu, etc.

[0415] When the method of the present invention is used, it is possible to determine the whole genome sequence of industrial yeast, to identify the useful genes of industrial yeast and to assign the functions of the said genes. There are many cases where the genes in industrial yeast are industrially useful and, when the genes are classified on the basis of the assigned functions, character of the yeast is clarified and precious information for breeding of industrial yeast is able to be obtained. For example, when the industrial yeast is a brewing yeast, then a gene participating in increase in productivity and improvement in flavor in the production of alcoholic beverage is identified and, in case the gene is disadvantageous for the increase of productivity or for the improvement of flavor, the gene expression is suppressed by a gene disruption or an antisense method or an RNAi method (c.f., for example, Non-Patent Document 10), whereupon yeast which shows an excellent brewing character can be bred. In case the gene is advantageous for the increase of productivity, improvement of flavor, etc., then for example the gene is overexpressed in the yeast, whereupon brewing yeast which shows an excellent brewing character, which is industrially useful, can be bred.

[0416] An example where the gene obtained by the method of the present invention is used to breed useful yeast is shown as follows.

[0417] As already mentioned above, when the sulfite concentration in a product is increased, it is possible to make a product with excellent flavor stability. Therefore, if the gene obtained by the screening method of the present invention contributes to production and efflux of sulfite, it is now possible that a transformant is cultivated and expressed the said gene to make a product with excellent flavor stability as a result of the increase in the concentration of sulfite in the product.

[0418] It has been known that a bottom fermenting yeast reduces sulfate ion (SO₄²⁻) taken from outside of the cell to sulfite ion (SO₃²⁻). However, sulfite inhibits glyceroaldehyde-3-phosphate dehydrogenase and reduces the concentration of intracellular ATP, therefore, yeast has a function of discharging sulfite so that excessive sulfite should not be accumulated in the cell. SSU1 is a gene, which has been isolated and shown complement the sulfite-sensitive mutation (c.f., for example, Non-Patent Document 11). SSU1 gene product comprises 485 amino acid residues, and the structural analysis suggests that it is a transporter with 9 to 10 membrane-spanning domains (c.f., for example, Non-Patent Document 12). Further, as a result of experiment using a SSU1 overexpressed strain, it has been already proved that the SSU1 gene product participates in discharge of sulfite (c.f., for example, Non-Patent Document 13).

[0419] Bottom fermenting yeast usually has a high production ability of sulfite, while top fermenting yeast rarely produces it. By using a screening method of the present invention, it is possible to select non-ScSSU1 gene which is specific to bottom fermenting yeast in addition to ScSSU1 gene which exists in both top and bottom fermenting yeast.

[0420] Breeding method of yeast, wherein the non-ScSSU1 gene 4 is intensified, is specifically mentioned in the Examples.

### V. Recombinant Vectors, Transformants and Other Embodiments

[0421] The present invention further includes the following embodiments:

[0422] A recombinant vector containing the gene of the present invention; A transformant comprising the recombinant vector. The transformant is preferably, a yeast of genus Saccharomyces

[0423] A method for producing an alcohol or an alcoholic beverage using the transformant of the present invention. Preferably, the present method may comprise culturing the transformant of the present invention in a sugar-containing medium. Preferably, the sugar containing medium can be selected from a group consisting of wort, grape juice, rice juice and glucose and/or maltose syrup.

[0424] A breeding method of yeast which is suitable for the production of an alcohol or an alcoholic beverage, characterized in that, expression of the gene or the nucleic acid of the present invention is controlled. Preferably, the yeast belongs to the genus Saccharomyces.

[0425] Yeast obtained by the breeding method of the present invention. A method for producing an alcohol or an alcoholic beverage using the yeast of the present invention.

[0426] An alcohol or an alcoholic beverage which is produced by the producing method of the present invention.

[0427] With regard to yeast used as a host in the introduction of gene selected by the screening method of the present invention, there is no particular limitation so far as it is yeast which is usable for brewing, and any yeast which is widely used as a brewing yeast at present such as beer yeast including NCYC456, NBRC 1951, NBRC 1952, NBRC 1953 and NBRC 1954 may be used. Further, whisky yeasts (such as S. cerevisiae NCYC 90), wine yeasts (such as wine yeast Kyokai No. 1, No. 3, No. 4, etc.) and sake yeasts (such as sake yeast Kyokai No. 7, No. 9, etc.) may be also used.

[0428] With regard to a vector used for the introduction of gene into the above-mentioned host, there is no particular limitation so far as it is a vector which can express gene in the yeast, and any of plasmid of a multicopy (YEp type), a single-copy plasmid (YCp type) and a chromosomal DNA-integrating plasmid (YIp type) may be utilized. An example of a YEp vector is YEp 51 (J. R. Broach, et al., Experimental Manipulation of Gene Expression, Academic Press, New York, 83, 1983), etc. an example of a YCp vector is YCp 50 (M. D. Rose, et al., Gene, volume 60, page 237, 1987), etc.; and an example of a YIp vector is YIp 5 (K. Struhl, et al., Proc. Natl. Acad. Sci. USA, volume 76, page 1035, 1979), etc. Those plasmids are put into the market and are easily available.

[0429] The above-mentioned vector may have other sequence for controlling expression of gene in yeast such as, promoter, operator, enhancer, silencer, ribosome binding sequence, terminator, etc. With regard to a promoter and a terminator for a constitutive expression of a gene, there is no particular limitation but any combination may be used so far as it functions in a brewing yeast and is independent from sulfite concentration in the product. As to a promoter for example, it is possible to use a promoter for glyceraldehyde-3-phosphate dehydrogenase (TDH3) gene, a promoter for phosphoglycerate kinase (PGK1) gene, etc. Those promoters have been known, and PGK1 gene, for example, is mentioned in detail in publicly known documents such as M. F. Tuite, et al., EMBO J., volume 1, page 603 (1982) and is easily available.

[0430] It is not necessary that the above-mentioned other sequences which regulate the expression of the introduced gene are particularly provided from vector so far as the DNA obtained by the screening method of the present invention includes them. When such other sequences are not contained in the said DNA, it is preferred that other sequences are prepared separately and ligated to the said DNA. Alternatively, even in the case of higher expression level or specific regulation of expression is required, other sequences appropriate for such a purpose are ligated to the said DNA.

[0431] A method for the transformation of the above vector to a host may follow known procedures. For example, the following methods may be used; an electroporation method “Meth. Enzym., volume 194, page 182 (1991)”, a spheroplast method “Proc. Natl. Acad. Sci. USA, volume 75, page 1929 (1978)”, a lithium acetate method “J. Bacteriology, volume 153, page 163 (1983)”, a method mentioned in “Proc. Natl. Acad. Sci. USA, volume 75, page 1929 (1978)”, etc.

[0432] To be more specific, a host is cultivated in a standard yeast nutrient medium (such as YEPD medium “Genetic Engineering, vol. 1, Plenum Press, New York, 117 (1979)”, etc.) so that the absorbance at 600 nm becomes 1 to 6. Cells are collected by centrifugation, washed and subjected to a pre-treatment with an alkali metal ion or, preferably, lithium ion in a concentration of about 1M to 2M. After the cells are incubated at about 30° C. for about 60 minutes, they are incubated together with DNA to be introduced (about 1 to 20 μg) at about 30° C. for about 60 minutes. Polyethyleneglycol or, preferably, polyethyleneglycol of about 4,000 daltons is added as the final concentration will be about 20% to 50%. After the incubation is carried out at about 30° C. for about 30 minutes, the cells are subjected to a heating treatment at about 42° C. for about 5 minutes. Preferably, the cell suspension is washed with a standard yeast nutrient medium and placed in a predetermined amount of a fresh standard yeast nutrient medium, then incubated at about 30° C. for about 1 hour. After the incubation, it is spread on an appropriate selective medium plate.

[0433] Besides the above, as for a general cloning technique, “Molecular Cloning, Third Edition”, “Methods in Yeast Genetics, A Laboratory Manual (Cold Spring Harbor Laboratory Press, Cold Spring Harbor, N.Y.)”, etc. were referred to.

[0434] With regard to a selective marker used for the transformation, it is not possible to utilize an auxotrophic marker in the case of brewing yeast and, therefore, G 418-resistance gene (G 418^{r}), copper-resistance gene (CUP 1) “M. Karin, et al., Proc. Natl. Acad. Sci. USA, volume 81, page 337, 1984”, serulenin-resistance gene (fas2m, PDR 4) (“Atsushi Inogoshi, et al., Seikagaku, volume 64, page 660, 1992”, “M. Hussain, et al., Gene, volume 101, page 149, 1991”, etc. are applicable.

[0435] The brewing yeast bred according to the present invention is not different from a parental strain in terms of growth and fermentation ability of yeast. Accordingly, materials, facilities for the production, production control, etc. may be entirely the same as those in the conventional methods, which is an important aspect of the present invention. However, it goes without saying that, conditions such as fermentation period may be changed on a case-by-case, if desired. For example, when a brewing yeast in which discharging ability of sulfite is intensified and an alcoholic beverage is produced using such yeast, only the content of sulfite in the product changes, and there is no difference from the case where a parental strain is used, in terms of growth and fermentation ability of the yeast. Accordingly, materials, facilities for the production, production control, etc. may be entirely the same as those in the conventional methods, and there is no increase in the cost of production of an alcoholic beverage in which sulfite content increases and of which flavor is improved.

### EXAMPLES

[0436] Details of the present invention are mentioned with the following Examples although the present invention is not limited to the following Examples.

### Example 1

### Preparation of Chromosomal DNA of Saccharomyces pastorianus Weihenstephan 34/70 (hereinafter, Abbreviated as Strain 34/70)

[0437] Preparation of chromosomal DNA was carried out by a method mentioned in “Yeast, a practical approach (IRL Press) 6.2.1 (pages 228-229)”, which was partially modified. Cells were inoculated and grown in 200 mL of YPD medium (2% glucose, 1% yeast extract and 2% polypeptone) at 30° C. until absorbance of the culture at 660 nm became 4. Cells were collected by centrifugation, washed with buffer A (50 mM sodium phosphate, 25 mM EDTA and 1% (v/v) β-mercaptoethanol; pH 7.5) and resuspended in 25 mL of buffer A 7 mg of Zymolyase 100T (Seikagaku Kogyo) was added thereto and the mixture was mildly shaken at 37° C. for 60 minutes. To this was added 25 mL of buffer B (0.2M Tris-HCl, 80 mM EDTA and 1% SDS; pH 9.5), then the mixture was allowed to stand at 65° C. for 30 minutes, cooled on ice, mixed with 12 mL of 5M potassium acetate and allowed to stand on ice for further 60 minutes. The resulting solution was centrifuged at 5,000 g for 10 minutes at 15° C. To the recovered supernatant was added the same volume of ethanol to precipitate DNA, and the mixture was immediately centrifuged at 5,000 g for 10 minutes at 15° C. to collect the precipitate. The resulting precipitate was washed with 70% (v/v) ethanol, subjected to natural drying and dissolved in 5 mL of TE buffer (10 mM Tris-HCl and 1 mM of EDTA; pH 8.0) to give a crude DNA solution. Cesium chloride (4.06 g) and 840 μg of bisbenzimide (Hoechst 33258) were added and dissolved in 3.5 mL of the crude DNA solution, the mixture was subjected to centrifugal separation at 100,000 g for 17 hours at 25° C. and exposed to, UV light to make DNA bands visible, whereupon the band of the lower layer was recovered. The recovered DNA solution was extracted with isopropanol which was saturated with a cesium chloride solution to remove bisbenzimide (Hoechst 33258). To the recovered aqueous layer was added 4-fold by volume of 0.3 M sodium acetate followed by mixing. Then, 3-fold by volume of ethanol was added thereto to precipitate the DNA, which was recovered by centrifugation. The recovered DNA was dissolved in TE buffer containing 75 μg/mL of RNase, kept at 37° C. for 5 minutes, and extracted with phenol/chloroform for three times and the aqueous layer was further subjected to precipitation with ethanol. The precipitate recovered by centrifugation was washed with 70% (v/v) ethanol, subjected to natural drying and dissolved in TE buffer to prepare a chromosomal DNA solution.

### Example 2

### Preparation of a Shotgun Library

[0438] The concentration of a genome solution of strain 34/70 prepared in Example 1 was adjusted to 1 mg/mL using a TE buffer. 0.1 mL thereof was treated with a Hydroshear (manufactured by GeneMachines; speed: 6; cycle: 20) to fragmentize the genomic DNA. End of the genomic fragment was blunted using a DNA Blunting Kit (manufactured by Takara Shuzo), fractionated by 0.8% agarose electrophoresis. Genomic fragments of 1.5 to 2.5 kb were excised from the gel, and DNA was eluted. The DNA eluate was treated with phenol/chloroform and precipitated with ethanol to give a genome library insert. All the above insert and 0.5 μg of pUC 18 SmaI/BAP (manufactured by Amersham Biosciences) were subjected to ligation at 15° C. for 15 hours using T4 ligase (manufactured by Takara Shuzo).

[0439] The ligation reaction product was precipitated with ethanol and dissolved in 10 μL of a TE buffer. A ligation solution (1 μL) was inserted into 40 μL of Escherichia coli Electro Cell DH5α (manufactured by Takara Shuzo) by means of electroporation under the condition mentioned in the attached experimental manual. The resulting product is spread on an LB plate medium containing 1.6% of agar (the LB medium (1% bactotryptone, 0.5% yeast extract and 1% sodium chloride; pH 7.0)) containing 0.1 mg/mL of ampicillin; 0.1 mg/mL of X-gal and 1 mmol/L of isopropyl-β-D-thiogalactopyranoside (IPTG), and incubated through the night at 37° C.

[0440] The transformant obtained from colonies formed on the said plate medium was subjected to cultivation without shaking through the night at 37° C. in a 384-well titer plate to which 50 μL of an LB medium containing 0.1 mg/mL of ampicillin was added. Then 50 μL of a 50% aqueous solution of glycerol was added thereto followed by stirring, and the mixture was used as a glycerol stock.

### Example 3

### Preparation of a Cosmid Library

[0441] About 0.1 mg of the genomic DNA obtained in Example 1 was partially digested with Sau3AI (manufactured by Takara Shuzo). Insertion of the fragment into a BamHI site of Super Cos I vector (manufactured by Stratagene) was carried out according to a manual. A ligated product prepared by this method was subjected to packaging using Gigapack III Gold (manufactured by Stratagene) and introduced into Escherichia coli XL1-Blue MR strain (manufactured by Stratagene) according to a manual. It was spread on an LB plate medium containing 0.1 mg/mL of ampicillin and incubated through the night at 37° C. The resulting transformants were cultured through the night at 37° C. in an LB medium (each well: 50 μL) containing 0.1 mg/mL of ampicillin using a 96-well titer plate, and then 50 μL of 50% glycerol solution was added thereto followed by stirring and the mixture was used as a glycerol stock.

### Example 4

### Determination of DNA Sequence

[0442] (4-1) Preparation of DNA Fragment

[0443] The whole genome sequence of strain 34/70 was determined mainly using the whole genome shotgun method. A DNA fragment of which DNA sequence is to be determined by that method was prepared by a PCR method from the shotgun library prepared in the above Example 2. To be specific, clone derived from the whole genome shotgun library was inoculated using a replicator (manufactured by Gene Solution) to a 384-well titer plate where 50 μL of an LB medium containing 0.1 mg/mL of ampicillin was placed to each well and cultivated without shaking through the night at 37° C. The culture liquid was transferred to a 384-well reaction plate (manufactured by AB Gene) containing 10 μL of reaction mixture for PCR (TaKaRa Ex Taq manufactured by Takara Shuzo) using a replicator (manufactured by Gene Solution) and PCR was carried out according to a protocol by Makino, et al. “DNA Research, volume 5, pages 1 to 9 (1998)” using a GeneAmp PCR System 9700 (manufactured by Applied Biosystems) to amplify the inserted fragment. After that, excessive primers and nucleotides were removed by a PCR product purification kit (manufactured by Amersham Bioscience) and a sequence reaction was carried out using that sample as a template.

[0444] A DNA fragment from the cosmid library of the above Example 3 was prepared according to the following method. That is, clone derived from the whole cosmid library was inoculated to each well of a 96-well plate to which 1.0 mL each of a 2×YT medium (1.6% bactotryptone, 0.1% yeast extract and 0.5% sodium chloride; pH 7.0) containing 50 μg/mL of ampicillin was placed and subjected to shake culture at 30° C. through the night. A cosmid DNA was prepared from the said culture using KURABO PI-1100 AUTOMATIC DNA ISOLATION SYSTEM (manufactured by KURABO) according to a manual of KURABO, and was used as a template for a sequence reaction.

[0445] (4-2) Sequence Reaction

[0446] A sequence reaction mixture was prepared as follows. The PCR product or cosmid DNA prepared in the above (4-1) is mixed with about 2 μl of DYEnamic ET Terminator Sequencing Kit (manufactured by Amersham Bioscience) and appropriate primers to give about 8 μl of reaction mixture. An M13 forward (M13-21) primer and an M13 reverse (M13RV) primer (manufactured by Takara Bio), are used for the sequence reaction of a PCR product derived from shotgun DNA, while a forward primer SS-cos F.1 (SEQ ID NO: 7) and a reverse primer SS-cos R.1 (SEQ ID NO: 8) are used for cosmid DNA. Amounts of the primers and the DNA fragment were 3.2 pmol and 50 to 200 ng, respectively. The said reaction solution was subjected to dye terminator sequence reaction of 60 cycles using a GeneAmp PCR System 9700. Cycle parameter followed a manual attached to the DYEnamic ET.Terminator Sequencing Kit. Purification of the sample was carried out using a Multi Screen HV Plate (manufactured by Millipore) according to a manual of Millipore. The purified reactant was stored in a dark place of 4° C. The purified reactant was analyzed using a Mega BACE 1000 Sequencing System (manufactured by Amersham Bioscience) and ABI PRISM 3700 DNA Analyser (manufactured by Applied Biosystems) according to manuals attached thereto. The data on 332,592 sequences obtained by the Mega BACE 1000 Sequencing System and on 13,461 sequences obtained by the 3700 DNA Analyser were transferred to a server Enterprise 6500 (manufactured by Sun Microsystems) and preserved. The data on 346,053 sequences corresponded to about 7-fold of the genome size.

[0447] A list of the primers for the PCR used in the Example is shown in Table 3.

### Example 5

### Assembly (A Process whereby the Order of Multiple Sequenced DNA Fragments is Determined)

[0448] All works for reconstruction of genomic DNA sequence from sequence information for DNA fragment of the 346,053 sequences obtained in the above Example 4 were carried out on a UNIX® platform. Base call was carried out by phred (The University of Washington), masking of vector sequence was carried out using Cross_Match (The University of Washington) and assembly was carried out using Phrap (The University of Washington). Contig obtained as a result of the assembly was analyzed using a graphical editor consed (The University of Washington). A series of works from base call to assembly was carried out all together utilizing a script phredphrap attached to the consed.

### Example 6

### Preparation of a Comparative Database with the Whole Genome Sequence of S. cerevisiae

[0449] S. pastorianus is believed to be a natural hybrid of S. cerevisiae with its closely-related species “Int. J. Syst. Bacteriol., volume 35, pages 508 to 511 (1985)”. Therefore, a DNA sequence (comprising 10,044 bases) of both ends of the cosmid DNA clone obtained in (4-2) was subjected to a homology searching by a homology searching algorithm to S. cerevisiae genome sequence, whereupon for each DNA sequence alignment of homologous region on S. cerevisiae genome sequence and the identity thereof were determined to prepare a database. An identity distribution chart for cosmid DNA sequence with the corresponding genomic DNA sequence of S. cerevisiae is shown in FIG. 2. The DNA sequence of cosmid was roughly classified into a DNA sequence group showing not less than 94% identity to the genomic DNA sequence of S. cerevisiae and a DNA sequence group showing around 84% identity thereto. The DNA sequence group showing not less than 94% identity is named a DNA sequence of an Sc type derived from S. cerevisiae and the DNA sequence group showing around 84% identity is named a DNA sequence of a non-Sc type derived from genome of closely related species. Similarly, a comparative database (Table 1) was prepared for the DNA sequence of both ends of shotgun clone obtained in (4-1) with the genomic DNA sequence of S. cerevisiae. Table 1 shows an example of the comparative database of DNA sequence of both ends of 3,648-cosmid clone with the genomic DNA sequence of S. cerevisiae. There are shown the homologous region and the identity of forward sequence and reverse sequence of cosmid subjected to the DNA sequence determination on each genomic DNA sequence of S. cerevisiae.

TABLE 1

| | Forward Chain | | | | | | Reverse Chain | | | | | |
|---|---|---|---|---|---|---|---|---|---|---|---|---|
| | | Matched S. cerevisiae Genomic Base Sequence | | | | | | Matched S. cerevisiae Genomic Base Sequence | | | | |
| | | Information | | | | | | Information | | | | |
| | | | Chro- | | | | | | Chro- | | | |
| | Sequence | Identical | mo- | Initiation | Termination | | Sequence | Identical | mo- | Initiation | Termination | |
| Name of | Length | Length | some | Position | Position | Identity | Length | Length | some | Position | Position | Identity |
| Cosmid | (bases) | (bases) | No. | (bases) | (bases) | (%) | (bases) | (bases) | No. | (bases) | (bases) | (%) |
| SSL052_A06 | 627 | 625 | XVI | 15,940 | 16,565 | 98.7 | 626 | 625 | XVI | 52,979 | 52,354 | 98.7 |
| SSL023_D02 | 346 | 341 | XVI | 16,784 | 17,125 | 87.3 | 633 | 629 | XVI | 66,017 | 65,388 | 90.5 |
| SSL015_E09 | 630 | 625 | XVI | 39,030 | 39,655 | 89.5 | 615 | 614 | XVI | 81,655 | 81,041 | 97.9 |
| SSL029_B08 | 664 | 660 | XVI | 45,916 | 45,256 | 99.3 | 650 | 647 | XVI | 8,504 | 9,151 | 98.8 |
| SSL028_G10 | 656 | 655 | XVI | 47,609 | 46,954 | 98.3 | 646 | 641 | XVI | 10,359 | 11,000 | 98.0 |
| SSL008_E01 | 622 | 620 | XVI | 46,362 | 46,982 | 93.4 | 589 | 587 | XVI | 86,022 | 85,435 | 98.3 |
| SSL030_G05 | 632 | 631 | XVI | 47,013 | 47,644 | 99.2 | 618 | 617 | XVI | 87,004 | 86,387 | 99.5 |
| SSL032_H10 | 646 | 645 | XVI | 52,076 | 51,431 | 98.1 | 637 | 636 | XVI | 13,273 | 13,909 | 98.7 |
| SSL041_G05 | 635 | 634 | XVI | 52,979 | 52,345 | 99.4 | 619 | 618 | XVI | 9,825 | 10,443 | 99.4 |
| SSL031_D08 | 659 | 658 | XVI | 52,297 | 52,955 | 99.2 | 638 | 637 | XVI | 92,295 | 91,658 | 99.1 |
| SSL069_F11 | 417 | 414 | XVI | 55,053 | 55,467 | 88.5 | 788 | 787 | XVI | 97,115 | 96,328 | 94.4 |
| SSL005_A10 | 647 | 645 | XVI | 65,233 | 64,588 | 99.2 | 527 | 516 | XVI | 21,537 | 22,053 | 81.8 |
| SSL014_G07 | 628 | 627 | XVI | 65,229 | 65,856 | 99.8 | 621 | 620 | XVI | 103,674 | 103,054 | 99.2 |

[0450] On the basis of the information obtained by the prepared comparative database, mapping of cosmid clone and shotgun clone on S. cerevisiae genome sequence was carried out (FIG. 3). In addition, a comparative database (Table 1) of contig DNA sequence obtained in Example 5 with S. cerevisiae genome sequence was prepared, then mapping was carried out. Although the means for the mapping was almost the same as the above-mentioned method, if forward and reverse sequences of cosmid and shotgun clones were present in different contigs, these contigs were connected by forward-reverse link (FIG. 4).

### Example 7

### Identification and Assignment of Function of ORF

[0451] Identification of ORF (open reading frame) in the DNA sequence assembled in Example 5 was carried out. The examples are specifically shown below. Identification of ORF existing in the DNA sequence assembled in Example 5 was carried out using a available program using ORF finder (http://www.ncbi.nih.gov/gorf/gorf.html) for identification of ORF for six kinds of reading frames in the sequence with the length of not less than 150 bases from initiation codon to termination codon including its complementary sequence. Assignment of function of the extracted ORF was carried out by homology searching of amino acid sequence of ORF of S. cerevisiae that has been registered at the SGD and published. Table 2 is a table showing examples of the ORF name of S. cerevisiae corresponding to the result of assignment of function of ORF existing in the non-Sc genome. From the left side of the table, there are shown name of the ORF existing on the brewing yeast, ORF length in polynucleotide, ORF length in polypeptide, name of the ORF of S. cerevisiae determined by homology searching, identity, coincided length and functions of the gene.

TABLE 2

| | ORF | ORF | Name of | | Coincided | |
|---|---|---|---|---|---|---|
| | Length | Length | Homologous | Identity | Length | |
| Name of ORF | (bp) | (aa) | Gene | (%) | (aa) | Functions |
| nonSc-ATF2 | 1638 | 545 | ATF2 | 71 | 535 | alchhol O-acetyltransferase |
| nonSc-THI3 | 1305 | 434 | THI3 | 94 | 431 | transcriptional activator |
| nonSc-FUS3 | 435 | 144 | FUS3 | 90 | 139 | MAP kinase |
| nonSc-ILV5 | 1188 | 395 | ILV5 | 97 | 395 | ketol-acid reductoisomerase |
| nonSc-MET2 | 1461 | 486 | MET2 | 93 | 486 | homoserine O-acetyltransferase |
| nonSc-MET10 | 3108 | 1035 | MET10 | 87 | 1035 | sulfite reductase (NADPH) |
| nonSc-MET14 | 609 | 202 | MET14 | 97 | 202 | adenylsulfate kinase |
| nonSc-MET16 | 786 | 261 | MET16 | 92 | 261 | phosphoadenylyl-sulfate reductase |
| nonSc-TPI1 | 747 | 248 | TPI1 | 96 | 248 | triosephosphate isomerase |
| nonSc-MET3 | 1536 | 511 | MET3 | 94 | 511 | sulfate adenylyltransferase (ATP) |
| nonSc-MET10 | 3108 | 1035 | MET10 | 87 | 1035 | sulfite reductase (NADPH) |
| nonSc-SAM1 | 1149 | 382 | SAM1 | 97 | 382 | methionine adenosyltransferase |
| nonSc-SSU1 | 1377 | 458 | SSU1 | 78 | 457 | sulfite transporter |

### Example 8

### Analysis of Chromosome Structure by DNA Array-Based Comparative Genomic Hybridization and PCR

[0452] Preparation of genomic DNA from yeast was carried out using Qiagen Genomic Tip 100/G (#10243: manufactured by Qiagen) and Qiagen Genomic DNA Buffer Set (#19060: manufactured by Qiagen) according to-the manuals attached to the kits. The DNA (10 μg) was digested with DNase I (manufactured by Invitrogen) according to a method of Winzeler,. et al. “Science, volume 281, pages 1194 to 1197 (1998)”, biotinylated by a terminal transferase (manufactured by Roche) and hybridized to a DNA array (Affymetrix Gene Chip Yeast Genome S98 Array: produced by Affymetrix). Hybridization and detection of signal intensity of array were carried out using a Gene Chip Analysis Basic System manufactured by Affymetrix.

[0453] The signal of each probe hybridized with the DNA of strain 34/70 is normalized to that of the haploid laboratory yeast strain S288C using an analysis soft ware (Microarray Suite 5.0: manufactured by Affymetrix) and shown as signal log ratio (2ⁿ). Signal log ratios were lined following gene order in each chromosome using a spreadsheet program (Microsoft Excel 2000) and the signal log ratios are shown in bar graphs as shown in FIG. 5. The non-Sc type genes do not hybridize to the S. cerevisiae array, therefore, the Sc type gene dosage affect the signal log ratio and the points where the signal log ratios show vigorous changes are considered to be translocation sites between Sc type and non-Sc type chromosome.

[0454] On the basis of genome sequence of strain 34/70 determined by a shotgun method, the chimera chromosome structure was confirmed by PCR where two pairs of primers having DNA sequences in which one side is Sc type while the other side is a non-Sc type (XVI-1(L)cer-95894 (SEQ ID NO: 9)/XVI-1(R)nonSc-106302rv (SEQ ID NO: 10) and XVI-2(L)cer-859737 (SEQ ID NO: 11)/XVI-2(R)nonSc-864595rv (SEQ ID NO: 12) were designed and the genomic DNA derived from strain 34/70 was used as a template. Two examples of translocation of chromosome XVI are shown as follows.

[0455] The PCR was carried out using Takara LA Taq™ and a buffer attached thereto in accordance with the attached manual by a Takara PCR Thermal Cycler SP.

[0456] As a result of the PCR, it was confirmed by a 0.8% agarose electrophoresis that, a DNA fragment in the predicted length was amplified from strain 34/70, while when genomic DNA of the experimental strain S. cerevisiae X2180-1A was used as a template for the PCR, amplification. of the DNA fragment was not detected. Furthermore, when DNA sequence of both ends of the DNA fragment amplified from strain 34/70 was confirmed, it was consistent with the genome sequence determined by a shotgun method and it was confirmed that, within such a region, translocation between Sc type and non-Sc type chromosome took place.

[0457] From the above result, it is estimated that at least two kinds of chromosomes were present in the chromosomeXVI as shown in FIG. 6. According to the same techniques, ligation between Sc chromosome and non-Sc chromosome (or inverse thereof) or, in other words, the region where the existence of chimera chromosome structure was suggested was confirmed. Such chimera chromosome structure of the Sc chromosome and non-Sc chromosome was confirmed at least 13 places in the total chromosomes of strain 34/70 (FIG. 1).

[0458] As a result of genome analysis, it was found that chromosome structure of bottom fermenting yeast was very complicated and there were at least 37 kinds of chromosomes in strain 34/70.

### Example 9

### Cloning of SSU1 Genes of Strain 34/70

[0459] The shotgun clone containing non-ScSSU1 gene was retrieved using a comparative database obtained in Example 6. There was SSS103_G08 which comprises about 2.4 kb of fragment containing full-length of non-ScSSU1 ORF, where identity of forward and reverse sequence of shotgun clone to those of S. cerevisiae were 62.9% and 82.9%, respectively.

[0460] SSS103-G08 was selected from a library of genomic DNA, then full length of non-ScSSU1 was prepared by PCR. Synthetic DNAs of SacI-non-Sc-SSU1_for1 (SEQ ID NO: 13) and Bg1II-non-Sc-SSU1_rv1460 (SEQ ID NO: 14) were used as primers. As a result of such a combination, base numbers 1 to 1460 of nonScSSU1 was amplified to give a SacI-Bg1II fragment of about 1.5 kb.

[0461] With regard to an ScSSU1 gene, full length of gene was obtained by PCR using a primer pair designed on the basis of the information of SGD using a genomic DNA of strain 34/70 as a template. Synthetic DNAs of SacI-ScSSU1_for1 (SEQ ID NO: 15) and Bg1II-ScSSU1_rv1406 (SEQ ID NO: 16) were used as primers. As a result of such a combination, base numbers 1 to 1406 of ScSSU1 gene was amplified to give a SacI-Bg1II fragment of about 1.4 kb.

[0462] ScSSU1 and non-ScSSU1 gene obtained as above were inserted using TA cloning kit (Invitrogen) into pCR 2.1-TOPO vector attached to the kit, and they were named TOPO/ScSSU1 and TOPO/non-ScSSU1, respectively. Sequences of the resulting ScSSU1 and non-ScSSU1 genes were confirmed by a method of Sanger “F. Sanger, Science, volume 214, page 1215, 1981” (FIG. 10).

### Example 10

### Disruption of each SSU1 Gene

[0463] According to a method mentioned in the document “Goldstein, et al., Yeast, volume 15, page 1541 (1999)”, DNA fragment for gene disruption was prepared by PCR using a plasmid containing a drug-resistance marker (pFA6a (G418^{r}), pAG 25 (nat1)) as a template. As primers for the PCR, non-Sc-SSU1_for (SEQ ID NO: 17)/non-Sc-SSU1_rv (SEQ ID NO: 18) were used for disruption of non-ScSSU1 gene, while for disruption of ScSSU1 gene, ScSSU1_for (SEQ ID NO: 19)/ScSSU1_rv (SEQ ID NO: 20) were used. For disruption of non-ScSSU1 gene, a plasmid pPGAPAUR (AUR1-C) and primers non-Sc-SSU1_for+PGAPAUR (SEQ ID NO: 21)/non-Sc-SSU1-rv+AURI-C (SEQ ID NO: 22) were further used. As such, two and three kinds of DNA fragments were prepared for ScSSU1 and non-ScSSU1 gene disruption, respectively.

[0464] The bottom fermenting yeast BH 96 was transformed using the DNA fragments for gene disruption prepared with above method. The transformation was carried out by a method mentioned in the Japanese Patent Laid-Open Gazette No. H07/303,475 and concentrations of the drugs were 300 mg/L for geneticin, 50 mg/L for nourseothricin and 1 mg/L for aureobasidin A.

[0465] With regard to the transformants prepared, gene disruption was confirmed by Southern analysis. Firstly, the genomic DNA extracted from parental strain and disruptant was subjected to restriction enzyme treatment (at 37° C. or 18 hours) using NcoI for the confirmation of ScSSU1 gene disruption and HindIII for the confirmation of non-ScSSU1 gene disruption, and then fractionated by 1.5% agarose gel electrophoresis and transferred to a membrane. After that, hybridization was carried out (at 55° C. for 18 hours) with a probe specific to the ScSSU1 or non-ScSSU1 following a protocol of the Alkphos Direct Labelling Reagents (Amersham) and signals were detected by CDP-Star.

[0466] Each of the strains where gene disruption was confirmed was named as follows.
[0467] Sc-1 (ScSSU1/Scssu1::G418^{r})
[0468] Sc-2 (Scssu1::G418^{r}/Scssu1::natl)
[0469] non-Sc-1 (non-ScSSU1/non-ScSSU1/non-Scssu1::G418^{r})
[0470] non-Sc-2 (non-ScSSU1/non-Scssu1: :G418^{r}/non-Scssu1: natl)
[0471] non-Sc-3 (non-Scssu1::G418^{r}/non-Scssu1::nat1/non-Scssu1::AUR1-C)

### Example 11

### Quantitative Analysis of Sulfite Production in a Fermentation Test

[0472] Fermentation test using parental strain and disruptant Sc-1 to non-Sc-3 prepared in Example 10 was carried out under the following condition.

[0473] Original extract: 12.75%

[0474] Fermentation scale: 2 liters

[0475] Dissolved oxygen concentration: about 9 ppm

[0476] Fermentation temperature: 15° C.

[0477] Pitching rate: 10 g of wet yeast cells/2 L of wort

[0478] Wort is periodically sampled and monitored in cell growth (OD 600) (FIG. 7-(a)), apparent extract (FIG. 7-(b)) and sulfite concentration (FIG. 7-(c)). Quantitative analysis of sulfite in wort was carried out in such a method that it was captured in a hydrogen peroxide solution by means of distillation in an acidic condition and subjected to titration with an alkali (Revised Method for BCOJ Beer Analysis by the Brewing Society of Japan).

[0479] As a result, sulfite production in the wort by ScSSU1 disruptant was nearly same as that by parental strain, while it significantly decreased by non-ScSSU1 disruptant. It was suggested that non-ScSSU1 gene which is specific to bottom fermenting yeast greatly contributes to sulfite production in wort.

[0480] At the same time, growth rate and extract-consuming rate significantly were decreased in the non-ScSSU1 disruptant, and it supported that excessive sulfite in cells caused inhibition of cell growth.

### Example 12

### Overexpression of each SSU1 Gene

[0481] From the plasmid TOPO/non-ScSSU1 mentioned in Example 9, a fragment of about 1.5 kb including the full length of non-ScSSU1 ORF was excised by a treatment with a restriction enzyme (SacI-Bg1II). Then this fragment was inserted into a plasmid pNI-NUT which was similarly treated with a restriction enzyme (SacI-Bg1II) to construct a non-ScSSU1 overexpression vector pYI-non-ScSSU1 The vector pNI-NUT contains URA3 as a homologous recombination site and nourseothricin-resistance gene (nat1) and ampicillin-resistance gene (Amp^{r}) as selective markers. On the other hand, the ScSSU1 overexpression vector pNI-ScSSU1 has a structure wherein the non-ScSSU1 gene of the above-mentioned pYI-non-ScSSU1 has been substituted with the SSU1-R of about 2 kb derived from S. cerevisiae “J. Ferment. Bioeng., volume 86, page 427 (1998)”. For overexpression of each SSU1 gene, promoter and terminator of glyceraldehyde-3-phosphate dehydrogenase gene (TDH3) were used.

[0482] Bottom fermenting yeast BH225 was transformed by a overexpression vector prepared in the above-mentioned method. Transformation was carried out by a method mentioned in the Japanese Patent Laid-Open Gazette No. H07/303,475 and selected on YPD plate medium containing 50 mg/L of nourseothricin.

[0483] Confirmation of the overexpression was carried out by RT-PCR. Extraction of total RNA was carried out using an RNeasy Mini Kit (Qiagen), according manual of “for total RNA isolation from yeast” attached the kit. ScSSU1_for331 (SEQ ID NO: 23)/ScSSU1_{—}982rv (SEQ ID NO: 24) were used as ScSSU1-specific primers; non-ScSSU1_for329 (SEQ ID NO: 25)/non-ScSSU1_{—}981rv (SEQ ID NO: 26) were used as non-ScSSU1-specific primers; and PDA1_for1 (SEQ ID NO: 27)/PDA1_{—}730rv (SEQ ID NO: 28) were used as specific primers for constitutively expressed gene PDA1 used as an internal standard. PCR product was fractionated by 1.2% agarose electrophoresis, stained with an ethidium bromide solution and signal value of each SSU1 gene of transformant was normalized with a signal value of PDA 1 and compared with that of the parental strain. The overexpressed strains confirmed as such were named as ScSSU1 overexpressed strain and non-ScSSU1 overexpressed strain.

### Example 13

### Quantitative Analysis of Sulfite Production in a Fermentation Test

[0484] Fermentation test using-parental strain and each of SSU1 overexpressed strain obtained in the Example 12 was carried out under the following condition.

[0485] Original extract: 12.83%

[0486] Fermentation scale: 2 liters

[0487] Dissolved oxygen concentration: about 9 ppm

[0488] Fermentation temperature: 12° C.

[0489] Pitching rate: 10 g of wet yeast cells/2 L of wort

[0490] As same as in Example 11, wort is periodically sampled and monitored in cell growth (OD 600) (FIG. 8-(a)), apparent extract (FIG. 8-(b)) and sulfite concentration (FIG. 8-(c)). With regard to the sulfite production, it was only somewhat higher in Sc SSU1 overexpressed strain (19 ppm at the end of the fermentation) as compared with that of the parental strain (12 ppm at the same stage), while non-Sc SSU1 over expressed strain showed a significant increase (45 ppm at the same stage). At the same time, there was no difference in the growth rate and in the extract-consuming rate between the parental strain and the overexpressed strains.

[0491] From the above result, by overexpression of the gene encoding the sulfite-discharging pump specific to the bottom fermenting yeast shown in the present invention, it is possible to increase sulfite concentration in beer without changing the fermentation process and the fermentation period. As a result, it is now possible to produce an alcoholic beverage with excellent flavor stability and a longer quality preservation period.

### Example 14

### Cloning of MET14 Gene of Strain 34/70

[0492] DNA sequence of non-Sc MET14 gene was retrieved from the comparative database obtained in Example 6. A shotgun clone SSS 134_{—}021 containing about 1.9 kb (full-length) of non-Sc MET14 gene was obtained; its forward and reverse DNA sequence identity to S. cerevisiae were 79.0% and 56.0%, respectively.

[0493] The shotgun clone 134_{—}021 was selected from shotgun library and a full length of non-Sc MET14 gene was obtained by PCR. As a primer pair, synthetic DNAs of SacI-nonSc-MET14_for-21 (SEQ ID NO: 29) and BamHI-nonSc-MET14_rv618 (SEQ ID NO: 30) as shown in Table 3 were used. As a result of using such a pair of primers, a non-Sc MET14 gene (about 0.6 kb) embraced by SacI and BamHI restriction sites was obtained.

TABLE 3

| SEQ ID No. | Sequence Name | 5′-Base Sequence-3′ |
|---|---|---|
| 5 | M13_for | agtcacgacg ttgta |
| 6 | M13_rv | caggaaacag ctatgac |
| 7 | SS-cosF. 1 | aggcgtatca cgaggccctt tc |
| 8 | SS-cosR. 1 | cttatcgatg ataagcggtc aaacatgag |
| 9 | XVI-1 (L) cer-95894 | cgcaagctcc gtacgttcaa cattcttatg aacggc |
| 10 | XVI-1 (R) nonSc-106302rv | gcatcatcgt cgtgatcctt ctttggcaaa tgcagg |
| 11 | XVI-2 (L) cer-859737 | gcgggtattt tgatggtaaa tctacaagcc ctcggc |
| 12 | XVI-2 (R) nonSc-864595rv | cccagacaca gtttccagta tcatcctcgc agaac |
| 13 | SacI-nonScSSU1_for1 | gagctcatgg tcgctagttg gatgct |
| 14 | BglII-nonScSSU1_rv1460 | agatctcagc ttcagcccaa tccatt |
| 15 | SacI-ScSSU1_for1 | gagctcatgg ttgccaattg ggtact |
| 16 | BglII-ScSSU1_rv1406 | agatctctcc tacatgaaat gcttgc |
| 17 | nonScSSU1_for | atggtcgcta gttggatgct cactgccaca agggatttca |
| | | accctttcat atcgaatatt ctgtacagct gtttgtcatg |
| | | gttatggggg tcggtatttc ccttgacagt cttgacgtgc |
| 18 | nonScSSU1_rv | tgttaaatat gtactatcga tagccgagtt tgattcctcc |
| | | acactttcga acagtcttct ccgtcccttc ctctgataaa |
| | | tgctgttgaa aggagaattg cgcacttaac ttcgcatctg |
| 19 | ScSSU1_for | atggttgcca attgggtact tgctcttacg aggcagtttg |
| | | accccttcat gtttatgatg gtcatgggtg tcggcatttc |
| | | atcgaatatt ctatatagct ccttgacagt cttgacgtgc |
| 20 | ScSSU1_rv | ttatgctaaa cgcgtaaaat ctagagccga gtttgattct |
| | | tccacgcttt caatgctgtt atacggagaa actgtcgtct |
| | | tttccgtacc tgactctgaa cgcacttaac ttcgcatctg |
| 21 | nonScSSU1_for + pGAPAUR | atggtcgcta gttggatgct cactgccaca agggatttca |
| | | accctttcat gtttgtcatg gttatggggg tcggtatttc |
| | | atcgaatatt ctgtacagct ccggagctta ccagttctca |
| 22 | nonScSSU1_rv + AUR1-C | tgttaaatat gtactatcga tagccgagtt tgattcctcc |
| | | acactttcga tgctgttgaa aggagaattg acagtcttct |
| | | ccgtcccttc ctctgataaa tcgactctag aggatccaga |
| 23 | ScSSU1_for 331 | tcgaaagcga acacgacgaa |
| 24 | ScSSU1_982rv | cgacagaaat cacggtgaaa a |
| 25 | nonScSSU1_329 | tgtcacaaaa atttaccacg ac |
| 26 | nonScSSU1_981rv | aagggaaatt accgtaaaga ag |
| 27 | PDA1_for1 | atgtttgtcg cacctgtatc t |
| 28 | PDA1_730rv | gattagaggc accatcac |
| 29 | SacI-nonSc-MET14_for-21 | ctcgagctct cgtgaaattc attgaaacaa atg |
| 30 | BamHI-nonSc-MET14_rv618 | ggatccttat aagatttata gatgcttccg |
| 31 | SacI-ScMET14_for | ctcgagctca gaaaagttgg aattatttct cca |
| 32 | BamHI-ScMET14_rv | ggatccaatg tacagtaatc ggtcaaatta |

[0494] With regard to an Sc MET14 gene, a full length of the structural gene was obtained by PCR using a primer pair designed on the basis of the information of SGD and using genomic DNA of strain 34/70 as a template. Synthetic DNAs of SacI-ScMET14_for (SEQ ID NO: 31) and BamHI-ScMET14_rv (SEQ ID NO: 32) were used as primers. As a result of using such a pair of primers, Sc MET14 gene (about 0.6 kb) embraced by SacI and BamHI restriction sites was obtained.

[0495] The Sc MET14 and non-Sc MET14 genes obtained as above were inserted using a TA cloning kit (manufactured by Invitrogen) into pCR 2.1-TOPO vector attached to the kit, and they were named TOPO/ScMET14 and TOPO/nonSc-MET14, respectively.

[0496] DNA sequences of the resulting Sc MET14 and non-Sc MET14 genes-were checked by a method by Sanger “Science, volume 214, page 1205 (1981)” (FIG. 11).

### Example 15

### Overexpression of each MET14 Gene in Sc SSU1 Overexpressed Strain

[0497] A fragment of about 0.6 kb containing Sc MET14 or non-Sc MET14 mentioned in Example 14 was inserted into a multi-cloning site of a expression vector pUP3GLP (Japanese Patent Laid-Open Gazette No. 2000/316,559) to construct overexpression vectors pUP3Sc MET14 and pUP3nonSc-MET14 in which each MET14 gene was expressed under control of glyceraldehyde-3-phosphate dehydrogenase promoter and terminator. On the other hand, top fermenting yeast, strain KN009F, was transformed by an Sc SSU1 overexpression vector pNI-SSU1 mentioned in Example 12 to prepare strain FOY227 which is an Sc SSU1 overexpressed strain. The strain FOY227 was transformed by the above pUP3ScMET14 and pUP3nonSc-MET14 to prepare strain FOY306 and strain FOY 307 in which Sc MET14 and non-Sc MET14, together with Sc SSU1, are overexpressed, respectively.

### Example 16

### Quantitative Analysis of Sulfite Production in a Fermentation Test

[0498] Fermentation tests were carried out under the following condition using strains prepared in Example 15; strain FOY227 which is an Sc SSU1 overexpressed strain, strain FOY306 which is an Sc MET14 overexpressed strain in strain FOY227, strain FOY307 which is a non-Sc MET14 overexpressed strain in strain FOY227and the parental strain KN009 F.

[0499] Original extract: 12.84%

[0500] Fermentation scale: 1.5 liters

[0501] Dissolved oxygen concentration: about 9 ppm

[0502] Fermentation temperature: 25° C. at all times

[0503] Pitching rate: 7.5 g of wet yeast cells/1.5 L of wort

[0504] In the same way Example 11, wort is periodically sampled and monitored in cell growth (OD 600), apparent extract and sulfite concentration. With regard to the yeast growth and the consumed amount of extract, there was no difference among the strains. However, with regard to the sulfite production, it was only somewhat higher in Sc SSU1 overexpressed strain FOY227 (3.4 ppm at the end of the fermentation),and Sc MET14 and Sc SSU1 overexpressed strain FOY306 (6.4 ppm at the same stage) as compared with that of the parental strain KN009F(0.32 ppm at the same stage), while non-Sc MET14 and Sc SSU1 overexpressed strain FOY307 showed a significant increase (16.6 ppm at the same stage) as shown in FIG. 9.

[0505] From the above results, it was found that overexpression of the gene encoding the adenylyl sulfate kinase specific to the bottom fermenting yeast shown in the present invention was effective to increase sulfite concentration in beer without changing the fermentation process and the fermentation period. As a result, it is now possible to produce an alcoholic beverage with excellent flavor stability and a longer quality preservation period.

### Example 17

### Production of the Bottom Fermenting Yeast DNA Array

[0506] DNA array of bottom fermenting yeast was produced based on the DNA sequence information of the ORFs obtained in the above (h) and intergenic DNA sequences located between ORFs deduced from whole genome sequence of strain 34/70.

Production of the DNA Array

[0507] Based on the DNA sequence information from following four groups, PM probe (Perfect Match Probe; 25 base long) which is unique against whole genome sequence of the bottom fermenting yeast was designed using GeneChip® (Affymetrix) technology; (1) 15712 regions from the whole genome sequence information of strain 34/70, (2) 403 S. cerevisiae ORFs represented from SEQ ID NOS: 190811 to 191213 from SGD which are not identified as Sc type ORFs in strain 34/70, (3) 64 DNA sequences of genes represented from SEQ ID NOS: 195588 to 195651 used as internal standard.

[0508] In order to obtain quantitative and reproducible information, 8 to 11 probes for each region of (1) and (2), and 20 to 51 probes for each region of (3) were designed. To further increase the sensitivity and specificity of detection, mismatch probe (MM probe) that has sequences identical to PM probe with the exception of one mismatched base, which substitutes the complementary base (adenine (A) to thymine (T) and vice versa, or guanine (G) to cytosine (C) and vice versa) at the central position (i.e. base 13), was also designed.

[0509] All of designed PM and MM probes were synthesized and packed (manufactured by Affymetrix) to produce the DNA array using GeneChip® technology.

Group (1) Consists of:

[0510] A) 6204 DNA sequences of non-Sc type ORFs represented from SEQ ID NOS: 33 to 6236;

[0511] B) 7448 DNA sequences of Sc type ORFs represented from SEQ ID NOS: 75337 to 82784;

[0512] C) 28 DNA sequences of mitochondrial ORFs from 34/70 strain represented from SEQ ID NOS: 166154 to 166181;

[0513] D) 553 DNA sequences represented from SEQ ID NOS: 166490 to 167042, which have not been identified as the above ORFs but have significant similarity (E value <=10e-7) to the proteins of S. cerevisiae using NCBI-BlastX homology searching,

[0514] E) 1479 DNA sequences represented from SEQ ID NOS: 173125 to 174603, which have not been identified as the above A) or B) but have significant similarity (E-value <=10e⁻⁷) to the proteins of S. cerevisiae using NCBI-BlastP homology searching.

[0515] E-value is an expected value for a possibility that a query sequence is found in a data base by chance. For example, E-value 10 means that 10 sequences can be found accidentally. The smaller the E-value is, the lesser is the chance of finding the sequence by chance, and thus meaning that similarity between the found sequence in data base and the query sequence is significant.

[0516] The E-value as the result of homology searching such as NCBI-BLAST can be significant less than 10⁻⁷, preferably less than 10⁻¹⁰, more preferably less than 10⁻²⁰. The function can be assigned as having the least value with the DNA sequences of the ORFs as the result of the homology searching.

Group (2) Consists of:

[0517] YBL108C-A, YBR074W, YFL061W, YIL165C, YGR291C, YJR052W, YDR223W, YAL025C, YAR073W, YFL057C, YLL015W, YJR105W, YLR299C-A, YNR073C, YDL246C, YHL049C, YAR010C, YKL096W, YBL026W, YMR230W, YAL037C-A, YAL037C-B, YAL037W, YAL063C-A, YAL064C-A, YAL064W, YAL065C, YAL068W-A, YAL069W, YAR009C, YAR020C, YAR042W, YAR047C, YAR053W, YAR060C, YAR061W, YAR062W, YBL027W, YBL040C, YBLO68W-A, YBL101W-B, YBL109W, YBL112C, YBR092C, YBR191W-A, YBR219C, YCL019W, YCL029C, YCL065W, YCL066W, YCL068C, YCL069W, YCL073C, YCL074W, YCL075W, YCL076W, YCR035C, YCR036W, YCR038W-A, YCR101C, YCR104W, YCR105W, YCR106W, YCR107W, YCR108C, YDL003W, YDL037C, YDL064W, YDL073W, YDL094C, YDL095W, YDL096C, YDL136W, YDL143W, YDL152W, YDL191W, YDL200C, YDL201W, YDL247W-A, YDL248W, YDR014W, YDR015C, YDR034C-D, YDR039C, YDR045C, YDR098C-B, YDR160W, YDR210C-D, YDR210W-B, YDR215C, YDR225W, YDR261C-D, YDR261W-B, YDR292C, YDR302W, YDR304C, YDR305C, YDR342C, YDR344C, YDR364C, YDR365W-B, YDR427W, YDR433W, YDR471W, YDR510C-A, YDR543C, YDR544C, YEL012W, YEL075W-A, YER039C-A, YER046W-A, YER056C-A, YER060W-A, YER074W, YER138C, YER187W, YER188C-A, YER190C-A, YFL002W-A, YFL014W, YFL019C, YFL020C, YFL030W, YFL031W, YFL051C, YFL052W, YFL053W, YFL054C, YFL055W, YFL056C, YFL063W, YFL065C, YFL066C, YFL067W, YFR012W-A, YGL028C, YGL041C, YGL052W, YGL210W-A, YGL259W, YGL262W, YGL263W, YGR034W, YGR038C-B, YGR089W, YGR107W, YGR109W-A, YIL082W-A, YGR122C-A, YGR146C, YGR148C, YGR161W-B, YGR182C, YGR183C, YGR271C-A, YGR290W, YGR295C, YHL009W-A, YHL009W-B, YHL015W-A, YHL046W-A, YHL047C, YHL048C-A, YHL048W, YHR032C-A, YHR032W-A, YHR039C-A, YHR043C, YHR070C-A, YHR071C-A, YHR071W, YHR141C, YHR165W-A, YHR179W, YHR180C-B, YHR180W-A, YHR182W, YHR193C, YHR193C-A, YHR207C, YHR211W, YHR213W-A, YHR216W, YHR217C, YHR218W-A, YIL029C, YIL052C, YIL069C, YIL148W, YIL171W, YIL174W, YIL176C, YIR018C-A, YIR041W, YIR042C, YIR043C, YIR044C, YJL012C-A, YJL014W, YJL062W-A, YJL136C, YJL175W, YJL222W-B, YJR024C, YJR027W, YJR032W, YJR053W, YJR054W, YJR094W-A, YJR107W, YJR110W, YJR111C, YJR140W-A, YJR151C, YJR152W, YJR153W, YJR154W, YJR155W, YJR162C, YKL018W, YKL020C, YKL044W, YKL224C, YKL225W, YKR012C, YKR013W, YKR017C, YKR018C, YKR019C, YKR020W, YKR035C, YKR036C, YKR040C, YKR041W, YKR042W, YKR052C, YKR053C, YKR057W, YKR062W, YKR094C, YKR102W, YKR103W, YKR104W, YLL014W, YLL030C, YLL037W, YLL038C, YLL043W, YLL065W, YLR029C, YLR030W, YLR062C, YLR098C, YLR099W-A, YLR107W, YLR139C, YLR140W, YLR142W, YLR144C, YLR145W, YLR154C-G, YLR154W-A, YLR154W-B, YLR154W-C, YLR154W-E, YLR154W-F, YLR155C, YLR156W, YLR157C-B, YLR157W-C, YLR162W, YLR205C, YLR207W, YLR209C, YLR227W-B, .YLR236C, YLR237W, YLR238W, YLR245C, YLR251W, YLR271W, YLR278C, YLR287C-A, YLR305C, YLR306W, YLR311C, YLR317W, YLR338W, YLR344W, YLR345W, YLR354C, YLR364W, YLR380W, YLR401C, YLR402W, YLR410W-B, YLR411W, YLR412C-A, YLR412W, YLR413W, YLR448W, YLR460C, YLR461W, YLR463C, YLR465C, YML003W, YML039W, YML073C, YMR087W, YMR143W, YMR175W-A, YMR247W-A, YMR268W-A, YMR324C, YMR325W, YNL020C, YNL035C, YNL054W-B, YNL243W, YNR034W-A, YNR075C-A, YNR077C, YOL038C-A, YOL053W, YOL101C, YOL103W-B, YOL162W, YOL163W, YOL164W, YOL164W-A, YOL165C, YOL166C, YOL166W-A, YOR050C, YOR096W, YOR101W, YOR192C-B, YOR192C-C, YOR225W, YOR235W, YOR343W-B, YOR366W, YOR381W-A, YOR382W, YOR383C, YOR384W, YOR385W, YOR386W, YOR387C, YOR389W, YPL003W, YPL019C, YPL023C, YPL036W, YPL048W, YPL055C, YPL060C-A, YPL175W, YPL194W, YPL197C, YPL257W-B, YPR002C-A, YPR008W, YPR014C, YPR028W, YPR043W, YPR048W, YPR087W, YPR094W, YPR108W, YPR137C-B, YPR161C, YPR162C, YPR163C, YPR164W, YPR165W, YPR166C, YPR167C, YPR168W, YPR169W, YPR169W-A, YPR170C, YPR170W-A, YPR171W, YPR172W, YPR173C, YPR174C, YPR175W, YPR176C, YPR177C, YPR178W, YPR179C, YPR180W, YPR181C, YPR182W, YPR183W, YPR184W, YPR185W, YPR186C, YPR187W, YPR188C, YPR189W, and YPR190C Group (3) consists of (GenBank Accession No.):

[0518] AFFX-BioB-5_at (J04423.1), AFFX-BioB-M_at (J04423.1), AFFX-BioB-3_at (J04423.1), AFFX-BioC-5_at (J04423.1), AFFX-BioC-3_at (J04423.1), AFFX-BioDn-5_at (J04423.1), AFFX-BioDn-3_at (J04423.1), AFFX-CreX-5_at (X03453.1), AFFX-CreX-3_at (X03453.1), AFFX-DapX-5_at: (L38424.1), AFFX-DapX-M_at (L38424.1), AFFX-DapX-3_at (L38424.1), AFFX-LysX-5_at (X17013.1), AFFX-LysX-M_at (X17013.1), AFFX-LysX-3_at (X17013.1), AFFX-PheX-5_at (M24537.1), AFFX-PheX-M_at (M24537.1), AFFX-PheX-3_at (M24537.1), AFFX-ThrX-5_at (X04603.1), AFFX-ThrX-M_at (XQ4603.1), AFFX-ThrX-3_at (X04603.1), AFFX-TrpnX-5_at (K01391.1), AFFX-TrpnX-M_at (K01391.1), AFFX-TrpnX-3_at (K01391.1), AFFX-r2-Ec-bioB-5_at (J04423.1), AFFX-r2-Ec-bioB-M_at (J04423.1),AFFX-r2-Ec-bioB-3 at (J04423.1), AFFX-r2-Ec-bioC-5 at (J04423.1), AFFX-r2-Ec-bioC-3_at (J04423.1),AFFX-r2-Ec-bioD-5_at (J04423.1), AFFX-r2-Ec-bioD-3_at (J04423.1), AFFX-r2-P1-cre-5_at (X03453.1), AFFX-r2-P1-cre-3_at (X03453.1), AFFX-r2-Bs-dap-5_at (L38424.1), AFFX-r2-Bs-dap-M_at (L38424.1), AFFX-r2-Bs-dap-3_at (L38424.1), AFFX-r2-Bs-dap-3_at (X17013.1), AFFX-r2-Bs-lys-5_at (X17013.1), AFFX-r2-Bs-lys-M_at (X17013.1), AFFX-r2-Bs-phe-5_at (M24537.1), AFFX-r2-Bs-phe-M_at (M24537.1), AFFX-r2-Bs-phe-3_at (M24537.1), AFFX-r2-Bs-thr-5_s_at (X04603.1), AFFX-r2-Bs-thr-M_s_at (X04603.1), AFFX-r2-Bs- thr-3_s_at (X04603.1), AFFX-YFL039CS_at (V01288.1), AFFX-YFL039CM_at (V01288.1), AFFX-YFL039C3_at (V01288.1), AFFX-YER148w5_at (X16860.1), AFFX-YER148wM_at (X16860.1),AFFX-YER148w3_at (X16860.1), AFFX-YER022w5_at (L12026.1), AFFX-YER022wM_at (L12026.1), AFFX-YER022w3_at (L12026.1), AFFX-18srRnaa_at (Z75578.1), AFFX-18srRnab_at (Z75578.1), AFFX-18srRnac_at (Z75578.1), AFFX-18srRnad_at (Z75578.1), AFFX-18srRnae_at (Z75578.1), AFFX-25srRnaa_at (J01355.1), AFFX-25srRnab_at (J01355.1), AFFX-25srRnac_at (J01355.1), AFFX-25srRnad_at (J01355.1) and AFFX-25srRnae_at (J01355.1).

[0519] The probes from 6204 DNA sequences of non-Sc type ORFs described as above (1-A) were as follows:

[0520] The probes having the nucleotide sequence represented by SEQ ID NOS: 6237, 6238, 6239, 6240, 6241, 6242, 6243, 6244, 6245, 6246, 6247 were selected from the ORFs having the nucleotide sequence represented by SEQ ID NO: 33.

[0521] The probes having the nucleotide sequence represented by SEQ ID NOS: 6248, 6249, 6250, 6251, 6252, 6253, 6254, 6255, 6256, 6257, 6258 were selected from the ORFs having the nucleotide sequence represented by SEQ ID NO: 34.

[0522] The probes having the nucleotide sequence represented by SEQ ID NOS: 6259, 6260, 6261, 6262, 6263, 6264, 6265, 6266, 6267, 6268, 6269 were selected from the ORFs having the nucleotide sequence represented by SEQ ID NO: 35.

[0523] The probes having the nucleotide sequence represented by SEQ ID NOS: 6270, 6271, 6272, 6273, 6274, 6275, 6276, 6277, 6278, 6279, 6280 were selected from the ORFs having the nucleotide sequence represented by SEQ ID NO: 36.

[0524] The probes having the nucleotide sequence represented by SEQ ID NOS: 6281, 6282, 6283, 6284, 6285, 6286, 6287, 6288, 6289, 6290, 6291 were selected from the ORFs having the nucleotide sequence represented by SEQ ID NO: 37.

[0525] The probes having the nucleotide sequence represented by SEQ ID NOS: 6292, 6293, 6294, 6295, 6296, 6297, 6298, 6299, 6300, 6301, 6302 were selected from the ORFs having the nucleotide sequence represented by SEQ ID NO: 38.

[0526] The probes having the nucleotide sequence represented by SEQ ID NOS: 6303, 6304, 6305, 6306, 6307, 6308, 6309, 6310, 6311, 6312, 6313 were selected from the ORFs having the nucleotide sequence represented by SEQ ID NO: 39.

[0527] The probes having the nucleotide sequence represented by -SEQ ID NOS: 6314, 6315, 6316, 6317, 6318, 6319, 6320, 6321, 6322, 6323, 6324 were selected from the ORFs having the nucleotide sequence represented by SEQ ID NO: 40.

[0528] The probes having the nucleotide sequence represented by SEQ ID NOS: 6325, 6326, 6327, 6328, 6329, 6330, 6331, 6332, 6333, 6334, 6335 were selected from the ORFs having the nucleotide sequence represented by SEQ ID NO: 41.

[0529] The probes having the nucleotide sequence represented by SEQ ID NOS: 6336, 6337, 6338, 6339, 6340, 6341, 6342, 6343, 6344, 6345, 6346 were selected from the ORFs having the nucleotide sequence represented by SEQ ID NO: 42.

[0530] The probes having the nucleotide sequence represented by SEQ ID NOS: 6347, 6348, 6349, 6350, 6351, 6352, 6353, 6354, 6355, 6356, 6357 were selected from the ORFs having the nucleotide sequence represented by SEQ ID NO: 43.

[0531] The probes having the nucleotide sequence represented by SEQ ID NOS: 6358, 6359, 6360, 6361, 6362, 6363, 6364, 6365, 6366, 6367, 6368 were selected from the ORFs having the nucleotide sequence represented by SEQ ID NO: 44.

[0532] The probes having the nucleotide sequence represented by SEQ ID NOS: 6369, 6370, 6371, 6372, 6373, 6374, 6375, 6376, 6377, 6378, 6379 were selected from the ORFs having the nucleotide sequence represented by SEQ ID NO: 45.

[0533] The probes having the nucleotide sequence represented by SEQ ID NOS: 6380, 6381, 6382, 6383, 6384, 6385, 6386, 6387, 6388, 6389, .6390 were selected from the ORFs having the nucleotide sequence.represented by SEQ ID NO: 46.

[0534] The probes having the nucleotide sequence represented by SEQ ID NOS: 6391, 6392, 6393, 6394, 6395, 6396, 6397, 6398, 6399, 6400, 6401 were selected from the ORFs having the nucleotide sequence represented by SEQ ID NO: 47.

[0535] The probes having the nucleotide sequence represented by SEQ ID NOS: 6402, 6403, 6404, 6405, 6406, 6407, 6408, 6409, 6410, 6411, 6412 were selected from the ORFs having the nucleotide sequence represented by SEQ ID NO: 48.

[0536] The probes having the nucleotide sequence represented by SEQ ID NOS: 6413, 6414, 6415, 6416, 6417, 6418, 6419, 6420, 6421, 6422, 6423 were selected from the ORFs having the nucleotide sequence represented by SEQ ID NO: 49.

[0537] The probes having the nucleotide sequence represented by SEQ ID NOS: 6424, 6425, 6426, 6427, 6428, 6429, 6430, 6431, 6432, 6433, 6434 were selected from the ORFs having the nucleotide sequence represented by SEQ ID NO: 50.

[0538] The probes having the nucleotide sequence represented by SEQ ID NOS: 6435, 6436, 6437, 6438, 6439, 6440, 6441, 6442, 6443, .6444, 6445 were selected from the ORFs having the nucleotide sequence represented by SEQ ID NO: 51.

[0539] The probes having the nucleotide sequence represented by SEQ ID NOS: 6446, 6447, 6448, 6449; 6450, 6451, 6452, 6453, 6454, 6455, 6456 were selected from the ORFs having the nucleotide sequence represented by SEQ ID NO: 52.

[0540] The probes having the nucleotide sequence represented by SEQ ID NOS: 6457, 6458, 6459, 6460, 6461, 6462, 6463, 6464, 6465, 6466, 6467 were selected from the ORFs having the nucleotide sequence represented by SEQ ID NO: 53.

[0541] The probes having the nucleotide sequence represented by SEQ ID NOS: 6468, 6469, 6470, 6471, 6472, 6473, 6474, 6475, 6476, 6477, 6478 were selected from the ORFs having the nucleotide sequence represented by SEQ ID NO: 54.

[0542] The probes having the nucleotide sequence represented by SEQ ID NOS: 6479, 6480, 6481, 6482, 6483, 6484, 6485, 6486, 6487, 6488, 6489 were selected from the ORFs having the nucleotide sequence represented by SEQ ID NO: 55.

[0543] The probes having the nucleotide sequence represented by SEQ ID NOS: 6490, 6491, 6492, 6493, 6494, 6495, 6496, 6497, 6498, 6499, 6500 were selected from the ORFs having the nucleotide sequence represented by SEQ ID NO: 56.

[0544] The probes having the nucleotide sequence represented by SEQ ID NOS: 6501, 6502, 6503, 6504, 6505, 6506, 6507, 6508, 6509, 6510, 6511 were selected from the ORFs having the nucleotide sequence represented by SEQ ID NO: 57.

[0545] The probes having the nucleotide sequence represented by SEQ ID NOS: 6512, 6513, 6514, 6515, 6516, 6517, 6518, 6519, 6520, 6521, 6522 were selected from the OREs having the nucleotide sequence represented by SEQ ID NO: 58.

[0546] The probes having the nucleotide sequence represented by SEQ ID NOS: 6523, 6524, 6525, 6526, 6527, 6528, 6529, 6530, 6531, 6532, 6533 were selected from the ORFs having the nucleotide sequence represented by SEQ ID NO: 59.

[0547] The probes having the nucleotide sequence represented by SEQ ID NOS: 6534, 6535, 6536, 6537, 6538, 6539, 6540, 6541, 6542, 6543, 6544 were selected from the ORFs having the nucleotide sequence represented by SEQ ID NO: 60.

[0548] The probes having the nucleotide sequence represented by SEQ ID NOS: 6545, 6546, 6547, 6548, 6549, 6550, 6551, 6552, 6553, 6554, 6555 were selected from the ORFs having the nucleotide sequence represented by SEQ ID NO: 61.

[0549] The probes having the nucleotide sequence represented by SEQ ID NOS: 6556, 6557, 6558, 6559, 6560, 6561, 6562, 6563, 6564, 6565, 6566 were selected from the ORFs having the nucleotide sequence represented by SEQ ID NO: 62.

[0550] The probes having the nucleotide sequence represented by SEQ ID NOS: 6567, 6568, 6569, 6570, 6571, 6572, 6573, 6574, 6575, 6576, 6577 were selected from the ORFs having the nucleotide sequence represented by SEQ ID NO: 63.

[0551] The probes having the nucleotide sequence represented by SEQ ID NOS: 6578, 6579, 6580, 6581, 6582, 6583, 6584, 6585, 6586, 6587, 6588 were selected from the ORFs having the nucleotide sequence represented by SEQ ID NO: 64.

[0552] The probes having the nucleotide sequence represented by SEQ ID NOS: 6589, 6590, 6591, 6592, 6593, 6594, 6595, 6596, 6597, 6598, 6599 were selected from the ORFs having the nucleotide sequence represented by SEQ ID NO: 65.

[0553] The probes having the nucleotide sequence represented by SEQ ID NOS: 6600, 6601, 6602, 6603, 6604, 6605, 6606, 6607, 6608, 6609, 6610 were selected from the ORFs having the nucleotide sequence represented by SEQ ID NO: 66.

[0554] The probes having the nucleotide sequence represented by SEQ ID NOS: 6611, 6612, 6613, 6614, 6615, 6616, 6617, 6618, 6619, 6620, 6621 were selected from the ORFs having the nucleotide sequence represented by SEQ ID NO: 67.

[0555] The probes having the nucleotide sequence represented by SEQ ID NOS: 6622, 6623, 6624, 6625, 6626, 6627, 6628, 6629, 6630, 6631, 6632 were selected from the ORFs having the nucleotide sequence represented by SEQ ID NO: 68.

[0556] The probes having the nucleotide sequence represented by SEQ ID NOS: 6633, 6634, 6635, 6636, 6637, 6638, 6639, 6640, 6641, 6642, 6643 were selected from the ORFs having the nucleotide sequence represented by SEQ ID NO: 69.

[0557] The probes having the nucleotide sequence represented by SEQ ID NOS: 6644, 6645, 6646, 6647, 6648, 6649, 6650, 6651, 6652, 6653, 6654 were selected from the ORFs having the nucleotide sequence represented by SEQ ID NO: 70.

[0558] The probes having the nucleotide sequence represented by SEQ ID NOS: 6655, 6656, 6657, 6658, 6659, 6660, 6661, 6662, 6663, 6664, 6665 were selected from the ORFs having the nucleotide sequence represented by SEQ ID NO: 71.

[0559] The probes having the nucleotide sequence represented by SEQ ID NOS: 6666, 6667, 6668, 6669, 6670, 6671, 6672, 6673, 6674, 6675, 6676 were selected from the ORFs having the nucleotide sequence represented by SEQ ID NO: 72.

[0560] The probes having the nucleotide sequence represented by SEQ ID NOS: 6677, 6678, 6679, 6680, 6681, 6682, 6683, 6684, 6685, 6686, 6687 were selected from the ORFs having the nucleotide sequence represented by SEQ ID NO: 73.

[0561] The probes having the nucleotide sequence represented by SEQ ID NOS: 6688, 6689, 6690, 6691, 6692, 6693, 6694, 6695, 6696, 6697, 6698 were selected from the ORFs having the nucleotide sequence represented by SEQ ID NO: 74.

[0562] The probes having the nucleotide sequence represented by SEQ ID NOS: 6699, 6700, 6701, 6702, 6703, 6704, 6705, 6706, 6707, 6708, 6709 were selected from the ORFs having the nucleotide sequence represented by SEQ ID NO: 75.

[0563] The probes having the nucleotide sequence represented by SEQ ID NOS: 6710, 6711, 6712, 6713, 6714, 6715, 6716, 6717, 6718, 6719, 6720 were selected from the ORFs having the nucleotide sequence represented by SEQ ID NO: 76.

[0564] The probes having the nucleotide sequence represented by SEQ ID NOS: 6721, 6722, 6723, 6724, 6725, 6726, 6727, 6728, 6729, 6730, 6731 were selected from the ORFs having the nucleotide sequence represented by SEQ ID NO: 77.

[0565] The probes having the nucleotide sequence represented by SEQ ID NOS: 6732, 6733, 6734, 6735, 6736, 6737, 6738, 6739, 6740, 6741, 6742 were selected from the ORFs having the nucleotide sequence represented by SEQ ID NO: 78.

[0566] The probes having the nucleotide sequence represented by SEQ ID NOS: 6743, 6744, 6745, 6746, 6747, 6748, 6749, 6750, 6751, 6752, 6753 were selected from the ORFs having the nucleotide sequence represented by SEQ ID NO: 79.

[0567] The probes having the nucleotide sequence represented by SEQ ID NOS: 6754, 6755, 6756, 6757, 6758, 6759, 6760, 6761, 6762, 6763, 6764 were selected from the ORFs having the nucleotide sequence represented by SEQ ID NO: 80.

[0568] The probes having the nucleotide sequence represented by SEQ ID NOS: 6765, 6766, 6767, 6768, 6769, 6770, 6771, 6772, 6773, 6774, 6775 were selected from the ORFs having the nucleotide sequence represented by SEQ ID NO: 81.

[0569] The probes having the nucleotide sequence represented by SEQ ID NOS: 6776, 6777, 6778, 6779,.6780, 6781, 6782, 6783, 6784, 6785, 6786 were selected from the ORFs having the nucleotide sequence represented by SEQ ID NO: 82.

[0570] The probes having the nucleotide sequence represented by SEQ ID NOS: 6787, 6788, 6789, 6790, 6791, 6792, 6793, 6794, 6795, 6796, 6797 were selected from the ORFs having the nucleotide sequence represented by SEQ ID NO: 83.

[0571] The probes having the nucleotide sequence represented by SEQ ID NOS: 6798, 6799, 6800, 6801, 6802, 6803, 6804, 6805, 6806, 6807, 6808 were selected from the ORFs having the nucleotide sequence represented by SEQ ID NO: 84.

[0572] The probes having the nucleotide sequence represented by SEQ ID NOS: 6809, 6810, 6811, 6812, 6813, 6814, 6815, 6816, 6817, 6818, 6819 were selected from the ORFs having the nucleotide sequence represented by SEQ ID NO: 85.

[0573] The probes having the nucleotide sequence represented by SEQ ID NOS: 6820, 6821, 6822, 6823, 6824, 6825, 6826, 6827, 6828, 6829, 6830.were selected from the ORFs having the nucleotide sequence represented by SEQ ID NO: 86.

[0574] The probes having the nucleotide sequence represented by SEQ ID NOS: 6831, 6832, 6833, 6834, 6835, 6836, 6837, 6838, 6839, 6840, 6841 were selected from the ORFs having the nucleotide sequence represented by SEQ ID NO: 87.

[0575] The probes having the nucleotide sequence represented by SEQ ID NOS: 6842, 6843, 6844, 6845, 6846, 6847, 6848, 6849, 6850, 6851, 6852 were selected from the ORFs having the nucleotide sequence represented by SEQ ID NO: 88.

[0576] The probes having the nucleotide sequence represented by SEQ ID NOS.: 6853, 6854, 6855, 6856, 6857, 6858, 6859, 6860, 6861, 6862, 6863 were selected from the ORFs having the nucleotide sequence represented by SEQ ID NO: 89.

[0577] The probes having-the nucleotide sequence represented by SEQ ID NOS: 6864, 6865, 6866, 6867, 6868, 6869, 6870, 6871, 6872, 6873, 6874 were selected from the ORFs having the nucleotide sequence represented by SEQ ID NO: 90.

[0578] The probes having the nucleotide sequence represented by SEQ ID NOS: 6875, 6876, 6877, 6878, 6879, 6880, 6881, 6882, 6883, 6884, 6885 were selected from the ORFs having the nucleotide sequence represented by SEQ ID NO: 91.

[0579] The probes having the nucleotide sequence represented by SEQ ID NOS: 6886, 6887, 6888, 6889, 6890, 6891, 6892, 6893, 6894, 6895, 6896 were selected from the ORFs having the nucleotide sequence represented by SEQ ID NO: 92.

[0580] The probes having the nucleotide sequence represented by SEQ ID NOS: 6897, 6898, 6899, 6900, 6901, 6902, 6903, 6904, 6905, 6906, 6907 were selected from the ORFs having the nucleotide sequence represented by.SEQ ID NO: 93.

[0581] The probes having the nucleotide sequence represented by SEQ ID NOS: 6908, 6909, 6910, 6911, 6912, 6913, 6914, 6915, 6916, 6917, 6918 were selected from the ORFs having the nucleotide sequence represented by SEQ ID NO: 94.

[0582] The probes having the nucleotide sequence represented by SEQ ID NOS: 6919, 6920, 6921, 6922, 6923, 6924, 6925, 6926, 6927, 6928, 6929 were selected from the ORFs having the nucleotide sequence represented by SEQ ID NO: 95.

[0583] The probes having the nucleotide sequence represented by SEQ ID NOS: 693Q, 6931, 6932, 6933, 6934, 6935, 6936, 6937, 6938, 6939, 6940 were selected from the ORFs having the nucleotide sequence represented by SEQ ID NO: 96.

[0584] The probes having the nucleotide sequence represented by SEQ ID NOS: 6941, 6942, 6943, 6944, 6945, 6946, 6947, 6948, 6949, 6950, 69-51 were selected from the ORFs having the nucleotide sequence represented by SEQ ID NO: 97.

[0585] The probes having the nucleotide sequence represented by SEQ ID NOS: 6952, 6953, 6954, 6955, 6956, 6957, 6958, 6959, 6960, 6961, 6962 were selected from the ORFs having the nucleotide sequence represented by SEQ ID NO: 98.

[0586] The probes having the nucleotide sequence represented by SEQ ID NOS: 6963, 6964, 6965, 6966, 6967, 6968, 6969, 6970, 6971, 6972, 6973 were selected from the ORFs having the nucleotide sequence represented by SEQ ID NO: 99.

[0587] The probes having the nucleotide sequence represented by SEQ ID NOS: 6974, 6975, 6976, 6977, 6978, 6979, 6980, 6981, 6982, 6983, 6984 were selected from the ORFs having the nucleotide sequence represented by SEQ ID NO: 100.

[0588] The probes having the nucleotide sequence represented by SEQ ID NOS: 6985, 6986, 6987, 6988, 6989, 6990, 6991, 6992, 6993, 6994, 6995 were selected from the ORFs having the nucleotide sequence represented by SEQ ID NO: 101.

[0589] The probes having the nucleotide sequence represented by SEQ ID NOS: 6996, 6997, 6998, 6999, 7000, 7001, 7002, 7003, 7004, 7005, 7006 were selected from the ORFs having the nucleotide sequence represented by SEQ ID NO: 102.

[0590] The.probes having the nucleotide sequence represented by SEQ ID NOS: 7007, 7008, 7009, 7010, 7011, 7012, 7013, 7014, 7015, 7016, 7017 were selected from the ORFs having the nucleotide sequence represented by SEQ ID NO: 103.

[0591] The probes having the nucleotide sequence represented by SEQ ID NOS: 7018, 7019, 7020, 7021, 7022, 7023, 7024, 7025, 7026, 7027, 7028 were selected from the ORFs having the nucleotide sequence represented by SEQ ID NO: 104.

[0592] The probes having the nucleotide sequence represented by SEQ ID NOS: 7029, 7030, 7031, 7032, 7033, 7034, 7035, 7036, 7037, 7038, 7039 were selected from the ORFs having the nucleotide sequence represented by SEQ ID NO: 105.

[0593] The probes having the nucleotide sequence represented by SEQ ID NOS: 7040, 7041, 7042, 7043, 7044, 7045, 7046, 7047, 7048, 7049, 7050 were selected from the ORFs having the nucleotide sequence represented by SEQ ID NO: 106.

[0594] The probes having the nucleotide sequence represented by SEQ ID NOS: 7051, 7052, 7053, 7054, 7055, 7056, 7057, 7058, 7059, 7060, 7061 were selected from the ORFs having the nucleotide sequence represented by SEQ ID NO: 107.

[0595] The probes having the nucleotide sequence represented by SEQ ID NOS: 7062, 7063, 7064, 7065, 7066, 7067, 7068, 7069, 7070, 7071, 7072 were selected from the ORFs having the nucleotide sequence represented by SEQ ID NO: 108.

[0596] The probes having the nucleotide sequence represented by SEQ ID NOS: 7073, 7074, 7075, 7076, 7077, 7078, 7079, 7080, 7081, 7082, 7083 were selected from the ORFs having the nucleotide sequence represented by SEQ ID NO: 109.

[0597] The probes having the nucleotide sequence represented by SEQ ID NOS: 7084, 7085, 7086, 7087, 7088, 7089, 7090, 7091, 7092, 7093, 7094 were selected from the ORFs having the nucleotide sequence represented by SEQ ID NO: 110.

[0598] The probes having the nucleotide sequence represented by SEQ ID NOS: 7095, 7096, 7097, 7098, 7099, 7100, 7101, 7102, 7103, 7104, 7105 were selected from the ORFs having the nucleotide sequence represented by SEQ ID NO: 111.

[0599] The probes having the nucleotide sequence represented by SEQ ID NOS: 7106, 7107, 7108, 7109, 7110, 7111, 7112, 7113, 7114, 7115, 7116 were selected from the ORFs having the nucleotide sequence represented by SEQ ID NO: 112.

[0600] The probes having the nucleotide sequence represented by SEQ ID NOS: 7117, 7118, 7119, 7120, 7121, 7122, 7123, 7124, 7125 were selected from the ORFs having the nucleotide sequence represented by SEQ ID NO: 113.

[0601] The probes having the nucleotide sequence represented by SEQ ID NOS: 7126, 7127, 7128, 7129, 7130, 7131, 7132, 7133, 7134, 7135, 7136 were selected from the ORFs having the nucleotide sequence represented by SEQ ID NO: 114.

[0602] The probes having the nucleotide sequence represented by SEQ ID NOS: 7137, 7138, 7139, 7140, 7141, 7142, 7143, 7144, 7145, 7146, 7147 were selected from the ORFs having the nucleotide sequence represented by SEQ ID NO: 115.

[0603] The probes having the nucleotide sequence represented by SEQ ID NOS: 7148, 7149, 7150, 7151, 7152, 7153, 7154, 7155, 7156, 7157, 7158 were selected from the ORFs having the nucleotide sequence represented by SEQ ID NO: 116.

[0604] The probes having the nucleotide sequence represented by SEQ ID NOS: 7159, 7160, 7161, 7162, 7163, 7164, 7165, 7166, 7167, 7168, 7169 were selected from the ORFs having the nucleotide sequence represented by SEQ ID NO: 117.

[0605] The probes having the nucleotide sequence represented by SEQ ID NOS: 7170, 7171, 7172, 7173, 7174, 7175, 7176, 7177, 7178, 7179, 7180 were selected from the ORFs having the nucleotide sequence represented by SEQ ID NO: 118.

[0606] The probes having the nucleotide sequence represented by SEQ ID NOS: 7181, 7182,. 7183, 7184, 7185, 7186, 7187, 7188, 7189, 7190, 7191 were selected from the ORFs having the nucleotide sequence represented by SEQ ID NO: 119.

[0607] The probes having the nucleotide sequence represented by SEQ ID NOS: 7192, 7193, 7194, 7195, 7196, 7197, 7198, 7199, 7200, 7201, 7202 were selected from the ORFs having the nucleotide sequence represented by SEQ ID NO: 120.

[0608] The probes having the nucleotide sequence represented by SEQ ID NOS: 7203, 7204, 7205, 7206, 7207, 7208, 7209, 7210, 7211, 7212, 7213 were selected from the ORFs having the nucleotide sequence represented by SEQ ID NO: 121.

[0609] The probes having the nucleotide sequence represented by SEQ ID NOS: 7214, 7215, 7216, 7217, 7218, 7219, 7220, 7.221, 7222, 7223, 7224 were selected from the ORFs having the nucleotide sequence represented by SEQ ID NO: 122.

[0610] The probes having the nucleotide sequence represented by SEQ ID NOS: 7225, 7226, 7227, 7228, 7229, 7230, 7231, 7232, 7233, 7234, 7235 were selected from the ORFs having the nucleotide sequence represented by SEQ ID NO: 123.

[0611] The probes having the nucleotide sequence represented by SEQ ID NOS: 7236, 7237, 7238, 7239, 7240, 7241, 7242, 7243, 7244, 7245, 7246 were selected from the ORFs having the nucleotide sequence represented by SEQ ID NO: 124.

[0612] The probes having the nucleotide sequence represented by SEQ ID NOS: 7247, 7248, 7249, 7250, 7251, 7252, 7253, 7254, 7255, 7256, 7257 were selected from the ORFs having the nucleotide sequence represented by SEQ ID NO: 125.

[0613] The probes having the nucleotide sequence represented by SEQ ID NOS: 7258, 7259, 7260, 7261, 7262, 7263, 7264, 7265, 7266, 7267, 7268 were selected from the ORFs having the nucleotide sequence represented by SEQ ID NO: 126.

[0614] The probes having the nucleotide sequence represented by SEQ ID NOS: 7269, 7270, 7271, 7272, 7273, 7274, 7275, 7276, 7277, 7278, 7279 were selected from the ORFs having the nucleotide sequence represented by SEQ ID NO: 127.

[0615] The probes having the nucleotide sequence represented by SEQ ID NOS: 7280, 7281, 7282, 7283, 7284, 7285, 7286, 7287, 7288, 7289, 7290 were selected from the ORFs having the nucleotide sequence represented by SEQ ID NO: 128.

[0616] The probes having the nucleotide sequence represented by SEQ ID NOS: 7291, 7292, 7293, 7294, 7295, 7296, 7297, 7298, 7299, 7300, 7301 were selected from the ORFs having the nucleotide sequence represented by SEQ ID NO: 129.

[0617] The probes having the nucleotide sequence represented by SEQ ID NOS: 7302, 7303, 7304, 7305, 7306, 7307, 7308, 7309, 7310, 7311, 7312 were selected from the ORFs having the nucleotide sequence represented by SEQ ID NO: 130.

[0618] The probes having the nucleotide sequence represented by SEQ ID NOS: 7313, 7314, 7315, 7316, 7317, 7318, 7319, 7320, 7321, 7322, 7323 were selected from the ORFs having the nucleotide sequence represented by SEQ ID NO: 131.

[0619] The probes having the nucleotide sequence represented by SEQ ID NOS: 7324, 7325, 7326, 7327, 7328, 7329, 7330, 7331, 7332, 7333, 7334 were selected from the ORFs having the nucleotide sequence represented by SEQ ID NO: 132.

[0620] The probes having the nucleotide sequence represented by SEQ ID NOS: 7335, 7336, 7337, 7338, 7339, 7340, 7341, 7342, 7343, 7344, 7345 were selected from the ORFs having the nucleotide sequence represented by SEQ ID NO: 133.

[0621] The probes having the nucleotide sequence represented by SEQ ID NOS: 7346, 7347, 7348, 7349, 7350, 7351, 7352, 7353, 7354, 7355, 7356 were selected from the ORFs having the nucleotide sequence represented by SEQ ID NO: 134.

[0622] The probes having the nucleotide sequence represented by SEQ ID NOS: 7357, .7358, 7359, 7360, 7361, 7362, 7363, 7364, 7365, 7366, 7367 were selected from the ORFs having the nucleotide sequence represented by SEQ ID NO: 135.

[0623] The probes having the nucleotide sequence represented by SEQ ID NOS: 7368, 7369, 7370, 7371, 7372, 7373, 7374, 7375, 7376, 7377, 7378 were selected from the ORFs having the nucleotide sequence represented by SEQ ID NO: 136.

[0624] The probes having the nucleotide sequence represented by SEQ ID NOS: 7379, 7380, 7381, 7382, 7383, 7384, 7385, 7386, 7387, 7388, 7389 were selected from the ORFs having the nucleotide sequence represented by SEQ ID NO: 137.

[0625] The probes having the nucleotide sequence represented by SEQ ID NOS: 7390, 7391, 7392, 7393, 7394, 7395, 7396, 7397, 7398, 7399, 7400 were selected from the ORFs having the nucleotide sequence represented by SEQ ID NO: 138.

[0626] The probes having the nucleotide sequence represented by SEQ ID NOS: 7401, 7402, 7403, 7404, 7405, 7406, 7407, 7408, 7409, 7410, 7411 were selected from the ORFs having the nucleotide sequence represented by SEQ ID NO: 139.

[0627] The probes having the nucleotide sequence represented by SEQ ID NOS: 7412, 7413, 7414, 7415, 7416, 7417, 7418, 7419, 7420, 7421, 7422 were selected from the ORFs having the nucleotide sequence represented by SEQ ID NO: 140.

[0628] The probes having the nucleotide sequence represented by SEQ ID NOS: 7423, 7424, 7425, 7426, 7427, 7428, 7429, 7430, 7431, 7432, 7433 were selected from the ORFs having the nucleotide sequence represented by SEQ ID NO: 141.

[0629] The probes having the nucleotide sequence represented by SEQ ID NOS: 7434, 7435, 7436, 7437, 7438, 7439, 7440, 7441, 7442, 7443, 7444 were selected from the ORFs having the nucleotide sequence represented by SEQ ID NO: 142.

[0630] The probes having the nucleotide sequence represented by SEQ ID NOS: 7445, 7446, 7447, 7448, 7449, 7450, 7451, 7452, 7453, 7454, 7455 were selected from the ORFs having the nucleotide sequence represented by SEQ ID NO: 143.

[0631] The probes having the nucleotide-sequence represented by SEQ ID NOS: 7456, 7457, 7458, 7459, 7460, 7461, 7462, 7463, 7464, 7465, 7466 were selected from the ORFs having the nucleotide sequence represented by SEQ ID NO: 144.

[0632] The probes having the nucleotide sequence represented by SEQ ID NOS: 7467, 7468, 7469, 7470, 7471, 7472, 7473, 7474, 7475, 7476, 7477 were selected from the ORFs having the nucleotide sequence represented by SEQ ID NO: 145.

[0633] The probes having the nucleotide sequence represented by SEQ ID NOS: 7478, 7479, 7480, 7481, 7482, 7483, 7484, 7485, 7486, 7487, 7488 were selected from the ORFs having the nucleotide sequence represented by SEQ ID NO: 146.

[0634] The probes having the nucleotide sequence represented by SEQ ID NOS: 7489, 7490, 7491, 7492, 7493, 7494, 7495, 7496, 7497, 7498, 7499 were selected from the ORFs having the nucleotide sequence represented by SEQ ID NO: 147.

[0635] The probes having the nucleotide sequence represented by SEQ ID NOS: 7500, 7501, 7502, 7503, 7504, 7505, 7506, 7507, 7508, 7509, 7510 were selected from the ORFs having the nucleotide sequence represented by SEQ ID NO: 148.

[0636] The probes having the nucleotide sequence represented by SEQ ID NOS: 7511, 7512, 7513, 7514, 7515, 7516, 7517, 7518, 7519, 7520, 7521 were selected from the ORFs having the nucleotide sequence represented by SEQ ID NO: 149.

[0637] The probes having the nucleotide sequence represented by SEQ ID NOS: 7522, 7523, 7524, 7525, 7526, 7527, 7528, 7529, 7530, 7531, 7532 were selected from the ORFs having the nucleotide sequence represented by SEQ ID NO: 150.

[0638] The probes having the nucleotide sequence represented by SEQ ID NOS: 7533, 7534, 7535, 7536, 7537, 7538, 7539, 7540, 7541, 7542, 7543 were selected from the ORFs having the nucleotide sequence represented by SEQ ID NO: 151.

[0639] The probes having the nucleotide sequence represented by SEQ ID NOS: 7544, 7545, 7546, 7547, 7548, 7549, 7550, 7551, 7552, 7553, 7554 were selected from the ORFs having the nucleotide sequence represented by SEQ ID NO: 152.

[0640] The probes having the nucleotide sequence represented by SEQ ID NOS: 7555, 7556, 7557, 7558, 7559, 7560, 7561, 7562, 7563, 7564, 7565 were selected from the ORFs having the nucleotide sequence represented by SEQ ID NO: 153.

[0641] The probes having the nucleotide sequence represented by SEQ ID NOS: 7566, 7567, 7568, 7569, 7570, 7571, 7572, 7573, 7574, 7575, 7576 were selected from the ORFs having the nucleotide sequence represented by SEQ ID NO: 154.

[0642] The probes having the nucleotide sequence represented by SEQ ID NOS: 7577, 7578, 7579, 7580, 7581, 7582, 7583, 7584, 7585, 7586, 7587 were selected from the ORFs having the nucleotide sequence represented by SEQ ID NO: 155.

[0643] The probes having the nucleotide sequence represented by SEQ ID NOS: 7588, 7589, 7590, 7591, 7592, 7593, 7594, 7595, 7596, 7597, 7598 were selected from the ORFs having the nucleotide sequence represented by SEQ ID NO: 156.

[0644] The probes having the nucleotide sequence represented by SEQ ID NOS: 7599, 7600, 7601, 7602, 7603, 7604, 7605, 7606, 7607, 7608, 7609 were selected from the ORFs having the nucleotide sequence represented by SEQ ID NO: 157.

[0645] The probes having the nucleotide sequence represented by SEQ ID NOS: 7610, 7611, 7612, 7613, 7614, 7615, 7616, 7617, 7618, 7619, 7620 were selected from the ORFs having the nucleotide sequence represented by SEQ ID NO: 158.

[0646] The probes having the nucleotide sequence represented by SEQ ID NOS: 7621, 7622, 7623, 7624, 7625, 7626, 7627, 7628, 7629, 7630, 7631 were selected from the ORFs having the nucleotide sequence represented by SEQ ID NO: 159.

[0647] The probes having the nucleotide sequence represented by SEQ ID NOS: 7632, 7633, 7634, 7635, 7636, 7637, 7638, 7639, 7640, 7641, 7642 were selected from the ORFs having the nucleotide sequence represented by SEQ ID NO: 160.

[0648] The probes having the nucleotide sequence represented by SEQ ID NOS: 7643, 7644, 7645, 7646, 7647, 7648, 7649, 7650, 7651, 7652, 7653 were selected from the ORFs having the nucleotide sequence represented by SEQ ID NO: 161.

[0649] The probes having the nucleotide sequence represented by SEQ ID NOS: 7654, 7655, 7656, 7657, 7658, 7659, 7660, 7661, 7662, 7663, 7664 were selected from the ORFs having the nucleotide sequence represented by SEQ ID NO: 162.

[0650] The probes having the nucleotide sequence represented by SEQ ID NOS: 7665, 7666, 7667, 7668, 7669, 7670, 7671, 7672, 7673, 7674, 7675 were selected from the ORFs having the nucleotide sequence represented by SEQ ID NO: 163.

[0651] The probes having the nucleotide sequence represented by SEQ ID NOS: 7676, 7677, 7678, 7679, 7680, 7681, 7682, 7683, 7684, 7685, 7686 were selected from the ORFs having the nucleotide sequence represented by SEQ ID NO: 164.

[0652] The probes having the nucleotide sequence represented by SEQ ID NOS: 7687, 7688, 7689, 7690, 7691, 7692, 7693, 7694, 7695, 7696, 7697 were selected from the ORFs having the nucleotide sequence represented by SEQ ID NO: 165.

[0653] The probes having the nucleotide sequence represented by SEQ ID NOS: 7698, 7699, 7700, 7701, 7702, 7703, 7704, 7705, 7706, 7707, 7708 were selected from the ORFs having the nucleotide sequence represented by SEQ ID NO: 166.

[0654] The probes having the nucleotide sequence represented by SEQ ID NOS: 7709, 7710, 7711, 7712, 7713, 7714, 7715, 7716, 7717, 7718, 7719 were selected from the ORFs having the nucleotide sequence represented by SEQ ID NO: 167.

[0655] The probes having the nucleotide sequence represented by SEQ ID NOS: 7720, 7721, 7722, 7723, 7724, 7725, 7726, 7727, 7728, 7729, 7730 were selected from the ORFs having the nucleotide sequence represented by SEQ ID NO: 168.

[0656] The probes having the nucleotide sequence represented by SEQ ID NOS: 7731, 7732, 7733, 7734, 7735, 7736, 7737, 7738, 7739, 7740, 7741 were selected from the ORFs having the nucleotide sequence represented by SEQ ID NO: 169.

[0657] The probes having the nucleotide sequence represented by SEQ ID NOS: 7742, 7743, 7744, 7745, 7746, 7747, 7748, 7749, 7750, 7751, 7752 were selected from the ORFs having the nucleotide sequence represented by SEQ ID NO: 170.

[0658] The probes having the nucleotide sequence represented by SEQ ID NOS: 7753, 7754, 7755, 7756, 7757, 7758, 7759, 7760, 7761, 7762, 7763 were selected from the ORFs having the nucleotide sequence represented by SEQ ID NO: 171.

[0659] The probes having the nucleotide sequence represented by SEQ ID NOS: 7764, 7765, 7766, 7767, 7768, 7769, 7770, 7771, 7772, 7773, 7774 were selected from the ORFs having the nuclebtide sequence represented by SEQ ID NO: 172.

[0660] The probes having the nucleotide sequence represented by SEQ ID NOS: 7775, 7776, 7777, 7778, 7779, 7780, 7781, 7782, 7783, 7784, 7785 were selected from the ORFs having the nucleotide sequence represented by SEQ ID NO: 173.

[0661] The probes having the nucleotide sequence represented by SEQ ID NOS:. 7786, 7787, 7788, 7789, 7790, 7791, 7792, 7793, 7794, 7795, 7796 were selected from the ORFs having the nucleotide sequence represented by SEQ ID NO: 174.

[0662] The probes having the nucleotide sequence represented by SEQ ID NOS: 7797, 7798, 7799, 7800, 7801, 7802, 7803, 7804, 7805, 7806, 7807 were selected from the ORFs having the nucleotide sequence represented by SEQ ID NO: 175.

[0663] The probes having the nucleotide sequence represented by SEQ ID NOS: 7808, 7809, 7810, 7811, 7812, 7813, 7814, 7815, 7816, 7817, 7818 were selected from the ORFs having the nucleotide sequence represented by SEQ ID NO: 176.

[0664] The probes having the nucleotide sequence represented by SEQ ID NOS: 7819, 7820, 7821, 7822, 7823, 7824, 7825, 7826, 7827, 7828, 7829 were selected from the ORFs having the nucleotide sequence represented by SEQ ID NO: 177.

[0665] The probes having the nucleotide sequence represented by SEQ ID NOS: 7830, 7831, 7832, 7833, 7834, 7835, 7836, 7837, 7838, 7839, 7840 were selected from the ORFs having the nucleotide sequence represented by SEQ ID NO: 178.

[0666] The probes having the nucleotide sequence represented by SEQ ID NOS: 7841, 7842, 7843, 7844, 7845, 7846, 7847, 7848, 7849, 7850, 7851 were selected from the ORFs having the nucleotide sequence represented by SEQ ID NO: 179.

[0667] The probes having the nucleotide sequence represented by SEQ ID NOS: 7852, 7853, 7854, 7855, 7856, 7857, 7858, 7859, 7860, 7861, 7862 were selected from the ORFs having the nucleotide sequence represented by SEQ ID NO: 180.

[0668] The probes having the nucleotide sequence represented by SEQ ID NOS: 7863, 7864, 7865, 7866, 7867, 7868, 7869, 7870, 7871, 7872, 7873 were selected from the ORFs having the nucleotide sequence represented by SEQ ID NO: 181.

[0669] The probes having the nucleotide sequence represented by SEQ ID NOS: 7874, 7875, 7876, 7877, 7878, 7879, 7880, 7881, 7882, 7883, 7884 were selected from the ORFs having the nucleotide sequence represented by SEQ ID NO: 182.

[0670] The probes having the nucleotide sequence represented by SEQ ID NOS: 7885, 7886, 7887, 7888, 7889, 7890, 7891, 7892, 7893, 7894, 7895 were selected from the ORFs having the nucleotide sequence-represented by SEQ ID NO: 183.

[0671] The probes having the nucleotide sequence represented by SEQ ID NOS: 7896, 7897, 7898, 7899, 7900, 7901, 7902, 7903, 7904, 7905, 7906 were selected from the ORFs having the nucleotide sequence represented by SEQ ID NO: 184.

[0672] The probes having the nucleotide sequence represented by SEQ ID NOS: 7907, 7908, 7909, 7910, 7911, 7912, 7913, 7914, 7915, 7916, 7917 were selected from the ORFs having the nucleotide sequence represented by SEQ ID NO: 185.

[0673] The probes having the nucleotide sequence represented by SEQ ID NOS: 7918, 7919, 7920, 7921, 7922, 7923, 7924, 7925, 7926, 7927, 7928 were selected from the ORFs having the nucleotide sequence represented by SEQ ID NO: 186.

[0674] The probes having the nucleotide sequence represented by SEQ ID NOS: 7929, 7930, 7931, 7932, 7933, 7934, 7935, 7936, 7937, 7938, 7939 were selected from the ORFs having the nucleotide sequence represented by SEQ ID NO: 187.

[0675] The probes having the nucleotide sequence represented by SEQ ID NOS: 7940, 7941, 7942, 7943, 7944, 7945, 7946, 7947, 7948, 7949, 7950 were selected from the ORFs having the nucleotide sequence represented by SEQ ID NO: 188.

[0676] The probes having the nucleotide sequence represented by SEQ ID NOS: 7951, 7952, 7953, 7954, 7955, 7956, 7957, 7958, 7959, 7960, 7961 were selected from the ORFs having the nucleotide sequence represented by SEQ ID NO: 189.

[0677] The probes having the nucleotide sequence represented by SEQ ID NOS: 7962, 7963, 7964, 7965, 7966, 7967, 7968, 7969, 7970, 7971, 7972 were selected from the ORFs having the nucleotide sequence represented by SEQ ID NO: 190.

[0678] The probes having the nucleotide sequence represented by SEQ ID NOS: 7973, 7974, 7975, 7976, 7977, 7978, 7979, 7980, 7981, 7982, 7983 were selected from the ORFs having the nucleotide sequence represented by SEQ ID NO: 191.

[0679] The probes having the nucleotide sequence represented by SEQ ID NOS: 7984, 7985, 7986, 7987, 7988, 7989, 7990, 7991, 7992, 7993, 7994 were selected from the ORFs having the nucleotide sequence represented by SEQ ID NO: 192.

[0680] The probes having the nucleotide sequence represented by SEQ ID NOS: 7995, 7996, 7997, 7998, 7999, 8000, 8001, 8002, 8003, 8004, 8005 were selected from the,ORFs having the nucleotide sequence represented by SEQ ID NO: 193.

[0681] The probes having the nucleotide sequence represented by SEQ ID NOS: 8006, 8007, 8008, 8009, 8010, 8011, 8012, 8013, 8014, 8015, 8016 were selected from the ORFs having the nucleotide sequence represented by SEQ ID NO: 194.

[0682] The probes having the nucleotide sequence represented by SEQ ID NOS: 8017, 8018, 8019, 8020, 8021., 8022, 8023, 8024, 8025, 8026, 8027 were selected from the ORFs having the nucleotide sequence represented by SEQ ID NO: 195.

[0683] The probes having the nucleotide sequence represented by SEQ ID NOS: 8028, 8029, 8030, 8031, 8032, 8033, 8034, 8035, 8036, 8037, 8038 were selected from the ORFs having the nucleotide sequence represented by SEQ ID NO: 196.

[0684] The probes having the nucleotide sequence represented by SEQ ID NOS: 8039, 8040, 8041, 8042, 8043, 8044, 8045, 8046, 8047, 8048, 8049 were selected from the ORFs having the nucleotide sequence represented by SEQ ID NO: 197.

[0685] The probes having the nucleotide sequence represented by SEQ ID NOS: 8050, 8051, 8052, 8053, 8054, 8055, 8056, 8057, 8058, 8059, 8060 were selected from the ORFs having the nucleotide sequence represented by SEQ ID NO: 198.

[0686] The probes having the nucleotide sequence represented by SEQ ID NOS: 8061, 8062, 8063, 8064, 8065, 8066, 8067, 8068, 8069, 8070, 8071 were selected from the ORFs having the nucleotide sequence represented by SEQ ID NO: 199.

[0687] The probes having the nucleotide sequence represented by SEQ ID NOS: 8072, 8073, 8074, 8075, 8076, 8077, 8078, 8079, 8080, 8081, 8082 were selected from the ORFs having the nucleotide sequence represented by SEQ ID NO: 200.

[0688] The probes having the nucleotide sequence represented by SEQ ID NOS: 8083, 8084, 8085, 8086, 8087, 8088, 8089, 8090, 8091, 8092, 8093 were selected from the ORFs having the nucleotide sequence represented by SEQ ID NO: 201.

[0689] The probes having the nucleotide sequence represented by SEQ ID NOS: 8094, 8095, 8096, 8097, 8098, 8099, 8100, 8101, 8102, 8103, 8104 were selected from the ORFs having the nucleotide sequence represented by SEQ ID NO: 202.

[0690] The probes having the nucleotide sequence represented by SEQ ID NOS: 8105, 8106, 8107, 8108, 8109, 8110, 8111, 8112, 8113, 8114, 8115 were selected from the ORFs having the nucleotide sequence represented by SEQ ID NO: 203.

[0691] The probes having the nucleotide sequence represented by SEQ ID NOS: 8116, 8117, 8118, 8119, 8120, 8121, 8122, 8123, 8124, 8125, 8126 were selected from the ORFs having the nucleotide sequence represented by SEQ ID NO: 204.

[0692] The probes having the nucleotide sequence represented by SEQ ID NOS: 8127, 8128, 8129, 8130, 8131, 8132, 8133, 8134, 8135, 8136, 8137 were selected from the ORFs having the nucleotide sequence represented by SEQ ID NO: 205.

[0693] The probes having the nucleotide sequence represented by SEQ ID NOS: 8138, 8139, 8140, 8141, 8142, 8143, 8144, 8145, 8146, 8147, 8148 were selected from the ORFs having the nucleotide sequence represented by SEQ ID NO: 206.

[0694] The probes having the nucleotide sequence represented by SEQ ID NOS: 8149, 8150, 8151, 8152, 8153, 8154, 8155, 8156, 8157, 8158, 8159 were selected from the ORFs having the nucleotide sequence represented by SEQ ID NO: 207.

[0695] The probes having the nucleotide sequence represented by SEQ ID NOS: 8160, 8161, 8162, 8163, 8164, 8165, 8166, 8167, 8168, 8169, 8170 were selected from the ORFs having the nucleotide sequence represented by SEQ ID NO: 208.

[0696] The probes having the nucleotide sequence represented by SEQ ID NOS: 8171, 8172, 8173, 8174, 8175, 8176, 8177, 8178, 8179, 8180, 8181 were selected from the ORFs having the nucleotide sequence represented by SEQ ID NO: 209.

[0697] The probes having the nucleotide sequence represented by SEQ ID NOS: 8182, 8183, 8184, 8185, 8186, 8187, 8188, 8189, 8190, 8191, 8192 were selected from the ORFs having the nucleotide sequence represented by SEQ ID NO: 210.

[0698] The probes having the nucleotide sequence represented by SEQ ID NOS: 8193, 8194, 8195, 8196, 8197, 8198, 8199, 8200, 8201, 8202, 8203 were selected from the ORFs having the nucleotide sequence represented by SEQ ID NO: 211.

[0699] The probes having the nucleotide sequence represented by SEQ ID NOS: 8204, 8205, 8206, 8207, 8208, 8209, 8210, 8211, 8212, 8213, 8214 were selected from the ORFs having the nucleotide sequence represented by SEQ ID NO: 212.

[0700] The probes having the nucleotide sequence represented by SEQ ID NOS: 8215, 8216, 8217, 8218, 8219, 8220, 8221, 8222, 8223, 8224, 8225 were selected from the ORFs having the nucleotide sequence represented by SEQ ID NO: 213.

[0701] The probes having the nucleotide sequence represented by SEQ ID NOS: 8226, 8227, 8228, 8229, 8230, 8231, 8232, 8233, 8234, 8235, 8236 were selected from the ORFs having the nucleotide sequence represented by SEQ ID NO: 214.

[0702] The probes having the nucleotide sequence represented by SEQ ID NOS: 8237, 8238, 8239, 8240, 8241, 8242, 8243, 8244, 8245, 8246, 8247 were selected from the ORFs having the nucleotide sequence represented by SEQ ID NO: 215.

[0703] The probes having the nucleotide sequence represented by SEQ ID NOS: 8248, 8249, 8250, 8251, 8252, 8253, 8254, 8255, 8256, 8257, 8258 were selected from the ORFs having the nucleotide sequence represented by SEQ ID NO: 216.

[0704] The probes having the nucleotide sequence represented by SEQ ID NOS: 8259, 8260, 8261, 8262, 8263, 8264, 8265, 8266, 8267, 8268, 8269 were selected from the ORFs having the nucleotide sequence represented by SEQ ID NO: 217.

[0705] The probes having the nucleotide sequence represented by SEQ ID NOS: 8270, 8271, 8272, 8273, 8274, 8275, 8276, 8277, 8278, 8279, 8280 were selected from the ORFs having the nucleotide sequence represented by SEQ ID NO: 218.

[0706] The probes having the nucleotide sequence represented by SEQ ID NOS: 8281, 8282, 8283, 8284, 8285, 8286, 8287, 8288, 8289, 8290, 8291 were selected from the ORFs having the nucleotide sequence represented by SEQ ID NO: 219.

[0707] The probes having the nucleotide sequence represented by SEQ ID NOS: 8292, 8293, 8294, 8295, 8296, 8297, 8298, 8299, 8300, 8301, 8302 were selected from the ORFs having the nucleotide sequence represented by SEQ ID NO: 220.

[0708] The probes having the nucleotide sequence represented by SEQ ID NOS: 8303, 8304, 8305, 8306, 8307, 8308, 8309, 8310, 8311, 8312, 8313 were selected from the ORFs having the nucleotide sequence represented by SEQ ID NO: 221.

[0709] The probes having the nucleotide sequence represented by SEQ ID NOS: 8314, 8315, 8316, 8317, 8318, 8319, 8320, 8321, 8322, 8323, 8324 were selected from the ORFs having the nucleotide sequence represented by SEQ ID NO: 222.

[0710] The probes having the nucleotide sequence represented by SEQ ID NOS: 8325, 8326, 8327, 8328, 8329, 8330, 8331, 8332, 8333, 8334, 8335 were selected from the ORFs having the nucleotide sequence represented by SEQ ID NO: 223.

[0711] The probes having the nucleotide sequence represented by SEQ ID NOS: 8336, 8337, 8338, 8339, 8340, 8341, 8342, 8343, 8344, 8345, 8346 were selected from the ORFs having the nucleotide sequence represented by SEQ ID NO: 224.

[0712] The probes having the nucleotide sequence represented by SEQ ID NOS: 8347, 8348, 8349, 8350, 8351, 8352, 8353, 8354, 8355, 8356, 8357 were selected from the ORFs having the nucleotide sequence represented by SEQ ID NO: 225.

[0713] The probes having the nucleotide sequence represented by. SEQ ID NOS: 8358, 8359, 8360, 8361, 8362, 8363, 8364, 8365, 8366, 8367, 8368 were selected from the ORFs having the nucleotide sequence represented by SEQ ID NO: 226.

[0714] The probes having the nucleotide sequence represented by SEQ ID NOS: 8369, 8370, 8371, 8372, 8373, 8374, 8375, 8376, 8377, 8378, 8379 were selected from the ORFs having the nucleotide sequence represented by SEQ ID NO: 227.

[0715] The probes having the nucleotide sequence represented by SEQ ID NOS: 8380, 8381, 8382, 8383, 8384, 8385, 8386, 8387, 8388, 8389, 8390 were selected from the ORFs having the nucleotide sequence represented by SEQ ID NO: 228.

[0716] The probes having the nuclebtide sequence-represented by SEQ ID NOS: 8391, 8392, 8393, 8394, 8395, 8396, 8397, 8398, 8399, 8400, 8401 were selected from the ORFs having the nucleotide sequence represented by SEQ ID NO: 229.

[0717] The probes having the nucleotide sequence represented by SEQ ID NOS: 8402, 8403, 8404, 8405, 8406, 8407, 8408, 8409, 8410, 8411, 8412 were selected from the ORFs having the nucleotide sequence represented by SEQ ID NO: 230.

[0718] The probes having the nucleotide sequence represented by SEQ ID NOS: 8413, 8414, 8415, 8416, 8417, 8418, 8419, 8420, 8421, 8422, 8423 were selected from the ORFs having the nucleotide sequence represented by SEQ ID NO: 231.

[0719] The probes having the nucleotide sequence represented by SEQ ID NOS: 8424, 8425, 8426, 8427, 8428, 8429, 8430, 8431, 8432, 8433, 8434 were selected from the ORFs having the nucleotide sequence represented by SEQ ID NO: 232.

[0720] The probes having the nucleotide sequence represented by SEQ ID NOS: 8435, 8436, 8437, 8438, 8439, 8440, 8441, 8442, 8443, 8444, 8445 were selected from the ORFs having the nucleotide sequence represented by SEQ ID NO: 233.

[0721] The probes having the nucleotide sequence represented by SEQ ID NOS: 8446, 8447, 8448, 8449, 8450, 8451, 8452, 8453, 8454, 8455, 8456 were selected from the ORFs having the nucleotide sequence represented by SEQ ID NO: 234.

[0722] The probes having the nucleotide sequence represented by SEQ ID NOS: 8457, 8458, 8459, 8460, 8461, 8462, 8463, 8464, 8465, 8466, 8467 were selected from the ORFs having the nucleotide sequence represented by SEQ ID NO: 235.

[0723] The probes having the nucleotide sequence represented by SEQ ID NOS: 8468, 8469, 8470, 8471, 8472, 8473, 8474, 8475, 8476, 8477, 8478 were selected from the ORFs having the nucleotide sequence represented by SEQ ID NO: 236.

[0724] The probes having the nucleotide sequence represented by SEQ ID NOS: 8479, 8480, 8481, 8482, 8483, 8484, 8485, 8486, 8487, 8488, 8489 were selected from the ORFs having the nucleotide sequence represented by SEQ ID NO: 237.

[0725] The probes having the nucleotide sequence represented by SEQ ID NOS: 8490, 8491, 8492, 8493, 8494, 8495, 8496, 8497, 8498, 8499, 8500 were selected from the ORFs having the nucleotide sequence represented by SEQ ID NO: 238.

[0726] The probes having the nucleotide sequence represented by SEQ ID NOS: 8501, 8502, 8503, 850.4, 8505, 8506, 8507, 8508, 8509, 8510, 8511 were selected from the ORFs having the nucleotide sequence represented by SEQ ID NO: 239.

[0727] The probes having the nucleotide sequence represented by SEQ ID NOS: 8512, 8513, 8514, 8515, 8516, 8517, 8518, 8519, 8520, 8521, 8522 were selected from the ORFs having the nucleotide sequence represented by SEQ ID NO: 240.

[0728] The probes having the nucleotide sequence represented by SEQ ID NOS: 8523, 8524, 8525, 8526, 8527, 8528, 8529, 8530, 8531, 8532, 8533 were selected from the ORFs having the nucleotide sequence represented by SEQ ID NO: 241.

[0729] The probes having the nucleotide sequence represented by SEQ ID NOS: 8534, 8535, 8536, 8537, 8538, 8539, 8540, 8541, 8542, 8543, 8544 were selected from the ORFs having the nucleotide sequence represented by SEQ ID NO: 242.

[0730] The probes having the nucleotide sequence represented by SEQ ID NOS: 8545, 8546, 8547, 8548, 8549, 8550, 8551, 8552, 8553, 8554, 8555 were selected from the ORFs having the nucleotide sequence represented by SEQ ID NO: 243.

[0731] The probes having the nucleotide sequence represented by SEQ ID NOS: 8556, 8557, 8558, 8559, 8560, 8561, 8562, 8563, 8564, 8565, 8566 were selected from the ORFs having the nucleotide sequence represented by SEQ ID NO: 244.

[0732] The probes having the nucleotide sequence represented by SEQ ID NOS: 8567, 8568, 8569, 8570, 8571, 8572, 8573, 8574, 8575, 8576, 8577 were selected from the ORFs having the nucleotide sequence represented by SEQ ID NO: 245.

[0733] The probes having the nucleotide sequence represented by SEQ ID NOS: 8578, 8579, 8580, 8581, 8582, 8583, 8584, 8585, 8586, 8587, 8588 were selected from the ORFs having the nucleotide sequence represented by SEQ ID NO: 246.

[0734] The probes having the nucleotide sequence represented by SEQ ID NOS: 8589, 8590, 8591, 8592, 8593, 8594, 8595, 8596, 8597, 8598, 8599 were selected from the ORFs having the nucleotide sequence represented by SEQ ID NO: 247.

[0735] The probes having the nucleotide sequence represented by SEQ ID NOS: 8600, 8601, 8602, 8603, 8604, 8605, 8606, 8607, 8608, 8609, 8610 were selected from the ORFs having the nucleotide sequence represented by SEQ ID NO: 248.

[0736] The probes having the nucleotide sequence represented by SEQ ID NOS: 8611, 8612, 8613, 8614, 8615, 8616, 8617, 8618, 8619, 8620, 8621 were selected from the ORFs having the nucleotide sequence represented by SEQ ID NO: 249.

[0737] The probes having the nucleotide sequence represented by SEQ ID NOS: 8622, 8623, 8624, 8625, 8626, 8627, 8628, 8629, 8630, 8631, 8632 were selected from the ORFs having the nucleotide sequence represented by SEQ ID NO: 250.

[0738] The probes having the nucleotide sequence represented by SEQ ID NOS: 8633, 8634, 8635, 8636, 8637, 8638, 8639, 8640, 8641, 8642, 8643 were selected from the ORFs having the nucleotide sequence represented by SEQ ID NO: 251.

[0739] The probes having the nucleotide sequence represented by SEQ ID NOS: 8644, 8645, 8646, 8647, 8648, 8649, 8650, 8651, 8652, 8653, 8654 were selected from the ORFs having the nucleotide sequence represented by SEQ ID NO: 252.

[0740] The probes having the nucleotide sequence represented by SEQ ID NOS: 8655, 8656, 8657, 8658, 8659, 8660, 8661, 8662, 8663, 8664, 8665 were selected from the ORFs having the nucleotide sequence represented by SEQ ID NO: 253.

[0741] The probes having the nucleotide sequence represented by SEQ ID NOS: 8666, 8667, 8668, 8669, 8670, 8671, 8672, 8673, 8674, 8675, 8676 were selected from the ORFs having the nucleotide sequence represented by SEQ ID NO: 254.

[0742] The probes having the nucleotide sequence represented by SEQ ID NOS: 8677, 8678, 8679, 8680, 8681, 8682, 8683, 8684, 8685, 8686, 8687 were selected from the ORFs having the nucleotide sequence represented by SEQ ID NO: 255.

[0743] The probes having the nucleotide sequence represented by SEQ ID NOS: 8688, 8689, 8690, 8691, 8692, 8693, 8694, 8695, 8696, 8697, 8698 were selected from the ORFs having the nucleotide sequence represented by SEQ ID NO: 256.

[0744] The probes having the nucleotide sequence represented by SEQ ID NOS: 8699, 8700, 8701, 8702, 8703, 8704, 8705, 8706, 8707, 8708, 8709 were selected from the ORFs having the nucleotide sequence represented by SEQ ID NO: 257.

[0745] The probes having the nucleotide sequence represented by SEQ ID NOS: 8710, 8711, 8712, 8713, 8714, 8715, 8716, 8717, 8718, 8719, 8720 were selected from the ORFs having the nucleotide sequence represented by SEQ ID NO: 258.

[0746] The probes having the nucleotide sequence represented by SEQ ID NOS: 8721, 8722, 8723, 8724, 8725, 8726, 8727, 8728, 8729, 8730, 8731 were selected from the ORFs having the nucleotide sequence represented by SEQ ID NO: 259.

[0747] The probes having the nucleotide sequence represented by SEQ ID NOS: 8732, 8733, 8734, 8735, 8736, 8737, 8738, 8739, 8740, 8741, 8742 were selected from the ORFs having the nucleotide sequence represented by SEQ ID NO: 260.

[0748] The probes having the nucleotide sequence represented by SEQ ID NOS: 8743, 8744, 8745, 8746, 8747, 8748, 8749, 8750, 8751, 8752, 8753 were selected from the ORFs having the nucleotide sequence represented by SEQ ID NO: 261.

[0749] The probes having the nucleotide sequence represented by SEQ ID NOS: 8754, 8755, 8756, 8757, 8758, 8759, 8760, 8761, 8762, 8763, 8764 were selected from the ORFs having the nucleotide sequence represented by SEQ ID NO: 262.

[0750] The probes having the nucleotide sequence represented by SEQ ID NOS: 8765, 8766, 8767, 8768, 8769, 8770, 8771, 8772, 8773, 8774, 8775 were selected from the ORFs having the nucleotide sequence represented by SEQ ID NO: 263.

[0751] The probes having the nucleotide sequence represented by SEQ ID NOS: 8776, 8777, 8778, 8779, 8780, 8781, 8782, 8783, 8784, 8785, 8786 were selected from the-ORFs having the nucleotide sequence represented by SEQ ID NO: 264.

[0752] The probes having the nucleotide sequence represented by SEQ ID NOS: 8787, 8788, 8789, 8790, 8791, 8792, 8793, 8794, 8795, 8796, 8797 were selected from the ORFs having the nucleotide sequence represented by SEQ ID NO: 265.

[0753] The probes having the nucleotide sequence represented by SEQ ID NOS: 8798, 8799, 8800, 8801, 8802, 8803, 8804, 8805, 8806, 8807, 8808 were selected from the ORFs having the nucleotide sequence represented by SEQ ID NO: 266.

[0754] The probes having the nucleotide sequence represented by SEQ ID NOS: 8809, 8810, 8811, 8812, 8813, 8814, 8815, 8816, 8817, 8818, 8819 were selected from the ORFs having the nucleotide sequence represented by SEQ ID NO: 267.

[0755] The probes having the nucleotide sequence represented by SEQ ID NOS: 8820, 8821, 8822, 8823, 8824, 8825, 8826, 8827, 8828, 8829, 8830 were selected from the ORFs having the nucleotide sequence represented by SEQ ID NO: 268.

[0756] The probes having the nucleotide sequence represented by SEQ ID NOS: 8831, 8832, 8833, 8834, 8835, 8836, 8837, 8838, 8839, 8840, 8841 were selected from the ORFs having the nucleotide sequence represented by SEQ ID NO: 269.

[0757] The probes having the nucleotide sequence represented by SEQ ID NOS: 8842, 8843, 8844, 8845, 8846, 8847, 8848, 8849, 8850, 8851, 8852 were selected from the ORFs having the nucleotide sequence represented by SEQ ID NO: 270.

[0758] The probes having the nucleotide sequence represented by SEQ ID NOS: 8853, 8854, 8855, 8856, 8857, 8858, 8859, 8860, 8861, 8862, 8863 were selected from the ORFs having the nucleotide sequence represented by SEQ ID NO: 271.

[0759] The probes having the nucleotide sequence represented by SEQ ID NOS: 8864, 8865, 8866, 8867, 8868, 8869, 8870, 8871, 8872, 8873, 8874 were selected from the ORFs having the nucleotide sequence represented by SEQ ID NO: 272.

[0760] The probes having the nucleotide sequence represented by SEQ ID NOS: 8875, 8876, 8877, 8878, 8879, 8880, 8881, 8882, 8883, 8884, 8885 were selected from the ORFs having the nucleotide sequence represented by SEQ ID NO: 273.

[0761] The probes having the nucleotide sequence represented by SEQ ID NOS: 8886, 8887, 8888, 8889, 8890, 8891, 8892, 8893, 8894, 8895, 8896 were selected from the ORFs having the nucleotide sequence represented by SEQ ID NO: 274.

[0762] The probes having the nucleotide sequence represented by SEQ ID NOS: 8897, 8898, 8899, 8900, 8901, 8902, 8903, 8904, 8905, 8906, 8907 were selected from the ORFs having the nucleotide sequence represented by SEQ ID NO: 275.

[0763] The probes having the nucleotide sequence represented by SEQ ID NOS: 8908, 8909, 8910, 8911, 8912, 8913, 8914, 8915, 8916, 8917, 8918 were selected from the ORFs having the nucleotide sequence represented by SEQ ID NO: 276.

[0764] The probes having the nucleotide sequence represented by SEQ ID NOS: 8919, 8920, 8921, 8922, 8923, 8924, 8925, 8926, 8927, 8928, 8929 were selected from the ORFs having the nucleotide sequence represented by SEQ ID NO: 277.

[0765] The probes having the nucleotide sequence represented by SEQ ID NOS: 8930, 8931, 8932, 8933, 8934, 8935, 8936, 8937, 8938, 8939, 8940 were selected from the ORFs having the nucleotide sequence represented by SEQ ID NO: 278.

[0766] The probes having the nucleotide sequence represented by SEQ ID NOS: 8941,. 8942, 8943, 8944, 8945, 8946, 8947, 8948, 8949, 8950, 8951 were selected from the ORFs having the nucleotide sequence represented by SEQ ID NO: 279.

[0767] The probes having the nucleotide sequence represented by SEQ ID NOS: 8952, 8953, 8954, 8955, 8956, 8957, 8958, 8959, 8960, 8961, 8962 were selected from the ORFs having the nucleotide sequence represented by SEQ ID NO: 280.

[0768] The probes having the nucleotide sequence represented by SEQ ID NOS: 8963, 8964, 8965, 8966, 8967, 8968, 8969, 8970, 8971, 8972, 8973 were selected from the ORFs having the nucleotide sequence represented by SEQ ID NO: 281.

[0769] The probes having the nucleotide sequence represented by SEQ ID NOS: 8974, 8975, 8976, 8977, 8978, 8979, 8980, 8981, 8982, 8983, 8984 were selected from the ORFs having the nucleotide sequence represented by SEQ ID NO: 282.

[0770] The probes having the nucleotide sequence represented by SEQ ID NOS: 8985, 8986, 8987, 8988, 8989, 8990, 8991, 8992, 8993, 8994, 8995 were selected from the ORFs having the nucleotide sequence represented by SEQ ID NO: 283.

[0771] The probes having the nucleotide sequence represented by SEQ ID NOS: 8996, 8997, 8998, 8999, 9000, 9001, 9002, 9003, 9004, 9005, 9006 were selected from the ORFs having the nucleotide sequence represented by SEQ ID NO: 284.

[0772] The probes having the nucleotide sequence represented by SEQ ID NOS: 9007, 9008, 9009, 9010, 9011, 9012, 9013, 9014, 9015, 9016, 9017 were selected from the ORFs having the nucleotide sequence represented by SEQ ID NO: 285.

[0773] The probes having the nucleotide sequence represented by SEQ ID NOS: 9018, 9019, 9020, 9021, 9022, 9023, 9024, 9025, 9026, 9027, 9028 were selected from the ORFs having the nucleotide sequence represented by SEQ ID NO: 286.

[0774] The probes having the nucleotide sequence represented by SEQ ID NOS: 9029, 9030, 9031, 9032, 9033, 9034, 9035, 9036, 9037, 9038, 9039 were selected from the ORFs having the nucleotide sequence represented by SEQ ID NO: 287.

[0775] The probes having the nucleotide sequence represented by SEQ. ID NOS: 9040, 9041, 9042, 9043, 9044, 9045, 9046, 9047, 9048, 9049, 9050 were selected from the ORFs having the nucleotide sequence represented by SEQ ID NO: 288.

[0776] The probes having the nucleotide sequence represented by SEQ ID NOS: 9051, 9052, 9053, 9054, 9055, 9056, 9057, 9058, 9059, 9060, 9061 were selected from the ORFs having the nucleotide sequence represented by SEQ ID NO: 289.

[0777] The probes having the nucleotide sequence represented by SEQ ID NOS: 9062, 9063, 9064, 9065, 9066, 9067, 9068, 9069, 9070, 9071, 9072 were selected from the ORFs having the nucleotide sequence represented by SEQ ID NO: 290.

[0778] The probes having the nucleotide sequence represented by SEQ ID NOS: 9073, 9074, 9075, 9076, 9077, 9078, 9079, 9080, 9081, 9082, 9083 were selected from the ORFs having the nucleotide sequence represented by SEQ ID NO: 291.

[0779] The probes having the nucleotide sequence represented by SEQ ID NOS: 9084, 9085, 9086, 9087, 9088, 9089, 9090, 9091, 9092, 9093, 9094 were selected from the ORFs having the nucleotide sequence represented by SEQ ID NO: 292.

[0780] The probes having the nuclebtide sequence represented by SEQ ID NOS: 9095, 9096, 9097, 9098, 9099, 9100, 9101, 9102, 9103, 9104, 9105 were selected from the ORFs having the nucleotide sequence represented by SEQ ID NO: 293.

[0781] The probes having the nucleotide sequence represented by SEQ ID NOS: 9106, 9107, 9108, 9109, 9110, 9111, 9112, 9113, 9114, 9115, 9116 were selected from the ORFs having the nucleotide sequence represented by SEQ ID NO: 294.

[0782] The probes having the nucleotide sequence represented by SEQ ID NOS: 9117, 9118, 9119, 9120, 9121, 9122, 9123, 9124, 9125, 9126, 9127 were selected from the ORFs having the nucleotide sequence represented by SEQ ID NO: 295.

[0783] The probes having the nucleotide sequence represented by SEQ ID NOS: 9128, 9129, 9130, 9131, 9132, 9133, 9134, 9135, 9136, 9137, 9138 were selected from the ORFs having the nucleotide sequence represented by SEQ ID NO: 296.

[0784] The probes having the nucleotide sequence represented by SEQ ID NOS: 9139, 9140, 9141, 9142, 9143, 9144, 9145, 9146, 9147, 9148, 9149 were selected from the ORFs having the nucleotide sequence represented by SEQ ID NO: 297.

[0785] The probes having the nucleotide sequence represented by SEQ ID NOS: 9150, 9151, 9152, 9153, 9154, 9155, 9156, 9157, 9158, 9159, 9160 were selected from the ORFs having the nucleotide sequence represented by SEQ ID NO: 298.

[0786] The probes having the nucleotide sequence represented by SEQ ID NOS: 9161, 9162, 9163, 9164, 9165, 9166, 9167, 9168, 9169, 9170, 9171 were selected from the ORFs having the nucleotide sequence represented by SEQ ID NO: 299.

[0787] The probes having the nucleotide sequence represented by SEQ ID NOS: 9172, 9173, 9174, 9175, 9176, 9177, 9178, 9179, 9180, 9181, 9182 were selected from the ORFs having the nucleotide sequence represented by SEQ ID NO: 300.

[0788] The probes having the nucleotide sequence represented by SEQ ID NOS: 9183, 9184, 9185, 9186, 9187, 9188, 9189, 9190, 9191, 9192, 9193 were selected from the ORFs having the nucleotide sequence represented by SEQ ID NO: 301.

[0789] The probes having the nucleotide sequence represented by SEQ ID NOS: 9194, 9195, 9196, 9197, 9198, 9199, 9200, 9201, 9202, 9203, 9204 were selected from the ORFs having the nucleotide sequence represented by SEQ ID NO: 302.

[0790] The probes having the nucleotide sequence represented by SEQ ID NOS: 9205, 9206, 9207, 9208, 9209, 9210, 9211, 9212, 9213, 9214, 9215 were selected from the ORFs having the nucleotide sequence represented by SEQ ID NO: 303.

[0791] The probes having the nucleotide sequence represented by SEQ ID NOS: 9216, 9217, 9218, 9219, 9220, 9221, 9222, 9223, 9224, 9225, 9226 were selected from the ORFs having the nucleotide sequence represented by SEQ ID NO: 304.

[0792] The probes having the nucleotide sequence represented by SEQ ID NOS: 9227, 9228, 9229, 9230, 9231, 9232, 9233, 9234, 9235, 9236, 9237 were selected from the ORFs having the nucleotide sequence represented by SEQ ID NO: 305.

[0793] The probes having the nucleotide sequence represented by SEQ ID NOS: 9238, 9239, 9240, 9241, 9242, 9243, 9244, 9245, 9246, 9247, 9248 were selected from the ORFs having the nucleotide sequence represented by SEQ ID NO: 306.

[0794] The probes having the nucleotide sequence represented by SEQ ID NOS: 9249, 9250, 9251, 9252, 9253, 9254, 9255, 9256, 9257, 9258, 9259 were selected from the ORFs having the nucleotide sequence represented by SEQ ID NO: 307.

[0795] The probes having the nucleotide sequence represented by SEQ ID NOS: 9260, 9261, 9262, 9263, 9264, 9265, 9266, 9267, 9268, 9269, 9270 were selected from the ORFs having the nucleotide sequence represented by SEQ ID NO: 308.

[0796] The probes having the nucleotide sequence represented by SEQ ID NOS: 9271, 9272, 9273, 9274, 9275, 9276, 9277, 9278, 9279, 9280, 9281 were selected from the ORFs having the nucleotide sequence represented by SEQ ID NO: 309.

[0797] The probes having the nucleotide sequence represented by SEQ ID NOS: 9282, 9283, 9284, 9285, 9286, 9287, 9288, 9289, 9290, 9291, 9292 were selected from the ORFs having the nucleotide sequence represented by SEQ ID NO: 310.

[0798] The probes having the nucleotide sequence represented by SEQ ID NOS: 9293, 9294, 9295, 9296, 9297, 9298, 9299, 9300, 9301, 9302, 9303 were selected from the ORFs having the nucleotide sequence represented by SEQ ID NO: 311.

[0799] The probes having the nucleotide sequence represented by SEQ ID NOS: 9304, 9305, 9306, 9307, 9308, 9309, 9310, 9311, 9312, 9313, 9314 were selected from the ORFs having the nucleotide sequence represented by SEQ ID NO: 312.

[0800] The probes having the nucleotide sequence represented by SEQ ID NOS: 9315, 9316, 9317, 9318, 9319, 9320, 9321, 9322, 9323, 9324, 9325 were selected from the ORFs having the nucleotide sequence represented by SEQ ID NO: 313.

[0801] The probes having the nucleotide sequence represented by SEQ ID NOS: 9326, 9327, 9328, 9329, 9330, 9331, 9332, 9333, 9334, 9335, 9336 were selected from the ORFs having the nucleotide sequence represented by SEQ ID NO: 314.

[0802] The probes having the nucleotide sequence represented by SEQ ID NOS: 9337, 9338, 9339, 9340, 9341, 9342, 9343, 9344, 9345, 9346, 9347, 9348, 9349, 9350, 9351, 9352, 9353, 9354, 9355, 9356, 9357, 9358 were selected from the ORFs having the nucleotide sequence represented by SEQ ID NO: 315.

[0803] The probes having the nucleotide sequence represented by SEQ ID NOS: 9359, 9360, 9361, 9362, 9363, 9364, 9365, 9366, 9367, 9368, 9369 were selected from the ORFs having the nucleotide sequence represented by SEQ ID NO: 316.

[0804] The probes having the nucleotide sequence represented by SEQ ID NOS: 9370, 9371, 9372, 9373, 9374, 9375, 9376, 9377, 9378, 9379, 9380 were selected from the ORFs having the nucleotide sequence represented by SEQ ID NO: 317.

[0805] The probes having the nucleotide sequence represented by SEQ ID NOS: 9381, 9382, 9383, 9384, 9385, 9386, 9387, 9388, 9389, 9390, 9391 were selected from the ORFs having the nucleotide sequence represented by SEQ ID NO: 318.

[0806] The probes having the nucleotide sequence represented by SEQ ID NOS: 9392, 9393, 9394, 9395, 9396, 9397, 9398, 9399, 9400, 9401, 9402 were selected from the ORFs having the nucleotide sequence represented by SEQ ID NO: 319.

[0807] The probes having the nucleotide sequence represented by SEQ ID NOS: 9403, 9404, 9405, 9406, 9407, 9408, 9409, 9410, 9411, 9412, 9413 were selected from the ORFs having the nucleotide sequence represented by SEQ ID NO: 320.

[0808] The probes having the nucleotide sequence represented by SEQ ID NOS: 9414, 9415, 9416, 9417, 9418, 9419, 9420, 9421, 9422, 9423, 9424 were selected from the ORFs having the nucleotide sequence represented by SEQ ID NO: 321.

[0809] The probes having the nucleotide sequence represented by SEQ ID NOS: 9425, 9426, 9427, 9428, 9429, 9430, 9431, 9432, 9433, 9434, 9435 were selected from the ORFs having the nucleotide sequence represented by SEQ ID NO: 322.

[0810] The probes having the nucleotide sequence represented by SEQ ID NOS: 9436, 9437, 9438, 9439, 9440, 9441, 9442, 9443, 9444, 9445, 9446 were selected from the ORFs having the nucleotide sequence represented by SEQ ID NO: 323.

[0811] The probes having the nucleotide sequence represented by SEQ ID NOS: 9447, 9448, 9449, 9450, 9451, 9452, 9453, 9454, 9455, 9456, 9457 were selected from the ORFs having the nucleotide sequence represented by SEQ ID NO: 324.

[0812] The probes having the nucleotide sequence represented by SEQ ID NOS: 9458, 9459, 9460, 9461, 9462, 9463, 9464, 9465, 9466, 9467, 9468 were selected from the ORFs having the nucleotide sequence represented by SEQ ID NO: 325.

[0813] The probes having the nucleotide sequence represented by SEQ ID NOS: 9469, 9470, 9471, 9472, 9473, 9474, 9475, 9476, 9477, 9478, 9479 were selected from the ORFs having the nucleotide sequence represented by SEQ ID NO: 326.

[0814] The probes having the nucleotide sequence represented by SEQ ID NOS: 9480, 9481, 9482, 9483, 9484, 9485, 9486, 9487, 9488, 9489, 9490 were selected from the ORFs having the nucleotide sequence represented by SEQ ID NO: 327.

[0815] The probes having the nucleotide sequence represented by SEQ ID NOS: 9491, 9492, 9493, 9494, 9495, 9496, 9497, 9498, 9499, 9500, 9501 were selected from the ORFs having the nucleotide sequence represented by SEQ ID NO: 328.

[0816] The probes having the nucleotide sequence represented by SEQ ID NOS: 9502, 9503, 9504, 9505, 9506, 9507, 9508, 9509, 9510, 9511, 9512 were selected from the ORFs having the nucleotide sequence represented by SEQ ID NO: 329.

[0817] The probes having the nucleotide sequence represented by SEQ ID NOS: 9513, 9514, 9515, 9516, 9517, 9518, 9519, 9520, 9521, 9522, 9523 were selected from the ORFs having the nucleotide sequence represented by SEQ ID NO: 330.

[0818] The probes having the nucleotide sequence represented by SEQ ID NOS: 9524, 9525, 9526, 9527, 9528, 9529, 9530, 9531, 9532, 9533, 9534 were selected from the ORFs having the nucleotide sequence represented by SEQ ID NO: 331.

[0819] The probes having the nucleotide sequence represented by SEQ ID NOS: 9535, 9536, 9537, 9538, 9539, 9540, 9541, 9542, 9543, 9544, 9545, 9546, 9547, 9548, 9549, 9550, 9551, 9552, 9553, 9554, 9555, 9556 were selected from the ORFs having the nucleotide sequence represented by SEQ ID NO: 332.

[0820] The probes having the nucleotide sequence represented by SEQ ID NOS: 9557, 9558, 9559, 9560, 9561, 9562, 9563, 9564, 9565, 9566, 9567, 9568, 9569, 9570, 9571, 9572, 9573, 9574, 9575, 9576, 9577, 9578 were selected from the ORFs having the nucleotide sequence represented by SEQ ID NO: 333.

[0821] The probes having the nucleotide sequence represented by SEQ ID NOS: 9579, 9580, 9581, 9582, 9583, 9584, 9585, 9586, 9587, 9588, 9589 were selected from the ORFs having the nucleotide sequence represented by SEQ ID NO: 334.

[0822] The probes having the nucleotide sequence represented by SEQ ID NOS: 9590, 9591, 9592, 9593, 9594, 9595, 9596, 9597, 9598, 9599, 9600 were selected from the ORFs having the nucleotide sequence represented by SEQ ID NO: 335.

[0823] The probes having the nucleotide sequence represented by SEQ ID NOS: 9601, 9602, 9603, 9604, 9605, 9606, 9607, 9608, 9609, 9610, 9611 were selected from the ORFs having the nucleotide sequence represented by SEQ ID NO: 336.

[0824] The probes having the nucleotide sequence represented by SEQ ID NOS: 9612, 9613, 9614, 9615, 9616, 9617, 9618, 9619, 9620, 9621, 9622 were selected from the ORFs having the nucleotide sequence represented by SEQ ID NO: 337.

[0825] The probes having the nucleotide sequence represented by SEQ ID NOS: 9623, 9624, 9625, 9626, 9627, 9628, 9629, 9630, 9631, 9632, 9633 were selected from the ORFs having the nucleotide sequence represented by SEQ ID NO: 338.

[0826] The probes having the nucleotide sequence represented by SEQ ID NOS: 9634, 9635, 9636, 9637, 9638, 9639, 9640, 9641, 9642, 9643, 9644 were selected from the ORFs having the nucleotide sequence represented by SEQ ID NO: 339.

[0827] The probes having the nucleotide sequence represented by SEQ ID NOS: 9645, 9646, 9647, 9648, 9649, 9650, 9651, 9652, 9653, 9654, 9655 were selected from the ORFs having the nucleotide sequence represented by SEQ ID NO: 340.

[0828] The probes having the nucleotide sequence represented by SEQ ID NOS: 9656, 9657, 9658, 9659, 9660, 9661, 9662, 9663, 9664, 9665, 9666 were selected from the ORFs having the nucleotide sequence represented by SEQ ID NO: 341.

[0829] The probes having the nucleotide sequence represented by SEQ ID NOS: 9667, 9668, 9669, 9670, 9671, 9672, 9673, 9674, 9675, 9676, 9677 were selected from the ORFs having the nucleotide sequence represented by SEQ ID NO: 342.

[0830] The probes having the nucleotide sequence represented-by SEQ ID NOS: 9678, 9679, 9680, 9681, 9682, 9683, 9684, 9685, 9686, 9687, 9688 were selected from the ORFs having the nucleotide sequence represented by SEQ ID NO: 343.

[0831] The probes having the nucleotide sequence-represented by SEQ ID NOS: 9689, 9690, 9691, 9692, 9693, 9694, 9695, 9696, 9697, 9698, 9699 were selected from the ORFs having the nucleotide sequence represented by SEQ ID NO: 344.

[0832] The probes having-the nucleotide sequence represented by SEQ ID NOS: 9700, 9701, 9702, 9703, 9704, 9705, 9706, 9707, 9708, 9709, 9710 were selected from the ORFs having the nucleotide sequence represented by SEQ ID NO: 345.

[0833] The probes having the nucleotide sequence represented by SEQ ID NOS: 9711, 9712, 9713, 9714, 9715, 9716, 9717, 9718, 9719, 9720, 9721 were selected from the ORFs having the nucleotide sequence represented by SEQ ID NO: 346.

[0834] The probes having the nucleotide sequence represented by SEQ ID NOS: 9722, 9723, 9724, 9725, 9726, 9727, 9728, 9729, 9730, 9731, 9732 were selected from the ORFs having the nucleotide sequence represented by SEQ ID NO: 347.

[0835] The probes having the nucleotide sequence represented by SEQ ID NOS: 9733, 9734, 9735, 9736, 9737, 9738, 9739, 9740, 9741, 9742, 9743 were selected from the ORFs having the nucleotide sequence represented by SEQ ID NO: 348.

[0836] The probes having the nucleotide sequence represented by SEQ ID NOS: 9744, 9745, 9746, 9747, 9748, 9749, 9750, 9751, 9752, 9753, 9754 were selected from the ORFs having the nucleotide sequence represented by SEQ ID NO: 349.

[0837] The probes having the nucleotide sequence represented by SEQ ID NOS: 9755, 9756, 9757, 9758, 9759, 9760, 9761, 9762, 9763, 9764, 9765 were selected from the ORFs having the nucleotide sequence represented by SEQ ID NO: 350.

[0838] The probes having the nucleotide sequence represented by SEQ ID NOS: 9766, 9767, 9768, 9769, 9770, 9771, 9772, 9773, 9774, 9775, 9776 were selected from the ORFs having the nucleotide sequence represented by SEQ ID NO: 351.

[0839] The probes having the nucleotide sequence represented by SEQ ID NOS: 9777, 9778, 9779, 9780, 9781, 9782, 9783, 9784, 9785, 9786, 9787 were selected from the ORFs having the nucleotide sequence represented by SEQ ID NO: 352.

[0840] The probes having the nucleotide sequence represented by SEQ ID NOS: 9788, 9789, 9790, 9791, 9792, 9793, 9794, 9795, 9796, 9797, 9798 were selected from the ORFs having the nucleotide sequence represented by SEQ ID NO: 353.

[0841] The probes having the nucleotide sequence represented by SEQ ID NOS: 9799, 9800, 9801, 9802, 9803, 9804, 9805, 9806, 9807, 9808, 9809 were selected from the ORFs having the nucleotide sequence represented by SEQ ID NO: 354.

[0842] The probes having the nucleotide sequence represented by SEQ ID NOS: 9810, 9811, 9812, 9813, 9814, 9815, 9816, 9817, 9818, 9819, 9820 were selected from the ORFs having the nucleotide sequence represented by SEQ ID NO: 355.

[0843] The probes having the nucleotide sequence represented by SEQ ID NOS: 9821, 9822, 9823, 9824, 9825, 9826, 9827, 9828, 9829, 9830, 9831 were selected from the ORFs having the nucleotide sequence represented by SEQ ID NO: 356.

[0844] The probes having the nucleotide sequence represented by SEQ ID NOS: 9832, 9833, 9834, 9835, 9836, 9837, 9838, 9839, 9840, 9841, 9842 were selected from the ORFs having the nucleotide sequence represented by SEQ ID NO: 357.

[0845] The probes having the nucleotide sequence represented by SEQ ID NOS: 9843, 9844, 9845, 9846, 9847, 9848, 9849, 9850, 9851, 9852, 9853 were selected from the ORFs having the nucleotide sequence represented by SEQ ID NO: 358.

[0846] The probes having the nucleotide sequence represented by SEQ ID NOS: 9854, 9855, 9856, 9857, 9858, 9859, 9860, 9861, 9862, 9863, 9864 were selected from the ORFs having the nucleotide sequence represented by SEQ ID NO: 359.

[0847] The probes having the nucleotide sequence represented by SEQ ID NOS: 9865, 9866, 9867, 9868, 9869, 9870, 9871, 9872, 9873, 9874, 9875 were selected from the ORFs having the nucleotide sequence represented by SEQ ID NO: 360.

[0848] The probes having the nucleotide sequence represented by SEQ ID NOS: 9876, 9877, 9878, 9879, 9880, 9881, 9882, 9883, 9884, 9885, 9886 were selected from the ORFs having the nucleotide sequence represented by SEQ ID NO: 361.

[0849] The probes having the nucleotide sequence represented by SEQ ID NOS: 9887, 9888, 9889, 9890, 9891, 9892, 9893, 9894, 9895, 9896, 9897 were selected from the ORFs having the nucleotide sequence represented by SEQ ID NO: 362.

[0850] The probes having the nucleotide sequence represented by SEQ ID NOS: 9898, 9899, 9900, 9901, 9902, 9903, 9904, 9905, 9906, 9907, 9908 were selected from the ORFs having the nucleotide sequence represented by SEQ ID NO: 363.

[0851] The probes having the nucleotide sequence represented by SEQ ID NOS: 9909, 9910, 9911, 9912, 9913, 9914, 9915, 9916, 9917, 9918, 9919 were selected from the ORFs having the nucleotide sequence represented by SEQ ID NO: 364.

[0852] The probes having the nucleotide sequence represented by SEQ ID NOS: 9920, 9921, 9922, 9923, 9924, 9925, 9926, 9927, 9928, 9929, 9930 were selected from the ORFs having the nucleotide sequence represented by SEQ ID NO: 365.

[0853] The probes having the nucleotide sequence represented by SEQ ID NOS: 9931, 9932, 9933, 9934, 9935, 9936, 9937, 9938, 9939, 9940, 9941 were selected from the ORFs having the nucleotide sequence represented by SEQ ID NO: 366.

[0854] The probes having the nucleotide sequence represented by SEQ ID NOS: 9942, 9943, 9944, 9945, 9946, 9947, 9948, 9949, 9950, 9951, 9952 were selected from the ORFs having the nucleotide sequence represented by SEQ ID NO: 367.

[0855] The probes having the nucleotide sequence represented by SEQ ID NOS: 9953, 9954, 9955, 9956, 9957, 9958, 9959, 9960, 9961, 9962, 9963 were selected from the ORFs having the nucleotide sequence represented by SEQ ID NO: 368.

[0856] The probes having the nucleotide sequence represented by SEQ ID NOS: 9964, 9965, 9966, 9967, 9968, 9969, 9970, 9971, 9972, 9973, 9974 were selected from the ORFs having the nucleotide sequence represented by SEQ ID NO: 369.

[0857] The probes having the nucleotide sequence represented by SEQ ID NOS: 9975, 9976, 9977, 9978, 9979, 9980, 9981, 9982, 9983, 9984, 9985 were selected from the ORFs having the nucleotide sequence represented by SEQ ID NO: 370.

[0858] The probes having the nucleotide sequence represented by SEQ ID NOS: 9986, 9987, 9988, 9989, 9990, 9991, 9992, 9993, 9994, 9995, 9996 were selected from the ORFs having the nucleotide sequence represented by SEQ ID NO: 371.

[0859] The probes having the nucleotide sequence represented by SEQ ID NOS: 9997, 9998, 9999, 10000, 10001, 10002, 10003, 10004, 10005, 10006, 10007 were selected from the ORFs having the nucleotide sequence represented by SEQ ID NO: 372.

[0860] The probes having the nucleotide sequence represented by SEQ ID NOS: 10008, 10009, 10010, 10011, 10012, 10013, 10014, 10015, 10016, 10017, 10018 were selected from the ORFs having the nucleotide sequence represented by SEQ ID NO: 373.

[0861] The probes having the nucleotide sequence represented by SEQ ID NOS: 10019, 10020, 10021, 10022, 10023, 10024, 10025, 10026, 10027, 10028, 10029 were selected from the ORFs having the nucleotide sequence represented by SEQ ID NO: 374.

[0862] The probes having the nucleotide sequence represented by SEQ ID NOS: 10030, 10031, 10032, 10033, 10034, 10035, 10036, 10037, 10038, 10039, 10040 were selected from the ORFs having the nucleotide sequence represented by SEQ ID NO: 375.

[0863] The probes having the nucleotide sequence represented by SEQ ID NOS: 10041, 10042, 10043, 10044, 10045, 10046, 10047, 10048, 10049, 10050, 10051 were selected from the ORFs having the nucleotide sequence represented by SEQ ID NO: 376.

[0864] The probes having the nucleotide sequence represented by SEQ ID NOS: 10052, 10053, 10054, 10055, 10056, 10057, 10058, 10059, 10060, 10061, 10062 were selected from the ORFs having the nucleotide sequence represented by SEQ ID NO: 377.

[0865] The probes having the nucleotide sequence represented by SEQ ID NOS: 10063, 10064, 10065, 10066, 10067, 10068, 10069, 10070, 10071, 10072, 10073 were selected from the ORFs having the nucleotide sequence represented by SEQ ID NO: 378.

[0866] The probes having the nucleotide sequence represented by SEQ ID NOS: 10074, 10075, 10076, 10077, 10078, 10079, 10080, 10081, 10082, 10083, 10084 were selected from the ORFs having the nucleotide sequence represented by SEQ ID NO: 379.

[0867] The probes having the nucleotide sequence represented by SEQ ID NOS: 10085, 10086, 10087, 10088, 10089, 10090, 10091, 10092, 10093; 10094, 10095 were selected from the ORFs having the nucleotide sequence represented by SEQ ID NO: 380.

[0868] The probes having the nucleotide sequence represented by SEQ ID NOS: 10096, 10097, 10098, 10099, 10100, 10101, 10102, 10103, 10104, 10105, 10106 were selected from the ORFs having the nucleotide sequence represented by SEQ ID NO: 381.

[0869] The probes having the nucleotide sequence represented by SEQ ID NOS: 10107, 10108, 10109, 10110, 10111, 10112, 10113, 10114, 10115, 10116, 10117 were selected from the ORFs having the nucleotide sequence represented by SEQ ID NO: 382.

[0870] The probes having the nucleotide sequence represented by SEQ ID NOS: 10118, 10119, 10120, 10121, 10122, 10123, 10124, 10125, 10126, 10127, 10128 were selected from the ORFs having the nucleotide sequence represented by SEQ ID NO: 383.

[0871] The probes having the nucleotide sequence represented by SEQ ID NOS: 10129, 10130, 10131, 10132, 10133, 10134, 10135, 10136, 10137, 10138, 10139 were selected from the ORFs having the nucleotide sequence represented by SEQ ID NO: 384.

[0872] The probes having the nucleotide sequence represented by SEQ ID NOS: 10140, 10141, 10142, 10143, 10144, 10145, 10146, 10147, 10148, 10149, 10150 were selected from the ORFs having the nucleotide sequence represented by SEQ ID NO: 385.

[0873] The probes having the nucleotide sequence represented by SEQ ID NOS: 10151, 10152, 10153, 10154, 10155, 10156, 10157, 10158, 10159, 10160, 10161 were selected from the ORFs having the nucleotide sequence represented by SEQ ID NO: 386.

[0874] The probes having the nucleotide sequence represented by SEQ ID NOS: 10162, 10163, 10164, 10165, 10166, 10167, 10168, 10169, 10170, 10171, 10172 were selected from the ORFs having the nucleotide sequence represented by SEQ ID NO: 387.

[0875] The probes having the nucleotide sequence represented by SEQ ID NOS: 10173, 10174, 10175, 10176, 10177, 10178, 10179, 10180, 10181, 10182, 10183 were selected from the ORFs having the nucleotide sequence represented by SEQ ID NO: 388.

[0876] The probes having the nucleotide sequence represented by SEQ ID NOS: 10184, 10185, 10186, 10187, 10188, 10189, 10190, 10191, 10192, 10193, 10194 were selected from the ORFs having the nucleotide sequence represented by SEQ ID NO: 389.

[0877] The probes having the nucleotide sequence represented by SEQ ID NOS: 10195, 10196, 10197, 10198, 10199, 10200, 10201, 10202, 10203, 10204, 10205 were selected from the ORFs having the nucleotide sequence represented by SEQ ID NO: 390.

[0878] The probes having the nucleotide sequence represented by SEQ ID NOS: 10206, 10207, 10208, 10209, 10210, 10211, 10212, 10213, 10214, 10215, 10216 were selected from the ORFs having the nucleotide sequence represented by SEQ ID NO: 391.

[0879] The probes having the nucleotide sequence represented by SEQ ID NOS: 10217, 10218, 10219, 10220, 10221, 10222, 10223, 10224, 10225, 10226, 10227 were selected from the ORFs having the nucleotide sequence represented by SEQ ID NO: 392.

[0880] The probes having the nucleotide sequence represented by SEQ ID NOS: 10228, 10229, 10230, 10231, 10232, 10233, 10234, 10235, 10236, 10237, 10238 were selected from the ORFs having the nucleotide sequence represented by SEQ ID NO: 393.

[0881] The probes having the nucleotide sequence represented by SEQ ID NOS: 10239, 10240, 10241, 10242, 10243, 10244, 10245, 10246, 10247, 10248, 10249 were selected from the ORFs having the nucleotide sequence represented by SEQ ID NO: 394.

[0882] The probes having the nucleotide sequence represented by SEQ ID NOS: 10250, 10251, 10252, 10253, 10254, 10255, 10256, 10257, 10258, 10259, 10260 were selected from the ORFs having the nucleotide sequence represented by SEQ ID NO: 395.

[0883] The probes having the nucleotide sequence represented by SEQ ID NOS: 10261, 10262, 10263, 10264, 10265, 10266, 10267, 10268, 10269, 10270, 10271 were selected from the ORFs having the nucleotide sequence represented by SEQ ID NO: 396.

[0884] The probes having the nucleotide sequence represented by SEQ ID NOS: 10272, 10273, 10274, 10275, 10276, 10277, 10278, 10279, 10280, 10281, 10282 were selected from the ORFs having the nucleotide sequence represented by SEQ ID NO: 397.

[0885] The probes having the nucleotide sequence represented by SEQ ID NOS: 10283, 10284, 10285, 10286, 10287, 10288, 10289, 10290, 10291, 10292, 10293 were selected from the ORFs having the nucleotide sequence represented by SEQ ID NO: 398.

[0886] The probes having the nucleotide sequence represented by SEQ ID NOS: 10294, 10295, 10296, 10297, 10298, 10299, 10300, 10301, 10302, 10303, 10304 were selected from the ORFs having the nucleotide sequence represented by SEQ ID NO: 399.

[0887] The probes having the nucleotide sequence represented by SEQ ID NOS: 10305, 10306, 10307, 10308, 10309, 10310, 10311, 10312, 10313, 10314, 10315 were selected from the ORFs having the nucleotide sequence represented by SEQ ID NO: 400.

[0888] The probes having the nucleotide sequence represented by SEQ ID NOS: 10316, 10317, 10318, 10319, 10320, 10321, 1032.2, 10323, 10324, 10325, 10326 were selected from the ORFs having the nucleotide sequence represented by SEQ ID NO: 401.

[0889] The probes having the nucleotide sequence represented by SEQ ID NOS: 10327, 10328, 10329, 10330, 10331, 10332, 10333, 10334, 10335, 10336, 10337 were selected from the ORFs having the nucleotide sequence represented by SEQ ID NO: 402.

[0890] The probes having the nucleotide sequence represented by SEQ ID NOS: 10338, 10339, 10340, 10341, 10342, 10343, 10344, 10345, 10346, 10347, 10348 were selected from the ORFs having the nucleotide sequence represented by SEQ ID NO: 403.

[0891] The probes having the nucleotide sequence represented by SEQ ID NOS: 10349, 10350, 10351, 10352, 10353, 10354, 10355, 10356, 10357, 10358, 10359 were selected from the ORFs having the nucleotide sequence represented by SEQ ID NO: 404.

[0892] The probes having the nucleotide sequence represented by SEQ ID NOS: 10360, 10361, 10362, 10363, 10364, 10365, 10366, 10367, 10368, 10369, 10370 were selected from the ORFs having the nucleotide sequence represented by SEQ ID NO: 405.

[0893] The probes having the nucleotide sequence represented by SEQ ID NOS: 10371, 10372, 10373, 10374, 10375, 10376, 10377, 10378, 10379, 10380, 10381 were selected from the ORFs having the nucleotide sequence represented by SEQ ID NO: 406.

[0894] The probes having the nucleotide sequence represented by SEQ ID NOS: 10382, 10383, 10384, 10385, 10386, 10387, 10388, 10389, 10390, 10391, 10392 were selected from the ORFs having the nucleotide-sequence represented by SEQ ID NO: 407.

[0895] The probes having the nucleotide sequence represented by SEQ ID NOS: 10393, 10394, 10395, 10396, 10397, 10398, 10399, 10400, 10401, 10402, 10403 were selected from the ORFs having the nucleotide sequence represented by SEQ ID NO: 408.

[0896] The probes having the nucleotide sequence represented by SEQ ID NOS: 10404, 10405, 10406, 10407, 10408, 10409, 10410, 10411, 10412, 10413, 10414 were selected from the ORFs having the nucleotide sequence represented by SEQ ID NO: 409.

[0897] The probes having the nucleotide sequence represented by SEQ ID NOS: 10415, 10416, 10417, 10418, 10419, 10420, 10421, 10422, 10423, 10424, 10425 were selected from the ORFs having the nucleotide sequence represented by SEQ ID NO: 410.

[0898] The probes having the nucleotide sequence represented by SEQ ID NOS: 10426, 10427, 10428, 10429, 10430, 10431, 10432, 10433, 10434, 10435, 10436 were selected from the ORFs having the nucleotide sequence represented by SEQ ID NO: 411.

[0899] The probes having the nucleotide sequence represented by SEQ ID NOS: 10437, 10438, 10439, 10440, 10441, 10442, 10443, 10444, 10445, 10446, 10447 were selected from the ORFs having the nucleotide sequence represented by SEQ ID NO: 412.

[0900] The probes having the nucleotide sequence represented by SEQ ID NOS: 10448, 10449, 10450, 10451, 10452, 10453, 10454, 10455, 10456, 10457, 10458 were selected from the ORFs having the nucleotide sequence represented by SEQ ID NO: 413.

[0901] The probes having the nucleotide sequence represented by SEQ ID NOS: 10459, 10460, 10461, 10462, 10463, 10464, 10465, 10466, 10467, 10468, 10469 were selected from the ORFs having the nucleotide sequence represented by SEQ ID NO: 414.

[0902] The probes having the nucleotide sequence represented by SEQ ID NOS: 10470, 10471, 10472, 10473, 10474, 10475, 10476, 10477, 10478, 10479, 10480 were selected from the ORFs having the nucleotide sequence represented by SEQ ID NO: 415.

[0903] The probes having the nucleotide sequence represented by SEQ ID NOS: 10481, 10482, 10483, 10484, 10485, 10486, 10487, 10488, 10489, 10490, 10491 were selected from the ORFs having the nucleotide sequence represented by SEQ ID NO: 416.

[0904] The probes having the nucleotide sequence represented by SEQ ID NOS: 10492, 10493, 10494, 10495, 10496, 10497, 10498, 10499, 10500, 10501, 10502 were selected from the ORFs having the nucleotide sequence represented by SEQ ID NO: 417.

[0905] The probes having the nucleotide sequence represented by SEQ ID NOS: 10503, 10504, 10505, 10506, 10507, 10508, 10509, 10510, 10511, 10512, 10513 were selected from the ORFs having the nucleotide sequence represented by SEQ ID NO: 418.

[0906] The probes having the nucleotide sequence represented by SEQ ID NOS: 10514, 10515, 10516, 10517, 10518, 10519, 10520, 10521, 10522, 10523, 10524 were selected from the ORFs having the nucleotide sequence represented by SEQ ID NO: 419.

[0907] The probes having the nucleotide sequence represented by SEQ ID NOS: 10525, 10526, 10527, 10528, 10529, 10530, 10531, 10532, 10533, 10534, 10535 were selected from the ORFs having the nucleotide sequence represented by SEQ ID NO: 420.

[0908] The probes having the nucleotide sequence represented by SEQ ID NOS: 10536, 10537, 10538, 10539, 10540, 10541, 10542, 10543, 10544, 10545, 10546 were selected from the ORFs having the nucleotide sequence represented by SEQ ID NO: 421.

[0909] The probes having the nucleotide sequence represented by SEQ ID NOS: 10547, 10548, 10549, 10550, 10551, 10552, 10553, 10554, 10555, 10556, 10557 were selected from the ORFs having the nucleotide sequence represented by SEQ ID NO: 422.

[0910] The probes having the nucleotide sequence represented by SEQ ID NOS: 10558, 10559, 10560, 10561, 10562, 10563, 10564, 10565, 10566, 10567, 10568 were selected from the ORFs having the nucleotide sequence represented by SEQ ID NO: 423.

[0911] The probes having the nucleotide sequence represented by SEQ ID NOS: 10569, 10570, 10571, 10572, 10573, 10574, 10575, 10576, 10577, 10578, 10579 were selected from the ORFs having the nucleotide sequence represented by SEQ ID NO: 424.

[0912] The probes having the nucleotide sequence represented by SEQ ID NOS: 10580, 10581, 10582, 10583, 10584, 10585, 10586, 10587, 10588, 10589, 10590 were selected from the ORFs having the nucleotide sequence represented by SEQ ID NO: 425.

[0913] The probes having the nucleotide sequence represented by SEQ ID NOS: 10591, 10592, 10593, 10594, 10595, 10596, 10597, 10598, 10599, 10600, 10601 were selected from the ORFs having the nucleotide sequence represented by SEQ ID NO: 426.

[0914] The probes having the nucleotide sequence represented by SEQ ID NOS: 10602, 10603, 10604, 10605, 10606, 10607, 10608, 10609, 10610, 10611, 10612 were selected from the ORFs having the nucleotide sequence represented by SEQ ID NO: 427.

[0915] The probes having the nucleotide sequence represented by SEQ ID NOS: 10613, 10614, 10615, 10616, 10617, 10618, 10619, 10620, 10621, 10622, 10623 were selected from the ORFs having the nucleotide sequence represented by SEQ ID NO: 428.

[0916] The probes having the nucleotide sequence represented by SEQ ID NOS: 10624, 10625, 10626, 10627, 10628, 10629, 10630, 10631, 10632, 10633, 10634 were selected from the ORFs having the nucleotide sequence represented by SEQ ID NO: 429.

[0917] The probes having the nucleotide sequence represented by SEQ ID NOS: 10635, 10636, 10637, 10638, 10639, 10640, 10641, 10642, 10643, 10644, 10645 were selected from the ORFs having the nucleotide sequence represented by SEQ ID NO: 430.

[0918] The probes having the nucleotide sequence represented by SEQ ID NOS: 10646, 10647, 10648, 10649, 10650, 10651, 10652, 10653, 10654, 10655, 10656 were selected from the ORFs having the nucleotide sequence represented by SEQ ID NO: 431.

[0919] The probes having the nucleotide sequence represented by SEQ ID NOS: 10657, 10658, 10659, 10660, 10661, 10662, 10663, 10664, 10665, 10666, 10667 were selected from the ORFs having the nucleotide sequence represented by SEQ ID NO: 432.

[0920] The probes having the nucleotide sequence represented by SEQ ID NOS: 10668, 10669, 10670, 10671, 10672, 10673, 10674, 10675, 10676, 10677, 10678 were selected from the ORFs having the nucleotide sequence represented by SEQ ID NO: 433.

[0921] The probes having the nucleotide sequence represented by SEQ ID NOS: 10679, 10680, 10681, 10682, 10683, 10684, 10685, 10686, 10687, 10688, 10689 were selected from the ORFs having the nucleotide sequence represented by SEQ ID NO: 434.

[0922] The probes having the nucleotide sequence represented by SEQ ID NOS: 10690, 10691, 10692, 10693, 10694, 10695, 10696, 10697, 10698, 10699, 10700 were selected from the ORFs having the nucleotide sequence represented by SEQ ID NO: 435.

[0923] The probes having the nucleotide sequence represented by SEQ ID NOS: 10701, 10702, 10703, 10704, 10705, 10706, 10707, 10708, 10709, 10710, 10711 were selected from the ORFs having the nucleotide sequence represented by SEQ ID NO: 436.

[0924] The probes having the nucleotide sequence represented by SEQ ID NOS: 10712, 10713, 10714, 10715, 10716, 10717, 10718, 10719, 10720, 10721, 10722 were selected from the ORFs having the nucleotide sequence represented by SEQ ID NO: 437.

[0925] The probes having the nucleotide sequence represented by SEQ ID NOS: 10723, 10724, 10725, 10726, 10727, 10728, 10729, 10730, 10731, 10732, 10733 were selected from the ORFs having the nucleotide sequence represented by SEQ ID NO: 438.

[0926] The probes having the nucleotide sequence represented by SEQ ID NOS: 10734, 10735, 10736, 10737, 10738, 10739, 10740, 10741, 10742, 10743, 10744 were selected from the ORFs having the nucleotide sequence represented by SEQ ID NO: 439.

[0927] The probes having the nucleotide sequence represented by SEQ ID NOS: 10745, 10746, 10747, 10748, 10749, 10750, 10751, 10752, 10753, 10754, 10755 were selected from the ORFs having the nucleotide sequence represented by SEQ ID NO: 440.

[0928] The probes having the nucleotide sequence represented by SEQ ID NOS: 10756, 10757, 10758, 10759, 10760, 10761, 10762, 10763, 10764, 10765, 10766 were selected from the ORFs having the nucleotide sequence represented by SEQ ID NO: 441.

[0929] The probes having the nucleotide sequence represented by SEQ ID NOS: 10767, 10768, 10769, 10770, 10771, 10772, 10773, 10774, 10775, 10776, 10777 were selected from the ORFs having the nucleotide sequence represented by SEQ ID NO: 442.

[0930] The probes having the nucleotide sequence represented by SEQ ID NOS: 10778, 10779, 10780, 10781, 10782, 10783, 10784, 10785, 10786, 10787, 10788 were selected from the ORFs having the nucleotide sequence represented by SEQ ID NO: 443.

[0931] The probes having the nucleotide sequence represented by SEQ ID NOS: 10789, 10790, 10791, 10792, 10793, 10794, 10795, 10796, 10797, 10798, 10799 were selected from the ORFs having the nucleotide sequence represented by SEQ ID NO: 444.

[0932] The probes having the nucleotide sequence represented by SEQ ID NOS: 10800, 10801, 10802, 10803, 10804, 10805, 10806, 10807, 10808, 10809, 10810 were selected from the ORFs having the nucleotide sequence represented by SEQ ID NO: 445.

[0933] The probes having the nucleotide sequence represented by SEQ ID NOS: 10811, 10812, 10813, 10814, 10815, 10816, 10817, 10818, 10819, 10820, 10821 were selected from the ORFs having the nucleotide sequence represented by SEQ ID NO: 446.

[0934] The probes having the nucleotide sequence represented by SEQ ID NOS: 10822, 10823, 10824, 10825, 10826, 10827, 10828, 10829, 10830, 10831, 10832 were selected from the ORFs having the nucleotide sequence represented by SEQ ID NO: 447.

[0935] The probes having the nucleotide sequence represented by SEQ ID NOS: 10833, 10834, 10835, 10836, 10837, 10838, 10839, 10840, 10841, 10842, 10843 were selected from the ORFs having the nucleotide sequence represented by SEQ ID NO: 448.

[0936] The probes having the nucleotide sequence represented by SEQ ID NOS: 10844, 10845, 10846, 10847, 10848, 10849, 10850, 10851, 10852, 10853, 10854 were selected from the ORFs having the nucleotide sequence represented by SEQ ID NO: 449.

[0937] The probes having the nucleotide sequence represented by SEQ ID NOS: 10855, 10856, 10857, 10858, 10859, 10860, 10861, 10862, 10863, 10864, 10865 were selected from the ORFs having the nucleotide sequence represented by SEQ ID NO: 450.

[0938] The probes having the nucleotide sequence represented by SEQ ID NOS: 10866, 10867, 10868, 10869, 10870, 10871, 10872, 10873, 10874, 10875, 10876 were selected from the ORFs having the nucleotide sequence represented by SEQ ID NO: 451.

[0939] The probes having the nucleotide sequence represented by SEQ ID NOS: 10877, 10878, 10879, 10880, 10881, 10882, 10883, 10884, 10885, 10886, 10887 were selected from the ORFs having the nucleotide sequence represented by SEQ ID NO: 452.

[0940] The probes having the nucleotide sequence represented by SEQ ID NOS: 10888, 10889, 10890, 10891, 10892, 10893, 10894, 10895, 10896, 10897, 10898 were selected from the ORFs having the nucleotide sequence represented by SEQ ID NO: 453.

[0941] The probes having the nucleotide sequence represented by SEQ ID NOS: 10899, 10900, 10901, 10902, 10903, 10904, 10905, 10906, 10907, 10908, 10909 were selected from the ORFs having the nucleotide sequence represented by SEQ ID NO: 454.

[0942] The probes having the nucleotide sequence represented by SEQ ID NOS: 10910, 10911, 10912, 10913, 10914, 10915, 10916, 10917, 10918, 10919, 10920 were selected from the ORFs having the nucleotide sequence represented by SEQ ID NO: 455.

[0943] The probes having the nucleotide sequence represented by SEQ ID NOS: 10921, 10922, 10923, 10924, 10925, 10926, 10927, 10928, 10929, 10930, 10931 were selected from the ORFs having the nucleotide sequence represented by SEQ ID NO: 456.

[0944] The probes having the nucleotide sequence represented by SEQ ID NOS: 10932, 10933, 10934, 10935, 10936, 10937, 10938, 10939, 10940, 10941, 10942 were selected from the ORFs having the nucleotide sequence represented by SEQ ID NO: 457.

[0945] The probes having the nucleotide sequence represented by SEQ ID NOS: 10943, 10944, 10945, 10946, 10947, 10948, 10949, 10950, 10951, 10952, 10953 were selected from the ORFs having the nucleotide sequence represented by SEQ ID NO: 458.

[0946] The probes having the nucleotide sequence represented by SEQ ID NOS: 10954, 10955, 10956, 10957, 10958, 10959, 10960, 10961, 10962, 10963, 10964 were selected from the ORFs having the nucleotide sequence represented by SEQ ID NO: 459.

[0947] The probes having the nucleotide sequence represented by SEQ ID NOS: 10965, 10966, 10967, 10968, 10969, 10970, 10971, 10972, 10973, 10974, 10975 were selected from the ORFs having the nucleotide sequence represented by SEQ ID NO: 460.

[0948] The probes having the nucleotide sequence represented by SEQ ID NOS: 10976, 10977, 10978, 10979, 10980, 10981, 10982, 10983, 10984, 10985, 10986 were selected from the ORFs having the nucleotide sequence represented by SEQ ID NO: 461.

[0949] The probes having the nucleotide sequence represented by SEQ ID NOS: 10987, 10988, 10989, 10990, 10991, 10992, 10993, 10994, 10995, 10996, 10997 were selected from the ORFs having the nucleotide sequence represented by SEQ ID NO: 462.

[0950] The probes having the nucleotide sequence represented by SEQ ID NOS: 10998, 10999, 11000, 11001, 11002, 11003, 11004, 11005, 11006, 11007, 11008 were selected from the ORFs having the nucleotide sequence represented by SEQ ID NO: 463.

[0951] The probes having the nucleotide sequence represented by SEQ ID NOS: 11009, 11010, 11011, 11012, 11013, 11014, 11015, 11016, 11017, 11018, 11019 were selected from the ORFs having the nucleotide sequence represented by SEQ ID NO: 464.

[0952] The probes having the nucleotide sequence represented by SEQ ID NOS: 11020, 11021, 11022, 11023, 11024, 11025, 11026, 11027, 11028, 11029, 11030 were selected from the ORFs having the nucleotide sequence represented by SEQ ID NO: 465.

[0953] The probes having the nucleotide sequence represented by SEQ ID NOS: 11031, 11032, 11033, 11034, 11035, 11036, 11037, 11038, 11039, 11040, 11041 were selected from the ORFs having the nucleotide sequence represented by SEQ ID NO: 466.

[0954] The probes having the nucleotide sequence represented by SEQ ID NOS: 11042, 11043, 11044, 11045,.11046, 11047, 11048, 11049, 11050, 11051, 11052 were selected from the ORFs having the nucleotide sequence represented by SEQ ID NO: 467.

[0955] The probes having the nucleotide sequence represented by SEQ ID NOS: 11053, 11054, 11055, 11056, 11057, 11058, 11059, 11060, 11061, 11062, 11063 were selected from the ORFs having the nucleotide sequence represented by SEQ ID NO: 468.

[0956] The probes having the nucleotide sequence represented by SEQ ID NOS: 11064, 11065, 11066, 11067, 11068, 11069, 11070, 11071, 11072, 11073, 11074 were selected from the ORFs having the nucleotide sequence represented by SEQ ID NO: 469.

[0957] The probes having the nucleotide sequence represented by SEQ ID NOS: 11075, 11076, 11077, 11078, 11079, 11080, 11081, 11082, 11083, 11084, 11085 were selected from the ORFs having the nucleotide sequence represented by SEQ ID NO: 470.

[0958] The probes having the nucleotide sequence represented by SEQ ID NOS: 11086, 11087, 11088, 11089, 11090, 11091, 11092, 11093, 11094, 11095, 11096 were selected from the ORFs having the nucleotide sequence represented by SEQ ID NO: 471.

[0959] The probes having the nucleotide sequence represented by SEQ ID NOS: 11097, 11098, 11099, 11100, 11101, 11102, 11103, 11104, 11105, 11106, 11107 were selected from the ORFs having the nucleotide sequence represented by SEQ ID NO: 472.

[0960] The probes having the nucleotide sequence represented by SEQ ID NOS: 11108, 11109, 11110, 11111, 11112, 11113, 11114, 11115, 11116, 11117, 11118 were selected from the ORFs having the nucleotide sequence represented by SEQ ID NO: 473.

[0961] The probes having the nucleotide sequence represented by SEQ ID NOS: 11119, 11120, 11121, 11122, 11123, 11124, 11125, 11126, 11127, 11128, 11129 were selected from the ORFs having the nucleotide sequence represented by SEQ ID NO: 474.

[0962] The probes having the nucleotide sequence represented by SEQ ID NOS: 11130, 11131, 11132, 11133, 11134, 11135, 11136, 11137, 11138, 11139, 11140 were selected from the ORFs having the nucleotide sequence represented by SEQ ID NO: 475.

[0963] The probes having the nucleotide sequence represented by SEQ ID NOS: 11141, 11142, 11143, 11144, 11145, 11146, 11147, 11148, 11149, 11150, 11151 were selected from the ORFs having the nucleotide sequence represented by SEQ ID NO: 476.

[0965] The probes having the nucleotide sequence represented by SEQ ID NOS: 11152, 11153, 11154, 11155, 11156, 11157, 11158, 11159, 11160, 11161, 11162 were selected from the ORFs having the nucleotide sequence represented by SEQ ID NO: 477.

[0966] The probes having the nucleotide sequence represented by SEQ ID NOS: 11163, 11164, 11165, 11166, 11167, 11168, 11169, 11170, 11171, 11172, 11173 were selected from the ORFs having the nucleotide sequence represented by SEQ ID NO: 478.

[0967] The probes having the nucleotide sequence represented by SEQ ID NOS: 11174, 11175, 11176, 11177, 11178, 11179, 11180, 11181, 11182, 11183, 11184 were selected from the ORFs having the nucleotide sequence represented by SEQ ID NO: 479.

[0968] The probes having the nucleotide sequence represented by SEQ ID NOS: 11185, 11186, 11187, 11188, 11189, 11190, 11191, 11192, 11193, 11194, 11195 were selected from the ORFs having the nucleotide sequence represented by SEQ ID NO: 480.

[0969] The probes having the nucleotide sequence represented by SEQ ID NOS: 11196, 11197, 11198, 11199, 11200, 11201, 11202, 11203, 11204, 11205, 11206 were selected from the ORFs having the nucleotide sequence represented by SEQ ID NO: 481.

[0970] The probes having the nucleotide sequence represented by SEQ ID NOS: 11207, 11208, 11209, 11210, 11211, 11212, 11213, 11214, 11215, 11216, 11217 were selected from the ORFs having the nucleotide sequence represented by SEQ ID NO: 482.

[0971] The probes having the nucleotide sequence represented by SEQ ID NOS: 11218, 11219, 11220, 11221, 11222, 11223, 11224, 11225, 11226, 11227, 11228 were selected from the ORFs having the nucleotide sequence represented by SEQ ID NO: 483.

[0972] The probes having the nucleotide sequence represented by SEQ ID NOS: 11229, 11230, 11231, 11232, 11233, 11234, 11235, 11236, 11237, 11238, 11239 were selected from the ORFs having the nucleotide sequence represented by SEQ ID NO: 484.

[0973] The probes having the nucleotide sequence represented by SEQ ID NOS: 11240, 11241, 11242, 11243, 11244, 11245, 11246, 11247, 11248, 11249, 11250 were selected from the ORFs having the nucleotide sequence represented by SEQ ID NO: 485.

[0974] The probes having the nucleotide sequence represented by SEQ ID NOS: 11251, 11252, 11253, 11254, 11255, 11256, 11257, 11258, 11259, 11260, 11261 were selected from the ORFs having the nucleotide sequence represented by SEQ ID NO: 486.

[0975] The probes having the nucleotide sequence represented by SEQ ID NOS: 11262, 11263, 11264, 11265, 11266, 11267, 11268, 11269, 11270, 11271, 11272 were selected from the ORFs having the nucleotide sequence represented by SEQ ID NO: 487.

[0976] The probes having the nucleotide sequence represented by SEQ ID NOS: 11273, 11274, 11275, 11276, 11277, 11278, 11279, 11280, 11281, 11282, 11283 were selected from the ORFs having the nucleotide sequence represented by SEQ ID NO: 488.

[0977] The probes having the nucleotide sequence represented by SEQ ID NOS: 11284, 11285, 11286, 11287, 11288, 11289, 11290, 11291, 11292, 11293, 11294 were selected from the ORFs having the nucleotide sequence represented by SEQ ID NO: 489.

[0978] The probes having the nucleotide sequence represented by SEQ ID NOS: 11295, 11296, 11297, 11298, 11299, 11300, 11301, 11302, 11303, 11304, 11305 were selected from the ORFs having the nucleotide sequence represented by SEQ ID NO: 490.

[0979] The probes having the nucleotide sequence represented by SEQ ID NOS: 11306, 11307, 11308, 11309, 11310, 11311, 11312, 11313, 11314, 11315, 11316 were selected from the ORFs having the nucleotide sequence represented by SEQ ID NO: 491.

[0980] The probes having the nucleotide sequence represented by SEQ ID NOS: 11317, 11318, 11319, 11320, 11321, 11322, 11323, 11324, 11325, 11326, 11327 were selected from the ORFs having the nucleotide sequence represented by SEQ ID NO: 492.

[0981] The probes having the nucleotide sequence represented by SEQ ID NOS: 11328, 11329, 11330, 11331, 11332, 11333, 11334, 11335, 11336, 11337, 11338 were selected from the ORFs having the nucleotide sequence represented by SEQ ID NO: 493.

[0982] The probes having the nucleotide sequence represented by SEQ ID NOS: 11339, 11340, 11341, 11342, 11343, 11344, 11345, 11346, 11347, 11348, 11349 were selected from the ORFs having the nucleotide sequence represented by SEQ ID NO: 494.

[0983] The probes having the nucleotide sequence represented by SEQ ID NOS: 11350, 11351, 11352, 11353, 11354, 11355, 11356, 11357, 11358, 11359, 11360 were selected from the ORFs having the nucleotide sequence represented by SEQ ID NO: 495.

[0984] The probes having the nucleotide sequence represented by SEQ ID NOS: 11361, 11362, 11363, 11364, 11365, 11366, 11367, 11368, 11369, 11370, 11371 were selected from the ORFs having the nucleotide sequence represented by SEQ ID NO: 496.

[0985] The probes having the nucleotide sequence represented by SEQ ID NOS: 11372, 11373, 11374, 11375, 11376, 11377, 11378, 11379, 11380, 11381, 11382 were selected from the ORFs having the nucleotide sequence represented by SEQ ID NO: 497.

[0986] The probes having the nucleotide sequence represented by SEQ ID NOS: 11383, 11384, 11385, 11386, 11387, 11388, 11389, 11390, 11391, 11392, 11393 were selected from the ORFs having the nucleotide sequence represented by SEQ ID NO: 498.

[0987] The probes having the nucleotide sequence represented by SEQ ID NOS: 11394, 11395, 11396, 11397, 11398, 11399, 11400, 11401, 11402, 11403, 11404 were selected from the ORFs having the nucleotide sequence represented by SEQ ID NO: 499.

[0988] The probes having the nucleotide sequence represented by SEQ ID NOS: 11405, 11406, 11407, 11408, 11409, 11410, 11411, 11412, 11413, 11414, 11415 were selected from the ORFs having the nucleotide sequence represented by SEQ ID NO: 500.

[0989] The probes having the nucleotide sequence represented by SEQ ID NOS: 11416, 11417, 11418, 11419, 11420, 11421, 11422, 11423, 11424, 11425, 11426 were selected from the ORFs having the nucleotide sequence represented by SEQ ID NO: 501.

[0990] The probes having the nucleotide sequence represented by SEQ ID NOS: 11427, 11428, 11429, 11430, 11431, 11432, 11433, 11434, 11435, 11436, 11437 were selected from the ORFs having the nucleotide sequence represented by SEQ ID NO: 502.

[0991] The probes having the nucleotide sequence represented by SEQ ID NOS: 11438, 11439, 11440, 11441, 11442, 11443, 11444, 11445, 11446, 11447, 11448 were selected from the ORFs having the nucleotide sequence represented by SEQ ID NO: 503.

[0992] The probes having the nucleotide sequence represented by SEQ ID NOS: 11449, 11450, 11451, 11452, 11453, 11454, 11455, 11456, 11457, 11458, 11459 were selected from the ORFs having the nucleotide sequence represented by SEQ ID NO: 504.

[0993] The probes having the nucleotide sequence represented by SEQ ID NOS: 11460, 11461, 11462, 11463, 11464, 11465, 11466, 11467, 11468, 11469, 11470 were selected from the ORFs having the nucleotide sequence represented by SEQ ID NO: 505.

[0994] The probes having the nucleotide sequence represented by SEQ ID NOS: 11471, 11472, 11473, 11474, 11475, 11476, 11477, 11478, 11479, 11480, 11481 were selected from the ORFs having the nucleotide sequence represented by SEQ ID NO: 506.

[0995] The probes having the nucleotide sequence represented by SEQ ID NOS: 11482, 11483, 11484, 11485, 11486, 11487, 11488, 11489, 11490, 11491, 11492 were selected from the ORFs having the nucleotide sequence represented by SEQ ID NO: 507.

[0996] The probes having the nucleotide sequence represented by SEQ ID NOS: 11493, 11494, 11495, 11496, 11497, 11498, 11499, 11500, 11501, 11502, 11503 were selected from the ORFs having the nucleotide sequence represented by SEQ ID NO: 508.

[0997] The probes having the nucleotide sequence represented by SEQ ID NOS: 11504, 11505, 11506, 11507, 11508, 11509, 11510, 11511, 11512, 11513, 11514 were selected from the ORFs having the nucleotide sequence represented by SEQ ID NO: 509.

[0998] The probes having the nucleotide sequence represented by SEQ ID NOS: 11515, 11516, 11517, 11518, 11519, 11520, 11521, 11522, 11523, 11524, 11525 were selected from the ORFs having the nucleotide sequence represented by SEQ ID NO: 510.

[0999] The probes having the nucleotide sequence represented by SEQ ID NOS: 11526, 11527, 11528, 11529, 11530, 11531, 11532, 11533, 11534, 11535, 11536 were selected from the ORFs having the nucleotide sequence represented by SEQ ID NO: 511.

[1000] The probes having the nucleotide sequence represented by SEQ ID NOS: 11537, 11538, 11539, 11540, 11541, 11542, 11543, 11544, 11545, 11546, 11547 were selected from the ORFs having the nucleotide sequence represented by SEQ ID NO: 512.

[1001] The probes having the nucleotide sequence represented by SEQ ID NOS: 11548, 11549, 11550, 11551, 11552, 11553, 11554, 11555, 11556, 11557, 11558 were selected from the ORFs having the nucleotide sequence represented by SEQ ID NO: 513.

[1002] The probes having the nucleotide sequence represented by SEQ ID NOS: 11559, 11560, 11561, 11562, 11563, 11564, 11565, 11566, 11567, 11568, 11569 were selected from the ORFs having the nucleotide sequence represented by SEQ ID NO: 514.

[1003] The probes having the nucleotide sequence represented by SEQ ID NOS: 11570, 11571, 11572, 11573, 11574, 11575, 11576, 11577, 11578, 11579, 11580 were selected from the ORFs having the nucleotide sequence represented by SEQ ID NO: 515.

[1004] The probes having the nucleotide sequence represented by SEQ ID NOS: 11581, 11582, 11583, 11584, 11585, 11586, 11587, 11588, 11589, 11590, 11591 were selected from the ORFs having the nucleotide sequence represented by SEQ ID NO: 516.

[1005] The probes having the nucleotide sequence represented by SEQ ID NOS: 11592, 11593, 11594, 11595, 11596, 11597, 11598, 11599, 11600, 11601, 11602 were selected from the ORFs having the nucleotide sequence represented by SEQ ID NO: 517.

[1006] The probes having the nucleotide sequence represented by SEQ ID NOS: 11603, 11604, 11605, 11606, 11607, 11608, 11609, 11610, 11611, 11612, 11613 were selected from the ORFs having the nucleotide sequence represented by SEQ ID NO: 518.

[1007] The probes having the nucleotide sequence represented by SEQ ID NOS: 11614, 11615, 11616, 11617, 11618, 11619, 11620, 11621, 11622, 11623, 11624 were selected from the ORFs having the nucleotide sequence represented by SEQ ID NO: 519.

[1008] The probes having the nucleotide sequence represented by SEQ ID NOS: 11625, 11626, 11627, 11628, 11629, 11630, 11631, 11632, 11633, 11634, 11635 were selected from the ORFs having the nucleotide sequence represented by SEQ ID NO: 520.

[1009] The probes having the nucleotide sequence represented by SEQ ID NOS: 11636, 11637, 11638, 11639, 11640, 11641, 11642, 11643, 11644, 11645, 11646 were selected from the ORFs having the nucleotide sequence represented by SEQ ID NO: 521.

[1010] The probes having the nucleotide sequence represented by SEQ ID NOS: 11647, 11648, 11649, 11650, 11651, 11652, 11653, 11654, 11655, 11656, 11657 were selected from the ORFs having the nucleotide sequence represented by SEQ ID NO: 522.

[1011] The probes having the nucleotide sequence represented by SEQ ID NOS: 11658, 11659, 11660, 11661, 11662, 11663, 11664, 11665, 11666, 11667, 11668 were selected from the ORFs having the nucleotide sequence represented by SEQ ID NO: 523.

[1012] The probes having the nucleotide sequence represented by SEQ ID NOS: 11669, 11670, 11671, 11672, 11673, 11674, 11675, 11676, 11677, 11678, 11679 were selected from the ORFs having the nucleotide sequence represented by SEQ ID NO: 524.

[1013] The probes having the nucleotide sequence represented by SEQ ID NOS: 11680, 11681, 11682, 11683, 11684, 11685, 11686, 11687, 11688, 11689, 11690 were selected from the ORFs having the nucleotide sequence represented by SEQ ID NO: 525.

[1014] The probes having the nucleotide sequence represented by SEQ ID NOS: 11691, 11692, 11693, 11694, 11695, 11696, 11697, 11698, 11699, 11700, 11701 were selected from the ORFs having the nucleotide sequence represented by SEQ ID NO: 526.

[1015] The probes having the nucleotide sequence represented by SEQ ID NOS: 11702, 11703, 11704, 11705, 11706, 11707, 11708, 11709, 11710, 11711, 11712 were selected from the ORFs having the nucleotide sequence represented by SEQ ID NO: 527.

[1016] The probes having the nucleotide sequence represented by SEQ ID NOS: 11713, 11714, 11715, 11716, 11717, 11718, 11719, 11720, 11721, 11722, 11723 were selected from the ORFs having the nucleotide sequence represented by SEQ ID NO: 528.

[1017] The probes having the nucleotide sequence represented by SEQ ID NOS: 11724, 11725, 11726, 11727, 11728, 11729, 11730, 11731, 11732, 11733, 11734 were selected from the ORFs having the nucleotide sequence represented by SEQ ID NO: 529.

[1018] The probes having the nucleotide sequence represented by SEQ ID NOS: 11735, 11736, 11737, 11738, 11739, 11740, 11741, 11742, 11743, 11744, 11745 were selected from the ORFs having the nucleotide sequence represented by SEQ ID NO: 530.

[1019] The probes having the nucleotide sequence represented by SEQ ID NOS: 11746, 11747, 11748, 11749, 11750, 11751, 11752, 11753, 11754, 11755, 11756 were selected from the ORFs having the nucleotide sequence represented by SEQ ID NO: 531.

[1020] The probes having the nucleotide sequence represented by SEQ ID NOS: 11757, 11758, 11759, 11760, 11761, 11762, 11763, 11764, 11765, 11766, 11767 were selected from the ORFs having the nucleotide sequence represented by SEQ ID NO: 532.

[1021] The probes having the nucleotide sequence represented by SEQ ID NOS: 11768, 11769, 11770, 11771, 11772, 11773, 11774, 11775, 11776, 11777, 11778 were selected from the ORFs having the nucleotide sequence represented by SEQ ID NO: 533.

[1022] The probes having the nucleotide sequence represented by SEQ ID NOS: 11779, 11780, 11781, 11782, 11783, 11784, 11785, 11786, 11787, 11788, 11789 were selected from the ORFs having the nucleotide sequence represented by SEQ ID NO: 534.

[1023] The probes having the nucleotide sequence represented by SEQ ID NOS: 11790, 11791, 11792, 11793, 11794, 11795, 11796, 11797, 11798, 11799, 11800 were selected from the ORFs having the nucleotide sequence represented by SEQ ID NO: 535.

[1024] The probes having the nucleotide sequence represented by SEQ ID NOS: 11801, 11802, 11803, 11804, 11805, 11806, 11807, 11808, 11809, 11810, 11811 were selected from the ORFs having the nucleotide sequence represented by SEQ ID NO: 536.

[1025] The probes having the nucleotide sequence represented by SEQ ID NOS: 11812, 11813, 11814, 11815, 11816, 11817, 11818, 11819, 11820, 11821, 11822 were selected from the ORFs having the nucleotide sequence represented by SEQ ID NO: 537.

[1026] The probes having the nucleotide sequence represented by SEQ ID NOS: 11823, 11824, 11825, 11826, 11827, 11828, 11829, 11830, 11831, 11832, 11833 were selected from the ORFs having the nucleotide sequence represented by SEQ ID NO: 538.

[1027] The probes having the nucleotide sequence represented by SEQ ID NOS: 11834, 11835, 11836, 11837, 11838, 11839, 11840, 11841, 11842, 11843, 11844 were selected from the ORFs having the nucleotide sequence represented by SEQ ID NO: 539.

[1028] The probes having the nucleotide sequence represented by SEQ ID NOS: 11845, 11846, 11847, 11848, 11849, 11850, 11851, 11852, 11853, 11854, 11855 were selected from the ORFs having the nucleotide sequence represented by SEQ ID NO: 540.

[1029] The probes having the nucleotide sequence represented by SEQ ID NOS: 11856, 11857, 11858, 11859, 11860, 11861, 11862, 11863, 11864, 11865, 11866 were selected from the ORFs having the nucleotide sequence represented by SEQ ID NO: 541.

[1030] The probes having the nucleotide sequence represented by SEQ ID NOS: 11867, 11868, 11869, 11870, 11871, 11872, 11873, 11874, 11875, 11876, 11877 were selected from the ORFs having the nucleotide sequence represented by SEQ ID NO: 542.

[1031] The probes having the nucleotide sequence represented by SEQ ID NOS: 11878, 11879, 11880, 11881, 11882, 11883, 11884, 11885, 11886, 11887, 11888 were selected from the. ORFs having the nucleotide sequence represented by SEQ ID NO: 543.

[1032] The probes having the nucleotide sequence represented by SEQ ID NOS: 11889, 11890, 11891, 11892, 11893, 11894, 11895, 11896, 11897, 11898, 11899 were selected from the ORFs having the nucleotide sequence represented by SEQ ID NO: 544.

[1033] The probes having the nucleotide sequence represented by SEQ ID NOS: 11900, 11901, 11902, 11903, 11904, 11905, 11906, 11907, 11908, 11909, 11910 were selected from the ORFs having the nucleotide sequence represented by SEQ ID NO: 545.

[1034] The probes having the nucleotide sequence represented by SEQ ID NOS: 11911, 11912, 11913, 11914, 11915, 11916, 11917, 11918, 11919, 11920, 11921 were selected from the ORFs having the nucleotide sequence represented by SEQ ID NO: 546.

[1035] The probes having the nucleotide sequence represented by SEQ ID NOS: 11922, 11923, 11924, 11925, 11926, 11927, 11928, 11929, 11930, 11931, 11932 were selected from the ORFs having the nucleotide sequence represented by SEQ ID NO: 547.

[1036] The probes having the nucleotide sequence represented by SEQ ID NOS: 11933, 11934, 11935, 11936, 11937, 11938, 11939, 11940, 11941, 11942, 11943 were selected from the ORFs having the nucleotide sequence represented by SEQ ID NO: 548.

[1037] The probes having the nucleotide sequence represented by SEQ ID NOS: 11944, 11945, 1194.6, 11947, 11948, 11949, 11950, 11951, 11952, 11953, 11954 were selected from the ORFs having the nucleotide sequence represented by SEQ ID NO: 549.

[1038] The probes having the nucleotide sequence represented by SEQ ID NOS: 11955, 11956, 11957, 11958, 11959, 11960, 11961, 11962, 11963, 11964, 11965 were selected from the ORFs having the nucleotide sequence represented by SEQ ID NO: 550.

[1039] The probes having the nucleotide sequence represented by SEQ ID NOS: 11966, 11967, 11968, 11969, 11970, 11971, 11972, 11973, 11974, 11975, 11976 were selected from the ORFs having the nuclebtide sequence represented by SEQ ID NO: 551.

[1040] The probes having the nucleotide sequence represented by SEQ ID NOS: 11977, 11978, 11979, 11980, 11981, 11982, 11983, 11984, 11985, 11986, 11987 were selected from the ORFs having the nucleotide sequence represented by SEQ ID NO: 552.

[1041] The probes having the nucleotide sequence represented by SEQ ID NOS: 11988, 11989, 11990, 11991, 11992, 11993, 11994, 11995, 11996, 11997, 11998 were selected from the ORFs having the nucleotide sequence represented by SEQ ID NO: 553.

[1042] The probes having the nucleotide sequence represented by SEQ ID NOS: 11999, 12000, 12001, 12002, 12003, 12004, 12005, 12006, 12007, 12008, 12009 were selected from the ORFs having the nucleotide sequence represented by SEQ ID NO: 554.

[1043] The probes having the nucleotide sequence represented by SEQ ID NOS: 12010, 12011, 12012, 12013, 12014, 12015, 12016, 12017, 12018, 12019, 12020 were selected from the ORFs having the nucleotide sequence represented by SEQ ID NO: 555.

[1044] The probes having the nucleotide sequence represented by SEQ ID NOS: 12021, 12022, 12023, 12024, 12025, 12026, 12027, 12028, 12029, 12030, 12031 were selected from the ORFs having the nucleotide sequence represented by SEQ ID NO: 556.

[1045] The probes having the nucleotide sequence represented by SEQ ID NOS: 12032, 12033, 12034, 12035, 12036, 12037, 12038, 12039, 12040, 12041, 12042 were selected from the ORFs having the nucleotide sequence represented by SEQ ID NO: 557.

[1046] The probes having the nucleotide sequence represented by SEQ ID NOS: 12043, 12044, 12045, 12046, 12047, 12048, 12049, 12050, 12051, 12052, 12053 were selected from the ORFs having the nucleotide sequence represented by SEQ ID NO: 558.

[1047] The probes having the nucleotide sequence represented by SEQ ID NOS: 12054, 12055, 12056, 12057, 12058, 12059, 12060, 12061, 12062, 12063, 12064 were selected from the ORFs having the nucleotide sequence represented by SEQ ID NO: 559.

[1048] The probes having the nucleotide sequence represented by SEQ ID NOS: 12065, 12066, 12067, 12068, 12069, 12070, 12071, 12072, 12073, 12074, 12075 were selected from the ORFs having the nucleotide sequence represented by SEQ ID NO: 560.

[1049] The probes having the nucleotide sequence represented by SEQ ID NOS: 12076, 12077, 12078, 12079, 12080, 12081, 12082, 12083, 12084, 12085, 12086 were selected from the ORFs having the nucleotide sequence represented by SEQ ID NO: 561.

[1050] The probes having the nucleotide sequence represented by SEQ ID NOS: 12087, 12088, 12089, 12090, 12091, 12092, 12093, 12094, 12095, 12096, 12097 were selected from the ORFs having the nucleotide sequence represented by SEQ ID NO: 562.

[1051] The probes having the nucleotide sequence represented by SEQ ID NOS: 12098, 12099, 12100, 12101, 12102, 12103, 12104, 12105, 12106, 12107, 12108 were selected from the ORFs having the nucleotide sequence represented by SEQ ID NO: 563.

[1052] The probes having the nucleotide sequence represented by SEQ ID NOS: 12109, 12110, 12111, 12112, 12113, 12114, 12115, 12116, 12117, 12118, 12119 were selected from the ORFs having the nucleotide sequence represented by SEQ ID NO: 564.

[1053] The probes having the nucleotide sequence represented by SEQ ID NOS: 12120, 12121,12122, 12123, 12124, 12125, 12126, 12127, 12128, 12129, 12130 were selected from the ORFs having the nucleotide sequence represented by SEQ ID NO: 565.

[1054] The probes having the nucleotide sequence represented by SEQ ID NOS: 12131, 12132, 12133, 12134, 12135, 12136, 12137, 12138, 12139, 12140, 12141 were selected from the ORFs having the nucleotide sequence represented by SEQ ID NO: 566.

[1055] The probes having the nucleotide sequence represented by SEQ ID NOS: 12142, 12143, 12144, 12145, 12146, 12147, 12148, 12149, 12150, 12151, 12152 were selected from the ORFs having the nucleotide sequence represented by SEQ ID NO: 567.

[1056] The probes having the nucleotide sequence represented by SEQ ID NOS: 12153, 12154, 12155, 12156, 12157, 12158, 12159, 12160, 12161, 12162, 12163 were selected from the ORFs having the nucleotide sequence represented by SEQ ID NO: 568.

[1057] The probes having the nucleotide sequence represented by SEQ ID NOS: 12164, 12165, 12166, 12167, 12168, 12169, 12170, 12171, 12172, 12173, 12174 were selected from the ORFs having the nucleotide sequence represented by SEQ ID NO: 569.

[1058] The probes having the nucleotide sequence represented by SEQ ID NOS: 12175, 12176, 12177, 12178, 12179, 12180, 12181, 12182, 12183, 12184, 12185 were selected from the ORFs having the nucleotide sequence represented by SEQ ID NO: 570.

[1059] The probes having the nucleotide sequence represented by SEQ ID NOS: 12186, 12187, 12188, 12189, 12190, 12191, 12192, 12193, 12194, 12195, 12196 were selected from the ORFs having the nucleotide sequence represented by SEQ ID NO: 571.

[1060] The probes having the nucleotide sequence represented by SEQ ID NOS: 12197, 12198, 12199, 12200, 12201, 12202, 12203, 12204, 12205, 12206, 12207 were selected from the ORFs having the nucleotide sequence represented by SEQ ID NO: 572.

[1061] The probes having the nucleotide sequence represented by SEQ ID NOS: 12208, 12209, 12210, 12211, 12212, 12213, 12214, 12215, 12216, 12217, 12218 were selected from the ORFs having the nucleotide sequence represented by SEQ ID NO: 573.

[1062] The probes having the nucleotide sequence represented by SEQ ID NOS: 12219, 12220, 12221, 12222, 12223, 12224, 12225, 12226, 12227, 12228, 12229 were selected from the ORFs having the nucleotide sequence represented by SEQ ID NO: 574.

[1063] The probes having the nucleotide sequence represented by SEQ ID NOS: 12230, 12231, 12232, 12233, 12234, 12235, 12236, 12237, 12238, 12239, 12240 were selected from the ORFs having the nucleotide sequence represented by SEQ ID NO: 575.

[1064] The probes having the nucleotide sequence represented by SEQ ID NOS: 12241, 12242, 12243, 12244, 12245, 12246, 12247, 12248, 12249, 12250, 12251 were selected from the ORFs having the nucleotide sequence represented by SEQ ID NO: 576.

[1065] The probes having the nucleotide sequence represented by SEQ ID NOS: 12252, 12253, 12254, 12255, 12256, 12257, 12258, 12259, 12260, 12261, 12262 were selected from the ORFs having the nucleotide sequence represented by SEQ ID NO: 577.

[1066] The probes having the nucleotide sequence represented by SEQ ID NOS: 12263, 12264, 12265, 12266, 12267, 12268, 12269, 12270, 12271, 12272, 12273 were selected from the ORFs having the nucleotide sequence represented by SEQ ID NO: 578.

[1067] The probes having the nucleotide sequence represented by SEQ ID NOS: 12274, 12275, 12276, 12277, 12278, 12279, 12280, 12281, 12282, 12283, 12284 were selected from the ORFs having the nucleotide sequence represented by SEQ ID NO: 579.

[1068] The probes having the nucleotide sequence represented by SEQ ID NOS: 12285, 12286, 12287, 12288, 12289, 12290, 12291, 12292, 12293, 12294, 12295 were selected from the ORFs having the nucleotide sequence represented by SEQ ID NO: 580.

[1069] The probes having the nucleotide sequence represented by SEQ ID NOS: 12296, 12297, 12298, 12299, 12300, 12301, 12302, 12303, 12304, 12305, 12306 were selected from the ORFs having the nucleotide sequence represented by SEQ ID NO: 581.

[1070] The probes having the nucleotide sequence represented by SEQ ID NOS: 12307, 12308, 12309, 12310, 12311, 12312, 12313, 12314, 12315, 12316, 12317 were selected from the ORFs having the nucleotide sequence represented by SEQ ID NO: 582.

[1071] The probes having the nucleotide sequence represented by SEQ ID NOS: 12318, 12319, 12320, 12321, 12322, 12323, 12324, 12325, 12326, 12327, 12328 were selected from the ORFs having the nucleotide sequence represented by SEQ ID NO: 583.

[1072] The probes having the nucleotide sequence represented by SEQ ID NOS: 12329, 12330, 12331, 12332, 12333, 12334, 12335, 12336, 12337, 12338, 12339 were selected from the ORFs having the nucleotide sequence represented by SEQ ID NO: 584.

[1073] The probes having the nucleotide sequence represented by SEQ ID NOS: 12340, 12341, 12342, 12343, 12344, 12345, 12346, 12347, 12348, 12349, 12350 were selected from the ORFs having the nucleotide sequence represented by SEQ ID NO: 585.

[1074] The probes having the nucleotide sequence represented by SEQ ID NOS: 12351, 12352, 12353, 12354, 12355, 12356, 12357, 12358, 12359, 12360, 12361 were selected from the ORFs having the nucleotide sequence represented by SEQ ID NO: 586.

[1075] The probes having the nucleotide sequence represented by SEQ ID NOS: 12362, 12363, 12364, 12365, 12366, 12367, 12368, 12369, 12370, 12371, 12372 were selected from the ORFs having the nucleotide sequence represented by SEQ ID NO: 587.

[1076] The probes having the nucleotide sequence represented by SEQ ID NOS: 12373, 12374, 12375, 12376, 12377, 12378, 12379, 12380, 12381, 12382, 12383 were selected from the ORFs having the nucleotide sequence represented by SEQ ID NO: 588.

[1077] The probes having the nucleotide sequence represented by SEQ ID NOS: 12384, 12385, 12386, 12387, 12388, 12389, 12390, 12391, 12392, 12393, 12394 were selected from the ORFs having the nucleotide sequence represented by SEQ ID NO: 589.

[1078] The probes having the nucleotide sequence represented by SEQ ID NOS: 12395, 12396, 12397, 12398, 12399, 12400, 12401, 12402, 12403, 12404, 12405 were selected from the ORFs having the nucleotide sequence represented by SEQ ID NO: 590.

[1079] The probes having the nucleotide sequence represented by SEQ ID NOS: 12406, 12407, 12408, 12409, 12410, 12411, 12412, 12413, 12414, 12415, 12416 were selected from the ORFs having the nucleotide sequence represented by SEQ ID NO: 591.

[1080] The probes having the nucleotide sequence represented by SEQ ID NOS: 12417., 12418, 12419, 12420, 12421, 12422, 12423, 12424, 12425, 12426, 12427 were selected from the ORFs having the nucleotide sequence represented by SEQ ID NO: 592.

[1081] The probes having the nucleotide sequence represented by SEQ ID NOS: 12428, 12429, 12430, 12431, 12432, 12433, 12434, 12435, 12436, 12437, 12438 were selected from the ORFs having the nucleotide sequence represented by SEQ ID NO: 593.

[1082] The probes having the nucleotide sequence represented by SEQ ID NOS: 12439, 12440, 12441, 12442, 12443, 12444, 12445, 12446, 12447, 12448, 12449 were selected from the ORFs having the nucleotide sequence represented by SEQ ID NO: 594.

[1083] The probes having the nucleotide sequence represented by SEQ ID NOS: 12450, 12451, 12452, 12453, 12454, 12455, 12456, 12457, 12458, 12459, 12460 were selected from the ORFs having the nucleotide sequence represented by SEQ ID NO: 595.

[1084] The probes having the nucleotide sequence represented by SEQ ID NOS: 12461, 12462, 12463, 12464, 12465, 12466, 12467, 12468, 12469, 12470, 12471 were selected from the ORFs having the nucleotide sequence represented by SEQ ID NO: 596.

[1085] The probes having the nucleotide sequence represented by SEQ ID NOS: 12472, 12473, 12474, 12475, 12476, 12477, 12478, 12479, 12480, 12481, 12482 were selected from the ORFs having the nucleotide sequence represented by SEQ ID NO: 597.

[1086] The probes having the nucleotide sequence represented by SEQ ID NOS: 12483, 12484, 12485, 12486, 12487, 12488, 12489, 12490, 12491, 12492, 12493 were selected from the ORFs having the nucleotide sequence represented by SEQ ID NO: 598.

[1087] The probes having the nucleotide sequence represented by SEQ ID NOS: 12494, 12495, 12496, 12497, 12498, 12499, 12500, 12501, 12502, 12503, 12504 were selected from the ORFs having the nucleotide sequence represented by SEQ ID NO: 599.

[1088] The probes having the nucleotide sequence represented by SEQ ID NOS: 12505, 12506, 12507, 12508, 12509, 12510, 12511, 12512, 12513, 12514, 12515 were selected from the ORFs having the nucleotide sequence represented by SEQ ID NO: 600.

[1089] The probes having the nucleotide sequence represented by SEQ ID NOS: 12516, 12517, 12518, 12519, 12520, 12521, 12522, 12523, 12524, 12525, 12526 were selected from the ORFs having the nucleotide sequence represented by SEQ ID NO: 601.

[1090] The probes having the nucleotide sequence represented by SEQ ID NOS: 12527, 12528, 12529, 12530, 12531, 12532, 12533, 12534, 12535, 12536, 12537 were selected from the ORFs having the nucleotide sequence represented by SEQ ID NO: 602.

[1091] The probes having the nucleotide sequence represented by SEQ ID NOS: 12538, 12539, 12540, 12541, 12542, 12543, 12544, 12545, 12546, 12547, 12548 were selected from the ORFs having the nucleotide sequence represented by SEQ ID NO: 603.

[1092] The probes having the nucleotide sequence represented by SEQ ID NOS: 12549, 12550, 12551, 12552, 12553, 12554, 12555, 12556, 12557, 12558, 12559 were selected from the ORFs having the nucleotide sequence represented by SEQ ID NO: 604.

[1093] The probes having the nucleotide sequence represented by SEQ ID NOS: 12560, 12561, 12562, 12563, 12564, 12565, 12566, 12567, 12568, 12569, 12570 were selected from the ORFs having the nucleotide sequence represented by SEQ ID NO: 605.

[1094] The probes having the nucleotide sequence represented by SEQ ID NOS: 12571, 12572, 12573, 12574, 12575, 12576, 12577, 12578, 12579, 12580, 12581 were selected from the ORFs having the nucleotide sequence represented by SEQ ID NO: 606.

[1095] The probes having the nucleotide sequence represented by SEQ ID NOS: 12582, 12583, 12584, 12585, 12586, 12587, 12588, 12589, 12590, 12591, 12592 were selected from the ORFs having the nucleotide sequence represented by SEQ ID NO: 607.

[1096] The probes having the nucleotide sequence represented by SEQ ID NOS: 12593, 12594, 12595, 12596, 12597, 12598, 12599, 12600, 12601, 12602, 12603 were selected from the ORFs having the nucleotide sequence represented by SEQ ID NO: 608.

[1097] The probes having the nucleotide sequence represented by SEQ ID NOS: 12604, 12605, 12606, 12607, 12608, 12609, 12610, 12611, 12612, 12613, 12614 were selected from the ORFs having the nucleotide sequence represented by SEQ ID NO: 609.

[1098] The probes having the nucleotide sequence represented by SEQ ID NOS: 12615, 12616, 12617, 12618, 12619, 12620, 12621, 12622, 12623, 12624, 12625 were selected from the ORFs having the nucleotide sequence represented by SEQ ID NO: 610.

[1099] The probes having the nucleotide sequence represented by. SEQ ID NOS: 12626, 12627, 12628, 12629, 12630, 12631, 12632, 12633, 12634, 12635, 12636 were selected from the ORFs having the nucleotide sequence represented by SEQ ID NO: 611.

[1100] The probes having the nucleotide sequence represented by SEQ ID NOS: 12637, 12638, 12639, 12640, 12641, 12642, 12643, 12644, 12645, 12646, 12647 were selected from the ORFs having the nucleotide sequence represented by SEQ ID NO: 612.

[1101] The probes having the nucleotide sequence represented by SEQ ID NOS: 12648, 12649, 12650, 12651, 12652, 12653, 12654, 12655, 12656, 12657, 12658 were selected from the ORFs having the nucleotide sequence represented by SEQ ID NO: 613.

[1102] The probes having the nucleotide sequence represented by SEQ ID NOS: 12659, 12660, 12661, 12662, 12663, 12664, 12665, 12666, 12667, 12668, 12669 were selected from the ORFs having the nucleotide sequence represented by SEQ ID NO: 614.

[1103] The probes having the nucleotide sequence represented by SEQ ID NOS: 12670, 12671, 12672, 12673, 12674, 12675, 12676, 12677, 12678, 12679, 12680 were selected from the ORFs having the nucleotide sequence represented by SEQ ID NO: 615.

[1104] The probes having the nucleotide sequence represented by SEQ ID NOS: 12681, 12682, 12683, 12684, 12685, 12686, 12687, 12688, 12689, 12690, 12691 were selected from the ORFs having the nucleotide sequence represented by SEQ ID NO: 616.

[1105] The probes having the nucleotide sequence represented by SEQ ID NOS: 12692, 12693, 12694, 12695, 12696, 12697, 12698, 12699, 12700, 12701, 12702 were selected from the ORFs having the nucleotide sequence represented by SEQ ID NO: 617.

[1106] The probes having the nucleotide sequence represented by SEQ ID NOS: 12703, 12704, 12705, 12706, 12707, 12708, 12709, 12710, 12711, 12712, 12713 were selected from the ORFs having the nucleotide sequence represented by SEQ ID NO: 618.

[1107] The probes having the nucleotide sequence represented by SEQ ID NOS: 12714, 12715, 12716, 12717, 12718, 12719, 12720, 12721, 12722, 12723, 12724 were selected from the ORFs having the nucleotide sequence represented by SEQ ID NO: 619.

[1108] The probes having the nucleotide sequence represented by SEQ ID NOS: 12725, 12726, 12727, 12728, 12729, 12730, 12731, 12732, 12733, 12734, 12735 were selected from the ORFs having the nucleotide sequence represented by SEQ ID NO: 620.

[1109] The probes having the nucleotide sequence represented by SEQ ID NOS: 12736, 12737, 12738, 12739, 12740, 12741, 12742, 12743, 12744, 12745, 12746 were selected from the ORFs having the nucleotide sequence represented by SEQ ID NO: 621.

[1110] The probes having the nucleotide sequence represented by SEQ ID NOS: 12747, 12748, 12749, 12750, 12751, 12752, 12753, 12754, 12755, 12756, 12757 were selected-from the ORFs having the nucleotide sequence represented by SEQ ID NO: 622.

[1111] The probes having the nucleotide sequence represented by SEQ ID NOS: 12758, 12759, 12760, 12761, 12762, 12763, 12764, 12765, 12766, 12767, 12768 were selected from the ORFs having the nucleotide sequence represented by SEQ ID NO: 623.

[1112] The probes having the nucleotide sequence represented by SEQ ID NOS: 12769, 12770, 12771, 12772, 12773, 12774, 12775, 12776, 12777, 12778, 12779 were selected from the ORFs having the nucleotide sequence represented by SEQ ID NO: 624.

[1113] The probes having the nucleotide sequence represented by SEQ ID NOS: 12780, 12781, 12782, 12783, 12784, 12785, 12786, 12787, 12788, 12789, 12790 were selected from the ORFs having the nucleotide sequence represented by SEQ ID NO: 625.

[1114] The probes having the nucleotide sequence represented by SEQ ID NOS: 12791, 12792, 12793, 12794, 12795, 12796, 12797, 12798, 12799, 12800, 12801 were selected from the ORFs having the nucleotide sequence represented by SEQ ID NO: 626.

[1115] The probes having the nucleotide sequence represented by SEQ ID NOS: 12802, 12803, 12804, 12805, 12806, 12807, 12808, 12809, 12810, 12811, 12812 were selected from the ORFs having the nucleotide sequence represented by SEQ ID NO: 627.

[1116] The probes having the nucleotide sequence represented by SEQ ID NOS: 12813, 12814, 12815, 12816, 12817, 12818, 12819, 12820, 12821, 12822, 12823 were selected from the ORFs having the nucleotide sequence represented by SEQ ID NO: 628.

[1117] The probes having the nucleotide sequence represented by SEQ ID NOS: 12824, 12825, 12826, 12827, 12828, 12829, 12830, 12831, 12832, 12833, 12834 were selected from the ORFs having the nucleotide sequence represented by SEQ ID NO: 629.

[1118] The probes having the nucleotide sequence represented by SEQ ID NOS: 12835, 12836, 12837, 12838, 12839, 12840, 12841, 12842, 12843, 12844, 12845 were selected from the ORFs having the nucleotide sequence represented by SEQ ID NO: 630.

[1119] The probes having the nucleotide sequence represented by SEQ ID NOS: 12846, 12847, 12848, 12849, 12850, 12851, 12852, 12853, 12854, 12855, 12856 were selected from the ORFs having the nucleotide sequence represented by SEQ ID NO: 631.

[1120] The probes having the nucleotide sequence represented by SEQ ID NOS: 12857, 12858, 12859, 12860, 12861, 12862, 12863, 12864, 12865, 12866, 12867 were selected from the ORFs having the nucleotide sequence represented by SEQ ID NO: 632.

[1121] The probes having the nucleotide sequence represented by SEQ ID NOS: 12868, 12869, 12870, 12871, 12872, 12873, 12874, 12875, 12876, 12877, 12878 were selected from the ORFs having the nucleotide sequence represented by SEQ ID NO: 633.

[1122] The probes having the nucleotide sequence represented by SEQ ID NOS: 12879, 12880, 12881, 12882, 12883, 12884, 12885, 12886, 12887, 12888, 12889 were selected from the ORFs having the nucleotide sequence represented by SEQ ID NO: 634.

[1123] The probes having the nucleotide sequence represented by SEQ ID NOS: 12890, 12891, 12892, 12893, 12894, 12895, 12896, 12897, 12898, 12899, 12900 were selected from the ORFs having the nucleotide sequence represented by SEQ ID NO: 635.

[1124] The probes having the nucleotide sequence represented by SEQ ID NOS: 12901, 12902, 12903, 12904, 12905, 12906, 12907, 12908, 12909, 12910, 12911 were selected from the ORFs having the nucleotide sequence represented by SEQ ID NO: 636.

[1125] The probes having the nucleotide sequence represented by SEQ ID NOS: 12912, 12913, 12914, 12915, 12916, 12917, 12918, 12919, 12920, 12921, 12922 were selected from the ORFs having the nucleotide sequence represented by SEQ ID NO: 637.

[1126] The probes having the nucleotide sequence represented by SEQ ID NOS: 12923, 12924, 12925, 12926, 12927, 12928, 12929, 12930, 12931, 12932, 12933 were selected from the ORFs having the nucleotide sequence represented by SEQ ID NO: 638.

[1127] The probes having the nucleotide sequence represented by SEQ ID NOS: 12934, 12935, 12936, 12937, 12938, 12939, 12940, 12941, 12942, 12943, 12944 were selected from the ORFs having the nucleotide sequence represented by SEQ ID NO: 639.

[1128] The probes having the nucleotide sequence represented by SEQ ID NOS: 12945, 12946, 12947, 12948, 12949, 12950, 12951, 12952, 12953, 12954, 12955 were selected from the ORFs having the nucleotide sequence represented by SEQ ID NO: 640.

[1129] The probes having the nucleotide sequence represented by SEQ ID NOS: 12956, 12957, 12958, 12959, 12960, 12961, 12962, 12963, 12964, 12965, 12966 were selected from the ORFs having the nucleotide sequence represented by SEQ ID NO: 641.

[1130] The probes having the nucleotide sequence represented by SEQ ID NOS: 12967, 12968, 12969, 12970, 12971, 12972, 12973, 12974, 12975, 12976, 12977 were selected from the ORFs having the nucleotide sequence represented by SEQ ID NO: 642.

[1131] The probes having the nucleotide sequence represented by SEQ ID NOS: 12978, 12979, 12980, 12981, 12982, 12983, 12984, 12985, 12986, 12987, 12988 were selected from the ORFs having the nucleotide sequence represented by SEQ ID NO: 643.

[1132] The probes having the nucleotide sequence represented by SEQ ID NOS: 12989, 12990, 12991, 12992, 12993, 12994, 12995, 12996, 12997, 12998, 12999 were selected from the ORFs having the nucleotide sequence represented by SEQ ID NO: 644.

[1133] The probes having the nucleotide sequence represented by SEQ ID NOS: 13000, 13001, 13002, 13003, 13004, 13005, 13006, 13007, 13008, 13009, 13010 were selected from the ORFs having the nucleotide sequence represented by SEQ ID NO: 645.

[1134] The probes having the nucleotide sequence represented by SEQ ID NOS: 13011, 13012, 13013, 13014, 13015, 13016, 13017, 13018, 13019, 13020, 13021 were selected from the ORFs having the nucleotide sequence represented by SEQ ID NO: 646.

[1135] The probes having the nucleotide sequence represented by SEQ ID NOS: 13022, 13023, 13024, 13025, 13026, 13027, 13028, 13029, 13030, 13031, 13032 were selected from the ORFs having the nucleotide sequence represented by SEQ ID NO: 647.

[1136] The probes having the nucleotide sequence represented by SEQ ID NOS: 13033, 13034, 13035, 13036, 13037, 13038, 13039, 13040, 13041, 13042, 13043 were selected from the ORFs having the nucleotide sequence represented by SEQ ID NO: 648.

[1137] The probes having the nucleotide sequence represented by SEQ ID NOS: 13044, 13045, 13046, 13047, 13048, 13049, 13050, 13051, 13052, 13053, 13054 were selected from the ORFs having the nucleotide sequence represented by SEQ ID NO: 649.

[1138] The probes having the nucleotide sequence represented by SEQ ID NOS: 13055, 13056, 13057, 13058, 13059, 13060, 13061, 13062, 13063, 13064, 13065 were selected from the ORFs having the nucleotide sequence represented by SEQ ID NO: 650.

[1139] The probes having the nucleotide sequence represented by SEQ ID NOS: 13066, 13067, 13068, 13069, 13070, 13071, 13072, 13073, 13074, 13075, 13076 were selected from the ORFs having the nucleotide sequence represented by SEQ ID NO: 651.

[1140] The probes having the nucleotide sequence represented by SEQ ID NOS: 13077, 13078, 13079, 13080, 13081, 13082, 13083, 13084, 13085, 13086, 13087 were selected from the ORFs having the nucleotide sequence represented by SEQ ID NO: 652.

[1141] The probes having the nucleotide sequence represented by SEQ ID NOS: 13088, 13089, 13090, 13091, 13092, 13093, 13094, 13095, 13096, 13097, 13098 were selected from the ORFs having the nucleotide sequence represented by SEQ ID NO: 653.

[1142] The probes having the nucleotide sequence represented by SEQ ID NOS: 13099, 13100, 13101, 13102, 13103, 13104, 13105, 13106, 13107, 13108, 13109 were selected from the ORFs having the nucleotide sequence represented by SEQ ID NO: 654.

[1143] The probes having the nucleotide sequence represented by SEQ ID NOS: 13110, 13111, 13112, 13113, 13114, 13115, 13116, 13117, 13118, 13119, 13120 were selected from the ORFs having the nucleotide sequence represented by SEQ ID NO: 655.

[1144] The probes having the nucleotide sequence represented by SEQ ID NOS: 13121, 13122, 13123, 13124, 13125, 13126, 13127, 13128, 13129, 13130, 13131 were selected from the ORFs having the nucleotide sequence represented by SEQ ID NO: 656.

[1145] The probes having the nucleotide sequence represented by SEQ ID NOS: 13132, 13133, 13134, 13135, 13136, 13137, 13138, 13139, 13140, 13141, 13142 were selected from the ORFs having the nucleotide sequence represented by SEQ ID NO: 657.

[1146] The probes having the nucleotide sequence represented by SEQ ID NOS: 13143, 13144, 13145, 13146, 13147, 13148, 13149, 13150, 13151, 13152, 13153 were selected from the ORFs having the nucleotide sequence represented by SEQ ID NO: 658.

[1147] The probes having the nucleotide sequence represented by SEQ ID NOS: 13154, 13155, 13156, 13157, 13158, 13159, 13160, 13161, 13162, 13163, 13164 were selected from the ORFs having the nucleotide sequence represented by SEQ ID NO: 659.

[1148] The probes having the nucleotide sequence represented by SEQ ID NOS: 13165, 13166, 13167, 13168, 13169, 13170, 13171, 13172, 13173, 13174, 13175 were selected from the ORFs having the nucleotide sequence represented by SEQ ID NO: 660.

[1149] The probes having the nucleotide sequence represented by SEQ ID NOS: 13176, 13177, 13178, 13179, 13180, 13181, 13182, 13183, 13184, 13185, 13186 were selected from the ORFs having the nucleotide sequence represented by SEQ ID NO: 661.

[1150] The probes having the nucleotide sequence represented by SEQ ID NOS: 13187, 13188, 13189, 13190, 13191, 13192, 13193, 13194, 13195, 13196, 13197 were selected from the ORFs having the nucleotide sequence represented by SEQ ID NO: 662.

[1151] The probes having the nucleotide sequence represented by SEQ ID NOS: 13198, 13199, 13200, 13201, 13202, 13203, 13204, 13205, 13206, 13207, 13208 were selected from the ORFs having the nucleotide sequence represented by SEQ ID NO: 663.

[1152] The probes having the nucleotide sequence represented by SEQ ID NOS: 13209, 13210, 13211, 13212, 13213, 13214, 13215, 13216, 13217, 13218, 13219 were selected from the ORFs having the nucleotide sequence represented by SEQ ID NO: 664.

[1153] The probes having the nucleotide sequence represented by SEQ ID NOS: 13220, 13221, 13222, 13223, 13224, 13225, 13226, 13227, 13228, 13229, 13230 were selected from the ORFs having the nucleotide sequence represented by SEQ ID NO: 665.

[1154] The probes having the nucleotide sequence represented by SEQ ID NOS: 13231, 13232, 13233, 13234, 13235, 13236, 13237, 13238, 13239, 13240, 13241 were selected from the ORFs having the nucleotide sequence represented by SEQ ID NO: 666.

[1155] The probes having the nucleotide sequence represented by SEQ ID NOS: 13242, 13243, 13244, 13245, 13246, 13247, 13248, 13249, 13250, 13251, 13252 were selected from the ORFs having the nucleotide sequence represented by SEQ ID NO: 667.

[1156] The probes having the nucleotide sequence represented by SEQ ID NOS: 13253, 13254, 13255, 13256, 13257, 13258, 13259, 13260, 13261, 13262, 13263 were selected from the ORFs having the nucleotide sequence represented by SEQ ID NO: 668.

[1157] The probes having the nucleotide sequence represented by SEQ ID NOS: 13264, 13265, 13266, 13267, 13268, 13269, 13270, 13271, 13272, 13273,13274 were selected from the ORFs having the nucleotide sequence represented by SEQ ID NO: 669.

[1158] The probes having the nucleotide sequence represented by SEQ ID NOS: 13275, 13276, 13277, 13278, 13279, 13280, 13281, 13282, 13283, 13284, 13285.were selected from the ORFs having the nucleotide sequence represented by SEQ ID NO: 670.

[1159] The probes having the nucleotide sequence represented by SEQ ID NOS: 13286, 13287, 13288, 13289, 13290, 13291, 13292, 13293, 13294, 13295, 13296 were selected from the ORFs having the nucleotide sequence represented by SEQ ID NO: 671.

[1160] The probes having the nucleotide sequence represented by SEQ ID NOS: 13297, 13298, 13299, 13300, 13301, 13302, 13303, 13304, 13305, 13306, 13307 were selected from the ORFs having the nucleotide sequence represented by SEQ ID NO: 672.

[1161] The probes having the nucleotide sequence represented by SEQ ID NOS: 13308, 13309, 13310, 13311, 13312, 13313, 13314, 13315, 13316, 13317, 13318 were selected from the ORFs having the nucleotide sequence represented by SEQ ID NO: 673.

[1162] The probes having the nucleotide sequence represented by SEQ ID NOS: 13319, 13320, 13321, 13322, 13323, 13324, 13325, 13326, 13327, 13328, 13329 were selected from the ORFs having the nucleotide sequence represented by SEQ ID NO: 674.

[1163] The probes having the nucleotide sequence represented by SEQ ID NOS: 13330, 13331, 13332, 13333, 13334, 13335, 13336, 13337, 13338, 13339, 13340 were selected from the ORFs having the nucleotide sequence represented by SEQ ID NO: 675.

[1164] The probes having the nucleotide sequence represented by SEQ ID NOS: 13341, 13342, 13343, 13344, 13345, 13346, 13347, 13348, 13349, 13350, 13351 were selected from the ORFs having the nucleotide sequence represented by SEQ ID NO: 676.

[1165] The probes having the nucleotide sequence represented by SEQ ID NOS: 13352, 13353, 13354, 13355, 13356, 13357, 13358, 13359, 13360, 13361, 13362 were selected from the ORFs having the nucleotide sequence represented by SEQ ID NO: 677.

[1166] The probes having the nucleotide sequence represented by SEQ ID NOS: 13363, 13364, 13365, 13366, 13367, 13368, 13369, 13370, 13371, 13372, 13373 were selected from the ORFs having the nucleotide sequence represented by SEQ ID NO: 678.

[1167] The probes having the nucleotide sequence represented by SEQ ID NOS: 13374, 13375, 13376, 13377, 13378, 13379, 13380, 13381, 13382, 13383, 13384 were selected from the ORFs having the nucleotide sequence represented by SEQ ID NO: 679.

[1168] The probes having the nucleotide sequence represented by SEQ ID NOS: 13385, 13386, 13387, 13388, 13389, 13390, 13391, 13392, 13393, 13394, 13395 were selected from the ORFs having the nucleotide sequence represented by SEQ ID NO: 680.

[1169] The probes having the nucleotide sequence represented by SEQ ID NOS: 1339.6, 13397, 13398, 13399, 13400, 13401, 13402, 13403, 13404, 13405, 13406 were selected from the ORFs having the nucleotide sequence represented by SEQ ID NO: 681.

[1170] The probes having the nucleotide sequence represented by SEQ ID NOS: 13407, 13408, 13409, 13410, 13411, 13412, 13413, 13414, 13415, 13416, 13417, 13418, 13419, 13420, 13421, 13422, 13423, 13424, 13425, 13426, 13427, 13428 were selected from the ORFs having the nucleotide sequence represented by SEQ ID NO: 682.

[1171] The probes having the nucleotide sequence represented by SEQ ID NOS: 13429, 13430, 13431, 13432, 13433, 13434, 13435, 13436, 13437, 13438, 13439 were selected from the ORFs having the nucleotide sequence represented by SEQ ID NO: 683.

[1172] The probes having the nucleotide sequence represented by SEQ ID NOS: 13440, 13441, 13442, 13443, 13444, 13445, 13446, 13447, 13448, 13449, 13450 were selected from the ORFs having the nucleotide sequence represented by SEQ ID NO: 684.

[1173] The probes having the nucleotide sequence represented by SEQ ID NOS: 13451, 13452, 13453, 13454, 13455, 13456, 13457, 13458, 13459, 13460, 13461 were selected from the ORFs having the nucleotide sequence represented by SEQ ID NO: 685.

[1174] The probes having the nucleotide sequence represented by SEQ ID NOS: 13462, 13463, 13464, 13465, 13466, 13467, 13468, 13469, 13470, 13471, 13472 were selected from the ORFs having the nucleotide sequence represented by SEQ ID NO: 686.

[1175] The probes having the nucleotide sequence represented by SEQ ID NOS: 13473, 13474, 13475, 13476, 13477, 13478, 13479, 13480, 13481, 13482, 13483 were selected from the ORFs having the nucleotide sequence represented by SEQ ID NO: 687.

[1176] The probes having the nucleotide sequence represented by SEQ ID NOS: 13484, 13485, 13486, 13487, 13488, 13489, 13490, 13491, 13492, 13493, 13494 were selected from the ORFs having the nucleotide sequence represented by SEQ-ID NO: 688.

[1177] The probes having the nucleotide sequence represented by SEQ ID NOS: 13495, 13496, 13497, 13498, 13499, 13500, 13501, 13502, 13503, 13504, 13505 were selected from the ORFs having the nucleotide sequence represented by SEQ ID NO: 689.

[1178] The probes having the nucleotide sequence represented by SEQ ID NOS: 13506, 13507, 13508, 13509, 13510, 13511, 13512, 13513, 13514, 13515, 13516 were selected from the ORFs having the nucleotide sequence represented by SEQ ID NO: 690.

[1179] The probes having the nucleotide sequence represented by SEQ ID NOS: 13517, 13518, 13519, 13520, 13521, 13522, 13523, 13524, 13525, 13526, 13527 were selected from the ORFs having the nucleotide sequence represented by SEQ ID NO: 691.

[1180] The probes having the nucleotide sequence represented by SEQ ID NOS: 13528, 13529, 13530, 13531, 13532, 13533, 13534, 13535, 13536, 13537, 13538 were selected from the ORFs having the nucleotide sequence represented by SEQ ID NO: 692.

[1181] The probes having the nucleotide sequence represented by SEQ ID NOS: 13539, 13540, 13541, 13542, 13543, 13544, 13545, 13546, 13547, 13548, 13549 were selected from the ORFs having the nucleotide sequence represented by SEQ ID NO: 693.

[1182] The probes having the nucleotide sequence represented by SEQ ID NOS: 13550, 13551, 13552, 13553, 13554, 13555, 13556, 13557, 13558, 13559, 13560 were selected from the ORFs having the nucleotide sequence represented by SEQ ID NO: 694.

[1183] The probes having the nucleotide sequence represented by SEQ ID NOS: 13561, 13562, 13563, 13564, 13565, 13566, 13567, 13568, 13569, 13570, 13571 were selected from the ORFs having the nucleotide sequence represented by SEQ ID NO: 695.

[1184] The probes having the nucleotide sequence represented by SEQ ID NOS: 13572, 13573, 13574, 13575, 13576, 13577, 13578, 13579, 13580, 13581, 13582 were selected from the ORFs having the nucleotide sequence represented by SEQ ID NO: 696.

[1185] The probes having the nucleotide sequence represented by SEQ ID NOS: 13583, 13584, 13585, 13586, 13587, 13588, 13589, 13590, 13591, 13592, 13593 were selected from the ORFs having the nucleotide sequence represented by SEQ ID NO: 697.

[1186] The probes having the nucleotide sequence represented by SEQ ID NOS: 13594, 13595, 13596, 13597, 13598, 13599, 13600, 13601, 13602, 13603, 13604 were selected from the ORFs having the nucleotide sequence represented by SEQ ID NO: 698.

[1187] The probes having the nucleotide sequence represented by SEQ ID NOS: 13605, 13606, 13607, 13608, 13609, 13610, 13611, 13612, 13613, 13614, 13615 were selected from the ORFs having the nucleotide sequence represented by SEQ ID NO: 699.

[1188] The probes having the nucleotide sequence represented by SEQ ID NOS: 13616, 13617, 13618, 13619, 13620, 13621, 13622, 13623, 13624, 13625, 13626 were selected from the ORFs having the nucleotide sequence represented by SEQ ID NO: 700.

[1189] The probes having the nucleotide sequence represented by SEQ ID NOS: 13627, 13628, 13629, 13630, 13631, 13632, 13633, 13634, 13635, 13636, 13637 were selected from the ORFs having the nucleotide sequence represented by SEQ ID NO: 701.

[1190] The probes having the nucleotide sequence represented by SEQ ID NOS: 13638, 13639, 13640, 13641, 13642, 13643, 13644, 13645, 13646, 13647, 13648 were selected from the ORFs having the nucleotide sequence represented by SEQ ID NO: 702.

[1191] The probes having the nucleotide sequence represented by SEQ ID NOS: 13649, 13650, 13651, 13652, 13653, 13654, 13655, 13656, 13657, 13658, 13659 were selected from the ORFs having the nucleotide sequence represented by SEQ ID NO: 703.

[1192] The probes having the nucleotide sequence represented by SEQ ID NOS: 13660, 13661, 13662, 13663, 13664, 13665, 13666, 13667, 13668, 13669, 13670 were selected from the ORFs having the nucleotide sequence represented by SEQ ID NO: 704.

[1193] The probes having the nucleotide sequence represented by SEQ ID NOS: 13671, 13672, 13673, 13674, 13675, 13676, 13677, 13678, 13679, 13680, 13681 were selected from the ORFs having the nucleotide sequence represented by SEQ ID NO: 705.

[1194] The probes having the nucleotide sequence represented by SEQ ID NOS: 13682, 13683, 13684, 13685, 13686, 13687, 13688, 13689, 13690, 13691, 13692 were selected from the ORFs having the nucleotide sequence represented by SEQ ID NO: 706.

[1195] The probes having the nucleotide sequence represented by SEQ ID NOS: 13693, 13694, 13695, 13696, 13697, 13698, 13699, 13700, 13701, 13702, 13703 were selected from the ORFs having the nucleotide sequence represented by SEQ ID NO: 707.

[1196] The probes having the nucleotide sequence represented by SEQ ID NOS: 13704, 13705, 13706, 13707, 13708, 13709, 13710, 13711, 13712, 13713, 13714 were selected from the ORFs having the nucleotide sequence represented by SEQ ID NO: 708.

[1197] The probes having the nucleotide sequence represented by SEQ ID NOS: 13715, 13716, 13717, 13718, 13719, 13720, 13721, 13722, 13723, 13724, 13725 were selected from the ORFs having the nucleotide sequence represented by SEQ ID NO: 709.

[1198] The probes having the nucleotide sequence represented by SEQ ID NOS: 13726, 13727, 13728, 13729, 13730, 13731, 13732, 13733, 13734, 13735, 13736 were selected from the ORFs having the nucleotide sequence represented by SEQ ID NO: 710.

[1199] The probes having the nucleotide sequence represented by SEQ ID NOS: 13737, 13738, 13739, 13740, 13741, 13742, 13743, 13744, 13745, 13746, 13747 were selected from the ORFs having the nucleotide sequence represented by SEQ ID NO: 711.

[1200] The probes having the nucleotide sequence represented by SEQ ID NOS: 13748, 13749, 13750, 13751, 13752, 13753, 13754, 13755, 13756, 13757, 13758 were selected from the ORFs having the nucleotide sequence represented by SEQ ID NO: 712.

[1201] The probes having the nucleotide sequence represented by SEQ ID NOS: 13759, 13760, 13761, 13762, 13763, 13764, 13765, 13766, 13767, 13768, 13769 were selected from the ORFs having the nucleotide sequence represented by SEQ ID NO: 713.

[1202] The probes having the nucleotide sequence represented by SEQ ID NOS: 13770, 13771, 13772, 13773, 13774, 13775, 13776, 13777, 13778, 13779, 13780 were selected from the ORFs having the nucleotide sequence represented by SEQ ID NO: 714.

[1203] The probes having the nucleotide sequence represented by SEQ ID NOS: 13781, 13782, 13783, 13784, 13785, 13786, 13787, 13788, 13789, 13790, 13791 were selected from the ORFs having the nucleotide sequence represented by SEQ ID NO: 715.

[1204] The probes having the nucleotide sequence represented by SEQ ID NOS: 13792, 13793, 13794, 13795, 13796, 13797, 13798, 13799, 13800, 13801, 13802 were selected from the ORFs having the nucleotide sequence represented by SEQ ID NO: 716.

[1205] The probes having the nucleotide sequence represented by SEQ ID NOS: 13803, 13804, 13805, 13806, 13807, 13808, 13809, 13810, 13811, 13812, 13813 were selected from the ORFs having the nucleotide sequence represented by SEQ ID NO: 717.

[1206] The probes having the nucleotide sequence represented by SEQ ID NOS: 13814, 13815, 13816, 13817, 13818, 13819, 13820, 13821, 13822, 13823, 13824 were selected from the ORFs having the nucleotide sequence represented by SEQ ID NO: 718.

[1207] The probes having the nucleotide sequence represented by SEQ ID NOS: 13825, 13826, 13827, 13828, 13829, 13830, 13831, 13832, 13833, 13834, 13835 were selected from the ORFs having the nucleotide sequence represented by SEQ ID NO: 719.

[1208] The probes having the nucleotide sequence represented by SEQ ID NOS: 13836, 13837, 13838, 13839, 13840, 13841, 13842, 13843, 13844, 13845, 13846 were selected from the ORFs having the nucleotide sequence represented by SEQ ID NO: 720.

[1209] The probes having the nucleotide sequence represented by SEQ ID NOS: 13847, 13848, 13849, 13850, 13851, 13852, 13853, 13854, 13855, 13856, 13857 were selected from the ORFs having the nucleotide sequence represented by SEQ ID NO: 721.

[1210] The probes having the nucleotide sequence represented by SEQ ID NOS: 13858, 13859, 13860, 13861, 13862, 13863, 13864, 13865, 13866, 13867, 13868 were selected from the ORFs having the nucleotide sequence represented by SEQ ID NO: 722.

[1211] The probes having the nucleotide sequence represented by SEQ ID NOS: 13869, 13870, 13871, 13872, 13873, 13874, 13875, 13876, 13877, 13878, 13879 were selected from the ORFs having the nucleotide sequence represented by SEQ ID NO: 723.

[1212] The probes having the nucleotide sequence represented by SEQ ID NOS: 13880, 13881, 13882, 13883, 13884, 13885, 13886, 13887, 13888, 13889, 13890 were selected from the ORFs having the nucleotide sequence represented by SEQ ID NO: 724.

[1213] The probes having the nucleotide sequence represented by SEQ ID NOS: 13891, 13892, 13893, 13894, 13895, 13896, 13897, 13898, 13899, 13900, 13901 were selected from the ORFs having the nucleotide sequence represented by SEQ ID NO: 725.

[1214] The probes having the nucleotide sequence represented by SEQ ID NOS: 13902, 13903, 13904, 13905, 13906, 13907, 13908, 13909, 13910, 13911, 13912 were selected from the ORFs having the nucleotide sequence represented by SEQ ID NO: 726.

[1215] The probes having the nucleotide sequence represented by SEQ ID NOS: 13913, 13914, 13915, 13916, 13917, 13918, 13919, 13920, 13921, 13922, 13923 were selected from the ORFs having the nucleotide sequence represented by SEQ ID NO: 727.

[1216] The probes having the nucleotide sequence represented by SEQ ID NOS: 13924, 13925, 13926, 13927, 13928, 13929, 13930, 13931, 13932, 13933, 13934 were selected from the ORFs having the nucleotide sequence represented by SEQ ID NO: 728.

[1217] The probes having the nucleotide sequence represented by SEQ ID NOS: 13935, 13936, 13937, 13938, 13939, 13940, 13941, 13942, 13943, 13944, 13945 were selected from the ORFs having the nucleotide sequence represented by SEQ ID NO: 729.

[1218] The probes having the nucleotide sequence represented by SEQ ID NOS: 13946, 13947, 13948, 13949, 13950, 13951, 13952, 13953, 13954, 13955, 13956 were selected from the ORFs having the nucleotide sequence represented by SEQ ID NO: 730.

[1219] The probes having the nucleotide sequence represented by SEQ ID NOS: 13957, 13958, 13959, 13960, 13961, 13962, 13963, 13964, 13965, 13966, 13967 were selected from the ORFs having the nucleotide sequence represented by SEQ ID NO: 731.

[1220] The probes having the nucleotide sequence represented by SEQ ID NOS: 13968, 13969, 13970, 13971, 13972, 13973, 13974, 13975, 13976, 13977, 13978 were selected from the ORFs having the nucleotide sequence represented by SEQ ID NO: 732.

[1221] The probes having the nucleotide sequence represented by SEQ ID NOS: 13979, 13980, 13981, 13982, 13983, 13984, 13985, 13986, 13987, 13988, 13989 were selected from the ORFs having the nucleotide sequence represented by SEQ ID NO: 733.

[1222] The probes having the nucleotide sequence represented by SEQ ID NOS: 13990, 13991, 13992, 13993, 13994, 13995, 13996, 13997, 13998, 13999, 14000 were selected from the ORFs having the nucleotide sequence represented by SEQ ID NO: 734.

[1223] The probes having the nucleotide sequence represented by SEQ ID NOS: 14001, 14002, 14003, 14004, 14005, 14006, 14007, 14008, 14009, 14010, 14011 were selected from the ORFs having the nucleotide sequence represented by SEQ ID NO: 735.

[1224] The probes having the nucleotide sequence represented by SEQ ID NOS: 14012, 14013, 14014, 14015, 14016, 14017, 14018, 14019, 14020, 14021, 14022 were selected from the ORFs having the nucleotide sequence represented by SEQ ID NO: 736.

[1225] The probes having the nucleotide sequence represented by SEQ ID NOS: 14023, 14024, 14025, 14026, 14027, 14028, 14029, 14030, 14031, 14032, 14033 were selected from the ORFs having the nucleotide sequence represented by SEQ ID NO: 737.

[1226] The probes having the nucleotide sequence represented by SEQ ID NOS: 14034, 14035, 14036, 14037, 14038, 14039, 14040, 14041, 14042, 14043, 14044, 14045, 14046, 14047, 14048, 14049, 14050, 14051, 14052, 14053, 14054, 14055 were selected from the ORFs having the nucleotide sequence represented by SEQ ID NO: 738.

[1227] The probes having the nucleotide sequence represented by SEQ ID NOS: 14056, 14057, 14058, 14059, 14060, 14061, 14062, 14063, 14064, 14065, 14066 were selected from the ORFs having the nucleotide sequence represented by SEQ ID NO: 739.

[1228] The probes having the nucleotide sequence represented by SEQ ID NOS: 14067, 14068, 14069, 14070, 14071, 14072, 14073, 14074, 14075, 14076, 14077 were selected from the ORFs having the nucleotide sequence represented by SEQ ID NO: 740.

[1229] The probes having the nucleotide sequence represented by SEQ ID NOS: 14078, 14079, 14080, 14081, 14082, 14083, 14084, 14085, 14086, 14087, 14088 were selected from the. ORFs having the nucleotide sequence represented by SEQ ID NO: 741.

[1230] The probes having the nucleotide sequence represented by SEQ ID NOS: 14089, 14090, 14091, 14092, 14093, 14094, 14095, 14096, 14097, 14098, 14099 were selected from the ORFs having the nucleotide sequence represented by SEQ ID NO: 742.

[1231] The probes having the nucleotide sequence represented by SEQ ID NOS: 14100, 14101, 14102, 14103, 14104, 14105, 14106, 14107, 14108, 14109, 14110 were selected from the ORFs having the nucleotide sequence represented by SEQ ID NO: 743.

[1232] The probes having the nucleotide sequence represented by SEQ ID NOS: 14111, 14112, 14113, 14114, 14115, 14116, 14117, 14118, 14119, 14120, 14121 were selected from the ORFs having the nucleotide sequence represented by SEQ ID NO: 744.

[1233] The probes having the nucleotide sequence represented by SEQ ID NOS: 14122, 14123, 14124, 14125, 14126, 14127, 14128, 14129, 14130, 14131, 14132 were selected from the ORFs having the nucleotide sequence represented by SEQ ID NO: 745.

[1234] The probes having the nucleotide sequence represented by SEQ ID NOS: 14133, 14134, 14135, 14136, 14137, 14138, 14139, 14140, 14141, 14142, 14143 were selected from the ORFs having the nucleotide sequence represented by SEQ ID NO: 746.

[1235] The probes having the nucleotide sequence represented by SEQ ID NOS: 14144, 14145, 14146, 14147, 14148, 14149, 14150, 14151, 14152, 14153, 14154 were selected from the ORFs having the nucleotide sequence represented by SEQ ID NO: 747.

[1236] The probes having the nucleotide sequence represented by SEQ ID NOS: 14155, 14156, 14157, 14158, 14159, 14160, 14161, 14162, 14163, 14164, 14165 were selected from the ORFs having the nucleotide sequence represented by SEQ ID NO: 748.

[1237] The probes having the nucleotide sequence represented by SEQ ID NOS: 14166, 14167, 14168, 14169, 14170, 14171, 14172, 14173, 14174, 14175, 14176 were selected from the ORFs having the nucleotide sequence represented by SEQ ID NO: 749.

[1238] The probes having the nucleotide sequence represented by SEQ ID NOS: 14177, 14178, 14179, 14180, 14181, 14182, 14183, 14184, 14185, 14186, 14187 were selected from the ORFs having the nucleotide sequence represented by SEQ ID NO: 750.

[1239] The probes having the nucleotide sequence represented by SEQ ID NOS: 14188, 14189, 14190, 14191, 14192, 14193, 14194, 14195, 14196, 14197, 14198 were selected from the ORFs having the nucleotide sequence represented by SEQ ID NO: 751.

[1240] The probes having the nucleotide sequence represented by SEQ ID NOS: 14199, 14200, 14201, 14202, 14203, 14204, 14205, 14206, 14207, 14208, 14209 were selected from the ORFs having the nucleotide sequence represented by SEQ ID NO: 752.

[1241] The probes having the nucleotide sequence represented by SEQ ID NOS: 14210, 14211, 14212, 14213, 14214, 14215, 14216, 14217, 14218, 14219, 14220 were selected from the ORFs having the nucleotide sequence represented by SEQ ID NO: 753.

[1242] The probes having the nucleotide sequence represented by SEQ ID NOS: 14221, 14222, 14223, 14224, 14225, 14226, 14227, 14228, 14229, 14230, 14231 were selected from the ORFs having the nucleotide sequence represented by SEQ ID NO: 754.

[1243] The probes having the nucleotide sequence represented by SEQ ID NOS: 14232, 14233, 14234, 14235, 14236, 14237, 14238, 14239, 14240, 14241, 14242 were selected from the ORFs having the nucleotide sequence represented by SEQ ID NO: 755.

[1244] The probes having the nucleotide sequence represented by SEQ ID NOS: 14243, 14244, 14245, 14246, 14247, 14248, 14249, 14250, 14251, 14252, 14253 were selected from the ORFs having the nucleotide sequence represented by SEQ ID NO: 756.

[1245] The probes having the nucleotide sequence represented by SEQ ID NOS: 14254, 14255, 14256, 14257, 14258, 14259, 14260, 14261, 14262, 14263, 14264 were selected from the ORFs having the nucleotide sequence represented by SEQ ID NO: 757.

[1246] The probes having the nucleotide sequence represented by SEQ ID NOS: 14265, 14266, 14267, 14268, 14269, 14270, 14271, 14272, 14273, 14274, 14275 were selected from the ORFs having the nucleotide sequence represented by SEQ ID NO: 758.

[1247] The probes having the nucleotide sequence represented by SEQ ID NOS: 14276, 14277, 14278, 14279, 14280, 14281, 14282, 14283, 14284, 14285, 14286 were selected from the ORFs having the nucleotide sequence represented by SEQ ID NO: 759.

[1248] The probes having the nucleotide sequence represented by SEQ ID NOS: 14287, 14288, 14289, 14290, 14291, 14292, 14293, 14294, 14295, 14296, 14297 were selected from the ORFs having the nucleotide sequence represented by SEQ ID NO: 760.

[1249] The probes having the nucleotide sequence represented by SEQ ID NOS: 14298, 14299, 14300, 14301, 14302, 14303, 14304, 14305, 14306, 14307, 14308 were selected from the ORFs having the nucleotide sequence represented by SEQ ID NO: 761.

[1250] The probes having the nucleotide sequence represented by SEQ ID NOS: 14309, 14310, 14311, 14312, 14313, 14314, 14315, 14316, 14317, 14318, 14319 were selected from the ORFs having the nucleotide sequence represented by SEQ ID NO: 762.

[1251] The probes having the nucleotide sequence represented by SEQ ID NOS: 14320, 14321, 14322, 14323, 14324, 14325, 14326, 14327, 14328, 14329, 14330 were selected from the ORFs having the nucleotide sequence represented by SEQ ID NO: 763.

[1252] The probes having the nucleotide sequence represented by SEQ ID NOS: 14331, 14332, 14333, 14334, 14335, 14336, 14337, 14338, 14339, 14340, 14341 were selected from the ORFs having the nucleotide sequence represented by SEQ ID NO: 764.

[1253] The probes having the nucleotide sequence represented by SEQ ID NOS: 14342, 14343, 14344, 14345, 14346, 14347, 14348, 14349, 14350, 14351, 14352, 14353, 14354, 14355, 14356, 14357, 14358, 14359, 14360, 14361, 14362, 14363 were selected from the ORFs having the nucleotide sequence represented by SEQ ID NO: 765.

[1254] The probes having the nucleotide sequence represented by SEQ ID NOS: 14364, 14365, 14366, 14367, 14368, 14369, 14370, 14371, 14372, 14373, 14374 were selected from the ORFs having the nucleotide sequence represented by SEQ ID NO: 766.

[1255] The probes having the nucleotide sequence represented by SEQ ID NOS: 14375, 14376, 14377, 14378, 14379, 14380, 14381, 14382, 14383, 14384, 14385 were selected from the ORFs having the nucleotide sequence represented by SEQ ID NO: 767.

[1256] The probes having the nucleotide sequence represented by SEQ ID NOS: 14386, 14387, 14388, 14389, 14390, 14391, 14392, 14393, 14394, 14395, 14396 were selected from the ORFs having the nucleotide sequence represented by SEQ ID NO: 768.

[1257] The probes having the nucleotide sequence represented by SEQ ID NOS: 14397, 14398, 14399, 14400, 14401, 14402, 14403, 14404, 14405, 14406, 14407 were selected from the ORFs having the nucleotide sequence represented by SEQ ID NO: 769.

[1258] The probes having the nucleotide sequence represented by SEQ ID NOS: 14408, 14409, 14410, 14411, 14412, 14413, 14414, 14415, 14416, 14417, 14418 were selected from the ORFs having the nucleotide sequence represented by SEQ ID NO: 770.

[1259] The probes having the nucleotide sequence represented by SEQ ID NOS: 14419, 14420, 14421, 14422, 14423, 14424, 14425, 14426, 14427, 14428, 14429 were selected from the ORFs having the nucleotide sequence represented by SEQ ID NO: 771.

[1260] The probes having the nucleotide sequence represented by SEQ ID NOS: 14430, 14431, 14432, 14433, 14434, 14435, 14436, 14437, 14438, 14439, 14440 were selected from the ORFs having the nucleotide sequence represented by SEQ ID NO: 772.

[1261] The probes having the nucleotide sequence represented by SEQ ID NOS: 14441, 14442, 14443, 14444, 14445, 14446, 14447, 14448, 14449, 14450, 14451 were selected from the ORFs having the nucleotide sequence represented by SEQ ID NO: 773.

[1262] The probes having the nucleotide sequence represented by SEQ ID NOS: 14452, 14453, 14454, 14455, 14456, 14457, 14458, 14459, 14460, 14461, 14462 were selected from the ORFs having the nucleotide sequence represented by SEQ ID NO: 774.

[1263] The probes having the nucleotide sequence represented by SEQ ID NOS: 14463, 14464, 14465, 14466, 14467, 14468, 14469, 14470, 14471, 14472, 14473 were selected from the ORFs having the nucleotide sequence represented by SEQ ID NO: 775.

[1264] The probes having the nucleotide sequence represented by SEQ ID NOS: 14474, 14475, 14476, 14477, 14478, 14479, 14480, 14481, 14482, 14483, 14484 were selected from the ORFs having the nucleotide sequence represented by SEQ ID NO: 776.

[1265] The probes having the nucleotide sequence represented by SEQ ID NOS: 14485, 14486, 14487, 14488, 14489, 14490, 14491, 14492, 14493, 14494, 14495 were selected from the ORFs having the nucleotide sequence represented by SEQ ID NO: 777.

[1266] The probes having the nucleotide sequence represented by SEQ ID NOS: 14496, 14497, 14498, 14499, 14500, 14501, 14502, 14503, 14504, 14505, 14506 were selected from the ORFs having the nucleotide sequence represented by SEQ ID NO: 778.

[1267] The probes having the nucleotide sequence represented by SEQ ID NOS: 14507, 14508, 14509, 14510, 14511, 14512, 14513, 14514, 14515, 14516, 14517 were selected from the ORFs having the nucleotide sequence represented by SEQ ID NO: 779.

[1268] The probes having the nucleotide sequence represented by SEQ ID NOS: 14518, 14519, 14520, 14521, 14522, 14523, 14524, 14525, 14526, 14527, 14528 were selected from the ORFs having the nucleotide sequence represented by SEQ ID NO: 780.

[1269] The probes having the nucleotide sequence represented by SEQ ID NOS: 14529, 14530, 14531, 14532, 14533, 14534, 14535, 14536, 14537, 14538, 14539 were selected from the ORFs having the nucleotide sequence represented by SEQ ID NO: 781.

[1270] The probes having the nucleotide sequence represented by SEQ ID NOS: 14540, 14541, 14542, 14543, 14544, 14545, 14546, 14547, 14548, 14549, 14550 were selected from the ORFs having the nucleotide sequence represented by SEQ ID NO: 782.

[1271] The probes having the nucleotide sequence represented by SEQ ID NOS: 14551, 14552, 14553, 14554, 14555, 14556, 14557, 14558, 14559, 14560, 14561 were selected from the ORFs having the nucleotide sequence represented by SEQ ID NO: 783.

[1272] The probes having the nucleotide sequence represented by SEQ ID NOS: 14562, 14563, 14564, 14565, 14566, 14567, 14568, 14569, 14570, 14571, 14572 were selected from the ORFs having the nucleotide sequence represented by SEQ ID NO: 784.

[1273] The probes having the nucleotide sequence represented by SEQ ID NOS: 14573, 14574, 14575, 14576, 14577, 14578, 14579, 14580, 14581, 14582, 14583 were selected from the ORFs having the nucleotide sequence represented by SEQ ID NO: 785.

[1274] The probes having the nucleotide sequence represented by SEQ ID NOS: 14584, 14585, 14586, 14587, 14588, 14589, 14590, 14591, 14592, 14593, 14594 were selected from the ORFs having the nucleotide sequence represented by SEQ ID NO: 786.

[1275] The probes having the nucleotide sequence represented by SEQ ID NOS: 14595, 14596, 14597, 14598, 14599, 14600, 14601, 14602, 14603, 14604, 14605 were selected from the ORFs having the nucleotide sequence represented by SEQ ID NO: 787.

[1276] The probes having the nucleotide sequence represented by SEQ ID NOS: 14606, 14607, 14608, 14609, 14610, 14611, 14612, 14613, 14614, 14615, 14616 were selected from the ORFs having the nucleotide sequence represented by SEQ ID NO: 788.

[1277] The probes having the nucleotide sequence represented by SEQ ID NOS: 14617, 14618, 14619, 14620, 14621, 14622, 14623, 14624, 14625, 14626, 14627 were selected from the ORFs having the nucleotide sequence represented by SEQ ID NO: 789.

[1278] The probes having the nucleotide sequence represented by SEQ ID NOS: 14628, 14629, 14630, 14631, 14632, 14633, 14634, 14635, 14636, 14637, 14638 were selected from the ORFs having the nucleotide sequence represented by SEQ ID NO: 790.

[1279] The probes having the nucleotide sequence represented by SEQ ID NOS: 14639, 14640, 14641, 14642, 14643, 14644, 14645, 14646, 14647, 14648, 14649 were selected from the ORFs having the nucleotide sequence represented by SEQ ID NO: 791.

[1280] The probes having the nucleotide sequence represented by SEQ ID NOS: 14650, 14651, 14652, 14653, 14654, 14655, 14656, 14657, 14658, 14659, 14660 were selected from the ORFs having the nucleotide sequence represented by SEQ ID NO: 792.

[1281] The probes having the nucleotide sequence represented by SEQ ID NOS: 14661, 14662, 14663, 14664, 14665, 14666, 14667, 14668, 14669, 14670, 14671 were selected from the ORFs having the nucleotide sequence represented by SEQ ID NO: 793.

[1282] The probes having the nucleotide sequence represented by SEQ ID NOS: 14672, 14673, 14674, 14675, 14676, 14677, 14678, 14679, 14680, 14681, 14682 were selected from the ORFs having the nucleotide sequence represented by SEQ ID NO: 794.

[1283] The probes having the nucleotide sequence represented by SEQ ID NOS: 14705, 14706, 14707, 14708, 14709, 14710, 14711, 14712, 14713, 14714, 14715 were selected from the ORFs having the nucleotide sequence represented by SEQ ID NO: 795.

[1284] The probes having the nucleotide sequence represented by SEQ ID NOS: 14683, 14684, 14685, 14686, 14687, 14688, 14689, 14690, 14691, 14692, 14693 were selected from the ORFs having the nucleotide sequence represented by SEQ ID NO: 796.

[1285] The probes having the nucleotide sequence represented by SEQ ID NOS: 14694, 14695, 14696, 14697, 14698, 14699, 14700, 14701, 14702, 14703, 14704 were selected from the ORFs having the nucleotide sequence represented by SEQ ID NO: 797.

[1286] The probes having the nucleotide sequence represented by SEQ ID NOS: 14716, 14717, 14718, 14719, 14720, 14721, 14722, 14723, 14724, 14725, 14726 were selected from the ORFs having the nucleotide sequence represented by SEQ ID NO: 798.

[1287] The probes having the nucleotide sequence represented by SEQ ID NOS: 14727, 14728, 14729, 14730, 14731, 14732, 14733, 14734, 14735, 14736, 14737 were selected from the ORFs having the nucleotide sequence represented by SEQ ID NO: 799.

[1288] The probes having the nucleotide sequence represented by SEQ ID NOS: 14738, 14739, 14740, 14741, 14742, 14743, 14744, 14745, 14746, 14747, 14748 were selected from the ORFs having the nucleotide sequence represented by SEQ ID NO: 800.

[1289] The probes having the nucleotide sequence represented by SEQ ID NOS: 14749, 14750, 14751, 14752, 14753, 14754, 14755, 14756, 14757, 14758, 14759 were selected from the ORFs having the nucleotide sequence represented by SEQ ID NO: 801.

[1290] The probes having the nucleotide sequence represented by SEQ ID NOS: 14760, 14761, 14762, 14763, 14764, 14765, 14766, 14767, 14768, 14769, 14770 were selected from the ORFs having the nucleotide sequence represented by SEQ ID NO: 802.

[1291] The probes having the nucleotide sequence represented by SEQ ID NOS: 14771, 14772, 14773, 14774, 14775, 14776, 14777, 14778, 14779, 14780, 14781 were selected from the ORFs having the nucleotide sequence represented by SEQ ID NO: 803.

[1292] The probes having the nucleotide sequence represented by SEQ ID NOS: 14782, 14783, 14784, 14785, 14786, 14787, 14788, 14789, 14790, 14791, 14792 were selected from the ORFs having the nucleotide sequence represented by SEQ ID NO: 804.

[1293] The probes having the nucleotide sequence represented by SEQ ID NOS: 14793, 14794, 14795, 14796, 14797, 14798, 14799, 14800, 14801, 14802, 14803 were selected from the ORFs having the nucleotide sequence represented by SEQ ID NO: 805.

[1294] The probes having the nucleotide sequence represented by SEQ ID NOS: 14804, 14805, 14806, 14807, 14808, 14809, 14810, 14811, 14812, 14813, 14814 were selected from the ORFs having the nucleotide sequence represented by SEQ ID NO: 806.

[1295] The probes having the nucleotide sequence represented by SEQ ID NOS: 14815, 14816, 14817, 14818, 14819, 14820, 14821, 14822, 14823, 14824, 14825 were selected from the ORFs having the nucleotide sequence represented by SEQ ID NO: 807.

[1296] The probes having the nucleotide sequence represented by SEQ ID NOS: 14826, 14827, 14828, 14829, 14830, 14831, 14832, 14833, 14834, 14835, 14836 were selected from the ORFs having the nucleotide sequence represented by SEQ ID NO: 808.

[1297] The probes having the nucleotide sequence represented by SEQ ID NOS: 14837, 14838, 14839, 14840, 14841, 14842, 14843, 14844, 14845, 14846, 14847 were selected from the ORFs having the nucleotide sequence represented by SEQ ID NO: 809.

[1298] The probes having the nucleotide sequence represented by SEQ ID NOS: 14848, 14849, 14850, 14851, 14852, 14853, 14854, 14855, 14856, 14857, 14858 were selected from the ORFs having the nucleotide sequence represented by SEQ ID NO: 810.

[1299] The probes having the nucleotide sequence represented by SEQ ID NOS: 14859, 14860, 14861, 14862, 14863, 14864, 14865, 14866, 14867, 14868, 14869 were selected from the ORFs having the nucleotide sequence represented by SEQ ID NO: 811.

[1300] The probes having the nucleotide sequence represented by SEQ ID NOS: 14870, 14871, 14872, 14873, 14874, 14875, 14876, 14877, 14878, 14879, 14880 were selected from the ORFs having the nucleotide sequence represented by SEQ ID NO: 812.

[1301] The probes having the nucleotide sequence represented by SEQ ID NOS: 14881, 14882, 14883, 14884, 14885, 14886, 14887, 14888, 14889, 14890, 14891 were selected from the ORFs having the nucleotide sequence represented by SEQ ID NO: 813.

[1302] The probes having the nucleotide sequence represented by SEQ ID NOS: 14892, 14893, 14894, 14895, 14896, 14897, 14898, 14899, 14900, 14901, 14902 were selected from the ORFs having the nucleotide sequence represented by SEQ ID NO: 814.

[1303] The probes having the nucleotide sequence represented by SEQ ID NOS: 14903, 14904, 14905, 14906, 14907, 14908, 14909, 14910, 14911, 14912, 14913 were selected from the ORFs having the nucleotide sequence represented by SEQ ID NO: 815.

[1304] The probes having the nucleotide sequence represented by SEQ ID NOS: 14914, 14915, 14916, 14917, 14918, 14919, 14920, 14921, 14922, 14923, 14924 were selected from the ORFs having the nucleotide sequence represented by SEQ ID NO: 816.

[1305] The probes having the nucleotide sequence represented by SEQ ID NOS: 14925, 14926, 14927, 14928, 14929, 14930, 14931, 14932, 14933, 14934, 14935 were selected from the ORFs having the nucleotide sequence represented by SEQ ID NO: 817.

[1306] The probes having the nucleotide sequence represented by SEQ ID NOS: 14936, 14937, 14938, 14939, 14940, 14941, 14942, 14943, 14944, 14945, 14946 were selected from the ORFs having the nucleotide sequence represented by SEQ ID NO: 818.

[1307] The probes having the nucleotide sequence represented by SEQ ID NOS: 14947, 14948, 14949, 14950, 14951, 14952, 14953, 14954, 14955, 14956, 14957 were selected from the ORFs having the nucleotide sequence represented by SEQ ID NO: 819.

[1308] The probes having the nucleotide sequence represented by SEQ ID NOS: 14958, 14959, 14960, 14961, 14962, 14963, 14964, 14965, 14966, 14967, 14968 were selected from the ORFs having the nucleotide sequence represented by SEQ ID NO: 820.

[1309] The probes having the nucleotide sequence represented by SEQ ID NOS: 14969, 14970, 14971, 14972, 14973, 14974, 14975, 14976, 14977, 14978, 14979 were selected from the ORFs having the nucleotide sequence represented by SEQ ID NO: 821.

[1310] The probes having the nucleotide sequence represented by SEQ ID NOS: 14980, 14981, 14982, 14983, 14984, 14985, 14986, 14987, 14988, 14989, 14990 were selected from the ORFs having the nucleotide sequence represented by SEQ ID NO: 822.

[1311] The probes having the nucleotide sequence represented by SEQ ID NOS: 14991, 14992, 14993, 14994, 14995, 14996, 14997, 14998, 14999, 15000, 15001 were selected from the ORFs having the nucleotide sequence represented by SEQ ID NO: 823.

[1312] The probes having the nucleotide sequence represented by SEQ ID NOS: 15002, 15003, 15004, 15005, 15006, 15007, 15008, 15009, 15010, 15011, 15012 were selected from the ORFs having the nucleotide sequence represented by SEQ ID NO: 824.

[1313] The probes having the nucleotide sequence represented by SEQ ID NOS: 15013, 15014, 15015, 15016, 15017, 15018, 15019, 15020, 15021, 15022, 15023 were selected from the ORFs having the nucleotide sequence represented by SEQ ID NO: 825.

[1314] The probes having the nucleotide sequence represented by SEQ ID NOS: 15024, 15025, 15026, 15027, 15028, 15029, 15030, 15031, 15032, 15033, 15034 were selected from the ORFs having the nucleotide sequence represented by SEQ ID NO: 826.

[1315] The probes having the nucleotide sequence represented by SEQ ID NOS: 15035, 15036, 15037, 15038, 15039, 15040, 15041, 15042, 15043, 15044, 15045 were selected from the ORFs having the nucleotide sequence represented by SEQ ID NO: 827.

[1316] The probes having the nucleotide sequence represented by SEQ ID NOS: 15046, 15047, 15048, 15049, 15050, 15051, 15052, 15053, 15054, 15055, 15056 were selected from the ORFs having the nucleotide sequence represented by SEQ ID NO: 828.

[1317] The probes having the nucleotide sequence represented by SEQ ID NOS: 15057, 15058, 15059, 15060, 15061, 15062, 15063, 15064, 15065, 15066, 15067 were selected from the ORFs having the nucleotide sequence represented by SEQ ID NO: 829.

[1318] The probes having the nucleotide sequence represented by SEQ ID NOS: 15068, 15069, 15070, 15071, 15072, 15073, 15074, 15075, 15076, 15077, 15078 were selected from the ORFs having the nucleotide sequence represented by SEQ ID NO: 830.

[1319] The probes having the nucleotide sequence represented by SEQ ID NOS: 15079, 15080, 15081, 15082, 15083, 15084, 15085, 15086, 15087, 15088, 15089 were selected from the ORFs having the nucleotide sequence represented by SEQ ID NO: 831.

[1320] The probes having the nucleotide sequence represented by SEQ ID NOS: 15090, 15091, 15092, 15093, 15094, 15095, 15096, 15097, 15098, 15099, 15100 were selected from the ORFs having the nucleotide sequence represented by SEQ ID NO: 832.

[1321] The probes having the nucleotide sequence represented by SEQ ID NOS: 15101, 15102, 15103, 15104, 15105, 15106, 15107, 15108, 15109, 15110, 15111 were selected from the ORFs having the nucleotide sequence represented by SEQ ID NO: 833.

[1322] The probes having the nucleotide sequence represented by SEQ ID NOS: 15112, 15113, 15114, 15115, 15116, 15117, 15118, 15119, 15120, 15121, 15122 were selected from the ORFs having the nucleotide sequence represented by SEQ ID NO: 834.

[1323] The probes having the nucleotide sequence represented by SEQ ID NOS: 15123, 15124, 15125, 15126, 15127, 15128, 15129, 15130, 15131, 15132, 15133 were selected from the ORFs having the nucleotide sequence represented by SEQ ID NO: 835.

[1324] The probes having the nucleotide sequence represented by SEQ ID NOS: 15134, 15135, 15136, 15137, 15138, 15139, 15140, 15141, 15142, 15143, 15144 were selected from the ORFs having the nucleotide sequence represented by SEQ ID NO: 836.

[1325] The probes having the nucleotide sequence represented by SEQ ID NOS: 15145, 15146, 15147, 15148, 15149, 15150, 15151, 15152, 15153, 15154, 15155 were selected from the ORFs having the nucleotide sequence represented by SEQ ID NO: 837.

[1326] The probes having the nucleotide sequence represented by SEQ ID NOS: 15156, 15157, 15158, 15159, 15160, 15161, 15162, 15163, 15164, 15165, 15166 were selected from the ORFs having the nucleotide sequence represented by SEQ ID NO: 838.

[1327] The probes having the nucleotide sequence represented by SEQ ID NOS: 15167, 15168, 15169, 15170, 15171, 15172, 15173, 15174, 15175, 15176, 15177 were selected from the ORFs having the nucleotide sequence represented by SEQ ID NO: 839.

[1328] The probes having the nucleotide sequence represented by SEQ ID NOS: 15178, 15179, 15180, 15181, 15182, 15183, 15184, 15185, 15186, 15187, 15188 were selected from the ORFs having the nucleotide sequence represented by SEQ ID NO: 840.

[1329] The probes having the nucleotide sequence represented by SEQ ID NOS: 15189, 15190, 15191, 15192, 15193, 15194, 15195, 15196, 15197, 15198, 15199 were selected from the ORFs having the nucleotide sequence represented by SEQ ID NO: 841.

[1330] The probes having the nucleotide sequence represented by SEQ ID NOS: 15200, 15201, 15202, 15203, 15204, 15205, 15206, 15207, 15208, 15209, 15210 were selected from the ORFs having the nucleotide sequence represented by SEQ ID NO: 842.

[1331] The probes having the nucleotide sequence represented by SEQ ID NOS: 15211, 15212, 15213, 15214, 15215, 15216, 15217, 15218, 15219, 15220, 15221 were selected from the ORFs having the nucleotide sequence represented by SEQ ID NO: 843.

[1332] The probes having the nucleotide sequence represented by SEQ ID NOS: 15222, 15223, 15224, 15225, 15226, 15227, 15228, 15229, 15230, 15231, 15232 were selected from the ORFs having the nucleotide sequence represented by SEQ ID NO: 844.

[1333] The probes having the nucleotide sequence represented by SEQ ID NOS: 15233, 15234, 15235, 15236, 15237, 15238, 15239, 15240, 15241, 15242, 15243 were selected from the ORFs having the nucleotide sequence represented by SEQ ID NO: 845.

[1334] The probes having the nucleotide sequence represented by SEQ ID NOS: 15244, 15245, 15246, 15247, 15248, 15249, 15250, 15251, 15252, 15253, 15254 were selected from the ORFs having the nucleotide sequence represented by SEQ ID NO: 846.

[1335] The probes having the nucleotide sequence represented by SEQ ID NOS: 15255, 15256, 15257, 15258, 15259, 15260, 15261, 15262, 15263, 15264, 15265 were selected from the ORFs having the nucleotide sequence represented by SEQ ID NO: 847.

[1336] The probes having the nucleotide sequence represented by SEQ ID NOS: 15266, 15267, 15268, 15269, 15270, 15271, 15272, 15273, 15274, 15275, 15276 were selected from the ORFs having the nucleotide sequence represented by SEQ ID NO: 848.

[1337] The probes having the nucleotide sequence represented by SEQ ID NOS: 15277, 15278, 15279, 15280, 15281, 15282, 15283, 15284, 15285, 15286, 15287 were selected from the ORFs having the nucleotide sequence represented by SEQ ID NO: 849.

[1338] The probes having the nucleotide sequence represented by SEQ ID NOS: 15288, 15289, 15290, 15291, 15292, 15293, 15294, 15295, 15296, 15297, 15298 were selected from the ORFs having the nucleotide sequence represented by SEQ ID NO: 850.

[1339] The probes having the nucleotide sequence represented by SEQ ID NOS: 15299, 15300, 15301, 15302, 15303, 15304, 15305, 15306, 15307, 15308, 15309 were selected from the ORFs having the nucleotide sequence represented by SEQ ID NO: 851.

[1340] The probes having the nucleotide sequence represented by SEQ ID NOS: 15310, 15311, 15312, 15313, 15314, 15315, 15316, 15317, 15318, 15319, 15320 were selected from the ORFs having the nucleotide sequence represented by SEQ ID NO: 852.

[1341] The probes having the nucleotide sequence represented by SEQ ID NOS: 15321, 15322, 15323, 15324, 15325, 15326, 15327, 15328, 15329, 15330, 15331 were selected from the ORFs having the nucleotide sequence represented by SEQ ID NO: 853.

[1342] The probes having the nucleotide sequence represented by SEQ ID NOS: 15332, 15333, 15334, 15335, 15336, 15337, 15338, 15339, 15340, 15341, 15342 were selected from the ORFs having the nucleotide sequence represented by SEQ ID NO: 854.

[1343] The probes having the nucleotide sequence represented by SEQ ID NOS: 15343, 15344, 15345, 15346, 15347, 15348, 15349, 15350, 15351, 15352, 15353 were selected from the ORFs having the nucleotide sequence represented by SEQ ID NO: 855.

[1344] The probes having the nucleotide sequence represented by SEQ ID NOS: 15354, 15355, 15356, 15357, 15358, 15359, 15360, 15361, 15362, 15363, 15364 were selected from the ORFs having the nucleotide sequence represented by SEQ ID NO: 856.

[1345] The probes having the nucleotide sequence represented by SEQ ID NOS: 15365, 15366, 15367, 15368, 15369, 15370, 15371, 15372, 15373, 15374, 15375 were selected from the ORFs having the nucleotide sequence represented by SEQ ID NO: 857.

[1346] The probes having the nucleotide sequence represented by SEQ ID NOS: 15376, 15377, 15378, 15379, 15380, 15381, 15382, 15383, 15384, 15385, 15386 were selected from the ORFs having the nucleotide sequence represented by SEQ ID NO: 858.

[1347] The probes having the nucleotide sequence represented by SEQ ID NOS: 15387, 15388, 15389, 15390, 15391, 15392, 15393, 15394, 15395, 15396, 15397 were selected from the ORFs having the nucleotide sequence represented by SEQ ID NO: 859.

[1348] The probes having the nucleotide sequence represented by SEQ ID NOS: 15398, 15399, 15400, 15401, 15402, 15403, 15404, 15405, 15406, 15407, 15408 were selected from the ORFs having the nucleotide sequence represented by SEQ ID NO: 860.

[1349] The probes having the nucleotide sequence represented by SEQ ID NOS: 15409, 15410, 15411, 15412, 15413, 15414, 15415, 15416, 15417, 15418, 15419 were selected from the ORFs having the nucleotide sequence represented by SEQ ID NO: 861.

[1350] The probes having the nucleotide sequence represented by SEQ ID NOS: 15420, 15421, 15422, 15423, 15424, 15425, 15426, 15427, 15428, 15429, 15430 were selected from the ORFs having the nucleotide sequence represented by SEQ ID NO: 862.

[1351] The probes having the nucleotide sequence represented by SEQ ID NOS: 15431, 15432, 15433, 15434, 15435, 15436, 15437, 15438, 15439, 15440, 15441 were selected from the ORFs having the nucleotide sequence represented by SEQ ID NO: 863.

[1352] The probes having the nucleotide sequence represented by SEQ ID NOS: 15442, 15443, 15444, 15445, 15446, 15447, 15448, 15449, 15450, 15451, 15452 were selected from the ORFs having the nucleotide sequence represented by SEQ ID NO: 864.

[1353] The probes having the nucleotide sequence represented by SEQ ID NOS: 15453, 15454, 15455, 15456, 15457, 15458, 15459, 15460, 15461, 15462, 15463 were selected from the ORFs having the nucleotide sequence represented by SEQ ID NO: 865.

[1354] The probes having the nucleotide sequence represented by SEQ ID NOS: 15464, 15465, 15466, 15467, 15468, 15469, 15470, 15471, 15472, 15473, 15474 were selected from the ORFs having the nucleotide sequence represented by SEQ ID NO: 866.

[1355] The probes having the nucleotide sequence represented by SEQ ID NOS: 15475, 15476, 15477, 15478, 15479, 15480, 15481, 15482, 15483, 15484, 15485 were selected from the ORFs having the nucleotide sequence represented by SEQ ID NO: 867.

[1356] The probes having the nucleotide sequence represented by SEQ ID NOS: 15486, 15487, 15488, 15489, 15490, 15491, 15492, 15493, 15494, 15495, 15496 were selected from the ORFs having the nucleotide sequence represented by SEQ ID NO: 868.

[1357] The probes having the nucleotide sequence represented by SEQ ID NOS: 15497, 15498, 15499, 15500, 15501, 15502, 15503, 15504, 15505, 15506, 15507 were selected from the ORFs having the nucleotide sequence represented by SEQ ID NO: 869.

[1358] The probes having the nucleotide sequence represented by SEQ ID NOS: 15508, 15509, 15510, 15511, 15512, 15513, 15514, 15515, 15516, 15517, 15518 were selected from the ORFs having the nucleotide sequence represented by SEQ ID NO: 870.

[1359] The probes having the nucleotide sequence represented by SEQ ID NOS: 15519, 15520, 15521, 15522, 15523, 15524, 15525, 15526, 15527, 15528, 15529 were selected from the ORFs having the nucleotide sequence represented by SEQ ID NO: 871.

[1360] The probes having the nucleotide sequence represented by SEQ ID NOS: 15530, 15531, 15532, 15533, 15534, 15535, 15536, 15537, 15538, 15539, 15540 were selected from the ORFs having the nucleotide sequence represented by SEQ ID NO: 872.

[1361] The probes having the nucleotide sequence represented by SEQ ID NOS: 15541, 15542, 15543, 15544, 15545, 15546, 15547, 15548, 15549, 15550, 15551 were selected from the ORFs having the nucleotide sequence represented by SEQ ID NO: 873.

[1362] The probes having the nucleotide sequence represented by SEQ ID NOS: 15552, 15553, 15554, 15555, 15556, 15557, 15558, 15559, 15560, 15561, 15562 were selected from the ORFs having the nucleotide sequence represented by SEQ ID NO: 874.

[1363] The probes having the nucleotide sequence represented by SEQ ID NOS: 15563, 15564, 15565, 15566, 15567, 15568, 15569, 15570, 15571, 15572, 15573 were selected from the ORFs having the nucleotide sequence represented by SEQ ID NO: 875.

[1364] The probes having the nucleotide sequence represented by SEQ ID NOS: 15574, 15575, 15576, 15577, 15578, 15579, 15580, 15581, 15582, 15583, 15584 were selected from the ORFs having the nucleotide sequence represented by SEQ ID NO: 876.

[1365] The probes having the nucleotide sequence represented by SEQ ID NOS: 15585, 15586, 15587, 15588, 15589, 15590, 15591, 15592, 15593, 15594, 15595 were selected from the ORFs having the nucleotide sequence represented by SEQ ID NO: 877.

[1366] The probes having the nucleotide sequence represented by SEQ ID NOS: 15596, 15597, 15598, 15599, 15600, 15601, 15602, 15603, 15604, 15605, 15606 were selected from the ORFs having the nucleotide sequence represented by SEQ ID NO: 878.

[1367] The probes having the nucleotide sequence represented by SEQ ID NOS: 15607, 15608, 15609, 15610, 15611, 15612, 15613, 15614, 15615, 15616, 15617 were selected from the ORFs having the nucleotide sequence represented by SEQ ID NO: 879.

[1368] The probes having the nucleotide sequence represented by SEQ ID NOS: 15618, 15619, 15620, 15621, 15622, 15623, 15624, 15625, 15626, 15627, 15628 were selected from the ORFs having the nucleotide sequence represented by SEQ ID NO: 880.

[1369] The probes having the nucleotide sequence represented by SEQ ID NOS: 15629, 15630, 15631, 15632, 15633, 15634, 15635, 15636, 15637, 15638, 15639 were selected from the ORFs having the nucleotide sequence represented by SEQ ID NO: 881.

[1370] The probes having the nucleotide sequence represented by SEQ ID NOS: 15640, 15641, 15642, 15643, 15644, 15645, 15646, 15647, 15648, 15649, 15650 were selected from the ORFs having the nucleotide sequence represented by SEQ ID NO: 882.

[1371] The probes having the nucleotide sequence represented by SEQ ID NOS: 15651, 15652, 15653, 15654, 15655, 15656, 15657, 15658, 15659, 15660, 15661 were selected from the ORFs having the nucleotide sequence represented by SEQ ID NO: 883.

[1372] The probes having the nucleotide sequence represented by SEQ ID NOS: 15662, 15663, 15664, 15665, 15666, 15667, 15668, 15669, 15670, 15671, 15672 were selected from the ORFs having the nucleotide sequence represented by SEQ ID NO: 884.

[1373] The probes having the nucleotide sequence represented by SEQ ID NOS: 15673, 15674, 15675, 15676, 15677, 15678, 15679, 15680, 15681, 15682, 15683 were selected from the ORFs having the nucleotide sequence represented by SEQ ID NO: 885.

[1374] The probes having the nucleotide sequence represented by SEQ ID NOS: 15684, 15685, 15686, 15687, 15688, 15689, 15690, 15691, 15692, 15693, 15694 were selected from the ORFs having the nucleotide sequence represented by SEQ ID NO: 886.

[1375] The probes having the nucleotide sequence represented by SEQ ID NOS: 15695, 15696, 15697, 15698, 15699, 15700, 15701, 15702, 15703, 15704, 15705 were selected from the ORFs having the nucleotide sequence represented by SEQ ID NO: 887.

[1376] The probes having the nucleotide sequence represented by SEQ ID NOS: 15706, 15707, 15708, 15709, 15710, 15711, 15712, 15713, 15714, 15715, 15716 were selected from the ORFs having the nucleotide sequence represented by SEQ ID NO: 888.

[1377] The probes having the nucleotide sequence represented by SEQ ID NOS: 15717, 15718, 15719, 15720, 15721, 15722, 15723, 15724, 15725, 15726, 15727 were selected from the ORFs having the nucleotide sequence represented by SEQ ID NO: 889.

[1378] The probes having the nucleotide sequence represented by SEQ ID NOS: 15728, 15729, 15730, 15731, 15732, 15733, 15734, 15735, 15736, 15737, 15738 were selected from the ORFs having the nucleotide sequence represented by SEQ ID NO: 890.

[1379] The probes having the nucleotide sequence represented by SEQ ID NOS: 15739, 15740, 15741, 15742, 15743, 15744, 15745, 15746, 15747, 15748, 15749 were selected from the ORFs having the nucleotide sequence represented by SEQ ID NO: 891.

[1380] The probes having the nucleotide sequence represented by SEQ ID NOS: 15750, 15751, 15752, 15753, 15754, 15755, 15756, 15757, 15758, 15759, 15760 were selected from the ORFs having the nucleotide sequence represented by SEQ ID NO: 892.

[1381] The probes having the nucleotide sequence represented by SEQ ID NOS: 15761, 15762, 15763, 15764, 15765, 15766, 15767, 15768, 15769, 15770, 15771 were selected from the ORFs having the nucleotide sequence represented by SEQ ID NO: 893.

[1382] The probes having the nucleotide sequence represented by SEQ ID NOS: 15772, 15773, 15774, 15775, 15776, 15777, 15778, 15779, 15780, 15781, 15782 were selected from the ORFs having the nucleotide sequence represented by SEQ ID NO: 894.

[1383] The probes having the nucleotide sequence represented by SEQ ID NOS: 15783, 15784, 15785, 15786, 15787, 15788, 15789, 15790, 15791, 15792, 15793 were selected from the ORFs having the nucleotide sequence represented by SEQ ID NO: 895.

[1384] The probes having the nucleotide sequence represented by SEQ ID NOS: 15794, 15795, 15796, 15797, 15798, 15799, 15800, 15801, 15802, 15803, 15804 were selected from the ORFs having the nucleotide sequence represented by SEQ ID NO: 896.

[1385] The probes having the nucleotide sequence represented by SEQ ID NOS: 15805, 15806, 15807, 15808, 15809, 15810, 15811, 15812, 15813, 15814, 15815 were selected from the ORFs having the nucleotide sequence represented by SEQ ID NO: 897.

[1386] The probes having the nucleotide sequence represented by SEQ ID NOS: 15816, 15817, 15818, 15819, 15820, 15821, 15822, 15823, 15824, 15825, 15826 were selected from the ORFs having the nucleotide sequence represented by SEQ ID NO: 898.

[1387] The probes having the nucleotide sequence represented by SEQ ID NOS: 15827, 15828, 15829, 15830, 15831, 15832, 15833, 15834, 15835, 15836, 15837 were selected from the ORFs having the nucleotide sequence represented by SEQ ID NO: 899.

[1388] The probes having the nucleotide sequence represented by SEQ ID NOS: 15838, 15839, 15840, 15841, 15842, 15843, 15844, 15845, 15846, 15847, 15848 were selected from the ORFs having the nucleotide sequence represented by SEQ ID NO: 900.

[1389] The probes having the nucleotide sequence represented by SEQ ID NOS: 15849, 15850, 15851, 15852, 15853, 15854, 15855, 15856, 15857, 15858, 15859 were selected from the ORFs having the nucleotide sequence represented by SEQ ID NO: 901.

[1390] The probes having the nucleotide sequence represented by SEQ ID NOS: 15860, 15861, 15862, 15863, 15864, 15865, 15866, 15867, 15868, 15869, 15870 were selected from the ORFs having the nucleotide sequence represented by SEQ ID NO: 902.

[1391] The probes having the nucleotide sequence represented by SEQ ID NOS: 15871, 15872, 15873, 15874, 15875, 15876, 15877, 158.78, 15879, 15880, 15881 were selected from the ORFs having the nucleotide sequence represented by SEQ ID NO: 903.

[1392] The probes having the nucleotide sequence represented by SEQ ID NOS: 15882, 15883, 15884, 15885, 15886, 15887, 15888, 15889, 15890, 15891, 15892 were selected from the ORFs having the nucleotide sequence represented by SEQ ID NO: 904.

[1393] The probes having the nucleotide sequence represented by SEQ ID NOS: 15893, 15894, 15895, 15896, 15897, 15898, 15899, 15900, 15901, 15902, 15903 were selected from the ORFs having the nucleotide sequence represented by SEQ ID NO: 905.

[1394] The probes having the nucleotide sequence represented by SEQ ID NOS: 15904, 15905, 15906, 15907, 15908, 15909, 15910, 15911, 15912, 15913, 15914 were selected from the ORFs having the nucleotide sequence represented by SEQ ID NO: 906.

[1395] The probes having the nucleotide sequence represented by SEQ ID NOS: 15915, 15916, 15917, 15918, 15919, 15920, 15921, 15922, 15923, 15924, 15925 were selected from the ORFs having the nucleotide sequence represented by SEQ ID NO: 907.

[1396] The probes having the nucleotide sequence represented by SEQ ID NOS: 15926, 15927, 15928, 15929, 15930, 15931, 15932, 15933, 15934, 15935, 15936 were selected from the ORFs having the nucleotide sequence represented by SEQ ID NO: 908.

[1397] The probes having the nucleotide sequence represented by SEQ ID NOS: 15937, 15938, 15939, 15940, 15941, 15942, 15943, 15944, 15945, 15946, 15947 were selected from the ORFs having the nucleotide sequence represented by SEQ ID NO: 909.

[1398] The probes having the nucleotide sequence represented by SEQ ID NOS: 15948, 15949, 15950, 15951, 15952, 15953, 15954, 15955, 15956, 15957, 15958 were selected from the ORFs having the nucleotide sequence represented by SEQ ID NO: 910.

[1399] The probes having the nucleotide sequence represented by SEQ ID NOS: 15959, 15960, 15961, 15962, 15963, 15964, 15965, 15966, 15967, 15968, 15969 were selected from the ORFs having the nucleotide sequence represented by SEQ ID NO: 911.

[1400] The probes having the nucleotide sequence represented by SEQ ID NOS: 15970, 15971, 15972, 15973, 15974, 15975, 15976, 15977, 15978, 15979, 15980 were selected from the ORFs having the nucleotide sequence represented by SEQ ID NO: 912.

[1401] The probes having the nucleotide sequence represented by SEQ ID NOS: 15981, 15982, 15983, 15984, 15985, 15986, 15987, 15988, 15989, 15990, 15991 were selected from the ORFs having the nucleotide sequence represented by SEQ ID NO: 913.

[1402] The probes having the nucleotide sequence represented by SEQ ID NOS: 15992, 15993, 15994, 15995, 15996, 15997, 15998, 15999, 16000, 16001, 16002 were selected from the ORFs having the nucleotide sequence represented by SEQ ID NO: 914.

[1403] The probes having the nucleotide sequence represented by SEQ ID NOS: 16003, 16004, 16005, 16006, 16007, 16008, 16009, 16010, 16011, 16012, 16013 were selected from the ORFs having the nucleotide sequence represented by SEQ ID NO: 915.

[1404] The probes having the nucleotide sequence represented by SEQ ID NOS: 16014, 16015, 16016, 16017, 16018, 16019, 16020, 16021, 16022, 16023, 16024 were selected from the ORFs having the nucleotide sequence represented by SEQ ID NO: 916.

[1405] The probes having the nucleotide sequence represented by SEQ ID NOS: 16025, 16026, 16027, 16028, 16029, 16030, 16031, 16032, 16033, 16034, 16035 were selected from the ORFs having the nucleotide sequence represented by SEQ ID NO: 917.

[1406] The probes having the nucleotide sequence represented by SEQ ID NOS: 16036, 16037, 16038, 16039, 16040, 16041, 16042, 16043, 16044, 16045, 16046 were selected from the ORFs having the nucleotide sequence represented by SEQ ID NO: 918.

[1407] The probes having the nucleotide sequence represented by SEQ ID NOS: 16047, 16048, 16049, 16050, 16051, 16052, 16053, 16054, 16055, 16056, 16057 were selected from the ORFs having the nucleotide sequence represented by SEQ ID NO: 919.

[1408] The probes having the nucleotide sequence represented by SEQ ID NOS: 16058, 16059, 16060, 16061, 16062, 16063, 16064, 16065, 16066, 16067, 16068 were selected from the ORFs having the nucleotide sequence represented by SEQ ID NO: 920.

[1409] The probes having the nucleotide sequence represented by SEQ ID NOS: 16069, 16070, 16071, 16072, 16073, 16074, 16075, 16076, 16077, 16078, 16079 were selected from the ORFs having the nucleotide sequence represented by SEQ ID NO: 921.

[1410] The probes having the nucleotide sequence represented by SEQ ID NOS: 16080, 16081, 16082, 16083, 16084, 16085, 16086, 16087, 16088, 16089, 16090 were selected from the ORFs having the nucleotide sequence represented by SEQ ID NO: 922.

[1411] The probes having the nucleotide sequence represented by SEQ ID NOS: 16091, 16092, 16093, 16094, 16095, 16096, 16097, 16098, 16099, 16100, 16101 were selected from the ORFs having the nucleotide sequence represented by SEQ ID NO: 923.

[1412] The probes having the nucleotide sequence represented by SEQ ID NOS: 16102, 16103, 16104, 16105, 16106, 16107, 16108, 16109, 16110, 16111, 16112 were selected from the ORFs having the nucleotide sequence represented by SEQ ID NO: 924.

[1413] The probes having the nucleotide sequence represented by SEQ ID NOS: 16113, 16114, 16115, 16116, 16117, 16118, 16119, 16120, 16121, 16122, 16123 were selected from the ORFs having the nucleotide sequence represented by SEQ ID NO: 925.

[1414] The probes having the nucleotide sequence represented by SEQ ID NOS: 16124, 16125, 16126, 16127, 16128, 16129, 16130, 16131, 16132, 16133, 16134 were selected from the ORFs having the nucleotide sequence represented by SEQ ID NO: 926.

[1415] The probes having the nucleotide sequence represented by SEQ ID NOS: 16135, 16136, 16137, 16138, 16139, 16140, 16141, 16142, 16143, 16144, 16145 were selected from the ORFs having the nucleotide sequence represented by SEQ ID NO: 927.

[1416] The probes having the nucleotide sequence represented by SEQ ID NOS: 16146, 16147, 16148, 16149, 16150, 16151, 16152, 16153, 16154, 16155, 16156 were selected from the ORFs having the nucleotide sequence represented by SEQ ID NO: 928.

[1417] The probes having the nucleotide sequence represented by SEQ ID NOS: 16157, 16158, 16159, 16160, 16161, 16162, 16163, 16164, 16165, 16166, 16167 were selected from the ORFs having the nucleotide sequence represented by SEQ ID NO: 929.

[1418] The probes having the nucleotide sequence represented by SEQ ID NOS: 16168, 16169, 16170, 16171, 16172, 16173, 16174, 16175, 16176, 16177, 16178 were selected from the ORFs having the nucleotide sequence represented by SEQ ID NO: 930.

[1419] The probes having the nucleotide sequence represented by SEQ ID NOS: 16179, 16180, 16181, 16182, 16183, 16184, 16185, 16186, 16187, 16188, 16189 were selected from the ORFs having the nucleotide sequence represented by SEQ ID NO: 931.

[1420] The probes having the nucleotide sequence represented by SEQ ID NOS: 16190, 16191, 16192, 16193, 16194, 16195, 16196, 16197, 16198, 16199, 16200 were selected from the ORFs having the nucleotide sequence represented by SEQ ID NO: 932.

[1421] The probes having the nucleotide sequence represented by SEQ ID NOS: 16201, 16202, 16203, 16204, 16205, 16206, 16207, 16208, 16209, 16210, 16211 were selected from the ORFs having the nucleotide sequence represented by SEQ ID NO: 933.

[1422] The probes having the nucleotide sequence represented by SEQ ID NOS: 16212, 16213, 16214, 16215, 16216, 16217, 16218, 16219, 16220, 16221, 16222 were selected from the ORFs having the nucleotide sequence represented by SEQ ID NO: 934.

[1423] The probes having the nucleotide sequence represented by SEQ ID NOS: 16223, 16224, 16225, 16226, 16227, 16228, 16229, 16230, 16231, 16232, 16233 were selected from the ORFs having the nucleotide sequence represented by SEQ ID NO: 935.

[1424] The probes having the nucleotide sequence represented by SEQ ID NOS: 16234, 16235, 16236, 16237, 16238, 16239, 16240, 16241, 16242, 16243, 16244 were selected from the ORFs having the nucleotide sequence represented by SEQ ID NO: 936.

[1425] The probes having the nucleotide sequence represented by SEQ ID NOS: 16245, 16246, 16247, 16248, 16249, 16250, 16251, 16252, 16253, 16254, 16255 were selected from the ORFs having the nucleotide sequence represented by SEQ ID NO: 937.

[1426] The probes having the nucleotide sequence represented by SEQ ID NOS: 16256, 16257, 16258, 16259, 16260, 16261, 16262, 16263, 16264, 16265, 16266 were selected from the ORFs having the nucleotide sequence represented by SEQ ID NO: 938.

[1427] The probes having the nucleotide sequence represented by SEQ ID NOS: 16267, 16268, 16269, 16270, 16271, 16272, 16273, 16274, 16275, 16276, 16277 were selected from the ORFs having the nucleotide sequence represented by SEQ ID NO: 939.

[1428] The probes having the nucleotide sequence represented by SEQ ID NOS: 16278, 16279, 16280, 16281, 16282, 16283, 16284, 16285, 16286, 16287, 16288 were selected from the ORFs having the nucleotide sequence represented by SEQ ID NO: 940.

[1429] The probes having the nucleotide sequence represented by SEQ ID NOS: 16289, 16290, 16291, 16292, 16293, 16294, 16295, 16296, 16297, 16298, 16299 were selected from the ORFs having the nucleotide sequence represented by SEQ ID NO: 941.

[1430] The probes having the nucleotide sequence represented by SEQ ID NOS: 16300, 16301, 16302, 16303, 16304, 16305, 16306, 16307, 16308, 16309, 16310 were selected from the ORFs having the nucleotide sequence represented by SEQ ID NO: 942.

[1431] The probes having the nucleotide sequence represented by SEQ ID NOS: 16311, 16312, 16313, 16314, 16315, 16316, 16317, 16318, 16319, 16320, 16321 were selected from the ORFs having the nucleotide sequence represented by SEQ ID NO: 943.

[1432] The probes having the nucleotide sequence represented by SEQ ID NOS: 16322, 16323, 16324, 16325, 16326, 16327, 16328, 16329, 16330, 16331, 16332 were selected from the ORFs having the nucleotide sequence represented by SEQ ID NO: 944.

[1433] The probes having the nucleotide sequence represented by SEQ ID NOS: 16333, 16334, 16335, 16336, 16337, 16338, 16339, 16340, 16341, 16342, 16343 were selected from the ORFs having the nucleotide sequence represented by SEQ ID NO: 945.

[1434] The probes having the nucleotide sequence represented by SEQ ID NOS: 16344, 16345, 16346, 16347, 16348, 16349, 16350, 16351, 16352, 16353, 16354 were selected from the ORFs having the nucleotide sequence represented by SEQ ID NO: 946.

[1435] The probes having the nucleotide sequence represented by SEQ ID NOS: 16355, 16356, 16357, 16358, 16359, 16360, 16361, 16362, 16363, 16364, 16365 were selected from the ORFs having the nucleotide sequence represented by SEQ ID NO: 947.

[1436] The probes having the nucleotide sequence represented by SEQ ID NOS: 16366, 16367, 16368, 16369, 16370, 16371, 16372, 16373, 16374, 16375, 16376 were selected from the ORFs having the nucleotide sequence represented by SEQ ID NO: 948.

[1437] The probes having the nucleotide sequence represented by SEQ ID NOS: 16377, 16378, 16379, 16380, 16381, 16382, 16383, 16384, 16385, 16386, 16387 were selected from the ORFs having the nucleotide sequence represented by SEQ ID NO: 949.

[1438] The probes having the nucleotide sequence represented by SEQ ID NOS: 16388, 16389, 16390, 16391, 16392, 16393, 16394, 16395, 16396, 16397, 16398 were selected from the ORFs having the nucleotide sequence represented by SEQ ID NO: 950.

[1439] The probes having the nucleotide sequence represented by SEQ ID NOS: 16399, 16400, 16401, 16402, 16403, 16404, 16405, 16406, 16407, 16408, 16409 were selected from the ORFs having the nucleotide sequence represented by SEQ ID NO: 951.

[1440] The probes having the nucleotide sequence represented by SEQ ID NOS: 16410, 16411, 16412, 16413, 16414, 16415, 16416, 16417, 16418, 16419, 16420 were selected from the ORFs having the nucleotide sequence represented by SEQ ID NO: 952.

[1441] The probes having the nucleotide sequence represented by SEQ ID NOS: 16421, 16422, 16423, 16424, 16425, 16426, 16427, 16428, 16429, 16430, 16431 were selected from the ORFs having the nucleotide sequence represented by SEQ ID NO: 953.

[1442] The probes having the nucleotide sequence represented by SEQ ID NOS: 16432, 16433, 16434, 16435, 16436, 16437, 16438, 16439, 16440, 16441, 16442 were selected from the ORFs having the nucleotide sequence represented by SEQ ID NO: 954.

[1443] The probes having the nucleotide sequence represented by SEQ ID NOS: 16443, 16444, 16445, 16446, 16447, 16448, 16449, 16450, 16451, 16452, 16453 were selected from the ORFs having the nucleotide sequence represented by SEQ ID NO: 955.

[1444] The probes having the nucleotide sequence represented by SEQ ID NOS: 16454, 16455, 16456, 16457, 16458, 16459, 16460, 16461, 16462, 16463, 16464 were selected from the ORFs having the nucleotide sequence represented by SEQ ID NO: 956.

[1445] The probes having the nucleotide sequence represented by SEQ ID NOS: 16465, 16466, 16467, 16468, 16469, 16470, 16471, 16472, 16473, 16474 were selected from the ORFs having the nucleotide sequence represented by SEQ ID NO: 957.

[1446] The probes having the nucleotide sequence represented by SEQ ID NOS: 16475, 16476, 16477, 16478, 16479, 16480, 16481, 16482, 16483, 16484, 16485 were selected from the ORFs having the nucleotide sequence represented by SEQ ID NO: 958.

[1447] The probes having the nucleotide sequence represented by SEQ ID NOS: 16486, 16487, 16488, 16489, 16490, 16491, 16492, 16493, 16494, 16495, 16496 were selected from the ORFs having the nucleotide sequence represented by SEQ ID NO: 959.

[1448] The probes having the nucleotide sequence represented by SEQ ID NOS: 16497, 16498, 16499, 16500, 16501, 16502, 16503, 16504, 16505, 16506, 16507 were selected from the ORFs having the nucleotide sequence represented by SEQ ID NO: 960.

[1449] The probes having the nucleotide sequence represented by SEQ ID NOS: 16508, 16509, 16510, 16511, 16512, 16513, 16514, 16515, 16516, 16517, 16518 were selected from the ORFs having the nucleotide sequence represented by SEQ ID NO: 961.

[1450] The probes having the nucleotide sequence represented by SEQ ID NOS: 16519, 16520, 16521, 16522, 16523, 16524, 16525, 16526, 16527, 16528, 16529 were selected from the ORFs having the nucleotide sequence represented by SEQ ID NO: 962.

[1451] The probes having the nucleotide sequence represented by SEQ ID NOS: 16530, 16531, 16532, 16533, 16534, 16535, 16536, 16537, 16538, 16539, 16540 were selected from the ORFs having the nucleotide sequence represented by SEQ ID NO: 963.

[1452] The probes having the nucleotide sequence represented by SEQ ID NOS: 16541, 16542, 16543, 16544, 16545, 16546, 16547, 16548, 16549, 16550, 16551 were selected from the ORFs having the nucleotide sequence represented by SEQ ID NO: 964.

[1453] The probes having the nucleotide sequence represented by SEQ ID NOS: 16552, 16553, 16554, 16555, 16556, 16557, 16558, 16559, 16560, 16561, 16562 were selected from the ORFs having the nucleotide sequence represented by SEQ ID NO: 965.

[1454] The probes having the nucleotide sequence represented by SEQ ID NOS: 16563, 16564, 16565, 16566, 16567, 16568, 16569, 16570, 16571, 16572, 16573 were selected from the ORFs having the nucleotide sequence represented by SEQ ID NO: 966.

[1455] The probes having the nucleotide sequence represented by SEQ ID NOS: 16574, 16575, 16576, 16577, 16578, 16579, 16580, 16581, 16582, 16583, 16584 were selected from the ORFs having the nucleotide sequence represented by SEQ ID NO: 967.

[1456] The probes having the nucleotide sequence represented by SEQ ID NOS: 16585, 16586, 16587, 16588, 16589, 16590, 16591, 16592, 16593, 16594, 16595 were selected from the ORFs having the nucleotide sequence represented by SEQ ID NO: 968.

[1457] The probes having the nucleotide sequence represented by SEQ ID NOS: 16596, 16597, 16598, 16599, 16600, 16601, 16602, 16603, 16604, 16605, 16606 were selected from the ORFs having the nucleotide sequence represented by SEQ ID NO: 969.

[1458] The probes having the nucleotide sequence represented by SEQ ID NOS: 16607, 16608, 16609, 16610, 16611, 16612, 16613, 16614, 16615, 16616, 16617 were selected from the ORFs having the nucleotide sequence represented by SEQ ID NO: 970.

[1459] The probes having the nucleotide sequence represented by SEQ ID NOS: 16618, 16619, 16620, 16621, 16622, 16623, 16624, 16625, 16626, 16627, 16628 were selected from the ORFs having the nucleotide sequence represented by SEQ ID NO: 971.

[1460] The probes having the nucleotide sequence represented by SEQ ID NOS: 16629, 16630, 16631, 16632, 16633, 16634, 16635, 16636, 16637, 16638, 16639 were selected from the ORFs having the nucleotide sequence represented by SEQ ID NO: 972.

[1461] The probes having the nucleotide sequence represented by SEQ ID NOS: 16640, 16641, 16642, 16643, 16644, 16645, 16646, 16647, 16648, 16649, 16650 were selected from the ORFs having the nucleotide sequence represented by SEQ ID NO: 973.

[1462] The probes having the nucleotide sequence represented by SEQ ID NOS: 16651, 16652, 16653, 16654, 16655, 16656, 16657, 16658, 16659, 16660, 16661 were selected from the ORFs having the nucleotide sequence represented by SEQ ID NO: 974.

[1463] The probes having the nucleotide sequence represented by SEQ ID NOS: 16662, 16663, 16664, 16665, 16666, 16667, 16668, 16669, 16670, 16671, 16672 were selected from the ORFs having the nucleotide sequence represented by SEQ ID NO: 975.

[1464] The probes having the nucleotide sequence represented by SEQ ID NOS: 16673, 16674, 16675, 16676, 16677, 16678, 16679, 16680, 16681, 16682, 16683 were selected from the ORFs having the nucleotide sequence represented by SEQ ID NO: 976.

[1465] The probes having the nucleotide sequence represented by SEQ ID NOS: 16684, 16685, 16686, 16687, 16688, 16689, 16690, 16691, 16692, 16693, 16694 were selected from the ORFs having the nucleotide sequence represented by SEQ ID NO: 977.

[1466] The probes having the nucleotide sequence represented by SEQ ID NOS: 16695, 16696, 16697, 16698, 16699, 16700, 16701, 16702, 16703, 16704, 16705 were selected from the ORFs having the nucleotide sequence represented by SEQ ID NO: 978.

[1467] The probes having the nucleotide sequence represented by SEQ ID NOS: 16706, 16707, 16708, 16709, 16710, 16711, 16712, 16713, 16714, 16715, 16716 were selected from the ORFs having the nucleotide sequence represented by SEQ ID NO: 979.

[1468] The probes having the nucleotide sequence represented by SEQ ID NOS: 16717, 16718, 16719, 16720, 16721, 16722, 16723, 16724, 16725, 16726, 16727 were selected from the ORFs having the nucleotide sequence represented by SEQ ID NO: 980.

[1469] The probes having the nucleotide sequence represented by SEQ ID NOS: 16728, 16729, 16730, 16731, 16732, 16733, 16734, 16735, 16736, 16737, 16738 were selected from the ORFs having the nucleotide sequence represented by SEQ ID NO: 981.

[1470] The probes having the nucleotide sequence represented by SEQ ID NOS: 16739, 16740, 16741, 16742, 16743, 16744, 16745, 16746, 16747, 16748, 16749 were selected from the ORFs having the nucleotide sequence represented by SEQ ID NO: 982.

[1471] The probes having the nucleotide sequence represented by SEQ ID NOS: 16750, 16751, 16752, 16753, 16754, 16755, 16756, 16757, 16758, 16759, 16760 were selected from the ORFs having the nucleotide sequence represented by SEQ ID NO: 983.

[1472] The probes having the nucleotide sequence represented by SEQ ID NOS: 16761, 16762, 16763, 16764, 16765, 16766, 16767, 16768, 16769, 16770, 16771 were selected from the ORFs having the nucleotide sequence represented by SEQ ID NO: 984.

[1473] The probes having the nucleotide sequence represented by SEQ ID NOS: 16772, 16773, 16774, 16775, 16776, 16777, 16778, 16779, 16780, 16781, 16782 were selected from the ORFs having the nucleotide sequence represented by SEQ ID NO: 985.

[1474] The probes having the nucleotide sequence represented by SEQ ID NOS: 16783, 16784, 16785, 16786, 16787, 16788, 16789, 16790, 16791, 16792, 16793 were selected from the ORFs having the nucleotide sequence represented by SEQ ID NO: 986.

[1475] The probes having the nucleotide sequence represented by SEQ ID NOS: 16794, 16795, 16796, 16797, 16798, 16799, 16800, 16801, 16802, 16803, 16804 were selected from the ORFs having the nucleotide sequence represented by SEQ ID NO: 987.

[1476] The probes having the nucleotide sequence represented by SEQ ID NOS: 16805, 16806, 16807, 16808, 16809, 16810, 16811, 16812, 16813, 16814, 16815 were selected from the ORFs having the nucleotide sequence represented by SEQ ID NO: 988.

[1477] The probes having the nucleotide sequence represented by SEQ ID NOS: 16816, 16817, 16818, 16819, 16820, 16821, 16822, 16823, 16824, 16825, 16826 were selected from the ORFs having the nucleotide sequence represented by SEQ ID NO: 989.

[1478] The probes having the nucleotide sequence represented by SEQ ID NOS: 16827, 16828, 16829, 16830, 16831, 16832, 16833, 16834, 16835, 16836, 16837 were selected from the ORFs having the nucleotide sequence represented by SEQ ID NO: 990.

[1479] The probes having the nucleotide sequence represented by SEQ ID NOS: 16838, 16839, 16840, 16841, 16842, 16843, 16844, 16845, 16846, 16847, 16848 were selected from the ORFs having the nucleotide sequence represented by SEQ ID NO: 991.

[1480] The probes having the nucleotide sequence represented by SEQ ID NOS: 16849, 16850, 16851, 16852, 16853, 16854, 16855, 16856, 16857, 16858, 16859 were selected from the ORFs having the nucleotide sequence represented by SEQ ID NO: 992.

[1481] The probes having the nucleotide sequence represented by SEQ ID NOS: 16860, 16861, 16862, 16863, 16864, 16865, 16866, 16867, 16868, 16869, 16870 were selected from the ORFs having the nucleotide sequence represented by SEQ ID NO: 993.

[1482] The probes having the nucleotide sequence represented by SEQ ID NOS: 16871, 16872, 16873, 16874, 16875, 16876, 16877, 16878, 16879, 16880, 16881 were selected from the ORFs having the nucleotide sequence represented by SEQ ID NO: 994.

[1483] The probes having the nucleotide sequence represented by SEQ ID NOS: 16882, 16883, 16884, 16885, 16886, 16887, 16888, 16889, 16890, 16891, 16892 were selected from the ORFs having the nucleotide sequence represented by SEQ ID NO: 995.

[1484] The probes having the nucleotide sequence represented by SEQ ID NOS: 16893, 16894, 16895, 16896, 16897, 16898, 16899, 16900, 16901, 16902, 16903 were selected from the ORFs having the nucleotide sequence represented by SEQ ID NO: 996.

[1485] The probes having the nucleotide sequence represented by SEQ ID NOS: 16904, 16905, 16906, 16907, 16908, 16909, 16910, 16911, 16912, 16913, 16914 were selected from the ORFs having the nucleotide sequence represented by SEQ ID NO: 997.

[1486] The probes having the nucleotide sequence represented by SEQ ID NOS: 16915, 16916, 16917, 16918, 16919, 16920, 16921, 16922, 16923, 16924, 16925 were selected from the ORFs having the nucleotide sequence represented by SEQ ID NO: 998.

[1487] The probes having the nucleotide sequence represented by SEQ ID NOS: 16926, 16927, 16928, 16929, 16930, 16931, 16932, 16933, 16934, 16935, 16936 were selected from the ORFs having the nucleotide sequence represented by SEQ ID NO: 999.

[1488] The probes having the nucleotide sequence represented by SEQ ID NOS: 16937, 16938, 16939, 16940, 16941, 16942, 16943, 16944, 16945, 16946, 16947 were selected from the ORFs having the nucleotide sequence represented by SEQ ID NO: 1000.

[1489] The probes having the nucleotide sequence represented by SEQ ID NOS: 16948, 16949, 16950, 16951, 16952, 16953, 16954, 16955, 16956, 16957, 16958 were selected from the ORFs having the nucleotide sequence represented by SEQ ID NO: 1001.

[1490] The probes having the nucleotide sequence represented by SEQ ID NOS: 16959, 16960, 16961, 16962, 16963, 16964, 16965, 16966, 16967, 16968, 16969 were selected from the ORFs having the nucleotide sequence represented by SEQ ID NO: 1002.

[1491] The probes having the nucleotide sequence represented by SEQ ID NOS: 16970, 16971, 16972, 16973, 16974, 16975, 16976, 16977, 16978, 16979, 16980 were selected from the ORFs having the nucleotide sequence represented by SEQ ID NO: 1003.

[1492] The probes having the nucleotide sequence represented by SEQ ID NOS: 16981, 16982, 16983, 16984, 16985, 16986, 16987, 16988, 16989, 16990, 16991 were selected from the ORFs having the nucleotide sequence represented by SEQ ID NO: 1004.

[1493] The probes having the nucleotide sequence represented by SEQ ID NOS: 16992, 16993, 16994, 16995, 16996, 16997, 16998, 16999, 17000, 17001, 17002 were selected from the ORFs having the nucleotide sequence represented by SEQ ID NO: 1005.

[1494] The probes having the nucleotide sequence represented by SEQ ID NOS: 17003, 17004, 17005, 17006, 17007, 17008, 17009, 17010, 17011, 17012, 17013 were selected from the ORFs having the nucleotide sequence represented by SEQ ID NO: 1006.

[1495] The probes having the nucleotide sequence represented by SEQ ID NOS: 17014, 17015, 17016, 17017, 17018, 17019, 17020, 17021, 17022, 17023, 17024 were selected from the ORFs having the nucleotide sequence represented by SEQ ID NO: 1007.

[1496] The probes having the nucleotide sequence represented by SEQ ID NOS: 17025, 17026, 17027, 17028, 17029, 17030, 17031, 17032, 17033, 17034, 17035 were selected from the ORFs having the nucleotide sequence represented by SEQ ID NO: 1008.

[1497] The probes having the nucleotide sequence represented by SEQ ID NOS: 17036, 17037, 17038, 17039, 17040, 17041, 17042, 17043, 17044, 17045, 17046 were selected from the ORFs having the nucleotide sequence represented by SEQ ID NO: 1009.

[1498] The probes having the nucleotide sequence represented by SEQ ID NOS: 17047, 17048, 17049, 17050, 17051, 17052, 17053, 17054, 17055, 17056, 17057 were selected from the ORFs having the nucleotide sequence represented by SEQ ID NO: 1010.

[1499] The probes having the nucleotide sequence represented by SEQ ID NOS: 17058, 17059, 17060, 17061, 17062, 17063, 17064, 17065, 17066, 17067, 17068 were selected from the ORFs having the nucleotide sequence represented by SEQ ID NO: 1011.

[1500] The probes having the nucleotide sequence represented by SEQ ID NOS: 17069, 17070, 17071, 17072, 17073, 17074, 17075, 17076, 17077, 17078, 17079 were selected from the ORFs having the nucleotide sequence represented by SEQ ID NO: 1012.

[1501] The probes having the nucleotide sequence represented by SEQ ID NOS: 17080, 17081, 17082, 17083, 17084, 17085, 17086, 17087, 17088, 17089, 17090 were selected from the ORFs having the nucleotide sequence represented by SEQ ID NO: 1013.

[1502] The probes having the nucleotide sequence represented by SEQ ID NOS: 17091, 17092, 17093, 17094, 17095, 17096, 17097, 17098, 17099, 17100, 17101 were selected from the ORFs having the nucleotide sequence represented by SEQ ID NO: 1014.

[1503] The probes having the nucleotide sequence represented by SEQ ID NOS: 17102, 17103, 17104, 17105, 17106, 17107, 17108, 17109, 17110, 17111, 17112 were selected from the ORFs having the nucleotide sequence represented by SEQ ID NO: 1015.

[1504] The probes having the nucleotide sequence represented by SEQ ID NOS: 17113, 17114, 17115, 17116, 17117, 17118, 17119, 17120, 17121, 17122, 17123 were selected from the ORFs having the nucleotide sequence represented by SEQ ID NO: 1016.

[1505] The probes having the nucleotide sequence represented by SEQ ID NOS: 17124, 17125, 17126, 17127, 17128, 17129, 17130, 17131, 17132, 17133, 17134 were selected from the ORFs having the nucleotide sequence represented by SEQ ID NO: 1017.

[1506] The probes having the nucleotide sequence represented by SEQ ID NOS: 17135, 17136, 17137, 17138, 17139, 17140, 17141, 17142, 17143, 17144, 17145 were selected from the ORFs having the nucleotide sequence represented by SEQ ID NO: 1018.

[1507] The probes having the nucleotide sequence represented by SEQ ID NOS: 17146, 17147, 17148, 17149, 17150, 17151, 17152, 17153, 17154, 17155, 17156 were selected from the ORFs having the nucleotide sequence represented by SEQ ID NO: 1019.

[1508] The probes having the nucleotide sequence represented by SEQ ID NOS: 17157, 17158, 17159, 17160, 17161, 17162, 17163, 17164, 17165, 17166, 17167 were selected from the ORFs having the nucleotide sequence represented by SEQ ID NO: 1020.

[1509] The probes having the nucleotide sequence represented by SEQ ID NOS: 17168, 17169, 17170, 17171, 17172, 17173, 17174, 17175, 17176, 17177, 17178 were selected from the ORFs having the nucleotide sequence represented by SEQ ID NO: 1021.

[1510] The probes having the nucleotide sequence represented by SEQ ID NOS: 17179, 17180, 17181, 17182, 17183, 17184, 17185, 17186, 17187, 17188, 17189 were selected from the ORFs having the nucleotide sequence represented by SEQ ID NO: 1022.

[1511] The probes having the nucleotide sequence represented by SEQ ID NOS: 17190, 17191, 1.7192, 17193, 17194, 17195, 17196, 17197, 17198, 17199, 17200 were selected from the ORFs having the nucleotide sequence represented by SEQ ID NO: 1023.

[1512] The probes having the nucleotide sequence represented by SEQ ID NOS: 17201, 17202, 17203, 17204, 17205, 17206, 17207, 17208, 17209, 17210, 17211 were selected from the ORFs having the nucleotide sequence represented by SEQ ID NO: 1024.

[1513] The probes having the nucleotide sequence represented by SEQ ID NOS: 17212, 17213, 17214, 17215, 17216, 17217, 17218, 17219, 17220, 17221, 17222 were selected from the ORFs having the nucleotide sequence represented by SEQ ID NO: 1025.

[1514] The probes having the nucleotide sequence represented by SEQ ID NOS: 17223, 17224, 17225, 17226, 17227, 17228, 17229, 17230, 17231, 17232, 17233 were selected from the ORFs having the nucleotide sequence represented by SEQ ID NO: 1026.

[1515] The probes having the nucleotide sequence represented by SEQ ID NOS: 17234, 17235, 17236, 17237, 17238, 17239, 17240, 17241, 17242, 17243, 17244 were selected from the ORFs having the nucleotide sequence represented by SEQ ID NO: 1027.

[1516] The probes having the nucleotide sequence represented by SEQ ID NOS: 17245, 17246, 17247, 17248, 17249, 17250, 17251, 17252, 17253, 17254, 17255 were selected from the ORFs having the nucleotide sequence represented by SEQ ID NO: 1028.

[1517] The probes having the nucleotide sequence represented by SEQ ID NOS: 17256, 17257, 17258, 17259, 17260, 17261, 17262, 17263, 17264, 17265, 17266 were selected from the ORFs having the nucleotide sequence represented by SEQ ID NO: 1029.

[1518] The probes having the nucleotide sequence represented by SEQ ID NOS: 17267, 17268, 17269, 17270, 17271, 17272, 17273, 17274, 17275, 17276, 17277 were selected from the ORFs having the nucleotide sequence represented by SEQ ID NO: 1030.

[1519] The probes having the nucleotide sequence represented by SEQ ID NOS: 17278, 17279, 17280, 17281, 17282, 17283, 17284, 17285, 17286, 17287, 17288 were selected from the ORFs having the nucleotide sequence represented by SEQ ID NO: 1031.

[1520] The probes having the nucleotide sequence represented by SEQ ID NOS: 17289, 17290, 17291, 17292, 17293, 17294, 17295, 17296, 17297, 17298, 17299 were selected from the ORFs having the nucleotide sequence represented by SEQ ID NO: 1032.

[1521] The probes having the nucleotide sequence represented by SEQ ID NOS: 17300, 17301, 17302, 17303, 17304, 17305, 17306, 17307, 17308, 17309, 17310 were selected from the ORFs having the nucleotide sequence represented by SEQ ID NO: 1033.

[1522] The probes having the nucleotide sequence represented by SEQ ID NOS: 17311, 17312, 17313, 17314, 17315, 17316, 17317, 17318, 17319, 17320, 17321 were selected from the ORFs having the nucleotide sequence represented by SEQ ID NO: 1034.

[1523] The probes having the nucleotide sequence represented by SEQ ID NOS: 17322, 17323, 17324, 17325, 17326, 17327, 17328, 17329, 17330, 17331, 17332 were selected from the ORFs having the nucleotide sequence represented by SEQ ID NO: 1035.

[1524] The probes having the nucleotide sequence represented by SEQ ID NOS: 17333, 17334, 17335, 17336, 17337, 17338, 17339, 17340, 17341, 17342, 17343 were selected from the ORFs having the nucleotide sequence represented by SEQ ID NO: 1036.

[1525] The probes having the nucleotide sequence represented by SEQ ID NOS: 17344, 17345, 17346, 17347, 17348, 17349, 17350, 17351, 17352, 17353, 17354 were selected from the ORFs having the nucleotide sequence represented by SEQ ID NO: 1037.

[1526] The probes having the nucleotide sequence represented by SEQ ID NOS: 17355, 17356, 17357, 17358, 17359, 17360, 17361, 17362, 17363, 17364, 17365 were selected from the ORFs having the nucleotide sequence represented by SEQ ID NO: 1038.

[1527] The probes having the nucleotide sequence represented by SEQ ID NOS: 17366, 17367, 17368, 17369, 17370, 17371, 17372, 17373, 17374, 17375, 17376 were selected from the ORFs having the nucleotide sequence represented by SEQ ID NO: 1039.

[1528] The probes having the nucleotide sequence represented by SEQ ID NOS: 17377, 17378, 17379, 17380, 17381, 17382, 17383, 17384, 17385, 17386, 17387 were selected from the ORFs having the nucleotide sequence represented by SEQ ID NO: 1040.

[1529] The probes having the nucleotide sequence represented by SEQ ID NOS: 17388, 17389, 17390, 17391, 17392, 17393, 17394, 17395, 17396, 17397, 17398 were selected from the ORFs having the nucleotide sequence represented by SEQ ID NO: 1041.

[1530] The probes having the nucleotide sequence represented by SEQ ID NOS: 17399, 17400, 17401, 17402, 17403, 17404, 17405, 17406, 17407, 17408, 17409 were selected from the ORFs having the nucleotide sequence represented by SEQ ID NO: 1042.

[1531] The probes having the nucleotide sequence represented by SEQ ID NOS: 17410, 17411, 17412, 17413, 17414, 17415, 17416, 17417, 17418, 17419, 17420 were selected from the ORFs having the nucleotide sequence represented by SEQ ID NO: 1043.

[1532] The probes having the nucleotide sequence represented by SEQ ID NOS: 17421, 17422, 17423, 17424, 17425, 17426, 17427, 17428, 17429, 17430, 17431 were selected from the ORFs having the nucleotide sequence represented by SEQ ID NO: 1044.

[1533] The probes having the nucleotide sequence represented by SEQ ID NOS: 17432, 17433, 17434, 17435, 17436, 17437, 17438, 17439, 17440, 17441, 17442 were selected from the ORFs having the nucleotide sequence represented by SEQ ID NO: 1045.

[1534] The probes having the nucleotide sequence represented by SEQ ID NOS: 17443, 17444, 17445, 17446, 17447, 17448, 17449, 17450, 17451, 17452, 17453 were selected from the ORFs having the nucleotide sequence represented by SEQ ID NO: 1046.

[1535] The probes having the nucleotide sequence represented by SEQ ID NOS: 17454, 17455, 17456, 17457, 17458, 17459, 17460, 17461, 17462, 17463, 17464 were selected from the ORFs having the nucleotide sequence represented by SEQ ID NO: 1047.

[1536] The probes having the nucleotide sequence represented by SEQ ID NOS: 17465, 17466, 17467, 17468, 17469, 17470, 17471, 17472, 17473, 17474, 17475 were selected from the ORFs having the nucleotide sequence represented by SEQ ID NO: 1048.

[1537] The probes having the nucleotide sequence represented by SEQ ID NOS: 17476, 17477, 17478, 17479, 17480, 17481, 17482, 17483, 17484, 17485, 17486 were selected from the ORFs having the nucleotide sequence represented by SEQ ID NO: 1049.

[1538] The probes having the nucleotide sequence represented by SEQ ID NOS: 17487, 17488, 17489, 17490, 17491, 17492, 17493, 17494, 17495, 17496, 17497 were selected from the ORFs having the nucleotide sequence represented by SEQ ID NO: 1050.

[1539] The probes having the nucleotide sequence represented by SEQ ID NOS: 17498, 17499, 17500, 17501, 17502, 17503, 17504, 17505, 17506, 17507, 17508 were selected from the ORFs having the nucleotide sequence represented by SEQ ID NO: 1051.

[1540] The probes having the nucleotide sequence represented by SEQ ID NOS: 17509, 17510, 17511, 17512, 17513, 17514, 17515, 17516, 17517, 17518, 17519 were selected from the ORFs having the nucleotide sequence represented by SEQ ID NO: 1052.

[1541] The probes having the nucleotide sequence represented by SEQ ID NOS: 17520, 17521, 17522, 17523, 17524, 17525, 17526, 17527, 17528, 17529, 17530 were selected from the ORFs having the nucleotide sequence represented by SEQ ID NO: 1053.

[1542] The probes having the nucleotide sequence represented by SEQ ID NOS: 17531, 17532, 17533, 17534, 17535, 17536, 17537, 17538, 17539, 17540, 17541 were selected from the ORFs having the nucleotide sequence represented by SEQ ID NO: 1054.

[1543] The probes having the nucleotide sequence represented by SEQ ID NOS: 17542, 17543, 17544, 17545, 17546, 17547, 17548, 17549, 17550, 17551, 17552 were selected from the ORFs having the nucleotide sequence represented by SEQ ID NO: 1055.

[1544] The probes having the nucleotide sequence represented by SEQ ID NOS: 17553, 17554, 17555, 17556, 17557, 17558, 17559, 17560, 17561, 17562, 17563 were selected from the ORFs having the nucleotide sequence represented by SEQ ID NO: 1056.

[1545] The probes having the nucleotide sequence represented by SEQ ID NOS: 17564, 17565, 17566, 17567, 17568, 17569, 17570, 17571, 17572, 17573, 17574 were selected from the ORFs having the nucleotide sequence represented by SEQ ID NO: 1057.

[1546] The probes having the nucleotide sequence represented by SEQ ID NOS: 17575, 17576, 17577, 17578, 17579, 17580, 17581, 17582, 17583, 17584, 17585 were selected from the ORFs having the nucleotide sequence represented by SEQ ID NO: 1058.

[1547] The probes having the nucleotide sequence represented by SEQ ID NOS: 17586, 17587, 17588, 17589, 17590, 17591, 17592, 17593, 17594, 17595, 17596 were selected from the ORFs having the nucleotide sequence represented by SEQ ID NO: 1059.

[1548] The probes having the nucleotide sequence represented by SEQ ID NOS: 17597, 17598, 17599, 17600, 17601, 17602, 17603, 17604, 17605, 17606, 17607 were selected from the ORFs having the nucleotide sequence represented by SEQ ID NO: 1060.

[1549] The probes having the nucleotide sequence represented by SEQ ID NOS: 17608, 17609, 17610, 17611, 17612, 17613, 17614, 17615, 17616, 17617, 17618 were selected from the ORFs having the nucleotide sequence represented by SEQ ID NO: 1061.

[1550] The probes having the nucleotide sequence represented by SEQ ID NOS: 17619, 17620, 17621, 17622, 17623, 17624, 17625, 17626, 17627, 17628, 17629 were selected from the ORFs having the nucleotide sequence represented by SEQ ID NO: 1062.

[1551] The probes having the nucleotide sequence represented by SEQ ID NOS: 17630, 17631, 17632, 17633, 17634, 17635, 17636, 17637, 17638, 17639, 17640 were selected from the ORFs having the nucleotide sequence represented by SEQ ID NO: 1063.

[1552] The probes having the nucleotide sequence represented by SEQ ID NOS: 17641, 17642, 17643, 17644, 17645, 17646, 17647, 17648, 17649, 17650, 17651 were selected from the ORFs having the nucleotide sequence represented by SEQ ID NO: 1064.

[1553] The probes having the nucleotide sequence represented by SEQ ID NOS: 17652, 17653, 17654, 17655, 17656, 17657, 17658, 17659, 17660, 17661, 17662 were selected from the ORFs having the nucleotide sequence represented by SEQ ID NO: 1065.

[1554] The probes having the nucleotide sequence represented by SEQ ID NOS: 17663, 17664, 17665, 17666, 17667, 17668, 17669, 17670, 17671, 17672, 17673 were selected from the ORFs having the nucleotide sequence represented by SEQ ID NO: 1066.

[1555] The probes having the nucleotide sequence represented by SEQ ID NOS: 17674, 17675, 17676, 17677, 17678, 17679, 17680, 17681, 17682, 17683, 17684 were selected from the ORFs having the nucleotide sequence represented by SEQ ID NO: 1067.

[1556] The probes having the nucleotide sequence represented by SEQ ID NOS: 17685, 17686, 17687, 17688, 17689, 17690, 17691, 17692, 17693, 17694, 17695 were selected from the ORFs having the nucleotide sequence represented by SEQ ID NO: 1068.

[1557] The probes having the nucleotide sequence represented by SEQ ID NOS: 17696, 17697, 17698, 17699, 17700, 17701, 17702, 17703, 17704, 17705, 17706 were selected from the ORFs having the nucleotide sequence represented by SEQ ID NO: 1069.

[1558] The probes having the nucleotide sequence represented by SEQ ID NOS: 17707, 17708, 17709, 17710, 17711, 17712, 17713, 17714, 17715, 17716, 17717 were selected from the ORFs having the nucleotide sequence represented by SEQ ID NO: 1070.

[1559] The probes having the nucleotide sequence represented by SEQ ID NOS: 17718, 17719, 17720, 17721, 17722, 17723, 17724, 17725, 17726, 17727, 17728 were selected from the ORFs having the nucleotide sequence represented by SEQ ID NO: 1071.

[1560] The probes having the nucleotide sequence represented by SEQ ID NOS: 17729, 17730, 17731, 17732, 17733, 17734, 17735, 17736, 17737, 17738, 17739 were selected from the ORFs having the nucleotide sequence represented by SEQ ID NO: 1072.

[1561] The probes having the nucleotide sequence represented by SEQ ID NOS: 17740, 17741, 17742, 17743, 17744, 17745, 17746, 17747, 17748, 17749, 17750 were selected from the ORFs having the nucleotide sequence represented by SEQ ID NO: 1073.

[1562] The probes having the nucleotide sequence represented by SEQ ID NOS: 17751, 17752, 17753, 17754, 17755, 17756, 17757, 17758, 17759, 17760, 17761 were selected from the ORFs having the nucleotide sequence represented by SEQ ID NO: 1074.

[1563] The probes having the nucleotide sequence represented by SEQ ID NOS: 17762, 17763, 17764, 17765, 17766, 17767, 17768, 17769, 17770, 17771, 17772 were selected from the ORFs having the nucleotide sequence represented by SEQ ID NO: 1075.

[1564] The probes having the nucleotide sequence represented by SEQ ID NOS: 17773, 17774, 17775, 17776, 17777, 17778, 17779, 17780, 17781, 17782, 17783 were selected from the ORFs having the nucleotide sequence represented by SEQ ID NO: 1076.

[1565] The probes having the nucleotide sequence represented by SEQ ID NOS: 17784, 17785, 17786, 17787, 17788, 17789, 17790, 17791, 17792, 17793, 17794 were selected from the ORFs having the nucleotide sequence represented by SEQ ID NO: 1077.

[1566] The probes having the nucleotide sequence represented by SEQ ID NOS: 17795, 17796, 17797, 17798, 17799, 17800, 17801, 17802, 17803, 17804, 17805 were selected,from the ORFs having the nucleotide sequence represented by SEQ ID NO: 1078.

[1567] The probes having the nucleotide sequence represented by SEQ ID NOS: 17806, 17807, 17808, 17809, 17810, 17811, 17812, 17813, 17814, 17815, 17816 were selected from the ORFs having the nucleotide sequence represented by SEQ ID NO: 1079.

[1568] The probes having the nucleotide sequence represented by SEQ ID NOS: 17817, 17818, 17819, 17820, 17821, 17822, 17823, 17824, 17825, 17826, 17827 were selected from the ORFs having the nucleotide sequence represented by SEQ ID NO: 1080.

[1569] The probes having the nucleotide sequence represented by SEQ ID NOS: 17828, 17829, 17830, 17831, 17832, 17833, 17834, 17835, 17836, 17837, 17838 were selected from the ORFs having the nucleotide sequence represented by SEQ ID NO: 1081.

[1570] The probes having the nucleotide sequence represented by SEQ ID NOS: 17839, 17840, 17841, 17842, 17843, 17844, 17845, 17846, 17847, 17848, 17849 were selected from the ORFs having the nucleotide sequence represented by SEQ ID NO: 1082.

[1571] The probes having the nucleotide sequence represented by SEQ ID NOS: 17850, 17851, 17852, 17853, 17854, 17855, 17856, 17857, 17858, 17859, 17860 were selected from the ORFs having the nucleotide sequence represented by SEQ ID NO: 1083.

[1572] The probes having the nucleotide sequence represented by SEQ ID NOS: 17861, 17862, 17863, 17864, 17865, 17866, 17867, 17868, 17869, 17870, 17871 were selected from the ORFs having the nucleotide sequence represented by SEQ ID NO: 1084.

[1573] The probes having the nucleotide sequence represented by SEQ ID NOS: 17872, 17873, 17874, 17875, 17876, 17877, 17878, 17879, 17880, 17881, 17882 were selected from the ORFs having the nucleotide sequence represented by SEQ ID NO: 1085.

[1574] The probes having the nucleotide sequence represented by SEQ ID NOS: 17883, 17884, 17885, 17886, 17887, 17888, 17889, 17890, 17891, 17892, 17893 were selected from the ORFs having the nucleotide sequence represented by SEQ ID NO: 1086.

[1575] The probes having the nucleotide sequence represented by SEQ ID NOS: 17894, 17895, 17896, 17897, 17898, 17899, 17900, 17901, 17902, 17903, 17904 were selected from the ORFs having the nucleotide sequence represented by SEQ ID NO: 1087.

[1576] The probes having the nucleotide sequence represented by SEQ ID NOS: 17905, 17906, 17907, 17908, 17909, 17910, 17911, 17912, 17913, 17914, 17915 were selected from the ORFs having the nucleotide sequence represented by SEQ ID NO: 1088.

[1577] The probes having the nucleotide sequence represented by SEQ ID NOS: 17916, 17917, 17918, 17919, 17920, 17921, 17922, 17923, 17924, 17925, 17926 were selected from the ORFs having the nucleotide sequence represented by SEQ ID NO: 1089.

[1578] The probes having the nucleotide sequence represented by SEQ ID NOS: 17927, 17928, 17929, 17930, 17931, 17932, 17933, 17934, 17935, 17936, 17937 were selected from the ORFs having the nucleotide sequence represented by SEQ ID NO: 1090.

[1579] The probes having the nucleotide sequence represented by SEQ ID NOS: 17938, 17939, 17940, 17941, 17942, 17943, 17944, 17945, 17946, 17947, 17948 were selected from the ORFs having the nucleotide sequence represented by SEQ ID NO: 1091.

[1580] The probes having the nucleotide sequence represented by SEQ ID NOS: 17949, 17950, 17951, 17952, 17953, 17954, 17955, 17956, 17957, 17958, 17959 were selected from the ORFs having the nucleotide sequence represented by SEQ ID NO: 1092.

[1581] The probes having the nucleotide sequence represented by SEQ ID NOS: 17960, 17961, 17962, 17963, 17964, 17965, 17966, 17967, 17968, 17969, 17970 were selected from the ORFs having the nucleotide sequence represented by SEQ ID NO: 1093.

[1582] The probes having the nucleotide sequence represented by SEQ ID NOS: 17971, 17972, 17973, 17974, 17975, 17976, 17977, 17978, 17979, 17980, 17981 were selected from the ORFs having the nucleotide sequence represented by SEQ ID NO: 1094.

[1583] The probes having the nucleotide sequence represented by SEQ ID NOS: 17982, 17983, 17984, 17985, 17986, 17987, 17988, 17989, 17990, 17991, 17992 were selected from the ORFs having the nucleotide sequence represented by SEQ ID NO: 1095.

[1584] The probes having the nucleotide sequence represented by SEQ ID NOS: 17993, 17994, 17995, 17996, 17997, 17998, 17999, 18000, 18001, 18002, 18003 were selected from the ORFs having the nucleotide sequence represented by SEQ ID NO: 1096.

[1585] The probes having the nucleotide sequence represented by SEQ ID NOS: 18004, 18005, 18006, 18007, 18008, 18009, 18010, 18011, 18012, 18013, 18014 were selected from the ORFs having the nucleotide sequence represented by SEQ ID NO: 1097.

[1586] The probes having the nucleotide sequence represented by SEQ ID NOS: 18015, 18016, 18017, 18018, 18019, 18020, 18021, 18022, 18023, 18024, 18025 were selected from the ORFs having the nucleotide sequence represented by SEQ ID NO: 1098.

[1587] The probes having the nucleotide sequence represented by SEQ ID NOS: 18026, 18027, 18028, 18029, 18030, 18031, 18032, 18033, 18034, 18035, 18036 were selected from the ORFs having the nucleotide sequence represented by SEQ ID NO: 1099.

[1588] The probes having the nucleotide sequence represented by SEQ ID NOS: 18037, 18038, 18039, 18040, 18041, 18042, 18043, 18044, 18045, 18046, 18047 were selected from the ORFs having the nucleotide sequence represented by SEQ ID NO: 1100.

[1589] The probes having the nucleotide sequence represented by SEQ ID NOS: 18048, 18049, 18050, 18051, 18052, 18053, 18054, 18055, 18056, 18057, 18058 were selected from the ORFs having the nucleotide sequence represented by SEQ ID NO: 1101.

[1590] The probes having the nucleotide sequence represented by SEQ ID NOS: 18059, 18060, 18061, 18062, 18063, 18064, 18065, 18066, 18067, 18068, 18069 were selected from the ORFs having the nucleotide sequence represented by SEQ ID NO: 1102.

[1591] The probes having the nucleotide sequence represented by SEQ ID NOS: 18070, 18071, 18072, 18073, 18074, 18075, 18076, 18077, 18078, 18079, 18080 were selected from the ORFs having the nucleotide sequence represented by SEQ ID NO: 1103.

[1592] The probes having the nucleotide sequence represented by SEQ ID NOS: 18081, 18082, 18083, 18084, 18085, 18086, 18087, 18088, 18089, 18090, 18091 were selected from the ORFs having the nucleotide sequence represented by SEQ ID NO: 1104.

[1593] The probes having the nucleotide sequence represented by SEQ ID NOS: 18092, 18093, 18094, 18095, 18096, 18097, 18098, 18099, 18100, 18101, 18102 were selected from the ORFs having the nucleotide sequence represented by SEQ ID NO: 1105.

[1594] The probes having the nucleotide sequence represented by SEQ ID NOS: 18103, 18104, 18105, 18106, 18107, 18108, 18109, 18110, 18111, 18112, 18113 were selected from the ORFs having the nucleotide sequence represented by SEQ ID NO: 1106.

[1595] The probes having the nucleotide sequence represented by SEQ ID NOS: 18114, 18115, 18116, 18117, 18118, 18119, 18120, 18121, 18122, 18123, 18124 were selected from the ORFs having the nucleotide sequence represented by SEQ ID NO: 1107.

[1596] The probes having the nucleotide sequence represented by SEQ ID NOS: 18125, 18126, 18127, 18128, 18129, 18130, 18131, 18132, 18133, 18134, 18135 were selected from the ORFs having the nucleotide sequence represented by SEQ ID NO: 1108.

[1597] The probes having the nucleotide sequence represented by SEQ ID NOS: 18136, 18137, 18138, 18139, 18140, 18141, 18142, 18143, 18144, 18145, 18146 were selected from the ORFs having the nucleotide sequence represented by SEQ ID NO: 1109.

[1598] The probes having the nucleotide sequence represented by SEQ ID NOS: 18147, 18148, 18149, 18150, 18151, 18152, 18153, 18154, 18155, 18156, 18157 were selected from the ORFs having the nucleotide sequence represented by SEQ ID NO: 1110.

[1599] The probes having the nucleotide sequence represented by SEQ ID NOS: 18158, 18159, 18160, 18161, 18162, 18163, 18164, 18165, 18166, 18167, 18168 were selected from the ORFs having the nucleotide sequence represented by SEQ ID NO: 1111.

[1600] The probes having the nucleotide sequence represented by SEQ ID NOS: 18169, 1.8170, 18171, 18172, 18173, 18174, 18175, 18176, 18177, 18178, 18179 were selected from the ORFs having the nucleotide sequence represented by SEQ ID NO: 1112.

[1601] The probes having the nucleotide sequence represented by SEQ ID NOS: 18180, 18181, 18182, 18183, 18184, 18185, 18186, 18187, 18188, 18189, 18190 were selected from the ORFs having the nucleotide sequence represented by SEQ ID NO: 1113.

[1602] The probes having the nucleotide sequence represented by SEQ ID NOS: 18191, 18192, 18193, 18194, 18195, 18196, 18197, 18198, 18199, 18200, 18201 were selected from the ORFs having the nucleotide sequence represented by SEQ ID NO: 1114.

[1603] The probes having the nucleotide sequence represented by SEQ ID NOS: 18202, 18203, 18204, 18205, 18206, 18207, 18208, 18209, 18210, 18211, 18212 were selected from the ORFs having the nucleotide sequence represented by SEQ ID NO: 1115.

[1604] The probes having the nucleotide sequence represented by SEQ ID NOS: 18213, 18214, 18215, 18216, 18217, 18218, 18219, 18220, 18221, 18222, 18223 were selected from the ORFs having the nucleotide sequence represented by SEQ ID NO: 1116.

[1605] The probes having the nucleotide sequence represented by SEQ ID NOS: 18224, 18225, 18226, 18227, 18228, 18229, 18230, 18231, 18232, 18233, 18234 were selected from the ORFs having the nucleotide sequence represented by SEQ ID NO: 1117.

[1606] The probes having the nucleotide sequence represented by SEQ ID NOS: 18235, 18236, 18237, 18238, 18239, 18240, 18241, 18242, 18243, 18244, 18245 were selected from the ORFs having the nucleotide sequence represented by SEQ ID NO: 1118.

[1607] The probes having the nucleotide sequence represented by SEQ ID NOS: 18246, 18247, 18248, 18249, 18250, 18251, 18252, 18253, 18254, 18255, 18256 were selected from the ORFs having the nucleotide sequence represented by SEQ ID NO: 1119.

[1608] The probes having the nucleotide sequence represented by SEQ ID NOS: 18257, 18258, 18259, 18260, 18261, 18262, 18263, 18264, 18265, 18266, 18267 were selected from the ORFs having the nucleotide sequence represented by SEQ ID NO: 1120.

[1609] The probes having the nucleotide sequence represented by SEQ ID NOS: 18268, 18269, 18270, 18271, 18272, 18273, 18274, 18275, 18276, 18277, 18278 were selected from the ORFs having the nucleotide sequence represented by SEQ ID NO: 1121.

[1610] The probes having the nucleotide sequence represented by SEQ ID NOS: 18279, 18280, 18281, 18282, 18283, 18284, 18285, 18286, 18287, 18288, 18289 were selected from the ORFs having the nucleotide sequence represented by SEQ ID NO: 1122.

[1611] The probes having the nucleotide sequence represented by SEQ ID NOS: 18290, 18291, 18292, 18293, 18294, 18295, 18296, 18297, 18298, 18299, 18300 were selected from the ORFs having the nucleotide sequence represented by SEQ ID NO: 1123.

[1612] The probes having the nucleotide sequence represented by SEQ ID NOS: 18301, 18302, 18303, 18304, 18305, 18306, 18307, 18308, 18309, 18310, 18311 were selected from the ORFs having the nucleotide sequence represented by SEQ ID NO: 1124.

[1613] The probes having the nucleotide sequence represented by SEQ ID NOS: 18312, 18313, 18314, 18315, 18316, 18317, 18318, 18319, 18320, 18321, 18322 were selected from the ORFs having the nucleotide sequence represented by SEQ ID NO: 1125.

[1614] The probes having the nucleotide sequence represented by SEQ ID NOS: 18323, 18324, 18325, 18326, 18327, 18328, 18329, 18330, 18331, 18332, 18333, 18334, 18335, 18336, 18337, 18338, 18339, 18340, 18341, 18342, 18343, 18344 were selected from the ORFs having the nucleotide sequence represented by SEQ ID NO: 1126.

[1615] The probes having the nucleotide sequence represented by SEQ ID NOS: 18345, 18346, 18347, 18348, 18349, 18350, 18351, 18352, 18353, 18354, 18355 were selected from the ORFs having the nucleotide sequence represented by SEQ ID NO: 1127.

[1616] The probes having the nucleotide sequence represented by SEQ ID NOS: 18356, 18357, 18358, 18359, 18360, 18361, 18362, 18363, 18364, 18365, 18366 were selected from the ORFs having the nucleotide sequence represented by SEQ ID NO: 1128.

[1617] The probes having the nucleotide sequence represented by SEQ ID NOS: 18367, 18368, 18369, 18370, 18371, 18372, 18373, 18374, 18375, 18376, 18377 were selected from the ORFs having the nucleotide sequence represented by SEQ ID NO: 1129.

[1618] The probes having the nucleotide sequence represented by SEQ ID NOS: 18378, 18379, 18380, 18381, 18382, 18383, 18384, 18385, 18386, 18387, 18388 were selected from the ORFs having the nucleotide sequence represented by SEQ ID NO: 1130.

[1619] The probes having the nucleotide sequence represented by SEQ ID NOS: 18389, 18390, 18391, 18392, 18393, 18394, 18395, 18396, 18397, 18398, 18399, 18400, 18401, 18402, 18403, 18404, 18405, 18406, 18407, 18408, 18409, 18410 were selected from the ORFs having the nucleotide sequence represented by SEQ ID NO: 1131.

[1620] The probes having the nucleotide sequence represented by SEQ ID NOS: 18411, 18412, 18413, 18414, 18415, 18416, 18417, 18418, 18419, 18420, 18421 were selected from the ORFs having the nucleotide sequence represented by SEQ ID NO: 1132.

[1621] The probes having the nucleotide sequence represented by SEQ ID NOS: 18422, 18423, 18424, 18425, 18426, 18427, 18428, 18429, 18430, 18431, 18432 were selected from the ORFs having the nucleotide sequence represented by SEQ ID NO: 1133.

[1622] The probes having the nucleotide sequence represented by SEQ ID NOS: 18433, 18434, 18435, 18436, 18437, 18438, 18439, 18440, 18441, 18442, 18443 were selected from the ORFs having the nucleotide sequence represented by SEQ ID NO: 1134.

[1623] The probes having the nucleotide sequence represented by SEQ ID NOS: 18444, 18445, 18446, 18447, 18448, 18449, 18450, 18451, 18452, 18453, 18454 were selected from the ORFs having the nucleotide sequence represented by SEQ ID NO: 1135.

[1624] The probes having the nucleotide sequence represented by SEQ ID NOS: 18455, 18456, 18457, 18458, 18459, 18460, 18461, 18462, 18463, 18464, 18465 were selected from the ORFs having the nucleotide sequence represented by SEQ ID NO: 1136.

[1625] The probes having the nucleotide sequence represented by SEQ ID NOS: 18466, 18467, 18468, 18469, 18470, 18471, 18472, 18473, 18474, 18475, 18476 were selected from the ORFs having the nucleotide sequence represented by SEQ ID NO: 1137.

[1626] The probes having the nucleotide sequence represented by SEQ ID NOS: 18477, 18478, 18479, 18480, 18481, 18482, 18483, 18484, 18485, 18486, 18487 were selected from the ORFs having the nucleotide sequence represented by SEQ ID NO: 1138.

[1627] The probes having the nucleotide sequence represented by SEQ ID NOS: 18488, 18489, 18490, 18491, 18492, 18493, 18494, 18495, 18496, 18497, 18498 were selected from the ORFs having the nucleotide sequence represented by SEQ ID NO: 1139.

[1628] The probes having the nucleotide sequence represented by SEQ ID NOS: 18499, 18500, 18501, 18502, 18503, 18504, 18505, 18506, 18507, 18508, 18509 were selected from the ORFs having the nucleotide sequence represented by SEQ ID NO: 1140.

[1629] The probes having the nucleotide sequence represented by SEQ ID NOS: 18510, 18511, 18512, 18513, 18514, 18515, 18516, 18517, 18518, 18519, 18520 were selected from the ORFs having the nucleotide sequence represented by SEQ ID NO: 1141.

[1630] The probes having the nucleotide sequence represented by SEQ ID NOS: 18521, 18522, 18523, 18524, 18525, 18526, 18527, 18528, 18529, 18530, 18531 were selected from the ORFs having the nucleotide sequence represented by SEQ ID NO: 1142.

[1631] The probes having the nucleotide sequence represented by SEQ ID NOS: 18532, 18533, 18534, 18535, 18536, 18537, 18538, 18539, 18540, 18541, 18542 were selected from the ORFs having the nucleotide sequence represented by SEQ ID NO: 1143.

[1632] The probes having the nucleotide sequence represented by SEQ ID NOS: 18543, 18544, 18545, 18546, 18547, 18548, 18549, 18550, 18551, 18552, 18553 were selected from the ORFs having the nucleotide sequence represented by SEQ ID NO: 1144.

[1633] The probes having the nucleotide sequence represented by SEQ ID NOS: 18554, 18555, 18556, 18557, 18558, 18559, 18560, 18561, 18562, 18563, 18564 were selected from the ORFs having the nucleotide sequence represented by SEQ ID NO: 1145.

[1634] The probes having the nucleotide sequence represented by SEQ ID NOS: 18565, 18566, 18567, 18568, 18569, 18570, 18571, 18572, 18573, 18574, 18575 were selected from the ORFs having the nucleotide sequence represented by SEQ ID NO: 1146.

[1635] The probes having the nucleotide sequence represented by SEQ ID NOS: 18576, 18577, 18578, 18579, 18580, 18581, 18582, 18583, 18584, 18585, 18586 were selected from the ORFs having the nucleotide sequence represented by SEQ ID NO: 1147.

[1636] The probes having the nucleotide sequence represented by SEQ ID NOS: 18587, 18588, 18589, 18590, 18591, 18592, 18593, 18594, 18595, 18596, 18597 were selected from the ORFs having the nucleotide sequence represented by SEQ ID NO: 1148.

[1637] The probes having the nucleotide sequence represented by SEQ ID NOS: 18598, 18599, 18600, 18601, 18602, 18603, 18604, 18605, 18606, 18607, 18608 were selected from the ORFs having the nucleotide sequence represented by SEQ ID NO: 1149.

[1638] The probes having the nucleotide sequence represented by SEQ ID NOS: 18609, 18610, 18611, 18612, 18613, 18614, 18615, 18616, 18617, 18618, 18619 were selected from the ORFs having the nucleotide sequence represented by SEQ ID NO: 1150.

[1639] The probes having the nucleotide sequence represented by SEQ ID NOS: 18620, 18621, 18622, 18623, 18624, 18625, 18626, 18627, 18628, 18629, 18630 were selected from the ORFs having the nucleotide sequence represented by SEQ ID NO: 1151.

[1640] The probes having the nucleotide sequence represented by SEQ ID NOS: 18631, 18632, 18633, 18634, 18635, 18636, 18637, 18638, 18639, 18640, 18641 were selected from the ORFs having the nucleotide sequence represented by SEQ ID NO: 1152.

[1641] The probes having the nucleotide sequence represented by SEQ ID NOS: 18642, 18643, 18644, 18645, 18646, 18647, 18648, 18649, 18650, 18651, 18652 were selected from the ORFs having the nucleotide sequence represented by SEQ ID NO: 1153.

[1642] The probes having the nucleotide sequence represented by SEQ ID NOS: 18653, 18654, 18655, 18656, 18657, 18658, 18659, 18660, 18661, 18662, 18663 were selected from the ORFs having the nucleotide sequence represented by SEQ ID NO: 1154.

[1643] The probes having the nucleotide sequence represented by SEQ ID NOS: 18664, 18665, 18666, 18667, 18668, 18669, 18670, 18671, 18672, 18673, 18674 were selected from the ORFs having the nucleotide sequence represented by SEQ ID NO: 1155.

[1644] The probes having the nucleotide sequence represented by SEQ ID NOS: 18675, 18676, 18677, 18678, 18679, 18680, 18681, 18682, 18683, 18684, 18685 were selected from the ORFs having the nucleotide sequence represented by SEQ ID NO: 1156.

[1645] The probes having the nucleotide sequence represented by SEQ ID NOS: 18686, 18687, 18688, 18689, 18690, 18691, 18692, 18693, 18694, 18695, 18696 were selected from the ORFs having the nucleotide sequence represented by SEQ ID NO: 1157.

[1646] The probes having the nucleotide sequence represented by SEQ ID NOS: 18697, 18698, 18699, 18700, 18701, 18702, 18703, 18704, 18705, 18706, 18707 were selected from the ORFs having the nucleotide sequence represented by SEQ ID NO: 1158.

[1647] The probes having the nucleotide sequence represented by SEQ ID NOS: 18708, 18709, 18710, 18711, 18712, 18713, 18714, 18715, 18716, 18717, 18718 were selected from the ORFs having the nucleotide sequence represented by SEQ ID NO: 1159.

[1648] The probes having the nucleotide sequence represented by SEQ ID NOS: 18719, 18720, 18721, 18722, 18723, 18724, 18725, 18726, 18727, 18728, 18729 were selected from the ORFs having the nucleotide sequence represented by SEQ ID NO: 1160.

[1649] The probes having the nucleotide sequence represented by SEQ ID NOS: 18730, 18731, 18732, 18733, 18734, 18735, 18736, 18737, 18738, 18739, 18740 were selected from the ORFs having the nucleotide sequence represented by SEQ ID NO: 1161.

[1650] The probes having the nucleotide sequence represented by SEQ ID NOS: 18741, 18742, 18743, 18744, 18745, 18746, 18747, 18748, 18749, 18750, 18751 were selected from the ORFs having the nucleotide sequence represented by SEQ ID NO: 1162.

[1651] The probes having the nucleotide sequence represented by SEQ ID NOS: 18752, 18753, 18754, 18755, 18756, 18757, 18758, 18759, 18760, 18761, 18762 were selected from the ORFs having the nucleotide sequence represented by SEQ ID NO: 1163.

[1652] The probes having the nucleotide sequence represented by SEQ ID NOS: 18763, 18764, 18765, 18766, 18767, 18768, 18769, 18770, 18771, 18772, 18773 were selected from the ORFs having the nucleotide sequence represented by SEQ ID NO: 1164.

[1653] The probes having the nucleotide sequence represented by SEQ ID NOS: 18774, 18775, 18776, 18777, 18778, 18779, 18780, 18781, 18782, 18783, 18784 were selected from the ORFs having the nucleotide sequence represented by SEQ ID NO: 1165.

[1654] The probes having the nucleotide sequence represented by SEQ ID NOS: 18785, 18786, 18787, 18788, 18789, 18790, 18791, 18792, 18793, 18794, 18795 were selected from the ORFs having the nucleotide sequence represented by SEQ ID NO: 1166.

[1655] The probes having the nucleotide sequence represented by SEQ ID NOS: 18796, 18797, 18798, 18799, 18800, 18801, 18802, 18803, 18804, 18805, 18806 were selected from the ORFs having the nucleotide sequence represented by SEQ ID NO: 1167.

[1656] The probes having the nucleotide sequence represented by SEQ ID NOS: 18807, 18808, 18809, 18810, 18811, 18812, 18813, 18814, 18815, 18816, 18817 were selected from the ORFs having the nucleotide sequence represented by SEQ ID NO: 1168.

[1657] The probes having the nucleotide sequence represented by SEQ ID NOS: 18818, 18819, 18820, 18821, 18822, 18823, 18824, 18825, 18826, 18827, 18828 were selected from the ORFs having the nucleotide sequence represented by SEQ ID NO: 1169.

[1658] The probes having the nucleotide sequence represented by SEQ ID NOS: 18829, 18830, 18831, 18832, 18833, 18834, 18835, 18836, 18837, 18838, 18839 were selected from the ORFs having the nucleotide sequence represented by SEQ ID NO: 1170.

[1659] The probes having the nucleotide sequence represented by SEQ ID NOS: 18840, 18841, 18842, 18843, 18844, 18845, 18846, 18847, 18848, 18849, 18850 were selected from the ORFs having the nucleotide sequence represented by SEQ ID NO: 1171.

[1660] The probes having the nucleotide sequence represented by SEQ ID NOS: 18851, 18852, 18853, 18854, 18855, 18856, 18857, 18858, 18859, 18860, 18861 were selected from the ORFs having the nucleotide sequence represented by SEQ ID NO: 1172.

[1661] The probes having the nucleotide sequence represented by SEQ ID NOS: 18862, 18863, 18864, 18865, 18866, 18867, 18868, 18869, 18870, 18871, 18872 were selected from the ORFs having the nucleotide sequence represented by SEQ ID NO: 1173.

[1662] The probes having the nucleotide sequence represented by SEQ ID NOS: 18873, 18874, 18875, 18876, 18877, 18878, 18879, 18880, 18881, 18882, 18883 were selected from the ORFs having the nucleotide sequence represented by SEQ ID NO: 1174.

[1663] The probes having the nucleotide sequence represented by SEQ ID NOS: 18884, 18885, 18886, 18887, 18888, 18889, 18890, 18891, 18892, 18893, 18894 were selected from the ORFs having the nucleotide sequence represented by SEQ ID NO: 1175.

[1664] The probes having the nucleotide sequence represented by SEQ ID NOS: 18895, 18896, 18897, 18898, 18899, 18900, 18901, 18902, 18903, 18904, 18905 were selected from the ORFs having the nucleotide sequence represented by SEQ ID NO: 1176.

[1665] The probes having the nucleotide sequence represented by SEQ ID NOS: 18906, 18907, 18908, 18909, 18910, 18911, 18912, 18913, 18914, 18915, 18916 were selected from the ORFs having the nucleotide sequence represented by SEQ ID NO: 1177.

[1666] The probes having the nucleotide sequence represented by SEQ ID NOS: 18917, 18918, 18919, 18920, 18921, 18922, 18923, 18924, 18925, 18926, 18927 were selected from the ORFs having the nucleotide sequence represented by SEQ ID NO: 1178.

[1667] The probes having the nucleotide sequence represented by SEQ ID NOS: 18928, 18929, 18930, 18931, 18932, 18933, 18934, 18935, 18936, 18937, 18938 were selected from the ORFs having the nucleotide sequence represented by SEQ ID NO: 1179.

[1668] The probes having the nucleotide sequence represented by SEQ ID NOS: 18939, 18940, 18941, 18942, 18943, 18944, 18945, 18946, 18947, 18948, 18949 were selected from the ORFs having the nucleotide sequence represented by SEQ ID NO: 1180.

[1669] The probes having the nucleotide sequence represented by SEQ ID NOS: 18950, 18951, 18952, 18953, 18954, 18955, 18956, 18957, 18958, 18959, 18960 were selected from the ORFs having the nucleotide sequence represented by SEQ ID NO: 1181.

[1670] The probes having the nucleotide sequence represented by SEQ ID NOS: 18961, 18962, 18963, 18964, 18965, 18966, 18967, 18968, 18969, 18970, 18971 were selected from the ORFs having the nucleotide sequence represented by SEQ ID NO: 1182.

[1671] The probes having the nucleotide sequence represented by SEQ ID NOS: 18972, 18973, 18974, 18975, 18976, 18977, 18978, 18979, 18980, 18981, 18982 were selected from the ORFs having the nucleotide sequence represented by SEQ ID NO: 1183.

[1672] The probes having the nucleotide sequence represented by SEQ ID NOS: 18983, 18984, 18985, 18986, 18987, 18988, 18989, 18990, 18991, 18992, 18993 were selected from the ORFs having the nucleotide sequence represented by SEQ ID NO: 1184.

[1673] The probes having the nucleotide sequence represented by SEQ ID NOS: 18994, 18995, 18996, 18997, 18998, 18999, 19000, 19001, 19002, 19003, 19004 were selected from the ORFs having the nucleotide sequence represented by SEQ ID NO: 1185.

[1674] The probes having the nucleotide sequence represented by SEQ ID NOS: 19005, 19006, 19007, 19008, 19009, 19010, 19011, 19012, 19013, 19014, 19015 were selected from the ORFs having the nucleotide sequence represented by SEQ ID NO: 1186.

[1675] The probes having the nucleotide sequence represented by SEQ ID NOS: 19016, 19017, 19018, 19019, 19020, 19021, 19022, 19023, 19024, 19025, 19026 were selected from the ORFs having the nucleotide sequence represented by SEQ ID NO: 1187.

[1676] The probes having the nucleotide sequence represented by SEQ ID NOS: 19027, 19028, 19029, 19030, 19031, 19032, 19033, 19034, 19035, 19036, 19037 were selected from the ORFs having the nucleotide sequence represented by SEQ ID NO: 1188.

[1677] The probes having the nucleotide sequence represented by SEQ ID NOS: 19038, 19039, 19040, 19041, 19042, 19043, 19044, 19045, 19046, 19047, 19048 were selected from the ORFs having the nucleotide sequence represented by SEQ ID NO: 1189.

[1678] The probes having the nucleotide sequence represented by SEQ ID NOS: 19049, 19050, 19051, 19052, 19053, 19054, 19055, 19056, 19057, 19058, 19059 were selected from the ORFs having the nucleotide sequence represented by SEQ ID NO: 1190.

[1679] The probes having the nucleotide sequence represented by SEQ ID NOS: 19060, 19061, 19062, 19063, 19064, 19065, 19066, 19067, 19068, 19069, 19070 were selected from the ORFs having the nucleotide sequence represented by SEQ ID NO: 1191.

[1680] The probes having the nucleotide sequence represented by SEQ ID NOS: 19071, 19072, 19073, 19074, 19075, 19076, 19077, 19078, 19079, 19080, 19081 were selected from the ORFs having the nucleotide sequence represented by SEQ ID NO: 1192.

[1681] The probes having the nucleotide sequence represented by SEQ ID NOS: 19082, 19083, 19084, 19085, 19086, 19087, 19088, 19089, 19090, 19091, 19092 were selected from the ORFs having the nucleotide sequence represented by SEQ ID NO: 1193.

[1682] The probes having the nucleotide sequence represented by SEQ ID NOS: 19093, 19094, 19095, 19096, 19097, 19098, 19099, 19100, 19101, 19102, 19103 were selected from the ORFs having the nucleotide sequence represented by SEQ ID NO: 1194.

[1683] The probes having the nucleotide sequence represented by SEQ ID NOS: 19104, 19105, 19106, 19107, 19108, 19109, 19110, 19111, 19112, 19113, 19114 were selected from the ORFs having the nucleotide sequence represented by SEQ ID NO: 1195.

[1684] The probes having the nucleotide sequence represented by SEQ ID NOS: 19115, 19116, 19117, 19118, 19119, 19120, 19121, 19122, 19123, 19124, 19125 were selected from the ORFs having the nucleotide sequence represented by SEQ ID NO: 1196.

[1685] The probes having the nucleotide sequence represented by SEQ ID NOS: 19126, 19127, 19128, 19129, 19130, 19131, 19132, 19133, 19134, 19135, 19136 were selected from the ORFs having the nucleotide sequence represented by SEQ ID NO: 1197.

[1686] The probes having the nucleotide sequence represented by SEQ. ID NOS: 19137, 19138, 19139, 19140, 19141, 19142, 19143, 19144, 19145, 19146, 19147 were selected from the ORFs having the nucleotide sequence represented by SEQ ID NO: 1198.

[1687] The probes having the nucleotide sequence represented by SEQ ID NOS: 19148, 19149, 19150, 19151, 19152, 19153, 19154, 19155, 19156, 19157, 19158 were selected from the ORFs having the nucleotide sequence represented by SEQ ID NO: 1199.

[1688] The probes having the nucleotide sequence represented by SEQ ID NOS: 19159, 19160, 19161, 19162, 19163, 19164, 19165, 19166, 19167, 19168, 19169 were selected from the ORFs having the nucleotide sequence represented by SEQ ID NO: 1200.

[1689] The probes having the nucleotide sequence represented by SEQ ID NOS: 19170, 19171, 19172, 19173, 19174, 19175, 19176, 19177, 19178, 19179, 19180 were selected from the ORFs having the nucleotide sequence represented by SEQ ID NO: 1201.

[1690] The probes having the nucleotide sequence represented by SEQ ID NOS: 19181, 19182, 19183, 19184, 19185, 19186, 19187, 19188, 19189, 19190, 19191 were selected from the ORFs having the nucleotide sequence represented by SEQ ID NO: 1202.

[1691] The probes having the nucleotide sequence represented by SEQ ID NOS: 19192, 19193, 19194, 19195, 19196, 19197, 19198, 19199, 19200, 19201, 19202 were selected from the ORFs having the nucleotide sequence represented by SEQ ID NO: 1203.

[1692] The probes having the nucleotide sequence represented by SEQ ID NOS: 19203, 19204, 19205, 19206, 19207, 19208, 19209, 19210, 19211, 19212, 19213 were selected from the ORFs having the nucleotide sequence represented by SEQ ID NO: 1204.

[1693] The probes having the nucleotide sequence represented by SEQ ID NOS: 19214, 19215, 19216, 19217, 19218, 19219, 19220, 19221, 19222, 19223, 19224 were selected from the ORFs having the nucleotide sequence represented by SEQ ID NO: 1205.

[1694] The probes having the nucleotide sequence represented by SEQ ID NOS: 19225, 19226, 19227, 19228, 19229, 19230, 19231, 19232, 19233, 19234, 19235 were selected from the ORFs having the nucleotide sequence represented by SEQ ID NO: 1206.

[1695] The probes having the nucleotide sequence represented by SEQ ID NOS: 19236, 19237, 19238, 19239, 19240, 19241, 19242, 19243, 19244, 19245, 19246 were selected from the ORFs having the nucleotide sequence represented by SEQ ID NO: 1207.

[1696] The probes having the nucleotide sequence represented by SEQ ID NOS: 19247, 19248, 19249, 19250, 19251, 19252, 19253, 19254, 19255, 19256, 19257 were selected from the ORFs having the nucleotide sequence represented by SEQ ID NO: 1208.

[1697] The probes having the nucleotide sequence represented by SEQ ID NOS: 19258, 19259, 19260, 19261, 19262, 19263, 19264, 19265, 19266, 19267, 19268 were selected from the ORFs having the nucleotide sequence represented by SEQ ID NO: 1209.

[1698] The probes having the nucleotide sequence represented by SEQ ID NOS: 19269, 19270, 19271, 19272, 19273, 19274, 19275, 19276, 19277, 19278, 19279 were selected from the ORFs having the nucleotide sequence represented by SEQ ID NO: 1210.

[1699] The probes having the nucleotide sequence represented by SEQ ID NOS: 19280, 19281, 19282, 19283, 19284, 19285, 19286, 19287, 19288, 19289, 19290 were selected from the ORFs having the nucleotide sequence represented by SEQ ID NO: 1211.

[1700] The probes having the nucleotide sequence represented by SEQ ID NOS: 19291, 19292, 19293, 19294, 19295, 19296, 19297, 19298, 19299, 19300, 19301 were selected from the ORFs having the nucleotide sequence represented by SEQ ID NO: 1212.

[1701] The probes having the nucleotide sequence represented by SEQ ID NOS: 19302, 19303, 19304, 19305, 19306, 19307, 19308, 19309, 19310, 19311, 19312 were selected from the ORFs having the nucleotide sequence represented by SEQ ID NO: 1213.

[1702] The probes having the nucleotide sequence represented by SEQ ID NOS: 19313, 19314, 19315, 19316, 19317, 19318, 19319, 19320, 19321, 19322, 19323 were selected from the ORFs having the nucleotide sequence represented by SEQ ID NO: 1214.

[1703] The probes having the nucleotide sequence represented by SEQ ID NOS: 19324, 19325, 19326, 19327, 19328, 19329, 19330, 19331, 19332, 19333, 19334 were selected from the ORFs having the nucleotide sequence represented by SEQ ID NO: 1215.

[1704] The probes having the nucleotide sequence represented by SEQ ID NOS: 19335, 19336, 19337, 19338, 19339, 19340, 19341, 19342, 19343, 19344, 19345 were selected from the ORFs having the nucleotide sequence represented by SEQ ID NO: 1216.

[1705] The probes having the nucleotide sequence represented by SEQ ID NOS: 19346, 19347, 19348, 19349, 19350, 19351, 19352, 19353, 19354, 19355, 19356 were selected from the ORFs having the nucleotide sequence represented by SEQ ID NO: 1217.

[1706] The probes having the nucleotide sequence represented by SEQ ID NOS: 19357, 19358, 19359, 19360, 19361, 19362, 19363, 19364, 19365, 19366, 19367 were selected from the ORFs having the nucleotide sequence represented by SEQ ID NO: 1218.

[1707] The probes having the nucleotide sequence represented by SEQ ID NOS: 19368, 19369, 19370, 19371, 19372, 19373, 19374, 19375, 19376, 19377, 19378 were selected from the ORFs having the nucleotide sequence represented by SEQ ID NO: 1219.

[1708] The probes having the nucleotide sequence represented by SEQ ID NOS: 19379, 19380, 19381, 19382, 19383, 19384, 19385, 19386, 19387, 19388, 19389 were selected from the ORFs having the nucleotide sequence represented by SEQ ID NO: 1220.

[1709] The probes having the nucleotide sequence represented by SEQ ID NOS: 19390, 19391, 19392, 19393, 19394, 19395, 19396, 19397, 19398, 19399, 19400 were selected from the ORFs having the nucleotide sequence represented by SEQ ID NO: 1221.

[1710] The probes having the nucleotide sequence represented by SEQ ID NOS: 19401, 19402, 19403, 19404, 19405, 19406, 19407, 19408, 19409, 19410, 19411 were selected from the ORFs having the nucleotide sequence represented by SEQ ID NO: 1222.

[1711] The probes having the nucleotide sequence represented by SEQ ID NOS: 19412, 19413, 19414, 19415, 19416, 19417, 19418, 19419, 19420, 19421, 19422 were selected from the ORFs having the nucleotide sequence represented by SEQ ID NO: 1223.

[1712] The probes having the nucleotide sequence represented by SEQ ID NOS: 19423, 19424, 19425, 19426, 19427, 19428, 19429, 19430, 19431, 19432, 19433 were selected from the ORFs having the nucleotide sequence represented by SEQ ID NO: 1224.

[1713] The probes having the nucleotide sequence represented by SEQ ID NOS: 19434, 19435, 19436, 19437, 19438, 19439, 19440, 19441, 19442, 19443, 19444 were selected from the ORFs having the nucleotide sequence represented by SEQ ID NO: 1225.

[1714] The probes having the nucleotide sequence represented by SEQ ID NOS: 19445, 19446, 19447, 19448, 19449, 19450, 19451, 19452, 19453, 19454, 19455 were selected from the ORFs having the nucleotide sequence represented by SEQ ID NO: 1226.

[1715] The probes having the nucleotide sequence represented by SEQ ID NOS: 19456, 19457, 19458, 19459, 19460, 19461, 19462, 19463, 19464, 19465, 19466 were selected from the ORFs having the nucleotide sequence represented by SEQ ID NO: 1227.

[1716] The probes having the nucleotide sequence represented by SEQ ID NOS: 19467, 19468, 19469, 19470, 19471, 19472, 19473, 19474, 19475, 19476, 19477 were selected from the ORFs having the nucleotide sequence represented by SEQ ID NO: 1228.

[1717] The probes having the nucleotide sequence represented by SEQ ID NOS: 19478, 19479, 19480, 19481, 19482, 19483, 19484, 19485, 19486, 19487, 19488 were selected from the ORFs having the nucleotide sequence represented by SEQ ID NO: 1229.

[1718] The probes having the nucleotide sequence represented by SEQ ID NOS: 19489, 19490, 19491, 19492, 19493, 19494, 19495, 19496, 19497, 19498, 19499 were selected from the ORFs having the nucleotide sequence represented by SEQ ID NO: 1230.

[1719] The probes having the nucleotide sequence represented by SEQ ID NOS: 19500, 19501, 19502, 19503, 19504, 19505, 19506, 19507, 19508, 19509, 19510 were selected from the ORFs having the nucleotide sequence represented by SEQ ID NO: 1231.

[1720] The probes having the nucleotide sequence represented by SEQ ID NOS: 19511, 19512, 19513, 19514, 19515, 19516, 19517, 19518, 19519, 19520, 19521 were selected from the ORFs having the nucleotide sequence represented by SEQ ID NO: 1232.

[1721] The probes having the nucleotide sequence represented by SEQ ID NOS: 19522, 19523, 19524, 19525, 19526, 19527, 19528, 19529, 19530, 19531, 19532 were selected from the ORFs having the nucleotide sequence represented by SEQ ID NO: 1233.

[1722] The probes having the nucleotide sequence represented by SEQ ID NOS: 19533, 19534, 19535, 19536, 19537, 19538, 19539, 19540, 19541, 19542, 19543 were selected from the ORFs having the nucleotide sequence represented by SEQ ID NO: 1234.

[1723] The probes having the nucleotide sequence represented by SEQ ID NOS: 19544, 19545, 19546, 19547, 19548, 19549, 19550, 19551, 19552, 19553, 19554 were selected from the ORFs having the nucleotide sequence represented by SEQ ID NO: 1235.

[1724] The probes having the nucleotide sequence represented by SEQ ID NOS: 19555, 19556, 19557, 19558, 19559, 19560, 19561, 19562, 19563, 19564, 19565 were selected from the ORFs having the nucleotide sequence represented by SEQ ID NO: 1236.

[1725] The probes having the nucleotide sequence represented by SEQ ID NOS: 19566, 19567, 19568, 19569, 19570, 19571, 19572, 19573, 19574, 19575, 19576 were selected from the ORFs having the nucleotide sequence represented by SEQ ID NO: 1237.

[1726] The probes having the nucleotide sequence represented by SEQ ID NOS: 19577, 19578, 19579, 19580, 19581, 19582, 19583, 19584, 19585, 19586, 19587 were selected from the ORFs having the nucleotide sequence represented by SEQ ID NO: 1238.

[1727] The probes having the nucleotide sequence represented by SEQ ID NOS: 19588, 19589, 19590, 19591, 19592, 19593, 19594, 19595, 19596, 19597, 19598 were selected from the ORFs having the nucleotide sequence represented by SEQ ID NO: 1239.

[1728] The probes having the nucleotide sequence represented by SEQ ID NOS: 19599, 19600, 19601, 19602, 19603, 19604, 19605, 19606, 19607, 19608, 19609 were selected from the ORFs having the nucleotide sequence represented by SEQ ID NO: 1240.

[1729] The probes having the nucleotide sequence represented by SEQ ID NOS: 19610, 19611, 19612, 19613, 19614, 19615, 19616, 19617, 19618, 19619, 19620 were selected from the ORFs having the nucleotide sequence represented by SEQ ID NO: 1241.

[1730] The probes having the nucleotide sequence represented by SEQ ID NOS: 19621, 19622, 19623, 19624, 19625, 19626, 19627, 19628, 19629, 19630, 19631 were selected from the ORFs having the nucleotide sequence represented by SEQ ID NO: 1242.

[1731] The probes having the nucleotide sequence represented by SEQ ID NOS: 19632, 19633, 19634, 19635, 19636, 19637, 19638, 19639, 19640, 19641, 19642 were selected from the ORFs having the nucleotide sequence represented by SEQ ID NO: 1243.

[1732] The probes having the nucleotide sequence represented by SEQ ID NOS: 19643, 19644, 19645, 19646, 19647, 19648, 19649, 19650, 19651, 19652, 19653 were selected from the ORFs having the nucleotide sequence represented by SEQ ID NO: 1244.

[1733] The probes having the nucleotide sequence represented by SEQ ID NOS: 19654, 19655, 19656, 19657, 19658, 19659, 19660, 19661, 19662, 19663, 19664 were selected from the ORFs having the nucleotide sequence represented by SEQ ID NO: 1245.

[1734] The probes having the nucleotide sequence represented by SEQ ID NOS: 19665, 19666, 19667, 19668, 19669, 19670, 19671, 19672, 19673, 19674, 19675 were selected from the ORFs having the nucleotide sequence represented by SEQ ID NO: 1246.

[1735] The probes having the nucleotide sequence represented by SEQ ID NOS: 19676, 19677, 19678, 19679, 19680, 19681, 19682, 19683, 19684, 19685, 19686 were selected from the ORFs having the nucleotide sequence represented by SEQ ID NO: 1247.

[1736] The probes having the nucleotide sequence represented by SEQ ID NOS: 19687, 19688, 19689, 19690, 19691, 19692, 19693, 19694, 19695, 19696, 19697 were selected from the ORFs having the nucleotide sequence represented by SEQ ID NO: 1248.

[1737] The probes having the nucleotide sequence represented by SEQ. ID NOS: 19698, 19699, 19700, 19701, 19702, 19703, 19704, 19705, 19706, 19707, 19708 were selected from the ORFs having the nucleotide sequence represented by SEQ ID NO: 1249.

[1738] The probes having the nucleotide sequence represented by SEQ ID NOS: 19709, 19710, 19711, 19712, 19713, 19714, 19715, 19716, 19717, 19718, 19719 were selected from the ORFs having the nucleotide sequence represented by SEQ ID NO: 1250.

[1739] The probes having the nucleotide sequence represented by SEQ ID NOS: 19720, 19721, 19722, 19723, 19724, 19725, 19726, 19727, 19728, 19729, 19730 were selected from the ORFs having the nucleotide sequence represented by SEQ ID NO: 1251.

[1740] The probes having the nucleotide sequence represented by SEQ ID NOS: 19731, 19732, 19733, 19734, 19735, 19736, 19737, 19738, 19739, 19740, 19741 were selected from the ORFs having the nucleotide sequence represented by SEQ ID NO: 1252.

[1741] The probes having the nucleotide sequence represented by SEQ ID NOS: 19742, 19743, 19744, 19745, 19746, 19747, 19748, 19749, 19750, 19751, 19752 were selected from the ORFs having the nucleotide sequence represented by SEQ ID NO: 1253.

[1742] The probes having the nucleotide sequence represented by SEQ ID NOS: 19753, 19754, 19755, 19756, 19757, 19758, 19759, 19760, 19761, 19762, 19763 were selected from the ORFs having the nucleotide sequence represented by SEQ ID NO: 1254.

[1743] The probes having the nucleotide sequence represented by SEQ ID NOS: 19764, 19765, 19766, 19767, 19768, 19769, 19770, 19771, 19772, 19773, 19774 were selected from the ORFs having the nucleotide sequence represented by SEQ ID NO: 1255.

[1744] The probes having the nucleotide sequence represented by SEQ ID NOS: 19775, 19776, 19777, 19778, 19779, 19780, 19781, 19782, 19783, 19784, 19785 were selected from the ORFs having the nucleotide sequence represented by SEQ ID NO: 1256.

[1745] The probes having the nucleotide sequence represented by SEQ ID NOS: 19786, 19787, 19788, 19789, 19790, 19791, 19792, 19793, 19794, 19795, 19796 were selected from the ORFs having the nucleotide sequence represented by SEQ ID NO: 1257.

[1746] The probes having the nucleotide sequence represented by SEQ ID NOS: 19797, 19798, 19799, 19800, 19801, 19802, 19803, 19804, 19805, 19806, 19807 were selected from the ORFs having the nucleotide sequence represented by SEQ ID NO: 1258.

[1747] The probes having the nucleotide sequence represented by SEQ ID NOS: 19808, 19809, 19810, 19811, 19812, 19813, 19814, 19815, 19816, 19817, 19818 were selected from the ORFs having the nucleotide sequence represented by SEQ ID NO: 1259.

[1748] The probes having the nucleotide sequence represented by SEQ ID NOS: 19819, 19820, 19821, 19822, 19823, 19824, 19825, 19826, 19827, 19828, 19829 were selected from the ORFs having the nucleotide sequence represented by SEQ ID NO: 1260.

[1749] The probes having the nucleotide sequence represented by SEQ ID NOS: 19830, 19831, 19832, 19833, 19834, 19835, 19836, 19837, 19838, 19839, 19840 were selected from the ORFs having the nucleotide sequence represented by SEQ ID NO: 1261.

[1750] The probes having the nucleotide sequence represented by SEQ ID NOS: 19841, 19842, 19843, 19844, 19845, 19846, 19847, 19848, 19849, 19850, 19851 were selected from the ORFs having the nucleotide sequence represented by SEQ ID NO: 1262.

[1751] The probes having the nucleotide sequence represented by SEQ ID NOS: 19852, 19853, 19854, 19855, 19856, 19857, 19858, 19859, 19860, 19861, 19862 were selected from the ORFs having the nucleotide sequence represented by SEQ ID NO: 1263.

[1752] The probes having the nucleotide sequence represented by SEQ ID NOS: 19863, 19864, 19865, 19866, 19867, 19868, 19869, 19870, 19871, 19872, 19873 were selected from the ORFs having the nucleotide sequence represented by SEQ ID NO: 1264.

[1753] The probes having the nucleotide sequence represented by SEQ ID NOS: 19874, 19875, 19876, 19877, 19878, 19879, 19880, 19881, 19882, 19883, 19884 were selected from the ORFs having the nucleotide sequence represented by SEQ ID NO: 1265.

[1754] The probes having the nucleotide sequence represented by SEQ ID NOS: 19885, 19886, 19887, 19888, 19889, 19890, 19891, 19892, 19893, 19894, 19895 were selected from the ORFs having the nucleotide sequence represented by SEQ ID NO: 1266.

[1755] The probes having the nucleotide sequence represented by SEQ ID NOS: 19896, 19897, 19898, 19899, 19900, 19901, 19902, 19903, 19904, 19905, 19906 were selected from the ORFs having the nucleotide sequence represented by SEQ ID NO: 1267.

[1756] The probes having the nucleotide sequence represented by SEQ ID NOS: 19907, 19908, 19909, 19910, 19911, 19912, 19913, 19914, 19915, 19916, 19917 were selected from the ORFs having the nucleotide sequence represented by SEQ ID NO: 1268.

[1757] The probes having the nucleotide sequence represented by SEQ ID NOS: 19918, 19919, 19920, 19921, 19922, 19923, 19924, 19925, 19926, 19927, 19928 were selected from the ORFs having the nucleotide sequence represented by SEQ ID NO: 1269.

[1758] The probes having the nucleotide sequence represented by SEQ ID NOS: 19929, 19930, 19931, 19932, 19933, 19934, 19935, 19936, 19937, 19938, 19939 were selected from the ORFs having the nucleotide sequence represented by SEQ ID NO: 1270.

[1759] The probes having the nucleotide sequence represented by SEQ ID NOS: 19940, 19941, 19942, 19943, 19944, 19945, 19946, 19947, 19948, 19949, 19950 were selected from the ORFs having the nucleotide sequence represented by SEQ ID NO: 1271.

[1760] The probes having the nucleotide sequence represented by SEQ ID NOS: 19951, 19952, 19953, 19954, 19955, 19956, 19957, 19958, 19959, 19960, 19961 were selected from the ORFs having the nucleotide sequence represented by SEQ ID NO: 1272.

[1761] The probes having the nucleotide sequence represented by SEQ ID NOS: 19962, 19963, 19964, 19965, 19966, 19967, 19968, 19969, 19970, 19971, 19972 were selected from the ORFs having the nucleotide sequence represented by SEQ ID NO: 1273.

[1762] The probes having the nucleotide sequence represented by SEQ ID NOS: 19973, 19974, 19975, 19976, 19977, 19978, 19979, 19980, 19981, 19982, 19983 were selected from the ORFs having the nucleotide sequence represented by SEQ ID NO: 1274.

[1763] The probes having the nucleotide sequence represented by SEQ ID NOS: 19984, 19985, 19986, 19987, 19988, 19989, 19990, 19991, 19992, 19993, 19994 were selected from the ORFs having the nucleotide sequence represented by SEQ ID NO: 1275.

[1764] The probes having the nucleotide sequence represented by SEQ ID NOS: 19995, 19996, 19997, 19998, 19999, 20000, 20001, 20002, 20003, 20004, 20005 were selected from the ORFs having the nucleotide sequence represented by SEQ ID NO: 1276.

[1765] The probes having the nucleotide sequence represented by SEQ ID NOS: 20006, 20007, 20008, 20009, 20010, 20011, 20012, 20013, 20014, 20015, 20016 were selected from the ORFs having the nucleotide sequence represented by SEQ ID NO: 1277.

[1766] The probes having the nucleotide sequence represented by SEQ ID NOS: 20017, 20018, 20019, 20020, 20021, 20022, 20023, 20024, 20025, 20026, 20027 were selected from the ORFs having the nucleotide sequence represented by SEQ ID NO: 1278.

[1767] The probes having the nucleotide sequence represented by SEQ ID NOS: 20028, 20029, 20030, 20031, 20032, 20033, 20034, 20035, 20036, 20037, 20038 were selected from the ORFs having the nucleotide sequence represented by SEQ ID NO: 1279.

[1768] The probes having the nucleotide sequence represented by SEQ ID NOS: 20039, 20040, 20041, 20042, 20043, 20044, 20045, 20046, 20047, 20048, 20049 were selected from the ORFs having the nucleotide sequence represented by SEQ ID NO: 1280.

[1769] The probes having the nucleotide sequence represented by SEQ ID NOS: 20050, 20051, 20052, 20053, 20054, 20055, 20056, 20057, 20058, 20059, 20060 were selected from the ORFs having the nucleotide sequence represented by SEQ ID NO: 1281.

[1770] The probes having the nucleotide sequence represented by SEQ ID NOS: 20061, 20062, 20063, 20064, 20065, 20066, 20067, 20068, 20069, 20070, 20071 were selected from the ORFs having the nucleotide sequence represented by SEQ ID NO: 1282.

[1771] The probes having the nucleotide sequence represented by SEQ ID NOS: 20072, 20073, 20074, 20075, 20076, 20077, 20078, 20079, 20080, 20081, 20082 were selected from the ORFs having the nucleotide sequence represented by SEQ ID NO: 1283.

[1772] The probes having the nucleotide sequence represented by SEQ ID NOS: 20083, 20084, 20085, 20086, 20087, 20088, 20089, 20090, 20091, 20092, 20093 were selected from the ORFs having the nucleotide sequence represented by SEQ ID NO: 1284.

[1773] The probes having the nucleotide sequence represented by SEQ ID NOS: 20094, 20095, 20096, 20097, 20098, 20099, 20100, 20101, 20102, 20103, 20104 were selected from the ORFs having the nucleotide sequence represented by SEQ ID NO: 1285.

[1774] The probes having the nucleotide sequence represented by SEQ ID NOS: 20105, 20106, 20107, 20108, 20109, 20110, 20111, 20112, 20113, 20114, 20115 were selected from the ORFs having the nucleotide sequence represented by SEQ ID NO: 1286.

[1775] The probes having the nucleotide sequence represented by SEQ ID NOS: 20116, 20117, 20118, 20119, 20120, 20121, 20122, 20123, 20124, 20125, 20126 were selected from the ORFs having the nucleotide sequence represented by SEQ ID NO: 1287.

[1776] The probes having the nucleotide sequence represented by SEQ ID NOS: 20127, 20128, 20129, 20130, 20131, 20132, 20133, 20134, 20135, 20136, 20137 were selected from the ORFs having the nucleotide sequence represented by SEQ ID NO: 1288.

[1777] The probes having the nucleotide sequence represented by SEQ ID NOS: 20138, 20139, 20140, 20141, 20142, 20143, 20144, 20145, 20146, 20147, 20148 were selected from the ORFs having the nucleotide sequence represented by SEQ ID NO: 1289.

[1778] The probes having the nucleotide sequence represented by SEQ ID NOS: 20149, 20150, 20151, 20152, 20153, 20154, 20155, 20156, 20157, 20158, 20159 were selected from the ORFs having the nucleotide sequence represented by SEQ ID NO: 1290.

[1779] The probes having the nucleotide sequence represented by SEQ ID NOS: 20160, 20161, 20162, 20163, 20164, 20165, 20166, 20167, 20168, 20169, 20170 were selected from the ORFs having the nucleotide sequence represented by SEQ ID NO: 1291.

[1780] The probes having the nucleotide sequence represented by SEQ ID NOS: 20171, 20172, 20173, 20174, 20175, 20176, 20177, 20178, 20179, 20180, 20181 were selected from the ORFs having the nucleotide sequence represented by SEQ ID NO: 1292.

[1781] The probes having the nucleotide sequence represented by SEQ ID NOS: 20182, 20183, 20184, 20185, 20186, 20187, 20188, 20189, 20190, 20191, 20192 were selected from the ORFs having the nucleotide sequence represented by SEQ ID NO: 1293.

[1782] The probes having the nucleotide sequence represented by SEQ ID NOS: 20193, 20194, 20195, 20196, 20197, 20198, 20199, 20200, 20201, 20202, 20203 were selected from the ORFs having the nucleotide sequence represented by SEQ ID NO: 1294.

[1783] The probes having the nucleotide sequence represented by SEQ ID NOS: 20204, 20205, 20206, 20207, 20208, 20209, 20210, 20211, 20212, 20213, 20214 were selected from the ORFs having the nucleotide sequence represented by SEQ ID NO: 1295.

[1784] The probes having the nucleotide sequence represented by SEQ ID NOS: 20215, 20216, 20217, 20218, 20219, 20220, 20221, 20222, 20223, 20224, 20225 were selected from the ORFs having the nucleotide sequence represented by SEQ ID NO: 1296.

[1785] The probes having the nucleotide sequence represented by SEQ ID NOS: 20226, 20227, 20228, 20229, 20230, 20231, 20232, 20233, 20234, 20235, 20236 were selected from the ORFs having the nucleotide sequence represented by SEQ ID NO: 1297.

[1786] The probes having the nucleotide sequence represented by SEQ ID NOS: 20237, 20238, 20239, 20240, 20241, 20242, 20243, 20244, 20245, 20246, 20247 were selected from the ORFs having the nucleotide sequence represented by SEQ ID NO: 1298.

[1787] The probes having the nucleotide sequence represented by SEQ ID NOS: 20248, 20249, 20250, 20251, 20252, 20253, 20254, 20255, 20256, 20257, 20258 were selected from the ORFs having the nucleotide sequence represented by SEQ ID NO: 1299.

[1788] The probes having the nucleotide sequence represented by SEQ ID NOS: 20259, 20260, 20261, 20262, 20263, 20264, 20265, 20266, 20267, 20268, 20269 were selected from the ORFs having the nucleotide sequence represented by SEQ ID NO: 1300.

[1789] The probes having the nucleotide sequence represented by SEQ ID NOS: 20270, 20271, 20272, 20273, 20274, 20275, 20276, 20277, 20278, 20279, 20280 were selected from the ORFs having the nucleotide sequence represented by SEQ ID NO: 1301.

[1790] The probes having the nucleotide sequence represented by SEQ ID NOS: 20281, 20282, 20283, 20284, 20285, 20286, 20287, 20288, 20289, 20290, 20291 were selected from the ORFs having the nucleotide sequence represented by SEQ ID NO: 1302.

[1791] The probes having the nucleotide sequence represented by SEQ ID NOS: 20292, 20293, 20294, 20295, 20296, 20297, 20298, 20299, 20300, 20301, 20302 were selected from the ORFs having the nucleotide sequence represented by SEQ ID NO: 1303.

[1792] The probes having the nucleotide sequence represented by SEQ ID NOS: 20303, 20304, 20305, 20306, 20307, 20308, 20309, 20310, 20311, 20312, 20313 were selected from the ORFs having the nucleotide sequence represented by SEQ ID NO: 1304.

[1793] The probes having the nucleotide sequence represented by SEQ ID NOS: 20314, 20315, 20316, 20317, 20318, 20319, 20320, 20321, 20322, 20323, 20324 were selected from the ORFs having the nucleotide sequence represented by SEQ ID NO: 1305.

[1794] The probes having the nucleotide sequence represented by SEQ ID NOS: 20325, 20326, 20327, 20328, 20329, 20330, 20331, 20332, 20333, 20334, 20335 were selected from the ORFs having the nucleotide sequence represented by SEQ ID NO: 1306.

[1795] The probes having the nucleotide sequence represented by SEQ ID NOS: 20336, 20337, 20338, 20339, 20340, 20341, 20342, 20343, 20344, 20345, 20346 were selected from the ORFs having the nucleotide sequence represented by SEQ ID NO: 1307.

[1796] The probes having the nucleotide sequence represented by SEQ ID NOS: 20347, 20348, 20349, 20350, 20351, 20352, 20353, 20354, 20355, 20356, 20357 were selected from the ORFs having the nucleotide sequence represented by SEQ ID NO: 1308.

[1797] The probes having the nucleotide sequence represented by SEQ ID NOS: 20358, 20359, 20360, 20361, 20362, 20363, 20364, 20365, 20366, 20367, 20368 were selected from the ORFs having the nucleotide sequence represented by SEQ ID NO: 1309.

[1798] The probes having the nucleotide sequence represented by SEQ ID NOS: 20369, 20370, 20371, 20372, 20373, 20374, 20375, 20376, 20377, 20378, 20379 were selected from the ORFs having the nucleotide sequence represented by SEQ ID NO: 1310.

[1799] The probes having the nucleotide sequence represented by SEQ ID NOS: 20380, 20381, 20382, 20383, 20384, 20385, 20386, 20387, 20388, 20389, 20390 were selected from the ORFs having the nucleotide sequence represented by SEQ ID NO: 1311.

[1800] The probes having the nucleotide sequence represented by SEQ ID NOS: 20391, 20392, 20393, 20394, 20395, 20396, 20397, 20398, 20399, 20400, 20401 were selected from the ORFs having the nucleotide sequence represented by SEQ ID NO: 1312.

[1801] The probes having the nucleotide sequence represented by SEQ ID NOS: 20402, 20403, 20404, 20405, 20406, 20407, 20408, 20409, 20410, 20411, 20412 were selected from the ORFs having the nucleotide sequence represented by SEQ ID NO: 1313.

[1802] The probes having the nucleotide sequence represented by SEQ ID NOS: 20413, 20414, 20415, 20416, 20417, 20418, 20419, 20420, 20421, 20422, 20423 were selected from the ORFs having the nucleotide sequence represented by SEQ ID NO: 1314.

[1803] The probes having the nucleotide sequence represented by SEQ ID NOS: 20424, 20425, 20426, 20427, 20428, 20429, 20430, 20431, 20432, 20433, 20434 were selected from the ORFs having the nucleotide sequence represented by SEQ ID NO: 1315.

[1804] The probes having the nucleotide sequence represented by SEQ ID NOS: 20435, 20436, 20437, 20438, 20439, 20440, 20441, 20442, 20443, 20444, 20445 were selected from the ORFs having the nucleotide sequence represented by SEQ ID NO: 1316.

[1805] The probes having the nucleotide sequence represented by SEQ ID NOS: 20446, 20447, 20448, 20449, 20450, 20451, 20452, 20453, 20454, 20455, 20456 were selected from the ORFs having the nucleotide sequence represented by SEQ ID NO: 1317.

[1806] The probes having the nucleotide sequence represented by SEQ ID NOS: 20457, 20458, 20459, 20460, 20461, 20462, 20463, 20464, 20465, 20466, 20467 were selected from the ORFs having the nucleotide sequence represented by SEQ ID NO: 1318.

[1807] The probes having the nucleotide sequence represented by SEQ ID NOS: 20468, 20469, 20470, 20471, 20472, 20473, 20474, 20475, 20476, 20477, 20478 were selected from the ORFs having the nucleotide sequence represented by SEQ ID NO: 1319.

[1808] The probes having the nucleotide sequence represented by SEQ ID NOS: 20479, 20480, 20481, 20482, 20483, 20484, 20485, 20486, 20487, 20488, 20489 were selected from the ORFs having the nucleotide sequence represented by SEQ ID NO: 1320.

[1809] The probes having the nucleotide sequence represented by SEQ ID NOS: 20490, 20491, 20492, 20493, 20494, 20495, 20496, 20497, 20498, 20499, 20500 were selected from the ORFs having the nucleotide sequence represented by SEQ ID NO: 1321.

[1810] The probes having the nucleotide sequence represented by SEQ ID NOS: 20501, 20502, 20503, 20504, 20505, 20506, 20507, 20508, 20509, 20510, 20511 were selected from the ORFs having the nucleotide sequence represented by SEQ ID NO: 1322.

[1811] The probes having the nucleotide sequence represented by SEQ ID NOS: 20512, 20513, 20514, 20515, 20516, 20517, 20518, 20519, 20520, 20521, 20522 were selected from the ORFs having the nucleotide sequence represented by SEQ ID NO: 1323.

[1812] The probes having the nucleotide sequence represented by SEQ ID NOS: 20523, 20524, 20525, 20526, 20527, 20528, 20529, 20530, 20531, 20532, 20533 were selected from the ORFs having the nucleotide sequence represented by SEQ ID NO: 1324.

[1813] The probes having the nucleotide sequence represented by SEQ ID NOS: 20534, 20535, 20536, 20537, 20538, 20539, 20540, 20541, 20542, 20543, 20544 were selected from the ORFs having the nucleotide sequence represented by SEQ ID NO: 1325.

[1814] The probes having the nucleotide sequence represented by SEQ ID NOS: 20545, 20546, 20547, 20548, 20549, 20550, 20551, 20552, 20553, 20554, 20555 were selected from the ORFs having the nucleotide sequence represented by SEQ ID NO: 1326.

[1815] The probes having the nucleotide sequence represented by SEQ ID NOS: 20556, 20557, 20558, 20559, 20560, 20561, 20562, 20563, 20564, 20565, 20566 were selected from the ORFs having the nucleotide sequence represented by SEQ ID NO: 1327.

[1816] The probes having the nucleotide sequence represented by SEQ ID NOS: 20567, 20568, 20569, 20570, 20571, 20572, 20573, 20574, 20575, 20576, 20577 were selected from the ORFs having the nucleotide sequence represented by SEQ ID NO: 1328.

[1817] The probes having the nucleotide sequence represented by SEQ ID NOS: 20578, 20579, 20580, 20581, 20582, 20583, 20584, 20585, 20586, 20587, 20588 were selected from the ORFs having the nucleotide sequence represented by SEQ ID NO: 1329.

[1818] The probes having the nucleotide sequence represented by SEQ ID NOS: 20589, 20590, 20591, 20592, 20593, 20594, 20595, 20596, 20597, 20598, 20599 were selected from the ORFs having the nucleotide sequence represented by SEQ ID NO: 1330.

[1819] The probes having the nucleotide sequence represented by SEQ ID NOS: 20600, 20601, 20602, 20603, 20604, 20605, 20606, 20607, 20608, 20609, 20610 were selected from the ORFs having the nucleotide sequence represented by SEQ ID NO: 1331.

[1820] The probes having the nucleotide sequence represented by SEQ ID NOS: 20611, 20612, 20613, 20614, 20615, 20616, 20617, 20618, 20619, 20620, 20621 were selected from the ORFs having the nucleotide sequence represented by SEQ ID NO: 1332.

[1821] The probes having the nucleotide sequence represented by SEQ ID NOS: 20622, 20623, 20624, 20625, 20626, 20627, 20628, 20629, 20630, 20631, 20632 were selected from the ORFs having the nucleotide sequence represented by SEQ ID NO: 1333.

[1822] The probes having the nucleotide sequence represented by SEQ ID NOS: 20633, 20634, 20635, 20636, 20637, 20638, 20639, 20640, 20641, 20642, 20643 were selected from the ORFs having the nucleotide sequence represented by SEQ ID NO: 1334.

[1823] The probes having the nucleotide sequence represented by SEQ ID NOS: 20644, 20645, 20646, 20647, 20648, 20649, 20650, 20651, 20652, 20653, 20654 were selected from the ORFs having the nucleotide sequence represented by SEQ ID NO: 1335.

[1824] The probes having the nucleotide sequence represented by SEQ ID NOS: 20655, 20656, 20657, 20658, 20659, 20660, 20661, 20662, 20663, 20664, 20665 were selected from the ORFs having the nucleotide sequence represented by SEQ ID NO: 1336.

[1825] The probes having the nucleotide sequence represented by SEQ ID NOS: 20666, 20667, 20668, 20669, 20670, 20671, 20672, 20673, 20674, 20675, 20676 were selected from the ORFs having the nucleotide sequence represented by SEQ ID NO: 1337.

[1826] The probes having the nucleotide sequence represented by SEQ ID NOS: 20677, 20678, 20679, 20680, 20681, 20682, 20683, 20684, 20685, 20686, 20687 were selected from the ORFs having the nucleotide sequence represented by SEQ ID NO: 1338.

[1827] The probes having the nucleotide sequence represented by SEQ ID NOS: 20688, 20689, 20690, 20691, 20692, 20693, 20694, 20695, 20696, 20697, 20698 were selected from the ORFs having the nucleotide sequence represented by SEQ ID NO: 1339.

[1828] The probes having the nucleotide sequence represented by SEQ ID NOS: 20699, 20700, 20701, 20702, 20703, 20704, 20705, 20706, 20707, 20708, 20709 were selected from the ORFs having the nucleotide sequence represented by SEQ ID NO: 1340.

[1829] The probes having the nucleotide sequence represented by SEQ ID NOS: 20710, 20711, 20712, 20713, 20714, 20715, 20716, 20717, 20718, 20719, 20720 were selected from the ORFs having the nucleotide sequence represented by SEQ ID NO: 1341.

[1830] The probes having the nucleotide sequence represented by SEQ ID NOS: 20721, 20722, 20723, 20724, 20725, 20726, 20727, 20728, 20729, 20730, 20731 were selected from the ORFs having the nucleotide sequence represented by SEQ ID NO: 1342.

[1831] The probes having the nucleotide sequence represented by SEQ ID NOS: 20732, 20733, 20734, 20735, 20736, 20737, 20738, 20739, 20740, 20741, 20742 were selected from the ORFs having the nucleotide sequence represented by SEQ ID NO: 1343.

[1832] The probes having the nucleotide sequence represented by SEQ ID NOS: 20743, 20744, 20745, 20746, 20747, 20748, 20749, 20750, 20751, 20752, 20753 were selected from the ORFs having the nucleotide sequence represented by SEQ ID NO: 1344.

[1833] The probes having the nucleotide sequence represented by SEQ ID NOS: 20754, 20755, 20756, 20757, 20758, 20759, 20760, 20761, 20762, 20763, 20764 were selected from the ORFs having the nucleotide sequence represented by SEQ ID NO: 1345.

[1834] The probes having the nucleotide sequence represented by SEQ ID NOS: 20765, 20766, 20767, 20768, 20769, 20770, 20771, 20772, 20773, 20774, 20775 were selected from the ORFs having the nucleotide sequence represented by SEQ ID NO: 1346.

[1835] The probes having the nucleotide sequence represented by SEQ ID NOS: 20776, 20777, 20778, 20779, 20780, 20781, 20782, 20783, 20784, 20785, 20786 were selected from the ORFs having the nucleotide sequence represented by SEQ ID NO: 1347.

[1836] The probes having the nucleotide sequence represented by SEQ ID NOS: 20787, 20788, 20789, 20790, 20791, 20792, 20793, 20794, 20795, 20796, 20797 were selected from the ORFs having the nucleotide sequence represented by SEQ ID NO: 1348.

[1837] The probes having the nucleotide sequence represented by SEQ ID NOS: 20798, 20799, 20800, 20801, 20802, 20803, 20804, 20805, 20806, 20807, 20808 were selected from the ORFs having the nucleotide sequence represented by SEQ ID NO: 1349.

[1838] The probes having the nucleotide sequence represented by SEQ ID NOS: 20809, 20810, 20811, 20812, 20813, 20814, 20815, 20816, 20817, 20818, 20819 were selected from the ORFs having the nucleotide sequence represented by SEQ ID NO: 1350.

[1839] The probes having the nucleotide sequence represented by SEQ ID NOS: 20820, 20821, 20822, 20823, 20824, 20825, 20826, 20827, 20828, 20829, 20830 were selected from the ORFs having the nucleotide sequence represented by SEQ ID NO: 1351.

[1840] The probes having the nucleotide sequence represented by SEQ ID NOS: 20831, 20832, 20833, 20834, 20835, 20836, 20837, 20838, 20839, 20840, 20841 were selected from the ORFs having the nucleotide sequence represented by SEQ ID NO: 1352.

[1841] The probes having the nucleotide sequence represented by SEQ ID NOS: 20842, 20843, 20844, 20845, 20846, 20847, 20848, 20849, 20850, 20851, 20852 were selected from the ORFs having the nucleotide sequence represented by SEQ ID NO: 1353.

[1842] The probes having the nucleotide sequence represented by SEQ ID NOS: 20853, 20854, 20855, 20856, 20857, 20858, 20859, 20860, 20861, 20862, 20863 were selected from the ORFs having the nucleotide sequence represented by SEQ ID NO: 1354.

[1843] The probes having the nucleotide sequence represented by SEQ ID NOS: 20864, 20865, 20866, 20867, 20868, 20869, 20870, 20871, 20872, 20873, 20874 were selected from the ORFs having the nucleotide sequence represented by SEQ ID NO: 1355.

[1844] The probes having the nucleotide sequence represented by SEQ ID NOS: 20875, 20876, 20877, 20878, 20879, 20880, 20881, 20882, 20883, 20884, 20885 were selected from the ORFs having the nucleotide sequence represented by SEQ ID NO: 1356.

[1845] The probes having the nucleotide sequence represented by SEQ ID NOS: 20886, 20887, 20888, 20889, 20890, 20891, 20892, 20893, 20894, 20895, 20896 were selected from the ORFs having the nucleotide sequence represented by SEQ ID NO: 1357.

[1846] The probes having the nucleotide sequence represented by SEQ ID NOS: 20897, 20898, 20899, 20900, 20901, 20902, 20903, 20904, 20905, 20906, 20907 were selected from the ORFs having the nucleotide sequence represented by SEQ ID NO: 1358.

[1847] The probes having the nucleotide sequence represented by SEQ ID NOS: 20908, 20909, 20910, 20911, 20912, 20913, 20914, 20915, 20916, 20917, 20918 were selected from the ORFs having the nucleotide sequence represented by SEQ ID NO: 1359.

[1848] The probes having the nucleotide sequence represented by SEQ ID NOS: 20919, 20920, 20921, 20922, 20923, 20924, 20925, 20926, 20927, 20928, 20929 were selected from the ORFs having the nucleotide sequence represented by SEQ ID NO: 1360.

[1849] The probes having the nucleotide sequence represented by SEQ ID NOS: 20930, 20931, 20932, 20933, 20934, 20935, 20936, 20937, 20938, 20939, 20940 were selected from the ORFs having the nucleotide sequence represented by SEQ ID NO: 1361.

[1850] The probes having the nucleotide sequence represented by SEQ ID NOS: 20941, 20942, 20943, 20944, 20945, 20946, 20947, 20948, 20949, 20950, 20951 were selected from the ORFs having the nucleotide sequence represented by SEQ ID NO: 1362.

[1851] The probes having the nucleotide sequence represented by SEQ ID NOS: 20952, 20953, 20954, 20955, 20956, 20957, 20958, 20959, 20960, 20961, 20962 were selected from the ORFs having the nucleotide sequence represented by SEQ ID NO: 1363.

[1852] The probes having the nucleotide sequence represented by SEQ ID NOS: 20963, 20964, 20965, 20966, 20967, 20968, 20969, 20970, 20971, 20972, 20973 were selected from the ORFs having the nucleotide sequence represented by SEQ ID NO: 1364.

[1853] The probes having the nucleotide sequence represented by SEQ ID NOS: 20974, 20975, 20976, 20977, 20978, 20979, 20980, 20981, 20982, 20983, 20984 were selected from the ORFs having the nucleotide sequence represented by SEQ ID NO: 1365.

[1854] The probes having the nucleotide sequence represented by SEQ ID NOS: 20985, 20986, 20987, 20988, 20989, 20990, 20991, 20992, 20993, 20994, 20995 were selected from the ORFs having the nucleotide sequence represented by SEQ ID NO: 1366.

[1855] The probes having the nucleotide sequence represented by SEQ ID NOS: 20996, 20997, 20998, 20999, 21000, 21001, 21002, 21003, 21004, 21005, 21006 were selected from the ORFs having the nucleotide sequence represented by SEQ ID NO: 1367.

[1856] The probes having the nucleotide sequence represented by SEQ ID NOS: 21007, 21008, 21009, 21010, 21011, 21012, 21013, 21014, 21015, 21016, 21017 were selected from the ORFs having the nucleotide sequence represented by SEQ ID NO: 1368.

[1857] The probes having the nucleotide sequence represented by SEQ ID NOS: 21018, 21019, 21020, 21021, 21022, 21023, 21024, 21025, 21026, 21027, 21028 were selected from the ORFs having the nucleotide sequence represented by SEQ ID NO: 1369.

[1858] The probes having the nucleotide sequence represented by SEQ ID NOS: 21029, 21030, 21031, 21032, 21033, 21034, 21035, 21036, 21037, 21038, 21039 were selected from the ORFs having the nucleotide sequence represented by SEQ ID NO: 1370.

[1859] The probes having the nucleotide sequence represented by SEQ ID NOS: 21040, 21041, 21042, 21043, 21044, 21045, 21046, 21047, 21048, 21049, 21050 were selected from the ORFs having the nucleotide sequence represented by SEQ ID NO: 1371.

[1860] The probes having the nucleotide sequence represented by SEQ ID NOS: 21051, 21052, 21053, 21054, 21055, 21056, 21057, 21058, 21059, 21060, 21061 were selected from the ORFs having the nucleotide sequence represented by SEQ ID NO: 1372.

[1861] The probes having the nucleotide sequence represented by SEQ ID NOS: 21062, 21063, 21064, 21065, 21066, 21067, 21068, 21069, 21070, 21071, 21072 were selected from the ORFs having the nucleotide sequence represented by SEQ ID NO: 1373.

[1862] The probes having the nucleotide sequence represented by SEQ ID NOS: 21073, 21074, 21075, 21076, 21077, 21078, 21079, 21080, 21081, 21082, 21083 were selected from the ORFs having the nucleotide sequence represented by SEQ ID NO: 1374.

[1863] The probes having the nucleotide sequence represented by SEQ ID NOS: 21084, 21085, 21086, 21087, 21088, 21089, 21090, 21091, 21092, 21093, 21094 were selected from the ORFs having the nucleotide sequence represented by SEQ ID NO: 1375.

[1864] The probes having the nucleotide sequence represented by SEQ ID NOS: 21095, 21096, 21097, 21098, 21099, 21100, 21101, 21102, 21103, 21104, 21105 were selected from the ORFs having the nucleotide sequence represented by SEQ ID NO: 1376.

[1865] The probes having the nucleotide sequence represented by SEQ ID NOS: 21106, 21107, 21108, 21109, 21110, 21111, 21112, 21113, 21114, 21115, 21116 were selected from the ORFs having the nucleotide sequence represented by SEQ ID NO: 1377.

[1866] The probes having the nucleotide sequence represented by SEQ ID NOS: 21117, 21118, 21119, 21120, 21121, 21122, 21123, 21124, 21125, 21126, 21127 were selected from the ORFs having the nucleotide sequence represented by SEQ ID NO: 1378.

[1867] The probes having the nucleotide sequence represented by SEQ ID NOS: 21128, 21129, 21130, 21131, 21132, 21133, 21134, 21135, 21136, 21137, 21138 were selected from the ORFs having the nucleotide sequence represented by SEQ ID NO: 1379.

[1868] The probes having the nucleotide sequence represented by SEQ ID NOS: 21139, 21140, 21141, 21142, 21143, 21144, 21145, 21146, 21147, 21148, 21149 were selected from the ORFs having the nucleotide sequence represented by SEQ ID NO: 1380.

[1869] The probes having the nucleotide sequence represented by SEQ ID NOS: 21150, 21151, 21152, 21153, 21154, 21155, 21156, 21157, 21158, 21159, 21160 were selected from the ORFs having the nucleotide sequence represented by SEQ ID NO: 1381.

[1870] The probes having the nucleotide sequence represented by SEQ ID NOS: 21161, 21162, 21163, 21164, 21165, 21166, 21167, 21168, 21169, 21170, 21171 were selected from the ORFs having the nucleotide sequence represented by SEQ ID NO: 1382.

[1871] The probes having the nucleotide sequence represented by SEQ ID NOS: 21172, 21173, 21174, 21175, 21176, 21177, 21178, 21179, 21180, 21181, 21182 were selected from the ORFs having the nucleotide sequence represented by SEQ ID NO: 1383.

[1872] The probes having the nucleotide sequence represented by SEQ ID NOS: 21183, 21184, 21185, 21186, 21187, 21188, 21189, 21190, 21191, 21192, 21193, 21194, 21195, 21196, 21197, 21198, 21199, 21200, 21201, 21202, 21203, 21204 were selected from the ORFs having the nucleotide sequence represented by SEQ ID NO: 1384.

[1873] The probes having the nucleotide sequence represented by SEQ ID NOS: 21205, 21206, 21207, 21208, 21209, 21210, 21211, 21212, 21213, 21214, 21215 were selected from the ORFs having the nucleotide sequence represented by SEQ ID NO: 1385.

[1874] The probes having the nucleotide sequence represented by SEQ ID NOS: 21216, 21217, 21218, 21219, 21220, 21221, 21222, 21223, 21224, 21225, 21226 were selected from the ORFs having the nucleotide sequence represented by SEQ ID NO: 1386.

[1875] The probes having the nucleotide sequence represented by SEQ ID NOS: 21227, 21228, 21229, 21230, 21231, 21232, 21233, 21234, 21235, 21236, 21237 were selected from the ORFs having the nucleotide sequence represented by SEQ ID NO: 1387.

[1876] The probes having the nucleotide sequence represented by SEQ ID NOS: 21238, 21239, 21240, 21241, 21242, 21243, 21244, 21245, 21246, 21247, 21248 were selected from the ORFs having the nucleotide sequence represented by SEQ ID NO: 1388.

[1877] The probes having the nucleotide sequence represented by SEQ ID NOS: 21249, 21250, 21251, 21252, 21253, 21254, 21255, 21256, 21257, 21258, 21259 were selected from the ORFs having the nucleotide sequence represented by SEQ ID NO: 1389.

[1878] The probes having the nucleotide sequence represented by SEQ ID NOS: 21260, 21261, 21262, 21263, 21264, 21265, 21266, 21267, 21268, 21269, 21270 were selected from the ORFs having the nucleotide sequence represented by SEQ ID NO: 1390.

[1879] The probes having the nucleotide sequence represented by SEQ ID NOS: 21271, 21272, 21273, 21274, 21275, 21276, 21277, 21278, 21279, 21280, 21281 were selected from the ORFs having the nucleotide sequence represented by SEQ ID NO: 1391.

[1880] The probes having the nucleotide sequence represented by SEQ ID NOS: 21282, 21283, 21284, 21285, 21286, 21287, 21288, 21289, 21290, 21291, 21292 were selected from the ORFs having the nucleotide sequence represented by SEQ ID NO: 1392.

[1881] The probes having the nucleotide sequence represented by SEQ ID NOS: 21293, 21294, 21295, 21296, 21297, 21298, 21299, 21300, 21301, 21302, 21303 were selected from the ORFs having the nucleotide sequence represented by SEQ ID NO: 1393.

[1882] The probes having the nucleotide sequence represented by SEQ ID NOS: 21304, 21305, 21306, 21307, 21308, 21309, 21310, 21311, 21312, 21313, 21314 were selected from the ORFs having the nucleotide sequence represented by SEQ ID NO: 1394.

[1883] The probes having the nucleotide sequence represented by SEQ ID NOS: 21315, 21316, 21317, 21318, 21319, 21320, 21321, 21322, 21323, 21324, 21325 were selected from the ORFs having the nucleotide sequence represented by SEQ ID NO: 1395.

[1884] The probes having the nucleotide sequence represented by SEQ ID NOS: 21326, 21327, 21328, 21329, 21330, 21331, 21332, 21333, 21334, 21335, 21336 were selected from the ORFs having the nucleotide sequence represented by SEQ ID NO: 1396.

[1885] The probes having the nucleotide sequence represented by SEQ ID NOS: 21337, 21338, 21339, 21340, 21341, 21342, 21343, 21344, 21345, 21346, 21347 were selected from the ORFs having the nucleotide sequence represented by SEQ ID NO: 1397.

[1886] The probes having the nucleotide sequence represented by SEQ ID NOS: 21348, 21349, 21350, 21351, 21352, 21353, 21354, 21355, 21356, 21357, 21358 were selected from the ORFs having the nucleotide sequence represented by SEQ ID NO: 1398.

[1887] The probes having the nucleotide sequence represented by SEQ ID NOS: 21359, 21360, 21361, 21362, 21363, 21364, 21365, 21366, 21367, 21368, 21369 were selected from the ORFs having the nucleotide sequence represented by SEQ ID NO: 1399.

[1888] The probes having the nucleotide sequence represented by SEQ ID NOS: 21370, 21371, 21372, 21373, 21374, 21375, 21376, 21377, 21378, 21379, 21380 were selected from the ORFs having the nucleotide sequence represented by SEQ ID NO: 1400.

[1889] The probes having the nucleotide sequence represented by SEQ ID NOS: 21381, 21382, 21383, 21384, 21385, 21386, 21387, 21388, 21389, 21390, 21391 were selected from the ORFs having the nucleotide sequence represented by SEQ ID NO: 1401.

[1890] The probes having the nucleotide sequence represented by SEQ ID NOS: 21392, 21393, 21394, 21395, 21396, 21397, 21398, 21399, 21400, 21401, 21402 were selected from the ORFs having the nucleotide sequence represented by SEQ ID NO: 1402.

[1891] The probes having the nucleotide sequence represented by SEQ ID NOS: 21403, 21404, 21405, 21406, 21407, 21408, 21409, 21410, 21411, 21412, 21413 were selected from the ORFs having the nucleotide sequence represented by SEQ ID NO: 1403.

[1892] The probes having the nucleotide sequence represented by SEQ ID NOS: 21414, 21415, 21416, 21417, 21418, 21419, 21420, 21421, 21422, 21423, 21424 were selected from the ORFs having the nucleotide sequence represented by SEQ ID NO: 1404.

[1893] The probes having the nucleotide sequence represented by SEQ ID NOS: 21425, 21426, 21427, 21428, 21429, 21430, 21431, 21432, 21433, 21434, 21435 were selected from the ORFs having the nucleotide sequence represented by SEQ ID NO: 1405.

[1894] The probes having the nucleotide sequence represented by SEQ ID NOS: 21436, 21437, 21438, 21439, 21440, 21441, 21442, 21443, 21444, 21445, 21446 were selected from the ORFs having the nucleotide sequence represented by SEQ ID NO: 1406.

[1895] The probes having the nucleotide sequence represented by SEQ ID NOS: 21447, 21448, 21449, 21450, 21451, 21452, 21453, 21454, 21455, 21456, 21457 were selected from the ORFs having the nucleotide sequence represented by SEQ ID NO: 1407.

[1896] The probes having the nucleotide sequence represented by SEQ ID NOS: 21458, 21459, 21460, 21461, 21462, 21463, 21464, 21465, 21466, 21467, 21468 were selected from the ORFs having the nucleotide sequence represented by SEQ ID NO: 1408.

[1897] The probes having the nucleotide sequence represented by SEQ ID NOS: 21469, 21470, 21471, 21472, 21473, 21474, 21475, 21476, 21477, 21478, 21479 were selected from the ORFs having the nucleotide sequence represented by SEQ ID NO: 1409.

[1898] The probes having the nucleotide sequence represented by SEQ ID NOS: 21480, 21481, 21482, 21483, 21484, 21485, 21486, 21487, 21488, 21489, 21490 were selected from the ORFs having the nucleotide sequence represented by SEQ ID NO: 1410.

[1899] The probes having the nucleotide sequence represented by SEQ ID NOS: 21491, 21492, 21493, 21494, 21495, 21496, 21497, 21498, 21499, 21500, 21501 were selected from the ORFs having the nucleotide sequence represented by SEQ ID NO: 1411.

[1900] The probes having the nucleotide sequence represented by SEQ ID NOS: 21502, 21503, 21504, 21505, 21506, 21507, 21508, 21509, 21510, 21511, 21512 were selected from the ORFs having the nucleotide sequence represented by SEQ ID NO: 1412.

[1901] The probes having the nucleotide sequence represented by SEQ ID NOS: 21513, 21514, 21515, 21516, 21517, 21518, 21519, 21520, 21521, 21522, 21523 were selected from the ORFs having the nucleotide sequence represented by SEQ ID NO: 1413.

[1902] The probes having the nucleotide sequence represented by SEQ ID NOS: 21524, 21525, 21526, 21527, 21528, 21529, 21530, 21531, 21532, 21533, 21534 were selected from the ORFs having the nucleotide sequence represented by SEQ ID NO: 1414.

[1903] The probes having the nucleotide sequence represented by SEQ ID NOS: 21535, 21536, 21537, 21538, 21539, 21540, 21541, 21542, 21543, 21544, 21545 were selected from the ORFs having the nucleotide sequence represented by SEQ ID NO: 1415.

[1904] The probes having the nucleotide sequence represented by SEQ ID NOS: 21546, 21547, 21548, 21549, 21550, 21551, 21552, 21553, 21554, 21555, 21556 were selected from the ORFs having the nucleotide sequence represented by SEQ ID NO: 1416.

[1905] The probes having the nucleotide sequence represented by SEQ ID NOS: 21557, 21558, 21559, 21560, 21561, 21562, 21563, 21564, 21565, 21566, 21567 were selected from the ORFs having the nucleotide sequence represented by SEQ ID NO: 1417.

[1906] The probes having the nucleotide sequence represented by SEQ ID NOS: 21568, 21569, 21570, 21571, 21572, 21573, 21574, 21575, 21576, 21577, 21578 were selected from the ORFs having the nucleotide sequence represented by SEQ ID NO: 1418.

[1907] The probes having the nucleotide sequence represented by SEQ ID NOS: 21579, 21580, 21581, 21582, 21583, 21584, 21585, 21586, 21587, 21588, 21589 were selected from the ORFs having the nucleotide sequence represented by SEQ ID NO: 1419.

[1908] The probes having the nucleotide sequence represented by SEQ ID NOS: 21590, 21591, 21592, 21593, 21594, 21595, 21596, 21597, 21598, 21599, 21600 were selected from the ORFs having the nucleotide sequence represented by SEQ ID NO: 1420.

[1909] The probes having the nucleotide sequence represented by SEQ ID NOS: 21601, 21602, 21603, 21604, 21605, 21606, 21607, 21608, 21609, 21610, 21611 were selected from the ORFs having the nucleotide sequence represented by SEQ ID NO: 1421.

[1910] The probes having the nucleotide sequence represented by SEQ ID NOS: 21612, 21613, 21614, 21615, 21616, 21617, 21618, 21619, 21620, 21621, 21622 were selected from the ORFs having the nucleotide sequence represented by SEQ ID NO: 1422.

[1911] The probes having the nucleotide sequence represented by SEQ ID NOS: 21623, 21624, 21625, 21626, 21627, 21628, 21629, 21630, 21631, 21632, 21633 were selected from the ORFs having the nucleotide sequence represented by SEQ ID NO: 1423.

[1912] The probes having the nucleotide sequence represented by SEQ ID NOS: 21634, 21635, 21636, 21637, 21638, 21639, 21640, 21641, 21642, 21643, 21644 were selected from the ORFs having the nucleotide sequence represented by SEQ ID NO: 1424.

[1913] The probes having the nucleotide sequence represented by SEQ ID NOS: 21645, 21646, 21647, 21648, 21649, 21650, 21651, 21652, 21653, 21654, 21655 were selected from the ORFs having the nucleotide sequence represented by SEQ ID NO: 1425.

[1914] The probes having the nucleotide sequence represented by SEQ ID NOS: 21656, 21657, 21658, 21659, 21660, 21661, 21662, 21663, 21664, 21665, 21666 were selected from the ORFs having the nucleotide sequence represented by SEQ ID NO: 1426.

[1915] The probes having the nucleotide sequence represented by SEQ ID NOS: 21667, 21668, 21669, 21670, 21671, 21672, 21673, 21674, 21675, 21676, 21677 were selected from the ORFs having the nucleotide sequence represented by SEQ ID NO: 1427.

[1916] The probes having the nucleotide sequence represented by SEQ ID NOS: 21678, 21679, 21680, 21681, 21682, 21683, 21684, 21685, 21686, 21687, 21688 were selected from the ORFs having the nucleotide sequence represented by SEQ ID NO: 1428.

[1917] The probes having the nucleotide sequence represented by SEQ ID NOS: 21689, 21690, 21691, 21692, 21693, 21694, 21695, 21696, 21697, 21698, 21699 were selected from the ORFs having the nucleotide sequence represented by SEQ ID NO: 1429.

[1918] The probes having the nucleotide sequence represented by SEQ ID NOS: 21700, 21701, 21702, 21703, 21704, 21705, 21706, 21707, 21708, 21709, 21710 were selected from the ORFs having the nucleotide sequence represented by SEQ ID NO: 1430.

[1919] The probes having the nucleotide sequence represented by SEQ ID NOS: 21711, 21712, 21713, 21714, 21715, 21716, 21717, 21718, 21719, 21720, 21721 were selected from the ORFs having the nucleotide sequence represented by SEQ ID NO: 1431.

[1920] The probes having the nucleotide sequence represented by SEQ ID NOS: 21722, 21723, 21724, 21725, 21726, 21727, 21728, 21729, 21730, 21731, 21732 were selected from the ORFs having the nucleotide sequence represented by SEQ ID NO: 1432.

[1921] The probes having the nucleotide sequence represented by SEQ ID NOS: 21733, 21734, 21735, 21736, 21737, 21738, 21739, 21740, 21741, 21742, 21743 were selected from the ORFs having the nucleotide sequence represented by SEQ ID NO: 1433.

[1922] The probes having the nucleotide sequence represented by SEQ ID NOS: 21744, 21745, 21746, 21747, 21748, 21749, 21750, 21751, 21752, 21753, 21754 were selected from the ORFs having the nucleotide sequence represented by SEQ ID NO: 1434.

[1923] The probes having the nucleotide sequence represented by SEQ ID NOS: 21755, 21756, 21757, 21758, 21759, 21760, 21761, 21762, 21763, 21764, 21765 were selected from the ORFs having the nucleotide sequence represented by SEQ ID NO: 1435.

[1924] The probes having the nucleotide sequence represented by SEQ ID NOS: 21766, 21767, 21768, 21769, 21770, 21771, 21772, 21773, 21774, 21775, 21776 were selected from the ORFs having the nucleotide sequence represented by SEQ ID NO: 1436.

[1925] The probes having the nucleotide sequence represented by SEQ ID NOS: 21777, 21778, 21779, 21780, 21781, 21782, 21783, 21784, 21785, 21786, 21787 were selected from the ORFs having the nucleotide sequence represented by SEQ ID NO: 1437.

[1926] The probes having the nucleotide sequence represented by SEQ ID NOS: 21788, 21789, 21790, 21791, 21792, 21793, 21794, 21795, 21796, 21797, 21798 were selected from the ORFs having the nucleotide sequence represented by SEQ ID NO: 1438.

[1927] The probes having the nucleotide sequence represented by SEQ ID NOS: 21799, 21800, 21801, 21802, 21803, 21804, 21805, 21806, 21807, 21808, 21809 were selected from the ORFs having the nucleotide sequence represented by SEQ ID NO: 1439.

[1928] The probes having the nucleotide sequence represented by SEQ ID NOS: 21810, 21811, 21812, 21813, 21814, 21815, 21816, 21817, 21818, 21819, 21820 were selected from the ORFs having the nucleotide sequence represented by SEQ ID NO: 1440.

[1929] The probes having the nucleotide sequence represented by SEQ ID NOS: 21821, 21822, 21823, 21824, 21825, 21826, 21827, 21828, 21829, 21830, 21831 were selected from the ORFs having the nucleotide sequence represented by SEQ ID NO: 1441.

[1930] The probes having the nucleotide sequence represented by SEQ ID NOS: 21832, 21833, 21834, 21835, 21836, 21837, 21838, 21839, 21840, 21841, 21842 were selected from the ORFs having the nucleotide sequence represented by SEQ ID NO: 1442.

[1931] The probes having the nucleotide sequence represented by SEQ ID NOS: 21843, 21844, 21845, 21846, 21847, 21848, 21849, 21850, 21851, 21852, 21853 were selected from the ORFs having the nucleotide sequence represented by SEQ ID NO: 1443.

[1932] The probes having the nucleotide sequence represented by SEQ ID NOS: 21854, 21855, 21856, 21857, 21858, 21859, 21860, 21861, 21862, 21863, 21864 were selected from the ORFs having the nucleotide sequence represented by SEQ ID NO: 1444.

[1933] The probes having the nucleotide sequence represented by SEQ ID NOS: 21865, 21866, 21867, 21868, 21869, 21870, 21871, 21872, 21873, 21874, 21875 were selected from the ORFs having the nucleotide sequence represented by SEQ ID NO: 1445.

[1934] The probes having the nucleotide sequence represented by SEQ ID NOS: 21876, 21877, 21878, 21879, 21880, 21881, 21882, 21883, 21884, 21885, 21886 were selected from the ORFs having the nucleotide sequence represented by SEQ ID NO: 1446.

[1935] The probes having the nucleotide sequence represented by SEQ ID NOS: 21887, 21888, 21889, 21890, 21891, 21892, 21893, 21894, 21895, 21896, 21897 were selected from the ORFs having the nucleotide sequence represented by SEQ ID NO: 1447.

[1936] The probes having the nucleotide sequence represented by SEQ ID NOS: 21898, 21899, 21900, 21901, 21902, 21903, 21904, 21905, 21906, 21907, 21908 were selected from the ORFs having the nucleotide sequence represented by SEQ ID NO: 1448.

[1937] The probes having the nucleotide sequence represented by SEQ ID NOS: 21909, 21910, 21911, 21912, 21913, 21914, 21915, 21916, 21917, 21918, 21919 were selected from the ORFs having the nucleotide sequence represented by SEQ ID NO: 1449.

[1938] The probes having the nucleotide sequence represented by SEQ ID NOS: 21920, 21921, 21922, 21923, 21924, 21925, 21926, 21927, 21928, 21929, 21930 were selected from the ORFs having the nucleotide sequence represented by SEQ ID NO: 1450.

[1939] The probes having the nucleotide sequence represented by SEQ ID NOS: 21931, 21932, 21933, 21934, 21935, 21936, 21937, 21938, 21939, 21940, 21941 were selected from the ORFs having the nucleotide sequence represented by SEQ ID NO: 1451.

[1940] The probes having the nucleotide sequence represented by SEQ ID NOS: 21942, 21943, 21944, 21945, 21946, 21947, 21948, 21949, 21950, 21951, 21952 were selected from the ORFs having the nucleotide sequence represented by SEQ ID NO: 1452.

[1941] The probes having the nucleotide sequence represented by SEQ ID NOS: 21953, 21954, 21955, 21956, 21957, 21958, 21959, 21960, 21961, 21962, 21963 were selected from the ORFs having the nucleotide sequence represented by SEQ ID NO: 1453.

[1942] The probes having the nucleotide sequence represented by SEQ ID NOS: 21964, 21965, 21966, 21967, 21968, 21969, 21970, 21971, 21972, 21973, 21974 were selected from the ORFs having the nucleotide sequence represented by SEQ ID NO: 1454.

[1943] The probes having the nucleotide sequence represented by SEQ ID NOS: 21975, 21976, 21977, 21978, 21979, 21980, 21981, 21982, 21983, 21984, 21985 were selected from the ORFs having the nucleotide sequence represented by SEQ ID NO: 1455.

[1944] The probes having the nucleotide sequence represented by SEQ ID NOS: 21986, 21987, 21988, 21989, 21990, 21991, 21992, 21993, 21994, 21995, 21996 were selected from the ORFs having the nucleotide sequence represented by SEQ ID NO: 1456.

[1945] The probes having the nucleotide sequence represented by SEQ ID NOS: 21997, 21998, 21999, 22000, 22001, 22002, 22003, 22004, 22005, 22006, 22007 were selected from the ORFs having the nucleotide sequence represented by SEQ ID NO: 1457.

[1946] The probes having the nucleotide sequence represented by SEQ ID NOS: 22008, 22009, 22010, 22011, 22012, 22013, 22014, 22015, 22016, 22017, 22018 were selected from the ORFs having the nucleotide sequence represented by SEQ ID NO: 1458.

[1947] The probes having the nucleotide sequence represented by SEQ ID NOS: 22019, 22020, 22021, 22022, 22023, 22024, 22025, 22026, 22027, 22028, 22029 were selected from the ORFs having the nucleotide sequence represented by SEQ ID NO: 1459.

[1948] The probes having the nucleotide sequence represented by SEQ ID NOS: 22030, 22031, 22032, 22033, 22034, 22035, 22036, 22037, 22038, 22039, 22040 were selected from the ORFs having the nucleotide sequence represented by SEQ ID NO: 1460.

[1949] The probes having the nucleotide sequence represented by SEQ ID NOS: 22041, 22042, 22043, 22044, 22045, 22046, 22047, 22048, 22049, 22050, 22051 were selected from the ORFs having the nucleotide sequence represented by SEQ ID NO: 1461.

[1950] The probes having the nucleotide sequence represented by SEQ ID NOS: 22052, 22053, 22054, 22055, 22056, 22057, 22058, 22059, 22060, 22061, 22062 were selected from the ORFs having the nucleotide sequence represented by SEQ ID NO: 1462.

[1951] The probes having the nucleotide sequence represented by SEQ ID NOS: 22063, 22064, 22065, 22066, 22067, 22068, 22069, 22070, 22071, 22072, 22073 were selected from the ORFs having the nucleotide sequence represented by SEQ ID NO: 1463.

[1952] The probes having the nucleotide sequence represented by SEQ ID NOS: 22074, 22075, 22076, 22077, 22078, 22079, 22080, 22081, 22082, 22083, 22084 were selected from the ORFs having the nucleotide sequence represented by SEQ ID NO: 1464.

[1953] The probes having the nucleotide sequence represented by SEQ ID NOS: 22085, 22086, 22087, 22088, 22089, 22090, 22091, 22092, 22093, 22094, 22095 were selected from the ORFs having the nucleotide sequence represented by SEQ ID NO: 1465.

[1954] The probes having the nucleotide sequence represented by SEQ ID NOS: 22096, 22097, 22098, 22099, 22100, 22101, 22102, 22103, 22104, 22105, 22106 were selected from the ORFs having the nucleotide sequence represented by SEQ ID NO: 1466.

[1955] The probes having the nucleotide sequence represented by SEQ ID NOS: 22107, 22108, 22109, 22110, 22111, 22112, 22113, 22114, 22115, 22116, 22117 were selected from the ORFs having the nucleotide sequence represented by SEQ ID NO: 1467.

[1956] The probes having the nucleotide sequence represented by SEQ ID NOS: 22118, 22119, 22120, 22121, 22122, 22123, 22124, 22125, 22126, 22127, 22128 were selected from the ORFs having the nucleotide sequence represented by SEQ ID NO: 1468.

[1957] The probes having the nucleotide sequence represented by SEQ ID NOS: 22129, 22130, 22131, 22132, 22133, 22134, 22135, 22136, 22137, 22138, 22139 were selected from the ORFs having the nucleotide sequence represented by SEQ ID NO: 1469.

[1958] The probes having the nucleotide sequence represented by SEQ ID NOS: 22140, 22141, 22142, 22143, 22144, 22145, 22146, 22147, 22148, 22149, 22150 were selected from the ORFs having the nucleotide sequence represented by SEQ ID NO: 1470.

[1959] The probes having the nucleotide sequence represented by SEQ ID NOS: 22151, 22152, 22153, 22154, 22155, 22156, 22157, 22158, 22159, 22160, 22161 were selected from the ORFs having the nucleotide sequence represented by SEQ ID NO: 1471.

[1960] The probes having the nucleotide sequence represented by SEQ ID NOS: 22162, 22163, 22164, 22165, 22166, 22167, 22168, 22169, 22170, 22171, 22172 were selected from the ORFs having the nucleotide sequence represented by SEQ ID NO: 1472.

[1961] The probes having the nucleotide sequence represented by SEQ ID NOS: 22173, 22174, 22175, 22176, 22177, 22178, 22179, 22180, 22181, 22182, 22183 were selected from the ORFs having the nucleotide sequence represented by SEQ ID NO: 1473.

[1962] The probes having the nucleotide sequence represented by SEQ ID NOS: 22184, 22185, 22186, 22187, 22188, 22189, 22190, 22191, 22192, 22193, 22194 were selected from the ORFs having the nucleotide sequence represented by SEQ ID NO: 1474.

[1963] The probes having the nucleotide sequence represented by SEQ ID NOS: 22195, 22196, 22197, 22198, 22199, 22200, 22201, 22202, 22203, 22204, 22205 were selected from the ORFs having the nucleotide sequence represented by SEQ ID NO: 1475.

[1964] The probes having the nucleotide sequence represented by SEQ ID NOS: 22206, 22207, 22208, 22209, 22210, 22211, 22212, 22213, 22214, 22215, 22216 were selected from the ORFs having the nucleotide sequence represented by SEQ ID NO: 1476.

[1965] The probes having the nucleotide sequence represented by SEQ ID NOS: 22217, 22218, 22219, 22220, 22221, 22222, 22223, 22224, 22225, 22226, 22227 were selected from the ORFs having the nucleotide sequence represented by SEQ ID NO: 1477.

[1966] The probes having the nucleotide sequence represented by SEQ ID NOS: 22228, 22229, 22230, 22231, 22232, 22233, 22234, 22235, 22236, 22237, 22238 were selected from the ORFs having the nucleotide sequence represented by SEQ ID NO: 1478.

[1967] The probes having the nucleotide sequence represented by SEQ ID NOS: 22239, 22240, 22241, 22242, 22243, 22244, 22245, 22246, 22247, 22248, 22249 were selected from the ORFs having the nucleotide sequence represented by SEQ ID NO: 1479.

[1968] The probes having the nucleotide sequence represented by SEQ ID NOS: 22250, 22251, 22252, 22253, 22254, 22255, 22256, 22257, 22258, 22259, 22260 were selected from the ORFs having the nucleotide sequence represented by SEQ ID NO: 1480.

[1969] The probes having the nucleotide sequence represented by SEQ ID NOS: 22261, 22262, 22263, 22264, 22265, 22266, 22267, 22268, 22269, 22270, 22271 were selected from the ORFs having the nucleotide sequence represented by SEQ ID NO: 1481.

[1970] The probes having the nucleotide sequence represented by SEQ ID NOS: 22272, 22273, 22274, 22275, 22276, 22277, 22278, 22279, 22280, 22281, 22282 were selected from the ORFs having the nucleotide sequence represented by SEQ ID NO: 1482.

[1971] The probes having the nucleotide sequence represented by SEQ ID NOS: 22283, 22284, 22285, 22286, 22287, 22288, 22289, 22290, 22291, 22292, 22293 were selected from the ORFs having the nucleotide sequence represented by SEQ ID NO: 1483.

[1972] The probes having the nucleotide sequence represented by SEQ ID NOS: 22294, 22295, 22296, 22297, 22298, 22299, 22300, 22301, 22302, 22303, 22304 were selected from the ORFs having the nucleotide sequence represented by SEQ ID NO: 1484.

[1973] The probes having the nucleotide sequence represented by SEQ ID NOS: 22305, 22306, 22307, 22308, 22309, 22310, 22311, 22312, 22313, 22314, 22315 were selected from the ORFs having the nucleotide sequence represented by SEQ ID NO: 1485.

[1974] The probes having the nucleotide sequence represented by SEQ ID NOS: 22316, 22317, 22318, 22319, 22320, 22321, 22322, 22323, 22324, 22325, 22326 were selected from the ORFs having the nucleotide sequence represented by SEQ ID NO: 1486.

[1975] The probes having the nucleotide sequence represented by SEQ ID NOS: 22327, 22328, 22329, 22330, 22331, 22332, 22333, 22334, 22335, 22336, 22337 were selected from the ORFs having the nucleotide sequence represented by SEQ ID NO: 1487.

[1976] The probes having the nucleotide sequence represented by SEQ ID NOS: 22338, 22339, 22340, 22341, 22342, 22343, 22344, 22345, 22346, 22347, 22348 were selected from the ORFs having the nucleotide sequence represented by SEQ ID NO: 1488.

[1977] The probes having the nucleotide sequence represented by SEQ ID NOS: 22349, 22350, 22351, 22352, 22353, 22354, 22355, 22356, 22357, 22358, 22359 were selected from the ORFs having the nucleotide sequence represented by SEQ ID NO: 1489.

[1978] The probes having the nucleotide sequence represented by SEQ ID NOS: 22360, 22361, 22362, 22363, 22364, 22365, 22366, 22367, 22368, 22369, 22370 were selected from the ORFs having the nucleotide sequence represented by SEQ ID NO: 1490.

[1979] The probes having the nucleotide sequence represented by SEQ ID NOS: 22371, 22372, 22373, 22374, 22375, 22376, 22377, 22378, 22379, 22380, 22381 were selected from the ORFs having the nucleotide sequence represented by SEQ ID NO: 1491.

[1980] The probes having the nucleotide sequence represented by SEQ ID NOS: 22382, 22383, 22384, 22385, 22386, 22387, 22388, 22389, 22390, 22391, 22392 were selected from the ORFs having the nucleotide sequence represented by SEQ ID NO: 1492.

[1981] The probes having the nucleotide sequence represented by SEQ ID NOS: 22393, 22394, 22395, 22396, 22397, 22398, 22399, 22400, 22401, 22402, 22403 were selected from the ORFs having the nucleotide sequence represented by SEQ ID NO: 1493.

[1982] The probes having the nucleotide sequence represented by SEQ ID NOS: 22404, 22405, 22406, 22407, 22408, 22409, 22410, 22411, 22412, 22413, 22414 were selected from the ORFs having the nucleotide sequence represented by SEQ ID NO: 1494.

[1983] The probes having the nucleotide sequence represented by SEQ ID NOS: 22415, 22416, 22417, 22418, 22419, 22420, 22421, 22422, 22423, 22424, 22425 were selected from the ORFs having the nucleotide sequence represented by SEQ ID NO: 1495.

[1984] The probes having the nucleotide sequence represented by SEQ ID NOS: 22426, 22427, 22428, 22429, 22430, 22431, 22432, 22433, 22434, 22435, 22436 were selected from the ORFs having the nucleotide sequence represented by SEQ ID NO: 1496.

[1985] The probes having the nucleotide sequence represented by SEQ ID NOS: 22437, 22438, 22439, 22440, 22441, 22442, 22443, 22444, 22445, 22446, 22447 were selected from the ORFs having the nucleotide sequence represented by SEQ ID NO: 1497.

[1986] The probes having the nucleotide sequence represented by SEQ ID NOS: 22448, 22449, 22450, 22451, 22452, 22453, 22454, 22455, 22456, 22457, 22458 were selected from the ORFs having the nucleotide sequence represented by SEQ ID NO: 1498.

[1987] The probes having the nucleotide sequence represented by SEQ ID NOS: 22459, 22460, 22461, 22462, 22463, 22464, 22465, 22466, 22467, 22468, 22469 were selected from the ORFs having the nucleotide sequence represented by SEQ ID NO: 1499.

[1988] The probes having the nucleotide sequence represented by SEQ ID NOS: 22470, 22471, 22472, 22473, 22474, 22475, 22476, 22477, 22478, 22479, 22480 were selected from the ORFs having the nucleotide sequence represented by SEQ ID NO: 1500.

[1989] The probes having the nucleotide sequence represented by SEQ ID NOS: 22481, 22482, 22483, 22484, 22485, 22486, 22487, 22488, 22489, 22490, 22491 were selected from the ORFs having the nucleotide sequence represented by SEQ ID NO: 1501.

[1990] The probes having the nucleotide sequence represented by SEQ ID NOS: 22492, 22493, 22494, 22495, 22496, 22497, 22498, 22499, 22500, 22501, 22502 were selected from the ORFs having the nucleotide sequence represented by SEQ ID NO: 1502.

[1991] The probes having the nucleotide sequence represented by SEQ ID NOS: 22503, 22504, 22505, 22506, 22507, 22508, 22509, 22510, 22511, 22512, 22513 were selected from the ORFs having the nucleotide sequence represented by SEQ ID NO: 1503.

[1992] The probes having the nucleotide sequence represented by SEQ ID NOS: 22514, 22515, 22516, 22517, 22518, 22519, 22520, 22521, 22522, 22523, 22524 were selected from the ORFs having the nucleotide sequence represented by SEQ ID NO: 1504.

[1993] The probes having the nucleotide sequence represented by SEQ ID NOS: 22525, 22526, 22527, 22528, 22529, 22530, 22531, 22532, 22533, 22534, 22535 were selected from the ORFs having the nucleotide sequence represented by SEQ ID NO: 1505.

[1994] The probes having the nucleotide sequence represented by SEQ ID NOS: 22536, 22537, 22538, 22539, 22540, 22541, 22542, 22543, 22544, 22545, 22546 were selected from the ORFs having the nucleotide sequence represented by SEQ ID NO: 1506.

[1995] The probes having the nucleotide sequence represented by SEQ ID NOS: 22547, 22548, 22549, 22550, 22551, 22552, 22553, 22554, 22555, 22556, 22557 were selected from the ORFs having the nucleotide sequence represented by SEQ ID NO: 1507.

[1996] The probes having the nucleotide sequence represented by SEQ ID NOS: 22558, 22559, 22560, 22561, 22562, 22563, 22564, 22565, 22566, 22567, 22568 were selected from the ORFs having the nucleotide sequence represented by SEQ ID NO: 1508.

[1997] The probes having the nucleotide sequence represented by SEQ ID NOS: 22569, 22570, 22571, 22572, 22573, 22574, 22575, 22576, 22577, 22578, 22579 were selected from the ORFs having the nucleotide sequence represented by SEQ ID NO: 1509.

[1998] The probes having the nucleotide sequence represented by SEQ ID NOS: 22580, 22581, 22582, 22583, 22584, 22585, 22586, 22587, 22588, 22589, 22590 were selected from the ORFs having the nucleotide sequence represented by SEQ ID NO: 1510.

[1999] The probes having the nucleotide sequence represented by SEQ ID NOS: 22591, 22592, 22593, 22594, 22595, 22596, 22597, 22598, 22599, 22600, 22601 were selected from the ORFs having the nucleotide sequence represented by SEQ ID NO: 1511.

[2000] The probes having the nucleotide sequence represented by SEQ ID NOS: 22602, 22603, 22604, 22605, 22606, 22607, 22608, 22609, 22610, 22611, 22612 were selected from the ORFs having the nucleotide sequence represented by SEQ ID NO: 1512.

[2001] The probes having the nucleotide sequence represented by SEQ ID NOS: 22613, 22614, 22615, 22616, 22617, 22618, 22619, 22620, 22621, 22622, 22623 were selected from the ORFs having the nucleotide sequence represented by SEQ ID NO: 1513.

[2002] The probes having the nucleotide sequence represented by SEQ ID NOS: 22624, 22625, 22626, 22627, 22628, 22629, 22630, 22631, 22632, 22633, 22634 were selected from the ORFs having the nucleotide sequence represented by SEQ ID NO: 1514.

[2003] The probes having the nucleotide sequence represented by SEQ ID NOS: 22635, 22636, 22637, 22638, 22639, 22640, 22641, 22642, 22643, 22644, 22645 were selected from the ORFs having the nucleotide sequence represented by SEQ ID NO: 1515.

[2004] The probes having the nucleotide sequence represented by SEQ ID NOS: 22646, 22647, 22648, 22649, 22650, 22651, 22652, 22653, 22654, 22655, 22656 were selected from the ORFs having the nucleotide sequence represented by SEQ ID NO: 1516.

[2005] The probes having the nucleotide sequence represented by SEQ ID NOS: 22657, 22658, 22659, 22660, 22661, 22662, 22663, 22664, 22665, 22666, 22667 were selected from the ORFs having the nucleotide sequence represented by SEQ ID NO: 1517.

[2006] The probes having the nucleotide sequence represented by SEQ ID NOS: 22668, 22669, 22670, 22671, 22672, 22673, 22674, 22675, 22676, 22677, 22678 were selected from the ORFs having the nucleotide sequence represented by SEQ ID NO: 1518.

[2007] The probes having the nucleotide sequence represented by SEQ ID NOS: 22679, 22680, 22681, 22682, 22683, 22684, 22685, 22686, 22687, 22688, 22689 were selected from the ORFs having the nucleotide sequence represented by SEQ ID NO: 1519.

[2008] The probes having the nucleotide sequence represented by SEQ ID NOS: 22690, 22691, 22692, 22693, 22694, 22695, 22696, 22697, 22698, 22699, 22700 were selected from the ORFs having the nucleotide sequence represented by SEQ ID NO: 1520.

[2009] The probes having the nucleotide sequence represented by SEQ ID NOS: 22701, 22702, 22703, 22704, 22705, 22706, 22707, 22708, 22709, 22710, 22711 were selected from the ORFs having the nucleotide sequence represented by SEQ ID NO: 1521.

[2010] The probes having the nucleotide sequence represented by SEQ ID NOS: 22712, 22713, 22714, 22715, 22716, 22717, 22718, 22719, 22720, 22721, 22722 were selected from the ORFs having the nucleotide sequence represented by SEQ ID NO: 1522.

[2011] The probes having the nucleotide sequence represented by SEQ ID NOS: 22723, 22724, 22725, 22726, 22727, 22728, 22729, 22730, 22731, 22732, 22733 were selected from the ORFs having the nucleotide sequence represented by SEQ ID NO: 1523.

[2012] The probes having the nucleotide sequence represented by SEQ ID NOS: 22734, 22735, 22736, 22737, 22738, 22739, 22740, 22741, 22742, 22743, 22744 were selected from the ORFs having the nucleotide sequence represented by SEQ ID NO: 1524.

[2013] The probes having the nucleotide sequence represented by SEQ ID NOS: 22745, 22746, 22747, 22748, 22749, 22750, 22751, 22752, 22753, 22754, 22755 were selected from the ORFs having the nucleotide sequence represented by SEQ ID NO: 1525.

[2014] The probes having the nucleotide sequence represented by SEQ ID NOS: 22756, 22757, 22758, 22759, 22760, 22761, 22762, 22763, 22764, 22765, 22766 were selected from the ORFs having the nucleotide sequence represented by SEQ ID NO: 1526.

[2015] The probes having the nucleotide sequence represented by SEQ ID NOS: 22767, 22768, 22769, 22770, 22771, 22772, 22773, 22774, 22775, 22776, 22777 were selected from the ORFs having the nucleotide sequence represented by SEQ ID NO: 1527.

[2016] The probes having the nucleotide sequence represented by SEQ ID NOS: 22778, 22779, 22780, 22781, 22782, 22783, 22784, 22785, 22786, 22787, 22788 were selected from the ORFs having the nucleotide sequence represented by SEQ ID NO: 1528.

[2017] The probes having the nucleotide sequence represented by SEQ ID NOS: 22789, 22790, 22791, 22792, 22793, 22794, 22795, 22796, 22797, 22798, 22799 were selected from the ORFs having the nucleotide sequence represented by SEQ ID NO: 1529.

[2018] The probes having the nucleotide sequence represented by SEQ ID NOS: 22800, 22801, 22802, 22803, 22804, 22805, 22806, 22807, 22808, 22809, 22810 were selected from the ORFs having the nucleotide sequence represented by SEQ ID NO: 1530.

[2019] The probes having the nucleotide sequence represented by SEQ ID NOS: 22811, 22812, 22813, 22814, 22815, 22816, 22817, 22818, 22819, 22820, 22821 were selected from the ORFs having the nucleotide sequence represented by SEQ ID NO: 1531.

[2020] The probes having the nucleotide sequence represented by SEQ ID NOS: 22822, 22823, 22824, 22825, 22826, 22827, 22828, 22829, 22830, 22831, 22832 were selected from the ORFs having the nucleotide sequence represented by SEQ ID NO: 1532.

[2021] The probes having the nucleotide sequence represented by SEQ ID NOS: 22833, 22834, 22835, 22836, 22837, 22838, 22839, 22840, 22841, 22842, 22843 were selected from the ORFs having the nucleotide sequence represented by SEQ ID NO: 1533.

[2022] The probes having the nucleotide sequence represented by SEQ ID NOS: 22844, 22845, 22846, 22847, 22848, 22849, 22850, 22851, 22852, 22853, 22854 were selected from the ORFs having the nucleotide sequence represented by SEQ ID NO: 1534.

[2023] The probes having the nucleotide sequence represented by SEQ ID NOS: 22855, 22856, 22857, 22858, 22859, 22860, 22861, 22862, 22863, 22864, 22865 were selected from the ORFs having the nucleotide sequence represented by SEQ ID NO: 1535.

[2024] The probes having the nucleotide sequence represented by SEQ ID NOS: 22866, 22867, 22868, 22869, 22870, 22871, 22872, 22873, 22874, 22875, 22876 were selected from the ORFs having the nucleotide sequence represented by SEQ ID NO: 1536.

[2025] The probes having the nucleotide sequence represented by SEQ ID NOS: 22877, 22878, 22879, 22880, 22881, 22882, 22883, 22884, 22885, 22886, 22887 were selected from the ORFs having the nucleotide sequence represented by SEQ ID NO: 1537.

[2026] The probes having the nucleotide sequence represented by SEQ ID NOS: 22888, 22889, 22890, 22891, 22892, 22893, 22894, 22895, 22896, 22897, 22898 were selected from the ORFs having the nucleotide sequence represented by SEQ ID NO: 1538.

[2027] The probes having the nucleotide sequence represented by SEQ ID NOS: 22899, 22900, 22901, 22902, 22903, 22904, 22905, 22906, 22907, 22908, 22909 were selected from the ORFs having the nucleotide sequence represented by SEQ ID NO: 1539.

[2028] The probes having the nucleotide sequence represented by SEQ ID NOS: 22910, 22911, 22912, 22913, 22914, 22915, 22916, 22917, 22918, 22919, 22920 were selected from the ORFs having the nucleotide sequence represented by SEQ ID NO: 1540.

[2029] The probes having the nucleotide sequence represented by SEQ ID NOS: 22921, 22922, 22923, 22924, 22925, 22926, 22927, 22928, 22929, 22930, 22931 were selected from the ORFs having the nucleotide sequence represented by SEQ ID NO: 1541.

[2030] The probes having the nucleotide sequence represented by SEQ ID NOS: 22932, 22933, 22934, 22935, 22936, 22937, 22938, 22939, 22940, 22941, 22942 were selected from the ORFs having the nucleotide sequence represented by SEQ ID NO: 1542.

[2031] The probes having the nucleotide sequence represented by SEQ ID NOS: 22943, 22944, 22945, 22946, 22947, 22948, 22949, 22950, 22951, 22952, 22953 were selected from the ORFs having the nucleotide sequence represented by SEQ ID NO: 1543.

[2032] The probes having the nucleotide sequence represented by SEQ ID NOS: 22954, 22955, 22956, 22957, 22958, 22959, 22960, 22961, 22962, 22963, 22964 were selected from the ORFs having the nucleotide sequence represented by SEQ ID NO: 1544.

[2033] The probes having the nucleotide sequence represented by SEQ ID NOS: 22965, 22966, 22967, 22968, 22969, 22970, 22971, 22972, 22973, 22974, 22975 were selected from the ORFs having the nucleotide sequence represented by SEQ ID NO: 1545.

[2034] The probes having the nucleotide sequence represented by SEQ ID NOS: 22976, 22977, 22978, 22979, 22980, 22981, 22982, 22983, 22984, 22985, 22986 were selected from the ORFs having the nucleotide sequence represented by SEQ ID NO: 1546.

[2035] The probes having the nucleotide sequence represented by SEQ ID NOS: 22987, 22988, 22989, 22990, 22991, 22992, 22993, 22994, 22995, 22996, 22997 were selected from the ORFs having the nucleotide sequence represented by SEQ ID NO: 1547.

[2036] The probes having the nucleotide sequence represented by SEQ ID NOS: 22998, 22999, 23000, 23001, 23002, 23003, 23004, 23005, 23006, 23007, 23008 were selected from the ORFs having the nucleotide sequence represented by SEQ ID NO: 1548.

[2037] The probes having the nucleotide sequence represented by SEQ ID NOS: 23009, 23010, 23011, 23012, 23013, 23014, 23015, 23016, 23017, 23018, 23019 were selected from the ORFs having the nucleotide sequence represented by SEQ ID NO: 1549.

[2038] The probes having the nucleotide sequence represented by SEQ ID NOS: 23020, 23021, 23022, 23023, 23024, 23025, 23026, 23027, 23028, 23029, 23030 were selected from the ORFs having the nucleotide sequence represented by SEQ ID NO: 1550.

[2039] The probes having the nucleotide sequence represented by SEQ ID NOS: 23031, 23032, 23033, 23034, 23035, 23036, 23037, 23038, 23039, 23040, 23041 were selected from the ORFs having the nucleotide sequence represented by SEQ ID NO: 1551.

[2040] The probes having the nucleotide sequence represented by SEQ ID NOS: 23042, 23043, 23044, 23045, 23046, 23047, 23048, 23049, 23050, 23051, 23052 were selected from the ORFs having the nucleotide sequence represented by SEQ ID NO: 1552.

[2041] The probes having the nucleotide sequence represented by SEQ ID NOS: 23053, 23054, 23055, 23056, 23057, 23058, 23059, 23060, 23061, 23062, 23063 were selected from the ORFs having the nucleotide sequence represented by SEQ ID NO: 1553.

[2042] The probes having the nucleotide sequence represented by SEQ ID NOS: 23064, 23065, 23066, 23067, 23068, 23069, 23070, 23071, 23072, 23073, 23074 were selected from the ORFs having the nucleotide sequence represented by SEQ ID NO: 1554.

[2043] The probes having the nucleotide sequence represented by SEQ ID NOS: 23075, 23076, 23077, 23078, 23079, 23080, 23081, 23082, 23083, 23084, 23085 were selected from the ORFs having the nucleotide sequence represented by SEQ ID NO: 1555.

[2044] The probes having the nucleotide sequence represented by SEQ ID NOS: 23086, 23087, 23088, 23089, 23090, 23091, 23092, 23093, 23094, 23095, 23096 were selected from the ORFs having the nucleotide sequence represented by SEQ ID NO: 1556.

[2045] The probes having the nucleotide sequence represented by SEQ ID NOS: 23097, 23098, 23099, 23100, 23101, 23102, 23103, 23104, 23105, 23106, 23107 were selected from the ORFs having the nucleotide sequence represented by SEQ ID NO: 1557.

[2046] The probes having the nucleotide sequence represented by SEQ ID NOS: 23108, 23109, 23110, 23111, 23112, 23113, 23114, 23115, 23116, 23117, 23118, 23119, 23120, 23121, 23122, 23123, 23124, 23125, 23126, 23127, 23128, 23129 were selected from the ORFs having the nucleotide sequence represented by SEQ ID NO: 1558.

[2047] The probes having the nucleotide sequence represented by SEQ ID NOS: 23130, 23131, 23132, 23133, 23134, 23135, 23136, 23137, 23138, 23139, 23140 were selected from the ORFs having the nucleotide sequence represented by SEQ ID NO: 1559.

[2048] The probes having the nucleotide sequence represented by SEQ ID NOS: 23141, 23142, 23143, 23144, 23145, 23146, 23147, 23148, 23149, 23150, 23151 were selected from the ORFs having the nucleotide sequence represented by SEQ ID NO: 1560.

[2049] The probes having the nucleotide sequence represented by SEQ ID NOS: 23152, 23153, 23154, 23155, 23156, 23157, 23158, 23159, 23160, 23161, 23162 were selected from the ORFs having the nucleotide sequence represented by SEQ ID NO: 1561.

[2050] The probes having the nucleotide sequence represented by SEQ ID NOS: 23163, 23164, 23165, 23166, 23167, 23168, 23169, 23170, 23171, 23172, 23173 were selected from the ORFs having the nucleotide sequence represented by SEQ ID NO: 1562.

[2051] The probes having the nucleotide sequence represented by SEQ ID NOS: 23174, 23175, 23176, 23177, 23178, 23179, 23180, 23181, 23182, 23183, 23184 were selected from the ORFs having the nucleotide sequence represented by SEQ ID NO: 1563.

[2052] The probes having the nucleotide sequence represented by SEQ ID NOS: 23185, 23186, 23187, 23188, 23189, 23190, 23191, 23192, 23193, 23194, 23195 were selected from the ORFs having the nucleotide sequence represented by SEQ ID NO: 1564.

[2053] The probes having the nucleotide sequence represented by SEQ ID NOS: 23196, 23197, 23198, 23199, 23200, 23201, 23202, 23203, 23204, 23205, 23206 were selected from the ORFs having the nucleotide sequence represented by SEQ ID NO: 1565.

[2054] The probes having the nucleotide sequence represented by SEQ ID NOS: 23207, 23208, 23209, 23210, 23211, 23212, 23213, 23214, 23215, 23216, 23217 were selected from the ORFs having the nucleotide sequence represented by SEQ ID NO: 1566.

[2055] The probes having the nucleotide sequence represented by SEQ ID NOS: 23218, 23219, 23220, 23221, 23222, 23223, 23224, 23225, 23226, 23227, 23228 were selected from the ORFs having the nucleotide sequence represented by SEQ ID NO: 1567.

[2056] The probes having the nucleotide sequence represented by SEQ ID NOS: 23229, 23230, 23231, 23232, 23233, 23234, 23235, 23236, 23237, 23238, 23239 were selected from the ORFs having the nucleotide sequence represented by SEQ ID NO: 1568.

[2057] The probes having the nucleotide sequence represented by SEQ ID NOS: 23240, 23241, 23242, 23243, 23244, 23245, 23246, 23247, 23248, 23249, 23250 were selected from the ORFs having the nucleotide sequence represented by SEQ ID NO: 1569.

[2058] The probes having the nucleotide sequence represented by SEQ ID NOS: 23251, 23252, 23253, 23254, 23255, 23256, 23257, 23258, 23259, 23260, 23261 were selected from the ORFs having the nucleotide sequence represented by SEQ ID NO: 1570.

[2059] The probes having the nucleotide sequence represented by SEQ ID NOS: 23262, 23263, 23264, 23265, 23266, 23267, 23268, 23269, 23270, 23271, 23272 were selected from the ORFs having the nucleotide sequence represented by SEQ ID NO: 1571.

[2060] The probes having the nucleotide sequence represented by SEQ ID NOS: 23273, 23274, 23275, 23276, 23277, 23278, 23279, 23280, 23281, 23282, 23283 were selected from the ORFs having the nucleotide sequence represented by SEQ ID NO: 1572.

[2061] The probes having the nucleotide sequence represented by SEQ ID NOS: 23284, 23285, 23286, 23287, 23288, 23289, 23290, 23291, 23292, 23293, 23294 were selected from the ORFs having the nucleotide sequence represented by SEQ ID NO: 1573.

[2062] The probes having the nucleotide sequence represented by SEQ ID NOS: 23295, 23296, 23297, 23298, 23299, 23300, 23301, 23302, 23303, 23304, 23305 were selected from the ORFs having the nucleotide sequence represented by SEQ ID NO: 1574.

[2063] The probes having the nucleotide sequence represented by SEQ ID NOS: 23306, 23307, 23308, 23309, 23310, 23311, 23312, 23313, 23314, 23315, 23316 were selected from the ORFs having the nucleotide sequence represented by SEQ ID NO: 1575.

[2064] The probes having the nucleotide sequence represented by SEQ ID NOS: 23317, 23318, 23319, 23320, 23321, 23322, 23323, 23324, 23325, 23326, 23327 were selected from the ORFs having the nucleotide sequence represented by SEQ ID NO: 1576.

[2065] The probes having the nucleotide sequence represented by SEQ ID NOS: 23328, 23329, 23330, 23331, 23332, 23333, 23334, 23335, 23336, 23337, 23338 were selected from the ORFs having the nucleotide sequence represented by SEQ ID NO: 1577.

[2066] The probes having the nucleotide sequence represented by SEQ ID NOS: 23339, 23340, 23341, 23342, 23343, 23344, 23345, 23346, 23347, 23348, 23349 were selected from the ORFs having the nucleotide sequence represented by SEQ ID NO: 1578.

[2067] The probes having the nucleotide sequence represented by SEQ ID NOS: 23350, 23351, 23352, 23353, 23354, 23355, 23356, 23357, 23358, 23359, 23360 were selected from the ORFs having the nucleotide sequence represented by SEQ ID NO: 1579.

[2068] The probes having the nucleotide sequence represented by SEQ ID NOS: 23361, 23362, 23363, 23364, 23365, 23366, 23367, 23368, 23369, 23370, 23371 were selected from the ORFs having the nucleotide sequence represented by SEQ ID NO: 1580.

[2069] The probes having the nucleotide sequence represented by SEQ ID NOS: 23372, 23373, 23374, 23375, 23376, 23377, 23378, 23379, 23380, 23381, 23382 were selected from the ORFs having the nucleotide sequence represented by SEQ ID NO: 1581.

[2070] The probes having the nucleotide sequence represented by SEQ ID NOS: 23383, 23384, 23385, 23386, 23387, 23388, 23389, 23390, 23391, 23392, 23393 were selected from the ORFs having the nucleotide sequence represented by SEQ ID NO: 1582.

[2071] The probes having the nucleotide sequence represented by SEQ ID NOS: 23394, 23395, 23396, 23397, 23398, 23399, 23400, 23401, 23402, 23403, 23404 were selected from the ORFs having the nucleotide sequence represented by SEQ ID NO: 1583.

[2072] The probes having the nucleotide sequence represented by SEQ ID NOS: 23405, 23406, 23407, 23408, 23409, 23410, 23411, 23412, 23413, 23414, 23415 were selected from the ORFs having the nucleotide sequence represented by SEQ ID NO: 1584.

[2073] The probes having the nucleotide sequence represented by SEQ ID NOS: 23416, 23417, 23418, 23419, 23420, 23421, 23422, 23423, 23424, 23425, 23426 were selected from the ORFs having the nucleotide sequence represented by SEQ ID NO: 1585.

[2074] The probes having the nucleotide sequence represented by SEQ ID NOS: 23427, 23428, 23429, 23430, 23431, 23432, 23433, 23434, 23435, 23436, 23437 were selected from the ORFs having the nucleotide sequence represented by SEQ ID NO: 1586.

[2075] The probes having the nucleotide sequence represented by SEQ ID NOS: 23438, 23439, 23440, 23441, 23442, 23443, 23444, 23445, 23446, 23447, 23448 were selected from the ORFs having the nucleotide sequence represented by SEQ ID NO: 1587.

[2076] The probes having the nucleotide sequence represented by SEQ ID NOS: 23449, 23450, 23451, 23452, 23453, 23454, 23455, 23456, 23457, 23458, 23459 were selected from the ORFs having the nucleotide sequence represented by SEQ ID NO: 1588.

[2077] The probes having the nucleotide sequence represented by SEQ ID NOS: 23460, 23461, 23462, 23463, 23464, 23465, 23466, 23467, 23468, 23469, 23470 were selected from the ORFs having the nucleotide sequence represented by SEQ ID NO: 1589.

[2078] The probes having the nucleotide sequence represented by SEQ ID NOS: 23471, 23472, 23473, 23474, 23475, 23476, 23477, 23478, 23479, 23480, 23481 were selected from the ORFs having the nucleotide sequence represented by SEQ ID NO: 1590.

[2079] The probes having the nucleotide sequence represented by SEQ ID NOS: 23482, 23483, 23484, 23485, 23486, 23487, 23488, 23489, 23490, 23491, 23492 were selected from the ORFs having the nucleotide sequence represented by SEQ ID NO: 1591.

[2080] The probes having the nucleotide sequence represented by SEQ ID NOS: 23493, 23494, 23495, 23496, 23497, 23498, 23499, 23500, 23501, 23502, 23503 were selected from the ORFs having the nucleotide sequence represented by SEQ ID NO: 1592.

[2081] The probes having the nucleotide sequence represented by SEQ ID NOS: 23504, 23505, 23506, 23507, 23508, 23509, 23510, 23511, 23512, 23513, 23514 were selected from the ORFs having the nucleotide sequence represented by SEQ ID NO: 1593.

[2082] The probes having the nucleotide sequence represented by SEQ ID NOS: 23515, 23516, 23517, 23518, 23519, 23520, 23521, 23522, 23523, 23524, 23525 were selected from the ORFs having the nucleotide sequence represented by SEQ ID NO: 1594.

[2083] The probes having the nucleotide sequence represented by SEQ ID NOS: 23526, 23527, 23528, 23529, 23530, 23531, 23532, 23533, 23534, 23535, 23536 were selected from the ORFs having the nucleotide sequence represented by SEQ ID NO: 1595.

[2084] The probes having the nucleotide sequence represented by SEQ ID NOS: 23537, 23538, 23539, 23540, 23541, 23542, 23543, 23544, 23545, 23546, 23547 were selected from the ORFs having the nucleotide sequence represented by SEQ ID NO: 1596.

[2085] The probes having the nucleotide sequence represented by SEQ ID NOS: 23548, 23549, 23550, 23551, 23552, 23553, 23554, 23555, 23556, 23557, 23558 were selected from the ORFs having the nucleotide sequence represented by SEQ ID NO: 1597.

[2086] The probes having the nucleotide sequence represented by SEQ ID NOS: 23559, 23560, 23561, 23562, 23563, 23564, 23565, 23566, 23567, 23568, 23569 were selected from the ORFs having the nucleotide sequence represented by SEQ ID NO: 1598.

[2087] The probes having the nucleotide sequence represented by SEQ ID NOS: 23570, 23571, 23572, 23573, 23574, 23575, 23576, 23577, 23578, 23579, 23580 were selected from the ORFs having the nucleotide sequence represented by SEQ ID NO: 1599.

[2088] The probes having the nucleotide sequence represented by SEQ ID NOS: 23581, 23582, 23583, 23584, 23585, 23586, 23587, 23588, 23589, 23590, 23591 were selected from the ORFs having the nucleotide sequence represented by SEQ ID NO: 1600.

[2089] The probes having the nucleotide sequence represented by SEQ ID NOS: 23592, 23593, 23594, 23595, 23596, 23597, 23598, 23599, 23600, 23601, 23602 were selected from the ORFs having the nucleotide sequence represented by SEQ ID NO: 1601.

[2090] The probes having the nucleotide sequence represented by SEQ ID NOS: 23603, 23604, 23605, 23606, 23607, 23608, 23609, 23610, 23611, 23612, 23613 were selected from the ORFs having the nucleotide sequence represented by SEQ ID NO: 1602.

[2091] The probes having the nucleotide sequence represented by SEQ ID NOS: 23614, 23615, 23616, 23617, 23618, 23619, 23620, 23621, 23622, 23623, 23624 were selected from the ORFs having the nucleotide sequence represented by SEQ ID NO: 1603.

[2092] The probes having the nucleotide sequence represented by SEQ ID NOS: 23625, 23626, 23627, 23628, 23629, 23630, 23631, 23632, 23633, 23634, 23635 were selected from the ORFs having the nucleotide sequence represented by SEQ ID NO: 1604.

[2093] The probes having the nucleotide sequence represented by SEQ ID NOS: 23636, 23637, 23638, 23639, 23640, 23641, 23642, 23643, 23644, 23645, 23646 were selected from the ORFs having the nucleotide sequence represented by SEQ ID NO: 1605.

[2094] The probes having the nucleotide sequence represented by SEQ ID NOS: 23647, 23648, 23649, 23650, 23651, 23652, 23653, 23654, 23655, 23656, 23657 were selected from the ORFs having the nucleotide sequence represented by SEQ ID NO: 1606.

[2095] The probes having the nucleotide sequence represented by SEQ ID NOS: 23658, 23659, 23660, 23661, 23662, 23663, 23664, 23665, 23666, 23667, 23668 were selected from the ORFs having the nucleotide sequence represented by SEQ ID NO: 1607.

[2096] The probes having the nucleotide sequence represented by SEQ ID NOS: 23669, 23670, 23671, 23672, 23673, 23674, 23675, 23676, 23677, 23678, 23679 were selected from the ORFs having the nucleotide sequence represented by SEQ ID NO: 1608.

[2097] The probes having the nucleotide sequence represented by SEQ ID NOS: 23680, 23681, 23682, 23683, 23684, 23685, 23686, 23687, 23688, 23689, 23690 were selected from the ORFs having the nucleotide sequence represented by SEQ ID NO: 1609.

[2098] The probes having the nucleotide sequence represented by SEQ ID NOS: 23691, 23692, 23693, 23694, 23695, 23696, 23697, 23698, 23699, 23700, 23701 were selected from the ORFs having the nucleotide sequence represented by SEQ ID NO: 1610.

[2099] The probes having the nucleotide sequence represented by SEQ ID NOS: 23702, 23703, 23704, 23705, 23706, 23707, 23708, 23709, 23710, 23711, 23712 were selected from the ORFs having the nucleotide sequence represented by SEQ ID NO: 1611.

[2100] The probes having the nucleotide sequence represented by SEQ ID NOS: 23713, 23714, 23715, 23716, 23717, 23718, 23719, 23720, 23721, 23722, 23723 were selected from the ORFs having the nucleotide sequence represented by SEQ ID NO: 1612.

[2101] The probes having the nucleotide sequence represented by SEQ ID NOS: 23724, 23725, 23726, 23727, 23728, 23729, 23730, 23731, 23732, 23733, 23734 were selected from the ORFs having the nucleotide sequence represented by SEQ ID NO: 1613.

[2102] The probes having the nucleotide sequence represented by SEQ ID NOS: 23735, 23736, 23737, 23738, 23739, 23740, 23741, 23742, 23743, 23744, 23745 were selected from the ORFs having the nucleotide sequence represented by SEQ ID NO: 1614.

[2103] The probes having the nucleotide sequence represented by SEQ ID NOS: 23746, 23747, 23748, 23749, 23750, 23751, 23752, 23753, 23754, 23755, 23756 were selected from the ORFs having the nucleotide sequence represented by SEQ ID NO: 1615.

[2104] The probes having the nucleotide sequence represented by SEQ ID NOS: 23757, 23758, 23759, 23760, 23761, 23762, 23763, 23764, 23765, 23766, 23767 were selected from the ORFs having the nucleotide sequence represented by SEQ ID NO: 1616.

[2105] The probes having the nucleotide sequence represented by SEQ ID NOS: 23768, 23769, 23770, 23771, 23772, 23773, 23774, 23775, 23776, 23777, 23778 were selected from the ORFs having the nucleotide sequence represented by SEQ ID NO: 1617.

[2106] The probes having the nucleotide sequence represented by SEQ ID NOS: 23779, 23780, 23781, 23782, 23783, 23784, 23785, 23786, 23787, 23788, 23789 were selected from the ORFs having the nucleotide sequence represented by SEQ ID NO: 1618.

[2107] The probes having the nucleotide sequence represented by SEQ ID NOS: 23790, 23791, 23792, 23793, 23794, 23795, 23796, 23797, 23798, 23799, 23800 were selected from the ORFs having the nucleotide sequence represented by SEQ ID NO: 1619.

[2108] The probes having the nucleotide sequence represented by SEQ ID NOS: 23801, 23802, 23803, 23804, 23805, 23806, 23807, 23808, 23809, 23810, 23811 were selected from the ORFs having the nucleotide sequence represented by SEQ ID NO: 1620.

[2109] The probes having the nucleotide sequence represented by SEQ ID NOS: 23812, 23813, 23814, 23815, 23816, 23817, 23818, 23819, 23820, 23821, 23822 were selected from the ORFs having the nucleotide sequence represented by SEQ ID NO: 1621.

[2110] The probes having the nucleotide sequence represented by SEQ ID NOS: 23823, 23824, 23825, 23826, 23827, 23828, 23829, 23830, 23831, 23832, 23833 were selected from the ORFs having the nucleotide sequence represented by SEQ ID NO: 1622.

[2111] The probes having the nucleotide sequence represented by SEQ ID NOS: 23834, 23835, 23836, 23837, 23838, 23839, 23840, 23841, 23842, 23843, 23844 were selected from the ORFs having the nucleotide sequence represented by SEQ ID NO: 1623.

[2112] The probes having the nucleotide sequence represented by SEQ ID NOS: 23845, 23846, 23847, 23848, 23849, 23850, 23851, 23852, 23853, 23854, 23855 were selected from the ORFs having the nucleotide sequence represented by SEQ ID NO: 1624.

[2113] The probes having the nucleotide sequence represented by SEQ ID NOS: 23856, 23857, 23858, 23859, 23860, 23861, 23862, 23863, 23864, 23865, 23866 were selected from the ORFs having the nucleotide sequence represented by SEQ ID NO: 1625.

[2114] The probes having the nucleotide sequence represented by SEQ ID NOS: 23867, 23868, 23869, 23870, 23871, 23872, 23873, 23874, 23875, 23876, 23877 were selected from the ORFs having the nucleotide sequence represented by SEQ ID NO: 1626.

[2115] The probes having the nucleotide sequence represented by SEQ ID NOS: 23878, 23879, 23880, 23881, 23882, 23883, 23884, 23885, 23886, 23887, 23888 were selected from the ORFs having the nucleotide sequence represented by SEQ ID NO: 1627.

[2116] The probes having the nucleotide sequence represented by SEQ ID NOS: 23889, 23890, 23891, 23892, 23893, 23894, 23895, 23896, 23897, 23898, 23899 were selected from the ORFs having the nucleotide sequence represented by SEQ ID NO: 1628.

[2117] The probes having the nucleotide sequence represented by SEQ ID NOS: 23900, 23901, 23902, 23903, 23904, 23905, 23906, 23907, 23908, 23909, 23910 were selected from the ORFs having the nucleotide sequence represented by SEQ ID NO: 1629.

[2118] The probes having the nucleotide sequence represented by SEQ ID NOS: 23911, 23912, 23913, 23914, 23915, 23916, 23917, 23918, 23919, 23920, 23921 were selected from the ORFs having the nucleotide sequence represented by SEQ ID NO: 1630.

[2119] The probes having the nucleotide sequence represented by SEQ ID NOS: 23922; 23923, 23924, 23925, 23926, 23927, 23928, 23929, 23930, 23931, 23932 were selected from the ORFs having the nucleotide sequence represented by SEQ ID NO: 1631.

[2120] The probes having the nucleotide sequence represented by SEQ ID NOS: 23933, 23934, 23935, 23936, 23937, 23938, 23939, 23940, 23941, 23942, 23943 were selected from the ORFs having the nucleotide sequence represented by SEQ ID NO: 1632.

[2121] The probes having the nucleotide sequence represented by SEQ ID NOS: 23944, 23945, 23946, 23947, 23948, 23949, 23950, 23951, 23952, 23953, 23954 were selected from the ORFs having the nucleotide sequence represented by SEQ ID NO: 1633.

[2122] The probes having the nucleotide sequence represented by SEQ ID NOS: 23955, 23956, 23957, 23958, 23959, 23960, 23961, 23962, 23963, 23964, 23965 were selected from the ORFs having the nucleotide sequence represented by SEQ ID NO: 1634.

[2123] The probes having the nucleotide sequence represented by SEQ ID NOS: 23966, 23967, 23968, 23969, 23970, 23971, 23972, 23973, 23974, 23975, 23976 were selected from the ORFs having the nucleotide sequence represented by SEQ ID NO: 1635.

[2124] The probes having the nucleotide sequence represented by SEQ ID NOS: 23977, 23978, 23979, 23980, 23981, 23982, 23983, 23984, 23985, 23986, 23987 were selected from the ORFs having the nucleotide sequence represented by SEQ ID NO: 1636.

[2125] The probes having the nucleotide sequence represented by SEQ ID NOS: 23988, 23989, 23990, 23991, 23992, 23993, 23994, 23995, 23996, 23997, 23998 were selected from the ORFs having the nucleotide sequence represented by SEQ ID NO: 1637.

[2126] The probes having the nucleotide sequence represented by SEQ ID NOS: 23999, 24000, 24001, 24002, 24003, 24004, 24005, 24006, 24007, 24008, 24009 were selected from the ORFs having the nucleotide sequence represented by SEQ ID NO: 1638.

[2127] The probes having the nucleotide sequence represented by SEQ ID NOS: 24010, 24011, 24012, 24013, 24014, 24015, 24016, 24017, 24018, 24019, 24020 were selected from the ORFs having the nucleotide sequence represented by SEQ ID NO: 1639.

[2128] The probes having the nucleotide sequence represented by SEQ ID NOS: 24021, 24022, 24023, 24024, 24025, 24026, 24027, 24028, 24029, 24030, 24031 were selected from the ORFs having the nucleotide sequence represented by SEQ ID NO: 1640.

[2129] The probes having the nucleotide sequence represented by SEQ ID NOS: 24032, 24033, 24034, 24035, 24036, 24037, 24038, 24039, 24040, 24041, 24042 were selected from the ORFs having the nucleotide sequence represented by SEQ ID NO: 1641.

[2130] The probes having the nucleotide sequence represented by SEQ ID NOS: 24043, 24044, 24045, 24046, 24047, 24048, 24049, 24050, 24051, 24052, 24053 were selected from the ORFs having the nucleotide sequence represented by SEQ ID NO: 1642.

[2131] The probes having the nucleotide sequence represented by SEQ ID NOS: 24054, 24055, 24056, 24057, 24058, 24059, 24060, 24061, 24062, 24063, 24064 were selected from the ORFs having the nucleotide sequence represented by SEQ ID NO: 1643.

[2132] The probes having the nucleotide sequence represented by SEQ ID NOS: 24065, 24066, 24067, 24068, 24069, 24070, 24071, 24072, 24073, 24074, 24075 were selected from the ORFs having the nucleotide sequence represented by SEQ ID NO: 1644.

[2133] The probes having the nucleotide sequence represented by SEQ ID NOS: 24076, 24077, 24078, 24079, 24080, 24081, 24082, 24083, 24084, 24085, 24086 were selected from the ORFs having the nucleotide sequence represented by SEQ ID NO: 1645.

[2134] The probes having the nucleotide sequence represented by SEQ ID NOS: 24087, 24088, 24089, 24090, 24091, 24092, 24093, 24094, 24095, 24096, 24097 were selected from the ORFs having the nucleotide sequence represented by SEQ ID NO: 1646.

[2135] The probes having the nucleotide sequence represented by SEQ ID NOS: 24098, 24099, 24100, 24101, 24102, 24103, 24104, 24105, 24106, 24107, 24108 were selected from the ORFs having the nucleotide sequence represented by SEQ ID NO: 1647.

[2136] The probes having the nucleotide sequence represented by SEQ ID NOS: 24109, 24110, 24111, 24112, 24113, 24114, 24115, 24116, 24117, 24118, 24119 were selected from the ORFs having the nucleotide sequence represented by SEQ ID NO: 1648.

[2137] The probes having the nucleotide sequence represented by SEQ ID NOS: 24120, 24121, 24122, 24123, 24124, 24125, 24126, 24127, 24128, 24129, 24130 were selected from the ORFs having the nucleotide sequence represented by SEQ ID NO: 1649.

[2138] The probes having the nucleotide sequence represented by SEQ ID NOS: 24131, 24132, 24133, 24134, 24135, 24136, 24137, 24138, 24139, 24140, 24141 were selected from the ORFs having the nucleotide sequence represented by SEQ ID NO: 1650.

[2139] The probes having the nucleotide sequence represented by SEQ ID NOS: 24142, 24143, 24144, 24145, 24146, 24147, 24148, 24149, 24150, 24151, 24152 were selected from the ORFs having the nucleotide sequence represented by SEQ ID NO: 1651.

[2140] The probes having the nucleotide sequence represented by SEQ ID NOS: 24153, 24154, 24155, 24156, 24157, 24158, 24159, 24160, 24161, 24162, 24163 were selected from the ORFs having the nucleotide sequence represented by SEQ ID NO: 1652.

[2141] The probes having the nucleotide sequence represented by SEQ ID NOS: 24164, 24165, 24166, 24167, 24168, 24169, 24170, 24171, 24172, 24173, 24174 were selected from the ORFs having the nucleotide sequence represented by SEQ ID NO: 1653.

[2142] The probes having the nucleotide sequence represented by SEQ ID NOS: 24175, 24176, 24177, 24178, 24179, 24180, 24181, 24182, 24183, 24184, 24185 were selected from the ORFs having the nucleotide sequence represented by SEQ ID NO: 1654.

[2143] The probes having the nucleotide sequence represented by SEQ ID NOS: 24186, 24187, 24188, 24189, 24190, 24191, 24192, 24193, 24194, 24195, 24196 were selected from the ORFs having the nucleotide sequence represented by SEQ ID NO: 1655.

[2144] The probes having the nucleotide sequence represented by SEQ ID. NOS: 24197, 24198, 24199, 24200, 24201, 24202, 24203, 24204, 24205, 24206, 24207 were selected from the ORFs having the nucleotide sequence represented by SEQ ID NO: 1656.

[2145] The probes having the nucleotide sequence represented by SEQ ID NOS: 24208, 24209, 24210, 24211, 24212, 24213, 24214, 24215, 24216, 24217, 24218 were selected from the ORFs having the nucleotide sequence represented by SEQ ID NO: 1657.

[2146] The probes having the nucleotide sequence represented by SEQ ID NOS: 24219, 24220, 24221, 24222, 24223, 24224, 24225, 24226, 24227, 24228, 24229 were selected from the ORFs having the nucleotide sequence represented by SEQ ID NO: 1658.

[2147] The probes having the nucleotide sequence represented by SEQ ID NOS: 24230, 24231, 24232, 24233, 24234, 24235, 24236, 24237, 24238, 24239, 24240 were selected from the ORFs having the nucleotide sequence represented by SEQ ID NO: 1659.

[2148] The probes having the nucleotide sequence represented by SEQ ID NOS: 24241, 24242, 24243, 24244, 24245, 24246, 24247, 24248, 24249, 24250, 24251 were selected from the ORFs having the nucleotide sequence represented by SEQ ID NO: 1660.

[2149] The probes having the nucleotide sequence represented by SEQ ID NOS: 24252, 24253, 24254, 24255, 24256, 24257, 24258, 24259, 24260, 24261, 24262 were selected from the ORFs having the nucleotide sequence represented by SEQ ID NO: 1661.

[2150] The probes having the nucleotide sequence represented by SEQ ID NOS: 24263, 24264, 24265, 24266, 24267, 24268, 24269, 24270, 24271, 24272, 24273 were selected from the ORFs having the nucleotide sequence represented by SEQ ID NO: 1662.

[2151] The probes having the nucleotide sequence represented by SEQ ID NOS: 24274, 24275, 24276, 24277, 24278, 24279, 24280, 24281, 24282, 24283, 24284, 24285, 24286, 24287, 24288, 24289, 24290, 24291, 24292, 24293, 24294, 24295 were selected from the ORFs having the nucleotide sequence represented by SEQ ID NO: 1663.

[2152] The probes having the nucleotide sequence represented by SEQ ID NOS: 24296, 24297, 24298, 24299, 24300, 24301, 24302, 24303, 24304, 24305, 24306 were selected from the ORFs having the nucleotide sequence represented by SEQ ID NO: 1664.

[2153] The probes having the nucleotide sequence represented by SEQ ID NOS: 24307, 24308, 24309, 24310, 24311, 24312, 24313, 24314, 24315, 24316, 24317 were selected from the ORFs having the nucleotide sequence represented by SEQ ID NO: 1665.

[2154] The probes having the nucleotide sequence represented by SEQ ID NOS: 24318, 24319, 24320, 24321, 24322, 24323, 24324, 24325, 24326, 24327, 24328 were selected from the ORFs having the nucleotide sequence represented by SEQ ID NO: 1666.

[2155] The probes having the nucleotide sequence represented by SEQ ID NOS: 24329, 24330, 24331, 24332, 24333, 24334, 24335, 24336, 24337, 24338, 24339 were selected from the ORFs having the nucleotide sequence represented by SEQ ID NO: 1667.

[2156] The probes having the nucleotide sequence represented by SEQ ID NOS: 24340, 24341, 24342, 24343, 24344, 24345, 24346, 24347, 24348, 24349, 24350 were selected from the ORFs having the nucleotide sequence represented by SEQ ID NO: 1668.

[2157] The probes having the nucleotide sequence represented by SEQ ID NOS: 24351, 24352, 24353, 24354, 24355, 24356, 24357, 24358, 24359, 24360, 24361 were selected from the ORFs having the nucleotide sequence represented by SEQ ID NO: 1669.

[2158] The probes having the nucleotide sequence represented by SEQ ID NOS: 24362, 24363, 24364, 24365, 24366, 24367, 24368, 24369, 24370, 24371, 24372 were selected from the ORFs having the nucleotide sequence represented by SEQ ID NO: 1670.

[2159] The probes having the nucleotide sequence represented by SEQ ID NOS: 24373, 24374, 24375, 24376, 24377, 24378, 24379, 24380, 24381, 24382, 24383 were selected from the ORFs having the nucleotide sequence represented by SEQ ID NO: 1671.

[2160] The probes having the nucleotide sequence represented by SEQ ID NOS: 24384, 24385, 24386, 24387, 24388, 24389, 24390, 24391, 24392, 24393, 24394 were selected from the ORFs having the nucleotide sequence represented by SEQ ID NO: 1672.

[2161] The probes having the nucleotide sequence represented by SEQ ID NOS: 24395, 24396, 24397, 24398, 24399, 24400, 24401, 24402, 24403, 24404, 24405 were selected from the ORFs having the nucleotide sequence represented by SEQ ID NO: 1673.

[2162] The probes having the nucleotide sequence represented by SEQ ID NOS: 24406, 24407, 24408, 24409, 24410, 24411, 24412, 24413, 24414, 24415, 24416 were selected from the ORFs having the nucleotide sequence represented by SEQ ID NO: 1674.

[2163] The probes having the nucleotide sequence represented by SEQ ID NOS: 24417, 24418, 24419, 24420, 24421, 24422, 24423, 24424, 24425, 24426, 24427 were selected from the ORFs having the nucleotide sequence represented by SEQ ID NO: 1675.

[2164] The probes having the nucleotide sequence represented by SEQ ID NOS: 24428, 24429, 24430, 24431, 24432, 24433, 24434, 24435, 24436, 24437, 24438 were selected from the ORFs having the nucleotide sequence represented by SEQ ID NO: 1676.

[2165] The probes having the nucleotide sequence represented by SEQ ID NOS: 24439, 24440, 24441, 24442, 24443, 24444, 24445, 24446, 24447, 24448, 24449 were selected from the ORFs having the nucleotide sequence represented by SEQ ID NO: 1677.

[2166] The probes having the nucleotide sequence represented by SEQ ID NOS: 24450, 24451, 24452, 24453, 24454, 24455, 24456, 24457, 24458, 24459, 24460 were selected from the ORFs having the nucleotide sequence represented by SEQ ID NO: 1678.

[2167] The probes having the nucleotide sequence represented by SEQ ID NOS: 24461, 24462, 24463, 24464, 24465, 24466, 24467, 24468, 24469, 24470, 24471 were selected from the ORFs having the nucleotide sequence represented by SEQ ID NO: 1679.

[2168] The probes having the nucleotide sequence represented by SEQ ID NOS: 24472, 24473, 24474, 24475, 24476, 24477, 24478, 24479, 24480, 24481, 24482 were selected from the ORFs having the nucleotide sequence represented by SEQ ID NO: 1680.

[2169] The probes having the nucleotide sequence represented by SEQ ID NOS: 24483, 24484, 24485, 24486, 24487, 24488, 24489, 24490, 24491, 24492, 24493 were selected from the ORFs having the nucleotide sequence represented by SEQ ID NO: 1681.

[2170] The probes having the nucleotide sequence represented by SEQ ID NOS: 24494, 24495, 24496, 24497, 24498, 24499, 24500, 24501, 24502, 24503, 24504 were selected from the ORFs having the nucleotide sequence represented by SEQ ID NO: 1682.

[2171] The probes having the nucleotide sequence represented by SEQ ID NOS: 24505, 24506, 24507, 24508, 24509, 24510, 24511, 24512, 24513, 24514, 24515 were selected from the ORFs having the nucleotide sequence represented by SEQ ID NO: 1683.

[2172] The probes having the nucleotide sequence represented by SEQ ID NOS: 24516, 24517, 24518, 24519, 24520, 24521, 24522, 24523, 24524, 24525, 24526 were selected from the ORFs having the nucleotide sequence represented by SEQ ID NO: 1684.

[2173] The probes having the nucleotide sequence represented by SEQ ID NOS: 24527, 24528, 24529, 24530, 24531, 24532, 24533, 24534, 24535, 24536, 24537 were selected from the ORFs having the nucleotide sequence represented by SEQ ID NO: 1685.

[2174] The probes having the nucleotide sequence represented by SEQ ID NOS: 24538, 24539, 24540, 24541, 24542, 24543, 24544, 24545, 24546, 24547, 24548 were selected from the ORFs having the nucleotide sequence represented by SEQ ID NO: 1686.

[2175] The probes having the nucleotide sequence represented by SEQ ID NOS: 24549, 24550, 24551, 24552, 24553, 24554, 24555, 24556, 24557, 24558, 24559 were selected from the ORFs having the nucleotide sequence represented by SEQ ID NO: 1687.

[2176] The probes having the nucleotide sequence represented by SEQ ID NOS: 24560, 24561, 24562, 24563, 24564, 24565, 24566, 24567, 24568, 24569, 24570 were selected from the ORFs having the nucleotide sequence represented by SEQ ID NO: 1688.

[2177] The probes having the nucleotide sequence represented by SEQ ID NOS: 24571, 24572, 24573, 24574, 24575, 24576, 24577, 24578, 24579, 24580, 24581 were selected from the ORFs having the nucleotide sequence represented by SEQ ID NO: 1689.

[2178] The probes having the nucleotide sequence represented by SEQ ID NOS: 24582, 24583, 24584, 24585, 24586, 24587, 24588, 24589, 24590, 24591, 24592 were selected from the ORFs having the nucleotide sequence represented by SEQ ID NO: 1690.

[2179] The probes having the nucleotide sequence represented by SEQ ID NOS: 24593, 24594, 24595, 24596, 24597, 24598, 24599, 24600, 24601, 24602, 24603 were selected from the ORFs having the nucleotide sequence represented by SEQ ID NO: 1691.

[2180] The probes having the nucleotide sequence represented by SEQ ID NOS: 24604, 24605, 24606, 24607, 24608, 24609, 24610, 24611, 24612, 24613, 24614 were selected from the ORFs having the nucleotide sequence represented by SEQ ID NO: 1692.

[2181] The probes having the nucleotide sequence represented by SEQ ID NOS: 24615, 24616, 24617, 24618, 24619, 24620, 24621, 24622, 24623, 24624, 24625 were selected from the ORFs having the nucleotide sequence represented by SEQ ID NO: 1693.

[2182] The probes having the nucleotide sequence represented by SEQ ID NOS: 24626, 24627, 24628, 24629, 24630, 24631, 24632, 24633, 24634, 24635, 24636 were selected from the ORFs having the nucleotide sequence represented by SEQ ID NO: 1694.

[2183] The probes having the nucleotide sequence represented by SEQ ID NOS: 24637, 24638, 24639, 24640, 24641, 24642, 24643, 24644, 24645, 24646, 24647 were selected from the ORFs having the nucleotide sequence represented by SEQ ID NO: 1695.

[2184] The probes having the nucleotide sequence represented by SEQ ID NOS: 24648, 24649, 24650, 24651, 24652, 24653, 24654, 24655, 24656, 24657, 24658 were selected from the ORFs having the nucleotide sequence represented by SEQ ID NO: 1696.

[2185] The probes having the nucleotide sequence represented by SEQ ID NOS: 24659, 24660, 24661, 24662, 24663, 24664, 24665, 24666, 24667, 24668, 24669 were selected from the ORFs having the nucleotide sequence represented by SEQ ID NO: 1697.

[2186] The probes having the nucleotide sequence represented by SEQ ID NOS: 24670, 24671, 24672, 24673, 24674, 24675, 24676, 24677, 24678, 24679, 24680 were selected from the ORFs having the nucleotide sequence represented by SEQ ID NO: 1698.

[2187] The probes having the nucleotide sequence represented by SEQ ID NOS: 24681, 24682, 24683, 24684, 24685, 24686, 24687, 24688, 24689, 24690, 24691 were selected from the ORFs having the nucleotide sequence represented by SEQ ID NO: 1699.

[2188] The probes having the nucleotide sequence represented by SEQ ID NOS: 24692, 24693, 24694, 24695, 24696, 24697, 24698, 24699, 24700, 24701, 24702 were selected from the ORFs having the nucleotide sequence represented by SEQ ID NO: 1700.

[2189] The probes having the nucleotide sequence represented by SEQ ID NOS: 24703, 24704, 24705, 24706, 24707, 24708, 24709, 24710, 24711, 24712, 24713 were selected from the ORFs having the nucleotide sequence represented by SEQ ID NO: 1701.

[2190] The probes having the nucleotide sequence represented by SEQ ID NOS: 24714, 24715, 24716, 24717, 24718, 24719, 24720, 24721, 24722, 24723, 24724 were selected from the ORFs having the nucleotide sequence represented by SEQ ID NO: 1702.

[2191] The probes having the nucleotide sequence represented by SEQ ID NOS: 24725, 24726, 24727, 24728, 24729, 24730, 24731, 24732, 24733, 24734, 24735 were selected from the ORFs having the nucleotide sequence represented by SEQ ID NO: 1703.

[2192] The probes having the nucleotide sequence represented by SEQ ID NOS: 24736, 24737, 24738, 24739, 24740, 24741, 24742, 24743, 24744, 24745, 24746 were selected from the ORFs having the nucleotide sequence represented by SEQ ID NO: 1704.

[2193] The probes having the nucleotide sequence represented by SEQ ID NOS: 24747, 24748, 24749, 24750, 24751, 24752, 24753, 24754, 24755, 24756, 24757 were selected from the ORFs having the nucleotide sequence represented by SEQ ID NO: 1705.

[2194] The probes having the nucleotide sequence represented by SEQ ID NOS: 24758, 24759, 24760, 24761, 24762, 24763, 24764, 24765, 24766, 24767, 24768 were selected from the ORFs having the nucleotide sequence represented by SEQ ID NO: 1706.

[2195] The probes having the nucleotide sequence represented by SEQ ID NOS: 24769, 24770, 24771, 24772, 24773, 24774, 24775, 24776, 24777, 24778, 24779 were selected from the ORFs having the nucleotide sequence represented by SEQ ID NO: 1707.

[2196] The probes having the nucleotide sequence represented by SEQ ID NOS: 24780, 24781, 24782, 24783, 24784, 24785, 24786, 24787, 24788, 24789, 24790 were selected from the ORFs having the nucleotide sequence represented by SEQ ID NO: 1708.

[2197] The probes having the nucleotide sequence represented by SEQ ID NOS: 24791, 24792, 24793, 24794, 24795, 24796, 24797, 24798, 24799, 24800, 24801 were selected from the ORFs having the nucleotide sequence represented by SEQ ID NO: 1709.

[2198] The probes having the nucleotide sequence represented by SEQ ID NOS: 24802, 24803, 24804, 24805, 24806, 24807, 24808, 24809, 24810, 24811, 24812 were selected from the ORFs having the nucleotide sequence represented by SEQ ID NO: 1710.

[2199] The probes having the nucleotide sequence represented by SEQ ID NOS: 24813, 24814, 24815, 24816, 24817, 24818, 24819, 24820, 24821, 24822, 24823 were selected from the ORFs having the nucleotide sequence represented by SEQ ID NO: 1711.

[2200] The probes having the nucleotide sequence represented by SEQ ID NOS: 24824, 24825, 24826, 24827, 24828, 24829, 24830, 24831, 24832, 24833, 24834 were selected from the ORFs having the nucleotide sequence represented by SEQ ID NO: 1712.

[2201] The probes having the nucleotide sequence represented by SEQ ID NOS: 24835, 24836, 24837, 24838, 24839, 24840, 24841, 24842, 24843, 24844, 24845 were selected from the ORFs having the nucleotide sequence represented by SEQ ID NO: 1713.

[2202] The probes having the nucleotide sequence represented by SEQ ID NOS: 24846, 24847, 24848, 24849, 24850, 24851, 24852, 24853, 24854, 24855, 24856 were selected from the ORFs having the nucleotide sequence represented by SEQ ID NO: 1714.

[2203] The probes having the nucleotide sequence represented by SEQ ID NOS: 24857, 24858, 24859, 24860, 24861, 24862, 24863, 24864, 24865, 24866, 24867 were selected from the ORFs having the nucleotide sequence represented by SEQ ID NO: 1715.

[2204] The probes having the nucleotide sequence represented by SEQ ID NOS: 24868, 24869, 24870, 24871, 24872, 24873, 24874, 24875, 24876, 24877, 24878 were selected from the ORFs having the nucleotide sequence represented by SEQ ID NO: 1716.

[2205] The probes having the nucleotide sequence represented by SEQ ID NOS: 24879, 24880, 24881, 24882, 24883, 24884, 24885, 24886, 24887, 24888, 24889 were selected from the ORFs having the nucleotide sequence represented by SEQ ID NO: 1717.

[2206] The probes having the nucleotide sequence represented by SEQ ID NOS: 24890, 24891, 24892, 24893, 24894, 24895, 24896, 24897, 24898, 24899, 24900 were selected from the ORFs having the nucleotide sequence represented by SEQ ID NO: 1718.

[2207] The probes having the nucleotide sequence represented by SEQ ID NOS: 24901, 24902, 24903, 24904, 24905, 24906, 24907, 24908, 24909, 24910, 24911 were selected from the ORFs having the nucleotide sequence represented by SEQ ID NO: 1719.

[2208] The probes having the nucleotide sequence represented by SEQ ID NOS: 24912, 24913, 24914, 24915, 24916, 24917, 24918, 24919, 24920, 24921, 24922 were selected from the ORFs having the nucleotide sequence represented by SEQ ID NO: 1720.

[2209] The probes having the nucleotide sequence represented by SEQ ID NOS: 24923, 24924, 24925, 24926, 24927, 24928, 24929, 24930, 24931, 24932, 24933 were selected from the ORFs having the nucleotide sequence represented by SEQ ID NO: 1721.

[2210] The probes having the nucleotide sequence represented by SEQ ID NOS: 24934, 24935, 24936, 24937, 24938, 24939, 24940, 24941, 24942, 24943, 24944 were selected from the ORFs having the nucleotide sequence represented by SEQ ID NO: 1722.

[2211] The probes having the nucleotide sequence represented by SEQ ID NOS: 24945, 24946, 24947, 24948, 24949, 24950, 24951, 24952, 24953, 24954, 24955 were selected from the ORFs having the nucleotide sequence represented by SEQ ID NO: 1723.

[2212] The probes having the nucleotide sequence represented by SEQ ID NOS: 24956, 24957, 24958, 24959, 24960, 24961, 24962, 24963, 24964, 24965, 24966 were selected from the ORFs having the nucleotide sequence represented by SEQ ID NO: 1724.

[2213] The probes having the nucleotide sequence represented by SEQ ID NOS: 24967, 24968, 24969, 24970, 24971, 24972, 24973, 24974, 24975, 24976, 24977 were selected from the ORFs having the nucleotide sequence represented by SEQ ID NO: 1725.

[2214] The probes having the nucleotide sequence represented by SEQ ID NOS: 24978, 24979, 24980, 24981, 24982, 24983, 24984, 24985, 24986, 24987, 24988 were selected from the ORFs having the nucleotide sequence represented by SEQ ID NO: 1726.

[2215] The probes having the nucleotide sequence represented by SEQ ID NOS: 24989, 24990, 24991, 24992, 24993, 24994, 24995, 24996, 24997, 24998, 24999 were selected from the ORFs having the nucleotide sequence represented by SEQ ID NO: 1727.

[2216] The probes having the nucleotide sequence represented by SEQ ID NOS: 25000, 25001, 25002, 25003, 25004, 25005, 25006, 25007, 25008, 25009, 25010 were selected from the ORFs having the nucleotide sequence represented by SEQ ID NO: 1728.

[2217] The probes having the nucleotide sequence represented by SEQ ID NOS: 25011, 25012, 25013, 25014, 25015, 25016, 25017, 25018, 25019, 25020, 25021 were selected from the ORFs having the nucleotide sequence represented by SEQ ID NO: 1729.

[2218] The probes having the nucleotide sequence represented by SEQ ID NOS: 25022, 25023, 25024, 25025, 25026, 25027, 25028, 25029, 25030, 25031, 25032 were selected from the ORFs having the nucleotide sequence represented by SEQ ID NO: 1730.

[2219] The probes having the nucleotide sequence represented by SEQ ID NOS: 25033, 25034, 25035, 25036, 25037, 25038, 25039, 25040, 25041, 25042, 25043 were selected from the ORFs having the nucleotide sequence represented by SEQ ID NO: 1731.

[2220] The probes having the nucleotide sequence represented by SEQ ID NOS: 25044, 25045, 25046, 25047, 25048, 25049, 25050, 25051, 25052, 25053, 25054 were selected from the ORFs having the nucleotide sequence represented by SEQ ID NO: 1732.

[2221] The probes having the nucleotide sequence represented by SEQ ID NOS: 25055, 25056, 25057, 25058, 25059, 25060, 25061, 25062, 25063, 25064, 25065 were selected from the ORFs having the nucleotide sequence represented by SEQ ID NO: 1733.

[2222] The probes having the nucleotide sequence represented by SEQ ID NOS: 25066, 25067, 25068, 25069, 25070, 25071, 25072, 25073, 25074, 25075, 25076 were selected from the ORFs having the nucleotide sequence represented by SEQ ID NO: 1734.

[2223] The probes having the nucleotide sequence represented by SEQ ID NOS: 25077, 25078, 25079, 25080, 25081, 25082, 25083, 25084, 25085, 25086, 25087 were selected from the ORFs having the nucleotide sequence represented by SEQ ID NO: 1735.

[2224] The probes having the nucleotide sequence represented by SEQ ID NOS: 25088, 25089, 25090, 25091, 25092, 25093, 25094, 25095, 25096, 25097, 25098 were selected from the ORFs having the nucleotide sequence represented by SEQ ID NO: 1736.

[2225] The probes having the nucleotide sequence represented by SEQ ID NOS: 25099, 25100, 25101, 25102, 25103, 25104, 25105, 25106, 25107, 25108, 25109 were selected from the ORFs having the nucleotide sequence represented by SEQ ID NO: 1737.

[2226] The probes having the nucleotide sequence represented by SEQ ID NOS: 25110, 25111, 25112, 25113, 25114, 25115, 25116, 25117, 25118, 25119, 25120 were selected from the ORFs having the nucleotide sequence represented by SEQ ID NO: 1738.

[2227] The probes having the nucleotide sequence represented by SEQ ID NOS: 25121, 25122, 25123, 25124, 25125, 25126, 25127, 25128, 25129, 25130, 25131 were selected from the ORFs having the nucleotide sequence represented by SEQ ID NO: 1739.

[2228] The probes having the nucleotide sequence represented by SEQ ID NOS: 25132, 25133, 25134, 25135, 25136, 25137, 25138, 25139, 25140, 25141, 25142 were selected from the ORFs having the nucleotide sequence represented by SEQ ID NO: 1740.

[2229] The probes having the nucleotide sequence represented by SEQ ID NOS: 25143, 25144, 25145, 25146, 25147, 25148, 25149, 25150, 25151, 25152, 25153 were selected from the ORFs having the nucleotide sequence represented by SEQ ID NO: 1741.

[2230] The probes having the nucleotide sequence represented by SEQ ID NOS: 25154, 25155, 25156, 25157, 25158, 25159, 25160, 25161, 25162, 25163, 25164 were selected from the ORFs having the nucleotide sequence represented by SEQ ID NO: 1742.

[2231] The probes having the nucleotide sequence represented by SEQ ID NOS: 25165, 25166, 25167, 25168, 25169, 25170, 25171, 25172, 25173, 25174, 25175 were selected from the ORFs having the nucleotide sequence represented by SEQ ID NO: 1743.

[2232] The probes having the nucleotide sequence represented by SEQ ID NOS: 25176, 25177, 25178, 25179, 25180, 25181, 25182, 25183, 25184, 25185, 25186 were selected from the ORFs having the nucleotide sequence represented by SEQ ID NO: 1744.

[2233] The probes having the nucleotide sequence represented by SEQ ID NOS: 25187, 25188, 25189, 25190, 25191, 25192, 25193, 25194, 25195, 25196, 25197 were selected from the ORFs having the nucleotide sequence represented by SEQ ID NO: 1745.

[2234] The probes having the nucleotide sequence represented by SEQ ID NOS: 25198, 25199, 25200, 25201, 25202, 25203, 25204, 25205, 25206, 25207, 25208 were selected from the ORFs having the nucleotide sequence represented by SEQ ID NO: 1746.

[2235] The probes having the nucleotide sequence represented by SEQ ID NOS: 25209, 25210, 25211, 25212, 25213, 25214, 25215, 25216, 25217, 25218, 25219 were selected from the ORFs having the nucleotide sequence represented by SEQ ID NO: 1747.

[2236] The probes having the nucleotide sequence represented by SEQ ID NOS: 25220, 25221, 25222, 25223, 25224, 25225, 25226, 25227, 25228, 25229, 25230 were selected from the ORFs having the nucleotide sequence represented by SEQ ID NO: 1748.

[2237] The probes having the nucleotide sequence represented by SEQ ID NOS: 25231, 25232, 25233, 25234, 25235, 25236, 25237, 25238, 25239, 25240, 25241 were selected from the ORFs having the nucleotide sequence represented by SEQ ID NO: 1749.

[2238] The probes having the nucleotide sequence represented by SEQ ID NOS: 25242, 25243, 25244, 25245, 25246, 25247, 25248, 25249, 25250, 25251, 25252 were selected from the ORFs having the nucleotide sequence represented by SEQ ID NO: 1750.

[2239] The probes having the nucleotide sequence represented by SEQ ID NOS: 25253, 25254, 25255, 25256, 25257, 25258, 25259, 25260, 25261, 25262, 25263 were selected from the ORFs having the nucleotide sequence represented by SEQ ID NO: 1751.

[2240] The probes having the nucleotide sequence represented by SEQ ID NOS: 25264, 25265, 25266, 25267, 25268, 25269, 25270, 25271, 25272, 25273, 25274 were selected from the ORFs having the nucleotide sequence represented by SEQ ID NO: 1752.

[2241] The probes having the nucleotide sequence represented by SEQ ID NOS: 25275, 25276, 25277, 25278, 25279, 25280, 25281, 25282, 25283, 25284, 25285 were selected from the ORFs having the nucleotide sequence represented by SEQ ID NO: 1753.

[2242] The probes having the nucleotide sequence represented by SEQ ID NOS: 25286, 25287, 25288, 25289, 25290, 25291, 25292, 25293, 25294, 25295, 25296 were selected from the ORFs having the nucleotide sequence represented by SEQ ID NO: 1754.

[2243] The probes having the nucleotide sequence represented by SEQ ID NOS: 25297, 25298, 25299, 25300, 25301, 25302, 25303, 25304, 25305, 25306, 25307 were selected from the ORFs having the nucleotide sequence represented by SEQ ID NO: 1755.

[2244] The probes having the nucleotide sequence represented by SEQ ID NOS: 25308, 25309, 25310, 25311, 25312, 25313, 25314, 25315, 25316, 25317, 25318, 25319, 25320, 25321, 25322, 25323, 25324, 25325, 25326, 25327, 25328, 25329 were selected from the ORFs having the nucleotide sequence represented by SEQ ID NO: 1756.

[2245] The probes having the nucleotide sequence represented by SEQ ID NOS: 25330, 25331, 25332, 25333, 25334, 25335, 25336, 25337, 25338, 25339, 25340 were selected from the ORFs having the nucleotide sequence represented by SEQ ID NO: 1757.

[2246] The probes having the nucleotide sequence represented by SEQ ID NOS: 25341, 25342, 25343, 25344, 25345, 25346, 25347, 25348, 25349, 25350, 25351 were selected from the ORFs having the nucleotide sequence represented by SEQ ID NO: 1758.

[2247] The probes having the nucleotide sequence represented by SEQ ID NOS: 25352, 25353, 25354, 25355, 25356, 25357, 25358, 25359, 25360, 25361, 25362 were selected from the ORFs having the nucleotide sequence represented by SEQ ID NO: 1759.

[2248] The probes having the nucleotide sequence represented by SEQ ID NOS: 25363, 25364, 25365, 25366, 25367, 25368, 25369, 25370, 25371, 25372, 25373 were selected from the ORFs having the nucleotide sequence represented by SEQ ID NO: 1760.

[2249] The probes having the nucleotide sequence represented by SEQ ID NOS: 25374, 25375, 25376, 25377, 25378, 25379, 25380, 25381, 25382, 25383, 25384 were selected from the ORFs having the nucleotide sequence represented by SEQ ID NO: 1761.

[2250] The probes having the nucleotide sequence represented by SEQ ID NOS: 25385, 25386, 25387, 25388, 25389, 25390, 25391, 25392, 25393, 25394, 25395 were selected from the ORFs having the nucleotide sequence represented by SEQ ID NO: 1762.

[2251] The probes having the nucleotide sequence represented by SEQ ID NOS: 25396, 25397, 25398, 25399, 25400, 25401, 25402, 25403, 25404, 25405, 25406 were selected from the ORFs having the nucleotide sequence represented by SEQ ID NO: 1763.

[2252] The probes having the nucleotide sequence represented by SEQ ID NOS: 25407, 25408, 25409, 25410, 25411, 25412, 25413, 25414, 25415, 25416, 25417 were selected from the ORFs having the nucleotide sequence represented by SEQ ID NO: 1764.

[2253] The probes having the nucleotide sequence represented by SEQ ID NOS: 25418, 25419, 25420, 25421, 25422, 25423, 25424, 25425, 25426, 25427, 25428 were selected from the ORFs having the nucleotide sequence represented by SEQ ID NO: 1765.

[2254] The probes having the nucleotide sequence represented by SEQ ID NOS: 25429, 25430, 25431, 25432, 25433, 25434, 25435, 25436, 25437, 25438, 25439 were selected from the ORFs having the nucleotide sequence represented by SEQ ID NO: 1766.

[2255] The probes having the nucleotide sequence represented by SEQ ID NOS: 25440, 25441, 25442, 25443, 25444, 25445, 25446, 25447, 25448, 25449, 25450 were selected from the ORFs having the nucleotide sequence represented by SEQ ID NO: 1767.

[2256] The probes having the nucleotide sequence represented by SEQ ID NOS: 25451, 25452, 25453, 25454, 25455, 25456, 25457, 25458, 25459, 25460, 25461 were selected from the ORFs having the nucleotide sequence represented by SEQ ID NO: 1768.

[2257] The probes having the nucleotide sequence represented by SEQ ID NOS: 25462, 25463, 25464, 25465, 25466, 25467, 25468, 25469, 25470, 25471, 25472 were selected from the ORFs having the nucleotide sequence represented by SEQ ID NO: 1769.

[2258] The probes having the nucleotide sequence represented by SEQ ID NOS: 25473, 25474, 25475, 25476, 25477, 25478, 25479, 25480, 25481, 25482, 25483 were selected from the ORFs having the nucleotide sequence represented by SEQ ID NO: 1770.

[2259] The probes having the nucleotide sequence represented by SEQ ID NOS: 25484, 25485, 25486, 25487, 25488, 25489, 25490, 25491, 25492, 25493, 25494 were selected from the ORFs having the nucleotide sequence represented by SEQ ID NO: 1771.

[2260] The probes having the nucleotide sequence represented by SEQ ID NOS: 25495, 25496, 25497, 25498, 25499, 25500, 25501, 25502, 25503, 25504, 25505 were selected from the ORFs having the nucleotide sequence represented by SEQ ID NO: 1772.

[2261] The probes having the nucleotide sequence represented by SEQ ID NOS: 25506, 25507, 25508, 25509, 25510, 25511, 25512, 25513, 25514, 25515, 25516 were selected from the ORFs having the nucleotide sequence represented by SEQ ID NO: 1773.

[2262] The probes having the nucleotide sequence represented by SEQ ID NOS: 25517, 25518, 25519, 25520, 25521, 25522, 25523, 25524, 25525, 25526, 25527 were selected from the ORFs having the nucleotide sequence represented by SEQ ID NO: 1774.

[2263] The probes having the nucleotide sequence represented by SEQ ID NOS: 25528, 25529, 25530, 25531, 25532, 25533, 25534, 25535, 25536, 25537, 25538 were selected from the ORFs having the nucleotide sequence represented by SEQ ID NO: 1775.

[2264] The probes having the nucleotide sequence represented by SEQ ID NOS: 25539, 25540, 25541, 25542, 25543, 25544, 25545, 25546, 25547, 25548, 25549 were selected from the ORFs having the nucleotide sequence represented by SEQ ID NO: 1776.

[2265] The probes having the nucleotide sequence represented by SEQ ID NOS: 25550, 25551, 25552, 25553, 25554, 25555, 25556, 25557, 25558, 25559, 25560 were selected from the ORFs having the nucleotide sequence represented by SEQ ID NO: 1777.

[2266] The probes having the nucleotide sequence represented by SEQ ID NOS: 25561, 25562, 25563, 25564, 25565, 25566, 25567, 25568, 25569, 25570, 25571 were selected from the ORFs having the nucleotide sequence represented by SEQ ID NO: 1778.

[2267] The probes having the nucleotide sequence represented by SEQ ID NOS: 25572, 25573, 25574, 25575, 25576, 25577, 25578, 25579, 25580, 25581, 25582 were selected from the ORFs having the nucleotide sequence represented by SEQ ID NO: 1779.

[2268] The probes having the nucleotide sequence represented by SEQ ID NOS: 25583, 25584, 25585, 25586, 25587, 25588, 25589, 25590, 25591, 25592, 25593 were selected from the ORFs having the nucleotide sequence represented by SEQ ID NO: 1780.

[2269] The probes having the nucleotide sequence represented by SEQ ID NOS: 25594, 25595, 25596, 25597, 25598, 25599, 25600, 25601, 25602, 25603, 25604 were selected from the ORFs having the nucleotide sequence represented by SEQ ID NO: 1781.

[2270] The probes having the nucleotide sequence represented by SEQ ID NOS: 25605, 25606, 25607, 25608, 25609, 25610, 25611, 25612, 25613, 25614, 25615 were selected from the ORFs having the nucleotide sequence represented by SEQ ID NO: 1782.

[2271] The probes having the nucleotide sequence represented by SEQ ID NOS: 25616, 25617, 25618, 25619, 25620, 25621, 25622, 25623, 25624, 25625, 25626 were selected from the ORFs having the nucleotide sequence represented by SEQ ID NO: 1783.

[2272] The probes having the nucleotide sequence represented by SEQ ID NOS: 25627, 25628, 25629, 25630, 25631, 25632, 25633, 25634, 25635, 25636, 25637 were selected from the ORFs having the nucleotide sequence represented by SEQ ID NO: 1784.

[2273] The probes having the nucleotide sequence represented by SEQ ID NOS: 25638, 25639, 25640, 25641, 25642, 25643, 25644, 25645, 25646, 25647, 25648 were selected from the ORFs having the nucleotide sequence represented by SEQ ID NO: 1785.

[2274] The probes having the nucleotide sequence represented by SEQ ID NOS: 25649, 25650, 25651, 25652, 25653, 25654, 25655, 25656, 25657, 25658, 25659 were selected from the ORFs having the nucleotide sequence represented by SEQ ID NO: 1786.

[2275] The probes having the nucleotide sequence represented by SEQ ID NOS: 25660, 25661, 25662, 25663, 25664, 25665, 25666, 25667, 25668, 25669, 25670 were selected from the ORFs having the nucleotide sequence represented by SEQ ID NO: 1787.

[2276] The probes having the nucleotide sequence represented by SEQ ID NOS: 25671, 25672, 25673, 25674, 25675, 25676, 25677, 25678, 25679, 25680, 25681 were selected from the ORFs having the nucleotide sequence represented by SEQ ID NO: 1788.

[2277] The probes having the nucleotide sequence represented by SEQ ID NOS: 25682, 25683, 25684, 25685, 25686, 25687, 25688, 25689, 25690, 25691, 25692 were selected from the ORFs having the nucleotide sequence represented by SEQ ID NO: 1789.

[2278] The probes having the nucleotide sequence represented by SEQ ID NOS: 25693, 25694, 25695, 25696, 25697, 25698, 25699, 25700, 25701, 25702, 25703 were selected from the ORFs having the nucleotide sequence represented by SEQ ID NO: 1790.

[2279] The probes having the nucleotide sequence represented by SEQ ID NOS: 25704, 25705, 25706, 25707, 25708, 25709, 25710, 25711, 25712, 25713, 25714 were selected from the ORFs having the nucleotide sequence represented by SEQ ID NO: 1791.

[2280] The probes having the nucleotide sequence represented by SEQ ID NOS: 25715, 25716, 25717, 25718, 25719, 25720, 25721, 25722, 25723, 25724, 25725 were selected from the ORFs having the nucleotide sequence represented by SEQ ID NO: 1792.

[2281] The probes having the nucleotide sequence represented by SEQ ID NOS: 25726, 25727, 25728, 25729, 25730, 25731, 25732, 25733, 25734, 25735, 25736 were selected from the ORFs having the nucleotide sequence represented by SEQ ID NO: 1793.

[2282] The probes having the nucleotide sequence represented by SEQ ID NOS: 25737, 25738, 25739, 25740, 25741, 25742, 25743, 25744, 25745, 25746, 25747, 25748, 25749, 25750, 25751, 25752, 25753, 25754, 25755, 25756, 25757, 25758 were selected from the ORFs having the nucleotide sequence represented by SEQ ID NO: 1794.

[2283] The probes having the nucleotide sequence represented by SEQ ID NOS: 25759, 25760, 25761, 25762, 25763, 25764, 25765, 25766, 25767, 25768, 25769 were selected from the ORFs having the nucleotide sequence represented by SEQ ID NO: 1795.

[2284] The probes having the nucleotide sequence represented by SEQ ID NOS: 25770, 25771, 25772, 25773, 25774, 25775, 25776, 25777, 25778, 25779, 25780 were selected from the ORFs having the nucleotide sequence represented by SEQ ID NO: 1796.

[2285] The probes having the nucleotide sequence represented by SEQ ID NOS: 25781, 25782, 257.83, 25784, 25785, 25786, 25787, 25788, 25789, 25790, 25791 were selected from the ORFs having the nucleotide sequence represented by SEQ ID NO: 1797.

[2286] The probes having the nucleotide sequence represented by SEQ ID NOS: 25792, 25793, 25794, 25795, 25796, 25797, 25798, 25799, 25800, 25801, 25802 were selected from the ORFs having the nucleotide sequence represented by SEQ ID NO: 1798.

[2287] The probes having the nucleotide sequence represented by SEQ ID NOS: 25803, 25804, 25805, 25806, 25807, 25808, 25809, 25810, 25811, 25812, 25813 were selected from the ORFs having the nucleotide sequence represented by SEQ ID NO: 1799.

[2288] The probes having the nucleotide sequence represented by SEQ ID NOS: 25814, 25815, 25816, 25817, 25818, 25819, 25820, 25821, 25822, 25823, 25824 were selected from the ORFs having the nucleotide sequence represented by SEQ ID NO: 1800.

[2289] The probes having the nucleotide sequence represented by SEQ ID NOS: 25825, 25826, 25827, 25828, 25829, 25830, 25831, 25832, 25833, 25834, 25835 were selected from the ORFs having the nucleotide sequence represented by SEQ ID NO: 1801.

[2290] The probes having the nucleotide sequence represented by SEQ ID NOS: 25836, 25837, 25838, 25839, 25840, 25841, 25842, 25843, 25844, 25845, 25846 were selected from the ORFs having the nucleotide sequence represented by SEQ ID NO: 1802.

[2291] The probes having the nucleotide sequence represented by SEQ ID NOS: 25847, 25848, 25849, 25850, 25851, 25852, 25853, 25854, 25855, 25856, 25857 were selected from the ORFs having the nucleotide sequence represented by SEQ ID NO: 1803.

[2292] The probes having the nucleotide sequence represented by SEQ ID NOS: 25858, 25859, 25860, 25861, 25862, 25863, 25864, 25865, 25866, 25867, 25868 were selected from the ORFs having the nucleotide sequence represented by SEQ ID NO: 1804.

[2293] The probes having the nucleotide sequence represented by SEQ ID NOS: 25869, 25870, 25871, 25872, 25873, 25874, 25875, 25876, 25877, 25878, 25879 were selected from the ORFs having the nucleotide sequence represented by SEQ ID NO: 1805.

[2294] The probes having the nucleotide sequence represented by SEQ ID NOS: 25880, 25881, 25882, 25883, 25884, 25885, 25886, 25887, 25888, 25889, 25890 were selected from the ORFs having the nucleotide sequence represented by SEQ ID NO: 1806.

[2295] The probes having the nucleotide sequence represented by SEQ ID NOS: 25891, 25892, 25893, 25894, 25895, 25896, 25897, 25898, 25899, 25900, 25901 were selected from the ORFs having the nucleotide sequence represented by SEQ ID NO: 1807.

[2296] The probes having the nucleotide sequence represented by SEQ ID NOS: 25902, 25903, 25904, 25905, 25906, 25907, 25908, 25909, 25910, 25911, 25912 were selected from the ORFs having the nucleotide sequence represented by SEQ ID NO: 1808.

[2297] The probes having the nucleotide sequence represented by SEQ ID NOS: 25913, 25914, 25915, 25916, 25917, 25918, 25919, 25920, 25921, 25922, 25923 were selected from the ORFs having the nucleotide sequence represented by SEQ ID NO: 1809.

[2298] The probes having the nucleotide sequence represented by SEQ ID NOS: 25924, 25925, 25926, 25927, 25928, 25929, 25930, 25931, 25932, 25933, 25934 were selected from the ORFs having the nucleotide sequence represented by SEQ ID NO: 1810.

[2299] The probes having the nucleotide sequence represented by SEQ ID NOS: 25935, 25936, 25937, 25938, 25939, 25940, 25941, 25942, 25943, 25944, 25945 were selected from the ORFs having the nucleotide sequence represented by SEQ ID NO: 1811.

[2300] The probes having the nucleotide sequence represented by SEQ ID NOS: 25946, 25947, 25948, 25949, 25950, 25951, 25952, 25953, 25954, 25955, 25956 were selected from the ORFs having the nucleotide sequence represented by SEQ ID NO: 1812.

[2301] The probes having the nucleotide sequence represented by SEQ ID NOS: 25957, 25958, 25959, 25960, 25961, 25962, 25963, 25964, 25965, 25966, 25967 were selected from the ORFs having the nucleotide sequence represented by SEQ ID NO: 1813.

[2302] The probes having the nucleotide sequence represented by SEQ ID NOS: 25968, 25969, 25970, 25971, 25972, 25973, 25974, 25975, 25976, 25977, 25978 were selected from the ORFs having the nucleotide sequence represented by SEQ ID NO: 1814.

[2303] The probes having the nucleotide sequence represented by SEQ ID NOS: 25979, 25980, 25981, 25982, 25983, 25984, 25985, 25986, 25987, 25988, 25989 were selected from the ORFs having the nucleotide sequence represented by SEQ ID NO: 1815.

[2304] The probes having the nucleotide sequence represented by SEQ ID NOS: 25990, 25991, 25992, 25993, 25994, 25995, 25996, 25997, 25998, 25999, 26000 were selected from the ORFs having the nucleotide sequence represented by SEQ ID NO: 1816.

[2305] The probes having the nucleotide sequence represented by SEQ ID NOS: 26001, 26002, 26003, 26004, 26005, 26006, 26007, 26008, 26009, 26010, 26011 were selected from the ORFs having the nucleotide sequence represented by SEQ ID NO: 1817.

[2306] The probes having the nucleotide sequence represented by SEQ ID NOS: 26012, 26013, 26014, 26015, 26016, 26017, 26018, 26019, 26020, 26021, 26022 were selected from the ORFs having the nucleotide sequence represented by SEQ ID NO: 1818.

[2307] The probes having the nucleotide sequence represented by SEQ ID NOS: 26023, 26024, 26025, 26026, 26027, 26028, 26029, 26030, 26031, 26032, 26033 were selected from the ORFs having the nucleotide sequence represented by SEQ ID NO: 1819.

[2308] The probes having the nucleotide sequence represented by SEQ ID NOS: 26034, 26035, 26036, 26037, 26038, 26039, 26040, 26041, 26042, 26043, 26044 were selected from the ORFs having the nucleotide sequence represented by SEQ ID NO: 1820.

[2309] The probes having the nucleotide sequence represented by SEQ ID NOS: 26045, 26046, 26047, 26048, 26049, 26050, 26051, 260.52, 26053, 26054, 26055 were selected from the ORFs having the nucleotide sequence represented by SEQ ID NO: 1821.

[2310] The probes having the nucleotide sequence represented by SEQ ID NOS: 26056, 26057, 26058, 26059, 26060, 26061, 26062, 26063, 26064, 26065, 26066 were selected from the ORFs having the nucleotide sequence represented by SEQ ID NO: 1822.

[2311] The probes having the nucleotide sequence represented by SEQ ID NOS: 26067, 26068, 26069, 26070, 26071, 26072, 26073, 26074, 26075, 26076, 26077 were selected from the ORFs having the nucleotide sequence represented by SEQ ID NO: 1823.

[2312] The probes having the nucleotide sequence represented by SEQ ID NOS: 26078, 26079, 26080, 26081, 2.6082, 26083, 26084, 26085, 26086, 26087, 26088 were selected from the ORFs having the nucleotide sequence represented by SEQ ID NO: 1824.

[2313] The probes having the nucleotide sequence represented by SEQ ID NOS: 26089, 26090, 26091, 26092, 26093, 26094, 26095, 26096, 26097, 26098, 26099 were selected from the ORFs having the nucleotide sequence represented by SEQ ID NO: 1825.

[2314] The probes having the nucleotide sequence represented by SEQ ID NOS: 26100, 26101, 26102, 26103, 26104, 26105, 26106, 26107, 26108, 26109, 26110 were selected from the ORFs having the nucleotide sequence represented by SEQ ID NO: 1826.

[2315] The probes having the nucleotide sequence represented by SEQ ID NOS: 26111, 26112, 26113, 26114, 26115, 26116, 26117, 26118, 26119, 26120, 26121 were selected from the ORFs having the nucleotide sequence represented by SEQ ID NO: 1827.

[2316] The probes having the nucleotide sequence represented by SEQ ID NOS: 26122, 26123, 26124, 26125, 26126, 26127, 26128, 26129, 26130, 26131, 26132 were selected from the ORFs having the nucleotide sequence represented by SEQ ID NO: 1828.

[2317] The probes having the nucleotide sequence represented by SEQ ID NOS: 26133, 26134, 26135, 26136, 26137, 26138, 26139, 26140, 26141, 26142, 26143 were selected from the ORFs having the nucleotide sequence represented by SEQ ID NO: 1829.

[2318] The probes having the nucleotide sequence represented by SEQ ID NOS: 26144, 26145, 26146, 26147, 26148, 26149, 26150, 26151, 26152, 26153, 26154 were selected from the ORFs having the nucleotide sequence represented by SEQ ID NO: 1830.

[2319] The probes having the nucleotide sequence represented by SEQ ID NOS: 26155, 26156, 26157, 26158, 26159, 26160, 26161, 26162, 26163, 26164, 26165 were selected from the ORFs having the nucleotide sequence represented by SEQ ID NO: 1831.

[2320] The probes having the nucleotide sequence represented by SEQ ID NOS: 26166, 26167, 26168, 26169, 26170, 26171, 26172, 26173, 26174, 26175, 26176 were selected from the ORFs having the nucleotide sequence represented by SEQ ID NO: 1832.

[2321] The probes having the nucleotide sequence represented by SEQ ID NOS: 26177, 26178, 26179, 26180, 26181, 26182, 26183, 26184, 26185, 26186, 26187 were selected from the ORFs having the nucleotide sequence represented by SEQ ID NO: 1833.

[2322] The probes having the nucleotide sequence represented by SEQ ID NOS: 26188, 26189, 26190, 26191, 26192, 26193, 26194, 26195, 26196, 26197, 26198 were selected from the ORFs having the nucleotide sequence represented by SEQ ID NO: 1834.

[2323] The probes having the nucleotide sequence represented by SEQ ID NOS: 26199, 26200, 26201, 26202, 26203, 26204, 26205, 26206, 26207, 26208, 26209 were selected from the ORFs having the nucleotide sequence represented by SEQ ID NO: 1835.

[2324] The probes having the nucleotide sequence represented by SEQ ID NOS: 26210, 26211, 26212, 26213, 26214, 26215, 26216, 26217, 26218, 26219, 26220 were selected from the ORFs having the nucleotide sequence represented by SEQ ID NO: 1836.

[2325] The probes having the nucleotide sequence represented by SEQ ID NOS: 26221, 26222, 26223, 26224, 26225, 26226, 26227, 26228, 26229, 26230, 26231 were selected from the ORFs having the nucleotide sequence represented by SEQ ID NO: 1837.

[2326] The probes having the nucleotide sequence represented by SEQ ID NOS: 26232, 26233, 26234, 26235, 26236, 26237, 26238, 26239, 26240, 26241, 26242 were selected from the ORFs having the nucleotide sequence represented by SEQ ID NO: 1838.

[2327] The probes having the nucleotide sequence represented by SEQ ID NOS: 26243, 26244, 26245, 26246, 26247, 26248, 26249, 26250, 26251, 26252, 26253 were selected from the ORFs having the nucleotide sequence represented by SEQ ID NO: 1839.

[2328] The probes having the nucleotide sequence represented by SEQ ID NOS: 26254, 26255, 26256, 26257, 26258, 26259, 26260, 26261, 26262, 26263, 26264 were selected from the ORFs having the nucleotide sequence represented by SEQ ID NO: 1840.

[2329] The probes having the nucleotide sequence represented by SEQ ID NOS: 26265, 26266, 26267, 26268, 26269, 26270, 26271, 26272, 26273, 26274, 26275 were selected from the ORFs having the nucleotide sequence represented by SEQ ID NO: 1841.

[2330] The probes having the nucleotide sequence represented by SEQ ID NOS: 26276, 26277, 26278, 26279, 26280, 26281, 26282, 26283, 26284, 26285, 26286 were selected from the ORFs having the nucleotide sequence represented by SEQ ID NO: 1842.

[2331] The probes having the nucleotide sequence represented by SEQ ID NOS: 26287, 26288, 26289, 26290, 26291, 26292, 26293, 26294, 26295, 26296, 26297 were selected from the ORFs having the nucleotide sequence represented by SEQ ID NO: 1843.

[2332] The probes having the nucleotide sequence represented by SEQ ID NOS: 26298, 26299, 26300, 26301, 26302, 26303, 26304, 26305, 26306, 26307, 26308 were selected from the ORFs having the nucleotide sequence represented by SEQ ID NO: 1844.

[2333] The probes having the nucleotide sequence represented by SEQ ID NOS: 26309, 26310, 26311, 26312, 26313, 26314, 26315, 26316, 26317, 26318, 26319 were selected from the ORFs having the nucleotide sequence represented by SEQ ID NO: 1845.

[2334] The probes having the nucleotide sequence represented by SEQ ID NOS: 26320, 26321, 26322, 26323, 26324, 26325, 26326, 26327, 26328, 26329, 26330 were selected from the ORFs having the nucleotide sequence represented by SEQ ID NO: 1846.

[2335] The probes having the nucleotide sequence represented by SEQ ID NOS: 26331, 26332, 26333, 26334, 26335, 26336, 26337, 26338, 26339, 26340, 26341 were selected from the ORFs having the nucleotide sequence represented by SEQ ID NO: 1847.

[2336] The probes having the nucleotide sequence represented by SEQ ID NOS: 26342, 26343, 26344, 26345, 26346, 26347, 26348, 26349, 26350, 26351, 26352 were selected from the ORFs having the nucleotide sequence represented by SEQ ID NO: 1848.

[2337] The probes having the nucleotide sequence represented by SEQ ID NOS: 26353, 26354, 26355, 26356, 26357, 26358, 26359, 26360, 26361, 26362, 26363 were selected from the ORFs having the nucleotide sequence represented by SEQ ID NO: 1849.

[2338] The probes having the nucleotide sequence represented by SEQ ID NOS: 26364, 26365, 26366, 26367, 26368, 26369, 26370, 26371, 26372, 26373, 26374 were selected from the ORFs having the nucleotide sequence represented by SEQ ID NO: 1850.

[2339] The probes having the nucleotide sequence represented by SEQ ID NOS: 26375, 26376, 26377, 26378, 26379, 26380, 26381, 26382, 26383, 26384, 26385 were selected from the ORFs having the nucleotide sequence represented by SEQ ID NO: 1851.

[2340] The probes having the nucleotide sequence represented by SEQ ID NOS: 26386, 26387, 26388, 26389, 26390, 26391, 26392, 26393, 26394, 26395, 26396 were selected from the ORFs having the nucleotide sequence represented by SEQ ID NO: 1852.

[2341] The probes having the nucleotide sequence represented by SEQ ID NOS: 26397, 26398, 26399, 26400, 26401, 26402, 26403, 26404, 26405, 26406, 26407 were selected from the ORFs having the nucleotide sequence represented by SEQ ID NO: 1853.

[2342] The probes having the nucleotide sequence represented by SEQ ID NOS: 26408, 26409, 26410, 26411, 26412, 26413, 26414, 26415, 26416, 26417, 26418 were selected from the ORFs having the nucleotide sequence represented by SEQ ID NO: 1854.

[2343] The probes having the nucleotide sequence represented by SEQ ID NOS: 26419, 26420, 26421, 26422, 26423, 26424, 26425, 26426, 26427, 26428, 26429 were selected from the ORFs having the nucleotide sequence represented by SEQ ID NO: 1855.

[2344] The probes having the nucleotide sequence represented by SEQ ID NOS: 26430, 26431, 26432, 26433, 26434, 26435, 26436, 26437, 26438, 26439, 26440 were selected from the ORFs having the nucleotide sequence represented by SEQ ID NO: 1856.

[2345] The probes having the nucleotide sequence represented by SEQ ID NOS: 26441, 26442, 26443, 26444, 26445, 26446, 26447, 26448, 26449, 26450, 26451 were selected from the ORFs having the nucleotide sequence represented by SEQ ID NO: 1857.

[2346] The probes having the nucleotide sequence represented by SEQ ID NOS: 26452, 26453, 26454, 26455, 26456, 26457, 26458, 26459, 26460, 26461, 26462 were selected from the ORFs having the nucleotide sequence represented by SEQ ID NO: 1858.

[2347] The probes having the nucleotide sequence represented by SEQ ID NOS: 26463, 26464, 26465, 26466, 26467, 26468, 26469, 26470, 26471, 26472, 26473 were selected from the ORFs having the nucleotide sequence represented by SEQ ID NO: 1859.

[2348] The probes having the nucleotide sequence represented by SEQ ID NOS: 26474, 26475, 26476, 26477, 26478, 26479, 26480, 26481, 26482, 26483, 26484 were selected from the ORFs having the nucleotide sequence represented by SEQ ID NO: 1860.

[2349] The probes having the nucleotide sequence represented by SEQ ID NOS: 26485, 26486, 26487, 26488, 26489, 26490, 26491, 26492, 26493, 26494, 26495 were selected from the ORFs having the nucleotide sequence represented by SEQ ID NO: 1861.

[2350] The probes having the nucleotide sequence represented by SEQ ID NOS: 26496, 26497, 26498, 26499, 26500, 26501, 26502, 26503, 26504, 26505, 26506 were selected from the ORFs having the nucleotide sequence represented by SEQ ID NO: 1862.

[2351] The probes having the nucleotide sequence represented by SEQ ID NOS: 26507, 26508, 26509, 26510, 26511, 26512, 26513, 26514, 26515, 26516, 26517 were selected from the ORFs having the nucleotide sequence represented by SEQ ID NO: 1863.

[2352] The probes having the nucleotide sequence represented by SEQ ID NOS: 26518, 26519, 26520, 26521, 26522, 26523, 26524, 26525, 26526, 26527, 26528 were selected from the ORFs having the nucleotide sequence represented by SEQ ID NO: 1864.

[2353] The probes having the nucleotide sequence represented by SEQ ID NOS: 26529, 26530, 26531, 26532, 26533, 26534, 26535, 26536, 26537, 26538, 26539 were selected from the ORFs having the nucleotide sequence represented by SEQ ID NO: 1865.

[2354] The probes having the nucleotide sequence represented by SEQ ID NOS: 26540, 26541, 26542, 26543, 26544, 26545, 26546, 26547, 26548, 26549, 26550 were selected from the ORFs having the nucleotide sequence represented by SEQ ID NO: 1866.

[2355] The probes having the nucleotide sequence represented by SEQ ID NOS: 26551, 26552, 26553, 26554, 26555, 26556, 26557, 26558, 26559, 26560, 26561 were selected from the ORFs having the nucleotide sequence represented by SEQ ID NO: 1867.

[2356] The probes having the nucleotide sequence represented by SEQ ID NOS: 26562, 26563, 26564, 26565, 26566, 26567, 26568, 26569, 26570, 26571, 26572 were selected from the ORFs having the nucleotide sequence represented by SEQ ID NO: 1868.

[2357] The probes having the nucleotide sequence represented by SEQ ID NOS: 26573, 26574, 26575, 26576, 26577, 26578, 26579, 26580, 26581, 26582, 26583 were selected from the ORFs having the nucleotide sequence represented by SEQ ID NO: 1869.

[2358] The probes having the nucleotide sequence represented by SEQ ID NOS: 26584, 26585, 26586, 26587, 26588, 26589, 26590, 26591, 26592, 26593, 26594 were selected from the ORFs having the nucleotide sequence represented by SEQ ID NO: 1870.

[2359] The probes having the nucleotide sequence represented by SEQ ID NOS: 26595, 26596, 26597, 26598, 26599, 26600, 26601, 26602, 26603, 26604, 26605 were selected from the ORFs having the nucleotide sequence represented by SEQ ID NO: 1871.

[2360] The probes having the nucleotide sequence represented by SEQ ID NOS: 26606, 26607, 26608, 26609, 26610, 26611, 26612, 26613, 26614, 26615, 26616 were selected from the ORFs having the nucleotide sequence represented by SEQ ID NO: 1872.

[2361] The probes having the nucleotide sequence represented by SEQ ID NOS: 26617, 26618, 26619, 26620, 26621, 26622, 26623, 26624, 26625, 26626, 26627 were selected from the ORFs having the nucleotide sequence represented by SEQ ID NO: 1873.

[2362] The probes having the nucleotide sequence represented by SEQ ID NOS: 26628, 26629, 26630, 26631, 26632, 26633, 26634, 26635, 26636, 26637, 26638 were selected from the ORFs having the nucleotide sequence represented by SEQ ID NO: 1874.

[2363] The probes having the nucleotide sequence represented by SEQ ID NOS: 26639, 26640, 26641, 26642, 26643, 26644, 26645, 26646, 26647, 26648, 26649 were selected from the ORFs having the nucleotide sequence represented by SEQ ID NO: 1875.

[2364] The probes having the nucleotide sequence represented by SEQ ID NOS: 26650, 26651, 26652, 26653, 26654, 26655, 26656, 26657, 26658, 26659, 26660 were selected from the ORFs having the nucleotide sequence represented by SEQ ID NO: 1876.

[2365] The probes having the nucleotide sequence represented by SEQ ID NOS: 26661, 26662, 26663, 26664, 26665, 26666, 26667, 26668, 26669, 26670, 26671 were selected from the ORFs having the nucleotide sequence represented by SEQ ID NO: 1877.

[2366] The probes having the nucleotide sequence represented by SEQ ID NOS: 26672, 26673, 26674, 26675, 26676, 26677, 26678, 26679, 26680, 26681, 26682 were selected from the ORFs having the nucleotide sequence represented by SEQ ID NO: 1878.

[2367] The probes having the nucleotide sequence represented by SEQ ID NOS: 26683, 26684, 26685, 26686, 26687, 26688, 26689, 26690, 26691, 26692, 26693, 26694, 26695, 26696, 26697, 26698, 26699, 26700, 26701, 26702, 26703, 26704 were selected from the ORFs having the nucleotide sequence represented by SEQ ID NO: 1879.

[2368] The probes having the nucleotide sequence represented by SEQ ID NOS: 26705, 26706, 26707, 26708, 26709, 26710, 26711, 26712, 26713, 26714, 26715 were selected from the ORFs having the nucleotide sequence represented by SEQ ID NO: 1880.

[2369] The probes having the nucleotide sequence represented by SEQ ID NOS: 26716, 26717, 26718, 26719, 26720, 26721, 26722, 26723, 26724, 26725, 26726 were selected from the ORFs having the nucleotide sequence represented by SEQ ID NO: 1881.

[2370] The probes having the nucleotide sequence represented by SEQ ID NOS: 26727, 26728, 26729, 26730, 26731, 26732, 26733, 26734, 26735, 26736, 26737 were selected from the ORFs having the nucleotide sequence represented by SEQ ID NO: 1882.

[2371] The probes having the nucleotide sequence represented by SEQ ID NOS: 26738, 26739, 26740, 26741, 26742, 26743, 26744, 26745, 26746, 26747, 26748 were selected from the ORFs having the nucleotide sequence represented by SEQ ID NO: 1883.

[2372] The probes having the nucleotide sequence represented by SEQ ID NOS: 26749, 26750, 26751, 26752, 26753, 26754, 26755, 26756, 26757, 26758, 26759 were selected from the ORFs having the nucleotide sequence represented by SEQ ID NO: 1884.

[2373] The probes having the nucleotide sequence represented by SEQ ID NOS: 26760, 26761, 26762, 26763, 26764, 26765, 26766, 26767, 26768, 26769, 26770 were selected from the ORFs having the nucleotide sequence represented by SEQ ID NO: 1885.

[2374] The probes having the nucleotide sequence represented by SEQ ID NOS: 26771, 26772, 26773, 26774, 26775, 26776, 26777, 26778, 26779, 26780, 26781 were selected from the ORFs having the nucleotide sequence represented by SEQ ID NO: 1886.

[2375] The probes having the nucleotide sequence represented by SEQ ID NOS: 26782, 26783, 26784, 26785, 26786, 26787, 26788, 26789, 26790, 26791, 26792 were selected from the ORFs having the nucleotide sequence represented by SEQ ID NO: 1887.

[2376] The probes having the nucleotide sequence represented by SEQ ID NOS: 26793, 26794, 26795, 26796, 26797, 26798, 26799, 26800, 26801, 26802, 26803 were selected from the ORFs having the nucleotide sequence represented by SEQ ID NO: 1888.

[2377] The probes having the nucleotide sequence represented by SEQ ID NOS: 26804, 26805, 26806, 26807, 26808, 26809, 26810, 26811, 26812, 26813, 26814 were selected from the ORFs having the nucleotide sequence represented by SEQ ID NO: 1889.

[2378] The probes having the nucleotide sequence represented by SEQ ID NOS: 26815, 26816, 26817, 26818, 26819, 26820, 26821, 26822, 26823, 26824, 26825 were selected from the ORFs having the nucleotide sequence represented by SEQ ID NO: 1890.

[2379] The probes having the nucleotide sequence represented by SEQ ID NOS: 26826, 26827, 26828, 26829, 26830, 26831, 26832, 26833, 26834, 26835, 26836 were selected from the ORFs having the nucleotide sequence represented by SEQ ID NO: 1891.

[2380] The probes having the nucleotide sequence represented by SEQ ID NOS: 26837, 26838, 26839, 26840, 26841, 26842, 26843, 26844, 26845, 26846, 26847 were selected from the ORFs having the nucleotide sequence represented by SEQ ID NO: 1892.

[2381] The probes having the nucleotide sequence represented by SEQ ID NOS: 26848, 26849, 26850, 26851, 26852, 26853, 26854, 26855, 26856, 26857, 26858 were selected from the ORFs having the nucleotide sequence represented by SEQ ID NO: 1893.

[2382] The probes having the nucleotide sequence represented by SEQ ID NOS: 26859, 26860, 26861, 26862, 26863, 26864, 26865, 26866, 26867, 26868, 26869 were selected from the ORFs having the nucleotide sequence represented by SEQ ID NO: 1894.

[2383] The probes having the nucleotide sequence represented by SEQ ID NOS: 26870, 26871, 26872, 26873, 26874, 26875, 26876, 26877, 26878, 26879, 26880 were selected from the ORFs having the nucleotide sequence represented by SEQ ID NO: 1895.

[2384] The probes having the nucleotide sequence represented by SEQ ID NOS: 26881, 26882, 26883, 26884, 26885, 26886, 26887, 26888, 26889, 26890, 26891 were selected from the ORFs having the nucleotide sequence represented by SEQ ID NO: 1896.

[2385] The probes having the nucleotide sequence represented by SEQ ID NOS: 26892, 26893, 26894, 26895, 26896, 26897, 26898, 26899, 26900, 26901, 26902, 26903, 26904, 26905, 26906, 26907, 26908, 26909, 26910, 26911, 26912, 26913 were selected from the ORFs having the nucleotide sequence represented by SEQ ID NO: 1897.

[2386] The probes having the nucleotide sequence represented by SEQ ID NOS: 26914, 26915, 26916, 26917, 26918, 26919, 26920, 26921, 26922, 26923, 26924 were selected from the ORFs having the nucleotide sequence represented by SEQ ID NO: 1898.

[2387] The probes having the nucleotide sequence represented by SEQ ID NOS: 26925, 26926, 26927, 26928, 26929, 26930, 26931, 26932, 26933, 26934, 26935 were selected from the ORFs having the nucleotide sequence represented by SEQ ID NO: 1899.

[2388] The probes having the nucleotide sequence represented by SEQ ID NOS: 26936, 26937, 26938, 26939, 26940, 26941, 26942, 26943, 26944, 26945, 26946 were selected from the ORFs having the nucleotide sequence represented by SEQ ID NO: 1900.

[2389] The probes having the nucleotide sequence represented by SEQ ID NOS: 26947, 26948, 26949, 26950, 26951, 26952, 26953, 26954, 26955, 26956, 26957 were selected from the ORFs having the nucleotide sequence represented by SEQ ID NO: 1901.

[2390] The probes having the nucleotide sequence represented by SEQ ID NOS: 26958, 26959, 26960, 26961, 26962, 26963, 26964, 26965, 26966, 26967, 26968 were selected from the ORFs having the nucleotide sequence represented by SEQ ID NO: 1902.

[2391] The probes having the nucleotide sequence represented by SEQ ID NOS: 26969, 26970, 26971, 26972, 26973, 26974, 26975, 26976, 26977, 26978, 26979 were selected from the ORFs having the nucleotide sequence represented by SEQ ID NO: 1903.

[2392] The probes having the nucleotide sequence represented by SEQ ID NOS: 26980, 26981, 26982, 26983, 26984, 26985, 26986, 26987, 26988, 26989, 26990 were selected from the ORFs having the nucleotide sequence represented by SEQ ID NO: 1904.

[2393] The probes having the nucleotide sequence represented by SEQ ID NOS: 26991, 26992, 26993, 26994, 26995, 26996, 26997, 26998, 26999, 27000, 27001 were selected from the ORFs having the nucleotide sequence represented by SEQ ID NO: 1905.

[2394] The probes having the nucleotide sequence represented by SEQ ID NOS: 27002, 27003, 27004, 27005, 27006, 27007, 27008, 27009, 27010, 27011, 27012 were selected from the ORFs having the nucleotide sequence represented by SEQ ID NO: 1906.

[2395] The probes having the nucleotide sequence represented by SEQ ID NOS: 27013, 27014, 27015, 27016, 27017, 27018, 27019, 27020, 27021, 27022, 27023 were selected from the ORFs having the nucleotide sequence represented by SEQ ID NO: 1907.

[2396] The probes having the nucleotide sequence represented by SEQ ID NOS: 27024, 27025, 27026, 27027, 27028, 27029, 27030, 27031, 27032, 27033, 27034 were selected from the ORFs having the nucleotide sequence represented by SEQ ID NO: 1908.

[2397] The probes having the nucleotide sequence represented by SEQ ID NOS: 27035, 27036, 27037, 27038, 27039, 27040, 27041, 27042, 27043, 27044, 27045 were selected from the ORFs having the nucleotide sequence represented by SEQ ID NO: 1909.

[2398] The probes having the nucleotide sequence represented by SEQ ID NOS: 27046, 27047, 27048, 27049, 27050, 27051, 27052, 27053, 27054, 27055, 27056 were selected from the ORFs having the nucleotide sequence represented by SEQ ID NO: 1910.

[2399] The probes having the nucleotide sequence represented by SEQ ID NOS: 27057, 27058, 27059, 27060, 27061, 27062, 27063, 27064, 27065, 27066, 27067 were selected from the ORFs having the nucleotide sequence represented by SEQ ID NO: 1911.

[2400] The probes having the nucleotide sequence represented by SEQ ID NOS: 27068, 27069, 27070, 27071, 27072, 27073, 27074, 27075, 27076, 27077, 27078 were selected from the ORFs having the nucleotide sequence represented by SEQ ID NO: 1912.

[2401] The probes having the nucleotide sequence represented by SEQ ID NOS: 27079, 27080, 27081, 27082, 27083, 27084, 27085, 27086, 27087, 27088, 27089 were selected from the ORFs having the nucleotide sequence represented by SEQ ID NO: 1913.

[2402] The probes having the nucleotide sequence represented by SEQ ID NOS: 27090, 27091, 27092, 27093, 27094, 27095, 27096, 27097, 27098, 27099, 27100 were selected from the ORFs having the nucleotide sequence represented by SEQ ID NO: 1914.

[2403] The probes having the nucleotide sequence represented by SEQ ID NOS: 27101, 27102, 27103, 27104, 27105, 27106, 27107, 27108, 27109, 27110, 27111 were selected from the ORFs having the nucleotide sequence represented by SEQ ID NO: 1915.

[2404] The probes having the nucleotide sequence represented by SEQ ID NOS: 27112, 27113, 27114, 27115, 27116, 27117, 27118, 27119, 27120, 27121, 27122 were selected from the ORFs having the nucleotide sequence represented by SEQ ID NO: 1916.

[2405] The probes having the nucleotide sequence represented by SEQ ID NOS: 27123, 27124, 27125, 27126, 27127, 27128, 27129, 27130, 27131, 27132, 27133 were selected from the ORFs having the nucleotide sequence represented by SEQ ID NO: 1917.

[2406] The probes having the nucleotide sequence represented by SEQ ID NOS: 27134, 27135, 27136, 27137, 27138, 27139, 27140, 27141, 27142, 27143, 27144, 27145, 27146, 27147, 27148, 27149, 27150, 27151, 27152, 27153, 27154, 27155 were selected from the ORFs having the nucleotide sequence represented by SEQ ID NO: 1918.

[2407] The probes having the nucleotide sequence represented by SEQ ID NOS: 27156, 27157, 27158, 27159, 27160, 27161, 27162, 27163, 27164, 27165, 27166 were selected from the ORFs having the nucleotide sequence represented by SEQ ID NO: 1919.

[2408] The probes having the nucleotide sequence represented by SEQ ID NOS: 27167, 27168, 27169, 27170, 27171, 27172, 27173, 27174, 27175, 27176, 27177 were selected from the ORFs having the nucleotide sequence represented by SEQ ID NO: 1920.

[2409] The probes having the nucleotide sequence represented by SEQ ID NOS: 27178, 27179, 27180, 27181, 27182, 27183, 27184, 27185, 27186, 27187, 27188 were selected from the ORFs having the nucleotide sequence represented by SEQ ID NO: 1921.

[2410] The probes having the nucleotide sequence represented by SEQ ID NOS: 27189, 27190, 27191, 27192, 27193, 27194, 27195, 27196, 27197, 27198, 27199 were selected from the ORFs having the nucleotide sequence represented by SEQ ID NO: 1922.

[2411] The probes having the nucleotide sequence represented by SEQ ID NOS: 27200, 27201, 27202, 27203, 27204, 27205, 27206, 27207, 27208, 27209, 27210 were selected from the ORFs having the nucleotide sequence represented by SEQ ID NO: 1923.

[2412] The probes having the nucleotide sequence represented by SEQ ID NOS: 27211, 27212, 27213, 27214, 27215, 27216, 27217, 27218, 27219, 27220, 27221 were selected from the ORFs having the nucleotide sequence represented by SEQ ID NO: 1924.

[2413] The probes having the nucleotide sequence represented by SEQ ID NOS: 27222, 27223, 27224, 27225, 27226, 27227, 27228, 27229, 27230, 27231, 27232 were selected from the ORFs having the nucleotide sequence represented by SEQ ID NO: 1925.

[2414] The probes having the nucleotide sequence represented by SEQ ID NOS: 27233, 27234, 27235, 27236, 27237, 27238, 27239, 27240, 27241, 27242, 27243 were selected from the ORFs having the nucleotide sequence represented by SEQ ID NO: 1926.

[2415] The probes having the nucleotide sequence represented by SEQ ID NOS: 27244, 27245, 27246, 27247, 27248, 27249, 27250, 27251, 27252, 27253, 27254 were selected from the ORFs having the nucleotide sequence represented by SEQ ID NO: 1927.

[2416] The probes having the nucleotide sequence represented by SEQ ID NOS: 27255, 27256, 27257, 27258, 27259, 27260, 27261, 27262, 27263, 27264, 27265 were selected from the ORFs having the nucleotide sequence represented by SEQ ID NO: 1928.

[2417] The probes having the nucleotide sequence represented by SEQ ID NOS: 27266, 27267, 27268, 27269, 27270, 27271, 27272, 27273, 27274, 27275, 27276 were selected from the ORFs having the nucleotide sequence represented by SEQ ID NO: 1929.

[2418] The probes having the nucleotide sequence represented by SEQ ID NOS: 27277, 27278, 27279, 27280, 27281, 27282, 27283, 27284, 27285, 27286, 27287 were selected from the ORFs having the nucleotide sequence represented by SEQ ID NO: 1930.

[2419] The probes having the nucleotide sequence represented by SEQ ID NOS: 27288, 27289, 27290, 27291, 27292, 27293, 27294, 27295, 27296, 27297, 27298 were selected from the ORFs having the nucleotide sequence represented by SEQ ID NO: 1931.

[2420] The probes having the nucleotide sequence represented by SEQ ID NOS: 27299, 27300, 27301, 27302, 27303, 27304, 27305, 27306, 27307, 27308, 27309 were selected from the ORFs having the nucleotide sequence represented by SEQ ID NO: 1932.

[2421] The probes having the nucleotide sequence represented by SEQ ID NOS: 27310, 27311, 27312, 27313, 27314, 27315, 27316, 27317, 27318, 27319, 27320 were selected from the ORFs having the nucleotide sequence represented by SEQ ID NO: 1933.

[2422] The probes having the nucleotide sequence represented by SEQ ID NOS: 27321, 27322, 27323, 27324, 27325, 27326, 27327, 27328, 27329, 27330, 27331 were selected from the ORFs having the nucleotide sequence represented by SEQ ID NO: 1934.

[2423] The probes having the nucleotide sequence represented by SEQ ID NOS: 27332, 27333, 27334, 27335, 27336, 27337, 27338, 27339, 27340, 27341, 27342 were selected from the ORFs having the nucleotide sequence represented by SEQ ID NO: 1935.

[2424] The probes having the nucleotide sequence represented by SEQ ID NOS: 27343, 27344, 27345, 27346, 27347, 27348, 27349, 27350, 27351, 27352, 27353 were selected from the ORFs having the nucleotide sequence represented by SEQ ID NO: 1936.

[2425] The probes having the nucleotide sequence represented by SEQ ID NOS: 27354, 27355, 27356, 27357, 27358, 27359, 27360, 27361, 27362, 27363, 27364 were selected from the ORFs having the nucleotide sequence represented by SEQ ID NO: 1937.

[2426] The probes having the nucleotide sequence represented by SEQ ID NOS: 27365, 27366, 27367, 27368, 27369, 27370, 27371, 27372, 27373, 27374, 27375 were selected from the ORFs having the nucleotide sequence represented by SEQ ID NO: 1938.

[2427] The probes having the nucleotide sequence represented by SEQ ID NOS: 27376, 27377, 27378, 27379, 27380, 27381, 27382, 27383, 27384, 27385, 27386 were selected from the ORFs having the nucleotide sequence represented by SEQ ID NO: 1939.

[2428] The probes having the nucleotide sequence represented by SEQ ID NOS: 27387, 27388, 27389, 27390, 27391, 27392, 27393, 27394, 27395, 27396, 27397 were selected from the ORFs having the nucleotide sequence represented by SEQ ID NO: 1940.

[2429] The probes having the nucleotide sequence represented by SEQ ID NOS: 27398, 27399, 27400, 27401, 27402, 27403, 27404, 27405, 27406, 27407, 27408 were selected from the ORFs having the nucleotide sequence represented by SEQ ID NO: 1941.

[2430] The probes having the nucleotide sequence represented by SEQ ID NOS: 27409, 27410, 27411, 27412, 27413, 27414, 27415, 27416, 27417, 27418, 27419 were selected from the ORFs having the nucleotide sequence represented by SEQ ID NO: 1942.

[2431] The probes having the nucleotide sequence represented by SEQ ID NOS: 27420, 27421, 27422, 27423, 27424, 27425, 27426, 27427, 27428, 27429, 27430 were selected from the ORFs having the nucleotide sequence represented by SEQ ID NO: 1943.

[2432] The probes having the nucleotide sequence represented by SEQ ID NOS: 27431, 27432, 27433, 27434, 27435, 27436, 27437, 27438, 27439, 27440, 27441 were selected from the ORFs having the nucleotide sequence represented by SEQ ID NO: 1944.

[2433] The probes having the nucleotide sequence represented by SEQ ID NOS: 27442, 27443, 27444, 27445, 27446, 27447, 27448, 27449, 27450, 27451, 27452 were selected from the ORFs having the nucleotide sequence represented by SEQ ID NO: 1945.

[2434] The probes having the nucleotide sequence represented by SEQ ID NOS: 27453, 27454, 27455, 27456, 27457, 27458, 27459, 27460, 27461, 27462, 27463 were selected from the ORFs having the nucleotide sequence represented by SEQ ID NO: 1946.

[2435] The probes having the nucleotide sequence represented by SEQ ID NOS: 27464, 27465, 27466, 27467, 27468, 27469, 27470, 27471, 27472, 27473, 27474 were selected from the ORFs having the nucleotide sequence represented by SEQ ID NO: 1947.

[2436] The probes having the nucleotide sequence represented by SEQ ID NOS: 27475, 27476, 27477, 27478, 27479, 27480, 27481, 27482, 27483, 27484, 27485 were selected from the ORFs having the nucleotide sequence represented by SEQ ID NO: 1948.

[2437] The probes having the nucleotide sequence represented by SEQ ID NOS: 27486, 27487, 27488, 27489, 27490, 27491, 27492, 27493, 27494, 27495, 27496 were selected from the ORFs having the nucleotide sequence represented by SEQ ID NO: 1949.

[2438] The probes having the nucleotide sequence represented by SEQ ID NOS: 27497, 27498, 27499, 27500, 27501, 27502, 27503, 27504, 27505, 27506, 27507 were selected from the ORFs having the nucleotide sequence represented by SEQ ID NO: 1950.

[2439] The probes having the nucleotide sequence represented by SEQ ID NOS: 27508, 27509, 27510, 27511, 27512, 27513, 27514, 27515, 27516, 27517, 27518 were selected from the ORFs having the nucleotide sequence represented by SEQ ID NO: 1951.

[2440] The probes having the nucleotide sequence represented by SEQ ID NOS: 27519, 27520, 27521, 27522, 27523, 27524, 27525, 27526, 27527, 27528, 27529 were selected from the ORFs having the nucleotide sequence represented by SEQ ID NO: 1952.

[2441] The probes having the nucleotide sequence represented by SEQ ID NOS: 27530, 27531, 27532, 27533, 27534, 27535, 27536, 27537, 27538, 27539, 27540 were selected from the ORFs having the nucleotide sequence represented by SEQ ID NO: 1953.

[2442] The probes having the nucleotide sequence represented by SEQ ID NOS: 27541, 27542, 27543, 27544, 27545, 27546, 27547, 27548, 27549, 27550, 27551 were selected from the ORFs having the nucleotide sequence represented by SEQ ID NO: 1954.

[2443] The probes having the nucleotide sequence represented by SEQ ID NOS: 27552, 27553, 27554, 27555, 27556, 27557, 27558, 27559, 27560, 27561, 27562 were selected from the ORFs having the nucleotide sequence represented by SEQ ID NO: 1955.

[2444] The probes having the nucleotide sequence represented by SEQ ID NOS: 27563, 27564, 27565, 27566, 27567, 27568, 27569, 27570, 27571, 27572, 27573 were selected from the ORFs having the nucleotide sequence represented by SEQ ID NO: 1956.

[2445] The probes having the nucleotide sequence represented by SEQ ID NOS: 27574, 27575, 27576, 27577, 27578, 27579, 27580, 27581, 27582, 27583, 27584 were selected from the ORFs having the nucleotide sequence represented by SEQ ID NO: 1957.

[2446] The probes having the nucleotide sequence represented by SEQ ID NOS: 27585, 27586, 27587, 27588, 27589, 27590, 27591, 27592, 27593, 27594, 27595 were selected from the ORFs having the nucleotide sequence represented by SEQ ID NO: 1958.

[2447] The probes having the nucleotide sequence represented by SEQ ID NOS: 27596, 27597, 27598, 27599, 27600, 27601, 27602, 27603, 27604, 27605, 27606 were selected from the ORFs having the nucleotide sequence represented by SEQ ID NO: 1959.

[2448] The probes having the nucleotide sequence represented by SEQ ID NOS: 27607, 27608, 27609, 27610, 27611, 27612, 27613, 27614, 27615, 27616, 27617 were selected from the ORFs having the nucleotide sequence represented by SEQ ID NO: 1960.

[2449] The probes having the nucleotide sequence represented by SEQ ID NOS: 27618, 27619, 27620, 27621, 27622, 27623, 27624, 27625, 27626, 27627, 27628 were selected from the ORFs having the nucleotide sequence represented by SEQ ID NO: 1961.

[2450] The probes having the nucleotide sequence represented by SEQ ID NOS: 27629, 27630, 27631, 27632, 27633, 27634, 27635, 27636, 27637, 27638, 27639 were selected from the ORFs having the nucleotide sequence represented by SEQ ID NO: 1962.

[2451] The probes having the nucleotide sequence represented by SEQ ID NOS: 27640, 27641, 27642, 27643, 27644, 27645, 27646, 27647, 27648, 27649, 27650 were selected from the ORFs having the nucleotide sequence represented by SEQ ID NO: 1963.

[2452] The probes having the nucleotide sequence represented by SEQ ID NOS: 27651, 27652, 27653, 27654, 27655, 27656, 27657, 27658, 27659, 27660, 27661 were selected from the ORFs having the nucleotide sequence represented by SEQ ID NO: 1964.

[2453] The probes having the nucleotide sequence represented by SEQ ID NOS: 27662, 27663, 27664, 27665, 27666, 27667, 27668, 27669, 27670, 27671, 27672 were selected from the ORFs having the nucleotide sequence represented by SEQ ID NO: 1965.

[2454] The probes having the nucleotide sequence represented by SEQ ID NOS: 27673, 27674, 27675, 27676, 27677, 27678, 27679, 27680, 27681, 27682, 27683 were selected from the ORFs having the nucleotide sequence represented by SEQ ID NO: 1966.

[2455] The probes having the nucleotide sequence represented by SEQ ID NOS: 27684, 27685, 27686, 27687, 27688, 27689, 27690, 27691, 27692, 27693, 27694 were selected from the ORFs having the nucleotide sequence represented by SEQ ID NO: 1967.

[2456] The probes having the nucleotide sequence represented by SEQ ID NOS: 27695, 27696, 27697, 27698, 27699, 27700, 27701, 27702, 27703, 27704, 27705 were selected from the ORFs having the nucleotide sequence represented by SEQ ID NO: 1968.

[2457] The probes having the nucleotide sequence represented by SEQ ID NOS: 27706, 27707, 27708, 27709, 27710, 27711, 27712, 27713, 27714, 27715, 27716 were selected from the ORFs having the nucleotide sequence represented by SEQ ID NO: 1969.

[2458] The probes having the nucleotide sequence represented by SEQ ID NOS: 27717, 27718, 27719, 27720, 27721, 27722, 27723, 27724, 27725, 27726, 27727 were selected from the ORFs having the nucleotide sequence represented by SEQ ID NO: 1970.

[2459] The probes having the nucleotide sequence represented by SEQ ID NOS: 27728, 27729, 27730, 27731, 27732, 27733, 27734, 27735, 27736, 27737, 27738 were selected from the ORFs having the nucleotide sequence represented by SEQ ID NO: 1971.

[2460] The probes having the nucleotide sequence represented by SEQ ID NOS: 27739, 27740, 27741, 27742, 27743, 27744, 27745, 27746, 27747, 27748, 27749 were selected from the ORFs having the nucleotide sequence represented by SEQ ID NO: 1972.

[2461] The probes having the nucleotide sequence represented by SEQ ID NOS: 27750, 27751, 27752, 27753, 27754, 27755, 27756, 27757, 27758, 27759, 27760 were selected from the ORFs having the nucleotide sequence represented by SEQ ID NO: 1973.

[2462] The probes having the nucleotide sequence represented by SEQ ID NOS: 27761, 27762, 27763, 27764, 27765, 27766, 27767, 27768, 27769, 27770, 27771 were selected from the ORFs having the nucleotide sequence represented by SEQ ID NO: 1974.

[2463] The probes having the nucleotide sequence represented by SEQ ID NOS: 27772, 27773, 27774, 27775, 27776, 27777, 27778, 27779, 27780, 27781, 27782 were selected from the ORFs having the nucleotide sequence represented by SEQ ID NO: 1975.

[2464] The probes having the nucleotide sequence represented by SEQ ID NOS: 27783, 27784, 27785, 27786, 27787, 27788, 27789, 27790, 27791, 27792, 27793 were selected from the ORFs having the nucleotide sequence represented by SEQ ID NO: 1976.

[2465] The probes having the nucleotide sequence represented by SEQ ID NOS: 27794, 27795, 27796, 27797, 27798, 27799, 27800, 27801, 27802, 27803, 27804 were selected from the ORFs having the nucleotide sequence represented by SEQ ID NO: 1977.

[2466] The probes having the nucleotide sequence represented by SEQ ID NOS: 27805, 27806, 27807, 27808, 27809, 27810, 27811, 27812, 27813, 27814, 27815 were selected from the ORFs having the nucleotide sequence represented by SEQ ID NO: 1978.

[2467] The probes having the nucleotide sequence represented by SEQ ID NOS: 27816, 27817, 27818, 27819, 27820, 27821, 27822, 27823, 27824, 27825, 27826 were selected from the ORFs having the nucleotide sequence represented by SEQ ID NO: 1979.

[2468] The probes having the nucleotide sequence represented by SEQ ID NOS: 27827, 2782.8, 27829, 27830, 27831, 27832, 27833, 27834, 27835, 27836, 27837 were selected from the ORFs having the nucleotide sequence represented by SEQ ID NO: 1980.

[2469] The probes having the nucleotide sequence represented by SEQ ID NOS: 27838, 27839, 27840, 27841, 27842, 27843, 27844, 27845, 27846, 27847, 27848 were selected from the ORFs having the nucleotide sequence represented by SEQ ID NO: 1981.

[2470] The probes having the nucleotide sequence represented by SEQ ID NOS: 27849, 27850, 27851, 27852, 27853, 27854, 27855, 27856, 27857, 27858, 27859 were selected from the ORFs having the nucleotide sequence represented by SEQ ID NO: 1982.

[2471] The probes having the nucleotide sequence represented by SEQ ID NOS: 27860, 27861, 27862, 27863, 27864, 27865, 27866, 27867, 27868, 27869, 27870 were selected from the ORFs having the nucleotide sequence represented by SEQ ID NO: 1983.

[2472] The probes having the nucleotide sequence represented by SEQ ID NOS: 27871, 27872, 27873, 27874, 27875, 27876, 27877, 27878, 27879, 27880, 27881 were selected from the ORFs having the nucleotide sequence represented by SEQ ID NO: 1984.

[2473] The probes having the nucleotide sequence represented by SEQ ID NOS: 27882, 27883, 27884, 27885, 27886, 27887, 27888, 27889, 27890, 27891, 27892 were selected from the ORFs having the nucleotide sequence represented by SEQ ID NO: 1985.

[2474] The probes having the nucleotide sequence represented by SEQ ID NOS: 27893, 27894, 27895, 27896, 27897, 27898, 27899, 27900, 27901, 27902, 27903 were selected from the ORFs having the nucleotide sequence represented by SEQ ID NO: 1986.

[2475] The probes having the nucleotide sequence represented by SEQ ID NOS: 27904, 27905, 27906, 27907, 27908, 27909, 27910, 27911, 27912, 27913, 27914 were selected from the ORFs having the nucleotide sequence represented by SEQ ID NO: 1987.

[2476] The probes having the nucleotide sequence represented by SEQ ID NOS: 27915, 27916, 27917, 27918, 27919, 27920, 27921, 27922, 27923, 27924, 27925 were selected from the ORFs having the nucleotide sequence represented by SEQ ID NO: 1988.

[2477] The probes having the nucleotide sequence represented by SEQ ID NOS: 27926, 27927, 27928, 27929, 27930, 27931, 27932, 27933, 27934, 27935, 27936 were selected from the ORFs having the nucleotide sequence represented by SEQ ID NO: 1989.

[2478] The probes having the nucleotide sequence represented by SEQ ID NOS: 27937, 27938, 27939, 27940, 27941, 27942, 27943, 27944, 27945, 27946, 27947 were selected from the ORFs having the nucleotide sequence represented by SEQ ID NO: 1990.

[2479] The probes having the nucleotide sequence represented by SEQ ID NOS: 27948, 27949, 27950, 27951, 27952, 27953, 27954, 27955, 27956, 27957, 27958 were selected from the ORFs having the nucleotide sequence represented by SEQ ID NO: 1991.

[2480] The probes having the nucleotide sequence represented by SEQ ID NOS: 27959, 27960, 27961, 27962, 27963, 27964, 27965, 27966, 27967, 27968, 27969 were selected from the ORFs having the nucleotide sequence represented by SEQ ID NO: 1992.

[2481] The probes having the nucleotide sequence represented by SEQ ID NOS: 27970, 27971, 27972, 27973, 27974, 27975, 27976, 27977, 27978, 27979, 27980 were selected from the ORFs having the nucleotide sequence represented by SEQ ID NO: 1993.

[2482] The probes having the nucleotide sequence represented by SEQ ID NOS: 27981, 27982, 27983, 27984, 27985, 27986, 27987, 27988, 27989, 27990 were selected from the ORFs having the nucleotide sequence represented by SEQ ID NO: 1994.

[2483] The probes having the nucleotide sequence represented by SEQ ID NOS: 27991, 27992, 27993, 27994, 27995, 27996, 27997, 27998, 27999, 28000, 28001 were selected from the ORFs having the nucleotide sequence represented by SEQ ID NO: 1995.

[2484] The probes having the nucleotide sequence represented by SEQ ID NOS: 28002, 28003, 28004, 28005, 28006, 28007, 28008, 28009, 28010, 28011, 28012 were selected from the ORFs having the nucleotide sequence represented by SEQ ID NO: 1996.

[2485] The probes having the nucleotide sequence represented by SEQ ID NOS: 28013, 28014, 28015, 28016, 28017, 28018, 28019, 28020, 28021, 28022, 28023 were selected from the ORFs having the nucleotide sequence represented by SEQ ID NO: 1997.

[2486] The probes having the nucleotide sequence represented by SEQ ID NOS: 28024, 28025, 28026, 28027, 28028, 28029, 28030, 28031, 28032, 28033, 28034 were selected from the ORFs having the nucleotide sequence represented by SEQ ID NO: 1998.

[2487] The probes having the nucleotide sequence represented by SEQ ID NOS: 28035, 28036, 28037, 28038, 28039, 28040, 28041, 28042, 28043, 28044, 28045 were selected from the ORFs having the nucleotide sequence represented by SEQ ID NO: 1999.

[2488] The probes having the nucleotide sequence represented by SEQ ID NOS: 28046, 28047, 28048, 28049, 28050, 28051, 28052, 28053, 28054, 28055, 28056 were selected from the ORFs having the nucleotide sequence represented by SEQ ID NO: 2000.

[2489] The probes having the nucleotide sequence represented by SEQ ID NOS: 28057, 28058, 28059, 28060, 28061, 28062, 28063, 28064, 28065, 28066, 28067 were selected from the ORFs having the nucleotide sequence represented by SEQ ID NO: 2001.

[2490] The probes having the nucleotide sequence represented by SEQ ID NOS: 28068, 28069, 28070, 28071, 28072, 28073, 28074, 28075, 28076, 28077, 28078 were selected from the ORFs having the nucleotide sequence represented by SEQ ID NO: 2002.

[2491] The probes having the nucleotide sequence represented by SEQ ID NOS: 28079, 28080, 28081, 28082, 28083, 28084, 28085, 28086, 28087, 28088, 28089 were selected from the ORFs having the nucleotide sequence represented by SEQ ID NO: 2003.

[2492] The probes having the nucleotide sequence represented by SEQ ID NOS: 28090, 28091, 28092, 28093, 28094, 28095, 28096, 28097, 28098, 28099, 28100 were selected from the ORFs having the nucleotide sequence represented by SEQ ID NO: 2004.

[2493] The probes having the nucleotide sequence represented by SEQ ID NOS: 28101, 28102, 28103, 28104, 28105, 28106, 28107, 28108, 28109, 28110, 28111 were selected from the ORFs having the nucleotide sequence represented by SEQ ID NO: 2005.

[2494] The probes having the nucleotide sequence represented by SEQ ID NOS: 28112, 28113, 28114, 28115, 28116, 28117, 28118, 28119, 28120, 28121, 28122 were selected from the ORFs having the nucleotide sequence represented by SEQ ID NO: 2006.

[2495] The probes having the nucleotide sequence represented by SEQ ID NOS: 28123, 28124, 28125, 28126, 28127, 28128, 28129, 28130, 28131, 28132, 28133 were selected from the ORFs having the nucleotide sequence represented by SEQ ID NO: 2007.

[2496] The probes having the nucleotide sequence represented by SEQ ID NOS: 28134, 28135, 28136, 28137, 28138, 28139, 28140, 28141, 28142, 28143, 28144 were selected from the ORFs having the nucleotide sequence represented by SEQ ID NO: 2008.

[2497] The probes having the nucleotide sequence represented by SEQ ID NOS: 28145, 28146, 28147, 28148, 28149, 28150, 28151, 28152, 28153, 28154, 28155 were selected from the ORFs having the nucleotide sequence represented by SEQ ID NO: 2009.

[2498] The probes having the nucleotide sequence represented by SEQ ID NOS: 28156, 28157, 28158, 28159, 28160, 28161, 28162, 28163, 28164, 28165, 28166 were selected from the ORFs having the nucleotide sequence represented by SEQ ID NO: 2010.

[2499] The probes having the nucleotide sequence represented by SEQ ID NOS: 28167, 28168, 28169, 28170, 28171, 28172, 28173, 28174, 28175, 28176, 28177 were selected from the ORFs having the nucleotide sequence represented by SEQ ID NO: 2011.

[2500] The probes having the nucleotide sequence represented by SEQ ID NOS: 28178, 28179, 28180, 28181, 28182, 28183, 28184, 28185, 28186, 28187, 28188 were selected from the ORFs having the nucleotide sequence represented by SEQ ID NO: 2012.

[2501] The probes having the nucleotide sequence represented by SEQ ID NOS: 28189, 28190, 28191, 28192, 28193, 28194, 28195, 28196, 28197, 28198, 28199 were selected from the ORFs having the nucleotide sequence represented by SEQ ID NO: 2013.

[2502] The probes having the nucleotide sequence represented by SEQ ID NOS: 28200, 28201, 28202, 28203, 28204, 28205, 28206, 28207, 28208, 28209, 28210 were selected from the ORFs having the nucleotide sequence represented by SEQ ID NO: 2014.

[2503] The probes having the nucleotide sequence represented by SEQ ID NOS: 28211, 28212, 28213, 28214, 28215, 28216, 28217, 28218, 28219, 28220, 28221 were selected from the ORFs having the nucleotide sequence represented by SEQ ID NO: 2015.

[2504] The probes having the nucleotide sequence represented by SEQ ID NOS: 28222, 28223, 28224, 28225, 28226, 28227, 28228, 28229, 28230, 28231, 28232 were selected from the ORFs having the nucleotide sequence represented by SEQ ID NO: 2016.

[2505] The probes having the nucleotide sequence represented by SEQ ID NOS: 28233, 28234, 28235, 28236, 28237, 28238, 28239, 28240, 28241, 28242, 28243 were selected from the ORFs having the nucleotide sequence represented by SEQ ID NO: 2017.

[2506] The probes having the nucleotide sequence represented by SEQ ID NOS: 28244, 28245, 28246, 28247, 28248, 28249, 28250, 28251, 28252, 28253, 28254 were selected from the ORFs having the nucleotide sequence represented by SEQ ID NO: 2018.

[2507] The probes having the nucleotide sequence represented by SEQ ID NOS: 28255, 28256, 28257, 28258, 28259, 28260, 28261, 28262, 28263, 28264, 28265 were selected from the ORFs having the nucleotide sequence represented by SEQ ID NO: 2019.

[2508] The probes having the nucleotide sequence represented by SEQ ID NOS: 28266, 28267, 28268, 28269, 28270, 28271, 28272, 28273, 28274, 28275, 28276 were selected from the ORFs having the nucleotide sequence represented by SEQ ID NO: 2020.

[2509] The probes having the nucleotide sequence represented by SEQ ID NOS: 28277, 28278, 28279, 28280, 28281, 28282, 28283, 28284, 28285, 28286, 28287 were selected from the ORFs having the nucleotide sequence represented by SEQ ID NO: 2021.

[2510] The probes having the nucleotide sequence represented by SEQ ID NOS: 28288, 28289, 28290, 28291, 28292, 28293, 28294, 28295, 28296, 28297, 28298 were selected from the ORFs having the nucleotide sequence represented by SEQ ID NO: 2022.

[2511] The probes having the nucleotide sequence represented by SEQ ID NOS: 28299, 28300, 28301, 28302, 28303, 28304, 28305, 28306, 28307, 28308, 28309 were selected from the ORFs having the nucleotide sequence represented by SEQ ID NO: 2023.

[2512] The probes having the nucleotide sequence represented by SEQ ID NOS: 28310, 28311, 28312, 28313, 28314, 28315, 28316, 28317, 28318, 28319, 28320 were selected from the ORFs having the nucleotide sequence represented by SEQ ID NO: 2024.

[2513] The probes having the nucleotide sequence represented by SEQ ID NOS: 28321, 28322, 28323, 28324, 28325, 28326, 28327, 28328, 28329, 28330, 28331 were selected from the ORFs having the nucleotide sequence represented by SEQ ID NO: 2025.

[2514] The probes having the nucleotide sequence represented by SEQ ID NOS: 28332, 28333, 28334, 28335, 28336, 28337, 28338, 28339, 28340, 28341, 28342 were selected from the ORFs having the nucleotide sequence represented by SEQ ID NO: 2026.

[2515] The probes having the nucleotide sequence represented by SEQ ID NOS: 28343, 28344, 28345, 28346, 28347, 28348, 28349, 28350, 28351, 28352, 28353 were selected from the ORFs having the nucleotide sequence represented by SEQ ID NO: 2027.

[2516] The probes having the nucleotide sequence represented by SEQ ID NOS: 28354, 28355, 28356, 28357, 28358, 28359, 28360, 28361, 28362, 28363, 28364 were selected from the ORFs having the nucleotide sequence represented by SEQ ID NO: 2028.

[2517] The probes having the nucleotide sequence represented by SEQ ID NOS: 28365, 28366, 28367, 28368, 28369, 28370, 28371, 28372, 28373, 28374, 28375 were selected from the ORFs having the nucleotide sequence represented by SEQ ID NO: 2029.

[2518] The probes having the nucleotide sequence represented by SEQ ID NOS: 28376, 28377, 28378, 28379, 28380, 28381, 28382, 28383, 28384, 28385, 28386 were selected from the ORFs having the nucleotide sequence represented by SEQ ID NO: 2030.

[2519] The probes having the nucleotide sequence represented by SEQ ID NOS: 28387, 28388, 28389, 28390, 28391, 28392, 28393, 28394, 28395, 28396, 28397 were selected from the ORFs having the nucleotide sequence represented by SEQ ID NO: 2031.

[2520] The probes having the nucleotide sequence represented by SEQ ID NOS: 28398, 28399, 28400, 28401, 28402, 28403, 28404, 28405, 28406, 28407, 28408 were selected from the ORFs having the nucleotide sequence represented by SEQ ID NO: 2032.

[2521] The probes having the nucleotide sequence represented by SEQ ID NOS: 28409, 28410, 28411, 28412, 28413, 28414, 28415, 28416, 28417, 28418, 28419 were selected from the ORFs having the nucleotide sequence represented by SEQ ID NO: 2033.

[2522] The probes having the nucleotide sequence represented by SEQ ID NOS: 28420, 28421, 28422, 28423, 28424, 28425, 28426, 28427, 28428, 28429, 28430 were selected from the ORFs having the nucleotide sequence represented by SEQ ID NO: 2034.

[2523] The probes having the nucleotide sequence represented by SEQ ID NOS: 28431, 28432, 28433, 28434, 28435, 28436, 28437, 28438, 28439, 28440, 28441 were selected from the ORFs having the nucleotide sequence represented by SEQ ID NO: 2035.

[2524] The probes having the nucleotide sequence represented by SEQ ID NOS: 28442, 28443, 28444, 28445, 28446, 28447, 28448, 28449, 28450, 28451, 28452 were selected from the ORFs having the nucleotide sequence represented by SEQ ID NO: 2036.

[2525] The probes having the nucleotide sequence represented by SEQ ID NOS: 28453, 28454, 28455, 28456, 28457, 28458, 28459, 28460, 28461, 28462, 28463 were selected from the ORFs having the nucleotide sequence represented by SEQ ID NO: 2037.

[2526] The probes having the nucleotide sequence represented by SEQ ID NOS: 28464, 28465, 28466, 28467, 28468, 28469, 28470, 28471, 28472, 28473, 28474 were selected from the ORFs having the nucleotide sequence represented by SEQ ID NO: 2038.

[2527] The probes having the nucleotide sequence represented by SEQ ID NOS: 28475, 28476, 28477, 28478, 28479, 28480, 28481, 28482, 28483, 28484, 28485 were selected from the ORFs having the nucleotide sequence represented by SEQ ID NO: 2039.

[2528] The probes having the nucleotide sequence represented by SEQ ID NOS: 28486, 28487, 28488, 28489, 28490, 28491, 28492, 28493, 28494, 28495, 28496 were selected from the ORFs having the nucleotide sequence represented by SEQ ID NO: 2040.

[2529] The probes having the nucleotide sequence represented by SEQ ID NOS: 28497, 28498, 28499, 28500, 28501, 28502, 28503, 28504, 28505, 28506, 28507 were selected from the ORFs having the nucleotide sequence represented by SEQ ID NO: 2041.

[2530] The probes having the nucleotide sequence represented by SEQ ID NOS: 28508, 28509, 28510, 28511, 28512, 28513, 28514, 28515, 28516, 28517, 28518 were selected from the ORFs having the nucleotide sequence represented by SEQ ID NO: 2042.

[2531] The probes having the nucleotide sequence represented by SEQ ID NOS: 28519, 28520, 28521, 28522, 28523, 28524, 28525, 28526, 28527, 28528, 28529 were selected from the ORFs having the nucleotide sequence represented by SEQ ID NO: 2043.

[2532] The probes having the nucleotide sequence represented by SEQ ID NOS: 28530, 28531, 28532, 28533, 28534, 28535, 28536, 28537, 28538, 28539, 28540 were selected from the ORFs having the nucleotide sequence represented by SEQ ID NO: 2044.

[2533] The probes having the nucleotide sequence represented by SEQ ID NOS: 28541, 28542, 28543, 28544, 28545, 28546, 28547, 28548, 28549, 28550, 28551 were selected from the ORFs having the nucleotide sequence represented by SEQ ID NO: 2045.

[2534] The probes having the nucleotide sequence represented by SEQ ID NOS: 28552, 28553, 28554, 28555, 28556, 28557, 28558, 28559, 28560, 28561, 28562 were selected from the ORFs having the nucleotide sequence represented by SEQ ID NO: 2046.

[2535] The probes having the nucleotide sequence represented by SEQ ID NOS: 28563, 28564, 28565, 28566, 28567, 28568, 28569, 28570, 28571, 28572, 28573 were selected from the ORFs having the nucleotide sequence represented by SEQ ID NO: 2047.

[2536] The probes having the nucleotide sequence represented by SEQ ID NOS: 28574, 28575, 28576, 28577, 28578, 28579, 28580, 28581, 28582, 28583, 28584 were selected from the ORFs having the nucleotide sequence represented by SEQ ID NO: 2048.

[2537] The probes having the nucleotide sequence represented by SEQ ID NOS: 28585, 28586, 28587, 28588, 28589, 28590, 28591, 28592, 28593, 28594, 28595 were selected from the ORFs having the nucleotide sequence represented by SEQ ID NO: 2049.

[2538] The probes having the nucleotide sequence represented by SEQ ID NOS: 28596, 28597, 28598, 28599, 28600, 28601, 28602, 28603, 28604, 28605, 28606 were selected from the ORFs having the nucleotide sequence represented by SEQ ID NO: 2050.

[2539] The probes having the nucleotide sequence represented by SEQ ID NOS: 28607, 28608, 28609, 28610, 28611, 28612, 28613, 28614, 28615, 28616, 28617 were selected from the ORFs having the nucleotide sequence represented by SEQ ID NO: 2051.

[2540] The probes having the nucleotide sequence represented by SEQ ID NOS: 28618, 28619, 28620, 28621, 28622, 28623, 28624, 28625, 28626, 28627, 28628 were selected from the ORFs having the nucleotide sequence represented by SEQ ID NO: 2052.

[2541] The probes having the nucleotide sequence represented by SEQ ID NOS: 28629, 28630, 28631, 28632, 28633, 28634, 28635, 28636, 28637, 28638, 28639 were selected from the ORFs having the nucleotide sequence represented by SEQ ID NO: 2053.

[2542] The probes having the nucleotide sequence represented by SEQ ID NOS: 28640, 28641, 28642, 28643, 28644, 28645, 28646, 28647, 28648, 28649, 28650 were selected from the ORFs having the nucleotide sequence represented by SEQ ID NO: 2054.

[2543] The probes having the nucleotide sequence represented by SEQ ID NOS: 28651, 28652, 28653, 28654, 28655, 28656, 28657, 28658, 28659, 28660, 28661 were selected from the ORFs having the nucleotide sequence represented by SEQ ID NO: 2055.

[2544] The probes having the nucleotide sequence represented by SEQ ID NOS: 28662, 28663, 28664, 28665, 28666, 28667, 28668, 28669, 28670, 28671, 28672 were selected from the ORFs having the nucleotide sequence represented by SEQ ID NO: 2056.

[2545] The probes having the nucleotide sequence represented by SEQ ID NOS: 28673, 28674, 28675, 28676, 28677, 28678, 28679, 28680, 28681, 28682, 28683 were selected from the ORFs having the nucleotide sequence represented by SEQ ID NO: 2057.

[2546] The probes having the nucleotide sequence represented by SEQ ID NOS: 28684, 28685, 28686, 28687, 28688, 28689, 28690, 28691, 28692, 28693, 28694 were selected from the ORFs having the nucleotide sequence represented by SEQ ID NO: 2058.

[2547] The probes having the nucleotide sequence represented by SEQ ID NOS: 28695, 28696, 28697, 28698, 28699, 28700, 28701, 28702, 28703, 28704, 28705 were selected from the ORFs having the nucleotide sequence represented by SEQ ID NO: 2059.

[2548] The probes having the nucleotide sequence represented by SEQ ID NOS: 28706, 28707, 28708, 28709, 28710, 28711, 28712, 28713, 28714, 28715, 28716 were selected from the ORFs having the nucleotide sequence represented by SEQ ID NO: 2060.

[2549] The probes having the nucleotide sequence represented by SEQ ID NOS: 28717, 28718, 28719, 28720, 28721, 28722, 28723, 28724, 28725, 28726, 28727 were selected from the ORFs having the nucleotide sequence represented by SEQ ID NO: 2061.

[2550] The probes having the nucleotide sequence represented by SEQ ID NOS: 28728, 28729, 28730, 28731, 28732, 28733, 28734, 28735, 28736, 28737, 28738 were selected from the ORFs having the nucleotide sequence represented by SEQ ID NO: 2062.

[2551] The probes having the nucleotide sequence represented by SEQ ID NOS: 28739, 28740, 28741, 28742, 28743, 28744, 28745, 28746, 28747, 28748, 28749 were selected from the ORFs having the nucleotide sequence represented by SEQ ID NO: 2063.

[2552] The probes having the nucleotide sequence represented by SEQ ID NOS: 28750, 28751, 28752, 28753, 28754, 28755, 28756, 28757, 28758, 28759, 28760 were selected from the ORFs having the nucleotide sequence represented by SEQ ID NO: 2064.

[2553] The probes having the nucleotide sequence represented by SEQ ID NOS: 28761, 28762, 28763, 28764, 28765, 28766, 28767, 28768, 28769, 28770, 28771 were selected from the ORFs having the nucleotide sequence represented by SEQ ID NO: 2065.

[2554] The probes having the nucleotide sequence represented by SEQ ID NOS: 28772, 28773, 28774, 28775, 28776, 28777, 28778, 28779, 28780, 28781, 28782 were selected from the ORFs having the nucleotide sequence represented by SEQ ID NO: 2066.

[2555] The probes having the nucleotide sequence represented by SEQ ID NOS: 28783, 28784, 28785, 28786, 28787, 28788, 28789, 28790, 28791, 28792, 28793 were selected from the ORFs having the nucleotide sequence represented by SEQ ID NO: 2067.

[2556] The probes having the nucleotide sequence represented by SEQ ID NOS: 28794, 28795, 28796, 28797, 28798, 28799, 28800, 28801, 28802, 28803, 28804 were selected from the ORFs having the nucleotide sequence represented by SEQ ID NO: 2068.

[2557] The probes having the nucleotide sequence represented by SEQ ID NOS: 28805, 28806, 28807, 28808, 28809, 28810, 28811, 28812, 28813, 28814, 28815 were selected from the ORFs having the nucleotide sequence represented by SEQ ID NO: 2069.

[2558] The probes having the nucleotide sequence represented by SEQ ID NOS: 28816, 28817, 28818, 28819, 28820, 28821, 28822, 28823, 28824, 28825, 28826 were selected from the ORFs having the nucleotide sequence represented by SEQ ID NO: 2070.

[2559] The probes having the nucleotide sequence represented by SEQ ID NOS: 28827, 28828, 28829, 28830, 28831, 28832, 28833, 28834, 28835, 28836, 28837 were selected from the ORFs having the nucleotide sequence represented by SEQ ID NO: 2071.

[2560] The probes having the nucleotide sequence represented by SEQ ID NOS: 28838, 28839, 28840, 28841, 28842, 28843, 28844, 28845, 28846, 28847, 28848 were selected from the ORFs having the nucleotide sequence represented by SEQ ID NO: 2072.

[2561] The probes having the nucleotide sequence represented by SEQ ID NOS: 28849, 28850, 28851, 28852, 28853, 28854, 28855, 28856, 28857, 28858, 28859 were selected from the ORFs having the nucleotide sequence represented by SEQ ID NO: 2073.

[2562] The probes having the nucleotide sequence represented by SEQ ID NOS: 28860, 28861, 28862, 28863, 28864, 28865, 28866, 28867, 28868, 28869, 28870 were selected from the ORFs having the nucleotide sequence represented by SEQ ID NO: 2074.

[2563] The probes having the nucleotide sequence represented by SEQ ID NOS: 28871, 28872, 28873, 28874, 28875, 28876, 28877, 28878, 28879, 28880, 28881 were selected from the ORFs having the nucleotide sequence represented by SEQ ID NO: 2075.

[2564] The probes having the nucleotide sequence represented by SEQ ID NOS: 28882, 28883, 28884, 28885, 28886, 28887, 28888, 28889, 28890, 28891, 28892 were selected from the ORFs having the nucleotide sequence represented by SEQ ID NO: 2076.

[2565] The probes having the nucleotide sequence represented by SEQ ID NOS: 28893, 28894, 28895, 28896, 28897, 28898, 28899, 28900, 28901, 28902, 28903 were selected from the ORFs having the nucleotide sequence represented by SEQ ID NO: 2077.

[2566] The probes having the nucleotide sequence represented by SEQ ID NOS: 28904, 28905, 28906, 28907, 28908, 28909, 28910, 28911, 28912, 28913, 28914 were selected from the ORFs having the nucleotide sequence represented by SEQ ID NO: 2078.

[2567] The probes having the nucleotide sequence represented by SEQ ID NOS: 28915, 28916, 28917, 28918, 28919, 28920, 28921, 28922, 28923, 28924, 28925 were selected from the ORFs having the nucleotide sequence represented by SEQ ID NO: 2079.

[2568] The probes having the nucleotide sequence represented by SEQ ID NOS: 28926, 28927, 28928, 28929, 28930, 28931, 28932, 28933, 28934, 28935, 28936 were selected from the ORFs having the nucleotide sequence represented by SEQ ID NO: 2080.

[2569] The probes having the nucleotide sequence represented by SEQ ID NOS: 28937, 28938, 28939, 28940, 28941, 28942, 28943, 28944, 28945, 28946, 28947 were selected from the ORFs having the nucleotide sequence represented by SEQ ID NO: 2081.

[2570] The probes having the nucleotide sequence represented by SEQ ID NOS: 28948, 28949, 28950, 28951, 28952, 28953, 28954, 28955, 28956, 28957, 28958 were selected from the ORFs having the nucleotide sequence represented by SEQ ID NO: 2082.

[2571] The probes having the nucleotide sequence represented by SEQ ID NOS: 28959, 28960, 28961, 28962, 28963, 28964, 28965, 28966, 28967, 28968, 28969 were selected from the ORFs having the nucleotide sequence represented by SEQ ID NO: 2083.

[2572] The probes having the nucleotide sequence represented by SEQ ID NOS: 28970, 28971, 28972, 28973, 28974, 28975, 28976, 28977, 28978, 28979, 28980 were selected from the ORFs having the nucleotide sequence represented by SEQ ID NO: 2084.

[2573] The probes having the nucleotide sequence represented by SEQ ID NOS: 28981, 28982, 28983, 28984, 28985, 28986, 28987, 28988, 28989, 28990, 28991 were selected from the ORFs having the nucleotide sequence represented by SEQ ID NO: 2085.

[2574] The probes having the nucleotide sequence represented by SEQ ID NOS: 28992, 28993, 28994, 28995, 28996, 28997, 28998, 28999, 29000, 29001, 29002 were selected from the ORFs having the nucleotide sequence represented by SEQ ID NO: 2086.

[2575] The probes having the nucleotide sequence represented by SEQ ID NOS: 29003, 29004, 29005, 29006, 29007, 29008, 29009, 29010, 29011, 29012, 29013 were selected from the ORFs having the nucleotide sequence represented by SEQ ID NO: 2087.

[2576] The probes having the nucleotide sequence represented by SEQ ID NOS: 29014, 29015, 29016, 29017, 29018, 29019, 29020, 29021, 29022, 29023, 29024 were selected from the ORFs having the nucleotide sequence represented by SEQ ID NO: 2088.

[2577] The probes having the nucleotide sequence represented by SEQ ID NOS: 29025, 29026, 29027, 29028, 29029, 29030, 29031, 29032, 29033, 29034, 29035 were selected from the ORFs having the nucleotide sequence represented by SEQ ID NO: 2089.

[2578] The probes having the nucleotide sequence represented by SEQ ID NOS: 29036, 29037, 29038, 29039, 29040, 29041, 29042, 29043, 29044, 29045, 29046 were selected from the ORFs having the nucleotide sequence represented by SEQ ID NO: 2090.

[2579] The probes having the nucleotide sequence represented by SEQ ID NOS: 29047, 29048, 29049, 29050, 29051, 29052, 29053, 29054, 29055, 29056, 29057 were selected from the ORFs having the nucleotide sequence represented by SEQ ID NO: 2091.

[2580] The probes having the nucleotide sequence represented by SEQ ID NOS: 29058, 29059, 29060, 29061, 29062, 29063, 29064, 29065, 29066, 29067, 29068 were selected from the ORFs having the nucleotide sequence represented by SEQ ID NO: 2092.

[2581] The probes having the nucleotide sequence represented by SEQ ID NOS: 29069, 29070, 29071, 29072, 29073, 29074, 29075, 29076, 29077, 29078, 29079 were selected from the ORFs having the nucleotide sequence represented by SEQ ID NO: 2093.

[2582] The probes having the nucleotide sequence represented by SEQ ID NOS: 29080, 29081, 29082, 29083, 29084, 29085, 29086, 29087, 29088, 29089, 29090 were selected from the ORFs having the nucleotide sequence represented by SEQ ID NO: 2094.

[2583] The probes having the nucleotide sequence represented by SEQ ID NOS: 29091, 29092, 29093, 29094, 29095, 29096, 29097, 29098, 29099, 29100, 29101 were selected from the ORFs having the nucleotide sequence represented by SEQ ID NO: 2095.

[2584] The probes having the nucleotide sequence represented by SEQ ID NOS: 29102, 29103, 29104, 29105, 29106, 29107, 29108, 29109, 29110, 29111, 29112 were selected from the ORFs having the nucleotide sequence represented by SEQ ID NO: 2096.

[2585] The probes having the nucleotide sequence represented by SEQ ID NOS: 29113, 29114, 29115, 29116, 29117, 29118, 29119, 29120, 29121, 29122, 29123 were selected from the ORFs having the nucleotide sequence represented by SEQ ID NO: 2097.

[2586] The probes having the nucleotide sequence represented by SEQ ID NOS: 29124, 29125, 29126, 29127, 29128, 29129, 29130, 29131, 29132, 29133, 29134 were selected from the ORFs having the nucleotide sequence represented by SEQ ID NO: 2098.

[2587] The probes having the nucleotide sequence represented by SEQ ID NOS: 29135, 29136, 29137, 29138, 29139, 29140, 29141, 29142, 29143, 29144, 29145 were selected from the ORFs having the nucleotide sequence represented by SEQ ID NO: 2099.

[2588] The probes having the nucleotide sequence represented by SEQ ID NOS: 29146, 29147, 29148, 29149, 29150, 29151, 29152, 29153, 29154, 29155, 29156 were selected from the ORFs having the nucleotide sequence represented by SEQ ID NO: 2100.

[2589] The probes having the nucleotide sequence represented by SEQ ID NOS: 29157, 29158, 29159, 29160, 29161, 29162, 29163, 29164, 29165, 29166, 29167 were selected from the ORFs having the nucleotide sequence represented by SEQ ID NO: 2101.

[2590] The probes having the nucleotide sequence represented by SEQ ID NOS: 29168, 29169, 29170, 29171, 29172, 29173, 29174, 29175, 29176, 29177, 29178 were selected from the ORFs having the nucleotide sequence represented by SEQ ID NO: 2102.

[2591] The probes having the nucleotide sequence represented by SEQ ID NOS: 29179, 29180, 29181, 29182, 29183, 29184, 29185, 29186, 29187, 29188, 29189 were selected from the ORFs having the nucleotide sequence represented by SEQ ID NO: 2103.

[2592] The probes having the nucleotide sequence represented by SEQ ID NOS: 29190, 29191, 29192, 29193, 29194, 29195, 29196, 29197, 29198, 29199, 29200 were selected from the ORFs having the nucleotide sequence represented by SEQ ID NO: 2104.

[2593] The probes having the nucleotide sequence represented by SEQ ID NOS: 29201, 29202, 29203, 29204, 29205, 29206, 29207, 29208, 29209, 29210, 29211 were selected from the ORFs having the nucleotide sequence represented by SEQ ID NO: 2105.

[2594] The probes having the nucleotide sequence represented by. SEQ ID NOS: 29212, 29213, 29214, 29215, 29216, 29217, 29218, 29219, 29220, 29221, 29222 were selected from the ORFs having the nucleotide sequence represented by SEQ ID NO: 2106.

[2595] The probes having the nucleotide sequence represented by SEQ ID NOS: 29223, 29224, 29225, 29226, 29227, 29228, 29229, 29230, 29231, 29232, 29233 were selected from the ORFs having the nucleotide sequence represented by SEQ ID NO: 2107.

[2596] The probes having the nucleotide sequence represented by SEQ ID NOS: 29234, 29235, 29236, 29237, 29238, 29239, 29240, 29241, 29242, 29243, 29244 were selected from the ORFs having the nucleotide sequence represented by SEQ ID NO: 2108.

[2597] The probes having the nucleotide sequence represented by SEQ ID NOS: 29245, 29246, 29247, 29248, 29249, 29250, 29251, 29252, 29253, 29254, 29255 were selected from the ORFs having the nucleotide sequence represented by SEQ ID NO: 2109.

[2598] The probes having the nucleotide sequence represented by SEQ ID NOS: 29256, 29257, 29258, 29259, 29260, 29261, 29262, 29263, 29264, 29265, 29266 were selected from the ORFs having the nucleotide sequence represented by SEQ ID NO: 2110.

[2599] The probes having the nucleotide sequence represented by SEQ ID NOS: 29267, 29268, 29269, 29270, 29271, 29272, 29273, 29274, 29275, 29276, 29277 were selected from the ORFs having the nucleotide sequence represented by SEQ ID NO: 2111.

[2600] The probes having the nucleotide sequence represented by SEQ ID NOS: 29278, 29279, 29280, 29281, 29282, 29283, 29284, 29285, 29286, 29287, 29288 were selected from the ORFs having the nucleotide sequence represented by SEQ ID NO: 2112.

[2601] The probes having the nucleotide sequence represented by SEQ ID NOS: 29289, 29290, 29291, 29292, 29293, 29294, 29295, 29296, 29297, 29298, 29299 were selected from the ORFs having the nucleotide sequence represented by SEQ ID NO: 2113.

[2602] The probes having the nucleotide sequence represented by SEQ ID NOS: 29300, 29301, 29302, 29303, 29304, 29305, 29306, 29307, 29308, 29309, 29310 were selected from the ORFs having the nucleotide sequence represented by SEQ ID NO: 2114.

[2603] The probes having the nucleotide sequence represented by SEQ ID NOS: 29311, 29312, 29313, 29314, 29315, 29316, 29317, 29318, 29319, 29320, 29321 were selected from the ORFs having the nucleotide sequence represented by SEQ ID NO: 2115.

[2604] The probes having the nucleotide sequence represented by SEQ ID NOS: 29322, 29323, 29324, 29325, 29326, 29327, 29328, 29329, 29330, 29331, 29332 were selected from the ORFs having the nucleotide sequence represented by SEQ ID NO: 2116.

[2605] The probes having the nucleotide sequence represented by SEQ ID NOS: 29333, 29334, 29335, 29336, 29337, 29338, 29339, 29340, 29341, 29342, 29343 were selected from the ORFs having the nucleotide sequence represented by SEQ ID NO: 2117.

[2606] The probes having the nucleotide sequence represented by SEQ ID NOS: 29344, 29345, 29346, 29347, 29348, 29349, 29350, 29351, 29352, 29353, 29354 were selected from the ORFs having the nucleotide sequence represented by SEQ ID NO: 2118.

[2607] The probes having the nucleotide sequence represented by SEQ ID NOS: 29355, 29356, 29357, 29358, 29359, 29360, 29361, 29362, 29363, 29364, 29365 were selected from the ORFs having the nucleotide sequence represented by SEQ ID NO: 2119.

[2608] The probes having the nucleotide sequence represented by SEQ ID NOS: 29366, 29367, 29368, 29369, 29370, 29371, 29372, 29373, 29374, 29375, 29376 were selected from the ORFs having the nucleotide sequence represented by SEQ ID NO: 2120.

[2609] The probes having the nucleotide sequence represented by SEQ ID NOS: 29377, 29378, 29379, 29380, 29381, 29382, 29383, 29384, 29385, 29386, 29387 were selected from the ORFs having the nucleotide sequence represented by SEQ ID NO: 2121.

[2610] The probes having the nucleotide sequence represented by SEQ ID NOS: 29388, 29389, 29390, 29391, 29392, 29393, 29394, 29395, 29396, 29397, 29398 were selected from the ORFs having the nucleotide sequence represented by SEQ ID NO: 2122.

[2611] The probes having the nucleotide sequence represented by SEQ ID NOS: 29399, 29400, 29401, 29402, 29403, 29404, 29405, 29406, 29407, 29408, 29409 were selected from the ORFs having the nucleotide sequence represented by SEQ ID NO: 2123.

[2612] The probes having the nucleotide sequence represented by SEQ ID NOS: 29410, 29411, 29412, 29413, 29414, 29415, 29416, 29417, 29418, 29419, 29420 were selected from the ORFs having the nucleotide sequence represented by SEQ ID NO: 2124.

[2613] The probes having the nucleotide sequence represented by SEQ ID NOS: 29421, 29422, 29423, 29424, 29425, 29426, 29427, 29428, 29429, 29430, 29431 were selected from the ORFs having the nucleotide sequence represented by SEQ ID NO: 2125.

[2614] The probes having the nucleotide sequence represented by SEQ ID NOS: 29432, 29433, 29434, 29435, 29436, 29437, 29438, 29439, 29440, 29441, 29442 were selected from the ORFs having the nucleotide sequence represented by SEQ ID NO: 2126.

[2615] The probes having the nucleotide sequence represented by SEQ ID NOS: 29443, 29444, 29445, 29446, 29447, 29448, 29449, 29450, 29451, 29452, 29453 were selected from the ORFs having the nucleotide sequence represented by SEQ ID NO: 2127.

[2616] The probes having the nucleotide sequence represented by SEQ ID NOS: 29454, 29455, 29456, 29457, 29458, 29459, 29460, 29461, 29462, 29463, 29464 were selected from the ORFs having the nucleotide sequence represented by SEQ ID NO: 2128.

[2617] The probes having the nucleotide sequence represented by SEQ ID NOS: 29465, 29466, 29467, 29468, 29469, 29470, 29471, 29472, 29473, 29474, 29475 were selected from the ORFs having the nucleotide sequence represented by SEQ ID NO: 2129.

[2618] The probes having the nucleotide sequence represented by SEQ ID NOS: 29476, 29477, 29478, 29479, 29480, 29481, 29482, 29483, 29484, 29485, 29486 were selected from the ORFs having the nucleotide sequence represented by SEQ ID NO: 2130.

[2619] The probes having the nucleotide sequence represented by SEQ ID NOS: 29487, 29488, 29489, 29490, 29491, 29492, 29493, 29494, 29495, 29496, 29497 were selected from the ORFs having the nucleotide sequence represented by SEQ ID NO: 2131.

[2620] The probes having the nucleotide sequence represented by SEQ ID NOS: 29498, 29499, 29500, 29501, 29502, 29503, 29504, 29505, 29506, 29507, 29508 were selected from the ORFs having the nucleotide sequence represented by SEQ ID NO: 2132.

[2621] The probes having the nucleotide sequence represented by SEQ ID NOS: 29509, 29510, 29511, 29512, 29513, 29514, 29515, 29516, 29517, 29518, 29519 were selected from the ORFs having the nucleotide sequence represented by SEQ ID NO: 2133.

[2622] The probes having the nucleotide sequence represented by SEQ ID NOS: 29520, 29521, 29522, 29523, 29524, 29525, 29526, 29527, 29528, 29529, 29530 were selected from the ORFs having the nucleotide sequence represented by SEQ ID NO: 2134.

[2623] The probes having the nucleotide sequence represented by SEQ ID NOS: 29531, 29532, 29533, 29534, 29535, 29536, 29537, 29538, 29539, 29540, 29541 were selected from the ORFs having the nucleotide sequence represented by SEQ ID NO: 2135.

[2624] The probes having the nucleotide sequence represented by SEQ ID NOS: 29542, 29543, 29544, 29545, 29546, 29547, 29548, 29549, 29550, 29551, 29552 were selected from the ORFs having the nucleotide sequence represented by SEQ ID NO: 2136.

[2625] The probes having the nucleotide sequence represented by SEQ ID NOS: 29553, 29554, 29555, 29556, 29557, 29558, 29559, 29560, 29561, 29562, 29563 were selected from the ORFs having the nucleotide sequence represented by SEQ ID NO: 2137.

[2626] The probes having the nucleotide sequence represented by SEQ ID NOS: 29564, 29565, 29566, 29567, 29568, 29569, 29570, 29571, 29572, 29573, 29574 were selected from the ORFs having the nucleotide sequence represented by SEQ ID NO: 2138.

[2627] The probes having the nucleotide sequence represented by SEQ ID NOS: 29575, 29576, 29577, 29578, 29579, 29580, 29581, 29582, 29583, 29584, 29585 were selected from the ORFs having the nucleotide sequence represented by SEQ ID NO: 2139.

[2628] The probes having the nucleotide sequence represented by SEQ ID NOS: 29586, 29587, 29588, 29589, 29590, 29591, 29592, 29593, 29594, 29595, 29596 were selected from the ORFs having the nucleotide sequence represented by SEQ ID NO: 2140.

[2629] The probes having the nucleotide sequence represented by SEQ ID NOS: 29597, 29598, 29599, 29600, 29601, 29602, 29603, 29604, 29605, 29606, 29607 were selected from the ORFs having the nucleotide sequence represented by SEQ ID NO: 2141.

[2630] The probes having the nucleotide sequence represented by SEQ ID NOS: 29608, 29609, 29610, 29611, 29612, 29613, 29614, 29615, 29616, 29617, 29618 were selected from the ORFs having the nucleotide sequence represented by SEQ ID NO: 2142.

[2631] The probes having the nucleotide sequence represented by SEQ ID NOS: 29619, 29620, 29621, 29622, 29623, 29624, 29625, 29626, 29627, 29628, 29629 were selected from the ORFs having the nucleotide sequence represented by SEQ ID NO: 2143.

[2632] The probes having the nucleotide sequence represented by SEQ ID NOS: 29630, 29631, 29632, 29633, 29634, 29635, 29636, 29637, 29638, 29639, 29640 were selected from the ORFs having the nucleotide sequence represented by SEQ ID NO: 2144.

[2633] The probes having the nucleotide sequence represented by SEQ ID NOS: 29641, 29642, 29643, 29644, 29645, 29646, 29647, 29648, 29649, 29650, 29651 were selected from the ORFs having the nucleotide sequence represented by SEQ ID NO: 2145.

[2634] The probes having the nucleotide sequence represented by SEQ ID NOS: 29652, 29653, 29654, 29655, 29656, 29657, 29658, 29659, 29660, 29661, 29662 were selected from the ORFs having the nucleotide sequence represented by SEQ ID NO: 2146.

[2635] The probes having the nucleotide sequence represented by SEQ ID NOS: 29663, 29664, 29665, 29666, 29667, 29668, 29669, 29670, 29671, 29672, 29673 were selected from the ORFs having the nucleotide sequence represented by SEQ ID NO: 2147.

[2636] The probes having the nucleotide sequence represented by SEQ ID NOS: 29674, 29675, 29676, 29677, 29678, 29679, 29680, 29681, 29682, 29683, 29684 were selected from the ORFs having the nucleotide sequence represented by SEQ ID NO: 2148.

[2637] The probes having the nucleotide sequence represented by SEQ ID NOS: 29685, 29686, 29687, 29688, 29689, 29690, 29691, 29692, 29693, 29694, 29695 were selected from the ORFs having the nucleotide sequence represented by SEQ ID NO: 2149.

[2638] The probes having the nucleotide sequence represented by SEQ ID NOS: 29696, 29697, 29698, 29699, 29700, 29701, 29702, 29703, 29704, 29705, 29706 were selected from the ORFs having the nucleotide sequence represented by SEQ ID NO: 2150.

[2639] The probes having the nucleotide sequence represented by SEQ ID NOS: 29707, 29708, 29709, 29710, 29711, 29712, 29713, 29714, 29715, 29716, 29717 were selected from the ORFs having the nucleotide sequence represented by SEQ ID NO: 2151.

[2640] The probes having the nucleotide sequence represented by SEQ ID NOS: 29718, 29719, 29720, 29721, 29722, 29723, 29724, 29725, 29726, 29727, 29728 were selected from the ORFs having the nucleotide sequence represented by SEQ ID NO: 2152.

[2641] The probes having the nucleotide sequence represented by SEQ ID NOS: 29729, 29730, 29731, 29732, 29733, 29734, 29735, 29736, 29737, 29738, 29739 were selected from the ORFs having the nucleotide sequence represented by SEQ ID NO: 2153.

[2642] The probes having the nucleotide sequence represented by SEQ ID NOS: 29740, 29741, 29742, 29743, 29744, 29745, 29746, 29747, 29748, 29749, 29750 were selected from the ORFs having the nucleotide sequence represented by SEQ ID NO: 2154.

[2643] The probes having the nucleotide sequence represented by SEQ ID NOS: 29751, 29752, 29753, 29754, 29755, 29756, 29757, 29758, 29759, 29760, 29761 were selected from the ORFs having the nucleotide sequence represented by SEQ ID NO: 2155.

[2644] The probes having the nucleotide sequence represented by SEQ ID NOS: 29762, 29763, 29764, 29765, 29766, 29767, 29768, 29769, 29770, 29771, 29772 were selected from the ORFs having the nucleotide sequence represented by SEQ ID NO: 2156.

[2645] The probes having the nucleotide sequence represented by SEQ ID NOS: 29773, 29774, 29775, 29776, 29777, 29778, 29779, 29780, 29781, 29782, 29783 were selected from the ORFs having the nucleotide sequence represented by SEQ ID NO: 2157.

[2646] The probes having the nucleotide sequence represented by SEQ ID NOS: 29784, 29785, 29786, 29787, 29788, 29789, 29790, 29791, 29792, 29793, 29794 were selected from the ORFs having the nucleotide sequence represented by SEQ ID NO: 2158.

[2647] The probes having the nucleotide sequence represented by SEQ ID NOS: 29795, 29796, 29797, 29798, 29799, 29800, 29801, 29802, 29803, 29804, 29805 were selected from the ORFs having the nucleotide sequence represented by SEQ ID NO: 2159.

[2648] The probes having the nucleotide sequence represented by SEQ ID NOS: 29806, 29807, 29808, 29809, 29810, 29811, 29812, 29813, 29814, 29815, 29816 were selected from the ORFs having the nucleotide sequence represented by SEQ ID NO: 2160.

[2649] The probes having the nucleotide sequence represented by SEQ ID NOS: 29817, 29818, 29819, 29820, 29821, 29822, 29823, 29824, 29825, 29826, 29827 were selected from the ORFs having the nucleotide sequence represented by SEQ ID NO: 2161.

[2650] The probes having the nucleotide sequence represented by SEQ ID NOS: 29828, 29829, 29830, 29831, 29832, 29833, 29834, 29835, 29836, 29837, 29838 were selected from the ORFs having the nucleotide sequence represented by SEQ ID NO: 2162.

[2651] The probes having the nucleotide sequence represented by SEQ ID NOS: 29839, 29840, 29841, 29842, 29843, 29844, 29845, 29846, 29847, 29848, 29849 were selected from the ORFs having the nucleotide sequence represented by SEQ ID NO: 2163.

[2652] The probes having the nucleotide sequence represented by SEQ ID NOS: 29850, 29851, 29852, 29853, 29854, 29855, 29856, 29857, 29858, 29859, 29860 were selected from the ORFs having the nucleotide sequence represented by SEQ ID NO: 2164.

[2653] The probes having the nucleotide sequence represented by SEQ ID NOS: 29861, 29862, 29863, 29864, 29865, 29866, 29867, 29868, 29869, 29870, 29871 were selected from the ORFs having the nucleotide sequence represented by SEQ ID NO: 2165.

[2654] The probes having the nucleotide sequence represented by SEQ ID NOS: 29872, 29873, 29874, 29875, 29876, 29877, 29878, 29879, 29880, 29881, 29882 were selected from the ORFs having the nucleotide sequence represented by SEQ ID NO: 2166.

[2655] The probes having the nucleotide sequence represented by SEQ ID NOS: 29883, 29884, 29885, 29886, 29887, 29888, 29889, 29890, 29891, 29892, 29893 were selected from the ORFs having the nucleotide sequence represented by SEQ ID NO: 2167.

[2656] The probes having the nucleotide sequence represented by SEQ ID NOS: 29894, 29895, 29896, 29897, 29898, 29899, 29900, 29901, 29902, 29903, 29904 were selected from the ORFs having the nucleotide sequence represented by SEQ ID NO: 2168.

[2657] The probes having the nucleotide sequence represented by SEQ ID NOS: 29905, 29906, 29907, 29908, 29909, 29910, 29911, 29912, 29913, 29914, 29915 were selected from the ORFs having the nucleotide sequence represented by SEQ ID NO: 2169.

[2658] The probes having the nucleotide sequence represented by SEQ ID NOS: 29916, 29917, 29918, 29919, 29920, 29921, 29922, 29923, 29924, 29925, 29926 were selected from the ORFs having the nucleotide sequence represented by SEQ ID NO: 2170.

[2659] The probes having the nucleotide sequence represented by SEQ ID NOS: 29927, 29928, 29929, 29930, 29931, 29932, 29933, 29934, 29935, 29936, 29937 were selected from the ORFs having the nucleotide sequence represented by SEQ ID NO: 2171.

[2660] The probes having the nucleotide sequence represented by SEQ ID NOS: 29938, 29939, 29940, 29941, 29942, 29943, 29944, 29945, 29946, 29947, 29948 were selected from the ORFs having the nucleotide sequence represented by SEQ ID NO: 2172.

[2661] The probes having the nucleotide sequence represented by SEQ ID NOS: 29949, 29950, 29951, 29952, 29953, 29954, 29955, 29956, 29957, 29958, 29959 were selected from the ORFs having the nucleotide sequence represented by SEQ ID NO: 2173.

[2662] The probes having the nucleotide sequence represented by SEQ ID NOS: 29960, 29961, 29962, 29963, 29964, 29965, 29966, 29967, 29968, 29969, 29970 were selected from the ORFs having the nucleotide sequence represented by SEQ ID NO: 2174.

[2663] The probes having the nucleotide sequence represented by SEQ ID NOS: 29971, 29972, 29973, 29974, 29975, 29976, 29977, 29978, 29979, 29980, 29981 were selected from the ORFs having the nucleotide sequence represented by SEQ ID NO: 2175.

[2664] The probes having the nucleotide sequence represented by SEQ ID NOS: 29982, 29983, 29984, 29985, 29986, 29987, 29988, 29989, 29990, 29991, 29992 were selected from the ORFs having the nucleotide sequence represented by SEQ ID NO: 2176.

[2665] The probes having the nucleotide sequence represented by SEQ ID NOS: 29993, 29994, 29995, 29996, 29997, 29998, 29999, 30000, 30001, 30002, 30003 were selected from the ORFs having the nucleotide sequence represented by SEQ ID NO: 2177.

[2666] The probes having the nucleotide sequence represented by SEQ ID NOS: 30004, 30005, 30006, 30007, 30008, 30009, 30010, 30011, 30012, 30013, 30014 were selected from the ORFs having the nucleotide sequence represented by SEQ ID NO: 2178.

[2667] The probes having the nucleotide sequence represented by SEQ ID NOS: 30015, 30016, 30017, 30018, 30019, 30020, 30021, 30022, 30023, 30024, 30025 were selected from the ORFs having the nucleotide sequence represented by SEQ ID NO: 2179.

[2668] The probes having the nucleotide sequence represented by SEQ ID NOS: 30026, 30027, 30028, 30029, 30030, 30031, 30032, 30033, 30034, 30035, 30036 were selected from the ORFs having the nucleotide sequence represented by SEQ ID NO: 2180.

[2669] The probes having the nucleotide sequence represented by SEQ ID NOS: 30037, 30038, 30039, 30040, 30041, 30042, 30043, 30044, 30045, 30046, 30047 were selected from the ORFs having the nucleotide sequence represented by SEQ ID NO: 2181.

[2670] The probes having the nucleotide sequence represented by SEQ ID NOS: 30048, 30049, 30050, 30051, 30052, 30053, 30054, 30055, 30056, 30057, 30058were selected from the ORFs having the nucleotide sequence represented by SEQ ID NO: 2182.

[2671] The probes having the nucleotide sequence represented by SEQ ID NOS: 30059, 30060, 30061, 30062, 30063, 30064, 30065, 30066, 30067, 30068, 30069 were selected from the ORFs having the nucleotide sequence represented by SEQ ID NO: 2183.

[2672] The probes having the nucleotide sequence represented by SEQ ID NOS: 30070, 30071, 30072, 30073, 30074, 30075, 30076, 30077, 30078, 30079, 30080 were selected from the ORFs having the nucleotide sequence represented by SEQ ID NO: 2184.

[2673] The probes having the nucleotide sequence represented by SEQ ID NOS: 30081, 30082, 30083, 30084, 30085, 30086, 30087, 30088, 30089, 30090, 30091 were selected from the ORFs having the nucleotide sequence represented by SEQ ID NO: 2185.

[2674] The probes having the nucleotide sequence represented by SEQ ID NOS: 30092, 30093, 30094, 30095, 30096, 30097, 30098, 30099, 30100, 30101, 30102 were selected from the ORFs having the nucleotide sequence represented by SEQ ID NO: 2186.

[2675] The probes having the nucleotide sequence represented by SEQ ID NOS: 30103, 30104, 30105, 30106, 30107, 30108, 30109, 30110, 30111, 30112, 30113 were selected from the ORFs having the nucleotide sequence represented by SEQ ID NO: 2187.

[2676] The probes having the nucleotide sequence represented by SEQ ID NOS: 30114, 30115, 30116, 30117, 30118, 30119, 30120, 30121, 30122, 30123, 30124 were selected from the ORFs having the nucleotide sequence represented by SEQ ID NO: 2188.

[2677] The probes having the nucleotide sequence represented by SEQ ID NOS: 30125, 30126, 30127, 30128, 30129, 30130, 30131, 30132, 30133, 30134, 30135 were selected from the ORFs having the nucleotide sequence represented by SEQ ID NO: 2189.

[2678] The probes having the nucleotide sequence represented by SEQ ID NOS: 30136, 30137, 30138, 30139, 30140, 30141, 30142, 30143, 30144, 30145, 30146 were selected from the ORFs having the nucleotide sequence represented by SEQ ID NO: 2190.

[2679] The probes having the nucleotide sequence represented by SEQ ID NOS: 30147, 30148, 30149, 30150, 30151, 30152, 30153, 30154, 30155, 30156, 30157 were selected from the ORFs having the nucleotide sequence represented by SEQ ID NO: 2191.

[2680] The probes having the nucleotide sequence represented by SEQ ID NOS: 30158, 30159, 30160, 30161, 30162, 30163, 30164, 30165, 30166, 30167, 30168 were selected from the ORFs having the nucleotide sequence represented by SEQ ID NO: 2192.

[2681] The probes having the nucleotide sequence represented by SEQ ID NOS: 30169, 30170, 30171, 30172, 30173, 30174, 30175, 30176, 30177, 30178, 30179 were selected from the ORFs having the nucleotide sequence represented by SEQ ID NO: 2193.

[2682] The probes having the nucleotide sequence represented by SEQ ID NOS: 30180, 30181, 30182, 30183, 30184, 30185, 30186, 30187, 30188, 30189, 30190 were selected from the ORFs having the nucleotide sequence represented by SEQ ID NO: 2194.

[2683] The probes having the nucleotide sequence represented by SEQ ID NOS: 30191, 30192, 30193, 30194, 30195, 30196, 30197, 30198, 30199, 30200, 30201 were selected from the ORFs having the nucleotide sequence represented by SEQ ID NO: 2195.

[2684] The probes having the nucleotide sequence represented by SEQ ID NOS: 30202, 30203, 30204, 30205, 30206, 30207, 30208, 30209, 30210, 30211, 30212 were selected from the ORFs having the nucleotide sequence represented by SEQ ID NO: 2196.

[2685] The probes having the nucleotide sequence represented by SEQ ID NOS: 30213, 30214, 30215, 30216, 30217, 30218, 30219, 30220, 30221, 30222, 30223 were selected from the ORFs having the nucleotide sequence represented by SEQ ID NO: 2197.

[2686] The probes having the nucleotide sequence represented by SEQ ID NOS: 30224, 30225, 30226, 30227, 30228, 30229, 30230, 30231, 30232, 30233, 30234 were selected from the ORFs having the nucleotide sequence represented by SEQ ID NO: 2198.

[2687] The probes having the nucleotide sequence represented by SEQ ID NOS: 30235, 30236, 30237, 30238, 30239, 30240, 30241, 30242, 30243, 30244, 30245 were selected from the ORFs having the nucleotide sequence represented by SEQ ID NO: 2199.

[2688] The probes having the nucleotide sequence represented by SEQ ID NOS: 30246, 30247, 30248, 30249, 30250, 30251, 30252, 30253, 30254, 30255, 30256 were selected from the ORFs having the nucleotide sequence represented by SEQ ID N O: 2200.

[2689] The probes having the nucleotide sequence represented by SEQ ID NOS: 30257, 30258, 30259, 30260, 30261, 30262, 30263, 30264, 30265, 30266, 30267, 30268, 30269, 30270, 30271, 30272, 30273, 30274, 30275, 30276, 30277, 30278 were selected from the ORFs having the nucleotide sequence represented by SEQ ID NO: 2201.

[2690] The probes having the nucleotide sequence represented by SEQ ID NOS: 30279, 30280, 30281, 30282, 30283, 30284, 30285, 30286, 30287, 30288, 30289 were selected from the ORFs having the nucleotide sequence represented by SEQ ID NO: 2202.

[2691] The probes having the nucleotide sequence represented by SEQ ID NOS: 30290, 30291, 30292, 30293, 30294, 30295, 30296, 30297, 30298, 30299, 30300 were selected from the ORFs having the nucleotide sequence represented by SEQ ID NO: 2203.

[2692] The probes having the nucleotide sequence represented by SEQ ID NOS: 30301, 30302, 30303, 30304, 30305, 30306, 30307, 30308, 30309, 30310, 30311 were selected from the ORFs having the nucleotide sequence represented by SEQ ID NO: 2204.

[2693] The probes having the nucleotide sequence represented by SEQ ID NOS: 30312, 30313, 30314, 30315, 30316, 30317, 30318, 30319, 30320, 30321, 30322 were selected from the ORFs having the nucleotide sequence represented by SEQ ID NO: 2205.

[2694] The probes having the nucleotide sequence represented by SEQ ID NOS: 30323, 30324, 30325, 30326, 30327, 30328, 30329, 30330, 30331, 30332, 30333 were selected from the ORFs having the nucleotide sequence represented by SEQ ID NO: 2206.

[2695] The probes having the nucleotide sequence represented by SEQ ID NOS: 30334, 30335, 30336, 30337, 30338, 30339, 30340, 30341, 30342, 30343, 30344 were selected from the ORFs having the nucleotide sequence represented by SEQ ID NO: 2207.

[2696] The probes having the nucleotide sequence represented by SEQ ID NOS: 30345, 30346, 30347, 30348, 30349, 30350, 30351, 30352, 30353, 30354, 30355 were selected from the ORFs having the nucleotide sequence represented by SEQ ID NO: 2208.

[2697] The probes having the nucleotide sequence represented by SEQ ID NOS: 30356, 30357, 30358, 30359, 30360, 30361, 30362, 30363, 30364, 30365, 30366 were selected from the ORFs having the nucleotide sequence represented by SEQ ID NO: 2209.

[2698] The probes having the nucleotide sequence represented by SEQ ID NOS: 30367, 30368, 30369, 30370, 30371, 30372, 30373, 30374, 30375, 30376, 30377 were selected from the ORFs having the nucleotide sequence represented by SEQ ID NO: 2210.

[2699] The probes having the nucleotide sequence represented by SEQ ID NOS: 30378, 30379, 30380, 30381, 30382, 30383, 30384, 30385, 30386, 30387, 30388 were selected from the ORFs having the nucleotide sequence represented by SEQ ID NO: 2211.

[2700] The probes having the nucleotide sequence represented by SEQ ID NOS: 30389, 30390, 30391, 30392, 30393, 30394, 30395, 30396, 30397, 30398, 30399 were selected from the ORFs having the nucleotide sequence represented by SEQ ID NO: 2212.

[2701] The probes having the nucleotide sequence represented by SEQ ID NOS: 30400, 30401, 30402, 30403, 30404, 30405, 30406, 30407, 30408, 30409, 30410 were selected from the ORFs having the nucleotide sequence represented by SEQ ID NO: 2213.

[2702] The probes having the nucleotide sequence represented by SEQ ID NOS: 30411, 30412, 30413, 30414, 30415, 30416, 30417, 30418, 30419, 30420, 30421 were selected from the ORFs having the nucleotide sequence represented by SEQ ID NO: 2214.

[2703] The probes having the nucleotide sequence represented by SEQ ID NOS: 30422, 30423, 30424, 30425, 30426, 30427, 30428, 30429, 30430, 30431, 30432 were selected from the ORFs having the nucleotide sequence represented by SEQ ID NO: 2215.

[2704] The probes having the nucleotide sequence represented by SEQ ID NOS: 30433, 30434, 30435, 30436, 30437, 30438, 30439, 30440, 30441, 30442, 30443 were selected from the ORFs having the nucleotide sequence represented by SEQ ID NO: 2216.

[2705] The probes having the nucleotide sequence represented by SEQ ID NOS: 30444, 30445, 30446, 30447, 30448, 30449, 30450, 30451, 30452, 30453, 30454 were selected from the ORFs having the nucleotide sequence represented by SEQ ID NO: 2217.

[2706] The probes having the nucleotide sequence represented by SEQ ID NOS: 30455, 30456, 30457, 30458, 30459, 30460, 30461, 30462, 30463, 30464, 30465 were selected from the ORFs having the nucleotide sequence represented by SEQ ID NO: 2218.

[2707] The probes having the nucleotide sequence represented by SEQ ID NOS: 30466, 30467, 30468, 30469, 30470, 30471, 30472, 30473, 30474, 30475, 30476 were selected from the ORFs having the nucleotide sequence represented by SEQ ID NO: 2219.

[2708] The probes having the nucleotide sequence represented by SEQ ID NOS: 30477, 30478, 30479, 30480, 30481, 30482, 30483, 30484, 30485, 30486, 30487 were selected from the ORFs having the nucleotide sequence represented by SEQ ID NO: 2220.

[2709] The probes having the nucleotide sequence represented by SEQ ID NOS: 30488, 30489, 30490, 30491, 30492, 30493, 30494, 30495, 30496, 30497, 30498 were selected from the ORFs having the nucleotide sequence represented by SEQ ID NO: 2221.

[2710] The probes having the nucleotide sequence represented by SEQ ID NOS: 30499, 30500, 30501, 30502, 30503, 30504, 30505, 30506, 30507, 30508, 30509 were selected from the ORFs having the nucleotide sequence represented by SEQ ID NO: 2222.

[2711] The probes having the nucleotide sequence represented by SEQ ID NOS: 30510, 30511, 30512, 30513, 30514, 30515, 30516, 30517, 30518, 30519, 30520 were selected from the ORFs having the nucleotide sequence represented by SEQ ID NO: 2223.

[2712] The probes having the nucleotide sequence represented by SEQ ID NOS: 30521, 30522, 30523, 30524, 30525, 30526, 30527, 30528, 30529, 30530, 30531 were selected from the ORFs having the nucleotide sequence represented by SEQ ID NO: 2224.

[2713] The probes having the nucleotide sequence represented by SEQ ID NOS: 30532, 30533, 30534, 30535, 30536, 30537, 30538, 30539, 30540, 30541, 30542 were selected from the ORFs having the nucleotide sequence represented by SEQ ID NO: 2225.

[2714] The probes having the nucleotide sequence represented by SEQ ID NOS: 30543, 30544, 30545, 30546, 30547, 30548, 30549, 30550, 30551, 30552, 30553 were selected from the ORFs having the nucleotide sequence represented by SEQ ID NO: 2226.

[2715] The probes having the nucleotide sequence represented by SEQ ID NOS: 30554, 30555, 30556, 30557, 30558, 30559, 30560, 30561, 30562, 30563, 30564 were selected from the ORFs having the nucleotide sequence represented by SEQ ID NO: 2227.

[2716] The probes having the nucleotide sequence represented by SEQ ID NOS: 30565, 30566, 30567, 30568, 30569, 30570, 30571, 30572, 30573, 30574, 30575 were selected from the ORFs having the nucleotide sequence represented by SEQ ID NO: 2228.

[2717] The probes having the nucleotide sequence represented by SEQ ID NOS: 30576, 30577, 30578, 30579, 30580, 30581, 30582, 30583, 30584, 30585, 30586 were selected from the ORFs having the nucleotide sequence represented by SEQ ID NO: 2229.

[2718] The probes having the nucleotide sequence represented by SEQ ID NOS: 30587, 30588, 30589, 30590, 30591, 30592, 30593, 30594, 30595, 30596, 30597 were selected from the ORFs having the nucleotide sequence represented by SEQ ID NO: 2230.

[2719] The probes having the nucleotide sequence represented by SEQ ID NOS: 30598, 30599, 30600, 30601, 30602, 30603, 30604, 30605, 30606, 30607, 30608 were selected from the ORFs having the nucleotide sequence represented by SEQ ID NO: 2231.

[2720] The probes having the nucleotide sequence represented by SEQ ID NOS: 30609, 30610, 30611, 30612, 30613, 30614, 30615, 30616, 30617, 30618, 30619 were selected from the ORFs having the nucleotide sequence represented by SEQ ID NO: 2232.

[2721] The probes having the nucleotide sequence represented by SEQ ID NOS: 30620, 30621, 30622, 30623, 30624, 30625, 30626, 30627, 30628, 30629, 30630 were selected from the ORFs having the nucleotide sequence represented by SEQ ID NO: 2233.

[2722] The probes having the nucleotide sequence represented by SEQ ID NOS: 30631, 30632, 30633, 30634, 30635, 30636, 30637, 30638, 30639, 30640, 30641 were selected from the ORFs having the nucleotide sequence represented by SEQ ID NO: 2234.

[2723] The probes having the nucleotide sequence represented by SEQ ID NOS: 30642, 30643, 30644, 30645, 30646, 30647, 30648, 30649, 30650, 30651, 30652 were selected from the ORFs having the nucleotide sequence represented by SEQ ID NO: 2235.

[2724] The probes having the nucleotide sequence represented by SEQ ID NOS: 30653, 30654, 30655, 30656, 30657, 30658, 30659, 30660, 30661, 30662, 30663 were selected from the ORFs having the nucleotide sequence represented by SEQ ID NO: 2236.

[2725] The probes having the nucleotide sequence represented by SEQ ID NOS: 30664, 30665, 30666, 30667, 30668, 30669, 30670, 30671, 30672, 30673, 30674 were selected from the ORFs having the nucleotide sequence represented by SEQ ID NO: 2237.

[2726] The probes having the nucleotide sequence represented by SEQ ID NOS: 30675, 30676, 30677, 30678, 30679, 30680, 30681, 30682, 30683, 30684, 30685 were selected from the ORFs having the nucleotide sequence represented by SEQ ID NO: 2238.

[2727] The probes having the nucleotide sequence represented by SEQ ID NOS: 30686, 30687, 30688, 30689, 30690, 30691, 30692, 30693, 30694, 30695, 30696 were selected from the ORFs having the nucleotide sequence represented by SEQ ID NO: 2239.

[2728] The probes having the nucleotide sequence represented by SEQ ID NOS: 30697, 30698, 30699, 30700, 30701, 30702, 30703, 30704, 30705, 30706, 30707 were selected from the ORFs having the nucleotide sequence represented by SEQ ID NO: 2240.

[2729] The probes having the nucleotide sequence represented by SEQ ID NOS: 30708, 30709, 30710, 30711, 30712, 30713, 30714, 30715, 30716, 30717, 30718 were selected from the ORFs having the nucleotide sequence represented by SEQ ID NO: 2241.

[2730] The probes having the nucleotide sequence represented by SEQ ID NOS: 30719, 30720, 30721, 30722, 30723, 30724, 30725, 30726, 30727, 30728, 30729 were selected from the ORFs having the nucleotide sequence represented by SEQ ID NO: 2242.

[2731] The probes having the nucleotide sequence represented by SEQ ID NOS: 30730, 30731, 30732, 30733, 30734, 30735, 30736, 30737, 30738, 30739, 30740 were selected from the ORFs having the nucleotide sequence represented by SEQ ID NO: 2243.

[2732] The probes having the nucleotide sequence represented by SEQ ID NOS: 30741, 30742, 30743, 30744, 30745, 30746, 30747, 30748, 30749, 30750, 30751 were selected from the ORFs having the nucleotide sequence represented by SEQ ID NO: 2244.

[2733] The probes having the nucleotide sequence represented by SEQ ID NOS: 30752, 30753, 30754, 30755, 30756, 30757, 30758, 30759, 30760, 30761, 30762 were selected from the ORFs having the nucleotide sequence represented by SEQ ID NO: 2245.

[2734] The probes having the nucleotide sequence represented by SEQ ID NOS: 30763, 30764, 30765, 30766, 30767, 30768, 30769, 30770, 30771, 30772, 30773 were selected from the ORFs having the nucleotide sequence represented by SEQ ID NO: 2246.

[2735] The probes having the nucleotide sequence represented by SEQ ID NOS: 30774, 30775, 30776, 30777, 30778, 30779, 30780, 30781, 30782, 30783, 30784 were selected from the ORFs having the nucleotide sequence represented by SEQ ID NO: 2247.

[2736] The probes having the nucleotide sequence represented by SEQ ID NOS: 30785, 30786, 30787, 30788, 30789, 30790, 30791, 30792, 30793, 30794, 30795 were selected from the ORFs having the nucleotide sequence represented by SEQ ID NO: 2248.

[2737] The probes having the nucleotide sequence represented by SEQ ID NOS: 30796, 30797, 30798, 30799, 30800, 30801, 30802, 30803, 30804, 30805, 30806 were selected from the ORFs having the nucleotide sequence represented by SEQ ID NO: 2249.

[2738] The probes having the nucleotide sequence represented by SEQ ID NOS: 30807, 30808, 30809, 30810, 30811, 30812, 30813, 30814, 30815, 30816, 30817 were selected from the ORFs having the nucleotide sequence represented by SEQ ID NO: 2250.

[2739] The probes having the nucleotide sequence represented by SEQ ID NOS: 30818, 30819, 30820, 30821, 30822, 30823, 30824, 30825, 30826, 30827, 30828 were selected from the ORFs having the nucleotide sequence represented by SEQ ID NO: 2251.

[2740] The probes having the nucleotide sequence represented by SEQ ID NOS: 30829, 30830, 30831, 30832, 30833, 30834, 30835, 30836, 30837, 30838, 30839 were selected from the ORFs having the nucleotide sequence represented by SEQ ID NO: 2252.

[2741] The probes having the nucleotide sequence represented by SEQ ID NOS: 30840, 30841, 30842, 30843, 30844, 30845, 30846, 30847, 30848, 30849, 30850 were selected from the ORFs having the nucleotide sequence represented by SEQ ID NO: 2253.

[2742] The probes having the nucleotide sequence represented by SEQ ID NOS: 30851, 30852, 30853, 30854, 30855, 30856, 30857, 30858, 30859, 30860, 30861 were selected from the ORFs having the nucleotide sequence represented by SEQ ID NO: 2254.

[2743] The probes having the nucleotide sequence represented by SEQ ID NOS: 30862, 30863, 30864, 30865, 30866, 30867, 30868, 30869, 30870, 30871, 30872 were selected from the ORFs having the nucleotide sequence represented by SEQ ID NO: 2255.

[2744] The probes having the nucleotide sequence represented by SEQ ID NOS: 30873, 30874, 30875, 30876, 30877, 30878, 30879, 30880, 30881, 30882, 30883 were selected from the ORFs having the nucleotide sequence represented by SEQ ID NO: 2256.

[2745] The probes having the nucleotide sequence represented by SEQ ID NOS: 30884, 30885, 30886, 30887, 30888, 30889, 30890, 30891, 30892, 30893, 30894 were selected from the ORFs having the nucleotide sequence represented by SEQ ID NO: 2257.

[2746] The probes having the nucleotide sequence represented by SEQ ID NOS: 30895, 30896, 30897, 30898, 30899, 30900, 30901, 30902, 30903, 30904, 30905 were selected from the ORFs having the nucleotide sequence represented by SEQ ID NO: 2258.

[2747] The probes having the nucleotide sequence represented by SEQ ID NOS: 30906, 30907, 30908, 30909, 30910, 30911, 30912, 30913, 30914, 30915, 30916 were selected from the ORFs having the nucleotide sequence represented by SEQ ID NO: 2259.

[2748] The probes having the nucleotide sequence represented by SEQ ID NOS: 30917, 30918, 30919, 30920, 30921, 30922, 30923, 30924, 30925, 30926, 30927 were selected from the ORFs having the nucleotide sequence represented by SEQ ID NO: 2260.

[2749] The probes having the nucleotide sequence represented by SEQ ID NOS: 30928, 30929, 30930, 30931, 30932, 30933, 30934, 30935, 30936, 30937, 30938 were selected from the ORFs having the nucleotide sequence represented by SEQ ID NO: 2261.

[2750] The probes having the nucleotide sequence represented by SEQ ID NOS: 30939, 30940, 30941, 30942, 30943, 30944, 30945, 30946, 30947, 30948, 30949 were selected from the ORFs having the nucleotide sequence represented by SEQ ID NO: 2262.

[2751] The probes having the nucleotide sequence represented by SEQ ID NOS: 30950, 30951, 30952, 30953, 30954, 30955, 30956, 30957, 30958, 30959, 309.60 were selected from the ORFs having the nucleotide sequence represented by SEQ ID NO: 2263.

[2752] The probes having the nucleotide sequence represented by SEQ ID NOS: 30961, 30962, 30963, 30964, 30965, 30966, 30967, 30968, 30969, 30970, 30971 were selected from the ORFs having the nucleotide sequence represented by SEQ ID NO: 2264.

[2753] The probes having the nucleotide sequence represented by SEQ ID NOS: 30972, 30973, 30974, 30975, 30976, 30977, 30978, 30979, 30980, 30981, 30982 were selected from the ORFs having the nucleotide sequence represented by SEQ ID NO: 2265.

[2754] The probes having the nucleotide sequence represented by SEQ ID NOS: 30983, 30984, 30985, 30986, 30987, 30988, 30989, 30990, 30991, 30992, 30993 were selected from the ORFs having the nucleotide sequence represented by SEQ ID NO: 2266.

[2755] The probes having the nucleotide sequence represented by SEQ ID NOS: 30994, 30995, 30996, 30997, 30998, 30999, 31000, 31001, 31002, 31003, 31004 were selected from the ORFs having the nucleotide sequence represented by SEQ ID NO: 2267.

[2756] The probes having the nucleotide sequence represented by SEQ ID NOS: 31005, 31006, 31007, 31008, 31009, 31010, 31011, 31012, 31013, 31014, 31015 were selected from the ORFs having the nucleotide sequence represented by SEQ ID NO: 2268.

[2757] The probes having the nucleotide sequence represented by SEQ ID NOS: 31016, 31017, 31018, 31019, 31020, 31021, 31022, 31023, 31024, 31025, 31026 were selected from the ORFs having the nucleotide sequence represented by SEQ ID NO: 2269.

[2758] The probes having the nucleotide sequence represented by SEQ ID NOS: 31027, 31028, 31029, 31030, 31031, 31032, 31033, 31034, 31035, 31036, 31037 were selected from the ORFs having the nucleotide sequence represented by SEQ ID NO: 2270.

[2759] The probes having the nucleotide sequence represented by SEQ ID NOS: 31038, 31039, 31040, 31041, 31042, 31043, 31044, 31045, 31046, 31047, 31048, 31049, 31050, 31051, 31052, 31053, 31054, 31055, 31056, 31057, 31058, 31059 were selected from the ORFs having the nucleotide sequence represented by SEQ ID NO: 2271.

[2760] The probes having the nucleotide sequence represented by SEQ ID NOS: 31060, 31061, 31062, 31063, 31064, 31065, 31066, 31067, 31068, 31069, 31070 were selected from the ORFs having the nucleotide sequence represented by SEQ ID NO: 2272.

[2761] The probes having the nucleotide sequence represented by SEQ ID NOS: 31071, 31072, 31073, 31074, 31075, 31076, 31077, 31078, 31079, 31080, 31081 were selected from the ORFs having the nucleotide sequence represented by SEQ ID NO: 2273.

[2762] The probes having the nucleotide sequence represented by SEQ ID NOS: 31082, 31083, 31084, 31085, 31086, 31087, 31088, 31089, 31090, 31091, 31092 were selected from the ORFs having the nucleotide sequence represented by SEQ ID NO: 2274.

[2763] The probes having the nucleotide sequence represented by SEQ ID NOS: 31093, 31094, 31095, 31096, 31097, 31098, 31099, 31100, 31101, 31102, 31103 were selected from the ORFs having the nucleotide sequence represented by SEQ ID NO: 2275.

[2764] The probes having the nucleotide sequence represented by SEQ ID NOS: 31104, 31105, 31106, 31107, 31108, 31109, 31110, 31111, 31112, 31113, 31114 were selected from the ORFs having the nucleotide sequence represented by SEQ ID NO: 2276.

[2765] The probes having the nucleotide sequence represented by SEQ ID NOS: 31115, 31116, 31117, 31118, 31119, 31120, 31121, 31122, 31123, 31124, 31125 were selected from the ORFs having the nucleotide sequence represented by SEQ ID NO: 2277.

[2766] The probes having the nucleotide sequence represented by SEQ ID NOS: 31126, 31127, 31128, 31129, 31130, 31131, 31132, 31133, 31134, 31135, 31136 were selected from the ORFs having the nucleotide sequence represented by SEQ ID NO: 2278.

[2767] The probes having the nucleotide sequence represented by SEQ ID NOS: 31137, 31138, 31139, 31140, 31141, 31142, 31143, 31144, 31145, 31146, 31147 were selected from the ORFs having the nucleotide sequence represented by SEQ ID NO: 2279.

[2768] The probes having the nucleotide sequence represented by SEQ ID NOS: 31148, 31149, 31150, 31151, 31152, 31153, 31154, 31155, 31156, 31157, 31158 were selected from the ORFs having the nucleotide sequence represented by SEQ ID NO: 2280.

[2769] The probes having the nucleotide sequence represented by SEQ ID NOS: 31159, 31160, 31161, 31162, 31163, 31164, 31165, 31166, 31167, 31168, 31169 were selected from the ORFs having the nucleotide sequence represented by SEQ ID NO: 2281.

[2770] The probes having the nucleotide sequence represented by SEQ ID NOS: 31170, 31171, 31172, 31173, 31174, 31175, 31176, 31177, 31178, 31179, 31180 were selected from the ORFs having the nucleotide sequence represented by SEQ ID NO: 2282.

[2771] The probes having the nucleotide sequence represented by SEQ ID NOS: 31181, 31182, 31183, 31184, 31185, 31186, 31187, 31188, 31189, 31190, 31191 were selected from the ORFs having the nucleotide sequence represented by SEQ ID NO: 2283.

[2772] The probes having the nucleotide sequence represented by SEQ ID NOS: 31192, 31193, 31194, 31195, 31196, 31197, 31198, 31199, 31200, 31201, 31202 were selected from the ORFs having the nucleotide sequence represented by SEQ ID NO: 2284.

[2773] The probes having the nucleotide sequence represented by SEQ ID NOS: 31203, 31204, 31205, 31206, 31207, 31208, 31209, 31210, 31211, 31212, 31213 were selected from the ORFs having the nucleotide sequence represented by SEQ ID NO: 2285.

[2774] The probes having the nucleotide sequence represented by SEQ ID NOS: 31214, 31215, 31216, 31217, 31218, 31219, 31220, 31221, 31222, 31223, 31224 were selected from the ORFs having the nucleotide sequence represented by SEQ ID NO: 2286.

[2775] The probes having the nucleotide sequence represented by SEQ ID NOS: 31225, 31226, 31227, 31228, 31229, 31230, 31231, 31232, 31233, 31234, 31235 were selected from the ORFs having the nucleotide sequence represented by SEQ ID NO: 2287.

[2776] The probes having the nucleotide sequence represented by SEQ ID NOS: 31236, 31237, 31238, 31239, 31240, 31241, 31242, 31243, 31244, 31245, 31246 were selected from the ORFs having the nucleotide sequence represented by SEQ ID NO: 2288.

[2777] The probes having the nucleotide sequence represented by SEQ ID NOS: 31247, 31248, 31249, 31250, 31251, 31252, 31253, 31254, 31255, 31256, 31257 were selected from the ORFs having the nucleotide sequence represented by SEQ ID NO: 2289.

[2778] The probes having the nucleotide sequence represented by SEQ ID NOS: 31258, 31259, 31260, 31261, 31262, 31263, 31264, 31265, 31266, 31267, 31268 were selected from the ORFs having the nucleotide sequence represented by SEQ ID NO: 2290.

[2779] The probes having the nucleotide sequence represented by SEQ ID NOS: 31269, 31270, 31271, 31272, 31273, 31274, 31275, 31276, 31277, 31278, 31279 were selected from the ORFs having the nucleotide sequence represented by SEQ ID NO: 2291.

[2780] The probes having the nucleotide sequence represented by SEQ ID NOS: 31280, 31281, 31282, 31283, 31284, 31285, 31286, 31287, 31288, 31289, 31290 were selected from the ORFs having the nucleotide sequence represented by SEQ ID NO: 2292.

[2781] The probes having the nucleotide sequence represented by SEQ ID NOS: 31291, 31292, 31293, 31294, 31295, 31296, 31297, 31298, 31299, 31300, 31301 were selected from the ORFs having the nucleotide sequence represented by SEQ ID NO: 2293.

[2782] The probes having the nucleotide sequence represented by SEQ ID NOS: 31302, 31303, 31304, 31305, 31306, 31307, 31308, 31309, 31310, 31311, 31312 were selected from the ORFs having the nucleotide sequence represented by SEQ ID NO: 2294.

[2783] The probes having the nucleotide sequence represented by SEQ ID NOS: 31313, 31314, 31315, 31316, 31317, 31318, 31319, 31320, 31321, 31322, 31323 were selected from the ORFs having the nucleotide sequence represented by SEQ ID NO: 2295.

[2784] The probes having the nucleotide sequence represented by SEQ ID NOS: 31324, 31325, 31326, 31327, 31328, 31329, 31330, 31331, 31332, 31333, 31334 were selected from the ORFs having the nucleotide sequence represented by SEQ ID NO: 2296.

[2785] The probes having the nucleotide sequence represented by SEQ ID NOS: 31335, 31336, 31337, 31338, 31339, 31340, 31341, 31342, 31343, 31344, 31345 were selected from the ORFs having the nucleotide sequence represented by SEQ ID NO: 2297.

[2786] The probes having the nucleotide sequence represented by SEQ ID NOS: 31346, 31347, 31348, 31349, 31350, 31351, 31352, 31353, 31354, 31355, 31356 were selected from the ORFs having the nucleotide sequence represented by SEQ ID NO: 2298.

[2787] The probes having the nucleotide sequence represented by SEQ ID NOS: 31357, 31358, 31359, 31360, 31361, 31362, 31363, 31364, 31365, 31366, 31367 were selected from the ORFs having the nucleotide sequence represented by SEQ ID NO: 2299.

[2788] The probes having the nucleotide sequence represented by SEQ ID NOS: 31368, 31369, 31370, 31371, 31372, 31373, 31374, 31375, 31376, 31377, 31378 were selected from the ORFs having the nucleotide sequence represented by SEQ ID NO: 2300.

[2789] The probes having the nucleotide sequence represented by SEQ ID NOS: 31379, 31380, 31381, 31382, 31383, 31384, 31385, 31386, 31387, 31388, 31389 were selected from the ORFs having the nucleotide sequence represented by SEQ ID NO: 2301.

[2790] The probes having the nucleotide sequence represented by SEQ ID NOS: 31390, 31391, 31392, 31393, 31394, 31395, 31396, 31397, 31398, 31399, 31400 were selected from the ORFs having the nucleotide sequence represented by SEQ ID NO: 2302.

[2791] The probes having the nucleotide sequence represented by SEQ ID NOS: 31401, 31402, 31403, 31404, 31405, 31406, 31407, 31408, 31409, 31410, 31411 were selected from the ORFs having the nucleotide sequence represented by SEQ ID NO: 2303.

[2792] The probes having the nucleotide sequence represented by SEQ ID NOS: 31412, 31413, 31414, 31415, 31416, 31417, 31418, 31419, 31420, 31421, 31422 were selected from the ORFs having the nucleotide sequence represented by SEQ ID NO: 2304.

[2793] The probes having the nucleotide sequence represented by SEQ ID NOS: 31423, 31424, 31425, 31426, 31427, 31428, 31429, 31430, 31431, 31432, 31433 were selected from the ORFs having the nucleotide sequence represented by SEQ ID NO: 2305.

[2794] The probes having the nucleotide sequence represented by SEQ ID NOS: 31434, 31435, 31436, 31437, 31438, 31439, 31440, 31441, 31442, 31443, 31444 were selected from the ORFs having the nucleotide sequence represented by SEQ ID NO: 2306.

[2795] The probes having the nucleotide sequence represented by SEQ ID NOS: 31445, 31446, 31447, 31448, 31449, 31450, 31451, 31452, 31453, 31454, 31455 were selected from the ORFs having the nucleotide sequence represented by SEQ ID NO: 2307.

[2796] The probes having the nucleotide sequence represented by SEQ ID NOS: 31456, 31457, 31458, 31459, 31460, 31461, 31462, 31463, 31464, 31465, 31466 were selected from the ORFs having the nucleotide sequence represented by SEQ ID NO: 2308.

[2797] The probes having the nucleotide sequence represented by SEQ ID NOS: 31467, 31468, 31469, 31470, 31471, 31472, 31473, 31474, 31475, 31476, 31477 were selected from the ORFs having the nucleotide sequence represented by SEQ ID NO: 2309.

[2798] The probes having the nucleotide sequence represented by SEQ ID NOS: 31478, 31479, 31480, 31481, 31482, 31483, 31484, 31485, 31486, 31487, 31488 were selected from the ORFs having the nucleotide sequence represented by SEQ ID NO: 2310.

[2799] The probes having the nucleotide sequence represented by SEQ ID NOS: 31489, 31490, 31491, 31492, 31493, 31494, 31495, 31496, 31497, 31498, 31499 were selected from the ORFs having the nucleotide sequence represented by SEQ ID NO: 2311.

[2800] The probes having the nucleotide sequence represented by SEQ ID NOS: 31500, 31501, 31502, 31503, 31504, 31505, 31506, 31507, 31508, 31509, 31510 were selected from the ORFs having the nucleotide sequence represented by SEQ ID NO: 2312.

[2801] The probes having the nucleotide sequence represented by SEQ ID NOS: 31511, 31512, 31513, 31514, 31515, 31516, 31517, 31518, 31519, 31520, 31521 were selected from the ORFs having the nucleotide sequence represented by SEQ ID NO: 2313.

[2802] The probes having the nucleotide sequence represented by SEQ ID NOS: 31522, 31523, 31524, 31525, 31526, 31527, 31528, 31529, 31530, 31531, 31532 were selected from the ORFs having the nucleotide sequence represented by SEQ ID NO: 2314.

[2803] The probes having the nucleotide sequence represented by SEQ ID NOS: 31533, 31534, 31535, 31536, 31537, 31538, 31539, 31540, 31541, 31542, 31543 were selected from the ORFs having the nucleotide sequence represented by SEQ ID NO: 2315.

[2804] The probes having the nucleotide sequence represented by SEQ ID NOS: 31544, 31545, 31546, 31547, 31548, 31549, 31550, 31551, 31552, 31553, 31554 were selected from the ORFs having the nucleotide sequence represented by SEQ ID NO: 2316.

[2805] The probes having the nucleotide sequence represented by SEQ ID NOS: 31555, 31556, 31557, 31558, 31559, 31560, 31561, 31562, 31563, 31564, 31565 were selected from the ORFs having the nucleotide sequence represented by SEQ ID NO: 2317.

[2806] The probes having the nucleotide sequence represented by SEQ ID NOS: 31566, 31567, 31568, 31569, 31570, 31571, 31572, 31573, 31574, 31575, 31576 were selected from the ORFs having the nucleotide sequence represented by SEQ ID NO: 2318.

[2807] The probes having the nucleotide sequence represented by SEQ ID NOS: 31577, 31578, 31579, 31580, 31581, 31582, 31583, 31584, 31585, 31586, 31587 were selected from the ORFs having the nucleotide sequence represented by SEQ ID NO: 2319.

[2808] The probes having the nucleotide sequence represented by SEQ ID NOS: 31588, 31589, 31590, 31591, 31592, 31593, 31594, 31595, 31596, 31597, 31598 were selected from the ORFs having the nucleotide sequence represented by SEQ ID NO: 2320.

[2809] The probes having the nucleotide sequence represented by SEQ ID NOS: 31599, 31600, 31601, 31602, 31603, 31604, 31605, 31606, 31607, 31608, 31609 were selected from the ORFs having the nucleotide sequence represented by SEQ ID NO: 2321.

[2810] The probes having the nucleotide sequence represented by SEQ ID NOS: 31610, 31611, 31612, 31613, 31614, 31615, 31616, 31617, 31618, 31619, 31620 were selected from the ORFs having the nucleotide sequence represented by SEQ ID NO: 2322.

[2811] The probes having the nucleotide sequence represented by SEQ ID NOS: 31621, 31622, 31623, 31624, 31625, 31626, 31627, 31628, 31629, 31630, 31631 were selected from the ORFs having the nucleotide sequence represented by SEQ ID NO: 2323.

[2812] The probes having the nucleotide sequence represented by SEQ ID NOS: 31632, 31633, 31634, 31635, 31636, 31637, 31638, 31639, 31640, 31641, 31642 were selected from the ORFs having the nucleotide sequence represented by SEQ ID NO: 2324.

[2813] The probes having the nucleotide sequence represented by SEQ ID NOS: 31643, 31644, 31645, 31646, 31647, 31648, 31649, 31650, 31651, 31652, 31653 were selected from the ORFs having the nucleotide sequence represented by SEQ ID NO: 2325.

[2814] The probes having the nucleotide sequence represented by SEQ ID NOS: 31654, 31655, 31656, 31657, 31658, 31659, 31660, 31661, 31662, 31663, 31664 were selected from the ORFs having the nucleotide sequence represented by SEQ ID NO: 2326.

[2815] The probes having the nucleotide sequence represented by SEQ ID NOS: 31665, 31666, 31667, 31668, 31669, 31670, 31671, 31672, 31673, 31674, 31675 were selected from the ORFs having the nucleotide sequence represented by SEQ ID NO: 2327.

[2816] The probes having the nucleotide sequence represented by SEQ ID NOS: 31676, 31677, 31678, 31679, 31680, 31681, 31682, 31683, 31684, 31685, 31686 were selected from the ORFs having the nucleotide sequence represented by SEQ ID NO: 2328.

[2817] The probes having the nucleotide sequence represented by SEQ ID NOS: 31687, 31688, 31689, 31690, 31691, 31692, 31693, 31694, 31695, 31696, 31697 were selected from the ORFs having the nucleotide sequence represented by SEQ ID NO: 2329.

[2818] The probes having the nucleotide sequence represented by SEQ ID NOS: 31698, 31699, 31700, 31701, 31702, 31703, 31704, 31705, 31706, 31707, 31708 were selected from the ORFs having the nucleotide sequence represented by SEQ ID NO: 2330.

[2819] The probes having the nucleotide sequence represented by SEQ ID NOS: 31709, 31710, 31711, 31712, 31713, 31714, 31715, 31716, 31717, 31718, 31719, 31720, 31721, 31722, 31723, 31724, 31725, 31726, 31727, 31728, 31729, 31730 were selected from the ORFs having the nucleotide sequence represented by SEQ ID NO: 2331.

[2820] The probes having the nucleotide sequence represented by SEQ ID NOS: 31731, 31732, 31733, 31734, 31735, 31736, 31737, 31738, 31739, 31740, 31741 were selected from the ORFs having the nucleotide sequence represented by SEQ ID NO: 2332.

[2821] The probes having the nucleotide sequence represented by SEQ ID NOS: 31742, 31743, 31744, 31745, 31746, 31747, 31748, 31749, 31750, 31751, 31752 were selected from the ORFs having the nucleotide sequence represented by SEQ ID NO: 2333.

[2822] The probes having the nucleotide sequence represented by SEQ ID NOS: 31753, 31754, 31755, 31756, 31757, 31758, 31759, 31760, 31761, 31762, 31763 were selected from the ORFs having the nucleotide sequence represented by SEQ ID NO: 2334.

[2823] The probes having the nucleotide sequence represented by SEQ ID NOS: 31764, 31765, 31766, 31767, 31768, 31769, 31770, 31771, 31772, 31773, 31774 were selected from the ORFs having the nucleotide sequence represented by SEQ ID NO: 2335.

[2824] The probes having the nucleotide sequence represented by SEQ ID NOS: 31775, 31776, 31777, 31778, 31779, 31780, 31781, 31782, 31783, 31784, 31785 were selected from the ORFs having the nucleotide sequence represented by SEQ ID NO: 2336.

[2825] The probes having the nucleotide sequence represented by SEQ ID NOS: 31786, 31787, 31788, 31789, 31790, 31791, 31792, 31793, 31794, 31795, 31796 were selected from the ORFs having the nucleotide sequence represented by SEQ ID NO: 2337.

[2826] The probes having the nucleotide sequence represented by SEQ ID NOS: 31797, 31798, 31799, 31800, 31801, 31802, 31803, 31804, 31805, 31806, 31807 were selected from the ORFs having the nucleotide sequence represented by SEQ ID NO: 2338.

[2827] The probes having the nucleotide sequence represented by SEQ ID NOS: 31808, 31809, 31810, 31811, 31812, 31813, 31814, 31815, 31816, 31817, 31818 were selected from the ORFs having the nucleotide sequence represented by SEQ ID NO: 2339.

[2828] The probes having the nucleotide sequence represented by SEQ ID NOS: 31819, 31820, 31821, 31822, 31823, 31824, 31825, 31826, 31827, 31828, 31829 were selected from the ORFs having the nucleotide sequence represented by SEQ ID NO: 2340.

[2829] The probes having the nucleotide sequence represented by SEQ ID NOS: 31830, 31831, 31832, 31833, 31834, 31835, 31836, 31837, 31838, 31839, 31840 were selected from the ORFs having the nucleotide sequence represented by SEQ ID NO: 2341.

[2830] The probes having the nucleotide sequence represented by SEQ ID NOS: 31841, 31842, 31843, 31844, 31845, 31846, 31847, 31848, 31849, 31850, 31851 were selected from the ORFs having the nucleotide sequence represented by SEQ ID NO: 2342.

[2831] The probes having the nucleotide sequence represented by SEQ ID NOS: 31852, 31.853, 31854, 31855, 31856, 31857, 31858, 31859, 31860, 31861, 31862 were selected from the ORFs having the nucleotide sequence represented by SEQ ID NO: 2343.

[2832] The probes having the nucleotide sequence represented by SEQ ID NOS: 31863, 31864, 31865, 31866, 31867, 31868, 31869, 31870, 31871, 31872, 31873 were selected from the ORFs having the nucleotide sequence represented by SEQ ID NO: 2344.

[2833] The probes having the nucleotide sequence represented by SEQ ID NOS: 31874, 31875, 31876, 31877, 31878, 31879, 31880, 31881, 31882, 31883, 31884 were selected from the ORFs having the nucleotide sequence represented by SEQ ID NO: 2345.

[2834] The probes having the nucleotide sequence represented by SEQ ID NOS: 31885, 31886, 31887, 31888, 31889, 31890, 31891, 31892, 31893, 31894, 31895 were selected from the ORFs having the nucleotide sequence represented by SEQ ID NO: 2346.

[2835] The probes having the nucleotide sequence represented by SEQ ID NOS: 31896, 31897, 31898, 31899, 31900, 31901, 31902, 31903, 31904, 31905, 31906 were selected from the ORFs having the nucleotide sequence represented by SEQ ID NO: 2347.

[2836] The probes having the nucleotide sequence represented by SEQ ID NOS: 31907, 31908, 31909, 31910, 31911, 31912, 31913, 31914, 31915, 31916, 31917 were selected from the ORFs having the nucleotide sequence represented by SEQ ID NO: 2348.

[2837] The probes having the nucleotide sequence represented by SEQ ID NOS: 31918, 31919, 31920, 31921, 31922, 31923, 31924, 31925, 31926, 31927, 31928 were selected from the ORFs having the nucleotide sequence represented by SEQ ID NO: 2349.

[2838] The probes having the nucleotide sequence represented by SEQ ID NOS: 31929, 31930, 31931, 31932, 31933, 31934, 31935, 31936, 31937, 31938, 31939 were selected from the ORFs having the nucleotide sequence represented by SEQ ID NO: 2350.

[2839] The probes having the nucleotide sequence represented by SEQ ID NOS: 31940, 31941, 31942, 31943, 31944, 31945, 31946, 31947, 31948, 31949, 31950 were selected from the ORFs having the nucleotide sequence represented by SEQ ID NO: 2351.

[2840] The probes having the nucleotide sequence represented by SEQ ID NOS: 31951, 31952, 31953, 31954, 31955, 31956, 31957, 31958, 31959, 31960, 31961 were selected from the ORFs having the nucleotide sequence represented by SEQ ID NO: 2352.

[2841] The probes having the nucleotide sequence represented by SEQ ID NOS: 31962, 31963, 31964, 31965, 31966, 31967, 31968, 31969, 31970, 31971, 31972 were selected from the ORFs having the nucleotide sequence represented by SEQ ID NO: 2353.

[2842] The probes having the nucleotide sequence represented by SEQ ID NOS: 31973, 31974, 31975, 31976, 31977, 31978, 31979, 31980, 31981, 31982, 31983 were selected from the ORFs having the nucleotide sequence represented by SEQ ID NO: 2354.

[2843] The probes having the nucleotide sequence represented by SEQ ID NOS: 31984, 31985, 31986, 31987, 31988, 31989, 31990, 31991, 31992, 31993, 31994 were selected from the ORFs having the nucleotide sequence represented by SEQ ID NO: 2355.

[2844] The probes having the nucleotide sequence represented by SEQ ID NOS: 31995, 31996, 31997, 31998, 31999, 32000, 32001, 32002, 32003, 32004, 32005 were selected from the ORFs having the nucleotide sequence represented by SEQ ID NO: 2356.

[2845] The probes having the nucleotide sequence represented by SEQ ID NOS: 32006, 32007, 32008, 32009, 32010, 32011, 32012, 32013, 32014, 32015, 32016 were selected from the ORFs having the nucleotide sequence represented by SEQ ID NO: 2357.

[2846] The probes having the nucleotide sequence represented by SEQ ID NOS: 32017, 32018, 32019, 32020, 32021, 32022, 32023, 32024, 32025, 32026, 32027 were selected from the ORFs having the nucleotide sequence represented by SEQ ID NO: 2358.

[2847] The probes having the nucleotide sequence represented by SEQ ID NOS: 32028, 32029, 32030, 32031, 32032, 32033, 32034, 32035, 32036, 32037, 32038 were selected from the ORFs having the nucleotide sequence represented by SEQ ID NO: 2359.

[2848] The probes having the nucleotide sequence represented by SEQ ID NOS: 32039, 32040, 32041, 32042, 32043, 32044, 32045, 32046, 32047, 32048, 32049 were selected from the ORFs having the nucleotide sequence represented by SEQ ID NO: 2360.

[2849] The probes having the nucleotide sequence represented by SEQ ID NOS: 32050, 32051, 32052, 32053, 32054, 32055, 32056, 32057, 32058, 32059, 32060 were selected from the ORFs having the nucleotide sequence represented by SEQ ID NO: 2361.

[2850] The probes having the nucleotide sequence represented by SEQ ID NOS: 32061, 32062, 32063, 32064, 32065, 32066, 32067, 32068, 32069, 32070, 32071 were selected from the ORFs having the nucleotide sequence represented by SEQ ID NO: 2362.

[2851] The probes having the nucleotide sequence represented by SEQ ID NOS: 32072, 32073, 32074, 32075, 32076, 32077, 32078, 32079, 32080, 32081, 32082 were selected from the ORFs having the nucleotide sequence represented by SEQ ID NO: 2363.

[2852] The probes having the nucleotide sequence represented by SEQ ID NOS: 32083, 32084, 32085, 32086, 32087, 32088, 32089, 32090, 32091, 32092, 32093 were selected from the ORFs having the nucleotide sequence represented by SEQ ID NO: 2364.

[2853] The probes having the nucleotide sequence represented by SEQ ID NOS: 32094, 32095, 32096, 32097, 32098, 32099, 32100, 32101, 32102, 32103, 32104 were selected from the ORFs having the nucleotide sequence represented by SEQ ID NO: 2365.

[2854] The probes having the nucleotide sequence represented by SEQ ID NOS: 32105, 32106, 32107, 32108, 32109, 32110, 32111, 32112, 32113, 32114, 32115 were selected from the ORFs having the nucleotide sequence represented by SEQ ID NO: 2366.

[2855] The probes having the nucleotide sequence represented by SEQ ID NOS: 32116, 32117, 32118, 32119, 32120, 32121, 32122, 32123, 32124, 32125, 32126 were selected from the ORFs having the nucleotide sequence represented by SEQ ID NO: 2367.

[2856] The probes having the nucleotide sequence represented by SEQ ID NOS: 32127, 32128, 32129, 32130, 32131, 32132, 32133, 32134, 32135, 32136, 32137 were selected from the ORFs having the nucleotide sequence represented by SEQ ID NO: 2368.

[2857] The probes having the nucleotide sequence represented by SEQ ID NOS: 32138, 32139, 32140, 32141, 32142, 32143, 32144, 32145, 32146, 32147, 32148 were selected from the ORFs having the nucleotide sequence represented by SEQ ID NO: 2369.

[2858] The probes having the nucleotide sequence represented by SEQ ID NOS: 32149, 32150, 32151, 32152, 32153, 32154, 32155, 32156, 32157, 32158, 32159 were selected from the ORFs having the nucleotide sequence represented by SEQ ID NO: 2370.

[2859] The probes having the nucleotide sequence represented by SEQ ID NOS: 32160, 32161, 32162, 32163, 32164, 32165, 32166, 32167, 32168, 32169, 32170 were selected from the ORFs having the nucleotide sequence represented by SEQ ID NO: 2371.

[2860] The probes having the nucleotide sequence represented by SEQ ID NOS: 32171, 32172, 32173, 32174, 32175, 32176, 32177, 32178, 32179, 32180, 32181 were selected from the ORFs having the nucleotide sequence represented by SEQ ID NO: 2372.

[2861] The probes having the nucleotide sequence represented by SEQ ID NOS: 32182, 32183, 32184, 32185, 32186, 32187, 32188, 32189, 32190, 32191, 32192 were selected from the ORFs having the nucleotide sequence represented by SEQ ID NO: 2373.

[2862] The probes having the nucleotide sequence represented by SEQ ID NOS: 32193, 32194, 32195, 32196, 32197, 32198, 32199, 32200, 32201, 32202, 32203 were selected from the ORFs having the nucleotide sequence represented by SEQ ID NO: 2374.

[2863] The probes having the nucleotide sequence represented by SEQ ID NOS: 32204, 32205, 32206, 32207, 32208, 32209, 32210, 32211, 32212, 32213, 32214 were selected from the ORFs having the nucleotide sequence represented by SEQ ID NO: 2375.

[2864] The probes having the nucleotide sequence represented by SEQ ID NOS: 32215, 32216, 32217, 32218, 32219, 32220, 32221, 32222, 32223, 32224, 32225 were selected from the ORFs having the nucleotide sequence represented by SEQ ID NO: 2376.

[2865] The probes having the nucleotide sequence represented by SEQ ID NOS: 32226, 32227, 32228, 32229, 32230, 32231, 32232, 32233, 32234, 32235, 32236 were selected from the ORFs having the nucleotide sequence represented by SEQ ID NO: 2377.

[2866] The probes having the nucleotide sequence represented by SEQ ID NOS: 32237, 32238, 32239, 32240, 32241, 32242, 32243, 32244, 32245, 32246, 32247 were selected from the ORFs having the nucleotide sequence represented by SEQ ID NO: 2378.

[2867] The probes having the nucleotide sequence represented by SEQ ID NOS: 32248, 32249, 32250, 32251, 32252, 32253, 32254, 32255, 32256, 32257, 32258 were selected from the ORFs having the nucleotide sequence represented by SEQ ID NO: 2379.

[2868] The probes having the nucleotide sequence represented by SEQ ID NOS: 32259, 32260, 32261, 32262, 32263, 32264, 32265, 32266, 32267, 32268, 32269 were selected from the ORFs having the nucleotide sequence represented by SEQ ID NO: 2380.

[2869] The probes having the nucleotide sequence represented by SEQ ID NOS: 32270, 32271, 32272, 32273, 32274, 32275, 32276, 32277, 32278, 32279, 32280 were selected from the ORFs having the nucleotide sequence represented by SEQ ID NO: 2381.

[2870] The probes having the nucleotide sequence represented by SEQ ID NOS: 32281, 32282, 32283, 32284, 32285, 32286, 32287, 32288, 32289, 32290, 32291 were selected from the ORFs having the nucleotide sequence represented by SEQ ID NO: 2382.

[2871] The probes having the nucleotide sequence represented by SEQ ID NOS: 32292, 32293, 32294, 32295, 32296, 32297, 32298, 32299, 32300, 32301, 32302 were selected from the ORFs having the nucleotide sequence represented by SEQ ID NO: 2383.

[2872] The probes having the nucleotide sequence represented by SEQ ID NOS: 32303, 32304, 32305, 32306, 32307, 32308, 32309, 32310, 32311, 32312, 32313 were selected from the ORFs having the nucleotide sequence represented by SEQ ID NO: 2384.

[2873] The probes having the nucleotide sequence represented by SEQ ID NOS: 32314, 32315, 32316, 32317, 32318, 32319, 32320, 32321, 32322, 32323, 32324 were selected from the ORFs having the nucleotide sequence represented by SEQ ID NO: 2385.

[2874] The probes having the nucleotide sequence represented by SEQ ID NOS: 32325, 32326, 32327, 32328, 32329, 32330, 32331, 32332, 32333, 32334, 32335 were selected from the ORFs having the nucleotide sequence represented by SEQ ID NO: 2386.

[2875] The probes having the nucleotide sequence represented by SEQ ID NOS: 32336, 32337, 32338, 32339, 32340, 32341, 32342, 32343, 32344, 32345, 32346 were selected from the ORFs having the nucleotide sequence represented by SEQ ID NO: 2387.

[2876] The probes having the nucleotide sequence represented by SEQ ID NOS: 32347, 32348, 32349, 32350, 32351, 32352, 32353, 32354, 32355, 32356, 32357 were selected from the ORFs having the nucleotide sequence represented by SEQ ID NO: 2388.

[2877] The probes having the nucleotide sequence represented by SEQ ID NOS: 32358, 32359, 32360, 32361, 32362, 32363, 32364, 32365, 32366, 32367, 32368 were selected from the ORFs having the nucleotide sequence represented by SEQ ID NO: 2389.

[2878] The probes having the nucleotide sequence represented by SEQ ID NOS: 32369, 32370, 32371, 32372, 32373, 32374, 32375, 32376, 32377, 32378, 32379 were selected from the ORFs having the nucleotide sequence represented by SEQ ID NO: 2390.

[2879] The probes having the nucleotide sequence represented by SEQ ID NOS: 32380, 32381, 32382, 32383, 32384, 32385, 32386, 32387, 32388, 32389, 32390 were selected from the ORFs having the nucleotide sequence represented by SEQ ID NO: 2391.

[2880] The probes having the nucleotide sequence represented by SEQ ID NOS: 32391, 32392, 32393, 32394, 32395, 32396, 32397, 32398, 32399, 32400, 32401 were selected from the ORFs having the nucleotide sequence represented by SEQ ID NO: 2392.

[2881] The probes having the nucleotide sequence represented by SEQ ID NOS: 32402, 32403, 32404, 32405, 32406, 32407, 32408, 32409, 32410, 32411, 32412 were selected from the ORFs having the nucleotide sequence represented by SEQ ID NO: 2393.

[2882] The probes having the nucleotide sequence represented by SEQ ID NOS: 32413, 32414, 32415, 32416, 32417, 32418, 32419, 32420, 32421, 32422, 32423 were selected from the ORFs having the nucleotide sequence represented by SEQ ID NO: 2394.

[2883] The probes having the nucleotide sequence represented by SEQ ID NOS: 32424, 32425, 32426, 32427, 32428, 32429, 32430, 32431, 32432, 32433, 32434 were selected from the ORFs having the nucleotide sequence represented by SEQ ID NO: 2395.

[2884] The probes having the nucleotide sequence represented by SEQ ID NOS: 32435, 32436, 32437, 32438, 32439, 32440, 32441, 32442, 32443, 32444, 32445 were selected from the ORFs having the nucleotide sequence represented by SEQ ID NO: 2396.

[2885] The probes having the nucleotide sequence represented by SEQ ID NOS: 32446, 32447, 32448, 32449, 32450, 32451, 32452, 32453, 32454, 32455, 32456 were selected from the ORFs having the nucleotide sequence represented by SEQ ID NO: 2397.

[2886] The probes having the nucleotide sequence represented by SEQ ID NOS: 32457, 32458, 32459, 32460, 32461, 32462, 32463, 32464, 32465, 32466, 32467 were selected from the ORFs having the nucleotide sequence represented by SEQ ID NO: 2398.

[2887] The probes having the nucleotide sequence represented by SEQ ID NOS: 32468, 32469, 32470, 32471, 32472, 32473, 32474, 32475, 32476, 32477, 32478 were selected from the ORFs having the nucleotide sequence represented by SEQ ID NO: 2399.

[2888] The probes having the nucleotide sequence represented by SEQ ID NOS: 32479, 32480, 32481, 32482, 32483, 32484, 32485, 32486, 32487, 32488, 32489 were selected from the ORFs having the nucleotide sequence represented by SEQ ID NO: 2400.

[2889] The probes having the nucleotide sequence represented by SEQ ID NOS: 32490, 32491, 32492, 32493, 32494, 32495, 32496, 32497, 32498, 32499, 32500 were selected from the ORFs having the nucleotide sequence represented by SEQ ID NO: 2401.

[2890] The probes having the nucleotide sequence represented by SEQ ID NOS: 32501, 32502, 32503, 32504, 32505, 32506, 32507, 32508, 32509, 32510, 32511 were selected from the ORFs having the nucleotide sequence represented by SEQ ID NO: 2402.

[2891] The probes having the nucleotide sequence represented by SEQ ID NOS: 32512, 32513, 32514, 32515, 32516, 32517, 32518, 32519, 32520, 32521, 32522 were selected from the ORFs having the nucleotide sequence represented by SEQ ID NO: 2403.

[2892] The probes having the nucleotide sequence represented by SEQ ID NOS: 32523, 32524, 32525, 32526, 32527, 32528, 32529, 32530, 32531, 32532, 32533 were selected from the ORFs having the nucleotide sequence represented by SEQ ID NO: 2404.

[2893] The probes having the nucleotide sequence represented by SEQ ID NOS: 32534, 32535, 32536, 32537, 32538, 32539, 32540, 32541, 32542, 32543, 32544 were selected from the ORFs having the nucleotide sequence represented by SEQ ID NO: 2405.

[2894] The probes having the nucleotide sequence represented by SEQ ID NOS: 32545, 32546, 32547, 32548, 32549, 32550, 32551, 32552, 32553, 32554, 32555 were selected from the ORFs having the nucleotide sequence represented by SEQ ID NO: 2406.

[2895] The probes having the nucleotide sequence represented by SEQ ID NOS: 32556, 32557, 32558, 32559, 32560, 32561, 32562, 32563, 32564, 32565, 32566 were selected from the ORFs having the nucleotide sequence represented by SEQ ID NO: 2407.

[2896] The probes having the nucleotide sequence represented by SEQ ID NOS: 32567, 32568, 32569, 32570, 32571, 32572, 32573, 32574, 32575, 32576, 32577 were selected from the ORFs having the nucleotide sequence represented by SEQ ID NO: 2408.

[2897] The probes having the nucleotide sequence represented by SEQ ID NOS: 32578, 32579, 32580, 32581, 32582, 32583, 32584, 32585, 32586, 32587, 32588 were selected from the ORFs having the nucleotide sequence represented by SEQ ID NO: 2409.

[2898] The probes having the nucleotide sequence represented by SEQ ID NOS: 32589, 32590, 32591, 32592, 32593, 32594, 32595, 32596, 32597, 32598, 32599 were selected from the ORFs having the nucleotide sequence represented by SEQ ID NO: 2410.

[2899] The probes having the nucleotide sequence represented by SEQ ID NOS: 32600, 32601, 32602, 32603, 32604, 32605, 32606, 32607, 32608, 32609, 32610 were selected from the ORFs having the nucleotide sequence represented by SEQ ID NO: 2411.

[2900] The probes having the nucleotide sequence represented by SEQ ID NOS: 32611, 32612, 32613, 32614, 32615, 32616, 32617, 32618, 32619, 32620, 32621 were selected from the ORFs having the nucleotide sequence represented by SEQ ID NO: 2412.

[2901] The probes having the nucleotide sequence represented by SEQ ID NOS: 32622, 32623, 32624, 32625, 32626, 32627, 32628, 32629, 32630, 32631, 32632 were selected from the ORFs having the nucleotide sequence represented by SEQ ID NO: 2413.

[2902] The probes having the nucleotide sequence represented by SEQ ID NOS: 32633, 32634, 32635, 32636, 32637, 32638, 32639, 32640, 32641, 32642, 32643 were selected from the ORFs having the nucleotide sequence represented by SEQ ID NO: 2414.

[2903] The probes having the nucleotide sequence represented by SEQ ID NOS: 32644, 32645, 32646, 32647, 32648, 32649, 32650, 32651, 32652, 32653, 32654 were selected from the ORFs having the nucleotide sequence represented by SEQ ID NO: 2415.

[2904] The probes having the nucleotide sequence represented by SEQ ID NOS: 32655, 32656, 32657, 32658, 32659, 32660, 32661, 32662, 32663, 32664, 32665 were selected from the ORFs having the nucleotide sequence represented by SEQ ID NO: 2416.

[2905] The probes having the nucleotide sequence represented by SEQ ID NOS: 32666, 32667, 32668, 32669, 32670, 32671, 32672, 32673, 32674, 32675, 32676 were selected from the ORFs having the nucleotide sequence represented by SEQ ID NO: 2417.

[2906] The probes having the nucleotide sequence represented by SEQ ID NOS: 32677, 32678, 32679, 32680, 32681, 32682, 32683, 32684, 32685, 32686, 32687 were selected from the ORFs having the nucleotide sequence represented by SEQ ID NO: 2418.

[2907] The probes having the nucleotide sequence represented by SEQ ID NOS: 32688, 32689, 32690, 32691, 32692, 32693, 32694, 32695, 32696, 32697, 32698 were selected from the ORFs having the nucleotide sequence represented by SEQ ID NO: 2419.

[2908] The probes having the nucleotide sequence represented by SEQ ID NOS: 32699, 32700, 32701, 32702, 32703, 32704, 32705, 32706, 32707, 32708, 32709 were selected from the ORFs having the nucleotide sequence represented by SEQ ID NO: 2420.

[2909] The probes having the nucleotide sequence represented by SEQ ID NOS: 32710, 32711, 32712, 32713, 32714, 32715, 32716, 32717, 32718, 32719, 32720 were selected from the ORFs having the nucleotide sequence represented by SEQ ID NO: 2421.

[2910] The probes having the nucleotide sequence represented by SEQ ID NOS: 32721, 32722, 32723, 32724, 32725, 32726, 32727, 32728, 32729, 32730, 32731 were selected from the ORFs having the nucleotide sequence represented by SEQ ID NO: 2422.

[2911] The probes having the nucleotide sequence represented by SEQ ID NOS: 32732, 32733, 32734, 32735, 32736, 32737, 32738, 32739, 32740, 32741, 32742 were selected from the ORFs having the nucleotide sequence represented by SEQ ID NO: 2423.

[2912] The probes having the nucleotide sequence represented by SEQ ID NOS: 32743, 32744, 32745, 32746, 32747, 32748, 32749, 32750, 32751 were selected from the ORFs having the nucleotide sequence represented by SEQ ID NO: 2424.

[2913] The probes having the nucleotide sequence represented by SEQ ID NOS: 32752, 32753, 32754, 32755, 32756, 32757, 32758, 32759, 32760, 32761, 32762 were selected from the ORFs having the nucleotide sequence represented by SEQ ID NO: 2425.

[2914] The probes having the nucleotide sequence represented by SEQ ID NOS: 32763, 32764, 32765, 32766, 32767, 32768, 32769, 32770, 32771, 32772, 32773 were selected from the ORFs having the nucleotide sequence represented by SEQ ID NO: 2426.

[2915] The probes having the nucleotide sequence represented by SEQ ID NOS: 32774, 32775, 32776, 32777, 32778, 32779, 32780, 32781, 32782, 32783, 32784 were selected from the ORFs having the nucleotide sequence represented by SEQ ID NO: 2427.

[2916] The probes having the nucleotide sequence represented by SEQ ID NOS: 32785, 32786, 32787, 32788, 32789, 32790, 32791, 32792, 32793, 32794, 32795 were selected from the ORFs having the nucleotide sequence represented by SEQ ID NO: 2428.

[2917] The probes having the nucleotide sequence represented by SEQ ID NOS: 32796, 32797, 32798, 32799, 32800, 32801, 32802, 32803, 32804, 32805, 32806 were selected from the ORFs having the nucleotide sequence represented by SEQ ID NO: 2429.

[2918] The probes having the nucleotide sequence represented by SEQ ID NOS: 32807, 32808, 32809, 32810, 32811, 32812, 32813, 32814, 32815, 32816, 32817 were selected from the ORFs having the nucleotide sequence represented by SEQ ID NO: 2430.

[2919] The probes having the nucleotide sequence represented by SEQ ID NOS: 32818, 32819, 32820, 32821, 32822, 32823, 32824, 32825, 32826, 32827, 32828 were selected from the ORFs having the nucleotide sequence represented by SEQ ID NO: 2431.

[2920] The probes having the nucleotide sequence represented by SEQ ID NOS: 32829, 32830, 32831, 32832, 32833, 32834, 32835, 32836, 32837, 32838, 32839 were selected from the ORFs having the nucleotide sequence represented by SEQ ID NO: 2432.

[2921] The probes having the nucleotide sequence represented by SEQ ID NOS: 32840, 32841, 32842, 32843, 32844, 32845, 32846, 32847, 32848, 32849, 32850 were selected from the ORFs having the nucleotide sequence represented by SEQ ID NO: 2433.

[2922] The probes having the nucleotide sequence represented by SEQ ID NOS: 32851, 32852, 32853, 32854, 32855, 32856, 32857, 32858, 32859, 32860, 32861 were selected from the ORFs having the nucleotide sequence represented by SEQ ID NO: 2434.

[2923] The probes having the nucleotide sequence represented by SEQ ID NOS: 32862, 32863, 32864, 32865, 32866, 32867, 32868, 32869, 32870, 32871, 32872 were selected from the ORFs having the nucleotide sequence represented by SEQ ID NO: 2435.

[2924] The probes having the nucleotide sequence represented by SEQ ID NOS: 32873, 32874, 32875, 32876, 32877, 32878, 32879, 32880, 32881, 32882, 32883 were selected from the ORFs having the nucleotide sequence represented by SEQ ID NO: 2436.

[2925] The probes having the nucleotide sequence represented by SEQ ID NOS: 32884, 32885, 32886, 32887, 32888, 32889, 32890, 32891, 32892, 32893, 32894 were selected from the ORFs having the nucleotide sequence represented by SEQ ID NO: 2437.

[2926] The probes having the nucleotide sequence represented by SEQ ID NOS: 32895, 32896, 32897, 32898, 32899, 32900, 32901, 32902, 32903, 32904, 32905 were selected from the ORFs having the nucleotide sequence represented by SEQ ID NO: 2438.

[2927] The probes having the nucleotide sequence represented by SEQ ID NOS: 32906, 32907, 32908, 32909, 32910, 32911, 32912, 32913, 32914, 32915, 32916 were selected from the ORFs having the nucleotide sequence represented by SEQ ID NO: 2439.

[2928] The probes having the nucleotide sequence represented by SEQ ID NOS: 32917, 32918, 32919, 32920, 32921, 32922, 32923, 32924, 32925, 32926, 32927 were selected from the ORFs having the nucleotide sequence represented by SEQ ID NO: 2440.

[2929] The probes having the nucleotide sequence represented by SEQ ID NOS: 32928, 32929, 32930, 32931, 32932, 32933, 32934, 32935, 32936, 32937, 32938 were selected from the ORFs having the nucleotide sequence represented by SEQ ID NO: 2441.

[2930] The probes having the nucleotide sequence represented by SEQ ID NOS: 32939, 32940, 32941, 32942, 32943, 32944, 32945, 32946, 32947, 32948, 32949 were selected from the ORFs having the nucleotide sequence represented by SEQ ID NO: 2442.

[2931] The probes having the nucleotide sequence represented by SEQ ID NOS: 32950, 32951, 32952, 32953, 32954, 32955, 32956, 32957, 32958, 32959, 32960 were selected from the ORFs having the nucleotide sequence represented by SEQ ID NO: 2443.

[2932] The probes having the nucleotide sequence represented by SEQ ID NOS: 32961, 32962, 32963, 32964, 32965, 32966, 32967, 32968, 32969, 32970, 32971 were selected from the ORFs having the nucleotide sequence represented by SEQ ID NO: 2444.

[2933] The probes having the nucleotide sequence represented by SEQ ID NOS: 32972, 32973, 32974, 32975, 32976, 32977, 32978, 32979, 32980, 32981, 32982 were selected from the ORFs having the nucleotide sequence represented by SEQ ID NO: 2445.

[2934] The probes having the nucleotide sequence represented by SEQ ID NOS: 32983, 32984, 32985, 32986, 32987, 32988, 32989, 32990, 32991, 32992, 32993 were selected from the ORFs having the nucleotide sequence represented by SEQ ID NO: 2446.

[2935] The probes having the nucleotide sequence represented by SEQ ID NOS: 32994, 32995, 32996, 32997, 32998, 32999, 33000, 33001, 33002, 33003, 33004 were selected from the ORFs having the nucleotide sequence represented by SEQ ID NO: 2447.

[2936] The probes having the nucleotide sequence represented by SEQ ID NOS: 33005, 33006, 33007, 33008, 33009, 33010, 33011, 33012, 33013, 33014, 33015 were selected from the ORFs having the nucleotide sequence represented by SEQ ID NO: 2448.

[2937] The probes having the nucleotide sequence represented by SEQ ID NOS: 33016, 33017, 33018, 33019, 33020, 33021, 33022, 33023, 33024, 33025, 33026 were selected from the ORFs having the nucleotide sequence represented by SEQ ID NO: 2449.

[2938] The probes having the nucleotide sequence represented by SEQ ID NOS: 33027, 33028, 33029, 33030, 33031, 33032, 33033, 33034, 33035, 33036, 33037 were selected from the ORFs having the nucleotide sequence represented by SEQ ID NO: 2450.

[2939] The probes having the nucleotide sequence represented by SEQ ID NOS: 33038, 33039, 33040, 33041, 33042, 33043, 33044, 33045, 33046, 33047, 33048 were selected from the ORFs having the nucleotide sequence represented by SEQ ID NO: 2451.

[2940] The probes having the nucleotide sequence represented by SEQ ID NOS: 33049, 33050, 33051, 33052, 33053, 33054, 33055, 33056, 33057, 33058, 33059 were selected from the ORFs having the nucleotide sequence represented by SEQ ID NO: 2452.

[2941] The probes having the nucleotide sequence represented by SEQ ID NOS: 33060, 33061, 33062, 33063, 33064, 33065, 33066, 33067, 33068, 33069, 33070 were selected from the ORFs having the nucleotide sequence represented by SEQ ID NO: 2453.

[2942] The probes having the nucleotide sequence represented by SEQ ID NOS: 33071, 33072, 33073, 33074, 33075, 33076, 33077, 33078, 33079, 33080, 33081 were selected from the ORFs having the nucleotide sequence represented by SEQ ID NO: 2454.

[2943] The probes having the nucleotide sequence represented by SEQ ID NOS: 33082, 33083, 33084, 33085, 33086, 33087, 33088, 33089, 33090, 33091, 33092 were selected from the ORFs having the nucleotide sequence represented by SEQ ID NO: 2455.

[2944] The probes having the nucleotide sequence represented by SEQ ID NOS: 33093, 33094, 33095, 33096, 33097, 33098, 33099, 33100, 33101, 33102, 33103 were selected from the ORFs having the nucleotide sequence represented by SEQ ID NO: 2456.

[2945] The probes having the nucleotide sequence represented by SEQ ID NOS: 33104, 33105, 33106, 33107, 33108, 33109, 33110, 33111, 33112, 33113, 33114 were selected from the ORFs having the nucleotide sequence represented by SEQ ID NO: 2457.

[2946] The probes having the nucleotide sequence represented by SEQ ID NOS: 33115, 33116, 33117, 33118, 33119, 33120, 33121, 33122, 33123, 33124, 33125 were selected from the ORFs having the nucleotide sequence represented by SEQ ID NO: 2458.

[2947] The probes having the nucleotide sequence represented by SEQ ID NOS: 33126, 33127, 33128, 33129, 33130, 33131, 33132, 33133, 3313.4, 33135, 33136 were selected from the ORFs having the nucleotide sequence represented by SEQ ID NO: 2459.

[2948] The probes having the nucleotide sequence represented by SEQ ID NOS: 33137, 33138, 33139, 33140, 33141, 33142, 33143, 33144, 33145, 33146, 33147 were selected from the ORFs having the nucleotide sequence represented by SEQ ID NO: 2460.

[2949] The probes having the nucleotide sequence represented by SEQ ID NOS: 33148, 33149, 33150, 33151, 33152, 33153, 33154, 33155, 33156, 33157, 33158 were selected from the ORFs having the nucleotide sequence represented by SEQ ID NO: 2461.

[2950] The probes having the nucleotide sequence represented by SEQ ID NOS: 33159, 33160, 33161, 33162, 33163, 33164, 33165, 33166, 33167, 33168, 33169 were selected from the ORFs having the nucleotide sequence represented by SEQ ID NO: 2462.

[2951] The probes having the nucleotide sequence represented by SEQ ID NOS: 33170, 33171, 33172, 33173, 33174, 33175, 33176, 33177, 33178, 33179, 33180 were selected from the ORFs having the nucleotide sequence represented by SEQ ID NO: 2463.

[2952] The probes having the nucleotide sequence represented by SEQ ID NOS: 33181, 33182, 33183, 33184, 33185, 33186, 33187, 33188, 33189, 33190, 33191 were selected from the ORFs having the nucleotide sequence represented by SEQ ID NO: 2464.

[2953] The probes having the nucleotide sequence represented by SEQ ID NOS: 33192, 33193, 33194, 33195, 33196, 33197, 33198, 33199, 33200, 33201, 33202 were selected from the ORFs having the nucleotide sequence represented by SEQ ID NO: 2465.

[2954] The probes having the nucleotide sequence represented by SEQ ID NOS: 33203, 33204, 33205, 33206, 33207, 33208, 33209, 33210, 33211, 33212, 33213 were selected from the ORFs having the nucleotide sequence represented by SEQ ID NO: 2466.

[2955] The probes having the nucleotide sequence represented by SEQ ID NOS: 33214, 33215, 33216, 33217, 33218, 33219, 33220, 33221, 33222, 33223, 33224 were selected from the ORFs having the nucleotide sequence represented by SEQ ID NO: 2467.

[2956] The probes having the nucleotide sequence represented by SEQ ID NOS: 33225, 33226, 33227, 33228, 33229, 33230, 33231, 33232, 33233, 33234, 33235 were selected from the ORFs having the nucleotide sequence represented by SEQ ID NO: 2468.

[2957] The probes having the nucleotide sequence represented by SEQ ID NOS: 33236, 33237, 33238, 33239, 33240, 33241, 33242, 33243, 33244, 33245, 33246 were selected from the ORFs having the nucleotide sequence represented by SEQ ID NO: 2469.

[2958] The probes having the nucleotide sequence represented by SEQ ID NOS: 33247, 33248, 33249, 33250, 33251, 33252, 33253, 33254, 33255, 33256, 33257 were selected from the ORFs having the nucleotide sequence represented by SEQ ID NO: 2470.

[2959] The probes having the nucleotide sequence represented by SEQ ID NOS: 33258, 33259, 33260, 33261, 33262, 33263, 33264, 33265, 33266, 33267, 33268 were selected from the ORFs having the nucleotide sequence represented by SEQ ID NO: 2471.

[2960] The probes having the nucleotide sequence represented by SEQ ID NOS: 33269, 33270, 33271, 33272, 33273, 33274, 33275, 33276, 33277, 33278, 33279 were selected from the ORFs having the nucleotide sequence represented by SEQ ID NO: 2472.

[2961] The probes having the nucleotide sequence represented by SEQ ID NOS: 33280, 33281, 33282, 33283, 33284, 33285, 33286, 33287, 33288, 33289, 33290 were selected from the ORFs having the nucleotide sequence represented by SEQ ID NO: 2473.

[2962] The probes having the nucleotide sequence represented by SEQ ID NOS: 33291, 33292, 33293, 33294, 33295, 33296, 33297, 33298, 33299, 33300, 33301 were selected from the ORFs having the nucleotide sequence represented by SEQ ID NO: 2474.

[2963] The probes having the nucleotide sequence represented by SEQ ID NOS: 33302, 33303, 33304, 33305, 33306, 33307, 33308, 33309, 33310, 33311, 33312 were selected from the ORFs having the nucleotide sequence represented by SEQ ID NO: 2475.

[2964] The probes having the nucleotide sequence represented by SEQ ID NOS: 33313, 33314, 33315, 33316, 33317, 33318, 33319, 33320, 33321, 33322, 33323 were selected from the ORFs having the nucleotide sequence represented by SEQ ID NO: 2476.

[2965] The probes having the nucleotide sequence represented by SEQ ID NOS: 33324, 33325, 33326, 33327, 33328, 33329, 33330, 33331, 33332, 33333, 33334 were selected from the ORFs having the nucleotide sequence represented by SEQ ID NO: 2477.

[2966] The probes having the nucleotide sequence represented by SEQ ID NOS: 33335, 33336, 33337, 33338, 33339, 33340, 33341, 33342, 33343, 33344, 33345 were selected from the ORFs having the nucleotide sequence represented by SEQ ID NO: 2478.

[2967] The probes having the nucleotide sequence represented by SEQ ID NOS: 33346, 33347, 33348, 33349, 33350, 33351, 33352, 33353, 33354, 33355, 33356 were selected from the ORFs having the nucleotide sequence represented by SEQ ID NO: 2479.

[2968] The probes having the nucleotide sequence represented by SEQ ID NOS: 33357, 33358, 33359, 33360, 33361, 33362, 33363, 33364, 33365, 333.66, 33367 were selected from the ORFs having the nucleotide sequence represented by SEQ ID NO: 2480.

[2969] The probes having the nucleotide sequence represented by SEQ ID NOS: 33368, 33369, 33370, 33371, 33372, 33373, 33374, 33375, 33376, 33377, 33378 were selected from the ORFs having the nucleotide sequence represented by SEQ ID NO: 2481.

[2970] The probes having the nucleotide sequence represented by SEQ ID NOS: 33379, 33380, 33381, 33382, 33383, 33384, 33385, 33386, 33387, 33388, 33389 were selected from the ORFs having the nucleotide sequence represented by SEQ ID NO: 2482.

[2971] The probes having the nucleotide sequence represented by SEQ ID NOS: 33390, 33391, 33392, 33393, 33394, 33395, 33396, 33397, 33398, 33399, 33400 were selected from the ORFs having the nucleotide sequence represented by SEQ ID NO: 2483.

[2972] The probes having the nucleotide sequence represented by SEQ ID NOS: 33401, 33402, 33403, 33404, 33405, 33406, 33407, 33408, 33409, 33410, 33411 were selected from the ORFs having the nucleotide sequence represented by SEQ ID NO: 2484.

[2973] The probes having the nucleotide sequence represented by SEQ ID NOS: 33412, 33413, 33414, 33415, 33416, 33417, 33418, 33419, 33420, 33421, 33422 were selected from the ORFs having the nucleotide sequence represented by SEQ ID NO: 2485.

[2974] The probes having the nucleotide sequence represented by SEQ ID NOS: 33423, 33424, 33425, 33426, 33427, 33428, 33429, 33430, 33431, 33432, 33433 were selected from the ORFs having the nucleotide sequence represented by SEQ ID NO: 2486.

[2975] The probes having the nucleotide sequence represented by SEQ ID NOS: 33434, 33435, 33436, 33437, 33438, 33439, 33440, 33441, 33442, 33443, 33444 were selected from the ORFs having the nucleotide sequence represented by SEQ ID NO: 2487.

[2976] The probes having the nucleotide sequence represented by SEQ ID NOS: 33445, 33446, 33447, 33448, 33449, 33450, 33451, 33452, 33453, 33454, 33455 were selected from the ORFs having the nucleotide sequence represented by SEQ ID NO: 2488.

[2977] The probes having the nucleotide sequence represented by SEQ ID NOS: 33456, 33457, 33458, 33459, 33460, 33461, 33462, 33463, 33464, 33465, 33466 were selected from the ORFs having the nucleotide sequence represented by SEQ ID NO: 2489.

[2978] The probes having the nucleotide sequence represented by SEQ ID NOS: 33467, 33468, 33469, 33470, 33471, 33472, 33473, 33474 were selected from the ORFs having the nucleotide sequence represented by SEQ ID NO: 2490.

[2979] The probes having the nucleotide sequence represented by SEQ ID NOS: 33475, 33476, 33477, 33478, 33479, 33480, 33481, 33482, 33483, 33484, 33485 were selected from the ORFs having the nucleotide sequence represented by SEQ ID NO: 2491.

[2980] The probes having the nucleotide sequence represented by SEQ ID NOS: 33486, 33487, 33488, 33489, 33490, 33491, 33492, 33493, 33494, 33495, 33496 were selected from the ORFs having the nucleotide sequence represented by SEQ ID NO: 2492.

[2981] The probes having the nucleotide sequence represented by SEQ ID NOS: 33497, 33498, 33499, 33500, 33501, 33502, 33503, 33504, 33505, 33506, 33507 were selected from the ORFs having the nucleotide sequence represented by SEQ ID NO: 2493.

[2982] The probes having the nucleotide sequence represented by SEQ ID NOS: 33508, 33509, 33510, 33511, 33512, 33513, 33514, 33515, 33516, 33517, 33518 were selected from the ORFs having the nucleotide sequence represented by SEQ ID NO: 2494.

[2983] The probes having the nucleotide sequence represented by SEQ ID NOS: 33519, 33520, 33521, 33522, 33523, 33524, 33525, 33526, 33527, 33528, 33529 were selected from the ORFs having the nucleotide sequence represented by SEQ ID NO: 2495.

[2984] The probes having the nucleotide sequence represented by SEQ ID NOS: 33530, 33531, 33532, 33533, 33534, 33535, 33536, 33537, 33538, 33539, 33540 were selected from the ORFs having the nucleotide sequence represented by SEQ ID NO: 2496.

[2985] The probes having the nucleotide sequence represented by SEQ ID NOS: 33541, 33542, 33543, 33544, 33545, 33546, 33547, 33548, 33549, 33550, 33551 were selected from the ORFs having the nucleotide sequence represented by SEQ ID NO: 2497.

[2986] The probes having the nucleotide sequence represented by SEQ ID NOS: 33552, 33553, 33554, 33555, 33556, 33557, 33558, 33559, 33560, 33561, 33562 were selected from the ORFs having the nucleotide sequence represented by SEQ ID NO: 2498.

[2987] The probes having the nucleotide sequence represented by SEQ ID NOS: 33563, 33564, 33565, 33566, 33567, 33568, 33569, 33570, 33571, 33572, 33573 were selected from the ORFs having the nucleotide sequence represented by SEQ ID NO: 2499.

[2988] The probes having the nucleotide sequence represented by SEQ ID NOS: 33574, 33575, 33576, 33577, 33578, 33579, 33580, 33581, 33582, 33583, 33584 were selected from the ORFs having the nucleotide sequence represented by SEQ ID NO: 2500.

[2989] The probes having the nucleotide sequence represented by SEQ ID NOS: 33585, 33586, 33587, 33588, 33589, 33590, 33591, 33592, 33593, 33594, 33595 were selected from the ORFs having the nucleotide sequence represented by SEQ ID NO: 2501.

[2990] The probes having the nucleotide sequence represented by SEQ ID NOS: 33596, 33597, 33598, 33599, 33600, 33601, 33602, 33603, 33604, 33605, 33606 were selected from the ORFs having the nucleotide sequence represented by SEQ ID NO: 2502.

[2991] The probes having the nucleotide sequence represented by SEQ ID NOS: 33607, 33608, 33609, 33610, 33611, 33612, 33613, 33614, 33615, 33616, 33617 were selected from the ORFs having the nucleotide sequence represented by SEQ ID NO: 2503.

[2992] The probes having the nucleotide sequence represented by SEQ ID NOS: 33618, 33619, 33620, 33621, 33622, 33623, 33624, 33625, 33626, 33627, 33628 were selected from the ORFs having the nucleotide sequence represented by SEQ ID NO: 2504.

[2993] The probes having the nucleotide sequence represented by SEQ ID NOS: 33629, 33630, 33631, 33632, 33633, 33634, 33635, 33636, 33637, 33638, 33639 were selected from the ORFs having the nucleotide sequence represented by SEQ ID NO: 2505.

[2994] The probes having the nucleotide sequence represented by SEQ ID NOS: 33640, 33641, 33642, 33643, 33644, 33645, 33646, 33647, 33648, 33649, 33650 were selected from the ORFs having the nucleotide sequence represented by SEQ ID NO: 2506.

[2995] The probes having the nucleotide sequence represented by SEQ ID NOS: 33651, 33652, 33653, 33654, 33655, 33656, 33657, 33658, 33659, 33660, 33661 were selected from the ORFs having the nucleotide sequence represented by SEQ ID NO: 2507.

[2996] The probes having the nucleotide sequence represented by SEQ ID NOS: 33662, 33663, 33664, 33665, 33666, 33667, 33668, 33669, 33670, 33671, 33672 were selected from the ORFs having the nucleotide sequence represented by SEQ ID NO: 2508.

[2997] The probes having the nucleotide sequence represented by SEQ ID NOS: 33673, 33674, 33675, 33676, 33677, 33678, 33679, 33680, 33681, 33682, 33683 were selected from the ORFs having the nucleotide sequence represented by SEQ ID NO: 2509.

[2998] The probes having the nucleotide sequence represented by SEQ ID NOS: 33684, 33685, 33686, 33687, 33688, 33689, 33690, 33691, 33692, 33693, 33694 were selected from the ORFs having the nucleotide sequence represented by SEQ ID NO: 2510.

[2999] The probes having the nucleotide sequence represented by SEQ ID NOS: 33695, 33696, 33697, 33698, 33699, 33700, 33701, 33702, 33703, 33704, 33705 were selected from the ORFs having the nucleotide sequence represented by SEQ ID NO: 2511.

[3000] The probes having the nucleotide sequence represented by SEQ ID NOS: 33706, 33707, 33708, 33709, 33710, 33711, 33712, 33713, 33714, 33715, 33716 were selected from the ORFs having the nucleotide sequence represented by SEQ ID NO: 2512.

[3001] The probes having the nucleotide sequence represented by SEQ ID NOS: 33717, 33718, 33719, 33720, 33721, 33722, 33723, 33724, 33725, 33726, 33727 were selected from the ORFs having the nucleotide sequence represented by SEQ ID NO: 2513.

[3002] The probes having the nucleotide sequence represented by SEQ ID NOS: 33728, 33729, 33730, 33731, 33732, 33733, 33734, 33735, 33736, 33737, 33738 were selected from the ORFs having the nucleotide sequence represented by SEQ ID NO: 2514.

[3003] The probes having the nucleotide sequence represented by SEQ ID NOS: 33739, 33740, 33741, 33742, 33743, 33744, 33745, 33746, 33747, 33748, 33749 were selected from the ORFs having the nucleotide sequence represented by SEQ ID NO: 2515.

[3004] The probes having the nucleotide sequence represented by SEQ ID NOS: 33750, 33751, 33752, 33753, 33754, 33755, 33756, 33757, 33758, 33759, 33760 were selected from the ORFs having the nucleotide sequence represented by SEQ ID NO: 2516.

[3005] The probes having the nucleotide sequence represented by SEQ ID NOS: 33761, 33762, 33763, 33764, 33765, 33766, 33767, 33768, 33769, 33770, 33771 were selected from the ORFs having the nucleotide sequence represented by SEQ ID NO: 2517.

[3006] The probes having the nucleotide sequence represented by SEQ ID NOS: 33772, 33773, 33774, 33775, 33776, 33777, 33778, 33779, 33780, 33781, 33782 were selected from the ORFs having the nucleotide sequence represented by SEQ ID NO: 2518.

[3007] The probes having the nucleotide sequence represented by SEQ ID NOS: 33783, 33784, 33785, 33786, 33787, 33788, 33789, 33790, 33791, 33792, 33793 were selected from the ORFs having the nucleotide sequence represented by SEQ ID NO: 2519.

[3008] The probes having the nucleotide sequence represented by SEQ ID NOS: 33794, 33795, 33796, 33797, 33798, 33799, 33800, 33801, 33802, 33803, 33804 were selected from the ORFs having the nucleotide sequence represented by SEQ ID NO: 2520.

[3009] The probes having the nucleotide sequence represented by SEQ ID NOS: 33805, 33806, 33807, 33808, 33809, 33810, 33811, 33812, 33813, 33814, 33815 were selected from the ORFs having the nucleotide sequence represented by SEQ ID NO: 2521.

[3010] The probes having the nucleotide sequence represented by SEQ ID NOS: 33816, 33817, 33818, 33819, 33820, 33821, 33822, 33823, 33824, 33825, 33826 were selected from the ORFs having the nucleotide sequence represented by SEQ ID NO: 2522.

[3011] The probes having the nucleotide sequence represented by SEQ ID NOS: 33827, 33828, 33829, 33830, 33831, 33832, 33833, 33834, 33835, 33836, 33837 were selected from the ORFs having the nucleotide sequence represented by SEQ ID NO: 2523.

[3012] The probes having the nucleotide sequence represented by SEQ ID NOS: 33838, 33839, 33840, 33841, 33842, 33843, 33844, 33845, 33846, 33847, 33848 were selected from the ORFs having the nucleotide sequence represented by SEQ ID NO: 2524.

[3013] The probes having the nucleotide sequence represented by SEQ ID NOS: 33849, 33850, 33851, 33852, 33853, 33854, 33855, 33856, 33857, 33858, 33859 were selected from the ORFs having the nucleotide sequence represented by SEQ ID NO: 2525.

[3014] The probes having the nucleotide sequence represented by SEQ ID NOS: 33860, 33861, 33862, 33863, 33864, 33865, 33866, 33867, 33868, 33869, 33870 were selected from the ORFs having the nucleotide sequence represented by SEQ ID NO: 2526.

[3015] The probes having the nucleotide sequence represented by SEQ ID NOS: 33871, 33872, 33873, 33874, 33875, 33876, 33877, 33878, 33879, 33880, 33881 were selected from the ORFs having the nucleotide sequence represented by SEQ ID NO: 2527.

[3016] The probes having the nucleotide sequence represented by SEQ ID NOS: 33882, 33883, 33884, 33885, 33886, 33887, 33888, 33889, 33890, 33891, 33892 were selected from the ORFs having the nucleotide sequence represented by SEQ ID NO: 2528.

[3017] The probes having the nucleotide sequence represented by SEQ ID NOS: 33893, 33894, 33895, 33896, 33897, 33898, 33899, 33900, 33901, 33902, 33903 were selected from the ORFs having the nucleotide sequence represented by SEQ ID NO: 2529.

[3018] The probes having the nucleotide sequence represented by SEQ ID NOS: 33904, 33905, 33906, 33907, 33908, 33909, 33910, 33911, 33912, 33913, 33914 were selected from the ORFs having the nucleotide sequence represented by SEQ ID NO: 2530.

[3019] The probes having the nucleotide sequence represented by SEQ ID NOS: 33915, 33916, 33917, 33918, 33919, 33920, 33921, 33922, 33923, 33924, 33925 were selected from the ORFs having the nucleotide sequence represented by SEQ ID NO: 2531.

[3020] The probes having the nucleotide sequence represented by SEQ ID NOS: 33926, 33927, 33928, 33929, 33930, 33931, 33932, 33933, 33934, 33935, 33936 were selected from the ORFs having the nucleotide sequence represented by SEQ ID NO: 2532.

[3021] The probes having the nucleotide sequence represented by SEQ ID NOS: 33937, 33938, 33939, 33940, 33941, 33942, 33943, 33944, 33945, 33946, 33947 were selected from the ORFs having the nucleotide sequence represented by SEQ ID NO: 2533.

[3022] The probes having the nucleotide sequence represented by SEQ ID NOS: 33948, 33949, 33950, 33951, 33952, 33953, 33954, 33955, 33956, 33957, 33958 were selected from the ORFs having the nucleotide sequence represented by SEQ ID NO: 2534.

[3023] The probes having the nucleotide sequence represented by SEQ ID NOS: 33959, 33960, 33961, 33962, 33963, 33964, 33965, 33966, 33967, 33968, 33969 were selected from the ORFs having the nucleotide sequence represented by SEQ ID NO: 2535.

[3024] The probes having the nucleotide sequence represented by SEQ ID NOS: 33970, 33971, 33972, 33973, 33974, 33975, 33976, 33977, 33978, 33979, 33980 were selected from the ORFs having the nucleotide sequence represented by SEQ ID NO: 2536.

[3025] The probes having the nucleotide sequence represented by SEQ ID NOS: 33981, 33982, 33983, 33984, 33985, 33986, 33987, 33988, 33989, 33990, 33991 were selected from the ORFs having the nucleotide sequence represented by SEQ ID NO: 2537.

[3026] The probes having the nucleotide sequence represented by SEQ ID NOS: 33992, 33993, 33994, 33995, 33996, 33997, 33998, 33999, 34000, 34001, 34002 were selected from the ORFs having the nucleotide sequence represented by SEQ ID NO: 2538.

[3027] The probes having the nucleotide sequence represented by SEQ ID NOS: 34003, 34004, 34005, 34006, 34007, 34008, 34009, 34010, 34011, 34012, 34013 were selected from the ORFs having the nucleotide sequence represented by SEQ ID NO: 2539.

[3028] The probes having the nucleotide sequence represented by SEQ ID NOS: 34014, 34015, 34016, 34017, 34018, 34019, 34020, 34021, 34022, 34023, 34024 were selected from the ORFs having the nucleotide sequence represented by SEQ ID NO: 2540.

[3029] The probes having the nucleotide sequence represented by SEQ ID NOS: 34025, 34026, 34027, 34028, 34029, 34030, 34031, 34032, 34033, 34034, 34035 were selected from the ORFs having the nucleotide sequence represented by SEQ ID NO: 2541.

[3030] The probes having the nucleotide sequence represented by SEQ ID NOS: 34036, 34037, 34038, 34039, 34040, 34041, 34042, 34043, 34044, 34045, 34046 were selected from the ORFs having the nucleotide sequence represented by SEQ ID NO: 2542.

[3031] The probes having the nucleotide sequence represented by SEQ ID NOS: 34047, 34048, 34049, 34050, 34051, 34052, 34053, 34054, 34055, 34056, 34057 were selected from the ORFs having the nucleotide sequence represented by SEQ ID NO: 2543.

[3032] The probes having the nucleotide sequence represented by SEQ ID NOS: 34058, 34059, 34060, 34061, 34062, 34063, 34064, 34065, 34066, 34067, 34068 were selected from the ORFs having the nucleotide sequence represented by SEQ ID NO: 2544.

[3033] The probes having the nucleotide sequence represented by SEQ ID NOS: 34069, 34070, 34071, 34072, 34073, 34074, 34075, 34076, 34077, 34078, 34079 were selected from the ORFs having the nucleotide sequence represented by SEQ ID NO: 2545.

[3034] The probes having the nucleotide sequence represented by SEQ ID NOS: 34080, 34081, 34082, 34083, 34084, 34085, 34086, 34087, 34088, 34089, 34090 were selected from the ORFs having the nucleotide sequence represented by SEQ ID NO: 2546.

[3035] The probes having the nucleotide sequence represented by SEQ ID NOS: 34091, 34092, 34093, 34094, 34095, 34096, 34097, 34098, 34099, 34100, 34101 were selected from the ORFs having the nucleotide sequence represented by SEQ ID NO: 2547.

[3036] The probes having the nucleotide sequence represented by SEQ ID NOS: 34102, 34103, 34104, 34105, 34106, 34107, 34108, 34109, 34110, 34111, 34112 were selected from the ORFs having the nucleotide sequence represented by SEQ ID NO: 2548.

[3037] The probes having the nucleotide sequence represented by SEQ ID NOS: 34113, 34114, 34115, 34116, 34117, 34118, 34119, 34120, 34121, 34122, 34123 were selected from the ORFs having the nucleotide sequence represented by SEQ ID NO: 2549.

[3038] The probes having the nucleotide sequence represented by SEQ ID NOS: 34124, 34125, 34126, 34127, 34128, 34129, 34130, 34131, 34132, 34133, 34134 were selected from the ORFs having the nucleotide sequence represented by SEQ ID NO: 2550.

[3039] The probes having the nucleotide sequence represented by SEQ ID NOS: 34135, 34136, 34137, 34138, 34139, 34140, 34141, 34142, 34143, 34144, 34145 were selected from the ORFs having the nucleotide sequence represented by SEQ ID NO: 2551.

[3040] The probes having the nucleotide sequence represented by SEQ ID NOS: 34146, 34147, 34148, 34149, 34150, 34151, 34152, 34153, 34154, 34155, 34156 were selected from the ORFs having the nucleotide sequence represented by SEQ ID NO: 2552.

[3041] The probes having the nucleotide sequence represented by SEQ ID NOS: 34157, 34158, 34159, 34160, 34161, 34162, 34163, 34164, 34165, 34166, 34167 were selected from the ORFs having the nucleotide sequence represented by SEQ ID NO: 2553.

[3042] The probes having the nucleotide sequence represented by SEQ ID NOS: 34168, 34169, 34170, 34171, 34172, 34173, 34174, 34175, 34176, 34177, 34178 were selected from the ORFs having the nucleotide sequence represented by SEQ ID NO: 2554.

[3043] The probes having the nucleotide sequence represented by SEQ ID NOS: 34179, 34180, 34181, 34182, 34183, 34184, 34185, 34186, 34187, 34188, 34189 were selected from the ORFs having the nucleotide sequence represented by SEQ ID NO: 2555.

[3044] The probes having the nucleotide sequence represented by SEQ ID NOS: 34190, 34191, 34192, 34193, 34194, 34195, 34196, 34197, 34198, 34199, 34200 were selected from the ORFs having the nucleotide sequence represented by SEQ ID NO: 2556.

[3045] The probes having the nucleotide sequence represented by SEQ ID NOS: 34201, 34202, 34203, 34204, 34205, 34206, 34207, 34208, 34209, 34210, 34211 were selected from the ORFs having the nucleotide sequence represented by SEQ ID NO: 2557.

[3046] The probes having the nucleotide sequence represented by SEQ ID NOS: 34212, 34213, 34214, 34215, 34216, 34217, 34218, 34219, 34220, 34221, 34222, 34223, 34224, 34225, 34226, 34227, 34228, 34229, 34230, 34231, 34232, 34233 were selected from the ORFs having the nucleotide sequence represented by SEQ ID NO: 2558.

[3047] The probes having the nucleotide sequence represented by SEQ ID NOS: 34234, 34235, 34236, 34237, 34238, 34239, 34240, 34241, 34242, 34243, 34244 were selected from the ORFs having the nucleotide sequence represented by SEQ ID NO: 2559.

[3048] The probes having the nucleotide sequence represented by SEQ ID NOS: 34245, 34246, 34247, 34248, 34249, 34250, 34251, 34252, 34253, 34254, 34255 were selected from the ORFs having the nucleotide sequence represented by SEQ ID NO: 2560.

[3049] The probes having the nucleotide sequence represented by SEQ ID NOS: 34256, 34257, 34258, 34259, 34260, 34261, 34262, 34263, 34264, 34265, 34266 were selected from the ORFs having the nucleotide sequence represented by SEQ ID NO: 2561.

[3050] The probes having the nucleotide sequence represented by SEQ ID NOS: 34267, 34268, 34269, 34270, 34271, 34272, 34273, 34274, 34275, 34276, 34277 were selected from the ORFs having the nucleotide sequence represented by SEQ ID NO: 2562.

[3051] The probes having the nucleotide sequence represented by SEQ ID NOS: 34278, 34279, 34280, 34281, 34282, 34283, 34284, 34285, 34286, 34287, 34288 were selected from the ORFs having the nucleotide sequence represented by SEQ ID NO: 2563.

[3052] The probes having the nucleotide sequence represented by SEQ ID NOS: 34289, 34290, 34291, 34292, 34293, 34294, 34295, 34296, 34297, 34298, 34299 were selected from the ORFs having the nucleotide sequence represented by SEQ ID NO: 2564.

[3053] The probes having the nucleotide sequence represented by SEQ ID NOS: 34300, 34301, 34302, 34303, 34304, 34305, 34306, 34307, 34308, 34309, 34310 were selected from the ORFs having the nucleotide sequence represented by SEQ ID NO: 2565.

[3054] The probes having the nucleotide sequence represented by SEQ ID NOS: 34311, 34312, 34313, 34314, 34315, 34316, 34317, 34318, 34319, 34320, 34321 were selected from the ORFs having the nucleotide sequence represented by SEQ ID NO: 2566.

[3055] The probes having the nucleotide sequence represented by SEQ ID NOS: 34322, 34323, 34324, 34325, 34326, 34327, 34328, 34329, 34330, 34331, 34332 were selected from the ORFs having the nucleotide sequence represented by SEQ ID NO: 2567.

[3056] The probes having the nucleotide sequence represented by SEQ ID NOS: 34333, 34334, 34335, 34336, 34337, 34338, 34339, 34340, 34341, 34342, 34343 were selected from the ORFs having the nucleotide sequence represented by SEQ ID NO: 2568.

[3057] The probes having the nucleotide sequence represented by SEQ ID NOS: 34344, 34345, 34346, 34347, 34348, 34349, 34350, 34351, 34352, 34353, 34354 were selected from the ORFs having the nucleotide sequence represented by SEQ ID NO: 2569.

[3058] The probes having the nucleotide sequence represented by SEQ ID NOS: 34355, 34356, 34357, 34358, 34359, 34360, 34361, 34362, 34363, 34364, 34365 were selected from the ORFs having the nucleotide sequence represented by SEQ ID NO: 2570.

[3059] The probes having the nucleotide sequence represented by SEQ ID NOS: 34366, 34367, 34368, 34369, 34370, 34371, 34372, 34373, 34374, 34375, 34376 were selected from the ORFs having the nucleotide sequence represented by SEQ ID NO: 2571.

[3060] The probes having the nucleotide sequence represented by SEQ ID NOS: 34377, 34378, 34379, 34380, 34381, 34382, 34383, 34384, 34385, 34386, 34387 were selected from the ORFs having the nucleotide sequence represented by SEQ ID NO: 2572.

[3061] The probes having the nucleotide sequence represented by SEQ ID NOS: 34388, 34389, 34390, 34391, 34392, 34393, 34394, 34395, 34396, 34397, 34398 were selected from the ORFs having the nucleotide sequence represented by SEQ ID NO: 2573.

[3062] The probes having the nucleotide sequence represented by SEQ ID NOS: 34399, 34400, 34401, 34402, 34403, 34404, 34405, 34406, 34407, 34408, 34409 were selected from the ORFs having the nucleotide sequence represented by SEQ ID NO: 2574.

[3063] The probes having the nucleotide sequence represented by SEQ ID NOS: 34410, 34411, 34412, 34413, 34414, 34415, 34416, 34417, 34418, 34419, 34420 were selected from the ORFs having the nucleotide sequence represented by SEQ ID NO: 2575.

[3064] The probes having the nucleotide sequence represented by SEQ ID NOS: 34421, 34422, 34423, 34424, 34425, 34426, 34427, 34428, 34429, 34430, 34431 were selected from the ORFs having the nucleotide sequence represented by SEQ ID NO: 2576.

[3065] The probes having the nucleotide sequence represented by SEQ ID NOS: 34432, 34433, 34434, 34435, 34436, 34437, 34438, 34439, 34440, 34441, 34442 were selected from the ORFs having the nucleotide sequence represented by SEQ ID NO: 2577.

[3066] The probes having the nucleotide sequence represented by SEQ ID NOS: 34443, 34444, 34445, 34446, 34447, 34448, 34449, 34450, 34451, 34452, 34453 were selected from the ORFs having the nucleotide sequence represented by SEQ ID NO: 2578.

[3067] The probes having the nucleotide sequence represented by SEQ ID NOS: 34454, 34455, 34456, 34457, 34458, 34459, 34460, 34461, 34462, 34463, 34464 were selected from the ORFs having the nucleotide sequence represented by SEQ ID NO: 2579.

[3068] The probes having the nucleotide sequence represented by SEQ ID NOS: 34465, 34466, 34467, 34468, 34469, 34470, 34471, 34472, 34473, 34474, 34475 were selected from the ORFs having the nucleotide sequence represented by SEQ ID NO: 2580.

[3069] The probes having the nucleotide sequence represented by SEQ ID NOS: 34476, 34477, 34478, 34479, 34480, 34481, 34482, 34483, 34484, 34485, 34486 were selected from the ORFs having the nucleotide sequence represented by SEQ ID NO: 2581.

[3070] The probes having the nucleotide sequence represented by SEQ ID NOS: 34487, 34488, 34489, 34490, 34491, 34492, 34493, 34494, 34495, 34496, 34497 were selected from the ORFs having the nucleotide sequence represented by SEQ ID NO: 2582.

[3071] The probes having the nucleotide sequence represented by SEQ ID NOS: 34498, 34499, 34500, 34501, 34502, 34503, 34504, 34505, 34506, 34507, 34508 were selected from the ORFs having the nucleotide sequence represented by SEQ ID NO: 2583.

[3072] The probes having the nucleotide sequence represented by SEQ ID NOS: 34509, 34510, 34511, 34512, 34513, 34514, 34515, 34516, 34517, 34518, 34519 were selected from the ORFs having the nucleotide sequence represented by SEQ ID NO: 2584.

[3073] The probes having the nucleotide sequence represented by SEQ ID NOS: 34520, 34521, 34522, 34523, 34524, 34525, 34526, 34527, 34528, 34529, 34530 were selected from the ORFs having the nucleotide sequence represented by SEQ ID NO: 2585.

[3074] The probes having the nucleotide sequence represented by SEQ ID NOS: 34531, 34532, 34533, 34534, 34535, 34536, 34537, 34538, 34539, 34540, 34541 were selected from the ORFs having the nucleotide sequence represented by SEQ ID NO: 2586.

[3075] The probes having the nucleotide sequence represented by SEQ ID NOS: 34542, 34543, 34544, 34545, 34546, 34547, 34548, 34549, 34550, 34551, 34552 were selected from the ORFs having the nucleotide sequence represented by SEQ ID NO: 2587.

[3076] The probes having the nucleotide sequence represented by SEQ ID NOS: 34553, 34554, 34555, 34556, 34557, 34558, 34559, 34560, 34561, 34562, 34563 were selected from the ORFs having the nucleotide sequence represented by SEQ ID NO: 2588.

[3077] The probes having the nucleotide sequence represented by SEQ ID NOS: 34564, 34565, 34566, 34567, 34568, 34569, 34570, 34571, 34572, 34573, 34574 were selected from the ORFs having the nucleotide sequence represented by SEQ ID NO: 2589.

[3078] The probes having the nucleotide sequence represented by SEQ ID NOS: 34575, 34576, 34577, 34578, 34579, 34580, 34581, 34582, 34583, 34584, 34585 were selected from the ORFs having the nucleotide sequence represented by SEQ ID NO: 2590.

[3079] The probes having the nucleotide sequence represented by SEQ ID NOS: 34586, 34587, 34588, 34589, 34590, 34591, 34592, 34593, 34594, 34595, 34596 were selected from the ORFs having the nucleotide sequence represented by SEQ ID NO: 2591.

[3080] The probes having the nucleotide sequence represented by SEQ ID NOS: 34597, 34598, 34599, 34600, 34601, 34602, 34603, 34604, 34605, 34606, 34607 were selected from the ORFs having the nucleotide sequence represented by SEQ ID NO: 2592.

[3081] The probes having the nucleotide sequence represented by SEQ ID NOS: 34608, 34609, 34610, 34611, 34612, 34613, 34614, 34615, 34616, 34617, 34618 were selected from the ORFs having the nucleotide sequence represented by SEQ ID NO: 2593.

[3082] The probes having the nucleotide sequence represented by SEQ ID NOS: 34619, 34620, 34621, 34622, 34623, 34624, 34625, 34626, 34627, 34628, 34629 were selected from the ORFs having the nucleotide sequence represented by SEQ ID NO: 2594.

[3083] The probes having the nucleotide sequence represented by SEQ ID NOS: 34630, 34631, 34632, 34633, 34634, 34635, 34636, 34637, 34638, 34639, 34640 were selected from the ORFs having the nucleotide sequence represented by SEQ ID NO: 2595.

[3084] The probes having the nucleotide sequence represented by SEQ ID NOS: 34641, 34642, 34643, 34644, 34645, 34646, 34647, 34648, 34649, 34650, 34651 were selected from the ORFs having the nucleotide sequence represented by SEQ ID NO: 2596.

[3085] The probes having the nucleotide sequence represented by SEQ ID NOS: 34652, 34653, 34654, 34655, 34656, 34657, 34658, 34659, 34660, 34661, 34662 were selected from the ORFs having the nucleotide sequence represented by SEQ ID NO: 2597.

[3086] The probes having the nucleotide sequence represented by SEQ ID NOS: 34663, 34664, 34665, 34666, 34667, 34668, 34669, 34670, 34671, 34672, 34673 were selected from the ORFs having the nucleotide sequence represented by SEQ ID NO: 2598.

[3087] The probes having the nucleotide sequence represented by SEQ ID NOS: 34674, 34675, 34676, 34677, 34678, 34679, 34680, 34681, 34682, 34683, 34684 were selected from the ORFs having the nucleotide sequence represented by SEQ ID NO: 2599.

[3088] The probes having the nucleotide sequence represented by SEQ ID NOS: 34685, 34686, 34687, 34688, 34689, 34690, 34691, 34692, 34693, 34694, 34695 were selected from the ORFs having the nucleotide sequence represented by SEQ ID NO: 2600.

[3089] The probes having the nucleotide sequence represented by SEQ ID NOS: 34696, 34697, 34698, 34699, 34700, 34701, 34702, 34703, 34704, 34705, 34706 were selected from the ORFs having the nucleotide sequence represented by SEQ ID NO: 2601.

[3090] The probes having the nucleotide sequence represented by SEQ ID NOS: 34707, 34708, 34709, 34710, 34711, 34712, 34713, 34714, 34715, 34716, 34717 were selected from the ORFs having the nucleotide sequence represented by SEQ ID NO: 2602.

[3091] The probes having the nucleotide sequence represented by SEQ ID NOS: 34718, 34719, 34720, 34721, 34722, 34723, 34724, 34725, 34726, 34727, 34728 were selected from the ORFs having the nucleotide sequence represented by SEQ ID NO: 2603.

[3092] The probes having the nucleotide sequence represented by SEQ ID NOS: 34729, 34730, 34731, 34732, 34733, 34734, 34735, 34736, 34737, 34738, 34739 were selected from the ORFs having the nucleotide sequence represented by SEQ ID NO: 2604.

[3093] The probes having the nucleotide sequence represented by SEQ ID NOS: 34740, 34741, 34742, 34743, 34744, 34745, 34746, 34747, 34748, 34749, 34750 were selected from the ORFs having the nucleotide sequence represented by SEQ ID NO: 2605.

[3094] The probes having the nucleotide sequence represented by SEQ ID NOS: 34751, 34752, 34753, 34754, 34755, 34756, 34757, 34758, 34759, 34760, 34761 were selected from the ORFs having the nucleotide sequence represented by SEQ ID NO: 2606.

[3095] The probes having the nucleotide sequence represented by SEQ ID NOS: 34762, 34763, 34764, 34765, 34766, 34767, 34768, 34769, 34770, 34771, 34772 were selected from the ORFs having the nucleotide sequence represented by SEQ ID NO: 2607.

[3096] The probes having the nucleotide sequence represented by SEQ ID NOS: 34773, 34774, 34775, 34776, 34777, 34778, 34779, 34780, 34781, 34782, 34783 were selected from the ORFs having the nucleotide sequence represented by SEQ ID NO: 2608.

[3097] The probes having the nucleotide sequence represented by SEQ ID NOS: 34784, 34785, 34786, 34787, 34788, 34789, 34790, 34791, 34792, 34793, 34794 were selected from the ORFs having the nucleotide sequence represented by SEQ ID NO: 2609.

[3098] The probes having the nucleotide sequence represented by SEQ ID NOS: 34795, 34796, 34797, 34798, 34799, 34800, 34801, 34802, 34803, 34804, 34805 were selected from the ORFs having the nucleotide sequence represented by SEQ ID NO: 2610.

[3099] The probes having the nucleotide sequence represented by SEQ ID NOS: 34806, 34807, 34808, 34809, 34810, 34811, 34812, 34813, 34814, 34815, 34816 were selected from the ORFs having the nucleotide sequence represented by SEQ ID NO: 2611.

[3100] The probes having the nucleotide sequence represented by SEQ ID NOS: 34817, 34818, 34819, 34820, 34821, 34822, 34823, 34824, 34825, 34826, 34827 were selected from the ORFs having the nucleotide sequence represented by SEQ ID NO: 2612.

[3101] The probes having the nucleotide sequence represented by SEQ ID NOS: 34828, 34829, 34830, 34831, 34832, 34833, 34834, 34835, 34836, 34837, 34838 were selected from the ORFs having the nucleotide sequence represented by SEQ ID NO: 2613.

[3102] The probes having the nucleotide sequence represented by SEQ ID NOS: 34839, 34840, 34841, 34842, 34843, 34844, 34845, 34846, 34847, 34848, 34849 were selected from the ORFs having the nucleotide sequence represented by SEQ ID NO: 2614.

[3103] The probes having the nucleotide sequence represented by SEQ ID NOS: 34850, 34851, 34852, 34853, 34854, 34855, 34856, 34857, 34858, 34859, 34860 were selected from the ORFs having the nucleotide sequence represented by SEQ ID NO: 2615.

[3104] The probes having the nucleotide sequence represented by SEQ ID NOS: 34861, 34862, 34863, 34864, 34865, 34866, 34867, 34868, 34869, 34870, 34871 were selected from the ORFs having the nucleotide sequence represented by SEQ ID NO: 2616.

[3105] The probes having the nucleotide sequence represented by SEQ ID NOS: 34872, 34873, 34874, 34875, 34876, 34877, 34878, 34879, 34880, 34881, 34882 were selected from the ORFs having the nucleotide sequence represented by SEQ ID NO: 2617.

[3106] The probes having the nucleotide sequence represented by SEQ ID NOS: 34883, 34884, 34885, 34886, 34887, 34888, 34889, 34890, 34891, 34892, 34893 were selected from the ORFs having the nucleotide sequence represented by SEQ ID NO: 2618.

[3107] The probes having the nucleotide sequence represented by SEQ ID NOS: 34894, 34895, 34896, 34897, 34898, 34899, 34900, 34901, 34902, 34903, 34904 were selected from the ORFs having the nucleotide sequence represented by SEQ ID NO: 2619.

[3108] The probes having the nucleotide sequence represented by SEQ ID NOS: 34905, 34906, 34907, 34908, 34909, 34910, 34911, 34912, 34913, 34914, 34915 were selected from the ORFs having the nucleotide sequence represented by SEQ ID NO: 2620.

[3109] The probes having the nucleotide sequence represented by SEQ ID NOS: 34916, 34917, 34918, 34919, 34920, 34921, 34922, 34923, 34924, 34925, 34926 were selected from the ORFs having the nucleotide sequence represented by SEQ ID NO: 2621.

[3110] The probes having the nucleotide sequence represented by SEQ ID NOS: 34927, 34928, 34929, 34930, 34931, 34932, 34933, 34934, 34935, 34936, 34937 were selected from the ORFs having the nucleotide sequence represented by SEQ ID NO: 2622.

[3111] The probes having the nucleotide sequence represented by SEQ ID NOS: 34938, 34939, 34940, 34941, 34942, 34943, 34944, 34945, 34946, 34947, 34948 were selected from the ORFs having the nucleotide sequence represented by SEQ ID NO: 2623.

[3112] The probes having the nucleotide sequence represented by SEQ ID NOS: 34949, 34950, 34951, 34952, 34953, 34954, 34955, 34956, 34957, 34958, 34959 were selected from the ORFs having the nucleotide sequence represented by SEQ ID NO: 2624.

[3113] The probes having the nucleotide sequence represented by SEQ ID NOS: 34960, 34961, 34962, 34963, 34964, 34965, 34966, 34967, 34968, 34969, 34970 were selected from the ORFs having the nucleotide sequence represented by SEQ ID NO: 2625.

[3114] The probes having the nucleotide sequence represented by SEQ ID NOS: 34971, 34972, 34973, 34974, 34975, 34976, 34977, 34978, 34979, 34980, 34981 were selected from the ORFs having the nucleotide sequence represented by SEQ ID NO: 2626.

[3115] The probes having the nucleotide sequence represented by SEQ ID NOS: 34982, 34983, 34984, 34985, 34986, 34987, 34988, 34989, 34990, 34991, 34992 were selected from the ORFs having the nucleotide sequence represented by SEQ ID NO: 2627.

[3116] The probes having the nucleotide sequence represented by SEQ ID NOS: 34993, 34994, 34995, 34996, 34997, 34998, 34999, 35000, 35001, 35002, 35003 were selected from the ORFs having the nucleotide sequence represented by SEQ ID NO: 2628.

[3117] The probes having the nucleotide sequence represented by SEQ ID NOS: 35004, 35005, 35006, 35007, 35008, 35009, 35010, 35011, 35012, 35013, 35014 were selected from the ORFs having the nucleotide sequence represented by SEQ ID NO: 2629.

[3118] The probes having the nucleotide sequence represented by SEQ ID NOS: 35015, 35016, 35017, 35018, 35019, 35020, 35021, 35022, 35023, 35024, 35025 were selected from the ORFs having the nucleotide sequence represented by SEQ ID NO: 2630.

[3119] The probes having the nucleotide sequence represented by SEQ ID NOS: 35026, 35027, 35028, 35029, 35030, 35031, 35032, 35033, 35034, 35035, 35036 were selected from the ORFs having the nucleotide sequence represented by SEQ ID NO: 2631.

[3120] The probes having the nucleotide sequence represented by SEQ ID NOS: 35037, 35038, 35039, 35040, 35041, 35042, 35043, 35044, 35045, 35046, 35047 were selected from the ORFs having the nucleotide sequence represented by SEQ ID NO: 2632.

[3121] The probes having the nucleotide sequence represented by SEQ ID NOS: 35048, 35049, 35050, 35051, 35052, 35053, 35054, 35055, 35056, 35057, 35058 were selected from the ORFs having the nucleotide sequence represented by SEQ ID NO: 2633.

[3122] The probes having the nucleotide sequence represented by SEQ ID NOS: 35059, 35060, 35061, 35062, 35063, 35064, 35065, 35066, 35067, 35068, 35069 were selected from the ORFs having the nucleotide sequence represented by SEQ ID NO: 2634.

[3123] The probes having the nucleotide sequence represented by SEQ ID NOS: 35070, 35071, 35072, 35073, 35074, 35075, 35076, 35077, 35078, 35079, 35080 were selected from the ORFs having the nucleotide sequence represented by SEQ ID NO: 2635.

[3124] The probes having the nucleotide sequence represented by SEQ ID NOS: 35081, 35082, 35083, 35084, 35085, 35086, 35087, 35088, 35089, 35090, 35091 were selected from the ORFs having the nucleotide sequence represented by SEQ ID NO: 2636.

[3125] The probes having the nucleotide sequence represented by SEQ ID NOS: 35092, 35093, 35094, 35095, 35096, 35097, 35098, 35099, 35100, 35101, 35102 were selected from the ORFs having the nucleotide sequence represented by SEQ ID NO: 2637.

[3126] The probes having the nucleotide sequence represented by SEQ ID NOS: 35103, 35104, 35105, 35106, 35107, 35108, 35109, 35110, 35111, 35112, 35113 were selected from the ORFs having the nucleotide sequence represented by SEQ ID NO: 2638.

[3127] The probes having the nucleotide sequence represented by SEQ ID NOS: 35114, 35115, 35116, 35117, 35118, 35119, 35120, 35121, 35122, 35123, 35124 were selected from the ORFs having the nucleotide sequence represented by SEQ ID NO: 2639.

[3128] The probes having the nucleotide sequence represented by SEQ ID NOS: 35125, 35126, 35127, 35128, 35129, 35130, 35131, 35132, 35133, 35134, 35135 were selected from the ORFs having the nucleotide sequence represented by SEQ ID NO: 2640.

[3129] The probes having the nucleotide sequence represented by SEQ ID NOS: 35136, 35137, 35138, 35139, 35140, 35141, 35142, 35143, 35144, 35145, 35146 were selected from the ORFs having the nucleotide sequence represented by SEQ ID NO: 2641.

[3130] The probes having the nucleotide sequence represented by SEQ ID NOS: 35147, 35148, 35149, 35150, 35151, 35152, 35153, 35154, 35155, 35156, 35157 were selected from the ORFs having the nucleotide sequence represented by SEQ ID NO: 2642.

[3131] The probes having the nucleotide sequence represented by SEQ ID NOS: 35158, 35159, 35160, 35161, 35162, 35163, 35164, 35165, 35166, 35167, 35168 were selected from the ORFs having the nucleotide sequence represented by SEQ ID NO: 2643.

[3132] The probes having the nucleotide sequence represented by SEQ ID NOS: 35169, 35170, 35171, 35172, 35173, 35174, 35175, 35176, 35177, 35178, 35179 were selected from the ORFs having the nucleotide sequence represented by SEQ ID NO: 2644.

[3133] The probes having the nucleotide sequence represented by SEQ ID NOS: 35180, 35181, 35182, 35183, 35184, 35185, 35186, 35187, 35188, 35189, 35190 were selected from the ORFs having the nucleotide sequence represented by SEQ ID NO: 2645.

[3134] The probes having the nucleotide sequence represented by SEQ ID NOS: 35191, 35192, 35193, 35194, 35195, 35196, 35197, 35198, 35199, 35200, 35201 were selected from the ORFs having the nucleotide sequence represented by SEQ ID NO: 2646.

[3135] The probes having the nucleotide sequence represented by SEQ ID NOS: 35202, 35203, 35204, 35205, 35206, 35207, 35208, 35209, 35210, 35211, 35212 were selected from the ORFs having the nucleotide sequence represented by SEQ ID NO: 2647.

[3136] The probes having the nucleotide sequence represented by SEQ ID NOS: 35213, 35214, 35215, 35216, 35217, 35218, 35219, 35220, 35221, 35222, 35223 were selected from the ORFs having the nucleotide sequence represented by SEQ ID NO: 2648.

[3137] The probes having the nucleotide sequence represented by SEQ ID NOS: 35224, 35225, 35226, 35227, 35228, 35229, 35230, 35231, 35232, 35233, 35234 were selected from the ORFs having the nucleotide sequence represented by SEQ ID NO: 2649.

[3138] The probes having the nucleotide sequence represented by SEQ ID NOS: 35235, 35236, 35237, 35238, 35239, 35240, 35241, 35242, 35243, 35244, 35245 were selected from the ORFs having the nucleotide sequence represented by SEQ ID NO: 2650.

[3139] The probes having the nucleotide sequence represented by SEQ ID NOS: 35246, 35247, 35248, 35249, 35250, 35251, 35252, 35253, 35254, 35255, 35256 were selected from the ORFs having the nucleotide sequence represented by SEQ ID NO: 2651.

[3140] The probes having the nucleotide sequence represented by SEQ ID NOS: 35257, 35258, 35259, 35260, 35261, 35262, 35263, 35264, 35265, 35266, 35267 were selected from the ORFs having the nucleotide sequence represented by SEQ ID NO: 2652.

[3141] The probes having the nucleotide sequence represented by SEQ ID NOS: 35268, 35269, 35270, 35271, 35272, 35273, 35274, 35275, 35276, 35277, 35278 were selected from the ORFs having the nucleotide sequence represented by SEQ ID NO: 2653.

[3142] The probes having the nucleotide sequence represented by SEQ ID NOS: 35279, 35280, 35281, 35282, 35283, 35284, 35285, 35286, 35287, 35288, 35289 were selected from the ORFs having the nucleotide sequence represented by SEQ ID NO: 2654.

[3143] The probes having the nucleotide sequence represented by SEQ ID NOS: 35290, 35291, 35292, 35293, 35294, 35295, 35296, 35297, 35298, 35299, 35300 were selected from the ORFs having the nucleotide sequence represented by SEQ ID NO: 2655.

[3144] The probes having the nucleotide sequence represented by SEQ ID NOS: 35301, 35302, 35303, 35304, 35305, 35306, 35307, 35308, 35309, 35310, 35311 were selected from the ORFs having the nucleotide sequence represented by SEQ ID NO: 2656.

[3145] The probes having the nucleotide sequence represented by SEQ ID NOS: 35312, 35313, 35314, 35315, 35316, 35317, 35318, 35319, 35320, 35321, 35322 were selected from the ORFs having the nucleotide sequence represented by SEQ ID NO: 2657.

[3146] The probes having the nucleotide sequence represented by SEQ ID NOS: 35323, 35324, 35325, 35326, 35327, 35328, 35329, 35330, 35331, 35332, 35333 were selected from the ORFs having the nucleotide sequence represented by SEQ ID NO: 2658.

[3147] The probes having the nucleotide sequence represented by SEQ ID NOS: 35334, 35335, 35336, 35337, 35338, 35339, 35340, 35341, 35342, 35343, 35344 were selected from the ORFs having the nucleotide sequence represented by SEQ ID NO: 2659.

[3148] The probes having the nucleotide sequence represented by SEQ ID NOS: 35345, 35346, 35347, 35348, 35349, 35350, 35351, 35352, 35353, 35354, 35355 were selected from the ORFs having the nucleotide sequence represented by SEQ ID NO: 2660.

[3149] The probes having the nucleotide sequence represented by SEQ ID NOS: 35356, 35357, 35358, 35359, 35360, 35361, 35362, 35363, 35364, 35365, 35366were selected from the ORFs having the nucleotide sequence represented by SEQ ID NO: 2661.

[3150] The probes having the nucleotide sequence represented by SEQ ID NOS: 35367, 35368, 35369, 35370, 35371, 35372, 35373, 35374, 35375, 35376, 35377 were selected from the ORFs having the nucleotide sequence represented by SEQ ID NO: 2662.

[3151] The probes having the nucleotide sequence represented by SEQ ID NOS: 35378, 35379, 35380, 35381, 35382, 35383, 35384, 35385, 35386, 35387, 35388 were selected from the ORFs having the nucleotide sequence represented by SEQ ID NO: 2663.

[3152] The probes having the nucleotide sequence represented by SEQ ID NOS: 35389, 35390, 35391, 35392, 35393, 35394, 35395, 35396, 35397, 35398, 35399 were selected from the ORFs having the nucleotide sequence represented by SEQ ID NO: 2664.

[3153] The probes having the nucleotide sequence represented by SEQ ID NOS: 35400, 35401, 35402, 35403, 35404, 35405, 35406, 35407, 35408, 35409, 35410 were selected from the ORFs having the nucleotide sequence represented by SEQ ID NO: 2665.

[3154] The probes having the nucleotide sequence represented by SEQ ID NOS: 35411, 35412, 35413, 35414, 35415, 35416, 35417, 35418, 35419, 35420, 35421 were selected from the ORFs having the nucleotide sequence represented by SEQ ID NO: 2666.

[3155] The probes having the nucleotide sequence represented by SEQ ID NOS: 35422, 35423, 35424, 35425, 35426, 35427, 35428, 35429, 35430, 35431, 35432 were selected from the ORFs having the nucleotide sequence represented by SEQ ID NO: 2667.

[3156] The probes having the nucleotide sequence represented by SEQ ID NOS: 35433, 35434, 35435, 35436, 35437, 35438, 35439, 35440, 35441, 35442, 35443 were selected from the ORFs having the nucleotide sequence represented by SEQ ID NO: 2668.

[3157] The probes having the nucleotide sequence represented by SEQ ID NOS: 35444, 35445, 35446, 35447, 35448, 35449, 35450, 35451, 35452, 35453, 35454 were selected from the ORFs having the nucleotide sequence represented by SEQ ID NO: 2669.

[3158] The probes having the nucleotide sequence represented by SEQ ID NOS: 35455, 35456, 35457, 35458, 35459, 35460, 35461, 35462, 35463, 35464, 35465 were selected from the ORFs having the nucleotide sequence represented by SEQ ID NO: 2670.

[3159] The probes having the nucleotide sequence represented by SEQ ID NOS: 35466, 35467, 35468, 35469, 35470, 35471, 35472, 35473, 35474, 35475, 35476 were selected from the ORFs having the nucleotide sequence represented by SEQ ID NO: 2671.

[3160] The probes having the nucleotide sequence represented by SEQ ID NOS: 35477, 35478, 35479, 35480, 35481, 35482, 35483, 35484, 35485, 35486, 35487 were selected from the ORFs having the nucleotide sequence represented by SEQ ID NO: 2672.

[3161] The probes having the nucleotide sequence represented by SEQ ID NOS: 35488, 35489, 35490, 35491, 35492, 35493, 35494, 35495, 35496, 35497, 35498 were selected from the ORFs having the nucleotide sequence represented by SEQ ID NO: 2673.

[3162] The probes having the nucleotide sequence represented by SEQ ID NOS: 35499, 35500, 35501, 35502, 35503, 35504, 35505, 35506, 35507, 35508, 35509 were selected from the ORFs having the nucleotide sequence represented by SEQ ID NO: 2674.

[3163] The probes having the nucleotide sequence represented by SEQ ID NOS: 35510, 35511, 35512, 35513, 35514, 35515, 35516, 35517, 35518, 35519, 35520 were selected from the ORFs having the nucleotide sequence represented by SEQ ID NO: 2675.

[3164] The probes having the nucleotide sequence represented by SEQ ID NOS: 35521, 35522, 35523, 35524, 35525, 35526, 35527, 35528, 35529, 35530, 35531 were selected from the ORFs having the nucleotide sequence represented by SEQ ID NO: 2676.

[3165] The probes having the nucleotide sequence represented by SEQ ID NOS: 35532, 35533, 35534, 35535, 35536, 35537, 35538, 35539, 35540, 35541, 35542 were selected from the ORFs having the nucleotide sequence represented by SEQ ID NO: 2677.

[3166] The probes having the nucleotide sequence represented by SEQ ID NOS: 35543, 35544, 35545, 35546, 35547, 35548, 35549, 35550, 35551, 35552, 35553 were selected from the ORFs having the nucleotide sequence represented by SEQ ID NO: 2678.

[3167] The probes having the nucleotide sequence represented by SEQ ID NOS: 35554, 35555, 35556, 35557, 35558, 35559, 35560, 35561, 35562, 35563, 35564 were selected from the ORFs having the nucleotide sequence represented by SEQ ID NO: 2679.

[3168] The probes having the nucleotide sequence represented by SEQ ID NOS: 35565, 35566, 35567, 35568, 35569, 35570, 35571, 35572, 35573, 35574, 35575 were selected from the ORFs having the nucleotide sequence represented by SEQ ID NO: 2680.

[3169] The probes having the nucleotide sequence represented by SEQ ID NOS: 35576, 35577, 35578, 35579, 35580, 35581, 35582, 35583, 35584, 35585, 35586 were selected from the ORFs having the nucleotide sequence represented by SEQ ID NO: 2681.

[3170] The probes having the nucleotide sequence represented by SEQ ID NOS: 35587, 35588, 35589, 35590, 35591, 35592, 35593, 35594, 35595, 35596, 35597 were selected from the ORFs having the nucleotide sequence represented by SEQ ID NO: 2682.

[3171] The probes having the nucleotide sequence represented by SEQ ID NOS: 35598, 35599, 35600, 35601, 35602, 35603, 35604, 35605, 35606, 35607, 35608 were selected from the ORFs having the nucleotide sequence represented by SEQ ID NO: 2683.

[3172] The probes having the nucleotide sequence represented by SEQ ID NOS: 35609, 35610, 35611, 35612, 35613, 35614, 35615, 35616, 35617, 35618, 35619 were selected from the ORFs having the nucleotide sequence represented by SEQ ID NO: 2684.

[3173] The probes having the nucleotide sequence represented by SEQ ID NOS: 35620, 35621, 35622, 35623, 35624, 35625, 35626, 35627, 35628, 35629, 35630 were selected from the ORFs having the nucleotide sequence represented by SEQ ID NO: 2685.

[3174] The probes having the nucleotide sequence represented by SEQ ID NOS: 35631, 35632, 35633, 35634, 35635, 35636, 35637, 35638, 35639, 35640, 35641 were selected from the ORFs having the nucleotide sequence represented by SEQ ID NO: 2686.

[3175] The probes having the nucleotide sequence represented by SEQ ID NOS: 35642, 35643, 35644, 35645, 35646, 35647, 35648, 35649, 35650, 35651, 35652 were selected from the ORFs having the nucleotide sequence represented by SEQ ID NO: 2687.

[3176] The probes having the nucleotide sequence represented by SEQ ID NOS: 35653, 35654, 35655, 35656, 35657, 35658, 35659, 35660, 35661, 35662, 35663 were selected from the ORFs having the nucleotide sequence represented by SEQ ID NO: 2688.

[3177] The probes having the nucleotide sequence represented by SEQ ID NOS: 35664, 35665, 35666, 35667, 35668, 35669, 35670, 35671, 35672, 35673, 35674 were selected from the ORFs having the nucleotide sequence represented by SEQ ID NO: 2689.

[3178] The probes having the nucleotide sequence represented by SEQ ID NOS: 35675, 35676, 35677, 35678, 35679, 35680, 35681, 35682, 35683, 35684, 35685 were selected from the ORFs having the nucleotide sequence represented by SEQ ID NO: 2690.

[3179] The probes having the nucleotide sequence represented by SEQ ID NOS: 35686, 35687, 35688, 35689, 35690, 35691, 35692, 35693, 35694, 35695, 35696 were selected from the ORFs having the nucleotide sequence represented by SEQ ID NO: 2691.

[3180] The probes having the nucleotide sequence represented by SEQ ID NOS: 35697, 35698, 35699, 35700, 35701, 35702, 35703, 35704, 35705, 35706, 35707 were selected from the ORFs having the nucleotide sequence represented by SEQ ID NO: 2692.

[3181] The probes having the nucleotide sequence represented by SEQ ID NOS: 35708, 35709, 35710, 35711, 35712, 35713, 35714, 35715, 35716, 35717, 35718 were selected from the ORFs having the nucleotide sequence represented by SEQ ID NO: 2693.

[3182] The probes having the nucleotide sequence represented by SEQ ID NOS: 35719, 35720, 35721, 35722, 35723, 35724, 35725, 35726, 35727, 35728, 35729 were selected from the ORFs having the nucleotide sequence represented by SEQ ID NO: 2694.

[3183] The probes having the nucleotide sequence represented by SEQ ID NOS: 35730, 35731, 35732, 35733, 35734, 35735, 35736, 35737, 35738, 35739, 35740 were selected from the ORFs having the nucleotide sequence represented by SEQ ID NO: 2695.

[3184] The probes having the nucleotide sequence represented by SEQ ID NOS: 35741, 35742, 35743, 35744, 35745, 35746, 35747, 35748, 35749, 35750, 35751 were selected from the ORFs having the nucleotide sequence represented by SEQ ID NO: 2696.

[3185] The probes having the nucleotide sequence represented by SEQ ID NOS: 35752, 35753, 35754, 35755, 35756, 35757, 35758, 35759, 35760, 35761, 35762 were selected from the ORFs having the nucleotide sequence represented by SEQ ID NO: 2697.

[3186] The probes having the nucleotide sequence represented by SEQ ID NOS: 35763, 35764, 35765, 35766, 35767, 35768, 35769, 35770, 35771, 35772, 35773, 35774, 35775, 35776, 35777, 35778, 35779, 35780, 35781, 35782, 35783, 35784 were selected from the ORFs having the nucleotide sequence represented by SEQ ID NO: 2698.

[3187] The probes having the nucleotide sequence represented by SEQ ID NOS: 35785, 35786, 35787, 35788, 35789, 35790, 35791, 35792, 35793, 35794, 35795 were selected from the ORFs having the nucleotide sequence represented by SEQ ID NO: 2699.

[3188] The probes having the nucleotide sequence represented by SEQ ID NOS: 35796, 35797, 35798, 35799, 35800, 35801, 35802, 35803, 35804, 35805, 35806 were selected from the ORFs having the nucleotide sequence represented by SEQ ID NO: 2700.

[3189] The probes having the nucleotide sequence represented by SEQ ID NOS: 35807, 35808, 35809, 35810, 35811, 35812, 35813, 35814, 35815, 35816, 35817 were selected from the ORFs having the nucleotide sequence represented by SEQ ID NO: 2701.

[3190] The probes having the nucleotide sequence represented by SEQ ID NOS: 35818, 35819, 35820, 35821, 35822, 35823, 35824, 35825, 35826, 35827, 35828 were selected from the ORFs having the nucleotide sequence represented by SEQ ID NO: 2702.

[3191] The probes having the nucleotide sequence represented by SEQ ID NOS: 35829, 35830, 35831, 35832, 35833, 35834, 35835, 35836, 35837, 35838, 35839 were selected from the ORFs having the nucleotide sequence represented by SEQ ID NO: 2703.

[3192] The probes having the nucleotide sequence represented by SEQ ID NOS: 35840, 35841, 35842, 35843, 35844, 35845, 35846, 35847, 35848, 35849, 35850 were selected from the ORFs having the nucleotide sequence represented by SEQ ID NO: 2704.

[3193] The probes having the nucleotide sequence represented by SEQ ID NOS: 35851, 35852, 35853, 35854, 35855, 35856, 35857, 35858, 35859, 35860, 35861 were selected from the ORFs having the nucleotide sequence represented by SEQ ID NO: 2705.

[3194] The probes having the nucleotide sequence represented by SEQ ID NOS: 35862, 35863, 35864, 35865, 35866, 35867, 35868, 35869, 35870, 35871, 35872 were selected from the ORFs having the nucleotide sequence represented by SEQ ID NO: 2706.

[3195] The probes having the nucleotide sequence represented by SEQ ID NOS: 35873, 35874, 35875, 35876, 35877, 35878, 35879, 35880, 35881, 35882, 35883 were selected from the ORFs having the nucleotide sequence represented by SEQ ID NO: 2707.

[3196] The probes having the nucleotide sequence represented by SEQ ID NOS: 35884, 35885, 35886, 35887, 35888, 35889, 35890, 35891, 35892, 35893, 35894 were selected from the ORFs having the nucleotide sequence represented by SEQ ID NO: 2708.

[3197] The probes having the nucleotide sequence represented by SEQ ID NOS: 35895, 35896, 35897, 35898, 35899, 35900, 35901, 35902, 35903, 35904, 35905 were selected from the ORFs having the nucleotide sequence represented by SEQ ID NO: 2709.

[3198] The probes having the nucleotide sequence represented by SEQ ID NOS: 35906, 35907, 35908, 35909, 35910, 35911, 35912, 35913, 35914, 35915, 35916 were selected from the ORFs having the nucleotide sequence represented by SEQ ID NO: 2710.

[3199] The probes having the nucleotide sequence represented by SEQ ID NOS: 35917, 35918, 35919, 35920, 35921, 35922, 35923, 35924, 35925, 35926, 35927 were selected from the ORFs having the nucleotide sequence represented by SEQ ID NO: 2711.

[3200] The probes having the nucleotide sequence represented by SEQ ID NOS: 35928, 35929, 35930, 35931, 35932, 35933, 35934, 35935, 35936, 35937, 35938 were selected from the ORFs having the nucleotide sequence represented by SEQ ID NO: 2712.

[3201] The probes having the nucleotide sequence represented by SEQ ID NOS: 35939, 35940, 35941, 35942, 35943, 35944, 35945, 35946, 35947, 35948, 35949 were selected from the ORFs having the nucleotide sequence represented by SEQ ID NO: 2713.

[3202] The probes having the nucleotide sequence represented by SEQ ID NOS: 35950, 35951, 35952, 35953, 35954, 35955, 35956, 35957, 35958, 35959, 35960 were selected from the ORFs having the nucleotide sequence represented by SEQ ID NO: 2714.

[3203] The probes having the nucleotide sequence represented by SEQ ID NOS: 35961, 35962, 35963, 35964, 35965, 35966, 35967, 35968, 35969, 35970, 35971 were selected from the ORFs having the nucleotide sequence represented by SEQ ID NO: 2715.

[3204] The probes having the nucleotide sequence represented by SEQ ID NOS: 35972, 35973, 35974, 35975, 35976, 35977, 35978, 35979, 35980, 35981, 35982 were selected from the ORFs having the nucleotide sequence represented by SEQ ID NO: 2716.

[3205] The probes having the nucleotide sequence represented by SEQ ID NOS: 35983, 35984, 35985, 35986, 35987, 35988, 35989, 35990, 35991, 35992, 35993 were selected from the ORFs having the nucleotide sequence represented by SEQ ID NO: 2717.

[3206] The probes having the nucleotide sequence represented by SEQ ID NOS: 35994, 35995, 35996, 35997, 35998, 35999, 36000, 36001, 36002, 36003, 36004 were selected from the ORFs having the nucleotide sequence represented by SEQ ID NO: 2718.

[3207] The probes having the nucleotide sequence represented by SEQ ID NOS: 36005, 36006, 36007, 36008, 36009, 36010, 36011, 36012, 36013, 36014, 36015 were selected from the ORFs having the nucleotide sequence represented by SEQ ID NO: 2719.

[3208] The probes having the nucleotide sequence represented by SEQ ID NOS: 36016, 36017, 36018, 36019, 36020, 36021, 36022, 36023, 36024, 36025, 36026 were selected from the ORFs having the nucleotide sequence represented by SEQ ID NO: 2720.

[3209] The probes having the nucleotide sequence represented by SEQ ID NOS: 36027, 36028, 36029, 36030, 36031, 36032, 36033, 36034, 36035, 36036, 36037 were selected from the ORFs having the nucleotide sequence represented by SEQ ID NO: 2721.

[3210] The probes having the nucleotide sequence represented by SEQ ID NOS: 36038, 36039, 36040, 36041, 36042, 36043, 36044, 36045, 36046, 36047, 36048 were selected from the ORFs having the nucleotide sequence represented by SEQ ID NO: 2722.

[3211] The probes having the nucleotide sequence represented by SEQ ID NOS: 36049, 36050, 36051, 36052, 36053, 36054, 36055, 36056, 36057, 36058, 36059 were selected from the ORFs having the nucleotide sequence represented by SEQ ID NO: 2723.

[3212] The probes having the nucleotide sequence represented by SEQ ID NOS: 36060, 36061, 36062, 36063, 36064, 36065, 36066, 36067, 36068, 36069, 36070 were selected from the ORFs having the nucleotide sequence represented by SEQ ID NO: 2724.

[3213] The probes having the nucleotide sequence represented by SEQ ID NOS: 36071, 36072, 36073, 36074, 36075, 36076, 36077, 36078, 36079, 36080, 36081 were selected from the ORFs having the nucleotide sequence represented by SEQ ID NO: 2725.

[3214] The probes having the nucleotide sequence represented by SEQ ID NOS: 36082, 36083, 36084, 36085, 36086, 36087, 36088, 36089, 36090, 36091, 36092 were selected from the ORFs having the nucleotide sequence represented by SEQ ID NO: 2726.

[3215] The probes having the nucleotide sequence represented by SEQ ID NOS: 36093, 36094, 36095, 36096, 36097, 36098, 36099, 36100, 36101, 36102, 36103 were selected from the ORFs having the nucleotide sequence represented by SEQ ID NO: 2727.

[3216] The probes having the nucleotide sequence represented by SEQ ID NOS: 36104, 36105, 36106, 36107, 36108, 36109, 36110, 36111, 36112, 36113, 36114 were selected from the ORFs having the nucleotide sequence represented by SEQ ID NO: 2728.

[3217] The probes having the nucleotide sequence represented by SEQ ID NOS: 36115, 36116, 36117, 36118, 36119, 36120, 36121, 36122, 36123, 36124, 36125 were selected from the ORFs having the nucleotide sequence represented by SEQ ID NO: 2729.

[3218] The probes having the nucleotide sequence represented by SEQ ID NOS: 36126, 36127, 36128, 36129, 36130, 36131, 36132, 36133, 36134, 36135, 36136 were selected from the ORFs having the nucleotide sequence represented by SEQ ID NO: 2730.

[3219] The probes having the nucleotide sequence represented by SEQ ID NOS: 36137, 36138, 36139, 36140, 36141, 36142, 36143, 36144, 36145, 36146, 36147 were selected from the ORFs having the nucleotide sequence represented by SEQ ID NO: 2731.

[3220] The probes having the nucleotide sequence represented by SEQ ID NOS: 36148, 36149, 36150, 36151, 36152, 36153, 36154, 36155, 36156, 36157, 36158 were selected from the ORFs having the nucleotide sequence represented by SEQ ID NO: 2732.

[3221] The probes having the nucleotide sequence represented by SEQ ID NOS: 36159, 36160, 36161, 36162, 36163, 36164, 36165, 36166, 36167, 36168, 36169 were selected from the ORFs having the nucleotide sequence represented by SEQ ID NO: 2733.

[3222] The probes having the nucleotide sequence represented by SEQ ID NOS: 36170, 36171, 36172, 36173, 36174, 36175, 36176, 36177, 36178, 36179, 36180 were selected from the ORFs having the nucleotide sequence represented by SEQ ID NO: 2734.

[3223] The probes having the nucleotide sequence represented by SEQ ID NOS: 36181, 36182, 36183, 36184, 36185, 36186, 36187, 36188, 36189, 36190, 36191 were selected from the ORFs having the nucleotide sequence represented by SEQ ID NO: 2735.

[3224] The probes having the nucleotide sequence represented by SEQ ID NOS: 36192, 36193, 36194, 36195, 36196, 36197, 36198, 36199, 36200, 36201, 36202 were selected from the ORFs having the nucleotide sequence represented by SEQ ID NO: 2736.

[3225] The probes having the nucleotide sequence represented by SEQ ID NOS: 36203, 36204, 36205, 36206, 36207, 36208, 36209, 36210, 36211, 36212, 36213 were selected from the ORFs having the nucleotide sequence represented by SEQ ID NO: 2737.

[3226] The probes having the nucleotide sequence represented by SEQ ID NOS: 36214, 36215, 36216, 36217, 36218, 36219, 36220, 36221, 36222, 36223, 36224 were selected from the ORFs having the nucleotide sequence represented by SEQ ID NO: 2738.

[3227] The probes having the nucleotide sequence represented by SEQ ID NOS: 36225, 36226, 36227, 36228, 36229, 36230, 36231, 36232, 36233, 36234, 36235 were selected from the ORFs having the nucleotide sequence represented by SEQ ID NO: 2739.

[3228] The probes having the nucleotide sequence represented by SEQ ID NOS: 36236, 36237, 36238, 36239, 36240, 36241, 36242, 36243, 36244, 36245, 36246 were selected from the ORFs having the nucleotide sequence represented by SEQ ID NO: 2740.

[3229] The probes having the nucleotide sequence represented by SEQ ID NOS: 36247, 36248, 36249, 36250, 36251, 36252, 36253, 36254, 36255, 36256, 36257 were selected from the ORFs having the nucleotide sequence represented by SEQ ID NO: 2741.

[3230] The probes having the nucleotide sequence represented by SEQ ID NOS: 36258, 36259, 36260, 36261, 36262, 36263, 36264, 36265, 36266, 36267, 36268 were selected from the ORFs having the nucleotide sequence represented by SEQ ID NO: 2742.

[3231] The probes having the nucleotide sequence represented by SEQ ID NOS: 36269, 36270, 36271, 36272, 36273, 36274, 36275, 36276, 36277, 36278, 36279 were selected from the ORFs having the nucleotide sequence represented by SEQ ID NO: 2743.

[3232] The probes having the nucleotide sequence represented by SEQ ID NOS: 36280, 36281, 36282, 36283, 36284, 36285, 36286, 36287, 36288, 36289, 36290 were selected from the ORFs having the nucleotide sequence represented by SEQ ID NO: 2744.

[3233] The probes having the nucleotide sequence represented by SEQ ID NOS: 36291, 36292, 36293, 36294, 36295, 36296, 36297, 36298, 36299, 36300, 36301 were selected from the ORFs having the nucleotide sequence represented by SEQ ID NO: 2745.

[3234] The probes having the nucleotide sequence represented by SEQ ID NOS: 36302, 36303, 36304, 36305, 36306, 36307, 36308, 36309, 36310, 36311, 36312 were selected from the ORFs having the nucleotide sequence represented by SEQ ID NO: 2746.

[3235] The probes having the nucleotide sequence represented by SEQ ID NOS: 36313, 36314, 36315, 36316, 36317, 36318, 36319, 36320, 36321, 36322, 36323 were selected from the ORFs having the nucleotide sequence represented by SEQ ID NO: 2747.

[3236] The probes having the nucleotide sequence represented by SEQ ID NOS: 36324, 36325, 36326, 36327, 36328, 36329, 36330, 36331, 36332, 36333, 36334 were selected from the ORFs having the nucleotide sequence represented by SEQ ID NO: 2748.

[3237] The probes having the nucleotide sequence represented by SEQ ID NOS: 36335, 36336, 36337, 36338, 36339, 36340, 36341, 36342, 36343, 36344, 36345 were selected from the ORFs having the nucleotide sequence represented by SEQ ID NO: 2749.

[3238] The probes having the nucleotide sequence represented by SEQ ID NOS: 36346, 36347, 36348, 36349, 36350, 36351, 36352, 36353, 36354, 36355, 36356 were selected from the ORFs having the nucleotide sequence represented by SEQ ID NO: 2750.

[3239] The probes having the nucleotide sequence represented by SEQ ID NOS: 36357, 36358, 36359, 36360, 36361, 36362, 36363, 36364, 36365, 36366, 36367 were selected from the ORFs having the nucleotide sequence represented by SEQ ID NO: 2751.

[3240] The probes having the nucleotide sequence represented by SEQ ID NOS: 36368, 36369, 36370, 36371, 36372, 36373, 36374, 36375, 36376, 36377, 36378 were selected from the ORFs having the nucleotide sequence represented by SEQ ID NO: 2752.

[3241] The probes having the nucleotide sequence represented by SEQ ID NOS: 36379, 36380, 36381, 36382, 36383, 36384, 36385, 36386, 36387, 36388, 36389 were selected from the ORFs having the nucleotide sequence represented by SEQ ID NO: 2753.

[3242] The probes having the nucleotide sequence represented by SEQ ID NOS: 36390, 36391, 36392, 36393, 36394, 36395, 36396, 36397, 36398, 36399, 36400 were selected from the ORFs having the nucleotide sequence represented by SEQ ID NO: 2754.

[3243] The probes having the nucleotide sequence represented by SEQ ID NOS: 36401, 36402, 36403, 36404, 36405, 36406, 36407, 36408, 36409, 36410, 36411 were selected from the ORFs having the nucleotide sequence represented by SEQ ID NO: 2755.

[3244] The probes having the nucleotide sequence represented by SEQ ID NOS: 36412, 36413, 36414, 36415, 36416, 36417, 36418, 36419, 36420, 36421, 36422 were selected from the ORFs having the nucleotide sequence represented by SEQ ID NO: 2756.

[3245] The probes having the nucleotide sequence represented by SEQ ID NOS: 36423, 36424, 36425, 36426, 36427, 36428, 36429, 36430, 36431, 36432, 36433 were selected from the ORFs having the nucleotide sequence represented by SEQ ID NO: 2757.

[3246] The probes having the nucleotide sequence represented by SEQ ID NOS: 36434, 36435, 36436, 36437, 36438, 36439, 36440, 36441, 36442, 36443, 36444 were selected from the ORFs having the nucleotide sequence represented by SEQ ID NO: 2758.

[3247] The probes having the nucleotide sequence represented by SEQ ID NOS: 36445, 36446, 36447, 36448, 36449, 36450, 36451, 36452, 36453, 36454, 36455 were selected from the ORFs having the nucleotide sequence represented by SEQ ID NO: 2759.

[3248] The probes having the nucleotide sequence represented by SEQ ID NOS: 36456, 36457, 36458, 36459, 36460, 36461, 36462, 36463, 36464, 36465, 36466 were selected from the ORFs having the nucleotide sequence represented by SEQ ID NO: 2760.

[3249] The probes having the nucleotide sequence represented by SEQ ID NOS: 36467, 36468, 36469, 36470, 36471, 36472, 36473, 36474, 36475, 36476, 36477 were selected from the ORFs having the nucleotide sequence represented by SEQ ID NO: 2761.

[3250] The probes having the nucleotide sequence represented by SEQ ID NOS: 36478, 36479, 36480, 36481, 36482, 36483, 36484, 36485, 36486, 36487, 36488 were selected from the ORFs having the nucleotide sequence represented by SEQ ID NO: 2762.

[3251] The probes having the nucleotide sequence represented by SEQ ID NOS: 36489, 36490, 36491, 36492, 36493, 36494, 36495, 36496, 36497, 36498, 36499 were selected from the ORFs having the nucleotide sequence represented by SEQ ID NO: 2763.

[3252] The probes having the nucleotide sequence represented by SEQ ID NOS: 36500, 36501, 36502, 36503, 36504, 36505, 36506, 36507, 36508, 36509, 36510 were selected from the ORFs having the nucleotide sequence represented by SEQ ID NO: 2764.

[3253] The probes having the nucleotide sequence represented by SEQ ID NOS: 36511, 36512, 36513, 36514, 36515, 36516, 36517, 36518, 36519, 36520, 36521 were selected from the ORFs having the nucleotide sequence represented by SEQ ID NO: 2765.

[3254] The probes having the nucleotide sequence represented by SEQ ID NOS: 36522, 36523, 36524, 36525, 36526, 36527, 36528, 36529, 36530, 36531, 36532 were selected from the ORFs having the nucleotide sequence represented by SEQ ID NO: 2766.

[3255] The probes having the nucleotide sequence represented by SEQ ID NOS: 36533, 36534, 36535, 36536, 36537, 36538, 36539, 36540, 36541, 36542, 36543 were selected from the ORFs having the nucleotide sequence represented by SEQ ID NO: 2767.

[3256] The probes having the nucleotide sequence represented by SEQ ID NOS: 36544, 36545, 36546, 36547, 36548, 36549, 36550, 36551, 36552, 36553, 36554 were selected from the ORFs having the nucleotide sequence represented by SEQ ID NO: 2768.

[3257] The probes having the nucleotide sequence represented by SEQ ID NOS: 36555, 36556, 36557, 36558, 36559, 36560, 36561, 36562, 36563, 36564, 36565 were selected from the ORFs having the nucleotide sequence represented by SEQ ID NO: 2769.

[3258] The probes having the nucleotide sequence represented by SEQ ID NOS: 36566, 36567, 36568, 36569, 36570, 36571, 36572, 36573, 36574, 36575, 36576 were selected from the ORFs having the nucleotide sequence represented by SEQ ID NO: 2770.

[3259] The probes having the nucleotide sequence represented by SEQ ID NOS: 36577, 36578, 36579, 36580, 36581, 36582, 36583, 36584, 36585, 36586, 36587 were selected from the ORFs having the nucleotide sequence represented by SEQ ID NO: 2771.

[3260] The probes having the nucleotide sequence represented by SEQ ID NOS: 36588, 36589, 36590, 36591, 36592, 36593, 36594, 36595, 36596, 36597, 36598 were selected from the ORFs having the nucleotide sequence represented by SEQ ID NO: 2772.

[3261] The probes having the nucleotide sequence represented by SEQ ID NOS: 36599, 36600, 36601, 36602, 36603, 36604, 36605, 36606, 36607, 36608, 36609 were selected from the ORFs having the nucleotide sequence represented by SEQ ID NO: 2773.

[3262] The probes having the nucleotide sequence represented by SEQ ID NOS: 36610, 36611, 36612, 36613, 36614, 36615, 36616, 36617, 36618, 36619, 36620 were selected from the ORFs having the nucleotide sequence represented by SEQ ID NO: 2774.

[3263] The probes having the nucleotide sequence represented by SEQ ID NOS: 36621, 36622, 36623, 36624, 36625, 36626, 36627, 36628, 36629, 36630, 36631 were selected from the ORFs having the nucleotide sequence represented by SEQ ID NO: 2775.

[3264] The probes having the nucleotide sequence represented by SEQ ID NOS: 36632, 36633, 36634, 36635, 36636, 36637, 36638, 36639, 36640, 36641, 36642 were selected from the ORFs having the nucleotide sequence represented by SEQ ID NO: 2776.

[3265] The probes having the nucleotide sequence represented by SEQ ID NOS: 36643, 36644, 36645, 36646, 36647, 36648, 36649, 36650, 36651, 36652, 36653 were selected from the ORFs having the nucleotide sequence represented by SEQ ID NO: 2777.

[3266] The probes having the nucleotide sequence represented by SEQ ID NOS: 36654, 36655, 36656, 36657, 36658, 36659, 36660, 36661, 36662, 36663, 36664 were selected from the ORFs having the nucleotide sequence represented by SEQ ID NO: 2778.

[3267] The probes having the nucleotide sequence represented by SEQ ID NOS: 36665, 36666, 36667, 36668, 36669, 36670, 36671, 36672, 36673, 36674, 36675 were selected from the ORFs having the nucleotide sequence represented by SEQ ID NO: 2779.

[3268] The probes having the nucleotide sequence represented by SEQ ID NOS: 36676, 36677, 36678, 36679, 36680, 36681, 36682, 36683, 36684, 36685, 36686 were selected from the ORFs having the nucleotide sequence represented by SEQ ID NO: 2780.

[3269] The probes having the nucleotide sequence represented by SEQ ID NOS: 36687, 36688, 36689, 36690, 36691, 36692, 36693, 36694, 36695, 36696, 36697 were selected from the ORFs having the nucleotide sequence represented by SEQ ID NO: 2781.

[3270] The probes having the nucleotide sequence represented by SEQ ID NOS: 36698, 36699, 36700, 36701, 36702, 36703, 36704, 36705, 36706, 36707, 36708 were selected from the ORFs having the nucleotide sequence represented by SEQ ID NO: 2782.

[3271] The probes having the nucleotide sequence represented by SEQ ID NOS: 36709, 36710, 36711, 36712, 36713, 36714, 36715, 36716, 36717, 36718, 36719 were selected from the ORFs having the nucleotide sequence represented by SEQ ID NO: 2783.

[3272] The probes having the nucleotide sequence represented by SEQ ID NOS: 36720, 36721, 36722, 36723, 36724, 36725, 36726, 36727, 36728, 36729, 36730 were selected from the ORFs having the nucleotide sequence represented by SEQ ID NO: 2784.

[3273] The probes having the nucleotide sequence represented by SEQ ID NOS: 36731, 36732, 36733, 36734, 36735, 36736, 36737, 36738, 36739, 36740, 36741 were selected from the ORFs having the nucleotide sequence represented by SEQ ID NO: 2785.

[3274] The probes having the nucleotide sequence represented by SEQ ID NOS: 36742, 36743, 36744, 36745, 36746, 36747, 36748, 36749, 36750, 36751, 36752 were,selected from the ORFs having the nucleotide sequence represented by SEQ ID NO: 2786.

[3275] The probes having the nucleotide sequence represented by SEQ ID NOS: 36753, 36754, 36755, 36756, 36757, 36758, 36759, 36760, 36761, 36762, 36763 were selected from the ORFs having the nucleotide sequence represented by SEQ ID NO: 2787.

[3276] The probes having the nucleotide sequence represented by SEQ ID NOS: 36764, 36765, 36766, 36767, 36768, 36769, 36770, 36771, 36772, 36773, 36774 were selected from the ORFs having the nucleotide sequence represented by SEQ ID NO: 2788.

[3277] The probes having the nucleotide sequence represented by SEQ ID NOS: 36775, 36776, 36777, 36778, 36779, 36780, 36781, 36782, 36783, 36784, 36785 were selected from the ORFs having the nucleotide sequence represented by SEQ ID NO: 2789.

[3278] The probes having the nucleotide sequence represented by SEQ ID NOS: 36786, 36787, 36788, 36789, 36790, 36791, 36792, 36793, 36794, 36795, 36796 were selected from the ORFs having the nucleotide sequence represented by SEQ ID NO: 2790.

[3279] The probes having the nucleotide sequence represented by SEQ ID NOS: 36797, 36798, 36799, 36800, 36801, 36802, 36803, 36804, 36805, 36806, 36807 were selected from the ORFs having the nucleotide sequence represented by SEQ ID NO: 2791.

[3280] The probes having the nucleotide sequence represented by SEQ ID NOS: 36808, 36809, 36810, 36811, 36812, 36813, 36814, 36815, 36816, 36817, 36818 were selected from the ORFs having the nucleotide sequence represented by SEQ ID NO: 2792.

[3281] The probes having the nucleotide sequence represented by SEQ ID NOS: 36819, 36820, 36821, 36822, 36823, 36824, 36825, 36826, 36827, 36828, 36829 were selected from the ORFs having the nucleotide sequence represented by SEQ ID NO: 2793.

[3282] The probes having the nucleotide sequence represented by SEQ ID NOS: 36830, 36831, 36832, 36833, 36834, 36835, 36836, 36837, 36838, 36839, 36840 were selected from the ORFs having the nucleotide sequence represented by SEQ ID NO: 2794.

[3283] The probes having the nucleotide sequence represented by SEQ ID NOS: 36841, 36842, 36843, 36844, 36845, 36846, 36847, 36848, 36849, 36850, 36851 were selected from the ORFs having the nucleotide sequence represented by SEQ ID NO: 2795.

[3284] The probes having the nucleotide sequence represented by SEQ ID NOS: 36852, 36853, 36854, 36855, 36856, 36857, 36858, 36859, 36860, 36861, 36862 were selected from the ORFs having the nucleotide sequence represented by SEQ ID NO: 2796.

[3285] The probes having the nucleotide sequence represented by SEQ ID NOS: 36863, 36864, 36865, 36866, 36867, 36868, 36869, 36870, 36871, 36872, 36873 were selected from the ORFs having the nucleotide sequence represented by SEQ ID NO: 2797.

[3286] The probes having the nucleotide sequence represented by SEQ ID NOS: 36874, 36875, 36876, 36877, 36878, 36879, 36880, 36881, 36882, 36883, 36884 were selected from the ORFs having the nucleotide sequence represented by SEQ ID NO: 2798.

[3287] The probes having the nucleotide sequence represented by SEQ ID NOS: 36885, 36886, 36887, 36888, 36889, 36890, 36891, 36892, 36893, 36894, 36895 were selected from the ORFs having the nucleotide sequence represented by SEQ ID NO: 2799.

[3288] The probes having the nucleotide sequence represented by SEQ ID NOS: 36896, 36897, 36898, 36899, 36900, 36901, 36902, 36903, 36904, 36905, 36906 were selected from the ORFs having the nucleotide sequence represented by SEQ ID NO: 2800.

[3289] The probes having the nucleotide sequence represented by SEQ ID NOS: 36907, 36908, 36909, 36910, 36911, 36912, 36913, 36914, 36915, 36916, 36917 were selected from the ORFs having the nucleotide sequence represented by SEQ ID NO: 2801.

[3290] The probes having the nucleotide sequence represented by SEQ ID NOS: 36918, 36919, 36920, 36921, 36922, 36923, 36924, 36925, 36926, 36927, 36928 were selected from the ORFs having the nucleotide sequence represented by SEQ ID NO: 2802.

[3291] The probes having the nucleotide sequence represented by SEQ ID NOS: 36929, 36930, 36931, 36932, 36933, 36934, 36935, 36936, 36937, 36938, 36939 were selected from the ORFs having the nucleotide sequence represented by SEQ ID NO: 2803.

[3292] The probes having the nucleotide sequence represented by SEQ ID NOS: 36940, 36941, 36942, 36943, 36944, 36945, 36946, 36947, 36948, 36949, 36950 were selected from the ORFs having the nucleotide sequence represented by SEQ ID NO: 2804.

[3293] The probes having the nucleotide sequence represented by SEQ ID NOS: 36951, 36952, 36953, 36954, 36955, 36956, 36957, 36958, 36959, 36960, 36961 were selected from the ORFs having the nucleotide sequence represented by SEQ ID NO: 2805.

[3294] The probes having the nucleotide sequence represented by SEQ ID NOS: 36962, 36963, 36964, 36965, 36966, 36967, 36968, 36969, 36970, 36971, 36972 were selected from the ORFs having the nucleotide sequence represented by SEQ ID NO: 2806.

[3295] The probes having the nucleotide sequence represented by SEQ ID NOS: 36973, 36974, 36975, 36976, 36977, 36978, 36979, 36980, 36981, 36982, 36983 were selected from the ORFs having the nucleotide sequence represented by SEQ ID NO: 2807.

[3296] The probes having the nucleotide sequence represented by SEQ ID NOS: 36984, 36985, 36986, 36987, 36988, 36989, 36990, 36991, 36992, 36993, 36994 were selected from the ORFs having the nucleotide sequence represented by SEQ ID NO: 2808.

[3297] The probes having the nucleotide sequence represented by SEQ ID NOS: 36995, 36996, 36997, 36998, 36999, 37000, 37001, 37002, 37003, 37004, 37005 were selected from the ORFs having the nucleotide sequence represented by SEQ ID NO: 2809.

[3298] The probes having the nucleotide sequence represented by SEQ ID NOS: 37006, 37007, 37008, 37009, 37010, 37011, 37012, 37013, 37014, 37015, 37016 were selected from the ORFs having the nucleotide sequence represented by SEQ ID NO: 2810.

[3299] The probes having the nucleotide sequence represented by SEQ ID NOS: 37017, 37018, 37019, 37020, 37021, 37022, 37023, 37024, 37025, 37026, 37027 were selected from the ORFs having the nucleotide sequence represented by SEQ ID NO: 2811.

[3300] The probes having the nucleotide sequence represented by SEQ ID NOS: 37028, 37029, 37030, 37031, 37032, 37033, 37034, 37035, 37036, 37037, 37038 were selected from the ORFs having the nucleotide sequence represented by SEQ ID NO: 2812.

[3301] The probes having the nucleotide sequence represented by SEQ ID NOS: 37039, 37040, 37041, 37042, 37043, 37044, 37045, 37046, 37047, 37048, 37049 were selected from the ORFs having the nucleotide sequence represented by SEQ ID NO: 2813.

[3302] The probes having the nucleotide sequence represented by SEQ ID NOS: 37050, 37051, 37052, 37053, 37054, 37055, 37056, 37057, 37058, 37059, 37060 were selected from the ORFs having the nucleotide sequence represented by SEQ ID NO: 2814.

[3303] The probes having the nucleotide sequence represented by SEQ ID NOS: 37061, 37062, 37063, 37064, 37065, 37066, 37067, 37068, 37069, 37070, 37071 were selected from the ORFs having the nucleotide sequence represented by SEQ ID NO: 2815.

[3304] The probes having the nucleotide sequence represented by SEQ ID NOS: 37072, 37073, 37074, 37075, 37076, 37077, 37078, 37079, 37080, 37081, 37082 were selected from the ORFs having the nucleotide sequence represented by SEQ ID NO: 2816.

[3305] The probes having the nucleotide sequence represented by SEQ ID NOS: 37083, 37084, 37085, 37086, 37087, 37088, 37089, 37090, 37091, 37092, 37093 were selected from the ORFs having the nucleotide sequence represented by SEQ ID NO: 2817.

[3306] The probes having the nucleotide sequence represented by SEQ ID NOS: 37094, 37095, 37096, 37097, 37098, 37099, 37100, 37101, 37102, 37103, 37104 were selected from the ORFs having the nucleotide sequence represented by SEQ ID NO: 2818.

[3307] The probes having the nucleotide sequence represented by SEQ ID NOS: 37105, 37106, 37107, 37108, 37109, 37110, 37111, 37112, 37113, 37114, 37115 were selected from the ORFs having the nucleotide sequence represented by SEQ ID NO: 2819.

[3308] The probes having the nucleotide sequence represented by SEQ ID NOS: 37116, 37117, 37118, 37119, 37120, 37121, 37122, 37123, 37124, 37125, 37126 were selected from the ORFs having the nucleotide sequence represented by SEQ ID NO: 2820.

[3309] The probes having the nucleotide sequence represented by SEQ ID NOS: 37127, 37128, 37129, 37130, 37131, 37132, 37133, 37134, 37135, 37136, 37137 were selected from the ORFs having the nucleotide sequence represented by SEQ ID NO: 2821.

[3310] The probes having the nucleotide sequence represented by SEQ ID NOS: 37138, 37139, 37140, 37141, 37142, 37143, 37144, 37145, 37146, 37147, 37148 were selected from the ORFs having the nucleotide sequence represented by SEQ ID NO: 2822.

[3311] The probes having the nucleotide sequence represented by SEQ ID NOS: 37149, 37150, 37151, 37152, 37153, 37154, 37155, 37156, 37157, 37158, 37159 were selected from the ORFs having the nucleotide sequence represented by SEQ ID NO: 2823.

[3312] The probes having the nucleotide sequence represented by SEQ ID NOS: 37160, 37161, 37162, 37163, 37164, 37165, 37166, 37167, 37168, 37169, 37170 were selected from the ORFs having the nucleotide sequence represented by SEQ ID NO: 2824.

[3313] The probes having the nucleotide sequence represented by SEQ ID NOS: 37171, 37172, 37173, 37174, 37175, 37176, 37177, 37178, 37179, 37180, 37181 were selected from the ORFs having the nucleotide sequence represented by SEQ ID NO: 2825.

[3314] The probes having the nucleotide sequence represented by SEQ ID NOS: 37182, 37183, 37184, 37185, 37186, 37187, 37188, 37189, 37190, 37191, 37192 were selected from the ORFs having the nucleotide sequence represented by SEQ ID NO: 2826.

[3315] The probes having the nucleotide sequence represented by SEQ ID NOS: 37193, 37194, 37195, 37196, 37197, 37198, 37199, 37200, 37201, 37202, 37203 were selected from the ORFs having the nucleotide sequence represented by SEQ ID NO: 2827.

[3316] The probes having the nucleotide sequence represented by SEQ ID NOS: 37204, 37205, 37206, 37207, 37208, 37209, 37210, 37211, 37212, 37213, 37214 were selected from the ORFs having the nucleotide sequence represented by SEQ ID NO: 2828.

[3317] The probes having the nucleotide sequence represented by SEQ ID NOS: 37215, 37216, 37217, 37218, 37219, 37220, 37221, 37222, 37223, 37224, 37225 were selected from the ORFs having the nucleotide sequence represented by SEQ ID NO: 2829.

[3318] The probes having the nucleotide sequence represented by SEQ ID NOS: 37226, 37227, 37228, 37229, 37230, 37231, 37232, 37233, 37234, 37235, 37236 were selected from the ORFs having the nucleotide sequence represented by SEQ ID NO: 2830.

[3319] The probes having the nucleotide sequence represented by SEQ ID NOS: 37237, 37238, 37239, 37240, 37241, 37242, 37243, 37244, 37245, 37246, 37247 were selected from the ORFs having the nucleotide sequence represented by SEQ ID NO: 2831.

[3320] The probes having the nucleotide sequence represented by SEQ ID NOS: 37248, 37249, 37250, 37251, 37252, 37253, 37254, 37255, 37256, 37257, 37258 were selected from the ORFs having the nucleotide sequence represented by SEQ ID NO: 2832.

[3321] The probes having the nucleotide sequence represented by SEQ ID NOS: 37259, 37260, 37261, 37262, 37263, 37264, 37265, 37266, 37267, 37268, 37269 were selected from the ORFs having the nucleotide sequence represented by SEQ ID NO: 2833.

[3322] The probes having the nucleotide sequence represented by SEQ ID NOS: 37270, 37271, 37272, 37273, 37274, 37275, 37276, 37277, 37278, 37279, 37280 were selected from the ORFs having the nucleotide sequence represented by SEQ ID NO: 2834.

[3323] The probes having the nucleotide sequence represented by SEQ ID NOS: 37281, 37282, 37283, 37284, 37285, 37286, 37287, 37288, 37289, 37290, 37291 were selected from the ORFs having the nucleotide sequence represented by SEQ ID NO: 2835.

[3324] The probes having the nucleotide sequence represented by SEQ ID NOS: 37292, 37293, 37294, 37295, 37296, 37297, 37298, 37299, 37300, 37301, 37302 were selected from the ORFs having the nucleotide sequence represented by SEQ ID NO: 2836.

[3325] The probes having the nucleotide sequence represented by SEQ ID NOS: 37303, 37304, 37305, 37306, 37307, 37308, 37309, 37310, 37311, 37312, 37313 were selected from the ORFs having the nucleotide sequence represented by SEQ ID NO: 2837.

[3326] The probes having the nucleotide sequence represented by SEQ ID NOS: 37314, 37315, 37316, 37317, 37318, 37319, 37320, 37321, 37322, 37323, 37324 were selected from the ORFs having the nucleotide sequence represented by SEQ ID NO: 2838.

[3327] The probes having the nucleotide sequence represented by SEQ ID NOS: 37325, 37326, 37327, 37328, 37329, 37330, 37331, 37332, 37333, 37334, 37335 were selected from the ORFs having the nucleotide sequence represented by SEQ ID NO: 2839.

[3328] The probes having the nucleotide sequence represented by SEQ ID NOS: 37336, 37337, 37338, 37339, 37340, 37341, 37342, 37343, 37344, 37345, 37346 were selected from the ORFs having the nucleotide sequence represented by SEQ ID NO: 2840.

[3329] The probes having the nucleotide sequence represented by SEQ ID NOS: 37347, 37348, 37349, 37350, 37351, 37352, 37353, 37354, 37355, 37356, 37357 were selected from the ORFs having the nucleotide sequence represented by SEQ ID NO: 2841.

[3330] The probes having the nucleotide sequence represented by SEQ ID NOS: 37358, 37359, 37360, 37361, 37362, 37363, 37364, 37365, 37366, 37367, 37368 were selected from the ORFs having the nucleotide sequence represented by SEQ ID NO: 2842.

[3331] The probes having the nucleotide sequence represented by SEQ ID NOS: 37369, 37370, 37371, 37372, 37373, 37374, 37375, 37376, 37377, 37378, 37379 were selected from the ORFs having the nucleotide sequence represented by SEQ ID NO: 2843.

[3332] The probes having the nucleotide sequence represented by SEQ ID NOS: 37380, 37381, 37382, 37383, 37384, 37385, 37386, 37387, 37388, 37389, 37390 were selected from the ORFs having the nucleotide sequence represented by SEQ ID NO: 2844.

[3333] The probes having the nucleotide sequence represented by SEQ ID NOS: 37391, 37392, 37393, 37394, 37395, 37396, 37397, 37398, 37399, 37400, 37401 were selected from the ORFs having the nucleotide sequence represented by SEQ ID NO: 2845.

[3334] The probes having the nucleotide sequence represented by SEQ ID NOS: 37402, 37403, 37404, 37405, 37406, 37407, 37408, 37409, 37410, 37411, 37412 were selected from the ORFs having the nucleotide sequence represented by SEQ ID NO: 2846.

[3335] The probes having the nucleotide sequence represented by SEQ ID NOS: 37413, 37414, 37415, 37416, 37417, 37418, 37419, 37420, 37421, 37422, 37423 were selected from the ORFs having the nucleotide sequence represented by SEQ ID NO: 2847.

[3336] The probes having the nucleotide sequence represented by SEQ ID NOS: 37424, 37425, 37426, 37427, 37428, 37429, 37430, 37431, 37432, 37433, 37434 were selected from the ORFs having the nucleotide sequence represented by SEQ ID NO: 2848.

[3337] The probes having the nucleotide sequence represented by SEQ ID NOS: 37435, 37436, 37437, 37438, 37439, 37440, 37441, 37442, 37443, 37444, 37445 were selected from the ORFs having the nucleotide sequence represented by SEQ ID NO: 2849.

[3338] The probes having the nucleotide sequence represented by SEQ ID NOS: 37446, 37447, 37448, 37449, 37450, 37451, 37452, 37453, 37454, 37455, 37456 were selected from the ORFs having the nucleotide sequence represented by SEQ ID NO: 2850.

[3339] The probes having the nucleotide sequence represented by SEQ ID NOS: 37457, 37458, 37459, 37460, 37461, 37462, 37463, 37464, 37465, 37466, 37467 were selected from the ORFs having the nucleotide sequence represented by SEQ ID NO: 2851.

[3340] The probes having the nucleotide sequence represented by SEQ ID NOS: 37468, 37469, 37470, 37471, 37472, 37473, 37474, 37475, 37476, 37477, 37478 were selected from the ORFs having the nucleotide sequence represented by SEQ ID NO: 2852.

[3341] The probes having the nucleotide sequence represented by SEQ ID NOS: 37479, 37480, 37481, 37482, 37483, 37484, 37485, 37486, 37487, 37488, 37489 were selected from the ORFs having the nucleotide sequence represented by SEQ ID NO: 2853.

[3342] The probes having the nucleotide sequence represented by SEQ ID NOS: 37490, 37491, 37492, 37493, 37494, 37495, 37496, 37497, 37498, 37499, 37500 were selected from the ORFs having the nucleotide sequence represented by SEQ ID NO: 2854.

[3343] The probes having the nucleotide sequence represented by SEQ ID NOS: 37501, 37502, 37503, 37504, 37505, 37506, 37507, 37508, 37509, 37510, 37511 were selected from the ORFs having the nucleotide sequence represented by SEQ ID NO: 2855.

[3344] The probes having the nucleotide sequence represented by SEQ ID NOS: 37512, 37513, 37514, 37515, 37516, 37517, 37518, 37519, 37520, 37521, 37522 were selected from the ORFs having the nucleotide sequence represented by SEQ ID. NO: 2856.

[3345] The probes having the nucleotide sequence represented by SEQ ID NOS: 37523, 37524, 37525, 37526, 37527, 37528, 37529, 37530, 37531, 37532, 37533 were selected from the ORFs having the nucleotide sequence represented by SEQ ID NO: 2857.

[3346] The probes having the nucleotide sequence represented by SEQ ID NOS: 37534, 37535, 37536, 37537, 37538, 37539, 37540, 37541, 37542, 37543, 37544 were selected from the ORFs having the nucleotide sequence represented by SEQ ID NO: 2858.

[3347] The probes having the nucleotide sequence represented by SEQ ID NOS: 37545, 37546, 37547, 37548, 37549, 37550, 37551, 37552, 37553, 37554, 37555 were selected from the ORFs having the nucleotide sequence represented by SEQ ID NO: 2859.

[3348] The probes having the nucleotide sequence represented by SEQ ID NOS: 37556, 37557, 37558, 37559, 37560, 37561, 37562, 37563, 37564, 37565, 37566 were selected from the ORFs having the nucleotide sequence represented by SEQ ID NO: 2860.

[3349] The probes having the nucleotide sequence represented by SEQ ID NOS: 37567, 37568, 37569, 37570, 37571, 37572, 37573, 37574, 37575, 37576, 37577 were selected from the ORFs having the nucleotide sequence represented by SEQ ID NO: 2861.

[3350] The probes having the nucleotide sequence represented by SEQ ID NOS: 37578, 37579, 37580, 37581, 37582, 37583, 37584, 37585, 37586, 37587, 37588 were selected from the ORFs having the nucleotide sequence represented by SEQ ID NO: 2862.

[3351] The probes having the nucleotide sequence represented by SEQ ID NOS: 37589, 37590, 37591, 37592, 37593, 37594, 37595, 37596, 37597, 37598, 37599 were selected from the ORFs having the nucleotide sequence represented by SEQ ID NO: 2863.

[3352] The probes having the nucleotide sequence represented by SEQ ID NOS: 37600, 37601, 37602, 37603, 37604, 37605, 37606, 37607, 37608, 37609, 37610 were selected from the ORFs having the nucleotide sequence represented by SEQ ID NO: 2864.

[3353] The probes having the nucleotide sequence represented by SEQ ID NOS: 37611, 37612, 37613, 37614, 37615, 37616, 37617, 37618, 37619, 37620, 37621 were selected from the ORFs having the nucleotide sequence represented by SEQ ID NO: 2865.

[3354] The probes having the nucleotide sequence represented by SEQ ID NOS: 37622, 37623, 37624, 37625, 37626, 37627, 37628, 37629, 37630, 37631, 37632 were selected from the ORFs having the nucleotide sequence represented by SEQ ID NO: 2866.

[3355] The probes having the nucleotide sequence represented by SEQ ID NOS: 37633, 37634, 37635, 37636, 37637, 37638, 37639, 37640, 37641, 37642, 37643 were selected from the ORFs having the nucleotide sequence represented by SEQ ID NO: 2867.

[3356] The probes having the nucleotide sequence represented by SEQ ID NOS: 37644, 37645, 37646, 37647, 37648, 37649, 37650, 37651, 37652, 37653, 37654 were selected from the ORFs having the nucleotide sequence represented by SEQ ID NO: 2868.

[3357] The probes having the nucleotide sequence represented by SEQ ID NOS: 37655, 37656, 37657, 37658, 37659, 37660, 37661, 37662, 37663, 37664, 37665 were selected from the ORFs having the nucleotide sequence represented by SEQ ID NO: 2869.

[3358] The probes having the nucleotide sequence represented by SEQ ID NOS: 37666, 37667, 37668, 37669, 37670, 37671, 37672, 37673, 37674, 37675, 37676 were selected from the ORFs having the nucleotide sequence represented by SEQ ID NO: 2870.

[3359] The probes having the nucleotide sequence represented by SEQ ID NOS: 37677, 37678, 37679, 37680, 37681, 37682, 37683, 37684, 37685, 37686, 37687 were selected from the ORFs having the nucleotide sequence represented by SEQ ID NO: 2871.

[3360] The probes having the nucleotide sequence represented by SEQ ID NOS: 37688, 37689, 37690, 37691, 37692, 37693, 37694, 37695, 37696, 37697, 37698 were selected from the ORFs having the nucleotide sequence represented by SEQ ID NO: 2872.

[3361] The probes having the nucleotide sequence represented by SEQ ID NOS: 37699, 37700, 37701, 37702, 37703, 37704, 37705, 37706, 37707, 37708, 37709 were selected from the ORFs having the nucleotide sequence represented by SEQ ID NO: 2873.

[3362] The probes having the nucleotide sequence represented by SEQ ID NOS: 37710, 37711, 37712, 37713, 37714, 37715, 37716, 37717, 37718, 37719, 37720 were selected from the ORFs having the nucleotide sequence represented by SEQ ID NO: 2874.

[3363] The probes having the nucleotide sequence represented by SEQ ID NOS: 37721, 37722, 37723, 37724, 37725, 37726, 37727, 37728, 37729, 37730, 37731 were selected from the ORFs having the nucleotide sequence represented by SEQ ID NO: 2875.

[3364] The probes having the nucleotide sequence represented by SEQ ID NOS: 37732, 37733, 37734, 37735, 37736, 37737, 37738, 37739, 37740, 37741, 37742 were selected from the ORFs having the nucleotide sequence represented by SEQ ID NO: 2876.

[3365] The probes having the nucleotide sequence represented by SEQ ID NOS: 37743, 37744, 37745, 37746, 37747, 37748, 37749, 37750, 37751, 37752, 37753 were selected from the ORFs having the nucleotide sequence represented by SEQ ID NO: 2877.

[3366] The probes having the nucleotide sequence represented by SEQ ID NOS: 37754, 37755, 37756, 37757, 37758, 37759, 37760, 37761, 37762, 37763, 37764 were selected from the ORFs having the nucleotide sequence represented by SEQ ID NO: 2878.

[3367] The probes having the nucleotide sequence represented by SEQ ID NOS: 37765, 37766, 37767, 37768, 37769, 37770, 37771, 37772, 37773, 37774, 37775 were selected from the ORFs having the nucleotide sequence represented by SEQ ID NO: 2879.

[3368] The probes having the nucleotide sequence represented by SEQ ID NOS: 37776, 37777, 37778, 37779, 37780, 37781, 37782, 37783, 37784, 37785, 37786 were selected from the ORFs having the nucleotide sequence represented by SEQ ID NO: 2880.

[3369] The probes having the nucleotide sequence represented by SEQ ID NOS: 37787, 37788, 37789, 37790, 37791, 37792, 37793, 37794, 37795, 37796, 37797 were selected from the ORFs having the nucleotide sequence represented by SEQ ID NO: 2881.

[3370] The probes having the nucleotide sequence represented by SEQ ID NOS: 37798, 37799, 37800, 37801, 37802, 37803, 37804, 37805, 37806, 37807, 37808 were selected from the ORFs having the nucleotide sequence represented by SEQ ID NO: 2882.

[3371] The probes having the nucleotide sequence represented by SEQ ID NOS: 37809, 37810, 37811, 37812, 37813, 37814, 37815, 37816, 37817, 37818, 37819 were selected from the ORFs having the nucleotide sequence represented by SEQ ID NO: 2883.

[3372] The probes having the nucleotide sequence represented by SEQ ID NOS: 37820, 37821, 37822, 37823, 37824, 37825, 37826, 37827, 37828, 37829, 37830 were selected from the ORFs having the nucleotide sequence represented by SEQ ID NO: 2884.

[3373] The probes having the nucleotide sequence represented by SEQ ID NOS: 37831, 37832, 37833, 37834, 37835, 37836, 37837, 37838, 37839, 37840, 37841 were selected from the ORFs having the nucleotide sequence represented by SEQ ID NO: 2885.

[3374] The probes having the nucleotide sequence represented by SEQ ID NOS: 37842, 37843, 37844, 37845, 37846, 37847, 37848, 37849, 37850, 37851, 37852 were selected from the ORFs having the nucleotide sequence represented by SEQ ID NO: 2886.

[3375] The probes having the nucleotide sequence represented by SEQ ID NOS: 37853, 37854, 37855, 37856, 37857, 37858, 37859, 37860, 37861, 37862, 37863 were selected from the ORFs having the nucleotide sequence represented by SEQ ID NO: 2887.

[3376] The probes having the nucleotide sequence represented by SEQ ID NOS: 37864, 37865, 37866, 37867, 37868, 37869, 37870, 37871, 37872, 37873, 37874 were selected from the ORFs having the nucleotide sequence represented by SEQ ID NO: 2888.

[3377] The probes having the nucleotide sequence represented by SEQ ID NOS: 37875, 37876, 37877, 37878, 37879, 37880, 37881, 37882, 37883, 37884, 37885 were selected from the ORFs having the nucleotide sequence represented by SEQ ID NO: 2889.

[3378] The probes having the nucleotide sequence represented by SEQ ID NOS: 37886, 37887, 37888, 37889, 37890, 37891, 37892, 37893, 37894, 37895, 37896 were selected from the ORFs having the nucleotide sequence represented by SEQ ID NO: 2890.

[3379] The probes having the nucleotide sequence represented by SEQ ID NOS: 37897, 37898, 37899, 37900, 37901, 37902, 37903, 37904, 37905, 37906, 37907 were selected from the ORFs having the nucleotide sequence represented by SEQ ID NO: 2891.

[3380] The probes having the nucleotide sequence represented by SEQ ID NOS: 37908, 37909, 37910, 37911, 37912, 37913, 37914, 37915, 37916, 37917, 37918 were selected from the ORFs having the nucleotide sequence represented by SEQ ID NO: 2892.

[3381] The probes having the nucleotide sequence represented by SEQ ID NOS: 37919, 37920, 37921, 37922, 37923, 37924, 37925, 37926, 37927, 37928, 37929 were selected from the ORFs having the nucleotide sequence represented by SEQ ID NO: 2893.

[3382] The probes having the nucleotide sequence represented by SEQ ID NOS: 37930, 37931, 37932, 37933, 37934, 37935, 37936, 37937, 37938, 37939, 37940 were selected from the ORFs having the nucleotide sequence represented by SEQ ID NO: 2894.

[3383] The probes having the nucleotide sequence represented by SEQ ID NOS: 37941, 37942, 37943, 37944, 37945, 37946, 37947, 37948, 37949, 37950, 37951 were selected from the ORFs having the nucleotide sequence represented by SEQ ID NO: 2895.

[3384] The probes having the nucleotide sequence represented by SEQ ID NOS: 37952, 37953, 37954, 37955, 37956, 37957, 37958, 37959, 37960, 37961, 37962 were selected from the ORFs having the nucleotide sequence represented by SEQ ID NO: 2896.

[3385] The probes having the nucleotide sequence represented by SEQ ID NOS: 37963, 37964, 37965, 37966, 37967, 37968, 37969, 37970, 37971, 37972, 37973, 37974, 37975, 37976, 37977, 37978, 37979, 37980, 37981, 37982, 37983, 37984 were selected from the ORFs having the nucleotide sequence represented by SEQ ID NO: 2897.

[3386] The probes having the nucleotide sequence represented by SEQ ID NOS: 37985, 37986, 37987, 37988, 37989, 37990, 37991, 37992, 37993, 37994, 37995 were selected from the ORFs having the nucleotide sequence represented by SEQ ID NO: 2898.

[3387] The probes having the nucleotide sequence represented by SEQ ID NOS: 37996, 37997, 37998, 37999, 38000, 38001, 38002, 38003, 38004, 38005, 38006 were selected from the ORFs having the nucleotide sequence represented by SEQ ID NO: 2899.

[3388] The probes having the nucleotide sequence represented by SEQ ID NOS: 38007, 38008, 38009, 38010, 38011, 38012, 38013, 38014, 38015, 38016, 38017 were selected from the ORFs having the nucleotide sequence represented by SEQ ID NO: 2900.

[3389] The probes having the nucleotide sequence represented by SEQ ID NOS: 38018, 38019, 38020, 38021, 38022, 38023, 38024, 38025, 38026, 38027, 38028 were selected from the ORFs having the nucleotide sequence represented by SEQ ID NO: 2901.

[3390] The probes having the nucleotide sequence represented by SEQ ID NOS: 38029, 38030, 38031, 38032, 38033, 38034, 38035, 38036, 38037, 38038, 38039 were selected from the ORFs having the nucleotide sequence represented by SEQ ID NO: 2902.

[3391] The probes having the nucleotide sequence represented by SEQ ID NOS: 38040, 38041, 38042, 38043, 38044, 38045, 38046, 38047, 38048, 38049, 38050 were selected from the ORFs having the nucleotide sequence represented by SEQ ID NO: 2903.

[3392] The probes having the nucleotide sequence represented by SEQ ID NOS: 38051, 38052, 38053, 38054, 38055, 38056, 38057, 38058, 38059, 38060, 38061 were selected from the ORFs having the nucleotide sequence represented by SEQ ID NO: 2904.

[3393] The probes having the nucleotide sequence represented by SEQ ID NOS: 38062, 38063, 38064, 38065, 38066, 38067, 38068, 38069, 38070, 38071, 38072 were selected from the ORFs having the nucleotide sequence represented by SEQ ID NO: 2905.

[3394] The probes having the nucleotide sequence represented by SEQ ID NOS: 38073, 38074, 38075, 38076, 38077, 38078, 38079, 38080, 38081, 38082, 38083 were selected from the ORFs having the nucleotide sequence represented by SEQ ID NO: 2906.

[3395] The probes having the nucleotide sequence represented by SEQ ID NOS: 38084, 38085, 38086, 38087, 38088, 38089, 38090, 38091, 38092, 38093, 38094 were selected from the ORFs having the nucleotide sequence represented by SEQ ID NO: 2907.

[3396] The probes having the nucleotide sequence represented by SEQ ID NOS: 38095, 38096, 38097, 38098, 38099, 38100, 38101, 38102, 38103, 38104, 38105 were selected from the ORFs having the nucleotide sequence represented by SEQ ID. NO: 2908.

[3397] The probes having the nucleotide sequence represented by SEQ ID NOS: 38106, 38107, 38108, 38109, 38110, 38111, 38112, 38113, 38114, 38115, 38116 were selected from the ORFs having the nucleotide sequence represented by SEQ ID NO: 2909.

[3398] The probes having the nucleotide sequence represented by SEQ ID NOS: 38117, 38118, 38119, 38120, 38121, 38122, 38123, 38124, 38125, 38126, 38127 were selected from the ORFs having the nucleotide sequence represented by SEQ ID NO: 2910.

[3399] The probes having the nucleotide sequence represented by SEQ ID NOS: 38128, 38129, 38130, 38131, 38132, 38133, 38134, 38135, 38136, 38137, 38138 were selected from the ORFs having the nucleotide sequence represented by SEQ ID NO: 2911.

[3400] The probes having the nucleotide sequence represented by SEQ ID NOS: 38139, 38140, 38141, 38142, 38143, 38144, 38145, 38146, 38147, 38148, 38149 were selected from the ORFs having the nucleotide sequence represented by SEQ ID NO: 2912.

[3401] The probes having the nucleotide sequence represented by SEQ ID NOS: 38150, 38151, 38152, 38153, 38154, 38155, 38156, 38157, 38158, 38159, 38160 were selected from the ORFs having the nucleotide sequence represented by SEQ ID NO: 2913.

[3402] The probes having the nucleotide sequence represented by SEQ ID NOS: 38161, 38162, 38163, 38164, 38165, 38166, 38167, 38168, 38169, 38170, 38171 were selected from the ORFs having the nucleotide sequence represented by SEQ ID NO: 2914.

[3403] The probes having the nucleotide sequence represented by SEQ ID NOS: 38172, 38173, 38174, 38175, 38176, 38177, 38178, 38179, 38180, 38181, 38182 were selected from the ORFs having the nucleotide sequence represented by SEQ ID NO: 2915.

[3404] The probes having the nucleotide sequence represented by SEQ ID NOS: 38183, 38184, 38185, 38186, 38187, 38188, 38189, 38190, 38191, 38192, 38193 were selected from the ORFs having the nucleotide sequence represented by SEQ ID NO: 2916.

[3405] The probes having the nucleotide sequence represented by SEQ ID NOS: 38194, 38195, 38196, 38197, 38198, 38199, 38200, 38201, 38202, 38203, 38204 were selected from the ORFs having the nucleotide sequence represented by SEQ ID NO: 2917.

[3406] The probes having the nucleotide sequence represented by SEQ ID NOS: 38205, 38206, 38207, 38208, 38209, 38210, 38211, 38212, 38213, 38214, 38215 were selected from the ORFs having the nucleotide sequence represented by SEQ ID NO: 2918.

[3407] The probes having the nucleotide sequence represented by SEQ ID NOS: 38216, 38217, 38218, 38219, 38220, 38221, 38222, 38223, 38224, 38225, 38226 were selected from the ORFs having the nucleotide sequence represented by SEQ ID NO: 2919.

[3408] The probes having the nucleotide sequence represented by SEQ ID NOS: 38227, 38228, 38229, 38230, 38231, 38232, 38233, 38234, 38235, 38236, 38237 were selected from the ORFs having the nucleotide sequence represented by SEQ ID NO: 2920.

[3409] The probes having the nucleotide sequence represented by SEQ ID NOS: 38238, 38239, 38240, 38241, 38242, 38243, 38244, 38245, 38246, 38247, 38248 were selected from the ORFs having the nucleotide sequence represented by SEQ ID NO: 2921.

[3410] The probes having the nucleotide sequence represented by SEQ ID NOS: 38249, 38250, 38251, 38252, 38253, 38254, 38255, 38256, 38257, 38258, 38259 were selected from the ORFs having the nucleotide sequence represented by SEQ ID NO: 2922.

[3411] The probes having the nucleotide sequence represented by SEQ ID NOS: 38260, 38261, 38262, 38263, 38264, 38265, 38266, 38267, 38268, 38269, 38270 were selected from the ORFs having the nucleotide sequence represented by SEQ ID NO: 2923.

[3412] The probes having the nucleotide sequence represented by SEQ ID NOS: 38271, 38272, 38273, 38274, 38275, 38276, 38277, 38278, 38279, 38280, 38281 were selected from the ORFs having the nucleotide sequence represented by SEQ ID NO: 2924.

[3413] The probes having the nucleotide sequence represented by SEQ ID NOS: 38282, 38283, 38284, 38285, 38286, 38287, 38288, 38289, 38290, 38291, 38292 were selected from the ORFs having the nucleotide sequence represented by SEQ ID NO: 2925.

[3414] The probes having the nucleotide sequence represented by SEQ ID NOS: 38293, 38294, 38295, 38296, 38297, 38298, 38299, 38300, 38301, 38302, 38303 were selected from the ORFs having the nucleotide sequence represented by SEQ ID NO: 2926.

[3415] The probes having the nucleotide sequence represented by SEQ ID NOS: 38304, 38305, 38306, 38307, 38308, 38309, 38310, 38311, 38312, 38313, 38314 were selected from the ORFs having the nucleotide sequence represented by SEQ ID NO: 2927.

[3416] The probes having the nucleotide sequence represented by SEQ ID NOS: 38315, 38316, 38317, 38318, 38319, 38320, 38321, 38322, 38323, 38324, 38325 were selected from the ORFs having the nucleotide sequence represented by SEQ ID NO: 2928.

[3417] The probes having the nucleotide sequence represented by SEQ ID NOS: 38326, 38327, 38328, 38329, 38330, 38331, 38332, 38333, 38334, 38335, 38336 were selected from the ORFs having the nucleotide sequence represented by SEQ ID NO: 2929.

[3418] The probes having the nucleotide sequence represented by SEQ ID NOS: 38337, 38338, 38339, 38340, 38341, 38342, 38343, 38344, 38345, 38346, 38347 were selected from the ORFs having the nucleotide sequence represented by SEQ ID NO: 2930.

[3419] The probes having the nucleotide sequence represented by SEQ ID NOS: 38348, 38349, 38350, 38351, 38352, 38353, 38354, 38355, 38356, 38357, 38358 were selected from the ORFs having the nucleotide sequence represented by SEQ ID NO: 2931.

[3420] The probes having the nucleotide sequence represented by SEQ ID NOS: 38359, 38360, 38361, 38362, 38363, 38364, 38365, 38366, 38367, 38368, 38369 were selected from the ORFs having the nucleotide sequence represented by SEQ ID NO: 2932.

[3421] The probes having the nucleotide sequence represented by SEQ ID NOS: 38370, 38371, 38372, 38373, 38374, 38375, 38376, 38377, 38378, 38379, 38380 were selected from the ORFs having the nucleotide sequence represented by SEQ ID NO: 2933.

[3422] The probes having the nucleotide sequence represented by SEQ ID NOS: 38381, 38382, 38383, 38384, 38385, 38386, 38387, 38388, 38389, 38390, 38391 were selected from the ORFs having the nucleotide sequence represented by SEQ ID NO: 2934.

[3423] The probes having the nucleotide sequence represented by SEQ ID NOS: 38392, 38393, 38394, 38395, 38396, 38397, 38398, 38399, 38400, 38401, 38402 were selected from the ORFs having the nucleotide sequence represented by SEQ ID NO: 2935.

[3424] The probes having the nucleotide sequence represented by. SEQ ID NOS: 38403, 38404, 38405, 38406, 38407, 38408, 38409, 38410, 38411, 38412, 38413 were selected from the ORFs having the nucleotide sequence represented by SEQ ID NO: 2936.

[3425] The probes having the nucleotide sequence represented by SEQ ID NOS: 38414, 38415, 38416, 38417, 38418, 38419, 38420, 38421, 38422, 38423, 38424 were selected from the ORFs having the nucleotide sequence represented by SEQ ID NO: 2937.

[3426] The probes having the nucleotide sequence represented by SEQ ID NOS: 38425, 38426, 38427, 38428, 38429, 38430, 38431, 38432, 38433, 38434, 38435 were selected from the ORFs having the nucleotide sequence represented by SEQ ID NO: 2938.

[3427] The probes having the nucleotide sequence represented by SEQ ID NOS: 38436, 38437, 38438, 38439, 38440, 38441, 38442, 38443, 38444, 38445, 38446 were selected from the ORFs having the nucleotide sequence represented by SEQ ID NO: 2939.

[3428] The probes having the nucleotide sequence represented by SEQ ID NOS: 38447, 38448, 38449, 38450, 38451, 38452, 38453, 38454, 38455, 38456, 38457 were selected from the ORFs having the nucleotide sequence represented by SEQ ID NO: 2940.

[3429] The probes having the nucleotide sequence represented by SEQ ID NOS: 38458, 38459, 38460, 38461, 38462, 38463, 38464, 38465, 38466, 38467, 38468 were selected from the ORFs having the nucleotide sequence represented by SEQ ID NO: 2941.

[3430] The probes having the nucleotide sequence represented by SEQ ID NOS: 38469, 38470, 38471, 38472, 38473, 38474, 38475, 38476, 38477, 38478, 38479 were selected from the ORFs having the nucleotide sequence represented by SEQ ID NO: 2942.

[3431] The probes having the nucleotide sequence represented by SEQ ID NOS: 38480, 38481, 38482, 38483, 38484, 38485, 38486, 38487, 38488, 38489, 38490 were selected from the ORFs having the nucleotide sequence represented by SEQ ID NO: 2943.

[3432] The probes having the nucleotide sequence represented by SEQ ID NOS: 38491, 38492, 38493, 38494, 38495, 38496, 38497, 38498, 38499, 38500, 38501 were selected from the ORFs having the nucleotide sequence represented by SEQ ID NO: 2944.

[3433] The probes having the nucleotide sequence represented by SEQ ID NOS: 38502, 38503, 38504, 38505, 38506, 38507, 38508, 38509, 38510, 38511, 38512 were selected from the ORFs having the nucleotide sequence represented by SEQ ID NO: 2945.

[3434] The probes having the nucleotide sequence represented by SEQ ID NOS: 38513, 38514, 38515, 38516, 38517, 38518, 38519, 38520, 38521, 38522, 38523 were selected from the ORFs having the nucleotide sequence represented by SEQ ID NO: 2946.

[3435] The probes having the nucleotide sequence represented by SEQ ID NOS: 38524, 38525, 38526, 38527, 38528, 38529, 38530, 38531, 38532, 38533, 38534 were selected from the ORFs having the nucleotide sequence represented by SEQ ID NO: 2947.

[3436] The probes having the nucleotide sequence represented by SEQ ID NOS: 38535, 38536, 38537, 38538, 38539, 38540, 38541, 38542, 38543, 38544, 38545 were selected from the ORFs having the nucleotide sequence represented by SEQ ID NO: 2948.

[3437] The probes having the nucleotide sequence represented by SEQ ID NOS: 38546, 38547, 38548, 38549, 38550, 38551, 38552, 38553, 38554, 38555, 38556 were selected from the ORFs having the nucleotide sequence represented by SEQ ID NO: 2949.

[3438] The probes having the nucleotide sequence represented by SEQ ID NOS: 38557, 38558, 38559, 38560, 38561, 38562, 38563, 38564, 38565, 38566, 38567 were selected from the ORFs having the nucleotide sequence represented by SEQ ID NO: 2950.

[3439] The probes having the nucleotide sequence represented by SEQ ID NOS: 38568, 38569, 38570, 38571, 38572, 38573, 38574, 38575, 38576, 38577, 38578 were selected from the ORFs having the nucleotide sequence represented by SEQ ID NO: 2951.

[3440] The probes having the nucleotide sequence represented by SEQ ID NOS: 38579, 38580, 38581, 38582, 38583, 38584, 38585, 38586, 38587, 38588, 38589 were selected from the ORFs having the nucleotide sequence represented by SEQ ID NO: 2952.

[3441] The probes having the nucleotide sequence represented by SEQ ID NOS: 38590, 38591, 38592, 38593, 38594, 38595, 38596, 38597, 38598, 38599, 38600 were selected from the ORFs having the nucleotide sequence represented by SEQ ID NO: 2953.

[3442] The probes having the nucleotide sequence represented by SEQ ID NOS: 38601, 38602, 38603, 38604, 38605, 38606, 38607, 38608, 38609, 38610, 38611 were selected from the ORFs having the nucleotide sequence represented by SEQ ID NO: 2954.

[3443] The probes having the nucleotide sequence represented by SEQ ID NOS: 38612, 38613, 38614, 38615, 38616, 38617, 38618, 38619, 38620, 38621, 38622 were selected from the ORFs having the nucleotide sequence represented by SEQ ID NO: 2955.

[3444] The probes having the nucleotide sequence represented by SEQ ID NOS: 38623, 38624, 38625, 38626, 38627, 38628, 38629, 38630, 38631, 38632, 38633 were selected from the ORFs having the nucleotide sequence represented by SEQ ID NO: 2956.

[3445] The probes having the nucleotide sequence represented by SEQ ID NOS: 38634, 38635, 38636, 38637, 38638, 38639, 38640, 38641, 38642, 38643, 38644 were selected from the ORFs having the nucleotide sequence represented by SEQ ID NO: 2957.

[3446] The probes having the nucleotide sequence represented by SEQ ID NOS: 38645, 38646, 38647, 38648, 38649, 38650, 38651, 38652, 38653, 38654, 38655 were selected from the ORFs having the nucleotide sequence represented by SEQ ID NO: 2958.

[3447] The probes having the nucleotide sequence represented by SEQ ID NOS: 38656, 38657, 38658, 38659, 38660, 38661, 38662, 38663, 38664, 38665, 38666 were selected from the ORFs having the nucleotide sequence represented by SEQ ID NO: 2959.

[3448] The probes having the nucleotide sequence represented by SEQ ID NOS: 38667, 38668, 38669, 38670, 38671, 38672, 38673, 38674, 38675, 38676, 38677 were selected from the ORFs having the nucleotide sequence represented by SEQ ID NO: 2960.

[3449] The probes having the nucleotide sequence represented by SEQ ID NOS: 38678, 38679, 38680, 38681, 38682, 38683, 38684, 38685, 38686, 38687, 38688 were selected from the ORFs having the nucleotide sequence represented by SEQ ID NO: 2961.

[3450] The probes having the nucleotide sequence represented by SEQ ID NOS: 38689, 38690, 38691, 38692, 38693, 38694, 38695, 38696, 38697, 38698, 38699 were selected from the ORFs having the nucleotide sequence represented by SEQ ID NO: 2962.

[3451] The probes having the nucleotide sequence represented by SEQ ID NOS: 38700, 38701, 38702, 38703, 38704, 38705, 38706, 38707, 38708, 38709, 38710 were selected from the ORFs having the nucleotide sequence represented by SEQ ID NO: 2963.

[3452] The probes having the nucleotide sequence represented by SEQ ID NOS: 38711, 38712, 38713, 38714, 38715, 38716, 38717, 38718, 38719, 38720, 38721 were selected from the ORFs having the nucleotide sequence represented by SEQ ID NO: 2964.

[3453] The probes having the nucleotide sequence represented by SEQ ID NOS: 38722, 38723, 38724, 38725, 38726, 38727, 38728, 38729, 38730, 38731, 38732 were selected from the ORFs having the nucleotide sequence represented by SEQ ID NO: 2965.

[3454] The probes having the nucleotide sequence represented by SEQ ID NOS: 38733, 38734, 38735, 38736, 38737, 38738, 38739, 38740, 38741, 38742, 38743 were selected from the ORFs having the nucleotide sequence represented by SEQ ID NO: 2966.

[3455] The probes having the nucleotide sequence represented by SEQ ID NOS: 38744, 38745, 38746, 38747, 38748, 38749, 38750, 38751, 38752, 38753, 38754 were selected from the ORFs having the nucleotide sequence represented by SEQ ID NO: 2967.

[3456] The probes having the nucleotide sequence represented by SEQ ID NOS: 38755, 38756, 38757, 38758, 38759, 38760, 38761, 38762, 38763, 38764, 38765 were selected from the ORFs having the nucleotide sequence represented by SEQ ID NO: 2968.

[3457] The probes having the nucleotide sequence represented by SEQ ID NOS: 38766, 38767, 38768, 38769, 38770, 38771, 38772, 38773, 38774, 38775, 38776 were selected from the ORFs having the nucleotide sequence represented by SEQ ID NO: 2969.

[3458] The probes having the nucleotide sequence represented by SEQ ID NOS: 38777, 38778, 38779, 38780, 38781, 38782, 38783, 38784, 38785, 38786, 38787 were selected from the ORFs having the nucleotide sequence represented by SEQ ID NO: 2970.

[3459] The probes having the nucleotide sequence represented by SEQ ID NOS: 38788, 38789, 38790, 38791, 38792, 38793, 38794, 38795, 38796, 38797, 38798 were selected from the ORFs having the nucleotide sequence represented by SEQ ID NO: 2971.

[3460] The probes having the nucleotide sequence represented by SEQ ID NOS: 38799, 38800, 38801, 38802, 38803, 38804, 38805, 38806, 38807, 38808, 38809 were selected from the ORFs having the nucleotide sequence represented by SEQ ID NO: 2972.

[3461] The probes having the nucleotide sequence represented by SEQ ID NOS: 38810, 38811, 38812, 38813, 38814, 38815, 38816, 38817, 38818, 38819, 38820 were selected from the ORFs having the nucleotide sequence represented by SEQ ID NO: 2973.

[3462] The probes having the nucleotide sequence represented by SEQ ID NOS: 38821, 38822, 38823, 38824, 38825, 38826, 38827, 38828, 38829, 38830, 38831 were selected from the ORFs having the nucleotide sequence represented by SEQ ID NO: 2974.

[3463] The probes having the nucleotide sequence represented by SEQ ID NOS: 38832, 38833, 38834, 38835, 38836, 38837, 38838, 38839, 38840, 38841, 38842 were selected from the ORFs having the nucleotide sequence represented by SEQ ID NO: 2975.

[3464] The probes having the nucleotide sequence represented by SEQ ID NOS: 38843, 38844, 38845, 38846, 38847, 38848, 38849, 38850, 38851, 38852, 38853 were selected from the ORFs having the nucleotide sequence represented by SEQ ID NO: 2976.

[3465] The probes having the nucleotide sequence represented by SEQ ID NOS: 38854, 38855, 38856, 38857, 38858, 38859, 38860, 38861, 38862, 38863, 38864 were selected from the ORFs having the nucleotide sequence represented by SEQ ID NO: 2977.

[3466] The probes having the nucleotide sequence represented by SEQ ID NOS: 38865, 38866, 38867, 38868, 38869, 38870, 38871, 38872, 38873, 38874, 38875 were selected from the ORFs having the nucleotide sequence represented by SEQ ID NO: 2978.

[3467] The probes having the nucleotide sequence represented by SEQ ID NOS: 38876, 38877, 38878, 38879, 38880, 38881, 38882, 38883, 38884, 38885, 38886 were selected from the ORFs having the nucleotide sequence represented by SEQ ID NO: 2979.

[3468] The probes having the nucleotide sequence represented by SEQ ID NOS: 38887, 38888, 38889, 38890, 38891, 38892, 38893, 38894, 38895, 38896, 38897 were selected from the ORFs having the nucleotide sequence represented by SEQ ID NO: 2980.

[3469] The probes having the nucleotide sequence represented by SEQ ID NOS: 38898, 38899, 38900, 38901, 38902, 38903, 38904, 38905, 38906, 38907, 38908 were selected from the ORFs having the nucleotide sequence represented by SEQ ID NO: 2981.

[3470] The probes having the nucleotide sequence represented by SEQ ID NOS: 38909, 38910, 38911, 38912, 38913, 38914, 38915, 38916, 38917, 38918, 38919 were selected from the ORFs having the nucleotide sequence represented by SEQ ID NO: 2982.

[3471] The probes having the nucleotide sequence represented by SEQ ID NOS: 38920, 38921, 38922, 38923, 38924, 38925, 38926, 38927, 38928, 38929, 38930 were selected from the ORFs having the nucleotide sequence represented by SEQ ID NO: 2983.

[3472] The probes having the nucleotide sequence represented by SEQ ID NOS: 38931, 38932, 38933, 38934, 38935, 38936, 38937, 38938, 38939, 38940, 38941 were selected from the ORFs having the nucleotide sequence represented by SEQ ID NO: 2984.

[3473] The probes having the nucleotide sequence represented by SEQ ID NOS: 38942, 38943, 38944, 38945, 38946, 38947, 38948, 38949, 38950, 38951, 38952 were selected from the ORFs having the nucleotide sequence represented by SEQ ID NO: 2985.

[3474] The probes having the nucleotide sequence represented by SEQ ID NOS: 38953, 38954, 38955, 38956, 38957, 38958, 38959, 38960, 38961, 38962, 38963 were selected from the ORFs having the nucleotide sequence represented by SEQ ID NO: 2986.

[3475] The probes having the nucleotide sequence represented by SEQ ID NOS: 38964, 38965, 38966, 38967, 38968, 38969, 38970, 38971, 38972, 38973, 38974 were selected from the ORFs having the nucleotide sequence represented by SEQ ID NO: 2987.

[3476] The probes having the nucleotide sequence represented by SEQ ID NOS: 38975, 38976, 38977, 38978, 38979, 38980, 38981, 38982, 38983, 38984, 38985 were selected from the ORFs having the nucleotide sequence represented by SEQ ID NO: 2988.

[3477] The probes having the nucleotide sequence represented by SEQ ID NOS: 38986, 38987, 38988, 38989, 38990, 38991, 38992, 38993, 38994, 38995, 38996 were selected from the ORFs having the nucleotide sequence represented by SEQ ID NO: 2989.

[3478] The probes having the nucleotide sequence represented by SEQ ID NOS: 38997, 38998, 38999, 39000, 39001, 39002, 39003, 39004, 39005, 39006, 39007 were selected from the ORFs having the nucleotide sequence represented by SEQ ID NO: 2990.

[3479] The probes having the nucleotide sequence represented by SEQ ID NOS: 39008, 39009, 39010, 39011, 39012, 39013, 39014, 39015, 39016, 39017, 39018 were selected from the ORFs having the nucleotide sequence represented by SEQ ID NO: 2991.

[3480] The probes having the nucleotide sequence represented by SEQ ID NOS: 39019, 39020, 39021, 39022, 39023, 39024, 39025, 39026, 39027, 39028, 39029 were selected from the ORFs having the nucleotide sequence represented by SEQ ID NO: 2992.

[3481] The probes having the nucleotide sequence represented by SEQ ID NOS: 39030, 39031, 39032, 39033, 39034, 39035, 39036, 39037, 39038, 39039, 39040 were selected from the ORFs having the nucleotide sequence represented by SEQ ID NO: 2993.

[3482] The probes having the nucleotide sequence represented by SEQ ID NOS: 39041, 39042, 39043, 39044, 39045, 39046, 39047, 39048, 39049, 39050, 39051 were selected from the ORFs having the nucleotide sequence represented by SEQ ID NO: 2994.

[3483] The probes having the nucleotide sequence represented by SEQ ID NOS: 39052, 39053, 39054, 39055, 39056, 39057, 39058, 39059, 39060, 39061, 39062 were selected from the ORFs having the nucleotide sequence represented by SEQ ID NO: 2995.

[3484] The probes having the nucleotide sequence represented by SEQ ID NOS: 39063, 39064, 39065, 39066, 39067, 39068, 39069, 39070, 39071, 39072, 39073 were selected from the ORFs having the nucleotide sequence represented by SEQ ID NO: 2996.

[3485] The probes having the nucleotide sequence represented by SEQ ID NOS: 39074, 39075, 39076, 39077, 39078, 39079, 39080, 39081, 39082, 39083, 39084 were selected from the ORFs having the nucleotide sequence represented by SEQ ID NO: 2997.

[3486] The probes having the nucleotide sequence represented by SEQ ID NOS: 39085, 39086, 39087, 39088, 39089, 39090, 39091, 39092, 39093, 39094, 39095 were selected from the ORFs having the nucleotide sequence represented by SEQ ID NO: 2998.

[3487] The probes having the nucleotide sequence represented by SEQ ID NOS: 39096, 39097, 39098, 39099, 39100, 39101, 39102, 39103, 39104, 39105, 39106 were selected from the ORFs having the nucleotide sequence represented by SEQ ID NO: 2999.

[3488] The probes having the nucleotide sequence represented by SEQ ID NOS: 39107, 39108, 39109, 39110, 39111, 39112, 39113, 39114, 39115, 39116, 39117 were selected from the ORFs having the nucleotide sequence represented by SEQ ID NO: 3000.

[3489] The probes having the nucleotide sequence represented by SEQ ID NOS: 39118, 39119, 39120, 39121, 39122, 39123, 39124, 39125, 39126, 39127, 39128 were selected from the ORFs having the nucleotide sequence represented by SEQ ID NO: 3001.

[3490] The probes having the nucleotide sequence represented by SEQ ID NOS: 39129, 39130, 39131, 39132, 39133, 39134, 39135, 39136, 39137, 39138, 39139 were selected from the ORFs having the nucleotide sequence represented by SEQ ID NO: 3002.

[3491] The probes having the nucleotide sequence represented by SEQ ID NOS: 39140, 39141, 39142, 39143, 39144, 39145, 39146, 39147, 39148, 39149, 39150 were selected from the ORFs having the nucleotide sequence represented by SEQ ID NO: 3003.

[3492] The probes having the nucleotide sequence represented by SEQ ID NOS: 39151, 39152, 39153, 39154, 39155, 39156, 39157, 39158, 39159, 39160, 39161 were selected from the ORFs having the nucleotide sequence represented by SEQ ID NO: 3004.

[3493] The probes having the nucleotide sequence represented by SEQ ID NOS: 39162, 39163, 39164, 39165, 39166, 39167, 39168, 39169, 39170, 39171, 39172 were selected from the ORFs having the nucleotide sequence represented by SEQ ID NO: 3005.

[3494] The probes having the nucleotide sequence represented by SEQ ID NOS: 39173, 39174, 39175, 39176, 39177, 39178, 39179, 39180, 39181, 39182, 39183 were selected from the ORFs having the nucleotide sequence represented by SEQ ID NO: 3006.

[3495] The probes having the nucleotide sequence represented by SEQ ID NOS: 39184, 39185, 39186, 39187, 39188, 39189, 39190, 39191, 39192, 39193, 39194 were selected from the ORFs having the nucleotide sequence represented by SEQ ID NO: 3007.

[3496] The probes having the nucleotide sequence represented by SEQ ID NOS: 39195, 39196, 39197, 39198, 39199, 39200, 39201, 39202, 39203, 39204, 39205 were selected from the ORFs having the nucleotide sequence represented by SEQ ID NO: 3008.

[3497] The probes having the nucleotide sequence represented by SEQ ID NOS: 39206, 39207, 39208, 39209, 39210, 39211, 39212, 39213, 39214, 39215, 39216 were selected from the ORFs having the nucleotide sequence represented by SEQ ID NO: 3009.

[3498] The probes having the nucleotide sequence represented by SEQ ID NOS: 39217, 39218, 39219, 39220, 39221, 39222, 39223, 39224, 39225, 39226, 39227 were selected from the ORFs having the nucleotide sequence represented by SEQ ID NO: 3010.

[3499] The probes having the nucleotide sequence represented by SEQ ID NOS: 39228, 39229, 39230, 39231, 39232, 39233, 39234, 39235, 39236, 39237, 39238 were selected from the ORFs having the nucleotide sequence represented by SEQ ID NO: 3011.

[3500] The probes having the nucleotide sequence represented by SEQ ID NOS: 39239, 39240, 39241, 39242, 39243, 39244, 39245, 39246, 39247, 39248, 39249 were selected from the ORFs having the nucleotide sequence represented by SEQ ID NO: 3012.

[3501] The probes having the nucleotide sequence represented by SEQ ID NOS: 39250, 39251, 39252, 39253, 39254, 39255, 39256, 39257, 39258, 39259, 39260 were selected from the ORFs having the nucleotide sequence represented by SEQ ID NO: 3013.

[3502] The probes having the nucleotide sequence represented by SEQ ID NOS: 39261, 39262, 39263, 39264, 39265, 39266, 39267, 39268, 39269, 39270, 39271 were selected from the ORFs having the nucleotide sequence represented by SEQ ID NO: 3014.

[3503] The probes having the nucleotide sequence represented by SEQ ID NOS: 39272, 39273, 39274, 39275, 39276, 39277, 39278, 39279, 39280, 39281, 39282 were selected from the ORFs having the nucleotide sequence represented by SEQ ID NO: 3015.

[3504] The probes having the nucleotide sequence represented by SEQ ID NOS: 39283, 39284, 39285, 39286, 39287, 39288, 39289, 39290, 39291, 39292, 39293 were selected from the ORFs having the nucleotide sequence represented by SEQ ID NO: 3016.

[3505] The probes having the nucleotide sequence represented by SEQ ID NOS: 39294, 39295, 39296, 39297, 39298, 39299, 39300, 39301, 39302, 39303, 39304 were selected from the ORFs having the nucleotide sequence represented by SEQ ID NO: 3017.

[3506] The probes having the nucleotide sequence represented by SEQ ID NOS: 39305, 39306, 39307, 39308, 39309, 39310, 39311, 39312, 39313, 39314, 39315 were selected from the ORFs having the nucleotide sequence represented by SEQ ID NO: 3018.

[3507] The probes having the nucleotide sequence represented by SEQ ID NOS: 39316, 39317, 39318, 39319, 39320, 39321, 39322, 39323, 39324, 39325, 39326 were selected from the ORFs having the nucleotide sequence represented by SEQ ID NO: 3019.

[3508] The probes having the nucleotide sequence represented by SEQ ID NOS: 39327, 39328, 39329, 39330, 39331, 39332, 39333, 39334, 39335, 39336, 39337 were selected from the ORFs having the nucleotide sequence represented by SEQ ID NO: 3020.

[3509] The probes having the nucleotide sequence represented by SEQ ID NOS: 39338, 39339, 39340, 39341, 39342, 39343, 39344, 39345, 39346, 39347, 39348 were selected from the ORFs having the nucleotide sequence represented by SEQ ID NO: 3021.

[3510] The probes having the nucleotide sequence represented by SEQ ID NOS: 39349, 39350, 39351, 39352, 39353, 39354, 39355, 39356, 39357, 39358, 39359 were selected from the ORFs having the nucleotide sequence represented by SEQ ID NO: 3022.

[3511] The probes having the nucleotide sequence represented by SEQ ID NOS: 39360, 39361, 39362, 39363, 39364, 39365, 39366, 39367, 39368, 39369, 39370 were selected from the ORFs having the nucleotide sequence represented by SEQ ID NO: 3023.

[3512] The probes having the nucleotide sequence represented by SEQ ID NOS: 39371, 39372, 39373, 39374, 39375, 39376, 39377, 39378, 39379, 39380, 39381 were selected from the ORFs having the nucleotide sequence represented by SEQ ID NO: 3024.

[3513] The probes having the nucleotide sequence represented by SEQ ID NOS: 39382, 39383, 39384, 39385, 39386, 39387, 39388, 39389, 39390, 39391, 39392 were selected from the ORFs having the nucleotide sequence represented by SEQ ID NO: 3025.

[3514] The probes having the nucleotide sequence represented by SEQ ID NOS: 39393, 39394, 39395, 39396, 39397, 39398, 39399, 39400, 39401, 39402, 39403 were selected from the ORFs having the nucleotide sequence represented by SEQ ID NO: 3026.

[3515] The probes having the nucleotide sequence represented by SEQ ID NOS: 39404, 39405, 39406, 39407, 39408, 39409, 39410, 39411, 39412, 39413, 39414 were selected from the ORFs having the nucleotide sequence represented by SEQ ID NO: 3027.

[3516] The probes having the nucleotide sequence represented by SEQ ID NOS: 39415, 39416, 39417, 39418, 39419, 39420, 39421, 39422, 39423, 39424, 39425 were selected from the ORFs having the nucleotide sequence represented by SEQ ID NO: 3028.

[3517] The probes having the nucleotide sequence represented by SEQ ID NOS: 39426, 39427, 39428, 39429, 39430, 39431, 39432, 39433, 39434, 39435, 39436 were selected from the ORFs having the nucleotide sequence represented by SEQ ID NO: 3029.

[3518] The probes having the nucleotide sequence represented by SEQ ID NOS: 39437, 39438, 39439, 39440, 39441, 39442, 39443, 39444, 39445, 39446, 39447 were selected from the ORFs having the nucleotide sequence represented by SEQ ID NO: 3030.

[3519] The probes having the nucleotide sequence represented by SEQ ID NOS: 39448, 39449, 39450, 39451, 39452, 39453, 39454, 39455, 39456, 39457, 39458 were selected from the ORFs having the nucleotide sequence represented by SEQ ID NO: 3031.

[3520] The probes having the nucleotide sequence represented by SEQ ID NOS: 39459, 39460, 39461, 39462, 39463, 39464, 39465, 39466, 39467, 39468, 39469 were selected from the ORFs having the nucleotide sequence represented by SEQ ID NO: 3032.

[3521] The probes having the nucleotide sequence represented by SEQ ID NOS: 39470, 39471, 39472, 39473, 39474, 39475, 39476, 39477, 39478, 39479, 39480 were selected from the ORFs having the nucleotide sequence represented by SEQ ID NO: 3033.

[3522] The probes having the nucleotide sequence represented by SEQ ID NOS: 39481, 39482, 39483, 39484, 39485, 39486, 39487, 39488, 39489, 39490, 39491 were selected from the ORFs having the nucleotide sequence represented by SEQ ID NO: 3034.

[3523] The probes having the nucleotide sequence represented by SEQ ID NOS: 39492, 39493, 39494, 39495, 39496, 39497, 39498, 39499, 39500, 39501, 39502 were selected from the ORFs having the nucleotide sequence represented by SEQ ID NO: 3035.

[3524] The probes having the nucleotide sequence represented by SEQ ID NOS: 39503, 39504, 39505, 39506, 39507, 39508, 39509,X39510, 39511, 39512, 39513 were selected from the ORFs having the nucleotide sequence represented by SEQ ID NO: 3036.

[3525] The probes having the nucleotide sequence represented by SEQ ID NOS: 39514, 39515, 39516, 39517, 39518, 39519, 39520, 39521, 39522, 39523, 39524 were selected from the ORFs having the nucleotide sequence represented by SEQ ID NO: 3037.

[3526] The probes having the nucleotide sequence represented by SEQ ID NOS: 39525, 39526, 39527, 39528, 39529, 39530, 39531, 39532, 39533, 39534, 39535 were selected from the ORFs having the nucleotide sequence represented by SEQ ID NO: 3038.

[3527] The probes having the nucleotide sequence represented by SEQ ID NOS: 39536, 39537, 39538, 39539, 39540, 39541, 39542, 39543, 39544, 39545, 39546 were selected from the ORFs having the nucleotide sequence represented by SEQ ID NO: 3039.

[3528] The probes having the nucleotide sequence represented by SEQ ID NOS: 39547, 39548, 39549, 39550, 39551, 39552, 39553, 39554, 39555, 39556, 39557 were selected from the ORFs having the nucleotide sequence represented by SEQ ID NO: 3040.

[3529] The probes having the nucleotide sequence represented by SEQ ID NOS: 39558, 39559, 39560, 39561, 39562, 39563, 39564, 39565, 39566, 39567, 39568 were selected from the ORFs having the nucleotide sequence represented by SEQ ID NO: 3041.

[3530] The probes having the nucleotide sequence represented by SEQ ID NOS: 39569, 39570, 39571, 39572, 39573, 39574, 39575, 39576, 39577, 39578, 39579 were selected from the ORFs having the nucleotide sequence represented by SEQ ID NO: 3042.

[3531] The probes having the nucleotide sequence represented by SEQ ID NOS: 39580, 39581, 39582, 39583, 39584, 39585, 39586, 39587, 39588, 39589, 39590 were selected from the ORFs having the nucleotide sequence represented by SEQ ID NO: 3043.

[3532] The probes having the nucleotide sequence represented by SEQ ID NOS: 39591, 39592, 39593, 39594, 39595, 39596, 39597, 39598, 39599, 39600, 39601 were selected from the ORFs having the nucleotide sequence represented by SEQ ID NO: 3044.

[3533] The probes having the nucleotide sequence represented by SEQ ID NOS: 39602, 39603, 39604, 39605, 39606, 39607, 39608, 39609, 39610, 39611, 39612 were selected from the ORFs having the nucleotide sequence represented by SEQ ID NO: 3045.

[3534] The probes having the nucleotide sequence represented by SEQ ID NOS: 39613, 39614, 39615, 39616, 39617, 39618, 39619, 39620, 39621, 39622, 39623 were selected from the ORFs having the nucleotide sequence represented by SEQ ID NO: 3046.

[3535] The probes having the nucleotide sequence represented by SEQ ID NOS: 39624, 39625, 39626, 39627, 39628, 39629, 39630, 39631, 39632, 39633, 39634 were selected from the ORFs having the nucleotide sequence represented by SEQ ID NO: 3047.

[3536] The probes having the nucleotide sequence represented by SEQ ID NOS: 39635, 39636, 39637, 39638, 39639, 39640, 39641, 39642, 39643, 39644, 39645 were selected from the ORFs having the nucleotide sequence represented by SEQ ID NO: 3048.

[3537] The probes having the nucleotide sequence represented by SEQ ID NOS: 39646, 39647, 39648, 39649, 39650, 39651, 39652, 39653, 39654, 39655, 39656 were selected from the ORFs having the nucleotide sequence represented by SEQ ID NO: 3049.

[3538] The probes having the nucleotide sequence represented by SEQ ID NOS: 39657, 39658, 39659, 39660, 39661, 39662, 39663, 39664, 39665, 39666, 39667 were selected from the ORFs having the nucleotide sequence represented by SEQ ID NO: 3050.

[3539] The probes having the nucleotide sequence represented by SEQ ID NOS: 39668, 39669, 39670, 39671, 39672, 39673, 39674, 39675, 39676, 39677, 39678 were selected from the ORFs having the nucleotide sequence represented by SEQ ID NO: 3051.

[3540] The probes having the nucleotide sequence represented by SEQ ID NOS: 39679, 39680, 39681, 39682, 39683, 39684, 39685, 39686, 39687, 39688, 39689 were selected from the ORFs having the nucleotide sequence represented by SEQ ID NO: 3052.

[3541] The probes having the nucleotide sequence represented by SEQ ID NOS: 39690, 39691, 39692, 39693, 39694, 39695, 39696, 39697, 39698, 39699, 39700 were selected from the ORFs having the nucleotide sequence represented by SEQ ID NO: 3053.

[3542] The probes having the nucleotide sequence represented by SEQ ID NOS: 39701, 39702, 39703, 39704, 39705, 39706, 39707, 39708, 39709, 39710, 39711 were selected from the ORFs having the nucleotide sequence represented by SEQ ID NO: 3054.

[3543] The probes having the nucleotide sequence represented by SEQ ID NOS: 39712, 39713, 39714, 39715, 39716, 39717, 39718, 39719, 39720, 39721, 39722 were selected from the ORFs having the nucleotide sequence represented by SEQ ID NO: 3055.

[3544] The probes having the nucleotide sequence represented by SEQ ID NOS: 39723, 39724, 39725, 39726, 39727, 39728, 39729, 39730, 39731, 39732, 39733 were selected from the ORFs having the nucleotide sequence represented by SEQ ID NO: 3056.

[3545] The probes having the nucleotide sequence represented by SEQ ID NOS: 39734, 39735, 39736, 39737, 39738, 39739, 39740, 39741, 39742, 39743, 39744 were selected from the ORFs having the nucleotide sequence represented by SEQ ID NO: 3057.

[3546] The probes having the nucleotide sequence represented by SEQ ID NOS: 39745, 39746, 39747, 39748, 39749, 39750, 39751, 39752, 39753, 39754, 39755 were selected from the ORFs having the nucleotide sequence represented by SEQ ID NO: 3058.

[3547] The probes having the nucleotide sequence represented by SEQ ID NOS: 39756, 39757, 39758, 39759, 39760, 39761, 39762, 39763, 39764, 39765, 39766 were selected from the ORFs having the nucleotide sequence represented by SEQ ID NO: 3059.

[3548] The probes having the nucleotide sequence represented by SEQ ID NOS: 39767, 39768, 39769, 39770, 39771, 39772, 39773, 39774, 39775, 39776, 39777 were selected from the ORFs having the nucleotide sequence represented by SEQ ID NO: 3060.

[3549] The probes having the nucleotide sequence represented by SEQ ID NOS: 39778, 39779, 39780, 39781, 39782, 39783, 39784, 39785, 39786, 39787, 39788 were selected from the ORFs having the nucleotide sequence represented by SEQ ID NO: 3061.

[3550] The probes having the nucleotide sequence represented by SEQ ID NOS: 39789, 39790, 39791, 39792, 39793, 39794, 39795, 39796, 39797, 39798, 39799 were selected from the ORFs having the nucleotide sequence represented by SEQ ID NO: 3062.

[3551] The probes having the nucleotide sequence represented by SEQ ID NOS: 39800, 39801, 39802, 39803, 39804, 39805, 39806, 39807, 39808, 39809, 39810 were selected from the ORFs having the nucleotide sequence represented by SEQ ID NO: 3063.

[3552] The probes having the nucleotide sequence represented by SEQ ID NOS: 39811, 39812, 39813, 39814, 39815, 39816, 39817, 39818, 39819, 39820, 39821 were selected from the ORFs having the nucleotide sequence represented by SEQ ID NO: 3064.

[3553] The probes having the nucleotide sequence represented by SEQ ID NOS: 39822, 39823, 39824, 39825, 39826, 39827, 39828, 39829, 39830, 39831, 39832 were selected from the ORFs having the nucleotide sequence represented by SEQ ID NO: 3065.

[3554] The probes having the nucleotide sequence represented by SEQ ID NOS: 39833, 39834, 39835, 39836, 39837, 39838, 39839, 39840, 39841, 39842, 39843 were selected from the ORFs having the nucleotide sequence represented by SEQ ID NO: 3066.

[3555] The probes having the nucleotide sequence represented by SEQ ID NOS: 39844, 39845, 39846, 39847, 39848, 39849, 39850, 39851, 39852, 39853, 39854 were selected from the ORFs having the nucleotide sequence represented by SEQ ID NO: 3067.

[3556] The probes having the nucleotide sequence represented by SEQ ID NOS: 39855, 39856, 39857, 39858, 39859, 39860, 39861, 39862, 39863, 39864, 39865 were selected from the ORFs having the nucleotide sequence represented by SEQ ID NO: 3068.

[3557] The probes having the nucleotide sequence represented by SEQ ID NOS: 39866, 39867, 39868, 39869, 39870, 39871, 39872, 39873, 39874, 39875, 39876 were selected from the ORFs having the nucleotide sequence represented by SEQ ID NO: 3069.

[3558] The probes having the nucleotide sequence represented by SEQ ID NOS: 39877, 39878, 39879, 39880, 39881, 39882, 39883, 39884, 39885, 39886, 39887 were selected from the ORFs having the nucleotide sequence represented by SEQ ID NO: 3070.

[3559] The probes having the nucleotide sequence represented by SEQ ID NOS: 39888, 39889, 39890, 39891, 39892, 39893, 39894, 39895, 39896, 39897, 39898 were selected from the ORFs having the nucleotide sequence represented by SEQ ID NO: 3071.

[3560] The probes having the nucleotide sequence represented by SEQ ID NOS: 39899, 39900, 39901, 39902, 39903, 39904, 39905, 39906, 39907, 39908, 39909 were selected from the ORFs having the nucleotide sequence represented by SEQ ID NO: 3072.

[3561] The probes having the nucleotide sequence represented by SEQ ID NOS: 39910, 39911, 39912, 39913, 39914, 39915, 39916, 39917, 39918, 39919, 39920 were selected from the ORFs having the nucleotide sequence represented by SEQ ID NO: 3073.

[3562] The probes having the nucleotide sequence represented by SEQ ID NOS: 39921, 39922, 39923, 39924, 39925, 39926, 39927, 39928, 39929, 39930, 39931 were selected from the ORFs having the nucleotide sequence represented by SEQ ID NO: 3074.

[3563] The probes having the nucleotide sequence represented by SEQ ID NOS: 39932, 39933, 39934, 39935, 39936, 39937, 39938, 39939, 39940, 39941, 39942 were selected from the ORFs having the nucleotide sequence represented by SEQ ID NO: 3075.

[3564] The probes having the nucleotide sequence represented by SEQ ID NOS: 39943, 39944, 39945, 39946, 39947, 39948, 39949, 39950, 39951, 39952, 39953 were selected from the ORFs having the nucleotide sequence represented by SEQ ID NO: 3076.

[3565] The probes having the nucleotide sequence represented by SEQ ID NOS: 39954, 39955, 39956, 39957, 39958, 39959, 39960, 39961, 39962, 39963, 39964 were selected from the ORFs having the nucleotide sequence represented by SEQ ID NO: 3077.

[3566] The probes having the nucleotide sequence represented by SEQ ID NOS: 39965, 39966, 39967, 39968, 39969, 39970, 39971, 39972, 39973, 39974, 39975 were selected from the ORFs having the nucleotide sequence represented by SEQ ID NO: 3078.

[3567] The probes having the nucleotide sequence represented by SEQ ID NOS: 39976, 39977, 39978, 39979, 39980, 39981, 39982, 39983, 39984, 39985, 39986 were selected from the ORFs having the nucleotide sequence represented by SEQ ID NO: 3079.

[3568] The probes having the nucleotide sequence represented by SEQ ID NOS: 39987, 39988, 39989, 39990, 39991, 39992, 39993, 39994, 39995, 39996, 39997 were selected from the ORFs having the nucleotide sequence represented by SEQ ID NO: 3080.

[3569] The probes having the nucleotide sequence represented by SEQ ID NOS: 39998, 39999, 40000, 40001, 40002, 40003, 40004, 40005, 40006, 40007, 40008 were selected from the ORFs having the nucleotide sequence represented by SEQ ID NO: 3081.

[3570] The probes having the nucleotide sequence represented by SEQ ID NOS: 40009, 40010, 40011, 40012, 40013, 40014, 40015, 40016, 40017, 40018, 40019 were selected from the ORFs having the nucleotide sequence represented by SEQ ID NO: 3082.

[3571] The probes having the nucleotide sequence represented by SEQ ID NOS: 40020, 40021, 40022, 40023, 40024, 40025, 40026, 40027, 40028, 40029, 40030 were selected from the ORFs having the nucleotide sequence represented by SEQ ID NO: 3083.

[3572] The probes having the nucleotide sequence represented by SEQ ID NOS: 40031, 40032, 40033, 40034, 40035, 40036, 40037, 40038, 40039, 40040, 40041 were selected from the ORFs having the nucleotide sequence represented by SEQ ID NO: 3084.

[3573] The probes having the nucleotide sequence represented by SEQ ID NOS: 40042, 40043, 40044, 40045, 40046, 40047, 40048, 40049, 40050, 40051, 40052 were selected from the ORFs having the nucleotide sequence represented by SEQ ID NO: 3085.

[3574] The probes having the nucleotide sequence represented by SEQ ID NOS: 40053, 40054, 40055, 40056, 40057, 40058, 40059, 40060, 40061, 40062, 40063 were selected from the ORFs having the nucleotide sequence represented by SEQ ID NO: 3086.

[3575] The probes having the nucleotide sequence represented by SEQ ID NOS: 40064, 40065, 40066, 40067, 40068, 40069, 40070, 40071, 40072, 40073, 40074 were selected from the ORFs having the nucleotide sequence represented by SEQ ID NO: 3087.

[3576] The probes having the nucleotide sequence represented by SEQ ID NOS: 40075, 40076, 40077, 40078, 40079, 40080, 40081, 40082, 40083, 40084, 40085 were selected from the ORFs having the nucleotide sequence represented by SEQ ID NO: 3088.

[3577] The probes having the nucleotide sequence represented by SEQ ID NOS: 40086, 40087, 40088, 40089, 40090, 40091, 40092, 40093, 40094, 40095, 40096 were selected from the ORFs having the nucleotide sequence represented by SEQ ID NO: 3089.

[3578] The probes having the nucleotide sequence represented by SEQ ID NOS: 40097, 40098, 40099, 40100, 40101, 40102, 40103, 40104, 40105, 40106, 40107 were selected from the ORFs having the nucleotide sequence represented by SEQ ID NO: 3090.

[3579] The probes having the nucleotide sequence represented by SEQ ID NOS: 40108, 40109, 40110, 40111, 40112, 40113, 40114, 40115, 40116, 40117, 40118 were selected from the ORFs having the nucleotide sequence represented by SEQ ID NO: 3091.

[3580] The probes having the nucleotide sequence represented by SEQ ID NOS: 40119, 40120, 40121, 40122, 40123, 40124, 40125, 40126, 40127, 40128, 40129 were selected from the ORFs having the nucleotide sequence represented by SEQ ID NO: 3092.

[3581] The probes having the nucleotide sequence represented by SEQ ID NOS: 40130, 40131, 40132, 40133, 40134, 40135, 40136, 40137, 40138, 40139, 40140 were selected from the ORFs having the nucleotide sequence represented by SEQ ID NO: 3093.

[3582] The probes having the nucleotide sequence represented by SEQ ID NOS: 40141, 40142, 40143, 40144, 40145, 40146, 40147, 40148, 40149, 40150, 40151 were selected from the ORFs having the nucleotide sequence represented by SEQ ID NO: 3094.

[3583] The probes having the nucleotide sequence represented by SEQ ID NOS: 40152, 40153, 40154, 40155, 40156, 40157, 40158, 40159, 40160, 40161, 40162 were selected from the ORFs having the nucleotide sequence represented by SEQ ID NO: 3095.

[3584] The probes having the nucleotide sequence represented by SEQ ID NOS: 40163, 40164, 40165, 40166, 40167, 40168, 40169, 40170, 40171, 40172, 40173 were selected from the ORFs having the nucleotide sequence represented by SEQ ID NO: 3096.

[3585] The probes having the nucleotide sequence represented by SEQ ID NOS: 40174, 40175, 40176, 40177, 40178, 40179, 40180, 40181, 40182, 40183, 40184 were selected from the ORFs having the nucleotide sequence represented by SEQ ID NO: 3097.

[3586] The probes having the nucleotide sequence represented by SEQ ID NOS: 40185, 40186, 40187, 40188, 40189, 40190, 40191, 40192, 40193, 40194, 40195 were selected from the ORFs having the nucleotide sequence represented by SEQ ID NO: 3098.

[3587] The probes having the nucleotide sequence represented by SEQ ID NOS: 40196, 40197, 40198, 40199, 40200, 40201, 40202, 40203, 40204, 40205, 40206 were selected from the ORFs having the nucleotide sequence represented by SEQ ID NO: 3099.

[3588] The probes having the nucleotide sequence represented by SEQ ID NOS: 40207, 40208, 40209, 40210, 40211, 40212, 40213, 40214, 40215, 40216, 40217 were selected from the ORFs having the nucleotide sequence represented by SEQ ID NO: 3100.

[3589] The probes having the nucleotide sequence represented by SEQ ID NOS: 40218, 40219, 40220, 40221, 40222, 40223, 40224, 40225, 40226, 40227, 40228 were selected from the ORFs having the nucleotide sequence represented by SEQ ID NO: 3101.

[3590] The probes having the nucleotide sequence represented by SEQ ID NOS: 40229, 40230, 40231, 40232, 40233, 40234, 40235, 40236, 40237, 40238, 40239 were selected from the ORFs having the nucleotide sequence represented by SEQ ID NO: 3102.

[3591] The probes having the nucleotide sequence represented by SEQ ID NOS: 40240, 40241, 40242, 40243, 40244, 40245, 40246, 40247, 40248, 40249, 40250 were selected from the ORFs having the nucleotide sequence represented by SEQ ID NO: 3103.

[3592] The probes having the nucleotide sequence represented by SEQ ID NOS: 40251, 40252, 40253, 40254, 40255, 40256, 40257, 40258, 40259, 40260, 40261 were selected from the ORFs having the nucleotide sequence represented by SEQ ID NO: 3104.

[3593] The probes having the nucleotide sequence represented by SEQ ID NOS: 40262, 40263, 40264, 40265, 40266, 40267, 40268, 40269, 40270, 40271, 40272 were selected from the ORFs having the nucleotide sequence represented by SEQ ID NO: 3105.

[3594] The probes having the nucleotide sequence represented by SEQ ID NOS: 40273, 40274, 40275, 40276, 40277, 40278, 40279, 40280, 40281, 40282, 40283 were selected from the ORFs having the nucleotide sequence represented by SEQ ID NO: 3106.

[3595] The probes having the nucleotide sequence represented by SEQ ID NOS: 40284, 40285, 40286, 40287, 40288, 40289, 40290, 40291, 40292, 40293, 40294 were selected from the ORFs having the nucleotide sequence represented by SEQ ID NO: 3107.

[3596] The probes having the nucleotide sequence represented by SEQ ID NOS: 40295, 40296, 40297, 40298, 40299, 40300, 40301, 40302, 40303, 40304, 40305 were selected from the ORFs having the nucleotide sequence represented by SEQ ID NO: 3108.

[3597] The probes having the nucleotide sequence represented by SEQ ID NOS: 40306, 40307, 40308, 40309, 40310, 40311, 40312, 40313, 40314, 40315, 40316 were selected from the ORFs having the nucleotide sequence represented by SEQ ID NO: 3109.

[3598] The probes having the nucleotide sequence represented by SEQ ID NOS: 40317, 40318, 40319, 40320, 40321, 40322, 40323, 40324, 40325, 40326, 40327 were selected from the ORFs having the nucleotide sequence represented by SEQ ID NO: 3110.

[3599] The probes having the nucleotide sequence represented by SEQ ID NOS: 40328, 40329, 40330, 40331, 40332, 40333, 40334, 40335, 40336, 40337, 40338 were selected from the ORFs having the nucleotide sequence represented by SEQ ID NO: 3111.

[3600] The probes having the nucleotide sequence represented by SEQ ID NOS: 40339, 40340, 40341, 40342, 40343, 40344, 40345, 40346, 40347, 40348, 40349 were selected from the ORFs having the nucleotide sequence represented by SEQ ID NO: 3112.

[3601] The probes having the nucleotide sequence represented by SEQ ID NOS: 40350, 40351, 40352, 40353, 40354, 40355, 40356, 40357, 40358, 40359, 40360 were selected from the ORFs having the nucleotide sequence represented by SEQ ID NO: 3113.

[3602] The probes having the nucleotide sequence represented by SEQ ID NOS: 40361, 40362, 40363, 40364, 40365, 40366, 40367, 40368, 40369, 40370, 40371 were selected from the ORFs having the nucleotide sequence represented by SEQ ID NO: 3114.

[3603] The probes having the nucleotide sequence represented by SEQ ID NOS: 40372, 40373, 40374, 40375, 40376, 40377, 40378, 40379, 40380, 40381, 40382 were selected from the ORFs having the nucleotide sequence represented by SEQ ID NO: 3115.

[3604] The probes having the nucleotide sequence represented by SEQ ID NOS: 40383, 40384, 40385, 40386, 40387, 40388, 40389, 40390, 40391, 40392, 40393 were selected from the ORFs having the nucleotide sequence represented by SEQ ID NO: 3116.

[3605] The probes having the nucleotide sequence represented by SEQ ID NOS: 40394, 40395, 40396, 40397, 40398, 40399, 40400, 40401, 40402, 40403, 40404 were selected from the ORFs having the nucleotide sequence represented by SEQ ID NO: 3117.

[3606] The probes having the nucleotide sequence represented by SEQ ID NOS: 40405, 40406, 40407, 40408, 40409, 40410, 40411, 40412, 40413, 40414, 40415 were selected from the ORFs having the nucleotide sequence represented by SEQ ID NO: 3118.

[3607] The probes having the nucleotide sequence represented by SEQ ID NOS: 40416, 40417, 40418, 40419, 40420, 40421, 40422, 40423, 40424, 40425, 40426 were selected from the ORFs having the nucleotide sequence represented by SEQ ID NO: 3119.

[3608] The probes having the nucleotide sequence represented by SEQ ID NOS: 40427, 40428, 40429, 40430, 40431, 40432, 40433, 40434, 40435, 40436, 40437 were selected from the ORFs having the nucleotide sequence represented by SEQ ID NO: 3120.

[3609] The probes having the nucleotide sequence represented by SEQ ID NOS: 40438, 40439, 40440, 40441, 40442, 40443, 40444, 40445, 40446, 40447, 40448 were selected from the ORFs having the nucleotide sequence represented by SEQ ID NO: 3121.

[3610] The probes having the nucleotide sequence represented by SEQ ID NOS: 40449, 40450, 40451, 40452, 40453, 40454, 40455, 40456, 40457, 40458, 40459 were selected from the ORFs having the nucleotide sequence represented by SEQ ID NO: 3122.

[3611] The probes having the nucleotide sequence represented by SEQ ID NOS: 40460, 40461, 40462, 40463, 40464, 40465, 40466, 40467, 40468, 40469, 40470 were selected from the ORFs having the nucleotide sequence represented by SEQ ID NO: 3123.

[3612] The probes having the nucleotide sequence represented by SEQ ID NOS: 40471, 40472, 40473, 40474, 40475, 40476, 40477, 40478, 40479, 40480, 40481 were selected from the ORFs having the nucleotide sequence represented by SEQ ID NO: 3124.

[3613] The probes having the nucleotide sequence represented by SEQ ID NOS: 40482, 40483, 40484, 40485, 40486, 40487, 40488, 40489, 40490, 40491, 40492 were selected from the ORFs having the nucleotide sequence represented by SEQ ID NO: 3125.

[3614] The probes having the nucleotide sequence represented by SEQ ID NOS: 40493, 40494, 40495, 40496, 40497, 40498, 40499, 40500, 40501, 40502, 40503 were selected from the ORFs having the nucleotide sequence represented by SEQ ID NO: 3126.

[3615] The probes having the nucleotide sequence represented by SEQ ID NOS: 40504, 40505, 40506, 40507, 40508, 40509, 40510, 40511, 40512, 40513, 40514 were selected from the ORFs having the nucleotide sequence represented by SEQ ID NO: 3127.

[3616] The probes having the nucleotide sequence represented by SEQ ID NOS: 40515, 40516, 40517, 40518, 40519, 40520, 40521, 40522, 40523, 40524, 40525 were selected from the ORFs having the nucleotide sequence represented by SEQ ID NO: 3128.

[3617] The probes having the nucleotide sequence represented by SEQ ID NOS: 40526, 40527, 40528, 40529, 40530, 40531, 40532, 40533, 40534, 40535, 40536 were selected from the ORFs having the nucleotide sequence represented by SEQ ID NO: 3129.

[3618] The probes having the nucleotide sequence represented by SEQ ID NOS: 40537, 40538, 40539, 40540, 40541, 40542, 40543, 40544, 40545, 40546, 40547 were selected from the ORFs having the nucleotide sequence represented by SEQ ID NO: 3130.

[3619] The probes having the nucleotide sequence represented by SEQ ID NOS: 40548, 40549, 40550, 40551, 40552, 40553, 40554, 40555, 40556, 40557, 40558 were selected from the ORFs having the nucleotide sequence represented by SEQ ID NO: 3131.

[3620] The probes having the nucleotide sequence represented by SEQ ID NOS: 40559, 40560, 40561, 40562, 40563, 40564, 40565, 40566, 40567, 40568, 40569 were selected from the ORFs having the nucleotide sequence represented by SEQ ID NO: 3132.

[3621] The probes having the nucleotide sequence represented by SEQ ID NOS: 40570, 40571, 40572, 40573, 40574, 40575, 40576, 40577, 40578, 40579, 40580 were selected from the ORFs having the nucleotide sequence represented by SEQ ID NO: 3133.

[3622] The probes having the nucleotide sequence represented by SEQ ID NOS: 40581, 40582, 40583, 40584, 40585, 40586, 40587, 40588, 40589, 40590, 40591 were selected from the ORFs having the nucleotide sequence represented by SEQ ID NO: 3134.

[3623] The probes having the nucleotide sequence represented by SEQ ID NOS: 40592, 40593, 40594, 40595, 40596, 40597, 40598, 40599, 40600, 40601, 40602 were selected from the ORFs having the nucleotide sequence represented by SEQ ID NO: 3135.

[3624] The probes having the nucleotide sequence represented by SEQ ID NOS: 40603, 40604, 40605, 40606, 40607, 40608, 40609, 40610, 40611, 40612, 40613 were selected from the ORFs having the nucleotide sequence represented by SEQ ID NO: 3136.

[3625] The probes having the nucleotide sequence represented by SEQ ID NOS: 40614, 40615, 40616, 40617, 40618, 40619, 40620, 40621, 40622, 40623, 40624 were selected from the ORFs having the nucleotide sequence represented by SEQ ID NO: 3137.

[3626] The probes having the nucleotide sequence represented by SEQ ID NOS: 40625, 40626, 40627, 40628, 40629, 40630, 40631, 40632, 40633, 40634, 40635 were selected from the ORFs having the nucleotide sequence represented by SEQ ID NO: 3138.

[3627] The probes having the nucleotide sequence represented by SEQ ID NOS: 40636, 40637, 40638, 40639, 40640, 40641, 40642, 40643, 40644, 40645, 40646 were selected from the ORFs having the nucleotide sequence represented by SEQ ID NO: 3139.

[3628] The probes having the nucleotide sequence represented by SEQ ID NOS: 40647, 40648, 40649, 40650, 40651, 40652, 40653, 40654, 40655, 40656, 40657 were selected from the ORFs having the nucleotide sequence represented by SEQ ID NO: 3140.

[3629] The probes having the nucleotide sequence represented by SEQ ID NOS: 40658, 40659, 40660, 40661, 40662, 40663, 40664, 40665, 40666, 40667, 40668 were selected from the ORFs having the nucleotide sequence represented by SEQ ID NO: 3141.

[3630] The probes having the nucleotide sequence represented by SEQ ID NOS: 40669, 40670, 40671, 40672, 40673, 40674, 40675, 40676, 40677, 40678, 40679 were selected from the ORFs having the nucleotide sequence represented by SEQ ID NO: 3142.

[3631] The probes having the nucleotide sequence represented by SEQ ID NOS: 40680, 40681, 40682, 40683, 40684, 40685, 40686, 40687, 40688, 40689, 40690 were selected from the ORFs having the nucleotide sequence represented by SEQ ID NO: 3143.

[3632] The probes having the nucleotide sequence represented by SEQ ID NOS: 40691, 40692, 40693, 40694, 40695, 40696, 40697, 40698, 40699, 40700, 40701 were selected from the ORFs having the nucleotide sequence represented by SEQ ID NO: 3144.

[3633] The probes having the nucleotide sequence represented by SEQ ID NOS: 40702, 40703, 40704, 40705, 40706, 40707, 40708, 40709, 40710, 40711, 40712 were selected from the ORFs having the nucleotide sequence represented by SEQ ID NO: 3145.

[3634] The probes having the nucleotide sequence represented by SEQ ID NOS: 40713, 40714, 40715, 40716, 40717, 40718, 40719, 40720, 40721, 40722, 40723 were selected from the ORFs having the nucleotide sequence represented by SEQ ID NO: 3146.

[3635] The probes having the nucleotide sequence represented by SEQ ID NOS: 40724, 40725, 40726, 40727, 40728, 40729, 40730, 40731, 40732, 40733, 40734 were selected from the ORFs having the nucleotide sequence represented by SEQ ID NO: 3147.

[3636] The probes having the nucleotide sequence represented by SEQ ID NOS: 40735, 40736, 40737, 40738, 40739, 40740, 40741, 40742, 40743, 40744, 40745 were selected from the ORFs having the nucleotide sequence represented by SEQ ID NO: 3148.

[3637] The probes having the nucleotide sequence represented by SEQ ID NOS: 40746, 40747, 40748, 40749, 40750, 40751, 40752, 40753, 40754, 40755, 40756 were selected from the ORFs having the nucleotide sequence represented by SEQ ID NO: 3149.

[3638] The probes having the nucleotide sequence represented by SEQ ID NOS: 40757, 40758, 40759, 40760, 40761, 40762, 40763, 40764, 40765, 40766, 40767 were selected from the ORFs having the nucleotide sequence represented by SEQ ID NO: 3150.

[3639] The probes having the nucleotide sequence represented by SEQ ID NOS: 40768, 40769, 40770, 40771, 40772, 40773, 40774, 40775, 40776, 40777, 40778 were selected from the ORFs having the nucleotide sequence represented by SEQ ID NO: 3151.

[3640] The probes having the nucleotide sequence represented by SEQ ID NOS: 40779, 40780, 40781, 40782, 40783, 40784, 40785, 40786, 40787, 40788, 40789 were selected from the ORFs having the nucleotide sequence represented by SEQ ID NO: 3152.

[3641] The probes having the nucleotide sequence represented by SEQ ID NOS: 40790, 40791, 40792, 40793, 40794, 40795, 40796, 40797, 40798, 40799, 40800 were selected from the ORFs having the nucleotide sequence represented by SEQ ID NO: 3153.

[3642] The probes having the nucleotide sequence represented by SEQ ID NOS: 40801, 40802, 40803, 40804, 40805, 40806, 40807, 40808, 40809, 40810, 40811 were selected from the ORFs having the nucleotide sequence represented by SEQ ID NO: 3154.

[3643] The probes having the nucleotide sequence represented by SEQ ID NOS: 40812, 40813, 40814, 40815, 40816, 40817, 40818, 40819, 40820, 40821, 40822 were selected from the ORFs having the nucleotide sequence represented by SEQ ID NO: 3155.

[3644] The probes having the nucleotide sequence represented by SEQ ID NOS: 40823, 40824, 40825, 40826, 40827, 40828, 40829, 40830, 40831, 40832, 40833 were selected from the ORFs having the nucleotide sequence represented by SEQ ID NO: 3156.

[3645] The probes having the nucleotide sequence represented by SEQ ID NOS: 40834, 40835, 40836, 40837, 40838, 40839, 40840, 40841, 40842, 40843, 40844 were selected from the ORFs having the nucleotide sequence represented by SEQ ID NO: 3157.

[3646] The probes having the nucleotide sequence represented by SEQ ID NOS: 40845, 40846, 40847, 40848, 40849, 40850, 40851, 40852, 40853, 40854, 40855 were selected from the ORFs having the nucleotide sequence represented by SEQ ID NO: 3158.

[3647] The probes having the nucleotide sequence represented by SEQ ID NOS: 40856, 40857, 40858, 40859, 40860, 40861, 40862, 40863, 40864, 40865, 40866 were selected from the ORFs having the nucleotide sequence represented by SEQ ID NO: 3159.

[3648] The probes having the nucleotide sequence represented by SEQ ID NOS: 40867, 40868, 40869, 40870, 40871, 40872, 40873, 40874, 40875, 40876, 40877 were selected from the ORFs having the nucleotide sequence represented by SEQ ID NO: 3160.

[3649] The probes having the nucleotide sequence represented by SEQ ID NOS: 40878, 40879, 40880, 40881, 40882, 40883, 40884, 40885, 40886, 40887, 40888 were selected from the ORFs having the nucleotide sequence represented by SEQ ID NO: 3161.

[3650] The probes having the nucleotide sequence represented by SEQ ID NOS: 40889, 40890, 40891, 40892, 40893, 40894, 40895, 40896, 40897, 40898, 40899 were selected from the ORFs having the nucleotide sequence represented by SEQ ID NO: 3162.

[3651] The probes having the nucleotide sequence represented by SEQ ID NOS: 40900, 40901, 40902, 40903, 40904, 40905, 40906, 40907, 40908, 40909, 40910 were selected from the ORFs having the nucleotide sequence represented by SEQ ID NO: 3163.

[3652] The probes having the nucleotide sequence represented by SEQ ID NOS: 40911, 40912, 40913, 40914, 40915, 40916, 40917, 40918, 40919, 40920, 40921 were selected from the ORFs having the nucleotide sequence represented by SEQ ID NO: 3164.

[3653] The probes having the nucleotide sequence represented by SEQ ID NOS: 40922, 40923, 40924, 40925, 40926, 40927, 40928, 40929, 40930, 40931, 40932 were selected from the ORFs having the nucleotide sequence represented by SEQ ID NO: 3165.

[3654] The probes having the nucleotide sequence represented by SEQ ID NOS: 40933, 40934, 40935, 40936, 40937, 40938, 40939, 40940, 40941, 40942, 40943 were selected from the ORFs having the nucleotide sequence represented by SEQ ID NO: 3166.

[3655] The probes having the nucleotide sequence represented by SEQ ID NOS: 40944, 40945, 40946, 40947, 40948, 40949, 40950, 40951, 40952, 40953, 40954 were selected from the ORFs having the nucleotide sequence represented by SEQ ID NO: 3167.

[3656] The probes having the nucleotide sequence represented by SEQ ID NOS: 40955, 40956, 40957, 40958, 40959, 40960, 40961, 40962, 40963, 40964, 40965 were selected from the ORFs having the nucleotide sequence represented by SEQ ID NO: 3168.

[3657] The probes having the nucleotide sequence represented by SEQ ID NOS: 40966, 40967, 40968, 40969, 40970, 40971, 40972, 40973, 40974, 40975, 40976 were selected from the ORFs having the nucleotide sequence represented by SEQ ID NO: 3169.

[3658] The probes having the nucleotide sequence represented by SEQ ID NOS: 40977, 40978, 40979, 40980, 40981, 40982, 40983, 40984, 40985, 40986, 40987 were selected from the ORFs having the nucleotide sequence represented by SEQ ID NO: 3170.

[3659] The probes having the nucleotide sequence represented by SEQ ID NOS: 40988, 40989, 40990, 40991, 40992, 40993, 40994, 40995, 40996, 40997, 40998 were selected from the ORFs having the nucleotide sequence represented by SEQ ID NO: 3171.

[3660] The probes having the nucleotide sequence represented by SEQ ID NOS: 40999, 41000, 41001, 41002, 41003, 41004, 41005, 41006, 41007, 41008, 41009 were selected from the ORFs having the nucleotide sequence represented by SEQ ID NO: 3172.

[3661] The probes having the nucleotide sequence represented by SEQ ID NOS: 41010, 41011, 41012, 41013, 41014, 41015, 41016, 41017, 41018, 41019, 41020 were selected from the ORFs having the nucleotide sequence represented by SEQ ID NO: 3173.

[3662] The probes having the nucleotide sequence represented by SEQ ID NOS: 41021, 41022, 41023, 41024, 41025, 41026, 41027, 41028, 41029, 41030, 41031 were selected from the ORFs having the nucleotide sequence represented by SEQ ID NO: 3174.

[3663] The probes having the nucleotide sequence represented by SEQ ID NOS: 41032, 41033, 41034, 41035, 41036, 41037, 41038, 41039, 41040, 41041, 41042 were selected from the ORFs having the nucleotide sequence represented by SEQ ID NO: 3175.

[3664] The probes having the nucleotide sequence represented by SEQ ID NOS: 41043, 41044, 41045, 41046, 41047, 41048, 41049, 41050, 41051, 41052, 41053 were selected from the ORFs having the nucleotide sequence represented by SEQ ID NO: 3176.

[3665] The probes having the nucleotide sequence represented by SEQ ID NOS: 41054, 41055, 41056, 41057, 41058, 41059, 41060, 41061, 41062, 41063, 41064 were selected from the ORFs having the nucleotide sequence represented by SEQ ID NO: 3177.

[3666] The probes having the nucleotide sequence represented by SEQ ID NOS: 41065, 41066, 41067, 41068, 41069, 41070, 41071, 41072, 41073, 41074, 41075 were selected from the ORFs having the nucleotide sequence represented by SEQ ID NO: 3178.

[3667] The probes having the nucleotide sequence represented by SEQ ID NOS: 41076, 41077, 41078, 41079, 41080, 41081, 41082, 41083, 41084, 41085, 41086 were selected from the ORFs having the nucleotide sequence represented by SEQ ID NO: 3179.

[3668] The probes having the nucleotide sequence represented by SEQ ID NOS: 41087, 41088, 41089, 41090, 41091, 41092, 41093, 41094, 41095, 41096, 41097 were selected from the ORFs having the nucleotide sequence represented by SEQ ID NO: 3180.

[3669] The probes having the nucleotide sequence represented by SEQ ID NOS: 41098, 41099, 41100, 41101, 41102, 41103, 41104, 41105, 41106, 41107, 41108 were selected from the ORFs having the nucleotide sequence represented by SEQ ID NO: 3181.

[3670] The probes having the nucleotide sequence represented by SEQ ID NOS: 41109, 41110, 41111, 41112, 41113, 41114, 41115, 41116, 41117, 41118, 41119 were selected from the ORFs having the nucleotide sequence represented by SEQ ID NO: 3182.

[3671] The probes having the nucleotide sequence represented by SEQ ID NOS: 41120, 41121, 41122, 41123, 41124, 41125, 41126, 41127, 41128, 41129, 41130 were selected from the ORFs having the nucleotide sequence represented by SEQ ID NO: 3183.

[3672] The probes having the nucleotide sequence represented by SEQ ID NOS: 41131, 41132, 41133, 41134, 41135, 41136, 41137, 41138, 41139, 41140, 41141 were selected from the ORFs having the nucleotide sequence represented by SEQ ID NO: 3184.

[3673] The probes having the nucleotide sequence represented by SEQ ID NOS: 41142, 41143, 41144, 41145, 41146, 41147, 41148, 41149, 41150, 41151, 41152 were selected from the ORFs having the nucleotide sequence represented by SEQ ID NO: 3185.

[3674] The probes having the nucleotide sequence represented by SEQ ID NOS: 41153, 41154, 41155, 41156, 41157, 41158, 41159, 41160, 41161, 41162, 41163 were selected from the ORFs having the nucleotide sequence represented by SEQ ID NO: 3186.

[3675] The probes having the nucleotide sequence represented by SEQ ID NOS: 41164, 41165, 41166, 41167, 41168, 41169, 41170, 41171, 41172, 41173, 41174 were selected from the ORFs having the nucleotide sequence represented by SEQ ID NO: 3187.

[3676] The probes having the nucleotide sequence represented by SEQ ID NOS: 41175, 41176, 41177, 41178, 41179, 41180, 41181, 41182, 41183, 41184, 41185 were selected from the ORFs having the nucleotide sequence represented by SEQ ID NO: 3188.

[3677] The probes having the nucleotide sequence represented by SEQ ID NOS: 41186, 41187, 41188, 41189, 41190, 41191, 41192, 41193, 41194, 41195, 41196 were selected from the ORFs having the nucleotide sequence represented by SEQ ID NO: 3189.

[3678] The probes having the nucleotide sequence represented by SEQ ID NOS: 41197, 41198, 41199, 41200, 41201, 41202, 41203, 41204, 41205, 41206, 41207 were selected from the ORFs having the nucleotide sequence represented by SEQ ID NO: 3190.

[3679] The probes having the nucleotide sequence represented by SEQ ID NOS: 41208, 41209, 41210, 41211, 41212, 41213, 41214, 41215, 41216, 41217, 41218 were selected from the ORFs having the nucleotide sequence represented by SEQ ID NO: 3191.

[3680] The probes having the nucleotide sequence represented by SEQ ID NOS: 41219, 41220, 41221, 41222, 41223, 41224, 41225, 41226, 41227, 41228, 41229 were selected from the ORFs having the nucleotide sequence represented by SEQ ID NO: 3192.

[3681] The probes having the nucleotide sequence represented by SEQ ID NOS: 41230, 41231, 41232, 41233, 41234, 41235, 41236, 41237, 41238, 41239, 41240 were selected from the ORFs having the nucleotide sequence represented by SEQ ID NO: 3193.

[3682] The probes having the nucleotide sequence represented by SEQ ID NOS: 41241, 41242, 41243, 41244, 41245, 41246, 41247, 41248, 41249, 41250, 41251 were selected from the ORFs having the nucleotide sequence represented by SEQ ID NO: 3194.

[3683] The probes having the nucleotide sequence represented by SEQ ID NOS: 41252, 41253, 41254, 41255, 41256, 41257, 41258, 41259, 41260, 41261, 41262 were selected from the ORFs having the nucleotide sequence represented by SEQ ID NO: 3195.

[3684] The probes having the nucleotide sequence represented by SEQ ID NOS: 41263, 41264, 41265, 41266, 41267, 41268, 41269, 41270, 41271, 41272, 41273 were selected from the ORFs having the nucleotide sequence represented by SEQ ID NO: 3196.

[3685] The probes having the nucleotide sequence represented by SEQ ID NOS: 41274, 41275, 41276, 41277, 41278, 41279, 41280, 41281, 41282, 41283, 41284 were selected from the ORFs having the nucleotide sequence represented by SEQ ID NO: 3197.

[3686] The probes having the nucleotide sequence represented by SEQ ID NOS: 41285, 41286, 41287, 41288, 41289, 41290, 41291, 41292, 41293, 41294, 41295 were selected from the ORFs having the nucleotide sequence represented by SEQ ID NO: 3198.

[3687] The probes having the nucleotide sequence represented by SEQ ID NOS: 41296, 41297, 41298, 41299, 41300, 41301, 41302, 41303, 41304, 41305, 41306 were selected from the ORFs having the nucleotide sequence represented by SEQ ID NO: 3199.

[3688] The probes having the nucleotide sequence represented by SEQ ID NOS: 41307, 41308, 41309, 41310, 41311, 41312, 41313, 41314, 41315, 41316, 41317 were selected from the ORFs having the nucleotide sequence represented by SEQ ID NO: 3200.

[3689] The probes having the nucleotide sequence represented by SEQ ID NOS: 41318, 41319, 41320, 41321, 41322, 41323, 41324, 41325, 41326, 41327, 41328 were selected from the ORFs having the nucleotide sequence represented by SEQ ID NO: 3201.

[3690] The probes having the nucleotide sequence represented by SEQ ID NOS: 41329, 41330, 41331, 41332, 41333, 41334, 41335, 41336, 41337, 41338, 41339 were selected from the ORFs having the nucleotide sequence represented by SEQ ID NO: 3202.

[3691] The probes having the nucleotide sequence represented by SEQ ID NOS: 41340, 41341, 41342, 41343, 41344, 41345, 41346, 41347, 41348, 41349, 41350 were selected from the ORFs having the nucleotide sequence represented by SEQ ID NO: 3203.

[3692] The probes having the nucleotide sequence represented by SEQ ID NOS: 41351, 41352, 41353, 41354, 41355, 41356, 41357, 41358, 41359, 41360, 41361 were selected from the ORFs having the nucleotide sequence represented by SEQ ID NO: 3204.

[3693] The probes having the nucleotide sequence represented by SEQ ID NOS: 41362, 41363, 41364, 41365, 41366, 41367, 41368, 41369, 41370, 41371, 41372 were selected from the ORFs having the nucleotide sequence represented by SEQ ID NO: 3205.

[3694] The probes having the nucleotide sequence represented by SEQ ID NOS: 41373, 41374, 41375, 41376, 41377, 41378, 41379, 41380, 41381, 41382, 41383 were selected from the ORFs having the nucleotide sequence represented by SEQ ID NO: 3206.

[3695] The probes having the nucleotide sequence represented by SEQ ID NOS: 41384, 41385, 41386, 41387, 41388, 41389, 41390, 41391, 41392, 41393, 41394 were selected from the ORFs having the nucleotide sequence represented by SEQ ID NO: 3207.

[3696] The probes having the nucleotide sequence represented by SEQ ID NOS: 41395, 41396, 41397, 41398, 41399, 41400, 41401, 41402, 41403, 41404, 41405 were selected from the ORFs having the nucleotide sequence represented by SEQ ID NO: 3208.

[3697] The probes having the nucleotide sequence represented by SEQ ID NOS: 41406, 41407, 41408, 41409, 41410, 41411, 41412, 41413, 41414, 41415, 41416 were selected from the ORFs having the nucleotide sequence represented by SEQ ID NO: 3209.

[3698] The probes having the nucleotide sequence represented by SEQ ID NOS: 41417, 41418, 41419, 41420, 41421, 41422, 41423, 41424, 41425, 41426, 41427 were selected from the ORFs having the nucleotide sequence represented by SEQ ID NO: 3210.

[3699] The probes having the nucleotide sequence represented by SEQ ID NOS: 41428, 41429, 41430, 41431, 41432, 41433, 41434, 41435, 41436, 41437, 41438 were selected from the ORFs having the nucleotide sequence represented by SEQ ID NO: 3211.

[3700] The probes having the nucleotide sequence represented by SEQ ID NOS: 41439, 41440, 41441, 41442, 41443, 41444, 41445, 41446, 41447, 41448, 41449 were selected from the ORFs having the nucleotide sequence represented by SEQ ID NO: 3212.

[3701] The probes having the nucleotide sequence represented by SEQ ID NOS: 41450, 41451, 41452, 41453, 41454, 41455, 41456, 41457, 41458, 41459, 41460 were selected from the ORFs having the nucleotide sequence represented by SEQ ID NO: 3213.

[3702] The probes having the nucleotide sequence represented by SEQ ID NOS: 41461, 41462, 41463, 41464, 41465, 41466, 41467, 41468, 41469, 41470, 41471 were selected from the ORFs having the nucleotide sequence represented by SEQ ID NO: 3214.

[3703] The probes having the nucleotide sequence represented by SEQ ID NOS: 41472, 41473, 41474, 41475, 41476, 41477, 41478, 41479, 41480, 41481, 41482 were selected from the ORFs having the nucleotide sequence represented by SEQ ID NO: 3215.

[3704] The probes having the nucleotide sequence represented by SEQ ID NOS: 41483, 41484, 41485, 41486, 41487, 41488, 41489, 41490, 41491, 41492, 41493 were selected from the ORFs having the nucleotide sequence represented by SEQ ID NO: 3216.

[3705] The probes having the nucleotide sequence represented by SEQ ID NOS: 41494, 41495, 41496, 41497, 41498, 41499, 41500, 41501, 41502, 41503, 41504 were selected from the ORFs having the nucleotide sequence represented by SEQ ID NO: 3217.

[3706] The probes having the nucleotide sequence represented by SEQ ID NOS: 41505, 41506, 41507, 41508, 41509, 41510, 41511, 41512, 41513, 41514, 41515 were selected from the ORFs having the nucleotide sequence represented by SEQ ID NO: 3218.

[3707] The probes having the nucleotide sequence represented by SEQ ID NOS: 41516, 41517, 41518, 41519, 41520, 41521, 41522, 41523, 41524, 41525, 41526 were selected from the ORFs having the nucleotide sequence represented by SEQ ID NO: 3219.

[3708] The probes having the nucleotide sequence represented by SEQ ID NOS: 41527, 41528, 41529, 41530, 41531, 41532, 41533, 41534, 41535, 41536, 41537 were selected from the ORFs having the nucleotide sequence represented by SEQ ID NO: 3220.

[3709] The probes having the nucleotide sequence represented by SEQ ID NOS: 41538, 41539, 41540, 41541, 41542, 41543, 41544, 41545, 41546, 41547, 41548 were selected from the ORFs having the nucleotide sequence represented by SEQ ID NO: 3221.

[3710] The probes having the nucleotide sequence represented by SEQ ID NOS: 41549, 41550, 41551, 41552, 41553, 41554, 41555, 41556, 41557, 41558, 41559 were selected from the ORFs having the nucleotide sequence represented by SEQ ID NO: 3222.

[3711] The probes having the nucleotide sequence represented by SEQ ID NOS: 41560, 41561, 41562, 41563, 41564, 41565, 41566, 41567, 41568, 41569, 41570 were selected from the ORFs having the nucleotide sequence represented by SEQ ID NO: 3223.

[3712] The probes having the nucleotide sequence represented by SEQ ID NOS: 41571, 41572, 41573, 41574, 41575, 41576, 41577, 41578, 41579, 41580, 41581 were selected from the ORFs having the nucleotide sequence represented by SEQ ID NO: 3224.

[3713] The probes having the nucleotide sequence represented by SEQ ID NOS: 41582, 41583, 41584, 41585, 41586, 41587, 41588, 41589, 41590, 41591, 41592 were selected from the ORFs having the nucleotide sequence represented by SEQ ID NO: 3225.

[3714] The probes having the nucleotide sequence represented by SEQ ID NOS: 41593, 41594, 41595, 41596, 41597, 41598, 41599, 41600, 41601, 41602, 41603 were selected from the ORFs having the nucleotide sequence represented by SEQ ID NO: 3226.

[3715] The probes having the nucleotide sequence represented by SEQ ID NOS: 41604, 41605, 41606, 41607, 41608, 41609, 41610, 41611, 41612, 41613, 41614 were selected from the ORFs having the nucleotide sequence represented by SEQ ID NO: 3227.

[3716] The probes having the nucleotide sequence represented by SEQ ID NOS: 41615, 41616, 41617, 41618, 41619, 41620, 41621, 41622, 41623, 41624, 41625 were selected from the ORFs having the nucleotide sequence represented by SEQ ID NO: 3228.

[3717] The probes having the nucleotide sequence represented by SEQ ID NOS: 41626, 41627, 41628, 41629, 41630, 41631, 41632, 41633, 41634, 41635, 41636 were selected from the ORFs having the nucleotide sequence represented by SEQ ID NO: 3229.

[3718] The probes having the nucleotide sequence represented by SEQ ID NOS: 41637, 41638, 41639, 41640, 41641, 41642, 41643, 41644, 41645, 41646, 41647 were selected from the ORFs having the nucleotide sequence represented by SEQ ID NO: 3230.

[3719] The probes having the nucleotide sequence represented by SEQ ID NOS: 41648, 41649, 41650, 41651, 41652, 41653, 41654, 41655, 41656, 41657, 41658 were selected from the ORFs having the nucleotide sequence represented by SEQ ID NO: 3231.

[3720] The probes having the nucleotide sequence represented by SEQ ID NOS: 41659, 41660, 41661, 41662, 41663, 41664, 41665, 41666, 41667, 41668, 41669 were selected from the ORFs having the nucleotide sequence represented by SEQ ID NO: 3232.

[3721] The probes having the nucleotide sequence represented by SEQ ID NOS: 41670, 41671, 41672, 41673, 41674, 41675, 41676, 41677, 41678, 41679, 41680 were selected from the ORFs having the nucleotide sequence represented by SEQ ID NO: 3233.

[3722] The probes having the nucleotide sequence represented by SEQ ID NOS: 41681, 41682, 41683, 41684, 41685, 41686, 41687, 41688, 41689, 41690, 41691 were selected from the ORFs having the nucleotide sequence represented by SEQ ID NO: 3234.

[3723] The probes having the nucleotide sequence represented by SEQ ID NOS: 41692, 41693, 41694, 41695, 41696, 41697, 41698, 41699, 41700, 41701, 41702 were selected from the ORFs having the nucleotide sequence represented by SEQ ID NO: 3235.

[3724] The probes having the nucleotide sequence represented by SEQ ID NOS: 41703, 41704, 41705, 41706, 41707, 41708, 41709, 41710, 41711, 41712, 41713 were selected from the ORFs having the nucleotide sequence represented by SEQ ID NO: 3236.

[3725] The probes having the nucleotide sequence represented by SEQ ID NOS: 41714, 41715, 41716, 41717, 41718, 41719, 41720, 41721, 41722, 41723, 41724 were selected from the ORFs having the nucleotide sequence represented by SEQ ID NO: 3237.

[3726] The probes having the nucleotide sequence represented by SEQ ID NOS: 41725, 41726, 41727, 41728, 41729, 41730, 41731, 41732, 41733, 41734, 41735 were selected from the ORFs having the nucleotide sequence represented by SEQ ID NO: 3238.

[3727] The probes having the nucleotide sequence represented by SEQ ID NOS: 41736, 41737, 41738, 41739, 41740, 41741, 41742, 41743, 41744, 41745, 41746 were selected from the ORFs having the nucleotide sequence represented by SEQ ID NO: 3239.

[3728] The probes having the nucleotide sequence represented by SEQ ID NOS: 41747, 41748, 41749, 41750, 41751, 41752, 41753, 41754, 41755, 41756, 41757 were selected from the ORFs having the nucleotide sequence represented by SEQ ID NO: 3240.

[3729] The probes having the nucleotide sequence represented by SEQ ID NOS: 41758, 41759, 41760, 41761, 41762, 41763, 41764, 41765, 41766, 41767, 41768 were selected from the ORFs having the nucleotide sequence represented by SEQ ID NO: 3241.

[3730] The probes having the nucleotide sequence represented by SEQ ID NOS: 41769, 41770, 41771, 41772, 41773, 41774, 41775, 41776, 41777, 41778, 41779 were selected from the ORFs having the nucleotide sequence represented by SEQ ID NO: 3242.

[3731] The probes having the nucleotide sequence represented by SEQ ID NOS: 41780, 41781, 41782, 41783, 41784, 41785, 41786, 41787, 41788, 41789, 41790 were selected from the ORFs having the nucleotide sequence represented by SEQ ID NO: 3243.

[3732] The probes having the nucleotide sequence represented by SEQ ID NOS: 41791, 41792, 41793, 41794, 41795, 41796, 41797, 41798, 41799, 41800, 41801 were selected from the ORFs having the nucleotide sequence represented by SEQ ID NO: 3244.

[3733] The probes having the nucleotide sequence represented by SEQ ID NOS: 41802, 41803, 41804, 41805, 41806, 41807, 41808, 41809, 41810, 41811, 41812 were selected from the ORFs having the nucleotide sequence represented by SEQ ID NO: 3245.

[3734] The probes having the nucleotide sequence represented by SEQ ID NOS: 41813, 41814, 41815, 41816, 41817, 41818, 41819, 41820, 41821, 41822, 41823 were selected from the ORFs having the nucleotide sequence represented by SEQ ID NO: 3246.

[3735] The probes having the nucleotide sequence represented by SEQ ID NOS: 41824, 41825, 41826, 41827, 41828, 41829, 41830, 41831, 41832, 41833, 41834 were selected from the ORFs having the nucleotide sequence represented by SEQ ID NO: 3247.

[3736] The probes having the nucleotide sequence represented by SEQ ID NOS: 41835, 41836, 41837, 41838, 41839, 41840, 41841, 41842, 41843, 41844, 41845 were selected from the ORFs having the nucleotide sequence represented by SEQ ID NO: 3248.

[3737] The probes having the nucleotide sequence represented by SEQ ID NOS: 41846, 41847, 41848, 41849, 41850, 41851, 41852, 41853, 41854, 41855, 41856 were selected from the ORFs having the nucleotide sequence represented by SEQ ID NO: 3249.

[3738] The probes having the nucleotide sequence represented by SEQ ID NOS: 41857, 41858, 41859, 41860, 41861, 41862, 41863, 41864, 41865, 41866, 41867 were selected from the ORFs having the nucleotide sequence represented by SEQ ID NO: 3250.

[3739] The probes having the nucleotide sequence represented by SEQ ID NOS: 41868, 41869, 41870, 41871, 41872, 41873, 41874, 41875, 41876, 41877, 41878 were selected from the ORFs having the nucleotide sequence represented by SEQ ID NO: 3251.

[3740] The probes having the nucleotide sequence represented by SEQ ID NOS: 41879, 41880, 41881, 41882, 41883, 41884, 41885, 41886, 41887, 41888, 41889 were selected from the ORFs having the nucleotide sequence represented by SEQ ID NO: 3252.

[3741] The probes having the nucleotide sequence represented by SEQ ID NOS: 41890, 41891, 41892, 41893, 41894, 41895, 41896, 41897, 41898, 41899, 41900 were selected from the ORFs having the nucleotide sequence represented by SEQ ID NO: 3253.

[3742] The probes having the nucleotide sequence represented by SEQ ID NOS: 41901, 41902, 41903, 41904, 41905, 41906, 41907, 41908, 41909, 41910, 41911 were selected from the ORFs having the nucleotide sequence represented by SEQ ID NO: 3254.

[3743] The probes having the nucleotide sequence represented by SEQ ID NOS: 41912, 41913, 41914, 41915, 41916, 41917, 41918, 41919, 41920, 41921, 41922 were selected from the ORFs having the nucleotide sequence represented by SEQ ID NO: 3255.

[3744] The probes having the nucleotide sequence represented by SEQ ID NOS: 41923, 41924, 41925, 41926, 41927, 41928, 41929, 41930, 41931, 41932, 41933 were selected from the ORFs having the nucleotide sequence represented by SEQ ID NO: 3256.

[3745] The probes having the nucleotide sequence represented by SEQ ID NOS: 41934, 41935, 41936, 41937, 41938, 41939, 41940, 41941, 41942, 41943, 41944 were selected from the ORFs having the nucleotide sequence represented by SEQ ID NO: 3257.

[3746] The probes having the nucleotide sequence represented by SEQ ID NOS: 41945, 41946, 41947, 41948, 41949, 41950, 41951, 41952, 41953, 41954, 41955 were selected from the ORFs having the nucleotide sequence represented by SEQ ID NO: 3258.

[3747] The probes having the nucleotide sequence represented by SEQ ID NOS: 41956, 41957, 41958, 41959, 41960, 41961, 41962, 41963, 41964, 41965, 41966 were selected from the ORFs having the nucleotide sequence represented by SEQ ID NO: 3259.

[3748] The probes having the nucleotide sequence represented by SEQ ID NOS: 41967, 41968, 41969, 41970, 41971, 41972, 41973, 41974, 41975, 41976, 41977 were selected from the ORFs having the nucleotide sequence represented by SEQ ID NO: 3260.

[3749] The probes having the nucleotide sequence represented by SEQ ID NOS: 41978, 41979, 41980, 41981, 41982, 41983, 41984, 41985, 41986, 41987, 41988 were selected from the ORFs having the nucleotide sequence represented by SEQ ID NO: 3261.

[3750] The probes having the nucleotide sequence represented by SEQ ID NOS: 41989, 41990, 41991, 41992, 41993, 41994, 41995, 41996, 41997, 41998, 41999 were selected from the ORFs having the nucleotide sequence represented by SEQ ID NO: 3262.

[3751] The probes having the nucleotide sequence represented by SEQ ID NOS: 42000, 42001, 42002, 42003, 42004, 42005, 42006, 42007, 42008, 42009, 42010 were selected from the ORFs having the nucleotide sequence represented by SEQ ID NO: 3263.

[3752] The probes having the nucleotide sequence represented by SEQ ID NOS: 42011, 42012, 42013, 42014, 42015, 42016, 42017, 42018, 42019, 42020, 42021 were selected from the ORFs having the nucleotide sequence represented by SEQ ID NO: 3264.

[3753] The probes having the nucleotide sequence represented by SEQ ID NOS: 42022, 42023, 42024, 42025, 42026, 42027, 42028, 42029, 42030, 42031, 42032 were selected from the ORFs having the nucleotide sequence represented by SEQ ID NO: 3265.

[3754] The probes having the nucleotide sequence represented by SEQ ID NOS: 42033, 42034, 42035, 42036, 42037, 42038, 42039, 42040, 42041, 42042, 42043 were selected from the ORFs having the nucleotide sequence represented by SEQ ID NO: 3266.

[3755] The probes having the nucleotide sequence represented by SEQ ID NOS: 42044, 42045, 42046, 42047, 42048, 42049, 42050, 42051, 42052, 42053, 42054 were selected from the ORFs having the nucleotide sequence represented by SEQ ID NO: 3267.

[3756] The probes having the nucleotide sequence represented by SEQ ID NOS: 42055, 42056, 42057, 42058, 42059, 42060, 42061, 42062, 42063, 42064, 42065 were selected from the ORFs having the nucleotide sequence represented by SEQ ID NO: 3268.

[3757] The probes having the nucleotide sequence represented by SEQ ID NOS: 42066, 42067, 42068, 42069, 42070, 42071, 42072, 42073, 42074, 42075, 42076 were selected from the ORFs having the nucleotide sequence represented by SEQ ID NO: 3269.

[3758] The probes having the nucleotide sequence represented by SEQ ID NOS: 42077, 42078, 42079, 42080, 42081, 42082, 42083, 42084, 42085, 42086, 42087 were selected from the ORFs having the nucleotide sequence represented by SEQ ID NO: 3270.

[3759] The probes having the nucleotide sequence represented by SEQ ID NOS: 42088, 42089, 42090, 42091, 42092, 42093, 42094, 42095, 42096, 42097, 42098 were selected from the ORFs having the nucleotide sequence represented by SEQ ID NO: 3271.

[3760] The probes having the nucleotide sequence represented by SEQ ID NOS: 42099, 42100, 42101, 42102, 42103, 42104, 42105, 42106, 42107, 42108, 42109 were selected from the ORFs having the nucleotide sequence represented by SEQ ID NO: 3272.

[3761] The probes having the nucleotide sequence represented by SEQ ID NOS: 42110, 42111, 42112, 42113, 42114, 42115, 42116, 42117, 42118, 42119, 42120 were selected from the ORFs having the nucleotide sequence represented by SEQ ID NO: 3273.

[3762] The probes having the nucleotide sequence represented by SEQ ID NOS: 42121, 42122, 42123, 42124, 42125, 42126, 42127, 42128, 42129, 42130, 42131 were selected from the ORFs having the nucleotide sequence represented by SEQ ID NO: 3274.

[3763] The probes having the nucleotide sequence represented by SEQ ID NOS: 42132, 42133, 42134, 42135, 42136, 42137, 42138, 42139, 42140, 42141, 42142 were selected from the ORFs having the nucleotide sequence represented by SEQ ID NO: 3275.

[3764] The probes having the nucleotide sequence represented by SEQ ID NOS: 42143, 42144, 42145, 42146, 42147, 42148, 42149, 42150, 42151, 42152, 42153 were selected from the ORFs having the nucleotide sequence represented by SEQ ID NO: 3276.

[3765] The probes having the nucleotide sequence represented by SEQ ID NOS: 42154, 42155, 42156, 42157, 42158, 42159, 42160, 42161, 42162, 42163, 42164 were selected from the ORFs having the nucleotide sequence represented by SEQ ID NO: 3277.

[3766] The probes having the nucleotide sequence represented by SEQ ID NOS: 42165, 42166, 42167, 42168, 42169, 42170, 42171, 42172, 42173, 42174, 42175 were selected from the ORFs having the nucleotide sequence represented by SEQ ID NO: 3278.

[3767] The probes having the nucleotide sequence represented by SEQ ID NOS: 42176, 42177, 42178, 42179, 42180, 42181, 42182, 42183, 42184, 42185, 42186 were selected from the ORFs having the nucleotide sequence represented by SEQ ID NO: 3279.

[3768] The probes having the nucleotide sequence represented by SEQ ID NOS: 42187, 42188, 42189, 42190, 42191, 42192, 42193, 42194, 42195, 42196, 42197 were selected from the ORFs having the nucleotide sequence represented by SEQ ID NO: 3280.

[3769] The probes having the nucleotide sequence represented by SEQ ID NOS: 42198, 42199, 42200, 42201, 42202, 42203, 42204, 42205, 42206, 42207, 42208 were selected from the ORFs having the nucleotide sequence represented by SEQ ID NO: 3281.

[3770] The probes having the nucleotide sequence represented by SEQ ID NOS: 42209, 42210, 42211, 42212, 42213, 42214, 42215, 42216, 42217, 42218, 42219 were selected from the ORFs having the nucleotide sequence represented by SEQ ID NO: 3282.

[3771] The probes having the nucleotide sequence represented by SEQ ID NOS: 42220, 42221, 42222, 42223, 42224, 42225, 42226, 42227, 42228, 42229, 42230 were selected from the ORFs having the nucleotide sequence represented by SEQ ID NO: 3283.

[3772] The probes having the nucleotide sequence represented by SEQ ID NOS: 42231, 42232, 42233, 42234, 42235, 42236, 42237, 42238, 42239, 42240, 42241 were selected from the ORFs having the nucleotide sequence represented by SEQ ID NO: 3284.

[3773] The probes having the nucleotide sequence represented by SEQ ID NOS: 42242, 42243, 42244, 42245, 42246, 42247, 42248, 42249, 42250, 42251, 42252 were selected from the ORFs having the nucleotide sequence represented by SEQ ID NO: 3285.

[3774] The probes having the nucleotide sequence represented by SEQ ID NOS: 42253, 42254, 42255, 42256, 42257, 42258, 42259, 42260, 42261, 42262, 42263 were selected from the ORFs having the nucleotide sequence represented by SEQ ID NO: 3286.

[3775] The probes having the nucleotide sequence represented by SEQ ID NOS: 42264, 42265, 42266, 42267, 42268, 42269, 42270, 42271, 42272, 42273, 42274 were selected from the ORFs having the nucleotide sequence represented by SEQ ID NO: 3287.

[3776] The probes having the nucleotide sequence represented by SEQ ID NOS: 42275, 42276, 42277, 42278, 42279, 42280, 42281, 42282, 42283, 42284, 42285 were selected from the ORFs having the nucleotide sequence represented by SEQ ID NO: 3288.

[3777] The probes having the nucleotide sequence represented by SEQ ID NOS: 42286, 42287, 42288, 42289, 42290, 42291, 42292, 42293, 42294, 42295, 42296 were selected from the ORFs having the nucleotide sequence represented by SEQ ID NO: 3289.

[3778] The probes having the nucleotide sequence represented by SEQ ID NOS: 42297, 42298, 42299, 42300, 42301, 42302, 42303, 42304, 42305, 42306, 42307 were selected from the ORFs having the nucleotide sequence represented by SEQ ID NO: 3290.

[3779] The probes having the nucleotide sequence represented by SEQ ID NOS: 42308, 42309, 42310, 42311, 42312, 42313, 42314, 42315, 42316, 42317, 42318 were selected from the ORFs having the nucleotide sequence represented by SEQ ID NO: 3291.

[3780] The probes having the nucleotide sequence represented by SEQ ID NOS: 42319, 42320, 42321, 42322, 42323, 42324, 42325, 42326, 42327, 42328, 42329 were selected from the ORFs having the nucleotide sequence represented by SEQ ID NO: 3292.

[3781] The probes having the nucleotide sequence represented by SEQ ID NOS: 42330, 42331, 42332, 42333, 42334, 42335, 42336, 42337, 42338, 42339, 42340 were selected from the ORFs having the nucleotide sequence represented by SEQ ID NO: 3293.

[3782] The probes having the nucleotide sequence represented by SEQ ID NOS: 42341, 42342, 42343, 42344, 42345, 42346, 42347, 42348, 42349, 42350, 42351 were selected from the ORFs having the nucleotide sequence represented by SEQ ID NO: 3294.

[3783] The probes having the nucleotide sequence represented by SEQ ID NOS: 42352, 42353, 42354, 42355, 42356, 42357, 42358, 42359, 42360, 42361, 42362 were selected from the ORFs having the nucleotide sequence represented by SEQ ID NO: 3295.

[3784] The probes having the nucleotide sequence represented by SEQ ID NOS: 42363, 42364, 42365, 42366, 42367, 42368, 42369, 42370, 42371, 42372, 42373 were selected from the ORFs having the nucleotide sequence represented by SEQ ID NO: 3296.

[3785] The probes having the nucleotide sequence represented by SEQ ID NOS: 42374, 42375, 42376, 42377, 42378, 42379, 42380, 42381, 42382, 42383, 42384 were selected from the ORFs having the nucleotide sequence represented by SEQ ID NO: 3297.

[3786] The probes having the nucleotide sequence represented by SEQ ID NOS: 42385, 42386, 42387, 42388, 42389, 42390, 42391, 42392, 42393, 42394, 42395 were selected from the ORFs having the nucleotide sequence represented by SEQ ID NO: 3298.

[3787] The probes having the nucleotide sequence represented by SEQ ID NOS: 42396, 42397, 42398, 42399, 42400, 42401, 42402, 42403, 42404, 42405, 42406 were selected from the ORFs having the nucleotide sequence represented by SEQ ID NO: 3299.

[3788] The probes having the nucleotide sequence represented by SEQ ID NOS: 42407, 42408, 42409, 42410, 42411, 42412, 42413, 42414, 42415, 42416, 42417 were selected from the ORFs having the nucleotide sequence represented by SEQ ID NO: 3300.

[3789] The probes having the nucleotide sequence represented by SEQ ID NOS: 42418, 42419, 42420, 42421, 42422, 42423, 42424, 42425, 42426, 42427, 42428 were selected from the ORFs having the nucleotide sequence represented by SEQ ID NO: 3301.

[3790] The probes having the nucleotide sequence represented by SEQ ID NOS: 42429, 42430, 42431, 42432, 42433, 42434, 42435, 42436, 42437, 42438, 42439 were selected from the ORFs having the nucleotide sequence represented by SEQ ID NO: 3302.

[3791] The probes having the nucleotide sequence represented by SEQ ID NOS: 42440, 42441, 42442, 42443, 42444, 42445, 42446, 42447, 42448, 42449, 42450 were selected from the ORFs having the nucleotide sequence represented by SEQ ID NO: 3303.

[3792] The probes having the nucleotide sequence represented by SEQ ID NOS: 42451, 42452, 42453, 42454, 42455, 42456, 42457, 42458, 42459, 42460, 42461 were selected from the ORFs having the nucleotide sequence represented by SEQ ID NO: 3304.

[3793] The probes having the nucleotide sequence represented by SEQ ID NOS: 42462, 42463, 42464, 42465, 42466, 42467, 42468, 42469, 42470, 42471, 42472 were selected from the ORFs having the nucleotide sequence represented by SEQ ID NO: 3305.

[3794] The probes having the nucleotide sequence represented by SEQ ID NOS: 42473, 42474, 42475, 42476, 42477, 42478, 42479, 42480, 42481, 42482, 42483 were selected from the ORFs having the nucleotide sequence represented by SEQ ID NO: 3306.

[3795] The probes having the nucleotide sequence represented by SEQ ID NOS: 42484, 42485, 42486, 42487, 42488, 42489, 42490, 42491, 42492, 42493, 42494 were selected from the ORFs having the nucleotide sequence represented by SEQ ID NO: 3307.

[3796] The probes having the nucleotide sequence represented by SEQ ID NOS: 42495, 42496, 42497, 42498, 42499, 42500, 42501, 42502, 42503, 42504, 42505 were selected from the ORFs having the nucleotide sequence represented by SEQ ID NO: 3308.

[3797] The probes having the nucleotide sequence represented by SEQ ID NOS: 42506, 42507, 42508, 42509, 42510, 42511, 42512, 42513, 42514, 42515, 42516 were selected from the ORFs having the nucleotide sequence represented by SEQ ID NO: 3309.

[3798] The probes having the nucleotide sequence represented by SEQ ID NOS: 42517, 42518, 42519, 42520, 42521, 42522, 42523, 42524, 42525, 42526, 42527 were selected from the ORFs having the nucleotide sequence represented by SEQ ID NO: 3310.

[3799] The probes having the nucleotide sequence represented by SEQ ID NOS: 42528, 42529, 42530, 42531, 42532, 42533, 42534, 42535, 42536, 42537, 42538 were selected from the ORFs having the nucleotide sequence represented by SEQ ID NO: 3311.

[3800] The probes having the nucleotide sequence represented by SEQ ID NOS: 42539, 42540, 42541, 42542, 42543, 42544, 42545, 42546, 42547, 42548, 42549 were selected from the ORFs having the nucleotide sequence represented by SEQ ID NO: 3312.

[3801] The probes having the nucleotide sequence represented by SEQ ID NOS: 42550, 42551, 42552, 42553, 42554, 42555, 42556, 42557, 42558, 42559, 42560 were selected from the ORFs having the nucleotide sequence represented by SEQ ID NO: 3313.

[3802] The probes having the nucleotide sequence represented by SEQ ID NOS: 42561, 42562, 42563, 42564, 42565, 42566, 42567, 42568, 42569, 42570, 42571 were selected from the ORFs having the nucleotide sequence represented by SEQ ID NO: 3314.

[3803] The probes having the nucleotide sequence represented by SEQ ID NOS: 42572, 42573, 42574, 42575, 42576, 42577, 42578, 42579, 42580, 42581, 42582 were selected from the ORFs having the nucleotide sequence represented by SEQ ID NO: 3315.

[3804] The probes having the nucleotide sequence represented by SEQ ID NOS: 42583, 42584, 42585, 42586, 42587, 42588, 42589, 42590, 42591, 42592, 42593 were selected from the ORFs having the nucleotide sequence represented by SEQ ID NO: 3316.

[3805] The probes having the nucleotide sequence represented by SEQ ID NOS: 42594, 42595, 42596, 42597, 42598, 42599, 42600, 42601, 42602, 42603, 42604 were selected from the ORFs having the nucleotide sequence represented by SEQ ID NO: 3317.

[3806] The probes having the nucleotide sequence represented by SEQ ID NOS: 42605, 42606, 42607, 42608, 42609, 42610, 42611, 42612, 42613, 42614, 42615 were selected from the ORFs having the nucleotide sequence represented by SEQ ID NO: 3318.

[3807] The probes having the nucleotide sequence represented by SEQ ID NOS: 42616, 42617, 42618, 42619, 42620, 42621, 42622, 42623, 42624, 42625, 42626 were selected from the ORFs having the nucleotide sequence represented by SEQ ID. NO: 3319.

[3808] The probes having the nucleotide sequence represented by SEQ ID NOS: 42627, 42628, 42629, 42630, 42631, 42632, 42633, 42634, 42635, 42636, 42637 were selected from the ORFs having the nucleotide sequence represented by SEQ ID NO: 3320.

[3809] The probes having the nucleotide sequence represented by SEQ ID NOS: 42638, 42639, 42640, 42641, 42642, 42643, 42644, 42645, 42646, 42647, 42648 were selected from the ORFs having the nucleotide sequence represented by SEQ ID NO: 3321.

[3810] The probes having the nucleotide sequence represented by SEQ ID NOS: 42649, 42650, 42651, 42652, 42653, 42654, 42655, 42656, 42657, 42658, 42659 were selected from the ORFs having the nucleotide sequence represented by SEQ ID NO: 3322.

[3811] The probes having the nucleotide sequence represented by SEQ ID NOS: 42660, 42661, 42662, 42663, 42664, 42665, 42666, 42667, 42668, 42669, 42670 were selected from the ORFs having the nucleotide sequence represented by SEQ ID NO: 3323.

[3812] The probes having the nucleotide sequence represented by SEQ ID NOS: 42671, 42672, 42673, 42674, 42675, 42676, 42677, 42678, 42679, 42680, 42681 were selected from the ORFs having the nucleotide sequence represented by SEQ ID NO: 3324.

[3813] The probes having the nucleotide sequence represented by SEQ ID NOS: 42682, 42683, 42684, 42685, 42686, 42687, 42688, 42689, 42690, 42691, 42692 were selected from the ORFs having the nucleotide sequence represented by SEQ ID NO: 3325.

[3814] The probes having the nucleotide sequence represented by SEQ ID NOS: 42693, 42694, 42695, 42696, 42697, 42698, 42699, 42700, 42701, 42702, 42703 were selected from the ORFs having the nucleotide sequence represented by SEQ ID NO: 3326.

[3815] The probes having the nucleotide sequence represented by SEQ ID NOS: 42704, 42705, 42706, 42707, 42708, 42709, 42710, 42711, 42712, 42713, 42714 were selected from the ORFs having the nucleotide sequence represented by SEQ ID NO: 3327.

[3816] The probes having the nucleotide sequence represented by SEQ ID NOS: 42715, 42716, 42717, 42718, 42719, 42720, 42721, 42722, 42723, 42724, 42725 were selected from the ORFs having the nucleotide sequence represented by SEQ ID NO: 3328.

[3817] The probes having the nucleotide sequence represented by SEQ ID NOS: 42726, 42727, 42728, 42729, 42730, 42731, 42732, 42733, 42734, 42735, 42736 were selected from the ORFs having the nucleotide sequence represented by SEQ ID NO: 3329.

[3818] The probes having the nucleotide sequence represented by SEQ ID NOS: 42737, 42738, 42739, 42740, 42741, 42742, 42743, 42744, 42745, 42746, 42747 were selected from the ORFs having the nucleotide sequence represented by SEQ ID NO: 3330.

[3819] The probes having the nucleotide sequence represented by SEQ ID NOS: 42748, 42749, 42750, 42751, 42752, 42753, 42754, 42755, 42756, 42757, 42758 were selected from the ORFs having the nucleotide sequence represented by SEQ ID NO: 3331.

[3820] The probes having the nucleotide sequence represented by SEQ ID NOS: 42759, 42760, 42761, 42762, 42763, 42764, 42765, 42766, 42767, 42768, 42769 were selected from the ORFs having the nucleotide sequence represented by SEQ ID NO: 3332.

[3821] The probes having the nucleotide sequence represented by SEQ ID NOS: 42770, 42771, 42772, 42773, 42774, 42775, 42776, 42777, 42778, 42779, 42780 were selected from the ORFs having the nucleotide sequence represented by SEQ ID NO: 3333.

[3822] The probes having the nucleotide sequence represented by SEQ ID NOS: 42781, 42782, 42783, 42784, 42785, 42786, 42787, 42788, 42789, 42790, 42791 were selected from the ORFs having the nucleotide sequence represented by SEQ ID NO: 3334.

[3823] The probes having the nucleotide sequence represented by SEQ ID NOS: 42792, 42793, 42794, 42795, 42796, 42797, 42798, 42799, 42800, 42801, 42802 were selected from the ORFs having the nucleotide sequence represented by SEQ ID NO: 3335.

[3824] The probes having the nucleotide sequence represented by SEQ ID NOS: 42803, 42804, 42805, 42806, 42807, 42808, 42809, 42810, 42811, 42812, 42813 were selected from the ORFs having the nucleotide sequence represented by SEQ ID NO: 3336.

[3825] The probes having the nucleotide sequence represented by SEQ ID NOS: 42814, 42815, 42816, 42817, 42818, 42819, 42820, 42821, 42822, 42823, 42824 were selected from the ORFs having the nucleotide sequence represented by SEQ ID NO: 3337.

[3826] The probes having the nucleotide sequence represented by SEQ ID NOS: 42825, 42826, 42827, 42828, 42829, 42830, 42831, 42832, 42833, 42834, 42835 were selected from the ORFs having the nucleotide sequence represented by SEQ ID NO: 3338.

[3827] The probes having the nucleotide sequence represented by SEQ ID NOS: 42836, 42837, 42838, 42839, 42840, 42841, 42842, 42843, 42844, 42845, 42846 were selected from the ORFs having the nucleotide sequence represented by SEQ ID NO: 3339.

[3828] The probes having the nucleotide sequence represented by SEQ ID NOS: 42847, 42848, 42849, 42850, 42851, 42852, 42853, 42854, 42855, 42856, 42857 were selected from the ORFs having the nucleotide sequence represented by SEQ ID NO: 3340.

[3829] The probes having the nucleotide sequence represented by SEQ ID NOS: 42858, 42859, 42860, 42861, 42862, 42863, 42864, 42865, 42866, 42867, 42868 were selected from the ORFs having the nucleotide sequence represented by SEQ ID NO: 3341.

[3830] The probes having the nucleotide sequence represented by SEQ ID NOS: 42869, 42870, 42871, 42872, 42873, 42874, 42875, 42876, 42877, 42878, 42879 were selected from the ORFs having the nucleotide sequence represented by SEQ ID NO: 3342.

[3831] The probes having the nucleotide sequence represented by SEQ ID NOS: 42880, 42881, 42882, 42883, 42884, 42885, 42886, 42887, 42888, 42889, 42890 were selected from the ORFs having the nucleotide sequence represented by SEQ ID NO: 3343.

[3832] The probes having the nucleotide sequence represented by SEQ ID NOS: 42891, 42892, 42893, 42894, 42895, 42896, 42897, 42898, 42899, 42900, 42901 were selected from the ORFs having the nucleotide sequence represented by SEQ ID NO: 3344.

[3833] The probes having the nucleotide sequence represented by SEQ ID NOS: 42902, 42903, 42904, 42905, 42906, 42907, 42908, 42909, 42910, 42911, 42912 were selected from the ORFs having the nucleotide sequence represented by SEQ ID NO: 3345.

[3834] The probes having the nucleotide sequence represented by SEQ ID NOS: 42913, 42914, 42915, 42916, 42917, 42918, 42919, 42920, 42921, 42922, 42923 were selected from the ORFs having the nucleotide sequence represented by SEQ ID NO: 3346.

[3835] The probes having the nucleotide sequence represented by SEQ ID NOS: 42924, 42925, 42926, 42927, 42928, 42929, 42930, 42931, 42932, 42933, 42934 were selected from the ORFs having the nucleotide sequence represented by SEQ ID NO: 3347.

[3836] The probes having the nucleotide sequence represented by SEQ ID NOS: 42935, 42936, 42937, 42938, 42939, 42940, 42941, 42942, 42943, 42944, 42945 were selected from the ORFs having the nucleotide sequence represented by SEQ ID NO: 3348.

[3837] The probes having the nucleotide sequence represented by SEQ ID NOS: 42946, 42947, 42948, 42949, 42950, 42951, 42952, 42953, 42954, 42955, 42956 were selected from the ORFs having the nucleotide sequence represented by SEQ ID NO: 3349.

[3838] The probes having the nucleotide sequence represented by SEQ ID NOS: 42957, 42958, 42959, 42960, 42961, 42962, 42963, 42964, 42965, 42966, 42967 were selected from the ORFs having the nucleotide sequence represented by SEQ ID NO: 3350.

[3839] The probes having the nucleotide sequence represented by SEQ ID NOS: 42968, 42969, 42970, 42971, 42972, 42973, 42974, 42975, 42976, 42977, 42978 were selected from the ORFs having the nucleotide sequence represented by SEQ ID NO: 3351.

[3840] The probes having the nucleotide sequence represented by SEQ ID NOS: 42979, 42980, 42981, 42982, 42983, 42984, 42985, 42986, 42987, 42988, 42989 were selected from the ORFs having the nucleotide sequence represented by SEQ ID NO: 3352.

[3841] The probes having the nucleotide sequence represented by SEQ ID NOS: 42990, 42991, 42992, 42993, 42994, 42995, 42996, 42997, 42998, 42999, 43000 were selected from the ORFs having the nucleotide sequence represented by SEQ ID NO: 3353.

[3842] The probes having the nucleotide sequence represented by SEQ ID NOS: 43001, 43002, 43003, 43004, 43005, 43006, 43007, 43008, 43009, 43010, 43011 were selected from the ORFs having the nucleotide sequence represented by SEQ ID NO: 3354.

[3843] The probes having the nucleotide sequence represented by SEQ ID NOS: 43012, 43013, 43014, 43015, 43016, 43017, 43018, 43019, 43020, 43021, 43022 were selected from the ORFs having the nucleotide sequence represented by SEQ ID NO: 3355.

[3844] The probes having the nucleotide sequence represented by SEQ ID NOS: 43023, 43024, 43025, 43026, 43027, 43028, 43029, 43030, 43031, 43032, 43033 were selected from the ORFs having the nucleotide sequence represented by SEQ ID NO: 3356.

[3845] The probes having the nucleotide sequence represented by SEQ ID NOS: 43034, 43035, 43036, 43037, 43038, 43039, 43040, 43041, 43042, 43043, 43044 were selected from the ORFs having the nucleotide sequence represented by SEQ ID NO: 3357.

[3846] The probes having the nucleotide sequence represented by SEQ ID NOS: 43045, 43046, 43047, 43048, 43049, 43050, 43051, 43052, 43053, 43054, 43055 were selected from the ORFs having the nucleotide sequence represented by SEQ ID NO: 3358.

[3847] The probes having the nucleotide sequence represented by SEQ ID NOS: 43056, 43057, 43058, 43059, 43060, 43061, 43062, 43063, 43064, 43065, 43066 were selected from the ORFs having the nucleotide sequence represented by SEQ ID NO: 3359.

[3848] The probes having the nucleotide sequence represented by SEQ ID NOS: 43067, 43068, 43069, 43070, 43071, 43072, 43073, 43074, 43075, 43076, 43077 were selected from the ORFs having the nucleotide sequence represented by SEQ ID NO: 3360.

[3849] The probes having the nucleotide sequence represented by SEQ ID NOS: 43078, 43079, 43080, 43081, 43082, 43083, 43084, 43085, 43086, 43087, 43088 were selected from the ORFs having the nucleotide sequence represented by SEQ ID NO: 3361.

[3850] The probes having the nucleotide sequence represented by SEQ ID NOS: 43089, 43090, 43091, 43092, 43093, 43094, 43095, 43096, 43097, 43098, 43099 were selected from the ORFs having the nucleotide sequence represented by SEQ ID NO: 3362.

[3851] The probes having the nucleotide sequence represented by SEQ ID NOS: 43100, 43101, 43102, 43103, 43104, 43105, 43106, 43107, 43108, 43109, 43110 were selected from the ORFs having the nucleotide sequence represented by SEQ ID NO: 3363.

[3852] The probes having the nucleotide sequence represented by SEQ ID NOS: 43111, 43112, 43113, 43114, 43115, 43116, 43117, 43118, 43119, 43120, 43121 were selected from the ORFs having the nucleotide sequence represented by SEQ ID NO: 3364.

[3853] The probes having the nucleotide sequence represented by SEQ ID NOS: 43122, 43123, 43124, 43125, 43126, 43127, 43128, 43129, 43130, 43131, 43132 were selected from the ORFs having the nucleotide sequence represented by SEQ ID NO: 3365.

[3854] The probes having the nucleotide sequence represented by SEQ ID NOS: 43133, 43134, 43135, 43136, 43137, 43138, 43139, 43140, 43141, 43142, 43143 were selected from the ORFs having the nucleotide sequence represented by SEQ ID NO: 3366.

[3855] The probes having the nucleotide sequence represented by SEQ ID NOS: 43144, 43145, 43146, 43147, 43148, 43149, 43150, 43151, 43152, 43153, 43154 were selected from the ORFs having the nucleotide sequence represented by SEQ ID NO: 3367.

[3856] The probes having the nucleotide sequence represented by SEQ ID NOS: 43155, 43156, 43157, 43158, 43159, 43160, 43161, 43162, 43163, 43164, 43165 were selected from the ORFs having the nucleotide sequence represented by SEQ ID NO: 3368.

[3857] The probes having the nucleotide sequence represented by SEQ ID NOS: 43166, 43167, 43168, 43169, 43170, 43171, 43172, 43173, 43174, 43175, 43176 were selected from the ORFs having the nucleotide sequence represented by SEQ ID NO: 3369.

[3858] The probes having the nucleotide sequence represented by SEQ ID NOS: 43177, 43178, 43179, 43180, 43181, 43182, 43183, 43184, 43185, 43186, 43187 were selected from the ORFs having the nucleotide sequence represented by SEQ ID NO: 3370.

[3859] The probes having the nucleotide sequence represented by SEQ ID NOS: 43188, 43189, 43190, 43191, 43192, 43193, 43194, 43195, 43196, 43197, 43198 were selected from the ORFs having the nucleotide sequence represented by SEQ ID NO: 3371.

[3860] The probes having the nucleotide sequence represented by SEQ ID NOS: 43199, 43200, 43201, 43202, 43203, 43204, 43205, 43206, 43207, 43208, 43209 were selected from the ORFs having the nucleotide sequence represented by SEQ ID NO: 3372.

[3861] The probes having the nucleotide sequence represented by SEQ ID NOS: 43210, 43211, 43212, 43213, 43214, 43215, 43216, 43217, 43218, 43219, 43220 were selected from the ORFs having the nucleotide sequence represented by SEQ ID NO: 3373.

[3862] The probes having the nucleotide sequence represented by SEQ ID NOS: 43221, 43222, 43223, 43224, 43225, 43226, 43227, 43228, 43229, 43230, 43231 were selected from the ORFs having the nucleotide sequence represented by SEQ ID NO: 3374.

[3863] The probes having the nucleotide sequence represented by SEQ ID NOS: 43232, 43233, 43234, 43235, 43236, 43237, 43238, 43239, 43240, 43241, 43242 were selected from the ORFs having the nucleotide sequence represented by SEQ ID NO: 3375.

[3864] The probes having the nucleotide sequence represented by SEQ ID NOS: 43243, 43244, 43245, 43246, 43247, 43248, 43249, 43250, 43251, 43252, 43253 were selected from the ORFs having the nucleotide sequence represented by SEQ ID NO: 3376.

[3865] The probes having the nucleotide sequence represented by SEQ ID NOS: 43254, 43255, 43256, 43257, 43258, 43259, 43260, 43261, 43262, 43263, 43264 were selected from the ORFs having the nucleotide sequence represented by SEQ ID NO: 3377.

[3866] The probes having the nucleotide sequence represented by SEQ ID NOS: 43265, 43266, 43267, 43268, 43269, 43270, 43271, 43272, 43273, 43274, 43275 were selected from the ORFs having the nucleotide sequence represented by SEQ ID NO: 3378.

[3867] The probes having the nucleotide sequence represented by SEQ ID NOS: 43276, 43277, 43278, 43279, 43280, 43281, 43282, 43283, 43284, 43285, 43286 were selected from the ORFs having the nucleotide sequence represented by SEQ ID NO: 3379.

[3868] The probes having the nucleotide sequence represented by SEQ ID NOS: 43287, 43288, 43289, 43290, 43291, 43292, 43293, 43294, 43295, 43296, 43297 were selected from the ORFs having the nucleotide sequence represented by SEQ ID NO: 3380.

[3869] The probes having the nucleotide sequence represented by SEQ ID NOS: 43298, 43299, 43300, 43301, 43302, 43303, 43304, 43305, 43306, 43307, 43308 were selected from the ORFs having the nucleotide sequence represented by SEQ ID NO: 3381.

[3870] The probes having the nucleotide sequence represented by SEQ ID NOS: 43309, 43310, 43311, 43312, 43313, 43314, 43315, 43316, 43317, 43318, 43319 were selected from the ORFs having the nucleotide sequence represented by SEQ ID NO: 3382.

[3871] The probes having the nucleotide sequence represented by SEQ ID NOS: 43320, 43321, 43322, 43323, 43324, 43325, 43326, 43327, 43328, 43329, 43330 were selected from the ORFs having the nucleotide sequence represented by SEQ ID NO: 3383.

[3872] The probes having the nucleotide sequence represented by SEQ ID NOS: 43331, 43332, 43333, 43334, 43335, 43336, 43337, 43338, 43339, 43340, 43341 were selected from the ORFs having the nucleotide sequence represented by SEQ ID NO: 3384.

[3873] The probes having the nucleotide sequence represented by SEQ ID NOS: 43342, 43343, 43344, 43345, 43346, 43347, 43348, 43349, 43350, 43351, 43352 were selected from the ORFs having the nucleotide sequence represented by SEQ ID NO: 3385.

[3874] The probes having the nucleotide sequence represented by SEQ ID NOS: 43353, 43354, 43355, 43356, 43357, 43358, 43359, 43360, 43361, 43362, 43363 were selected from the ORFs having the nucleotide sequence represented by SEQ ID NO: 3386.

[3875] The probes having the nucleotide sequence represented by SEQ ID NOS: 43364, 43365, 43366, 43367, 43368, 43369, 43370, 43371, 43372, 43373, 43374 were selected from the ORFs having the nucleotide sequence represented by SEQ ID NO: 3387.

[3876] The probes having the nucleotide sequence represented by SEQ ID NOS: 43375, 43376, 43377, 43378, 43379, 43380, 43381, 43382, 43383, 43384, 43385 were selected from the ORFs having the nucleotide sequence represented by SEQ ID NO: 3388.

[3877] The probes having the nucleotide sequence represented by SEQ ID NOS: 43386, 43387, 43388, 43389, 43390, 43391, 43392, 43393, 43394, 43395, 43396 were selected from the ORFs having the nucleotide sequence represented by SEQ ID NO: 3389.

[3878] The probes having the nucleotide sequence represented by SEQ ID NOS: 43397, 43398, 43399, 43400, 43401, 43402, 43403, 43404, 43405, 43406, 43407 were selected from the ORFs having the nucleotide sequence represented by SEQ ID NO: 3390.

[3879] The probes having the nucleotide sequence represented by SEQ ID NOS: 43408, 43409, 43410, 43411, 43412, 43413, 43414, 43415, 43416, 43417, 43418 were selected from the ORFs having the nucleotide sequence represented by SEQ ID NO: 3391.

[3880] The probes having the nucleotide sequence represented by SEQ ID NOS: 43419, 43420, 43421, 43422, 43423, 43424, 43425, 43426, 43427, 43428, 43429 were selected from the ORFs having the nucleotide sequence represented by SEQ ID NO: 3392.

[3881] The probes having the nucleotide sequence represented by SEQ ID NOS: 43430, 43431, 43432, 43433, 43434, 43435, 43436, 43437, 43438, 43439, 43440 were selected from the ORFs having the nucleotide sequence represented by SEQ ID NO: 3393.

[3882] The probes having the nucleotide sequence represented by SEQ ID NOS: 43441, 43442, 43443, 43444, 43445, 43446, 43447, 43448, 43449, 43450, 43451 were selected from the ORFs having the nucleotide sequence represented by SEQ ID NO: 3394.

[3883] The probes having the nucleotide sequence represented by SEQ ID NOS: 43452, 43453, 43454, 43455, 43456, 43457, 43458, 43459, 43460, 43461, 43462 were selected from the ORFs having the nucleotide sequence represented by SEQ ID NO: 3395.

[3884] The probes having the nucleotide sequence represented by SEQ ID NOS: 43463, 43464, 43465, 43466, 43467, 43468, 43469, 43470, 43471, 43472, 43473 were selected from the ORFs having the nucleotide sequence represented by SEQ ID NO: 3396.

[3885] The probes having the nucleotide sequence represented by SEQ ID NOS: 43474, 43475, 43476, 43477, 43478, 43479, 43480, 43481, 43482, 43483, 43484 were selected from the ORFs having the nucleotide sequence represented by SEQ ID NO: 3397.

[3886] The probes having the nucleotide sequence represented by SEQ ID NOS: 43485, 43486, 43487, 43488, 43489, 43490, 43491, 43492, 43493, 43494, 43495 were selected from the ORFs having the nucleotide sequence represented by SEQ ID NO: 3398.

[3887] The probes having the nucleotide sequence represented by SEQ ID NOS: 43496, 43497, 43498, 43499, 43500, 43501, 43502, 43503, 43504, 43505, 43506 were selected from the ORFs having the nucleotide sequence represented by SEQ ID NO: 3399.

[3888] The probes having the nucleotide sequence represented by SEQ ID NOS: 43507, 43508, 43509, 43510, 43511, 43512, 43513, 43514, 43515, 43516, 43517 were selected from the ORFs having the nucleotide sequence represented by SEQ ID NO: 3400.

[3889] The probes having the nucleotide sequence represented by SEQ ID NOS: 43518, 43519, 43520, 43521, 43522, 43523, 43524, 43525, 43526, 43527, 43528 were selected from the ORFs having the nucleotide sequence represented by SEQ ID NO: 3401.

[3890] The probes having the nucleotide sequence represented by SEQ ID NOS: 43529, 43530, 43531, 43532, 43533, 43534, 43535, 43536, 43537, 43538, 43539, 43540, 43541, 43542, 43543, 43544, 43545, 43546, 43547, 43548, 43549, 43550 were selected from the ORFs having the nucleotide sequence represented by SEQ ID NO: 3402.

[3891] The probes having the nucleotide sequence represented by SEQ ID NOS: 43551, 43552, 43553, 43554, 43555, 43556, 43557, 43558, 43559, 43560, 43561 were selected from the ORFs having the nucleotide sequence represented by SEQ ID NO: 3403.

[3892] The probes having the nucleotide sequence represented by SEQ ID NOS: 43562, 43563, 43564, 43565, 43566, 43567, 43568, 43569, 43570, 43571, 43572 were selected from the ORFs having the nucleotide sequence represented by SEQ ID NO: 3404.

[3893] The probes having the nucleotide sequence represented by SEQ ID NOS: 43573, 43574, 43575, 43576, 43577, 43578, 43579, 43580, 43581, 43582, 43583 were selected from the ORFs having the nucleotide sequence represented by SEQ ID NO: 3405.

[3894] The probes having the nucleotide sequence represented by SEQ ID NOS: 43584, 43585, 43586, 43587, 43588, 43589, 43590, 43591, 43592, 43593, 43594 were selected from the ORFs having the nucleotide sequence represented by SEQ ID NO: 3406.

[3895] The probes having the nucleotide sequence represented by SEQ ID NOS: 43595, 43596, 43597, 43598, 43599, 43600, 43601, 43602, 43603, 43604, 43605 were selected from the ORFs having the nucleotide sequence represented by SEQ ID NO: 3407.

[3896] The probes having the nucleotide sequence represented by SEQ ID NOS: 43606, 43607, 43608, 43609, 43610, 43611, 43612, 43613, 43614, 43615, 43616 were selected from the ORFs having the nucleotide sequence represented by SEQ ID NO: 3408.

[3897] The probes having the nucleotide sequence represented by SEQ ID NOS: 43617, 43618, 43619, 43620, 43621, 43622, 43623, 43624, 43625, 43626, 43627 were selected from the ORFs having the nucleotide sequence represented by SEQ ID NO: 3409.

[3898] The probes having the nucleotide sequence represented by SEQ ID NOS: 43628, 43629, 43630, 43631, 43632, 43633, 43634, 43635, 43636, 43637, 43638 were selected from the ORFs having the nucleotide sequence represented by SEQ ID NO: 3410.

[3899] The probes having the nucleotide sequence represented by SEQ ID NOS: 43639, 43640, 43641, 43642, 43643, 43644, 43645, 43646, 43647, 43648, 43649 were selected from the ORFs having the nucleotide sequence represented by SEQ ID NO: 3411.

[3900] The probes having the nucleotide sequence represented by SEQ ID NOS: 43650, 43651, 43652, 43653, 43654, 43655, 43656, 43657, 43658, 43659, 43660, 43661, 43662, 43663, 43664, 43665, 43666, 43667, 43668, 43669, 43670, 43671 were selected from the ORFs having the nucleotide sequence represented by SEQ ID NO: 3412.

[3901] The probes having the nucleotide sequence represented by SEQ ID NOS: 43672, 43673, 43674, 43675, 43676, 43677, 43678, 43679, 43680, 43681, 43682 were selected from the ORFs having the nucleotide sequence represented by SEQ ID NO: 3413.

[3902] The probes having the nucleotide sequence represented by SEQ ID NOS: 43683, 43684, 43685, 43686, 43687, 43688, 43689, 43690, 43691, 43692, 43693 were selected from the ORFs having the nucleotide sequence represented by SEQ ID NO: 3414.

[3903] The probes having the nucleotide sequence represented by SEQ ID NOS: 43694, 43695, 43696, 43697, 43698, 43699, 43700, 43701, 43702, 43703, 43704 were selected from the ORFs having the nucleotide sequence represented by SEQ ID NO: 3415.

[3904] The probes having the nucleotide sequence represented by SEQ ID NOS: 43705, 43706, 43707, 43708, 43709, 43710, 43711, 43712, 43713, 43714, 43715 were selected from the ORFs having the nucleotide sequence represented by SEQ ID NO: 3416.

[3905] The probes having the nucleotide sequence represented by SEQ ID NOS: 43716, 43717, 43718, 43719, 43720, 43721, 43722, 43723, 43724, 43725, 43726 were selected from the ORFs having the nucleotide sequence represented by SEQ ID NO: 3417.

[3906] The probes having the nucleotide sequence represented by SEQ ID NOS: 43727, 43728, 43729, 43730, 43731, 43732, 43733, 43734, 43735, 43736, 43737 were selected from the ORFs having the nucleotide sequence represented by SEQ ID NO: 3418.

[3907] The probes having the nucleotide sequence represented by SEQ ID NOS: 43738, 43739, 43740, 43741, 43742, 43743, 43744, 43745, 43746, 43747, 43748 were selected from the ORFs having the nucleotide sequence represented by SEQ ID NO: 3419.

[3908] The probes having the nucleotide sequence represented by SEQ ID NOS: 43749, 43750, 43751, 43752, 43753, 43754, 43755, 43756, 43757, 43758, 43759 were selected from the ORFs having the nucleotide sequence represented by SEQ ID NO: 3420.

[3909] The probes having the nucleotide sequence represented by SEQ ID NOS: 43760, 43761, 43762, 43763, 43764, 43765, 43766, 43767, 43768, 43769, 43770 were selected from the ORFs having the nucleotide sequence represented by SEQ ID NO: 3421.

[3910] The probes having the nucleotide sequence represented by SEQ ID NOS: 43771, 43772, 43773, 43774, 43775, 43776, 43777, 43778, 43779, 43780, 43781 were selected from the ORFs having the nucleotide sequence represented by SEQ ID NO: 3422.

[3911] The probes having the nucleotide sequence represented by SEQ ID NOS: 43782, 43783, 43784, 43785, 43786, 43787, 43788, 43789, 43790, 43791, 43792 were selected from the ORFs having the nucleotide sequence represented by SEQ ID NO: 3423.

[3912] The probes having the nucleotide sequence represented by SEQ ID NOS: 43793, 43794, 43795, 43796, 43797, 43798, 43799, 43800, 43801, 43802, 43803, 43804, 43805, 43806, 43807, 43808, 43809, 43810, 43811, 43812, 43813, 43814 were selected from the ORFs having the nucleotide sequence represented by SEQ ID NO: 3424.

[3913] The probes having the nucleotide sequence represented by SEQ ID NOS: 43815, 43816, 43817, 43818, 43819, 43820, 43821, 43822, 43823, 43824, 43825 were selected from the ORFs having the nucleotide sequence represented by SEQ ID NO: 3425.

[3914] The probes having the nucleotide sequence represented by SEQ ID NOS: 43826, 43827, 43828, 43829, 43830, 43831, 43832, 43833, 43834, 43835, 43836 were selected from the ORFs having the nucleotide sequence represented by SEQ ID NO: 3426.

[3915] The probes having the nucleotide sequence represented by SEQ ID NOS: 43837, 43838, 43839, 43840, 43841, 43842, 43843, 43844, 43845, 43846, 43847 were selected from the ORFs having the nucleotide sequence represented by SEQ ID NO: 3427.

[3916] The probes having the nucleotide sequence represented by SEQ ID NOS: 43848, 43849, 43850, 43851, 43852, 43853, 43854, 43855, 43856, 43857, 43858 were selected from the ORFs having the nucleotide sequence represented by SEQ ID NO: 3428.

[3917] The probes having the nucleotide sequence represented by SEQ ID NOS: 43859, 43860, 43861, 43862, 43863, 43864, 43865, 43866, 43867, 43868, 43869 were selected from the ORFs having the nucleotide sequence represented by SEQ ID NO: 3429.

[3918] The probes having the nucleotide sequence represented by SEQ ID NOS: 43870, 43871, 43872, 43873, 43874, 43875, 43876, 43877, 43878, 43879, 43880 were selected from the ORFs having the nucleotide sequence represented by SEQ ID NO: 3430.

[3919] The probes having the nucleotide sequence represented by SEQ ID NOS: 43881, 43882, 43883, 43884, 43885, 43886, 43887, 43888, 43889, 43890, 43891 were selected from the ORFs having the nucleotide sequence represented by SEQ ID NO: 3431.

[3920] The probes having the nucleotide sequence represented by SEQ ID NOS: 43892, 43893, 43894, 43895, 43896, 43897, 43898, 43899, 43900, 43901, 43902 were selected from the ORFs having the nucleotide sequence represented by SEQ ID NO: 3432.

[3921] The probes having the nucleotide sequence represented by SEQ ID NOS: 43903, 43904, 43905, 43906, 43907, 43908, 43909, 43910, 43911, 43912, 43913 were selected from the ORFs having the nucleotide sequence represented by SEQ ID NO: 3433.

[3922] The probes having the nucleotide sequence represented by SEQ ID NOS: 43914, 43915, 43916, 43917, 43918, 43919, 43920, 43921, 43922, 43923, 43924 were selected from the ORFs having the nucleotide sequence represented by SEQ ID NO: 3434.

[3923] The probes having the nucleotide sequence represented by SEQ ID NOS: 43925, 43926, 43927, 43928, 43929, 43930, 43931, 43932, 43933, 43934, 43935 were selected from the ORFs having the nucleotide sequence represented by SEQ ID NO: 3435.

[3924] The probes having the nucleotide sequence represented by SEQ ID NOS: 43936, 43937, 43938, 43939, 43940, 43941, 43942, 43943, 43944, 43945, 43946 were selected from the ORFs having the nucleotide sequence represented by SEQ ID NO: 3436.

[3925] The probes having the nucleotide sequence represented by SEQ ID NOS: 43947, 43948, 43949, 43950, 43951, 43952, 43953, 43954, 43955, 43956, 43957 were selected from the ORFs having the nucleotide sequence represented by SEQ ID NO: 3437.

[3926] The probes having the nucleotide sequence represented by SEQ ID NOS: 43958, 43959, 43960, 43961, 43962, 43963, 43964, 43965, 43966, 43967, 43968 were selected from the ORFs having the nucleotide sequence represented by SEQ ID NO: 3438.

[3927] The probes having the nucleotide sequence represented by SEQ ID NOS: 43969, 43970, 43971, 43972, 43973, 43974, 43975, 43976, 43977, 43978, 43979 were selected from the ORFs having the nucleotide sequence represented by SEQ ID NO: 3439.

[3928] The probes having the nucleotide sequence represented by SEQ ID NOS: 43980, 43981, 43982, 43983, 43984, 43985, 43986, 43987, 43988, 43989, 43990 were selected from the ORFs having the nucleotide sequence represented by SEQ ID NO: 3440.

[3929] The probes having the nucleotide sequence represented by SEQ ID NOS: 43991, 43992, 43993, 43994, 43995, 43996, 43997, 43998, 43999, 44000, 44001 were selected from the ORFs having the nucleotide sequence represented by SEQ ID NO: 3441.

[3930] The probes having the nucleotide sequence represented by SEQ ID NOS: 44002, 44003, 44004, 44005, 44006, 44007, 44008, 44009, 44010, 44011, 44012.were selected from the ORFs having the nucleotide sequence represented by SEQ ID NO: 3442.

[3931] The probes having the nucleotide sequence represented by SEQ ID NOS: 44013, 44014, 44015, 44016, 44017, 44018, 44019, 44020, 44021, 44022, 44023 were selected from the ORFs having the nucleotide sequence represented by SEQ ID NO: 3443.

[3932] The probes having the nucleotide sequence represented by SEQ ID NOS: 44024, 44025, 44026, 44027, 44028, 44029, 44030, 44031, 44032, 44033, 44034 were selected from the ORFs having the nucleotide sequence represented by SEQ ID NO: 3444.

[3933] The probes having the nucleotide sequence represented by SEQ ID NOS: 44035, 44036, 44037, 44038, 44039, 44040, 44041, 44042, 44043, 44044, 44045 were selected from the ORFs having the nucleotide sequence represented by SEQ ID NO: 3445.

[3934] The probes having the nucleotide sequence represented by SEQ ID NOS: 44046, 44047, 44048, 44049, 44050, 44051, 44052, 44053, 44054, 44055, 44056 were selected from the ORFs having the nucleotide sequence represented by SEQ ID NO: 3446.

[3935] The probes having the nucleotide sequence represented by SEQ ID NOS: 44057, 44058, 44059, 44060, 44061, 44062, 44063, 44064, 44065, 44066, 44067 were selected from the ORFs having the nucleotide sequence represented by SEQ ID NO: 3447.

[3936] The probes having the nucleotide sequence represented by SEQ ID NOS: 44068, 44069, 44070, 44071, 44072, 44073, 44074, 44075, 44076, 44077, 44078 were selected from the ORFs having the nucleotide sequence represented by SEQ ID NO: 3448.

[3937] The probes having the nucleotide sequence represented by SEQ ID NOS: 44079, 44080, 44081, 44082, 44083, 44084, 44085, 44086, 44087, 44088, 44089 were selected from the ORFs having the nucleotide sequence represented by SEQ ID NO: 3449.

[3938] The probes having the nucleotide sequence represented by SEQ ID NOS: 44090, 44091, 44092, 44093, 44094, 44095, 44096, 44097, 44098, 44099, 44100 were selected from the ORFs having the nucleotide sequence represented by SEQ ID NO: 3450.

[3939] The probes having the nucleotide sequence represented by SEQ ID NOS: 44101, 44102, 44103, 44104, 44105, 44106, 44107, 44108, 44109, 44110, 44111 were selected from the ORFs having the nucleotide sequence represented by SEQ ID NO: 3451.

[3940] The probes having the nucleotide sequence represented by SEQ ID NOS: 44112, 44113, 44114, 44115, 44116, 44117, 44118, 44119, 44120, 44121, 44122 were selected from the ORFs having the nucleotide sequence represented by SEQ ID NO: 3452.

[3941] The probes having the nucleotide sequence represented by SEQ ID NOS: 44123, 44124, 44125, 44126, 44127, 44128, 44129, 44130, 44131, 44132, 44133 were selected from the ORFs having the nucleotide sequence represented by SEQ ID NO: 3453.

[3942] The probes having the nucleotide sequence represented by SEQ ID NOS: 44134, 44135, 44136, 44137, 44138, 44139, 44140, 44141, 44142, 44143, 44144 were selected from the ORFs having the nucleotide sequence represented by SEQ ID NO: 3454.

[3943] The probes having the nucleotide sequence represented by SEQ ID NOS: 44145, 44146, 44147, 44148, 44149, 44150, 44151, 44152, 44153, 44154, 44155 were selected from the ORFs having the nucleotide sequence represented by SEQ ID NO: 3455.

[3944] The probes having the nucleotide sequence represented by SEQ ID NOS: 44156, 44157, 44158, 44159, 44160, 44161, 44162, 44163, 44164, 44165, 44166 were selected from the ORFs having the nucleotide sequence represented by SEQ ID NO: 3456.

[3945] The probes having the nucleotide sequence represented by SEQ ID NOS: 44167, 44168, 44169, 44170, 44171, 44172, 44173, 44174, 44175, 44176, 44177 were selected from the ORFs having the nucleotide sequence represented by SEQ ID NO: 3457.

[3946] The probes having the nucleotide sequence represented by SEQ ID NOS: 44178, 44179, 44180, 44181, 44182, 44183, 44184, 44185, 44186, 44187, 44188 were selected from the ORFs having the nucleotide sequence represented by SEQ ID NO: 3458.

[3947] The probes having the nucleotide sequence represented by SEQ ID NOS: 44189, 44190, 44191, 44192, 44193, 44194, 44195, 44196, 44197, 44198, 44199 were selected from the ORFs having the nucleotide sequence represented by SEQ ID NO: 3459.

[3948] The probes having the nucleotide sequence represented by SEQ ID NOS: 44200, 44201, 44202, 44203, 44204, 44205, 44206, 44207, 44208, 44209, 44210 were selected from the ORFs having the nucleotide sequence represented by SEQ ID NO: 3460.

[3949] The probes having the nucleotide sequence represented by SEQ ID NOS: 44211, 44212, 44213, 44214, 44215, 44216, 44217, 44218, 44219, 44220, 44221 were selected from the ORFs having the nucleotide sequence represented by SEQ ID NO: 3461.

[3950] The probes having the nucleotide sequence represented by SEQ ID NOS: 44222, 44223, 44224, 44225, 44226, 44227, 44228, 44229, 44230, 44231, 44232 were selected from the ORFs having the nucleotide sequence represented by SEQ ID NO: 3462.

[3951] The probes having the nucleotide sequence represented by SEQ ID NOS: 44233, 44234, 44235, 44236, 44237, 44238, 44239, 44240, 44241, 44242, 44243 were selected from the ORFs having the nucleotide sequence represented by SEQ ID NO: 3463.

[3952] The probes having the nucleotide sequence represented by SEQ ID NOS: 44244, 44245, 44246, 44247, 44248, 44249, 44250, 44251, 44252, 44253, 44254 were selected from the ORFs having the nucleotide sequence represented by SEQ ID NO: 3464.

[3953] The probes having the nucleotide sequence represented by SEQ ID NOS: 44255, 44256, 44257, 44258, 44259, 44260, 44261, 44262, 44263, 44264, 44265 were selected from the ORFs having the nucleotide sequence represented by SEQ ID NO: 3465.

[3954] The probes having the nucleotide sequence represented by SEQ ID NOS: 44266, 44267, 44268, 44269, 44270, 44271, 44272, 44273, 44274, 44275, 44276 were selected from the ORFs having the nucleotide sequence represented by SEQ ID NO: 3466.

[3955] The probes having the nucleotide sequence represented by SEQ ID NOS: 44277, 44278, 44279, 44280, 44281, 44282, 44283, 44284, 44285, 44286, 44287 were selected from the ORFs having the nucleotide sequence represented by SEQ ID NO: 3467.

[3956] The probes having the nucleotide sequence represented by SEQ ID NOS: 44288, 44289, 44290, 44291, 44292, 44293, 44294, 44295, 44296, 44297, 44298 were selected from the ORFs having the nucleotide sequence represented by SEQ ID NO: 3468.

[3957] The probes having the nucleotide sequence represented by SEQ ID NOS: 44299, 44300, 44301, 44302, 44303, 44304, 44305, 44306, 44307, 44308, 44309 were selected from the ORFs having the nucleotide sequence represented by SEQ ID NO: 3469.

[3958] The probes having the nucleotide sequence represented by SEQ ID NOS: 44310, 44311, 44312, 44313, 44314, 44315, 44316, 44317, 44318, 44319, 44320 were selected from the ORFs having the nucleotide sequence represented by SEQ ID NO: 3470.

[3959] The probes having the nucleotide sequence represented by SEQ ID NOS: 44321, 44322, 44323, 44324, 44325, 44326, 44327, 44328, 44329, 44330, 44331 were selected from the ORFs having the nucleotide sequence represented by SEQ ID NO: 3471.

[3960] The probes having the nucleotide sequence represented by SEQ ID NOS: 44332, 44333, 44334, 44335, 44336, 44337, 44338, 44339, 44340, 44341, 44342 were selected from the ORFs having the nucleotide sequence represented by SEQ ID NO: 3472.

[3961] The probes having the nucleotide sequence represented by SEQ ID NOS: 44343, 44344, 44345, 44346, 44347, 44348, 44349, 44350, 44351, 44352, 44353 were selected from the ORFs having the nucleotide sequence represented by SEQ ID NO: 3473.

[3962] The probes having the nucleotide sequence represented by SEQ ID NOS: 44354, 44355, 44356, 44357, 44358, 44359, 44360, 44361, 44362, 44363, 44364 were selected from the ORFs having the nucleotide sequence represented by SEQ ID NO: 3474.

[3963] The probes having the nucleotide sequence represented by SEQ ID NOS: 44365, 44366, 44367, 44368, 44369, 44370, 44371, 44372, 44373, 44374, 44375 were selected from the ORFs having the nucleotide sequence represented by SEQ ID NO: 3475.

[3964] The probes having the nucleotide sequence represented by SEQ ID NOS: 44376, 44377, 44378, 44379, 44380, 44381, 44382, 44383, 44384, 44385, 44386 were selected from the ORFs having the nucleotide sequence represented by SEQ ID NO: 3476.

[3965] The probes having the nucleotide sequence represented by SEQ ID NOS: 44387, 44388, 44389, 44390, 44391, 44392, 44393, 44394, 44395, 44396, 44397 were selected from the ORFs having the nucleotide sequence represented by SEQ ID NO: 3477.

[3966] The probes having the nucleotide sequence represented by SEQ ID NOS: 44398, 44399, 44400, 44401, 44402, 44403, 44404, 44405, 44406, 44407, 44408 were selected from the ORFs having the nucleotide sequence represented by SEQ ID NO: 3478.

[3967] The probes having the nucleotide sequence represented by SEQ ID NOS: 44409, 44410, 44411, 44412, 44413, 44414, 44415, 44416, 44417, 44418, 44419 were selected from the ORFs having the nucleotide sequence represented by SEQ ID NO: 3479.

[3968] The probes having the nucleotide sequence represented by SEQ ID NOS: 44420, 44421, 44422, 44423, 44424, 44425, 44426, 44427, 44428, 44429, 44430 were selected from the ORFs having the nucleotide sequence represented by SEQ ID NO: 3480.

[3969] The probes having the nucleotide sequence represented by SEQ ID NOS: 44431, 44432, 44433, 44434, 44435, 44436, 44437, 44438, 44439, 44440, 44441 were selected from the ORFs having the nucleotide sequence represented by SEQ ID NO: 3481.

[3970] The probes having the nucleotide sequence represented by SEQ ID NOS: 44442, 44443, 44444, 44445, 44446, 44447, 44448, 44449, 44450, 44451, 44452 were selected from the ORFs having the nucleotide sequence represented by SEQ ID NO: 3482.

[3971] The probes having the nucleotide sequence represented by SEQ ID NOS: 44453, 44454, 44455, 44456, 44457, 44458, 44459, 44460, 44461, 44462, 44463 were selected from the ORFs having the nucleotide sequence represented by SEQ ID NO: 3483.

[3972] The probes having the nucleotide sequence represented by SEQ ID NOS: 44464, 44465, 44466, 44467, 44468, 44469, 44470, 44471, 44472, 44473, 44474 were selected from the ORFs having the nucleotide sequence represented by SEQ ID NO: 3484.

[3973] The probes having the nucleotide sequence represented by SEQ ID NOS: 44475, 44476, 44477, 44478, 44479, 44480, 44481, 44482, 44483, 44484, 44485 were selected from the ORFs having the nucleotide sequence represented by SEQ ID NO: 3485.

[3974] The probes having the nucleotide sequence represented by SEQ ID NOS: 44486, 44487, 44488, 44489, 44490, 44491, 44492, 44493, 44494, 44495, 44496 were selected from the ORFs having the nucleotide sequence represented by SEQ ID NO: 3486.

[3975] The probes having the nucleotide sequence represented by SEQ ID NOS: 44497, 44498, 44499, 44500, 44501, 44502, 44503, 44504, 44505, 44506, 44507 were selected from the ORFs having the nucleotide sequence represented by SEQ ID NO: 3487.

[3976] The probes having the nucleotide sequence represented by SEQ ID NOS: 44508, 44509, 44510, 44511, 44512, 44513, 44514, 44515, 44516, 44517, 44518 were selected from the ORFs having the nucleotide sequence represented by SEQ ID NO: 3488.

[3977] The probes having the nucleotide sequence represented by SEQ ID NOS: 44519, 44520, 44521, 44522, 44523, 44524, 44525, 44526, 44527, 44528, 44529 were selected from the ORFs having the nucleotide sequence represented by SEQ ID NO: 3489.

[3978] The probes having the nucleotide sequence represented by SEQ ID NOS: 44530, 44531, 44532, 44533, 44534, 44535, 44536, 44537, 44538, 44539, 44540 were selected from the ORFs having the nucleotide sequence represented by SEQ ID NO: 3490.

[3979] The probes having the nucleotide sequence represented by SEQ ID NOS: 44541, 44542, 44543, 44544, 44545, 44546, 44547, 44548, 44549, 44550, 44551 were selected from the ORFs having the nucleotide sequence represented by SEQ ID NO: 3491.

[3980] The probes having the nucleotide sequence represented by SEQ ID NOS: 44552, 44553, 44554, 44555, 44556, 44557, 44558, 44559, 44560, 44561, 44562 were selected from the ORFs having the nucleotide sequence represented by SEQ ID NO: 3492.

[3981] The probes having the nucleotide sequence represented by SEQ ID NOS: 44563, 44564, 44565, 44566, 44567, 44568, 44569, 44570, 44571, 44572, 44573 were selected from the ORFs having the nucleotide sequence represented by SEQ ID NO: 3493.

[3982] The probes having the nucleotide sequence represented by SEQ ID NOS: 44574, 44575, 44576, 44577, 44578, 44579, 44580, 44581, 44582, 44583, 44584 were selected from the ORFs having the nucleotide sequence represented by SEQ ID NO: 3494.

[3983] The probes having the nucleotide sequence represented by SEQ ID NOS: 44585, 44586, 44587, 44588, 44589, 44590, 44591, 44592, 44593, 44594, 44595 were selected from the ORFs having the nucleotide sequence represented by SEQ ID NO: 3495.

[3984] The probes having the nucleotide sequence represented by SEQ ID NOS: 44596, 44597, 44598, 44599, 44600, 44601, 44602, 44603, 44604, 44605, 44606 were selected from the ORFs having the nucleotide sequence represented by SEQ ID NO: 3496.

[3985] The probes having the nucleotide sequence represented by SEQ ID NOS: 44607, 44608, 44609, 44610, 44611, 44612, 44613, 44614, 44615, 44616, 44617 were selected from the ORFs having the nucleotide sequence represented by SEQ ID NO: 3497.

[3986] The probes having the nucleotide sequence represented by SEQ ID NOS: 44618, 44619, 44620, 44621, 44622, 44623, 44624, 44625, 44626, 44627, 44628 were selected from the ORFs having the nucleotide sequence represented by SEQ ID NO: 3498.

[3987] The probes having the nucleotide sequence represented by SEQ ID NOS: 44629, 44630, 44631, 44632, 44633, 44634, 44635, 44636, 44637, 44638, 44639 were selected from the ORFs having the nucleotide sequence represented by SEQ ID NO: 3499.

[3988] The probes having the nucleotide sequence represented by SEQ ID NOS: 44640, 44641, 44642, 44643, 44644, 44645, 44646, 44647, 44648, 44649, 44650 were selected from the ORFs having the nucleotide sequence represented by SEQ ID NO: 3500.

[3989] The probes having the nucleotide sequence represented by SEQ ID NOS: 44651, 44652, 44653, 44654, 44655, 44656, 44657, 44658, 44659, 44660, 44661, 44662, 44663, 44664, 44665, 44666, 44667, 44668, 44669, 44670, 44671, 44672 were selected from the ORFs having the nucleotide sequence represented by SEQ ID NO: 3501.

[3990] The probes having the nucleotide sequence represented by SEQ ID NOS: 44673, 44674, 44675, 44676, 44677, 44678, 44679, 44680, 44681, 44682, 44683 were selected from the ORFs having the nucleotide sequence represented by SEQ ID NO: 3502.

[3991] The probes having the nucleotide sequence represented by SEQ ID NOS: 44684, 44685, 44686, 44687, 44688, 44689, 44690, 44691, 44692, 44693, 44694 were selected from the ORFs having the nucleotide sequence represented by SEQ ID NO: 3503.

[3992] The probes having the nucleotide sequence represented by SEQ ID NOS: 44695, 44696, 44697, 44698, 44699, 44700, 44701, 44702, 44703, 44704, 44705 were selected from the ORFs having the nucleotide sequence represented by SEQ ID NO: 3504.

[3993] The probes having the nucleotide sequence represented by SEQ ID NOS: 44706, 44707, 44708, 44709, 44710, 44711, 44712, 44713, 44714, 44715, 44716 were selected from the ORFs having the nucleotide sequence represented by SEQ ID NO: 3505.

[3994] The probes having the nucleotide sequence represented by SEQ ID NOS: 44717, 44718, 44719, 44720, 44721, 44722, 44723, 44724, 44725, 44726, 44727 were selected from the ORFs having the nucleotide sequence represented by SEQ ID NO: 3506.

[3995] The probes having the nucleotide sequence represented by SEQ ID NOS: 44728, 44729, 44730, 44731, 44732, 44733, 44734, 44735, 44736, 44737, 44738 were selected from the ORFs having the nucleotide sequence represented by SEQ ID NO: 3507.

[3996] The probes having the nucleotide sequence represented by SEQ ID NOS: 44739, 44740, 44741, 44742, 44743, 44744, 44745, 44746, 44747, 44748, 44749 were selected from the ORFs having the nucleotide sequence represented by SEQ ID NO: 3508.

[3997] The probes having the nucleotide sequence represented by SEQ ID NOS: 44750, 44751, 44752, 44753, 44754, 44755, 44756, 44757, 44758, 44759, 44760 were selected from the ORFs having the nucleotide sequence represented by SEQ ID NO: 3509.

[3998] The probes having the nucleotide sequence represented by SEQ ID NOS: 44761, 44762, 44763, 44764, 44765, 44766, 44767, 44768, 44769, 44770, 44771 were selected from the ORFs having the nucleotide sequence represented by SEQ ID NO: 3510.

[3999] The probes having the nucleotide sequence represented by SEQ ID NOS: 44772, 44773, 44774, 44775, 44776, 44777, 44778, 44779, 44780, 44781, 44782 were selected from the ORFs having the nucleotide sequence represented by SEQ ID NO: 3511.

[4000] The probes having the nucleotide sequence represented by SEQ ID NOS: 44783, 44784, 44785, 44786, 44787, 44788, 44789, 44790, 44791, 44792, 44793 were selected from the ORFs having the nucleotide sequence represented by SEQ ID NO: 3512.

[4001] The probes having the nucleotide sequence represented by SEQ ID NOS: 44794, 44795, 44796, 44797, 44798, 44799, 44800, 44801, 44802, 44803, 44804 were selected from the ORFs having the nucleotide sequence represented by SEQ ID NO: 3513.

[4002] The probes having the nucleotide sequence represented by SEQ ID NOS: 44805, 44806, 44807, 44808, 44809, 44810, 44811, 44812, 44813, 44814, 44815 were selected from the ORFs having the nucleotide sequence represented by SEQ ID NO: 3514.

[4003] The probes having the nucleotide sequence represented by SEQ ID NOS: 44816, 44817, 44818, 44819, 44820, 44821, 44822, 44823, 44824, 44825, 44826 were selected from the ORFs having the nucleotide sequence represented by SEQ ID NO: 3515.

[4004] The probes having the nucleotide sequence represented by SEQ ID NOS: 44827, 44828, 44829, 44830, 44831, 44832, 44833, 44834, 44835, 44836, 44837 were selected from the ORFs having the nucleotide sequence represented by SEQ ID NO: 3516.

[4005] The probes having the nucleotide sequence represented by SEQ ID NOS: 44838, 44839, 44840, 44841, 44842, 44843, 44844, 44845, 44846, 44847, 44848 were selected from the ORFs having the nucleotide sequence represented by SEQ ID NO: 3517.

[4006] The probes having the nucleotide sequence represented by SEQ ID NOS: 44849, 44850, 44851, 44852, 44853, 44854, 44855, 44856, 44857, 44858, 44859 were selected from the ORFs having the nucleotide sequence represented by SEQ ID NO: 3518.

[4007] The probes having the nucleotide sequence represented by SEQ ID NOS: 44860, 44861, 44862, 44863, 44864, 44865, 44866, 44867, 44868, 44869, 44870 were selected from the ORFs having the nucleotide sequence represented by SEQ ID NO: 3519.

[4008] The probes having the nucleotide sequence represented by SEQ ID NOS: 44871, 44872, 44873, 44874, 44875, 44876, 44877, 44878, 44879, 44880, 44881 were selected from the ORFs having the nucleotide sequence represented by SEQ ID NO: 3520.

[4009] The probes having the nucleotide sequence represented by SEQ ID NOS: 44882, 44883, 44884, 44885, 44886, 44887, 44888, 44889, 44890, 44891, 44892 were selected from the ORFs having the nucleotide sequence represented by SEQ ID NO: 3521.

[4010] The probes having the nucleotide sequence represented by SEQ ID NOS: 44893, 44894, 44895, 44896, 44897, 44898, 44899, 44900, 44901, 44902, 44903 were selected from the ORFs having the nucleotide sequence represented by SEQ ID NO: 3522.

[4011] The probes having the nucleotide sequence represented by SEQ ID NOS: 44904, 44905, 44906, 44907, 44908, 44909, 44910, 44911, 44912, 44913, 44914 were selected from the ORFs having the nucleotide sequence represented by SEQ ID NO: 3523.

[4012] The probes having the nucleotide sequence represented by SEQ ID NOS: 44915, 44916, 44917, 44918, 44919, 44920, 44921, 44922, 44923, 44924, 44925 were selected from the ORFs having the nucleotide sequence represented by SEQ ID NO: 3524.

[4013] The probes having the nucleotide sequence represented by SEQ ID NOS: 44926, 44927, 44928, 44929, 44930, 44931, 44932, 44933, 44934, 44935, 44936 were selected from the ORFs having the nucleotide sequence represented by SEQ ID NO: 3525.

[4014] The probes having the nucleotide sequence represented by SEQ ID NOS: 44937, 44938, 44939, 44940, 44941, 44942, 44943, 44944, 44945, 44946, 44947 were selected from the ORFs having the nucleotide sequence represented by SEQ ID NO: 3526.

[4015] The probes having the nucleotide sequence represented by SEQ ID NOS: 44948, 44949, 44950, 44951, 44952, 44953, 44954, 44955, 44956, 44957, 44958 were selected from the ORFs having the nucleotide sequence represented by SEQ ID NO: 3527.

[4016] The probes having the nucleotide sequence represented by SEQ ID NOS: 44959, 44960, 44961, 44962, 44963, 44964, 44965, 44966, 44967, 44968, 44969 were selected from the ORFs having the nucleotide sequence represented by SEQ ID NO: 3528.

[4017] The probes having the nucleotide sequence represented by SEQ ID NOS: 44970, 44971, 44972, 44973, 44974, 44975, 44976, 44977, 44978, 44979, 44980 were selected from the ORFs having the nucleotide sequence represented by SEQ ID NO: 3529.

[4018] The probes having the nucleotide sequence represented by SEQ ID NOS: 44981, 44982, 44983, 44984, 44985, 44986, 44987, 44988, 44989, 44990, 44991 were selected from the ORFs having the nucleotide sequence represented by SEQ ID NO: 3530.

[4019] The probes having the nucleotide sequence represented by SEQ ID NOS: 44992, 44993, 44994, 44995, 44996, 44997, 44998, 44999, 45000, 45001, 45002 were selected from the ORFs having the nucleotide sequence represented by SEQ ID NO: 3531.

[4020] The probes having the nucleotide sequence represented by SEQ ID NOS: 45003, 45004, 45005, 45006, 45007, 45008, 45009, 45010, 45011, 45012, 45013 were selected from the ORFs having the nucleotide sequence represented by SEQ ID NO: 3532.

[4021] The probes having the nucleotide sequence represented by SEQ ID NOS: 45014, 45015, 45016, 45017, 45018, 45019, 45020, 45021, 45022, 45023, 45024 were selected from the ORFs having the nucleotide sequence represented by SEQ ID NO: 3533.

[4022] The probes having the nucleotide sequence represented by SEQ ID NOS: 45025, 45026, 45027, 45028, 45029, 45030, 45031, 45032, 45033, 45034, 45035 were selected from the ORFs having the nucleotide sequence represented by SEQ ID NO: 3534.

[4023] The probes having the nucleotide sequence represented by SEQ ID NOS: 45036, 45037, 45038, 45039, 45040, 45041, 45042, 45043, 45044, 45045, 45046 were selected from the ORFs having the nucleotide sequence represented by SEQ ID NO: 3535.

[4024] The probes having the nucleotide sequence represented by SEQ ID NOS: 45047, 45048, 45049, 45050, 45051, 45052, 45053, 45054, 45055, 45056, 45057 were selected from the ORFs having the nucleotide sequence represented by SEQ ID NO: 3536.

[4025] The probes having the nucleotide sequence represented by SEQ ID NOS: 45058, 45059, 45060, 45061, 45062, 45063, 45064, 45065, 45066, 45067, 45068 were selected from the ORFs having the nucleotide sequence represented by SEQ ID NO: 3537.

[4026] The probes having the nucleotide sequence represented by SEQ ID NOS: 45069, 45070, 45071, 45072, 45073, 45074, 45075, 45076, 45077, 45078, 45079 were selected from the ORFs having the nucleotide sequence represented by SEQ ID NO: 3538.

[4027] The probes having the nucleotide sequence represented by SEQ ID NOS: 45080, 45081, 45082, 45083, 45084, 45085, 45086, 45087, 45088, 45089, 45090 were selected from the ORFs having the nucleotide sequence represented by SEQ ID NO: 3539.

[4028] The probes having the nucleotide sequence represented by SEQ ID NOS: 45091, 45092, 45093, 45094, 45095, 45096, 45097, 45098, 45099, 45100, 45101 were selected from the ORFs having the nucleotide sequence represented by SEQ ID NO: 3540.

[4029] The probes having the nucleotide sequence represented by SEQ ID NOS: 45102, 45103, 45104, 45105, 45106, 45107, 45108, 45109, 45110, 45111, 45112 were selected from the ORFs having the nucleotide sequence represented by SEQ ID NO: 3541.

[4030] The probes having the nucleotide sequence represented by SEQ ID NOS: 45113, 45114, 45115, 45116, 45117, 45118, 45119, 45120, 45121, 45122, 45123 were selected from the ORFs having the nucleotide sequence represented by SEQ ID NO: 3542.

[4031] The probes having the nucleotide sequence represented by SEQ ID NOS: 45124, 45125, 45126, 45127, 45128, 45129, 45130, 45131, 45132, 45133, 45134 were selected from the ORFs having the nucleotide sequence represented by SEQ ID NO: 3543.

[4032] The probes having the nucleotide sequence represented by SEQ ID NOS: 45135, 45136, 45137, 45138, 45139, 45140, 45141, 45142, 45143, 45144, 45145 were selected from the ORFs having the nucleotide sequence represented by SEQ ID NO: 3544.

[4033] The probes having the nucleotide sequence represented by SEQ ID NOS: 45146, 45147, 45148, 45149, 45150, 45151, 45152, 45153, 45154, 45155, 45156 were selected from the ORFs having the nucleotide sequence represented by SEQ ID NO: 3545.

[4034] The probes having the nucleotide sequence represented by SEQ ID NOS: 45157, 45158, 45159, 45160, 45161, 45162, 45163, 45164, 45165, 45166, 45167 were selected from the ORFs having the nucleotide sequence represented by SEQ ID NO: 3546.

[4035] The probes having the nucleotide sequence represented by SEQ ID NOS: 45168, 45169, 45170, 45171, 45172, 45173, 45174, 45175, 45176, 45177, 45178 were selected from the ORFs having the nucleotide sequence represented by SEQ ID NO: 3547.

[4036] The probes having the nucleotide sequence represented by SEQ ID NOS: 45179, 45180, 45181, 45182, 45183, 45184, 45185, 45186, 45187, 45188, 45189 were selected from the ORFs having the nucleotide sequence represented by SEQ ID NO: 3548.

[4037] The probes having the nucleotide sequence represented by SEQ ID NOS: 45190, 45191, 45192, 45193, 45194, 45195, 45196, 45197, 45198, 45199, 45200 were selected from the ORFs having the nucleotide sequence represented by SEQ ID NO: 3549.

[4038] The probes having the nucleotide sequence represented by SEQ ID NOS: 45201, 45202, 45203, 45204, 45205, 45206, 45207, 45208, 45209, 45210, 45211 were selected from the ORFs having the nucleotide sequence represented by SEQ ID NO: 3550.

[4039] The probes having the nucleotide sequence represented by SEQ ID NOS: 45212, 45213, 45214, 45215, 45216, 45217, 45218, 45219, 45220, 45221, 45222 were selected from the ORFs having the nucleotide sequence represented by SEQ ID NO: 3551.

[4040] The probes having the nucleotide sequence represented by SEQ ID NOS: 45223, 45224, 45225, 45226, 45227, 45228, 45229, 45230, 45231, 45232, 45233 were selected from the ORFs having the nucleotide sequence represented by SEQ ID NO: 3552.

[4041] The probes having the nucleotide sequence represented by SEQ ID NOS: 45234, 45235, 45236, 45237, 45238, 45239, 45240, 45241, 45242, 45243, 45244 were selected from the ORFs having the nucleotide sequence represented by SEQ ID NO: 3553.

[4042] The probes having the nucleotide sequence represented by SEQ ID NOS: 45245, 45246, 45247, 45248, 45249, 45250, 45251, 45252, 45253, 45254, 45255 were selected from the ORFs having the nucleotide sequence represented by SEQ ID NO: 3554.

[4043] The probes having the nucleotide sequence represented by SEQ ID NOS: 45256, 45257, 45258, 45259, 45260, 45261, 45262, 45263, 45264, 45265, 45266 were selected from the ORFs having the nucleotide sequence represented by SEQ ID NO: 3555.

[4044] The probes having the nucleotide sequence represented by SEQ ID NOS: 45267, 45268, 45269, 45270, 45271, 45272, 45273, 45274, 45275, 45276, 45277 were selected from the ORFs having the nucleotide sequence represented by SEQ ID NO: 3556.

[4045] The probes having the nucleotide sequence represented by SEQ ID NOS: 45278, 45279, 45280, 45281, 45282, 45283, 45284, 45285, 45286, 45287, 45288 were selected from the ORFs having the nucleotide sequence represented by SEQ ID NO: 3557.

[4046] The probes having the nucleotide sequence represented by SEQ ID NOS: 45289, 45290, 45291, 45292, 45293, 45294, 45295, 45296, 45297, 45298, 45299 were selected from the ORFs having the nucleotide sequence represented by SEQ ID NO: 3558.

[4047] The probes having the nucleotide sequence represented by SEQ ID NOS: 45300, 45301, 45302, 45303, 45304, 45305, 45306, 45307, 45308, 45309, 45310 were selected from the ORFs having the nucleotide sequence represented by SEQ ID NO: 3559.

[4048] The probes having the nucleotide sequence represented by SEQ ID NOS: 45311, 45312, 45313, 45314, 45315, 45316, 45317, 45318, 45319, 45320, 45321 were selected from the ORFs having the nucleotide sequence represented by SEQ ID NO: 3560.

[4049] The probes having the nucleotide sequence represented by SEQ ID NOS: 45322, 45323, 45324, 45325, 45326, 45327, 45328, 45329, 45330, 45331, 45332 were selected from the ORFs having the nucleotide sequence represented by SEQ ID NO: 3561.

[4050] The probes having the nucleotide sequence represented by SEQ ID NOS: 45333, 45334, 45335, 45336, 45337, 45338, 45339, 45340, 45341, 45342, 45343 were selected from the ORFs having the nucleotide sequence represented by SEQ ID NO: 3562.

[4051] The probes having the nucleotide sequence represented by SEQ ID NOS: 45344, 45345, 45346, 45347, 45348, 45349, 45350, 45351, 45352, 45353, 45354 were selected from the ORFs having the nucleotide sequence represented by SEQ ID NO: 3563.

[4052] The probes having the nucleotide sequence represented by SEQ ID NOS: 45355, 45356, 45357, 45358, 45359, 45360, 45361, 45362, 45363, 45364, 45365 were selected from the ORFs having the nucleotide sequence represented by SEQ ID NO: 3564.

[4053] The probes having the nucleotide sequence represented by SEQ ID NOS: 45366, 45367, 45368, 45369, 45370, 45371, 45372, 45373, 45374, 45375, 45376 were selected from the ORFs having the nucleotide sequence represented by SEQ ID NO: 3565.

[4054] The probes having the nucleotide sequence represented by SEQ ID NOS: 45377, 45378, 45379, 45380, 45381, 45382, 45383, 45384, 45385, 45386, 45387 were selected from the ORFs having the nucleotide sequence represented by SEQ ID NO: 3566.

[4055] The probes having the nucleotide sequence represented by SEQ ID NOS: 45388, 45389, 45390, 45391, 45392, 45393, 45394, 45395, 45396, 45397, 45398 were selected from the ORFs having the nucleotide sequence represented by SEQ ID NO: 3567.

[4056] The probes having the nucleotide sequence represented by SEQ ID NOS: 45399, 45400, 45401, 45402, 45403, 45404, 45405, 45406, 45407, 45408, 45409 were selected from the ORFs having the nucleotide sequence represented by SEQ ID NO: 3568.

[4057] The probes having the nucleotide sequence represented by SEQ ID NOS: 45410, 45411, 45412, 45413, 45414, 45415, 45416, 45417, 45418, 45419, 45420 were selected from the ORFs having the nucleotide sequence represented by SEQ ID NO: 3569.

[4058] The probes having the nucleotide sequence represented by SEQ ID NOS: 45421, 45422, 45423, 45424, 45425, 45426, 45427, 45428, 45429, 45430, 45431 were selected from the ORFs having the nucleotide sequence represented by SEQ ID NO: 3570.

[4059] The probes having the nucleotide sequence represented by SEQ ID NOS: 45432, 45433, 45434, 45435, 45436, 45437, 45438, 45439, 45440, 45441, 45442 were selected from the ORFs having the nucleotide sequence represented by SEQ ID NO: 3571.

[4060] The probes having the nucleotide sequence represented by SEQ ID NOS: 45443, 45444, 45445, 45446, 45447, 45448, 45449, 45450, 45451, 45452, 45453 were selected from the ORFs having the nucleotide sequence represented by SEQ ID NO: 3572.

[4061] The probes having the nucleotide sequence represented by SEQ ID NOS: 45454, 45455, 45456, 45457, 45458, 45459, 45460, 45461, 45462, 45463, 45464 were selected from the ORFs having the nucleotide sequence represented by SEQ ID NO: 3573.

[4062] The probes having the nucleotide sequence represented by SEQ ID NOS: 45465, 45466, 45467, 45468, 45469, 45470, 45471, 45472, 45473, 45474, 45475 were selected from the ORFs having the nucleotide sequence represented by SEQ ID NO: 3574.

[4063] The probes having the nucleotide sequence represented by SEQ ID NOS: 45476, 45477, 45478, 45479, 45480, 45481, 45482, 45483, 45484, 45485, 45486 were selected from the ORFs having the nucleotide sequence represented by SEQ ID NO: 3575.

[4064] The probes having the nucleotide sequence represented by SEQ ID NOS: 45487, 45488, 45489, 45490, 45491, 45492, 45493, 45494, 45495, 45496, 45497 were selected from the ORFs having the nucleotide sequence represented by SEQ ID NO: 3576.

[4065] The probes having the nucleotide sequence represented by SEQ ID NOS: 45498, 45499, 45500, 45501, 45502, 45503, 45504, 45505, 45506, 45507, 45508 were selected from the ORFs having the nucleotide sequence represented by SEQ ID NO: 3577.

[4066] The probes having the nucleotide sequence represented by SEQ ID NOS: 45509, 45510, 45511, 45512, 45513, 45514, 45515, 45516, 45517, 45518, 45519 were selected from the ORFs having the nucleotide sequence represented by SEQ ID NO: 3578.

[4067] The probes having the nucleotide sequence represented by SEQ ID NOS: 45520, 45521, 45522, 45523, 45524, 45525, 45526, 45527, 45528, 45529, 45530 were selected from the ORFs having the nucleotide sequence represented by SEQ ID NO: 3579.

[4068] The probes having the nucleotide sequence represented by SEQ ID NOS: 45531, 45532, 45533, 45534, 45535, 45536, 45537, 45538, 45539, 45540, 45541 were selected from the ORFs having the nucleotide sequence represented by SEQ ID NO: 3580.

[4069] The probes having the nucleotide sequence represented by SEQ ID NOS: 45542, 45543, 45544, 45545, 45546, 45547, 45548, 45549, 45550, 45551, 45552 were selected from the ORFs having the nucleotide sequence represented by SEQ ID NO: 3581.

[4070] The probes having the nucleotide sequence represented by SEQ ID NOS: 45553, 45554, 45555, 45556, 45557, 45558, 45559, 45560, 45561, 45562, 45563 were selected from the ORFs having the nucleotide sequence represented by SEQ ID NO: 3582.

[4071] The probes having the nucleotide sequence represented by SEQ ID NOS: 45564, 45565, 45566, 45567, 45568, 45569, 45570, 45571, 45572, 45573, 45574 were selected from the ORFs having the nucleotide sequence represented by SEQ ID NO: 3583.

[4072] The probes having the nucleotide sequence represented by SEQ ID NOS: 45575, 45576, 45577, 45578, 45579, 45580, 45581, 45582, 45583, 45584, 45585 were selected from the ORFs having the nucleotide sequence represented by SEQ ID NO: 3584.

[4073] The probes having the nucleotide sequence represented by SEQ ID NOS: 45586, 45587, 45588, 45589, 45590, 45591, 45592, 45593, 45594, 45595, 45596 were selected from the ORFs having the nucleotide sequence represented by SEQ ID NO: 3585.

[4074] The probes having the nucleotide sequence represented by SEQ ID NOS: 45597, 45598, 45599, 45600, 45601, 45602, 45603, 45604, 45605, 45606, 45607 were selected from the ORFs having the nucleotide sequence represented by SEQ ID NO: 3586.

[4075] The probes having the nucleotide sequence represented by SEQ ID NOS: 45608, 45609, 45610, 45611, 45612, 45613, 45614, 45615, 45616, 45617, 45618 were selected from the ORFs having the nucleotide sequence represented by SEQ ID NO: 3587.

[4076] The probes having the nucleotide sequence represented by SEQ ID NOS: 45619, 45620, 45621, 45622, 45623, 45624, 45625, 45626, 45627, 45628, 45629 were selected from the ORFs having the nucleotide sequence represented by SEQ ID NO: 3588.

[4077] The probes having the nucleotide sequence represented by SEQ ID NOS: 45630, 45631, 45632, 45633, 45634, 45635, 45636, 45637, 45638, 45639, 45640 were selected from the ORFs having the nucleotide sequence represented by SEQ ID NO: 3589.

[4078] The probes having the nucleotide sequence represented by SEQ ID NOS: 45641, 45642, 45643, 45644, 45645, 45646, 45647, 45648, 45649, 45650, 45651 were selected from the ORFs having the nucleotide sequence represented by SEQ ID NO: 3590.

[4079] The probes having the nucleotide sequence represented by SEQ ID NOS: 45652, 45653, 45654, 45655, 45656, 45657, 45658, 45659, 45660, 45661, 45662 were selected from the ORFs having the nucleotide sequence represented by SEQ ID NO: 3591.

[4080] The probes having the nucleotide sequence represented by SEQ ID NOS: 45663, 45664, 45665, 45666, 45667, 45668, 45669, 45670, 45671, 45672, 45673 were selected from the ORFs having the nucleotide sequence represented by SEQ ID NO: 3592.

[4081] The probes having the nucleotide sequence represented by SEQ ID NOS: 45674, 45675, 45676, 45677, 45678, 45679, 45680, 45681, 45682, 45683, 45684 were selected from the ORFs having the nucleotide sequence represented by SEQ ID NO: 3593.

[4082] The probes having the nucleotide sequence represented by SEQ ID NOS: 45685, 45686, 45687, 45688, 45689, 45690, 45691, 45692, 45693, 45694, 45695 were selected from the ORFs having the nucleotide sequence represented by SEQ ID NO: 3594.

[4083] The probes having the nucleotide sequence represented by SEQ ID NOS: 45696, 45697, 45698, 45699, 45700, 45701, 45702, 45703, 45704, 45705, 45706 were selected from the ORFs having the nucleotide sequence represented by SEQ ID NO: 3595.

[4084] The probes having the nucleotide sequence represented by SEQ ID NOS: 45707, 45708, 45709, 45710, 45711, 45712, 45713, 45714, 45715, 45716, 45717 were selected from the ORFs having the nucleotide sequence represented by SEQ ID NO: 3596.

[4085] The probes having the nucleotide sequence represented by SEQ ID NOS: 45718, 45719, 45720, 45721, 45722, 45723, 45724, 45725, 45726, 45727, 45728 were selected from the ORFs having the nucleotide sequence represented by SEQ ID NO: 3597.

[4086] The probes having the nucleotide sequence represented by SEQ ID NOS: 45729, 45730, 45731, 45732, 45733, 45734, 45735, 45736, 45737, 45738, 45739 were selected from the ORFs having the nucleotide sequence represented by SEQ ID NO: 3598.

[4087] The probes having the nucleotide sequence represented by SEQ ID NOS: 45740, 45741, 45742, 45743, 45744, 45745,

[4088] 45746, 45747, 45748, 45749, 45750 were selected from the ORFs having the nucleotide sequence represented by SEQ ID NO: 3599.

[4089] The probes having the nucleotide sequence represented by SEQ ID NOS: 45751, 45752, 45753, 45754, 45755, 45756, 45757, 45758, 45759, 45760, 45761 were selected from the ORFs having the nucleotide sequence represented by SEQ ID NO: 3600.

[4090] The probes having the nucleotide sequence represented by SEQ ID NOS: 45762, 45763, 45764, 45765, 45766, 45767, 45768, 45769, 45770, 45771, 45772 were selected from the ORFs having the nucleotide sequence represented by SEQ ID NO: 3601.

[4091] The probes having the nucleotide sequence represented by SEQ ID NOS: 45773, 45774, 45775, 45776, 45777, 45778, 45779, 45780, 45781, 45782, 45783 were selected from the ORFs having the nucleotide sequence represented by SEQ ID NO: 3602.

[4092] The probes having the nucleotide sequence represented by SEQ ID NOS: 45784, 45785, 45786, 45787, 45788, 45789, 45790, 45791, 45792, 45793, 45794 were selected from the ORFs having the nucleotide sequence represented by SEQ ID NO: 3603.

[4093] The probes having the nucleotide sequence represented by SEQ ID NOS: 45795, 45796, 45797, 45798, 45799, 45800, 45801, 45802, 45803, 45804, 45805 were selected from the ORFs having the nucleotide sequence represented by SEQ ID NO: 3604.

[4094] The probes having the nucleotide sequence represented by SEQ ID NOS: 45806, 45807, 45808, 45809, 45810, 45811, 45812, 45813, 45814, 45815, 45816 were selected from the ORFs having the nucleotide sequence represented by SEQ ID NO: 3605.

[4095] The probes having the nucleotide sequence represented by SEQ ID NOS: 45817, 45818, 45819, 45820, 45821, 45822, 45823, 45824, 45825, 45826, 45827 were selected from the ORFs having the nucleotide sequence represented by SEQ ID NO: 3606.

[4096] The probes having the nucleotide sequence represented by SEQ ID NOS: 45828, 45829, 45830, 45831, 45832, 45833, 45834, 45835, 45836, 45837, 45838 were selected from the ORFs having the nucleotide sequence represented by SEQ ID NO: 3607.

[4097] The probes having the nucleotide sequence represented by SEQ ID NOS: 45839, 45840, 45841, 45842, 45843, 45844, 45845, 45846, 45847, 45848, 45849 were selected from the ORFs having the nucleotide sequence represented by SEQ ID NO: 3608.

[4098] The probes having the nucleotide sequence represented by SEQ ID NOS: 45850, 45851, 45852, 45853, 45854, 45855, 45856, 45857, 45858, 45859, 45860 were selected from the ORFs having the nucleotide sequence represented by SEQ ID NO: 3609.

[4099] The probes having the nucleotide sequence represented by SEQ ID NOS: 45861, 45862, 45863, 45864, 45865, 45866, 45867, 45868, 45869, 45870, 45871 were selected from the ORFs having the nucleotide sequence represented by SEQ ID NO: 3610.

[4100] The probes having the nucleotide sequence represented by SEQ ID NOS: 45872, 45873, 45874, 45875, 45876, 45877, 45878, 45879, 45880, 45881, 45882 were selected from the ORFs having the nucleotide sequence represented by SEQ ID NO: 3611.

[4101] The probes having the nucleotide sequence represented by SEQ ID NOS: 45883, 45884, 45885, 45886, 45887, 45888, 45889, 45890, 45891, 45892, 45893 were selected from the ORFs having the nucleotide sequence represented by SEQ ID NO: 3612.

[4102] The probes having the nucleotide sequence represented by SEQ ID NOS: 45894, 45895, 45896, 45897, 45898, 45899, 45900, 45901, 45902, 45903, 45904 were selected from the ORFs having the nucleotide sequence represented by SEQ ID NO: 3613.

[4103] The probes having the nucleotide sequence represented by SEQ ID NOS: 45905, 45906, 45907, 45908, 45909, 45910, 45911, 45912, 45913, 45914, 45915 were selected from the ORFs having the nucleotide sequence represented by SEQ ID NO: 3614.

[4104] The probes having the nucleotide sequence represented by SEQ ID NOS: 45916, 45917, 45918, 45919, 45920, 45921, 45922, 45923, 45924, 45925, 45926 were selected from the ORFs having the nucleotide sequence represented by SEQ ID NO: 3615.

[4105] The probes having the nucleotide sequence represented by SEQ ID NOS: 45927, 45928, 45929, 45930, 45931, 45932, 45933, 45934, 45935, 45936, 45937 were selected from the ORFs having the nucleotide sequence represented by SEQ ID NO: 3616.

[4106] The probes having the nucleotide sequence represented by SEQ ID NOS: 45938, 45939, 45940, 45941, 45942, 45943, 45944, 45945, 45946, 45947, 45948 were selected from the ORFs having the nucleotide sequence represented by SEQ ID NO: 3617.

[4107] The probes having the nucleotide sequence represented by SEQ ID NOS: 45949, 45950, 45951, 45952, 45953, 45954, 45955, 45956, 45957, 45958, 45959 were selected from the ORFs having the nucleotide sequence represented by SEQ ID NO: 3618.

[4108] The probes having the nucleotide sequence represented by SEQ ID NOS: 45960, 45961, 45962, 45963, 45964, A5965, 45966, 45967, 45968, 45969, 45970 were selected from the ORFs having the nucleotide sequence represented by SEQ ID NO: 3619.

[4109] The probes having the nucleotide sequence represented by SEQ ID NOS: 45971, 45972, 45973, 45974, 45975, 45976, 45977, 45978, 45979, 45980, 45981 were selected from the ORFs having the nucleotide sequence represented by SEQ ID NO: 3620.

[4110] The probes having the nucleotide sequence represented by SEQ ID NOS: 45982, 45983, 45984, 45985, 45986, 45987, 45988, 45989, 45990, 45991, 45992 were selected from the ORFs having the nucleotide sequence represented by SEQ ID NO: 3621.

[4111] The probes having the nucleotide sequence represented by SEQ ID NOS: 45993, 45994, 45995, 45996, 45997, 45998, 45999, 46000, 46001, 46002, 46003 were selected from the ORFs having the nucleotide sequence represented by SEQ ID NO: 3622.

[4112] The probes having the nucleotide sequence represented by SEQ ID NOS: 46004, 46005, 46006, 46007, 46008, 46009, 46010, 46011, 46012, 46013, 46014 were selected from the ORFs having the nucleotide sequence represented by SEQ ID NO: 3623.

[4113] The probes having the nucleotide sequence represented by SEQ ID NOS: 46015, 46016, 46017, 46018, 46019, 46020, 46021, 46022, 46023, 46024, 46025 were selected from the ORFs having the nucleotide sequence represented by SEQ ID NO: 3624.

[4114] The probes having the nucleotide sequence represented by SEQ ID NOS: 46026, 46027, 46028, 46029, 46030, 46031, 46032, 46033, 46034, 46035, 46036 were selected from the ORFs having the nucleotide sequence represented by SEQ ID NO: 3625.

[4115] The probes having the nucleotide sequence represented by SEQ ID NOS: 46037, 46038, 46039, 46040, 46041, 46042, 46043, 46044, 46045, 46046, 46047 were selected from the ORFs having the nucleotide sequence represented by SEQ ID NO: 3626.

[4116] The probes having the nucleotide sequence represented by SEQ ID NOS: 46048, 46049, 46050, 46051, 46052, 46053, 46054, 46055, 46056, 46057, 46058 were selected from the ORFs having the nucleotide sequence represented by SEQ ID NO: 3627.

[4117] The probes having the nucleotide sequence represented by SEQ ID NOS: 46059, 46060, 46061, 46062, 46063, 46064, 46065, 46066, 46067, 46068, 46069 were selected from the ORFs having the nucleotide sequence represented by SEQ ID NO: 3628.

[4118] The probes having the nucleotide sequence represented by SEQ ID NOS: 46070, 46071, 46072, 46073, 46074, 46075, 46076, 46077, 46078, 46079, 46080 were selected from the ORFs having the nucleotide sequence represented by SEQ ID NO: 3629.

[4119] The probes having the nucleotide sequence represented by SEQ ID NOS: 46081, 46082, 46083, 46084, 46085, 46086, 46087, 46088, 46089, 46090, 46091 were selected from the ORFs having the nucleotide sequence represented by SEQ ID NO: 3630.

[4120] The probes having the nucleotide sequence represented by SEQ ID NOS: 46092, 46093, 46094, 46095, 46096, 46097, 46098, 46099, 46100, 46101, 46102 were selected from the ORFs having the nucleotide sequence represented by SEQ ID NO: 3631.

[4121] The probes having the nucleotide sequence represented by SEQ ID NOS: 46103, 46104, 46105, 46106, 46107, 46108, 46109, 46110, 46111, 46112, 46113 were selected from the ORFs having the nucleotide sequence represented by SEQ ID NO: 3632.

[4122] The probes having the nucleotide sequence represented by SEQ ID NOS: 46114, 46115, 46116, 46117, 46118, 46119, 46120, 46121, 46122, 46123, 46124 were selected from the ORFs having the nucleotide sequence represented by SEQ ID NO: 3633.

[4123] The probes having the nucleotide sequence represented by SEQ ID NOS: 46125, 46126, 46127, 46128, 46129, 46130, 46131, 46132, 46133, 46134, 46135 were selected from the ORFs having the nucleotide sequence represented by SEQ ID NO: 3634.

[4124] The probes having the nucleotide sequence represented by SEQ ID NOS: 46136, 46137, 46138, 46139, 46140, 46141, 46142, 46143, 46144, 46145, 46146 were selected from the ORFs having the nucleotide sequence represented by SEQ ID NO: 3635.

[4125] The probes having the nucleotide sequence represented by SEQ ID NOS: 46147, 46148, 46149, 46150, 46151, 46152, 46153, 46154, 46155, 46156, 46157 were selected from the ORFs having the nucleotide sequence represented by SEQ ID NO: 3636.

[4126] The probes having the nucleotide sequence represented by SEQ ID NOS: 46158, 46159, 46160, 46161, 46162, 46163, 46164, 46165, 46166, 46167, 46168, 46169, 46170, 46171, 46172, 46173, 46174, 46175, 46176, 46177, 46178, 46179 were selected from the ORFs having the nucleotide sequence represented by SEQ ID NO: 3637.

[4127] The probes having the nucleotide sequence represented by SEQ ID NOS: 46180, 46181, 46182, 46183, 46184, 46185, 46186, 46187, 46188, 46189, 46190 were selected from the ORFs having the nucleotide sequence represented by SEQ ID NO: 3638.

[4128] The probes having the nucleotide sequence represented by SEQ ID NOS: 46191, 46192, 46193, 46194, 46195, 46196, 46197, 46198, 46199, 46200, 46201 were selected from the ORFs having the nucleotide sequence represented by SEQ ID NO: 3639.

[4129] The probes having the nucleotide sequence represented by SEQ ID NOS: 46202, 46203, 46204, 46205, 46206, 46207, 46208, 46209, 46210, 46211, 46212 were selected from the ORFs having the nucleotide sequence represented by SEQ ID NO: 3640.

[4130] The probes having the nucleotide sequence represented by SEQ ID NOS: 46213, 46214, 46215, 46216, 46217, 46218, 46219, 46220, 46221, 46222, 46223 were selected from the ORFs having the nucleotide sequence represented by SEQ ID NO: 3641.

[4131] The probes having the nucleotide sequence represented by SEQ ID NOS: 46224, 46225, 46226, 46227, 46228, 46229, 46230, 46231, 46232, 46233, 46234 were selected from the ORFs having the nucleotide sequence represented by SEQ ID NO: 3642.

[4132] The probes having the nucleotide sequence represented by SEQ ID NOS: 46235, 46236, 46237, 46238, 46239, 46240, 46241, 46242, 46243, 46244, 46245 were selected from the ORFs having the nucleotide sequence represented by SEQ ID NO: 3643.

[4133] The probes having the nucleotide sequence represented by SEQ ID NOS: 46246, 46247, 46248, 46249, 46250, 46251, 46252, 46253, 46254, 46255, 46256 were selected from the ORFs having the nucleotide sequence represented by SEQ ID NO: 3644.

[4134] The probes having the nucleotide sequence represented by SEQ ID NOS: 46257, 46258, 46259, 46260, 46261, 46262, 46263, 46264, 46265, 46266, 46267 were selected from the ORFs having the nucleotide sequence represented by SEQ ID NO: 3645.

[4135] The probes having the nucleotide sequence represented by SEQ ID NOS: 46268, 46269, 46270, 46271, 46272, 46273, 46274, 46275, 46276, 46277, 46278 were selected from the ORFs having the nucleotide sequence represented by SEQ ID NO: 3646.

[4136] The probes having the nucleotide sequence represented by SEQ ID NOS: 46279, 46280, 46281, 46282, 46283, 46284, 46285, 46286, 46287, 46288, 46289 were selected from the ORFs having the nucleotide sequence represented by SEQ ID NO: 3647.

[4137] The probes having the nucleotide sequence represented by SEQ ID NOS: 46290, 46291, 46292, 46293, 46294, 46295, 46296, 46297, 46298, 46299, 46300 were selected from the ORFs having the nucleotide sequence represented by SEQ ID NO: 3648.

[4138] The probes having the nucleotide sequence represented by SEQ ID NOS: 46301, 46302, 46303, 46304, 46305, 46306, 46307, 46308, 46309, 46310, 46311 were selected from the ORFs having the nucleotide sequence represented by SEQ ID NO: 3649.

[4139] The probes having the nucleotide sequence represented by SEQ ID NOS: 46312, 46313, 46314, 46315, 46316, 46317, 46318, 46319, 46320, 46321, 46322 were selected from the ORFs having the nucleotide sequence represented by SEQ ID NO: 3650.

[4140] The probes having the nucleotide sequence represented by SEQ ID NOS: 46323, 46324, 46325, 46326, 46327, 46328, 46329, 46330, 46331, 46332, 46333 were selected from the ORFs having the nucleotide sequence represented by SEQ ID NO: 3651.

[4141] The probes having the nucleotide sequence represented by SEQ ID NOS: 46334, 46335, 46336, 46337, 46338, 46339, 46340, 46341, 46342, 46343, 46344 were selected from the ORFs having the nucleotide sequence represented by SEQ ID NO: 3652.

[4142] The probes having the nucleotide sequence represented by SEQ ID NOS: 46345, 46346, 46347, 46348, 46349, 46350, 46351, 46352, 46353, 46354, 46355 were selected from the ORFs having the nucleotide sequence represented by SEQ ID NO: 3653.

[4143] The probes having the nucleotide sequence represented by SEQ ID NOS: 46356, 46357, 46358, 46359, 46360, 46361, 46362, 46363, 46364, 46365, 46366 were selected from the ORFs having the nucleotide sequence represented by SEQ ID NO: 3654.

[4144] The probes having the nucleotide sequence represented by SEQ ID NOS: 46367, 46368, 46369, 46370, 46371, 46372, 46373, 46374, 46375, 46376, 46377 were selected from the ORFs having the nucleotide sequence represented by SEQ ID NO: 3655.

[4145] The probes having the nucleotide sequence represented by SEQ ID NOS: 46378, 46379, 46380, 46381, 46382, 46383, 46384, 46385, 46386, 46387, 46388 were selected from the ORFs having the nucleotide sequence represented by SEQ ID NO: 3656.

[4146] The probes having the nucleotide sequence represented by SEQ ID NOS: 46389, 46390, 46391, 46392, 46393, 46394, 46395, 46396, 46397, 46398, 46399 were selected from the ORFs having the nucleotide sequence represented by SEQ ID NO: 3657.

[4147] The probes having the nucleotide sequence represented by SEQ ID NOS: 46400, 46401, 46402, 46403, 46404, 46405, 46406, 46407, 46408, 46409, 46410 were selected from the ORFs having the nucleotide sequence represented by SEQ ID NO: 3658.

[4148] The probes having the nucleotide sequence represented by SEQ ID NOS: 46411, 46412, 46413, 46414, 46415, 46416, 46417, 46418, 46419, 46420, 46421 were selected from the ORFs having the nucleotide sequence represented by SEQ ID NO: 3659.

[4149] The probes having the nucleotide sequence represented by SEQ ID NOS: 46422, 46423, 46424, 46425, 46426, 46427, 46428, 46429, 46430, 46431, 46432 were selected from the ORFs having the nucleotide sequence represented by SEQ ID NO: 3660.

[4150] The probes having the nucleotide sequence represented by SEQ ID NOS: 46433, 46434, 46435, 46436, 46437, 46438, 46439, 46440, 46441, 46442, 46443 were selected from the ORFs having the nucleotide sequence represented by SEQ ID NO: 3661.

[4151] The probes having the nucleotide sequence represented by SEQ ID NOS: 46444, 46445, 46446, 46447, 46448, 46449, 46450, 46451, 46452, 46453, 46454 were selected from the ORFs having the nucleotide sequence represented by SEQ ID NO: 3662.

[4152] The probes having the nucleotide sequence represented by SEQ ID NOS: 46455, 46456, 46457, 46458, 46459, 46460, 46461, 46462, 46463, 46464, 46465 were selected from the ORFs having the nucleotide sequence represented by SEQ ID NO: 3663.

[4153] The probes having the nucleotide sequence represented by SEQ ID NOS: 46466, 46467, 46468, 46469, 46470, 46471, 46472, 46473, 46474, 46475, 46476 were selected from the ORFs having the nucleotide sequence represented by SEQ ID NO: 3664.

[4154] The probes having the nucleotide sequence represented by SEQ ID NOS: 46477, 46478, 46479, 46480, 46481, 46482, 46483, 46484, 46485, 46486, 46487 were selected from the ORFs having the nucleotide sequence represented by SEQ ID NO: 3665.

[4155] The probes having the nucleotide sequence represented by SEQ ID NOS: 46488, 46489, 46490, 46491, 46492, 46493, 46494, 46495, 46496, 46497, 46498 were selected from the ORFs having the nucleotide sequence represented by SEQ ID NO: 3666.

[4156] The probes having the nucleotide sequence represented by SEQ ID NOS: 46499, 46500, 46501, 46502, 46503, 46504, 46505, 46506, 46507, 46508, 46509 were selected from the ORFs having the nucleotide sequence represented by SEQ ID NO: 3667.

[4157] The probes having the nucleotide sequence represented by SEQ ID NOS: 46510, 46511, 46512, 46513, 46514, 46515, 46516, 46517, 46518, 46519, 46520 were selected from the ORFs having the nucleotide sequence represented by SEQ ID NO: 3668.

[4158] The probes having the nucleotide sequence represented by SEQ ID NOS: 46521, 46522, 46523, 46524, 46525, 46526, 46527, 46528, 46529, 46530, 46531 were selected from the ORFs having the nucleotide sequence represented by SEQ ID NO: 3669.

[4159] The probes having the nucleotide sequence represented by SEQ ID NOS: 46532, 46533, 46534, 46535, 46536, 46537, 46538, 46539, 46540, 46541, 46542 were selected from the ORFs having the nucleotide sequence represented by SEQ ID NO: 3670.

[4160] The probes having the nucleotide sequence represented by SEQ ID NOS: 46543, 46544, 46545, 46546, 46547, 46548, 46549, 46550, 46551, 46552, 46553 were selected from the ORFs having the nucleotide sequence represented by SEQ ID NO: 3671.

[4161] The probes having the nucleotide sequence represented by SEQ ID NOS: 46554, 46555, 46556, 46557, 46558, 46559, 46560, 46561, 46562, 46563, 46564 were selected from the ORFs having the nucleotide sequence represented by SEQ ID NO: 3672.

[4162] The probes having the nucleotide sequence represented by SEQ ID NOS: 46565, 46566, 46567, 46568, 46569, 46570, 46571, 46572, 46573, 46574, 46575 were selected from the ORFs having the nucleotide sequence represented by SEQ ID NO: 3673.

[4163] The probes having the nucleotide sequence represented by SEQ ID NOS: 46576, 46577, 46578, 46579, 46580, 46581, 46582, 46583, 46584, 46585, 46586 were selected from the ORFs having the nucleotide sequence represented by SEQ ID NO: 3674.

[4164] The probes having the nucleotide sequence represented by SEQ ID NOS: 46587, 46588, 46589, 46590, 46591, 46592, 46593, 46594, 46595, 46596, 46597 were selected from the ORFs having the nucleotide sequence represented by SEQ ID NO: 3675.

[4165] The probes having the nucleotide sequence represented by SEQ ID NOS: 46598, 46599, 46600, 46601, 46602, 46603, 46604, 46605, 46606, 46607, 46608 were selected from the ORFs having the nucleotide sequence represented by SEQ ID NO: 3676.

[4166] The probes having the nucleotide sequence represented by SEQ ID NOS: 46609, 46610, 46611, 46612, 46613, 46614, 46615, 46616, 46617, 46618, 46619 were selected from the ORFs having the nucleotide sequence represented by SEQ ID NO: 3677.

[4167] The probes having the nucleotide sequence represented by SEQ ID NOS: 46620, 46621, 46622, 46623, 46624, 46625, 46626, 46627, 46628, 46629, 46630 were selected from the ORFs having the nucleotide sequence represented by SEQ ID NO: 3678.

[4168] The probes having the nucleotide sequence represented by SEQ ID NOS: 46631, 46632, 46633, 46634, 46635, 46636, 46637, 46638, 46639, 46640, 46641 were selected from the ORFs having the nucleotide sequence represented by SEQ ID NO: 3679.

[4169] The probes having the nucleotide sequence represented by SEQ ID NOS: 46642, 46643, 46644, 46645, 46646, 46647, 46648, 46649, 46650, 46651, 46652 were selected from the ORFs having the nucleotide sequence represented by SEQ ID NO: 3680.

[4170] The probes having the nucleotide sequence represented by SEQ ID NOS: 46653, 46654, 46655, 46656, 46657, 46658, 46659, 46660, 46661, 46662, 46663 were selected from the ORFs having the nucleotide sequence represented by SEQ ID NO: 3681.

[4171] The probes having the nucleotide sequence represented by SEQ ID NOS: 46664, 46665, 46666, 46667, 46668, 46669, 46670, 46671, 46672, 46673, 46674 were selected from the ORFs having the nucleotide sequence represented by SEQ ID NO: 3682.

[4172] The probes having the nucleotide sequence represented by SEQ ID NOS: 46675, 46676, 46677, 46678, 46679, 46680, 46681, 46682, 46683, 46684, 46685 were selected from the ORFs having the nucleotide sequence represented by SEQ ID NO: 3683.

[4173] The probes having the nucleotide sequence represented by SEQ ID NOS: 46686, 46687, 46688, 46689, 46690, 46691, 46692, 46693, 46694, 46695, 46696 were selected from the ORFs having the nucleotide sequence represented by SEQ ID NO: 3684.

[4174] The probes having the nucleotide sequence represented by SEQ ID NOS: 46697, 46698, 46699, 46700, 46701, 46702, 46703, 46704, 46705, 46706, 46707 were selected from the ORFs having the nucleotide sequence represented by SEQ ID NO: 3685.

[4175] The probes having the nucleotide sequence represented by SEQ ID NOS: 46708, 46709, 46710, 46711, 46712, 46713, 46714, 46715, 46716, 46717, 46718 were selected from the ORFs having the nucleotide sequence represented by SEQ ID NO: 3686.

[4176] The probes having the nucleotide sequence represented by SEQ ID NOS: 46719, 46720, 46721, 46722, 46723, 46724, 46725, 46726, 46727, 46728, 46729 were selected from the ORFs having the nucleotide sequence represented by SEQ ID NO: 3687.

[4177] The probes having the nucleotide sequence represented by SEQ ID NOS: 46730, 46731, 46732, 46733, 46734, 46735, 46736, 46737, 46738, 46739, 46740 were selected from the ORFs having the nucleotide sequence represented by SEQ ID NO: 3688.

[4178] The probes having the nucleotide sequence represented by SEQ ID NOS: 46741, 46742, 46743, 46744, 46745, 46746, 46747, 46748, 46749, 46750, 46751 were selected from the ORFs having the nucleotide sequence represented by SEQ ID NO: 3689.

[4179] The probes having the nucleotide sequence represented by SEQ ID NOS: 46752, 46753, 46754, 46755, 46756, 46757, 46758, 46759, 46760, 46761, 46762 were selected from the ORFs having the nucleotide sequence represented by SEQ ID NO: 3690.

[4180] The probes having the nucleotide sequence represented by SEQ ID NOS: 46763, 46764, 46765, 46766, 46767, 46768, 46769, 46770, 46771, 46772, 46773 were selected from the ORFs having the nucleotide sequence represented by SEQ ID NO: 3691.

[4181] The probes having the nucleotide sequence represented by SEQ ID NOS: 46774, 46775, 46776, 46777, 46778, 46779, 46780, 46781, 46782, 46783, 46784 were selected from the ORFs having the nucleotide sequence represented by SEQ ID NO: 3692.

[4182] The probes having the nucleotide sequence represented by SEQ ID NOS: 46785, 46786, 46787, 46788, 46789, 46790, 46791, 46792, 46793, 46794, 46795 were selected from the ORFs having the nucleotide sequence represented by SEQ ID NO: 3693.

[4183] The probes having the nucleotide sequence represented by SEQ ID NOS: 46796, 46797, 46798, 46799, 46800, 46801, 46802, 46803, 46804, 46805, 46806 were selected from the ORFs having the nucleotide sequence represented by SEQ ID NO: 3694.

[4184] The probes having the nucleotide sequence represented by SEQ ID NOS: 46807, 46808, 46809, 46810, 46811, 46812, 46813, 46814, 46815, 46816, 46817 were selected from the ORFs having the nucleotide sequence represented by SEQ ID NO: 3695.

[4185] The probes having the nucleotide sequence represented by SEQ ID NOS: 46818, 46819, 46820, 46821, 46822, 46823, 46824, 46825, 46826, 46827, 46828 were selected from the ORFs having the nucleotide sequence represented by SEQ ID NO: 3696.

[4186] The probes having the nucleotide sequence represented by SEQ ID NOS: 46829, 46830, 46831, 46832, 46833, 46834, 46835, 46836, 46837, 46838, 46839 were selected from the ORFs having the nucleotide sequence represented by SEQ ID NO: 3697.

[4187] The probes having the nucleotide sequence represented by SEQ ID NOS: 46840, 46841, 46842, 46843, 46844, 46845, 46846, 46847, 46848, 46849, 46850 were selected from the ORFs having the nucleotide sequence represented by SEQ ID NO: 3698.

[4188] The probes having the nucleotide sequence represented by SEQ ID NOS: 46851, 46852, 46853, 46854, 46855, 46856, 46857, 46858, 46859, 46860, 46861 were selected from the ORFs having the nucleotide sequence represented by SEQ ID NO: 3699.

[4189] The probes having the nucleotide sequence represented by SEQ ID NOS: 46862, 46863, 46864, 46865, 46866, 46867, 46868, 46869, 46870, 46871, 46872 were selected from the ORFs having the nucleotide sequence represented by SEQ ID NO: 3700.

[4190] The probes having the nucleotide sequence represented by SEQ ID NOS: 46873, 46874, 46875, 46876, 46877, 46878, 46879, 46880, 46881, 46882, 46883 were selected from the ORFs having the nucleotide sequence represented by SEQ ID NO: 3701.

[4191] The probes having the nucleotide sequence represented by SEQ ID NOS: 46884, 46885, 46886, 46887, 46888, 46889, 46890, 46891, 46892, 46893, 46894 were selected from the ORFs having the nucleotide sequence represented by SEQ ID NO: 3702.

[4192] The probes having the nucleotide sequence represented by SEQ ID NOS: 46895, 46896, 46897, 46898, 46899, 46900, 46901, 46902, 46903, 46904, 46905 were selected from the ORFs having the nucleotide sequence represented by SEQ ID NO: 3703.

[4193] The probes having the nucleotide sequence represented by SEQ ID NOS: 46906, 46907, 46908, 46909, 46910, 46911, 46912, 46913, 46914, 46915, 46916, 46917, 46918, 46919, 46920, 46921, 46922, 46923, 46924, 46925, 46926, 46927 were selected from the ORFs having the nucleotide sequence represented by SEQ ID NO: 3704.

[4194] The probes having the nucleotide sequence represented by SEQ ID NOS: 46928, 46929, 46930, 46931, 46932, 46933, 46934, 46935, 46936, 46937, 46938 were selected from the ORFs having the nucleotide sequence represented by SEQ ID NO: 3705.

[4195] The probes having the nucleotide sequence represented by SEQ ID NOS: 46939, 46940, 46941, 46942, 46943, 46944, 46945, 46946, 46947, 46948, 46949 were selected from the ORFs having the nucleotide sequence represented by SEQ ID NO: 3706.

[4196] The probes having the nucleotide sequence represented by SEQ ID NOS: 46950, 46951, 46952, 46953, 46954, 46955, 46956, 46957, 46958, 46959, 46960 were selected from the ORFs having the nucleotide sequence represented by SEQ ID NO: 3707.

[4197] The probes having the nucleotide sequence represented by SEQ ID NOS: 46961, 46962, 46963, 46964, 46965, 46966, 46967, 46968, 46969, 46970, 46971 were selected from the ORFs having the nucleotide sequence represented by SEQ ID NO: 3708.

[4198] The probes having the nucleotide sequence represented by SEQ ID NOS: 46972, 46973, 46974, 46975, 46976, 46977, 46978, 46979, 46980, 46981, 46982 were selected from the ORFs having the nucleotide sequence represented by SEQ ID NO: 3709.

[4199] The probes having the nucleotide sequence represented by SEQ ID NOS: 46983, 46984, 46985, 46986, 46987, 46988, 46989, 46990, 46991, 46992, 46993 were selected from the ORFs having the nucleotide sequence represented by SEQ ID NO: 3710.

[4200] The probes having the nucleotide sequence represented by SEQ ID NOS: 46994, 46995, 46996, 46997, 46998, 46999, 47000, 47001, 47002, 47003, 47004 were selected from the ORFs having the nucleotide sequence represented by SEQ ID NO: 3711.

[4201] The probes having the nucleotide sequence represented by SEQ ID NOS: 47005, 47006, 47007, 47008, 47009, 47010, 47011, 47012, 47013, 47014, 47015 were selected from the ORFs having the nucleotide sequence represented by SEQ ID NO: 3712.

[4202] The probes having the nucleotide sequence represented by SEQ ID NOS: 47016, 47017, 47018, 47019, 47020, 47021, 47022, 47023, 47024, 47025, 47026 were selected from the ORFs having the nucleotide sequence represented by SEQ ID NO: 3713.

[4203] The probes having the nucleotide sequence represented by SEQ ID NOS: 47027, 47028, 47029, 47030, 47031, 47032, 47033, 47034, 47035, 47036, 47037, 47038, 47039, 47040, 47041, 47042, 47043, 47044, 47045, 47046, 47047, 47048 were selected from the ORFs having the nucleotide sequence represented by SEQ ID NO: 3714.

[4204] The probes having the nucleotide sequence represented by SEQ ID NOS: 47049, 47050, 47051, 47052, 47053, 47054, 47055, 47056, 47057, 47058, 47059 were selected from the ORFs having the nucleotide sequence represented by SEQ ID NO: 3715.

[4205] The probes having the nucleotide sequence represented by SEQ ID NOS: 47060, 47061, 47062, 47063, 47064, 47065, 47066, 47067, 47068, 47069, 47070 were selected from the ORFs having the nucleotide sequence represented by SEQ ID NO: 3716.

[4206] The probes having the nucleotide sequence represented by SEQ ID NOS: 47071, 47072, 47073, 47074, 47075, 47076, 47077, 47078, 47079, 47080, 47081 were selected from the ORFs having the nucleotide sequence represented by SEQ ID NO: 3717.

[4207] The probes having the nucleotide sequence represented by SEQ ID NOS: 47082, 47083, 470.84, 47085, 47086, 47087, 47088, 47089, 47090, 47091, 47092 were selected from the ORFs having the nucleotide sequence represented by SEQ ID NO: 3718.

[4208] The probes having the nucleotide sequence represented by SEQ ID NOS: 47093, 47094, 47095, 47096, 47097, 47098, 47099, 47100, 47101, 47102, 47103 were selected from the ORFs having the nucleotide sequence represented by SEQ ID NO: 3719.

[4209] The probes having the nucleotide sequence represented by SEQ ID NOS: 47104, 47105, 47106, 47107, 47108, 47109, 47110, 47111, 47112, 47113, 47114, 47115, 47116, 47117, 47118, 47119, 47120, 47121, 47122, 47123, 47124, 47125 were selected from the ORFs having the nucleotide sequence represented by SEQ ID NO: 3720.

[4210] The probes having the nucleotide sequence represented by SEQ ID NOS: 47126, 47127, 47128, 47129, 47130, 47131, 47132, 47133, 47134, 47135, 47136 were selected from the ORFs having the nucleotide sequence represented by SEQ ID NO: 3721.

[4211] The probes having the nucleotide sequence represented by SEQ ID NOS: 47137, 47138, 47139, 47140, 47141, 47142, 47143, 47144, 47145, 47146, 47147 were selected from the ORFs having the nucleotide sequence represented by SEQ ID NO: 3722.

[4212] The probes having the nucleotide sequence represented by SEQ ID NOS: 47148, 47149, 47150, 47151, 47152, 47153, 47154, 47155, 47156, 47157, 47158 were selected from the ORFs having the nucleotide sequence represented by SEQ ID NO: 3723.

[4213] The probes having the nucleotide sequence represented by SEQ ID NOS: 47159, 47160, 47161, 47162, 47163, 47164, 47165, 47166, 47167, 47168, 47169 were selected from the ORFs having the nucleotide sequence represented by SEQ ID NO: 3724.

[4214] The probes having the nucleotide sequence represented by SEQ ID NOS: 47170, 47171, 47172, 47173, 47174, 47175, 47176, 47177, 47178, 47179, 47180 were selected from the ORFs having the nucleotide sequence represented by SEQ ID NO: 3725.

[4215] The probes having the nucleotide sequence represented by SEQ ID NOS: 47181, 47182, 47183, 47184, 47185, 47186, 47187, 47188, 47189, 47190, 47191 were selected from the ORFs having the nucleotide sequence represented by SEQ ID NO: 3726.

[4216] The probes having the nucleotide sequence represented by SEQ ID NOS: 47192, 47193, 47194, 47195, 47196, 47197, 47198, 47199, 47200, 47201, 47202 were selected from the ORFs having the nucleotide sequence represented by SEQ ID NO: 3727.

[4217] The probes having the nucleotide sequence represented by SEQ ID NOS: 47203, 47204, 47205, 47206, 47207, 47208, 47209, 47210, 47211, 47212, 47213 were selected from the ORFs having the nucleotide sequence represented by SEQ ID NO: 3728.

[4218] The probes having the nucleotide sequence represented by SEQ ID NOS: 47214, 47215, 47216, 47217, 47218, 47219, 47220, 47221, 47222, 47223, 47224 were selected from the ORFs having the nucleotide sequence represented by SEQ ID NO: 3729.

[4219] The probes having the nucleotide sequence represented by SEQ ID NOS: 47225, 47226, 47227, 47228, 47229, 47230, 47231, 47232, 47233, 47234, 47235 were selected from the ORFs having the nucleotide sequence represented by SEQ ID NO: 3730.

[4220] The probes having the nucleotide sequence represented by SEQ ID NOS: 47236, 47237, 47238, 47239, 47240, 47241, 47242, 47243, 47244, 47245, 47246 were selected from the ORFs having the nucleotide sequence represented by SEQ ID NO: 3731.

[4221] The probes having the nucleotide sequence represented by SEQ ID NOS: 47247, 47248, 47249, 47250, 47251, 47252, 47253, 47254, 47255, 47256, 47257 were selected from the ORFs having the nucleotide sequence represented by SEQ ID NO: 3732.

[4222] The probes having the nucleotide sequence represented by SEQ ID NOS: 47258, 47259, 47260, 47261, 47262, 47263, 47264, 47265, 47266, 47267, 47268 were selected from the ORFs having the nucleotide sequence represented by SEQ ID NO: 3733.

[4223] The probes having the nucleotide sequence represented by SEQ ID NOS: 47269, 47270, 47271, 47272, 47273, 47274, 47275, 47276, 47277, 47278, 47279 were selected from the ORFs having the nucleotide sequence represented by SEQ ID NO: 3734.

[4224] The probes having the nucleotide sequence represented by SEQ ID NOS: 47280, 47281, 47282, 47283, 47284, 47285, 47286, 47287, 47288, 47289, 47290 were selected from the ORFs having the nucleotide sequence represented by SEQ ID NO: 3735.

[4225] The probes having the nucleotide sequence represented by SEQ ID NOS: 47291, 47292, 47293, 47294, 47295, 47296, 47297, 47298, 47299, 47300, 47301 were selected from the ORFs having the nucleotide sequence represented by SEQ ID NO: 3736.

[4226] The probes having the nucleotide sequence represented by SEQ ID NOS: 47302, 47303, 47304, 47305, 47306, 47307, 47308, 47309, 47310, 47311, 47312 were selected from the ORFs having the nucleotide sequence represented by SEQ ID NO: 3737.

[4227] The probes having the nucleotide sequence represented by SEQ ID NOS: 47313, 47314, 47315, 47316, 47317, 47318, 47319, 47320, 47321, 47322, 47323 were selected from the ORFs having the nucleotide sequence represented by SEQ ID NO: 3738.

[4228] The probes having the nucleotide sequence represented by SEQ ID NOS: 47324, 47325, 47326, 47327, 47328, 47329, 47330, 47331, 47332, 47333, 47334 were selected from the ORFs having the nucleotide sequence represented by SEQ ID NO: 3739.

[4229] The probes having the nucleotide sequence represented by SEQ ID NOS: 47335, 47336, 47337, 47338, 47339, 47340, 47341, 47342, 47343, 47344, 47345 were selected from the ORFs having the nucleotide sequence represented by SEQ ID NO: 3740.

[4230] The probes having the nucleotide sequence represented by SEQ ID NOS: 47346, 47347, 47348, 47349, 47350, 47351, 47352, 47353, 47354, 47355, 47356 were selected from the ORFs having the nucleotide sequence represented by SEQ ID NO: 3741.

[4231] The probes having the nucleotide sequence represented by SEQ ID NOS: 47357, 47358, 47359, 47360, 47361, 47362, 47363, 47364, 47365, 47366, 47367 were selected from the ORFs having the nucleotide sequence represented by SEQ ID NO: 3742.

[4232] The probes having the nucleotide sequence represented by SEQ ID NOS: 47368, 47369, 47370, 47371, 47372, 47373, 47374, 47375, 47376, 47377, 47378 were selected from the ORFs having the nucleotide sequence represented by SEQ ID NO: 3743.

[4233] The probes having the nucleotide sequence represented by SEQ ID NOS: 47379, 47380, 47381, 47382, 47383, 47384, 47385, 47386, 47387, 47388, 47389 were selected from the ORFs having the nucleotide sequence represented by SEQ ID NO: 3744.

[4234] The probes having the nucleotide sequence represented by SEQ ID NOS: 47390, 47391, 47392, 47393, 47394, 47395, 47396, 47397, 47398, 47399, 47400 were selected from the ORFs having the nucleotide sequence represented by SEQ ID NO: 3745.

[4235] The probes having the nucleotide sequence represented by SEQ ID NOS: 47401, 47402, 47403, 47404, 47405, 47406, 47407, 47408, 47409, 47410, 47411 were selected from the ORFs having the nucleotide sequence represented by SEQ ID NO: 3746.

[4236] The probes having the nucleotide sequence represented by SEQ ID NOS: 47412, 47413, 47414, 47415, 47416, 47417, 47418, 47419, 47420, 47421, 47422 were selected from the ORFs having the nucleotide sequence represented by SEQ ID NO: 3747.

[4237] The probes having the nucleotide sequence represented by SEQ ID NOS: 47423, 47424, 47425, 47426, 47427, 47428, 47429, 47430, 47431, 47432, 47433 were selected from the ORFs having the nucleotide sequence represented by SEQ ID NO: 3748.

[4238] The probes having the nucleotide sequence represented by SEQ ID NOS: 47434, 47435, 47436, 47437, 47438, 47439, 47440, 47441, 47442, 47443, 47444 were selected from the ORFs having the nucleotide sequence represented by SEQ ID NO: 3749.

[4239] The probes having the nucleotide sequence represented by SEQ ID NOS: 47445, 47446, 47447, 47448, 47449, 47450, 47451, 47452, 47453, 47454, 47455 were selected from the ORFs having the nucleotide sequence represented by SEQ ID NO: 3750.

[4240] The probes having the nucleotide sequence represented by SEQ ID NOS: 47456, 47457, 47458, 47459, 47460, 47461, 47462, 47463, 47464, 47465, 47466 were selected from the ORFs having the nucleotide sequence represented by SEQ ID NO: 3751.

[4241] The probes having the nucleotide sequence represented by SEQ ID NOS: 47467, 47468, 47469, 47470, 47471, 47472, 47473, 47474, 47475, 47476, 47477 were selected from the ORFs having the nucleotide sequence represented by SEQ ID NO: 3752.

[4242] The probes having the nucleotide sequence represented by SEQ ID NOS: 47478, 47479, 47480, 47481, 47482, 47483, 47484, 47485, 47486, 47487, 47488 were selected from the ORFs having the nucleotide sequence represented by SEQ ID NO: 3753.

[4243] The probes having the nucleotide sequence represented by SEQ ID NOS: 47489, 47490, 47491, 47492, 47493, 47494, 47495, 47496, 47497, 47498, 47499 were selected from the ORFs having the nucleotide sequence represented by SEQ ID NO: 3754.

[4244] The probes having the nucleotide sequence represented by SEQ ID NOS: 47500, 47501, 47502, 47503, 47504, 47505, 47506, 47507, 47508, 47509, 47510 were selected from the ORFs having the nucleotide sequence represented by SEQ ID NO: 3755.

[4245] The probes having the nucleotide sequence represented by SEQ ID NOS: 47511, 47512, 47513, 47514, 47515, 47516, 47517, 47518, 47519, 47520, 47521 were selected from the ORFs having the nucleotide sequence represented by SEQ ID NO: 3756.

[4246] The probes having the nucleotide sequence represented by SEQ ID NOS: 47522, 47523, 47524, 47525, 47526, 47527, 47528, 47529, 47530, 47531, 47532 were selected from the ORFs having the nucleotide sequence represented by SEQ ID NO: 3757.

[4247] The probes having the nucleotide sequence represented by SEQ ID NOS: 47533, 47534, 47535, 47536, 47537, 47538, 47539, 47540, 47541, 47542, 47543 were selected from the ORFs having the nucleotide sequence represented by SEQ ID NO: 3758.

[4248] The probes having the nucleotide sequence represented by SEQ ID NOS: 47544, 47545, 47546, 47547, 47548, 47549, 47550, 47551, 47552, 47553, 47554 were selected from the ORFs having the nucleotide sequence represented by SEQ ID NO: 3759.

[4249] The probes having the nucleotide sequence represented by SEQ ID NOS: 47555, 47556, 47557, 47558, 47559, 47560, 47561, 47562, 47563, 47564, 47565 were selected from the ORFs having the nucleotide sequence represented by SEQ ID NO: 3760.

[4250] The probes having the nucleotide sequence represented by SEQ ID NOS: 47566, 47567, 47568, 47569, 47570, 47571, 47572, 47573, 47574, 47575, 47576 were selected from the ORFs having the nucleotide sequence represented by SEQ ID NO: 3761.

[4251] The probes having the nucleotide sequence represented by SEQ ID NOS: 47577, 47578, 47579, 47580, 47581, 47582, 47583, 47584, 47585, 47586, 47587 were selected from the ORFs having the nucleotide sequence represented by SEQ ID NO: 3762.

[4252] The probes having the nucleotide sequence represented by SEQ ID NOS: 47588, 47589, 47590, 47591, 47592, 47593, 47594, 47595, 47596, 47597, 47598 were selected from the ORFs having the nucleotide sequence represented by SEQ ID NO: 3763.

[4253] The probes having the nucleotide sequence represented by SEQ ID NOS: 47599, 47600, 47601, 47602, 47603, 47604, 47605, 47606, 47607, 47608, 47609 were selected from the ORFs having the nucleotide sequence represented by SEQ ID NO: 3764.

[4254] The probes having the nucleotide sequence represented by SEQ ID NOS: 47610, 47611, 47612, 47613, 47614, 47615, 47616, 47617, 47618, 47619, 47620 were selected from the ORFs having the nucleotide sequence represented by SEQ ID NO: 3765.

[4255] The probes having the nucleotide sequence represented by SEQ ID NOS: 47621, 47622, 47623, 47624, 47625, 47626, 47627, 47628, 47629, 47630, 47631 were selected from the ORFs having the nucleotide sequence represented by SEQ ID NO: 3766.

[4256] The probes having the nucleotide sequence represented by SEQ ID NOS: 47632, 47633, 47634, 47635, 47636, 47637, 47638, 47639, 47640, 47641, 47642 were selected from the ORFs having the nucleotide sequence represented by SEQ ID NO: 3767.

[4257] The probes having the nucleotide sequence represented by SEQ ID NOS: 47643, 47644, 47645, 47646, 47647, 47648, 47649, 47650, 47651, 47652, 47653 were selected from the ORFs having the nucleotide sequence represented by SEQ ID NO: 3768.

[4258] The probes having the nucleotide sequence represented by SEQ ID NOS: 47654, 47655, 47656, 47657, 47658, 47659, 47660, 47661, 47662, 47663, 47664 were selected from the ORFs having the nucleotide sequence represented by SEQ ID NO: 3769.

[4259] The probes having the nucleotide sequence represented by SEQ ID NOS: 47665, 47666, 47667, 47668, 47669, 47670, 47671, 47672, 47673, 47674, 47675 were selected from the ORFs having the nucleotide sequence represented by SEQ ID NO: 3770.

[4260] The probes having the nucleotide sequence represented by SEQ ID NOS: 47676, 47677, 47678, 47679, 47680, 47681, 47682, 47683, 47684, 47685, 47686 were selected from the ORFs having the nucleotide sequence represented by SEQ ID NO: 3771.

[4261] The probes having the nucleotide sequence represented by SEQ ID NOS: 47687, 47688, 47689, 47690, 47691, 47692, 47693, 47694, 47695, 47696, 47697 were selected from the ORFs having the nucleotide sequence represented by SEQ ID NO: 3772.

[4262] The probes having the nucleotide sequence represented by SEQ ID NOS: 47698, 47699, 47700, 47701, 47702, 47703, 47704, 47705, 47706, 47707, 47708 were selected from the ORFs having the nucleotide sequence represented by SEQ ID NO: 3773.

[4263] The probes having the nucleotide sequence represented by SEQ ID NOS: 47709, 47710, 47711, 47712, 47713, 47714, 47715, 47716, 47717, 47718, 47719 were selected from the ORFs having the nucleotide sequence represented by SEQ ID NO: 3774.

[4264] The probes having the nucleotide sequence represented by SEQ ID NOS: 47720, 47721, 47722, 47723, 47724, 47725, 47726, 47727, 47728, 47729, 47730 were selected from the ORFs having the nucleotide sequence represented by SEQ ID NO: 3775.

[4265] The probes having the nucleotide sequence represented by SEQ ID NOS: 47731, 47732, 47733, 47734, 47735, 47736, 47737, 47738, 47739, 47740, 47741 were selected from the ORFs having the nucleotide sequence represented by SEQ ID NO: 3776.

[4266] The probes having the nucleotide sequence represented by SEQ ID NOS: 47742, 47743, 47744, 47745, 47746, 47747, 47748, 47749, 47750, 47751, 47752, 47753, 47754, 47755, 47756, 47757, 47758, 47759, 47760, 47761, 47762, 47763 were selected from the ORFs having the nucleotide sequence represented by SEQ ID NO: 3777.

[4267] The probes having the nucleotide sequence represented by SEQ ID NOS: 47764, 47765, 47766, 47767, 47768, 47769, 47770, 47771, 47772, 47773, 47774 were selected from the ORFs having the nucleotide sequence represented by SEQ ID NO: 3778.

[4268] The probes having the nucleotide sequence represented by SEQ ID NOS: 47775, 47776, 47777, 47778, 47779, 47780, 47781, 47782, 47783, 47784, 47785 were selected from the ORFs having the nucleotide sequence represented by SEQ ID NO: 3779.

[4269] The probes having the nucleotide sequence represented by SEQ ID NOS: 47786, 47787, 47788, 47789, 47790, 47791, 47792, 47793, 47794, 47795, 47796 were selected from the ORFs having the nucleotide sequence represented by SEQ ID NO: 3780.

[4270] The probes having the nucleotide sequence represented by SEQ ID NOS: 47797, 47798, 47799, 47800, 47801, 47802, 47803, 47804, 47805, 47806, 47807 were selected from the ORFs having the nucleotide sequence represented by SEQ ID NO: 3781.

[4271] The probes having the nucleotide sequence represented by SEQ ID NOS: 47808, 47809, 47810, 47811, 47812, 47813, 47814, 47815, 47816, 47817, 47818 were selected from the ORFs having the nucleotide sequence represented by SEQ ID NO: 3782.

[4272] The probes having the nucleotide sequence represented by SEQ ID NOS: 47819, 47820, 47821, 47822, 47823, 47824, 47825, 47826, 47827, 47828, 47829 were selected from the ORFs having the nucleotide sequence represented by SEQ ID NO: 3783.

[4273] The probes having the nucleotide sequence represented by SEQ ID NOS: 47830, 47831, 47832, 47833, 47834, 47835, 47836, 47837, 47838, 47839, 47840 were selected from the ORFs having the nucleotide sequence represented by SEQ ID NO: 3784.

[4274] The probes having the nucleotide sequence represented by SEQ ID NOS: 47841, 47842, 47843, 47844, 47845, 47846, 47847, 47848, 47849, 47850, 47851 were selected from the ORFs having the nucleotide sequence represented by SEQ ID NO: 3785.

[4275] The probes having the nucleotide sequence represented by SEQ ID NOS: 47852, 47853, 47854, 47855, 47856, 47857, 47858, 47859, 47860, 47861, 47862 were selected from the ORFs having the nucleotide sequence represented by SEQ ID NO: 3786.

[4276] The probes having the nucleotide sequence represented by SEQ ID NOS: 47863, 47864, 47865, 47866, 47867, 47868, 47869, 47870, 47871, 47872, 47873 were selected from the ORFs having the nucleotide sequence represented by SEQ ID NO: 3787.

[4277] The probes having the nucleotide sequence represented by SEQ ID NOS: 47874, 47875, 47876, 47877, 47878, 47879, 47880, 47881, 47882, 47883, 47884 were selected from the ORFs having the nucleotide sequence represented by SEQ ID NO: 3788.

[4278] The probes having the nucleotide sequence represented by SEQ ID NOS: 47885, 47886, 47887, 47888, 47889, 47890, 47891, 47892, 47893, 47894, 47895 were selected from the ORFs having the nucleotide sequence represented by SEQ ID NO: 3789.

[4279] The probes having the nucleotide sequence represented by SEQ ID NOS: 47896, 47897, 47898, 47899, 47900, 47901, 47902, 47903, 47904, 47905, 47906 were selected from the ORFs having the nucleotide sequence represented by SEQ ID NO: 3790.

[4280] The probes having the nucleotide sequence represented by SEQ ID NOS: 47907, 47908, 47909, 47910, 47911, 47912, 47913, 47914, 47915, 47916, 47917 were selected from the ORFs having the nucleotide sequence represented by SEQ ID NO: 3791.

[4281] The probes having the nucleotide sequence represented by SEQ ID NOS: 47918, 47919, 47920, 47921, 47922, 47923, 47924, 47925, 47926, 47927, 47928 were selected from the ORFs having the nucleotide sequence represented by SEQ ID NO: 3792.

[4282] The probes having the nucleotide sequence represented by SEQ ID NOS: 47929, 47930, 47931, 47932, 47933, 47934, 47935, 47936, 47937, 47938, 47939 were selected from the ORFs having the nucleotide sequence represented by SEQ ID NO: 3793.

[4283] The probes having the nucleotide sequence represented by SEQ ID NOS: 47940, 47941, 47942, 47943, 47944, 47945, 47946, 47947, 47948, 47949, 47950 were selected from the ORFs having the nucleotide sequence represented by SEQ ID NO: 3794.

[4284] The probes having the nucleotide sequence represented by SEQ ID NOS: 47951, 47952, 47953, 47954, 47955, 47956, 47957, 47958, 47959, 47960, 47961 were selected from the ORFs having the nucleotide sequence represented by SEQ ID NO: 3795.

[4285] The probes having the nucleotide sequence represented by SEQ ID NOS: 47962, 47963, 47964, 47965, 47966, 47967, 47968, 47969, 47970, 47971, 47972 were selected from the ORFs having the nucleotide sequence represented by SEQ ID NO: 3796.

[4286] The probes having the nucleotide sequence represented by SEQ ID NOS: 47973, 47974, 47975, 47976, 47977, 47978, 47979, 47980, 47981, 47982, 47983 were selected from the ORFs having the nucleotide sequence represented by SEQ ID NO: 3797.

[4287] The probes having the nucleotide sequence represented by SEQ ID NOS: 47984, 47985, 47986, 47987, 47988, 47989, 47990, 47991, 47992, 47993, 47994 were selected from the ORFs having the nucleotide sequence represented by SEQ ID NO: 3798.

[4288] The probes having the nucleotide sequence represented by SEQ ID NOS: 47995, 47996, 47997, 47998, 47999, 48000, 48001, 48002, 48003, 48004, 48005 were selected from the ORFs having the nucleotide sequence represented by SEQ ID NO: 3799.

[4289] The probes having the nucleotide sequence represented by SEQ ID NOS: 48006, 48007, 48008, 48009, 48010, 48011, 48012, 48013, 48014, 48015, 48016 were selected from the ORFs having the nucleotide sequence represented by SEQ ID NO: 3800.

[4290] The probes having the nucleotide sequence represented by SEQ ID NOS: 48017, 48018, 48019, 48020, 48021, 48022, 48023, 48024, 48025, 48026, 48027 were selected from the ORFs having the nucleotide sequence represented by SEQ ID NO: 3801.

[4291] The probes having the nucleotide sequence represented by SEQ ID NOS: 48028, 48029, 48030, 48031, 48032, 48033, 48034, 48035, 48036, 48037, 48038 were selected from the ORFs having the nucleotide sequence represented by SEQ ID NO: 3802.

[4292] The probes having the nucleotide sequence represented by SEQ ID NOS: 48039, 48040, 48041, 48042, 48043, 48044, 48045, 48046, 48047, 48048, 48049 were selected from the ORFs having the nucleotide sequence represented by SEQ ID NO: 3803.

[4293] The probes having the nucleotide sequence represented by SEQ ID NOS: 48050, 48051, 48052, 48053, 48054, 48055, 48056, 48057, 48058, 48059, 48060 were selected from the ORFs having the nucleotide sequence represented by SEQ ID NO: 3804.

[4294] The probes having the nucleotide sequence represented by SEQ ID NOS: 48061, 48062, 48063, 48064, 48065, 48066, 48067, 48068, 48069, 48070, 48071 were selected from the ORFs having the nucleotide sequence represented by SEQ ID NO: 3805.

[4295] The probes having the nucleotide sequence represented by SEQ ID NOS: 48072, 48073, 48074, 48075, 48076, 48077, 48078, 48079, 48080, 48081, 48082 were selected from the ORFs having the nucleotide sequence represented by SEQ ID NO: 3806.

[4296] The probes having the nucleotide sequence represented by SEQ ID NOS: 48083, 48084, 48085, 48086, 48087, 48088, 48089, 48090, 48091, 48092, 48093 were selected from the ORFs having the nucleotide sequence represented by SEQ ID NO: 3807.

[4297] The probes having the nucleotide sequence represented by SEQ ID NOS: 48094, 48095, 48096, 48097, 48098, 48099, 48100, 48101, 48102, 48103, 48104 were selected from the ORFs having the nucleotide sequence represented by SEQ ID NO: 3808.

[4298] The probes having the nucleotide sequence represented by SEQ ID NOS: 48105, 48106, 48107, 48108, 48109, 48110, 48111, 48112, 48113, 48114, 48115 were selected from the ORFs having the nucleotide sequence represented by SEQ ID NO: 3809.

[4299] The probes having the nucleotide sequence represented by SEQ ID NOS: 48116, 48117, 48118, 48119, 48120, 48121, 48122, 48123, 48124, 48125, 48126 were selected from the ORFs having the nucleotide sequence represented by SEQ ID NO: 3810.

[4300] The probes having the nucleotide sequence represented by SEQ ID NOS: 48127, 48128, 48129, 48130, 48131, 48132, 48133, 48134, 48135, 48136, 48137 were selected from the ORFs having the nucleotide sequence represented by SEQ ID NO: 3811.

[4301] The probes having the nucleotide sequence represented by SEQ ID NOS: 48138, 48139, 48140, 48141, 48142, 48143, 48144, 48145, 48146, 48147, 48148 were selected from the ORFs having the nucleotide sequence represented by SEQ ID NO: 3812.

[4302] The probes having the nucleotide sequence represented by SEQ ID NOS: 48149, 48150, 48151, 48152, 48153, 48154, 48155, 48156, 48157, 48158, 48159 were selected from the ORFs having the nucleotide sequence represented by SEQ ID NO: 3813.

[4303] The probes having the nucleotide sequence represented by SEQ ID NOS: 48160, 48161, 48162, 48163, 48164, 48165, 48166, 48167, 48168, 48169, 48170 were selected from the ORFs having the nucleotide sequence represented by SEQ ID NO: 3814.

[4304] The probes having the nucleotide sequence represented by SEQ ID NOS: 48171, 48172, 48173, 48174, 48175, 48176, 48177, 48178, 48179, 48180, 48181 were selected from the ORFs having the nucleotide sequence represented by SEQ ID NO: 3815.

[4305] The probes having the nucleotide sequence represented by SEQ ID NOS: 48182, 48183, 48184, 48185, 48186, 48187, 48188, 48189, 48190, 48191, 48192 were selected from the ORFs having the nucleotide sequence represented by SEQ ID NO: 3816.

[4306] The probes having the nucleotide sequence represented by SEQ ID NOS:. 48193, 48194, 48195, 48196, 48197, 48198, 48199, 48200, 48201, 48202, 48203 were selected from the ORFs having the nucleotide sequence represented by SEQ ID NO: 3817.

[4307] The probes having the nucleotide sequence represented by SEQ ID NOS: 48204, 48205, 48206, 48207, 48208, 48209, 48210, 48211, 48212, 48213, 48214 were selected from the ORFs having the nucleotide sequence represented by SEQ ID NO: 3818.

[4308] The probes having the nucleotide sequence represented by SEQ ID NOS: 48215, 48216, 48217, 48218, 48219, 48220, 48221, 48222, 48223, 48224, 48225 were selected from the ORFs having the nucleotide sequence represented by SEQ ID NO: 3819.

[4309] The probes having the nucleotide sequence represented by SEQ ID NOS: 48226, 48227, 48228, 48229, 48230, 48231, 48232, 48233, 48234, 48235, 48236 were selected from the ORFs having the nucleotide sequence represented by SEQ ID NO: 3820.

[4310] The probes having the nucleotide sequence represented by SEQ ID NOS: 48237, 48238, 48239, 48240, 48241, 48242, 48243, 48244, 48245, 48246, 48247 were selected from the ORFs having the nucleotide sequence represented by SEQ ID NO: 3821.

[4311] The probes having the nucleotide sequence represented by SEQ ID NOS: 48248, 48249, 48250, 48251, 48252, 48253, 48254, 48255, 48256, 48257, 48258 were selected from the ORFs having the nucleotide sequence represented by SEQ ID NO: 3822.

[4312] The probes having the nucleotide sequence represented by SEQ ID NOS: 48259, 48260, 48261, 48262, 48263, 48264, 48265, 48266, 48267, 48268, 48269 were selected from the ORFs having the nucleotide sequence represented by SEQ ID NO: 3823.

[4313] The probes having the nucleotide sequence represented by SEQ ID NOS: 48270, 48271, 48272, 48273, 48274, 48275, 48276, 48277, 48278, 48279, 48280 were selected from the ORFs having the nucleotide sequence represented by SEQ ID NO: 3824.

[4314] The probes having the nucleotide sequence represented by SEQ ID NOS: 48281, 48282, 48283, 48284, 48285, 48286, 48287, 48288, 48289, 48290, 48291 were selected from the ORFs having the nucleotide sequence represented by SEQ ID NO: 3825.

[4315] The probes having the nucleotide sequence represented by SEQ ID NOS: 48292, 48293, 48294, 48295, 48296, 48297, 48298, 48299, 48300, 48301, 48302 were selected from the ORFs having the nucleotide sequence represented by SEQ ID NO: 3826.

[4316] The probes having the nucleotide sequence represented by SEQ ID NOS: 48303, 48304, 48305, 48306, 48307, 48308, 48309, 48310, 48311, 48312, 48313, 48314, 48315, 48.316, 48317, 48318, 48319, 48320, 48321, 48322, 48323, 48324 were selected from the ORFs having the nucleotide sequence represented by SEQ ID NO: 3827.

[4317] The probes having the nucleotide sequence represented by SEQ ID NOS: 48325, 48326, 48327, 48328, 48329, 48330, 48331, 48332, 48333, 48334, 48335 were selected from the ORFs having the nucleotide sequence represented by SEQ ID NO: 3828.

[4318] The probes having the nucleotide sequence represented by SEQ ID NOS: 48336, 48337, 48338, 48339, 48340, 48341, 48342, 48343, 48344, 48345, 48346 were selected from the ORFs having the nucleotide sequence represented by SEQ ID NO: 3829.

[4319] The probes having the nucleotide sequence represented by SEQ ID NOS: 48347, 48348, 48349, 48350, 48351, 48352, 48353, 48354, 48355, 48356, 48357 were selected from the ORFs having the nucleotide sequence represented by SEQ ID NO: 3830.

[4320] The probes having the nucleotide sequence represented by SEQ ID NOS: 48358, 48359, 48360, 48361, 48362, 48363, 48364, 48365, 48366, 48367, 48368 were selected from the ORFs having the nucleotide sequence represented by SEQ ID NO: 3831.

[4321] The probes having the nucleotide sequence represented by SEQ ID NOS: 48369, 48370, 48371, 48372, 48373, 48374, 48375, 48376, 48377, 48378, 48379 were selected from the ORFs having the nucleotide sequence represented by SEQ ID NO: 3832.

[4322] The probes having the nucleotide sequence represented by SEQ ID NOS: 48380, 48381, 48382, 48383, 48384, 48385, 48386, 48387, 48388, 48389, 48390 were selected from the ORFs having the nucleotide sequence represented by SEQ ID NO: 3833.

[4323] The probes having the nucleotide sequence represented by SEQ ID NOS: 48391, 48392, 48393, 48394, 48395, 48396, 48397, 48398, 48399, 48400, 48401 were selected from the ORFs having the nucleotide sequence represented by SEQ ID NO: 3834.

[4324] The probes having the nucleotide sequence represented by SEQ ID NOS: 48402, 48403, 48404, 48405, 48406, 48407, 48408, 48409, 48410, 48411, 48412 were selected from the ORFs having the nucleotide sequence represented by SEQ ID NO: 3835.

[4325] The probes having the nucleotide sequence represented by SEQ ID NOS: 48413, 48414, 48415, 48416, 48417, 48418, 48419, 48420, 48421, 48422, 48423 were selected from the ORFs having the nucleotide sequence represented by SEQ ID NO: 3836.

[4326] The probes having the nucleotide sequence represented by SEQ ID NOS: 48424, 48425, 48426, 48427, 48428, 48429, 48430, 48431, 48432, 48433, 48434 were selected from the ORFs having the nucleotide sequence represented by SEQ ID NO: 3837.

[4327] The probes having the nucleotide sequence represented by SEQ ID NOS: 48435, 48436, 48437, 48438, 48439, 48440, 48441, 48442, 48443, 48444, 48445, 48446, 48447, 48448, 48449, 48450, 48451, 48452, 48453, 48454, 48455, 48456 were selected from the ORFs having the nucleotide sequence represented by SEQ ID NO: 3838.

[4328] The probes having the nucleotide sequence represented by SEQ ID NOS: 48457, 48458, 48459, 48460, 48461, 48462, 48463, 48464, 48465, 48466, 48467 were selected from the ORFs having the nucleotide sequence represented by SEQ ID NO: 3839.

[4329] The probes having the nucleotide sequence represented by SEQ ID NOS: 48468, 48469, 48470, 48471, 48472, 48473, 48474, 48475, 48476, 48477, 48478 were selected from the ORFs having the nucleotide sequence represented by SEQ ID NO: 3840.

[4330] The probes having the nucleotide sequence represented by SEQ ID NOS: 48479, 48480, 48481, 48482, 48483, 48484, 48485, 48486, 48487, 48488, 48489 were selected from the ORFs having the nucleotide sequence represented by SEQ ID NO: 3841.

[4331] The probes having the nucleotide sequence represented by SEQ ID NOS: 48490, 48491, 48492, 48493, 48494, 48495, 48496, 48497, 48498, 48499, 48500 were selected from the ORFs having the nucleotide sequence represented by SEQ ID NO: 3842.

[4332] The probes having the nucleotide sequence represented by SEQ ID NOS: 48501, 48502, 48503, 48504, 48505, 48506, 48507, 48508, 48509, 48510, 48511 were selected from the ORFs having the nucleotide sequence represented by SEQ ID NO: 3843.

[4333] The probes having the nucleotide sequence represented by SEQ ID NOS: 48512, 48513, 48514, 48515, 48516, 48517, 48518, 48519, 48520, 48521, 48522 were selected from the ORFs having the nucleotide sequence represented by SEQ ID NO: 3844.

[4334] The probes having the nucleotide sequence represented by SEQ ID NOS: 48523, 48524, 48525, 48526, 48527, 48528, 48529, 48530, 48531, 48532, 48533 were selected from the ORFs having the nucleotide sequence represented by SEQ ID NO: 3845.

[4335] The probes having the nucleotide sequence represented by SEQ ID NOS: 48534, 48535, 48536, 48537, 48538, 48539, 48540, 48541, 48542, 48543, 48544, 48545, 48546, 48547, 48548, 48549, 48550, 48551, 48552, 48553, 48554, 48555 were selected from the ORFs having the nucleotide sequence represented by SEQ ID NO: 3846.

[4336] The probes having the nucleotide sequence represented by SEQ ID NOS: 48556, 48557, 48558, 48559, 48560, 48561, 48562, 48563, 48564, 48565, 48566 were selected from the ORFs having the nucleotide sequence represented by SEQ ID NO: 3847.

[4337] The probes having the nucleotide sequence represented by SEQ ID NOS: 48567, 48568, 48569, 48570, 48571, 48572, 48573, 48574, 48575, 48576, 48577 were selected from the ORFs having the nucleotide sequence represented by SEQ ID NO: 3848.

[4338] The probes having the nucleotide sequence represented by SEQ ID NOS: 48578, 48579, 48580, 48581, 48582, 48583, 48584, 48585, 48586, 48587, 48588 were selected from the ORFs having the nucleotide sequence represented by SEQ ID NO: 3849.

[4339] The probes having the nucleotide sequence represented by SEQ ID NOS: 48589, 48590., 48591, 48592, 48593, 48594, 48595, 48596, 48597, 48598, 48599 were selected from the ORFs having the nucleotide sequence represented by SEQ ID NO: 3850.

[4340] The probes having the nucleotide sequence represented by SEQ ID NOS: 48600, 48601, 48602, 48603, 48604, 48605, 48606, 48607, 48608, 48609, 48610 were selected from the ORFs having the nucleotide sequence represented by SEQ ID NO: 3851.

[4341] The probes having the nucleotide sequence represented by SEQ ID NOS: 48611, 48612, 48613, 48614, 48615, 48616, 48617, 48618, 48619, 48620, 48621 were selected from the ORFs having the nucleotide sequence represented by SEQ ID NO: 3852.

[4342] The probes having the nucleotide sequence represented by SEQ ID NOS: 48622, 48623, 48624, 48625, 48626, 48627, 48628, 48629, 48630, 48631, 48632 were selected from the ORFs having the nucleotide sequence represented by SEQ ID NO: 3853.

[4343] The probes having the nucleotide sequence represented by SEQ ID NOS: 48633, 48634, 48635, 48636, 48637, 48638, 48639, 48640, 48641, 48642, 48643 were selected from the ORFs having the nucleotide sequence represented by SEQ ID NO: 3854.

[4344] The probes having the nucleotide sequence represented by SEQ ID NOS: 48644, 48645, 48646, 48647, 48648, 48649, 48650, 48651, 48652, 48653, 48654 were selected from the ORFs having the nucleotide sequence represented by SEQ ID NO: 3855.

[4345] The probes having the nucleotide sequence represented by SEQ ID NOS: 48655, 48656, 48657, 48658, 48659, 48660, 48661, 48662, 48663, 48664, 48665 were selected from the ORFs having the nucleotide sequence represented by SEQ ID NO: 3856.

[4346] The probes having the nucleotide sequence represented by SEQ ID NOS: 48666, 48667, 48668, 48669, 48670, 48671, 48672, 48673, 48674, 48675, 48676 were selected from the ORFs having the nucleotide sequence represented by SEQ ID NO: 3857.

[4347] The probes having the nucleotide sequence represented by SEQ ID NOS: 48677, 48678, 48679, 48680, 48681, 48682, 48683, 48684, 48685, 48686, 48687 were selected from the ORFs having the nucleotide sequence represented by SEQ ID NO: 3858.

[4348] The probes having the nucleotide sequence represented by SEQ ID NOS: 48688, 48689, 48690, 48691, 48692, 48693, 48694, 48695, 48696, 48697, 48698 were selected from the ORFs having the nucleotide sequence represented by SEQ ID NO: 3859.

[4349] The probes having the nucleotide sequence represented by SEQ ID NOS: 48699, 48700, 48701, 48702, 48703, 48704, 48705, 48706, 48707, 48708, 48709 were selected from the ORFs having the nucleotide sequence represented by SEQ ID NO: 3860.

[4350] The probes having the nucleotide sequence represented by SEQ ID NOS: 48710, 48711, 48712, 48713, 48714, 48715, 48716, 48717, 48718, 48719, 48720 were selected from the ORFs having the nucleotide sequence represented by SEQ ID NO: 3861.

[4351] The probes having the nucleotide sequence represented by SEQ ID NOS: 48721, 48722, 48723, 48724, 48725, 48726, 48727, 48728, 48729, 48730, 48731 were selected from the ORFs having the nucleotide sequence represented by SEQ ID NO: 3862.

[4352] The probes having the nucleotide sequence represented by SEQ ID NOS: 48732, 48733, 48734, 48735, 48736, 48737, 48738, 48739, 48740, 48741, 48742 were selected from the ORFs having the nucleotide sequence represented by SEQ ID NO: 3863.

[4353] The probes having the nucleotide sequence represented by SEQ ID NOS: 48743, 48744, 48745, 48746, 48747, 48748, 48749, 48750, 48751, 48752, 48753 were selected from the ORFs having the nucleotide sequence represented by SEQ ID NO: 3864.

[4354] The probes having the nucleotide sequence represented by SEQ ID NOS: 48754, 48755, 48756, 48757, 48758, 48759, 48760, 48761, 48762, 48763, 48764 were selected from the ORFs having the nucleotide sequence represented by SEQ ID NO: 3865.

[4355] The probes having the nucleotide sequence represented by SEQ ID NOS: 48765, 48766, 48767, 48768, 48769, 48770, 48771, 48772, 48773, 48774, 48775 were selected from the ORFs having the nucleotide sequence represented by SEQ ID NO: 3866.

[4356] The probes having the nucleotide sequence represented by SEQ ID NOS: 48776, 48777, 48778, 48779, 48780, 48781, 48782, 48783, 48784, 48785, 48786 were selected from the ORFs having the nucleotide sequence represented by SEQ ID NO: 3867.

[4357] The probes having the nucleotide sequence represented by SEQ ID NOS: 48787, 48788, 48789, 48790, 48791, 48792, 48793, 48794, 48795, 48796, 48797 were selected from the ORFs having the nucleotide sequence represented by SEQ ID NO: 3868.

[4358] The probes having the nucleotide sequence represented by SEQ ID NOS: 48798, 48799, 48800, 48801, 48802, 48803, 48804, 48805, 48806, 48807, 48808 were selected from the ORFs having the nucleotide sequence represented by SEQ ID NO: 3869.

[4359] The probes having the nucleotide sequence represented by SEQ ID NOS: 48809, 48810, 48811, 48812, 48813, 48814, 48815, 48816, 48817, 48818, 48819 were selected from the ORFs having the nucleotide sequence represented by SEQ ID NO: 3870.

[4360] The probes having the nucleotide sequence represented by SEQ ID NOS: 48820, 48821, 48822, 48823, 48824, 48825, 48826, 48827, 48828, 48829, 48830 were selected from the ORFs having the nucleotide sequence represented by SEQ ID NO: 3871.

[4361] The probes having the nucleotide sequence represented by SEQ ID NOS: 48831, 48832, 48833, 48834, 48835, 48836, 48837, 48838, 48839, 48840, 48841, 48842, 48843, 48844, 48845, 48846, 48847, 48848, 48849, 48850, 48851, 48852 were selected from the ORFs having the nucleotide sequence represented by SEQ ID NO: 3872.

[4362] The probes having the nucleotide sequence represented by SEQ ID NOS: 48853, 48854, 48855, 48856, 48857, 48858, 48859, 48860, 48861, 48862, 48863, 48864, 48865, 48866, 48867, 48868, 48869, 48870, 48871, 48872, 48873, 48874 were selected from the ORFs having the nucleotide sequence represented by SEQ ID NO: 3873.

[4363] The probes having the nucleotide sequence represented by SEQ ID NOS: 48875, 48876, 48877, 48878, 48879, 48880, 48881, 48882, 48883, 48884, 48885 were selected from the ORFs having the nucleotide sequence represented by SEQ ID NO: 3874.

[4364] The probes having the nucleotide sequence represented by SEQ ID NOS: 48886, 48887, 48888, 48889, 48890, 48891, 48892, 48893, 48894, 48895, 48896 were selected from the ORFs having the nucleotide sequence represented by SEQ ID NO: 3875.

[4365] The probes having the nucleotide sequence represented by SEQ ID NOS: 48897, 48898, 48899, 48900, 48901, 48902, 48903, 48904, 48905, 48906, 48907 were selected from the ORFs having the nucleotide sequence represented by SEQ ID NO: 3876.

[4366] The probes having the nucleotide sequence represented by SEQ ID NOS: 48908, 48909, 48910, 48911, 48912, 48913, 48914, 48915, 48916, 48917, 48918 were selected from the ORFs having the nucleotide sequence represented by SEQ ID NO: 3877.

[4367] The probes having the nucleotide sequence represented by SEQ ID NOS: 48919, 48920, 48921, 48922, 48923, 48924, 48925, 48926, 48927, 48928, 48929 were selected from the ORFs having the nucleotide sequence represented by SEQ ID NO: 3878.

[4368] The probes having the nucleotide sequence represented by SEQ ID NOS: 48930, 48931, 48932, 48933, 48934, 48935, 48936, 48937, 48938, 48939, 48940 were selected from the ORFs having the nucleotide sequence represented by SEQ ID NO: 3879.

[4369] The probes having the nucleotide sequence represented by SEQ ID NOS: 48941, 48942, 48943, 48944, 48945, 48946, 48947, 48948, 48949, 48950, 48951 were selected from the ORFs having the nucleotide sequence represented by SEQ ID NO: 3880.

[4370] The probes having the nucleotide sequence represented by SEQ ID NOS: 48952, 48953, 48954, 48955, 48956, 48957, 48958, 48959, 48960, 48961, 48962 were selected from the ORFs having the nucleotide sequence represented by SEQ ID NO: 3881.

[4371] The probes having the nucleotide sequence represented by SEQ ID NOS: 48963, 48964, 48965, 48966, 48967, 48968, 48969, 48970, 48971, 48972, 48973 were selected from the ORFs having the nucleotide sequence represented by SEQ ID NO: 3882.

[4372] The probes having the nucleotide sequence represented by SEQ ID NOS: 48974, 48975, 48976, 48977, 48978, 48979, 48980, 48981, 48982, 48983, 48984 were selected from the ORFs having the nucleotide sequence represented by SEQ ID NO: 3883.

[4373] The probes having the nucleotide sequence represented by SEQ ID NOS: 48985, 48986, 48987, 48988, 48989, 48990, 48991, 48992, 48993, 48994, 48995 were selected from the ORFs having the nucleotide sequence represented by SEQ ID NO: 3884.

[4374] The probes having the nucleotide sequence represented by SEQ ID NOS: 48996, 48997, 48998, 48999, 49000, 49001, 49002, 49003, 49004, 49005, 49006 were selected from the ORFs having the nucleotide sequence represented by SEQ ID NO: 3885.

[4375] The probes having the nucleotide sequence represented by SEQ ID NOS: 49007, 49008, 49009, 49010, 49011, 49012, 49013, 49014, 49015, 49016, 49017 were selected from the ORFs having the nucleotide sequence represented by SEQ ID NO: 3886.

[4376] The probes having the nucleotide sequence represented by SEQ ID NOS: 49018, 49019, 49020, 49021, 49022, 49023, 49024, 49025, 49026, 49027, 49028 were selected from the ORFs having the nucleotide sequence represented by SEQ ID NO: 3887.

[4377] The probes having the nucleotide sequence represented by SEQ ID NOS: 49029, 49030, 49031, 49032, 49033, 49034, 49035, 49036, 49037, 49038, 49039 were selected from the ORFs having the nucleotide sequence represented by SEQ ID NO: 3888.

[4378] The probes having the nucleotide sequence represented by SEQ ID NOS: 49040, 49041, 49042, 49043, 49044, 49045, 49046, 49047, 49048, 49049, 49050 were selected from the ORFs having the nucleotide sequence represented by SEQ ID NO: 3889.

[4379] The probes having the nucleotide sequence represented by SEQ ID NOS: 49051, 49052, 49053, 49054, 49055, 49056, 49057, 49058, 49059, 49060 were selected from the ORFs having the nucleotide sequence represented by SEQ ID NO: 3890.

[4380] The probes having the nucleotide sequence represented by SEQ ID NOS: 49061, 49062, 49063, 49064, 49065, 49066, 49067, 49068, 49069, 49070, 49071 were selected from the ORFs having the nucleotide sequence represented by SEQ ID NO: 3891.

[4381] The probes having the nucleotide sequence represented by SEQ ID NOS: 49072, 49073, 49074, 49075, 49076, 49077, 49078, 49079, 49080, 49081, 49082 were selected from the ORFs having the nucleotide sequence represented by SEQ ID NO: 3892.

[4382] The probes having the nucleotide sequence represented by SEQ ID NOS: 49083, 49084, 49085, 49086, 49087, 49088, 49089, 49090, 49091, 49092, 49093, 49094, 49095, 49096, 49097, 49098, 49099, 49100, 49101, 49102, 49103, 49104 were selected from the ORFs having the nucleotide sequence represented by SEQ ID NO: 3893.

[4383] The probes having the nucleotide sequence represented by SEQ ID NOS: 49105, 49106, 49107, 49108, 49109, 49110, 49111, 49112, 49113, 49114, 49115 were selected from the ORFs having the nucleotide sequence represented by SEQ ID NO: 3894.

[4384] The probes having the nucleotide sequence represented by SEQ ID NOS: 49116, 49117, 49118, 49119, 49120, 49121, 49122, 49123, 49124, 49125, 49126 were selected from the ORFs having the nucleotide sequence represented by SEQ ID NO: 3895.

[4385] The probes having the nucleotide sequence represented by SEQ ID NOS: 49127, 49128, 49129, 49130, 49131, 49132, 49133, 49134, 49135, 49136, 49137 were selected from the ORFs having the nucleotide sequence represented by SEQ ID NO: 3896.

[4386] The probes having the nucleotide sequence represented by SEQ ID NOS: 49138, 49139, 49140, 49141, 49142, 49143, 49144, 49145, 49146, 49147, 49148 were selected from the ORFs having the nucleotide sequence represented by SEQ ID NO: 3897.

[4387] The probes having the nucleotide sequence represented by SEQ ID NOS: 49149, 49150, 49151, 49152, 49153, 49154, 49155, 49156, 49157, 49158, 49159 were selected from the ORFs having the nucleotide sequence represented by SEQ ID NO: 3898.

[4388] The probes having the nucleotide sequence represented by SEQ ID NOS: 49160, 49161, 49162, 49163, 49164, 49165, 49166, 49167, 49168, 49169, 49170 were selected from the ORFs having the nucleotide sequence represented by SEQ ID NO: 3899.

[4389] The probes having the nucleotide sequence represented by SEQ ID NOS: 49171, 49172, 49173, 49174, 49175, 49176, 49177, 49178, 49179, 49180, 49181 were selected from the ORFs having the nucleotide sequence represented by SEQ ID NO: 3900.

[4390] The probes having the nucleotide sequence represented by SEQ ID NOS: 49182, 49183, 49184, 49185, 49186, 49187, 49188, 49189, 49190, 49191, 49192 were selected from the ORFs having the nucleotide sequence represented by SEQ ID NO: 3901.

[4391] The probes having the nucleotide sequence represented by SEQ ID NOS: 49193, 49194, 49195, 49196, 49197, 49198, 49199, 49200, 49201, 49202, 49203 were selected from the ORFs having the nucleotide sequence represented by SEQ ID NO: 3902.

[4392] The probes having the nucleotide sequence represented by SEQ ID NOS: 49204, 49205, 49206, 49207, 49208, 49209, 49210, 49211, 49212, 49213, 49214 were selected from the ORFs having the nucleotide sequence represented by SEQ ID NO: 3903.

[4393] The probes having the nucleotide sequence represented by SEQ ID NOS: 49215, 49216, 49217, 49218, 49219, 49220, 49221, 49222, 49223, 49224, 49225 were selected from the ORFs having the nucleotide sequence represented by SEQ ID NO: 3904.

[4394] The probes having the nucleotide sequence represented by SEQ ID NOS: 49226, 49227, 49228, 49229, 49230, 49231, 49232, 49233, 49234, 49235, 49236, 49237, 49238, 49239, 49240, 49241, 49242, 49243, 49244, 49245, 49246, 49247 were selected from the ORFs having the nucleotide sequence represented by SEQ ID NO: 3905.

[4395] The probes having the nucleotide sequence represented by SEQ ID NOS: 49248, 49249, 49250, 49251, 49252, 49253, 49254, 49255, 49256, 49257, 49258 were selected from the ORFs having the nucleotide sequence represented by SEQ ID NO: 3906.

[4396] The probes having the nucleotide sequence represented by SEQ ID NOS: 49259, 49260, 49261, 49262, 49263, 49264, 49265, 49266, 49267, 49268, 49269 were selected from the ORFs having the nucleotide sequence represented by SEQ ID NO: 3907.

[4397] The probes having the nucleotide sequence represented by SEQ ID NOS: 49270, 49271, 49272, 49273, 49274, 49275, 49276, 49277, 49278, 49279, 49280 were selected from the ORFs having the nucleotide sequence represented by SEQ ID NO: 3908.

[4398] The probes having the nucleotide sequence represented by SEQ ID NOS: 49281, 49282, 49283, 49284, 49285, 49286, 49287, 49288, 49289, 49290, 49291 were selected from the ORFs having the nucleotide sequence represented by SEQ ID NO: 3909.

[4399] The probes having the nucleotide sequence represented by SEQ ID NOS: 49292, 49293, 49294, 49295, 49296, 49297, 49298, 49299, 49300, 49301, 49302 were selected from the ORFs having the nucleotide sequence represented by SEQ ID NO: 3910.

[4400] The probes having the nucleotide sequence represented by SEQ ID NOS: 49303, 49304, 49305, 49306, 49307, 49308, 49309, 49310, 49311, 49312, 49313 were selected from the ORFs having the nucleotide sequence represented by SEQ ID NO: 3911.

[4401] The probes having the nucleotide sequence represented by SEQ ID NOS: 49314, 49315, 49316, 49317, 49318, 49319, 49320, 49321, 49322, 49323, 49324 were selected from the ORFs having the nucleotide sequence represented by SEQ ID NO: 3912.

[4402] The probes having the nucleotide sequence represented by SEQ ID NOS: 49325, 49326, 49327, 49328, 49329, 49330, 49331, 49332, 49333, 49334, 49335 were selected from the ORFs having the nucleotide sequence represented by SEQ ID NO: 3913.

[4403] The probes having the nucleotide sequence represented by SEQ ID NOS: 49336, 49337, 49338, 49339, 49340, 49341, 49342, 49343, 49344, 49345, 49346 were selected from the ORFs having the nucleotide sequence represented by SEQ ID NO: 3914.

[4404] The probes having the nucleotide sequence represented by SEQ ID NOS: 49347, 49348, 49349, 49350, 49351, 49352, 49353, 49354, 49355, 49356, 49357 were selected from the ORFs having the nucleotide sequence represented by SEQ ID NO: 3915.

[4405] The probes having the nucleotide sequence represented by SEQ ID NOS: 49358, 49359, 49360, 49361, 49362, 49363, 49364, 49365, 49366, 49367, 49368 were selected from the ORFs having the nucleotide sequence represented by SEQ ID NO: 3916.

[4406] The probes having the nucleotide sequence represented by SEQ ID NOS: 49369, 49370, 49371, 49372, 49373, 49374, 49375, 49376, 49377, 49378, 49379 were selected from the ORFs having the nucleotide sequence represented by SEQ ID NO: 3917.

[4407] The probes having the nucleotide sequence represented by SEQ ID NOS: 49380, 49381, 49382, 49383, 49384, 49385, 49386, 49387, 49388, 49389, 49390 were selected from the ORFs having the nucleotide sequence represented by SEQ ID NO: 3918.

[4408] The probes having the nucleotide sequence represented by SEQ ID NOS: 49391, 49392, 49393, 49394, 49395, 49396, 49397, 49398, 49399, 49400, 49401 were selected from the ORFs having the nucleotide sequence represented by SEQ ID NO: 3919.

[4409] The probes having the nucleotide sequence represented by SEQ ID NOS: 49402, 49403, 49404, 49405, 49406, 49407, 49408, 49409, 49410, 49411, 49412 were selected from the ORFs having the nucleotide sequence represented by SEQ ID NO: 3920.

[4410] The probes having the nucleotide sequence represented by SEQ ID NOS: 49413, 49414, 49415, 49416, 49417, 49418, 49419, 49420, 49421, 49422, 49423 were selected from the ORFs having the nucleotide sequence represented by SEQ ID NO: 3921.

[4411] The probes having the nucleotide sequence represented by SEQ ID NOS: 49424, 49425, 49426, 49427, 49428, 49429, 49430, 49431, 49432, 49433, 49434 were selected from the ORFs having the nucleotide sequence represented by SEQ ID NO: 3922.

[4412] The probes having the nucleotide sequence represented by SEQ ID NOS: 49435, 49436, 49437, 49438, 49439, 49440, 49441, 49442, 49443, 49444, 49445 were selected from the ORFs having the nucleotide sequence represented by SEQ ID NO: 3923.

[4413] The probes having the nucleotide sequence represented by SEQ ID NOS: 49446, 49447, 49448, 49449, 49450, 49451, 49452, 49453, 49454, 49455, 49456 were selected from the ORFs having the nucleotide sequence represented by SEQ ID NO: 3924.

[4414] The probes having the nucleotide sequence represented by SEQ ID NOS: 49457, 49458, 49459, 49460, 49461, 49462, 49463, 49464, 49465, 49466, 49467 were selected from the ORFs having the nucleotide sequence represented by SEQ ID NO: 3925.

[4415] The probes having the nucleotide sequence represented by SEQ ID NOS: 49468, 49469, 49470, 49471, 49472, 49473, 49474, 49475, 49476, 49477, 49478 were selected from the ORFs having the nucleotide sequence represented by SEQ ID NO: 3926.

[4416] The probes having the nucleotide sequence represented by SEQ ID NOS: 49479, 49480, 49481, 49482, 49483, 49484, 49485, 49486, 49487, 49488, 49489 were selected from the ORFs having the nucleotide sequence represented by SEQ ID NO: 3927.

[4417] The probes having the nucleotide sequence represented by SEQ ID NOS: 49490, 49491, 49492, 49493, 49494, 49495, 49496, 49497, 49498, 49499, 49500 were selected from the ORFs having the nucleotide sequence represented by SEQ ID NO: 3928.

[4418] The probes having the nucleotide sequence represented by SEQ ID NOS: 49501, 49502, 49503, 49504, 49505, 49506, 49507, 49508, 49509, 49510, 49511 were selected from the ORFs having the nucleotide sequence represented by SEQ ID NO: 3929.

[4419] The probes having the nucleotide sequence represented by SEQ ID NOS: 49512, 49513, 49514, 49515, 49516, 49517, 49518, 49519, 49520, 49521, 49522 were selected from the ORFs having the nucleotide sequence represented by SEQ ID NO: 3930.

[4420] The probes having the nucleotide sequence represented by SEQ ID NOS: 49523, 49524, 49525, 49526, 49527, 49528, 49529, 49530, 49531, 49532, 49533 were selected from the ORFs having the nucleotide sequence represented by SEQ ID NO: 3931.

[4421] The probes having the nucleotide sequence represented by SEQ ID NOS: 49534, 49535, 49536, 49537, 49538, 49539, 49540, 49541, 49542, 49543, 49544 were selected from the ORFs having the nucleotide sequence represented by SEQ ID NO: 3932.

[4422] The probes having the nucleotide sequence represented by SEQ ID NOS: 49545, 49546, 49547, 49548, 49549, 49550, 49551, 49552, 49553, 49554, 49555 were selected from the ORFs having the nucleotide sequence represented by SEQ ID NO: 3933.

[4423] The probes having the nucleotide sequence represented by SEQ ID NOS: 49556, 49557, 49558, 49559, 49560, 49561, 49562, 49563, 49564, 49565, 49566 were selected from the ORFs having the nucleotide sequence represented by SEQ ID NO: 3934.

[4424] The probes having the nucleotide sequence represented by SEQ ID NOS: 49567, 49568, 49569, 49570, 49571, 49572, 49573, 49574, 49575, 49576, 49577 were selected from the ORFs having the nucleotide sequence represented by SEQ ID NO: 3935.

[4425] The probes having the nucleotide sequence represented by SEQ ID NOS: 49578, 49579, 49580, 49581, 49582, 49583, 49584, 49585, 49586, 49587, 49588 were selected from the ORFs having the nucleotide sequence represented by SEQ ID NO: 3936.

[4426] The probes having the nucleotide sequence represented by SEQ ID NOS: 49589, 49590, 49591, 49592, 49593, 49594, 49595, 49596, 49597, 49598, 49599 were selected from the ORFs having the nucleotide sequence represented by SEQ ID NO: 3937.

[4427] The probes having the nucleotide sequence represented by SEQ ID NOS: 49600, 49601, 49602, 49603, 49604, 49605, 49606, 49607, 49608, 49609, 49610 were selected from the ORFs having the nucleotide sequence represented by SEQ ID NO: 3938.

[4428] The probes having the nucleotide sequence represented by SEQ ID NOS: 49611, 49612, 49613, 49614, 49615, 49616, 49617, 49618, 49619, 49620, 49621 were selected from the ORFs having the nucleotide sequence represented by SEQ ID NO: 3939.

[4429] The probes having the nucleotide sequence represented by SEQ ID NOS: 49622, 49623, 49624, 49625, 49626, 49627, 49628, 49629, 49630, 49631, 49632 were selected from the ORFs having the nucleotide sequence represented by SEQ ID NO: 3940.

[4430] The probes having the nucleotide sequence represented by SEQ ID NOS: 49633, 49634, 49635, 49636, 49637, 49638, 49639, 49640, 49641, 49642, 49643 were selected from the ORFs having the nucleotide sequence represented by SEQ ID NO: 3941.

[4431] The probes having the nucleotide sequence represented by SEQ ID NOS: 49644, 49645, 49646, 49647, 49648, 49649, 49650, 49651, 49652, 49653, 49654 were selected from the ORFs having the nucleotide sequence represented by SEQ ID NO: 3942.

[4432] The probes having the nucleotide sequence represented by SEQ ID NOS: 49655, 49656, 49657, 49658, 49659, 49660, 49661, 49662, 49663, 49664, 49665 were selected from the ORFs having the nucleotide sequence represented by SEQ ID NO: 3943.

[4433] The probes having the nucleotide sequence represented by SEQ ID NOS: 49666, 49667, 49668, 49669, 49670, 49671, 49672, 49673, 49674, 49675, 49676 were selected from the ORFs having the nucleotide sequence represented by SEQ ID NO: 3944.

[4434] The probes having the nucleotide sequence represented by SEQ ID NOS: 49677, 49678, 49679, 49680, 49681, 49682, 49683, 49684, 49685, 49686, 49687 were selected from the ORFs having the nucleotide sequence represented by SEQ ID NO: 3945.

[4435] The probes having the nucleotide sequence represented by SEQ ID NOS: 49688, 49689, 49690, 49691, 49692, 49693, 49694, 49695, 49696, 49697, 49698 were selected from the ORFs having the nucleotide sequence represented by SEQ ID NO: 3946.

[4436] The probes having the nucleotide sequence represented by SEQ ID NOS: 49699, 49700, 49701, 49702, 49703, 49704, 49705, 49706, 49707, 49708, 49709 were selected from the ORFs having the nucleotide sequence represented by SEQ ID NO: 3947.

[4437] The probes having the nucleotide sequence represented by SEQ ID NOS: 49710, 49711, 49712, 49713, 49714, 49715, 49716, 49717, 49718, 49719, 49720 were selected from the ORFs having the nucleotide sequence represented by SEQ ID NO: 3948.

[4438] The probes having the nucleotide sequence represented by SEQ ID NOS: 49721, 49722, 49723, 49724, 49725, 49726, 49727, 49728, 49729, 49730, 49731 were selected from the ORFs having the nucleotide sequence represented by SEQ ID NO: 3949.

[4439] The probes having the nucleotide sequence represented by SEQ ID NOS: 49732, 49733, 49734, 49735, 49736, 49737, 49738, 49739, 49740, 49741, 49742 were selected from the ORFs having the nucleotide sequence represented by SEQ ID NO: 3950.

[4440] The probes having the nucleotide sequence represented by SEQ ID NOS: 49743, 49744, 49745, 49746, 49747, 49748, 49749, 49750, 49751, 49752, 49753 were selected from the ORFs having the nucleotide sequence represented by SEQ ID NO: 3951.

[4441] The probes having the nucleotide sequence represented by SEQ ID NOS: 49754, 49755, 49756, 49757, 49758, 49759, 49760, 49761, 49762, 49763, 49764 were selected from the ORFs having the nucleotide sequence represented by SEQ ID NO: 3952.

[4442] The probes having the nucleotide sequence represented by SEQ ID NOS: 49765, 49766, 49767, 49768, 49769, 49770, 49771, 49772, 49773, 49774, 49775 were selected from the ORFs having the nucleotide sequence represented by SEQ ID NO: 3953.

[4443] The probes having the nucleotide sequence represented by SEQ ID NOS: 49776, 49777, 49778, 49779, 49780, 49781, 49782, 49783, 49784, 49785, 49786 were selected from the ORFs having the nucleotide sequence represented by SEQ ID NO: 3954.

[4444] The probes having the nucleotide sequence represented by SEQ ID NOS: 49787, 49788, 49789, 49790, 49791, 49792, 49793, 49794, 49795, 49796, 49797 were selected from the ORFs having the nucleotide sequence represented by SEQ ID NO: 3955.

[4445] The probes having the nucleotide sequence represented by SEQ ID NOS: 49798, 49799, 49800, 49801, 49802, 49803, 49804, 49805, 49806, 49807, 49808 were selected from the ORFs having the nucleotide sequence represented by SEQ ID NO: 3956.

[4446] The probes having the nucleotide sequence represented by SEQ ID NOS: 49809, 49810, 49811, 49812, 49813, 49814, 49815, 49816, 49817, 49818, 49819 were selected from the ORFs having the nucleotide sequence represented by SEQ ID NO: 3957.

[4447] The probes having the nucleotide sequence represented by SEQ ID NOS: 49820, 49821, 49822, 49823, 49824, 49825, 49826, 49827, 49828, 49829, 49830 were selected from the ORFs having the nucleotide sequence represented by SEQ ID NO: 3958.

[4448] The probes having the nucleotide sequence represented by SEQ ID NOS: 49831, 49832, 49833, 49834, 49835, 49836, 49837, 49838, 49839, 49840, 49841 were selected from the ORFs having the nucleotide sequence represented by SEQ ID NO: 3959.

[4449] The probes having the nucleotide sequence represented by SEQ ID NOS: 49842, 49843, 49844, 49845, 49846, 49847, 49848, 49849, 49850, 49851, 49852 were selected from the ORFs having the nucleotide sequence represented by SEQ ID NO: 3960.

[4450] The probes having the nucleotide sequence represented by SEQ ID NOS: 49853, 49854, 49855, 49856, 49857, 49858, 49859, 49860, 49861, 49862, 49863, 49864, 49865, 49866, 49867, 49868, 49869, 49870, 49871, 49872, 49873, 49874 were selected from the ORFs having the nucleotide sequence represented by SEQ ID NO: 3961.

[4451] The probes having the nucleotide sequence represented by SEQ ID NOS: 49875, 49876, 49877, 49878, 49879, 49880, 49881, 49882, 49883, 49884, 49885 were selected from the ORFs having the nucleotide sequence represented by SEQ ID NO: 3962.

[4452] The probes having the nucleotide sequence represented by SEQ ID NOS: 49886, 49887, 49888, 49889, 49890, 49891, 49892, 49893, 49894, 49895, 49896 were selected from the ORFs having the nucleotide sequence represented by SEQ ID NO: 3963.

[4453] The probes having the nucleotide sequence represented by SEQ ID NOS: 49897, 49898, 49899, 49900, 49901, 49902, 49903, 49904, 49905, 49906, 49907 were selected from the ORFs having the nucleotide sequence represented by SEQ ID NO: 3964.

[4454] The probes having the nucleotide sequence represented by SEQ ID NOS: 49908, 49909, 49910, 49911, 49912, 49913, 49914, 49915, 49916, 49917, 49918 were selected from the ORFs having the nucleotide sequence represented by SEQ ID NO: 3965.

[4455] The probes having the nucleotide sequence represented by SEQ ID NOS: 49919, 49920, 49921, 49922, 49923, 49924, 49925, 49926, 49927, 49928, 49929 were selected from the ORFs having the nucleotide sequence represented by SEQ ID NO: 3966.

[4456] The probes having the nucleotide sequence represented by SEQ ID NOS: 49930, 49931, 49932, 49933, 49934, 49935, 49936, 49937, 49938, 49939, 49940 were selected from the ORFs having the nucleotide sequence represented by SEQ ID NO: 3967.

[4457] The probes having the nucleotide sequence represented by SEQ ID NOS: 49941, 49942, 49943, 49944, 49945, 49946, 49947, 49948, 49949, 49950, 49951 were selected from the ORFs having the nucleotide sequence represented by SEQ ID NO: 3968.

[4458] The probes having the nucleotide sequence represented by SEQ ID NOS: 49952, 49953, 49954, 49955, 49956, 49957, 49958, 49959, 49960, 49961, 49962 were selected from the ORFs having the nucleotide sequence represented by SEQ ID NO: 3969.

[4459] The probes having the nucleotide sequence represented by SEQ ID NOS: 49963, 49964, 49965, 49966, 49967, 49968, 49969, 49970, 49971, 49972, 49973 were selected from the ORFs having the nucleotide sequence represented by SEQ ID NO: 3970.

[4460] The probes having the nucleotide sequence represented by SEQ ID NOS: 49974, 49975, 49976, 49977, 49978, 49979, 49980, 49981, 49982, 49983, 49984 were selected from the ORFs having the nucleotide sequence represented by SEQ ID NO: 3971.

[4461] The probes having the nucleotide sequence represented by SEQ ID NOS: 49985, 49986, 49987, 49988, 49989, 49990, 49991, 49992, 49993, 49994, 49995 were selected from the ORFs having the nucleotide sequence represented by SEQ ID NO: 3972.

[4462] The probes having the nucleotide sequence represented by SEQ ID NOS: 49996, 49997, 49998, 49999, 50000, 50001, 50002, 50003, 50004, 50005, 50006 were selected from the ORFs having the nucleotide sequence represented by SEQ ID NO: 3973.

[4463] The probes having the nucleotide sequence represented by SEQ ID NOS: 50007, 50008, 50009, 50010, 50011, 50012, 50013, 50014, 50015, 50016, 50017 were selected from the ORFs having the nucleotide sequence represented by SEQ ID NO: 3974.

[4464] The probes having the nucleotide sequence represented by SEQ ID NOS: 50018, 50019, 50020, 50021, 50022, 50023, 50024, 50025, 50026, 50027, 50028 were selected from the ORFs having the nucleotide sequence represented by SEQ ID NO: 3975.

[4465] The probes having the nucleotide sequence represented by SEQ ID NOS: 50029, 50030, 50031, 50032, 50033, 50034, 50035, 50036, 50037, 50038, 50039 were selected from the ORFs having the nucleotide sequence represented by SEQ ID NO: 3976.

[4466] The probes having the nucleotide sequence represented by SEQ ID NOS: 50040, 50041, 50042, 50043, 50044, 50045, 50046, 50047, 50048, 50049, 50050 were selected from the ORFs having the nucleotide sequence represented by SEQ ID NO: 3977.

[4467] The probes having the nucleotide sequence represented by SEQ ID NOS: 50051, 50052, 50053, 50054, 50055, 50056, 50057, 50058, 50059, 50060, 50061 were selected from the ORFs having the nucleotide sequence represented by SEQ ID NO: 3978.

[4468] The probes having the nucleotide sequence represented by SEQ ID NOS: 50062, 50063, 50064, 50065, 50066, 50067, 50068, 50069, 50070, 50071, 50072 were selected from the ORFs having the nucleotide sequence represented by SEQ ID NO: 3979.

[4469] The probes having the nucleotide sequence represented by SEQ ID NOS: 50073, 50074, 50075, 50076, 50077, 50078, 50079, 50080, 50081, 50082, 50083 were selected from the ORFs having the nucleotide sequence represented by SEQ ID NO: 3980.

[4470] The probes having the nucleotide sequence represented by SEQ ID NOS: 50084, 50085, 50086, 50087, 50088, 50089, 50090, 50091, 50092, 50093, 50094 were selected from the ORFs having the nucleotide sequence represented by SEQ ID NO: 3981.

[4471] The probes having the nucleotide sequence represented by SEQ ID NOS: 50095, 50096, 50097, 50098, 50099, 50100, 50101, 50102, 50103, 50104, 50105 were selected from the ORFs having the nucleotide sequence represented by SEQ ID NO: 3982.

[4472] The probes having the nucleotide sequence represented by SEQ ID NOS: 50106, 50107, 50108, 50109, 50110, 50111, 50112, 50113, 50114, 50115, 50116 were selected from the ORFs having the nucleotide sequence represented by SEQ ID NO: 3983.

[4473] The probes having the nucleotide sequence represented by SEQ ID NOS: 50117, 50118, 50119, 50120, 50121, 50122, 50123, 50124, 50125, 50126, 50127 were selected from the ORFs having the nucleotide sequence represented by SEQ ID NO: 3984.

[4474] The probes having the nucleotide sequence represented by SEQ ID NOS: 50128, 50129, 50130, 50131, 50132, 50133, 50134, 50135, 50136, 50137, 50138 were selected from the ORFs having the nucleotide sequence represented by SEQ ID NO: 3985.

[4475] The probes having the nucleotide sequence represented by SEQ ID NOS: 50139, 50140, 50141, 50142, 50143, 50144, 50145, 50146, 50147, 50148, 50149 were selected from the ORFs having the nucleotide sequence represented by SEQ ID NO: 3986.

[4476] The probes having the nucleotide sequence represented by SEQ ID NOS: 50150, 50151, 50152, 50153, 50154, 50155, 50156, 50157, 50158, 50159, 50160 were selected from the ORFs having the nucleotide sequence represented by SEQ ID NO: 3987.

[4477] The probes having the nucleotide sequence represented by SEQ ID NOS: 50161, 50162, 50163, 50164, 50165, 50166, 50167, 50168, 50169, 50170, 50171 were selected from the ORFs having the nucleotide sequence represented by SEQ ID NO: 3988.

[4478] The probes having the nucleotide sequence represented by SEQ ID NOS: 50172, 50173, 50174, 50175, 50176, 50177, 50178, 50179, 50180, 50181, 50182 were selected from the ORFs having the nucleotide sequence represented by SEQ ID NO: 3989.

[4479] The probes having the nucleotide sequence represented by SEQ ID NOS: 50183, 50184, 50185, 50186, 50187, 50188, 50189, 50190, 50191, 50192, 50193 were selected from the ORFs having the nucleotide sequence represented by SEQ ID NO: 3990.

[4480] The probes having the nucleotide sequence represented by SEQ ID NOS: 50194, 50195, 50196, 50197, 50198, 50199, 50200, 50201, 50202, 50203, 50204 were selected from the ORFs having the nucleotide sequence represented by SEQ ID NO: 3991.

[4481] The probes having the nucleotide sequence represented by SEQ ID NOS: 50205, 50206, 50207, 50208, 50209, 50210, 50211, 50212, 50213, 50214, 50215 were selected from the ORFs having the nucleotide sequence represented by SEQ ID NO: 3992.

[4482] The probes having the nucleotide sequence represented by SEQ ID NOS: 50216, 50217, 50218, 50219, 50220, 50221, 50222, 50223, 50224, 50225, 50226 were selected from the ORFs having the nucleotide sequence represented by SEQ ID NO: 3993.

[4483] The probes having the nucleotide sequence represented by SEQ ID NOS: 50227, 50228, 50229, 50230, 50231, 50232, 50233, 50234, 50235, 50236, 50237 were selected from the ORFs having the nucleotide sequence represented by SEQ ID NO: 3994.

[4484] The probes having the nucleotide sequence represented by SEQ ID NOS: 50238, 50239, 50240, 50241, 50242, 50243, 50244, 50245, 50246, 50247, 50248 were selected from the ORFs having the nucleotide sequence represented by SEQ ID NO: 3995.

[4485] The probes having the nucleotide sequence represented by SEQ ID NOS: 50249, 50250, 50251, 50252, 50253, 50254, 50255, 50256, 50257, 50258, 50259 were selected from the ORFs having the nucleotide sequence represented by SEQ ID NO: 3996.

[4486] The probes having the nucleotide sequence represented by SEQ ID NOS: 50260, 50261, 50262, 50263, 50264, 50265, 50266, 50267, 50268, 50269, 50270 were selected from the ORFs having the nucleotide sequence represented by SEQ ID NO: 3997.

[4487] The probes having the nucleotide sequence represented by SEQ ID NOS: 50271, 50272, 50273, 50274, 50275, 50276, 50277, 50278, 50279, 50280., 50281 were selected from the ORFs having the nucleotide sequence represented by SEQ ID NO: 3998.

[4488] The probes having the nucleotide sequence represented by SEQ ID NOS: 50282, 50283, 50284, 50285, 50286, 50287, 50288, 50289, 50290, 50291, 50292 were selected from the ORFs having the nucleotide sequence represented by SEQ ID NO: 3999.

[4489] The probes having the nucleotide sequence represented by SEQ ID NOS: 50293, 50294, 50295, 50296, 50297, 50298, 50299, 50300, 50301, 50302, 50303 were selected from the ORFs having the nucleotide sequence represented by SEQ ID NO: 4000.

[4490] The probes having the nucleotide sequence represented by SEQ ID NOS: 50304, 50305, 50306, 50307, 50308, 50309, 50310, 50311, 50312, 50313, 50314 were selected from the ORFs having the nucleotide sequence represented by SEQ ID NO: 4001.

[4491] The probes having the nucleotide sequence represented by SEQ ID NOS: 50315, 50316, 50317, 50318, 50319, 50320, 50321, 50322, 50323, 50324, 50325 were selected from the ORFs having the nucleotide sequence represented by SEQ ID NO: 4002.

[4492] The probes having the nucleotide sequence represented by SEQ ID NOS: 50326, 50327, 50328, 50329, 50330, 50331, 50332, 50333, 50334, 50335, 50336 were selected from the ORFs having the nucleotide sequence represented by SEQ ID NO: 4003.

[4493] The probes having the nucleotide sequence represented by SEQ ID NOS: 50337, 50338, 50339, 50340, 50341, 50342, 50343, 50344, 50345, 50346, 50347 were selected from the ORFs having the nucleotide sequence represented by SEQ ID NO: 4004.

[4494] The probes having the nucleotide sequence represented by SEQ ID NOS: 50348, 50349, 50350, 50351, 50352, 50353, 50354, 50355, 50356, 50357, 50358 were selected from the ORFs having the nucleotide sequence represented by SEQ ID NO: 4005.

[4495] The probes having the nucleotide sequence represented by SEQ ID NOS: 50359, 50360, 50361, 50362, 50363, 50364, 50365, 50366, 50367, 50368, 50369 were selected from the ORFs having the nucleotide sequence represented by SEQ ID NO: 4006.

[4496] The probes having the nucleotide sequence represented by SEQ ID NOS: 50370, 50371, 50372, 50373, 50374, 50375, 50376, 50377, 50378, 50379, 50380 were selected from the ORFs having the nucleotide sequence represented by SEQ ID NO: 4007.

[4497] The probes having the nucleotide sequence represented by SEQ ID NOS: 50381, 50382, 50383, 50384, 50385, 50386, 50387, 50388, 50389, 50390, 50391 were selected from the ORFs having the nucleotide sequence represented by SEQ ID NO: 4008.

[4498] The probes having the nucleotide sequence represented by SEQ ID NOS: 50392, 50393, 50394, 50395, 50396, 50397, 50398, 50399, 50400, 50401, 50402 were selected from the ORFs having the nucleotide sequence represented by SEQ ID NO: 4009.

[4499] The probes having the nucleotide sequence represented by SEQ ID NOS: 50403, 50404, 50405, 50406, 50407, 50408, 50409, 50410, 50411, 50412, 50413 were selected from the ORFs having the nucleotide sequence represented by SEQ ID NO: 4010.

[4500] The probes having the nucleotide sequence represented by SEQ ID NOS: 50414, 50415, 50416, 50417, 50418, 50419, 50420, 50421, 50422, 50423, 50424 were selected from the ORFs having the nucleotide sequence represented by SEQ ID NO: 4011.

[4501] The probes having the nucleotide sequence represented by SEQ ID NOS: 50425, 50426, 50427, 50428, 50429, 50430, 50431, 50432, 50433, 50434, 50435 were selected from the ORFs having the nucleotide sequence represented by SEQ ID NO: 4012.

[4502] The probes having the nucleotide sequence represented by SEQ ID NOS: 50436, 50437, 50438, 50439, 50440, 50441, 50442, 50443, 50444, 50445, 50446 were selected from the ORFs having the nucleotide sequence represented by SEQ ID NO: 4013.

[4503] The probes having the nucleotide sequence represented by SEQ ID NOS: 50447, 50448, 50449, 50450, 50451, 50452, 50453, 50454, 50455, 50456, 50457 were selected from the ORFs having the nucleotide sequence represented by SEQ ID NO: 4014.

[4504] The probes having the nucleotide sequence represented by SEQ ID NOS: 50458, 50459, 50460, 50461, 50462, 50463, 50464, 50465, 50466, 50467, 50468 were selected from the ORFs having the nucleotide sequence represented by SEQ ID NO: 4015.

[4505] The probes having the nucleotide sequence represented by SEQ ID NOS: 50502, 50503, 50504, 50505, 50506, 50507, 50508, 50509, 50510, 50511, 50512, 50513, 50514, 50515, 50516, 50517, 50518, 50519, 50520, 50521, 50522, 50523 were selected from the ORFs having the nucleotide sequence represented by SEQ ID NO: 4016.

[4506] The probes having the nucleotide sequence represented by SEQ ID NOS: 50469, 50470, 50471, 50472, 50473, 50474, 50475, 50476, 50477, 50478, 50479 were selected from the ORFs having the nucleotide sequence represented by SEQ ID NO: 4017.

[4507] The probes having the nucleotide sequence represented by SEQ ID NOS: 50480, 50481, 50482, 50483, 50484, 50485, 50486, 50487, 50488, 50489, 50490, 50491, 50492, 50493, 50494, 50495, 50496, 50497, 50498, 50499, 50500, 50501 were selected from the ORFs having the nucleotide sequence represented by SEQ ID NO: 4018.

[4508] The probes having the nucleotide sequence represented by SEQ ID NOS: 50524, 50525, 50526, 50527, 50528, 50529, 50530, 50531, 50532, 50533, 50534 were selected from the ORFs having the nucleotide sequence represented by SEQ ID NO: 4019.

[4509] The probes having the nucleotide sequence represented by SEQ ID NOS: 50535, 50536, 50537, 50538, 50539, 50540, 50541, 50542, 50543, 50544, 50545 were selected from the ORFs having the nucleotide sequence represented by SEQ ID NO: 4020.

[4510] The probes having the nucleotide sequence represented by SEQ ID NOS: 50546, 50547, 50548, 50549, 50550, 50551, 50552, 50553, 50554, 50555, 50556 were selected from the ORFs having the nucleotide sequence represented by SEQ ID NO: 4021.

[4511] The probes having the nucleotide sequence represented by SEQ ID NOS: 50557, 50558, 50559, 50560, 50561, 50562, 50563, 50564, 50565, 50566, 50567 were selected from the ORFs having the nucleotide sequence represented by SEQ ID NO: 4022.

[4512] The probes having the nucleotide sequence represented by SEQ ID NOS: 50568, 50569, 50570, 50571, 50572, 50573, 50574, 50575, 50576, 50577, 50578 were selected from the ORFs having the nucleotide sequence represented by SEQ ID NO: 4023.

[4513] The probes having the nucleotide sequence represented by SEQ ID NOS: 50579, 50580, 50581, 50582, 50583, 50584, 50585, 50586, 50587, 50588, 50589 were selected from the ORFs having the nucleotide sequence represented by SEQ ID NO: 4024.

[4514] The probes having the nucleotide sequence represented by SEQ ID NOS: 50590, 50591, 50592, 50593, 50594, 50595, 50596, 50597, 50598, 50599, 50600 were selected from the ORFs having the nucleotide sequence represented by SEQ ID NO: 4025.

[4515] The probes having the nucleotide sequence represented by SEQ ID NOS: 50601, 50602, 50603, 50604, 50605, 50606, 50607, 50608, 50609, 50610, 50611 were selected from the ORFs having the nucleotide sequence represented by SEQ ID NO: 4026.

[4516] The probes having the nucleotide sequence represented by SEQ ID NOS:,50612, 50613, 50614, 50615, 50616, 50617, 50618, 50619, 50620, 50621, 50622 were selected from the ORFs having the nucleotide sequence represented by SEQ ID NO: 4027.

[4517] The probes having the nucleotide sequence represented by SEQ ID NOS: 50623, 50624, 50625, 50626, 50627, 50628, 50629, 50630, 50631, 50632, 50633 were selected from the ORFs having the nucleotide sequence represented by SEQ ID NO: 4028.

[4518] The probes having the nucleotide sequence represented by SEQ ID NOS: 50634, 50635, 50636, 50637, 50638, 50639, 50640, 50641, 50642, 50643, 50644 were selected from the ORFs having the nucleotide sequence represented by SEQ ID NO: 4029.

[4519] The probes having the nucleotide sequence represented by SEQ ID NOS: 50645, 50646, 50647, 50648, 50649, 50650, 50651, 50652, 50653, 50654, 50655 were selected from the ORFs having the nucleotide sequence represented by SEQ ID NO: 4030.

[4520] The probes having the nucleotide sequence represented by SEQ ID NOS: 50656, 50657, 50658, 50659, 50660, 50661, 50662, 50663, 50664, 50665, 50666 were selected from the ORFs having the nucleotide sequence represented by SEQ ID NO: 4031.

[4521] The probes having the nucleotide sequence represented by SEQ ID NOS: 50667, 50668, 50669, 50670, 50671, 50672, 50673, 50674, 50675, 50676, 50677 were selected from the ORFs having the nucleotide sequence represented by SEQ ID NO: 4032.

[4522] The probes having the nucleotide sequence represented by SEQ ID NOS: 50678, 50679, 50680, 50681, 50682, 50683, 50684, 50685, 50686, 50687, 50688 were selected from the ORFs having the nucleotide sequence represented by SEQ ID NO: 4033.

[4523] The probes having the nucleotide sequence represented by SEQ ID NOS: 50689, 50690, 50691, 50692, 50693, 50694, 50695, 50696, 50697, 50698, 50699 were selected from the ORFs having the nucleotide sequence represented by SEQ ID NO: 4034.

[4524] The probes having the nucleotide sequence represented by SEQ ID NOS: 50700, 50701, 50702, 50703, 50704, 50705, 50706, 50707, 50708, 50709, 50710 were selected from the ORFs having the nucleotide sequence represented by SEQ ID NO: 4035.

[4525] The probes having the nucleotide sequence represented by SEQ ID NOS: 50711, 50712, 50713, 50714, 50715, 50716, 50717, 50718, 50719, 50720, 50721 were selected from the ORFs having the nucleotide sequence represented by SEQ ID NO: 4036.

[4526] The probes having the nucleotide sequence represented by SEQ ID NOS: 50722, 50723, 50724, 50725, 50726, 50727, 50728, 50729, 50730, 50731, 50732 were selected from the ORFs having the nucleotide sequence represented by SEQ ID NO: 4037.

[4527] The probes having the nucleotide sequence represented by SEQ ID NOS: 50733, 50734, 50735, 50736, 50737, 50738, 50739, 50740, 50741, 50742, 50743 were selected from the ORFs having the nucleotide sequence represented by SEQ ID NO: 4038.

[4528] The probes having the nucleotide sequence represented by SEQ ID NOS: 50744, 50745, 50746, 50747, 50748, 50749, 50750, 50751, 50752, 50753, 50754 were selected from the ORFs having the nucleotide sequence represented by SEQ ID NO: 4039.

[4529] The probes having the nucleotide sequence represented by SEQ ID NOS: 50755, 50756, 50757, 50758, 50759, 50760, 50761, 50762, 50763, 50764, 50765 were selected from the ORFs having the nucleotide sequence represented by SEQ ID NO: 4040.

[4530] The probes having the nucleotide sequence represented by SEQ ID NOS: 50766, 50767, 50768, 50769, 50770, 50771, 50772, 50773, 50774, 50775, 50776 were selected from the ORFs having the nucleotide sequence represented by SEQ ID NO: 4041.

[4531] The probes having the nucleotide sequence represented by SEQ ID NOS: 50777, 50778, 50779, 50780, 50781, 50782, 50783, 50784, 50785, 50786, 50787 were selected from the ORFs having the nucleotide sequence represented by SEQ ID NO: 4042.

[4532] The probes having the nucleotide sequence represented by SEQ ID NOS: 50788, 50789, 50790, 50791, 50792, 50793, 50794, 50795, 50796, 50797, 50798 were selected from the ORFs having the nucleotide sequence represented by SEQ ID NO: 4043.

[4533] The probes having the nucleotide sequence represented by SEQ ID NOS: 50799, 50800, 50801, 50802, 50803, 50804, 50805, 50806, 50807, 50808, 50809 were selected from the ORFs having the nucleotide sequence represented by SEQ ID NO: 4044.

[4534] The probes having the nucleotide sequence represented by SEQ ID NOS: 50810, 50811, 50812, 50813, 50814, 50815, 50816, 50817, 50818, 50819, 50820 were selected from the ORFs having the nucleotide sequence represented by SEQ ID NO: 4045.

[4535] The probes having the nucleotide sequence represented by SEQ ID NOS: 50821, 50822, 50823, 50824, 50825, 50826, 50827, 50828, 50829, 50830, 50831 were selected from the ORFs having the nucleotide sequence represented by SEQ ID NO: 4046.

[4536] The probes having the nucleotide sequence represented by SEQ ID NOS: 50832, 50833, 50834, 50835, 50836, 50837, 50838, 50839, 50840, 50841, 50842 were selected from the ORFs having the nucleotide sequence represented by SEQ ID NO: 4047.

[4537] The probes having the nucleotide sequence represented by SEQ ID NOS: 50843, 50844, 50845, 50846, 50847, 50848, 50849, 50850, 50851, 50852, 50853 were selected from the ORFs having the nucleotide sequence represented by SEQ ID NO: 4048.

[4538] The probes having the nucleotide sequence represented by SEQ ID NOS: 50854, 50855, 50856, 50857, 50858, 50859, 50860, 50861, 50862, 50863 were selected from the ORFs having the nucleotide sequence represented by SEQ ID NO: 4049.

[4539] The probes having the nucleotide sequence represented by SEQ ID NOS: 50864, 50865, 50866, 50867, 50868, 50869, 50870, 50871, 50872, 50873, 50874 were selected from the ORFs having the nucleotide sequence represented by SEQ ID NO: 4050.

[4540] The probes having the nucleotide sequence represented by SEQ ID NOS: 50875, 50876, 50877, 50878, 50879, 50880, 50881, 50882, 50883, 50884, 50885 were selected from the ORFs having the nucleotide sequence represented by SEQ ID NO: 4051.

[4541] The probes having the nucleotide sequence represented by SEQ ID NOS: 50886, 50887, 50888, 50889, 50890, 50891, 50892, 50893, 50894, 50895, 50896 were selected from the ORFs having the nucleotide sequence represented by SEQ ID NO: 4052.

[4542] The probes having the nucleotide sequence represented by SEQ ID NOS: 50897, 50898, 50899, 50900, 50901, 50902, 50903, 50904, 50905, 50906, 50907 were selected from the ORFs having the nucleotide sequence represented by SEQ ID NO: 4053.

[4543] The probes having the nucleotide sequence represented by SEQ ID NOS: 50908, 50909, 50910, 50911, 50912, 50913, 50914, 50915, 50916, 50917, 50918 were selected from the ORFs having the nucleotide sequence represented by SEQ ID NO: 4054.

[4544] The probes having the nucleotide sequence represented by SEQ ID NOS: 50919, 50920, 50921, 50922, 50923, 50924, 50925, 50926, 50927, 50928, 50929 were selected from the ORFs having the nucleotide sequence represented by SEQ ID NO: 4055.

[4545] The probes having the nucleotide sequence represented by SEQ ID NOS: 50930, 50931, 50932, 50933, 50934, 50935, 50936, 50937, 50938, 50939, 50940 were selected from the ORFs having the nucleotide sequence represented by SEQ ID NO: 4056.

[4546] The probes having the nucleotide sequence represented by SEQ ID NOS: 50941, 50942, 50943, 50944, 50945, 50946, 50947, 50948, 50949, 50950, 50951 were selected from the ORFs having the nucleotide sequence represented by SEQ ID NO: 4057.

[4547] The probes having the nucleotide sequence represented by SEQ ID NOS: 50952, 50953, 50954, 50955, 50956, 50957, 50958, 50959, 50960, 50961, 50962 were selected from the ORFs having the nucleotide sequence represented by SEQ ID NO: 4058.

[4548] The probes having the nucleotide sequence represented by SEQ ID NOS: 50963, 50964, 50965, 50966, 50967, 50968, 50969, 50970, 50971, 50972, 50973 were selected from the ORFs having the nucleotide sequence represented by SEQ ID NO: 4059.

[4549] The probes having the nucleotide sequence represented by SEQ ID NOS: 50974, 50975, 50976, 50977, 50978, 50979, 50980, 50981, 50982, 50983, 50984 were selected from the ORFs having the nucleotide sequence represented by SEQ ID NO: 4060.

[4550] The probes having the nucleotide sequence represented by SEQ ID NOS: 50985, 50986, 50987, 50988, 50989, 50990, 50991, 50992, 50993, 50994, 50995 were selected from the ORFs having the nucleotide sequence represented by SEQ ID NO: 4061.

[4551] The probes having the nucleotide sequence represented by SEQ ID NOS: 50996, 50997, 50998, 50999, 51000, 51001, 51002, 51003, 51004, 51005, 51006 were selected from the ORFs having the nucleotide sequence represented by SEQ ID NO: 4062.

[4552] The probes having the nucleotide sequence represented by SEQ ID NOS: 51007, 51008, 51009, 51010, 51011, 51012, 51013, 51014, 51015, 51016, 51017 were selected from the ORFs having the nucleotide sequence represented by SEQ ID NO: 4063.

[4553] The probes having the nucleotide sequence represented by SEQ ID NOS: 51018, 51019, 51020, 51021, 51022, 51023, 51024, 51025, 51026, 51027, 51028 were selected from the ORFs having the nucleotide sequence represented by SEQ ID NO: 4064.

[4554] The probes having the nucleotide sequence represented by SEQ ID NOS: 51029, 51030, 51031, 51032, 51033, 51034, 51035, 51036, 51037, 51038, 51039 were selected from the ORFs having the nucleotide sequence represented by SEQ ID NO: 4065.

[4555] The probes having the nucleotide sequence represented by SEQ ID NOS: 51040, 51041, 51042, 51043, 51044, 51045, 51046, 51047, 51048, 51049, 51050 were selected from the ORFs having the nucleotide sequence represented by SEQ ID NO: 4066.

[4556] The probes having the nucleotide sequence represented by SEQ ID NOS: 51051, 51052, 51053, 51054, 51055, 51056, 51057, 51058, 51059, 51060, 51061 were selected from the ORFs having the nucleotide sequence represented by SEQ ID NO: 4067.

[4557] The probes having the nucleotide sequence represented by SEQ ID NOS: 51062, 51063, 51064, 51065, 51066, 51067, 51068, 51069, 51070, 51071, 51072 were selected from the ORFs having the nucleotide sequence represented by SEQ ID NO: 4068.

[4558] The probes having the nucleotide sequence represented by SEQ ID NOS: 51073, 51074, 51075, 51076, 51077, 51078, 51079, 51080, 51081, 51082, 51083 were selected from the ORFs having the nucleotide sequence represented by SEQ ID NO: 4069.

[4559] The probes having the nucleotide sequence represented by SEQ ID NOS: 51084, 51085, 51086, 51087, 51088, 51089, 51090, 51091, 51092, 51093, 51094 were selected from the ORFs having the nucleotide sequence represented by SEQ ID NO: 4070.

[4560] The probes having the nucleotide sequence represented by SEQ ID NOS: 51095, 51096, 51097, 51098, 51099, 51100, 51101, 51102, 51103, 51104, 51105 were selected from the ORFs having the nucleotide sequence represented by SEQ ID NO: 4071.

[4561] The probes having the nucleotide sequence represented by SEQ ID NOS: 51106, 51107, 51108, 51109, 51110, 51111, 51112, 51113, 51114, 51115, 51116 were selected from the ORFs having the nucleotide sequence represented by SEQ ID NO: 4072.

[4562] The probes having the nucleotide sequence represented by SEQ ID NOS: 51117, 51118, 51119, 51120, 51121, 51122, 51123, 51124, 51125, 51126, 51127 were selected from the ORFs having the nucleotide sequence represented by SEQ ID NO: 4073.

[4563] The probes having the nucleotide sequence represented by SEQ ID NOS: 51128, 51129, 51130, 51131, 51132, 51133, 51134, 51135, 51136, 51137, 51138, 51139, 51140, 51141, 51142, 51143, 51144, 51145, 51146, 51147, 51148, 51149 were selected from the ORFs having the nucleotide sequence represented by SEQ ID NO: 4074.

[4564] The probes having the nucleotide sequence represented by SEQ ID NOS: 51150, 51151, 51152, 51153, 51154, 51155, 51156, 51157, 51158, 51159, 51160, 51161, 51162, 51163, 51164, 51165, 51166, 51167, 51168, 51169 were selected from the ORFs having the nucleotide sequence represented by SEQ ID NO: 4075.

[4565] The probes having the nucleotide sequence represented by SEQ ID NOS: 51170, 51171, 51172, 51173, 51174, 51175, 51176, 51177, 51178, 51179, 51180 were selected from the ORFs having the nucleotide sequence represented by SEQ ID NO: 4076.

[4566] The probes having the nucleotide sequence represented by SEQ ID NOS: 51181, 51182, 51183, 51184, 51185, 51186, 51187, 51188, 51189, 51190, 51191 were selected from the ORFs having the nucleotide sequence represented by SEQ ID NO: 4077.

[4567] The probes having the nucleotide sequence represented by SEQ ID NOS: 51192, 51193, 51194, 51195, 51196, 51197, 51198, 51199, 51200, 51201, 51202 were selected from the ORFs having the nucleotide sequence represented by SEQ ID NO: 4078.

[4568] The probes having the nucleotide sequence represented by SEQ ID NOS: 51203, 51204, 51205, 51206, 51207, 51208, 51209, 51210, 51211, 51212, 51213 were selected from the ORFs having the nucleotide sequence represented by SEQ ID NO: 4079.

[4569] The probes having the nucleotide sequence represented by SEQ ID NOS: 51214, 51215, 51216, 51217, 51218, 51219, 51220, 51221, 51222, 51223, 51224 were selected from the ORFs having the nucleotide sequence represented by SEQ ID NO: 4080.

[4570] The probes having the nucleotide sequence represented by SEQ ID NOS: 51225, 51226, 51227, 51228, 51229, 51230, 51231, 51232, 51233, 51234, 51235 were selected from the ORFs having the nucleotide sequence represented by SEQ ID NO: 4081.

[4571] The probes having the nucleotide sequence represented by SEQ ID NOS: 51236, 51237, 51238, 51239, 51240, 51241, 51242, 51243, 51244, 51245, 51246 were selected from the ORFs having the nucleotide sequence represented by SEQ ID NO: 4082.

[4572] The probes having the nucleotide sequence represented by SEQ ID NOS: 51247, 51248, 51249, 51250, 51251, 51252, 51253, 51254, 51255, 51256, 51257 were selected from the ORFs having the nucleotide sequence represented by SEQ ID NO: 4083.

[4573] The probes having the nucleotide sequence represented by SEQ ID NOS: 51258, 51259, 51260, 51261, 51262, 51263, 51264, 51265, 51266, 51267, 51268 were selected from the ORFs having the nucleotide sequence represented by SEQ ID NO: 4084.

[4574] The probes having the nucleotide sequence represented by SEQ ID NOS: 51269, 51270, 51271, 51272, 51273, 51274, 51275, 51276, 51277, 51278, 51279 were selected from the ORFs having the nucleotide sequence represented by SEQ ID NO: 4085.

[4575] The probes having the nucleotide sequence represented by SEQ ID NOS: 51280, 51281, 51282, 51283, 51284, 51285, 51286, 51287, 51288, 51289, 51290 were selected from the ORFs having the nucleotide sequence represented by SEQ ID NO: 4086.

[4576] The probes having the nucleotide sequence represented by SEQ ID NOS: 51291, 51292, 51293, 51294, 51295, 51296, 51297, 51298, 51299, 51300, 51301 were selected from the ORFs having the nucleotide sequence represented by SEQ ID NO: 4087.

[4577] The probes having the nucleotide sequence represented by SEQ ID NOS: 51302, 51303, 51304, 51305, 51306, 51307, 51308, 51309, 51310, 51311, 51312 were selected from the ORFs having the nucleotide sequence represented by SEQ ID NO: 4088.

[4578] The probes having the nucleotide sequence represented by SEQ ID NOS: 51313, 51314, 51315, 51316, 51317, 51318, 51319, 51320, 51321, 51322, 51323 were selected from the ORFs having the nucleotide sequence represented by SEQ ID NO: 4089.

[4579] The probes having the nucleotide sequence represented by SEQ ID NOS: 51324, 51325, 51326, 51327, 51328, 51329, 51330, 51331, 51332, 51333, 51334 were selected from the ORFs having the nucleotide sequence represented by SEQ ID NO: 4090.

[4580] The probes having the nucleotide sequence represented by SEQ ID NOS: 51335, 51336, 51337, 51338, 51339, 51340, 51341, 51342, 51343, 51344, 51345 were selected from the ORFs having the nucleotide sequence represented by SEQ ID NO: 4091.

[4581] The probes having the nucleotide sequence represented by SEQ ID NOS: 51346, 51347, 51348, 51349, 51350, 51351, 51352, 51353, 51354, 51355, 51356 were selected from the ORFs having the nucleotide sequence represented by SEQ ID NO: 4092.

[4582] The probes having the nucleotide sequence represented by SEQ ID NOS: 51357, 51358, 51359, 51360, 51361, 51362, 51363, 51364, 51365, 51366, 51367 were selected from the ORFs having the nucleotide sequence represented by SEQ ID NO: 4093.

[4583] The probes having the nucleotide sequence represented by SEQ ID NOS: 51368, 51369, 51370, 51371, 51372, 51373, 51374, 51375, 51376, 51377, 51378 were selected from the ORFs having the nucleotide sequence represented by SEQ ID NO: 4094.

[4584] The probes having the nucleotide sequence represented by SEQ ID NOS: 51379, 51380, 51381, 51382, 51383, 51384, 51385, 51386, 51387, 51388, 51389 were selected from the ORFs having the nucleotide sequence represented by SEQ ID NO: 4095.

[4585] The probes having the nucleotide sequence represented by SEQ ID NOS: 51390, 51391, 51392, 51393, 51394, 51395, 51396, 51397, 51398, 51399, 51400 were selected from the ORFs having the nucleotide sequence represented by SEQ ID NO: 4096.

[4586] The probes having the nucleotide sequence represented by SEQ ID NOS: 51401, 51402, 51403, 51404, 51405, 51406, 51407, 51408, 51409, 51410, 51411 were selected from the ORFs having the nucleotide sequence represented by SEQ ID NO: 4097.

[4587] The probes having the nucleotide sequence represented by SEQ ID NOS: 51412, 51413, 51414, 51415, 51416, 51417, 51418, 51419, 51420, 51421, 51422 were selected from the ORFs having the nucleotide sequence represented by SEQ ID NO: 4098.

[4588] The probes having the nucleotide sequence represented by SEQ ID NOS: 51423, 51424, 51425, 51426, 51427, 51428, 51429, 51430, 51431, 51432, 51433 were selected from the ORFs having the nucleotide sequence represented by SEQ ID NO: 4099.

[4589] The probes having the nucleotide sequence represented by SEQ ID NOS: 51434, 51435, 51436, 51437, 51438, 51439, 51440, 51441, 51442, 51443, 51444 were selected from the ORFs having the nucleotide sequence represented by SEQ ID NO: 4100.

[4590] The probes having the nucleotide sequence represented by SEQ ID NOS: 51445, 51446, 51447, 51448, 51449, 51450, 51451, 51452, 51453, 51454, 51455 were selected from the ORFs having the nucleotide sequence represented by SEQ ID NO: 4101.

[4591] The probes having the nucleotide sequence represented by SEQ ID NOS: 5.1456, 51457, 51458, 51459, 51460, 51461, 51462, 51463, 51464, 51465, 51466 were selected from the ORFs having the nucleotide sequence represented by SEQ ID NO: 4102.

[4592] The probes having the nucleotide sequence represented by SEQ ID NOS: 51467, 51468, 51469, 51470, 51471, 51472, 51473, 51474, 51475, 51476, 51477 were selected from the ORFs having the nucleotide sequence represented by SEQ ID NO: 4103.

[4593] The probes having the nucleotide sequence represented by SEQ ID NOS: 51478, 51479, 51480, 51481, 51482, 51483, 51484, 51485, 51486, 51487, 51488 were selected from the ORFs having the nucleotide sequence represented by SEQ ID NO: 4104.

[4594] The probes having the nucleotide sequence represented by SEQ ID NOS: 51489, 51490, 51491, 51492, 51493, 51494, 51495, 51496, 51497, 51498, 51499 were selected from the ORFs having the nucleotide sequence represented by SEQ ID NO: 4105.

[4595] The probes having the nucleotide sequence represented by SEQ ID NOS: 51500, 51501, 51502, 51503, 51504, 51505, 51506, 51507, 51508, 51509, 51510 were selected from the ORFs having the nucleotide sequence represented by SEQ ID NO: 4106.

[4596] The probes having the nucleotide sequence represented by SEQ ID NOS: 51511, 51512, 51513, 51514, 51515, 51516, 51517, 51518, 51519, 51520, 51521 were selected from the ORFs having the nucleotide sequence represented by SEQ ID NO: 4107.

[4597] The probes having the nucleotide sequence represented by SEQ ID NOS: 51522, 51523, 51524, 51525, 51526, 51527, 51528, 51529, 51530, 51531, 51532 were selected from the ORFs having the nucleotide sequence represented by SEQ ID NO: 4108.

[4598] The probes having the nucleotide sequence represented by SEQ ID NOS: 51533, 51534, 51535, 51536, 51537, 51538, 51539, 51540, 51541, 51542, 51543 were selected from the ORFs having the nucleotide sequence represented by SEQ ID NO: 4109.

[4599] The probes having the nucleotide sequence represented by SEQ ID NOS: 51544, 51545, 51546, 51547, 51548, 51549, 51550, 51551, 51552, 51553, 51554 were selected from the ORFs having the nucleotide sequence represented by SEQ ID NO: 4110.

[4600] The probes having the nucleotide sequence represented by SEQ ID NOS: 51555, 51556, 51557, 51558, 51559, 51560, 51561, 51562, 51563, 51564, 51565 were selected from the ORFs having the nucleotide sequence represented by SEQ ID NO: 4111.

[4601] The probes having the nucleotide sequence represented by SEQ ID NOS: 51566, 51567, 51568, 51569, 51570, 51571, 51572, 51573, 51574, 51575, 51576 were selected from the ORFs having the nucleotide sequence represented by SEQ ID NO: 4112.

[4602] The probes having the nucleotide sequence represented by SEQ ID NOS: 51577, 51578, 51579, 51580, 51581, 51582, 51583, 51584, 51585, 51586, 51587 were selected from the ORFs having the nucleotide sequence represented by SEQ ID NO: 4113.

[4603] The probes having the nucleotide sequence represented by SEQ ID NOS: 51588, 51589, 51590, 51591, 51592, 51593, 51594, 51595, 51596, 51597, 51598 were selected from the ORFs having the nucleotide sequence represented by SEQ ID NO: 4114.

[4604] The probes having the nucleotide sequence represented by SEQ ID NOS: 51599, 51600, 51601, 51602, 51603, 51604, 51605, 51606, 51607, 51608, 51609 were selected from the ORFs having the nucleotide sequence represented by SEQ ID NO: 4115.

[4605] The probes having the nucleotide sequence represented by SEQ ID NOS: 51610, 51611, 51612, 51613, 51614, 51615, 51616, 51617, 51618, 51619, 51620 were selected from the ORFs having the nucleotide sequence represented by SEQ ID NO: 4116.

[4606] The probes having the nucleotide sequence represented by SEQ ID NOS: 51621, 51622, 51623, 51624, 51625, 51626, 51627, 51628, 51629, 51630, 51631 were selected from the ORFs having the nucleotide sequence represented by SEQ ID NO: 4117.

[4607] The probes having the nucleotide sequence represented by SEQ ID NOS: 51632, 51633, 51634, 51635, 51636, 51637, 51638, 51639, 51640, 51641, 51642 were selected from the ORFs having the nucleotide sequence represented by SEQ ID NO: 4118.

[4608] The probes having the nucleotide sequence represented by SEQ ID NOS: 51643, 51644, 51645, 51646, 51647, 51648, 51649, 51650, 51651, 51652, 51653 were selected from the ORFs having the nucleotide sequence represented by SEQ ID NO: 4119.

[4609] The probes having the nucleotide sequence represented by SEQ ID NOS: 51654, 51655, 51656, 51657, 51658, 51659, 51660, 51661, 51662, 51663, 51664 were selected from the ORFs having the nucleotide sequence represented by SEQ ID NO: 4120.

[4610] The probes having the nucleotide sequence represented by SEQ ID NOS: 51665, 51666, 51667, 51668, 51669, 51670, 51671, 51672, 51673, 51674, 51675 were selected from the ORFs having the nucleotide sequence represented by SEQ ID NO: 4121.

[4611] The probes having the nucleotide sequence represented by SEQ ID NOS: 51676, 51677, 51678, 51679, 51680, 51681, 51682, 51683, 51684, 51685, 51686 were selected from the ORFs having the nucleotide sequence represented by SEQ ID NO: 4122.

[4612] The probes having the nucleotide sequence represented by SEQ ID NOS: 51687, 51688, 51689, 51690, 51691, 51692, 51693, 51694, 51695, 51696, 51697 were selected from the ORFs having the nucleotide sequence represented by SEQ ID NO: 4123.

[4613] The probes having the nucleotide sequence represented by SEQ ID NOS: 51698, 51699, 51700, 51701, 51702, 51703, 51704, 51705, 51706, 51707, 51708 were selected from the ORFs having the nucleotide sequence represented by SEQ ID NO: 4124.

[4614] The probes having the nucleotide sequence represented by SEQ ID NOS: 51709, 51710, 51711, 51712, 51713, 51714, 51715, 51716, 51717, 51718, 51719 were selected from the ORFs having the nucleotide sequence represented by SEQ ID NO: 4125.

[4615] The probes having the nucleotide sequence represented by SEQ ID NOS: 51720, 51721, 51722, 51723, 51724, 51725, 51726, 51727, 51728, 51729, 51730 were selected from the ORFs having the nucleotide sequence represented by SEQ ID NO: 4126.

[4616] The probes having the nucleotide sequence represented by SEQ ID NOS: 51731, 51732, 51733, 51734, 51735, 51736, 51737, 51738, 51739, 51740, 51741 were selected from the ORFs having the nucleotide sequence represented by SEQ ID NO: 4127.

[4617] The probes having the nucleotide sequence represented by SEQ ID NOS: 51742, 51743, 51744, 51745, 51746, 51747, 51748, 51749, 51750, 51751, 51752 were selected from the ORFs having the nucleotide sequence represented by SEQ ID NO: 4128.

[4618] The probes having the nucleotide sequence represented by SEQ ID NOS: 51753, 51754, 51755, 51756, 51757, 51758, 51759, 51760, 51761, 51762, 51763 were selected from the ORFs having the nucleotide sequence represented by SEQ ID NO: 4129.

[4619] The probes having the nucleotide sequence represented by SEQ ID NOS: 51764, 51765, 51766, 51767, 51768, 51769, 51770, 51771, 51772, 51773, 51774 were selected from the ORFs having the nucleotide sequence represented by SEQ ID NO: 4130.

[4620] The probes having the nucleotide sequence represented by SEQ ID NOS: 51775, 51776, 51777, 51778, 51779, 51780, 51781, 51782, 51783, 51784, 51785 were selected from the ORFs having the nucleotide sequence represented by SEQ ID NO: 4131.

[4621] The probes having the nucleotide sequence represented by SEQ ID NOS: 51786, 51787, 51788, 51789, 51790, 51791, 51792, 51793, 51794, 51795, 51796 were selected from the ORFs having the nucleotide sequence represented by SEQ ID NO: 4132.

[4622] The probes having the nucleotide sequence represented by SEQ ID NOS: 51797, 51798, 51799, 51800, 51801, 51802, 51803, 51804, 51805, 51806, 51807 were selected from the ORFs having the nucleotide sequence represented by SEQ ID NO: 4133.

[4623] The probes having the nucleotide sequence represented by SEQ ID NOS: 51808, 51809, 51810, 51811, 51812, 51813, 51814, 51815, 51816, 51817, 51818 were selected from the ORFs having the nucleotide sequence represented by SEQ ID NO: 4134.

[4624] The probes having the nucleotide sequence represented by SEQ ID NOS: 51819, 51820, 51821, 51822, 51823, 51824, 51825, 51826, 51827, 51828, 51829 were selected from the ORFs having the nucleotide sequence represented by SEQ ID NO: 4135.

[4625] The probes having the nucleotide sequence represented by SEQ ID NOS: 51830, 51831, 51832, 51833, 51834, 51835, 51836, 51837, 51838, 51839, 51840 were selected from the ORFs having the nucleotide sequence represented by SEQ ID NO: 4136.

[4626] The probes having the nucleotide sequence represented by SEQ ID NOS: 51841, 51842, 51843, 51844, 51845, 51846, 51847, 51848, 51849, 51850, 51851, 51852, 51853, 51854, 51855, 51856, 51857, 51858, 51859, 51860, 51861, 51862 were selected from the ORFs having the nucleotide sequence represented by SEQ ID NO: 4137.

[4627] The probes having the nucleotide sequence represented by SEQ ID NOS: 51863, 51864, 51865, 51866, 51867, 51868, 51869, 51870, 51871, 51872, 51873 were selected from the ORFs having the nucleotide sequence represented by SEQ ID NO: 4138.

[4628] The probes having the nucleotide sequence represented by SEQ ID NOS: 51874, 51875, 51876, 51877, 51878, 51879, 51880, 51881, 51882, 51883, 51884 were selected from the ORFs having the nucleotide sequence represented by SEQ ID NO: 4139.

[4629] The probes having the nucleotide sequence represented by SEQ ID NOS: 51885, 51886, 51887, 51888, 51889, 51890, 51891, 51892, 51893, 51894, 51895 were selected from the ORFs having the nucleotide sequence represented by SEQ ID NO: 4140.

[4630] The probes having the nucleotide sequence represented by SEQ ID NOS: 51896, 51897, 51898, 51899, 51900, 51901, 51902, 51903, 51904, 51905, 51906 were selected from the ORFs having the nucleotide sequence represented by SEQ ID NO: 4141.

[4631] The probes having the nucleotide sequence represented by SEQ ID NOS: 51907, 51908, 51909, 51910, 51911, 51912, 51913, 51914, 51915, 51916, 51917 were selected from the ORFs having the nucleotide sequence represented by SEQ ID NO: 4142.

[4632] The probes having the nucleotide sequence represented by SEQ ID NOS: 51918, 51919, 51920, 51921, 51922, 51923, 51924, 51925, 51926, 51927, 51928 were selected from the ORFs having the nucleotide sequence represented by SEQ ID NO: 4143.

[4633] The probes having the nucleotide sequence represented by SEQ ID NOS: 51929, 51930, 51931, 51932, 51933, 51934, 51935, 51936, 51937, 51938, 51939 were selected from the ORFs having the nucleotide sequence represented by SEQ ID NO: 4144.

[4634] The probes having the nucleotide sequence represented by SEQ ID NOS: 51940, 51941, 51942, 51943, 51944, 51945, 51946, 51947, 51948, 51949, 51950 were selected from the ORFs having the nucleotide sequence represented by SEQ ID NO: 4145.

[4635] The probes having the nucleotide sequence represented by SEQ ID NOS: 51951, 51952, 51953, 51954, 51955, 51956, 51957, 51958, 51959, 51960, 51961 were selected from the ORFs having the nucleotide sequence represented by SEQ ID NO: 4146.

[4636] The probes having the nucleotide sequence represented by SEQ ID NOS: 51962, 51963, 51964, 51965, 51966, 51967, 51968, 51969, 51970, 51971, 51972 were selected from the ORFs having the nucleotide sequence represented by SEQ ID NO: 4147.

[4637] The probes having the nucleotide sequence represented by SEQ ID NOS: 51973, 51974, 51975, 51976, 51977, 51978, 51979, 51980, 51981, 51982, 51983 were selected from the ORFs having the nucleotide sequence represented by SEQ ID NO: 4148.

[4638] The probes having the nucleotide sequence represented by SEQ ID NOS: 51984, 51985, 51986, 51987, 51988, 51989, 51990, 51991, 51992, 51993, 51994 were selected from the ORFs having the nucleotide sequence represented by SEQ ID NO: 4149.

[4639] The probes having the nucleotide sequence represented by SEQ ID NOS: 51995, 51996, 51997, 51998, 51999, 52000, 52001, 52002, 52003, 52004, 52005 were selected from the ORFs having the nucleotide sequence represented by SEQ ID NO: 4150.

[4640] The probes having the nucleotide sequence represented by SEQ ID NOS: 52006, 52007, 52008, 52009, 52010, 52011, 52012, 52013, 52014, 52015, 52016 were selected from the ORFs having the nucleotide sequence represented by SEQ ID NO: 4151.

[4641] The probes having the nucleotide sequence represented by SEQ ID NOS: 52017, 52018, 52019, 52020, 52021, 52022, 52023, 52024, 52025, 52026, 52027 were selected from the ORFs having the nucleotide sequence represented by SEQ ID NO: 4152.

[4642] The probes having the nucleotide sequence represented by SEQ ID NOS: 52028, 52029, 52030, 52031, 52032, 52033, 52034, 52035, 52036, 52037, 52038 were selected from the ORFs having the nucleotide sequence represented by SEQ ID NO: 4153.

[4643] The probes having the nucleotide sequence represented by SEQ ID NOS: 52039, 52040, 52041, 52042, 52043, 52044, 52045, 52046, 52047, 52048, 52049 were selected from the ORFs having the nucleotide sequence represented by SEQ ID NO: 4154.

[4644] The probes having the nucleotide sequence represented by SEQ ID NOS: 52050, 52051, 52052, 52053, 52054, 52055, 52056, 52057, 52058, 52059, 52060 were selected from the ORFs having the nucleotide sequence represented by SEQ ID NO: 4155.

[4645] The probes having the nucleotide sequence represented by SEQ ID NOS: 52061, 52062, 52063, 52064, 52065, 52066, 52067, 52068, 52069, 52070, 52071 were selected from the ORFs having the nucleotide sequence represented by SEQ ID NO: 4156.

[4646] The probes having the nucleotide sequence represented by SEQ ID NOS: 52072, 52073, 52074, 52075, 52076, 52077, 52078, 52079, 52080, 52081, 52082 were selected from the ORFs having the nucleotide sequence represented by SEQ ID NO: 4157.

[4647] The probes having the nucleotide sequence represented by SEQ ID NOS: 52083, 52084, 52085, 52086, 52087, 52088, 52089, 52090, 52091, 52092, 52093 were selected from the ORFs having the nucleotide sequence represented by SEQ ID NO: 4158.

[4648] The probes having the nucleotide sequence represented by SEQ ID NOS: 52094, 52095, 52096, 52097, 52098, 52099, 52100, 52101, 52102, 52103, 52104 were selected from the ORFs having the nucleotide sequence represented by SEQ ID NO: 4159.

[4649] The probes having the nucleotide sequence represented by SEQ ID NOS: 52105, 52106, 52107, 52108, 52109, 52110, 52111, 52112, 52113, 52114, 52115 were selected from the ORFs having the nucleotide sequence represented by SEQ ID NO: 4160.

[4650] The probes having the nucleotide sequence represented by SEQ ID NOS: 52116, 52117, 52118, 52119, 52120, 52121, 52122, 52123, 52124, 52125, 52126 were selected from the ORFs having the nucleotide sequence represented by SEQ ID NO: 4161.

[4651] The probes having the nucleotide sequence represented by SEQ ID NOS: 52127, 52128, 52129, 52130, 52131, 52132, 52133, 52134, 52135, 52136, 52137 were selected from the ORFs having the nucleotide sequence represented by SEQ ID NO: 4162.

[4652] The probes having the nucleotide sequence represented by SEQ ID NOS: 52138, 52139, 52140, 52141, 52142, 52143, 52144, 52145, 52146, 52147, 52148 were selected from the ORFs having the nucleotide sequence represented by SEQ ID NO: 4163.

[4653] The probes having the nucleotide sequence represented by SEQ ID NOS: 52149, 52150, 52151, 52152, 52153, 52154, 52155, 52156, 52157, 52158, 52159 were selected from the ORFs having the nucleotide sequence represented by SEQ ID NO: 4164.

[4654] The probes having the nucleotide sequence represented by SEQ ID NOS: 52160, 52161, 52162, 52163, 52164, 52165, 52166, 52167, 52168, 52169, 52170 were selected from the ORFs having the nucleotide sequence represented by SEQ ID NO: 4165.

[4655] The probes having the nucleotide sequence represented by SEQ ID NOS: 52171, 52172, 52173, 52174, 52175, 52176, 52177, 52178, 52179, 52180, 52181 were selected from the ORFs having the nucleotide sequence represented by SEQ ID NO: 4166.

[4656] The probes having the nucleotide sequence represented by SEQ ID NOS: 52182, 52183, 52184, 52185, 52186, 52187, 52188, 52189, 52190, 52191, 52192 were selected from the ORFs having the nucleotide sequence represented by SEQ ID NO: 4167.

[4657] The probes having the nucleotide sequence represented by SEQ ID NOS: 52193, 52194, 52195, 52196, 52197, 52198, 52199, 52200, 52201, 52202, 52203 were selected from the ORFs having the nucleotide sequence represented by SEQ ID NO: 4168.

[4658] The probes having the nucleotide sequence represented by SEQ ID NOS: 52204, 52205, 52206, 52207, 52208, 52209, 52210, 52211, 52212, 52213, 52214 were selected from the ORFs having the nucleotide sequence represented by SEQ ID NO: 4169.

[4659] The probes having the nucleotide sequence represented by SEQ ID NOS: 52215, 52216, 52217, 52218, 52219, 52220, 52221, 52222, 52223, 52224, 52225 were selected from the ORFs having the nucleotide sequence represented by SEQ ID NO: 4170.

[4660] The probes having the nucleotide sequence represented by SEQ ID NOS: 52226, 52227, 52228, 52229, 52230, 52231, 52232, 52233, 52234, 52235, 52236 were selected from the ORFs having the nucleotide sequence represented by SEQ ID NO: 4171.

[4661] The probes having the nucleotide sequence represented by SEQ ID NOS: 52237, 52238, 52239, 52240, 52241, 52242, 52243, 52244, 52245, 52246, 52247 were selected from the ORFs having the nucleotide sequence represented by SEQ ID NO: 4172.

[4662] The probes having the nucleotide sequence represented by SEQ ID NOS: 52248, 52249, 52250, 52251, 52252, 52253, 52254, 52255, 52256, 52257, 52258 were selected from the ORFs having the nucleotide sequence represented by SEQ ID NO: 4173.

[4663] The probes having the nucleotide sequence represented by SEQ ID NOS: 52259, 52260, 52261, 52262, 52263, 52264, 52265, 52266, 52267, 52268, 52269 were selected from the ORFs having the nucleotide sequence represented by SEQ ID NO: 4174.

[4664] The probes having the nucleotide sequence represented by SEQ ID NOS: 52270, 52271, 52272, 52273, 52274, 52275, 52276, 52277, 52278, 52279, 52280 were selected from the ORFs having the nucleotide sequence represented by SEQ ID NO: 4175.

[4665] The probes having the nucleotide sequence represented by SEQ ID NOS: 52281, 52282, 52283, 52284, 52285, 52286, 52287, 52288, 52289, 52290, 52291 were selected from the ORFs having the nucleotide sequence represented by SEQ ID NO: 4176.

[4666] The probes having the nucleotide sequence represented by SEQ ID NOS: 52292, 52293, 52294, 52295, 52296, 52297, 52298, 52299, 52300, 52301, 52302, 52303, 52304, 52305, 52306, 52307, 52308, 52309, 52310, 52311, 52312, 52313 were selected from the ORFs having the nucleotide sequence represented by SEQ ID NO: 4177.

[4667] The probes having the nucleotide sequence represented by SEQ ID NOS: 52314, 52315, 52316, 52317, 52318, 52319, 52320, 52321, 52322, 52323, 52324 were selected from the ORFs having the nucleotide sequence represented by SEQ ID NO: 4178.

[4668] The probes having the nucleotide sequence represented by SEQ ID NOS: 52325, 52326, 52327, 52328, 52329, 52330, 52331, 52332, 52333, 52334, 52335 were selected from the ORFs having the nucleotide sequence represented by SEQ ID NO: 4179.

[4669] The probes having the nucleotide sequence represented by SEQ ID NOS: 52336, 52337, 52338, 52339, 52340, 52341, 52342, 52343, 52344, 52345, 52346 were selected from the ORFs having the nucleotide sequence represented by SEQ ID NO: 4180.

[4670] The probes having the nucleotide sequence represented by SEQ ID NOS: 52347, 52348, 52349, 52350, 52351, 52352, 52353, 52354, 52355, 52356, 52357 were selected from the ORFs having the nucleotide sequence represented by SEQ ID NO: 4181.

[4671] The probes having the nucleotide sequence represented by SEQ ID NOS: 52358, 52359, 52360, 52361, 52362, 52363, 52364, 52365, 52366, 52367, 52368 were selected from the ORFs having the nucleotide sequence represented by SEQ ID NO: 4182.

[4672] The probes having the nucleotide sequence represented by SEQ ID NOS: 52369, 52370, 52371, 52372, 52373, 52374, 52375, 52376, 52377, 52378, 52379 were selected from the ORFs having the nucleotide sequence represented by SEQ ID NO: 4183.

[4673] The probes having the nucleotide sequence represented by SEQ ID NOS: 52380, 52381, 52382, 52383, 52384, 52385, 52386, 52387, 52388, 52389, 52390 were selected from the ORFs having the nucleotide sequence represented by SEQ ID NO: 4184.

[4674] The probes having the nucleotide sequence represented by SEQ ID NOS: 52391, 52392, 52393, 52394, 52395, 52396, 52397, 52398, 52399, 52400, 52401 were selected from the ORFs having the nucleotide sequence represented by SEQ ID NO: 4185.

[4675] The probes having the nucleotide sequence represented by SEQ ID NOS: 52402, 52403, 52404, 52405, 52406, 52407, 52408, 52409, 52410, 52411, 52412 were selected from the ORFs having the nucleotide sequence represented by SEQ ID NO: 4186.

[4676] The probes having the nucleotide sequence represented by SEQ ID NOS: 52413, 52414, 52415, 52416, 52417, 52418, 52419, 52420, 52421, 52422, 52423 were selected from the ORFs having the nucleotide sequence represented by SEQ ID NO: 4187.

[4677] The probes having the nucleotide sequence represented by SEQ ID NOS: 52424, 52425, 52426, 52427, 52428, 52429, 52430, 52431, 52432, 52433, 52434 were selected from the ORFs having the nucleotide sequence represented by SEQ ID NO: 4188.

[4678] The probes having the nucleotide sequence represented by SEQ ID NOS: 52435, 52436, 52437, 52438, 52439, 52440, 52441, 52442, 52443, 52444, 52445 were selected from the ORFs having the nucleotide sequence represented by SEQ ID NO: 4189.

[4679] The probes having the nucleotide sequence represented by SEQ ID NOS: 52446, 52447, 52448, 52449, 52450, 52451, 52452, 52453, 52454, 52455, 52456 were selected from the ORFs having the nucleotide sequence represented by SEQ ID NO: 4190.

[4680] The probes having the nucleotide sequence represented by SEQ ID NOS: 52457, 52458, 52459, 52460, 52461, 52462, 52463, 52464, 52465, 52466, 52467 were selected from the ORFs having the nucleotide sequence represented by SEQ ID NO: 4191.

[4681] The probes having the nucleotide sequence represented by SEQ ID NOS: 52468, 52469, 52470, 52471, 52472, 52473, 52474, 52475, 52476, 52477, 52478 were selected from the ORFs having the nucleotide sequence represented by SEQ ID NO: 4192.

[4682] The probes having the nucleotide sequence represented by SEQ ID NOS: 52479, 52480, 52481, 52482, 52483, 52484, 52485, 52486, 52487, 52488, 52489 were selected from the ORFs having the nucleotide sequence represented by SEQ ID NO: 4193.

[4683] The probes having the nucleotide sequence represented by SEQ ID NOS: 52490, 52491, 52492, 52493, 52494, 52495, 52496, 52497, 52498, 52499, 52500 were selected from the ORFs having the nucleotide sequence represented by SEQ ID NO: 4194.

[4684] The probes having the nucleotide sequence represented by SEQ ID NOS: 52501, 52502, 52503, 52504, 52505, 52506, 52507, 52508, 52509, 52510, 52511 were selected from the ORFs having the nucleotide sequence represented by SEQ ID NO: 4195.

[4685] The probes having the nucleotide sequence represented by SEQ ID NOS: 52512, 52513, 52514, 52515, 52516, 52517, 52518, 52519, 52520, 52521, 52522 were selected from the ORFs having the nucleotide sequence represented by SEQ ID NO: 4196.

[4686] The probes having the nucleotide sequence represented by SEQ ID NOS: 52523, 52524, 52525, 52526, 52527, 52528, 52529, 52530, 52531, 52532, 52533 were selected from the ORFs having the nucleotide sequence represented by SEQ ID NO: 4197.

[4687] The probes having the nucleotide sequence represented by SEQ ID NOS: 52534, 52535, 52536, 52537, 52538, 52539, 52540, 52541, 52542, 52543, 52544 were selected from the ORFs having the nucleotide sequence represented by. SEQ ID NO: 4198.

[4688] The probes having the nucleotide sequence represented by SEQ ID NOS: 52545, 52546, 52547, 52548, 52549, 52550, 52551, 52552, 52553, 52554, 52555 were selected from the ORFs having the nucleotide sequence represented by SEQ ID NO: 4199.

[4689] The probes having the nucleotide sequence represented by SEQ ID NOS: 52556, 52557, 52558, 52559, 52560, 52561, 52562, 52563, 52564, 52565, 52566 were selected from the ORFs having the nucleotide sequence represented by SEQ ID NO: 4200.

[4690] The probes having the nucleotide sequence represented by SEQ ID NOS: 52567, 52568, 52569, 52570, 52571, 52572, 52573, 52574, 52575, 52576, 52577 were selected from the ORFs having the nucleotide sequence represented by SEQ ID NO: 4201.

[4691] The probes having the nucleotide sequence represented by SEQ ID NOS: 52578, 52579, 52580, 52581, 52582, 52583, 52584, 52585, 52586, 52587, 52588 were selected from the ORFs having the nucleotide sequence represented by SEQ ID NO: 4202.

[4692] The probes having the nucleotide sequence represented by SEQ ID NOS: 52589, 52590, 52591, 52592, 52593, 52594, 52595, 52596, 52597, 52598, 52599 were selected from the ORFs having the nucleotide sequence represented by SEQ ID NO: 4203.

[4693] The probes having the nucleotide sequence represented by SEQ ID NOS: 52600, 52601, 52602, 52603, 52604, 52605, 52606, 52607, 52608, 52609, 52610 were selected from the ORFs having the nucleotide sequence represented by SEQ ID NO: 4204.

[4694] The probes having the nucleotide sequence represented by SEQ ID NOS: 52611, 52612, 52613, 52614, 52615, 52616, 52617, 52618, 52619, 52620, 52621 were selected from the ORFs having the nucleotide sequence represented by SEQ ID NO: 4205.

[4695] The probes having the nucleotide sequence represented by SEQ ID NOS: 52622, 52623, 52624, 52625, 52626, 52627, 52628, 52629, 52630, 52631, 52632 were selected from the ORFs having the nucleotide sequence represented by SEQ ID NO: 4206.

[4696] The probes having the nucleotide sequence represented by SEQ ID NOS: 52633, 52634, 52635, 52636, 52637, 52638, 52639, 52640, 52641, 52642, 52643 were selected from the ORFs having the nucleotide sequence represented by SEQ ID NO: 4207.

[4697] The probes having the nucleotide sequence represented by SEQ ID NOS: 52644, 52645, 52646, 52647, 52648, 52649, 52650, 52651, 52652, 52653, 52654 were selected from the ORFs having the nucleotide sequence represented by SEQ ID NO: 4208.

[4698] The probes having the nucleotide sequence represented by SEQ ID NOS: 52655, 52656, 52657,: 52658, 52659, 52660, 52661, 52662, 52663, 52664, 52665 were selected from the ORFs having the nucleotide sequence represented by SEQ ID NO: 4209.

[4699] The probes having the nucleotide sequence represented by SEQ ID NOS: 52666, 52667, 52668, 52669, 52670, 52671, 52672, 52673, 52674, 52675, 52676 were selected from the ORFs having the nucleotide sequence represented by SEQ ID NO: 4210.

[4700] The probes having the nucleotide sequence represented by SEQ ID NOS: 52677, 52678, 52679, 52680, 52681, 52682, 52683, 52684, 52685, 52686, 52687 were selected from the ORFs having the nucleotide sequence represented by SEQ ID NO: 4211.

[4701] The probes having the nucleotide sequence represented by SEQ ID NOS: 52688, 52689, 52690, 52691, 52692, 52693, 52694, 52695, 52696, 52697, 52698 were selected from the ORFs having the nucleotide sequence represented by SEQ ID NO: 4212.

[4702] The probes having the nucleotide sequence represented by SEQ ID NOS: 52699, 52700, 52701, 52702, 52703, 52704, 52705, 52706, 52707, 52708, 52709 were selected from the ORFs having the nucleotide sequence represented by SEQ ID NO: 4213.

[4703] The probes having the nucleotide sequence represented by SEQ ID NOS: 52710, 52711, 52712, 52713, 52714, 52715, 52716, 52717, 52718, 52719, 52720 were selected from the ORFs having the nucleotide sequence represented by SEQ ID NO: 4214.

[4704] The probes having the nucleotide sequence represented by SEQ ID NOS: 52721, 52722, 52723, 52724, 52725, 52726, 52727, 52728, 52729, 52730, 52731 were selected from the ORFs having the nucleotide sequence represented by SEQ ID NO: 4215.

[4705] The probes having the nucleotide sequence represented by SEQ ID NOS: 52732, 52733, 52734, 52735, 52736, 52737, 52738, 5,2739, 52740, 52741, 52742 were selected from the ORFs having the nucleotide sequence represented by SEQ ID NO: 4216.

[4706] The probes having the nucleotide sequence represented by SEQ ID NOS: 52743, 52744, 52745, 52746, 52747, 52748, 52749, 52750, 52751, 52752, 52753 were selected from the ORFs having the nucleotide sequence represented by SEQ ID NO: 4217.

[4707] The probes having the nucleotide sequence represented by SEQ ID NOS: 52754, 52755, 52756, 52757, 52758, 52759, 52760, 52761, 52762, 52763, 52764 were selected from the ORFs having the nucleotide sequence represented by SEQ ID NO: 4218.

[4708] The probes having the nucleotide sequence represented by SEQ ID NOS: 52765, 52766, 52767, 52768, 52769, 52770, 52771, 52772, 52773, 52774, 52775 were selected from the ORFs having the nucleotide sequence represented by SEQ ID NO: 4219.

[4709] The probes having the nucleotide sequence represented by SEQ ID NOS: 52776, 52777, 52778, 52779, 52780, 52781, 52782, 52783, 52784, 52785, 52786 were selected from the ORFs having the nucleotide sequence represented by SEQ ID NO: 4220.

[4710] The probes having the nucleotide sequence represented by SEQ ID NOS: 52787, 52788, 52789, 52790, 52791, 52792, 52793, 52794, 52795, 52796, 52797 were selected from the ORFs having the nucleotide sequence represented by SEQ ID NO: 4221.

[4711] The probes having the nucleotide sequence represented by SEQ ID NOS: 52798, 52799, 52800, 52801, 52802, 52803, 52804, 52805, 52806, 52807, 52808 were selected from the ORFs having the nucleotide sequence represented by SEQ ID NO: 4222.

[4712] The probes having the nucleotide sequence represented by SEQ ID NOS: 52809, 52810, 52811, 52812, 52813, 52814, 52815, 52816, 52817, 52818, 52819 were selected from the ORFs having the nucleotide sequence represented by SEQ ID NO: 4223.

[4713] The probes having the nucleotide sequence represented by SEQ ID NOS: 52820, 52821, 52822, 52823, 52824, 52825, 52826, 52827, 52828, 52829, 52830 were selected from the ORFs having the nucleotide sequence represented by SEQ ID NO: 4224.

[4714] The probes having the nucleotide sequence represented by SEQ ID NOS: 52831, 52832, 52833, 52834, 52835, 52836, 52837, 52838, 52839, 52840, 52841 were selected from the ORFs having the nucleotide sequence represented by SEQ ID NO: 4225.

[4715] The probes having the nucleotide sequence represented by SEQ ID NOS: 52842, 52843, 52844, 52845, 52846, 52847, 52848, 52849, 52850, 52851, 52852 were selected from the ORFs having the nucleotide sequence represented by SEQ ID NO: 4226.

[4716] The probes having the nucleotide sequence represented by SEQ ID NOS: 52853, 52854, 52855, 52856, 52857, 52858, 52859, 52860, 52861, 52862, 52863 were selected from the ORFs having the nucleotide sequence represented by SEQ ID NO: 4227.

[4717] The probes having the nucleotide sequence represented by SEQ ID NOS: 52864, 52865, 52866, 52867, 52868, 52869, 52870, 52871, 52872, 52873, 52874 were selected from the ORFs having the nucleotide sequence represented by SEQ ID NO: 4228.

[4718] The probes having the nucleotide sequence represented by SEQ ID NOS: 52875, 52876, 52877, 52878, 52879, 52880, 52881, 52882, 52883, 52884, 52885 were selected from the ORFs having the nucleotide sequence represented by SEQ ID NO: 4229.

[4719] The probes having the nucleotide sequence represented by SEQ ID NOS: 52886, 52887, 52888, 52889, 52890, 52891, 52892, 52893, 52894, 52895, 52896 were selected from the ORFs having the nucleotide sequence represented by SEQ ID NO: 4230.

[4720] The probes having the nucleotide sequence represented by SEQ ID NOS: 52897, 52898, 52899, 52900, 52901, 52902, 52903, 52904, 52905, 52906, 52907 were selected from the ORFs having the nucleotide sequence represented by SEQ ID NO: 4231.

[4721] The probes having the nucleotide sequence represented by SEQ ID NOS: 52908, 52909, 52910, 52911, 52912, 52913, 52914, 52915, 52916, 52917, 52918 were selected from the ORFs having the nucleotide sequence represented by SEQ ID NO: 4232.

[4722] The probes having the nucleotide sequence represented by SEQ ID NOS: 52919, 52920, 52921, 52922, 52923, 52924, 52925, 52926, 52927, 52928, 52929 were selected from the ORFs having the nucleotide sequence represented by SEQ ID NO: 4233.

[4723] The probes having the nucleotide sequence represented by SEQ ID NOS: 52930, 52931, 52932, 52933, 52934, 52935, 52936, 52937, 52938, 52939, 52940 were selected from the ORFs having the nucleotide sequence represented by SEQ ID NO: 4234.

[4724] The probes having the nucleotide sequence represented by SEQ ID NOS: 52941, 52942, 52943, 52944, 52945, 52946, 52947, 52948, 52949, 52950, 52951 were selected from the ORFs having the nucleotide sequence represented by SEQ ID NO: 4235.

[4725] The probes having the nucleotide sequence represented by SEQ ID NOS: 52952, 52953, 52954, 52955, 52956, 52957, 52958, 52959, 52960, 52961, 52962 were selected from the ORFs having the nucleotide sequence represented by SEQ ID NO: 4236.

[4726] The probes having the nucleotide sequence represented by SEQ ID NOS: 52963, 52964, 52965, 52966, 52967, 52968, 52969, 52970, 52971, 52972, 52973 were selected from the ORFs having the nucleotide sequence represented by SEQ ID NO: 4237.

[4727] The probes having the nucleotide sequence represented by SEQ ID NOS: 52974, 52975, 52976, 52977, 52978, 52979, 52980, 52981, 52982, 52983, 52984 were selected from the ORFs having the nucleotide sequence represented by SEQ ID NO: 4238.

[4728] The probes having the nucleotide sequence represented by SEQ ID NOS: 52985, 52986, 52987, 52988, 52989, 52990, 52991, 52992, 52993, 52994, 52995 were selected from the ORFs having the nucleotide sequence represented by SEQ ID NO: 4239.

[4729] The probes having the nucleotide sequence represented by SEQ ID NOS: 52996, 52997, 52998, 52999, 53000, 53001, 53002, 53003, 53004, 53005, 53006 were selected from the ORFs having the nucleotide sequence represented by SEQ ID NO: 4240.

[4730] The probes having the nucleotide sequence represented by SEQ ID NOS: 53007, 53008, 53009, 53010, 53011, 53012, 53013, 53014, 53015, 53016, 53017 were selected from the ORFs having the nucleotide sequence represented by SEQ ID NO: 4241.

[4731] The probes having the nucleotide sequence represented by SEQ ID NOS: 53018, 53019, 53020, 53021, 53022, 53023, 53024, 53025, 53026, 53027, 53028 were selected from the ORFs having the nucleotide sequence represented by SEQ ID NO: 4242.

[4732] The probes having the nucleotide sequence represented by SEQ ID NOS: 53029, 53030, 53031, 53032, 53033, 53034, 53035, 53036, 53037, 53038, 53039 were selected from the ORFs having the nucleotide sequence represented by SEQ ID NO: 4243.

[4733] The probes having the nucleotide sequence represented by SEQ ID NOS: 53040, 53041, 53042, 53043, 53044, 53045, 53046, 53047, 53048, 53049, 53050 were selected from the ORFs having the nucleotide sequence represented by SEQ ID NO: 4244.

[4734] The probes having the nucleotide sequence represented by SEQ ID NOS: 53051, 53052, 53053, 53054, 53055, 53056, 53057, 53058, 53059, 53060, 53061 were selected from the ORFs having the nucleotide sequence represented by SEQ ID NO: 4245.

[4735] The probes having the nucleotide sequence represented by SEQ ID NOS: 53062, 53063, 53064, 53065, 53066, 53067, 53068, 53069, 53070, 53071, 53072 were selected from the ORFs having the nucleotide sequence represented by SEQ ID NO: 4246.

[4736] The probes having the nucleotide sequence represented by SEQ ID NOS: 53073, 53074, 53075, 53076, 53077, 53078, 53079, 53080, 53081, 53082, 53083 were selected from the ORFs having the nucleotide sequence represented by SEQ ID NO: 4247.

[4737] The probes having the nucleotide sequence represented by SEQ ID NOS: 53084, 53085, 53086, 53087, 53088, 53089, 53090, 53091, 53092, 53093, 53094 were selected from the ORFs having the nucleotide sequence represented by SEQ ID NO: 4248.

[4738] The probes having the nucleotide sequence represented by SEQ ID NOS: 53095, 53096, 53097, 53098, 53099, 53100, 53101, 53102, 53103, 53104, 53105 were selected from the ORFs having the nucleotide sequence represented by SEQ ID NO: 4249.

[4739] The probes having the nucleotide sequence represented by SEQ ID NOS: 53106, 53107, 53108, 53109, 53110, 53111, 53112, 53113, 53114, 53115, 53116 were selected from the ORFs having the nucleotide sequence represented by SEQ ID NO: 4250.

[4740] The probes having the nucleotide sequence represented by SEQ ID NOS: 53117, 53118, 53119, 53120, 53121, 53122, 53123, 53124, 53125, 53126, 53127 were selected from the ORFs having the nucleotide sequence represented by SEQ ID NO: 4251.

[4741] The probes having the nucleotide sequence represented by SEQ ID NOS: 53128, 53129, 53130, 53131, 53132, 53133, 53134, 53135, 53136, 53137, 53138 were selected from the ORFs having the nucleotide sequence represented by SEQ ID NO: 4252.

[4742] The probes having the nucleotide sequence represented by SEQ ID NOS: 53139, 53140, 53141, 53142, 53143, 53144, 53145, 53146, 53147, 53148, 53149 were selected from the ORFs having the nucleotide sequence represented by SEQ ID NO: 4253.

[4743] The probes having the nucleotide sequence represented by SEQ ID NOS: 53150, 53151, 53152, 53153, 53154, 53155, 53156, 53157, 53158, 53159, 53160 were selected from the ORFs having the nucleotide sequence represented by SEQ ID NO: 4254.

[4744] The probes having the nucleotide sequence represented by SEQ ID NOS: 53161, 53162, 53163, 53164, 53165, 53166, 53167, 53168, 53169, 53170, 53171 were selected from the ORFs having the nucleotide sequence represented by SEQ ID NO: 4255.

[4745] The probes having the nucleotide sequence represented by SEQ ID NOS: 53172, 53173, 53174, 53175, 53176, 53177, 53178, 53179, 53180, 53181, 53182 were selected from the ORFs having the nucleotide sequence represented by SEQ ID NO: 4256.

[4746] The probes having the nucleotide sequence represented by SEQ ID NOS: 53183, 53184, 53185, 53186, 53187, 53188, 53189, 53190, 53191, 53192, 53193 were selected from the ORFs having the nucleotide sequence represented by SEQ ID NO: 4257.

[4747] The probes having the nucleotide sequence represented by SEQ ID NOS: 53194, 53195, 53196, 53197, 53198, 53199, 53200, 53201, 53202, 53203, 53204 were selected from the ORFs having the nucleotide sequence represented by SEQ ID NO: 4258.

[4748] The probes having the nucleotide sequence represented by SEQ ID NOS: 53205, 53206, 53207, 53208, 53209, 53210, 53211, 53212, 53213, 53214, 53215 were selected from the ORFs having the nucleotide sequence represented by SEQ ID NO: 4259.

[4749] The probes having the nucleotide sequence represented by SEQ ID NOS: 53216, 53217, 53218, 53219, 53220, 53221, 53222, 53223, 53224, 53225, 53226 were selected from the ORFs having the nucleotide sequence represented by SEQ ID NO: 4260.

[4750] The probes having the nucleotide sequence represented by SEQ ID NOS: 53227, 53228, 53229, 53230, 53231, 53232, 53233, 53234, 53235, 53236, 53237 were selected from the ORFs having the nucleotide sequence represented by SEQ ID NO: 4261.

[4751] The probes having the nucleotide sequence represented by SEQ ID NOS: 53238, 53239, 53240, 53241, 53242, 53243, 53244, 53245, 53246, 53247, 53248 were selected from the ORFs having the nucleotide sequence represented by SEQ ID NO: 4262.

[4752] The probes having the nucleotide sequence represented by SEQ ID NOS: 53249, 53250, 53251, 53252, 53253, 53254, 53255, 53256, 53257, 53258, 53259 were selected from the ORFs having the nucleotide sequence represented by SEQ ID NO: 4263.

[4753] The probes having the nucleotide sequence represented by SEQ ID NOS: 53260, 53261, 53262, 53263, 53264, 53265, 53266, 53267, 53268, 53269, 53270 were selected from the ORFs having the nucleotide sequence represented by SEQ ID NO: 4264.

[4754] The probes having the nucleotide sequence represented by SEQ ID NOS: 53271, 53272, 53273, 53274, 53275, 53276, 53277, 53278, 53279, 53280, 53281 were selected from the ORFs having the nucleotide sequence represented by SEQ ID NO: 4265.

[4755] The probes having the nucleotide sequence represented by SEQ ID NOS: 53282, 53283, 53284, 53285, 53286, 53287, 53288, 53289, 53290, 53291, 53292 were selected from the ORFs having the nucleotide sequence represented by SEQ ID NO: 4266.

[4756] The probes having the nucleotide sequence represented by SEQ ID NOS: 53293, 53294, 53295, 53296, 53297, 53298, 53299, 53300, 53301, 53302, 53303 were selected from the ORFs having the nucleotide sequence represented by SEQ ID NO: 4267.

[4757] The probes having the nucleotide sequence represented by SEQ ID NOS: 53304, 53305, 53306, 53307, 53308, 53309, 53310, 53311, 53312, 53313, 53314 were selected from the ORFs having the nucleotide sequence represented by SEQ ID NO: 4268.

[4758] The probes having the nucleotide sequence represented by SEQ ID NOS: 53315, 53316, 53317, 53318, 53319, 53320, 53321, 53322, 53323, 53324, 53325 were selected from the ORFs having the nucleotide sequence represented by SEQ ID NO: 4269.

[4759] The probes having the nucleotide sequence represented by SEQ ID NOS: 53326, 53327, 53328, 53329, 53330, 53331, 53332, 53333, 53334, 53335, 53336 were selected from the ORFs having the nucleotide sequence represented by SEQ ID NO: 4270.

[4760] The probes having the nucleotide sequence represented by SEQ ID NOS: 53337, 53338, 53339, 53340, 53341, 53342, 53343, 53344, 53345, 53346, 53347 were selected from the ORFs having the nucleotide sequence represented by SEQ ID NO: 4271.

[4761] The probes having the nucleotide sequence represented by SEQ ID NOS: 53348, 53349, 53350, 53351, 53352, 53353, 53354, 53355, 53356, 53357, 53358 were selected from the ORFs having the nucleotide sequence represented by SEQ ID NO: 4272.

[4762] The probes having the nucleotide sequence represented by SEQ ID NOS: 53359, 53360, 53361, 53362, 53363, 53364, 53365, 53366, 53367, 53368, 53369 were selected from the ORFs having the nucleotide sequence represented by SEQ ID NO: 4273.

[4763] The probes having the nucleotide sequence represented by SEQ ID NOS: 53370, 53371, 53372, 53373, 53374, 53375, 53376, 53377, 53378, 53379, 53380 were selected from the ORFs having the nucleotide sequence represented by SEQ ID NO: 4274.

[4764] The probes having the nucleotide sequence represented by SEQ ID NOS: 53381, 53382, 53383, 53384, 53385, 53386, 53387, 53388, 53389, 53390, 53391, 53392, 53393, 53394, 53395, 53396, 53397, 53398, 53399, 53400, 53401, 53402, 53403, 53404, 53405, 53406, 53407, 53408, 53409, 53410, 53411, 53412, 53413 were selected from the ORFs having the nucleotide sequence represented by SEQ ID NO: 4275.

[4765] The probes having the nucleotide sequence represented by SEQ ID NOS: 53414, 53415, 53416, 53417, 53418, 53419, 53420, 53421, 53422, 53423, 53424 were selected from the ORFs having the nucleotide sequence represented by SEQ ID NO: 4276.

[4766] The probes having the nucleotide sequence represented by SEQ ID NOS: 53425, 53426, 53427, 53428, 53429, 53430, 53431, 53432, 53433, 53434, 53435 were selected from the ORFs having the nucleotide sequence represented by SEQ ID NO: 4277.

[4767] The probes having the nucleotide sequence represented by SEQ ID NOS: 53436, 53437, 53438, 53439, 53440, 53441, 53442, 53443, 53444, 53445, 53446 were selected from the ORFs having the nucleotide sequence represented by SEQ ID NO: 4278.

[4768] The probes having the nucleotide sequence represented by SEQ ID NOS: 53447, 53448, 53449, 53450, 53451, 53452, 53453, 53454, 53455, 53456, 53457, 53458, 53459, 53460, 53461, 53462, 53463, 53464, 53465, 53466, 53467, 53468 were selected from the ORFs having the nucleotide sequence represented by SEQ ID NO: 4279.

[4769] The probes having the nucleotide sequence represented by SEQ ID NOS: 53469, 53470, 53471, 53472, 53473, 53474, 53475, 53476, 53477, 53478, 53479 were selected from the ORFs having the nucleotide sequence represented by SEQ ID NO: 4280.

[4770] The probes having the nucleotide sequence represented by SEQ ID NOS: 53480, 53481, 53482, 53483, 53484, 53485, 53486, 53487, 53488, 53489, 53490 were selected from the ORFs having the nucleotide sequence represented by SEQ ID NO: 4281.

[4771] The probes having the nucleotide sequence represented by SEQ ID NOS: 53491, 53492, 53493, 53494, 53495, 53496, 53497, 53498, 53499, 53500, 53501 were selected from the ORFs having the nucleotide sequence represented by SEQ ID NO: 4282.

[4772] The probes having the nucleotide sequence represented by SEQ ID NOS: 53502, 53503, 53504, 53505, 53506, 53507, 53508, 53509, 53510, 53511, 53512 were selected from the ORFs having the nucleotide sequence represented by SEQ ID NO: 4283.

[4773] The probes having the nucleotide sequence represented by SEQ ID NOS: 53513, 53514, 53515, 53516, 53517, 53518, 53519, 53520, 53521, 53522, 53523 were selected from the ORFs having the nucleotide sequence represented by SEQ ID NO: 4284.

[4774] The probes having the nucleotide sequence represented by SEQ ID NOS: 53524, 53525, 53526, 53527, 53528, 53529, 53530, 53531, 53532, 53533, 53534 were selected from the ORFs having the nucleotide sequence represented by SEQ ID NO: 4285.

[4775] The probes having the nucleotide sequence represented by SEQ ID NOS: 53535, 53536, 53537, 53538, 53539, 53540, 53541, 53542, 53543, 53544, 53545 were selected from the ORFs having the nucleotide sequence represented by SEQ ID NO: 4286.

[4776] The probes having the nucleotide sequence represented by SEQ ID NOS: 53546, 53547, 53548, 53549, 53550, 53551, 53552, 53553, 53554, 53555, 53556 were selected from the ORFs having the nucleotide sequence represented by SEQ ID NO: 4287.

[4777] The probes having the nucleotide sequence represented by SEQ ID NOS: 53557, 53558, 53559, 53560, 53561, 53562, 53563, 53564, 53565, 53566, 53567 were selected from the ORFs having the nucleotide sequence represented by SEQ ID NO: 4288.

[4778] The probes having the nucleotide sequence represented by SEQ ID NOS: 53568, 53569, 53570, 53571, 53572, 53573, 53574, 53575, 53576, 53577, 53578 were selected from the ORFs having the nucleotide sequence represented by SEQ ID NO: 4289.

[4779] The probes having the nucleotide sequence represented by SEQ ID NOS: 53579, 53580, 53581, 53582, 53583, 53584, 53585, 53586, 53587, 53588, 53589 were selected from the ORFs having the nucleotide sequence represented by SEQ ID NO: 4290.

[4780] The probes having the nucleotide sequence represented by SEQ ID NOS: 53590, 53591, 53592, 53593, 53594, 53595, 53596, 53597, 53598, 53599, 53600 were selected from the ORFs having the nucleotide sequence represented by SEQ ID NO: 4291.

[4781] The probes having the nucleotide sequence represented by SEQ ID NOS. 53601, 53602, 53603, 53604, 53605, 53606, 53607, 53608, 53609, 53610, 53611 were selected from the ORFs having the nucleotide sequence represented by SEQ ID NO: 4292.

[4782] The probes having the nucleotide sequence represented by SEQ ID NOS: 53612, 53613, 53614, 53615, 53616, 53617, 53618, 53619, 53620, 53621, 53622 were selected from the ORFs having the nucleotide sequence represented by SEQ ID NO: 4293.

[4783] The probes having the nucleotide sequence represented by SEQ ID NOS: 53623, 53624, 53625, 53626, 53627, 53628, 53629, 53630, 53631, 53632, 53633, 53634, 53635, 53636, 53637, 53638, 53639, 53640, 53641, 53642, 53643, 53644 were selected from the ORFs having the nucleotide sequence represented by SEQ ID NO: 4294.

[4784] The probes having the nucleotide sequence represented by SEQ ID NOS: 53645, 53646, 53647, 53648, 53649, 53650, 53651, 53652, 53653, 53654, 53655 were selected from the ORFs having the nucleotide sequence represented by SEQ ID NO: 4295.

[4785] The probes having the nucleotide sequence represented by SEQ ID NOS: 53656, 53657, 53658, 53659, 53660, 53661, 53662, 53663, 53664, 53665, 53666 were selected from the ORFs having the nucleotide sequence represented by SEQ ID NO: 4296.

[4786] The probes having the nucleotide sequence represented by SEQ ID NOS: 53667, 53668, 53669, 53670, 53671, 53672, 53673, 53674, 53675, 53676, 53677 were selected from the ORFs having the nucleotide sequence represented by SEQ ID NO: 4297.

[4787] The probes having the nucleotide sequence represented by SEQ ID NOS: 53678, 53679, 53680, 53681, 53682, 53683, 53684, 53685, 53686, 53687, 53688 were selected from the ORFs having the nucleotide sequence represented by SEQ ID NO: 4298.

[4788] The probes having the nucleotide sequence represented by SEQ ID NOS: 53689, 53690, 53691, 53692, 53693, 53694, 53695, 53696, 53697, 53698, 53699 were selected from the ORFs having the nucleotide sequence represented by SEQ ID NO: 4299.

[4789] The probes having the nucleotide sequence represented by SEQ ID NOS: 53700, 53701, 53702, 53703, 53704, 53705, 53706, 53707, 53708, 53709, 53710 were selected from the ORFs having the nucleotide sequence represented by SEQ ID NO: 4300.

[4790] The probes having the nucleotide sequence represented by SEQ ID NOS: 53711, 53712, 53713, 53714, 53715, 53716, 53717, 53718, 53719, 53720, 53721 were selected from the ORFs having the nucleotide sequence represented by SEQ ID NO: 4301.

[4791] The probes having the nucleotide sequence represented by SEQ ID NOS: 53722, 53723, 53724, 53725, 53726, 53727, 53728, 53729, 53730, 53731, 53732 were selected from the ORFs having the nucleotide sequence represented by SEQ ID NO: 4302.

[4792] The probes having the nucleotide sequence represented by SEQ ID NOS: 53733, 53734, 53735, 53736, 53737, 53738, 53739, 53740, 53741, 53742, 53743 were selected from the ORFs having the nucleotide sequence represented by SEQ ID NO: 4303.

[4793] The probes having the nucleotide sequence represented by SEQ ID NOS: 53744, 53745, 53746, 53747, 53748, 53749, 53750, 53751, 53752, 53753, 53754 were selected from the ORFs having the nucleotide sequence represented by SEQ ID NO: 4304.

[4794] The probes having the nucleotide sequence represented by SEQ ID NOS: 53755, 53756, 53757, 53758, 53759, 53760, 53761, 53762, 53763, 53764, 53765 were selected from the ORFs having the nucleotide sequence represented by SEQ ID NO: 4305.

[4795] The probes having the nucleotide sequence represented by SEQ ID NOS: 53766, 53767, 53768, 53769, 53770, 53771, 53772, 53773, 53774, 53775, 53776 were selected from the ORFs having the nucleotide sequence represented by SEQ ID NO: 4306.

[4796] The probes having the nucleotide sequence represented by SEQ ID NOS: 53777, 53778, 53779, 53780, 53781, 53782, 53783, 53784, 53785, 53786, 53787 were selected from the ORFs having the nucleotide sequence represented by SEQ ID NO: 4307.

[4797] The probes having the nucleotide sequence represented by SEQ ID NOS: 53788, 53789, 53790, 53791, 53792, 53793, 53794, 53795, 53796, 53797, 53798 were selected from the ORFs having the nucleotide sequence represented by SEQ ID NO: 4308.

[4798] The probes having the nucleotide sequence represented by SEQ ID NOS: 53799, 53800, 53801, 53802, 53803, 53804, 53805, 53806, 53807, 53808, 53809 were selected from the ORFs having the nucleotide sequence represented by SEQ ID NO: 4309.

[4799] The probes having the nucleotide sequence represented by SEQ ID NOS: 53810, 53811, 53812, 53813, 53814, 53815, 53816, 53817, 53818, 53819, 53820 were selected from the ORFs having the nucleotide sequence represented by SEQ ID NO: 4310.

[4800] The probes having the nucleotide sequence represented by SEQ ID NOS: 53821, 53822, 53823, 53824, 53825, 53826, 53827, 53828, 53829, 53830, 53831 were selected from the ORFs having the nucleotide sequence represented by SEQ ID NO: 4311.

[4801] The probes having the nucleotide sequence represented by SEQ ID NOS: 53832, 53833, 53834, 53835, 53836, 53837, 53838, 53839, 53840, 53841, 53842 were selected from the ORFs having the nucleotide sequence represented by SEQ ID NO: 4312.

[4802] The probes having the nucleotide sequence represented by SEQ ID NOS: 53843, 53844, 53845, 53846, 53847, 53848, 53849, 53850, 53851, 53852, 53853 were selected from the ORFs having the nucleotide sequence represented by SEQ ID NO: 4313.

[4803] The probes having the nucleotide sequence represented by SEQ ID NOS: 53854, 53855, 53856, 53857, 53858, 53859, 53860, 53861, 53862, 53863, 53864 were selected from the ORFs having the nucleotide sequence represented by SEQ ID NO: 4314.

[4804] The probes having the nucleotide sequence represented by SEQ ID NOS: 53865, 53866, 53867, 53868, 53869, 53870, 53871, 53872, 53873, 53874, 53875 were selected from the ORFs having the nucleotide sequence represented by SEQ ID NO: 4315.

[4805] The probes having the nucleotide sequence represented by SEQ ID NOS: 53876, 53877, 53878, 53879, 53880, 53881, 53882, 53883, 53884, 53885, 53886 were selected from the ORFs having the nucleotide sequence represented by SEQ ID NO: 4316.

[4806] The probes having the nucleotide sequence represented by SEQ ID NOS: 53887, 53888, 53889, 53890, 53891, 53892, 53893, 53894, 53895, 53896, 53897 were selected from the ORFs having the nucleotide sequence represented by SEQ ID NO: 4317.

[4807] The probes having the nucleotide sequence represented by SEQ ID NOS: 53898, 53899, 53900, 53901, 53902, 53903, 53904, 53905, 53906, 53907, 53908 were selected from the ORFs having the nucleotide sequence represented by SEQ ID NO: 4318.

[4808] The probes having the nucleotide sequence represented by SEQ ID NOS: 53909, 53910, 53911, 53912, 53913, 53914, 53915, 53916, 53917, 53918, 53919 were selected from the ORFs having the nucleotide sequence represented by SEQ ID NO: 4319.

[4809] The probes having the nucleotide sequence represented by SEQ ID NOS: 53920, 53921, 53922, 53923, 53924, 53925, 53926, 53927, 53928, 53929, 53930 were selected from the ORFs having the nucleotide sequence represented by SEQ ID NO: 4320.

[4810] The probes having the nucleotide sequence represented by SEQ ID NOS: 53931, 53932, 53933, 53934, 53935, 53936, 53937, 53938, 53939, 53940, 53941 were selected from the ORFs having the nucleotide sequence represented by SEQ ID NO: 4321.

[4811] The probes having the nucleotide sequence represented by SEQ ID NOS: 53942, 53943, 53944, 53945, 53946, 53947, 53948, 53949, 53950, 53951, 53952 were selected from the ORFs having the nucleotide sequence represented by SEQ ID NO: 4322.

[4812] The probes having the nucleotide sequence represented by SEQ ID NOS: 53953, 53954, 53955, 53956, 53957, 53958, 53959, 53960, 53961, 53962, 53963 were selected from the ORFs having the nucleotide sequence represented by SEQ ID NO: 4323.

[4813] The probes having the nucleotide sequence represented by SEQ ID NOS: 53964, 53965, 53966, 53967, 53968, 53969, 53970, 53971, 53972, 53973, 53974, 53975, 53976, 53977, 53978, 53979, 53980, 53981, 53982, 53983, 53984, 53985 were selected from the ORFs having the nucleotide sequence represented by SEQ ID NO: 4324.

[4814] The probes having the nucleotide sequence represented by SEQ ID NOS: 53986, 53987, 53988, 53989, 53990, 53991, 53992, 53993, 53994, 53995, 53996 were selected from the ORFs having the nucleotide sequence represented by SEQ ID NO: 4325.

[4815] The probes having the nucleotide sequence represented by SEQ ID NOS: 53997, 53998, 53999, 54000, 54001, 54002, 54003, 54004, 54005, 54006, 54007 were selected from the ORFs having the nucleotide sequence represented by SEQ ID NO: 4326.

[4816] The probes having the nucleotide sequence represented by SEQ ID NOS: 54008, 54009, 54010, 54011, 54012, 54013, 54014, 54015, 54016, 54017, 54018 were selected from the ORFs having the nucleotide sequence represented by SEQ ID NO: 4327.

[4817] The probes having the nucleotide sequence represented by SEQ ID NOS: 54019, 54020, 54021, 54022, 54023, 54024, 54025, 54026, 54027, 54028, 54029 were selected from the ORFs having the nucleotide sequence represented by SEQ ID NO: 4328.

[4818] The probes having the nucleotide sequence represented by SEQ ID NOS: 54030, 54031, 54032, 54033, 54034, 54035, 54036, 54037, 54038, 54039, 54040 were selected from the ORFs having the nucleotide sequence represented by SEQ ID NO: 4329.

[4819] The probes having the nucleotide sequence represented by SEQ ID NOS: 54041, 54042, 54043, 54044, 54045, 54046, 54047, 54048, 54049, 54050, 54051 were selected from the ORFs having the nucleotide sequence represented by SEQ ID NO: 4330.

[4820] The probes having the nucleotide sequence represented by SEQ ID NOS: 54052, 54053, 54054, 54055, 54056, 54057, 54058, 54059, 54060, 54061, 54062 were selected from the ORFs having the nucleotide sequence represented by SEQ ID NO: 4331.

[4821] The probes having the nucleotide sequence represented by SEQ ID NOS: 54063, 54064, 54065, 54066, 54067, 54068, 54069, 54070, 54071, 54072, 54073 were selected from the ORFs having the nucleotide sequence represented by SEQ ID NO: 4332.

[4822] The probes having the nucleotide sequence represented by SEQ ID NOS: 54074, 54075, 54076, 54077, 54078, 54079, 54080, 54081, 54082, 54083, 54084 were selected from the ORFs having the nucleotide sequence represented by SEQ ID NO: 4333.

[4823] The probes having the nucleotide sequence represented by SEQ ID NOS: 54085, 54086, 54087, 54088, 54089, 54090, 54091, 54092, 54093, 54094, 54095 were selected from the ORFs having the nucleotide sequence represented by SEQ ID NO: 4334.

[4824] The probes having the nucleotide sequence represented by SEQ ID NOS: 54096, 54097, 54098, 54099, 54100, 54101, 54102, 54103, 54104, 54105, 54106 were selected from the ORFs having the nucleotide sequence represented by SEQ ID NO: 4335.

[4825] The probes having the nucleotide sequence represented by SEQ ID NOS: 54107, 54108, 54109, 54110, 54111, 54112, 54113, 54114, 54115, 54116, 54117 were selected from the ORFs having the nucleotide sequence represented by SEQ ID NO: 4336.

[4826] The probes having the nucleotide sequence represented by SEQ ID NOS: 54118, 54119, 54120, 54121, 54122, 54123, 54124, 54125, 54126, 54127, 54128 were selected from the ORFs having the nucleotide sequence represented by SEQ ID NO: 4337.

[4827] The probes having the nucleotide sequence represented by SEQ ID NOS: 54129, 54130, 54131, 54132, 54133, 54134, 54135, 54136, 54137, 54138, 54139 were selected from the ORFs having the nucleotide sequence represented by SEQ ID NO: 4338.

[4828] The probes having the nucleotide sequence represented by SEQ ID NOS: 54140, 54141, 54142, 54143, 54144, 54145, 54146, 54147, 54148, 54149, 54150 were selected from the ORFs having the nucleotide sequence represented by SEQ ID NO: 4339.

[4829] The probes having the nucleotide sequence represented by SEQ ID NOS: 54151, 54152, 54153, 54154, 54155, 54156, 54157, 54158, 54159, 54160, 54161 were selected from the ORFs having the nucleotide sequence represented by SEQ ID NO: 4340.

[4830] The probes having the nucleotide sequence represented by SEQ ID NOS: 54162, 54163, 54164, 54165, 54166, 54167, 54168, 54169, 54170, 54171, 54172 were selected from the ORFs having the nucleotide sequence represented by SEQ ID NO: 4341.

[4831] The probes having the nucleotide sequence represented by SEQ ID NOS: 54173, 54174, 54175, 54176, 54177, 54178, 54179, 54180, 54181, 54182, 54183 were selected from the ORFs having the nucleotide sequence represented by SEQ ID NO: 4342.

[4832] The probes having the nucleotide sequence represented by SEQ ID NOS: 54184, 54185, 54186, 54187, 54188, 54189, 54190, 54191, 54192, 54193, 54194 were selected from the ORFs having the nucleotide sequence represented by SEQ ID NO: 4343.

[4833] The probes having the nucleotide sequence represented by SEQ ID NOS: 54195, 54196, 54197, 54198, 54199, 54200, 54201, 54202, 54203, 54204, 54205 were selected from the ORFs having the nucleotide sequence represented by SEQ ID NO: 4344.

[4834] The probes having the nucleotide sequence represented by SEQ ID NOS: 54206, 54207, 54208, 54209, 54210, 54211, 54212, 54213, 54214, 54215, 54216 were selected from the ORFs having the nucleotide sequence represented by SEQ ID NO: 4345.

[4835] The probes having the nucleotide sequence represented by SEQ ID NOS: 54217, 54218, 54219, 54220, 54221, 54222, 54223, 54224, 54225, 54226, 54227 were selected from the ORFs having the nucleotide sequence represented by SEQ ID NO: 4346.

[4836] The probes having the nucleotide sequence represented by SEQ ID NOS: 54228, 54229, 54230, 54231, 54232, 54233, 54234, 54235, 54236, 54237, 54238 were selected from the ORFs having the nucleotide sequence represented by SEQ ID NO: 4347.

[4837] The probes having the nucleotide sequence represented by SEQ ID NOS: 54239, 54240, 54241, 54242, 54243, 54244, 54245, 54246, 54247, 54248, 54249 were selected from the ORFs having the nucleotide sequence represented by SEQ ID NO: 4348.

[4838] The probes having the nucleotide sequence represented by SEQ ID NOS: 54250, 54251, 54252, 54253, 54254, 54255, 54256, 54257, 54258, 54259, 54260 were selected from the ORFs having the nucleotide sequence represented by SEQ ID NO: 4349.

[4839] The probes having the nucleotide sequence represented by SEQ ID NOS: 54261, 54262, 54263, 54264, 54265, 54266, 54267, 54268, 54269, 54270, 54271 were selected from the ORFs having the nucleotide sequence represented by SEQ ID NO: 4350.

[4840] The probes having the nucleotide sequence represented by SEQ ID NOS: 54272, 54273, 54274, 54275, 54276, 54277, 54278, 54279, 54280, 54281, 54282 were selected from the ORFs having the nucleotide sequence represented by SEQ ID NO: 4351.

[4841] The probes having the nucleotide sequence represented by SEQ ID NOS: 54283, 54284, 54285, 54286, 54287, 54288, 54289, 54290, 54291, 54292, 54293 were selected from the ORFs having the nucleotide sequence represented by SEQ ID NO: 4352.

[4842] The probes having the nucleotide sequence represented by SEQ ID NOS: 54294, 54295, 54296, 54297, 54298, 54299, 54300, 54301, 54302, 54303, 54304 were selected from the ORFs having the nucleotide sequence represented by SEQ ID NO: 4353.

[4843] The probes having the nucleotide sequence represented by SEQ ID NOS: 54305, 54306, 54307, 54308, 54309, 54310, 54311, 54312, 54313, 54314, 54315 were selected from the ORFs having the nucleotide sequence represented by SEQ ID NO: 4354.

[4844] The probes having the nucleotide sequence represented by SEQ ID NOS: 54316, 54317, 54318, 54319, 54320, 54321, 54322, 54323, 54324, 54325, 54326 were selected from the ORFs having the nucleotide sequence represented by SEQ ID NO: 4355.

[4845] The probes having the nucleotide sequence represented by SEQ ID NOS: 54327, 54328, 54329, 54330, 54331, 54332, 54333, 54334, 54335, 54336, 54337 were selected from the ORFs having the nucleotide sequence represented by SEQ ID NO: 4356.

[4846] The probes having the nucleotide sequence represented by SEQ ID NOS: 54338, 54339, 54340, 54341, 54342, 54343, 54344, 54345, 54346, 54347, 54348 were selected from the ORFs having the nucleotide sequence represented by SEQ ID NO: 4357.

[4847] The probes having the nucleotide sequence represented by SEQ ID NOS: 54349, 54350, 54351, 54352, 54353, 54354, 54355, 54356, 54357, 54358, 54359 were selected from the ORFs having the nucleotide sequence represented by SEQ ID NO: 4358.

[4848] The probes having the nucleotide sequence represented by SEQ ID NOS: 54360, 54361, 54362, 54363, 54364, 54365, 54366, 54367, 54368, 54369, 54370 were selected from the ORFs having the nucleotide sequence represented by SEQ ID NO: 4359.

[4849] The probes having the nucleotide sequence represented by SEQ ID NOS: 54371, 54372, 54373, 54374, 54375, 54376, 54377, 54378, 54379, 54380, 54381 were selected from the ORFs having the nucleotide sequence represented by SEQ ID NO: 4360.

[4850] The probes having the nucleotide sequence represented by SEQ ID NOS: 54382, 54383, 54384, 54385, 54386, 54387, 54388, 54389, 54390, 54391, 54392 were selected from the ORFs having the nucleotide sequence represented by SEQ ID NO: 4361.

[4851] The probes having the nucleotide sequence represented by SEQ ID NOS: 54393, 54394, 54395, 54396, 54397, 54398, 54399, 54400, 54401, 54402, 54403 were selected from the ORFs having the nucleotide sequence represented by SEQ ID NO: 4362.

[4852] The probes having the nucleotide sequence represented by SEQ ID NOS: 54404, 54405, 54406, 54407, 54408, 54409, 54410, 54411, 54412, 54413, 54414 were selected from the ORFs having the nucleotide sequence represented by SEQ ID NO: 4363.

[4853] The probes having the nucleotide sequence represented by SEQ ID NOS: 54415, 54416, 54417, 54418, 54419, 54420, 54421, 54422, 54423, 54424, 54425 were selected from the ORFs having the nucleotide sequence represented by SEQ ID NO: 4364.

[4854] The probes having the nucleotide sequence represented by SEQ ID NOS: 54426, 54427, 54428, 54429, 54430, 54431, 54432, 54433, 54434, 54435, 54436 were selected from the ORFs having the nucleotide sequence represented by SEQ ID NO: 4365.

[4855] The probes having the nucleotide sequence represented by SEQ ID NOS: 54437, 54438, 54439, 54440, 54441, 54442, 54443, 54444, 54445, 54446, 54447 were selected from the ORFs having the nucleotide sequence represented by SEQ ID NO: 4366.

[4856] The probes having the nucleotide sequence represented by SEQ ID NOS: 54448, 54449, 54450, 54451, 54452, 54453, 54454, 54455, 54456, 54457, 54458 were selected from the ORFs having the nucleotide sequence represented by SEQ ID NO: 4367.

[4857] The probes having the nucleotide sequence represented by SEQ ID NOS: 54459, 54460, 54461, 54462, 54463, 54464, 54465, 54466, 54467, 54468, 54469 were selected from the ORFs having the nucleotide sequence represented by SEQ ID NO: 4368.

[4858] The probes having the nucleotide sequence represented by SEQ ID NOS: 54470, 54471, 54472, 54473, 54474, 54475, 54476, 54477, 54478, 54479, 54480 were selected from the ORFs having the nucleotide sequence represented by SEQ ID NO: 4369.

[4859] The probes having the nucleotide sequence represented by SEQ ID NOS: 54481, 54482, 54483, 54484, 54485, 54486, 54487, 54488, 54489, 54490, 54491 were selected from the ORFs having the nucleotide sequence represented by SEQ ID NO: 4370.

[4860] The probes having the nucleotide sequence represented by SEQ ID NOS: 54492, 54493, 54494, 54495, 54496, 54497, 54498, 54499, 54500, 54501, 54502 were selected from the ORFs having the nucleotide sequence represented by SEQ ID NO: 4371.

[4861] The probes having the nucleotide sequence represented by SEQ ID NOS: 54503, 54504, 54505, 54506, 54507, 54508, 54509, 54510, 54511, 54512, 54513 were selected from the ORFs having the nucleotide sequence represented by SEQ ID NO: 4372.

[4862] The probes having the nucleotide sequence represented by SEQ ID NOS: 54514, 54515, 54516, 54517, 54518, 54519, 54520, 54521, 54522, 54523, 54524 were selected from the ORFs having the nucleotide sequence represented by SEQ ID NO: 4373.

[4863] The probes having the nucleotide sequence represented by SEQ ID NOS: 54525, 54526, 54527, 54528, 54529, 54530, 54531, 54532, 54533, 54534, 54535 were selected from the ORFs having the nucleotide sequence represented by SEQ ID NO: 4374.

[4864] The probes having the nucleotide sequence represented by SEQ ID NOS: 54536, 54537, 54538, 54539, 54540, 54541, 54542, 54543, 54544, 54545, 54546 were selected from the ORFs having the nucleotide sequence represented by SEQ ID NO: 4375.

[4865] The probes having the nucleotide sequence represented by SEQ ID NOS: 54547, 54548, 54549, 54550, 54551, 54552, 54553, 54554, 54555, 54556, 54557 were selected from the ORFs having the nucleotide sequence represented by SEQ ID NO: 4376.

[4866] The probes having the nucleotide sequence represented by SEQ ID NOS: 54558, 54559, 54560, 54561, 54562, 54563, 54564, 54565, 54566, 54567, 54568 were selected from the ORFs having the nucleotide sequence represented by SEQ ID NO: 4377.

[4867] The probes having the nucleotide sequence represented by SEQ ID NOS: 54569, 54570, 54571, 54572, 54573, 54574, 54575, 54576, 54577, 54578, 54579 were selected from the ORFs having the nucleotide sequence represented by SEQ ID NO: 4378.

[4868] The probes having the nucleotide sequence represented by SEQ ID NOS: 54580, 54581, 54582, 54583, 54584, 54585, 54586, 54587, 54588, 54589, 54590 were selected from the ORFs having the nucleotide sequence represented by SEQ ID NO: 4379.

[4869] The probes having the nucleotide sequence represented by SEQ ID NOS: 54591, 54592, 54593, 54594, 54595, 54596, 54597, 54598, 54599, 54600, 54601 were selected from the ORFs having the nucleotide sequence represented by SEQ ID NO: 4380.

[4870] The probes having the nucleotide sequence represented by SEQ ID NOS: 54602, 54603, 54604, 54605, 54606, 54607, 54608, 54609, 54610, 54611, 54612 were selected from the ORFs having the nucleotide sequence represented by SEQ ID NO: 4381.

[4871] The probes having the nucleotide sequence represented by SEQ ID NOS: 54613, 54614, 54615, 54616, 54617, 54618, 54619, 54620, 54621, 54622, 54623 were selected from the ORFs having the nucleotide sequence represented by SEQ ID NO: 4382.

[4872] The probes having the nucleotide sequence represented by SEQ ID NOS: 54624, 54625, 54626, 54627, 54628, 54629, 54630, 54631, 54632, 54633, 54634 were selected from the ORFs having the nucleotide sequence represented by SEQ ID NO: 4383.

[4873] The probes having the nucleotide sequence represented by SEQ ID NOS: 54635, 54636, 54637, 54638, 54639, 54640, 54641, 54642, 54643, 54644, 54645 were selected from the ORFs having the nucleotide sequence represented by SEQ ID NO: 4384.

[4874] The probes having the nucleotide sequence represented by SEQ ID NOS: 54646, 54647, 54648, 54649, 54650, 54651, 54652, 54653, 54654, 54655, 54656 were selected from the ORFs having the nucleotide sequence represented by SEQ ID NO: 4385.

[4875] The probes having the nucleotide sequence represented by SEQ ID NOS: 54657, 54658, 54659, 54660, 54661, 54662, 54663, 54664, 54665, 54666, 54667 were selected from the ORFs having the nucleotide sequence represented by SEQ ID NO: 4386.

[4876] The probes having the nucleotide sequence represented by SEQ ID NOS: 54668, 54669, 54670, 54671, 54672, 54673, 54674, 54675, 54676, 54677, 54678 were selected from the ORFs having the nucleotide sequence represented by SEQ ID NO: 4387.

[4877] The probes having the nucleotide sequence represented by SEQ ID NOS: 54679, 54680, 54681, 54682, 54683, 54684, 54685, 54686, 54687, 54688, 54689 were selected from the ORFs having the nucleotide sequence represented by SEQ ID NO: 4388.

[4878] The probes having the nucleotide sequence represented by SEQ ID NOS: 54690, 54691, 54692, 54693, 54694, 54695, 54696, 54697, 54698, 54699, 54700 were selected from the ORFs having the nucleotide sequence represented by SEQ ID NO: 4389.

[4879] The probes having the nucleotide sequence represented by SEQ ID NOS: 54701, 54702, 54703, 54704, 54705, 54706, 54707, 54708, 54709, 54710, 54711 were selected from the ORFs having the nucleotide sequence represented by SEQ ID NO: 4390.

[4880] The probes having the nucleotide sequence represented by SEQ ID NOS: 54712, 54713, 54714, 54715, 54716, 54717, 54718, 54719, 54720, 54721, 54722 were selected from the ORFs having the nucleotide sequence represented by SEQ ID NO: 4391.

[4881] The probes having the nucleotide sequence represented by SEQ ID NOS: 54723, 54724, 54725, 54726, 54727, 54728, 54729, 54730, 54731, 54732, 54733 were selected from the ORFs having the nucleotide sequence represented by SEQ ID NO: 4392.

[4882] The probes having the nucleotide sequence represented by SEQ ID NOS: 54734, 54735, 54736, 54737, 54738, 54739, 54740, 54741, 54742, 54743, 54744 were selected from the ORFs having the nucleotide sequence represented by SEQ ID NO: 4393.

[4883] The probes having the nucleotide sequence represented by SEQ ID NOS: 54745, 54746, 54747, 54748, 54749, 54750, 54751, 54752, 54753, 54754, 54755 were selected from the ORFs having the nucleotide sequence represented by SEQ ID NO: 4394.

[4884] The probes having the nucleotide sequence represented by SEQ ID NOS: 54756, 54757, 54758, 54759, 54760, 54761, 54762, 54763, 54764, 54765, 54766 were selected from the ORFs having the nucleotide sequence represented by SEQ ID NO: 4395.

[4885] The probes having the nucleotide sequence represented by SEQ ID NOS: 54767, 54768, 54769, 54770, 54771, 54772, 54773, 54774, 54775, 54776, 54777 were selected from the ORFs having the nucleotide sequence represented by SEQ ID NO: 4396.

[4886] The probes having the nucleotide sequence represented by SEQ ID NOS: 54778, 54779, 54780, 54781, 54782, 54783, 54784, 54785, 54786, 54787, 54788 were selected from the ORFs having the nucleotide sequence represented by SEQ ID NO: 4397.

[4887] The probes having the nucleotide sequence represented by SEQ ID NOS: 54789, 54790, 54791, 54792, 54793, 54794, 54795, 54796, 54797, 54798, 54799 were selected from the ORFs having the nucleotide sequence represented by SEQ ID NO: 4398.

[4888] The probes having the nucleotide sequence represented by SEQ ID NOS: 54800, 54801, 54802, 54803, 54804, 54805, 54806, 54807, 54808, 54809, 54810 were selected from the ORFs having the nucleotide sequence represented by SEQ ID NO: 4399.

[4889] The probes having the nucleotide sequence represented by SEQ ID NOS: 54811, 54812, 54813, 54814, 54815, 54816, 54817, 54818, 54819, 54820, 54821 were selected from the ORFs having the nucleotide sequence represented by SEQ ID NO: 4400.

[4890] The probes having the nucleotide sequence represented by SEQ ID NOS: 54822, 54823, 54824, 54825, 54826, 54827, 54828, 54829, 54830, 54831, 54832 were selected from the ORFs having the nucleotide sequence represented by SEQ ID NO: 4401.

[4891] The probes having the nucleotide sequence represented by SEQ ID NOS: 54833, 54834, 54835, 54836, 54837, 54838, 54839, 54840, 54841, 54842, 54843 were selected from the ORFs having the nucleotide sequence represented by SEQ ID NO: 4402.

[4892] The probes having the nucleotide sequence represented by SEQ ID NOS: 54844, 54845, 54846, 54847, 54848, 54849, 54850, 54851, 54852, 54853, 54854 were selected from the ORFs having the nucleotide sequence represented by SEQ ID NO: 4403.

[4893] The probes having the nucleotide sequence represented by SEQ ID NOS: 54855, 54856, 54857, 54858, 54859, 54860, 54861, 54862, 54863, 54864, 54865 were selected from the ORFs having the nucleotide sequence represented by SEQ ID NO: 4404.

[4894] The probes having the nucleotide sequence represented by SEQ ID NOS: 54866, 54867, 54868, 54869, 54870, 54871, 54872, 54873, 54874, 54875, 54876 were selected from the ORFs having the nucleotide sequence represented by SEQ ID NO: 4405.

[4895] The probes having the nucleotide sequence represented by SEQ ID NOS: 54877, 54878, 54879, 54880, 54881, 54882, 54883, 54884, 54885, 54886, 54887, 54888, 54889, 54890, 54891, 54892, 54893, 54894, 54895, 54896, 54897, 54898 were selected from the ORFs having the nucleotide sequence represented by SEQ ID NO: 4406.

[4896] The probes having the nucleotide sequence represented by SEQ ID NOS: 54899, 54900, 54901, 54902, 54903, 54904, 54905, 54906, 54907, 54908, 54909 were selected from the ORFs having the nucleotide sequence represented by SEQ ID NO: 4407.

[4897] The probes having the nucleotide sequence represented by SEQ ID NOS: 54910, 54911, 54912, 54913, 54914, 54915, 54916, 54917, 54918, 54919, 54920 were selected from the ORFs having the nucleotide sequence represented by SEQ ID NO: 4408.

[4898] The probes having the nucleotide sequence represented by SEQ ID NOS: 54921, 54922, 54923, 54924, 54925, 54926, 54927, 54928, 54929, 54930, 54931 were selected from the ORFs having the nucleotide sequence represented by SEQ ID NO: 4409.

[4899] The probes having the nucleotide sequence represented by SEQ ID NOS: 54932, 54933, 54934, 54935, 54936, 54937, 54938, 54939, 54940, 54941, 54942 were selected from the ORFs having the nucleotide sequence represented by SEQ ID NO: 4410.

[4900] The probes having the nucleotide sequence represented by SEQ ID NOS: 54943, 54944, 54945, 54946, 54947, 54948, 54949, 54950, 54951, 54952, 54953 were selected from the ORFs having the nucleotide sequence represented by SEQ ID NO: 4411.

[4901] The probes having the nucleotide sequence represented by SEQ ID NOS: 54954, 54955, 54956, 54957, 54958, 54959, 54960, 54961, 54962, 54963, 54964 were selected from the ORFs having the nucleotide sequence represented by SEQ ID NO: 4412.

[4902] The probes having the nucleotide sequence represented by SEQ ID NOS: 54965, 54966, 54967, 54968, 54969, 54970, 54971, 54972, 54973, 54974, 54975 were selected from the ORFs having the nucleotide sequence represented by SEQ ID NO: 4413.

[4903] The probes having the nucleotide sequence represented by SEQ ID NOS: 54976, 54977, 54978, 54979, 54980, 54981, 54982, 54983, 54984, 54985, 54986 were selected from the ORFs having the nucleotide sequence represented by SEQ ID NO: 4414.

[4904] The probes having the nucleotide sequence represented by SEQ ID NOS: 54987, 54988, 54989, 54990, 54991, 54992, 54993, 54994, 54995, 54996, 54997 were selected from the ORFs having the nucleotide sequence represented by SEQ ID NO: 4415.

[4905] The probes having the nucleotide sequence represented by SEQ ID NOS: 54998, 54999, 55000, 55001, 55002, 55003, 55004, 55005, 55006, 55007, 55008 were selected from the ORFs having the nucleotide sequence represented by SEQ ID NO: 4416.

[4906] The probes having the nucleotide sequence represented by SEQ ID NOS: 55009, 55010, 55011, 55012, 55013, 55014, 55015, 55016, 55017, 55018, 55019 were selected from the ORFs having the nucleotide sequence represented by SEQ ID NO: 4417.

[4907] The probes having the nucleotide sequence represented by SEQ ID NOS: 55020, 55021, 55022, 55023, 55024, 55025, 55026, 55027, 55028, 55029, 55030 were selected from the ORFs having the nucleotide sequence represented by SEQ ID NO: 4418.

[4908] The probes having the nucleotide sequence represented by SEQ ID NOS: 55031, 55032, 55033, 55034, 55035, 55036, 55037, 55038, 55039, 55040, 55041, 55042, 55043, 55044, 55045, 55046, 55047, 55048, 55049, 55050, 55051, 55052 were selected from the ORFs having the nucleotide sequence represented by SEQ ID NO: 4419.

[4909] The probes having the nucleotide sequence represented by SEQ ID NOS: 55053, 55054, 55055, 55056, 55057, 55058, 55059, 55060, 55061, 55062, 55063 were selected from the ORFs having the nucleotide sequence represented by SEQ ID NO: 4420.

[4910] The probes having the nucleotide sequence represented by SEQ ID NOS: 55064, 55065, 55066, 55067, 55068, 55069, 55070, 55071, 55072, 55073, 55074 were selected from the ORFs having the nucleotide sequence represented by SEQ ID NO: 4421.

[4911] The probes having the nucleotide sequence represented by SEQ ID NOS: 55075, 55076, 55077, 55078, 55079, 55080, 55081, 55082, 55083, 55084, 55085 were selected from the ORFs having the nucleotide sequence represented by SEQ ID NO: 4422.

[4912] The probes having the nucleotide sequence represented by SEQ ID NOS: 55086, 55087, 55088, 55089, 55090, 55091, 55092, 55093, 55094 were selected from the ORFs having the nucleotide sequence represented by SEQ ID NO: 4423.

[4913] The probes having the nucleotide sequence represented by SEQ ID NOS: 55095, 55096, 55097, 55098, 55099, 55100, 55101, 55102, 55103, 55104, 55105 were selected from the ORFs having the nucleotide sequence represented by SEQ ID NO: 4424.

[4914] The probes having the nucleotide sequence represented by SEQ ID NOS: 55106, 55107, 55108, 55109, 55110, 55111, 55112, 55113, 55114, 55115, 55116 were selected from the ORFs having the nucleotide sequence represented by SEQ ID NO: 4425.

[4915] The probes having the nucleotide sequence represented by SEQ ID NOS: 55117, 55118, 55119, 55120, 55121, 55122, 55123, 55124, 55125, 55126, 55127 were selected from the ORFs having the nucleotide sequence represented by SEQ ID NO: 4426.

[4916] The probes having the nucleotide sequence represented by SEQ ID NOS: 55128, 55129, 55130, 55131, 55132, 55133, 55134, 55135, 55136, 55137, 55138 were selected from the ORFs having the nucleotide sequence represented by SEQ ID NO: 4427.

[4917] The probes having the nucleotide sequence represented by SEQ ID NOS: 55139, 55140, 55141, 55142, 55143, 55144, 55145, 55146, 55147, 55148, 55149 were selected from the ORFs having the nucleotide sequence represented by SEQ ID NO: 4428.

[4918] The probes having the nucleotide sequence represented by SEQ ID NOS: 55150, 55151, 55152, 55153, 55154, 55155, 55156, 55157, 55158, 55159, 55160 were selected from the ORFs having the nucleotide sequence represented by SEQ ID NO: 4429.

[4919] The probes having the nucleotide sequence represented by SEQ ID NOS: 55161, 55162, 55163, 55164, 55165, 55166, 55167, 55168, 55169, 55170, 55171 were selected from the ORFs having the nucleotide sequence represented by SEQ ID NO: 4430.

[4920] The probes having the nucleotide sequence represented by SEQ ID NOS: 55172, 55173, 55174, 55175, 55176, 55177, 55178, 55179, 55180, 55181, 55182 were selected from the ORFs having the nucleotide sequence represented by SEQ ID NO: 4431.

[4921] The probes having the nucleotide sequence represented by SEQ ID NOS: 55183, 55184, 55185, 55186, 55187, 55188, 55189, 55190, 55191, 55192, 55193 were selected from the ORFs having the nucleotide sequence represented by SEQ ID NO: 4432.

[4922] The probes having the nucleotide sequence represented by SEQ ID NOS: 55194, 55195, 55196, 55197, 55198, 55199, 55200, 55201, 55202, 55203, 55204 were selected from the ORFs having the nucleotide sequence represented by SEQ ID NO: 4433.

[4923] The probes having the nucleotide sequence represented by SEQ ID NOS: 55205, 55206, 55207, 55208, 55209, 55210, 55211, 55212, 55213, 55214, 55215 were selected from the ORFs having the nucleotide sequence represented by SEQ ID NO: 4434.

[4924] The probes having the nucleotide sequence represented by SEQ ID NOS: 55216, 55217, 55218, 55219, 55220, 55221, 55222, 55223, 55224, 55225, 55226 were selected from the ORFs having the nucleotide sequence represented by SEQ ID NO: 4435.

[4925] The probes having the nucleotide sequence represented by SEQ ID NOS: 55227, 55228, 55229, 55230, 55231, 55232, 55233, 55234, 55235, 55236, 55237 were selected from the ORFs having the nucleotide sequence represented by SEQ ID NO: 4436.

[4926] The probes having the nucleotide sequence represented by SEQ ID NOS: 55238, 55239, 55240, 55241, 55242, 55243, 55244, 55245, 55246, 55247, 55248 were selected from the ORFs having the nucleotide sequence represented by SEQ ID NO: 4437.

[4927] The probes having the nucleotide sequence represented by SEQ ID NOS: 55249, 55250, 55251, 55252, 55253, 55254, 55255, 55256, 55257, 55258, 55259 were selected from the ORFs having the nucleotide sequence represented by SEQ ID NO: 4438.

[4928] The probes having the nucleotide sequence represented by SEQ ID NOS: 55260, 55261, 55262, 55263, 55264, 55265, 55266, 55267, 55268, 55269, 55270 were selected from the ORFs having the nucleotide sequence represented by SEQ ID NO: 4439.

[4929] The probes having the nucleotide sequence represented by SEQ ID NOS: 55271, 55272, 55273, 55274, 55275, 55276, 55277, 55278, 55279, 55280, 55281 were selected from the ORFs having the nucleotide sequence represented by SEQ ID NO: 4440.

[4930] The probes having the nucleotide sequence represented by SEQ ID NOS: 55282, 55283, 55284, 55285, 55286, 55287, 55288, 55289, 55290, 55291, 55292 were selected from the ORFs having the nucleotide sequence represented by SEQ ID NO: 4441.

[4931] The probes having the nucleotide sequence represented by SEQ ID NOS: 55293, 55294, 55295, 55296, 55297, 55298, 55299, 55300, 55301, 55302, 55303 were selected from the ORFs having the nucleotide sequence represented by SEQ ID NO: 4442.

[4932] The probes having the nucleotide sequence represented by SEQ ID NOS: 55304, 55305, 55306, 55307, 55308, 55309, 55310, 55311, 55312, 55313, 55314 were selected from the ORFs having the nucleotide sequence represented by SEQ ID NO: 4443.

[4933] The probes having the nucleotide sequence represented by SEQ ID NOS: 55315, 55316, 55317, 55318, 55319, 55320, 55321, 55322, 55323, 55324, 55325 were selected from the ORFs having the nucleotide sequence represented by SEQ ID NO: 4444.

[4934] The probes having the nucleotide sequence represented by SEQ ID NOS: 55326, 55327, 55328, 55329, 55330, 55.331, 55332, 55333, 55334, 55335, 55336 were selected from the ORFs having the nucleotide sequence represented by SEQ ID NO: 4445.

[4935] The probes having the nucleotide sequence represented by SEQ ID NOS: 55337, 55338, 55339, 55340, 55341, 55342, 55343, 55344, 55345, 55346, 55347 were selected from the ORFs having the nucleotide sequence represented by SEQ ID NO: 4446.

[4936] The probes having the nucleotide sequence represented by SEQ ID NOS: 55348, 55349, 55350, 55351, 55352, 55353, 55354, 55355, 55356, 55357, 55358 were selected from the ORFs having the nucleotide sequence represented by SEQ ID NO: 4447.

[4937] The probes having the nucleotide sequence represented by SEQ ID NOS: 55359, 55360, 55361, 55362, 55363, 55364, 55365, 55366, 55367, 55368, 55369 were selected from the ORFs having the nucleotide sequence represented by SEQ ID NO: 4448.

[4938] The probes having the nucleotide sequence represented by SEQ ID NOS: 55370, 55371, 55372, 55373, 55374, 55375, 55376, 55377, 55378, 55379, 55380 were selected from the ORFs having the nucleotide sequence represented by SEQ ID NO: 4449.

[4939] The probes having the nucleotide sequence represented by SEQ ID NOS: 55381, 55382, 55383, 55384, 55385, 55386, 55387, 55388, 55389, 55390, 55391 were selected from the ORFs having the nucleotide sequence represented by SEQ ID NO: 4450.

[4940] The probes having the nucleotide sequence represented by SEQ ID NOS: 55392, 55393, 55394, 55395, 55396, 55397, 55398, 55399, 55400, 55401, 55402 were selected from the ORFs having the nucleotide sequence represented by SEQ ID NO: 4451.

[4941] The probes having the nucleotide sequence represented by SEQ ID NOS: 55403, 55404, 55405, 55406, 55407, 55408, 55409, 55410, 55411, 55412, 55413 were selected from the ORFs having the nucleotide sequence represented by SEQ ID NO: 4452.

[4942] The probes having the nucleotide sequence represented by SEQ ID NOS: 55414, 55415, 55416, 55417, 55418, 55419, 55420, 55421, 55422, 55423,.55424 were selected from the ORFs having the nucleotide sequence represented by SEQ ID NO: 4453.

[4943] The probes having the nucleotide sequence represented by SEQ ID NOS: 55425, 55426, 55427, 55428, 55429, 55430, 55431, 55432, 55433, 55434, 55435 were selected from the ORFs having the nucleotide sequence represented by SEQ ID NO: 4454.

[4944] The probes having the nucleotide sequence represented by SEQ ID NOS: 55436, 55437, 55438, 55439, 55440, 55441, 55442, 55443, 55444, 55445, 55446 were selected from the ORFs having the nucleotide sequence represented by SEQ ID NO: 4455.

[4945] The probes having the nucleotide sequence represented by SEQ ID NOS: 55447, 55448, 55449, 55450, 55451, 55452, 55453, 55454, 55455, 55456, 55457 were selected from the ORFs having the nucleotide sequence represented by SEQ ID NO: 4456.

[4946] The probes having the nucleotide sequence represented by SEQ ID NOS: 55458, 55459, 55460, 55461, 55462, 55463, 55464, 55465, 55466, 55467, 55468 were selected from the ORFs having the nucleotide sequence represented by SEQ ID NO: 4457.

[4947] The probes having the nucleotide sequence represented by SEQ ID NOS: 55469, 55470, 55471, 55472, 55473, 55474, 55475, 55476, 55477, 55478, 55479 were selected from the ORFs having the nucleotide sequence represented by SEQ ID NO: 4458.

[4948] The probes having the nucleotide sequence represented by SEQ ID NOS: 55480,. 55481, 55482, 55483, 55484, 55485, 55486, 55487, 55488, 55489, 55490 were selected from the ORFs having the nucleotide sequence represented by SEQ ID NO: 4459.

[4949] The probes having the nucleotide sequence represented by SEQ ID NOS: 55491, 55492, 55493, 55494, 55495, 55496, 55497, 55498, 55499, 55500, 55501 were selected from the ORFs having the nucleotide sequence represented by SEQ ID NO: 4460.

[4950] The probes having the nucleotide sequence represented by SEQ ID NOS: 55502, 55503, 55504, 55505, 55506, 55507, 55508, 55509, 555110, 55511, 55512 were selected from the ORFs having the nucleotide sequence represented by SEQ ID NO: 4461.

[4951] The probes having the nucleotide sequence represented by SEQ ID NOS: 55513, 55514, 55515, 55516, 55517, 55518, 55519, 55520, 55521, 55522, 55523 were selected from the ORFs having the nucleotide sequence represented by SEQ ID NO: 4462.

[4952] The probes having the nucleotide sequence represented by SEQ ID NOS: 55524, 55525, 55526, 55527, 55528, 55529, 55530, 55531, 55532, 55533, 55534 were selected from the ORFs having the nucleotide sequence represented by SEQ ID NO: 4463.

[4953] The probes having the nucleotide sequence represented by SEQ ID NOS: 55535, 55536, 55537, 55538, 55539, 55540, 55541, 55542, 55543, 55544, 55545 were selected from the ORFs having the nucleotide sequence represented by SEQ ID NO: 4464.

[4954] The probes having the nucleotide sequence represented by SEQ ID NOS: 55546, 55547, 55548, 55549, 55550, 55551, 55552, 55553, 55554, 55555, 55556 were selected from the ORFs having the nucleotide sequence represented by SEQ ID NO: 4465.

[4955] The probes having the nucleotide sequence represented by SEQ ID NOS: 55557, 55558, 55559, 55560, 55561, 55562, 55563, 55564, 55565, 55566, 55567 were selected from the ORFs having the nucleotide sequence represented by SEQ ID NO: 4466.

[4956] The probes having the nucleotide sequence represented by SEQ ID NOS: 55568, 55569, 55570, 55571, 55572, 55573, 55574, 55575, 55576, 55577, 55578 were selected from the ORFs having the nucleotide sequence represented by SEQ ID NO: 4467.

[4957] The probes having the nucleotide sequence represented by SEQ ID NOS: 55579, 55580, 55581, 55582, 55583, 55584, 55585, 55586, 55587, 55588, 55589 were selected from the ORFs having the nucleotide sequence represented by SEQ ID NO: 4468.

[4958] The probes having the nucleotide sequence represented by SEQ ID NOS: 55590, 55591, 55592, 55593, 55594, 55595, 55596, 55597, 55598, 55599, 55600 were selected from the ORFs having the nucleotide sequence represented by SEQ ID NO: 4469.

[4959] The probes having the nucleotide sequence represented by SEQ ID NOS: 55601, 55602, 55603, 55604, 55605, 55606, 55607, 55608, 55609, 55610, 55611 were selected from the ORFs having the nucleotide sequence represented by SEQ ID NO: 4470.

[4960] The probes having the nucleotide sequence represented by SEQ ID NOS: 55612, 55613, 55614, 55615, 55616, 55617, 55618, 55619, 55620, 55621, 55622 were selected from the ORFs having the nucleotide sequence represented by SEQ ID NO: 4471.

[4961] The probes having the nucleotide sequence represented by SEQ ID NOS: 55623, 55624, 55625, 55626, 55627, 55628, 55629, 55630, 55631, 55632, 55633 were selected from the ORFs having the nucleotide sequence represented by SEQ ID NO: 4472.

[4962] The probes having the nucleotide sequence represented by SEQ ID NOS: 55634, 55635, 55636, 55637, 55638, 55639, 55640, 55641, 55642, 55643, 55644 were selected from the ORFs having the nucleotide sequence represented by SEQ ID NO: 4473.

[4963] The probes having the nucleotide sequence represented by SEQ ID NOS: 55645, 55646, 55647, 55648, 55649, 55650, 55651, 55652, 55653, 55654, 55655, 55656, 55657, 55658, 55659, 55660, 55661, 55662, 55663, 55664, 55665, 55666 were selected from the ORFs having the nucleotide sequence represented by SEQ ID NO: 4474.

[4964] The probes having the nucleotide sequence represented by SEQ ID NOS: 55667, 55668, 55669, 55670, 55671, 55672, 55673, 55674, 55675, 55676, 55677 were selected from the ORFs having the nucleotide sequence represented by SEQ ID NO: 4475.

[4965] The probes having the nucleotide sequence represented by SEQ ID NOS: 55678, 55679, 55680, 55681, 55682, 55683, 55684, 55685, 55686, 55687, 55688 were selected from the ORFs having the nucleotide sequence represented by SEQ ID NO: 4476.

[4966] The probes having the nucleotide sequence represented by SEQ ID NOS: 55689, 55690, 55691, 55692, 55693, 55694, 55695, 55696, 55697, 55698, 55699 were selected from the ORFs having the nucleotide sequence represented by SEQ ID NO: 4477.

[4967] The probes having the nucleotide sequence represented by SEQ ID NOS: 55700, 55701, 55702, 55703, 55704, 55705, 55706, 55707, 55708, 55709, 55710 were selected from the ORFs having the nucleotide sequence represented by SEQ ID NO: 4478.

[4968] The probes having the nucleotide sequence represented by SEQ ID NOS: 55711, 55712, 55713, 55714, 55715, 55716, 55717, 55118, 55719, 55720, 55721 were selected from the ORFs having the nucleotide sequence represented by SEQ ID NO: 4479.

[4969] The probes having the nucleotide sequence represented by SEQ ID NOS: 55722, 55723, 55724, 55725, 55726, 55727, 55728, 55729, 55730, 55731, 55732 were selected from the ORFs having the nucleotide sequence represented by SEQ ID NO: 4480.

[4970] The probes having the nucleotide sequence represented by SEQ ID NOS: 55733, 55734, 55735, 55736, 55737, 55738, 55739, 55740, 55741, 55742, 55743 were selected from the ORFs having the nucleotide sequence represented by SEQ ID NO: 4481.

[4971] The probes having the nucleotide sequence represented by SEQ ID NOS: 55744, 55745, 55746, 55747, 55748, 55749, 55750, 55751, 55752, 55753, 55754 were selected from the ORFs having the nucleotide sequence represented by SEQ ID NO: 4482.

[4972] The probes having the nucleotide sequence represented by SEQ ID NOS: 55755, 55756, 55757, 55758, 55759, 55760, 55761, 55762, 55763, 55764, 55765 were selected from the ORFs having the nucleotide sequence represented by SEQ ID NO: 4483.

[4973] The probes having the nucleotide sequence represented by SEQ ID NOS: 55766, 55767, 55768, 55769, 55770, 55771, 55772, 55773, 55774, 55775, 55776 were selected from the ORFs having the nucleotide sequence represented by SEQ ID NO: 4484.

[4974] The probes having the nucleotide sequence represented by SEQ ID NOS: 55777, 55778, 55779, 55780, 55781, 55782, 55783, 55784, 55785, 55786, 55787 were selected from the ORFs having the nucleotide sequence represented by SEQ ID NO: 4485.

[4975] The probes having the nucleotide sequence represented by SEQ ID NOS: 55788, 55789, 55790, 55791, 55792, 55793, 55794, 55795, 55796, 55797, 55798 were selected from the ORFs having the nucleotide sequence represented by SEQ ID NO: 4486.

[4976] The probes having the nucleotide sequence represented by SEQ ID NOS: 55799, 55800, 55801, 55802, 55803, 55804, 55805, 55806, 55807, 55808, 55809 were selected from the ORFs having the nucleotide sequence represented by SEQ ID NO: 4487.

[4977] The probes having the nucleotide sequence represented by SEQ ID NOS: 55810, 55811, 55812, 55813, 55814, 55815, 55816, 55817, 55818, 55819, 55820 were selected from the ORFs having the nucleotide sequence represented by SEQ ID NO: 4488.

[4978] The probes having the nucleotide sequence represented by SEQ ID NOS: 55821, 55822, 55823, 55824, 55825, 55826, 55827, 55828, 55829, 55830, 55831 were selected from the ORFs having the nucleotide sequence represented by SEQ ID NO: 4489.

[4979] The probes having the nucleotide sequence represented by SEQ ID NOS: 55832, 55833, 55834, 55835, 55836, 55837, 55838, 55839, 55840, 55841, 55842 were selected from the ORFs having the nucleotide sequence represented by SEQ ID NO: 4490.

[4980] The probes having the nucleotide sequence represented by SEQ ID NOS: 55843, 55844, 55845, 55846, 55847, 55848, 55849, 55850, 55851, 55852, 55853 were selected from the ORFs having the nucleotide sequence represented by SEQ ID NO: 4491.

[4981] The probes having the nucleotide sequence represented by SEQ ID NOS: 55854, 55855, 55856, 55857, 55858, 55859, 55860, 55861, 55862, 55863, 55864 were selected from the ORFs having the nucleotide sequence represented by SEQ ID NO: 4492.

[4982] The probes having the nucleotide sequence represented by SEQ ID NOS: 55865, 55866, 55867, 55868, 55869, 55870, 55871, 55872, 55873, 55874, 55875 were selected from the ORFs having the nucleotide sequence represented by SEQ ID NO: 4493.

[4983] The probes having the nucleotide sequence represented by SEQ ID NOS: 55876, 55877, 55878, 55879, 55880, 55881, 55882, 55883, 55884, 55885, 55886 were selected from the ORFs having the nucleotide sequence represented by SEQ ID NO: 4494.

[4984] The probes having the nucleotide sequence represented by SEQ ID NOS: 55887, 55888, 55889, 55890, 55891, 55892, 55893, 55894, 55895, 55896, 55897 were selected from the ORFs having the nucleotide sequence represented by SEQ ID NO: 4495.

[4985] The probes having the nucleotide sequence represented by SEQ ID NOS: 55898, 55899, 55900, 55901, 55902, 55903, 55904, 55905, 55906, 55907, 55908 were selected from the ORFs having the nucleotide sequence represented by SEQ ID NO: 4496.

[4986] The probes having the nucleotide sequence represented by SEQ ID NOS: 55909, 55910, 55911, 55912, 55913, 55914, 55915, 55916, 55917, 55918, 55919 were selected from the ORFs having the nucleotide sequence represented by SEQ ID NO: 4497.

[4987] The probes having the nucleotide sequence represented by SEQ ID NOS: 55920, 55921, 55922, 55923, 55924, 55925, 55926, 55927, 55928, 55929, 55930 were selected from the ORFs having the nucleotide sequence represented by SEQ ID NO: 4498.

[4988] The probes having the nucleotide sequence represented by SEQ ID NOS: 55931, 55932, 55933, 55934, 55935, 55936, 55937, 55938, 55939, 55940, 55941 were selected from the ORFs having the nucleotide sequence represented by SEQ ID NO: 4499.

[4989] The probes having the nucleotide sequence represented by SEQ ID NOS: 55942, 55943, 55944, 55945, 55946, 55947, 55948, 55949, 55950, 55951, 55952 were selected from the ORFs having the nucleotide sequence represented by SEQ ID NO: 4500.

[4990] The probes having the nucleotide sequence represented by SEQ ID NOS: 55953, 55954, 55955, 55956, 55957, 55958, 55959, 55960, 55961, 55962, 55963 were selected from the ORFs having the nucleotide sequence represented by SEQ ID NO: 4501.

[4991] The probes having the nucleotide sequence represented by SEQ ID NOS: 55964, 55965, 55966, 55967, 55968, 55969, 55970, 55971, 55972, 55973, 55974 were selected from the ORFs having the nucleotide sequence represented by SEQ ID NO: 4502.

[4992] The probes having the nucleotide sequence represented by SEQ ID NOS: 55975, 55976, 55977, 55978, 55979, 55980, 55981, 55982, 55983, 55984, 55985 were selected from the ORFs having the nucleotide sequence represented by SEQ ID NO: 4503.

[4993] The probes having the nucleotide sequence represented by SEQ ID NOS: 55986, 55987, 55988, 55989, 55990, 55991, 55992, 55993, 55994, 55995, 55996 were selected from the ORFs having the nucleotide sequence represented by SEQ ID NO: 4504.

[4994] The probes having the nucleotide sequence represented by SEQ ID NOS: 55997, 55998, 55999, 56000, 56001, 56002, 56003, 56004, 56005, 56006, 56007 were selected from the ORFs having the nucleotide sequence represented by SEQ ID NO: 4505.

[4995] The probes having the nucleotide sequence represented by SEQ ID NOS: 56008, 56009, 56010, 56011, 56012, 56013, 56014, 56015, 56016, 56017, 56018 were selected from the ORFs having the nucleotide sequence represented by SEQ ID NO: 4506.

[4996] The probes having the nucleotide sequence represented by SEQ ID NOS: 56019, 56020, 56021, 56022, 56023, 56024, 56025, 56026, 56027, 56028, 56029 were selected from the ORFs having the nucleotide sequence represented by SEQ ID NO: 4507.

[4997] The probes having the nucleotide sequence represented by SEQ ID NOS: 56030, 56031, 56032, 56033, 56034, 56035, 56036, 56037, 56038, 56039, 56040 were selected from the ORFs having the nucleotide sequence represented by SEQ ID NO: 4508.

[4998] The probes having the nucleotide sequence represented by SEQ ID NOS: 56041, 56042, 56043, 56044, 56045, 56046, 56047, 56048, 56049, 56050, 56051 were selected from the ORFs having the nucleotide sequence represented by SEQ ID NO: 4509.

[4999] The probes having the nucleotide sequence represented by SEQ ID NOS: 56052, 56053, 56054, 56055, 56056, 56057, 56058, 56059, 56060, 56061, 56062 were selected from the ORFs having the nucleotide sequence represented by SEQ ID NO: 4510.

[5000] The probes having the nucleotide sequence represented by SEQ ID NOS: 56063, 56064, 56065, 56066, 56067, 56068, 56069, 56070, 56071, 56072, 56073 were selected from the ORFs having the nucleotide sequence represented by SEQ ID NO: 4511.

[5001] The probes having the nucleotide sequence represented by SEQ ID NOS: 56074, 56075, 56076, 56077, 56078, 56079, 56080, 56081, 56082, 56083, 56084 were selected from the ORFs having the nucleotide sequence represented by SEQ ID NO: 4512.

[5002] The probes having the nucleotide sequence represented by SEQ ID NOS: 56085, 56086, 56087, 56088, 56089, 56090, 56091, 56092, 56093, 56094, 56095 were selected from the ORFs having the nucleotide sequence represented by SEQ ID NO: 4513.

[5003] The probes having the nucleotide sequence represented by SEQ ID NOS: 56096, 56097, 56098, 56099, 56100, 56101, 56102, 56103, 56104, 56105, 56106 were selected from the ORFs having the nucleotide sequence represented by SEQ ID NO: 4514.

[5004] The probes having the nucleotide sequence represented by SEQ ID NOS: 56107, 56108, 56109, 56110, 56111, 56112, 56113, 56114, 56115, 56116, 56117 were selected from the ORFs having the nucleotide sequence represented by SEQ ID NO: 4515.

[5005] The probes having the nucleotide sequence represented by SEQ ID NOS: 56118, 56119, 56120, 56121, 56122, 56123, 56124, 56125, 56126, 56127, 56128 were selected from the ORFs having the nucleotide sequence represented by SEQ ID NO: 4516.

[5006] The probes having the nucleotide sequence represented by SEQ ID NOS: 56129, 56130, 56131, 56132, 56133, 56134, 56135, 56136, 56137, 56138, 56139 were selected from the ORFs having the nucleotide sequence represented by SEQ ID NO: 4517.

[5007] The probes having the nucleotide sequence represented by SEQ ID NOS: 56140, 56141, 56142, 56143, 56144, 56145, 56146, 56147, 56148, 56149, 56150 were selected from the ORFs having the nucleotide sequence represented by SEQ ID NO: 4518.

[5008] The probes having the nucleotide sequence represented by SEQ ID NOS: 56151, 56152, 56153, 56154, 56155, 56156, 56157, 56158, 56159, 56160, 56161 were selected from the ORFs having the nucleotide sequence represented by SEQ ID NO: 4519.

[5009] The probes having the nucleotide sequence represented by SEQ ID NOS: 56162, 56163, 56164, 56165, 56166, 56167, 56168, 56169, 56170, 56171, 56172 were selected from the ORFs having the nucleotide sequence represented by SEQ ID NO: 4520.

[5010] The probes having the nucleotide sequence represented by SEQ ID NOS: 56173, 56174, 56175, 56176, 56177, 56178, 56179, 56180, 56181, 56182, 56183 were selected from the ORFs having the nucleotide sequence represented by SEQ ID NO: 4521.

[5011] The probes having the nucleotide sequence represented by SEQ ID NOS: 56184, 56185, 56186, 56187, 56188, 56189, 56190, 56191, 56192, 56193, 56194 were selected from the ORFs having the nucleotide sequence represented by SEQ ID NO: 4522.

[5012] The probes having the nucleotide sequence represented by SEQ ID NOS: 56195, 56196, 56197, 56198, 56199, 56200, 56201, 56202, 56203, 56204, 56205 were selected from the ORFs having the nucleotide sequence represented by SEQ ID NO: 4523.

[5013] The probes having the nucleotide sequence represented by SEQ ID NOS: 56206, 56207, 56208, 56209, 56210, 56211, 56212, 56213, 56214, 56215, 56216 were selected from the ORFs having the nucleotide sequence represented by SEQ ID NO: 4524.

[5014] The probes having the nucleotide sequence represented by SEQ ID NOS: 56217, 56218, 56219, 56220, 56221, 56222, 56223, 56224, 56225, 56226, 56227 were selected from the ORFs having the nucleotide sequence represented by SEQ ID NO: 4525.

[5015] The probes having the nucleotide sequence represented by SEQ ID NOS: 56228, 56229, 56230, 56231, 56232, 56233, 56234, 56235, 56236, 56237, 56238 were selected from the ORFs having the nucleotide sequence represented by SEQ ID NO: 4526.

[5016] The probes having the nucleotide sequence represented by SEQ ID NOS: 56239, 56240, 56241, 56242, 56243, 56244, 56245, 56246, 56247, 56248, 56249 were selected from the ORFs having the nucleotide sequence represented by SEQ ID NO: 4527.

[5017] The probes having the nucleotide sequence represented by SEQ ID NOS: 56250, 56251, 56252, 56253, 56254, 56255, 56256, 56257, 56258, 56259, 56260 were selected from the ORFs having the nucleotide sequence represented by SEQ ID NO: 4528.

[5018] The probes having the nucleotide sequence represented by SEQ ID NOS: 56261, 56262, 56263, 56264, 56265, 56266, 56267, 56268, 56269, 56270, 56271 were selected from the ORFs having the nucleotide sequence represented by SEQ ID NO: 4529.

[5019] The probes having the nucleotide sequence represented by SEQ ID NOS: 56272, 56273, 56274, 56275, 56276, 56277, 56278, 56279, 56280, 56281, 56282 were selected from the ORFs having the nucleotide sequence represented by SEQ ID NO: 4530.

[5020] The probes having the nucleotide sequence represented by SEQ ID NOS: 56283, 56284, 56285, 56286, 56287, 56288, 56289, 56290, 56291, 56292, 56293, 56294, 56295, 56296, 56297, 56298, 56299, 56300, 56301, 56302, 56303, 56304 were selected from the ORFs having the nucleotide sequence represented by SEQ ID NO: 4531.

[5021] The probes having the nucleotide sequence represented by SEQ ID NOS: 56305, 56306, 56307, 56308, 56309, 56310, 56311, 56312, 56313, 56314, 56315 were selected from the ORFs having the nucleotide sequence represented by SEQ ID NO: 4532.

[5022] The probes having the nucleotide sequence represented by SEQ ID NOS: 56316, 56317, 56318, 56319, 56320, 56321, 56322, 56323, 56324, 56325, 56326 were selected from the ORFs having the nucleotide sequence represented by SEQ ID NO: 4533.

[5023] The probes having the nucleotide sequence represented by SEQ ID NOS: 56327, 56328, 56329, 56330, 56331, 56332, 56333, 56334, 56335, 56336, 56337 were selected from the ORFs having the nucleotide sequence represented by SEQ ID NO: 4534.

[5024] The probes having the nucleotide sequence represented by SEQ ID NOS: 56338, 56339, 56340, 56341, 56342, 56343, 56344, 56345, 56346, 56347, 56348 were selected from the ORFs having the nucleotide sequence represented by SEQ ID NO: 4535.

[5025] The probes having the nucleotide sequence represented by SEQ ID NOS: 56349, 56350, 56351, 56352, 56353, 56354, 56355, 56356, 56357, 56358, 56359 were selected from the ORFs having the nucleotide sequence represented by SEQ ID NO: 4536.

[5026] The probes having the nucleotide sequence represented by SEQ ID NOS: 56360, 56361, 56362, 56363, 56364, 56365, 56366, 56367, 56368, 56369, 56370 were selected from the ORFs having the nucleotide sequence represented by SEQ ID NO: 4537.

[5027] The probes having the nucleotide sequence represented by SEQ ID NOS: 56371, 56372, 56373, 56374, 56375, 56376, 56377, 56378, 56379, 56380, 56381 were selected from the ORFs having the nucleotide sequence represented by SEQ ID NO: 4538.

[5028] The probes having the nucleotide sequence represented by SEQ ID NOS: 56382, 56383, 56384, 56385, 56386, 56387, 56388, 56389, 56390, 56391, 56392 were selected from the ORFs having the nucleotide sequence represented by SEQ ID NO: 4539.

[5029] The probes having the nucleotide sequence represented by SEQ ID NOS: 56393, 56394, 56395, 56396, 56397, 56398, 56399, 56400, 56401, 56402, 56403 were selected from the ORFs having the nucleotide sequence represented by SEQ ID NO: 4540.

[5030] The probes having the nucleotide sequence represented by SEQ ID NOS: 56404, 56405, 56406, 56407, 56408, 56409, 56410, 56411, 56412, 56413, 56414 were selected from the ORFs having the nucleotide sequence represented by SEQ ID NO: 4541.

[5031] The probes having the nucleotide sequence represented by SEQ ID NOS: 56415, 56416, 56417, 56418, 56419, 56420, 56421, 56422, 56423, 56424, 56425 were selected from the ORFs having the nucleotide sequence represented by SEQ ID NO: 4542.

[5032] The probes having the nucleotide sequence represented by SEQ ID NOS: 56426, 56427, 56428, 56429, 56430, 56431, 56432, 56433, 56434, 56435, 56436 were selected from the ORFs having the nucleotide sequence represented by SEQ ID NO: 4543.

[5033] The probes having the nucleotide sequence represented by SEQ ID NOS: 56437, 56438, 56439, 56440, 56441, 56442, 56443, 56444, 56445, 56446, 56447 were selected from the ORFs having the nucleotide sequence represented by SEQ ID NO: 4544.

[5034] The probes having the nucleotide sequence represented by SEQ ID NOS: 56448, 56449, 56450, 56451, 56452, 56453, 56454, 56455, 56456, 56457, 56458 were selected from the ORFs having the nucleotide sequence represented by SEQ ID NO: 4545.

[5035] The probes having the nucleotide sequence represented by SEQ ID NOS: 56459, 56460, 56461, 56462, 56463, 56464, 56465, 56466, 56467, 56468, 56469 were selected from the ORFs having the nucleotide sequence represented by SEQ ID NO: 4546.

[5036] The probes having the nucleotide sequence represented by SEQ ID NOS: 56470, 56471, 56472, 56473, 56474, 56475, 56476, 56477, 56478, 56479, 56480 were selected from the ORFs having the nucleotide sequence represented by SEQ ID NO: 4547.

[5037] The probes having the nucleotide sequence represented by SEQ ID NOS: 56481, 56482, 56483, 56484, 56485, 56486, 56487, 56488, 56489, 56490, 56491 were selected from the ORFs having the nucleotide sequence represented by SEQ ID NO: 4548.

[5038] The probes having the nucleotide sequence represented by SEQ ID NOS: 56492, 56493, 56494, 56495, 56496, 56497, 56498, 56499, 56500, 56501, 56502 were selected from the ORFs having the nucleotide sequence represented by SEQ ID NO: 4549.

[5039] The probes having the nucleotide sequence represented by SEQ ID NOS: 56503, 56504, 56505, 56506, 56507, 56508, 56509, 56510, 56511, 56512, 56513 were selected from the ORFs having the nucleotide sequence represented by SEQ ID NO: 4550.

[5040] The probes having the nucleotide sequence represented by SEQ ID NOS: 56514, 56515, 56516, 56517, 56518, 56519, 56520, 56521, 56522, 56523, 56524 were selected from the ORFs having the nucleotide sequence represented by SEQ ID NO: 4551.

[5041] The probes having the nucleotide sequence represented by SEQ ID NOS: 56525, 56526, 56527, 56528, 56529, 56530, 56531, 56532, 56533, 56534, 56535, 56536, 56537, 56538, 56539, 56540, 56541, 56542, 56543, 56544, 56545, 56546 were selected from the ORFs having the nucleotide sequence represented by SEQ ID NO: 4552.

[5042] The probes having the nucleotide sequence represented by SEQ ID NOS: 56547, 56548, 56549, 56550, 56551, 56552, 56553, 56554, 56555, 56556, 56557 were selected from the ORFs having the nucleotide sequence represented by SEQ ID NO: 4553.

[5043] The probes having the nucleotide sequence represented by SEQ ID NOS: 56558, 56559, 56560, 56561, 56562, 56563, 56564, 56565, 56566, 56567, 56568 were selected from the ORFs having the nucleotide sequence represented by SEQ ID NO: 4554.

[5044] The probes having the nucleotide sequence represented by SEQ ID NOS: 56569, 56570, 56571, 56572, 56573, 56574, 56575, 56576, 56577, 56578, 56579 were selected from the ORFs having the nucleotide sequence represented by SEQ ID NO: 4555.

[5045] The probes having the nucleotide sequence represented by SEQ ID NOS: 56580, 56581, 56582, 56583, 56584, 56585, 56586, 56587, 56588, 56589, 56590 were selected from the ORFs having the nucleotide sequence represented by SEQ ID NO: 4556.

[5046] The probes having the nucleotide sequence represented by SEQ ID NOS: 56591, 56592, 56593, 56594, 56595, 56596, 56597, 56598, 56599, 56600, 56601 were selected from the ORFs having the nucleotide sequence represented by SEQ ID NO: 4557.

[5047] The probes having the nucleotide sequence represented by SEQ ID NOS: 56602, 56603, 56604, 56605, 56606, 56607, 56608, 56609, 56610, 56611, 56612 were selected from the ORFs having the nucleotide sequence represented by SEQ ID NO: 4558.

[5048] The probes having the nucleotide sequence represented by SEQ ID NOS: 56613, 56614, 56615, 56616, 56617, 56618, 56619, 56620, 56621, 56622, 56623 were selected from the ORFs having the nucleotide sequence represented by SEQ ID NO: 4559.

[5049] The probes having the nucleotide sequence represented by SEQ ID NOS: 56624, 56625, 56626, 56627, 56628, 56629, 56630, 56631, 56632, 56633, 56634 were selected from the ORFs having the nucleotide sequence represented by SEQ ID NO: 4560.

[5050] The probes having the nucleotide sequence represented by SEQ ID NOS: 56635, 56636, 56637, 56638, 56639, 56640, 56641, 56642, 56643, 56644, 56645 were selected from the ORFs having the nucleotide sequence represented by SEQ ID NO: 4561.

[5051] The probes having the nucleotide sequence represented by SEQ ID NOS: 56646, 56647, 56648, 56649, 56650, 56651, 56652, 56653, 56654, 56655, 56656 were selected from the ORFs having the nucleotide sequence represented by SEQ ID NO: 4562.

[5052] The probes having the nucleotide sequence represented by SEQ ID NOS: 56657, 56658, 56659, 56660, 56661, 56662, 56663, 56664, 56665, 56666, 56667 were selected from the ORFs having the nucleotide sequence represented by SEQ ID NO: 4563.

[5053] The probes having the nucleotide sequence represented by SEQ ID NOS: 56668, 56669, 56670, 56671, 56672, 56673, 56674, 56675, 56676, 56677, 56678 were selected from the ORFs having the nucleotide sequence represented by SEQ ID NO: 4564.

[5054] The probes having the nucleotide sequence represented by SEQ ID NOS: 56679, 56680, 56681, 56682, 56683, 56684, 56685, 56686, 56687, 56688, 56689 were selected from the ORFs having the nucleotide sequence represented by SEQ ID NO: 4565.

[5055] The probes having the nucleotide sequence represented by SEQ ID NOS: 56690, 56691, 56692, 56693, 56694, 56695, 56696, 56697, 56698, 56699, 56700 were selected from the ORFs having the nucleotide sequence represented by SEQ ID NO: 4566.

[5056] The probes having the nucleotide sequence represented by SEQ ID NOS: 56701, 56702, 56703, 56704, 56705, 56706, 56707, 56708, 56709, 56710, 56711 were selected from the ORFs having the nucleotide sequence represented by SEQ ID NO: 4567.

[5057] The probes having the nucleotide sequence represented by SEQ ID NOS: 56712, 56713, 56714, 56715, 56716, 56717, 56718, 56719, 56720, 56721, 56722, 56723, 56724, 56725, 56726, 56727, 56728, 56729, 56730, 56731, 56732, 56733 were selected from the ORFs having the nucleotide sequence represented by SEQ ID NO: 4568.

[5058] The probes having the nucleotide sequence represented by SEQ ID NOS: 56734, 56735, 56736, 56737, 56738, 56739, 56740, 56741, 56742, 56743, 56744 were selected from the ORFs having the nucleotide sequence represented by SEQ ID NO: 4569.

[5059] The probes having the nucleotide sequence represented by SEQ ID NOS: 56745, 56746, 56747, 56748, 56749, 56750, 56751, 56752, 56753, 56754, 56755 were selected from the ORFs having the nucleotide sequence represented by SEQ ID NO: 4570.

[5060] The probes having the nucleotide sequence represented by SEQ ID NOS: 56756, 56757, 56758, 56759, 56760, 56761, 56762, 56763, 56764, 56765, 56766 were selected from the ORFs having the nucleotide sequence represented by SEQ ID NO: 4571.

[5061] The probes having the nucleotide sequence represented by SEQ ID NOS: 56767, 56768, 56769, 56770, 56771, 56772, 56773, 56774, 56775, 56776, 56777 were selected from the ORFs having the nucleotide sequence represented by SEQ ID NO: 4572.

[5062] The probes having the nucleotide sequence represented by SEQ ID NOS: 56778, 56779, 56780, 56781, 56782, 56783, 56784, 56785, 56786, 56787, 56788 were selected from the ORFs having the nucleotide sequence represented by SEQ ID NO: 4573.

[5063] The probes having the nucleotide sequence represented by SEQ ID NOS: 56789, 56790, 56791, 56792, 56793, 56794, 56795, 56796, 56797, 56798, 56799 were selected from the ORFs having the nucleotide sequence represented by SEQ ID NO: 4574.

[5064] The probes having the nucleotide sequence represented by SEQ ID NOS: 56800, 56801, 56802, 56803, 56804, 56805, 56806, 56807, 56808, 56809, 56810 were selected from the ORFs having the nucleotide sequence represented by SEQ ID NO: 4575.

[5065] The probes having the nucleotide sequence represented by SEQ ID NOS: 56811, 56812, 56813, 56814, 56815, 56816, 56817, 56818, 56819, 56820, 56821 were selected from the ORFs having the nucleotide sequence represented by SEQ ID NO: 4576.

[5066] The probes having the nucleotide sequence represented by SEQ ID NOS: 56822, 56823, 56824, 56825, 56826, 56827, 56828, 56829, 56830, 56831, 56832 were selected from the ORFs having the nucleotide sequence represented by SEQ ID NO: 4577.

[5067] The probes having the nucleotide sequence represented by SEQ ID NOS: 56833, 56834, 56835, 56836, 56837, 56838, 56839, 56840, 56841, 56842, 56843 were selected from the ORFs having the nucleotide sequence represented by SEQ ID NO: 4578.

[5068] The probes having the nucleotide sequence represented by SEQ ID NOS: 56844, 56845, 56846, 56847, 56848, 56849, 56850, 56851, 56852, 56853, 56854 were selected from the ORFs having the nucleotide sequence represented by SEQ ID NO: 4579.

[5069] The probes having the nucleotide sequence represented by SEQ ID NOS: 56855, 56856, 56857, 56858, 56859, 56860, 56861, 56862, 56863, 56864, 56865 were selected from the ORFs having the nucleotide sequence represented by SEQ ID NO: 4580.

[5070] The probes having the nucleotide sequence represented by SEQ ID NOS: 56866, 56867, 56868, 56869, 56870, 56871, 56872, 56873, 56874, 56875, 56876 were selected from the ORFs having the nucleotide sequence represented by SEQ ID NO: 4581.

[5071] The probes having the nucleotide sequence represented by SEQ ID NOS: 56877, 56878, 56879, 56880, 56881, 56882, 56883, 56884, 56885, 56886, 56887 were selected from the ORFs having the nucleotide sequence represented by SEQ ID NO: 4582.

[5072] The probes having the nucleotide sequence represented by SEQ ID NOS: 56888, 56889, 56890, 56891, 56892, 56893, 56894, 56895, 56896, 56897, 56898,were selected from the ORFs having the nucleotide sequence represented by SEQ ID NO: 4583.

[5073] The probes having the nucleotide sequence represented by SEQ ID NOS: 56899, 56900, 56901, 56902, 56903, 56904, 56905, 56906, 56907, 56908, 56909 were selected from the ORFs having the nucleotide sequence represented by SEQ ID NO: 4584.

[5074] The probes having the nucleotide sequence represented by SEQ ID NOS: 56910, 56911, 56912, 56913, 56914, 56915, 56916, 56917, 56918, 56919, 56920 were selected from the ORFs having the nucleotide sequence represented by SEQ ID NO: 4585.

[5075] The probes having the nucleotide sequence represented by SEQ ID NOS: 56921, 56922, 56923, 56924, 56925, 56926, 56927, 56928, 56929, 56930, 56931 were selected from the ORFs having the nucleotide sequence represented by SEQ ID NO: 4586.

[5076] The probes having the nucleotide sequence represented by SEQ ID NOS: 56932, 56933, 56934, 56935, 56936, 56937, 56938, 56939, 56940, 56941, 56942 were selected from the ORFs having the nucleotide sequence represented by SEQ ID NO: 4587.

[5077] The probes having the nucleotide sequence represented by SEQ ID NOS: 56943, 56944, 56945, 56946, 56947, 56948, 56949, 56950, 56951, 56952, 56953 were selected from the ORFs having the nucleotide sequence represented by SEQ ID NO: 4588.

[5078] The probes having the nucleotide sequence represented by SEQ ID NOS: 56954, 56955, 56956, 56957, 56958, 56959, 56960, 56961, 56962, 56963, 56964 were selected from the ORFs having the nucleotide sequence represented by SEQ ID NO: 4589.

[5079] The probes having the nucleotide sequence represented by SEQ ID NOS: 56965, 56966, 56967, 56968, 56969, 56970, 56971, 56972, 56973, 56974, 56975 were selected from the ORFs having the nucleotide sequence represented by SEQ ID NO: 4590.

[5080] The probes having the nucleotide sequence represented by SEQ ID NOS: 56976, 56977, 56978, 56979, 56980, 56981, 56982, 56983, 56984, 56985, 56986 were selected from the ORFs having the nucleotide sequence represented by SEQ ID NO: 4591.

[5081] The probes having the nucleotide sequence represented by SEQ ID NOS: 56987, 56988, 56989, 56990, 56991, 56992, 56993, 56994, 56995, 56996, 56997 were selected from the ORFs having the nucleotide sequence represented by SEQ ID NO: 4592.

[5082] The probes having the nucleotide sequence represented by SEQ ID NOS: 56998, 56999, 57000, 57001, 57002, 57003, 57004, 57005, 57006, 57007, 57008 were selected from the ORFs having the nucleotide sequence represented by SEQ ID NO: 4593.

[5083] The probes having the nucleotide sequence represented by SEQ ID NOS: 57009, 57010, 57011, 57012, 57013, 57014, 57015, 57016, 57017, 57018, 57019 were selected from the ORFs having the nucleotide sequence represented by SEQ ID NO: 4594.

[5084] The probes having the nucleotide sequence represented by SEQ ID NOS: 57020, 57021, 57022, 57023, 57024, 57025, 57026, 57027, 57028, 57029, 57030 were selected from the ORFs having the nucleotide sequence represented by SEQ ID NO: 4595.

[5085] The probes having the nucleotide sequence represented by SEQ ID NOS: 57031, 57032, 57033, 57034, 57035, 57036, 57037, 57038, 57039, 57040, 57041 were selected from the ORFs having the nucleotide sequence represented by SEQ ID NO: 4596.

[5086] The probes having the nucleotide sequence represented by SEQ ID NOS: 57042, 57043, 57044, 57045, 57046, 57047, 57048, 57049, 57050, 57051, 57052 were selected from the ORFs having the nucleotide sequence represented by SEQ ID NO: 4597.

[5087] The probes having the nucleotide sequence represented by SEQ ID NOS: 57053, 57054, 57055, 57056, 57057, 57058, 57059, 57060, 57061, 57062, 57063 were selected from the ORFs having the nucleotide sequence represented by SEQ ID NO: 4598.

[5088] The probes having the nucleotide sequence represented by SEQ ID NOS: 57064, 57065, 57066, 57067, 57068, 57069, 57070, 57071, 57072, 57073, 57074 were selected from the ORFs having the nucleotide sequence represented by SEQ ID NO: 4599.

[5089] The probes having the nucleotide sequence represented by SEQ ID NOS: 57075, 57076, 57077, 57078, 57079, 57080, 57081, 57082, 57083, 57084, 57085 were selected from the ORFs having the nucleotide sequence represented by SEQ ID NO: 4600.

[5090] The probes having the nucleotide sequence represented by SEQ ID NOS: 57086, 57087, 57088, 57089, 57090, 57091, 57092, 57093, 57094, 57095, 57096, 57097, 57098, 57099, 57100, 57101, 57102, 57103, 57104, 57105, 57106, 57107 were selected from the ORFs having the nucleotide sequence represented by SEQ ID NO: 4601.

[5091] The probes having the nucleotide sequence represented by SEQ ID NOS: 57108, 57109, 57110, 57111, 57112, 57113, 57114, 57115, 57116, 57117, 57118 were selected from the ORFs having the nucleotide sequence represented by SEQ ID NO: 4602.

[5092] The probes having the nucleotide sequence represented by SEQ ID NOS: 57119, 57120, 57121, 57122, 57123, 57124, 57125, 57126, 57127, 57128, 57129 were selected from the ORFs having the nucleotide sequence represented by SEQ ID NO: 4603.

[5093] The probes having the nucleotide sequence represented by SEQ ID NOS: 57130, 57131, 57132, 57133, 57134, 57135, 57136, 57137, 57138, 57139, 57140 were selected from the ORFs having the nucleotide sequence represented by SEQ ID NO: 4604.

[5094] The probes having the nucleotide sequence represented by SEQ ID NOS: 57141, 57142, 57143, 57144, 57145, 57146, 57147, 57148, 57149, 57150, 57151 were selected from the ORFs having the nucleotide sequence represented by SEQ ID NO: 4605.

[5095] The probes having the nucleotide sequence represented by SEQ ID NOS: 57152, 57153, 57154, 57155, 57156, 57157, 57158, 57159, 57160, 57161, 57162 were selected from the ORFs having the nucleotide sequence represented by SEQ ID NO: 4606.

[5096] The probes having the nucleotide sequence represented by SEQ ID NOS: 57163, 57164, 57165, 57166, 57167, 57168, 57169, 57170, 57171, 57172, 57173 were selected from the ORFs having the nucleotide sequence represented by SEQ ID NO: 4607.

[5097] The probes having the nucleotide sequence represented by SEQ ID NOS: 57174, 57175, 57176, 57177, 57178, 57179, 57180, 57181, 57182, 57183, 57184 were selected from the ORFs having the nucleotide sequence represented by SEQ ID NO: 4608.

[5098] The probes having the nucleotide sequence represented by SEQ ID NOS: 57185, 57186, 57187, 57188, 57189, 57190, 57191, 57192, 57193, 57194, 57195 were selected from the ORFs having the nucleotide sequence represented by SEQ ID NO: 4609.

[5099] The probes having the nucleotide sequence represented by SEQ ID NOS: 57196, 57197, 57198, 57199, 57200, 57201, 57202, 57203, 57204, 57205, 57206 were selected from the ORFs having the nucleotide sequence represented by SEQ ID NO: 4610.

[5100] The probes having the nucleotide sequence represented by SEQ ID NOS: 57207, 57208, 57209, 57210, 57211, 57212, 57213, 57214, 57215, 57216, 57217 were selected from the ORFs having the nucleotide sequence represented by SEQ ID NO: 4611.

[5101] The probes having the nucleotide sequence represented by SEQ ID NOS: 57218, 57219, 57220, 57221, 57222, 57223, 57224, 57225, 57226, 57227, 57228 were selected from the ORFs having the nucleotide sequence represented by SEQ ID NO: 4612.

[5102] The probes having the nucleotide sequence represented by SEQ ID NOS: 57229, 57230, 57231, 57232, 57233, 57234, 57235, 57236, 57237, 57238, 57239 were selected from the ORFs having the nucleotide sequence represented by SEQ ID NO: 4613.

[5103] The probes having the nucleotide sequence represented by SEQ ID NOS: 57240, 57241, 57242, 57243, 57244, 57245, 57246, 57247, 57248, 57249, 57250 were selected from the ORFs having the nucleotide sequence represented by SEQ ID NO: 4614.

[5104] The probes having the nucleotide sequence represented by SEQ ID NOS: 57251, 57252, 57253, 57254, 57255, 57256, 57257, 57258, 57259, 57260, 57261 were selected from the ORFs having the nucleotide sequence represented by SEQ ID NO: 4615.

[5105] The probes having the nucleotide sequence represented by SEQ ID NOS: 57262, 57263, 57264, 57265, 57266, 57267, 57268, 57269, 57270, 57271, 57272 were selected from the ORFs having the nucleotide sequence represented by SEQ ID NO: 4616.

[5106] The probes having the nucleotide sequence represented by SEQ ID NOS: 57273, 57274, 57275, 57276, 57277, 57278, 57279, 57280, 57281, 57282, 57283 were selected from the ORFs having the nucleotide sequence represented by SEQ ID NO: 4617.

[5107] The probes having the nucleotide sequence represented by SEQ ID NOS: 57284, 57285, 57286, 57287, 57288, 57289, 57290, 57291, 57292, 57293, 57294 were selected from the ORFs having the nucleotide sequence represented by SEQ ID NO: 4618.

[5108] The probes having the nucleotide sequence represented by SEQ ID NOS: 57295, 57296, 57297, 57298, 57299, 57300, 57301, 57302, 57303, 57304, 57305 were selected from the ORFs having the nucleotide sequence represented by SEQ ID NO: 4619.

[5109] The probes having the nucleotide sequence represented by SEQ ID NOS: 57306, 57307, 57308, 57309, 57310, 57311, 57312, 57313, 57314, 57315, 57316 were selected from the ORFs having the nucleotide sequence represented by SEQ ID NO: 4620.

[5110] The probes having the nucleotide sequence represented by SEQ ID NOS: 57317, 57318, 57319, 57320, 57321, 57322, 57323, 57324, 57325, 57326, 57327 were selected from the ORFs having the nucleotide sequence represented by SEQ ID NO: 4621.

[5111] The probes having the nucleotide sequence represented by SEQ ID NOS: 57328, 57329, 57330, 57331, 57332, 57333, 57334, 57335, 57336, 57337, 57338 were selected from the ORFs having the nucleotide sequence represented by SEQ ID NO: 4622.

[5112] The probes having the nucleotide sequence represented by SEQ ID NOS: 57339, 57340, 57341, 57342, 57343, 57344, 57345, 57346, 57347, 57348, 57349 were selected from the ORFs having the nucleotide sequence represented by SEQ ID NO: 4623.

[5113] The probes having the nucleotide sequence represented by SEQ ID NOS: 57350, 57351, 57352, 57353, 57354, 57355, 57356, 57357, 57358, 57359, 57360 were selected from the ORFs having the nucleotide sequence represented by SEQ ID NO: 4624.

[5114] The probes having the nucleotide sequence represented by SEQ ID NOS: 57361, 57362, 57363, 57364, 57365, 57366, 57367, 57368, 57369, 57370, 57371 were selected from the ORFs having the nucleotide sequence represented by SEQ ID NO: 4625.

[5115] The probes having the nucleotide sequence represented by SEQ ID NOS: 57372, 57373, 57374, 57375, 57376, 57377, 57378, 57379, 57380, 57381, 57382 were selected from the ORFs having the nucleotide sequence represented by SEQ ID NO: 4626.

[5116] The probes having the nucleotide sequence represented by SEQ ID NOS: 57383, 57384, 57385, 57386, 57387, 57388, 57389, 57390, 57391, 57392, 57393 were selected from the ORFs having the nucleotide sequence represented by SEQ ID NO: 4627.

[5117] The probes having the nucleotide sequence represented by SEQ ID NOS: 57394, 57395, 57396, 57397, 57398, 57399, 57400, 57401, 57402, 57403, 57404 were selected from the ORFs having the nucleotide sequence represented by SEQ ID NO: 4628.

[5118] The probes having the nucleotide sequence represented by SEQ ID NOS: 57405, 57406, 57407, 57408, 57409, 57410, 57411, 57412, 57413, 57414, 57415 were selected from the ORFs having the nucleotide sequence represented by SEQ ID NO: 4629.

[5119] The probes having the nucleotide sequence represented by SEQ ID NOS: 57416, 57417, 57418, 57419, 57420, 57421, 57422, 57423, 57424, 57425, 57426 were selected from the ORFs having the nucleotide sequence represented by SEQ ID NO: 4630.

[5120] The probes having the nucleotide sequence represented by SEQ ID NOS: 57427, 57428, 57429, 57430, 57431, 57432, 57433, 57434, 57435, 57436, 57437 were selected from the ORFs having the nucleotide sequence represented by SEQ ID NO: 4631.

[5121] The probes having the nucleotide sequence represented by SEQ ID NOS: 57438, 57439, 57440, 57441, 57442, 57443, 57444, 57445, 57446, 57447, 57448 were selected from the ORFs having the nucleotide sequence represented by SEQ ID NO: 4632.

[5122] The probes having the nucleotide sequence represented by SEQ ID NOS: 57449, 57450, 57451, 57452, 57453, 57454, 57455, 57456, 57457, 57458, 57459 were selected from the ORFs having the nucleotide sequence represented by SEQ ID NO: 4633.

[5123] The probes having the nucleotide sequence represented by SEQ ID NOS: 57460, 57461, 57462, 57463, 57464, 57465, 57466, 57467, 57468, 57469, 57470 were selected from the ORFs having the nucleotide sequence represented by SEQ ID NO: 4634.

[5124] The probes having the nucleotide sequence represented by SEQ ID NOS: 57471, 57472, 57473, 57474, 57475, 57476, 57477, 57478, 57479, 57480, 57481 were selected from the ORFs having the nucleotide sequence represented by SEQ ID NO: 4635.

[5125] The probes having the nucleotide sequence represented by SEQ ID NOS: 57482, 57483, 57484, 57485, 57486, 57487, 57488, 57489, 57490, 57491, 57492 were selected from the ORFs having the nucleotide sequence represented by SEQ ID NO: 4636.

[5126] The probes having the nucleotide sequence represented by SEQ ID NOS: 57493, 57494, 57495, 57496, 57497, 57498, 57499, 57500, 57501, 57502, 57503 were selected from the ORFs having the nucleotide sequence represented by SEQ ID NO: 4637.

[5127] The probes having the nucleotide sequence represented by SEQ ID NOS: 57504, 57505, 57506, 57507, 57508, 57509, 57510, 57511, 57512, 57513, 57514 were selected from the ORFs having the nucleotide sequence represented by SEQ ID NO: 4638.

[5128] The probes having the nucleotide sequence represented by SEQ ID NOS: 57515, 57516, 57517, 57518, 57519, 57520, 57521, 57522, 57523, 57524, 57525 were selected from the ORFs having the nucleotide sequence represented by SEQ ID NO: 4639.

[5129] The probes having the nucleotide sequence represented by SEQ ID NOS: 57526, 57527, 57528, 57529, 57530, 57531, 57532, 57533, 57534, 57535, 57536 were selected from the ORFs having the nucleotide sequence represented by SEQ ID NO: 4640.

[5130] The probes having the nucleotide sequence represented by SEQ ID NOS: 57537, 57538, 57539, 57540, 57541, 57542, 57543, 57544, 57545, 57546, 57547 were selected from the ORFs having the nucleotide sequence represented by SEQ ID NO: 4641.

[5131] The probes having the nucleotide sequence represented by SEQ ID NOS: 57548, 57549, 57550, 57551, 57552, 57553, 57554, 57555, 57556, 57557, 57558 were selected from the ORFs having the nucleotide sequence represented by SEQ ID NO: 4642.

[5132] The probes having the nucleotide sequence represented by SEQ ID NOS: 57559, 57560, 57561, 57562, 57563, 57564, 57565, 57566, 57567, 57568, 57569 were selected from the ORFs having the nucleotide sequence represented by SEQ ID NO: 4643.

[5133] The probes having the nucleotide sequence represented by SEQ ID NOS: 57570, 57571, 57572, 57573, 57574, 57575, 57576, 57577, 57578, 57579, 57580 were selected from the ORFs having the nucleotide sequence represented by SEQ ID NO: 4644.

[5134] The probes having the nucleotide sequence represented by SEQ ID NOS: 57581, 57582, 57583, 57584, 57585, 57586, 57587, 57588, 57589, 57590, 57591 were selected from the ORFs having the nucleotide sequence represented by SEQ ID NO: 4645.

[5135] The probes having the nucleotide sequence represented by SEQ ID NOS: 57592, 57593, 57594, 57595, 57596, 57597, 57598, 57599, 57600, 57601, 57602 were selected from the ORFs having the nucleotide sequence represented by SEQ ID NO: 4646.

[5136] The probes having the nucleotide sequence represented by SEQ ID NOS: 57603, 57604, 57605, 57606, 57607, 57608, 57609, 57610, 57611, 57612, 57613 were selected from the ORFs having the nucleotide sequence represented by SEQ ID NO: 4647.

[5137] The probes having the nucleotide sequence represented by SEQ ID NOS: 57614, 57615, 57616, 57617, 57618, 57619, 57620, 57621, 57622, 57623, 57624 were selected from the ORFs having the nucleotide sequence represented by SEQ ID NO: 4648.

[5138] The probes having the nucleotide sequence represented by SEQ ID NOS: 57625, 57626, 57627, 57628, 57629, 57630, 57631, 57632, 57633, 57634, 57635 were selected from the ORFs having the nucleotide sequence represented by SEQ ID NO: 4649.

[5139] The probes having the nucleotide sequence represented by SEQ ID NOS: 57636, 57637, 57638, 57639, 57640, 57641, 57642, 57643, 57644, 57645, 57646 were selected from the ORFs having the nucleotide sequence represented by SEQ ID NO: 4650.

[5140] The probes having the nucleotide sequence represented by SEQ ID NOS: 57647, 57648, 57649, 57650, 57651, 57652, 57653, 57654, 57655, 57656, 57657 were selected from the ORFs having the nucleotide sequence represented by SEQ ID NO: 4651.

[5141] The probes having the nucleotide sequence represented by SEQ ID NOS: 57658, 57659, 57660, 57661, 57662, 57663, 57664, 57665, 57666, 57667, 57668 were selected from the ORFs having the nucleotide sequence represented by SEQ ID NO: 4652.

[5142] The probes having the nucleotide sequence represented by SEQ ID NOS: 57669, 57670, 57671, 57672, 57673, 57674, 57675, 57676, 57677, 57678, 57679 were selected from the ORFs having the nucleotide sequence represented by SEQ ID NO: 4653.

[5143] The probes having the nucleotide sequence represented by SEQ ID NOS: 57680, 57681, 57682, 57683, 57684, 57685, 57686, 57687, 57688, 57689, 57690 were selected from the ORFs having the nucleotide sequence represented by SEQ ID NO: 4654.

[5144] The probes having the nucleotide sequence represented by SEQ ID NOS: 57691, 57692, 57693, 57694, 57695, 57696, 57697, 57698, 57699, 57700, 57701 were selected from the ORFs having the nucleotide sequence represented by SEQ ID NO: 4655.

[5145] The probes having the nucleotide sequence represented by SEQ ID NOS: 57702, 57703, 57704, 57705, 57706, 57707, 57708, 57709, 57710, 57711, 57712 were selected from the ORFs having the nucleotide sequence represented by SEQ ID NO: 4656.

[5146] The probes having the nucleotide sequence represented by SEQ ID NOS: 57713, 57714, 57715, 57716, 57717, 57718, 57719, 57720, 57721, 57722, 57723 were selected from the ORFs having the nucleotide sequence represented by SEQ ID NO: 4657.

[5147] The probes having the nucleotide sequence represented by SEQ ID NOS: 57724, 57725, 57726, 57727, 57728, 57729, 57730, 57731, 57732, 57733, 57734 were selected from the ORFs having the nucleotide sequence represented by SEQ ID NO: 4658.

[5148] The probes having the nucleotide sequence represented by SEQ ID NOS: 57735, 57736, 57737, 57738, 57739, 57740, 57741, 57742, 57743, 57744, 57745 were selected from the ORFs having the nucleotide sequence represented by SEQ ID NO: 4659.

[5149] The probes having the nucleotide sequence represented by SEQ ID NOS: 57746, 57747, 57748, 57749, 57750, 57751, 57752, 57753, 57754, 57755, 57756 were selected from the ORFs having the nucleotide sequence represented by SEQ ID NO: 4660.

[5150] The probes having the nucleotide sequence represented by SEQ ID NOS: 57757, 57758, 57759, 57760, 57761, 57762, 57763, 57764, 57765, 57766, 57767 were selected from the ORFs having the nucleotide sequence represented by SEQ ID NO: 4661.

[5151] The probes having the nucleotide sequence represented by SEQ ID NOS: 57768, 57769, 57770, 57771, 57772, 57773, 57774, 57775, 57776, 57777, 57778 were selected from the ORFs having the nucleotide sequence represented by SEQ ID NO: 4662.

[5152] The probes having the nucleotide sequence represented by SEQ ID NOS: 57779, 57780, 57781, 57782, 57783, 57784, 57785, 57786, 57787, 57788, 57789 were selected from the ORFs having the nucleotide sequence represented by SEQ ID NO: 4663.

[5153] The probes having the nucleotide sequence represented by SEQ ID NOS: 57790, 57791, 57792, 57793, 57794, 57795, 57796, 57797, 57798, 57799, 57800 were selected from the ORFs having the nucleotide sequence represented by SEQ ID NO: 4664.

[5154] The probes having the nucleotide sequence represented by SEQ ID NOS: 57801, 57802, 57803, 57804, 57805, 57806, 57807, 57808, 57809, 57810, 57811 were selected from the ORFs having the nucleotide sequence represented by SEQ ID NO: 4665.

[5155] The probes having the nucleotide sequence represented by SEQ ID NOS: 57812, 57813, 57814, 57815, 57816, 57817, 57818, 57819, 57820, 57821, 57822 were selected from the ORFs having the nucleotide sequence represented by SEQ ID NO: 4666.

[5156] The probes having the nucleotide sequence represented by SEQ ID NOS: 57823, 57824, 57825, 57826, 57827, 57828, 57829, 57830, 57831, 57832, 57833 were selected from the ORFs having the nucleotide sequence represented by SEQ ID NO: 4667.

[5157] The probes having the nucleotide sequence represented by SEQ ID NOS: 57834, 57835, 57836, 57837, 57838, 57839, 57840, 57841, 57842, 57843, 57844 were selected from the ORFs having the nucleotide sequence represented by SEQ ID NO: 4668.

[5158] The probes having the nucleotide sequence represented by SEQ ID NOS: 57845, 57846, 57847, 57848, 57849, 57850, 57851, 57852, 57853, 57854, 57855 were selected from the ORFs having the nucleotide sequence represented by SEQ ID NO: 4669.

[5159] The probes having the nucleotide sequence represented by SEQ ID NOS: 57856, 57857, 57858, 57859, 57860, 57861, 57862, 57863, 57864, 57865, 57866 were selected from the ORFs having the nucleotide sequence represented by SEQ ID NO: 4670.

[5160] The probes having the nucleotide sequence represented by SEQ ID NOS: 57867, 57868, 57869, 57870, 57871, 57872, 57873, 57874, 57875, 57876, 57877 were selected from the ORFs having the nucleotide sequence represented by SEQ ID NO: 4671.

[5161] The probes having the nucleotide sequence represented by SEQ ID NOS: 57878, 57879, 57880, 57881, 57882, 57883, 57884, 57885, 57886, 57887, 57888 were selected from the ORFs having the nucleotide sequence represented by SEQ ID NO: 4672.

[5162] The probes having the nucleotide sequence represented by SEQ ID NOS: 57889, 57890, 57891, 57892, 57893, 57894, 57895, 57896, 57897, 57898, 57899 were selected from the ORFs having the nucleotide sequence represented by SEQ ID NO: 4673.

[5163] The probes having the nucleotide sequence represented by SEQ ID NOS: 57900, 57901, 57902, 57903, 57904, 57905, 57906, 57907, 57908, 57909, 57910 were selected from the ORFs having the nucleotide sequence represented by SEQ ID NO: 4674.

[5164] The probes having the nucleotide sequence represented by SEQ ID NOS: 57911, 57912, 57913, 57914, 57915, 57916, 57917, 57918, 57919, 57920, 57921 were selected from the ORFs having the nucleotide sequence represented by SEQ ID NO: 4675.

[5165] The probes having the nucleotide sequence represented by SEQ ID NOS: 57922, 57923, 57924, 57925, 57926, 57927, 57928, 57929, 57930, 57931, 57932 were selected from the ORFs having the nucleotide sequence represented by SEQ ID NO: 4676.

[5166] The probes having the nucleotide sequence represented by SEQ ID NOS: 57933, 57934, 57935, 57936, 57937, 57938, 57939, 57940, 57941, 57942, 57943 were selected from the ORFs having the nucleotide sequence represented by SEQ ID NO: 4677.

[5167] The probes having the nucleotide sequence represented by SEQ ID NOS: 57944, 57945, 57946, 57947, 57948, 57949, 57950, 57951, 57952, 57953, 57954 were selected from the ORFs having the nucleotide sequence represented by SEQ ID NO: 4678.

[5168] The probes having the nucleotide sequence represented by SEQ ID NOS: 57955, 57956, 57957, 57958, 57959, 57960, 57961, 57962, 57963, 57964, 57965 were selected from the ORFs having the nucleotide sequence represented by SEQ ID NO: 4679.

[5169] The probes having the nucleotide sequence represented by SEQ ID NOS: 57966, 57967, 57968, 57969, 57970, 57971, 57972, 57973, 57974, 57975, 57976 were selected from the ORFs having the nucleotide sequence represented by SEQ ID NO: 4680.

[5170] The probes having the nucleotide sequence represented by SEQ ID NOS: 57977, 57978, 57979, 57980, 57981, 57982, 57983, 57984, 57985, 57986, 57987 were selected from the ORFs having the nucleotide sequence represented by SEQ ID NO: 4681.

[5171] The probes having the nucleotide sequence represented by SEQ ID NOS: 57988, 57989, 57990, 57991, 57992, 57993, 57994, 57995, 57996, 57997, 57998 were selected from the ORFs having the nucleotide sequence represented by SEQ ID NO: 4682.

[5172] The probes having the nucleotide sequence represented by SEQ ID NOS: 57999, 58000, 58001, 58002, 58003, 58004, 58005, 58006, 58007, 58008, 58009 were selected from the ORFs having the nucleotide sequence represented by SEQ ID NO: 4683.

[5173] The probes having the nucleotide sequence represented by SEQ ID NOS: 58010, 58011, 58012, 58013, 58014, 58015, 58016, 58017, 58018, 58019, 58020 were selected from the ORFs having the nucleotide sequence represented by SEQ ID NO: 4684.

[5174] The probes having the nucleotide sequence represented by SEQ ID NOS: 58021, 58022, 58023, 58024, 58025, 58026, 58027, 58028, 58029, 58030, 58031 were selected from the ORFs having the nucleotide sequence represented by SEQ ID NO: 4685.

[5175] The probes having the nucleotide sequence represented by SEQ ID NOS: 58032, 58033, 58034, 58035, 58036, 58037, 58038, 58039, 58040, 58041, 58042 were selected from the ORFs having the nucleotide sequence represented by SEQ ID NO: 4686.

[5176] The probes having the nucleotide sequence represented by SEQ ID NOS: 58043, 58044, 58045, 58046, 58047, 58048, 58049, 58050, 58051, 58052, 58053 were selected from the ORFs having the nucleotide sequence represented by SEQ ID NO: 4687.

[5177] The probes having the nucleotide sequence represented by SEQ ID NOS: 58054, 58055, 58056, 58057, 58058, 58059, 58060, 58061, 58062, 58063, 58064 were selected from the ORFs having the nucleotide sequence represented by SEQ ID NO: 4688.

[5178] The probes having the nucleotide sequence represented by SEQ ID NOS: 58065, 58066, 58067, 58068, 58069, 58070, 58071, 58072, 58073, 58074, 58075 were selected from the ORFs having the nucleotide sequence represented by SEQ ID NO: 4689.

[5179] The probes having the nucleotide sequence represented by SEQ ID NOS: 58076, 58077, 58078, 58079, 58080, 58081, 58082, 58083, 58084, 58085, 58086 were selected from the ORFs having the nucleotide sequence represented by SEQ ID NO: 4690.

[5180] The probes having the nucleotide sequence represented by SEQ ID NOS: 58087, 58088, 58089, 58090, 58091, 58092, 58093, 58094, 58095, 58096, 58097 were selected from the ORFs having the nucleotide sequence represented by SEQ ID NO: 4691.

[5181] The probes having the nucleotide sequence represented by SEQ ID NOS: 58098, 58099, 58100, 58101, 58102, 58103, 58104, 58105, 58106, 58107, 58108 were selected from the ORFs having the nucleotide sequence represented by SEQ ID NO: 4692.

[5182] The probes having the nucleotide sequence represented by SEQ ID NOS: 58109, 58110, 58111, 58112, 58113, 58114, 58115, 58116, 58117, 58118, 58119 were selected from the ORFs having the nucleotide sequence represented by SEQ ID NO: 4693.

[5183] The probes having the nucleotide sequence represented by SEQ ID NOS: 58120, 58121, 58122, 58123, 58124, 58125, 58126, 58127, 58128, 58129, 58130 were selected from the ORFs having the nucleotide sequence represented by SEQ ID NO: 4694.

[5184] The probes having the nucleotide sequence represented by SEQ ID NOS: 58131, 58132, 58133, 58134, 58135, 58136, 58137, 58138, 58139, 58140, 58141 were selected from the ORFs having the nucleotide sequence represented by SEQ ID NO: 4695.

[5185] The probes having the nucleotide sequence represented by SEQ ID NOS: 58142, 58143, 58144, 58145, 58146, 58147, 58148, 58149, 58150, 58151, 58152 were selected from the ORFs having the nucleotide sequence represented by SEQ ID NO: 4696.

[5186] The probes having the nucleotide sequence represented by SEQ ID NOS: 58153, 58154, 58155, 58156, 58157, 58158, 58159, 58160, 58161, 58162, 58163 were selected from the ORFs having the nucleotide sequence represented by SEQ ID NO: 4697.

[5187] The probes having the nucleotide sequence represented by SEQ ID NOS: 58164, 58165, 58166, 58167, 58168, 58169, 58170, 58171, 58172, 58173, 58174 were selected from the ORFs having the nucleotide sequence represented by SEQ ID NO: 4698.

[5188] The probes having the nucleotide sequence represented by SEQ ID NOS: 58175, 58176, 58177, 58178, 58179, 58180, 58181, 58182, 58183, 58184, 58185 were selected from the ORFs having the nucleotide sequence represented by SEQ ID NO: 4699.

[5189] The probes having the nucleotide sequence represented by SEQ ID NOS: 58186, 58187, 58188, 58189, 58190, 58191, 58192, 58193, 58194, 58195, 58196 were selected from the ORFs having the nucleotide sequence represented by SEQ ID NO: 4700.

[5190] The probes having the nucleotide sequence represented by SEQ ID NOS: 58197, 58198, 58199, 58200, 58201, 58202, 58203, 58204, 58205, 58206, 58207 were selected from the ORFs having the nucleotide sequence represented by SEQ ID NO: 4701.

[5191] The probes having the nucleotide sequence represented by SEQ ID NOS: 58208, 58209, 58210, 58211, 58212, 58213, 58214, 58215, 58216, 58217, 58218 were selected from the ORFs having the nucleotide sequence represented by SEQ ID NO: 4702.

[5192] The probes having the nucleotide sequence represented by SEQ ID NOS: 58219, 58220, 58221, 58222, 58223, 58224, 58225, 58226, 58227, 58228, 58229 were selected from the ORFs having the nucleotide sequence represented by SEQ ID NO: 4703.

[5193] The probes having the nucleotide sequence represented by SEQ ID NOS: 58230, 58231, 58232, 58233, 58234, 58235, 58236, 58237, 58238, 58239, 58240 were selected from the ORFs having the nucleotide sequence represented by SEQ ID NO: 4704.

[5194] The probes having the nucleotide sequence represented by SEQ ID NOS: 58241, 58242, 58243, 58244,.58245, 58246, 58247, 58248, 58249, 58250, 58251 were selected from the ORFs having the nucleotide sequence represented by SEQ ID NO: 4705.

[5195] The probes having the nucleotide sequence represented by SEQ ID NOS: 58252, 58253, 58254, 58255, 58256, 58257, 58258, 58259, 58260, 58261, 58262 were selected from the ORFs having the nucleotide sequence represented by SEQ ID NO: 4706.

[5196] The probes having the nucleotide sequence represented by SEQ ID NOS: 58263, 58264, 58265, 58266, 58267, 58268, 58269, 58270, 58271, 58272, 58273 were selected from the ORFs having the nucleotide sequence represented by SEQ ID NO: 4707.

[5197] The probes having the nucleotide sequence represented by SEQ ID NOS: 58274, 58275, 58276, 58277, 58278, 58279, 58280, 58281, 58282, 58283, 58284 were selected from the ORFs having the nucleotide sequence represented by SEQ ID NO: 4708.

[5198] The probes having the nucleotide sequence represented by SEQ ID NOS: 58285, 58286, 58287, 58288, 58289, 58290, 58291, 58292, 58293, 58294, 58295 were selected from the ORFs having the nucleotide sequence represented by SEQ ID NO: 4709.

[5199] The probes having the nucleotide sequence represented by SEQ ID NOS: 58296, 58297, 58298, 58299, 58300, 58301, 58302, 58303, 58304, 58305, 58306 were selected from the ORFs having the nucleotide sequence represented by SEQ ID NO: 4710.

[5200] The probes having the nucleotide sequence represented by SEQ ID NOS: 58307, 58308, 58309, 58310, 58311, 58312, 58313, 58314, 58315, 58316, 58317 were selected from the ORFs having the nucleotide sequence represented by SEQ ID NO: 4711.

[5201] The probes having the nucleotide sequence represented by SEQ ID NOS: 58318, 58319, 58320, 58321, 58322, 58323, 58324, 58325, 58326, 58327, 58328 were selected from the ORFs having the nucleotide sequence represented by SEQ ID NO: 4712.

[5202] The probes having the nucleotide sequence represented by SEQ ID NOS: 58329, 58330, 58331, 58332, 58333, 58334, 58335, 58336, 58337, 58338, 58339 were selected from the ORFs having the nucleotide sequence represented by SEQ ID NO: 4713.

[5203] The probes having the nucleotide sequence represented by SEQ ID NOS: 58340, 58341, 58342, 58343, 58344, 58345, 58346, 58347, 58348, 58349, 58350 were selected from the ORFs having the nucleotide sequence represented by SEQ ID NO: 4714.

[5204] The probes having the nucleotide sequence represented by SEQ ID NOS: 58351, 58352, 58353, 58354, 58355, 58356, 58357, 583.58, 58359, 58360, 58361 were selected from the ORFs having the nucleotide sequence represented by SEQ ID NO: 4715.

[5205] The probes having the nucleotide sequence represented by SEQ ID NOS: 58362, 58363, 58364, 58365, 58366, 58367, 58368, 58369, 58370, 58371, 58372 were selected from the ORFs having the nucleotide sequence represented by SEQ ID NO: 4716.

[5206] The probes having the nucleotide sequence represented by SEQ ID NOS: 58373, 58374, 58375, 58376, 58377, 58378, 58379, 58380, 58381, 58382, 58383 were selected from the ORFs having the nucleotide sequence represented by SEQ ID NO: 4717.

[5207] The probes having the nucleotide sequence represented by SEQ ID NOS: 58384, 58385, 58386, 58387, 58388, 58389, 58390, 58391, 58392, 58393, 58394 were selected from the ORFs having the nucleotide sequence represented by SEQ ID NO: 4718.

[5208] The probes having the nucleotide sequence represented by SEQ ID NOS: 58395, 58396, 58397, 58398, 58399, 58400, 58401, 58402, 58403, 58404, 58405 were selected from the ORFs having the nucleotide sequence represented by SEQ ID NO: 4719.

[5209] The probes having the nucleotide sequence represented by SEQ ID NOS: 58406, 58407, 58408, 58409, 58410, 58411, 58412, 58413, 58414, 58415, 58416 were selected from the ORFs having the nucleotide sequence represented by SEQ ID NO: 4720.

[5210] The probes having the nucleotide sequence represented by SEQ ID NOS: 58417, 58418, 58419, 58420, 58421, 58422, 58423, 58424, 58425, 58426, 58427 were selected from the ORFs having the nucleotide sequence represented by SEQ ID NO: 4721.

[5211] The probes having the nucleotide sequence represented by SEQ ID NOS: 58428, 58429, 58430, 58431, 58432, 58433, 58434, 58435, 58436, 58437, 58438 were selected from the ORFs having the nucleotide sequence represented by SEQ ID NO: 4722.

[5212] The probes having the nucleotide sequence represented by SEQ ID NOS: 58439, 58440, 58441, 58442, 58443, 58444, 58445, 58446, 58447, 58448, 58449 were selected from the ORFs having the nucleotide sequence represented by SEQ ID NO: 4723.

[5213] The probes having the nucleotide sequence represented by SEQ ID NOS: 58450, 58451, 58452, 58453, 58454, 58455, 58456, 58457, 58458, 58459, 58460 were selected from the ORFs having the nucleotide sequence represented by SEQ ID NO: 4724.

[5214] The probes having the nucleotide sequence represented by SEQ ID NOS: 58461, 58462, 58463, 58464, 58465, 58466, 58467, 58468, 58469, 58470, 58471 were selected from the ORFs having the nucleotide sequence represented by SEQ ID NO: 4725.

[5215] The probes having the nucleotide sequence represented by SEQ ID NOS: 58472, 58473, 58474, 58475, 58476, 58477, 58478, 58479, 58480, 58481, 58482 were selected from the ORFs having the nucleotide sequence represented by SEQ ID NO: 4726.

[5216] The probes having the nucleotide sequence represented by SEQ ID NOS: 58483, 58484, 58485, 58486, 58487, 58488, 58489, 58490, 58491, 58492, 58493 were selected from the ORFs having the nucleotide sequence represented by SEQ ID NO: 4727.

[5217] The probes having the nucleotide sequence represented by SEQ ID NOS: 58494, 58495, 58496, 58497, 58498, 58499, 58500, 58501, 58502, 58503, 58504 were selected from the ORFs having the nucleotide sequence represented by SEQ ID NO: 4728.

[5218] The probes having the nucleotide sequence represented by SEQ ID NOS: 58505, 58506, 58507, 58508, 58509, 58510, 58511, 58512, 58513, 58514, 58515 were selected from the ORFs having the nucleotide sequence represented by SEQ ID NO: 4729.

[5219] The probes having the nucleotide sequence represented by SEQ ID NOS: 58516, 58517, 58518, 58519, 58520, 58521, 58522, 58523, 58524, 58525, 58526 were selected from the ORFs having the nucleotide sequence represented by SEQ ID NO: 4730.

[5220] The probes having the nucleotide sequence represented by SEQ ID NOS: 58527, 58528, 58529, 58530, 58531, 58532, 58533, 58534, 58535, 58536, 58537 were selected from the ORFs having the nucleotide sequence represented by SEQ ID NO: 4731.

[5221] The probes having the nucleotide sequence represented by SEQ ID NOS: 58538, 58539, 58540, 58541, 58542, 58543, 58544, 58545, 58546, 58547, 58548 were selected from the ORFs having the nucleotide sequence represented by SEQ ID NO: 4732.

[5222] The probes having the nucleotide sequence represented by SEQ ID NOS: 58549, 58550, 58551, 58552, 58553, 58554, 58555, 58556, 58557, 58558, 58559 were selected from the ORFs having the nucleotide sequence represented by SEQ ID NO: 4733.

[5223] The probes having the nucleotide sequence represented by SEQ ID NOS: 58560, 58561, 58562, 58563, 58564, 58565, 58566, 58567, 58568, 58569, 58570 were selected from the ORFs having the nucleotide sequence represented by SEQ ID NO: 4734.

[5224] The probes having the nucleotide sequence represented by SEQ ID NOS: 58571, 58572, 58573, 58574, 58575, 58576, 58577, 58578, 58579, 58580, 58581 were selected from the ORFs having the nucleotide sequence represented by SEQ ID NO: 4735.

[5225] The probes having the nucleotide sequence represented by SEQ ID NOS: 58582, 58583, 58584, 58585, 58586, 58587, 58588, 58589, 58590, 58591, 58592 were selected from the ORFs having the nucleotide sequence represented by SEQ ID NO: 4736.

[5226] The probes having the nucleotide sequence represented by SEQ ID NOS: 58593, 58594, 58595, 58596, 58597, 58598, 58599, 58600, 58601, 58602, 58603 were selected from the ORFs having the nucleotide sequence represented by SEQ ID NO: 4737.

[5227] The probes having the nucleotide sequence represented by SEQ ID NOS: 58604, 58605, 58606, 58607, 58608, 58609, 58610, 58611, 58612, 58613, 58614 were selected from the ORFs having the nucleotide sequence represented by SEQ ID NO: 4738.

[5228] The probes having the nucleotide sequence represented by SEQ ID NOS: 58615, 58616, 58617, 58618, 58619, 58620, 58621, 58622, 58623, 58624, 58625 were selected from the ORFs having the nucleotide sequence represented by SEQ ID NO: 4739.

[5229] The probes having the nucleotide sequence represented by SEQ ID NOS: 58626, 58627, 58628, 58629, 58630, 58631, 58632, 58633, 58634, 58635, 58636 were selected from the ORFs having the nucleotide sequence represented by SEQ ID NO: 4740.

[5230] The probes having the nucleotide sequence represented by SEQ ID NOS: 58637, 58638, 58639, 58640, 58641, 58642, 58643, 58644, 58645, 58646, 58647 were selected from the ORFs having the nucleotide sequence represented by SEQ ID NO: 4741.

[5231] The probes having the nucleotide sequence represented by SEQ ID NOS: 58648, 58649, 58650, 58651, 58652, 58653, 58654, 58655, 58656, 58657, 58658 were selected from the ORFs having the nucleotide sequence represented by SEQ ID NO: 4742.

[5232] The probes having the nucleotide sequence represented by SEQ ID NOS: 58659, 58660, 58661, 58662, 58663, 58664, 58665, 58666, 58667, 58668, 58669 were selected from the ORFs having the nucleotide sequence represented by SEQ ID NO: 4743.

[5233] The probes having the nucleotide sequence represented by SEQ ID NOS: 58670, 58671, 58672, 58673, 58674, 58675, 58676, 58677, 58678, 58679, 58680 were selected from the ORFs having the nucleotide sequence represented by SEQ ID NO: 4744.

[5234] The probes having the nucleotide sequence represented by SEQ ID NOS: 58681, 58682, 58683, 58684, 58685, 58686, 58687, 58688, 58689, 58690, 58691 were selected from the ORFs having the nucleotide sequence represented by SEQ ID NO: 4745.

[5235] The probes having the nucleotide sequence represented by SEQ ID NOS: 58692, 58693, 58694, 58695, 58696, 58697, 58698, 58699, 58700, 58701, 58702 were selected from the ORFs having the nucleotide sequence represented by SEQ ID NO: 4746.

[5236] The probes having the nucleotide sequence represented by SEQ ID NOS: 58703, 58704, 58705, 58706, 58707, 58708, 58709, 58710, 58711, 58712, 58713 were selected from the ORFs having the nucleotide sequence represented by SEQ ID NO: 4747.

[5237] The probes having the nucleotide sequence represented by SEQ ID NOS: 58714, 58715, 58716, 58717, 58718, 58719, 58720, 58721, 58722, 58723, 58724 were selected from the ORFs having the nucleotide sequence represented by SEQ ID NO: 4748.

[5238] The probes having the nucleotide sequence represented by SEQ ID NOS: 58725, 58726, 58727, 58728, 58729, 58730, 58731, 58732, 58733, 58734, 58735 were selected from the ORFs having the nucleotide sequence represented by SEQ ID NO: 4749.

[5239] The probes having the nucleotide sequence represented by SEQ ID NOS: 58736, 58737, 58738, 58739, 58740, 58741, 58742, 58743, 58744, 58745, 58746 were selected from the ORFs having the nucleotide sequence represented by SEQ ID NO: 4750.

[5240] The probes having the nucleotide sequence represented by SEQ ID NOS: 58747, 58748, 58749, 58750, 58751, 58752, 58753, 58754, 58755, 58756, 58757 were selected from the ORFs having the nucleotide sequence represented by SEQ ID NO: 4751.

[5241] The probes having the nucleotide sequence represented by SEQ ID NOS: 58758, 58759, 58760, 58761, 58762, 58763, 58764, 58765, 58766, 58767, 58768 were selected from the ORFs having the nucleotide sequence represented by SEQ ID NO: 4752.

[5242] The probes having the nucleotide sequence represented by SEQ ID NOS: 58769, 58770, 58771, 58772, 58773, 58774, 58775, 58776, 58777, 58778, 58779 were selected from the ORFs having the nucleotide sequence represented by SEQ ID NO: 4753.

[5243] The probes having the nucleotide sequence represented by SEQ ID NOS: 58780, 58781, 58782, 58783, 58784, 58785, 58786, 58787, 58788, 58789, 58790 were selected from the ORFs having the nucleotide sequence represented by SEQ ID NO: 4754.

[5244] The probes having the nucleotide sequence represented by SEQ ID NOS: 58791, 58792, 58793, 58794, 58795, 58796, 58797, 58798, 58799, 58800, 58801 were selected from the ORFs having the nucleotide sequence represented by SEQ ID NO: 4755.

[5245] The probes having the nucleotide sequence represented by SEQ ID NOS: 58802, 58803, 58804, 58805, 58806, 58807, 58808, 58809, 58810, 58811, 58812 were selected from the ORFs having the nucleotide sequence represented by SEQ ID NO: 4756.

[5246] The probes having the nucleotide sequence represented by SEQ ID NOS: 58813, 58814, 58815, 58816, 58817, 58818, 58819, 58820, 58821, 58822, 58823 were selected from the ORFs having the nucleotide sequence represented by SEQ ID NO: 4757.

[5247] The probes having the nucleotide sequence represented by SEQ ID NOS: 58824, 58825, 58826, 58827, 58828, 58829, 58830, 58831, 58832, 58833, 58834 were selected from the ORFs having the nucleotide sequence represented by SEQ ID NO: 4758.

[5248] The probes having the nucleotide sequence represented by SEQ ID NOS: 58835, 58836, 58837, 58838, 58839, 58840, 58841, 58842, 58843, 58844, 58845 were selected from the ORFs having the nucleotide sequence represented by SEQ ID NO: 4759.

[5249] The probes having the nucleotide sequence represented by SEQ ID NOS: 58846, 58847, 58848, 58849, 58850, 58851, 58852, 58853, 58854, 58855, 58856 were selected from the ORFs having the nucleotide sequence represented by SEQ ID NO: 4760.

[5250] The probes having the nucleotide sequence represented by SEQ ID NOS: 58857, 58858, 58859, 58860, 58861, 58862, 58863, 58864, 58865, 58866, 58867 were selected from the ORFs having the nucleotide sequence represented by SEQ ID NO: 4761.

[5251] The probes having the nucleotide sequence represented by SEQ ID NOS: 58868, 58869, 58870, 58871, 58872, 58873, 58874, 58875, 58876, 58877, 58878 were selected from the ORFs having the nucleotide sequence represented by SEQ ID NO: 4762.

[5252] The probes having the nucleotide sequence represented by SEQ ID NOS: 58879, 58880, 58881, 58882, 58883, 58884, 58885, 58886, 58887, 58888, 58889 were selected from the ORFs having the nucleotide sequence represented by SEQ ID NO: 4763.

[5253] The probes having the nucleotide sequence represented by SEQ ID NOS: 58890, 58891, 58892, 58893, 58894, 58895, 58896, 58897, 58898, 58899, 58900 were selected from the ORFs having the nucleotide sequence represented by SEQ ID NO: 4764.

[5254] The probes having the nucleotide sequence represented by SEQ ID NOS: 58901, 58902, 58903, 58904, 58905, 58906, 58907, 58908, 58909, 58910, 58911 were selected from the ORFs having the nucleotide sequence represented by SEQ ID NO: 4765.

[5255] The probes having the nucleotide sequence represented by SEQ ID NOS: 58912, 58913, 58914, 58915, 58916, 58917, 58918, 58919, 58920, 58921, 58922 were selected from the ORFs having the nucleotide sequence represented by SEQ ID NO: 4766.

[5256] The probes having the nucleotide sequence represented by SEQ ID NOS: 58923, 58924, 58925, 58926, 58927, 58928, 58929, 58930, 58931, 58932, 58933 were selected from the ORFs having the nucleotide sequence represented by SEQ ID NO: 4767.

[5257] The probes having the nucleotide sequence represented by SEQ ID NOS: 58934, 58935, 58936, 58937, 58938, 58939, 58940, 58941, 58942, 58943, 58944 were selected from the ORFs having the nucleotide sequence represented by SEQ ID NO: 4768.

[5258] The probes having the nucleotide sequence represented by SEQ ID NOS: 58945, 58946, 58947, 58948, 58949, 58950, 58951, 58952, 58953, 58954, 58955 were selected from the ORFs having the nucleotide sequence represented by SEQ ID NO: 4769.

[5259] The probes having the nucleotide sequence represented by SEQ ID NOS: 58956, 58957, 58958, 58959, 58960, 58961, 58962, 58963, 58964, 58965, 58966 were selected from the ORFs having the nucleotide sequence represented by SEQ ID NO: 4770.

[5260] The probes having the nucleotide sequence represented by SEQ ID NOS: 58967, 58968, 58969, 58970, 58971, 58972, 58973, 58974, 58975, 58976, 58977 were selected from the ORFs having the nucleotide sequence represented by SEQ ID NO: 4771.

[5261] The probes having the nucleotide sequence represented by SEQ ID NOS: 58978, 58979, 58980, 58981, 58982, 58983, 58984, 58985, 58986, 58987, 58988 were selected from the ORFs having the nucleotide sequence represented by SEQ ID NO: 4772.

[5262] The probes having the nucleotide sequence represented by SEQ ID NOS: 58989, 58990, 58991, 58992, 58993, 58994, 58995, 58996, 58997, 58998, 58999 were selected from the ORFs having the nucleotide sequence represented by SEQ ID NO: 4773.

[5263] The probes having the nucleotide sequence represented by SEQ ID NOS: 59000, 59001, 59002, 59003, 59004, 59005, 59006, 59007, 59008, 59009, 59010 were selected from the ORFs having the nucleotide sequence represented by SEQ ID NO: 4774.

[5264] The probes having the nucleotide sequence represented by SEQ ID NOS: 59011, 59012, 59013, 59014, 59015, 59016, 59017, 59018, 59019, 59020, 59021 were selected from the ORFs having the nucleotide sequence represented by SEQ ID NO: 4775.

[5265] The probes having the nucleotide sequence represented by SEQ ID NOS: 59022, 59023, 59024, 59025, 59026, 59027, 59028, 59029, 59030, 59031, 59032 were selected from the ORFs having the nucleotide sequence represented by SEQ ID NO: 4776.

[5266] The probes having the nucleotide sequence represented by SEQ ID NOS: 59033, 59034, 59035, 59036, 59037, 59038, 59039, 59040, 59041, 59042, 59043 were selected from the ORFs having the nucleotide sequence represented by SEQ ID NO: 4777.

[5267] The probes having the nucleotide sequence represented by SEQ ID NOS: 59044, 59045, 59046, 59047, 59048, 59049, 59050, 59051, 59052, 59053, 59054 were selected from the ORFs having the nucleotide sequence represented by SEQ ID NO: 4778.

[5268] The probes having the nucleotide sequence represented by SEQ ID NOS: 59055, 59056, 59057, 59058, 59059, 59060, 59061, 59062, 59063, 59064, 59065 were selected from the ORFs having the nucleotide sequence represented by SEQ ID NO: 4779.

[5269] The probes having the nucleotide sequence represented by SEQ ID NOS: 59066, 59067, 59068, 59069, 59070, 59071, 59072, 59073, 59074, 59075, 59076 were selected from the ORFs having the nucleotide sequence represented by SEQ ID NO: 4780.

[5270] The probes having the nucleotide sequence represented by SEQ ID NOS: 59077, 59078, 59079, 59080, 59081, 59082, 59083, 59084, 59085, 59086, 59087 were selected from the ORFs having the nucleotide sequence represented by SEQ ID NO: 4781.

[5271] The probes having the nucleotide sequence represented by SEQ ID NOS: 59088, 59089, 59090, 59091, 59092, 59093, 59094, 59095, 59096, 59097, 59098 were selected from the ORFs having the nucleotide sequence represented by SEQ ID NO: 4782.

[5272] The probes having the nucleotide sequence represented by SEQ ID NOS: 59099, 59100, 59101, 59102, 59103, 59104, 59105, 59106, 59107, 59108, 59109 were selected from the ORFs having the nucleotide sequence represented by SEQ ID NO: 4783.

[5273] The probes having the nucleotide sequence represented by SEQ ID NOS: 59110, 59111, 59112, 59113, 59114, 59115, 59116, 59117, 59118, 59119, 59120 were selected from the ORFs having the nucleotide sequence represented by SEQ ID NO: 4784.

[5274] The probes having the nucleotide sequence represented by SEQ ID NOS: 59121, 59122, 59123, 59124, 59125, 59126, 59127, 59128, 59129, 59130, 59131 were selected from the ORFs having the nucleotide sequence represented by SEQ ID NO: 4785.

[5275] The probes having the nucleotide sequence represented by SEQ ID NOS: 59132, 59133, 59134, 59135, 59136, 59137, 59138, 59139, 59140, 59141, 59142 were selected from the ORFs having the nucleotide sequence represented by SEQ ID NO: 4786.

[5276] The probes having the nucleotide sequence represented by SEQ ID NOS: 59143, 59144, 59145, 59146, 59147, 59148, 59149, 59150, 59151, 59152, 59153 were selected from the ORFs having the nucleotide sequence represented by SEQ ID NO: 4787.

[5277] The probes having the nucleotide sequence represented by SEQ ID NOS: 59154, 59155, 59156, 59157, 59158, 59159, 59160, 59161, 59162, 59163, 59164 were selected from the ORFs having the nucleotide sequence represented by SEQ ID NO: 4788.

[5278] The probes having the nucleotide sequence represented by SEQ ID NOS: 59165, 59166, 59167, 59168, 59169, 59170, 59171, 59172, 59173, 59174, 59175 were selected from the ORFs having the nucleotide sequence represented by SEQ ID NO: 4789.

[5279] The probes having the nucleotide sequence represented by SEQ ID NOS: 59176, 59177, 59178, 59179, 59180, 59181, 59182, 59183, 59184, 59185, 59186 were selected from the ORFs having the nucleotide sequence represented by SEQ ID NO: 4790.

[5280] The probes having the nucleotide sequence represented by SEQ ID NOS: 59187, 59188, 59189, 59190, 59191, 59192, 59193, 59194, 59195, 59196, 59197 were selected from the ORFs having the nucleotide sequence represented by SEQ ID NO: 4791.

[5281] The probes having the nucleotide sequence represented by SEQ ID NOS: 59198, 59199, 59200, 59201, 59202, 59203, 59204, 59205, 59206, 59207, 59208 were selected from the ORFs having the nucleotide sequence represented by SEQ ID NO: 4792.

[5282] The probes having the nucleotide sequence represented by SEQ ID NOS: 59209, 59210, 59211, 59212, 59213, 59214, 59215, 59216, 59217, 59218, 59219 were selected from the ORFs having the nucleotide sequence represented by SEQ ID NO: 4793.

[5283] The probes having the nucleotide sequence represented by SEQ ID NOS: 59220, 59221, 59222, 59223, 59224, 59225, 59226, 59227, 59228, 59229, 59230 were selected from the ORFs having the nucleotide sequence represented by SEQ ID NO: 4794.

[5284] The probes having the nucleotide sequence represented by SEQ ID NOS: 59231, 59232, 59233, 59234, 59235, 59236, 59237, 59238, 59239, 59240, 59241 were selected from the ORFs having the nucleotide sequence represented by SEQ ID NO: 4795.

[5285] The probes having the nucleotide sequence represented by SEQ ID NOS: 59242, 59243, 59244, 59245, 59246, 59247, 59248, 59249, 59250, 59251, 59252 were selected from the ORFs having the nucleotide sequence represented by SEQ ID NO: 4796.

[5286] The probes having the nucleotide sequence represented by SEQ ID NOS: 59253, 59254, 59255, 59256, 59257, 59258, 59259, 59260, 59261, 59262, 59263 were selected from the ORFs having the nucleotide sequence represented by SEQ ID NO: 4797.

[5287] The probes having the nucleotide sequence represented by SEQ ID NOS: 59264, 59265, 59266, 59267, 59268, 59269, 59270, 59271, 59272, 59273, 59274 were selected from the ORFs having the nucleotide sequence represented by SEQ ID NO: 4798.

[5288] The probes having the nucleotide sequence represented by SEQ ID NOS: 59275, 59276, 59277, 59278, 59279, 59280, 59281, 59282, 59283, 59284, 59285 were selected from the ORFs having the nucleotide sequence represented by SEQ ID NO: 4799.

[5289] The probes having the nucleotide sequence represented by SEQ ID NOS: 59286, 59287, 59288, 59289, 59290, 59291, 59292, 59293, 59294, 59295, 59296 were selected from the ORFs having the nucleotide sequence represented by SEQ ID NO: 4800.

[5290] The probes having the nucleotide sequence represented by SEQ ID NOS: 59297, 59298, 59299, 59300, 59301, 59302, 59303, 59304, 59305, 59306, 59307 were selected from the ORFs having the nucleotide sequence represented by SEQ ID NO: 4801.

[5291] The probes having the nucleotide sequence represented by SEQ ID NOS: 59308, 59309, 59310, 59311, 59312, 59313, 59314, 59315, 59316,. 59317, 59318 were selected from the ORFs having the nucleotide sequence represented by SEQ ID NO: 4802.

[5292] The probes having the nucleotide sequence represented by SEQ ID NOS: 59319, 59320, 59321, 59322, 59323, 59324, 59325, 59326, 59327, 59328, 59329 were selected from the ORFs having the nucleotide sequence represented by SEQ ID NO: 4803.

[5293] The probes having the nucleotide sequence represented by SEQ ID NOS: 59330, 59331, 59332, 59333, 59334, 59335, 59336, 59337, 59338, 59339, 59340 were selected from the ORFs having the nucleotide sequence represented by SEQ ID NO: 4804.

[5294] The probes having the nucleotide sequence represented by SEQ ID NOS: 59341, 59342, 59343, 59344, 59345, 59346, 59347, 59348, 59349, 59350, 59351 were selected from the ORFs having the nucleotide sequence represented by SEQ ID NO: 4805.

[5295] The probes having the nucleotide sequence represented by SEQ ID NOS: 59352, 59353, 59354, 59355, 59356, 59357, 59358, 59359, 59360, 59361, 59362, 59363, 59364, 59365, 59366, 59367, 59368, 59369, 59370, 59371, 59372, 59373 were selected from the ORFs having the nucleotide sequence represented by SEQ ID NO: 4806.

[5296] The probes having the nucleotide sequence represented by SEQ ID NOS: 59374, 59375, 59376, 59377, 59378, 59379, 59380, 59381, 59382, 59383, 59384 were selected from the ORFs having the nucleotide sequence represented by SEQ ID NO: 4807.

[5297] The probes having the nucleotide sequence represented by SEQ ID NOS: 59385, 59386, 59387, 59388, 59389, 59390, 59391, 59392, 59393, 59394, 59395 were selected from the ORFs having the nucleotide sequence represented by SEQ ID NO: 4808.

[5298] The probes having the nucleotide sequence represented by SEQ ID NOS: 59396, 59397, 59398, 59399, 59400, 59401, 59402, 59403, 59404, 59405, 59406 were selected from the ORFs having the nucleotide sequence represented by SEQ ID NO: 4809.

[5299] The probes having the nucleotide sequence represented by SEQ ID NOS: 59407, 59408, 59409, 59410, 59411, 59412, 59413, 59414, 59415, 59416, 59417 were selected from the ORFs having the nucleotide sequence represented by SEQ ID NO: 4810.

[5300] The probes having the nucleotide sequence represented by SEQ ID NOS: 59418, 59419, 59420, 59421, 59422, 59423, 59424, 59425, 59426, 59427, 59428 were selected from the ORFs having the nucleotide sequence represented by SEQ ID NO: 4811.

[5301] The probes having the nucleotide sequence represented by SEQ ID NOS: 59429, 59430, 59431, 59432, 59433, 59434, 59435, 59436, 59437, 59438, 59439 were selected from the ORFs having the nucleotide sequence represented by SEQ ID NO: 4812.

[5302] The probes having the nucleotide sequence represented by SEQ ID NOS: 59440, 59441, 59442, 59443, 59444, 59445, 59446, 59447, 59448, 59449, 59450 were selected from the ORFs having the nucleotide sequence represented by SEQ ID NO: 4813.

[5303] The probes having the nucleotide sequence represented by SEQ ID NOS: 59451, 59452, 59453, 59454, 59455, 59456, 59457, 59458, 59459, 59460, 59461 were selected from the ORFs having the nucleotide sequence represented by SEQ ID NO: 4814.

[5304] The probes having the nucleotide sequence represented by SEQ ID NOS: 59462, 59463, 59464, 59465, 59466, 59467, 59468, 59469, 59470, 59471, 59472 were selected from the ORFs having the nucleotide sequence represented by SEQ ID NO: 4815.

[5305] The probes having the nucleotide sequence represented by SEQ ID NOS: 59473, 59474, 59475, 59476, 59477, 59478, 59479, 59480, 59481, 59482, 59483 were selected from the ORFs having the nucleotide sequence represented by SEQ ID NO: 4816.

[5306] The probes having the nucleotide sequence represented by SEQ ID NOS: 59484, 59485, 59486, 59487, 59488, 59489, 59490, 59491, 59492, 59493, 59494 were selected from the ORFs having the nucleotide sequence represented by SEQ ID NO: 4817.

[5307] The probes having the nucleotide sequence represented by SEQ ID NOS: 59495, 59496, 59497, 59498, 59499, 59500, 59501, 59502, 59503, 59504, 59505 were selected from the ORFs having the nucleotide sequence represented by SEQ ID NO: 4818.

[5308] The probes having the nucleotide sequence represented by SEQ ID NOS: 59506, 59507, 59508, 59509, 59510, 59511, 59512, 59513, 59514, 59515, 59516 were selected from the ORFs having the nucleotide sequence represented by SEQ ID NO: 4819.

[5309] The probes having the nucleotide sequence represented by SEQ ID NOS: 59517, 59518, 59519, 59520, 59521, 59522, 59523, 59524, 59525, 59526, 59527 were selected from the ORFs having the nucleotide sequence represented by SEQ ID NO: 4820.

[5310] The probes having the nucleotide sequence represented by SEQ ID NOS: 59528, 59529, 59530, 59531, 59532, 59533, 59534, 59535, 59536, 59537, 59538 were selected from the ORFs having the nucleotide sequence represented by SEQ ID NO: 4821.

[5311] The probes having the nucleotide sequence represented by SEQ ID NOS: 59539, 59540, 59541, 59542, 59543, 59544, 59545, 59546, 59547, 59548, 59549 were selected from the ORFs having the nucleotide sequence represented by SEQ ID NO: 4822.

[5312] The probes having the nucleotide sequence represented by SEQ ID NOS: 59550, 59551, 59552, 59553, 59554, 59555, 59556, 59557, 59558, 59559, 59560 were selected from the ORFs having the nucleotide sequence represented by SEQ ID NO: 4823.

[5313] The probes having the nucleotide sequence represented by SEQ ID NOS: 59561, 59562, 59563, 59564, 59565, 59566, 59567, 59568, 59569, 59570, 59571 were selected from the ORFs having the nucleotide sequence represented by SEQ ID NO: 4824.

[5314] The probes having the nucleotide sequence represented by SEQ ID NOS: 59572, 59573, 59574, 59575, 59576, 59577, 59578, 59579, 59580, 59581, 59582 were selected from the ORFs having the nucleotide sequence represented by SEQ ID NO: 4825.

[5315] The probes having the nucleotide sequence represented by SEQ ID NOS: 59583, 59584, 59585, 59586, 59587, 59588, 59589, 59590, 59591, 59592, 59593 were selected from the ORFs having the nucleotide sequence represented by SEQ ID NO: 4826.

[5316] The probes having the nucleotide sequence represented by SEQ ID NOS: 59594, 59595, 59596, 59597, 59598, 59599, 59600, 59601, 59602, 59603, 59604 were selected from the ORFs having the nucleotide sequence represented by SEQ ID NO: 4827.

[5317] The probes having the nucleotide sequence represented by SEQ ID NOS: 59605, 59606, 59607, 59608, 59609, 59610, 59611, 59612, 59613, 59614, 59615, 59616, 59617, 59618, 59619, 59620, 59621, 59622, 59623, 59624, 59625, 59626 were selected from the ORFs having the nucleotide sequence represented by SEQ ID NO: 4828.

[5318] The probes having the nucleotide sequence represented by SEQ ID NOS: 59627, 59628, 59629, 59630, 59631, 59632, 59633, 59634, 59635, 59636, 59637 were selected from the ORFs having the nucleotide sequence represented by SEQ ID NO: 4829.

[5319] The probes having the nucleotide sequence represented by SEQ ID NOS: 59638, 59639, 59640, 59641, 59642, 59643, 9644, 59645, 59646, 59647, 59648 were selected from the ORFs having the nucleotide sequence represented by SEQ ID NO: 4830.

[5320] The probes having the nucleotide sequence represented by SEQ ID NOS: 59649, 59650, 59651, 59652, 59653, 59654, 59655, 59656, 59657, 59658, 59659 were selected from the ORFs having the nucleotide sequence represented by SEQ ID NO: 4831.

[5321] The probes having the nucleotide sequence represented by SEQ ID NOS: 59660, 59661, 59662, 59663, 59664, 59665, 59666, 59667, 59668, 59669, 59670 were selected from the ORFs having the nucleotide sequence represented by SEQ ID NO: 4832.

[5322] The probes having the nucleotide sequence represented by SEQ ID NOS: 59671, 59672, 59673, 59674, 59675, 59676, 59677, 59678, 59679, 59680, 59681 were selected from the ORFs having the nucleotide sequence represented by SEQ ID NO: 4833.

[5323] The probes having the nucleotide sequence represented by SEQ ID NOS: 59682, 59683, 59684, 59685, 59686, 59687, 59688, 59689, 59690, 59691, 59692 were selected from the ORFs having the nucleotide sequence represented by SEQ ID NO: 4834.

[5324] The probes having-the nucleotide sequence represented by SEQ ID NOS: 59693, 59694, 59695, 59696, 59697, 59698, 59699, 59700, 59701, 59702, 59703 were selected from the ORFs having the nucleotide sequence represented by SEQ ID NO: 4835.

[5325] The probes having the nucleotide sequence represented by SEQ ID NOS: 59704, 59705, 59706, 59707, 59708, 59709, 59710, 59711, 59712, 59713, 59714 were selected from the ORFs having the nucleotide sequence represented by SEQ ID NO: 4836.

[5326] The probes having the nucleotide sequence represented by SEQ ID NOS: 59715, 59716, 59717, 59718, 59719, 59720, 59721, 59722, 59723, 59724, 59725 were selected from the ORFs having the nucleotide sequence represented by SEQ ID NO: 4837.

[5327] The probes having the nucleotide sequence represented by SEQ ID NOS: 59726, 59727, 59728, 59729, 59730, 59731, 59732, 59733, 59734, 59735, 59736 were selected from the ORFs having the nucleotide sequence represented by SEQ ID NO: 4838.

[5328] The probes having the nucleotide sequence represented by SEQ ID NOS: 59737, 59738, 59739, 59740, 59741, 59742, 59743, 59744, 59745, 59746, 59747 were selected from the ORFs having the nucleotide sequence represented by SEQ ID NO: 4839.

[5329] The probes having the nucleotide sequence represented by SEQ ID NOS: 59748, 59749, 59750, 59751, 59752, 59753, 59754, 59755, 59756, 59757, 59758 were selected from the ORFs having the nucleotide sequence represented by SEQ ID NO: 4840.

[5330] The probes having the nucleotide sequence represented by SEQ ID NOS: 59759, 59760, 59761, 59762, 59763, 59764, 59765, 59766, 59767, 59768, 59769 were selected from the ORFs having the nucleotide sequence represented by SEQ ID NO: 4841.

[5331] The probes having the nucleotide sequence represented by SEQ ID-NOS: 59770, 59771, 59772, 59773, 59774, 59775, 59776, 59777, 59778, 59779, 59780 were selected from the ORFs having the nucleotide sequence represented by SEQ ID NO: 4842.

[5332] The probes having the nucleotide sequence represented by SEQ ID NOS: 59781, 59782, 59783, 59784, 59785, 59786, 59787, 59788, 59789, 59790, 59791 were selected from the ORFs having the nucleotide sequence represented by SEQ ID NO: 4843.

[5333] The probes having the nucleotide sequence represented by SEQ ID NOS: 59792, 59793, 59794, 59795, 59796, 59797, 59798, 59799, 59800, 59801, 59802 were selected from the ORFs having the nucleotide sequence represented by SEQ ID NO: 4844.

[5334] The probes having the nucleotide sequence represented by SEQ ID NOS: 59803, 59804, 59805, 59806, 59807, 59808, 59809, 59810, 59811, 59812, 59813 were selected from the ORFs having the nucleotide sequence represented by SEQ ID NO: 4845.

[5335] The probes having the nucleotide sequence represented by SEQ ID NOS: 59814, 59815, 59816, 59817, 59818, 59819, 59820, 59821, 59822, 59823, 59824 were selected from the ORFs having the nucleotide sequence represented by SEQ ID NO: 4846.

[5336] The probes having the nucleotide sequence represented by SEQ ID NOS: 59825, 59826, 59827, 59828, 59829, 59830, 59831, 59832, 59833, 59834, 59835 were selected from the ORFs having the nucleotide sequence represented by SEQ ID NO: 4847.

[5337] The probes having the nucleotide sequence represented by SEQ ID NOS: 59836, 59837, 59838, 59839, 59840, 59841, 59842, 59843, 59844, 59845, 59846 were selected from the ORFs having the nucleotide sequence represented by SEQ ID NO: 4848.

[5338] The probes having the nucleotide sequence represented by SEQ ID NOS: 59847, 59848, 59849, 59850, 59851, 59852, 59853, 59854, 59855, 59856, 59857 were selected from the ORFs having the nucleotide sequence represented by SEQ ID NO: 4849.

[5339] The probes having the nucleotide sequence represented by SEQ ID NOS: 59858, 59859, 59860, 59861, 59862, 59863, 59864, 59865, 59866, 59867, 59868 were selected from the ORFs having the nucleotide sequence represented by SEQ ID NO: 4850.

[5340] The probes having the nucleotide sequence represented by SEQ ID NOS: 59869, 59870, 59871, 59872, 59873, 59874, 59875, 59876, 5.9877, 59878, 59879 were selected from the ORFs having the nucleotide sequence represented by SEQ ID NO: 4851.

[5341] The probes having the nucleotide sequence represented by SEQ ID NOS: 59880, 59881, 59882, 59883, 59884, 59885, 59886, 59887, 59888, 59889, 59890 were selected from the ORFs having the nucleotide sequence represented by SEQ ID NO: 4852.

[5342] The probes having the nucleotide sequence represented by SEQ ID NOS: 59891, 59892, 59893, 59894, 59895, 59896, 59897, 59898, 59899, 59900, 59901 were selected from the ORFs having the nucleotide sequence represented by SEQ ID NO: 4853.

[5343] The probes having the nucleotide sequence represented by SEQ ID NOS: 59902, 59903, 59904, 59905, 59906, 59907, 59908, 59909, 59910, 59911, 59912 were selected from the ORFs having the nucleotide sequence represented by SEQ ID NO: 4854.

[5344] The probes having the nucleotide sequence represented by SEQ ID NOS: 59913, 59914, 59915, 59916, 59917, 59918, 59919, 59920, 59921, 59922, 59923 were selected from the ORFs having the nucleotide sequence represented by SEQ ID NO: 4855.

[5345] The probes having the nucleotide sequence represented by SEQ ID NOS: 59924, 59925, 59926, 59927, 59928, 59929, 59930, 59931, 59932, 59933, 59934 were selected from the ORFs having the nucleotide sequence represented by SEQ ID NO: 4856.

[5346] The probes having the nucleotide sequence represented by SEQ ID NOS: 59935, 59936, 59937, 59938, 59939, 59940, 59941, 59942, 59943, 59944, 59945 were selected from the ORFs having the nucleotide sequence represented by SEQ ID NO: 4857.

[5347] The probes having the nucleotide sequence represented by SEQ ID NOS: 59946, 59947, 59948, 59949, 59950, 59951, 59952, 59953, 59954, 59955, 59956 were selected from the ORFs having the nucleotide sequence represented by SEQ ID NO: 4858.

[5348] The probes having the nucleotide sequence represented by SEQ ID NOS: 59957, 59958, 59959, 59960, 59961, 59962, 59963, 59964, 59965, 59966, 59967 were selected from the ORFs having the nucleotide sequence represented by SEQ ID NO: 4859.

[5349] The probes having the nucleotide sequence represented by SEQ ID NOS: 59968, 59969, 59970, 59971, 59972, 59973, 59974, 59975, 59976, 59977, 59978 were selected from the ORFs having the nucleotide sequence represented by SEQ ID NO: 4860.

[5350] The probes having the nucleotide sequence represented by SEQ ID NOS: 59979, 59980, 59981, 59982, 59983, 59984, 59985, 59986, 59987, 59988, 59989 were selected from the ORFs having the nucleotide sequence represented by SEQ ID NO: 4861.

[5351] The probes having the nucleotide sequence represented by SEQ ID NOS: 59990, 59991, 59992, 59993, 59994, 59995, 59996, 59997, 59998, 59999, 60000 were selected from the ORFs having the nucleotide sequence represented by SEQ ID NO: 4862.

[5352] The probes having the nucleotide sequence represented by SEQ ID NOS: 60001, 60002, 60003, 60004, 60005, 60006, 60007, 60008, 60009, 60010, 60011 were selected from the ORFs having the nucleotide sequence represented by SEQ ID NO: 4863.

[5353] The probes having the nucleotide sequence represented by SEQ ID NOS: 60012, 60013, 60014, 60015, 60016, 60017, 60018, 60019, 60020, 60021, 60022 were selected from the ORFs having the nucleotide sequence represented by SEQ ID NO: 4864.

[5354] The probes having the nucleotide sequence represented by SEQ ID NOS: 60023, 60024, 60025, 60026, 60027, 60028, 60029, 60030, 60031, 60032, 60033 were selected from the ORFs having the nucleotide sequence represented by SEQ ID NO: 4865.

[5355] The probes having the nucleotide sequence represented by SEQ ID NOS: 60034, 60035, 60036, 60037, 60038, 60039, 60040, 60041, 60042, 60043, 60044 were selected from the ORFs having the nucleotide sequence represented by SEQ ID NO: 4866.

[5356] The probes having the nucleotide sequence represented by SEQ ID NOS: 60045, 60046, 60047, 60048, 60049, 60050, 60051, 60052, 60053, 60054, 60055 were selected from the ORFs having the nucleotide sequence represented by SEQ ID NO: 4867.

[5357] The probes having the nucleotide sequence represented by SEQ ID NOS: 60056, 60057, 60058, 60059, 60060, 60061, 60062, 60063, 60064, 60065, 60066 were selected from the ORFs having the nucleotide sequence represented by SEQ ID NO: 4868.

[5358] The probes having the nucleotide sequence represented by SEQ ID NOS: 60067, 60068, 60069, 60070, 60071, 60072, 60073, 60074, 60075, 60076, 60077 were selected from the ORFs having the nucleotide sequence represented by SEQ ID NO: 4869.

[5359] The probes having the nucleotide sequence represented by SEQ ID NOS: 60078, 60079, 60080, 60081, 60082, 60083, 60084, 60085, 60086, 60087, 60088 were selected from the ORFs having the nucleotide sequence represented by SEQ ID NO: 4870.

[5360] The probes having the nucleotide sequence represented by SEQ ID NOS: 60089, 60090, 60091, 60092, 60093, 60094, 60095, 60096, 60097, 60098, 60099 were selected from the ORFs having the nucleotide sequence represented by SEQ ID NO: 4871.

[5361] The probes having the nucleotide sequence represented by SEQ ID NOS: 60100, 60101, 60102, 60103, 60104, 60105, 60106, 60107, 60108, 60109, 60110 were selected from the ORFs having the nucleotide sequence represented by SEQ ID NO: 4872.

[5362] The probes having the nucleotide sequence represented by SEQ ID NOS: 60111, 60112, 60113, 60114, 60115, 60116, 60117, 60118, 60119, 60120, 60121 were selected from the ORFs having the nucleotide sequence represented by SEQ ID NO: 4873.

[5363] The probes having the nucleotide sequence represented by SEQ ID NOS: 60122, 60123, 60124, 60125, 60126, 60127, 60128, 60129, 60130, 60131, 60132 were selected from the ORFs having the nucleotide sequence represented by SEQ ID NO: 4874.

[5364] The probes having the nucleotide sequence represented by SEQ ID NOS: 60133, 60134, 60135, 60136, 60137, 60138, 60139, 60140, 60141, 60142, 60143 were selected from the ORFs having the nucleotide sequence represented by SEQ ID NO: 4875.

[5365] The probes having the nucleotide sequence represented by SEQ ID NOS: 60144, 60145, 60146, 60147, 60148, 60149, 60150, 60151, 60152, 60153, 60154 were selected from the ORFs having the nucleotide sequence represented by SEQ ID NO: 4876.

[5366] The probes having the nucleotide sequence represented by SEQ ID NOS: 60155, 60156, 60157, 60158, 60159, 60160, 60161, 60162, 60163, 60164, 60165 were selected from the ORFs having the nucleotide sequence represented by SEQ ID NO: 4877.

[5367] The probes having the nucleotide sequence represented by SEQ ID NOS: 60166, 60167, 60168, 60169, 60170, 60171, 60172, 60173, 60174, 60175, 60176 were selected from the ORFs having the nucleotide sequence represented by SEQ ID NO: 4878.

[5368] The probes having the nucleotide sequence represented by SEQ ID NOS: 60177, 60178, 60179, 60180, 60181, 60182, 60183, 60184, 60185, 60186, 60187 were selected from the ORFs having the nucleotide sequence represented by SEQ ID NO: 4879.

[5369] The probes having the nucleotide sequence represented by SEQ ID NOS: 60188, 60189, 60190, 60191, 60192, 60193, 60194, 60195, 60196, 60197, 60198 were selected from the ORFs having the nucleotide sequence represented by SEQ ID NO: 4880.

[5370] The probes having the nucleotide sequence represented by SEQ ID NOS: 60199, 60200, 60201, 60202, 60203, 60204, 60205, 60206, 60207, 60208, 60209 were selected from the ORFs having the nucleotide sequence represented by SEQ ID NO: 4881.

[5371] The probes having the nucleotide sequence represented by SEQ ID NOS: 60210, 60211, 60212, 60213, 60214, 60215, 60216, 60217, 60218, 60219, 60220 were selected from the ORFs having the nucleotide sequence represented by SEQ ID NO: 4882.

[5372] The probes having the nucleotide sequence represented by SEQ ID NOS: 60221, 60222, 60223, 60224, 60225, 60226, 60227, 60228, 60229, 60230, 60231 were selected from the ORFs having the nucleotide sequence represented by SEQ ID NO: 4883.

[5373] The probes having the nucleotide sequence represented by SEQ ID NOS: 60232, 60233, 60234, 60235, 60236, 60237, 60238, 60239, 60240, 60241, 60242 were selected from the ORFs having the nucleotide sequence represented by SEQ ID NO: 4884.

[5374] The probes having the nucleotide sequence represented by SEQ ID NOS: 60243, 60244, 60245, 60246, 60247, 60248, 60249, 60250, 60251, 60252, 60253 were selected from the ORFs having the nucleotide sequence represented by SEQ ID NO: 4885.

[5375] The probes having the nucleotide sequence represented by SEQ ID NOS: 60254, 60255, 60256, 60257, 60258, 60259, 60260, 60261, 60262, 60263, 60264 were selected from the ORFs having the nucleotide sequence represented by SEQ ID NO: 4886.

[5376] The probes having the nucleotide sequence represented by SEQ ID NOS: 60265, 60266, 60267, 60268, 60269, 60270, 60271, 60272, 60273, 60274, 60275 were selected from the ORFs having the nucleotide sequence represented by SEQ ID NO: 4887.

[5377] The probes having the nucleotide sequence represented by SEQ ID NOS: 60276, 60277, 60278, 60279, 60280, 60281, 60282, 60283, 60284, 60285, 60286 were selected from the ORFs having the nucleotide sequence represented by SEQ ID NO: 4888.

[5378] The probes having the nucleotide sequence represented by SEQ ID NOS: 60287, 60288, 60289, 60290, 60291, 60292, 60293, 60294, 60295, 60296, 60297 were selected from the ORFs having the nucleotide sequence represented by SEQ ID NO: 4889.

[5379] The probes having the nucleotide sequence represented by SEQ ID NOS: 60298, 60299, 60300, 60301, 60302, 60303, 60304, 60305, 60306, 60307, 60308 were selected from the ORFs having the nucleotide sequence represented by SEQ ID NO: 4890.

[5380] The probes having the nucleotide sequence represented by SEQ ID NOS: 60309, 60310, 60311, 60312, 60313, 60314, 60315, 60316, 60317, 60318, 60319 were selected from the ORFs having the nucleotide sequence represented by SEQ ID NO: 4891.

[5381] The probes having the nucleotide sequence represented by SEQ ID NOS: 60320, 60321, 60322, 60323, 60324, 60325, 60326, 60327, 60328, 60329, 60330 were selected from the ORFs having the nucleotide sequence represented by SEQ ID NO: 4892.

[5382] The probes having the nucleotide sequence represented by SEQ ID NOS: 60331, 60332, 60333, 60334, 60335, 60336, 60337, 60338, 60339, 60340, 60341 were selected from the ORFs having the nucleotide sequence represented by SEQ ID NO: 4893.

[5383] The probes having the nucleotide sequence represented by SEQ ID NOS: 60342, 60343, 60344, 60345, 60346, 60347, 60348, 60349, 60350, 60351, 60352 were selected from the ORFs having the nucleotide sequence represented by SEQ ID NO: 4894.

[5384] The probes having the nucleotide sequence represented by SEQ ID NOS: 60353, 60354, 60355, 60356, 60357, 60358, 60359, 60360, 60361, 60362, 60363 were selected from the ORFs having the nucleotide sequence represented by SEQ ID NO: 4895.

[5385] The probes having the nucleotide sequence represented by SEQ ID NOS: 60364, 60365, 60366, 60367, 60368, 60369, 60370, 60371, 60372, 60373, 60374 were selected from the ORFs having the nucleotide sequence represented by SEQ ID NO: 4896.

[5386] The probes having the nucleotide sequence represented by SEQ ID NOS: 60375, 60376, 60377, 60378, 60379, 60380, 60381, 60382, 60383, 60384, 60385 were selected from the ORFs having the nucleotide sequence represented by SEQ ID NO: 4897.

[5387] The probes having the nucleotide sequence represented by SEQ ID NOS: 60386, 60387, 60388, 60389, 60390, 60391, 60392, 60393, 60394, 60395, 60396 were selected from the ORFs having the nucleotide sequence represented by SEQ ID NO: 4898.

[5388] The probes having the nucleotide sequence represented by SEQ ID NOS: 60397, 60398, 60399, 60400, 60401, 60402, 60403, 60404, 60405, 60406, 60407 were selected from the ORFs having the nucleotide sequence represented by SEQ ID NO: 4899.

[5389] The probes having the nucleotide sequence represented by SEQ ID NOS: 60408, 60409, 60410, 60411, 60412, 60413, 60414, 60415, 60416, 60417, 60418 were selected from the ORFs having the nucleotide sequence represented by SEQ ID NO: 4900.

[5390] The probes having the nucleotide sequence represented by SEQ ID NOS: 60419, 60420, 60421, 60422, 60423, 60424, 60425, 60426, 60427, 60428, 60429 were selected from the ORFs having the nucleotide sequence represented by SEQ ID NO: 4901.

[5391] The probes having the nucleotide sequence represented by SEQ ID NOS: 60430, 60431, 60432, 60433, 60434, 60435, 60436, 60437, 60438, 60439, 60440 were selected from the ORFs having the nucleotide sequence represented by SEQ ID NO: 4902.

[5392] The probes having the nucleotide sequence represented by SEQ ID NOS: 60441, 60442, 60443, 60444, 60445, 60446, 60447, 60448, 60449, 60450, 60451 were selected from the ORFs having the nucleotide sequence represented by SEQ ID NO: 4903.

[5393] The probes having the nucleotide sequence represented by SEQ ID NOS: 60452, 60453, 60454, 60455, 60456, 60457, 60458, 60459, 60460, 60461, 60462 were selected from the ORFs having the nucleotide sequence represented by SEQ ID NO: 4904.

[5394] The probes having the nucleotide sequence represented by SEQ ID NOS: 60463, 60464, 60465, 60466, 60467, 60468, 60469, 60470, 60471, 60472, 60473 were selected from the ORFs having the nucleotide sequence represented by SEQ ID NO: 4905.

[5395] The probes having the nucleotide sequence represented by SEQ ID NOS: 60474, 60475, 60476, 60477, 60478, 60479, 60480, 60481, 60482, 60483, 60484 were selected from the ORFs having the nucleotide sequence represented by SEQ ID NO: 4906.

[5396] The probes having the nucleotide sequence represented by SEQ ID NOS: 60485, 60486, 60487, 60488, 60489, 60490, 60491, 60492, 60493, 60494, 60495 were selected from the ORFs having the nucleotide sequence represented by SEQ ID NO: 4907.

[5397] The probes having the nucleotide sequence represented by SEQ ID NOS: 60496, 60497, 60498, 60499, 60500, 60501, 60502, 60503, 60504, 60505, 60506 were selected from the ORFs having the nucleotide sequence represented by SEQ ID NO: 4908.

[5398] The probes having the nucleotide sequence represented by SEQ ID NOS: 60507, 60508, 60509, 60510, 60511, 60512, 60513, 60514, 60515, 60516, 60517 were selected from the ORFs having the nucleotide sequence represented by SEQ ID NO: 4909.

[5399] The probes having the nucleotide sequence represented by SEQ ID NOS: 60518, 60519, 60520, 60521, 60522, 60523, 60524, 60525, 60526, 60527, 60528 were selected from the ORFs having the nucleotide sequence represented by SEQ ID NO: 4910.

[5400] The probes having the nucleotide sequence represented by SEQ ID NOS: 60529, 60530, 60531, 60532, 60533, 60534, 60535, 60536, 60537, 60538, 60539 were selected from the ORFs having the nucleotide sequence represented by SEQ ID NO: 4911.

[5401] The probes having the nucleotide sequence represented by SEQ ID NOS: 60540, 60541, 60542, 60543, 60544, 60545, 60546, 60547, 60548, 60549, 60550 were selected from the ORFs having the nucleotide sequence represented by SEQ ID NO: 4912.

[5402] The probes having the nucleotide sequence represented by SEQ ID NOS: 60551, 60552, 60553, 60554, 60555, 60556, 60557, 60558, 60559, 60560, 60561 were selected from the ORFs having the nucleotide sequence represented by SEQ ID NO: 4913.

[5403] The probes having the nucleotide sequence represented by SEQ ID NOS: 60562, 60563, 60564, 60565, 60566, 60567, 60568, 60569, 60570, 60571, 60572 were selected from the ORFs having the nucleotide sequence represented by SEQ ID NO: 4914.

[5404] The probes having the nucleotide sequence represented by SEQ ID NOS: 60573, 60574, 60575, 60576, 60577, 60578, 60579, 60580, 60581, 60582, 60583 were selected from the ORFs having the nucleotide sequence represented by SEQ ID NO: 4915.

[5405] The probes having the nucleotide sequence represented by SEQ ID NOS: 60584, 60585, 60586, 60587, 60588, 60589, 60590, 60591, 60592, 60593, 60594 were selected from the ORFs having the nucleotide sequence represented by SEQ ID NO: 4916.

[5406] The probes having the nucleotide sequence represented by SEQ ID NOS: 60595, 60596, 60597, 60598, 60599, 60600, 60601, 60602, 60603, 60604, 60605 were selected from the ORFs having the nucleotide sequence represented by SEQ ID NO: 4917.

[5407] The probes having the nucleotide sequence represented by SEQ ID NOS: 60606, 60607, 60608, 60609, 60610, 60611, 60612, 60613, 60614, 60615, 60616 were selected from the ORFs having the nucleotide sequence represented by SEQ ID NO: 4918.

[5408] The probes having the nucleotide sequence represented by SEQ ID NOS: 60617, 60618, 60619, 60620, 60621, 60622, 60623, 60624, 60625, 60626, 60627 were selected from the ORFs having the nucleotide sequence represented by SEQ ID NO: 4919.

[5409] The probes having the nucleotide sequence represented by SEQ ID NOS: 60628, 60629, 60630, 60631, 60632, 60633, 60634, 60635, 60636, 60637, 60638 were selected from the ORFs having the nucleotide sequence represented by SEQ ID NO: 4920.

[5410] The probes having the nucleotide sequence represented by SEQ ID NOS: 60639, 60640, 60641, 60642, 60643, 60644, 60645, 60646, 60647, 60648, 60649 were selected from the ORFs having the nucleotide sequence represented by SEQ ID NO: 4921.

[5411] The probes having the nucleotide sequence represented by SEQ ID NOS: 60650, 60651, 60652, 60653, 60654, 60655, 60656, 60657, 60658, 60659, 60660 were selected from the ORFs having the nucleotide sequence represented by SEQ ID NO: 4922.

[5412] The probes having the nucleotide sequence represented by SEQ ID NOS: 60661, 60662, 60663, 60664, 60665, 60666, 60667, 60668, 60669, 60670, 60671 were selected from the ORFs having the nucleotide sequence represented by SEQ ID NO: 4923.

[5413] The probes having the nucleotide sequence represented by SEQ ID NOS: 60672, 60673, 60674, 60675, 60676, 60677, 60678, 60679, 60680, 60681, 60682 were selected from the ORFs having the nucleotide sequence represented by SEQ ID NO: 4924.

[5414] The probes having the nucleotide sequence represented by SEQ ID NOS: 60683, 60684, 60685, 60686, 60687, 60688, 60689, 60690, 60691, 60692, 60693 were selected from the ORFs having the nucleotide sequence represented by SEQ ID NO: 4925.

[5415] The probes having the nucleotide sequence represented by SEQ ID NOS: 60694, 60695, 60696, 60697, 60698, 60699, 60700, 60701, 60702, 60703, 60704 were selected from the ORFs having the nucleotide sequence represented by SEQ ID NO: 4926.

[5416] The probes having the nucleotide sequence represented by SEQ ID NOS: 60705, 60706, 60707, 60708, 60709, 60710, 60711, 60712, 60713, 60714, 60715 were selected from the ORFs having the nucleotide sequence represented by SEQ ID NO: 4927.

[5417] The probes having the nucleotide sequence represented by SEQ ID NOS: 60716, 60717, 60718, 60719, 60720, 60721, 60722, 60723, 60724, 60725, 60726 were selected from the ORFs having the nucleotide sequence represented by SEQ ID NO: 4928.

[5418] The probes having the nucleotide sequence represented by SEQ ID NOS: 60727, 60728, 60729, 60730, 60731, 60732, 60733, 60734, 60735, 60736, 60737 were selected from the ORFs having the nucleotide sequence represented by SEQ ID NO: 4929.

[5419] The probes having the nucleotide sequence represented by SEQ ID NOS: 60738, 60739, 60740, 60741, 60742, 60743, 60744, 60745, 60746, 60747, 60748 were selected from the ORFs having the nucleotide sequence represented by SEQ ID NO: 4930.

[5420] The probes having the nucleotide sequence represented by SEQ ID NOS: 60749, 60750, 60751, 60752, 60753, 60754, 60755, 60756, 60757, 60758, 60759 were selected from the ORFs having the nucleotide sequence represented by SEQ ID NO: 4931.

[5421] The probes having the nucleotide sequence represented by SEQ ID NOS: 60760, 60761, 60762, 60763, 60764, 60765, 60766, 60767, 60768, 60769, 60770 were selected from the ORFs having the nucleotide sequence represented by SEQ ID NO: 4932.

[5422] The probes having the nucleotide sequence represented by SEQ ID NOS: 60771, 60772, 60773, 60774, 60775, 60776, 60777, 60778, 60779, 60780, 60781 were selected from the ORFs having the nucleotide sequence represented by SEQ ID NO: 4933.

[5423] The probes having the nucleotide sequence represented by SEQ ID NOS: 60782, 60783, 60784, 60785, 60786, 60787, 60788, 60789, 60790, 60791, 60792 were selected from the ORFs having the nucleotide sequence represented by SEQ ID NO: 4934.

[5424] The probes having the nucleotide sequence represented by SEQ ID NOS: 60793, 60794, 60795, 60796, 60797, 60798, 60799, 60800, 60801, 60802, 60803 were selected from the ORFs having the nucleotide sequence represented by SEQ ID NO: 4935.

[5425] The probes having the nucleotide sequence represented by SEQ ID NOS: 60804, 60805, 60806, 60807, 60808, 60809, 60810, 60811, 60812, 60813, 60814 were selected from the ORFs having the nucleotide sequence represented by SEQ ID NO: 4936.

[5426] The probes having the nucleotide sequence represented by SEQ ID NOS: 60815, 60816, 60817, 60818, 60819, 60820, 60821, 60822, 60823, 60824, 60825 were selected from the ORFs having the nucleotide sequence represented by SEQ ID NO: 4937.

[5427] The probes having the nucleotide sequence represented by SEQ ID NOS: 60826, 60827, 60828, 60829, 60830, 60831, 60832, 60833, 60834, 60835, 60836 were selected from the ORFs having the nucleotide sequence represented by SEQ ID NO: 4938.

[5428] The probes having the nucleotide sequence represented by SEQ ID NOS: 60837, 60838, 60839, 60840, 60841, 60842, 60843, 60844, 60845, 60846, 60847 were selected from the ORFs having the nucleotide sequence represented by SEQ ID NO: 4939.

[5429] The probes having the nucleotide sequence represented by SEQ ID NOS: 60848, 60849, 60850, 60851, 60852, 60853, 60854, 60855, 60856, 60857, 60858 were selected from the ORFs having the nucleotide sequence represented by SEQ ID NO: 4940.

[5430] The probes having the nucleotide sequence represented by SEQ ID NOS: 60859, 60860, 60861, 60862, 60863, 60864, 60865, 60866, 60867, 60868, 60869 were selected from the ORFs having the nucleotide sequence represented by SEQ ID NO: 4941.

[5431] The probes having the nucleotide sequence represented by SEQ ID NOS: 60870, 60871, 60872, 60873, 60874, 60875, 60876, 60877, 60878, 60879, 60880 were selected from the ORFs having the nucleotide sequence represented by SEQ ID NO: 4942.

[5432] The probes having the nucleotide sequence represented by SEQ ID NOS: 60881, 60882, 60883, 60884, 60885, 60886, 60887, 60888, 60889, 60890, 60891 were selected from the ORFs having the nucleotide sequence represented by SEQ ID NO: 4943.

[5433] The probes having the nucleotide sequence represented by SEQ ID NOS: 60892, 60893, 60894, 60895, 60896, 60897, 60898, 60899, 60900, 60901, 60902 were selected from the ORFs having the nucleotide sequence represented by SEQ ID NO: 4944.

[5434] The probes having the nucleotide sequence represented by SEQ ID NOS: 60903, 60904, 60905, 60906, 60907, 60908, 60909, 60910, 60911, 60912, 60913 were selected from the ORFs having the nucleotide sequence represented by SEQ ID NO: 4945.

[5435] The probes having the nucleotide sequence represented by SEQ ID NOS: 60914, 60915, 60916, 60917, 60918, 60919, 60920, 60921, 60922, 60923, 60924 were selected from the ORFs having the nucleotide sequence represented by SEQ ID NO: 4946.

[5436] The probes having the nucleotide sequence represented by SEQ ID NOS: 60925, 60926, 60927, 60928, 60929, 60930, 60931, 60932, 60933, 60934, 60935 were selected from the ORFs having the nucleotide sequence represented by SEQ ID NO: 4947.

[5437] The probes having the nucleotide sequence represented by SEQ ID NOS: 60936, 60937, 60938, 60939, 60940, 60941, 60942, 60943, 60944, 60945, 60946 were selected from the ORFs having the nucleotide sequence represented by SEQ ID NO: 4948.

[5438] The probes having the nucleotide sequence represented by SEQ ID NOS: 60947, 60948, 60949, 60950, 60951, 60952, 60953, 60954, 60955, 60956, 60957 were selected from the ORFs having the nucleotide sequence represented by SEQ ID NO: 4949.

[5439] The probes having the nucleotide sequence represented by SEQ ID NOS:-60958, 60959, 60960, 60961, 60962, 60963, 60964, 60965, 60966, 60967, 60968 were selected from the ORFs having the nucleotide sequence represented by SEQ ID NO: 4950.

[5440] The probes having the nucleotide sequence represented by SEQ ID NOS: 60969, 60970, 60971, 60972, 60973, 60974, 60975, 60976, 60977, 60978, 60979 were selected from the ORFs having the nucleotide sequence represented by SEQ ID NO: 4951.

[5441] The probes having the nucleotide sequence represented by SEQ ID NOS: 60980, 60981, 60982, 60983, 60984, 60985, 60986, 60987, 60988, 60989, 60990 were selected from the ORFs having the nucleotide sequence represented by SEQ ID- NO: 4952.

[5442] The probes having the nucleotide sequence represented by SEQ ID NOS: 60991, 60992, 60993, 60994, 60995, 60996, 60997, 60998, 60999, 61000, 61001 were selected from the ORFs having the nucleotide sequence represented by SEQ ID NO: 4953.

[5443] The probes having the nucleotide sequence represented by SEQ ID NOS: 61002, 61003, 61004, 61005, 61006, 61007, 61008, 61009, 61010, 61011, 61012 were selected from the ORFs having the nucleotide sequence represented by SEQ ID NO: 4954.

[5444] The probes having the nucleotide sequence represented by SEQ ID NOS: 61013, 61014, 61015, 61016, 61017, 61018, 61019, 61020, 61021, 61022, 61023 were selected from the ORFs having the nucleotide sequence represented by SEQ ID NO: 4955.

[5445] The probes having the nucleotide sequence represented by SEQ ID NOS: 61024, 61025, 61026, 61027, 61028, 61029, 61030, 61031, 61032, 61033, 61034 were selected from the ORFs having the nucleotide sequence represented by SEQ ID NO: 4956.

[5446] The probes having the nucleotide sequence represented by SEQ ID NOS: 61035, 61036, 61037, 61038, 61039, 61040, 61041, 61042, 61043, 61044, 61045 were selected from the ORFs having the nucleotide sequence represented by SEQ ID NO: 4957.

[5447] The probes having the nucleotide sequence represented by SEQ ID NOS: 61046, 61047, 61048, 61049, 61050, 61051, 61052, 61053, 61054, 61055, 61056 were selected from the ORFs having the nucleotide sequence represented by SEQ ID NO: 4958.

[5448] The probes having the nucleotide sequence represented by SEQ ID NOS: 61057, 61058, 61059, 61060, 61061, 61062, 61063, 61064, 61065, 61066, 61067 were selected from the ORFs having the nucleotide sequence represented by SEQ ID NO: 4959.

[5449] The probes having the nucleotide sequence represented by SEQ ID NOS: 61068, 61069, 61070, 61071, 61072, 61073, 61074, 61075, 61076, 61077, 61078 were selected from the ORFs having the nucleotide sequence represented by SEQ ID NO: 4960.

[5450] The probes having the nucleotide sequence represented by SEQ ID NOS: 61079, 61080, 61081, 61082, 61083, 61084, 61085, 61086, 61087, 61088, 61089 were selected from the ORFs having the nucleotide sequence represented by SEQ ID NO: 4961.

[5451] The probes having the nucleotide sequence represented by SEQ ID NOS: 61090, 61091, 61092, 61093, 61094, 61095, 61096, 61097, 61098, 61099, 61100 were selected from the ORFs having the nucleotide sequence represented by SEQ ID NO: 4962.

[5452] The probes having the nucleotide sequence represented by SEQ ID NOS: 61101, 61102, 61103, 61104, 61105, 61106, 61107, 61108, 61109, 61110, 61111 were selected from the ORFs having the nucleotide sequence represented by SEQ ID NO: 4963.

[5453] The probes having the nucleotide sequence represented by SEQ ID NOS: 61112, 61113, 61114, 61115, 61116, 61117, 61118, 61119, 61120, 61121, 61122 were selected from the ORFs having the nucleotide sequence represented by SEQ ID NO: 4964.

[5454] The probes having the nucleotide sequence represented by SEQ ID NOS: 61123, 61124, 61125, 61126, 61127, 61128,

[5455] 61129, 61130, 61131, 61132, 61133 were selected from the ORFs having the nucleotide sequence represented by SEQ ID NO: 4965.

[5456] The probes having the nucleotide sequence represented by SEQ ID NOS: 61134, 61135, 61136, 61137, 61138, 61139, 61140, 61141, 61142, 61143, 61144 were selected from the ORFs having the nucleotide sequence represented by SEQ ID NO: 4966.

[5457] The probes having the nucleotide sequence represented by SEQ ID NOS: 61145, 61146, 61147, 61148, 61149, 61150, 61151, 61152, 61153, 61154, 61155 were selected from the ORFs having the nucleotide sequence represented by SEQ ID NO: 4967.

[5458] The probes having the nucleotide sequence represented by SEQ ID NOS: 61156, 61157, 61158, 61159, 61160, 61161, 61162, 61163, 61164, 61165, 61166 were selected from the ORFs having the nucleotide sequence represented by SEQ ID NO: 4968.

[5459] The probes having the nucleotide sequence represented by SEQ ID NOS: 61167, 61168, 61169, 61170, 61171, 61172, 61173, 61174, 61175, 61176, 61177, 61178, 61179, 61180, 61181, 61182, 61183, 61184, 61185, 61186, 61187, 61188 were selected from the ORFs having the nucleotide sequence represented by SEQ ID NO: 4969.

[5460] The probes having the nucleotide sequence represented by SEQ ID NOS: 61189, 61190, 61191, 61192, 61193, 61194, 61195, 61196, 61197, 61198, 61199 were selected from the ORFs having the nucleotide sequence represented by SEQ ID NO: 4970.

[5461] The probes having the nucleotide sequence represented by SEQ ID NOS: 61200, 61201, 61202, 61203, 61204, 61205, 61206, 61207, 61208, 61209, 61210 were selected from the ORFs having the nucleotide sequence represented by SEQ ID NO: 4971.

[5462] The probes having the nucleotide sequence represented by SEQ ID NOS: 61211, 61212, 61213, 61214, 61215, 61216, 61217, 61218, 61219, 61220, 61221 were selected from the ORFs having the nucleotide sequence represented by SEQ ID NO: 4972.

[5463] The probes having the nucleotide sequence represented by SEQ ID NOS: 61222, 61223, 61224, 61225, 61226, 61227, 61228, 61229, 61230, 61231, 61232 were selected from the ORFs having the nucleotide sequence represented by SEQ ID NO: 4973.

[5464] The probes having the nucleotide sequence represented by SEQ ID NOS: 61233, 61234, 61235, 61236, 61237, 61238, 61239, 61240, 61241, 61242, 61243 were selected from the ORFs having the nucleotide sequence represented by SEQ ID NO: 4974.

[5465] The probes having the nucleotide sequence represented by SEQ ID NOS: 61244, 61245, 61246, 61247, 61248, 61249, 61250, 61251, 61252, 61253, 61254 were selected from the ORFs having the nucleotide sequence represented by SEQ ID NO: 4975.

[5466] The probes having the nucleotide sequence represented by SEQ ID NOS: 61255, 61256, 61257, 61258, 61259, 61260, 61261, 61262, 61263, 61264, 61265 were selected from the ORFs having the nucleotide sequence represented by SEQ ID NO: 4976.

[5467] The probes having the nucleotide sequence represented by SEQ ID NOS: 61266, 61267, 61268, 61269, 61270, 61271, 61272, 61273, 61274, 61275, 61276 were selected from the ORFs having the nucleotide sequence represented by SEQ ID NO: 4977.

[5468] The probes having the nucleotide sequence represented by SEQ ID NOS: 61277, 61278, 61279, 61280, 61281, 61282, 61283, 61284, 61285, 61286, 61287 were selected from the ORFs having the nucleotide sequence represented by SEQ ID NO: 4978.

[5469] The probes having the nucleotide sequence represented by SEQ ID NOS: 61288, 61289, 61290, 61291, 61292, 61293, 61294, 61295, 61296, 61297, 61298 were selected from the ORFs having the nucleotide sequence represented by SEQ ID NO: 4979.

[5470] The probes having the nucleotide sequence represented by SEQ ID NOS: 61299, 61300, 61301, 61302, 61303, 61304, 61305, 61306, 61307, 61308, 61309 were selected from the ORFs having the nucleotide sequence represented by SEQ ID NO: 4980.

[5471] The probes having the nucleotide sequence represented by SEQ ID NOS: 61310, 61311, 61312, 61313, 61314, 61315, 61316, 61317, 61318, 61319, 61320 were selected from the ORFs having the nucleotide sequence represented by SEQ ID NO: 4981.

[5472] The probes having the nucleotide sequence represented by SEQ ID NOS: 61321, 61322, 61323, 61324, 61325, 61326, 61327, 61328, 61329, 61330, 61331 were selected from the ORFs having the nucleotide sequence represented by SEQ ID NO: 4982.

[5473] The probes having the nucleotide sequence represented by SEQ ID NOS: 61332, 61333, 61334, 61335, 61336, 61337, 61338, 61339, 61340, 61341, 61342 were selected from the ORFs having the nucleotide sequence represented by SEQ ID NO: 4983.

[5474] The probes having the nucleotide sequence represented by SEQ ID NOS: 61343, 61344, 61345, 61346, 61347, 61348, 61349, 61350, 61351, 61352, 61353 were selected from the ORFs having the nucleotide sequence represented by SEQ ID NO: 4984.

[5475] The probes having the nucleotide sequence represented by SEQ ID NOS: 61354, 61355, 61356, 61357, 61358, 61359, 61360, 61361, 61362, 61363, 61364 were selected from the ORFs having the nucleotide sequence represented by SEQ ID NO: 4985.

[5476] The probes having the nucleotide sequence represented by SEQ ID NOS: 61365, 61366, 61367, 61368, 61369, 61370, 61371, 61372, 61373, 61374, 61375 were selected from the ORFs having the nucleotide sequence represented by SEQ ID NO: 4986.

[5477] The probes having the nucleotide sequence represented by SEQ ID NOS: 61376, 61377, 61378, 61379, 61380, 61381, 61382, 61383, 61384, 61385, 61386 were selected from the ORFs having the nucleotide sequence represented by SEQ ID NO: 4987.

[5478] The probes having the nucleotide sequence represented by SEQ ID NOS: 61387, 61388, 61389, 61390, 61391, 61392, 61393, 61394, 61395, 61396, 61397 were selected from the ORFs having the nucleotide sequence represented by SEQ ID NO: 4988.

[5479] The probes having the nucleotide sequence represented by. SEQ ID NOS: 61398, 61399, 61400, 61401, 61402, 61403, 61404, 61405, 61406, 61407, 61408 were selected from the ORFs having the nucleotide sequence represented by SEQ ID NO: 4989.

[5480] The probes having the nucleotide sequence represented by SEQ ID NOS: 61409, 61410, 61411, 61412, 61413, 61414, 61415, 61416, 61417, 61418, 61419 were selected from the ORFs having the nucleotide sequence represented by SEQ ID NO: 4990.

[5481] The probes having the nucleotide sequence represented by SEQ ID NOS: 61420, 61421, 61422, 61423, 61424, 61425, 61426, 61427, 61428, 61429, 61430 were selected from the ORFs having the nucleotide sequence represented by SEQ ID NO: 4991.

[5482] The probes having the nucleotide sequence represented by SEQ ID NOS: 61431, 61432, 61433, 61434, 61435, 61436, 61437, 61438, 61439, 61440, 61441 were selected from the ORFs having the nucleotide sequence represented by SEQ ID NO: 4992.

[5483] The probes having the nucleotide sequence represented by SEQ ID NOS: 61442, 61443, 61444, 61445, 61446, 61447, 61448, 61449, 61450, 61451, 61452 were selected from the ORFs having the nucleotide sequence represented by SEQ ID NO: 4993.

[5484] The probes having the nucleotide sequence represented by SEQ ID NOS: 61453, 61454, 61455, 61456, 61457, 61458, 61459, 61460, 61461, 61462, 61463 were selected from the ORFs having the nucleotide sequence represented by SEQ ID NO: 4994.

[5485] The probes having the nucleotide sequence represented by SEQ ID NOS: 61464, 61465, 61466, 61467, 61468, 61469, 61470, 61471, 61472, 61473, 61474 were selected from the ORFs having the nucleotide sequence represented by SEQ ID NO: 4995.

[5486] The probes having the nucleotide sequence represented by SEQ ID NOS: 61475, 61476, 61477, 61478, 61479, 61480, 61481, 61482, 61483, 61484, 61485 were selected from the ORFs having the nucleotide sequence represented by SEQ ID NO: 4996.

[5487] The probes having the nucleotide sequence represented by SEQ ID NOS: 61486, 61487, 61488, 61489, 61490, 61491, 61492, 61493, 61494, 61495, 61496 were selected from the ORFs having the nucleotide sequence represented by SEQ ID NO: 4997.

[5488] The probes having the nucleotide sequence represented by SEQ ID NOS: 61497, 61498, 61499, 61500, 61501, 61502, 61503, 61504, 61505, 61506, 61507 were selected from the ORFs having the nucleotide sequence represented by SEQ ID NO: 4998.

[5489] The probes having the nucleotide sequence represented by SEQ ID NOS: 61508, 61509, 61510, 61511, 61512, 61513, 61514, 61515, 61516, 61517, 61518 were selected from the ORFs having the nucleotide sequence represented by SEQ ID NO: 4999.

[5490] The probes-having the nucleotide sequence represented by SEQ ID NOS: 61519, 61520, 61521, 61522, 61523, 61524, 61525, 61526, 61527, 61528, 61529 were selected from the ORFs having the nucleotide sequence represented by SEQ ID NO: 5000.

[5491] The probes having the nucleotide sequence represented by SEQ ID NOS: 61530, 61531, 61532, 61533, 61534, 61535, 61536, 61537, 61538, 61539, 61540 were selected from the ORFs having the nucleotide sequence represented by SEQ ID NO: 5001.

[5492] The probes having-the nucleotide sequence represented by SEQ ID NOS: 61541, 61542, 61543, 61544, 61545, 61546, 61547, 61548, 61549, 61550, 61551 were selected from the ORFs having the nucleotide sequence represented by SEQ ID NO: 5002.

[5493] The probes having the nucleotide sequence represented by SEQ ID NOS:. 61552, 61553, 61554, 61555, 61556, 61557, 61558, 61559, 61560, 61561, 61562 were selected from the ORFs having the nucleotide sequence represented by SEQ ID NO: 5003.

[5494] The probes having the nucleotide sequence represented by SEQ ID NOS: 61563, 61564, 61565, 61566, 61567, 61568, 61569, 61570, 61571, 61572, 61573 were selected from the ORFs having the nucleotide sequence represented by SEQ ID NO: 5004.

[5495] The probes having the nucleotide sequence represented by SEQ ID NOS: 61574, 61575, 61576, 61577, 61578, 61579, 61580, 61581, 61582, 61583, 61584 were selected from the ORFs having the nucleotide sequence represented by SEQ ID NO: 5005.

[5496] The probes having the nucleotide sequence represented by SEQ ID NOS: 61585, 61586, 61587, 61588, 61589, 61590, 61591, 61592, 61593, 61594, 61595 were selected from the ORFs having the nucleotide sequence represented by SEQ ID NO: 5006.

[5497] The probes having the nucleotide sequence represented by SEQ ID NOS: 61596, 61597, 61598, 61599, 61600, 61601, 61602, 61603, 61604, 61605, 61606 were selected from the ORFs having the nucleotide sequence represented by SEQ ID NO: 5007.

[5498] The probes having the nucleotide sequence represented by SEQ ID NOS: 61607, 61608, 61609, 61610, 61611, 61612, 61613, 61614, 61615, 61616, 61617 were selected from the ORFs having the nucleotide sequence represented by SEQ ID NO: 5008.

[5499] The probes having the nucleotide sequence represented by SEQ ID NOS: 61618, 61619, 61620, 61621, 61622, 61623, 61624, 61625, 61626, 61627, 61628 were selected from the ORFs having the nucleotide sequence represented by SEQ ID NO: 5009.

[5500] The probes having the nucleotide sequence represented by SEQ ID NOS: 61629, 61630, 61631, 61632, 61633, 61634, 61635, 61636, 61637, 61638, 61639 were selected from the ORFs having the nucleotide sequence represented by SEQ ID NO: 5010.

[5501] The probes having the nucleotide sequence represented by SEQ ID NOS: 61640, 61641, 61642, 61643, 61644, 61645, 61646, 61647, 61648, 61649, 61650 were selected from the ORFs having the nucleotide sequence represented by SEQ ID NO: 5011.

[5502] The probes having the nucleotide sequence represented by SEQ ID NOS: 61651, 61652, 61653, 61654, 61655, 61656, 61657, 61658, 61659, 61660, 61661 were selected from the ORFs having the nucleotide sequence represented by SEQ ID NO: 5012.

[5503] The probes having the nucleotide sequence represented by SEQ ID NOS: 61662, 61663, 61664, 61665, 61666, 61667, 61668, 61669, 61670, 61671, 61672 were selected from the ORFs having the nucleotide sequence represented by SEQ ID NO: 5013.

[5504] The probes having the nucleotide sequence represented by SEQ ID NOS: 61673, 61674, 61675, 61676, 61677, 61678, 61679, 61680, 61681, 61682, 61683 were selected from the ORFs having the nucleotide sequence represented by SEQ ID NO: 5014.

[5505] The probes having the nucleotide sequence represented by SEQ ID NOS: 61684, 61685, 61686, 61687, 61688, 61689, 61690, 61691, 61692, 61693, 61694 were selected from the ORFs having the nucleotide sequence represented by SEQ ID NO: 5015.

[5506] The probes having the nucleotide sequence represented by SEQ ID NOS: 61695, 61696, 61697, 61698, 61699, 61700, 61701, 61702, 61703, 61704, 61705 were selected from the ORFs having the nucleotide sequence represented by SEQ ID NO: 5016.

[5507] The probes having the nucleotide sequence represented by SEQ ID NOS: 61706, 61707, 61708, 61709, 61710, 61711, 61712, 61713, 61714, 61715, 61716 were selected from the ORFs having the nucleotide sequence represented by SEQ ID NO: 5017.

[5508] The probes having the nucleotide sequence represented by SEQ ID NOS: 61717, 61718, 61719, 61720, 61721, 61722, 61723, 61724, 61725, 61726, 61727 were selected from the ORFs having the nucleotide sequence represented by SEQ ID NO: 5018.

[5509] The probes having the nucleotide sequence represented by SEQ ID NOS: 61728, 61729, 61730, 61731, 61732, 61733, 61734, 61735, 61736, 6.1737, 61738 were selected from the ORFs having the nucleotide sequence represented by SEQ ID NO: 5019.

[5510] The probes having the nucleotide sequence represented by SEQ ID NOS: 61739, 61740, 61741, 61742, 61743, 61744, 61745, 61746, 61747, 61748, 61749 were selected from the ORFs having the nucleotide sequence represented by SEQ ID NO: 5020.

[5511] The probes having the nucleotide sequence represented by SEQ ID NOS: 61750, 61751, 61752, 61753, 61754, 61755, 61756, 61757, 61758, 61759, 61760 were selected from the ORFs having the nucleotide sequence represented by SEQ ID NO: 5021.

[5512] The probes having the nucleotide sequence represented by SEQ ID NOS: 61761, 61762, 61763, 61764, 61765, 61766, 61767, 61768, 61769, 61770, 61771 were selected from the ORFs having the nucleotide sequence represented by SEQ ID NO: 5022.

[5513] The probes having the nucleotide sequence represented by SEQ ID NOS: 61772, 61773, 61774, 61775, 61776, 61777, 61778, 61779, 61780, 61781, 61782 were selected from the ORFs having the-nucleotide sequence represented by SEQ ID NO: 5023.

[5514] The probes having the nucleotide sequence represented by SEQ ID NOS: 61783, 61784, 61785, 61786, 61787, 61788, 61789, 61790, 61791, 61792, 61793 were selected from the ORFs having the nucleotide sequence represented by SEQ ID NO: 5024.

[5515] The probes having the nucleotide sequence represented by SEQ ID NOS: 61794, 61795, 61796, 61797, 61798, 61799, 61800, 61801, 61802, 61803, 61804 were selected from the ORFs having the nucleotide sequence represented by SEQ ID NO: 5025.

[5516] The probes having the nucleotide sequence represented by SEQ ID NOS: 61805, 61806, 61807, 61808, 61809, 61810, 61811, 61812, 61813, 61814, 61815 were selected from the ORFs having the nucleotide sequence represented by SEQ ID NO: 5026.

[5517] The probes having the nucleotide sequence represented by SEQ ID NOS: 61816, 61817, 61818, 61819, 61820, 61821, 61822, 61823, 61824, 61825, 61826 were selected from the ORFs having the nucleotide sequence represented by SEQ ID NO: 5027.

[5518] The probes having the nucleotide sequence represented by SEQ ID NOS: 61827, 61828, 61829, 61830, 61831, 61832, 61833, 61834, 61835, 61836, 61837 were selected from the ORFs having the nucleotide sequence represented by SEQ ID NO: 5028.

[5519] The probes having the nucleotide sequence represented by SEQ ID NOS: 61838, 61839, 61840, 61841, 61842, 61843, 61844, 61845, 61846, 61847, 61848 were selected from the ORFs having the nucleotide sequence represented by SEQ ID NO: 5029.

[5520] The probes having the nucleotide sequence represented by SEQ ID NOS: 61849, 61850, 61851, 61852, 61853, 61854, 61855, 61856, 61857, 61858, 61859 were selected from the ORFs having the nucleotide sequence represented by SEQ ID NO: 5030.

[5521] The probes having the nucleotide sequence represented by SEQ ID NOS: 61860, 61861, 61862, 61863, 61864, 61865, 61866, 61867, 61868, 61869, 61870 were selected from the ORFs having the nucleotide sequence represented by SEQ ID NO: 5031.

[5522] The probes having the nucleotide sequence represented by SEQ ID NOS: 61871, 61872, 61873, 61874, 61875, 61876, 61877, 61878, 61879, 61880, 61881 were selected from the ORFs having the nucleotide sequence represented by SEQ ID NO: 5032.

[5523] The probes having the nucleotide sequence represented by SEQ ID NOS: 61882, 61883, 61884, 61885, 61886, 61887, 61888, 61889, 61890, 61891, 61892 were selected from the ORFs having the nucleotide sequence represented by SEQ ID NO: 5033.

[5524] The probes having the nucleotide sequence represented by SEQ ID NOS: 61893, 61894, 61895, 61896, 61897, 61898, 61899, 61900, 61901, 61902, 61903 were selected from the ORFs having the nucleotide sequence represented by SEQ ID NO: 5034.

[5525] The probes having the nucleotide sequence represented by SEQ ID NOS: 61904, 61905, 61906, 61907, 61908, 61909, 61910, 61911, 61912, 61913, 61914 were selected from the ORFs having the nucleotide sequence represented by SEQ ID NO: 5035.

[5526] The probes having the nucleotide sequence represented by SEQ ID NOS: 61915, 61916, 61917, 61918, 61919, 61920, 61921, 61922, 61923, 61924, 61925 were selected from the ORFs having the nucleotide sequence represented by SEQ ID NO: 5036.

[5527] The probes having the nucleotide sequence represented by SEQ ID NOS: 61926, 61927, 61928, 61929, 61930, 61931, 61932, 61933, 61934, 61935, 61936 were selected from the ORFs having the nucleotide sequence represented by SEQ ID NO: 5037.

[5528] The probes having the nucleotide sequence represented by SEQ ID NOS: 61937, 61938, 61939, 61940, 61941, 61942, 61943, 61944, 61945, 61946, 61947 were selected from the ORFs having the nucleotide sequence represented by SEQ ID NO: 5038.

[5529] The probes having the nucleotide sequence represented by SEQ ID NOS: 61948, 61949, 61950, 61951, 61952, 61953, 61954, 61955, 61956, 61957, 61958 were selected from the ORFs having the nucleotide sequence represented by SEQ ID NO: 5039.

[5530] The probes having the nucleotide sequence represented by SEQ ID NOS: 61959, 61960, 61961, 61962, 61963, 61964, 61965, 61966, 61967, 61968, 61969 were selected from the ORFs having the nucleotide sequence represented by SEQ ID NO:. 5040.

[5531] The probes having the nucleotide sequence represented by SEQ ID NOS: 61970, 61971, 61972, 61973, 61974, 61975, 61976, 61977, 61978, 61979, 61980, 61981, 61982, 61983, 61984, 61985, 61986, 61987, 61988, 61989, 61990, 61991 were selected from the ORFs having the nucleotide sequence represented by SEQ ID NO: 5041.

[5532] The probes having the nucleotide sequence represented by SEQ ID NOS: 61992, 61993, 61994, 61995, 61996, 61997, 61998, 61999, 62000, 62001, 62002 were selected from the ORFs having the nucleotide sequence represented by SEQ ID NO: 5042.

[5533] The probes having the nucleotide sequence represented by SEQ ID NOS: 62003, 62004, 62005, 62006, 62007, 62008, 62009, 62010, 62011, 62012, 62013 were selected from the ORFs having the nucleotide sequence represented by SEQ ID NO: 5043.

[5534] The probes having the nucleotide sequence represented by SEQ ID NOS: 62014, 62015, 62016, 62017, 62018, 62019, 62020, 62021, 62022, 62023, 62024 were selected from the ORFs having the nucleotide sequence represented by SEQ ID NO: 5044.

[5535] The probes having the nucleotide sequence represented by SEQ ID NOS: 62025, 62026, 62027, 62028, 62029, 62030, 62031, 62032, 62033, 62034, 62035 were selected from the ORFs having the nucleotide sequence represented by SEQ ID NO: 5045.

[5536] The probes having the nucleotide sequence represented by SEQ ID NOS: 62036, 62037, 62038, 62039, 62040, 62041, 62042, 62043, 62044, 62045, 62046 were selected from the ORFs having the nucleotide sequence represented by SEQ ID NO: 5046.

[5537] The probes having the nucleotide sequence represented by SEQ ID NOS: 62047, 62048, 62049, 62050, 62051, 62052, 62053, 62054, 62055, 62056, 62057 were selected from the ORFs having the nucleotide sequence represented by SEQ ID NO: 5047.

[5538] The probes having the nucleotide sequence represented by SEQ ID NOS: 62058, 62059, 62060, 62061, 62062, 62063, 62064, 62065, 62066, 62067, 62068 were selected from the ORFs having the nucleotide sequence represented by SEQ ID NO: 5048.

[5539] The probes having the nucleotide sequence represented by SEQ ID NOS: 62069, 62070, 62071, 62072, 62073, 62074, 62075, 62076, 62077, 62078, 62079 were selected from the ORFs having the nucleotide sequence represented by SEQ ID NO: 5049.

[5540] The probes having the nucleotide sequence represented by SEQ ID NOS: 62080, 62081, 62082, 62083, 62084, 62085, 62086, 62087, 62088, 62089, 62090 were selected from the ORFs having the nucleotide sequence represented by SEQ ID NO: 5050.

[5541] The probes having the nucleotide sequence represented by SEQ ID NOS: 62091, 62092, 62093, 62094, 62095, 62096, 62097, 62098, 62099, 62100, 62101 were selected from the ORFs having the nucleotide sequence represented by SEQ ID NO: 5051.

[5542] The probes having the nucleotide sequence represented by SEQ ID NOS: 62102, 62103, 62104, 62105, 62106, 62107, 62108, 62109, 62110, 62111, 62112 were selected from the ORFs having the nucleotide sequence represented by SEQ ID NO: 5052.

[5543] The probes having the nucleotide sequence represented by SEQ ID NOS: 62113, 62114, 62115, 62116, 62117, 62118, 62119, 62120, 62121, 62122, 62123 were selected from the ORFs having the nucleotide sequence represented by SEQ ID NO: 5053.

[5544] The probes having the nucleotide sequence represented by SEQ ID NOS: 62124, 62125, 62126, 62127, 62128, 62129, 62130, 62131, 62132, 62133, 62134 were selected from the ORFs having the nucleotide sequence represented by SEQ ID NO: 5054.

[5545] The probes having the nucleotide sequence represented by SEQ ID NOS: 62135, 62136, 62137, 62138, 62139, 62140, 62141, 62142, 62143, 62144, 62145 were selected from the ORFs having the nucleotide sequence represented by SEQ ID NO: 5055.

[5546] The probes having the nucleotide sequence represented by SEQ ID NOS: 62146, 62147, 62148, 62149, 62150, 62151, 62152, 62153, 62154, 62155, 62156 were selected from the ORFs having the nucleotide sequence represented by SEQ ID NO: 5056.

[5547] The probes having the nucleotide sequence represented by SEQ ID NOS: 62157, 62158, 62159, 62160, 62161, 62162, 62163, 62164, 62165, 62166, 62167 were selected from the ORFs having the nucleotide sequence represented by SEQ ID NO: 5057.

[5548] The probes having the nucleotide sequence represented by SEQ ID NOS: 62168, 62169, 62170, 62171, 62172, 62173, 62174, 62175, 62176, 62177, 62178 were selected from the ORFs having the nucleotide sequence represented by SEQ ID NO: 5058.

[5549] The probes having the nucleotide sequence represented by SEQ ID NOS: 62179, 62180, 62181, 62182, 62183, 62184, 62185, 62186, 62187, 62188, 62189 were selected from the ORFs having the nucleotide sequence represented by SEQ ID NO: 5059.

[5550] The probes having the nucleotide sequence represented by SEQ ID NOS: 62190, 62191, 62192, 62193, 62194, 62195, 62196, 62197, 62198, 62199, 62200 were selected from the ORFs having the nucleotide sequence represented by SEQ ID NO: 5060.

[5551] The probes having the nucleotide sequence represented by SEQ ID NOS: 62201, 62202, 62203, 62204, 62205, 62206, 62207, 62208, 62209, 62210, 62211 were selected from the ORFs having the nucleotide sequence represented by SEQ ID NO: 5061.

[5552] The probes having the nucleotide sequence represented by SEQ ID NOS: 62212, 62213, 62214, 62215, 62216, 62217, 62218, 62219, 62220, 62221, 62222 were selected from the ORFs having the nucleotide sequence represented by SEQ ID NO: 5062.

[5553] The probes having the nucleotide sequence represented by SEQ ID NOS: 62223, 62224, 62225, 62226, 62227, 62228, 62229, 62230, 62231, 62232, 62233 were selected from the ORFs having the nucleotide sequence represented by SEQ ID NO: 5063.

[5554] The probes having the nucleotide sequence represented by SEQ ID NOS: 62234, 62235, 62236, 62237, 62238, 62239, 62240, 62241, 62242, 62243, 62244 were selected from the ORFs having the nucleotide sequence represented by SEQ ID NO: 5064.

[5555] The probes having the nucleotide sequence represented by SEQ ID NOS: 62245, 62246, 62247, 62248, 62249, 62250, 62251, 62252, 62253, 62254, 62255 were selected from the ORFs having the nucleotide sequence represented by SEQ ID NO: 5065.

[5556] The probes having the nucleotide sequence represented by SEQ ID NOS: 62256, 62257, 62258, 62259, 62260, 62261, 62262, 62263, 62264, 62265, 62266 were selected from the ORFs having the nucleotide sequence represented by SEQ ID NO: 5066.

[5557] The probes having the nucleotide sequence represented by SEQ ID NOS: 62267, 62268, 62269, 62270, 62271, 62272, 62273, 62274, 62275, 62276, 62277 were selected from the ORFs having the nucleotide sequence represented by SEQ ID NO: 5067.

[5558] The probes having the nucleotide sequence represented by SEQ ID NOS: 62278, 62279, 62280, 62281, 62282, 62283, 62284, 62285, 62286, 62287, 62288 were selected from the ORFs having the nucleotide sequence represented by SEQ ID NO: 5068.

[5559] The probes having the nucleotide sequence represented by SEQ ID NOS: 62289, 62290, 62291, 62292, 62293, 62294, 62295, 62296, 62297, 62298, 62299 were selected from the ORFs having the nucleotide sequence represented by SEQ ID NO: 5069.

[5560] The probes having the nucleotide sequence represented by SEQ ID NOS: 62300, 62301, 62302, 62303, 62304, 62305, 62306, 62307, 62308, 62309, 62310 were selected from the ORFs having the nucleotide sequence represented by SEQ ID NO: 5070.

[5561] The probes having the nucleotide sequence represented by SEQ ID NOS: 62311, 62312, 62313, 62314, 62315, 62316, 62317, 62318, 62319, 62320, 62321 were selected from the ORFs having the nucleotide sequence represented by SEQ ID NO: 5071.

[5562] The probes having the nucleotide sequence represented by SEQ ID NOS: 62322, 62323, 62324, 62325, 62326, 62327, 62328, 62329, 62330, 62331, 62332 were selected from the ORFs having the nucleotide sequence represented by SEQ ID NO: 5072.

[5563] The probes having the nucleotide sequence represented by SEQ ID NOS: 62333, 62334, 62335, 62336, 62337, 62338, 62339, 62340, 62341, 62342, 62343 were selected from the ORFs having the nucleotide sequence represented by SEQ ID NO: 5073.

[5564] The probes having the nucleotide sequence represented by SEQ ID NOS: 62344, 62345, 62346, 62347, 62348, 62349, 62350, 62351, 62352, 62353, 62354 were selected from the ORFs having the nucleotide sequence represented by SEQ ID NO: 5074.

[5565] The probes having the nucleotide sequence represented by SEQ ID NOS: 62355, 62356, 62357, 62358, 62359, 62360, 62361, 62362, 62363, 62364, 62365 were selected from the ORFs having the nucleotide sequence represented by SEQ ID NO: 5075.

[5566] The probes having the nucleotide sequence represented by SEQ ID NOS: 62366, 62367, 62368, 62369, 62370, 62371, 62372, 62373, 62374, 62375, 62376 were selected from the ORFs having the nucleotide sequence represented by SEQ ID NO: 5076.

[5567] The probes having the nucleotide sequence represented by SEQ ID NOS: 62377, 62378, 62379, 62380, 62381, 62382, 62383, 62384, 62385, 62386, 62387, 62388, 62389, 62390, 62391, 62392, 62393, 62394, 62395, 62396, 62397, 62398 were selected from the ORFs having the nucleotide sequence represented by SEQ ID NO: 5077.

[5568] The probes having the nucleotide sequence represented by SEQ ID NOS: 62399, 62400, 62401, 62402, 62403, 62404, 62405, 62406, 62407, 62408, 62409 were selected from the ORFs having the nucleotide sequence represented by SEQ ID NO: 5078.

[5569] The probes having the nucleotide sequence represented by SEQ ID NOS: 62410, 62411, 62412, 62413, 62414, 62415, 62416, 62417, 62418, 62419, 62420 were selected from the ORFs having the nucleotide sequence represented by SEQ ID NO: 5079.

[5570] The probes having the nucleotide sequence represented by SEQ ID NOS: 62421, 62422, 62423, 62424, 62425, 62426, 62427, 62428, 62429, 62430, 62431 were selected from the ORFs having the nucleotide sequence represented by SEQ ID NO: 5080.

[5571] The probes having the nucleotide sequence represented by SEQ ID NOS: 62432, 62433, 62434, 62435, 62436, 62437, 62438, 62439, 62440, 62441, 62442 were selected from the ORFs having the nucleotide sequence represented by SEQ ID NO: 5081.

[5572] The probes having the nucleotide sequence represented by SEQ ID NOS: 62443, 62444, 62445, 62446, 62447, 62448, 62449, 62450, 62451, 62452, 62453 were selected from the ORFs having the nucleotide sequence represented by SEQ ID NO: 5082.

[5573] The probes having the nucleotide sequence represented by SEQ ID NOS: 62454, 62455, 62456, 62457, 62458, 62459, 62460, 62461, 62462, 62463, 62464 were selected from the ORFs having the nucleotide sequence represented by SEQ ID NO: 5083.

[5574] The probes having the nucleotide sequence represented by SEQ ID NOS: 62465, 62466, 62467, 62468, 62469, 62470, 62471, 62472, 62473, 62474, 62475 were selected from the ORFs having the nucleotide sequence represented by SEQ ID NO: 5084.

[5575] The probes having the nucleotide sequence represented by SEQ ID NOS: 62476, 62477, 62478, 62479, 62480, 62481, 62482, 62483, 62484, 62485, 62486 were selected from the ORFs having the nucleotide sequence represented by SEQ ID NO: 5085.

[5576] The probes having the nucleotide sequence represented by SEQ ID NOS: 62487, 62488, 62489, 62490, 62491, 62492, 62493, 62494, 62495, 62496, 62497 were selected from the ORFs having the nucleotide sequence represented by SEQ ID NO: 5086.

[5577] The probes having the nucleotide sequence represented by SEQ ID NOS: 62498, 62499, 62500, 62501, 62502, 62503, 62504, 62505, 62506, 62507, 62508 were selected from the ORFs having the nucleotide sequence represented by SEQ ID NO: 5087.

[5578] The probes having the nucleotide sequence represented by SEQ ID NOS: 62509, 62510, 62511, 62512, 62513, 62514, 62515, 62516, 62517, 62518, 62519 were selected from the ORFs having the nucleotide sequence represented by SEQ ID NO: 5088.

[5579] The probes having the nucleotide sequence represented by SEQ ID NOS: 62520, 62521, 62522, 62523, 62524, 62525, 62526, 62527, 62528, 62529, 62530 were selected from the ORFs having the nucleotide sequence represented by SEQ ID NO: 5089.

[5580] The probes having the nucleotide sequence represented by SEQ ID NOS: 62531, 62532, 62533, 62534, 62535, 62536, 62537, 62538, 62539, 62540, 62541 were selected from the ORFs having the nucleotide sequence represented by SEQ ID NO: 5090.

[5581] The probes having the nucleotide sequence represented by SEQ ID NOS: 62542, 62543, 62544, 62545, 62546, 62547, 62548, 62549, 62550, 62551, 62552 were selected from the ORFs having the nucleotide sequence represented by SEQ ID NO: 5091.

[5582] The probes having the nucleotide sequence represented by SEQ ID NOS: 62553, 62554, 62555, 62556, 62557, 62558, 62559, 62560, 62561, 62562, 62563 were selected from the ORFs having the nucleotide sequence represented by SEQ ID NO: 5092.

[5583] The probes having the nucleotide sequence represented by SEQ ID NOS: 62564, 62565, 62566, 62567, 62568, 62569, 62570, 62571, 62572, 62573, 62574 were selected from the ORFs having the nucleotide sequence represented by SEQ ID NO: 5093.

[5584] The probes having the nucleotide sequence represented by SEQ ID NOS: 62575, 62576, 62577, 62578, 62579, 62580, 62581, 62582, 62583, 62584, 62585 were selected from the ORFs having the nucleotide sequence represented by SEQ ID NO: 5094.

[5585] The probes having the nucleotide sequence represented by SEQ ID NOS: 62586, 62587, 62588, 62589, 62590, 62591, 62592, 62593, 62594, 62595, 62596 were selected from the ORFs having the nucleotide sequence represented by SEQ ID NO: 5095.

[5586] The probes having the nucleotide sequence represented by SEQ ID NOS: 62597, 62598, 62599, 62600, 62601, 62602, 62603, 62604, 62605, 62606, 62607 were selected from the ORFs having the nucleotide sequence represented by SEQ ID NO: 5096.

[5587] The probes having the nucleotide sequence represented by SEQ ID NOS: 62608, 62609, 62610, 62611, 62612, 62613, 62614, 62615, 62616, 62617, 62618 were selected from the ORFs having the nucleotide sequence represented by SEQ ID NO: 5097.

[5588] The probes having the nucleotide sequence represented by SEQ ID NOS: 62619, 62620, 62621, 62622, 62623, 62624, 62625, 62626, 62627, 62628, 62629 were selected from the ORFs having the nucleotide sequence represented by SEQ ID NO: 5098.

[5589] The probes having the nucleotide sequence represented by SEQ ID NOS: 62630, 62631, 62632, 62633, 62634, 62635, 62636, 62637, 62638, 62639, 62640 were selected from the ORFs having the nucleotide sequence represented by SEQ ID NO: 5099.

[5590] The probes having the nucleotide sequence represented by SEQ ID NOS: 62641, 62642, 62643, 62644, 62645, 62646, 62647, 62648, 62649, 62650, 62651 were selected from the ORFs having the nucleotide sequence represented by SEQ ID NO: 5100.

[5591] The probes having the nucleotide sequence represented by SEQ ID NOS: 62652, 62653, 62654, 62655, 62656, 62657, 62658, 62659, 62660, 62661, 62662 were selected from the ORFs having the nucleotide sequence represented by SEQ ID NO: 5101.

[5592] The probes having the nucleotide sequence represented by SEQ ID NOS: 62663, 62664, 62665, 62666, 62667, 62668, 62669, 62670, 62671, 62672, 62673 were selected from the ORFs having the nucleotide sequence represented by SEQ ID NO: 5102.

[5593] The probes having the nucleotide sequence represented by SEQ ID NOS: 62674, 62675, 62676, 62677, 62678, 62679, 62680, 62681, 62682, 62683, 62684 were selected from the ORFs having the nucleotide sequence represented by SEQ ID NO: 5103.

[5594] The probes having the nucleotide sequence represented by SEQ ID NOS: 62685, 62686, 62687, 62688, 62689, 62690, 62691, 62692, 62693, 62694, 62695 were selected from the ORFs having the nucleotide sequence represented by SEQ ID NO: 5104.

[5595] The probes having the nucleotide sequence represented by SEQ ID NOS: 62696, 62697, 62698, 62699, 62700, 62701, 62702, 62703, 62704, 62705, 62706 were selected from the ORFs having the nucleotide sequence represented by SEQ ID NO: 5105.

[5596] The probes having the nucleotide sequence represented by SEQ ID NOS: 62707, 62708, 62709, 62710, 62711, 62712, 62713, 62714, 62715, 62716, 62717 were selected from the ORFs having the nucleotide sequence represented by SEQ ID NO: 5106.

[5597] The probes having the nucleotide sequence represented by SEQ ID NOS: 62718, 62719, 62720, 62721, 62722, 62723, 62724, 62725, 62726, 62727, 62728 were selected from the ORFs having the nucleotide sequence represented by SEQ ID NO: 5107.

[5598] The probes having the nucleotide sequence represented by SEQ ID NOS: 62729, 62730, 62731, 62732, 62733, 62734, 62735, 62736, 62737, 62738, 62739 were selected from the ORFs having the nucleotide sequence represented by SEQ ID NO: 5108.

[5599] The probes having the nucleotide sequence represented by SEQ ID NOS: 62740, 62741, 62742, 62743, 62744, 62745, 62746, 62747, 62748, 62749, 62750 were selected from the ORFs having the nucleotide sequence represented by SEQ ID NO: 5109.

[5600] The probes having the nucleotide sequence represented by SEQ ID NOS: 62751, 62752, 62753, 62754, 62755, 62756, 62757, 62758, 62759, 62760, 62761 were selected from the ORFs having the nucleotide sequence represented by SEQ ID NO: 5110.

[5601] The probes having the nucleotide sequence represented by SEQ ID NOS: 62762, 62763, 62764, 62765, 62766, 62767, 62768, 62769, 62770, 62771, 62772 were selected from the ORFs having the nucleotide sequence represented by SEQ ID NO: 5111.

[5602] The probes having the nucleotide sequence represented by SEQ ID NOS: 62773, 62774, 62775, 62776, 62777, 62778, 62779, 62780, 62781, 62782, 62783 were selected from the ORFs having the nucleotide sequence represented by SEQ ID NO: 5112.

[5603] The probes having the nucleotide sequence represented by SEQ ID NOS: 62784, 62785, 62786, 62787, 62788, 62789, 62790, 62791, 62792, 62793, 62794 were selected from the ORFs having the nucleotide sequence represented by SEQ ID NO: 5113.

[5604] The probes having the nucleotide sequence represented by SEQ ID NOS: 62795, 62796, 62797, 62798, 62799, 62800, 62801, 62802, 62803, 62804, 62805 were selected from the ORFs having the nucleotide sequence represented by SEQ ID NO: 5114.

[5605] The probes having the nucleotide sequence represented by SEQ ID NOS: 62806, 62807, 62808, 62809, 62810, 62811, 62812, 62813, 62814, 62815, 62816 were selected from the ORFs having the nucleotide sequence represented by SEQ ID NO: 5115.

[5606] The probes having the nucleotide sequence represented by SEQ ID NOS: 62817, 62818, 62819, 62820, 62821, 62822, 62823, 62824, 62825, 62826, 62827 were selected from the ORFs having the nucleotide sequence represented by SEQ ID NO: 5116.

[5607] The probes having the nucleotide sequence represented by SEQ ID NOS: 62828, 62829, 62830, 62831, 62832, 62833, 62834, 62835, 62836, 62837, 62838 were selected from the ORFs having the nucleotide sequence represented by SEQ ID NO: 5117.

[5608] The probes having the nucleotide sequence represented by SEQ ID NOS: 62839, 62840, 62841, 62842, 62843, 62844, 62845, 62846, 62847, 62848, 62849 were selected from the ORFs having the nucleotide sequence represented by SEQ ID NO: 5118.

[5609] The probes having the nucleotide sequence represented by SEQ ID NOS: 62850, 62851, 62852, 62853, 62854, 62855, 62856, 62857, 62858, 62859, 62860 were selected from the ORFs having the nucleotide sequence represented by SEQ ID NO: 5119.

[5610] The probes having the nucleotide sequence represented by SEQ ID NOS: 62861, 62862, 62863, 62864, 62865, 62866, 62867, 62868, 62869, 62870, 62871 were selected from the ORFs having the nucleotide sequence represented by SEQ ID NO: 5120.

[5611] The probes having the nucleotide sequence represented by SEQ ID NOS: 62872, 62873, 62874, 62875, 62876, 62877, 62878, 62879, 62880, 62881, 62882 were selected from the ORFs having the nucleotide sequence represented by SEQ ID NO: 5121.

[5612] The probes having the nucleotide sequence represented by SEQ ID NOS: 62883, 62884, 62885, 62886, 62887, 62888, 62889, 62890, 62891, 62892, 62893 were selected from the ORFs having the nucleotide sequence represented by SEQ ID NO: 5122.

[5613] The probes having the nucleotide sequence represented by SEQ ID NOS: 62894, 62895, 62896, 62897, 62898, 62899, 62900, 62901, 62902, 62903, 62904 were selected from the ORFs having the nucleotide sequence represented by SEQ ID NO: 5123.

[5614] The probes having the nucleotide sequence represented by SEQ ID NOS: 62905, 62906, 62907, 62908, 62909, 62910, 62911, 62912, 62913, 62914, 62915 were selected from the ORFs having the nucleotide sequence represented by SEQ ID NO: 5124.

[5615] The probes having the nucleotide sequence represented by SEQ ID NOS: 62916, 62917, 62918, 62919, 62920, 62921, 62922, 62923, 62924, 62925, 62926 were selected from the ORFs having the nucleotide sequence represented by SEQ ID NO: 5125.

[5616] The probes having the nucleotide sequence represented by SEQ ID NOS: 62927, 62928, 62929, 62930, 62931, 62932, 62933, 62934, 62935, 62936, 62937 were selected from the ORFs having the nucleotide sequence represented by SEQ ID NO: 5126.

[5617] The probes having the nucleotide sequence represented by SEQ ID NOS: 62938, 62939, 62940, 62941, 62942, 62943, 62944, 62945, 62946, 62947, 62948 were selected from the ORFs having the nucleotide sequence represented by SEQ ID NO: 5127.

[5618] The probes having the nucleotide sequence represented by SEQ ID NOS: 62949, 62950, 62951, 62952, 62953, 62954, 62955, 62956, 62957, 62958, 62959 were selected from the ORFs having the nucleotide sequence represented by SEQ ID NO: 5128.

[5619] The probes having the nucleotide sequence represented by SEQ ID NOS: 62960, 62961, 62962, 62963, 62964, 62965, 62966, 62967, 62968, 62969, 62970 were selected from the ORFs having the nucleotide sequence represented by SEQ ID NO: 5129.

[5620] The probes having the nucleotide sequence represented by SEQ ID NOS: 62971, 62972, 62973, 62974, 62975, 62976, 62977, 62978, 62979, 62980, 62981 were selected from the ORFs having the nucleotide sequence represented by SEQ ID NO: 5130.

[5621] The probes having the nucleotide sequence represented by SEQ ID NOS: 62982, 62983, 62984, 62985, 62986, 62987, 62988, 62989, 62990, 62991, 62992 were selected from the ORFs having the nucleotide sequence represented by SEQ ID NO: 5131.

[5622] The probes having the nucleotide sequence represented by SEQ ID NOS: 62993, 62994, 62995, 62996, 62997, 62998, 62999, 63000, 63001, 63002, 63003 were selected from the ORFs having the nucleotide sequence represented by SEQ ID NO: 5132.

[5623] The probes having the nucleotide sequence represented by SEQ ID NOS: 63004, 63005, 63006, 63007, 63008, 63009, 63010, 63011, 63012, 63013, 63014 were selected from the ORFs having the nucleotide sequence represented by SEQ ID NO: 5133.

[5624] The probes having the nucleotide sequence represented by SEQ ID NOS: 63015, 63016, 63017, 63018, 63019, 63020, 63021, 63022, 63023, 63024, 63025, 63026, 63027, 63028, 63029, 63030, 63031, 63032, 63033, 63034, 63035, 63036 were selected from the ORFs having the nucleotide sequence represented by SEQ ID NO: 5134.

[5625] The probes having the nucleotide sequence represented by SEQ ID NOS: 63037, 63038, 63039, 63040, 63041, 63042, 63043, 63044, 63045, 63046, 63047 were selected from the ORFs having the nucleotide sequence represented by SEQ ID NO: 5135.

[5626] The probes having the nucleotide sequence represented by SEQ ID NOS: 63048, 63049, 63050, 63051, 63052, 63053, 63054, 63055, 63056, 63057, 63058 were selected from the ORFs having the nucleotide sequence represented by SEQ ID NO: 5136.

[5627] The probes having the nucleotide sequence represented by SEQ ID NOS: 63059, 63060, 63061, 63062, 63063, 63064, 63065, 63066, 63067, 63068, 63069 were selected from the ORFs having the nucleotide sequence represented by SEQ ID NO: 5137.

[5628] The probes having the nucleotide sequence represented by SEQ ID NOS: 63070, 63071, 63072, 63073, 63074, 63075, 63076, 63077, 63078, 63079, 63080 were selected from the ORFs having the nucleotide sequence represented by SEQ ID NO: 5138.

[5629] The probes having the nucleotide sequence represented by SEQ ID NOS: 63081, 63082, 63083, 63084, 63085, 63086, 63087, 63088, 63089, 63090, 63091 were selected from the ORFs having the nucleotide sequence represented by SEQ ID NO: 5139.

[5630] The probes having the nucleotide sequence represented by SEQ ID NOS: 63092, 63093, 63094, 63095, 63096, 63097, 63098, 63099, 63100 were selected from the ORFs having the nucleotide sequence represented by SEQ ID NO: 5140.

[5631] The probes having the nucleotide sequence represented by SEQ ID NOS: 63101, 63102, 63103, 63104, 63105, 63106, 63107, 63108, 63109, 63110, 63111 were selected from the ORFs having the nucleotide sequence represented by SEQ ID NO: 5141.

[5632] The probes having the nucleotide sequence represented by SEQ ID NOS: 63112, 63113, 63114, 63115, 63116, 63117, 63118, 63119, 63120, 63121, 63122 were selected from the ORFs having the nucleotide sequence represented by SEQ ID NO: 5142.

[5633] The probes having the nucleotide sequence represented by SEQ ID NOS: 63123, 63124, 63125, 63126, 63127, 63128, 63129, 63130, 63131, 63132, 63133 were selected from the ORFs having the nucleotide sequence represented by SEQ ID NO: 5143.

[5634] The probes having the nucleotide sequence represented by SEQ ID NOS: 63134, 63135, 63136, 63137, 63138, 63139, 63140, 63141, 63142, 63143, 63144 were selected from the ORFs having the nucleotide sequence represented by SEQ ID NO: 5144.

[5635] The probes having the nucleotide sequence represented by SEQ ID NOS: 63145, 63146, 63147, 63148, 63149, 63150, 63151, 63152, 63153, 63154, 63155 were selected from the ORFs having the nucleotide sequence represented by SEQ ID NO: 5145.

[5636] The probes having the nucleotide sequence represented by SEQ ID NOS: 63156, 63157, 63158, 63159, 63160, 63161, 63162, 63163, 63164, 63165, 63166 were selected from the ORFs having the nucleotide sequence represented by SEQ ID NO: 5146.

[5637] The probes having the nucleotide sequence represented by SEQ ID NOS: 63167, 63168, 63169, 63170, 63171, 63172, 63173, 63174, 63175, 63176, 63177 were selected from the ORFs having the nucleotide sequence represented by SEQ ID NO: 5147.

[5638] The probes having the nucleotide sequence represented by SEQ ID NOS: 63178, 63179, 63180, 63181, 63182, 63183, 63184, 63185, 63186, 63187, 63188 were selected from the ORFs having the nucleotide sequence represented by SEQ ID NO: 5148.

[5639] The probes having the nucleotide sequence represented by SEQ ID NOS: 63189, 63190, 63191, 63192, 63193, 63194, 63195, 63196, 63197, 63198, 63199 were selected from the ORFs having the nucleotide sequence represented by SEQ ID NO: 5149.

[5640] The probes having the nucleotide sequence represented by SEQ ID NOS: 63200, 63201, 63202, 63203, 63204, 63205, 63206, 63207, 63208, 63209, 63210 were selected from the ORFs having the nucleotide sequence represented by SEQ ID NO: 5150.

[5641] The probes having the nucleotide sequence represented by SEQ ID NOS: 63211, 63212, 63213, 63214, 63215, 63216, 63217, 63218, 63219, 63220, 63221 were selected from the ORFs having the nucleotide sequence represented by SEQ ID NO: 5151.

[5642] The probes having the nucleotide sequence represented by SEQ ID NOS: 63222, 63223, 63224, 63225, 63226, 63227, 63228, 63229, 63230, 63231, 63232 were selected from the ORFs having the nucleotide sequence represented by SEQ ID NO: 5152.

[5643] The probes having the nucleotide sequence represented by SEQ ID NOS: 63233, 63234, 63235, 63236, 63237, 63238, 63239, 63240, 63241, 63242, 63243 were selected from the ORFs having the nucleotide sequence represented by SEQ ID NO: 5153.

[5644] The probes having the nucleotide sequence represented by SEQ ID NOS: 63244, 63245, 63246, 63247, 63248, 63249, 63250, 63251, 63252, 63253, 63254 were selected from the ORFs having the nucleotide sequence represented by SEQ ID NO: 5154.

[5645] The probes having the nucleotide sequence represented by SEQ ID NOS: 63255, 63256, 63257, 63258, 63259, 63260, 63261, 63262, 63263, 63264, 63265 were selected from the ORFs having the nucleotide sequence represented by SEQ ID NO: 5155.

[5646] The probes having the nucleotide sequence represented by SEQ ID NOS: 63266, 63267, 63268, 63269, 63270, 63271, 63272, 63273, 63274, 63275, 63276 were selected from the ORFs having the nucleotide sequence represented by SEQ ID NO: 5156.

[5647] The probes having the nucleotide sequence represented by SEQ ID NOS: 63277, 63278, 63279, 63280, 63281, 63282, 63283, 63284, 63285, 63286, 63287 were selected from the ORFs having the nucleotide sequence represented by SEQ ID NO: 5157.

[5648] The probes having the nucleotide sequence represented by SEQ ID NOS: 63288, 63289, 63290, 63291, 63292, 63293, 63294, 63295, 63296, 63297, 63298 were selected from the ORFs having the nucleotide sequence represented by SEQ ID NO: 5158.

[5649] The probes having the nucleotide sequence represented by SEQ ID NOS: 63299, 63300, 63301, 63302, 63303, 63304, 63305, 63306, 63307, 63308, 63309 were selected from the ORFs having the nucleotide sequence represented by SEQ ID NO: 5159.

[5650] The probes having the nucleotide sequence represented by SEQ ID NOS: 63310, 63311, 63312, 63313, 63314, 63315, 63316, 63317, 63318, 63319, 63320 were selected from the ORFs having the nucleotide sequence represented by SEQ ID NO: 5160.

[5651] The probes having the nucleotide sequence represented by SEQ ID NOS: 63321, 63322, 63323, 63324, 63325, 63326, 63327, 63328, 63329, 63330, 63331 were selected from the ORFs having the nucleotide sequence represented by SEQ ID NO: 5161.

[5652] The probes having the nucleotide sequence represented by SEQ ID NOS: 63332, 63333, 63334, 63335, 63336, 63337, 63338, 63339, 63340, 63341, 63342 were selected from the ORFs having the nucleotide sequence represented by SEQ ID NO: 5162.

[5653] The probes having the nucleotide sequence represented by SEQ ID NOS: 63343, 63344, 63345, 63346, 63347, 63348, 63349, 63350, 63351, 63352, 63353 were selected from the ORFs having the nucleotide sequence represented by SEQ ID NO: 5163.

[5654] The probes having the nucleotide sequence represented by SEQ ID NOS: 63354, 63355, 63356, 63357, 63358, 63359, 63360, 63361, 63362, 63363, 63364 were selected from the ORFs having the nucleotide sequence represented by SEQ ID NO: 5164.

[5655] The probes having the nucleotide sequence represented by SEQ ID NOS: 63365, 63366, 63367, 63368, 63369, 63370, 63371, 63372, 63373, 63374, 63375 were selected from the ORFs having the nucleotide sequence represented by SEQ ID NO: 5165.

[5656] The probes having the nucleotide sequence represented by SEQ ID NOS: 63376, 63377, 63378, 63379, 63380, 63381, 63382, 63383, 63384, 63385, 63386 were selected from the ORFs having the nucleotide sequence represented by SEQ ID NO: 5166..

[5657] The probes having the nucleotide sequence represented by SEQ ID NOS: 63387, 63388, 63389, 63390, 63391, 63392, 63393, 63394, 63395, 63396, 63397 were selected from the ORFs having the nucleotide sequence represented by SEQ ID NO: 5167.

[5658] The probes having the nucleotide sequence represented by SEQ ID NOS: 63398, 63399, 63400, 63401, 63402, 63403, 63404, 63405, 63406, 63407, 63408 were selected from the ORFs having the nucleotide sequence represented by SEQ ID NO: 5168.

[5659] The probes having the nucleotide sequence represented by SEQ ID NOS: 63409, 63410, 63411, 63412, 63413, 63414, 63415, 63416, 63417, 63418, 63419 were selected from the ORFs having the nucleotide sequence represented by SEQ ID NO: 5169.

[5660] The probes having the nucleotide sequence represented by SEQ ID NOS: 63420, 63421, 63422, 63423, 63424, 63425, 63426, 63427, 63428, 63429, 63430 were selected from the ORFs having the nucleotide sequence represented by SEQ ID NO: 5170.

[5661] The probes having the nucleotide sequence represented by SEQ ID NOS: 63431, 63432, 63433, 63434, 63435, 63436, 63437, 63438, 63439, 63440, 63441 were selected from the ORFs having the nucleotide sequence represented by SEQ ID NO: 5171.

[5662] The probes having the nucleotide sequence represented by SEQ ID NOS: 63442, 63443, 63444, 63445, 63446, 63447, 63448, 63449, 63450, 63451, 63452 were selected from the ORFs having the nucleotide sequence represented by SEQ ID NO: 5172.

[5663] The probes having the nucleotide sequence represented by SEQ ID NOS: 63453, 63454, 63455, 63456, 63457, 63458, 63459, 63460, 63461, 63462, 63463 were selected from the ORFs having the nucleotide sequence represented by SEQ ID NO: 5173.

[5664] The probes having the nucleotide sequence represented by SEQ ID NOS: 63464, 63465, 63466, 63467, 63468, 63469, 63470, 63471, 63472, 63473, 63474 were selected from the ORFs having the nucleotide sequence represented by SEQ ID NO: 5174.

[5665] The probes having the nucleotide sequence represented by SEQ ID NOS: 63475, 63476, 63477, 63478, 63479, 63480, 63481, 63482, 63483, 63484, 63485 were selected from the ORFs having the nucleotide sequence -represented by SEQ ID NO: 5175.

[5666] The probes having the nucleotide sequence represented by SEQ ID NOS: 63486, 63487, 63488, 63489, 63490, 63491, 63492, 63493, 63494, 63495, 63496 were selected from the ORFs having the nucleotide sequence represented by SEQ ID NO: 5176.

[5667] The probes having the nucleotide sequence represented by SEQ ID NOS: 63497, 63498, 63499, 63500, 63501, 63502, 63503, 63504, 63505, 63506, 63507 were selected from the ORFs having the nucleotide sequence represented by SEQ ID NO: 5177.

[5668] The probes having the nucleotide sequence represented by SEQ ID NOS: 63508, 63509, 63510, 63511, 63512, 63513, 63514, 63515, 63516, 63517, 63518 were selected from the ORFs having the nucleotide sequence represented by SEQ ID NO: 5178.

[5669] The probes having the nucleotide sequence represented by SEQ ID NOS: 63519, 63520, 63521, 63522, 63523, 63524, 63525, 63526, 63527, 63528, 63529 were selected from the ORFs having the nucleotide sequence represented by SEQ ID NO: 5179.

[5670] The probes having the nucleotide sequence represented by SEQ ID NOS: 63530, 63531, 63532, 63533, 63534, 63535, 63536, 63537, 63538, 63539, 63540 were selected from the ORFs having the nucleotide sequence represented by SEQ ID NO: 5180.

[5671] The probes having the nucleotide sequence represented by SEQ ID NOS: 63541, 63542, 63543, 63544, 63545, 63546, 63547, 63548, 63549, 63550, 63551 were selected from the ORFs having the nucleotide sequence represented by SEQ ID NO: 5181.

[5672] The probes having the nucleotide sequence represented by SEQ ID NOS: 63552, 63553, 63554, 63555, 63556, 63557, 63558, 63559, 63560, 63561, 63562 were selected from the ORFs having the nucleotide sequence represented by SEQ ID NO: 5182.

[5673] The probes having the nucleotide sequence represented by SEQ ID NOS: 63563, 63564, 63565, 63566, 63567, 63568, 63569, 63570, 63571, 63572, 63573 were selected from the ORFs having the nucleotide sequence represented by SEQ ID NO: 5183.

[5674] The probes having the nucleotide sequence represented by SEQ ID NOS: 63574, 63575, 63576, 63577, 63578, 63579, 63580, 63581, 63582, 63583, 63584 were selected from the ORFs having the nucleotide sequence represented by SEQ ID NO: 5184.

[5675] The probes having the nucleotide sequence represented by SEQ ID NOS: 63585, 63586, 63587, 63588, 63589, 63590, 63591, 63592, 63593, 63594, 63595 were selected from the ORFs having the nucleotide sequence represented by SEQ ID NO: 5185.

[5676] The probes having the nucleotide sequence represented by SEQ ID NOS: 63596, 63597, 63598, 63599, 63600, 63601, 63602, 63603, 63604, 63605, 63606 were selected from the ORFs having the nucleotide sequence represented by SEQ ID NO: 5186.

[5677] The probes having the nucleotide sequence represented by SEQ ID NOS: 63607, 63608, 63609, 63610, 63611, 63612, 63613, 63614, 63615, 63616, 63617 were selected from the ORFs having the nucleotide sequence represented by SEQ ID NO: 5187.

[5678] The probes having the nucleotide sequence represented by SEQ ID NOS: 63618, 63619, 63620, 63621, 6.3622, 63623, 63624, 63625, 63626, 63627, 63628 were selected from the ORFs having the nucleotide sequence represented by SEQ ID NO: 5188.

[5679] The probes having the nucleotide sequence represented by SEQ ID NOS: 63629, 63630, 63631, 63632, 63633, 63634, 63635, 63636, 63637, 63638, 63639 were selected from the ORFs having the nucleotide sequence represented by SEQ ID NO: 5189.

[5680] The probes having the nucleotide sequence represented by SEQ ID NOS: 63640, 63641, 63642, 63643, 63644, 63645, 63646, 63647, 63648, 63649, 63650 were selected from the ORFs having the nucleotide sequence represented by SEQ ID NO: 5190.

[5681] The probes having the nucleotide sequence represented by SEQ ID NOS: 63651, 63652, 63653, 63654, 63655, 63656, 63657, 63658, 63659, 63660, 63661 were selected from the ORFs having the nucleotide sequence represented by SEQ ID NO: 5191.

[5682] The probes having the nucleotide sequence represented by SEQ ID NOS: 63662, 63663, 63664, 63665, 63666, 63667, 63668, 63669, 63670, 63671, 63672 were selected from the ORFs having the nucleotide sequence represented by SEQ ID NO: 5192.

[5683] The probes having the nucleotide sequence represented by SEQ ID NOS: 63673, 63674, 63675, 63676, 63677, 63678, 63679, 63680, 63681, 63682, 63683 were selected from the ORFs having the nucleotide sequence represented by SEQ ID NO: 5193.

[5684] The probes having the nucleotide sequence represented by SEQ ID NOS: 63684, 63685, 63686, 63687, 63688, 63689, 63690, 63691, 63692, 63693, 63694 were selected from the ORFs having the nucleotide sequence represented by SEQ ID NO: 5194.

[5685] The probes having the nucleotide sequence represented by SEQ ID NOS: 63695, 63696, 63697, 63698, 63699, 63700, 63701, 63702, 63703, 63704, 63705 were selected from the ORFs having the nucleotide sequence represented by SEQ ID NO: 5195.

[5686] The probes having the nucleotide sequence represented by SEQ ID NOS: 63706, 63707, 63708, 63709, 63710, 63711, 63712, 63713, 63714, 63715, 63716 were selected from the ORFs having the nucleotide sequence represented by SEQ ID NO: 5196.

[5687] The probes having the nucleotide sequence represented by SEQ ID NOS: 63717, 63718, 63719, 63720, 63721, 63722, 63723, 63724, 63725, 63726, 63727 were selected from the ORFs having the nucleotide sequence represented by SEQ ID NO: 5197.

[5688] The probes having the nucleotide sequence represented by SEQ ID NOS: 63728, 63729, 63730, 63731, 63732, 63733, 63734, 63735, 63736, 63737, 63738 were selected from the ORFs having the nucleotide sequence represented by SEQ ID NO: 5198.

[5689] The probes having the nucleotide sequence represented by SEQ ID NOS: 63739, 63740, 63741, 63742, 63743, 63744, 63745, 63746, 63747, 63748, 63749 were selected from the ORFs having the nucleotide sequence represented by SEQ ID NO: 5199.

[5690] The probes having the nucleotide sequence represented by SEQ ID NOS: 63750, 63751, 63752, 63753, 63754, 63755, 63756, 63757, 63758, 63759, 63760 were selected from the ORFs having the nucleotide sequence represented by SEQ ID NO: 5200.

[5691] The probes having the nucleotide sequence represented by SEQ ID NOS: 63761, 63762, 63763, 63764, 63765, 63766, 63767, 63768, 63769, 63770, 63771 were selected from the ORFs having the nucleotide sequence represented by SEQ ID NO: 5201.

[5692] The probes having the nucleotide sequence represented by SEQ ID NOS: 63772, 63773, 63774, 63775, 63776, 63777, 63778, 63779, 63780, 63781, 63782 were selected from the ORFs having the nucleotide sequence represented by SEQ ID NO: 5202.

[5693] The probes having the nucleotide sequence represented by SEQ ID NOS: 63783, 63784, 63785, 63786, 63787, 63788, 63789, 63790, 63791, 63792, 63793 were selected from the ORFs having the nucleotide sequence represented by SEQ ID NO: 5203.

[5694] The probes having the nucleotide sequence represented by SEQ ID NOS: 63794, 63795, 63796, 63797, 63798, 63799, 63800, 63801, 63802, 63803, 63804 were selected from the ORFs having the nucleotide sequence represented by SEQ ID NO: 5204.

[5695] The probes having the nucleotide sequence represented by SEQ ID NOS: 63805, 63806, 63807, 63808, 63809, 63810, 63811, 63812, 63813, 63814, 63815 were selected from the ORFs having the nucleotide sequence represented by SEQ ID NO: 5205.

[5696] The probes having the nucleotide sequence represented by SEQ ID NOS: 63816, 63817, 63818, 63819, 63820, 63821, 63822, 63823, 63824, 63825, 63826 were selected from the ORFs having the nucleotide sequence represented by SEQ ID NO: 5206.

[5697] The probes having the nucleotide sequence represented by SEQ ID NOS: 63827, 63828, 63829, 63830, 63831, 63832, 63833, 63834, 63835, 63836, 63837 were selected from the ORFs having the nucleotide sequence represented by SEQ ID NO: 5207.

[5698] The probes having the nucleotide sequence represented by SEQ ID NOS: 63838, 63839, 63840, 63841, 63842, 63843, 63844, 63845, 63846, 63847, 63848 were selected from the ORFs having the nucleotide sequence represented by SEQ ID NO: 5208.

[5699] The probes having the nucleotide sequence represented by SEQ ID NOS: 63849, 63850, 63851, 63852, 63853, 63854, 63855, 63856, 63857, 63858, 63859 were selected from the ORFs having the nucleotide sequence represented by SEQ ID NO: 5209.

[5700] The probes having the nucleotide sequence represented by SEQ ID NOS: 63860, 63861, 63862, 63863, 63864, 63865, 63866, 63867, 63868, 63869, 63870 were selected from the ORFs having the nucleotide sequence represented by SEQ ID NO: 5210.

[5701] The probes having the nucleotide sequence represented by SEQ ID NOS: 63871, 63872, 63873, 63874, 63875, 63876, 63877, 63878, 63879, 63880, 63881 were selected from the ORFs having the nucleotide sequence represented by SEQ ID NO: 5211.

[5702] The probes having the nucleotide sequence represented by SEQ ID NOS: 63882, 63883, 63884, 63885, 63886, 63887, 63888, 63889, 63890, 63891, 63892 were selected from the ORFs having the nucleotide sequence represented by SEQ ID NO: 5212.

[5703] The probes having the nucleotide sequence represented by SEQ ID NOS: 63893, 63894, 63895, 63896, 63897, 63898, 63899, 63900, 63901, 63902, 63903 were selected from the ORFs having the nucleotide sequence represented by SEQ ID NO: 5213.

[5704] The probes having the nucleotide sequence represented by SEQ ID NOS: 63904, 63905, 63906, 63907, 63908, 63909, 63910, 63911, 63912, 63913, 63914 were selected from the ORFs having the nucleotide sequence represented by SEQ ID NO: 5214.

[5705] The probes having the nucleotide sequence represented by SEQ ID NOS: 63915, 63916, 63917, 63918, 63919, 63920, 63921, 63922, 63923, 63924, 63925 were selected from the ORFs having the nucleotide sequence represented by SEQ ID NO: 5215.

[5706] The probes having the nucleotide sequence represented by SEQ ID NOS: 63926, 63927, 63928, 63929, 63930, 63931, 63932, 63933, 63934, 63935, 63936 were selected from the ORFs having the nucleotide sequence represented by SEQ ID NO: 5216.

[5707] The probes having the nucleotide sequence represented by SEQ ID NOS: 63937, 63938, 63939, 63940, 63941, 63942, 63943, 63944, 63945, 63946, 63947 were selected from the ORFs having the nucleotide sequence represented by SEQ ID NO: 5217.

[5708] The probes having the nucleotide sequence represented by SEQ ID NOS: 63948, 63949, 63950, 63951, 63952, 63953, 63954, 63955, 63956, 63957, 63958 were selected from the ORFs having the nucleotide sequence represented by SEQ ID NO: 5218.

[5709] The probes having the nucleotide sequence represented by SEQ ID NOS: 63959, 63960, 63961, 63962, 63963, 63964, 63965, 63966, 63967, 63968, 63969 were selected from the ORFs having the nucleotide sequence represented by SEQ ID NO: 5219.

[5710] The probes having the nucleotide sequence represented by SEQ ID NOS: 63970, 63971, 63972, 63973, 63974, 63975, 63976, 63977, 63978, 63979, 63980 were selected from the ORFs having the nucleotide sequence represented by SEQ ID NO: 5220.

[5711] The probes having the nucleotide sequence represented by SEQ ID NOS: 63981, 63982, 63983, 63984, 63985, 63986, 63987, 63988, 63989, 63990, 63991 were selected from the ORFs having the nucleotide sequence represented by SEQ ID NO: 5221.

[5712] The probes having the nucleotide sequence represented by SEQ ID NOS: 63992, 63993, 63994, 63995, 63996, 63997, 63998, 63999, 64000, 64001, 64002 were selected from the ORFs having the nucleotide sequence represented by SEQ ID NO: 5222.

[5713] The probes having the nucleotide sequence represented by SEQ ID NOS: 64003, 64004, 64005, 64006, 64007, 64008, 64009, 64010, 64011, 64012, 64013 were selected from the ORFs having the nucleotide sequence represented by SEQ ID NO: 5223.

[5714] The probes having the nucleotide sequence represented by SEQ ID NOS: 64014, 64015, 64016, 64017, 64018, 64019, 64020, 64021, 64022, 64023, 64024 were selected from the ORFs having the nucleotide sequence represented by SEQ ID NO: 5224.

[5715] The probes having the nucleotide sequence represented by SEQ ID NOS: 64025, 64026, 64027, 64028, 64029, 64030, 64031, 64032, 64033, 64034, 64035 were selected from the ORFs having the nucleotide sequence represented by SEQ ID NO: 5225.

[5716] The probes having the nucleotide sequence represented by SEQ ID NOS: 64036, 64037, 64038, 64039, 64040, 64041, 64042, 64043, 64044, 64045, 64046 were selected from the ORFs having the nucleotide sequence represented by SEQ ID NO: 5226.

[5717] The probes having the nucleotide sequence represented by SEQ ID NOS: 64047, 64048, 64049, 64050, 64051, 64052, 64053, 64054, 64055, 64056, 64057 were selected from the ORFs having the nucleotide sequence represented by SEQ ID NO: 5227.

[5718] The probes having the nucleotide sequence represented by SEQ ID NOS: 64058, 64059, 64060, 64061, 64062, 64063, 64064, 64065, 64066, 64067, 64068 were selected from the ORFs having the nucleotide sequence represented by SEQ ID NO: 5228.

[5719] The probes having the nucleotide sequence represented by SEQ ID NOS: 64069, 64070, 64071, 64072, 64073, 64074, 64075, 64076, 64077, 64078, 64079 were selected from the ORFs having the nucleotide sequence represented by SEQ ID NO: 5229.

[5720] The probes having the nucleotide sequence represented by SEQ ID NOS: 64080, 64081, 64082, 64083, 64084, 64085, 64086, 64087, 64088, 64089, 64090 were selected from the ORFs having the nucleotide sequence represented by SEQ ID NO: 5230.

[5721] The probes having the nucleotide sequence represented by SEQ ID NOS: 64091, 64092, 64093, 64094, 64095, 64096, 64097, 64098, 64099, 64100, 64101 were selected from the ORFs having the nucleotide sequence represented by SEQ ID NO: 5231.

[5722] The probes having the nucleotide sequence represented by SEQ ID NOS: 64102, 64103, 64104, 64105, 64106, 64107, 64108, 64109, 64110, 64111, 64112 were selected from the ORFs having the nucleotide sequence represented by SEQ ID NO: 5232.

[5723] The probes having the nucleotide sequence represented by SEQ ID NOS: 64113, 64114, 64115, 64116, 64117, 64118, 64119, 64120, 64121, 64122, 64123 were selected from the ORFs having the nucleotide sequence represented by SEQ ID NO: 5233.

[5724] The probes having the nucleotide sequence represented by SEQ ID NOS: 64124, 64125, 64126, 64127, 64128, 64129, 64130, 64131, 64132, 64133, 64134 were selected from the ORFs having the nucleotide sequence represented by SEQ ID NO: 5234.

[5725] The probes having the nucleotide sequence represented by SEQ ID NOS: 64135, 64136, 64137, 64138, 64139, 64140, 64141, 64142, 64143, 64144, 64145 were selected from the ORFs having the nucleotide sequence represented by SEQ ID NO: 5235.

[5726] The probes having the nucleotide sequence represented by SEQ ID NOS: 64146, 64147, 64148, 64149, 64150, 64151, 64152, 64153, 64154, 64155, 64156 were selected from the ORFs having the nucleotide sequence represented by SEQ ID NO: 5236.

[5727] The probes having the nucleotide sequence represented by SEQ ID NOS: 64157, 64158, 64159, 64160, 64161, 64162, 64163, 64164, 64165, 64166, 64167 were selected from the ORFs having the nucleotide sequence represented by SEQ ID NO: 5237.

[5728] The probes having the nucleotide sequence represented by SEQ ID NOS: 64168, 64169, 64170, 64171, 64172, 64173, 64174, 64175, 64176, 64177, 64178 were selected from the ORFs having the nucleotide sequence represented by SEQ ID NO: 5238.

[5729] The probes having the nucleotide sequence represented by SEQ ID NOS: 64179, 64180, 64181, 64182, 64183, 64184, 64185, 64186, 64187, 64188, 64189 were selected from the ORFs having the nucleotide sequence represented by SEQ ID NO: 5239.

[5730] The probes having the nucleotide sequence represented by SEQ ID NOS: 64190, 64191, 64192, 64193, 64194, 64195, 64196, 64197, 64198, 64199, 64200 were selected from the ORFs having the nucleotide sequence represented by SEQ ID NO: 5240.

[5731] The probes having the nucleotide sequence represented by SEQ ID NOS: 64201, 64202, 64203, 64204, 64205, 64206, 64207, 64208, 64209, 64210, 64211 were selected from the ORFs having the nucleotide sequence represented by SEQ ID NO: 5241.

[5732] The probes having the nucleotide sequence represented by SEQ ID NOS: 64212, 64213, 64214, 64215, 64216, 64217, 64218, 64219, 64220, 64221, 64222 were selected from the ORFs having the nucleotide sequence represented by SEQ ID NO: 5242.

[5733] The probes having the nucleotide sequence represented by SEQ ID NOS: 64223, 64224, 64225, 64226, 64227, 64228, 64229, 64230, 64231, 64232, 64233 were selected from the ORFs having the nucleotide sequence represented by SEQ ID NO: 5243.

[5734] The probes having the nucleotide sequence represented by SEQ ID NOS: 64234, 64235, 64236, 64237, 64238, 64239, 64240, 64241, 64242, 64243, 64244 were selected from the ORFs having the nucleotide sequence represented by SEQ ID NO: 5244.

[5735] The probes having the nucleotide sequence represented by SEQ ID NOS: 64245, 64246, 64247, 64248, 64249, 64250, 64251, 64252, 64253, 64254, 64255 were selected from the ORFs having the nucleotide sequence represented by SEQ ID NO: 5245.

[5736] The probes having the nucleotide sequence represented by SEQ ID NOS: 64256, 64257, 64258, 64259, 64260, 64261, 64262, 64263, 64264, 64265, 64266 were selected from the ORFs having the nucleotide sequence represented by SEQ ID NO: 5246.

[5737] The probes having the nucleotide sequence represented by SEQ ID NOS: 64267, 64268, 64269, 64270, 64271, 64272, 64273, 64274, 64275, 64276, 64277 were selected from the ORFs having the nucleotide sequence represented by SEQ ID NO: 5247.

[5738] The probes having the nucleotide sequence represented by SEQ ID NOS: 64278, 64279, 64280, 64281, 64282, 64283, 64284, 64285, 64286, 64287, 64288 were selected from the ORFs having the nucleotide sequence represented by SEQ ID NO: 5248.

[5739] The probes having the nucleotide sequence represented by SEQ ID NOS: 64289, 64290, 64291, 64292, 64293, 64294, 64295, 64296, 64297, 64298, 64299 were selected from the ORFs having the nucleotide sequence represented by SEQ ID NO: 5249.

[5740] The probes having the nucleotide sequence represented by SEQ ID NOS: 64300, 64301, 64302, 64303, 64304, 64305, 64306, 64307, 64308, 64309, 64310 were selected from the ORFs having the nucleotide sequence represented by SEQ ID NO: 5250.

[5741] The probes having the nucleotide sequence represented by SEQ ID NOS: 64311, 64312, 64313, 64314, 64315, 64316, 64317, 64318, 64319, 64320, 64321 were selected from the ORFs having the nucleotide sequence represented by SEQ ID NO: 5251.

[5742] The probes having the nucleotide sequence represented by SEQ ID NOS: 64322, 64323, 64324, 64325, 64326, 64327, 64328, 64329, 64330, 64331, 64332 were selected from the ORFs having the nucleotide sequence represented by SEQ ID NO: 5252.

[5743] The probes having the nucleotide sequence represented by SEQ ID NOS: 64333, 64334, 64335, 64336, 64337, 64338, 64339, 64340, 64341, 64342, 64343 were selected from the ORFs having the nucleotide sequence represented by SEQ ID NO: 5253.

[5744] The probes having the nucleotide sequence represented by SEQ ID NOS: 64344, 64345, 64346, 64347, 64348, 64349, 64350, 64351, 64352, 64353, 64354 were selected from the ORFs having the nucleotide sequence represented by SEQ ID NO: 5254.

[5745] The probes having the nucleotide sequence represented by SEQ ID NOS: 64355, 64356, 64357, 64358, 64359, 64360, 64361, 64362, 64363, 64364, 64365 were selected from the ORFs having the nucleotide sequence represented by SEQ ID NO: 5255.

[5746] The probes having the nucleotide sequence represented by SEQ ID NOS: 64366, 64367, 64368, 64369, 64370, 64371, 64372, 64373, 64374, 64375, 64376, 64377, 64378, 64379, 64380, 64381, 64382, 64383, 64384, 64385, 64386, 64387 were selected from the ORFs having the nucleotide sequence represented by SEQ ID NO: 5256.

[5747] The probes having the nucleotide sequence represented by SEQ ID NOS: 64388, 64389, 64390, 64391, 64392, 64393, 64394, 64395, 64396, 64397, 64398 were selected from the ORFs having the nucleotide sequence represented by SEQ ID NO: 5257.

[5748] The probes having the nucleotide sequence represented by SEQ ID NOS: 64399, 64400, 64401, 64402, 64403, 64404, 64405, 64406, 64407, 64408, 64409 were selected from the ORFs having the nucleotide sequence represented by SEQ ID NO: 5258.

[5749] The probes having the nucleotide sequence represented by SEQ ID NOS: 64410, 64411, 64412, 64413, 64414, 64415, 64416, 64417, 64418, 64419, 64420 were selected from the ORFs having the nucleotide sequence represented by SEQ ID NO: 5259.

[5750] The probes having the nucleotide sequence represented by SEQ ID NOS: 64421, 64422, 64423, 64424, 64425, 64426, 64427, 64428, 64429, 64430, 64431 were selected from the ORFs having the nucleotide sequence represented by SEQ ID NO: 5260.

[5751] The probes having the nucleotide sequence represented by SEQ ID NOS: 64432, 64433, 64434, 64435, 64436, 64437, 64438, 64439, 64440, 64441, 64442 were selected from the ORFs having the nucleotide sequence represented by SEQ ID NO: 5261.

[5752] The probes having the nucleotide sequence represented by SEQ ID NOS: 64443, 64444, 64445, 64446, 64447, 64448, 64449, 64450, 64451, 64452, 64453 were selected from the ORFs having the nucleotide sequence represented by SEQ ID NO: 5262.

[5753] The probes having the nucleotide sequence represented by SEQ ID NOS: 64454, 64455, 64456, 64457, 64458, 64459, 64460, 64461, 64462, 64463, 64464 were selected from the ORFs having the nucleotide sequence represented by SEQ ID NO: 5263.

[5754] The probes having the nucleotide sequence represented by SEQ ID NOS: 64465, 64466, 64467, 64468, 64469, 64470, 64471, 64472, 64473, 64474, 64475 were selected from the ORFs having the nucleotide sequence represented by SEQ ID NO: 5264.

[5755] The probes having the nucleotide sequence represented by SEQ ID NOS: 64476, 64477, 64478, 64479, 64480, 64481, 64482, 64483, 64484, 64485, 64486 were selected from the ORFs having the nucleotide sequence represented by SEQ ID NO: 5265.

[5756] The probes having the nucleotide sequence represented by SEQ ID NOS: 64487, 64488, 64489, 64490, 64491, 64492, 64493, 64494, 64495, 64496, 64497 were selected from the ORFs having the nucleotide sequence represented by SEQ ID NO: 5266.

[5757] The probes having the nucleotide sequence represented by SEQ ID NOS: 64498, 64499, 64500, 64501, 64502, 64503, 64504, 64505, 64506, 64507, 64508 were selected from the ORFs having the nucleotide sequence represented by SEQ ID NO: 5267.

[5758] The probes having the nucleotide sequence represented by SEQ ID NOS: 64509, 64510, 64511, 64512, 64513, 64514, 64515, 64516, 64517, 64518, 64519 were selected from the ORFs having the nucleotide sequence represented by SEQ ID NO: 5268.

[5759] The probes having the nucleotide sequence represented by SEQ ID NOS: 64520, 64521, 64522, 64523, 64524, 64525, 64526, 64527, 64528, 64529, 64530 were selected from the ORFs having the nucleotide sequence represented by SEQ ID NO: 5269.

[5760] The probes having the nucleotide sequence represented by SEQ ID NOS: 64531, 64532, 64533, 64534, 64535, 64536, 64537, 64538, 64539, 64540, 64541 were selected from the ORFs having the nucleotide sequence represented by SEQ ID NO: 5270.

[5761] The probes having the nucleotide sequence represented by SEQ ID NOS: 64542, 64543, 64544, 64545, 64546, 64547, 64548, 64549, 64550, 64551, 64552 were selected from the ORFs having the nucleotide sequence represented by SEQ ID NO: 5271.

[5762] The probes having the nucleotide sequence represented by SEQ ID NOS: 64553, 64554, 64555, 64556, 64557, 64558, 64559, 64560, 64561, 64562, 64563, 64564, 64565, 64566, 64567, 64568, 64569, 64570, 64571, 64572, 64573, 64574 were selected from the ORFs having the nucleotide sequence represented by SEQ ID NO: 5272.

[5763] The probes having the nucleotide sequence represented by SEQ ID NOS: 64575, 64576, 64577, 64578, 64579, 64580, 64581, 64582, 64583, 64584, 64585 were selected from the ORFs having the nucleotide sequence represented by SEQ ID NO: 5273.

[5764] The probes having the nucleotide sequence represented by SEQ ID NOS: 64586, 64587, 64588, 64589, 64590, 64591, 64592, 64593, 64594, 64595, 64596 were selected from the ORFs having the nucleotide sequence represented by SEQ ID NO: 5274.

[5765] The probes having the nucleotide sequence represented by SEQ ID NOS: 64597, 64598, 64599, 64600, 64601, 64602, 64603, 64604, 64605, 64606, 64607 were selected from the ORFs having the nucleotide sequence represented by SEQ ID NO: 5275.

[5766] The probes having the nucleotide sequence represented by SEQ ID NOS: 64608, 64609, 64610, 64611, 64612, 64613, 64614, 64615, 64616, 64617, 64618 were selected from the ORFs having the nucleotide sequence represented by SEQ ID NO: 5276.

[5767] The probes having the nucleotide sequence represented by SEQ ID NOS: 64619, 64620, 64621, 64622, 64623, 64624, 64625, 64626, 64627, 64628, 64629 were selected from the ORFs having the nucleotide sequence represented by SEQ ID NO: 5277.

[5768] The probes having the-nucleotide sequence represented by SEQ ID NOS: 64630, 64631, 64632, 64633, 64634, 64635, 64636, 64637, 64638, 64639, 64640 were selected from the ORFs having the nucleotide sequence represented by SEQ ID NO: 5278.

[5769] The probes having the nucleotide sequence represented by SEQ ID NOS: 64641, 64642, 64643, 64644, 64645, 64646, 64647, 64648, 64649, 64650, 64651 were selected from the ORFs having the nucleotide sequence represented by SEQ ID NO: 5279.

[5770] The probes having the nucleotide sequence represented by SEQ ID NOS: 64652, 64653, 64654, 64655, 64656, 64657, 64658, 64659, 64660, 64661, 64662 were selected from the ORFs having the nucleotide sequence represented by SEQ ID NO: 5280.

[5771] The probes having the nucleotide sequence represented by SEQ ID NOS: 64663, 64664, 64665, 64666, 64667, 64668, 64669, 64670, 64671, 64672, 64673 were selected from the ORFs having the nucleotide sequence represented by SEQ ID NO: 5281.

[5772] The probes having the nucleotide sequence represented by SEQ ID NOS: 64674, 64675, 64676, 64677, 64678, 64679, 64680, 64681, 64682, 64683, 64684 were selected from the ORFs having the nucleotide sequence represented by SEQ ID NO: 5282.

[5773] The probes having the nucleotide sequence represented by SEQ ID NOS: 64685, 64686, 64687, 64688, 64689, 64690, 64691, 64692, 64693, 64694, 64695 were selected from the ORFs having the nucleotide sequence represented by SEQ ID NO: 5283.

[5774] The probes having the nucleotide sequence represented by SEQ ID NOS: 64696, 64697, 64698, 64699, 64700, 64701, 64702, 64703, 64704, 64705, 64706 were selected from the ORFs having the nucleotide sequence represented by SEQ ID NO: 5284.

[5775] The probes having the nucleotide sequence represented by SEQ ID NOS: 64707, 64708, 64709, 64710, 64711, 64712, 64713, 64714, 64715, 64716, 64717 were selected from the ORFs having the nucleotide sequence represented by SEQ ID NO: 5285.

[5776] The probes having the nucleotide sequence represented by SEQ ID NOS: 64718, 64719, 64720, 64721, 64722, 64723, 64724, 64725, 64726, 64727, 64728 were selected from the ORFs having the nucleotide sequence represented by SEQ ID NO: 5286.

[5777] The probes having the nucleotide sequence represented by SEQ ID NOS: 64729, 64730, 64731, 64732, 64733, 64734, 64735, 64736, 64737, 64738, 64739 were selected from the ORFs having the nucleotide sequence represented by SEQ ID NO: 5287.

[5778] The probes having the nucleotide sequence represented by SEQ ID NOS: 64740, 64741, 64742, 64743, 64744, 64745, 64746, 64747, 64748, 64749, 64750 were selected from the ORFs having the nucleotide sequence represented by SEQ ID NO: 5288.

[5779] The probes having the nucleotide sequence represented by SEQ ID NOS: 64751, 64752, 64753, 64754, 64755, 64756, 64757, 64758, 64759, 64760, 64761 were selected from the ORFs having the nucleotide sequence represented by SEQ ID NO: 5289.

[5780] The probes having the nucleotide sequence represented by SEQ ID NOS: 64762, 64763, 64764, 64765, 64766, 64767, 64768, 64769, 64770, 64771, 64772 were selected from the ORFs having the nucleotide sequence represented by SEQ ID NO: 5290.

[5781] The probes having the nucleotide sequence represented by SEQ ID NOS: 64773, 64774, 64775, 64776, 64777, 64778, 64779, 64780, 64781, 64782, 64783 were selected from the ORFs having the nucleotide sequence represented by SEQ ID NO: 5291.

[5782] The probes having the nucleotide sequence represented by SEQ ID NOS: 64784, 64785, 64786, 64787, 64788, 64789, 64790, 64791, 64792, 64793, 64794 were selected from the ORFs having the-nucleotide sequence represented by SEQ ID NO: 5292.

[5783] The probes having the nucleotide sequence represented by SEQ ID NOS: 64795, 64796, 64797, 64798, 64799, 64800, 64801, 64802, 64803, 64804, 64805 were selected from the ORFs having the nucleotide sequence represented by SEQ ID NO: 5293.

[5784] The probes having the nucleotide sequence represented by SEQ ID NOS: 64806, 64807, 64808, 64809, 64810, 64811, 64812, 64813, 64814, 64815, 64816 were selected from the ORFs having the nucleotide sequence represented by SEQ ID NO: 5294.

[5785] The probes having the nucleotide sequence represented by SEQ ID NOS: 64817, 64818, 64819, 64820, 64821, 64822, 64823, 64824, 64825, 64826, 64827 were selected from the ORFs having the nucleotide sequence represented by SEQ ID NO: 5295.

[5786] The probes having the nucleotide sequence represented by SEQ ID NOS: 64828, 64829, 64830, 64831, 64832, 64833, 64834, 64835, 64836, 64837, 64838 were selected from the ORFs having the nucleotide sequence represented by SEQ ID NO: 5296.

[5787] The probes having the nucleotide sequence represented by SEQ ID NOS: 64839, 64840, 64841, 64842, 64843, 64844, 64845, 64846, 64847, 64848, 64849 were selected from the ORFs having the nucleotide sequence represented by SEQ ID NO: 5297.

[5788] The probes having the nucleotide sequence represented by SEQ ID NOS: 64850, 64851, 64852, 64853, 64854, 64855, 64856, 64857, 64858, 64859, 64860 were selected from the ORFs having the nucleotide sequence represented by SEQ ID NO: 5298.

[5789] The probes having the nucleotide sequence represented by SEQ ID NOS: 64861, 64862, 64863, 64864, 64865, 64866, 64867, 64868, 64869, 64870, 64871 were selected from the ORFs having the nucleotide sequence represented by SEQ ID NO: 5299.

[5790] The probes having the nucleotide sequence represented by SEQ ID NOS: 64872, 64873, 64874, 64875, 64876, 64877, 64878, 64879, 64880, 64881, 64882 were selected from the ORFs having the nucleotide sequence represented by SEQ ID NO: 5300.

[5791] The probes having the nucleotide sequence represented by SEQ ID NOS: 64883, 64884, 64885, 64886, 64887, 64888, 64889, 64890, 64891, 64892, 64893 were selected from the ORFs having the nucleotide sequence represented by SEQ ID NO: 5301.

[5792] The probes having the nucleotide sequence represented by SEQ ID NOS: 64894, 64895, 64896, 64897, 64898, 64899, 64900, 64901, 64902, 64903, 64904 were selected from the ORFs having the nucleotide sequence represented by SEQ ID NO: 5302.

[5793] The probes having the nucleotide sequence represented by SEQ ID NOS: 64905, 64906, 64907, 64908, 64909, 64910, 64911, 64912, 64913, 64914, 64915 were selected from the ORFs having the nucleotide sequence represented by SEQ ID NO: 5303.

[5794] The probes having the nucleotide sequence represented by SEQ ID NOS: 64916, 64917, 64918, 64919, 64920, 64921, 64922, 64923, 64924, 64925, 64926 were selected from the ORFs having the nucleotide sequence represented by SEQ ID NO: 5304.

[5795] The probes having the nucleotide sequence represented by SEQ ID NOS: 64927, 64928, 64929, 64930, 64931, 64932, 64933, 64934, 64935, 64936, 64937 were selected from the ORFs having the nucleotide sequence represented by SEQ ID NO: 5305.

[5796] The probes having the nucleotide sequence represented by SEQ ID NOS: 64938, 64939, 64940, 64941, 64942, 64943, 64944, 64945, 64946, 64947, 64948 were selected from the ORFs having the nucleotide sequence represented by SEQ ID NO: 5306.

[5797] The probes having the nucleotide sequence represented by SEQ ID NOS: 64949, 64950, 64951, 64952, 64953, 64954, 64955, 64956, 64957, 64958, 64959 were selected from the ORFs having the nucleotide sequence represented by SEQ ID NO: 5307.

[5798] The probes having the nucleotide sequence represented by SEQ ID NOS: 64960, 64961, 64962, 64963, 64964, 64965, 64966, 64967, 64968, 64969, 64970 were selected from the ORFs having the nucleotide sequence represented by SEQ ID NO: 5308.

[5799] The probes having the nucleotide sequence represented by SEQ ID NOS: 64971, 64972, 64973, 64974, 64975, 64976, 64977, 64978, 64979, 64980, 64981 were selected from the ORFs having the nucleotide sequence represented by SEQ ID NO: 5309.

[5800] The probes having the nucleotide sequence represented by SEQ ID NOS: 64982, 64983, 64984, 64985, 64986, 64987, 64988, 64989, 64990, 64991, 64992 were selected from the ORFs having the nucleotide sequence represented by SEQ ID NO: 5310.

[5801] The probes having the nucleotide sequence represented by SEQ ID NOS: 64993, 64994, 64995, 64996, 64997, 64998, 64999, 65000, 65001, 65002, 65003 were selected from the ORFs having the nucleotide sequence represented by SEQ ID NO: 5311.

[5802] The probes having the nucleotide sequence represented by SEQ ID NOS: 65004, 65005, 65006, 65007, 65008, 65009, 65010, 65011, 65012, 65013, 65014 were selected from the ORFs having the nucleotide sequence represented by SEQ ID NO: 5312.

[5803] The probes having the nucleotide sequence represented by SEQ ID NOS: 65015, 65016, 65017, 65018, 65019, 65020, 65021, 65022, 65023, 65024, 65025 were selected from the ORFs having the nucleotide sequence represented by SEQ ID NO: 5313.

[5804] The probes having the nucleotide sequence represented by SEQ ID NOS: 65026, 65027, 65028, 65029, 65030, 65031, 65032, 65033, 65034, 65035, 65036 were selected from the ORFs having the nucleotide sequence represented by SEQ ID NO: 5314.

[5805] The probes having the nucleotide sequence represented by SEQ ID NOS: 65037, 65038, 65039, 65040, 65041, 65042, 65043, 65044, 65045, 65046, 65047 were selected from the ORFs having the nucleotide sequence represented by SEQ ID NO: 5315.

[5806] The probes having the nucleotide sequence represented by SEQ ID NOS: 65048, 65049, 65050, 65051, 65052, 65053, 65054, 65055, 65056, 65057, 65058 were selected from the ORFs having the nucleotide sequence represented by SEQ ID NO: 5316.

[5807] The probes having the nucleotide sequence represented by SEQ ID NOS: 65059, 65060, 65061, 65062, 65063, 65064, 65065, 65066, 65067, 65068, 65069 were selected from the ORFs having the nucleotide sequence represented by SEQ ID NO: 5317.

[5808] The probes having the nucleotide sequence represented by SEQ ID NOS: 65070, 65071, 65072, 65073, 65074, 65075, 65076, 65077, 65078, 65079, 65080 were selected from the ORFs having the nucleotide sequence represented by SEQ ID NO: 5318.

[5809] The probes having the nucleotide sequence represented by SEQ ID NOS: 65081, 65082, 65083, 65084, 65085, 65086, 65087, 65088, 65089, 65090, 65091 were selected from the ORFs having the nucleotide sequence represented by SEQ ID NO: 5319.

[5810] The probes having the nucleotide sequence represented by SEQ ID NOS: 65092, 65093, 65094, 65095, 65096, 65097, 65098, 65099, 65100, 65101, 65102 were selected from the ORFs having the nucleotide sequence represented by SEQ ID NO: 5320.

[5811] The probes having the nucleotide sequence represented by SEQ ID NOS: 65103, 65104, 65105, 65106, 65107, 65108, 65109, 65110, 65111, 65112, 65113 were selected from the ORFs having the nucleotide sequence represented by SEQ ID NO: 5321.

[5812] The probes having the nucleotide sequence represented by SEQ ID NOS: 65114, 65115, 65116, 65117, 65118, 65119, 65120, 65121, 65122, 65123, 65124 were selected from the ORFs having the nucleotide sequence represented by SEQ ID NO: 5322.

[5813] The probes having the nucleotide sequence represented by SEQ ID NOS: 65125, 65126, 65127, 65128, 65129, 65130, 65131, 65132, 65133, 65134, 65135 were selected from the ORFs having the nucleotide sequence represented by SEQ ID NO: 5323.

[5814] The probes having the nucleotide sequence represented by SEQ ID NOS: 65136, 65137, 65138, 65139, 65140, 65141, 65142, 65143, 65144, 65145, 65146 were selected from the ORFs having the nucleotide sequence represented by SEQ ID NO: 5324.

[5815] The probes having the nucleotide sequence represented by SEQ ID NOS: 65147, 65148, 65149, 65150, 65151, 65152, 65153, 65154, 65155, 65156, 65157 were selected from the ORFs having the nucleotide sequence represented by SEQ ID NO: 5325.

[5816] The probes having the nucleotide sequence represented by SEQ ID NOS: 65158, 65159, 65160, 65161, 65162, 65163, 65164, 65165, 65166, 65167, 65168 were selected from the ORFs having the nucleotide sequence represented by SEQ ID NO: 5326.

[5817] The probes having the nucleotide sequence represented by SEQ ID NOS: 65169, 65170, 65171, 65172, 65173, 65174, 65175, 65176, 65177, 65178, 65179 were selected from the ORFs having the nucleotide sequence represented by SEQ ID NO: 5327.

[5818] The probes having the nucleotide sequence represented by SEQ ID NOS: 65180, 65181, 65182, 65183, 65184, 65185, 65186, 65187, 65188, 65189, 65190 were selected from the ORFs having the nucleotide sequence represented by SEQ ID NO: 5328.

[5819] The probes having the nucleotide sequence represented by SEQ ID NOS: 65191, 65192, 65193, 65194, 65195, 65196, 65197, 65198, 65199, 65200, 65201 were selected from the ORFs having the nucleotide sequence represented by SEQ ID NO: 5329.

[5820] The probes having the nucleotide sequence represented by SEQ ID NOS: 65202, 65203, 65204, 65205, 65206, 65207, 65208, 65209, 65210, 65211, 65212 were selected from the ORFs having the nucleotide sequence represented by SEQ ID NO: 5330.

[5821] The probes having the nucleotide sequence represented by SEQ ID NOS: 65213, 65214, 65215, 65216, 65217, 65218, 65219, 65220, 65221, 65222, 65223 were selected from the ORFs having the nucleotide sequence represented by SEQ ID NO: 5331.

[5822] The probes having the nucleotide sequence represented by SEQ ID NOS: 65224, 65225, 65226, 65227, 65228, 65229, 65230, 65231, 65232, 65233, 65234 were selected from the ORFs having the nucleotide sequence represented by SEQ ID NO: 5332.

[5823] The probes having the nucleotide sequence represented by SEQ ID NOS: 65235, 65236, 65237, 65238, 65239, 65240, 65241, 65242, 65243, 65244, 65245 were selected from the ORFs having the nucleotide sequence represented by SEQ ID NO: 5333.

[5824] The probes having the nucleotide sequence represented by SEQ ID NOS: 65246, 65247, 65248, 65249, 65250, 65251, 65252, 65253, 65254, 65255, 65256 were selected from the ORFs having the nucleotide sequence represented by SEQ ID NO: 5334.

[5825] The probes having the nucleotide sequence represented by SEQ ID NOS: 65257, 65258, 65259, 65260, 65261, 65262, 65263, 65264, 65265, 65266, 65267 were selected from the ORFs having the nucleotide sequence represented by SEQ ID NO: 5335.

[5826] The probes having the nucleotide sequence represented by SEQ ID NOS: 65268, 65269, 65270, 65271, 65272, 65273, 65274, 65275, 65276, 65277, 65278 were selected from the ORFs having the nucleotide sequence represented by SEQ ID NO: 5336.

[5827] The probes having the nucleotide sequence represented by SEQ ID NOS: 65279, 65280, 65281, 65282, 65283, 65284, 65285, 65286, 65287, 65288, 65289 were selected from the ORFs having the nucleotide sequence represented by SEQ ID NO: 5337.

[5828] The probes having the nucleotide sequence represented by SEQ ID NOS: 65290, 65291, 65292, 65293, 65294, 65295, 65296, 65297, 65298, 65299, 65300 were selected from the ORFs having the nucleotide sequence represented by SEQ ID NO: 5338.

[5829] The probes having the nucleotide sequence represented by SEQ ID NOS: 65301, 65302, 65303, 65304, 65305, 65306, 65307, 65308, 65309, 65310, 65311 were selected from the ORFs having the nucleotide sequence represented by SEQ ID NO: 5339.

[5830] The probes having the nucleotide sequence represented by SEQ ID NOS: 65312, 65313, 65314, 65315, 65316, 65317, 65318, 65319, 65320, 65321, 65322 were selected from the ORFs having the nucleotide sequence represented by SEQ ID NO: 5340.

[5831] The probes having the nucleotide sequence represented by SEQ ID NOS: 65323, 65324, 65325, 65326, 65327, 65328, 65329, 65330, 65331, 65332, 65333 were selected from the ORFs having the nucleotide sequence represented by SEQ ID NO: 5341.

[5832] The probes having the nucleotide sequence represented by SEQ ID NOS: 65334, 65335, 65336, 65337, 65338, 65339, 65340, 65341, 65342, 65343, 65344 were selected from the ORFs having the nucleotide sequence represented by SEQ ID NO: 5342.

[5833] The probes having the nucleotide sequence represented by SEQ ID NOS: 65345, 65346, 65347, 65348, 65349, 65350, 65351, 65352, 65353, 65354, 65355 were selected from the ORFs having the nucleotide sequence represented by SEQ ID NO: 5343.

[5834] The probes having the nucleotide sequence represented by SEQ ID NOS: 65356, 65357, 65358, 65359, 65360, 65361, 65362, 65363, 65364, 65365, 65366 were selected from the ORFs having the nucleotide sequence represented by SEQ ID NO: 5344.

[5835] The probes having the nucleotide sequence represented by SEQ ID NOS: 65367, 65368, 65369, 65370, 65371, 65372, 65373, 65374, 65375, 65376, 65377 were selected from the ORFs having the nucleotide sequence represented by SEQ ID NO: 5345.

[5836] The probes having the nucleotide sequence represented by SEQ ID NOS: 65378, 65379, 65380, 65381, 65382, 65383, 65384, 65385, 65386, 65387, 65388 were selected from the ORFs having the nucleotide sequence represented by SEQ ID NO: 5346.

[5837] The probes having the nucleotide sequence represented by SEQ ID NOS: 65389, 65390, 65391, 65392, 65393, 65394, 65395, 65396, 65397, 65398, 65399 were selected from the ORFs having the nucleotide sequence represented by SEQ ID NO: 5347.

[5838] The probes having the nucleotide sequence represented by SEQ ID NOS: 65400, 65401, 65402, 65403, 65404, 65405, 65406, 65407, 65408, 65409, 65410 were selected from the ORFs having the nucleotide sequence represented by SEQ ID NO: 5348.

[5839] The probes having the nucleotide sequence represented by SEQ ID NOS: 65411, 65412, 65413, 65414, 65415, 65416, 65417, 65418, 65419, 65420, 65421 were selected from the ORFs having the nucleotide sequence represented by SEQ ID NO: 5349.

[5840] The probes having the nucleotide sequence represented by SEQ ID NOS: 65422, 65423, 65424, 65425, 65426, 65427, 65428, 65429, 65430, 65431, 65432 were selected from the ORFs having the nucleotide sequence represented by SEQ ID NO: 5350.

[5841] The probes having the nucleotide sequence represented by SEQ ID NOS: 65433, 65434, 65435, 65436, 65437, 65438, 65439, 65440, 65441, 65442, 65443 were selected from the ORFs having the nucleotide sequence represented by SEQ ID NO: 5351.

[5842] The probes having the nucleotide sequence represented by SEQ ID NOS: 65444, 65445, 65446, 65447, 65448, 65449, 65450, 65451, 65452, 65453, 65454 were selected from the ORFs having the nucleotide sequence represented by SEQ ID NO: 5352.

[5843] The probes having the nucleotide sequence represented by SEQ ID NOS: 65455, 65456, 65457, 65458, 65459, 65460, 65461, 65462, 65463, 65464, 65465 were selected from the ORFs having the nucleotide sequence represented by SEQ ID NO: 5353.

[5844] The probes having the nucleotide sequence represented by SEQ ID NOS: 65466, 65467, 65468, 65469, 65470, 65471, 65472, 65473, 65474, 65475, 65476 were selected from the ORFs having the nucleotide sequence represented by SEQ ID NO: 5354.

[5845] The probes having the nucleotide sequence represented by SEQ ID NOS: 65477, 65478, 65479, 65480, 65481, 65482, 65483, 65484, 65485, 65486, 65487 were selected from the ORFs having the nucleotide sequence represented by SEQ ID NO: 5355.

[5846] The probes having the nucleotide sequence represented by SEQ ID NOS: 65488, 65489, 65490, 65491, 65492, 65493,

[5847] 65494, 65495, 65496, 65497, 65498 were selected from the ORFs having the nucleotide sequence represented by SEQ ID NO: 5356.

[5848] The probes having the nucleotide sequence represented by SEQ ID NOS: 65499, 65500, 65501, 65502, 65503, 65504, 65505, 65506, 65507, 65508, 65509 were selected from the ORFs having the nucleotide sequence represented by SEQ ID NO: 5357.

[5849] The probes having the nucleotide sequence represented by SEQ ID NOS: 65510, 65511, 65512, 65513, 65514, 65515, 65516, 65517, 65518, 65519, 65520 were selected from the ORFs having the nucleotide sequence represented by SEQ ID NO: 5358.

[5850] The probes having the nucleotide sequence represented by SEQ ID NOS: 65521, 65522, 65523, 65524, 65525, 65526, 65527, 65528, 65529, 65530, 65531 were selected from the ORFs having the nucleotide sequence represented by SEQ ID NO: 5359.

[5851] The probes having the nucleotide sequence represented by SEQ ID NOS: 65532, 65533, 65534, 65535, 65536, 65537, 65538, 65539, 65540, 65541, 65542 were selected from the ORFs having the nucleotide sequence represented by SEQ ID NO: 5360.

[5852] The probes having the nucleotide sequence represented by SEQ ID NOS: 65543, 65544, 65545, 65546, 65547, 65548, 65549, 65550, 65551, 65552, 65553 were selected from the ORFs having the nucleotide sequence represented by SEQ ID NO: 5361.

[5853] The probes having the nucleotide sequence represented by SEQ ID NOS: 65554, 65555, 65556, 65557, 65558, 65559, 65560, 65561, 65562, 65563, 65564 were selected from the ORFs having the nucleotide sequence represented by SEQ ID NO: 5362.

[5854] The probes having the nucleotide sequence represented by SEQ ID NOS: 65565, 65566, 65567, 65568, 65569, 65570, 65571, 65572, 65573, 65574, 65575 were selected from the ORFs having the nucleotide sequence represented by SEQ ID NO: 5363.

[5855] The probes having the nucleotide sequence represented by SEQ ID NOS: 65576, 65577, 65578, 65579, 65580, 65581, 65582, 65583, 65584, 65585, 65586 were selected from the ORFs having the nucleotide sequence represented by SEQ ID NO: 5364.

[5856] The probes having the nucleotide sequence represented by SEQ ID NOS: 65587, 65588, 65589, 65590, 65591, 65592, 65593, 65594, 65595, 65596, 65597 were selected from the ORFs having the nucleotide sequence represented by SEQ ID NO: 5365.

[5857] The probes having the nucleotide sequence represented by SEQ ID NOS: 65598, 65599, 65600, 65601, 65602, 65603, 65604, 65605, 65606, 65607, 65608 were selected from the ORFs having the nucleotide sequence represented by SEQ ID NO: 5366.

[5858] The probes having the nucleotide sequence represented by SEQ ID NOS: 65609, 65610, 65611, 65612, 65613, 65614, 65615, 65616, 65617, 65618, 65619 were selected from the ORFs having the nucleotide sequence represented by SEQ ID NO: 5367.

[5859] The probes having the nucleotide sequence represented by SEQ ID NOS: 65620, 65621, 65622, 65623, 65624, 65625, 65626, 65627, 65628, 65629, 65630 were selected from the ORFs having the nucleotide sequence represented by SEQ ID NO: 5368.

[5860] The probes having the nucleotide sequence represented by SEQ ID NOS: 65631, 65632, 65633, 65634, 65635, 65636, 65637, 65638, 65639, 65640, 65641 were selected from the ORFs having the nucleotide sequence represented by SEQ ID NO: 5369.

[5861] The probes having the nucleotide sequence represented by SEQ ID NOS: 65642, 65643, 65644, 65645, 65646, 65647, 65648, 65649, 65650, 65651, 65652 were selected from the ORFs having the nucleotide sequence represented by SEQ ID NO: 5370.

[5862] The probes having the nucleotide sequence represented by SEQ ID NOS: 65653, 65654, 65655, 65656, 65657, 65658, 65659, 65660, 65661, 65662, 65663 were selected from the ORFs having the nucleotide sequence represented by SEQ ID NO: 5371.

[5863] The probes having the nucleotide sequence represented by SEQ ID NOS: 65664, 65665, 65666, 65667, 65668, 65669, 65670, 65671, 65672, 65673, 65674 were selected from the ORFs having the nucleotide sequence represented by SEQ ID NO: 5372.

[5864] The probes having the nucleotide sequence represented by SEQ ID NOS: 65675, 65676, 65677, 65678, 65679, 65680, 65681, 65682, 65683, 65684, 65685 were selected from the ORFs having the nucleotide sequence represented by SEQ ID NO: 5373.

[5865] The probes having the nucleotide sequence represented by SEQ ID NOS: 65686, 65687, 65688, 65689, 65690, 65691, 65692, 65693, 65694, 65695, 65696 were selected from the ORFs having the nucleotide sequence represented by SEQ ID NO: 5374.

[5866] The probes having the nucleotide sequence represented by SEQ ID NOS: 65697, 65698, 65699, 65700, 65701, 65702, 65703, 65704, 65705, 65706, 65707 were selected from the ORFs having the nucleotide sequence represented by SEQ ID NO: 5375.

[5867] The probes having the nucleotide sequence represented by SEQ ID NOS: 65708, 65709, 65710, 65711, 65712, 65713, 65714, 65715, 65716, 65717, 65718 were selected from the ORFs having the nucleotide sequence represented by SEQ ID NO: 5376.

[5868] The probes having the nucleotide sequence represented by SEQ ID NOS: 65719, 65720, 65721, 65722, 65723, 65724, 65725, 65726, 65727, 65728, 65729 were selected from the ORFs having the nucleotide sequence represented by SEQ ID NO: 5377.

[5869] The probes having the nucleotide sequence represented by SEQ ID NOS: 65730, 65731, 65732, 65733, 65734, 65735, 65736, 65737, 65738, 65739, 65740 were selected from the ORFs having the nucleotide sequence represented by SEQ ID NO: 5378.

[5870] The probes having the nucleotide sequence represented by SEQ ID NOS: 65741, 65742, 65743, 65744, 65745, 65746, 65747, 65748, 65749, 65750, 65751 were selected from the ORFs having the nucleotide sequence represented by SEQ ID NO: 5379.

[5871] The probes having the nucleotide sequence represented by SEQ ID NOS: 65752, 65753, 65754, 65755, 65756, 65757, 65758, 65759, 65760, 65761, 65762 were selected from the ORFs having the nucleotide sequence represented by SEQ ID NO: 5380.

[5872] The probes having the nucleotide sequence represented by SEQ ID NOS: 65763, 65764, 65765, 65766, 65767, 65768, 65769, 65770, 65771, 65772, 65773 were selected from the ORFs having the nucleotide sequence represented by SEQ ID NO: 5381.

[5873] The probes having the nucleotide sequence represented by SEQ ID NOS: 65774, 65775, 65776, 65777, 65778, 65779, 65780, 65781, 65782, 65783, 65784 were selected from the ORFs having the nucleotide sequence represented by SEQ ID NO: 5382.

[5874] The probes having the nucleotide sequence represented by SEQ ID NOS: 65785, 65786, 65787, 65788, 65789, 65790, 65791, 65792, 65793, 65794, 65795 were selected from the ORFs having the nucleotide sequence represented by SEQ ID NO: 5383.

[5875] The probes having the nucleotide sequence represented by SEQ ID NOS: 65796, 65797, 65798, 65799, 65800, 65801, 65802, 65803, 65804, 65805, 65806 were selected from the ORFs having the nucleotide sequence represented by SEQ ID NO: 5384.

[5876] The probes having the nucleotide sequence represented by SEQ ID NOS: 65807, 65808, 65809, 65810, 65811, 65812, 65813, 65814, 65815, 65816, 65817 were selected from the ORFs having the nucleotide sequence represented by SEQ ID NO: 5385.

[5877] The probes having the nucleotide sequence represented by SEQ ID NOS: 65818, 65819, 65820, 65821, 65822, 65823, 65824, 65825, 65826, 65827, 65828 were selected from the ORFs having the nucleotide sequence represented by SEQ ID NO: 5386.

[5878] The probes having the nucleotide sequence represented by SEQ ID NOS: 65829, 65830, 65831, 65832, 65833, 65834, 65835, 65836, 65837, 65838, 65839 were selected from the ORFs having the nucleotide sequence represented by SEQ ID NO: 5387.

[5879] The probes having the nucleotide sequence represented by SEQ ID NOS: 65840, 65841, 65842, 65843, 65844, 65845, 65846, 65847, 65848, 65849, 65850 were selected from the ORFs having the nucleotide sequence represented by SEQ ID NO: 5388.

[5880] The probes having the nucleotide sequence represented by SEQ ID NOS: 65851, 65852, 65853, 65854, 65855, 65856, 65857, 65858, 65859, 65860, 65861 were selected from the ORFs having the nucleotide sequence represented by SEQ ID NO: 5389.

[5881] The probes having the nucleotide sequence represented by SEQ ID NOS: 65862, 65863, 65864, 65865, 65866, 65867, 65868, 65869, 65870, 65871, 65872 were selected from the ORFs having the nucleotide sequence represented by SEQ ID NO: 5390.

[5882] The probes having the nucleotide sequence represented by SEQ ID NOS: 65873, 65874, 65875, 65876, 65877, 65878, 65879, 65880, 65881, 65882, 65883 were selected from the ORFs having the nucleotide sequence represented by SEQ ID NO: 5391.

[5883] The probes having the nucleotide sequence represented by SEQ ID NOS: 65884, 65885, 65886, 65887, 65888, 65889, 65890, 65891, 65892, 65893, 65894 were selected from the ORFs having the nucleotide sequence represented by SEQ ID NO: 5392.

[5884] The probes having the nucleotide sequence represented by SEQ ID NOS: 65895, 65896, 65897, 65898, 65899, 65900, 65901, 65902, 65903, 65904, 65905 were selected from the ORFs having the nucleotide sequence represented by SEQ ID NO: 5393.

[5885] The probes having the nucleotide sequence represented by SEQ ID NOS: 65906, 65907, 65908, 65909, 65910, 65911, 65912, 65913, 65914, 65915, 65916 were selected from the ORFs having the nucleotide sequence represented by SEQ ID NO: 5394.

[5886] The probes having the nucleotide sequence represented by SEQ ID NOS: 65917, 65918, 65919, 65920, 65921, 65922, 65923, 65924, 65925, 65926, 65927 were selected from the ORFs having the nucleotide sequence represented by SEQ ID NO: 5395.

[5887] The probes having the nucleotide sequence represented by SEQ ID NOS: 65928, 65929, 65930, 65931, 65932, 65933, 65934, 65935, 65936, 65937, 65938 were selected from the ORFs having the nucleotide sequence represented by SEQ ID NO: 5396.

[5888] The probes having the nucleotide sequence represented by SEQ ID NOS: 65939, 65940, 65941, 65942, 65943, 65944, 65945, 65946, 65947, 65948, 65949 were selected from the ORFs having the nucleotide sequence represented by SEQ ID NO: 5397.

[5889] The probes having the nucleotide sequence represented by SEQ ID NOS: 65950, 65951, 65952, 65953, 65954, 65955, 65956, 65957, 65958, 65959, 65960 were selected from the ORFs having the nucleotide sequence represented by SEQ ID NO: 5398.

[5890] The probes having the nucleotide sequence represented by SEQ ID NOS: 65961, 65962, 65963, 65964, 65965, 65966, 65967, 65968, 65969, 65970, 65971 were selected from the ORFs having the nucleotide sequence represented by SEQ ID NO: 5399.

[5891] The probes having the nucleotide sequence represented by SEQ ID NOS: 65972, 65973, 65974, 65975, 65976, 65977, 65978, 65979, 65980, 65981, 65982 were selected from the ORFs having the nucleotide sequence represented by SEQ ID NO: 5400.

[5892] The probes having the nucleotide sequence represented by SEQ ID NOS: 65983, 65984, 65985, 65986, 65987, 65988, 65989, 65990, 65991, 65992, 65993 were selected from the ORFs having the nucleotide sequence represented by SEQ ID NO: 5401.

[5893] The probes having the nucleotide sequence represented by SEQ ID NOS: 65994, 65995, 65996, 65997, 65998, 65999, 66000, 66001, 66002, 66003, 66004 were selected from the ORFs having the nucleotide sequence represented by SEQ ID NO: 5402.

[5894] The probes having the nucleotide sequence represented by SEQ ID NOS: 66005, 66006, 66007, 66008, 66009, 66010, 66011, 66012, 66013, 66014, 66015 were selected from the ORFs having the nucleotide sequence represented by SEQ ID NO: 5403.

[5895] The probes having the nucleotide sequence represented by SEQ ID NOS: 66016, 66017, 66018, 66019, 66020, 66021, 66022, 66023, 66024, 66025, 66026 were selected from the ORFs having the nucleotide sequence represented by SEQ ID NO: 5404.

[5896] The probes having the nucleotide sequence represented by SEQ ID NOS: 66027, 66028, 66029, 66030, 66031, 66032, 66033, 66034, 66035, 66036, 66037 were selected from the ORFs having the nucleotide sequence represented by SEQ ID NO: 5405.

[5897] The probes having the nucleotide sequence represented by SEQ ID NOS: 66038, 66039, 66040, 66041, 66042, 66043, 66044, 66045, 66046, 66047, 66048 were selected from the ORFs having the nucleotide sequence represented by SEQ ID NO: 5406.

[5898] The probes having the nucleotide sequence represented by SEQ ID NOS: 66049, 66050, 66051, 66052, 66053, 66054, 66055, 66056, 66057, 66058, 66059 were selected from the ORFs having the nucleotide sequence represented by SEQ ID NO: 5407.

[5899] The probes having the nucleotide sequence represented by SEQ ID NOS: 66060, 66061, 66062, 66063, 66064, 66065, 66066, 66067, 66068, 66069, 66070 were selected from the ORFs having the nucleotide sequence represented by SEQ ID NO: 5408.

[5900] The probes having the nucleotide sequence represented by SEQ ID NOS: 66071, 66072, 66073, 66074, 66075, 66076, 66077, 66078, 66079, 66080, 66081 were selected from the ORFs having the nucleotide sequence represented by SEQ ID NO: 5409.

[5901] The probes having the nucleotide sequence represented by SEQ ID NOS: 66082, 66083, 66084, 66085, 66086, 66087, 66088, 66089, 66090, 66091, 66092 were selected from the ORFs having the nucleotide sequence represented by SEQ ID NO: 5410.

[5902] The probes having the nucleotide sequence represented by SEQ ID NOS: 66093, 66094, 66095, 66096, 66097, 66098, 66099, 66100, 66101, 66102, 66103, 66104, 66105, 66106, 66107, 66108, 66109, 66110, 66111, 66112, 66113, 66114 were selected from the ORFs having the nucleotide sequence represented by SEQ ID NO: 5411.

[5903] The probes having the nucleotide sequence represented by SEQ ID NOS: 66115, 66116, 66117, 66118, 66119, 66120, 66121, 66122, 66123, 66124, 66125 were selected from the ORFs having the nucleotide sequence represented by SEQ ID NO: 5412.

[5904] The probes having the nucleotide sequence represented by SEQ ID NOS: 66126, 66127, 66128, 66129, 66130, 66131, 66132, 66133, 66134, 66135, 66136 were selected from the ORFs having the nucleotide sequence represented by SEQ ID NO: 5413.

[5905] The probes having the nucleotide sequence represented by SEQ ID NOS: 66137, 66138, 66139, 66140, 66141, 66142, 66143, 66144, 66145, 66146, 66147 were selected from the ORFs having the nucleotide sequence represented by SEQ ID NO: 5414.

[5906] The probes having the nucleotide sequence represented by SEQ ID NOS: 66148, 66149, 66150, 66151, 66152, 66153, 66154, 66155, 66156, 66157, 66158 were selected from the ORFs having the nucleotide sequence represented by SEQ ID NO: 5415.

[5907] The probes having the nucleotide sequence represented by SEQ ID NOS: 66159, 66160, 66161, 66162, 66163, 66164, 66165, 66166, 66167, 66168, 66169 were selected from the ORFs having the nucleotide sequence represented by SEQ ID NO: 5416.

[5908] The probes having the nucleotide sequence represented by SEQ ID NOS: 66170, 66171, 66172, 66173, 66174, 66175, 66176, 66177, 66178, 66179, 66180 were selected from the ORFs having the nucleotide sequence represented by SEQ ID NO: 5417.

[5909] The probes having the nucleotide sequence represented by SEQ ID NOS: 66181, 66182, 66183, 66184, 66185, 66186, 66187, 66188, 66189, 66190, 66191 were selected from the ORFs having the nucleotide sequence represented by SEQ ID NO: 5418.

[5910] The probes having the nucleotide sequence represented by SEQ ID NOS: 66192, 66193, 66194, 66195, 66196, 66197, 66198, 66199, 66200, 66201, 66202 were selected from the ORFs having the nucleotide sequence represented by SEQ ID NO: 5419.

[5911] The probes having the nucleotide sequence represented by SEQ ID NOS: 66203, 66204, 66205, 66206, 66207, 66208, 66209, 66210, 66211, 66212, 66213 were selected from the ORFs having the nucleotide sequence represented by SEQ ID NO: 5420.

[5912] The probes having the nucleotide sequence represented by SEQ ID NOS: 66214, 66215, 66216, 66217, 66218, 66219, 66220, 66221, 66222, 66223, 66224 were selected from the ORFs having the nucleotide sequence represented by SEQ ID NO: 5421.

[5913] The probes having the nucleotide sequence represented by SEQ ID NOS: 66225, 66226, 66227, 66228, 66229, 66230, 66231, 66232, 66233, 66234, 66235 were selected from the ORFs having the nucleotide sequence represented by SEQ ID NO: 5422.

[5914] The probes having the nucleotide sequence represented by SEQ ID NOS: 66236, 66237, 66238, 66239, 66240, 66241, 66242, 66243, 66244, 66245, 66246 were selected from the ORFs having the nucleotide sequence represented by SEQ ID NO: 5423.

[5915] The probes having the nucleotide sequence represented by SEQ ID NOS: 66247, 66248, 66249, 66250, 66251, 66252, 66253, 66254, 66255, 66256, 66257 were selected from the ORFs having the nucleotide sequence represented by SEQ ID NO: 5424.

[5916] The probes having the nucleotide sequence represented by SEQ ID NOS: 66258, 66259, 66260, 66261, 66262, 66263, 66264, 66265, 66266, 66267, 66268 were selected from the ORFs having the nucleotide sequence represented by SEQ ID NO: 5425.

[5917] The probes having the nucleotide sequence represented by SEQ ID NOS: 66269, 66270, 66271, 66272, 66273, 66274, 66275, 66276, 66277, 66278, 66279 were selected from the ORFs having the nucleotide sequence represented by SEQ ID NO: 5426.

[5918] The probes having the nucleotide sequence represented by SEQ ID NOS: 66280, 66281, 66282, 66283, 66284, 66285, 66286, 66287, 66288, 66289, 66290 were selected from the ORFs having the nucleotide sequence represented by SEQ ID NO: 5427.

[5919] The probes having the nucleotide sequence represented by SEQ ID NOS: 66291, 66292, 66293, 66294, 66295, 66296, 66297, 66298, 66299, 66300, 66301 were selected from the ORFs having the nucleotide sequence represented by SEQ ID NO: 5428.

[5920] The probes having the nucleotide sequence represented by SEQ ID NOS: 66302, 66303, 66304, 66305, 66306, 66307, 66308, 66309, 66310, 66311, 66312 were selected from the ORFs having the nucleotide sequence represented by SEQ ID NO: 5429.

[5921] The probes having the nucleotide sequence represented by SEQ ID NOS: 66313, 66314, 66315, 66316, 66317, 66318, 66319, 66320, 66321, 66322, 66323 were selected from the ORFs having the nucleotide sequence represented by SEQ ID NO: 5430.

[5922] The probes having the nucleotide sequence represented by SEQ ID NOS: 66324, 66325, 66326, 66327, 66328, 66329, 66330, 66331, 66332, 66333, 66334 were selected from the ORFs having the nucleotide sequence represented by SEQ ID NO: 5431.

[5923] The probes having the nucleotide sequence represented by SEQ ID NOS: 66335, 66336, 66337, 66338, 66339, 66340, 66341, 66342, 66343, 66344, 66345 were selected from the ORFs having the nucleotide sequence represented by SEQ ID NO: 5432.

[5924] The probes having the nucleotide sequence represented by SEQ ID NOS: 66346, 66347, 66348, 66349, 66350, 66351, 66352, 66353, 66354, 66355, 66356 were selected from the ORFs having the nucleotide sequence represented by SEQ ID NO: 5433.

[5925] The probes having the nucleotide sequence represented by SEQ ID NOS: 66357, 66358, 66359, 66360, 66361,,66362, 66363, 66364, 66365, 66366, 66367 were selected from the ORFs having the nucleotide sequence represented by SEQ ID NO: 5434.

[5926] The probes having the nucleotide sequence represented by SEQ ID NOS: 66368, 66369, 66370, 66371, 66372, 66373, 66374, 66375, 66376, 66377, 66378 were selected from the ORFs having the nucleotide sequence represented by SEQ ID NO: 5435.

[5927] The probes having the nucleotide sequence represented by SEQ ID NOS: 66379, 66380, 66381, 66382, 66383, 66384, 66385, 66386, 66387, 66388, 66389 were selected from the ORFs having the nucleotide sequence represented by SEQ ID NO: 5436.

[5928] The probes having the nucleotide sequence represented by SEQ ID NOS: 66390, 66391, 66392, 66393, 66394, 66395, 66396, 66397, 66398, 66399, 66400 were selected from the ORFs having the nucleotide sequence represented by SEQ ID NO: 5437.

[5929] The probes having the nucleotide sequence represented by SEQ ID NOS: 66401, 66402, 66403, 66404, 66405, 66406, 66407, 66408, 66409, 66410, 66411 were selected from the ORFs having the nucleotide sequence represented by SEQ ID NO: 5438.

[5930] The probes having the nucleotide sequence represented by SEQ ID NOS: 66412, 66413, 66414, 66415, 66416, 66417, 66418, 66419, 66420, 66421, 66422 were selected from the ORFs having the nucleotide sequence represented by SEQ ID NO: 5439.

[5931] The probes having the nucleotide sequence represented by SEQ ID NOS: 66423, 66424, 66425, 66426, 66427, 66428, 66429, 66430, 66431, 66432, 66433 were selected from the ORFs having the nucleotide sequence represented by SEQ ID NO: 5440.

[5932] The probes having the nucleotide sequence represented by SEQ ID NOS: 66434, 66435, 66436, 66437, 66438, 66439, 66440, 66441, 66442, 66443, 66444 were selected from the ORFs having the nucleotide sequence represented by SEQ ID NO: 5441.

[5933] The probes having the nucleotide sequence represented by SEQ ID NOS: 66445, 66446, 66447, 66448, 66449, 66450, 66451, 66452, 66453, 66454, 66455 were selected from the ORFs having the nucleotide sequence represented by SEQ ID NO: 5442.

[5934] The probes having the nucleotide sequence represented by SEQ ID NOS: 66456, 66457, 66458, 66459, 66460, 66461, 66462, 66463, 66464, 66465, 66466 were selected from the ORFs having the nucleotide sequence represented by SEQ ID NO: 5443.

[5935] The probes having the nucleotide sequence represented by SEQ ID NOS: 66467, 66468, 66469, 66470, 66471, 66472, 66473, 66474, 66475, 66476, 66477 were selected from the ORFs having the nucleotide sequence represented by SEQ ID NO: 5444.

[5936] The probes having the nucleotide sequence represented by SEQ ID NOS: 66478, 66479, 66480, 66481, 66482, 66483, 66484, 66485, 66486, 66487, 66488 were selected from the ORFs having the nucleotide sequence represented by SEQ ID NO: 5445.

[5937] The probes having the nucleotide sequence represented by SEQ ID NOS: 66489, 66490, 66491, 66492, 66493, 66494, 66495, 66496, 66497, 66498, 66499 were selected from the ORFs having the nucleotide sequence represented by SEQ ID NO: 5446.

[5938] The probes having the nucleotide sequence represented by SEQ ID NOS: 66500, 66501, 66502, 66503, 66504, 66505, 66506, 66507, 66508, 66509, 66510 were selected from the ORFs having the nucleotide sequence represented by SEQ ID NO: 5447.

[5939] The probes having the nucleotide sequence represented by SEQ ID NOS: 66511, 66512, 66513, 66514, 66515, 66516, 66517, 66518, 66519, 66520, 66521 were selected from the ORFs having the nucleotide sequence represented by SEQ ID NO: 5448.

[5940] The probes having the nucleotide sequence represented by SEQ ID NOS: 66522, 66523, 66524, 66525, 66526, 66527, 66528, 66529, 66530, 66531, 66532 were selected from the ORFs having the nucleotide sequence represented by SEQ ID NO: 5449.

[5941] The probes having the nucleotide sequence represented by SEQ ID NOS: 66533, 66534, 66535, 66536, 66537, 66538, 66539, 66540, 66541, 66542, 66543 were selected from the ORFs having the nucleotide sequence represented by SEQ ID NO: 5450.

[5942] The probes having the nucleotide sequence represented by SEQ ID NOS: 66544, 66545, 66546, 66547, 66548, 66549, 66550, 66551, 66552, 66553, 66554 were selected from the ORFs having the nucleotide sequence represented by SEQ ID NO: 5451.

[5943] The probes having the nucleotide sequence represented by SEQ ID NOS: 66555, 66556, 66557, 66558, 66559, 66560, 66561, 66562, 66563, 66564, 66565 were selected from the ORFs having the nucleotide sequence represented by SEQ ID NO: 5452.

[5944] The probes having the nucleotide sequence represented by SEQ ID NOS: 66566, 66567, 66568, 66569, 66570, 66571, 66572, 66573, 66574, 66575, 66576 were selected from the ORFs having the nucleotide sequence represented by SEQ ID NO: 5453.

[5945] The probes having the nucleotide sequence represented by SEQ ID NOS: 66577, 66578, 66579, 66580, 66581, 66582, 66583, 66584, 66585, 66586, 66587 were selected from the ORFs having the nucleotide sequence represented by SEQ ID NO: 5454.

[5946] The probes having the nucleotide sequence represented by SEQ ID NOS: 66588, 66589, 66590, 66591, 66592, 66593, 66594, 66595, 66596, 66597, 66598 were selected from the ORFs having the nucleotide sequence represented by SEQ ID NO: 5455.

[5947] The probes having the nucleotide sequence represented by SEQ ID NOS: 66599, 66600, 66601, 66602, 66603, 66604, 66605, 66606, 66607, 66608, 66609 were selected from the ORFs having the nucleotide sequence represented by SEQ ID NO: 5456.

[5948] The probes having the nucleotide sequence represented by SEQ ID NOS: 66610, 66611, 66612, 66613, 66614, 66615, 66616, 66617, 66618, 66619, 66620 were selected from the ORFs having the nucleotide sequence represented by SEQ ID NO: 5457.

[5949] The probes having the nucleotide sequence represented by SEQ ID NOS: 66621, 66622, 66623, 66624, 66625, 66626, 66627, 66628, 66629, 66630, 66631 were selected from the ORFs having the nucleotide sequence represented by SEQ ID NO: 5458.

[5950] The probes having the nucleotide sequence represented by SEQ ID NOS: 66632, 66633, 66634, 66635, 66636, 66637, 66638, 66639, 66640, 66641, 66642 were selected from the ORFs having the nucleotide sequence represented by SEQ ID NO: 5459.

[5951] The probes having the nucleotide sequence represented by SEQ ID NOS: 66643, 66644, 66645, 66646, 66647, 66648, 66649, 66650, 66651, 66652, 66653 were selected from the ORFs having the nucleotide sequence represented by SEQ ID NO: 5460.

[5952] The probes having the nucleotide sequence represented by SEQ ID NOS: 66654, 66655, 66656, 66657, 66658, 66659, 66660, 66661, 66662, 66663, 66664 were selected from the ORFs having the nucleotide sequence represented by SEQ ID NO: 5461.

[5953] The probes having the nucleotide sequence represented by SEQ ID NOS: 66665, 66666, 66667, 66668, 66669, 66670, 66671, 66672, 66673, 66674, 66675 were selected from the ORFs having the nucleotide sequence represented by SEQ ID NO: 5462.

[5954] The probes having the nucleotide sequence represented by SEQ ID NOS: 66676, 66677, 66678, 66679, 66680, 66681, 66682, 66683, 66684, 66685, 66686 were selected from the ORFs having the nucleotide sequence represented by SEQ ID NO: 5463.

[5955] The probes having the nucleotide sequence represented by SEQ ID NOS: 66687, 66688, 66689, 66690, 66691, 66692, 66693, 66694, 66695, 66696, 66697 were selected from the ORFs having the nucleotide sequence represented by SEQ ID NO: 5464.

[5956] The probes having the nucleotide sequence represented by SEQ ID NOS: 66698, 66699, 66700, 66701, 66702, 66703, 66704, 66705, 66706, 66707, 66708 were selected from the ORFs having the nucleotide sequence represented by SEQ ID NO: 5465.

[5957] The probes having the nucleotide sequence represented by SEQ ID NOS: 66709, 66710, 66711, 66712, 66713, 66714, 66715, 66716, 66717, 66718, 66719 were selected from the ORFs having the nucleotide sequence represented by SEQ ID NO: 5466.

[5958] The probes having the nucleotide sequence represented by SEQ ID NOS: 66720, 66721, 66722, 66723, 66724, 66725, 66726, 66727, 66728, 66729, 66730 were selected from the ORFs having the nucleotide sequence represented by SEQ ID NO: 5467.

[5959] The probes having the nucleotide sequence represented by SEQ ID NOS: 66731, 66732, 66733, 66734, 66735, 66736, 66737, 66738, 66739, 66740, 66741 were selected from the ORFs having the nucleotide sequence represented by SEQ ID NO: 5468.

[5960] The probes having the nucleotide sequence represented by SEQ ID NOS: 66742, 66743, 66744, 66745, 66746, 66747, 66748, 66749, 66750, 66751, 66752 were selected from the ORFs having the nucleotide sequence represented by SEQ ID NO: 5469.

[5961] The probes having the nucleotide sequence represented by SEQ ID NOS: 66753, 66754, 66755, 66756, 66757, 66758, 66759, 66760, 66761, 66762, 66763 were selected from the ORFs having the nucleotide sequence represented by SEQ ID NO: 5470.

[5962] The probes having the nucleotide sequence represented by SEQ ID NOS: 66764, 66765, 66766, 66767, 66768, 66769, 66770, 66771, 66772, 66773, 66774 were selected from the ORFs having the nucleotide sequence represented by SEQ ID NO: 5471.

[5963] The probes having the nucleotide sequence represented by SEQ ID NOS: 66775, 66776, 66777, 66778, 66779, 66780, 66781, 66782, 66783, 66784, 66785 were selected from the ORFs having the nucleotide sequence represented by SEQ ID NO: 5472.

[5964] The probes having the nucleotide sequence represented by SEQ ID NOS: 66786, 66787, 66788, 66789, 66790, 66791, 66792, 66793, 66794, 66795, 66796 were selected from the ORFs having the nucleotide sequence represented by SEQ ID NO: 5473.

[5965] The probes having the nucleotide sequence represented by SEQ ID NOS: 66797, 66798, 66799, 66800, 66801, 66802, 66803, 66804, 66805, 66806, 66807 were selected from the ORFs having the nucleotide sequence represented by SEQ ID NO: 5474.

[5966] The probes having the nucleotide sequence represented by SEQ ID NOS: 66808, 66809, 66810, 66811, 66812, 66813, 66814, 66815, 66816, 66817, 66818 were selected from the ORFs having the nucleotide sequence represented by SEQ ID NO: 5475.

[5967] The probes having the nucleotide sequence represented by SEQ ID NOS: 66819, 66820, 66821, 66822, 66823, 66824, 66825, 66826, 66827, 66828, 66829 were selected from the ORFs having the nucleotide sequence represented by SEQ ID NO: 5476.

[5968] The probes having the nucleotide sequence represented by SEQ ID NOS: 66830, 66831, 66832, 66833, 66834, 66835, 66836, 66837, 66838, 66839, 66840 were selected from the ORFs having the nucleotide sequence represented by SEQ ID NO: 5477.

[5969] The probes having the nucleotide sequence represented by SEQ ID NOS: 66841, 66842, 66843, 66844, 66845, 66846, 66847, 66848, 66849, 66850, 66851 were selected from the ORFs having the nucleotide sequence represented by SEQ ID NO: 5478.

[5970] The probes having the nucleotide sequence represented by SEQ ID NOS: 66852, 66853, 66854, 66855, 66856, 66857, 66858, 66859, 66860, 66861, 66862 were selected from the ORFs having the nucleotide sequence represented by SEQ ID NO: 5479.

[5971] The probes having the nucleotide sequence represented by SEQ ID NOS: 66863, 66864, 66865, 66866, 66867, 66868, 66869, 66870, 66871, 66872, 66873 were selected from the ORFs having the nucleotide sequence represented by SEQ ID NO: 5480.

[5972] The probes having the nucleotide sequence represented by SEQ ID NOS: 66874, 66875, 66876, 66877, 66878, 66879, 66880, 66881, 66882, 66883, 66884 were selected from the ORFs having the nucleotide sequence represented by SEQ ID NO: 5481.

[5973] The probes having the nucleotide sequence represented by SEQ ID NOS: 66885, 66886, 66887, 66888, 66889, 66890, 66891, 66892, 66893, 66894, 66895 were selected from the ORFs having the nucleotide sequence represented by SEQ ID NO: 5482.

[5974] The probes having the nucleotide sequence represented by SEQ ID NOS: 66896, 66897, 66898, 66899, 66900, 66901, 66902, 66903, 66904, 66905, 66906 were selected from the ORFs having the nucleotide sequence represented by SEQ ID NO: 5483.

[5975] The probes having the nucleotide sequence represented by SEQ ID NOS: 66907, 66908, 66909, 66910, 66911, 66912, 66913, 66914, 66915, 66916, 66917 were selected from the ORFs having the nucleotide sequence represented by SEQ ID NO: 5484.

[5976] The probes having the nucleotide sequence represented by SEQ ID NOS: 66918, 66919, 66920, 66921, 66922, 66923, 66924, 66925, 66926, 66927, 66928 were selected from the ORFs having the nucleotide sequence represented by SEQ ID NO: 5485.

[5977] The probes having the nucleotide sequence represented by SEQ ID NOS: 66929, 66930, 66931, 66932, 66933, 66934, 66935, 66936, 66937, 66938, 66939 were selected from the ORFs having the nucleotide sequence represented by SEQ ID NO: 5486.

[5978] The probes having the nucleotide sequence represented by SEQ ID NOS: 66940, 66941, 66942, 66943, 66944, 66945, 66946, 66947, 66948, 66949, 66950 were selected from the ORFs having the nucleotide sequence represented by SEQ ID NO: 5487.

[5979] The probes having the nucleotide sequence represented by SEQ ID NOS: 66951, 66952, 66953, 66954, 66955, 66956, 66957, 66958, 66959, 66960, 66961 were selected from the ORFs having the nucleotide sequence represented by SEQ ID NO: 5488.

[5980] The probes having the nucleotide sequence represented by SEQ ID NOS: 66962, 66963, 66964, 66965, 66966, 66967, 66968, 66969, 66970, 66971, 66972 were selected from the ORFs having the nucleotide sequence represented by SEQ ID NO: 5489.

[5981] The probes having the nucleotide sequence represented by SEQ ID NOS: 66973, 66974, 66975, 66976, 66977, 66978, 66979, 66980, 66981, 66982, 66983 were selected from the ORFs having the nucleotide sequence represented by SEQ ID NO: 5490.

[5982] The probes having the nucleotide sequence represented by SEQ ID NOS: 66984, 66985, 66986, 66987, 66988, 66989, 66990, 66991, 66992, 66993, 66994 were selected from the ORFs having the nucleotide sequence represented by SEQ ID NO: 5491.

[5983] The probes having the nucleotide sequence represented by SEQ ID NOS: 66995, 66996, 66997, 66998, 66999, 67000, 67001, 67002, 67003, 67004, 67005 were selected from the ORFs having the nucleotide sequence represented by SEQ ID NO: 5492.

[5984] The probes having the nucleotide sequence represented by SEQ ID NOS: 67006, 67007, 67008, 67009, 67010, 67011, 67012, 67013, 67014, 67015, 67016 were selected from the ORFs having the nucleotide sequence represented by SEQ ID NO: 5493.

[5985] The probes having the nucleotide sequence represented by SEQ ID NOS: 67017, 67018, 67019, 67020, 67021, 67022, 67023, 67024, 67025, 67026, 67027 were selected from the ORFs having the nucleotide sequence represented by SEQ ID NO: 5494.

[5986] The probes having the nucleotide sequence represented by SEQ ID NOS: 67028, 67029, 67030, 67031, 67032, 67033, 67034, 67035, 67036, 67037, 67038 were selected from the ORFs having the nucleotide sequence represented by SEQ ID NO: 5495.

[5987] The probes having the nucleotide sequence represented by SEQ ID NOS: 67039, 67040, 67041, 67042, 67043, 67044, 67045, 67046, 67047, 67048, 67049 were selected from the ORFs having the nucleotide sequence represented by SEQ ID NO: 5496.

[5988] The probes having the nucleotide sequence represented by SEQ ID NOS: 67050, 67051, 67052, 67053, 67054, 67055, 67056, 67057, 67058, 67059, 67060 were selected from the ORFs having the nucleotide sequence represented by SEQ ID NO: 5497.

[5989] The probes having the nucleotide sequence represented by SEQ ID NOS: 67061, 67062, 67063, 67064, 67065, 67066, 67067, 67068, 67069, 67070, 67071 were selected from the ORFs having the nucleotide sequence represented by SEQ ID NO: 5498.

[5990] The probes having the nucleotide sequence represented by SEQ ID NOS: 67072, 67073, 67074, 67075, 67076, 67077, 67078, 67079, 67080, 67081, 67082 were selected from the ORFs having the nucleotide sequence represented by SEQ ID NO: 5499.

[5991] The probes having the nucleotide sequence represented by SEQ ID NOS: 67083, 67084, 67085, 67086, 67087, 67088, 67089, 67090, 67091, 67092, 67093 were selected from the ORFs having the nucleotide sequence represented by SEQ ID NO: 5500.

[5992] The probes having the nucleotide sequence represented by SEQ ID NOS: 67094, 67095, 67096, 67097, 67098, 67099, 67100, 67101, 67102, 67103, 67104 were selected from the ORFs having the nucleotide sequence represented by SEQ ID NO: 5501.

[5993] The probes having the nucleotide sequence represented by SEQ ID NOS: 67105, 67106, 67107, 67108, 67109, 67110, 67111, 67112, 67113, 67114, 67115 were selected from the ORFs having the nucleotide sequence represented by SEQ ID NO: 5502.

[5994] The probes having the nucleotide sequence represented by SEQ ID NOS: 67116, 67117, 67118, 67119, 67120, 67121, 67122, 67123, 67124, 67125, 67126 were selected from the ORFs having the nucleotide sequence represented by SEQ ID NO: 5503.

[5995] The probes having the nucleotide sequence represented by SEQ ID NOS: 67127, 67128, 67129, 67130, 67131, 67132, 67133, 67134, 67135, 67136, 67137 were selected from the ORFs having the nucleotide sequence represented by SEQ ID NO: 5504.

[5996] The probes having the nucleotide sequence represented by SEQ ID NOS: 67138, 67139, 67140, 67141, 67142, 67143, 67144, 67145, 67146, 67147, 67148 were selected from the ORFs having the nucleotide sequence represented by SEQ ID NO: 5505.

[5997] The probes having the nucleotide sequence represented by SEQ ID NOS: 67149, 67150, 67151, 67152, 67153, 67154, 67155, 67156, 67157, 67158, 67159 were selected from the ORFs having the nucleotide sequence represented by SEQ ID NO: 5506.

[5998] The probes having the nucleotide sequence represented by SEQ ID NOS: 67160, 67161, 67162, 67163, 67164, 67165, 67166, 67167, 67168, 67169, 67170 were selected from the ORFs having the nucleotide sequence represented by SEQ ID NO: 5507.

[5999] The probes having the nucleotide sequence represented by SEQ ID NOS: 67171, 67172, 67173, 67174, 67175, 67176, 67177, 67178, 67179, 67180, 67181 were selected from the ORFs having the nucleotide sequence represented by SEQ ID NO: 5508.

[6000] The probes having the nucleotide sequence represented by SEQ ID NOS: 67182, 67183, 67184, 67185, 67186, 67187, 67188, 67189, 67190, 67191, 67192 were selected from the ORFs having the nucleotide sequence represented by SEQ ID NO: 5509.

[6001] The probes having the nucleotide sequence represented by SEQ ID NOS: 67193, 67194, 67195, 67196, 67197, 67198, 67199, 67200, 67201, 67202, 67203 were selected from the ORFs having the nucleotide sequence represented by SEQ ID NO: 5510.

[6002] The probes having the nucleotide sequence represented by SEQ ID NOS: 67204, 67205, 67206, 67207, 67208, 67209, 67210, 67211, 67212, 67213, 67214 were selected from the ORFs having the nucleotide sequence represented by SEQ ID NO: 5511.

[6003] The probes having the nucleotide sequence represented by SEQ ID NOS: 67215, 67216, 67217, 67218, 67219, 67220, 67221, 67222, 67223, 67224, 67225 were selected from the ORFs having the nucleotide sequence represented by SEQ ID NO: 5512.

[6004] The probes having the nucleotide sequence represented by SEQ ID NOS: 67226, 67227, 67228, 67229, 67230, 67231, 67232, 67233, 67234, 67235, 67236 were selected from the ORFs having the nucleotide sequence represented by SEQ ID NO: 5513.

[6005] The probes having the nucleotide sequence represented by SEQ ID NOS: 67237, 67238, 67239, 67240, 67241, 67242, 67243, 67244, 67245, 67246, 67247 were selected from the ORFs having the nucleotide sequence represented by SEQ ID NO: 5514.

[6006] The probes having the nucleotide sequence represented by SEQ ID NOS: 67248, 67249, 67250, 67251, 67252, 67253, 67254, 67255, 67256, 67257, 67258 were selected from the ORFs having the nucleotide sequence represented by SEQ ID NO: 5515.

[6007] The probes having the nucleotide sequence represented by SEQ ID NOS: 67259, 67260, 67261, 67262, 67263, 67264, 67265, 67266, 67267, 67268, 67269 were selected from the ORFs having the nucleotide sequence represented by SEQ ID NO: 5516.

[6008] The probes having the nucleotide sequence represented by SEQ ID NOS: 67270, 67271, 67272, 67273, 67274, 67275, 67276, 67277, 67278, 67279, 67280 were selected from the ORFs having the nucleotide sequence represented by SEQ ID NO: 5517.

[6009] The probes having the nucleotide sequence represented by SEQ ID NOS: 67281, 67282, 67283, 67284, 67285, 67286, 67287, 67288, 67289, 67290, 67291 were selected from the ORFs having the nucleotide sequence represented by SEQ ID NO: 5518.

[6010] The probes having the nucleotide sequence represented by SEQ ID NOS: 67292, 67293, 67294, 67295, 67296, 67297, 67298, 67299, 67300, 67301, 67302 were selected from the ORFs having the nucleotide sequence represented by SEQ ID NO: 5519.

[6011] The probes having the nucleotide sequence represented by SEQ ID NOS: 67303, 67304, 67305, 67306, 67307, 67308, 67309, 67310, 67311, 67312, 67313 were selected from the ORFs having the nucleotide sequence represented by SEQ ID NO: 5520.

[6012] The probes having the nucleotide sequence represented by SEQ ID NOS: 67314, 67315, 67316, 67317, 67318, 67319, 67320, 67321, 67322, 67323, 67324 were selected from the ORFs having the nucleotide sequence represented by SEQ ID NO: 5521.

[6013] The probes having the nucleotide sequence represented by SEQ ID NOS: 67325, 67326, 67327, 67328, 67329, 67330, 67331, 67332, 67333, 67334, 67335 were selected from the ORFs having the nucleotide sequence represented by SEQ ID NO: 5522.

[6014] The probes having the nucleotide sequence represented by SEQ ID NOS: 67336, 67337, 67338, 67339, 67340, 67341, 67342, 67343, 67344, 67345, 67346 were selected from the ORFs having the nucleotide sequence represented by SEQ ID NO: 5523.

[6015] The probes having the nucleotide sequence represented by SEQ ID NOS: 67347, 67348, 67349, 67350, 67351, 67352, 67353, 67354, 67355, 67356, 67357, 67358, 67359, 67360, 67361, 67362, 67363, 67364, 67365, 67366, 67367, 67368 were selected from the ORFs having the nucleotide sequence represented by SEQ ID NO: 5524.

[6016] The probes having the nucleotide sequence represented by SEQ ID NOS: 67369, 67370, 67371, 67372, 67373, 67374, 67375, 67376, 67377, 67378, 67379 were selected from the ORFs having the nucleotide sequence represented by SEQ ID NO: 5525.

[6017] The probes having the nucleotide sequence represented by SEQ ID NOS: 67380, 67381, 67382, 67383, 67384, 67385, 67386, 67387, 67388, 67389, 67390 were selected from the ORFs having the nucleotide sequence represented by SEQ ID NO: 5526.

[6018] The probes having the nucleotide sequence represented by SEQ ID NOS: 67391, 67392, 67393, 67394, 67395, 67396, 67397, 67398, 67399, 67400, 67401 were selected from the ORFs having the nucleotide sequence represented by SEQ ID NO: 5527.

[6019] The probes having the nucleotide sequence represented by SEQ ID NOS: 67402, 67403, 67404, 67405, 67406, 67407, 67408, 67409, 67410, 67411, 67412 were selected from the ORFs having the nucleotide sequence represented by SEQ ID NO: 5528.

[6020] The probes having the nucleotide sequence represented by SEQ ID NOS: 67413, 67414, 67415, 67416, 67417, 67418, 67419, 67420, 67421, 67422, 67423 were selected from the ORFs having the nucleotide sequence represented by SEQ ID NO: 5529.

[6021] The probes having the nucleotide sequence represented by SEQ ID NOS: 67424, 67425, 67426, 67427, 67428, 67429, 67430, 67431, 67432, 67433, 67434 were selected from the ORFs having the nucleotide sequence represented by SEQ ID NO: 5530.

[6022] The probes having the nucleotide sequence represented by SEQ ID NOS: 67435, 67436, 67437, 67438, 67439, 67440, 67441, 67442, 67443, 67444, 67445 were selected from the ORFs having the nucleotide sequence represented by SEQ ID NO: 5531.

[6023] The probes having the nucleotide sequence represented by SEQ ID NOS: 67446, 67447, 67448, 67449, 67450, 67451, 67452, 67453, 67454, 67455, 67456, 67457, 67458, 67459, 67460, 67461, 67462, 67463, 67464, 67465, 67466, 67467 were selected from the ORFs having the nucleotide sequence represented by SEQ ID NO: 5532.

[6024] The probes having the nucleotide sequence represented by SEQ ID NOS: 67468, 67469, 67470, 67471, 67472, 67473, 67474, 67475, 67476, 67477, 67478 were selected from the ORFs having the nucleotide sequence represented by SEQ ID NO: 5533.

[6025] The probes having the nucleotide sequence represented by SEQ ID NOS: 67479, 67480, 67481, 67482, 67483, 67484, 67485, 67486, 67487, 67488, 67489 were selected from the ORFs having the nucleotide sequence represented by SEQ ID NO: 5534.

[6026] The probes having the nucleotide sequence represented by SEQ ID NOS: 67490, 67491, 67492, 67493, 67494, 67495, 67496, 67497, 67498, 67499, 67500 were selected from the ORFs having the nucleotide sequence represented by SEQ ID NO: 5535.

[6027] The probes having the nucleotide sequence represented by SEQ ID NOS: 67501, 67502, 67503, 67504, 67505, 67506, 67507, 67508, 67509, 67510, 67511 were selected from the ORFs having the nucleotide sequence represented by SEQ ID NO: 5536.

[6028] The probes having the nucleotide sequence represented by SEQ ID NOS: 67512, 67513, 67514, 67515, 67516, 67517, 67518, 67519, 67520, 67521, 67522 were selected from the ORFs having the nucleotide sequence represented by SEQ ID NO: 5537.

[6029] The probes having the nucleotide sequence represented by SEQ ID NOS: 67523, 67524, 67525, 67526, 67527, 67528, 67529, 67530, 67531, 67532, 67533 were selected from the ORFs having the nucleotide sequence represented by SEQ ID NO: 5538.

[6030] The probes having the nucleotide sequence represented by SEQ ID NOS: 67534, 67535, 67536, 67537, 67538, 67539, 67540, 67541, 67542, 67543, 67544 were selected from the ORFs having the nucleotide sequence represented by SEQ ID NO: 5539.

[6031] The probes having the nucleotide sequence represented by SEQ ID NOS: 67545, 67546, 67547, 67548, 67549, 67550, 67551, 67552, 67553, 67554, 67555 were selected from the ORFs having the nucleotide sequence represented by SEQ ID NO: 5540.

[6032] The probes having the nucleotide sequence represented by SEQ ID NOS: 67556, 67557, 67558, 67559, 67560, 67561, 67562, 67563, 67564, 67565, 67566 were selected from the ORFs having the nucleotide sequence represented by SEQ ID NO: 5541.

[6033] The probes having the nucleotide sequence represented by SEQ ID NOS: 67567, 67568, 67569, 67570, 67571, 67572, 67573, 67574, 67575, 67576, 67577 were selected from the ORFs having the nucleotide sequence represented by SEQ ID NO: 5542.

[6034] The probes having the nucleotide sequence represented by SEQ ID NOS: 67578, 67579, 67580, 67581, 67582, 67583, 67584, 67585, 67586, 67587, 67588 were selected from the ORFs having the nucleotide sequence represented by SEQ ID NO: 5543.

[6035] The probes having the nucleotide sequence represented by SEQ ID NOS: 67589, 67590, 67591, 67592, 67593, 67594, 67595, 67596, 67597, 67598, 67599 were selected from the ORFs having the nucleotide sequence represented by SEQ ID NO: 5544.

[6036] The probes having the nucleotide sequence represented by SEQ ID NOS: 67600, 67601, 67602, 67603, 67604, 67605, 67606, 67607, 67608, 67609, 67610 were selected from the ORFs having the nucleotide sequence represented by SEQ ID NO: 5545.

[6037] The probes having the nucleotide sequence represented by SEQ ID NOS: 67611, 67612, 67613, 67614, 67615, 67616, 67617, 67618, 67619, 67620, 67621 were selected from the ORFs having the nucleotide sequence represented by SEQ ID NO: 5546.

[6038] The probes having the nucleotide sequence represented by SEQ ID NOS: 67622, 67623, 67624, 67625, 67626, 67627, 67628, 67629, 67630, 67631, 67632 were selected from the ORFs having the nucleotide sequence represented by SEQ ID NO: 5547.

[6039] The probes having the nucleotide sequence represented by SEQ ID NOS: 67633, 67634, 67635, 67636, 67637, 67638, 67639, 67640, 67641, 67642, 67643 were selected from the ORFs having the nucleotide sequence represented by SEQ ID NO: 5548.

[6040] The probes having the nucleotide sequence represented by SEQ ID NOS: 67644, 67645, 67646, 67647, 67648, 67649, 67650, 67651, 67652, 67653, 67654 were selected from the ORFs having the nucleotide sequence represented by SEQ ID NO: 5549.

[6041] The probes having the nucleotide sequence represented by SEQ ID NOS: 67655, 67656, 67657, 67658, 67659, 67660, 67661, 67662, 67663, 67664, 67665 were selected from the ORFs having the nucleotide sequence represented by SEQ ID NO: 5550.

[6042] The probes having the nucleotide sequence represented by SEQ ID NOS: 67666, 67667, 67668, 67669, 67670, 67671, 67672, 67673, 67674, 67675, 67676, 67677, 67678, 67679, 67680, 67681, 67682, 67683, 67684, 67685, 67686, 67687 were selected from the ORFs having the nucleotide sequence represented by SEQ ID NO: 5551.

[6043] The probes having the nucleotide sequence represented by SEQ ID NOS: 67688, 67689, 67690, 67691, 67692, 67693, 67694, 67695, 67696, 67697, 67698 were selected from the ORFs having the nucleotide sequence represented by SEQ ID NO: 5552.

[6044] The probes having the nucleotide sequence represented by SEQ ID NOS: 67699, 67700, 67701, 67702, 67703, 67704, 67705, 67706, 67707, 67708, 67709 were selected from the ORFs having the nucleotide sequence represented by SEQ ID NO: 5553.

[6045] The probes having the nucleotide sequence represented by SEQ ID NOS: 67710, 67711, 67712, 67713, 67714, 67715, 67716, 67717, 67718, 67719, 67720 were selected from the ORFs having the nucleotide sequence represented by SEQ ID NO: 5554.

[6046] The probes having the nucleotide sequence represented by SEQ ID NOS: 67721, 67722, 67723, 67724, 67725, 67726, 67727, 67728, 67729, 67730, 67731 were selected from the ORFs having the nucleotide sequence represented by SEQ ID NO: 5555.

[6047] The probes having the nucleotide sequence represented by SEQ ID NOS: 67732, 67733, 67734, 67735, 67736, 67737, 67738, 67739, 67740, 67741, 67742 were selected from the ORFs having the nucleotide sequence represented by SEQ ID NO: 5556.

[6048] The probes having the nucleotide sequence represented by SEQ ID NOS: 67743, 67744, 67745, 67746, 67747, 67748, 67749, 67750, 67751, 67752, 67753 were selected from the ORFs having the nucleotide sequence represented by SEQ ID NO: 5557.

[6049] The probes having the nucleotide sequence represented by SEQ ID NOS: 67754, 67755, 67756, 67757, 67758, 67759, 67760, 67761, 67762, 67763, 67764 were selected from the ORFs having the nucleotide sequence represented by SEQ ID NO: 5558.

[6050] The probes having the nucleotide sequence represented by SEQ ID NOS: 67765, 67766, 67767, 67768, 67769, 67770, 67771, 67772, 67773, 67774, 67775 were selected from the ORFs having the nucleotide sequence represented by SEQ ID NO: 5559.

[6051] The probes having the nucleotide sequence represented by SEQ ID NOS: 67776, 67777, 67778, 67779, 67780, 67781, 67782, 67783, 67784, 67785, 67786 were selected from the ORFs having the nucleotide sequence represented by SEQ ID NO: 5560.

[6052] The probes having the nucleotide sequence represented by SEQ ID NOS: 67787, 67788, 67789, 67790, 67791, 67792, 67793, 67794, 67795, 67796, 67797 were selected from the ORFs having the nucleotide sequence represented by SEQ ID NO: 5561.

[6053] The probes having the nucleotide sequence represented by SEQ ID NOS: 67798, 67799, 67800, 67801, 67802, 67803, 67804, 67805, 67806, 67807, 67808 were selected from the ORFs having the nucleotide sequence represented by SEQ ID NO: 5562.

[6054] The probes having the nucleotide sequence represented by SEQ ID NOS: 67809, 67810, 67811, 67812, 67813, 67814, 67815, 67816, 67817, 67818, 67819 were selected from the ORFs having the nucleotide sequence represented by SEQ ID NO: 5563.

[6055] The probes having the nucleotide sequence represented by SEQ ID NOS: 67820, 67821, 67822, 67823, 67824, 67825, 67826, 67827, 67828, 67829, 67830 were selected from the ORFs having the nucleotide sequence represented by SEQ ID NO: 5564.

[6056] The probes having the nucleotide sequence represented by SEQ ID NOS: 67831, 67832, 67833, 67834, 67835, 67836, 67837, 67838, 67839, 67840, 67841 were selected from the ORFs having the nucleotide sequence represented by SEQ ID NO: 5565.

[6057] The probes having the nucleotide sequence represented by SEQ ID NOS: 67842, 67843, 67844, 67845, 67846, 67847, 67848, 67849, 67850, 67851, 67852 were selected from the ORFs having the nucleotide sequence represented by SEQ ID NO: 5566.

[6058] The probes having the nucleotide sequence represented by SEQ ID NOS: 67853, 67854, 67855, 67856, 67857, 67858, 67859, 67860, 67861, 67862, 67863 were selected from the ORFs having the nucleotide sequence represented by SEQ ID NO: 5567.

[6059] The probes having the nucleotide sequence represented by SEQ ID NOS: 67864, 67865, 67866, 67867, 67868, 67869, 67870, 67871, 67872, 67873, 67874 were selected from the ORFs having the nucleotide sequence represented by SEQ ID NO: 5568.

[6060] The probes having the nucleotide sequence represented by SEQ ID NOS: 67875, 67876, 67877, 67878, 67879, 67880, 67881, 67882, 67883, 67884, 67885 were selected from the ORFs having the nucleotide sequence represented by SEQ ID NO: 5569.

[6061] The probes having the nucleotide sequence represented by SEQ ID NOS: 67886, 67887, 67888, 67889, 67890, 67891, 67892, 67893, 67894, 67895, 67896 were selected from the ORFs having the nucleotide sequence represented by SEQ ID NO: 5570.

[6062] The probes having the nucleotide sequence represented by SEQ ID NOS: 67897, 67898, 67899, 67900, 67901, 67902, 67903, 67904, 67905, 67906, 67907 were selected from the ORFs having the nucleotide sequence represented by SEQ ID NO: 5571.

[6063] The probes having the nucleotide sequence represented by SEQ ID NOS: 67908, 67909, 67910, 67911, 67912, 67913, 67914, 67915, 67916, 67917, 67918 were selected from the ORFs having the nucleotide sequence represented by SEQ ID NO: 5572.

[6064] The probes having the nucleotide sequence represented by SEQ ID NOS: 67919, 67920, 67921, 67922, 67923, 67924, 67925, 67926, 67927, 67928, 67929 were selected from the ORFs having the nucleotide sequence represented by SEQ ID NO: 5573.

[6065] The probes having the nucleotide sequence represented by SEQ ID NOS: 67930, 67931, 67932, 67933, 67934, 67935, 67936, 67937, 67938, 67939, 67940 were selected from the ORFs having the nucleotide sequence represented by SEQ ID NO: 5574.

[6066] The probes having the nucleotide sequence represented by SEQ ID NOS: 67941, 67942, 67943, 67944, 67945, 67946, 67947, 67948, 67949, 67950, 67951 were selected from the ORFs having the nucleotide sequence represented by SEQ ID NO: 5575.

[6067] The probes having the nucleotide sequence represented by SEQ ID NOS: 67952, 67953, 67954, 67955, 67956, 67957, 67958, 67959, 67960, 67961, 67962 were selected from the ORFs having the nucleotide sequence represented by SEQ ID NO: 5576.

[6068] The probes having the nucleotide sequence represented by SEQ ID NOS: 67963, 67964, 67965, 67966, 67967, 67968, 67969, 67970, 67971, 67972, 67973 were selected from the ORFs having the nucleotide sequence represented by SEQ ID NO: 5577.

[6069] The probes having the nucleotide sequence represented by SEQ ID NOS: 67974, 67975, 67976, 67977, 67978, 67979, 67980, 67981, 67982, 67983, 67984 were selected from the ORFs having the nucleotide sequence represented by SEQ ID NO: 5578.

[6070] The probes having the nucleotide sequence represented by SEQ ID NOS: 67985, 67986, 67987, 67988, 67989, 67990, 67991, 67992, 67993, 67994, 67995 were selected from the ORFs having the nucleotide sequence represented by SEQ ID NO: 5579.

[6071] The probes having the nucleotide sequence represented by SEQ ID NOS: 67996, 67997, 67998, 67999, 68000, 68001, 68002, 68003, 68004, 68005, 68006 were selected from the ORFs having the nucleotide sequence represented by SEQ ID NO: 5580.

[6072] The probes having the nucleotide sequence represented by SEQ ID NOS: 68007, 68008, 68009, 68010, 68011, 68012, 68013, 68014, 68015, 68016, 68017 were selected from the ORFs having the nucleotide sequence represented by SEQ ID NO: 5581.

[6073] The probes having the nucleotide sequence represented by SEQ ID NOS: 68018, 68019, 68020, 68021, 68022, 68023, 68024, 68025, 68026, 68027, 68028 were selected from the ORFs having the nucleotide sequence represented by SEQ ID NO: 5582.

[6074] The probes having the nucleotide sequence represented by SEQ ID NOS: 68029, 68030, 68031, 68032, 68033, 68034, 68035, 68036, 68037, 68038, 68039 were selected from the ORFs having the nucleotide sequence represented by SEQ ID NO: 5583.

[6075] The probes having the nucleotide sequence represented by SEQ ID NOS: 68040, 68041, 68042, 68043, 68044, 68045, 68046, 68047, 68048, 68049, 68050 were selected from the ORFs having the nucleotide sequence represented by SEQ ID NO: 5584.

[6076] The probes having the nucleotide sequence represented by SEQ ID NOS: 68051, 68052, 68053, 68054, 68055, 68056, 68057, 68058, 68059, 68060, 68061 were selected from the ORFs having the nucleotide sequence represented by SEQ ID NO: 5585.

[6077] The probes having the nucleotide sequence represented by SEQ ID NOS: 68062, 68063, 68064, 68065, 68066, 68067, 68068, 68069, 68070, 68071, 68072 were selected from the ORFs having the nucleotide sequence represented by SEQ ID NO: 5586.

[6078] The probes having the nucleotide sequence represented by SEQ ID NOS: 68073, 68074, 68075, 68076, 68077, 68078, 68079, 68080, 68081, 68082, 68083 were selected from the ORFs having the nucleotide sequence represented by SEQ ID NO: 5587.

[6079] The probes having the nucleotide sequence represented by SEQ ID NOS: 68084, 68085, 68086, 68087, 68088, 68089, 68090, 68091, 68092, 68093, 68094 were selected from the ORFs having the nucleotide sequence represented by SEQ ID NO: 5588.

[6080] The probes having the nucleotide sequence represented by SEQ ID NOS: 68095, 68096, 68097, 68098, 68099, 68100, 68101, 68102, 68103, 68104, 68105 were selected from the ORFs having the nucleotide sequence represented by SEQ ID NO: 5589.

[6081] The probes having the nucleotide sequence represented by SEQ ID NOS: 68106, 68107, 68108, 68109, 68110, 68111, 68112, 68113, 68114, 68115, 68116 were selected from the ORFs having the nucleotide sequence represented by SEQ ID NO: 5590.

[6082] The probes having the nucleotide sequence represented by SEQ ID NOS: 68117, 68118, 68119, 68120, 68121, 68122, 68123, 68124, 68125, 68126, 68127 were selected from the ORFs having the nucleotide sequence represented by SEQ ID NO: 5591.

[6083] The probes having the nucleotide sequence represented by SEQ ID NOS: 68128, 68129, 68130, 68131, 68132, 68133, 68134, 68135, 68136, 68137, 68138 were selected from the ORFs having the nucleotide sequence represented by SEQ ID NO: 5592.

[6084] The probes having the nucleotide sequence represented by SEQ ID NOS: 68139, 68140, 68141, 68142, 68143, 68144, 68145, 68146, 68147, 68148, 68149 were selected from the ORFs having the nucleotide sequence represented by SEQ ID NO: 5593.

[6085] The probes having the nucleotide sequence represented by SEQ ID NOS: 68150, 68151, 68152, 68153, 68154, 68155, 68156, 68157, 68158, 68159, 68160 were selected from the ORFs having the nucleotide sequence represented by SEQ ID NO: 5594.

[6086] The probes having the nucleotide sequence represented by SEQ ID NOS: 68161, 68162, 68163, 68164, 68165, 68166, 68167, 68168, 68169, 68170, 68171 were selected from the ORFs having the nucleotide sequence represented by SEQ ID NO: 5595.

[6087] The probes having the nucleotide sequence represented by SEQ ID NOS: 68172, 68173, 68174, 68175, 68176, 68177, 68178, 68179, 68180, 68181, 68182 were selected from the ORFs having the nucleotide sequence represented by SEQ ID NO: 5596.

[6088] The probes having the nucleotide sequence represented by SEQ ID NOS: 68183, 68184, 68185, 68186, 68187, 68188, 68189, 68190, 68191, 68192, 68193 were selected from the ORFs having the nucleotide sequence represented by SEQ ID NO: 5597.

[6089] The probes having the nucleotide sequence represented by SEQ ID NOS: 68194, 68195, 68196, 68197, 68198, 68199, 68200, 68201, 68202, 68203, 68204 were selected from the ORFs having the nucleotide sequence represented by SEQ ID NO: 5598.

[6090] The probes having the nucleotide sequence represented by SEQ ID NOS: 68205, 68206, 68207, 68208, 68209, 68210, 68211, 68212, 68213, 68214, 68215 were selected from the ORFs having the nucleotide sequence represented by SEQ ID NO: 5599.

[6091] The probes having the nucleotide sequence represented by SEQ ID NOS: 68216, 68217, 68218, 68219, 68220, 68221, 68222, 68223, 68224, 68225, 68226 were selected from the ORFs having the nucleotide sequence represented by SEQ ID NO: 5600.

[6092] The probes having the nucleotide sequence represented by SEQ ID NOS: 68227, 68228, 68229, 68230, 68231, 68232, 68233, 68234, 68235, 68236, 68237 were selected from the ORFs having the nucleotide sequence represented by SEQ ID NO: 5601.

[6093] The probes having the nucleotide sequence represented by SEQ ID NOS: 68238, 68239, 68240, 68241, 68242, 68243, 68244, 68245, 68246, 68247, 68248 were selected from the ORFs having the nucleotide sequence represented by SEQ ID NO: 5602.

[6094] The probes having the nucleotide sequence represented by SEQ ID NOS: 68249, 68250, 68251, 68252, 68253, 68254, 68255, 68256, 68257, 68258, 68259 were selected from the ORFs having the nucleotide sequence represented by SEQ ID NO: 5603.

[6095] The probes having the nucleotide sequence represented by SEQ ID NOS: 68260, 68261, 68262, 68263, 68264, 68265, 68266, 68267, 68268, 68269, 68270 were selected from the ORFs having the nucleotide sequence represented by SEQ ID NO: 5604.

[6096] The probes having the nucleotide sequence represented by SEQ ID NOS: 68271, 68272, 68273, 68274, 68275, 68276, 68277, 68278, 68279, 68280, 68281 were selected from the ORFs having the nucleotide sequence represented by SEQ ID NO: 5605.

[6097] The probes having the nucleotide sequence represented by SEQ ID NOS: 68282, 68283, 68284, 68285, 68286, 68287, 68288, 68289, 68290, 68291, 68292 were selected from the ORFs having the nucleotide sequence represented by SEQ ID NO: 5606.

[6098] The probes having the nucleotide sequence represented by SEQ ID NOS: 68293, 68294, 68295, 68296, 68297, 68298, 68299, 68300, 68301, 68302, 68303 were selected from the ORFs having the nucleotide sequence represented by SEQ ID NO: 5607.

[6099] The probes having the nucleotide sequence represented by SEQ ID NOS: 68304, 68305, 68306, 68307, 68308, 68309, 68310, 68311, 68312, 68313, 68314 were selected from the ORFs having the nucleotide sequence represented by SEQ ID NO: 5608.

[6100] The probes having the nucleotide sequence represented by SEQ ID NOS: 68315, 68316, 68317, 68318, 68319, 68320, 68321, 68322, 68323, 68324, 68325 were selected from the ORFs having the nucleotide sequence represented by SEQ ID NO: 5609.

[6101] The probes having the nucleotide sequence represented by SEQ ID NOS: 68326, 68327, 68328, 68329, 68330, 68331, 68332, 68333, 68334, 68335, 68336 were selected from the ORFs having the nucleotide sequence represented by SEQ ID NO: 5610.

[6102] The probes having the nucleotide sequence represented by SEQ ID NOS: 68337, 68338, 68339, 68340, 68341, 68342, 68343, 68344, 68345, 68346, 68347 were selected from the ORFs having the nucleotide sequence represented by SEQ ID NO: 5611.

[6103] The probes having the nucleotide sequence represented by SEQ ID NOS: 68348, 68349, 68350, 68351, 68352, 68353, 68354, 68355, 68356, 68357, 68358 were selected from the ORFs having the nucleotide sequence represented by SEQ ID NO: 5612.

[6104] The probes having the nucleotide sequence represented by SEQ ID NOS: 68359, 68360, 68361, 68362, 68363, 68364, 68365, 68366, 68367, 68368, 68369 were selected from the ORFs having the nucleotide sequence represented by SEQ ID NO: 5613.

[6105] The probes having the nucleotide sequence represented by SEQ ID NOS: 68370, 68371, 68372, 68373, 68374, 68375, 68376, 68377, 68378, 68379, 68380 were selected from the ORFs having the nucleotide sequence represented by SEQ ID NO: 5614.

[6106] The probes having the nucleotide sequence represented by SEQ ID NOS: 68381, 68382, 68383, 68384, 68385, 68386, 68387, 68388, 68389, 68390, 68391 were selected from the ORFs having the nucleotide sequence represented by SEQ ID NO: 5615.

[6107] The probes having the nucleotide sequence represented by SEQ ID NOS: 68392, 68393, 68394, 68395, 68396, 68397, 68398, 68399, 68400, 68401, 68402 were selected from the ORFs having the nucleotide sequence represented by SEQ ID NO: 5616.

[6108] The probes having the nucleotide sequence represented by SEQ ID NOS: 68403, 68404, 68405, 68406, 68407, 68408, 68409, 68410, 68411, 68412, 68413 were selected from the ORFs having the nucleotide sequence represented by SEQ ID NO: 5617.

[6109] The probes having the nucleotide sequence represented by SEQ ID NOS: 68414, 68415, 68416, 68417, 68418, 68419, 68420, 68421, 68422, 68423, 68424 were selected from the ORFs having the nucleotide sequence represented by SEQ ID NO: 5618.

[6110] The probes having the nucleotide sequence represented by SEQ ID NOS: 68425, 68426, 68427, 68428, 68429, 68430, 68431, 68432, 68433, 68434, 68435 were selected from the ORFs having the nucleotide sequence represented by SEQ ID NO: 5619.

[6111] The probes having the nucleotide sequence represented by SEQ ID NOS: 68436, 68437, 68438, 68439, 68440, 68441, 68442, 68443, 68444, 68445, 68446 were selected from the ORFs having the nucleotide sequence represented by SEQ ID NO: 5620.

[6112] The probes having the nucleotide sequence represented by SEQ ID NOS: 68447, 68448, 68449, 68450, 68451, 68452, 68453, 68454, 68455, 68456, 68457 were selected from the ORFs having the nucleotide sequence represented by SEQ ID NO: 5621.

[6113] The probes having the nucleotide sequence represented by SEQ ID NOS: 68458, 68459, 68460, 68461, 68462, 68463, 68464, 68465, 68466, 68467, 68468 were selected from the ORFs having the nucleotide sequence represented by SEQ ID NO: 5622.

[6114] The probes having the nucleotide sequence represented by SEQ ID NOS: 68469, 68470, 68471, 68472, 68473, 68474, 68475, 68476, 68477, 68478, 68479 were selected from the ORFs having the nucleotide sequence represented by SEQ ID NO: 5623.

[6115] The probes having the nucleotide sequence represented by SEQ ID NOS: 68480, 68481, 68482, 68483, 68484, 68485, 68486, 68487, 68488, 68489, 68490 were selected from the ORFs having the nucleotide sequence represented by SEQ ID NO: 5624.

[6116] The probes having the nucleotide sequence represented by SEQ ID NOS: 68491, 68492, 68493, 68494, 68495, 68496, 68497, 68498, 68499, 68500, 68501 were selected from the ORFs having the nucleotide sequence represented by SEQ ID NO: 5625.

[6117] The probes having the nucleotide sequence represented by SEQ ID NOS: 68502, 68503, 68504, 68505, 68506, 68507, 68508, 68509, 68510, 68511, 68512 were selected from the ORFs having the nucleotide sequence represented by SEQ ID NO: 5626.

[6118] The probes having the nucleotide sequence represented by SEQ ID NOS: 68513, 68514, 68515, 68516, 68517, 68518, 68519, 68520, 68521, 68522, 68523 were selected from the ORFs having the nucleotide sequence represented by SEQ ID NO: 5627.

[6119] The probes having the nucleotide sequence represented by SEQ ID NOS: 68524, 68525, 68526, 68527, 68528, 68529, 68530, 68531, 68532, 68533, 68534 were selected from the ORFs having the nucleotide sequence represented by SEQ ID NO: 5628.

[6120] The probes having the nucleotide sequence represented by SEQ ID NOS: 68535, 68536, 68537, 68538, 68539, 68540, 68541, 68542, 68543, 68544, 68545 were selected from the ORFs having the nucleotide sequence represented by SEQ ID NO: 5629.

[6121] The probes having the nucleotide sequence represented by SEQ ID NOS: 68546, 68547, 68548, 68549, 68550, 68551, 68552, 68553, 68554, 68555, 68556 were selected from the ORFs having the nucleotide sequence represented by SEQ ID NO: 5630.

[6122] The probes having the nucleotide sequence represented by SEQ ID NOS: 68557, 68558, 68559, 68560, 68561, 68562, 68563, 68564, 68565, 68566, 68567 were selected from the ORFs having the nucleotide sequence represented by SEQ ID NO: 5631.

[6123] The probes having the nucleotide sequence represented by SEQ ID NOS: 68568, 68569, 68570, 68571, 68572, 68573, 68574, 68575, 68576, 68577, 68578 were selected from the ORFs having the nucleotide sequence represented by SEQ ID NO: 5632.

[6124] The probes having the nucleotide sequence represented by SEQ ID NOS: 68579, 68580, 68581, 68582, 68583, 68584, 68585, 68586, 68587, 68588, 68589 were selected from the ORFs having the nucleotide sequence represented by SEQ ID NO: 5633.

[6125] The probes having the nucleotide sequence represented by SEQ ID NOS: 68590, 68591, 68592, 68593, 68594, 68595, 68596, 68597, 68598, 68599, 68600 were selected from the ORFs having the nucleotide sequence represented by SEQ ID NO: 5634.

[6126] The probes having the nucleotide sequence represented by SEQ ID NOS: 68601, 68602, 68603, 68604, 68605, 68606, 68607, 68608, 68609, 68610, 68611 were selected from the ORFs having the nucleotide sequence represented by SEQ ID NO: 5635.

[6127] The probes having the nucleotide sequence represented by SEQ ID NOS: 68612, 68613, 68614, 68615, 68616, 68617, 68618, 68619, 68620, 68621, 68622 were selected from the ORFs having the nucleotide sequence represented by SEQ ID NO: 5636.

[6128] The probes having the nucleotide sequence represented by SEQ ID NOS: 68623, 68624, 68625, 68626, 68627, 68628, 68629, 68630, 68631, 68632, 68633 were selected from the ORFs having the nucleotide sequence represented by SEQ ID NO: 5637.

[6129] The probes having the nucleotide sequence represented by SEQ ID NOS: 68634, 68635, 68636, 68637, 68638, 68639, 68640, 68641, 68642, 68643, 68644 were selected from the ORFs having the nucleotide sequence represented by SEQ ID NO: 5638.

[6130] The probes having the nucleotide sequence represented by SEQ ID NOS: 68645, 68646, 68647, 68648, 68649, 68650, 68651, 68652, 68653, 68654, 68655 were selected from the ORFs having the nucleotide sequence represented by SEQ ID NO: 5639.

[6131] The probes having the nucleotide sequence represented by SEQ ID NOS: 68656, 68657, 68658, 68659, 68660, 68661, 68662, 68663, 68664, 68665, 68666 were selected from the ORFs having the nucleotide sequence represented by SEQ ID NO: 5640.

[6132] The probes having the nucleotide sequence represented by SEQ ID NOS: 68667, 68668, 68669, 68670, 68671, 68672, 68673, 68674, 68675, 68676, 68677 were selected from the ORFs having the nucleotide sequence represented by SEQ ID NO: 5641.

[6133] The probes having the nucleotide sequence represented by SEQ ID NOS: 68678, 68679, 68680, 68681, 68682, 68683, 68684, 68685, 68686, 68687, 68688 were selected from the ORFs having the nucleotide sequence represented by SEQ ID NO: 5642.

[6134] The probes having the nucleotide sequence represented by SEQ ID NOS: 68689, 68690, 68691, 68692, 68693, 68694, 68695, 68696, 68697, 68698, 68699 were selected from the ORFs having the nucleotide sequence represented by SEQ ID NO: 5643.

[6135] The probes having the nucleotide sequence represented by SEQ ID NOS: 68700, 68701, 68702, 68703, 68704, 68705, 68706, 68707, 68708, 68709, 68710 were selected from the ORFs having the nucleotide sequence represented by SEQ ID NO: 5644.

[6136] The probes having the nucleotide sequence represented by SEQ ID NOS: 68711, 68712, 68713, 68714, 68715, 68716, 68717, 68718, 68719, 68720, 68721 were selected from the ORFs having the nucleotide sequence represented by SEQ ID NO: 5645.

[6137] The probes having the nucleotide sequence represented by SEQ ID NOS: 68722, 68723, 68724, 68725, 68726, 68727, 68728, 68729, 68730, 68731, 68732 were selected from the ORFs having the nucleotide sequence represented by SEQ ID NO: 5646.

[6138] The probes having the nucleotide sequence represented by SEQ ID NOS: 68733, 68734, 68735, 68736, 68737, 68738, 68739, 68740, 68741, 68742, 68743 were selected from the ORFs having the nucleotide sequence represented by SEQ ID NO: 5647.

[6139] The probes having the nucleotide sequence represented by SEQ ID NOS: 68744, 68745, 68746, 68747, 68748, 68749, 68750, 68751, 68752, 68753, 68754 were selected from the ORFs having the nucleotide sequence represented by SEQ ID NO: 5648.

[6140] The probes having the nucleotide sequence represented by SEQ ID NOS: 68755, 68756, 68757, 68758, 68759, 68760, 68761, 68762, 68763, 68764, 68765 were selected from the ORFs having the nucleotide sequence represented by SEQ ID NO: 5649.

[6141] The probes having the nucleotide sequence represented by SEQ ID NOS: 68766, 68767, 68768, 68769, 68770, 68771, 68772, 68773, 68774, 68775, 68776 were selected from the ORFs having the nucleotide sequence represented by SEQ ID NO: 5650.

[6142] The probes having the nucleotide sequence represented by SEQ ID NOS: 68777, 68778, 68779, 68780, 68781, 68782, 68783, 68784, 68785, 68786, 68787 were selected from the ORFs having the nucleotide sequence represented by SEQ ID NO: 5651.

[6143] The probes having the nucleotide sequence represented by SEQ ID NOS: 68788, 68789, 68790, 68791, 68792, 68793, 68794, 68795, 68796, 68797, 68798 were selected from the ORFs having the nucleotide sequence represented by SEQ ID NO: 5652.

[6144] The probes having the nucleotide sequence represented by SEQ ID NOS: 68799, 68800, 68801, 68802, 68803, 68804, 68805, 68806, 68807, 68808, 68809 were selected from the ORFs having the nucleotide sequence represented by SEQ ID NO: 5653.

[6145] The probes having the nucleotide sequence represented by SEQ ID NOS: 68810, 68811, 68812, 68813, 68814, 68815, 68816, 68817, 68818, 68819, 68820 were selected from the ORFs having the nucleotide sequence represented by SEQ ID NO: 5654.

[6146] The probes having the nucleotide sequence represented by SEQ ID NOS: 68821, 68822, 68823, 68824, 68825, 68826, 68827, 68828, 68829, 68830, 68831 were selected from the ORFs having the nucleotide sequence represented by SEQ ID NO: 5655.

[6147] The probes having the nucleotide sequence represented by SEQ ID NOS: 68832, 68833, 68834, 68835, 68836, 68837, 68838, 68839, 68840, 68841, 68842 were selected from the ORFs having the nucleotide sequence represented by SEQ ID NO: 5656.

[6148] The probes having the nucleotide sequence represented by SEQ ID NOS: 68843, 68844, 68845, 68846, 68847, 68848, 68849, 68850, 68851, 68852, 68853 were selected from the ORFs having the nucleotide sequence represented by SEQ ID NO: 5657.

[6149] The probes having the nucleotide sequence represented by SEQ ID NOS: 68854, 68855, 68856, 68857, 68858, 68859, 68860, 68861, 68862, 68863, 68864 were selected from the ORFs having the nucleotide sequence represented by SEQ ID NO: 5658.

[6150] The probes having the nucleotide sequence represented by SEQ ID NOS: 68865, 68866, 68867, 68868, 68869, 68870, 68871, 68872, 68873, 68874, 68875 were selected from the ORFs having the nucleotide sequence represented by SEQ ID NO: 5659.

[6151] The probes having the nucleotide sequence represented by SEQ ID NOS: 68876, 68877, 68878, 68879, 68880, 68881, 68882, 68883, 68884, 68885, 68886 were selected from the ORFs having the nucleotide sequence represented by SEQ ID NO: 5660.

[6152] The probes having the nucleotide sequence represented by SEQ ID NOS: 68887, 68888, 68889, 68890, 68891, 68892, 68893, 68894, 68895, 68896, 68897 were selected from the ORFs having the nucleotide sequence represented by SEQ ID NO: 5661.

[6153] The probes having the nucleotide sequence represented by SEQ ID NOS: 68898, 68899, 68900, 68901, 68902, 68903, 68904, 68905, 68906, 68907, 68908 were selected from the ORFs having the nucleotide sequence represented by SEQ ID NO: 5662.

[6154] The probes having the nucleotide sequence represented by SEQ ID NOS: 68909, 68910, 68911, 68912, 68913, 68914, 68915, 68916, 68917, 68918, 68919 were selected from the ORFs having the nucleotide sequence represented by SEQ ID NO: 5663.

[6155] The probes having the nucleotide sequence represented by SEQ ID NOS: 68920, 68921, 68922, 68923, 68924, 68925, 68926, 68927, 68928, 68929, 68930 were selected from the ORFs having the nucleotide sequence represented by SEQ ID NO: 5664.

[6156] The probes having the nucleotide sequence represented by SEQ ID NOS: 68931, 68932, 68933, 68934, 68935, 68936, 68937, 68938, 68939, 68940, 68941 were selected from the ORFs having the nucleotide sequence represented by SEQ ID NO: 5665.

[6157] The probes having the nucleotide sequence represented by SEQ ID NOS: 68942, 68943, 68944, 68945, 68946, 68947, 68948, 68949, 68950, 68951, 68952 were selected from the ORFs having the nucleotide sequence represented by SEQ ID NO: 5666.

[6158] The probes having the nucleotide sequence represented by SEQ ID NOS: 68953, 68954, 68955, 68956, 68957, 68958, 68959, 68960, 68961, 68962, 68963 were selected from the ORFs having the nucleotide sequence represented by SEQ ID NO: 5667.

[6159] The probes having the nucleotide sequence represented by SEQ ID NOS: 68964, 68965, 68966, 68967, 68968, 68969, 68970, 68971, 68972, 68973, 68974 were selected from the ORFs having the nucleotide sequence represented by SEQ ID NO: 5668.

[6160] The probes having the nucleotide sequence represented by SEQ ID NOS: 68975, 68976, 68977, 68978, 68979, 68980, 68981, 68982, 68983, 68984, 68985 were selected from the ORFs having the nucleotide sequence represented by SEQ ID NO: 5669.

[6161] The probes having the nucleotide sequence represented by SEQ ID NOS: 68986, 68987, 68988, 68989, 68990, 68991, 68992, 68993, 68994, 68995, 68996 were selected from the ORFs having the nucleotide sequence represented by SEQ ID NO: 5670.

[6162] The probes having the nucleotide sequence represented by SEQ ID NOS: 68997, 68998, 68999, 69000, 69001, 69002, 69003, 69004, 69005, 69006, 69007 were selected from the ORFs having the nucleotide sequence represented by SEQ ID NO: 5671.

[6163] The probes having the nucleotide sequence represented by SEQ ID NOS: 69008, 69009, 69010, 69011, 69012, 69013, 69014, 69015, 69016, 69017, 69018 were selected from the ORFs having the nucleotide sequence represented by SEQ ID NO: 5672.

[6164] The probes having the nucleotide sequence represented by SEQ ID NOS: 69019, 69020, 69021, 69022, 69023, 69024, 69025, 69026, 69027, 69028, 69029 were selected from the ORFs having the nucleotide sequence represented by SEQ ID NO: 5673.

[6165] The probes having the nucleotide sequence represented by SEQ ID NOS: 69030, 69031, 69032, 69033, 69034, 69035, 69036, 69037, 69038, 69039, 69040 were selected from the ORFs having the nucleotide sequence represented by SEQ ID NO: 5674.

[6166] The probes having the nucleotide sequence represented by SEQ ID NOS: 69041, 69042, 69043, 69044, 69045, 69046, 69047, 69048, 69049, 69050, 69051 were selected from the ORFs having the nucleotide sequence represented by SEQ ID NO: 5675.

[6167] The probes having the nucleotide sequence represented by SEQ ID NOS: 69052, 69053, 69054, 69055, 69056, 69057, 69058, 69059, 69060, 69061, 69062 were selected from the ORFs having the nucleotide sequence represented by SEQ ID NO: 5676.

[6168] The probes having the nucleotide sequence represented by SEQ ID NOS: 69063, 69064, 69065, 69066, 69067, 69068, 69069, 69070, 69071, 69072, 69073 were selected from the ORFs having the nucleotide sequence represented by SEQ ID NO: 5677.

[6169] The probes having the nucleotide sequence represented by SEQ ID NOS: 69074, 69075, 69076, 69077, 69078, 69079, 69080, 69081, 69082, 69083, 69084 were selected from the ORFs having the nucleotide sequence represented by SEQ ID NO: 5678.

[6170] The probes having the nucleotide sequence represented by SEQ ID NOS: 69085, 69086, 69087, 69088, 69089, 69090, 69091, 69092, 69093, 69094, 69095 were selected from the ORFs having the nucleotide sequence represented by SEQ ID NO: 5679.

[6171] The probes having the nucleotide sequence represented by SEQ ID NOS: 69096, 69097, 69098, 69099, 69100, 69101, 69102, 69103, 69104, 69105, 69106 were selected from the ORFs having the nucleotide sequence represented by SEQ ID NO: 5680.

[6172] The probes having the nucleotide sequence represented by SEQ ID NOS: 69107, 69108, 69109, 69110, 69111, 69112, 69113, 69114, 69115, 69116, 69117 were selected from the ORFs having the nucleotide sequence represented by SEQ ID NO: 5681.

[6173] The probes having the nucleotide sequence represented by SEQ ID NOS: 69118, 69119, 69120, 69121, 69122, 69123, 69124, 69125, 69126, 69127, 69128 were selected from the ORFs having the nucleotide sequence represented by SEQ ID NO: 5682.

[6174] The probes having the nucleotide sequence represented by SEQ ID NOS: 69129, 69130, 69131, 69132, 69133, 69134, 69135, 69136, 69137, 69138, 69139 were selected from the ORFs having the nucleotide sequence represented by SEQ ID NO: 5683.

[6175] The probes having the nucleotide sequence represented by SEQ ID NOS: 69140, 69141, 69142, 69143, 69144, 69145, 69146, 69147, 69148, 69149, 69150 were selected from the ORFs having the nucleotide sequence represented by SEQ ID NO: 5684.

[6176] The probes having the nucleotide sequence represented by SEQ ID NOS: 69151, 69152, 69153, 69154, 69155, 69156,

[6177] 69157, 69158, 69159, 69160, 69161 were selected from the ORFs having the nucleotide sequence represented by SEQ ID NO: 5685.

[6178] The probes having the nucleotide sequence represented by SEQ ID NOS: 69162, 69163, 69164, 69165, 69166, 69167, 69168, 69169, 69170, 69171, 69172 were selected from the ORFs having the nucleotide sequence represented by SEQ ID NO: 5686.

[6179] The probes having the nucleotide sequence represented by SEQ ID NOS: 69173, 69174, 69175, 69176, 69177, 69178, 69179, 69180, 69181, 69182, 69183 were selected from the ORFs having the nucleotide sequence represented by SEQ ID NO: 5687.

[6180] The probes having the nucleotide sequence represented by SEQ ID NOS: 69184, 69185, 69186, 69187, 69188, 69189, 69190, 69191, 69192, 69193, 69194 were selected from the ORFs having the nucleotide sequence represented by SEQ ID NO: 5688.

[6181] The probes having the nucleotide sequence represented by SEQ ID NOS: 69195, 69196, 69197, 69198, 69199, 69200, 69201, 69202, 69203, 69204, 69205 were selected from the ORFs having the nucleotide sequence represented by SEQ ID NO: 5689.

[6182] The probes having the nucleotide sequence represented by SEQ ID NOS: 69206, 69207, 69208, 69209, 69210, 69211, 69212, 69213, 69214, 69215, 69216 were selected from the ORFs having the nucleotide sequence represented by SEQ ID NO: 5690.

[6183] The probes having the nucleotide sequence represented by SEQ ID NOS: 69217, 6921.8, 69219, 69220, 69221, 69222, 69223, 69224, 69225, 69226, 69227 were selected from the ORFs having the nucleotide sequence represented by SEQ ID NO: 5691.

[6184] The probes having the nucleotide sequence represented by SEQ ID NOS: 69228, 69229, 69230, 69231, 69232, 69233, 69234, 69235, 69236, 69237, 69238 were selected from the ORFs having the nucleotide sequence represented by SEQ ID NO: 5692.

[6185] The probes having the nucleotide sequence represented by SEQ ID NOS: 69239, 69240, 69241, 69242, 69243, 69244, 69245, 69246, 69247, 69248, 69249 were selected from the ORFs having the nucleotide sequence represented by SEQ ID NO: 5693.

[6186] The probes having the nucleotide sequence represented by SEQ ID NOS: 69250, 69251, 69252, 69253, 69254, 69255, 69256, 69257, 69258, 69259, 69260 were selected from the ORFs having the nucleotide sequence represented by SEQ ID NO: 5694.

[6187] The probes having the nucleotide sequence represented by SEQ ID NOS: 69261, 69262, 69263, 69264, 69265, 69266, 69267, 69268, 69269, 69270, 69271 were selected from the ORFs having the nucleotide sequence represented by SEQ ID NO: 5695.

[6188] The probes having the nucleotide sequence represented by SEQ ID NOS: 69272, 69273, 69274, 69275, 69276, 69277, 69278, 69279, 69280, 69281, 69282 were selected from the ORFs having the nucleotide sequence represented by SEQ ID NO: 5696.

[6189] The probes having the nucleotide sequence represented by SEQ ID NOS: 69283, 69284, 69285, 69286, 69287, 69288, 69289, 69290, 69291, 69292, 69293 were selected from the ORFs having the nucleotide sequence represented by SEQ ID NO: 5697.

[6190] The probes having the nucleotide sequence represented by SEQ ID NOS: 69294, 69295, 69296, 69297, 69298, 69299, 69300, 69301, 69302, 69303, 69304 were selected from the ORFs having the nucleotide sequence represented by SEQ ID NO: 5698.

[6191] The probes having the nucleotide sequence represented by SEQ ID NOS: 69305, 69306, 69307, 69308, 69309, 69310, 69311, 69312, 69313, 69314, 69315 were selected from the ORFs having the nucleotide sequence represented by SEQ ID NO: 5699.

[6192] The probes having the nucleotide sequence represented by SEQ ID NOS: 69316, 69317, 69318, 69319, 69320, 69321, 69322, 69323, 69324, 69325, 69326 were selected from the ORFs having the nucleotide sequence represented by SEQ ID NO: 5700.

[6193] The probes having the nucleotide sequence represented by SEQ ID NOS: 69327, 69328, 69329, 69330, 69331, 69332, 69333, 69334, 69335, 69336, 69337, 69338, 69339, 69340, 69341, 69342, 69343, 69344, 69345, 69346, 69347, 69348 were selected from the ORFs having the nucleotide sequence represented by SEQ ID NO: 5701.

[6194] The probes having the nucleotide sequence represented by SEQ ID NOS: 69349, 69350, 69351, 69352, 69353, 69354, 69355, 69356, 69357, 69358, 69359 were selected from the ORFs having the nucleotide sequence represented by SEQ ID NO: 5702.

[6195] The probes having the nucleotide sequence represented by SEQ ID NOS: 69360, 69361, 69362, 69363, 69364, 69365, 69366, 69367, 69368, 69369, 69370 were selected from the ORFs having the nucleotide sequence represented by SEQ ID NO: 5703.

[6196] The probes having the nucleotide sequence represented by SEQ ID NOS: 69371, 69372, 69373, 69374, 69375, 69376, 69377, 69378, 69379, 69380, 69381 were selected from the ORFs having the nucleotide sequence represented by SEQ ID NO: 5704.

[6197] The probes having the nucleotide sequence represented by SEQ ID NOS: 69382, 69383, 69384, 69385, 69386, 69387, 69388, 69389, 69390, 69391, 69392 were selected from the ORFs having the nucleotide sequence represented by SEQ ID NO: 5705.

[6198] The probes having the nucleotide sequence represented by SEQ ID NOS: 69393, 69394, 69395, 69396, 69397, 69398, 69399, 69400, 69401, 69402, 69403 were selected from the ORFs having the nucleotide sequence represented by SEQ ID NO: 5706.

[6199] The probes having the nucleotide sequence represented by SEQ ID NOS: 69404, 69405, 69406, 69407, 69408, 69409, 69410, 69411, 69412, 69413, 69414 were selected from the ORFs having the nucleotide sequence represented by SEQ ID NO: 5707.

[6200] The probes having the nucleotide sequence represented by SEQ ID NOS: 69415, 69416, 69417, 69418, 69419, 69420, 69421, 69422, 69423, 69424, 69425 were selected from the ORFs having the nucleotide sequence represented by SEQ ID NO: 5708.

[6201] The probes having the nucleotide sequence represented by SEQ ID NOS: 69426, 69427, 69428, 69429, 69430, 69431, 69432, 69433, 69434, 69435, 69436 were selected from the ORFs having the nucleotide sequence represented by SEQ ID NO: 5709.

[6202] The probes having the nucleotide sequence represented by SEQ ID NOS: 69437, 69438, 69439, 69440, 69441, 69442, 69443, 69444, 69445, 69446, 69447 were selected from-the ORFs having the nucleotide sequence represented by SEQ ID NO: 5710.

[6203] The probes having the nucleotide sequence represented by SEQ ID NOS: 69448, 69449, 69450, 69451, 69452, 69453, 69454, 69455, 69456, 69457, 69458 were selected from the ORFs having the nucleotide sequence represented by SEQ ID NO: 5711.

[6204] The probes having the nucleotide sequence represented by SEQ ID NOS: 69459, 69460, 69461, 69462, 69463, 69464, 69465, 69466, 69467, 69468, 69469 were selected from the ORFs having the nucleotide sequence represented by SEQ ID NO: 5712.

[6205] The probes having the nucleotide sequence represented by SEQ ID NOS: 69470, 69471, 69472, 69473, 69474, 69475, 69476, 69477, 69478, 69479, 69480 were selected from the ORFs having the nucleotide sequence represented by SEQ ID NO: 5713.

[6206] The probes having the nucleotide sequence represented by SEQ ID NOS: 69481, 69482, 69483, 69484, 69485, 69486, 69487, 69488, 69489, 69490, 69491 were selected from the ORFs having the nucleotide sequence represented by SEQ ID NO: 5714.

[6207] The probes having the nucleotide sequence represented by SEQ ID NOS: 69492, 69493, 69494, 69495, 69496, 69497, 69498, 69499, 69500, 69501, 69502 were selected from the ORFs having the nucleotide sequence represented by SEQ ID NO: 5715.

[6208] The probes having the nucleotide sequence represented by SEQ ID NOS: 69503, 69504, 69505, 69506, 69507, 69508, 69509, 69510, 69511, 69512, 69513 were selected from the ORFs having the nucleotide sequence represented by SEQ ID NO: 5716.

[6209] The probes having the nucleotide sequence represented by SEQ ID NOS: 69514, 69515, 69516, 69517, 69518, 69519, 69520, 69521, 69522, 69523, 69524 were selected from the ORFs having the nucleotide sequence represented by SEQ ID NO: 5717.

[6210] The probes having the nucleotide sequence represented by SEQ ID NOS: 69525, 69526, 69527, 69528, 69529, 69530, 69531, 69532, 69533, 69534, 69535 were selected from the ORFs having the nucleotide sequence represented by SEQ ID NO: 5718.

[6211] The probes having the nucleotide sequence represented by SEQ ID NOS: 69536, 69537, 69538, 69539, 69540, 69541, 69542, 69543, 69544, 69545, 69546 were selected from the ORFs having the nucleotide sequence represented by SEQ ID NO: 5719.

[6212] The probes having the nucleotide sequence represented by SEQ ID NOS: 69547, 69548, 69549, 69550, 69551, 69552, 69553, 69554, 69555, 69556, 69557 were selected from the ORFs having the nucleotide sequence represented by SEQ ID NO: 5720.

[6213] The probes having the nucleotide sequence represented by SEQ ID NOS: 69558, 69559, 69560, 69561, 69562, 69563, 69564, 69565, 69566, 69567, 69568 were selected from the ORFs having the nucleotide sequence represented by SEQ ID NO: 5721.

[6214] The probes having the nucleotide sequence represented by SEQ ID NOS: 69569, 69570, 69571, 69572, 69573, 69574, 69575, 69576, 69577, 69578, 69579 were selected from the ORFs having the nucleotide sequence represented by SEQ ID NO: 5722.

[6215] The probes having the nucleotide sequence represented by SEQ ID NOS: 69580, 69581, 69582, 69583, 69584, 69585, 69586, 69587, 69588, 69589, 69590 were selected from the ORFs having the nucleotide sequence represented by SEQ ID NO: 5723.

[6216] The probes having the nucleotide sequence represented by SEQ ID NOS: 69591, 69592, 69593, 69594, 69595, 69596, 69597, 69598, 69599, 69600, 69601 were selected from the ORFs having the nucleotide sequence represented by SEQ ID NO: 5724.

[6217] The probes having the nucleotide sequence represented by SEQ ID NOS: 69602, 69603, 69604, 69605, 69606, 69607, 69608, 69609, 69610, 69611, 69612 were selected from the ORFs having the nucleotide sequence represented by SEQ ID NO: 5725.

[6218] The probes having the nucleotide sequence represented by SEQ ID NOS: 69613, 69614, 69615, 69616, 69617, 69618, 69619, 69620, 69621, 69622, 69623 were selected from the ORFs having the nucleotide sequence represented by SEQ ID NO: 5726.

[6219] The probes having the nucleotide sequence represented by SEQ ID NOS: 69624, 69625, 69626, 69627, 69628, 69629, 69630, 69631, 69632, 69633, 69634 were selected from the ORFs having the nucleotide sequence represented by SEQ ID NO: 5727.

[6220] The probes having the nucleotide sequence represented by SEQ ID NOS: 69635, 69636, 69637, 69638, 69639, 69640, 69641, 69642, 69643, 69644, 69645 were selected from the ORFs having the nucleotide sequence represented by SEQ ID NO: 5728.

[6221] The probes having the nucleotide sequence represented by SEQ ID NOS: 69646, 69647, 69648, 69649, 69650, 69651, 69652, 69653, 69654, 69655, 69656 were selected from the ORFs having the nucleotide sequence represented by SEQ ID NO: 5729.

[6222] The probes having the nucleotide sequence represented by SEQ ID NOS: 69657, 69658, 69659, 69660, 69661, 69662, 69663, 69664, 69665, 69666, 69667 were selected from the ORFs having the nucleotide sequence represented by SEQ ID NO: 5730.

[6223] The probes having the nucleotide sequence represented by SEQ ID NOS: 69668, 69669, 69670, 69671, 69672, 69673, 69674, 69675, 69676, 69677, 69678 were selected from the ORFs having the nucleotide sequence represented by SEQ ID NO: 5731.

[6224] The probes having the nucleotide sequence represented by SEQ ID NOS: 69679, 69680, 69681, 69682, 69683, 69684, 69685, 69686, 69687, 69688, 69689 were selected from the ORFs having the nucleotide sequence represented by SEQ ID NO: 5732.

[6225] The probes having the nucleotide sequence represented by SEQ ID NOS: 69690, 69691, 69692, 69693, 69694, 69695, 69696, 69697, 69698, 69699, 69700 were selected from the ORFs having the nucleotide sequence represented by SEQ ID NO: 5733.

[6226] The probes having the nucleotide sequence represented by SEQ ID NOS: 69701, 69702, 69703, 69704, 69705, 69706, 69707, 69708, 69709, 69710, 69711 were selected from the ORFs having the nucleotide sequence represented by SEQ ID NO: 5734.

[6227] The probes having the nucleotide sequence represented by SEQ ID NOS: 69712, 69713, 69714, 69715, 69716, 69717, 69718, 69719, 69720, 69721, 69722 were selected from the ORFs having the nucleotide sequence represented by SEQ ID NO: 5735.

[6228] The probes having the nucleotide sequence represented by SEQ ID NOS: 69723, 69724, 69725, 69726, 69727, 69728, 69729, 69730, 69731, 69732, 69733 were selected from the ORFs having the nucleotide sequence represented by SEQ ID NO: 5736.

[6229] The probes having the nucleotide sequence represented by SEQ ID NOS: 69734, 69735, 69736, 69737, 69738, 69739, 69740, 69741, 69742, 69743, 69744 were selected from the ORFs having the nucleotide sequence represented by SEQ ID NO: 5737.

[6230] The probes having the nucleotide sequence represented by SEQ ID NOS: 69745, 69746, 69747, 69748, 69749, 69750, 6,9751, 69752, 69753, 69754, 69755 were selected from the ORFs having the nucleotide sequence represented by SEQ ID NO: 5738.

[6231] The probes having the nucleotide sequence represented by SEQ ID NOS: 69756, 69757, 69758, 69759, 69760, 69761, 69762, 69763, 69764, 69765, 69766 were selected from the ORFs having the nucleotide sequence represented by SEQ ID NO: 5739.

[6232] The probes having the nucleotide sequence represented by SEQ ID NOS: 69767, 69768, 69769, 69770, 69771, 69772, 69773, 69774, 69775, 69776, 69777 were selected from the ORFs having the nucleotide sequence represented by SEQ ID NO: 5740.

[6233] The probes having the nucleotide sequence represented by SEQ ID NOS: 69778, 69779, 69780, 69781, 69782, 69783, 69784, 69785, 69786, 69787, 69788 were selected from the ORFs having the nucleotide sequence represented by SEQ ID NO: 5741.

[6234] The probes having the nucleotide sequence represented by SEQ ID NOS: 69789, 69790, 69791, 69792, 69793, 69794, 69795, 69796, 69797, 69798, 69799 were selected from the ORFs having the nucleotide sequence represented by SEQ ID NO: 5742.

[6235] The probes having the nucleotide sequence represented by SEQ ID NOS: 69800, 69801, 69802, 69803, 69804, 69805, 69806, 69807, 69808, 69809, 69810 were selected from the ORFs having the nucleotide sequence represented by SEQ ID NO: 5743.

[6236] The probes having the nucleotide sequence represented by SEQ ID NOS: 69811, 69812, 69813, 69814, 69815, 69816, 69817, 69818, 69819, 69820, 69821 were selected from the ORFs having the nucleotide sequence represented by SEQ ID NO: 5744.

[6237] The probes having the nucleotide sequence represented by SEQ ID NOS: 69822, 69823, 69824, 69825, 69826, 69827, 69828, 69829, 69830, 69831, 69832 were selected from the ORFs having the nucleotide sequence represented by SEQ ID NO: 5745.

[6238] The probes having the nucleotide sequence represented by SEQ ID NOS: 69833, 69834, 69835, 69836, 69837, 69838, 69839, 69840, 69841, 69842, 69843 were selected from the ORFs having the nucleotide sequence represented by SEQ ID NO: 5746.

[6239] The probes having the nucleotide sequence represented by SEQ ID NOS: 69844, 69845, 69846, 69847, 69848, 69849, 69850, 69851, 69852, 69853, 69854 were selected from the ORFs having the nucleotide sequence represented by SEQ ID NO: 5747.

[6240] The probes having the nucleotide sequence represented by SEQ ID NOS: 69855, 69856, 69857, 69858, 69859, 69860, 69861, 69862, 69863, 69864, 69865 were selected from the ORFs having the nucleotide sequence represented by SEQ ID NO: 5748.

[6241] The probes having the nucleotide sequence represented by SEQ ID NOS: 69866, 69867, 69868, 69869, 69870, 69871, 69872, 69873, 69874, 69875, 69876 were selected from the ORFs having the nucleotide sequence represented by SEQ ID NO: 5749.

[6242] The probes having the nucleotide sequence represented by SEQ ID NOS: 69877, 69878, 69879, 69880, 69881, 69882, 69883, 69884, 69885, 69886, 69887 were selected from the ORFs having the nucleotide sequence represented by SEQ ID NO: 5750.

[6243] The probes having the nucleotide sequence represented by SEQ ID NOS: 69888, 69889, 69890, 69891, 69892, 69893, 69894, 69895, 69896, 69897, 69898 were selected from the ORFs having the nucleotide sequence represented by SEQ ID NO: 5751.

[6244] The probes having the nucleotide sequence represented by SEQ ID NOS: 69899, 69900, 69901, 69902, 69903, 69904, 69905, 69906, 69907, 69908, 69909 were selected from the ORFs having the nucleotide sequence represented by SEQ ID NO: 5752.

[6245] The probes having the nucleotide sequence represented by SEQ ID NOS: 69910, 69911, 69912, 69913, 69914, 69915, 69916, 69917, 69918, 69919, 69920 were selected from the ORFs having the nucleotide sequence represented by SEQ ID NO: 5753.

[6246] The probes having the nucleotide sequence represented by SEQ ID NOS: 69921, 69922, 69923, 69924, 69925, 69926, 69927, 69928, 69929, 69930, 69931 were selected from the ORFs having the nucleotide sequence represented by SEQ ID NO: 5754.

[6247] The probes having the nucleotide sequence represented by SEQ ID NOS: 69932, 69933, 69934, 69935, 69936, 69937, 69938, 69939, 69940, 69941, 69942 were selected from the ORFs having the nucleotide sequence represented by SEQ ID NO: 5755.

[6248] The probes having the nucleotide sequence represented by SEQ ID NOS: 69943, 69944, 69945, 69946, 69947, 69948, 69949, 69950, 69951, 69952, 69953 were selected from the ORFs having the nucleotide sequence represented by SEQ ID NO: 5756.

[6249] The probes having the nucleotide sequence represented by SEQ ID NOS: 69954, 69955, 69956, 69957, 69958, 69959, 69960, 69961, 69962, 69963, 69964 were selected from the ORFs having the nucleotide sequence represented by SEQ ID NO: 5757.

[6250] The probes having the nucleotide sequence represented by SEQ ID NOS: 69965, 69966, 69967, 69968, 69969, 69970, 69971, 69972, 69973, 69974, 69975 were selected from the ORFs having the nucleotide sequence represented by SEQ ID NO: 5758.

[6251] The probes having the nucleotide sequence represented by SEQ ID NOS: 69976, 69977, 69978, 69979, 69980, 69981, 69982, 69983, 69984, 69985, 69986, 69987, 69988, 69989, 69990, 69991, 69992, 69993, 69994, 69995, 69996, 69997 were selected from the ORFs having the nucleotide sequence represented by SEQ ID NO: 5759.

[6252] The probes having the nucleotide sequence represented by SEQ ID NOS: 69998, 69999, 70000, 70001, 70002, 70003, 70004, 70005, 70006, 70007, 70008 were selected from the ORFs having the nucleotide sequence represented by SEQ ID NO: 5760.

[6253] The probes having the nucleotide sequence represented by SEQ ID NOS: 70009, 70010, 70011, 70012, 70013, 70014, 70015, 70016, 70017, 70018, 70019 were selected from the ORFs having the nucleotide sequence represented by SEQ ID NO: 5761.

[6254] The probes having the nucleotide sequence represented by SEQ ID NOS: 70020, 70021, 70022, 70023, 70024, 70025, 70026, 70027, 70028, 70029, 70030 were selected from the ORFs having the nucleotide sequence represented by SEQ ID NO: 5762.

[6255] The probes having the nucleotide sequence represented by SEQ ID NOS: 70031, 70032, 70033, 70034, 70035, 70036, 70037, 70038, 70039, 70040, 70041 were selected from the ORFs having the nucleotide sequence represented by SEQ ID NO: 5763.

[6256] The probes having the nucleotide sequence represented by SEQ ID NOS: 70042, 70043, 70044, 70045, 70046, 70047, 70048, 70049, 70050, 70051, 70052 were selected from the ORFs having the nucleotide sequence represented by SEQ ID NO: 5764.

[6257] The probes having the nucleotide sequence represented by SEQ ID NOS: 70053, 70054, 70055, 70056, 70057, 70058, 70059, 70060, 70061, 70062, 70063 were selected from the ORFs having the nucleotide sequence represented by SEQ ID NO: 5765.

[6258] The probes having the nucleotide sequence represented by SEQ ID NOS: 70064, 70065, 70066, 70067, 70068, 70069, 70070, 70071, 70072, 70073, 70074 were selected from the ORFs having the nucleotide sequence represented by SEQ ID NO: 5766.

[6259] The probes having the nucleotide sequence represented by SEQ ID NOS: 70075, 70076, 70077, 70078, 70079, 70080, 70081, 70082, 70083, 70084, 70085 were selected from the ORFs having the nucleotide sequence represented by SEQ ID NO: 5767.

[6260] The probes having the nucleotide sequence represented by SEQ ID NOS: 70086, 70087, 70088, 70089, 70090, 70091, 70092, 70093, 70094, 70095, 70096 were selected from the ORFs having the nucleotide sequence represented by SEQ ID NO: 5768.

[6261] The probes having the nucleotide sequence represented by SEQ ID NOS: 70097, 70098, 70099, 70100, 70101, 70102, 70103, 70104, 70105, 70106, 70107 were selected from the ORFs having the nucleotide sequence represented by SEQ ID NO: 5769.

[6262] The probes having the nucleotide sequence represented by SEQ ID NOS: 70108, 70109, 70110, 70111, 70112, 70113, 70114, 70115, 70116, 70117, 70118, 70119, 70120, 70121, 70122, 70123, 70124, 70125, 70126, 70127, 70128, 70129 were selected from the ORFs having the nucleotide sequence represented by SEQ ID NO: 5770.

[6263] The probes having the nucleotide sequence represented by SEQ ID NOS: 70130, 70131, 70132, 70133, 70134, 70135, 70136, 70137, 70138, 70139, 70140 were selected from the ORFs having the nucleotide sequence represented by SEQ ID NO: 5771.

[6264] The probes having the nucleotide sequence represented by SEQ ID NOS: 70141, 70142, 70143, 70144, 70145, 70146, 70147, 70148 were selected from the ORFs having the nucleotide sequence represented by SEQ ID NO: 5772.

[6265] The probes having the nucleotide sequence represented by SEQ ID NOS: 70149, 70150, 70151, 70152, 70153, 70154, 70155, 70156, 70157, 70158, 70159 were selected from the ORFs having the nucleotide sequence represented by SEQ ID NO: 5773.

[6266] The probes having the nucleotide sequence represented by SEQ ID NOS: 70160, 70161, 70162, 70163, 70164, 70165, 70166, 70167, 70168, 70169, 70170 were selected from the ORFs having the nucleotide sequence represented by SEQ ID NO: 5774.

[6267] The probes having the nucleotide sequence represented by SEQ ID NOS: 70171, 70172, 70173, 70174, 70175, 70176, 70177, 70178, 70179, 70180, 70181 were selected from the ORFs having the nucleotide sequence represented by SEQ ID NO: 5775.

[6268] The probes having the nucleotide sequence represented by SEQ ID NOS: 70182, 70183, 70184, 70185, 70186, 70187, 70188, 70189, 70190, 70191, 70192 were selected from the ORFs having the nucleotide sequence represented by SEQ ID NO: 5776.

[6269] The probes having the nucleotide sequence represented by SEQ ID NOS: 70193, 70194, 70195, 70196, 70197, 70198, 70199, 70200, 70201, 70202, 70203 were selected from the ORFs having the nucleotide sequence represented by SEQ ID NO: 5777.

[6270] The probes having the nucleotide sequence represented by SEQ ID NOS: 70204, 70205, 70206, 70207, 70208, 70209, 70210, 70211, 70212, 70213, 70214 were selected from the ORFs having the nucleotide sequence represented by SEQ ID NO: 5778.

[6271] The probes having the nucleotide sequence represented by SEQ ID NOS: 70215, 70216, 70217, 70218, 70219, 70220, 70221, 70222, 70223, 70224, 70225 were selected from the ORFs having the nucleotide sequence represented by SEQ ID NO: 5779.

[6272] The probes having the nucleotide sequence represented by SEQ ID NOS: 70226, 70227, 70228, 70229, 70230, 70231, 70232, 70233, 70234, 70235, 70236 were selected from the ORFs having the nucleotide sequence represented by SEQ ID NO: 5780.

[6273] The probes having the nucleotide sequence represented by SEQ ID NOS: 70237, 70238, 70239, 70240, 70241, 70242, 70243, 70244, 70245, 70246, 70247 were selected from the ORFs having the nucleotide sequence represented by SEQ ID NO: 5781.

[6274] The probes having the nucleotide sequence represented by SEQ ID NOS: 70248, 70249, 70250, 70251, 70252, 70253, 70254, 70255, 70256, 70257, 70258 were selected from the ORFs having the nucleotide sequence represented by SEQ ID NO: 5782.

[6275] The probes having the nucleotide sequence represented by SEQ ID NOS: 70259, 70260, 70261, 70262, 70263, 70264, 70265, 70266, 70267, 70268, 70269 were selected from the ORFs having the nucleotide sequence represented by SEQ ID NO: 5783.

[6276] The probes having the nucleotide sequence represented by SEQ ID NOS: 70270, 70271, 70272, 70273, 70274, 70275, 70276, 70277, 70278, 70279, 70280 were selected from the ORFs having the nucleotide sequence represented by SEQ ID NO: 5784.

[6277] The probes having the nucleotide sequence represented by SEQ ID NOS: 70281, 70282, 70283, 70284, 70285, 70286, 70287, 70288, 70289, 70290, 70291 were selected from the ORFs having the nucleotide sequence represented by SEQ ID NO: 5785.

[6278] The probes having the nucleotide sequence represented by SEQ ID NOS: 70292, 70293, 70294, 70295, 70296, 70297, 70298, 70299, 70300, 70301, 70302 were selected from the ORFs having the nucleotide sequence represented by SEQ ID NO: 5786.

[6279] The probes having the nucleotide sequence represented by SEQ ID NOS: 70303, 70304, 70305, 70306, 70307, 70308, 70309, 70310, 70311, 70312, 70313 were selected from the ORFs having the nucleotide sequence represented by SEQ ID NO: 5787.

[6280] The probes having the nucleotide sequence represented by SEQ ID NOS: 70314, 70315, 70316, 70317, 70318, 70319, 70320, 70321, 70322, 70323, 70324 were selected from the ORFs having the nucleotide sequence represented by SEQ ID NO: 5788.

[6281] The probes having the nucleotide sequence represented by SEQ ID NOS: 70325, 70326, 70327, 70328, 70329, 70330, 70331, 70332, 70333, 70334, 70335 were selected from the ORFs having the nucleotide sequence represented by SEQ ID NO: 5789.

[6282] The probes having the nucleotide sequence represented by SEQ ID NOS: 70336, 70337, 70338, 70339, 70340, 70341, 70342, 70343, 70344, 70345, 70346 were selected from the ORFs having the nucleotide sequence represented by SEQ ID NO: 5790.

[6283] The probes having the nucleotide sequence represented by SEQ ID NOS: 70347, 70348, 70349, 70350, 70351, 70352, 70353, 70354, 70355, 70356, 70357 were selected from the ORFs having the nucleotide sequence represented by SEQ ID NO: 5791.

[6284] The probes having the nucleotide sequence represented by SEQ ID NOS: 70358, 70359, 70360, 70361, 70362, 70363, 70364, 70365, 70366, 70367, 70368 were selected from the ORFs having the nucleotide sequence represented by SEQ ID NO: 5792.

[6285] The probes having the nucleotide sequence represented by SEQ ID NOS: 70369, 70370, 70371, 70372, 70373, 70374, 70375, 70376, 70377, 70378, 70379 were selected from the ORFs having the nucleotide sequence represented by SEQ ID NO: 5793.

[6286] The probes having the nucleotide sequence represented by SEQ ID NOS: 70380, 70381, 70382, 70383, 70384, 70385, 70386, 70387, 70388, 70389, 70390 were selected from the ORFs having the nucleotide sequence represented by SEQ ID NO: 5794.

[6287] The probes having the nucleotide sequence represented by SEQ ID NOS: 70391, 70392, 70393, 70394, 70395, 70396, 70397, 70398, 70399, 70400, 70401 were selected from the ORFs having the nucleotide sequence represented by SEQ ID NO: 5795.

[6288] The probes having the nucleotide sequence represented by SEQ ID NOS: 70402, 70403, 70404, 70405, 70406, 70407, 70408, 70409, 70410, 70411, 70412 were selected from the ORFs having the nucleotide sequence represented by SEQ ID NO: 5796.

[6289] The probes having the nucleotide sequence represented by SEQ ID NOS: 70413, 70414, 70415, 70416, 70417, 70418, 70419, 70420, 70421, 70422, 70423 were selected from the ORFs having the nucleotide sequence represented by SEQ ID NO: 5797.

[6290] The probes having the nucleotide sequence represented by SEQ ID NOS: 70424, 70425, 70426, 70427, 70428, 70429, 70430, 70431, 70432, 70433, 70434, 70435, 70436, 70437, 70438, 70439, 70440, 70441, 70442, 70443, 70444, 70445 were selected from the ORFs having the nucleotide sequence represented by SEQ ID NO: 5798.

[6291] The probes having the nucleotide sequence represented by SEQ ID NOS: 70446, 70447, 70448, 70449, 70450, 70451, 70452, 70453, 70454, 70455, 70456 were selected from the ORFs having the nucleotide sequence represented by SEQ ID NO: 5799.

[6292] The probes having the nucleotide sequence represented by SEQ ID NOS: 70457, 70458, 70459, 70460, 70461, 70462, 70463, 70464, 70465, 70466, 70467 were selected from the ORFs having the nucleotide sequence represented by SEQ ID NO: 5800.

[6293] The probes having the nucleotide sequence represented by SEQ ID NOS: 70468, 70469, 70470, 70471, 70472, 70473, 70474, 70475, 70476, 70477, 70478 were selected from the ORFs having the nucleotide sequence represented by SEQ ID NO: 5801.

[6294] The probes having the nucleotide sequence represented by SEQ ID NOS: 70479, 70480, 70481, 70482, 70483, 70484, 70485, 7.0486, 70487, 70488, 70489 were selected from the ORFs having the nucleotide sequence represented by SEQ ID NO: 5802.

[6295] The probes having the nucleotide sequence represented by SEQ ID NOS: 70490, 70491, 70492, 70493, 70494, 70495, 70496, 70497, 70498, 70499, 70500 were selected from the ORFs having the nucleotide sequence represented by SEQ ID NO: 5803.

[6296] The probes having the nucleotide sequence represented by SEQ ID NOS: 70501, 70502, 70503, 70504, 70505, 70506, 70507, 70508, 70509, 70510, 70511 were selected from the ORFs having the nucleotide sequence represented by SEQ ID NO: 5804.

[6297] The probes having the nucleotide sequence represented by SEQ ID NOS: 70512, 70513, 70514, 70515, 70516, 70517, 70518, 70519, 70520, 70521, 70522 were selected from the ORFs having the nucleotide sequence represented by SEQ ID NO: 5805.

[6298] The probes having the nucleotide sequence represented by SEQ ID NOS: 70523, 70524, 70525, 70526, 70527, 70528, 70529, 70530, 70531, 70532, 70533 were selected from the ORFs having the nucleotide sequence represented by SEQ ID NO: 5806.

[6299] The probes having the nucleotide sequence represented by SEQ ID NOS: 70534, 70535, 70536, 70537, 70538, 70539, 70540, 70541, 70542, 70543, 70544, 70545, 70546, 70547, 70548, 70549, 70550, 70551, 70552, 70553, 70554, 70555 were selected from the ORFs having the nucleotide sequence represented by SEQ ID NO: 5807.

[6300] The probes having the nucleotide sequence represented by SEQ ID NOS: 70556, 70557, 70558, 70559, 70560, 70561, 70562, 70563, 70564, 70565, 70566 were selected from the ORFs having the nucleotide sequence represented by SEQ ID NO: 5808.

[6301] The probes having the nucleotide sequence represented by SEQ ID NOS: 70567, 70568, 70569, 70570, 70571, 70572, 70573, 70574, 70575, 70576, 70577 were selected from the ORFs having the nucleotide sequence represented by SEQ ID NO: 5809.

[6302] The probes having the nucleotide sequence represented by SEQ ID NOS: 70578, 70579, 70580, 70581, 70582, 70583, 70584, 70585, 70586, 70587, 70588 were selected from the ORFs having the nucleotide sequence represented by SEQ ID NO: 5810.

[6303] The probes having the nucleotide sequence represented by SEQ ID NOS: 70589, 70590, 70591, 70592, 70593, 70594, 70595, 70596, 70597, 70598, 70599 were selected from the ORFs having the nucleotide sequence represented by SEQ ID NO: 5811.

[6304] The probes having the nucleotide sequence represented by SEQ ID NOS: 70600, 70601, 70602, 70603, 70604, 70605,

[6305] 70606, 70607, 70608, 70609, 70610 were selected from the ORFs having the nucleotide sequence represented by SEQ ID NO: 5812.

[6306] The probes having the nucleotide sequence represented by SEQ ID NOS: 70611, 70612, 70613, 70614, 70615, 70616, 70617, 70618, 70619, 70620, 70621 were selected from the ORFs having the nucleotide sequence represented by SEQ ID NO: 5813.

[6307] The probes having the nucleotide sequence represented by SEQ ID NOS: 70622, 70623, 70624, 70625, 70626, 70627, 70628, 70629, 70630, 70631, 70632 were selected from the ORFs having the nucleotide sequence represented by SEQ ID NO: 5814.

[6308] The probes having the nucleotide sequence represented by SEQ ID NOS: 70633, 70634, 70635, 70636, 70637, 70638, 70639, 70640, 70641, 70642, 70643 were selected from the ORFs having the nucleotide sequence represented by SEQ ID NO: 5815.

[6309] The probes having the nucleotide sequence represented by SEQ ID NOS: 70644, 70645, 70646, 70647, 70648, 70649, 70650, 70651, 70652, 70653, 70654 were selected from the ORFs having the nucleotide sequence represented by SEQ ID NO: 5816.

[6310] The probes having the nucleotide sequence represented by SEQ ID NOS: 70655, 70656, 70657, 70658, 70659, 70660, 70661, 70662, 70663, 70664, 70665 were selected from the ORFs having the nucleotide sequence represented by SEQ ID NO: 5817.

[6311] The probes having the nucleotide sequence represented by SEQ ID NOS: 70666, 70667, 70668, 70669, 70670, 70671, 70672, 70673, 70674, 70675, 70676 were selected from the ORFs having the nucleotide sequence represented by SEQ ID NO: 5818.

[6312] The probes having the nucleotide sequence represented by SEQ ID NOS: 70677, 70678, 70679, 70680, 70681, 70682, 70683, 70684, 70685, 70686, 70687 were selected from the ORFs having the nucleotide sequence represented by SEQ ID NO: 5819.

[6313] The probes having the nucleotide sequence represented by SEQ ID NOS: 70688, 70689, 70690, 70691, 70692, 70693, 70694, 70695, 70696, 70697, 70698 were selected from the ORFs having the nucleotide sequence represented by SEQ ID NO: 5820.

[6314] The probes having the nucleotide sequence represented by SEQ ID NOS: 70699, 70700, 70701, 70702, 70703, 70704, 70705, 70706, 70707, 70708, 70709 were selected from the ORFs having the nucleotide sequence represented by SEQ ID NO: 5821.

[6315] The probes having the nucleotide sequence represented by SEQ ID NOS: 70710, 70711, 70712, 70713, 70714, 70715, 70716, 70717, 70718, 70719, 70720 were selected from the ORFs having the nucleotide sequence represented by SEQ ID NO: 5822.

[6316] The probes having the nucleotide sequence represented by SEQ ID NOS: 70721, 70722, 70723, 70724, 70725, 70726, 70727, 70728, 70729, 70730, 70731 were selected from the ORFs having the nucleotide sequence represented by SEQ ID NO: 5823.

[6317] The probes having the nucleotide sequence represented by SEQ ID NOS: 70732, 70733, 70734, 70735, 70736, 70737, 70738, 70739, 70740, 70741, 70742 were selected from the ORFs having the nucleotide sequence represented by SEQ ID NO: 5824.

[6318] The probes having the nucleotide sequence represented by SEQ ID NOS: 70743, 70744, 70745, 70746, 70747, 70748, 70749, 70750, 70751, 70752, 70753 were selected from the ORFs having the nucleotide sequence represented by SEQ ID NO: 5825.

[6319] The probes having the nucleotide sequence represented by SEQ ID NOS: 70754, 70755, 70756, 70757, 70758, 70759, 70760, 70761, 70762, 70763, 70764 were selected from the ORFs having the nucleotide sequence represented by SEQ ID NO: 5826.

[6320] The probes having the nucleotide sequence represented by SEQ ID NOS: 70765, 70766, 70767, 70768, 70769, 70770, 70771, 70772, 70773, 70774, 70775 were selected from the ORFs having the nucleotide sequence represented by SEQ ID NO: 5827.

[6321] The probes having the nucleotide sequence represented by SEQ ID NOS: 70776, 70777, 70778, 70779, 70780, 70781, 70782, 70783, 70784, 70785, 70786 were selected from the ORFs having the nucleotide sequence represented by SEQ ID NO: 5828.

[6322] The probes having the nucleotide sequence represented by SEQ ID NOS: 70787, 70788, 70789, 70790, 70791, 70792, 70793, 70794, 70795, 70796, 70797 were selected from the ORFs having the nucleotide sequence represented by SEQ ID NO: 5829.

[6323] The probes having the nucleotide sequence represented by SEQ ID NOS: 70798, 70799, 70800, 70801, 70802, 70803, 70804, 70805, 70806, 70807, 70808 were selected from the ORFs having the nucleotide sequence represented by SEQ ID NO: 5830.

[6324] The probes having the nucleotide sequence represented by SEQ ID NOS: 70809, 70810, 70811, 70812, 70813, 70814, 70815, 70816, 70817, 70818, 70819 were selected from the ORFs having the nucleotide sequence represented by SEQ ID NO: 5831.

[6325] The probes having the nucleotide sequence represented by SEQ ID NOS: 70820, 70821, 70822, 70823, 70824, 70825, 70826, 70827, 70828, 70829, 70830 were selected from the ORFs having the nucleotide sequence represented by SEQ ID NO: 5832.

[6326] The probes having the nucleotide sequence represented by SEQ ID NOS: 70831, 70832, 70833, 70834, 70835, 70836, 70837, 70838, 70839, 70840, 70841 were selected from the ORFs having the nucleotide sequence represented by SEQ ID NO: 5833.

[6327] The probes having the nucleotide sequence represented by SEQ ID NOS: 70842, 70843, 70844, 70845, 70846, 70847, 70848, 70849, 70850, 70851, 70852 were selected from the ORFs having the nucleotide sequence represented by SEQ ID NO: 5834.

[6328] The probes having the nucleotide sequence represented by SEQ ID NOS: 70853, 70854, 70855, 70856, 70857, 70858, 70859, 70860, 70861, 70862, 70863 were selected from the ORFs having the nucleotide sequence represented by SEQ ID NO: 5835.

[6329] The probes having-the nucleotide sequence represented by SEQ ID NOS: 70864, 70865, 70866, 70867, 70868, 70869, 70870, 70871, 70872, 70873, 70874 were selected from the ORFs having the nucleotide sequence represented by SEQ ID NO: 5836.

[6330] The probes having the nucleotide sequence represented by SEQ ID NOS: 70875, 70876, 70877, 70878, 70879, 70880, 70881, 70882, 70883, 70884, 70885 were selected from the ORFs having the nucleotide sequence represented by SEQ ID NO: 5837.

[6331] The probes having the nucleotide sequence represented by SEQ ID NOS: 70886, 70887, 70888, 70889, 70890, 70891, 70892, 70893, 70894, 70895, 70896 were selected from the ORFs having the nucleotide sequence represented by SEQ ID NO: 5838.

[6332] The probes having the nucleotide sequence represented by SEQ ID NOS: 70897, 70898, 70899, 70900, 70901, 70902, 70903, 70904, 70905, 70906, 70907 were selected from the ORFs having the nucleotide sequence represented by SEQ ID NO: 5839.

[6333] The probes having the nucleotide sequence represented by SEQ ID NOS: 70908, 70909, 70910, 70911, 70912, 70913, 70914, 70915, 70916, 70917, 70918 were selected from the ORFs having the nucleotide sequence represented by SEQ ID NO: 5840.

[6334] The probes having the nucleotide sequence represented by SEQ ID NOS: 70919, 70920, 70921, 70922, 70923, 70924, 70925, 70926, 70927, 70928, 70929 were selected from the ORFs having the nucleotide sequence represented by SEQ ID NO: 5841.

[6335] The probes having the nucleotide sequence represented by SEQ ID NOS: 70930, 70931, 70932, 70933, 70934, 70935, 70936, 70937, 70938, 70939, 70940 were selected from the ORFs having the nucleotide sequence represented by SEQ ID NO: 5842.

[6336] The probes having the nucleotide sequence represented by SEQ ID NOS: 70941, 70942, 70943, 70944, 70945, 70946, 70947, 70948, 70949, 70950, 70951 were selected from the ORFs having the nucleotide sequence represented by SEQ ID NO: 5843.

[6337] The probes having the nucleotide sequence represented by SEQ ID NOS: 70952, 70953, 70954, 70955, 70956, 70957, 70958, 70959, 70960, 70961, 70962 were selected from the ORFs having the nucleotide sequence represented by SEQ ID NO: 5844.

[6338] The probes having the nucleotide sequence represented by SEQ ID NOS: 70963, 70964, 70965, 70966, 70967, 70968, 70969, 70970, 70971, 70972, 70973 were selected from the ORFs having the nucleotide sequence represented by SEQ ID NO: 5845.

[6339] The probes having the nucleotide sequence represented by SEQ ID NOS: 70974, 70975, 70976, 70977, 70978, 70979, 70980, 70981, 70982, 70983, 70984 were selected from the ORFs having the nucleotide sequence represented by SEQ ID NO: 5846.

[6340] The probes having the nucleotide sequence represented by SEQ ID NOS: 70985, 70986, 70987, 70988, 70989, 70990, 70991, 70992, 70993, 70994, 70995 were selected from the ORFs having the nucleotide sequence represented by SEQ ID NO: 5847.

[6341] The probes having the nucleotide sequence represented by SEQ ID NOS: 70996, 70997, 70998, 70999, 71000, 71001, 71002, 71003, 71004, 71005, 71006 were selected from the ORFs having the nucleotide sequence represented by SEQ ID NO: 5848.

[6342] The probes having the nucleotide sequence represented by SEQ ID NOS: 71007, 71008, 71009, 71010, 71011, 71012, 71013, 71014, 71015, 71016, 71017 were selected from the ORFs having the nucleotide sequence represented by SEQ ID NO: 5849.

[6343] The probes having the nucleotide sequence represented by SEQ ID NOS: 71018, 71019, 71020, 71021, 71022, 71023, 71024, 71025, 71026, 71027, 71028 were selected from the ORFs having the nucleotide sequence represented by SEQ ID NO: 5850.

[6344] The probes having the nucleotide sequence represented by SEQ ID NOS: 71029, 71030, 71031, 71032, 71033, 71034, 71035, 71036, 71037, 71038, 71039 were selected from the ORFs having the nucleotide sequence represented by SEQ ID NO: 5851.

[6345] The probes having the nucleotide sequence represented by SEQ ID NOS: 71040, 71041, 71042, 71043, 71044, 71045, 71046, 71047, 71048, 71049, 71050 were selected from the ORFs having the nucleotide sequence represented by SEQ ID NO: 5852.

[6346] The probes having the nucleotide sequence represented by SEQ ID NOS: 71051, 71052, 71053, 71054, 71055, 71056, 71057, 71058, 71059, 71060, 71061 were selected from the ORFs having the nucleotide sequence represented by SEQ ID NO: 5853.

[6347] The probes having the nucleotide sequence represented by SEQ ID NOS: 71062, 71063, 71064, 71065, 71066, 71067, 71068, 71069, 71070, 71071, 71072 were selected from the ORFs having the nucleotide sequence represented by SEQ ID NO: 5854.

[6348] The probes having the nucleotide sequence represented by SEQ ID NOS: 71073, 71074, 71075, 71076, 71077, 71078, 71079, 71080, 71081, 71082, 71083 were selected from the ORFs having the nucleotide sequence represented by SEQ ID NO: 5855.

[6349] The probes having the nucleotide sequence represented by SEQ ID NOS: 71084, 71085, 71086, 71087, 71088, 71089, 71090, 71091, 71092, 71093, 71094 were selected from the ORFs having the nucleotide sequence represented by SEQ ID NO: 5856.

[6350] The probes having the nucleotide sequence represented by SEQ ID NOS: 71095, 71096, 71097, 71098, 71099, 71100, 71101, 71102, 71103, 71104, 71105 were selected from the ORFs having the nucleotide sequence represented by SEQ ID NO: 5857.

[6351] The probes having the nucleotide sequence represented by SEQ ID NOS: 71106, 71107, 71108, 71109, 71110, 71111, 71112, 71113, 71114, 71115, 71116 were selected from the ORFs having the nucleotide sequence represented by SEQ ID NO: 5858.

[6352] The probes having the nucleotide sequence represented by SEQ ID NOS: 71117, 71118, 71119, 71120, 71121, 71122, 71123, 71124, 71125, 71126, 71127 were selected from the ORFs having the nucleotide sequence represented by SEQ ID NO: 5859.

[6353] The probes having the nucleotide sequence represented by SEQ ID NOS: 71128, 71129, 71130, 71131, 71132, 71133, 71134, 71135, 71136, 71137, 71138 were selected from the ORFs having the nucleotide sequence represented by SEQ ID NO: 5860.

[6354] The probes having the nucleotide sequence represented by SEQ ID NOS: 71139, 71140, 71141, 71142, 71143, 71144, 71145, 71146, 71147, 71148, 71149 were selected from the ORFs having the nucleotide sequence represented by SEQ ID NO: 5861.

[6355] The probes having the nucleotide sequence represented by SEQ ID NOS: 71150, 71151, 71152, 71153, 71154, 71155,

[6356] 71156, 71157, 71158, 71159, 71160 were selected from the ORFs having the nucleotide sequence represented by SEQ ID NO: 5862.

[6357] The probes having the nucleotide sequence represented by SEQ ID NOS: 71161, 71162, 71163, 71164, 71165, 71166, 71167, 71168, 71169, 71170, 71171 were selected from the ORFs having the nucleotide sequence represented by SEQ ID NO: 5863.

[6358] The probes having the nucleotide sequence represented by SEQ ID NOS: 71172, 71173, 71174, 71175, 71176, 71177, 71178, 71179, 71180, 71181, 71182 were selected from the ORFs having the nucleotide sequence represented by SEQ ID NO: 5864.

[6359] The probes having the nucleotide sequence represented by SEQ ID NOS: 71183, 71184, 71185, 71186, 71187, 71188, 71189, 71190, 71191, 71192, 71193 were selected from the ORFs having the nucleotide sequence represented by SEQ ID NO: 5865.

[6360] The probes having the nucleotide sequence represented by SEQ ID NOS: 71194, 71195, 71196, 71197, 71198, 71199, 71200, 71201, 71202, 71203, 71204 were selected from the ORFs having the nucleotide sequence represented by SEQ ID NO: 5866.

[6361] The probes having the nucleotide sequence represented by SEQ ID NOS: 71205, 71206, 71207, 71208, 71209, 71210, 71211, 71212, 71213, 71214, 71215 were selected from the ORFs having the nucleotide sequence represented by SEQ ID NO: 5867.

[6362] The probes having the nucleotide sequence represented by SEQ ID NOS: 71216, 71217, 71218, 71219, 71220, 71221, 71222, 71223, 71224, 71225, 71226 were selected from the ORFs having the nucleotide sequence represented by SEQ ID NO: 5868.

[6363] The probes having the nucleotide sequence represented by SEQ ID NOS: 71227, 71228, 71229, 71230, 71231, 71232, 71233, 71234, 71235, 71236, 71237 were selected from the ORFs having the nucleotide sequence represented by SEQ ID NO: 5869.

[6364] The probes having the nucleotide sequence represented by SEQ ID NOS: 71238, 71239, 71240, 71241, 71242, 71243, 71244, 71245, 71246, 71247, 71248 were selected from the ORFs having the nucleotide sequence represented by SEQ ID NO: 5870.

[6365] The probes having the nucleotide sequence represented by SEQ ID NOS: 71249, 71250, 71251, 71252, 71253, 71254, 71255, 71256, 71257, 71258, 71259 were selected from the ORFs having the nucleotide sequence represented by SEQ ID NO: 5871.

[6366] The probes having the nucleotide sequence represented by SEQ ID NOS: 71260, 71261, 71262, 71263, 71264, 71265, 71266, 71267, 71268, 71269, 71270 were selected from the ORFs having the nucleotide sequence represented by SEQ ID NO: 5872.

[6367] The probes having the nucleotide sequence represented by SEQ ID NOS: 71271, 71272, 71273, 71274, 71275, 71276, 71277, 71278, 71279, 71280, 71281 were selected from the ORFs having the nucleotide sequence represented by SEQ ID NO: 5873.

[6368] The probes having the nucleotide sequence represented by SEQ ID NOS: 71282, 71283, 71284, 71285, 71286, 71287, 71288, 71289, 71290, 71291, 71292 were selected from the ORFs having the nucleotide sequence represented by SEQ ID NO: 5874.

[6369] The probes having the nucleotide sequence represented by SEQ ID NOS: 71293, 71294, 71295, 71296, 71297, 71298, 71299, 71300, 71301, 71302, 71303 were selected from the ORFs having the nucleotide sequence represented by SEQ ID NO: 5875.

[6370] The probes having the nucleotide sequence represented by SEQ ID NOS: 71304, 71305, 71306, 71307, 71308, 71309, 71310, 71311, 71312, 71313, 71314 were selected from the ORFs having the nucleotide sequence represented by SEQ ID NO: 5876.

[6371] The probes having the nucleotide sequence represented by SEQ ID NOS: 71315, 71316, 71317, 71318, 71319, 71320, 71321, 71322, 71323, 71324, 71325 were selected from the ORFs having the nucleotide sequence represented by SEQ ID NO: 5877.

[6372] The probes having the nucleotide sequence represented by SEQ ID NOS: 71326, 71327, 71328, 71329, 71330, 71331, 71332, 71333, 71334, 71335, 71336 were selected from the ORFs having the nucleotide sequence represented by SEQ ID NO: 5878.

[6373] The probes having the nucleotide sequence represented by SEQ ID NOS: 71337, 71338, 71339, 71340, 71341, 71342, 71343, 71344, 71345, 71346, 71347 were selected from the ORFs having the nucleotide sequence represented by SEQ ID NO: 5879.

[6374] The probes having the nucleotide sequence represented by SEQ ID NOS: 71348, 71349, 71350, 71351, 71352, 71353, 71354, 71355, 71356, 71357, 71358 were selected from the ORFs having the nucleotide sequence represented by SEQ ID NO: 5880.

[6375] The probes having the nucleotide sequence represented by SEQ ID NOS: 71359, 71360, 71361, 71362, 71363, 71364, 71365, 71366, 71367, 71368, 71369 were selected from the ORFs having the nucleotide sequence represented by SEQ ID NO: 5881.

[6376] The probes having the nucleotide sequence represented by SEQ ID NOS: 71370, 71371, 71372, 71373, 71374, 71375, 71376, 71377, 71378, 71379, 71380 were selected from the ORFs having the nucleotide sequence represented by SEQ ID NO: 5882.

[6377] The probes having the nucleotide sequence represented by SEQ ID NOS: 71381, 71382, 71383, 71384, 71385, 71386, 71387, 71388, 71389, 71390, 71391 were selected from the ORFs having the nucleotide sequence represented by SEQ ID NO: 5883.

[6378] The probes having the nucleotide sequence represented by SEQ ID NOS: 71392, 71393, 71394, 71395, 71396, 71397, 71398, 71399, 71400, 71401, 71402 were selected from the ORFs having the nucleotide sequence represented by SEQ ID NO: 5884.

[6379] The probes having the nucleotide sequence represented by SEQ ID NOS: 71403, 71404, 71405, 71406, 71407, 71408, 71409, 71410, 71411, 71412, 71413 were selected from the ORFs having the nucleotide sequence represented by SEQ ID NO: 5885.

[6380] The probes having the nucleotide sequence represented by SEQ ID NOS: 71414, 71415, 71416, 71417, 71418, 71419, 71420, 71421, 71422, 71423, 71424 were selected from the ORFs having the nucleotide sequence represented by SEQ ID NO: 5886.

[6381] The probes having the nucleotide sequence represented by SEQ ID NOS: 71425, 71426, 71427, 71428, 71429, 71430, 71431, 71432, 71433, 71434, 71435 were selected from the ORFs having the nucleotide sequence represented by SEQ ID NO: 5887.

[6382] The probes having the nucleotide sequence represented by SEQ ID NOS: 71436, 71437, 71438, 71439, 71440, 71441, 71442, 71443, 71444, 71445, 71446 were selected from the ORFs having the nucleotide sequence represented by SEQ ID NO: 5888.

[6383] The probes having the nucleotide sequence represented by SEQ ID NOS: 71447, 71448, 71449, 71450, 71451, 71452, 71453, 71454, 71455, 71456, 71457 were selected from the ORFs having the nucleotide sequence represented by SEQ ID NO: 5889.

[6384] The probes having the nucleotide sequence represented by SEQ ID NOS: 71458, 71459, 71460, 71461, 71462, 71463, 71464, 71465, 71466, 71467, 71468 were selected from the ORFs having the nucleotide sequence represented by SEQ ID NO: 5890.

[6385] The probes having the nucleotide sequence represented by SEQ ID NOS: 71469, 71470, 71471, 71472, 71473, 71474, 71475, 71476, 71477, 71478, 71479 were selected from the ORFs having the nucleotide sequence represented by SEQ ID NO: 5891.

[6386] The probes having the nucleotide sequence represented by SEQ ID NOS: 71480, 71481, 71482, 71483, 71484, 71485, 71486, 71487, 71488, 71489, 71490 were selected from the ORFs having the nucleotide sequence represented by SEQ ID NO: 5892.

[6387] The probes having the nucleotide sequence represented by SEQ ID NOS: 71491, 71492, 71493, 71494, 71495, 71496, 71497, 71498, 71499, 71500, 71501 were selected from the ORFs having the nucleotide sequence represented by SEQ ID NO: 5893.

[6388] The probes having the nucleotide sequence represented by SEQ ID NOS: 71502, 71503, 71504, 71505, 71506, 71507, 71508, 71509, 71510, 71511, 71512 were selected from the ORFs having the nucleotide sequence represented by SEQ ID NO: 5894.

[6389] The probes having the nucleotide sequence represented by SEQ ID NOS: 71513, 71514, 71515, 71516, 71517, 71518, 71519, 71520, 71521, 71522, 71523 were selected from the ORFs having the nucleotide sequence represented by SEQ ID NO: 5895.

[6390] The probes having the nucleotide sequence represented by SEQ ID NOS: 71524, 71525, 71526, 71527, 71528, 71529, 71530, 71531, 71532, 71533, 71534 were selected from the ORFs having the nucleotide sequence represented by SEQ ID NO: 5896.

[6391] The probes having the nucleotide sequence represented by SEQ ID NOS: 71535, 71536, 71537, 71538, 71539, 71540, 71541, 71542, 71543, 71544, 71545 were selected from the ORFs having the nucleotide sequence represented by SEQ ID NO: 5897.

[6392] The probes having the nucleotide sequence represented by SEQ ID NOS: 71546, 71547, 71548, 71549, 71550, 71551, 71552, 71553, 71554, 71555, 71556 were selected from the ORFs having the nucleotide sequence represented by SEQ ID NO: 5898.

[6393] The probes having the nucleotide sequence represented by SEQ ID NOS: 71557, 71558, 71559, 71560, 71561, 71562, 71563, 71564, 71565, 71566, 71567 were selected from the ORFs having the nucleotide sequence represented by SEQ ID NO: 5899.

[6394] The probes having the nucleotide sequence represented by SEQ ID NOS: 71568, 71569, 71570, 71571, 71572, 71573, 71574, 71575, 71576, 71577, 71578 were selected from the ORFs having the nucleotide sequence represented by SEQ ID NO: 5900.

[6395] The probes having the nucleotide sequence represented by SEQ ID NOS: 71579, 71580, 71581, 71582, 71583, 71584, 71585, 71586, 71587, 71588, 71589 were selected from the ORFs having the nucleotide sequence represented by SEQ ID NO: 5901.

[6396] The probes having the nucleotide sequence represented by SEQ ID NOS: 71590, 71591, 71592, 71593, 71594, 71595, 71596, 71597, 71598, 71599, 71600 were selected from the ORFs having the nucleotide sequence represented by SEQ ID NO: 5902.

[6397] The probes having the nucleotide sequence represented by SEQ ID NOS: 71601, 71602, 71603, 71604, 71605, 71606, 71607, 71608, 71609, 71610, 71611 were selected from the ORFs having the nucleotide sequence represented by SEQ ID NO: 5903.

[6398] The probes having the nucleotide sequence represented by SEQ ID NOS: 71612, 71613, 71614, 71615, 71616, 71617, 71618, 71619, 71620, 71621, 71622 were selected from the ORFs having the nucleotide sequence represented by SEQ ID NO: 5904.

[6399] The probes having the nucleotide sequence represented by SEQ ID NOS: 71623, 71624, 71625, 71626, 71627, 71628, 71629, 71630, 71631, 71632, 71633 were selected from the ORFs having the nucleotide sequence represented by SEQ ID NO: 5905.

[6400] The probes having the nucleotide sequence represented by SEQ ID NOS: 71634, 71635, 71636, 71637, 71638, 71639, 71640, 71641, 71642, 71643, 71644 were selected from the ORFs having the nucleotide sequence represented by SEQ ID NO: 5906.

[6401] The probes having the nucleotide sequence represented by SEQ ID NOS: 71645, 71646, 71647, 71648, 71649, 71650, 71651, 71652, 71653, 71654, 71655 were selected from the ORFs having the nucleotide sequence represented by SEQ ID NO: 5907.

[6402] The probes having the nucleotide sequence represented by SEQ ID NOS: 71656, 71657, 71658, 71659, 71660, 71661, 71662, 71663, 71664, 71665, 71666 were selected from the ORFs having the nucleotide sequence represented by SEQ ID NO: 5908.

[6403] The probes having the nucleotide sequence represented by SEQ ID NOS: 71667, 71668, 71669, 71670, 71671, 71672, 71673, 71674, 71675, 71676, 71677 were selected from the ORFs having the nucleotide sequence represented by SEQ ID NO: 5909.

[6404] The probes having the nucleotide sequence represented by SEQ ID NOS: 71678, 71679, 71680, 71681, 71682, 71683, 71684, 71685, 71686, 71687, 71688 were selected from the ORFs having the nucleotide sequence represented by SEQ ID NO: 5910.

[6405] The probes having the nucleotide sequence represented by SEQ ID NOS: 71689, 71690, 71691, 71692, 71693, 71694, 71695, 71696, 71697, 71698, 71699 were selected from the ORFs having the nucleotide sequence represented by SEQ ID NO: 5911.

[6406] The probes having the nucleotide sequence represented by SEQ ID NOS: 71700, 71701, 71702, 71703, 71704, 71705, 71706, 71707, 71708, 71709, 71710 were selected from the ORFs having the nucleotide sequence represented by SEQ ID NO: 5912.

[6407] The probes having the nucleotide sequence represented by SEQ ID NOS: 71711, 71712, 71713, 71714, 71715, 71716, 71717, 71718, 71719, 71720, 71721 were selected from the ORFs having the nucleotide sequence represented by SEQ ID NO: 5913.

[6408] The probes having the nucleotide sequence represented by SEQ ID NOS: 71722, 71723, 71724, 71725, 71726, 71727, 71728, 71729, 71730, 71731, 71732 were selected from the ORFs having the nucleotide sequence represented by SEQ ID NO: 5914.

[6409] The probes having the nucleotide sequence represented by SEQ ID NOS: 71733, 71734, 71735, 71736, 71737, 71738, 71739, 71740, 71741, 71742, 71743 were selected from the ORFs having the nucleotide sequence represented by SEQ ID NO: 5915.

[6410] The probes having the nucleotide sequence represented by SEQ ID NOS: 71744, 71745, 71746, 71747, 71748, 71749, 71750, 71751, 71752, 71753, 71754 were selected from the ORFs having the nucleotide sequence represented by SEQ ID NO: 5916.

[6411] The probes having the nucleotide sequence represented by SEQ ID NOS: 71755, 71756, 71757, 71758, 71759, 71760, 71761, 71762, 71763, 71764, 71765 were selected from the ORFs having the nucleotide sequence represented by SEQ ID NO: 5917.

[6412] The probes having the nucleotide sequence represented by SEQ ID NOS: 71766, 71767, 71768, 71769, 71770, 71771, 71772, 71773, 71774, 71775, 71776 were selected from the ORFs having the nucleotide sequence represented by SEQ ID NO: 5918.

[6413] The probes having the nucleotide sequence represented by SEQ ID NOS: 71777, 71778, 71779, 71780, 71781, 71782, 71783, 71784, 71785, 71786, 71787 were selected from the ORFs having the nucleotide sequence represented by SEQ ID NO: 5919.

[6414] The probes having the nucleotide sequence represented by SEQ ID NOS: 71788, 71789, 71790, 71791, 71792, 71793, 71794, 71795, 71796, 71797, 71798 were selected from the ORFs having the nucleotide sequence represented by SEQ ID NO: 5920.

[6415] The probes having the nucleotide sequence represented by SEQ ID NOS: 71799, 71800, 71801, 71802, 71803, 71804, 71805, 71806, 71807, 71808, 71809 were selected from the ORFs having the nucleotide sequence represented by SEQ ID NO: 5921.

[6416] The probes having the nucleotide sequence represented by SEQ ID NOS: 71810, 71811, 71812, 71813, 71814, 71815, 71816, 71817, 71818, 71819, 71820 were selected from the ORFs having the nucleotide sequence represented by SEQ ID NO: 5922.

[6417] The probes having the nucleotide sequence represented by SEQ ID NOS: 71821, 71822, 71823, 71824, 71825, 71826, 71827, 71828, 71829, 71830, 71831 were selected from the ORFs having the nucleotide sequence represented by SEQ ID NO: 5923.

[6418] The probes having the nucleotide sequence represented by SEQ ID NOS: 71832, 71833, 71834, 71835, 71836, 71837, 71838, 71839, 71840, 71841, 71842 were selected from the ORFs having the nucleotide sequence represented by SEQ ID NO: 5924.

[6419] The probes having the nucleotide sequence represented by SEQ ID NOS: 71843, 71844, 71845, 71846, 71847, 71848, 71849, 71850, 71851, 71852, 71853 were selected from the ORFs having the nucleotide sequence represented by SEQ ID NO: 5925.

[6420] The probes having the nucleotide sequence represented by SEQ ID NOS: 71854, 71855, 71856, 71857, 71858, 71859, 71860, 71861, 71862, 71863, 71864 were selected from the ORFs having the nucleotide sequence represented by SEQ ID NO: 5926.

[6421] The probes having the nucleotide sequence represented by SEQ ID NOS: 71865, 71866, 71867, 71868, 71869, 71870, 71871, 71872, 71873, 71874, 71875 were selected from the ORFs having the nucleotide sequence represented by SEQ ID NO: 5927.

[6422] The probes having the nucleotide sequence represented by SEQ ID NOS: 71876, 71877, 71878, 71879, 71880, 71881, 71882, 71883, 71884, 71885, 71886 were selected from the ORFs having the nucleotide sequence represented by SEQ ID NO: 5928.

[6423] The probes having the nucleotide sequence represented by SEQ ID NOS: 71887, 71888, 71889, 71890, 71891, 71892, 71893, 71894, 71895, 71896, 71897 were selected from the ORFs having the nucleotide sequence represented by SEQ ID NO: 5929.

[6424] The probes having the nucleotide sequence represented by SEQ ID NOS: 71898, 71899, 71900, 71901, 71902, 71903, 71904, 71905, 71906, 71907, 71908 were selected from the ORFs having the nucleotide sequence represented by SEQ ID NO: 5930.

[6425] The probes having the nucleotide sequence represented by SEQ ID NOS: 71909, 71910, 71911, 71912, 71913, 71914, 71915, 71916, 71917, 71918, 71919 were selected from the ORFs having the nucleotide sequence represented by SEQ ID NO: 5931.

[6426] The probes having the nucleotide sequence represented by SEQ ID NOS: 71920, 71921, 71922, 71923, 71924, 71925, 71926, 71927, 71928, 71929, 71930 were selected from the ORFs having the nucleotide sequence represented by SEQ ID NO: 5932.

[6427] The probes having the nucleotide sequence represented by SEQ ID NOS: 71931, 71932, 71933, 71934, 71935, 71936, 71937, 71938, 71939, 71940, 71941 were selected from the ORFs having the nucleotide sequence represented by SEQ ID NO: 5933.

[6428] The probes having the nucleotide sequence represented by SEQ ID NOS: 71942, 71943, 71944, 71945, 71946, 71947, 71948, 71949, 71950, 71951, 71952 were selected from the ORFs having the nucleotide sequence represented by SEQ ID NO: 5934.

[6429] The probes having the nucleotide sequence represented by SEQ ID NOS: 71953, 71954, 71955, 71956, 71957, 71958, 71959, 71960, 71961, 71962, 71963 were selected from the ORFs having the nucleotide sequence represented by SEQ ID NO: 5935.

[6430] The probes having the nucleotide sequence represented by SEQ ID NOS: 71964, 71965, 71966, 71967, 71968, 71969, 71970, 71971, 71972, 71973, 71974 were selected from the ORFs having the nucleotide sequence represented by SEQ ID NO: 5936.

[6431] The probes having the nucleotide sequence represented by SEQ ID NOS: 71975, 71976, 71977, 71978, 71979, 71980, 71981, 71982, 71983, 71984, 71985 were selected from the ORFs having the nucleotide sequence represented by SEQ ID NO: 5937.

[6432] The probes having the nucleotide sequence represented by SEQ ID NOS: 71986, 71987, 71988, 71989, 71990, 71991, 71992, 71993, 71994, 719,95, 71996 were selected from the ORFs having the nucleotide sequence represented by SEQ ID NO: 5938.

[6433] The probes having the nucleotide sequence represented by SEQ ID NOS: 71997, 71998, 71999, 72000, 72001, 72002, 72003, 72004, 72005, 72006, 72007 were selected from the ORFs having the nucleotide sequence represented by SEQ ID NO: 5939.

[6434] The probes having the nucleotide sequence represented by SEQ ID NOS: 72008, 72009, 72010, 72011, 72012, 72013, 72014, 72015, 72016, 72017, 72018 were selected from the ORFs having the nucleotide sequence represented by SEQ ID NO: 5940.

[6435] The probes having the nucleotide sequence represented by SEQ ID NOS: 72019, 72020, 72021, 72022, 72023, 72024, 72025, 72026, 72027, 72028, 72029 were selected from the ORFs having the nucleotide sequence represented by SEQ ID NO: 5941.

[6436] The probes having the nucleotide sequence represented by SEQ ID NOS: 72030, 72031, 72032, 72033, 72034, 72035, 72036, 72037, 72038, 72039, 72040 were selected from the ORFs having the nucleotide sequence represented by SEQ ID NO: 5942.

[6437] The probes having the nucleotide sequence represented by SEQ ID NOS: 72041, 72042, 72043, 72044, 72045, 72046, 72047, 72048, 72049, 72050, 72051 were selected from the ORFs having the nucleotide sequence represented by SEQ ID NO: 5943.

[6438] The probes having the nucleotide sequence represented by SEQ ID NOS: 72052, 72053, 72054, 72055, 72056, 72057, 72058, 72059, 72060, 72061, 72062 were selected from the ORFs having the nucleotide sequence represented by SEQ ID NO: 5944.

[6439] The probes having the nucleotide sequence represented by SEQ ID NOS: 72063, 72064, 72065, 72066, 72067, 72068, 72069, 72070, 72071, 72072, 72073 were selected from the ORFs having the nucleotide sequence represented by SEQ ID NO: 5945.

[6440] The probes having the nucleotide sequence represented by SEQ ID NOS: 72074, 72075, 72076, 72077, 72078, 72079, 72080, 72081, 72082, 72083, 72084 were selected from the ORFs having the nucleotide sequence represented by SEQ ID NO: 5946.

[6441] The probes having the nucleotide sequence represented by SEQ ID NOS: 72085, 72086, 72087, 72088, 72089, 72090, 72091, 72092, 72093, 72094, 72095 were selected from the ORFs having the nucleotide sequence represented by SEQ ID NO: 5947.

[6442] The probes having the nucleotide sequence represented by SEQ ID NOS: 72096, 72097, 72098, 72099, 72100, 72101, 72102, 72103, 72104, 72105, 72106 were selected from the ORFs having the nucleotide sequence represented by SEQ ID NO: 5948.

[6443] The probes having the nucleotide sequence represented by SEQ ID NOS: 72107, 72108, 72109, 72110, 72111, 72112, 72113, 72114, 72115, 72116, 72117 were selected from the ORFs having the nucleotide sequence represented by SEQ ID NO: 5949.

[6444] The probes having the nucleotide sequence represented by SEQ ID NOS: 72118, 72119, 72120, 72121, 72122, 72123, 72124, 72125, 72126, 72127, 72128 were selected from the ORFs having the nucleotide sequence represented by SEQ ID NO: 5950.

[6445] The probes having the nucleotide sequence represented by SEQ ID NOS: 72129, 72130, 72131, 72132, 72133, 72134, 72135, 72136, 72137, 72138, 72139 were selected from the ORFs having the nucleotide sequence represented by SEQ ID NO: 5951.

[6446] The probes having the nucleotide sequence represented by SEQ ID NOS: 72140, 72141, 72142, 72143, 72144, 72145, 72146, 72147, 72148, 72149, 72150 were selected from the ORFs having the nucleotide sequence represented by SEQ ID NO: 5952.

[6447] The probes having the nucleotide sequence represented by SEQ ID NOS: 72151, 72152, 72153, 72154, 72155, 72156, 72157, 72158, 72159, 72160, 72161, 72162, 72163, 72164, 72165, 72166, 72167, 72168, 72169, 72170, 72171, 72172 were selected from the ORFs having the nucleotide sequence represented by SEQ ID NO: 5953.

[6448] The probes having the nucleotide sequence represented by SEQ ID NOS: 72173, 72174, 72175, 72176, 72177, 72178, 72179, 72180, 72181, 72182, 72183 were selected from the ORFs having the nucleotide sequence represented by SEQ ID NO: 5954.

[6449] The probes having the nucleotide sequence represented by SEQ ID NOS: 72184, 72185, 72186, 72187, 72188, 72189, 72190, 72191, 72192, 72193, 72194 were selected from the ORFs having the nucleotide sequence represented by SEQ ID NO: 5955.

[6450] The probes having the nucleotide sequence represented by SEQ ID NOS: 72195, 72196, 72197, 72198, 72199, 72200, 72201, 72202, 72203, 72204, 72205 were selected from the ORFs having the nucleotide sequence represented by SEQ ID NO: 5956.

[6451] The probes having the nucleotide sequence represented by SEQ ID NOS: 72206, 72207, 72208, 72209, 72210, 72211, 72212, 72213, 72214, 72215, 72216 were selected from the ORFs having the nucleotide sequence represented by SEQ ID NO: 5957.

[6452] The probes having the nucleotide sequence represented by SEQ ID NOS: 72217, 72218, 72219, 72220, 72221, 72222, 72223, 72224, 72225, 72226, 72227 were selected from the ORFs having the nucleotide sequence represented by SEQ ID NO: 5958.

[6453] The probes having the nucleotide sequence represented by SEQ ID NOS: 72228, 72229, 72230, 72231, 72232, 72233, 72234, 72235, 72236, 72237, 72238 were selected from the ORFs having the nucleotide sequence represented by SEQ ID NO: 5959.

[6454] The probes having the nucleotide sequence represented by SEQ ID NOS: 72239, 72240, 72241, 72242, 72243, 72244, 72245, 72246, 72247, 72248, 72249 were selected from the ORFs having the nucleotide sequence represented by SEQ ID NO: 5960.

[6455] The probes having the nucleotide sequence represented by SEQ ID NOS: 72250, 72251, 72252, 72253, 72254, 72255, 72256, 72257, 72258, 72259, 72260 were selected from the ORFs having the nucleotide sequence represented by SEQ ID NO: 5961.

[6456] The probes having the nucleotide sequence represented by SEQ ID NOS: 72261, 72262, 72263, 72264, 72265, 72266, 72267, 72268, 72269, 72270, 72271 were selected from the ORFs having the nucleotide sequence represented by SEQ ID NO: 5962.

[6457] The probes having the nucleotide sequence represented by SEQ ID NOS: 72272, 72273, 72274, 72275, 72276, 72277, 72278, 72279, 72280, 72281, 72282 were selected from the ORFs having the nucleotide sequence represented by SEQ ID NO: 5963.

[6458] The probes having the nucleotide sequence represented by SEQ ID NOS: 72283, 72284, 72285, 72286, 72287, 72288, 72289, 72290, 72291, 72292, 72293 were selected from the ORFs having the nucleotide sequence represented by SEQ ID NO: 5964.

[6459] The probes having the nucleotide sequence represented by SEQ ID NOS: 72294, 72295, 72296, 72297, 72298, 72299, 72300, 72301, 72302, 72303, 72304 were selected from the ORFs having the nucleotide sequence represented by SEQ ID NO: 5965.

[6460] The probes having the nucleotide sequence represented by SEQ ID NOS: 72305, 72306, 72307, 72308, 72309, 72310, 72311, 72312, 72313, 72314, 72315 were selected from the ORFs having the nucleotide sequence represented by SEQ ID NO: 5966.

[6461] The probes having the nucleotide sequence represented by SEQ ID NOS: 72316, 72317, 72318, 72319, 72320, 72321, 72322, 72323, 72324, 72325, 72326 were selected from the ORFs having the nucleotide sequence represented by SEQ ID NO: 5967.

[6462] The probes having the nucleotide sequence represented by SEQ ID NOS: 72327, 72328, 72329, 72330, 72331, 72332, 72333, 72334, 72335, 72336, 72337 were selected from the ORFs having the nucleotide sequence represented by SEQ ID NO: 5968.

[6463] The probes having the nucleotide sequence represented by SEQ ID NOS: 72338, 72339, 72340, 72341, 72342, 72343, 72344, 72345, 72346, 72347, 72348 were selected from the ORFs having the nucleotide sequence represented by SEQ ID NO: 5969.

[6464] The probes having the nucleotide sequence represented by SEQ ID NOS: 72349, 72350, 72351, 72352, 72353, 72354, 72355, 72356, 72357, 72358, 72359 were selected from the ORFs having the nucleotide sequence represented by SEQ ID NO: 5970.

[6465] The probes having the nucleotide sequence represented by SEQ ID NOS: 72360, 72361, 72362, 72363, 72364, 72365, 72366, 72367, 72368, 72369, 72370, 72371, 72372, 72373, 72374, 72375, 72376, 72377, 72378, 72379, 72380, 72381 were selected from the ORFs having the nucleotide sequence represented by SEQ ID NO: 5971.

[6466] The probes having the nucleotide sequence represented by SEQ ID NOS: 72382, 72383, 72384, 72385, 72386, 72387, 72388, 72389, 72390, 72391, 72392 were selected from the ORFs having the nucleotide sequence represented by SEQ ID NO: 5972.

[6467] The probes having the nucleotide sequence represented by SEQ ID NOS: 72393, 72394, 72395, 72396, 72397, 72398, 72399, 72400, 72401, 72402, 72403 were selected from the ORFs having the nucleotide sequence represented by SEQ ID NO: 5973.

[6468] The probes having the nucleotide sequence represented by SEQ ID NOS: 72404, 72405, 72406, 72407, 72408, 72409, 72410, 72411, 72412, 72413, 72414 were selected from the ORFs having the nucleotide sequence represented by SEQ ID NO: 5974.

[6469] The probes having the nucleotide sequence represented by SEQ ID NOS: 72415, 72416, 72417, 72418, 72419, 72420, 72421, 72422, 72423, 72424, 72425 were selected from the ORFs having the nucleotide sequence represented by SEQ ID NO: 5975.

[6470] The probes having the nucleotide sequence represented by SEQ ID NOS: 72426, 72427, 72428, 72429, 72430, 72431, 72432, 72433, 72434, 72435, 72436 were selected from the ORFs having the nucleotide sequence represented by SEQ ID NO: 5976.

[6471] The probes having the nucleotide sequence represented by SEQ ID NOS: 72437, 72438, 72439, 72440, 72441, 72442, 72443, 72444, 72445, 72446, 72447 were selected from the ORFs having the nucleotide sequence represented by SEQ ID NO: 5977.

[6472] The probes having the nucleotide sequence represented by SEQ ID NOS: 72448, 72449, 72450, 72451, 72452, 72453, 72454, 72455, 72456, 72457, 72458, 72459, 72460, 72461, 72462, 72463, 72464, 72465, 72466, 72467, 72468, 72469 were selected from the ORFs having the nucleotide sequence represented by SEQ ID NO: 5978.

[6473] The probes having the nucleotide sequence represented by SEQ ID NOS: 72470, 72471, 72472, 72473, 72474, 72475, 72476, 72477, 72478, 72479, 72480 were selected from the ORFs having the nucleotide sequence represented by SEQ ID NO: 5979.

[6474] The probes having the nucleotide sequence represented by SEQ ID NOS: 72481, 72482, 72483, 72484, 72485, 72486, 72487, 72488, 72489, 72490, 72491 were selected from the ORFs having the nucleotide sequence represented by SEQ ID NO: 5980.

[6475] The probes having the nucleotide sequence represented by SEQ ID NOS: 72492, 72493, 72494, 72495, 72496, 72497, 72498, 72499, 72500, 72501, 72502 were selected from the ORFs having the nucleotide sequence represented by SEQ ID NO: 5981.

[6476] The probes having the nucleotide sequence represented by SEQ ID NOS: 72503, 72504, 72505, 72506, 72507, 72508, 72509, 72510, 72511, 72512, 72513 were selected from the ORFs having the nucleotide sequence represented by SEQ ID NO: 5982.

[6477] The probes having the nucleotide sequence represented by SEQ ID NOS: 72514, 72515, 72516, 72517, 72518, 72519, 72520, 72521, 72522, 72523, 72524 were selected from the ORFs having the nucleotide sequence represented by SEQ ID NO: 5983.

[6478] The probes having the nucleotide sequence represented by SEQ ID NOS: 72525, 72526, 72527, 72528, 72529, 72530, 72531, 72532, 72533, 72534, 72535 were selected from the ORFs having the nucleotide sequence represented by SEQ ID NO: 5984.

[6479] The probes having the nucleotide sequence represented by SEQ ID NOS: 72536, 72537, 72538, 72539, 72540, 72541, 72542, 72543, 72544, 72545, 72546 were selected from the ORFs having the nucleotide sequence represented by SEQ ID NO: 5985.

[6480] The probes having the nucleotide sequence represented by SEQ ID NOS: 72547, 72548, 72549, 72550, 72551, 72552, 72553, 72554, 72555, 72556, 72557 were selected from the ORFs having the nucleotide sequence represented by SEQ ID NO: 5986.

[6481] The probes having the nucleotide sequence represented by SEQ ID NOS: 72558, 72559, 72560, 72561, 72562, 72563, 72564, 72565, 72566, 72567, 72568 were selected from the ORFs having the nucleotide sequence represented by SEQ ID NO: 5987.

[6482] The probes having the nucleotide sequence represented by SEQ ID NOS: 72569, 72570, 72571, 72572, 72573, 72574, 72575, 72576, 72577, 72578, 72579 were selected from the ORFs having the nucleotide sequence represented by SEQ ID NO: 5988.

[6483] The probes having the nucleotide sequence represented by SEQ ID NOS: 72580, 72581, 72582, 72583, 72584, 72585, 72586, 72587, 72588, 72589, 72590 were selected from the ORFs having the nucleotide sequence represented by SEQ ID NO: 5989.

[6484] The probes having the nucleotide sequence represented by SEQ ID NOS: 72591, 72592, 72593, 72594, 72595, 72596, 72597, 72598, 72599, 72600, 72601 were selected from the ORFs having the nucleotide sequence represented by SEQ ID NO: 5990.

[6485] The probes having the nucleotide sequence represented by SEQ ID NOS: 72602, 72603, 72604, 72605, 72606, 72607, 72608, 72609, 72610, 72611, 72612 were selected from the ORFs having the nucleotide sequence represented by SEQ ID NO: 5991.

[6486] The probes having the nucleotide sequence represented by SEQ ID NOS: 72613, 72614, 72615, 72616, 72617, 72618, 72619, 72620, 72621, 72622, 72623 were selected from the ORFs having the nucleotide sequence represented by SEQ ID NO: 5992.

[6487] The probes having the nucleotide sequence represented by SEQ ID NOS: 72624, 72625, 72626, 72627, 72628, 72629, 72630, 72631, 72632, 72633, 72634 were selected from the ORFs having the nucleotide sequence represented by SEQ ID NO: 5993.

[6488] The probes having the nucleotide sequence represented by SEQ ID NOS: 72635, 72636, 72637, 72638, 72639, 72640, 72641, 72642, 72643, 72644, 72645 were selected from the ORFs having the nucleotide sequence represented by SEQ ID NO: 5994.

[6489] The probes having the nucleotide sequence represented by SEQ ID NOS: 72646, 72647, 72648, 72649, 72650, 72651, 72652, 72653, 72654, 72655, 72656 were selected from the ORFs having the nucleotide sequence represented by SEQ ID NO: 5995.

[6490] The probes having the nucleotide sequence represented by SEQ ID NOS: 72657, 72658, 72659, 72660, 72661, 72662, 72663, 72664, 72665, 72666, 72667 were selected from the ORFs having the nucleotide sequence represented by SEQ ID NO: 5996.

[6491] The probes having the nucleotide sequence represented by SEQ ID NOS: 72668, 72669, 72670, 72671, 72672, 72673, 72674, 72675, 72676, 72677, 72678 were selected from the ORFs having the nucleotide sequence represented by SEQ ID NO: 5997.

[6492] The probes having the nucleotide sequence represented by SEQ ID NOS: 72679, 72680, 72681, 72682, 72683, 72684, 72685, 72686, 72687, 72688, 72689 were selected from the ORFs having the nucleotide sequence represented by SEQ ID NO: 5998.

[6493] The probes having the nucleotide sequence represented by SEQ ID NOS: 72690, 72691, 72692, 72693, 72694, 72695, 72696, 72697, 72698, 72699, 72700 were selected from the ORFs having the nucleotide sequence represented by SEQ ID NO: 5999.

[6494] The probes having the nucleotide sequence represented by SEQ ID NOS: 72701, 72702, 72703, 72704, 72705, 72706, 72707, 72708, 72709, 72710, 72711 were selected from the ORFs having the nucleotide sequence represented by SEQ ID NO: 6000.

[6495] The probes having the nucleotide sequence represented by SEQ ID NOS: 72712, 72713, 72714, 72715, 72716, 72717, 72718, 72719, 72720, 72721, 72722 were selected from the ORFs having the nucleotide sequence represented by SEQ ID NO: 6001.

[6496] The probes having the nucleotide sequence represented by SEQ ID NOS: 72723, 72724, 72725, 72726, 72727, 72728, 72729, 72730, 72731, 72732, 72733 were selected from the ORFs having the nucleotide sequence represented by SEQ ID NO: 6002.

[6497] The probes having the nucleotide sequence represented by SEQ ID NOS: 72734, 72735, 72736, 72737, 72738, 72739, 72740, 72741, 72742, 72743, 72744 were selected from the ORFs having the nucleotide sequence represented by SEQ ID NO: 6003.

[6498] The probes having the nucleotide sequence represented by SEQ ID NOS: 72745, 72746, 72747, 72748, 72749, 72750, 72751, 72752, 72753, 72754, 72755 were selected from the ORFs having the nucleotide sequence represented by SEQ ID NO: 6004.

[6499] The probes having the nucleotide sequence represented by SEQ ID NOS: 72756, 72757, 72758, 72759, 72760, 72761, 72762, 72763, 72764, 72765, 72766 were selected from the ORFs having the nucleotide sequence represented by SEQ ID NO: 6005.

[6500] The probes having the nucleotide sequence represented by SEQ ID NOS: 72767, 72768, 72769, 72770, 72771, 72772, 72773, 72774, 72775, 72776, 72777 were selected from the ORFs having the nucleotide sequence represented by SEQ ID NO: 6006.

[6501] The probes having the nucleotide sequence represented by SEQ ID NOS: 72778, 72779, 72780, 72781, 72782, 72783, 72784, 72785, 72786, 72787, 72788 were selected from the ORFs having the nucleotide sequence represented by SEQ ID NO: 6007.

[6502] The probes having the nucleotide sequence represented by SEQ ID NOS: 72789, 72790, 72791, 72792, 72793, 72794, 72795, 72796, 72797, 72798, 72799 were selected from the ORFs having the nucleotide sequence represented by SEQ ID NO: 6008.

[6503] The probes having the nucleotide sequence represented by SEQ ID NOS: 72800, 72801, 72802, 72803, 72804, 72805, 72806, 72807, 72808, 72809, 72810 were selected from the ORFs having the nucleotide sequence represented by SEQ ID NO: 6009.

[6504] The probes having the nucleotide sequence represented by SEQ ID NOS: 72811, 72812, 72813, 72814, 72815, 72816, 72817, 72818, 72819, 72820, 72821 were selected from the ORFs having the nucleotide sequence represented by SEQ ID NO: 6010.

[6505] The probes having the nucleotide sequence represented by SEQ ID NOS: 72822, 72823, 72824, 72825, 72826, 72827, 72828, 72829, 72830, 72831, 72832 were selected from the ORFs having the nucleotide sequence represented by SEQ ID NO: 6011.

[6506] The probes having the nucleotide sequence represented by SEQ ID NOS: 72833, 72834, 72835, 72836, 72837, 72838, 72839, 72840, 72841, 72842, 72843 were selected from the ORFs having the nucleotide sequence represented by SEQ ID NO: 6012.

[6507] The probes having the nucleotide sequence represented by SEQ ID NOS: 72844, 72845, 72846, 72847, 72848, 72849, 72850, 72851, 72852, 72853, 72854 were selected from the ORFs having the nucleotide sequence represented by SEQ ID NO: 6013.

[6508] The probes having the nucleotide sequence represented by SEQ ID NOS: 72855, 72856, 72857, 72858, 72859, 72860, 72861, 72862, 72863, 72864, 72865 were selected from the ORFs having the nucleotide-sequence represented by SEQ ID NO: 6014.

[6509] The probes having the nucleotide sequence represented by SEQ ID NOS: 72866, 72867, 72868, 72869, 72870, 72871, 72872, 72873, 72874, 72875, 72876, 72877, 72878, 72879, 72880, 72881, 72882, 72883, 72884, 72885, 72886, 72887 were selected from the ORFs having the nucleotide sequence represented by SEQ ID NO: 6015.

[6510] The probes having the nucleotide sequence represented by SEQ ID NOS: 72888, 72889, 72890, 72891, 72892, 72893, 72894, 72895, 72896, 72897, 72898 were selected from the ORFs having the nucleotide sequence represented by SEQ ID NO: 6016.

[6511] The probes having the nucleotide sequence represented by SEQ ID NOS: 72899, 72900, 72901, 72902, 72903, 72904, 72905, 72906, 72907, 72908, 72909 were selected from the ORFs having the nucleotide sequence represented by SEQ ID NO: 6017.

[6512] The probes having the nucleotide sequence represented by SEQ ID NOS: 72910, 72911, 72912, 72913, 72914, 72915, 72916, 72917, 72918, 72919, 72920 were selected from the ORFs having the nucleotide sequence represented by SEQ ID NO: 6018.

[6513] The probes having the nucleotide sequence represented by SEQ ID NOS: 72921, 72922, 72923, 72924, 72925, 72926, 72927, 72928, 72929, 72930, 72931 were selected from the ORFs having the nucleotide sequence represented by SEQ ID NO: 6019.

[6514] The probes having the nucleotide sequence represented by SEQ ID NOS: 72932, 72933, 72934, 72935, 72936, 72937, 72938, 72939, 72940, 72941, 72942 were selected from the ORFs having the nucleotide sequence represented by SEQ ID NO: 6020.

[6515] The probes having the nucleotide sequence represented by SEQ ID NOS: 72943, 72944, 72945, 72946, 72947, 72948, 72949, 72950, 72951, 72952, 72953 were selected from the ORFs having the nucleotide sequence represented by SEQ ID NO: 6021.

[6516] The probes having the nucleotide sequence represented by SEQ ID NOS: 72954, 72955, 72956, 72957, 72958, 72959, 72960, 72961, 72962, 72963, 72964 were selected from the ORFs having the nucleotide sequence represented by SEQ ID NO: 6022.

[6517] The probes having the nucleotide sequence represented by SEQ ID NOS: 72965, 72966, 72967, 72968, 72969, 72970, 72971, 72972, 72973, 72974, 72975 were selected from the ORFs having the nucleotide sequence represented by SEQ ID NO: 6023.

[6518] The probes having the nucleotide sequence represented by SEQ ID NOS: 72976, 72977, 72978, 72979, 72980, 72981, 72982, 72983, 72984, 72985, 72986 were selected from the ORFs having the nucleotide sequence represented by SEQ ID NO: 6024.

[6519] The probes having the nucleotide sequence represented by SEQ ID NOS: 72987, 72988, 72989, 72990, 72991, 72992, 72993, 72994, 72995, 72996, 72997 were selected from the ORFs having the nucleotide sequence represented by SEQ ID NO: 6025.

[6520] The probes having the nucleotide sequence represented by SEQ ID NOS: 72998, 72999, 73000, 73001, 73002, 73003, 73004, 73005, 73006, 73007, 73008 were selected from the ORFs having the nucleotide sequence represented by SEQ ID NO: 6026.

[6521] The probes having the nucleotide sequence represented by SEQ ID NOS: 73009, 73010, 73011, 73012, 73013, 73014, 73015, 73016, 73017, 73018, 73019 were selected from the ORFs having the nucleotide sequence represented by SEQ ID NO: 6027.

[6522] The probes having the nucleotide sequence represented by SEQ ID NOS: 73020, 73021, 73022, 73023, 73024, 73025, 73026, 73027, 73028, 73029, 73030 were selected from the ORFs having the nucleotide sequence represented by SEQ ID NO: 6028.

[6523] The probes having the nucleotide sequence represented by SEQ ID NOS: 73031, 73032, 73033, 73034, 73035, 73036, 73037, 73038, 73039, 73040, 73041 were selected from the ORFs having the nucleotide sequence represented by SEQ ID NO: 6029.

[6524] The probes having the nucleotide sequence represented by SEQ ID NOS: 73042, 73043, 73044, 73045, 73046, 73047, 73048, 73049, 73050, 73051, 73052 were selected from the ORFs having the nucleotide sequence represented by SEQ ID NO: 6030.

[6525] The probes having the nucleotide sequence represented by SEQ ID NOS: 73053, 73054, 73055, 73056, 73057, 73058, 73059, 73060, 73061, 73062, 73063 were selected from the ORFs having the nucleotide sequence represented by SEQ ID NO: 6031.

[6526] The probes having the nucleotide sequence represented by SEQ ID NOS: 73064, 73065, 73066, 73067, 73068, 73069, 73070, 73071, 73072, 73073, 73074 were selected from the ORFs having the nucleotide sequence represented by SEQ ID NO: 6032.

[6527] The probes having the nucleotide sequence represented by SEQ ID NOS: 73075, 73076, 73077, 73078, 73079, 73080, 73081, 73082 were selected from the ORFs having the nucleotide sequence represented by SEQ ID NO: 6033.

[6528] The probes having the nucleotide sequence represented by SEQ ID NOS: 73083, 73084, 73085, 73086, 73087, 73088, 73089, 73090, 73091, 73092, 73093 were selected from the ORFs having the nucleotide sequence represented by SEQ ID NO: 6034.

[6529] The probes having the nucleotide sequence represented by SEQ ID NOS: 73094, 73095, 73096, 73097, 73098, 73099, 73100, 73101, 73102, 73103, 73104 were selected from the ORFs having the nucleotide sequence represented by SEQ ID NO: 6035.

[6530] The probes having the nucleotide sequence represented by SEQ ID NOS: 73105, 73106, 73107, 73108, 73109, 73110, 73111, 73112, 73113, 73114, 73115 were selected from the ORFs having the nucleotide sequence represented by SEQ ID NO: 6036.

[6531] The probes having the nucleotide sequence represented by SEQ ID NOS: 73116, 73117, 73118, 73119, 73120, 73121, 73122, 73123, 73124, 73125, 73126 were selected from the ORFs having the nucleotide sequence represented by SEQ ID NO: 6037.

[6532] The probes having the nucleotide sequence represented by SEQ ID NOS: 73127, 73128, 73129, 73130, 73131, 73132, 73133, 73134, 73135, 73136, 73137 were selected from the ORFs having the nucleotide sequence represented by SEQ ID NO: 6038.

[6533] The probes having the nucleotide sequence represented by SEQ ID NOS: 73138, 73139, 73140, 73141, 73142, 73143, 73144, 73145, 73146, 73147, 73148 were selected from the ORFs having the nucleotide sequence represented by SEQ ID NO: 6039.

[6534] The probes having the nucleotide sequence represented by SEQ ID NOS: 73149, 73150, 73151, 73152, 73153, 73154, 73155, 73156, 73157, 73158, 73159 were selected from the ORFs having the nucleotide sequence represented by SEQ ID NO: 6040.

[6535] The probes having the nucleotide sequence represented by SEQ ID NOS: 73160, 73161, 73162, 73163, 73164, 73165, 73166, 73167, 73168, 73169, 73170 were selected from the ORFs having the nucleotide sequence represented by SEQ ID NO: 6041.

[6536] The probes having the nucleotide sequence represented by SEQ ID NOS: 73171, 73172, 73173, 73174, 73175, 73176, 73177, 73178, 73179, 73180, 73181 were selected from the ORFs having the nucleotide sequence represented by SEQ ID NO: 6042.

[6537] The probes having the nucleotide sequence represented by SEQ ID NOS: 73182, 73183, 73184, 73185, 73186, 73187, 73188, 73189, 73190, 73191, 73192 were selected from the ORFs having the nucleotide sequence represented by SEQ ID NO: 6043.

[6538] The probes having the nucleotide sequence represented by SEQ ID NOS: 73193, 73194, 73195, 73196, 73197, 73198, 73199, 73200, 73201, 73202, 73203 were selected from the ORFs having the nucleotide sequence represented by SEQ ID NO: 6044.

[6539] The probes having the nucleotide sequence represented by SEQ ID NOS: 73204, 73205, 73206, 73207, 73208, 73209, 73210, 73211, 73212, 73213, 73214 were selected from the ORFs having the nucleotide sequence represented by SEQ ID NO: 6045.

[6540] The probes having the nucleotide sequence represented by SEQ ID NOS: 73215, 73216, 73217, 73218, 73219, 73220, 73221, 73222, 73223, 73224, 73225 were selected from the ORFs having the nucleotide sequence represented by SEQ ID NO: 6046.

[6541] The probes having the nucleotide sequence represented by SEQ ID NOS: 73226, 73227, 73228, 73229, 73230, 73231, 73232, 73233, 73234, 73235, 73236 were selected from the ORFs having the nucleotide sequence represented by SEQ ID NO: 6047.

[6542] The probes having the nucleotide sequence represented by SEQ ID NOS: 73237, 73238, 73239, 73240, 73241, 73242, 73243, 73244, 73245, 73246, 73247 were selected from the ORFs having the nucleotide sequence represented by SEQ ID NO: 6048.

[6543] The probes having the nucleotide sequence represented by SEQ ID NOS: 73248, 73249, 73250, 73251, 73252, 73253, 73254, 73255, 73256, 73257, 73258 were selected from the ORFs having the nucleotide sequence represented by SEQ ID NO: 6049.

[6544] The probes having the nucleotide sequence represented by SEQ ID NOS: 73259, 73260, 73261, 73262, 73263, 73264, 73265, 73266, 73267, 73268, 73269 were selected from the ORFs having the nucleotide sequence represented by SEQ ID NO: 6050.

[6545] The probes having the nucleotide sequence represented by SEQ ID NOS: 73270, 73271, 73272, 73273, 73274, 73275, 73276, 73277, 73278, 73279, 73280 were selected from the ORFs having the nucleotide sequence represented by SEQ ID NO: 6051.

[6546] The probes having the nucleotide sequence represented by SEQ ID NOS: 73281, 73282, 73283, 73284, 73285, 73286, 73287, 73288, 73289, 73290, 73291 were selected from the ORFs having the nucleotide sequence represented by SEQ ID NO: 6052.

[6547] The probes having the nucleotide sequence represented by SEQ ID NOS: 73292, 73293, 73294, 73295, 73296, 73297, 73298, 73299, 73300, 73301, 73302 were selected from the ORFs having the nucleotide sequence represented by SEQ ID NO: 6053.

[6548] The probes having the nucleotide sequence represented by SEQ ID NOS: 73303, 73304, 73305, 73306, 73307, 73308, 73309, 73310, 73311, 73312, 73313 were selected from the ORFs having the nucleotide sequence represented by SEQ ID NO: 6054.

[6549] The probes having the nucleotide sequence represented by SEQ ID NOS: 73314, 73315, 73316, 73317, 73318, 73319, 73320, 73321, 73322, 73323, 73324 were selected from the ORFs having the nucleotide sequence represented by SEQ ID NO: 6055.

[6550] The probes having the nucleotide sequence represented by SEQ ID NOS: 73325, 73326, 73327, 73328, 73329, 73330, 73331, 73332, 73333, 73334, 73335 were selected from the ORFs having the nucleotide sequence represented by SEQ ID NO: 6056.

[6551] The probes having the nucleotide sequence represented by SEQ ID NOS: 73336, 73337, 73338, 73339, 73340, 73341, 73342, 73343, 73344, 73345, 73346 were selected from the ORFs having the nucleotide sequence represented by SEQ ID NO: 6057.

[6552] The probes having the nucleotide sequence represented by SEQ ID NOS: 73347, 73348, 73349, 73350, 73351, 73352, 73353, 73354, 73355, 73356, 73357 were selected from the ORFs having the nucleotide sequence represented by SEQ ID NO: 6058.

[6553] The probes having the nucleotide sequence represented by SEQ ID NOS: 73358, 73359, 73360, 73361, 73362, 73363, 73364, 73365, 73366, 73367, 73368 were selected from the ORFs having the nucleotide sequence represented by SEQ ID NO: 6059.

[6554] The probes having the nucleotide sequence represented by SEQ ID NOS: 73369, 73370, 73371, 73372, 73373, 73374, 73375, 73376, 73377, 73378, 73379 were selected from the ORFs having the nucleotide sequence represented by SEQ ID NO: 6060.

[6555] The probes having the nucleotide sequence represented by SEQ ID NOS: 73380, 73381, 73382, 73383, 73384, 73385, 73386, 73387, 73388, 73389, 73390 were selected from the ORFs having the nucleotide sequence represented by SEQ ID NO: 6061.

[6556] The probes having the nucleotide sequence represented by SEQ ID NOS: 73391, 73392, 73393, 73394, 73395, 73396, 73397, 73398, 73399, 73400, 73401 were selected from the ORFs having the nucleotide sequence represented by SEQ ID NO: 6062.

[6557] The probes having the nucleotide sequence represented by SEQ ID NOS: 73402, 73403, 73404, 73405, 73406, 73407, 73408, 73409, 73410, 73411, 73412 were selected from the ORFs having the nucleotide sequence represented by SEQ ID NO: 6063.

[6558] The probes having the nucleotide sequence represented by SEQ ID NOS: 73413, 73414, 73415, 73416, 73417, 73418, 73419, 73420, 73421, 73422, 73423 were selected from the ORFs having the nucleotide sequence represented by SEQ ID NO: 6064.

[6559] The probes having the nucleotide sequence represented by SEQ ID NOS: 73424, 73425, 73426, 73427, 73428, 73429, 73430, 73431, 73432, 73433, 73434 were selected from the ORFs having the nucleotide sequence represented by SEQ ID NO: 6065.

[6560] The probes having the nucleotide sequence represented by SEQ ID NOS: 73435, 73436, 73437, 73438, 73439, 73440, 73441, 73442, 73443, 73444, 73445 were selected from the ORFs having the nucleotide sequence represented by SEQ ID NO: 6066.

[6561] The probes having the nucleotide sequence represented by SEQ ID NOS: 73446, 73447, 73448, 73449, 73450, 73451, 73452, 73453, 73454, 73455, 73456 were selected from the ORFs having the nucleotide sequence represented by SEQ ID NO: 6067.

[6562] The probes having the nucleotide sequence represented by SEQ ID NOS: 73457, 73458, 73459, 73460, 73461, 73462, 73463, 73464, 73465, 73466, 73467 were selected from the ORFs having the nucleotide sequence represented by SEQ ID NO: 6068.

[6563] The probes having the nucleotide sequence represented by SEQ ID NOS: 73468, 73469, 73470, 73471, 73472, 73473, 73474, 73475, 73476, 73477, 73478 were selected from the ORFs having the nucleotide sequence represented by SEQ ID NO: 6069.

[6564] The probes having the nucleotide sequence represented by SEQ ID NOS: 73479, 73480, 73481, 73482, 73483, 73484, 73485, 73486, 73487, 73488, 73489 were selected from the ORFs having the nucleotide sequence represented by SEQ ID NO: 6070.

[6565] The probes having the nucleotide sequence represented by SEQ ID NOS: 73490, 73491, 73492, 73493, 73494, 73495, 73496, 73497, 73498, 73499, 73500 were selected from the ORFs having the nucleotide sequence represented by SEQ ID NO: 6071.

[6566] The probes having the nucleotide sequence represented by SEQ ID NOS: 73501, 73502, 73503, 73504, 73505, 73506, 73507, 73508, 73509, 73510, 73511 were selected from the ORFs having the nucleotide sequence represented by SEQ ID NO: 6072.

[6567] The probes having the nucleotide sequence represented by SEQ ID NOS: 73512, 73513, 73514, 73515, 73516, 73517, 73518, 73519, 73520, 73521, 73522 were selected from the ORFs having the nucleotide sequence represented by SEQ ID NO: 6073.

[6568] The probes having the nucleotide sequence represented by SEQ ID NOS: 73523, 73524, 73525, 73526, 73527, 73528, 73529, 73530, 73531, 73532, 73533 were selected from the ORFs having the nucleotide sequence represented by SEQ ID NO: 6074.

[6569] The probes having the nucleotide sequence represented by SEQ ID NOS: 73534, 73535, 73536, 73537, 73538, 73539, 73540, 73541, 73542, 73543, 73544 were selected from the ORFs having the nucleotide sequence represented by SEQ ID NO: 6075.

[6570] The probes having the nucleotide sequence represented by SEQ ID NOS: 73545, 73546, 73547, 73548, 73549, 73550, 73551, 73552, 73553, 73554, 73555 were selected from the ORFs having the nucleotide sequence represented by SEQ ID NO: 6076.

[6571] The probes having the nucleotide sequence represented by SEQ ID NOS: 73556, 73557, 73558, 73559, 73560, 73561, 73562, 73563, 73564, 73565, 73566 were selected from the ORFs having the nucleotide sequence represented by SEQ ID NO: 6077.

[6572] The probes having the nucleotide sequence represented by SEQ ID NOS: 73567, 73568, 73569, 73570, 73571, 73572, 73573, 73574, 73575, 73576, 73577 were selected from the ORFs having the nucleotide sequence represented by SEQ ID NO: 6078.

[6573] The probes having the nucleotide sequence represented by SEQ ID NOS: 73578, 73579, 73580, 73581, 73582, 73583, 73584, 73585, 73586, 73587, 73588 were selected from the ORFs having the nucleotide sequence represented by SEQ ID NO: 6079.

[6574] The probes having the nucleotide sequence represented by SEQ ID NOS: 73589, 73590, 73591, 73592, 73593, 73594, 73595, 73596, 73597, 73598, 73599 were selected from the ORFs having the nucleotide sequence represented by SEQ ID NO: 6080.

[6575] The probes having the nucleotide sequence represented by SEQ ID NOS: 73600, 73601, 73602, 73603, 73604, 73605, 73606, 73607, 73608, 73609, 73610 were selected from the ORFs having the nucleotide sequence represented by SEQ ID NO: 6081.

[6576] The probes having the nucleotide sequence represented by SEQ ID NOS: 73611, 73612, 73613, 73614, 73615, 73616, 73617, 73618, 73619, 73620, 73621 were selected from the ORFs having the nucleotide sequence represented by SEQ ID NO: 6082.

[6577] The probes having the nucleotide sequence represented by SEQ ID NOS: 73622, 73623, 73624, 73625, 73626, 73627, 73628, 73629, 73630, 73631, 73632 were selected from the ORFs having the nucleotide sequence represented by SEQ ID NO: 6083.

[6578] The probes having the nucleotide sequence represented by SEQ ID NOS: 73633, 73634, 73635, 73636, 73637, 73638, 73639, 73640, 73641, 73642, 73643 were selected from the ORFs having the nucleotide sequence represented by SEQ ID NO: 6084.

[6579] The probes having the nucleotide sequence represented by SEQ ID NOS: 73644, 73645, 73646, 73647, 73648, 73649, 73650, 73651, 73652, 73653, 73654 were selected from the ORFs having the nucleotide sequence represented by SEQ ID NO: 6085.

[6580] The probes having the nucleotide sequence represented by SEQ ID NOS: 73655, 73656, 73657, 73658, 73659, 73660, 73661, 73662, 73663, 73664, 73665 were selected from the ORFs having the nucleotide sequence represented by SEQ ID NO: 6086.

[6581] The probes having the nucleotide sequence represented by SEQ ID NOS: 73666, 73667, 73668, 73669, 73670, 73671, 73672, 73673, 73674, 73675, 73676 were selected from the ORFs having the nucleotide sequence represented by SEQ ID NO: 6087.

[6582] The probes having the nucleotide sequence represented by SEQ ID NOS: 73677, 73678, 73679, 73680, 73681, 73682, 73683, 73684, 73685, 73686, 73687 were selected from the ORFs having the nucleotide sequence represented by SEQ ID NO: 6088.

[6583] The probes having the nucleotide sequence represented by SEQ ID NOS: 73688, 73689, 73690, 73691, 73692, 73693, 73694, 73695, 73696, 73697, 73698 were selected from the ORFs having the nucleotide sequence represented by SEQ ID NO: 6089.

[6584] The probes having the nucleotide sequence represented by SEQ ID NOS: 73699, 73700, 73701, 73702, 73703, 73704, 73705, 73706, 73707, 73708, 73709 were selected from the ORFs having the nucleotide sequence represented by SEQ ID NO: 6090.

[6585] The probes having the nucleotide sequence represented by SEQ ID NOS: 73710, 73711, 73712, 73713, 73714, 73715, 73716, 73717, 73718, 73719, 73720 were selected from the ORFs having the nucleotide sequence represented by SEQ ID NO: 6091.

[6586] The probes having the nucleotide sequence represented by SEQ ID NOS: 73721, 73722, 73723, 73724, 73725, 73726, 73727, 73728, 73729, 73730, 73731 were selected from the ORFs having the nucleotide sequence represented by SEQ ID NO: 6092.

[6587] The probes having the nucleotide sequence represented by SEQ ID NOS: 73732, 73733, 73734, 73735, 73736, 73737, 73738, 73739, 73740, 73741, 73742 were selected from the ORFs having the nucleotide sequence represented by SEQ ID NO: 6093.

[6588] The probes having the nucleotide sequence represented by SEQ ID NOS: 73743, 73744, 73745, 73746, 73747, 73748, 73749, 73750, 73751, 73752, 73753 were selected from the ORFs having the nucleotide sequence represented by SEQ ID NO: 6094.

[6589] The probes having the nucleotide sequence represented by SEQ ID NOS: 73754, 73755, 73756, 73757, 73758, 73759, 73760, 737616 73762, 73763, 73764 were selected from the ORFs having the nucleotide sequence represented by SEQ ID NO: 6095.

[6590] The probes having the nucleotide sequence represented by SEQ ID NOS: 73765, 73766, 73767, 73768, 73769, 73770, 73771, 73772, 73773, 73774, 73775 were selected from the ORFs having the nucleotide sequence represented by SEQ ID NO: 6096.

[6591] The probes having the nucleotide sequence represented by SEQ ID NOS: 73776, 73777, 73778, 73779, 73780, 73781, 73782, 73783, 73784, 73785, 73786 were selected from the ORFs having the nucleotide sequence represented by SEQ ID NO: 6097.

[6592] The probes having the nucleotide sequence represented by SEQ ID NOS: 73787, 73788, 73789, 73790, 73791, 73792, 73793, 73794, 73795, 73796, 73797 were selected from the ORFs having the nucleotide sequence represented by SEQ ID NO: 6098.

[6593] The probes having the nucleotide sequence represented by SEQ ID NOS: 73798, 73799, 73800, 73801, 73802, 73803, 73804, 73805, 73806, 73807, 73808 were selected from the ORFs having the nucleotide sequence represented by SEQ ID NO: 6099.

[6594] The probes having the nucleotide sequence represented by SEQ ID NOS: 73809, 73810, 73811, 73812, 73813, 73814, 73815, 73816, 73817, 73818, 73819 were selected from the ORFs having the nucleotide sequence represented by SEQ ID NO: 6100.

[6595] The probes having the nucleotide sequence represented by SEQ ID NOS: 73820, 73821, 73822, 73823, 73824, 73825, 73826, 73827, 73828, 73829, 73830 were selected from the ORFs having the nucleotide sequence represented by SEQ ID NO: 6101.

[6596] The probes having the nucleotide sequence represented by SEQ ID NOS: 73831, 73832, 73833, 73834, 73835, 73836, 73837, 73838, 73839, 73840, 73841 were selected from the ORFs having the nucleotide sequence represented by SEQ ID NO: 6102.

[6597] The probes having the nucleotide sequence represented by SEQ ID NOS: 73842, 73843, 73844, 73845, 73846, 73847, 73848, 73849, 73850, 73851, 73852 were selected from the ORFs having the nucleotide sequence represented by SEQ ID NO: 6103.

[6598] The probes having the nucleotide sequence represented by SEQ ID NOS: 73853, 73854, 73855, 73856, 73857, 73858, 73859, 73860, 73861, 73862, 73863 were selected from the ORFs having the nucleotide sequence represented by SEQ ID NO: 6104.

[6599] The probes having the nucleotide sequence represented by SEQ ID NOS: 73864, 73865, 73866, 73867, 73868, 73869, 73870, 73871, 73872, 73873, 73874 were selected from the ORFs having the nucleotide sequence represented by SEQ ID NO: 6105.

[6600] The probes having the nucleotide sequence represented by SEQ ID NOS: 73875, 73876, 73877, 73878, 73879, 73880, 73881, 73882, 73883, 73884, 73885 were selected from the ORFs having the nucleotide sequence represented by SEQ ID NO: 6106.

[6601] The probes having the nucleotide sequence represented by SEQ ID NOS: 73886, 73887, 73888, 73889, 73890, 73891, 73892, 73893, 73894, 73895, 73896 were selected from the ORFs having the nucleotide sequence represented by SEQ ID NO: 6107.

[6602] The probes having the nucleotide sequence represented by SEQ ID NOS: 73897, 73898, 73899, 73900, 73901, 73902, 73903, 73904, 73905, 73906, 73907 were selected from the ORFs having the nucleotide sequence represented by SEQ ID NO: 6108.

[6603] The probes having the nucleotide sequence represented by SEQ ID NOS: 73908, 73909, 73910, 73911, 73912, 73913, 73914, 73915, 73916, 73917, 73918 were selected from the ORFs having the nucleotide sequence represented by SEQ ID NO: 6109.

[6604] The probes having the nucleotide sequence represented by SEQ ID NOS: 73919, 73920, 73921, 73922, 73923, 73924, 73925, 73926, 73927, 73928, 73929 were selected from the ORFs having the nucleotide sequence represented by SEQ ID NO: 6110.

[6605] The probes having the nucleotide sequence represented by SEQ ID NOS: 73930, 73931, 73932, 73933, 73934, 73935, 73936, 73937, 73938, 73939, 73940 were selected from the ORFs having the nucleotide sequence represented by SEQ ID NO: 6111.

[6606] The probes having the nucleotide sequence represented by SEQ ID NOS: 73941, 73942, 73943, 73944, 73945, 73946, 73947, 73948, 73949, 73950, 73951 were selected from the ORFs having the nucleotide sequence represented by SEQ ID NO: 6112.

[6607] The probes having the nucleotide sequence represented by SEQ ID NOS: 73952, 73953, 73954, 73955, 73956, 73957, 73958, 73959, 73960, 73961, 73962 were selected from the ORFs having the nucleotide sequence represented by SEQ ID NO: 6113.

[6608] The probes having the nucleotide sequence represented by SEQ ID NOS: 73963, 73964, 73965, 73966, 73967, 73968, 73969, 73970, 73971, 73972, 73973 were selected from the ORFs having the nucleotide sequence represented by SEQ ID NO: 6114.

[6609] The probes having the nucleotide sequence represented by SEQ ID NOS: 73974, 73975, 73976, 73977, 73978, 73979, 73980, 73981, 73982, 73983, 73984 were selected from the ORFs having the nucleotide sequence represented by SEQ ID NO: 6115.

[6610] The probes having the nucleotide sequence represented by SEQ ID NOS: 73985, 73986, 73987, 73988, 73989, 73990, 73991, 73992, 73993, 73994, 73995 were selected from the ORFs having the nucleotide sequence represented by SEQ ID NO: 6116.

[6611] The probes having the nucleotide sequence represented by SEQ ID NOS: 73996, 73997, 73998, 73999, 74000, 74001, 74002, 74003, 74004, 74005, 74006 were selected from the ORFs having the nucleotide sequence represented by SEQ ID NO: 6117.

[6612] The probes having the nucleotide sequence represented by SEQ ID NOS: 74007, 74008, 74009, 74010, 74011, 74012, 74013, 74014, 74015, 74016, 74017 were selected from the ORFs having the nucleotide sequence represented by SEQ ID NO: 6118.

[6613] The probes having the nucleotide sequence represented by SEQ ID NOS: 74018, 74019, 74020, 74021, 74022, 74023, 74024, 74025, 74026, 74027, 74028 were selected from the ORFs having the nucleotide sequence represented by SEQ ID NO: 6119.

[6614] The probes having the nucleotide sequence represented by SEQ ID NOS: 74029, 74030, 74031, 74032, 74033, 74034, 74035, 74036, 74037, 74038, 74039 were selected from the ORFs having the nucleotide sequence represented by SEQ ID NO: 6120.

[6615] The probes having the nucleotide sequence represented by SEQ ID NOS: 74040, 74041, 74042, 74043, 74044, 74045, 74046, 74047, 74048, 74049, 74050 were selected from the ORFs having the nucleotide sequence represented by SEQ ID NO: 6121.

[6616] The probes having the nucleotide sequence represented by SEQ ID NOS: 74051, 74052, 74053, 74054, 74055, 74056, 74057, 74058, 74059, 74060, 74061 were selected from the ORFs having the nucleotide sequence represented by SEQ ID NO: 6122.

[6617] The probes having the nucleotide sequence represented by SEQ ID NOS: 74062, 74063, 74064, 74065, 74066, 74067, 74068, 74069, 74070, 74071, 74072 were selected from the ORFs having the nucleotide sequence represented by SEQ ID NO: 6123.

[6618] The probes having the nucleotide sequence represented by SEQ ID NOS: 74073, 74074, 74075, 74076, 74077, 74078, 74079, 74080, 74081, 74082, 74083 were selected from the ORFs having the nucleotide sequence represented by SEQ ID NO: 6124.

[6619] The probes having the nucleotide sequence represented by SEQ ID NOS: 74084, 74085, 74086, 74087, 74088, 74089,

[6620] 74090, 74091, 74092, 74093, 74094 were selected from the ORFs having the nucleotide sequence represented by SEQ ID NO: 6125.

[6621] The probes having the nucleotide sequence represented by SEQ ID NOS: 74095, 74096, 74097, 74098, 74099, 74100, 74101, 74102, 74103, 74104, 74105 were selected from the ORFs having the nucleotide sequence represented by SEQ ID NO: 6126.

[6622] The probes having the nucleotide sequence represented by SEQ ID NOS: 74106, 74107, 74108, 74109, 74110, 74111, 74112, 74113, 74114, 74115, 74116 were selected from the ORFs having the nucleotide sequence represented by SEQ ID NO: 6127.

[6623] The probes having the nucleotide sequence represented by SEQ ID NOS: 74117, 74118, 74119, 74120, 74121, 74122, 74123, 74124, 74125, 74126, 74127 were selected from the ORFs having the nucleotide sequence represented by SEQ ID NO: 6128.

[6624] The probes having the nucleotide sequence represented by SEQ ID NOS: 74128, 74129, 74130, 74131, 74132, 74133, 74134, 74135, 74136, 74137, 74138 were selected from the ORFs having the nucleotide sequence represented by SEQ ID NO: 6129.

[6625] The probes having the nucleotide sequence represented by SEQ ID NOS: 74139, 74140, 74141, 74142, 74143, 74144, 74145, 74146, 74147, 74148, 74149 were selected from the ORFs having the nucleotide sequence represented by SEQ ID NO: 6130.

[6626] The probes having the nucleotide sequence represented by SEQ ID NOS: 74150, 74151, 74152, 74153, 74154, 74155, 74156, 74157, 74158, 74159, 74160 were selected from the ORFs having the nucleotide sequence represented by SEQ ID NO: 6131.

[6627] The probes having the nucleotide sequence represented by SEQ ID NOS: 74161, 74162, 74163, 74164, 74165, 74166, 74167, 74168, 74169, 74170, 74171 were selected from the ORFs having the nucleotide sequence represented by SEQ ID NO: 6132.

[6628] The probes having the nucleotide sequence represented by SEQ ID NOS: 74172, 74173, 74174, 74175, 74176, 74177, 74178, 74179, 74180, 74181, 74182 were selected from the ORFs having the nucleotide sequence represented by SEQ ID NO: 6133.

[6629] The probes having the nucleotide sequence represented by SEQ ID NOS: 74183, 74184, 74185, 74186, 74187, 74188, 74189, 74190, 74191, 74192, 74193 were selected from the ORFs having the nucleotide sequence represented by SEQ ID NO: 6134.

[6630] The probes having the nucleotide sequence represented by SEQ ID NOS: 74194, 74195, 74196, 74197, 74198, 74199, 74200, 74201, 74202, 74203, 74204 were selected from the ORFs having the nucleotide sequence represented by SEQ ID NO: 6135.

[6631] The probes having the nucleotide sequence represented by SEQ ID NOS: 74205, 74206, 74207, 74208, 74209, 74210, 74211, 74212, 74213, 74214, 74215 were selected from the ORFs having the nucleotide sequence represented by SEQ ID NO: 6136.

[6632] The probes having the nucleotide sequence represented by SEQ ID NOS: 74216, 74217, 74218, 74219, 74220, 74221, 74222, 74223, 74224, 74225, 74226 were selected from the ORFs having the nucleotide sequence represented by SEQ ID NO: 6137.

[6633] The probes having the nucleotide sequence represented by SEQ ID NOS: 74227, 74228, 74229, 74230, 74231, 74232, 74233, 74234, 74235, 74236, 74237 were selected from the ORFs having the nucleotide sequence represented by SEQ ID NO: 6138.

[6634] The probes having the nucleotide sequence represented by SEQ ID NOS: 74238, 74239, 74240, 74241, 74242, 74243, 74244, 74245, 74246, 74247, 74248 were selected from the ORFs having the nucleotide sequence represented by SEQ ID NO: 6139.

[6635] The probes having the nucleotide sequence represented by SEQ ID NOS: 74249, 74250, 74251, 74252, 74253, 74254, 74255, 74256, 74257, 74258, 74259 were selected from the ORFs having the nucleotide sequence represented by SEQ ID NO: 6140.

[6636] The probes having the nucleotide sequence represented by SEQ ID NOS: 74260, 74261, 74262, 74263, 74264, 74265, 74266, 74267, 74268, 74269, 74270 were selected from the ORFs having the nucleotide sequence represented by SEQ ID NO: 6141.

[6637] The probes having the nucleotide sequence represented by SEQ ID NOS: 74271, 74272, 74273, 74274, 74275, 74276, 74277, 74278, 74279, 74280, 74281 were selected from the ORFs having the nucleotide sequence represented by SEQ ID NO: 6142.

[6638] the probes having the nucleotide sequence represented by SEQ ID NOS: 74282, 74283, 74284, 74285, 74286, 74287, 74288, 74289, 74290, 74291, 74292 were selected from the ORFs having the nucleotide sequence represented by SEQ ID NO: 6143.

[6639] The probes having the nucleotide sequence represented by SEQ ID NOS: 74293, 74294, 74295, 74296, 74297, 74298, 74299, 74300, 74301, 74302, 74303 were selected from the ORFs having the nucleotide sequence represented by SEQ ID NO: 6144.

[6640] The probes having the nucleotide sequence represented by SEQ ID NOS: 74304, 74305, 74306, 74307, 74308, 74309, 74310, 74311, 74312, 74313, 74314 were selected from the ORFs having the nucleotide sequence represented by SEQ ID NO: 6145.

[6641] The probes having the nucleotide sequence represented by SEQ ID NOS: 74315, 74316, 74317, 74318, 74319, 74320, 74321, 74322, 74323, 74324, 74325 were selected from the ORFs having the nucleotide sequence represented by SEQ ID NO: 6146.

[6642] The probes having the nucleotide sequence represented by SEQ ID NOS: 74326, 74327, 74328, 74329, 74330, 74331, 74332, 74333, 74334, 74335, 74336 were selected from the ORFs having the nucleotide sequence represented by SEQ ID NO: 6147.

[6643] The probes having the nucleotide sequence represented by SEQ ID NOS: 74337, 74338, 74339, 74340, 74341, 74342, 74343, 74344, 74345, 74346, 74347 were selected from the ORFs having the nucleotide sequence represented by SEQ ID NO: 6148.

[6644] The probes having the nucleotide sequence represented by SEQ ID NOS: 74348, 74349, 74350, 74351, 74352, 74353, 74354, 74355, 74356, 74357, 74358 were selected from the ORFs having the nucleotide sequence represented by SEQ ID NO: 6149.

[6645] The probes having the nucleotide sequence represented by SEQ ID NOS: 74359, 74360, 74361, 74362, 74363, 74364, 74365, 74366, 74367, 74368, 74369 were selected from the ORFs having the nucleotide sequence represented by SEQ ID NO: 6150.

[6646] The probes having the nucleotide sequence represented by SEQ ID NOS: 74370, 74371, 74372, 74373, 74374, 74375, 74376, 74377, 74378, 74379, 74380 were selected from the ORFs having the nucleotide sequence represented by SEQ ID NO: 6151.

[6647] The probes having the nucleotide sequence represented by SEQ ID NOS: 74381, 74382, 74383, 74384, 74385, 74386, 74387, 74388, 74389, 74390, 74391 were selected from the ORFs having the nucleotide sequence represented by SEQ ID NO: 6152.

[6648] The probes having the nucleotide sequence represented by SEQ ID NOS: 74392, 74393, 74394, 74395, 74396, 74397, 74398, 74399, 74400, 74401, 74402 were selected from the ORFs having the nucleotide sequence represented by SEQ ID NO: 6153.

[6649] The probes having the nucleotide sequence represented by SEQ ID NOS: 74403, 74404, 74405, 74406, 74407, 74408, 74409, 74410, 74411, 74412, 74413 were selected from the ORFs having the nucleotide sequence represented by SEQ ID NO: 6154.

[6650] The probes having the nucleotide sequence represented by SEQ ID NOS: 74414, 74415, 74416, 74417, 74418, 74419, 74420, 74421, 74422, 74423, 74424 were selected from the ORFs having the nucleotide sequence represented by SEQ ID NO: 6155.

[6651] The probes having the nucleotide sequence represented by SEQ ID NOS: 74425, 74426, 74427, 74428, 74429, 74430, 74431, 74432, 74433, 74434, 74435 were selected from the ORFs having the nucleotide sequence represented by SEQ ID NO: 6156.

[6652] The probes having the nucleotide sequence represented by SEQ ID NOS: 74436, 74437, 74438, 74439, 74440, 74441, 74442, 74443, 74444, 74445, 74446 were selected from the ORFs having the nucleotide sequence represented by SEQ ID NO: 6157.

[6653] The probes having the nucleotide sequence represented by SEQ ID NOS: 74447, 74448, 74449, 74450, 74451, 74452, 74453, 74454, 74455, 74456, 74457 were selected from the ORFs having the nucleotide sequence represented by SEQ ID NO: 6158.

[6654] The probes having the nucleotide sequence represented by SEQ ID NOS: 74458, 74459, 74460, 74461, 74462, 74463, 74464, 74465, 74466, 74467, 74468 were selected from the ORFs having the nucleotide sequence represented by SEQ ID NO: 6159.

[6655] The probes having the nucleotide sequence represented by SEQ ID NOS: 74469, 74470, 74471, 74472, 74473, 74474, 74475, 74476, 74477, 74478, 74479 were selected from the ORFs having the nucleotide sequence represented by SEQ ID NO: 6160.

[6656] The probes having the nucleotide sequence represented by SEQ ID NOS: 74480, 74481, 74482, 74483, 74484, 74485, 74486, 74487, 74488, 74489, 74490 were selected from the ORFs having the nucleotide sequence represented by SEQ ID NO: 6161.

[6657] The probes having the nucleotide sequence represented by SEQ ID NOS: 74491, 74492, 74493, 74494, 74495, 74496, 74497, 74498, 74499, 74500, 74501 were selected from the ORFs having the nucleotide sequence represented by SEQ ID NO: 6162.

[6658] The probes having the nucleotide sequence represented by SEQ ID NOS: 74502, 74503, 74504, 74505, 74506, 74507, 74508, 74509, 74510, 74511, 74512 were selected from the ORFs having the nucleotide sequence represented by SEQ ID NO: 6163.

[6659] The probes having the nucleotide sequence represented by SEQ ID NOS: 74513, 74514, 74515, 74516, 74517, 74518, 74519, 74520, 74521, 74522, 74523 were selected from the ORFs having the nucleotide sequence represented by SEQ ID NO: 6164.

[6660] The probes having the nucleotide sequence represented by SEQ ID NOS: 74524, 74525, 74526, 74527, 74528, 74529, 74530, 74531, 74532, 74533, 74534 were selected from the ORFs having the nucleotide sequence represented by SEQ ID NO: 6165.

[6661] The probes having the nucleotide sequence represented by SEQ ID NOS: 74535, 74536, 74537, 74538, 74539, 74540, 74541, 74542, 74543, 74544, 74545 were selected from the ORFs having the nucleotide sequence represented by SEQ ID NO: 6166.

[6662] The probes having the nucleotide sequence,represented by SEQ ID NOS: 74546, 74547, 74548, 74549, 74550, 74551, 74552, 74553, 74554, 74555, 74556 were selected from the ORFs having the nucleotide sequence represented by SEQ ID NO: 6167.

[6663] The probes having the nucleotide sequence represented by SEQ ID NOS: 74557, 74558, 74559, 74560, 74561, 74562, 74563, 74564, 74565, 74566, 74567 were selected from the ORFs having the nucleotide sequence represented by SEQ ID NO: 6168.

[6664] The probes having the nucleotide sequence represented by SEQ ID NOS: 74568, 74569, 74570, 74571, 74572, 74573, 74574, 74575, 74576, 74577, 74578 were selected from the ORFs having the nucleotide sequence represented by SEQ ID NO: 6169.

[6665] The probes having the nucleotide sequence represented by SEQ ID NOS: 74579, 74580, 74581, 74582, 74583, 74584, 74585, 74586, 74587, 74588, 74589 were selected from the ORFs having the nucleotide sequence represented by SEQ ID NO: 6170.

[6666] The probes having the nucleotide sequence represented by SEQ ID NOS: 74590, 74591, 74592, 74593, 74594, 74595, 74596, 74597, 74598, 74599, 74600 were selected from the ORFs having the nucleotide sequence represented by SEQ ID NO: 6171.

[6667] The probes having the nucleotide sequence represented by SEQ ID NOS: 74601, 74602, 74603, 74604, 74605, 74606, 74607, 74608, 74609, 74610, 74611 were selected from the ORFs having the nucleotide sequence represented by SEQ ID NO: 6172.

[6668] The probes having the nucleotide sequence represented by SEQ ID NOS: 74612, 74613, 74614, 74615, 74616, 74617, 74618, 74619, 74620, 74621, 74622 were selected from the ORFs having the nucleotide sequence represented by SEQ ID NO: 6173.

[6669] The probes having the nucleotide sequence represented by SEQ ID NOS: 74623, 74624, 74625, 74626, 74627, 74628, 74629, 74630, 74631, 74632, 74633 were selected from the ORFs having the nucleotide sequence represented by SEQ ID NO: 6174.

[6670] The probes having the nucleotide sequence represented by SEQ ID NOS: 74634, 74635, 74636, 74637, 74638, 74639, 74640, 74641, 74642, 74643, 74644 were selected from the ORFs having the nucleotide sequence represented by SEQ ID NO: 6175.

[6671] The probes having the nucleotide sequence represented by SEQ ID NOS: 74645, 74646, 74647, 74648, 74649, 74650, 74651, 74652, 74653, 74654, 74655 were selected from the ORFs having the nucleotide sequence represented by SEQ ID NO: 6176.

[6672] The probes having the nucleotide sequence represented by SEQ ID NOS: 74656, 74657, 74658, 74659, 74660, 74661, 74662, 74663, 74664, 74665, 74666, 74667, 74668, 74669, 74670, 74671, 74672, 74673, 74674, 74675, 74676, 74677 were selected from the ORFs having the nucleotide sequence represented by SEQ ID NO: 6177.

[6673] The probes having the nucleotide sequence represented by SEQ ID NOS: 74678, 74679, 74680, 74681, 74682, 74683, 74684, 74685, 74686, 74687, 74688 were selected from the ORFs having the nucleotide sequence represented by SEQ ID NO: 6178.

[6674] The probes having the nucleotide sequence represented by SEQ ID NOS: 74689, 74690, 74691, 74692, 74693, 74694, 74695, 74696, 74697, 74698, 74699 were selected from the ORFs having the nucleotide sequence represented by SEQ ID NO: 6179.

[6675] The probes having the nucleotide sequence represented by SEQ ID NOS: 74700, 74701, 74702, 74703, 74704, 74705, 74706, 74707, 74708, 74709, 74710 were selected from the ORFs having the nucleotide sequence represented by SEQ ID NO: 6180.

[6676] The probes having the nucleotide sequence represented by SEQ ID NOS: 74711, 74712, 74713, 74714, 74715, 74716, 74717, 74718, 74719, 74720, 74721 were selected from the ORFs having the nucleotide sequence represented by SEQ ID NO: 6181.

[6677] The probes having the nucleotide sequence represented by SEQ ID NOS: 74722, 74723, 74724, 74725, 74726, 74727, 74728, 74729, 74730, 74731, 74732 were selected from the ORFs having the nucleotide sequence represented by SEQ ID NO: 6182.

[6678] The probes having the nucleotide sequence represented by SEQ ID NOS: 74733, 74734, 74735, 74736, 74737, 74738, 74739, 74740, 74741, 74742, 74743 were selected from the ORFs having the nucleotide sequence represented by SEQ ID NO: 6183.

[6679] The probes having the nucleotide sequence represented by SEQ ID NOS: 74744, 74745, 74746, 74747, 74748, 74749, 74750, 74751, 74752, 74753, 74754 were selected from the ORFs having the nucleotide sequence represented by SEQ ID NO: 6184.

[6680] The probes having the nucleotide sequence represented by SEQ ID NOS: 74755, 74756, 74757, 74758, 74759, 74760, 74761, 74762, 74763, 74764, 74765 were selected from the ORFs having the nucleotide sequence represented by SEQ ID NO: 6185.

[6681] The probes having the nucleotide sequence represented by SEQ ID NOS: 74766, 74767, 74768, 74769, 74770, 74771, 74772, 74773, 74774, 74775, 74776 were selected from the ORFs having the nucleotide sequence represented by SEQ ID NO: 6186.

[6682] The probes having the nucleotide sequence represented by SEQ ID NOS: 74777, 74778, 74779, 74780, 74781, 74782, 74783, 74784, 74785, 74786, 74787 were selected from the ORFs having the nucleotide sequence represented by SEQ ID NO: 6187.

[6683] The probes having the nucleotide sequence represented by SEQ ID NOS: 74788, 74789, 74790, 74791, 74792, 74793, 74794, 74795, 74796, 74797, 74798 were selected from the ORFs having the nucleotide sequence represented by SEQ ID NO: 6188.

[6684] The probes having the nucleotide sequence represented by SEQ ID NOS: 74799, 74800, 74801, 74802, 74803, 74804, 74805, 74806, 74807, 74808, 74809 were selected from the ORFs having the nucleotide sequence represented by SEQ ID NO: 6189.

[6685] The probes having the nucleotide sequence represented by SEQ ID NOS: 74810, 74811, 74812, 74813, 74814, 74815, 74816, 74817, 74818, 74819, 74820 were selected from the ORFs having the nucleotide sequence represented by SEQ ID NO: 6190.

[6686] The probes having the nucleotide sequence represented by SEQ ID NOS: 74821, 74822, 74823, 74824, 74825, 74826, 74827, 74828, 74829, 74830, 74831 were selected from the ORFs having the nucleotide sequence represented by SEQ ID NO: 6191.

[6687] The probes having the nucleotide sequence represented by SEQ ID NOS: 74832, 74833, 74834, 74835, 74836, 74837, 74838, 74839, 74840, 74841, 74842 were selected from the ORFs having the nucleotide sequence represented by SEQ ID NO: 6192.

[6688] The probes having the nucleotide sequence represented by SEQ ID NOS: 74843, 74844, 74845, 74846, 74847, 74848, 74849, 74850, 74851, 74852, 74853 were selected from the ORFs having the nucleotide sequence represented by SEQ ID NO: 6193.

[6689] The probes having the nucleotide sequence represented by SEQ ID NOS: 74854, 74855, 74856, 74857, 74858, 74859, 74860, 74861, 74862, 74863, 74864, 74865, 74866, 74867, 74868, 74869, 74870, 74871, 74872, 74873, 74874, 74875 were selected from the ORFs having the nucleotide sequence represented by SEQ ID NO: 6194.

[6690] The probes having the nucleotide sequence represented by SEQ ID NOS: 74876, 74877, 74878, 74879, 74880, 74881, 74882, 74883, 74884, 74885, 74886 were selected from the ORFs having the nucleotide sequence represented by SEQ ID NO: 6195.

[6691] The probes having the nucleotide sequence represented by SEQ ID NOS: 74887, 74888, 74889, 74890, 74891, 74892, 74893, 74894, 74895, 74896, 74897 were selected from the ORFs having the nucleotide sequence represented by SEQ ID NO: 6196.

[6692] The probes having the nucleotide sequence represented by SEQ ID NOS: 74898, 74899, 74900, 74901, 74902, 74903, 74904, 74905, 74906, 74907, 74908 were selected from the ORFs having the nucleotide sequence represented by SEQ ID NO: 6197.

[6693] The probes having the nucleotide sequence represented by SEQ ID NOS: 74909, 74910, 74911, 74912, 74913, 74914, 74915, 74916, 74917, 74918, 74919 were selected from the ORFs having the nucleotide sequence represented by SEQ ID NO: 6198.

[6694] The probes having the nucleotide sequence represented by SEQ ID NOS: 74920, 74921, 74922, 74923, 74924, 74925, 74926, 74927, 74928, 74929, 74930 were selected from the ORFs having the nucleotide sequence represented by SEQ ID NO: 6199.

[6695] The probes having the nucleotide sequence represented by SEQ ID NOS: 74931, 74932, 74933, 74934, 74935, 74936, 74937, 74938, 74939, 74940, 74941 were selected from the ORFs having the nucleotide sequence represented by SEQ ID NO: 6200.

[6696] The probes having the nucleotide sequence represented by SEQ ID NOS: 74942, 74943, 74944, 74945, 74946, 74947, 74948, 74949, 74950, 74951, 74952 were selected from the ORFs having the nucleotide sequence represented by SEQ ID NO: 6201.

[6697] The probes having the nucleotide sequence represented by SEQ ID NOS: 74953, 74954, 74955, 74956, 74957, 74958, 74959, 74960, 74961, 74962, 74963 were selected from the ORFs having the nucleotide sequence represented by SEQ ID NO: 6202.

[6698] The probes having the nucleotide sequence represented by SEQ ID NOS: 74964, 74965, 74966, 74967, 74968, 74969, 74970, 74971, 74972, 74973, 74974 were selected from the ORFs having the nucleotide sequence represented by SEQ ID NO: 6203.

[6699] The probes having the nucleotide sequence represented by SEQ ID NOS: 74975, 74976, 74977, 74978, 74979, 74980, 74981, 74982, 74983, 74984, 74985 were selected from the ORFs having the nucleotide sequence represented by SEQ ID NO: 6204.

[6700] The probes having the nucleotide sequence represented by SEQ ID NOS: 74986, 74987, 74988, 74989, 74990, 74991, 74992, 74993, 74994, 74995, 74996 were selected from the ORFs having the nucleotide sequence represented by SEQ ID NO: 6205.

[6701] The probes having the nucleotide sequence represented by SEQ ID NOS: 74997, 74998, 74999, 75000, 75001, 75002, 75003, 75004, 75005, 75006, 75007 were selected from the ORFs having the nucleotide sequence represented by SEQ ID NO: 6206.

[6702] The probes having the nucleotide sequence represented by SEQ ID NOS: 75008, 75009, 75010, 75011, 75012, 75013, 75014, 75015, 75016, 75017, 75018 were selected from the ORFs having the nucleotide sequence represented by SEQ ID NO: 6207.

[6703] The probes having the nucleotide sequence represented by SEQ ID NOS: 75019, 75020, 75021, 75022, 75023, 75024, 75025, 75026, 75027, 75028, 75029 were selected from the ORFs having the nucleotide sequence represented by SEQ ID NO: 6208.

[6704] The probes having the nucleotide sequence represented by SEQ ID NOS: 75030, 75031, 75032, 75033, 75034, 75035, 75036, 75037, 75038, 75039, 75040 were selected from the ORFs having the nucleotide sequence represented by SEQ ID NO: 6209.

[6705] The probes having the nucleotide sequence represented by SEQ ID NOS: 75041, 75042, 75043, 75044, 75045, 75046, 75047, 75048, 75049, 75050, 75051 were selected from the ORFs having the nucleotide sequence represented by SEQ ID NO: 6210.

[6706] The probes having the nucleotide sequence represented by SEQ ID NOS: 75052, 75053, 75054, 75055, 75056, 75057, 75058, 75059, 75060, 75061, 75062 were selected from the ORFs having the nucleotide sequence represented by SEQ ID NO: 6211.

[6707] The probes having the nucleotide sequence represented by SEQ ID NOS: 75063, 75064, 75065, 75066, 75067, 75068, 75069, 75070, 75071, 75072, 75073 were selected from the ORFs having the nucleotide sequence represented by SEQ ID NO: 6212.

[6708] The probes having the nucleotide sequence represented by SEQ ID NOS: 75074, 75075, 75076, 75077, 75078, 75079, 75080, 75081, 75082, 75083, 75084 were selected from the ORFs having the nucleotide sequence represented by SEQ ID NO: 6213.

[6709] The probes having the nucleotide sequence represented by SEQ ID NOS: 75085, 75086, 75087, 75088, 75089, 75090, 75091, 75092, 75093, 75094, 75095 were selected from the ORFs having the nucleotide sequence represented by SEQ ID NO: 6214.

[6710] The probes having the nucleotide sequence represented by SEQ ID NOS: 75096, 75097, 75098, 75099, 75100, 75101, 75102, 75103, 75104, 75105, 75106 were selected from the ORFs having the nucleotide sequence represented by SEQ ID NO: 6215.

[6711] The probes having the nucleotide sequence represented by SEQ ID NOS: 75107, 75108, 75109, 75110, 75111, 75112, 75113, 75114, 75115, 75116, 75117 were selected from the ORFs having the nucleotide sequence represented by SEQ ID NO: 6216.

[6712] The probes having the nucleotide sequence represented by SEQ ID NOS: 75118, 75119, 75120, 75121, 75122, 75123, 75124, 75125, 75126, 75127, 75128 were selected from the ORFs having the nucleotide sequence represented by SEQ ID NO: 6217.

[6713] The probes having the nucleotide sequence represented by SEQ ID NOS: 75129, 75130, 75131, 75132, 75133, 75134, 75135, 75136, 75137, 75138, 75139 were selected from the ORFs having the nucleotide sequence represented by SEQ ID NO: 6218.

[6714] The probes having the nucleotide sequence represented by SEQ ID NOS: 75140, 75141, 75142, 75143, 75144, 75145, 75146, 75147, 75148, 75149, 75150 were selected from the ORFs having the nucleotide sequence represented by SEQ ID NO: 6219.

[6715] The probes having the nucleotide sequence represented by SEQ ID NOS: 75151, 75152, 75153, 75154, 75155, 75156, 75157, 75158, 75159, 75160 were selected from the ORFs having the nucleotide sequence represented by SEQ ID NO: 6220.

[6716] The probes having the nucleotide sequence represented by SEQ ID NOS: 75161, 75162, 75163, 75164, 75165, 75166, 75167, 75168, 75169, 75170, 75171 were selected from the ORFs having the nucleotide sequence represented by SEQ ID NO: 6221.

[6717] The probes having the nucleotide sequence represented by SEQ ID NOS: 75172, 75173, 75174, 75175, 75176, 75177, 75178, 75179, 75180, 75181, 75182 were selected from the ORFs having the nucleotide sequence represented by SEQ ID NO: 6222.

[6718] The probes having the nucleotide sequence represented by SEQ ID NOS: 75183, 75184, 75185, 75186, 75187, 75188, 75189, 75190, 75191, 75192, 75193 were selected from the ORFs having the nucleotide sequence represented by SEQ ID NO: 6223.

[6719] The probes having the nucleotide sequence represented by SEQ ID NOS: 75194, 75195, 75196, 75197, 75198, 75199, 75200, 75201, 75202, 75203, 75204 were selected from the ORFs having the nucleotide sequence represented by SEQ ID NO: 6224.

[6720] The probes having the nucleotide sequence represented by SEQ ID NOS: 75205, 75206, 75207, 75208, 75209, 75210, 75211, 75212, 75213, 75214, 75215 were selected from the ORFs having the nucleotide sequence represented by SEQ ID NO: 6225.

[6721] The probes having the nucleotide sequence represented by SEQ ID NOS: 75216, 75217, 75218, 75219, 75220, 75221, 75222, 75223, 75224, 75225, 75226 were selected from the ORFs having the nucleotide sequence represented by SEQ ID NO: 6226.

[6722] The probes having the nucleotide sequence represented by SEQ ID NOS: 75227, 75228, 75229, 75230, 75231, 75232, 75233, 75234, 75235, 75236, 75237 were selected from the ORFs having the nucleotide sequence represented by SEQ ID NO: 6227.

[6723] The probes having the nucleotide sequence represented by SEQ ID NOS: 75238, 75239, 75240, 75241, 75242, 75243, 75244, 75245, 75246, 75247, 75248 were selected from the ORFs having the nucleotide sequence represented by SEQ ID NO: 6228.

[6724] The probes having the nucleotide sequence represented by SEQ ID NOS: 75249, 75250, 75251, 75252, 75253, 75254, 75255, 75256, 75257, 75258, 75259 were selected from the ORFs having the nucleotide sequence represented by SEQ ID NO: 6229.

[6725] The probes having the nucleotide sequence represented by SEQ ID NOS: 75260, 75261, 75262, 75263, 75264, 75265, 75266, 75267, 75268, 75269, 75270 were selected from the ORFs having the nucleotide sequence represented by SEQ ID NO: 6230.

[6726] The probes having the nucleotide sequence represented by SEQ ID NOS: 75271, 75272, 75273, 75274, 75275, 75276, 75277, 75278, 75279, 75280, 75281 were selected from the ORFs having the nucleotide sequence represented by SEQ ID NO: 6231.

[6727] The probes having the nucleotide sequence represented by SEQ ID NOS: 75282, 75283, 75284, 75285, 75286, 75287, 75288, 75289, 75290, 75291, 75292 were selected from the ORFs having the nucleotide sequence represented by SEQ ID NO: 6232.

[6728] The probes having the nucleotide sequence represented by SEQ ID NOS: 75293, 75294, 75295, 75296, 75297, 75298, 75299, 75300, 75301, 75302, 75303 were selected from the ORFs having the nucleotide sequence represented by SEQ ID NO: 6233.

[6729] The probes having the nucleotide sequence represented by SEQ ID NOS: 75304, 75305, 75306, 75307, 75308, 75309, 75310, 75311, 75312, 75313, 75314 were selected from the ORFs having the nucleotide sequence represented by SEQ ID NO: 6234.

[6730] The probes having the nucleotide sequence represented by SEQ ID NOS: 75315, 75316, 75317, 75318, 75319, 75320,

[6731] 75321, 75322, 75323, 75324, 75325 were selected from the ORFs having the nucleotide sequence represented by SEQ ID NO: 6235.

[6732] The probes having the nucleotide sequence represented by SEQ ID NOS: 75326, 75327, 75328, 75329, 75330, 75331,

[6733] 75332, 75333, 75334, 75335, 75336 were selected from the ORFs having the nucleotide sequence represented by SEQ ID NO: 6236.

[6734] The probes from 7448 DNA sequences of non-Sc type ORFs described as above (1-B) were as follows:

[6735] The probes having the nucleotide sequence represented by SEQ ID NOS: 82785, 82786, 82787, 82788, 82789, 82790, 82791, 82792, 82793, 82794, 82795 were selected from the ORFs having the nucleotide sequence represented by SEQ ID NO: 75337.

[6736] The probes having the nucleotide sequence represented by SEQ ID NOS: 82796, 82797, 82798, 82799, 82800, 82801, 82802, 82803, 82804, 82805, 82806 were selected from the ORFs having the nucleotide sequence represented by SEQ ID NO: 75338.

[6737] The probes having the nucleotide sequence represented by SEQ ID NOS: 82807, 82808, 82809, 82810, 82811, 82812, 82813, 82814, 82815, 82816, 82817 were selected from the ORFs having the nucleotide sequence represented by SEQ ID NO: 75339.

[6738] The probes having the nucleotide sequence represented by SEQ ID NOS: 82818, 82819, 82820, 82821, 82822, 82823, 82824, 82825, 82826, 82827, 82828 were selected from the ORFs having the nucleotide sequence represented by SEQ ID NO: 75340.

[6739] The probes having the nucleotide sequence represented by SEQ ID NOS: 82829, 82830, 82831, 82832, 82833, 82834, 82835, 82836, 82837, 82838, 82839 were selected from the ORFs having the nucleotide sequence represented by SEQ ID NO: 75341.

[6740] The probes having the nucleotide sequence represented by SEQ ID NOS: 82840, 82841, 82842, 82843, 82844, 82845, 82846, 82847, 82848, 82849, 82850 were selected from the ORFs having the nucleotide sequence represented by SEQ ID NO: 75342.

[6741] The probes having the nucleotide sequence represented by SEQ ID NOS: 82851, 82852, 82853, 82854, 82855, 82856, 82857, 82858, 82859, 82860, 82861 were selected from the ORFs having the nucleotide sequence represented by SEQ ID NO: 75343.

[6742] The probes having the nucleotide sequence represented by SEQ ID NOS: 82862, 82863, 82864, 82865, 82866, 82867, 82868, 82869, 82870, 82871, 82872 were selected from the ORFs having the nucleotide sequence represented by SEQ ID NO: 75344.

[6743] The probes having the nucleotide sequence represented by SEQ ID NOS: 82873, 82874, 82875, 82876, 82877, 82878, 82879, 82880, 82881, 82882, 82883 were selected from the ORFs having the nucleotide sequence represented by SEQ ID NO: 75345.

[6744] The probes having the nucleotide sequence represented by SEQ ID NOS: 82884, 82885, 82886, 82887, 82888, 82889, 82890, 82891, 82892, 82893, 82894 were selected from the ORFs having the nucleotide sequence represented by SEQ ID NO: 75346.

[6745] The probes having the nucleotide sequence represented by SEQ ID NOS: 82895, 82896, 82897, 82898, 82899, 82900, 82901, 82902, 82903, 82904, 82905 were selected from the ORFs having the nucleotide sequence represented by SEQ ID NO: 75347.

[6746] The probes having the nucleotide sequence represented by SEQ ID NOS: 82906, 82907, 82908, 82909, 82910, 82911, 82912, 82913, 82914, 82915, 82916 were selected from the ORFs having the nucleotide sequence represented by SEQ ID NO: 75348.

[6747] The probes having the nucleotide sequence represented by SEQ ID NOS: 82917, 82918, 82919, 82920, 82921, 82922, 82923, 82924, 82925, 82926, 82927 were selected from the ORFs having the nucleotide sequence represented by SEQ ID NO: 75349.

[6748] The probes having the nucleotide sequence represented by SEQ ID NOS: 82928, 82929, 82930, 82931, 82932, 82933, 82934, 82935, 82936, 82937, 82938 were selected from the ORFs having the nucleotide sequence represented by SEQ ID NO: 75350.

[6749] The probes having the nucleotide sequence represented by SEQ ID NOS: 82939, 82940, 82941, 82942, 82943, 82944, 82945, 82946, 82947, 82948, 82949 were selected from the ORFs having the nucleotide sequence represented by SEQ ID NO: 75351.

[6750] The probes having the nucleotide sequence represented by SEQ ID NOS: 82950, 82951, 82952, 82953, 82954, 82955, 82956, 82957, 82958, 82959, 82960 were selected from the ORFs having the nucleotide sequence represented by SEQ ID NO:. 75352.

[6751] The probes having the nucleotide sequence represented by SEQ ID NOS: 82961, 82962, 82963, 82964, 82965, 82966, 82967, 82968, 82969, 82970, 82971 were selected from the ORFs having the nucleotide sequence represented by SEQ ID NO: 75353.

[6752] The probes having the nucleotide sequence represented by SEQ ID NOS: 82972, 82973, 82974, 82975, 82976, 82977, 82978, 82979, 82980, 82981, 82982 were selected from the ORFs having the nucleotide sequence represented by SEQ ID NO: 75354.

[6753] The probes having the nucleotide sequence represented by SEQ ID NOS: 82983, 82984, 82985, 82986, 82987, 82988, 82989, 82990, 82991, 82992, 82993 were selected from the ORFs having the nucleotide sequence represented by SEQ ID NO: 75355.

[6754] The probes having the nucleotide sequence represented by SEQ ID NOS: 82994, 82995, 82996, 82997, 82998, 82999, 83000, 83001, 83002, 83003, 83004 were selected from the ORFs having the nucleotide sequence represented by SEQ ID NO: 75356.

[6755] The probes having the nucleotide sequence represented by SEQ ID NOS: 83005, 83006, 83007, 83008, 83009, 83010, 83011, 83012, 83013, 83014, 83015 were selected from the ORFs having the nucleotide sequence represented by SEQ ID NO: 75357.

[6756] The probes having the nucleotide sequence represented by SEQ ID NOS: 83016, 83017, 83018, 83019, 83020, 83021, 83022, 83023, 83024, 83025, 83026 were selected from the ORFs having the nucleotide sequence represented by SEQ ID NO: 75358.

[6757] The probes having the nucleotide sequence represented by SEQ ID NOS: 83027, 83028, 83029, 83030, 83031, 83032, 83033, 83034, 83035, 83036, 83037 were selected from the ORFs having the nucleotide sequence represented by SEQ ID NO: 75359.

[6758] The probes having the nucleotide sequence represented by SEQ ID NOS: 83038, 83039, 83040, 83041, 83042, 83043, 83044, 83045, 83046, 83047, 83048 were selected from the ORFs having the nucleotide sequence represented by SEQ ID NO: 75360.

[6759] The probes having the nucleotide sequence represented by SEQ ID NOS: 83049, 83050, 83051, 83052, 83053, 83054, 83055, 83056, 83057, 83058, 83059 were selected from the ORFs having the nucleotide sequence represented by SEQ ID NO: 75361.

[6760] The probes having the nucleotide sequence represented by SEQ ID NOS: 83060, 83061, 83062, 83063, 83064, 83065, 83066, 83067, 83068, 83069, 83070 were selected from the ORFs having the nucleotide sequence represented by SEQ ID NO: 75362.

[6761] The probes having the nucleotide sequence represented by SEQ ID NOS: 83071, 83072, 83073, 83074, 83075, 83076, 83077, 83078, 83079, 83080, 83081 were selected from the ORFs having the nucleotide sequence represented by SEQ ID NO: 75363.

[6762] The probes having the nucleotide sequence represented by SEQ ID NOS: 83082, 83083, 83084, 83085, 83086, 83087, 83088, 83089, 83090, 83091, 83092 were selected from the ORFs having the nucleotide sequence represented by SEQ ID NO: 75364.

[6763] The probes having the nucleotide sequence represented by SEQ ID NOS: 83093, 83094, 83095, 83096, 83097, 83098, 83099, 83100, 83101, 83102, 83103 were selected from the ORFs having the nucleotide sequence represented by SEQ ID NO: 75365.

[6764] The probes having the nucleotide sequence represented by SEQ ID NOS: 83104, 83105, 83106, 83107, 83108, 83109, 83110, 83111, 83112, 83113, 83114 were selected from the ORFs having the nucleotide sequence represented by SEQ ID NO: 75366.

[6765] The probes having the nucleotide sequence represented by SEQ ID NOS: 83115, 83116, 83117, 83118, 83119, 83120, 83121, 83122, 83123, 83124, 83125 were selected from the ORFs having the nucleotide sequence represented by SEQ ID NO: 75367.

[6766] The probes having the nucleotide sequence represented by SEQ ID NOS: 83126, 83127, 83128, 83129, 83130, 83131, 83132, 83133, 83134, 83135, 83136 were selected from the ORFs having the nucleotide sequence represented by SEQ ID NO: 75368.

[6767] The probes having the nucleotide sequence represented by SEQ ID NOS: 83137, 83138, 83139, 83140, 83141, 83142, 83143, 83144, 83145, 83146, 83147 were selected from the ORFs having the nucleotide sequence represented by SEQ ID NO: 75369.

[6768] The probes having the nucleotide sequence represented by SEQ ID NOS: 83148, 83149, 83150, 83151, 83152, 83153, 83154, 83155, 83156, 83157, 83158 were selected from the ORFs having the nucleotide sequence represented by SEQ ID NO: 75370.

[6769] The probes having the nucleotide sequence represented by SEQ ID NOS: 83159, 83160, 83161, 83162, 83163, 83164, 83165, 83166, 83167, 83168, 83169 were selected from the ORFs having the nucleotide sequence represented by SEQ ID NO: 75371.

[6770] The probes having the nucleotide sequence represented by SEQ ID NOS: 83170, 83171, 83172, 83173, 83174, 83175, 83176, 83177, 83178, 83179, 83180, 83181, 83182, 83183, 83184, 83185, 83186, 83187, 83188, 83189, 83190, 83191 were selected from the ORFs having the nucleotide sequence represented by SEQ ID NO: 75372.

[6771] The probes having the nucleotide sequence represented by SEQ ID NOS: 83192, 83193, 83194, 83195, 83196, 83197, 83198, 83199, 83200, 83201, 83202 were selected from the ORFs having the nucleotide sequence represented by SEQ ID NO: 75373.

[6772] The probes having the nucleotide sequence represented by SEQ ID NOS: 83203, 83204, 83205, 83206, 83207, 83208, 83209, 83210, 83211, 83212, 83213 were selected from the ORFs having the nucleotide sequence represented by SEQ ID NO: 75374.

[6773] The probes having the nucleotide sequence represented by SEQ ID NOS: 83214, 83215, 83216, 83217, 83218, 83219, 83220, 83221, 83222, 83223, 83224 were selected from the ORFs having the nucleotide sequence represented by SEQ ID NO: 75375.

[6774] The probes having the nucleotide sequence represented by SEQ ID NOS: 83225, 83226, 83227, 83228, 83229, 83230, 83231, 83232, 83233, 83234, 83235 were selected from the ORFs having the nucleotide sequence represented by SEQ ID NO: 75376.

[6775] The probes having the nucleotide sequence represented by SEQ ID NOS: 83236, 83237, 83238, 83239, 83240, 83241, 83242, 83243, 83244, 83245, 83246 were selected from the ORFs having the nucleotide sequence represented by SEQ ID NO: 75377.

[6776] The probes having the nucleotide sequence represented by SEQ ID NOS: 83247, 83248, 83249, 83250, 83251, 83252, 83253, 83254, 83255, 83256, 83257 were selected from the ORFs having the nucleotide sequence represented by SEQ ID NO: 75378.

[6777] The probes having the nucleotide sequence represented by SEQ ID NOS: 83258, 83259, 83260, 83261, 83262, 83263, 83264, 83265, 83266, 83267, 83268 were selected from the ORFs having the nucleotide sequence represented by SEQ ID NO: 75379.

[6778] The probes having the nucleotide sequence represented by SEQ ID NOS: 83269, 83270, 83271, 83272, 83273, 83274, 83275, 83276, 83277, 83278, 83279 were selected from the ORFs having the nucleotide sequence represented by SEQ ID NO: 75380.

[6779] The probes having the nucleotide sequence-represented by SEQ ID NOS: 83280, 83281, 83282, 83283, 83284, 83285, 83286, 83287, 83288, 83289, 83290 were selected from the ORFs having the nucleotide sequence represented by SEQ ID NO: 75381.

[6780] The probes having the nucleotide sequence represented by SEQ ID NOS: 83291, 83292, 83293, 83294, 83295, 83296, 83297, 83298, 83299, 83300, 83301 were selected from the ORFs having the nucleotide sequence represented by SEQ ID NO: 75382.

[6781] The probes having the nucleotide sequence represented by SEQ ID NOS: 83302, 83303, 83304, 83305, 83306, 83307, 83308, 83309, 83310, 83311, 83312 were selected from the ORFs having the nucleotide sequence represented by SEQ ID NO: 75383.

[6782] The probes having the nucleotide sequence represented by SEQ ID NOS: 83313, 83314, 83315, 83316, 83317, 83318, 83319, 83320, 83321, 83322, 83323 were selected from the ORFs having the nucleotide sequence represented by SEQ ID NO: 75384.

[6783] The probes having the nucleotide sequence represented by SEQ ID NOS: 83324, 83325, 83326, 83327, 83328, 83329, 83330, 83331, 83332, 83333, 83334 were selected from the ORFs having the nucleotide sequence represented by SEQ ID NO: 75385.

[6784] The probes having the nucleotide sequence represented by SEQ ID NOS: 83335, 83336, 83337, 83338, 83339, 83340, 83341, 83342, 83343, 83344, 83345 were selected from the ORFs having the nucleotide sequence represented by SEQ ID NO: 75386.

[6785] The probes having the nucleotide sequence represented by SEQ ID NOS: 83346, 83347, 83348, 83349, 83350, 83351, 83352, 83353, 83354, 83355, 83356 were selected from the ORFs having the nucleotide sequence represented by SEQ ID NO: 75387.

[6786] The probes having the nucleotide sequence represented by SEQ ID NOS: 83357, 83358, 83359, 83360, 83361, 83362, 83363, 83364, 83365, 83366, 83367 were selected from the ORFs having the nucleotide sequence represented by SEQ ID NO: 75388.

[6787] The probes having the nucleotide sequence represented by SEQ ID NOS: 83368, 83369, 83370, 83371, 83372, 83373, 83374, 83375, 83376, 83377, 83378 were selected from the ORFs having the nucleotide sequence represented by SEQ ID NO: 75389.

[6788] The probes having the nucleotide sequence represented by SEQ ID NOS: 83379, 83380, 83381, 83382, 83383, 83384, 83385, 83386, 83387, 83388, 83389 were selected from the ORFs having the nucleotide sequence represented by SEQ ID NO: 75390.

[6789] The probes having the nucleotide sequence represented by SEQ ID NOS: 83390, 83391, 83392, 83393, 83394, 83395, 83396, 83397, 83398, 83399 were selected from the ORFs having the nucleotide sequence represented by SEQ ID NO: 75391.

[6790] The probes having the nucleotide sequence represented by SEQ ID NOS: 83400, 83401, 83402, 83403, 83404, 83405, 83406, 83407, 83408, 83409, 83410 were selected from the ORFs having the nucleotide sequence represented by SEQ ID NO: 75392.

[6791] The probes having the nucleotide sequence represented by SEQ ID NOS: 83411, 83412, 83413, 83414, 83415, 83416, 83417, 83418, 83419, 83420, 83421 were selected from the ORFs having the nucleotide sequence represented by SEQ ID NO: 75393.

[6792] The probes having the nucleotide sequence represented by SEQ ID NOS: 83422, 83423, 83424, 83425, 83426, 83427, 83428, 83429, 83430, 83431, 83432 were selected from the ORFs having the nucleotide sequence represented by SEQ ID NO: 75394.

[6793] The probes having the nucleotide sequence represented by SEQ ID NOS: 83433, 83434, 83435, 83436, 83437, 83438, 83439, 83440, 83441, 83442, 83443 were selected from the ORFs having the nucleotide sequence represented by SEQ ID NO: 75395.

[6794] The probes having the nucleotide sequence represented by SEQ ID NOS: 83444, 83445, 83446, 83447, 83448, 83449, 83450, 83451, 83452, 83453, 83454 were selected from the ORFs having the nucleotide sequence represented by SEQ ID NO: 75396.

[6795] The probes having the nucleotide sequence represented by SEQ ID NOS: 83455, 83456, 83457, 83458, 83459, 83460, 83461, 83462, 83463, 83464, 83465 were selected from the ORFs having the nucleotide sequence represented by SEQ ID NO: 75397.

[6796] The probes having the nucleotide sequence represented by SEQ ID NOS: 83466, 83467, 83468, 83469, 83470, 83471, 83472, 83473, 83474, 83475, 83476 were selected from the ORFs having the nucleotide sequence represented by SEQ ID NO: 75398.

[6797] The probes having the nucleotide sequence represented by SEQ ID NOS: 83477, 83478, 83479, 83480, 83481, 83482, 83483, 83484, 83485, 83486, 83487 were selected from the ORFs having the nucleotide sequence represented by SEQ ID NO: 75399.

[6798] The probes having the nucleotide sequence represented by SEQ ID NOS: 83488, 83489, 83490, 83491, 83492, 83493, 83494, 83495, 83496, 83497, 83498 were selected from the ORFs having the nucleotide sequence represented by SEQ ID NO: 75400.

[6799] The probes having the nucleotide sequence represented by SEQ ID NOS: 83499, 83500, 83501, 83502, 83503, 83504, 83505, 83506, 83507, 83508, 83509 were selected from the ORFs having the nucleotide sequence represented by SEQ ID NO: 75401.

[6800] The probes having the nucleotide sequence represented by SEQ ID NOS: 83510, 83511, 83512, 83513, 83514, 83515, 83516, 83517, 83518, 83519, 83520 were selected from the ORFs having the nucleotide sequence represented by SEQ ID NO: 75402.

[6801] The probes having the nucleotide sequence represented by SEQ ID NOS: 83521, 83522, 83523, 83524, 83525, 83526, 83527, 83528, 83529, 83530, 83531 were selected from the ORFs having the nucleotide sequence represented by SEQ ID NO: 75403.

[6802] The probes having the nucleotide sequence represented by SEQ ID NOS: 83532, 83533, 83534, 83535, 83536, 83537, 83538, 83539, 83540, 83541, 83542 were selected from the ORFs having the nucleotide sequence represented by SEQ ID NO: 75404.

[6803] The probes having the nucleotide sequence represented by SEQ ID NOS: 83543, 83544, 83545, 83546, 83547, 83548, 83549, 83550, 83551, 83552, 83553 were selected from the ORFs having the nucleotide sequence represented by SEQ ID NO: 75405.

[6804] The probes having the nucleotide sequence represented by SEQ ID NOS: 83554, 83555, 83556, 83557, 83558, 83559, 83560, 83561, 83562, 83563, 83564 were selected from the ORFs having the nucleotide sequence represented by SEQ ID NO: 75406.

[6805] The probes having the nucleotide sequence represented by SEQ ID NOS: 83565, 83566, 83567, 83568, 83569, 83570, 83571, 83572, 83573, 83574, 83575 were selected from the ORFs having the nucleotide sequence represented by SEQ ID NO: 75407.

[6806] The probes having the nucleotide sequence represented by SEQ ID NOS: 83576, 83577, 83578, 83579, 83580, 83581, 83582, 83583, 83584, 83585, 83586 were selected from the ORFs having the nucleotide sequence represented by SEQ ID NO: 75408.

[6807] The probes having the nucleotide sequence represented by SEQ ID NOS: 83587, 83588, 83589, 83590, 83591, 83592, 83593, 83594, 83595, 83596, 83597 were selected from the ORFs having the nucleotide sequence represented by SEQ ID NO: 75409.

[6808] The probes having the nucleotide sequence represented by SEQ ID NOS: 83598, 83599, 83600, 83601, 83602, 83603, 83604, 83605, 83606, 83607, 83608 were selected from the ORFs having the nucleotide sequence represented by SEQ ID NO: 75410.

[6809] The probes having the nucleotide sequence represented by SEQ ID NOS: 83609, 83610, 83611, 83612, 83613, 83614, 83615, 83616, 83617, 83618, 83619 were selected from the ORFs having the nucleotide sequence represented by SEQ ID NO: 75411.

[6810] The probes having the nucleotide sequence represented by SEQ ID NOS: 83620, 83621, 83622, 83623, 83624, 83625, 83626, 83627, 83628, 83629, 83630 were selected from the ORFs having the nucleotide sequence represented by SEQ ID NO: 75412.

[6811] The probes having the nucleotide sequence represented by SEQ ID NOS: 83631, 83632, 83633, 83634, 83635, 83636, 83637, 83638, 83639, 83640, 83641 were selected from the ORFs having the nucleotide sequence represented by SEQ ID NO: 75413.

[6812] The probes having the nucleotide sequence represented by SEQ ID NOS: 83642, 83643, 83644, 83645, 83646, 83647, 83648, 83649, 83650, 83651, 83652 were selected from the ORFs having the nucleotide sequence represented by SEQ ID NO: 75414.

[6813] The probes having the nucleotide sequence represented by SEQ ID NOS: 83653, 83654, 83655, 83656, 83657, 83658, 83659, 83660, 83661, 83662, 83663 were selected from the ORFs having the nucleotide sequence represented by SEQ ID NO: 75415.

[6814] The probes having the nucleotide sequence represented by SEQ ID NOS: 83664, 83665, 83666, 83667, 83668, 83669, 83670, 83671, 83672, 83673, 83674 were selected from the ORFs having the nucleotide sequence represented by SEQ ID NO: 75416.

[6815] The probes having the nucleotide sequence represented by SEQ ID NOS: 83675, 83676, 83677, 83678, 83679, 83680, 83681, 83682, 83683, 83684, 83685 were selected from the ORFs having the nucleotide sequence represented by SEQ ID NO: 75417.

[6816] The probes having the nucleotide sequence represented by SEQ ID NOS: 83686, 83687, 83688, 83689, 83690, 83691, 83692, 83693, 83694, 83695, 83696 were selected from the ORFs having the nucleotide sequence represented by SEQ ID NO: 75418.

[6817] The probes having the nucleotide sequence represented by SEQ ID NOS: 83697, 83698, 83699, 83700, 83701, 83702, 83703, 83704, 83705, 83706, 83707 were selected from the ORFs having the nucleotide sequence represented by SEQ ID NO: 75419.

[6818] The probes having the nucleotide sequence represented by SEQ ID NOS: 83708, 83709, 83710, 83711, 83712, 83713, 83714, 83715, 83716, 83717, 83718 were selected from the ORFs having the nucleotide sequence represented by SEQ ID NO: 75420.

[6819] The probes having the nucleotide sequence represented by SEQ ID NOS: 83719, 83720, 83721, 83722, 83723, 83724, 83725, 83726, 83727, 83728, 83729 were selected from the ORFs having the nucleotide sequence represented by SEQ ID NO: 75421.

[6820] The probes having the nucleotide sequence represented by SEQ ID NOS: 83730, 83731, 83732, 83733, 83734, 83735, 83736, 83737, 83738, 83739, 83740 were selected from the ORFs having the nucleotide sequence represented by SEQ ID NO: 75422.

[6821] The probes having the nucleotide sequence represented by SEQ ID NOS: 83741, 83742, 83743, 83744, 83745, 83746, 83747, 83748, 83749, 83750, 83751 were selected from the ORFs having the nucleotide sequence represented by SEQ ID NO: 75423.

[6822] The probes having the nucleotide sequence represented by SEQ ID NOS: 83752, 83753, 83754, 83755, 83756, 83757, 83758, 83759, 83760, 83761, 83762 were selected from the ORFs having the nucleotide sequence represented by SEQ ID NO: 75424.

[6823] The probes having the nucleotide sequence represented by SEQ ID NOS: 83763, 83764, 83765, 83766, 83767, 83768, 83769, 83770, 83771, 83772, 83773 were selected from the ORFs having the nucleotide sequence represented by SEQ ID NO: 75425.

[6824] The probes having the nucleotide sequence represented by SEQ ID NOS: 83774, 83775, 83776, 83777, 83778, 83779, 83780, 83781, 83782, 83783, 83784 were selected from the ORFs having the nucleotide sequence represented by SEQ ID NO: 75426.

[6825] The probes having the nucleotide sequence represented by SEQ ID NOS: 83785, 83786, 83787, 83788, 83789, 83790, 83791, 83792, 83793, 83794, 83795 were selected from the ORFs having the nucleotide sequence represented by SEQ ID NO: 75427.

[6826] The probes having the nucleotide sequence represented by SEQ ID NOS: 83796, 83797, 83798, 83799, 83800, 83801, 83802, 83803, 83804, 83805, 83806 were selected from the ORFs having the nucleotide sequence represented by SEQ ID NO: 75428.

[6827] The probes having the nucleotide sequence represented by SEQ ID NOS: 83807, 83808, 83809, 83810, 83811, 83812, 83813, 83814, 83815, 83816, 83817 were selected from the ORFs having the nucleotide sequence represented by SEQ ID NO: 75429.

[6828] The probes having the nucleotide sequence represented by SEQ ID NOS: 83818, 83819, 83820, 83821, 83822, 83823, 83824, 83825, 83826, 83827, 83828 were selected from the ORFs having the nucleotide sequence represented by SEQ ID NO: 75430.

[6829] The probes having the nucleotide sequence represented by SEQ ID NOS: 83829, 83830, 83831, 83832, 83833, 83834, 83835, 83836, 83837, 83838, 83839 were selected from the ORFs having the nucleotide sequence represented by SEQ ID NO: 75431.

[6830] The probes having the nucleotide sequence represented by SEQ ID NOS: 83840, 83841, 83842, 83843, 83844, 83845, 83846, 83847, 83848, 83849, 83850 were selected from the ORFs having the nucleotide sequence represented by SEQ ID NO: 75432.

[6831] The probes having the nucleotide sequence represented by SEQ ID NOS: 83851, 83852, 83853, 83854, 83855, 83856, 83857, 83858, 83859, 83860, 83861 were selected from the ORFs having the nucleotide sequence represented by SEQ ID NO: 75433.

[6832] The probes having the nucleotide sequence represented by SEQ ID NOS: 83862, 83863, 83864, 83865, 83866, 83867, 83868, 83869, 83870, 83871, 83872 were selected from the ORFs having the nucleotide sequence represented by SEQ ID NO: 75434.

[6833] The probes having the nucleotide sequence represented by SEQ ID NOS: 83873, 83874, 83875, 83876, 83877, 83878, 83879, 83880, 83881, 83882, 83883 were selected from the ORFs having the nucleotide sequence represented by SEQ ID NO: 75435.

[6834] The probes having the nucleotide sequence represented by SEQ ID NOS: 83884, 83885, 83886, 83887, 83888, 83889, 83890, 83891 were selected from the ORFs having the nucleotide sequence represented by SEQ ID NO: 75436.

[6835] The probes having the nucleotide sequence represented by SEQ ID NOS: 83892, 83893, 83894, 83895, 83896, 83897, 83898, 83899, 83900, 83901, 83902 were selected from the ORFs having the nucleotide sequence represented by SEQ ID NO: 75437.

[6836] The probes having the nucleotide sequence represented by SEQ ID NOS: 83903, 83904, 83905, 83906, 83907, 83908, 83909, 83910, 83911, 83912, 83913 were selected from the ORFs having the nucleotide sequence represented by SEQ ID NO: 75438.

[6837] The probes having the nucleotide sequence represented by SEQ ID NOS: 83914, 83915, 83916, 83917, 83918, 83919, 83920, 83921, 83922, 83923, 83924 were selected from the ORFs having the nucleotide sequence represented by SEQ ID NO: 75439.

[6838] The probes having the nucleotide sequence represented by SEQ ID NOS: 83925, 83926, 83927, 83928, 83929, 83930, 83931, 83932, 83933, 83934, 83935 were selected from the ORFs having the nucleotide sequence represented by SEQ ID NO: 75440.

[6839] The probes having the nucleotide sequence represented by SEQ ID NOS: 83936, 83937, 83938, 83939, 83940, 83941, 83942, 83943, 83944, 83945, 83946 were selected from the ORFs having the nucleotide sequence represented by SEQ ID NO: 75441.

[6840] The probes having the nucleotide sequence represented by SEQ ID NOS: 83947, 83948, 83949, 83950, 83951, 83952, 83953, 83954, 83955, 83956, 83957 were selected from the ORFs having the nucleotide sequence represented by SEQ ID NO: 75442.

[6841] The probes having the nucleotide sequence represented by SEQ ID NOS: 83958, 83959, 83960, 83961, 83962, 83963, 83964, 83965, 83966, 83967, 83968 were selected from the ORFs having the nucleotide sequence represented by SEQ ID NO: 75443.

[6842] The probes having the nucleotide sequence represented by SEQ ID NOS: 83969, 83970, 83971, 83972, 83973, 83974, 83975, 83976, 83977, 83978, 83979 were selected from the ORFs having the nucleotide sequence represented by SEQ ID NO: 75444.

[6843] The probes having the nucleotide sequence represented by SEQ ID NOS: 83980, 83981, 83982, 83983, 83984, 83985, 83986, 83987, 83988, 83989, 83990 were selected from the ORFs having the nucleotide sequence represented by SEQ ID NO: 75445.

[6844] The probes having the nucleotide sequence represented by SEQ ID NOS: 83991, 83992, 83993, 83994, 83995, 83996, 83997, 83998, 83999, 84000, 84001 were selected from the ORFs having the nucleotide sequence represented by SEQ ID NO: 75446.

[6845] The probes having the nucleotide sequence represented by SEQ ID NOS: 84002, 84003, 84004, 84005, 84006, 84007, 84008, 84009, 84010, 84011, 84012 were selected from the ORFs having the nucleotide sequence represented by SEQ ID NO: 75447.

[6846] The probes having the nucleotide sequence represented by SEQ ID NOS: 84013, 84014, 84015, 84016, 84017, 84018, 84019, 84020, 84021, 84022, 84023 were selected from the ORFs having the nucleotide sequence represented by SEQ ID NO: 75448.

[6847] The probes having the nucleotide sequence represented by SEQ ID NOS: 84024, 84025, 84026, 84027, 84028, 84029, 84030, 84031, 84032, 84033, 84034 were selected from the ORFs having the nucleotide sequence represented by SEQ ID NO: 75449.

[6848] The probes having the nucleotide sequence represented by SEQ ID NOS: 84035, 84036, 84037, 84038, 84039, 84040, 84041, 84042, 84043, 84044, 84045 were selected from the ORFs having the nucleotide sequence represented by SEQ ID NO: 75450.

[6849] The probes having the nucleotide sequence represented by SEQ ID NOS: 84046, 84047, 84048, 84049, 84050, 84051, 84052, 84053, 84054, 84055, 84056 were selected from the ORFs having the nucleotide sequence represented by SEQ ID NO: 75451.

[6850] The probes having the nucleotide sequence represented by SEQ ID NOS: 84057, 84058, 84059, 84060, 84061, 84062, 84063, 84064, 84065, 84066, 84067 were selected from the ORFs having the nucleotide sequence represented by SEQ ID NO: 75452.

[6851] The probes having the nucleotide sequence represented by SEQ ID NOS: 84068, 84069, 84070, 84071, 84072, 84073, 84074, 84075, 84076, 84077, 84078 were selected from the ORFs having the nucleotide sequence represented by SEQ ID NO: 75453.

[6852] The probes having the nucleotide sequence represented by SEQ ID NOS: 84079, 84080, 84081, 84082, 84083, 84084, 84085, 84086, 84087, 84088, 84089 were selected from the ORFs having the nucleotide sequence represented by SEQ ID NO: 75454.

[6853] The probes having the nucleotide sequence represented by SEQ ID NOS: 84090, 84091, 84092, 84093, 84094, 84095, 84096, 84097, 84098, 84099, 84100 were selected from the ORFs having the nucleotide sequence represented by SEQ ID NO: 75455.

[6854] The probes having the nucleotide sequence represented by SEQ ID NOS: 84101, 84102, 84103, 84104, 84105, 84106, 84107, 84108, 84109, 84110, 84111 were selected from the ORFs having the nucleotide sequence represented by SEQ ID NO: 75456.

[6855] The probes having the nucleotide sequence represented by SEQ ID NOS: 84112, 84113, 84114, 84115, 84116, 84117, 84118, 84119, 84120, 84121, 84122 were selected from the ORFs having the nucleotide sequence represented by SEQ ID NO: 75457.

[6856] The probes having the nucleotide sequence represented by SEQ ID NOS: 84123, 84124, 84125, 84126, 84127, 84128, 84129, 84130, 84131, 84132, 84133 were selected from the ORFs having the nucleotide sequence represented by SEQ ID NO: 75458.

[6857] The probes having the nucleotide sequence represented by SEQ ID NOS: 84134, 84135, 84136, 84137, 84138, 84139, 84140, 84141, 84142, 84143, 84144 were selected from the ORFs having the nucleotide sequence represented by SEQ ID NO: 75459.

[6858] The probes having the nucleotide sequence represented by SEQ ID NOS: 84145, 84146, 84147, 84148, 84149, 84150, 84151, 84152, 84153, 84154, 84155 were selected from the ORFs having the nucleotide sequence represented by SEQ ID NO: 75460.

[6859] The probes having the nucleotide sequence represented by SEQ ID NOS: 84156, 84157, 84158, 84159, 84160, 84161, 84162, 84163, 84164, 84165, 84166 were selected from the ORFs having the nucleotide sequence represented by SEQ ID NO: 75461.

[6860] The probes having the nucleotide sequence represented by SEQ ID NOS: 84167, 84168, 84169, 84170, 84171, 84172, 84173, 84174, 84175, 84176, 84177 were selected from the ORFs having the nucleotide sequence represented by SEQ ID NO: 75462.

[6861] The probes having the nucleotide sequence represented by SEQ ID NOS: 84178, 84179, 84180, 84181, 84182, 84183, 84184, 84185, 84186, 84187, 84188 were selected from the ORFs having the nucleotide sequence represented by SEQ ID NO: 75463.

[6862] The probes having the nucleotide sequence represented by SEQ ID NOS: 84189, 84190, 84191, 84192, 84193, 84194, 84195, 84196, 84197, 84198 were selected from the ORFs having the nucleotide sequence represented by SEQ ID NO: 75464.

[6863] The probes having the nucleotide sequence represented by SEQ ID NOS: 84199, 84200, 84201, 84202, 84203, 84204, 84205, 84206, 84207, 84208, 84209 were selected from the ORFs having the nucleotide sequence represented by SEQ ID NO: 75465.

[6864] The probes having the nucleotide sequence represented by SEQ ID NOS: 84210, 84211, 84212, 84213, 84214, 84215, 84216, 84217, 84218, 84219, 84220 were selected from the ORFs having the nucleotide sequence represented by SEQ ID NO: 75466.

[6865] The probes having the nucleotide sequence represented by SEQ ID NOS: 84221, 84222, 84223, 84224, 84225, 84226, 84227, 84228, 84229, 84230, 84231 were selected from the ORFs having the nucleotide sequence represented by SEQ ID NO: 75467.

[6866] The probes having the nucleotide sequence represented by SEQ ID NOS: 84232, 84233, 84234, 84235, 84236, 84237, 84238, 84239, 84240, 84241, 84242 were selected from the ORFs having the nucleotide sequence represented by SEQ ID NO: 75468.

[6867] The probes having the nucleotide sequence represented by SEQ ID NOS: 84243, 84244, 84245, 84246, 84247, 84248, 84249, 84250, 84251, 84252, 84253 were selected from the ORFs having the nucleotide sequence represented by SEQ ID NO: 75469.

[6868] The probes having the nucleotide sequence represented by SEQ ID NOS: 84254, 84255, 84256, 84257, 84258, 84259, 84260, 84261, 84262, 84263, 84264 were selected from the ORFs having the nucleotide sequence represented by SEQ ID NO: 75470.

[6869] The probes having the nucleotide sequence represented by SEQ ID NOS: 84265, 84266, 84267, 84268, 84269, 84270, 84271, 84272, 84273, 84274, 84275 were selected from the ORFs having the nucleotide sequence represented by SEQ ID NO: 75471.

[6870] The probes having the nucleotide sequence represented by SEQ ID NOS: 84276, 84277, 84278, 84279, 84280, 84281, 84282, 84283, 84284, 84285, 84286 were selected from the ORFs having the nucleotide sequence represented by SEQ ID NO: 75472.

[6871] The probes having the nucleotide sequence represented by SEQ ID NOS: 84287, 84288, 84289, 84290, 84291, 84292, 84293, 84294, 84295, 84296, 84297 were selected from the ORFs having the nucleotide sequence represented by SEQ ID NO: 75473.

[6872] The probes having the nucleotide sequence represented by SEQ ID NOS: 84298, 84299, 84300, 84301, 84302, 84303, 84304, 84305, 84306, 84307, 84308 were selected from the ORFs having the nucleotide sequence represented by SEQ ID NO: 75474.

[6873] The probes having the nucleotide sequence represented by SEQ ID NOS: 84309, 84310, 84311, 84312, 84313, 84314, 84315, 84316, 84317, 84318, 84319 were selected from the ORFs having the nucleotide sequence represented by SEQ ID NO: 75475.

[6874] The probes having the nucleotide sequence represented by SEQ ID NOS: 84320, 84321, 84322, 84323, 84324, 84325, 84326, 84327, 84328, 84329, 84330 were selected from the ORFs having the nucleotide sequence represented by SEQ ID NO: 75476.

[6875] The probes having the nucleotide sequence represented by SEQ ID NOS: 84331, 84332, 84333, 84334, 84335, 84336, 84337, 84338, 84339, 84340, 84341 were selected from the ORFs having the nucleotide sequence represented by SEQ ID NO: 75477.

[6876] The probes having the nucleotide sequence represented by SEQ ID NOS: 84342, 84343, 84344, 84345, 84346, 84347, 84348, 84349, 84350, 84351, 84352 were selected from the ORFs having the nucleotide sequence represented by SEQ ID NO: 75478.

[6877] The probes having the nucleotide sequence represented by SEQ ID NOS: 84353, 84354, 84355, 84356, 84357, 84358, 84359, 84360, 84361, 84362, 84363 were selected from the ORFs having the nucleotide sequence represented by SEQ ID NO: 75479.

[6878] The probes having the nucleotide sequence represented by SEQ ID NOS: 84364, 84365, 84366, 84367, 84368, 84369, 84370, 84371, 84372, 84373, 84374 were selected from the ORFs having the nucleotide sequence represented by SEQ ID NO: 75480.

[6879] The probes having the nucleotide sequence represented by SEQ ID NOS: 84375, 84376, 84377, 84378, 84379, 84380, 84381, 84382, 84383, 84384, 84385 were selected from the ORFs having the nucleotide sequence represented by SEQ ID NO: 75481.

[6880] The probes having the nucleotide sequence represented by SEQ ID NOS: 84386, 84387, 84388, 84389, 84390, 84391, 84392, 84393, 84394, 84395, 84396 were selected from the ORFs having the nucleotide sequence represented by SEQ ID NO: 75482.

[6881] The probes having the nucleotide sequence represented by SEQ ID NOS: 84397, 84398, 84399, 84400, 84401, 84402, 84403, 84404, 84405, 84406, 84407 were selected from the ORFs having the nucleotide sequence represented by SEQ ID NO: 75483.

[6882] The probes having the nucleotide sequence represented by SEQ ID NOS: 84408, 84409, 84410, 84411, 84412, 84413, 84414, 84415, 84416, 84417, 84418 were selected from the ORFs having the nucleotide sequence represented by SEQ ID NO: 75484.

[6883] The probes having the nucleotide sequence represented by SEQ ID NOS: 84419, 84420, 84421, 84422, 84423, 84424, 84425, 84426, 84427, 84428, 84429 were selected from the ORFs having the nucleotide sequence represented by SEQ ID NO: 75485.

[6884] The probes having the nucleotide sequence represented by SEQ ID NOS:.84430, 84431, 84432, 84433, 84434, 84435, 84436, 84437, 84438, 84439, 84440 were selected from the ORFs having the nucleotide sequence represented by SEQ ID NO: 75486.

[6885] The probes having the nucleotide sequence represented by SEQ ID NOS: 84441, 84442, 84443, 84444, 84445, 84446, 84447, 84448, 84449, 84450, 84451 were selected from the ORFs having the nucleotide sequence represented by SEQ ID NO: 75487.

[6886] The probes having the nucleotide sequence represented by SEQ ID NOS: 84452, 84453, 84454, 84455, 84456, 84457, 84458, 84459, 84460, 84461, 84462 were selected from the ORFs having the nucleotide sequence represented by SEQ ID NO: 75488.

[6887] The probes having the nucleotide sequence represented by SEQ ID NOS: 84463, 84464, 84465, 84466, 84467, 84468, 84469, 84470, 84471, 84472, 84473 were selected from the ORFs having the nucleotide sequence represented by SEQ ID NO: 75489.

[6888] The probes having the nucleotide sequence represented by SEQ ID NOS: 84474, 84475, 84476, 84477, 84478, 84479, 84480, 84481, 84482, 84483, 84484 were selected from the ORFs having the nucleotide sequence represented by SEQ ID NO: 75490.

[6889] The probes having the nucleotide sequence represented by SEQ ID NOS: 84485, 84486, 84487, 84488, 84489, 84490, 84491, 84492, 84493, 84494, 84495 were selected from the ORFs having the nucleotide sequence represented by SEQ ID NO: 75491.

[6890] The probes having the nucleotide sequence represented by SEQ ID NOS: 84496, 84497, 84498, 84499, 84500, 84501, 84502, 84503, 84504, 84505, 84506 were selected from the ORFs having the nucleotide sequence represented by SEQ ID NO: 75492.

[6891] The probes having the nucleotide sequence represented by SEQ ID NOS: 84507, 84508, 84509, 84510, 84511, 84512, 84513, 84514, 84515, 84516, 84517 were selected from the ORFs having the nucleotide sequence represented by SEQ ID NO: 75493.

[6892] The probes having the nucleotide sequence represented by SEQ ID NOS: 84518, 84519, 84520, 84521, 84522, 84523, 84524, 84525, 84526, 84527, 84528 were selected from the ORFs having the nucleotide sequence represented by SEQ ID NO: 75494.

[6893] The probes having the nucleotide sequence represented by SEQ ID NOS: 84529, 84530, 84531, 84532, 84533, 84534, 84535, 84536, 84537, 84538, 84539 were selected from the ORFs having the nucleotide sequence represented by SEQ ID NO: 75495.

[6894] The probes having the nucleotide sequence represented by SEQ ID NOS: 84540, 84541, 84542, 84543, 84544, 84545, 84546, 84547, 84548, 84549, 84550 were selected from the ORFs having the nucleotide sequence represented by SEQ ID NO: 75496.

[6895] The probes having the nucleotide sequence represented by SEQ ID NOS: 84551, 84552, 84553, 84554, 84555, 84556, 84557, 84558, 84559, 84560, 84561 were selected from the ORFs having the nucleotide sequence represented by SEQ ID NO: 75497.

[6896] The probes having the nucleotide sequence represented by SEQ ID NOS: 84562, 84563, 84564, 84565, 84566, 84567, 84568, 84569, 84570, 84571, 84572 were selected from the ORFs having the nucleotide sequence represented by SEQ ID NO: 75498.

[6897] The probes having the nucleotide sequence represented by SEQ ID NOS: 84573, 84574, 84575, 84576, 84577, 84578, 84579, 84580, 84581, 84582, 84583 were selected from the ORFs having the nucleotide sequence represented by SEQ ID NO: 75499.

[6898] The probes having the nucleotide sequence represented by SEQ ID NOS: 84584, 84585, 84586, 84587, 84588, 84589, 84590, 84591, 84592, 84593, 84594 were selected from the ORFs having the nucleotide sequence represented by SEQ ID NO: 75500.

[6899] The probes having the nucleotide sequence represented by SEQ ID NOS: 84595, 84596, 84597, 84598, 84599, 84600, 84601, 84602, 84603, 84604, 84605 were selected from the ORFs having the nucleotide sequence represented by SEQ ID NO: 75501.

[6900] The probes having the nucleotide sequence represented by SEQ ID NOS: 84606, 84607, 84608, 84609, 84610, 84611, 84612, 84613, 84614, 84615, 84616 were selected from the ORFs having the nucleotide sequence represented by SEQ ID NO: 75502.

[6901] The probes having the nucleotide sequence represented by SEQ ID NOS: 84617, 84618, 84619, 84620, 84621, 84622, 84623, 84624, 84625, 84626, 84627 were selected from the ORFs having the nucleotide sequence represented by SEQ ID NO: 75503.

[6902] The probes having the nucleotide sequence represented by SEQ ID NOS: 84628, 84629, 84630, 84631, 84632, 84633, 84634, 84635, 84636, 84637, 84638 were selected from the ORFs having the nucleotide sequence represented by SEQ ID NO: 75504.

[6903] The probes having the nucleotide sequence represented by SEQ ID NOS: 84639, 84640, 84641, 84642, 84643, 84644, 84645, 84646, 84647, 84648, 84649 were selected from the ORFs having the nucleotide sequence represented by SEQ ID NO: 75505.

[6904] The probes having the nucleotide sequence represented by SEQ ID NOS: 84650, 84651, 84652, 84653, 84654, 84655, 84656, 84657, 84658, 84659, 84660 were selected from the ORFs having the nucleotide sequence represented by SEQ ID NO: 75506.

[6905] The probes having the nucleotide sequence represented by SEQ ID NOS: 84661, 84662, 84663, 84664, 84665, 84666, 84667, 84668, 84669, 84670, 84671 were selected from the ORFs having the nucleotide sequence represented by SEQ ID NO: 75507.

[6906] The probes having the nucleotide sequence represented by SEQ ID NOS: 84672, 84673, 84674, 84675, 84676, 84677, 84678, 84679, 84680, 84681, 84682 were selected from the ORFs having the nucleotide sequence represented by SEQ ID NO: 75508.

[6907] The probes having the nucleotide sequence represented by SEQ ID NOS: 84683, 84684, 84685, 84686, 84687, 84688, 84689, 84690, 84691, 84692, 84693 were selected from the ORFs having the nucleotide sequence represented by SEQ ID NO: 75509.

[6908] The probes having the nucleotide sequence represented by SEQ ID NOS: 84694, 84695, 84696, 84697, 84698, 84699, 84700, 84701, 84702, 84703, 84704 were selected from the ORFs having the nucleotide sequence represented by SEQ ID NO: 75510.

[6909] The probes having the nucleotide sequence represented by SEQ ID NOS: 84705, 84706, 84707, 84708, 84709, 84710, 84711, 84712, 84713, 84714, 84715 were selected from the ORFs having the nucleotide sequence represented by SEQ ID NO: 75511.

[6910] The probes having the nucleotide sequence represented by SEQ ID NOS: 84716, 84717, 84718, 84719, 84720, 84721, 84722, 84723, 84724, 84725, 84726 were selected from the ORFs having the nucleotide sequence represented by SEQ ID NO: 75512.

[6911] The probes having the nucleotide sequence represented by SEQ ID NOS: 84727, 84728, 84729, 84730, 84731, 84732, 84733, 84734, 84735, 84736, 84737 were selected from the ORFs having the nucleotide sequence represented by SEQ ID NO: 75513.

[6912] The probes having the nucleotide sequence represented by SEQ ID NOS: 84738, 84739, 84740, 84741, 84742, 84743, 84744, 84745, 84746, 84747, 84748 were selected from the ORFs having the nucleotide sequence represented by SEQ ID NO: 75514.

[6913] The probes having the nucleotide sequence represented by SEQ ID NOS: 84749, 84750, 84751, 84752, 84753, 84754, 84755, 84756, 84757, 84758, 84759 were selected from the ORFs having the nucleotide sequence represented by SEQ ID NO: 75515.

[6914] The probes having the nucleotide sequence represented by SEQ ID NOS: 84760, 84761, 84762, 84763, 84764, 84765, 84766, 84767, 84768, 84769, 84770 were selected from the ORFs having the nucleotide sequence represented by SEQ ID NO: 75516.

[6915] The probes having the nucleotide sequence represented by SEQ ID NOS: 84771, 84772, 84773, 84774, 84775, 84776, 84777, 84778, 84779, 84780, 84781 were selected from the ORFs having the nucleotide sequence represented by SEQ ID NO: 75517.

[6916] The probes having the nucleotide sequence represented by SEQ ID NOS: 84782, 84783, 84784, 84785, 84786, 84787, 84788, 84789, 84790, 84791, 84792 were selected from the ORFs having the nucleotide sequence represented by SEQ ID NO: 75518.

[6917] The probes having the nucleotide sequence represented by SEQ ID NOS: 84793, 84794, 84795, 84796, 84797, 84798, 84799, 84800, 84801, 84802, 84803 were selected from the ORFs having the nucleotide sequence represented by SEQ ID NO: 75519.

[6918] The probes having the nucleotide sequence represented by SEQ ID NOS: 84804, 84805, 84806, 84807, 84808, 84809, 84810, 84811, 84812, 84813, 84814 were selected from the ORFs having the nucleotide sequence represented by SEQ ID NO: 75520.

[6919] The probes having the nucleotide sequence represented by SEQ ID NOS: 84815, 84816, 84817, 84818, 84819, 84820, 84821, 84822, 84823, 84824, 84825 were selected from the ORFs having the nucleotide sequence represented by SEQ ID NO: 75521.

[6920] The probes having the nucleotide sequence represented by SEQ ID NOS: 84826, 84827, 84828, 84829, 84830, 84831, 84832, 84833, 84834, 84835, 84836 were selected from the ORFs having the nucleotide sequence represented by SEQ ID NO: 75522.

[6921] The probes having the nucleotide sequence represented by SEQ ID NOS: 84837, 84838, 84839, 84840, 84841, 84842, 84843, 84844, 84845, 84846, 84847 were selected from the ORFs having the nucleotide sequence represented by SEQ ID NO: 75523.

[6922] The probes having the nucleotide sequence represented by SEQ ID NOS: 84848, 84849, 84850, 84851, 84852, 84853, 84854, 84855, 84856, 84857, 84858 were selected from the ORFs having the nucleotide sequence represented by SEQ ID NO: 75524.

[6923] The probes having the nucleotide sequence represented by SEQ ID NOS: 84859, 84860, 84861, 84862, 84863, 84864, 84865, 84866, 84867, 84868, 84869 were selected from the ORFs having the nucleotide sequence represented by SEQ ID NO: 75525.

[6924] The probes having the nucleotide sequence represented by SEQ ID NOS: 84870, 84871, 84872, 84873, 84874, 84875, 84876, 84877, 84878, 84879, 84880 were selected from the ORFs having the nucleotide sequence represented by SEQ ID NO: 75526.

[6925] The probes having the nucleotide sequence represented by SEQ ID NOS: 84881, 84882, 84883, 84884, 84885, 84886, 84887, 84888, 84889, 84890, 84891 were selected from the ORFs having the nucleotide sequence represented by SEQ ID NO: 75527.

[6926] The probes having the nucleotide sequence represented by SEQ ID NOS: 84892, 84893, 84894, 84895, 84896, 84897, 84898, 84899, 84900, 84901, 84902 were selected from the ORFs having the nucleotide sequence represented by SEQ ID NO: 75528.

[6927] The probes having the nucleotide sequence represented by SEQ ID NOS: 84903, 84904, 84905, 84906, 84907, 84908, 84909, 84910, 84911, 84912, 84913 were selected from the ORFs having the nucleotide sequence represented by SEQ ID NO: 75529.

[6928] The probes having the nucleotide sequence represented by SEQ ID NOS: 84914, 84915, 84916, 84917, 84918, 84919, 84920, 84921, 84922, 84923, 84924 were selected from the ORFs having the nucleotide sequence represented by SEQ ID NO: 75530.

[6929] The probes having the nucleotide sequence represented by SEQ ID NOS: 84925, 84926, 84927, 84928, 84929, 84930, 84931, 84932, 84933, 84934, 84935 were selected from the ORFs having the nucleotide sequence represented by SEQ ID NO: 75531.

[6930] The probes having the nucleotide sequence represented by SEQ ID NOS: 84936, 84937, 84938, 84939, 84940, 84941, 84942, 84943, 84944, 84945, 84946 were selected from the ORFs having the nucleotide sequence represented by SEQ ID NO: 75532.

[6931] The probes having the nucleotide sequence represented by SEQ ID NOS: 84947, 84948, 84949, 84950, 84951, 84952, 84953, 84954, 84955, 84956, 84957 were selected from the ORFs having the nucleotide sequence represented by SEQ ID NO: 75533.

[6932] The probes having the nucleotide sequence represented by SEQ ID NOS: 84958, 84959, 84960, 84961, 84962, 84963, 84964, 84965, 84966, 84967, 84968 were selected from the ORFs having the nucleotide sequence represented by SEQ ID NO: 75534.

[6933] The probes having the nucleotide sequence represented by SEQ ID NOS: 84969, 84970, 84971, 84972, 84973, 84974, 84975, 84976, 84977, 84978, 84979 were selected from the ORFs having the nucleotide sequence represented by SEQ ID NO: 75535.

[6934] The probes having the nucleotide sequence represented by SEQ ID NOS: 84980, 84981, 84982, 84983, 84984, 84985, 84986, 84987, 84988, 84989, 84990 were selected from the ORFs having the nucleotide sequence represented by SEQ ID NO: 75536.

[6935] The probes having the nucleotide sequence represented by SEQ ID NOS: 84991, 84992, 84993, 84994, 84995, 84996, 84997, 84998, 84999, 85000, 85001 were selected from the ORFs having the nucleotide sequence represented by SEQ ID NO: 75537.

[6936] The probes having the nucleotide sequence represented by SEQ ID NOS: 85002, 85003, 85004, 85005, 85006, 85007, 85008, 85009, 85010, 85011, 85012 were selected from the ORFs having the nucleotide sequence represented by SEQ ID NO: 75538.

[6937] The probes having the nucleotide sequence represented by SEQ ID NOS: 85013, 85014, 85015, 85016, 85017, 85018, 85019, 85020, 85021, 85022, 85023 were selected from the ORFs having the nucleotide sequence represented by SEQ ID NO: 75539.

[6938] The probes having the nucleotide sequence represented by SEQ ID NOS: 85024, 85025, 85026, 85027, 85028, 85029, 85030, 85031, 85032, 85033, 85034 were selected from the ORFs having the nucleotide sequence represented by SEQ ID NO: 75540.

[6939] The probes having the nucleotide sequence represented by SEQ ID NOS: 85035, 85036, 85037, 85038, 85039, 85040, 85041, 85042, 85043, 85044, 85045 were selected from the ORFs having the nucleotide sequence represented by SEQ ID NO: 75541.

[6940] The probes having the nucleotide sequence represented by SEQ ID NOS: 85046, 85047, 85048, 85049, 85050, 85051, 85052, 85053, 85054, 85055, 85056 were selected from the ORFs having the nucleotide sequence represented by SEQ ID NO: 75542.

[6941] The probes having the nucleotide sequence represented by SEQ ID NOS: 85057, 85058, 85059, 85060, 85061, 85062, 85063, 85064, 85065, 85066, 85067 were selected from the ORFs having the nucleotide sequence represented by SEQ ID NO: 75543.

[6942] The probes having the nucleotide sequence represented by SEQ ID NOS: 85068, 85069, 85070, 85071, 85072, 85073,

[6943] 85074, 85075, 85076, 85077, 85078 were selected from the ORFs having the nucleotide sequence represented by SEQ ID NO: 75544.

[6944] The probes having the nucleotide sequence represented by SEQ ID NOS: 85079, 85080, 85081, 85082, 85083, 85084, 85085, 85086, 85087, 85088, 85089 were selected from the ORFs having the nucleotide sequence represented by SEQ ID NO: 75545.

[6945] The probes having the nucleotide sequence represented by SEQ ID NOS: 85090, 85091, 85092, 85093, 85094, 85095, 85096, 85097, 85098, 85099, 85100 were selected from the ORFs having the nucleotide sequence represented by SEQ ID NO: 75546.

[6946] The probes having the nucleotide sequence represented by SEQ ID NOS: 85101, 85102, 85103, 85104, 85105, 85106, 85107, 85108, 85109, 85110, 85111 were selected from the ORFs having the nucleotide sequence represented by SEQ ID NO: 75547.

[6947] The probes having the nucleotide sequence represented by SEQ ID NOS: 85112, 85113, 85114, 85115, 85116, 85117, 85118, 85119, 85120, 85121, 85122 were selected from the ORFs having the nucleotide sequence represented by SEQ ID NO: 75548.

[6948] The probes having the nucleotide sequence represented by SEQ ID NOS: 85123, 85124, 85125, 85126, 85127, 85128, 85129, 85130, 85131, 85132, 85133 were selected from the ORFs having the nucleotide sequence represented by SEQ ID NO: 75549.

[6949] The probes having the nucleotide sequence represented by SEQ ID NOS: 85134, 85135, 85136, 85137, 85138, 85139, 85140, 85141, 85142, 85143, 85144 were selected from the ORFs having the nucleotide sequence represented by SEQ ID NO: 75550.

[6950] The probes having the nucleotide sequence represented by SEQ ID NOS: 85145, 85146, 85147, 85148, 85149, 85150, 85151, 85152, 85153, 85154, 85155 were selected from the ORFs having the nucleotide sequence represented by SEQ ID NO: 75551.

[6951] The probes having the nucleotide sequence represented by SEQ ID NOS: 85156, 85157, 85158, 85159, 85160, 85161, 85162, 85163,. 85164, 85165, 85166 were selected from the ORFs having the nucleotide sequence represented by SEQ ID NO: 75552.

[6952] The probes having the nucleotide sequence represented by SEQ ID NOS: 85167, 85168, 85169, 85170, 85171, 85172, 85173, 85174, 85175, 85176, 85177 were selected from the ORFs having the nucleotide sequence represented by SEQ ID NO: 75553.

[6953] The probes having the nucleotide sequence represented by SEQ ID NOS: 85178, 85179, 85180, 85181, 85182, 85183, 85184, 85185, 85186, 85187, 85188 were selected from the ORFs having the nucleotide sequence represented by SEQ ID NO: 75554.

[6954] The probes having the nucleotide sequence represented by SEQ ID NOS: 85189, 85190, 85191, 85192, 85193, 85194, 85195, 85196, 85197, 85198, 85199 were selected from the ORFs having the nucleotide sequence represented by SEQ ID NO: 75555.

[6955] The probes having the nucleotide sequence represented by SEQ ID NOS: 85200, 85201, 85202, 85203, 85204, 85205, 85206, 85207, 85208, 85209, 85210 were selected from the ORFs having the nucleotide sequence represented by SEQ ID NO: 75556.

[6956] The probes having the nucleotide sequence represented by SEQ ID NOS: 85211, 85212, 85213, 85214, 85215, 85216, 85217, 85218, 85219, 85220, 85221 were selected from the ORFs having the nucleotide sequence represented by SEQ ID NO: 75557.

[6957] The probes having the nucleotide sequence represented by SEQ ID NOS: 85222, 85223, 85224, 85225, 85226, 85227, 85228, 85229, 85230, 85231, 85232 were selected from the ORFs having the nucleotide sequence represented by SEQ ID NO: 75558.

[6958] The probes having the nucleotide sequence represented by SEQ ID NOS: 85233, 85234, 85235, 85236, 85237, 85238, 85239, 85240, 85241, 85242, 85243 were selected from the ORFs having the nucleotide sequence represented by SEQ ID NO: 75559.

[6959] The probes having the nucleotide sequence represented by SEQ ID NOS: 85244, 85245, 85246, 85247, 85248, 85249, 85250, 85251, 85252, 85253, 85254 were selected from the ORFs having the nucleotide sequence represented by SEQ ID NO: 75560.

[6960] The probes having the nucleotide sequence represented by SEQ ID NOS: 85255, 85256, 85257, 85258, 85259, 85260, 85261, 85262, 85263, 85264, 85265 were selected from the ORFs having the nucleotide sequence represented by SEQ ID NO: 75561.

[6961] The probes having the nucleotide sequence represented by SEQ ID NOS: 85266, 85267, 85268, 85269, 85270, 85271, 85272, 85273, 85274, 85275, 85276 were selected from the ORFs having the nucleotide sequence represented by SEQ ID NO: 75562.

[6962] The probes having the nucleotide sequence represented by SEQ ID NOS: 85277, 85278, 85279, 85280, 85281, 85282, 85283, 85284, 85285, 85286, 85287 were selected from the ORFs having the nucleotide sequence represented by SEQ ID NO: 75563.

[6963] The probes having the nucleotide sequence represented by SEQ ID NOS: 85288, 85289, 85290, 85291, 85292, 85293, 85294, 85295, 85296, 85297, 85298 were selected from the ORFs having the nucleotide sequence represented by SEQ ID NO: 75564.

[6964] The probes having the nucleotide sequence represented by SEQ ID NOS: 85299, 85300, 85301, 85302, 85303, 85304, 85305, 85306, 85307, 85308, 85309 were selected from the ORFs having the nucleotide sequence represented by SEQ ID NO: 75565.

[6965] The probes having the nucleotide sequence represented by SEQ ID NOS: 85310, 85311, 85312, 85313, 85314, 85315, 85316, 85317, 85318, 85319, 85320 were selected from the ORFs having the nucleotide sequence represented by SEQ ID NO: 75566.

[6966] The probes having the nucleotide sequence represented by SEQ ID NOS: 85321, 85322, 85323, 85324, 85325, 85326, 85327, 85328, 85329, 85330, 85331 were selected from the ORFs having the nucleotide sequence represented by SEQ ID NO: 75567.

[6967] The probes having the nucleotide sequence represented by SEQ ID NOS: 85332, 85333, 85334, 85335, 85336, 85337, 85338, 85339, 85340, 85341, 85342 were selected from the ORFs having the nucleotide sequence represented by SEQ ID NO: 75568.

[6968] The probes having the nucleotide sequence represented by SEQ ID NOS: 85343,. 85344, 85345, 85346, 85347, 85348, 85349, 85350, 85351, 85352, 85353 were selected from the ORFs having the nucleotide sequence represented by SEQ ID NO: 75569.

[6969] The probes having the nucleotide sequence represented by SEQ ID NOS: 85354, 85355, 85356, 85357, 85358, 85359, 85360, 85361, 85362, 85363, 85364 were selected from the ORFs having the nucleotide sequence represented by SEQ ID NO: 75570.

[6970] The probes having the nucleotide sequence represented by SEQ ID NOS: 85365, 85366, 85367, 85368, 85369, 85370, 85371, 85372, 85373, 85374, 85375 were selected from the ORFs having the nucleotide sequence represented by SEQ ID NO: 75571.

[6971] The probes having the nucleotide sequence represented by SEQ ID NOS: 85376, 85377, 85378, 85379, 85380, 85381, 85382, 85383, 85384, 85385, 85386 were selected from the ORFs having the nucleotide sequence represented by SEQ ID NO: 75572.

[6972] The probes having the nucleotide sequence represented by SEQ ID NOS: 85387, 85388, 85389, 85390, 85391, 85392, 85393, 85394, 85395, 85396, 85397 were selected from the ORFs having the nucleotide sequence represented by SEQ ID NO: 75573.

[6973] The probes having the nucleotide sequence represented by SEQ ID NOS: 85398, 85399, 85400, 85401, 85402, 85403, 85404, 85405, 85406, 85407, 85408 were selected from the ORFs having the nucleotide sequence represented by SEQ ID NO: 75574.

[6974] The probes having the nucleotide sequence represented by SEQ ID NOS: 85409, 85410, 85411, 85412, 85413, 85414, 85415, 85416, 85417, 85418, 85419 were selected from the ORFs having the nucleotide sequence represented by SEQ ID NO: 75575.

[6975] The probes having the nucleotide sequence represented by SEQ ID NOS: 85420, 85421, 85422, 85423, 85424, 85425, 85426, 85427, 85428, 85429, 85430 were selected from the ORFs having the nucleotide sequence represented by SEQ ID NO: 75576.

[6976] The probes having the nucleotide sequence represented by SEQ ID NOS: 85431, 85432, 85433, 85434, 85435, 85436, 85437, 85438, 85439, 85440, 85441 were selected from the ORFs having the nucleotide sequence represented by SEQ ID NO: 75577.

[6977] The probes having the nucleotide sequence represented by SEQ ID NOS: 85442, 85443, 85444, 85445, 85446, 85447, 85448, 85449, 85450, 85451, 85452 were selected from the ORFs having the nucleotide sequence represented by SEQ ID NO: 75578.

[6978] The probes having the nucleotide sequence represented by SEQ ID NOS: 85453, 85454, 85455, 85456, 85457, 85458, 85459, 85460, 85461, 85462, 85463 were selected from the ORFs having the nucleotide sequence represented by SEQ ID NO: 75579.

[6979] The probes having the nucleotide sequence represented by SEQ ID NOS: 85464, 85465., 85466, 85467, 85468, 85469, 85470, 85471, 85472, 85473, 85474 were selected from the ORFs having the nucleotide sequence represented by SEQ ID NO: 75580.

[6980] The probes having the nucleotide sequence represented by SEQ ID NOS: 85475, 85476, 85477, 85478, 85479, 85480, 85481, 85482, 85483, 85484, 85485 were selected from the ORFs having the nucleotide sequence represented by SEQ ID NO: 75581.

[6981] The probes having the nucleotide sequence represented by SEQ ID NOS: 85486, 85487, 85488, 85489, 85490, 85491, 85492, 85493, 85494, 85495, 85496 were selected from the ORFs having the nucleotide sequence represented by SEQ ID NO: 75582.

[6982] The probes having the nucleotide sequence represented by SEQ ID NOS: 85497, 85498, 85499, 85500, 85501, 85502, 85503, 85504, 85505, 85506, 85507 were selected from the ORFs having the nucleotide sequence represented by SEQ ID NO: 75583.

[6983] The probes having the nucleotide sequence represented by SEQ ID NOS: 85508, 85509, 85510, 85511, 85512, 85513, 85514, 85515, 85516, 85517, 85518 were selected from the ORFs having the nucleotide sequence represented by SEQ ID NO: 75584.

[6984] The probes having the nucleotide sequence represented by SEQ ID NOS: 85519, 85520, 85521, 85522, 85523, 85524, 85525, 85526, 85527, 85528, 85529 were selected from the ORFs having the nucleotide sequence represented by SEQ ID NO: 75585.

[6985] The probes having the nucleotide sequence represented by SEQ ID NOS: 85530, 85531, 85532, 85533, 85534, 85535, 85536, 85537, 85538, 85539, 85540 were selected from the ORFs having the nucleotide sequence represented by SEQ ID NO: 75586.

[6986] The probes having the nucleotide sequence represented by SEQ ID NOS: 85541, 85542, 85543, 85544, 85545, 85546, 85547, 85548, 85549, 85550, 85551 were selected from the ORFs having the nucleotide sequence represented by SEQ ID NO: 75587.

[6987] The probes having the nucleotide sequence represented by SEQ ID NOS: 85552, 85553, 85554, 85555, 85556, 85557, 85558, 85559, 85560, 85561, 85562 were selected from the ORFs having the nucleotide sequence represented by SEQ ID NO: 75588.

[6988] The probes having the nucleotide sequence represented by SEQ ID NOS: 85563, 85564, 85565, 85566, 85567, 85568, 85569, 85570, 85571, 85572, 85573 were selected from the ORFs having the nucleotide sequence represented by SEQ ID NO: 75589.

[6989] The probes having the nucleotide sequence represented by SEQ ID NOS: 85574, 85575, 85576, 85577, 85578, 85579, 85580, 85581, 85582, 85583, 85584 were selected from the ORFs having the nucleotide sequence represented by SEQ ID NO: 75590.

[6990] The probes having the nucleotide sequence represented by SEQ ID NOS: 85585, 85586, 85587, 85588, 85589, 85590, 85591, 85592, 85593, 85594, 85595 were selected from the ORFs having the nucleotide sequence represented by SEQ ID NO: 75591.

[6991] The probes having the nucleotide sequence represented by SEQ ID NOS: 85596, 85597, 85598, 85599, 85600, 85601, 85602, 85603, 85604, 85605, 85606 were selected from the ORFs having the nucleotide sequence represented by SEQ ID NO: 75592.

[6992] The probes having the nucleotide sequence represented by SEQ ID NOS: 85607, 85608, 85609, 85610, 85611, 85612, 85613, 85614, 85615, 85616, 85617 were selected from the ORFs having the nucleotide sequence represented by SEQ ID NO: 75593.

[6993] The probes having the nucleotide sequence represented by SEQ ID NOS: 85618, 85619, 85620, 85621, 85622, 85623, 85624, 85625, 85626, 85627, 85628 were selected from the ORFs having the nucleotide sequence represented by SEQ ID NO: 75594.

[6994] The probes having the nucleotide sequence represented by SEQ ID NOS: 85629, 85630, 85631, 85632, 85633, 85634, 85635, 85636, 85637, 85638, 85639 were selected from the ORFs having the nucleotide sequence represented by SEQ ID NO: 75595.

[6995] The probes having the nucleotide sequence represented by SEQ ID NOS: 85640, 85641, 85642, 85643, 85644, 85645, 85646, 85647, 85648, 85649, 85650 were selected from the ORFs having the nucleotide sequence represented by SEQ ID NO: 75596.

[6996] The probes having the nucleotide sequence represented by SEQ ID NOS: 85651, 85652, 85653, 85654, 85655, 85656, 85657, 85658, 85659, 85660, 85661 were selected from the ORFs having the nucleotide sequence represented by SEQ ID NO: 75597.

[6997] The probes having the nucleotide sequence represented by SEQ ID NOS: 85662, 85663, 85664, 85665, 85666, 85667, 85668, 85669, 85670, 85671, 85672 were selected from the ORFs having the nucleotide sequence represented by SEQ ID NO: 75598.

[6998] The probes having the nucleotide sequence represented by SEQ ID NOS: 85673, 85674, 85675, 85676, 85677, 85678, 85679, 85680, 85681, 85682, 85683 were selected from the ORFs having the nucleotide sequence represented by SEQ ID NO: 75599.

[6999] The probes having the nucleotide sequence represented by SEQ ID NOS: 85684, 85685, 85686, 85687, 85688, 85689, 85690, 85691, 85692, 85693, 85694 were selected from the ORFs having the nucleotide sequence represented by SEQ ID NO: 75600.

[7000] The probes having the nucleotide sequence represented by SEQ ID NOS: 85695, 85696, 85697, 85698, 85699, 85700, 85701, 85702, 85703, 85704, 85705 were selected from the ORFs having the nucleotide sequence represented by SEQ ID NO: 75601.

[7001] The probes having the nucleotide sequence represented by SEQ ID NOS: 85706, 85707, 85708, 85709, 85710, 85711, 85712, 85713, 85714, 85715, 85716 were selected from the ORFs having the nucleotide sequence represented by SEQ ID NO: 75602.

[7002] The probes having the nucleotide sequence represented by SEQ ID NOS: 85717, 85718, 85719, 85720, 85721, 85722, 85723, 85724, 85725, 85726, 85727 were selected from the ORFs having the nucleotide sequence represented by SEQ ID NO: 75603.

[7003] The probes having the nucleotide sequence represented by SEQ ID NOS: 85728, 85729, 85730, 85731, 85732, 85733, 85734, 85735, 85736, 85737, 85738 were selected from the ORFs having the nucleotide sequence represented by SEQ ID NO: 75604.

[7004] The probes having the nucleotide sequence represented by SEQ ID NOS: 85739, 85740, 85741, 85742, 85743, 85744, 85745, 85746, 85747, 85748, 85749 were selected from the ORFs having the nucleotide sequence represented by SEQ ID NO: 75605.

[7005] The probes having the nucleotide sequence represented by SEQ ID NOS: 85750, 85751, 85752, 85753, 85754, 85755, 85756, 85757, 85758, 85759, 85760, 85761, 85762, 85763, 85764, 85765, 85766, 85767, 85768, 85769, 85770, 85771 were selected from the ORFs having the nucleotide sequence represented by SEQ ID NO: 75606.

[7006] The probes having the nucleotide sequence represented by SEQ ID NOS: 85772, 85773, 85774, 85775, 85776, 85777, 85778, 85779, 85780, 85781, 85782 were selected from the ORFs having the nucleotide sequence represented by SEQ ID NO: 75607.

[7007] The probes having the nucleotide sequence represented by SEQ ID NOS: 85783, 85784, 85785, 85786, 85787, 85788, 85789, 85790, 85791, 85792, 85793 were selected from the ORFs having the nucleotide sequence represented by SEQ ID NO: 75608.

[7008] The probes having the nucleotide sequence represented by SEQ ID NOS: 85794, 85795, 85796, 85797, 85798, 85799, 85800, 85801, 85802, 85803, 85804 were selected from the ORFs having the nucleotide sequence represented by SEQ ID NO: 75609.

[7009] The probes having the nucleotide sequence represented by SEQ ID NOS: 85805, 85806, 85807, 85808, 85809, 85810, 85811, 85812, 85813, 85814, 85815 were selected from the ORFs having the nucleotide sequence represented by SEQ ID NO: 75610.

[7010] The probes having the nucleotide sequence represented by SEQ ID NOS: 85816, 85817, 85818, 85819, 85820, 85821, 85822, 85823, 85824, 85825, 85826 were selected from the ORFs having the nucleotide sequence represented by SEQ ID NO: 75611.

[7011] The probes having the nucleotide sequence represented by SEQ ID NOS: 85827, 85828, 85829, 85830, 85831, 85832, 85833, 85834, 85835, 85836, 85837 were selected from the ORFs having the nucleotide sequence represented by SEQ ID NO: 75612.

[7012] The probes having the nucleotide sequence represented by SEQ ID NOS: 85838, 85839, 85840, 85841, 85842, 85843, 85844, 85845, 85846, 85847, 85848 were selected from the ORFs having the nucleotide sequence represented by SEQ ID NO: 75613.

[7013] The probes having the nucleotide sequence represented by SEQ ID NOS: 85849, 85850, 85851, 85852, 85853, 85854, 85855, 85856, 85857, 85858, 85859 were selected from the ORFs having the nucleotide sequence represented by SEQ ID NO: 75614.

[7014] The probes having the nucleotide sequence represented by SEQ ID NOS: 85860, 85861, 85862, 85863, 85864, 85865, 85866, 85867, 85868, 85869, 85870 were selected from the ORFs having the nucleotide sequence represented by SEQ ID NO: 75615.

[7015] The probes having the nucleotide sequence represented by SEQ ID NOS: 85871, 85872, 85873, 85874, 85875, 85876, 85877, 85878, 85879, 85880, 85881 were selected from the ORFs having the nucleotide sequence represented by SEQ ID NO: 75616.

[7016] The probes having the nucleotide sequence represented by SEQ ID NOS: 85882, 85883, 85884, 85885, 85886, 85887, 85888, 85889, 85890, 85891, 85892 were selected from the ORFs having the nucleotide sequence represented by SEQ ID NO: 75617.

[7017] The probes having the nucleotide sequence represented by SEQ ID NOS: 85893, 85894, 85895, 85896, 85897, 85898, 85899, 85900, 85901, 85902, 85903 were selected from the ORFs having the nucleotide sequence represented by SEQ ID NO: 75618.

[7018] The probes having the nucleotide sequence represented by SEQ ID NOS: 85904, 85905, 85906, 85907, 85908, 85909, 85910, 85911, 85912, 85913, 85914 were selected from the ORFs having the nucleotide sequence represented by SEQ ID NO: 75619.

[7019] The probes having the nucleotide sequence represented by SEQ ID NOS: 85915, 85916, 85917, 85918, 85919, 85920, 85921, 85922, 85923, 85924, 85925 were selected from the ORFs having the nucleotide sequence represented by SEQ ID NO: 75620.

[7020] The probes having the nucleotide sequence represented by SEQ ID NOS: 85926, 85927, 85928, 85929, 85930, 85931, 85932, 85933, 85934, 85935, 85936 were selected from the ORFs having the nucleotide sequence represented by SEQ ID NO: 75621.

[7021] The probes having the nucleotide sequence represented by SEQ ID NOS: 85937, 85938, 85939, 85940, 85941, 85942, 85943, 85944, 85945, 85946, 85947 were selected from the ORFs having the nucleotide sequence represented by SEQ ID NO: 75622.

[7022] The probes having the nucleotide sequence represented by SEQ ID NOS: 85948, 85949, 85950, 85951, 85952, 85953, 85954, 85955, 85956, 85957, 85958 were selected from the ORFs having the nucleotide sequence represented by SEQ ID NO: 75623.

[7023] The probes having the nucleotide sequence represented by SEQ ID NOS: 85959, 85960, 85961, 85962, 85963, 85964, 85965, 85966, 85967, 85968, 85969 were selected from the ORFs having the nucleotide sequence represented by SEQ ID NO: 75624.

[7024] The probes having the nucleotide sequence represented by SEQ ID NOS: 85970, 85971, 85972, 85973, 85974, 85975, 85976, 85977, 85978, 85979, 85980 were selected from the ORFs having the nucleotide sequence represented by SEQ ID NO: 75625.

[7025] The probes having the nucleotide sequence represented by SEQ ID NOS: 85981, 85982, 85983, 85984, 85985, 85986, 85987, 85988, 85989, 85990, 85991 were selected from the ORFs having the nucleotide sequence represented by SEQ ID NO: 75626.

[7026] The probes having the nucleotide sequence represented by SEQ ID NOS: 85992, 85993, 85994, 85995, 85996, 85997, 85998, 85999, 86000, 86001, 86002 were selected from the ORFs having the nucleotide sequence represented by SEQ ID NO: 75627.

[7027] The probes having the nucleotide sequence represented by SEQ ID NOS: 86003, 86004, 86005, 86006, 86007, 86008, 86009, 86010, 86011, 86012, 86013 were selected from the ORFs having the nucleotide sequence represented by SEQ ID NO: 75628.

[7028] The probes having the nucleotide sequence represented by SEQ ID NOS: 86014, 86015, 86016, 86017, 86018, 86019, 86020, 86021, 86022, 86023, 86024 were selected from the ORFs having the nucleotide sequence represented by SEQ ID NO: 75629.

[7029] The probes having the nucleotide sequence represented by SEQ ID NOS: 86025, 86026, 86027, 86028, 86029, 86030, 86031, 86032, 86033, 86034, 86035 were selected from the ORFs having the nucleotide sequence represented by SEQ ID NO: 75630.

[7030] The probes having the nucleotide sequence represented by SEQ ID NOS: 86036, 86037, 86038, 86039, 86040, 86041, 86042, 86043, 86044, 86045, 86046 were selected from the ORFs having the nucleotide sequence represented by SEQ ID NO: 75631.

[7031] The probes having the nucleotide sequence represented by SEQ ID NOS: 86047, 86048, 86049, 86050, 86051, 86052, 86053, 86054, 86055, 86056, 86057 were selected from the ORFs having the nucleotide sequence represented by SEQ ID NO: 75632.

[7032] The probes having the nucleotide sequence represented by SEQ ID NOS: 86058, 86059, 86060, 86061, 86062, 86063, 86064, 86065, 86066, 86067, 86068 were selected from the ORFs having the nucleotide sequence represented by SEQ ID NO: 75633.

[7033] The probes having the nucleotide sequence represented by SEQ ID NOS: 86069, 86070, 86071, 86072, 86073, 86074, 86075, 86076, 86077, 86078, 86079 were selected from the ORFs having the nucleotide sequence represented by SEQ ID NO: 75634.

[7034] The probes having the nucleotide sequence represented by SEQ ID NOS: 86080, 86081, 86082, 86083, 86084, 86085, 86086, 86087, 86088, 86089, 86090 were selected from the ORFs having the nucleotide sequence represented by SEQ ID NO: 75635.

[7035] The probes having the nucleotide sequence represented by SEQ ID NOS: 86091, 86092, 86093, 86094, 86095, 86096, 86097, 86098, 86099, 86100, 86101 were selected from the ORFs having the nucleotide sequence represented by SEQ ID NO: 75636.

[7036] The probes having the nucleotide sequence represented by SEQ ID NOS: 86102, 86103, 86104, 86105, 86106, 86107, 86108, 86109, 86110, 86111, 86112 were selected from the ORFs having the nucleotide sequence represented by SEQ ID NO: 75637.

[7037] The probes having the nucleotide sequence represented by SEQ ID NOS: 86113, 86114, 86115, 86116, 86117, 86118, 86119, 86120, 86121, 86122, 86123 were selected from the ORFs having the nucleotide sequence represented by SEQ ID NO: 75638.

[7038] The probes having the nucleotide sequence represented by SEQ ID NOS: 86124, 86125, 86126, 86127, 86128, 86129, 86130, 86131, 86132, 86133, 86134 were selected from the ORFs having the nucleotide sequence represented by SEQ ID NO: 75639.

[7039] The probes having the nucleotide sequence represented by SEQ ID NOS: 86135, 86136, 86137, 86138, 86139, 86140, 86141, 86142, 86143, 86144, 86145 were selected from the ORFs having the nucleotide sequence represented by SEQ ID NO: 75640.

[7040] The probes having the nucleotide sequence represented by SEQ ID NOS: 86146, 86147, 86148, 86149, 86150, 86151, 86152, 86153, 86154, 86155, 86156 were selected from the ORFs having the nucleotide sequence represented by SEQ ID NO: 75641.

[7041] The probes having the nucleotide sequence represented by SEQ ID NOS: 86157, 86158, 86159, 86160, 86161, 86162, 86163, 86164, 86165, 86166, 86167 were selected from the ORFs having the nucleotide sequence represented by SEQ ID NO: 75642.

[7042] The probes having the nucleotide sequence represented by SEQ ID NOS: 86168, 86169, 86170, 86171, 86172, 86173, 86174, 86175, 86176, 86177, 86178 were selected from the ORFs having the nucleotide sequence represented by SEQ ID NO: 75643.

[7043] The probes having the nucleotide sequence represented by SEQ ID NOS: 86179, 86180, 86181, 86182, 86183, 86184, 86185, 86186, 86187, 86188, 86189 were selected from the ORFs having the nucleotide sequence represented by SEQ ID NO: 75644.

[7044] The probes having the nucleotide sequence represented by SEQ ID NOS: 86190, 86191, 86192, 86193, 86194, 86195, 86196, 86197, 86198, 86199, 86200 were selected from the ORFs having the nucleotide sequence represented by SEQ ID NO: 75645.

[7045] The probes having the nucleotide sequence represented by SEQ ID NOS: 86201, 86202, 86203, 86204, 86205, 86206, 86207, 86208, 86209, 86210, 86211 were selected from the ORFs having the nucleotide sequence represented by SEQ ID NO: 75646.

[7046] The probes having the nucleotide sequence represented by SEQ ID NOS: 86212, 86213, 86214, 86215, 86216, 86217, 86218, 86219, 86220, 86221, 86222 were selected from the ORFs having the nucleotide sequence represented by SEQ ID NO: 75647.

[7047] The probes having the nucleotide sequence represented by SEQ ID NOS: 86223, 86224, 86225, 86226, 86227, 86228, 86229, 86230, 86231, 86232, 86233 were selected from the ORFs having the nucleotide sequence represented by SEQ ID NO: 75648.

[7048] The probes having the nucleotide sequence represented by SEQ ID NOS: 86234, 86235, 86236, 86237, 86238, 86239, 86240, 86241, 86242, 86243, 86244 were selected from the ORFs having the nucleotide sequence represented by SEQ ID NO: 75649.

[7049] The probes having the nucleotide sequence represented by SEQ ID NOS: 86245, 86246, 86247, 86248, 86249, 86250, 86251, 86252, 86253, 86254, 86255 were selected from the ORFs having the nucleotide sequence represented by SEQ ID NO: 75650.

[7050] The probes having the nucleotide sequence represented by SEQ ID NOS: 86256, 86257, 86258, 86259, 86260, 86261, 86262, 86263, 86264, 86265, 86266 were selected from the ORFs having the nucleotide sequence represented by SEQ ID NO: 75651.

[7051] The probes having the nucleotide sequence represented by SEQ ID NOS: 86267, 86268, 86269, 86270, 86271, 86272, 86273, 86274, 86275, 86276, 86277 were selected from the ORFs having the nucleotide sequence represented by SEQ ID NO: 75652.

[7052] The probes having the nucleotide sequence represented by SEQ ID NOS: 86278, 86279, 86280, 86281, 86282, 86283, 86284, 86285, 86286, 86287, 86288 were selected from the ORFs having the nucleotide sequence represented by SEQ ID NO: 75653.

[7053] The probes having the nucleotide sequence represented by SEQ ID NOS: 86289, 86290, 86291, 86292, 86293, 86294, 86295, 86296, 86297, 86298, 86299 were selected from the ORFs having the nucleotide sequence represented by SEQ ID NO: 75654.

[7054] The probes having the nucleotide sequence represented by SEQ ID NOS: 86300, 86301, 86302, 86303, 86304, 86305, 86306, 86307, 86308, 86309, 86310 were selected from the ORFs having the nucleotide sequence represented by SEQ ID NO: 75655.

[7055] The probes having the nucleotide sequence represented by SEQ ID NOS: 86311, 86312, 86313, 86314, 86315, 86316, 86317, 86318, 86319, 86320, 86321 were selected from the ORFs having the nucleotide sequence represented by SEQ ID NO: 75656.

[7056] The probes having the nucleotide sequence represented by SEQ ID NOS: 86322, 86323, 86324, 86325, 86326, 86327, 86328, 86329, 86330, 86331, 86332 were selected from the ORFs having the nucleotide sequence represented by SEQ ID NO: 75657.

[7057] The probes having the nucleotide sequence represented by SEQ ID NOS: 86333, 86334, 86335, 86336, 86337, 86338, 86339, 86340, 86341, 86342, 86343 were selected from the ORFs having the nucleotide sequence represented by SEQ ID NO: 75658.

[7058] The probes having the nucleotide sequence represented by SEQ ID NOS: 86344, 86345, 86346, 86347, 86348, 86349, 86350, 86351, 86352, 86353, 86354 were selected from the ORFs having the nucleotide sequence represented by SEQ ID NO: 75659.

[7059] The probes having the nucleotide sequence represented by SEQ ID NOS: 86355, 86356, 86357, 86358, 86359, 86360, 86361, 86362, 86363, 86364, 86365 were selected from the ORFs having the nucleotide sequence represented by SEQ ID NO: 75660.

[7060] The probes having the nucleotide sequence represented by SEQ ID NOS: 86366, 86367, 86368, 86369, 86370, 86371, 86372, 86373, 86374, 86375, 86376 were selected from the ORFs having the nucleotide sequence represented by SEQ ID NO: 75661.

[7061] The probes having the nucleotide sequence represented by SEQ ID NOS: 86377, 86378, 86379, 86380, 86381, 86382, 86383, 86384, 86385, 86386, 86387 were selected from the ORFs having the nucleotide sequence represented by SEQ ID NO: 75662.

[7062] The probes having the nucleotide sequence represented by SEQ ID NOS: 86388, 86389, 86390, 86391, 86392, 86393, 86394, 86395, 86396, 86397, 86398 were selected from the ORFs having the nucleotide sequence represented by SEQ ID NO: 75663.

[7063] The probes having the nucleotide sequence represented by SEQ ID NOS: 86399, 86400, 86401, 86402, 86403, 86404, 86405, 86406, 86407, 86408, 86409 were selected from the ORFs having the nucleotide sequence represented by SEQ ID NO: 75664.

[7064] The probes having the nucleotide sequence represented by SEQ ID NOS: 86410, 86411, 86412, 86413, 86414, 86415, 86416, 86417, 86418, 86419, 86420 were selected from the ORFs having the nucleotide sequence represented by SEQ ID NO: 75665.

[7065] The probes having the nucleotide sequence represented by SEQ ID NOS: 86421, 86422, 86423, 86424, 86425, 86426, 86427, 86428, 86429, 86430, 86431 were selected from the ORFs having the nucleotide sequence represented by SEQ ID NO: 75666.

[7066] The probes having the nucleotide sequence represented by SEQ ID NOS: 86432, 86433, 86434, 86435, 86436, 86437, 86438, 86439, 86440, 86441, 86442 were selected from the ORFs having the nucleotide sequence represented by SEQ ID NO: 75667.

[7067] The probes having the nucleotide sequence represented by SEQ ID NOS: 86443, 86444, 86445, 86446, 86447, 86448, 86449, 86450, 86451, 86452, 86453 were selected from the ORFs having the nucleotide sequence represented by SEQ ID NO: 75668.

[7068] The probes having the nucleotide sequence represented by SEQ ID NOS: 86454, 86455, 86456, 86457, 86458, 86459, 86460, 86461, 86462, 86463, 86464 were selected from the ORFs having the nucleotide sequence represented by SEQ ID NO: 75669.

[7069] The probes having the nucleotide sequence represented by SEQ ID NOS: 86465, 86466, 86467, 86468, 86469, 86470, 86471, 86472, 86473, 86474, 86475 were selected from the ORFs having the nucleotide sequence represented by SEQ ID NO: 75670.

[7070] The probes having the nucleotide sequence represented by SEQ ID NOS: 86476, 86477, 86478, 86479, 86480, 86481, 86482, 86483, 86484, 86485, 86486 were selected from the ORFs having the nucleotide sequence represented by SEQ ID NO: 75671.

[7071] The probes having the nucleotide sequence represented by SEQ ID NOS: 86487, 86488, 86489, 86490, 86491, 86492, 86493, 86494, 86495, 86496, 86497 were selected from the ORFs having the nucleotide sequence represented by SEQ ID NO: 75672.

[7072] The probes having the nucleotide sequence represented by SEQ ID NOS: 86498, 86499, 86500, 86501, 86502, 86503, 86504, 86505, 86506, 86507, 86508 were selected from the ORFs having the nucleotide sequence represented by SEQ ID NO: 75673.

[7073] The probes having the nucleotide sequence represented by SEQ ID NOS: 86509, 86510, 86511, 86512, 86513, 86514, 86515, 86516, 86517, 86518, 86519 were selected from the ORFs having the nucleotide sequence represented by SEQ ID NO: 75674.

[7074] The probes having the nucleotide sequence represented by SEQ ID NOS: 86520, 86521, 86522, 86523, 86524, 86525, 86526, 86527, 86528, 86529, 86530 were selected from the ORFs having the nucleotide sequence represented by SEQ ID NO: 75675.

[7075] The probes having the nucleotide sequence represented by SEQ ID NOS: 86531, 86532, 86533, 86534, 86535, 86536, 86537, 86538, 86539, 86540, 86541 were selected from the ORFs having the nucleotide sequence represented by SEQ ID NO: 75676.

[7076] The probes having the nucleotide sequence represented by SEQ ID NOS: 86542, 86543, 86544, 86545, 86546, 86547, 86548, 86549, 86550, 86551, 86552 were selected from the ORFs having the nucleotide sequence represented by SEQ ID NO: 75677.

[7077] The probes having the nucleotide sequence represented by SEQ ID NOS: 86553, 86554, 86555, 86556, 86557, 86558, 86559, 86560, 86561, 86562, 86563 were selected from the ORFs having the nucleotide sequence represented by SEQ ID NO: 75678.

[7078] The probes having the nucleotide sequence represented by SEQ ID NOS: 86564, 86565, 86566, 86567, 86568, 86569, 86570, 86571, 86572, 86573, 86574 were selected from the ORFs having the nucleotide sequence represented by SEQ ID NO: 75679.

[7079] The probes having the nucleotide sequence represented by SEQ ID NOS: 86575, 86576, 86577, 86578, 86579, 86580, 86581, 86582, 86583, 86584, 86585 were selected from the ORFs having the nucleotide sequence represented by SEQ ID NO: 75680.

[7080] The probes having the nucleotide sequence represented by SEQ ID NOS: 86586, 86587, 86588, 86589, 86590, 86591, 86592, 86593, 86594, 86595, 86596 were selected from the ORFs having the nucleotide sequence represented by SEQ ID NO: 75681.

[7081] The probes having the nucleotide sequence represented by SEQ ID NOS: 86597, 86598, 86599, 86600, 86601, 86602, 86603, 86604, 86605, 86606, 86607 were selected from the ORFs having the nucleotide sequence represented by SEQ ID NO: 75682.

[7082] The probes having the nucleotide sequence represented by SEQ ID NOS: 86608, 86609, 86610, 86611, 86612, 86613, 86614, 86615, 86616, 86617, 86618 were selected from the ORFs having the nucleotide sequence represented by SEQ ID NO: 75683.

[7083] The probes having the nucleotide sequence represented by SEQ ID NOS: 86619, 86620, 86621, 86622, 86623, 86624, 86625, 86626, 86627, 86628, 86629 were selected from the ORFs having the nucleotide sequence represented by SEQ ID NO: 75684.

[7084] The probes having the nucleotide sequence represented by SEQ ID NOS: 86630, 86631, 86632, 86633, 86634, 86635, 86636, 86637, 86638, 86639, 86640 were selected from the ORFs having the nucleotide sequence represented by SEQ ID NO: 75685.

[7085] The probes having the nucleotide sequence represented by SEQ ID NOS: 86641, 86642, 86643, 86644, 86645, 86646, 86647, 86648, 86649, 86650, 86651 were selected from the ORFs having the nucleotide sequence represented by SEQ ID NO: 75686.

[7086] The probes having the nucleotide sequence represented by SEQ ID NOS: 86652, 86653, 86654, 86655, 86656, 86657, 86658, 86659, 86660, 86661, 86662 were selected from the ORFs having the nucleotide sequence represented by SEQ ID NO: 75687.

[7087] The probes having the nucleotide sequence represented by SEQ ID NOS: 86663, 86664, 86665, 86666, 86667, 86668, 86669, 86670, 86671, 86672, 86673 were selected from the ORFs having the nucleotide sequence represented by SEQ ID NO: 75688.

[7088] The probes having the nucleotide sequence represented by SEQ ID NOS: 86674, 86675, 86676, 86677, 86678, 86679, 86680, 86681, 86682, 86683, 86684 were selected from the ORFs having the nucleotide sequence represented by SEQ ID NO: 75689.

[7089] The probes having the nucleotide sequence represented by SEQ ID NOS: 86685, 86686, 86687, 86688, 86689, 86690, 86691, 86692, 86693, 86694, 86695 were selected from the ORFs having the nucleotide sequence represented by SEQ ID NO: 75690.

[7090] The probes having the nucleotide sequence represented by SEQ ID NOS: 86696, 86697, 86698, 86699, 86700, 86701, 86702, 86703, 86704, 86705, 86706 were selected from the ORFs having the nucleotide sequence represented by SEQ ID NO: 75691.

[7091] The probes having the nucleotide sequence represented by SEQ ID NOS: 86707, 86708, 86709, 86710, 86711, 86712, 86713, 86714, 86715, 86716, 86717 were selected from the ORFs having the nucleotide sequence represented by SEQ ID NO: 75692.

[7092] The probes having the nucleotide sequence represented by SEQ ID NOS: 86718, 86719, 86720, 86721, 86722, 86723, 86724, 86725, 86726, 86727, 86728 were selected from the ORFs having the nucleotide sequence represented by SEQ ID NO: 75693.

[7093] The probes having the nucleotide sequence represented by SEQ ID NOS: 86729, 86730, 86731, 86732, 86733, 86734, 86735, 86736, 86737, 86738, 86739 were selected from the ORFs having the nucleotide sequence represented by SEQ ID NO: 75694.

[7094] The probes having the nucleotide sequence represented by SEQ ID NOS: 86740, 86741, 86742, 86743, 86744, 86745, 86746, 86747, 86748, 86749, 86750 were selected from the ORFs having the nucleotide sequence represented by SEQ ID NO: 75695.

[7095] The probes having the nucleotide sequence represented by SEQ ID NOS: 86751, 86752, 86753, 86754, 86755, 86756, 86757, 86758, 86759, 86760, 86761 were selected from the ORFs having the nucleotide sequence represented by SEQ ID NO: 75696.

[7096] The probes having the nucleotide sequence represented by SEQ ID NOS: 86762, 86763, 86764, 86765, 86766, 86767, 86768, 86769, 86770, 86771, 86772 were selected from the ORFs having the nucleotide sequence represented by SEQ ID NO: 75697.

[7097] The probes having the nucleotide sequence represented by SEQ ID NOS: 86773, 86774, 86775, 86776, 86777, 86778, 86779, 86780, 86781, 86782, 86783 were selected from the ORFs having the nucleotide sequence represented by SEQ ID NO: 75698.

[7098] The probes having the nucleotide sequence represented by SEQ ID NOS: 86784, 86785, 86786, 86787, 86788, 86789, 86790, 86791, 86792, 86793, 86794 were selected from the ORFs having the nucleotide sequence represented by SEQ ID NO: 75699.

[7099] The probes having the nucleotide sequence represented by SEQ ID NOS: 86795, 86796, 86797, 86798, 86799, 86800, 86801, 86802, 86803, 86804, 86805 were selected from the ORFs having the nucleotide sequence represented by SEQ ID NO: 75700.

[7100] The probes having the nucleotide sequence represented by SEQ ID NOS: 86806, 86807, 86808, 86809, 86810, 86811, 86812, 86813, 86814, 86815, 86816 were selected from the ORFs having the nucleotide sequence represented by SEQ ID NO: 75701.

[7101] The probes having the nucleotide sequence represented by SEQ ID NOS: 86817, 86818, 86819, 86820, 86821, 86822, 86823, 86824, 86825, 86826, 86827 were selected from the ORFs having the nucleotide sequence represented by SEQ ID NO: 75702.

[7102] The probes having the nucleotide sequence represented by SEQ ID NOS: 86828, 86829, 86830, 86831, 86832, 86833, 86834, 86835, 86836, 86837, 86838 were selected from the ORFs having the nucleotide sequence represented by SEQ ID NO: 75703.

[7103] The probes having the nucleotide sequence represented by SEQ ID NOS: 86839, 86840, 86841, 86842, 86843, 86844, 86845, 86846, 86847, 86848, 86849 were selected from the ORFs having the nucleotide sequence represented by SEQ ID NO: 75704.

[7104] The probes having the nucleotide sequence represented by SEQ ID NOS: 86850, 86851, 86852, 86853, 86854, 86855, 86856, 86857, 86858, 86859, 86860 were selected from the ORFs having the nucleotide sequence represented by SEQ ID NO: 75705.

[7105] The probes having the nucleotide sequence represented by SEQ ID NOS: 86861, 86862, 86863, 86864, 86865, 86866, 86867, 86868, 86869, 86870, 86871 were selected from the ORFs having the nucleotide sequence represented by SEQ ID NO: 75706.

[7106] The probes having the nucleotide sequence represented by SEQ ID NOS: 86872, 86873, 86874, 86875, 86876, 86877, 86878, 86879, 86880, 86881, 86882 were selected from the ORFs having the nucleotide sequence represented by SEQ ID NO: 75707.

[7107] The probes having the nucleotide sequence represented by SEQ ID NOS: 86883, 86884, 86885, 86886, 86887, 86888, 86889, 86890, 86891, 86892, 86893 were selected from the ORFs having the nucleotide sequence represented by SEQ ID NO: 75708.

[7108] The probes having the nucleotide sequence represented by SEQ ID NOS: 86894, 86895, 86896, 86897, 86898, 86899, 86900, 86901, 86902, 86903, 86904 were selected from the ORFs having the nucleotide sequence represented by SEQ ID NO: 75709.

[7109] The probes having the nucleotide sequence represented by SEQ ID NOS: 86905, 86906, 86907, 86908, 86909, 86910, 86911, 86912, 86913, 86914, 86915 were selected from the ORFs having the nucleotide sequence represented by SEQ ID NO: 75710.

[7110] The probes having the nucleotide sequence represented by SEQ ID NOS: 86916, 86917, 86918, 86919, 86920, 86921, 86922, 86923, 86924, 86925, 86926 were selected from the ORFs having the nucleotide sequence represented by SEQ ID NO: 75711.

[7111] The probes having the nucleotide sequence represented by SEQ ID NOS: 86927, 86928, 86929, 86930, 86931, 86932, 86933, 86934, 86935, 86936, 86937 were selected from the ORFs having the nucleotide sequence represented by SEQ ID NO: 75712.

[7112] The probes having the nucleotide sequence represented by SEQ ID NOS: 86938, 86939, 86940, 86941, 86942, 86943, 86944, 86945, 86946, 86947, 86948 were selected from the ORFs having the nucleotide sequence represented by SEQ ID NO: 75713.

[7113] The probes having the nucleotide sequence represented by SEQ ID NOS: 86949, 86950, 86951, 86952, 86953, 86954, 86955, 86956, 86957, 86958, 86959 were selected from the ORFs having the nucleotide sequence represented by SEQ ID NO: 75714.

[7114] The probes having the nucleotide sequence represented by SEQ ID NOS: 86960, 86961, 86962, 86963, 86964, 86965, 86966, 86967, 86968, 86969, 86970 were selected from the ORFs having the nucleotide sequence represented by SEQ ID NO: 75715.

[7115] The probes having the nucleotide sequence represented by SEQ ID NOS: 86971, 86972, 86973, 86974, 86975, 86976, 86977, 86978, 86979, 86980, 86981 were selected from the ORFs having the nucleotide sequence represented by SEQ ID NO: 75716.

[7116] The probes having the nucleotide sequence represented by SEQ ID NOS: 86982, 86983, 86984, 86985, 86986, 86987, 86988, 86989, 86990, 86991, 86992 were selected from the ORFs having the nucleotide sequence represented by SEQ ID NO: 75717.

[7117] The probes having the nucleotide sequence represented by SEQ ID NOS: 86993, 86994, 86995, 86996, 86997, 86998, 86999, 87000, 87001, 87002, 87003 were selected from the ORFs having the nucleotide sequence represented by SEQ ID NO: 75718.

[7118] The probes having the nucleotide sequence represented by SEQ ID NOS: 87004, 87005, 87006, 87007, 87008, 87009, 87010, 87011, 87012, 87013, 87014 were selected from the ORFs having the nucleotide sequence represented by SEQ ID NO: 75719.

[7119] The probes having the nucleotide sequence represented by SEQ ID NOS: 87015, 87016, 87017, 87018, 87019, 87020, 87021, 87022, 87023, 87024, 87025 were selected from the ORFs having the nucleotide sequence represented by SEQ ID NO: 75720.

[7120] The probes having the nucleotide sequence represented by SEQ ID NOS: 87026, 87027, 87028, 87029, 87030, 87031, 87032, 87033, 87034, 87035, 87036 were selected from the ORFs having the nucleotide sequence represented by SEQ ID NO: 75721.

[7121] The probes having the nucleotide sequence represented by SEQ ID NOS: 87037, 87038, 87039, 87040, 87041, 87042, 87043, 87044, 87045, 87046, 87047 were selected from the ORFs having the nucleotide sequence represented by SEQ ID NO: 75722.

[7122] The probes having the nucleotide sequence represented by SEQ ID NOS: 87048, 87049, 87050, 87051, 87052, 87053, 87054, 87055, 87056, 87057, 87058 were selected from the ORFs having the nucleotide sequence represented by SEQ ID NO: 75723.

[7123] The probes having the nucleotide sequence represented by SEQ ID NOS: 87059, 87060, 87061, 87062, 87063, 87064, 87065, 87066, 87067, 87068, 87069 were selected from the ORFs having the nucleotide sequence represented by SEQ ID NO: 75724.

[7124] The probes having the nucleotide sequence represented by SEQ ID NOS: 87070, 87071, 87072, 87073, 87074, 87075, 87076, 87077, 87078, 87079, 87080 were selected from the ORFs having the nucleotide sequence represented by SEQ ID NO: 75725.

[7125] The probes having the nucleotide sequence represented by SEQ ID NOS: 87081, 87082, 87083, 87084, 87085, 87086, 87087, 87088, 87089, 87090, 87091 were selected from the ORFs having the nucleotide sequence represented by SEQ ID NO: 75726.

[7126] The probes having the nucleotide sequence represented by SEQ ID NOS: 87092, 87093, 87094, 87095, 87096, 87097, 87098, 87099, 87100, 87101, 87102 were selected from the ORFs having the nucleotide sequence represented by SEQ ID NO: 75727.

[7127] The probes having the nucleotide sequence represented by SEQ ID NOS: 87103, 87104, 87105, 87106, 87107, 87108, 87109, 87110, 87111, 87112, 87113 were selected from the ORFs having the nucleotide sequence represented by SEQ ID NO: 75728.

[7128] The probes having the nucleotide sequence represented by SEQ ID NOS: 87114, 87115, 87116, 87117, 87118, 87119, 87120, 87121, 87122, 87123, 87124 were selected from the ORFs having the nucleotide sequence represented by SEQ ID NO: 75729.

[7129] The probes having the nucleotide sequence represented by SEQ ID NOS: 87125, 87126, 87127, 87128, 87129, 87130, 87131, 87132, 87133, 87134, 87135 were selected from the ORFs having the nucleotide sequence represented by SEQ ID NO: 75730.

[7130] The probes having the nucleotide sequence represented by SEQ ID NOS: 87136, 87137, 87138, 87139, 87140, 87141, 87142, 87143, 87144, 87145, 87146 were selected from the ORFs having the nucleotide sequence represented by SEQ ID NO: 75731.

[7131] The probes having the nucleotide sequence represented by SEQ ID NOS: 87147, 87148, 87149, 87150, 87151, 87152, 87153, 87154, 87155, 87156, 87157 were selected from the ORFs having the nucleotide sequence represented by SEQ ID NO: 75732.

[7132] The probes having the nucleotide sequence represented by SEQ ID NOS: 87158, 87159, 87160, 87161, 87162, 87163, 87164, 87165, 87166, 87167, 87168 were selected from the ORFs having the nucleotide sequence represented by SEQ ID NO: 75733.

[7133] The probes having the nucleotide sequence represented by SEQ ID NOS: 87169, 87170, 87171, 87172, 87173, 87174, 87175, 87176, 87177, 87178, 87179 were selected from the ORFs having the nucleotide sequence represented by SEQ ID NO: 75734.

[7134] The probes having the nucleotide sequence represented by SEQ ID NOS: 87180, 87181, 87182, 87183, 87184, 87185, 87186, 87187, 87188, 87189, 87190 were selected from the ORFs having the nucleotide sequence represented by SEQ ID NO: 75735.

[7135] The probes having the nucleotide sequence represented by SEQ ID NOS: 87191, 87192, 87193, 87194, 87195, 87196, 87197, 87198, 87199, 87200, 87201 were selected from the ORFs having the nucleotide sequence represented by SEQ ID NO: 75736.

[7136] The probes having the nucleotide sequence represented by SEQ ID NOS: 87202, 87203, 87204, 87205, 87206, 87207, 87208, 87209, 87210, 87211, 87212 were selected from the ORFs having the nucleotide sequence represented by SEQ ID NO: 75737.

[7137] The probes having the nucleotide sequence represented by SEQ ID NOS: 87213, 87214, 87215, 87216, 87217, 87218, 87219, 87220, 87221, 87222, 87223 were selected from the ORFs having the nucleotide sequence represented by SEQ ID NO: 75738.

[7138] The probes having the nucleotide sequence represented by SEQ ID NOS: 87224, 87225, 87226, 87227, 87228, 87229, 87230, 87231, 87232, 87233, 87234 were selected from the ORFs having the nucleotide sequence represented by SEQ ID NO: 75739.

[7139] The probes having the nucleotide sequence represented by SEQ ID NOS: 87235, 87236, 87237, 87238, 87239, 87240, 87241, 87242, 87243, 87244, 87245 were selected from the ORFs having the nucleotide sequence represented by SEQ ID NO: 75740.

[7140] The probes having the nucleotide sequence represented by SEQ ID NOS: 87246, 87247, 87248, 87249, 87250, 87251, 87252, 87253, 87254, 87255, 87256 were selected from the ORFs having the nucleotide sequence represented by SEQ ID NO: 75741.

[7141] The probes having the nucleotide sequence represented by SEQ ID NOS: 87257, 87258, 87259, 87260, 87261, 87262, 87263, 87264, 87265, 87266, 87267 were selected from the ORFs having the nucleotide sequence represented by SEQ ID NO: 75742.

[7142] The probes having the nucleotide sequence represented by SEQ ID NOS: 87268, 87269, 87270, 87271, 87272, 87273, 87274, 87275, 87276, 87277, 87278 were selected from the ORFs having the nucleotide sequence represented by SEQ ID NO: 75743.

[7143] The probes having the nucleotide sequence represented by SEQ ID NOS: 87279, 87280, 87281, 87282, 87283, 87284, 87285, 87286, 87287, 87288, 87289 were selected from the ORFs having the nucleotide sequence represented by SEQ ID NO: 75744.

[7144] The probes having the nucleotide sequence represented by SEQ ID NOS: 87290, 87291, 87292, 87293, 87294, 87295, 87296, 87297, 87298, 87299, 87300 were selected from the ORFs having the nucleotide sequence represented by SEQ ID NO: 75745.

[7145] The probes having the nucleotide sequence represented by SEQ ID NOS: 87301, 87302, 87303, 87304, 87305, 87306, 87307, 87308, 87309, 87310, 87311 were selected from the ORFs having the nucleotide sequence represented by SEQ ID NO: 75746.

[7146] The probes having the nucleotide sequence represented by SEQ ID NOS: 87312, 87313, 87314, 87315, 87316, 87317, 87318, 87319, 87320, 87321, 87322 were selected from the ORFs having the nucleotide sequence represented by SEQ ID NO: 75747.

[7147] The probes having the nucleotide sequence represented by SEQ ID NOS: 87323, 87324, 87325, 87326, 87327, 87328, 87329, 87330, 87331, 87332, 87333 were selected from the ORFs having the nucleotide sequence represented by SEQ ID NO: 75748.

[7148] The probes having the nucleotide sequence represented by SEQ ID NOS: 87334, 87335, 87336, 87337, 87338, 87339, 87340, 87341, 87342, 87343, 87344 were selected from the ORFs having the nucleotide sequence represented by SEQ ID NO: 75749.

[7149] The probes having the nucleotide sequence represented by SEQ ID NOS: 87345, 87346, 87347, 87348, 87349, 87350, 87351, 87352, 87353, 87354, 87355 were selected from the ORFs having the nucleotide sequence represented by SEQ ID NO: 75750.

[7150] The probes having the nucleotide sequence represented by SEQ ID NOS: 87356, 87357, 87358, 87359, 87360, 87361, 87362, 87363, 87364, 87365, 87366 were selected from the ORFs having the nucleotide sequence represented by SEQ ID NO: 75751.

[7151] The probes having the nucleotide sequence represented by SEQ ID NOS: 87367, 87368, 87369, 87370, 87371, 87372, 87373, 87374, 87375, 87376, 87377 were selected from the ORFs having the nucleotide sequence represented by SEQ ID NO: 75752.

[7152] The probes having the nucleotide sequence represented by SEQ ID NOS: 87378, 87379, 87380, 87381, 87382, 87383, 87384, 87385, 87386, 87387, 87388 were selected from the ORFs having the nucleotide sequence represented by SEQ ID NO: 75753.

[7153] The probes having the nucleotide sequence represented by SEQ ID NOS: 87389, 87390, 87391, 87392, 87393, 87394, 87395, 87396, 87397, 87398, 87399 were selected from the ORFs having the nucleotide sequence represented by SEQ ID NO: 75754.

[7154] The probes having the nucleotide sequence represented by SEQ ID NOS: 87400, 87401, 87402, 87403, 87404, 87405, 87406, 87407, 87408, 87409, 87410 were selected from the ORFs having the nucleotide sequence represented by SEQ ID NO: 75755.

[7155] The probes having the nucleotide sequence represented by SEQ ID NOS: 87411, 87412, 87413, 87414, 87415, 87416, 87417, 87418, 87419, 87420, 87421 were selected from the ORFs having the nucleotide sequence represented by SEQ ID NO: 75756.

[7156] The probes having the nucleotide sequence represented by SEQ ID NOS: 87422, 87423, 87424, 87425, 87426, 87427, 87428, 87429, 87430, 87431, 87432 were selected from the ORFs having the nucleotide sequence represented by SEQ ID NO: 75757.

[7157] The probes having the nucleotide sequence represented by SEQ ID NOS: 87433, 87434, 87435, 87436, 87437, 87438, 87439, 87440, 87441, 87442, 87443 were selected from the ORFs having the nucleotide sequence represented by SEQ ID NO: 75758.

[7158] The probes having the nucleotide sequence represented by SEQ ID NOS: 87444, 87445, 87446, 87447, 87448, 87449, 87450, 87451, 87452, 87453, 87454 were selected from the ORFs having the nucleotide sequence represented by SEQ ID NO: 75759.

[7159] The probes having the nucleotide sequence represented by SEQ ID NOS: 87455, 87456, 87457, 87458, 87459, 87460, 87461, 87462, 87463, 87464, 87465 were selected from the ORFs having the nucleotide sequence represented by SEQ ID NO: 75760.

[7160] The probes having the nucleotide sequence represented by SEQ ID NOS: 87466, 87467, 87468, 87469, 87470, 87471, 87472, 87473, 87474, 87475, 87476 were selected from the ORFs having the nucleotide sequence represented by SEQ ID NO: 75761.

[7161] The probes having the nucleotide sequence represented by SEQ ID NOS: 87477, 87478, 87479, 87480, 87481, 87482, 87483, 87484, 87485, 87486, 87487 were selected from the ORFs having the nucleotide sequence represented by SEQ ID NO: 75762.

[7162] The probes having the nucleotide sequence represented by SEQ ID NOS: 87488, 87489, 87490, 87491, 87492, 87493, 87494, 87495, 87496, 87497, 87498 were selected from the ORFs having the nucleotide sequence represented by SEQ ID NO: 75763.

[7163] The probes having the nucleotide sequence represented by SEQ ID NOS: 87499, 87500, 87501, 87502, 87503, 87504, 87505, 87506, 87507, 87508, 87509 were selected from the ORFs having the nucleotide sequence represented by SEQ ID NO: 75764.

[7164] The probes having the nucleotide sequence represented by SEQ ID NOS: 87510, 87511, 87512, 87513, 87514, 87515, 87516, 87517, 87518, 87519, 87520 were selected from the ORFs having the nucleotide sequence represented by SEQ ID NO: 75765.

[7165] The probes having the nucleotide sequence represented by SEQ ID NOS: 87521, 87522, 87523, 87524, 87525, 87526, 87527, 87528, 87529, 87530, 87531 were selected from the ORFs having the nucleotide sequence represented by SEQ ID NO: 75766.

[7166] The probes having the nucleotide sequence represented by SEQ ID NOS: 87532, 87533, 87534, 87535, 87536, 87537, 87538, 87539, 87540, 87541, 87542 were selected from the ORFs having the nucleotide sequence represented by SEQ ID NO: 75767.

[7167] The probes having the nucleotide sequence represented by SEQ ID NOS: 87543, 87544, 87545, 87546, 87547, 87548, 87549, 87550, 87551, 87552, 87553 were selected from the ORFs having the nucleotide sequence represented by SEQ ID NO: 75768.

[7168] The probes having the nucleotide sequence represented by SEQ ID NOS: 87554, 87555, 87556, 87557, 87558, 87559, 87560, 87561, 87562, 87563, 87564 were selected from the ORFs having the nucleotide sequence represented by SEQ ID NO: 75769.

[7169] The probes having the nucleotide sequence represented by SEQ ID NOS: 87565, 87566, 87567, 87568, 87569, 87570, 87571, 87572, 87573, 87574, 87575 were selected from the ORFs having the nucleotide sequence represented by SEQ ID NO: 75770.

[7170] The probes having the nucleotide sequence represented by SEQ ID NOS: 87576, 87577, 87578, 87579, 87580, 87581, 87582, 87583, 87584, 87585, 87586 were selected from the ORFs having the nucleotide sequence represented by SEQ ID NO: 75771.

[7171] The probes having the nucleotide sequence represented by SEQ ID NOS: 87587, 87588, 87589, 87590, 87591, 87592, 87593, 87594, 87595, 87596, 87597 were selected from the ORFs having the nucleotide sequence represented by SEQ ID NO: 75772.

[7172] The probes having the nucleotide sequence represented by SEQ ID NOS: 87598, 87599, 87600, 87601, 87602, 87603, 87604, 87605, 87606, 87607, 87608 were selected from the ORFs having the nucleotide sequence represented by SEQ ID NO: 75773.

[7173] The probes having the nucleotide sequence represented by SEQ ID NOS: 87609, 87610, 87611, 87612, 87613, 87614, 87615, 87616, 87617, 87618, 87619 were selected from the ORFs having the nucleotide sequence represented by SEQ ID NO: 75774.

[7174] The probes having the nucleotide sequence represented by SEQ ID NOS: 87620, 87621, 87622, 87623, 87624, 87625, 87626, 87627, 87628, 87629, 87630 were selected from the ORFs having the nucleotide sequence represented by SEQ ID NO: 75775.

[7175] The probes having the nucleotide sequence represented by SEQ ID NOS: 87631, 87632, 87633, 87634, 87635, 87636, 87637, 87638, 87639, 87640, 87641 were selected from the ORFs having the nucleotide sequence represented by SEQ ID NO: 75776.

[7176] The probes having the nucleotide sequence represented by SEQ ID NOS: 87642, 87643, 87644, 87645, 87646, 87647, 87648, 87649, 87650, 87651, 87652 were selected from the ORFs having the nucleotide sequence represented by SEQ ID NO: 75777.

[7177] The probes having the nucleotide sequence represented by SEQ ID NOS: 87653, 87654, 87655, 87656, 87657, 87658, 87659, 87660, 87661, 87662, 87663 were selected from the ORFs having the nucleotide sequence represented by SEQ ID NO: 75778.

[7178] The probes having the nucleotide sequence represented by SEQ ID NOS: 87664, 87665, 87666, 87667, 87668, 87669, 87670, 87671, 87672, 87673, 87674 were selected from the ORFs having the nucleotide sequence represented by SEQ ID NO: 75779.

[7179] The probes having the nucleotide sequence represented by SEQ ID NOS: 87675, 87676, 87677, 87678, 87679, 87680, 87681, 87682, 87683, 87684, 87685 were selected from the ORFs having the nucleotide sequence represented by SEQ ID NO: 75780.

[7180] The probes having the nucleotide sequence represented by SEQ ID NOS: 87686, 87687, 87688, 87689, 87690, 87691, 87692, 87693, 87694, 87695, 87696 were selected from the ORFs having the nucleotide sequence represented by SEQ ID NO: 75781.

[7181] The probes having the nucleotide sequence represented by SEQ ID NOS: 87697, 87698, 87699, 87700, 87701, 87702, 87703, 87704, 87705, 87706, 87707 were selected from the ORFs having the nucleotide sequence represented by SEQ ID NO: 75782.

[7182] The probes having the nucleotide sequence represented by SEQ ID NOS: 87708, 87709, 87710, 87711, 87712, 87713, 87714, 87715, 87716, 87717, 87718 were selected from the ORFs having the nucleotide sequence represented by SEQ ID NO: 75783.

[7183] The probes having the nucleotide sequence represented by SEQ ID NOS: 87719, 87720, 87721, 87722, 87723, 87724, 87725, 87726, 87727, 87728, 87729 were selected from the ORFs having the nucleotide sequence represented by SEQ ID NO: 75784.

[7184] The probes having the nucleotide sequence represented by SEQ ID NOS: 87730, 87731, 87732, 87733, 87734, 87735, 87736, 87737, 87738, 87739, 87740 were selected from the ORFs having the nucleotide sequence represented by SEQ ID NO: 75785.

[7185] The probes having the nucleotide sequence represented by SEQ ID NOS: 87741, 87742, 87743, 87744, 87745, 87746, 87747, 87748, 87749, 87750, 87751 were selected from the ORFs having the nucleotide sequence represented by SEQ ID NO: 75786.

[7186] The probes having the nucleotide sequence represented by SEQ ID NOS: 87752, 87753, 87754, 87755, 87756, 87757, 87758, 87759, 87760, 87761, 87762 were selected from the ORFs having the nucleotide sequence represented by SEQ ID NO: 75787.

[7187] The probes having the nucleotide sequence represented by SEQ ID NOS: 87763, 87764, 87765, 87766, 87767, 87768, 87769, 87770, 87771, 87772, 87773 were selected from the ORFs having the nucleotide sequence represented by SEQ ID NO: 75788.

[7188] The probes having the nucleotide sequence represented by SEQ ID NOS: 87774, 87775, 87776, 87777, 87778, 87779, 87780, 87781, 87782, 87783, 87784 were selected from the ORFs having the nucleotide sequence represented by SEQ ID NO: 75789.

[7189] The probes having the nucleotide sequence represented by SEQ ID NOS: 87785, 87786, 87787, 87788, 87789, 87790, 87791, 87792, 87793, 87794, 87795 were selected from the ORFs having the nucleotide sequence represented by SEQ ID NO: 75790.

[7190] The probes having the nucleotide sequence represented by SEQ ID NOS: 87796, 87797, 87798, 87799, 87800, 87801, 87802, 87803, 87804, 87805, 87806 were selected from the ORFs having the nucleotide sequence represented by SEQ ID NO: 75791.

[7191] The probes having the nucleotide sequence represented by SEQ ID NOS: 87807, 87808, 87809, 87810, 87811, 87812, 87813, 87814, 87815, 87816, 87817 were selected from the ORFs having the nucleotide sequence represented by SEQ ID NO: 75792.

[7192] The probes having the nucleotide sequence represented by SEQ ID NOS: 87818, 87819, 87820, 87821, 87822, 87823, 87824, 87825, 87826, 87827, 87828, 87829, 87830, 87831, 87832, 87833, 87834, 87835, 87836, 87837, 87838, 87839 were selected from the ORFs having the nucleotide sequence represented by SEQ ID NO: 75793.

[7193] The probes having the nucleotide sequence represented by SEQ ID NOS: 87840, 87841, 87842, 87843, 87844, 87845, 87846, 87847, 87848, 87849, 87850 were selected from the ORFs having the nucleotide sequence represented by SEQ ID NO: 75794.

[7194] The probes having the nucleotide sequence represented by SEQ ID NOS: 87851, 87852, 87853, 87854, 87855, 87856, 87857, 87858, 87859, 87860, 87861 were selected from the ORFs having the nucleotide sequence represented by SEQ ID NO: 75795.

[7195] The probes having the nucleotide sequence represented by SEQ ID NOS: 87862, 87863, 87864, 87865, 87866, 87867, 87868, 87869, 87870, 87871, 87872 were selected from the ORFs having the nucleotide sequence represented by SEQ ID NO: 75796.

[7196] The probes having the nucleotide sequence represented by SEQ ID NOS: 87873, 87874, 87875, 87876, 87877, 87878, 87879, 87880, 87881, 87882, 87883 were selected from the ORFs having the nucleotide sequence represented by SEQ ID NO: 75797.

[7197] The probes having the nucleotide sequence represented by SEQ ID NOS: 87884, 87885, 87886, 87887, 87888, 87889, 87890, 87891, 87892, 87893, 87894 were selected from the ORFs having the nucleotide sequence represented by SEQ ID NO: 75798.

[7198] The probes having the nucleotide sequence represented by SEQ ID NOS: 87895, 87896, 87897, 87898, 87899, 87900, 87901, 87902, 87903, 87904, 87905 were selected from the ORFs having the nucleotide sequence represented by SEQ ID NO: 75799.

[7199] The probes having the nucleotide sequence represented by SEQ ID NOS: 87906, 87907, 87908, 87909, 87910, 87911, 87912, 87913, 87914, 87915, 87916 were selected from the ORFs having the nucleotide sequence represented by SEQ ID NO: 75800.

[7200] The probes having the nucleotide sequence represented by SEQ ID NOS: 87917, 87918, 87919, 87920, 87921, 87922, 87923, 87924, 87925, 87926, 87927 were selected from the ORFs having the nucleotide sequence represented by SEQ ID NO: 75801.

[7201] The probes having the nucleotide sequence represented by SEQ ID NOS: 87928, 87929, 87930, 87931, 87932, 87933, 87934, 87935, 87936, 87937, 87938 were selected from the ORFs having the nucleotide sequence represented by SEQ ID NO: 75802.

[7202] The probes having the nucleotide sequence represented by SEQ ID NOS: 87939, 87940, 87941, 87942, 87943, 87944, 87945, 87946, 87947, 87948, 87949 were selected from the ORFs having the nucleotide sequence represented by SEQ ID NO: 75803.

[7203] The probes having the nucleotide sequence represented by SEQ ID NOS: 87950, 87951, 87952, 87953, 87954, 87955, 87956, 87957, 87958, 87959, 87960 were selected from the ORFs having the nucleotide sequence represented by SEQ ID NO: 75804.

[7204] The probes having the nucleotide sequence represented by SEQ ID NOS: 87961, 87962, 87963, 87964, 87965, 87966, 87967, 87968, 87969, 87970, 87971 were selected from the ORFs having the nucleotide sequence represented by SEQ ID NO: 75805.

[7205] The probes having the nucleotide sequence represented by SEQ ID NOS: 87972, 87973, 87974, 87975, 87976, 87977, 87978, 87979, 87980, 87981, 87982 were selected from the ORFs having the nucleotide sequence represented by SEQ ID NO: 75806.

[7206] The probes having the nucleotide sequence represented by SEQ ID NOS: 87983, 87984, 87985, 87986, 87987, 87988, 87989, 87990, 87991, 87992, 87993 were selected from the ORFs having the nucleotide sequence represented by SEQ ID NO: 75807.

[7207] The probes having the nucleotide sequence represented by SEQ ID NOS: 87994, 87995, 87996, 87997, 87998, 87999, 88000, 88001, 88002, 88003, 88004 were selected from the ORFs having the nucleotide sequence represented by SEQ ID NO: 75808.

[7208] The probes having the nucleotide sequence represented by SEQ ID NOS: 88005, 88006, 88007, 88008, 88009, 88010, 88011, 88012, 88013, 88014, 88015 were selected from the ORFs having the nucleotide sequence represented by SEQ ID NO: 75809.

[7209] The probes having the nucleotide sequence represented by SEQ ID NOS: 88016, 88017, 88018, 88019, 88020, 88021, 88022, 88023, 88024, 88025, 88026 were selected from the ORFs having the nucleotide sequence represented by SEQ ID NO: 75810.

[7210] The probes having the nucleotide sequence represented by SEQ ID NOS: 88027, 88028, 88029, 88030, 88031, 88032, 88033, 88034, 88035, 88036, 88037 were selected from the ORFs having the nucleotide sequence represented by SEQ ID NO: 75811.

[7211] The probes having the nucleotide sequence represented by SEQ ID NOS: 88038, 88039, 88040, 88041, 88042, 88043, 88044, 88045, 88046, 88047, 88048 were selected from the ORFs having the nucleotide sequence represented by SEQ ID NO: 75812.

[7212] The probes having the nucleotide sequence represented by SEQ ID NOS: 88049, 88050, 88051, 88052, 88053, 88054, 88055, 88056, 88057, 88058, 88059 were selected from the ORFs having the nucleotide sequence represented by SEQ ID NO: 75813.

[7213] The probes having the nucleotide sequence represented by SEQ ID NOS: 88060, 88061, 88062, 88063, 88064, 88065, 88066, 88067, 88068, 88069, 88070 were selected from the ORFs having the nucleotide sequence represented by SEQ ID NO: 75814.

[7214] The probes having the nucleotide sequence represented by SEQ ID NOS: 88071, 88072, 88073, 88074, 88075, 88076, 88077, 88078, 88079, 88080, 88081 were selected from the ORFs having the nucleotide sequence represented by SEQ ID NO: 75815.

[7215] The probes having the nucleotide sequence represented by SEQ ID NOS: 88082, 88083, 88084, 88085, 88086, 88087, 88088, 88089, 88090, 88091, 88092 were selected from the ORFs having the nucleotide sequence represented by SEQ ID NO: 75816.

[7216] The probes having the nucleotide sequence represented by SEQ ID NOS: 88093, 88094, 88095, 88096, 88097, 88098, 88099, 88100, 88101, 88102, 88103 were selected from the ORFs having the nucleotide sequence represented by SEQ ID NO: 75817.

[7217] The probes having the nucleotide sequence represented by SEQ ID NOS: 88104, 88105, 88106, 88107, 88108, 88109, 88110, 88111, 88112, 88113, 88114 were selected from the ORFs having the nucleotide sequence represented by SEQ ID NO: 75818.

[7218] The probes having the nucleotide sequence represented by SEQ ID NOS: 88115, 88116, 88117, 88118, 88119, 88120, 88121, 88122, 88123, 88124, 88125 were selected from the ORFs having the nucleotide sequence represented by SEQ ID NO: 75819.

[7219] The probes having the nucleotide sequence represented by SEQ ID NOS: 88126, 88127, 88128, 88129, 88130, 88131, 88132, 88133, 88134, 88135, 88136 were selected from the ORFs having the nucleotide sequence represented by SEQ ID NO: 75820.

[7220] The probes having the nucleotide sequence represented by SEQ ID NOS: 88137, 88138, 88139, 88140, 88141, 88142, 88143, 88144, 88145, 88146, 88147 were selected from the ORFs having the nucleotide sequence represented by SEQ ID NO: 75821.

[7221] The probes having the nucleotide sequence represented by SEQ ID NOS: 88148, 88149, 88150, 88151, 88152, 88153, 88154, 88155, 88156, 88157, 88158 were selected from the ORFs having the nucleotide sequence represented by SEQ ID NO: 75822.

[7222] The probes having the nucleotide sequence represented by SEQ ID NOS: 88159, 88160, 88161, 88162, 88163, 88164, 88165, 88166, 88167, 88168, 88169 were selected from the ORFs having the nucleotide sequence represented by SEQ ID NO: 75823.

[7223] The probes having the nucleotide sequence represented by SEQ ID NOS: 88170, 88171, 88172, 88173, 88174, 88175, 88176, 88177, 88178, 88179, 88180 were selected from the ORFs having the nucleotide sequence represented by SEQ ID NO: 75824.

[7224] The probes having the nucleotide sequence represented by SEQ ID NOS: 88181, 88182, 88183, 88184, 88185, 88186, 88187, 88188, 88189, 88190, 88191 were selected from the ORFs having the nucleotide sequence represented by SEQ ID NO: 75825.

[7225] The probes having the nucleotide sequence represented by SEQ ID NOS: 88192, 88193, 88194, 88195, 88196, 88197, 88198, 88199, 88200, 88201, 88202 were selected from the ORFs having the nucleotide sequence represented by SEQ ID NO: 75826.

[7226] The probes having the nucleotide sequence represented by SEQ ID NOS: 88203, 88204, 88205, 88206, 88207, 88208, 88209, 88210, 88211, 88212, 88213 were selected from the ORFs having the nucleotide sequence represented by SEQ ID NO: 75827.

[7227] The probes having the nucleotide sequence represented by SEQ ID NOS: 88214, 88215, 88216, 88217, 88218, 88219, 88220, 88221, 88222, 88223, 88224 were selected from the ORFs having the nucleotide sequence represented by SEQ ID NO: 75828.

[7228] The probes having the nucleotide sequence represented by SEQ ID NOS: 88225, 88226, 88227, 88228, 88229, 88230, 88231, 88232, 88233, 88234, 88235 were selected from the ORFs having the nucleotide sequence represented by SEQ ID NO: 75829.

[7229] The probes having the nucleotide sequence represented by SEQ ID NOS: 88236, 88237, 88238, 88239, 88240, 88241, 88242, 88243, 88244, 88245, 88246 were selected from the ORFs having the nucleotide sequence represented by SEQ ID NO: 75830.

[7230] The probes having the nucleotide sequence represented by SEQ ID NOS: 88247, 88248, 88249, 88250, 88251, 88252, 88253, 88254, 88255, 88256, 88257 were selected from the ORFs having the nucleotide sequence represented by SEQ ID NO: 75831.

[7231] The probes having the nucleotide sequence represented by SEQ ID NOS: 88258, 88259, 88260, 88261, 88262, 88263, 88264, 88265, 88266, 88267, 88268 were selected from the ORFs having the nucleotide sequence represented by SEQ ID NO: 75832.

[7232] The probes having the nucleotide sequence represented by SEQ ID NOS: 88269, 88270, 88271, 88272, 88273, 88274, 88275, 88276, 88277, 88278, 88279 were selected from the ORFs having the nucleotide sequence represented by SEQ ID NO: 75833.

[7233] The probes having the nucleotide sequence represented by SEQ ID NOS: 88280, 88281, 88282, 88283, 88284, 88285, 88286, 88287, 88288, 88289, 88290 were selected from the ORFs having the nucleotide sequence represented by SEQ ID NO: 75834.

[7234] The probes having the nucleotide sequence represented by SEQ ID NOS: 88291, 88292, 88293, 88294, 88295, 88296, 88297, 88298, 88299, 88300, 88301 were selected from the ORFs having the nucleotide sequence represented by SEQ ID NO: 75835.

[7235] The probes having the nucleotide sequence represented by SEQ ID NOS: 88302, 88303, 88304, 88305, 88306, 88307, 88308, 88309, 88310, 88311, 88312 were selected from the ORFs having the nucleotide sequence represented by SEQ ID NO: 75836.

[7236] The probes having the nucleotide sequence represented by SEQ ID NOS: 88313, 88314, 88315, 88316, 88317, 88318, 88319, 88320, 88321, 88322, 88323 were selected from the ORFs having the nucleotide sequence represented by SEQ ID NO: 75837.

[7237] The probes having the nucleotide sequence represented by SEQ ID NOS: 88324, 88325, 88326, 88327, 88328, 88329, 88330, 88331, 88332, 88333, 88334 were selected from the ORFs having the nucleotide sequence represented by SEQ ID NO: 75838.

[7238] The probes having the nucleotide sequence represented by SEQ ID NOS: 88335, 88336, 88337, 88338, 88339, 88340, 88341, 88342, 88343, 88344, 88345 were selected from the ORFs having the nucleotide sequence represented by SEQ ID NO: 75839.

[7239] The probes having the nucleotide sequence represented by SEQ ID NOS: 88346, 88347, 88348, 88349, 88350, 88351, 88352, 88353, 88354, 88355, 88356 were selected from the ORFs having the nucleotide sequence represented by SEQ ID NO: 75840.

[7240] The probes having the nucleotide sequence represented by SEQ ID NOS: 88357, 88358, 88359, 88360, 88361, 88362, 88363, 88364, 88365, 88366, 88367 were selected from the ORFs having the nucleotide sequence represented by SEQ ID NO: 75841.

[7241] The probes having the nucleotide sequence represented by SEQ ID NOS: 88368, 88369, 88370, 88371, 88372, 88373, 88374, 88375, 88376, 88377, 88378 were selected from the ORFs having the nucleotide sequence represented by SEQ ID NO: 75842.

[7242] The probes having the nucleotide sequence represented by SEQ ID NOS: 88379, 88380, 88381, 88382, 88383, 88384, 88385, 88386, 88387, 88388, 88389 were selected from the ORFs having the nucleotide sequence represented by SEQ ID NO: 75843.

[7243] The probes having the nucleotide sequence represented by SEQ ID NOS: 88390, 88391, 88392, 88393, 88394, 88395, 88396, 88397, 88398, 88399, 88400 were selected from the ORFs having the nucleotide sequence represented by SEQ ID NO: 75844.

[7244] The probes having the nucleotide sequence represented by SEQ ID NOS: 88401, 88402, 88403, 88404, 88405, 88406, 88407, 88408, 88409, 88410, 88411 were selected from the ORFs having the nucleotide sequence represented by SEQ ID NO: 75845.

[7245] The probes having the nucleotide sequence represented by SEQ ID NOS: 88412, 88413, 88414, 88415, 88416, 88417, 88418, 88419, 88420, 88421 were selected from the ORFs having the nucleotide sequence represented by SEQ ID NO: 75846.

[7246] The probes having the nucleotide sequence represented by SEQ ID NOS: 88422, 88423, 88424, 88425, 88426, 88427, 88428, 88429, 88430, 88431, 88432 were selected from the ORFs having the nucleotide sequence represented by SEQ ID NO: 75847.

[7247] The probes having the nucleotide sequence represented by SEQ ID NOS: 88433, 88434, 88435, 88436, 88437, 88438, 88439, 88440, 88441, 88442, 88443 were selected from the ORFs having the nucleotide sequence represented by SEQ ID NO: 75848.

[7248] The probes having the nucleotide sequence represented by SEQ ID NOS: 88444, 88445, 88446, 88447, 88448, 88449, 88450, 88451, 88452, 88453, 88454 were selected from the ORFs having the nucleotide sequence-represented by SEQ ID NO: 75849.

[7249] The probes having the nucleotide sequence represented by SEQ ID NOS: 88455, 88456, 88457, 88458, 88459, 88460, 88461, 88462, 88463, 88464, 88465 were selected from the ORFs having the nucleotide sequence represented by SEQ ID NO: 75850.

[7250] The probes having the nucleotide sequence represented by SEQ ID NOS: 88466, 88467, 88468, 88469, 88470, 88471, 88472, 88473, 88474, 88475, 88476 were selected from the ORFs having the nucleotide sequence represented by SEQ ID NO: 75851.

[7251] The probes having the nucleotide sequence represented by SEQ ID NOS: 88477, 88478, 88479, 88480, 88481, 88482, 88483, 88484, 88485, 88486, 88487 were selected from the ORFs having the nucleotide sequence represented by SEQ ID NO: 75852.

[7252] The probes having the nucleotide sequence represented by SEQ ID NOS: 88488, 88489, 88490, 88491, 88492, 88493, 88494, 88495, 88496, 88497, 88498 were selected from the ORFs having the nucleotide sequence represented by SEQ ID NO: 75853.

[7253] The probes having the nucleotide sequence represented by SEQ ID NOS: 88499, 88500, 88501, 88502, 88503, 88504, 88505, 88506, 88507, 88508, 88509 were selected from the ORFs having the nucleotide sequence represented by SEQ ID NO: 75854.

[7254] The probes having the nucleotide sequence represented by SEQ ID NOS: 88510, 88511, 88512, 88513, 88514, 88515, 88516, 88517, 88518, 88519, 88520 were selected from the ORFs having the nucleotide sequence represented by SEQ ID NO: 75855.

[7255] The probes-having the nucleotide sequence represented by SEQ ID NOS: 88521, 88522, 88523, 88524, 88525, 88526, 88527, 88528, 88529, 88530, 88531 were selected from the ORFs having the nucleotide sequence represented by SEQ ID NO: 75856.

[7256] The probes having the nucleotide sequence represented by SEQ ID NOS: 88532, 88533, 88534, 88535, 88536, 88537, 88538, 88539, 88540, 88541, 88542 were selected from the ORFs having the nucleotide sequence represented by SEQ ID NO: 75857.

[7257] The probes having the nucleotide sequence represented by SEQ ID NOS: 88543, 88544, 88545, 88546, 88547, 88548, 88549, 88550, 88551, 88552, 88553 were selected from the ORFs having the nucleotide sequence represented by SEQ ID NO: 75858.

[7258] The probes having the nucleotide sequence represented by SEQ ID NOS: 88554, 88555, 88556, 88557, 88558, 88559, 88560, 88561, 88562, 88563, 88564 were selected from the ORFs having the nucleotide sequence represented by SEQ ID NO: 75859.

[7259] The probes having the nucleotide sequence represented by SEQ ID NOS: 88565, 88566, 88567, 88568, 88569, 88570, 88571, 88572, 88573, 88574, 88575 were selected from the ORFs having the nucleotide sequence represented by SEQ ID NO: 75860.

[7260] The probes having the nucleotide sequence represented by SEQ ID NOS: 88576, 88577, 88578, 88579, 88580, 88581, 88582, 88583, 88584, 88585, 88586 were selected from the ORFs having the nucleotide sequence represented by SEQ ID NO: 75861.

[7261] The probes having the nucleotide sequence represented by SEQ ID NOS: 88587, 88588, 88589, 88590, 88591, 88592, 88593, 88594, 88595, 88596, 88597 were selected from the ORFs having the nucleotide sequence represented by SEQ ID NO: 75862.

[7262] The probes having the nucleotide sequence represented by SEQ ID NOS: 88598, 88599, 88600, 88601, 88602, 88603, 88604, 88605, 88606, 88607, 88608 were selected from the ORFs having the nucleotide sequence represented by SEQ ID NO: 75863.

[7263] The probes having the nucleotide sequence represented by SEQ ID NOS: 88609, 88610, 88611, 88612, 88613, 88614, 88615, 88616, 88617, 88618, 88619 were selected from the ORFs having the nucleotide sequence represented by SEQ ID NO: 75864.

[7264] The probes having the nucleotide sequence represented by SEQ ID NOS: 88620, 88621, 88622, 88623, 88624, 88625, 88626, 88627, 88628, 88629, 88630 were selected from the ORFs having the nucleotide sequence represented by SEQ ID NO: 75865.

[7265] The probes having the nucleotide sequence represented by SEQ ID NOS: 88631, 88632, 88633, 88634, 88635, 88636, 88637, 88638, 88639, 88640, 88641 were selected from the ORFs having the nucleotide sequence represented by SEQ ID NO: 75866.

[7266] The probes having the nucleotide sequence represented by SEQ ID NOS: 88642, 88643, 88644, 88645, 88646, 88647, 88648, 88649, 88650, 88651, 88652 were selected from the ORFs having the nucleotide sequence represented by SEQ ID NO: 75867.

[7267] The probes having the nucleotide sequence represented by SEQ ID NOS: 88653, 88654, 88655, 88656, 88657, 88658, 88659, 88660, 88661, 88662, 88663 were selected from the ORFs having the nucleotide sequence represented by SEQ ID NO: 75868.

[7268] The probes having the nucleotide sequence represented by SEQ ID NOS: 88664, 88665, 88666, 88667, 88668, 88669, 88670, 88671, 88672, 88673, 88674 were selected from the ORFs having the nucleotide sequence represented by SEQ ID NO: 75869.

[7269] The probes having the nucleotide sequence represented by SEQ ID NOS: 88675, 88676, 88677, 88678, 88679, 88680, 88681, 88682, 88683, 88684, 88685 were selected from the ORFs having the nucleotide sequence represented by SEQ ID NO: 75870.

[7270] The probes having the nucleotide sequence represented by SEQ ID NOS: 88686, 88687, 88688, 88689, 88690, 88691, 88692, 88693, 88694, 88695, 88696 were selected from the ORFs having the nucleotide sequence represented by SEQ ID NO: 75871.

[7271] The probes having the nucleotide sequence represented by SEQ ID NOS: 88697, 88698, 88699, 88700, 88701, 88702, 88703, 88704, 88705, 88706, 88707 were selected from the ORFs having the nucleotide sequence represented by SEQ ID NO: 75872.

[7272] The probes having the nucleotide sequence represented by SEQ ID NOS: 88708, 88709, 88710, 88711, 88712, 88713, 88714, 88715, 88716, 88717, 88718 were selected from the ORFs having the nucleotide sequence represented by SEQ ID NO: 75873.

[7273] The probes having the nucleotide sequence represented by SEQ ID NOS: 88719, 88720, 88721, 88722, 88723, 88724, 88725, 88726, 88727, 88728, 88729 were selected from the ORFs having the nucleotide sequence represented by SEQ ID NO: 75874.

[7274] The probes having the nucleotide sequence represented by SEQ ID NOS: 88730, 88731, 88732, 88733, 88734, 88735, 88736, 88737, 88738, 88739, 88740 were selected from the ORFs having the nucleotide sequence represented by SEQ ID NO: 75875.

[7275] The probes having the nucleotide sequence represented by SEQ ID NOS: 88741, 88742, 88743, 88744, 88745, 88746, 88747, 88748, 88749, 88750, 88751 were selected from the ORFs having the nucleotide sequence represented by SEQ ID NO: 75876.

[7276] The probes having the nucleotide sequence represented by SEQ ID NOS: 88752, 88753, 88754, 88755, 88756, 88757, 88758, 88759, 88760, 88761, 88762 were selected from the ORFs having the nucleotide sequence represented by SEQ ID NO: 75877.

[7277] The probes having the nucleotide sequence represented by SEQ ID NOS: 88763, 88764, 88765, 88766, 88767, 88768, 88769, 88770, 88771, 88772, 88773 were selected from the ORFs having the nucleotide sequence represented by SEQ ID NO: 75878.

[7278] The probes having the nucleotide sequence represented by SEQ ID NOS: 88774, 88775, 88776, 88777, 88778, 88779, 88780, 88781, 88782, 88783, 88784 were selected from the ORFs having the nucleotide sequence represented by SEQ ID NO: 75879.

[7279] The probes having the nucleotide sequence represented by SEQ ID NOS: 88785, 88786, 88787, 88788, 88789, 88790, 88791, 88792, 88793, 88794, 88795 were selected from the ORFs having the nucleotide sequence represented by SEQ ID NO: 75880.

[7280] The probes having the nucleotide sequence represented by SEQ ID NOS: 88796, 88797, 88798, 88799, 88800, 88801, 88802, 88803, 88804, 88805, 88806 were selected from the ORFs having the nucleotide sequence represented by SEQ ID NO: 75881.

[7281] The probes having the nucleotide sequence represented by SEQ ID NOS: 88807, 88808, 88809, 88810, 88811, 88812, 88813, 88814, 88815, 88816, 88817 were selected from the ORFs having the nucleotide sequence represented by SEQ ID NO: 75882.

[7282] The probes having the nucleotide sequence represented by SEQ ID NOS: 88818, 88819, 88820, 88821, 88822, 88823, 88824, 88825, 88826, 88827, 88828 were selected from the ORFs having the nucleotide sequence represented by SEQ ID NO: 75883.

[7283] The probes having the nucleotide sequence represented by SEQ ID NOS: 88829, 88830, 88831, 88832, 88833, 88834, 88835, 88836, 88837, 88838, 88839 were selected from the ORFs having the nucleotide sequence represented by SEQ ID NO: 75884.

[7284] The probes having the nucleotide sequence represented by SEQ ID NOS: 88840, 88841, 88842, 88843, 88844, 88845, 88846, 88847, 88848, 88849, 88850 were selected from the ORFs having the nucleotide sequence represented by SEQ ID NO: 75885.

[7285] The probes having the nucleotide sequence represented by SEQ ID NOS: 88851, 88852, 88853, 88854, 88855, 88856, 88857, 88858, 88859, 88860, 88861 were selected from the ORFs having the nucleotide sequence represented by SEQ ID NO: 75886.

[7286] The probes having the nucleotide sequence represented by SEQ ID NOS: 88862, 88863, 88864, 88865, 88866, 88867, 88868, 88869, 88870, 88871, 88872 were selected from the ORFs having the nucleotide sequence represented by SEQ ID NO: 75887.

[7287] The probes having the nucleotide sequence represented by SEQ ID NOS: 88873, 88874, 88875, 88876, 88877, 88878, 88879, 88880, 88881, 88882, 88883 were selected from the ORFs having the nucleotide sequence represented by SEQ ID NO: 75888.

[7288] The probes having the nucleotide sequence represented by SEQ ID NOS: 88884, 88885, 88886, 88887, 88888, 88889, 88890, 88891, 88892, 88893, 88894 were selected from the ORFs having the nucleotide sequence represented by SEQ ID NO: 75889.

[7289] The probes having the nucleotide sequence represented by SEQ ID NOS: 88895, 88896, 88897, 88898, 88899, 88900, 88901, 88902, 88903, 88904, 88905 were selected from the ORFs having the nucleotide sequence represented by SEQ ID NO: 75890.

[7290] The probes having the nucleotide sequence represented by SEQ ID NOS: 88906, 88907, 88908, 88909, 88910, 88911, 88912, 88913, 88914, 88915, 88916 were selected from the ORFs having the nucleotide sequence represented by SEQ ID NO: 75891.

[7291] The probes having the nucleotide sequence represented by SEQ ID NOS: 88917, 88918, 88919, 88920, 88921, 88922, 88923,. 88924, 88925, 88926, 88927 were selected from the ORFs having the nucleotide sequence represented by SEQ ID NO: 75892.

[7292] The probes having the nucleotide sequence represented by SEQ ID NOS: 88928, 88929, 88930, 88931, 88932, 88933, 88934, 88935, 88936, 88937, 88938 were selected from the ORFs having the nucleotide sequence represented by SEQ ID NO: 75893.

[7293] The probes having the nucleotide sequence represented by SEQ ID NOS: 88939, 88940, 88941, 88942, 88943, 88944, 88945, 88946, 88947, 88948, 88949 were selected from the ORFs having the nucleotide sequence represented by SEQ ID NO: 75894.

[7294] The probes having the nucleotide sequence represented by SEQ ID NOS: 88950, 88951, 88952, 88953, 88954, 88955, 88956, 88957, 88958, 88959, 88960 were selected from the ORFs having the nucleotide sequence represented by SEQ ID NO: 75895.

[7295] The probes having the nucleotide sequence represented by SEQ ID NOS: 88961, 88962, 88963, 88964, 88965, 88966, 88967, 88968, 88969, 88970, 88971 were selected from the ORFs having the nucleotide sequence represented by SEQ ID NO: 75896.

[7296] The probes having the nucleotide sequence represented by SEQ ID NOS: 88972, 88973, 88974, 88975, 88976, 88977, 88978, 88979, 88980, 88981, 88982 were selected from the ORFs having the nucleotide sequence represented by SEQ ID NO: 75897.

[7297] The probes having the nucleotide sequence represented by SEQ ID NOS: 88983, 88984, 88985, 88986, 88987, 88988, 88989, 88990, 88991, 88992, 88993 were selected from the ORFs having the nucleotide sequence represented by SEQ ID NO: 75898.

[7298] The probes having the nucleotide sequence represented by SEQ ID NOS: 88994, 88995, 88996, 88997, 88998, 88999, 89000, 89001, 89002, 89003, 89004 were selected from the ORFs having the nucleotide sequence represented by SEQ ID NO: 75899.

[7299] The probes having the nucleotide sequence represented by SEQ ID NOS: 89005, 89006, 89007, 89008, 89009, 89010, 89011, 89012, 89013, 89014, 89015 were selected from the ORFs having the nucleotide sequence represented by SEQ ID NO: 75900.

[7300] The probes having the nucleotide sequence represented by SEQ ID NOS: 89016, 89017, 89018, 89019, 89020, 89021, 89022, 89023, 89024, 89025, 89026 were selected from the ORFs having the nucleotide sequence represented by SEQ ID NO: 75901.

[7301] The probes having the nucleotide sequence represented by SEQ ID NOS: 89027, 89028, 89029, 89030, 89031, 89032, 89033, 89034, 89035, 89036, 89037 were selected from the ORFs having the nucleotide sequence represented by SEQ ID NO: 75902.

[7302] The probes having the nucleotide sequence represented by SEQ ID NOS: 89038, 89039, 89040, 89041, 89042, 89043, 89044, 89045, 89046, 89047, 89048 were selected from the ORFs having the nucleotide sequence represented by SEQ ID NO: 75903.

[7303] The probes having the nucleotide sequence represented by SEQ ID NOS: 89049, 89050, 89051, 89052, 89053, 89054, 89055, 89056, 89057, 89058, 89059 were selected from the ORFs having the nucleotide sequence represented by SEQ ID NO: 75904.

[7304] The probes having the nucleotide sequence represented by SEQ ID NOS: 89060, 89061, 89062, 89063, 89064, 89065, 89066, 89067, 89068, 89069, 89070 were selected from the ORFs having the nucleotide sequence represented by SEQ ID NO: 75905.

[7305] The probes having the nucleotide sequence represented by SEQ ID NOS: 89071, 89072, 89073, 89074, 89075, 89076, 89077, 89078, 89079, 89080, 89081 were selected from the ORFs having the nucleotide sequence represented by SEQ ID NO: 75906.

[7306] The probes having the nucleotide sequence represented by SEQ ID NOS: 89082, 89083, 89084, 89085, 89086, 89087, 89088, 89089, 89090, 89091, 89092 were selected from the ORFs having the nucleotide sequence represented by SEQ ID NO: 75907.

[7307] The probes having the nucleotide sequence represented by SEQ ID NOS: 89093, 89094, 89095, 89096, 89097, 89098, 89099, 89100, 89101, 89102, 89103 were selected from the ORFs having the nucleotide sequence represented by SEQ ID NO: 75908.

[7308] The probes having the nucleotide sequence represented by SEQ ID NOS: 89104, 89105, 89106, 89107, 89108, 89109, 89110, 89111, 89112, 89113, 89114 were selected from the ORFs having the nucleotide sequence represented by SEQ ID NO: 75909.

[7309] The probes having the nucleotide sequence represented by SEQ ID NOS: 89115, 89116, 89117, 89118, 89119, 89120, 89121, 89122, 89123, 89124, 89125 were selected from the ORFs having the nucleotide sequence represented by SEQ ID NO: 75910.

[7310] The probes having the nucleotide sequence represented by SEQ ID NOS: 89126, 89127, 89128, 89129, 89130, 89131, 89132, 89133, 89134, 89135, 89136 were selected from the ORFs having the nucleotide sequence represented by SEQ ID NO: 75911.

[7311] The probes having the nucleotide sequence represented by SEQ ID NOS: 89137, 89138, 89139, 89140, 89141, 89142, 89143, 89144, 89145, 89146, 89147 were selected from the ORFs having the nucleotide sequence represented by SEQ ID NO: 75912.

[7312] The probes having the nucleotide sequence represented by SEQ ID NOS: 89148, 89149, 89150, 89151, 89152, 89153, 89154, 89155, 89156, 89157, 89158 were selected from the ORFs having the nucleotide sequence represented by SEQ ID NO: 75913.

[7313] The probes having the nucleotide sequence represented by SEQ ID NOS: 89159, 89160, 89161, 89162, 89163, 89164, 89165, 89166, 89167, 89168, 89169 were selected from the ORFs having the nucleotide sequence represented by SEQ ID NO: 75914.

[7314] The probes having the nucleotide sequence represented by SEQ ID NOS: 89170, 89171, 89172, 89173, 89174, 89175, 89176, 89177, 89178, 89179, 89180 were selected from the ORFs having the nucleotide sequence represented by SEQ ID NO: 75915.

[7315] The probes having the nucleotide sequence represented by SEQ ID NOS: 89181, 89182, 89183, 89184, 89185, 89186, 89187, 89188, 89189, 89190, 89191 were selected from the ORFs having the nucleotide sequence represented by SEQ ID. NO: 75916.

[7316] The probes having the nucleotide sequence represented by SEQ ID NOS: 89192, 89193, 89194, 89195, 89196, 89197, 89198, 89199, 89200, 89201, 89202 were selected from the ORFs having the nucleotide sequence represented by SEQ ID NO: 75917.

[7317] The probes having the nucleotide sequence represented by SEQ ID NOS: 89203, 89204, 89205, 89206, 89207, 89208, 89209, 89210, 89211, 89212, 89213 were selected from the ORFs having the nucleotide sequence represented by SEQ ID NO: 75918.

[7318] The probes having the nucleotide sequence represented by SEQ ID NOS: 89214, 89215, 89216, 89217, 89218, 89219, 89220, 89221, 89222, 89223, 89224 were selected from the ORFs having the nucleotide sequence represented by SEQ ID. NO: 75919.

[7319] The probes having the nucleotide sequence represented by SEQ ID NOS: 89225, 89226, 89227, 89228, 89229, 89230, 89231, 89232, 89233, 89234, 89235 were selected from the ORFs having the nucleotide sequence represented by SEQ ID NO: 75920.

[7320] The probes having the nucleotide sequence represented by SEQ ID NOS: 89236, 89237, 89238, 89239, 89240, 89241, 89242, 89243, 89244, 89245, 89246 were selected from the ORFs having the nucleotide sequence represented by SEQ ID NO: 75921.

[7321] The probes having the nucleotide sequence represented by SEQ ID NOS: 89247, 89248, 89249, 89250, 89251, 89252, 89253, 89254, 89255, 89256, 89257 were selected from the ORFs having the nucleotide sequence represented by SEQ ID NO: 75922.

[7322] The probes having the nucleotide sequence represented by SEQ ID NOS: 89258, 89259, 89260, 89261, 89262, 89263, 89264, 89265, 89266, 89267, 89268 were selected from the ORFs having the nucleotide sequence represented by SEQ ID NO: 75923.

[7323] The probes having the nucleotide sequence represented by SEQ ID NOS: 89269, 89270, 89271, 89272, 89273, 89274, 89275, 89276, 89277, 89278, 89279 were selected from the ORFs having the nucleotide sequence represented by SEQ ID NO: 75924.

[7324] The probes having the nucleotide sequence represented by SEQ ID NOS: 89280, 89281, 89282, 89283, 89284, 89285, 89286, 89287, 89288, 89289, 89290 were selected from the ORFs having the nucleotide sequence represented by SEQ ID NO: 75925.

[7325] The probes having the nucleotide sequence represented by SEQ ID NOS: 89291, 89292, 89293, 89294, 89295, 89296, 89297, 89298, 89299, 89300, 89301 were selected from the ORFs having the nucleotide sequence represented by SEQ ID NO: 75926.

[7326] The probes having the nucleotide sequence represented by SEQ ID NOS: 89302, 89303, 89304, 89305, 89306, 89307, 89308, 89309, 89310, 89311, 89312 were selected from the ORFs having the nucleotide sequence represented by SEQ ID NO: 75927.

[7327] The probes having the nucleotide sequence represented by SEQ ID NOS: 89313, 89314, 89315, 89316, 89317, 89318, 89319, 89320, 89321, 89322, 89323 were selected from the ORFs having the nucleotide sequence represented by SEQ ID NO: 75928.

[7328] The probes having the nucleotide sequence represented by SEQ ID NOS: 89324, 89325, 89326, 89327, 89328, 89329, 89330, 89331, 89332, 89333, 89334 were selected from the ORFs having the nucleotide sequence represented by SEQ ID NO: 75929.

[7329] The probes having the nucleotide sequence represented by SEQ ID NOS: 89335, 89336, 89337, 89338, 89339, 89340, 89341, 89342, 89343, 89344, 89345 were selected from the ORFs having the nucleotide sequence represented by SEQ ID NO: 75930.

[7330] The probes having the nucleotide sequence represented by SEQ ID NOS: 89346, 89347, 89348, 89349, 89350, 89351, 89352, 89353, 89354, 89355, 89356 were selected from the ORFs having the nucleotide sequence represented by SEQ ID NO: 75931.

[7331] The probes having the nucleotide sequence represented by SEQ ID NOS: 89357, 89358, 89359, 89360, 89361, 89362, 89363, 89364, 89365, 89366, 89367 were selected from the ORFs having the nucleotide sequence represented by SEQ ID NO: 75932.

[7332] The probes having the nucleotide sequence represented by SEQ ID NOS: 89368, 89369, 89370, 89371, 89372, 89373, 89374, 89375, 89376, 89377, 89378 were selected from the ORFs having the nucleotide sequence represented by SEQ ID NO: 75933.

[7333] The probes having the nucleotide sequence represented by SEQ ID NOS: 89379, 89380, 89381, 89382, 89383, 89384, 89385, 89386, 89387, 89388, 89389 were selected from the ORFs having the nucleotide sequence represented by SEQ ID NO: 75934.

[7334] The probes having the nucleotide sequence represented by SEQ ID NOS: 89390, 89391, 89392, 89393, 89394, 89395, 89396, 89397, 89398, 89399, 89400 were selected from the ORFs having the nucleotide sequence represented by SEQ ID NO: 75935.

[7335] The probes having the nucleotide sequence represented by SEQ ID NOS: 89401, 89402, 89403, 89404, 89405, 89406, 89407, 89408, 89409, 89410, 89411 were selected from the ORFs having the nucleotide sequence represented by SEQ ID NO: 75936.

[7336] The probes having the nucleotide sequence represented by SEQ ID NOS: 89412, 89413, 89414, 89415, 89416, 89417, 89418, 89419, 89420, 89421, 89422 were selected from the ORFs having the nucleotide sequence represented by SEQ ID NO: 75937.

[7337] The probes having the nucleotide sequence represented by SEQ ID NOS: 89423, 89424, 89425, 89426, 89427, 89428, 89429, 89430, 89431, 89432, 89433 were selected from the ORFs having the nucleotide sequence represented by SEQ ID NO: 75938.

[7338] The probes having the nucleotide sequence represented by SEQ ID NOS: 89434, 89435, 89436, 89437, 89438, 89439, 89440, 89441, 89442, 89443, 8944.4 were selected from the ORFs having the nucleotide sequence represented by SEQ ID NO: 75939.

[7339] The probes having the nucleotide sequence represented by SEQ ID NOS: 89445, 89446, 89447, 89448, 89449, 89450, 89451, 89452, 89453, 89454, 89455 were selected from the ORFs having the nucleotide sequence represented by SEQ ID NO: 75940.

[7340] The probes having the nucleotide sequence represented by SEQ ID NOS: 89456, 89457, 89458, 89459, 89460, 89461, 89462, 89463, 89464, 89465, 89466 were selected from the ORFs having the nucleotide sequence represented by SEQ ID NO: 75941.

[7341] The probes having the nucleotide sequence represented by SEQ ID NOS: 89467, 89468, 89469, 89470, 89471, 89472, 89473, 89474, 89475, 89476, 89477 were selected from the ORFs having the nucleotide sequence represented by SEQ ID NO: 75942.

[7342] The probes having the nucleotide sequence represented by SEQ ID NOS: 89478, 89479, 89480, 89481, 89482, 89483, 89484, 89485, 89486, 89487, 89488 were selected from the ORFs having the nucleotide sequence represented by SEQ ID NO: 75943.

[7343] The probes having the nucleotide sequence represented by SEQ ID NOS: 89489, 89490, 89491, 89492, 89493, 89494, 89495, 89496, 89497, 89498, 89499 were selected from the ORFs having the nucleotide sequence represented by SEQ ID NO: 75944.

[7344] The probes having the nucleotide sequence represented by. SEQ ID NOS: 89500, 89501, 89502, 89503, 89504, 89505, 89506, 89507, 89508, 89509, 89510 were selected from the ORFs having the nucleotide sequence represented by SEQ ID NO: 75945.

[7345] The probes having the nucleotide sequence represented by SEQ ID NOS: 89511, 89512, 89513, 89514, 89515, 89516, 89517, 89518, 89519, 89520, 89521 were selected from the ORFs having the nucleotide sequence represented by SEQ ID NO: 75946.

[7346] The probes having the nucleotide sequence represented by SEQ ID NOS: 89522, 89523, 89524, 89525, 89526, 89527, 89528, 89529, 89530, 89531, 89532 were selected from the ORFs having the nucleotide sequence represented by SEQ ID NO: 75947.

[7347] The probes having the nucleotide sequence represented by SEQ ID NOS: 89533, 89534, 89535, 89536, 89537, 89538, 89539, 89540, 89541, 89542, 89543 were selected from the ORFs having the nucleotide sequence represented by SEQ ID NO: 75948.

[7348] The probes having the nucleotide sequence represented by SEQ ID NOS: 89544, 89545, 89546, 89547, 89548, 89549, 89550, 89551, 89552, 89553, 89554 were selected from the ORFs having the nucleotide sequence represented by SEQ ID. NO: 75949.

[7349] The probes having the nucleotide sequence represented by SEQ ID NOS: 89555, 89556, 89557, 89558, 89559, 89560, 89561, 89562, 89563, 89564, 89565 were selected from the ORFs having the nucleotide sequence represented by SEQ ID NO: 75950.

[7350] The probes having the nucleotide sequence represented by SEQ ID NOS: 89566, 89567, 89568, 89569, 89570, 89571, 89572, 89573, 89574, 89575, 89576 were selected from the ORFs having the nucleotide sequence represented by SEQ ID NO: 75951.

[7351] The probes having the nucleotide sequence represented by SEQ ID NOS: 89577, 89578, 89579, 89580, 89581, 89582, 89583, 89584, 89585, 89586, 89587 were selected from the ORFs having the nucleotide sequence represented by SEQ ID NO: 75952.

[7352] The probes having the nucleotide sequence represented by SEQ ID NOS: 89588, 89589, 89590, 89591, 89592, 89593, 89594, 89595, 89596, 89597, 89598 were selected from the ORFs having the nucleotide sequence represented by SEQ ID NO: 75953.

[7353] The probes having the nucleotide sequence represented by SEQ ID NOS: 89599, 89600, 89601, 89602, 89603, 89604, 89605, 89606, 89607, 89608, 89609 were selected from the ORFs having the nucleotide sequence represented by SEQ ID NO: 75954.

[7354] The probes having the nucleotide sequence represented by SEQ ID NOS: 89610, 89611, 89612, 89613, 89614, 89615, 89616, 89617, 89618, 89619, 89620 were selected from the ORFs having the nucleotide sequence represented by SEQ ID NO: 75955.

[7355] The probes having the nucleotide sequence represented by SEQ ID NOS: 89621, 89622, 89623, 89624, 89625, 89626, 89627, 89628, 89629, 89630, 89631 were selected from the ORFs having the nucleotide sequence represented by SEQ ID NO: 75956.

[7356] The probes having the nucleotide sequence represented by SEQ ID NOS: 89632, 89633, 89634, 89635, 89636, 89637, 89638, 89639, 89640, 89641, 89642 were selected from the ORFs having the nucleotide sequence represented by SEQ ID NO: 75957.

[7357] The probes having the nucleotide sequence represented by SEQ ID NOS: 89643, 89644, 89645, 89646, 89647, 89648, 89649, 89650, 89651, 89652, 89653 were selected from the ORFs having the nucleotide sequence represented by SEQ ID NO: 75958.

[7358] The probes having the nucleotide sequence represented by SEQ ID NOS: 89654, 89655, 89656, 89657, 89658, 89659, 89660, 89661, 89662, 89663, 89664 were selected from the ORFs having the nucleotide sequence represented by SEQ ID NO: 75959.

[7359] The probes having the nucleotide sequence represented by SEQ ID NOS: 89665, 89666, 89667, 89668, 89669, 89670, 89671, 89672, 89673, 89674, 89675 were selected from the ORFs having the nucleotide sequence represented by SEQ ID NO: 75960.

[7360] The probes having the nucleotide sequence represented by SEQ ID NOS: 89676, 89677, 89678, 89679, 89680, 89681, 89682, 89683, 89684, 89685, 89686 were selected from the ORFs having the nucleotide sequence represented by SEQ ID NO: 75961.

[7361] The probes having the nucleotide sequence represented by SEQ ID NOS: 89687, 89688, 89689, 89690, 89691, 89692, 89693, 89694, 89695, 89696, 89697 were selected from the ORFs having the nucleotide sequence represented by SEQ ID NO: 75962.

[7362] The probes having the nucleotide sequence represented by SEQ ID NOS: 89698, 89699, 89700, 89701, 89702, 89703, 89704, 89705, 89706, 89707, 89708 were selected from the ORFs having the nucleotide sequence represented by SEQ ID NO: 75963.

[7363] The probes having the nucleotide sequence represented by SEQ ID NOS: 89709, 89710, 89711, 89712, 89713, 89714, 89715, 89716, 89717, 89718, 89719 were selected from the ORFs having the nucleotide sequence represented by SEQ ID NO: 75964.

[7364] The probes having the nucleotide sequence represented by SEQ ID NOS: 89720, 89721, 89722, 89723, 89724, 89725, 89726, 89727, 89728, 89729, 89730 were selected from the ORFs having the nucleotide sequence represented by SEQ ID NO: 75965.

[7365] The probes having the nucleotide sequence represented by SEQ ID NOS: 89731, 89732, 89733, 89734, 89735, 89736, 89737, 89738, 89739, 89740, 89741 were selected from the ORFs having the nucleotide sequence represented by SEQ ID NO: 75966.

[7366] The probes having the nucleotide sequence represented by SEQ ID NOS: 89742, 89743, 89744, 89745, 89746, 89747, 89748, 89749, 89750, 89751, 89752 were selected from the ORFs having the nucleotide sequence represented by SEQ ID NO: 75967.

[7367] The probes having the nucleotide sequence represented by SEQ ID NOS: 89753, 89754, 89755, 89756, 89757, 89758, 89759, 89760, 89761, 89762, 89763 were selected from the ORFs having the nucleotide sequence represented by SEQ ID NO: 75968.

[7368] The probes having the nucleotide sequence represented by SEQ ID NOS: 89764, 89765, 89766, 89767, 89768, 89769, 89770, 89771, 89772, 89773, 89774 were selected from the ORFs having the nucleotide sequence represented by SEQ ID NO: 75969.

[7369] The probes having the nucleotide sequence represented by SEQ ID NOS: 89775, 89776, 89777, 89778, 89779, 89780, 89781, 89782, 89783, 89784, 89785 were selected from the ORFs having the nucleotide sequence represented by SEQ ID NO: 75970.

[7370] The probes having the nucleotide sequence represented by SEQ ID NOS: 89786, 89787, 89788, 89789, 89790, 89791, 89792, 89793, 89794, 89795, 89796 were selected from the ORFs having the nucleotide sequence represented by SEQ ID NO: 75971.

[7371] The probes having the nucleotide sequence represented by SEQ ID NOS: 89797, 89798, 89799, 89800, 89801, 89802, 89803, 89804, 89805, 89806, 89807 were selected from the ORFs having the nucleotide sequence represented by SEQ ID NO: 75972.

[7372] The probes having the nucleotide sequence represented by SEQ ID NOS: 89808, 89809, 89810, 89811, 89812, 89813, 89814, 89815, 89816, 89817, 89818 were selected from the ORFs having the nucleotide sequence represented by SEQ ID NO: 75973.

[7373] The probes having the nucleotide sequence represented by SEQ ID NOS: 89819, 89820, 89821, 89822, 89823, 89824, 89825, 89826, 89827, 89828, 89829 were selected from the ORFs having the nucleotide sequence represented by SEQ ID NO: 75974.

[7374] The probes having the nucleotide sequence represented by SEQ ID NOS: 89830, 89831, 89832, 89833, 89834, 89835, 89836, 89837, 89838, 89839, 89840 were selected from the ORFs having the nucleotide sequence represented by SEQ ID NO: 75975.

[7375] The probes having the nucleotide sequence represented by SEQ ID NOS: 89841, 89842, 89843, 89844, 89845, 89846, 89847, 89848, 89849, 89850, 89851 were selected from the ORFs having the nucleotide sequence represented by SEQ ID NO: 75976.

[7376] The probes having the nucleotide sequence represented by SEQ ID NOS: 89852, 89853, 89854, 89855, 89856, 89857, 89858, 89859, 89860, 89861, 89862 were selected from the ORFs having the nucleotide sequence represented by SEQ ID NO: 75977.

[7377] The probes having the nucleotide sequence represented by SEQ ID NOS: 89863, 89864, 89865, 89866, 89867, 89868, 89869, 89870, 89871, 89872, 89873 were selected from the ORFs having the nucleotide sequence represented by SEQ ID NO: 75978.

[7378] The probes having the nucleotide sequence represented by SEQ ID NOS: 89874, 89875, 89876, 89877, 89878, 89879, 89880, 89881, 89882, 89883, 89884 were selected from the ORFs having the nucleotide sequence represented by SEQ ID NO: 75979.

[7379] The probes having the nucleotide sequence represented by SEQ ID NOS: 89885, 89886, 89887, 89888, 89889, 89890, 89891, 89892, 89893, 89894, 89895 were selected from the ORFs having the nucleotide sequence represented by SEQ ID NO: 75980.

[7380] The probes having the nucleotide sequence represented by SEQ ID NOS: 89896, 89897, 89898, 89899, 89900, 89901, 89902, 89903, 89904, 89905, 89906 were selected from the ORFs having the nucleotide sequence represented by SEQ ID NO: 75981.

[7381] The probes having the nucleotide sequence represented by SEQ ID NOS: 89907, 89908, 89909, 89910, 89911, 89912, 89913, 89914, 89915, 89916, 89917 were selected from the ORFs having the nucleotide sequence represented by SEQ ID NO: 75982.

[7382] The probes having the nucleotide sequence represented by SEQ ID NOS: 89918, 89919, 89920, 89921, 89922, 89923, 89924, 89925, 89926, 89927, 89928 were selected from the ORFs having the nucleotide sequence represented by SEQ ID NO: 75983.

[7383] The probes having the nucleotide sequence represented by SEQ ID NOS: 89929, 89930, 89931, 89932, 89933, 89934, 89935, 89936, 89937, 89938, 89939 were selected from the ORFs having the nucleotide sequence represented by SEQ ID NO: 75984.

[7384] The probes having the nucleotide sequence represented by SEQ ID NOS: 89940, 89941, 89942, 89943, 89944, 89945, 89946, 89947, 89948, 89949, 89950 were selected from the ORFs having the nucleotide sequence represented by SEQ ID NO: 75985.

[7385] The probes having the nucleotide sequence represented by SEQ ID NOS: 89951, 89952, 89953, 89954, 89955, 89956, 89957, 89958, 89959, 89960, 89961 were selected from the ORFs having the nucleotide sequence represented by SEQ ID NO: 75986.

[7386] The probes having the nucleotide sequence represented by SEQ ID NOS: 89962, 89963, 89964, 89965, 89966, 89967, 89968, 89969, 89970, 89971, 89972 were selected from the ORFs having the nucleotide sequence represented by SEQ ID NO: 75987.

[7387] The probes having the nucleotide sequence represented by SEQ ID NOS: 89973, 89974, 89975, 89976, 89977, 89978, 89979, 89980, 89981, 89982, 89983 were selected from the ORFs having the nucleotide sequence represented by SEQ ID NO: 75988.

[7388] The probes having the nucleotide sequence represented by SEQ ID NOS: 89984, 89985, 89986, 89987, 89988, 89989, 89990, 89991, 89992, 89993, 89994 were selected from the ORFs having the nucleotide sequence represented by SEQ ID NO: 75989.

[7389] The probes having the nucleotide sequence represented by SEQ ID NOS: 89995, 89996, 89997, 89998, 89999, 90000, 90001, 90002, 90003, 90004, 90005 were selected from the ORFs having the nucleotide sequence represented by SEQ ID NO: 75990.

[7390] The probes having the nucleotide sequence represented by SEQ ID NOS: 90006, 90007, 90008, 90009, 90010, 90011, 90012, 90013, 90014, 90015, 90016 were selected from the ORFs having the nucleotide sequence represented by SEQ ID NO: 75991.

[7391] The probes having the nucleotide sequence represented by SEQ ID NOS: 90017, 90018, 90019, 90020, 90021, 90022, 90023, 90024, 90025, 90026, 90027 were selected from the ORFs having the nucleotide sequence represented by SEQ ID NO: 75992.

[7392] The probes having the nucleotide sequence represented by SEQ ID NOS: 90028, 90029, 90030, 90031, 90032, 90033, 90034, 90035, 90036, 90037, 90038, 90039, 90040, 90041, 90042, 90043, 90044, 90045, 90046, 90047, 90048, 90049 were selected from the ORFs having the nucleotide sequence represented by SEQ ID NO: 75993.

[7393] The probes having the nucleotide sequence represented by SEQ ID NOS: 90050, 90051, 90052, 90053, 90054, 90055, 90056, 90057, 90058, 90059, 90060 were selected from the ORFs having the nucleotide sequence represented by SEQ ID NO: 75994.

[7394] The probes having the nucleotide sequence represented by SEQ ID NOS: 90061, 90062, 90063, 90064, 90065, 90066, 90067, 90068, 90069, 90070, 90071 were selected from the ORFs having the nucleotide sequence represented by SEQ ID NO: 75995.

[7395] The probes having the nucleotide sequence represented by SEQ ID NOS: 90072, 90073, 90074, 90075, 90076, 90077, 90078, 90079, 90080, 90081, 90082 were selected from the ORFs having the nucleotide sequence represented by SEQ ID NO: 75996.

[7396] The probes having the nucleotide sequence represented by SEQ ID NOS: 90083, 90084, 90085, 90086, 90087, 90088, 90089, 90090, 90091, 90092, 90093 were selected from the ORFs having the nucleotide sequence represented by SEQ ID NO: 75997.

[7397] The probes having the nucleotide sequence represented by SEQ ID NOS: 90094, 90095, 90096, 90097, 90098, 90099, 90100, 90101, 90102, 90103, 90104 were selected from the ORFs having the nucleotide sequence represented by SEQ ID NO: 75998.

[7398] The probes having the nucleotide sequence represented by SEQ ID NOS: 90105, 90106, 90107, 90108, 90109, 90110, 90111, 90112, 90113, 90114, 90115 were selected from the ORFs having the nucleotide sequence represented by SEQ ID NO: 75999.

[7399] The probes having the nucleotide sequence represented by SEQ ID NOS: 90116, 90117, 90118, 90119, 90120, 90121, 90122, 90123, 90124, 90125, 90126 were selected from the ORFs having the nucleotide sequence represented by SEQ ID NO: 76000.

[7400] The probes having the nucleotide sequence represented by SEQ ID NOS: 90127, 90128, 90129, 90130, 90131, 90132, 90133, 90134, 90135, 90136, 90137 were selected from the ORFs having the nucleotide sequence represented by SEQ ID NO: 76001.

[7401] The probes having the nucleotide sequence represented by SEQ ID NOS: 90138, 90139, 90140, 90141, 90142, 90143, 90144, 90145, 90146, 90147, 90148 were selected from the ORFs having the nucleotide sequence represented by SEQ ID NO: 76002.

[7402] The probes having the nucleotide sequence represented by SEQ ID NOS: 90149, 90150, 90151, 90152, 90153, 90154, 90155, 90156, 90157, 90158, 90159 were selected from the ORFs having the nucleotide sequence represented by SEQ ID NO: 76003.

[7403] The probes having the nucleotide sequence represented by SEQ ID NOS: 90160, 90161, 90162, 90163, 90164, 90165, 90166, 90167, 90168, 90169, 90170 were selected from the ORFs having the nucleotide sequence represented by SEQ ID NO: 76004.

[7404] The probes having the nucleotide sequence represented by SEQ ID NOS: 90171, 90172, 90173, 90174, 90175, 90176, 90177, 90178, 90179, 90180, 90181 were selected from the ORFs having the nucleotide sequence represented by SEQ ID NO: 76005.

[7405] The probes having the nucleotide sequence represented by SEQ ID NOS: 90182, 90183, 90184, 90185, 90186, 90187, 90188, 90189, 90190, 90191, 90192 were selected from the ORFs having the nucleotide sequence represented by SEQ ID NO: 76006.

[7406] The probes having the nucleotide sequence represented by SEQ ID NOS: 90193, 90194, 90195, 90196, 90197, 90198, 90199, 90200, 90201, 90202, 90203 were selected from the ORFs having the nucleotide sequence represented by SEQ ID NO: 76007.

[7407] The probes having the nucleotide sequence represented by SEQ ID NOS: 90204, 90205, 90206, 90207, 90208, 90209, 90210, 90211, 90212, 90213, 90214 were selected from the ORFs having the nucleotide sequence represented by SEQ ID NO: 76008.

[7408] The probes having the nucleotide sequence represented by SEQ ID NOS: 90215, 90216, 90217, 90218, 90219, 90220, 90221, 90222, 90223, 90224, 90225 were selected from the ORFs having the nucleotide sequence represented by SEQ ID NO: 76009.

[7409] The probes having the nucleotide sequence represented by SEQ ID NOS: 90226, 90227, 90228, 90229, 90230, 90231, 90232, 90233, 90234, 90235, 90236 were selected from the ORFs having the nucleotide sequence represented by SEQ ID NO: 76010.

[7410] The probes having the nucleotide sequence represented by SEQ ID NOS: 90237, 90238, 90239, 90240, 90241, 90242, 90243, 90244, 90245, 90246, 90247 were selected from the ORFs having the nucleotide sequence represented by SEQ ID NO: 76011.

[7411] The probes having the nucleotide sequence represented by SEQ ID NOS: 90248, 90249, 90250, 90251, 90252, 90253, 90254, 90255, 90256, 90257, 90258 were selected from the ORFs having the nucleotide sequence represented by SEQ ID NO: 76012.

[7412] The probes having the nucleotide sequence represented by SEQ ID NOS: 90259, 90260, 90261, 90262, 90263, 90264, 90265, 90266, 90267, 90268, 90269 were selected from the ORFs having the nucleotide sequence represented by SEQ ID NO: 76013.

[7413] The probes having the nucleotide sequence represented by SEQ ID NOS: 90270, 90271, 90272, 90273, 90274, 90275, 90276, 90277, 90278, 90279, 90280 were selected from the ORFs having the nucleotide sequence represented by SEQ ID NO: 76014.

[7414] The probes having the nucleotide sequence represented by SEQ ID NOS: 90281, 90282, 90283, 90284, 90285, 90286, 90287, 90288, 90289, 90290, 90291 were selected from the ORFs having the nucleotide sequence represented by SEQ ID NO: 76015.

[7415] The probes having the nucleotide sequence represented by SEQ ID NOS: 90292, 90293, 90294, 90295, 90296, 90297, 90298, 90299, 90300, 90301, 90302 were selected from the ORFs having the nucleotide sequence represented by SEQ ID NO: 76016.

[7416] The probes having the nucleotide sequence represented by SEQ ID NOS: 90303, 90304, 90305, 90306, 90307, 90308, 90309, 90310, 90311, 90312, 90313 were selected from the ORFs having the nucleotide sequence represented by SEQ ID NO: 76017.

[7417] The probes having the nucleotide sequence represented by SEQ ID NOS: 90314, 90315, 90316, 90317, 90318, 90319, 90320, 90321, 90322, 90323, 90324 were selected from the ORFs having the nucleotide sequence represented by SEQ ID NO: 76018.

[7418] The probes having the nucleotide sequence represented by SEQ ID NOS: 90325, 90326, 90327, 90328, 90329, 90330, 90331, 90332, 90333, 90334, 90335 were selected from the ORFs having the nucleotide sequence represented by SEQ ID NO: 76019.

[7419] The probes having the nucleotide sequence represented by SEQ ID NOS: 90336, 90337, 90338, 90339, 90340, 90341, 90342, 90343, 90344, 90345, 90346 were selected from the ORFs having the nucleotide sequence represented by SEQ ID NO: 76020.

[7420] The probes having the nucleotide sequence represented by SEQ ID NOS: 90347, 90348, 90349, 90350, 90351, 90352, 90353, 90354, 90355, 90356, 90357 were selected from the ORFs having the nucleotide sequence represented by SEQ ID NO: 76021.

[7421] The probes having the nucleotide sequence represented by SEQ ID NOS: 90358, 90359, 90360, 90361, 90362, 90363, 90364, 90365, 90366, 90367, 90368 were selected from the ORFs having the nucleotide sequence represented by SEQ ID NO: 76022.

[7422] The probes having the nucleotide sequence represented by SEQ ID NOS: 90369, 90370, 90371, 90372, 90373, 90374, 90375, 90376, 90377, 90378, 90379 were selected from the ORFs having the nucleotide sequence represented by SEQ ID NO: 76023.

[7423] The probes having the nucleotide sequence represented by SEQ ID NOS: 90380, 90381, 90382, 90383, 90384, 90385, 90386, 90387, 90388, 90389, 90390 were selected from the ORFs having the nucleotide sequence represented by SEQ ID NO: 76024.

[7424] The probes having the nucleotide sequence represented by SEQ ID NOS: 90391, 90392, 90393, 90394, 90395, 90396, 90397, 90398, 90399, 90400, 90401 were selected from the ORFs having the nucleotide sequence represented by SEQ ID NO: 76025.

[7425] The probes having the nucleotide sequence represented by SEQ ID NOS: 90402, 90403, 90404, 90405, 90406, 90407, 90408, 90409, 90410, 90411, 90412 were selected from the ORFs having the nucleotide sequence represented by SEQ ID NO: 76026.

[7426] The probes having the nucleotide sequence represented by SEQ ID NOS: 90413, 90414, 90415, 90416, 90417, 90418, 90419, 90420, 90421, 90422, 90423 were selected from the ORFs having the nucleotide sequence represented by SEQ ID NO: 76027.

[7427] The probes having the nucleotide sequence represented by SEQ ID NOS: 90424, 90425, 90426, 90427, 90428, 90429, 90430, 90431, 90432, 90433, 90434 were selected from the ORFs having the nucleotide sequence represented by SEQ ID NO: 76028.

[7428] The probes having the nucleotide sequence represented by SEQ ID NOS: 90435, 90436, 90437, 90438, 90439, 90440, 90441, 90442, 90443, 90444, 90445 were selected from the ORFs having the nucleotide sequence represented by SEQ ID NO: 76029.

[7429] The probes having the nucleotide sequence represented by SEQ ID NOS: 90446, 90447, 90448, 90449, 90450, 90451, 90452, 90453, 90454, 90455, 90456 were selected from the ORFs having the nucleotide sequence represented by SEQ ID NO: 76030.

[7430] The probes having the nucleotide sequence represented by SEQ ID NOS: 90457, 90458, 90459, 90460, 90461, 90462, 90463, 90464, 90465, 90466, 90467 were selected from the ORFs having the nucleotide sequence represented by SEQ ID NO: 76031.

[7431] The probes having the nucleotide sequence represented by SEQ ID NOS: 90468, 90469, 90470, 90471, 90472, 90473, 90474, 90475, 90476, 90477, 90478 were selected from the ORFs having the nucleotide sequence represented by SEQ ID NO: 76032.

[7432] The probes having the nucleotide sequence represented by SEQ ID NOS: 90479, 90480, 90481, 90482, 90483, 90484, 90485, 90486, 90487, 90488, 90489 were selected from the ORFs having the nucleotide sequence represented by SEQ ID NO: 76033.

[7433] The probes having the nucleotide sequence represented by SEQ ID NOS: 90490, 90491, 90492, 90493, 90494, 90495, 90496, 90497, 90498, 90499, 90500 were selected from the ORFs having the nucleotide sequence represented by SEQ ID NO: 76034.

[7434] The probes having the nucleotide sequence represented by SEQ ID NOS: 90501, 90502, 90503, 90504, 90505, 90506, 90507, 90508, 90509, 90510, 90511 were selected from the ORFs having the nucleotide sequence represented by SEQ ID NO: 76035.

[7435] The probes having the nucleotide sequence represented by SEQ ID NOS: 90512, 90513, 90514, 90515, 90516, 90517, 90518, 90519, 90520, 90521, 90522 were selected from the ORFs having the nucleotide sequence represented by SEQ ID NO: 76036.

[7436] The probes having the nucleotide sequence represented by SEQ ID NOS: 90523, 90524, 90525, 90526, 90527, 90528, 90529, 90530, 90531, 90532, 90533 were selected from the ORFs having the nucleotide sequence represented by SEQ ID NO: 76037.

[7437] The probes having the nucleotide sequence represented by SEQ ID NOS: 90534, 90535, 90536, 90537, 90538, 90539, 90540, 90541, 90542, 90543, 90544 were selected from the ORFs having the nucleotide sequence represented by SEQ ID NO: 76038.

[7438] The probes having the nucleotide sequence represented by SEQ ID NOS: 90545, 90546, 90547, 90548, 90549, 90550, 90551, 90552, 90553, 90554, 90555 were selected from the ORFs having the nucleotide sequence represented by SEQ ID NO: 76039.

[7439] The probes having the nucleotide sequence represented by SEQ ID NOS: 90556, 90557, 90558, 90559, 90560, 90561, 90562, 90563, 90564, 90565, 90566 were selected from the ORFs having the nucleotide sequence represented by SEQ ID NO: 76040.

[7440] The probes having the nucleotide sequence represented by SEQ ID NOS: 90567, 90568, 90569, 90570, 90571, 90572, 90573, 90574, 90575, 90576, 90577 were selected from the ORFs having the nucleotide sequence represented by SEQ ID NO: 76041.

[7441] The probes having the nucleotide sequence represented by SEQ ID NOS: 90578, 90579, 90580, 90581, 90582, 90583, 90584, 90585, 90586, 90587, 90588 were selected from the ORFs having the nucleotide sequence represented by SEQ ID NO: 76042.

[7442] The probes having the nucleotide sequence represented by SEQ ID NOS: 90589, 90590, 90591, 90592, 90593, 90594, 90595, 90596, 90597, 90598, 90599 were selected from the ORFs having the nucleotide sequence represented by SEQ ID NO: 76043.

[7443] The probes having the nucleotide sequence represented by SEQ ID NOS: 90600, 90601, 90602, 90603, 90604, 90605, 90606, 90607, 90608, 90609, 90610 were selected from the ORFs having the nucleotide sequence represented by SEQ ID NO: 76044.

[7444] The probes having the nucleotide sequence represented by SEQ ID NOS: 90611, 90612, 90613, 90614, 90615, 90616, 90617, 90618, 90619, 90620, 90621 were selected from the ORFs having the nucleotide sequence represented by SEQ ID NO: 76045.

[7445] The probes having the nucleotide sequence represented by SEQ ID NOS: 90622, 90623, 90624, 90625, 90626, 90627, 90628, 90629, 90630, 90631, 90632 were selected from the ORFs having the nucleotide sequence represented by SEQ ID NO: 76046.

[7446] The probes having the nucleotide sequence represented by SEQ ID NOS: 90633, 90634, 90635, 90636, 90637, 90638, 90639, 90640, 90641, 90642, 90643 were selected from the ORFs having the nucleotide sequence represented by SEQ ID NO: 76047.

[7447] The probes having the nucleotide sequence represented by SEQ ID NOS: 90644, 90645, 90646, 90647, 90648, 90649, 90650, 90651, 90652, 90653, 90654 were selected from the ORFs having the nucleotide sequence represented by SEQ ID NO: 76048.

[7448] The probes having the nucleotide sequence represented by SEQ ID NOS: 90655, 90656, 90657, 90658, 90659, 90660, 90661, 90662, 90663, 90664, 90665 were selected from the ORFs having the nucleotide sequence represented by SEQ ID NO: 76049.

[7449] The probes having the nucleotide sequence represented by SEQ ID NOS: 90666, 90667, 90668, 90669, 90670, 90671,

[7450] 90672, 90673, 90674, 90675, 90676 were selected from the ORFs having the nucleotide sequence represented by SEQ ID NO: 76050.

[7451] The probes having the nucleotide sequence represented by SEQ ID NOS: 90677, 90678, 90679, 90680, 90681, 90682, 90683, 90684, 90685, 90686, 90687 were selected from the ORFs having the nucleotide sequence represented by SEQ ID NO: 76051.

[7452] The probes having the nucleotide sequence represented by SEQ ID NOS: 90688, 90689, 90690, 90691, 90692, 90693, 90694, 90695, 90696, 90697, 90698 were selected from the ORFs having the nucleotide sequence represented by SEQ ID NO: 76052.

[7453] The probes having the nucleotide sequence represented by SEQ ID NOS: 90699, 90700, 90701, 90702, 90703, 90704, 90705, 90706, 90707, 90708, 90709 were selected from the ORFs having the nucleotide sequence represented by SEQ ID NO: 76053.

[7454] The probes having the nucleotide sequence represented by SEQ ID NOS: 90710, 90711, 90712, 90713, 90714, 90715, 90716, 90717, 90718, 90719, 90720 were selected from the ORFs having the nucleotide sequence represented by SEQ ID NO: 76054.

[7455] The probes having the nucleotide sequence represented by SEQ ID NOS: 90721, 90722, 90723, 90724, 90725, 90726, 90727, 90728, 90729, 90730, 90731 were selected from the ORFs having the nucleotide sequence represented by SEQ ID NO: 76055.

[7456] The probes having the nucleotide sequence represented by SEQ ID NOS: 90732, 90733, 90734, 90735, 90736, 90737, 90738, 90739, 90740, 90741, 90742 were selected from the ORFs having the nucleotide sequence represented by SEQ ID NO: 76056.

[7457] The probes having the nucleotide sequence represented by SEQ ID NOS: 90743, 90744, 90745, 90746, 90747, 90748, 90749, 90750, 90751, 90752, 90753 were selected from the ORFs having the nucleotide sequence represented by SEQ ID NO: 76057.

[7458] The probes having the nucleotide sequence represented by SEQ ID NOS: 90754, 90755, 90756, 90757, 90758, 90759, 90760, 90761, 90762, 90763, 90764 were selected from the ORFs having the nucleotide sequence represented by SEQ ID NO: 76058.

[7459] The probes having the nucleotide sequence represented by SEQ ID NOS: 90765, 90766, 90767, 90768, 90769, 90770, 90771, 90772, 90773, 90774, 90775 were selected from the ORFs having the nucleotide sequence represented by SEQ ID NO: 76059.

[7460] The probes having the nucleotide sequence represented by SEQ ID NOS: 90776, 90777, 90778, 90779, 90780, 90781, 90782, 90783, 90784, 90785, 90786 were selected from the ORFs having the nucleotide sequence represented by SEQ ID NO: 76060.

[7461] The probes having the nucleotide sequence represented by SEQ ID NOS: 90787, 90788, 90789, 90790, 90791, 90792, 90793, 90794, 90795, 90796, 90797 were selected from the ORFs having the nucleotide sequence represented by SEQ ID NO: 76061.

[7462] The probes having the nucleotide sequence represented by SEQ ID NOS: 90798, 90799, 90800, 90801, 90802, 90803, 90804, 90805, 90806, 90807, 90808 were selected from the ORFs having the nucleotide sequence represented by SEQ ID NO: 76062.

[7463] The probes having the nucleotide sequence represented by SEQ ID NOS: 90809, 90810, 90811, 90812, 90813, 90814, 90815, 90816, 90817, 90818, 90819 were selected from the ORFs having the nucleotide sequence represented by SEQ ID NO: 76063.

[7464] The probes having the nucleotide sequence represented by SEQ ID NOS: 90820, 90821, 90822, 90823, 90824, 90825, 90826, 90827, 90828, 90829, 90830 were selected from the ORFs having the nucleotide sequence represented by SEQ ID NO: 76064.

[7465] The probes having the nucleotide sequence represented by SEQ ID NOS: 90831, 90832, 90833, 90834, 90835, 90836, 90837, 90838, 90839, 90840, 90841 were selected from the ORFs having the nucleotide sequence represented by SEQ ID NO: 76065.

[7466] The probes having the nucleotide sequence represented by SEQ ID NOS: 90842, 90843, 90844, 90845, 90846, 90847, 90848, 90849, 90850, 90851, 90852 were selected from the ORFs having the nucleotide sequence represented by SEQ ID NO: 76066.

[7467] The probes having the nucleotide sequence represented by SEQ ID NOS: 90853, 90854, 90855, 90856, 90857, 90858, 90859, 90860, 90861, 90862, 90863 were selected from the ORFs having the nucleotide sequence represented by SEQ ID NO: 76067.

[7468] The probes having the nucleotide sequence represented by SEQ ID NOS: 90864, 90865, 90866, 90867, 90868, 90869, 90870, 90871, 90872, 90873, 90874 were selected from the ORFs having the nucleotide sequence represented by SEQ ID NO: 76068.

[7469] The probes having the nucleotide sequence represented by SEQ ID NOS: 90875, 90876, 90877, 90878, 90879, 90880, 90881, 90882, 90883, 90884, 90885 were selected from the ORFs having the nucleotide sequence represented by SEQ ID NO: 76069.

[7470] The probes having the nucleotide sequence represented by SEQ ID NOS: 90886, 90887, 90888, 90889, 90890, 90891, 90892, 90893, 90894, 90895, 90896 were selected from the ORFs having the nucleotide sequence represented by SEQ ID NO: 76070.

[7471] The probes having the nucleotide sequence represented by SEQ ID NOS: 90897, 90898, 90899, 90900, 90901, 90902, 90903, 90904, 90905, 90906, 90907 were selected from the ORFs having the nucleotide sequence represented by SEQ ID NO: 76071.

[7472] The probes having the nucleotide sequence represented by SEQ ID NOS: 90908, 90909, 90910, 90911, 90912, 90913, 90914, 90915, 90916, 90917, 90918 were selected from the ORFs having the nucleotide sequence represented by SEQ ID NO: 76072.

[7473] The probes having the nucleotide sequence represented by SEQ ID NOS: 90919, 90920, 90921, 90922, 90923, 90924, 90925, 90926, 90927, 90928, 90929 were selected from the ORFs having the nucleotide sequence represented by SEQ ID NO: 76073.

[7474] The probes having the nucleotide sequence represented by SEQ ID NOS: 90930, 90931, 90932, 90933, 90934, 90935, 90936, 90937, 90938, 90939, 90940 were selected from the ORFs having the nucleotide sequence represented by SEQ ID NO: 76074.

[7475] The probes having the nucleotide sequence represented by SEQ ID NOS: 90941, 90942, 90943, 90944, 90945, 90946, 90947, 90948, 90949, 90950, 90951 were selected from the ORFs having the nucleotide sequence represented by SEQ ID NO: 76075.

[7476] The probes having the nucleotide sequence represented by SEQ ID NOS: 90952, 90953, 90954, 90955, 90956, 90957, 90958, 90959, 90960, 90961, 90962 were selected from the ORFs having the nucleotide sequence represented by SEQ ID NO: 76076.

[7477] The probes having the nucleotide sequence represented by SEQ ID NOS: 90963, 90964, 90965, 90966, 90967, 90968, 90969, 90970, 90971, 90972, 90973 were selected from the ORFs having the nucleotide sequence represented by SEQ ID NO: 76077.

[7478] The probes having the nucleotide sequence represented by SEQ ID NOS: 90974, 90975, 90976, 90977, 90978, 90979, 90980, 90981, 90982, 90983, 90984 were selected from the ORFs having the nucleotide sequence represented by SEQ ID NO: 76078.

[7479] The probes having the nucleotide sequence represented by SEQ ID NOS: 90985, 90986, 90987, 90988, 90989, 90990, 90991, 90992, 90993, 90994, 90995 were selected from the ORFs having the nucleotide sequence represented by SEQ ID NO: 76079.

[7480] The probes having the nucleotide sequence represented by SEQ ID NOS: 90996, 90997, 90998, 90999, 91000, 91001, 91002, 91003, 91004, 91005, 91006 were selected from the ORFs having the nucleotide sequence represented by SEQ ID NO: 76080.

[7481] The probes having the nucleotide sequence represented by SEQ ID NOS: 91007, 91008, 91009, 91010, 91011, 91012, 91013, 91014, 91015, 91016, 91017 were selected from the ORFs having the nucleotide sequence represented by SEQ ID NO: 76081.

[7482] The probes having the nucleotide sequence represented by SEQ ID NOS: 91018, 91019, 91020, 91021, 91022, 91023, 91024, 91025, 91026, 91027, 91028 were selected from the ORFs having the nucleotide sequence represented by SEQ ID NO: 76082.

[7483] The probes having the nucleotide sequence represented by SEQ ID NOS: 91029, 91030, 91031, 91032, 91033, 91034, 91035, 91036, 91037, 91038, 91039 were selected from the ORFs having the nucleotide sequence represented by SEQ ID NO: 76083.

[7484] The probes having the nucleotide sequence represented by SEQ ID NOS: 91040, 91041, 91042, 91043, 91044, 91045, 91046, 91047, 91048, 91049, 91050 were selected from the ORFs having the nucleotide sequence represented by SEQ ID NO: 76084.

[7485] The probes having the nucleotide sequence represented by SEQ ID NOS: 91051, 91052, 91053, 91054, 91055, 91056, 91057, 91058, 91059, 91060, 91061 were selected from the ORFs having the nucleotide sequence represented by SEQ ID NO: 76085.

[7486] The probes having the nucleotide sequence represented by SEQ ID NOS: 91062, 91063, 91064, 91065, 91066, 91067, 91068, 91069, 91070, 91071, 91072 were selected from the ORFs having the nucleotide sequence represented by SEQ ID NO: 76086.

[7487] The probes having the nucleotide sequence represented by SEQ ID NOS: 91073, 91074, 91075, 91076, 91077, 91078, 91079, 91080, 91081, 91082, 91083 were selected from the ORFs having the nucleotide sequence represented by SEQ ID NO: 76087.

[7488] The probes having the nucleotide sequence represented by SEQ ID NOS: 91084, 91085, 91086, 91087, 91088, 91089, 91090, 91091, 91092, 91093, 91094 were selected from the ORFs having the nucleotide sequence represented by SEQ ID NO: 76088.

[7489] The probes having the nucleotide sequence represented by SEQ ID NOS: 91095, 91096, 91097, 91098, 91099, 91100, 91101, 91102, 91103, 91104, 91105 were selected from the ORFs having the nucleotide sequence represented by SEQ ID NO: 76089.

[7490] The probes having the nucleotide sequence represented by SEQ ID NOS: 91106, 91107, 91108, 91109, 91110, 91111, 91112, 91113, 91114, 91115, 91116 were selected from the ORFs having the nucleotide sequence represented by SEQ ID NO: 76090.

[7491] The probes having the nucleotide sequence represented by SEQ ID NOS: 91117, 91118, 91119, 91120, 91121, 91122, 91123, 91124, 91125, 91126, 91127 were selected from the ORFs having the nucleotide sequence represented by SEQ ID NO: 76091.

[7492] The probes having the nucleotide sequence represented by SEQ ID NOS: 91128, 91129, 91130, 91131, 91132, 91133, 91134, 91135, 91136, 91137, 91138 were selected from the ORFs having the nucleotide sequence represented by SEQ ID NO: 76092.

[7493] The probes having the nucleotide sequence represented by SEQ ID NOS: 91139, 91140, 91141, 91142, 91143, 91144, 91145, 91146, 91147, 91148, 91149 were selected from the ORFs having the nucleotide sequence represented by SEQ ID NO: 76093.

[7494] The probes having the nucleotide sequence represented by SEQ ID NOS: 91150, 91151, 91152, 91153, 91154, 91155, 91156, 91157, 91158, 91159, 91160 were selected from the ORFs having the nucleotide sequence represented by SEQ ID NO: 76094.

[7495] The probes having the nucleotide sequence represented by SEQ ID NOS: 91161, 91162, 91163, 91164, 91165, 91166, 91167, 91168, 91169, 91170, 91171 were selected from the ORFs having the nucleotide sequence represented by SEQ ID NO: 76095.

[7496] The probes having the nucleotide sequence represented by SEQ ID NOS: 91172, 91173, 91174, 91175, 91176, 91177, 91178, 91179, 91180, 91181, 91182 were selected from the ORFs having the nucleotide sequence represented by SEQ ID NO: 76096.

[7497] The probes having the nucleotide sequence represented by SEQ ID NOS: 91183, 91184, 91185, 91186, 91187, 91188, 91189, 91190, 91191, 91192, 91193 were selected from the ORFs having the nucleotide sequence represented by SEQ ID NO: 76097.

[7498] The probes having the nucleotide sequence represented by SEQ ID NOS: 91194, 91195, 91196, 91197, 91198, 91199, 91200, 91201, 91202, 91203, 91204 were selected from the ORFs having the nucleotide sequence represented by SEQ ID NO: 76098.

[7499] The probes having the nucleotide sequence represented by SEQ ID NOS: 91205, 91206, 91207, 91208, 91209, 91210, 91211, 91212, 91213, 91214, 91215 were selected from the ORFs having the nucleotide sequence represented by SEQ ID NO: 76099.

[7500] The probes having the nucleotide sequence represented by SEQ ID NOS: 91216, 91217, 91218, 91219, 91220, 91221, 91222, 91223, 91224, 91225, 91226 were selected from the ORFs having the nucleotide sequence represented by SEQ ID NO: 76100.

[7501] The probes having the nucleotide sequence represented by SEQ ID NOS: 91227, 91228, 91229, 91230, 91231, 91232, 91233, 91234, 91235, 91236, 91237 were selected from the ORFs having the nucleotide sequence represented by SEQ ID NO: 76101.

[7502] The probes having the nucleotide sequence represented by SEQ ID NOS: 91238, 91239, 91240, 91241, 91242, 91243, 91244, 91245, 91246, 91247, 91248, 91249, 91250, 91251, 91252, 91253, 91254, 91255, 91256, 91257, 91258, 91259 were selected from the ORFs having the nucleotide sequence represented by SEQ ID NO: 76102.

[7503] The probes having the nucleotide sequence represented by SEQ ID NOS: 91260, 91261, 91262, 91263, 91264, 91265, 91266, 91267, 91268, 91269, 91270 were selected from the ORFs having the nucleotide sequence represented by SEQ ID NO: 76103.

[7504] The probes having the nucleotide sequence represented by SEQ ID NOS: 91271, 91272, 91273, 91274, 91275, 91276, 91277, 91278, 91279, 91280, 91281 were selected from the ORFs having the nucleotide sequence represented by SEQ ID NO: 76104.

[7505] The probes having the nucleotide sequence represented by SEQ ID NOS: 91282, 91283, 91284, 91285, 91286, 91287, 91288, 91289, 91290, 91291, 91292 were selected from the ORFs having the nucleotide sequence represented by SEQ ID NO: 76105.

[7506] The probes having the nucleotide sequence represented by SEQ ID NOS: 91293, 91294, 91295, 91296, 91297, 91298, 91299, 91300, 91301, 91302, 91303 were selected from the ORFs having the nucleotide sequence represented by SEQ ID NO: 76106.

[7507] The probes having the nucleotide sequence represented by SEQ ID NOS: 91304, 91305, 91306, 91307, 91308, 91309, 91310, 91311, 91312, 91313, 91314 were selected from the ORFs having the nucleotide sequence represented by SEQ ID NO: 76107.

[7508] The probes having the nucleotide sequence represented by SEQ ID NOS: 91315, 91316, 91317, 91318, 91319, 91320, 91321, 91322, 91323, 91324, 91325 were selected from the ORFs having the nucleotide sequence represented by SEQ ID NO: 76108.

[7509] The probes having the nucleotide sequence represented by SEQ ID NOS: 91326, 91327, 91328, 91329, 91330, 91331, 91332, 91333, 91334, 91335, 91336 were selected from the ORFs having the nucleotide sequence represented by SEQ ID NO: 76109.

[7510] The probes having the nucleotide sequence represented by SEQ ID NOS: 91337, 91338, 91339, 91340, 91341, 91342, 91343, 91344, 91345, 91346, 91347 were selected from the ORFs having the nucleotide sequence represented by SEQ ID NO: 76110.

[7511] The probes having the nucleotide sequence represented by SEQ ID NOS: 91348, 91349, 91350, 91351, 91352, 91353, 91354, 91355, 91356, 91357, 91358 were selected from the ORFs having the nucleotide sequence represented by SEQ ID NO: 76111.

[7512] The probes having the nucleotide sequence represented by SEQ ID NOS: 91359, 91360, 91361, 91362, 91363, 91364, 91365, 91366, 91367, 91368, 91369 were selected from the ORFs having the nucleotide sequence represented by SEQ ID NO: 76112.

[7513] The probes having the nucleotide sequence represented by SEQ ID NOS: 91370, 91371, 91372, 91373, 91374, 91375, 91376, 91377, 91378, 91379, 91380 were selected from the ORFs having the nucleotide sequence represented by SEQ ID NO: 76113.

[7514] The probes having the nucleotide sequence represented by SEQ ID NOS: 91381, 91382, 91383, 91384, 91385, 91386, 91387, 91388, 91389, 91390, 91391 were selected from the ORFs having the nucleotide sequence represented by SEQ ID NO: 76114.

[7515] The probes having the nucleotide sequence represented by SEQ ID NOS: 91392, 91393, 91394, 91395, 91396, 91397, 91398, 91399, 91400, 91401, 91402 were selected from the ORFs having the nucleotide sequence represented by SEQ ID NO: 76115.

[7516] The probes having the nucleotide sequence represented by SEQ ID NOS: 91403, 91404, 91405, 91406, 91407, 91408, 91409, 91410, 91411, 91412, 91413 were selected from the ORFs having the nucleotide sequence represented by SEQ ID NO: 76116.

[7517] The probes having the nucleotide sequence represented by SEQ ID NOS: 91414, 91415, 91416, 91417, 91418, 91419, 91420, 91421, 91422, 91423, 91424 were selected from the ORFs having the nucleotide sequence represented by SEQ ID NO: 76117.

[7518] The probes having the nucleotide sequence represented by SEQ ID NOS: 91425, 91426, 91427, 91428, 91429, 91430, 91431, 91432, 91433, 91434, 91435 were selected from the ORFs having the nucleotide sequence represented by SEQ ID NO: 76118.

[7519] The probes having the nucleotide sequence represented by SEQ ID NOS: 91436, 91437, 91438, 91439, 91440, 91441, 91442, 91443, 91444, 91445, 91446 were selected from the ORFs having the nucleotide sequence represented by SEQ ID NO: 76119.

[7520] The probes having the nucleotide sequence represented by SEQ ID NOS: 91447, 91448, 91449, 91450, 91451, 91452, 91453, 91454, 91455, 91456, 91457 were selected from the ORFs having the nucleotide sequence represented by SEQ ID NO: 76120.

[7521] The probes having the nucleotide sequence represented by SEQ ID NOS: 91458, 91459, 91460, 91461, 91462, 91463, 91464, 91465, 91466, 91467, 91468 were selected from the ORFs having the nucleotide sequence represented by SEQ ID NO: 76121.

[7522] The probes having the nucleotide sequence represented by SEQ ID NOS: 91469, 91470, 91471, 91472, 91473, 91474, 91475, 91476, 91477, 91478, 91479 were selected from the ORFs having the nucleotide sequence represented by SEQ ID NO: 76122.

[7523] The probes having the nucleotide sequence represented by SEQ ID NOS: 91480, 91481, 91482, 91483, 91484, 91485, 91486, 91487, 91488, 91489, 91490 were selected from the ORFs having the nucleotide sequence represented by SEQ ID NO: 76123.

[7524] The probes having the nucleotide sequence represented by SEQ ID NOS: 91491, 91492, 91493, 91494, 91495, 91496, 91497, 91498, 91499, 91500, 91501 were selected from the ORFs having the nucleotide sequence represented by SEQ ID NO: 76124.

[7525] The probes having the nucleotide sequence represented by SEQ ID NOS: 91502, 91503, 91504, 91505, 91506, 91507, 91508, 91509, 91510, 91511, 91512 were selected from the ORFs having the nucleotide sequence represented by SEQ ID NO: 76125.

[7526] The probes having the nucleotide sequence represented by SEQ ID NOS: 91513, 91514, 91515, 91516, 91517, 91518, 91519, 91520, 91521, 91522, 91523 were selected from the ORFs having the nucleotide sequence represented by SEQ ID NO: 76126.

[7527] The probes having the nucleotide sequence represented by SEQ ID NOS: 91524, 91525, 91526, 91527, 91528, 91529, 91530, 91531, 91532, 91533, 91534, 91535, 91536, 91537, 91538, 91539, 91540, 91541, 91542, 91543, 91544, 91545 were selected from the ORFs having the nucleotide sequence represented by SEQ ID NO: 76127.

[7528] The probes having the nucleotide sequence represented by SEQ ID NOS: 91546, 91547, 91548, 91549, 91550, 91551, 91552, 91553, 91554, 91555, 91556 were selected from the ORFs having the nucleotide sequence represented by SEQ ID NO: 76128.

[7529] The probes having the nucleotide sequence represented by SEQ ID NOS: 91557, 91558, 91559, 91560, 91561, 91562, 91563, 91564, 91565, 91566, 91567 were selected from the ORFs having the nucleotide sequence represented by SEQ ID NO: 76129.

[7530] The probes having the nucleotide sequence represented by SEQ ID NOS: 91568, 91569, 91570, 91571, 91572, 91573, 91574, 91575, 91576, 91577, 91578 were selected from the ORFs having the nucleotide sequence represented by SEQ ID NO: 76130.

[7531] The probes having the nucleotide sequence represented by SEQ ID NOS: 91579, 91580, 91581, 91582, 91583, 91584, 91585, 91586, 91587, 91588, 91589 were selected from the ORFs having the nucleotide sequence represented by SEQ ID NO: 76131.

[7532] The probes having the nucleotide sequence represented by SEQ ID NOS: 91590, 91591, 91592, 91593, 91594, 91595, 91596, 91597, 91598, 91599, 91600 were selected from the ORFs having the nucleotide sequence represented by SEQ ID NO: 76132.

[7533] The probes having the nucleotide sequence represented by SEQ ID NOS: 91601, 91602, 91603, 91604, 91605, 91606, 91607, 91608, 91609, 91610, 91611 were selected from the ORFs having the nucleotide sequence represented by SEQ ID NO: 76133.

[7534] The probes having the nucleotide sequence represented by SEQ ID NOS: 91612, 91613, 91614, 91615, 91616, 91617, 91618, 91619, 91620, 91621, 91622 were selected from the ORFs having the nucleotide sequence represented by SEQ ID NO: 76134.

[7535] The probes having the nucleotide sequence represented by SEQ ID NOS: 91623, 91624, 91625, 91626, 91627, 91628, 91629, 91630, 91631, 91632, 91633 were selected from the ORFs having the nucleotide sequence represented by SEQ ID NO: 76135.

[7536] The probes having the nucleotide sequence represented by SEQ ID NOS: 91634, 91635, 91636, 91637, 91638, 91639, 91640, 91641, 91642, 91643, 91644 were selected from the ORFs having the nucleotide sequence represented by SEQ ID NO: 76136.

[7537] The probes having the nucleotide sequence represented by SEQ ID NOS: 91645, 91646, 91647, 91648, 91649, 91650, 91651, 91652, 91653, 91654, 91655 were selected from the ORFs having the nucleotide sequence represented by SEQ ID NO: 76137.

[7538] The probes having the nucleotide sequence represented by SEQ ID NOS: 91656, 91657, 91658, 91659, 91660, 91661, 91662, 91663, 91664, 91665, 91666 were selected from the ORFs having the nucleotide sequence represented by SEQ ID NO: 76138.

[7539] The probes having the nucleotide sequence represented by SEQ ID NOS: 91667, 91668, 91669, 91670, 91671, 91672, 91673, 91674, 91675, 91676, 91677 were selected from the ORFs having the nucleotide sequence represented by SEQ ID NO: 76139.

[7540] The probes having the nucleotide sequence represented by SEQ ID NOS: 91678, 91679, 91680, 91681, 91682, 91683, 91684, 91685, 91686, 91687, 91688 were selected from the ORFs having the nucleotide sequence represented by SEQ ID NO: 76140.

[7541] The probes having the nucleotide sequence represented by SEQ ID NOS: 91689, 91690, 91691, 91692, 91693, 91694, 91695, 91696, 91697, 91698, 91699 were selected from the ORFs having the nucleotide sequence represented by SEQ ID NO: 76141.

[7542] The probes having the nucleotide sequence represented by SEQ ID NOS: 91700, 91701, 91702, 91703, 91704, 91705, 91706, 91707, 91708, 91709, 91710 were selected from the ORFs having the nucleotide sequence represented by SEQ ID NO: 76142.

[7543] The probes having the nucleotide sequence represented by SEQ ID NOS: 91711, 91712, 91713, 91714, 91715, 91716, 91717, 91718, 91719, 91720, 91721 were selected from the ORFs having the nucleotide sequence represented by SEQ ID NO: 76143.

[7544] The probes having the nucleotide sequence represented by SEQ ID NOS: 91722, 91723, 91724, 91725, 91726, 91727, 91728, 91729, 91730, 91731, 91732 were selected from the ORFs having the nucleotide sequence represented by SEQ ID NO: 76144.

[7545] The probes having the nucleotide sequence represented by SEQ ID NOS: 91733, 91734, 91735, 91736, 91737, 91738, 91739, 91740, 91741, 91742, 91743 were selected from the ORFs having the nucleotide sequence represented by SEQ ID NO: 76145.

[7546] The probes having the nucleotide sequence represented by SEQ ID NOS: 91744, 91745, 91746, 91747, 91748, 91749, 91750, 91751, 91752, 91753, 91754 were selected from the ORFs having the nucleotide sequence represented by SEQ ID NO: 76146.

[7547] The probes having the nucleotide sequence represented by SEQ ID NOS: 91755, 91756, 91757, 91758, 91759, 91760, 91761, 91762, 91763, 91764, 91765 were selected from the ORFs having the nucleotide sequence represented by SEQ ID NO: 76147.

[7548] The probes having the nucleotide sequence represented by SEQ ID NOS: 91766, 91767, 91768, 91769, 91770, 91771, 9177.2, 91773, 91774, 91775, 91776 were selected from the ORFs having the nucleotide sequence represented by SEQ ID NO: 76148.

[7549] The probes having the nucleotide sequence represented by SEQ ID NOS: 91777, 91778, 91779, 91780, 91781, 91782, 91783, 91784, 91785, 91786, 91787 were selected from the ORFs having the nucleotide sequence represented by SEQ ID NO: 76149.

[7550] The probes having the nucleotide sequence represented by SEQ ID NOS: 91788, 91789, 91790, 91791, 91792, 91793, 91794, 91795, 91796, 91797, 91798 were selected from the ORFs having the nucleotide sequence represented by SEQ ID NO: 76150.

[7551] The probes having the nucleotide sequence represented by SEQ ID NOS: 91799, 91800, 91801, 91802, 91803, 91804, 91805, 91806, 91807, 91808, 91809 were selected from the ORFs having the nucleotide sequence represented by SEQ ID NO: 76151.

[7552] The probes having the nucleotide sequence represented by SEQ ID NOS: 91810, 91811, 91812, 91813, 91814, 91815, 91816, 91817, 91818, 91819, 91820 were selected from the ORFs having the nucleotide sequence represented by SEQ ID NO: 76152.

[7553] The probes having the nucleotide sequence represented by SEQ ID NOS: 91821, 91822, 91823, 91824, 91825, 91826, 91827, 91828, 91829, 91830, 91831 were selected from the ORFs having the nucleotide sequence represented by SEQ ID NO: 76153.

[7554] The probes having the nucleotide sequence represented by SEQ ID NOS: 91832, 91833, 91834, 91835, 91836, 91837, 91838, 91839, 91840, 91841, 91842 were selected from the ORFs having the nucleotide sequence represented by SEQ ID NO: 76154.

[7555] The probes having the nucleotide sequence represented by SEQ ID NOS: 91843, 91844, 91845, 91846, 91847, 91848, 91849, 91850, 91851, 91852, 91853 were selected from the ORFs having the nucleotide sequence represented by SEQ ID NO: 76155.

[7556] The probes having the nucleotide sequence represented by SEQ ID NOS: 91854, 91855, 91856, 91857, 91858, 91859, 91860, 91861, 91862, 91863, 91864 were selected from the ORFs having the nucleotide sequence represented by SEQ ID NO: 76156.

[7557] The probes having the nucleotide sequence represented by SEQ ID NOS: 91865, 91866, 91867, 91868, 91869, 91870, 91871, 91872, 91873, 91874, 91875 were selected from the ORFs having the nucleotide sequence represented by SEQ ID NO: 76157.

[7558] The probes having the nucleotide sequence represented by SEQ ID NOS: 91876, 91877, 91878, 91879, 91880, 91881, 91882, 91883, 91884, 91885, 91886 were selected from the ORFs having the nucleotide sequence represented by SEQ ID NO: 76158.

[7559] The probes having the nucleotide sequence represented by SEQ ID NOS: 91887, 91888, 91889, 91890, 91891, 91892, 91893, 91894, 91895, 91896, 91897 were selected from the ORFs having the nucleotide sequence represented by SEQ ID NO: 76159.

[7560] The probes having the nucleotide sequence represented by SEQ ID NOS: 91898, 91899, 91900, 91901, 91902, 91903, 91904, 91905, 91906, 91907, 91908 were selected from the ORFs having the nucleotide sequence represented by SEQ ID NO: 76160.

[7561] The probes having the nucleotide sequence represented by SEQ ID NOS: 91909, 91910, 91911, 91912, 91913, 91914, 91915, 91916, 91917, 91918, 91919 were selected from the ORFs having the nucleotide sequence represented by SEQ ID NO: 76161.

[7562] The probes having the nucleotide sequence represented by SEQ ID NOS: 91920, 91921, 91922, 91923, 91924, 91925, 91926, 91927, 91928, 91929, 91930 were selected from the ORFs having the nucleotide sequence represented by SEQ ID NO: 76162.

[7563] The probes having the nucleotide sequence represented by SEQ ID NOS: 91931, 91932, 91933, 91934, 91935, 91936, 91937, 91938,. 91939, 91940, 91941 were selected from the ORFs having the nucleotide sequence represented by SEQ ID NO: 76163.

[7564] The probes having the nucleotide sequence represented by SEQ ID NOS: 91942, 91943, 91944, 91945, 91946, 91947, 91948, 91949, 91950, 91951, 91952 were selected from the ORFs having the nucleotide sequence represented by SEQ ID NO: 76164.

[7565] The probes having the nucleotide sequence represented by SEQ ID NOS: 91953, 91954, 91955, 91956, 91957, 91958, 91959, 91960, 91961, 91962, 91963 were selected from the ORFs having the nucleotide sequence represented by SEQ ID NO: 76165.

[7566] The probes having the nucleotide sequence represented by SEQ ID NOS: 91964, 91965, 91966, 91967, 91968, 91969, 91970, 91971, 91972, 91973, 91974 were selected from the ORFs having the nucleotide sequence represented by SEQ ID NO: 76166.

[7567] The probes having the nucleotide sequence represented by SEQ ID NOS: 91975, 91976, 91977, 91978, 91979, 91980, 91981, 91982, 91983, 91984, 91985 were selected from the ORFs having the nucleotide sequence represented by SEQ ID NO: 76167.

[7568] The probes having the nucleotide sequence represented by SEQ ID NOS: 91986, 91987, 91988, 91989, 91990, 91991, 91992, 91993, 91994, 91995, 91996 were selected from the ORFs having the nucleotide sequence represented by SEQ ID NO: 76168.

[7569] The probes having the nucleotide sequence represented by SEQ ID NOS: 91997, 91998, 91999, 92000, 92001, 92002, 92003, 92004, 92005, 92006, 92007 were selected from the ORFs having the nucleotide sequence represented by SEQ ID NO: 76169.

[7570] The probes having the nucleotide sequence represented by SEQ ID NOS: 92008, 92009, 92010, 92011, 92012, 92013, 92014, 92015, 92016, 92017, 92018 were selected from the ORFs having the nucleotide sequence represented by SEQ ID NO: 76170.

[7571] The probes having the nucleotide sequence represented by SEQ ID NOS: 92019, 92020, 92021, 92022, 92023, 92024, 92025, 92026, 92027, 92028, 92029 were selected from the ORFs having the nucleotide sequence represented by SEQ ID NO: 76171.

[7572] The probes having the nucleotide sequence represented by SEQ ID NOS: 92030, 92031, 92032, 92033, 92034, 92035, 92036, 92037, 92038, 92039, 92040 were selected from the ORFs having the nucleotide sequence represented by SEQ ID NO: 76172.

[7573] The probes having the nucleotide sequence represented by SEQ ID NOS: 92041, 92042, 92043, 92044, 92045, 92046, 92047, 92048, 92049, 92050, 92051 were selected from the ORFs having the nucleotide sequence represented by SEQ ID NO: 76173.

[7574] The probes having the nucleotide sequence represented by SEQ ID NOS: 92052, 92053, 92054, 92055, 92056, 92057, 92058, 92059, 92060, 92061, 92062 were selected from the ORFs having the nucleotide sequence represented by SEQ ID NO: 76174.

[7575] The probes having the nucleotide sequence represented by SEQ ID NOS: 92063, 92064, 92065, 92066, 92067, 92068, 92069, 92070, 92071, 92072, 92073 were selected from the ORFs having the nucleotide sequence represented by SEQ ID NO: 76175.

[7576] The probes having the nucleotide sequence represented by SEQ ID NOS: 92074, 92075, 92076, 92077, 92078, 92079, 92080, 92081, 92082, 92083, 92084 were selected from the ORFs having the nucleotide sequence represented by SEQ ID NO: 76176.

[7577] The probes having the nucleotide sequence represented by SEQ ID NOS: 92085, 92086, 92087, 92088, 92089, 92090, 92091, 92092, 92093, 92094, 92095 were selected from the ORFs having the nucleotide sequence represented by SEQ ID NO: 76177.

[7578] The probes having the nucleotide sequence represented by SEQ ID NOS.: 92096, 92097, 92098, 92099, 92100, 92101, 92102, 92103, 92104, 92105, 92106 were selected from the ORFs having the nucleotide sequence represented by SEQ ID NO: 76178.

[7579] The probes having the nucleotide sequence represented by SEQ ID NOS: 92107, 92108, 92109, 92110, 92111, 92112, 92113, 92114, 92115, 92116, 92117 were selected from the ORFs having the nucleotide sequence represented by SEQ ID NO: 76179.

[7580] The probes having the nucleotide sequence represented by SEQ ID NOS: 92118, 92119, 92120, 92121, 92122, 92123, 92124, 92125, 92126, 92127, 92128 were selected from the ORFs having the nucleotide sequence represented by SEQ ID NO: 76180.

[7581] The probes having the nucleotide sequence represented by SEQ ID NOS: 92129, 92130, 92131, 92132, 92133, 92134, 92135, 92136, 92137, 92138, 92139 were selected from the ORFs having the nucleotide sequence represented by SEQ ID NO: 76181.

[7582] The probes having the nucleotide sequence represented by SEQ ID NOS: 92140, 92141, 92142, 92143, 92144, 92145, 92146, 92147, 92148, 92149, 92150, 92151, 92152, 92153, 92154, 92155, 92156, 92157, 92158, 92159, 92160, 92161 were selected from the ORFs having the nucleotide sequence represented by SEQ ID NO: 76182.

[7583] The probes having the nucleotide sequence represented by SEQ ID NOS: 92162, 92163, 92164, 92165, 92166, 92167, 92168, 92169, 92170, 92171, 92172 were selected from the ORFs having the nucleotide sequence represented by SEQ ID NO: 76183.

[7584] The probes having the nucleotide sequence represented by SEQ ID NOS: 92173, 92174, 92175, 92176, 92177, 92178, 92179, 92180, 92181, 92182, 92183 were selected from the ORFs having the nucleotide sequence represented by SEQ ID NO: 76184.

[7585] The probes having the nucleotide sequence represented by SEQ ID NOS: 92184, 92185, 92186, 92187, 92188, 92189, 92190, 92191, 92192, 92193, 92194 were selected from the ORFs having the nucleotide sequence represented by SEQ ID NO: 76185.

[7586] The probes having the nucleotide sequence represented by SEQ ID NOS: 92195, 92196, 92197, 92198, 92199, 92200, 92201, 92202, 92203, 92204, 92205 were selected from the ORFs having the nucleotide sequence represented by SEQ ID NO: 76186.

[7587] The probes having the nucleotide sequence represented by SEQ ID NOS: 92206, 92207, 92208, 92209, 92210, 92211, 92212, 92213, 92214, 92215, 92216 were selected from the ORFs having the nucleotide sequence represented by SEQ ID NO: 76187.

[7588] The probes having the nucleotide sequence represented by SEQ ID NOS: 92217, 92218, 92219, 92220, 92221, 92222, 92223, 92224, 92225, 92226, 92227 were selected from the ORFs having the nucleotide sequence represented by SEQ ID NO: 76188.

[7589] The probes having the nucleotide sequence represented by SEQ ID NOS: 92228, 92229, 92230, 92231, 92232, 92233, 92234, 92235, 92236, 92237, 92238 were selected from the ORFs having the nucleotide sequence represented by SEQ ID NO: 76189.

[7590] The probes having the nucleotide sequence represented by SEQ ID NOS: 92239, 92240, 92241, 92242, 92243, 92244, 92245, 92246, 92247, 92248, 92249 were selected from the ORFs having the nucleotide sequence represented by SEQ ID NO: 76190.

[7591] The probes having the nucleotide sequence represented by SEQ ID NOS: 92250, 92251, 92252, 92253, 92254, 92255, 92256, 92257, 92258, 92259, 92260 were selected from the ORFs having the nucleotide sequence represented by SEQ ID NO: 76191.

[7592] The probes having the nucleotide sequence represented by SEQ ID NOS: 92261, 92262, 92263, 92264, 92265, 92266, 92267, 92268, 92269, 92270, 92271 were selected from the ORFs having the nucleotide sequence represented by SEQ ID NO: 76192.

[7593] The probes having the nucleotide sequence represented by SEQ ID NOS: 92272, 92273, 92274, 92275, 92276, 92277, 92278, 92279, 92280, 92281, 92282 were selected from the ORFs having the nucleotide sequence represented by SEQ ID NO: 76193.

[7594] The probes having the nucleotide sequence represented by SEQ ID NOS: 92283, 92284, 92285, 92286, 92287, 92288, 92289, 92290, 92291, 92292, 92293 were selected from the ORFs having the nucleotide sequence represented by SEQ ID NO: 76194.

[7595] The probes having the nucleotide sequence represented by SEQ ID NOS: 92294, 92295, 92296, 92297, 92298, 92299, 92300, 92301, 92302, 92303, 92304 were selected from the ORFs having the nucleotide sequence represented by SEQ ID NO: 76195.

[7596] The probes having the nucleotide sequence represented by SEQ ID NOS: 92305, 92306, 92307, 92308, 92309, 92310, 92311, 92312, 92313, 92314, 92315 were selected from the ORFs having the nucleotide sequence represented by SEQ ID NO: 76196.

[7597] The probes having the nucleotide sequence represented by SEQ ID NOS: 92316, 92317, 92318, 92319, 92320, 92321, 92322, 92323, 92324, 92325, 92326 were selected from the ORFs having the nucleotide sequence represented by SEQ ID NO: 76197.

[7598] The probes having the nucleotide sequence represented by SEQ ID NOS: 92327, 92328, 92329, 92330, 92331, 92332, 92333, 92334, 92335, 92336, 92337 were selected from the ORFs having the nucleotide sequence represented by SEQ ID NO: 76198.

[7599] The probes having the nucleotide sequence represented by SEQ ID NOS: 92338, 92339, 92340, 92341, 92342, 92343, 92344, 92345, 92346, 92347, 92348 were selected from the ORFs having the nucleotide sequence represented by SEQ ID NO: 76199.

[7600] The probes having the nucleotide sequence represented by SEQ ID NOS: 92349, 92350, 92351, 92352, 92353, 92354, 92355, 92356, 92357, 92358, 92359 were selected from the ORFs having the nucleotide sequence represented by SEQ ID NO: 76200.

[7601] The probes having the nucleotide sequence represented by SEQ ID NOS: 92360, 92361, 92362, 92363, 92364, 92365, 92366, 92367, 92368, 92369, 92370 were selected from the ORFs having the nucleotide sequence represented by SEQ ID NO: 76201.

[7602] The probes having the nucleotide sequence represented by SEQ ID NOS: 92371, 92372, 92373, 92374, 92375, 92376, 92377, 92378, 92379, 92380, 92381 were selected from the ORFs having the nucleotide sequence represented by SEQ ID NO: 76202.

[7603] The probes having the nucleotide sequence represented by SEQ ID NOS: 92382, 92383, 92384, 92385, 92386, 92387, 92388, 92389, 92390, 92391, 92392 were selected from the ORFs having the nucleotide sequence represented by SEQ ID NO: 76203.

[7604] The probes having the nucleotide sequence represented by SEQ ID NOS: 92393, 92394, 92395, 92396, 92397, 92398, 92399, 92400, 92401, 92402, 92403 were selected from the ORFs having the nucleotide sequence represented by SEQ ID NO: 76204.

[7605] The probes having the nucleotide sequence represented by SEQ ID NOS: 92404, 92405, 92406, 92407, 92408, 92409, 92410, 92411, 92412, 92413, 92414 were selected from the ORFs having the nucleotide sequence represented by SEQ ID NO: 76205.

[7606] The probes having the nucleotide sequence represented by SEQ ID NOS: 92415, 92416, 92417, 92418, 92419, 92420, 92421, 92422, 92423, 92424, 92425 were selected from the ORFs having the nucleotide sequence represented by SEQ ID NO: 76206.

[7607] The probes having the nucleotide sequence represented by SEQ ID NOS: 92426, 92427, 92428, 92429, 92430, 92431, 92432, 92433, 92434, 92435, 92436 were selected from the ORFs having the nucleotide sequence represented by SEQ ID NO: 76207.

[7608] The probes having the nucleotide sequence represented by SEQ ID NOS: 92437, 92438, 92439, 92440, 92441, 92442, 92443, 92444, 92445, 92446, 92447 were selected from the ORFs having the nucleotide sequence represented by SEQ ID NO: 76208.

[7609] The probes having the nucleotide sequence represented by SEQ ID NOS: 92448, 92449, 92450, 92451, 92452, 92453, 92454, 92455, 92456, 92457, 92458 were selected from the ORFs having the nucleotide sequence represented by SEQ ID NO: 76209.

[7610] The probes having the nucleotide sequence represented by SEQ ID NOS: 92459, 92460, 92461, 92462, 92463, 92464, 92465, 92466, 92467, 92468, 92469 were selected from the ORFs having the nucleotide sequence represented by SEQ ID NO: 76210.

[7611] The probes having the nucleotide sequence represented by SEQ ID NOS: 92470, 92471, 92472, 92473, 92474, 92475, 92476, 92477, 92478, 92479, 92480 were selected from the ORFs having the nucleotide sequence represented by SEQ ID NO: 76211.

[7612] The probes having the nucleotide sequence represented by SEQ ID NOS: 92481, 92482, 92483, 92484, 92485, 92486, 92487, 92488, 92489, 92490, 92491 were selected from the ORFs having the nucleotide sequence represented by SEQ ID NO: 76212.

[7613] The probes having the nucleotide sequence represented by SEQ ID NOS: 92492, 92493, 92494, 92495, 92496, 92497, 92498, 92499, 92500, 92501, 92502 were selected from the ORFs having the nucleotide sequence represented by SEQ ID NO: 76213.

[7614] The probes having the nucleotide sequence represented by SEQ ID NOS: 92503, 92504, 92505, 92506, 92507, 92508, 92509, 92510, 92511, 92512, 92513 were selected from the ORFs having the nucleotide sequence represented by SEQ ID NO: 76214.

[7615] The probes having the nucleotide sequence represented by SEQ ID NOS: 92514, 92515, 92516, 92517, 92518, 92519, 92520, 92521, 92522, 92523, 92524 were selected from the ORFs having the nucleotide sequence represented by SEQ ID NO: 76215.

[7616] The probes having the nucleotide sequence represented by SEQ ID NOS: 92525, 92526, 92527, 92528, 92529, 92530, 92531, 92532, 92533, 92534, 92535 were selected from the ORFs having the nucleotide sequence represented by SEQ ID NO: 76216.

[7617] The probes having the nucleotide sequence represented by SEQ ID NOS: 92536, 92537, 92538, 92539, 92540, 92541, 92542, 92543, 92544, 92545, 92546 were selected from the ORFs having the nucleotide sequence represented by SEQ ID NO: 76217.

[7618] The probes having the nucleotide sequence represented by SEQ ID NOS: 92547, 92548, 92549, 92550, 92551, 92552, 92553, 92554, 92555, 92556, 92557 were selected from the ORFs having the nucleotide sequence represented by SEQ ID NO: 76218.

[7619] The probes having the nucleotide sequence represented by SEQ ID NOS: 92558, 92559, 92560, 92561, 92562, 92563, 92564, 92565, 92566, 92567, 92568 were selected from the ORFs having the nucleotide sequence represented by SEQ ID NO: 76219.

[7620] The probes having the nucleotide sequence represented by SEQ ID NOS: 92569, 92570, 92571, 92572, 92573, 92574, 92575, 92576, 92577, 92578, 92579 were selected from the ORFs having the nucleotide sequence represented by SEQ ID NO: 76220.

[7621] The probes having the nucleotide sequence represented by SEQ ID NOS: 92580, 92581, 92582, 92583, 92584, 92585, 92586, 92587, 92588, 92589, 92590 were selected from the ORFs having the nucleotide sequence represented by SEQ ID NO: 76221.

[7622] The probes having the nucleotide sequence represented by SEQ ID NOS: 92591, 92592, 92593, 92594, 92595, 92596, 92597, 92598, 92599, 92600, 92601 were selected from the ORFs having the nucleotide sequence represented by SEQ ID NO: 76222.

[7623] The probes having the nucleotide sequence represented by SEQ ID NOS: 92602, 92603, 92604, 92605, 92606, 92607, 92608, 92609, 92610, 92611, 92612 were selected from the ORFs having the nucleotide sequence represented by SEQ ID NO: 76223.

[7624] The probes having the nucleotide sequence represented by SEQ ID NOS: 92613, 92614, 92615, 92616, 92617, 92618, 92619, 92620, 92621, 92622, 92623 were selected from the ORFs having the nucleotide sequence represented by SEQ ID NO: 76224.

[7625] The probes having the nucleotide sequence represented by SEQ ID NOS: 92624, 92625, 92626, 92627, 92628, 92629, 92630, 92631, 92632, 92633, 92634 were selected from the ORFs having the nucleotide sequence represented by SEQ ID NO: 76225.

[7626] The probes having the nucleotide sequence represented by SEQ ID NOS: 92635, 92636, 92637, 92638, 92639, 92640, 92641, 92642, 92643, 92644, 92645 were selected from the ORFs having the nucleotide sequence represented by SEQ ID NO: 76226.

[7627] The probes having the nucleotide sequence represented by SEQ ID NOS: 92646, 92647, 92648, 92649, 92650, 92651, 92652, 92653, 92654, 92655, 92656 were selected from the ORFs having the nucleotide sequence represented by SEQ ID NO: 76227.

[7628] The probes having the nucleotide sequence represented by SEQ ID NOS: 92657, 92658, 92659, 92660, 92661, 92662, 92663, 92664, 92665, 92666, 92667 were selected from the ORFs having the nucleotide sequence represented by SEQ ID NO: 76228.

[7629] The probes having the nucleotide sequence represented by SEQ ID NOS: 92668, 92669, 92670, 92671, 92672, 92673, 92674, 92675, 92676, 92677, 92678 were selected from the ORFs having the nucleotide sequence represented by SEQ ID NO: 76229.

[7630] The probes having the nucleotide sequence represented by SEQ ID NOS: 92679, 92680, 92681, 92682, 92683, 92684, 92685, 92686, 92687, 92688, 92689 were selected from the ORFs having the nucleotide sequence represented by SEQ ID NO: 76230.

[7631] The probes having the nucleotide sequence represented by SEQ ID NOS: 92690, 92691, 92692, 92693, 92694, 92695, 92696, 92697, 92698, 92699, 92700 were selected from the ORFs having the nucleotide sequence represented by SEQ ID NO: 76231.

[7632] The probes having the nucleotide sequence represented by SEQ ID NOS: 92701, 92702, 92703, 92704, 92705, 92706, 92707, 92708, 92709, 92710, 92711 were selected from the ORFs having the nucleotide sequence represented by SEQ ID NO: 76232.

[7633] The probes having the nucleotide sequence represented by SEQ ID NOS: 92712, 92713, 92714, 92715, 92716, 92717, 92718, 92719, 92720, 92721, 92722, 92723, 92724, 92725, 92726, 92727, 92728, 92729, 92730, 92731, 92732, 92733 were selected from the ORFs having the nucleotide sequence represented by SEQ ID NO: 76233.

[7634] The probes having the nucleotide sequence represented by SEQ ID NOS: 92734, 92735, 92736, 92737, 92738, 92739, 92740, 92741, 92742, 92743, 92744 were selected from the ORFs having the nucleotide sequence represented by SEQ ID NO: 76234.

[7635] The probes having the nucleotide sequence represented by SEQ ID NOS: 92745, 92746, 92747, 92748, 92749, 92750, 92751, 92752, 92753, 92754, 92755 were selected-from the ORFs having the nucleotide sequence represented by SEQ ID NO: 76235.

[7636] The probes having the nucleotide sequence represented by SEQ ID NOS: 92756, 92757, 92758, 92759, 92760, 92761, 92762, 92763, 92764, 92765, 92766 were selected from the ORFs having the nucleotide sequence represented by SEQ ID NO: 76236.

[7637] The probes having the nucleotide sequence represented by SEQ ID NOS: 92767, 92768, 92769, 92770, 92771, 92772, 92773, 92774, 92775, 92776, 92777 were selected from the ORFs having the nucleotide sequence represented by SEQ ID NO: 76237.

[7638] The probes having the nucleotide sequence represented by SEQ ID NOS: 92778, 92779, 92780, 92781, 92782, 92783, 92784, 92785, 92786, 92787, 92788 were selected from the ORFs having the nucleotide sequence represented by SEQ ID NO: 76238.

[7639] The probes having the nucleotide sequence represented by SEQ ID NOS: 92789, 92790, 92791, 92792, 92793, 92794, 92795, 92796, 92797, 92798, 92799 were selected from the ORFs having the nucleotide sequence represented by SEQ ID NO: 76239.

[7640] The probes having the nucleotide sequence represented by SEQ ID NOS: 92800, 92801, 92802, 92803, 92804, 92805, 92806, 92807, 92808, 92809, 92810 were selected from the ORFs having the nucleotide sequence represented by SEQ ID NO: 76240.

[7641] The probes having the nucleotide sequence represented by SEQ ID NOS: 92811, 92812, 92813, 92814, 92815, 92816, 92817, 92818, 92819, 92820, 92821, 92822, 92823, 92824, 92825, 92826, 92827, 92828, 92829, 92830, 92831, 92832 were selected from the ORFs having the nucleotide sequence represented by SEQ ID NO: 76241.

[7642] The probes having the nucleotide sequence represented by SEQ ID NOS: 92833, 92834, 92835, 92836, 92837, 92838, 92839, 92840, 92841, 92842, 92843, 92844, 92845, 92846, 92847, 92848, 92849, 92850, 92851, 92852, 92853, 92854 were selected from the ORFs having the nucleotide sequence represented by SEQ ID NO: 76242.

[7643] The probes having the nucleotide sequence represented by SEQ ID NOS: 92855, 92856, 92857, 92858, 92859, 92860, 92861, 92862, 92863, 92864, 92865 were selected from the ORFs having the nucleotide sequence represented by SEQ ID NO: 76243.

[7644] The probes having the nucleotide sequence represented by SEQ ID NOS: 92866, 92867, 92868, 92869, 92870, 92871, 92872, 92873, 92874, 92875, 92876 were selected from the ORFs having the nucleotide sequence represented by SEQ ID NO: 76244.

[7645] The probes having the nucleotide sequence represented by SEQ ID NOS: 92877, 92878, 92879, 92880, 92881, 92882, 92883, 92884, 92885, 92886, 92887 were selected from the ORFs having the nucleotide sequence represented by SEQ ID NO: 76245.

[7646] The probes having the nucleotide sequence represented by SEQ ID NOS: 92888, 92889, 92890, 92891, 92892, 92893, 92894, 92895, 92896, 92897, 92898 were selected from the ORFs having the nucleotide sequence represented by SEQ ID NO: 76246.

[7647] The probes having the nucleotide sequence represented by SEQ ID NOS: 92899, 92900, 92901, 92902, 92903, 92904, 92905, 92906, 92907, 92908, 92909 were selected from the ORFs having the nucleotide sequence represented by SEQ ID NO: 76247.

[7648] The probes having the nucleotide sequence represented by SEQ ID NOS: 92910, 92911, 92912, 92913, 92914, 92915, 92916, 92917, 92918, 92919, 92920 were selected from the ORFs having the nucleotide sequence represented by SEQ ID NO: 76248.

[7649] The probes having the nucleotide sequence represented by SEQ ID NOS: 92921, 92922, 92923, 92924, 92925, 92926, 92927, 92928, 92929, 92930, 92931 were selected from the ORFs having the nucleotide sequence represented by SEQ ID NO: 76249.

[7650] The probes having the nucleotide sequence represented by SEQ ID NOS: 92932, 92933, 92934, 92935, 92936, 92937, 92938, 92939, 92940, 92941, 92942 were selected from the ORFs having the nucleotide sequence represented by SEQ ID NO: 76250.

[7651] The probes having the nucleotide sequence represented by SEQ ID NOS: 92943, 92944, 92945, 92946, 92947, 92948, 92949, 92950, 92951, 92952, 92953 were selected from the ORFs having the nucleotide sequence represented by SEQ ID NO: 76251.

[7652] The probes having the nucleotide sequence represented by SEQ ID NOS: 92954, 92955, 92956, 92957, 92958, 92959, 92960, 92961, 92962, 92963, 92964 were selected from the ORFs having the nucleotide sequence represented by SEQ ID NO: 76252.

[7653] The probes having the nucleotide sequence represented by SEQ ID NOS: 92965, 92966, 92967, 92968, 92969, 92970, 92971, 92972, 92973, 92974, 92975 were selected from the ORFs having the nucleotide sequence represented by SEQ ID NO: 76253.

[7654] The probes having the nucleotide sequence represented by SEQ ID NOS: 92976, 92977, 92978, 92979, 92980, 92981, 92982, 92983, 92984, 92985, 92986 were selected from the ORFs having the nucleotide sequence represented by SEQ ID NO: 76254.

[7655] The probes having the nucleotide sequence represented by SEQ ID NOS: 92987, 92988, 92989, 92990, 92991, 92992, 92993, 92994, 92995, 92996, 92997 were selected from the ORFs having the nucleotide sequence represented by SEQ ID NO: 76255.

[7656] The probes having the nucleotide sequence represented by SEQ ID NOS: 92998, 92999, 93000, 93001, 93002, 93003, 93004, 93005, 93006, 93007, 93008 were selected from the ORFs having the nucleotide sequence represented by SEQ ID NO: 76256.

[7657] The probes having the nucleotide sequence represented by SEQ ID NOS: 93009, 93010, 93011, 93012, 93013, 93014, 93015, 93016, 93017, 93018, 93019 were selected from the ORFs having the nucleotide sequence represented by SEQ ID NO: 76257.

[7658] The probes having the nucleotide sequence represented by SEQ ID NOS: 93020, 93021, 93022, 93023, 93024, 93025, 93026, 93027, 93028, 93029, 93030 were selected from the ORFs having the nucleotide sequence represented by SEQ ID NO: 76258.

[7659] The probes having the nucleotide sequence represented by SEQ ID NOS: 93031, 93032, 93033, 93034, 93035, 93036, 93037, 93038, 93039, 93040, 93041 were selected from the ORFs having the nucleotide sequence represented by SEQ ID NO: 76259.

[7660] The probes having the nucleotide sequence represented by SEQ ID NOS: 93042, 93043, 93044, 93045, 93046, 93047, 93048, 93049, 93050, 93051, 93052 were selected from the ORFs having the nucleotide sequence represented by SEQ ID NO: 76260.

[7661] The probes having the nucleotide sequence represented by SEQ ID NOS: 93053, 93054, 93055, 93056, 93057, 93058, 93059, 93060, 93061, 93062, 93063 were selected from the ORFs having the nucleotide sequence represented by SEQ ID NO: 76261.

[7662] The probes having the nucleotide sequence represented by SEQ ID NOS: 93064, 93065, 93066, 93067, 93068, 93069, 93070, 93071, 93072, 93073, 93074 were selected from the ORFs having the nucleotide sequence represented by SEQ ID NO: 76262.

[7663] The probes having the nucleotide sequence represented by SEQ ID NOS: 93075, 93076, 93077, 93078, 93079, 93080, 93081, 93082, 93083, 93084, 93085 were selected from the ORFs having the nucleotide sequence represented by SEQ ID NO: 76263.

[7664] The probes having the nucleotide sequence represented by SEQ ID NOS: 93086, 93087, 93088, 93089, 93090, 93091, 93092, 93093, 93094, 93095, 93096 were selected from the ORFs having the nucleotide sequence represented by SEQ ID NO: 76264.

[7665] The probes having the nucleotide sequence represented by SEQ ID NOS: 93097, 93098, 93099, 93100, 93101, 93102, 93103, 93104, 93105, 93106, 93107 were selected from the ORFs having the nucleotide sequence represented by SEQ ID NO: 76265.

[7666] The probes having the nucleotide sequence represented by SEQ ID NOS: 93108, 93109, 93110, 93111, 93112, 93113, 93114, 93115, 93116, 93117, 93118 were selected from the ORFs having the nucleotide sequence represented by SEQ ID NO: 76266.

[7667] The probes having the nucleotide sequence represented by SEQ ID NOS: 93119, 93120, 93121, 93122, 93123, 93124, 93125, 93126, 93127, 93128, 93129 were selected from the ORFs having the nucleotide sequence represented by SEQ ID NO: 76267.

[7668] The probes having the nucleotide sequence represented by SEQ ID NOS: 93130, 93131, 93132, 93133, 93134, 93135, 93136, 93137, 93138, 93139, 93140 were selected from the ORFs having the nucleotide sequence represented by SEQ ID NO: 76268.

[7669] The probes having the nucleotide sequence represented by SEQ ID NOS: 93141, 93142, 93143, 93144, 93145, 93146, 93147, 93148, 93149, 93150, 93151 were selected from the ORFs having the nucleotide sequence represented by SEQ ID NO: 76269.

[7670] The probes having the nucleotide sequence represented by SEQ ID NOS: 93152, 93153, 93154, 93155, 93156, 93157, 93158, 93159, 93160, 93161, 93162 were selected from the ORFs having the nucleotide sequence represented by SEQ ID NO: 76270.

[7671] The probes having the nucleotide sequence represented by SEQ ID NOS: 93163, 93164, 93165, 93166, 93167, 93168, 93169, 93170, 93171, 93172, 93173, 93174, 93175, 93176, 93177, 93178, 93179, 93180, 93181, 93182, 93183, 93184 were selected from the ORFs having the nucleotide sequence represented by SEQ ID NO: 76271.

[7672] The probes having the nucleotide sequence represented by SEQ ID NOS: 93185, 93186, 93187, 93188, 93189, 93190, 93191, 93192, 93193, 93194, 93195 were selected from the ORFs having the nucleotide sequence represented by SEQ ID NO: 76272.

[7673] The probes having the nucleotide sequence represented by SEQ ID NOS: 93196, 93197, 93198, 93199, 93200, 93201, 93202, 93203, 93204, 93205, 93206 were selected from the ORFs having the nucleotide sequence represented by SEQ ID NO: 76273.

[7674] The probes having the nucleotide sequence represented by SEQ ID NOS: 93207, 93208, 93209, 93210, 93211, 93212, 93213, 93214, 93215, 93216, 93217 were selected from the ORFs having the nucleotide sequence represented by SEQ ID NO: 76274.

[7675] The probes having the nucleotide sequence represented by SEQ ID NOS: 93218, 93219, 93220, 93221, 93222, 93223, 93224, 93225, 93226, 93227, 93228 were selected from the ORFs having the nucleotide sequence represented by SEQ ID NO: 76275.

[7676] The probes having the nucleotide sequence represented by SEQ ID NOS: 93229, 93230, 93231, 93232, 93233, 93234, 93235, 93236, 93237, 93238, 93239 were selected from the ORFs having the nucleotide sequence represented by SEQ ID NO: 76276.

[7677] The probes having the nucleotide sequence represented by SEQ ID NOS: 93240, 93241, 93242, 93243, 93244, 93245, 93246, 93247, 93248, 93249, 93250 were selected from the ORFs having the nucleotide sequence represented by SEQ ID NO: 76277.

[7678] The probes having the nucleotide sequence represented by SEQ ID NOS: 93251, 93252, 93253, 93254, 93255, 93256, 93257, 93258, 93259, 93260, 93261 were selected from the ORFs having the nucleotide sequence represented by SEQ ID NO: 76278.

[7679] The probes having the nucleotide sequence represented by SEQ ID NOS: 93262, 93263, 93264, 93265, 93266, 93267, 93268, 93269, 93270, 93271, 93272 were selected from the ORFs having the nucleotide sequence represented by SEQ ID NO: 76279.

[7680] The probes having the nucleotide sequence represented by SEQ ID NOS: 93273, 93274, 93275, 93276, 93277, 93278, 93279, 93280, 93281, 93282, 93283 were selected from the ORFs having the nucleotide sequence represented by SEQ ID NO: 76280.

[7681] The probes having the nucleotide sequence represented by SEQ ID NOS: 93284, 93285, 93286, 93287, 93288, 93289, 93290, 93291, 93292, 93293, 93294 were selected from the ORFs having the nucleotide sequence represented by SEQ ID NO: 76281.

[7682] The probes having the nucleotide sequence represented by SEQ ID NOS: 93295, 93296, 93297, 93298, 93299, 93300, 93301, 93302, 93303, 93304, 93305 were selected from the ORFs having the nucleotide sequence represented by SEQ ID NO: 76282.

[7683] The probes having the nucleotide sequence represented by SEQ ID NOS: 93306, 93307, 93308, 93309, 93310, 93311, 93312, 93313, 93314, 93315, 93316 were selected from the ORFs having the nucleotide sequence represented by SEQ ID NO: 76283.

[7684] The probes having the nucleotide sequence represented by SEQ ID NOS: 93317, 93318, 93319, 93320, 93321, 93322, 93323, 93324, 93325, 93326, 93327 were selected from the ORFs having the nucleotide sequence represented by SEQ ID NO: 76284.

[7685] The probes having the nucleotide sequence represented by SEQ ID NOS: 93328, 93329, 93330, 93331, 93332, 93333, 93334, 93335, 93336, 93337, 93338 were selected from the ORFs having the nucleotide sequence represented by SEQ ID NO: 76285.

[7686] The probes having the nucleotide sequence represented by SEQ ID NOS: 93339, 93340, 93341, 93342, 93343, 93344, 93345, 93346, 93347, 93348, 93349 were selected from the ORFs having the nucleotide sequence represented by SEQ ID NO: 76286.

[7687] The probes having the nucleotide sequence represented by SEQ ID NOS: 93350, 93351, 93352, 93353, 93354, 93355, 93356, 93357, 93358, 93359, 93360 were selected from the ORFs having the nucleotide sequence represented by SEQ ID NO: 76287.

[7688] The probes having the nucleotide sequence represented by SEQ ID NOS: 93361, 93362, 93363, 93364, 93365, 93366, 93367, 93368, 93369, 93370, 93371 were selected from the ORFs having the nucleotide sequence represented by SEQ ID NO: 76288.

[7689] The probes having the nucleotide sequence represented by SEQ ID NOS: 93372, 93373, 93374, 93375, 93376, 93377, 93378, 93379, 93380, 93381, 93382 were selected from the ORFs having the nucleotide sequence represented by SEQ ID NO: 76289.

[7690] The probes having the nucleotide sequence represented by SEQ ID NOS: 93383, 93384, 93385, 93386, 93387, 93388, 93389, 93390, 93391, 93392, 93393 were selected from the ORFs having the nucleotide sequence represented by SEQ ID NO: 76290.

[7691] The probes having the nucleotide sequence represented by SEQ ID NOS: 93394, 93395, 93396, 93397, 93398, 93399, 93400, 93401, 93402, 93403, 93404 were selected from the ORFs having the nucleotide sequence represented by SEQ ID NO: 76291.

[7692] The probes having the nucleotide sequence represented by SEQ ID NOS: 93405, 93406, 93407, 93408, 93409, 93410, 93411, 93412, 93413, 93414, 93415 were selected from the ORFs having the nucleotide sequence represented by SEQ ID NO: 76292.

[7693] The probes having the nucleotide sequence represented by SEQ ID NOS: 93416, 93417, 93418, 93419, 93420, 93421, 93422, 93423, 93424, 93425, 93426 were selected from the ORFs having the nucleotide sequence represented by SEQ ID NO: 76293.

[7694] The probes having the nucleotide sequence represented by SEQ ID NOS: 93427, 93428, 93429, 93430, 93431, 93432, 93433, 93434, 93435, 93436, 93437 were selected from the ORFs having the nucleotide sequence represented by SEQ ID NO: 76294.

[7695] The probes having the nucleotide sequence represented by SEQ ID NOS: 93438, 93439, 93440, 93441, 93442, 93443, 93444, 93445, 93446, 93447, 93448 were selected from the ORFs having the nucleotide sequence represented by SEQ ID NO: 76295.

[7696] The probes having the nucleotide sequence represented by SEQ ID NOS: 93449, 93450, 93451, 93452, 93453, 93454, 93455, 93456, 93457, 93458, 93459 were selected from the ORFs having the nucleotide sequence represented by SEQ ID NO: 76296.

[7697] The probes having the nucleotide sequence represented by SEQ ID NOS: 93460, 93461, 93462, 93463, 93464, 93465, 93466, 93467, 93468, 93469, 93470 were selected from the ORFs having the nucleotide sequence represented by SEQ ID NO: 76297.

[7698] The probes having the nucleotide sequence represented by SEQ ID NOS: 93471, 93472, 93473, 93474, 93475, 93476, 93477, 93478, 93479, 93480, 93481 were selected from the ORFs having the nucleotide sequence represented by SEQ ID NO: 76298.

[7699] The probes having the nucleotide sequence represented by SEQ ID NOS: 93482, 93483, 93484, 93485, 93486, 93487, 93488, 93489, 93490, 93491, 93492 were selected from the ORFs having the nucleotide sequence represented by SEQ ID NO: 76299.

[7700] The probes having the nucleotide sequence represented by SEQ ID NOS: 93493, 93494, 93495, 93496, 93497, 93498, 93499, 93500, 93501, 93502, 93503 were selected from the ORFs having the nucleotide sequence represented by SEQ ID NO: 76300.

[7701] The probes having the nucleotide sequence represented by SEQ ID NOS: 93504, 93505, 93506, 93507, 93508, 93509, 93510, 93511, 93512, 93513, 93514 were selected from the ORFs having the nucleotide sequence represented by SEQ ID NO: 76301.

[7702] The probes having the nucleotide sequence represented by SEQ ID NOS: 93515, 93516, 93517, 93518, 93519, 93520, 93521, 93522, 93523, 93524, 93525 were selected from the ORFs having the nucleotide sequence represented by SEQ ID NO: 76302.

[7703] The probes having the nucleotide sequence represented by SEQ ID NOS: 93526, 93527, 93528, 93529, 93530, 93531, 93532, 93533, 93534, 93535, 93536 were selected from the ORFs having the nucleotide sequence represented by SEQ ID NO: 76303.

[7704] The probes having the nucleotide sequence represented by SEQ ID NOS: 93537, 93538, 93539, 93540, 93541, 93542, 93543, 93544, 93545, 93546, 93547 were selected from the ORFs having the nucleotide sequence represented by SEQ ID NO: 76304.

[7705] The probes having the nucleotide sequence represented by SEQ ID NOS: 93548, 93549, 93550, 93551, 93552, 93553, 93554, 93555, 93556, 93557, 93558 were selected from the ORFs having the nucleotide sequence represented by SEQ ID NO: 76305.

[7706] The probes having the nucleotide sequence represented by SEQ ID NOS: 93559, 93560, 93561, 93562, 93563, 93564, 93565, 93566, 93567, 93568, 93569 were selected from the ORFs having the nucleotide sequence represented by SEQ ID NO: 76306.

[7707] The probes having the nucleotide sequence represented by SEQ ID NOS: 93570, 93571, 93572, 93573, 93574, 93575, 93576, 93577, 93578, 93579, 93580 were selected from the ORFs having the nucleotide sequence represented by SEQ ID NO: 76307.

[7708] The probes having the nucleotide sequence represented by SEQ ID NOS: 93581, 93582, 93583, 93584, 93585, 93586, 93587, 93588, 93589, 93590, 93591 were selected from the ORFs having the nucleotide sequence represented by SEQ ID NO: 76308.

[7709] The probes having the nucleotide sequence represented by SEQ ID NOS: 93592, 93593, 93594, 93595, 93596, 93597, 93598, 93599, 93600, 93601, 93602 were selected from the ORFs having the nucleotide sequence represented by SEQ ID NO: 76309.

[7710] The probes having the nucleotide sequence represented by SEQ ID NOS: 93603, 93604, 93605, 93606, 93607, 93608, 93609, 93610, 93611, 93612, 93613 were selected from the ORFs having the nucleotide sequence represented by SEQ ID NO: 76310.

[7711] The probes having the nucleotide sequence represented by SEQ ID NOS: 93614, 93615, 93616, 93617, 93618, 93619, 93620, 93621, 93622, 93623, 93624 were selected from the ORFs having the nucleotide sequence represented by SEQ ID NO: 76311.

[7712] The probes having the nucleotide sequence represented by SEQ ID NOS: 93625, 93626, 93627, 93628, 93629, 93630, 93631, 93632, 93633, 93634, 93635 were selected from the ORFs having the nucleotide sequence represented by SEQ ID NO: 76312.

[7713] The probes having the nucleotide sequence represented by SEQ ID NOS: 93636, 93637, 93638, 93639, 93640, 93641, 93642, 93643, 93644, 93645, 93646 were selected from the ORFs having the nucleotide sequence represented by SEQ ID NO: 76313.

[7714] The probes having the nucleotide sequence represented by SEQ ID NOS: 93647, 93648, 93649, 93650, 93651, 93652, 93653, 93654, 93655, 93656, 93657 were selected from the ORFs having the nucleotide sequence represented by SEQ ID NO: 76314.

[7715] The probes having the nucleotide sequence represented by SEQ ID NOS: 93658, 93659, 93660, 93661, 93662, 93663, 93664, 93665, 93666, 93667, 93668 were selected from the ORFs having the nucleotide sequence represented by SEQ ID NO: 76315.

[7716] The probes having the nucleotide sequence represented by SEQ ID NOS: 93669, 93670, 93671, 93672, 93673, 93674, 93675, 93676, 93677, 93678, 93679 were selected from the ORFs having the nucleotide sequence represented by SEQ ID NO: 76316.

[7717] The probes having the nucleotide sequence represented by SEQ ID NOS: 93680, 93681, 93682, 93683, 93684, 93685, 93686, 93687, 93688, 93689, 93690 were selected from the ORFs having the nucleotide sequence represented by SEQ ID NO: 76317.

[7718] The probes having the nucleotide sequence represented by SEQ ID NOS: 93691, 93692, 93693, 93694, 93695, 93696, 93697, 93698, 93699, 93700, 93701 were selected from the ORFs having the nucleotide sequence represented by SEQ ID NO: 76318.

[7719] The probes having the nucleotide sequence represented by SEQ ID NOS: 93702, 93703, 93704, 93705, 93706, 93707, 93708, 93709, 93710, 93711, 93712 were selected from the ORFs having the nucleotide sequence represented by SEQ ID NO: 76319.

[7720] The probes having the nucleotide sequence represented by SEQ ID NOS: 93713, 93714, 93715, 93716, 93717, 93718, 93719, 93720, 93721, 93722, 93723 were selected from the ORFs having the nucleotide sequence represented by SEQ ID NO: 76320.

[7721] The probes having the nucleotide sequence represented by SEQ ID NOS: 93724, 93725, 93726, 93727, 93728, 93729, 93730, 93731, 93732, 93733, 93734 were selected from the ORFs having the nucleotide sequence represented by SEQ ID NO: 76321.

[7722] The probes having the nucleotide sequence represented by SEQ ID NOS: 93735, 93736, 93737, 93738, 93739, 93740, 93741, 93742, 93743, 93744, 93745 were selected from the ORFs having the nucleotide sequence represented by SEQ ID NO: 76322.

[7723] The probes having the nucleotide sequence represented by SEQ ID NOS: 93746, 93747, 93748, 93749, 93750, 93751, 93752, 93753, 93754, 93755, 93756 were selected from the ORFs having the nucleotide sequence represented by SEQ ID NO: 76323.

[7724] The probes having the nucleotide sequence represented by SEQ ID NOS: 93757, 93758, 93759, 93760, 93761, 93762, 93763, 93764, 93765, 93766, 93767 were selected from the ORFs having the nucleotide sequence represented by SEQ ID NO: 76324.

[7725] The probes having the nucleotide sequence represented by SEQ ID NOS: 93768, 93769, 93770, 93771, 93772, 93773, 93774, 93775, 93776, 93777, 93778 were selected from the ORFs having the nucleotide sequence represented by SEQ ID NO: 76325.

[7726] The probes having the nucleotide sequence represented by SEQ ID NOS: 93779, 93780, 93781, 93782, 93783, 93784, 93785, 93786, 93787, 93788, 93789 were selected from the ORFs having the nucleotide sequence represented by SEQ ID NO: 76326.

[7727] The probes having the nucleotide sequence represented by SEQ ID NOS: 93790, 93791, 93792, 93793, 93794, 93795, 93796, 93797, 93798, 93799, 93800 were selected from the ORFs having the nucleotide sequence represented by SEQ ID NO: 76327.

[7728] The probes having the nucleotide sequence represented by SEQ ID NOS: 93801, 93802, 93803, 93804, 93805, 93806, 93807, 93808, 93809, 93810, 93811 were selected from the ORFs having the nucleotide sequence represented by SEQ ID NO: 76328.

[7729] The probes having the nucleotide sequence represented by SEQ ID NOS: 93812, 93813, 93814, 93815, 93816, 93817, 93818, 93819, 93820, 93821, 93822 were selected from the ORFs having the nucleotide sequence represented by SEQ ID NO: 76329.

[7730] The probes having the nucleotide sequence represented by SEQ ID NOS: 93823, 93824, 93825, 93826, 93827, 93828, 93829, 93830, 93831, 93832, 93833 were selected from the ORFs having the nucleotide sequence represented by SEQ ID NO: 76330.

[7731] The probes having the nucleotide sequence represented by SEQ ID NOS: 93834, 93835, 93836, 93837, 93838, 93839, 93840, 93841, 93842, 93843, 93844 were selected from the ORFs having the nucleotide sequence represented by SEQ ID NO: 76331.

[7732] The probes having the nucleotide sequence represented by SEQ ID NOS: 93845, 93846, 93847, 93848, 93849, 93850, 93851, 93852, 93853, 93854, 93855 were selected from the ORFs having the nucleotide sequence represented by SEQ ID NO: 76332.

[7733] The probes having the nucleotide sequence represented by SEQ ID NOS: 93856, 93857, 93858, 93859, 93860, 93861, 93862, 93863, 93864, 93865, 93866 were selected from the ORFs having the nucleotide sequence represented by SEQ ID NO: 76333.

[7734] The probes having the nucleotide sequence represented by SEQ ID NOS: 93867, 93868, 93869, 93870, 93871, 93872, 93873, 93874, 93875, 93876, 93877 were selected from the ORFs having the nucleotide sequence represented by SEQ ID NO: 76334.

[7735] The probes having the nucleotide sequence represented by SEQ ID NOS: 93878, 93879, 93880, 93881, 93882, 93883, 93884, 93885, 93886, 93887, 93888 were selected from the ORFs having the nucleotide sequence represented by SEQ ID NO: 76335.

[7736] The probes having the nucleotide sequence represented by SEQ ID NOS: 93889, 93890, 93891, 93892, 93893, 93894, 93895, 93896, 93897, 93898, 93899 were selected from the ORFs having the nucleotide sequence represented by SEQ ID NO: 76336.

[7737] The probes having the nucleotide sequence represented by SEQ ID NOS: 93900, 93901, 93902, 93903, 93904, 93905, 93906, 93907, 93908, 93909, 93910 were selected from the ORFs having the nucleotide sequence represented by SEQ ID NO: 76337.

[7738] The probes having the nucleotide sequence represented by SEQ ID NOS: 93911, 93912, 93913, 93914, 93915, 93916, 93917, 93918, 93919, 93920, 93921 were selected from the ORFs having the nucleotide sequence represented by SEQ ID NO: 76338.

[7739] The probes having the nucleotide sequence represented by SEQ ID NOS: 93922, 93923, 93924, 93925, 93926, 93927, 93928, 93929, 93930, 93931, 93932 were selected from the ORFs having the nucleotide sequence represented by SEQ ID NO: 76339.

[7740] The probes having the nucleotide sequence represented by SEQ ID NOS: 93933, 93934, 93935, 93936, 93937, 93938, 93939, 93940, 93941, 93942, 93943 were selected from the ORFs having the nucleotide sequence represented by SEQ ID NO: 76340.

[7741] The probes having the nucleotide sequence represented by SEQ ID NOS: 93944, 93945, 93946, 93947, 93948, 93949, 93950, 93951, 93952, 93953, 93954 were selected from the ORFs having the nucleotide sequence represented by SEQ ID NO: 76341.

[7742] The probes having the nucleotide sequence represented by SEQ ID NOS: 93955, 93956, 93957, 93958, 93959, 93960, 93961, 93962, 93963, 93964, 93965 were selected from the ORFs having the nucleotide sequence represented by SEQ ID NO: 76342.

[7743] The probes having the nucleotide sequence represented by SEQ ID NOS: 93966, 93967, 93968, 93969, 93970, 93971, 93972, 93973, 93974, 93975, 93976 were selected from the ORFs having the nucleotide sequence represented by SEQ ID NO: 76343.

[7744] The probes having the nucleotide sequence represented by SEQ ID NOS: 93977, 93978, 93979, 93980, 93981, 93982, 93983, 93984, 93985, 93986, 93987 were selected from the ORFs having the nucleotide sequence represented by SEQ ID NO: 76344.

[7745] The probes having the nucleotide sequence represented by SEQ ID NOS: 93988, 93989, 93990, 93991, 93992, 93993, 93994, 93995, 93996, 93997, 93998 were selected from the ORFs having the nucleotide sequence represented by SEQ ID NO: 76345.

[7746] The probes having the nucleotide sequence represented by SEQ ID NOS: 93999, 94000, 94001, 94002, 94003, 94004, 94005, 94006, 94007, 94008, 94009 were selected from the ORFs having the nucleotide sequence represented by SEQ ID NO: 76346.

[7747] The probes having the nucleotide sequence represented by SEQ ID NOS: 94010, 94011, 94012, 94013, 94014, 94015, 94016, 94017, 94018, 94019, 94020 were selected from the ORFs having the nucleotide sequence represented by SEQ ID NO: 76347.

[7748] The probes having the nucleotide sequence represented by SEQ ID NOS: 94021, 94022, 94023, 94024, 94025, 94026, 94027, 94028, 94029, 94030, 94031 were selected from the ORFs having the nucleotide sequence represented by SEQ ID NO: 76348.

[7749] The probes having the nucleotide sequence represented by SEQ ID NOS: 94032, 94033, 94034, 94035, 94036, 94037, 94038, 94039, 94040, 94041, 94042 were selected from the ORFs having the nucleotide sequence represented by SEQ ID NO: 76349.

[7750] The probes having the nucleotide sequence represented by SEQ ID NOS: 94043, 94044, 94045, 94046, 94047, 94048, 94049, 94050, 94051, 94052, 94053 were selected from the ORFs having the nucleotide sequence represented by SEQ ID NO: 76350.

[7751] The probes having the nucleotide sequence represented by SEQ ID NOS: 94054, 94055, 94056, 94057, 94058, 94059, 94060, 94061, 94062, 94063, 94064 were selected from the ORFs having the nucleotide sequence represented by SEQ ID NO: 76351.

[7752] The probes having the nucleotide sequence represented by SEQ ID NOS: 94065, 94066, 94067, 94068, 94069, 94070, 94071, 94072, 94073, 94074, 94075 were selected from the ORFs having the nucleotide sequence represented by SEQ ID NO: 76352.

[7753] The probes having the nucleotide sequence represented by SEQ ID NOS: 94076, 94077, 94078, 94079, 94080, 94081, 94082, 94083, 94084, 94085, 94086 were selected from the ORFs having the nucleotide sequence represented by SEQ ID NO: 76353.

[7754] The probes having the nucleotide sequence represented by SEQ ID NOS: 94087, 94088, 94089, 94090, 94091, 94092, 94093, 94094, 94095, 94096, 94097 were selected from the ORFs having the nucleotide sequence represented by SEQ ID NO: 76354.

[7755] The probes having the nucleotide sequence represented by SEQ ID NOS: 94098, 94099, 94100, 94101, 94102, 94103, 94104, 94105, 94106, 94107, 94108 were selected from the ORFs having the nucleotide sequence represented by SEQ ID NO: 76355.

[7756] The probes having the nucleotide sequence represented by SEQ ID NOS: 94109, 94110, 94111, 94112, 94113, 94114, 94115, 94116, 94117, 94118, 94119 were selected from the ORFs having the nucleotide sequence represented by SEQ ID NO: 76356.

[7757] The probes having the nucleotide sequence represented by SEQ ID NOS: 94120, 94121, 94122, 94123, 94124, 94125, 94126, 94127, 94128, 94129, 94130 were selected from the ORFs having the nucleotide sequence represented by SEQ ID NO: 76357.

[7758] The probes having the nucleotide sequence represented by SEQ ID NOS: 94131, 94132, 94133, 94134, 94135, 94136, 94137, 94138, 94139, 94140, 94141 were selected from the ORFs having the nucleotide sequence represented by SEQ ID NO: 76358.

[7759] The probes having the nucleotide sequence represented by SEQ ID NOS: 94142, 94143, 94144, 94145, 94146, 94147, 94148, 94149, 94150, 94151, 94152 were selected from the ORFs having the nucleotide sequence represented by SEQ ID NO: 76359.

[7760] The probes having the nucleotide sequence represented by SEQ ID NOS: 94153, 94154, 94155, 94156, 94157, 94158, 94159, 94160, 94161, 94162, 94163 were selected from the ORFs having the nucleotide sequence represented by SEQ ID NO: 76360.

[7761] The probes having the nucleotide sequence represented by SEQ ID NOS: 94164, 94165, 94166, 94167, 94168, 94169, 94170, 94171, 94172, 94173, 94174 were selected from the ORFs having the nucleotide sequence represented by SEQ ID NO: 76361.

[7762] The probes having the nucleotide sequence represented by SEQ ID NOS: 94175, 94176, 94177, 94178, 94179, 94180, 94181, 94182, 94183, 94184, 94185 were selected from the ORFs having the nucleotide sequence represented by SEQ ID NO: 76362.

[7763] The probes having the nucleotide sequence represented by SEQ ID NOS: 94186, 94187, 94188, 94189, 94190, 94191, 94192, 94193, 94194, 94195, 94196 were selected from the ORFs having the nucleotide sequence represented by SEQ ID NO: 76363.

[7764] The probes having the nucleotide sequence represented by SEQ ID NOS: 94197, 94198, 94199, 94200, 94201, 94202, 94203, 94204, 94205, 94206, 94207 were selected from the ORFs having the nucleotide sequence represented by SEQ ID NO: 76364.

[7765] The probes having the nucleotide sequence represented by SEQ ID NOS: 94208, 94209, 94210, 94211, 94212, 94213, 94214, 94215, 94216, 94217, 94218 were selected from the ORFs having the nucleotide sequence represented by SEQ ID NO: 76365.

[7766] The probes having the nucleotide sequence represented by SEQ ID NOS: 94219, 94220, 94221, 94222, 94223, 94224, 94225, 94226, 94227, 94228, 94229 were selected from the ORFs having the nucleotide sequence represented by SEQ ID NO: 76366.

[7767] The probes having the nucleotide sequence represented by SEQ ID NOS: 94230, 94231, 94232, 94233, 94234, 94235, 94236, 94237, 94238, 94239, 94240 were selected from the ORFs having the nucleotide sequence represented by SEQ ID NO: 76367.

[7768] The probes having the nucleotide sequence represented by SEQ ID NOS: 94241, 94242, 94243, 94244, 94245, 94246, 94247, 94248, 94249, 94250, 94251 were selected from the ORFs having the nucleotide sequence represented by SEQ ID NO: 76368.

[7769] The probes having the nucleotide sequence represented by SEQ ID NOS: 94252, 94253, 94254, 94255, 94256, 94257, 94258, 94259, 94260, 94261, 94262 were selected from the ORFs having the nucleotide sequence represented by SEQ ID NO: 76369.

[7770] The probes having the nucleotide sequence represented by SEQ ID NOS: 94263, 94264, 94265, 94266, 94267, 94268, 94269, 94270, 94271, 94272, 94273 were selected from the ORFs having the nucleotide sequence represented by SEQ ID NO: 76370.

[7771] The probes having the nucleotide sequence represented by SEQ ID NOS: 94274, 94275, 94276, 94277, 94278, 94279, 94280, 94281, 94282, 94283, 94284 were selected from the ORFs having the nucleotide sequence represented by SEQ ID NO: 76371.

[7772] The probes having the nucleotide sequence represented by SEQ ID NOS: 94285, 94286, 94287, 94288, 94289, 94290, 94291, 94292, 94293, 94294, 94295 were selected from the ORFs having the nucleotide sequence represented by SEQ ID NO: 76372.

[7773] The probes having the nucleotide sequence represented by SEQ ID NOS: 94296, 94297, 94298, 94299, 94300, 94301, 94302, 94303, 94304, 94305, 94306 were selected from the ORFs having the nucleotide sequence represented by SEQ ID NO: 76373.

[7774] The probes having the nucleotide sequence represented by SEQ ID NOS: 94307, 94308, 94309, 94310, 94311, 94312, 94313, 94314, 94315, 94316, 94317 were selected from the ORFs having the nucleotide sequence represented by SEQ ID NO: 76374.

[7775] The probes having the nucleotide sequence represented by SEQ ID NOS: 94318, 94319, 94320, 94321, 94322, 94323, 94324, 94325, 94326, 94327, 94328 were selected from the ORFs having the nucleotide sequence represented by SEQ ID NO: 76375.

[7776] The probes having the nucleotide sequence represented by SEQ ID NOS: 94329, 94330, 94331, 94332, 94333, 94334, 94335, 94336, 94337, 94338, 94339 were selected from the ORFs having the nucleotide sequence represented by SEQ ID NO: 76376.

[7777] The probes having the nucleotide sequence represented by SEQ ID NOS: 94340, 94341, 94342, 94343, 94344, 94345, 94346, 94347, 94348, 94349, 94350 were selected from the ORFs having the nucleotide sequence represented by SEQ ID NO: 76377.

[7778] The probes having the nucleotide sequence represented by SEQ ID NOS: 94351, 94352, 94353, 94354, 94355, 94356, 94357, 94358, 94359, 94360, 94361 were selected from the ORFs having the nucleotide sequence represented by SEQ ID NO: 76378.

[7779] The probes having the nucleotide sequence represented by SEQ ID NOS: 94362, 94363, 94364, 94365, 94366, 94367, 94368, 94369, 94370, 94371, 94372 were selected from the ORFs having the nucleotide sequence represented by SEQ ID NO: 76379.

[7780] The probes having the nucleotide sequence represented by SEQ ID NOS: 94373, 94374, 94375, 94376, 94377, 94378, 94379, 94380, 94381, 94382, 94383 were selected from the ORFs having the nucleotide sequence represented by SEQ ID NO: 76380.

[7781] The probes having the nucleotide sequence represented by SEQ ID NOS: 94384, 94385, 94386, 94387, 94388, 94389, 94390, 94391, 94392, 94393, 94394 were selected from the ORFs having the nucleotide sequence represented by SEQ ID NO: 76381.

[7782] The probes having the nucleotide sequence represented by SEQ ID NOS: 94417, 94418, 94419, 94420, 94421, 94422, 94423, 94424, 94425, 94426, 94427 were selected from the ORFs having the nucleotide sequence represented by SEQ ID NO: 76382.

[7783] The probes having the nucleotide sequence represented by SEQ ID NOS: 94395, 94396, 94397, 94398, 94399, 94400, 94401, 94402, 94403, 94404, 94405 were selected from the ORFs having the nucleotide sequence represented by SEQ ID NO: 76383.

[7784] The probes having the nucleotide sequence represented by SEQ ID NOS: 94406, 94407, 94408, 94409, 94410, 94411, 94412, 94413, 94414, 94415, 94416 were selected from the ORFs having the nucleotide sequence represented by SEQ ID NO: 76384.

[7785] The probes having the nucleotide sequence represented by SEQ ID NOS: 94428, 94429, 94430, 94431, 94432, 94433, 94434, 94435, 94436, 94437, 94438 were selected from the ORFs having the nucleotide sequence represented by SEQ ID NO: 76385.

[7786] The probes having the nucleotide sequence represented by SEQ ID NOS: 94439, 94440, 94441, 94442, 94443, 94444, 94445, 94446, 94447, 94448, 94449 were selected from the ORFs having the nucleotide sequence represented by SEQ ID NO: 76386.

[7787] The probes having the nucleotide sequence represented by SEQ ID NOS: 94450, 94451, 94452, 94453, 94454, 94455, 94456, 94457, 94458, 94459, 94460 were selected from the ORFs having the nucleotide sequence represented by SEQ ID NO: 76387.

[7788] The probes having the nucleotide sequence represented by SEQ ID NOS: 94461, 94462, 94463, 94464, 94465, 94466, 94467, 94468, 94469, 94470, 94471 were selected from the ORFs having the nucleotide sequence represented by SEQ ID NO: 76388.

[7789] The probes having the nucleotide sequence represented by SEQ ID NOS: 94472, 94473, 94474, 94475, 94476, 94477, 94478, 94479, 94480, 94481, 94482 were selected from the ORFs having the nucleotide sequence represented by SEQ ID NO: 76389.

[7790] The probes having the nucleotide sequence represented by SEQ ID NOS: 94483, 94484, 94485, 94486, 94487, 94488, 94489, 94490, 94491, 94492, 94493 were selected from the ORFs having the nucleotide sequence represented by SEQ ID NO: 76390.

[7791] The probes having the nucleotide sequence represented by SEQ ID NOS: 94494, 94495, 94496, 94497, 94498, 94499, 94500, 94501, 94502, 94503, 94504 were selected from the ORFs having the nucleotide sequence represented by SEQ ID NO: 76391.

[7792] The probes having the nucleotide sequence represented by SEQ ID NOS: 94505, 94506, 94507, 94508, 94509, 94510, 94511, 94512, 94513, 94514, 94515 were selected from the ORFs having the nucleotide sequence represented by SEQ ID NO: 76392.

[7793] The probes having the nucleotide sequence represented by SEQ ID NOS: 94516, 94517, 94518, 94519, 94520, 94521, 94522, 94523, 94524, 94525, 94526 were selected from the ORFs having the nucleotide sequence represented by SEQ ID NO: 76393.

[7794] The probes having the nucleotide sequence represented by SEQ ID NOS: 94527, 94528, 94529, 94530, 94531, 94532, 94533, 94534, 94535, 94536, 94537 were selected from the ORFs having the nucleotide sequence represented by SEQ ID NO: 76394.

[7795] The probes having the nucleotide sequence represented by SEQ ID NOS: 94538, 94539, 94540, 94541, 94542, 94543, 94544, 94545, 94546, 94547, 94548 were selected from the ORFs having the nucleotide sequence represented by SEQ ID NO: 76395.

[7796] The probes having the nucleotide sequence represented by SEQ ID NOS: 94549, 94550, 94551, 94552, 94553, 94554, 94555, 94556, 94557, 94558, 94559 were selected from the ORFs having the nucleotide sequence represented by SEQ ID NO: 76396.

[7797] The probes having the nucleotide sequence represented by SEQ ID NOS: 94560, 94561, 94562, 94563, 94564, 94565, 94566, 94567, 94568, 94569, 94570 were selected from the ORFs having the nucleotide sequence represented by SEQ ID NO: 76397.

[7798] The probes having the nucleotide sequence represented by SEQ ID NOS: 94571, 94572, 94573, 94574, 94575, 94576, 94577, 94578, 94579, 94580, 94581 were selected from the ORFs having the nucleotide sequence represented by SEQ ID NO: 76398.

[7799] The probes having the nucleotide sequence represented by SEQ ID NOS: 94582, 94583, 94584, 94585, 94586, 94587, 94588, 94589, 94590, 94591, 94592 were selected from the ORFs having the nucleotide sequence represented by SEQ ID NO: 76399.

[7800] The probes having the nucleotide sequence represented by SEQ ID NOS: 94593, 94594, 94595, 94596, 94597, 94598, 94599, 94600, 94601, 94602, 94603 were selected from the ORFs having the nucleotide sequence represented by SEQ ID NO: 76400.

[7801] The probes having the nucleotide sequence represented by SEQ ID NOS: 94604, 94605, 94606, 94607, 94608, 94609, 94610, 94611, 94612, 94613, 94614 were selected from the ORFs having the nucleotide sequence represented by SEQ ID NO: 76401.

[7802] The probes having the nucleotide sequence represented by SEQ ID NOS: 94615, 94616, 94617, 94618, 94619, 94620, 94621, 94622, 94623, 94624, 94625 were selected from the ORFs having the nucleotide sequence represented by SEQ ID NO: 76402.

[7803] The probes having the nucleotide sequence represented by SEQ ID NOS: 94626, 94627, 94628, 94629, 94630, 94631, 94632, 94633, 94634, 94635, 94636 were selected from the ORFs having the nucleotide sequence represented by SEQ ID NO: 76403.

[7804] The probes having the nucleotide sequence represented by SEQ ID NOS: 94637, 94638, 94639, 94640, 94641, 94642, 94643, 94644, 94645, 94646, 94647 were selected from the ORFs having the nucleotide sequence represented by SEQ ID NO: 76404.

[7805] The probes having the nucleotide sequence represented by SEQ ID NOS: 94648, 94649, 94650, 94651, 94652, 94653, 94654, 94655, 94656, 94657, 94658 were selected from the ORFs having the nucleotide sequence represented by SEQ ID NO: 76405.

[7806] The probes having the nucleotide sequence represented by SEQ ID NOS: 94659, 94660, 94661, 94662, 94663, 94664, 94665, 94666, 94667, 94668, 94669 were selected from the ORFs having the nucleotide sequence represented by SEQ ID NO: 76406.

[7807] The probes having the nucleotide sequence represented by SEQ ID NOS: 94670, 94671, 94672, 94673, 94674, 94675, 94676, 94677, 94678, 94679, 94680 were selected from the ORFs having the nucleotide sequence represented by SEQ ID NO: 76407.

[7808] The probes having the nucleotide sequence represented by SEQ ID NOS: 94681, 94682, 94683, 94684, 94685, 94686, 94687, 94688, 94689, 94690, 94691 were selected from the ORFs having the nucleotide sequence represented by SEQ ID NO: 76408.

[7809] The probes having the nucleotide sequence represented by SEQ ID NOS: 94692, 94693, 94694, 94695, 94696, 94697, 94698, 94699, 94700, 94701, 94702 were selected from the ORFs having the nucleotide sequence represented by SEQ ID NO: 76409.

[7810] The probes having the nucleotide sequence represented by SEQ ID NOS: 94703, 94704, 94705, 94706, 94707, 94708, 94709, 94710, 94711, 94712, 94713 were selected from the ORFs having the nucleotide sequence represented by SEQ ID NO: 76410.

[7811] The probes having the nucleotide sequence represented by SEQ ID NOS: 94714, 94715, 94716, 94717, 94718, 94719, 94720, 94721, 94722, 94723, 94724 were selected from the ORFs having the nucleotide sequence represented by SEQ ID NO: 76411.

[7812] The probes having the nucleotide sequence represented by SEQ ID NOS: 94725, 94726, 94727, 94728, 94729, 94730, 94731, 94732, 94733, 94734, 94735 were selected from the ORFs having the nucleotide sequence represented by SEQ ID NO: 76412.

[7813] The probes having the nucleotide sequence represented by SEQ ID NOS: 94736, 94737, 94738, 94739, 94740, 94741, 94742, 94743, 94744, 94745, 94746 were selected from the ORFs having the nucleotide sequence represented by SEQ ID NO: 76413.

[7814] The probes having the nucleotide sequence represented by SEQ ID NOS: 94747, 94748, 94749, 94750, 94751, 94752, 94753, 94754, 94755, 94756, 94757 were selected from the ORFs having the nucleotide sequence represented by SEQ ID NO: 76414.

[7815] The probes having the nucleotide sequence represented by SEQ ID NOS: 94758, 94759, 94760, 94761, 94762, 94763, 94764, 94765, 94766, 94767, 94768 were selected from the ORFs having the nucleotide sequence represented by SEQ ID NO: 76415.

[7816] The probes having the nucleotide sequence represented by SEQ ID NOS: 94769, 94770, 94771, 94772, 94773, 94774, 94775, 94776, 94777, 94778, 94779 were selected from the ORFs having the nucleotide sequence represented by SEQ ID NO: 76416.

[7817] The probes having the nucleotide sequence represented by SEQ ID NOS: 94780, 94781, 94782, 94783, 94784, 94785, 94786, 94787, 94788, 94789, 94790 were selected from the ORFs having the nucleotide sequence represented by SEQ ID NO: 76417.

[7818] The probes having the nucleotide sequence represented by SEQ ID NOS: 94791, 94792, 94793, 94794, 94795, 94796, 94797, 94798, 94799, 94800, 94801 were selected from the ORFs having the nucleotide sequence represented by SEQ ID NO: 76418.

[7819] The probes having the nucleotide sequence represented by SEQ ID NOS: 94802, 94803, 94804, 94805, 94806, 94807, 94808, 94809, 94810, 94811, 94812 were selected from the ORFs having the nucleotide sequence represented by SEQ ID NO: 76419.

[7820] The probes having the nucleotide sequence represented by SEQ ID NOS: 94813, 94814, 94815, 94816, 94817, 94818, 94819, 94820, 94821, 94822, 94823 were selected from the ORFs having the nucleotide sequence represented by SEQ ID NO: 76420.

[7821] The probes having the nucleotide sequence represented by SEQ ID NOS: 94824, 94825, 94826, 94827, 94828, 94829, 94830, 94831, 94832, 94833, 94834 were selected from the ORFs having the nucleotide sequence represented by SEQ ID NO: 76421.

[7822] The probes having the nucleotide sequence represented by SEQ ID NOS: 94835, 94836, 94837, 94838, 94839, 94840, 94841, 94842, 94843, 94844, 94845 were selected from the ORFs having the nucleotide sequence represented by SEQ ID NO: 76422.

[7823] The probes having the nucleotide sequence represented by SEQ ID NOS: 94846, 94847, 94848, 94849, 94850, 94851, 94852, 94853, 94854, 94855, 94856 were selected from the ORFs having the nucleotide sequence represented by SEQ ID NO: 76423.

[7824] The probes having the nucleotide sequence represented by SEQ ID NOS: 94857, 94858, 94859, 94860, 94861, 94862, 94863, 94864, 94865, 94866, 94867 were selected from the ORFs having the nucleotide sequence represented by SEQ ID NO: 76424.

[7825] The probes having the nucleotide sequence represented by SEQ ID NOS: 94868, 94869, 94870, 94871, 94872, 94873, 94874, 94875, 94876, 94877, 94878 were selected from the ORFs having the nucleotide sequence represented by SEQ ID NO: 76425.

[7826] The probes having the nucleotide sequence represented by SEQ ID NOS: 94879, 94880, 94881, 94882, 94883, 94884, 94885, 94886, 94887, 94888, 94889 were selected from the ORFs having the nucleotide sequence represented by SEQ ID NO: 76426.

[7827] The probes having the nucleotide sequence represented by SEQ ID NOS: 94890, 94891, 94892, 94893, 94894, 94895, 94896, 94897, 94898, 94899, 94900 were selected from the ORFs having the nucleotide sequence represented by SEQ ID NO: 76427.

[7828] The probes having the nucleotide sequence represented by SEQ ID NOS: 94901, 94902, 94903, 94904, 94905, 94906, 94907, 94908, 94909, 94910, 94911 were selected from the ORFs having the nucleotide sequence represented by SEQ ID NO: 76428.

[7829] The probes having the nucleotide sequence represented by SEQ ID NOS: 94912, 94913, 94914, 94915, 94916, 94917, 94918, 94919, 94920, 94921, 94922 were selected from the ORFs having the nucleotide sequence represented by SEQ ID NO: 76429.

[7830] The probes having the nucleotide sequence represented by SEQ ID NOS: 94923, 94924, 94925, 94926, 94927, 94928, 94929, 94930, 94931, 94932, 94933 were selected from the ORFs having the nucleotide sequence represented by SEQ ID NO: 76430.

[7831] The probes having the nucleotide sequence represented by SEQ ID NOS: 94934, 94935, 94936, 94937, 94938, 94939, 94940, 94941, 94942, 94943, 94944 were selected from the ORFs having the nucleotide sequence represented by SEQ ID NO: 76431.

[7832] The probes having the nucleotide sequence represented by SEQ ID NOS: 94945, 94946, 94947, 94948, 94949, 94950, 94951, 94952, 94953, 94954, 94955 were selected from the ORFs having the nucleotide sequence represented by SEQ ID NO: 76432.

[7833] The probes having the nucleotide sequence represented by SEQ ID NOS: 94956, 94957, 94958, 94959, 94960, 94961, 94962, 94963, 94964, 94965, 94966 were selected from the ORFs having the nucleotide sequence represented by SEQ ID NO: 76433.

[7834] The probes having the nucleotide sequence represented by SEQ ID NOS: 94967, 94968, 94969, 94970, 94971, 94972, 94973, 94974, 94975, 94976, 94977 were selected from the ORFs having the nucleotide sequence represented by SEQ ID NO: 76434.

[7835] The probes having the nucleotide sequence represented by SEQ ID NOS: 94978, 94979, 94980, 94981, 94982, 94983, 94984, 94985, 94986, 94987, 94988 were selected from the ORFs having the nucleotide sequence represented by SEQ ID NO: 76435.

[7836] The probes having the nucleotide sequence represented by SEQ ID NOS: 94989, 94990, 94991, 94992, 94993, 94994, 94995, 94996, 94997, 94998, 94999 were selected from the ORFs having the nucleotide sequence represented by SEQ ID NO: 76436.

[7837] The probes having the nucleotide sequence represented by SEQ ID NOS: 95000, 95001, 95002, 95003, 95004, 95005, 95006, 95007, 95008, 95009, 95010 were selected from the ORFs having the nucleotide sequence represented by SEQ ID NO: 76437.

[7838] The probes having the nucleotide sequence represented by SEQ ID NOS: 95011, 95012, 95013, 95014, 95015, 95016, 95017, 95018, 95019, 95020, 95021 were selected from the ORFs having the nucleotide sequence represented by SEQ ID NO: 76438.

[7839] The probes having the nucleotide sequence represented by SEQ ID NOS: 95022, 95023, 95024, 95025, 95026, 95027, 95028, 95029, 95030, 95031, 95032 were selected from the ORFs having the nucleotide sequence represented by SEQ ID NO: 76439.

[7840] The probes having the nucleotide sequence represented by SEQ ID NOS: 95033, 95034, 95035, 95036, 95037, 95038, 95039, 95040, 95041, 95042, 95043 were selected from the ORFs having the nucleotide sequence represented by SEQ ID NO: 76440.

[7841] The probes having the nucleotide sequence represented by SEQ ID NOS: 95044, 95045, 95046, 95047, 95048, 95049, 95050, 95051, 95052, 95053, 95054 were selected from the ORFs having the nucleotide sequence represented by SEQ ID NO: 76441.

[7842] The probes having the nucleotide sequence represented by SEQ ID NOS: 95055, 95056, 95057, 95058, 95059, 95060, 95061, 95062, 95063, 95064, 95065 were selected from the ORFs having the nucleotide sequence represented by SEQ ID NO: 76442.

[7843] The probes having the nucleotide sequence represented by SEQ ID NOS: 95066, 95067, 95068, 95069, 95070, 95071, 95072, 95073, 95074, 95075, 95076 were selected from the ORFs having the nucleotide sequence represented by SEQ ID NO: 76443.

[7844] The probes having the nucleotide sequence represented by SEQ ID NOS: 95077, 95078, 95079, 95080, 95081, 95082, 95083, 95084, 95085, 95086, 95087 were selected from the ORFs having the nucleotide sequence represented by SEQ ID NO: 76444.

[7845] The probes having the nucleotide sequence represented by SEQ ID NOS: 95088, 95089, 95090, 95091, 95092, 95093, 95094, 95095, 95096, 95097, 95098 were selected from the ORFs having the nucleotide sequence represented by SEQ ID NO: 76445.

[7846] The probes having the nucleotide sequence represented by SEQ ID NOS: 95099, 95100, 95101, 95102, 95103, 95104, 95105, 95106, 95107, 95108, 95109 were selected from the ORFs having the nucleotide sequence represented by SEQ ID NO: 76446.

[7847] The probes having the nucleotide sequence represented by SEQ ID NOS: 95110, 95111, 95112, 95113, 95114, 95115, 95116, 95117, 95118, 95119, 95120 were selected from the ORFs having the nucleotide sequence represented by SEQ ID NO: 76447.

[7848] The probes having the nucleotide sequence represented by SEQ ID NOS: 95121, 95122, 95123, 95124, 95125, 95126, 95127, 95128, 95129, 95130, 95131 were selected from the ORFs having the nucleotide sequence represented by SEQ ID NO: 76448.

[7849] The probes having the nucleotide sequence represented by SEQ ID NOS: 95132, 95133, 95134, 95135, 95136, 95137, 95138, 95139, 95140, 95141, 95142 were selected from the ORFs having the nucleotide sequence represented by SEQ ID NO: 76449.

[7850] The probes having the nucleotide sequence represented by SEQ ID NOS: 95143, 95144, 95145, 95146, 95147, 95148, 95149, 95150, 95151, 95152, 95153 were selected from the ORFs having the nucleotide sequence represented by SEQ ID NO: 76450.

[7851] The probes having the nucleotide sequence represented by SEQ ID NOS: 95154, 95155, 95156, 95157, 95158, 95159, 95160, 95161, 95162, 95163, 95164 were selected from the ORFs having the nucleotide sequence represented by SEQ ID NO: 76451.

[7852] The probes having the nucleotide sequence represented by SEQ ID NOS: 95165, 95166, 95167, 95168, 95169, 95170, 95171, 95172, 95173, 95174, 95175 were selected from the ORFs having the nucleotide sequence represented by SEQ ID NO: 76452.

[7853] The probes having the nucleotide sequence represented by SEQ ID NOS: 95176, 95177, 95178, 95179, 95180, 95181, 95182, 95183, 95184, 95185, 95186 were selected from the ORFs having the nucleotide sequence represented by SEQ ID NO: 76453.

[7854] The probes having the nucleotide sequence represented by SEQ ID NOS: 95187, 95188, 95189, 95190, 95191, 95192, 95193, 95194, 95195, 95196, 95197 were selected from the ORFs having the nucleotide sequence represented by SEQ ID NO: 76454.

[7855] The probes having the nucleotide sequence represented by SEQ ID NOS: 95198, 95199, 95200, 95201, 95202, 95203, 95204, 95205, 95206, 95207, 95208 were selected from the ORFs having the nucleotide sequence represented by SEQ ID NO: 76455.

[7856] The probes having the nucleotide sequence represented by SEQ ID-NOS: 95209, 95210, 95211, 95212, 95213, 95214, 95215, 95216, 95217, 95218, 95219 were selected from the ORFs having the nucleotide sequence represented by SEQ ID NO: 76456.

[7857] The probes having the nucleotide sequence represented by SEQ ID NOS: 95220, 95221, 95222, 95223, 95224, 95225, 95226, 95227, 95228, 95229, 95230 were selected from the ORFs having the nucleotide sequence represented by SEQ ID NO: 76457.

[7858] The probes having the nucleotide sequence represented by SEQ ID NOS: 95231, 95232, 95233, 95234, 95235, 95236, 95237, 95238, 95239, 95240, 95241 were selected from the ORFs having the nucleotide sequence represented by SEQ ID NO: 76458.

[7859] The probes having the nucleotide sequence represented by SEQ ID NOS: 95242, 95243, 95244, 95245, 95246, 95247, 95248, 95249, 95250, 95251, 95252 were selected from the ORFs having the nucleotide sequence represented by SEQ ID NO: 76459.

[7860] The probes having the nucleotide sequence represented by SEQ ID NOS: 95253, 95254, 95255, 95256, 95257, 95258, 95259, 95260, 95261, 95262, 95263 were selected from the ORFs having the nucleotide sequence represented by SEQ ID NO: 76460.

[7861] The probes having the nucleotide sequence represented by SEQ ID NOS: 95264, 95265, 95266, 95267, 95268, 95269, 95270, 95271, 95272, 95273, 95274 were selected from the ORFs having the nucleotide sequence represented by SEQ ID NO: 76461.

[7862] The probes having the nucleotide sequence represented by SEQ ID NOS: 95275, 95276, 95277, 95278, 95279, 95280, 95281, 95282, 95283, 95284, 95285 were selected from the ORFs having the nucleotide sequence represented by SEQ ID NO: 76462.

[7863] The probes having the nucleotide sequence represented by SEQ ID NOS: 95286, 95287, 95288, 95289, 95290, 95291, 95292, 95293, 95294, 95295, 95296 were selected from the ORFs having the nucleotide sequence represented by SEQ ID NO: 76463.

[7864] The probes having the nucleotide sequence represented by SEQ ID NOS: 95297, 95298, 95299, 95300, 95301, 95302, 95303, 95304, 95305, 95306, 95307 were selected from the ORFs having the nucleotide sequence represented by SEQ ID NO: 76464.

[7865] The probes having the nucleotide sequence represented by SEQ ID NOS: 95308, 95309, 95310, 95311, 95312, 95313, 95314, 95315, 95316, 95317, 95318 were selected from the ORFs having the nucleotide sequence represented by SEQ ID NO: 76465.

[7866] The probes having the nucleotide sequence represented by SEQ ID NOS: 95319, 95320, 95321, 95322, 95323, 95324, 95325, 95326, 95327, 95328, 95329 were selected from the ORFs having the nucleotide sequence represented by SEQ ID NO: 76466.

[7867] The probes having the nucleotide sequence represented by SEQ ID NOS: 95330, 95331, 95332, 95333, 95334, 95335, 95336, 95337, 95338, 95339, 95340 were selected from the ORFs having the nucleotide sequence represented by SEQ ID NO: 76467.

[7868] The probes having the nucleotide sequence represented by SEQ ID NOS: 95341, 95342, 95343, 95344, 95345, 95346, 95347, 95348, 95349, 95350, 95351 were selected from the ORFs having the nucleotide sequence represented by SEQ ID NO: 76468.

[7869] The probes having the nucleotide sequence represented by SEQ ID NOS: 95352, 95353, 95354, 95355, 95356, 95357, 95358, 95359, 95360, 95361, 95362 were selected from the ORFs having the nucleotide sequence represented by SEQ ID NO: 76469.

[7870] The probes having the nucleotide sequence represented by SEQ ID NOS: 95363, 95364, 95365, 95366, 95367, 95368, 95369, 95370, 95371, 95372, 95373 were selected from the ORFs having the nucleotide sequence represented by SEQ ID NO: 76470.

[7871] The probes having the nucleotide sequence represented by SEQ ID NOS: 95374, 95375, 95376, 95377, 95378, 95379, 95380, 95381, 95382, 95383, 95384 were selected from the ORFs having the nucleotide sequence represented by SEQ ID NO: 76471.

[7872] The probes having the nucleotide sequence represented by SEQ ID NOS: 95385, 95386, 95387, 95388, 95389, 95390, 95391, 95392, 95393, 95394, 95395 were selected from the ORFs having the nucleotide sequence represented by SEQ ID NO: 76472.

[7873] The probes having the nucleotide sequence represented by SEQ ID NOS: 95396, 95397, 95398, 95399, 95400, 95401, 95402, 95403, 95404, 95405, 95406 were selected from the ORFs having the nucleotide sequence represented by SEQ ID NO: 76473.

[7874] The probes having the nucleotide sequence represented by SEQ ID NOS: 95407, 95408, 95409, 95410, 95411, 95412, 95413, 95414, 95415, 95416, 95417 were selected from the ORFs having the nucleotide sequence represented by SEQ ID NO: 76474.

[7875] The probes having the nucleotide sequence represented by SEQ ID NOS: 95418, 95419, 95420, 95421, 95422, 95423, 95424, 95425, 95426, 95427, 95428 were selected from the ORFs having the nucleotide sequence represented by SEQ ID NO: 76475.

[7876] The probes having the nucleotide sequence represented by SEQ ID NOS: 95429, 95430, 95431, 95432, 95433, 95434, 95435, 95436, 95437, 95438, 95439 were selected from the ORFs having the nucleotide sequence represented by SEQ ID NO: 76476.

[7877] The probes having the nucleotide sequence represented by SEQ ID NOS: 95440, 95441, 95442, 95443, 95444, 95445, 95446, 95447, 95448, 95449, 95450 were selected from the ORFs having the nucleotide sequence represented by SEQ ID NO: 76477.

[7878] The probes having the nucleotide sequence represented by SEQ ID NOS: 95451, 95452, 95453, 95454, 95455, 95456, 95457, 95458, 95459, 95460, 95461 were selected from the ORFs having the nucleotide sequence represented by SEQ ID NO: 76478.

[7879] The probes having the nucleotide sequence represented by SEQ ID NOS: 95462, 95463, 95464, 95465, 95466, 95467, 95468, 95469, 95470, 95471, 95472 were selected from the ORFs having the nucleotide sequence represented by SEQ ID NO: 76479.

[7880] The probes having the nucleotide sequence represented by SEQ ID NOS: 95473, 95474, 95475, 95476, 95477, 95478, 95479, 95480, 95481, 95482, 95483 were selected from the ORFs having the nucleotide sequence represented by SEQ ID NO: 76480.

[7881] The probes having the nucleotide sequence represented by SEQ ID NOS: 95484, 95485, 95486, 95487, 95488, 95489, 95490, 95491, 95492, 95493, 95494 were selected from the ORFs having the nucleotide sequence represented by SEQ ID NO: 76481.

[7882] The probes having the nucleotide sequence represented by SEQ ID NOS: 95495, 95496, 95497, 95498, 95499, 95500, 95501, 95502, 95503, 95504, 95505 were selected from the ORFs having the nucleotide sequence represented by SEQ ID NO: 76482.

[7883] The probes having the nucleotide sequence represented by SEQ ID NOS: 95506, 95507, 95508, 95509, 95510, 95511, 95512, 95513, 95514, 95515, 95516 were selected from the ORFs having the nucleotide sequence represented by SEQ ID NO: 76483.

[7884] The probes having the nucleotide sequence represented by SEQ ID NOS: 95517, 95518, 95519, 95520, 95521, 95522, 95523, 95524, 95525, 95526, 95527 were selected from the ORFs having the nucleotide sequence represented by SEQ ID NO: 76484.

[7885] The probes having the nucleotide sequence represented by SEQ ID NOS: 95528, 95529, 95530, 95531, 95532, 95533, 95534, 95535, 95536, 95537, 95538 were selected from the ORFs having the nucleotide sequence represented by SEQ ID NO: 76485.

[7886] The probes having the nucleotide sequence represented by SEQ ID NOS: 95539, 95540, 95541, 95542, 95543, 95544, 95545, 95546, 95547, 95548, 95549 were selected from the ORFs having the nucleotide sequence represented by SEQ ID NO: 76486.

[7887] The probes having the nucleotide sequence represented by SEQ ID NOS: 95550, 95551, 95552, 95553, 95554, 95555, 95556, 95557, 95558, 95559, 95560 were selected from the ORFs having the nucleotide sequence represented by SEQ ID NO: 76487.

[7888] The probes having the nucleotide sequence represented by SEQ ID NOS: 95561, 95562, 95563, 95564, 95565, 95566, 95567, 95568, 95569, 95570, 95571 were selected from the ORFs having the nucleotide sequence represented by SEQ ID NO: 76488.

[7889] The probes having the nucleotide sequence represented by SEQ ID NOS: 95572, 95573, 95574, 95575, 95576, 95577, 95578, 95579, 95580, 95581, 95582 were selected from the ORFs having the nucleotide sequence represented by SEQ ID NO: 76489.

[7890] The probes having the nucleotide sequence represented by SEQ ID NOS: 95583, 95584, 95585, 95586, 95587, 95588, 95589, 95590, 95591, 95592, 95593 were selected from the ORFs having the nucleotide sequence represented by SEQ ID NO: 76490.

[7891] The probes having the nucleotide sequence represented by SEQ ID NOS: 95594, 95595, 95596, 95597, 95598, 95599, 95600, 95601, 95602, 95603, 95604 were selected from the ORFs having the nucleotide sequence represented by SEQ ID NO: 76491.

[7892] The probes having the nucleotide sequence represented by SEQ ID NOS: 95605, 95606, 95607, 95608, 95609, 95610, 95611, 95612, 95613, 95614, 95615 were selected from the ORFs having the nucleotide sequence represented by SEQ ID NO: 76492.

[7893] The probes having the nucleotide sequence represented by SEQ ID NOS: 95616, 95617, 95618, 95619, 95620, 95621, 95622, 95623, 95624, 95625, 95626 were selected from the ORFs having the nucleotide sequence represented by SEQ ID NO: 76493.

[7894] The probes having the nucleotide sequence represented by SEQ ID NOS: 95627, 95628, 95629, 95630, 95631, 95632, 95633, 95634, 95635, 95636, 95637 were selected from the ORFs having the nucleotide sequence represented by SEQ ID NO: 76494.

[7895] The probes having the nucleotide sequence represented by SEQ ID NOS: 95638, 95639, 95640, 95641, 95642, 95643, 95644, 95645, 95646, 95647, 95648 were selected from the ORFs having the nucleotide sequence represented by SEQ ID NO: 76495.

[7896] The probes having the nucleotide sequence represented by SEQ ID NOS: 95649, 95650, 95651, 95652, 95653, 95654, 95655, 95656, 95657, 95658, 95659 were selected from the ORFs having the nucleotide sequence represented by SEQ ID NO: 76496.

[7897] The probes having the nucleotide sequence represented by SEQ ID NOS: 95660, 95661, 95662, 95663, 95664, 95665, 95666, 95667, 95668, 95669, 95670 were selected from the ORFs having the nucleotide sequence represented by SEQ ID NO: 76497.

[7898] The probes having the nucleotide sequence represented by SEQ ID NOS: 95671, 95672, 95673, 95674, 95675, 95676, 95677, 95678, 95679, 95680, 95681 were selected from the ORFs having the nucleotide sequence represented by SEQ ID NO: 76498.

[7899] The probes having the nucleotide sequence represented by SEQ ID NOS: 95682, 95683, 95684, 95685, 95686, 95687, 95688, 95689, 95690, 95691, 95692 were selected from the ORFs having the nucleotide sequence represented by SEQ ID NO: 76499.

[7900] The probes having the nucleotide sequence represented by SEQ ID NOS: 95693, 95694, 95695, 95696, 95697, 95698, 95699, 95700, 95701, 95702, 95703 were selected from the ORFs having the nucleotide sequence represented by SEQ ID NO: 76500.

[7901] The probes having the nucleotide sequence represented by SEQ ID NOS: 95704, 95705, 95706, 95707, 95708, 95709, 95710, 95711, 95712, 95713, 95714 were selected from the ORFs having the nucleotide sequence represented by SEQ ID NO: 76501.

[7902] The probes having the nucleotide sequence represented by SEQ ID NOS: 95715, 95716, 95717, 95718, 95719, 95720, 95721, 95722, 95723, 95724, 95725 were selected from the ORFs having the nucleotide sequence represented by SEQ ID NO: 76502.

[7903] The probes having the nucleotide sequence represented by SEQ ID NOS: 95726, 95727, 95728, 95729, 95730, 95731, 95732, 95733, 95734, 95735, 95736 were selected from the ORFs having the nucleotide sequence represented by SEQ ID NO: 76503.

[7904] The probes having the nucleotide sequence represented by SEQ ID NOS: 95737, 95738, 95739, 95740, 95741, 95742, 95743, 95744, 95745, 95746, 95747 were selected from the ORFs having the nucleotide sequence represented by SEQ ID NO: 76504.

[7905] The probes having the nucleotide sequence represented by SEQ ID NOS: 95748, 95749, 95750, 95751, 95752, 95753, 95754, 95755, 95756, 95757, 95758 were selected from the ORFs having the nucleotide sequence represented by SEQ ID NO: 76505.

[7906] The probes having the nucleotide sequence represented by SEQ ID NOS: 95759, 95760, 95761, 95762, 95763, 95764, 95765, 95766, 95767, 95768, 95769 were selected from the ORFs having the nucleotide sequence represented by SEQ ID NO: 76506.

[7907] The probes having the nucleotide sequence represented by SEQ ID NOS: 95770, 95771, 95772, 95773, 95774, 95775, 95776, 95777, 95778, 95779, 95780 were selected from the ORFs having the nucleotide sequence represented by SEQ ID NO: 76507.

[7908] The probes having the nucleotide sequence represented by SEQ ID NOS: 95781, 95782, 95783, 95784, 95785, 95786, 95787, 95788, 95789, 95790, 95791 were selected from the ORFs having the nucleotide sequence represented by SEQ ID NO: 76508.

[7909] The probes having the nucleotide sequence represented by SEQ ID NOS: 95792, 95793, 95794, 95795, 95796, 95797, 95798, 95799, 95800, 95801, 95802 were selected from the ORFs having the nucleotide sequence represented by SEQ ID NO: 76509.

[7910] The probes having the nucleotide sequence represented by SEQ ID NOS: 95803, 95804, 95805, 95806, 95807, 95808, 95809, 95810, 95811, 95812, 95813 were selected from the ORFs having the nucleotide sequence represented by SEQ ID NO: 76510.

[7911] The probes having the nucleotide sequence represented by SEQ ID NOS: 95814, 95815, 95816, 95817, 95818, 95819, 95820, 95821, 95822, 95823, 95824 were selected from the ORFs having the nucleotide sequence represented by SEQ ID NO: 76511.

[7912] The probes having the nucleotide sequence represented by SEQ ID NOS: 95825, 95826, 95827, 95828, 95829, 95830, 95831, 95832, 95833, 95834, 95835 were selected from the ORFs having the nucleotide sequence represented by SEQ ID NO: 76512.

[7913] The probes having the nucleotide sequence represented by SEQ ID NOS: 95836, 95837, 95838, 95839, 95840, 95841, 95842, 95843, 95844, 95845, 95846 were selected from the ORFs having the nucleotide sequence represented by SEQ ID NO: 76513.

[7914] The probes having the nucleotide sequence represented by SEQ ID NOS: 95847, 95848, 95849, 95850, 95851, 95852, 95853, 95854, 95855, 95856, 95857 were selected from the ORFs having the nucleotide sequence represented by SEQ ID NO: 76514.

[7915] The probes having the nucleotide sequence represented by SEQ ID NOS: 95858, 95859, 95860, 95861, 95862, 95863, 95864, 95865, 95866, 95867, 95868 were selected from the ORFs having the nucleotide sequence represented by SEQ ID NO: 76515.

[7916] The probes having the nucleotide sequence represented by SEQ ID NOS: 95869, 95870, 95871, 95872, 95873, 95874, 95875, 95876, 95877, 95878, 95879 were selected from the ORFs having the nucleotide sequence represented by SEQ ID NO: 76516.

[7917] The probes having the nucleotide sequence represented by SEQ ID NOS: 95880, 95881, 95882, 95883, 95884, 95885, 95886, 95887, 95888, 95889, 95890 were selected from the ORFs having the nucleotide sequence represented by SEQ ID NO: 76517.

[7918] The probes having the nucleotide sequence represented by SEQ ID NOS: 95891, 95892, 95893, 95894, 95895, 95896, 95897, 95898, 95899, 95900, 95901 were selected from the ORFs having the nucleotide sequence represented by SEQ ID NO: 76518.

[7919] The probes having the nucleotide sequence represented by SEQ ID NOS: 95902, 95903, 95904, 95905, 95906, 95907, 95908, 95909, 95910, 95911, 95912 were selected from the ORFs having the nucleotide sequence represented by SEQ ID NO: 76519.

[7920] The probes having the nucleotide sequence represented by SEQ ID NOS: 95913, 95914, 95915, 95916, 95917, 95918, 95919, 95920, 95921, 95922, 95923 were selected from the ORFs having the nucleotide sequence represented by SEQ ID NO: 76520.

[7921] The probes having the nucleotide sequence represented by SEQ ID NOS: 95924, 95925, 95926, 95927, 95928, 95929, 95930, 95931, 95932, 95933, 95934 were selected from the ORFs having the nucleotide sequence represented by SEQ ID NO: 76521.

[7922] The probes having the nucleotide sequence represented by SEQ ID NOS: 959.35, 95936, 95937, 95938, 95939, 95940, 95941, 95942, 95943, 95944, 95945 were selected from the ORFs having the nucleotide sequence represented by SEQ ID NO: 76522.

[7923] The probes having the nucleotide sequence represented by SEQ ID NOS: 95946, 95947, 95948, 95949, 95950, 95951, 95952, 95953, 95954, 95955, 95956 were selected from the ORFs having the nucleotide sequence represented by SEQ ID NO: 76523.

[7924] The probes having the nucleotide sequence represented by SEQ ID NOS: 95957, 95958, 95959, 95960, 95961, 95962, 95963, 95964, 95965, 95966, 95967 were selected from the ORFs having the nucleotide sequence represented by SEQ ID NO: 76524.

[7925] The probes having the nucleotide sequence represented by SEQ ID NOS: 95968, 95969, 95970, 95971, 95972, 95973, 95974, 95975, 95976, 95977, 95978 were selected from the ORFs having the nucleotide sequence represented by SEQ ID NO: 76525.

[7926] The probes having the nucleotide sequence represented by SEQ ID NOS: 95979, 95980, 95981, 95982, 95983, 95984, 95985, 95986, 95987, 95988, 95989 were selected from the ORFs having the nucleotide sequence represented by SEQ ID NO: 76526.

[7927] The probes having the nucleotide sequence represented by SEQ ID NOS: 95990, 95991, 95992, 95993, 95994, 95995, 95996, 95997, 95998, 95999, 96000 were selected from the ORFs having the nucleotide sequence represented by SEQ ID NO: 76527.

[7928] The probes having the nucleotide sequence represented by SEQ ID NOS: 96001, 96002, 96003, 96004, 96005, 96006, 96007, 96008, 96009, 96010, 96011 were selected from the ORFs having the nucleotide sequence represented by SEQ ID NO: 76528.

[7929] The probes having the nucleotide sequence represented by SEQ ID NOS: 96012, 96013, 96014, 96015, 96016, 96017, 96018, 96019, 96020, 96021, 96022 were selected from the ORFs having the nucleotide sequence represented by SEQ ID NO: 76529.

[7930] The probes having the nucleotide sequence represented by SEQ ID NOS: 96023, 96024, 96025, 96026, 96027, 96028, 96029, 96030, 96031, 96032, 96033 were selected from the ORFs having the nucleotide sequence represented by SEQ ID NO: 76530.

[7931] The probes having the nucleotide sequence represented by SEQ ID NOS: 96034, 96035, 96036, 96037, 96038, 96039, 96040, 96041, 96042, 96043, 96044 were selected from the ORFs having the nucleotide sequence represented by SEQ ID NO: 76531.

[7932] The probes having the nucleotide sequence represented by SEQ ID NOS: 96045, 96046, 96047, 96048, 96049, 96050, 96051, 96052, 96053, 96054, 96055 were selected from the ORFs having the nucleotide sequence represented by SEQ ID NO: 76532.

[7933] The probes having the nucleotide sequence represented by SEQ ID NOS: 96056, 96057, 96058, 96059, 96060, 96061, 96062, 96063, 96064, 96065, 96066 were selected from the ORFs having the nucleotide sequence represented by SEQ ID NO: 76533.

[7934] The probes having the nucleotide sequence represented by SEQ ID NOS: 96067, 96068, 96069, 96070, 96071, 96072, 96073, 96074, 96075, 96076, 96077 were selected from the ORFs having the nucleotide sequence represented by SEQ ID NO: 76534.

[7935] The probes having the nucleotide sequence represented by SEQ ID NOS: 96078, 96079, 96080, 96081, 96082, 96083, 96084, 96085, 96086, 96087, 96088 were selected from the ORFs having the nucleotide sequence represented by SEQ ID NO: 76535.

[7936] The probes having the nucleotide sequence represented by SEQ ID NOS: 96089, 96090, 96091, 96092, 96093, 96094, 96095, 96096, 96097, 96098, 96099 were selected from the ORFs having the nucleotide sequence represented by SEQ ID NO: 76536.

[7937] The probes having the nucleotide sequence represented by SEQ ID NOS: 96100, 96101, 96102, 96103, 96104, 96105, 96106, 96107, 96108, 96109, 96110 were selected from the ORFs having the nucleotide sequence represented by SEQ ID NO: 76537.

[7938] The probes having the nucleotide sequence represented by SEQ ID NOS: 96111, 96112, 96113, 96114, 96115, 96116, 96117, 96118, 96119, 96120, 96121 were selected from the ORFs having the nucleotide sequence represented by SEQ ID NO: 76538.

[7939] The probes having the nucleotide sequence represented by SEQ ID NOS: 96122, 96123, 96124, 96125, 96126, 96127, 96128, 96129, 96130, 96131, 96132 were selected from the ORFs having the nucleotide sequence represented by SEQ ID NO: 76539.

[7940] The probes having the nucleotide sequence represented by SEQ ID NOS: 96133, 96134, 96135, 96136, 96137, 96138, 96139, 96140, 96141, 96142, 96143 were selected from the ORFs having the nucleotide sequence represented by SEQ ID NO: 76540.

[7941] The probes having the nucleotide sequence represented by SEQ ID NOS: 96144, 96145, 96146, 96147, 96148, 96149, 96150, 96151, 96152, 96153, 96154 were selected from the ORFs having the nucleotide sequence represented by SEQ ID NO: 76541.

[7942] The probes having the nucleotide sequence represented by SEQ ID NOS: 96155, 96156, 96157, 96158, 96159, 96160, 96161, 96162, 96163, 96164, 96165 were selected from the ORFs having the nucleotide sequence represented by SEQ ID NO: 76542.

[7943] The probes having the nucleotide sequence represented by SEQ ID NOS: 96166, 96167, 96168, 96169, 96170, 96171, 96172, 96173, 96174, 96175, 96176 were selected from the ORFs having the nucleotide sequence represented by SEQ ID NO: 76543.

[7944] The probes having the nucleotide sequence represented by SEQ ID NOS: 96177, 96178, 96179, 96180, 96181, 96182, 96183, 96184, 96185, 96186, 96187 were selected from the ORFs having the nucleotide sequence represented by SEQ ID NO: 76544.

[7945] The probes having the nucleotide sequence represented by SEQ ID NOS: 96188, 96189, 96190, 96191, 96192, 96193, 96194, 96195, 96196, 96197, 96198 were selected from the ORFs having the nucleotide sequence represented by SEQ ID NO: 76545.

[7946] The probes having the nucleotide sequence represented by SEQ ID NOS: 96199, 96200, 96201, 96202, 96203, 96204, 96205, 96206, 96207, 96208, 96209 were selected from the ORFs having the nucleotide sequence represented by SEQ ID NO: 76546.

[7947] The probes having the nucleotide sequence represented by SEQ ID NOS: 96210, 96211, 96212, 96213, 96214, 96215, 96216, 96217, 96218, 96219, 96220 were selected from the ORFs having the nucleotide sequence represented by SEQ ID NO: 76547.

[7948] The probes having the nucleotide sequence represented by SEQ ID NOS: 96221, 96222, 96223, 96224, 96225, 96226, 96227, 96228, 96229, 96230, 96231 were selected from the ORFs having the nucleotide sequence represented by SEQ ID NO: 76548.

[7949] The probes having the nucleotide sequence represented by SEQ ID NOS: 96232, 96233, 96234, 96235, 96236, 96237, 96238, 96239, 96240, 96241, 96242 were selected from the ORFs having the nucleotide sequence represented by SEQ ID NO: 76549.

[7950] The probes having the nucleotide sequence represented by SEQ ID NOS: 96243, 96244, 96245, 96246, 96247, 96248, 96249, 96250, 96251, 96252, 96253 were selected from the ORFs having the nucleotide sequence represented by SEQ ID NO: 76550.

[7951] The probes having the nucleotide sequence represented by SEQ ID NOS: 96254, 96255, 96256, 96257, 96258, 96259, 96260, 96261, 96262, 96263, 96264 were selected from the ORFs having the nucleotide sequence represented by SEQ ID NO: 76551.

[7952] The probes having the nucleotide sequence represented by SEQ ID NOS: 96265, 96266, 96267, 96268, 96269, 96270, 96271, 96272, 96273, 96274, 96275 were selected from the ORFs having the nucleotide sequence represented by SEQ ID NO: 76552.

[7953] The probes having the nucleotide sequence represented by SEQ ID NOS: 96276, 96277, 96278, 96279, 96280, 96281, 96282, 96283, 96284, 96285, 96286 were selected from the ORFs having the nucleotide sequence represented by SEQ ID NO: 76553.

[7954] The probes having the nucleotide sequence represented by SEQ ID NOS: 96287, 96288, 96289, 96290, 96291, 96292, 96293, 96294, 96295, 96296, 96297 were selected from the ORFs having the nucleotide sequence represented by SEQ ID NO: 76554.

[7955] The probes having the nucleotide sequence represented by SEQ ID NOS: 96298, 96299, 96300, 96301, 96302, 96303, 96304, 96305, 96306, 96307, 96308 were selected from the ORFs having the nucleotide sequence represented by SEQ ID NO: 76555.

[7956] The probes having the nucleotide sequence represented by SEQ ID NOS: 96309, 96310, 96311, 96312, 96313, 96314, 96315, 96316, 96317, 96318, 96319 were selected from the ORFs having the nucleotide sequence represented by SEQ ID NO: 76556.

[7957] The probes having the nucleotide sequence represented by SEQ ID NOS: 96320, 96321, 96322, 96323, 96324, 96325, 96326, 96327, 96328, 96329, 96330 were selected from the ORFs having the nucleotide sequence represented by SEQ ID NO: 76557.

[7958] The probes having the nucleotide sequence represented by SEQ ID NOS: 96331, 96332, 96333, 96334, 96335, 96336, 96337, 96338, 96339, 96340, 96341 were selected from the ORFs having the nucleotide sequence represented by SEQ ID NO: 76558.

[7959] The probes having the nucleotide sequence represented by SEQ ID NOS: 96342, 96343, 96344, 96345, 96346, 96347, 96348, 96349, 96350, 96351, 96352 were selected from the ORFs having the nucleotide sequence represented by SEQ ID NO: 76559.

[7960] The probes having the nucleotide sequence represented by SEQ ID NOS: 96353, 96354, 96355, 96356, 96357, 96358, 96359, 96360, 96361, 96362, 96363 were selected from the ORFs having the nucleotide sequence represented by SEQ ID NO: 76560.

[7961] The probes having the nucleotide sequence represented by SEQ ID NOS: 96364, 96365, 96366, 96367, 96368, 96369, 96370, 96371, 96372, 96373, 96374 were selected from the ORFs having the nucleotide sequence represented by SEQ ID NO: 76561.

[7962] The probes having the nucleotide sequence represented by SEQ ID NOS: 96375, 96376, 96377, 96378, 96379, 96380, 96381, 96382, 96383, 96384, 96385 were selected from the ORFs having the nucleotide sequence represented by SEQ ID NO: 76562.

[7963] The probes having the nucleotide sequence represented by SEQ ID NOS: 96386, 96387, 96388, 96389, 96390, 96391, 96392, 96393, 96394, 96395, 96396 were selected from the ORFs having the nucleotide sequence represented by SEQ ID NO: 76563.

[7964] The probes having the nucleotide sequence represented by SEQ ID NOS: 96397, 96398, 96399, 96400, 96401, 96402, 96403, 96404, 96405, 96406, 96407 were selected from the ORFs having the nucleotide sequence represented by SEQ ID NO: 76564.

[7965] The probes having the nucleotide sequence represented by SEQ ID NOS: 96408, 96409, 96410, 96411, 96412, 96413, 96414, 96415, 96416, 96417, 96418 were selected from the ORFs having the nucleotide sequence represented by SEQ ID NO: 76565.

[7966] The probes having the nucleotide sequence represented by SEQ ID NOS: 96419, 96420, 96421, 96422, 96423, 96424, 96425, 96426, 96427, 96428, 96429 were selected from the ORFs having the nucleotide sequence represented by SEQ ID NO: 76566.

[7967] The probes having the nucleotide sequence represented by SEQ ID NOS: 96430, 96431, 96432, 96433, 96434, 96435, 96436, 96437, 96438, 96439, 96440 were selected from the ORFs having the nucleotide sequence represented by SEQ ID NO: 76567.

[7968] The probes having the nucleotide sequence represented by SEQ ID NOS: 96441, 96442, 96443, 96444, 96445, 96446, 96447, 96448, 96449, 96450, 96451 were selected from the ORFs having the nucleotide sequence represented by SEQ ID NO: 76568.

[7969] The probes having the nucleotide sequence represented by SEQ ID NOS: 96452, 96453, 96454, 96455, 96456, 96457, 96458, 96459, 96460, 96461, 96462 were selected from the ORFs having the nucleotide sequence represented by SEQ ID NO: 76569.

[7970] The probes having the nucleotide sequence represented by SEQ ID NOS: 96463, 96464, 96465, 96466, 96467, 96468, 96469, 96470, 96471, 96472, 96473 were selected from the ORFs having the nucleotide sequence represented by SEQ ID NO: 76570.

[7971] The probes having the nucleotide sequence represented by SEQ ID NOS: 96474, 96475, 96476, 96477, 96478, 96479, 96480, 96481, 96482, 96483, 96484 were selected from the ORFs having the nucleotide sequence represented by SEQ ID NO: 76571.

[7972] The probes having the nucleotide sequence represented by SEQ ID NOS: 96485, 96486, 96487, 96488, 96489, 96490, 96491, 96492, 96493, 96494, 96495 were selected from the ORFs having the nucleotide sequence represented by SEQ ID NO: 76572.

[7973] The probes having the nucleotide sequence represented by SEQ ID NOS: 96496, 96497, 96498, 96499, 96500, 96501, 96502, 96503, 96504, 96505, 96506 were selected from the ORFs having the nucleotide sequence represented by SEQ ID NO: 76573.

[7974] The probes having the nucleotide sequence represented by SEQ ID NOS: 96507, 96508, 96509, 96510, 96511, 96512, 96513, 96514, 96515, 96516, 96517, 96518, 96519, 96520, 96521, 96522, 96523, 96524, 96525, 96526, 96527, 96528 were selected from the ORFs having the nucleotide sequence represented by SEQ ID NO: 76574.

[7975] The probes having the nucleotide sequence represented by SEQ ID NOS: 96529, 96530, 96531, 96532, 96533, 96534, 96535, 96536, 96537, 96538, 96539 were selected from the ORFs having the nucleotide sequence represented by SEQ ID NO: 76575.

[7976] The probes having the nucleotide sequence represented by SEQ ID NOS: 96540, 96541, 96542, 96543, 96544, 96545, 96546, 96547, 96548, 96549, 96550 were selected from the ORFs having the nucleotide sequence represented by SEQ ID NO: 76576.

[7977] The probes having the nucleotide sequence represented by SEQ ID NOS: 96551, 96552, 96553, 96554, 96555, 96556, 96557, 96558, 96559, 96560, 96561 were selected from the ORFs having the nucleotide sequence represented by SEQ ID NO: 76577.

[7978] The probes having the nucleotide sequence represented by SEQ ID NOS: 96562, 96563, 96564, 96565, 96566, 96567, 96568, 96569, 96570, 96571, 96572 were selected from the ORFs having the nucleotide sequence represented by SEQ ID NO: 76578.

[7979] The probes having the nucleotide sequence represented by SEQ ID NOS: 96573, 96574, 96575, 96576, 96577, 96578, 96579, 96580, 96581, 96582, 96583 were selected from the ORFs having the nucleotide sequence represented by SEQ ID NO: 76579.

[7980] The probes having the nucleotide sequence represented by SEQ ID NOS: 96584, 96585, 96586, 96587, 96588, 96589, 96590, 96591, 96592, 96593, 96594 were selected from the ORFs having the nucleotide sequence represented by SEQ ID NO: 76580.

[7981] The probes having the nucleotide sequence represented by SEQ ID NOS: 96595, 96596, 96597, 96598, 96599, 96600, 96601, 96602, 96603, 96604, 96605 were selected from the ORFs having the nucleotide sequence represented by SEQ ID NO: 76581.

[7982] The probes having the nucleotide sequence represented by SEQ ID NOS: 96606, 96607, 96608, 96609, 96610, 96611, 96612, 96613, 96614, 96615, 96616 were selected from the ORFs having the nucleotide sequence represented by SEQ ID NO: 76582.

[7983] The probes having the nucleotide sequence represented by SEQ ID NOS: 96617, 96618, 96619, 96620, 96621, 96622, 96623, 96624, 96625, 96626, 96627 were selected from the ORFs having the nucleotide sequence represented by SEQ ID NO: 76583.

[7984] The probes having the nucleotide sequence represented by SEQ ID NOS: 96628, 96629, 96630, 96631, 96632, 96633, 96634, 96635, 96636, 96637, 96638 were selected from the ORFs having the nucleotide sequence represented by SEQ ID NO: 76584.

[7985] The probes having the nucleotide sequence represented by SEQ ID NOS: 96639, 96640, 96641, 96642, 96643, 96644, 96645, 96646, 96647, 96648, 96649 were selected from the ORFs having the nucleotide sequence represented by SEQ ID NO: 76585.

[7986] The probes having the nucleotide sequence represented by SEQ ID NOS: 96650, 96651, 96652, 96653, 96654, 96655, 96656, 96657, 96658, 96659, 96660 were selected from the ORFs having the nucleotide sequence represented by SEQ ID NO: 76586.

[7987] The probes having the nucleotide sequence represented by SEQ ID NOS: 96661, 96662, 96663, 96664, 96665, 96666, 96667, 96668, 96669, 96670, 96671 were selected from the ORFs having the nucleotide sequence represented by SEQ ID NO: 76587.

[7988] The probes having the nucleotide sequence represented by SEQ ID NOS: 96672, 96673, 96674, 96675, 96676, 96677, 96678, 96679, 96680, 96681, 96682 were selected from the ORFs having the nucleotide sequence represented by SEQ ID NO: 76588.

[7989] The probes having the nucleotide sequence represented by SEQ ID NOS: 96683, 96684, 96685, 96686, 96687, 96688, 96689, 96690, 96691, 96692, 96693 were selected from the ORFs having the nucleotide sequence represented by SEQ ID NO: 76589.

[7990] The probes having the nucleotide sequence represented by SEQ ID NOS: 96694, 96695, 96696, 96697, 96698, 96699, 96700, 96701, 96702, 96703, 96704 were selected from the ORFs having the nucleotide sequence represented by SEQ ID NO: 76590.

[7991] The probes having the nucleotide sequence represented by SEQ ID NOS: 96705, 96706, 96707, 96708, 96709, 96710, 96711, 96712, 96713, 96714, 96715 were selected from the ORFs having the nucleotide sequence represented by SEQ ID NO: 76591.

[7992] The probes having the nucleotide sequence represented by SEQ ID NOS: 96716, 96717, 96718, 96719, 96720, 96721, 96722, 96723, 96724, 96725, 96726 were selected from the ORFs having the nucleotide sequence represented by SEQ ID NO: 76592.

[7993] The probes having the nucleotide sequence represented by SEQ ID NOS: 96727, 96728, 96729, 96730, 96731, 96732, 96733, 96734, 96735, 96736, 96737 were selected from the ORFs having the nucleotide sequence represented by SEQ ID NO: 76593.

[7994] The probes having the nucleotide sequence represented by SEQ ID NOS: 96738, 96739, 96740, 96741, 96742, 96743, 96744, 96745, 96746, 96747, 96748 were selected from the ORFs having the nucleotide sequence represented by SEQ ID NO: 76594.

[7995] The probes having the nucleotide sequence represented by SEQ ID NOS: 96749, 96750, 96751, 96752, 96753, 96754, 96755, 96756, 96757, 96758, 96759 were selected from the ORFs having the nucleotide sequence represented by SEQ ID NO: 76595.

[7996] The probes having the nucleotide sequence represented by SEQ ID NOS: 96760, 96761, 96762, 96763, 96764, 96765, 96766, 96767, 96768, 96769, 96770 were selected from the ORFs having the nucleotide sequence represented by SEQ ID NO: 76596.

[7997] The probes having the nucleotide sequence represented by SEQ ID NOS: 96771, 96772, 96773, 96774, 96775, 96776, 96777, 96778, 96779, 96780, 96781 were selected from the ORFs having the nucleotide sequence represented by SEQ ID NO: 76597.

[7998] The probes having the nucleotide sequence represented by SEQ ID NOS: 96782, 96783, 96784, 96785, 96786, 96787, 96788, 96789, 96790, 96791, 96792 were selected from the ORFs having the nucleotide sequence represented by SEQ ID NO: 76598.

[7999] The probes having the nucleotide sequence represented by SEQ ID NOS: 96793, 96794, 96795, 96796, 96797, 96798, 96799, 96800, 96801, 96802, 96803 were selected from the ORFs having the nucleotide sequence represented by SEQ ID NO: 76599.

[8000] The probes having the nucleotide sequence represented by SEQ ID NOS: 96804, 96805, 96806, 96807, 96808, 96809, 96810, 96811, 96812, 96813, 96814 were selected from the ORFs having the nucleotide sequence represented by SEQ ID NO: 76600.

[8001] The probes having the nucleotide sequence represented by SEQ ID NOS: 96815, 96816, 96817, 96818, 96819, 96820, 96821, 96822, 96823, 96824, 96825 were selected from the ORFs having the nucleotide sequence represented by SEQ ID NO: 76601.

[8002] The probes having the nucleotide sequence represented by SEQ ID NOS: 96826, 96827, 96828, 96829, 96830, 96831, 96832, 96833, 96834, 96835, 96836 were selected from the ORFs having the nucleotide sequence represented by SEQ ID NO: 76602.

[8003] The probes having the nucleotide sequence represented by SEQ ID NOS: 96837, 96838, 96839, 96840, 96841, 96842, 96843, 96844, 96845, 96846, 96847 were selected from the ORFs having the nucleotide sequence represented by SEQ ID NO: 76603.

[8004] The probes having the nucleotide sequence represented by SEQ ID NOS: 96848, 96849, 96850, 96851, 96852, 96853, 96854, 96855, 96856, 96857, 96858 were selected from the ORFs having the nucleotide sequence represented by SEQ ID NO: 76604.

[8005] The probes having the nucleotide sequence represented by SEQ ID NOS: 96859, 96860, 96861, 96862, 96863, 96864, 96865, 96866, 96867, 96868, 96869 were selected from the ORFs having the nucleotide sequence represented by SEQ ID NO: 76605.

[8006] The probes having the nucleotide sequence represented by SEQ ID NOS: 96870, 96871, 96872, 96873, 96874, 96875, 96876, 96877, 96878, 96879, 96880 were selected from the ORFs having the nucleotide sequence represented by SEQ ID NO: 76606.

[8007] The probes having the nucleotide sequence represented by SEQ ID NOS: 96881, 96882, 96883, 96884, 96885, 96886, 96887, 96888, 96889, 96890, 96891 were selected from the ORFs having the nucleotide sequence represented by SEQ ID NO: 76607.

[8008] The probes having the nucleotide sequence represented by SEQ ID NOS: 96892, 96893, 96894, 96895, 96896, 96897, 96898, 96899, 96900, 96901, 96902 were selected from the ORFs having the nucleotide sequence represented by SEQ ID NO: 76608.

[8009] The probes having the nucleotide sequence represented by SEQ ID NOS: 96903, 96904, 96905, 96906, 96907, 96908, 96909, 96910, 96911, 96912, 96913 were selected from the ORFs having the nucleotide sequence represented by SEQ ID NO: 76609.

[8010] The probes having the nucleotide sequence represented by SEQ ID NOS: 96914, 96915, 96916, 96917, 96918, 96919, 96920, 96921, 96922, 96923, 96924 were selected from the ORFs having the nucleotide sequence represented by SEQ ID NO: 76610.

[8011] The probes having the nucleotide sequence represented by SEQ ID NOS: 96925, 96926, 96927, 96928, 96929, 96930, 96931, 96932, 96933, 96934, 96935 were selected from the ORFs having the nucleotide sequence represented by SEQ ID NO: 76611.

[8012] The probes having the nucleotide sequence represented by SEQ ID NOS: 96936, 96937, 96938, 96939, 96940, 96941, 96942, 96943, 96944, 96945, 96946 were selected from the ORFs having the nucleotide sequence represented by SEQ ID NO: 76612.

[8013] The probes having the nucleotide sequence represented by SEQ ID NOS: 96947, 96948, 96949, 96950, 96951, 96952, 96953, 96954, 96955, 96956, 96957 were selected from the ORFs having the nucleotide sequence represented by SEQ ID NO: 76613.

[8014] The probes having the nucleotide sequence represented by SEQ ID NOS: 96958, 96959, 96960, 96961, 96962, 96963, 96964, 96965, 96966, 96967, 96968 were selected from the ORFs having the nucleotide sequence represented by SEQ ID NO: 76614.

[8015] The probes having the nucleotide sequence represented by SEQ ID NOS: 96969, 96970, 96971, 96972, 96973, 96974, 96975, 96976, 96977, 96978, 96979 were selected from the ORFs having the nucleotide sequence represented by SEQ ID NO: 76615.

[8016] The probes having the nucleotide sequence represented by SEQ ID NOS: 96980, 96981, 96982, 96983, 96984, 96985, 96986, 96987, 96988, 96989, 96990 were selected from the ORFs having the nucleotide sequence represented by SEQ ID NO: 76616.

[8017] The probes having the nucleotide sequence represented by SEQ ID NOS: 96991, 96992, 96993, 96994, 96995, 96996, 96997, 96998, 96999, 97000, 97001 were selected from the ORFs having the nucleotide sequence represented by SEQ ID NO: 76617.

[8018] The probes having the nucleotide sequence represented by SEQ ID NOS: 97002, 97003, 97004, 97005, 97006, 97007, 97008, 97009, 97010, 97011, 97012 were selected from the ORFs having the nucleotide sequence-represented by SEQ ID NO: 76618.

[8019] The probes having the nucleotide sequence represented by SEQ ID NOS: 97013, 97014, 97015, 97016, 97017, 97018, 97019, 97020, 97021, 97022, 97023 were selected from the ORFs having the nucleotide sequence represented by SEQ ID NO: 76619.

[8020] The probes having the nucleotide sequence represented by SEQ ID NOS: 97024, 97025, 97026, 97027, 97028, 97029, 97030, 97031, 97032, 97033, 97034 were selected from the ORFs having the nucleotide sequence represented by SEQ ID NO: 76620.

[8021] The probes having the nucleotide sequence represented by SEQ ID NOS: 97035, 97036, 97037, 97038, 97039, 97040, 97041, 97042, 97043, 97044, 97045 were selected from the ORFs having the nucleotide sequence represented by SEQ ID NO: 76621.

[8022] The probes having the nucleotide sequence represented by SEQ ID NOS: 97046, 97047, 97048, 97049, 97050, 97051, 97052, 97053, 97054, 97055, 97056 were selected from the ORFs having the nucleotide sequence represented by SEQ ID NO: 76622.

[8023] The probes having the nucleotide sequence represented by SEQ ID NOS: 97057, 97058, 97059, 97060, 97061, 97062, 97063, 97064, 97065, 97066, 97067 were selected from the ORFs having the nucleotide sequence represented by SEQ ID NO: 76623.

[8024] The probes having the nucleotide sequence represented by SEQ ID NOS: 97068, 97069, 97070, 97071, 97072, 97073, 97074, 97075, 97076, 97077, 97078 were selected from the ORFs having the nucleotide sequence represented by SEQ ID NO: 76624.

[8025] The probes having the nucleotide sequence represented by SEQ ID NOS: 97079, 97080, 97081, 97082, 97083, 97084, 97085, 97086, 97087, 97088, 97089 were selected from the ORFs having the nucleotide sequence represented by SEQ ID NO: 76625.

[8026] The probes having the nucleotide sequence represented by SEQ ID NOS: 97090, 97091, 97092, 97093, 97094, 97095, 97096, 97097, 97098, 97099, 97100 were selected from the ORFs having the nucleotide sequence represented by SEQ ID NO: 76626.

[8027] The probes having the nucleotide sequence represented by SEQ ID NOS: 97101, 97102, 97103, 97104, 97105, 97106, 97107, 97108, 97109, 97110, 97111 were selected from the ORFs having the nucleotide sequence represented by SEQ ID NO: 76627.

[8028] The probes having the nucleotide sequence represented by SEQ ID NOS: 97112, 97113, 97114, 97115, 97116, 97117, 97118, 97119, 97120, 97121, 97122 were selected from the ORFs having the nucleotide sequence represented by SEQ ID NO: 76628.

[8029] The probes having the nucleotide sequence represented by SEQ ID NOS: 97123, 97124, 97125, 97126, 97127, 97128, 97129, 97130, 97131, 97132, 97133 were selected from the ORFs having the nucleotide sequence represented by SEQ ID NO: 76629.

[8030] The probes having the nucleotide sequence represented by SEQ ID NOS: 97134, 97135, 97136, 97137, 97138, 97139, 97140, 97141, 97142, 97143, 97144 were selected from the ORFs having the nucleotide sequence represented by SEQ ID NO: 76630.

[8031] The probes having the nucleotide sequence represented by SEQ ID NOS: 97145, 97146, 97147, 97148, 97149, 97150, 97151, 97152, 97153, 97154, 97155 were selected from the ORFs having the nucleotide sequence represented by SEQ ID NO: 76631.

[8032] The probes having the nucleotide sequence represented by SEQ ID NOS: 97156, 97157, 97158, 97159, 97160, 97161, 97162, 97163, 97164, 97165, 97166 were selected from the ORFs having the nucleotide sequence represented by SEQ ID NO: 76632.

[8033] The probes having the nucleotide sequence represented by SEQ ID NOS: 97167, 97168, 97169, 97170, 97171, 97172, 97173, 97174, 97175, 97176, 97177 were selected from the ORFs having the nucleotide sequence represented by SEQ ID NO: 76633.

[8034] The probes having the nucleotide sequence represented by SEQ ID NOS: 97178, 97179, 97180, 97181, 97182, 97183, 97184, 97185, 97186, 97187, 97188 were selected from the ORFs having the nucleotide sequence represented by SEQ ID NO: 76634.

[8035] The probes having the nucleotide sequence represented by SEQ ID NOS: 97189, 97190, 97191, 97192, 97193, 97194, 97195, 97196, 97197, 97198, 97199 were selected from the ORFs having the nucleotide sequence represented by SEQ ID NO: 76635.

[8036] The probes having the nucleotide sequence represented by SEQ ID NOS: 97200, 97201, 97202, 97203, 97204, 97205, 97206, 97207, 97208, 97209, 97210 were selected from the ORFs having the nucleotide sequence represented by SEQ ID NO: 76636.

[8037] The probes having the nucleotide sequence represented by SEQ ID NOS: 97211, 97212, 97213, 97214, 97215, 97216, 97217, 97218, 97219, 97220, 97221 were selected from the ORFs having the nucleotide sequence represented by SEQ ID NO: 76637.

[8038] The probes having the nucleotide sequence represented by SEQ ID NOS: 97222, 97223, 97224, 97225, 97226, 97227, 97228, 97229, 97230, 97231, 97232 were selected from the ORFs having the nucleotide sequence represented by SEQ ID NO: 76638.

[8039] The probes having the nucleotide sequence represented by SEQ ID NOS: 97233, 97234, 97235, 97236, 97237, 97238, 97239, 97240, 97241, 97242, 97243 were selected from the ORFs having the nucleotide sequence represented by SEQ ID NO: 76639.

[8040] The probes having the nucleotide sequence represented by SEQ ID NOS: 97244, 97245, 97246, 97247, 97248, 97249, 97250, 97251, 97252, 97253, 97254 were selected from the ORFs having the nucleotide sequence represented by SEQ ID NO: 76640.

[8041] The probes having the nucleotide sequence represented by SEQ ID NOS: 97255, 97256, 97257, 97258, 97259, 97260, 97261, 97262, 97263, 97264, 97265 were selected from the ORFs having the nucleotide sequence represented by SEQ ID NO: 76641.

[8042] The probes having the nucleotide sequence represented by SEQ ID NOS: 97266, 97267, 97268, 97269, 97270, 97271, 97272, 97273, 97274, 97275, 97276 were selected from the ORFs having the nucleotide sequence represented by SEQ ID NO: 76642.

[8043] The probes having the nucleotide sequence represented by SEQ ID NOS: 97277, 97278, 97279, 97280, 97281, 97282, 97283, 97284, 97285, 97286, 97287 were selected from the ORFs having the nucleotide sequence represented by SEQ ID NO: 76643.

[8044] The probes having the nucleotide sequence represented by SEQ ID NOS: 97288, 97289, 97290, 97291, 97292, 97293, 97294, 97295, 97296, 97297, 97298 were selected from the ORFs having the nucleotide sequence represented by SEQ ID NO: 76644.

[8045] The probes having the nucleotide sequence represented by SEQ ID NOS: 97299, 97300, 97301, 97302, 97303, 97304, 97305, 97306, 97307, 97308, 97309 were selected from the ORFs having the nucleotide sequence represented by SEQ ID NO: 76645.

[8046] The probes having the nucleotide sequence represented by SEQ ID NOS: 97310, 97311, 97312, 97313, 97314, 97315, 97316, 97317, 97318, 97319, 97320 were selected from the ORFs having the nucleotide sequence represented by SEQ ID NO: 76646.

[8047] The probes having the nucleotide sequence represented by SEQ ID NOS: 97321, 97322, 97323, 97324, 97325, 97326, 97327, 97328, 97329, 97330, 97331 were selected from the ORFs having the nucleotide sequence represented by SEQ ID NO: 76647.

[8048] The probes having the nucleotide sequence represented by SEQ ID NOS: 97332, 97333, 97334, 97335, 97336, 97337, 97338, 97339, 97340, 97341, 97342 were selected from the ORFs having the nucleotide sequence represented by SEQ ID NO: 76648.

[8049] The probes having the nucleotide sequence represented by SEQ ID NOS: 97343, 97344, 97345, 97346, 97347, 97348, 97349, 97350, 97351, 97352, 97353 were selected from the ORFs having the nucleotide sequence represented by SEQ ID NO: 76649.

[8050] The probes having the nucleotide sequence represented by SEQ ID NOS: 97354, 97355, 97356, 97357, 97358, 97359, 97360, 97361, 97362, 97363, 97364 were selected from the ORFs having the nucleotide sequence represented by SEQ ID NO: 76650.

[8051] The probes having the nucleotide sequence represented by SEQ ID NOS: 97365, 97366, 97367, 97368, 97369, 97370, 97371, 97372, 97373, 97374, 97375 were selected from the ORFs having the nucleotide sequence represented by SEQ ID NO: 76651.

[8052] The probes having the nucleotide sequence represented by SEQ ID NOS: 97376, 97377, 97378, 97379, 97380, 97381, 97382, 97383, 97384, 97385, 97386 were selected from the ORFs having the nucleotide sequence represented by SEQ ID NO: 76652.

[8053] The probes having the nucleotide sequence represented by SEQ ID NOS: 97387, 97388, 97389, 97390, 97391, 97392, 97393, 97394, 97395, 97396, 97397 were selected from the ORFs having the nucleotide sequence represented by SEQ ID NO: 76653.

[8054] The probes having the nucleotide sequence represented by SEQ ID NOS: 97398, 97399, 97400, 97401, 97402, 97403, 97404, 97405, 97406, 97407, 97408 were selected from the ORFs having the nucleotide sequence represented by SEQ ID NO: 76654.

[8055] The probes having the nucleotide sequence represented by SEQ ID NOS: 97409, 97410, 97411, 97412, 97413, 97414, 97415, 97416, 97417, 97418, 97419 were selected from the ORFs having the nucleotide sequence represented by SEQ ID NO: 76655.

[8056] The probes having the nucleotide sequence represented by SEQ ID NOS: 97420, 97421, 97422, 97423, 97424, 97425, 97426, 97427, 97428, 97429, 97430, 97431, 97432, 97433, 97434, 97435, 97436, 97437, 97438, 97439, 97440, 97441 were selected from the ORFs having the nucleotide sequence represented by SEQ ID NO: 76656.

[8057] The probes having the nucleotide sequence represented by SEQ ID NOS: 97442, 97443, 97444, 97445, 97446, 97447, 97448, 97449, 97450, 97451, 97452 were selected from the ORFs having the nucleotide sequence represented by SEQ ID NO: 76657.

[8058] The probes having the nucleotide sequence represented by SEQ ID NOS: 97453, 97454, 97455, 97456, 97457, 97458, 97459, 97460, 97461, 97462, 97463 were selected from the ORFs having the nucleotide sequence represented by SEQ ID NO: 76658.

[8059] The probes having the nucleotide sequence represented by SEQ ID NOS: 97464, 97465, 97466, 97467, 97468, 97469, 97470, 97471, 97472, 97473, 97474 were selected from the ORFs having the nucleotide sequence represented by SEQ ID NO: 76659.

[8060] The probes having the nucleotide sequence represented by SEQ ID NOS: 97475, 97476, 97477, 97478, 97479, 97480, 97481, 97482, 97483, 97484, 97485 were selected from the ORFs having the nucleotide sequence represented by SEQ ID NO: 76660.

[8061] The probes having the nucleotide sequence represented by SEQ ID NOS: 97486, 97487, 97488, 97489, 97490, 97491, 97492, 97493, 97494, 97495, 97496 were selected from the ORFs having the nucleotide sequence represented by SEQ ID NO: 76661.

[8062] The probes having the nucleotide sequence represented by SEQ ID NOS: 97497, 97498, 97499, 97500, 97501, 97502, 97503, 97504, 97505, 97506, 97507 were selected from the ORFs having the nucleotide sequence represented by SEQ ID NO: 76662.

[8063] The probes having the nucleotide sequence represented by SEQ ID NOS: 97508, 97509, 97510, 97511, 97512, 97513, 97514, 97515, 97516, 97517, 97518 were selected from the ORFs having the nucleotide sequence represented by SEQ ID NO: 76663.

[8064] The probes having the nucleotide sequence represented by SEQ ID NOS: 97519, 97520, 97521, 97522, 97523, 97524, 97525, 97526, 97527, 97528, 97529 were selected from the ORFs having the nucleotide sequence represented by SEQ ID NO: 76664.

[8065] The probes having the nucleotide sequence represented by SEQ ID NOS: 97530, 97531, 97532, 97533, 97534, 97535, 97536, 97537, 97538, 97539, 97540 were selected from the ORFs having the nucleotide sequence represented by SEQ ID NO: 76665.

[8066] The probes having the nucleotide sequence represented by SEQ ID NOS: 97541, 97542, 97543, 97544, 97545, 97546, 97547, 97548, 97549, 97550, 97551 were selected from the ORFs having the nucleotide sequence represented by SEQ ID NO: 76666.

[8067] The probes having the nucleotide sequence represented by SEQ ID NOS: 97552, 97553, 97554, 97555, 97556, 97557, 97558, 97559, 97560, 97561, 97562 were selected from the ORFs having the nucleotide sequence represented by SEQ ID NO: 76667.

[8068] The probes having the nucleotide sequence represented by SEQ ID NOS: 97563, 97564, 97565, 97566, 97567, 97568, 97569, 97570, 97571, 97572, 97573 were selected from the ORFs having the nucleotide sequence represented by SEQ ID NO: 76668.

[8069] The probes having the nucleotide sequence represented by SEQ ID NOS: 97574, 97575, 97576, 97577, 97578, 97579, 97580, 97581, 97582, 97583, 97584 were selected from the ORFs having the nucleotide sequence represented by SEQ ID NO: 76669.

[8070] The probes having the nucleotide sequence represented by. SEQ ID NOS: 97585, 97586, 97587, 97588, 97589, 97590, 97591, 97592, 97593, 97594, 97595 were selected from the ORFs having the nucleotide sequence represented by SEQ ID NO: 76670.

[8071] The probes having the nucleotide sequence represented by SEQ ID NOS: 97596, 97597, 97598, 97599, 97600, 97601, 97602, 97603, 97604, 97605, 97606 were selected from the ORFs having the nucleotide sequence represented by SEQ ID NO: 76671.

[8072] The probes having the nucleotide sequence represented by SEQ ID NOS: 97607, 97608, 97609, 97610, 97611, 97612, 97613, 97614, 97615, 97616, 97617 were selected from the ORFs having the nucleotide sequence represented by SEQ ID NO: 76672.

[8073] The probes having the nucleotide sequence represented by SEQ ID NOS: 97618, 97619, 97620, 97621, 97622, 97623, 97624, 97625, 97626, 97627, 97628 were selected from the ORFs having the nucleotide sequence represented by SEQ ID NO: 76673.

[8074] The probes having the nucleotide sequence represented by SEQ ID NOS: 97629, 97630, 97631, 97632, 97633, 97634, 97635, 97636, 97637, 97638, 97639 were selected from the ORFs having the nucleotide sequence represented by SEQ ID NO: 76674.

[8075] The probes having the nucleotide sequence represented by SEQ ID NOS: 97640, 97641, 97642, 97643, 97644, 97645, 97646, 97647, 97648, 97649, 97650 were selected from the ORFs having the nucleotide sequence represented by SEQ ID NO: 76675.

[8076] The probes having the nucleotide sequence represented by SEQ ID NOS: 97651, 97652, 97653, 97654, 97655, 97656, 97657, 97658, 97659, 97660, 97661 were selected from the ORFs having the nucleotide sequence represented by SEQ ID NO: 76676.

[8077] The probes having the nucleotide sequence represented by SEQ ID NOS: 97662, 97663, 97664, 97665, 97666, 97667, 97668, 97669, 97670, 97671, 97672 were selected from the ORFs having the nucleotide sequence represented by SEQ ID NO: 76677.

[8078] The probes having the nucleotide sequence represented by SEQ ID NOS: 97673, 97674, 97675, 97676, 97677, 97678, 97679, 97680, 97681, 97682, 97683 were selected from the ORFs having the nucleotide sequence represented by SEQ ID NO: 76678.

[8079] The probes having the nucleotide sequence represented by SEQ ID NOS: 97684, 97685, 97686, 97687, 97688, 97689, 97690, 97691, 97692, 97693, 97694 were selected from the ORFs having the nucleotide sequence represented by SEQ ID NO: 76679.

[8080] The probes having the nucleotide sequence represented by SEQ ID NOS: 97695, 97696, 97697, 97698, 97699, 97700, 97701, 97702, 97703, 97704, 97705 were selected from the ORFs having the nucleotide sequence represented by SEQ ID NO: 76680.

[8081] The probes having the nucleotide sequence represented by SEQ ID NOS: 97706, 97707, 97708, 97709, 97710, 97711, 97712, 97713, 97714, 97715, 97716 were selected from the ORFs having the nucleotide sequence represented by SEQ ID NO: 76681.

[8082] The probes having the nucleotide sequence represented by SEQ ID NOS: 97717, 97718, 97719, 97720, 97721, 97722, 97723, 97724, 97725, 97726, 97727 were selected from the ORFs having the nucleotide sequence represented by SEQ ID NO: 76682.

[8083] The probes having the nucleotide sequence represented by SEQ ID NOS: 97728, 97729, 97730, 97731, 97732, 97733, 97734, 97735, 97736, 97737, 97738 were selected from the ORFs having the nucleotide sequence represented by SEQ ID NO: 76683.

[8084] The probes having the nucleotide sequence represented by SEQ ID NOS: 97739, 97740, 97741, 97742, 97743, 97744, 97745, 97746, 97747, 97748, 97749 were selected from the ORFs having the nucleotide sequence represented by SEQ ID NO: 76684.

[8085] The probes having the nucleotide sequence represented by SEQ ID NOS: 97750, 97751, 97752, 97753, 97754, 97755, 97756, 97757, 97758, 97759, 97760 were selected from the ORFs having the nucleotide sequence represented by SEQ ID NO: 76685.

[8086] The probes having the nucleotide sequence represented by SEQ ID NOS: 97761, 97762, 97763, 97764, 97765, 97766, 97767, 97768, 97769, 97770, 97771 were selected from the ORFs having the nucleotide sequence represented by SEQ ID NO: 76686.

[8087] The probes having the nucleotide sequence represented by SEQ ID NOS: 97772, 97773, 97774, 97775, 97776, 97777, 97778, 97779, 97780, 97781, 97782 were selected from the ORFs having the nucleotide sequence represented by SEQ ID NO: 76687.

[8088] The probes having the nucleotide sequence represented by SEQ ID NOS: 97783, 97784, 97785, 97786, 97787, 97788, 97789, 97790, 97791, 97792, 97793 were selected from the ORFs having the nucleotide sequence represented by SEQ ID NO: 76688.

[8089] The probes having the nucleotide sequence represented by SEQ ID NOS: 97794, 97795, 97796, 97797, 97798, 97799, 97800, 97801, 97802, 97803, 97804, 97805, 97806, 97807, 97808, 97809, 97810, 97811, 97812, 97813, 97814, 97815 were selected from the ORFs having the nucleotide sequence represented by SEQ ID NO: 76689.

[8090] The probes having the nucleotide sequence represented by SEQ ID NOS: 97816, 97817, 97818, 97819, 97820, 97821, 97822, 97823, 97824, 97825, 97826 were selected from the ORFs having the nucleotide sequence represented by SEQ ID NO: 76690.

[8091] The probes having the nucleotide sequence represented by SEQ ID NOS: 97827, 97828, 97829, 97830, 97831, 97832, 97833, 97834, 97835, 97836, 97837 were selected from the ORFs having the nucleotide sequence represented by SEQ ID NO: 76691.

[8092] The probes having the nucleotide sequence represented by SEQ ID NOS: 97838, 97839, 97840, 97841, 97842, 97843, 97844, 97845, 97846, 97847, 97848 were selected from the ORFs having the nucleotide sequence represented by SEQ ID NO: 76692.

[8093] The probes having the nucleotide sequence represented by SEQ ID NOS: 97849, 97850, 97851, 97852, 97853, 97854, 97855, 97856, 97857, 97858, 97859 were selected from the ORFs having the nucleotide sequence represented by SEQ ID NO: 76693.

[8094] The probes having the nucleotide sequence represented by SEQ ID NOS: 97860, 97861, 97862, 97863, 97864, 97865, 97866, 97867, 97868, 97869, 97870 were selected from the ORFs having the nucleotide sequence represented by SEQ ID NO: 76694.

[8095] The probes having the nucleotide sequence represented by SEQ ID NOS: 97871, 97872, 97873, 97874, 97875, 97876, 97877, 97878, 97879, 97880, 97881 were selected from the ORFs having the nucleotide sequence represented by SEQ ID NO: 76695.

[8096] The probes having the nucleotide sequence represented by SEQ ID NOS: 97882, 97883, 97884, 97885, 97886, 97887, 97888, 97889, 97890, 97891, 97892 were selected from the ORFs having the nucleotide sequence represented by SEQ ID NO: 76696.

[8097] The probes having the nucleotide sequence represented by SEQ ID NOS: 97893, 97894, 97895, 97896, 97897, 97898, 97899, 97900, 97901, 97902, 97903 were selected from the ORFs having the nucleotide sequence represented by SEQ ID NO: 76697.

[8098] The probes having the nucleotide sequence represented by SEQ ID NOS: 97904, 97905, 97906, 97907, 97908, 97909, 97910, 97911, 97912, 97913, 97914 were selected from the ORFs having the nucleotide sequence represented by SEQ ID NO: 76698.

[8099] The probes having the nucleotide sequence represented by SEQ ID NOS: 97915, 97916, 97917, 97918, 97919, 97920, 97921, 97922, 97923, 97924, 97925 were selected from the ORFs having the nucleotide sequence represented by SEQ ID NO: 76699.

[8100] The probes having the nucleotide sequence represented by SEQ ID NOS: 97926, 97927, 97928, 97929, 97930, 97931, 97932, 97933, 97934, 97935, 97936 were selected from the ORFs having the nucleotide sequence represented by SEQ ID NO: 76700.

[8101] The probes having the nucleotide sequence represented by SEQ ID NOS: 97937, 97938, 97939, 97940, 97941, 97942, 97943, 97944, 97945, 97946, 97947 were selected from the ORFs having the nucleotide sequence represented by SEQ ID NO: 76701.

[8102] The probes having the nucleotide sequence represented by SEQ ID NOS: 97948, 97949, 97950, 97951, 97952, 97953, 97954, 97955, 97956, 97957, 97958 were selected from the ORFs having the nucleotide sequence represented by SEQ ID NO: 76702.

[8103] The probes having the nucleotide sequence represented by SEQ ID NOS: 97959, 9.7960, 97961, 97962, 97963, 97964, 97965, 97966, 97967, 97968, 97969 were selected from the ORFs having the nucleotide sequence represented by SEQ ID NO: 76703.

[8104] The probes having the nucleotide sequence represented by SEQ ID NOS: 97970, 97971, 97972, 97973, 97974, 97975, 97976, 97977, 97978, 97979, 97980 were selected from the ORFs having the nucleotide sequence represented by SEQ ID NO: 76704.

[8105] The probes having the nucleotide sequence represented by SEQ ID NOS: 97981, 97982, 97983, 97984, 97985, 97986, 97987, 97988, 97989, 97990, 97991 were selected from the ORFs having the nucleotide sequence represented by SEQ ID NO: 76705.

[8106] The probes having the nucleotide sequence represented by SEQ ID NOS: 97992, 97993, 97994, 97995, 97996, 97997, 97998, 97999, 98000, 98001, 98002 were selected from the ORFs having the nucleotide sequence represented by SEQ ID NO: 76706.

[8107] The probes having the nucleotide sequence represented by SEQ ID NOS: 98003, 98004, 98005, 98006, 98007, 98008, 98009, 98010, 98011, 98012, 98013 were selected from the ORFs having the nucleotide sequence represented by SEQ ID NO: 76707.

[8108] The probes having the nucleotide sequence represented by SEQ ID NOS: 98014, 98015, 98016, 98017, 98018, 98019, 98020, 98021, 98022, 98023, 98024 were selected from the ORFs having the nucleotide sequence represented by SEQ ID NO: 76708.

[8109] The probes having the nucleotide sequence represented by SEQ ID NOS: 98025, 98026, 98027, 98028, 98029, 98030, 98031, 98032, 98033, 98034, 98035 were selected from the ORFs having the nucleotide sequence represented by SEQ ID NO: 76709.

[8110] The probes having the nucleotide sequence represented by SEQ ID NOS: 98036, 98037, 98038, 98039, 98040, 98041, 98042, 98043, 98044, 98045, 98046 were selected from the ORFs having the nucleotide sequence represented by SEQ ID NO: 76710.

[8111] The probes having the nucleotide sequence represented by SEQ ID NOS: 98047, 98048, 98049, 98050, 98051, 98052, 98053, 98054, 98055, 98056, 98057 were selected from the ORFs having the nucleotide sequence represented by SEQ ID NO: 76711.

[8112] The probes having the nucleotide sequence represented by SEQ ID NOS: 98058, 98059, 98060, 98061, 98062, 98063, 98064, 98065, 98066, 98067, 98068 were selected from the ORFs having the nucleotide sequence represented by SEQ ID NO: 76712.

[8113] The probes having the nucleotide sequence represented by SEQ ID NOS: 98069, 98070, 98071, 98072, 98073, 98074, 98075, 98076, 98077, 98078, 98079 were selected from the ORFs having the nucleotide sequence represented by SEQ ID NO: 76713.

[8114] The probes having the nucleotide sequence represented by SEQ ID NOS: 98080, 98081, 98082, 98083, 98084, 98085, 98086, 98087, 98088, 98089, 98090 were selected from the ORFs having the nucleotide sequence represented by SEQ ID NO: 76714.

[8115] The probes having the nucleotide sequence represented by SEQ ID NOS: 98091, 98092, 98093, 98094, 98095, 98096, 98097, 98098, 98099, 98100, 98101 were selected from the ORFs having the nucleotide sequence represented by SEQ ID NO: 76715.

[8116] The probes having the nucleotide sequence represented by SEQ ID NOS: 98102, 98103, 98104, 98105, 98106, 98107, 98108, 98109, 98110, 98111, 98112 were selected from the ORFs having the nucleotide sequence represented by SEQ ID NO: 76716.

[8117] The probes having the nucleotide sequence represented by SEQ ID NOS: 98113, 98114, 98115, 98116, 98117, 98118, 98119, 98120, 98121, 98122, 98123 were selected from the ORFs having the nucleotide sequence represented by SEQ ID NO: 76717.

[8118] The probes having the nucleotide sequence represented by SEQ ID NOS: 98124, 98125, 98126, 98127, 98128, 98129, 98130, 98131, 98132, 98133, 98134 were selected from the ORFs having the nucleotide sequence represented by SEQ ID NO: 76718.

[8119] The probes having the nucleotide sequence represented by SEQ ID NOS:.98135, 98136, 98137, 98138, 98139, 98140, 98141, 98142, 98143, 98144, 98145 were selected from the ORFs having the nucleotide sequence represented by SEQ ID NO: 76719.

[8120] The probes having the nucleotide sequence represented by SEQ ID NOS: 98146, 98147, 98148, 98149, 98150, 98151, 98152, 98153, 98154, 98155, 98156 were selected from the ORFs having the nucleotide sequence represented by SEQ ID NO: 76720.

[8121] The probes having the nucleotide sequence represented by SEQ ID NOS: 98157, 98158, 98159, 98160, 98161, 98162, 98163, 98164, 98165, 98166, 98167 were selected from the ORFs having the nucleotide sequence represented by SEQ ID NO: 76721.

[8122] The probes having the nucleotide sequence represented by SEQ ID NOS: 98168, 98169, 98170, 98171, 98172, 98173, 98174, 98175, 98176, 98177, 98178 were selected from the ORFs having the nucleotide sequence represented by SEQ ID NO: 76722.

[8123] The probes having the nucleotide sequence represented by SEQ ID NOS: 98179, 98180, 98181, 98182, 98183, 98184, 98185, 98186, 98187, 98188, 98189 were selected from the ORFs having the nucleotide sequence represented by SEQ ID NO: 76723.

[8124] The probes having the nucleotide sequence represented by SEQ ID NOS: 98190, 98191, 98192, 98193, 98194, 98195, 98196, 98197, 98198, 98199, 98200 were selected from the ORFs having the nucleotide sequence represented by SEQ ID NO: 76724.

[8125] The probes having the nucleotide sequence represented by SEQ ID NOS: 98201, 98202, 98203, 98204, 98205, 98206, 98207, 98208, 98209, 98210, 98211 were selected from the ORFs having the nucleotide sequence represented by SEQ ID NO: 76725.

[8126] The probes having the nucleotide sequence represented by SEQ ID NOS: 98212, 98213, 98214, 98215, 98216, 98217, 98218, 98219, 98220, 98221, 98222 were selected from the ORFs having the nucleotide sequence represented by SEQ ID NO: 76726.

[8127] The probes having the nucleotide sequence represented by SEQ ID NOS: 98223, 98224, 98225, 98226, 98227, 98228, 98229, 98230, 98231, 98232, 98233 were selected from the ORFs having the nucleotide sequence represented by SEQ ID NO: 76727.

[8128] The probes having the nucleotide sequence represented by SEQ ID NOS: 98234, 98235, 98236, 98237, 98238, 98239, 98240, 98241, 98242, 98243, 98244 were selected from the ORFs having the nucleotide sequence represented by SEQ ID NO: 76728.

[8129] The probes having the nucleotide sequence represented by SEQ ID NOS: 98245, 98246, 98247, 98248, 98249, 98250, 98251, 98252, 98253, 98254, 98255 were selected from the ORFs having the nucleotide sequence represented by SEQ ID NO: 76729.

[8130] The probes having the nucleotide sequence represented by SEQ ID NOS: 98256, 98257, 98258, 98259, 98260, 98261, 98262, 98263, 98264, 98265, 98266 were selected from the ORFs having the nucleotide sequence represented by SEQ ID NO: 76730.

[8131] The probes having the nucleotide sequence represented by SEQ ID NOS: 98267, 98268, 98269, 98270, 98271, 98272, 98273, 98274, 98275, 98276, 98277 were selected from the ORFs having the nucleotide sequence represented by SEQ ID NO: 76731.

[8132] The probes having the nucleotide sequence represented by SEQ ID NOS: 98278, 98279, 98280, 98281, 98282, 98283, 98284, 98285, 98286, 98287, 98288 were selected from the ORFs having the nucleotide sequence represented by SEQ ID NO: 76732.

[8133] The probes having the nucleotide sequence represented by SEQ ID NOS: 98289, 98290, 98291, 98292, 98293, 98294, 98295, 98296, 98297, 98298, 98299 were selected from the ORFs having the nucleotide sequence represented by SEQ ID NO: 76733.

[8134] The probes having the nucleotide sequence represented by SEQ ID NOS: 98300, 98301, 98302, 98303, 98304, 98305, 98306, 98307, 98308, 98309, 98310 were selected from the ORFs having the nucleotide sequence represented by SEQ ID NO: 76734.

[8135] The probes having the nucleotide sequence represented by SEQ ID NOS: 98311, 98312, 98313, 98314, 98315, 98316, 98317, 98318, 98319, 98320, 98321 were selected from the ORFs having the nucleotide sequence represented by SEQ ID NO: 76735.

[8136] The probes having the nucleotide sequence represented by SEQ ID NOS: 98322, 98323, 98324, 98325, 98326, 98327, 98328, 98329, 98330, 98331, 98332 were selected from the ORFs having the nucleotide sequence represented by SEQ ID NO: 76736.

[8137] The probes having the nucleotide sequence represented by SEQ ID NOS: 98333, 98334, 98335, 98336, 98337, 98338, 98339, 98340, 98341, 98342, 98343 were selected from the ORFs having the nucleotide sequence represented by SEQ ID NO: 76737.

[8138] The probes having the nucleotide sequence represented by SEQ ID NOS: 98344, 98345, 98346, 98347, 98348, 98349, 98350, 98351, 98352, 98353, 98354 were selected from the ORFs having the nucleotide sequence represented by SEQ ID NO: 76738.

[8139] The probes having the nucleotide sequence represented by SEQ ID NOS: 98355, 98356, 98357, 98358, 98359, 98360, 98361, 98362, 98363, 98364, 98365 were selected from the ORFs having the nucleotide sequence represented by SEQ ID NO: 76739.

[8140] The probes having the nucleotide sequence represented by SEQ ID NOS: 98366, 98367, 98368, 98369, 98370, 98371, 98372, 98373, 98374, 98375, 98376 were selected from the ORFs having the nucleotide sequence represented by SEQ ID NO: 76740.

[8141] The probes having the nucleotide sequence represented by SEQ ID NOS: 98377, 98378, 98379, 98380, 98381, 98382, 98383, 98384, 98385, 98386, 98387 were selected from the ORFs having the nucleotide sequence represented by SEQ ID NO: 76741.

[8142] The probes having the nucleotide sequence represented by SEQ ID NOS: 98388, 98389, 98390, 98391, 98392, 98393, 98394, 98395, 98396, 98397, 98398 were selected from the ORFs having the nucleotide sequence represented by SEQ ID NO: 76742.

[8143] The probes having the nucleotide sequence represented by SEQ ID NOS: 98399, 98400, 98401, 98402, 98403, 98404, 98405, 98406, 98407, 98408, 98409 were selected from the ORFs having the nucleotide sequence represented by SEQ ID NO: 76743.

[8144] The probes having the nucleotide sequence represented by SEQ ID NOS: 98410, 98411, 98412, 98413, 98414, 98415, 98416, 98417, 98418, 98419, 98420 were selected from the ORFs having the nucleotide sequence represented by SEQ ID NO: 76744.

[8145] The probes having the nucleotide sequence represented by SEQ ID NOS: 98421, 98422, 98423, 98424, 98425, 98426, 98427, 98428, 98429, 98430, 98431 were selected from the ORFs having the nucleotide sequence represented by SEQ ID NO: 76745.

[8146] The probes having the nucleotide sequence represented by SEQ ID NOS: 98432, 98433, 98434, 98435, 98436, 98437, 98438, 98439, 98440, 98441, 98442 were selected from the ORFs having the nucleotide sequence represented by SEQ ID NO: 76746.

[8147] The probes having the nucleotide sequence represented by SEQ ID NOS: 98443, 98444, 98445, 98446, 98447, 98448, 98449, 98450, 98451, 98452, 98453 were selected from the ORFs having the nucleotide sequence represented by SEQ ID NO: 76747.

[8148] The probes having the nucleotide sequence represented by SEQ ID NOS: 98454, 98455, 98456, 98457, 98458, 98459, 98460, 98461, 98462, 98463, 98464 were selected from the ORFs having the nucleotide sequence represented by SEQ ID NO: 76748.

[8149] The probes having the nucleotide sequence represented by SEQ ID NOS: 98465, 98466, 98467, 98468, 98469, 98470, 98471, 98472, 98473, 98474, 98475 were selected from the ORFs having the nucleotide sequence represented by SEQ ID NO: 76749.

[8150] The probes having the nucleotide sequence represented by SEQ ID NOS: 98476, 98477, 98478, 98479, 98480, 98481, 98482, 98483, 98484, 98485, 98486 were selected from the ORFs having the nucleotide sequence represented by SEQ ID NO: 76750.

[8151] The probes having the nucleotide sequence represented by SEQ ID NOS: 98487, 98488, 98489, 98490, 98491, 98492, 98493, 98494, 98495, 98496, 98497 were selected from the ORFs having the nucleotide sequence represented by SEQ ID NO: 76751.

[8152] The probes having the nucleotide sequence represented by SEQ ID NOS: 98498, 98499, 98500, 98501, 98502, 98503, 98504, 98505, 98506, 98507, 98508 were selected from the ORFs having the nucleotide sequence represented by SEQ ID NO: 76752.

[8153] The probes having the nucleotide sequence represented by SEQ ID NOS: 98509, 98510, 98511, 98512, 98513, 98514, 98515, 98516, 98517, 98518, 98519 were selected from the ORFs having the nucleotide sequence represented by SEQ ID NO: 76753.

[8154] The probes having the nucleotide sequence represented by SEQ ID NOS: 98520, 98521, 98522, 98523, 98524, 98525, 98526, 98527, 98528, 98529, 98530 were selected from the ORFs having the nucleotide sequence represented by SEQ ID NO: 76754.

[8155] The probes having the nucleotide sequence represented by SEQ ID NOS: 98531, 98532, 98533, 98534, 98535, 98536, 98537, 98538, 98539, 98540, 98541 were selected from the ORFs having the nucleotide sequence represented by SEQ ID NO: 76755.

[8156] The probes having the nucleotide sequence represented by SEQ ID NOS: 98542, 98543, 98544, 98545, 98546, 98547, 98548, 98549, 98550, 98551, 98552 were selected from the ORFs having the nucleotide sequence represented by SEQ ID NO: 76756.

[8157] The probes having the nucleotide sequence represented by SEQ ID NOS: 98553, 98554, 98555, 98556, 98557, 98558, 98559, 98560, 98561, 98562, 98563 were selected from the ORFs having the nucleotide sequence represented by SEQ ID NO: 76757.

[8158] The probes having the nucleotide sequence represented by SEQ ID NOS: 98564, 98565, 98566, 98567, 98568, 98569, 98570, 98571, 98572, 98573, 98574 were selected from the ORFs having the nucleotide sequence represented by SEQ ID NO: 76758.

[8159] The probes having the nucleotide sequence represented by SEQ ID NOS: 98575, 98576, 98577, 98578, 98579, 98580, 98581, 98582, 98583, 98584, 98585 were selected from the ORFs having the nucleotide sequence represented by SEQ ID NO: 76759.

[8160] The probes having the nucleotide sequence represented by SEQ ID NOS: 98586, 98587, 98588, 98589, 98590, 98591, 98592, 98593, 98594, 98595, 98596 were selected from the ORFs having the nucleotide sequence represented by SEQ ID NO: 76760.

[8161] The probes having the nucleotide sequence represented by SEQ ID NOS: 98597, 98598, 98599, 98600, 98601, 98602, 98603, 98604, 98605, 98606, 98607 were selected from the ORFs having the nucleotide sequence represented by SEQ ID NO: 76761.

[8162] The probes having the nucleotide sequence represented by SEQ ID NOS: 98608, 98609, 98610, 98611, 98612, 98613, 98614, 98615, 98616, 98617, 98618 were selected from the ORFs having the nucleotide sequence represented by SEQ ID NO: 76762.

[8163] The probes having the nucleotide sequence represented by SEQ ID NOS: 98619, 98620, 98621, 98622, 98623, 98624, 98625, 98626, 98627, 98628, 98629 were selected from the ORFs having the nucleotide sequence represented by SEQ ID NO: 76763.

[8164] The probes having the nucleotide sequence represented by SEQ ID NOS: 98630, 98631, 98632, 98633, 98634, 98635, 98636, 98637, 98638, 98639, 98640 were selected from the ORFs having the nucleotide sequence represented by SEQ ID NO: 76764.

[8165] The probes having the nucleotide sequence represented by SEQ ID NOS: 98641, 98642, 98643, 98644, 98645, 98646, 98647, 98648, 98649, 98650, 98651 were selected from the ORFs having the nucleotide sequence represented by SEQ ID NO: 76765.

[8166] The probes having the nucleotide sequence represented by SEQ ID NOS: 98652, 98653, 98654, 98655, 98656, 98657, 98658, 98659, 98660, 98661, 98662 were selected from the ORFs having the nucleotide sequence represented by SEQ ID NO: 76766.

[8167] The probes having the nucleotide sequence represented by SEQ ID NOS: 98663, 98664, 98665, 98666, 98667, 98668, 98669, 98670, 98671, 98672, 98673 were selected from the ORFs having the nucleotide sequence represented by SEQ ID NO: 76767.

[8168] The probes having the nucleotide sequence represented by SEQ ID NOS: 98674, 98675, 98676, 98677, 98678, 98679, 98680, 98681, 98682, 98683, 98684 were selected from the ORFs having the nucleotide sequence represented by SEQ ID NO: 76768.

[8169] The probes having the nucleotide sequence represented by SEQ ID NOS: 98685, 98686, 98687, 98688, 98689, 98690, 98691, 98692, 98693, 98694, 98695 were selected from the ORFs having the nucleotide sequence represented by SEQ ID NO: 76769.

[8170] The probes having the nucleotide sequence represented by SEQ ID NOS: 98696, 98697, 98698, 98699, 98700, 98701, 98702, 98703, 98704, 98705, 98706 were selected from the ORFs having the nucleotide sequence represented by SEQ ID NO: 76770.

[8171] The probes having the nucleotide sequence represented by SEQ ID NOS: 98707, 98708, 98709, 98710, 98711, 98712, 98713, 98714, 98715, 98716, 98717 were selected from the ORFs having the nucleotide sequence represented by SEQ ID NO: 76771.

[8172] The probes having the nucleotide sequence represented by SEQ ID NOS: 98718, 98719, 98720, 98721, 98722, 98723, 98724, 98725, 98726, 98727, 98728 were selected from the ORFs having the nucleotide sequence represented by SEQ ID NO: 76772.

[8173] The probes having the nucleotide sequence represented by SEQ ID NOS: 98729, 98730, 98731, 98732, 98733, 98734, 98735, 98736, 98737, 98738, 98739 were selected from the ORFs having the nucleotide sequence represented by SEQ ID NO: 76773.

[8174] The probes having the nucleotide sequence represented by SEQ ID NOS: 98740, 98741, 98742, 98743, 98744, 98745, 98746, 98747, 98748, 98749, 98750 were selected from the ORFs having the nucleotide sequence represented by SEQ ID NO: 76774.

[8175] The probes having the nucleotide sequence represented by SEQ ID NOS: 98751, 98752, 98753, 98754, 98755, 98756, 98757, 98758, 98759, 98760, 98761 were selected from the ORFs having the nucleotide sequence represented by SEQ ID NO: 76775.

[8176] The probes having the nucleotide sequence represented by SEQ ID NOS: 98762, 98763, 98764, 98765, 98766, 98767, 98768, 98769, 98770, 98771, 98772 were selected from the ORFs having the nucleotide sequence represented by SEQ ID NO: 76776.

[8177] The probes having the nucleotide sequence represented by SEQ ID NOS: 98773, 98774, 98775, 98776, 98777, 98778, 98779, 98780, 98781, 98782, 98783 were selected from the ORFs having the nucleotide sequence represented by SEQ ID NO: 76777.

[8178] The probes having the nucleotide sequence represented by SEQ ID NOS: 98784, 98785, 98786, 98787, 98788, 98789, 98790, 98791, 98792, 98793, 98794, 98795, 98796, 98797, 98798, 98799, 98800, 98801, 98802, 98803, 98804, 98805 were selected from the ORFs having the nucleotide sequence represented by SEQ ID NO: 76778.

[8179] The probes having the nucleotide sequence represented by SEQ ID NOS: 98806, 98807, 98808, 98809, 98810, 98811, 98812, 98813, 98814, 98815, 98816 were selected from the ORFs having the nucleotide sequence represented by SEQ ID NO: 76779.

[8180] The probes having the nucleotide sequence represented by SEQ ID NOS: 98817, 98818, 98819, 98820, 98821, 98822, 98823, 98824, 98825, 98826, 98827 were selected from the ORFs having the nucleotide sequence represented by SEQ ID NO: 76780.

[8181] The probes having the nucleotide sequence represented by SEQ ID NOS: 98828, 98829, 98830, 98831, 98832, 98833, 98834, 98835, 98836, 98837, 98838 were selected from the ORFs having the nucleotide sequence represented by SEQ ID NO: 76781.

[8182] The probes having the nucleotide sequence represented by SEQ ID NOS: 98839, 98840, 98841, 98842, 98843, 98844, 98845, 98846, 98847, 98848, 98849 were selected from the ORFs having the nucleotide sequence represented by SEQ ID NO: 76782.

[8183] The probes having the nucleotide sequence represented by SEQ ID NOS: 98850, 98851, 98852, 98853, 98854, 98855, 98856, 98857, 98858, 98859, 98860, 98861, 98862, 98863, 98864, 98865, 98866, 98867, 98868, 98869, 98870, 98871 were selected from the ORFs having the nucleotide sequence represented by SEQ ID NO: 76783.

[8184] The probes having the nucleotide sequence represented by SEQ ID NOS: 98872, 98873, 98874, 98875, 98876, 98877, 98878, 98879, 98880, 98881, 98882 were selected from the ORFs having the nucleotide sequence represented by SEQ ID NO: 76784.

[8185] The probes having the nucleotide sequence represented by SEQ ID NOS: 98883, 98884, 98885, 98886, 98887, 98888, 98889, 98890, 98891, 98892, 98893 were selected from the ORFs having the nucleotide sequence represented by SEQ ID NO: 76785.

[8186] The probes having the nucleotide sequence represented by SEQ ID NOS: 98894, 98895, 98896, 98897, 98898, 98899, 98900, 98901, 98902, 98903, 98904 were selected from the ORFs having the nucleotide sequence represented by SEQ ID NO: 76786.

[8187] The probes having the nucleotide sequence represented by SEQ ID NOS: 98905, 98906, 98907, 98908, 98909, 98910, 98911, 98912, 98913, 98914, 98915 were selected from the ORFs having the nucleotide sequence represented by SEQ ID NO: 76787.

[8188] The probes having the nucleotide sequence represented by SEQ ID NOS: 98916, 98917, 98918, 98919, 98920, 98921, 98922, 98923, 98924, 98925, 98926 were selected from the ORFs having the nucleotide sequence represented by SEQ ID NO: 76788.

[8189] The probes having the nucleotide sequence represented by SEQ ID NOS: 98927, 98928, 98929, 98930, 98931, 98932, 98933, 98934, 98935, 98936, 98937 were selected from the ORFs having the nucleotide sequence represented by SEQ ID NO: 76789.

[8190] The probes having the nucleotide sequence represented by SEQ ID NOS: 98938, 98939, 98940, 98941, 98942, 98943, 98944, 98945, 98946, 98947, 98948 were selected from the ORFs having the nucleotide sequence represented by SEQ ID NO: 76790.

[8191] The probes having the nucleotide sequence represented by SEQ ID NOS: 98949, 98950, 98951, 98952, 98953, 98954, 98955, 98956, 98957, 98958, 98959 were selected from the ORFs having the nucleotide sequence represented by SEQ ID NO: 76791.

[8192] The probes having the nucleotide sequence represented by SEQ ID NOS: 98960, 98961, 98962, 98963, 98964, 98965, 98966, 98967, 98968, 98969, 98970 were selected from the ORFs having the nucleotide sequence represented by SEQ ID NO: 76792.

[8193] The probes having the nucleotide sequence represented by SEQ ID NOS: 98971, 98972, 98973, 98974, 98975, 98976, 98977, 98978, 98979, 98980, 98981 were selected from the ORFs having the nucleotide sequence represented by SEQ ID NO: 76793.

[8194] The probes having the nucleotide sequence represented by SEQ ID NOS: 98982, 98983, 98984, 98985, 98986, 98987, 98988, 98989, 98990, 98991, 98992 were selected from the ORFs having the nucleotide sequence represented by SEQ ID NO: 76794.

[8195] The probes having the nucleotide sequence represented by SEQ ID NOS: 98993, 98994, 98995, 98996, 98997, 98998, 98999, 99000, 99001, 99002, 99003 were selected from the ORFs having the nucleotide sequence represented by SEQ ID NO: 76795.

[8196] The probes having the nucleotide sequence represented by SEQ ID NOS: 99004, 99005, 99006, 99007, 99008, 99009, 99010, 99011, 99012, 99013, 99014 were selected from the ORFs having the nucleotide sequence represented by SEQ ID NO: 76796.

[8197] The probes having the nucleotide sequence represented by SEQ ID NOS: 99015, 99016, 99017, 99018, 99019, 99020, 99021, 99022, 99023, 99024, 99025 were selected from the ORFs having the nucleotide sequence represented by SEQ ID NO: 76797.

[8198] The probes having the nucleotide sequence represented by SEQ ID NOS: 99026, 99027, 99028, 99029, 99030, 99031, 99032, 99033, 99034, 99035, 99036 were selected from the ORFs having the nucleotide sequence represented by SEQ ID NO: 76798.

[8199] The probes having the nucleotide sequence represented by SEQ ID NOS: 99037, 99038, 99039, 99040, 99041, 99042, 99043, 99044, 99045, 99046, 99047 were selected from the ORFs having the nucleotide sequence represented by SEQ ID NO: 76799.

[8200] The probes having the nucleotide sequence represented by SEQ ID NOS: 99048, 99049, 99050, 99051, 99052, 99053, 99054, 99055, 99056, 99057, 99058 were selected from the ORFs having the nucleotide sequence represented by SEQ ID NO: 76800.

[8201] The probes having the nucleotide sequence represented by SEQ ID NOS: 99059, 99060, 99061, 99062, 99063, 99064, 99065, 99066, 99067, 99068, 99069 were selected from the ORFs having the nucleotide sequence represented by SEQ ID NO: 76801.

[8202] The probes having the nucleotide sequence represented by SEQ ID NOS: 99070, 99071, 99072, 99073, 99074, 99075, 99076, 99077, 99078, 99079, 99080 were selected from the ORFs having the nucleotide sequence represented by SEQ ID NO: 76802.

[8203] The probes having the nucleotide sequence represented by SEQ ID NOS: 99081, 99082, 99083, 99084, 99085, 99086, 99087, 99088, 99089, 99090, 99091 were selected from the ORFs having the nucleotide sequence represented by SEQ ID NO: 76803.

[8204] The probes having the nucleotide sequence represented by SEQ ID NOS: 99092, 99093, 99094, 99095, 99096, 99097, 99098, 99099, 99100, 99101, 99102 were selected from the ORFs having the nucleotide sequence represented by SEQ ID NO: 76804.

[8205] The probes having the nucleotide sequence represented by SEQ ID NOS: 99103, 99104, 99105, 99106, 99107, 99108, 99109, 99110, 99111, 99112, 99113 were selected from the ORFs having the nucleotide sequence represented by SEQ ID NO: 76805.

[8206] The probes having the nucleotide sequence represented by SEQ ID NOS: 99114, 99115, 99116, 99117, 99118, 99119, 99120, 99121, 99122, 99123, 99124 were selected from the ORFs having the nucleotide sequence represented by SEQ ID NO: 76806.

[8207] The probes having the nucleotide sequence represented by SEQ ID NOS: 99125, 99126, 99127, 99128, 99129, 99130, 99131, 99132, 99133, 99134, 99135 were selected from the ORFs having the nucleotide sequence represented by SEQ ID NO: 76807.

[8208] The probes having the nucleotide sequence represented by SEQ ID NOS: 99136, 99137, 99138, 99139, 99140, 99141, 99142, 99143, 99144, 99145, 99146 were selected from the ORFs having the nucleotide sequence represented by SEQ ID NO: 76808.

[8209] The probes having the nucleotide sequence represented by SEQ ID NOS: 99147, 99148, 99149, 99150, 99151, 99152, 99153, 99154, 99155, 99156, 99157 were selected from the ORFs having the nucleotide sequence represented by SEQ ID NO: 76809.

[8210] The probes having the nucleotide sequence represented by SEQ ID NOS: 99158, 99159, 99160, 99161, 99162, 99163, 99164, 99165, 99166, 99167, 99168 were selected from the ORFs having the nucleotide sequence represented by SEQ ID NO: 76810.

[8211] The probes having the nucleotide sequence represented by SEQ ID NOS: 99169, 99170, 99171, 99172, 99173, 99174, 99175, 99176, 99177, 99178, 99179 were selected from the ORFs having the nucleotide sequence represented by SEQ ID NO: 76811.

[8212] The probes having the nucleotide sequence represented by SEQ ID NOS: 99180, 99181, 99182, 99183, 99184, 99185, 99186, 99187, 99188, 99189, 99190 were selected from the ORFs having the nucleotide sequence represented by SEQ ID NO: 76812.

[8213] The probes having the nucleotide sequence represented by SEQ ID NOS: 99191, 99192, 99193, 99194, 99195, 99196, 99197, 99198, 99199, 99200, 99201 were selected from the ORFs having the nucleotide sequence represented by SEQ ID NO: 76813.

[8214] The probes having the nucleotide sequence represented by SEQ ID NOS: 99202, 99203, 99204, 99205, 99206, 99207, 99208, 99209, 99210, 99211, 99212 were selected from the ORFs having the nucleotide sequence represented by SEQ ID NO: 76814.

[8215] The probes having the nucleotide sequence represented by SEQ ID NOS: 99213, 99214, 99215, 99216, 99217, 99218, 99219, 99220, 99221, 99222, 99223 were selected from the ORFs having the nucleotide sequence represented by SEQ ID NO: 76815.

[8216] The probes having the nucleotide sequence represented by SEQ ID NOS: 99224, 99225, 99226, 99227, 99228, 99229, 99230, 99231, 99232, 99233, 99234 were selected from the ORFs having the nucleotide sequence represented by SEQ ID NO: 76816.

[8217] The probes having the nucleotide sequence represented by SEQ ID NOS: 99235, 99236, 99237, 99238, 99239, 99240, 99241, 99242, 99243, 99244, 99245 were selected from the ORFs having the nucleotide sequence represented by SEQ ID NO: 76817.

[8218] The probes having the nucleotide sequence represented by SEQ ID NOS: 99246, 99247, 99248, 99249, 99250, 99251, 99252, 99253, 99254, 99255, 99256 were selected from the ORFs having the nucleotide sequence represented by SEQ ID NO: 76818.

[8219] The probes having the nucleotide sequence represented by SEQ ID NOS: 99257, 99258, 99259, 99260, 99261, 99262, 99263, 99264, 99265, 99266, 99267 were selected from the ORFs having the nucleotide sequence represented by SEQ ID NO: 76819.

[8220] The probes having the nucleotide sequence represented by SEQ ID NOS: 99268, 99269, 99270, 99271, 99272, 99273, 99274, 99275, 99276, 99277, 99278 were selected from the ORFs having the nucleotide sequence represented by SEQ ID NO: 76820.

[8221] The probes having the nucleotide sequence represented by SEQ ID NOS: 99279, 99280, 99281, 99282, 99283, 99284, 99285, 99286, 99287, 99288, 99289 were selected from the ORFs having the nucleotide sequence represented by SEQ ID NO: 76821.

[8222] The probes having the nucleotide sequence represented by SEQ ID NOS: 99290, 99291, 99292, 99293, 99294, 99295, 99296, 99297, 99298, 99299, 99300 were selected from the ORFs having the nucleotide sequence represented by SEQ ID NO: 76822.

[8223] The probes having the nucleotide sequence represented by SEQ ID NOS: 99301, 99302, 99303, 99304, 99305, 99306, 99307, 99308, 99309, 99310, 99311 were selected from the ORFs having the nucleotide sequence represented by SEQ ID NO: 76823.

[8224] The probes having the nucleotide sequence represented by SEQ ID NOS: 99312, 99313, 99314, 99315, 99316, 99317, 99318, 99319, 99320, 99321, 99322 were selected from the ORFs having the nucleotide sequence represented by SEQ ID NO: 76824.

[8225] The probes having the nucleotide sequence represented by SEQ ID NOS: 99323, 99324, 99325, 99326, 99327, 99328, 99329, 99330, 99331, 99332, 99333 were selected from the ORFs having the nucleotide sequence represented by SEQ ID NO: 76825.

[8226] The probes having the nucleotide sequence represented by SEQ ID NOS: 99334, 99335, 99336, 99337, 99338, 99339, 99340, 99341, 99342, 99343, 99344 were selected from the ORFs having the nucleotide sequence represented by SEQ ID NO: 76826.

[8227] The probes having the nucleotide sequence represented by SEQ ID NOS: 99345, 99346, 99347, 99348, 99349, 99350, 99351, 99352, 99353, 99354, 99355 were selected from the ORFs having the nucleotide sequence represented by SEQ ID NO: 76827.

[8228] The probes having the nucleotide sequence represented by SEQ ID NOS: 99356, 99357, 99358, 99359, 99360, 99361, 99362, 99363, 99364, 99365, 99366 were selected from the ORFs having the nucleotide sequence represented by SEQ ID NO: 76828.

[8229] The probes having the nucleotide sequence represented by SEQ ID NOS: 99367, 99368, 99369, 99370, 99371, 99372, 99373, 99374, 99375, 99376, 99377 were selected from the ORFs having the nucleotide sequence represented by SEQ ID NO: 76829.

[8230] The probes having the nucleotide sequence represented by SEQ ID NOS: 99378, 99379, 99380, 99381, 99382, 99383, 99384, 99385, 99386, 99387, 99388 were selected from the ORFs having the nucleotide sequence represented by SEQ ID NO: 76830.

[8231] The probes having the nucleotide sequence represented by SEQ ID NOS: 99389, 99390, 99391, 99392, 99393, 99394, 99395, 99396, 99397, 99398, 99399 were selected from the ORFs having the nucleotide sequence represented by SEQ ID NO: 76831.

[8232] The probes having the nucleotide sequence represented by SEQ ID NOS: 99400, 99401, 99402, 99403, 99404, 99405, 99406, 99407, 99408, 99409, 99410 were selected from the ORFs having the nucleotide sequence represented by SEQ ID NO: 76832.

[8233] The probes having the nucleotide sequence represented by SEQ ID NOS: 99411, 99412, 99413, 99414, 99415, 99416, 99417, 99418, 99419, 99420, 99421 were selected from the ORFs having the nucleotide sequence represented by SEQ ID NO: 76833.

[8234] The probes having the nucleotide sequence represented by SEQ ID NOS: 99422, 99423, 99424, 99425, 99426, 99427, 99428, 99429, 99430, 99431, 99432 were selected from the ORFs having the nucleotide sequence represented by SEQ ID NO: 76834.

[8235] The probes having the nucleotide sequence represented by SEQ ID NOS: 9.9433, 99434, 99435, 99436, 99437, 99438, 99439, 99440, 99441, 99442, 99443 were selected from the ORFs having the nucleotide sequence represented by SEQ ID NO: 76835.

[8236] The probes having the nucleotide sequence represented by SEQ ID NOS: 99444, 99445, 99446, 99447, 99448, 99449, 99450, 99451, 99452, 99453, 99454 were selected from the ORFs having the nucleotide sequence represented by SEQ ID NO: 76836.

[8237] The probes having the nucleotide sequence represented by SEQ ID NOS: 99455, 99456, 99457, 99458, 99459, 99460, 99461, 99462, 99463, 99464, 99465 were selected from the ORFs having the nucleotide sequence represented by SEQ ID NO: 76837.

[8238] The probes having the nucleotide sequence represented by SEQ ID NOS: 99466, 99467, 99468, 99469, 99470, 99471, 99472, 99473, 99474, 99475, 99476 were selected from the ORFs having the nucleotide sequence represented by SEQ ID NO: 76838.

[8239] The probes having the nucleotide sequence represented by SEQ ID NOS: 99477, 99478, 99479, 99480, 99481, 99482, 99483, 99484, 99485, 99486, 99487 were selected from the ORFs having the nucleotide sequence represented by SEQ ID NO: 76839.

[8240] The probes having the nucleotide sequence represented by SEQ ID NOS: 99488, 99489, 99490, 99491, 99492, 99493, 99494, 99495, 99496, 99497, 99498 were selected from the ORFs having the nucleotide sequence represented by SEQ ID NO: 76840.

[8241] The probes having the nucleotide sequence represented by SEQ ID NOS: 99499, 99500, 99501, 99502, 99503, 99504, 99505, 99506, 99507, 99508, 99509 were selected from the ORFs having the nucleotide sequence represented by SEQ ID NO: 76841.

[8242] The probes having the nucleotide sequence represented by SEQ ID NOS: 99510, 99511, 99512, 99513, 99514, 99515, 99516, 99517, 99518, 99519, 99520 were selected from the ORFs having the nucleotide sequence represented by SEQ ID NO: 76842.

[8243] The probes having the nucleotide sequence represented by SEQ ID NOS: 99521, 99522, 99523, 99524, 99525, 99526, 99527, 99528, 99529, 99530, 99531 were selected from the ORFs having the nucleotide sequence represented by SEQ ID NO: 76843.

[8244] The probes having the nucleotide sequence represented by SEQ ID NOS: 99532, 99533, 99534, 99535, 99536, 99537, 99538, 99539, 99540, 99541, 99542 were selected from the ORFs having the nucleotide sequence represented by SEQ ID NO: 76844.

[8245] The probes having the nucleotide sequence represented by SEQ ID NOS: 99543, 99544, 99545, 99546, 99547, 99548, 99549, 99550, 99551, 99552, 99553 were selected from the ORFs having the nucleotide sequence represented by SEQ ID NO: 76845.

[8246] The probes having the nucleotide sequence represented by SEQ ID NOS: 99554, 99555, 99556, 99557, 99558, 99559, 99560, 99561, 99562, 99563, 99564 were selected from the ORFs having the nucleotide sequence represented by SEQ ID NO: 76846.

[8247] The probes having the nucleotide sequence represented by SEQ ID NOS: 99565, 99566, 99567, 99568, 99569, 99570, 99571, 99572, 99573, 99574, 99575 were selected from the ORFs having the nucleotide sequence represented by SEQ ID NO: 76847.

[8248] The probes having the nucleotide sequence represented by SEQ ID NOS: 99576, 99577, 99578, 99579, 99580, 99581, 99582, 99583, 99584, 99585, 99586 were selected from the ORFs having the nucleotide sequence represented by SEQ ID NO: 76848.

[8249] The probes having the nucleotide sequence represented by SEQ ID NOS: 99587, 99588, 99589, 99590, 99591, 99592, 99593, 99594, 99595, 99596, 99597 were selected from the ORFs having the nucleotide sequence represented by SEQ ID NO: 76849.

[8250] The probes having the nucleotide sequence represented by SEQ ID NOS: 99598, 99599, 99600, 99601, 99602, 99603, 99604, 99605, 99606, 99607, 99608 were selected from the ORFs having the nucleotide sequence represented by SEQ ID NO: 76850.

[8251] The probes having the nucleotide sequence represented by SEQ ID NOS: 99609, 99610, 99611, 99612, 99613, 99614, 99615, 99616, 99617, 99618, 99619 were selected from the ORFs having the nucleotide sequence represented by SEQ ID NO: 76851.

[8252] The probes having the nucleotide sequence represented by SEQ ID NOS: 99620, 99621, 99622, 99623, 99624, 99625, 99626, 99627, 99628, 99629, 99630 were selected from the ORFs having the nucleotide sequence represented by SEQ ID NO: 76852.

[8253] The probes having the nucleotide sequence represented by SEQ ID NOS: 99631, 99632, 99633, 99634, 99635, 99636, 99637, 99638, 99639, 99640, 99641 were selected from the ORFs having the nucleotide sequence represented by SEQ ID NO: 76853.

[8254] The probes having the nucleotide sequence represented by SEQ ID NOS: 99642, 99643, 99644, 99645, 99646, 99647, 99648, 99649, 99650, 99651, 99652 were selected from the ORFs having the nucleotide sequence represented by SEQ ID NO: 76854.

[8255] The probes having the nucleotide sequence represented by SEQ ID NOS: 99653, 99654, 99655, 99656, 99657, 99658, 99659, 99660, 99661, 99662, 99663 were selected from the ORFs having the nucleotide sequence represented by SEQ ID NO: 76855.

[8256] The probes having the nucleotide sequence represented by SEQ ID NOS: 99664, 99665, 99666, 99667, 99668, 99669, 99670, 99671, 99672, 99673, 99674 were selected from the ORFs having the nucleotide sequence represented by SEQ ID NO: 76856.

[8257] The probes having the nucleotide sequence represented by SEQ ID NOS: 99675, 99676, 99677, 99678, 99679, 99680, 99681, 99682, 99683, 99684, 99685 were selected from the ORFs having the nucleotide sequence represented by SEQ ID NO: 76857.

[8258] The probes having the nucleotide sequence represented by SEQ ID NOS: 99686, 99687, 99688, 99689, 99690, 99691, 99692, 99693, 99694, 99695, 99696 were selected from the ORFs having the nucleotide sequence represented by SEQ ID NO: 76858.

[8259] The probes having the nucleotide sequence represented by SEQ ID NOS: 99697, 99698, 99699, 99700, 99701, 99702, 99703, 99704, 99705, 99706, 99707 were selected from the ORFs having the nucleotide sequence represented by SEQ ID NO: 76859.

[8260] The probes having the nucleotide sequence represented by SEQ ID NOS: 99708, 99709, 99710, 99711, 99712, 99713, 99714, 99715, 99716, 99717, 99718 were selected from the ORFs having the nucleotide sequence represented by SEQ ID NO: 76860.

[8261] The probes having the nucleotide sequence represented by SEQ ID NOS: 99719, 99720, 99721, 99722, 99723, 99724, 99725, 99726, 99727, 99728, 99729 were selected from the ORFs having the nucleotide sequence represented by SEQ ID NO: 76861.

[8262] The probes having the nucleotide sequence represented by SEQ ID NOS: 99730, 99731, 99732, 99733, 99734, 99735, 99736, 99737, 99738, 99739, 99740 were selected from the ORFs having the nucleotide sequence represented by SEQ ID NO: 76862.

[8263] The probes having the nucleotide sequence represented by SEQ ID NOS: 99741, 99742, 99743, 99744, 99745, 99746, 99747, 99748, 99749, 99750, 99751 were selected from the ORFs having the nucleotide sequence represented by SEQ ID NO: 76863.

[8264] The probes having the nucleotide sequence represented by SEQ ID NOS: 99752, 99753, 99754, 99755, 99756, 99757, 99758, 99759, 99760, 99761, 99762 were selected from the ORFs having the nucleotide sequence represented by SEQ ID NO: 76864.

[8265] The probes having the nucleotide sequence represented by SEQ ID NOS: 99763, 99764, 99765, 99766, 99767, 99768, 99769, 99770, 99771, 99772, 99773 were selected from the ORFs having the nucleotide sequence represented by SEQ ID NO: 76865.

[8266] The probes having the nucleotide sequence represented by SEQ ID NOS: 99774, 99775, 99776, 99777, 99778, 99779, 99780, 99781, 99782, 99783, 99784 were selected from the ORFs having the nucleotide sequence represented by SEQ ID NO: 76866.

[8267] The probes having the nucleotide sequence represented by SEQ ID NOS: 99785, 99786, 99787, 99788, 99789, 99790, 99791, 99792, 99793, 99794, 99795 were selected from the ORFs having the nucleotide sequence represented by SEQ ID NO: 76867.

[8268] The probes having the nucleotide sequence represented by SEQ ID NOS: 99796, 99797, 99798, 99799, 99800, 99801, 99802, 99803, 99804, 99805, 99806 were selected from the ORFs having the nucleotide sequence represented by SEQ ID NO: 76868.

[8269] The probes having the nucleotide sequence represented by SEQ ID NOS: 99807, 99808, 99809, 99810, 99811, 99812, 99813, 99814, 99815, 99816, 99817 were selected from the ORFs having the nucleotide sequence represented by SEQ ID NO: 76869.

[8270] The probes having the nucleotide sequence represented by SEQ ID NOS: 99818, 99819, 99820, 99821, 99822, 99823, 99824, 99825, 99826, 99827, 99828 were selected from the ORFs having the nucleotide sequence represented by SEQ ID NO: 76870.

[8271] The probes having the nucleotide sequence represented by SEQ ID NOS: 99829, 99830, 99831, 99832, 99833, 99834, 99835, 99836, 99837, 99838, 99839 were selected from the ORFs having the nucleotide sequence represented by SEQ ID NO: 76871.

[8272] The probes having the nucleotide sequence represented by SEQ ID NOS: 99840, 99841, 99842, 99843, 99844, 99845, 99846, 99847, 99848, 99849, 99850 were selected from the ORFs having the nucleotide sequence represented by SEQ ID NO: 76872.

[8273] The probes having the nucleotide sequence represented by SEQ ID NOS: 99851, 99852, 99853, 99854, 99855, 99856, 99857, 99858, 99859, 99860, 99861 were selected from the ORFs having the nucleotide sequence represented by SEQ ID NO: 76873.

[8274] The probes having the nucleotide sequence represented by SEQ ID NOS: 99862, 99863, 99864, 99865, 99866, 99867, 99868, 99869, 99870, 99871, 99872 were selected from the ORFs having the nucleotide sequence represented by SEQ ID NO: 76874.

[8275] The probes having the nucleotide sequence represented by SEQ ID NOS: 99873, 99874, 99875, 99876, 99877, 99878, 99879, 99880, 99881, 99882, 99883 were selected from the ORFs having the nucleotide sequence represented by SEQ ID NO: 76875.

[8276] The probes having the nucleotide sequence represented by SEQ ID NOS: 99884, 99885, 99886, 99887, 99888, 99889, 99890, 99891, 99892, 99893, 99894 were selected from the ORFs having the nucleotide sequence represented by SEQ ID NO: 76876.

[8277] The probes having the nucleotide sequence represented by SEQ ID NOS: 99895, 99896, 99897, 99898, 99899, 99900, 99901, 99902, 99903, 99904, 99905 were selected from the ORFs having the nucleotide sequence represented by SEQ ID NO: 76877.

[8278] The probes having the nucleotide sequence represented by SEQ ID NOS: 99906, 99907, 99908, 99909, 99910, 99911, 99912, 99913, 99914, 99915, 99916 were selected from the ORFs having the nucleotide sequence represented by SEQ ID NO: 76878.

[8279] The probes having the nucleotide sequence represented by SEQ ID NOS: 99917, 99918, 99919, 99920, 99921, 99922, 99923, 99924, 99925, 99926, 99927 were selected from the ORFs having the nucleotide sequence represented by SEQ ID NO: 76879.

[8280] The probes having the nucleotide sequence represented by SEQ ID NOS: 99928, 99929, 99930, 99931, 99932, 99933, 99934, 99935, 99936, 99937, 99938 were selected from the ORFs having the nucleotide sequence represented by SEQ ID NO: 76880.

[8281] The probes having the nucleotide sequence represented by SEQ ID NOS: 99939, 99940, 99941, 99942, 99943, 99944, 99945, 99946, 99947, 99948, 99949 were selected from the ORFs having the nucleotide sequence represented by SEQ ID NO: 76881.

[8282] The probes having the nucleotide sequence represented by SEQ ID NOS: 99950, 99951, 99952, 99953, 99954, 99955, 99956, 99957, 99958, 99959, 99960 were selected from the ORFs having the nucleotide sequence represented by SEQ ID NO: 76882.

[8283] The probes having the nucleotide sequence represented by SEQ ID NOS: 99961, 99962, 99963, 99964, 99965, 99966, 99967, 99968, 99969, 99970, 99971 were selected from the ORFs having the nucleotide sequence represented by SEQ ID NO: 76883.

[8284] The probes having the nucleotide sequence represented by SEQ ID NOS: 99972, 99973, 99974, 99975, 99976, 99977, 99978, 99979, 99980, 99981, 99982 were selected from the ORFs having the nucleotide sequence represented by SEQ ID NO: 76884.

[8285] The probes having the nucleotide sequence represented by SEQ ID NOS: 99983, 99984, 99985, 99986, 99987, 99988, 99989, 99990, 99991, 99992, 99993 were selected from the ORFs having the nucleotide sequence represented by SEQ ID NO: 76885.

[8286] The probes having the nucleotide sequence represented by SEQ ID NOS: 99994, 99995, 99996, 99997, 99998, 99999, 100000, 100001, 100002, 100003, 100004 were selected from the ORFs having the nucleotide sequence represented by SEQ ID NO: 76886.

[8287] The probes having the nucleotide sequence represented by SEQ ID NOS: 100005, 100006, 100007, 100008, 100009, 100010, 100011, 100012, 100013, 100014, 100015, 100016, 100017, 100018, 100019, 100020, 100021, 100022, 100023, 100024, 100025, 100026 were selected from the ORFs having the nucleotide sequence represented by SEQ ID NO: 76887.

[8288] The probes having the nucleotide sequence represented by SEQ ID NOS: 100027, 100028, 100029, 100030, 100031, 100032, 100033, 100034, 100035, 100036, 100037 were selected from the ORFs having the nucleotide sequence represented by SEQ ID NO: 76888.

[8289] The probes having the nucleotide sequence represented by SEQ ID NOS: 100038, 100039, 100040, 100041, 100042, 100043, 100044, 100045, 100046, 100047, 100048 were selected from the ORFs having the nucleotide sequence represented by SEQ ID NO: 76889.

[8290] The probes having the nucleotide sequence represented by SEQ ID NOS: 100049, 100050, 100051, 100052, 100053, 100054, 100055, 100056, 100057, 100058, 100059 were selected from the ORFs having the nucleotide sequence represented by SEQ ID NO: 76890.

[8291] The probes having the nucleotide sequence represented by SEQ ID NOS: 100060, 100061, 100062, 100063, 100064, 100065, 100066, 100067, 100068, 100069, 100070 were selected from the ORFs having the nucleotide sequence represented by SEQ ID NO: 76891.

[8292] The probes having the nucleotide sequence represented by SEQ ID NOS: 100071, 100072, 100073, 100074, 100075, 100076, 100077, 100078, 100079, 100080, 100081 were selected from the ORFs having the nucleotide sequence represented by SEQ ID NO: 76892.

[8293] The probes having the nucleotide sequence represented by SEQ ID NOS: 100082, 100083, 100084, 100085, 100086, 100087, 100088, 100089, 100090, 100091, 100092 were selected from the ORFs having the nucleotide sequence represented by SEQ ID NO: 76893.

[8294] The probes having the nucleotide sequence represented by SEQ ID NOS: 100093, 100094, 100095, 100096, 100097, 100098, 100099, 100100, 100101, 100102, 100103 were selected from the ORFs having the nucleotide sequence represented by SEQ ID NO: 76894.

[8295] The probes having the nucleotide sequence represented by SEQ ID NOS: 100104, 100105, 100106, 100107, 100108, 100109, 100110, 100111, 100112, 100113, 100114 were selected from the ORFs having the nucleotide sequence represented by SEQ ID NO: 76895.

[8296] The probes having the nucleotide sequence represented by SEQ ID NOS: 100115, 100116, 100117, 100118, 100119, 100120, 100121, 100122, 100123, 100124, 100125 were selected from the ORFs having the nucleotide sequence represented by SEQ ID NO: 76896.

[8297] The probes having the nucleotide sequence represented by SEQ ID NOS: 100126, 100127, 100128, 100129, 100130, 100131, 100132, 100133, 100134, 100135, 100136 were selected from the ORFs having the nucleotide sequence represented by SEQ ID NO: 76897.

[8298] The probes having the nucleotide sequence represented by SEQ ID NOS: 100137, 100138, 100139, 100140, 100141, 100142, 100143, 100144, 100145, 100146, 100147 were selected from the ORFs having the nucleotide sequence represented by SEQ ID NO: 76898.

[8299] The probes having the nucleotide sequence represented by SEQ ID NOS: 100148, 100149, 100150, 100151, 100152, 100153, 100154, 100155, 100156, 100157, 100158 were selected from the ORFs having the nucleotide sequence represented by SEQ ID NO: 76899.

[8300] The probes having the nucleotide sequence represented by SEQ ID NOS: 100159, 100160, 100161, 100162, 100163, 100164, 100165, 100166, 100167, 100168, 100169, 100170, 100171, 100172, 100173, 100174, 100175, 100176, 100177, 100178, 100179, 100180, 100181, 100182, 100183, 100184, 100185, 100186, 100187, 100188, 100189, 100190, 100191 were selected from the ORFs having the nucleotide sequence represented by SEQ ID NO: 76900.

[8301] The probes having the nucleotide sequence represented by SEQ ID NOS: 100192, 100193, 100194, 100195, 100196, 100197, 100198, 100199, 100200, 100201, 100202 were selected from the ORFs having the nucleotide sequence represented by SEQ ID NO: 76901.

[8302] The probes having the nucleotide sequence represented by SEQ ID NOS: 100203, 100204, 100205, 100206, 100207, 100208, 100209, 100210, 100211, 100212, 100213 were selected from the ORFs having the nucleotide sequence represented by SEQ ID NO: 76902.

[8303] The probes having the nucleotide sequence represented by SEQ ID NOS: 100214, 100215, 100216, 100217, 100218, 100219, 100220, 100221, 100222, 100223, 100224 were selected from the ORFs having the nucleotide sequence represented by SEQ ID NO: 76903.

[8304] The probes having the nucleotide sequence represented by SEQ ID NOS: 100225, 100226, 100227, 100228, 100229, 100230, 100231, 100232, 100233, 100234, 100235 were selected from the ORFs having the nucleotide sequence represented by SEQ ID NO: 76904.

[8305] The probes having the nucleotide sequence represented by SEQ ID NOS: 100236, 100237, 100238, 100239, 100240, 100241, 100242, 100243, 100244, 100245, 100246 were selected from the ORFs having the nucleotide sequence represented by SEQ ID NO: 76905.

[8306] The probes having the nucleotide sequence represented by SEQ ID NOS: 100247, 100248, 100249, 100250, 100251, 100252, 100253, 100254, 100255, 100256, 100257 were selected from the ORFs having the nucleotide sequence represented by SEQ ID NO: 76906.

[8307] The probes having the nucleotide sequence represented by SEQ ID NOS: 100258, 100259, 100260, 100261, 100262, 100263, 100264, 100265, 100266, 100267, 100268 were selected from the ORFs having the nucleotide sequence represented by SEQ ID NO: 76907.

[8308] The probes having the nucleotide sequence represented by SEQ ID NOS: 100269, 100270, 100271, 100272, 100273, 100274, 100275, 100276, 100277, 100278, 100279 were selected from the ORFs having the nucleotide sequence represented by SEQ ID NO: 76908.

[8309] The probes having the nucleotide sequence represented by SEQ ID NOS: 100280, 100281, 100282, 100283, 100284, 100285, 100286, 100287, 100288, 100289, 100290 were selected from the ORFs having the nucleotide sequence represented by SEQ ID NO: 76909.

[8310] The probes having the nucleotide sequence represented by SEQ ID NOS: 100291, 100292, 100293, 100294, 100295, 100296, 100297, 100298, 100299, 100300, 100301 were selected from the ORFs having the nucleotide sequence represented by SEQ ID NO: 76910.

[8311] The probes having the nucleotide sequence represented by SEQ ID NOS: 100302, 100303, 100304, 100305, 100306, 100307, 100308, 100309, 100310, 100311, 100312 were selected from the ORFs having the nucleotide sequence represented by SEQ ID NO: 76911.

[8312] The probes having the nucleotide sequence represented by SEQ ID NOS: 100313, 100314, 100315, 100316, 100317, 100318, 100319, 100320, 100321, 100322, 100323 were selected from the ORFs having the nucleotide sequence represented by SEQ ID NO: 76912.

[8313] The probes having the nucleotide sequence represented by SEQ ID NOS: 100324, 100325, 100326, 100327, 100328, 100329, 100330, 100331, 100332, 100333, 100334 were selected from the ORFs having the nucleotide sequence represented by SEQ ID NO: 76913.

[8314] The probes having the nucleotide sequence represented by SEQ ID NOS: 100335, 100336, 100337, 100338, 100339, 100340, 100341, 100342, 100343, 100344, 100345 were selected from the ORFs having the nucleotide sequence represented by SEQ ID NO: 76914.

[8315] The probes having the nucleotide sequence represented by SEQ ID NOS: 100346, 100347, 100348, 100349, 100350, 100351, 100352, 100353, 100354, 100355, 100356 were selected from the ORFs having the nucleotide sequence represented by SEQ ID NO: 76915.

[8316] The probes having the nucleotide sequence represented by SEQ ID NOS: 100357, 100358, 100359, 100360, 100361, 100362, 100363, 100364, 100365, 100366, 100367 were selected from the ORFs having the nucleotide sequence represented by SEQ ID NO: 76916.

[8317] The probes having the nucleotide sequence represented by SEQ ID NOS: 100368, 100369, 100370, 100371, 100372, 100373, 100374, 100375, 100376, 100377, 100378 were selected from the ORFs having the nucleotide sequence represented by SEQ ID NO: 76917.

[8318] The probes having the nucleotide sequence represented by SEQ ID NOS: 100379, 100380, 100381, 100382, 100383, 100384, 100385, 100386, 100387, 100388, 100389 were selected from the ORFs having the nucleotide sequence represented by SEQ ID NO: 76918.

[8319] The probes having the nucleotide sequence represented by SEQ ID NOS: 100390, 100391, 100392, 100393, 100394, 100395, 100396, 100397, 100398, 100399, 100400 were selected from the ORFs having the nucleotide sequence represented by SEQ ID NO: 76919.

[8320] The probes having the nucleotide sequence represented by SEQ ID NOS: 100401, 100402, 100403, 100404, 100405, 100406, 100407, 100408, 100409, 100410, 100411 were selected from the ORFs having the nucleotide sequence represented by SEQ ID NO: 76920.

[8321] The probes having the nucleotide sequence represented by SEQ ID NOS: 100412, 100413, 100414, 100415, 100416, 100417, 100418, 100419, 100420, 100421, 100422 were selected from the ORFs having the nucleotide sequence represented by SEQ ID NO: 76921.

[8322] The probes having the nucleotide sequence represented by SEQ ID NOS: 100423, 100424, 100425, 100426, 100427, 100428, 100429, 100430, 100431, 100432, 100433 were selected from the ORFs having the nucleotide sequence represented by SEQ ID NO: 76922.

[8323] The probes having the nucleotide sequence represented by SEQ ID NOS: 100434, 100435, 100436, 100437, 100438, 100439, 100440, 100441, 100442, 100443, 100444 were selected from the ORFs having the nucleotide sequence represented by SEQ ID NO: 76923.

[8324] The probes having the nucleotide sequence represented by SEQ ID NOS: 100445, 100446, 100447, 100448, 100449, 100450, 100451, 100452, 100453, 100454, 100455 were selected from the ORFs having the nucleotide sequence represented by SEQ ID NO: 76924.

[8325] The probes having the nucleotide sequence represented by SEQ ID NOS: 100456, 100457, 100458, 100459, 100460, 100461, 100462, 100463, 100464, 100465, 100466 were selected from the ORFs having the nucleotide sequence represented by SEQ ID NO: 76925.

[8326] The probes having the nucleotide sequence represented by SEQ ID NOS: 100467, 100468, 100469, 100470, 100471, 100472, 100473, 100474, 100475, 100476, 100477 were selected from the ORFs having the nucleotide sequence represented by SEQ ID NO: 76926.

[8327] The probes having the nucleotide sequence represented by SEQ ID NOS: 100478, 100479, 100480, 100481, 100482, 100483, 100484, 100485, 100486, 100487, 100488 were selected from the ORFs having the nucleotide sequence represented by SEQ ID NO: 76927.

[8328] The probes having the nucleotide sequence represented by SEQ ID NOS: 100489, 100490, 100491, 100492, 100493, 100494, 100495, 100496, 100497, 100498, 100499 were selected from the ORFs having the nucleotide sequence represented by SEQ ID NO: 76928.

[8329] The probes having the nucleotide sequence represented by SEQ ID NOS: 100500, 100501, 100502, 100503, 100504, 100505, 100506, 100507, 100508, 100509, 100510 were selected from the ORFs having the nucleotide sequence represented by SEQ ID NO: 76929.

[8330] The probes having the nucleotide sequence represented by SEQ ID NOS: 100511, 100512, 100513, 100514, 100515, 100516, 100517, 100518, 100519, 100520, 100521 were selected from the ORFs having the nucleotide sequence represented by SEQ ID NO: 76930.

[8331] The probes having the nucleotide sequence represented by SEQ ID NOS: 100522, 100523, 100524, 100525, 100526, 100527, 100528, 100529, 100530, 100531, 100532 were selected from the ORFs having the nucleotide sequence represented by SEQ ID NO: 76931.

[8332] The probes having the nucleotide sequence represented by SEQ ID NOS: 100533, 100534, 100535, 100536, 100537, 100538, 100539, 100540, 100541, 100542, 100543 were selected from the ORFs having the nucleotide sequence represented by SEQ ID NO: 76932.

[8333] The probes having the nucleotide sequence represented by SEQ ID NOS: 100544, 100545, 100546, 100547, 100548, 100549, 100550, 100551, 100552, 100553, 100554 were selected from the ORFs having the nucleotide sequence represented by SEQ ID NO: 76933.

[8334] The probes having the nucleotide sequence represented by SEQ ID NOS: 100555, 100556, 100557, 100558, 100559, 100560, 100561, 100562, 100563, 100564, 100565, 100566, 100567, 100568, 100569, 100570, 100571, 100572, 100573, 100574, 100575, 100576 were selected from the ORFs having the nucleotide sequence represented by SEQ ID NO: 76934.

[8335] The probes having the nucleotide sequence represented by SEQ ID NOS: 100577, 100578, 100579, 100580, 100581, 100582, 100583, 100584, 100585, 100586, 100587 were selected from the ORFs having the nucleotide sequence represented by SEQ ID NO: 76935.

[8336] The probes having the nucleotide sequence represented by SEQ ID NOS: 100588, 100589, 100590, 100591, 100592, 100593, 100594, 100595, 100596, 100597, 100598 were selected from the ORFs having the nucleotide sequence represented by SEQ ID NO: 76936.

[8337] The probes having the nucleotide sequence represented by SEQ ID NOS: 100599, 100600, 100601, 100602, 100603, 100604, 100605, 100606, 100607, 100608, 100609 were selected from the ORFs having the nucleotide sequence represented by SEQ ID NO: 76937.

[8338] The probes having the nucleotide sequence represented by SEQ ID NOS: 100610, 100611, 100612, 100613, 100614, 100615, 100616, 100617, 100618, 100619, 100620 were selected from the ORFs having the nucleotide sequence represented by SEQ ID NO: 76938.

[8339] The probes having the nucleotide sequence represented by SEQ ID NOS: 100621, 100622, 100623, 100624, 100625, 100626, 100627, 100628, 100629, 100630, 100631 were selected from the ORFs having the nucleotide sequence represented by SEQ ID NO: 76939.

[8340] The probes having the nucleotide sequence represented by SEQ ID NOS: 100632, 100633, 100634, 100635, 100636, 100637, 100638, 100639, 100640, 100641, 100642 were selected from the ORFs having the nucleotide sequence represented by SEQ ID NO: 76940.

[8341] The probes having the nucleotide sequence represented by SEQ ID NOS: 100643, 100644, 100645, 100646, 100647, 100648, 100649, 100650, 100651, 100652, 100653 were selected from the ORFs having the nucleotide sequence represented by SEQ ID NO: 76941.

[8342] The probes having the nucleotide sequence represented by SEQ ID NOS: 100654, 100655, 100656, 100657, 100658, 100659, 100660, 100661, 100662, 100663, 100664 were selected from the ORFs having the nucleotide sequence represented by SEQ ID NO: 76942.

[8343] The probes having the nucleotide sequence represented by SEQ ID NOS: 100665, 100666, 100667, 100668, 100669, 100670, 100671, 100672, 100673, 100674, 100675 were selected from the ORFs having the nucleotide sequence represented by SEQ ID NO: 76943.

[8344] The probes having the nucleotide sequence represented by SEQ ID NOS: 100676, 100677, 100678, 100679, 100680, 100681, 100682, 100683, 100684, 100685, 100686 were selected from the ORFs having the nucleotide sequence represented by SEQ ID NO: 76944.

[8345] The probes having the nucleotide sequence represented by SEQ ID NOS: 100687, 100688, 100689, 100690, 100691, 100692, 100693, 100694, 100695, 100696, 100697 were selected from the ORFs having the nucleotide sequence represented by SEQ ID NO: 76945.

[8346] The probes having the nucleotide sequence represented by SEQ ID NOS: 100698, 100699, 100700, 100701, 100702, 100703, 100704, 100705, 100706, 100707, 100708 were selected from the ORFs having the nucleotide sequence represented by SEQ ID NO: 76946.

[8347] The probes having the nucleotide sequence represented by SEQ ID NOS: 100709, 100710, 100711, 100712, 100713, 100714, 100715, 100716, 100717, 100718, 100719 were selected from the ORFs having the nucleotide sequence represented by SEQ ID NO: 76947.

[8348] The probes having the nucleotide sequence represented by SEQ ID NOS: 100720, 100721, 100722, 100723, 100724, 100725, 100726, 100727, 100728, 100729, 100730 were selected from the ORFs having the nucleotide sequence represented by SEQ ID NO: 76948.

[8349] The probes having the nucleotide sequence represented by SEQ ID NOS: 100731, 100732, 100733, 100734, 100735, 100736, 100737, 100738, 100739, 100740, 100741 were selected from the ORFs having the nucleotide sequence represented by SEQ ID NO: 76949.

[8350] The probes having the nucleotide sequence represented by SEQ ID NOS: 100742, 100743, 100744, 100745, 100746, 100747, 100748, 100749, 100750, 100751, 100752 were selected from the ORFs having the nucleotide sequence represented by SEQ ID NO: 76950.

[8351] The probes having the nucleotide sequence represented by SEQ ID NOS: 100753, 100754, 100755, 100756, 100757, 100758, 100759, 100760, 100761, 100762, 100763 were selected from the ORFs having the nucleotide sequence represented by SEQ ID NO: 76951.

[8352] The probes having the nucleotide sequence represented by SEQ ID NOS: 100764, 100765, 100766, 100767, 100768, 100769, 100770, 100771, 100772, 100773, 100774 were selected from the ORFs having the nucleotide sequence represented by SEQ ID NO: 76952.

[8353] The probes having the nucleotide sequence represented by SEQ ID NOS: 100775, 100776, 100777, 100778, 100779, 100780, 100781, 100782, 100783, 100784, 100785, 100786, 100787, 100788, 100789, 100790, 100791, 100792, 100793, 100794, 100795, 100796 were selected from the ORFs having the nucleotide sequence represented by SEQ ID NO: 76953.

[8354] The probes having the nucleotide sequence represented by SEQ ID NOS: 100797, 100798, 100799, 100800, 100801, 100802, 100803, 100804, 100805, 100806, 100807 were selected from the ORFs having the nucleotide sequence represented by SEQ ID NO: 76954.

[8355] The probes having the nucleotide sequence represented by SEQ ID NOS: 100808, 100809, 100810, 100811, 100812, 100813, 100814, 100815, 100816, 100817, 100818 were selected from the ORFs having the nucleotide sequence represented by SEQ ID NO: 76955.

[8356] The probes having the nucleotide sequence represented by SEQ ID NOS: 100819, 100820, 100821, 100822, 100823, 100824, 100825, 100826, 100827, 100828, 100829, 100830, 100831, 100832, 100833, 100834, 100835, 100836, 100837, 100838, 100839, 100840 were selected from the ORFs having the nucleotide sequence represented by SEQ ID NO: 76956.

[8357] The probes having the nucleotide sequence represented by SEQ ID NOS: 100841, 100842, 100843, 100844, 100845, 100846, 100847, 100848, 100849, 100850, 100851 were selected from the ORFs having the nucleotide sequence represented by SEQ ID NO: 76957.

[8358] The probes having the nucleotide sequence represented by SEQ ID NOS: 100852, 100853, 100854, 100855, 100856, 100857, 100858, 100859, 100860, 100861, 100862 were selected from the ORFs having the nucleotide sequence represented by SEQ ID NO: 76958.

[8359] The probes having the nucleotide sequence represented by SEQ ID NOS: 100863, 100864, 100865, 100866, 100867, 100868, 100869, 100870, 100871, 100872, 100873 were selected from the ORFs having the nucleotide sequence represented by SEQ ID NO: 76959.

[8360] The probes having the nucleotide sequence represented by SEQ ID NOS: 100874, 100875, 100876, 100877, 100878, 100879, 100880, 100881, 100882, 100883, 100884 were selected from the ORFs having the nucleotide sequence represented by SEQ ID NO: 76960.

[8361] The probes having the nucleotide sequence represented by SEQ ID NOS: 100885, 100886, 100887, 100888, 100889, 100890, 100891, 100892, 100893, 100894, 100895 were selected from the ORFs having the nucleotide sequence represented by SEQ ID NO: 76961.

[8362] The probes having the nucleotide sequence represented by SEQ ID NOS: 100896, 100897, 100898, 100899, 100900, 100901, 100902, 100903, 100904, 100905, 100906 were selected from the ORFs having the nucleotide sequence represented by SEQ ID NO: 76962.

[8363] The probes having the nucleotide sequence represented by SEQ ID NOS: 100907, 100908, 100909, 100910, 100911, 100912, 100913, 100914, 100915, 100916, 100917 were selected from the ORFs having the nucleotide sequence represented by SEQ ID NO: 76963.

[8364] The probes having the nucleotide sequence represented by SEQ ID NOS: 100918, 100919, 100920, 100921, 100922, 100923, 100924, 100925, 100926, 100927, 100928 were selected from the ORFs having the nucleotide sequence represented by SEQ ID NO: 76964.

[8365] The probes having the nucleotide sequence represented by SEQ ID NOS: 100929, 100930, 100931, 100932, 100933, 100934, 100935, 100936, 100937, 100938, 100939 were selected from the ORFs having the nucleotide sequence represented by SEQ ID NO: 76965.

[8366] The probes having the nucleotide sequence represented by SEQ ID NOS: 100940, 100941, 100942, 100943, 100944, 100945, 100946, 100947, 100948, 100949, 100950 were selected from the ORFs having the nucleotide sequence represented by SEQ ID NO: 76966.

[8367] The probes having the nucleotide sequence represented by SEQ ID NOS: 100951, 100952, 100953, 100954, 100955, 100956, 100957, 100958, 100959, 100960, 100961 were selected from the ORFs having the nucleotide sequence represented by SEQ ID NO: 76967.

[8368] The probes having the nucleotide sequence represented by SEQ ID NOS: 100962, 100963, 100964, 100965, 100966, 100967, 100968, 100969, 100970, 100971, 100972 were selected from the ORFs having the nucleotide sequence represented by SEQ ID NO: 76968.

[8369] The probes having the nucleotide sequence represented by SEQ ID NOS: 100973, 100974, 100975, 100976, 100977, 100978, 100979, 100980, 100981, 100982, 100983 were selected from the ORFs having the nucleotide sequence represented by SEQ ID NO: 76969.

[8370] The probes having the nucleotide sequence represented by SEQ ID NOS: 100984, 100985, 100986, 100987, 100988, 100989, 100990, 100991, 100992, 100993, 100994 were selected from the ORFs having the nucleotide sequence represented by SEQ ID NO: 76970.

[8371] The probes having the nucleotide sequence represented by SEQ ID NOS: 100995, 100996, 100997, 100998, 100999, 101000, 101001, 101002, 101003, 101004, 101005 were selected from the ORFs having the nucleotide sequence represented by SEQ ID NO: 76971.

[8372] The probes having the nucleotide sequence represented by SEQ ID NOS: 101006, 101007, 101008, 101009, 101010, 101011, 101012, 101013, 101014, 101015, 101016 were selected from the ORFs having the nucleotide sequence represented by SEQ ID NO: 76972.

[8373] The probes having the nucleotide sequence represented by SEQ ID NOS: 101017, 101018, 101019, 101020, 101021, 101022, 101023, 101024, 101025, 101026, 101027 were selected from the ORFs having the nucleotide sequence represented by SEQ ID NO: 76973.

[8374] The probes having the nucleotide sequence represented by SEQ ID NOS: 101028, 101029, 101030, 101031, 101032, 101033, 101034, 101035, 101036, 101037, 101038 were selected from the ORFs having the nucleotide sequence represented by SEQ ID NO: 76974.

[8375] The probes having the nucleotide sequence represented by SEQ ID NOS: 101039, 101040, 101041, 101042, 101043, 101044, 101045, 101046, 101047, 101048, 101049 were selected from the ORFs having the nucleotide sequence represented by SEQ ID NO: 76975.

[8376] The probes having the nucleotide sequence represented by SEQ ID NOS: 101050, 101051, 101052, 101053, 101054, 101055, 101056, 101057, 101058, 101059, 101060 were selected from the ORFs having the nucleotide sequence represented by SEQ ID NO: 76976.

[8377] The probes having the nucleotide sequence represented by SEQ ID NOS: 101061, 101062, 101063, 101064, 101065, 101066, 101067, 101068, 101069, 101070, 101071 were selected from the ORFs having the nucleotide sequence represented by SEQ ID NO: 76977.

[8378] The probes having the nucleotide sequence represented by SEQ ID NOS: 101072, 101073, 101074, 101075, 101076, 101077, 101078, 101079, 101080, 101081, 101082 were selected from the ORFs having the nucleotide sequence represented by SEQ ID NO: 76978.

[8379] The probes having the nucleotide sequence represented by SEQ ID NOS: 101083, 101084, 101085, 101086, 101087, 101088, 101089, 101090, 101091, 101092, 101093 were selected from the ORFs having the nucleotide sequence represented by SEQ ID NO: 76979.

[8380] The probes having the nucleotide sequence represented by SEQ ID NOS: 101094, 101095, 101096, 101097, 101098, 101099, 101100, 101101, 101102, 101103, 101104 were selected from the ORFs having the nucleotide sequence represented by SEQ ID NO: 76980.

[8381] The probes having the nucleotide sequence represented by SEQ ID NOS: 101105, 101106, 101107, 101108, 101109, 101110, 101111, 101112, 101113, 101114, 101115 were selected from the ORFs having the nucleotide sequence represented by SEQ ID NO: 76981.

[8382] The probes having the nucleotide sequence represented by SEQ ID NOS: 101116, 101117, 101118, 101119, 101120, 101121, 101122, 101123, 101124, 101125, 101126 were selected from the ORFs having the nucleotide sequence represented by SEQ ID NO: 76982.

[8383] The probes having the nucleotide sequence represented by SEQ ID NOS: 101127, 101128, 101129, 101130, 101131, 101132, 101133, 101134, 101135, 101136, 101137 were selected from the ORFs having the nucleotide sequence represented by SEQ ID NO: 76983.

[8384] The probes having the nucleotide sequence represented by SEQ ID NOS: 101138, 101139, 101140, 101141, 101142, 101143, 101144, 101145, 101146, 101147, 101148 were selected from the ORFs having the nucleotide sequence represented by SEQ ID NO: 76984.

[8385] The probes having the nucleotide sequence represented by SEQ ID NOS: 101149, 101150, 101151, 101152, 101153, 101154, 101155, 101156, 101157, 101158, 101159 were selected from the ORFs having the nucleotide sequence represented by SEQ ID NO: 76985.

[8386] The probes having the nucleotide sequence represented by SEQ ID NOS: 101160, 101161, 101162, 101163, 101164, 101165, 101166, 101167, 101168, 101169, 101170 were selected from the ORFs having the nucleotide sequence represented by SEQ ID NO: 76986.

[8387] The probes having the nucleotide sequence represented by SEQ ID NOS: 101171, 101172, 101173, 101174, 101175, 101176, 101177, 101178, 101179, 101180, 101181 were selected from the ORFs having the nucleotide sequence represented by SEQ ID NO: 76987.

[8388] The probes having the nucleotide sequence represented by SEQ ID NOS: 101182, 101183, 101184, 101185, 101186, 101187, 101188, 101189, 101190, 101191, 101192 were selected from the ORFs having the nucleotide sequence represented by SEQ ID NO: 76988.

[8389] The probes having the nucleotide sequence represented by SEQ ID NOS: 101193, 101194, 101195, 101196, 101197, 101198, 101199, 101200, 101201, 101202, 101203 were selected from the ORFs having the nucleotide sequence represented by SEQ ID NO: 76989.

[8390] The probes having the nucleotide sequence represented by SEQ ID NOS: 101204, 101205, 101206, 101207, 101208, 101209, 101210, 101211, 101212, 101213, 101214 were selected from the ORFs having the nucleotide sequence represented by SEQ ID NO: 76990.

[8391] The probes having the nucleotide sequence represented by SEQ ID NOS: 101215, 101216, 101217, 101218, 101219, 101220, 101221, 101222, 101223, 101224, 101225 were selected from the ORFs having the nucleotide sequence represented by SEQ ID NO: 76991.

[8392] The probes having the nucleotide sequence represented by SEQ ID NOS: 101226, 101227, 101228, 101229, 101230, 101231, 101232, 101233, 101234, 101235, 101236 were selected from the ORFs having the nucleotide sequence represented by SEQ ID NO: 76992.

[8393] The probes having the nucleotide sequence represented by SEQ ID NOS: 101237, 101238, 101239, 101240, 101241, 101242, 101243, 101244, 101245, 101246, 101247 were selected from the ORFs having the nucleotide sequence represented by SEQ ID NO: 76993.

[8394] The probes having the nucleotide sequence represented by SEQ ID NOS: 101248, 101249, 101250, 101251, 101252, 101253, 101254, 101255, 101256, 101257, 101258 were selected from the ORFs having the nucleotide sequence represented by SEQ ID NO: 76994.

[8395] The probes having the nucleotide sequence represented by SEQ ID NOS: 101259, 101260, 101261, 101262, 101263, 101264, 101265, 101266, 101267, 101268, 101269 were selected from the ORFs having the nucleotide sequence represented by SEQ ID NO: 76995.

[8396] The probes having the nucleotide sequence represented by SEQ ID NOS: 101270, 101271, 101272, 101273, 101274, 101275, 101276, 101277, 101278, 101279, 101280 were selected from the ORFs having the nucleotide sequence represented by SEQ ID NO: 76996.

[8397] The probes having the nucleotide sequence represented by SEQ ID NOS: 101281, 101282, 101283, 101284, 101285, 101286, 101287, 101288, 101289, 101290, 101291 were selected from the ORFs having the nucleotide sequence represented by SEQ ID NO: 76997.

[8398] The probes having the nucleotide sequence represented by SEQ ID NOS: 101292, 101293, 101294, 101295, 101296, 101297, 101298, 101299, 101300, 101301, 101302 were selected from the ORFs having the nucleotide sequence represented by SEQ ID NO: 76998.

[8399] The probes having the nucleotide sequence represented by SEQ ID NOS: 101303, 101304, 101305, 101306, 101307, 101308, 101309, 101310, 101311, 101312, 101313 were selected from the ORFs having the nucleotide sequence represented by SEQ ID NO: 76999.

[8400] The probes having the nucleotide sequence represented by SEQ ID NOS: 101314, 101315, 101316, 101317, 101318, 101319, 101320, 101321, 101322, 101323, 101324 were selected from the ORFs having the nucleotide sequence represented by SEQ ID NO: 77000.

[8401] The probes having the nucleotide sequence represented by SEQ ID NOS: 101325, 101326, 101327, 101328, 101329, 101330, 101331, 101332, 101333, 101334, 101335 were selected from the ORFs having the nucleotide sequence represented by SEQ ID NO: 77001.

[8402] The probes having the nucleotide sequence represented by SEQ ID NOS: 101336, 101337, 101338, 101339, 101340, 101341, 101342, 101343, 101344, 101345, 101346 were selected from the ORFs having the nucleotide sequence represented by SEQ ID NO: 77002.

[8403] The probes having the nucleotide sequence represented by SEQ ID NOS: 101347, 101348, 101349, 101350, 101351, 101352, 101353, 101354, 101355, 101356, 101357 were selected from the ORFs having the nucleotide sequence represented by SEQ ID NO: 77003.

[8404] The probes having the nucleotide sequence represented by SEQ ID NOS: 101358, 101359, 101360, 101361, 101362, 101363, 101364, 101365, 101366, 101367, 101368 were selected from the ORFs having the nucleotide sequence represented by SEQ ID NO: 77004.

[8405] The probes having the nucleotide sequence represented by SEQ ID NOS: 101369, 101370, 101371, 101372, 101373, 101374, 101375, 101376, 101377, 101378, 101379 were selected from the ORFs having the nucleotide sequence represented by SEQ ID NO: 77005.

[8406] The probes having the nucleotide sequence represented by SEQ ID NOS: 101380, 101381, 101382, 101383, 101384, 101385, 101386, 101387, 101388, 101389, 101390 were selected from the ORFs having the nucleotide sequence represented by SEQ ID NO: 77006.

[8407] The probes having the nucleotide sequence represented by SEQ ID NOS: 101391, 101392, 101393, 101394, 101395, 101396, 101397, 101398, 101399, 101400, 101401 were selected from the ORFs having the nucleotide sequence represented by SEQ ID NO: 77007.

[8408] The probes having the nucleotide sequence represented by SEQ ID NOS: 101402, 101403, 101404, 101405, 101406, 101407, 101408, 101409, 101410, 101411, 101412 were selected from the ORFs having the nucleotide sequence represented by SEQ ID NO: 77008.

[8409] The probes having the nucleotide sequence represented by SEQ ID NOS: 101413, 101414, 101415, 101416, 101417, 101418, 101419, 101420, 101421, 101422, 101423 were selected from the ORFs having the nucleotide sequence represented by SEQ ID NO: 77009.

[8410] The probes having the nucleotide sequence represented by SEQ ID NOS: 101424, 101425, 101426, 101427, 101428, 101429, 101430, 101431, 101432, 101433, 101434 were selected from the ORFs having the nucleotide sequence represented by SEQ ID NO: 77010.

[8411] The probes having the nucleotide sequence represented by SEQ ID NOS: 101435, 101436, 101437, 101438, 101439, 101440, 101441, 101442, 101443, 101444, 101445 were selected from the ORFs having the nucleotide sequence represented by SEQ ID NO: 77011.

[8412] The probes having the nucleotide sequence represented by SEQ ID NOS: 101446, 101447, 101448, 101449, 101450, 101451, 101452, 101453, 101454, 101455, 101456 were selected from the ORFs having the nucleotide sequence represented by SEQ ID NO: 77012.

[8413] The probes having the nucleotide sequence represented by SEQ ID NOS: 101457, 101458, 101459, 101460, 101461, 101462, 101463, 101464, 101465, 101466, 101467 were selected from the ORFs having the nucleotide sequence represented by SEQ ID NO: 77013.

[8414] The probes having the nucleotide sequence represented by SEQ ID NOS: 101468, 101469, 101470, 101471, 101472, 101473, 101474, 101475, 101476, 101477, 101478 were selected from the ORFs having the nucleotide sequence represented by SEQ ID NO: 77014.

[8415] The probes having the nucleotide sequence represented by SEQ ID NOS: 101479, 101480, 101481, 101482, 101483, 101484, 101485, 101486, 101487, 101488, 101489 were selected from the ORFs having the nucleotide sequence represented by SEQ ID NO: 77015.

[8416] The probes having the nucleotide sequence represented by SEQ ID NOS: 101490, 101491, 101492, 101493, 101494, 101495, 101496, 101497, 101498, 101499, 101500 were selected from the ORFs having the nucleotide sequence represented by SEQ ID NO: 77016.

[8417] The probes having the nucleotide sequence represented by SEQ ID NOS: 101501, 101502, 101503, 101504, 101505, 101506, 101507, 101508, 101509, 101510, 101511 were selected from the ORFs having the nucleotide sequence represented by SEQ ID NO: 77017.

[8418] The probes having the nucleotide sequence represented by SEQ ID NOS: 101512, 101513, 101514, 101515, 101516, 101517, 101518, 101519, 101520, 101521, 101522 were selected from the ORFs having the nucleotide sequence represented by SEQ ID NO: 77018.

[8419] The probes having the nucleotide sequence represented by SEQ ID NOS: 101523, 101524, 101525, 101526, 101527, 101528, 101529, 101530, 101531, 101532, 101533 were selected from the ORFs having the nucleotide sequence represented by SEQ ID NO: 77019.

[8420] The probes having the nucleotide sequence represented by SEQ ID NOS: 101534, 101535, 101536, 101537, 101538, 101539, 101540, 101541, 101542, 101543, 101544 were selected from the ORFs having the nucleotide sequence represented by SEQ ID NO: 77020.

[8421] The probes having the nucleotide sequence represented by SEQ ID NOS: 101545, 101546, 101547, 101548, 101549, 101550, 101551, 101552, 101553, 101554, 101555 were selected from the ORFs having the nucleotide sequence represented by SEQ ID NO: 77021.

[8422] The probes having the nucleotide sequence represented by SEQ ID NOS: 101556, 101557, 101558, 101559, 101560, 101561, 101562, 101563, 101564, 101565, 101566 were selected from the ORFs having the nucleotide sequence represented by SEQ ID NO: 77022.

[8423] The probes having the nucleotide sequence represented by SEQ ID NOS: 101567, 101568, 101569, 101570, 101571, 101572, 101573, 101574, 101575, 101576, 101577 were selected from the ORFs having the nucleotide sequence represented by SEQ ID NO: 77023.

[8424] The probes having the nucleotide sequence represented by SEQ ID NOS: 101578, 101579, 101580, 101581, 101582, 101583, 101584, 101585, 101586, 101587, 101588 were selected from the ORFs having the nucleotide sequence represented by SEQ ID NO: 77024.

[8425] The probes having the nucleotide sequence represented by SEQ ID NOS: 101589, 101590, 101591, 101592, 101593, 101594, 101595, 101596, 101597, 101598, 101599 were selected from the ORFs having the nucleotide sequence represented by SEQ ID NO: 77025.

[8426] The probes having the nucleotide sequence represented by SEQ ID NOS: 101600, 101601, 101602, 101603, 101604, 101605, 101606, 101607, 101608, 101609, 101610 were selected from the ORFs having the nucleotide sequence represented by SEQ ID NO: 77026.

[8427] The probes having the nucleotide sequence represented by SEQ ID NOS: 101611, 101612, 101613, 101614, 101615, 101616, 101617, 101618, 101619, 101620, 101621 were selected from the ORFs having the nucleotide sequence represented by SEQ ID NO: 77027.

[8428] The probes having the nucleotide sequence represented by SEQ ID NOS: 101622, 101623, 101624, 101625, 101626, 101627, 101628, 101629, 101.630, 101631, 101632 were selected from the ORFs having the nucleotide sequence represented by SEQ ID NO: 77028.

[8429] The probes having the nucleotide sequence represented by SEQ ID NOS: 101633, 101634, 101635, 101636, 101637, 101638, 101639, 101640, 101641, 101642, 101643 were selected from the ORFs having the nucleotide sequence represented by SEQ ID NO: 77029.

[8430] The probes having the nucleotide sequence represented by SEQ ID NOS: 101644, 101645, 101646, 101647, 101648, 101649, 101650, 101651, 101652, 101653, 101654 were selected from the ORFs having the nucleotide sequence represented by SEQ ID NO: 77030.

[8431] The probes having the nucleotide sequence represented by SEQ ID NOS: 101655, 101656, 101657, 101658, 101659, 101660, 101661, 101662, 101663, 101664, 101665 were selected from the ORFs having the nucleotide sequence represented by SEQ ID NO: 77031.

[8432] The probes having the nucleotide sequence represented by SEQ ID NOS: 101666, 101667, 101668, 101669, 101670, 101671, 101672, 101673, 101674, 101675, 101676 were selected from the ORFs having the nucleotide sequence represented by SEQ ID NO: 77032.

[8433] The probes having the nucleotide sequence represented by SEQ ID NOS: 101677, 101678, 101679, 101680, 101681, 101682, 101683, 101684, 101685, 101686, 101687 were selected from the ORFs having the nucleotide sequence represented by SEQ ID NO: 77033.

[8434] The probes having the nucleotide sequence represented by SEQ ID NOS: 101688, 101689, 101690, 101691, 101692, 101693, 101694, 101695, 101696, 101697, 101698 were selected from the ORFs having the nucleotide sequence represented by SEQ ID NO: 77034.

[8435] The probes having the nucleotide sequence represented by SEQ ID NOS: 101699, 101700, 101701, 101702, 101703, 101704, 101705, 101706, 101707, 101708, 101709 were selected from the ORFs having the nucleotide sequence represented by SEQ ID NO: 77035.

[8436] The probes having the nucleotide sequence represented by SEQ ID NOS: 101710, 101711, 101712, 101713, 101714, 101715, 101716, 101717, 101718, 101719, 101720 were selected from the ORFs having the nucleotide sequence represented by SEQ ID NO: 77036.

[8437] The probes having the nucleotide sequence represented by SEQ ID NOS: 101721, 101722, 101723, 101724, 101725, 101726, 101727, 101728, 101729, 101730, 101731 were selected from the ORFs having the nucleotide sequence represented by SEQ ID NO: 77037.

[8438] The probes having the nucleotide sequence represented by SEQ ID NOS: 101732, 101733, 101734, 101735, 101736, 101737, 101738, 101739, 101740, 101741, 101742 were selected from the ORFs having the nucleotide sequence represented by SEQ ID NO: 77038.

[8439] The probes having the nucleotide sequence represented by SEQ ID NOS: 101743, 101744, 101745, 101746, 101747, 101748, 101749, 101750, 101751, 101752, 101753 were selected from the ORFs having the nucleotide sequence represented by SEQ ID NO: 77039.

[8440] The probes having the nucleotide sequence represented by SEQ ID NOS: 101754, 101755, 101756, 101757, 101758, 101759, 101760, 101761, 101762, 101763, 101764 were selected from the ORFs having the nucleotide sequence represented by SEQ ID NO: 77040.

[8441] The probes having the nucleotide sequence represented by SEQ ID NOS: 101765, 101766, 101767, 101768, 101769, 101770, 101771, 101772, 101773, 101774, 101775 were selected from the ORFs having the nucleotide sequence represented by SEQ ID NO: 77041.

[8442] The probes having the nucleotide sequence represented by SEQ ID NOS: 101776, 101777, 101778, 101779, 101780, 101781, 101782, 101783, 101784, 101785, 101786 were selected from the ORFs having the nucleotide sequence represented by SEQ ID NO: 77042.

[8443] The probes having the nucleotide sequence represented by SEQ ID NOS: 101787, 101788, 101789, 101790, 101791, 101792, 101793, 101794, 101795, 101796, 101797 were selected from the ORFs having the nucleotide sequence represented by SEQ ID NO: 77043.

[8444] The probes having the nucleotide sequence represented by SEQ ID NOS: 101798, 101799, 101800, 101801, 101802, 101803, 101804, 101805, 101806, 101807, 101808 were selected from the ORFs having the nucleotide sequence represented by SEQ ID NO: 77044.

[8445] The probes having the nucleotide sequence represented by SEQ ID NOS: 101809, 101810, 101811, 101812, 101813, 101814, 101815, 101816, 101817, 101818, 101819 were selected from the ORFs having the nucleotide sequence represented by SEQ ID NO: 77045.

[8446] The probes having the nucleotide sequence represented by SEQ ID NOS: 101820, 101821, 101822, 101823, 101824, 101825, 101826, 101827, 101828, 101829, 101830 were selected from the ORFs having the nucleotide sequence represented by SEQ ID NO: 77046.

[8447] The probes having the nucleotide sequence represented by SEQ ID NOS: 101831, 101832, 101833, 101834, 101835, 101836, 101837, 101838, 101839, 101840, 101841 were selected from the ORFs having the nucleotide sequence represented by SEQ ID NO: 77047.

[8448] The probes having the nucleotide sequence represented by SEQ ID NOS: 101842, 101843, 101844, 101845, 101846, 101847, 101848, 101849, 101850, 101851, 101852 were selected from the ORFs having the nucleotide sequence represented by SEQ ID NO: 77048.

[8449] The probes having the nucleotide sequence represented by SEQ ID NOS: 101853, 101854, 101855, 101856, 101857, 101858, 101859, 101860, 101861, 101862, 101863 were selected from the ORFs having the nucleotide sequence represented by SEQ ID NO: 77049.

[8450] The probes having the nucleotide sequence represented by SEQ ID NOS: 101864, 101865, 101866, 101867, 101868, 101869, 101870, 101871, 101872, 101873, 101874 were selected from the ORFs having the nucleotide sequence represented by SEQ ID NO: 77050.

[8451] The probes having the nucleotide sequence represented by SEQ ID NOS: 101875, 101876, 101877, 101878, 101879, 101880, 101881, 101882, 101883, 101884, 101885 were selected from the ORFs having the nucleotide sequence represented by SEQ ID NO: 77051.

[8452] The probes having the nucleotide sequence represented by SEQ ID NOS: 101886, 101887, 101888, 101889, 101890, 101891, 101892, 101893, 101894, 101895, 101896 were selected from the ORFs having the nucleotide sequence represented by SEQ ID NO: 77052.

[8453] The probes having the nucleotide sequence represented by SEQ ID NOS: 101897, 101898, 101899, 101900, 101901, 101902, 101903, 101904, 101905, 101906, 101907 were selected from the ORFs having the nucleotide sequence represented by SEQ ID NO: 77053.

[8454] The probes having the nucleotide sequence represented by SEQ ID NOS: 101908, 101909, 101910, 101911, 101912, 101913, 101914, 101915, 101916, 101917, 101918 were selected from the ORFs having the nucleotide sequence represented by SEQ ID NO: 77054.

[8455] The probes having the nucleotide sequence represented by SEQ ID NOS: 101919, 101920, 101921, 101922, 101923, 101924, 101925, 101926, 101927, 101928, 101929 were selected from the ORFs having the nucleotide sequence represented by SEQ ID NO: 77055.

[8456] The probes having the nucleotide sequence represented by SEQ ID NOS: 101930, 101931, 101932, 101933, 101934, 101935, 101936, 101937, 101938, 101939, 101940 were selected from the ORFs having the nucleotide sequence represented by SEQ ID NO: 77056.

[8457] The probes having the nucleotide sequence represented by SEQ ID NOS: 101941, 101942, 101943, 101944, 101945, 101946, 101947, 101948, 101949, 101950, 101951 were selected from the ORFs having the nucleotide sequence represented by SEQ ID NO: 77057.

[8458] The probes having the nucleotide sequence represented by SEQ ID NOS: 101952, 101953, 101954, 101955, 101956, 101957, 101958, 101959, 101960, 101961, 101962 were selected from the ORFs having the nucleotide sequence represented by SEQ ID NO: 77058.

[8459] The probes having the nucleotide sequence represented by SEQ ID NOS: 101963, 101964, 101965, 101966, 101967, 101968, 101969, 101970, 101971, 101972, 101973 were selected from the ORFs having the nucleotide sequence represented by SEQ ID NO: 77059.

[8460] The probes having the nucleotide sequence represented by SEQ ID NOS: 101974, 101975, 101976, 101977, 101978, 101979, 101980, 101981, 101982, 101983, 101984 were selected from the ORFs having the nucleotide sequence represented by SEQ ID NO: 77060.

[8461] The probes having the nucleotide sequence represented by SEQ ID NOS: 101985, 101986, 101987, 101988, 101989, 101990, 101991, 101992, 101993, 101994, 101995 were selected from the ORFs having the nucleotide sequence represented by SEQ ID NO: 77061.

[8462] The probes having the nucleotide sequence represented by SEQ ID NOS: 101996, 101997, 101998, 101999, 102000, 102001, 102002, 102003, 102004, 102005, 102006 were selected from the ORFs having the nucleotide sequence represented by SEQ ID NO: 77062.

[8463] The probes having the nucleotide sequence represented by SEQ ID NOS: 102007, 102008, 102009, 102010, 102011, 102012, 102013, 102014, 102015, 102016, 102017 were selected from the ORFs having the nucleotide sequence represented by SEQ ID NO: 77063.

[8464] The probes having the nucleotide sequence represented by SEQ ID NOS: 102018, 102019, 102020, 102021, 102022, 102023, 102024, 102025, 102026, 102027, 102028 were selected from the ORFs having the nucleotide sequence represented by SEQ ID NO: 77064.

[8465] The probes having the nucleotide sequence represented by SEQ ID NOS: 102029, 102030, 102031, 102032, 102033, 102034, 102035, 102036, 102037, 102038, 102039 were selected from the ORFs having the nucleotide sequence represented by SEQ ID NO: 77065.

[8466] The probes having the nucleotide sequence represented by SEQ ID NOS: 102040, 102041, 102042, 102043, 102044, 102045, 102046, 102047, 102048, 102049, 102050 were selected from the ORFs having the nucleotide sequence represented by SEQ ID NO: 77066.

[8467] The probes having the nucleotide sequence represented by SEQ ID NOS: 102051, 102052, 102053, 102054, 102055, 102056, 102057, 102058, 102059, 102060, 102061 were selected from the ORFs having the nucleotide sequence represented by SEQ ID NO: 77067.

[8468] The probes having the nucleotide sequence represented by SEQ ID NOS: 102062, 102063, 102064, 102065, 102066, 102067, 102068, 102069, 102070, 102071, 102072 were selected from the ORFs having the nucleotide sequence represented by SEQ ID NO: 77068.

[8469] The probes having the nucleotide sequence represented by SEQ ID NOS: 102073, 102074, 102075, 102076, 102077, 102078, 102079, 102080, 102081, 102082, 102083 were selected from the ORFs having the nucleotide sequence represented by SEQ ID NO: 77069.

[8470] The probes having the nucleotide sequence represented by SEQ ID NOS: 102084, 102085, 102086, 102087, 102088, 102089, 102090, 102091, 102092, 102093, 102094 were selected from the ORFs having the nucleotide sequence represented by SEQ ID NO: 77070.

[8471] The probes having the nucleotide sequence represented by SEQ ID NOS: 102095, 102096, 102097, 102098, 102099, 102100, 102101, 102102, 102103, 102104, 102105 were selected from the ORFs having the nucleotide sequence represented by SEQ ID NO: 77071.

[8472] The probes having the nucleotide sequence represented by SEQ ID NOS: 102106, 102107, 102108, 102109, 102110, 102111, 102112, 102113, 102114, 102115, 102116 were selected from the ORFs having the nucleotide sequence represented by SEQ ID NO: 77072.

[8473] The probes having the nucleotide sequence represented by SEQ ID NOS: 102117, 102118, 102119, 102120, 102121, 102122, 102123, 102124, 102125, 102126, 102127 were selected from the ORFs having the nucleotide sequence represented by SEQ ID NO: 77073.

[8474] The probes having the nucleotide sequence represented by SEQ ID NOS: 102128, 102129, 102130, 102131, 102132, 102133, 102134, 102135, 102136, 102137, 102138 were selected from the ORFs having the nucleotide sequence represented by SEQ ID NO: 77074.

[8475] The probes having the nucleotide sequence represented by SEQ ID NOS: 102139, 102140, 102141, 102142, 102143, 102144, 102145, 102146, 102147, 102148, 102149 were selected from the ORFs having the nucleotide sequence represented by SEQ ID NO: 77075.

[8476] The probes having the nucleotide sequence represented by SEQ ID NOS: 102150, 102151, 102152, 102153, 102154, 102155, 102156, 102157, 102158, 102159, 102160 were selected from the ORFs having the nucleotide sequence represented by SEQ ID NO: 77076.

[8477] The probes having the nucleotide sequence represented by SEQ ID NOS: 102161, 102162, 102163, 102164, 102165, 102166, 102167, 102168, 102169, 102170, 102171 were selected from the ORFs having the nucleotide sequence represented by SEQ ID NO: 77077.

[8478] The probes having the nucleotide sequence represented by SEQ ID NOS: 102172, 102173, 102174, 102175, 102176, 102177, 102178, 102179, 102180, 102181, 102182 were selected from the ORFs having the nucleotide sequence represented by SEQ ID NO: 77078.

[8479] The probes having the nucleotide sequence represented by SEQ ID NOS: 102183, 102184, 102185, 102186, 102187, 102188, 102189, 102190, 102191, 102192, 102193 were selected from the ORFs having the nucleotide sequence represented by SEQ ID NO: 77079.

[8480] The probes having the nucleotide sequence represented by SEQ ID NOS: 102194, 102195, 102196, 102197, 102198, 102199, 102200, 102201, 102202, 102203, 102204 were selected from the ORFs having the nucleotide sequence represented by SEQ ID NO: 77080.

[8481] The probes having the nucleotide sequence represented by SEQ ID NOS: 102205, 102206, 102207, 102208, 102209, 102210, 102211, 102212, 102213, 102214, 102215 were selected from the ORFs having the nucleotide sequence represented by SEQ ID NO: 77081.

[8482] The probes having the nucleotide sequence represented by SEQ ID NOS: 102216, 102217, 102218, 102219, 102220, 102221, 102222, 102223, 102224, 102225, 102226 were selected from the ORFs having the nucleotide sequence represented by SEQ ID NO: 77082.

[8483] The probes having the nucleotide sequence represented by SEQ ID NOS: 102227, 102228, 102229, 102230, 102231, 102232, 102233, 102234, 102235, 102236, 102237 were selected from the ORFs having the nucleotide sequence represented by SEQ ID NO: 77083.

[8484] The probes having the nucleotide sequence represented by SEQ ID NOS: 102238, 102239, 102240, 102241, 102242, 102243, 102244, 102245, 102246, 102247, 102248 were selected from the ORFs having the nucleotide sequence represented by SEQ ID NO: 77084.

[8485] The probes having the nucleotide sequence represented by SEQ ID NOS: 102249, 102250, 102251, 102252, 102253, 102254, 102255, 102256, 102257, 102258, 102259 were selected from the ORFs having the nucleotide sequence represented by SEQ ID NO: 77085.

[8486] The probes having the nucleotide sequence represented by SEQ ID NOS: 102260, 102261, 102262, 102263, 102264, 102265, 102266, 102267, 102268, 102269, 102270 were selected from the ORFs having the nucleotide sequence represented by SEQ ID NO: 77086.

[8487] The probes having the nucleotide sequence represented by SEQ ID NOS: 102271, 102272, 102273, 102274, 102275, 102276, 102277, 102278, 102279, 102280, 102281 were selected from the ORFs having the nucleotide sequence represented by SEQ ID NO: 77087.

[8488] The probes having the nucleotide sequence represented by SEQ ID NOS: 102282, 102283, 102284, 102285, 102286, 102287, 102288, 102289, 102290, 102291, 102292 were selected from the ORFs having the nucleotide sequence represented by SEQ ID NO: 77088.

[8489] The probes having the nucleotide sequence represented by SEQ ID NOS: 102293, 102294, 102295, 102296, 102297, 102298, 102299, 102300, 102301, 102302, 102303 were selected from the ORFs having the nucleotide sequence represented by SEQ ID NO: 77089.

[8490] The probes having the nucleotide sequence represented by SEQ ID NOS: 102304, 102305, 102306, 102307, 102308, 102309, 102310, 102311, 102312, 102313, 102314 were selected from the ORFs having the nucleotide sequence represented by SEQ ID NO: 77090.

[8491] The probes having the nucleotide sequence represented by SEQ ID NOS: 102315, 102316, 102317, 102318, 102319, 102320, 102321, 102322, 102323, 102324, 102325 were selected from the ORFs having the nucleotide sequence represented by SEQ ID NO: 77091.

[8492] The probes having the nucleotide sequence represented by SEQ ID NOS: 102326, 102327, 102328, 102329, 102330, 102331, 102332, 102333, 102334, 102335, 102336 were selected from the ORFs having the nucleotide sequence represented by SEQ ID NO: 77092.

[8493] The probes having the nucleotide sequence represented by SEQ ID NOS: 102337, 102338, 102339, 102340, 102341, 102342, 102343, 102344, 102345, 102346, 102347 were selected from the ORFs having the nucleotide sequence represented by SEQ ID NO: 77093.

[8494] The probes having the nucleotide sequence represented by SEQ ID NOS: 102348, 102349, 102350, 102351, 102352, 102353, 102354, 102355, 102356, 102357, 102358 were selected from the ORFs having the nucleotide sequence represented by SEQ ID NO: 77094.

[8495] The probes having the nucleotide sequence represented by SEQ ID NOS: 102359, 102360, 102361, 102362, 102363, 102364, 102365, 102366, 102367, 102368, 102369 were selected from the ORFs having the nucleotide sequence represented by SEQ ID NO: 77095.

[8496] The probes having the nucleotide sequence represented by SEQ ID NOS: 102370, 102371, 102372, 102373, 102374, 102375, 102376, 102377, 102378, 102379, 102380 were selected from the ORFs having the nucleotide sequence represented by SEQ ID NO: 77096.

[8497] The probes having the nucleotide sequence represented by SEQ ID NOS: 102381, 102382, 102383, 102384, 102385, 102386, 102387, 102388, 102389, 102390, 102391 were selected from the ORFs having the nucleotide sequence represented by SEQ ID NO: 77097.

[8498] The probes having the nucleotide sequence represented by SEQ ID NOS: 102392, 102393, 102394, 102395, 102396, 102397, 102398, 102399, 102400, 102401, 102402 were selected from the ORFs having the nucleotide sequence represented by SEQ ID NO: 77098.

[8499] The probes having the nucleotide sequence represented by SEQ ID NOS: 102403, 102404, 102405, 102406, 102407, 102408, 102409, 102410, 102411, 102412, 102413 were selected from the ORFs having the nucleotide sequence represented by SEQ ID NO: 77099.

[8500] The probes having the nucleotide sequence represented by SEQ ID NOS: 102414, 102415, 102416, 102417, 102418, 102419, 102420, 102421, 102422, 102423, 102424 were selected from the ORFs having the nucleotide sequence represented by SEQ ID NO: 77100.

[8501] The probes having the nucleotide sequence represented by SEQ ID NOS: 102425, 102426, 102427, 102428, 102429, 102430, 102431, 102432, 102433, 102434, 102435 were selected from the ORFs having the nucleotide sequence represented by SEQ ID NO: 77101.

[8502] The probes having the nucleotide sequence represented by SEQ ID NOS: 102436, 102437, 102438, 102439, 102440, 102441, 102442, 102443, 102444, 102445, 102446 were selected from the ORFs having the nucleotide sequence represented by SEQ ID NO: 77102.

[8503] The probes having the nucleotide sequence represented by SEQ ID NOS: 102447, 102448, 102449, 102450, 102451, 102452, 102453, 102454, 102455, 102456, 102457 were selected from the ORFs having the nucleotide sequence represented by SEQ ID NO: 77103.

[8504] The probes having the nucleotide sequence represented by SEQ ID NOS: 102458, 102459, 102460, 102461, 102462, 102463, 102464, 102465, 102466, 102467, 102468 were selected from the ORFs having the nucleotide sequence represented by SEQ ID NO: 77104.

[8505] The probes having the nucleotide sequence represented by SEQ ID NOS: 102469, 102470, 102471, 102472, 102473, 102474, 102475, 102476, 102477, 102478, 102479 were selected from the ORFs having the nucleotide sequence represented by SEQ ID NO: 77105.

[8506] The probes having the nucleotide sequence represented by SEQ ID NOS: 102480, 102481, 102482, 102483, 102484, 102485, 102486, 102487, 102488, 102489, 102490 were selected from the ORFs having the nucleotide sequence represented by SEQ ID NO: 77106.

[8507] The probes having the nucleotide sequence represented by SEQ ID NOS: 102491, 102492, 102493, 102494, 102495, 102496, 102497, 102498, 102499, 102500, 102501 were selected from the ORFs having the nucleotide sequence represented by SEQ ID NO: 77107.

[8508] The probes having the nucleotide sequence represented by SEQ ID NOS: 102502, 102503, 102504, 102505, 102506, 102507, 102508, 102509, 102510, 102511, 102512 were selected from the ORFs having the nucleotide sequence represented by SEQ ID NO: 77108.

[8509] The probes having the nucleotide sequence represented by SEQ ID NOS: 102513, 102514, 102515, 102516, 102517, 102518, 102519, 102520, 102521, 102522, 102523 were selected from the ORFs having the nucleotide sequence represented by SEQ ID NO: 77109.

[8510] The probes having the nucleotide sequence represented by SEQ ID NOS: 102524, 102525, 102526, 102527, 102528, 102529, 102530, 102531, 102532, 102533, 102534 were selected from the ORFs having the nucleotide sequence represented by SEQ ID NO: 77110.

[8511] The probes having the nucleotide sequence represented by SEQ ID NOS: 102535, 102536, 102537, 102538, 102539, 102540, 102541, 102542, 102543, 102544, 102545 were selected from the ORFs having the nucleotide sequence represented by SEQ ID NO: 77111.

[8512] The probes having the nucleotide sequence represented by SEQ ID NOS: 102546, 102547, 102548, 102549, 102550, 102551, 102552, 102553, 102554, 102555, 102556 were selected from the ORFs having the nucleotide sequence represented by SEQ ID NO: 77112.

[8513] The probes having the nucleotide sequence represented by SEQ ID NOS: 102557, 102558, 102559, 102560, 102561, 102562, 102563, 102564, 102565, 102566, 102567 were selected from the ORFs having the nucleotide sequence represented by SEQ ID NO: 77113.

[8514] The probes having the nucleotide sequence represented by SEQ ID NOS: 102568, 102569, 102570, 102571, 102572, 102573, 102574, 102575, 102576, 102577, 102578 were selected from the ORFs having the nucleotide sequence represented by SEQ ID NO: 77114.

[8515] The probes having the nucleotide sequence represented by SEQ ID NOS: 102579, 102580, 102581, 102582, 102583, 102584, 102585, 102586, 102587, 102588, 102589 were selected from the ORFs having the nucleotide sequence represented by SEQ ID NO: 77115.

[8516] The probes having the nucleotide sequence represented by SEQ ID NOS: 102590, 102591, 102592, 102593, 102594, 102595, 102596, 102597, 102598, 102599, 102600 were selected from the ORFs having the nucleotide sequence represented by SEQ ID NO: 77116.

[8517] The probes having the nucleotide sequence represented by SEQ ID NOS: 102601, 102602, 102603, 102604, 102605, 102606, 102607, 102608, 102609, 102610, 102611 were selected from the ORFs having the nucleotide sequence represented by SEQ ID NO: 77117.

[8518] The probes having the nucleotide sequence represented by SEQ ID NOS: 102612, 102613, 102614, 102615, 102616, 102617, 102618, 102619, 102620, 102621, 102622 were selected from the ORFs having the nucleotide sequence represented by SEQ ID NO: 77118.

[8519] The probes having the nucleotide sequence represented by SEQ ID NOS: 102623, 102624, 102625, 102626, 102627, 102628, 102629, 102630, 102631, 102632, 102633 were selected from the ORFs having the nucleotide sequence represented by SEQ ID NO: 77119.

[8520] The probes having the nucleotide sequence represented by SEQ ID NOS: 102634, 102635, 102636, 102637, 102638, 102639, 102640, 102641, 102642, 102643, 102644 were selected from the ORFs having the nucleotide sequence represented by SEQ ID NO: 77120.

[8521] The probes having the nucleotide sequence represented by SEQ ID NOS: 102645, 102646, 102647, 102648, 102649, 102650, 102651, 102652, 102653, 102654, 102655 were selected from the ORFs having the nucleotide sequence represented by SEQ ID NO: 77121.

[8522] The probes having the nucleotide sequence represented by SEQ ID NOS: 102656, 102657, 102658, 102659, 102660, 102661, 102662, 102663, 102664, 102665, 102666 were selected from the ORFs having the nucleotide sequence represented by SEQ ID NO: 77122.

[8523] The probes having the nucleotide sequence represented by SEQ ID NOS: 102667, 102668, 102669, 102670, 102671, 102672, 102673, 102674, 102675, 102676, 102677 were selected from the ORFs having the nucleotide sequence represented by SEQ ID NO: 77123.

[8524] The probes having the nucleotide sequence represented by SEQ ID NOS: 102678, 102679, 102680, 102681, 102682, 102683, 102684, 102685, 102686, 102687, 102688 were selected from the ORFs having the nucleotide sequence represented by SEQ ID NO: 77124.

[8525] The probes having the nucleotide sequence represented by SEQ ID NOS: 102689, 102690, 102691, 102692, 102693, 102694, 102695, 102696, 102697, 102698, 102699 were selected from the ORFs having the nucleotide sequence represented by SEQ ID NO: 77125.

[8526] The probes having the nucleotide sequence represented by SEQ ID NOS: 102700, 102701, 102702, 102703, 102704, 102705, 102706, 102707, 102708, 102709, 102710 were selected from the ORFs having the nucleotide sequence represented by SEQ ID NO: 77126.

[8527] The probes having the nucleotide sequence represented by SEQ ID NOS: 102711, 102712, 102713, 102714, 102715, 102716, 102717, 102718, 102719, 102720, 102721 were selected from the ORFs having the nucleotide sequence represented by SEQ ID NO: 77127.

[8528] The probes having the nucleotide sequence represented by SEQ ID NOS: 102722, 102723, 102724, 102725, 102726, 102727, 102728, 102729, 102730, 102731, 102732 were selected from the ORFs having the nucleotide sequence represented by SEQ ID NO: 77128.

[8529] The probes having the nucleotide sequence represented by SEQ ID NOS: 102733, 102734, 102735, 102736, 102737, 102738, 102739, 102740, 102741, 102742, 102743 were selected from the ORFs having the nucleotide sequence represented by SEQ ID NO: 77129.

[8530] The probes having the nucleotide sequence represented by SEQ ID NOS: 102744, 102745, 102746, 102747, 102748, 102749, 102750, 102751, 102752, 102753, 102754 were selected from the ORFs having the nucleotide sequence represented by SEQ ID NO: 77130.

[8531] The probes having the nucleotide sequence represented by SEQ ID NOS: 102755, 102756, 102757, 102758, 102759, 102760, 102761, 102762, 102763, 102764, 102765 were selected from the ORFs having the nucleotide sequence represented by SEQ ID NO: 77131.

[8532] The probes having the nucleotide sequence represented by SEQ ID NOS: 102766, 102767, 102768, 102769, 102770, 102771, 102772, 102773, 102774, 102775, 102776 were selected from the ORFs having the nucleotide sequence represented by SEQ ID NO: 77132.

[8533] The probes having the nucleotide sequence represented by SEQ ID NOS: 102777, 102778, 102779, 102780, 102781, 102782, 102783, 102784, 102785, 102786, 102787 were selected from the ORFs having the nucleotide sequence represented by SEQ ID NO: 77133.

[8534] The probes having the nucleotide sequence represented by SEQ ID NOS: 102788, 102789, 102790, 102791, 102792, 102793, 102794, 102795, 102796, 102797, 102798 were selected from the ORFs having the nucleotide sequence represented by SEQ ID NO: 77134.

[8535] The probes having the nucleotide sequence represented by SEQ ID NOS: 102799, 102800, 102801, 102802, 102803, 102804, 102805, 102806, 102807, 102808, 102809 were selected from the ORFs having the nucleotide sequence represented by SEQ ID NO: 77135.

[8536] The probes having the nucleotide sequence represented by SEQ ID NOS: 102810, 102811, 102812, 102813, 102814, 102815, 102816, 102817, 102818, 102819, 102820 were selected from the ORFs having the nucleotide sequence represented by SEQ ID NO: 77136.

[8537] The probes having the nucleotide sequence represented by SEQ ID NOS: 102821, 102822, 102823, 102824, 102825, 102826, 102827, 102828, 102829, 102830, 102831 were selected from the ORFs having the nucleotide sequence represented by SEQ ID NO: 77137.

[8538] The probes having the nucleotide sequence represented by SEQ ID NOS: 102832, 102833, 102834, 102835, 102836, 102837, 102838, 102839, 102840, 102841, 102842 were selected from the ORFs having the nucleotide sequence represented by SEQ ID NO: 77138.

[8539] The probes having the nucleotide sequence represented by SEQ ID NOS: 102843, 102844, 102845, 102846, 102847, 102848, 102849, 102850, 102851, 102852, 102853 were selected from the ORFs having the nucleotide sequence represented by SEQ ID NO: 77139.

[8540] The probes having the nucleotide sequence represented by SEQ ID NOS: 102854, 102855, 102856, 102857, 102858, 102859, 102860, 102861, 102862, 102863, 102864 were selected from the ORFs having the nucleotide sequence represented by SEQ ID NO: 77140.

[8541] The probes having the nucleotide sequence represented by SEQ ID NOS: 102865, 102866, 102867, 102868, 102869, 102870, 102871, 102872, 102873, 102874, 102875 were selected from the ORFs having the nucleotide sequence represented by SEQ ID NO: 77141.

[8542] The probes having the nucleotide sequence represented by SEQ ID NOS: 102876, 102877, 102878, 102879, 102880, 102881, 102882, 102883, 102884, 102885, 102886 were selected from the ORFs having the nucleotide sequence represented by SEQ ID NO: 77142.

[8543] The probes having the nucleotide sequence represented by SEQ ID NOS: 102887, 102888, 102889, 102890, 102891, 102892, 102893, 102894, 102895, 102896, 102897 were selected from the ORFs having the nucleotide sequence represented by SEQ ID NO: 77143.

[8544] The probes having the nucleotide sequence represented by SEQ ID NOS: 102898, 102899, 102900, 102901, 102902, 102903, 102904, 102905, 102906, 102907, 102908 were selected from the ORFs having the nucleotide sequence represented by SEQ ID NO: 77144.

[8545] The probes having the nucleotide sequence represented by SEQ ID NOS: 102909, 102910, 102911, 102912, 102913, 102914, 102915, 102916, 102917, 102918, 102919 were selected from the ORFs having the nucleotide sequence represented by SEQ ID NO: 77145.

[8546] The probes having the nucleotide sequence represented by SEQ ID NOS: 102920, 102921, 102922, 102923, 102924, 102925, 102926, 102927, 102928, 102929, 102930 were selected from the ORFs having the nucleotide sequence represented by SEQ ID NO: 77146.

[8547] The probes having the nucleotide sequence represented by SEQ ID NOS: 102931, 102932, 102933, 102934, 102935, 102936, 102937, 102938, 102939, 102940, 102941 were selected from the ORFs having the nucleotide sequence represented by SEQ ID NO: 77147.

[8548] The probes having the nucleotide sequence represented by SEQ ID NOS: 102942, 102943, 102944, 102945, 102946, 102947, 102948, 102949, 102950, 102951, 102952 were selected from the ORFs having the nucleotide sequence represented by SEQ ID NO: 77148.

[8549] The probes having the nucleotide sequence represented by SEQ ID NOS: 102953, 102954, 102955, 102956, 102957, 102958, 102959, 102960, 102961, 102962, 102963 were selected from the ORFs having the nucleotide sequence represented by SEQ ID NO: 77149.

[8550] The probes having the nucleotide sequence represented by SEQ ID NOS: 102964, 102965, 102966, 102967, 102968, 102969, 102970, 102971, 102972, 102973, 102974 were selected from the ORFs having the nucleotide sequence represented by SEQ ID NO: 77150.

[8551] The probes having the nucleotide sequence represented by SEQ ID NOS: 102975, 102976, 102977, 102978, 102979, 102980, 102981, 102982, 102983, 102984, 102985 were selected from the ORFs having the nucleotide sequence represented by SEQ ID NO: 77151.

[8552] The probes having the nucleotide sequence represented by SEQ ID NOS: 102986, 102987, 102988, 102989, 102990, 102991, 102992, 102993, 102994, 102995, 102996 were selected from the ORFs having the nucleotide sequence represented by SEQ ID NO: 77152.

[8553] The probes having the nucleotide sequence represented by SEQ ID NOS: 102997, 102998, 102999, 103000, 103001, 103002, 103003, 103004, 103005, 103006, 103007 were selected from the ORFs having the nucleotide sequence represented by SEQ ID NO: 77153.

[8554] The probes having the nucleotide sequence represented by SEQ ID NOS: 103008, 103009, 103010, 103011, 103012, 103013, 103014, 103015, 103016, 103017, 103018 were selected from the ORFs having the nucleotide sequence represented by SEQ ID NO: 77154.

[8555] The probes having the nucleotide sequence represented by SEQ ID NOS: 103019, 103020, 103021, 103022, 103023, 103024, 103025, 103026, 103027, 103028, 103029 were selected from the ORFs having the nucleotide sequence represented by SEQ ID NO: 77155.

[8556] The probes having the nucleotide sequence represented by SEQ ID NOS: 103030, 103031, 103032, 103033, 103034, 103035, 103036, 103037, 103038, 103039, 103040 were selected from the ORFs having the nucleotide sequence represented by SEQ ID NO: 77156.

[8557] The probes having the nucleotide sequence represented by SEQ ID NOS: 103041, 103042, 103043, 103044, 103045, 103046, 103047, 103048, 103049, 103050, 103051 were selected from the ORFs having the nucleotide sequence represented by SEQ ID NO: 77157.

[8558] The probes having the nucleotide sequence represented by SEQ ID NOS: 103052, 103053, 103054, 103055, 103056, 103057, 103058, 103059, 103060, 103061, 103062 were selected from the ORFs having the nucleotide sequence represented by SEQ ID NO: 77158.

[8559] The probes having the nucleotide sequence represented by SEQ ID NOS: 103063, 103064, 103065, 103066, 103067, 103068, 103069, 103070, 103071, 103072, 103073 were selected from the ORFs having the nucleotide sequence represented by SEQ ID NO: 77159.

[8560] The probes having the nucleotide sequence represented by SEQ ID NOS: 103074, 103075, 103076, 103077, 103078, 103079, 103080, 103081, 103082, 103083, 103084 were selected from the ORFs having the nucleotide sequence represented by SEQ ID NO: 77160.

[8561] The probes having the nucleotide sequence represented by SEQ ID NOS: 103085, 103086, 103087, 103088, 103089, 103090, 103091, 103092, 103093, 103094, 103095 were selected from the ORFs having the nucleotide sequence represented by SEQ ID NO: 77161.

[8562] The probes having the nucleotide sequence represented by SEQ ID NOS: 103096, 103097, 103098, 103099, 103100, 103101, 103102, 103103, 103104, 103105, 103106 were selected from the ORFs having the nucleotide sequence represented by SEQ ID NO: 77162.

[8563] The probes having the nucleotide sequence represented by SEQ ID NOS: 103107, 103108, 103109, 103110, 103111, 103112, 103113, 103114, 103115, 103116, 103117 were selected from the ORFs having the nucleotide sequence represented by SEQ ID NO: 77163.

[8564] The probes having the nucleotide sequence represented by SEQ ID NOS: 103118, 103119, 103120, 103121, 103122, 103123, 103124, 103125, 103126, 103127, 103128 were selected from the ORFs having the nucleotide sequence represented by SEQ ID NO: 77164.

[8565] The probes having the nucleotide sequence represented by SEQ ID NOS: 103129, 103130, 103131, 103132, 103133, 103134, 103135, 103136, 103137, 103138, 103139 were selected from the ORFs having the nucleotide sequence represented by SEQ ID NO: 77165.

[8566] The probes having the nucleotide sequence represented by SEQ ID NOS: 103140, 103141, 103142, 103143, 103144, 103145, 103146, 103147, 103148, 103149, 103150 were selected from the ORFs having the nucleotide sequence represented by SEQ ID NO: 77166.

[8567] The probes having the nucleotide sequence represented by SEQ ID NOS: 103151, 103152, 103153, 103154, 103155, 103156, 103157, 103158, 103159, 103160, 103161, 103162, 103163, 103164, 103165, 103166, 103167, 103168, 103169, 103170, 103171, 103172 were selected from the ORFs having the nucleotide sequence represented by SEQ ID NO: 77167.

[8568] The probes having the nucleotide sequence represented by SEQ ID NOS: 103173, 103174, 103175, 103176, 103177, 103178, 103179, 103180, 103181, 103182, 103183 were selected from the ORFs having the nucleotide sequence represented by SEQ ID NO: 77168.

[8569] The probes having the nucleotide sequence represented by SEQ ID NOS: 103184, 103185, 103186, 103187, 103188, 103189, 103190, 103191, 103192, 103193, 103194 were selected from the ORFs having the nucleotide sequence represented by SEQ ID NO: 77169.

[8570] The probes having the nucleotide sequence represented by SEQ ID NOS: 103195, 103196, 103197, 103198, 103199, 103200, 103201, 103202, 103203, 103204, 103205 were selected from the ORFs having the nucleotide sequence represented by SEQ ID NO: 77170.

[8571] The probes having the nucleotide sequence represented by SEQ ID NOS: 103206, 103207, 103208, 103209, 103210, 103211, 103212, 103213, 103214, 103215, 103216 were selected from the ORFs having the nucleotide sequence represented by SEQ ID NO: 77171.

[8572] The probes having the nucleotide sequence represented by SEQ ID NOS: 103217, 103218, 103219, 103220, 103221, 103222, 103223, 103224, 103225, 103226, 103227 were selected from the ORFs having the nucleotide sequence represented by SEQ ID NO: 77172.

[8573] The probes having the nucleotide sequence represented by SEQ ID NOS: 103228, 103229, 103230, 103231, 103232, 103233, 103234, 103235, 103236, 103237, 103238 were selected from the ORFs having the nucleotide sequence represented by SEQ ID NO: 77173.

[8574] The probes having the nucleotide sequence represented by SEQ ID NOS: 103239, 103240, 103241, 103242, 103243, 103244, 103245, 103246, 103247, 103248, 103249 were selected from the ORFs having the nucleotide sequence represented by SEQ ID NO: 77174.

[8575] The probes having the nucleotide sequence represented by SEQ ID NOS: 103250, 103251, 103252, 103253, 103254, 103255, 103256, 103257, 103258, 103259, 103260 were selected from the ORFs having the nucleotide sequence represented by SEQ ID NO: 77175.

[8576] The probes having the nucleotide sequence represented by SEQ ID NOS: 103261, 103262, 103263, 103264, 103265, 103266, 103267, 103268, 103269, 103270, 103271 were selected from the ORFs having the nucleotide sequence represented by SEQ ID NO: 77176.

[8577] The probes having the nucleotide sequence represented by SEQ ID NOS: 103272, 103273, 103274, 103275, 103276, 103277, 103278, 103279, 103280, 103281, 103282 were selected from the ORFs having the nucleotide sequence represented by SEQ ID NO: 77177.

[8578] The probes having the nucleotide sequence represented by SEQ ID NOS: 103283, 103284, 103285, 103286, 103287, 103288, 103289, 103290, 103291, 103292, 103293 were selected from the ORFs having the nucleotide sequence represented by SEQ ID NO: 77178.

[8579] The probes having the nucleotide sequence represented by SEQ ID NOS: 103294, 103295, 103296, 103297, 103298, 103299, 103300, 103301, 103302, 103303, 103304 were selected from the ORFs having the nucleotide sequence represented by SEQ ID NO: 77179.

[8580] The probes having the nucleotide sequence represented by SEQ ID NOS: 103305, 103306, 103307, 103308, 103309, 103310, 103311, 103312, 103313, 103314, 103315 were selected from the ORFs having the nucleotide sequence represented by SEQ ID NO: 77180.

[8581] The probes having the nucleotide sequence represented by SEQ ID NOS: 103316, 103317, 103318, 103319, 103320, 103321, 103322, 103323, 103324, 103325, 103326 were selected from the ORFs having the nucleotide sequence represented by SEQ ID NO: 77181.

[8582] The probes having the nucleotide sequence represented by SEQ ID NOS: 103327, 103328, 103329, 103330, 103331, 103332, 103333, 103334, 103335, 103336, 103337 were selected from the ORFs having the nucleotide sequence represented by SEQ ID NO: 77182.

[8583] The probes having the nucleotide sequence represented by SEQ ID NOS: 103338, 103339, 103340, 103341, 103342, 103343, 103344, 103345, 103346, 103347, 103348 were selected from the ORFs having the nucleotide sequence represented by SEQ ID NO: 77183.

[8584] The probes having the nucleotide sequence represented by SEQ ID NOS: 103349, 103350, 103351, 103352, 103353, 103354, 103355, 103356, 103357, 103358, 103359 were selected from the ORFs having the nucleotide sequence represented by SEQ ID NO: 77184.

[8585] The probes having the nucleotide sequence represented by SEQ ID NOS: 103360, 103361, 103362, 103363, 103364, 103365, 103366, 103367, 103368, 103369, 103370 were selected from the ORFs having the nucleotide sequence represented by SEQ ID NO: 77185.

[8586] The probes having the nucleotide sequence represented by SEQ ID NOS: 103371, 103372, 103373, 103374, 103375, 103376, 103377, 103378, 103379, 103380, 103381 were selected from the ORFs having the nucleotide sequence represented by SEQ ID NO: 77186.

[8587] The probes having the nucleotide sequence represented by SEQ ID NOS: 103382, 103383, 103384, 103385, 103386, 103387, 103388, 103389, 103390, 103391, 103392 were selected from the ORFs having the nucleotide sequence represented by SEQ ID NO: 77187.

[8588] The probes having the nucleotide sequence represented by SEQ ID NOS: 103393, 103394, 103395, 103396, 103397, 103398, 103399, 103400, 103401, 103402, 103403 were selected from the ORFs having the nucleotide sequence represented by SEQ ID NO: 77188.

[8589] The probes having the nucleotide sequence represented by SEQ ID NOS: 103404, 103405, 103406, 103407, 103408, 103409, 103410, 103411, 103412, 103413, 103414 were selected from the ORFs having the nucleotide sequence represented by SEQ ID NO: 77189.

[8590] The probes having the nucleotide sequence represented by SEQ ID NOS: 103415, 103416, 103417, 103418, 103419, 103420, 103421, 103422, 103423, 103424, 103425 were selected from the ORFs having the nucleotide sequence represented by SEQ ID NO: 77190.

[8591] The probes having the nucleotide sequence represented by SEQ ID NOS: 103426, 103427, 103428, 103429, 103430, 103431, 103432, 103433, 103434, 103435, 103436 were selected from the ORFs having the nucleotide sequence represented by SEQ ID NO: 77191.

[8592] The probes having the nucleotide sequence represented by SEQ ID NOS: 103437, 103438, 103439, 103440, 103441, 103442, 103443, 103444, 103445, 103446, 103447 were selected from the ORFs having the nucleotide sequence represented by SEQ ID NO: 77192.

[8593] The probes having the nucleotide sequence represented by SEQ ID NOS: 103448, 103449, 103450, 103451, 103452, 103453, 103454, 103455, 103456, 103457, 103458 were selected from the ORFs having the nucleotide sequence represented by SEQ ID NO: 77193.

[8594] The probes having the nucleotide sequence represented by SEQ ID NOS: 103459, 103460, 103461, 103462, 103463, 103464, 103465, 103466, 103467, 103468, 103469 were selected from the ORFs having the nucleotide sequence represented by SEQ ID NO: 77194.

[8595] The probes having the nucleotide sequence represented by SEQ ID NOS: 103470, 103471, 103472, 103473, 103474, 103475, 103476, 103477, 103478, 103479, 103480 were selected from the ORFs having the nucleotide sequence represented by SEQ ID NO: 77195.

[8596] The probes having the nucleotide sequence represented by SEQ ID NOS: 103481, 103482, 103483, 103484, 103485, 103486, 103487, 103488, 103489, 103490, 103491 were selected from the ORFs having the nucleotide sequence represented by SEQ ID NO: 77196.

[8597] The probes having the nucleotide sequence represented by SEQ ID NOS: 103492, 103493, 103494, 103495, 103496, 103497, 103498, 103499, 103500, 103501, 103502, 103503, 103504, 103505, 103506, 103507, 103508, 103509, 103510, 103511, 103512, 103513 were selected from the ORFs having the nucleotide sequence represented by SEQ ID NO: 77197.

[8598] The probes having the nucleotide sequence represented by SEQ ID NOS: 103514, 103515, 103516, 103517, 103518, 103519, 103520, 103521, 103522, 103523, 103524 were selected from the ORFs having the nucleotide sequence represented by SEQ ID NO: 77198.

[8599] The probes having the nucleotide sequence represented by SEQ ID NOS: 103525, 103526, 103527, 103528, 103529, 103530, 103531, 103532, 103533, 103534, 103535 were selected from the ORFs having the nucleotide sequence represented by SEQ ID NO: 77199.

[8600] The probes having the nucleotide sequence represented by SEQ ID NOS: 103536, 103537, 103538, 103539, 103540, 103541, 103542, 103543, 103544, 103545, 103546 were selected from the ORFs having the nucleotide sequence represented by SEQ ID NO: 77200.

[8601] The probes having the nucleotide sequence represented by SEQ ID NOS: 103547, 103548, 103549, 103550, 103551, 103552, 103553, 103554, 103555, 103556, 103557 were selected from the ORFs having the nucleotide sequence represented by SEQ ID NO: 77201.

[8602] The probes having the nucleotide sequence represented by SEQ ID NOS: 103558, 103559, 103560, 103561, 103562, 103563, 103564, 103565, 103566, 103567, 103568 were selected from the ORFs having the nucleotide sequence represented by SEQ ID NO: 77202.

[8603] The probes having the nucleotide sequence represented by SEQ ID NOS: 103569, 103570, 103571, 103572, 103573, 103574, 103575, 103576, 103577, 103578, 103579 were selected from the ORFs having the nucleotide sequence represented by SEQ ID NO: 77203.

[8604] The probes having the nucleotide sequence represented by SEQ ID NOS: 103580, 103581, 103582, 103583, 103584, 103585, 103586, 103587, 103588, 103589, 103590 were selected from the ORFs having the nucleotide sequence represented by SEQ ID NO: 77204.

[8605] The probes having the nucleotide sequence represented by SEQ ID NOS: 103591, 103592, 103593, 103594, 103595, 103596, 103597, 103598, 103599, 103600, 103601 were selected from the ORFs having the nucleotide sequence represented by SEQ ID NO: 77205.

[8606] The probes having the nucleotide sequence represented by SEQ ID NOS: 103602, 103603, 103604, 103605, 103606, 103607, 103608, 103609, 103610, 103611, 103612 were selected from the ORFs having the nucleotide sequence represented by SEQ ID NO: 77206.

[8607] The probes having the nucleotide sequence represented by SEQ ID NOS: 103613, 103614, 103615, 103616, 103617, 103618, 103619, 103620, 103621, 103622, 103623 were selected from the ORFs having the nucleotide sequence represented by SEQ ID NO: 77207.

[8608] The probes having the nucleotide sequence represented by SEQ ID NOS: 103624, 103625, 103626, 103627, 103628, 103629, 103630, 103631, 103632, 103633, 103634 were selected from the ORFs having the nucleotide sequence represented by SEQ ID NO: 77208.

[8609] The probes having the nucleotide sequence represented by SEQ ID NOS: 103635, 103636, 103637, 103638, 103639, 103640, 103641, 103642, 103643, 103644, 103645 were selected from the ORFs having the nucleotide sequence represented by SEQ ID NO: 77209.

[8610] The probes having the nucleotide sequence represented by SEQ ID NOS: 103646, 103647, 103648, 103649, 103650, 103651, 103652, 103653, 103654, 103655, 103656 were selected from the ORFs having the nucleotide sequence represented by SEQ ID NO: 77210.

[8611] The probes having the nucleotide sequence represented by SEQ ID NOS: 103657, 103658, 103659, 103660, 103661, 103662, 103663, 103664, 103665, 103666, 103667 were selected from the ORFs having the nucleotide sequence represented by SEQ ID NO: 77211.

[8612] The probes having the nucleotide sequence represented by SEQ ID NOS: 103668, 103669, 103670, 103671, 103672, 103673, 103674, 103675, 103676, 103677, 103678 were selected from the ORFs having the nucleotide sequence represented by SEQ ID NO: 77212.

[8613] The probes having the nucleotide sequence represented by SEQ ID NOS: 103679, 103680, 103681, 103682, 103683, 103684, 103685, 103686, 103687, 103688, 103689 were selected from the ORFs having the nucleotide sequence represented by SEQ ID NO: 77213.

[8614] The probes having the nucleotide sequence represented by SEQ ID NOS: 103690, 103691, 103692, 103693, 103694, 103695, 103696, 103697, 103698, 103699, 103700 were selected from the ORFs having the nucleotide sequence represented by SEQ ID NO: 77214.

[8615] The probes having the nucleotide sequence represented by SEQ ID NOS: 103701, 103702, 103703, 103704, 103705, 103706, 103707, 103708, 103709, 103710, 103711 were selected from the ORFs having the nucleotide sequence represented by SEQ ID NO: 77215.

[8616] The probes having the nucleotide sequence represented by SEQ ID NOS: 103712, 103713, 103714, 103715, 103716, 103717, 103718, 103719, 103720, 103721, 103722 were selected from the ORFs having the nucleotide sequence represented by SEQ ID NO: 77216.

[8617] The probes having the nucleotide sequence represented by SEQ ID NOS: 103723, 103724, 103725, 103726, 103727, 103728, 103729, 103730, 103731, 103732, 103733 were selected from the ORFs having the nucleotide sequence represented by SEQ ID NO: 77217.

[8618] The probes having the nucleotide sequence represented by SEQ ID NOS: 103734, 103735, 103736, 103737, 103738, 103739, 103740, 103741, 103742, 103743, 103744 were selected from the ORFs having the nucleotide sequence represented by SEQ ID NO: 77218.

[8619] The probes having the nucleotide sequence represented by SEQ ID NOS: 103745, 103746, 103747, 103748, 103749, 103750, 103751, 103752, 103753, 103754, 103755 were selected from the ORFs having the nucleotide sequence represented by SEQ ID NO: 77219.

[8620] The probes having the nucleotide sequence represented by SEQ ID NOS: 103756, 103757, 103758, 103759, 103760, 103761, 103762, 103763, 103764, 103765, 103766 were selected from the ORFs having the nucleotide sequence represented by SEQ ID NO: 77220.

[8621] The probes having the nucleotide sequence represented by SEQ ID NOS: 103767, 103768, 103769, 103770, 103771, 103772, 103773, 103774, 103775, 103776, 103777 were selected from the ORFs having the nucleotide sequence represented by SEQ ID NO: 77221.

[8622] The probes having the nucleotide sequence represented by SEQ ID NOS: 103778, 103779, 103780, 103781, 103782, 103783, 103784, 103785, 103786, 103787, 103788 were selected from the ORFs having the nucleotide sequence represented by SEQ ID NO: 77222.

[8623] The probes having the nucleotide sequence represented by SEQ ID NOS: 103789, 103790, 103791, 103792, 103793, 103794, 103795, 103796, 103797, 103798, 103799 were selected from the ORFs having the nucleotide sequence represented by SEQ ID NO: 77223.

[8624] The probes having the nucleotide sequence represented by SEQ ID NOS: 103800, 103801, 103802, 103803, 103804, 103805, 103806, 103807, 103808, 103809, 103810 were selected from the ORFs having the nucleotide sequence represented by SEQ ID NO: 77224.

[8625] The probes having the nucleotide sequence represented by SEQ ID NOS: 103811, 103812, 103813, 103814, 103815, 103816, 103817, 103818, 103819, 103820, 103821 were selected from the ORFs having the nucleotide sequence represented by SEQ ID NO: 77225.

[8626] The probes having the nucleotide sequence represented by SEQ ID NOS: 103822, 103823, 103824, 103825, 103826, 103827, 103828, 103829, 103830, 103831, 103832 were selected from the ORFs having the nucleotide sequence represented by SEQ ID NO: 77226.

[8627] The probes having the nucleotide sequence represented by SEQ ID NOS: 103833, 103834, 103835, 103836, 103837, 103838, 103839, 103840, 103841, 103842, 103843 were selected from the ORFs having the nucleotide sequence represented by SEQ ID NO: 77227.

[8628] The probes having the nucleotide sequence represented by SEQ ID NOS: 103844, 103845, 1.03846, 103847, 103848, 103849, 103850, 103851, 103852, 103853, 103854 were selected from the ORFs having the nucleotide sequence represented by SEQ ID NO: 77228.

[8629] The probes having the nucleotide sequence represented by SEQ ID NOS: 103855, 103856, 103857, 103858, 103859, 103860, 103861, 103862, 103863, 103864, 103865 were selected from the ORFs having the nucleotide sequence represented by SEQ ID NO: 77229.

[8630] The probes having the nucleotide sequence represented by SEQ ID NOS: 103866, 103867, 103868, 103869, 103870, 103871, 103872, 103873, 103874, 103875, 103876 were selected from the ORFs having the nucleotide sequence represented by SEQ ID NO: 77230.

[8631] The probes having the nucleotide sequence represented by SEQ ID NOS: 103877, 103878, 103879, 103880, 103881, 103882, 103883, 103884, 103885, 103886, 103887 were selected from the ORFs having the nucleotide sequence represented by SEQ ID NO: 77231.

[8632] The probes having the nucleotide sequence represented by SEQ ID NOS: 103888, 103889, 103890, 103891, 103892, 103893, 103894, 103895, 103896, 103897, 103898 were selected from the ORFs having the nucleotide sequence represented by SEQ ID NO: 77232.

[8633] The probes having the nucleotide sequence represented by SEQ ID NOS: 103899, 103900, 103901, 103902, 103903, 103904, 103905, 103906, 103907, 103908, 103909 were selected from the ORFs having the nucleotide sequence represented by SEQ ID NO: 77233.

[8634] The probes having the nucleotide sequence represented by SEQ ID NOS: 103910, 103911, 103912, 103913, 103914, 103915, 103916, 103917, 103918, 103919, 103920 were selected from the ORFs having the nucleotide sequence represented by SEQ ID NO: 77234.

[8635] The probes having the nucleotide sequence represented by SEQ ID NOS: 103921, 103922, 103923, 103924, 103925, 103926, 103927, 103928, 103929, 103930, 103931 were selected from the ORFs having the nucleotide sequence represented by SEQ ID NO: 77235.

[8636] The probes having the nucleotide sequence represented by SEQ ID NOS: 103932, 103933, 103934, 103935, 103936, 103937, 103938, 103939, 103940, 103941, 103942 were selected from the ORFs having the nucleotide sequence represented by SEQ ID NO: 77236.

[8637] The probes having the nucleotide sequence represented by SEQ ID NOS: 103943, 103944, 103945, 103946, 103947, 103948, 103949, 103950, 103951, 103952, 103953 were selected from the ORFs having the nucleotide sequence represented by SEQ ID NO: 77237.

[8638] The probes having the nucleotide sequence represented by SEQ ID NOS: 103954, 103955, 103956, 103957, 103958, 103959, 103960, 103961, 103962, 103963, 103964 were selected from the ORFs having the nucleotide sequence represented by SEQ ID NO: 77238.

[8639] The probes having the nucleotide sequence represented by SEQ ID NOS: 103965, 103966, 103967, 103968, 103969, 103970, 103971, 103972, 103973, 103974, 103975 were selected from the ORFs having the nucleotide sequence represented by SEQ ID NO: 77239.

[8640] The probes having the nucleotide sequence represented by SEQ ID NOS: 103976, 103977, 103978, 103979, 103980, 103981, 103982, 103983, 103984, 103985, 103986 were selected from the ORFs having the nucleotide sequence represented by SEQ ID NO: 77240.

[8641] The probes having the nucleotide sequence represented by SEQ ID NOS: 103987, 103988, 103989, 103990, 103991, 103992, 103993, 103994, 103995, 103996, 103997 were selected from the ORFs having the nucleotide sequence represented by SEQ ID NO: 77241.

[8642] The probes having the nucleotide sequence represented by SEQ ID NOS: 103998, 103999, 104000, 104001, 104002, 104003, 104004, 104005, 104006, 104007, 104008 were selected from the ORFs having the nucleotide sequence represented by SEQ ID NO: 77242.

[8643] The probes having the nucleotide sequence represented by SEQ ID NOS: 104009, 104010, 104011, 104012, 104013, 104014, 104015, 104016, 104017, 104018, 104019 were selected from the ORFs having the nucleotide sequence represented by SEQ ID NO: 77243.

[8644] The probes having the nucleotide sequence represented by SEQ ID NOS: 104020, 104021, 104022, 104023, 104024, 104025, 104026, 104027, 104028, 104029, 104030 were selected from the ORFs having the nucleotide sequence represented by SEQ ID NO: 77244.

[8645] The probes having the nucleotide sequence represented by SEQ ID NOS: 104031, 104032, 104033, 104034, 104035, 104036, 104037, 104038, 104039, 104040, 104041 were selected from the ORFs having the nucleotide sequence represented by SEQ ID NO: 77245.

[8646] The probes having the nucleotide sequence represented by SEQ ID NOS: 104042, 104043, 104044, 104045, 104046, 104047, 104048, 104049, 104050, 104051, 104052 were selected from the ORFs having the nucleotide sequence represented by SEQ ID NO: 77246.

[8647] The probes having the nucleotide sequence represented by SEQ ID NOS: 104053, 104054, 104055, 104056, 104057, 104058, 104059, 104060, 104061, 104062, 104063 were selected from the ORFs having the nucleotide sequence represented by SEQ ID NO: 77247.

[8648] The probes having the nucleotide sequence represented by SEQ ID NOS: 104064, 104065, 104066, 104067, 104068, 104069, 104070, 104071, 104072, 104073, 104074 were selected from the ORFs having the nucleotide sequence represented by SEQ ID NO: 77248.

[8649] The probes having the nucleotide sequence represented by SEQ ID NOS: 104075, 104076, 104077, 104078, 104079, 104080, 104081, 104082, 104083, 104084, 104085 were selected from the ORFs having the nucleotide sequence represented by SEQ ID NO: 77249.

[8650] The probes having the nucleotide sequence represented by SEQ ID NOS: 104086, 104087, 104088, 104089, 104090, 104091, 104092, 104093, 104094, 104095, 104096 were selected from the ORFs having the nucleotide sequence represented by SEQ ID NO: 77250.

[8651] The probes having the nucleotide sequence represented by SEQ ID NOS: 104097, 104098, 104099, 104100, 104101, 104102, 104103, 104104, 104105, 104106, 104107 were selected from the ORFs having the nucleotide sequence represented by SEQ ID NO: 77251.

[8652] The probes having the nucleotide sequence represented by SEQ ID NOS: 104108, 104109, 104110, 104111, 104112, 104113, 104114, 104115, 104116, 104117, 104118 were selected from the ORFs having the nucleotide sequence represented by SEQ ID NO: 77252.

[8653] The probes having the nucleotide sequence represented by SEQ ID NOS: 104119, 104120, 104121, 104122, 104123, 104124, 104125, 104126, 104127, 104128, 104129 were selected from the ORFs having the nucleotide sequence represented by SEQ ID NO: 77253.

[8654] The probes having the nucleotide sequence represented by SEQ ID NOS: 104130, 104131, 104132, 104133, 104134, 104135, 104136, 104137, 104138, 104139, 104140 were selected from the ORFs having the nucleotide sequence represented by SEQ ID NO: 77254.

[8655] The probes having the nucleotide sequence represented by SEQ ID NOS: 104141, 104142, 104143, 104144, 104145, 104146, 104147, 104148, 104149, 104150, 104151 were selected from the ORFs having the nucleotide sequence represented by SEQ ID NO: 77255.

[8656] The probes having the nucleotide sequence represented by SEQ ID NOS: 104152, 104153, 104154, 104155, 104156, 104157, 104158, 104159, 104160, 104161, 104162 were selected from the ORFs having the nucleotide sequence represented by SEQ ID NO: 77256.

[8657] The probes having the nucleotide sequence represented by SEQ ID NOS: 104163, 104164, 104165, 104166, 104167, 104168, 104169, 104170, 104171, 104172, 104173 were selected from the ORFs having the nucleotide sequence represented by SEQ ID NO: 77257.

[8658] The probes having the nucleotide sequence represented by SEQ ID NOS: 104174, 104175, 104176, 104177, 104178, 104179, 104180, 104181, 104182, 104183, 104184 were selected from the ORFs having the nucleotide sequence represented by SEQ ID NO: 77258.

[8659] The probes having the nucleotide sequence represented by SEQ ID NOS: 104185, 104186, 104187, 104188, 104189, 104190, 104191, 104192, 104193, 104194, 104195 were selected from the ORFs having the nucleotide sequence represented by SEQ ID NO: 77259.

[8660] The probes having the nucleotide sequence represented by SEQ ID NOS: 104196, 104197, 104198, 104199, 104200, 104201, 104202, 104203, 104204, 104205, 104206 were selected from the ORFs having the nucleotide sequence represented by SEQ ID NO: 77260.

[8661] The probes having the nucleotide sequence represented by SEQ ID NOS: 104207, 104208, 104209, 104210, 104211, 104212, 104213, 104214, 104215, 104216, 104217 were selected from the ORFs having the nucleotide sequence represented by SEQ ID NO: 77261.

[8662] The probes having the nucleotide sequence represented by SEQ ID NOS: 104218, 104219, 104220, 104221, 104222, 104223, 104224, 104225, 104226, 104227, 104228 were selected from the ORFs having the nucleotide sequence represented by SEQ ID NO: 77262.

[8663] The probes having the nucleotide sequence represented by SEQ ID NOS: 104229, 104230, 104231, 104232, 104233, 104234, 104235, 104236, 104237, 104238, 104239 were selected from the ORFs having the nucleotide sequence represented by SEQ ID NO: 77263.

[8664] The probes having the nucleotide sequence represented by SEQ ID NOS: 104240, 104241, 104242, 104243, 104244, 104245, 104246, 104247, 104248, 104249, 104250 were selected from the ORFs having the nucleotide sequence represented by SEQ ID NO: 77264.

[8665] The probes having the nucleotide sequence represented by SEQ ID NOS: 104251, 104252, 104253, 104254, 104255, 104256, 104257, 104258, 104259, 104260, 104261 were selected from the ORFs having the nucleotide sequence represented by SEQ ID NO: 77265.

[8666] The probes having the nucleotide sequence represented by SEQ ID NOS: 104262, 104263, 104264, 104265, 104266, 104267, 104268, 104269, 104270, 104271, 104272 were selected from the ORFs having the nucleotide sequence represented by SEQ ID NO: 77266.

[8667] The probes having the nucleotide sequence represented by SEQ ID NOS: 104273, 104274, 104275, 104276, 104277, 104278, 104279, 104280, 104281, 104282, 104283 were selected from the ORFs having the nucleotide sequence represented by SEQ ID NO: 77267.

[8668] The probes having the nucleotide sequence represented by SEQ ID NOS: 104284, 104285, 104286, 104287, 104288, 104289, 104290, 104291, 104292, 104293, 104294 were selected from the ORFs having the nucleotide sequence represented by SEQ ID NO: 77268.

[8669] The probes having the nucleotide sequence represented by SEQ ID NOS: 104295, 104296, 104297, 104298, 104299, 104300, 104301, 104302, 104303, 104304, 104305 were selected from the ORFs having the nucleotide sequence represented by SEQ ID NO: 77269.

[8670] The probes having the nucleotide sequence represented by SEQ ID NOS: 104306, 104307, 104308, 104309, 104310, 104311, 104312, 104313, 104314, 104315, 104316 were selected from the ORFs having the nucleotide sequence represented by SEQ ID NO: 77270.

[8671] The probes having the nucleotide sequence represented by SEQ ID NOS: 104317, 104318, 104319, 104320, 104321, 104322, 104323, 104324, 104325, 104326, 104327 were selected from the ORFs having the nucleotide sequence represented by SEQ ID NO: 77271.

[8672] The probes having the nucleotide sequence represented by SEQ ID NOS: 104328, 104329, 104330, 104331, 104332, 104333, 104334, 104335, 104336, 104337, 104338 were selected from the ORFs having the nucleotide sequence represented by SEQ ID NO: 77272.

[8673] The probes having the nucleotide sequence represented by SEQ ID NOS: 104339, 104340, 104341, 104342, 104343, 104344, 104345, 104346, 104347, 104348, 104349 were selected from the ORFs having the nucleotide sequence represented by SEQ ID NO: 77273.

[8674] The probes having the nucleotide sequence represented by SEQ ID NOS: 104350, 104351, 104352, 104353, 104354, 104355, 104356, 104357, 104358, 104359, 104360 were selected from the ORFs having the nucleotide sequence represented by SEQ ID NO: 77274.

[8675] The probes having the nucleotide sequence represented by SEQ ID NOS: 104361, 104362, 104363, 104364, 104365, 104366, 104367, 104368, 104369, 104370, 104371 were selected from the ORFs having the nucleotide sequence represented by SEQ ID NO: 77275.

[8676] The probes having the nucleotide sequence represented by SEQ ID NOS: 104372, 104373, 104374, 104375, 104376, 104377, 104378, 104379, 104380, 104381, 104382 were selected from the ORFs having the nucleotide sequence represented by SEQ ID NO: 77276.

[8677] The probes having the nucleotide sequence represented by SEQ ID NOS: 104383, 104384, 104385, 104386, 104387, 104388, 104389, 104390, 104391, 104392, 104393 were selected from the ORFs having the nucleotide sequence represented by SEQ ID NO: 77277.

[8678] The probes having the nucleotide sequence represented by SEQ ID NOS: 104394, 104395, 104396, 104397, 104398, 104399, 104400, 104401, 104402, 104403, 104404 were selected from the ORFs having the nucleotide sequence represented by SEQ ID NO: 77278.

[8679] The probes having the nucleotide sequence represented by SEQ ID NOS: 104405, 104406, 104407, 104408, 104409, 104410, 104411, 104412, 104413, 104414, 104415 were selected from the ORFs having the nucleotide sequence represented by SEQ ID NO: 77279.

[8680] The probes having the nucleotide sequence represented by SEQ ID NOS: 104416, 104417, 104418, 104419, 104420, 104421, 104422, 104423, 104424, 104425, 104426 were selected from the ORFs having the nucleotide sequence represented by SEQ ID NO: 77280.

[8681] The probes having the nucleotide sequence represented by SEQ ID NOS: 104427, 104428, 104429, 104430, 104431, 104432, 104433, 104434, 104435, 104436, 104437 were selected from the ORFs having the nucleotide sequence represented by SEQ ID NO: 77281.

[8682] The probes having the nucleotide sequence represented by SEQ ID NOS: 104438, 104439, 104440, 104441, 104442, 104443, 104444, 104445, 104446, 104447, 104448 were selected from the ORFs having the nucleotide sequence represented by SEQ ID NO: 77282.

[8683] The probes having the nucleotide sequence represented by SEQ ID NOS: 104449, 104450, 104451, 104452, 104453, 104454, 104455, 104456, 104457, 104458, 104459 were selected from the ORFs having the nucleotide sequence represented by SEQ ID NO: 77283.

[8684] The probes having the nucleotide sequence represented by SEQ ID NOS: 104460, 104461, 104462, 104463, 104464, 104465, 104466, 104467, 104468, 104469, 104470 were selected from the ORFs having the nucleotide sequence represented by SEQ ID NO: 77284.

[8685] The probes having the nucleotide sequence represented by SEQ ID NOS: 104471, 104472, 104473, 104474, 104475, 104476, 104477, 104478, 104479, 104480, 104481 were selected from the ORFs having the nucleotide sequence represented by SEQ ID NO: 77285.

[8686] The probes having the nucleotide sequence represented by SEQ ID NOS: 104482, 104483, 104484, 104485, 104486, 104487, 104488, 104489, 104490, 104491, 104492 were selected from the ORFs having the nucleotide sequence represented by SEQ ID NO: 77286.

[8687] The probes having the nucleotide sequence represented by SEQ ID NOS: 104493, 104494, 104495, 104496, 104497, 104498, 104499, 104500, 104501, 104502, 104503 were selected from the ORFs having the nucleotide sequence represented by SEQ ID NO: 77287.

[8688] The probes having the nucleotide sequence represented by SEQ ID NOS: 104504, 104505, 104506, 104507, 104508, 104509, 104510, 104511, 104512, 104513, 104514 were selected from the ORFs having the nucleotide sequence represented by SEQ ID NO: 77288.

[8689] The probes having the nucleotide sequence represented by SEQ ID NOS: 104515, 104516, 104517, 104518, 104519, 104520, 104521, 104522, 104523, 104524, 104525 were selected from the ORFs having the nucleotide sequence represented by SEQ ID NO: 77289.

[8690] The probes having the nucleotide sequence represented by SEQ ID NOS: 104526, 104527, 104528, 104529, 104530, 104531, 104532, 104533, 104534, 104535, 104536 were selected from the ORFs having the nucleotide sequence represented by SEQ ID NO: 77290.

[8691] The probes having the nucleotide sequence represented by SEQ ID NOS: 104537, 104538, 104539, 104540, 104541, 104542, 104543, 104544, 104545, 104546, 104547 were selected from the ORFs having the nucleotide sequence represented by SEQ ID NO: 77291.

[8692] The probes having the nucleotide sequence represented by SEQ ID NOS: 104548, 104549, 104550, 104551, 104552, 104553, 104554, 104555, 104556, 104557, 104558 were selected from the ORFs having the nucleotide sequence represented by SEQ ID NO: 77292.

[8693] The probes having the nucleotide sequence represented by SEQ ID NOS: 104559, 104560, 104561, 104562, 104563, 104564, 104565, 104566, 104567, 104568, 104569 were selected from the ORFs having the nucleotide sequence represented by SEQ ID NO: 77293.

[8694] The probes having the nucleotide sequence represented by SEQ ID NOS: 104570, 104571, 104572, 104573, 104574, 104575, 104576, 104577, 104578, 104579, 104580 were selected from the ORFs having the nucleotide sequence represented by SEQ ID NO: 77294.

[8695] The probes having the nucleotide sequence represented by SEQ ID NOS: 104581, 104582, 104583, 104584, 104585, 104586, 104587, 104588, 104589, 104590, 104591 were selected from the ORFs having the nucleotide sequence represented by SEQ ID NO: 77295.

[8696] The probes having the nucleotide sequence represented by SEQ ID NOS: 104592, 104593, 104594, 104595, 104596, 104597, 104598, 104599, 104600, 104601, 104602 were selected from the ORFs having the nucleotide sequence represented by SEQ ID NO: 77296.

[8697] The probes having the nucleotide sequence represented by SEQ ID NOS: 104603, 104604, 104605, 104606, 104607, 104608, 104609, 104610, 104611, 104612, 104613 were selected from the ORFs having the nucleotide sequence represented by SEQ ID NO: 77297.

[8698] The probes having the nucleotide sequence represented by SEQ ID NOS: 104614, 104615, 104616, 104617, 104618, 104619, 104620, 104621, 104622, 104623, 104624 were selected from the ORFs having the nucleotide sequence represented by SEQ ID NO: 77298.

[8699] The probes having the nucleotide sequence represented by SEQ ID NOS: 104625, 104626, 104627, 104628, 104629, 104630, 104631, 104632, 104633, 104634, 104635 were selected from the ORFs having the nucleotide sequence represented by SEQ ID NO: 77299.

[8700] The probes having the nucleotide sequence represented by SEQ ID NOS: 104636, 104637, 104638, 104639, 104640, 104641, 104642, 104643, 104644, 104645, 104646 were selected from the ORFs having the nucleotide sequence represented by SEQ ID NO: 77300.

[8701] The probes having the nucleotide sequence represented by SEQ ID NOS: 104647, 104648, 104649, 104650, 104651, 104652, 104653, 104654, 104655, 104656, 104657 were selected from the ORFs having the nucleotide sequence represented by SEQ ID NO: 77301.

[8702] The probes having the nucleotide sequence represented by SEQ ID NOS: 104658, 104659, 104660, 104661, 104662, 104663, 104664, 104665, 104666, 104667, 104668 were selected from the ORFs having the nucleotide sequence represented by SEQ ID NO: 77302.

[8703] The probes having the nucleotide sequence represented by SEQ ID NOS: 104669, 104670, 104671, 104672, 104673, 104674, 104675, 104676, 104677, 104678, 104679 were selected from the ORFs having the nucleotide sequence represented by SEQ ID NO: 77303.

[8704] The probes having the nucleotide sequence represented by SEQ ID NOS: 104680, 104681, 104682, 104683, 104684, 104685, 104686, 104687, 104688, 104689, 104690 were selected from the ORFs having the nucleotide sequence represented by SEQ ID NO: 77304.

[8705] The probes having the nucleotide sequence represented by SEQ ID NOS: 104691, 104692, 104693, 104694, 104695, 104696, 104697, 104698, 104699, 104700, 104701 were selected from the ORFs having the nucleotide sequence represented by SEQ ID NO: 77305.

[8706] The probes having the nucleotide sequence represented by SEQ ID NOS: 104702, 104703, 104704, 104705, 104706, 104707, 104708, 104709, 104710, 104711, 104712 were selected from the ORFs having the nucleotide sequence represented by SEQ ID NO: 77306.

[8707] The probes having the nucleotide sequence represented by SEQ ID NOS: 104713, 104714, 104715, 104716, 104717, 104718, 104719, 104720, 104721, 104722, 104723 were selected from the ORFs having the nucleotide sequence represented by SEQ ID NO: 77307.

[8708] The probes having the nucleotide sequence represented by SEQ ID NOS: 104724, 104725, 104726, 104727, 104728, 104729, 104730, 104731, 104732, 104733, 104734 were selected from the ORFs having the nucleotide sequence represented by SEQ ID NO: 77308.

[8709] The probes having the nucleotide sequence represented by SEQ ID NOS: 104735, 104736, 104737, 104738, 104739, 104740, 104741, 104742, 104743, 104744, 104745 were selected from the ORFs having the nucleotide sequence represented by SEQ ID NO: 77309.

[8710] The probes having the nucleotide sequence represented by SEQ ID NOS: 104746, 104747, 104748, 104749, 104750, 104751, 104752, 104753, 104754, 104755, 104756 were selected from the ORFs having the nucleotide sequence represented by SEQ ID NO: 77310.

[8711] The probes having the nucleotide sequence represented by SEQ ID NOS: 104757, 104758, 104759, 104760, 104761, 104762, 104763, 104764, 104765, 104766, 104767 were selected from the ORFs having the nucleotide sequence represented by SEQ ID NO: 77311.

[8712] The probes having the nucleotide sequence represented by SEQ ID NOS: 104768, 104769, 104770, 104771, 104772, 104773, 104774, 104775, 104776, 104777, 104778 were selected from the ORFs having the nucleotide sequence represented by SEQ ID NO: 77312.

[8713] The probes having the nucleotide sequence represented by SEQ ID NOS: 104779, 104780, 104781, 104782, 104783, 104784, 104785, 104786, 104787, 104788, 104789 were selected from the ORFs having the nucleotide sequence represented by SEQ ID NO: 77313.

[8714] The probes having the nucleotide sequence represented by SEQ ID NOS: 104790, 104791, 104792, 104793, 104794, 104795, 104796, 104797, 104798, 104799, 104800 were selected from the ORFs having the nucleotide sequence represented by SEQ ID NO: 77314.

[8715] The probes having the nucleotide sequence represented by SEQ ID NOS: 104801, 104802, 104803, 104804, 104805, 104806, 104807, 104808, 104809, 104810, 104811 were selected from the ORFs having the nucleotide sequence represented by SEQ ID NO: 77315.

[8716] The probes having the nucleotide sequence represented by SEQ ID NOS: 104812, 104813, 104814, 104815, 104816, 104817, 104818, 104819, 104820, 104821, 104822 were selected from the ORFs having the nucleotide sequence represented by SEQ ID NO: 77316.

[8717] The probes having the nucleotide sequence represented by SEQ ID NOS: 104823, 104824, 104825, 104826, 104827, 104828, 104829, 104830, 104831, 104832, 104833 were selected from the ORFs having the nucleotide sequence represented by SEQ ID NO: 77317.

[8718] The probes having the nucleotide sequence represented by SEQ ID NOS: 104834, 104835, 104836, 104837, 104838, 104839, 104840, 104841, 104842, 104843, 104844 were selected from the ORFs having the nucleotide sequence represented by SEQ ID NO: 77318.

[8719] The probes having the nucleotide sequence represented by SEQ ID NOS: 104845, 104846, 104847, 104848, 104849, 104850, 104851, 104852, 104853, 104854, 104855 were selected from the ORFs having the nucleotide sequence represented by SEQ ID NO: 77319.

[8720] The probes having the nucleotide sequence represented by SEQ ID NOS: 104856, 104857, 104858, 104859, 104860, 104861, 104862, 104863, 104864, 104865, 104866 were selected from the ORFs having the nucleotide sequence represented by SEQ ID NO: 77320.

[8721] The probes having the nucleotide sequence represented by SEQ ID NOS: 104867, 104868, 104869, 104870, 104871, 104872, 104873, 104874, 104875, 104876, 104877 were selected from the ORFs having the nucleotide sequence represented by SEQ ID NO: 77321.

[8722] The probes having the nucleotide sequence represented by SEQ ID NOS: 104878, 104879, 104880, 104881, 104882, 104883, 104884, 104885, 104886, 104887, 104888 were selected from the ORFs having the nucleotide sequence represented by SEQ ID NO: 77322.

[8723] The probes having the nucleotide sequence represented by SEQ ID NOS: 104889, 104890, 104891, 104892, 104893, 104894, 104895, 104896, 104897, 104898, 104899 were selected from the ORFs having the nucleotide sequence represented by SEQ ID NO: 77323.

[8724] The probes having the nucleotide sequence represented by SEQ ID NOS: 104900, 104901, 104902, 104903, 104904, 104905, 104906, 104907, 104908, 104909, 104910 were selected from the ORFs having the nucleotide sequence represented by SEQ ID NO: 77324.

[8725] The probes having the nucleotide sequence represented by SEQ ID NOS: 104911, 104912, 104913, 104914, 104915, 104916, 104917, 104918, 104919, 104920, 104921 were selected from the ORFs having the nucleotide sequence represented by SEQ ID NO: 77325.

[8726] The probes having the nucleotide sequence represented by SEQ ID NOS: 104922, 104923, 104924, 104925, 104926, 104927, 104928, 104929, 104930, 104931, 104932 were selected from the ORFs having the nucleotide sequence represented by SEQ ID NO: 77326.

[8727] The probes having the nucleotide sequence represented by SEQ ID NOS: 104933, 104934, 104935, 104936, 104937, 104938, 104939, 104940, 104941, 104942, 104943 were selected from the ORFs having the nucleotide sequence represented by SEQ ID NO: 77327.

[8728] The probes having the nucleotide sequence represented by SEQ ID NOS: 104944, 104945, 104946, 104947, 104948, 104949, 104950, 104951, 104952, 104953, 104954 were selected from the ORFs having the nucleotide sequence represented by SEQ ID NO: 77328.

[8729] The probes having the nucleotide sequence represented by SEQ ID NOS: 104955, 104956, 104957, 104958, 104959, 104960, 104961, 104962, 104963, 104964, 104965 were selected from the ORFs having the nucleotide sequence represented by SEQ ID NO: 77329.

[8730] The probes having the nucleotide sequence represented by SEQ ID NOS: 104966, 104967, 104968, 104969, 104970, 104971, 104972, 104973, 104974, 104975, 104976 were selected from the ORFs having the nucleotide sequence represented by SEQ ID NO: 77330.

[8731] The probes having the nucleotide sequence represented by SEQ ID NOS: 104977, 104978, 104979, 104980, 104981, 104982, 104983, 104984, 104985, 104986, 104987 were selected from the ORFs having the nucleotide sequence represented by SEQ ID NO: 77331.

[8732] The probes having the nucleotide sequence represented by SEQ ID NOS: 104988, 104989, 104990, 104991, 104992, 104993, 104994, 104995, 104996, 104997, 104998 were selected from the ORFs having the nucleotide sequence represented by SEQ ID NO: 77332.

[8733] The probes having the nucleotide sequence represented by SEQ ID NOS: 104999, 105000, 105001, 105002, 105003, 105004, 105005, 105006, 105007, 105008, 105009 were selected from the ORFs having the nucleotide sequence represented by SEQ ID NO: 77333.

[8734] The probes having the nucleotide sequence represented by SEQ ID NOS: 105010, 105011, 105012, 105013, 105014, 105015, 105016, 105017, 105018, 105019, 105020 were selected from the ORFs having the nucleotide sequence represented by SEQ ID NO: 77334.

[8735] The probes having the nucleotide sequence represented by SEQ ID NOS: 105021, 105022, 105023, 105024, 105025, 105026, 105027, 105028, 105029, 105030, 105031 were selected from the ORFs having the nucleotide sequence represented by SEQ ID NO: 77335.

[8736] The probes having the nucleotide sequence represented by SEQ ID NOS: 105032, 105033, 105034, 105035, 105036, 105037, 105038, 105039, 105040, 105041, 105042 were selected from the ORFs having the nucleotide sequence represented by SEQ ID NO: 77336.

[8737] The probes having the nucleotide sequence represented by SEQ ID NOS: 105043, 105044, 105045, 105046, 105047, 105048, 105049, 105050, 105051, 105052, 105053 were selected from the ORFs having the nucleotide sequence represented by SEQ ID NO: 77337.

[8738] The probes having the nucleotide sequence represented by SEQ ID NOS: 105054, 105055, 105056, 105057, 105058, 105059, 105060, 105061, 105062, 105063, 105064 were selected from the ORFs having the nucleotide sequence represented by SEQ ID NO: 77338.

[8739] The probes having the nucleotide sequence represented by SEQ ID NOS: 105065, 105066, 105067, 105068, 105069, 105070, 105071, 105072, 105073, 105074, 105075 were selected from the ORFs having the nucleotide sequence represented by SEQ ID NO: 77339.

[8740] The probes having the nucleotide sequence represented by SEQ ID NOS: 105076, 105077, 105078, 105079, 105080, 105081, 105082, 105083, 105084, 105085, 105086 were selected from the ORFs having the nucleotide sequence represented by SEQ ID NO: 77340.

[8741] The probes having the nucleotide sequence represented by SEQ ID NOS: 105087, 105088, 105089, 105090, 105091, 105092, 105093, 105094, 105095, 105096, 105097 were selected from the ORFs having the nucleotide sequence represented by SEQ ID NO: 77341.

[8742] The probes having the nucleotide sequence represented by SEQ ID NOS: 105098, 105099, 105100, 105101, 105102, 105103, 105104, 105105, 105106, 105107, 105108 were selected from the ORFs having the nucleotide sequence represented by SEQ ID NO: 77342.

[8743] The probes having the nucleotide sequence represented by SEQ ID NOS: 105109, 105110, 105111, 105112, 105113, 105114, 105115, 105116, 105117, 105118, 105119 were selected from the ORFs having the nucleotide sequence represented by SEQ ID NO: 77343.

[8744] The probes having the nucleotide sequence represented by SEQ ID NOS: 105120, 105121, 105122, 105123, 105124, 105125, 105126, 105127, 105128, 105129, 105130 were selected from the ORFs having the nucleotide sequence represented by SEQ ID NO: 77344.

[8745] The probes having the nucleotide sequence represented by SEQ ID NOS: 105131, 105132, 105133, 105134, 105135, 105136, 105137, 105138, 105139, 105140, 105141 were selected from the ORFs having the nucleotide sequence represented by SEQ ID NO: 77345.

[8746] The probes having the nucleotide sequence represented by SEQ ID NOS: 105142, 105143, 105144, 105145, 105146, 105147, 105148, 105149, 105150, 105151, 105152 were selected from the ORFs having the nucleotide sequence represented by SEQ ID NO: 77346.

[8747] The probes having the nucleotide sequence represented by SEQ ID NOS: 105153, 105154, 105155, 105156, 105157, 105158, 105159, 105160, 105161, 105162, 105163 were selected from the ORFs having the nucleotide sequence represented by SEQ ID NO: 77347.

[8748] The probes having the nucleotide sequence represented by SEQ ID NOS: 105164, 105165, 105166, 105167, 105168, 105169, 105170, 105171, 105172, 105173, 105174 were selected from the ORFs having the nucleotide sequence represented by SEQ ID NO: 77348.

[8749] The probes having the nucleotide sequence represented by SEQ ID NOS: 105175, 105176, 105177, 105178, 105179, 105180, 105181, 105182, 105183, 105184, 105185, 105186, 105187, 105188, 105189, 105190, 105191, 105192, 105193, 105194, 105195, 105196 were selected from the ORFs having the nucleotide sequence represented by SEQ ID NO: 77349.

[8750] The probes having the nucleotide sequence represented by SEQ ID NOS: 105197, 105198, 105199, 105200, 105201, 105202, 105203, 105204, 105205, 105206, 105207 were selected from the ORFs having the nucleotide sequence represented by SEQ ID NO: 77350.

[8751] The probes having the nucleotide sequence represented by SEQ ID NOS: 105208, 105209, 105210, 105211, 105212, 105213, 105214, 105215, 105216, 105217, 105218 were selected from the ORFs having the nucleotide sequence represented by SEQ ID NO: 77351.

[8752] The probes having the nucleotide sequence represented by SEQ ID NOS: 105219, 105220, 105221, 105222, 105223, 105224, 105225, 105226, 105227, 105228, 105229 were selected from the ORFs having the nucleotide sequence represented by SEQ ID NO: 77352.

[8753] The probes having the nucleotide sequence represented by SEQ ID NOS: 105230, 105231, 105232, 105233, 105234, 105235, 105236, 105237, 105238, 105239, 105240 were selected from the ORFs having the nucleotide sequence represented by SEQ ID NO: 77353.

[8754] The probes having the nucleotide sequence represented by SEQ ID NOS: 105241, 105242, 105243, 105244, 105245, 105246, 105247, 105248, 105249, 105250, 105251 were selected from the ORFs having the nucleotide sequence represented by SEQ ID NO: 77354.

[8755] The probes having the nucleotide sequence represented by SEQ ID NOS: 105252, 105253, 105254, 105255, 105256, 105257, 105258, 105259, 105260, 105261, 105262 were selected from the ORFs having the nucleotide sequence represented by SEQ ID NO: 77355.

[8756] The probes having the nucleotide sequence represented by SEQ ID NOS: 105263, 105264, 105265, 105266, 105267, 105268, 105269, 105270, 105271, 105272, 105273 were selected from the ORFs having the nucleotide sequence represented by SEQ ID NO: 77356.

[8757] The probes having the nucleotide sequence represented by SEQ ID NOS: 105274, 105275, 105276, 105277, 105278, 105279, 105280, 105281, 105282, 105283, 105284 were selected from the ORFs having the nucleotide sequence represented by SEQ ID NO: 77357.

[8758] The probes having the nucleotide sequence represented by SEQ ID NOS: 105285, 105286, 105287, 105288, 105289, 105290, 105291, 105292, 105293, 105294, 105295 were selected from the ORFs having the nucleotide sequence represented by SEQ ID NO: 77358.

[8759] The probes having the nucleotide sequence represented by SEQ ID NOS: 105296, 105297, 105298, 105299, 105300, 105301, 105302, 105303, 105304, 105305, 105306 were selected from the ORFs having the nucleotide sequence represented by SEQ ID NO: 77359.

[8760] The probes having the nucleotide sequence represented by SEQ ID NOS: 105307, 105308, 105309, 105310, 105311, 105312, 105313, 105314, 105315, 105316, 105317 were selected from the ORFs having the nucleotide sequence represented by SEQ ID NO: 77360.

[8761] The probes having the nucleotide sequence represented by SEQ ID NOS: 105318, 105319, 105320, 105321, 105322, 105323, 105324, 105325, 105326, 105327, 105328 were selected from the ORFs having the nucleotide sequence represented by SEQ ID NO: 77361.

[8762] The probes having the nucleotide sequence represented by SEQ ID NOS: 105329, 105330, 105331, 105332, 105333, 105334, 105335, 105336, 105337, 105338, 105339 were selected from the ORFs having the nucleotide sequence represented by SEQ ID NO: 77362.

[8763] The probes having the nucleotide sequence represented by SEQ ID NOS: 105340, 105341, 105342, 105343, 105344, 105345, 105346, 105347, 105348, 105349, 105350 were selected from the ORFs having the nucleotide sequence represented by SEQ ID NO: 77363.

[8764] The probes having the nucleotide sequence represented by SEQ ID NOS: 105351, 105352, 105353, 105354, 105355, 105356, 105357, 105358, 105359, 105360, 105361 were selected from the ORFs having the nucleotide sequence represented by SEQ ID NO: 77364.

[8765] The probes having the nucleotide sequence represented by SEQ ID NOS: 105362, 105363, 105364, 105365, 105366, 105367, 105368, 105369, 105370, 105371, 105372 were selected from the ORFs having the nucleotide sequence represented by SEQ ID NO: 77365.

[8766] The probes having the nucleotide sequence represented by SEQ ID NOS: 105373, 105374, 105375, 105376, 105377, 105378, 105379, 105380, 105381, 105382, 105383 were selected from the ORFs having the nucleotide sequence represented by SEQ ID NO: 77366.

[8767] The probes having the nucleotide sequence represented by SEQ ID NOS: 105384, 105385, 105386, 105387, 105388, 105389, 105390, 105391, 105392, 105393, 105394 were selected from the ORFs having the nucleotide sequence represented by SEQ ID NO: 77367.

[8768] The probes having the nucleotide sequence represented by SEQ ID NOS: 105395, 105396, 105397, 105398, 105399, 105400, 105401, 105402, 105403, 105404, 105405 were selected from the ORFs having the nucleotide sequence represented by SEQ ID NO: 77368.

[8769] The probes having the nucleotide sequence represented by SEQ ID NOS: 105406, 105407, 105408, 105409, 105410, 105411, 105412, 105413, 105414, 105415, 105416 were selected from the ORFs having the nucleotide sequence represented by SEQ ID NO: 77369.

[8770] The probes having the nucleotide sequence represented by SEQ ID NOS: 105417, 105418, 105419, 105420, 105421, 105422, 105423, 105424, 105425, 105426, 105427 were selected from the ORFs having the nucleotide sequence represented by SEQ ID NO: 77370.

[8771] The probes having the nucleotide sequence represented by SEQ ID NOS: 105428, 105429, 105430, 105431, 105432, 105433, 105434, 105435, 105436, 105437, 105438 were selected from the ORFs having the nucleotide sequence represented by SEQ ID NO: 77371.

[8772] The probes having the nucleotide sequence represented by SEQ ID NOS: 105439, 105440, 105441, 105442, 105443, 105444, 105445, 105446, 105447, 105448, 105449 were selected from the ORFs having the nucleotide sequence represented by SEQ ID NO: 77372.

[8773] The probes having the nucleotide sequence represented by SEQ ID NOS: 105450, 105451, 105452, 105453, 105454, 105455, 105456, 105457, 105458, 105459, 105460 were selected from the ORFs having the nucleotide sequence represented by SEQ ID NO: 77373.

[8774] The probes having the nucleotide sequence represented by SEQ ID NOS: 105461, 105462, 105463, 105464, 105465, 105466, 105467, 105468, 105469, 105470, 105471 were selected from the ORFs having the nucleotide sequence represented by SEQ ID NO: 77374.

[8775] The probes having the nucleotide sequence represented by SEQ ID NOS: 105472, 105473, 105474, 105475, 105476, 105477, 105478, 105479, 105480, 105481, 105482 were selected from the ORFs having the nucleotide sequence represented by SEQ ID NO: 77375.

[8776] The probes having the nucleotide sequence represented by SEQ ID NOS: 105483, 105484, 105485, 105486, 105487, 105488, 105489, 105490, 105491, 105492, 105493 were selected from the ORFs having the nucleotide sequence represented by SEQ ID NO: 77376.

[8777] The probes having the nucleotide sequence represented by SEQ ID NOS: 105494, 105495, 105496, 105497, 105498, 105499, 105500, 105501, 105502, 105503, 105504 were selected from the ORFs having the nucleotide sequence represented by SEQ ID NO: 77377.

[8778] The probes having the nucleotide sequence represented by SEQ ID NOS: 105505, 105506, 105507, 105508, 105509, 105510, 105511, 105512, 105513, 105514, 105515 were selected from the ORFs having the nucleotide sequence represented by SEQ ID NO: 77378.

[8779] The probes having the nucleotide sequence represented by SEQ ID NOS: 105516, 105517, 105518, 105519, 105520, 105521, 105522, 105523, 105524, 105525, 105526 were selected from the ORFs having the nucleotide sequence represented by SEQ ID NO: 77379.

[8780] The probes having the nucleotide sequence represented by SEQ ID NOS: 105527, 105528, 105529, 105530, 105531, 105532, 105533, 105534, 105535, 105536, 105537 were selected from the ORFs having the nucleotide sequence represented by SEQ ID NO: 77380.

[8781] The probes having the nucleotide sequence represented by SEQ ID NOS: 105538, 105539, 105540, 105541, 105542, 105543, 105544, 105545, 105546, 105547, 105548 were selected from the ORFs having the nucleotide sequence represented by SEQ ID NO: 77381.

[8782] The probes having the nucleotide sequence represented by SEQ ID NOS: 105549, 105550, 105551, 105552, 105553, 105554, 105555, 105556, 105557, 105558, 105559 were selected from the ORFs having the nucleotide sequence represented by SEQ ID NO: 77382.

[8783] The probes having the nucleotide sequence represented by SEQ ID NOS: 105560, 105561, 105562, 105563, 105564, 105565, 105566, 105567, 105568, 105569, 105570 were selected from the ORFs having the nucleotide sequence represented by SEQ ID NO: 77383.

[8784] The probes having the nucleotide sequence represented by SEQ ID NOS: 105571, 105572, 105573, 105574, 105575, 105576, 105577, 105578, 105579, 105580, 105581 were selected from the ORFs having the nucleotide sequence represented by SEQ ID NO: 77384.

[8785] The probes having the nucleotide sequence represented by SEQ ID NOS: 105582, 105583, 105584, 105585, 105586, 105587, 105588, 105589, 105590, 105591, 105592 were selected from the ORFs having the nucleotide sequence represented by SEQ ID NO: 77385.

[8786] The probes having the nucleotide sequence represented by SEQ ID NOS: 105593, 105594, 105595, 105596, 105597, 105598, 105599, 105600, 105601, 105602, 105603 were selected from the ORFs having the nucleotide sequence represented by SEQ ID NO: 77386.

[8787] The probes having the nucleotide sequence represented by SEQ ID NOS: 105604, 105605, 105606, 105607, 105608, 105609, 105610, 105611, 105612, 105613, 105614 were selected from the ORFs having the nucleotide sequence represented by SEQ ID NO: 77387.

[8788] The probes having the nucleotide sequence represented by SEQ ID NOS: 105615, 105616, 105617, 105618, 105619, 105620, 105621, 105622, 105623, 105624, 105625 were selected from the ORFs having the nucleotide sequence represented by SEQ ID NO: 77388.

[8789] The probes having the nucleotide sequence represented by SEQ ID NOS: 105626, 105627, 105628, 105629, 105630, 105631, 105632, 105633, 105634, 105635, 105636 were selected from the ORFs having the nucleotide sequence represented by SEQ ID NO: 77389.

[8790] The probes having the nucleotide sequence represented by SEQ ID NOS: 105637, 105638, 105639, 105640, 105641, 105642, 105643, 105644, 105645, 105646, 105647 were selected from the ORFs having the nucleotide sequence represented by SEQ ID NO: 77390.

[8791] The probes having the nucleotide sequence represented by SEQ ID NOS: 105648, 105649, 105650, 105651, 105652, 105653, 105654, 105655, 105656, 105657, 105658 were selected from the ORFs having the nucleotide sequence represented by SEQ ID NO: 77391.

[8792] The probes having the nucleotide sequence represented by SEQ ID NOS: 105659, 105660, 105661, 105662, 105663, 105664, 105665, 105666, 105667, 105668, 105669 were selected from the ORFs having the nucleotide sequence represented by SEQ ID NO: 77392.

[8793] The probes having the nucleotide sequence represented by SEQ ID NOS: 105670, 105671, 105672, 105673, 105674, 105675, 105676, 105677, 105678, 105679, 105680 were selected from the ORFs having the nucleotide sequence represented by SEQ ID NO: 77393.

[8794] The probes having the nucleotide sequence represented by SEQ ID NOS: 105681, 105682, 105683, 105684, 105685, 105686, 105687, 105688, 105689, 105690, 105691 were selected from the ORFs having the nucleotide sequence represented by SEQ ID NO: 77394.

[8795] The probes having the nucleotide sequence represented by SEQ ID NOS: 105692, 105693, 105694, 105695, 105696, 105697, 105698, 105699, 105700, 105701, 105702 were selected from the ORFs having the nucleotide sequence represented by SEQ ID NO: 77395.

[8796] The probes having the nucleotide sequence represented by SEQ ID NOS: 105703, 105704, 105705, 105706, 105707, 105708, 105709, 105710, 105711, 105712, 105713 were selected from the ORFs having the nucleotide sequence represented by SEQ ID NO: 77396.

[8797] The probes having the nucleotide sequence represented by SEQ ID NOS: 105714, 105715, 105716, 105717, 105718, 105719, 105720, 105721, 105722, 105723, 105724 were selected from the ORFs having the nucleotide sequence represented by SEQ ID NO: 77397.

[8798] The probes having the nucleotide sequence represented by SEQ ID NOS: 105725, 105726, 105727, 105728, 105729, 105730, 105731, 105732, 105733, 105734, 105735 were selected from the ORFs having the nucleotide sequence represented by SEQ ID NO: 77398.

[8799] The probes having the nucleotide sequence represented by SEQ ID NOS: 105736, 105737, 105738, 105739, 105740, 105741, 105742, 105743, 105744, 105745, 105746 were selected from the ORFs having the nucleotide sequence represented by SEQ ID NO: 77399.

[8800] The probes having the nucleotide sequence represented by SEQ ID NOS: 105747, 105748, 105749, 105750, 105751, 105752, 105753, 105754, 105755, 105756, 105757 were selected from the ORFs having the nucleotide sequence represented by SEQ ID NO: 77400.

[8801] The probes having the nucleotide sequence represented by SEQ ID NOS: 105758, 105759, 105760, 105761, 105762, 105763, 105764, 105765, 105766, 105767, 105768 were selected from the ORFs having the nucleotide sequence represented by SEQ ID NO: 77401.

[8802] The probes having the nucleotide sequence represented by SEQ ID NOS: 105769, 105770, 105771, 105772, 105773, 105774, 105775, 105776, 105777, 105778, 105779 were selected from the ORFs having the nucleotide sequence represented by SEQ ID NO: 77402.

[8803] The probes having the nucleotide sequence represented by SEQ ID NOS: 105780, 105781, 105782, 105783, 105784, 105785, 105786, 105787, 105788, 105789, 105790 were selected from the ORFs having the nucleotide sequence represented by SEQ ID NO: 77403.

[8804] The probes having the nucleotide sequence represented by SEQ ID NOS: 105791, 105792, 105793, 105794, 105795, 105796, 105797, 105798, 105799, 105800, 105801 were selected from the ORFs having the nucleotide sequence represented by SEQ ID NO: 77404.

[8805] The probes having the nucleotide sequence represented by SEQ ID NOS: 105802, 105803, 105804, 105805, 105806, 105807, 105808, 105809, 105810, 105811, 105812 were selected from the ORFs having the nucleotide sequence represented by SEQ ID NO: 77405.

[8806] The probes having the nucleotide sequence represented by SEQ ID NOS: 105813, 105814, 105815, 105816, 105817, 105818, 105819, 105820, 105821, 105822, 105823 were selected from the ORFs having the nucleotide sequence represented by SEQ ID NO: 77406.

[8807] The probes having the nucleotide sequence represented by SEQ ID NOS: 105824, 105825, 105826, 105827, 105828, 105829, 105830, 105831, 105832, 105833, 105834 were selected from the ORFs having the nucleotide sequence represented by SEQ ID NO: 77407.

[8808] The probes having the nucleotide sequence represented by SEQ ID NOS: 105835, 105836, 105837, 105838, 105839, 105840, 105841, 105842, 105843, 105844, 105845 were selected from the ORFs having the nucleotide sequence represented by SEQ ID NO: 77408.

[8809] The probes having the nucleotide sequence represented by SEQ ID NOS: 105846, 105847, 105848, 105849, 105850, 105851, 105852, 105853, 105854, 105855, 105856 were selected from the ORFs having the nucleotide sequence represented by SEQ ID NO: 77409.

[8810] The probes having the nucleotide sequence represented by SEQ ID NOS: 105857, 105858, 105859, 105860, 105861, 105862, 105863, 105864, 105865, 105866, 105867 were selected from the ORFs having the nucleotide sequence represented by SEQ ID NO: 77410.

[8811] The probes having the nucleotide sequence represented by SEQ ID NOS: 105868, 105869, 105870, 105871, 105872, 105873, 105874, 105875, 105876, 105877, 105878 were selected from the ORFs having the nucleotide sequence represented by SEQ ID NO: 77411.

[8812] The probes having the nucleotide sequence represented by SEQ ID NOS: 105879, 105880, 105881, 105882, 105883, 105884, 105885, 105886, 105887, 105888, 105889 were selected from the ORFs having the nucleotide sequence represented by SEQ ID NO: 77412.

[8813] The probes having the nucleotide sequence represented by SEQ ID NOS: 105890, 105891, 105892, 105893, 105894, 105895, 105896, 105897, 105898, 105899, 105900 were selected from the ORFs having the nucleotide sequence represented by SEQ ID NO: 77413.

[8814] The probes having the nucleotide sequence represented by SEQ ID NOS: 105901, 105902, 105903, 105904, 105905, 105906, 105907, 105908, 105909, 105910, 105911 were selected from the ORFs having the nucleotide sequence represented by SEQ ID NO: 77414.

[8815] The probes having the nucleotide sequence represented by SEQ ID NOS: 105912, 105913, 105914, 105915, 105916, 105917, 105918, 105919, 105920, 105921, 105922 were selected from the ORFs having the nucleotide sequence represented by SEQ ID NO: 77415.

[8816] The probes having the nucleotide sequence represented by SEQ ID NOS: 105923, 105924, 105925, 105926, 105927, 105928, 105929, 105930, 105931, 105932, 105933 were selected from the ORFs having the nucleotide sequence represented by SEQ ID NO: 77416.

[8817] The probes having the nucleotide sequence represented by SEQ ID NOS: 105934, 105935, 105936, 105937, 105938, 105939, 105940, 105941, 105942, 105943, 105944 were selected from the ORFs having the nucleotide sequence represented by SEQ ID NO: 77417.

[8818] The probes having the nucleotide sequence represented by SEQ ID NOS: 105945, 105946, 105947, 105948, 105949, 105950, 105951, 105952, 105953, 105954, 105955 were selected from the ORFs having the nucleotide sequence represented by SEQ ID NO: 77418.

[8819] The probes having the nucleotide sequence represented by SEQ ID NOS: 105956, 105957, 105958, 105959, 105960, 105961, 105962, 105963, 105964, 105965, 105966 were selected from the ORFs having the nucleotide sequence represented by SEQ ID NO: 77419.

[8820] The probes having the nucleotide sequence represented by SEQ ID NOS: 105967, 105968, 105969, 105970, 105971, 105972, 105973, 105974, 105975, 105976, 105977 were selected from the ORFs having the nucleotide sequence represented by SEQ ID NO: 77420.

[8821] The probes having the nucleotide sequence represented by SEQ ID NOS: 105978, 105979, 105980, 105981, 105982, 105983, 105984, 105985, 105986, 105987, 105988 were selected from the ORFs having the nucleotide sequence represented by SEQ ID NO: 77421.

[8822] The probes having the nucleotide sequence represented by SEQ ID NOS: 105989, 105990, 105991, 105992, 105993, 105994, 105995, 105996, 105997, 105998, 105999 were selected from the ORFs having the nucleotide sequence represented by SEQ ID NO: 77422.

[8823] The probes having the nucleotide sequence represented by SEQ ID NOS: 106000, 106001, 106002, 106003, 106004, 106005, 106006, 106007, 106008, 106009, 106010 were selected from the ORFs having the nucleotide sequence represented by SEQ ID NO: 77423.

[8824] The probes having the nucleotide sequence represented by SEQ ID NOS: 106011, 106012, 106013, 106014, 106015, 106016, 106017, 106018, 106019, 106020, 106021 were selected from the ORFs having the nucleotide sequence represented by SEQ ID NO: 77424.

[8825] The probes having the nucleotide sequence represented by SEQ ID NOS: 106022, 106023, 106024, 106025, 106026, 106027, 106028, 106029, 106030, 106031, 106032 were selected from the ORFs having the nucleotide sequence represented by SEQ ID NO: 77425.

[8826] The probes having the nucleotide sequence represented by SEQ ID NOS: 106033, 106034, 106035, 106036, 106037, 106038, 106039, 106040, 106041, 106042, 106043 were selected from the ORFs having the nucleotide sequence represented by SEQ ID NO: 77426.

[8827] The probes having the nucleotide sequence represented by SEQ ID NOS: 106044, 106045, 106046, 106047, 106048, 106049, 106050, 106051, 106052, 106053, 106054 were selected from the ORFs having the nucleotide sequence represented by SEQ ID NO: 77427.

[8828] The probes having the nucleotide sequence represented by SEQ ID NOS: 106055, 106056, 106057, 106058, 106059, 106060, 106061, 106062, 106063, 106064, 106065 were selected from the ORFs having the nucleotide sequence represented by SEQ ID NO: 77428.

[8829] The probes having the nucleotide sequence represented by SEQ ID NOS: 106066, 106067, 106068, 106069, 106070, 106071, 106072, 106073, 106074, 106075, 106076 were selected from the ORFs having the nucleotide sequence represented by SEQ ID NO: 77429.

[8830] The probes having the nucleotide sequence represented by SEQ ID NOS: 106077, 106078, 106079, 106080, 106081, 106082, 106083, 106084, 106085, 106086, 106087 were selected from the ORFs having the nucleotide sequence represented by SEQ ID NO: 77430.

[8831] The probes having the nucleotide sequence represented by SEQ ID NOS: 106088, 106089, 106090, 106091, 106092, 106093, 106094, 106095, 106096, 106097, 106098 were selected from the ORFs having the nucleotide sequence represented by SEQ ID NO: 77431.

[8832] The probes having the nucleotide sequence represented by SEQ ID NOS: 106099, 106100, 106101, 106102, 106103, 106104, 106105, 106106, 106107, 106108, 106109 were selected from the ORFs having the nucleotide sequence represented by SEQ ID NO: 77432.

[8833] The probes having the nucleotide sequence represented by SEQ ID NOS: 106110, 106111, 106112, 106113, 106114, 106115, 106116, 106117, 106118, 106119, 106120 were selected from the ORFs having the nucleotide sequence represented by SEQ ID NO: 77433.

[8834] The probes having the nucleotide sequence represented by SEQ ID NOS: 106121, 106122, 106123, 106124, 106125, 106126, 106127, 106128, 106129, 106130, 106131 were selected from the ORFs having the nucleotide sequence represented by SEQ ID NO: 77434.

[8835] The probes having the nucleotide sequence represented by SEQ ID NOS: 106132, 106133, 106134, 106135, 106136, 106137, 106138, 106139, 106140, 106141, 106142 were selected from the ORFs having the nucleotide sequence represented by SEQ ID NO: 77435.

[8836] The probes having the nucleotide sequence represented by SEQ ID NOS: 106143, 106144, 106145, 106146, 106147, 106148, 106149, 106150, 106151, 106152, 106153 were selected from the ORFs having the nucleotide sequence represented by SEQ ID NO: 77436.

[8837] The probes having the nucleotide sequence represented by SEQ ID NOS: 106154, 106155, 106156, 106157, 106158, 106159, 106160, 106161, 106162, 106163, 106164 were selected from the ORFs having the nucleotide sequence represented by SEQ ID NO: 77437.

[8838] The probes having the nucleotide sequence represented by SEQ ID NOS: 106165, 106166, 106167, 106168, 106169, 106170, 106171, 106172, 106173, 106174, 106175 were selected from the ORFs having the nucleotide sequence represented by SEQ ID NO: 77438.

[8839] The probes having the nucleotide sequence represented by SEQ ID NOS: 106176, 106177, 106178, 106179, 106180, 106181, 106182, 106183, 106184, 106185, 106186 were selected from the ORFs having the nucleotide sequence represented by SEQ ID NO: 77439.

[8840] The probes having the nucleotide sequence represented by SEQ ID NOS: 106187, 106188, 106189, 106190, 106191, 106192, 106193, 106194, 106195, 106196, 106197 were selected from the ORFs having the nucleotide sequence represented by SEQ ID NO: 77440.

[8841] The probes having the nucleotide sequence represented by SEQ ID NOS: 106198, 106199, 106200, 106201, 106202, 106203, 106204, 106205, 106206, 106207, 106208 were selected from the ORFs having the nucleotide sequence represented by SEQ ID NO: 77441.

[8842] The probes having the nucleotide sequence represented by SEQ ID NOS: 106209, 106210, 106211, 106212, 106213, 106214, 106215, 106216, 106217, 106218, 106219 were selected from the ORFs having the nucleotide sequence represented by SEQ ID NO: 77442.

[8843] The probes having the nucleotide sequence represented by SEQ ID NOS: 106220, 106221, 106222, 106223, 106224, 106225, 106226, 106227, 106228, 106229, 106230 were selected from the ORFs having the nucleotide sequence represented by SEQ ID NO: 77443.

[8844] The probes having the nucleotide sequence represented by SEQ ID NOS: 106231, 106232, 106233, 106234, 106235, 106236, 106237, 106238, 106239, 106240, 106241 were selected from the ORFs having the nucleotide sequence represented by SEQ ID NO: 77444.

[8845] The probes having the nucleotide sequence represented by SEQ ID NOS: 106242, 106243, 106244, 106245, 106246, 106247, 106248, 106249, 106250, 106251, 106252 were selected from the ORFs having the nucleotide sequence represented by SEQ ID NO: 77445.

[8846] The probes having the nucleotide sequence represented by SEQ ID NOS: 106253, 106254, 106255, 106256, 106257, 106258, 106259, 106260, 106261, 106262, 106263 were selected from the ORFs having the nucleotide sequence represented by SEQ ID NO: 77446.

[8847] The probes having the nucleotide sequence represented by SEQ ID NOS: 106264, 106265, 106266, 106267, 106268, 106269, 106270, 106271, 106272, 106273, 106274 were selected from the ORFs having the nucleotide sequence represented by SEQ ID NO: 77447.

[8848] The probes having the nucleotide sequence represented by SEQ ID NOS: 106275, 106276, 106277, 106278, 106279, 106280, 106281, 106282, 106283, 106284, 106285 were selected from the ORFs having the nucleotide sequence represented by SEQ ID NO: 77448.

[8849] The probes having the nucleotide sequence represented by SEQ ID NOS: 106286, 106287, 106288, 106289, 106290, 106291, 106292, 106293, 106294, 106295, 106296 were selected from the ORFs having the nucleotide sequence represented by SEQ ID NO: 77449.

[8850] The probes having the nucleotide sequence represented by SEQ ID NOS: 106297, 106298, 106299, 106300, 106301, 106302, 106303, 106304, 106305, 106306, 106307 were selected from the ORFs having the nucleotide sequence represented by SEQ ID NO: 77450.

[8851] The probes having the nucleotide sequence represented by SEQ ID NOS: 106308, 106309, 106310, 106311, 106312, 106313, 106314, 106315, 106316, 106317, 106318 were selected from the ORFs having the nucleotide sequence represented by SEQ ID NO: 77451.

[8852] The probes having the nucleotide sequence represented by SEQ ID NOS: 106319, 106320, 106321, 106322, 106323, 106324, 106325, 106326, 106327, 106328, 106329 were selected from the ORFs having the nucleotide sequence represented by SEQ ID NO: 77452.

[8853] The probes having the nucleotide sequence represented by SEQ ID NOS: 106330, 106331, 106332, 106333, 106334, 106335, 106336, 106337, 106338, 106339, 106340 were selected from the ORFs having the nucleotide sequence represented by SEQ ID NO: 77453.

[8854] The probes having the nucleotide sequence represented by SEQ ID NOS: 106341, 106342, 106343, 106344, 106345, 106346, 106347, 106348, 106349, 106350, 106351 were selected from the ORFs having the nucleotide sequence represented by SEQ ID NO: 77454.

[8855] The probes having the nucleotide sequence represented by SEQ ID NOS: 106352, 106353, 106354, 106355, 106356, 106357, 106358, 106359, 106360, 106361, 106362 were selected from the ORFs having the nucleotide sequence represented by SEQ ID NO: 77455.

[8856] The probes having the nucleotide sequence represented by SEQ ID NOS: 106363, 106364, 106365, 106366, 106367, 106368, 106369, 106370, 106371, 106372, 106373 were selected from the ORFs having the nucleotide sequence represented by SEQ ID NO: 77456.

[8857] The probes having the nucleotide sequence represented by SEQ ID NOS: 106374, 106375, 106376, 106377, 106378, 106379, 106380, 106381, 106382, 106383, 106384 were selected from the ORFs having the nucleotide sequence represented by SEQ ID NO: 77457.

[8858] The probes having the nucleotide sequence represented by SEQ ID NOS: 106385, 106386, 106387, 106388, 106389, 106390, 106391, 106392, 106393, 106394, 106395 were selected from the ORFs having the nucleotide sequence represented by SEQ ID NO: 77458.

[8859] The probes having the nucleotide sequence represented by SEQ ID NOS: 106396, 106397, 106398, 106399, 106400, 106401, 106402, 106403, 106404, 106405, 106406 were selected from the ORFs having the nucleotide sequence represented by SEQ ID NO: 77459.

[8860] The probes having the nucleotide sequence represented by SEQ ID NOS: 106407, 106408, 106409, 106410, 106411, 106412, 106413, 106414, 106415, 106416, 106417, 106418, 106419, 106420, 106421, 106422, 106423, 106424, 106425, 106426, 106427, 106428 were selected from the ORFs having the nucleotide sequence represented by SEQ ID NO: 77460.

[8861] The probes having the nucleotide sequence represented by SEQ ID NOS: 106429, 106430, 106431, 106432, 106433, 106434, 106435, 106436, 106437, 106438, 106439 were selected from the ORFs having the nucleotide sequence represented by SEQ ID NO: 77461.

[8862] The probes having the nucleotide sequence represented by SEQ ID NOS: 106440, 106441, 106442, 106443, 106444, 106445, 106446, 106447, 106448, 106449, 106450 were selected from the ORFs having the nucleotide sequence represented by SEQ ID NO: 77462.

[8863] The probes having the nucleotide sequence represented by SEQ ID NOS: 106451, 106452, 106453, 106454, 106455, 106456, 106457, 106458, 106459, 106460, 106461 were selected from the ORFs having the nucleotide sequence represented by SEQ ID NO: 77463.

[8864] The probes having the nucleotide sequence represented by SEQ ID NOS: 106462, 106463, 106464, 106465, 106466, 106467, 106468, 106469, 106470, 106471, 106472 were selected from the ORFs having the nucleotide sequence represented by SEQ ID NO: 77464.

[8865] The probes having the nucleotide sequence represented by SEQ ID NOS: 106473, 106474, 106475, 106476, 106477, 106478, 106479, 106480, 106481, 106482, 106483 were selected from the ORFs having the nucleotide sequence represented by SEQ ID NO: 77465.

[8866] The probes having the nucleotide sequence represented by SEQ ID NOS: 106484, 106485, 106486, 106487, 106488, 106489, 106490, 106491, 106492, 106493, 106494 were selected from the ORFs having the nucleotide sequence represented by SEQ ID NO: 77466.

[8867] The probes having the nucleotide sequence represented by SEQ ID NOS: 106495, 106496, 106497, 106498, 106499, 106500, 106501, 106502, 106503, 106504, 106505 were selected from the ORFs having the nucleotide sequence represented by SEQ ID NO: 77467.

[8868] The probes having the nucleotide sequence represented by SEQ ID NOS: 106506, 106507, 106508, 106509, 106510, 106511, 106512, 106513, 106514, 106515, 106516 were selected from the ORFs having the nucleotide sequence represented by SEQ ID NO: 77468.

[8869] The probes having the nucleotide sequence represented by SEQ ID NOS: 106517, 106518, 106519, 106520, 106521, 106522, 106523, 106524, 106525, 106526, 106527 were selected from the ORFs having the nucleotide sequence represented by SEQ ID NO: 77469.

[8870] The probes having the nucleotide sequence represented by SEQ ID NOS: 106528, 106529, 106530, 106531, 106532, 106533, 106534, 106535, 106536, 106537, 106538 were selected from the ORFs having the nucleotide sequence represented by SEQ ID NO: 77470.

[8871] The probes having the nucleotide sequence represented by SEQ ID NOS: 106539, 106540, 106541, 106542, 106543, 106544, 106545, 106546, 106547, 106548, 106549 were selected from the ORFs having the nucleotide sequence represented by SEQ ID NO: 77471.

[8872] The probes having the nucleotide sequence represented by SEQ ID NOS: 106550, 106551, 106552, 106553, 106554, 106555, 106556, 106557, 106558, 106559, 106560 were selected from the ORFs having the nucleotide sequence represented by SEQ ID NO: 77472.

[8873] The probes having the nucleotide sequence represented by SEQ ID NOS: 106561, 106562, 106563, 106564, 106565, 106566, 106567, 106568, 106569, 106570, 106571 were selected from the ORFs having the nucleotide sequence represented by SEQ ID NO: 77473.

[8874] The probes having the nucleotide sequence represented by SEQ ID NOS: 106572, 106573, 106574, 106575, 106576, 106577, 106578, 106579, 106580, 106581, 106582 were selected from the ORFs having the nucleotide sequence represented by SEQ ID NO: 77474.

[8875] The probes having the nucleotide sequence represented by SEQ ID NOS: 106583, 106584, 106585, 106586, 106587, 106588, 106589, 106590, 106591, 106592, 106593 were selected from the ORFs having the nucleotide sequence represented by SEQ ID NO: 77475.

[8876] The probes having the nucleotide sequence represented by SEQ ID NOS: 106594, 106595, 106596, 106597, 106598, 106599, 106600, 106601, 106602, 106603, 106604 were selected from the ORFs having the nucleotide sequence represented by SEQ ID NO: 77476.

[8877] The probes having the nucleotide sequence represented by SEQ ID NOS: 106605, 106606, 106607, 106608, 106609, 106610, 106611, 106612, 106613, 106614, 106615 were selected from the ORFs having the nucleotide sequence represented by SEQ ID NO: 77477.

[8878] The probes having the nucleotide sequence represented by SEQ ID NOS: 106616, 106617, 106618, 106619, 106620, 106621, 106622, 106623, 106624, 106625, 106626 were selected from the ORFs having the nucleotide sequence represented by SEQ ID NO: 77478.

[8879] The probes having the nucleotide sequence represented by SEQ ID NOS: 106627, 106628, 106629, 106630, 106631, 106632, 106633, 106634, 106635, 106636, 106637 were selected from the ORFs having the nucleotide sequence represented by SEQ ID NO: 77479.

[8880] The probes having the nucleotide sequence represented by SEQ ID NOS: 106638, 106639, 106640, 106641, 106642, 106643, 106644, 106645, 106646, 106647, 106648 were selected from the ORFs having the nucleotide sequence represented by SEQ ID NO: 77480.

[8881] The probes having the nucleotide sequence represented by SEQ ID NOS: 106649, 106650, 106651, 106652, 106653, 106654, 106655, 106656, 106657, 106658, 106659 were selected from the ORFs having the nucleotide sequence represented by SEQ ID NO: 77481.

[8882] The probes having the nucleotide sequence represented by SEQ ID NOS: 106660, 106661, 106662, 106663, 106664, 106665, 106666, 106667, 106668, 106669, 106670 were selected from the ORFs having the nucleotide sequence represented by SEQ ID NO: 77482.

[8883] The probes having the nucleotide sequence represented by SEQ ID NOS: 106671, 106672, 106673, 106674, 106675, 106676, 106677, 106678, 106679, 106680, 106681 were selected from the ORFs having the nucleotide sequence represented by SEQ ID NO: 77483.

[8884] The probes having the nucleotide sequence represented by SEQ ID NOS: 106682, 106683, 106684, 106685, 106686, 106687, 106688, 106689, 106690, 106691, 106692 were selected from the ORFs having the nucleotide sequence represented by SEQ ID NO: 77484.

[8885] The probes having the nucleotide sequence represented by SEQ ID NOS: 106693, 106694, 106695, 106696, 106697, 106698, 106699, 106700, 106701, 106702, 106703 were selected from the ORFs having the nucleotide sequence represented by SEQ ID NO: 77485.

[8886] The probes having the nucleotide sequence represented by SEQ ID NOS: 106704, 106705, 106706, 106707, 106708, 106709, 106710, 106711, 106712, 106713, 106714 were selected from the ORFs having the nucleotide sequence represented by SEQ ID NO: 77486.

[8887] The probes having the nucleotide sequence represented by SEQ ID NOS: 106715, 106716, 106717, 106718, 106719, 106720, 106721, 106722, 106723, 106724, 106725 were selected from the ORFs having the nucleotide sequence represented by SEQ ID NO: 77487.

[8888] The probes having the nucleotide sequence represented by SEQ ID NOS: 106726, 106727, 106728, 106729, 106730, 106731, 106732, 106733, 106734, 106735, 106736 were selected from the ORFs having the nucleotide sequence represented by SEQ ID NO: 77488.

[8889] The probes having the nucleotide sequence represented by SEQ ID NOS: 106737, 106738, 106739, 106740, 106741, 106742, 106743, 106744, 106745, 106746, 106747 were selected from the ORFs having the nucleotide sequence represented by SEQ ID NO: 77489.

[8890] The probes having the nucleotide sequence represented by SEQ ID NOS: 106748, 106749, 106750, 106751, 106752, 106753, 106754, 106755, 106756, 106757, 106758 were selected from the ORFs having the nucleotide sequence represented by SEQ ID NO: 77490.

[8891] The probes having the nucleotide sequence represented by SEQ ID NOS: 106759, 106760, 106761, 106762, 106763, 106764, 106765, 106766, 106767, 106768, 106769 were selected from the ORFs having the nucleotide sequence represented by SEQ ID NO: 77491.

[8892] The probes having the nucleotide sequence represented by SEQ ID NOS: 106770, 106771, 106772, 106773, 106774, 106775, 106776, 106777, 106778, 106779, 106780 were selected from the ORFs having the nucleotide sequence represented by SEQ ID NO: 77492.

[8893] The probes having the nucleotide sequence represented by SEQ ID NOS: 106781, 106782, 106783, 106784, 106785, 106786, 106787, 106788, 106789, 106790, 106791 were selected from the ORFs having the nucleotide sequence represented by SEQ ID NO: 77493.

[8894] The probes having the nucleotide sequence represented by SEQ ID NOS: 106792, 106793, 106794, 106795, 106796, 106797, 106798, 106799, 106800, 106801, 106802 were selected from the ORFs having the nucleotide sequence represented by SEQ ID NO: 77494.

[8895] The probes having the nucleotide sequence represented by SEQ ID NOS: 106803, 106804, 106805, 106806, 106807, 106808, 106809, 106810, 106811, 106812, 106813 were selected from the ORFs having the nucleotide sequence represented by SEQ ID NO: 77495.

[8896] The probes having the nucleotide sequence represented by SEQ ID NOS: 106814, 106815, 106816, 106817, 106818, 106819, 106820, 106821, 106822, 106823, 106824 were selected from the ORFs having the nucleotide sequence represented by SEQ ID NO: 77496.

[8897] The probes having the nucleotide sequence represented by SEQ ID NOS: 106825, 106826, 106827, 106828, 106829, 106830, 106831, 106832, 106833, 106834, 106835 were selected from the ORFs having the nucleotide sequence represented by SEQ ID NO: 77497.

[8898] The probes having the nucleotide sequence represented by SEQ ID NOS: 106836, 106837, 106838, 106839, 106840, 106841, 106842, 106843, 106844, 106845, 106846 were selected from the ORFs having the nucleotide sequence represented by SEQ ID NO: 77498.

[8899] The probes having the nucleotide sequence represented by SEQ ID NOS: 106847, 106848, 106849, 106850, 106851, 106852, 106853, 106854, 106855, 106856, 106857 were selected from the ORFs having the nucleotide sequence represented by SEQ ID NO: 77499.

[8900] The probes having the nucleotide sequence represented by SEQ ID NOS: 106858, 106859, 106860, 106861, 106862, 106863, 106864, 106865, 106866, 106867, 106868 were selected from the ORFs having the nucleotide sequence represented by SEQ ID NO: 77500.

[8901] The probes having the nucleotide sequence represented by SEQ ID NOS: 106869, 106870, 106871, 106872, 106873, 106874, 106875, 106876, 106877, 106878, 106879 were selected from the ORFs having the nucleotide sequence represented by SEQ ID NO: 77501.

[8902] The probes having the nucleotide sequence represented by SEQ ID NOS: 106880, 106881, 106882, 106883, 106884, 106885, 106886, 106887, 106888, 106889, 106890 were selected from the ORFs having the nucleotide sequence represented by SEQ ID NO: 77502.

[8903] The probes having the nucleotide sequence represented by SEQ ID NOS: 106891, 106892, 106893, 106894, 106895, 106896, 106897, 106898, 106899, 106900, 106901 were selected from the ORFs having the nucleotide sequence represented by SEQ ID NO: 77503.

[8904] The probes having the nucleotide sequence represented by SEQ ID NOS: 106902, 106903, 106904, 106905, 106906, 106907, 106908, 106909, 106910, 106911, 106912 were selected from the ORFs having the nucleotide sequence represented by SEQ ID NO: 77504.

[8905] The probes having the nucleotide sequence represented by SEQ ID NOS: 106913, 106914, 106915, 106916, 106917, 106918, 106919, 106920, 106921, 106922, 106923 were selected from the ORFs having the nucleotide sequence represented by SEQ ID NO: 77505.

[8906] The probes having the nucleotide sequence represented by SEQ ID NOS: 106924, 106925, 106926, 106927, 106928, 106929, 106930, 106931, 106932, 106933, 106934 were selected from the ORFs having the nucleotide sequence represented by SEQ ID NO: 77506.

[8907] The probes having the nucleotide sequence represented by SEQ ID NOS: 106935, 106936, 106937, 106938, 106939, 106940, 106941, 106942, 106943, 106944, 106945 were selected from the ORFs having the nucleotide sequence represented by SEQ ID NO: 77507.

[8908] The probes having the nucleotide sequence represented by SEQ ID NOS: 106946, 106947, 106948, 106949, 106950, 106951, 106952, 106953, 106954, 106955, 106956 were selected from the ORFs having the nucleotide sequence represented by SEQ ID NO: 77508.

[8909] The probes having the nucleotide sequence represented by SEQ ID NOS: 106957, 106958, 106959, 106960, 106961, 106962, 106963, 106964, 106965, 106966, 106967 were selected from the ORFs having the nucleotide sequence represented by SEQ ID NO: 77509.

[8910] The probes having the nucleotide sequence represented by SEQ ID NOS: 106968, 106969, 106970, 106971, 106972, 106973, 106974, 106975, 106976, 106977, 106978 were selected from the ORFs having the nucleotide sequence represented by SEQ ID NO: 77510.

[8911] The probes having the nucleotide sequence represented by SEQ ID NOS: 106979, 106980, 106981, 106982, 106983, 106984, 106985, 106986, 106987, 106988, 106989 were selected from the ORFs having the nucleotide sequence represented by SEQ ID NO: 77511.

[8912] The probes having the nucleotide sequence represented by SEQ ID NOS: 106990, 106991, 106992, 106993, 106994, 106995, 106996, 106997, 106998, 106999, 107000 were selected from the ORFs having the nucleotide sequence represented by SEQ ID NO: 77512.

[8913] The probes having the nucleotide sequence represented by SEQ ID NOS: 107001, 107002, 107003, 107004, 107005, 107006, 107007, 107008, 107009, 107010, 107011 were selected from the ORFs having the nucleotide sequence represented by SEQ ID NO: 77513.

[8914] The probes having the nucleotide sequence represented by SEQ ID NOS: 107012, 107013, 107014, 107015, 107016, 107017, 107018, 107019, 107020, 107021, 107022 were selected from the ORFs having the nucleotide sequence represented by SEQ ID NO: 77514.

[8915] The probes having the nucleotide sequence represented by SEQ ID NOS: 107023, 107024, 107025, 107026, 107027, 107028, 107029, 107030, 107031, 107032, 107033 were selected from the ORFs having the nucleotide sequence represented by SEQ ID NO: 77515.

[8916] The probes having the nucleotide sequence represented by SEQ ID NOS: 107034, 107035, 107036, 107037, 107038, 107039, 107040, 107041, 107042, 107043, 107044 were selected from the ORFs having the nucleotide sequence represented by SEQ ID NO: 77516.

[8917] The probes having the nucleotide sequence represented by SEQ ID NOS: 107045, 107046, 107047, 107048, 107049, 107050, 107051, 107052, 107053, 107054, 107055 were selected from the ORFs having the nucleotide sequence represented by SEQ ID NO: 77517.

[8918] The probes having the nucleotide sequence represented by SEQ ID NOS: 107056, 107057, 107058, 107059, 107060, 107061, 107062, 107063, 107064, 107065, 107066 were selected from the ORFs having the nucleotide sequence represented by SEQ ID NO: 77518.

[8919] The probes having the nucleotide sequence represented by SEQ ID NOS: 107067, 107068, 107069, 107070, 107071, 107072, 107073, 107074, 107075, 107076, 107077 were selected from the ORFs having the nucleotide sequence represented by SEQ ID NO: 77519.

[8920] The probes having the nucleotide sequence represented by SEQ ID NOS: 107078, 107079, 107080, 107081, 107082, 107083, 107084, 107085, 107086, 107087, 107088 were selected from the ORFs having the nucleotide sequence represented by SEQ ID NO: 77520.

[8921] The probes having the nucleotide sequence represented by SEQ ID NOS: 107089, 107090, 107091, 107092, 107093, 107094, 107095, 107096, 107097, 107098, 107099, 107100, 107101, 107102, 107103, 107104, 107105, 107106, 107107, 107108, 107109, 107110 were selected from the ORFs having the nucleotide sequence represented by SEQ ID NO: 77521.

[8922] The probes having the nucleotide sequence represented by SEQ ID NOS: 107111, 107112, 107113, 107114, 107115, 107116, 107117, 107118, 107119, 107120, 107121 were selected from the ORFs having the nucleotide sequence represented by SEQ ID NO: 77522.

[8923] The probes having the nucleotide sequence represented by SEQ ID NOS: 107122, 107123, 107124, 107125, 107126, 107127, 107128, 107129, 107130, 107131, 107132 were selected from the ORFs having the nucleotide sequence represented by SEQ ID NO: 77523.

[8924] The probes having the nucleotide sequence represented by SEQ ID NOS: 107133, 107134, 107135, 107136, 107137, 107138, 107139, 107140, 107141, 107142, 107143 were selected from the ORFs having the nucleotide sequence represented by SEQ ID NO: 77524.

[8925] The probes having the nucleotide sequence represented by SEQ ID NOS: 107144, 107145, 107146, 107147, 107148, 107149, 107150, 107151, 107152, 107153, 107154 were selected from the ORFs having the nucleotide sequence represented by SEQ ID NO: 77525.

[8926] The probes having the nucleotide sequence represented by SEQ ID NOS: 107155, 107156, 107157, 107158, 107159, 107160, 107161, 107162, 107163, 107164, 107165 were selected from the ORFs having the nucleotide sequence represented by SEQ ID NO: 77526.

[8927] The probes having the nucleotide sequence represented by SEQ ID NOS: 107166, 107167, 107168, 107169, 107170, 107171, 107172, 107173, 107174, 107175, 107176 were selected from the ORFs having the nucleotide sequence represented by SEQ ID NO: 77527.

[8928] The probes having the nucleotide sequence represented by SEQ ID NOS: 107177, 107178, 107179, 107180, 107181, 107182, 107183, 107184, 107185, 107186, 107187 were selected from the ORFs having the nucleotide sequence represented by SEQ ID NO: 77528.

[8929] The probes having the nucleotide sequence represented by SEQ ID NOS: 107188, 107189, 107190, 107191, 107192, 107193, 107194, 107195, 107196, 107197, 107198 were selected from the ORFs having the nucleotide sequence represented by SEQ ID NO: 77529.

[8930] The probes having the nucleotide sequence represented by SEQ ID NOS: 107199, 107200, 107201, 107202, 107203, 107204, 107205, 107206, 107207, 107208, 107209 were selected from the ORFs having the nucleotide sequence represented by SEQ ID NO: 77530.

[8931] The probes having the nucleotide sequence represented by SEQ ID NOS: 107210, 107211, 107212, 107213, 107214, 107215, 107216, 107217, 107218, 107219, 107220 were selected from the ORFs having the nucleotide sequence represented by SEQ ID NO: 77531.

[8932] The probes having the nucleotide sequence represented by SEQ ID NOS: 107221, 107222, 107223, 107224, 107225, 107226, 107227, 107228, 107229, 107230, 107231 were selected from the ORFs having the nucleotide sequence represented by SEQ ID NO: 77532.

[8933] The probes having the nucleotide sequence represented by SEQ ID NOS: 107232, 107233, 107234, 107235, 107236, 107237, 107238, 107239, 107240, 107241, 107242 were selected from the ORFs having the nucleotide sequence represented by SEQ ID NO: 77533.

[8934] The probes having the nucleotide sequence represented by SEQ ID NOS: 107243, 107244, 107245, 107246, 107247, 107248, 107249, 107250, 107251, 107252, 107253 were selected from the ORFs having the nucleotide sequence represented by SEQ ID NO: 77534.

[8935] The probes having the nucleotide sequence represented by SEQ ID NOS: 107254, 107255, 107256, 107257, 107258, 107259, 107260, 107261, 107262, 107263, 107264, 107265, 107266, 107267, 107268, 107269, 107270, 107271, 107272, 107273, 107274, 107275 were selected from the ORFs having the nucleotide sequence represented by SEQ ID NO: 77535.

[8936] The probes having the nucleotide sequence represented by SEQ ID NOS: 107276, 107277, 107278, 107279, 107280, 107281, 107282, 107283, 107284, 107285, 107286 were selected from the ORFs having the nucleotide sequence represented by SEQ ID NO: 77536.

[8937] The probes having the nucleotide sequence represented by SEQ ID NOS: 107287, 107288, 107289, 107290, 107291, 107292, 107293, 107294, 107295, 107296, 107297 were selected from the ORFs having the nucleotide sequence represented by SEQ ID NO: 77537.

[8938] The probes having the nucleotide sequence represented by SEQ ID NOS: 107298, 107299, 107300, 107301, 107302, 107303, 107304, 107305, 107306, 107307, 107308 were selected from the ORFs having the nucleotide sequence represented by SEQ ID NO: 77538.

[8939] The probes having the nucleotide sequence represented by SEQ ID NOS: 107309, 107310, 107311, 107312, 107313, 107314, 107315, 107316, 107317, 107318, 107319 were selected from the ORFs having the nucleotide sequence represented by SEQ ID NO: 77539.

[8940] The probes having the nucleotide sequence represented by SEQ ID NOS: 107320, 107321, 107322, 107323, 107324, 107325, 107326, 107327, 107328, 107329, 107330 were selected from the ORFs having the nucleotide sequence represented by SEQ ID NO: 77540.

[8941] The probes having the nucleotide sequence represented by SEQ ID NOS: 107331, 107332, 107333, 107334, 107335, 107336, 107337, 107338, 107339, 107340, 107341 were selected from the ORFs having the nucleotide sequence represented by SEQ ID NO: 77541.

[8942] The probes having the nucleotide sequence represented by SEQ ID NOS: 107342, 107343, 107344, 107345, 107346, 107347, 107348, 107349, 107350, 107351, 107352 were selected from the ORFs having the nucleotide sequence represented by SEQ ID NO: 77542.

[8943] The probes having the nucleotide sequence represented by SEQ ID NOS: 107353, 107354, 107355, 107356, 107357, 107358, 107359, 107360, 107361, 107362, 107363 were selected from the ORFs having the nucleotide sequence represented by SEQ ID NO: 77543.

[8944] The probes having the nucleotide sequence represented by SEQ ID NOS: 107364, 107365, 107366, 107367, 107368, 107369, 107370, 107371, 107372, 107373, 107374 were selected from the ORFs having the nucleotide sequence represented by SEQ ID NO: 77544.

[8945] The probes having the nucleotide sequence represented by SEQ ID NOS: 107375, 107376, 107377, 107378, 107379, 107380, 107381, 107382, 107383, 107384, 107385 were selected from the ORFs having the nucleotide sequence represented by SEQ ID NO: 77545.

[8946] The probes having the nucleotide sequence represented by SEQ ID NOS: 107386, 107387, 107388, 107389, 107390, 107391, 107392, 107393, 107394, 107395, 107396 were selected from the ORFs having the nucleotide sequence represented by SEQ ID NO: 77546.

[8947] The probes having the nucleotide sequence represented by SEQ ID NOS: 107397, 107398, 107399, 107400, 107401, 107402, 107403, 107404, 107405, 107406, 107407 were selected from the ORFs having the nucleotide sequence represented by SEQ ID NO: 77547.

[8948] The probes having the nucleotide sequence represented by SEQ ID NOS: 107408, 107409, 107410, 107411, 107412, 107413, 107414, 107415, 107416, 107417, 107418 were selected from the ORFs having the nucleotide sequence represented by SEQ ID NO: 77548.

[8949] The probes having the nucleotide sequence represented by SEQ ID NOS: 107419, 107420, 107421, 107422, 107423, 107424, 107425, 107426, 107427, 107428, 107429, 107430, 107431, 107432, 107433, 107434, 107435, 107436, 107437, 107438, 107439, 107440 were selected from the ORFs having the nucleotide sequence represented by SEQ ID NO: 77549.

[8950] The probes having the nucleotide sequence represented by SEQ ID NOS: 107441, 107442, 107443, 107444, 107445, 107446, 107447, 107448, 107449, 107450, 107451 were selected from the ORFs having the nucleotide sequence represented by SEQ ID NO: 77550.

[8951] The probes having the nucleotide sequence represented by SEQ ID NOS: 107452, 107453, 107454, 107455, 101456, 107457, 107458, 107459, 107460, 107461, 107462 were selected from the ORFs having the nucleotide sequence represented by SEQ ID NO: 77551.

[8952] The probes having the nucleotide sequence represented by SEQ ID NOS: 107463, 107464, 107465, 107466, 107467, 107468, 107469, 107470, 107471, 107472, 107473 were selected from the ORFs having the nucleotide sequence represented by SEQ ID NO: 77552.

[8953] The probes having the nucleotide sequence represented by SEQ ID NOS: 107474, 107475, 107476, 107477, 107478, 107479, 107480, 107481, 107482, 107483, 10748.4, 107485, 107486, 107487, 107488, 107489, 107490, 107491, 107492, 107493, 107494, 107495 were selected from the ORFs having the nucleotide sequence represented by SEQ ID NO: 77553.

[8954] The probes having the nucleotide sequence represented by SEQ ID NOS: 107496, 107497, 107498, 107499, 107500, 107501, 107502, 107503, 107504, 107505, 107506 were selected from the ORFs having the nucleotide sequence represented by SEQ ID NO: 77554.

[8955] The probes having the nucleotide sequence represented by SEQ ID NOS: 107507, 107508, 107509, 107510, 107511, 107512, 107513, 107514, 107515, 107516, 107517 were selected from the ORFs having the nucleotide sequence represented by SEQ ID NO: 77555.

[8956] The probes having the nucleotide sequence represented by SEQ ID NOS: 107518, 107519, 107520, 107521, 107522, 107523, 107524, 107525, 107526, 107527, 107528 were selected from the ORFs having the nucleotide sequence represented by SEQ ID NO: 77556.

[8957] The probes having the nucleotide sequence represented by SEQ ID NOS: 107529, 107530, 107531, 107532, 107533, 107534, 107535, 107536, 107537, 107538, 107539 were selected from the ORFs having the nucleotide sequence represented by SEQ ID NO: 77557.

[8958] The probes having the nucleotide sequence represented by SEQ ID NOS: 107540, 107541, 107542, 107543, 107544, 107545, 107546, 107547, 107548, 107549, 107550 were selected from the ORFs having the nucleotide sequence represented by SEQ ID NO: 77558.

[8959] The probes having the nucleotide sequence represented by SEQ ID NOS: 107551, 107552, 107553, 107554, 107555, 107556, 107557, 107558, 107559, 107560, 107561 were selected from the ORFs having the nucleotide sequence represented by SEQ ID NO: 77559.

[8960] The probes having the nucleotide sequence represented by SEQ ID NOS: 107562, 107563, 107564, 107565, 107566, 107567, 107568, 107569, 107570, 107571, 107572 were selected from the ORFs having the nucleotide sequence represented by SEQ ID NO: 77560.

[8961] The probes having the nucleotide sequence represented by SEQ ID NOS: 107573, 107574, 107575, 107576, 107577, 107578, 107579, 107580, 107581, 107582, 107583 were selected from the ORFs having the nucleotide sequence represented by SEQ ID NO: 77561.

[8962] The probes having the nucleotide sequence represented by SEQ ID NOS: 107584, 107585, 107586, 107587, 107588, 107589, 107590, 107591, 107592, 107593, 107594 were selected from the ORFs having the nucleotide sequence represented by SEQ ID NO: 77562.

[8963] The probes having the nucleotide sequence represented by SEQ ID NOS: 107595, 107596, 107597, 107598, 107599, 107600, 107601, 107602, 107603, 107604, 107605 were selected from the ORFs having the nucleotide sequence represented by SEQ ID NO: 77563.

[8964] The probes having the nucleotide sequence represented by SEQ ID NOS: 107606, 107607, 107608, 107609, 107610, 107611, 107612, 107613, 107614, 107615, 107616 were selected from the ORFs having the nucleotide sequence represented by SEQ ID NO: 77564.

[8965] The probes having the nucleotide sequence represented by SEQ ID NOS: 107617, 107618, 107619, 107620, 107621, 107622, 107623, 107624, 107625, 107626, 107627 were selected from the ORFs having the nucleotide sequence represented by SEQ ID NO: 77565.

[8966] The probes having the nucleotide sequence represented by SEQ ID NOS: 107628, 107629, 107630, 107631, 107632, 107633, 107634, 107635, 107636, 107637, 107638 were selected from the ORFs having the nucleotide sequence represented by SEQ ID NO: 77566.

[8967] The probes having the nucleotide sequence represented by SEQ ID NOS: 107639, 107640, 107641, 107642, 107643, 107644, 107645, 107646, 107647, 107648, 107649 were selected from the ORFs having the nucleotide sequence represented by SEQ ID NO: 77567.

[8968] The probes having the nucleotide sequence represented by SEQ ID NOS: 107650, 107651, 107652, 107653, 107654, 107655, 107656, 107657, 107658, 107659, 107660 were selected from the ORFs having the nucleotide sequence represented by SEQ ID NO: 77568.

[8969] The probes having the nucleotide sequence represented by SEQ ID NOS: 107661, 107662, 107663, 107664, 107665, 107666, 107667, 107668, 107669, 107670, 107671 were selected from the ORFs having the nucleotide sequence represented by SEQ ID NO: 77569.

[8970] The probes having the nucleotide sequence represented by SEQ ID NOS: 107672, 107673, 107674, 107675, 107676, 107677, 107678, 107679, 107680, 107681, 107682 were selected from the ORFs having the nucleotide sequence represented by SEQ ID NO: 77570.

[8971] The probes having the nucleotide sequence represented by SEQ ID NOS: 107683, 107684, 107685, 107686, 107687, 107688, 107689, 107690, 107691, 107692, 107693 were selected from the ORFs having the nucleotide sequence represented by SEQ ID NO: 77571.

[8972] The probes having the nucleotide sequence represented by SEQ ID NOS: 107694, 107695, 107696, 107697, 107698, 107699, 107700, 107701, 107702, 107703, 107704 were selected from the ORFs having the nucleotide sequence represented by SEQ ID NO: 77572.

[8973] The probes having the nucleotide sequence represented by SEQ ID NOS: 107705, 107706, 107707, 107708, 107709, 107710, 107711, 107712, 107713, 107714, 107715 were selected from the ORFs having the nucleotide sequence represented by SEQ ID NO: 77573.

[8974] The probes having the nucleotide sequence represented by SEQ ID NOS: 107716, 107717, 107718, 107719, 107720, 107721, 107722, 107723, 107724, 107725, 107726 were selected from the ORFs having the nucleotide sequence represented by SEQ ID NO: 77574.

[8975] The probes having the nucleotide sequence represented by SEQ ID NOS: 107727, 107728, 107729, 107730, 107731, 107732, 107733, 107734, 107735, 107736, 107737 were selected from the ORFs having the nucleotide sequence represented by SEQ ID NO: 77575.

[8976] The probes having the nucleotide sequence represented by SEQ. ID NOS: 107738, 107739, 107740, 107741, 107742, 107743, 107744, 107745, 107746, 107747, 107748 were selected from the ORFs having the nucleotide sequence represented by SEQ ID NO: 77576.

[8977] The probes having the nucleotide sequence represented by SEQ ID NOS: 107749, 107750, 107751, 107752, 107753, 107754, 107755, 107756, 107757, 107758, 107759 were selected from the ORFs having the nucleotide sequence represented by SEQ ID NO: 77577.

[8978] The probes having the nucleotide sequence represented by SEQ ID NOS: 107760, 107761, 107762, 107763, 107764, 107765, 107766, 107767, 107768, 107769, 107770 were selected from the ORFs having the nucleotide sequence represented by SEQ ID NO: 77578.

[8979] The probes having the nucleotide sequence represented by SEQ ID NOS: 107771, 107772, 107773, 107774, 107775, 107776, 107777, 107778, 107779, 107780, 107781 were selected from the ORFs having the nucleotide sequence represented by SEQ ID NO: 77579.

[8980] The probes having the nucleotide sequence represented by SEQ ID NOS: 107782, 107783, 107784, 107785, 107786, 107787, 107788, 107789, 107790, 107791, 107792 were selected from the ORFs having the nucleotide sequence represented by SEQ ID NO: 77580.

[8981] The probes having the nucleotide sequence represented by SEQ ID NOS: 107793, 107794, 107795, 107796, 107797, 107798, 107799, 107800, 107801, 107802, 107803 were selected from the ORFs having the nucleotide sequence represented by SEQ ID NO: 77581.

[8982] The probes having the nucleotide sequence represented by SEQ ID NOS: 107804, 107805, 107806, 107807, 107808, 107809, 107810, 107811, 107812, 107813, 107814 were selected from the ORFs having the nucleotide sequence represented by SEQ ID NO: 77582.

[8983] The probes having the nucleotide sequence represented by SEQ ID NOS: 107815, 107816, 107817, 107818, 107819, 107820, 107821, 107822, 107823, 107824, 107825 were selected from the ORFs having the nucleotide sequence represented by SEQ ID NO: 77583.

[8984] The probes having the nucleotide sequence represented by SEQ ID NOS: 107826, 107827, 107828, 107829, 107830, 107831, 107832, 107833, 107834, 107835, 107836 were selected from the ORFs having the nucleotide sequence represented by SEQ ID NO: 77584.

[8985] The probes having the nucleotide sequence represented by SEQ ID NOS: 107837, 107838, 107839, 107840, 107841, 107842, 107843, 107844, 107845, 107846, 107847 were selected from the ORFs having the nucleotide sequence represented by SEQ ID NO: 77585.

[8986] The probes having the nucleotide sequence represented by SEQ ID NOS: 107848, 107849, 107850, 107851, 107852, 107853, 107854, 107855, 107856, 107857, 107858 were selected from the ORFs having the nucleotide sequence represented by SEQ ID NO: 77586.

[8987] The probes having the nucleotide sequence represented by SEQ ID NOS: 107859, 107860, 107861, 107862, 107863, 107864, 107865, 107866, 107867, 107868, 107869 were selected from the ORFs having the nucleotide sequence represented by SEQ ID NO: 77587.

[8988] The probes having the nucleotide sequence represented by SEQ ID NOS: 107870, 107871, 107872, 107873, 107874, 107875, 107876, 107877, 107878, 107879, 107880 were selected from the ORFs having the nucleotide sequence represented by SEQ ID NO: 77588.

[8989] The probes having the nucleotide sequence represented by SEQ ID NOS: 107881, 107882, 107883, 107884, 107885, 107886, 107887, 107888, 107889, 107890, 107891 were selected from the ORFs having the nucleotide sequence represented by SEQ ID NO: 77589.

[8990] The probes having the nucleotide sequence represented by SEQ ID NOS: 107892, 107893, 107894, 107895, 107896, 107897, 107898, 107899, 107900, 107901, 107902 were selected from the ORFs having the nucleotide sequence represented by SEQ ID NO: 77590.

[8991] The probes having the nucleotide sequence represented by SEQ ID NOS: 107903, 107904, 107905, 107906, 107907, 107908, 107909, 107910, 107911, 107912, 107913 were selected from the ORFs having the nucleotide sequence represented by SEQ ID NO: 77591.

[8992] The probes having the nucleotide sequence represented by SEQ ID NOS: 107914, 107915, 107916, 107917, 107918, 107919, 107920, 107921, 107922, 107923, 107924 were selected from the ORFs having the nucleotide sequence represented by SEQ ID NO: 77592.

[8993] The probes having the nucleotide sequence represented by SEQ ID NOS: 107925, 107926, 107927, 107928, 107929, 107930, 107931, 107932, 107933, 107934, 107935 were selected from the ORFs having the nucleotide sequence represented by SEQ ID NO: 77593.

[8994] The probes having the nucleotide sequence represented by SEQ ID NOS: 107936, 107937, 107938, 107939, 107940, 107941, 107942, 107943, 107944, 107945, 107946 were selected from the ORFs having the nucleotide sequence represented by SEQ ID NO: 77594.

[8995] The probes having the nucleotide sequence represented by SEQ ID NOS: 107947, 107948, 107949, 107950, 107951, 107952, 107953, 107954, 107955, 107956, 107957 were selected from the ORFs having the nucleotide sequence represented by SEQ ID NO: 77595.

[8996] The probes having the nucleotide sequence represented by SEQ ID NOS: 107958, 107959, 107960, 107961, 107962, 107963, 107964, 107965, 107966, 107967, 107968 were selected from the ORFs having the nucleotide sequence represented by SEQ ID NO: 77596.

[8997] The probes having the nucleotide sequence represented by SEQ ID NOS: 107969, 107970, 107971, 107972, 107973, 107974, 107975, 107976, 107977, 107978, 107979 were selected from the ORFs having the nucleotide sequence represented by SEQ ID NO: 77597.

[8998] The probes having the nucleotide sequence represented by SEQ ID NOS: 107980, 107981, 107982, 107983, 107984, 107985, 107986, 107987, 107988, 107989, 107990 were selected from the ORFs having the nucleotide sequence represented by SEQ ID NO: 77598.

[8999] The probes having the nucleotide sequence represented by SEQ ID NOS: 107991, 107992, 107993, 107994, 107995, 107996, 107997, 107998, 107999, 108000, 108001 were selected from the ORFs having the nucleotide sequence represented by SEQ ID NO: 77599.

[9000] The probes having the nucleotide sequence represented by SEQ ID NOS: 108002, 108003, 108004, 108005, 108006, 108007, 108008, 108009, 108010, 108011, 108012 were selected from the ORFs having the nucleotide sequence represented by SEQ ID NO: 77600.

[9001] The probes having the nucleotide sequence represented by SEQ ID NOS: 108013, 108014, 108015, 108016, 108017, 108018, 108019, 108020, 108021, 108022, 108023 were selected from the ORFs having the nucleotide sequence represented by SEQ ID NO: 77601.

[9002] The probes having the nucleotide sequence represented by SEQ ID NOS: 108024, 108025, 108026, 108027, 108028, 108029, 108030, 108031, 108032, 108033, 108034 were selected from the ORFs having the nucleotide sequence represented by SEQ ID NO: 77602.

[9003] The probes having the nucleotide sequence represented by SEQ ID NOS: 108035, 108036, 108037, 108038, 108039, 108040, 108041, 108042, 108043, 108044, 108045 were selected from the ORFs having the nucleotide sequence represented by SEQ ID NO: 77603.

[9004] The probes having the nucleotide sequence represented by SEQ ID NOS: 108046, 108047, 108048, 108049, 108050, 108051, 108052, 108053, 108054, 108055, 108056 were selected from the ORFs having the nucleotide sequence represented by SEQ ID NO: 77604.

[9005] The probes having the nucleotide sequence represented by SEQ ID NOS: 108057, 108058, 108059, 108060, 108061, 108062, 108063, 108064, 108065, 108066, 108067 were selected from the ORFs having the nucleotide sequence represented by SEQ ID NO: 77605.

[9006] The probes having the nucleotide sequence represented by SEQ ID NOS: 108068, 108069, 108070, 108071, 108072, 108073, 108074, 108075, 108076, 108077, 108078 were selected from the ORFs having the nucleotide sequence represented by SEQ ID NO: 77606.

[9007] The probes having the nucleotide sequence represented by SEQ ID NOS: 108079, 108080, 108081, 108082, 108083, 108084, 108085, 108086, 108087, 108088, 108089 were selected from the ORFs having the nucleotide sequence represented by SEQ ID NO: 77607.

[9008] The probes having the nucleotide sequence represented by SEQ ID NOS: 108090, 108091, 108092, 108093, 108094, 108095, 108096, 108097, 108098, 108099, 108100 were selected from the ORFs having the nucleotide sequence represented by SEQ ID NO: 77608.

[9009] The probes having the nucleotide sequence represented by SEQ ID NOS: 108101, 108102, 108103, 108104, 108105, 108106, 108107, 108108, 108109, 108110, 108111 were selected from the ORFs having the nucleotide sequence represented by SEQ ID NO: 77609.

[9010] The probes having the nucleotide sequence represented by SEQ ID NOS: 108112, 108113, 108114, 108115, 108116, 108117, 108118, 108119, 108120, 108121, 108122 were selected from the ORFs having the nucleotide sequence represented by SEQ ID NO: 77610.

[9011] The probes having the nucleotide sequence represented by SEQ ID NOS: 108123, 108124, 108125, 108126, 108127, 108128, 108129, 108130, 108131, 108132, 108133 were selected from the ORFs having the nucleotide sequence represented by SEQ ID NO: 77611.

[9012] The probes having the nucleotide sequence represented by SEQ ID NOS: 108134, 108135, 108136, 108137, 108138, 108139, 108140, 108141, 108142, 108143, 108144 were selected from the ORFs having the nucleotide sequence represented by SEQ ID NO: 77612.

[9013] The probes having the nucleotide sequence represented by SEQ ID NOS: 108145, 108146, 108147, 108148, 108149, 108150, 108151, 108152, 108153, 108154, 108155 were selected from the ORFs having the nucleotide sequence represented by SEQ ID NO: 77613.

[9014] The probes having the nucleotide sequence represented by SEQ ID NOS: 108156, 108157, 108158, 108159, 108160, 108161, 108162, 108163, 108164, 108165, 108166 were selected from the ORFs having the nucleotide sequence represented by SEQ ID NO: 77614.

[9015] The probes having the nucleotide sequence represented by SEQ ID NOS: 108167, 108168, 108169, 108170, 108171, 108172, 108173, 108174, 108175, 108176, 108177 were selected from the ORFs having the nucleotide sequence represented by SEQ ID NO: 77615.

[9016] The probes having the nucleotide sequence represented by SEQ ID NOS: 108178, 108179, 108180, 108181, 108182, 108183, 108184, 108185, 108186, 108187, 108188 were selected from the ORFs having the nucleotide sequence represented by SEQ ID NO: 77616.

[9017] The probes having the nucleotide sequence represented by SEQ ID NOS: 108189, 108190, 108191, 108192, 108193, 108194, 108195, 108196, 108197, 108198, 108199 were selected from the ORFs having the nucleotide sequence represented by SEQ ID NO: 77617.

[9018] The probes having the nucleotide sequence represented by SEQ ID NOS: 108200, 108201, 108202, 108203, 108204, 108205, 108206, 108207, 108208, 108209, 108210 were selected from the ORFs having the nucleotide sequence represented by SEQ ID NO: 77618.

[9019] The probes having the nucleotide sequence represented by SEQ ID NOS: 108211, 108212, 108213, 108214, 108215, 108216, 108217, 108218, 108219, 108220, 108221 were selected from the ORFs having the nucleotide sequence represented by SEQ ID NO: 77619.

[9020] The probes having the nucleotide sequence represented by SEQ ID NOS: 108222, 108223, 108224, 108225, 108226, 108227, 108228, 108229, 108230, 108231, 108232 were selected from the ORFs having the nucleotide sequence represented by SEQ ID NO: 77620.

[9021] The probes having the nucleotide sequence represented by SEQ ID NOS: 108233, 108234, 108235, 108236, 108237, 108238, 108239, 108240, 108241, 108242, 108243 were selected from the ORFs having the nucleotide sequence represented by. SEQ ID NO: 77621.

[9022] The probes having the nucleotide sequence represented by SEQ ID NOS: 108244, 108245, 108246, 108247, 108248, 108249, 108250, 108251, 108252, 108253, 108254 were selected from the ORFs having the nucleotide sequence represented by SEQ ID NO: 77622.

[9023] The probes having the nucleotide sequence represented by SEQ ID NOS: 108255, 108256, 108257, 108258, 108259, 108260, 108261, 108262, 108263, 108264, 108265, 108266, 108267, 108268, 108269, 108270, 108271, 108272, 108273, 108274, 108275, 108276 were selected from the ORFs having the nucleotide sequence represented by SEQ ID NO: 77623.

[9024] The probes having the nucleotide sequence represented by SEQ ID NOS: 108277, 108278, 108279, 108280, 108281, 108282, 108283, 108284, 108285, 108286, 108287 were selected from the ORFs having the nucleotide sequence represented by SEQ ID NO: 77624.

[9025] The probes having the nucleotide sequence represented by SEQ ID NOS: 108288, 108289, 108290, 108291, 108292, 108293, 108294, 108295, 108296, 108297, 108298 were selected from the ORFs having the nucleotide sequence represented by SEQ ID NO: 77625.

[9026] The probes having the nucleotide sequence represented by SEQ ID NOS: 108299, 108300, 108301, 108302, 108303, 108304, 108305, 108306, 108307, 108308, 108309 were selected from the ORFs having the nucleotide sequence represented by SEQ ID NO: 77626.

[9027] The probes having the nucleotide sequence represented by SEQ ID NOS: 108310, 108311, 108312, 108313, 108314, 108315, 108316, 108317, 108318, 108319, 108320 were selected from the ORFs having the nucleotide sequence represented by SEQ ID NO: 77627.

[9028] The probes having the nucleotide sequence represented by SEQ ID NOS: 108321, 108322, 108323, 108324, 108325, 108326, 108327, 108328, 108329, 108330, 108331 were selected from the ORFs having the nucleotide sequence represented by SEQ ID NO: 77628.

[9029] The probes having the nucleotide sequence represented by SEQ ID NOS: 108332, 108333, 108334, 108335, 108336, 108337, 108338, 108339, 108340, 108341, 108342 were selected from the ORFs having the nucleotide sequence represented by SEQ ID NO: 77629.

[9030] The probes having the nucleotide sequence represented by SEQ ID NOS: 108343, 108344, 108345, 108346, 108347, 108348, 108349, 108350, 108351, 108352, 108353 were selected from the ORFs having the nucleotide sequence represented by SEQ ID NO: 77630.

[9031] The probes having the nucleotide sequence represented by SEQ ID NOS: 108354, 108355, 108356, 108357, 108358, 108359, 108360, 108361, 108362, 108363, 108364 were selected from the ORFs having the nucleotide sequence represented by SEQ ID NO: 77631.

[9032] The probes having the nucleotide sequence represented by SEQ ID NOS: 108365, 108366, 108367, 108368, 108369, 108370, 108371, 108372, 108373, 108374, 108375 were selected from the ORFs having the nucleotide sequence represented by SEQ ID NO: 77632.

[9033] The probes having the nucleotide sequence represented by SEQ ID NOS: 108376, 108377, 108378, 108379, 108380, 108381, 108382, 108383, 108384, 108385, 108386 were selected from the ORFs having the nucleotide sequence represented by SEQ ID NO: 77633.

[9034] The probes having the nucleotide sequence represented by SEQ ID NOS: 108387, 108388, 108389, 108390, 108391, 108392, 108393, 108394, 108395, 108396, 108397 were selected from the ORFs having the nucleotide sequence represented by SEQ ID NO: 77634.

[9035] The probes having the nucleotide sequence represented by SEQ ID NOS: 108398, 108399, 108400, 108401, 108402, 108403, 108404, 108405, 108406, 108407, 108408 were selected from the ORFs having the nucleotide sequence represented by SEQ ID NO: 77635.

[9036] The probes having the nucleotide sequence represented by SEQ ID NOS: 108409, 108410, 108411, 108412, 108413, 108414, 108415, 108416, 108417, 108418, 108419 were selected from the ORFs having the nucleotide sequence represented by SEQ ID NO: 77636.

[9037] The probes having the nucleotide sequence represented by SEQ ID NOS: 108420, 108421, 108422, 108423, 108424, 108425, 108426, 108427, 108428, 108429, 108430 were selected from the ORFs having the nucleotide sequence represented by SEQ ID NO: 77637.

[9038] The probes having the nucleotide sequence represented by SEQ ID NOS: 108431, 108432, 108433, 108434, 108435, 108436, 108437, 108438, 108439, 108440, 108441 were selected from the ORFs having the nucleotide sequence represented by SEQ ID NO: 77638.

[9039] The probes having the nucleotide sequence represented by SEQ ID NOS: 108442, 108443, 108444, 108445, 108446, 108447, 108448, 108449, 108450, 108451, 108452 were selected from the ORFs having the nucleotide sequence represented by SEQ ID NO: 77639.

[9040] The probes having the nucleotide sequence represented by SEQ ID NOS: 108453, 108454, 108455, 108456, 108457, 108458, 108459, 108460, 108461, 108462, 108463 were selected from the ORFs having the nucleotide sequence represented by SEQ ID NO: 77640.

[9041] The probes having the nucleotide sequence represented by SEQ ID NOS: 108464, 108465, 108466, 108467, 108468, 108469, 108470, 108471, 108472, 108473, 108474 were selected from the ORFs having the nucleotide sequence represented by SEQ ID NO: 77641.

[9042] The probes having the nucleotide sequence represented by SEQ ID NOS: 108475, 108476, 108477, 108478, 108479, 108480, 108481, 108482, 108483, 108484, 108485 were selected from the ORFs having the nucleotide sequence represented by SEQ ID NO: 77642.

[9043] The probes having the nucleotide sequence represented by SEQ ID NOS: 108486, 108487, 108488, 108489, 108490, 108491, 108492, 108493, 108494, 108495, 108496 were selected from the ORFs having the nucleotide sequence represented by SEQ ID NO: 77643.

[9044] The probes having the nucleotide sequence represented by SEQ ID NOS: 108497, 108498, 108499, 108500, 108501, 108502, 108503, 108504, 108505, 108506, 108507 were selected from the ORFs having the nucleotide sequence represented by SEQ ID NO: 77644.

[9045] The probes having the nucleotide sequence represented by SEQ ID NOS: 108508, 108509, 108510, 108511, 108512, 108513, 108514, 108515, 108516, 108517, 108518 were selected from the ORFs having the nucleotide sequence represented by SEQ ID NO: 77645.

[9046] The probes having the nucleotide sequence represented by SEQ ID NOS: 108519, 108520, 108521, 108522, 108523, 108524, 108525, 108526, 108527, 108528, 108529 were selected from the ORFs having the nucleotide sequence represented by SEQ ID NO: 77646.

[9047] The probes having the nucleotide sequence represented by SEQ ID NOS: 108530, 108531, 108532, 108533, 108534, 108535, 108536, 108537, 108538, 108539, 108540 were selected from the ORFs having the nucleotide sequence represented by SEQ ID NO: 77647.

[9048] The probes having the nucleotide sequence represented by SEQ ID NOS: 108541, 108.542, 108543, 108544, 108545, 108546, 108547, 108548, 108549, 108550, 108551 were selected from the ORFs having the nucleotide sequence represented by SEQ ID NO: 77648.

[9049] The probes having the nucleotide sequence represented by SEQ ID NOS: 108552, 108553, 108554, 108555, 108556, 108557, 108558, 108559, 108560, 108561, 108562 were selected from the ORFs having the nucleotide sequence represented by SEQ ID NO: 77649.

[9050] The probes having the nucleotide sequence represented by SEQ ID NOS: 108563, 108564, 108565, 108566, 108567, 108568, 108569, 108570, 108571, 108572, 108573 were selected from the ORFs having the nucleotide sequence represented by SEQ ID NO: 77650.

[9051] The probes having the nucleotide sequence represented by SEQ ID NOS: 108574, 108575, 108576, 108577, 108578, 108579, 108580, 108581, 108582, 108583, 108584 were selected from the ORFs having the nucleotide sequence represented by SEQ ID NO: 77651.

[9052] The probes having the nucleotide sequence represented by SEQ ID NOS: 108585, 108586, 108587, 108588, 108589, 108590, 108591, 108592, 108593, 108594, 108595 were selected from the ORFs having the nucleotide sequence represented by SEQ ID NO: 77652.

[9053] The probes having the nucleotide sequence represented by SEQ ID NOS: 108596, 108597, 108598, 108599, 108600, 108601, 108602, 108603, 108604, 108605, 108606 were selected from the ORFs having the nucleotide sequence represented by SEQ ID NO: 77653.

[9054] The probes having the nucleotide sequence represented by SEQ ID NOS: 108607, 108608, 108609, 108610, 108611, 108612, 108613, 108614, 108615, 108616, 108617 were selected from the ORFs having the nucleotide sequence represented by SEQ ID NO: 77654.

[9055] The probes having the nucleotide sequence represented by SEQ ID NOS: 108618, 108619, 108620, 108621, 108622, 108623, 108624, 108625, 108626, 108627, 108628 were selected from the ORFs having the nucleotide sequence represented by SEQ ID NO: 77655.

[9056] The probes having the nucleotide sequence represented by SEQ ID NOS: 108629, 108630, 108631, 108632, 108633, 108634, 108635, 108636, 108637, 108638, 108639 were selected from the ORFs having the nucleotide sequence represented by SEQ ID NO: 77656.

[9057] The probes having the nucleotide sequence represented by SEQ ID NOS: 108640, 108641, 108642, 108643, 108644, 108645, 108646, 108647, 108648, 108649, 108650 were selected from the ORFs having the nucleotide sequence represented by SEQ ID NO: 77657.

[9058] The probes having the nucleotide sequence represented by SEQ ID NOS: 108651, 108652, 108653, 108654, 108655, 108656, 108657, 108658, 108659, 108660, 108661 were selected from the ORFs having the nucleotide sequence represented by SEQ ID NO: 77658.

[9059] The probes having the nucleotide sequence represented by SEQ ID NOS: 108662, 108663, 108664, 108665, 108666, 108667, 108668, 108669, 108670, 108671, 108672 were selected from the ORFs having the nucleotide sequence represented by SEQ ID NO: 77659.

[9060] The probes having the nucleotide sequence represented by SEQ ID NOS: 108673, 108674, 108675, 108676, 108677, 108678, 108679, 108680, 108681, 108682, 108683 were selected from the ORFs having the nucleotide sequence represented by SEQ ID NO: 77660.

[9061] The probes having the nucleotide sequence represented by SEQ ID NOS: 108684, 108685, 108686, 108687, 108688, 108689, 108690, 108691, 108692, 108693, 108694 were selected from the ORFs having the nucleotide sequence represented by SEQ ID NO: 77661.

[9062] The probes having the nucleotide sequence represented by SEQ ID NOS: 108695, 108696, 108697, 108698, 108699, 108700, 108701, 108702, 108703, 108704, 108705 were selected from the ORFs having the nucleotide sequence represented by SEQ ID NO: 77662.

[9063] The probes having the nucleotide sequence represented by SEQ ID NOS: 108706, 108707, 108708, 108709, 108710, 108711, 108712, 108713, 108714, 108715, 108716 were selected from the ORFs having the nucleotide sequence represented by SEQ ID NO: 77663.

[9064] The probes having the nucleotide sequence represented by SEQ ID NOS: 108717, 108718, 108719, 108720, 108721, 108722, 108723, 108724, 108725, 108726, 108727 were selected from the ORFs having the nucleotide sequence represented by SEQ ID NO: 77664.

[9065] The probes having the nucleotide sequence represented by SEQ ID NOS: 108728, 108729, 108730, 108731, 108732, 108733, 108734, 108735, 108736, 108737, 108738 were selected from the ORFs having the nucleotide sequence represented by SEQ ID NO: 77665.

[9066] The probes having the nucleotide sequence represented by SEQ ID NOS: 108739, 108740, 108741, 108742, 108743, 108744, 108745, 108746, 108747, 108748, 108749 were selected from the ORFs having the nucleotide sequence represented by SEQ ID NO: 77666.

[9067] The probes having the nucleotide sequence represented by SEQ ID NOS: 108750, 108751, 108752, 108753, 108754, 108755, 108756, 108757, 108758, 108759, 108760 were selected from the ORFs having the nucleotide sequence represented by SEQ ID NO: 77667.

[9068] The probes having the nucleotide sequence represented by SEQ ID NOS: 108761, 108762, 108763, 108764, 108765, 108766, 108767, 108768, 108769, 108770, 108771 were selected from the ORFs having the nucleotide sequence represented by SEQ ID NO: 77668.

[9069] The probes having the nucleotide sequence represented by SEQ ID NOS: 108772, 108773, 108774, 108775, 108776, 108777, 108778, 108779, 108780, 108781, 108782 were selected from the ORFs having the nucleotide sequence represented by SEQ ID NO: 77669.

[9070] The probes having the nucleotide sequence represented by SEQ ID NOS: 108783, 108784, 108785, 108786, 108787, 108788, 108789, 108790, 108791, 108792, 108793 were selected from the ORFs having the nucleotide sequence represented by SEQ ID NO: 77670.

[9071] The probes having the nucleotide sequence represented by SEQ ID NOS: 108794, 108795, 108796, 108797, 108798, 108799, 108800, 108801, 108802, 108803, 108804 were selected from the ORFs having the nucleotide sequence represented by SEQ ID NO: 77671.

[9072] The probes having the nucleotide sequence represented by SEQ ID NOS: 108805, 108806, 108807, 108808, 108809, 108810, 108811, 108812, 108813, 108814, 108815 were selected from the ORFs having the nucleotide sequence represented by SEQ ID NO: 77672.

[9073] The probes having the nucleotide sequence represented by SEQ ID NOS: 108816, 108817, 108818, 108819, 108820, 108821, 108822, 108823, 108824, 108825, 108826 were selected from the ORFs having the nucleotide sequence represented by SEQ ID NO: 77673.

[9074] The probes having the nucleotide sequence represented by SEQ ID NOS: 108827, 108828, 108829, 108830, 108831, 108832, 108833, 108834, 108835, 108836, 108837 were selected from the ORFs having the nucleotide sequence represented by SEQ ID NO: 77674.

[9075] The probes having the nucleotide sequence represented by SEQ ID NOS: 108838, 108839, 108840, 108841, 108842, 108843, 108844, 108845, 108846, 108847, 108848 were selected from the ORFs having the nucleotide sequence represented by SEQ ID NO: 77675.

[9076] The probes having the nucleotide sequence represented by SEQ ID NOS: 108849, 108850, 108851, 108852, 108853, 108854, 108855, 108856, 108857, 108858, 108859 were selected from the ORFs having the nucleotide sequence represented by SEQ ID NO: 77676.

[9077] The probes having the nucleotide sequence represented by SEQ ID NOS: 108860, 108861, 108862, 108863, 108864, 108865, 108866, 108867, 108868, 108869, 108870 were selected from the ORFs having the nucleotide sequence represented by SEQ ID NO: 77677.

[9078] The probes having the nucleotide sequence represented by SEQ ID NOS: 108871, 108872, 108873, 108874, 108875, 108876, 108877, 108878, 108879, 108880, 108881 were selected from the ORFs having the nucleotide sequence represented by SEQ ID NO: 77678.

[9079] The probes having the nucleotide sequence represented by SEQ ID NOS: 108882, 108883, 108884, 108885, 108886, 108887, 108888, 108889, 108890, 10889.1, 108892 were selected from the ORFs having the nucleotide sequence represented by SEQ ID NO: 77679.

[9080] The probes having the nucleotide sequence represented by SEQ ID NOS: 108893, 108894, 108895, 108896, 108897, 108898, 108899, 108900, 108901, 108902, 108903 were selected from the ORFs having the nucleotide sequence represented by SEQ ID NO: 77680.

[9081] The probes having the nucleotide sequence represented by SEQ ID NOS: 108904, 108905, 108906, 108907, 108908, 108909, 108910, 108911, 108912, 108913, 108914 were selected from the ORFs having the nucleotide sequence represented by SEQ ID NO: 77681.

[9082] The probes having the nucleotide sequence represented by SEQ ID NOS: 108915, 108916, 108917, 108918, 108919, 108920, 108921, 108922, 108923, 108924, 108925 were selected from the ORFs having the nucleotide sequence represented by SEQ ID NO: 77682.

[9083] The probes having the nucleotide sequence represented by SEQ ID NOS: 108926, 108927, 108928, 108929, 108930, 108931, 108932, 108933, 108934, 108935, 108936 were selected from the ORFs having the nucleotide sequence represented by SEQ ID NO: 77683.

[9084] The probes having the nucleotide sequence represented by SEQ ID NOS: 108937, 108938, 108939, 108940, 108941, 108942, 108943, 108944, 108945, 108946, 108947 were selected from the ORFs having the nucleotide sequence represented by SEQ ID NO: 77684.

[9085] The probes having the nucleotide sequence represented by SEQ ID NOS: 108948, 108949, 108950, 108951, 108952, 108953, 108954, 108955, 108956, 108957, 108958 were selected from the ORFs having the nucleotide sequence represented by SEQ ID NO: 77685.

[9086] The probes having the nucleotide sequence represented by SEQ ID NOS: 108959, 108960, 108961, 108962, 108963, 108964, 108965, 108966, 108967, 108968, 108969 were selected from the ORFs having the nucleotide sequence represented by SEQ ID NO: 77686.

[9087] The probes having the nucleotide sequence represented by SEQ ID NOS: 108970, 108971, 108972, 108973, 108974, 108975, 108976, 108977, 108978, 108979, 108980 were selected from the ORFs having the nucleotide sequence represented by SEQ ID NO: 77687.

[9088] The probes having the nucleotide sequence represented by SEQ ID NOS: 108981, 108982, 108983, 108984, 108985, 108986, 108987, 108988, 108989, 108990, 108991 were selected from the ORFs having the nucleotide sequence represented by SEQ ID NO: 77688.

[9089] The probes having the nucleotide sequence represented by SEQ ID NOS: 108992, 108993, 108994, 108995, 108996, 108997, 108998, 108999, 109000, 109001, 109002 were selected from the ORFs having the nucleotide sequence represented by SEQ ID NO: 77689.

[9090] The probes having the nucleotide sequence represented by SEQ ID NOS: 109003, 109004, 109005, 109006, 109007, 109008, 109009, 109010, 109011, 109012, 109013 were selected from the ORFs having the nucleotide sequence represented by SEQ ID NO: 77690.

[9091] The probes having the nucleotide sequence represented by SEQ ID NOS: 109014, 109015, 109016, 109017, 109018, 109019, 109020, 109021, 109022, 109023, 109024 were selected from the ORFs having the nucleotide sequence represented by SEQ ID NO: 77691.

[9092] The probes having the nucleotide sequence represented by SEQ ID NOS: 109025, 109026, 109027, 109028, 109029, 109030, 109031, 109032, 109033, 109034, 109035 were selected from the ORFs having the nucleotide sequence represented by SEQ ID NO: 77692.

[9093] The probes having the nucleotide sequence represented by SEQ ID NOS: 109036, 109037, 109038, 109039, 109040, 109041, 109042, 109043, 109044, 109045, 109046, 109047, 109048, 109049, 109050, 109051, 109052, 109053, 109054, 109055, 109056, 109057 were selected from the ORFs having the nucleotide sequence represented by SEQ ID NO: 77693.

[9094] The probes having the nucleotide sequence represented by SEQ ID NOS: 109058, 109059, 109060, 109061, 109062, 109063, 109064, 109065, 109066, 109067, 109068 were selected from the ORFs having the nucleotide sequence represented by SEQ ID NO: 77694.

[9095] The probes having the nucleotide sequence represented by SEQ ID NOS: 109069, 109070, 109071, 109072, 109073, 109074, 109075, 109076, 109077, 109078, 109079 were selected from the ORFs having the nucleotide sequence represented by SEQ ID NO: 77695.

[9096] The probes having the nucleotide sequence represented by SEQ ID NOS: 109080, 109081, 109082, 109083, 109084, 109085, 109086, 109087, 109088, 109089, 109090 were selected from the ORFs having the nucleotide sequence represented by SEQ ID NO: 77696.

[9097] The probes having the nucleotide sequence represented by SEQ ID NOS: 109091, 109092, 109093, 109094, 109095, 109096, 109097, 109098, 109099, 109100, 109101 were selected from the ORFs having the nucleotide sequence represented by SEQ ID NO: 77697.

[9098] The probes having the nucleotide sequence represented by SEQ ID NOS: 109102, 109103, 109104, 109105, 109106, 109107, 109108, 109109, 109110, 109111, 109112 were selected from the ORFs having the nucleotide sequence represented by SEQ ID NO: 77698.

[9099] The probes having the nucleotide sequence represented by SEQ ID NOS: 109113, 109114, 109115, 109116, 109117, 109118, 109119, 109120, 109121, 109122, 109123 were selected from the ORFs having the nucleotide sequence represented by SEQ ID NO: 77699.

[9100] The probes having the nucleotide sequence represented by SEQ ID NOS: 109124, 109125, 109126, 109127, 109128, 109129, 109130, 109131, 109132, 109133, 109134 were selected from the ORFs having the nucleotide sequence represented by SEQ ID NO: 77700.

[9101] The probes having the nucleotide sequence represented by SEQ ID NOS: 109135, 109136, 109137, 109138, 109139, 109140, 109141, 109142, 109143, 109144, 109145 were selected from the ORFs having the nucleotide sequence represented by SEQ ID NO: 77701.

[9102] The probes having the nucleotide sequence represented by SEQ ID NOS: 109146, 109147, 109148, 109149, 109150, 109151, 109152, 109153, 109154, 109155, 109156 were selected from the ORFs having the nucleotide sequence represented by SEQ ID NO: 77702.

[9103] The probes having the nucleotide sequence represented by SEQ ID NOS: 109157, 109158, 109159, 109160, 109161, 109162, 109163, 109164, 109165, 109166, 109167 were selected from the ORFs having the nucleotide sequence represented by SEQ ID NO: 77703.

[9104] The probes having the nucleotide sequence represented by SEQ ID NOS: 109168, 109169, 109170, 109171, 109172, 109173, 109174, 109175, 109176, 109177, 109178 were selected from the ORFs having the nucleotide sequence represented by SEQ ID NO: 77704.

[9105] The probes having the nucleotide sequence represented by SEQ ID NOS: 109179, 109180, 109181, 109182, 109183, 109184, 109185, 109186, 109187, 109188, 109189 were selected from the ORFs having the nucleotide sequence represented by SEQ ID NO: 77705.

[9106] The probes having the nucleotide sequence represented by SEQ ID NOS: 109190, 109191, 109192, 109193, 109194, 109195, 109196, 109197, 109198, 109199, 109200 were selected from the ORFs having the nucleotide sequence represented by SEQ ID NO: 77706.

[9107] The probes having the nucleotide sequence represented by SEQ ID NOS: 109201, 109202, 109203, 109204, 109205, 109206, 109207, 109208, 109209, 109210, 109211 were selected from the ORFs having the nucleotide sequence represented by SEQ ID NO: 77707.

[9108] The probes having the nucleotide sequence represented by SEQ ID NOS: 109212, 109213, 109214, 109215, 109216, 109217, 109218, 109219, 109220, 109221, 109222 were selected from the ORFs having the nucleotide sequence represented by SEQ ID NO: 77708.

[9109] The probes having the nucleotide sequence represented by SEQ ID NOS: 109223, 109224, 109225, 109226, 109227, 109228, 109229, 109230, 109231, 109232, 109233 were selected from the ORFs having the nucleotide sequence represented by SEQ ID NO: 77709.

[9110] The probes having the nucleotide sequence represented by SEQ ID NOS: 109234, 109235, 109236, 109237, 109238, 109239, 109240, 109241, 109242, 109243, 109244 were selected from the ORFs having the nucleotide sequence represented by SEQ ID NO: 77710.

[9111] The probes having the nucleotide sequence represented by SEQ ID NOS: 109245, 109246, 109247, 109248, 109249, 109250, 109251, 109252, 109253, 109254, 109255 were selected from the ORFs having the nucleotide sequence represented by SEQ ID NO: 77711.

[9112] The probes having the nucleotide sequence represented by SEQ ID NOS: 109256, 109257, 109258, 109259, 109260, 109261, 109262, 109263, 109264, 109265, 109266 were selected from the ORFs having the nucleotide sequence represented by SEQ ID NO: 77712.

[9113] The probes having the nucleotide sequence represented by SEQ ID NOS: 109267, 109268, 109269, 109270, 109271, 109272, 109273, 109274, 109275, 109276, 109277 were selected from the ORFs having the nucleotide sequence represented by SEQ ID NO: 77713.

[9114] The probes having the nucleotide sequence represented by SEQ ID NOS: 109278, 109279, 109280, 109281, 109282, 109283, 109284, 109285, 109286, 109287, 109288 were selected from the ORFs having the nucleotide sequence represented by SEQ ID NO: 77714.

[9115] The probes having the nucleotide sequence represented by SEQ ID NOS: 109289, 109290, 109291, 109292, 109293, 109294, 109295, 109296, 109297, 109298, 109299 were selected from the ORFs having the nucleotide sequence represented by SEQ ID NO: 77715.

[9116] The probes having the nucleotide sequence represented by SEQ ID NOS: 109300, 109301, 109302, 109303, 109304, 109305, 109306, 109307, 109308, 109309, 109310 were selected from the ORFs having the nucleotide sequence represented by SEQ ID NO: 77716.

[9117] The probes having the nucleotide sequence represented by SEQ ID NOS: 109311, 109312, 109313, 109314, 109315, 109316, 109317, 109318, 109319, 109320, 109321 were selected from the ORFs having the nucleotide sequence represented by SEQ ID NO: 77717.

[9118] The probes having the nucleotide sequence represented by SEQ ID NOS: 109322, 109323, 109324, 109325, 109326, 109327, 109328, 109329, 109330, 109331, 109332 were selected from the ORFs having the nucleotide sequence represented by SEQ ID NO: 77718.

[9119] The probes having the nucleotide sequence represented by SEQ ID NOS: 109333, 109334, 109335, 109336, 109337, 109338, 109339, 109340, 109341, 109342, 109343 were selected from the ORFs having the nucleotide sequence represented by SEQ ID NO: 77719.

[9120] The probes having the nucleotide sequence represented by SEQ ID NOS: 109344, 109345, 109346, 109347, 109348, 109349, 109350, 109351, 109352, 109353, 109354 were selected from the ORFs having the nucleotide sequence represented by SEQ ID NO: 77720.

[9121] The probes having the nucleotide sequence represented by SEQ ID NOS: 109355, 109356, 109357, 109358, 109359, 109360, 109361, 109362, 109363, 109364, 109365 were selected from the ORFs having the nucleotide sequence represented by SEQ ID NO: 77721.

[9122] The probes having the nucleotide sequence represented by SEQ ID NOS: 109366, 109367, 109368, 109369, 109370, 109371, 109372, 109373, 109374, 109375, 109376 were selected from the ORFs having the nucleotide sequence represented by SEQ ID NO: 77722.

[9123] The probes having the nucleotide sequence represented by SEQ ID NOS: 109377, 109378, 109379, 109380, 109381, 109382, 109383, 109384, 109385, 109386, 109387 were selected from the ORFs having the nucleotide sequence represented by SEQ ID NO: 77723.

[9124] The probes having the nucleotide sequence represented by SEQ ID NOS: 109388, 109389, 109390, 109391, 109392, 109393, 109394, 109395, 109396, 109397, 109398 were selected from the ORFs having the nucleotide sequence represented by SEQ ID NO: 77724.

[9125] The probes having the nucleotide sequence represented by SEQ ID NOS: 109399, 109400, 109401, 109402, 109403, 109404, 109405, 109406, 109407, 109408, 109409 were selected from the ORFs having the nucleotide sequence represented by SEQ ID NO: 77725.

[9126] The probes having the nucleotide sequence represented by SEQ ID NOS: 109410, 109411, 109412, 109413, 109414, 109415, 109416, 109417, 109418, 109419, 109420 were selected from the ORFs having the nucleotide sequence represented by SEQ ID NO: 77726.

[9127] The probes having the nucleotide sequence represented by SEQ ID NOS: 109421, 109422, 109423, 109424, 109425, 109426, 109427, 109428, 109429, 109430, 109431 were selected from the ORFs having the nucleotide sequence represented by SEQ ID NO: 77727.

[9128] The probes having the nucleotide sequence represented by SEQ ID NOS: 109432, 109433, 109434, 109435, 109436, 109437, 109438, 109439, 109440, 109441, 109442 were selected from the ORFs having the nucleotide sequence represented by SEQ ID NO: 77728.

[9129] The probes having the nucleotide sequence represented by SEQ ID NOS: 109443, 109444, 109445, 109446, 109447, 109448, 109449, 109450, 109451, 109452, 109453 were selected from the ORFs having the nucleotide sequence represented by SEQ ID NO: 77729.

[9130] The probes having the nucleotide sequence represented by SEQ ID NOS: 109454, 109455, 109456, 109457, 109458, 109459, 109460, 109461, 109462, 109463, 109464 were selected from the ORFs having the nucleotide sequence represented by SEQ ID NO: 77730.

[9131] The probes having the nucleotide sequence represented by SEQ ID NOS: 109465, 109466, 109467, 109468, 109469, 109470, 109471, 109472, 109473, 109474, 109475 were selected from the ORFs having the nucleotide sequence represented by SEQ ID NO: 77731.

[9132] The probes having the nucleotide sequence represented by SEQ ID NOS: 109476, 109477, 109478, 109479, 109480, 109481, 109482, 109483, 109484, 109485, 109486 were selected from the ORFs having the nucleotide sequence represented by SEQ ID NO: 77732.

[9133] The probes having the nucleotide sequence represented by SEQ ID NOS: 109487, 109488, 109489, 109490, 109491, 109492, 109493, 109494, 109495, 109496, 109497 were selected from the ORFs having the nucleotide sequence represented by SEQ ID NO: 77733.

[9134] The probes having the nucleotide sequence represented by SEQ ID NOS: 109498, 109499, 109500, 109501, 109502, 109503, 109504, 109505, 109506, 109507, 109508 were selected from the ORFs having the nucleotide sequence represented by SEQ ID NO: 77734.

[9135] The probes having the nucleotide sequence represented by SEQ ID NOS: 109509, 109510, 109511, 109512, 109513, 109514, 109515, 109516, 109517, 109518, 109519 were selected from the ORFs having the nucleotide sequence represented by SEQ ID NO: 77735.

[9136] The probes having the nucleotide sequence represented by SEQ ID NOS: 109520, 109521, 109522, 109523, 109524, 109525, 109526, 109527, 109528, 109529, 109530, 109531, 109532, 109533, 109534, 109535, 109536, 109537, 109538, 109539, 109540, 109541 were selected from the ORFs having the nucleotide sequence represented by SEQ ID NO: 77736.

[9137] The probes having the nucleotide sequence represented by SEQ ID NOS: 109542, 109543, 109544, 109545, 109546, 109547, 109548, 109549, 109550, 109551, 109552 were selected from the ORFs having the nucleotide sequence represented by SEQ ID NO: 77737.

[9138] The probes having the nucleotide sequence represented by SEQ ID NOS: 109553, 109554, 109555, 109556, 109557, 109558, 109559, 109560, 109561, 109562, 109563 were selected from the ORFs having the nucleotide sequence represented by SEQ ID NO: 77738.

[9139] The probes having the nucleotide sequence represented by SEQ ID NOS: 109564, 109565, 109566, 109567, 109568, 109569, 109570, 109571, 109572, 109573, 109574 were selected from the ORFs having the nucleotide sequence represented by SEQ ID NO: 77739.

[9140] The probes having the nucleotide sequence represented by SEQ ID NOS: 109575, 109576, 109577, 109578, 109579, 109580, 109581, 109582, 109583, 109584, 109585 were selected from the ORFs having the nucleotide sequence represented by SEQ ID NO: 77740.

[9141] The probes having the nucleotide sequence represented by SEQ ID NOS: 109586, 109587, 109588, 109589, 109590, 109591, 109592, 109593, 109594, 109595, 109596 were selected from the ORFs having the nucleotide sequence represented by SEQ ID NO: 77741.

[9142] The probes having the nucleotide sequence represented by SEQ ID NOS: 109597, 109598, 109599, 109600, 109601, 109602, 109603, 109604, 109605, 109606, 109607 were selected from the ORFs having the nucleotide sequence represented by SEQ ID NO: 77742.

[9143] The probes having the nucleotide sequence represented by SEQ ID NOS: 109608, 109609, 109610, 109611, 109612, 109613, 109614, 109615, 109616, 109617, 109618 were selected from the ORFs having the nucleotide sequence represented by SEQ ID NO: 77743.

[9144] The probes having the nucleotide sequence represented by SEQ ID NOS: 109619, 109620, 109621, 109622, 109623, 109624, 109625, 109626, 109627, 109628, 109629 were selected from the ORFs having the nucleotide sequence represented by SEQ ID NO: 77744.

[9145] The probes having the nucleotide sequence represented by SEQ ID NOS: 109630, 109631, 109632, 109633, 109634, 109635, 109636, 109637, 109638, 109639, 109640 were selected from the ORFs having the nucleotide sequence represented by SEQ ID NO: 77745.

[9146] The probes having the nucleotide sequence represented by SEQ ID NOS: 109641, 109642, 109643, 109644, 109645, 109646, 109647, 109648, 109649, 109650, 109651 were selected from the ORFs having the nucleotide sequence represented by SEQ ID NO: 77746.

[9147] The probes having the nucleotide sequence represented by SEQ ID NOS: 109652, 109653, 109654, 109655, 109656, 109657, 109658, 109659, 109660, 109661, 109662 were selected from the ORFs having the nucleotide sequence represented by SEQ ID NO: 77747.

[9148] The probes having the nucleotide sequence represented by SEQ ID NOS: 109663, 109664, 109665, 109666, 109667, 109668, 109669, 109670, 109671, 109672, 109673 were selected from the ORFs having the nucleotide sequence represented by SEQ ID NO: 77748.

[9149] The probes having the nucleotide sequence represented by SEQ ID NOS: 109674, 109675, 109676, 109677, 109678, 109679, 109680, 109681, 109682, 109683, 109684 were selected from the ORFs having the nucleotide sequence represented by SEQ ID NO: 77749.

[9150] The probes having the nucleotide sequence represented by SEQ ID NOS: 109685, 109686, 109687, 109688, 109689, 109690, 109691, 109692, 109693, 109694, 109695 were selected from the ORFs having the nucleotide sequence represented by SEQ ID NO: 77750.

[9151] The probes having the nucleotide sequence represented by SEQ ID NOS: 109696, 109697, 109698, 109699, 109700, 109701, 109702, 109703, 109704, 109705, 109706 were selected from the ORFs having the nucleotide sequence represented by SEQ ID NO: 77751.

[9152] The probes having the nucleotide sequence represented by SEQ ID NOS: 109707, 109708, 109709, 109710, 109711, 109712, 109713, 109714, 109715, 109716, 109717 were selected from the ORFs having the nucleotide sequence represented by SEQ ID NO: 77752.

[9153] The probes having the nucleotide sequence represented by SEQ ID NOS: 109718, 109719, 109720, 109721, 109722, 109723, 109724, 109725, 109726, 109727, 109728 were selected from the ORFs having the nucleotide sequence represented by SEQ ID NO: 77753.

[9154] The probes having the nucleotide sequence represented by SEQ ID NOS: 109729, 109730, 109731, 109732, 109733, 109734, 109735, 109736, 109737, 109738, 109739 were selected from the ORFs having the nucleotide sequence represented by SEQ ID NO: 77754.

[9155] The probes having the nucleotide sequence represented by SEQ ID NOS: 109740, 109741, 109742, 109743, 109744, 109745, 109746, 109747, 109748, 109749, 109750 were selected from the ORFs having the nucleotide sequence represented by SEQ ID NO: 77755.

[9156] The probes having the nucleotide sequence represented by SEQ ID NOS: 109751, 109752, 109753, 109754, 109755, 109756, 109757, 109758, 109759, 109760, 109761 were selected from the ORFs having the nucleotide sequence represented by SEQ ID NO: 77756.

[9157] The probes having the nucleotide sequence represented by SEQ ID NOS: 109762, 109763, 109764, 109765, 109766, 109767, 109768, 109769, 109770, 109771, 109772 were selected from the ORFs having the nucleotide sequence represented by SEQ ID NO: 77757.

[9158] The probes having the nucleotide sequence represented by SEQ ID NOS: 109773, 109774, 109775, 109776, 109777, 109778, 109779, 109780, 109781, 109782, 109783 were selected from the ORFs having the nucleotide sequence represented by SEQ ID NO: 77758.

[9159] The probes having the nucleotide sequence represented by SEQ ID NOS: 109784, 109785, 109786, 109787, 109788, 109789, 109790, 109791, 109792, 109793, 109794 were selected from the ORFs having the nucleotide sequence represented by SEQ ID NO: 77759.

[9160] The probes having the nucleotide sequence represented by SEQ ID NOS: 109795, 109796, 109797, 109798, 109799, 109800, 109801, 109802, 109803, 109804, 109805 were selected from the ORFs having the nucleotide sequence represented by SEQ ID NO: 77760.

[9161] The probes having the nucleotide sequence represented by SEQ ID NOS: 109806, 109807, 109808, 109809, 109810, 109811, 109812, 109813, 109814, 109815, 109816 were selected from the ORFs having the nucleotide sequence represented by SEQ ID NO: 77761.

[9162] The probes having the nucleotide sequence represented by SEQ ID NOS: 109817, 109818, 109819, 109820, 109821, 109822, 109823, 109824, 109825, 109826, 109827 were selected from the ORFs having the nucleotide sequence represented by SEQ ID NO: 77762.

[9163] The probes having the nucleotide sequence represented by SEQ ID NOS: 109828, 109829, 109830, 109831, 109832, 109833, 109834, 109835, 109836, 109837, 109838 were selected from the ORFs having the nucleotide sequence represented by SEQ ID NO: 77763.

[9164] The probes having the nucleotide sequence represented by SEQ ID NOS: 109839, 109840, 109841, 109842, 109843, 109844, 109845, 109846, 109847, 109848, 109849 were selected from the ORFs having the nucleotide sequence represented by SEQ ID NO: 77764.

[9165] The probes having the nucleotide sequence represented by SEQ ID NOS: 109850, 109851, 109852, 109853, 109854, 109855, 109856, 109857, 109858, 109859, 109860, 109861, 109862, 109863, 109864, 109865, 109866, 109867, 109868, 109869, 109870, 109871 were selected from the ORFs having the nucleotide sequence represented by SEQ ID NO: 77765.

[9166] The probes having the nucleotide sequence represented by SEQ ID NOS: 109872, 109873, 109874, 109875, 109876, 109877, 109878, 109879, 109880, 109881, 109882 were selected from the ORFs having the nucleotide sequence represented by SEQ ID NO: 77766.

[9167] The probes having the nucleotide sequence represented by SEQ ID NOS: 109883, 109884, 109885, 109886, 109887, 109888, 109889, 109890, 109891, 109892, 109893 were selected from the ORFs having the nucleotide sequence represented by SEQ ID NO: 77767.

[9168] The probes having the nucleotide sequence represented by SEQ ID NOS: 109894, 109895, 109896, 109897, 109898, 109899, 109900, 109901, 109902, 109903, 109904 were selected from the ORFs having the nucleotide sequence represented by SEQ ID NO: 77768.

[9169] The probes having the nucleotide sequence represented by SEQ ID NOS: 109905, 109906, 109907, 109908, 109909, 109910, 109911, 109912, 109913, 109914, 109915 were selected from the ORFs having the nucleotide sequence represented by SEQ ID NO: 77769.

[9170] The probes having the nucleotide sequence represented by SEQ ID NOS: 109916, 109917, 109918, 109919, 109920, 109921, 109922, 109923, 109924, 109925, 109926 were selected from the ORFs having the nucleotide sequence represented by SEQ ID NO: 77770.

[9171] The probes having the nucleotide sequence represented by SEQ ID NOS: 109927, 109928, 109929, 109930, 109931, 109932, 109933, 109934, 109935, 109936, 109937, 109938, 109939, 109940, 109941, 109942, 109943, 109944, 109945, 109946, 109947, 109948 were selected from the ORFs having the nucleotide sequence represented by SEQ ID NO: 77771.

[9172] The probes having the nucleotide sequence represented by SEQ ID NOS: 109949, 109950, 109951, 109952, 109953, 109954, 109955, 109956, 109957, 109958, 109959 were selected from the ORFs having the nucleotide sequence represented by SEQ ID NO: 77772.

[9173] The probes having the nucleotide sequence represented by SEQ ID NOS: 109960, 109961, 109962, 109963, 109964, 109965, 109966, 109967, 109968, 109969, 109970 were selected from the ORFs having the nucleotide sequence represented by SEQ ID NO: 77773.

[9174] The probes having the nucleotide sequence represented by SEQ ID NOS: 109971, 109972, 109973, 109974, 109975, 109976, 109977, 109978, 109979, 109980, 109981 were selected from the ORFs having the nucleotide sequence represented by SEQ ID NO: 77774.

[9175] The probes having the nucleotide sequence represented by SEQ ID NOS: 109982, 109983, 109984, 109985, 109986, 109987, 109988, 109989, 109990, 109991, 109992 were selected from the ORFs having the nucleotide sequence represented by SEQ ID NO: 77775.

[9176] The probes having the nucleotide sequence represented by SEQ ID NOS: 109993, 109994, 109995, 109996, 109997, 109998, 109999, 110000, 110001, 110002, 110003 were selected from the ORFs having the nucleotide sequence represented by SEQ ID NO: 77776.

[9177] The probes having the nucleotide sequence represented by SEQ ID NOS: 110004, 110005, 110006, 110007, 110008, 110009, 110010, 110011, 110012, 110013, 110014 were selected from the ORFs having the nucleotide sequence represented by SEQ ID NO: 77777.

[9178] The probes having the nucleotide sequence represented by SEQ ID NOS: 110015, 110016, 110017, 110018, 110019, 110020, 110021, 110022, 110023, 110024, 110025 were selected from the ORFs having the nucleotide sequence represented by SEQ ID NO: 77778.

[9179] The probes having the nucleotide sequence represented by SEQ ID NOS: 110026, 110027, 110028, 110029, 110030, 110031, 110032, 110033, 110034, 110035, 110036 were selected from the ORFs having the nucleotide sequence represented by SEQ ID NO: 77779.

[9180] The probes having the nucleotide sequence represented by SEQ ID NOS: 110037, 110038, 110039, 110040, 110041, 110042, 110043, 110044, 110045, 110046, 110047 were selected from the ORFs having the nucleotide sequence represented by SEQ ID NO: 77780.

[9181] The probes having the nucleotide sequence represented by SEQ ID NOS: 110048, 110049, 110050, 110051, 110052, 110053, 110054, 110055, 110056, 110057, 110058 were selected from the ORFs having the nucleotide sequence represented by SEQ ID NO: 77781.

[9182] The probes having the nucleotide sequence represented by SEQ ID NOS: 110059, 110060, 110061, 110062, 110063, 110064, 110065, 110066, 110067, 110068, 110069 were selected from the ORFs having the nucleotide sequence represented by SEQ ID NO: 77782.

[9183] The probes having the nucleotide sequence represented by SEQ ID NOS: 110070, 110071, 110072, 110073, 110074, 110075, 110076, 110077, 110078, 110079, 110080 were selected from the ORFs having the nucleotide sequence represented by SEQ ID NO: 77783.

[9184] The probes having the nucleotide sequence represented by SEQ ID NOS: 110081, 110082, 110083, 110084, 110085, 110086, 110087, 110088, 110089, 110090, 110091 were selected from the ORFs having the nucleotide sequence represented by SEQ ID NO: 77784.

[9185] The probes having the nucleotide sequence represented by SEQ ID NOS: 110092, 110093, 110094, 110095, 110096, 110097, 110098, 110099, 110100, 110101, 110102 were selected from the ORFs having the nucleotide sequence represented by SEQ ID NO: 77785.

[9186] The probes having the nucleotide sequence represented by SEQ ID NOS: 110103, 110104, 110105, 110106, 110107, 110108, 110109, 110110, 110111, 110112, 110113 were selected from the ORFs having the nucleotide sequence represented by SEQ ID NO: 77786.

[9187] The probes having the nucleotide sequence represented by SEQ ID NOS: 110114, 110115, 110116, 110117, 110118, 110119, 110120, 110121, 110122, 110123, 110124 were selected from the ORFs having the nucleotide sequence represented by SEQ ID NO: 77787.

[9188] The probes having the nucleotide sequence represented by SEQ ID NOS: 110125, 110126, 110127, 110128, 110129, 110130, 110131, 110132, 110133, 110134, 110135 were selected from the ORFs having the nucleotide sequence represented by SEQ ID NO: 77788.

[9189] The probes having the nucleotide sequence represented by SEQ ID NOS: 110136, 110137, 110138, 110139, 110140, 110141, 110142, 110143, 110144, 110145, 110146 were selected from the ORFs having the nucleotide sequence represented by SEQ ID NO: 77789.

[9190] The probes having the nucleotide sequence represented by SEQ ID NOS: 110147, 110148, 110149, 110150, 110151, 110152, 110153, 110154, 110155, 110156, 110157 were selected from the ORFs having the nucleotide sequence represented by SEQ ID NO: 77790.

[9191] The probes having the nucleotide sequence represented by SEQ ID NOS: 110158, 110159, 110160, 110161, 110162, 110163, 110164, 110165, 110166, 110167, 110168 were selected from the ORFs having the nucleotide sequence represented by SEQ ID NO: 77791.

[9192] The probes having the nucleotide sequence represented by SEQ ID NOS: 110169, 110170, 110171, 110172, 110173, 110174, 110175, 110176, 110177, 110178, 110179 were selected from the ORFs having the nucleotide sequence represented by SEQ ID NO: 77792.

[9193] The probes having the nucleotide sequence represented by SEQ ID NOS: 110180, 110181, 110182, 110183, 110184, 110185, 110186, 110187, 110188, 110189, 110190 were selected from the ORFs having the nucleotide sequence represented by SEQ ID NO: 77793.

[9194] The probes having the nucleotide sequence represented by SEQ ID NOS: 110191, 110192, 110193, 110194, 110195, 110196, 110197, 110198, 110199, 110200, 110201 were selected from the ORFs having the nucleotide sequence represented by SEQ ID NO: 77794.

[9195] The probes having the nucleotide sequence represented by SEQ ID NOS: 110202, 110203, 110204, 110205, 110206, 110207, 110208, 110209, 110210, 110211, 110212 were selected from the ORFs having the nucleotide sequence represented by SEQ ID NO: 77795.

[9196] The probes having the nucleotide sequence represented by SEQ ID NOS: 110213, 110214, 110215, 110216, 110217, 110218, 110219, 110220, 110221, 110222, 110223 were selected from the ORFs having the nucleotide sequence represented by SEQ ID NO: 77796.

[9197] The probes having the nucleotide sequence represented by SEQ ID NOS: 110224, 110225, 110226, 110227, 110228, 110229, 110230, 110231, 110232, 110233, 110234 were selected from the ORFs having the nucleotide sequence represented by SEQ ID NO: 77797.

[9198] The probes having the nucleotide sequence represented by SEQ ID NOS: 110235, 110236, 110237, 110238, 110239, 110240, 110241, 110242, 110243, 110244, 110245 were selected from the ORFs having the nucleotide sequence represented by SEQ ID NO: 77798.

[9199] The probes having the nucleotide sequence represented by SEQ ID NOS: 110246, 110247, 110248, 110249, 110250, 110251, 110252, 110253, 110254, 110255, 110256 were selected from the ORFs having the nucleotide sequence represented by SEQ ID NO: 77799.

[9200] The probes having the nucleotide sequence represented by SEQ ID NOS: 110257, 110258, 110259, 110260, 110261, 110262, 110263, 110264, 110265, 110266, 110267 were selected from the ORFs having the nucleotide sequence represented by SEQ ID NO: 77800.

[9201] The probes having the nucleotide sequence represented by SEQ ID NOS: 110268, 110269, 110270, 110271, 110272, 110273, 110274, 110275, 110276, 110277, 110278 were selected from the ORFs having the nucleotide sequence represented by SEQ ID NO: 77801.

[9202] The probes having the nucleotide sequence represented by SEQ ID NOS: 110279, 110280, 110281, 110282, 110283, 110284, 110285, 110286, 110287, 110288, 110289 were selected from the ORFs having the nucleotide sequence represented by SEQ ID NO: 77802.

[9203] The probes having the nucleotide sequence represented by SEQ ID NOS: 110290, 110291, 110292, 110293, 110294, 110295, 110296, 110297, 110298, 110299, 110300 were selected from the ORFs having the nucleotide sequence represented by SEQ ID NO: 77803.

[9204] The probes having the nucleotide sequence represented by SEQ ID NOS: 110301, 110302, 110303, 110304, 110305, 110306, 110307, 110308, 110309, 110310, 110311 were selected from the ORFs having the nucleotide sequence represented by SEQ ID NO: 77804.

[9205] The probes having the nucleotide sequence represented by SEQ ID NOS: 110312, 110313, 110314, 110315, 110316, 110317, 110318, 110319, 110320, 110321, 110322 were selected from the ORFs having the nucleotide sequence represented by SEQ ID NO: 77805.

[9206] The probes having the nucleotide sequence represented by SEQ ID NOS: 110323, 110324, 110325, 110326, 110327, 110328, 110329, 110330, 110331, 110332, 110333 were selected from the ORFs having the nucleotide sequence represented by SEQ ID NO: 77806.

[9207] The probes having the nucleotide sequence represented by SEQ ID NOS: 110334, 110335, 110336, 110337, 110338, 110339, 110340, 110341, 110342, 110343, 110344 were selected from the ORFs having the nucleotide sequence represented by SEQ ID NO: 77807.

[9208] The probes having the nucleotide sequence represented by SEQ ID NOS: 110345, 110346, 110347, 110348, 110349, 110350, 110351, 110352, 110353, 110354, 110355 were selected from the ORFs having the nucleotide sequence represented by SEQ. ID NO: 77808.

[9209] The probes having the nucleotide sequence represented by SEQ ID NOS: 110356, 110357, 110358, 110359, 110360, 110361, 110362, 110363, 110364, 110365, 110366 were selected from the ORFs having the nucleotide sequence represented by SEQ ID NO: 77809.

[9210] The probes having the nucleotide sequence represented by SEQ ID NOS: 110367, 110368, 110369, 110370, 110371, 110372, 110373, 110374, 110375, 110376, 110377 were selected from the ORFs having the nucleotide sequence represented by SEQ ID NO: 77810.

[9211] The probes having the nucleotide sequence represented by SEQ ID NOS: 110378, 110379, 110380, 110381, 110382, 110383, 110384, 110385, 110386, 110387, 110388, 110389, 110390, 110391, 110392, 110393, 110394, 110395, 110396, 110397, 110398, 110399 were selected from the ORFs having the nucleotide sequence represented by SEQ ID NO: 77811.

[9212] The probes having the nucleotide sequence represented by SEQ ID NOS: 110400, 110401, 110402, 110403, 110404, 110405, 110406, 110407, 110408, 110409, 110410 were selected from the ORFs having the nucleotide sequence represented by SEQ ID NO: 77812.

[9213] The probes having the nucleotide sequence represented by SEQ ID NOS: 110411, 110412, 110413, 110414, 110415, 110416, 110417, 110418, 110419, 110420, 110421 were selected from the ORFs having the nucleotide sequence represented by SEQ ID NO: 77813.

[9214] The probes having the nucleotide sequence represented by SEQ ID NOS: 110422, 110423, 110424, 110425, 110426, 110427, 110428, 110429, 110430, 110431, 110432 were selected from the ORFs having the nucleotide sequence represented by SEQ ID NO: 77814.

[9215] The probes having the nucleotide sequence represented by SEQ ID NOS: 110433, 110434, 110435, 110436, 110437, 110438, 110439, 110440, 110441, 110442, 110443 were selected from the ORFs having the nucleotide sequence represented by SEQ ID NO: 77815.

[9216] The probes having the nucleotide sequence represented by SEQ ID NOS: 110444, 110445, 110446, 110447, 110448, 110449, 110450, 110451, 110452, 110453, 110454 were selected from the ORFs having the nucleotide sequence represented by SEQ ID NO: 77816.

[9217] The probes having the nucleotide sequence represented by SEQ ID NOS: 110455, 110456, 110457, 110458, 110459, 110460, 110461, 110462, 110463, 110464, 110465 were selected from the ORFs having the nucleotide sequence represented by SEQ ID NO: 77817.

[9218] The probes having the nucleotide sequence represented by SEQ ID NOS: 110466, 110467, 110468, 110469, 110470, 110471, 110472, 110473, 110474, 110475, 110476 were selected from the ORFs having the nucleotide sequence represented by SEQ ID NO: 77818.

[9219] The probes having the nucleotide sequence represented by SEQ ID NOS: 110477, 110478, 110479, 110480, 110481, 110482, 110483, 110484, 110485, 110486, 110487 were selected from the ORFs having the nucleotide sequence represented by SEQ ID NO: 77819.

[9220] The probes having the nucleotide sequence represented by SEQ ID NOS: 110488, 110489, 110490, 110491, 110492, 110493, 110494, 110495, 110496, 110497, 110498 were selected from the ORFs having the nucleotide sequence represented by SEQ ID NO: 77820.

[9221] The probes having the nucleotide sequence represented by SEQ ID NOS: 110499, 110500, 110501, 110502, 110503, 110504, 110505, 110506, 110507, 110508, 110509 were selected from the ORFs having the nucleotide sequence represented by SEQ ID NO: 77821.

[9222] The probes having the nucleotide sequence represented by SEQ ID NOS: 110510, 110511, 110512, 110513, 110514, 110515, 110516, 110517, 110518, 110519, 110520 were selected from the ORFs having the nucleotide sequence represented by SEQ ID NO: 77822.

[9223] The probes having the nucleotide sequence represented by SEQ ID NOS: 110521, 110522, 110523, 110524, 110525, 110526, 110527, 110528, 110529, 110530, 110531 were selected from the ORFs having the nucleotide sequence represented by SEQ ID NO: 77823.

[9224] The probes having the nucleotide sequence represented by SEQ ID NOS: 110532, 110533, 110534, 110535, 110536, 110537, 110538, 110539, 110540, 110541, 110542 were selected from the ORFs having the nucleotide sequence represented by SEQ ID NO: 77824.

[9225] The probes having the nucleotide sequence represented by SEQ ID NOS: 110543, 110544, 110545, 110546, 110547, 110548, 110549, 110550, 110551, 110552, 110553 were selected from the ORFs having the nucleotide sequence represented by SEQ ID NO: 77825.

[9226] The probes having the nucleotide sequence represented by SEQ ID NOS: 110554, 110555, 110556, 110557, 110558, 110559, 110560, 110561, 110562, 110563, 110564 were selected from the ORFs having the nucleotide sequence represented by SEQ ID NO: 77826.

[9227] The probes having the nucleotide sequence represented by SEQ ID NOS: 110565, 110566, 110567, 110568, 110569, 110570, 110571, 110572, 110573, 110574, 110575 were selected from the ORFs having the nucleotide sequence represented by SEQ ID NO: 77827.

[9228] The probes having the nucleotide sequence represented by SEQ ID NOS: 110576, 110577, 110578, 110579, 110580, 110581, 110582, 110583, 110584, 110585, 110586 were selected from the ORFs having the nucleotide sequence represented by SEQ ID NO: 77828.

[9229] The probes having the nucleotide sequence represented by SEQ ID NOS: 110587, 110588, 110589, 110590, 110591, 110592, 110593, 110594, 110595, 110596, 110597 were selected from the ORFs having the nucleotide sequence represented by SEQ ID NO: 77829.

[9230] The probes having the nucleotide sequence represented by SEQ ID NOS: 110598, 110599, 110600, 110601, 110602, 110603, 110604, 110605, 110606, 110607, 110608 were selected from the ORFs having the nucleotide sequence represented by SEQ ID NO: 77830.

[9231] The probes having the nucleotide sequence represented by SEQ ID NOS: 110609, 110610, 110611, 110612, 110613, 110614, 110615, 110616, 110617, 110618, 110619 were selected from the ORFs having the nucleotide sequence represented by SEQ ID NO: 77831.

[9232] The probes having the nucleotide sequence represented by SEQ ID NOS: 110620, 110621, 110622, 110623, 110624, 110625, 110626, 110627, 110628, 110629, 110630 were selected from the ORFs having the nucleotide sequence represented by SEQ ID NO: 77832.

[9233] The probes having the nucleotide sequence represented by SEQ ID NOS: 110631, 110632, 110633, 110634, 110635, 110636, 110637, 110638, 110639, 110640, 110641 were selected from the ORFs having the nucleotide sequence represented by SEQ ID NO: 77833.

[9234] The probes having the nucleotide sequence represented by SEQ ID NOS: 110642, 110643, 110644, 110645, 110646, 110647, 110648, 110649, 110650, 110651, 110652, 110653, 110654, 110655, 110656, 110657, 110658, 110659, 110660, 110661, 110662, 110663 were selected from the ORFs having the nucleotide sequence represented by SEQ ID NO: 77834.

[9235] The probes having the nucleotide sequence represented by SEQ ID NOS: 110664, 110665, 110666, 110667, 110668, 110669, 110670, 110671, 110672, 110673, 110674 were selected from the ORFs having the nucleotide sequence represented by SEQ ID NO: 77835.

[9236] The probes having the nucleotide sequence represented by SEQ ID NOS: 110675, 110676, 110677, 110678, 110679, 110680, 110681, 110682, 110683, 110684, 110685 were selected from the ORFs having the nucleotide sequence represented by SEQ ID NO: 77836.

[9237] The probes having the nucleotide sequence represented by SEQ ID NOS: 110686, 110687, 110688, 110689, 110690, 110691, 110692, 110693, 110694, 110695, 110696 were selected from the ORFs having the nucleotide sequence represented by SEQ ID NO: 77837.

[9238] The probes having the nucleotide sequence represented by SEQ ID NOS: 110697, 110698, 110699, 110700, 110701, 110702, 110703, 110704, 110705, 110706, 110707 were selected from the ORFs having the nucleotide sequence represented by SEQ ID NO: 77838.

[9239] The probes having the nucleotide sequence represented by SEQ ID NOS: 110708, 110709, 110710, 110711, 110712, 110713, 110714, 110715, 110716, 110717, 110718 were selected from the ORFs having the nucleotide sequence represented by SEQ ID NO: 77839.

[9240] The probes having the nucleotide sequence represented by SEQ ID NOS: 110719, 110720, 110721, 110722, 110723, 110724, 110725, 110726, 110727, 110728, 110729 were selected from the ORFs having the nucleotide sequence represented by SEQ ID NO: 77840.

[9241] The probes having the nucleotide sequence represented by SEQ ID NOS: 110730, 110731, 110732, 110733, 110734, 110735, 110736, 110737, 110738, 110739, 110740 were selected from the ORFs having the nucleotide sequence represented by SEQ ID NO: 77841.

[9242] The probes having the nucleotide sequence represented by SEQ ID NOS: 110741, 110742, 110743, 110744, 110745, 110746, 110747, 110748, 110749, 110750, 110751 were selected from the ORFs having the nucleotide sequence represented by SEQ ID NO: 77842.

[9243] The probes having the nucleotide sequence represented by SEQ ID NOS: 110752, 110753, 110754, 110755, 110756, 110757, 110758, 110759, 110760, 110761, 110762 were selected from the ORFs having the nucleotide sequence represented by SEQ ID NO: 77843.

[9244] The probes having the nucleotide sequence represented by SEQ ID NOS: 110763, 110764, 110765, 110766, 110767, 110768, 110769, 110770, 110771, 110772, 110773 were selected from the ORFs having the nucleotide sequence represented by SEQ ID NO: 77844.

[9245] The probes having the nucleotide sequence represented by SEQ ID NOS: 110774, 110775, 110776, 110777, 110778, 110779, 110780, 110781, 110782, 110783, 110784, 110785, 110786, 110787, 110788, 110789, 110790, 110791, 110792, 110793, 110794, 110795 were selected from the ORFs having the nucleotide sequence represented by SEQ ID NO: 77845.

[9246] The probes having the nucleotide sequence represented by SEQ ID NOS: 110796, 110797, 110798, 110799, 110800, 110801, 110802, 110803, 110804, 110805, 110806 were selected from the ORFs having the nucleotide sequence represented by SEQ ID NO: 77846.

[9247] The probes having the nucleotide sequence represented by SEQ ID NOS: 110807, 110808, 110809, 110810, 110811, 110812, 110813, 110814, 110815, 110816, 110817 were selected from the ORFs having the nucleotide sequence represented by SEQ ID NO: 77847.

[9248] The probes having the nucleotide sequence represented by SEQ ID NOS: 110818, 110819, 110820, 110821, 110822, 110823, 110824, 110825, 110826, 110827, 110828 were selected from the ORFs having the nucleotide sequence represented by SEQ ID NO: 77848.

[9249] The probes having the nucleotide sequence represented by SEQ ID NOS: 110829, 110830, 110831, 110832, 110833, 110834, 110835, 110836, 110837, 110838, 110839 were selected from the ORFs having the nucleotide sequence represented by SEQ ID NO: 77849.

[9250] The probes having the nucleotide sequence represented by SEQ ID NOS: 110840, 110841, 110842, 110843, 110844, 110845, 110846, 110847, 110848, 110849, 110850 were selected from the ORFs having the nucleotide sequence represented by SEQ ID NO: 77850.

[9251] The probes having the nucleotide sequence represented by SEQ ID NOS: 110851, 110852, 110853, 110854, 110855, 110856, 110857, 110858, 110859, 110860, 110861 were selected from the ORFs having the nucleotide sequence represented by SEQ ID NO: 77851.

[9252] The probes having the nucleotide sequence represented by SEQ ID NOS: 110862, 110863, 110864, 110865, 110866, 110867, 110868, 110869, 110870, 110871, 110872 were selected from the ORFs having the nucleotide sequence represented by SEQ ID NO: 77852.

[9253] The probes having the nucleotide sequence represented by SEQ ID NOS: 110873, 110874, 110875, 110876, 110877, 110878, 110879, 110880, 110881, 110882, 110883 were selected from the ORFs having the nucleotide sequence represented by SEQ ID NO: 77853.

[9254] The probes having the nucleotide sequence represented by SEQ ID NOS: 110884, 110885, 110886, 110887, 110888, 110889, 110890, 110891, 110892, 110893, 110894 were selected from the ORFs having the nucleotide sequence represented by SEQ ID NO: 77854.

[9255] The probes having the nucleotide sequence represented by SEQ ID NOS: 110895, 110896, 110897, 110898, 110899, 110900, 110901, 110902, 110903, 110904, 110905 were selected from the ORFs having the nucleotide sequence represented by SEQ ID NO: 77855.

[9256] The probes having the nucleotide sequence represented by SEQ ID NOS: 110906, 110907, 110908, 110909, 110910, 110911, 110912, 110913, 110914, 110915, 110916 were selected from the ORFs having the nucleotide sequence represented by SEQ ID NO: 77856.

[9257] The probes having the nucleotide sequence represented by SEQ ID NOS: 110917, 110918, 110919, 110920, 110921, 110922, 110923, 110924, 110925, 110926, 110927 were selected from the ORFs having the nucleotide sequence represented by SEQ ID NO: 77857.

[9258] The probes having the nucleotide sequence represented by SEQ ID NOS: 110928, 110929, 110930, 110931, 110932, 110933, 110934, 110935, 110936, 110937, 110938 were selected from the ORFs having the nucleotide sequence represented by SEQ ID NO: 77858.

[9259] The probes having the nucleotide sequence represented by SEQ ID NOS: 110939, 110940, 110941, 110942, 110943, 110944, 110945, 110946, 110947, 110948, 110949 were selected from the ORFs having the nucleotide sequence represented by SEQ ID NO: 77859.

[9260] The probes having the nucleotide sequence represented by SEQ ID NOS: 110950, 110951, 110952, 110953, 110954, 110955, 110956, 110957, 110958, 110959, 110960 were selected from the ORFs having the nucleotide sequence represented by SEQ ID NO: 77860.

[9261] The probes having the nucleotide sequence represented by SEQ ID NOS: 110961, 110962, 110963, 110964, 110965, 110966, 110967, 110968, 110969, 110970, 110971 were selected from the ORFs having the nucleotide sequence represented by SEQ ID NO: 77861.

[9262] The probes having the nucleotide sequence represented by SEQ ID NOS: 110972, 110973, 110974, 110975, 110976, 110977, 110978, 110979, 110980, 110981, 110982 were selected from the ORFs having the nucleotide sequence represented by SEQ ID NO: 77862.

[9263] The probes having the nucleotide sequence represented by SEQ ID NOS: 110983, 110984, 110985, 110986, 110987, 110988, 110989, 110990, 110991, 110992, 110993 were selected from the ORFs having the nucleotide sequence represented by SEQ ID NO: 77863.

[9264] The probes having the nucleotide sequence represented by SEQ ID NOS: 110994, 110995, 110996, 110997, 110998, 110999, 111000, 111001, 111002, 111003, 111004 were selected from the ORFs having the nucleotide sequence represented by SEQ ID NO: 77864.

[9265] The probes having the nucleotide sequence represented by SEQ ID NOS: 111005, 111006, 111007, 111008, 111009, 111010, 111011, 111012, 111013, 111014, 111015 were selected from the ORFs having the nucleotide sequence represented by SEQ ID NO: 77865.

[9266] The probes having the nucleotide sequence represented by SEQ ID NOS: 111016, 111017, 111018, 111019, 111020, 111021, 111022, 111023, 111024, 111025, 111026 were selected from the ORFs having the nucleotide sequence represented by SEQ ID NO: 77866.

[9267] The probes having the nucleotide sequence represented by SEQ ID NOS: 111027, 111028, 111029, 111030, 111031, 111032, 111033, 111034, 111035, 111036, 111037 were selected from the ORFs having the nucleotide sequence represented by SEQ ID NO: 77867.

[9268] The probes having the nucleotide sequence represented by SEQ ID NOS: 111038, 111039, 111040, 111041, 111042, 111043, 111044, 111045, 111046, 111047, 111048 were selected from the ORFs having the nucleotide sequence represented by SEQ ID NO: 77868.

[9269] The probes having the nucleotide sequence represented by SEQ ID NOS: 111049, 111050, 111051, 111052, 111053, 111054, 111055, 111056, 111057, 111058, 111059 were selected from the ORFs having the nucleotide sequence represented by SEQ ID NO: 77869.

[9270] The probes having the nucleotide sequence represented by SEQ ID NOS: 111060, 111061, 111062, 111063, 111064, 111065, 111066, 111067, 111068, 111069, 111070 were selected from the ORFs having the nucleotide sequence represented by SEQ ID NO: 77870.

[9271] The probes having the nucleotide sequence represented by SEQ ID NOS: 111071, 111072, 111073, 111074, 111075, 111076, 111077, 111078, 111079, 111080, 111081 were selected from the ORFs having the nucleotide sequence represented by SEQ ID NO: 77871.

[9272] The probes having the nucleotide sequence represented by SEQ ID NOS: 111082, 111083, 111084, 111085, 111086, 111087, 111088, 111089, 111090, 111091, 111092 were selected from the ORFs having the nucleotide sequence represented by SEQ ID NO: 77872.

[9273] The probes having the nucleotide sequence represented by SEQ ID NOS: 111093, 111094, 111095, 111096, 111097, 111098, 111099, 111100, 111101, 111102, 111103 were selected from the ORFs having the nucleotide sequence represented by SEQ ID NO: 77873.

[9274] The probes having the nucleotide sequence represented by SEQ ID NOS: 111104, 111105, 111106, 111107, 111108, 111109, 111110, 111111, 111112, 111113, 111114 were selected from the ORFs having the nucleotide sequence represented by SEQ ID NO: 77874.

[9275] The probes having the nucleotide sequence represented by SEQ ID NOS: 111115, 111116, 111117, 111118, 111119, 111120, 111121, 111122, 111123, 111124, 111125 were selected from the ORFs having the nucleotide sequence represented by SEQ ID NO: 77875.

[9276] The probes having the nucleotide sequence represented by SEQ ID NOS: 111126, 111127, 111128, 111129, 111130, 111131, 111132, 111133, 111134, 111135, 111136 were selected from the ORFs having the nucleotide sequence represented by SEQ ID NO: 77876.

[9277] The probes having the nucleotide sequence represented by SEQ ID NOS: 111137, 111138, 111139, 111140, 111141, 111142, 111143, 111144, 111145, 111146, 111147 were selected from the ORFs having the nucleotide sequence represented by SEQ ID NO: 77877.

[9278] The probes having the nucleotide sequence represented by SEQ ID NOS: 111148, 111149, 111150, 111151, 111152, 111153, 111154, 111155, 111156, 111157, 111158 were selected from the ORFs having the nucleotide sequence represented by SEQ ID NO: 77878.

[9279] The probes having the nucleotide sequence represented by SEQ ID NOS: 111159, 111160, 111161, 111162, 111163, 111164, 111165, 111166, 111167, 111168, 111169 were selected from the ORFs having the nucleotide sequence represented by SEQ ID NO: 77879.

[9280] The probes having the nucleotide sequence represented by SEQ ID NOS: 111170, 111171, 111172, 111173, 111174, 111175, 111176, 111177, 111178, 111179, 111180 were selected from the ORFs having the nucleotide sequence represented by SEQ ID NO: 77880.

[9281] The probes having the nucleotide sequence represented by SEQ ID NOS: 111181, 111182, 111183, 111184, 111185, 111186, 111187, 111188, 111189, 111190, 111191 were selected from the ORFs having the nucleotide sequence represented by SEQ ID NO: 77881.

[9282] The probes having the nucleotide sequence represented by SEQ ID NOS: 111192, 111193, 111194, 111195, 111196, 111197, 111198, 111199, 111200, 111201, 111202 were selected from the ORFs having the nucleotide sequence represented by SEQ ID NO: 77882.

[9283] The probes having the nucleotide sequence represented by SEQ ID NOS: 111203, 111204, 111205, 111206, 111207, 111208, 111209, 111210, 111211, 111212, 111213 were selected from the ORFs having the nucleotide sequence represented by SEQ ID NO: 77883.

[9284] The probes having the nucleotide sequence represented by SEQ ID NOS: 111214, 111215, 111216, 111217, 111218, 111219, 111220, 111221, 111222, 111223, 111224 were selected from the ORFs having the nucleotide sequence represented by SEQ ID NO: 77884.

[9285] The probes having the nucleotide sequence represented by SEQ ID NOS: 111225, 111226, 111227, 111228, 111229, 111230, 111231, 111232, 111233, 111234, 111235 were selected from the ORFs having the nucleotide sequence represented by SEQ ID NO: 77885.

[9286] The probes having the nucleotide sequence represented by SEQ ID NOS: 111236, 111237, 111238, 111239, 111240, 111241, 111242, 111243, 111244, 111245, 111246 were selected from the ORFs having the nucleotide sequence represented by SEQ ID NO: 77886.

[9287] The probes having the nucleotide sequence represented by SEQ ID NOS: 111247, 111248, 111249, 111250, 111251, 111252, 111253, 111254, 111255, 111256, 111257 were selected from the ORFs having the nucleotide sequence represented by SEQ ID NO: 77887.

[9288] The probes having the nucleotide sequence represented by SEQ ID NOS: 111258, 111259, 111260, 111261, 111262, 111263, 111264, 111265, 111266, 111267, 111268 were selected from the ORFs having the nucleotide sequence represented by SEQ ID NO: 77888.

[9289] The probes having the nucleotide sequence represented by SEQ ID NOS: 111269, 111270, 111271, 111272, 111273, 111274, 111275, 111276, 111277, 111278, 111279 were selected from the ORFs having the nucleotide sequence represented by SEQ ID NO: 77889.

[9290] The probes having the nucleotide sequence represented by SEQ ID NOS: 111280, 111281, 111282, 111283, 111284, 111285, 111286, 111287, 111288, 111289, 111290 were selected from the ORFs having the nucleotide sequence represented by SEQ ID NO: 77890.

[9291] The probes having the nucleotide sequence represented by SEQ ID NOS: 111291, 111292, 111293, 111294, 111295, 111296, 111297, 111298, 111299, 111300, 111301 were selected from the ORFs having the nucleotide sequence represented by SEQ ID NO: 77891.

[9292] The probes having the nucleotide sequence represented by SEQ ID NOS: 111302, 111303, 111304, 111305, 111306, 111307, 111308, 111309, 111310, 111311, 111312 were selected from the ORFs having the nucleotide sequence represented by SEQ ID NO: 77892.

[9293] The probes having the nucleotide sequence represented by SEQ ID NOS: 111313, 111314, 111315, 111316, 111317, 111318, 111319, 111320, 111321, 111322, 111323 were selected from the ORFs having the nucleotide sequence represented by SEQ ID NO: 77893.

[9294] The probes having the nucleotide sequence represented by SEQ ID NOS: 111324, 111325, 111326, 111327, 111328, 111329, 111330, 111331, 111332, 111333, 111334 were selected from the ORFs having the nucleotide sequence represented by SEQ ID NO: 77894.

[9295] The probes having the nucleotide sequence represented by SEQ ID NOS: 111335, 111336, 111337, 111338, 111339, 111340, 111341, 111342, 111343, 111344, 111345 were selected from the ORFs having the nucleotide sequence represented by SEQ ID NO: 77895.

[9296] The probes having the nucleotide sequence represented by SEQ ID NOS: 111346, 111347, 111348, 111349, 111350, 111351, 111352, 111353, 111354, 111355, 111356 were selected from the ORFs having the nucleotide sequence represented by SEQ ID NO: 77896.

[9297] The probes having the nucleotide sequence represented by SEQ ID NOS: 111357, 111358, 111359, 111360, 111361, 111362, 111363, 111364, 111365, 111366, 111367 were selected from the ORFs having the nucleotide sequence represented by SEQ ID NO: 77897.

[9298] The probes having the nucleotide sequence represented by SEQ ID NOS: 111368, 111369, 111370, 111371, 111372, 111373, 111374, 111375, 111376, 111377, 111378 were selected from the ORFs having the nucleotide sequence represented by SEQ ID NO: 77898.

[9299] The probes having the nucleotide sequence represented by SEQ ID NOS: 111379, 111380, 111381, 111382, 111383, 111384, 111385, 111386, 111387, 111388, 111389 were selected from the ORFs having the nucleotide sequence represented by SEQ ID NO: 77899.

[9300] The probes having the nucleotide sequence represented by SEQ ID NOS: 111390, 111391, 111392, 111393, 111394, 111395, 111396, 111397, 111398, 111399, 111400 were selected from the ORFs having the nucleotide sequence represented by SEQ ID NO: 77900.

[9301] The probes having the nucleotide sequence represented by SEQ ID NOS: 111401, 111402, 111403, 111404, 111405, 111406, 111407, 111408, 111409, 111410, 111411 were selected from the ORFs having the nucleotide sequence represented by SEQ ID NO: 77901.

[9302] The probes having the nucleotide sequence represented by SEQ ID NOS: 111412, 111413, 111414, 111415, 111416, 111417, 111418, 111419, 111420, 111421, 111422 were selected from the ORFs having the nucleotide sequence represented by SEQ ID NO: 77902.

[9303] The probes having the nucleotide sequence represented by SEQ ID NOS: 111423, 111424, 111425, 111426, 111427, 111428, 111429, 111430, 111431, 111432, 111433 were selected from the ORFs having the nucleotide sequence represented by SEQ ID NO: 77903.

[9304] The probes having the nucleotide sequence represented by SEQ ID NOS: 111434, 111435, 111436, 111437, 111438, 111439, 111440, 111441, 111442, 111443, 111444 were selected from the ORFs having the nucleotide sequence represented by SEQ ID NO: 77904.

[9305] The probes having the nucleotide sequence represented by SEQ ID NOS: 111445, 111446, 111447, 111448, 111449, 111450, 111451, 111452, 111453, 111454, 111455 were selected from the ORFs having the nucleotide sequence represented by SEQ ID NO: 77905.

[9306] The probes having the nucleotide sequence represented by SEQ ID NOS: 111456, 111457, 111458, 111459, 111460, 111461, 111462, 111463, 111464, 111465, 111466 were selected from the ORFs having the nucleotide sequence represented by SEQ ID NO: 77906.

[9307] The probes having the nucleotide sequence represented by SEQ ID NOS: 111467, 111468, 111469, 111470, 111471, 111472, 111473, 111474, 111475, 111476, 111477 were selected from the ORFs having the nucleotide sequence represented by SEQ ID NO: 77907.

[9308] The probes having the nucleotide sequence represented by SEQ ID NOS: 111478, 111479, 111480, 111481, 111482, 111483, 111484, 111485, 111486, 111487, 111488 were selected from the ORFs having the nucleotide sequence represented by SEQ ID NO: 77908.

[9309] The probes having the nucleotide sequence represented by SEQ ID NOS: 111489, 111490, 111491, 111492, 111493, 111494, 111495, 111496, 111497, 111498, 111499 were selected from the ORFs having the nucleotide sequence represented by SEQ ID NO: 77909.

[9310] The probes having the nucleotide sequence represented by SEQ ID NOS: 111500, 111501, 111502, 111503, 111504, 111505, 111506, 111507, 111508, 111509, 111510 were selected from the ORFs having the nucleotide sequence represented by SEQ ID NO: 77910.

[9311] The probes having the nucleotide sequence represented by SEQ ID NOS: 111511, 111512, 111513, 111514, 111515, 111516, 111517, 111518, 111519, 111520, 111521 were selected from the ORFs having the nucleotide sequence represented by SEQ ID NO: 77911.

[9312] The probes having the nucleotide sequence represented by SEQ ID NOS: 111522, 111523, 111524, 111525, 111526, 111527, 111528, 111529, 111530, 111531, 111532 were selected from the ORFs having the nucleotide sequence represented by SEQ ID NO: 77912.

[9313] The probes having the nucleotide sequence represented by SEQ ID NOS: 111533, 111534, 111535, 111536, 111537, 111538, 111539, 111540, 111541, 111542, 111543 were selected from the ORFs having the nucleotide sequence represented by SEQ ID NO: 77913.

[9314] The probes having the nucleotide sequence represented by SEQ ID NOS: 111544, 111545, 111546, 111547, 111548, 111549, 111550, 111551, 111552, 111553, 111554 were selected from the ORFs having the nucleotide sequence represented by SEQ ID NO: 77914.

[9315] The probes having the nucleotide sequence represented by SEQ ID NOS: 111555, 111556, 111557, 111558, 111559, 111560, 111561, 111562, 111563, 111564, 111565 were selected from the ORFs having the nucleotide sequence represented by SEQ ID NO: 77915.

[9316] The probes having the nucleotide sequence represented by SEQ ID NOS: 111566, 111567, 111568, 111569, 111570, 111571, 111572, 111573, 111574, 111575, 111576 were selected from the ORFs having the nucleotide sequence represented by SEQ ID NO: 77916.

[9317] The probes having the nucleotide sequence represented by SEQ ID NOS: 111577, 111578, 111579, 111580, 111581, 111582, 111583, 111584, 111585, 111586, 111587 were selected from the ORFs having the nucleotide sequence represented by SEQ ID NO: 77917.

[9318] The probes having the nucleotide sequence represented by SEQ ID NOS: 111588, 111589, 111590, 111591, 111592, 111593, 111594, 111595, 111596, 111597, 111598 were selected from the ORFs having the nucleotide sequence represented by SEQ ID NO: 77918.

[9319] The probes having the nucleotide sequence represented by SEQ ID NOS: 111599, 111600, 111601, 111602, 111603, 111604, 111605, 111606, 111607, 111608, 111609 were selected from the ORFs having the nucleotide sequence represented by SEQ ID NO: 77919.

[9320] The probes having the nucleotide sequence represented by SEQ ID NOS: 111610, 111611, 111612, 111613, 111614, 111615, 111616, 111617, 111618, 111619, 111620 were selected from the ORFs having the nucleotide sequence represented by SEQ ID NO: 77920.

[9321] The probes having the nucleotide sequence represented by SEQ ID NOS: 111621, 111622, 111623, 111624, 111625, 111626, 111627, 111628, 111629, 111630, 111631 were selected from the ORFs having the nucleotide sequence represented by SEQ ID NO: 77921.

[9322] The probes having the nucleotide sequence represented by SEQ ID NOS: 111632, 111633, 111634, 111635, 111636, 111637, 111638, 111639, 111640, 111641, 111642 were selected from the ORFs having the nucleotide sequence represented by SEQ ID NO: 77922.

[9323] The probes having the nucleotide sequence represented by SEQ ID NOS: 111643, 111644, 111645, 111646, 111647, 111648, 111649, 111650, 111651, 111652, 111653 were selected from the ORFs having the nucleotide sequence represented by SEQ ID NO: 77923.

[9324] The probes having the nucleotide sequence represented by SEQ ID NOS: 111654, 111655, 111656, 111657, 111658, 111659, 111660, 111661, 111662, 111663, 111664 were selected from the ORFs having the nucleotide sequence represented by SEQ ID NO: 77924.

[9325] The probes having the nucleotide sequence represented by SEQ ID NOS: 111665, 111666, 111667, 111668, 111669, 111670, 111671, 111672, 111673, 111674, 111675 were selected from the ORFs having the nucleotide sequence represented by SEQ ID NO: 77925.

[9326] The probes having the nucleotide sequence represented by SEQ ID NOS: 111676, 111677, 111678, 111679, 111680, 111681, 111682, 111683, 111684, 111685, 111686 were selected from the ORFs having the nucleotide sequence represented by SEQ ID NO: 77926.

[9327] The probes having the nucleotide sequence represented by SEQ ID NOS: 111687, 111688, 111689, 111690, 111691, 111692, 111693, 111694, 111695, 111696, 111697 were selected from the ORFs having the nucleotide sequence represented by SEQ ID NO: 77927.

[9328] The probes having the nucleotide sequence represented by SEQ ID NOS: 111698, 111699, 111700, 111701, 111702, 111703, 111704, 111705, 111706, 111707, 111708 were selected from the ORFs having the nucleotide sequence represented by SEQ ID NO: 77928.

[9329] The probes having the nucleotide sequence represented by SEQ ID NOS: 111709, 111710, 111711, 111712, 111713, 111714, 111715, 111716, 111717, 111718, 111719 were selected from the ORFs having the nucleotide sequence represented by SEQ ID NO: 77929.

[9330] The probes having the nucleotide sequence represented by SEQ ID NOS: 111720, 111721, 111722, 111723, 111724, 111725, 111726, 111727, 111728, 111729, 111730 were selected from the ORFs having the nucleotide sequence represented by SEQ ID NO: 77930.

[9331] The probes having the nucleotide sequence represented by SEQ ID NOS: 111731, 111732, 111733, 111734, 111735, 111736, 111737, 111738, 111739, 111740, 111741 were selected from the ORFs having the nucleotide sequence represented by SEQ ID NO: 77931.

[9332] The probes having the nucleotide sequence represented by SEQ ID NOS: 111742, 111743, 111744, 111745, 111746, 111747, 111748, 111749, 111750, 111751, 111752 were selected from the ORFs having the nucleotide sequence represented by SEQ ID NO: 77932.

[9333] The probes having the nucleotide sequence represented by SEQ ID NOS: 111753, 111754, 111755, 111756, 111757, 111758, 111759, 111760, 111761, 111762, 111763 were selected from the ORFs having the nucleotide sequence represented by SEQ ID NO: 77933.

[9334] The probes having the nucleotide sequence represented by SEQ ID NOS: 111764, 111765, 111766, 111767, 111768, 111769, 111770, 111771, 111772, 111773, 111774 were selected from the ORFs having the nucleotide sequence represented by SEQ ID NO: 77934.

[9335] The probes having the nucleotide sequence represented by SEQ ID NOS: 111775, 111776, 111777, 111778, 111779, 111780, 111781, 111782, 111783, 111784, 111785 were selected from the ORFs having the nucleotide sequence represented by SEQ ID NO: 77935.

[9336] The probes having the nucleotide sequence represented by SEQ ID NOS: 111786, 111787, 111788, 111789, 111790, 111791, 111792, 111793, 111794, 111795, 111796 were selected from the ORFs having the nucleotide sequence represented by SEQ ID NO: 77936.

[9337] The probes having the nucleotide sequence represented by SEQ ID NOS: 111797, 111798, 111799, 111800, 111801, 111802, 111803, 111804, 111805, 111806, 111807 were selected from the ORFs having the nucleotide sequence represented by SEQ ID NO: 77937.

[9338] The probes having the nucleotide sequence represented by SEQ ID NOS: 111808, 111809, 111810, 111811, 111812, 111813, 111814, 111815, 111816, 111817, 111818 were selected from the ORFs having the nucleotide sequence represented by SEQ ID NO: 77938.

[9339] The probes having the nucleotide sequence represented by SEQ ID NOS: 111819, 111820, 111821, 111822, 111823, 111824, 111825, 111826, 111827, 111828, 111829 were selected from the ORFs having the nucleotide sequence represented by SEQ ID NO: 77939.

[9340] The probes having the nucleotide sequence represented by SEQ ID NOS: 111830, 111831, 111832, 111833, 111834, 111835, 111836, 111837, 111838, 111839, 111840 were selected from the ORFs having the nucleotide sequence represented by SEQ ID NO: 77940.

[9341] The probes having the nucleotide sequence represented by SEQ ID NOS: 111841, 111842, 111843, 111844, 111845, 111846, 111847, 111848, 111849, 111850, 111851 were selected from the ORFs having the nucleotide sequence represented by SEQ ID NO: 77941.

[9342] The probes having the nucleotide sequence represented by SEQ ID NOS: 111852, 111853, 111854, 111855, 111856, 111857, 111858, 111859, 111860, 111861, 111862 were selected from the ORFs having the nucleotide sequence represented by SEQ ID NO: 77942.

[9343] The probes having the nucleotide sequence represented by SEQ ID NOS: 111863, 111864, 111865, 111866, 111867, 111868, 111869, 111870, 111871, 111872, 111873 were selected from the ORFs having the nucleotide sequence represented by SEQ ID NO: 77943.

[9344] The probes having the nucleotide sequence represented by SEQ ID NOS: 111874, 111875, 111876, 111877, 111878, 111879, 111880, 111881, 111882, 111883, 111884 were selected from the ORFs having the nucleotide sequence represented by SEQ ID NO: 77944.

[9345] The probes having the nucleotide sequence represented by SEQ ID NOS: 111885, 111886, 111887, 111888, 111889, 111890, 111891, 111892, 111893, 111894, 111895 were selected from the ORFs having the nucleotide sequence represented by SEQ ID NO: 77945.

[9346] The probes having the nucleotide sequence represented by SEQ ID NOS: 111896, 111897, 111898, 111899, 111900, 111901, 111902, 111903, 111904, 111905, 111906 were selected from the ORFs having the nucleotide sequence represented by SEQ ID NO: 77946.

[9347] The probes having the nucleotide sequence represented by SEQ ID NOS: 111907, 111908, 111909, 111910, 111911, 111912, 111913, 111914, 111915, 111916, 111917 were selected from the ORFs having the nucleotide sequence represented by SEQ ID NO: 77947.

[9348] The probes having the nucleotide sequence represented by SEQ ID NOS: 111918, 111919, 111920, 111921, 111922, 111923, 111924, 111925, 111926, 111927, 111928 were selected from the ORFs having the nucleotide sequence represented by SEQ ID NO: 77948.

[9349] The probes having the nucleotide sequence represented by SEQ ID NOS: 111929, 111930, 111931, 111932, 111933, 111934, 111935, 111936, 111937, 111938, 111939 were selected from the ORFs having the nucleotide sequence represented by SEQ ID NO: 77949.

[9350] The probes having the nucleotide sequence represented by SEQ ID NOS: 111940, 111941, 111942, 111943, 111944, 111945, 111946, 111947, 111948, 111949, 111950 were selected from the ORFs having the nucleotide sequence represented by SEQ ID NO: 77950.

[9351] The probes having the nucleotide sequence represented by SEQ ID NOS: 111951, 111952, 111953, 111954, 111955, 111956, 111957, 111958, 111959, 111960, 111961 were selected from the ORFs having the nucleotide sequence represented by SEQ ID NO: 77951.

[9352] The probes having the nucleotide sequence represented by SEQ ID NOS: 111962, 111963, 111964, 111965, 111966, 111967, 111968, 111969, 111970, 111971, 111972 were selected from the ORFs having the nucleotide sequence represented by SEQ ID NO: 77952.

[9353] The probes having the nucleotide sequence represented by SEQ ID NOS: 111973, 111974, 111975, 111976, 111977, 111978, 111979, 111980, 111981, 111982, 111983 were selected from the ORFs having the nucleotide sequence represented by SEQ ID NO: 77953.

[9354] The probes having the nucleotide sequence represented by SEQ ID NOS: 111984, 111985, 111986, 111987, 111988, 111989, 111990, 111991, 111992, 111993, 111994 were selected from the ORFs having the nucleotide sequence represented by SEQ ID NO: 77954.

[9355] The probes having the nucleotide sequence represented by SEQ ID NOS: 111995, 111996, 111997, 111998, 111999, 112000, 112001, 112002, 112003, 112004, 112005 were selected from the ORFs having the nucleotide sequence represented by SEQ ID NO: 77955.

[9356] The probes having the nucleotide sequence represented by SEQ ID NOS: 112006, 112007, 112008, 112009, 112010, 112011, 112012, 112013, 112014, 112015, 112016 were selected from the ORFs having the nucleotide sequence represented by SEQ ID NO: 77956.

[9357] The probes having the nucleotide sequence represented by SEQ ID NOS: 112017, 112018, 112019, 112020, 112021, 112022, 112023, 112024, 112025, 112026, 112027 were selected from the ORFs having the nucleotide sequence represented by SEQ ID NO: 77957.

[9358] The probes having the nucleotide sequence represented by SEQ ID NOS: 112028, 112029, 112030, 112031, 112032, 112033, 112034, 112035, 112036, 112037, 112038 were selected from the ORFs having the nucleotide sequence represented by SEQ ID NO: 77958.

[9359] The probes having the nucleotide sequence represented by SEQ ID NOS: 112039, 112040, 112041, 112042, 112043, 112044, 112045, 112046, 112047, 112048, 112049 were selected from the ORFs having the nucleotide sequence represented by SEQ ID NO: 77959.

[9360] The probes having the nucleotide sequence represented by SEQ ID NOS: 112050, 112051, 112052, 112053, 112054, 112055, 112056, 112057, 112058, 112059, 112060 were selected from the ORFs having the nucleotide sequence represented by SEQ ID NO: 77960.

[9361] The probes having the nucleotide sequence represented by SEQ ID NOS: 112061, 112062, 112063, 112064, 112065, 112066, 112067, 112068, 112069, 112070, 112071 were selected from the ORFs having the nucleotide sequence represented by SEQ ID NO: 77961.

[9362] The probes having the nucleotide sequence represented by SEQ ID NOS: 112072, 112073, 112074, 112075, 112076, 112077, 112078, 112079, 112080, 112081, 112082 were selected from the ORFs having the nucleotide sequence represented by SEQ ID NO: 77962.

[9363] The probes having the nucleotide sequence represented by SEQ ID NOS: 112083, 112084, 112085, 112086, 112087, 112088, 112089, 112090, 112091, 112092, 112093 were selected from the ORFs having the nucleotide sequence represented by SEQ ID NO: 77963.

[9364] The probes having the nucleotide sequence represented by SEQ ID NOS: 112094, 112095, 112096, 112097, 112098, 112099, 112100, 112101, 112102, 112103, 112104 were selected from the ORFs having the nucleotide sequence represented by SEQ ID NO: 77964.

[9365] The probes having the nucleotide sequence represented by SEQ ID NOS: 112105, 112106, 112107, 112108, 112109, 112110, 112111, 112112, 112113, 112114, 112115 were selected from the ORFs having the nucleotide sequence represented by SEQ ID NO: 77965.

[9366] The probes having the nucleotide sequence represented by SEQ ID NOS: 112116, 112117, 112118, 112119, 112120, 112121, 112122, 112123, 112124, 112125, 112126 were selected from the ORFs having the nucleotide sequence represented by SEQ ID NO: 77966.

[9367] The probes having the nucleotide sequence represented by SEQ ID NOS: 112127, 112128, 112129, 112130, 112131, 112132, 112133, 112134, 112135, 112136, 112137 were selected from the ORFs having the nucleotide sequence represented by SEQ ID NO: 77967.

[9368] The probes having the nucleotide sequence represented by SEQ ID NOS: 112138, 112139, 112140, 112141, 112142, 112143, 112144, 112145, 112146, 112147, 112148 were selected from the ORFs having the nucleotide sequence represented by SEQ ID NO: 77968.

[9369] The probes having the nucleotide sequence represented by SEQ ID NOS: 112149, 112150, 112151, 112152, 112153, 112154, 112155, 112156, 112157, 112158, 112159 were selected from the ORFs having the nucleotide sequence represented by SEQ ID NO: 77969.

[9370] The probes having the nucleotide sequence represented by SEQ ID NOS: 112160, 112161, 112162, 112163, 112164, 112165, 112166, 112167, 112168, 112169, 112170 were selected from the ORFs having the nucleotide sequence represented by SEQ ID NO: 77970.

[9371] The probes having the nucleotide sequence represented by SEQ ID NOS: 112171, 112172, 112173, 112174, 112175, 112176, 112177, 112178, 112179, 112180, 112181 were selected from the ORFs having the nucleotide sequence represented by SEQ ID NO: 77971.

[9372] The probes having the nucleotide sequence represented by SEQ ID NOS: 112182, 112183, 112184, 112185, 112186, 112187, 112188, 112189, 112190, 112191, 112192 were selected from the ORFs having the nucleotide sequence represented by SEQ ID NO: 77972.

[9373] The probes having the nucleotide sequence represented by SEQ ID NOS: 112193, 112194, 112195, 112196, 112197, 112198, 112199, 112200, 112201, 112202, 112203 were selected from the ORFs having the nucleotide sequence represented by SEQ ID NO: 77973.

[9374] The probes having the nucleotide sequence represented by SEQ ID NOS: 112204, 112205, 112206, 112207, 112208, 112209, 112210, 112211, 112212, 112213, 112214 were selected from the ORFs having the nucleotide sequence represented by SEQ ID NO: 77974.

[9375] The probes having the nucleotide sequence represented by SEQ ID NOS: 112215, 112216, 112217, 112218, 112219, 112220, 112221, 112222, 112223, 112224, 112225 were selected from the ORFs having the nucleotide sequence represented by SEQ ID NO: 77975.

[9376] The probes having the nucleotide sequence represented by SEQ ID NOS: 112226, 112227, 112228, 112229, 112230, 112231, 112232, 112233, 112234, 112235, 112236 were selected from the ORFs having the nucleotide sequence represented by SEQ ID NO: 77976.

[9377] The probes having the nucleotide sequence represented by SEQ ID NOS: 112237, 112238, 112239, 112240, 112241, 112242, 112243, 112244, 112245, 112246, 112247 were selected from the ORFs having the nucleotide sequence represented by SEQ ID NO: 77977.

[9378] The probes having the nucleotide sequence represented by SEQ ID NOS: 112248, 112249, 112250, 112251, 112252, 112253, 112254, 112255, 112256, 112257, 112258 were selected from the ORFs having the nucleotide sequence represented by SEQ ID NO: 77978.

[9379] The probes having the nucleotide sequence represented by SEQ ID NOS: 112259, 112260, 112261, 112262, 112263, 112264, 112265, 112266, 112267, 112268, 112269 were selected from the ORFs having the nucleotide sequence represented by SEQ ID NO: 77979.

[9380] The probes having the nucleotide sequence represented by SEQ ID NOS: 112270, 112271, 112272, 112273, 112274, 112275, 112276, 112277, 112278, 112279, 112280 were selected from the ORFs having the nucleotide sequence represented by SEQ ID NO: 77980.

[9381] The probes having the nucleotide sequence represented by SEQ ID NOS: 112281, 112282, 112283, 112284, 112285, 112286, 112287, 112288, 112289, 112290, 112291 were selected from the ORFs having the nucleotide sequence represented by SEQ ID NO: 77981.

[9382] The probes having the nucleotide sequence represented by SEQ ID NOS: 112292, 112293, 112294, 112295, 112296, 112297, 112298, 112299, 112300, 112301, 112302 were selected from the ORFs having the nucleotide sequence represented by SEQ ID NO: 77982.

[9383] The probes having the nucleotide sequence represented by SEQ ID NOS: 112303, 112304, 112305, 112306, 112307, 112308, 112309, 112310, 112311, 112312, 112313 were selected from the ORFs having the nucleotide sequence represented by SEQ ID NO: 77983.

[9384] The probes having the nucleotide sequence represented by SEQ ID NOS: 112314, 112315, 112316, 112317, 112318, 112319, 112320, 112321, 112322, 112323, 112324 were selected from the ORFs having the nucleotide sequence represented by SEQ ID NO: 77984.

[9385] The probes having the nucleotide sequence represented by SEQ ID NOS: 112325, 112326, 112327, 112328, 112329, 112330, 112331, 112332, 112333, 112334, 112335 were selected from the ORFs having the nucleotide sequence represented by SEQ ID NO: 77985.

[9386] The probes having the nucleotide sequence represented by SEQ ID NOS: 112336, 112337, 112338, 112339, 112340, 112341, 112342, 112343, 112344, 112345, 112346 were selected from the ORFs having the nucleotide sequence represented by SEQ ID NO: 77986.

[9387] The probes having the nucleotide sequence represented by SEQ ID NOS: 112347, 112348, 112349, 112350, 112351, 112352, 112353, 112354, 112355, 112356, 112357 were selected from the ORFs having the nucleotide sequence represented by SEQ ID NO: 77987.

[9388] The probes having the nucleotide sequence represented by SEQ ID NOS: 112358, 112359, 112360, 112361, 112362, 112363, 112364, 112365, 112366, 112367, 112368 were selected from the ORFs having the nucleotide sequence represented by SEQ ID NO: 77988.

[9389] The probes having the nucleotide sequence represented by SEQ ID NOS: 112369, 112370, 112371, 112372, 112373, 112374, 112375, 112376, 112377, 112378, 112379 were selected from the ORFs having the nucleotide sequence represented by SEQ ID NO: 77989.

[9390] The probes having the nucleotide sequence represented by SEQ ID NOS: 112380, 112381, 112382, 112383, 112384, 112385, 112386, 112387, 112388, 112389, 112390 were selected from the ORFs having the nucleotide sequence represented by SEQ ID NO: 77990.

[9391] The probes having the nucleotide sequence represented by SEQ ID NOS: 112391, 112392, 112393, 112394, 112395, 112396, 112397, 112398, 112399, 112400, 112401 were selected from the ORFs having the nucleotide sequence represented by SEQ ID NO: 77991.

[9392] The probes having the nucleotide sequence represented by SEQ ID NOS: 112402, 112403, 112404, 112405, 112406, 112407, 112408, 112409, 112410, 112411, 112412 were selected from the ORFs having the nucleotide sequence represented by SEQ ID NO: 77992.

[9393] The probes having the nucleotide sequence represented by SEQ ID NOS: 112413, 112414, 112415, 112416, 112417, 112418, 112419, 112420, 112421, 112422, 112423 were selected from the ORFs having the nucleotide sequence represented by SEQ ID NO: 77993.

[9394] The probes having the nucleotide sequence represented by SEQ ID NOS: 112424, 112425, 112426, 112427, 112428, 112429, 112430, 112431, 112432, 112433, 112434 were selected from the ORFs having the nucleotide sequence represented by SEQ ID NO: 77994.

[9395] The probes having the nucleotide sequence represented by SEQ ID NOS: 112435, 112436, 112437, 112438, 112439, 112440, 112441, 112442, 112443, 112444, 112445, 112446, 112447, 112448, 112449, 112450, 112451, 112452, 112453, 112454, 112455, 112456 were selected from the ORFs having the nucleotide sequence represented by SEQ ID NO: 77995.

[9396] The probes having the nucleotide sequence represented by SEQ ID NOS: 112457, 112458, 112459, 112460, 112461, 112462, 112463, 112464, 112465, 112466, 112467 were selected from the ORFs having the nucleotide sequence represented by SEQ ID NO: 77996.

[9397] The probes having the nucleotide sequence represented by SEQ ID NOS: 112468, 112469, 112470, 112471, 112472, 112473, 112474, 112475, 112476, 112477, 112478 were selected from the ORFs having the nucleotide sequence represented by SEQ ID NO: 77997.

[9398] The probes having the nucleotide sequence represented by SEQ ID NOS: 112479, 112480, 112481, 112482, 112483, 112484, 112485, 112486, 112487, 112488, 112489 were selected from the ORFs having the nucleotide sequence represented by SEQ ID NO: 77998.

[9399] The probes having the nucleotide sequence represented by SEQ ID NOS: 112490, 112491, 112492, 112493, 112494, 112495, 112496, 112497, 112498, 112499, 112500 were selected from the ORFs having the nucleotide sequence represented by SEQ ID NO: 77999.

[9400] The probes having the nucleotide sequence represented by SEQ ID NOS: 112501, 112502, 112503, 112504, 112505, 112506, 112507, 112508, 112509, 112510, 112511 were selected from the ORFs having the nucleotide sequence represented by SEQ ID NO: 78000.

[9401] The probes having the nucleotide sequence represented by SEQ ID NOS: 112512, 112513, 112514, 112515, 112516, 112517, 112518, 112519, 112520, 112521, 112522 were selected from the ORFs having the nucleotide sequence represented by SEQ ID NO: 78001.

[9402] The probes having the nucleotide sequence represented by SEQ ID NOS: 112523, 112524, 112525, 112526, 112527, 112528, 112529, 112530, 112531, 112532, 112533 were selected from the ORFs having the nucleotide sequence represented by SEQ ID NO: 78002.

[9403] The probes having the nucleotide sequence represented by SEQ ID NOS: 112534, 112535, 112536, 112537, 112538, 112539, 112540, 112541, 112542, 112543, 112544 were selected from the ORFs having the nucleotide sequence represented by SEQ ID NO: 78003.

[9404] The probes having the nucleotide sequence represented by SEQ ID NOS: 112545, 112546, 112547, 112548, 112549, 112550, 112551, 112552, 112553, 112554, 112555 were selected from the ORFs having the nucleotide sequence represented by SEQ ID NO: 78004.

[9405] The probes having the nucleotide sequence represented by SEQ ID NOS: 112556, 112557, 112558, 112559, 112560, 112561, 112562, 112563, 112564, 112565, 112566, 112567, 112568, 112569, 112570, 112571, 112572, 112573, 112574, 112575, 112576, 112577 were selected from the ORFs having the nucleotide sequence represented by SEQ ID NO: 78005.

[9406] The probes having the nucleotide sequence represented by SEQ ID NOS: 112578, 112579, 112580, 112581, 112582, 112583, 112584, 112585, 112586, 112587, 112588 were selected from the ORFs having the nucleotide sequence represented by SEQ ID NO: 78006.

[9407] The probes having the nucleotide sequence represented by SEQ ID NOS: 112589, 112590, 112591, 112592, 112593, 112594, 112595, 112596, 112597, 112598, 112599 were selected from the ORFs having the nucleotide sequence represented by SEQ ID NO: 78007.

[9408] The probes having the nucleotide sequence represented by SEQ ID NOS: 112600, 112601, 112602, 112603, 112604, 112605, 112606, 112607, 112608, 112609, 112610 were selected from the ORFs having the nucleotide sequence represented by SEQ ID NO: 78008.

[9409] The probes having the nucleotide sequence represented by SEQ ID NOS: 112611, 112612, 112613, 112614, 112615, 112616, 112617, 112618, 112619, 112620, 112621 were selected from the ORFs having the nucleotide sequence represented by SEQ ID NO: 78009.

[9410] The probes having the nucleotide sequence represented by SEQ ID NOS: 112622, 112623, 112624, 112625, 112626, 112627, 112628, 112629, 112630, 112631, 112632 were selected from the ORFs having the nucleotide sequence represented by SEQ ID NO: 78010.

[9411] The probes having the nucleotide sequence represented by SEQ ID NOS: 112633, 112634, 112635, 112636, 112637, 112638, 112639, 112640, 112641, 112642, 112643 were selected from the ORFs having the nucleotide sequence represented by SEQ ID NO: 78011.

[9412] The probes having the nucleotide sequence represented by SEQ ID NOS: 112644, 112645, 112646, 112647, 112648, 112649, 112650, 112651, 112652, 112653, 112654 were selected from the ORFs having the nucleotide sequence represented by SEQ ID NO: 78012.

[9413] The probes having the nucleotide sequence represented by SEQ ID NOS: 112655, 112656, 112657, 112658, 112659, 112660, 112661, 112662, 112663, 112664, 112665 were selected from the ORFs having the nucleotide sequence represented by SEQ ID NO: 78013.

[9414] The probes having the nucleotide sequence represented by SEQ ID NOS: 112666, 112667, 112668, 112669, 112670, 112671, 112672, 112673, 112674, 112675, 112676 were selected from the ORFs having the nucleotide sequence represented by SEQ ID NO: 78014.

[9415] The probes having the nucleotide sequence represented by SEQ ID NOS: 112677, 112678, 112679, 112680, 112681, 112682, 112683, 112684, 112685, 112686, 112687 were selected from the ORFs having the nucleotide sequence represented by SEQ ID NO: 78015.

[9416] The probes having the nucleotide sequence represented by SEQ ID NOS: 112688, 112689, 112690, 112691, 112692, 112693, 112694, 112695, 112696, 112697, 112698 were selected from the ORFs having the nucleotide sequence represented by SEQ ID NO: 78016.

[9417] The probes having the nucleotide sequence represented by SEQ ID NOS: 112699, 112700, 112701, 112702, 112703, 112704, 112705, 112706, 112707, 112708, 112709 were selected from the ORFs having the nucleotide sequence represented by SEQ ID NO: 78017.

[9418] The probes having the nucleotide sequence represented by SEQ ID NOS: 112710, 112711, 112712, 112713, 112714, 112715, 112716, 112717, 112718, 112719, 112720 were selected from the ORFs having the nucleotide sequence represented by SEQ ID NO: 78018.

[9419] The probes having the nucleotide sequence represented by SEQ ID NOS: 112721, 112722, 112723, 112724, 112725, 112726, 112727, 112728, 112729, 112730, 112731 were selected from the ORFs having the nucleotide sequence represented by SEQ ID NO: 78019.

[9420] The probes having the nucleotide sequence represented by SEQ ID NOS: 112732, 112733, 112734, 112735, 112736, 112737, 112738, 112739, 112740, 112741, 112742 were selected from the ORFs having the nucleotide sequence represented by SEQ ID NO: 78020.

[9421] The probes having the nucleotide sequence represented by SEQ ID NOS: 112743, 112744, 112745, 112746, 112747, 112748, 112749, 112750, 112751, 112752, 112753 were selected from the ORFs having the nucleotide sequence represented by SEQ ID NO: 78021.

[9422] The probes having the nucleotide sequence represented by SEQ ID NOS: 112754, 112755, 112756, 112757, 112758, 112759, 112760, 112761, 112762, 112763, 112764 were selected from the ORFs having the nucleotide sequence represented by SEQ ID NO: 78022.

[9423] The probes having the nucleotide sequence represented by SEQ ID NOS: 112765, 112766, 112767, 112768, 112769, 112770, 112771, 112772, 112773, 112774, 112775 were selected from the ORFs having the nucleotide sequence represented by SEQ ID NO: 78023.

[9424] The probes having the nucleotide sequence represented by SEQ ID NOS: 112776, 112777, 112778, 112779, 112780, 112781, 112782, 112783, 112784, 112785, 112786 were selected from the ORFs having the nucleotide sequence represented by SEQ ID NO: 78024.

[9425] The probes having the nucleotide sequence represented by SEQ ID NOS: 112787, 112788, 112789, 112790, 112791, 112792, 112793, 112794, 112795, 112796, 112797 were selected from the ORFs having the nucleotide sequence represented by SEQ ID NO: 78025.

[9426] The probes having the nucleotide sequence represented by SEQ ID NOS: 112798, 112799, 112800, 112801, 112802, 112803, 112804, 112805, 112806, 112807, 112808 were selected from the ORFs having the nucleotide sequence represented by SEQ ID NO: 78026.

[9427] The probes having the nucleotide sequence represented by SEQ ID NOS: 112809, 112810, 112811, 112812, 112813, 112814, 112815, 112816, 112817, 112818, 112819 were selected from the ORFs having the nucleotide sequence represented by SEQ ID NO: 78027.

[9428] The probes having the nucleotide sequence represented by SEQ ID NOS: 112820, 112821, 112822, 112823, 112824, 112825, 112826, 112827, 112828, 112829, 112830 were selected from the ORFs having the nucleotide sequence represented by SEQ ID NO: 78028.

[9429] The probes having the nucleotide sequence represented by SEQ ID NOS: 112831, 112832, 112833, 112834, 112835, 112836, 112837, 112838, 112839, 112840, 112841 were selected from the ORFs having the nucleotide sequence represented by SEQ ID NO: 78029.

[9430] The probes having the nucleotide sequence represented by SEQ ID NOS: 112842, 112843, 112844, 112845, 112846, 112847, 112848, 112849, 112850, 112851, 112852 were selected from the ORFs having the nucleotide sequence represented by SEQ ID NO: 78030.

[9431] The probes having the nucleotide sequence represented by SEQ ID NOS: 112853, 112854, 112855, 112856, 112857, 112858, 112859, 112860, 112861, 112862, 112863 were selected from the ORFs having the nucleotide sequence represented by SEQ ID NO: 78031.

[9432] The probes having the nucleotide sequence represented by SEQ ID NOS: 112864, 112865, 112866, 112867, 112868, 112869, 112870, 112871, 112872, 112873, 112874 were selected from the ORFs having the nucleotide sequence represented by SEQ ID NO: 78032.

[9433] The probes having the nucleotide sequence represented by SEQ ID NOS: 112875, 112876, 112877, 112878, 112879, 112880, 112881, 112882, 112883, 112884, 112885 were selected from the ORFs having the nucleotide sequence represented by SEQ ID NO: 78033.

[9434] The probes having the nucleotide sequence represented by SEQ ID NOS: 112886, 112887, 112888, 112889, 112890, 112891, 112892, 112893, 112894, 112895, 112896 were selected from the ORFs having the nucleotide sequence represented by SEQ ID NO: 78034.

[9435] The probes having the nucleotide sequence represented by SEQ ID NOS: 112897, 112898, 112899, 112900, 112901, 112902, 112903, 112904, 112905, 112906, 112907 were selected from the ORFs having the nucleotide sequence represented by SEQ ID NO: 78035.

[9436] The probes having the nucleotide sequence represented by SEQ ID NOS: 112908, 112909, 112910, 112911, 112912, 112913, 112914, 112915, 112916, 112917, 112918 were selected from the ORFs having the nucleotide sequence represented by SEQ ID NO: 78036.

[9437] The probes having the nucleotide sequence represented by SEQ ID NOS: 112919, 112920, 112921, 112922, 112923, 112924, 112925, 112926, 112927, 112928, 112929 were selected from the ORFs having the nucleotide sequence represented by SEQ ID NO: 78037.

[9438] The probes having the nucleotide sequence represented by SEQ ID NOS: 112930, 112931, 112932, 112933, 112934, 112935, 112936, 112937, 112938, 112939, 112940 were selected from the ORFs having the nucleotide sequence represented by SEQ ID NO: 78038.

[9439] The probes having the nucleotide sequence represented by SEQ ID NOS: 112941, 112942, 112943, 112944, 112945, 112946, 112947, 112948, 112949, 112950, 112951 were selected from the ORFs having the nucleotide sequence represented by SEQ ID NO: 78039.

[9440] The probes having the nucleotide sequence represented by SEQ ID NOS: 112952, 112953, 112954, 112955, 112956, 112957, 112958, 112959, 112960, 112961, 112962 were selected from the ORFs having the nucleotide sequence represented by SEQ ID NO: 78040.

[9441] The probes having the nucleotide sequence represented by SEQ ID NOS: 112963, 112964, 112965, 112966, 112967, 112968, 112969, 112970, 112971, 112972, 112973 were selected from the ORFs having the nucleotide sequence represented by SEQ ID NO: 78041.

[9442] The probes having the nucleotide sequence represented by SEQ ID NOS: 112974, 112975, 112976, 112977, 112978, 112979, 112980, 112981, 112982, 112983, 112984 were selected from the ORFs having the nucleotide sequence represented by SEQ ID NO: 78042.

[9443] The probes having the nucleotide sequence represented by SEQ ID NOS: 112985, 112986, 112987, 112988, 112989, 112990, 112991, 112992, 112993, 112994, 112995 were selected from the ORFs having the nucleotide sequence represented by SEQ ID NO: 78043.

[9444] The probes having the nucleotide sequence represented by SEQ ID NOS: 112996, 112997, 112998, 112999, 113000, 113001, 113002, 113003, 113004, 113005, 113006 were selected from the ORFs having the nucleotide sequence represented by SEQ ID NO: 78044.

[9445] The probes having the nucleotide sequence represented by SEQ ID NOS: 113007, 113008, 113009, 113010, 113011, 113012, 113013, 113014, 113015, 113016, 113017, 113018, 113019, 113020, 113021, 113022, 113023, 113024, 113025, 113026, 113027, 113028 were selected from the ORFs having the nucleotide sequence represented by SEQ ID NO: 78045.

[9446] The probes having the nucleotide sequence represented by SEQ ID NOS: 113029, 113030, 113031, 113032, 113033, 113034, 113035, 113036, 113037, 113038, 113039 were selected from the ORFs having the nucleotide sequence represented by SEQ ID NO: 78046.

[9447] The probes having the nucleotide sequence represented by SEQ ID NOS: 113040, 113041, 113042, 113043, 113044, 113045, 113046, 113047, 113048, 113049, 113050 were selected from the ORFs having the nucleotide sequence represented by SEQ ID NO: 78047.

[9448] The probes having the nucleotide sequence represented by SEQ ID NOS: 113051, 113052, 113053, 113054, 113055, 113056, 113057, 113058, 113059, 113060, 113061 were selected from the ORFs having the nucleotide sequence represented by SEQ ID NO: 78048.

[9449] The probes having the nucleotide sequence represented by SEQ ID NOS: 113062, 113063, 113064, 113065, 113066, 113067, 113068, 113069, 113070, 113071, 113072 were selected from the ORFs having the nucleotide sequence represented by SEQ ID NO: 78049.

[9450] The probes having the nucleotide sequence represented by SEQ ID NOS: 113073, 113074, 113075, 113076, 113077, 113078, 113079, 113080, 113081, 113082, 113083 were selected from the ORFs having the nucleotide sequence represented by SEQ ID NO: 78050.

[9451] The probes having the nucleotide sequence represented by SEQ ID NOS: 113084, 113085, 113086, 113087, 113088, 113089, 113090, 113091, 113092, 113093, 113094 were selected from the ORFs having the nucleotide sequence represented by SEQ ID NO: 78051.

[9452] The probes having the nucleotide sequence represented by SEQ ID NOS: 113095, 113096, 113097, 113098, 113099, 113100, 113101, 113102, 113103, 113104, 113105 were selected from the ORFs having the nucleotide sequence represented by SEQ ID NO: 78052.

[9453] The probes having the nucleotide sequence represented by SEQ ID NOS: 113106, 113107, 113108, 113109, 113110, 113111, 113112, 113113, 113114, 113115, 113116 were selected from the ORFs having the nucleotide sequence represented by SEQ ID NO: 78053.

[9454] The probes having the nucleotide sequence represented by SEQ ID NOS: 113117, 113118, 113119, 113120, 113121, 113122, 113123, 113124, 113125, 113126, 113127 were selected from the ORFs having the nucleotide sequence represented by SEQ ID NO: 78054.

[9455] The probes having the nucleotide sequence represented by SEQ ID NOS: 113128, 113129, 113130, 113131, 113132, 113133, 113134, 113135, 113136, 113137, 113138 were selected from the ORFs having the nucleotide sequence represented by SEQ ID NO: 78055.

[9456] The probes having the nucleotide sequence represented by SEQ ID NOS: 113139, 113140, 113141, 113142, 113143, 113144, 113145, 113146, 113147, 113148, 113149 were selected from the ORFs having the nucleotide sequence represented by SEQ ID NO: 78056.

[9457] The probes having the nucleotide sequence represented by SEQ ID NOS: 113150, 113151, 113152, 113153, 113154, 113155, 113156, 113157, 113158, 113159, 113160 were selected from the ORFs having the nucleotide sequence represented by SEQ ID NO: 78057.

[9458] The probes having the nucleotide sequence represented by SEQ ID NOS: 113161, 113162, 113163, 113164, 113165, 113166, 113167, 113168, 113169, 113170, 113171 were selected from the ORFs having the nucleotide sequence represented by SEQ ID NO: 78058.

[9459] The probes having the nucleotide sequence represented by SEQ ID NOS: 113172, 113173, 113174, 113175, 113176, 113177, 113178, 113179, 113180, 113181, 113182 were selected from the ORFs having the nucleotide sequence represented by SEQ ID NO: 78059.

[9460] The probes having the nucleotide sequence represented by SEQ ID NOS: 113183, 113184, 113185, 113186, 113187, 113188, 113189, 113190, 113191, 113192, 113193 were selected from the ORFs having the nucleotide sequence represented by SEQ ID NO: 78060.

[9461] The probes having the nucleotide sequence represented by SEQ ID NOS: 113194, 113195, 113196, 113197, 113198, 113199, 113200, 113201, 113202, 113203, 113204 were selected from the ORFs having the nucleotide sequence represented by SEQ ID NO: 78061.

[9462] The probes having the nucleotide sequence represented by SEQ ID NOS: 113205, 113206, 113207, 113208, 113209, 113210, 113211, 113212, 113213, 113214, 113215 were selected from the ORFs having the nucleotide sequence represented by SEQ ID NO: 78062.

[9463] The probes having the nucleotide sequence represented by SEQ ID NOS: 113216, 113217, 113218, 113219, 113220, 113221, 113222, 113223, 113224, 113225, 113226 were selected from the ORFs having the nucleotide sequence represented by SEQ ID NO: 78063.

[9464] The probes having the nucleotide sequence represented by SEQ ID NOS: 113227, 113228, 113229, 113230, 113231, 113232, 113233, 113234, 113235, 113236, 113237 were selected from the ORFs having the nucleotide sequence represented by SEQ ID NO: 78064.

[9465] The probes having the nucleotide sequence represented by SEQ ID NOS: 113238, 113239, 113240, 113241, 113242, 113243, 113244, 113245, 113246, 113247, 113248 were selected from the ORFs having the nucleotide sequence represented by SEQ ID NO: 78065.

[9466] The probes having the nucleotide sequence represented by SEQ ID NOS: 113249, 113250, 113251, 113252, 113253, 113254, 113255, 113256, 113257, 113258, 113259 were selected from the ORFs having the nucleotide sequence represented by SEQ ID NO: 78066.

[9467] The probes having the nucleotide sequence represented by SEQ ID NOS: 113260, 113261, 113262, 113263, 113264, 113265, 113266, 113267, 113268, 113269, 113270 were selected from the ORFs having the nucleotide sequence represented by SEQ ID NO: 78067.

[9468] The probes having the nucleotide sequence represented by SEQ ID NOS: 113271, 113272, 113273, 113274, 113275, 113276, 113277, 113278, 113279, 113280, 113281 were selected from the ORFs having the nucleotide sequence represented by SEQ ID NO: 78068.

[9469] The probes having the nucleotide sequence represented by SEQ ID NOS: 113282, 113283, 113284, 113285, 113286, 113287, 113288, 113289, 113290, 113291, 113292 were selected from the ORFs having the nucleotide sequence represented by SEQ ID NO: 78069.

[9470] The probes having the nucleotide sequence represented by SEQ ID NOS: 113293, 113294, 113295, 113296, 113297, 113298, 113299, 113300, 113301, 113302, 113303 were selected from the ORFs having the nucleotide sequence represented by SEQ ID NO: 78070.

[9471] The probes having the nucleotide sequence represented by SEQ ID NOS: 113304, 113305, 113306, 113307, 113308, 113309, 113310, 113311, 113312, 113313, 113314 were selected from the ORFs having the nucleotide sequence represented by SEQ ID NO: 78071.

[9472] The probes having the nucleotide sequence represented by SEQ ID NOS: 113315, 113316, 113317, 113318, 113319, 113320, 113321, 113322, 113323, 113324, 113325 were selected from the ORFs having the nucleotide sequence represented by SEQ ID NO: 78072.

[9473] The probes having the nucleotide sequence represented by SEQ ID NOS: 113326, 113327, 113328, 113329, 113330, 113331, 113332, 113333, 113334, 113335, 113336 were selected from the ORFs having the nucleotide sequence represented by SEQ ID NO: 78073.

[9474] The probes having the nucleotide sequence represented by SEQ ID NOS: 113337, 113338, 113339, 113340, 113341, 113342, 113343, 113344, 113345, 113346, 113347 were selected from the ORFs having the nucleotide sequence represented by SEQ ID NO: 78074.

[9475] The probes having the nucleotide sequence represented by SEQ ID NOS: 113348, 113349, 113350, 113351, 113352, 113353, 113354, 113355, 113356, 113357, 113358 were selected from the ORFs having the nucleotide sequence represented by SEQ ID NO: 78075.

[9476] The probes having the nucleotide sequence represented by SEQ ID NOS: 113359, 113360, 113361, 113362, 113363, 113364, 113365, 113366, 113367, 113368, 113369 were selected from the ORFs having the nucleotide sequence represented by SEQ ID NO: 78076.

[9477] The probes having the nucleotide sequence represented by SEQ ID NOS: 113370, 113371, 113372, 113373, 113374, 113375, 113376, 113377, 113378, 113379, 113380 were selected from the ORFs having the nucleotide sequence represented by SEQ ID NO: 78077.

[9478] The probes having the nucleotide sequence represented by SEQ ID NOS: 113381, 113382, 113383, 113384, 113385, 113386, 113387, 113388, 113389, 113390, 113391 were selected from the ORFs having the nucleotide sequence represented by SEQ ID NO: 78078.

[9479] The probes having the nucleotide sequence represented by SEQ ID NOS: 113392, 113393, 113394, 113395, 113396, 113397, 113398, 113399, 113400, 113401, 113402 were selected from the ORFs having the nucleotide sequence represented by SEQ ID NO: 78079.

[9480] The probes having the nucleotide sequence represented by SEQ ID NOS: 113403, 113404, 113405, 113406, 113407, 113408, 113409, 113410, 113411, 113412, 113413 were selected from the ORFs having the nucleotide sequence represented by SEQ ID NO: 78080.

[9481] The probes having the nucleotide sequence represented by SEQ ID NOS: 113414, 113415, 113416, 113417, 113418, 113419, 113420, 113421, 113422, 113423, 113424 were selected from the ORFs having the nucleotide sequence represented by SEQ ID NO: 78081.

[9482] The probes having the nucleotide sequence represented by SEQ ID NOS: 113425, 113426, 113427, 113428, 113429, 113430, 113431, 113432, 113433, 113434, 113435 were selected from the ORFs having the nucleotide sequence represented by SEQ ID NO: 78082.

[9483] The probes having the nucleotide sequence represented by SEQ ID NOS: 113436, 113437, 113438, 113439, 113440, 113441, 113442, 113443, 113444, 113445, 113446 were selected from the ORFs having the nucleotide sequence represented by SEQ ID NO: 78083.

[9484] The probes having the nucleotide sequence represented by SEQ ID NOS: 113447, 113448, 113449, 113450, 113451, 113452, 113453, 113454, 113455, 113456, 113457 were selected from the ORFs having the nucleotide sequence represented by SEQ ID NO: 78084.

[9485] The probes having the nucleotide sequence represented by SEQ ID NOS: 113458, 113459, 113460, 113461, 113462, 113463, 113464, 113465, 113466, 113467, 113468 were selected from the ORFs having the nucleotide sequence represented by SEQ ID NO: 78085.

[9486] The probes having the nucleotide sequence represented by SEQ ID NOS: 113469, 113470, 113471, 113472, 113473, 113474, 113475, 113476, 113477, 113478, 113479 were selected from the ORFs having the nucleotide sequence represented by SEQ ID NO: 78086.

[9487] The probes having the nucleotide sequence represented by SEQ ID NOS: 113480, 113481, 113482, 113483, 113484, 113485, 113486, 113487, 113488, 113489, 113490 were selected from the ORFs having the nucleotide sequence represented by SEQ ID NO: 78087.

[9488] The probes having the nucleotide sequence represented by SEQ ID NOS: 113491, 113492, 113493, 113494, 113495, 113496, 113497, 113498, 113499, 113500, 113501 were selected from the ORFs having the nucleotide sequence represented by SEQ ID NO: 78088.

[9489] The probes having the nucleotide sequence represented by SEQ ID NOS: 113502, 113503, 113504, 113505, 113506, 113507, 113508, 113509, 113510, 113511, 113512 were selected from the ORFs having the nucleotide sequence represented by SEQ ID NO: 78089.

[9490] The probes having the nucleotide sequence represented by SEQ ID NOS: 113513, 113514, 113515, 113516, 113517, 113518, 113519, 113520, 113521, 113522, 113523 were selected from the ORFs having the nucleotide sequence represented by SEQ ID NO: 78090.

[9491] The probes having the nucleotide sequence represented by SEQ ID NOS: 113524, 113525, 113526, 113527, 113528, 113529, 113530, 113531, 113532, 113533, 113534 were selected from the ORFs having the nucleotide sequence represented by SEQ ID NO: 78091.

[9492] The probes having the nucleotide sequence represented by SEQ ID NOS: 113535, 113536, 113537, 113538, 113539, 113540, 113541, 113542, 113543, 113544, 113545 were selected from the ORFs having the nucleotide sequence represented by SEQ ID NO: 78092.

[9493] The probes having the nucleotide sequence represented by SEQ ID NOS: 113546, 113547, 113548, 113549, 113550, 113551, 113552, 113553, 113554, 113555, 113556 were selected from the ORFs having the nucleotide sequence represented by SEQ ID NO: 78093.

[9494] The probes having the nucleotide sequence represented by SEQ ID NOS: 113557, 113558, 113559, 113560, 113561, 113562, 113563, 113564, 113565, 113566, 113567 were selected from the ORFs having the nucleotide sequence represented by SEQ ID NO: 78094.

[9495] The probes having the nucleotide sequence represented by SEQ ID NOS: 113568, 113569, 113570, 113571, 113572, 113573, 113574, 113575, 113576, 113577, 113578 were selected from the ORFs having the nucleotide sequence represented by SEQ ID NO: 78095.

[9496] The probes having the nucleotide sequence represented by SEQ ID NOS: 113579, 113580, 113581, 113582, 113583, 113584, 113585, 113586, 113587, 113588, 113589 were selected from the ORFs having the nucleotide sequence represented by SEQ ID NO: 78096.

[9497] The probes having the nucleotide sequence represented by SEQ ID NOS: 113590, 113591, 113592, 113593, 113594, 113595, 113596, 113597, 113598, 113599, 113600 were selected from the ORFs having the nucleotide sequence represented by SEQ ID NO: 78097.

[9498] The probes having the nucleotide sequence represented by SEQ ID NOS: 113601, 113602, 113603, 113604, 113605, 113606, 113607, 113608, 113609, 113610, 113611 were selected from the ORFs having the nucleotide sequence represented by SEQ ID NO: 78098.

[9499] The probes having the nucleotide sequence represented by SEQ ID NOS: 113612, 113613, 113614, 113615, 113616, 113617, 113618, 113619, 113620, 113621, 113622 were selected from the ORFs having the nucleotide sequence represented by SEQ ID NO: 78099.

[9500] The probes having the nucleotide sequence represented by SEQ ID NOS: 113623, 113624, 113625, 113626, 113627, 113628, 113629, 113630, 113631, 113632, 113633 were selected from the ORFs having the nucleotide sequence represented by SEQ ID NO: 78100.

[9501] The probes having the nucleotide sequence represented by SEQ ID NOS: 113634, 113635, 113636, 113637, 113638, 113639, 113640, 113641, 113642, 113643, 113644 were selected from the ORFs having the nucleotide sequence represented by SEQ ID NO: 78101.

[9502] The probes having the nucleotide sequence represented by SEQ ID NOS: 113645, 113646, 113647, 113648, 113649, 113650, 113651, 113652, 113653, 113654, 113655 were selected from the ORFs having the nucleotide sequence represented by SEQ ID NO: 78102.

[9503] The probes having the nucleotide sequence represented by SEQ ID NOS: 113656, 113657, 113658, 113659, 113660, 113661, 113662, 113663, 113664, 113665, 113666 were selected from the ORFs having the nucleotide sequence represented by SEQ ID NO: 78103.

[9504] The probes having the nucleotide sequence represented by SEQ ID NOS: 113667, 113668, 113669, 113670, 113671, 113672, 113673, 113674, 113675, 113676, 113677 were selected from the ORFs having the nucleotide sequence represented by SEQ ID NO: 78104.

[9505] The probes having the nucleotide sequence represented by SEQ ID NOS: 113678, 113679, 113680, 113681, 113682, 113683, 113684, 113685, 113686, 113687, 113688 were selected from the ORFs having the nucleotide sequence represented by SEQ ID NO: 78105.

[9506] The probes having the nucleotide sequence represented by SEQ ID NOS: 113689, 113690, 113691, 113692, 113693, 113694, 113695, 113696, 113697, 113698, 113699 were selected from the ORFs having the nucleotide sequence represented by SEQ ID NO: 78106.

[9507] The probes having the nucleotide sequence represented by SEQ ID NOS: 113700, 113701, 113702, 113703, 113704, 113705, 113706, 113707, 113708, 113709, 113710 were selected from the ORFs having the nucleotide sequence represented by SEQ ID NO: 78107.

[9508] The probes having the nucleotide sequence represented by SEQ ID NOS: 113711, 113712, 113713, 113714, 113715, 113716, 113717, 113718, 113719, 113720, 113721 were selected from the ORFs having the nucleotide sequence represented by SEQ ID NO: 78108.

[9509] The probes having the nucleotide sequence represented by SEQ ID NOS: 113722, 113723, 113724, 113725, 113726, 113727, 113728, 113729, 113730, 113731, 113732 were selected from the ORFs having the nucleotide sequence represented by SEQ ID NO: 78109.

[9510] The probes having the nucleotide sequence represented by SEQ ID NOS: 113733, 113734, 113735, 113736, 113737, 113738, 113739, 113740, 113741, 113742, 113743 were selected from the ORFs having the nucleotide sequence represented by SEQ ID NO: 78110.

[9511] The probes having the nucleotide sequence represented by SEQ ID NOS: 113744, 113745, 113746, 113747, 113748, 113749, 113750, 113751, 113752, 113753, 113754 were selected from the ORFs having the nucleotide sequence represented by SEQ ID NO: 78111.

[9512] The probes having the nucleotide sequence represented by SEQ ID NOS: 113755, 113756, 113757, 113758, 113759, 113760, 113761, 113762, 113763, 113764, 113765 were selected from the ORFs having the nucleotide sequence represented by SEQ ID NO: 78112.

[9513] The probes having the nucleotide sequence represented by SEQ ID NOS: 113766, 113767, 113768, 113769, 113770, 113771, 113772, 113773, 113774, 113775, 113776 were selected from the ORFs having the nucleotide sequence represented by SEQ ID NO: 78113.

[9514] The probes having the nucleotide sequence represented by SEQ ID NOS: 113777, 113778, 113779, 113780, 113781, 113782, 113783, 113784, 113785, 113786, 113787 were selected from the ORFs having the nucleotide sequence represented by SEQ ID NO: 78114.

[9515] The probes having the nucleotide sequence represented by SEQ ID NOS: 113788, 113789, 113790, 113791, 113792, 113793, 113794, 113795, 113796, 113797, 113798 were selected from the ORFs having the nucleotide sequence represented by SEQ ID NO: 78115.

[9516] The probes having the nucleotide sequence represented by SEQ ID NOS: 113799, 113800, 113801, 113802, 113803, 113804, 113805, 113806, 113807, 113808, 113809 were selected from the ORFs having the nucleotide sequence represented by SEQ ID NO: 78116.

[9517] The probes having the nucleotide sequence represented by SEQ ID NOS: 113810, 113811, 113812, 113813, 113814, 113815, 113816, 113817, 113818, 113819, 113820 were selected from the ORFs having the nucleotide sequence represented by SEQ ID NO: 78117.

[9518] The probes having the nucleotide sequence represented by SEQ ID NOS: 113821, 113822, 113823, 113824, 113825, 113826, 113827, 113828, 113829, 113830, 113831 were selected from the ORFs having the nucleotide sequence represented by SEQ ID NO: 78118.

[9519] The probes having the nucleotide sequence represented by SEQ ID NOS: 113832, 113833, 113834, 113835, 113836, 113837, 113838, 113839, 113840, 113841, 113842 were selected from the ORFs having the nucleotide sequence represented by SEQ ID NO: 78119.

[9520] The probes having the nucleotide sequence represented by SEQ ID NOS: 113843, 113844, 113845, 113846, 113847, 113848, 113849, 113850, 113851, 113852, 113853 were selected from the ORFs having the nucleotide sequence represented by SEQ ID NO: 78120.

[9521] The probes having the nucleotide sequence represented by SEQ ID NOS: 113854, 113855, 113856, 113857, 113858, 113859, 113860, 113861, 113862, 113863, 113864 were selected from the ORFs having the nucleotide sequence represented by SEQ ID NO: 78121.

[9522] The probes having the nucleotide sequence represented by SEQ ID NOS: 113865, 113866, 113867, 113868, 113869, 113870, 113871, 113872, 113873, 113874, 113875 were selected from the ORFs having the nucleotide sequence represented by SEQ ID NO: 78122.

[9523] The probes having the nucleotide sequence represented by SEQ ID NOS: 113876, 113877, 113878, 113879, 113880, 113881, 113882, 113883, 113884, 113885, 113886 were selected from the ORFs having the nucleotide sequence represented by SEQ ID NO: 78123.

[9524] The probes having the nucleotide sequence represented by SEQ ID NOS: 113887, 113888, 113889, 113890, 113891, 113892, 113893, 113894, 113895, 113896, 113897 were selected from the ORFs having the nucleotide sequence represented by SEQ ID NO: 78124.

[9525] The probes having the nucleotide sequence represented by SEQ ID NOS: 113898, 113899, 113900, 113901, 113902, 113903, 113904, 113905, 113906, 113907, 113908 were selected from the ORFs having the nucleotide sequence represented by SEQ ID NO: 78125.

[9526] The probes having the nucleotide sequence represented by SEQ ID NOS: 113909, 113910, 113911, 113912, 113913, 113914, 113915, 113916, 113917, 113918, 113919 were selected from the ORFs having the nucleotide sequence represented by SEQ ID NO: 78126.

[9527] The probes having the nucleotide sequence represented by SEQ ID NOS: 113920, 113921, 113922, 113923, 113924, 113925, 113926, 113927, 113928, 113929, 113930 were selected from the ORFs having the nucleotide sequence represented by SEQ ID NO: 78127.

[9528] The probes having the nucleotide sequence represented by SEQ ID NOS: 113931, 113932, 113933, 113934, 113935, 113936, 113937, 113938, 113939, 113940, 113941 were selected from the ORFs having the nucleotide sequence represented by SEQ ID NO: 78128.

[9529] The probes having the nucleotide sequence represented by SEQ ID NOS: 113942, 113943, 113944, 113945, 113946, 113947, 113948, 113949, 113950, 113951, 113952 were selected from the ORFs having the nucleotide sequence represented by SEQ ID NO: 78129.

[9530] The probes having the nucleotide sequence represented by SEQ ID NOS: 113953, 113954, 113955, 113956, 113957, 113958, 113959, 113960, 113961, 113962, 113963 were selected from the ORFs having the nucleotide sequence represented by SEQ ID NO: 78130.

[9531] The probes having the nucleotide sequence represented by SEQ ID NOS: 113964, 113965, 113966, 113967, 113968, 113969, 113970, 113971, 113972, 113973, 113974 were selected from the ORFs having the nucleotide sequence represented by SEQ ID NO: 78131.

[9532] The probes having the nucleotide sequence represented by SEQ ID NOS: 113975, 113976, 113977, 113978, 113979, 113980, 113981, 113982, 113983, 113984, 113985 were selected from the ORFs having the nucleotide sequence represented by SEQ ID NO: 78132.

[9533] The probes having the nucleotide sequence represented by SEQ ID NOS: 113986, 113987, 113988, 113989, 113990, 113991, 113992, 113993, 113994, 113995, 113996 were selected from the ORFs having the nucleotide sequence represented by SEQ ID NO: 78133.

[9534] The probes having the nucleotide sequence represented by SEQ ID NOS: 113997, 113998, 113999, 114000, 114001, 114002, 114003, 114004, 114005, 114006, 114007 were selected from the ORFs having the nucleotide sequence represented by SEQ ID NO: 78134.

[9535] The probes having the nucleotide sequence represented by SEQ ID NOS: 114008, 114009, 114010, 114011, 114012, 114013, 114014, 114015, 114016, 114017, 114018 were selected from the ORFs having the nucleotide sequence represented by SEQ ID NO: 78135.

[9536] The probes having the nucleotide sequence represented by SEQ ID NOS: 114019, 114020, 114021, 114022, 114023, 114024, 114025, 114026, 114027, 114028, 114029 were selected from the ORFs having the nucleotide sequence represented by SEQ ID NO: 78136.

[9537] The probes having the nucleotide sequence represented by SEQ ID NOS: 114030, 114031, 114032, 114033, 114034, 114035, 114036, 114037, 114038, 114039, 114040 were selected from the ORFs having the nucleotide sequence represented by SEQ ID NO: 78137.

[9538] The probes having the nucleotide sequence represented by SEQ ID NOS: 114041, 114042, 114043, 114044, 114045, 114046, 114047, 114048, 114049, 114050, 114051 were selected from the ORFs having the nucleotide sequence represented by SEQ ID NO: 78138.

[9539] The probes having the nucleotide sequence represented by SEQ ID NOS: 114052, 114053, 114054, 114055, 114056, 114057, 114058, 114059, 114060, 114061, 114062 were selected from the ORFs having the nucleotide sequence represented by SEQ ID NO: 78139.

[9540] The probes having the nucleotide sequence represented by SEQ ID NOS: 114063, 114064, 114065, 114066, 114067, 114068, 114069, 114070, 114071, 114072, 114073 were selected from the ORFs having the nucleotide sequence represented by SEQ ID NO: 78140.

[9541] The probes having the nucleotide sequence represented by SEQ ID NOS: 114074, 114075, 114076, 114077, 114078, 114079, 114080, 114081, 114082, 114083, 114084 were selected from the ORFs having the nucleotide sequence represented by SEQ ID NO: 78141.

[9542] The probes having the nucleotide sequence represented by SEQ ID NOS: 114085, 114086, 114087, 114088, 114089, 114090, 114091, 114092, 114093, 114094, 114095 were selected from the ORFs having the nucleotide sequence represented by SEQ ID NO: 78142.

[9543] The probes having the nucleotide sequence represented by SEQ ID NOS: 114096, 114097, 114098, 114099, 114100, 114101, 114102, 114103, 114104, 114105, 114106 were selected from the ORFs having the nucleotide sequence represented by SEQ ID NO: 78143.

[9544] The probes having the nucleotide sequence represented by SEQ ID NOS: 114107, 114108, 114109, 114110, 114111, 114112, 114113, 114114, 114115, 114116, 114117 were selected from the ORFs having the nucleotide sequence represented by SEQ ID NO: 78144.

[9545] The probes having the nucleotide sequence represented by SEQ ID NOS: 114118, 114119, 114120, 114121, 114122, 114123, 114124, 114125, 114126, 114127, 114128 were selected from the ORFs having the nucleotide sequence represented by SEQ ID NO: 78145.

[9546] The probes having the nucleotide sequence represented by SEQ ID NOS: 114129, 114130, 114131, 114132, 114133, 114134, 114135, 114136, 114137, 114138, 114139 were selected from the ORFs having the nucleotide sequence represented by SEQ ID NO: 78146.

[9547] The probes having the nucleotide sequence represented by SEQ ID NOS: 114140, 114141, 114142, 114143, 114144, 114145, 114146, 114147, 114148, 114149, 114150 were selected from the ORFs having the nucleotide sequence represented by SEQ ID NO: 78147.

[9548] The probes having the nucleotide sequence represented by SEQ ID NOS: 114151, 114152, 114153, 114154, 114155, 114156, 114157, 114158, 114159, 114160, 114161 were selected from the ORFs having the nucleotide sequence represented by SEQ ID NO: 78148.

[9549] The probes having the nucleotide sequence represented by SEQ ID NOS: 114162, 114163, 114164, 114165, 114166, 114167, 114168, 114169, 114170, 114171, 114172 were selected from the ORFs having the nucleotide sequence represented by SEQ ID NO: 78149.

[9550] The probes having the nucleotide sequence represented by SEQ ID NOS: 114173, 114174, 114175, 114176, 114177, 114178, 114179, 114180, 114181, 114182, 114183 were selected from the ORFs having the nucleotide sequence represented by SEQ ID NO: 78150.

[9551] The probes having the nucleotide sequence represented by SEQ ID NOS: 114184, 114185, 114186, 114187, 114188, 114189, 114190, 114191, 114192, 114193, 114194 were selected from the ORFs having the nucleotide sequence represented by SEQ ID NO: 78151.

[9552] The probes having the nucleotide sequence represented by SEQ ID NOS: 114195, 114196, 114197, 114198, 114199, 114200, 114201, 114202, 114203, 114204, 114205 were selected from the ORFs having the nucleotide sequence represented by SEQ ID NO: 78152.

[9553] The probes having the nucleotide sequence represented by SEQ ID NOS: 114206, 114207, 114208, 114209, 114210, 114211, 114212, 114213, 114214, 114215, 114216 were selected from the ORFs having the nucleotide sequence represented by SEQ ID NO: 78153.

[9554] The probes having the nucleotide sequence represented by SEQ ID NOS: 114217, 114218, 114219, 114220, 114221, 114222, 114223, 114224, 114225, 114226, 114227 were selected from the ORFs having the nucleotide sequence represented by SEQ ID NO: 78154.

[9555] The probes having the nucleotide sequence represented by SEQ ID NOS: 114228, 114229, 114230, 114231, 114232, 114233, 114234, 114235, 114236, 114237, 114238 were selected from the ORFs having the nucleotide sequence represented by SEQ ID NO: 78155.

[9556] The probes having the nucleotide sequence represented by SEQ ID NOS: 114239, 114240, 114241, 114242, 114243, 114244, 114245, 114246, 114247, 114248, 114249 were selected from the ORFs having the nucleotide sequence represented by SEQ ID NO: 78156.

[9557] The probes having the nucleotide sequence represented by SEQ ID NOS: 114250, 114251, 114252, 114253, 114254, 114255, 114256, 114257, 114258, 114259, 114260 were selected from the ORFs having the nucleotide sequence represented by SEQ ID NO: 78157.

[9558] The probes having the nucleotide sequence represented by SEQ ID NOS: 114261, 114262, 114263, 114264, 114265, 114266, 114267, 114268, 114269, 114270, 114271 were selected from the ORFs having the nucleotide sequence represented by SEQ ID NO: 78158.

[9559] The probes having the nucleotide sequence represented by SEQ ID NOS: 114272, 114273, 114274, 114275, 114276, 114277, 114278, 114279, 114280, 114281, 114282 were selected from the ORFs having the nucleotide sequence represented by SEQ ID NO: 78159.

[9560] The probes having the nucleotide sequence represented by SEQ ID NOS: 114283, 114284, 114285, 114286, 114287, 114288, 114289, 114290, 114291, 114292, 114293 were selected from the ORFs having the nucleotide sequence represented by SEQ ID NO: 78160.

[9561] The probes having the nucleotide sequence represented by SEQ ID NOS: 114294, 114295, 114296, 114297, 114298, 114299, 114300, 114301, 114302, 114303, 114304 were selected from the ORFs having the nucleotide sequence represented by SEQ ID NO: 78161.

[9562] The probes having the nucleotide sequence represented by SEQ ID NOS: 114305, 114306, 114307, 114308, 114309, 114310, 114311, 114312, 114313, 114314, 114315 were selected from the ORFs having the nucleotide sequence represented by SEQ ID NO: 78162.

[9563] The probes having the nucleotide sequence represented by SEQ ID NOS: 114316, 114317, 114318, 114319, 114320, 114321, 114322, 114323, 114324, 114325, 114326 were selected from the ORFs having the nucleotide sequence represented by SEQ ID NO: 78163.

[9564] The probes having the nucleotide sequence represented by SEQ ID NOS: 114327, 114328, 114329, 114330, 114331, 114332, 114333, 114334, 114335, 114336, 114337 were selected from the ORFs having the nucleotide sequence represented by SEQ ID NO: 78164.

[9565] The probes having the nucleotide sequence represented by SEQ ID NOS: 114338, 114339, 114340, 114341, 114342, 114343, 114344, 114345, 114346, 114347, 114348 were selected from the ORFs having the nucleotide sequence represented by SEQ ID NO: 78165.

[9566] The probes having the nucleotide sequence represented by SEQ ID NOS: 114349, 114350, 114351, 114352, 114353, 114354, 114355, 114356, 114357, 114358, 114359 were selected from the ORFs having the nucleotide sequence represented by SEQ ID NO: 78166.

[9567] The probes having the nucleotide sequence represented by SEQ ID NOS: 114360, 114361, 114362, 114363, 114364, 114365, 114366, 114367, 114368, 114369, 114370 were selected from the ORFs having the nucleotide sequence represented by SEQ ID NO: 78167.

[9568] The probes having the nucleotide sequence represented by SEQ ID NOS: 114371, 114372, 114373, 114374, 114375, 114376, 114377, 114378, 114379, 114380, 114381 were selected from the ORFs having the nucleotide sequence represented by SEQ ID NO: 78168.

[9569] The probes having the nucleotide sequence represented by SEQ ID NOS: 114382, 114383, 114384, 114385, 114386, 114387, 114388, 114389, 114390, 114391, 114392 were selected from the ORFs having the nucleotide sequence represented by SEQ ID NO: 78169.

[9570] The probes having the nucleotide sequence represented by SEQ ID NOS: 114393, 114394, 114395, 114396, 114397, 114398, 114399, 114400, 114401, 114402, 114403 were selected from the ORFs having the nucleotide sequence represented by SEQ ID NO: 78170.

[9571] The probes having the nucleotide sequence represented by SEQ ID NOS: 114404, 114405, 114406, 114407, 114408, 114409, 114410, 114411, 114412, 114413, 114414 were selected from the ORFs having the nucleotide sequence represented by SEQ ID NO: 78171.

[9572] The probes having the nucleotide sequence represented by SEQ ID NOS: 114415, 114416, 114417, 114418, 114419, 114420, 114421, 114422, 114423, 114424, 114425 were selected from the ORFs having the nucleotide sequence represented by SEQ ID NO: 78172.

[9573] The probes having the nucleotide sequence represented by SEQ ID NOS: 114426, 114427, 114428, 114429, 114430, 114431, 114432, 114433, 114434, 114435, 114436 were selected from the ORFs having the nucleotide sequence represented by SEQ ID NO: 78173.

[9574] The probes having the nucleotide sequence represented by SEQ ID NOS: 114437, 114438, 114439, 114440, 114441, 114442, 114443, 114444, 114445, 114446, 114447 were selected from the ORFs having the nucleotide sequence represented by SEQ ID NO: 78174.

[9575] The probes having the nucleotide sequence represented by SEQ ID NOS: 114448, 114449, 114450, 114451, 114452, 114453, 114454, 114455, 114456, 114457, 114458 were selected from the ORFs having the nucleotide sequence represented by SEQ ID NO: 78175.

[9576] The probes having the nucleotide sequence represented by SEQ ID NOS: 114459, 114460, 114461, 114462, 114463, 114464, 114465, 114466, 114467, 114468, 114469 were selected from the ORFs having the nucleotide sequence represented by SEQ ID NO: 78176.

[9577] The probes having the nucleotide sequence represented by SEQ ID NOS: 114470, 114471, 114472, 114473, 114474, 114475, 114476, 114477, 114478, 114479, 114480 were selected from the ORFs having the nucleotide sequence represented by SEQ ID NO: 78177.

[9578] The probes having the nucleotide sequence represented by SEQ ID NOS: 114481, 114482, 114483, 114484, 114485, 114486, 114487, 114488, 114489, 114490, 114491 were selected from the ORFs having the nucleotide sequence represented by SEQ ID NO: 78178.

[9579] The probes having the nucleotide sequence represented by SEQ ID NOS: 114492, 114493, 114494, 114495, 114496, 114497, 114498, 114499, 114500, 114501, 114502 were selected from the ORFs having the nucleotide sequence represented by SEQ ID NO: 78179.

[9580] The probes having the nucleotide sequence represented by SEQ ID NOS: 114503, 114504, 114505, 114506, 114507, 114508, 114509, 114510, 114511, 114512, 114513 were selected from the ORFs having the nucleotide sequence represented by SEQ ID NO: 78180.

[9581] The probes having the nucleotide sequence represented by SEQ ID NOS: 114514, 114515, 114516, 114517, 114518, 114519, 114520, 114521, 114522, 114523, 114524 were selected from the ORFs having the nucleotide sequence represented by SEQ ID NO: 78181.

[9582] The probes having the nucleotide sequence represented by SEQ ID NOS: 114525, 114526, 114527, 114528, 114529, 114530, 114531, 114532, 114533, 114534, 114535 were selected from the ORFs having the nucleotide sequence represented by SEQ ID NO: 78182.

[9583] The probes having the nucleotide sequence represented by SEQ ID NOS: 114536, 114537, 114538, 114539, 114540, 114541, 114542, 114543, 114544, 114545, 114546 were selected from the ORFs having the nucleotide sequence represented by SEQ ID NO: 78183.

[9584] The probes having the nucleotide sequence represented by SEQ ID NOS: 114547, 114548, 114549, 114550, 114551, 114552, 114553, 114554, 114555, 114556, 114557 were selected from the ORFs having the nucleotide sequence represented by SEQ ID NO: 78184.

[9585] The probes having the nucleotide sequence represented by SEQ ID NOS: 114558, 114559, 114560, 114561, 114562, 114563, 114564, 114565, 114566, 114567, 114568 were selected from the ORFs having the nucleotide sequence represented by SEQ ID NO: 78185.

[9586] The probes having the nucleotide sequence represented by SEQ ID NOS: 114569, 114570, 114571, 114572, 114573, 114574, 114575, 114576, 114577, 114578, 114579 were selected from the ORFs having the nucleotide sequence represented by SEQ ID NO: 78186.

[9587] The probes having the nucleotide sequence represented by SEQ ID NOS: 114580, 114581, 114582, 114583, 114584, 114585, 114586, 114587, 114588, 114589, 114590 were selected from the ORFs having the nucleotide sequence represented by SEQ ID NO: 78187.

[9588] The probes having the nucleotide sequence represented by SEQ ID NOS: 114591, 114592, 114593, 114594, 114595, 114596, 114597, 114598, 114599, 114600, 114601 were selected from the ORFs having the nucleotide sequence represented by SEQ ID NO: 78188.

[9589] The probes having the nucleotide sequence represented by SEQ ID NOS: 114602, 114603, 114604, 114605, 114606, 114607, 114608, 114609, 114610, 114611, 114612 were selected from the ORFs having the nucleotide sequence represented by SEQ ID NO: 78189.

[9590] The probes having the nucleotide sequence represented by SEQ ID NOS: 114613, 114614, 114615, 114616, 114617, 114618, 114619, 114620, 114621, 114622, 114623 were selected from the ORFs having the nucleotide sequence represented by SEQ ID NO: 78190.

[9591] The probes having the nucleotide sequence represented by SEQ ID NOS: 114624, 114625, 114626, 114627, 114628, 114629, 114630, 114631, 114632, 114633, 114634 were selected from the ORFs having the nucleotide sequence represented by SEQ ID NO: 78191.

[9592] The probes having the nucleotide sequence represented by SEQ ID NOS: 114635, 114636, 114637, 114638, 114639, 114640, 114641, 114642, 114643, 114644, 114645 were selected from the ORFs having the nucleotide sequence represented by SEQ ID NO: 78192.

[9593] The probes having the nucleotide sequence represented by SEQ ID NOS: 114646, 114647, 114648, 114649, 114650, 114651, 114652, 114653, 114654, 114655, 114656 were selected from the ORFs having the nucleotide sequence represented by SEQ ID NO: 78193.

[9594] The probes having the nucleotide sequence represented by SEQ ID NOS: 114657, 114658, 114659, 114660, 114661, 114662, 114663, 114664, 114665, 114666, 114667 were selected from the ORFs having the nucleotide sequence represented by SEQ ID NO: 78194.

[9595] The probes having the nucleotide sequence represented by SEQ ID NOS: 114668, 114669, 114670, 114671, 114672, 114673, 114674, 114675, 114676, 114677, 114678 were selected from the ORFs having the nucleotide sequence represented by SEQ ID NO: 78195.

[9596] The probes having the nucleotide sequence represented by SEQ ID NOS: 114679, 114680, 114681, 114682, 114683, 114684, 114685, 114686, 114687, 114688, 114689 were selected from the ORFs having the nucleotide sequence represented by SEQ ID NO: 78196.

[9597] The probes having the nucleotide sequence represented by SEQ ID NOS: 114690, 114691, 114692, 114693, 114694, 114695, 114696, 114697, 114698, 114699, 114700 were selected from the ORFs having the nucleotide sequence represented by SEQ ID NO: 78197.

[9598] The probes having the nucleotide sequence represented by SEQ ID NOS: 114701, 114702, 114703, 114704, 114705, 114706, 114707, 114708, 114709, 114710, 114711 were selected from the ORFs having the nucleotide sequence represented by SEQ ID NO: 78198.

[9599] The probes having the nucleotide sequence represented by SEQ ID NOS: 114712, 114713, 114714, 114715, 114716, 114717, 114718, 114719, 114720, 114721, 114722 were selected from the ORFs having the nucleotide sequence represented by SEQ ID NO: 78199.

[9600] The probes having the nucleotide sequence represented by SEQ ID NOS: 114723, 114724, 114725, 114726, 114727, 114728, 114729, 114730, 114731, 114732, 114733 were selected from the ORFs having the nucleotide sequence represented by SEQ ID NO: 78200.

[9601] The probes having the nucleotide sequence represented by SEQ ID NOS: 114734, 114735, 114736, 114737, 114738, 114739, 114740, 114741, 114742, 114743, 114744 were selected from the ORFs having the nucleotide sequence represented by SEQ ID NO: 78201.

[9602] The probes having the nucleotide sequence represented by SEQ ID NOS: 114745, 114746, 114747, 114748, 114749, 114750, 114751, 114752, 114753, 114754, 114755 were selected from the ORFs having the nucleotide sequence represented by SEQ ID NO: 78202.

[9603] The probes having the nucleotide sequence represented by SEQ ID NOS: 114756, 114757, 114758, 114759, 114760, 114761, 114762, 114763, 114764, 114765, 114766 were selected from the ORFs having the nucleotide sequence represented by SEQ ID NO: 78203.

[9604] The probes having the nucleotide sequence represented by SEQ ID NOS: 114767, 114768, 114769, 114770, 114771, 114772, 114773, 114774, 114775, 114776, 114777 were selected from the ORFs having the nucleotide sequence represented by SEQ ID NO: 78204.

[9605] The probes having the nucleotide sequence represented by SEQ ID NOS: 114778, 114779, 114780, 114781, 114782, 114783, 114784, 114785, 114786, 114787, 114788 were selected from the ORFs having the nucleotide sequence represented by SEQ ID NO: 78205.

[9606] The probes having the nucleotide sequence represented by SEQ ID NOS: 114789, 114790, 114791, 114792, 114793, 114794, 114795, 114796, 114797, 114798, 114799 were selected from the ORFs having the nucleotide sequence represented by SEQ ID NO: 78206.

[9607] The probes having the nucleotide sequence represented by SEQ ID NOS: 114800, 114801, 114802, 114803, 114804, 114805, 114806, 114807, 114808, 114809, 114810 were selected from the ORFs having the nucleotide sequence represented by SEQ ID NO: 78207.

[9608] The probes having the nucleotide sequence represented by SEQ ID NOS: 114811, 114812, 114813, 114814, 114815, 114816, 114817, 114818, 114819, 114820, 114821 were selected from the ORFs having the nucleotide sequence represented by SEQ ID NO: 78208.

[9609] The probes having the nucleotide sequence represented by SEQ ID NOS: 114822, 114823, 114824, 114825, 114826, 114827, 114828, 114829, 114830, 114831, 114832 were selected from the ORFs having the nucleotide sequence represented by SEQ ID NO: 78209.

[9610] The probes having the nucleotide sequence represented by SEQ ID NOS: 114833, 114834, 114835, 114836, 114837, 114838, 114839, 114840, 114841, 114842, 114843 were selected from the ORFs having the nucleotide sequence represented by SEQ ID NO: 78210.

[9611] The probes having the nucleotide sequence represented by SEQ ID NOS: 114844, 114845, 114846, 114847, 114848, 114849, 114850, 114851, 114852, 114853, 114854 were selected from the ORFs having the nucleotide sequence represented by SEQ ID NO: 78211.

[9612] The probes having the nucleotide sequence represented by SEQ ID NOS: 114855, 114856, 114857, 114858, 114859, 114860, 114861, 114862, 114863, 114864, 114865 were selected from the ORFs having the nucleotide sequence represented by SEQ ID NO: 78212.

[9613] The probes having the nucleotide sequence represented by SEQ ID NOS: 114866, 114867, 114868, 114869, 114870, 114871, 114872, 114873, 114874, 114875, 114876 were selected from the ORFs having the nucleotide sequence represented by SEQ ID NO: 78213.

[9614] The probes having the nucleotide sequence represented by SEQ ID NOS: 114877, 114878, 114879, 114880, 114881, 114882, 114883, 114884, 114885, 114886, 114887 were selected from the ORFs having the nucleotide sequence represented by SEQ ID NO: 78214.

[9615] The probes having the nucleotide sequence represented by SEQ ID NOS: 114888, 114889, 114890, 114891, 114892, 114893, 114894, 114895, 114896, 114897, 114898 were selected from the ORFs having the nucleotide sequence represented by SEQ ID NO: 78215.

[9616] The probes having the nucleotide sequence represented by SEQ ID NOS: 114899, 114900, 114901, 114902, 114903, 114904, 114905, 114906, 114907, 114908, 114909 were selected from the ORFs having the nucleotide sequence represented by SEQ ID NO: 78216.

[9617] The probes having the nucleotide sequence represented by SEQ ID NOS: 114910, 114911, 114912, 114913, 114914, 114915, 114916, 114917, 114918, 114919, 114920 were selected from the ORFs having the nucleotide sequence represented by SEQ ID NO: 78217.

[9618] The probes having the nucleotide sequence represented by SEQ ID NOS: 114921, 114922, 114923, 114924, 114925, 114926, 114927, 114928, 114929, 114930, 114931 were selected from the ORFs having the nucleotide sequence represented by SEQ ID NO: 78218.

[9619] The probes having the nucleotide sequence represented by SEQ ID NOS: 114932, 114933, 114934, 114935, 114936, 114937, 114938, 114939, 114940, 114941, 114942 were selected from the ORFs having the nucleotide sequence represented by SEQ ID NO: 78219.

[9620] The probes having the nucleotide sequence represented by SEQ ID NOS: 114943, 114944, 114945, 114946, 114947, 114948, 114949, 114950, 114951, 114952, 114953 were selected from the ORFs having the nucleotide sequence represented by SEQ ID NO: 78220.

[9621] The probes having the nucleotide sequence represented by SEQ ID NOS: 114954, 114955, 114956, 114957, 114958, 114959, 114960, 114961, 114962, 114963, 114964 were selected from the ORFs having the nucleotide sequence represented by SEQ ID NO: 78221.

[9622] The probes having the nucleotide sequence represented by SEQ ID NOS: 114965, 114966, 114967, 114968, 114969, 114970, 114971, 114972, 114973, 114974, 114975 were selected from the ORFs having the nucleotide sequence represented by SEQ ID NO: 78222.

[9623] The probes having the nucleotide sequence represented by SEQ ID NOS: 114976, 114977, 114978, 114979, 114980, 114981, 114982, 114983, 114984, 114985, 114986 were selected from the ORFs having the nucleotide sequence represented by SEQ ID NO: 78223.

[9624] The probes having the nucleotide sequence represented by SEQ ID NOS: 114987, 114988, 114989, 114990, 114991, 114992, 114993, 114994, 114995, 114996, 114997 were selected from the ORFs having the nucleotide sequence represented by SEQ ID NO: 78224.

[9625] The probes having the nucleotide sequence represented by SEQ ID NOS: 114998, 114999, 115000, 115001, 115002, 115003, 115004, 115005, 115006, 115007, 115008 were selected from the ORFs having the nucleotide sequence represented by SEQ ID NO: 78225.

[9626] The probes having the nucleotide sequence represented by SEQ ID NOS: 115009, 115010, 115011, 115012, 115013, 115014, 115015, 115016, 115017, 115018, 115019 were selected from the ORFs having the nucleotide sequence represented by SEQ ID NO: 78226.

[9627] The probes having the nucleotide sequence represented by SEQ ID NOS: 115020, 115021, 115022, 115023, 115024, 115025, 115026, 115027, 115028, 115029, 115030 were selected from the ORFs having the nucleotide sequence represented by SEQ ID NO: 78227.

[9628] The probes having the nucleotide sequence represented by SEQ ID NOS: 115031, 115032, 115033, 115034, 115035, 115036, 115037, 115038, 115039, 115040, 115041 were selected from the ORFs having the nucleotide sequence represented by SEQ ID NO: 78228.

[9629] The probes having the nucleotide sequence represented by SEQ ID NOS: 115042, 115043, 115044, 115045, 115046, 115047, 115048, 115049, 115050, 115051, 115052 were selected from the ORFs having the nucleotide sequence represented by SEQ ID NO: 78229.

[9630] The probes having the nucleotide sequence represented by SEQ ID NOS: 115053, 115054, 115055, 115056, 115057, 115058, 115059, 115060, 115061, 115062, 115063 were selected from the ORFs having the nucleotide sequence represented by SEQ ID NO: 78230.

[9631] The probes having the nucleotide sequence represented by SEQ ID NOS:.115064, 115065, 115066, 115067, 115068, 115069, 115070, 115071, 115072, 115073, 115074 were selected from the ORFs having the nucleotide sequence represented by SEQ ID NO: 78231.

[9632] The probes having the nucleotide sequence represented by SEQ ID NOS: 115075, 115076, 115077, 115078, 115079, 115080, 115081, 115082, 115083, 115084, 115085 were selected from the ORFs having the nucleotide sequence represented by SEQ ID NO: 78232.

[9633] The probes having the nucleotide sequence represented by SEQ ID NOS: 115086, 115087, 115088, 115089, 115090, 115091, 115092, 115093, 115094, 115095, 115096 were selected from the ORFs having the nucleotide sequence represented by SEQ ID NO: 78233.

[9634] The probes having the nucleotide sequence represented by SEQ ID NOS: 115097, 115098, 115099, 115100, 115101, 115102, 115103, 115104, 115105, 115106, 115107 were selected from the ORFs having the nucleotide sequence represented by SEQ ID NO: 78234.

[9635] The probes having the nucleotide sequence represented by SEQ ID NOS: 115108, 115109, 115110, 115111, 115112, 115113, 115114, 115115, 115116, 115117, 115118 were selected from the ORFs having the nucleotide sequence represented by SEQ ID NO: 78235.

[9636] The probes having the nucleotide sequence represented by SEQ ID NOS: 115119, 115120, 115121, 115122, 115123, 115124, 115125, 115126, 115127, 115128, 115129 were selected from the ORFs having the nucleotide sequence represented by SEQ ID NO: 78236.

[9637] The probes having the nucleotide sequence represented by SEQ ID NOS: 115130, 115131, 115132, 115133, 115134, 115135, 115136, 115137, 115138, 115139, 115140 were selected from the ORFs having the nucleotide sequence represented by SEQ ID NO: 78237.

[9638] The probes having the nucleotide sequence represented by SEQ ID NOS: 115141, 115142, 115143, 115144, 115145, 115146, 115147, 115148, 115149, 115150, 115151 were selected from the ORFs having the nucleotide sequence represented by SEQ ID NO: 78238.

[9639] The probes having the nucleotide sequence represented by SEQ ID NOS: 115152, 115153, 115154, 115155, 115156, 115157, 115158, 115159, 115160, 115161, 115162 were selected from the ORFs having the nucleotide sequence represented by SEQ ID NO: 78239.

[9640] The probes having the nucleotide sequence represented by SEQ ID NOS: 115163, 115164, 115165, 115166, 115167, 115168, 115169, 115170, 115171, 115172, 115173 were selected from the ORFs having the nucleotide sequence represented by SEQ ID NO: 78240.

[9641] The probes having the nucleotide sequence represented by SEQ ID NOS: 115174, 115175, 115176, 115177, 115178, 115179, 115180, 115181, 115182, 115183, 115184 were selected from the ORFs having the nucleotide sequence represented by SEQ ID NO: 78241.

[9642] The probes having the nucleotide sequence represented by SEQ ID NOS: 115185, 115186, 115187, 115188, 115189, 115190, 115191, 115192, 115193, 115194, 115195 were selected from the ORFs having the nucleotide sequence represented by SEQ ID NO: 78242.

[9643] The probes having the nucleotide sequence represented by SEQ ID NOS: 115196, 115197, 115198, 115199, 115200, 115201, 115202, 115203, 115204, 115205, 115206 were selected from the ORFs having the nucleotide sequence represented by SEQ ID NO: 78243.

[9644] The probes having the nucleotide sequence represented by SEQ ID NOS: 115207, 115208, 115209, 115210, 115211, 115212, 115213, 115214, 115215, 115216, 115217 were selected from the ORFs having the nucleotide sequence represented by SEQ ID NO: 78244.

[9645] The probes having the nucleotide sequence represented by SEQ ID NOS: 115218, 115219, 115220, 115221, 115222, 115223, 115224, 115225, 115226, 115227, 115228 were selected from the ORFs having the nucleotide sequence represented by SEQ ID NO: 78245.

[9646] The probes having the nucleotide sequence represented by SEQ ID NOS: 115229, 115230, 115231, 115232, 115233, 115234, 115235, 115236, 115237, 115238, 115239, 115240, 115241, 115242, 115243, 115244, 115245, 115246, 115247, 115248, 115249, 115250 were selected from the ORFs having the nucleotide sequence represented by SEQ ID NO: 78246.

[9647] The probes having the nucleotide sequence represented by SEQ ID NOS: 115251, 115252, 115253, 115254, 115255, 115256, 115257, 115258, 115259, 115260, 115261 were selected from the ORFs having the nucleotide sequence represented by SEQ ID NO: 78247.

[9648] The probes having the nucleotide sequence represented by SEQ ID NOS: 115262, 115263, 115264, 115265, 115266, 115267, 115268, 115269, 115270, 115271, 115272 were selected from the ORFs having the nucleotide sequence represented by SEQ ID NO: 78248.

[9649] The probes having the nucleotide sequence represented by SEQ ID NOS: 115273, 115274, 115275, 115276, 115277, 115278, 115279, 115280, 115281, 115282, 115283 were selected from the ORFs having the nucleotide sequence represented by SEQ ID NO: 78249.

[9650] The probes having the nucleotide sequence represented by SEQ ID NOS: 115284, 115285, 115286, 115287, 115288, 115289, 115290, 115291, 115292, 115293, 115294 were selected from the ORFs having the nucleotide sequence represented by SEQ ID NO: 78250.

[9651] The probes having the nucleotide sequence represented by SEQ ID NOS: 115295, 115296, 115297, 115298, 115299, 115300, 115301, 115302, 115303, 115304, 115305 were selected from the ORFs having the nucleotide sequence represented by SEQ ID NO: 78251.

[9652] The probes having the nucleotide sequence represented by SEQ ID NOS: 115306, 115307, 115308, 115309, 115310, 115311, 115312, 115313, 115314, 115315, 115316 were selected from the ORFs having the nucleotide sequence represented by SEQ ID NO: 78252.

[9653] The probes having the nucleotide sequence represented by SEQ ID NOS: 115317, 115318, 115319, 115320, 115321, 115322, 115323, 115324, 115325, 115326, 115327 were selected from the ORFs having the nucleotide sequence represented by SEQ ID NO: 78253.

[9654] The probes having the nucleotide sequence represented by SEQ ID NOS: 115328, 115329, 115330, 115331, 115332, 115333, 115334, 115335, 115336, 115337, 115338 were selected from the ORFs having the nucleotide sequence represented by SEQ ID NO: 78254.

[9655] The probes having the nucleotide sequence represented by SEQ ID NOS: 115339, 115340, 115341, 115342, 115343, 115344, 115345, 115346, 115347, 115348, 115349 were selected from the ORFs having the nucleotide sequence represented by SEQ ID NO: 78255.

[9656] The probes having the nucleotide sequence represented by SEQ ID NOS: 115350, 115351, 115352, 115353, 115354, 115355, 115356, 115357, 115358, 115359, 115360 were selected from the ORFs having the nucleotide sequence represented by SEQ ID NO: 78256.

[9657] The probes having the nucleotide sequence represented by SEQ ID NOS: 115361, 115362, 115363, 115364, 115365, 115366, 115367, 115368, 115369, 115370, 115371 were selected from the ORFs having the nucleotide sequence represented by SEQ ID NO: 78257.

[9658] The probes having the nucleotide sequence represented by SEQ ID NOS: 115372, 115373, 115374, 115375, 115376, 115377, 115378, 115379, 115380, 115381, 115382 were selected from the ORFs having the nucleotide sequence represented by SEQ ID NO: 78258.

[9659] The probes having the nucleotide sequence represented by SEQ ID NOS: 115383, 115384, 115385, 115386, 115387, 115388, 115389, 115390, 115391, 115392, 115393 were selected from the ORFs having the nucleotide sequence represented by SEQ ID NO: 78259.

[9660] The probes having the nucleotide sequence represented by SEQ ID NOS: 115394, 115395, 115396, 115397, 115398, 115399, 115400, 115401, 115402, 115403, 115404 were selected from the ORFs having the nucleotide sequence represented by SEQ ID NO: 78260.

[9661] The probes having the nucleotide sequence represented by SEQ ID NOS: 115405, 115406, 115407, 115408, 115409, 115410, 115411, 115412, 115413, 115414, 115415 were selected from the ORFs having the nucleotide sequence represented by SEQ ID NO: 78261.

[9662] The probes having the nucleotide sequence represented by SEQ ID NOS: 115416, 115417, 115418, 115419, 115420, 115421, 115422, 115423, 115424, 115425, 115426 were selected from the ORFs having the nucleotide sequence represented by SEQ ID NO: 78262.

[9663] The probes having the nucleotide sequence represented by SEQ ID NOS: 115427, 115428, 115429, 115430, 115431, 115432, 115433, 115434, 115435, 115436, 115437 were selected from the ORFs having the nucleotide sequence represented by SEQ ID NO: 78263.

[9664] The probes having the nucleotide sequence represented by SEQ ID NOS: 115438, 115439, 115440, 115441, 115442, 115443, 115444, 115445, 115446, 115447, 115448 were selected from the ORFs having the nucleotide sequence represented by SEQ ID NO: 78264.

[9665] The probes having the nucleotide sequence represented by SEQ ID NOS: 115449, 115450, 115451, 115452, 115453, 115454, 115455, 115456, 115457, 115458, 115459 were selected from the ORFs having the nucleotide sequence represented by SEQ ID NO: 78265.

[9666] The probes having the nucleotide sequence represented by SEQ ID NOS: 115460, 115461, 115462, 115463, 115464, 115465, 115466, 115467, 115468, 115469, 115470 were selected from the ORFs having the nucleotide sequence represented by SEQ ID NO: 78266.

[9667] The probes having the nucleotide sequence represented by SEQ ID NOS: 115471, 115472, 115473, 115474, 115475, 115476, 115477, 115478, 115479, 115480, 115481 were selected from the ORFs having the nucleotide sequence represented by SEQ ID NO: 78267.

[9668] The probes having the nucleotide sequence represented by SEQ ID NOS: 115482, 115483, 115484, 115485, 115486, 115487, 115488, 115489, 115490, 115491, 115492 were selected from the ORFs having the nucleotide sequence represented by SEQ ID NO: 78268.

[9669] The probes having the nucleotide sequence represented by SEQ ID NOS: 115493, 115494, 115495, 115496, 115497, 115498, 115499, 115500, 115501, 115502, 115503 were selected from the ORFs having the nucleotide sequence represented by SEQ ID NO: 78269.

[9670] The probes having the nucleotide sequence represented by SEQ ID NOS: 115504, 115505, 115506, 115507, 115508, 115509, 115510, 115511, 115512, 115513, 115514 were selected from the ORFs having the nucleotide sequence represented by SEQ ID NO: 78270.

[9671] The probes having the nucleotide sequence represented by SEQ ID NOS: 115515, 115516, 115517, 115518, 115519, 115520, 115521, 115522, 115523, 115524, 115525 were selected from the ORFs having the nucleotide sequence represented by SEQ ID NO: 78271.

[9672] The probes having the nucleotide sequence represented by SEQ ID NOS: 115526, 115527, 115528, 115529, 115530, 115531, 115532, 115533, 115534, 115535, 115536 were selected from the ORFs having the nucleotide sequence represented by SEQ ID NO: 78272.

[9673] The probes having the nucleotide sequence represented by SEQ ID NOS: 115537, 115538, 115539, 115540, 115541, 115542, 115543, 115544, 115545, 115546, 115547 were selected from the ORFs having the nucleotide sequence represented by SEQ ID NO: 78273.

[9674] The probes having the nucleotide sequence represented by SEQ ID NOS: 115548, 115549, 115550, 115551, 115552, 115553, 115554, 115555, 115556, 115557, 115558 were selected from the ORFs having the nucleotide sequence represented by SEQ ID NO: 78274.

[9675] The probes having the nucleotide sequence represented by SEQ ID NOS: 115559, 115560, 115561, 115562, 115563, 115564, 115565, 115566, 115567, 115568, 115569 were selected from the ORFs having the nucleotide sequence represented by SEQ ID NO: 78275.

[9676] The probes having the nucleotide sequence represented by SEQ ID NOS: 115570, 115571, 115572, 115573, 115574, 115575, 115576, 115577, 115578, 115579, 115580 were selected from the ORFs having the nucleotide sequence represented by SEQ ID NO: 78276.

[9677] The probes having the nucleotide sequence represented by SEQ ID NOS: 115581, 115582, 115583, 115584, 115585, 115586, 115587, 115588, 115589, 115590, 115591 were selected from the ORFs having the nucleotide sequence represented by SEQ ID NO: 78277.

[9678] The probes having the nucleotide sequence represented by SEQ ID NOS: 115592, 115593, 115594, 115595, 115596, 115597, 115598, 115599, 115600, 115601, 115602 were selected from the ORFs having the nucleotide sequence represented by SEQ ID NO: 78278.

[9679] The probes having the nucleotide sequence represented by SEQ ID NOS: 115603, 115604, 115605, 115606, 115607, 115608, 115609, 115610, 115611, 115612, 115613 were selected from the ORFs having the nucleotide sequence represented by SEQ ID NO: 78279.

[9680] The probes having the nucleotide sequence represented by SEQ ID NOS: 115614, 115615, 115616, 115617, 115618, 115619, 115620, 115621, 115622, 115623, 115624 were selected from the ORFs having the nucleotide sequence represented by SEQ ID NO: 78280.

[9681] The probes having the nucleotide sequence represented by SEQ ID NOS: 115625, 115626, 115627, 115628, 115629, 115630, 115631, 115632, 115633, 115634, 115635 were selected from the ORFs having the nucleotide sequence represented by SEQ ID NO: 78281.

[9682] The probes having the nucleotide sequence represented by SEQ ID NOS: 115636, 115637, 115638, 115639, 115640, 115641, 115642, 115643, 115644, 115645, 115646 were selected from the ORFs having the nucleotide sequence represented by SEQ ID NO: 78282.

[9683] The probes having the nucleotide sequence represented by SEQ ID NOS: 115647, 115648, 115649, 115650, 115651, 115652, 115653, 115654, 115655, 115656, 115657 were selected from the ORFs having the nucleotide sequence represented by SEQ ID NO: 78283.

[9684] The probes having the nucleotide sequence represented by SEQ ID NOS: 115658, 115659, 115660, 115661, 115662, 115663, 115664, 115665, 115666, 115667, 115668 were selected from the ORFs having the nucleotide sequence represented by SEQ ID NO: 78284.

[9685] The probes having the nucleotide sequence represented by SEQ ID NOS: 115669, 115670, 115671, 115672, 115673, 115674, 115675, 115676, 115677, 115678, 115679 were selected from the ORFs having the nucleotide sequence represented by SEQ ID NO: 78285.

[9686] The probes having the nucleotide sequence represented by SEQ ID NOS: 115680, 115681, 115682, 115683, 115684, 115685, 115686, 115687, 115688, 115689, 115690 were selected from the ORFs having the nucleotide sequence represented by SEQ ID NO: 78286.

[9687] The probes having the nucleotide sequence represented by SEQ ID NOS: 115691, 115692, 115693, 115694, 115695, 115696, 115697, 115698, 115699, 115700, 115701 were selected from the ORFs having the nucleotide sequence represented by SEQ ID NO: 78287.

[9688] The probes having the nucleotide sequence represented by SEQ ID NOS: 115702, 115703, 115704, 115705, 115706, 115707, 115708, 115709, 115710, 115711, 115712 were selected from the ORFs having the nucleotide sequence represented by SEQ ID NO: 78288.

[9689] The probes having the nucleotide sequence represented by SEQ ID NOS: 115713, 115714, 115715, 115716, 115717, 115718, 115719, 115720, 115721, 115722, 115723 were selected from the ORFs having the nucleotide sequence represented by SEQ ID NO: 78289.

[9690] The probes having the nucleotide sequence represented by SEQ ID NOS: 115724, 115725, 115726, 115727, 115728, 115729, 115730, 115731, 115732, 115733, 115734 were selected from the ORFs having the nucleotide sequence represented by SEQ ID NO: 78290.

[9691] The probes having the nucleotide sequence represented by SEQ ID NOS: 115735, 115736, 115737, 115738, 115739, 115740, 115741, 115742, 115743, 115744, 115745 were selected from the ORFs having the nucleotide sequence represented by SEQ ID NO: 78291.

[9692] The probes having the nucleotide sequence represented by SEQ ID NOS: 115746, 115747, 115748, 115749, 115750, 115751, 115752, 115753, 115754, 115755, 115756 were selected from the ORFs having the nucleotide sequence represented by SEQ ID NO: 78292.

[9693] The probes having the nucleotide sequence represented by SEQ ID NOS: 115757, 115758, 115759, 115760, 115761, 115762, 115763, 115764, 115765, 115766, 115767 were selected from the ORFs having the nucleotide sequence represented by SEQ ID NO: 78293.

[9694] The probes having the nucleotide sequence represented by SEQ ID NOS: 115768, 115769, 115770, 115771, 115772, 115773, 115774, 115775, 115776, 115777, 115778 were selected from the ORFs having the nucleotide sequence represented by SEQ ID NO: 78294.

[9695] The probes having the nucleotide sequence represented by SEQ ID NOS: 115779, 115780, 115781, 115782, 115783, 115784, 115785, 115786, 115787, 115788, 115789 were selected from the ORFs having the nucleotide sequence represented by SEQ ID NO: 78295.

[9696] The probes having the nucleotide sequence represented by SEQ ID NOS: 115790, 115791, 115792, 115793, 115794, 115795, 115796, 115797, 115798, 115799, 115800 were selected from the ORFs having the nucleotide sequence represented by SEQ ID NO: 78296.

[9697] The probes having the nucleotide sequence represented by SEQ ID NOS: 115801, 115802, 115803, 115804, 115805, 115806, 115807, 115808, 115809, 115810, 115811 were selected from the ORFs having the nucleotide sequence represented by SEQ ID NO: 78297.

[9698] The probes having the nucleotide sequence represented by SEQ ID NOS: 115812, 115813, 115814, 115815, 115816, 115817, 115818, 115819, 115820, 115821, 115822 were selected from the ORFs having the nucleotide sequence represented by SEQ ID NO: 78298.

[9699] The probes having the nucleotide sequence represented by SEQ ID NOS: 115823, 115824, 115825, 115826, 115827, 115828, 115829, 115830, 115831, 115832, 115833 were selected from the ORFs having the nucleotide sequence represented by SEQ ID NO: 78299.

[9700] The probes having the nucleotide sequence represented by SEQ ID NOS: 115834, 115835, 115836, 115837, 115838, 115839, 115840, 115841, 115842, 115843, 115844 were selected from the ORFs having the nucleotide sequence represented by SEQ ID NO: 78300.

[9701] The probes having the nucleotide sequence represented by SEQ ID NOS: 115845, 115846, 115847, 115848, 115849, 115850, 115851, 115852, 115853, 115854, 115855 were selected from the ORFs having the nucleotide sequence represented by SEQ ID NO: 78301.

[9702] The probes having the nucleotide sequence represented by SEQ ID NOS: 115856, 115857, 115858, 115859, 115860, 115861, 115862, 115863, 115864, 115865, 115866 were selected from the ORFs having the nucleotide sequence represented by SEQ ID NO: 78302.

[9703] The probes having the nucleotide sequence represented by SEQ ID NOS: 115867, 115868, 115869, 115870, 115871, 115872, 115873, 115874, 115875, 115876, 115877 were selected from the ORFs having the nucleotide sequence represented by SEQ ID NO: 78303.

[9704] The probes having the nucleotide sequence represented by SEQ ID NOS: 115878, 115879, 115880, 115881, 115882, 115883, 115884, 115885, 115886, 115887, 115888 were selected from the ORFs having the nucleotide sequence represented by SEQ ID NO: 78304.

[9705] The probes having the nucleotide sequence represented by SEQ ID NOS: 115889, 115890, 115891, 115892, 115893, 115894, 115895, 115896, 115897, 115898, 115899 were selected from the ORFs having the nucleotide sequence represented by SEQ ID NO: 78305.

[9706] The probes having the nucleotide sequence represented by SEQ ID NOS: 115900, 115901, 115902, 115903, 115904, 115905, 115906, 115907, 115908, 115909, 115910 were selected from the ORFs having the nucleotide sequence represented by SEQ ID NO: 78306.

[9707] The probes having the nucleotide sequence represented by SEQ ID NOS: 115911, 115912, 115913, 115914, 115915, 115916, 115917, 115918, 115919, 115920, 115921 were selected from the ORFs having the nucleotide sequence represented by SEQ ID NO: 78307.

[9708] The probes having the nucleotide sequence represented by SEQ ID NOS: 115922, 115923, 115924, 115925, 115926, 115927, 115928, 115929, 115930, 115931, 115932 were selected from the ORFs having the nucleotide sequence represented by SEQ ID NO: 78308.

[9709] The probes having the nucleotide sequence represented by SEQ ID NOS: 115933, 115934, 115935, 115936, 115937, 115938, 115939, 115940, 115941, 115942, 115943 were selected from the ORFs having the nucleotide sequence represented by SEQ ID NO: 78309.

[9710] The probes having the nucleotide sequence represented by SEQ ID NOS: 115944, 115945, 115946, 115947, 115948, 115949, 115950, 115951, 115952, 115953, 115954 were selected from the ORFs having the nucleotide sequence represented by SEQ ID NO: 78310.

[9711] The probes having the nucleotide sequence represented by SEQ ID NOS: 115955, 115956, 115957, 115958, 115959, 115960, 115961, 115962, 115963, 115964, 115965 were selected from the ORFs having the nucleotide sequence represented by SEQ ID NO: 78311.

[9712] The probes having the nucleotide sequence represented by SEQ ID NOS: 115966, 115967, 115968, 115969, 115970, 115971, 115972, 115973, 115974, 115975, 115976 were selected from the ORFs having the nucleotide sequence represented by SEQ ID NO: 78312.

[9713] The probes having the nucleotide sequence represented by SEQ ID NOS: 115977, 115978, 115979, 115980, 115981, 115982, 115983, 115984, 115985, 115986, 115987 were selected from the ORFs having the nucleotide sequence represented by SEQ ID NO: 78313.

[9714] The probes having the nucleotide sequence represented by SEQ ID NOS: 115988, 115989, 115990, 115991, 115992, 115993, 115994, 115995, 115996, 115997, 115998 were selected from the ORFs having the nucleotide sequence represented by SEQ ID NO: 78314.

[9715] The probes having the nucleotide sequence represented by SEQ ID NOS: 115999, 116000, 116001, 116002, 116003, 116004, 116005, 116006, 116007, 116008, 116009 were selected from the ORFs having the nucleotide sequence represented by SEQ ID NO: 78315.

[9716] The probes having the nucleotide sequence represented by SEQ ID NOS: 116010, 116011, 116012, 116013, 116014, 116015, 116016, 116017, 116018, 116019, 116020 were selected from the ORFs having the nucleotide sequence represented by SEQ ID NO: 78316.

[9717] The probes having the nucleotide sequence represented by SEQ ID NOS: 116021, 116022, 116023, 116024, 116025, 116026, 116027, 116028, 116029, 116030, 116031 were selected from the ORFs having the nucleotide sequence represented by SEQ ID NO: 78317.

[9718] The probes having the nucleotide sequence represented by SEQ ID NOS: 116032, 116033, 116034, 116035, 116036, 116037, 116038, 116039, 116040, 116041, 116042 were selected from the ORFs having the nucleotide sequence represented by SEQ ID NO: 78318.

[9719] The probes having the nucleotide sequence represented by SEQ ID NOS: 116043, 116044, 116045, 116046, 116047, 116048, 116049, 116050, 116051, 116052, 116053 were selected from the ORFs having the nucleotide sequence represented by SEQ ID NO: 78319.

[9720] The probes having the nucleotide sequence represented by SEQ ID NOS: 116054, 116055, 116056, 116057, 116058, 116059, 116060, 116061, 116062, 116063, 116064 were selected from the ORFs having the nucleotide sequence represented by SEQ ID NO: 78320.

[9721] The probes having the nucleotide sequence represented by SEQ ID NOS: 116065, 116066, 116067, 116068, 116069, 116070, 116071, 116072, 116073, 116074, 116075 were selected from the ORFs having the nucleotide sequence represented by SEQ ID NO: 78321.

[9722] The probes having the nucleotide sequence represented by SEQ ID NOS: 116076, 116077, 116078, 116079, 116080, 116081, 116082, 116083, 116084, 116085, 116086 were selected from the ORFs having the nucleotide sequence represented by SEQ ID NO: 78322.

[9723] The probes having the nucleotide sequence represented by SEQ ID NOS: 116087, 116088, 116089, 116090, 116091, 116092, 116093, 116094, 116095, 116096, 116097 were selected from the ORFs having the nucleotide sequence represented by SEQ ID NO: 78323.

[9724] The probes having the nucleotide sequence represented by SEQ ID NOS: 116098, 116099, 116100, 116101, 116102, 116103, 116104, 116105, 116106, 116107, 116108 were selected from the ORFs having the nucleotide sequence represented by SEQ ID NO: 78324.

[9725] The probes having the nucleotide sequence represented by SEQ ID NOS: 116109, 116110, 116111, 116112, 116113, 116114, 116115, 116116, 116117, 116118, 116119 were selected from the ORFs having the nucleotide sequence represented by SEQ ID NO: 78325.

[9726] The probes having the nucleotide sequence represented by SEQ ID NOS: 116120, 116121, 116122, 116123, 116124, 116125, 116126, 116127, 116128, 116129, 116130 were selected from the ORFs having the nucleotide sequence represented by SEQ ID NO: 78326.

[9727] The probes having the nucleotide sequence represented by SEQ ID NOS: 116131, 116132, 116133, 116134, 116135, 116136, 116137, 116138, 116139, 116140, 116141 were selected from the ORFs having the nucleotide sequence represented by SEQ ID NO: 78327.

[9728] The probes having the nucleotide sequence represented by SEQ ID NOS: 116142, 116143, 116144, 116145, 116146, 116147, 116148, 116149, 116150, 116151, 116152 were selected from the ORFs having the nucleotide sequence represented by SEQ ID NO: 78328.

[9729] The probes having the nucleotide sequence represented by SEQ ID NOS: 116153, 116154, 116155, 116156, 116157, 116158, 116159, 116160, 116161, 116162, 116163 were selected from the ORFs having the nucleotide sequence represented by SEQ ID NO: 78329.

[9730] The probes having the nucleotide sequence represented by SEQ ID NOS: 116164, 116165, 116166, 116167, 116168, 116169, 116170, 116171, 116172, 116173, 116174 were selected from the ORFs having the nucleotide sequence represented by SEQ ID NO: 78330.

[9731] The probes having the nucleotide sequence represented by SEQ ID NOS: 116175, 116176, 116177, 116178, 116179, 116180, 116181, 116182, 116183, 116184, 116185 were selected from the ORFs having the nucleotide sequence represented by SEQ ID NO: 78331.

[9732] The probes having the nucleotide sequence represented by SEQ ID NOS: 116186, 116187, 116188, 116189, 116190, 116191, 116192, 116193, 116194, 116195, 116196 were selected from the ORFs having the nucleotide sequence represented by SEQ ID NO: 78332.

[9733] The probes having the nucleotide sequence represented by SEQ ID NOS: 116197, 116198, 116199, 116200, 116201, 116202, 116203, 116204, 116205, 116206, 116207 were selected from the ORFs having the nucleotide sequence represented by SEQ ID NO: 78333.

[9734] The probes having the nucleotide sequence represented by SEQ ID NOS: 116208, 116209, 116210, 116211, 116212, 116213, 116214, 116215, 116216, 116217, 116218 were selected from the ORFs having the nucleotide sequence represented by SEQ ID NO: 78334.

[9735] The probes having the nucleotide sequence represented by SEQ ID NOS: 116219, 116220, 116221, 116222, 116223, 116224, 116225, 116226, 116227, 116228, 116229 were selected from the ORFs having the nucleotide sequence represented by SEQ ID NO: 78335.

[9736] The probes having the nucleotide sequence represented by SEQ ID NOS: 116230, 116231, 116232, 116233, 116234, 116235, 116236, 116237, 116238, 116239, 116240 were selected from the ORFs having the nucleotide sequence represented by SEQ ID NO: 78336.

[9737] The probes having the nucleotide sequence represented by SEQ ID NOS: 116241, 116242, 116243, 116244, 116245, 116246, 116247, 116248, 116249, 116250, 116251 were selected from the ORFs having the nucleotide sequence represented by SEQ ID NO: 78337.

[9738] The probes having the nucleotide sequence represented by SEQ ID NOS: 116252, 116253, 116254, 116255, 116256, 116257, 116258, 116259, 116260, 116261, 116262 were selected from the ORFs having the nucleotide sequence represented by SEQ ID NO: 78338.

[9739] The probes having the nucleotide sequence represented by SEQ ID NOS: 116263, 116264, 116265, 116266, 116267, 116268, 116269, 116270, 116271, 116272, 116273 were selected from the ORFs having the nucleotide sequence represented by SEQ ID NO: 78339.

[9740] The probes having the nucleotide sequence represented by SEQ ID NOS: 116274, 116275, 116276, 116277, 116278, 116279, 116280, 116281, 116282, 116283, 116284 were selected from the ORFs having the nucleotide sequence represented by SEQ ID NO: 78340.

[9741] The probes having the nucleotide sequence represented by SEQ ID NOS: 116285, 116286, 116287, 116288, 116289, 116290, 116291, 116292, 116293, 116294, 116295 were selected from the ORFs having the nucleotide sequence represented by SEQ ID NO: 78341.

[9742] The probes having the nucleotide sequence represented by SEQ ID NOS: 116296, 116297, 116298, 116299, 116300, 116301, 116302, 116303, 116304, 116305, 116306 were selected from the ORFs having the nucleotide sequence represented by SEQ ID NO: 78342.

[9743] The probes having the nucleotide sequence represented by SEQ ID NOS: 116307, 116308, 116309, 116310, 116311, 116312, 116313, 116314, 116315, 116316, 116317 were selected from the ORFs having the nucleotide sequence represented by SEQ ID NO: 78343.

[9744] The probes having the nucleotide sequence represented by SEQ ID NOS: 116318, 116319, 116320, 116321, 116322, 116323, 116324, 116325, 116326, 116327, 116328 were selected from the ORFs having the nucleotide sequence represented by SEQ ID NO: 78344.

[9745] The probes having the nucleotide sequence represented by SEQ ID NOS: 116329, 116330, 116331, 116332, 116333, 116334, 116335, 116336, 116337, 116338, 116339 were selected from the ORFs having the nucleotide sequence represented by SEQ ID NO: 78345.

[9746] The probes having the nucleotide sequence represented by SEQ ID NOS: 116340, 116341, 116342, 116343, 116344, 116345, 116346, 116347, 116348, 116349, 116350 were selected from the ORFs having the nucleotide sequence represented by SEQ ID NO: 78346.

[9747] The probes having the nucleotide sequence represented by SEQ ID NOS: 116351, 116352, 116353, 116354, 116355, 116356, 116357, 116358, 116359, 116360, 116361 were selected from the ORFs having the nucleotide sequence represented by SEQ ID NO: 78347.

[9748] The probes having the nucleotide sequence represented by SEQ ID NOS: 116362, 116363, 116364, 116365, 116366, 116367, 116368, 116369, 116370, 116371, 116372 were selected from the ORFs having the nucleotide sequence represented by SEQ ID NO: 78348.

[9749] The probes having the nucleotide sequence represented by SEQ ID NOS: 116373, 116374, 116375, 116376, 116377, 116378, 116379, 116380, 116381, 116382, 116383 were selected from the ORFs having the nucleotide sequence represented by SEQ ID NO: 78349.

[9750] The probes having the nucleotide sequence represented by SEQ ID NOS: 116384, 116385, 116386, 116387, 116388, 116389, 116390, 116391, 116392, 116393, 116394 were selected from the ORFs having the nucleotide sequence represented by SEQ ID NO: 78350.

[9751] The probes having the nucleotide sequence represented by SEQ ID NOS: 116395, 116396, 116397, 116398, 116399, 116400, 116401, 116402, 116403, 116404, 116405 were selected from the ORFs having the nucleotide sequence represented by SEQ ID NO: 78351.

[9752] The probes having the nucleotide sequence represented by SEQ ID NOS: 116406, 116407, 116408, 116409, 116410, 116411, 116412, 116413, 116414, 116415, 116416 were selected from the ORFs having the nucleotide sequence represented by SEQ ID NO: 78352.

[9753] The probes having the nucleotide sequence represented by SEQ ID NOS: 116417, 116418, 116419, 116420, 116421, 116422, 116423, 116424, 116425, 116426, 116427 were selected from the ORFs having the nucleotide sequence represented by SEQ ID NO: 78353.

[9754] The probes having the nucleotide sequence represented by SEQ ID NOS: 116428, 116429, 116430, 116431, 116432, 116433, 116434, 116435, 116436, 116437, 116438 were selected from the ORFs having the nucleotide sequence represented by SEQ ID NO: 78354.

[9755] The probes having the nucleotide sequence represented by SEQ ID NOS: 116439, 116440, 116441, 116442, 116443, 116444, 116445, 116446, 116447, 116448, 116449 were selected from the ORFs having the nucleotide sequence represented by SEQ ID NO: 78355.

[9756] The probes having the nucleotide sequence represented by SEQ ID NOS: 116450, 116451, 116452, 116453, 116454, 116455, 116456, 116457, 116458, 116459, 116460 were selected from the ORFs having the nucleotide sequence represented by SEQ ID NO: 78356.

[9757] The probes having the nucleotide sequence represented by SEQ ID NOS: 116461, 116462, 116463, 116464, 116465, 116466, 116467, 116468, 116469, 116470, 116471 were selected from the ORFs having the nucleotide sequence represented by SEQ ID NO: 78357.

[9758] The probes having the nucleotide sequence represented by SEQ ID NOS: 116472, 116473, 116474, 116475, 116476, 116477, 116478, 116479, 116480, 116481, 116482 were selected from the ORFs having the nucleotide sequence represented by SEQ ID NO: 78358.

[9759] The probes having the nucleotide sequence represented by SEQ ID NOS: 116483, 116484, 116485, 116486, 116487, 116488, 116489, 116490, 116491, 116492, 116493 were selected from the ORFs having the nucleotide sequence represented by SEQ ID NO: 78359.

[9760] The probes having the nucleotide sequence represented by SEQ ID NOS: 116494, 116495, 116496, 116497, 116498, 116499, 116500, 116501, 116502, 116503, 116504 were selected from the ORFs having the nucleotide sequence represented by SEQ ID NO: 78360.

[9761] The probes having the nucleotide sequence represented by SEQ ID NOS: 116505, 116506, 116507, 116508, 116509, 116510, 116511, 116512, 116513, 116514, 116515 were selected from the ORFs having the nucleotide sequence represented by SEQ ID NO: 78361.

[9762] The probes having the nucleotide sequence represented by SEQ ID NOS: 116516, 116517, 116518, 116519, 116520, 116521, 116522, 116523, 116524, 116525, 116526 were selected from the ORFs having the nucleotide sequence represented by SEQ ID NO: 78362.

[9763] The probes having the nucleotide sequence represented by SEQ ID NOS: 116527, 116528, 116529, 116530, 116531, 116532, 116533, 116534, 116535, 116536, 116537 were selected from the ORFs having the nucleotide sequence represented by SEQ ID NO: 78363.

[9764] The probes having the nucleotide sequence represented by SEQ ID NOS: 116538, 116539, 116540, 116541, 116542, 116543, 116544, 116545, 116546, 116547, 116548 were selected from the ORFs having the nucleotide sequence represented by SEQ ID NO: 78364.

[9765] The probes having the nucleotide sequence represented by SEQ ID NOS: 116549, 116550, 116551, 116552, 116553, 116554, 116555, 116556, 116557, 116558, 116559 were selected from the ORFs having the nucleotide sequence represented by SEQ ID NO: 78365.

[9766] The probes having the nucleotide sequence represented by SEQ ID NOS: 116560, 116561, 116562, 116563, 116564, 116565, 116566, 116567, 116568, 116569, 116570 were selected from the ORFs having the nucleotide sequence represented by SEQ ID NO: 78366.

[9767] The probes having the nucleotide sequence represented by SEQ ID NOS: 116571, 116572, 116573, 116574, 116575, 116576, 116577, 116578, 116579, 116580, 116581 were selected from the ORFs having the nucleotide sequence represented by SEQ ID NO: 78367.

[9768] The probes having the nucleotide sequence represented by SEQ ID NOS: 116582, 116583, 116584, 116585, 116586, 116587, 116588, 116589, 116590, 116591, 116592 were selected from the ORFs having the nucleotide sequence represented by SEQ ID NO: 78368.

[9769] The probes having the nucleotide sequence represented by SEQ ID NOS: 116593, 116594, 116595, 116596, 116597, 116598, 116599, 116600, 116601, 116602, 116603 were selected from the ORFs having the nucleotide sequence represented by SEQ ID NO: 78369.

[9770] The probes having the nucleotide sequence represented by SEQ ID NOS: 116604, 116605, 116606, 116607, 116608, 116609, 116610, 116611, 116612, 116613, 116614 were selected from the ORFs having the nucleotide sequence represented by SEQ ID NO: 78370.

[9771] The probes having the nucleotide sequence represented by SEQ ID NOS: 116615, 116616, 116617, 116618, 116619, 116620, 116621, 116622, 116623, 116624 were selected from the ORFs having the nucleotide sequence represented by SEQ ID NO: 78371.

[9772] The probes having the nucleotide sequence represented by SEQ ID NOS: 116625, 116626, 116627, 116628, 116629, 116630, 116631, 116632, 116633, 116634, 116635 were selected from the ORFs having the nucleotide sequence represented by SEQ ID NO: 78372.

[9773] The probes having the nucleotide sequence represented by SEQ ID NOS: 116636, 116637, 116638, 116639, 116640, 116641, 116642, 116643, 116644, 116645, 116646 were selected from the ORFs having the nucleotide sequence represented by SEQ ID NO: 78373.

[9774] The probes having the nucleotide sequence represented by SEQ ID NOS: 116647, 116648, 116649, 116650, 116651, 116652, 116653, 116654, 116655, 116656, 116657 were selected from the ORFs having the nucleotide sequence represented by SEQ ID NO: 78374.

[9775] The probes having the nucleotide sequence represented by SEQ ID NOS: 116658, 116659, 116660, 116661, 116662, 116663, 116664, 116665, 116666, 116667, 116668 were selected from the ORFs having the nucleotide sequence represented by SEQ ID NO: 78375.

[9776] The probes having the nucleotide sequence represented by SEQ ID NOS: 116669, 116670, 116671, 116672, 116673, 116674, 116675, 116676, 116677, 116678, 116679 were selected from the ORFs having the nucleotide sequence represented by SEQ ID NO: 78376.

[9777] The probes having the nucleotide sequence represented by SEQ ID NOS: 116680, 116681, 116682, 116683, 116684, 116685, 116686, 116687, 116688, 116689, 116690 were selected from the ORFs having the nucleotide sequence represented by SEQ ID NO: 78377.

[9778] The probes having the nucleotide sequence represented by SEQ ID NOS: 116691, 116692, 116693, 116694, 116695, 116696, 116697, 116698, 116699, 116700, 116701 were selected from the ORFs having the nucleotide sequence represented by SEQ ID NO: 78378.

[9779] The probes having the nucleotide sequence represented by SEQ ID NOS: 116702, 116703, 116704, 116705, 116706, 116707, 116708, 116709, 116710, 116711, 116712 were selected from the ORFs having the nucleotide sequence represented by SEQ ID NO: 78379.

[9780] The probes having the nucleotide sequence represented by SEQ ID NOS: 116713, 116714, 116715, 116716, 116717, 116718, 116719, 116720, 116721, 116722, 116723 were selected from the ORFs having the nucleotide sequence represented by SEQ ID NO: 78380.

[9781] The probes having the nucleotide sequence represented by SEQ ID NOS: 116724, 116725, 116726, 116727, 116728, 116729, 116730, 116731, 116732, 116733, 116734 were selected from the ORFs having the nucleotide sequence represented by SEQ ID NO: 78381.

[9782] The probes having the nucleotide sequence represented by SEQ ID NOS: 116735, 116736, 116737, 116738, 116739, 116740, 116741, 116742, 116743, 116744, 116745 were selected from the ORFs having the nucleotide sequence represented by SEQ ID NO: 78382.

[9783] The probes having the nucleotide sequence represented by SEQ ID NOS: 116746, 116747, 116748, 116749, 116750, 116751, 116752, 116753, 116754, 116755, 116756 were selected from the ORFs having the nucleotide sequence represented by SEQ ID NO: 78383.

[9784] The probes having the nucleotide sequence represented by SEQ ID NOS: 116757, 116758, 116759, 116760, 116761, 116762, 116763, 116764, 116765, 116766, 116767 were selected from the ORFs having the nucleotide sequence represented by SEQ ID NO: 78384.

[9785] The probes having the nucleotide sequence represented by SEQ ID NOS: 116768, 116769, 116770, 116771, 116772, 116773, 116774, 116775, 116776, 116777, 116778 were selected from the ORFs having the nucleotide sequence represented by SEQ ID NO: 78385.

[9786] The probes having the nucleotide sequence represented by SEQ ID NOS: 116779, 116780, 116781, 116782, 116783, 116784, 116785, 116786, 116787, 116788, 116789 were selected from the ORFs having the nucleotide sequence represented by SEQ ID NO: 78386.

[9787] The probes having the nucleotide sequence represented by SEQ ID NOS: 116790, 116791, 116792, 116793, 116794, 116795, 116796, 116797, 116798, 116799, 116800 were selected from the ORFs having the nucleotide sequence represented by SEQ ID NO: 78387.

[9788] The probes having the nucleotide sequence represented by SEQ ID NOS: 116801, 116802, 116803, 116804, 116805, 116806, 116807, 116808, 116809, 116810, 116811 were selected from the ORFs having the nucleotide sequence represented by SEQ ID NO: 78388.

[9789] The probes having the nucleotide sequence represented by SEQ ID NOS: 116812, 116813, 116814, 116815, 116816, 116817, 116818, 116819, 116820, 116821, 116822 were selected from the ORFs having the nucleotide sequence represented by SEQ ID NO: 78389.

[9790] The probes having the nucleotide sequence represented by SEQ ID NOS: 116823, 116824, 116825, 116826, 116827, 116828, 116829, 116830, 116831, 116832, 116833 were selected from the ORFs having the nucleotide sequence represented by SEQ ID NO: 78390.

[9791] The probes having the nucleotide sequence represented by SEQ ID NOS: 116834, 116835, 116836, 116837, 116838, 116839, 116840, 116841, 116842, 116843, 116844 were selected from the ORFs having the nucleotide sequence represented by SEQ ID NO: 78391.

[9792] The probes having the nucleotide sequence represented by SEQ ID NOS: 116845, 116846, 116847, 116848, 116849, 116850, 116851, 116852, 116853, 116854, 116855 were selected from the ORFs having the nucleotide sequence represented by SEQ ID NO: 78392.

[9793] The probes having the nucleotide sequence represented by SEQ ID NOS: 116856, 116857, 116858, 116859, 116860, 116861, 116862, 116863, 116864, 116865, 116866 were selected from the ORFs having the nucleotide sequence represented by SEQ ID NO: 78393.

[9794] The probes having the nucleotide sequence represented by SEQ ID NOS: 116867, 116868, 116869, 116870, 116871, 116872, 116873, 116874, 116875, 116876, 116877 were selected from the ORFs having the nucleotide sequence represented by SEQ ID NO: 78394.

[9795] The probes having the nucleotide sequence represented by SEQ ID NOS: 116878, 116879, 116880, 116881, 116882, 116883, 116884, 116885, 116886, 116887, 116888 were selected from the ORFs having the nucleotide sequence represented by SEQ ID NO: 78395.

[9796] The probes having the nucleotide sequence represented by SEQ ID NOS: 116889, 116890, 116891, 116892, 116893, 116894, 116895, 116896, 116897, 116898, 116899 were selected from the ORFs having the nucleotide sequence represented by SEQ ID NO: 78396.

[9797] The probes having the nucleotide sequence represented by SEQ ID NOS: 116900, 116901, 116902, 116903, 116904, 116905, 116906, 116907, 116908, 116909, 116910 were selected from the ORFs having the nucleotide sequence represented by SEQ ID NO: 78397.

[9798] The probes having the nucleotide sequence represented by SEQ ID NOS: 116911, 116912, 116913, 116914, 116915, 116916, 116917, 116918, 116919, 116920, 116921 were selected from the ORFs having the nucleotide sequence represented by SEQ ID NO: 78398.

[9799] The probes having the nucleotide sequence represented by SEQ ID NOS: 116922, 116923, 116924, 116925, 116926, 116927, 116928, 116929, 116930, 116931, 116932 were selected from the ORFs having the nucleotide sequence represented by SEQ ID NO: 78399.

[9800] The probes having the nucleotide sequence represented by SEQ ID NOS: 116933, 116934, 116935, 116936, 116937, 116938, 116939, 116940, 116941, 116942, 116943 were selected from the ORFs having the nucleotide sequence represented by SEQ ID NO: 78400.

[9801] The probes having the nucleotide sequence represented by SEQ ID NOS: 116944, 116945, 116946, 116947, 116948, 116949, 116950, 116951, 116952, 116953, 116954 were selected from the ORFs having the nucleotide sequence represented by SEQ ID NO: 78401.

[9802] The probes having the nucleotide sequence represented by SEQ ID NOS: 116955, 116956, 116957, 116958, 116959, 116960, 116961, 116962, 116963, 116964, 116965 were selected from the ORFs having the nucleotide sequence represented by SEQ ID NO: 78402.

[9803] The probes having the nucleotide sequence represented by SEQ ID NOS: 116966, 116967, 116968, 116969, 116970, 116971, 116972, 116973, 116974, 116975, 116976 were selected from the ORFs having the nucleotide sequence represented by SEQ ID NO: 78403.

[9804] The probes having the nucleotide sequence represented by SEQ ID NOS: 116977, 116978, 116979, 116980, 116981, 116982, 116983, 116984, 116985, 116986, 116987 were selected from the ORFs having the nucleotide sequence represented by SEQ ID NO: 78404.

[9805] The probes having the nucleotide sequence represented by SEQ ID NOS: 116988, 116989, 116990, 116991, 116992, 116993, 116994, 116995, 116996, 116997, 116998 were selected from the ORFs having the nucleotide sequence represented by SEQ ID NO: 78405.

[9806] The probes having the nucleotide sequence represented by SEQ ID NOS: 116999, 117000, 117001, 117002, 117003, 117004, 117005, 117006, 117007, 117008, 117009 were selected from the ORFs having the nucleotide sequence represented by SEQ ID NO: 78406.

[9807] The probes having the nucleotide sequence represented by SEQ ID NOS: 117010, 117011, 117012, 117013, 117014, 117015, 117016, 117017, 117018, 117019, 117020 were selected from the ORFs having the nucleotide sequence represented by SEQ ID NO: 78407.

[9808] The probes having the nucleotide sequence represented by SEQ ID NOS: 117021, 117022, 117023, 117024, 117025, 117026, 117027, 117028, 117029, 117030, 117031 were selected from the ORFs having the nucleotide sequence represented by SEQ ID NO: 78408.

[9809] The probes having the nucleotide sequence represented by SEQ ID NOS: 117032, 117033, 117034, 117035, 117036, 117037, 117038, 117039, 117040, 117041, 117042 were selected from the ORFs having the nucleotide sequence represented by SEQ ID NO: 78409.

[9810] The probes having the nucleotide sequence represented by SEQ ID NOS: 117043, 117044, 117045, 117046, 117047, 117048, 117049, 117050, 117051, 117052, 117053 were selected from the ORFs having the nucleotide sequence represented by SEQ ID NO: 78410.

[9811] The probes having the nucleotide sequence represented by SEQ ID NOS: 117054, 117055, 117056, 117057, 117058, 117059, 117060, 117061, 117062, 117063, 117064 were selected from the ORFs having the nucleotide sequence represented by SEQ ID NO: 78411.

[9812] The probes having the nucleotide sequence represented by SEQ ID NOS: 117065, 117066, 117067, 117068, 117069, 117070, 117071, 117072, 117073, 117074, 117075 were selected from the ORFs having the nucleotide sequence represented by SEQ ID NO: 78412.

[9813] The probes having the nucleotide sequence represented by SEQ ID NOS: 117076, 117077, 117078, 117079, 117080, 117081, 117082, 117083, 117084, 117085, 117086 were selected from the ORFs having the nucleotide sequence represented by SEQ ID NO: 78413.

[9814] The probes having the nucleotide sequence represented by SEQ ID NOS: 117087, 117088, 117089, 117090, 117091, 117092, 117093, 117094, 117095, 117096, 117097 were selected from the ORFs having the nucleotide sequence represented by SEQ ID NO: 78414.

[9815] The probes having the nucleotide sequence represented by SEQ ID NOS: 117098, 117099, 117100, 117101, 117102, 117103, 117104, 117105, 117106, 117107, 117108 were selected from the ORFs having the nucleotide sequence represented by SEQ ID NO: 78415.

[9816] The probes having the nucleotide sequence represented by SEQ ID NOS: 117109, 117110, 117111, 117112, 117113, 117114, 117115, 117116, 117117, 117118, 117119 were selected from the ORFs having the nucleotide sequence represented by SEQ ID NO: 78416.

[9817] The probes having the nucleotide sequence represented by SEQ ID NOS: 117120, 117121, 117122, 117123, 117124, 117125, 117126, 117127, 117128, 117129, 117130 were selected from the ORFs having the nucleotide sequence represented by SEQ ID NO: 78417.

[9818] The probes having the nucleotide sequence represented by SEQ ID NOS: 117131, 117132, 117133, 117134, 117135, 117136, 117137, 117138, 117139, 117140, 117141 were selected from the ORFs having the nucleotide sequence represented by SEQ ID NO: 78418.

[9819] The probes having the nucleotide sequence represented by SEQ ID NOS: 117142, 117143, 117144, 117145, 117146, 117147, 117148, 117149, 117150, 117151, 117152 were selected from the ORFs having the nucleotide sequence represented by SEQ ID NO: 78419.

[9820] The probes having the nucleotide sequence represented by SEQ ID NOS: 117153, 117154, 117155, 117156, 117157, 117158, 117159, 117160, 117161, 117162, 117163 were selected from the ORFs having the nucleotide sequence represented by SEQ ID NO: 78420.

[9821] The probes having the nucleotide sequence represented by SEQ ID NOS: 117164, 117165, 117166, 117167, 117168, 117169, 117170, 117171, 117172, 117173, 117174 were selected from the ORFs having the nucleotide sequence represented by SEQ ID NO: 78421.

[9822] The probes having the nucleotide sequence represented by SEQ ID NOS: 117175, 117176, 117177, 117178, 117179, 117180, 117181, 117182, 117183, 117184, 117185 were selected from the ORFs having the nucleotide sequence represented by SEQ ID NO: 78422.

[9823] The probes having the nucleotide sequence represented by SEQ ID NOS: 117186, 117187, 117188, 117189, 117190, 117191, 117192, 117193, 117194, 117195, 117196 were selected from the ORFs having the nucleotide sequence represented by SEQ ID NO: 78423.

[9824] The probes having the nucleotide sequence represented by SEQ ID NOS: 117197, 117198, 117199, 117200, 117201, 117202, 117203, 117204, 117205, 117206, 117207 were selected from the ORFs having the nucleotide sequence represented by SEQ ID NO: 78424.

[9825] The probes having the nucleotide sequence represented by SEQ ID NOS: 117208, 117209, 117210, 117211, 117212, 117213, 117214, 117215, 117216, 117217, 117218 were selected from the ORFs having the nucleotide sequence represented by SEQ ID NO: 78425.

[9826] The probes having the nucleotide sequence represented by SEQ ID NOS: 117219, 117220, 117221, 117222, 117223, 117224, 117225, 117226, 117227, 117228, 117229 were selected from the ORFs having the nucleotide sequence represented by SEQ ID NO: 78426.

[9827] The probes having the nucleotide sequence represented by SEQ ID NOS: 117230, 117231, 117232, 117233, 117234, 117235, 117236, 117237, 117238, 117239, 117240 were selected from the ORFs having the nucleotide sequence represented by SEQ ID NO: 78427.

[9828] The probes having the nucleotide sequence represented by SEQ ID NOS: 117241, 117242, 117243, 117244, 117245, 117246, 117247, 117248, 117249, 117250, 117251 were selected from the ORFs having the nucleotide sequence represented by SEQ ID NO: 78428.

[9829] The probes having the nucleotide sequence represented by SEQ ID NOS: 117252, 117253, 117254, 117255, 117256, 117257, 117258, 117259, 117260, 117261, 117262 were selected from the ORFs having the nucleotide sequence represented by SEQ ID NO: 78429.

[9830] The probes having the nucleotide sequence represented by SEQ ID NOS: 117263, 117264, 117265, 117266, 117267, 117268, 117269, 117270, 117271, 117272, 117273 were selected from the ORFs having the nucleotide sequence represented by SEQ ID NO: 78430.

[9831] The probes having the nucleotide sequence represented by SEQ ID NOS: 117274, 117275, 117276, 117277, 117278, 117279, 117280, 117281, 117282, 117283, 117284 were selected from the ORFs having the nucleotide sequence represented by SEQ ID NO: 78431.

[9832] The probes having the nucleotide sequence represented by SEQ ID NOS: 117285, 117286, 117287, 117288, 117289, 117290, 117291, 117292, 117293, 117294, 117295 were selected from the ORFs having the nucleotide sequence represented by SEQ ID NO: 78432.

[9833] The probes having the nucleotide sequence represented by SEQ ID NOS: 117296, 117297, 117298, 117299, 117300, 117301, 117302, 117303, 117304, 117305, 117306 were selected from the ORFs having the nucleotide sequence represented by SEQ ID NO: 78433.

[9834] The probes having the nucleotide sequence represented by SEQ ID NOS: 117307, 117308, 117309, 117310, 117311, 117312, 117313, 117314, 117315, 117316, 117317 were selected from the ORFs having the nucleotide sequence represented by SEQ ID NO: 78434.

[9835] The probes having the nucleotide sequence represented by SEQ ID NOS: 117318, 117319, 117320, 117321, 117322, 117323, 117324, 117325, 117326, 117327, 117328 were selected from the ORFs having the nucleotide sequence represented by SEQ ID NO: 78435.

[9836] The probes having the nucleotide sequence represented by SEQ ID NOS: 117329, 117330, 117331, 117332, 117333, 117334, 117335, 117336, 117337, 117338, 117339 were selected from the ORFs having the nucleotide sequence represented by SEQ ID NO: 78436.

[9837] The probes having the nucleotide sequence represented by SEQ ID NOS: 117340, 117341, 117342, 117343, 117344, 117345, 117346, 117347, 117348, 117349, 117350 were selected from the ORFs having the nucleotide sequence represented by SEQ ID NO: 78437.

[9838] The probes having the nucleotide sequence represented by SEQ ID NOS: 117351, 117352, 117353, 117354, 117355, 117356, 117357, 117358, 117359, 117360, 117361, 117362, 117363, 117364, 117365, 117366, 117367, 117368, 117369, 117370, 117371, 117372 were selected from the ORFs having the nucleotide sequence represented by SEQ ID NO: 78438.

[9839] The probes having the nucleotide sequence represented by SEQ ID NOS: 117373, 117374, 117375, 117376, 117377, 117378, 117379, 117380, 117381, 117382, 117383 were selected from the ORFs having the nucleotide sequence represented by SEQ ID NO: 78439.

[9840] The probes having the nucleotide sequence represented by SEQ ID NOS: 117384, 117385, 117386, 117387, 117388, 117389, 117390, 117391, 117392, 117393, 117394 were selected from the ORFs having the nucleotide sequence represented by SEQ ID NO: 78440.

[9841] The probes having the nucleotide sequence represented by SEQ ID NOS: 117395, 117396, 117397, 117398, 117399, 117400, 117401, 117402, 117403, 117404, 117405 were selected from the ORFs having the nucleotide sequence represented by SEQ ID NO: 78441.

[9842] The probes having the nucleotide sequence represented by SEQ ID NOS: 117406, 117407, 117408, 117409, 117410, 117411, 117412, 117413, 117414, 117415, 117416 were selected from the ORFs having the nucleotide sequence represented by SEQ ID NO: 78442.

[9843] The probes having the nucleotide sequence represented by SEQ ID NOS: 117417, 117418, 117419, 117420, 117421, 117422, 117423, 117424, 117425, 117426, 117427 were selected from the ORFs having the nucleotide sequence represented by SEQ ID NO: 78443.

[9844] The probes having the nucleotide sequence represented by SEQ ID NOS: 117428, 117429, 117430, 117431, 117432, 117433, 117434, 117435, 117436, 117437, 117438 were selected from the ORFs having the nucleotide sequence represented by SEQ ID NO: 78444.

[9845] The probes having the nucleotide sequence represented by SEQ ID NOS: 117439, 117440, 117441, 117442, 117443, 117444, 117445, 117446, 117447, 117448, 117449 were selected from the ORFs having the nucleotide sequence represented by SEQ ID NO: 78445.

[9846] The probes having the nucleotide sequence represented by SEQ ID NOS: 117450, 117451, 117452, 117453, 117454, 117455, 117456, 117457, 117458, 117459, 117460 were selected from the ORFs having the nucleotide sequence represented by SEQ ID NO: 78446.

[9847] The probes having the nucleotide sequence represented by SEQ ID NOS: 117461, 117462, 117463, 117464, 117465, 117466, 117467, 117468, 117469, 117470, 117471 were selected from the ORFs having the nucleotide sequence represented by SEQ ID NO: 78447.

[9848] The probes having the nucleotide sequence represented by SEQ ID NOS: 117472, 117473, 117474, 117475, 117476, 117477, 117478, 117479, 117480, 117481, 117482 were selected from the ORFs having the nucleotide sequence represented by SEQ ID NO: 78448.

[9849] The probes having the nucleotide sequence represented by SEQ ID NOS: 117483, 117484, 117485, 117486, 117487, 117488, 117489, 117490, 117491, 117492, 117493 were selected from the ORFs having the nucleotide sequence represented by SEQ ID NO: 78449.

[9850] The probes having the nucleotide sequence represented by SEQ ID NOS: 117494, 117495, 117496, 117497, 117498, 117499, 117500, 117501, 117502, 117503, 117504 were selected from the ORFs having the nucleotide sequence represented by SEQ ID NO: 78450.

[9851] The probes having the nucleotide sequence represented by SEQ ID NOS: 117505, 117506, 117507, 117508, 117509, 117510, 117511, 117512, 117513, 117514, 117515 were selected from the ORFs having the nucleotide sequence represented by SEQ ID NO: 78451.

[9852] The probes having the nucleotide sequence represented by SEQ ID NOS: 117516, 117517, 117518, 117519, 117520, 117521, 117522, 117523, 117524, 117525, 117526 were selected from the ORFs having the nucleotide sequence represented by SEQ ID NO: 78452.

[9853] The probes having the nucleotide sequence represented by SEQ ID NOS: 117527, 117528, 117529, 117530, 117531, 117532, 117533, 117534, 117535, 117536, 117537 were selected from the ORFs having the nucleotide sequence represented by SEQ ID NO: 78453.

[9854] The probes having the nucleotide sequence represented by SEQ ID NOS: 117538, 117539, 117540, 117541, 117542, 117543, 117544, 117545, 117546, 117547, 117548 were selected from the ORFs having the nucleotide sequence represented by SEQ ID NO: 78454.

[9855] The probes having the nucleotide sequence represented by SEQ ID NOS: 117549, 117550, 117551, 117552, 117553, 117554, 117555, 117556, 117557, 117558, 117559 were selected from the ORFs having the nucleotide sequence represented by SEQ ID NO: 78455.

[9856] The probes having the nucleotide sequence represented by SEQ ID NOS: 117560, 117561, 117562, 117563, 117564, 117565, 117566, 117567, 117568, 117569, 117570 were selected from the ORFs having the nucleotide sequence represented by SEQ ID NO: 78456.

[9857] The probes having the nucleotide sequence represented by SEQ ID NOS: 117571, 117572, 117573, 117574, 117575, 117576, 117577, 117578, 117579, 117580, 117581 were selected from the ORFs having the nucleotide sequence represented by SEQ ID NO: 78457.

[9858] The probes having the nucleotide sequence represented by SEQ ID NOS: 117582, 117583, 117584, 117585, 117586, 117587, 117588, 117589, 117590, 117591, 117592 were selected from the ORFs having the nucleotide sequence represented by SEQ ID NO: 78458.

[9859] The probes having the nucleotide sequence represented by SEQ ID NOS: 117593, 117594, 117595, 117596, 117597, 117598, 117599, 117600, 117601, 117602, 117603 were selected from the ORFs having the nucleotide sequence represented by SEQ ID NO: 78459.

[9860] The probes having the nucleotide sequence represented by SEQ ID NOS: 117604, 117605, 117606, 117607, 117608, 117609, 117610, 117611, 117612, 117613, 117614 were selected from the ORFs having the nucleotide sequence represented by SEQ ID NO: 78460.

[9861] The probes having the nucleotide sequence represented by SEQ ID NOS: 117615, 117616, 117617, 117618, 117619, 117620, 117621, 117622, 117623, 117624, 117625 were selected from the ORFs having the nucleotide sequence represented by SEQ ID NO: 78461.

[9862] The probes having the nucleotide sequence represented by SEQ ID NOS: 117626, 117627, 117628, 117629, 117630, 117631, 117632, 117633, 117634, 117635, 117636 were selected from the ORFs having the nucleotide sequence represented by SEQ ID NO: 78462.

[9863] The probes having the nucleotide sequence represented by SEQ ID NOS: 117637, 117638, 117639, 117640, 117641, 117642, 117643, 117644, 117645, 117646, 117647 were selected from the ORFs having the nucleotide sequence represented by SEQ ID NO: 78463.

[9864] The probes having the nucleotide sequence represented by SEQ ID NOS: 117648, 117649, 117650, 117651, 117652, 117653, 117654, 117655, 117656, 117657, 117658 were selected from the ORFs having the nucleotide sequence represented by SEQ ID NO: 78464.

[9865] The probes having the nucleotide sequence represented by SEQ ID NOS: 117659, 117660, 117661, 117662, 117663, 117664, 117665, 117666, 117667, 117668, 117669 were selected from the ORFs having the nucleotide sequence represented by SEQ ID NO: 78465.

[9866] The probes having the nucleotide sequence represented by SEQ ID NOS: 117670, 117671, 117672, 117673, 117674, 117675, 117676, 117677, 117678, 117679, 117680 were selected from the ORFs having the nucleotide sequence represented by SEQ ID NO: 78466.

[9867] The probes having the nucleotide sequence represented by SEQ ID NOS: 117681, 117682, 117683, 117684, 117685, 117686, 117687, 117688, 117689, 117690, 117691 were selected from the ORFs having the nucleotide sequence represented by SEQ ID NO: 78467.

[9868] The probes having the nucleotide sequence represented by SEQ ID NOS: 117692, 117693, 117694, 117695, 117696, 117697, 117698, 117699, 117700, 117701, 117702 were selected from the ORFs having the nucleotide sequence represented by SEQ ID NO: 78468.

[9869] The probes having the nucleotide sequence represented by SEQ ID NOS: 117703, 117704, 117705, 117706, 117707, 117708, 117709, 117710, 117711, 117712, 117713 were selected from the ORFs having the nucleotide sequence represented by SEQ ID NO: 78469.

[9870] The probes having the nucleotide sequence represented by SEQ ID NOS: 117714, 117715, 117716, 117717, 117718, 117719, 117720, 117721, 117722, 117723, 117724 were selected from the ORFs having the nucleotide sequence represented by SEQ ID NO: 78470.

[9871] The probes having the nucleotide sequence represented by SEQ ID NOS: 117725, 117726, 117727, 117728, 117729, 117730, 117731, 117732, 117733, 117734, 117735 were selected from the ORFs having the nucleotide sequence represented by SEQ ID NO: 78471.

[9872] The probes having the nucleotide sequence represented by SEQ ID NOS: 117736, 117737, 117738, 117739, 117740, 117741, 117742, 117743, 117744, 117745, 117746 were selected from the ORFs having the nucleotide sequence represented by SEQ ID NO: 78472.

[9873] The probes having the nucleotide sequence represented by SEQ ID NOS: 117747, 117748, 117749, 117750, 117751, 117752, 117753, 117754, 117755, 117756, 117757 were selected from the ORFs having the nucleotide sequence represented by SEQ ID NO: 78473.

[9874] The probes having the nucleotide sequence represented by SEQ ID NOS: 117758, 117759, 117760, 117761, 117762, 117763, 117764, 117765, 117766, 117767, 117768 were selected from the ORFs having the nucleotide sequence represented by SEQ ID NO: 78474.

[9875] The probes having the nucleotide sequence represented by SEQ ID NOS: 117769, 117770, 117771, 117772, 117773, 117774, 117775, 117776, 117777, 117778, 117779 were selected from the ORFs having the nucleotide sequence represented by SEQ ID NO: 78475.

[9876] The probes having the nucleotide sequence represented by SEQ ID NOS: 117780, 117781, 117782, 117783, 117784, 117785, 117786, 117787, 117788, 117789, 117790 were selected from the ORFs having the nucleotide sequence represented by SEQ ID NO: 78476.

[9877] The probes having the nucleotide sequence represented by SEQ ID NOS: 117791, 117792, 117793, 117794, 117795, 117796, 117797, 117798, 117799, 117800, 117801 were selected from the ORFs having the nucleotide sequence represented by SEQ ID NO: 78477.

[9878] The probes having the nucleotide sequence represented by SEQ ID NOS: 117802, 117803, 117804, 117805, 117806, 117807, 117808, 117809, 117810, 117811, 117812 were selected from the ORFs having the nucleotide sequence represented by SEQ ID NO: 78478.

[9879] The probes having the nucleotide sequence represented by SEQ ID NOS: 117813, 117814, 117815, 117816, 117817, 117818, 117819, 117820, 117821, 117822, 117823 were selected from the ORFs having the nucleotide sequence represented by SEQ ID NO: 78479.

[9880] The probes having the nucleotide sequence represented by SEQ ID NOS: 117824, 117825, 117826, 117827, 117828, 117829, 117830, 117831, 117832, 117833, 117834 were selected from the ORFs having the nucleotide sequence represented by SEQ ID NO: 78480.

[9881] The probes having the nucleotide sequence represented by SEQ ID NOS: 117835, 117836, 117837, 117838, 117839, 117840, 117841, 117842, 117843, 117844, 117845 were selected from the ORFs having the nucleotide sequence represented by SEQ ID NO: 78481.

[9882] The probes having the nucleotide sequence represented by SEQ ID NOS: 117846, 117847, 117848, 117849, 117850, 117851, 117852, 117853, 117854, 117855, 117856 were selected from the ORFs having the nucleotide sequence represented by SEQ ID NO: 78482.

[9883] The probes having the nucleotide sequence represented by SEQ ID NOS: 117857, 117858, 117859, 117860, 117861, 117862, 117863, 117864, 117865, 117866, 117867 were selected from the ORFs having the nucleotide sequence represented by SEQ ID NO: 78483.

[9884] The probes having the nucleotide sequence represented by SEQ ID NOS: 117868, 117869, 117870, 117871, 117872, 117873, 117874, 117875, 117876, 117877, 117878 were selected from the ORFs having the nucleotide sequence represented by SEQ ID NO: 78484.

[9885] The probes having the nucleotide sequence represented by SEQ ID NOS: 117879, 117880, 117881, 117882, 117883, 117884, 117885, 117886, 117887, 117888, 117889 were selected from the ORFs having the nucleotide sequence represented by SEQ ID NO: 78485.

[9886] The probes having the nucleotide sequence represented by SEQ ID NOS: 117890, 117891, 117892, 117893, 117894, 117895, 117896, 117897, 117898, 117899, 117900 were selected from the ORFs having the nucleotide sequence represented by SEQ ID NO: 78486.

[9887] The probes having the nucleotide sequence represented by SEQ ID NOS: 117901, 117902, 117903, 117904, 117905, 117906, 117907, 117908, 117909, 117910, 117911 were selected from the ORFs having the nucleotide sequence represented by SEQ ID NO: 78487.

[9888] The probes having the nucleotide sequence represented by SEQ ID NOS: 117912, 117913, 117914, 117915, 117916, 117917, 117918, 117919, 117920, 117921, 117922 were selected from the ORFs having the nucleotide sequence represented by SEQ ID NO: 78488.

[9889] The probes having the nucleotide sequence represented by SEQ ID NOS: 117923, 117924, 117925, 117926, 117927, 117928, 117929, 117930, 117931, 117932, 117933 were selected from the ORFs having the nucleotide sequence represented by SEQ ID NO: 78489.

[9890] The probes having the nucleotide sequence represented by SEQ ID NOS: 117934, 117935, 117936, 117937, 117938, 117939, 117940, 117941, 117942, 117943, 117944 were selected from the ORFs having the nucleotide sequence represented by SEQ ID NO: 78490.

[9891] The probes having the nucleotide sequence represented by SEQ ID NOS: 117945, 117946, 117947, 117948, 117949, 117950, 117951, 117952, 117953, 117954, 117955 were selected from the ORFs having the nucleotide sequence represented by SEQ ID NO: 78491.

[9892] The probes having the nucleotide sequence represented by SEQ ID NOS: 117956, 117957, 117958, 117959, 117960, 117961, 117962, 117963, 117964, 117965, 117966 were selected from the ORFs having the nucleotide sequence represented by SEQ ID NO: 78492.

[9893] The probes having the nucleotide sequence represented by SEQ ID NOS: 117967, 117968, 117969, 117970, 117971, 117972, 117973, 117974, 117975, 117976, 117977 were selected from the ORFs having the nucleotide sequence represented by SEQ ID NO: 78493.

[9894] The probes having the nucleotide sequence represented by SEQ ID NOS: 117978, 117979, 117980, 117981, 117982, 117983, 117984, 117985, 117986, 117987, 117988 were selected from the ORFs having the nucleotide sequence represented by SEQ ID NO: 78494.

[9895] The probes having the nucleotide sequence represented by SEQ ID NOS: 117989, 117990, 117991, 117992, 117993, 117994, 117995, 117996, 117997, 117998, 117999 were selected from the ORFs having the nucleotide sequence represented by SEQ ID NO: 78495.

[9896] The probes having the nucleotide sequence represented by SEQ ID NOS: 118000, 118001, 118002, 118003, 118004, 118005, 118006, 118007, 118008, 118009, 118010 were selected from the ORFs having the nucleotide sequence represented by SEQ ID NO: 78496.

[9897] The probes having the nucleotide sequence represented by SEQ ID NOS: 118011, 118012, 118013, 118014, 118015, 118016, 118017, 118018, 118019, 118020, 118021 were selected from the ORFs having the nucleotide sequence represented by SEQ ID NO: 78497.

[9898] The probes having the nucleotide sequence represented by SEQ ID NOS: 118022, 118023, 118024, 118025, 118026, 118027, 118028, 118029, 118030, 118031, 118032 were selected from the ORFs having the nucleotide sequence represented by SEQ ID NO: 78498.

[9899] The probes having the nucleotide sequence represented by SEQ ID NOS: 118033, 118034, 118035, 118036, 118037, 118038, 118039, 118040, 118041, 118042, 118043 were selected from the ORFs having the nucleotide sequence represented by SEQ ID NO: 78499.

[9900] The probes having the nucleotide sequence represented by SEQ ID NOS: 118044, 118045, 118046, 118047, 118048, 118049, 118050, 118051, 118052, 118053, 118054 were selected from the ORFs having the nucleotide sequence represented by SEQ ID NO: 78500.

[9901] The probes having the nucleotide sequence represented by SEQ ID NOS: 118055, 118056, 118057, 118058, 118059, 118060, 118061, 118062, 118063, 118064, 118065 were selected from the ORFs having the nucleotide sequence represented by SEQ ID NO: 78501.

[9902] The probes having the nucleotide sequence represented by SEQ ID NOS: 118066, 118067, 118068, 118069, 118070, 118071, 118072, 118073, 118074, 118075, 118076 were selected from the ORFs having the nucleotide sequence represented by SEQ ID NO: 78502.

[9903] The probes having the nucleotide sequence represented by SEQ ID NOS: 118077, 118078, 118079, 118080, 118081, 118082, 118083, 118084, 118085, 118086, 118087 were selected from the ORFs having the nucleotide sequence represented by SEQ ID NO: 78503.

[9904] The probes having the nucleotide sequence represented by SEQ ID NOS: 118088, 118089, 118090, 118091, 118092, 118093, 118094, 118095, 118096, 118097, 118098 were selected from the ORFs having the nucleotide sequence represented by SEQ ID NO: 78504.

[9905] The probes having the nucleotide sequence represented by SEQ ID NOS: 118099, 118100, 118101, 118102, 118103, 118104, 118105, 118106, 118107, 118108, 118109 were selected from the ORFs having the nucleotide sequence represented by SEQ ID NO: 78505.

[9906] The probes having the nucleotide sequence represented by SEQ ID NOS: 118110, 118111, 118112, 118113, 118114, 118115, 118116, 118117, 118118, 118119, 118120 were selected from the ORFs having the nucleotide sequence represented by SEQ ID NO: 78506.

[9907] The probes having the nucleotide sequence represented by SEQ ID NOS: 118121, 118122, 118123, 118124, 118125, 118126, 118127, 118128, 118129, 118130, 118131 were selected from the ORFs having the nucleotide sequence represented by SEQ ID NO: 78507.

[9908] The probes having the nucleotide sequence represented by SEQ ID NOS: 118132, 118133, 118134, 118135, 118136, 118137, 118138, 118139, 118140, 118141, 118142 were selected from the ORFs having the nucleotide sequence represented by SEQ ID NO: 78508.

[9909] The probes having the nucleotide sequence represented by SEQ ID NOS: 118143, 118144, 118145, 118146, 118147, 118148, 118149, 118150, 118151, 118152, 118153 were selected from the ORFs having the nucleotide sequence represented by SEQ ID NO: 78509.

[9910] The probes having the nucleotide sequence represented by SEQ ID NOS: 118154, 118155, 118156, 118157, 118158, 118159, 118160, 118161, 118162, 118163, 118164 were selected from the ORFs having the nucleotide sequence represented by SEQ ID NO: 78510.

[9911] The probes having the nucleotide sequence represented by SEQ ID NOS: 118165, 118166, 118167, 118168, 118169, 118170, 118171, 118172, 118173, 118174, 118175 were selected from the ORFs having the nucleotide sequence represented by SEQ ID NO: 78511.

[9912] The probes having the nucleotide sequence represented by SEQ ID NOS: 118176, 118177, 118178, 118179, 118180, 118181, 118182, 118183, 118184, 118185, 118186 were selected from the ORFs having the nucleotide sequence represented by SEQ ID NO: 78512.

[9913] The probes having the nucleotide sequence represented by SEQ ID NOS: 118187, 118188, 118189, 118190, 118191, 118192, 118193, 118194, 118195, 118196, 118197 were selected from the ORFs having the nucleotide sequence represented by SEQ ID NO: 78513.

[9914] The probes having the nucleotide sequence represented by SEQ ID NOS: 118198, 118199, 118200, 118201, 118202, 118203, 118204, 118205, 118206, 118207, 118208 were selected from the ORFs having the nucleotide sequence represented by SEQ ID NO: 78514.

[9915] The probes having the nucleotide sequence represented by SEQ ID NOS: 118209, 118210, 118211, 118212, 118213, 118214, 118215, 118216, 118217, 118218, 118219 were selected from the ORFs having the nucleotide sequence represented by SEQ ID NO: 78515.

[9916] The probes having the nucleotide sequence represented by SEQ ID NOS: 118220, 118221, 118222, 118223, 118224, 118225, 118226, 118227, 118228, 118229, 118230 were selected from the ORFs having the nucleotide sequence represented by SEQ ID NO: 78516.

[9917] The probes having the nucleotide sequence represented by SEQ ID NOS: 118231, 118232, 118233, 118234, 118235, 118236, 118237, 118238, 118239, 118240, 118241, 118242, 118243, 118244, 118245, 118246, 118247, 118248, 118249, 118250, 118251, 118252 were selected from the ORFs having the nucleotide sequence represented by SEQ ID NO: 78517.

[9918] The probes having the nucleotide sequence represented by SEQ ID NOS: 118253, 118254, 118255, 118256, 118257, 118258, 118259, 118260, 118261, 118262, 118263, 118264, 118265, 118266, 118267, 118268, 118269, 118270, 118271, 118272, 118273, 118274 were selected from the ORFs having the nucleotide sequence represented by SEQ ID NO: 78518.

[9919] The probes having the nucleotide sequence represented by SEQ ID NOS: 118275, 118276, 118277, 118278, 118279, 118280, 118281, 118282, 118283, 118284, 118285 were selected from the ORFs having the nucleotide sequence represented by SEQ ID NO: 78519.

[9920] The probes having the nucleotide sequence represented by SEQ ID NOS: 118286, 118287, 118288, 118289, 118290, 118291, 118292, 118293, 118294, 118295, 118296 were selected from the ORFs having the nucleotide sequence represented by SEQ ID NO: 78520.

[9921] The probes having the nucleotide sequence represented by SEQ ID NOS: 118297, 118298, 118299, 118300, 118301, 118302, 118303, 118304, 118305, 118306, 118307 were selected from the ORFs having the nucleotide sequence represented by SEQ ID NO: 78521.

[9922] The probes having the nucleotide sequence represented by SEQ ID NOS: 118308, 118309, 118310, 118311, 118312, 118313, 118314, 118315, 118316, 118317, 118318 were selected from the ORFs having the nucleotide sequence represented by SEQ ID NO: 78522.

[9923] The probes having the nucleotide sequence represented by SEQ ID NOS: 118319, 118320, 118321, 118322, 118323, 118324, 118325, 118326, 118327, 118328, 118329 were selected from the ORFs having the nucleotide sequence represented by SEQ ID NO: 78523.

[9924] The probes having the nucleotide sequence represented by SEQ ID NOS: 118330, 118331, 118332, 118333, 118334, 118335, 118336, 118337, 118338, 118339, 118340 were selected from the ORFs having the nucleotide sequence represented by SEQ ID NO: 78524.

[9925] The probes having the nucleotide sequence represented by SEQ ID NOS: 118341, 118342, 118343, 118344, 118345, 118346, 118347, 118348, 118349, 118350, 118351 were selected from the ORFs having the nucleotide sequence represented by SEQ ID NO: 78525.

[9926] The probes having the nucleotide sequence represented by SEQ ID NOS: 118352, 118353, 118354, 118355, 118356, 118357, 118358, 118359, 118360, 118361, 118362 were selected from the ORFs having the nucleotide sequence represented by SEQ ID NO: 78526.

[9927] The probes having the nucleotide sequence represented by SEQ ID NOS: 118363, 118364, 118365, 118366, 118367, 118368, 118369, 118370, 118371, 118372, 118373 were selected from the ORFs having the nucleotide sequence represented by SEQ ID NO: 78527.

[9928] The probes having the nucleotide sequence represented by SEQ ID NOS: 118374, 118375, 118376, 118377, 118378, 118379, 118380, 118381, 118382, 118383, 118384 were selected from the ORFs having the nucleotide sequence represented by SEQ ID NO: 78528.

[9929] The probes having the nucleotide sequence represented by SEQ ID NOS: 118385, 118386, 118387, 118388, 118389, 118390, 118391, 118392, 118393, 118394, 118395 were selected from the ORFs having the nucleotide sequence represented by SEQ ID NO: 78529.

[9930] The probes having the nucleotide sequence represented by SEQ ID NOS: 118396, 118397, 118398, 118399, 118400, 118401, 118402, 118403, 118404, 118405, 118406 were selected from the ORFs having the nucleotide sequence represented by SEQ ID NO: 78530.

[9931] The probes having the nucleotide sequence represented by SEQ ID NOS: 118407, 118408, 118409, 118410, 118411, 118412, 118413, 118414, 118415, 118416, 118417 were selected from the ORFs having the nucleotide sequence represented by SEQ ID NO: 78531.

[9932] The probes having the nucleotide sequence represented by SEQ ID NOS: 118418, 118419, 118420, 118421, 118422, 118423, 118424, 118425, 118426, 118427, 118428 were selected from the ORFs having the nucleotide sequence represented by SEQ ID NO: 78532.

[9933] The probes having the nucleotide sequence represented by SEQ ID NOS: 118429, 118430, 118431, 118432, 118433, 118434, 118435, 118436, 118437, 118438, 118439 were selected from the ORFs having the nucleotide sequence represented by SEQ ID NO: 78533.

[9934] The probes having the nucleotide sequence represented by SEQ ID NOS: 118440, 118441, 118442, 118443, 118444, 118445, 118446, 118447, 118448, 118449, 118450 were selected from the ORFs having the nucleotide sequence represented by SEQ ID NO: 78534.

[9935] The probes having the nucleotide sequence represented by SEQ ID NOS: 118451, 118452, 118453, 118454, 118455, 118456, 118457, 118458, 118459, 118460, 118461 were selected from the ORFs having the nucleotide sequence represented by SEQ ID NO: 78535.

[9936] The probes having the nucleotide sequence represented by SEQ ID NOS: 118462, 118463, 118464, 118465, 118466, 118467, 118468, 118469, 118470, 118471, 118472 were selected from the ORFs having the nucleotide sequence represented by SEQ ID NO: 78536.

[9937] The probes having the nucleotide sequence represented by SEQ ID NOS: 118473, 118474, 118475, 118476, 118477, 118478, 118479, 118480, 118481, 118482, 118483 were selected from the ORFs having the nucleotide sequence represented by SEQ ID NO: 78537.

[9938] The probes having the nucleotide sequence represented by SEQ ID NOS: 118484, 118485, 118486, 118487, 118488, 118489, 118490, 118491, 118492, 118493, 118494 were selected from the ORFs having the nucleotide sequence represented by SEQ ID NO: 78538.

[9939] The probes having the nucleotide sequence represented by SEQ ID NOS: 118495, 118496, 118497, 118498, 118499, 118500, 118501, 118502, 118503, 118504, 118505 were selected from the ORFs having the nucleotide sequence represented by SEQ ID NO: 78539.

[9940] The probes having the nucleotide sequence represented by SEQ ID NOS: 118506, 118507, 118508, 118509, 118510, 118511, 118512, 118513, 118514, 118515, 118516 were selected from the ORFs having the nucleotide sequence represented by SEQ ID NO: 78540.

[9941] The probes having the nucleotide sequence represented by SEQ ID NOS: 118517, 118518, 118519, 118520, 118521, 118522, 118523, 118524, 118525, 118526, 118527 were selected from the ORFs having the nucleotide sequence represented by SEQ ID NO: 78541.

[9942] The probes having the nucleotide sequence represented by SEQ ID NOS: 118528, 118529, 118530, 118531, 118532, 118533, 118534, 118535, 118536, 118537, 118538 were selected from the ORFs having the nucleotide sequence represented by SEQ ID NO: 78542.

[9943] The probes having the nucleotide sequence represented by SEQ ID NOS: 118539, 118540, 118541, 118542, 118543, 118544, 118545, 118546, 118547, 118548, 118549 were selected from the ORFs having the nucleotide sequence represented by SEQ ID NO: 78543.

[9944] The probes having the nucleotide sequence represented by SEQ ID NOS: 118550, 118551, 118552, 118553, 118554, 118555, 118556, 118557, 118558, 118559, 118560 were selected from the ORFs having the nucleotide sequence represented by SEQ ID NO: 78544.

[9945] The probes having the nucleotide sequence represented by SEQ ID NOS: 118561, 118562, 118563, 118564, 118565, 118566, 118567, 118568, 118569, 118570, 118571 were selected from the ORFs having the nucleotide sequence represented by SEQ ID NO: 78545.

[9946] The probes having the nucleotide sequence represented by SEQ ID NOS: 118572, 118573, 118574, 118575, 118576, 118577, 118578, 118579, 118580, 118581, 118582 were selected from the ORFs having the nucleotide sequence represented by SEQ ID NO: 78546.

[9947] The probes having the nucleotide sequence represented by SEQ ID NOS: 118583, 118584, 118585, 118586, 118587, 118588, 118589, 118590, 118591, 118592, 118593 were selected from the ORFs having the nucleotide sequence represented by SEQ ID NO: 78547.

[9948] The probes having the nucleotide sequence represented by SEQ ID NOS: 118594, 118595, 118596, 118597, 118598, 118599, 118600, 118601, 118602, 118603, 118604 were selected from the ORFs having the nucleotide sequence represented by SEQ ID NO: 78548.

[9949] The probes having the nucleotide sequence represented by SEQ ID NOS: 118605, 118606, 118607, 118608, 118609, 118610, 118611, 118612, 118613, 118614, 118615 were selected from the ORFs having the nucleotide sequence represented by SEQ ID NO: 78549.

[9950] The probes having the nucleotide sequence represented by SEQ ID NOS: 118616, 118617, 118618, 118619, 118620, 118621, 118622, 118623, 118624, 118625, 118626 were selected from the ORFs having the nucleotide sequence represented by SEQ ID NO: 78550.

[9951] The probes having the nucleotide sequence represented by SEQ ID NOS: 118627, 118628, 118629, 118630, 118631, 118632, 118633, 118634, 118635, 118636, 118637 were selected from the ORFs having the nucleotide sequence represented by SEQ ID NO: 78551.

[9952] The probes having the nucleotide sequence represented by SEQ ID NOS: 118638, 118639, 118640, 118641, 118642, 118643, 118644, 118645, 118646, 118647, 118648 were selected from the ORFs having the nucleotide sequence represented by SEQ ID NO: 78552.

[9953] The probes having the nucleotide sequence represented by SEQ ID NOS: 118649, 118650, 118651, 118652, 118653, 118654, 118655, 118656, 118657, 118658, 118659 were selected from the ORFs having the nucleotide sequence represented by SEQ ID NO: 78553.

[9954] The probes having the nucleotide sequence represented by SEQ ID NOS: 118660, 118661, 118662, 118663, 118664, 118665, 118666, 118667, 118668, 118669, 118670 were selected from the ORFs having the nucleotide sequence represented by SEQ ID NO: 78554.

[9955] The probes having the nucleotide sequence represented by SEQ ID NOS: 118671, 118672, 118673, 118674, 118675, 118676, 118677, 118678, 118679, 118680, 118681 were selected from the ORFs having the nucleotide sequence represented by SEQ ID NO: 78555.

[9956] The probes having the nucleotide sequence represented by SEQ ID NOS: 118682, 118683, 118684, 118685, 118686, 118687, 118688, 118689, 118690, 118691, 118692 were selected from the ORFs having the nucleotide sequence represented by SEQ ID NO: 78556.

[9957] The probes having the nucleotide sequence represented by SEQ ID NOS: 118693, 118694, 118695, 118696, 118697, 118698, 118699, 118700, 118701, 118702, 118703 were selected from the ORFs having the nucleotide sequence represented by SEQ ID NO: 78557.

[9958] The probes having the nucleotide sequence represented by SEQ ID NOS: 118704, 118705, 118706, 118707, 118708, 118709, 118710, 118711, 118712, 118713, 118714 were selected from the ORFs having the nucleotide sequence represented by SEQ ID NO: 78558.

[9959] The probes having the nucleotide sequence represented by SEQ ID NOS: 118715, 118716, 118717, 118718, 118719, 118720, 118721, 118722, 118723, 118724, 118725 were selected from the ORFs having the nucleotide sequence represented by SEQ ID NO: 78559.

[9960] The probes having the nucleotide sequence represented by SEQ ID NOS: 118726, 118727, 118728, 118729, 118730, 118731, 118732, 118733, 118734, 118735, 118736 were selected from the ORFs having the nucleotide sequence represented by SEQ ID NO: 78560.

[9961] The probes having the nucleotide sequence represented by SEQ ID NOS: 118737, 118738, 118739, 118740, 118741, 118742, 118743, 118744, 118745, 118746, 118747 were selected from the ORFs having the nucleotide sequence represented by SEQ ID NO: 78561.

[9962] The probes having the nucleotide sequence represented by SEQ ID NOS: 118748, 118749, 118750, 118751, 118752, 118753, 118754, 118755, 118756, 118757, 118758 were selected from the ORFs having the nucleotide sequence represented by SEQ ID NO: 78562.

[9963] The probes having the nucleotide sequence represented by SEQ ID NOS: 118759, 118760, 118761, 118762, 118763, 118764, 118765, 118766, 118767, 118768, 118769 were selected from the ORFs having the nucleotide sequence represented by SEQ ID NO: 78563.

[9964] The probes having the nucleotide sequence represented by SEQ ID NOS: 118770, 118771, 118772, 118773, 118774, 118775, 118776, 118777, 118778, 118779, 118780 were selected from the ORFs having the nucleotide sequence represented by SEQ ID NO: 78564.

[9965] The probes having the nucleotide sequence represented by SEQ ID NOS: 118781, 118782, 118783, 118784, 118785, 118786, 118787, 118788, 118789, 118790, 118791 were selected from the ORFs having the nucleotide sequence represented by SEQ ID NO: 78565.

[9966] The probes having the nucleotide sequence represented by SEQ ID NOS: 118792, 118793, 118794, 118795, 118796, 118797, 118798, 118799, 118800, 118801, 118802 were selected from the ORFs having the nucleotide sequence represented by SEQ ID NO: 78566.

[9967] The probes having the nucleotide sequence represented by SEQ ID NOS: 118803, 118804, 118805, 118806, 118807, 118808, 118809, 118810, 118811, 118812, 118813 were selected from the ORFs having the nucleotide sequence represented by SEQ ID NO: 78567.

[9968] The probes having the nucleotide sequence represented by SEQ ID NOS: 118814, 118815, 118816, 118817, 118818, 118819, 118820, 118821, 118822, 118823, 118824 were selected from the ORFs having the nucleotide sequence represented by SEQ ID NO: 78568.

[9969] The probes having the nucleotide sequence represented by SEQ ID NOS: 118825, 118826, 118827, 118828, 118829, 118830, 118831, 118832, 118833, 118834, 118835 were selected from the ORFs having the nucleotide sequence represented by SEQ ID NO: 78569.

[9970] The probes having the nucleotide sequence represented by SEQ ID NOS: 118836, 118837, 118838, 118839, 118840, 118841, 118842, 118843, 118844, 118845, 118846 were selected from the ORFs having the nucleotide sequence represented by SEQ ID NO: 78570.

[9971] The probes having the nucleotide sequence represented by SEQ ID NOS: 118847, 118848, 118849, 118850, 118851, 118852, 118853, 118854, 118855, 118856, 118857 were selected from the ORFs having the nucleotide sequence represented by SEQ ID NO: 78571.

[9972] The probes having the nucleotide sequence represented by SEQ ID NOS: 118858, 118859, 118860, 118861, 118862, 118863, 118864, 118865, 118866, 118867, 118868 were selected from the ORFs having the nucleotide sequence represented by SEQ ID NO: 78572.

[9973] The probes having the nucleotide sequence represented by SEQ ID NOS: 118869, 118870, 118871, 118872, 118873, 118874, 118875, 118876, 118877, 118878, 118879 were selected from the ORFs having the nucleotide sequence represented by SEQ ID NO: 78573.

[9974] The probes having the nucleotide sequence represented by SEQ ID NOS: 118880, 118881, 118882, 118883, 118884, 118885, 118886, 118887, 118888, 118889, 118890 were selected from the ORFs having the nucleotide sequence represented by SEQ ID NO: 78574.

[9975] The probes having the nucleotide sequence represented by SEQ ID NOS: 118891, 118892, 118893, 118894, 118895, 118896, 118897, 118898, 118899, 118900, 118901 were selected from the ORFs having the nucleotide sequence represented by SEQ ID NO: 78575.

[9976] The probes having the nucleotide sequence represented by SEQ ID NOS: 118902, 118903, 118904, 118905, 118906, 118907, 118908, 118909, 118910, 118911, 118912 were selected from the ORFs having the nucleotide sequence represented by SEQ ID NO: 78576.

[9977] The probes having the nucleotide sequence represented by SEQ ID NOS: 118913, 118914, 118915, 118916, 118917, 118918, 118919, 118920, 118921, 118922, 118923 were selected from the ORFs having the nucleotide sequence represented by SEQ ID NO: 78577.

[9978] The probes having the nucleotide sequence represented by SEQ ID NOS: 118924, 118925, 118926, 118927, 118928, 118929, 118930, 118931, 118932, 118933, 118934 were selected from the ORFs having the nucleotide sequence represented by SEQ ID NO: 78578.

[9979] The probes having the nucleotide sequence represented by SEQ ID NOS: 118935, 118936, 118937, 118938, 118939, 118940, 118941, 118942, 118943, 118944, 118945 were selected from the ORFs having the nucleotide sequence represented by SEQ ID NO: 78579.

[9980] The probes having the nucleotide sequence represented by SEQ ID NOS: 118946, 118947, 118948, 118949, 118950, 118951, 118952, 118953, 118954, 118955, 118956 were selected from the ORFs having the nucleotide sequence represented by SEQ ID NO: 78580.

[9981] The probes having the nucleotide sequence represented by SEQ ID NOS: 118957, 118958, 118959, 118960, 118961, 118962, 118963, 118964, 118965, 118966, 118967 were selected from the ORFs having the nucleotide sequence represented by SEQ ID NO: 78581.

[9982] The probes having the nucleotide sequence represented by SEQ ID NOS: 118968, 118969, 118970, 118971, 118972, 118973, 118974, 118975, 118976, 118977, 118978 were selected from the ORFs having the nucleotide sequence represented by SEQ ID NO: 78582.

[9983] The probes having the nucleotide sequence represented by SEQ ID NOS: 118979, 118980, 118981, 118982, 118983, 118984, 118985, 118986, 118987, 118988, 118989 were selected from the ORFs having the nucleotide sequence represented by SEQ ID NO: 78583.

[9984] The probes having the nucleotide sequence represented by SEQ ID NOS: 118990, 118991, 118992, 118993, 118994, 118995, 118996, 118997, 118998, 118999, 119000 were selected from the ORFs having the nucleotide sequence represented by SEQ ID NO: 78584.

[9985] The probes having the nucleotide sequence represented by SEQ ID NOS: 119001, 119002, 119003, 119004, 119005, 119006, 119007, 119008, 119009, 119010, 119011 were selected from the ORFs having the nucleotide sequence represented by SEQ ID NO: 78585.

[9986] The probes having the nucleotide sequence represented by SEQ ID NOS: 119012, 119013, 119014, 119015, 119016, 119017, 119018, 119019, 119020, 119021, 119022 were selected from the ORFs having the nucleotide sequence represented by SEQ ID NO: 78586.

[9987] The probes having the nucleotide sequence represented by SEQ ID NOS: 119023, 119024, 119025, 119026, 119027, 119028, 119029, 119030, 119031, 119032, 119033 were selected from the ORFs having the nucleotide sequence represented by SEQ ID NO: 78587.

[9988] The probes having the nucleotide sequence represented by SEQ ID NOS: 119034, 119035, 119036, 119037, 119038, 119039, 119040, 119041, 119042, 119043, 119044 were selected from the ORFs having the nucleotide sequence represented by SEQ ID NO: 78588.

[9989] The probes having the nucleotide sequence represented by SEQ ID NOS: 119045, 119046, 119047, 119048, 119049, 119050, 119051, 119052, 119053, 119054, 119055, 119056, 119057, 119058, 119059, 119060, 119061, 119062, 119063, 119064, 119065, 119066 were selected from the ORFs having the nucleotide sequence represented by SEQ ID NO: 78589.

[9990] The probes having the nucleotide sequence represented by SEQ ID NOS: 119067, 119068, 119069, 119070, 119071, 119072, 119073, 119074, 119075, 119076, 119077 were selected from the ORFs having the nucleotide sequence represented by SEQ ID NO: 78590.

[9991] The probes having the nucleotide sequence represented by SEQ ID NOS: 119078, 119079, 119080, 119081, 119082, 119083, 119084, 119085, 119086, 119087, 119088 were selected from the ORFs having the nucleotide sequence represented by SEQ ID NO: 78591.

[9992] The probes having the nucleotide sequence represented by SEQ ID NOS: 119089, 119090, 119091, 119092, 119093, 119094, 119095, 119096, 119097, 119098, 119099 were selected from the ORFs having the nucleotide sequence represented by SEQ ID NO: 78592.

[9993] The probes having the nucleotide sequence represented by SEQ ID NOS: 119100, 119101, 119102, 119103, 119104, 119105, 119106, 119107, 119108, 119109, 119110 were selected from the ORFs having the nucleotide sequence represented by SEQ ID NO: 78593.

[9994] The probes having the nucleotide sequence represented by SEQ ID NOS: 119111, 119112, 119113, 119114, 119115, 119116, 119117, 119118, 119119, 119120, 119121 were selected from the ORFs having the nucleotide sequence represented by SEQ ID NO: 78594.

[9995] The probes having the nucleotide sequence represented by SEQ ID NOS: 119122, 119123, 119124, 119125, 119126, 119127, 119128, 119129, 119130, 119131, 119132 were selected from the ORFs having the nucleotide sequence represented by SEQ ID NO: 78595.

[9996] The probes having the nucleotide sequence represented by SEQ ID NOS: 119133, 119134, 119135, 119136, 119137, 119138, 119139, 119140, 119141, 119142, 119143 were selected from the ORFs having the nucleotide sequence represented by SEQ ID NO: 78596.

[9997] The probes having the nucleotide sequence represented by SEQ ID NOS: 119144, 119145, 119146, 119147, 119148, 119149, 119150, 119151, 119152, 119153, 119154 were selected from the ORFs having the nucleotide sequence represented by SEQ ID NO: 78597.

[9998] The probes having the nucleotide sequence represented by SEQ ID NOS: 119155, 119156, 119157, 119158, 119159, 119160, 119161, 119162, 119163, 119164, 119165 were selected from the ORFs having the nucleotide sequence represented by SEQ ID NO: 78598.

[9999] The probes having the nucleotide sequence represented by SEQ ID NOS: 119166, 119167, 119168, 119169, 119170, 119171, 119172, 119173, 119174, 119175, 119176 were selected from the ORFs having the nucleotide sequence represented by SEQ ID NO: 78599.

[10000] The probes having the nucleotide sequence represented by SEQ ID NOS: 119177, 119178, 119179, 119180, 119181, 119182, 119183, 119184, 119185, 119186, 119187 were selected from the ORFs having the nucleotide sequence represented by SEQ ID NO: 78600.

[10001] The probes having the nucleotide sequence represented by SEQ ID NOS: 119188, 119189, 119190, 119191, 119192, 119193, 119194, 119195, 119196, 119197, 119198 were selected from the ORFs having the nucleotide sequence represented by SEQ ID NO: 78601.

[10002] The probes having the nucleotide sequence represented by SEQ ID NOS: 119199, 119200, 119201, 119202, 119203, 119204, 119205, 119206, 119207, 119208, 119209 were selected from the ORFs having the nucleotide sequence represented by SEQ ID NO: 78602.

[10003] The probes having the nucleotide sequence represented by SEQ ID NOS: 119210, 119211, 119212, 119213, 119214, 119215, 119216, 119217, 119218, 119219, 119220 were selected from the ORFs having the nucleotide sequence represented by SEQ ID NO: 78603.

[10004] The probes having the nucleotide sequence represented by SEQ ID NOS: 119221, 119222, 119223, 119224, 119225, 119226, 119227, 119228, 119229, 119230, 119231 were selected from the ORFs having the nucleotide sequence represented by SEQ ID NO: 78604.

[10005] The probes having the nucleotide sequence represented by SEQ ID NOS: 119232, 119233, 119234, 119235, 119236, 119237, 119238, 119239, 119240, 119241, 119242 were selected from the ORFs having the nucleotide sequence represented by SEQ ID NO: 78605.

[10006] The probes having the nucleotide sequence represented by SEQ ID NOS: 119243, 119244, 119245, 119246, 119247, 119248, 119249, 119250, 119251, 119252, 119253 were selected from the ORFs having the nucleotide sequence represented by SEQ ID NO: 78606.

[10007] The probes having the nucleotide sequence represented by SEQ ID NOS: 119254, 119255, 119256, 119257, 119258, 119259, 119260, 119261, 119262, 119263, 119264 were selected from the ORFs having the nucleotide sequence represented by SEQ ID NO: 78607.

[10008] The probes having the nucleotide sequence represented by SEQ ID NOS: 119265, 119266, 119267, 119268, 119269, 119270, 119271, 119272, 119273, 119274, 119275 were selected from the ORFs having the nucleotide sequence represented by SEQ ID NO: 78608.

[10009] The probes having the nucleotide sequence represented by SEQ ID NOS: 119276, 119277, 119278, 119279, 119280, 119281, 119282, 119283, 119284, 119285, 119286 were selected from the ORFs having the nucleotide sequence represented by SEQ ID NO: 78609.

[10010] The probes having the nucleotide sequence represented by SEQ ID NOS: 119287, 119288, 119289, 119290, 119291, 119292, 119293, 119294, 119295, 119296, 119297 were selected from the ORFs having the nucleotide sequence represented by SEQ ID NO: 78610.

[10011] The probes having the nucleotide sequence represented by SEQ ID NOS: 119298, 119299, 119300, 119301, 119302, 119303, 119304, 119305, 119306, 119307, 119308 were selected from the ORFs having the nucleotide sequence represented by SEQ ID NO: 78611.

[10012] The probes having the nucleotide sequence represented by SEQ ID NOS: 119309, 119310, 119311, 119312, 119313, 119314, 119315, 119316, 119317, 119318, 119319 were selected from the ORFs having the nucleotide sequence represented by SEQ ID NO: 78612.

[10013] The probes having the nucleotide sequence represented by SEQ ID NOS: 119320, 119321, 119322, 119323, 119324, 119325, 119326, 119327, 119328, 119329, 119330 were selected from the ORFs having the nucleotide sequence represented by SEQ ID NO: 78613.

[10014] The probes having the nucleotide sequence represented by SEQ ID NOS: 119331, 119332, 119333, 119334, 119335, 119336, 119337, 119338, 119339, 119340, 119341 were selected from the ORFs having the nucleotide sequence represented by SEQ ID NO: 78614.

[10015] The probes having the nucleotide sequence represented by SEQ ID NOS: 119342, 119343, 119344, 119345, 119346, 119347, 119348, 119349, 119350, 119351, 119352 were selected from the ORFs having the nucleotide sequence represented by SEQ ID NO: 78615.

[10016] The probes having the nucleotide sequence represented by SEQ ID NOS: 119353, 119354, 119355, 119356, 119357, 119358, 119359, 119360, 119361, 119362, 119363 were selected from the ORFs having the nucleotide sequence represented by SEQ ID NO: 78616.

[10017] The probes having the nucleotide sequence represented by SEQ ID NOS: 119364, 119365, 119366, 119367, 119368, 119369, 119370, 119371, 119372, 119373, 119374 were selected from the ORFs having the nucleotide sequence represented by SEQ ID NO: 78617.

[10018] The probes having the nucleotide sequence represented by SEQ ID NOS: 119375, 119376, 119377, 119378, 119379, 119380, 119381, 119382, 119383, 119384, 119385 were selected from the ORFs having the nucleotide sequence represented by SEQ ID NO: 78618.

[10019] The probes having the nucleotide sequence represented by SEQ ID NOS: 119386, 119387, 119388, 119389, 119390, 119391, 119392, 119393, 119394, 119395, 119396 were selected from the ORFs having the nucleotide sequence represented by SEQ ID NO: 78619.

[10020] The probes having the nucleotide sequence represented by SEQ ID NOS: 119397, 119398, 119399, 119400, 119401, 119402, 119403, 119404, 119405, 119406, 119407 were selected from the ORFs having the nucleotide sequence represented by SEQ ID NO: 78620.

[10021] The probes having the nucleotide sequence represented by SEQ ID NOS: 119408, 119409, 119410, 119411, 119412, 119413, 119414, 119415, 119416, 119417, 119418 were selected from the ORFs having the nucleotide sequence represented by SEQ ID NO: 78621.

[10022] The probes having the nucleotide sequence represented by SEQ ID NOS: 119419, 119420, 119421, 119422, 119423, 119424, 119425, 119426, 119427, 119428, 119429 were selected from the ORFs having the nucleotide sequence represented by SEQ ID NO: 78622.

[10023] The probes having the nucleotide sequence represented by SEQ ID NOS: 119430, 119431, 119432, 119433, 119434, 119435, 119436, 119437, 119438, 119439, 119440 were selected from the ORFs having the nucleotide sequence represented by SEQ ID NO: 78623.

[10024] The probes having the nucleotide sequence represented by SEQ ID NOS: 119441, 119442, 119443, 119444, 119445, 119446, 119447, 119448, 119449, 119450, 119451 were selected from the ORFs having the nucleotide sequence represented by SEQ ID NO: 78624.

[10025] The probes having the nucleotide sequence represented by SEQ ID NOS: 119452, 119453, 119454, 119455, 119456, 119457, 119458, 119459, 119460, 119461, 119462 were selected from the ORFs having the nucleotide sequence represented by SEQ ID NO: 78625.

[10026] The probes having the nucleotide sequence represented by SEQ ID NOS: 119463, 119464, 119465, 119466, 119467, 119468, 119469, 119470, 119471, 119472, 119473 were selected from the ORFs having the nucleotide sequence represented by SEQ ID NO: 78626.

[10027] The probes having the nucleotide sequence represented by SEQ ID NOS: 119474, 119475, 119476, 119477, 119478, 119479, 119480, 119481, 119482, 119483, 119484 were selected from the ORFs having the nucleotide sequence represented by SEQ ID NO: 78627.

[10028] The probes having the nucleotide sequence represented by SEQ ID NOS: 119485, 119486, 119487, 119488, 119489, 119490, 119491, 119492, 119493, 119494, 119495 were selected from the ORFs having the nucleotide sequence represented by SEQ ID NO: 78628.

[10029] The probes having the nucleotide sequence represented by SEQ ID NOS: 119496, 119497, 119498, 119499, 119500, 119501, 119502, 119503, 119504, 119505, 119506 were selected from the ORFs having the nucleotide sequence represented by SEQ ID NO: 78629.

[10030] The probes having the nucleotide sequence represented by SEQ ID NOS: 119507, 119508, 119509, 119510, 119511, 119512, 119513, 119514, 119515, 119516, 119517 were selected from the ORFs having the nucleotide sequence represented by SEQ ID NO: 78630.

[10031] The probes having the nucleotide sequence represented by SEQ ID NOS: 119518, 119519, 119520, 119521, 119522, 119523, 119524, 119525, 119526, 119527, 119528 were selected from the ORFs having the nucleotide sequence represented by SEQ ID NO: 78631.

[10032] The probes having the nucleotide sequence represented by SEQ ID NOS: 119529, 119530, 119531, 119532, 119533, 119534, 119535, 119536, 119537, 119538, 119539 were selected from the ORFs having the nucleotide sequence represented by SEQ ID NO: 78632.

[10033] The probes having the nucleotide sequence represented by SEQ ID NOS: 119540, 119541, 119542, 119543, 119544, 119545, 119546, 119547, 119548, 119549, 119550 were selected from the ORFs having the nucleotide sequence represented by SEQ ID NO: 78633.

[10034] The probes having the nucleotide sequence represented by SEQ ID NOS: 119551, 119552, 119553, 119554, 119555, 119556, 119557, 119558, 119559, 119560, 119561 were selected from the ORFs having the nucleotide sequence represented by SEQ ID NO: 78634.

[10035] The probes having the nucleotide sequence represented by SEQ ID NOS: 119562, 119563, 119564, 119565, 119566, 119567, 119568, 119569, 119570, 119571, 119572 were selected from the ORFs having the nucleotide sequence represented by SEQ ID NO: 78635.

[10036] The probes having the nucleotide sequence represented by SEQ ID NOS: 119573, 119574, 119575, 119576, 119577, 119578, 119579, 119580, 119581, 119582, 119583 were selected from the ORFs having the nucleotide sequence represented by SEQ ID NO: 78636.

[10037] The probes having the nucleotide sequence represented by SEQ ID NOS: 119584, 119585, 119586, 119587, 119588, 119589, 119590, 119591, 119592, 119593, 119594 were selected from the ORFs having the nucleotide sequence represented by SEQ ID NO: 78637.

[10038] The probes having the nucleotide sequence represented by SEQ ID NOS: 119595, 119596, 119597, 119598, 119599, 119600, 119601, 119602, 119603, 119604, 119605 were selected from the ORFs having the nucleotide sequence represented by SEQ ID NO: 78638.

[10039] The probes having the nucleotide sequence represented by SEQ ID NOS: 119606, 119607, 119608, 119609, 119610, 119611, 119612, 119613, 119614, 119615, 119616 were selected from the ORFs having the nucleotide sequence represented by SEQ ID NO: 78639.

[10040] The probes having the nucleotide sequence represented by SEQ ID NOS: 119617, 119618, 119619, 119620, 119621, 119622, 119623, 119624, 119625, 119626, 119627 were selected from the ORFs having the nucleotide sequence represented by SEQ ID NO: 78640.

[10041] The probes having the nucleotide sequence represented by SEQ ID NOS: 119628, 119629, 119630, 119631, 119632, 119633, 119634, 119635, 119636, 119637, 119638 were selected from the ORFs having the nucleotide sequence represented by SEQ ID NO: 78641.

[10042] The probes having the nucleotide sequence represented by SEQ ID NOS: 119639, 119640, 119641, 119642, 119643, 119644, 119645, 119646, 119647, 119648, 119649 were selected from the ORFs having the nucleotide sequence represented by SEQ ID NO: 78642.

[10043] The probes having the nucleotide sequence represented by SEQ ID NOS: 119650, 119651, 119652, 119653, 119654, 119655, 119656, 119657, 119658, 119659, 119660 were selected from the ORFs having the nucleotide sequence represented by SEQ ID NO: 78643.

[10044] The probes having the nucleotide sequence represented by SEQ ID NOS: 119661, 119662, 119663, 119664, 119665, 119666, 119667, 119668, 119669, 119670, 119671 were selected from the ORFs having the nucleotide sequence represented by SEQ ID NO: 78644.

[10045] The probes having the nucleotide sequence represented by SEQ ID NOS: 119672, 119673, 119674, 119675, 119676, 119677, 119678, 119679, 119680, 119681, 119682 were selected from the ORFs having the nucleotide sequence represented by SEQ ID NO: 78645.

[10046] The probes having the nucleotide sequence represented by SEQ ID NOS: 119683, 119684, 119685, 119686, 119687, 119688, 119689, 119690, 119691, 119692, 119693 were selected from the ORFs having the nucleotide sequence represented by SEQ ID NO: 78646.

[10047] The probes having the nucleotide sequence represented by SEQ ID NOS: 119694, 119695, 119696, 119697, 119698, 119699, 119700, 119701, 119702, 119703, 119704 were selected from the ORFs having the nucleotide sequence represented by SEQ ID NO: 78647.

[10048] The probes having the nucleotide sequence represented by SEQ ID NOS: 119705, 119706, 119707, 119708, 119709, 119710, 119711, 119712, 119713, 119714, 119715 were selected from the ORFs having the nucleotide sequence represented by SEQ ID NO: 78648.

[10049] The probes having the nucleotide sequence represented by SEQ ID NOS: 119716, 119717, 119718, 119719, 119720, 119721, 119722, 119723, 119724, 119725, 119726 were selected from the ORFs having the nucleotide sequence represented by SEQ ID NO: 78649.

[10050] The probes having the nucleotide sequence represented by SEQ ID NOS: 119727, 119728, 119729, 119730, 119731, 119732, 119733, 119734, 119735, 119736, 119737 were selected from the ORFs having the nucleotide sequence represented by SEQ ID NO: 78650.

[10051] The probes having the nucleotide sequence represented by SEQ ID NOS: 119738, 119739, 119740, 119741, 119742, 119743, 119744, 119745, 119746, 119747, 119748 were selected from the ORFs having the nucleotide sequence represented by SEQ ID NO: 78651.

[10052] The probes having the nucleotide sequence represented by SEQ ID NOS: 119749, 119750, 119751, 119752, 119753, 119754, 119755, 119756, 119757, 119758, 119759 were selected from the ORFs having the nucleotide sequence represented by SEQ ID NO: 78652.

[10053] The probes having the nucleotide sequence represented by SEQ ID NOS: 119760, 119761, 119762, 119763, 119764, 119765, 119766, 119767, 119768 were selected from the ORFs having the nucleotide sequence represented by SEQ ID NO: 78653.

[10054] The probes having the nucleotide sequence represented by SEQ ID NOS: 119769, 119770, 119771, 119772, 119773, 119774, 119775, 119776, 119777, 119778, 119779 were selected from the ORFs having the nucleotide sequence represented by SEQ ID NO: 78654.

[10055] The probes having the nucleotide sequence represented by SEQ ID NOS: 119780, 119781, 119782, 119783, 119784, 119785, 119786, 119787, 119788, 119789, 119790 were selected from the ORFs having the nucleotide sequence represented by SEQ ID NO: 78655.

[10056] The probes having the nucleotide sequence represented by SEQ ID NOS: 119791, 119792, 119793, 119794, 119795, 119796, 119797, 119798, 119799, 119800, 119801 were selected from the ORFs having the nucleotide sequence represented by SEQ ID NO: 78656.

[10057] The probes having the nucleotide sequence represented by SEQ ID NOS: 119802, 119803, 119804, 119805, 119806, 119807, 119808, 119809, 119810, 119811, 119812 were selected from the ORFs having the nucleotide sequence represented by SEQ ID NO: 78657.

[10058] The probes having the nucleotide sequence represented by SEQ ID NOS: 119813, 119814, 119815, 119816, 119817, 119818, 119819, 119820, 119821, 119822, 119823 were selected from the ORFs having the nucleotide sequence represented by SEQ ID NO: 78658.

[10059] The probes having the nucleotide sequence represented by SEQ ID NOS: 119824, 119825, 119826, 119827, 119828, 119829, 119830, 119831, 119832, 119833, 119834 were selected from the ORFs having the nucleotide sequence represented by SEQ ID NO: 78659.

[10060] The probes having the nucleotide sequence represented by SEQ ID NOS: 119835, 119836, 119837, 119838, 119839, 119840, 119841, 119842, 119843, 119844, 119845 were selected from the ORFs having the nucleotide sequence represented by SEQ ID NO: 78660.

[10061] The probes having the nucleotide sequence represented by SEQ ID NOS: 119846, 119847, 119848, 119849, 119850, 119851, 119852, 119853, 119854, 119855, 119856 were selected from the ORFs having the nucleotide sequence represented by SEQ ID NO: 78661.

[10062] The probes having the nucleotide sequence represented by SEQ ID NOS: 119857, 119858, 119859, 119860, 119861, 119862, 119863, 119864, 119865, 119866, 119867 were selected from the ORFs having the nucleotide sequence represented by SEQ ID NO: 78662.

[10063] The probes having the nucleotide sequence represented by SEQ ID NOS: 119868, 119869, 119870, 119871, 119872, 119873, 119874, 119875, 119876, 119877, 119878 were selected from the ORFs having the nucleotide sequence represented by SEQ ID NO: 78663.

[10064] The probes having the nucleotide sequence represented by SEQ ID NOS: 119879, 119880, 119881, 119882, 119883, 119884, 119885, 119886, 119887, 119888, 119889 were selected from the ORFs having the nucleotide sequence represented by SEQ ID NO: 78664.

[10065] The probes having the nucleotide sequence represented by SEQ ID NOS: 119890, 119891, 119892, 119893, 119894, 119895, 119896, 119897, 119898, 119899, 119900 were selected from the ORFs having the nucleotide sequence represented by SEQ ID NO: 78665.

[10066] The probes having the nucleotide sequence represented by SEQ ID NOS: 119901, 119902, 119903, 119904, 119905, 119906, 119907, 119908, 119909, 119910, 119911 were selected from the ORFs having the nucleotide sequence represented by SEQ ID NO: 78666.

[10067] The probes having the nucleotide sequence represented by SEQ ID NOS: 119912, 119913, 119914, 119915, 119916, 119917, 119918, 119919, 119920, 119921, 119922 were selected from the ORFs having the nucleotide sequence represented by SEQ ID NO: 78667.

[10068] The probes having the nucleotide sequence represented by SEQ ID NOS: 119923, 119924, 119925, 119926, 119927, 119928, 119929, 119930, 119931, 119932, 119933 were selected from the ORFs having the nucleotide sequence represented by SEQ ID NO: 78668.

[10069] The probes having the nucleotide sequence represented by SEQ ID NOS: 119934, 119935, 119936, 119937, 119938, 119939, 119940, 119941, 119942, 119943, 119944 were selected from the ORFs having the nucleotide sequence represented by SEQ ID NO: 78669.

[10070] The probes having the nucleotide sequence represented by SEQ ID NOS: 119945, 119946, 119947, 119948, 119949, 119950, 119951, 119952, 119953, 119954, 119955 were selected from the ORFs having the nucleotide sequence represented by SEQ ID NO: 78670.

[10071] The probes having the nucleotide sequence represented by SEQ ID NOS: 119956, 119957, 119958, 119959, 119960, 119961, 119962, 119963, 119964, 119965, 119966 were selected from the ORFs having the nucleotide sequence represented by SEQ ID NO: 78671.

[10072] The probes having the nucleotide sequence represented by SEQ ID NOS: 119967, 119968, 119969, 119970, 119971, 119972, 119973, 119974, 119975, 119976, 119977 were selected from the ORFs having the nucleotide sequence represented by SEQ ID NO: 78672.

[10073] The probes having the nucleotide sequence represented by SEQ ID NOS: 119978, 119979, 119980, 119981, 119982, 119983, 119984, 119985, 119986, 119987, 119988 were selected from the ORFs having the nucleotide sequence represented by SEQ ID NO: 78673.

[10074] The probes having the nucleotide sequence represented by SEQ ID NOS: 119989, 119990, 119991, 119992, 119993, 119994, 119995, 119996, 119997, 119998, 119999 were selected from the ORFs having the nucleotide sequence represented by SEQ ID NO: 78674.

[10075] The probes having the nucleotide sequence represented by SEQ ID NOS: 120000, 120001, 120002, 120003, 120004, 120005, 120006, 120007, 120008, 120009, 120010 were selected from the ORFs having the nucleotide sequence represented by SEQ ID NO: 78675.

[10076] The probes having the nucleotide sequence represented by SEQ ID NOS: 120011, 120012, 120013, 120014, 120015, 120016, 120017, 120018, 120019, 120020, 120021 were selected from the ORFs having the nucleotide sequence represented by SEQ ID NO: 78676.

[10077] The probes having the nucleotide sequence represented by SEQ ID NOS: 120022, 120023, 120024, 120025, 120026, 120027, 120028, 120029, 120030, 120031, 120032 were selected from the ORFs having the nucleotide sequence represented by SEQ ID NO: 78677.

[10078] The probes having the nucleotide sequence represented by SEQ ID NOS: 120033, 120034, 120035, 120036, 120037, 120038, 120039, 120040, 120041, 120042, 120043 were selected from the ORFs having the nucleotide sequence represented by SEQ ID NO: 78678.

[10079] The probes having the nucleotide sequence represented by SEQ ID NOS: 120044, 120045, 120046, 120047, 120048, 120049, 120050, 120051, 120052, 120053, 120054 were selected from the ORFs having the nucleotide sequence represented by SEQ ID NO: 78679.

[10080] The probes having the nucleotide sequence represented by SEQ ID NOS: 120055, 120056, 120057, 120058, 120059, 120060, 120061, 120062, 120063, 120064, 120065 were selected from the ORFs having the nucleotide sequence represented by SEQ ID NO: 78680.

[10081] The probes having the nucleotide sequence represented by SEQ ID NOS: 120066, 120067, 120068, 120069, 120070, 120071, 120072, 120073, 120074, 120075, 120076 were selected from the ORFs having the nucleotide sequence represented by SEQ ID NO: 78681.

[10082] The probes having the nucleotide sequence represented by SEQ ID NOS: 120077, 120078, 120079, 120080, 120081, 120082, 120083, 120084, 120085, 120086, 120087 were selected from the ORFs having the nucleotide sequence represented by SEQ ID NO: 78682.

[10083] The probes having the nucleotide sequence represented by SEQ ID NOS: 120088, 120089, 120090, 120091, 120092, 120093, 120094, 120095, 120096, 120097, 120098 were selected from the ORFs having the nucleotide sequence represented by SEQ ID NO: 78683.

[10084] The probes having the nucleotide sequence represented by SEQ ID NOS: 120099, 120100, 120101, 120102, 120103, 120104, 120105, 120106, 120107, 120108, 120109 were selected from the ORFs having the nucleotide sequence represented by SEQ ID NO: 78684.

[10085] The probes having the nucleotide sequence represented by SEQ ID NOS: 120110, 120111, 120112, 120113, 120114, 120115, 120116, 120117, 120118, 120119, 120120 were selected from the ORFs having the nucleotide sequence represented by SEQ ID NO: 78685.

[10086] The probes having the nucleotide sequence represented by SEQ ID NOS: 120121, 120122, 120123, 120124, 120125, 120126, 120127, 120128, 120129, 120130, 120131 were selected from the ORFs having the nucleotide sequence represented by SEQ ID NO: 78686.

[10087] The probes having the nucleotide sequence represented by SEQ ID NOS: 120132, 120133, 120134, 120135, 120136, 120137, 120138, 120139, 120140, 120141, 120142 were selected from the ORFs having the nucleotide sequence represented by SEQ ID NO: 78687.

[10088] The probes having the nucleotide sequence represented by SEQ ID NOS: 120143, 120144, 120145, 120146, 120147, 120148, 120149, 120150, 120151, 120152, 120153 were selected from the ORFs having the nucleotide sequence represented by SEQ ID NO: 78688.

[10089] The probes having the nucleotide sequence represented by SEQ ID NOS: 120154, 120155, 120156, 120157, 120158, 120159, 120160, 120161, 120162, 120163, 120164 were selected from the ORFs having the nucleotide sequence represented by SEQ ID NO: 78689.

[10090] The probes having the nucleotide sequence represented by SEQ ID NOS: 120165, 120166, 120167, 120168, 120169, 120170, 120171, 120172, 120173, 120174, 120175 were selected from the ORFs having the nucleotide sequence represented by SEQ ID NO: 78690.

[10091] The probes having the nucleotide sequence represented by SEQ ID NOS: 120176, 120177, 120178, 120179, 120180, 120181, 120182, 120183, 120184, 120185, 120186 were selected from the ORFs having the nucleotide sequence represented by SEQ ID NO: 78691.

[10092] The probes having the nucleotide sequence represented by SEQ ID NOS: 120187, 120188, 120189, 120190, 120191, 120192, 120193, 120194, 120195, 120196, 120197 were selected from the ORFs having the nucleotide sequence represented by SEQ ID NO: 78692.

[10093] The probes having the nucleotide sequence represented by SEQ ID NOS: 120198, 120199, 120200, 120201, 120202, 120203, 120204, 120205, 120206, 120207, 120208 were selected from the ORFs having the nucleotide sequence represented by SEQ ID NO: 78693.

[10094] The probes having the nucleotide sequence represented by SEQ ID NOS: 120209, 120210, 120211, 120212, 120213, 120214, 120215, 120216, 120217, 120218, 120219 were selected from the ORFs having the nucleotide sequence represented by SEQ ID NO: 78694.

[10095] The probes having the nucleotide sequence represented by SEQ ID NOS: 120220, 120221, 120222, 120223, 120224, 120225, 120226, 120227, 120228, 120229, 120230 were selected from the ORFs having the nucleotide sequence represented by SEQ ID NO: 78695.

[10096] The probes having the nucleotide sequence represented by SEQ ID NOS: 120231, 120232, 120233, 120234, 120235, 120236, 120237, 120238, 120239, 120240, 120241 were selected from the ORFs having the nucleotide sequence represented by SEQ ID NO: 78696.

[10097] The probes having the nucleotide sequence represented by SEQ ID NOS: 120242, 120243, 120244, 120245, 120246, 120247, 120248, 120249, 120250, 120251, 120252 were selected from the ORFs having the nucleotide sequence represented by SEQ ID NO: 78697.

[10098] The probes having the nucleotide sequence represented by SEQ ID NOS: 120253, 120254, 120255, 120256, 120257, 120258, 120259, 120260, 120261, 120262, 120263 were selected from the ORFs having the nucleotide sequence represented by SEQ ID NO: 78698.

[10099] The probes having the nucleotide sequence represented by SEQ ID NOS: 120264, 120265, 120266, 120267, 120268, 120269, 120270, 120271, 120272, 120273, 120274 were selected from the ORFs having the nucleotide sequence represented by SEQ ID NO: 78699.

[10100] The probes having the nucleotide sequence represented by SEQ ID NOS: 120275, 120276, 120277, 120278, 120279, 120280, 120281, 120282, 120283, 120284, 120285 were selected from the ORFs having the nucleotide sequence represented by SEQ ID NO: 78700.

[10101] The probes having the nucleotide sequence represented by SEQ ID NOS: 120286, 120287, 120288, 120289, 120290, 120291, 120292, 120293, 120294, 120295, 120296 were selected from the ORFs having the nucleotide sequence represented by SEQ ID NO: 78701.

[10102] The probes having the nucleotide sequence represented by SEQ ID NOS: 120297, 120298, 120299, 120300, 120301, 120302, 120303, 120304, 120305, 120306, 120307 were selected from the ORFs having the nucleotide sequence represented by SEQ ID NO: 78702.

[10103] The probes having the nucleotide sequence represented by SEQ ID NOS: 120308, 120309, 120310, 120311, 120312, 120313, 120314, 120315, 120316, 120317, 120318 were selected from the ORFs having the nucleotide sequence represented by SEQ ID NO: 78703.

[10104] The probes having the nucleotide sequence represented by SEQ ID NOS: 120319, 120320, 120321, 120322, 120323, 120324, 120325, 120326, 120327, 120328, 120329 were selected from the ORFs having the nucleotide sequence represented by SEQ ID NO: 78704.

[10105] The probes having the nucleotide sequence represented by SEQ ID NOS: 120330, 120331, 120332, 120333, 120334, 120335, 120336, 120337, 120338, 120339, 120340 were selected from the ORFs having the nucleotide sequence represented by SEQ ID NO: 78705.

[10106] The probes having the nucleotide sequence represented by SEQ ID NOS: 120341, 120342, 120343, 120344, 120345, 120346, 120347, 120348, 120349, 120350, 120351 were selected from the ORFs having the nucleotide sequence represented by SEQ ID NO: 78706.

[10107] The probes having the nucleotide sequence represented by SEQ ID NOS: 120352, 120353, 120354, 120355, 120356, 120357, 120358, 120359, 120360, 120361, 120362 were selected from the ORFs having the nucleotide sequence represented by SEQ ID NO: 78707.

[10108] The probes having the nucleotide sequence represented by SEQ ID NOS: 120363, 120364, 120365, 120366, 120367, 120368, 120369, 120370, 120371, 120372, 120373 were selected from the ORFs having the nucleotide sequence represented by SEQ ID NO: 78708.

[10109] The probes having the nucleotide sequence represented by SEQ ID NOS: 120374, 120375, 120376, 120377, 120378, 120379, 120380, 120381, 120382, 120383, 120384 were selected from the ORFs having the nucleotide sequence represented by SEQ ID NO: 78709.

[10110] The probes having the nucleotide sequence represented by SEQ ID NOS: 120385, 120386, 120387, 120388, 120389, 120390, 120391, 120392, 120393, 120394, 120395 were selected from the ORFs having the nucleotide sequence represented by SEQ ID NO: 78710.

[10111] The probes having the nucleotide sequence represented by SEQ ID NOS: 120396, 120397, 120398, 120399, 120400, 120401, 120402, 120403, 120404, 120405, 120406 were selected from the ORFs having the nucleotide sequence represented by SEQ ID NO: 78711.

[10112] The probes having the nucleotide sequence represented by SEQ ID NOS: 120407, 120408, 120409, 120410, 120411, 120412, 120413, 120414, 120415, 120416, 120417 were selected from the ORFs having the nucleotide sequence represented by SEQ ID NO: 78712.

[10113] The probes having the nucleotide sequence represented by SEQ ID NOS: 120418, 120419, 120420, 120421, 120422, 120423, 120424, 120425, 120426, 120427, 120428 were selected from the ORFs having the nucleotide sequence represented by SEQ ID NO: 78713.

[10114] The probes having the nucleotide sequence represented by SEQ ID NOS: 120429, 120430, 120431, 120432, 120433, 120434, 120435, 120436, 120437, 120438, 120439 were selected from the ORFs having the nucleotide sequence represented by SEQ ID NO: 78714.

[10115] The probes having the nucleotide sequence represented by SEQ ID NOS: 120440, 120441, 120442, 120443, 120444, 120445, 120446, 120447, 120448, 120449, 120450 were selected from the ORFs having the nucleotide sequence represented by SEQ ID NO: 78715.

[10116] The probes having the nucleotide sequence represented by SEQ ID NOS: 120451, 120452, 120453, 120454, 120455, 120456, 120457, 120458, 120459, 120460, 120461 were selected from the ORFs having the nucleotide sequence represented by SEQ ID NO: 78716.

[10117] The probes having the nucleotide sequence represented by SEQ ID NOS: 120462, 120463, 120464, 120465, 120466, 120467, 120468, 120469, 120470, 120471, 120472 were selected from the ORFs having the nucleotide sequence represented by SEQ ID NO: 78717.

[10118] The probes having the nucleotide sequence represented by SEQ ID NOS: 120473, 120474, 120475, 120476, 120477, 120478, 120479, 120480, 120481, 120482, 120483 were selected from the ORFs having the nucleotide sequence represented by SEQ ID NO: 78718.

[10119] The probes having the nucleotide sequence represented by SEQ ID NOS: 120484, 120485, 120486, 120487, 120488, 120489, 120490, 120491, 120492, 120493, 120494 were selected from the ORFs having the nucleotide sequence represented by SEQ ID NO: 78719.

[10120] The probes having the nucleotide sequence represented by SEQ ID NOS: 120495, 120496, 120497, 120498, 120499, 120500, 120501, 120502, 120503, 120504, 120505 were selected from the ORFs having the nucleotide sequence represented by SEQ ID NO: 78720.

[10121] The probes having the nucleotide sequence represented by SEQ ID NOS: 120506, 120507, 120508, 120509, 120510, 120511, 120512, 120513, 120514, 120515, 120516 were selected from the ORFs having the nucleotide sequence represented by SEQ ID NO: 78721.

[10122] The probes having the nucleotide sequence represented by SEQ ID NOS: 120517, 120518, 120519, 120520, 120521, 120522, 120523, 120524, 120525, 120526, 120527 were selected from the ORFs having the nucleotide sequence represented by SEQ ID NO: 78722.

[10123] The probes having the nucleotide sequence represented by SEQ ID NOS: 120528, 120529, 120530, 120531, 120532, 120533, 120534, 120535, 120536, 120537, 120538 were selected from the ORFs having the nucleotide sequence represented by SEQ ID NO: 78723.

[10124] The probes having the nucleotide sequence represented by SEQ ID NOS: 120539, 120540, 120541, 120542, 120543, 120544, 120545, 120546, 120547, 120548, 120549 were selected from the ORFs having the nucleotide sequence represented by SEQ ID NO: 78724.

[10125] The probes having the nucleotide sequence represented by SEQ ID NOS: 120550, 120551, 120552, 120553, 120554, 120555, 120556, 120557, 120558, 120559, 120560 were selected from the ORFs having the nucleotide sequence represented by SEQ ID NO: 78725.

[10126] The probes having the nucleotide sequence represented by SEQ ID NOS: 120561, 120562, 120563, 120564, 120565, 120566, 120567, 120568, 120569, 120570, 120571 were selected from the ORFs having the nucleotide sequence represented by SEQ ID NO: 78726.

[10127] The probes having the nucleotide sequence represented by SEQ ID NOS: 120572, 120573, 120574, 120575, 120576, 120577, 120578, 120579, 120580, 120581, 120582 were selected from the ORFs having the nucleotide sequence represented by SEQ ID NO: 78727.

[10128] The probes having the nucleotide sequence represented by SEQ ID NOS: 120583, 120584, 120585, 120586, 120587, 120588, 120589, 120590, 120591, 120592, 120593 were selected from the ORFs having the nucleotide sequence represented by SEQ ID NO: 78728.

[10129] The probes having the nucleotide sequence represented by SEQ ID NOS: 120594, 120595, 120596, 120597, 120598, 120599, 120600, 120601, 120602, 120603, 120604 were selected from the ORFs having the nucleotide sequence represented by SEQ ID NO: 78729.

[10130] The probes having the nucleotide sequence represented by SEQ ID NOS: 120605, 120606, 120607, 120608, 120609, 120610, 120611, 120612, 120613, 120614, 120615 were selected from the ORFs having the nucleotide sequence represented by SEQ ID NO: 78730.

[10131] The probes having the nucleotide sequence represented by SEQ ID NOS: 120616, 120617, 120618, 120619, 120620, 120621, 120622, 120623, 120624, 120625, 120626 were selected from the ORFs having the nucleotide sequence represented by SEQ. ID NO: 78731.

[10132] The probes having the nucleotide sequence represented by SEQ ID NOS: 120627, 120628, 120629, 120630, 120631, 120632, 120633, 120634, 120635, 120636, 120637 were selected from the ORFs having the nucleotide sequence represented by SEQ ID NO: 78732.

[10133] The probes having the nucleotide sequence represented by SEQ ID NOS: 120638, 120639, 120640, 120641, 120642, 120643, 120644, 120645, 120646, 120647, 120648 were selected from the ORFs having the nucleotide sequence represented by SEQ ID NO: 78733.

[10134] The probes having the nucleotide sequence represented by SEQ ID NOS: 120649, 120650, 120651, 120652, 120653, 120654, 120655, 120656, 120657, 120658, 120659 were selected from the ORFs having the nucleotide sequence represented by SEQ ID NO: 78734.

[10135] The probes having the nucleotide sequence represented by SEQ ID NOS: 120660, 120661, 120662, 120663, 120664, 120665, 120666, 120667, 120668, 120669, 120670 were selected from the ORFs having the nucleotide sequence represented by SEQ ID NO: 78735.

[10136] The probes having the nucleotide sequence represented by SEQ ID NOS: 120671, 120672, 120673, 120674, 120675, 120676, 120677, 120678, 120679, 120680, 120681 were selected from the ORFs having the nucleotide sequence represented by SEQ ID NO: 78736.

[10137] The probes having the nucleotide sequence represented by SEQ ID NOS: 120682, 120683, 120684, 120685, 120686, 120687, 120688, 120689, 120690, 120691, 120692 were selected from the ORFs having the nucleotide sequence represented by SEQ ID NO: 78737.

[10138] The probes having the nucleotide sequence represented by SEQ ID NOS: 120693, 120694, 120695, 120696, 120697, 120698, 120699, 120700, 120701, 120702, 120703 were selected from the ORFs having the nucleotide sequence represented by SEQ ID NO: 78738.

[10139] The probes having the nucleotide sequence represented by SEQ ID NOS: 120704, 120705, 120706, 120707, 120708, 120709, 120710, 120711, 120712, 120713, 120714 were selected from the ORFs having the nucleotide sequence represented by SEQ ID NO: 78739.

[10140] The probes having the nucleotide sequence represented by SEQ ID NOS: 120715, 120716, 120717, 120718, 120719, 120720, 120721, 120722, 120723, 120724, 120725 were selected from the ORFs having the nucleotide sequence represented by SEQ ID NO: 78740.

[10141] The probes having the nucleotide sequence represented by SEQ ID NOS: 120726, 120727, 120728, 120729, 120730, 120731, 120732, 120733, 120734, 120735, 120736 were selected from the ORFs having the nucleotide sequence represented by SEQ ID NO: 78741.

[10142] The probes having the nucleotide sequence represented by SEQ ID NOS: 120737, 120738, 120739, 120740, 120741, 120742, 120743, 120744, 120745, 120746, 120747 were selected from the ORFs having the nucleotide sequence represented by SEQ ID NO: 78742.

[10143] The probes having the nucleotide sequence represented by SEQ ID NOS: 120748, 120749, 120750, 120751, 120752, 120753, 120754, 120755, 120756, 120757, 120758 were selected from the ORFs having the nucleotide sequence represented by SEQ ID NO: 78743.

[10144] The probes having the nucleotide sequence represented by SEQ ID NOS: 120759, 120760, 120761, 120762, 120763, 120764, 120765, 120766, 120767, 120768, 120769 were selected from the ORFs having the nucleotide sequence represented by SEQ ID NO: 78744.

[10145] The probes having the nucleotide sequence represented by SEQ ID NOS: 120770, 120771, 120772, 120773, 120774, 120775, 120776, 120777, 120778, 120779, 120780 were selected from the ORFs having the nucleotide sequence represented by SEQ ID NO: 78745.

[10146] The probes having the nucleotide sequence represented by SEQ ID NOS: 120781, 120782, 120783, 120784, 120785, 120786, 120787, 120788, 120789, 120790, 120791 were selected from the ORFs having the nucleotide sequence represented by SEQ ID NO: 78746.

[10147] The probes having the nucleotide sequence represented by SEQ ID NOS: 120792, 120793, 120794, 120795, 120796, 120797, 120798, 120799, 120800, 120801, 120802 were selected from the ORFs having the nucleotide sequence represented by SEQ ID NO: 78747.

[10148] The probes having the nucleotide sequence represented by SEQ ID NOS: 120803, 120804, 120805, 120806, 120807, 120808, 120809, 120810, 120811, 120812, 120813 were selected from the ORFs having the nucleotide sequence represented by SEQ ID NO: 78748.

[10149] The probes having the nucleotide sequence represented by SEQ ID NOS: 120814, 120815, 120816, 120817, 120818, 120819, 120820, 120821, 120822, 120823, 120824 were selected from the ORFs having the nucleotide sequence represented by SEQ ID NO: 78749.

[10150] The probes having the nucleotide sequence represented by SEQ ID NOS: 120825, 120826, 120827, 120828, 120829, 120830, 120831, 120832, 120833, 120834, 120835 were selected from the ORFs having the nucleotide sequence represented by SEQ ID NO: 78750.

[10151] The probes having the nucleotide sequence represented by SEQ ID NOS: 120836, 120837, 120838, 120839, 120840, 120841, 120842, 120843, 120844, 120845, 120846 were selected from the ORFs having the nucleotide sequence represented by SEQ ID NO: 78751.

[10152] The probes having the nucleotide sequence represented by SEQ ID NOS: 120847, 120848, 120849, 120850, 120851, 120852, 120853, 120854, 120855, 120856, 120857 were selected from the ORFs having the nucleotide sequence represented by SEQ ID NO: 78752.

[10153] The probes having the nucleotide sequence represented by SEQ ID NOS: 120858, 120859, 120860, 120861, 120862, 120863, 120864, 120865, 120866, 120867, 120868 were selected from the ORFs having the nucleotide sequence represented by SEQ ID NO: 78753.

[10154] The probes having the nucleotide sequence represented by SEQ ID NOS: 120869, 120870, 120871, 120872, 120873, 120874, 120875, 120876, 120877, 120878, 120879 were selected from the ORFs having the nucleotide sequence represented by SEQ ID NO: 78754.

[10155] The probes having the nucleotide sequence represented by SEQ ID NOS: 120880, 120881, 120882, 120883, 120884, 120885, 120886, 120887, 120888, 120889, 120890 were selected from the ORFs having the nucleotide sequence represented by SEQ ID NO: 78755.

[10156] The probes having the nucleotide sequence represented by SEQ ID NOS: 120891, 120892, 120893, 120894, 120895, 120896, 120897, 120898, 120899, 120900, 120901, 120902, 120903, 120904, 120905, 120906, 120907, 120908, 120909, 120910, 120911, 120912 were selected from the ORFs having the nucleotide sequence represented by SEQ ID NO: 78756.

[10157] The probes having the nucleotide sequence represented by SEQ ID NOS: 120913, 120914, 120915, 120916, 120917, 120918, 120919, 120920, 120921, 120922, 120923 were selected from the ORFs having the nucleotide sequence represented by SEQ ID NO: 78757.

[10158] The probes having the nucleotide sequence represented by SEQ ID NOS: 120924, 120925, 120926, 120927, 120928, 120929, 120930, 120931, 120932, 120933, 120934 were selected from the ORFs having the nucleotide sequence represented by SEQ ID NO: 78758.

[10159] The probes having the nucleotide sequence represented by SEQ ID NOS: 120935, 120936, 120937, 120938, 120939, 120940, 120941, 120942, 120943, 120944, 120945 were selected from the ORFs having the nucleotide sequence represented by SEQ ID NO: 78759.

[10160] The probes having the nucleotide sequence represented by SEQ ID NOS: 120946, 120947, 120948, 120949, 120950, 120951, 120952, 120953, 120954, 120955, 120956 were selected from the ORFs having the nucleotide sequence represented by SEQ ID NO: 78760.

[10161] The probes having the nucleotide sequence represented by SEQ ID NOS: 120957, 120958, 120959, 120960, 120961, 120962, 120963, 120964, 120965, 120966, 120967 were selected from the ORFs having the nucleotide sequence represented by SEQ ID NO: 78761.

[10162] The probes having the nucleotide sequence represented by SEQ ID NOS: 120968, 120969, 120970, 120971, 120972, 120973, 120974, 120975, 120976, 120977, 120978 were selected from the ORFs having the nucleotide sequence represented by SEQ ID NO: 78762.

[10163] The probes having the nucleotide sequence represented by SEQ ID NOS: 120979, 120980, 120981, 120982, 120983, 120984, 120985, 120986, 120987, 120988, 120989 were selected from the ORFs having the nucleotide sequence represented by SEQ ID NO: 78763.

[10164] The probes having the nucleotide sequence represented by SEQ ID NOS: 120990, 120991, 120992, 120993, 120994, 120995, 120996, 120997, 120998, 120999, 121000 were selected from the ORFs having the nucleotide sequence represented by SEQ ID NO: 78764.

[10165] The probes having the nucleotide sequence represented by SEQ ID NOS: 121001, 121002, 121003, 121004, 121005, 121006, 121007, 121008, 121009, 121010, 121011 were selected from the ORFs having the nucleotide sequence represented by SEQ ID NO: 78765.

[10166] The probes having the nucleotide sequence represented by SEQ ID NOS: 121012, 121013, 121014, 121015, 121016, 121017, 121018, 121019, 121020, 121021, 121022 were selected from the ORFs having the nucleotide sequence represented by SEQ ID NO: 78766.

[10167] The probes having the nucleotide sequence represented by SEQ ID NOS: 121023, 121024, 121025, 121026, 121027, 121028, 121029, 121030, 121031, 121032, 121033 were selected from the ORFs having the nucleotide sequence represented by SEQ ID NO: 78767.

[10168] The probes having the nucleotide sequence represented by SEQ ID NOS: 121034, 121035, 121036, 121037, 121038, 121039, 121040, 121041, 121042, 121043, 121044 were selected from the ORFs having the nucleotide sequence represented by SEQ ID NO: 78768.

[10169] The probes having the nucleotide sequence represented by SEQ ID NOS: 121045, 121046, 121047, 121048, 121049, 121050, 121051, 121052, 121053, 121054, 121055 were selected from the ORFs having the nucleotide sequence represented by SEQ ID NO: 78769.

[10170] The probes having the nucleotide sequence represented by SEQ ID NOS: 121056, 121057, 121058, 121059, 121060, 121061, 121062, 121063, 121064, 121065, 121066 were selected from the ORFs having the nucleotide sequence represented by SEQ ID NO: 78770.

[10171] The probes having the nucleotide sequence represented by SEQ ID NOS: 121067, 121068, 121069, 121070, 121071, 121072, 121073, 121074, 121075, 121076, 121077 were selected from the ORFs having the nucleotide sequence represented by SEQ ID NO: 78771.

[10172] The probes having the nucleotide sequence represented by SEQ ID NOS: 121078, 121079, 121080, 121081, 121082, 121083, 121084, 121085, 121086, 121087, 121088, 121089, 121090, 121091, 121092, 121093, 121094, 121095, 121096, 121097, 121098, 121099 were selected from the ORFs having the nucleotide sequence represented by SEQ ID NO: 78772.

[10173] The probes having the nucleotide sequence represented by SEQ ID NOS: 121100, 121101, 121102, 121103, 121104, 121105, 121106, 121107, 121108, 121109, 121110 were selected from the ORFs having the nucleotide sequence represented by SEQ ID NO: 78773.

[10174] The probes having the nucleotide sequence represented by SEQ ID NOS: 121111, 121112, 121113, 121114, 121115, 121116, 121117, 121118, 121119, 121120, 121121 were selected from the ORFs having the nucleotide sequence represented by SEQ ID NO: 78774.

[10175] The probes having the nucleotide sequence represented by SEQ ID NOS: 121122, 121123, 121124, 121125, 121126, 121127, 121128, 121129, 121130, 121131, 121132 were selected from the ORFs having the nucleotide sequence represented by SEQ ID NO: 78775.

[10176] The probes having the nucleotide sequence represented by SEQ ID NOS: 121133, 121134, 121135, 121136, 121137, 121138, 121139, 121140, 121141, 121142, 121143 were selected from the ORFs having the nucleotide sequence represented by SEQ ID NO: 78776.

[10177] The probes having the nucleotide sequence represented by SEQ ID NOS: 121144, 121145, 121146, 121147, 121148, 121149, 121150, 121151, 121152, 121153, 121154 were selected from the ORFs having the nucleotide sequence represented by SEQ ID NO: 78777.

[10178] The probes having the nucleotide sequence represented by SEQ ID NOS: 121155, 121156, 121157, 121158, 121159, 121160, 121161, 121162, 121163, 121164, 121165 were selected from the ORFs having the nucleotide sequence represented by SEQ ID NO: 78778.

[10179] The probes having the nucleotide sequence represented by SEQ ID NOS: 121166, 121167, 121168, 121169, 121170, 121171, 121172, 121173, 121174, 121175, 121176 were selected from the ORFs having the nucleotide sequence represented by SEQ ID NO: 78779.

[10180] The probes having the nucleotide sequence represented by SEQ ID NOS: 121177, 121178, 121179, 121180, 121181, 121182, 121183, 121184, 121185, 121186, 121187 were selected from the ORFs having the nucleotide sequence represented by SEQ ID NO: 78780.

[10181] The probes having the nucleotide sequence represented by SEQ ID NOS: 121188, 121189, 121190, 121191, 121192, 121193, 121194, 121195, 121196, 121197, 121198 were selected from the ORFs having the nucleotide sequence represented by SEQ ID NO: 78781.

[10182] The probes having the nucleotide sequence represented by SEQ ID NOS: 121199, 121200, 121201, 121202, 121203, 121204, 121205, 121206, 121207, 121208, 121209 were selected from the ORFs having the nucleotide sequence represented by SEQ ID NO: 78782.

[10183] The probes having the nucleotide sequence represented by SEQ ID NOS: 121210, 121211, 121212, 121213, 121214, 121215, 121216, 121217, 121218, 121219, 121220 were selected from the ORFs having the nucleotide sequence represented by SEQ ID NO: 78783.

[10184] The probes having the nucleotide sequence represented by SEQ ID NOS: 121221, 121222, 121223, 121224, 121225, 121226, 121227, 121228, 121229, 121230, 121231 were selected from the ORFs having the nucleotide sequence represented by SEQ ID NO: 78784.

[10185] The probes having the nucleotide sequence represented by SEQ ID NOS: 121232, 121233, 121234, 121235, 121236, 121237, 121238, 121239, 121240, 121241, 121242 were selected from the ORFs having the nucleotide sequence represented by SEQ ID NO: 78785.

[10186] The probes having the nucleotide sequence represented by SEQ ID NOS: 121243, 121244, 121245, 121246, 121247, 121248, 121249, 121250, 121251, 121252, 121253 were selected from the ORFs having the nucleotide sequence represented by SEQ ID NO: 78786.

[10187] The probes having the nucleotide sequence represented by SEQ ID NOS: 121254, 121255, 121256, 121257, 121258, 121259, 121260, 121261, 121262, 121263, 121264 were selected from the ORFs having the nucleotide sequence represented by SEQ ID NO: 78787.

[10188] The probes having the nucleotide sequence represented by SEQ ID NOS: 121265, 121266, 121267, 121268, 121269, 121270, 121271, 121272, 121273, 121274, 121275 were selected from the ORFs having the nucleotide sequence represented by SEQ ID NO: 78788.

[10189] The probes having the nucleotide sequence represented by SEQ ID NOS: 121276, 121277, 121278, 121279, 121280, 121281, 121282, 121283, 121284, 121285, 121286 were selected from the ORFs having the nucleotide sequence represented by SEQ ID NO: 78789.

[10190] The probes having the nucleotide sequence represented by SEQ ID NOS: 121287, 121288, 121289, 121290, 121291, 121292, 121293, 121294, 121295, 121296, 121297 were selected from the ORFs having the nucleotide sequence represented by SEQ ID NO: 78790.

[10191] The probes having the nucleotide sequence represented by SEQ ID NOS: 121298, 121299, 121300, 121301, 121302, 121303, 121304, 121305, 121306, 121307, 121308 were selected from the ORFs having the nucleotide sequence represented by SEQ ID NO: 78791.

[10192] The probes having the nucleotide sequence represented by SEQ ID NOS: 121309, 121310, 121311, 121312, 121313, 121314, 121315, 121316, 121317, 121318, 121319 were selected from the ORFs having the nucleotide sequence represented by SEQ ID NO: 78792.

[10193] The probes having the nucleotide sequence represented by SEQ ID NOS: 121320, 121321, 121322, 121323, 121324, 121325, 121326, 121327, 121328, 121329, 121330 were selected from the ORFs having the nucleotide sequence represented by SEQ ID NO: 78793.

[10194] The probes having the nucleotide sequence represented by SEQ ID NOS: 121331, 121332, 121333, 121334, 121335, 121336, 121337, 121338, 121339, 121340, 121341 were selected from the ORFs having the nucleotide sequence represented by SEQ ID NO: 78794.

[10195] The probes having the nucleotide sequence represented by SEQ ID NOS: 121342, 121343, 121344, 121345, 121346, 121347, 121348, 121349, 121350, 121351, 121352 were selected from the ORFs having the nucleotide sequence represented by SEQ ID NO: 78795.

[10196] The probes having the nucleotide sequence represented by SEQ ID NOS: 121353, 121354, 121355, 121356, 121357, 121358, 121359, 121360, 121361, 121362, 121363 were selected from the ORFs having the nucleotide sequence represented by SEQ ID NO: 78796.

[10197] The probes having the nucleotide sequence represented by SEQ ID NOS: 121364, 121365, 121366, 121367, 121368, 121369, 121370, 121371, 121372, 121373, 121374 were selected from the ORFs having the nucleotide sequence represented by SEQ ID NO: 78797.

[10198] The probes having the nucleotide sequence represented by SEQ ID NOS: 121375, 121376, 121377, 121378, 121379, 121380, 121381, 121382, 121383, 121384, 121385 were selected from the ORFs having the nucleotide sequence represented by SEQ ID NO: 78798.

[10199] The probes having the nucleotide sequence represented by SEQ ID NOS: 121386, 121387, 121388, 121389, 121390, 121391, 121392, 121393, 121394, 121395, 121396 were selected from he ORFs having the nucleotide sequence represented by SEQ ID NO: 78799.

[10200] The probes having the nucleotide sequence represented by SEQ ID NOS: 121397, 121398, 121399, 121400, 121401, 121402, 121403, 121404, 121405, 121406, 121407 were selected from the ORFs having the nucleotide sequence represented by SEQ ID NO: 78800.

[10201] The probes having the nucleotide sequence represented by SEQ ID NOS: 121408, 121409, 121410, 121411, 121412, 121413, 121414, 121415, 121416, 121417, 121418 were selected from the ORFs having the nucleotide sequence represented by SEQ ID NO: 78801.

[10202] The probes having the nucleotide sequence represented by SEQ ID NOS: 121419, 121420, 121421, 121422, 121423, 121424, 121425, 121426, 121427, 121428, 121429 were selected from the ORFs having the nucleotide sequence represented by SEQ ID NO: 78802.

[10203] The probes having the nucleotide sequence represented by SEQ ID NOS: 121430, 121431, 121432, 121433, 121434, 121435, 121436, 121437, 121438, 121439, 121440 were selected from the ORFs having the nucleotide sequence represented by SEQ ID NO: 78803.

[10204] The probes having the nucleotide sequence represented by SEQ ID NOS: 121441, 121442, 121443, 121444, 121445, 121446, 121447, 121448, 121449, 121450, 121451 were selected from the ORFs having the nucleotide sequence represented by SEQ ID NO: 78804.

[10205] The probes having the nucleotide sequence represented by SEQ ID NOS: 121452, 121453, 121454, 121455, 121456, 121457, 121458, 121459, 121460, 121461, 121462 were selected from the ORFs having the nucleotide sequence represented by SEQ ID NO: 78805.

[10206] The probes having the nucleotide sequence represented by SEQ ID NOS: 121463, 121464, 121465, 121466, 121467, 121468, 121469, 121470, 121471, 121472, 121473 were selected from the ORFs having the nucleotide sequence represented by SEQ ID NO: 78806.

[10207] The probes having the nucleotide sequence represented by SEQ ID NOS: 121474, 121475, 121476, 121477, 121478, 121479, 121480, 121481, 121482, 121483, 121484 were selected from the ORFs having the nucleotide sequence represented by SEQ ID NO: 78807.

[10208] The probes having the nucleotide sequence represented by SEQ ID NOS: 121485, 121486, 121487, 121488, 121489, 121490, 121491, 121492, 121493, 121494, 121495 were selected from the ORFs having the nucleotide sequence represented by SEQ ID NO: 78808.

[10209] The probes having the nucleotide sequence represented by SEQ ID NOS: 121496, 121497, 121498, 121499, 121500, 121501, 121502, 121503, 121504, 121505, 121506 were selected from the ORFs having the nucleotide sequence represented by SEQ ID NO: 78809.

[10210] The probes having the nucleotide sequence represented by SEQ ID NOS: 121507, 121508, 121509, 121510, 121511, 121512, 121513, 121514, 121515, 121516, 121517 were selected from the ORFs having the nucleotide sequence represented by SEQ ID NO: 78810.

[10211] The probes having the nucleotide sequence represented by SEQ ID NOS: 121518, 121519, 121520, 121521, 121522, 121523, 121524, 121525, 121526, 121527, 121528 were selected from the ORFs having the nucleotide sequence represented by SEQ ID NO: 78811.

[10212] The probes having the nucleotide sequence represented by SEQ ID NOS: 121529, 121530, 121531, 121532, 121533, 121534, 121535, 121536, 121537, 121538, 121539 were selected from the ORFs having the nucleotide sequence represented by SEQ ID NO: 78812.

[10213] The probes having the nucleotide sequence represented by SEQ ID NOS: 121540, 121541, 121542, 121543, 121544, 121545, 121546, 121547, 121548, 121549, 121550 were selected from the ORFs having the nucleotide sequence represented by SEQ ID NO: 78813.

[10214] The probes having the nucleotide sequence represented by SEQ ID NOS: 121551, 121552, 121553, 121554, 121555, 121556, 121557, 121558, 121559, 121560, 121561 were selected from the ORFs having the nucleotide sequence represented by SEQ ID NO: 78814.

[10215] The probes having the nucleotide sequence represented by SEQ ID NOS: 121562, 121563, 121564, 121565, 121566, 121567, 121568, 121569, 121570, 121571, 121572 were selected from the ORFs having the nucleotide sequence represented by SEQ ID NO: 78815.

[10216] The probes having the nucleotide sequence represented by SEQ ID NOS: 121573, 121574, 121575, 121576, 121577, 121578, 121579, 121580, 121581, 121582, 121583 were selected from the ORFs having the nucleotide sequence represented by SEQ ID NO: 78816.

[10217] The probes having the nucleotide sequence represented by SEQ ID NOS: 121584, 121585, 121586, 121587, 121588, 121589, 121590, 121591, 121592, 121593, 121594 were selected from the ORFs having the nucleotide sequence represented by SEQ ID NO: 78817.

[10218] The probes having the nucleotide sequence represented by SEQ ID NOS: 121595, 121596, 121597, 121598, 121599, 121600, 121601, 121602, 121603, 121604, 121605 were selected from the ORFs having the nucleotide sequence represented by SEQ ID NO: 78818.

[10219] The probes having the nucleotide sequence represented by SEQ ID NOS: 121606, 121607, 121608, 121609, 121610, 121611, 121612, 121613, 121614, 121615, 121616 were selected from the ORFs having the nucleotide sequence represented by SEQ ID NO: 78819.

[10220] The probes having the nucleotide sequence represented by SEQ ID NOS: 121617, 121618, 121619, 121620, 121621, 121622, 121623, 121624, 121625, 121626, 121627 were selected from the ORFs having the nucleotide sequence represented by SEQ ID NO: 78820.

[10221] The probes having the nucleotide sequence represented by SEQ ID NOS: 121628, 121629, 121630, 121631, 121632, 121633, 121634, 121635, 121636, 121637, 121638 were selected from the ORFs having the nucleotide sequence represented by SEQ ID NO: 78821.

[10222] The probes having the nucleotide sequence represented by SEQ ID NOS: 121639, 121640, 121641, 121642, 121643, 121644, 121645, 121646, 121647, 121648, 121649 were selected from the ORFs having the nucleotide sequence represented by SEQ ID NO: 78822.

[10223] The probes having the nucleotide sequence represented by SEQ ID NOS: 121650, 121651, 121652, 121653, 121654, 121655, 121656, 121657, 121658, 121659, 121660 were selected from the ORFs having the nucleotide sequence represented by SEQ ID NO: 78823.

[10224] The probes having the nucleotide sequence represented by SEQ ID NOS: 121661, 121662, 121663, 121664, 121665, 121666, 121667, 121668, 121669, 121670, 121671 were selected from the ORFs having the nucleotide sequence represented by SEQ ID NO: 78824.

[10225] The probes having the nucleotide sequence represented by SEQ ID NOS: 121672, 121673, 121674, 121675, 121676, 121677, 121678, 121679, 121680, 121681, 121682 were selected from the ORFs having the nucleotide sequence represented by SEQ ID NO: 78825.

[10226] The probes having the nucleotide sequence represented by SEQ ID NOS: 121683, 121684, 121685, 121686, 121687, 121688, 121689, 121690, 121691, 121692, 121693 were selected from the ORFs having the nucleotide sequence represented by SEQ ID NO: 78826.

[10227] The probes having the nucleotide sequence represented by SEQ ID NOS: 121694, 121695, 121696, 121697, 121698, 121699, 121700, 121701, 121702, 121703, 121704 were selected from the ORFs having the nucleotide sequence represented by SEQ ID NO: 78827.

[10228] The probes having the nucleotide sequence represented by SEQ ID NOS: 121705, 121706, 121707, 121708, 121709, 121710, 121711, 121712, 121713, 121714, 121715 were selected from the ORFs having the nucleotide sequence represented by SEQ ID NO: 78828.

[10229] The probes having the nucleotide sequence represented by SEQ ID NOS: 121716, 121717, 121718, 121719, 121720, 121721, 121722, 121723, 121724, 121725, 121726 were selected from the ORFs having the nucleotide sequence represented by SEQ ID NO: 78829.

[10230] The probes having the nucleotide sequence represented by SEQ ID NOS: 121727, 121728, 121729, 121730, 121731, 121732, 121733, 121734, 121735, 121736, 121737 were selected from the ORFs having the nucleotide sequence represented by SEQ ID NO: 78830.

[10231] The probes having the nucleotide sequence represented by SEQ ID NOS: 121738, 121739, 121740, 121741, 121742, 121743, 121744, 121745, 121746, 121747, 121748 were selected from the ORFs having the nucleotide sequence represented by SEQ ID NO: 78831.

[10232] The probes having the nucleotide sequence represented by SEQ ID NOS: 121749, 121750, 121751, 121752, 121753, 121754, 121755, 121756, 121757, 121758, 121759 were selected from the ORFs having the nucleotide sequence represented by SEQ ID NO: 78832.

[10233] The probes having the nucleotide sequence represented by SEQ ID NOS: 121760, 121761, 121762, 121763, 121764, 121765, 121766, 121767, 121768, 121769, 121770 were selected from the ORFs having the nucleotide sequence represented by SEQ ID NO: 78833.

[10234] The probes having the nucleotide sequence represented by SEQ ID NOS: 121771, 121772, 121773, 121774, 121775, 121776, 121777, 121778, 121779, 121780, 121781 were selected from the ORFs having the nucleotide sequence represented by SEQ ID NO: 78834.

[10235] The probes having the nucleotide sequence represented by SEQ ID NOS: 121782, 121783, 121784, 121785, 121786, 121787, 121788, 121789, 121790, 121791, 121792 were selected from the ORFs having the nucleotide sequence represented by SEQ ID NO: 78835.

[10236] The probes having the nucleotide sequence represented by SEQ ID NOS: 121793, 121794, 121795, 121796, 121797, 121798, 121799, 121800, 121801, 121802, 121803 were selected from the ORFs having the nucleotide sequence represented by SEQ ID NO: 78836.

[10237] The probes having the nucleotide sequence represented by SEQ ID NOS: 121804, 121805, 121806, 121807, 121808, 121809, 121810, 121811, 121812, 121813, 121814 were selected from the ORFs having the nucleotide sequence represented by SEQ ID NO: 78837.

[10238] The probes having the nucleotide sequence represented by SEQ ID NOS: 121815, 121816, 121817, 121818, 121819, 121820, 121821, 121822, 121823, 121824, 121825 were selected from the ORFs having the nucleotide sequence represented by SEQ ID NO: 78838.

[10239] The probes having the nucleotide sequence represented by SEQ ID NOS: 121826, 121827, 121828, 121829, 121830, 121831, 121832, 121833, 121834, 121835, 121836, 121837, 121838, 121839, 121840, 121841, 121842, 121843, 121844, 121845, 121846, 121847 were selected from the ORFs having the nucleotide sequence represented by SEQ ID NO: 78839.

[10240] The probes having the nucleotide sequence represented by SEQ ID NOS: 121848, 121849, 121850, 121851, 121852, 121853, 121854, 121855, 121856, 121857, 121858 were selected from the ORFs having the nucleotide sequence represented by SEQ ID NO: 78840.

[10241] The probes having the nucleotide sequence represented by SEQ ID NOS: 121859, 121860, 121861, 121862, 121863, 121864, 121865, 121866, 121867, 121868, 121869 were selected from the ORFs having the nucleotide sequence represented by SEQ ID NO: 78841.

[10242] The probes having the nucleotide sequence represented by SEQ ID NOS: 121870, 121871, 121872, 121873, 121874, 121875, 121876, 121877, 121878, 121879, 121880 were selected from the ORFs having the nucleotide sequence represented by SEQ ID NO: 78842.

[10243] The probes having the nucleotide sequence represented by SEQ ID NOS: 121881, 121882, 121883, 121884, 121885, 121886, 121887, 121888, 121889, 121890, 121891 were selected from the ORFs having the nucleotide sequence represented by SEQ ID NO: 78843.

[10244] The probes having the nucleotide sequence represented by SEQ ID NOS: 121892, 121893, 121894, 121895, 121896, 121897, 121898, 121899, 121900, 121901, 121902 were selected from the ORFs having the nucleotide sequence represented by SEQ ID NO: 78844.

[10245] The probes having the nucleotide sequence represented by SEQ ID NOS: 121903, 121904, 121905, 121906, 121907, 121908, 121909, 121910, 121911, 121912, 121913 were selected from the ORFs having the nucleotide sequence represented by SEQ ID NO: 78845.

[10246] The probes having the nucleotide sequence represented by SEQ ID NOS: 121914, 121915, 121916, 121917, 121918, 121919, 121920, 121921, 121922, 121923, 121924 were selected from the ORFs having the nucleotide sequence represented by SEQ ID NO: 78846.

[10247] The probes having the nucleotide sequence represented by SEQ ID NOS: 121925, 121926, 121927, 121928, 121929, 121930, 121931, 121932, 121933, 121934, 121935 were selected from the ORFs having the nucleotide sequence represented by SEQ ID NO: 78847.

[10248] The probes having the nucleotide sequence represented by SEQ ID NOS: 121936, 121937, 121938, 121939, 121940, 121941, 121942, 121943, 121944, 121945, 121946 were selected from the ORFs having the nucleotide sequence represented by SEQ ID NO: 78848.

[10249] The probes having the nucleotide sequence represented by SEQ ID NOS: 121947, 121948, 121949, 121950, 121951, 121952, 121953, 121954, 121955, 121956, 121957 were selected from the ORFs having the nucleotide sequence represented by SEQ ID NO: 78849.

[10250] The probes having the nucleotide sequence represented by SEQ ID NOS: 121958, 121959, 121960, 121961, 121962, 121963, 121964, 121965, 121966, 121967, 121968 were selected from the ORFs having the nucleotide sequence represented by SEQ ID NO: 78850.

[10251] The probes having the nucleotide sequence represented by SEQ ID NOS: 121969, 121970, 121971, 121972, 121973, 121974, 121975, 121976, 121977, 121978, 121979 were selected from the ORFs having the nucleotide sequence represented by SEQ ID NO: 78851.

[10252] The probes having the nucleotide sequence represented by SEQ ID NOS: 121980, 121981, 121982, 121983, 121984, 121985, 121986, 121987, 121988, 121989, 121990 were selected from the ORFs having the nucleotide sequence represented by SEQ ID NO: 78852.

[10253] The probes having the nucleotide sequence represented by SEQ ID NOS: 121991, 121992, 121993, 121994, 121995, 121996, 121997, 121998, 121999, 122000, 122001 were selected from the ORFs having the nucleotide sequence represented by SEQ ID NO: 78853.

[10254] The probes having the nucleotide sequence represented by SEQ ID NOS: 122002, 122003, 122004, 122005, 122006, 122007, 122008, 122009, 122010, 122011, 122012 were selected from the ORFs having the nucleotide sequence represented by SEQ ID NO: 78854.

[10255] The probes having the nucleotide sequence represented by SEQ ID NOS: 122013, 122014, 122015, 122016, 122017, 122018, 122019, 122020, 122021, 122022, 122023 were selected from the ORFs having the nucleotide sequence represented by SEQ ID NO: 78855.

[10256] The probes having the nucleotide sequence represented by SEQ ID NOS: 122024, 122025, 122026, 122027, 122028, 122029, 122030, 122031, 122032, 122033, 122034 were selected from the ORFs having the nucleotide sequence represented by SEQ ID NO: 78856.

[10257] The probes having the nucleotide sequence represented by SEQ ID NOS: 122035, 122036, 122037, 122038, 122039, 122040, 122041, 122042, 122043, 122044, 122045 were selected from the ORFs having the nucleotide sequence represented by SEQ ID NO: 78857.

[10258] The probes having the nucleotide sequence represented by SEQ ID NOS: 122046, 122047, 122048, 122049, 122050, 122051, 122052, 122053, 122054, 122055, 122056 were selected from the ORFs having the nucleotide sequence represented by SEQ ID NO: 78858.

[10259] The probes having the nucleotide sequence represented by SEQ ID NOS: 122057, 122058, 122059, 122060, 122061, 122062, 122063, 122064, 122065, 122066, 122067 were selected from the ORFs having the nucleotide sequence represented by SEQ ID NO: 78859.

[10260] The probes having the nucleotide sequence represented by SEQ ID NOS: 122068, 122069, 122070, 122071, 122072, 122073, 122074, 122075, 122076, 122077, 122078 were selected from the ORFs having the nucleotide sequence represented by SEQ ID NO: 78860.

[10261] The probes having the nucleotide sequence represented by SEQ ID NOS: 122079, 122080, 122081, 122082, 122083, 122084, 122085, 122086, 122087, 122088, 122089 were selected from the ORFs having the nucleotide sequence represented by SEQ ID NO: 78861.

[10262] The probes having the nucleotide sequence represented by SEQ ID NOS: 122090, 122091, 122092, 122093, 122094, 122095, 122096, 122097, 122098, 122099, 122100 were selected from the ORFs having the nucleotide sequence represented by SEQ ID NO: 78862.

[10263] The probes having the nucleotide sequence represented by SEQ ID NOS: 122101, 122102, 122103, 122104, 122105, 122106, 122107, 122108, 122109, 122110, 122111 were selected from the ORFs having the nucleotide sequence represented by SEQ ID NO: 78863.

[10264] The probes having the nucleotide sequence represented by SEQ ID NOS: 122112, 122113, 122114, 122115, 122116, 122117, 122118, 122119, 122120, 122121, 122122 were selected from the ORFs having the nucleotide sequence represented by SEQ ID NO: 78864.

[10265] The probes having the nucleotide sequence represented by SEQ ID NOS: 122123, 122124, 122125, 122126, 122127, 122128, 122129, 122130, 122131, 122132, 122133 were selected from the ORFs having the nucleotide sequence represented by SEQ ID NO: 78865.

[10266] The probes having the nucleotide sequence represented by SEQ ID NOS: 122134, 122135, 122136, 122137, 122138, 122139, 122140, 122141, 122142, 122143, 122144 were selected from the ORFs having the nucleotide sequence represented by SEQ ID NO: 78866.

[10267] The probes having the nucleotide sequence represented by SEQ ID NOS: 122145, 122146, 122147, 122148, 122149, 122150, 122151, 122152, 122153, 122154, 122155 were selected from the ORFs having the nucleotide sequence represented by SEQ ID NO: 78867.

[10268] The probes having the nucleotide sequence represented by SEQ ID NOS: 122156, 122157, 122158, 122159, 122160, 122161, 122162, 122163, 122164, 122165, 122166 were selected from the ORFs having the nucleotide sequence represented by SEQ ID NO: 78868.

[10269] The probes having the nucleotide sequence represented by SEQ ID NOS: 122167, 122168, 122169, 122170, 122171, 122172, 122173, 122174, 122175, 122176, 122177 were selected from the ORFs having the nucleotide sequence represented by SEQ ID NO: 78869.

[10270] The probes having the nucleotide sequence represented by SEQ ID NOS: 122178, 122179, 122180, 122181, 122182, 122183, 122184, 122185, 122186, 122187, 122188 were selected from the ORFs having the nucleotide sequence represented by SEQ ID NO: 78870.

[10271] The probes having the nucleotide sequence represented by SEQ ID NOS: 122189, 122190, 122191, 122192, 122193, 122194, 122195, 122196, 122197, 122198, 122199 were selected from the ORFs having the nucleotide sequence represented by SEQ ID NO: 78871.

[10272] The probes having the nucleotide sequence represented by SEQ ID NOS: 122200, 122201, 122202, 122203, 122204, 122205, 122206, 122207, 122208, 122209, 122210 were selected from the ORFs having the nucleotide sequence represented by SEQ ID NO: 78872.

[10273] The probes having the nucleotide sequence represented by SEQ ID NOS: 122211, 122212, 122213, 122214, 122215, 122216, 122217, 122218, 122219, 122220, 122221 were selected from the ORFs having the nucleotide sequence represented by SEQ ID NO: 78873.

[10274] The probes having the nucleotide sequence represented by SEQ ID NOS: 122222, 122223, 122224, 122225, 122226, 122227, 122228, 122229, 122230, 122231, 122232 were selected from the ORFs having the nucleotide sequence represented by SEQ ID NO: 78874.

[10275] The probes having the nucleotide sequence represented by SEQ ID NOS: 122233, 122234, 122235, 122236, 122237, 122238, 122239, 122240, 122241, 122242, 122243 were selected from the ORFs having the nucleotide sequence represented by SEQ ID NO: 78875.

[10276] The probes having the nucleotide sequence represented by SEQ ID NOS: 122244, 122245, 122246, 122247, 122248, 122249, 122250, 122251, 122252, 122253, 122254 were selected from the ORFs having the nucleotide sequence represented by SEQ ID NO: 78876.

[10277] The probes having the nucleotide sequence represented by SEQ ID NOS: 122255, 122256, 122257, 122258, 122259, 122260, 122261, 122262, 122263, 122264, 122265 were selected from the ORFs having the nucleotide sequence represented by SEQ ID NO: 78877.

[10278] The probes having the nucleotide sequence represented by SEQ ID NOS: 122266, 122267, 122268, 122269, 122270, 122271, 122272, 122273, 122274, 122275, 122276 were selected from the ORFs having the nucleotide sequence represented by SEQ ID NO: 78878.

[10279] The probes having the nucleotide sequence represented by SEQ ID NOS: 122277, 122278, 122279, 122280, 122281, 122282, 122283, 122284, 122285, 122286, 122287 were selected from the ORFs having the nucleotide sequence represented by SEQ ID NO: 78879.

[10280] The probes having the nucleotide sequence represented by SEQ ID NOS: 122288, 122289, 122290, 122291, 122292, 122293, 122294, 122295, 122296, 122297, 122298 were selected from the ORFs having the nucleotide sequence represented by SEQ ID NO: 78880.

[10281] The probes having the nucleotide sequence represented by SEQ ID NOS: 122299, 122300, 122301, 122302, 122303, 122304, 122305, 122306, 122307, 122308, 122309 were selected from the ORFs having the nucleotide sequence represented by SEQ ID NO: 78881.

[10282] The probes having the nucleotide sequence represented by SEQ ID NOS: 122310, 122311, 122312, 122313, 122314, 122315, 122316, 122317, 122318, 122319, 122320 were selected from the ORFs having the nucleotide sequence represented by SEQ ID NO: 78882.

[10283] The probes having the nucleotide sequence represented by SEQ ID NOS: 122321, 122322, 122323, 122324, 122325, 122326, 122327, 122328, 122329, 122330, 122331 were selected from the ORFs having the nucleotide sequence represented by SEQ ID NO: 78883.

[10284] The probes having the nucleotide sequence represented by SEQ ID NOS: 122332, 122333, 122334, 122335, 122336, 122337, 122338, 122339, 122340, 122341, 122342 were selected from the ORFs having the nucleotide sequence represented by SEQ ID NO: 78884.

[10285] The probes having the nucleotide sequence represented by SEQ ID NOS: 122343, 122344, 122345, 122346, 122347, 122348, 122349, 122350, 122351, 122352, 122353 were selected from the ORFs having the nucleotide sequence represented by SEQ ID NO: 78885.

[10286] The probes having the nucleotide sequence represented by SEQ ID NOS: 122354, 122355, 122356, 122357, 122358, 122359, 122360, 122361, 122362, 122363, 122364 were selected from the ORFs having the nucleotide sequence represented by SEQ ID NO: 78886.

[10287] The probes having the nucleotide sequence represented by SEQ ID NOS: 122365, 122366, 122367, 122368, 122369, 122370, 122371, 122372, 122373, 122374, 122375 were selected from the ORFs having the nucleotide sequence represented by SEQ ID NO: 78887.

[10288] The probes having the nucleotide sequence represented by SEQ ID NOS: 122376, 122377, 122378, 122379, 122380, 122381, 122382, 122383, 122384, 122385, 122386 were selected from the ORFs having the nucleotide sequence represented by SEQ ID NO: 78888.

[10289] The probes having the nucleotide sequence represented by SEQ ID NOS: 122387, 122388, 122389, 122390, 122391, 122392, 122393, 122394, 122395, 122396, 122397 were selected from the ORFs having the nucleotide sequence represented by SEQ ID NO: 78889.

[10290] The probes having the nucleotide sequence represented by SEQ ID NOS: 122398, 122399, 122400, 122401, 122402, 122403, 122404, 122405, 122406, 122407, 122408 were selected from the ORFs having the nucleotide sequence represented by SEQ ID NO: 78890.

[10291] The probes having the nucleotide sequence represented by SEQ ID NOS: 122409, 122410, 122411, 122412, 122413, 122414, 122415, 122416, 122417, 122418, 122419 were selected from the ORFs having the nucleotide sequence represented by SEQ ID NO: 78891.

[10292] The probes having the nucleotide sequence represented by SEQ ID NOS: 122420, 122421, 122422, 122423, 122424, 122425, 122426, 122427, 122428, 122429, 122430 were selected from the ORFs having the nucleotide sequence represented by SEQ ID NO: 78892.

[10293] The probes having the nucleotide sequence represented by SEQ ID NOS: 122431, 122432, 122433, 122434, 122435, 122436, 122437, 122438, 122439, 122440, 122441 were selected from the ORFs having the nucleotide sequence represented by SEQ ID NO: 78893.

[10294] The probes having the nucleotide sequence represented by SEQ ID NOS: 122442, 122443, 122444, 122445, 122446, 122447, 122448, 122449, 122450, 122451, 122452 were selected from the ORFs having the nucleotide sequence represented by SEQ ID NO: 78894.

[10295] The probes having the nucleotide sequence represented by SEQ ID NOS: 122453, 122454, 122455, 122456, 122457, 122458, 122459, 122460, 122461, 122462, 122463 were selected from the ORFs having the nucleotide sequence represented by SEQ ID NO: 78895.

[10296] The probes having the nucleotide sequence represented by SEQ ID NOS: 122464, 122465, 122466, 122467, 122468, 122469, 122470, 122471, 122472, 122473, 122474 were selected from the ORFs having the nucleotide sequence represented by SEQ ID NO: 78896.

[10297] The probes having the nucleotide sequence represented by SEQ ID NOS: 122475, 122476, 122477, 122478, 122479, 122480, 122481, 122482, 122483, 122484, 122485 were selected from the ORFs having the nucleotide sequence represented by SEQ ID NO: 78897.

[10298] The probes having the nucleotide sequence represented by SEQ ID NOS: 122486, 122487, 122488, 122489, 122490, 122491, 122492, 122493, 122494, 122495, 122496 were selected from the ORFs having the nucleotide sequence represented by SEQ ID NO: 78898.

[10299] The probes having the nucleotide sequence represented by SEQ ID NOS: 122497, 122498, 122499, 122500, 122501, 122502, 122503, 122504, 122505, 122506, 122507 were selected from the ORFs having the nucleotide sequence represented by SEQ ID NO: 78899.

[10300] The probes having the nucleotide sequence represented by SEQ ID NOS: 122508, 122509, 122510, 122511, 122512, 122513, 122514, 122515, 122516, 122517, 122518 were selected from the ORFs having the nucleotide sequence represented by SEQ ID NO: 78900.

[10301] The probes having the nucleotide sequence represented by SEQ ID NOS: 122519, 122520, 122521, 122522, 122523, 122524, 122525, 122526, 122527, 122528, 122529 were selected from the ORFs having the nucleotide sequence represented by SEQ ID NO: 78901.

[10302] The probes having the nucleotide sequence represented by SEQ ID NOS: 122530, 122531, 122532, 122533, 122534, 122535, 122536, 122537, 122538, 122539, 122540 were selected from the ORFs having the nucleotide sequence represented by SEQ ID NO: 78902.

[10303] The probes having the nucleotide sequence represented by SEQ ID NOS: 122541, 122542, 122543, 122544, 122545, 122546, 122547, 122548, 122549, 122550, 122551 were selected from the ORFs having the nucleotide sequence represented by SEQ ID NO: 78903.

[10304] The probes having the nucleotide sequence represented by SEQ ID NOS: 122552, 122553, 122554, 122555, 122556, 122557, 122558, 122559, 122560, 122561, 122562 were selected from the ORFs having the nucleotide sequence represented by SEQ ID NO: 78904.

[10305] The probes having the nucleotide sequence represented by SEQ ID NOS: 122563, 122564, 122565, 122566, 122567, 122568, 122569, 122570, 122571, 122572, 122573 were selected from the ORFs having the nucleotide sequence represented by SEQ ID NO: 78905.

[10306] The probes having the nucleotide sequence represented by SEQ ID NOS: 122574, 122575, 122576, 122577, 122578, 122579, 122580, 122581, 122582, 122583, 122584 were selected from the ORFs having the nucleotide sequence represented by SEQ ID NO: 78906.

[10307] The probes having the nucleotide sequence represented by SEQ ID NOS: 122585, 122586, 122587, 122588, 122589, 122590, 122591, 122592, 122593, 122594, 122595 were selected from the ORFs having the nucleotide sequence represented by SEQ ID NO: 78907.

[10308] The probes having the nucleotide sequence represented by SEQ ID NOS: 122596, 122597, 122598, 122599, 122600, 122601, 122602, 122603, 122604, 122605, 122606 were selected from the ORFs having the nucleotide sequence represented by SEQ ID NO: 78908.

[10309] The probes having the nucleotide sequence represented by SEQ ID NOS: 122607, 122608, 122609, 122610, 122611, 122612, 122613, 122614, 122615, 122616, 122617 were selected from the ORFs having the nucleotide sequence represented by SEQ ID NO: 78909.

[10310] The probes having the nucleotide sequence represented by SEQ ID NOS: 122618, 122619, 122620, 122621, 122622, 122623, 122624, 122625, 122626, 122627, 122628 were selected from the ORFs having the nucleotide sequence represented by SEQ ID NO: 78910.

[10311] The probes having the nucleotide sequence represented by SEQ ID NOS: 122629, 122630, 122631, 122632, 122633, 122634, 122635, 122636, 122637, 122638, 122639 were selected from the ORFs having the nucleotide sequence represented by SEQ ID NO: 78911.

[10312] The probes having the nucleotide sequence represented by SEQ ID NOS: 122640, 122641, 122642, 122643, 122644, 122645, 122646, 122647, 122648, 122649, 122650 were selected from the ORFs having the nucleotide sequence represented by SEQ ID NO: 78912.

[10313] The probes having the nucleotide sequence represented by SEQ ID NOS: 122651, 122652, 122653, 122654, 122655, 122656, 122657, 122658, 122659, 122660, 122661 were selected from the ORFs having the nucleotide sequence represented by SEQ ID NO: 78913.

[10314] The probes having the nucleotide sequence represented by SEQ ID NOS: 122662, 122663, 122664, 122665, 122666, 122667, 122668, 122669, 122670, 122671, 122672 were selected from the ORFs having the nucleotide sequence represented by SEQ ID NO: 78914.

[10315] The probes having the nucleotide sequence represented by SEQ ID NOS: 122673, 122674, 122675, 122676, 122677, 122678, 122679, 122680, 122681, 122682, 122683 were selected from the ORFs having the nucleotide sequence represented by SEQ ID NO: 78915.

[10316] The probes having the nucleotide sequence represented by SEQ ID NOS: 122684, 122685, 122686, 122687, 122688, 122689, 122690, 122691, 122692, 122693, 122694 were selected from the ORFs having the nucleotide sequence represented by SEQ ID NO: 78916.

[10317] The probes having the nucleotide sequence represented by SEQ ID NOS: 122695, 122696, 122697, 122698, 122699, 122700, 122701, 122702, 122703, 122704, 122705 were selected from the ORFs having the nucleotide sequence represented by SEQ ID NO: 78917.

[10318] The probes having the nucleotide sequence represented by SEQ ID NOS: 122706, 122707, 122708, 122709, 122710, 122711, 122712, 122713, 122714, 122715, 122716 were selected from the ORFs having the nucleotide sequence represented by SEQ ID NO: 78918.

[10319] The probes having the nucleotide sequence represented by SEQ ID NOS: 122717, 122718, 122719, 122720, 122721, 122722, 122723, 122724, 122725, 122726, 122727 were selected from the ORFs having the nucleotide sequence represented by SEQ ID NO: 78919.

[10320] The probes having the nucleotide sequence represented by SEQ ID NOS: 122728, 122729, 122730, 122731, 122732, 122733, 122734, 122735, 122736, 122737, 122738 were selected from the ORFs having the nucleotide sequence represented by SEQ ID NO: 78920.

[10321] The probes having the nucleotide sequence represented by SEQ ID NOS: 122739, 122740, 122741, 122742, 122743, 122744, 122745, 122746, 122747, 122748, 122749 were selected from the ORFs having the nucleotide sequence represented by SEQ ID NO: 78921.

[10322] The probes having the nucleotide sequence represented by SEQ ID NOS: 122750, 122751, 122752, 122753, 122754, 122755, 122756, 122757, 122758, 122759, 122760 were selected from the ORFs having the nucleotide sequence represented by SEQ ID NO: 78922.

[10323] The probes having the nucleotide sequence represented by SEQ ID NOS: 122761, 122762, 122763, 122764, 122765, 122766, 122767, 122768, 122769, 122770, 122771 were selected from the ORFs having the nucleotide sequence represented by SEQ ID NO: 78923.

[10324] The probes having the nucleotide sequence represented by SEQ ID NOS: 122772, 122773, 122774, 122775, 122776, 122777, 122778, 122779, 122780, 122781, 122782 were selected from the ORFs having the nucleotide sequence represented by SEQ ID NO: 78924.

[10325] The probes having the nucleotide sequence represented by SEQ ID NOS: 122783, 122784, 122785, 122786, 122787, 122788, 122789, 122790, 122791, 122792, 122793 were selected from the ORFs having the nucleotide sequence represented by SEQ ID NO: 78925.

[10326] The probes having the nucleotide sequence represented by SEQ ID NOS: 122794, 122795, 122796, 122797, 122798, 122799, 122800, 122801, 122802, 122803, 122804 were selected from the ORFs having the nucleotide sequence represented by SEQ ID NO: 78926.

[10327] The probes having the nucleotide sequence represented by SEQ ID NOS: 122805, 122806, 122807, 122808, 122809, 122810, 122811, 122812, 122813, 122814, 122815 were selected from the ORFs having the nucleotide sequence represented by SEQ ID NO: 78927.

[10328] The probes having the nucleotide sequence represented by SEQ ID NOS: 122816, 122817, 122818, 122819, 122820, 122821, 122822, 122823, 122824, 122825, 122826 were selected from the ORFs having the nucleotide sequence represented by SEQ ID NO: 78928.

[10329] The probes having the nucleotide sequence represented by SEQ ID NOS: 122827, 122828, 122829, 122830, 122831, 122832, 122833, 122834, 122835, 122836, 122837 were selected from the ORFs having the nucleotide sequence represented by SEQ ID NO: 78929.

[10330] The probes having the nucleotide sequence represented by SEQ ID NOS: 122838, 122839, 122840, 122841, 122842, 122843, 122844, 122845, 122846, 122847, 122848 were selected from the ORFs having the nucleotide sequence represented by SEQ ID NO: 78930.

[10331] The probes having the nucleotide sequence represented by SEQ ID NOS: 122849, 122850, 122851, 122852, 122853, 122854, 122855, 122856, 122857, 122858, 122859 were selected from the ORFs having the nucleotide sequence represented by SEQ ID NO: 78931.

[10332] The probes having the nucleotide sequence represented by SEQ ID NOS: 122860, 122861, 122862, 122863, 122864, 122865, 122866, 122867, 122868, 122869, 122870 were selected from the ORFs having the nucleotide sequence represented by SEQ ID NO: 78932.

[10333] The probes having the nucleotide sequence represented by SEQ ID NOS: 122871, 122872, 122873, 122874, 122875, 122876, 122877, 122878, 122879, 122880, 122881 were selected from the ORFs having the nucleotide sequence represented by SEQ ID NO: 78933.

[10334] The probes having the nucleotide sequence represented by SEQ ID NOS: 122882, 122883, 122884, 122885, 122886, 122887, 122888, 122889, 122890, 122891, 122892 were selected from the ORFs having the nucleotide sequence represented by SEQ ID NO: 78934.

[10335] The probes having the nucleotide sequence represented by SEQ ID NOS: 122893, 122894, 122895, 122896, 122897, 122898, 122899, 122900, 122901, 122902, 122903 were selected from the ORFs having the nucleotide sequence represented by SEQ ID NO: 78935.

[10336] The probes having the nucleotide sequence represented by SEQ ID NOS: 122904, 122905, 122906, 122907, 122908, 122909, 122910, 122911, 122912, 122913, 122914 were selected from the ORFs having the nucleotide sequence represented by SEQ ID NO: 78936.

[10337] The probes having the nucleotide sequence represented by SEQ ID NOS: 122915, 122916, 122917, 122918, 122919, 122920, 122921, 122922, 122923, 122924, 122925 were selected from the ORFs having the nucleotide sequence represented by SEQ ID NO: 78937.

[10338] The probes having the nucleotide sequence represented by SEQ ID NOS: 122926, 122927, 122928, 122929, 122930, 122931, 122932, 122933, 122934, 122935, 122936 were selected from the ORFs having the nucleotide sequence represented by SEQ ID NO: 78938.

[10339] The probes having the nucleotide sequence represented by SEQ ID NOS: 122937, 122938, 122939, 122940, 122941, 122942, 122943, 122944, 122945, 122946, 122947 were selected from the ORFs having the nucleotide sequence represented by SEQ ID NO: 78939.

[10340] The probes having the nucleotide sequence represented by SEQ ID NOS: 122948, 122949, 122950, 122951, 122952, 122953, 122954, 122955, 122956, 122957, 122958 were selected from the ORFs having the nucleotide sequence represented by SEQ ID NO: 78940.

[10341] The probes having the nucleotide sequence represented by SEQ ID NOS: 122959, 122960, 122961, 122962, 122963, 122964, 122965, 122966, 122967, 122968, 122969 were selected from the ORFs having the nucleotide sequence represented by SEQ ID NO: 78941.

[10342] The probes having the nucleotide sequence represented by SEQ ID NOS: 122970, 122971, 122972, 122973, 122974, 122975, 122976, 122977, 122978, 122979, 122980 were selected from the ORFs having the nucleotide sequence represented by SEQ ID NO: 78942.

[10343] The probes having the nucleotide sequence represented by SEQ ID NOS: 122981, 122982, 122983, 122984, 122985, 122986, 122987, 122988, 122989, 122990, 122991 were selected from the ORFs having the nucleotide sequence represented by SEQ ID NO: 78943.

[10344] The probes having the nucleotide sequence represented by SEQ ID NOS: 122992, 122993, 122994, 122995, 122996, 122997, 122998, 122999, 123000, 123001, 123002 were selected from the ORFs having the nucleotide sequence represented by SEQ ID NO: 78944.

[10345] The probes having the nucleotide sequence represented by SEQ ID NOS: 123003, 123004, 123005, 123006, 123007, 123008, 123009, 123010, 123011, 123012, 123013 were selected from the ORFs having the nucleotide sequence represented by SEQ ID NO: 78945.

[10346] The probes having the nucleotide sequence represented by SEQ ID NOS: 123014, 123015, 123016, 123017, 123018, 123019, 123020, 123021, 123022, 123023, 123024 were selected from the ORFs having the nucleotide sequence represented by SEQ ID NO: 78946.

[10347] The probes having the nucleotide sequence represented by SEQ ID NOS: 123025, 123026, 123027, 123028, 123029, 123030, 123031, 123032, 123033, 123034, 123035 were selected from the ORFs having the nucleotide sequence represented by SEQ ID NO: 78947.

[10348] The probes having the nucleotide sequence represented by SEQ ID NOS: 123036, 123037, 123038, 123039, 123040, 123041, 123042, 123043, 123044, 123045, 123046 were selected from the ORFs having the nucleotide sequence represented by SEQ ID NO: 78948.

[10349] The probes having the nucleotide sequence represented by SEQ ID NOS: 123047, 123048, 123049, 123050, 123051, 123052, 123053, 123054, 123055, 123056, 123057 were selected from the ORFs having the nucleotide sequence represented by SEQ ID NO: 78949.

[10350] The probes having the nucleotide sequence represented by SEQ ID NOS: 123058, 123059, 123060, 123061, 123062, 123063, 123064, 123065, 123066, 123067, 123068 were selected from the ORFs having the nucleotide sequence represented by SEQ ID NO: 78950.

[10351] The probes having the nucleotide sequence represented by SEQ ID NOS: 123069, 123070, 123071, 123072, 123073, 123074, 123075, 123076, 123077, 123078, 123079 were selected from the ORFs having the nucleotide sequence represented by SEQ ID NO: 78951.

[10352] The probes having the nucleotide sequence represented by SEQ ID NOS: 123080, 123081, 123082, 123083, 123084, 123085, 123086, 123087, 123088, 123089, 123090 were selected from the ORFs having the nucleotide sequence represented by SEQ ID NO: 78952.

[10353] The probes having the nucleotide sequence represented by SEQ ID NOS: 123091, 123092, 123093, 123094, 123095, 123096, 123097, 123098, 123099, 123100, 123101 were selected from the ORFs having the nucleotide sequence represented by SEQ ID NO: 78953.

[10354] The probes having the nucleotide sequence represented by SEQ ID NOS: 123102, 123103, 123104, 123105, 123106, 123107, 123108, 123109, 123110, 123111, 123112 were selected from the ORFs having the nucleotide sequence represented by SEQ ID NO: 78954.

[10355] The probes having the nucleotide sequence represented by SEQ ID NOS: 123113, 123114, 123115, 123116, 123117, 123118, 123119, 123120, 123121, 123122, 123123 were selected from the ORFs having the nucleotide sequence represented by SEQ ID NO: 78955.

[10356] The probes having the nucleotide sequence represented by SEQ ID NOS: 123124, 123125, 123126, 123127, 123128, 123129, 123130, 123131, 123132, 123133, 123134 were selected from the ORFs having the nucleotide sequence represented by SEQ ID NO: 78956.

[10357] The probes having the nucleotide sequence represented by SEQ ID NOS: 123135, 123136, 123137, 123138, 123139, 123140, 123141, 123142, 123143, 123144, 123145 were selected from the ORFs having the nucleotide sequence represented by SEQ ID NO: 78957.

[10358] The probes having the nucleotide sequence represented by SEQ ID NOS: 123146, 123147, 123148, 123149, 123150, 123151, 123152, 123153, 123154, 123155, 123156 were selected from the ORFs having the nucleotide sequence represented by SEQ ID NO: 78958.

[10359] The probes having the nucleotide sequence represented by SEQ ID NOS: 123157, 123158, 123159, 123160, 123161, 123162, 123163, 123164, 123165, 123166, 123167 were selected from the ORFs having the nucleotide sequence represented by SEQ ID NO: 78959.

[10360] The probes having the nucleotide sequence represented by SEQ ID NOS: 123168, 123169, 123170, 123171, 123172, 123173, 123174, 123175, 123176, 123177, 123178 were selected from the ORFs having the nucleotide sequence represented by SEQ ID NO: 78960.

[10361] The probes having the nucleotide sequence represented by SEQ ID NOS: 123179, 123180, 123181, 123182, 123183, 123184, 123185, 123186, 123187, 123188, 123189 were selected from the ORFs having the nucleotide sequence represented by SEQ ID NO: 78961.

[10362] The probes having the nucleotide sequence represented by SEQ ID NOS: 123190, 123191, 123192, 123193, 123194, 123195, 123196, 123197, 123198, 123199, 123200 were selected from the ORFs having the nucleotide sequence represented by SEQ ID NO: 78962.

[10363] The probes having the nucleotide sequence represented by SEQ ID NOS: 123201, 123202, 123203, 123204, 123205, 123206, 123207, 123208, 123209, 123210, 123211 were selected from the ORFs having the nucleotide sequence represented by SEQ ID NO: 78963.

[10364] The probes having the nucleotide sequence represented by SEQ ID NOS: 123212, 123213, 123214, 123215, 123216, 123217, 123218, 123219, 123220, 123221, 123222 were selected from the ORFs having the nucleotide sequence represented by SEQ ID NO: 78964.

[10365] The probes having the nucleotide sequence represented by SEQ ID NOS: 123223, 123224, 123225, 123226, 123227, 123228, 123229, 123230, 123231, 123232, 123233 were selected from the ORFs having the nucleotide sequence represented by SEQ ID NO: 78965.

[10366] The probes having the nucleotide sequence represented by SEQ ID NOS: 123234, 123235, 123236, 123237, 123238, 123239, 123240, 123241, 123242, 123243, 123244 were selected from the ORFs having the nucleotide sequence represented by SEQ ID NO: 78966.

[10367] The probes having the nucleotide sequence represented by SEQ ID NOS: 123245, 123246, 123247, 123248, 123249, 123250, 123251, 123252, 123253, 123254, 123255 were selected from the ORFs having the nucleotide sequence represented by SEQ ID NO: 78967.

[10368] The probes having the nucleotide sequence represented by SEQ ID NOS: 123256, 123257, 123258, 123259, 123260, 123261, 123262, 123263, 123264, 123265, 123266 were selected from the ORFs having the nucleotide sequence represented by SEQ ID NO: 78968.

[10369] The probes having the nucleotide sequence represented by SEQ ID NOS: 123267, 123268, 123269, 123270, 123271, 123272, 123273, 123274, 123275, 123276, 123277 were selected from the ORFs having the nucleotide sequence represented by SEQ ID NO: 78969.

[10370] The probes having the nucleotide sequence represented by SEQ ID NOS: 123278, 123279, 123280, 123281, 123282, 123283, 123284, 123285, 123286, 123287, 123288 were selected from the ORFs having the nucleotide sequence represented by SEQ ID NO: 78970.

[10371] The probes having the nucleotide sequence represented by SEQ ID NOS: 123289, 123290, 123291, 123292, 123293, 123294, 123295, 123296, 123297, 123298, 123299 were selected from the ORFs having the nucleotide sequence represented by SEQ ID NO: 78971.

[10372] The probes having the nucleotide sequence represented by SEQ ID NOS: 123300, 123301, 123302, 123303, 123304, 123305, 123306, 123307, 123308, 123309, 123310 were selected from the ORFs having the nucleotide sequence represented by SEQ ID NO: 78972.

[10373] The probes having the nucleotide sequence represented by SEQ ID NOS: 123311, 123312, 123313, 123314, 123315, 123316, 123317, 123318, 123319, 123320, 123321 were selected from the ORFs having the nucleotide sequence represented by SEQ ID NO: 78973.

[10374] The probes having the nucleotide sequence represented by SEQ ID NOS: 123322, 123323, 123324, 123325, 123326, 123327, 123328, 123329, 123330, 123331, 123332 were selected from the ORFs having the nucleotide sequence represented by SEQ ID NO: 78974.

[10375] The probes having the nucleotide sequence represented by SEQ ID NOS: 123333, 123334, 123335, 123336, 123337, 123338, 123339, 123340, 123341, 123342, 123343 were selected from the ORFs having the nucleotide sequence represented by SEQ ID NO: 78975.

[10376] The probes having the nucleotide sequence represented by SEQ ID NOS: 123344, 123345, 123346, 123347, 123348, 123349, 123350, 123351, 123352, 123353, 123354 were selected from the ORFs having the nucleotide sequence represented by SEQ ID NO: 78976.

[10377] The probes having the nucleotide sequence represented by SEQ ID NOS: 123355, 123356, 123357, 123358, 123359, 123360, 123361, 123362, 123363, 123364, 123365 were selected from the ORFs having the nucleotide sequence represented by SEQ ID NO: 78977.

[10378] The probes having the nucleotide sequence represented by SEQ ID NOS: 123366, 123367, 123368, 123369, 123370, 123371, 123372, 123373, 123374, 123375, 123376, 123377, 123378, 123379, 123380, 123381, 123382, 123383, 123384, 123385, 123386, 123387 were selected from the ORFs having the nucleotide sequence represented by SEQ ID NO: 78978.

[10379] The probes having the nucleotide sequence represented by SEQ ID NOS: 123388, 123389, 123390, 123391, 123392, 123393, 123394, 123395, 123396, 123397, 123398 were selected from the ORFs having the nucleotide sequence represented by SEQ ID NO: 78979.

[10380] The probes having the nucleotide sequence represented by SEQ ID NOS: 123399, 123400, 123401, 123402, 123403, 123404, 123405, 123406, 123407, 123408, 123409 were selected from the ORFs having the nucleotide sequence represented by SEQ ID NO: 78980.

[10381] The probes having the nucleotide sequence represented by SEQ ID NOS: 123410, 123411, 123412, 123413, 123414, 123415, 123416, 123417, 123418, 123419, 123420 were selected from the ORFs having the nucleotide sequence represented by SEQ ID NO: 78981.

[10382] The probes having the nucleotide sequence represented by SEQ ID NOS: 123421, 123422, 123423, 123424, 123425, 123426, 123427, 123428, 123429, 123430, 123431 were selected from the ORFs having the nucleotide sequence represented by SEQ ID NO: 78982.

[10383] The probes having the nucleotide sequence represented by SEQ ID NOS: 123432, 123433, 123434, 123435, 123436, 123437, 123438, 123439, 123440, 123441, 123442 were selected from the ORFs having the nucleotide sequence represented by SEQ ID NO: 78983.

[10384] The probes having the nucleotide sequence represented by SEQ ID NOS: 123443, 123444, 123445, 123446, 123447, 123448, 123449, 123450, 123451, 123452, 123453 were selected from the ORFs having the nucleotide sequence represented by SEQ ID NO: 78984.

[10385] The probes having the nucleotide sequence represented by SEQ ID NOS: 123454, 123455, 123456, 123457, 123458, 123459, 123460, 123461, 123462, 123463, 123464 were selected from the ORFs having the nucleotide sequence represented by SEQ ID NO: 78985.

[10386] The probes having the nucleotide sequence represented by SEQ ID NOS: 123465, 123466, 123467, 123468, 123469, 123470, 123471, 123472, 123473, 123474, 123475 were selected from the ORFs having the nucleotide sequence represented by SEQ ID NO: 78986.

[10387] The probes having the nucleotide sequence represented by SEQ ID NOS: 123476, 123477, 123478, 123479, 123480, 123481, 123482, 123483, 123484, 123485, 123486 were selected from the ORFs having the nucleotide sequence represented by SEQ ID NO: 78987.

[10388] The probes having the nucleotide sequence represented by SEQ ID NOS: 123487, 123488, 123489, 123490, 123491, 123492, 123493, 123494, 123495, 123496, 123497 were selected from the ORFs having the nucleotide sequence represented by SEQ ID NO: 78988.

[10389] The probes having the nucleotide sequence represented by SEQ ID NOS: 123498, 123499, 123500, 123501, 123502, 123503, 123504, 123505, 123506, 123507, 123508 were selected from the ORFs having the nucleotide sequence represented by SEQ ID NO: 78989.

[10390] The probes having the nucleotide sequence represented by SEQ ID NOS: 123509, 123510, 123511, 123512, 123513, 123514, 123515, 123516, 123517, 123518, 123519 were selected from the ORFs having the nucleotide sequence represented by SEQ ID NO: 78990.

[10391] The probes having the nucleotide sequence represented by SEQ ID NOS: 123520, 123521, 123522, 123523, 123524, 123525, 123526, 123527, 123528, 123529, 123530 were selected from the ORFs having the nucleotide sequence represented by SEQ ID NO: 78991.

[10392] The probes having the nucleotide sequence represented by SEQ ID NOS: 123531, 123532, 123533, 123534, 123535, 123536, 123537, 123538, 123539, 123540, 123541 were selected from the ORFs having the nucleotide sequence represented by SEQ ID NO: 78992.

[10393] The probes having the nucleotide sequence represented by SEQ ID NOS: 123542, 123543, 123544, 123545, 123546, 123547, 123548, 123549, 123550, 123551, 123552 were selected from the ORFs having the nucleotide sequence represented by SEQ ID NO: 78993.

[10394] The probes having the nucleotide sequence represented by SEQ ID NOS: 123553, 123554, 123555, 123556, 123557, 123558, 123559, 123560, 123561, 123562, 123563 were selected from the ORFs having the nucleotide sequence represented by SEQ ID NO: 78994.

[10395] The probes having the nucleotide sequence represented by SEQ ID NOS: 123564, 123565, 123566, 123567, 123568, 123569, 123570, 123571, 123572, 123573, 123574 were selected from the ORFs having the nucleotide sequence represented by SEQ ID NO: 78995.

[10396] The probes having the nucleotide sequence represented by SEQ ID NOS: 123575, 123576, 123577, 123578, 123579, 123580, 123581, 123582, 123583, 123584, 123585 were selected from the ORFs having the nucleotide sequence represented by SEQ ID NO: 78996.

[10397] The probes having the nucleotide sequence represented by SEQ ID NOS: 123586, 123587, 123588, 123589, 123590, 123591, 123592, 123593, 123594, 123595, 123596 were selected from the ORFs having the nucleotide sequence represented by SEQ ID NO: 78997.

[10398] The probes having the nucleotide sequence represented by SEQ ID NOS: 123597, 123598, 123599, 123600, 123601, 123602, 123603, 123604, 123605, 123606, 123607 were selected from the ORFs having the nucleotide sequence represented by SEQ ID NO: 78998.

[10399] The probes having the nucleotide sequence represented by SEQ ID NOS: 123608, 123609, 123610, 123611, 123612, 123613, 123614, 123615, 123616, 123617, 123618 were selected from the ORFs having the nucleotide sequence represented by SEQ ID NO: 78999.

[10400] The probes having the nucleotide sequence represented by SEQ ID NOS: 123619, 123620, 123621, 123622, 123623, 123624, 123625, 123626, 123627, 123628, 123629 were selected from the ORFs having the nucleotide sequence represented by SEQ ID NO: 79000.

[10401] The probes having the nucleotide sequence represented by SEQ ID NOS: 123630, 123631, 123632, 123633, 123634, 123635, 123636, 123637, 123638, 123639, 123640 were selected from the ORFs having the nucleotide sequence represented by SEQ ID NO: 79001.

[10402] The probes having the nucleotide sequence represented by SEQ ID NOS: 123641, 123642, 123643, 123644, 123645, 123646, 123647, 123648, 123649, 123650, 123651 were selected from the ORFs having the nucleotide sequence represented by SEQ ID NO: 79002.

[10403] The probes having the nucleotide sequence represented by SEQ ID NOS: 123652, 123653, 123654, 123655, 123656, 123657, 123658, 123659, 123660, 123661, 123662 were selected from the ORFs having the nucleotide sequence represented by SEQ ID NO: 79003.

[10404] The probes having the nucleotide sequence represented by SEQ ID NOS: 123663, 123664, 123665, 123666, 123667, 123668, 123669, 123670, 123671, 123672, 123673 were selected from the ORFs having the nucleotide sequence represented by SEQ ID NO: 79004.

[10405] The probes having the nucleotide sequence represented by SEQ ID NOS: 123674, 123675, 123676, 123677, 123678, 123679, 123680, 123681, 123682, 123683, 123684 were selected from the ORFs having the nucleotide sequence represented by SEQ ID NO: 79005.

[10406] The probes having the nucleotide sequence represented by SEQ ID NOS: 123685, 123686, 123687, 123688, 123689, 123690, 123691, 123692, 123693, 123694, 123695 were selected from the ORFs having the nucleotide sequence represented by SEQ ID NO: 79006.

[10407] The probes having the nucleotide sequence represented by SEQ ID NOS: 123696, 123697, 123698, 123699, 123700, 123701, 123702, 123703, 123704, 123705, 123706 were selected from the ORFs having the nucleotide sequence represented by SEQ ID NO: 79007.

[10408] The probes having the nucleotide sequence represented by SEQ ID NOS: 123707, 123708, 123709, 123710, 123711, 123712, 123713, 123714, 123715, 123716, 123717 were selected from the ORFs having the nucleotide sequence represented by SEQ ID NO: 79008.

[10409] The probes having the nucleotide sequence represented by SEQ ID NOS: 123718, 123719, 123720, 123721, 123722, 123723, 123724, 123725, 123726, 123727, 123728 were selected from the ORFs having the nucleotide sequence represented by SEQ ID NO: 79009.

[10410] The probes having the nucleotide sequence represented by SEQ ID NOS: 123729, 123730, 123731, 123732, 123733, 123734, 123735, 123736, 123737, 123738, 123739 were selected from the ORFs having the nucleotide sequence represented by SEQ ID NO: 79010.

[10411] The probes having the nucleotide sequence represented by SEQ ID NOS: 123740, 123741, 123742, 123743, 123744, 123745, 123746, 123747, 123748, 123749, 123750 were selected from the ORFs having the nucleotide sequence represented by SEQ ID NO: 79011.

[10412] The probes having the nucleotide sequence represented by SEQ ID NOS: 123751, 123752, 123753, 123754, 123755, 123756, 123757, 123758, 123759, 123760, 123761 were selected from the ORFs having the nucleotide sequence represented by SEQ ID NO: 79012.

[10413] The probes having the nucleotide sequence represented by SEQ ID NOS: 123762, 123763, 123764, 123765, 123766, 123767, 123768, 123769, 123770, 123771, 123772 were selected from the ORFs having the nucleotide sequence represented by SEQ ID NO: 79013.

[10414] The probes having the nucleotide sequence represented by SEQ ID NOS: 123773, 123774, 123775, 123776, 123777, 123778, 123779, 123780, 123781, 123782, 123783 were selected from the ORFs having the nucleotide sequence represented by SEQ ID NO: 79014.

[10415] The probes having the nucleotide sequence represented by SEQ ID NOS: 123784, 123785, 123786, 123787, 123788, 123789, 123790, 123791, 123792, 123793, 123794 were selected from the ORFs having the nucleotide sequence represented by SEQ ID NO: 79015.

[10416] The probes having the nucleotide sequence represented by SEQ ID NOS: 123795, 123796, 123797, 123798, 123799, 123800, 123801, 123802, 123803, 123804, 123805 were selected from the ORFs having the nucleotide sequence represented by SEQ ID NO: 79016.

[10417] The probes having the nucleotide sequence represented by SEQ ID NOS: 123806, 123807, 123808, 123809, 123810, 123811, 123812, 123813, 123814, 123815, 123816 were selected from the ORFs having the nucleotide sequence represented by SEQ ID NO: 79017.

[10418] The probes having the nucleotide sequence represented by SEQ ID NOS: 123817, 123818, 123819, 123820, 123821, 123822, 123823, 123824, 123825, 123826, 123827 were selected from the ORFs having the nucleotide sequence represented by SEQ ID NO: 79018.

[10419] The probes having the nucleotide sequence represented by SEQ ID NOS: 123828, 123829, 123830, 123831, 123832, 123833, 123834, 123835, 123836, 123837, 123838 were selected from the ORFs having the nucleotide sequence represented by SEQ ID NO: 79019.

[10420] The probes having the nucleotide sequence represented by SEQ ID NOS: 123839, 123840, 123841, 123842, 123843, 123844, 123845, 123846, 123847, 123848, 123849 were selected from the ORFs having the nucleotide sequence represented by SEQ ID NO: 79020.

[10421] The probes having the nucleotide sequence represented by SEQ ID NOS: 123850, 123851, 123852, 123853, 123854, 123855, 123856, 123857, 123858, 123859, 123860 were selected from the ORFs having the nucleotide sequence represented by SEQ ID NO: 79021.

[10422] The probes having the nucleotide sequence represented by SEQ ID NOS: 123861, 123862, 123863, 123864, 123865, 123866, 123867, 123868, 123869, 123870, 123871 were selected from the ORFs having the nucleotide sequence represented by SEQ ID NO: 79022.

[10423] The probes having the nucleotide sequence represented by SEQ ID NOS: 123872, 123873, 123874, 123875, 123876, 123877, 123878, 123879, 123880, 123881, 123882 were selected from the ORFs having the nucleotide sequence represented by SEQ ID NO: 79023.

[10424] The probes having the nucleotide sequence represented by SEQ ID NOS: 123883, 123884, 123885, 123886, 123887, 123888, 123889, 123890, 123891, 123892, 123893 were selected from the ORFs having the nucleotide sequence represented by SEQ ID NO: 79024.

[10425] The probes having the nucleotide sequence represented by SEQ ID NOS: 123894, 123895, 123896, 123897, 123898, 123899, 123900, 123901, 123902, 123903, 123904 were selected from the ORFs having the nucleotide sequence represented by SEQ ID NO: 79025.

[10426] The probes having the nucleotide sequence represented by SEQ ID NOS: 123905, 123906, 123907, 123908, 123909, 123910, 123911, 123912, 123913, 123914, 123915 were selected from the ORFs having the nucleotide sequence represented by SEQ ID NO: 79026.

[10427] The probes having the nucleotide sequence represented by SEQ ID NOS: 123916, 123917, 123918, 123919, 123920, 123921, 123922, 123923, 123924, 123925, 123926 were selected from the ORFs having the nucleotide sequence represented by SEQ ID NO: 79027.

[10428] The probes having the nucleotide sequence represented by SEQ ID NOS: 123927, 123928, 123929, 123930, 123931, 123932, 123933, 123934, 123935, 123936, 123937 were selected from the ORFs having the nucleotide sequence represented by SEQ ID NO: 79028.

[10429] The probes having the nucleotide sequence represented by SEQ ID NOS: 123938, 123939, 123940, 123941, 123942, 123943, 123944, 123945, 123946, 123947, 123948 were selected from the ORFs having the nucleotide sequence represented by SEQ ID NO: 79029.

[10430] The probes having the nucleotide sequence represented by SEQ ID NOS: 123949, 123950, 123951, 123952, 123953, 123954, 123955, 123956, 123957, 123958, 123959 were selected from the ORFs having the nucleotide sequence represented by SEQ ID NO: 79030.

[10431] The probes having the nucleotide sequence represented by SEQ ID NOS: 123960, 123961, 123962, 123963, 123964, 123965, 123966, 123967, 123968, 123969, 123970 were selected from the ORFs having the nucleotide sequence represented by SEQ ID NO: 79031.

[10432] The probes having the nucleotide sequence represented by SEQ ID NOS: 123971, 123972, 123973, 123974, 123975, 123976, 123977, 123978, 123979, 123980, 123981 were selected from the ORFs having the nucleotide sequence represented by SEQ ID NO: 79032.

[10433] The probes having the nucleotide sequence represented by SEQ ID NOS: 123982, 123983, 123984, 123985, 123986, 123987, 123988, 123989, 123990, 123991, 123992 were selected from the ORFs having the nucleotide sequence represented by SEQ ID NO: 79033.

[10434] The probes having the nucleotide sequence represented by SEQ ID NOS: 123993, 123994, 123995, 123996, 123997, 123998, 123999, 124000, 124001, 124002, 124003 were selected from the ORFs having the nucleotide sequence represented by SEQ ID NO: 79034.

[10435] The probes having the nucleotide sequence represented by SEQ ID NOS: 124004, 124005, 124006, 124007, 124008, 124009, 124010, 124011, 124012, 124013, 124014 were selected from the ORFs having the nucleotide sequence represented by SEQ ID NO: 79035.

[10436] The probes having the nucleotide sequence represented by SEQ ID NOS: 124015, 124016, 124017, 124018, 124019, 124020, 124021, 124022, 124023, 124024, 124025 were selected from the ORFs having the nucleotide sequence represented by SEQ ID NO: 79036.

[10437] The probes having the nucleotide sequence represented by SEQ ID NOS: 124026, 124027, 124028, 124029, 124030, 124031, 124032, 124033, 124034, 124035, 124036 were selected from the ORFs having the nucleotide sequence represented by SEQ ID NO: 79037.

[10438] The probes having the nucleotide sequence represented by SEQ ID NOS: 124037, 124038, 124039, 124040, 124041, 124042, 124043, 124044, 124045, 124046, 124047 were selected from the ORFs having the nucleotide sequence represented by SEQ ID NO: 79038.

[10439] The probes having the nucleotide sequence represented by SEQ ID NOS: 124048, 124049, 124050, 124051, 124052, 124053, 124054, 124055, 124056, 124057, 124058 were selected from the ORFs having the nucleotide sequence represented by SEQ ID NO: 79039.

[10440] The probes having the nucleotide sequence represented by SEQ ID NOS: 124059, 124060, 124061, 124062, 124063, 124064, 124065, 124066, 124067, 124068, 124069 were selected from the ORFs having the nucleotide sequence represented by SEQ ID NO: 79040.

[10441] The probes having the nucleotide sequence represented by SEQ ID NOS: 124070, 124071, 124072, 124073, 124074, 124075, 124076, 124077, 124078, 124079, 124080 were selected from the ORFs having the nucleotide sequence represented by SEQ ID NO: 79041.

[10442] The probes having the nucleotide sequence represented by SEQ ID NOS: 124081, 124082, 124083, 124084, 124085, 124086, 124087, 124088, 124089, 124090, 124091 were selected from the ORFs having the nucleotide sequence represented by SEQ ID NO: 79042.

[10443] The probes having the nucleotide sequence represented by SEQ ID NOS: 124092, 124093, 124094, 124095, 124096, 124097, 124098, 124099, 124100, 124101, 124102 were selected from the ORFs having the nucleotide sequence represented by SEQ ID NO: 79043.

[10444] The probes having the nucleotide sequence represented by SEQ ID NOS: 124103, 124104, 124105, 124106, 124107, 124108, 124109, 124110, 124111, 124112, 124113 were selected from the ORFs having the nucleotide sequence represented by SEQ ID NO: 79044.

[10445] The probes having the nucleotide sequence represented by SEQ ID NOS: 124114, 124115, 124116, 124117, 124118, 124119, 124120, 124121, 124122, 124123, 124124 were selected from the ORFs having the nucleotide sequence represented by SEQ ID NO: 79045.

[10446] The probes having the nucleotide sequence represented by SEQ ID NOS: 124125, 124126, 124127, 124128, 124129, 124130, 124131, 124132, 124133, 124134, 124135 were selected from the ORFs having the nucleotide sequence represented by SEQ ID NO: 79046.

[10447] The probes having the nucleotide sequence represented by SEQ ID NOS: 124136, 124137, 124138, 124139, 124140, 124141, 124142, 124143, 124144, 124145, 124146 were selected from the ORFs having the nucleotide sequence represented by SEQ ID NO: 79047.

[10448] The probes having the nucleotide sequence represented by SEQ ID NOS: 124147, 124148, 124149, 124150, 124151, 124152, 124153, 124154, 124155, 124156, 124157 were selected from the ORFs having the nucleotide sequence represented by SEQ ID NO: 79048.

[10449] The probes having the nucleotide sequence represented by SEQ ID NOS: 124158, 124159, 124160, 124161, 124162, 124163, 124164, 124165, 124166, 124167, 124168 were selected from the ORFs having the nucleotide sequence represented by SEQ ID NO: 79049.

[10450] The probes having the nucleotide sequence represented by SEQ ID NOS: 124169, 124170, 124171, 124172, 124173, 124174, 124175, 124176, 124177, 124178, 124179 were selected from the ORFs having the nucleotide sequence represented by SEQ ID NO: 79050.

[10451] The probes having the nucleotide sequence represented by SEQ ID NOS: 124180, 124181, 124182, 124183, 124184, 124185, 124186, 124187, 124188, 124189, 124190 were selected from the ORFs having the nucleotide sequence represented by SEQ ID NO: 79051.

[10452] The probes having the nucleotide sequence represented by SEQ ID NOS: 124191, 124192, 124193, 124194, 124195, 124196, 124197, 124198, 124199, 124200, 124201, 124202, 124203, 124204, 124205, 124206, 124207, 124208, 124209, 124210, 124211, 124212 were selected from the ORFs having the nucleotide sequence represented by SEQ ID NO: 79052.

[10453] The probes having the nucleotide sequence represented by SEQ ID NOS: 124213, 124214, 124215, 124216, 124217, 124218, 124219, 124220, 124221, 124222, 124223 were selected from the ORFs having the nucleotide sequence represented by SEQ ID NO: 79053.

[10454] The probes having the nucleotide sequence represented by SEQ ID NOS: 124224, 124225, 124226, 124227, 124228, 124229, 124230, 124231, 124232, 124233, 124234 were selected from the ORFs having the nucleotide sequence represented by SEQ ID NO: 79054.

[10455] The probes having the nucleotide sequence represented by SEQ ID NOS: 124235, 124236, 124237, 124238, 124239, 124240, 124241, 124242, 124243, 124244, 124245 were selected from the ORFs having the nucleotide sequence represented by SEQ ID NO: 79055.

[10456] The probes having the nucleotide sequence represented by SEQ ID NOS: 124246, 124247, 124248, 124249, 124250, 124251, 124252, 124253, 124254, 124255, 124256 were selected from the ORFs having the nucleotide sequence represented by SEQ ID NO: 79056.

[10457] The probes having the nucleotide sequence represented by SEQ ID NOS: 124257, 124258, 124259, 124260, 124261, 124262, 124263, 124264, 124265, 124266, 124267 were selected from the ORFs having the nucleotide sequence represented by SEQ ID NO: 79057.

[10458] The probes having the nucleotide sequence represented by SEQ ID NOS: 124268, 124269, 124270, 124271, 124272, 124273, 124274, 124275, 124276, 124277, 124278 were selected from the ORFs having the nucleotide sequence represented by SEQ ID NO: 79058.

[10459] The probes having the nucleotide sequence represented by SEQ ID NOS: 124279, 124280, 124281, 124282, 124283, 124284, 124285, 124286, 124287, 124288, 124289 were selected from the ORFs having the nucleotide sequence represented by SEQ ID NO: 79059.

[10460] The probes having the nucleotide sequence represented by SEQ ID NOS: 124290, 124291, 124292, 124293, 124294, 124295, 124296, 124297, 124298, 124299, 124300 were selected from the ORFs having the nucleotide sequence represented by SEQ ID NO: 79060.

[10461] The probes having the nucleotide sequence represented by SEQ ID NOS: 124301, 124302, 124303, 124304, 124305, 124306, 124307, 124308, 124309, 124310, 124311 were selected from the ORFs having the nucleotide sequence represented by SEQ ID NO: 79061.

[10462] The probes having the nucleotide sequence represented by SEQ ID NOS: 124312, 124313, 124314, 124315, 124316, 124317, 124318, 124319, 124320, 124321, 124322 were selected from the ORFs having the nucleotide sequence represented by SEQ ID NO: 79062.

[10463] The probes having the nucleotide sequence represented by SEQ ID NOS: 124323, 124324, 124325, 124326, 124327, 124328, 124329, 124330, 124331, 124332, 124333 were selected from the ORFs having the nucleotide sequence represented by SEQ ID NO: 79063.

[10464] The probes having the nucleotide sequence represented by SEQ ID NOS: 124334, 124335, 124336, 124337, 124338, 124339, 124340, 124341, 124342, 124343, 124344 were selected from the ORFs having the nucleotide sequence represented by SEQ ID NO: 79064.

[10465] The probes having the nucleotide sequence represented by SEQ ID NOS: 124345, 124346, 124347, 124348, 124349, 124350, 124351, 124352, 124353, 124354, 124355 were selected from the ORFs having the nucleotide sequence represented by SEQ ID NO: 79065.

[10466] The probes having the nucleotide sequence represented by SEQ ID NOS: 124356, 124357, 124358, 124359, 124360, 124361, 124362, 124363, 124364, 124365, 124366 were selected from the ORFs having the nucleotide sequence represented by SEQ ID NO: 79066.

[10467] The probes having the nucleotide sequence represented by SEQ ID NOS: 124367, 124368, 124369, 124370, 124371, 124372, 124373, 124374, 124375, 124376, 124377 were selected from the ORFs having the nucleotide sequence represented by SEQ ID NO: 79067.

[10468] The probes having the nucleotide sequence represented by SEQ ID NOS: 124378, 124379, 124380, 124381, 124382, 124383, 124384, 124385, 124386, 124387, 124388 were selected from the ORFs having the nucleotide sequence represented by SEQ ID NO: 79068.

[10469] The probes having the nucleotide sequence represented by SEQ ID NOS: 124389, 124390, 124391, 124392, 124393, 124394, 124395, 124396, 124397, 124398, 124399 were selected from the ORFs having the nucleotide sequence represented by SEQ ID NO: 79069.

[10470] The probes having the nucleotide sequence represented by SEQ ID NOS: 124400, 124401, 124402, 124403, 124404, 124405, 124406, 124407, 124408, 124409, 124410 were selected from the ORFs having the nucleotide sequence represented by SEQ ID NO: 79070.

[10471] The probes having the nucleotide sequence represented by SEQ ID NOS: 124411, 124412, 124413, 124414, 124415, 124416, 124417, 124418, 124419, 124420, 124421 were selected from the ORFs having the nucleotide sequence represented by SEQ ID NO: 79071.

[10472] The probes having the nucleotide sequence represented by SEQ ID NOS: 124422, 124423, 124424, 124425, 124426, 124427, 124428, 124429, 124430, 124431, 124432 were selected from the ORFs having the nucleotide sequence represented by SEQ ID NO: 79072.

[10473] The probes having the nucleotide sequence represented by SEQ ID NOS: 124433, 124434, 124435, 124436, 124437, 124438, 124439, 124440, 124441, 124442, 124443 were selected from the ORFs having the nucleotide sequence represented by SEQ ID NO: 79073.

[10474] The probes having the nucleotide sequence represented by SEQ ID NOS: 124444, 124445, 124446, 124447, 124448, 124449, 124450, 124451, 124452, 124453, 124454 were selected from the ORFs having the nucleotide sequence represented by SEQ ID NO: 79074.

[10475] The probes having the nucleotide sequence represented by SEQ ID NOS: 124455, 124456, 124457, 124458, 124459, 124460, 124461, 124462, 124463, 124464, 124465 were selected from the ORFs having the nucleotide sequence represented by SEQ ID NO: 79075.

[10476] The probes having the nucleotide sequence represented by SEQ ID NOS: 124466, 124467, 124468, 124469, 124470, 124471, 124472, 124473, 124474, 124475, 124476 were selected from the ORFs having the nucleotide sequence represented by SEQ ID NO: 79076.

[10477] The probes having the nucleotide sequence represented by SEQ ID NOS: 124477, 124478, 124479, 124480, 124481, 124482, 124483, 124484, 124485, 124486, 124487 were selected from the ORFs having the nucleotide sequence represented by SEQ ID NO: 79077.

[10478] The probes having the nucleotide sequence represented by SEQ ID NOS: 124488, 124489, 124490, 124491, 124492, 124493, 124494, 124495, 124496, 124497, 124498 were selected from the ORFs having the nucleotide sequence represented by SEQ ID NO: 79078.

[10479] The probes having the nucleotide sequence represented by SEQ ID NOS: 124499, 124500, 124501, 124502, 124503, 124504, 124505, 124506, 124507, 124508, 124509 were selected from the ORFs having the nucleotide sequence represented by SEQ ID NO: 79079.

[10480] The probes having the nucleotide sequence represented by SEQ ID NOS: 124510, 124511, 124512, 124513, 124514, 124515, 124516, 124517, 124518, 124519, 124520 were selected from the ORFs having the nucleotide sequence represented by SEQ ID NO: 79080.

[10481] The probes having the nucleotide sequence represented by SEQ ID NOS: 124521, 124522, 124523, 124524, 124525, 124526, 124527, 124528, 124529, 124530, 124531 were selected from the ORFs having the nucleotide sequence represented by SEQ ID NO: 79081.

[10482] The probes having the nucleotide sequence represented by SEQ ID NOS: 124532, 124533, 124534, 124535, 124536, 124537, 124538, 124539, 124540, 124541, 124542 were selected from the ORFs having the nucleotide sequence represented by SEQ ID NO: 79082.

[10483] The probes having the nucleotide sequence represented by SEQ ID NOS: 124543, 124544, 124545, 124546, 124547, 124548, 124549, 124550, 124551, 124552, 124553 were selected from the ORFs having the nucleotide sequence represented by SEQ ID NO: 79083.

[10484] The probes having the nucleotide sequence represented by SEQ ID NOS: 124554, 124555, 124556, 124557, 124558, 124559, 124560, 124561, 124562, 124563, 124564 were selected from the ORFs having the nucleotide sequence represented by SEQ ID NO: 79084.

[10485] The probes having the nucleotide sequence represented by SEQ ID NOS: 124565, 124566, 124567, 124568, 124569, 124570, 124571, 124572, 124573, 124574, 124575 were selected from the ORFs having the nucleotide sequence represented by SEQ ID NO: 79085.

[10486] The probes having the nucleotide sequence represented by SEQ ID NOS: 124576, 124577, 124578, 124579, 124580, 124581, 124582, 124583, 124584, 124585, 124586 were selected from the ORFs having the nucleotide sequence represented by SEQ ID NO: 79086.

[10487] The probes having the nucleotide sequence represented by SEQ ID NOS: 124587, 124588, 124589, 124590, 124591, 124592, 124593, 124594, 124595, 124596, 124597 were selected from the ORFs having the nucleotide sequence represented by SEQ ID NO: 79087.

[10488] The probes having the nucleotide sequence represented by SEQ ID NOS: 124598, 124599, 124600, 124601, 124602, 124603, 124604, 124605, 124606, 124607, 124608 were selected from the ORFs having the nucleotide sequence represented by SEQ ID NO: 79088.

[10489] The probes having the nucleotide sequence represented by SEQ ID NOS: 124609, 124610, 124611, 124612, 124613, 124614, 124615, 124616, 124617, 124618, 124619 were selected from the ORFs having the nucleotide sequence represented by SEQ ID NO: 79089.

[10490] The probes having the nucleotide sequence represented by SEQ ID NOS: 124620, 124621, 124622, 124623, 124624, 124625, 124626, 124627, 124628, 124629, 124630 were selected from the ORFs having the nucleotide sequence represented by SEQ ID NO: 79090.

[10491] The probes having the nucleotide sequence represented by SEQ ID NOS: 124631, 124632, 124633, 124634, 124635, 124636, 124637, 124638, 124639, 124640, 124641 were selected from the ORFs having the nucleotide sequence represented by SEQ ID NO: 79091.

[10492] The probes having the nucleotide sequence represented by SEQ ID NOS: 124642, 124643, 124644, 124645, 124646, 124647, 124648, 124649, 124650, 124651, 124652 were selected from the ORFs having the nucleotide sequence represented by SEQ ID NO: 79092.

[10493] The probes having the nucleotide sequence represented by SEQ ID NOS: 124653, 124654, 124655, 124656, 124657, 124658, 124659, 124660, 124661, 124662, 124663 were selected from the ORFs having the nucleotide sequence represented by SEQ ID NO: 79093.

[10494] The probes having the nucleotide sequence represented by SEQ ID NOS: 124664, 124665, 124666, 124667, 124668, 124669, 124670, 124671, 124672, 124673, 124674 were selected from the ORFs having the nucleotide sequence represented by SEQ ID NO: 79094.

[10495] The probes having the nucleotide sequence represented by SEQ ID NOS: 124675, 124676, 124677, 124678, 124679, 124680, 124681, 124682, 124683, 124684, 124685 were selected from the ORFs having the nucleotide sequence represented by SEQ ID NO: 79095.

[10496] The probes having the nucleotide sequence represented by SEQ ID NOS: 124686, 124687, 124688, 124689, 124690, 124691, 124692, 124693, 124694, 124695, 124696 were selected from the ORFs having the nucleotide sequence represented by SEQ ID NO: 79096.

[10497] The probes having the nucleotide sequence represented by SEQ ID NOS: 124697, 124698, 124699, 124700, 124701, 124702, 124703, 124704, 124705, 124706, 124707 were selected from the ORFs having the nucleotide sequence represented by SEQ ID NO: 79097.

[10498] The probes having the nucleotide sequence represented by SEQ ID NOS: 124708, 124709, 124710, 124711, 124712, 124713, 124714, 124715, 124716, 124717, 124718 were selected from the ORFs having the nucleotide sequence represented by SEQ ID NO: 79098.

[10499] The probes having the nucleotide sequence represented by SEQ ID NOS: 124719, 124720, 124721, 124722, 124723, 124724, 124725, 124726, 124727, 124728, 124729 were selected from the ORFs having the nucleotide sequence represented by SEQ ID NO: 79099.

[10500] The probes having the nucleotide sequence represented by SEQ ID NOS: 124730, 124731, 124732, 124733, 124734, 124735, 124736, 124737, 124738, 124739, 124740 were selected from the ORFs having the nucleotide sequence represented by SEQ ID NO: 79100.

[10501] The probes having the nucleotide sequence represented by SEQ ID NOS: 124741, 124742, 124743, 124744, 124745, 124746, 124747, 124748, 124749, 124750, 124751 were selected from the ORFs having the nucleotide sequence represented by SEQ ID NO: 79101.

[10502] The probes having the nucleotide sequence represented by SEQ ID NOS: 124752, 124753, 124754, 124755, 124756, 124757, 124758, 124759, 124760, 124761, 124762 were selected from the ORFs having the nucleotide sequence represented by SEQ ID NO: 79102.

[10503] The probes having the nucleotide sequence represented by SEQ ID NOS: 124763, 124764, 124765, 124766, 124767, 124768, 124769, 124770, 124771, 124772, 124773 were selected from the ORFs having the nucleotide sequence represented by SEQ ID NO: 79103.

[10504] The probes having the nucleotide sequence represented by SEQ ID NOS: 124774, 124775, 124776, 124777, 124778, 124779, 124780, 124781, 124782, 124783, 124784 were selected from the ORFs having the nucleotide sequence represented by SEQ ID NO: 79104.

[10505] The probes having the nucleotide sequence represented by SEQ ID NOS: 124785, 124786, 124787, 124788, 124789, 124790, 124791, 124792, 124793, 124794, 124795 were selected from the ORFs having the nucleotide sequence represented by SEQ. ID NO: 79105.

[10506] The probes having the nucleotide sequence represented by SEQ ID NOS: 124796, 124797, 124798, 124799, 124800, 124801, 124802, 124803, 124804, 124805, 124806 were selected from the ORFs having the nucleotide sequence represented by SEQ ID NO: 79106.

[10507] The probes having the nucleotide sequence represented by SEQ ID NOS: 124807, 124808, 124809, 124810, 124811, 124812, 124813, 124814, 124815, 124816, 124817 were selected from the ORFs having the nucleotide sequence represented by SEQ ID NO: 79107.

[10508] The probes having the nucleotide sequence represented by SEQ ID NOS: 124818, 124819, 124820, 124821, 124822, 124823, 124824, 124825, 124826, 124827, 124828 were selected from the ORFs having the nucleotide sequence represented by SEQ ID NO: 79108.

[10509] The probes having the nucleotide sequence represented by SEQ ID NOS: 124829, 124830, 124831, 124832, 124833, 124834, 124835, 124836, 124837, 124838, 124839 were selected from the ORFs having the nucleotide sequence represented by SEQ ID NO: 79109.

[10510] The probes having the nucleotide sequence represented by SEQ ID NOS: 124840, 124841, 124842, 124843, 124844, 124845, 124846, 124847, 124848, 124849, 124850 were selected from the ORFs having the nucleotide sequence represented by SEQ ID NO: 79110.

[10511] The probes having the nucleotide sequence represented by SEQ ID NOS: 124851, 124852, 124853, 124854, 124855, 124856, 124857, 124858, 124859, 124860, 124861 were selected from the ORFs having the nucleotide sequence represented by SEQ ID NO: 79111.

[10512] The probes having the nucleotide sequence represented by SEQ ID NOS: 124862, 124863, 124864, 124865, 124866, 124867, 124868, 124869, 124870, 124871, 124872 were selected from the ORFs having the nucleotide sequence represented by SEQ ID NO: 79112.

[10513] The probes having the nucleotide sequence represented by SEQ ID NOS: 124873, 124874, 124875, 124876, 124877, 124878, 124879, 124880, 124881, 124882, 124883 were selected from the ORFs having the nucleotide sequence represented by SEQ ID NO: 79113.

[10514] The probes having the nucleotide sequence represented by SEQ ID NOS: 124884, 124885, 124886, 124887, 124888, 124889, 124890, 124891, 124892, 124893, 124894 were selected from the ORFs having the nucleotide sequence represented by SEQ ID NO: 79114.

[10515] The probes having the nucleotide sequence represented by SEQ ID NOS: 124895, 124896, 124897, 124898, 124899, 124900, 124901, 124902, 124903, 124904, 124905 were selected from the ORFs having the nucleotide sequence represented by SEQ ID NO: 79115.

[10516] The probes having the nucleotide sequence represented by SEQ ID NOS: 124906, 124907, 124908, 124909, 124910, 124911, 124912, 124913, 124914, 124915, 124916 were selected from the ORFs having the nucleotide sequence represented by SEQ ID NO: 79116.

[10517] The probes having the nucleotide sequence represented by SEQ ID NOS: 124917, 124918, 124919, 124920, 124921, 124922, 124923, 124924, 124925, 124926, 124927 were selected from the ORFs having the nucleotide sequence represented by SEQ ID NO: 79117.

[10518] The probes having the nucleotide sequence represented by SEQ ID NOS: 124928, 124929, 124930, 124931, 124932, 124933, 124934, 124935, 124936, 124937, 124938 were selected from the ORFs having the nucleotide sequence represented by SEQ ID NO: 79118.

[10519] The probes having the nucleotide sequence represented by SEQ ID NOS: 124939, 124940, 124941, 124942, 124943, 124944, 124945, 124946, 124947, 124948, 124949 were selected from the ORFs having the nucleotide sequence represented by SEQ ID NO: 79119.

[10520] The probes having the nucleotide sequence represented by SEQ ID NOS: 124950, 124951, 124952, 124953, 124954, 124955, 124956, 124957, 124958, 124959, 124960 were selected from the ORFs having the nucleotide sequence represented by SEQ ID NO: 79120.

[10521] The probes having the nucleotide sequence represented by SEQ ID NOS: 124961, 124962, 124963, 124964, 124965, 124966, 124967, 124968, 124969, 124970, 124971 were selected from the ORFs having the nucleotide sequence represented by SEQ ID NO: 79121.

[10522] The probes having the nucleotide sequence represented by SEQ ID NOS: 124972, 124973, 124974, 124975, 124976, 124977, 124978, 124979, 124980, 124981, 124982 were selected from the ORFs having the nucleotide sequence represented by SEQ ID NO: 79122.

[10523] The probes having the nucleotide sequence represented by SEQ ID NOS: 124983, 124984, 124985, 124986, 124987, 124988, 124989, 124990, 124991, 124992, 124993 were selected from the ORFs having the nucleotide sequence represented by SEQ ID NO: 79123.

[10524] The probes having the nucleotide sequence represented by SEQ ID NOS: 124994, 124995, 124996, 124997, 124998, 124999, 125000, 125001, 125002, 125003, 125004 were selected from the ORFs having the nucleotide sequence represented by SEQ ID NO: 79124.

[10525] The probes having the nucleotide sequence represented by SEQ ID NOS: 125005, 125006, 125007, 125008, 125009, 125010, 125011, 125012, 125013, 125014, 125015 were selected from the ORFs having the nucleotide sequence represented by SEQ ID NO: 79125.

[10526] The probes having the nucleotide sequence represented by SEQ ID NOS: 125016, 125017, 125018, 125019, 125020, 125021, 125022, 125023, 125024, 125025, 125026 were selected from the ORFs having the nucleotide sequence represented by SEQ ID NO: 79126.

[10527] The probes having the nucleotide sequence represented by SEQ ID NOS: 125027, 125028, 125029, 125030, 125031, 125032, 125033, 125034, 125035, 125036, 125037, 125038, 125039, 125040, 125041, 125042, 125043, 125044, 125045, 125046, 125047, 125048 were selected from the ORFs having the nucleotide sequence represented by SEQ ID NO: 79127.

[10528] The probes having the nucleotide sequence represented by SEQ ID NOS: 125049, 125050, 125051, 125052, 125053, 125054, 125055, 125056, 125057, 125058 were selected from the ORFs having the nucleotide sequence represented by SEQ ID NO: 79128.

[10529] The probes having the nucleotide sequence represented by SEQ ID NOS: 125059, 125060, 125061, 125062, 125063, 125064, 125065, 125066, 125067, 125068, 125069 were selected from the ORFs having the nucleotide sequence represented by SEQ ID NO: 79129.

[10530] The probes having the nucleotide sequence represented by SEQ ID NOS: 125070, 125071, 125072, 125073, 125074, 125075, 125076, 125077, 125078, 125079, 125080 were selected from the ORFs having the nucleotide sequence represented by SEQ ID NO: 79130.

[10531] The probes having the nucleotide sequence represented by SEQ ID NOS: 125081, 125082, 125083, 125084, 125085, 125086, 125087, 125088, 125089, 125090, 125091 were selected from the ORFs having the nucleotide sequence represented by SEQ ID NO: 79131.

[10532] The probes having the nucleotide sequence represented by SEQ ID NOS: 125092, 125093, 125094, 125095, 125096, 125097, 125098, 125099, 125100, 125101, 125102 were selected from the ORFs having the nucleotide sequence represented by SEQ ID NO: 79132.

[10533] The probes having the nucleotide sequence represented by SEQ ID NOS: 125103, 125104, 125105, 125106, 125107, 125108, 125109, 125110, 125111, 125112, 125113 were selected from the ORFs having the nucleotide sequence represented by SEQ ID NO: 79133.

[10534] The probes having the nucleotide sequence represented by SEQ ID NOS: 125114, 125115, 125116, 125117, 125118, 125119, 125120, 125121, 125122, 125123, 125124 were selected from the ORFs having the nucleotide sequence represented by SEQ ID NO: 79134.

[10535] The probes having the nucleotide sequence represented by SEQ ID NOS: 125125, 125126, 125127, 125128, 125129, 125130, 125131, 125132, 125133, 125134, 125135 were selected from the ORFs having the nucleotide sequence represented by SEQ ID NO: 79135.

[10536] The probes having the nucleotide sequence represented by SEQ ID NOS: 125136, 125137, 125138, 125139, 125140, 125141, 125142, 125143, 125144, 125145, 125146 were selected from the ORFs having the nucleotide sequence represented by SEQ ID NO: 79136.

[10537] The probes having the nucleotide sequence represented by SEQ ID NOS: 125147, 125148, 125149, 125150, 125151, 125152, 125153, 125154, 125155, 125156, 125157 were selected from the ORFs having the nucleotide sequence represented by SEQ ID NO: 79137.

[10538] The probes having the nucleotide sequence represented by SEQ ID NOS: 125158, 125159, 125160, 125161, 125162, 125163, 125164, 125165, 125166, 125167, 125168 were selected from the ORFs having the nucleotide sequence represented by SEQ ID NO: 79138.

[10539] The probes having the nucleotide sequence represented by SEQ ID NOS: 125169, 125170, 125171, 125172, 125173, 125174, 125175, 125176, 125177, 125178, 125179 were selected from the ORFs having the nucleotide sequence represented by SEQ ID NO: 79139.

[10540] The probes having the nucleotide sequence represented by SEQ ID NOS: 125180, 125181, 125182, 125183, 125184, 125185, 125186, 125187, 125188, 125189, 125190 were selected from the ORFs having the nucleotide sequence represented by SEQ ID NO: 79140.

[10541] The probes having the nucleotide sequence represented by SEQ ID NOS: 125191, 125192, 125193, 125194, 125195, 125196, 125197, 125198, 125199, 125200, 125201 were selected from the ORFs having the nucleotide sequence represented by SEQ ID NO: 79141.

[10542] The probes having the nucleotide sequence represented by SEQ ID NOS: 125202, 125203, 125204, 125205, 125206, 125207, 125208, 125209, 125210, 125211, 125212 were selected from the ORFs having the nucleotide sequence represented by SEQ ID NO: 79142.

[10543] The probes having the nucleotide sequence represented by SEQ ID NOS: 125213, 125214, 125215, 125216, 125217, 125218, 125219, 125220, 125221, 125222, 125223 were selected from the ORFs having the nucleotide sequence represented by SEQ ID NO: 79143.

[10544] The probes having the nucleotide sequence represented by SEQ ID NOS: 125224, 125225, 125226, 125227, 125228, 125229, 125230, 125231, 125232, 125233, 125234 were selected from the ORFs having the nucleotide sequence represented by SEQ ID NO: 79144.

[10545] The probes having the nucleotide sequence represented by SEQ ID NOS: 125235, 125236, 125237, 125238, 125239, 125240, 125241, 125242, 125243, 125244, 125245, 125246, 125247, 125248, 125249, 125250, 125251, 125252, 125253, 125254, 125255, 125256 were selected from the ORFs having the nucleotide sequence represented by SEQ ID NO: 79145.

[10546] The probes having the nucleotide sequence represented by SEQ ID NOS: 125257, 125258, 125259, 125260, 125261, 125262, 125263, 125264, 125265, 125266, 125267 were selected from the ORFs having the nucleotide sequence represented by SEQ ID NO: 79146.

[10547] The probes having the nucleotide sequence represented by SEQ ID NOS: 125268, 125269, 125270, 125271, 125272, 125273, 125274, 125275, 125276, 125277, 125278 were selected from the ORFs having the nucleotide sequence represented by SEQ ID NO: 79147.

[10548] The probes having the nucleotide sequence represented by SEQ ID NOS: 125279, 125280, 125281, 125282, 125283, 125284, 125285, 125286, 125287, 125288, 125289 were selected from the ORFs having the nucleotide sequence represented by SEQ ID NO: 79148.

[10549] The probes having the nucleotide sequence represented by SEQ ID NOS: 125290, 125291, 125292, 125293, 125294, 125295, 125296, 125297, 125298, 125299, 125300 were selected from the ORFs having the nucleotide sequence represented by SEQ ID NO: 79149.

[10550] The probes having the nucleotide sequence represented by SEQ ID NOS: 125301, 125302, 125303, 125304, 125305, 125306, 125307, 125308, 125309, 125310, 125311 were selected from the ORFs having the nucleotide sequence represented by SEQ ID NO: 79150.

[10551] The probes having the nucleotide sequence represented by SEQ ID NOS: 125312, 125313, 125314, 125315, 125316, 125317, 125318, 125319, 125320, 125321, 125322, 125323, 125324, 125325, 125326, 125327, 125328, 125329, 125330, 125331, 125332, 125333 were selected from the ORFs having the nucleotide sequence represented by SEQ ID NO: 79151.

[10552] The probes having the nucleotide sequence represented by SEQ ID NOS: 125334, 125335, 125336, 125337, 125338, 125339, 125340, 125341, 125342, 125343, 125344 were selected from the ORFs having the nucleotide sequence represented by SEQ ID NO: 79152.

[10553] The probes having the nucleotide sequence represented by SEQ ID NOS: 125345, 125346, 125347, 125348, 125349, 125350, 125351, 125352, 125353, 125354, 125355 were selected from the ORFs having the nucleotide sequence represented by SEQ ID NO: 79153.

[10554] The probes having the nucleotide sequence represented by SEQ ID NOS: 125356, 125357, 125358, 125359, 125360, 125361, 125362, 125363, 125364, 125365, 125366 were selected from the ORFs having the nucleotide sequence represented by SEQ ID NO: 79154.

[10555] The probes having the nucleotide sequence represented by SEQ ID NOS: 125367, 125368, 125369, 125370, 125371, 125372, 125373, 125374, 125375, 125376, 125377 were selected from the ORFs having the nucleotide sequence represented by SEQ ID NO: 79155.

[10556] The probes having the nucleotide sequence represented by SEQ ID NOS: 125378, 125379, 125380, 125381, 125382, 125383, 125384, 125385, 125386, 125387, 125388 were selected from the ORFs having the nucleotide sequence represented by SEQ ID NO: 79156.

[10557] The probes having the nucleotide sequence represented by SEQ ID NOS: 125389, 125390, 125391, 125392, 125393, 125394, 125395, 125396, 125397, 125398, 125399 were selected from the ORFs having the nucleotide sequence represented by SEQ ID NO: 79157.

[10558] The probes having the nucleotide sequence represented by SEQ ID NOS: 125400, 125401, 125402, 125403, 125404, 125405, 125406, 125407, 125408, 125409, 125410 were selected from the ORFs having the nucleotide sequence represented by SEQ ID NO: 79158.

[10559] The probes having the nucleotide sequence represented by SEQ ID NOS: 125411, 125412, 125413, 125414, 125415, 125416, 125417, 125418, 125419, 125420, 125421 were selected from the ORFs having the nucleotide sequence represented by SEQ ID NO: 79159.

[10560] The probes having the nucleotide sequence represented by SEQ ID NOS: 125422, 125423, 125424, 125425, 125426, 125427, 125428, 125429, 125430, 125431, 125432 were selected from the ORFs having the nucleotide sequence represented by SEQ ID NO: 79160.

[10561] The probes having the nucleotide sequence represented by SEQ ID NOS: 125433, 125434, 125435, 125436, 125437, 125438, 125439, 125440, 125441, 125442, 125443 were selected from the ORFs having the nucleotide sequence represented by SEQ ID NO: 79161.

[10562] The probes having the nucleotide sequence represented by SEQ ID NOS: 125444, 125445, 125446, 125447, 125448, 125449, 125450, 125451, 125452, 125453, 125454 were selected from the ORFs having the nucleotide sequence represented by SEQ ID NO: 79162.

[10563] The probes having the nucleotide sequence represented by SEQ ID NOS: 125455, 125456, 125457, 125458, 125459, 125460, 125461, 125462, 125463, 125464, 125465 were selected from the ORFs having the nucleotide sequence represented by SEQ ID NO: 79163.

[10564] The probes having the nucleotide sequence represented by SEQ ID NOS: 125466, 125467, 125468, 125469, 125470, 125471, 125472, 125473, 125474, 125475, 125476, 125477, 125478, 125479, 125480, 125481, 125482, 125483, 125484, 125485, 125486, 125487 were selected from the ORFs having the nucleotide sequence represented by SEQ ID NO: 79164.

[10565] The probes having the nucleotide sequence represented by SEQ ID NOS: 125488, 125489, 125490, 125491, 125492, 125493, 125494, 125495, 125496, 125497, 125498 were selected from the ORFs having the nucleotide sequence represented by SEQ ID NO: 79165.

[10566] The probes having the nucleotide sequence represented by SEQ ID NOS: 125499, 125500, 125501, 125502, 125503, 125504, 125505, 125506, 125507, 125508, 125509 were selected from the ORFs having the nucleotide sequence represented by SEQ ID NO: 79166.

[10567] The probes having the nucleotide sequence represented by SEQ ID NOS: 125510, 125511, 125512, 125513, 125514, 125515, 125516, 125517, 125518, 125519, 125520 were selected from the ORFs having the nucleotide sequence represented by SEQ ID NO: 79167.

[10568] The probes having the nucleotide sequence represented by SEQ ID NOS: 125521, 125522, 125523, 125524, 125525, 125526, 125527, 125528, 125529, 125530, 125531 were selected from the ORFs having the nucleotide sequence represented by SEQ ID NO: 79168.

[10569] The probes having the nucleotide sequence represented by SEQ ID NOS: 125532, 125533, 125534, 125535, 125536, 125537, 125538, 125539, 125540, 125541, 125542 were selected from the ORFs having the nucleotide sequence represented by SEQ ID NO: 79169.

[10570] The probes having the nucleotide sequence represented by SEQ ID NOS: 125543, 125544, 125545, 125546, 125547, 125548, 125549, 125550, 125551, 125552, 125553 were selected from the ORFs having the nucleotide sequence represented by SEQ ID NO: 79170.

[10571] The probes having the nucleotide sequence represented by SEQ ID NOS: 125554, 125555, 125556, 125557, 125558, 125559, 125560, 125561, 125562, 125563, 125564 were selected from the ORFs having the nucleotide sequence represented by SEQ ID NO: 79171.

[10572] The probes having the nucleotide sequence represented by SEQ ID NOS: 125565, 125566, 125567, 125568, 125569, 125570, 125571, 125572, 125573, 125574, 125575 were selected from the ORFs having the nucleotide sequence represented by SEQ ID NO: 79172.

[10573] The probes having the nucleotide sequence represented by SEQ ID NOS: 125576, 125577, 125578, 125579, 125580, 125581, 125582, 125583, 125584, 125585, 125586 were selected from the ORFs having the nucleotide sequence represented by SEQ ID NO: 79173.

[10574] The probes having the nucleotide sequence represented by SEQ ID NOS: 125587, 125588, 125589, 125590, 125591, 125592, 125593, 125594, 125595, 125596, 125597 were selected from the ORFs having the nucleotide sequence represented by SEQ ID NO: 79174.

[10575] The probes having the nucleotide sequence represented by SEQ ID NOS: 125598, 125599, 125600, 125601, 125602, 125603, 125604, 125605, 125606, 125607, 125608 were selected from the ORFs having the nucleotide sequence represented by SEQ ID NO: 79175.

[10576] The probes having the nucleotide sequence represented by SEQ ID NOS: 125609, 125610, 125611, 125612, 125613, 125614, 125615, 125616, 125617, 125618, 125619 were selected from the ORFs having the nucleotide sequence represented by SEQ ID NO: 79176.

[10577] The probes having the nucleotide sequence represented by SEQ ID NOS: 125620, 125621, 125622, 125623, 125624, 125625, 125626, 125627, 125628, 125629, 125630 were selected from the ORFs having the nucleotide sequence represented by SEQ ID NO: 79177.

[10578] The probes having the nucleotide sequence represented by SEQ ID NOS: 125631, 125632, 125633, 125634, 125635, 125636, 125637, 125638, 125639, 125640, 125641 were selected from the ORFs having the nucleotide sequence represented by SEQ ID NO: 79178.

[10579] The probes having the nucleotide sequence represented by SEQ ID NOS: 125642, 125643, 125644, 125645, 125646, 125647, 125648, 125649, 125650, 125651, 125652 were selected from the ORFs having the nucleotide sequence represented by SEQ ID NO: 79179.

[10580] The probes having the nucleotide sequence represented by SEQ ID NOS: 125653, 125654, 125655, 125656, 125657, 125658, 125659, 125660, 125661, 125662, 125663 were selected from the ORFs having the nucleotide sequence represented by SEQ ID NO: 79180.

[10581] The probes having the nucleotide sequence represented by SEQ ID NOS: 125664, 125665, 125666, 125667, 125668, 125669, 125670, 125671, 125672, 125673, 125674 were selected from the ORFs having the nucleotide sequence represented by SEQ ID NO: 79181.

[10582] The probes having the nucleotide sequence represented by SEQ ID NOS: 125675, 125676, 125677, 125678, 125679, 125680, 125681, 125682, 125683, 125684, 125685 were selected from the ORFs having the nucleotide sequence represented by SEQ ID NO: 79182.

[10583] The probes having the nucleotide sequence represented by SEQ ID NOS: 125686, 125687, 125688, 125689, 125690, 125691, 125692, 125693, 125694, 125695, 125696 were selected from the ORFs having the nucleotide sequence represented by SEQ ID NO: 79183.

[10584] The probes having the nucleotide sequence represented by SEQ ID NOS: 125697, 125698, 125699, 125700, 125701, 125702, 125703, 125704, 125705, 125706, 125707 were selected from the ORFs having the nucleotide sequence represented by SEQ ID NO: 79184.

[10585] The probes having the nucleotide sequence represented by SEQ ID NOS: 125708, 125709, 125710, 125711, 125712, 125713, 125714, 125715, 125716, 125717, 125718 were selected from the ORFs having the nucleotide sequence represented by SEQ ID NO: 79185.

[10586] The probes having the nucleotide sequence represented by SEQ ID NOS: 125719, 125720, 125721, 125722, 125723, 125724, 125725, 125726, 125727, 125728, 125729 were selected from the ORFs having the nucleotide sequence represented by SEQ ID NO: 79186.

[10587] The probes having the nucleotide sequence represented by SEQ ID NOS: 125730, 125731, 125732, 125733, 125734, 125735, 125736, 125737, 125738, 125739, 125740 were selected from the ORFs having the nucleotide sequence represented by SEQ ID NO: 79187.

[10588] The probes having the nucleotide sequence represented by SEQ ID NOS: 125741, 125742, 125743, 125744, 125745, 125746, 125747, 125748, 125749, 125750, 125751 were selected from the ORFs having the nucleotide sequence represented by SEQ ID NO: 79188.

[10589] The probes having the nucleotide sequence represented by SEQ ID NOS: 125752, 125753, 125754, 125755, 125756, 125757, 125758, 125759, 125760, 125761, 125762 were selected from the ORFs having the nucleotide sequence represented by SEQ ID NO: 79189.

[10590] The probes having the nucleotide sequence represented by SEQ ID NOS: 125763, 125764, 125765, 125766, 125767, 125768, 125769, 125770, 125771, 125772, 125773 were selected from the ORFs having the nucleotide sequence represented by SEQ ID NO: 79190.

[10591] The probes having the nucleotide sequence represented by SEQ ID NOS: 125774, 125775, 125776, 125777, 125778, 125779, 125780, 125781, 125782, 125783, 125784 were selected from the ORFs having the nucleotide sequence represented by SEQ ID NO: 79191.

[10592] The probes having the nucleotide sequence represented by SEQ ID NOS: 125785, 125786, 125787, 125788, 125789, 125790, 125791, 125792, 125793, 125794, 125795 were selected from the ORFs having the nucleotide sequence represented by SEQ ID NO: 79192.

[10593] The probes having the nucleotide sequence represented by SEQ ID NOS: 125796, 125797, 125798, 125799, 125800, 125801, 125802, 125803, 125804, 125805, 125806 were selected from the ORFs having the nucleotide sequence represented by SEQ ID NO: 79193.

[10594] The probes having the nucleotide sequence represented by SEQ ID NOS: 125807, 125808, 125809, 125810, 125811, 125812, 125813, 125814, 125815, 125816, 125817 were selected from the ORFs having the nucleotide sequence represented by SEQ ID NO: 79194.

[10595] The probes having the nucleotide sequence represented by SEQ ID NOS: 125818, 125819, 125820, 125821, 125822, 125823, 125824, 125825, 125826, 125827, 125828 were selected from the ORFs having the nucleotide sequence represented by SEQ ID NO: 79195.

[10596] The probes having the nucleotide sequence represented by SEQ ID NOS: 125829, 125830, 125831, 125832, 125833, 125834, 125835, 125836, 125837, 125838, 125839 were selected from the ORFs having the nucleotide sequence represented by SEQ ID NO: 79196.

[10597] The probes having the nucleotide sequence represented by SEQ ID NOS: 125840, 125841, 125842, 125843, 125844, 125845, 125846, 125847, 125848, 125849, 125850 were selected from the ORFs having the nucleotide sequence represented by SEQ ID NO: 79197.

[10598] The probes having the nucleotide sequence represented by SEQ ID NOS: 125851, 125852, 125853, 125854, 125855, 125856, 125857, 125858, 125859, 125860, 125861 were selected from the ORFs having the nucleotide sequence represented by SEQ ID NO: 79198.

[10599] The probes having the nucleotide sequence represented by SEQ ID NOS: 125862, 125863, 125864, 125865, 125866, 125867, 125868, 125869, 125870, 125871, 125872 were selected from the ORFs having the nucleotide sequence represented by SEQ ID NO: 79199.

[10600] The probes having the nucleotide sequence represented by SEQ ID NOS: 125873, 125874, 125875, 125876, 125877, 125878, 125879, 125880, 125881, 125882, 125883 were selected from the ORFs having the nucleotide sequence represented by SEQ ID NO: 79200.

[10601] The probes having the nucleotide sequence represented by SEQ ID NOS: 125884, 125885, 125886, 125887, 125888, 125889, 125890, 125891, 125892, 125893, 125894 were selected from the ORFs having the nucleotide sequence represented by SEQ ID NO: 79201.

[10602] The probes having the nucleotide sequence represented by SEQ ID NOS: 125895, 125896, 125897, 125898, 125899, 125900, 125901, 125902, 125903, 125904, 125905 were selected from the ORFs having the nucleotide sequence represented by SEQ ID NO: 79202.

[10603] The probes having the nucleotide sequence represented by SEQ ID NOS: 125906, 125907, 125908, 125909, 125910, 125911, 125912, 125913, 125914, 125915, 125916 were selected from the ORFs having the nucleotide sequence represented by SEQ ID NO: 79203.

[10604] The probes having the nucleotide sequence represented by SEQ ID NOS: 125917, 125918, 125919, 125920, 125921, 125922, 125923, 125924, 125925, 125926, 125927 were selected from the ORFs having the nucleotide sequence represented by SEQ ID NO: 79204.

[10605] The probes having the nucleotide sequence represented by SEQ ID NOS: 125928, 125929, 125930, 125931, 125932, 125933, 125934, 125935, 125936, 125937, 125938 were selected from the ORFs having the nucleotide sequence represented by SEQ ID NO: 79205.

[10606] The probes having the nucleotide sequence represented by SEQ ID NOS: 125939, 125940, 125941, 125942, 125943, 125944, 125945, 125946, 125947, 125948, 125949 were selected from the ORFs having the nucleotide sequence represented by SEQ ID NO: 79206.

[10607] The probes having the nucleotide sequence represented by SEQ ID NOS: 125950, 125951, 125952, 125953, 125954, 125955, 125956, 125957, 125958, 125959, 125960 were selected from the ORFs having the nucleotide sequence represented by SEQ ID NO: 79207.

[10608] The probes having the nucleotide sequence represented by SEQ ID NOS: 125961, 125962, 125963, 125964, 125965, 125966, 125967, 125968, 125969, 125970, 125971, 125972, 125973, 125974, 125975, 125976, 125977, 125978, 125979, 125980, 125981, 125982 were selected from the ORFs having the nucleotide sequence represented by SEQ ID NO: 79208.

[10609] The probes having the nucleotide sequence represented by SEQ ID NOS: 125983, 125984, 125985, 125986, 125987, 125988, 125989, 125990, 125991, 125992, 125993 were selected from the ORFs having the nucleotide sequence represented by SEQ ID NO: 79209.

[10610] The probes having the nucleotide sequence represented by SEQ ID NOS: 125994, 125995, 125996, 125997, 125998, 125999, 126000, 126001, 126002, 126003, 126004 were selected from the ORFs having the nucleotide sequence represented by SEQ ID NO: 79210.

[10611] The probes having the nucleotide sequence represented by SEQ ID NOS: 126005, 126006, 126007, 126008, 126009, 126010, 126011, 126012, 126013, 126014, 126015, 126016, 126017, 126018, 126019, 126020, 126021, 126022, 126023, 126024, 126025, 126026 were selected from the ORFs having the nucleotide sequence represented by SEQ ID NO: 79211.

[10612] The probes having the nucleotide sequence represented by SEQ ID NOS: 126027, 126028, 126029, 126030, 126031, 126032, 126033, 126034, 126035, 126036, 126037 were selected from the ORFs having the nucleotide sequence represented by SEQ ID NO: 79212.

[10613] The probes having the nucleotide sequence represented by SEQ ID NOS: 126038, 126039, 126040, 126041, 126042, 126043, 126044, 126045, 126046, 126047, 126048 were selected from the ORFs having the nucleotide sequence represented by SEQ ID NO: 79213.

[10614] The probes having the nucleotide sequence represented by SEQ ID NOS: 126049, 126050, 126051, 126052, 126053, 126054, 126055, 126056, 126057, 126058, 126059 were selected from the ORFs having the nucleotide sequence represented by SEQ ID NO: 79214.

[10615] The probes having the nucleotide sequence represented by SEQ ID NOS: 126060, 126061, 126062, 126063, 126064, 126065, 126066, 126067, 126068, 126069, 126070 were selected from the ORFs having the nucleotide sequence represented by SEQ ID NO: 79215.

[10616] The probes having the nucleotide sequence represented by SEQ ID NOS: 126071, 126072, 126073, 126074, 126075, 126076, 126077, 126078, 126079, 126080, 126081 were selected from the ORFs having the nucleotide sequence represented by SEQ ID NO: 79216.

[10617] The probes having the nucleotide sequence represented by SEQ ID NOS: 126082, 126083, 126084, 126085, 126086, 126087, 126088, 126089, 126090, 126091, 126092 were selected from the ORFs having the nucleotide sequence represented by SEQ ID NO: 79217.

[10618] The probes having the nucleotide sequence represented by SEQ ID NOS: 126093, 126094, 126095, 126096, 126097, 126098, 126099, 126100, 126101, 126102, 126103 were selected from the ORFs having the nucleotide sequence represented by SEQ ID NO: 79218.

[10619] The probes having the nucleotide sequence represented by SEQ ID NOS: 126104, 126105, 126106, 126107, 126108, 126109, 126110, 126111, 126112, 126113, 126114 were selected from the ORFs having the nucleotide sequence represented by SEQ ID NO: 79219.

[10620] The probes having the nucleotide sequence represented by SEQ ID NOS: 126115, 126116, 126117, 126118, 126119, 126120, 126121, 126122, 126123, 126124, 126125, 126126, 126127, 126128, 126129, 126130, 126131, 126132, 126133, 126134, 126135, 126136 were selected from the ORFs having the nucleotide sequence represented by SEQ ID NO: 79220.

[10621] The probes having the nucleotide sequence represented by SEQ ID NOS: 126137, 126138, 126139, 126140, 126141, 126142, 126143, 126144, 126145, 126146, 126147 were selected from the ORFs having the nucleotide sequence represented by SEQ ID NO: 79221.

[10622] The probes having the nucleotide sequence represented by SEQ ID NOS: 126148, 126149, 126150, 126151, 126152, 126153, 126154, 126155, 126156, 126157, 126158 were selected from the ORFs having the nucleotide sequence represented by SEQ ID NO: 79222.

[10623] The probes having the nucleotide sequence represented by SEQ ID NOS: 126159, 126160, 126161, 126162, 126163, 126164, 126165, 126166, 126167, 126168, 126169 were selected from the ORFs having the nucleotide sequence represented by SEQ ID NO: 79223.

[10624] The probes having the nucleotide sequence represented by SEQ ID NOS: 126170, 126171, 126172, 126173, 126174, 126175, 126176, 126177, 126178, 126179, 126180 were selected from the ORFs having the nucleotide sequence represented by SEQ ID NO: 79224.

[10625] The probes having the nucleotide sequence represented by SEQ ID NOS: 126181, 126182, 126183, 126184, 126185, 126186, 126187, 126188, 126189, 126190, 126191 were selected from the OREs having the nucleotide sequence represented by SEQ ID NO: 79225.

[10626] The probes having the nucleotide sequence represented by SEQ ID NOS: 126192, 126193, 126194, 126195, 126196, 126197, 126198, 126199, 126200, 126201, 126202 were selected from the ORFs having the nucleotide sequence represented by SEQ ID NO: 79226.

[10627] The probes having the nucleotide sequence represented by SEQ ID NOS: 126203, 126204, 126205, 126206, 126207, 126208, 126209, 126210, 126211, 126212, 126213 were selected from the ORFs having the nucleotide sequence represented by SEQ ID NO: 79227.

[10628] The probes having the nucleotide sequence represented by SEQ ID NOS: 126214, 126215, 126216, 126217, 126218, 126219, 126220, 126221, 126222, 126223, 126224, 126225, 126226, 126227, 126228, 126229, 126230, 126231, 126232, 126233, 126234, 126235 were selected from the ORFs having the nucleotide sequence represented by SEQ ID NO: 79228.

[10629] The probes having the nucleotide sequence represented by SEQ ID NOS: 126236, 126237, 126238, 126239, 126240, 126241, 126242, 126243, 126244, 126245, 126246 were selected from the ORFs having the nucleotide sequence represented by SEQ ID NO: 79229.

[10630] The probes having the nucleotide sequence represented by SEQ ID NOS: 126247, 126248, 126249, 126250, 126251, 126252, 126253, 126254, 126255, 126256, 126257 were selected from the ORFs having the nucleotide sequence represented by SEQ ID NO: 79230.

[10631] The probes having the nucleotide sequence represented by SEQ ID NOS: 126258, 126259, 126260, 126261, 126262, 126263, 126264, 126265, 126266, 126267, 126268 were selected from the ORFs having the nucleotide sequence represented by SEQ ID NO: 79231.

[10632] The probes having the nucleotide sequence represented by SEQ ID NOS: 126269, 126270, 126271, 126272, 126273, 126274, 126275, 126276, 126277, 126278, 126279, 126280, 126281, 126282, 126283, 126284, 126285, 126286, 126287, 126288, 126289, 126290 were selected from the ORFs having the nucleotide sequence represented by SEQ ID NO: 79232.

[10633] The probes having the nucleotide sequence represented by SEQ ID NOS: 126291, 126292, 126293, 126294, 126295, 126296, 126297, 126298, 126299, 126300, 126301 were selected from the ORFs having the nucleotide sequence represented by SEQ ID NO: 79233.

[10634] The probes having the nucleotide sequence represented by SEQ ID NOS: 126302, 126303, 126304, 126305, 126306, 126307, 126308, 126309, 126310, 126311, 126312 were selected from the ORFs having the nucleotide sequence represented by SEQ ID NO: 79234.

[10635] The probes having the nucleotide sequence represented by SEQ ID NOS: 126313, 126314, 126315, 126316, 126317, 126318, 126319, 126320, 126321, 126322, 126323 were selected from the ORFs having the nucleotide sequence represented by SEQ ID NO: 79235.

[10636] The probes having the nucleotide sequence represented by SEQ ID NOS: 126324, 126325, 126326, 126327, 126328, 126329, 126330, 126331, 126332, 126333, 126334 were selected from the ORFs having the nucleotide sequence represented by SEQ ID NO: 79236.

[10637] The probes having the nucleotide sequence represented by SEQ ID NOS: 126335, 126336, 126337, 126338, 126339, 126340, 126341, 126342, 126343, 126344, 126345 were selected from the ORFs having the nucleotide sequence represented by SEQ ID NO: 79237.

[10638] The probes having the nucleotide sequence represented by SEQ ID NOS: 126346, 126347, 126348, 126349, 126350, 126351, 126352, 126353, 126354, 126355, 126356 were selected from the ORFs having the nucleotide sequence represented by SEQ ID NO: 79238.

[10639] The probes having the nucleotide sequence represented by SEQ ID NOS: 126357, 126358, 126359, 126360, 126361, 126362, 126363, 126364, 126365, 126366, 126367 were selected from the ORFs having the nucleotide sequence represented by SEQ ID NO: 79239.

[10640] The probes having the nucleotide sequence represented by SEQ ID NOS: 126368, 126369, 126370, 126371, 126372, 126373, 126374, 126375, 126376, 126377, 126378 were selected from the ORFs having the nucleotide sequence represented by SEQ ID NO: 79240.

[10641] The probes having the nucleotide sequence represented by SEQ ID NOS: 126379, 126380, 126381, 126382, 126383, 126384, 126385, 126386, 126387, 126388, 126389 were selected from the ORFs having the nucleotide sequence represented by SEQ ID NO: 79241.

[10642] The probes having the nucleotide sequence represented by SEQ ID NOS: 126390, 126391, 126392, 126393, 126394, 126395, 126396, 126397, 126398, 126399, 126400 were selected from the ORFs having the nucleotide sequence represented by SEQ ID NO: 79242.

[10643] The probes having the nucleotide sequence represented by SEQ ID NOS: 126401, 126402, 126403, 126404, 126405, 126406, 126407, 126408, 126409, 126410, 126411 were selected from the ORFs having the nucleotide sequence represented by SEQ ID NO: 79243.

[10644] The probes having the nucleotide sequence represented by SEQ ID NOS: 126412, 126413, 126414, 126415, 126416, 126417, 126418, 126419, 126420, 126421, 126422 were selected from the ORFs having the nucleotide sequence represented by SEQ ID NO: 79244.

[10645] The probes having the nucleotide sequence represented by SEQ ID NOS: 126423, 126424, 126425, 126426, 126427, 126428, 126429, 126430, 126431, 126432, 126433 were selected from the ORFs having the nucleotide sequence represented by SEQ ID NO: 79245.

[10646] The probes having the nucleotide sequence represented by SEQ ID NOS: 126434, 126435, 126436, 126437, 126438, 126439, 126440, 126441, 126442, 126443, 126444 were selected from the ORFs having the nucleotide sequence represented by SEQ ID NO: 79246.

[10647] The probes having the nucleotide sequence represented by SEQ ID NOS: 126445, 126446, 126447, 126448, 126449, 126450, 126451, 126452, 126453, 126454, 126455 were selected from the ORFs having the nucleotide sequence represented by SEQ ID NO: 79247.

[10648] The probes having the nucleotide sequence represented by SEQ ID NOS: 126456, 126457, 126458, 126459, 126460, 126461, 126462, 126463, 126464, 126465, 126466 were selected from the ORFs having the nucleotide sequence represented by SEQ ID NO: 79248.

[10649] The probes having the nucleotide sequence represented by SEQ ID NOS: 126467, 126468, 126469, 126470, 126471, 126472, 126473, 126474, 126475, 126476, 126477 were selected from the ORFs having the nucleotide sequence represented by SEQ ID NO: 79249.

[10650] The probes having the nucleotide sequence represented by SEQ ID NOS: 126478, 126479, 126480, 126481, 126482, 126483, 126484, 126485, 126486, 126487, 126488 were selected from the ORFs having the nucleotide sequence represented by SEQ ID NO: 79250.

[10651] The probes having the nucleotide sequence represented by SEQ ID NOS: 126489, 126490, 126491, 126492, 126493, 126494, 126495, 126496, 126497, 126498, 126499 were selected from the ORFs having the nucleotide sequence represented by SEQ ID NO: 79251.

[10652] The probes having the nucleotide sequence represented by SEQ ID NOS: 126500, 126501, 126502, 126503, 126504, 126505, 126506, 126507, 126508, 126509, 126510 were selected from the ORFs having the nucleotide sequence represented by SEQ ID NO: 79252.

[10653] The probes having the nucleotide sequence represented by SEQ ID NOS: 126511, 126512, 126513, 126514, 126515, 126516, 126517, 126518, 126519, 126520, 126521 were selected from the ORFs having the nucleotide sequence represented by SEQ ID NO: 79253.

[10654] The probes having the nucleotide sequence represented by SEQ ID NOS: 126522, 126523, 126524, 126525, 126526, 126527, 126528, 126529, 126530, 126531, 126532 were selected from the ORFs having the nucleotide sequence represented by SEQ ID NO: 79254.

[10655] The probes having the nucleotide sequence represented by SEQ ID NOS: 126533, 126534, 126535, 126536, 126537, 126538, 126539, 126540, 126541, 126542, 126543 were selected from the ORFs having the nucleotide sequence represented by SEQ ID NO: 79255.

[10656] The probes having the nucleotide sequence represented by SEQ ID NOS: 126544, 126545, 126546, 126547, 126548, 126549, 126550, 126551, 126552, 126553, 126554 were selected from the ORFs having the nucleotide sequence represented by SEQ ID NO: 79256.

[10657] The probes having the nucleotide sequence represented by SEQ ID NOS: 126555, 126556, 126557, 126558, 126559, 126560, 126561, 126562, 126563, 126564, 126565 were selected from the ORFs having the nucleotide sequence represented by SEQ ID NO: 79257.

[10658] The probes having the nucleotide sequence represented by SEQ ID NOS: 126566, 126567, 126568, 126569, 126570, 126571, 126572, 126573, 126574, 126575, 126576 were selected from the ORFs having the nucleotide sequence represented by SEQ ID NO: 79258.

[10659] The probes having the nucleotide sequence represented by SEQ ID NOS: 126577, 126578, 126579, 126580, 126581, 126582, 126583, 126584, 126585, 126586, 126587 were selected from the ORFs having the nucleotide sequence represented by SEQ ID NO: 79259.

[10660] The probes having the nucleotide sequence represented by SEQ ID NOS: 126588, 126589, 126590, 126591, 126592, 126593, 126594, 126595, 126596, 126597, 126598 were selected from the ORFs having the nucleotide sequence represented by SEQ ID NO: 79260.

[10661] The probes having the nucleotide sequence represented by SEQ ID NOS: 126599, 126600, 126601, 126602, 126603, 126604, 126605, 126606, 126607, 126608, 126609 were selected from the ORFs having the nucleotide sequence represented by SEQ ID NO: 79261.

[10662] The probes having the nucleotide sequence represented by SEQ ID NOS: 126610, 126611, 126612, 126613, 126614, 126615, 126616, 126617, 126618, 126619, 126620 were selected from the ORFs having the nucleotide sequence represented by SEQ ID NO: 79262.

[10663] The probes having the nucleotide sequence represented by SEQ ID NOS: 126621, 126622, 126623, 126624, 126625, 126626, 126627, 126628, 126629, 126630, 126631 were selected from the ORFs having the nucleotide sequence represented by SEQ ID NO: 79263.

[10664] The probes having the nucleotide sequence represented by SEQ ID NOS: 126632, 126633, 126634, 126635, 126636, 126637, 126638, 126639, 126640, 126641, 126642 were selected from the ORFs having the nucleotide sequence represented by SEQ ID NO: 79264.

[10665] The probes having the nucleotide sequence represented by SEQ ID NOS: 126643, 126644, 126645, 126646, 126647, 126648, 126649, 126650, 126651, 126652, 126653 were selected from the ORFs having the nucleotide sequence represented by SEQ ID NO: 79265.

[10666] The probes having the nucleotide sequence represented by SEQ ID NOS: 126654, 126655, 126656, 126657, 126658, 126659, 126660, 126661, 126662, 126663, 126664 were selected from the ORFs having the nucleotide sequence represented by SEQ ID NO: 79266.

[10667] The probes having the nucleotide sequence represented by SEQ ID NOS: 126665, 126666, 126667, 126668, 126669, 126670, 126671, 126672, 126673, 126674, 126675 were selected from the ORFs having the nucleotide sequence represented by SEQ ID NO: 79267.

[10668] The probes having the nucleotide sequence represented by SEQ ID NOS: 126676, 126677, 126678, 126679, 126680, 126681, 126682, 126683, 126684, 126685, 126686 were selected from the ORFs having the nucleotide sequence represented by SEQ ID NO: 79268.

[10669] The probes having the nucleotide sequence represented by SEQ ID NOS: 126687, 126688, 126689, 126690, 126691, 126692, 126693, 126694, 126695, 126696, 126697 were selected from the ORFs having the nucleotide sequence represented by SEQ ID NO: 79269.

[10670] The probes having the nucleotide sequence represented by SEQ ID NOS: 126698, 126699, 126700, 126701, 126702, 126703, 126704, 126705, 126706, 126707, 126708 were selected from the ORFs having the nucleotide sequence represented by SEQ ID NO: 79270.

[10671] The probes having the nucleotide sequence represented by SEQ ID NOS: 126709, 126710, 126711, 126712, 126713, 126714, 126715, 126716, 126717, 126718, 126719 were selected from the ORFs having the nucleotide sequence represented by SEQ ID NO: 79271.

[10672] The probes having the nucleotide sequence represented by SEQ ID NOS: 126720, 126721, 126722, 126723, 126724, 126725, 126726, 126727, 126728, 126729, 126730 were selected from the ORFs having the nucleotide sequence represented by SEQ ID NO: 79272.

[10673] The probes having the nucleotide sequence represented by SEQ ID NOS: 126731, 126732, 126733, 126734, 126735, 126736, 126737, 126738, 126739, 126740, 126741 were selected from the ORFs having the nucleotide sequence represented by SEQ ID NO: 79273.

[10674] The probes having the nucleotide sequence represented by SEQ ID NOS: 126742, 126743, 126744, 126745, 126746, 126747, 126748, 126749, 126750, 126751, 126752 were selected from the ORFs having the nucleotide sequence represented by SEQ ID NO: 79274.

[10675] The probes having the nucleotide sequence represented by SEQ ID NOS: 126753, 126754, 126755, 126756, 126757, 126758, 126759, 126760, 126761, 126762, 126763 were selected from the ORFs having the nucleotide sequence represented by SEQ ID NO: 79275.

[10676] The probes having the nucleotide sequence represented by SEQ ID NOS: 126764, 126765, 126766, 126767, 126768, 126769, 126770, 126771, 126772, 126773, 126774 were selected from the ORFs having the nucleotide sequence represented by SEQ ID NO: 79276.

[10677] The probes having the nucleotide sequence represented by SEQ ID NOS: 126775, 126776, 126777, 126778, 126779, 126780, 126781, 126782, 126783, 126784, 126785 were selected from the ORFs having the nucleotide sequence represented by SEQ ID NO: 79277.

[10678] The probes having the nucleotide sequence represented by SEQ ID NOS: 126786, 126787, 126788, 126789, 126790, 126791, 126792, 126793, 126794, 126795, 126796 were selected from the ORFs having the nucleotide sequence represented by SEQ ID NO: 79278.

[10679] The probes having the nucleotide sequence represented by SEQ ID NOS: 126797, 126798, 126799, 126800, 126801, 126802, 126803, 126804, 126805, 126806, 126807 were selected from the ORFs having the nucleotide sequence represented by SEQ ID NO: 79279.

[10680] The probes having the nucleotide sequence represented by SEQ ID NOS: 126808, 126809, 126810, 126811, 126812, 126813, 126814, 126815, 126816, 126817, 126818 were selected from the ORFs having the nucleotide sequence represented by SEQ ID NO: 79280.

[10681] The probes having the nucleotide sequence represented by SEQ ID NOS: 126819, 126820, 126821, 126822, 126823, 126824, 126825, 126826, 126827, 126828, 126829 were selected from the ORFs having the nucleotide sequence represented by SEQ ID NO: 79281.

[10682] The probes having the nucleotide sequence represented by SEQ ID NOS: 126830, 126831, 126832, 126833, 126834, 126835, 126836, 126837, 126838, 126839, 126840 were selected from the ORFs having the nucleotide sequence represented by SEQ ID NO: 79282.

[10683] The probes having the nucleotide sequence represented by SEQ ID NOS: 126841, 126842, 126843, 126844, 126845, 126846, 126847, 126848, 126849, 126850, 126851, 126852, 126853, 126854, 126855, 126856, 126857, 126858, 126859, 126860, 126861, 126862 were selected from the ORFs having the nucleotide sequence represented by SEQ ID NO: 79283.

[10684] The probes having the nucleotide sequence represented by SEQ ID NOS: 126863, 126864, 126865, 126866, 126867, 126868, 126869, 126870, 126871, 126872, 126873 were selected from the ORFs having the nucleotide sequence represented by SEQ ID NO: 79284.

[10685] The probes having the nucleotide sequence represented by SEQ ID NOS: 126874, 126875, 126876, 126877, 126878, 126879, 126880, 126881, 126882, 126883, 126884 were selected from the ORFs having the nucleotide sequence represented by SEQ ID NO: 79285.

[10686] The probes having the nucleotide sequence represented by SEQ ID NOS: 126885, 126886, 126887, 126888, 126889, 126890, 126891, 126892, 126893, 126894, 126895 were selected from the ORFs having the nucleotide sequence represented by SEQ ID NO: 79286.

[10687] The probes having the nucleotide sequence represented by SEQ ID NOS: 126896, 126897, 126898, 126899, 126900, 126901, 126902, 126903, 126904, 126905, 126906 were selected from the ORFs having the nucleotide sequence represented by SEQ ID NO: 79287.

[10688] The probes having the nucleotide sequence represented by SEQ ID NOS: 126907, 126908, 126909, 126910, 126911, 126912, 126913, 126914, 126915, 126916, 126917 were selected from the ORFs having the nucleotide sequence represented by SEQ ID NO: 79288.

[10689] The probes having the nucleotide sequence represented by SEQ ID NOS: 126918, 126919, 126920, 126921, 126922, 126923, 126924, 126925, 126926, 126927, 126928 were selected from the ORFs having the nucleotide sequence represented by SEQ ID NO: 79289.

[10690] The probes having the nucleotide sequence represented by SEQ ID NOS: 126929, 126930, 126931, 126932, 126933, 126934, 126935, 126936, 126937, 126938, 126939 were selected from the ORFs having the nucleotide sequence represented by SEQ ID NO: 79290.

[10691] The probes having the nucleotide sequence represented by SEQ ID NOS: 126940, 126941, 126942, 126943, 126944, 126945, 126946, 126947, 126948, 126949, 126950 were selected from the ORFs having the nucleotide sequence represented by SEQ ID NO: 79291.

[10692] The probes having the nucleotide sequence represented by SEQ ID NOS: 126951, 126952, 126953, 126954, 126955, 126956, 126957, 126958, 126959, 126960, 126961 were selected from the ORFs having the nucleotide sequence represented by SEQ ID NO: 79292.

[10693] The probes having the nucleotide sequence represented by SEQ ID NOS: 126962, 126963, 126964, 126965, 126966, 126967, 126968, 126969, 126970, 126971, 126972 were selected from the ORFs having the nucleotide sequence represented by SEQ ID NO: 79293.

[10694] The probes having the nucleotide sequence represented by SEQ ID NOS: 126973, 126974, 126975, 126976, 126977, 126978, 126979, 126980, 126981, 126982, 126983 were selected from the ORFs having the nucleotide sequence represented by SEQ ID NO: 79294.

[10695] The probes having the nucleotide sequence represented by SEQ ID NOS: 126984, 126985, 126986, 126987, 126988, 126989, 126990, 126991, 126992, 126993, 126994 were selected from the ORFs having the nucleotide sequence represented by SEQ ID NO: 79295.

[10696] The probes having the nucleotide sequence represented by SEQ ID NOS: 126995, 126996, 126997, 126998, 126999, 127000, 127001, 127002, 127003, 127004, 127005 were selected from the ORFs having the nucleotide sequence represented by SEQ ID NO: 79296.

[10697] The probes having the nucleotide sequence represented by SEQ ID NOS: 127006, 127007, 127008, 127009, 127010, 127011, 127012, 127013, 127014, 127015, 127016 were selected from the ORFs having the nucleotide sequence represented by SEQ ID NO: 79297.

[10698] The probes having the nucleotide sequence represented by SEQ ID NOS: 127017, 127018, 127019, 127020, 127021, 127022, 127023, 127024, 127025, 127026, 127027 were selected from the ORFs having the nucleotide sequence represented by SEQ ID NO: 79298.

[10699] The probes having the nucleotide sequence represented by SEQ ID NOS: 127028, 127029, 127030, 127031, 127032, 127033, 127034, 127035, 127036, 127037, 127038 were selected from the ORFs having the nucleotide sequence represented by SEQ ID NO: 79299.

[10700] The probes having the nucleotide sequence represented by SEQ ID NOS: 127039, 127040, 127041, 127042, 127043, 127044, 127045, 127046, 127047, 127048, 127049 were selected from the ORFs having the nucleotide sequence represented by SEQ ID NO: 79300.

[10701] The probes having the nucleotide sequence represented by SEQ ID NOS: 127050, 127051, 127052, 127053, 127054, 127055, 127056, 127057, 127058, 127059, 127060 were selected from the ORFs having the nucleotide sequence represented by SEQ ID NO: 79301.

[10702] The probes having the nucleotide sequence represented by SEQ ID NOS: 127061, 127062, 127063, 127064, 127065, 127066, 127067, 127068, 127069, 127070, 127071 were selected from the ORFs having the nucleotide sequence represented by SEQ ID NO: 79302.

[10703] The probes having the nucleotide sequence represented by SEQ ID NOS: 127072, 127073, 127074, 127075, 127076, 127077, 127078, 127079, 127080, 127081, 127082 were selected from the ORFs having the nucleotide sequence represented by SEQ ID NO: 79303.

[10704] The probes having the nucleotide sequence represented by SEQ ID NOS: 127083, 127084, 127085, 127086, 127087, 127088, 127089, 127090, 127091, 127092, 127093 were selected from the ORFs having the nucleotide sequence represented by SEQ ID NO: 79304.

[10705] The probes having the nucleotide sequence represented by SEQ ID NOS: 127094, 127095, 127096, 127097, 127098, 127099, 127100, 127101, 127102, 127103, 127104 were selected from the ORFs having the nucleotide sequence represented by SEQ ID NO: 79305.

[10706] The probes having the nucleotide sequence represented by SEQ ID NOS: 127105, 127106, 127107, 127108, 127109, 127110, 127111, 127112, 127113, 127114, 127115 were selected from the ORFs having the nucleotide sequence represented by SEQ ID NO: 79306.

[10707] The probes having the nucleotide sequence represented by SEQ ID NOS: 127116, 127117, 127118, 127119, 127120, 127121, 127122, 127123, 127124, 127125, 127126 were selected from the ORFs having the nucleotide sequence represented by SEQ ID NO: 79307.

[10708] The probes having the nucleotide sequence represented by SEQ ID NOS: 127127, 127128, 127129, 127130, 127131, 127132, 127133, 127134, 127135, 127136, 127137 were selected from the ORFs having the nucleotide sequence represented by SEQ ID NO: 79308.

[10709] The probes having the nucleotide sequence represented by SEQ ID NOS: 127138, 127139, 127140, 127141, 127142, 127143, 127144, 127145, 127146, 127147, 127148 were selected from the ORFs having the nucleotide sequence represented by SEQ ID NO: 79309.

[10710] The probes having the nucleotide sequence represented by SEQ ID NOS: 127149, 127150, 127151, 127152, 127153, 127154, 127155, 127156, 127157, 127158, 127159 were selected from the ORFs having the nucleotide sequence represented by SEQ ID NO: 79310.

[10711] The probes having the nucleotide sequence represented by SEQ ID NOS: 127160, 127161, 127162, 127163, 127164, 127165, 127166, 127167, 127168, 127169, 127170 were selected from the ORFs having the nucleotide sequence represented by SEQ ID NO: 79311.

[10712] The probes having the nucleotide sequence represented by SEQ ID NOS: 127171, 127172, 127173, 127174, 127175, 127176, 127177, 127178, 127179, 127180, 127181 were selected from the ORFs having the nucleotide sequence represented by SEQ ID NO: 79312.

[10713] The probes having the nucleotide sequence represented by SEQ ID NOS: 127182, 127183, 127184, 127185, 127186, 127187, 127188, 127189, 127190, 127191, 127192 were selected from the ORFs having the nucleotide sequence represented by SEQ ID NO: 79313.

[10714] The probes having the nucleotide sequence represented by SEQ ID NOS: 127193, 127194, 127195, 127196, 127197, 127198, 127199, 127200, 127201, 127202, 127203 were selected from the ORFs having the nucleotide sequence represented by SEQ ID NO: 79314.

[10715] The probes having the nucleotide sequence represented by SEQ ID NOS: 127204, 127205, 127206, 127207, 127208, 127209, 127210, 127211, 127212, 127213, 127214 were selected from the ORFs having the nucleotide sequence represented by SEQ ID NO: 79315.

[10716] The probes having the nucleotide sequence represented by SEQ ID NOS: 127215, 127216, 127217, 127218, 127219, 127220, 127221, 127222, 127223, 127224, 127225 were selected from the ORFs having the nucleotide sequence represented by SEQ ID NO: 79316.

[10717] The probes having the nucleotide sequence represented by SEQ ID NOS: 127226, 127227, 127228, 127229, 127230, 127231, 127232, 127233, 127234, 127235, 127236 were selected from the ORFs having the nucleotide sequence represented by SEQ ID NO: 79317.

[10718] The probes having the nucleotide sequence represented by SEQ ID NOS: 127237, 127238, 127239, 127240, 127241, 127242, 127243, 127244, 127245, 127246, 127247 were selected from the ORFs having the nucleotide sequence represented by SEQ ID NO: 79318.

[10719] The probes having the nucleotide sequence represented by SEQ ID NOS: 127248, 127249, 127250, 127251, 127252, 127253, 127254, 127255, 127256, 127257, 127258 were selected from the ORFs having the nucleotide sequence represented by SEQ ID NO: 79319.

[10720] The probes having the nucleotide sequence represented by SEQ ID NOS: 127259, 127260, 127261, 127262, 127263, 127264, 127265, 127266, 127267, 127268, 127269 were selected from the ORFs having the nucleotide sequence represented by SEQ ID NO: 79320.

[10721] The probes having the nucleotide sequence represented by SEQ ID NOS: 127270, 127271, 127272, 127273, 127274, 127275, 127276, 127277, 127278, 127279, 127280 were selected from the ORFs having the nucleotide sequence represented by SEQ ID NO: 79321.

[10722] The probes having the nucleotide sequence represented by SEQ ID NOS: 127281, 127282, 127283, 127284, 127285, 127286, 127287, 127288, 127289, 127290, 127291 were selected from the ORFs having the nucleotide sequence represented by SEQ ID NO: 79322.

[10723] The probes having the nucleotide sequence represented by SEQ ID NOS: 127292, 127293, 127294, 127295, 127296, 127297, 127298, 127299, 127300, 127301, 127302 were selected from the ORFs having the nucleotide sequence represented by SEQ ID NO: 79323.

[10724] The probes having the nucleotide sequence represented by SEQ ID NOS: 127303, 127304, 127305, 127306, 127307, 127308, 127309, 127310, 127311, 127312, 127313 were selected from the ORFs having the nucleotide sequence represented by SEQ ID NO: 79324.

[10725] The probes having the nucleotide sequence represented by SEQ ID NOS: 127314, 127315, 127316, 127317, 127318, 127319, 127320, 127321, 127322, 127323, 127324 were selected from the ORFs having the nucleotide sequence represented by SEQ ID NO: 79325.

[10726] The probes having the nucleotide sequence represented by SEQ ID NOS: 127325, 127326, 127327, 127328, 127329, 127330, 127331, 127332, 127333, 127334, 127335 were selected from the ORFs having the nucleotide sequence represented by SEQ ID NO: 79326.

[10727] The probes having the nucleotide sequence represented by SEQ ID NOS: 127336, 127337, 127338, 127339, 127340, 127341, 127342, 127343, 127344, 127345, 127346 were selected from the ORFs having the nucleotide sequence represented by SEQ ID NO: 79327.

[10728] The probes having the nucleotide sequence represented by SEQ ID NOS: 127347, 127348, 127349, 127350, 127351, 127352, 127353, 127354, 127355, 127356, 127357 were selected from the ORFs having the nucleotide sequence represented by SEQ ID NO: 79328.

[10729] The probes having the nucleotide sequence represented by SEQ ID NOS: 127358, 127359, 127360, 127361, 127362, 127363, 127364, 127365, 127366, 127367, 127368 were selected from the ORFs having the nucleotide sequence represented by SEQ ID NO: 79329.

[10730] The probes having the nucleotide sequence represented by SEQ ID NOS: 127369, 127370, 127371, 127372, 127373, 127374, 127375, 127376, 127377, 127378, 127379 were selected from the ORFs having the nucleotide sequence represented by SEQ ID NO: 79330.

[10731] The probes having the nucleotide sequence represented by SEQ ID NOS: 127380, 127381, 127382, 127383, 127384, 127385, 127386, 127387, 127388, 127389, 127390 were selected from the ORFs having the nucleotide sequence represented by SEQ ID NO: 79331.

[10732] The probes having the nucleotide sequence represented by SEQ ID NOS: 127391, 127392, 127393, 127394, 127395, 127396, 127397, 127398, 127399, 127400, 127401 were selected from the ORFs having the nucleotide sequence represented by SEQ ID NO: 79332.

[10733] The probes having the nucleotide sequence represented by SEQ ID NOS: 127402, 127403, 127404, 127405, 127406, 127407, 127408, 127409, 127410, 127411, 127412 were selected from the ORFs having the nucleotide sequence represented by SEQ ID NO: 79333.

[10734] The probes having the nucleotide sequence represented by SEQ ID NOS: 127413, 127414, 127415, 127416, 127417, 127418, 127419, 127420, 127421, 127422, 127423 were selected from the ORFs having the nucleotide sequence represented by SEQ ID NO: 79334.

[10735] The probes having the nucleotide sequence represented by SEQ ID NOS: 127424, 127425, 127426, 127427, 127428, 127429, 127430, 127431, 127432, 127433, 127434 were selected from the ORFs having the nucleotide sequence represented by SEQ ID NO: 79335.

[10736] The probes having the nucleotide sequence represented by SEQ ID NOS: 127435, 127436, 127437, 127438, 127439, 127440, 127441, 127442, 127443, 127444, 127445 were selected from the ORFs having the nucleotide sequence represented by SEQ ID NO: 79336.

[10737] The probes having the nucleotide sequence represented by SEQ ID NOS: 127446, 127447, 127448, 127449, 127450, 127451, 127452, 127453, 127454, 127455, 127456 were selected from the ORFs having the nucleotide sequence represented by SEQ ID NO: 79337.

[10738] The probes having the nucleotide sequence represented by SEQ ID NOS: 127457, 127458, 127459, 127460, 127461, 127462, 127463, 127464, 127465, 127466, 127467 were selected from the ORFs having the nucleotide sequence represented by SEQ ID NO: 79338.

[10739] The probes having the nucleotide sequence represented by SEQ ID NOS: 127468, 127469, 127470, 127471, 127472, 127473, 127474, 127475, 127476, 127477, 127478 were selected from the ORFs having the nucleotide sequence represented by SEQ ID NO: 79339.

[10740] The probes having the nucleotide sequence represented by SEQ ID NOS: 127479, 127480, 127481, 127482, 127483, 127484, 127485, 127486, 127487, 127488, 127489 were selected from the ORFs having the nucleotide sequence represented by SEQ ID NO: 79340.

[10741] The probes having the nucleotide sequence represented by SEQ ID NOS: 127490, 127491, 127492, 127493, 127494, 127495, 127496, 127497, 127498, 127499, 127500 were selected from the ORFs having the nucleotide sequence represented by SEQ ID NO: 79341.

[10742] The probes having the nucleotide sequence represented by SEQ ID NOS: 127501, 127502, 127503, 127504, 127505, 127506, 127507, 127508, 127509, 127510, 127511 were selected from the ORFs having the nucleotide sequence represented by SEQ ID NO: 79342.

[10743] The probes having the nucleotide sequence represented by SEQ ID NOS: 127512, 127513, 127514, 127515, 127516, 127517, 127518, 127519, 127520, 127521, 127522 were selected from the ORFs having the nucleotide sequence represented by SEQ ID NO: 79343.

[10744] The probes having the nucleotide sequence represented by SEQ ID NOS: 127523, 127524, 127525, 127526, 127527, 127528, 127529, 127530, 127531, 127532, 127533 were selected from the ORFs having the nucleotide sequence represented by SEQ ID NO: 79344.

[10745] The probes having the nucleotide sequence represented by SEQ ID NOS: 127534, 127535, 127536, 127537, 127538, 127539, 127540, 127541, 127542, 127543, 127544 were selected from the ORFs having the nucleotide sequence represented by SEQ ID NO: 79345.

[10746] The probes having the nucleotide sequence represented by SEQ ID NOS: 127545, 127546, 127547, 127548, 127549, 127550, 127551, 127552, 127553, 127554, 127555 were selected from the ORFs having the nucleotide sequence represented by SEQ ID NO: 79346.

[10747] The probes having the nucleotide sequence represented by SEQ ID NOS: 127556, 127557, 127558, 127559, 127560, 127561, 127562, 127563, 127564, 127565, 127566 were selected from the ORFs having the nucleotide sequence represented by SEQ ID NO: 79347.

[10748] The probes having the nucleotide sequence represented by SEQ ID NOS: 127567, 127568, 127569, 127570, 127571, 127572, 127573, 127574, 127575, 127576, 127577 were selected from the ORFs having the nucleotide sequence represented by SEQ ID NO: 79348.

[10749] The probes having the nucleotide sequence represented by SEQ ID NOS: 127578, 127579, 127580, 127581, 127582, 127583, 127584, 127585, 127586, 127587, 127588 were selected from the ORFs having the nucleotide sequence represented by SEQ ID NO: 79349.

[10750] The probes having the nucleotide sequence represented by SEQ ID NOS: 127589, 127590, 127591, 127592, 127593, 127594, 127595, 127596, 127597, 127598, 127599 were selected from the ORFs having the nucleotide sequence represented by SEQ ID NO: 79350.

[10751] The probes having the nucleotide sequence represented by SEQ ID NOS: 127600, 127601, 127602, 127603, 127604, 127605, 127606, 127607, 127608, 127609, 127610, 127611, 127612, 127613, 127614, 127615, 127616, 127617, 127618, 127619, 127620, 127621 were selected from the ORFs having the nucleotide sequence represented by SEQ ID NO: 79351.

[10752] The probes having the nucleotide sequence represented by SEQ ID NOS: 127622, 127623, 127624, 127625, 127626, 127627, 127628, 127629, 127630, 127631, 127632 were selected from the ORFs having the nucleotide sequence represented by SEQ ID NO: 79352.

[10753] The probes having the nucleotide sequence represented by SEQ ID NOS: 127633, 127634, 127635, 127636, 127637, 127638, 127639, 127640, 127641, 127642, 127643 were selected from the ORFs having the nucleotide sequence represented by SEQ ID NO: 79353.

[10754] The probes having the nucleotide sequence represented by SEQ ID NOS: 127644, 127645, 127646, 127647, 127648, 127649, 127650, 127651, 127652, 127653, 127654 were selected from the ORFs having the nucleotide sequence represented by SEQ ID NO: 79354.

[10755] The probes having the nucleotide sequence represented by SEQ ID NOS: 127655, 127656, 127657, 127658, 127659, 127660, 127661, 127662, 127663, 127664, 127665 were selected from the ORFs having the nucleotide sequence represented by SEQ ID NO: 79355.

[10756] The probes having the nucleotide sequence represented by SEQ ID NOS: 127666, 127667, 127668, 127669, 127670, 127671, 127672, 127673, 127674, 127675, 127676 were selected from the ORFs having the nucleotide sequence represented by SEQ ID NO: 79356.

[10757] The probes having the nucleotide sequence represented by SEQ ID NOS: 127677, 127678, 127679, 127680, 127681, 127682, 127683, 127684, 127685, 127686, 127687 were selected from the ORFs having the nucleotide sequence represented by SEQ ID NO: 79357.

[10758] The probes having the nucleotide sequence represented by SEQ ID NOS: 127688, 127689, 127690, 127691, 127692, 127693, 127694, 127695, 127696, 127697, 127698 were selected from the ORFs having the nucleotide sequence represented by SEQ ID NO: 79358.

[10759] The probes having the nucleotide sequence represented by SEQ ID NOS: 127699, 127700, 127701, 127702, 127703, 127704, 127705, 127706, 127707, 127708, 127709 were selected from the ORFs having the nucleotide sequence represented by SEQ ID NO: 79359.

[10760] The probes having the nucleotide sequence represented by SEQ ID NOS: 127710, 127711, 127712, 127713, 127714, 127715, 127716, 127717, 127718, 127719, 127720 were selected from the ORFs having the nucleotide sequence represented by SEQ ID NO: 79360.

[10761] The probes having the nucleotide sequence represented by SEQ ID NOS: 127721, 127722, 127723, 127724, 127725, 127726, 127727, 127728, 127729, 127730, 127731 were selected from the ORFs having the nucleotide sequence represented by SEQ ID NO: 79361.

[10762] The probes having the nucleotide sequence represented by SEQ ID NOS: 127732, 127733, 127734, 127735, 127736, 127737, 127738, 127739, 127740, 127741, 127742 were selected from the ORFs having the nucleotide sequence represented by SEQ ID NO: 79362.

[10763] The probes having the nucleotide sequence represented by SEQ ID NOS: 127743, 127744, 127745, 127746, 127747, 127748, 127749, 127750, 127751, 127752, 127753 were selected from the ORFs having the nucleotide sequence represented by SEQ ID NO: 79363.

[10764] The probes having the nucleotide sequence represented by SEQ ID NOS: 127754, 127755, 127756, 127757, 127758, 127759, 127760, 127761, 127762, 127763, 127764 were selected from the ORFs having the nucleotide sequence represented by SEQ ID NO: 79364.

[10765] The probes having the nucleotide sequence represented by SEQ ID NOS: 127765, 127766, 127767, 127768, 127769, 127770, 127771, 127772, 127773, 127774, 127775 were selected from the ORFs having the nucleotide sequence represented by SEQ ID NO: 79365.

[10766] The probes having the nucleotide sequence represented by SEQ ID NOS: 127776, 127777, 127778, 127779, 127780, 127781, 127782, 127783, 127784, 127785, 127786 were selected from the ORFs having the nucleotide sequence represented by SEQ ID NO: 79366.

[10767] The probes having the nucleotide sequence represented by SEQ ID NOS: 127787, 127788, 127789, 127790, 127791, 127792, 127793, 127794, 127795, 127796, 127797 were selected from the ORFs having the nucleotide sequence represented by SEQ ID NO: 79367.

[10768] The probes having the nucleotide sequence represented by SEQ ID NOS: 127798, 127799, 127800, 127801, 127802, 127803, 127804, 127805, 127806, 127807, 127808 were selected from the ORFs having the nucleotide sequence represented by SEQ ID NO: 79368.

[10769] The probes having the nucleotide sequence represented by SEQ ID NOS: 127809, 127810, 127811, 127812, 127813, 127814, 127815, 127816, 127817, 127818, 127819 were selected from the ORFs having the nucleotide sequence represented by SEQ ID NO: 79369.

[10770] The probes having the nucleotide sequence represented by SEQ ID NOS: 127820, 127821, 127822, 127823, 127824, 127825, 127826, 127827, 127828, 127829, 127830 were selected from the ORFs having the nucleotide sequence represented by SEQ ID NO: 79370.

[10771] The probes having the nucleotide sequence represented by SEQ ID NOS: 127831, 127832, 127833, 127834, 127835, 127836, 127837, 127838, 127839, 127840, 127841 were selected from the ORFs having the nucleotide sequence represented by SEQ ID NO: 79371.

[10772] The probes having the nucleotide sequence represented by SEQ ID NOS: 127842, 127843, 127844, 127845, 127846, 127847, 127848, 127849, 127850, 127851, 127852 were selected from the ORFs having the nucleotide sequence represented by SEQ ID NO: 79372.

[10773] The probes having the nucleotide sequence represented by SEQ ID NOS: 127853, 127854, 127855, 127856, 127857, 127858, 127859, 127860, 127861, 127862, 127863 were selected from the ORFs having the nucleotide sequence represented by SEQ ID NO: 79373.

[10774] The probes having the nucleotide sequence represented by SEQ ID NOS: 127864, 127865, 127866, 127867, 127868, 127869, 127870, 127871, 127872, 127873, 127874 were selected from the ORFs having the nucleotide sequence represented by SEQ ID NO: 79374.

[10775] The probes having the nucleotide sequence represented by SEQ ID NOS: 127875, 127876, 127877, 127878, 127879, 127880, 127881, 127882, 127883, 127884, 127885 were selected from the ORFs having the nucleotide sequence represented by SEQ ID NO: 79375.

[10776] The probes having the nucleotide sequence represented by SEQ ID NOS: 127886, 127887, 127888, 127889, 127890, 127891, 127892, 127893, 127894, 127895, 127896 were selected from the ORFs having the nucleotide sequence represented by SEQ ID NO: 79376.

[10777] The probes having the nucleotide sequence represented by SEQ ID NOS: 127897, 127898, 127899, 127900, 127901, 127902, 127903, 127904, 127905, 127906, 127907 were selected from the ORFs having the nucleotide sequence represented by SEQ ID NO: 79377.

[10778] The probes having the nucleotide sequence represented by SEQ ID NOS: 127908, 127909, 127910, 127911, 127912, 127913, 127914, 127915, 127916, 127917, 127918 were selected from the ORFs having the nucleotide sequence represented by SEQ ID NO: 79378.

[10779] The probes having the nucleotide sequence represented by SEQ ID NOS: 127919, 127920, 127921, 127922, 127923, 127924, 127925, 127926, 127927, 127928, 127929 were selected from the ORFs having the nucleotide sequence represented by SEQ ID NO: 79379.

[10780] The probes having the nucleotide sequence represented by SEQ ID NOS: 127930, 127931, 127932, 127933, 127934, 127935, 127936, 127937, 127938, 127939, 127940 were selected from the ORFs having the nucleotide sequence represented by SEQ ID NO: 79380.

[10781] The probes having the nucleotide sequence represented by SEQ ID NOS: 127941, 127942, 127943, 127944, 127945, 127946, 127947, 127948, 127949, 127950, 127951 were selected from the ORFs having the nucleotide sequence represented by SEQ ID NO: 79381.

[10782] The probes having the nucleotide sequence represented by SEQ ID NOS: 127952, 127953, 127954, 127955, 127956, 127957, 127958, 127959, 127960, 127961, 127962, 127963, 127964, 127965, 127966, 127967, 127968, 127969, 127970, 127971, 127972, 127973 were selected from the ORFs having the nucleotide sequence represented by SEQ ID NO: 79382.

[10783] The probes having the nucleotide sequence represented by SEQ ID NOS: 127974, 127975, 127976, 127977, 127978, 127979, 127980, 127981, 127982, 127983, 127984 were selected from the ORFs having the nucleotide sequence represented by SEQ ID NO: 79383.

[10784] The probes having the nucleotide sequence represented by SEQ ID NOS: 127985, 127986, 127987, 127988, 127989, 127990, 127991, 127992, 127993, 127994, 127995 were selected from the ORFs having the nucleotide sequence represented by SEQ ID NO: 79384.

[10785] The probes having the nucleotide sequence represented by SEQ ID NOS: 127996, 127997, 127998, 127999, 128000, 128001, 128002, 128003, 128004, 128005, 128006 were selected from the ORFs having the nucleotide sequence represented by SEQ ID NO: 79385.

[10786] The probes having the nucleotide sequence represented by SEQ ID NOS: 128007, 128008, 128009, 128010, 128011, 128012, 128013, 128014, 128015, 128016, 128017 were selected from the ORFs having the nucleotide sequence represented by SEQ ID NO: 79386.

[10787] The probes having the nucleotide sequence represented by SEQ ID NOS: 128018, 128019, 128020, 128021, 128022, 128023, 128024, 128025, 128026, 128027, 128028 were selected from the ORFs having the nucleotide sequence represented by SEQ ID NO: 79387.

[10788] The probes having the nucleotide sequence represented by SEQ ID NOS: 128029, 128030, 128031, 128032, 128033, 128034, 128035, 128036, 128037, 128038, 128039 were selected from the ORFs having the nucleotide sequence represented by SEQ ID NO: 79388.

[10789] The probes having the nucleotide sequence represented by SEQ ID NOS: 128040, 128041, 128042, 128043, 128044, 128045, 128046, 128047, 128048, 128049, 128050 were selected from the ORFs having the nucleotide sequence represented by SEQ ID NO: 79389.

[10790] The probes having the nucleotide sequence represented by SEQ ID NOS: 128051, 128052, 128053, 128054, 128055, 128056, 128057, 128058, 128059, 128060, 128061 were selected from the ORFs having the nucleotide sequence represented by SEQ ID NO: 79390.

[10791] The probes having the nucleotide sequence represented by SEQ ID NOS: 128062, 128063, 128064, 128065, 128066, 128067, 128068, 128069, 128070, 128071, 128072 were selected from the ORFs having the nucleotide sequence represented by SEQ ID NO: 79391.

[10792] The probes having the nucleotide sequence represented by SEQ ID NOS: 128073, 128074, 128075, 128076, 128077, 128078, 128079, 128080, 128081, 128082, 128083 were selected from the ORFs having the nucleotide sequence represented by SEQ ID NO: 79392.

[10793] The probes having the nucleotide sequence represented by SEQ ID NOS: 128084, 128085, 128086, 128087, 128088, 128089, 128090, 128091, 128092, 128093, 128094 were selected from the ORFs having the nucleotide sequence represented by SEQ ID NO: 79393.

[10794] The probes having the nucleotide sequence represented by SEQ ID NOS: 128095, 128096, 128097, 128098, 128099, 128100, 128101, 128102, 128103, 128104, 128105 were selected from the ORFs having the nucleotide sequence represented by SEQ ID NO: 79394.

[10795] The probes having the nucleotide sequence represented by SEQ ID NOS: 128106, 128107, 128108, 128109, 128110, 128111, 128112, 128113, 128114, 128115 were selected from the ORFs having the nucleotide sequence represented by SEQ ID NO: 79395.

[10796] The probes having the nucleotide sequence represented by SEQ ID NOS: 128116, 128117, 128118, 128119, 128120, 128121, 128122, 128123, 128124, 128125, 128126 were selected from the ORFs having the nucleotide sequence represented by SEQ ID NO: 79396.

[10797] The probes having the nucleotide sequence represented by SEQ ID NOS: 128127, 128128, 128129, 128130, 128131, 128132, 128133, 128134, 128135, 128136, 128137 were selected from the ORFs having the nucleotide sequence represented by SEQ ID NO: 79397.

[10798] The probes having the nucleotide sequence represented by SEQ ID NOS: 128138, 128139, 128140, 128141, 128142, 128143, 128144, 128145, 128146, 128147, 128148 were selected from the ORFs having the nucleotide sequence represented by SEQ ID NO: 79398.

[10799] The probes having the nucleotide sequence represented by SEQ ID NOS: 128149, 128150, 128151, 128152, 128153, 128154, 128155, 128156, 128157, 128158, 128159 were selected from the ORFs having the nucleotide sequence represented by SEQ ID NO: 79399.

[10800] The probes having the nucleotide sequence represented by SEQ ID NOS: 128160, 128161, 128162, 128163, 128164, 128165, 128166, 128167, 128168, 128169, 128170 were selected from the ORFs having the nucleotide sequence represented by SEQ ID NO: 79400.

[10801] The probes having the nucleotide sequence represented by SEQ ID NOS: 128171, 128172, 128173, 128174, 128175, 128176, 128177, 128178, 128179, 128180, 128181 were selected from the ORFs having the nucleotide sequence represented by SEQ ID NO: 79401.

[10802] The probes having the nucleotide sequence represented by SEQ ID NOS: 128182, 128183, 128184, 128185, 128186, 128187, 128188, 128189, 128190, 128191, 128192 were selected from the ORFs having the nucleotide sequence represented by SEQ ID NO: 79402.

[10803] The probes having the nucleotide sequence represented by SEQ ID NOS: 128193, 128194, 128195, 128196, 128197, 128198, 128199, 128200, 128201, 128202, 128203 were selected from the ORFs having the nucleotide sequence represented by SEQ ID NO: 79403.

[10804] The probes having the nucleotide sequence represented by SEQ ID NOS: 128204, 128205, 128206, 128207, 128208, 128209, 128210, 128211, 128212, 128213, 128214 were selected from the ORFs having the nucleotide sequence represented by SEQ ID NO: 79404.

[10805] The probes having the nucleotide sequence represented by SEQ ID NOS: 128215, 128216, 128217, 128218, 128219, 128220, 128221, 128222, 128223, 128224, 128225 were selected from the ORFs having the nucleotide sequence represented by SEQ ID NO: 79405.

[10806] The probes having the nucleotide sequence represented by SEQ ID NOS: 128226, 128227, 128228, 128229, 128230, 128231, 128232, 128233, 128234, 128235, 128236 were selected from the ORFs having the nucleotide sequence represented by SEQ ID NO: 79406.

[10807] The probes having the nucleotide sequence represented by SEQ ID NOS: 128237, 128238, 128239, 128240, 128241, 128242, 128243, 128244, 128245, 128246, 128247 were selected from the ORFs having the nucleotide sequence represented by SEQ ID NO: 79407.

[10808] The probes having the nucleotide sequence represented by SEQ ID NOS: 128248, 128249, 128250, 128251, 128252, 128253, 128254, 128255, 128256, 128257, 128258 were selected from the ORFs having the nucleotide sequence represented by SEQ ID NO: 79408.

[10809] The probes having the nucleotide sequence represented by SEQ ID NOS: 128259, 128260, 128261, 128262, 128263, 128264, 128265, 128266, 128267, 128268, 128269 were selected from the ORFs having the nucleotide sequence represented by SEQ ID NO: 79409.

[10810] The probes having the nucleotide sequence represented by SEQ ID NOS: 128270, 128271, 128272, 128273, 128274, 128275, 128276, 128277, 128278, 128279, 128280 were selected from the ORFs having the nucleotide sequence represented by SEQ ID NO: 79410.

[10811] The probes having the nucleotide sequence represented by SEQ ID NOS: 128281, 128282, 128283, 128284, 128285, 128286, 128287, 128288, 128289, 128290, 128291 were selected from the ORFs having the nucleotide sequence represented by SEQ ID NO: 79411.

[10812] The probes having the nucleotide sequence represented by SEQ ID NOS: 128292, 128293, 128294, 128295, 128296, 128297, 128298, 128299, 128300, 128301, 128302 were selected from the ORFs having the nucleotide sequence represented by SEQ ID NO: 79412.

[10813] The probes having the nucleotide sequence represented by SEQ ID NOS: 128303, 128304, 128305, 128306, 128307, 128308, 128309, 128310, 128311, 128312, 128313 were selected from the ORFs having the nucleotide sequence represented by SEQ ID NO: 79413.

[10814] The probes having the nucleotide sequence represented by SEQ ID NOS: 128314, 128315, 128316, 128317, 128318, 128319, 128320, 128321, 128322, 128323, 128324 were selected from the ORFs having the nucleotide sequence represented by SEQ ID NO: 79414.

[10815] The probes having the nucleotide sequence represented by SEQ ID NOS: 128325, 128326, 128327, 128328, 128329, 128330, 128331, 128332, 128333, 128334, 128335 were selected from the ORFs having the nucleotide sequence represented by SEQ ID NO: 79415.

[10816] The probes having the nucleotide sequence represented by SEQ ID NOS: 128336, 128337, 128338, 128339, 128340, 128341, 128342, 128343, 128344, 128345, 128346 were selected from the ORFs having the nucleotide sequence represented by SEQ ID NO: 79416.

[10817] The probes having the nucleotide sequence represented by SEQ ID NOS: 128347, 128348, 128349, 128350, 128351, 128352, 128353, 128354, 128355 were selected from the ORFs having the nucleotide sequence represented by SEQ ID NO: 79417.

[10818] The probes having the nucleotide sequence represented by SEQ ID NOS: 128356, 128357, 128358, 128359, 128360, 128361, 128362, 128363, 128364, 128365, 128366 were selected from the ORFs having the nucleotide sequence represented by SEQ ID NO: 79418.

[10819] The probes having the nucleotide sequence represented by SEQ ID NOS: 128367, 128368, 128369, 128370, 128371, 128372, 128373, 128374, 128375, 128376, 128377 were selected from the ORFs having the nucleotide sequence represented by SEQ ID NO: 79419.

[10820] The probes having the nucleotide sequence represented by SEQ ID NOS: 128378, 128379, 128380, 128381, 128382, 128383, 128384, 128385, 128386, 128387, 128388 were selected from the ORFs having the nucleotide sequence represented by SEQ ID NO: 79420.

[10821] The probes having the nucleotide sequence represented by SEQ ID NOS: 128389, 128390, 128391, 128392, 128393, 128394, 128395, 128396, 128397, 128398, 128399 were selected from the ORFs having the nucleotide sequence represented by SEQ ID NO: 79421.

[10822] The probes having the nucleotide sequence represented by SEQ ID NOS: 128400, 128401, 128402, 128403, 128404, 128405, 128406, 128407, 128408, 128409, 128410 were selected from the ORFs having the nucleotide sequence represented by SEQ ID NO: 79422.

[10823] The probes having the nucleotide sequence represented by SEQ ID NOS: 128411, 128412, 128413, 128414, 128415, 128416, 128417, 128418, 128419, 128420, 128421 were selected from the ORFs having the nucleotide sequence represented by SEQ ID NO: 79423.

[10824] The probes having the nucleotide sequence represented by SEQ ID NOS: 128422, 128423, 128424, 128425, 128426, 128427, 128428, 128429, 128430, 128431, 128432 were selected from the ORFs having the nucleotide sequence represented by SEQ ID NO: 79424.

[10825] The probes having the nucleotide sequence represented by SEQ ID NOS: 128433, 128434, 128435, 128436, 128437, 128438, 128439, 128440, 128441, 128442, 128443 were selected from the ORFs having the nucleotide sequence represented by SEQ ID NO: 79425.

[10826] The probes having the nucleotide sequence represented by SEQ ID NOS: 128444, 128445, 128446, 128447, 128448, 128449, 128450, 128451, 128452, 128453, 128454, 128455, 128456, 128457, 128458, 128459, 128460, 128461, 128462, 128463, 128464, 128465 were selected from the ORFs having the nucleotide sequence represented by SEQ ID NO: 79426.

[10827] The probes having the nucleotide sequence represented by SEQ ID NOS: 128466, 128467, 128468, 128469, 128470, 128471, 128472, 128473, 128474, 128475, 128476, 128477, 128478, 128479, 128480, 128481, 128482, 128483, 128484, 128485, 128486, 128487 were selected from the ORFs having the nucleotide sequence represented by SEQ ID NO: 79427.

[10828] The probes having the nucleotide sequence represented by SEQ ID NOS: 128488, 128489, 128490, 128491, 128492, 128493, 128494, 128495, 128496, 128497, 128498 were selected from the ORFs having the nucleotide sequence represented by SEQ ID NO: 79428.

[10829] The probes having the nucleotide sequence represented by SEQ ID NOS: 128499, 128500, 128501, 128502, 128503, 128504, 128505, 128506, 128507, 128508, 128509 were selected from the ORFs having the nucleotide sequence represented by SEQ ID NO: 79429.

[10830] The probes having the nucleotide sequence represented by SEQ ID NOS: 128510, 128511, 128512, 128513, 128514, 128515, 128516, 128517, 128518, 128519, 128520 were selected from the ORFs having the nucleotide sequence represented by SEQ ID NO: 79430.

[10831] The probes having the nucleotide sequence represented by SEQ ID NOS: 128521, 128522, 128523, 128524, 128525, 128526, 128527, 128528, 128529, 128530, 128531 were selected from the ORFs having the nucleotide sequence represented by SEQ ID NO: 79431.

[10832] The probes having the nucleotide sequence represented by SEQ ID NOS: 128532, 128533, 128534, 128535, 128536, 128537, 128538, 128539, 128540, 128541, 128542 were selected from the ORFs having the nucleotide sequence represented by SEQ ID NO: 79432.

[10833] The probes having the nucleotide sequence represented by SEQ ID NOS: 128543, 128544, 128545, 128546, 128547, 128548, 128549, 128550, 128551, 128552, 128553 were selected from the ORFs having the nucleotide sequence represented by SEQ ID NO: 79433.

[10834] The probes having the nucleotide sequence represented by SEQ ID NOS: 128554, 128555, 128556, 128557, 128558, 128559, 128560, 128561, 128562, 128563, 128564 were selected from the ORFs having the nucleotide sequence represented by SEQ ID NO: 79434.

[10835] The probes having the nucleotide sequence represented by SEQ ID NOS: 128565, 128566, 128567, 128568, 128569, 128570, 128571, 128572, 128573, 128574, 128575 were selected from the ORFs having the nucleotide sequence represented by SEQ ID NO: 79435.

[10836] The probes having the nucleotide sequence represented by SEQ ID NOS: 128576, 128577, 128578, 128579, 128580, 128581, 128582, 128583, 128584, 128585, 128586, 128587, 128588, 128589, 128590, 128591, 128592, 128593, 128594, 128595, 128596, 128597 were selected from the ORFs having the nucleotide sequence represented by SEQ ID NO: 79436.

[10837] The probes having the nucleotide sequence represented by SEQ ID NOS: 128598, 128599, 128600, 128601, 128602, 128603, 128604, 128605, 128606, 128607, 128608 were selected from the ORFs having the nucleotide sequence represented by SEQ ID NO: 79437.

[10838] The probes having the nucleotide sequence represented by SEQ ID NOS: 128609, 128610, 128611, 128612, 128613, 128614, 128615, 128616, 128617, 128618, 128619 were selected from the ORFs having the nucleotide sequence represented by SEQ ID NO: 79438.

[10839] The probes having the nucleotide sequence represented by SEQ ID NOS: 128620, 128621, 128622, 128623, 128624, 128625, 128626, 128627, 128628, 128629, 128630 were selected from the ORFs having the nucleotide sequence represented by SEQ ID NO: 79439.

[10840] The probes having the nucleotide sequence represented by SEQ ID NOS: 128631, 128632, 128633, 128634, 128635, 128636, 128637, 128638, 128639, 128640, 128641 were selected from the ORFs having the nucleotide sequence represented by SEQ ID NO: 79440.

[10841] The probes having the nucleotide sequence represented by SEQ ID NOS: 128642, 128643, 128644, 128645, 128646, 128647, 128648, 128649, 128650, 128651, 128652 were selected from the ORFs having the nucleotide sequence represented by SEQ ID NO: 79441.

[10842] The probes having the nucleotide sequence represented by SEQ ID NOS: 128653, 128654, 128655, 128656, 128657, 128658, 128659, 128660, 128661, 128662, 128663 were selected from the ORFs having the nucleotide sequence represented by SEQ ID NO: 79442.

[10843] The probes having the nucleotide sequence represented by SEQ ID NOS: 128664, 128665, 128666, 128667, 128668, 128669, 128670, 128671, 128672, 128673, 128674 were selected from the ORFs having the nucleotide sequence represented by SEQ ID NO: 79443.

[10844] The probes having the nucleotide sequence represented by SEQ ID NOS: 128675, 128676, 128677, 128678, 128679, 128680, 128681, 128682, 128683, 128684, 128685 were selected from the ORFs having the nucleotide sequence represented by SEQ ID NO: 79444.

[10845] The probes having the nucleotide sequence represented by SEQ ID NOS: 128686, 128687, 128688, 128689, 128690, 128691, 128692, 128693, 128694, 128695, 128696 were selected from the ORFs having the nucleotide sequence represented by SEQ ID NO: 79445.

[10846] The probes having the nucleotide sequence represented by SEQ ID NOS: 128697, 128698, 128699, 128700, 128701, 128702, 128703, 128704, 128705, 128706, 128707 were selected from the ORFs having the nucleotide sequence represented by SEQ ID NO: 79446.

[10847] The probes having the nucleotide sequence represented by SEQ ID NOS: 128708, 128709, 128710, 128711, 128712, 128713, 128714, 128715, 128716, 128717, 128718 were selected from the ORFs having the nucleotide sequence represented by SEQ ID NO: 79447.

[10848] The probes having the nucleotide sequence represented by SEQ ID NOS: 128719, 128720, 128721, 128722, 128723, 128724, 128725, 128726, 128727, 128728, 128729 were selected from the ORFs having the nucleotide sequence represented by SEQ ID NO: 79448.

[10849] The probes having the nucleotide sequence represented by SEQ ID NOS: 128730, 128731, 128732, 128733, 128734, 128735, 128736, 128737, 128738, 128739, 128740 were selected from the ORFs having the nucleotide sequence represented by SEQ ID NO: 79449.

[10850] The probes having the nucleotide sequence represented by SEQ ID NOS: 128741, 128742, 128743, 128744, 128745, 128746, 128747, 128748, 128749, 128750, 128751, 128752, 128753, 128754, 128755, 128756, 128757, 128758, 128759, 128760, 128761, 128762 were selected from the ORFs having the nucleotide sequence represented by SEQ ID NO: 79450.

[10851] The probes having the nucleotide sequence represented by SEQ ID NOS: 128763, 128764, 128765, 128766, 128767, 128768, 128769, 128770, 128771, 128772, 128773 were selected from the ORFs having the nucleotide sequence represented by SEQ ID NO: 79451.

[10852] The probes having the nucleotide sequence represented by SEQ ID NOS: 128774, 128775, 128776, 128777, 128778, 128779, 128780, 128781, 128782, 128783, 128784 were selected from the ORFs having the nucleotide sequence represented by SEQ ID NO: 79452.

[10853] The probes having the nucleotide sequence represented by SEQ ID NOS: 128785, 128786, 128787, 128788, 128789, 128790, 128791, 128792, 128793, 128794, 128795 were selected from the ORFs having the nucleotide sequence represented by SEQ ID NO: 79453.

[10854] The probes having the nucleotide sequence represented by SEQ ID NOS: 128796, 128797, 128798, 128799, 128800, 128801, 128802, 128803, 128804, 128805, 128806 were selected from the ORFs having the nucleotide sequence represented by SEQ ID NO: 79454.

[10855] The probes having the nucleotide sequence represented by SEQ ID NOS: 128807, 128808, 128809, 128810, 128811, 128812, 128813, 128814, 128815, 128816, 128817 were selected from the ORFs having the nucleotide sequence represented by SEQ ID NO: 79455.

[10856] The probes having the nucleotide sequence represented by SEQ ID NOS: 128818, 128819, 128820, 128821, 128822, 128823, 128824, 128825, 128826, 128827, 128828 were selected from the ORFs having the nucleotide sequence represented by SEQ ID NO: 79456.

[10857] The probes having the nucleotide sequence represented by SEQ ID NOS: 128829, 128830, 128831, 128832, 128833, 128834, 128835, 128836, 128837, 128838, 128839 were selected from the ORFs having the nucleotide sequence represented by SEQ ID NO: 79457.

[10858] The probes having the nucleotide sequence represented by SEQ ID NOS: 128840, 128841, 128842, 128843, 128844, 128845, 128846, 128847, 128848, 128849, 128850 were selected from the ORFs having the nucleotide sequence represented by SEQ ID NO: 79458.

[10859] The probes having the nucleotide sequence represented by SEQ ID NOS: 128851, 128852, 128853, 128854, 128855, 128856, 128857, 128858, 128859, 128860, 128861 were selected from the ORFs having the nucleotide sequence represented by SEQ ID NO: 79459.

[10860] The probes having the nucleotide sequence represented by SEQ ID NOS: 128862, 128863, 128864, 128865, 128866, 128867, 128868, 128869, 128870, 128871, 128872 were selected from the ORFs having the nucleotide sequence represented by SEQ ID NO: 79460.

[10861] The probes having the nucleotide sequence represented by SEQ ID NOS: 128873, 128874, 128875, 128876, 128877, 128878, 128879, 128880, 128881, 128882, 128883 were selected from the ORFs having the nucleotide sequence represented by SEQ ID NO: 79461.

[10862] The probes having the nucleotide sequence represented by SEQ ID NOS: 128884, 128885, 128886, 128887, 128888, 128889, 128890, 128891, 128892, 128893, 128894 were selected from the ORFs having the nucleotide sequence represented by SEQ ID NO: 79462.

[10863] The probes having the nucleotide sequence represented by SEQ ID NOS: 128895, 128896, 128897, 128898, 128899, 128900, 128901, 128902, 128903, 128904, 128905 were selected from the ORFs having the nucleotide sequence represented by SEQ ID NO: 79463.

[10864] The probes having the nucleotide sequence represented by SEQ ID NOS: 128906, 128907, 128908, 128909, 128910, 128911, 128912, 128913, 128914, 128915, 128916 were selected from the ORFs having the nucleotide sequence represented by SEQ ID NO: 79464.

[10865] The probes having the nucleotide sequence represented by SEQ ID NOS: 128917, 128918, 128919, 128920, 128921, 128922, 128923, 128924, 128925, 128926, 128927 were selected from the ORFs having the nucleotide sequence represented by SEQ ID NO: 79465.

[10866] The probes having the nucleotide sequence represented by SEQ ID NOS: 128928, 128929, 128930, 128931, 128932, 128933, 128934, 128935, 128936, 128937, 128938 were selected from the ORFs having the nucleotide sequence represented by SEQ ID NO: 79466.

[10867] The probes having the nucleotide sequence represented by SEQ ID NOS: 128939, 128940, 128941, 128942, 128943, 128944, 128945, 128946, 128947, 128948, 128949 were selected from the ORFs having the nucleotide sequence represented by SEQ ID NO: 79467.

[10868] The probes having the nucleotide sequence represented by SEQ ID NOS: 128950, 128951, 128952, 128953, 128954, 128955, 128956, 128957, 128958, 128959, 128960 were selected from the ORFs having the nucleotide sequence represented by SEQ ID NO: 79468.

[10869] The probes having the nucleotide sequence represented by SEQ ID NOS: 128961, 128962, 128963, 128964, 128965, 128966, 128967, 128968, 128969, 128970, 128971 were selected from the ORFs having the nucleotide sequence represented by SEQ ID NO: 79469.

[10870] The probes having the nucleotide sequence represented by SEQ ID NOS: 128972, 128973, 128974, 128975, 128976, 128977, 128978, 128979, 128980, 128981, 128982 were selected from the ORFs having the nucleotide sequence represented by SEQ ID NO: 79470.

[10871] The probes having the nucleotide sequence represented by SEQ ID NOS: 128983, 128984, 128985, 128986, 128987, 128988, 128989, 128990, 128991, 128992, 128993 were selected from the ORFs having the nucleotide sequence represented by SEQ ID NO: 79471.

[10872] The probes having the nucleotide sequence represented by SEQ ID NOS: 128994, 128995, 128996, 128997, 128998, 128999, 129000, 129001, 129002, 129003, 129004 were selected from the ORFs having the nucleotide sequence represented by SEQ ID NO: 79472.

[10873] The probes having the nucleotide sequence represented by SEQ ID NOS: 129005, 129006, 129007, 129008, 129009, 129010, 129011, 129012, 129013, 129014, 129015 were selected from the ORFs having the nucleotide sequence represented by SEQ ID NO: 79473.

[10874] The probes having the nucleotide sequence represented by SEQ ID NOS: 129016, 129017, 129018, 129019, 129020, 129021, 129022, 129023, 129024, 129025, 129026 were selected from the ORFs having the nucleotide sequence represented by SEQ ID NO: 79474.

[10875] The probes having the nucleotide sequence represented by SEQ ID NOS: 129027, 129028, 129029, 129030, 129031, 129032, 129033, 129034, 129035, 129036, 129037 were selected from the ORFs having the nucleotide sequence represented by SEQ ID NO: 79475.

[10876] The probes having the nucleotide sequence represented by SEQ ID NOS: 129038, 129039, 129040, 129041, 129042, 129043, 129044, 129045, 129046, 129047, 129048 were selected from the ORFs having the nucleotide sequence represented by SEQ ID NO: 79476.

[10877] The probes having the nucleotide sequence represented by SEQ ID NOS: 129049, 129050, 129051, 129052, 129053, 129054, 129055, 129056, 129057, 129058, 129059 were selected from the ORFs having the nucleotide sequence represented by SEQ ID NO: 79477.

[10878] The probes having the nucleotide sequence represented by SEQ ID NOS: 129060, 129061, 129062, 129063, 129064, 129065, 129066, 129067, 129068, 129069, 129070, 129071, 129072, 129073, 129074, 129075, 129076, 129077, 129078, 129079, 129080, 129081 were selected from the ORFs having the nucleotide sequence represented by SEQ ID NO: 79478.

[10879] The probes having the nucleotide sequence represented by SEQ ID NOS: 129082, 129083, 129084, 129085, 129086, 129087, 129088, 129089, 129090, 129091, 129092 were selected from the ORFs having the nucleotide sequence represented by SEQ ID NO: 79479.

[10880] The probes having the nucleotide sequence represented by SEQ ID NOS: 129093, 129094, 129095, 129096, 129097, 129098, 129099, 129100, 129101, 129102, 129103 were selected from the ORFs having the nucleotide sequence represented by SEQ ID NO: 79480.

[10881] The probes having the nucleotide sequence represented by SEQ ID NOS: 129104, 129105, 129106, 129107, 129108, 129109, 129110, 129111, 129112, 129113, 129114 were selected from the ORFs having the nucleotide sequence represented by SEQ ID NO: 79481.

[10882] The probes having the nucleotide sequence represented by SEQ ID NOS: 129115, 129116, 129117, 129118, 129119, 129120, 129121, 129122, 129123, 129124, 129125 were selected from the ORFs having the nucleotide sequence represented by SEQ ID NO: 79482.

[10883] The probes having the nucleotide sequence represented by SEQ ID NOS: 129126, 129127, 129128, 129129, 129130, 129131, 129132, 129133, 129134, 129135, 129136 were selected from the ORFs having the nucleotide sequence represented by SEQ ID NO: 79483.

[10884] The probes having the nucleotide sequence represented by SEQ ID NOS: 129137, 129138, 129139, 129140, 129141, 129142, 129143, 129144, 129145, 129146, 129147 were selected from the ORFs having the nucleotide sequence represented by SEQ ID NO: 79484.

[10885] The probes having the nucleotide sequence represented by SEQ ID NOS: 129148, 129149, 129150, 129151, 129152, 129153, 129154, 129155, 129156, 129157, 129158 were selected from the ORFs having the nucleotide sequence represented by SEQ ID NO: 79485.

[10886] The probes having the nucleotide sequence represented by SEQ ID NOS: 129159, 129160, 129161, 129162, 129163, 129164, 129165, 129166, 129167, 129168, 129169 were selected from the ORFs having the nucleotide sequence represented by SEQ ID NO: 79486.

[10887] The probes having the nucleotide sequence represented by SEQ ID NOS: 129170, 129171, 129172, 129173, 129174, 129175, 129176, 129177, 129178, 129179, 129180 were selected from the ORFs having the nucleotide sequence represented by SEQ ID NO: 79487.

[10888] The probes having the nucleotide sequence represented by SEQ ID NOS: 129181, 129182, 129183, 129184, 129185, 129186, 129187, 129188, 129189, 129190, 129191 were selected from the ORFs having the nucleotide sequence represented by SEQ ID NO: 79488.

[10889] The probes having the nucleotide sequence represented by SEQ ID NOS: 129192, 129193, 129194, 129195, 129196, 129197, 129198, 129199, 129200, 129201, 129202 were selected from the ORFs having the nucleotide sequence represented by SEQ ID NO: 79489.

[10890] The probes having the nucleotide sequence represented by SEQ ID NOS: 129203, 129204, 129205, 129206, 129207, 129208, 129209, 129210, 129211, 129212, 129213 were selected from the ORFs having the nucleotide sequence represented by SEQ ID NO: 79490.

[10891] The probes having the nucleotide sequence represented by SEQ ID NOS: 129214, 129215, 129216, 129217, 129218, 129219, 129220, 129221, 129222, 129223, 129224 were selected from the ORFs having the nucleotide sequence represented by SEQ ID NO: 79491.

[10892] The probes having the nucleotide sequence represented by SEQ ID NOS: 129225, 129226, 129227, 129228, 129229, 129230, 129231, 129232, 129233, 129234, 129235 were selected from the ORFs having the nucleotide sequence represented by SEQ ID NO: 79492.

[10893] The probes having the nucleotide sequence represented by SEQ ID NOS: 129236, 129237, 129238, 129239, 129240, 129241, 129242, 129243, 129244, 129245, 129246 were selected from the ORFs having the nucleotide sequence represented by SEQ ID NO: 79493.

[10894] The probes having the nucleotide sequence represented by SEQ ID NOS: 129247, 129248, 129249, 129250, 129251, 129252, 129253, 129254, 129255, 129256, 129257 were selected from the ORFs having the nucleotide sequence represented by SEQ ID NO: 79494.

[10895] The probes having the nucleotide sequence represented by SEQ ID NOS: 129258, 129259, 129260, 129261, 129262, 129263, 129264, 129265, 129266, 129267, 129268 were selected from the ORFs having the nucleotide sequence represented by SEQ ID NO: 79495.

[10896] The probes having the nucleotide sequence represented by SEQ ID NOS: 129269, 129270, 129271, 129272, 129273, 129274, 129275, 129276, 129277, 129278, 129279 were selected from the ORFs having the nucleotide sequence represented by SEQ ID NO: 79496.

[10897] The probes having the nucleotide sequence represented by SEQ ID NOS: 129280, 129281, 129282, 129283, 129284, 129285, 129286, 129287, 129288, 129289, 129290 were selected from the ORFs having the nucleotide sequence represented by SEQ ID NO: 79497.

[10898] The probes having the nucleotide sequence represented by SEQ ID NOS: 129291, 129292, 129293, 129294, 129295, 129296, 129297, 129298, 129299, 129300, 129301 were selected from the ORFs having the nucleotide sequence represented by SEQ ID NO: 79498.

[10899] The probes having the nucleotide sequence represented by SEQ ID NOS: 129302, 129303, 129304, 129305, 129306, 129307, 129308, 129309, 129310, 129311, 129312 were selected from the ORFs having the nucleotide sequence represented by SEQ ID NO: 79499.

[10900] The probes having the nucleotide sequence represented by SEQ ID NOS: 129313, 129314, 129315, 129316, 129317, 129318, 129319, 129320, 129321, 129322, 129323 were selected from the ORFs having the nucleotide sequence represented by SEQ ID NO: 79500.

[10901] The probes having the nucleotide sequence represented by SEQ ID NOS: 129324, 129325, 129326, 129327, 129328, 129329, 129330, 129331, 129332, 129333, 129334 were selected from the ORFs having the nucleotide sequence represented by SEQ ID NO: 79501.

[10902] The probes having the nucleotide sequence represented by SEQ ID NOS: 129335, 129336, 129337, 129338, 129339, 129340, 129341, 129342, 129343, 129344, 129345 were selected from the ORFs having the nucleotide sequence represented by SEQ ID NO: 79502.

[10903] The probes having the nucleotide sequence represented by SEQ ID NOS: 129346, 129347, 129348, 129349, 129350, 129351, 129352, 129353, 129354, 129355, 129356 were selected from the ORFs having the nucleotide sequence represented by SEQ ID NO: 79503.

[10904] The probes having the nucleotide sequence represented by SEQ ID NOS: 129357, 129358, 129359, 129360, 129361, 129362, 129363, 129364, 129365, 129366, 129367 were selected from the ORFs having the nucleotide sequence represented by SEQ ID NO: 79504.

[10905] The probes having the nucleotide sequence represented by SEQ ID NOS: 129368, 129369, 129370, 129371, 129372, 129373, 129374, 129375, 129376, 129377, 129378 were selected from the ORFs having the nucleotide sequence represented by SEQ ID NO: 79505.

[10906] The probes having the nucleotide sequence represented by SEQ ID NOS: 129379, 129380, 129381, 129382, 129383, 129384, 129385, 129386, 129387, 129388, 129389 were selected from the ORFs having the nucleotide sequence represented by SEQ ID NO: 79506.

[10907] The probes having the nucleotide sequence represented by SEQ ID NOS: 129390, 129391, 129392, 129393, 129394, 129395, 129396, 129397, 129398, 129399, 129400 were selected from the ORFs having the nucleotide sequence represented by SEQ ID NO: 79507.

[10908] The probes having the nucleotide sequence represented by SEQ ID NOS: 129401, 129402, 129403, 129404, 129405, 129406, 129407, 129408, 129409, 129410, 129411 were selected from the ORFs having the nucleotide sequence represented by SEQ ID NO: 79508.

[10909] The probes having the nucleotide sequence represented by SEQ ID NOS: 129412, 129413, 129414, 129415, 129416, 129417, 129418, 129419, 129420, 129421, 129422 were selected from the ORFs having the nucleotide sequence represented by SEQ ID NO: 79509.

[10910] The probes having the nucleotide sequence represented by SEQ ID NOS: 129423, 129424, 129425, 129426, 129427, 129428, 129429, 129430, 129431, 129432, 129433 were selected from the ORFs having the nucleotide sequence represented by SEQ ID NO: 79510.

[10911] The probes having the nucleotide sequence represented by SEQ ID NOS: 129434, 129435, 129436, 129437, 129438, 129439, 129440, 129441, 129442, 129443, 129444 were selected from the ORFs having the nucleotide sequence represented by SEQ ID NO: 79511.

[10912] The probes having the nucleotide sequence represented by SEQ ID NOS: 129445, 129446, 129447, 129448, 129449, 129450, 129451, 129452, 129453, 129454, 129455 were selected from the ORFs having the nucleotide sequence represented by SEQ ID NO: 79512.

[10913] The probes having the nucleotide sequence represented by SEQ ID NOS: 129456, 129457, 129458, 129459, 129460, 129461, 129462, 129463, 129464, 129465, 129466 were selected from the ORFs having the nucleotide sequence represented by SEQ ID NO: 79513.

[10914] The probes having the nucleotide sequence represented by SEQ ID NOS: 129467, 129468, 129469, 129470, 129471, 129472, 129473, 129474, 129475, 129476, 129477 were selected from the ORFs having the nucleotide sequence represented by SEQ ID NO: 79514.

[10915] The probes having the nucleotide sequence represented by SEQ ID NOS: 129478, 129479, 129480, 129481, 129482, 129483, 129484, 129485, 129486, 129487, 129488 were selected from the ORFs having the nucleotide sequence represented by SEQ ID NO: 79515.

[10916] The probes having the nucleotide sequence represented by SEQ ID NOS: 129489, 129490, 129491, 129492, 129493, 129494, 129495, 129496, 129497, 129498, 129499 were selected from the ORFs having the nucleotide sequence represented by SEQ ID NO: 79516.

[10917] The probes having the nucleotide sequence represented by SEQ ID NOS: 129500, 129501, 129502, 129503, 129504, 129505, 129506, 129507, 129508, 129509, 129510 were selected from the ORFs having the nucleotide sequence represented by SEQ ID NO: 79517.

[10918] The probes having the nucleotide sequence represented by SEQ ID NOS: 129511, 129512, 129513, 129514, 129515, 129516, 129517, 129518, 129519, 129520, 129521 were selected from the ORFs having the nucleotide sequence represented by SEQ ID NO: 79518.

[10919] The probes having the nucleotide sequence represented by SEQ ID NOS: 129522, 129523, 129524, 129525, 129526, 129527, 129528, 129529, 129530, 129531, 129532 were selected from the ORFs having the nucleotide sequence represented by SEQ ID NO: 79519.

[10920] The probes having the nucleotide sequence represented by SEQ ID NOS: 129533, 129534, 129535, 129536, 129537, 129538, 129539, 129540, 129541, 129542, 129543 were selected from the ORFs having the nucleotide sequence represented by SEQ ID NO: 79520.

[10921] The probes having the nucleotide sequence represented by SEQ ID NOS: 129544, 129545, 129546, 129547, 129548, 129549, 129550, 129551, 129552, 129553, 129554 were selected from the ORFs having the nucleotide sequence represented by SEQ ID NO: 79521.

[10922] The probes having the nucleotide sequence represented by SEQ ID NOS: 129555, 129556, 129557, 129558, 129559, 129560, 129561, 129562, 129563, 129564, 129565 were selected from the ORFs having the nucleotide sequence represented by SEQ ID NO: 79522.

[10923] The probes having the nucleotide sequence represented by SEQ ID NOS: 129566, 129567, 129568, 129569, 129570, 129571, 129572, 129573, 129574, 129575, 129576 were selected from the ORFs having the nucleotide sequence represented by SEQ ID NO: 79523.

[10924] The probes having the nucleotide sequence represented by SEQ ID NOS: 129577, 129578, 129579, 129580, 129581, 129582, 129583, 129584, 129585, 129586, 129587 were selected from the ORFs having the nucleotide sequence represented by SEQ ID NO: 79524.

[10925] The probes having the nucleotide sequence represented by SEQ ID NOS: 129588, 129589, 129590, 129591, 129592, 129593, 129594, 129595, 129596, 129597, 129598 were selected from the ORFs having the nucleotide sequence represented by SEQ ID NO: 79525.

[10926] The probes having the nucleotide sequence represented by SEQ ID NOS: 129599, 129600, 129601, 129602, 129603, 129604, 129605, 129606, 129607, 129608, 129609 were selected from the ORFs having the nucleotide sequence represented by SEQ ID NO: 79526.

[10927] The probes having the nucleotide sequence represented by SEQ ID NOS: 129610, 129611, 129612, 129613, 129614, 129615, 129616, 129617, 129618, 129619, 129620 were selected from the ORFs having the nucleotide sequence represented by SEQ ID NO: 79527.

[10928] The probes having the nucleotide sequence represented by SEQ ID NOS: 129621, 129622, 129623, 129624, 129625, 129626, 129627, 129628, 129629, 129630, 129631, 129632, 129633, 129634, 129635, 129636, 129637, 129638, 129639, 129640, 129641, 129642 were selected from the ORFs having the nucleotide sequence represented by SEQ ID NO: 79528.

[10929] The probes having the nucleotide sequence represented by SEQ ID NOS: 129643, 129644, 129645, 129646, 129647, 129648, 129649, 129650, 129651, 129652, 129653 were selected from the ORFs having the nucleotide sequence represented by SEQ ID NO: 79529.

[10930] The probes having the nucleotide sequence represented by SEQ ID NOS: 129654, 129655, 129656, 129657, 129658, 129659, 129660, 129661, 129662, 129663, 129664, 129665, 129666, 129667, 129668, 129669, 129670, 129671, 129672, 129673, 129674, 129675 were selected from the ORFs having the nucleotide sequence represented by SEQ ID NO: 79530.

[10931] The probes having the nucleotide sequence represented by SEQ ID NOS: 129676, 129677, 129678, 129679, 129680, 129681, 129682, 129683, 129684, 129685, 129686 were selected from the ORFs having the nucleotide sequence represented by SEQ ID NO: 79531.

[10932] The probes having the nucleotide sequence represented by SEQ ID NOS: 129687, 129688, 129689, 129690, 129691, 129692, 129693, 129694, 129695, 129696, 129697 were selected from the ORFs having the nucleotide sequence represented by SEQ ID NO: 79532.

[10933] The probes having the nucleotide sequence represented by SEQ ID NOS: 129698, 129699, 129700, 129701, 129702, 129703, 129704, 129705, 129706, 129707, 129708 were selected from the ORFs having the nucleotide sequence represented by SEQ ID NO: 79533.

[10934] The probes having the nucleotide sequence represented by SEQ ID NOS: 129709, 129710, 129711, 129712, 129713, 129714, 129715, 129716, 129717, 129718, 129719 were selected from the ORFs having the nucleotide sequence represented by SEQ ID NO: 79534.

[10935] The probes having the nucleotide sequence represented by SEQ ID NOS: 129720, 129721, 129722, 129723, 129724, 129725, 129726, 129727, 129728, 129729, 129730 were selected from the ORFs having the nucleotide sequence represented by SEQ ID NO: 79535.

[10936] The probes having the nucleotide sequence represented by SEQ ID NOS: 129731, 129732, 129733, 129734, 129735, 129736, 129737, 129738, 129739, 129740, 129741 were selected from the ORFs having the nucleotide sequence represented by SEQ ID NO: 79536.

[10937] The probes having the nucleotide sequence represented by SEQ ID NOS: 129742, 129743, 129744, 129745, 129746, 129747, 129748, 129749, 129750, 129751, 129752 were selected from the ORFs having the nucleotide sequence represented by SEQ ID NO: 79537.

[10938] The probes having the nucleotide sequence represented by SEQ ID NOS: 129753, 129754, 129755, 129756, 129757, 129758, 129759, 129760, 129761, 129762, 129763 were selected from the ORFs having the nucleotide sequence represented by SEQ ID NO: 79538.

[10939] The probes having the nucleotide sequence represented by SEQ ID NOS: 129764, 129765, 129766, 129767, 129768, 129769, 129770, 129771, 129772, 129773, 129774 were selected from the ORFs having the nucleotide sequence represented by SEQ ID NO: 79539.

[10940] The probes having the nucleotide sequence represented by SEQ ID NOS: 129775, 129776, 129777, 129778, 129779, 129780, 129781, 129782, 129783, 129784, 129785 were selected from the ORFs having the nucleotide sequence represented by SEQ ID NO: 79540.

[10941] The probes having the nucleotide sequence represented by SEQ ID NOS: 129786, 129787, 129788, 129789, 129790, 129791, 129792, 129793, 129794, 129795, 129796 were selected from the ORFs having the nucleotide sequence represented by SEQ ID NO: 79541.

[10942] The probes having the nucleotide sequence represented by SEQ ID NOS: 129797, 129798, 129799, 129800, 129801, 129802, 129803, 129804, 129805, 129806, 129807 were selected from the ORFs having the nucleotide sequence represented by SEQ ID NO: 79542.

[10943] The probes having the nucleotide sequence represented by SEQ ID NOS: 129808, 129809, 129810, 129811, 129812, 129813, 129814, 129815, 129816, 129817, 129818 were selected from the ORFs having the nucleotide sequence represented by SEQ ID NO: 79543.

[10944] The probes having the nucleotide sequence represented by SEQ ID NOS: 129819, 129820, 129821, 129822, 129823, 129824, 129825, 129826, 129827, 129828, 129829 were selected from the ORFs having the nucleotide sequence represented by SEQ ID NO: 79544.

[10945] The probes having the nucleotide sequence represented by SEQ ID NOS: 129830, 129831, 129832, 129833, 129834, 129835, 129836, 129837, 129838, 129839, 129840 were selected from the ORFs having the nucleotide sequence represented by SEQ ID NO: 79545.

[10946] The probes having the nucleotide sequence represented by SEQ ID NOS: 129841, 129842, 129843, 129844, 129845, 129846, 129847, 129848, 129849, 129850, 129851 were selected from the ORFs having the nucleotide sequence represented by SEQ ID NO: 79546.

[10947] The probes having the nucleotide sequence represented by SEQ ID NOS: 129852, 129853, 129854, 129855, 129856, 129857, 129858, 129859, 129860, 129861, 129862 were selected from the ORFs having the nucleotide sequence represented by SEQ ID NO: 79547.

[10948] The probes having the nucleotide sequence represented by SEQ ID NOS: 129863, 129864, 129865, 129866, 129867, 129868, 129869, 129870, 129871, 129872, 129873 were selected from the ORFs having the nucleotide sequence represented by SEQ ID NO: 79548.

[10949] The probes having the nucleotide sequence represented by SEQ ID NOS: 129874, 129875, 129876, 129877, 129878, 129879, 129880, 129881, 129882, 129883, 129884 were selected from the ORFs having the nucleotide sequence represented by SEQ ID NO: 79549.

[10950] The probes having the nucleotide sequence represented by SEQ ID NOS: 129885, 129886, 129887, 129888, 129889, 129890, 129891, 129892, 129893, 129894, 129895 were selected from the ORFs having the nucleotide sequence represented by SEQ ID NO: 79550.

[10951] The probes having the nucleotide sequence represented by SEQ ID NOS: 129896, 129897, 129898, 129899, 129900, 129901, 129902, 129903, 129904, 129905, 129906 were selected from the ORFs having the nucleotide sequence represented by SEQ ID NO: 79551.

[10952] The probes having the nucleotide sequence represented by SEQ ID NOS: 129907, 129908, 129909, 129910, 129911, 129912, 129913, 129914, 129915, 129916, 129917 were selected from

[10953] The ORFs having the nucleotide sequence represented by SEQ ID NO: 79552.

[10954] The probes having the nucleotide sequence represented by SEQ ID NOS: 129918, 129919, 129920, 129921, 129922, 129923, 129924, 129925, 129926, 129927, 129928 were selected from the ORFs having the nucleotide sequence represented by SEQ ID NO: 79553.

[10955] The probes having the nucleotide sequence represented by SEQ ID NOS: 129929, 129930, 129931, 129932, 129933, 129934, 129935, 129936, 129937, 129938, 129939 were selected from the ORFs having the nucleotide sequence represented by SEQ ID NO: 79554.

[10956] The probes having the nucleotide sequence represented by SEQ ID NOS: 129940, 129941, 129942, 129943, 129944, 129945, 129946, 129947, 129948, 129949, 129950 were selected from the ORFs having the nucleotide sequence represented by SEQ ID NO: 79555.

[10957] The probes having the nucleotide sequence represented by SEQ ID NOS: 129951, 129952, 129953, 129954, 129955, 129956, 129957, 129958, 129959, 129960, 129961 were selected from the ORFs having the nucleotide sequence represented by SEQ ID NO: 79556.

[10958] The probes having the nucleotide sequence represented by SEQ ID NOS: 129962, 129963, 129964, 129965, 129966, 129967, 129968, 129969, 129970, 129971, 129972 were selected from the ORFs having the nucleotide sequence represented by SEQ ID NO: 79557.

[10959] The probes having the nucleotide sequence represented by SEQ ID NOS: 129973, 129974, 129975, 129976, 129977, 129978, 129979, 129980, 129981, 129982, 129983 were selected from the ORFs having the nucleotide sequence represented by SEQ ID NO: 79558.

[10960] The probes having the nucleotide sequence represented by SEQ ID NOS: 129984, 129985, 129986, 129987, 129988, 129989, 129990, 129991, 129992, 129993, 129994 were selected from the ORFs having the nucleotide sequence represented by SEQ ID NO: 79559.

[10961] The probes having the nucleotide sequence represented by SEQ ID NOS: 129995, 129996, 129997, 129998, 129999, 130000, 130001, 130002, 130003, 130004, 130005 were selected from the ORFs having the nucleotide sequence represented by SEQ ID NO: 79560.

[10962] The probes having the nucleotide sequence represented by SEQ ID NOS: 130006, 130007, 130008, 130009, 130010, 130011, 130012, 130013, 130014, 130015, 130016 were selected from the ORFs having the nucleotide sequence represented by SEQ ID NO: 79561.

[10963] The probes having the nucleotide sequence represented by SEQ ID NOS: 130017, 130018, 130019, 130020, 130021, 130022, 130023, 130024, 130025, 130026, 130027 were selected from the ORFs having the nucleotide sequence represented by SEQ ID NO: 79562.

[10964] The probes having the nucleotide sequence represented by SEQ ID NOS: 130028, 130029, 130030, 130031, 130032, 130033, 130034, 130035, 130036, 130037, 130038 were selected from the ORFs having the nucleotide sequence represented by SEQ ID NO: 79563.

[10965] The probes having the nucleotide sequence represented by SEQ ID NOS: 130039, 130040, 130041, 130042, 130043, 130044, 130045, 130046, 130047, 130048, 130049 were selected from the ORFs having the nucleotide sequence represented by SEQ ID NO: 79564.

[10966] The probes having the nucleotide sequence represented by SEQ ID NOS: 130050, 130051, 130052, 130053, 130054, 130055, 130056, 130057, 130058, 130059, 130060 were selected from the ORFs having the nucleotide sequence represented by SEQ ID NO: 79565.

[10967] The probes having the nucleotide sequence represented by SEQ ID NOS: 130061, 130062, 130063, 130064, 130065, 130066, 130067, 130068, 130069, 130070, 130071 were selected from the ORFs having the nucleotide sequence represented by SEQ ID NO: 79566.

[10968] The probes having the nucleotide sequence represented by SEQ ID NOS: 130072, 130073, 130074, 130075, 130076, 130077, 130078, 130079, 130080, 130081, 130082 were selected from the ORFs having the nucleotide sequence represented by SEQ ID NO: 79567.

[10969] The probes having the nucleotide sequence represented by SEQ ID NOS: 130083, 130084, 130085, 130086, 130087, 130088, 130089, 130090, 130091, 130092, 130093 were selected from the ORFs having the nucleotide sequence represented by SEQ ID NO: 79568.

[10970] The probes having the nucleotide sequence represented by SEQ ID NOS: 130094, 130095, 130096, 130097, 130098, 130099, 130100, 130101, 130102, 130103, 130104 were selected from the ORFs having the nucleotide sequence represented by SEQ ID NO: 79569.

[10971] The probes having the nucleotide sequence represented by SEQ ID NOS: 130105, 130106, 130107, 130108, 130109, 130110, 130111, 130112, 130113, 130114, 130115 were selected from the ORFs having the nucleotide sequence represented by SEQ ID NO: 79570.

[10972] The probes having the nucleotide sequence represented by SEQ ID NOS: 130116, 130117, 130118, 130119, 130120, 130121, 130122, 130123, 130124, 130125, 130126 were selected from the ORFs having the nucleotide sequence represented by SEQ ID NO: 79571.

[10973] The probes having the nucleotide sequence represented by SEQ ID NOS: 130127, 130128, 130129, 130130, 130131, 130132, 130133, 130134, 130135, 130136, 130137 were selected from the ORFs having the nucleotide sequence represented by SEQ ID NO: 79572.

[10974] The probes having the nucleotide sequence represented by SEQ ID NOS: 130138, 130139, 130140, 130141, 130142, 130143, 130144, 130145, 130146, 130147, 130148 were selected from the ORFs having the nucleotide sequence represented by SEQ ID NO: 79573.

[10975] The probes having the nucleotide sequence represented by SEQ ID NOS: 130149, 130150, 130151, 130152, 130153, 130154, 130155, 130156, 130157, 130158, 130159 were selected from the ORFs having the nucleotide sequence represented by SEQ ID NO: 79574.

[10976] The probes having the nucleotide sequence represented by SEQ ID NOS: 130160, 130161, 130162, 130163, 130164, 130165, 130166, 130167, 130168, 130169, 130170 were selected from the ORFs having the nucleotide sequence represented by SEQ ID NO: 79575.

[10977] The probes having the nucleotide sequence represented by SEQ ID NOS: 130171, 130172, 130173, 130174, 130175, 130176, 130177, 130178, 130179, 130180, 130181 were selected from the ORFs having the nucleotide sequence represented by SEQ ID NO: 79576.

[10978] The probes having the nucleotide sequence represented by SEQ ID NOS: 130182, 130183, 130184, 130185, 130186, 130187, 130188, 130189, 130190, 130191, 130192 were selected from the ORFs having the nucleotide sequence represented by SEQ ID NO: 79577.

[10979] The probes having the nucleotide sequence represented by SEQ ID NOS: 130193, 130194, 130195, 130196, 130197, 130198, 130199, 130200, 130201, 130202, 130203 were selected from the ORFs having the nucleotide sequence represented by SEQ ID NO: 79578.

[10980] The probes having the nucleotide sequence represented by SEQ ID NOS: 130204, 130205, 130206, 130207, 130208, 130209, 130210, 130211, 130212, 130213, 130214 were selected from the ORFs having the nucleotide sequence represented by SEQ ID NO: 79579.

[10981] The probes having the nucleotide sequence represented by SEQ ID NOS: 130215, 130216, 130217, 130218, 130219, 130220, 130221, 130222, 130223, 130224, 130225 were selected from the ORFs having the nucleotide sequence represented by SEQ ID NO: 79580.

[10982] The probes having the nucleotide sequence represented by SEQ ID NOS: 130226, 130227, 130228, 130229, 130230, 130231, 130232, 130233, 130234, 130235, 130236 were selected from the ORFs having the nucleotide sequence represented by SEQ ID NO: 79581.

[10983] The probes having the nucleotide sequence represented by SEQ ID NOS: 130237, 130238, 130239, 130240, 130241, 130242, 130243, 130244, 130245, 130246, 130247 were selected from the ORFs having the nucleotide sequence represented by SEQ ID NO: 79582.

[10984] The probes having the nucleotide sequence represented by SEQ ID NOS: 130248, 130249, 130250, 130251, 130252, 130253, 130254, 130255, 130256, 130257, 130258 were selected from the ORFs having the nucleotide sequence represented by SEQ ID NO: 79583.

[10985] The probes having the nucleotide sequence represented by SEQ ID NOS: 130259, 130260, 130261, 130262, 130263, 130264, 130265, 130266, 130267, 130268, 130269 were selected from the ORFs having the nucleotide sequence represented by SEQ ID NO: 79584.

[10986] The probes having the nucleotide sequence represented by SEQ ID NOS: 130270, 130271, 130272, 130273, 130274, 130275, 130276, 130277, 130278, 130279, 130280 were selected from the ORFs having the nucleotide sequence represented by SEQ ID NO: 79585.

[10987] The probes having the nucleotide sequence represented by SEQ ID NOS: 130281, 130282, 130283, 130284, 130285, 130286, 130287, 130288, 130289, 130290, 130291 were selected from the ORFs having the nucleotide sequence represented by SEQ ID NO: 79586.

[10988] The probes having the nucleotide sequence represented by SEQ ID NOS: 130292, 130293, 130294, 130295, 130296, 130297, 130298, 130299, 130300, 130301, 130302 were selected from the ORFs having the nucleotide sequence represented by SEQ ID NO: 79587.

[10989] The probes having the nucleotide sequence represented by SEQ ID NOS: 130303, 130304, 130305, 130306, 130307, 130308, 130309, 130310, 130311, 130312, 130313 were selected from the ORFs having the nucleotide sequence represented by SEQ ID NO: 79588.

[10990] The probes having the nucleotide sequence represented by SEQ ID NOS: 130314, 130315, 130316, 130317, 130318, 130319, 130320, 130321, 130322, 130323, 130324 were selected from the ORFs having the nucleotide sequence represented by SEQ ID NO: 79589.

[10991] The probes having the nucleotide sequence represented by SEQ ID NOS: 130325, 130326, 130327, 130328, 130329, 130330, 130331, 130332, 130333, 130334, 130335 were selected from the ORFs having the nucleotide sequence represented by SEQ ID NO: 79590.

[10992] The probes having the nucleotide sequence represented by SEQ ID NOS: 130336, 130337, 130338, 130339, 130340, 130341, 130342, 130343, 130344, 130345, 130346 were selected from the ORFs having the nucleotide sequence represented by SEQ ID NO: 79591.

[10993] The probes having the nucleotide sequence represented by SEQ ID NOS: 130347, 130348, 130349, 130350, 130351, 130352, 130353, 130354, 130355, 130356, 130357 were selected from the ORFs having the nucleotide sequence represented by SEQ ID NO: 79592.

[10994] The probes having the nucleotide sequence represented by SEQ ID NOS: 130358, 130359, 130360, 130361, 130362, 130363, 130364, 130365, 130366, 130367, 130368 were selected from the ORFs having the nucleotide sequence represented by SEQ ID NO: 79593.

[10995] The probes having the nucleotide sequence represented by SEQ ID NOS: 130369, 130370, 130371, 130372, 130373, 130374, 130375, 130376, 130377, 130378, 130379 were selected from the ORFs having the nucleotide sequence represented by SEQ ID NO: 79594.

[10996] The probes having the nucleotide sequence represented by SEQ ID NOS: 130380, 130381, 130382, 130383, 130384, 130385, 130386, 130387, 130388, 130389, 130390 were selected from the ORFs having the nucleotide sequence represented by SEQ ID NO: 79595.

[10997] The probes having the nucleotide sequence represented by SEQ ID NOS: 130391, 130392, 130393, 130394, 130395, 130396, 130397, 130398, 130399, 130400, 130401 were selected from the ORFs having the nucleotide sequence represented by SEQ ID NO: 79596.

[10998] The probes having the nucleotide sequence represented by SEQ ID NOS: 130402, 130403, 130404, 130405, 130406, 130407, 130408, 130409, 130410, 130411, 130412 were selected from the ORFs having the nucleotide sequence represented by SEQ ID NO: 79597.

[10999] The probes having the nucleotide sequence represented by SEQ ID NOS: 130413, 130414, 130415, 130416, 130417, 130418, 130419, 130420, 130421, 130422, 130423 were selected from the ORFs having the nucleotide sequence represented by SEQ ID NO: 79598.

[11000] The probes having the nucleotide sequence represented by SEQ ID NOS: 130424, 130425, 130426, 130427, 130428, 130429, 130430, 130431, 130432, 130433, 130434 were selected from the ORFs having the nucleotide sequence represented by SEQ ID NO: 79599.

[11001] The probes having the nucleotide sequence represented by SEQ ID NOS: 130435, 130436, 130437, 130438, 130439, 130440, 130441, 130442, 130443, 130444, 130445 were selected from the ORFs having the nucleotide sequence represented by SEQ ID NO: 79600.

[11002] The probes having the nucleotide sequence represented by SEQ ID NOS: 130446, 130447, 130448, 130449, 130450, 130451, 130452, 130453, 130454, 130455, 130456 were selected from the ORFs having the nucleotide sequence represented by SEQ ID NO: 79601.

[11003] The probes having the nucleotide sequence represented by SEQ ID NOS: 130457, 130458, 130459, 130460, 130461, 130462, 130463, 130464, 130465, 130466, 130467 were selected from the ORFs having the nucleotide sequence represented by SEQ ID NO: 79602.

[11004] The probes having the nucleotide sequence represented by SEQ ID NOS: 130468, 130469, 130470, 130471, 130472, 130473, 130474, 130475, 130476, 130477, 130478 were selected from the ORFs having the nucleotide sequence represented by SEQ ID NO: 79603.

[11005] The probes having the nucleotide sequence represented by SEQ ID NOS: 130479, 130480, 130481, 130482, 130483, 130484, 130485, 130486, 130487, 130488, 130489 were selected from the ORFs having the nucleotide sequence represented by SEQ ID NO: 79604.

[11006] The probes having the nucleotide sequence represented by SEQ ID NOS: 130490, 130491, 130492, 130493, 130494, 130495, 130496, 130497, 130498, 130499, 130500 were selected from the ORFs having the nucleotide sequence represented by SEQ ID NO: 79605.

[11007] The probes having the nucleotide sequence represented by SEQ ID NOS: 130501, 130502, 130503, 130504, 130505, 130506, 130507, 130508, 130509, 130510, 130511 were selected from the ORFs having the nucleotide sequence represented by SEQ ID NO: 79606.

[11008] The probes having the nucleotide sequence represented by SEQ ID NOS: 130512, 130513, 130514, 130515, 130516, 130517, 130518, 130519, 130520, 130521, 130522 were selected from the ORFs having the nucleotide sequence represented by SEQ ID NO: 79607.

[11009] The probes having the nucleotide sequence represented by SEQ ID NOS: 130523, 130524, 130525, 130526, 130527, 130528, 130529, 130530, 130531, 130532, 130533 were selected from the ORFs having the nucleotide sequence represented by SEQ ID NO: 79608.

[11010] The probes having the nucleotide sequence represented by SEQ ID NOS: 130534, 130535, 130536, 130537, 130538, 130539, 130540, 130541, 130542, 130543, 130544 were selected from the ORFs having the nucleotide sequence represented by SEQ ID NO: 79609.

[11011] The probes having the nucleotide sequence represented by SEQ ID NOS: 130545, 130546, 130547, 130548, 130549, 130550, 130551, 130552, 130553, 130554, 130555 were selected from the ORFs having the nucleotide sequence represented by SEQ ID NO: 79610.

[11012] The probes having the nucleotide sequence represented by SEQ ID NOS: 130556, 130557, 130558, 130559, 130560, 130561, 130562, 130563, 130564, 130565, 130566 were selected from the ORFs having the nucleotide sequence represented by SEQ ID NO: 79611.

[11013] The probes having the nucleotide sequence represented by SEQ ID NOS: 130567, 130568, 130569, 130570, 130571, 130572, 130573, 130574, 130575, 130576, 130577 were selected from the ORFs having the nucleotide sequence represented by SEQ ID NO: 79612.

[11014] The probes having the nucleotide sequence represented by SEQ ID NOS: 130578, 130579, 130580, 130581, 130582, 130583, 130584, 130585, 130586, 130587, 130588 were selected from the ORFs having the nucleotide sequence represented by SEQ ID NO: 79613.

[11015] The probes having the nucleotide sequence represented by SEQ ID NOS: 130589, 130590, 130591, 130592, 130593, 130594, 130595, 130596, 130597, 130598, 130599 were selected from the ORFs having the nucleotide sequence represented by SEQ ID NO: 79614.

[11016] The probes having the nucleotide sequence represented by SEQ ID NOS: 130600, 130601, 130602, 130603, 130604, 130605, 130606, 130607, 130608, 130609, 130610 were selected from the ORFs having the nucleotide sequence represented by SEQ ID NO: 79615.

[11017] The probes having the nucleotide sequence represented by SEQ ID NOS: 130611, 130612, 130613, 130614, 130615, 130616, 130617, 130618, 130619, 130620, 130621 were selected from the ORFs having the nucleotide sequence represented by SEQ ID NO: 79616.

[11018] The probes having the nucleotide sequence represented by SEQ ID NOS: 130622, 130623, 130624, 130625, 130626, 130627, 130628, 130629, 130630, 130631, 130632 were selected from the ORFs having the nucleotide sequence represented by SEQ ID NO: 79617.

[11019] The probes having the nucleotide sequence represented by SEQ ID NOS: 130633, 130634, 130635, 130636, 130637, 130638, 130639, 130640, 130641, 130642, 130643 were selected from the ORFs having the nucleotide sequence represented by SEQ ID NO: 79618.

[11020] The probes having the nucleotide sequence represented by SEQ ID NOS: 130644, 130645, 130646, 130647, 130648, 130649, 130650, 130651, 130652, 130653, 130654 were selected from the ORFs having the nucleotide sequence represented by SEQ ID NO: 79619.

[11021] The probes having the nucleotide sequence represented by SEQ ID NOS: 130655, 130656, 130657, 130658, 130659, 130660, 130661, 130662, 130663, 130664, 130665 were selected from the ORFs having the nucleotide sequence represented by SEQ ID NO: 79620.

[11022] The probes having the nucleotide sequence represented by SEQ ID NOS: 130666, 130667, 130668, 130669, 130670, 130671, 130672, 130673, 130674, 130675, 130676 were selected from the ORFs having the nucleotide sequence represented by SEQ ID NO: 79621.

[11023] The probes having the nucleotide sequence represented by SEQ ID NOS: 130677, 130678, 130679, 130680, 130681, 130682, 130683, 130684, 130685, 130686, 130687 were selected from the ORFs having the nucleotide sequence represented by SEQ ID NO: 79622.

[11024] The probes having the nucleotide sequence represented by SEQ ID NOS: 130688, 130689, 130690, 130691, 130692, 130693, 130694, 130695, 130696, 130697, 130698 were selected from the ORFs having the nucleotide sequence represented by SEQ ID NO: 79623.

[11025] The probes having the nucleotide sequence represented by SEQ ID NOS: 130699, 130700, 130701, 130702, 130703, 130704, 130705, 130706, 130707, 130708, 130709 were selected from the ORFs having the nucleotide sequence represented by SEQ ID NO: 79624.

[11026] The probes having the nucleotide sequence represented by SEQ ID NOS: 130710, 130711, 130712, 130713, 130714, 130715, 130716, 130717, 130718, 130719, 130720 were selected from the ORFs having the nucleotide sequence represented by SEQ ID NO: 79625.

[11027] The probes having the nucleotide sequence represented by SEQ ID NOS: 130721, 130722, 130723, 130724, 130725, 130726, 130727, 130728, 130729, 130730, 130731 were selected from the ORFs having the nucleotide sequence represented by SEQ ID NO: 79626.

[11028] The probes having the nucleotide sequence represented by SEQ ID NOS: 130732, 130733, 130734, 130735, 130736, 130737, 130738, 130739, 130740, 130741, 130742 were selected from the ORFs having the nucleotide sequence represented by SEQ ID NO: 79627.

[11029] The probes having the nucleotide sequence represented by SEQ ID NOS: 130743, 130744, 130745, 130746, 130747, 130748, 130749, 130750, 130751, 130752, 130753 were selected from the ORFs having the nucleotide sequence represented by SEQ ID NO: 79628.

[11030] The probes having the nucleotide sequence represented by SEQ ID NOS: 130754, 130755, 130756, 130757, 130758, 130759, 130760, 130761, 130762, 130763, 130764 were selected from the ORFs having the nucleotide sequence represented by SEQ ID NO: 79629.

[11031] The probes having the nucleotide sequence represented by SEQ ID NOS: 130765, 130766, 130767, 130768, 130769, 130770, 130771, 130772, 130773, 130774, 130775 were selected from the ORFs having the nucleotide sequence represented by SEQ ID NO: 79630.

[11032] The probes having the nucleotide sequence represented by SEQ ID NOS: 130776, 130777, 130778, 130779, 130780, 130781, 130782, 130783, 130784, 130785, 130786 were selected from the ORFs having the nucleotide sequence represented by SEQ ID NO: 79631.

[11033] The probes having the nucleotide sequence represented by SEQ ID NOS: 130787, 130788, 130789, 130790, 130791, 130792, 130793, 130794, 130795, 130796, 130797 were selected from the ORFs having the nucleotide sequence represented by SEQ ID NO: 79632.

[11034] The probes having the nucleotide sequence represented by SEQ ID NOS: 130798, 130799, 130800, 130801, 130802, 130803, 130804, 130805, 130806, 130807, 130808 were selected from the ORFs having the nucleotide sequence represented by SEQ ID NO: 79633.

[11035] The probes having the nucleotide sequence represented by SEQ ID NOS: 130809, 130810, 130811, 130812, 130813, 130814, 130815, 130816, 130817, 130818, 130819 were selected from the ORFs having the nucleotide sequence represented by SEQ ID NO: 79634.

[11036] The probes having the nucleotide sequence represented by SEQ ID NOS: 130820, 130821, 130822, 130823, 130824, 130825, 130826, 130827, 130828, 130829, 130830 were selected from the ORFs having the nucleotide sequence represented by SEQ ID NO: 79635.

[11037] The probes having the nucleotide sequence represented by SEQ ID NOS: 130831, 130832, 130833, 130834, 130835, 130836, 130837, 130838, 130839, 130840, 130841 were selected from the ORFs having the nucleotide sequence represented by SEQ ID NO: 79636.

[11038] The probes having the nucleotide sequence represented by SEQ ID NOS: 130842, 130843, 130844, 130845, 130846, 130847, 130848, 130849, 130850, 130851, 130852 were selected from the ORFs having the nucleotide sequence represented by SEQ ID NO: 79637.

[11039] The probes having the nucleotide sequence represented by SEQ ID NOS: 130853, 130854, 130855, 130856, 130857, 130858, 130859, 130860, 130861, 130862, 130863 were selected from the ORFs having the nucleotide sequence represented by SEQ ID NO: 79638.

[11040] The probes having the nucleotide sequence represented by SEQ ID NOS: 130864, 130865, 130866, 130867, 130868, 130869, 130870, 130871, 130872, 130873, 130874 were selected from the ORFs having the nucleotide sequence represented by SEQ ID NO: 79639.

[11041] The probes having the nucleotide sequence represented by SEQ ID NOS: 130875, 130876, 130877, 130878, 130879, 130880, 130881, 130882, 130883, 130884, 130885 were selected from the ORFs having the nucleotide sequence represented by SEQ ID NO: 79640.

[11042] The probes having the nucleotide sequence represented by SEQ ID NOS: 130886, 130887, 130888, 130889, 130890, 130891, 130892, 130893, 130894, 130895, 130896 were selected from the ORFs having the nucleotide sequence represented by SEQ ID NO: 79641.

[11043] The probes having the nucleotide sequence represented by SEQ ID NOS: 130897, 130898, 130899, 130900, 130901, 130902, 130903, 130904, 130905, 130906, 130907 were selected from the ORFs having the nucleotide sequence represented by SEQ ID NO: 79642.

[11044] The probes having the nucleotide sequence represented by SEQ ID NOS: 130908, 130909, 130910, 130911, 130912, 130913, 130914, 130915, 130916, 130917, 130918 were selected from the ORFs having the nucleotide sequence represented by SEQ ID NO: 79643.

[11045] The probes having the nucleotide sequence represented by SEQ ID NOS: 130919, 130920, 130921, 130922, 130923, 130924, 130925, 130926, 130927, 130928, 130929 were selected from the ORFs having the nucleotide sequence represented by SEQ ID NO: 79644.

[11046] The probes having the nucleotide sequence represented by SEQ ID NOS: 130930, 130931, 130932, 130933, 130934, 130935, 130936, 130937, 130938, 130939, 130940 were selected from the ORFs having the nucleotide sequence represented by SEQ ID NO: 79645.

[11047] The probes having the nucleotide sequence represented by SEQ ID NOS: 130941, 130942, 130943, 130944, 130945, 130946, 130947, 130948, 130949, 130950, 130951 were selected from the ORFs having the nucleotide sequence represented by SEQ ID NO: 79646.

[11048] The probes having the nucleotide sequence represented by SEQ ID NOS: 130952, 130953, 130954, 130955, 130956, 130957, 130958, 130959, 130960, 130961, 130962 were selected from the ORFs having the nucleotide sequence represented by SEQ ID NO: 79647.

[11049] The probes having the nucleotide sequence represented by SEQ ID NOS: 130963, 130964, 130965, 130966, 130967, 130968, 130969, 130970, 130971, 130972, 130973 were selected from the ORFs having the nucleotide sequence represented by SEQ ID NO: 79648.

[11050] The probes having the nucleotide sequence represented by SEQ ID NOS: 130974, 130975, 130976, 130977, 130978, 130979, 130980, 130981, 130982, 130983, 130984 were selected from the ORFs having the nucleotide sequence represented by SEQ ID NO: 79649.

[11051] The probes having the nucleotide sequence represented by SEQ ID NOS: 130985, 130986, 130987, 130988, 130989, 130990, 130991, 130992, 130993, 130994, 130995 were selected from the ORFs having the nucleotide sequence represented by SEQ ID NO: 79650.

[11052] The probes having the nucleotide sequence represented by SEQ ID NOS: 130996, 130997, 130998, 130999, 131000, 131001, 131002, 131003, 131004, 131005, 131006 were selected from the ORFs having the nucleotide sequence represented by SEQ ID NO: 79651.

[11053] The probes having the nucleotide sequence represented by SEQ ID NOS: 131007, 131008, 131009, 131010, 131011, 131012, 131013, 131014, 131015, 131016, 131017 were selected from the ORFs having the nucleotide sequence represented by SEQ ID NO: 79652.

[11054] The probes having the nucleotide sequence represented by SEQ ID NOS: 131018, 131019, 131020, 131021, 131022, 131023, 131024, 131025, 131026, 131027, 131028 were selected from the ORFs having the nucleotide sequence represented by SEQ ID NO: 79653.

[11055] The probes having the nucleotide sequence represented by SEQ ID NOS: 131029, 131030, 131031, 131032, 131033, 131034, 131035, 131036, 131037, 131038, 131039 were selected from the ORFs having the nucleotide sequence represented by SEQ ID NO: 79654.

[11056] The probes having the nucleotide sequence represented by SEQ ID NOS: 131040, 131041, 131042, 131043, 131044, 131045, 131046, 131047, 131048, 131049, 131050 were selected from the ORFs having the nucleotide sequence represented by SEQ ID NO: 79655.

[11057] The probes having the nucleotide sequence represented by SEQ ID NOS: 131051, 131052, 131053, 131054, 131055, 131056, 131057, 131058, 131059, 131060, 131061 were selected from the ORFs having the nucleotide sequence represented by SEQ ID NO: 79656.

[11058] The probes having the nucleotide sequence represented by SEQ ID NOS: 131062, 131063, 131064, 131065, 131066, 131067, 131068, 131069, 131070, 131071, 131072 were selected from the ORFs having the nucleotide sequence represented by SEQ ID NO: 79657.

[11059] The probes having the nucleotide sequence represented by SEQ ID NOS: 131073, 131074, 131075, 131076, 131077, 131078, 131079, 131080, 131081, 131082, 131083, 131084, 131085, 131086, 131087, 131088, 131089, 131090, 131091, 131092, 131093, 131094 were selected from the ORFs having the nucleotide sequence represented by SEQ ID NO: 79658.

[11060] The probes having the nucleotide sequence represented by SEQ ID NOS: 131095, 131096, 131097, 131098, 131099, 131100, 131101, 131102, 131103, 131104, 131105, 131106, 131107, 131108, 131109, 131110, 131111, 131112, 131113, 131114, 131115, 131116 were selected from the ORFs having the nucleotide sequence represented by SEQ ID NO: 79659.

[11061] The probes having the nucleotide sequence represented by SEQ ID NOS: 131117, 131118, 131119, 131120, 131121, 131122, 131123, 131124, 131125, 131126, 131127 were selected from the ORFs having the nucleotide sequence represented by SEQ ID NO: 79660.

[11062] The probes having the nucleotide sequence represented by SEQ ID NOS: 131128, 131129, 131130, 131131, 131132, 131133, 131134, 131135, 131136, 131137, 131138 were selected from the ORFs having the nucleotide sequence represented by SEQ ID NO: 79661.

[11063] The probes having the nucleotide sequence represented by SEQ ID NOS: 131139, 131140, 131141, 131142, 131143, 131144, 131145, 131146, 131147, 131148, 131149 were selected from the ORFs having the nucleotide sequence represented by SEQ ID NO: 79662.

[11064] The probes having the nucleotide sequence represented by SEQ ID NOS: 131150, 131151, 131152, 131153, 131154, 131155, 131156, 131157, 131158, 131159, 131160 were selected from the ORFs having the nucleotide sequence represented by SEQ ID NO: 79663.

[11065] The probes having the nucleotide sequence represented by SEQ ID NOS: 131161, 131162, 131163, 131164, 131165, 131166, 131167, 131168, 131169, 131170, 131171 were selected from the ORFs having the nucleotide sequence represented by SEQ ID NO: 79664.

[11066] The probes having the nucleotide sequence represented by SEQ ID NOS: 131172, 131173, 131174, 131175, 131176, 131177, 131178, 131179, 131180, 131181, 131182 were selected from the ORFs having the nucleotide sequence represented by SEQ ID NO: 79665.

[11067] The probes having the nucleotide sequence represented by SEQ ID NOS: 131183, 131184, 131185, 131186, 131187, 131188, 131189, 131190, 131191, 131192, 131193 were selected from the ORFs having the nucleotide sequence represented by SEQ ID NO: 79666.

[11068] The probes having the nucleotide sequence represented by SEQ ID NOS: 131194, 131195, 131196, 131197, 131198, 131199, 131200, 131201, 131202, 131203, 131204 were selected from the ORFs having the nucleotide sequence represented by SEQ ID NO: 79667.

[11069] The probes having the nucleotide sequence represented by SEQ ID NOS: 131205, 131206, 131207, 131208, 131209, 131210, 131211, 131212, 131213, 131214, 131215 were selected from the ORFs having the nucleotide sequence represented by SEQ ID NO: 79668.

[11070] The probes having the nucleotide sequence represented by SEQ ID NOS: 131216, 131217, 131218, 131219, 131220, 131221, 131222, 131223, 131224, 131225, 131226 were selected from the ORFs having the nucleotide sequence represented by SEQ ID NO: 79669.

[11071] The probes having the nucleotide sequence represented by SEQ ID NOS: 131227, 131228, 131229, 131230, 131231, 131232, 131233, 131234, 131235, 131236, 131237 were selected from the ORFs having the nucleotide sequence represented by SEQ ID NO: 79670.

[11072] The probes having the nucleotide sequence represented by SEQ ID NOS: 131238, 131239, 131240, 131241, 131242, 131243, 131244, 131245, 131246, 131247, 131248 were selected from the ORFs having the nucleotide sequence represented by SEQ ID NO: 79671.

[11073] The probes having the nucleotide sequence represented by SEQ ID NOS: 131249, 131250, 131251, 131252, 131253, 131254, 131255, 131256, 131257, 131258, 131259 were selected from the ORFs having the nucleotide sequence represented by SEQ ID NO: 79672.

[11074] The probes having the nucleotide sequence represented by SEQ ID NOS: 131260, 131261, 131262, 131263, 131264, 131265, 131266, 131267, 131268, 131269, 131270 were selected from the ORFs having the nucleotide sequence represented by SEQ ID NO: 79673.

[11075] The probes having the nucleotide sequence represented by SEQ ID NOS: 131271, 131272, 131273, 131274, 131275, 131276, 131277, 131278, 131279, 131280, 131281 were selected from the ORFs having the nucleotide sequence represented by SEQ ID NO: 79674.

[11076] The probes having the nucleotide sequence represented by SEQ ID NOS: 131282, 131283, 131284, 131285, 131286, 131287, 131288, 131289, 131290, 131291, 131292 were selected from the ORFs having the nucleotide sequence represented by SEQ ID NO: 79675.

[11077] The probes having the nucleotide sequence represented by SEQ ID NOS: 131293, 131294, 131295, 131296, 131297, 131298, 131299, 131300, 131301, 131302, 131303 were selected from the ORFs having the nucleotide sequence represented by SEQ ID NO: 79676.

[11078] The probes having the nucleotide sequence represented by SEQ ID NOS: 131304, 131305, 131306, 131307, 131308, 131309, 131310, 131311, 131312, 131313, 131314 were selected from the ORFs having the nucleotide sequence represented by SEQ ID NO: 79677.

[11079] The probes having the nucleotide sequence represented by SEQ ID NOS: 131315, 131316, 131317, 131318, 131319, 131320, 131321, 131322, 131323, 131324, 131325 were selected from the ORFs having the nucleotide sequence represented by SEQ ID NO: 79678.

[11080] The probes having the nucleotide sequence represented by SEQ ID NOS: 131326, 131327, 131328, 131329, 131330, 131331, 131332, 131333, 131334, 131335, 131336 were selected from the ORFs having the nucleotide sequence represented by SEQ ID NO: 79679.

[11081] The probes having the nucleotide sequence represented by SEQ ID NOS: 131337, 131338, 131339, 131340, 131341, 131342, 131343, 131344, 131345, 131346, 131347 were selected from the ORFs having the nucleotide sequence represented by SEQ ID NO: 79680.

[11082] The probes having the nucleotide sequence represented by SEQ ID NOS: 131348, 131349, 131350, 131351, 131352, 131353, 131354, 131355, 131356, 131357, 131358 were selected from the ORFs having the nucleotide sequence represented by SEQ ID NO: 79681.

[11083] The probes having the nucleotide sequence represented by SEQ ID NOS: 131359, 131360, 131361, 131362, 131363, 131364, 131365, 131366, 131367, 131368, 131369 were selected from the ORFs having the nucleotide sequence represented by SEQ ID NO: 79682.

[11084] The probes having the nucleotide sequence represented by SEQ ID NOS: 131370, 131371, 131372, 131373, 131374, 131375, 131376, 131377, 131378, 131379, 131380 were selected from the ORFs having the nucleotide sequence represented by SEQ ID NO: 79683.

[11085] The probes having the nucleotide sequence represented by SEQ ID NOS: 131381, 131382, 131383, 131384, 131385, 131386, 131387, 131388, 131389, 131390, 131391 were selected from the ORFs having the nucleotide sequence represented by SEQ ID NO: 79684.

[11086] The probes having the nucleotide sequence represented by SEQ ID NOS: 131392, 131393, 131394, 131395, 131396, 131397, 131398, 131399, 131400, 131401, 131402 were selected from the ORFs having the nucleotide sequence represented by SEQ ID NO: 79685.

[11087] The probes having the nucleotide sequence represented by SEQ ID NOS: 131403, 131404, 131405, 131406, 131407, 131408, 131409, 131410, 131411, 131412, 131413 were selected from the ORFs having the nucleotide sequence represented by SEQ ID NO: 79686.

[11088] The probes having the nucleotide sequence represented by SEQ ID NOS: 131414, 131415, 131416, 131417, 131418, 131419, 131420, 131421, 131422, 131423, 131424 were selected from the ORFs having the nucleotide sequence represented by SEQ ID NO: 79687.

[11089] The probes having the nucleotide sequence represented by SEQ ID NOS: 131425, 131426, 131427, 131428, 131429, 131430, 131431, 131432, 131433, 131434, 131435 were selected from the ORFs having the nucleotide sequence represented by SEQ ID NO: 79688.

[11090] The probes having the nucleotide sequence represented by SEQ ID NOS: 131436, 131437, 131438, 131439, 131440, 131441, 131442, 131443, 131444, 131445, 131446 were selected from the ORFs having the nucleotide sequence represented by SEQ ID NO: 79689.

[11091] The probes having the nucleotide sequence represented by SEQ ID NOS: 131447, 131448, 131449, 131450, 131451, 131452, 131453, 131454, 131455, 131456, 131457 were selected from the ORFs having the nucleotide sequence represented by SEQ ID NO: 79690.

[11092] The probes having the nucleotide sequence represented by SEQ ID NOS: 131458, 131459, 131460, 131461, 131462, 131463, 131464, 131465, 131466, 131467, 131468 were selected from the ORFs having the nucleotide sequence represented by SEQ ID NO: 79691.

[11093] The probes having the nucleotide sequence represented by SEQ ID NOS: 131469, 131470, 131471, 131472, 131473, 131474, 131475, 131476, 131477, 131478, 131479 were selected from the ORFs having the nucleotide sequence represented by SEQ ID NO: 79692.

[11094] The probes having the nucleotide sequence represented by SEQ ID NOS: 131480, 131481, 131482, 131483, 131484, 131485, 131486, 131487, 131488, 131489, 131490 were selected from the ORFs having the nucleotide sequence represented by SEQ ID NO: 79693.

[11095] The probes having the nucleotide sequence represented by SEQ ID NOS: 131491, 131492, 131493, 131494, 131495, 131496, 131497, 131498, 131499, 131500, 131501 were selected from the ORFs having the nucleotide sequence represented by SEQ ID NO: 79694.

[11096] The probes having the nucleotide sequence represented by SEQ ID NOS: 131502, 131503, 131504, 131505, 131506, 131507, 131508, 131509, 131510, 131511, 131512 were selected from the ORFs having the nucleotide sequence represented by SEQ ID NO: 79695.

[11097] The probes having the nucleotide sequence represented by SEQ ID NOS: 131513, 131514, 131515, 131516, 131517, 131518, 131519, 131520, 131521, 131522, 131523 were selected from the ORFs having the nucleotide sequence represented by SEQ ID NO: 79696.

[11098] The probes having the nucleotide sequence represented by SEQ ID NOS: 131524, 131525, 131526, 131527, 131528, 131529, 131530, 131531, 131532, 131533, 131534 were selected from the ORFs having the nucleotide sequence represented by SEQ ID NO: 79697.

[11099] The probes having the nucleotide sequence represented by SEQ ID NOS: 131535, 131536, 131537, 131538, 131539, 131540, 131541, 131542, 131543, 131544, 131545 were selected from the ORFs having the nucleotide sequence represented by SEQ ID NO: 79698.

[11100] The probes having the nucleotide sequence represented by SEQ ID NOS: 131546, 131547, 131548, 131549, 131550, 131551, 131552, 131553, 131554, 131555, 131556 were selected from the ORFs having the nucleotide sequence represented by SEQ ID NO: 79699.

[11101] The probes having the nucleotide sequence represented by SEQ ID NOS: 131557, 131558, 131559, 131560, 131561, 131562, 131563, 131564, 131565, 131566, 131567 were selected from the ORFs having the nucleotide sequence represented by SEQ ID NO: 79700.

[11102] The probes having the nucleotide sequence represented by SEQ ID NOS: 131568, 131569, 131570, 131571, 131572, 131573, 131574, 131575, 131576, 131577, 131578 were selected from the ORFs having the nucleotide sequence represented by SEQ ID NO: 79701.

[11103] The probes having the nucleotide sequence represented by SEQ ID NOS: 131579, 131580, 131581, 131582, 131583, 131584, 131585, 131586, 131587, 131588, 131589 were selected from the ORFs having the nucleotide sequence represented by SEQ ID NO: 79702.

[11104] The probes having the nucleotide sequence represented by SEQ ID NOS: 131590, 131591, 131592, 131593, 131594, 131595, 131596, 131597, 131598, 131599, 131600 were selected from the ORFs having the nucleotide sequence represented by SEQ ID NO: 79703.

[11105] The probes having the nucleotide sequence represented by SEQ ID NOS: 131601, 131602, 131603, 131604, 131605, 131606, 131607, 131608, 131609, 131610, 131611 were selected from the ORFs having the nucleotide sequence represented by SEQ ID NO: 79704.

[11106] The probes having the nucleotide sequence represented by SEQ ID NOS: 131612, 131613, 131614, 131615, 131616, 131617, 131618, 131619, 131620, 131621, 131622 were selected from the ORFs having the nucleotide sequence represented by SEQ ID NO: 79705.

[11107] The probes having the nucleotide sequence represented by SEQ ID NOS: 131623, 131624, 131625, 131626, 131627, 131628, 131629, 131630, 131631, 131632, 131633 were selected from the ORFs having the nucleotide sequence represented by SEQ ID NO: 79706.

[11108] The probes having the nucleotide sequence represented by SEQ ID NOS: 131634, 131635, 131636, 131637, 131638, 131639, 131640, 131641, 131642, 131643, 131644 were selected from the ORFs having the nucleotide sequence represented by SEQ ID NO: 79707.

[11109] The probes having the nucleotide sequence represented by SEQ ID NOS: 131645, 131646, 131647, 131648, 131649, 131650, 131651, 131652, 131653, 131654, 131655 were selected from the ORFs having the nucleotide sequence represented by SEQ ID NO: 79708.

[11110] The probes having the nucleotide sequence represented by SEQ ID NOS: 131656, 131657, 131658, 131659, 131660, 131661, 131662, 131663, 131664, 131665, 131666 were selected from the ORFs having the nucleotide sequence represented by SEQ ID NO: 79709.

[11111] The probes having the nucleotide sequence represented by SEQ ID NOS: 131667, 131668, 131669, 131670, 131671, 131672, 131673, 131674, 131675, 131676, 131677 were selected from the ORFs having the nucleotide sequence represented by SEQ ID NO: 79710.

[11112] The probes having the nucleotide sequence represented by SEQ ID NOS: 131678, 131679, 131680, 131681, 131682, 131683, 131684, 131685, 131686, 131687, 131688 were selected from the ORFs having the nucleotide sequence represented by SEQ ID NO: 79711.

[11113] The probes having the nucleotide sequence represented by SEQ ID NOS: 131689, 131690, 131691, 131692, 131693, 131694, 131695, 131696, 131697, 131698, 131699 were selected from the ORFs having the nucleotide sequence represented by SEQ ID NO: 79712.

[11114] The probes having the nucleotide sequence represented by SEQ ID NOS: 131700, 131701, 131702, 131703, 131704, 131705, 131706, 131707, 131708, 131709, 131710 were selected from the ORFs having the nucleotide sequence represented by SEQ ID NO: 79713.

[11115] The probes having the nucleotide sequence represented by SEQ ID NOS: 131711, 131712, 131713, 131714, 131715, 131716, 131717, 131718, 131719, 131720, 131721 were selected from the ORFs having the nucleotide sequence represented by SEQ ID NO: 79714.

[11116] The probes having the nucleotide sequence represented by SEQ ID NOS: 131722, 131723, 131724, 131725, 131726, 131727, 131728, 131729, 131730, 131731, 131732 were selected from the ORFs having the nucleotide sequence represented by SEQ ID NO: 79715.

[11117] The probes having the nucleotide sequence represented by SEQ ID NOS: 131733, 131734, 131735, 131736, 131737, 131738, 131739, 131740, 131741, 131742, 131743 were selected from the ORFs having the nucleotide sequence represented by SEQ ID NO: 79716.

[11118] The probes having the nucleotide sequence represented by SEQ ID NOS: 131744, 131745, 131746, 131747, 131748, 131749, 131750, 131751, 131752, 131753, 131754 were selected from the ORFs having the nucleotide sequence represented by SEQ ID NO: 79717.

[11119] The probes having the nucleotide sequence represented by SEQ ID NOS: 131755, 131756, 131757, 131758, 131759, 131760, 131761, 131762, 131763, 131764, 131765 were selected from the ORFs having the nucleotide sequence represented by SEQ ID NO: 79718.

[11120] The probes having the nucleotide sequence represented by SEQ ID NOS: 131766, 131767, 131768, 131769, 131770, 131771, 131772, 131773, 131774, 131775, 131776 were selected from the ORFs having the nucleotide sequence represented by SEQ ID NO: 79719.

[11121] The probes having the nucleotide sequence represented by SEQ ID NOS: 131777, 131778, 131779, 131780, 131781, 131782, 131783, 131784, 131785, 131786, 131787 were selected from the ORFs having the nucleotide sequence represented by SEQ ID NO: 79720.

[11122] The probes having the nucleotide sequence represented by SEQ ID NOS: 131788, 131789, 131790, 131791, 131792, 131793, 131794, 131795, 131796, 131797, 131798 were selected from the ORFs having the nucleotide sequence represented by SEQ ID NO: 79721.

[11123] The probes having the nucleotide sequence represented by SEQ ID NOS: 131799, 131800, 131801, 131802, 131803, 131804, 131805, 131806, 131807, 131808, 131809 were selected from the ORFs having the nucleotide sequence represented by SEQ ID NO: 79722.

[11124] The probes having the nucleotide sequence represented by SEQ ID NOS: 131810, 131811, 131812, 131813, 131814, 131815, 131816, 131817, 131818, 131819, 131820 were selected from the ORFs having the nucleotide sequence represented by SEQ ID NO: 79723.

[11125] The probes having the nucleotide sequence represented by SEQ ID NOS: 131821, 131822, 131823, 131824, 131825, 131826, 131827, 131828, 131829, 131830, 131831 were selected from the ORFs having the nucleotide sequence represented by SEQ ID NO: 79724.

[11126] The probes having the nucleotide sequence represented by SEQ ID NOS: 131832, 131833, 131834, 131835, 131836, 131837, 131838, 131839, 131840, 131841, 131842 were selected from the ORFs having the nucleotide sequence represented by SEQ ID NO: 79725.

[11127] The probes having the nucleotide sequence represented by SEQ ID NOS: 131843, 131844, 131845, 131846, 131847, 131848, 131849, 131850, 131851, 131852, 131853 were selected from the ORFs having the nucleotide sequence represented by SEQ ID NO: 79726.

[11128] The probes having the nucleotide sequence represented by SEQ ID NOS: 131854, 131855, 131856, 131857, 131858, 131859, 131860, 131861, 131862, 131863, 131864 were selected from the ORFs having the nucleotide sequence represented by SEQ ID NO: 79727.

[11129] The probes having the nucleotide sequence represented by SEQ ID NOS: 131865, 131866, 131867, 131868, 131869, 131870, 131871, 131872, 131873, 131874, 131875 were selected from the ORFs having the nucleotide sequence represented by SEQ ID NO: 79728.

[11130] The probes having the nucleotide sequence represented by SEQ ID NOS: 131876, 131877, 131878, 131879, 131880, 131881, 131882, 131883, 131884, 131885, 131886 were selected from the ORFs having the nucleotide sequence represented by SEQ ID NO: 79729.

[11131] The probes having the nucleotide sequence represented by SEQ ID NOS: 131887, 131888, 131889, 131890, 131891, 131892, 131893, 131894, 131895, 131896, 131897 were selected from the ORFs having the nucleotide sequence represented by SEQ ID NO: 79730.

[11132] The probes having the nucleotide sequence represented by SEQ ID NOS: 131898, 131899, 131900, 131901, 131902, 131903, 131904, 131905, 131906, 131907, 131908 were selected from the ORFs having the nucleotide sequence represented by SEQ ID NO: 79731.

[11133] The probes having the nucleotide sequence represented by SEQ ID NOS: 131909, 131910, 131911, 131912, 131913, 131914, 131915, 131916, 131917, 131918, 131919 were selected from the ORFs having the nucleotide sequence represented by SEQ ID NO: 79732.

[11134] The probes having the nucleotide sequence represented by SEQ ID NOS: 131920, 131921, 131922, 131923, 131924, 131925, 131926, 131927, 131928, 131929, 131930 were selected from the ORFs having the nucleotide sequence represented by SEQ ID NO: 79733.

[11135] The probes having the nucleotide sequence represented by SEQ ID NOS: 131931, 131932, 131933, 131934, 131935, 131936, 131937, 131938, 131939, 131940, 131941 were selected from the ORFs having the nucleotide sequence represented by SEQ ID NO: 79734.

[11136] The probes having the nucleotide sequence represented by SEQ ID NOS: 131942, 131943, 131944, 131945, 131946, 131947, 131948, 131949, 131950, 131951, 131952 were selected from the ORFs having the nucleotide sequence represented by SEQ ID NO: 79735.

[11137] The probes having the nucleotide sequence represented by SEQ ID NOS: 131953, 131954, 131955, 131956, 131957, 131958, 131959, 131960, 131961, 131962, 131963 were selected from the ORFs having the nucleotide sequence represented by SEQ ID NO: 79736.

[11138] The probes having the nucleotide sequence represented by SEQ ID NOS: 131964, 131965, 131966, 131967, 131968, 131969, 131970, 131971, 131972, 131973, 131974 were selected from the ORFs having the nucleotide sequence represented by SEQ ID NO: 79737.

[11139] The probes having the nucleotide sequence represented by SEQ ID NOS: 131975, 131976, 131977, 131978, 131979, 131980, 131981, 131982, 131983, 131984, 131985 were selected from the ORFs having the nucleotide sequence represented by SEQ ID NO: 79738.

[11140] The probes having the nucleotide sequence represented by SEQ ID NOS: 131986, 131987, 131988, 131989, 131990, 131991, 131992, 131993, 131994, 131995, 131996 were selected from the ORFs having the nucleotide sequence represented by SEQ ID NO: 79739.

[11141] The probes having the nucleotide sequence represented by SEQ ID NOS: 131997, 131998, 131999, 132000, 132001, 132002, 132003, 132004, 132005, 132006, 132007 were selected from the ORFs having the nucleotide sequence represented by SEQ ID NO: 79740.

[11142] The probes having the nucleotide sequence represented by SEQ ID NOS: 132008, 132009, 132010, 132011, 132012, 132013, 132014, 132015, 132016, 132017, 132018 were selected from the ORFs having the nucleotide sequence represented by SEQ ID NO: 79741.

[11143] The probes having the nucleotide sequence represented by SEQ ID NOS: 132019, 132020, 132021, 132022, 132023, 132024, 132025, 132026, 132027, 132028, 132029 were selected from the ORFs having the nucleotide sequence represented by SEQ ID NO: 79742.

[11144] The probes having the nucleotide sequence represented by SEQ ID NOS: 132030, 132031, 132032, 132033, 132034, 132035, 132036, 132037, 132038, 132039, 132040 were selected from the ORFs having the nucleotide sequence represented by SEQ ID NO: 79743.

[11145] The probes having the nucleotide sequence represented by SEQ ID NOS: 132041, 132042, 132043, 132044, 132045, 132046, 132047, 132048, 132049, 132050, 132051 were selected from the ORFs having the nucleotide sequence represented by SEQ ID NO: 79744.

[11146] The probes having the nucleotide sequence represented by SEQ ID NOS: 132052, 132053, 132054, 132055, 132056, 132057, 132058, 132059, 132060, 132061, 132062 were selected from the ORFs having the nucleotide sequence represented by SEQ ID NO: 79745.

[11147] The probes having the nucleotide sequence represented by SEQ ID NOS: 132063, 132064, 132065, 132066, 132067, 132068, 132069, 132070, 132071, 132072, 132073 were selected from the ORFs having the nucleotide sequence represented by SEQ ID NO: 79746.

[11148] The probes having the nucleotide sequence represented by SEQ ID NOS: 132074, 132075, 132076, 132077, 132078, 132079, 132080, 132081, 132082, 132083, 132084 were selected from the ORFs having the nucleotide sequence represented by SEQ ID NO: 79747.

[11149] The probes having the nucleotide sequence represented by SEQ ID NOS: 132085, 132086, 132087, 132088, 132089, 132090, 132091, 132092, 132093, 132094, 132095 were selected from the ORFs having the nucleotide sequence represented by SEQ ID NO: 79748.

[11150] The probes having the nucleotide sequence represented by SEQ ID NOS: 132096, 132097, 132098, 132099, 132100, 132101, 132102, 132103, 132104, 132105, 132106 were selected from the ORFs having the nucleotide sequence represented by SEQ ID NO: 79749.

[11151] The probes having the nucleotide sequence represented by SEQ ID NOS: 132107, 132108, 132109, 132110, 132111, 132112, 132113, 132114, 132115, 132116, 132117 were selected from the ORFs having the nucleotide sequence represented by SEQ ID NO: 79750.

[11152] The probes having the nucleotide sequence represented by SEQ ID NOS: 132118, 132119, 132120, 132121, 132122, 132123, 132124, 132125, 132126, 132127, 132128 were selected from the ORFs having the nucleotide sequence represented by SEQ ID NO: 79751.

[11153] The probes having the nucleotide sequence represented by SEQ ID NOS: 132129, 132130, 132131, 132132, 132133, 132134, 132135, 132136, 132137, 132138, 132139 were selected from the ORFs having the nucleotide sequence represented by SEQ ID NO: 79752.

[11154] The probes having the nucleotide sequence represented by SEQ ID NOS: 132140, 132141, 132142, 132143, 132144, 132145, 132146, 132147, 132148, 132149, 132150 were selected from the ORFs having the nucleotide sequence represented by SEQ ID NO: 79753.

[11155] The probes having the nucleotide sequence represented by SEQ ID NOS: 132151, 132152, 132153, 132154, 132155, 132156, 132157, 132158, 132159, 132160, 132161 were selected from the ORFs having the nucleotide sequence represented by SEQ ID NO: 79754.

[11156] The probes having the nucleotide sequence represented by SEQ ID NOS: 132162, 132163, 132164, 132165, 132166, 132167, 132168, 132169, 132170, 132171, 132172 were selected from the ORFs having the nucleotide sequence represented by SEQ ID NO: 79755.

[11157] The probes having the nucleotide sequence represented by SEQ ID NOS: 132173, 132174, 132175, 132176, 132177, 132178, 132179, 132180, 132181, 132182, 132183 were selected from the ORFs having the nucleotide sequence represented by SEQ ID NO: 79756.

[11158] The probes having the nucleotide sequence represented by SEQ ID NOS: 132184, 132185, 132186, 132187, 132188, 132189, 132190, 132191, 132192, 132193, 132194 were selected from the ORFs having the nucleotide sequence represented by SEQ ID NO: 79757.

[11159] The probes having the nucleotide sequence represented by SEQ ID NOS: 132195, 132196, 132197, 132198, 132199, 132200, 132201, 132202, 132203, 132204, 132205 were selected from the ORFs having the nucleotide sequence represented by SEQ ID NO: 79758.

[11160] The probes having the nucleotide sequence represented by SEQ ID NOS: 132206, 132207, 132208, 132209, 132210, 132211, 132212, 132213, 132214, 132215, 132216 were selected from the ORFs having the nucleotide sequence represented by SEQ ID NO: 79759.

[11161] The probes having the nucleotide sequence represented by SEQ ID NOS: 132217, 132218, 132219, 132220, 132221, 132222, 132223, 132224, 132225, 132226, 132227 were selected from the ORFs having the nucleotide sequence represented by SEQ ID NO: 79760.

[11162] The probes having the nucleotide sequence represented by SEQ ID NOS: 132228, 132229, 132230, 132231, 132232, 132233, 132234, 132235, 132236, 132237, 132238 were selected from the ORFs having the nucleotide sequence represented by SEQ ID NO: 79761.

[11163] The probes having the nucleotide sequence represented by SEQ ID NOS: 132239, 132240, 132241, 132242, 132243, 132244, 132245, 132246, 132247, 132248, 132249, 132250, 132251, 132252, 132253, 132254, 132255, 132256, 132257, 132258, 132259, 132260 were selected from the ORFs having the nucleotide sequence represented by SEQ ID NO: 79762.

[11164] The probes having the nucleotide sequence represented by SEQ ID NOS: 132261, 132262, 132263, 132264, 132265, 132266, 132267, 132268, 132269, 132270, 132271 were selected from the ORFs having the nucleotide sequence represented by SEQ ID NO: 79763.

[11165] The probes having the nucleotide sequence represented by SEQ ID NOS: 132272, 132273, 132274, 132275, 132276, 132277, 132278, 132279, 132280, 132281, 132282 were selected from the ORFs having the nucleotide sequence represented by SEQ ID NO: 79764.

[11166] The probes having the nucleotide sequence represented by SEQ ID NOS: 132283, 132284, 132285, 132286, 132287, 132288, 132289, 132290, 132291, 132292, 132293 were selected from the ORFs having the nucleotide sequence represented by SEQ ID NO: 79765.

[11167] The probes having the nucleotide sequence represented by SEQ ID NOS: 132294, 132295, 132296, 132297, 132298, 132299, 132300, 132301, 132302, 132303, 132304 were selected from the ORFs having the nucleotide sequence represented by SEQ ID NO: 79766.

[11168] The probes having the nucleotide sequence represented by SEQ ID NOS: 132305, 132306, 132307, 132308, 132309, 132310, 132311, 132312, 132313, 132314, 132315 were selected from the ORFs having the nucleotide sequence represented by SEQ ID NO: 79767.

[11169] The probes having the nucleotide sequence represented by SEQ ID NOS: 132316, 132317, 132318, 132319, 132320, 132321, 132322, 132323, 132324, 132325, 132326 were selected from the ORFs having the nucleotide sequence represented by SEQ ID NO: 79768.

[11170] The probes having the nucleotide sequence represented by SEQ ID NOS: 132327, 132328, 132329, 132330, 132331, 132332, 132333, 132334, 132335, 132336, 132337 were selected from the ORFs having the nucleotide sequence represented by SEQ ID NO: 79769.

[11171] The probes having the nucleotide sequence represented by SEQ ID NOS: 132338, 132339, 132340, 132341, 132342, 132343, 132344, 132345, 132346, 132347, 132348 were selected from the ORFs having the nucleotide sequence represented by SEQ ID NO: 79770.

[11172] The probes having the nucleotide sequence represented by SEQ ID NOS: 132349, 132350, 132351, 132352, 132353, 132354, 132355, 132356, 132357, 132358, 132359 were selected from the ORFs having the nucleotide sequence represented by SEQ ID NO: 79771.

[11173] The probes having the nucleotide sequence represented by SEQ ID NOS: 132360, 132361, 132362, 132363, 132364, 132365, 132366, 132367, 132368, 132369, 132370 were selected from the ORFs having the nucleotide sequence represented by SEQ ID NO: 79772.

[11174] The probes having the nucleotide sequence represented by SEQ ID NOS: 132371, 132372, 132373, 132374, 132375, 132376, 132377, 132378, 132379, 132380, 132381 were selected from the ORFs having the nucleotide sequence represented by SEQ ID NO: 79773.

[11175] The probes having the nucleotide sequence represented by SEQ ID NOS: 132382, 132383, 132384, 132385, 132386, 132387, 132388, 132389, 132390, 132391, 132392 were selected from the ORFs having the nucleotide sequence represented by SEQ ID NO: 79774.

[11176] The probes having the nucleotide sequence represented by SEQ ID NOS: 132393, 132394, 132395, 132396, 132397, 132398, 132399, 132400, 132401, 132402, 132403 were selected from the ORFs having the nucleotide sequence represented by SEQ ID NO: 79775.

[11177] The probes having the nucleotide sequence represented by SEQ ID NOS: 132404, 132405, 132406, 132407, 132408, 132409, 132410, 132411, 132412, 132413, 132414 were selected from the ORFs having the nucleotide sequence represented by SEQ ID NO: 79776.

[11178] The probes having the nucleotide sequence represented by SEQ ID NOS: 132415, 132416, 132417, 132418, 132419, 132420, 132421, 132422, 132423, 132424, 132425 were selected from the ORFs having the nucleotide sequence represented by SEQ ID NO: 79777.

[11179] The probes having the nucleotide sequence represented by SEQ ID NOS: 132426, 132427, 132428, 132429, 132430, 132431, 132432, 132433, 132434, 132435, 132436 were selected from the ORFs having the nucleotide sequence represented by SEQ ID NO: 79778.

[11180] The probes having the nucleotide sequence represented by SEQ ID NOS: 132437, 132438, 132439, 132440, 132441, 132442, 132443, 132444, 132445, 132446, 132447 were selected from the ORFs having the nucleotide sequence represented by SEQ ID NO: 79779.

[11181] The probes having the nucleotide sequence represented by SEQ ID NOS: 132448, 132449, 132450, 132451, 132452, 132453, 132454, 132455, 132456, 132457, 132458 were selected from the ORFs having the nucleotide sequence represented by SEQ ID NO: 79780.

[11182] The probes having the nucleotide sequence represented by SEQ ID NOS: 132459, 132460, 132461, 132462, 132463, 132464, 132465, 132466, 132467, 132468, 132469 were selected from the ORFs having the nucleotide sequence represented by SEQ ID NO: 79781.

[11183] The probes having the nucleotide sequence represented by SEQ ID NOS: 132470, 132471, 132472, 132473, 132474, 132475, 132476, 132477, 132478, 132479, 132480 were selected from the ORFs having the nucleotide sequence represented by SEQ ID NO: 79782.

[11184] The probes having the nucleotide sequence represented by SEQ ID NOS: 132481, 132482, 132483, 132484, 132485, 132486, 132487, 132488, 132489, 132490, 132491 were selected from the ORFs having the nucleotide sequence represented by SEQ ID NO: 79783.

[11185] The probes having the nucleotide sequence represented by SEQ ID NOS: 132492, 132493, 132494, 132495, 132496, 132497, 132498, 132499, 132500, 132501, 132502 were selected from the ORFs having the nucleotide sequence represented by SEQ ID NO: 79784.

[11186] The probes having the nucleotide sequence represented by SEQ ID NOS: 132503, 132504, 132505, 132506, 132507, 132508, 132509, 132510, 132511, 132512, 132513 were selected from the ORFs having the nucleotide sequence represented by SEQ ID NO: 79785.

[11187] The probes having the nucleotide sequence represented by SEQ ID NOS: 132514, 132515, 132516, 132517, 132518, 132519, 132520, 132521, 132522, 132523, 132524 were selected from the ORFs having the nucleotide sequence represented by SEQ ID NO: 79786.

[11188] The probes having the nucleotide sequence represented by SEQ ID NOS: 132525, 132526, 132527, 132528, 132529, 132530, 132531, 132532, 132533, 132534, 132535 were selected from the ORFs having the nucleotide sequence represented by SEQ ID NO: 79787.

[11189] The probes having the nucleotide sequence represented by SEQ ID NOS: 132536, 132537, 132538, 132539, 132540, 132541, 132542, 132543, 132544, 132545, 132546 were selected from the ORFs having the nucleotide sequence represented by SEQ ID NO: 79788.

[11190] The probes having the nucleotide sequence represented by SEQ ID NOS: 132547, 132548, 132549, 132550, 132551, 132552, 132553, 132554, 132555, 132556, 132557, 132558, 132559, 132560, 132561, 132562, 132563, 132564, 132565, 132566, 132567, 132568 were selected from the ORFs having the nucleotide sequence represented by SEQ ID NO: 79789.

[11191] The probes having the nucleotide sequence represented by SEQ ID NOS: 132569, 132570, 132571, 132572, 132573, 132574, 132575, 132576, 132577, 132578, 132579 were selected from the ORFs having the nucleotide sequence represented by SEQ ID NO: 79790.

[11192] The probes having the nucleotide sequence represented by SEQ ID NOS: 132580, 132581, 132582, 132583, 132584, 132585, 132586, 132587, 132588, 132589, 132590 were selected from the ORFs having the nucleotide sequence represented by SEQ ID NO: 79791.

[11193] The probes having the nucleotide sequence represented by SEQ ID NOS: 132591, 132592, 132593, 132594, 132595, 132596, 132597, 132598, 132599, 132600, 132601 were selected from the ORFs having the nucleotide sequence represented by SEQ ID NO: 79792.

[11194] The probes having the nucleotide sequence represented by SEQ ID NOS: 132602, 132603, 132604, 132605, 132606, 132607, 132608, 132609, 132610, 132611, 132612 were selected from the ORFs having the nucleotide sequence represented by SEQ ID NO: 79793.

[11195] The probes having the nucleotide sequence represented by SEQ ID NOS: 132613, 132614, 132615, 132616, 132617, 132618, 132619, 132620, 132621, 132622, 132623 were selected from the ORFs having the nucleotide sequence represented by SEQ ID NO: 79794.

[11196] The probes having the nucleotide sequence represented by SEQ ID NOS: 132624, 132625, 132626, 132627, 132628, 132629, 132630, 132631, 132632, 132633, 132634, 132635, 132636, 132637, 132638, 132639, 132640, 132641, 132642, 132643, 132644, 132645 were selected from the ORFs having the nucleotide sequence represented by SEQ ID NO: 79795.

[11197] The probes having the nucleotide sequence represented by SEQ. ID NOS: 132646, 132647, 132648, 132649, 132650, 132651, 132652, 132653, 132654, 132655, 132656 were selected from the ORFs having the nucleotide sequence represented by SEQ ID NO: 79796.

[11198] The probes having the nucleotide sequence represented by SEQ ID NOS: 132657, 132658, 132659, 132660, 132661, 132662, 132663, 132664, 132665, 132666, 132667 were selected from the ORFs having the nucleotide sequence represented by SEQ ID NO: 79797.

[11199] The probes having the nucleotide sequence represented by SEQ ID NOS: 132668, 132669, 132670, 132671, 132672, 132673, 132674, 132675, 132676, 132677, 132678 were selected from the ORFs having the nucleotide sequence represented by SEQ ID NO: 79798.

[11200] The probes having the nucleotide sequence represented by SEQ ID NOS: 132679, 132680, 132681, 132682, 132683, 132684, 132685, 132686, 132687, 132688, 132689 were selected from the ORFs having the nucleotide sequence represented by SEQ ID NO: 79799.

[11201] The probes having the nucleotide sequence represented by SEQ ID NOS: 132690, 132691, 132692, 132693, 132694, 132695, 132696, 132697, 132698, 132699, 132700 were selected from the ORFs having the nucleotide sequence represented by SEQ ID NO: 79800.

[11202] The probes having the nucleotide sequence represented by SEQ ID NOS: 132701, 132702, 132703, 132704, 132705, 132706, 132707, 132708, 132709, 132710, 132711 were selected from the ORFs having the nucleotide sequence represented by SEQ ID NO: 79801.

[11203] The probes having the nucleotide sequence represented by SEQ ID NOS: 132712, 132713, 132714, 132715, 132716, 132717, 132718, 132719, 132720, 132721, 132722 were selected from the ORFs having the nucleotide sequence represented by SEQ ID NO: 79802.

[11204] The probes having the nucleotide sequence represented by SEQ ID NOS: 132723, 132724, 132725, 132726, 132727, 132728, 132729, 132730, 132731, 132732, 132733 were selected from the ORFs having the nucleotide sequence represented by SEQ ID NO: 79803.

[11205] The probes having the nucleotide sequence represented by SEQ ID NOS: 132734, 132735, 132736, 132737, 132738, 132739, 132740, 132741, 132742, 132743, 132744 were selected from the ORFs having the nucleotide sequence represented by SEQ ID NO: 79804.

[11206] The probes having the nucleotide sequence represented by SEQ ID NOS: 132745, 132746, 132747, 132748, 132749, 132750, 132751, 132752, 132753, 132754, 132755 were selected from the ORFs having the nucleotide sequence represented by SEQ ID NO: 79805.

[11207] The probes having the nucleotide sequence represented by SEQ ID NOS: 132756, 132757, 132758, 132759, 132760, 132761, 132762, 132763, 132764, 132765, 132766 were selected from the ORFs having the nucleotide sequence represented by SEQ ID NO: 79806.

[11208] The probes having the nucleotide sequence represented by SEQ ID NOS: 132767, 132768, 132769, 132770, 132771, 132772, 132773, 132774, 132775, 132776, 132777 were selected from the ORFs having the nucleotide sequence represented by SEQ ID NO: 79807.

[11209] The probes having the nucleotide sequence represented by SEQ ID NOS: 132778, 132779, 132780, 132781, 132782, 132783, 132784, 132785, 132786, 132787, 132788 were selected from the ORFs having the nucleotide sequence represented by SEQ ID NO: 79808.

[11210] The probes having the nucleotide sequence represented by SEQ ID NOS: 132789, 132790, 132791, 132792, 132793, 132794, 132795, 132796, 132797, 132798, 132799 were selected from the ORFs having the nucleotide sequence represented by SEQ ID NO: 79809.

[11211] The probes having the nucleotide sequence represented by SEQ ID NOS: 132800, 132801, 132802, 132803, 132804, 132805, 132806, 132807, 132808, 132809, 132810 were selected from the ORFs having the nucleotide sequence represented by SEQ ID NO: 79810.

[11212] The probes having the nucleotide sequence represented by SEQ ID NOS: 132811, 132812, 132813, 132814, 132815, 132816, 132817, 132818, 132819, 132820, 132821 were selected from the ORFs having the nucleotide sequence represented by SEQ ID NO: 79811.

[11213] The probes having the nucleotide sequence represented by SEQ ID NOS: 132822, 132823, 132824, 132825, 132826, 132827, 132828, 132829, 132830, 132831, 132832 were selected from the ORFs having the nucleotide sequence represented by SEQ ID NO: 79812.

[11214] The probes having the nucleotide sequence represented by SEQ ID NOS: 132833, 132834, 132835, 132836, 132837, 132838, 132839, 132840, 132841, 132842, 132843 were selected from the ORFs having the nucleotide sequence represented by SEQ ID NO: 79813.

[11215] The probes having the nucleotide sequence represented by SEQ ID NOS: 132844, 132845, 132846, 132847, 132848, 132849, 132850, 132851, 132852, 132853, 132854 were selected from the ORFs having the nucleotide sequence represented by SEQ ID NO: 79814.

[11216] The probes having the nucleotide sequence represented by SEQ ID NOS: 132855, 132856, 132857, 132858, 132859, 132860, 132861, 132862, 132863, 132864, 132865 were selected from the ORFs having the nucleotide sequence represented by SEQ ID NO: 79815.

[11217] The probes having the nucleotide sequence represented by SEQ ID NOS: 132866, 132867, 132868, 132869, 132870, 132871, 132872, 132873, 132874, 132875, 132876 were selected from the ORFs having the nucleotide sequence represented by SEQ ID NO: 79816.

[11218] The probes having the nucleotide sequence represented by SEQ ID NOS: 132877, 132878, 132879, 132880, 132881, 132882, 132883, 132884, 132885, 132886, 132887, 132888, 132889, 132890, 132891, 132892, 132893, 132894, 132895, 132896, 132897, 132898 were selected from the ORFs having the nucleotide sequence represented by SEQ ID NO: 79817.

[11219] The probes having the nucleotide sequence represented by SEQ ID NOS: 132899, 132900, 132901, 132902, 132903, 132904, 132905, 132906, 132907, 132908, 132909 were selected from the ORFs having the nucleotide sequence represented by SEQ ID NO: 79818.

[11220] The probes having the nucleotide sequence represented by SEQ ID NOS: 132910, 132911, 132912, 132913, 132914, 132915, 132916, 132917, 132918, 132919, 132920 were selected from the ORFs having the nucleotide sequence represented by SEQ ID NO: 79819.

[11221] The probes having the nucleotide sequence represented by SEQ ID NOS: 132921, 132922, 132923, 132924, 132925, 132926, 132927, 132928, 132929, 132930, 132931 were selected from the ORFs having the nucleotide sequence represented by SEQ ID NO: 79820.

[11222] The probes having the nucleotide sequence represented by SEQ ID NOS: 132932, 132933, 132934, 132935, 132936, 132937, 132938, 132939, 132940, 132941, 132942 were selected from the ORFs having the nucleotide sequence represented by SEQ ID NO: 79821.

[11223] The probes having the nucleotide sequence represented by SEQ ID NOS: 132943, 132944, 132945, 132946, 132947, 132948, 132949, 132950, 132951, 132952, 132953 were selected from the ORFs having the nucleotide sequence represented by SEQ ID NO: 79822.

[11224] The probes having the nucleotide sequence represented by SEQ ID NOS: 132954, 132955, 132956, 132957, 132958, 132959, 132960, 132961, 132962, 132963, 132964 were selected from the ORFs having the nucleotide sequence represented by SEQ ID NO: 79823.

[11225] The probes having the nucleotide sequence represented by SEQ ID NOS: 132965, 132966, 132967, 132968, 132969, 132970, 132971, 132972, 132973, 132974, 132975 were selected from the ORFs having the nucleotide sequence represented by SEQ ID NO: 79824.

[11226] The probes having the nucleotide sequence represented by SEQ ID NOS: 132976, 132977, 132978, 132979, 132980, 132981, 132982, 132983, 132984, 132985, 132986 were selected from the ORFs having the nucleotide sequence represented by SEQ ID NO: 79825.

[11227] The probes having the nucleotide sequence represented by SEQ ID NOS: 132987, 132988, 132989, 132990, 132991, 132992, 132993, 132994 were selected from the ORFs having the nucleotide sequence represented by SEQ ID NO: 79826.

[11228] The probes having the nucleotide sequence represented by SEQ ID NOS: 132995, 132996, 132997, 132998, 132999, 133000, 133001, 133002, 133003, 133004, 133005 were selected from the ORFs having the nucleotide sequence represented by SEQ ID NO: 79827.

[11229] The probes having the nucleotide sequence represented by SEQ ID NOS: 133006, 133007, 133008, 133009, 133010, 133011, 133012, 133013, 133014, 133015, 133016 were selected from the ORFs having the nucleotide sequence represented by SEQ ID NO: 79828.

[11230] The probes having the nucleotide sequence represented by SEQ ID NOS: 133017, 133018, 133019, 133020, 133021, 133022, 133023, 133024, 133025, 133026, 133027 were selected from the ORFs having the nucleotide sequence represented by SEQ ID NO: 79829.

[11231] The probes having the nucleotide sequence represented by SEQ ID NOS: 133028, 133029, 133030, 133031, 133032, 133033, 133034, 133035, 133036, 133037, 133038 were selected from the ORFs having the nucleotide sequence represented by SEQ ID NO: 79830.

[11232] The probes having the nucleotide sequence represented by SEQ ID NOS: 133039, 133040, 133041, 133042, 133043, 133044, 133045, 133046, 133047, 133048, 133049 were selected from the ORFs having the nucleotide sequence represented by SEQ ID NO: 79831.

[11233] The probes having the nucleotide sequence represented by SEQ ID NOS: 133050, 133051, 133052, 133053, 133054, 133055, 133056, 133057, 133058, 133059, 133060 were selected from the ORFs having the nucleotide sequence represented by SEQ ID NO: 79832.

[11234] The probes having the nucleotide sequence represented by SEQ ID NOS: 133061, 133062, 133063, 133064, 133065, 133066, 133067, 133068, 133069, 133070, 133071 were selected from the ORFs having the nucleotide sequence represented by SEQ ID NO: 79833.

[11235] The probes having the nucleotide sequence represented by SEQ ID NOS: 133072, 133073, 133074, 133075, 133076, 133077, 133078, 133079, 133080, 133081, 133082 were selected from the ORFs having the nucleotide sequence represented by SEQ ID NO: 79834.

[11236] The probes having the nucleotide sequence represented by SEQ ID NOS: 133083, 133084, 133085, 133086, 133087, 133088, 133089, 133090, 133091, 133092, 133093 were selected from the ORFs having the nucleotide sequence represented by SEQ ID NO: 79835.

[11237] The probes having the nucleotide sequence represented by SEQ ID NOS: 133094, 133095, 133096, 133097, 133098, 133099, 133100, 133101, 133102, 133103, 133104 were selected from the ORFs having the nucleotide sequence represented by SEQ ID NO: 79836.

[11238] The probes having the nucleotide sequence represented by SEQ ID NOS: 133105, 133106, 133107, 133108, 133109, 133110, 133111, 133112, 133113, 133114, 133115 were selected from the ORFs having the nucleotide sequence represented by SEQ ID NO: 79837.

[11239] The probes having the nucleotide sequence represented by SEQ ID NOS: 133116, 133117, 133118, 133119, 133120, 133121, 133122, 133123, 133124, 133125, 133126 were selected from the ORFs having the nucleotide sequence represented by SEQ ID NO: 79838.

[11240] The probes having the nucleotide sequence represented by SEQ ID NOS: 133127, 133128, 133129, 133130, 133131, 133132, 133133, 133134, 133135, 133136, 133137 were selected from the ORFs having the nucleotide sequence represented by SEQ ID NO: 79839.

[11241] The probes having the nucleotide sequence represented by SEQ ID NOS: 133138, 133139, 133140, 133141, 133142, 133143, 133144, 133145, 133146, 133147, 133148 were selected from the ORFs having the nucleotide sequence represented by SEQ ID NO: 79840.

[11242] The probes having the nucleotide sequence represented by SEQ ID NOS: 133149, 133150, 133151, 133152, 133153, 133154, 133155, 133156, 133157, 133158, 133159 were selected from the ORFs having the nucleotide sequence represented by SEQ ID NO: 79841.

[11243] The probes having the nucleotide sequence represented by SEQ ID NOS: 133160, 133161, 133162, 133163, 133164, 133165, 133166, 133167, 133168, 133169, 133170 were selected from the ORFs having the nucleotide sequence represented by SEQ ID NO: 79842.

[11244] The probes having the nucleotide sequence represented by SEQ ID NOS: 133171, 133172, 133173, 133174, 133175, 133176, 133177, 133178, 133179, 133180, 133181 were selected from the ORFs having the nucleotide sequence represented by SEQ ID NO: 79843.

[11245] The probes having the nucleotide sequence represented by SEQ ID NOS: 133182, 133183, 133184, 133185, 133186, 133187, 133188, 133189, 133190, 133191, 133192 were selected from the ORFs having the nucleotide sequence represented by SEQ ID NO: 79844.

[11246] The probes having the nucleotide sequence represented by SEQ ID NOS: 133193, 133194, 133195, 133196, 133197, 133198, 133199, 133200, 133201, 133202, 133203 were selected from the ORFs having the nucleotide sequence represented by SEQ ID NO: 79845.

[11247] The probes having the nucleotide sequence represented by SEQ ID NOS: 133204,133205, 133206, 133207, 133208, 133209, 133210, 133211, 133212, 133213, 133214 were selected from the ORFs having the nucleotide sequence represented by SEQ ID NO: 79846.

[11248] The probes having the nucleotide sequence represented by SEQ ID NOS: 133215, 133216, 133217, 133218, 133219, 133220, 133221, 133222, 133223, 133224, 133225 were selected from the ORFs having the nucleotide sequence represented by SEQ ID NO: 79847.

[11249] The probes having the nucleotide sequence represented by SEQ ID NOS: 133226, 133227, 133228, 133229, 133230, 133231, 133232, 133233, 133234, 133235, 133236 were selected from the ORFs having the nucleotide sequence represented by SEQ ID NO: 79848.

[11250] The probes having the nucleotide sequence represented by SEQ ID NOS: 133237, 133238, 133239, 133240, 133241, 133242, 133243, 133244, 133245, 133246, 133247 were selected from the ORFs having the nucleotide sequence represented by SEQ ID NO: 79849.

[11251] The probes having the nucleotide sequence represented by SEQ ID NOS: 133248, 133249, 133250, 133251, 133252, 133253, 133254, 133255, 133256, 133257, 133258 were selected from the ORFs having the nucleotide sequence represented by SEQ ID NO: 79850.

[11252] The probes having the nucleotide sequence represented by SEQ ID NOS: 133259, 133260, 133261, 133262, 133263, 133264, 133265, 133266, 133267, 133268, 133269 were selected from the ORFs having the nucleotide sequence represented by SEQ ID NO: 79851.

[11253] The probes having the nucleotide sequence represented by SEQ ID NOS: 133270, 133271, 133272, 133273, 133274, 133275, 133276, 133277, 133278, 133279, 133280 were selected from the ORFs having the nucleotide sequence represented by SEQ ID NO: 79852.

[11254] The probes having the nucleotide sequence represented by SEQ ID NOS: 133281, 133282, 133283, 133284, 133285, 133286, 133287, 133288, 133289, 133290, 133291 were selected from the ORFs having the nucleotide sequence represented by SEQ ID NO: 79853.

[11255] The probes having the nucleotide sequence represented by SEQ ID NOS: 133292, 133293, 133294, 133295, 133296, 133297, 133298, 133299, 133300, 133301, 133302 were selected from the ORFs having the nucleotide sequence represented by SEQ ID NO: 79854.

[11256] The probes having the nucleotide sequence represented by SEQ ID NOS: 133303, 133304, 133305, 133306, 133307, 133308, 133309, 133310, 133311, 133312, 133313 were selected from the ORFs having the nucleotide sequence represented by SEQ ID NO: 79855.

[11257] The probes having the nucleotide sequence represented by SEQ ID NOS: 133314, 133315, 133316, 133317, 133318, 133319, 133320, 133321, 133322, 133323, 133324 were selected from the ORFs having the nucleotide sequence represented by SEQ ID NO: 79856.

[11258] The probes having the nucleotide sequence represented by SEQ ID NOS: 133325, 133326, 133327, 133328, 133329, 133330, 133331, 133332, 133333, 133334, 133335 were selected from the ORFs having the nucleotide sequence represented by SEQ ID NO: 79857.

[11259] The probes having the nucleotide sequence represented by SEQ ID NOS: 133336, 133337, 133338, 133339, 133340, 133341, 133342, 133343, 133344, 133345, 133346 were selected from the ORFs having the nucleotide sequence represented by SEQ ID NO: 79858.

[11260] The probes having the nucleotide sequence represented by SEQ ID NOS: 133347, 133348, 133349, 133350, 133351, 133352, 133353, 133354, 133355, 133356, 133357 were selected from the ORFs having the nucleotide sequence represented by SEQ ID NO: 79859.

[11261] The probes having the nucleotide sequence represented by SEQ ID NOS: 133358, 133359, 133360, 133361, 133362, 133363, 133364, 133365, 133366, 133367, 133368 were selected from the ORFs having the nucleotide sequence represented by SEQ ID NO: 79860.

[11262] The probes having the nucleotide sequence represented by SEQ ID NOS: 133369, 133370, 133371, 133372, 133373, 133374, 133375, 133376, 133377, 133378, 133379 were selected from the ORFs having the nucleotide sequence represented by SEQ ID NO: 79861.

[11263] The probes having the nucleotide sequence represented by SEQ ID NOS: 133380, 133381, 133382, 133383, 133384, 133385, 133386, 133387, 133388, 133389, 133390 were selected from the ORFs having the nucleotide sequence represented by SEQ ID NO: 79862.

[11264] The probes having the nucleotide sequence represented by SEQ ID NOS: 133391, 133392, 133393, 133394, 133395, 133396, 133397, 133398, 133399, 133400, 133401 were selected from the ORFs having the nucleotide sequence represented by SEQ ID NO: 79863.

[11265] The probes having the nucleotide sequence represented by SEQ ID NOS: 133402, 133403, 133404, 133405, 133406, 133407, 133408, 133409, 133410, 133411, 133412 were selected from the ORFs having the nucleotide sequence represented by SEQ ID NO: 79864.

[11266] The probes having the nucleotide sequence represented by SEQ ID NOS: 133413, 133414, 133415, 133416, 133417, 133418, 133419, 133420, 133421, 133422, 133423 were selected from the ORFs having the nucleotide sequence represented by SEQ ID NO: 79865.

[11267] The probes having the nucleotide sequence represented by SEQ ID NOS: 133424, 133425, 133426, 133427, 133428, 133429, 133430, 133431, 133432, 133433, 133434 were selected from the ORFs having the nucleotide sequence represented by SEQ ID NO: 79866.

[11268] The probes having the nucleotide sequence represented by SEQ ID NOS: 133435, 133436, 133437, 133438, 133439, 133440, 133441, 133442, 133443, 133444, 133445 were selected from the ORFs having the nucleotide sequence represented by SEQ ID NO: 79867.

[11269] The probes having the nucleotide sequence represented by SEQ ID NOS: 133446, 133447, 133448, 133449, 133450, 133451, 133452, 133453, 133454, 133455, 133456 were selected from the ORFs having the nucleotide sequence represented by SEQ ID NO: 79868.

[11270] The probes having the nucleotide sequence represented by SEQ ID NOS: 133457, 133458, 133459, 133460, 133461, 133462, 133463, 133464, 133465, 133466, 133467 were selected from the ORFs having the nucleotide sequence represented by SEQ ID NO: 79869.

[11271] The probes having the nucleotide sequence represented by SEQ ID NOS: 133468, 133469, 133470, 133471, 133472, 133473, 133474, 133475, 133476, 133477, 133478 were selected from the ORFs having the nucleotide sequence represented by SEQ ID NO: 79870.

[11272] The probes having the nucleotide sequence represented by SEQ ID NOS: 133479, 133480, 133481, 133482, 133483, 133484, 133485, 133486, 133487, 133488, 133489 were selected from the ORFs having the nucleotide sequence represented by SEQ ID NO: 79871.

[11273] The probes having the nucleotide sequence represented by SEQ ID NOS: 133490, 133491, 133492, 133493, 133494, 133495, 133496, 133497, 133498, 133499, 133500 were selected from the ORFs having the nucleotide sequence represented by SEQ ID NO: 79872.

[11274] The probes having the nucleotide sequence represented by SEQ ID NOS: 133501, 133502, 133503, 133504, 133505, 133506, 133507, 133508, 133509, 133510, 133511 were selected from the ORFs having the nucleotide sequence represented by SEQ ID NO: 79873.

[11275] The probes having the nucleotide sequence represented by SEQ ID NOS: 133512, 133513, 133514, 133515, 133516, 133517, 133518, 133519, 133520, 133521, 133522 were selected from the ORFs having the nucleotide sequence represented by SEQ ID NO: 79874.

[11276] The probes having the nucleotide sequence represented by SEQ ID NOS: 133523, 133524, 133525, 133526, 133527, 133528, 133529, 133530, 133531, 133532, 133533 were selected from the ORFs having the nucleotide sequence represented by SEQ ID NO: 79875.

[11277] The probes having the nucleotide sequence represented by SEQ ID NOS: 133534, 133535, 133536, 133537, 133538, 133539, 133540, 133541, 133542, 133543, 133544 were selected from the ORFs having the nucleotide sequence represented by SEQ ID NO: 79876.

[11278] The probes having the nucleotide sequence represented by SEQ ID NOS: 133567, 133568, 133569, 133570, 133571, 133572, 133573, 133574, 133575, 133576, 133577 were selected from the ORFs having the nucleotide sequence represented by SEQ ID NO: 79877.

[11279] The probes having the nucleotide sequence represented by SEQ ID NOS: 133545, 133546, 133547, 133548, 133549, 133550, 133551, 133552, 133553, 133554, 133555 were selected from the ORFs having the nucleotide sequence represented by SEQ ID NO: 79878.

[11280] The probes having the nucleotide sequence represented by SEQ ID NOS: 133556, 133557, 133558, 133559, 133560, 133561, 133562, 133563, 133564, 133565, 133566 were selected from the ORFs having the nucleotide sequence represented by SEQ ID NO: 79879.

[11281] The probes having the nucleotide sequence represented by SEQ ID NOS: 133578, 133579, 133580, 133581, 133582, 133583, 133584, 133585, 133586, 133587, 133588 were selected from the ORFs having the nucleotide sequence represented by SEQ ID NO: 79880.

[11282] The probes having the nucleotide sequence represented by SEQ ID NOS: 133589, 133590, 133591, 133592, 133593, 133594, 133595, 133596, 133597, 133598, 133599 were selected from the ORFs having the nucleotide sequence represented by SEQ ID NO: 79881.

[11283] The probes having the nucleotide sequence represented by SEQ ID NOS: 133600, 133601, 133602, 133603, 133604, 133605, 133606, 133607, 133608, 133609, 133610 were selected from the ORFs having the nucleotide sequence represented by SEQ ID NO: 79882.

[11284] The probes having the nucleotide sequence represented by SEQ ID NOS: 133611, 133612, 133613, 133614, 133615, 133616, 133617, 133618, 133619, 133620, 133621 were selected from the ORFs having the nucleotide sequence represented by SEQ ID NO: 79883.

[11285] The probes having the nucleotide sequence represented by SEQ ID NOS: 133622, 133623, 133624, 133625, 133626, 133627, 133628, 133629, 133630, 133631, 133632 were selected from the ORFs having the nucleotide sequence represented by SEQ ID NO: 79884.

[11286] The probes having the nucleotide sequence represented by SEQ ID NOS: 133633, 133634, 133635, 133636, 133637, 133638, 133639, 133640, 133641, 133642, 133643 were selected from the ORFs having the nucleotide sequence represented by SEQ ID NO: 79885.

[11287] The probes having the nucleotide sequence represented by SEQ ID NOS: 133644, 133645, 133646, 133647, 133648, 133649, 133650, 133651, 133652, 133653, 133654 were selected from the ORFs having the nucleotide sequence represented by SEQ ID NO: 79886.

[11288] The probes having the nucleotide sequence represented by SEQ ID NOS: 133655, 133656, 133657, 133658, 133659, 133660, 133661, 133662, 133663, 133664, 133665 were selected from the ORFs having the nucleotide sequence represented by SEQ ID NO: 79887.

[11289] The probes having the nucleotide sequence represented by SEQ ID NOS: 133666, 133667, 133668, 133669, 133670, 133671, 133672, 133673, 133674, 133675, 133676 were selected from the ORFs having the nucleotide sequence represented by SEQ ID NO: 79888.

[11290] The probes having the nucleotide sequence represented by SEQ ID NOS: 133677, 133678, 133679, 133680, 133681, 133682, 133683, 133684, 133685, 133686, 133687 were selected from the ORFs having the nucleotide sequence represented by SEQ ID NO: 79889.

[11291] The probes having the nucleotide sequence represented by SEQ ID NOS: 133688, 133689, 133690, 133691, 133692, 133693, 133694, 133695, 133696, 133697, 133698 were selected from the ORFs having the nucleotide sequence represented by SEQ ID NO: 79890.

[11292] The probes having the nucleotide sequence represented by SEQ ID NOS: 133699, 133700, 133701, 133702, 133703, 133704, 133705, 133706, 133707, 133708, 133709 were selected from the ORFs having the nucleotide sequence represented by SEQ ID NO: 79891.

[11293] The probes having the nucleotide sequence represented by SEQ ID NOS: 133710, 133711, 133712, 133713, 133714, 133715, 133716, 133717, 133718, 133719, 133720 were selected from the ORFs having the nucleotide sequence represented by SEQ ID NO: 79892.

[11294] The probes having the nucleotide sequence represented by SEQ ID NOS: 133721, 133722, 133723, 133724, 133725, 133726, 133727, 133728, 133729, 133730, 133731 were selected from the ORFs having the nucleotide sequence represented by SEQ ID NO: 79893.

[11295] The probes having the nucleotide sequence represented by SEQ ID NOS: 133732, 133733, 133734, 133735, 133736, 133737, 133738, 133739, 133740, 133741, 133742 were selected from the ORFs having the nucleotide sequence represented by SEQ ID NO: 79894.

[11296] The probes having the nucleotide sequence represented by SEQ ID NOS: 133743, 133744, 133745, 133746, 133747, 133748, 133749, 133750, 133751, 133752, 133753 were selected from the ORFs having the nucleotide sequence represented by SEQ ID NO: 79895.

[11297] The probes having the nucleotide sequence represented by SEQ ID NOS: 133754, 133755, 133756, 133757, 133758, 133759, 133760, 133761, 133762, 133763, 133764 were selected from the ORFs having the nucleotide sequence represented by SEQ ID NO: 79896.

[11298] The probes having the nucleotide sequence represented by SEQ ID NOS: 133765, 133766, 133767, 133768, 133769, 133770, 133771, 133772, 133773, 133774, 133775 were selected from the ORFs having the nucleotide sequence represented by SEQ ID NO: 79897.

[11299] The probes having the nucleotide sequence represented by SEQ ID NOS: 133776, 133777, 133778, 133779, 133780, 133781, 133782, 133783, 133784, 133785, 133786 were selected from the ORFs having the nucleotide sequence represented by SEQ ID NO: 79898.

[11300] The probes having the nucleotide sequence represented by SEQ ID NOS: 133787, 133788, 133789, 133790, 133791, 133792, 133793, 133794, 133795, 133796, 133797 were selected from the ORFs having the nucleotide sequence represented by SEQ ID NO: 79899.

[11301] The probes having the nucleotide sequence represented by SEQ ID NOS: 133798, 133799, 133800, 133801, 133802, 133803, 133804, 133805, 133806, 133807, 133808 were selected from the ORFs having the nucleotide sequence represented by SEQ ID NO: 79900.

[11302] The probes having the nucleotide sequence represented by SEQ ID NOS: 133809, 133810, 133811, 133812, 133813, 133814, 133815, 133816, 133817, 133818, 133819 were selected from the ORFs having the nucleotide sequence represented by SEQ ID NO: 79901.

[11303] The probes having the nucleotide sequence represented by SEQ ID NOS: 133820, 133821, 133822, 133823, 133824, 133825, 133826, 133827, 133828, 133829, 133830 were selected from the ORFs having the nucleotide sequence represented by SEQ ID NO: 79902.

[11304] The probes having the nucleotide sequence represented by SEQ ID NOS: 133831, 133832, 133833, 133834, 133835, 133836, 133837, 133838, 133839, 133840, 133841 were selected from the ORFs having the nucleotide sequence represented by SEQ ID NO: 79903.

[11305] The probes having the nucleotide sequence represented by SEQ ID NOS: 133842, 133843, 133844, 133845, 133846, 133847, 133848, 133849, 133850, 133851, 133852 were selected from the ORFs having the nucleotide sequence represented by SEQ ID NO: 79904.

[11306] The probes having the nucleotide sequence represented by SEQ ID NOS: 133853, 133854, 133855, 133856, 133857, 133858, 133859, 133860, 133861, 133862, 133863 were selected from the ORFs having the nucleotide sequence represented by SEQ ID NO: 79905.

[11307] The probes having the nucleotide sequence represented by SEQ ID NOS: 133864, 133865, 133866, 133867, 133868, 133869, 133870, 133871, 133872, 133873, 133874 were selected from the ORFs having the nucleotide sequence represented by SEQ ID NO: 79906.

[11308] The probes having the nucleotide sequence represented by SEQ ID NOS: 133875, 133876, 133877, 133878, 133879, 133880, 133881, 133882, 133883, 133884, 133885 were selected from the ORFs having the nucleotide sequence represented by SEQ ID NO: 79907.

[11309] The probes having the nucleotide sequence represented by SEQ ID NOS: 133886, 133887, 133888, 133889, 133890, 133891, 133892, 133893, 133894, 133895, 133896 were selected from the ORFs having the nucleotide sequence represented by SEQ ID NO: 79908.

[11310] The probes having the nucleotide sequence represented by SEQ ID NOS: 133897, 133898, 133899, 133900, 133901, 133902, 133903, 133904, 133905, 133906, 133907 were selected from the ORFs having the nucleotide sequence represented by SEQ ID NO: 79909.

[11311] The probes having the nucleotide sequence represented by SEQ ID NOS: 133908, 133909, 133910, 133911, 133912, 133913, 133914, 133915, 133916, 133917, 133918 were selected from the ORFs having the nucleotide sequence represented by SEQ ID NO: 79910.

[11312] The probes having the nucleotide sequence represented by SEQ ID NOS: 133919, 133920, 133921, 133922, 133923, 133924, 133925, 133926, 133927, 133928, 133929 were selected from the ORFs having the nucleotide sequence represented by SEQ ID NO: 79911.

[11313] The probes having the nucleotide sequence represented by SEQ ID NOS: 133930, 133931, 133932, 133933, 133934, 133935, 133936, 133937, 133938, 133939, 133940 were selected from the ORFs having the nucleotide sequence represented by SEQ ID NO: 79912.

[11314] The probes having the nucleotide sequence represented by SEQ ID NOS: 133941, 13394.2, 133943, 133944, 133945, 133946, 133947, 133948, 133949, 133950, 133951 were selected from the ORFs having the nucleotide sequence represented by SEQ ID NO: 79913.

[11315] The probes having the nucleotide sequence represented by SEQ ID NOS: 133952, 133953, 133954, 133955, 133956, 133957, 133958, 133959, 133960, 133961, 133962 were selected from the ORFs having the nucleotide sequence represented by SEQ ID NO: 79914.

[11316] The probes having the nucleotide sequence represented by SEQ ID NOS: 133963, 133964, 133965, 133966, 133967, 133968, 133969, 133970, 133971, 133972, 133973 were selected from the ORFs having the nucleotide sequence represented by SEQ ID NO: 79915.

[11317] The probes having the nucleotide sequence represented by SEQ ID NOS: 133974, 133975, 133976, 133977, 133978, 133979, 133980, 133981, 133982, 133983, 133984 were selected from the ORFs having the nucleotide sequence represented by SEQ ID NO: 79916.

[11318] The probes having the nucleotide sequence represented by SEQ ID NOS: 133985, 133986, 133987, 133988, 133989, 133990, 133991, 133992, 133993, 133994, 133995 were selected from the ORFs having the nucleotide sequence represented by SEQ ID NO: 79917.

[11319] The probes having the nucleotide sequence represented by SEQ ID NOS: 133996, 133997, 133998, 133999, 134000, 134001, 134002, 134003, 134004, 134005, 134006 were selected from the ORFs having the nucleotide sequence represented by SEQ ID NO: 79918.

[11320] The probes having the nucleotide sequence represented by SEQ ID NOS: 134007, 134008, 134009, 134010, 134011, 134012, 134013, 134014, 134015, 134016, 134017 were selected from the ORFs having the nucleotide sequence represented by SEQ ID NO: 79919.

[11321] The probes having the nucleotide sequence represented by SEQ ID NOS: 134018, 134019, 134020, 134021, 134022, 134023, 134024, 134025, 134026, 134027, 134028 were selected from the ORFs having the nucleotide sequence represented by SEQ ID NO: 79920.

[11322] The probes having the nucleotide sequence represented by SEQ ID NOS: 134029, 134030, 134031, 134032, 134033, 134034, 134035, 134036, 134037, 134038, 134039 were selected from the ORFs having the nucleotide sequence represented by SEQ ID NO: 79921.

[11323] The probes having the nucleotide sequence represented by SEQ ID NOS: 134040, 134041, 134042, 134043, 134044, 134045, 134046, 134047, 134048, 134049, 134050 were selected from the ORFs having the nucleotide sequence represented by SEQ ID NO: 79922.

[11324] The probes having the nucleotide sequence represented by SEQ ID NOS: 134051, 134052, 134053, 134054, 134055, 134056, 134057, 134058, 134059, 134060, 134061 were selected from the ORFs having the nucleotide sequence represented by SEQ ID NO: 79923.

[11325] The probes having the nucleotide sequence represented by SEQ ID NOS: 134062, 134063, 134064, 134065, 134066, 134067, 134068, 134069, 134070, 134071, 134072 were selected from the ORFs having the nucleotide sequence represented by SEQ ID NO: 79924.

[11326] The probes having the nucleotide sequence represented by SEQ ID NOS: 134073, 134074, 134075, 134076, 134077, 134078, 134079, 134080, 134081, 134082, 134083 were selected from the ORFs having the nucleotide sequence represented by SEQ ID NO: 79925.

[11327] The probes having the nucleotide sequence represented by SEQ ID NOS: 134084, 134085, 134086, 134087, 134088, 134089, 134090, 134091, 134092, 134093, 134094 were selected from the ORFs having the nucleotide sequence represented by SEQ ID NO: 79926.

[11328] The probes having the nucleotide sequence represented by SEQ ID NOS: 134095, 134096, 134097, 134098, 134099, 134100, 134101, 134102, 134103, 134104, 134105 were selected from the ORFs having the nucleotide sequence represented by SEQ ID NO: 79927.

[11329] The probes having the nucleotide sequence represented by SEQ ID NOS: 134106, 134107, 134108, 134109, 134110, 134111, 134112, 134113, 134114, 134115, 134116 were selected from the ORFs having the nucleotide sequence represented by SEQ ID NO: 79928.

[11330] The probes having the nucleotide sequence represented by SEQ ID NOS: 134117, 134118, 134119, 134120, 134121, 134122, 134123, 134124, 134125, 134126, 134127 were selected from the ORFs having the nucleotide sequence represented by SEQ ID NO: 79929.

[11331] The probes having the nucleotide sequence represented by SEQ ID NOS: 134128, 134129, 134130, 134131, 134132, 134133, 134134, 134135, 134136, 134137, 134138 were selected from the ORFs having the nucleotide sequence represented by SEQ ID NO: 79930.

[11332] The probes having the nucleotide sequence represented by SEQ ID NOS: 134139, 134140, 134141, 134142, 134143, 134144, 134145, 134146, 134147, 134148, 134149 were selected from the ORFs having the nucleotide sequence represented by SEQ ID NO: 79931.

[11333] The probes having the nucleotide sequence represented by SEQ ID NOS: 134150, 134151, 134152, 134153, 134154, 134155, 134156, 134157, 134158, 134159, 134160 were selected from the ORFs having the nucleotide sequence represented by SEQ ID NO: 79932.

[11334] The probes having the nucleotide sequence represented by SEQ ID NOS: 134161, 134162, 134163, 134164, 134165, 134166, 134167, 134168, 134169, 134170, 134171 were selected from the ORFs having the nucleotide sequence represented by SEQ ID NO: 79933.

[11335] The probes having the nucleotide sequence represented by SEQ ID NOS: 134172, 134173, 134174, 134175, 134176, 134177, 134178, 134179, 134180, 134181, 134182 were selected from the ORFs having the nucleotide sequence represented by SEQ ID NO: 79934.

[11336] The probes having the nucleotide sequence represented by SEQ ID NOS: 134183, 134184, 134185, 134186, 134187, 134188, 134189, 134190, 134191, 134192, 134193 were selected from the ORFs having the nucleotide sequence represented by SEQ ID NO: 79935.

[11337] The probes having the nucleotide sequence represented by SEQ ID NOS: 134194, 134195, 134196, 134197, 134198, 134199, 134200, 134201, 134202, 134203, 134204 were selected from the ORFs having the nucleotide sequence represented by SEQ ID NO: 79936.

[11338] The probes having the nucleotide sequence represented by SEQ ID NOS: 134205, 134206, 134207, 134208, 134209, 134210, 134211, 134212, 134213, 134214, 134215 were selected from the ORFs having the nucleotide sequence represented by SEQ ID NO: 79937.

[11339] The probes having the nucleotide sequence represented by SEQ ID NOS: 134216, 134217, 134218, 134219, 134220, 134221, 134222, 134223, 134224, 134225, 134226 were selected from the ORFs having the nucleotide sequence represented by SEQ ID NO: 79938.

[11340] The probes having the nucleotide sequence represented by SEQ ID NOS: 134227, 134228, 134229, 134230, 134231, 134232, 134233, 134234, 134235, 134236, 134237 were selected from the ORFs having the nucleotide sequence represented by SEQ ID NO: 79939.

[11341] The probes having the nucleotide sequence represented by SEQ ID NOS: 134238, 134239, 134240, 134241, 134242, 134243, 134244, 134245, 134246, 134247, 134248 were selected from the ORFs having the nucleotide sequence represented by SEQ ID NO: 79940.

[11342] The probes having the nucleotide sequence represented by SEQ ID NOS: 134249, 134250, 134251, 134252, 134253, 134254, 134255, 134256, 134257, 134258, 134259 were selected from the ORFs having the nucleotide sequence represented by SEQ ID NO: 79941.

[11343] The probes having the nucleotide sequence represented by SEQ ID NOS: 134260, 134261, 134262, 134263, 134264, 134265, 134266, 134267, 134268, 134269, 134270 were selected from the ORFs having the nucleotide sequence represented by SEQ ID NO: 79942.

[11344] The probes having the nucleotide sequence represented by SEQ ID NOS: 134271, 134272, 134273, 134274, 134275, 134276, 134277, 134278, 134279, 134280, 134281 were selected from the ORFs having the nucleotide sequence represented by SEQ ID NO: 79943.

[11345] The probes having the nucleotide sequence represented by SEQ ID NOS: 134282, 134283, 134284, 134285, 134286, 134287, 134288, 134289, 134290, 134291, 134292 were selected from the ORFs having the nucleotide sequence represented by SEQ ID NO: 79944.

[11346] The probes having the nucleotide sequence represented by SEQ ID NOS: 134293, 134294, 134295, 134296, 134297, 134298, 134299, 134300, 134301, 134302, 134303 were selected from the ORFs having the nucleotide sequence represented by SEQ ID NO: 79945.

[11347] The probes having the nucleotide sequence represented by SEQ ID NOS: 134304, 134305, 134306, 134307, 134308, 134309, 134310, 134311, 134312, 134313, 134314 were selected from the ORFs having the nucleotide sequence represented by SEQ ID NO: 79946.

[11348] The probes having the nucleotide sequence represented by SEQ ID NOS: 134315, 134316, 134317, 134318, 134319, 134320, 134321, 134322, 134323, 134324, 134325 were selected from the ORFs having the nucleotide sequence represented by SEQ ID NO: 79947.

[11349] The probes having the nucleotide sequence represented by SEQ ID NOS: 134326, 134327, 134328, 134329, 134330, 134331, 134332, 134333, 134334, 134335, 134336 were selected from the ORFs having the nucleotide sequence represented by SEQ ID NO: 79948.

[11350] The probes having the nucleotide sequence represented by SEQ ID NOS: 134337, 134338, 134339, 134340, 134341, 134342, 134343, 134344, 134345, 134346, 134347 were selected from the ORFs having the nucleotide sequence represented by SEQ ID NO: 79949.

[11351] The probes having the nucleotide sequence represented by SEQ ID NOS: 134348, 134349, 134350, 134351, 134352, 134353, 134354, 134355, 134356, 134357, 134358 were selected from the ORFs having the nucleotide sequence represented by SEQ ID NO: 79950.

[11352] The probes having the nucleotide sequence represented by SEQ ID NOS: 134359, 134360, 134361, 134362, 134363, 134364, 134365, 134366, 134367, 134368, 134369 were selected from the ORFs having the nucleotide sequence represented by SEQ ID NO: 79951.

[11353] The probes having the nucleotide sequence represented by SEQ ID NOS: 134370, 134371, 134372, 134373, 134374, 134375, 134376, 134377, 134378, 134379, 134380 were selected from the ORFs having the nucleotide sequence represented by SEQ ID NO: 79952.

[11354] The probes having the nucleotide sequence represented by SEQ ID NOS: 134381, 134382, 134383, 134384, 134385, 134386, 134387, 134388, 134389, 134390, 134391 were selected from the ORFs having the nucleotide sequence represented by SEQ ID NO: 79953.

[11355] The probes having the nucleotide sequence represented by SEQ ID NOS: 134392, 134393, 134394, 134395, 134396, 134397, 134398, 134399, 134400, 134401, 134402 were selected from the ORFs having the nucleotide sequence represented by SEQ ID NO: 79954.

[11356] The probes having the nucleotide sequence represented by SEQ ID NOS: 134403, 134404, 134405, 134406, 134407, 134408, 134409, 134410, 134411, 134412, 134413 were selected from the ORFs having the nucleotide sequence represented by SEQ ID NO: 79955.

[11357] The probes having the nucleotide sequence represented by SEQ ID NOS: 134414, 134415, 134416, 134417, 134418, 134419, 134420, 134421, 134422, 134423, 134424 were selected from the ORFs having the nucleotide sequence represented by SEQ ID NO: 79956.

[11358] The probes having the nucleotide sequence represented by SEQ ID NOS: 134425, 134426, 134427, 134428, 134429, 134430, 134431, 134432, 134433, 134434, 134435 were selected from the ORFs having the nucleotide sequence represented by SEQ ID NO: 79957.

[11359] The probes having the nucleotide sequence represented by SEQ ID NOS: 134436, 134437, 134438, 134439, 134440, 134441, 134442, 134443, 134444, 134445, 134446 were selected from the ORFs having the nucleotide sequence represented by SEQ ID NO: 79958.

[11360] The probes having the nucleotide sequence represented by SEQ ID NOS: 134447, 134448, 134449, 134450, 134451, 134452, 134453, 134454, 134455, 134456, 134457 were selected from the ORFs having the nucleotide sequence represented by SEQ ID NO: 79959.

[11361] The probes having the nucleotide sequence represented by SEQ ID NOS: 134458, 134459, 134460, 134461, 134462, 134463, 134464, 134465, 134466, 134467, 134468 were selected from the ORFs having the nucleotide sequence represented by SEQ ID NO: 79960.

[11362] The probes having the nucleotide sequence represented by SEQ ID NOS: 134469, 134470, 134471, 134472, 134473, 134474, 134475, 134476, 134477, 134478, 134479 were selected from the ORFs having the nucleotide sequence represented by SEQ ID NO: 79961.

[11363] The probes having the nucleotide sequence represented by SEQ ID NOS: 134480, 134481, 134482, 134483, 134484, 134485, 134486, 134487, 134488, 134489, 134490 were selected from the ORFs having the nucleotide sequence represented by SEQ ID NO: 79962.

[11364] The probes having the nucleotide sequence represented by SEQ ID NOS: 134491, 134492, 134493, 134494, 134495, 134496, 134497, 134498, 134499, 134500, 134501 were selected from the ORFs having the nucleotide sequence represented by SEQ ID NO: 79963.

[11365] The probes having the nucleotide sequence represented by SEQ ID NOS: 134502, 134503, 134504, 134505, 134506, 134507, 134508, 134509, 134510, 134511, 134512 were selected from the ORFs having the nucleotide sequence represented by SEQ ID NO: 79964.

[11366] The probes having the nucleotide sequence represented by SEQ ID NOS: 134513, 134514, 134515, 134516, 134517, 134518, 134519, 134520, 134521, 134522, 134523 were selected from the ORFs having the nucleotide sequence represented by SEQ ID NO: 79965.

[11367] The probes having the nucleotide sequence represented by SEQ ID NOS: 134524, 134525, 134526, 134527, 134528, 134529, 134530, 134531, 134532, 134533, 134534 were selected from the ORFs having the nucleotide sequence represented by SEQ ID NO: 79966.

[11368] The probes having the nucleotide sequence represented by SEQ ID NOS: 134535, 134536, 134537, 134538, 134539, 134540, 134541, 134542, 134543, 134544, 134545 were selected from the ORFs having the nucleotide sequence represented by SEQ ID NO: 79967.

[11369] The probes having the nucleotide sequence represented by SEQ ID NOS: 134546, 134547, 134548, 134549, 134550, 134551, 134552, 134553, 134554, 134555, 134556 were selected from the ORFs having the nucleotide sequence represented by SEQ ID NO: 79968.

[11370] The probes having the nucleotide sequence represented by SEQ ID NOS: 134557, 134558, 134559, 134560, 134561, 134562, 134563, 134564, 134565, 134566, 134567 were selected from the ORFs having the nucleotide sequence represented by SEQ ID NO: 79969.

[11371] The probes having the nucleotide sequence represented by SEQ ID NOS: 134568, 134569, 134570, 134571, 134572, 134573, 134574, 134575, 134576, 134577, 134578 were selected from the ORFs having the nucleotide sequence represented by SEQ ID NO: 79970.

[11372] The probes having the nucleotide sequence represented by SEQ ID NOS: 134579, 134580, 134581, 134582, 134583, 134584, 134585, 134586, 134587, 134588, 134589 were selected from the ORFs having the nucleotide sequence represented by SEQ ID NO: 79971.

[11373] The probes having the nucleotide sequence represented by SEQ ID NOS: 134590, 134591, 134592, 134593, 134594, 134595, 134596, 134597, 134598, 134599, 134600 were selected from the ORFs having the nucleotide sequence represented by SEQ ID NO: 79972.

[11374] The probes having the nucleotide sequence represented by SEQ ID NOS: 134601, 134602, 134603, 134604, 134605, 134606, 134607, 134608, 134609, 134610, 134611 were selected from the ORFs having the nucleotide sequence represented by SEQ ID NO: 79973.

[11375] The probes having the nucleotide sequence represented by SEQ ID NOS: 134612, 134613, 134614, 134615, 134616, 134617, 134618, 134619, 134620, 134621, 134622 were selected from the ORFs having the nucleotide sequence represented by SEQ ID NO: 79974.

[11376] The probes having the nucleotide sequence represented by SEQ ID NOS: 134623, 134624, 134625, 134626, 134627, 134628, 134629, 134630, 134631, 134632, 134633 were selected from the ORFs having the nucleotide sequence represented by SEQ ID NO: 79975.

[11377] The probes having the nucleotide sequence represented by SEQ ID NOS: 134634, 134635, 134636, 134637, 134638, 134639, 134640, 134641, 134642, 134643, 134644 were selected from the ORFs having the nucleotide sequence represented by SEQ ID NO: 79976.

[11378] The probes having the nucleotide sequence represented by SEQ ID NOS: 134645, 134646, 134647, 134648, 134649, 134650, 134651, 134652, 134653, 134654, 134655 were selected from the ORFs having the nucleotide sequence represented by SEQ ID NO: 79977.

[11379] The probes having the nucleotide sequence represented by SEQ ID NOS: 134656, 134657, 134658, 134659, 134660, 134661, 134662, 134663, 134664, 134665, 134666 were selected from the ORFs having the nucleotide sequence represented by SEQ ID NO: 79978.

[11380] The probes having the nucleotide sequence represented by SEQ ID NOS: 134667, 134668, 134669, 134670, 134671, 134672, 134673, 134674, 134675, 134676, 134677 were selected from the ORFs having the nucleotide sequence represented by SEQ ID NO: 79979.

[11381] The probes having the nucleotide sequence represented by SEQ ID NOS: 134678, 134679, 134680, 134681, 134682, 134683, 134684, 134685, 134686, 134687, 134688 were selected from the ORFs having the nucleotide sequence represented by SEQ ID NO: 79980.

[11382] The probes having the nucleotide sequence represented by SEQ ID NOS: 134689, 134690, 134691, 134692, 134693, 134694, 134695, 134696, 134697, 134698, 134699 were selected from the ORFs having the nucleotide sequence represented by SEQ ID NO: 79981.

[11383] The probes having the nucleotide sequence represented by SEQ ID NOS: 134700, 134701, 134702, 134703, 134704, 134705, 134706, 134707, 134708, 134709, 134710 were selected from the ORFs having the nucleotide sequence represented by SEQ ID NO: 79982.

[11384] The probes having the nucleotide sequence represented by SEQ ID NOS: 134711, 134712, 134713, 134714, 134715, 134716, 134717, 134718, 134719, 134720, 134721 were selected from the ORFs having the nucleotide sequence represented by SEQ ID NO: 79983.

[11385] The probes having the nucleotide sequence represented by SEQ ID NOS: 134722, 134723, 134724, 134725, 134726, 134727, 134728, 134729, 134730, 134731, 134732 were selected from the ORFs having the nucleotide sequence represented by SEQ ID NO: 79984.

[11386] The probes having the nucleotide sequence represented by SEQ ID NOS: 134733, 134734, 134735, 134736, 134737, 134738, 134739, 134740, 134741, 134742, 134743 were selected from the ORFs having the nucleotide sequence represented by SEQ ID NO: 79985.

[11387] The probes having the nucleotide sequence represented by SEQ ID NOS: 134744, 134745, 134746, 134747, 134748, 134749, 134750, 134751, 134752, 134753, 134754 were selected from the ORFs having the nucleotide sequence represented by SEQ ID NO: 79986.

[11388] The probes having the nucleotide sequence represented by SEQ ID NOS: 134755, 134756, 134757, 134758, 134759, 134760, 134761, 134762, 134763, 134764, 134765 were selected from the ORFs having the nucleotide sequence represented by SEQ ID NO: 79987.

[11389] The probes having the nucleotide sequence represented by SEQ ID NOS: 134766, 134767, 134768, 134769, 134770, 134771, 134772, 134773, 134774, 134775, 134776 were selected from the ORFs having the nucleotide sequence represented by SEQ ID NO: 79988.

[11390] The probes having the nucleotide sequence represented by SEQ ID NOS: 134777, 134778, 134779, 134780, 134781, 134782, 134783, 134784, 134785, 134786, 134787 were selected from the ORFs having the nucleotide sequence represented by SEQ ID NO: 79989.

[11391] The probes having the nucleotide sequence represented by SEQ ID NOS: 134788, 134789, 134790, 134791, 134792, 134793, 134794, 134795, 134796, 134797, 134798 were selected from the ORFs having the nucleotide sequence represented by SEQ ID NO: 79990.

[11392] The probes having the nucleotide sequence represented by SEQ ID NOS: 134799, 134800, 134801, 134802, 134803, 134804, 134805, 134806, 134807, 134808, 134809 were selected from the ORFs having the nucleotide sequence represented by SEQ ID NO: 79991.

[11393] The probes having the nucleotide sequence represented by SEQ ID NOS: 134810, 134811, 134812, 134813, 134814, 134815, 134816, 134817, 134818, 134819, 134820 were selected from the ORFs having the nucleotide sequence represented by SEQ ID NO: 79992.

[11394] The probes having the nucleotide sequence represented by SEQ ID NOS: 134821, 134822, 134823, 134824, 134825, 134826, 134827, 134828, 134829, 134830, 134831 were selected from the ORFs having the nucleotide sequence represented by SEQ ID NO: 79993.

[11395] The probes having the nucleotide sequence represented by SEQ ID NOS: 134832, 134833, 134834, 134835, 134836, 134837, 134838, 134839, 134840, 134841, 134842 were selected from the ORFs having the nucleotide sequence represented by SEQ ID NO: 79994.

[11396] The probes having the nucleotide sequence represented by SEQ ID NOS: 134843, 134844, 134845, 134846, 134847, 134848, 134849, 134850, 134851, 134852, 134853 were selected from the ORFs having the nucleotide sequence represented by SEQ ID NO: 79995.

[11397] The probes having the nucleotide sequence represented by SEQ ID NOS: 134854, 134855, 134856, 134857, 134858, 134859, 134860, 134861, 134862, 134863, 134864 were selected from the ORFs having the nucleotide sequence represented by SEQ ID NO: 79996.

[11398] The probes having the nucleotide sequence represented by SEQ ID NOS: 134865, 134866, 134867, 134868, 134869, 134870, 134871, 134872, 134873, 134874, 134875 were selected from the ORFs having the nucleotide sequence represented by SEQ ID NO: 79997.

[11399] The probes having the nucleotide sequence represented by SEQ ID NOS: 134876, 134877, 134878, 134879, 134880, 134881, 134882, 134883, 134884, 134885, 134886 were selected from the ORFs having the nucleotide sequence represented by SEQ ID NO: 79998.

[11400] The probes having the nucleotide sequence represented by SEQ ID NOS: 134887, 134888, 134889, 134890, 134891, 134892, 134893, 134894, 134895, 134896, 134897 were selected from the ORFs having the nucleotide sequence represented by SEQ ID NO: 79999.

[11401] The probes having the nucleotide sequence represented by SEQ ID NOS: 134898, 134899, 134900, 134901, 134902, 134903, 134904, 134905, 134906, 134907, 134908 were selected from the ORFs having the nucleotide sequence represented by SEQ ID NO: 80000.

[11402] The probes having the nucleotide sequence represented by SEQ ID NOS: 134909, 134910, 134911, 134912, 134913, 134914, 134915, 134916, 134917, 134918, 134919 were selected from the ORFs having the nucleotide sequence represented by SEQ ID NO: 80001.

[11403] The probes having the nucleotide sequence represented by SEQ ID NOS: 134920, 134921, 134922, 134923, 134924, 134925, 134926, 134927, 134928, 134929, 134930 were selected from the ORFs having the nucleotide sequence represented by SEQ ID NO: 80002.

[11404] The probes having the nucleotide sequence represented by SEQ ID NOS: 134931, 134932, 134933, 134934, 134935, 134936, 134937, 134938, 134939, 134940, 134941 were selected from the ORFs having the nucleotide sequence represented by SEQ ID NO: 80003.

[11405] The probes having the nucleotide sequence represented by SEQ ID NOS: 134942, 134943, 134944, 134945, 134946, 134947, 134948, 134949, 134950, 134951, 134952 were selected from the ORFs having the nucleotide sequence represented by SEQ ID NO: 80004.

[11406] The probes having the nucleotide sequence represented by SEQ ID NOS: 134953, 134954, 134955, 134956, 134957, 134958, 134959, 134960, 134961, 134962, 134963 were selected from the ORFs having the nucleotide sequence represented by SEQ ID NO: 80005.

[11407] The probes having the nucleotide sequence represented by SEQ ID NOS: 134964, 134965, 134966, 134967, 134968, 134969, 134970, 134971, 134972, 134973, 134974 were selected from the ORFs having the nucleotide sequence represented by SEQ ID NO: 80006.

[11408] The probes having the nucleotide sequence represented by SEQ ID NOS: 134975, 134976, 134977, 134978, 134979, 134980, 134981, 134982, 134983, 134984, 134985 were selected from the ORFs having the nucleotide sequence represented by SEQ ID NO: 80007.

[11409] The probes having the nucleotide sequence represented by SEQ ID NOS: 134986, 134987, 134988, 134989, 134990, 134991, 134992, 134993, 134994, 134995, 134996 were selected from the ORFs having the nucleotide sequence represented by SEQ ID NO: 80008.

[11410] The probes having the nucleotide sequence represented by SEQ ID NOS: 134997, 134998, 134999, 135000, 135001, 135002, 135003, 135004, 135005, 135006, 135007 were selected from the ORFs having the nucleotide sequence represented by SEQ ID NO: 80009.

[11411] The probes having the nucleotide sequence represented by SEQ ID NOS: 135008, 135009, 135010, 135011, 135012, 135013, 135014, 135015, 135016, 135017, 135018 were selected from the ORFs having the nucleotide sequence represented by SEQ ID NO: 80010.

[11412] The probes having the nucleotide sequence represented by SEQ ID NOS: 135019, 135020, 135021, 135022, 135023, 135024, 135025, 135026, 135027, 135028, 135029 were selected from the ORFs having the nucleotide sequence represented by SEQ ID NO: 80011.

[11413] The probes having the nucleotide sequence represented by SEQ ID NOS: 135030, 135031, 135032, 135033, 135034, 135035, 135036, 135037, 135038, 135039, 135040 were selected from the ORFs having the nucleotide sequence represented by SEQ ID NO: 80012.

[11414] The probes having the nucleotide sequence represented by SEQ ID NOS: 135041, 135042, 135043, 135044, 135045, 135046, 135047, 135048, 135049, 135050, 135051 were selected from the ORFs having the nucleotide sequence represented by SEQ ID NO: 80013.

[11415] The probes having the nucleotide sequence represented by SEQ ID NOS: 135052, 135053, 135054, 135055, 135056, 135057, 135058, 135059, 135060, 135061, 135062 were selected from the ORFs having the nucleotide sequence represented by SEQ ID NO: 80014.

[11416] The probes having the nucleotide sequence represented by SEQ ID NOS: 135063, 135064, 135065, 135066, 135067, 135068, 135069, 135070, 135071, 135072, 135073 were selected from the ORFs having the nucleotide sequence represented by SEQ ID NO: 80015.

[11417] The probes having the nucleotide sequence represented by SEQ ID NOS: 135074, 135075, 135076, 135077, 135078, 135079, 135080, 135081, 135082, 135083, 135084 were selected from the ORFs having the nucleotide sequence represented by SEQ ID NO: 80016.

[11418] The probes having the nucleotide sequence represented by SEQ ID NOS: 135085, 135086, 135087, 135088, 135089, 135090, 135091, 135092, 135093, 135094, 135095 were selected from the ORFs having the nucleotide sequence represented by SEQ ID NO: 80017.

[11419] The probes having the nucleotide sequence represented by SEQ ID NOS: 135096, 135097, 135098, 135099, 135100, 135101, 135102, 135103, 135104, 135105, 135106 were selected from the ORFs having the nucleotide sequence represented by SEQ ID NO: 80018.

[11420] The probes having the nucleotide sequence represented by SEQ ID NOS: 135107, 135108, 135109, 135110, 135111, 135112, 135113, 135114, 135115, 135116, 135117 were selected from the ORFs having the nucleotide sequence represented by SEQ ID NO: 80019.

[11421] The probes having the nucleotide sequence represented by SEQ ID NOS: 135118, 135119, 135120, 135121, 135122, 135123, 135124, 135125, 135126, 135127, 135128 were selected from the ORFs having the nucleotide sequence represented by SEQ ID NO: 80020.

[11422] The probes having the nucleotide sequence represented by SEQ ID NOS: 135129, 135130, 135131, 135132, 135133, 135134, 135135, 135136, 135137, 135138, 135139 were selected from the ORFs having the nucleotide sequence represented by SEQ ID NO: 80021.

[11423] The probes having the nucleotide sequence represented by SEQ ID NOS: 135140, 135141, 135142, 135143, 135144, 135145, 135146, 135147, 135148, 135149, 135150 were selected from the ORFs having the nucleotide sequence represented by SEQ ID NO: 80022.

[11424] The probes having the nucleotide sequence represented by SEQ ID NOS: 135151, 135152, 135153, 135154, 135155, 135156, 135157, 135158, 135159, 135160, 135161 were selected from the ORFs having the nucleotide sequence represented by SEQ ID NO: 80023.

[11425] The probes having the nucleotide sequence represented by SEQ ID NOS: 135162, 135163, 135164, 135165, 135166, 135167, 135168, 135169, 135170, 135171, 135172 were selected from the ORFs having the nucleotide sequence represented by SEQ ID NO: 80024.

[11426] The probes having the nucleotide sequence represented by SEQ ID NOS: 135173, 135174, 135175, 135176, 135177, 135178, 135179, 135180, 135181, 135182, 135183 were selected from the ORFs having the nucleotide sequence represented by SEQ ID NO: 80025.

[11427] The probes having the nucleotide sequence represented by SEQ ID NOS: 135184, 135185, 135186, 135187, 135188, 135189, 135190, 135191, 135192, 135193, 135194 were selected from the ORFs having the nucleotide sequence represented by SEQ ID NO: 80026.

[11428] The probes having the nucleotide sequence represented by SEQ ID NOS: 135195, 135196, 135197, 135198, 135199, 135200, 135201, 135202, 135203, 135204, 135205 were selected from the ORFs having the nucleotide sequence represented by SEQ ID NO: 80027.

[11429] The probes having the nucleotide sequence represented by SEQ ID NOS: 135206, 135207, 135208, 135209, 135210, 135211, 135212, 135213, 135214, 135215, 135216 were selected from the ORFs having the nucleotide sequence represented by SEQ ID NO: 80028.

[11430] The probes having the nucleotide sequence represented by SEQ ID NOS: 135217, 135218, 135219, 135220, 135221, 135222, 135223, 135224, 135225, 135226, 135227 were selected from the ORFs having the nucleotide sequence represented by SEQ ID NO: 80029.

[11431] The probes having the nucleotide sequence represented by SEQ ID NOS: 135228, 135229, 135230, 135231, 135232, 135233, 135234, 135235, 135236, 135237, 135238 were selected from the ORFs having the nucleotide sequence represented by SEQ ID NO: 80030.

[11432] The probes having the nucleotide sequence represented by SEQ ID NOS: 135239, 135240, 135241, 135242, 135243, 135244, 135245, 135246, 135247, 135248, 135249 were selected from the ORFs having the nucleotide sequence represented by SEQ ID NO: 80031.

[11433] The probes having the nucleotide sequence represented by SEQ ID NOS: 135250, 135251, 135252, 135253, 135254, 135255, 135256, 135257, 135258, 135259, 135260 were selected from the ORFs having the nucleotide sequence represented by SEQ ID NO: 80032.

[11434] The probes having the nucleotide sequence represented by SEQ ID NOS: 135261, 135262, 135263, 135264, 135265, 135266, 135267, 135268, 135269, 135270, 135271 were selected from the ORFs having the nucleotide sequence represented by SEQ ID NO: 80033.

[11435] The probes having the nucleotide sequence represented by SEQ ID NOS: 135272, 135273, 135274, 135275, 135276, 135277, 135278, 135279, 135280, 135281, 135282 were selected from the ORFs having the nucleotide sequence represented by SEQ ID NO: 80034.

[11436] The probes having the nucleotide sequence represented by SEQ ID NOS: 135283, 135284, 135285, 135286, 135287, 135288, 135289, 135290, 135291, 135292, 135293 were selected from the ORFs having the nucleotide sequence represented by SEQ ID NO: 80035.

[11437] The probes having the nucleotide sequence represented by SEQ ID NOS: 135294, 135295, 135296, 135297, 135298, 135299, 135300, 135301, 135302, 135303, 135304 were selected from the ORFs having the nucleotide sequence represented by SEQ ID NO: 80036.

[11438] The probes having the nucleotide sequence represented by SEQ ID NOS: 135305, 135306, 135307, 135308, 135309, 135310, 135311, 135312, 135313, 135314, 135315 were selected from the ORFs having the nucleotide sequence represented by SEQ ID NO: 80037.

[11439] The probes having the nucleotide sequence represented by SEQ ID NOS: 135316, 135317, 135318, 135319, 135320, 135321, 135322, 135323, 135324, 135325, 135326 were selected from the ORFs having the nucleotide sequence represented by SEQ ID NO: 80038.

[11440] The probes having the nucleotide sequence represented by SEQ ID NOS: 135327, 135328, 135329, 135330, 135331, 135332, 135333, 135334, 135335, 135336, 135337 were selected from the ORFs having the nucleotide sequence represented by SEQ ID NO: 80039.

[11441] The probes having the nucleotide sequence represented by SEQ ID NOS: 135338, 135339, 135340, 135341, 135342, 135343, 135344, 135345, 135346, 135347, 135348 were selected from the ORFs having the nucleotide sequence represented by SEQ ID NO: 80040.

[11442] The probes having the nucleotide sequence represented by SEQ ID NOS: 135349, 135350, 135351, 135352, 135353, 135354, 135355, 135356, 135357, 135358, 135359 were selected from the ORFs having the nucleotide sequence represented by SEQ ID NO: 80041.

[11443] The probes having the nucleotide sequence represented by SEQ ID NOS: 135360, 135361, 135362, 135363, 135364, 135365, 135366, 135367, 135368, 135369, 135370 were selected from the ORFs having the nucleotide sequence represented by SEQ ID NO: 80042.

[11444] The probes having the nucleotide sequence represented by SEQ ID NOS: 135371, 135372, 135373, 135374, 135375, 135376, 135377, 135378, 135379, 135380, 135381 were selected from the ORFs having the nucleotide sequence represented by SEQ ID NO: 80043.

[11445] The probes having the nucleotide sequence represented by SEQ ID NOS: 135382, 135383, 135384, 135385, 135386, 135387, 135388, 135389, 135390, 135391, 135392 were selected from the ORFs having the nucleotide sequence represented by SEQ ID NO: 80044.

[11446] The probes having the nucleotide sequence represented by SEQ ID NOS: 135393, 135394, 135395, 135396, 135397, 135398, 135399, 135400, 135401, 135402, 135403 were selected from the ORFs having the nucleotide sequence represented by SEQ ID NO: 80045.

[11447] The probes having the nucleotide sequence represented by SEQ ID NOS: 135404, 135405, 135406, 135407, 135408, 135409, 135410, 135411, 135412, 135413, 135414 were selected from the ORFs having the nucleotide sequence represented by SEQ ID NO: 80046.

[11448] The probes having the nucleotide sequence represented by SEQ ID NOS: 135415, 135416, 135417, 135418, 135419, 135420, 135421, 135422, 135423, 135424, 135425 were selected from the ORFs having the nucleotide sequence represented by SEQ ID NO: 80047.

[11449] The probes having the nucleotide sequence represented by SEQ ID NOS: 135426, 135427, 135428, 135429, 135430, 135431, 135432, 135433, 135434, 135435, 135436 were selected from the ORFs having the nucleotide sequence represented by SEQ ID NO: 80048.

[11450] The probes having the nucleotide sequence represented by SEQ ID NOS: 135437, 135438, 135439, 135440, 135441, 135442, 135443, 135444, 135445, 135446, 135447 were selected from the ORFs having the nucleotide sequence represented by SEQ ID NO: 80049.

[11451] The probes having the nucleotide sequence represented by SEQ ID NOS: 135448, 135449, 135450, 135451, 135452, 135453, 135454, 135455, 135456, 135457, 135458 were selected from the ORFs having the nucleotide sequence represented by SEQ ID NO: 80050.

[11452] The probes having the nucleotide sequence represented by SEQ ID NOS: 135459, 135460, 135461, 135462, 135463, 135464, 135465, 135466, 135467, 135468, 135469 were selected from the ORFs having the nucleotide sequence represented by SEQ ID NO: 80051.

[11453] The probes having the nucleotide sequence represented by SEQ ID NOS: 135470, 135471, 135472, 135473, 135474, 135475, 135476, 135477, 135478, 135479, 135480 were selected from the ORFs having the nucleotide sequence represented by SEQ ID NO: 80052.

[11454] The probes having the nucleotide sequence represented by SEQ ID NOS: 135481, 135482, 135483, 135484, 135485, 135486, 135487, 135488, 135489, 135490, 135491 were selected from the ORFs having the nucleotide sequence represented by SEQ ID NO: 80053.

[11455] The probes having the nucleotide sequence represented by SEQ ID NOS: 135492, 135493, 135494, 135495, 135496, 135497, 135498, 135499, 135500, 135501, 135502 were selected from the ORFs having the nucleotide sequence represented by SEQ ID NO: 80054.

[11456] The probes having the nucleotide sequence represented by SEQ ID NOS: 135503, 135504, 135505, 135506, 135507, 135508, 135509, 135510, 135511, 135512, 135513 were selected from the ORFs having the nucleotide sequence represented by SEQ ID NO: 80055.

[11457] The probes having the nucleotide sequence represented by SEQ ID NOS: 135514, 135515, 135516, 135517, 135518, 135519, 135520, 135521, 135522, 135523, 135524 were selected from the ORFs having the nucleotide sequence represented by SEQ ID NO: 80056.

[11458] The probes having the nucleotide sequence represented by SEQ ID NOS: 135525, 135526, 135527, 135528, 135529, 135530, 135531, 135532, 135533, 135534, 135535 were selected from the ORFs having the nucleotide sequence represented by SEQ ID NO: 80057.

[11459] The probes having the nucleotide sequence represented by SEQ ID NOS: 135536, 135537, 135538, 135539, 135540, 135541, 135542, 135543, 135544, 135545, 135546 were selected from the ORFs having the nucleotide sequence represented by SEQ ID NO: 80058.

[11460] The probes having the nucleotide sequence represented by SEQ ID NOS: 135547, 135548, 135549, 135550, 135551, 135552, 135553, 135554, 135555, 135556, 135557 were selected from the ORFs having the nucleotide sequence represented by SEQ ID NO: 80059.

[11461] The probes having the nucleotide sequence represented by SEQ ID NOS: 135558, 135559, 135560, 135561, 135562, 135563, 135564, 135565, 135566, 135567, 135568 were selected from the ORFs having the nucleotide sequence represented by SEQ ID NO: 80060.

[11462] The probes having the nucleotide sequence represented by SEQ ID NOS: 135569, 135570, 135571, 135572, 135573, 135574, 135575, 135576, 135577, 135578, 135579 were selected from the ORFs having the nucleotide sequence represented by SEQ ID NO: 80061.

[11463] The probes having the nucleotide sequence represented by SEQ ID NOS: 135580, 135581, 135582, 135583, 135584, 135585, 135586, 135587, 135588, 135589, 135590 were selected from the ORFs having the nucleotide sequence represented by SEQ ID NO: 80062.

[11464] The probes having the nucleotide sequence represented by SEQ ID NOS: 135591, 135592, 135593, 135594, 135595, 135596, 135597, 135598, 135599, 135600, 135601 were selected from the ORFs having the nucleotide sequence represented by SEQ ID NO: 80063.

[11465] The probes having the nucleotide sequence represented by SEQ ID NOS: 135602, 135603, 135604, 135605, 135606, 135607, 135608, 135609, 135610, 135611, 135612 were selected from the ORFs having the nucleotide sequence represented by SEQ ID NO: 80064.

[11466] The probes having the nucleotide sequence represented by SEQ ID NOS: 135613, 135614, 135615, 135616, 135617, 135618, 135619, 135620, 135621, 135622, 135623 were selected from the ORFs having the nucleotide sequence represented by SEQ ID NO: 80065.

[11467] The probes having the nucleotide sequence represented by SEQ ID NOS: 135624, 135625, 135626, 135627, 135628, 135629, 135630, 135631, 135632, 135633, 135634 were selected from the ORFs having the nucleotide sequence represented by SEQ ID NO: 80066.

[11468] The probes having the nucleotide sequence represented by SEQ ID NOS: 135635, 135636, 135637, 135638, 135639, 135640, 135641, 135642, 135643, 135644, 135645 were selected from the ORFs having the nucleotide sequence represented by SEQ ID NO: 80067.

[11469] The probes having the nucleotide sequence represented by SEQ ID NOS: 135646, 135647, 135648, 135649, 135650, 135651, 135652, 135653, 135654, 135655, 135656 were selected from the ORFs having the nucleotide sequence represented by SEQ ID NO: 80068.

[11470] The probes having the nucleotide sequence represented by SEQ ID NOS: 135657, 135658, 135659, 135660, 135661, 135662, 135663, 135664, 135665, 135666, 135667 were selected from the ORFs having the nucleotide sequence represented by SEQ ID NO: 80069.

[11471] The probes having the nucleotide sequence represented by SEQ ID NOS: 135668, 135669, 135670, 135671, 135672, 135673, 135674, 135675, 135676, 135677, 135678 were selected from the ORFs having the nucleotide sequence represented by SEQ ID NO: 80070.

[11472] The probes having the nucleotide sequence represented by SEQ ID NOS: 135679, 135680, 135681, 135682, 135683, 135684, 135685, 135686, 135687, 135688, 135689 were selected from the ORFs having the nucleotide sequence represented by SEQ ID NO: 80071.

[11473] The probes having the nucleotide sequence represented by SEQ ID NOS: 135690, 135691, 135692, 135693, 135694, 135695, 135696, 135697, 135698, 135699, 135700 were selected from the ORFs having the nucleotide sequence represented by SEQ ID NO: 80072.

[11474] The probes having the nucleotide sequence represented by SEQ ID NOS: 135701, 135702, 135703, 135704, 135705, 135706, 135707, 135708, 135709, 135710, 135711 were selected from the ORFs having the nucleotide sequence represented by SEQ ID NO: 80073.

[11475] The probes having the nucleotide sequence represented by SEQ ID NOS: 135712, 135713, 135714, 135715, 135716, 135717, 135718, 135719, 135720, 135721, 135722 were selected from the ORFs having the nucleotide sequence represented by SEQ ID NO: 80074.

[11476] The probes having the nucleotide sequence represented by SEQ ID NOS: 135723, 135724, 135725, 135726, 135727, 135728, 135729, 135730, 135731, 135732, 135733 were selected from the ORFs having the nucleotide sequence represented by SEQ ID NO: 80075.

[11477] The probes having the nucleotide sequence represented by SEQ ID NOS: 135734, 135735, 135736, 135737, 135738, 135739, 135740, 135741, 135742, 135743, 135744 were selected from the ORFs having the nucleotide sequence represented by SEQ ID NO: 80076.

[11478] The probes having the nucleotide sequence represented by SEQ ID NOS: 135745, 135746, 135747, 135748, 135749, 135750, 135751, 135752, 135753, 135754, 135755 were selected from the ORFs having the nucleotide sequence represented by SEQ ID NO: 80077.

[11479] The probes having the nucleotide sequence represented by SEQ ID NOS: 135756, 135757, 135758, 135759, 135760, 135761, 135762, 135763, 135764, 135765, 135766 were selected from the ORFs having the nucleotide sequence represented by SEQ ID NO: 80078.

[11480] The probes having the nucleotide sequence represented by SEQ ID NOS: 135767, 135768, 135769, 135770, 135771, 135772, 135773, 135774, 135775, 135776, 135777 were selected from the ORFs having the nucleotide sequence represented by SEQ ID NO: 80079.

[11481] The probes having the nucleotide sequence represented by SEQ ID NOS: 135778, 135779, 135780, 135781, 135782, 135783, 135784, 135785, 135786, 135787, 135788 were selected from the ORFs having the nucleotide sequence represented by SEQ ID NO: 80080.

[11482] The probes having the nucleotide sequence represented by SEQ ID NOS: 135789, 135790, 135791, 135792, 135793, 135794, 135795, 135796, 135797, 135798, 135799 were selected from the ORFs having the nucleotide sequence represented by SEQ ID NO: 80081.

[11483] The probes having the nucleotide sequence represented by SEQ ID NOS: 135800, 135801, 135802, 135803, 135804, 135805, 135806, 135807, 135808, 135809, 135810 were selected from the ORFs having the nucleotide sequence represented by SEQ ID NO: 80082.

[11484] The probes having the nucleotide sequence represented by SEQ ID NOS: 135811, 135812, 135813, 135814, 135815, 135816, 135817, 135818, 135819, 135820, 135821 were selected from the ORFs having the nucleotide sequence represented by SEQ ID NO: 80083.

[11485] The probes having the nucleotide sequence represented by SEQ ID NOS: 135822, 135823, 135824, 135825, 135826, 135827, 135828, 135829, 135830, 135831, 135832 were selected from the ORFs having the nucleotide sequence represented by SEQ ID NO: 80084.

[11486] The probes having the nucleotide sequence represented by SEQ ID NOS: 135833, 135834, 135835, 135836, 135837, 135838, 135839, 135840, 135841, 135842, 135843 were selected from the ORFs having the nucleotide sequence represented by SEQ ID NO: 80085.

[11487] The probes having the nucleotide sequence represented by SEQ ID NOS: 135844, 135845, 135846, 135847, 135848, 135849, 135850, 135851, 135852, 135853, 135854, 135855, 135856, 135857, 135858, 135859, 135860, 135861, 135862, 135863, 135864, 135865 were selected from the ORFs having the nucleotide sequence represented by SEQ ID NO: 80086.

[11488] The probes having the nucleotide sequence represented by SEQ ID NOS: 135866, 135867, 135868, 135869, 135870, 135871, 135872, 135873, 135874, 135875, 135876 were selected from the ORFs having the nucleotide sequence represented by SEQ ID NO: 80087.

[11489] The probes having the nucleotide sequence represented by SEQ ID NOS: 135877, 135878, 135879, 135880, 135881, 135882, 135883, 135884, 135885, 135886, 135887 were selected from the ORFs having the nucleotide sequence represented by SEQ ID NO: 80088.

[11490] The probes having the nucleotide sequence represented by SEQ ID NOS: 135888, 135889, 135890, 135891, 135892, 135893, 135894, 135895, 135896, 135897, 135898 were selected from the ORFs having the nucleotide sequence represented by SEQ ID NO: 80089.

[11491] The probes having the nucleotide sequence represented by SEQ ID NOS: 135899, 135900, 135901, 135902, 135903, 135904, 135905, 135906, 135907, 135908, 135909 were selected from the ORFs having the nucleotide sequence represented by SEQ ID NO: 80090.

[11492] The probes having the nucleotide sequence represented by SEQ ID NOS: 135910, 135911, 135912, 135913, 135914, 135915, 135916, 135917, 135918, 135919, 135920 were selected from the ORFs having the nucleotide sequence represented by SEQ ID NO: 80091.

[11493] The probes having the nucleotide sequence represented by SEQ ID NOS: 135921, 135922, 135923, 135924, 135925, 135926, 135927, 135928, 135929, 135930, 135931 were selected from the ORFs having the nucleotide sequence represented by SEQ ID NO: 80092.

[11494] The probes having the nucleotide sequence represented by SEQ ID NOS: 135932, 135933, 135934, 135935, 135936, 135937, 135938, 135939, 135940, 135941, 135942 were selected from the ORFs having the nucleotide sequence represented by SEQ ID NO: 80093.

[11495] The probes having the nucleotide sequence represented by SEQ ID NOS: 135943, 135944, 135945, 135946, 135947, 135948, 135949, 135950, 135951, 135952, 135953 were selected from the ORFs having the nucleotide sequence represented by SEQ ID NO: 80094.

[11496] The probes having the nucleotide sequence represented by SEQ ID NOS: 135954, 135955, 135956, 135957, 135958, 135959, 135960, 135961, 135962, 135963, 135964 were selected from the ORFs having the nucleotide sequence represented by SEQ ID NO: 80095.

[11497] The probes having the nucleotide sequence represented by SEQ ID NOS: 135965, 135966, 135967, 135968, 135969, 135970, 135971, 135972, 135973, 135974, 135975 were selected from the ORFs having the nucleotide sequence represented by SEQ ID NO: 80096.

[11498] The probes having the nucleotide sequence represented by SEQ ID NOS: 135976, 135977, 135978, 135979, 135980, 135981, 135982, 135983, 135984, 135985, 135986 were selected from the ORFs having the nucleotide sequence represented by SEQ ID NO: 80097.

[11499] The probes having the nucleotide sequence represented by SEQ ID NOS: 135987, 135988, 135989, 135990, 135991, 135992, 135993, 135994, 135995, 135996, 135997 were selected from the ORFs having the nucleotide sequence represented by SEQ ID NO: 80098.

[11500] The probes having the nucleotide sequence represented by SEQ ID NOS: 135998, 135999, 136000, 136001, 136002, 136003, 136004, 136005, 136006, 136007, 136008 were selected from the ORFs having the nucleotide sequence represented by SEQ ID NO: 80099.

[11501] The probes having the nucleotide sequence represented by SEQ ID NOS: 136009, 136010, 136011, 136012, 136013, 136014, 136015, 136016, 136017, 136018, 136019 were selected from the ORFs having the nucleotide sequence represented by SEQ ID NO: 80100.

[11502] The probes having the nucleotide sequence represented by SEQ ID NOS: 136020, 136021, 136022, 136023, 136024, 136025, 136026, 136027, 136028, 136029, 136030 were selected from the ORFs having the nucleotide sequence represented by SEQ ID NO: 80101.

[11503] The probes having the nucleotide sequence represented by SEQ ID NOS: 136031, 136032, 136033, 136034, 136035, 136036, 136037, 136038, 136039, 136040, 136041 were selected from the ORFs having the nucleotide sequence represented by SEQ ID NO: 80102.

[11504] The probes having the nucleotide sequence represented by SEQ ID NOS: 136042, 136043, 136044, 136045, 136046, 136047, 136048, 136049, 136050, 136051, 136052 were selected from the ORFs having the nucleotide sequence represented by SEQ ID NO: 80103.

[11505] The probes having the nucleotide sequence represented by SEQ ID NOS: 136053, 136054, 136055, 136056, 136057, 136058, 136059, 136060, 136061, 136062, 136063 were selected from the ORFs having the nucleotide sequence represented by SEQ ID NO: 80104.

[11506] The probes having the nucleotide sequence represented by SEQ ID NOS: 136064, 136065, 136066, 136067, 136068, 136069, 136070, 136071, 136072, 136073, 136074 were selected from the ORFs having the nucleotide sequence represented by SEQ ID NO: 80105.

[11507] The probes having the nucleotide sequence represented by SEQ ID NOS: 136075, 136076, 136077, 136078, 136079, 136080, 136081, 136082, 136083, 136084, 136085 were selected from the ORFs having the nucleotide sequence represented by SEQ ID NO: 80106.

[11508] The probes having the nucleotide sequence represented by SEQ ID NOS: 136086, 136087, 136088, 136089, 136090, 136091, 136092, 136093, 136094, 136095, 136096 were selected from the ORFs having the nucleotide sequence represented by SEQ ID NO: 80107.

[11509] The probes having the nucleotide sequence represented by SEQ ID NOS: 136097, 136098, 136099, 136100, 136101, 136102, 136103, 136104, 136105, 136106, 136107 were selected from the ORFs having the nucleotide sequence represented by SEQ ID NO: 80108.

[11510] The probes having the nucleotide sequence represented by SEQ ID NOS: 136108, 136109, 136110, 136111, 136112, 136113, 136114, 136115, 136116, 136117, 136118, 136119, 136120, 136121, 136122, 136123, 136124, 136125, 136126, 136127, 136128, 136129 were selected from the ORFs having the nucleotide sequence represented by SEQ ID NO: 80109.

[11511] The probes having the nucleotide sequence represented by SEQ ID NOS: 136130, 136131, 136132, 136133, 136134, 136135, 136136, 136137, 136138, 136139, 136140 were selected from the ORFs having the nucleotide sequence represented by SEQ ID NO: 80110.

[11512] The probes having the nucleotide sequence represented by SEQ ID NOS: 136141, 136142, 136143, 136144, 136145, 136146, 136147, 136148, 136149, 136150, 136151 were selected from the ORFs having the nucleotide sequence represented by SEQ ID NO: 80111.

[11513] The probes having the nucleotide sequence represented by SEQ ID NOS: 136152, 136153, 136154, 136155, 136156, 136157, 136158, 136159, 136160, 136161, 136162 were selected from the ORFs having the nucleotide sequence represented by SEQ ID NO: 80112.

[11514] The probes having the nucleotide sequence represented by SEQ ID NOS: 136163, 136164, 136165, 136166, 136167, 136168, 136169, 136170, 136171, 136172, 136173 were selected from the ORFs having the nucleotide sequence represented by SEQ ID NO: 80113.

[11515] The probes having the nucleotide sequence represented by SEQ ID NOS: 136174, 136175, 136176, 136177, 136178, 136179, 136180, 136181, 136182, 136183, 136184 were selected from the ORFs having the nucleotide sequence represented by SEQ ID NO: 80114.

[11516] The probes having the nucleotide sequence represented by SEQ ID NOS: 136185, 136186, 136187, 136188, 136189, 136190, 136191, 136192, 136193, 136194, 136195 were selected from the ORFs having the nucleotide sequence represented by SEQ ID NO: 80115.

[11517] The probes having the nucleotide sequence represented by SEQ ID NOS: 136196, 136197, 136198, 136199, 136200, 136201, 136202, 136203, 136204, 136205, 136206 were selected from the ORFs having the nucleotide sequence represented by SEQ ID NO: 80116.

[11518] The probes having the nucleotide sequence represented by SEQ ID NOS: 136207, 136208, 136209, 136210, 136211, 136212, 136213, 136214, 136215, 136216, 136217 were selected from the ORFs having the nucleotide sequence represented by SEQ ID NO: 80117.

[11519] The probes having the nucleotide sequence represented by SEQ ID NOS: 136218, 136219, 136220, 136221, 136222, 136223, 136224, 136225, 136226, 136227, 136228 were selected from the ORFs having the nucleotide sequence represented by SEQ ID NO: 80118.

[11520] The probes having the nucleotide sequence represented by SEQ ID NOS: 136229, 136230, 136231, 136232, 136233, 136234, 136235, 136236, 136237, 136238, 136239 were selected from the ORFs having the nucleotide sequence represented by SEQ ID NO: 80119.

[11521] The probes having the nucleotide sequence represented by SEQ ID NOS: 136240, 136241, 136242, 136243, 136244, 136245, 136246, 136247, 136248, 136249, 136250 were selected from the ORFs having the nucleotide sequence represented by SEQ ID NO: 80120.

[11522] The probes having the nucleotide sequence represented by SEQ ID NOS: 136251, 136252, 136253, 136254, 136255, 136256, 136257, 136258, 136259, 136260, 136261 were selected from the ORFs having the nucleotide sequence represented by SEQ ID NO: 80121.

[11523] The probes having the nucleotide sequence represented by SEQ ID NOS: 136262, 136263, 136264, 136265, 136266, 136267, 136268, 136269, 136270, 136271, 136272 were selected from the ORFs having the nucleotide sequence represented by SEQ ID NO: 80122.

[11524] The probes having the nucleotide sequence represented by SEQ ID NOS: 136273, 136274, 136275, 136276, 136277, 136278, 136279, 136280, 136281, 136282, 136283 were selected from the ORFs having the nucleotide sequence represented by SEQ ID NO: 80123.

[11525] The probes having the nucleotide sequence represented by SEQ ID NOS: 136284, 136285, 136286, 136287, 136288, 136289, 136290, 136291, 136292, 136293, 136294 were selected from the ORFs having the nucleotide sequence represented by SEQ ID NO: 80124.

[11526] The probes having the nucleotide sequence represented by SEQ ID NOS: 136295, 136296, 136297, 136298, 136299, 136300, 136301, 136302, 136303, 136304, 136305 were selected from the ORFs having the nucleotide sequence represented by SEQ ID NO: 80125.

[11527] The probes having the nucleotide sequence represented by SEQ ID NOS: 136306, 136307, 136308, 136309, 136310, 136311, 136312, 136313, 136314, 136315, 136316 were selected from the ORFs having the nucleotide sequence represented by SEQ ID NO: 80126.

[11528] The probes having the nucleotide sequence represented by SEQ ID NOS: 136317, 136318, 136319, 136320, 136321, 136322, 136323, 136324, 136325, 136326, 136327 were selected from the ORFs having the nucleotide sequence represented by SEQ ID NO: 80127.

[11529] The probes having the nucleotide sequence represented by SEQ ID NOS: 136328, 136329, 136330, 136331, 136332, 136333, 136334, 136335, 136336, 136337; 136338, 136339, 136340, 136341, 136342, 136343, 136344, 136345, 136346, 136347, 136348, 136349 were selected from the ORFs having the nucleotide sequence represented by SEQ ID NO: 80128.

[11530] The probes having the nucleotide sequence represented by SEQ ID NOS: 136350, 136351, 136352, 136353, 136354, 136355, 136356, 136357, 136358, 136359, 136360, 136361, 136362, 136363, 136364, 136365, 136366, 136367, 136368, 136369, 136370, 136371 were selected from the ORFs having the nucleotide sequence represented by SEQ ID NO: 80129.

[11531] The probes having the nucleotide sequence represented by SEQ ID NOS: 136372, 136373, 136374, 136375, 136376, 136377, 136378, 136379, 136380, 136381, 136382 were selected from the ORFs having the nucleotide sequence represented by SEQ ID NO: 80130.

[11532] The probes having the nucleotide sequence represented by SEQ ID NOS: 136383, 136384, 136385, 136386, 136387, 136388, 136389, 136390, 136391, 136392, 136393 were selected from the ORFs having the nucleotide sequence represented by SEQ ID NO: 80131.

[11533] The probes having the nucleotide sequence represented by SEQ ID NOS: 136394, 136395, 136396, 136397, 136398, 136399, 136400, 136401, 136402, 136403, 136404 were selected from the ORFs having the nucleotide sequence represented by SEQ ID NO: 80132.

[11534] The probes having the nucleotide sequence represented by SEQ ID NOS: 136405, 136406, 136407, 136408, 136409, 136410, 136411, 136412, 136413, 136414, 136415 were selected from the ORFs having the nucleotide sequence represented by SEQ ID NO: 80133.

[11535] The probes having the nucleotide sequence represented by SEQ ID NOS: 136416, 136417, 136418, 136419, 136420, 136421, 136422, 136423, 136424, 136425, 136426 were selected from the ORFs having the nucleotide sequence represented by SEQ ID NO: 80134.

[11536] The probes having the nucleotide sequence represented by SEQ ID NOS: 136427, 136428, 136429, 136430, 136431, 136432, 136433, 136434, 136435, 136436, 136437 were selected from the ORFs having the nucleotide sequence represented by SEQ ID NO: 80135.

[11537] The probes having the nucleotide sequence represented by SEQ ID NOS: 136438, 136439, 136440, 136441, 136442, 136443, 136444, 136445, 136446, 136447, 136448 were selected from the ORFs having the nucleotide sequence represented by SEQ ID NO: 80136.

[11538] The probes having the nucleotide sequence represented by SEQ ID NOS: 136449, 136450, 136451, 136452, 136453, 136454, 136455, 136456, 136457, 136458, 136459 were selected from the ORFs having the nucleotide sequence represented by SEQ ID NO: 80137.

[11539] The probes having the nucleotide sequence represented by SEQ ID NOS: 136460, 136461, 136462, 136463, 136464, 136465, 136466, 136467, 136468, 136469, 136470, 136471, 136472, 136473, 136474, 136475, 136476, 136477, 136478, 136479, 136480, 136481 were selected from the ORFs having the nucleotide sequence represented by SEQ ID NO: 80138.

[11540] The probes having the nucleotide sequence represented by SEQ ID NOS: 136482, 136483, 136484, 136485, 136486, 136487, 136488, 136489, 136490, 136491, 136492 were selected from the ORFs having the nucleotide sequence represented by SEQ ID NO: 80139.

[11541] The probes having the nucleotide sequence represented by SEQ ID NOS: 136493, 136494, 136495, 136496, 136497, 136498, 136499, 136500, 136501, 136502, 136503 were selected from the ORFs having the nucleotide sequence represented by SEQ ID NO: 80140.

[11542] The probes having the nucleotide sequence represented by SEQ ID NOS: 136504, 136505, 136506, 136507, 136508, 136509, 136510, 136511, 136512, 136513, 136514 were selected from the ORFs having the nucleotide sequence represented by SEQ ID NO: 80141.

[11543] The probes having the nucleotide sequence represented by SEQ ID NOS: 136515, 136516, 136517, 136518, 136519, 136520, 136521, 136522, 136523, 136524, 136525 were selected from the ORFs having the nucleotide sequence represented by SEQ ID NO: 80142.

[11544] The probes having the nucleotide sequence represented by SEQ ID NOS: 136526, 136527, 136528, 136529, 136530, 136531, 136532, 136533, 136534, 136535 were selected from the ORFs having the nucleotide sequence represented by SEQ ID NO: 80143.

[11545] The probes having the nucleotide sequence represented by SEQ ID NOS: 136536, 136537, 136538, 136539, 136540, 136541, 136542, 136543, 136544, 136545, 136546 were selected from the ORFs having the nucleotide sequence represented by SEQ ID NO: 80144.

[11546] The probes having the nucleotide sequence represented by SEQ ID NOS: 136547, 136548, 136549, 136550, 136551, 136552, 136553, 136554, 136555, 136556, 136557 were selected from the ORFs having the nucleotide sequence represented by SEQ ID NO: 80145.

[11547] The probes having the nucleotide sequence represented by SEQ ID NOS: 136558, 136559, 136560, 136561, 136562, 136563, 136564, 136565, 136566, 136567, 136568 were selected from the ORFs having the nucleotide sequence represented by SEQ ID NO: 80146.

[11548] The probes having the nucleotide sequence represented by SEQ ID NOS: 136569, 136570, 136571, 136572, 136573, 136574, 136575, 136576, 136577, 136578, 136579 were selected from the ORFs having the nucleotide sequence represented by SEQ ID NO: 80147.

[11549] The probes having the nucleotide sequence represented by SEQ ID NOS: 136580, 136581, 136582, 136583, 136584, 136585, 136586, 136587, 136588, 136589, 136590 were selected from the ORFs having the nucleotide sequence represented by SEQ ID NO: 80148.

[11550] The probes having the nucleotide sequence represented by SEQ ID NOS: 136591, 136592, 136593, 136594, 136595, 136596, 136597, 136598, 136599, 136600, 136601 were selected from the ORFs having the nucleotide sequence represented by SEQ ID NO: 80149.

[11551] The probes having the nucleotide sequence represented by SEQ ID NOS: 136602, 136603, 136604, 136605, 136606, 136607, 136608, 136609, 136610, 136611, 136612 were selected from the ORFs having the nucleotide sequence represented by SEQ ID NO: 80150.

[11552] The probes having the nucleotide sequence represented by SEQ ID NOS: 136613, 136614, 136615, 136616, 136617, 136618, 136619, 136620, 136621, 136622, 136623 were selected from the ORFs having the nucleotide sequence represented by SEQ ID NO: 80151.

[11553] The probes having the nucleotide sequence represented by SEQ ID NOS: 136624, 136625, 136626, 136627, 136628, 136629, 136630, 136631, 136632, 136633, 136634 were selected from the ORFs having the nucleotide sequence represented by SEQ ID NO: 80152.

[11554] The probes having the nucleotide sequence represented by SEQ ID NOS: 136635, 136636, 136637, 136638, 136639, 136640, 136641, 136642, 136643, 136644, 136645 were selected from the ORFs having the nucleotide sequence represented by SEQ ID NO: 80153.

[11555] The probes having the nucleotide sequence represented by SEQ ID NOS: 136646, 136647, 136648, 136649, 136650, 136651, 136652, 136653, 136654, 136655, 136656 were selected from the ORFs having the nucleotide sequence represented by SEQ ID NO: 80154.

[11556] The probes having the nucleotide sequence represented by SEQ ID NOS: 136657, 136658, 136659, 136660, 136661, 136662, 136663, 136664, 136665, 136666, 136667 were selected from the ORFs having the nucleotide sequence represented by SEQ ID NO: 80155.

[11557] The probes having the nucleotide sequence represented by SEQ ID NOS: 136668, 136669, 136670, 136671, 136672, 136673, 136674, 136675, 136676, 136677, 136678 were selected from the ORFs having the nucleotide sequence represented by SEQ ID NO: 80156.

[11558] The probes having the nucleotide sequence represented by SEQ ID NOS: 136679, 136680, 136681, 136682, 136683, 136684, 136685, 136686, 136687, 136688, 136689 were selected from the ORFs having the nucleotide sequence represented by SEQ ID NO: 80157.

[11559] The probes having the nucleotide sequence represented by SEQ ID NOS: 136690, 136691, 136692, 136693, 136694, 136695, 136696, 136697, 136698, 136699, 136700 were selected from the ORFs having the nucleotide sequence represented by SEQ ID NO: 80158.

[11560] The probes having the nucleotide sequence represented by SEQ ID NOS: 136701, 136702, 136703, 136704, 136705, 136706, 136707, 136708, 136709, 136710, 136711 were selected from the ORFs having the nucleotide sequence represented by SEQ ID NO: 80159.

[11561] The probes having the nucleotide sequence represented by SEQ ID NOS: 136712, 136713, 136714, 136715, 136716, 136717, 136718, 136719, 136720, 136721, 136722 were selected from the ORFs having the nucleotide sequence represented by SEQ ID NO: 80160.

[11562] The probes having the nucleotide sequence represented by SEQ ID NOS: 136723, 136724, 136725, 136726, 136727, 136728, 136729, 136730, 136731, 136732, 136733 were selected from the ORFs having the nucleotide sequence represented by SEQ ID NO: 80161.

[11563] The probes having the nucleotide sequence represented by SEQ ID NOS: 136734, 136735, 136736, 136737, 136738, 136739, 136740, 136741, 136742, 136743, 136744 were selected from the ORFs having the nucleotide sequence represented by SEQ ID NO: 80162.

[11564] The probes having the nucleotide sequence represented by SEQ ID NOS: 136745, 136746, 136747, 136748, 136749, 136750, 136751, 136752, 136753, 136754, 136755 were selected from the ORFs having the nucleotide sequence represented by SEQ ID NO: 80163.

[11565] The probes having the nucleotide sequence represented by SEQ ID NOS: 136756, 136757, 136758, 136759, 136760, 136761, 136762, 136763, 136764, 136765, 136766 were selected from the ORFs having the nucleotide sequence represented by SEQ ID NO: 80164.

[11566] The probes having the nucleotide sequence represented by SEQ ID NOS: 136767, 136768, 136769, 136770, 136771, 136772, 136773, 136774, 136775, 136776, 136777 were selected from the ORFs having the nucleotide sequence represented by SEQ ID NO: 80165.

[11567] The probes having the nucleotide sequence represented by SEQ ID NOS: 136778, 136779, 136780, 136781, 136782, 136783, 136784, 136785, 136786, 136787, 136788 were selected from the ORFs having the nucleotide sequence represented by SEQ ID NO: 80166.

[11568] The probes having the nucleotide sequence represented by SEQ ID NOS: 136789, 136790, 136791, 136792, 136793, 136794, 136795, 136796, 136797, 136798, 136799 were selected from the ORFs having the nucleotide sequence represented by SEQ ID NO: 80167.

[11569] The probes having the nucleotide sequence represented by SEQ ID NOS: 136800, 136801, 136802, 136803, 136804, 136805, 136806, 136807, 136808, 136809, 136810 were selected from the ORFs having the nucleotide sequence represented by SEQ ID NO: 80168.

[11570] The probes having the nucleotide sequence represented by SEQ ID NOS: 136811, 136812, 136813, 136814, 136815, 136816, 136817, 136818, 136819, 136820, 136821 were selected from the ORFs having the nucleotide sequence represented by SEQ ID NO: 80169.

[11571] The probes having the nucleotide sequence represented by SEQ ID NOS: 136822, 136823, 136824, 136825, 136826, 136827, 136828, 136829, 136830, 136831, 136832 were selected from the ORFs having the nucleotide sequence represented by SEQ ID NO: 80170.

[11572] The probes having the nucleotide sequence represented by SEQ ID NOS: 136833, 136834, 136835, 136836, 136837, 136838, 136839, 136840, 136841, 136842, 136843 were selected from the ORFs having the nucleotide sequence represented by SEQ ID NO: 80171.

[11573] The probes having the nucleotide sequence represented by SEQ ID NOS: 136844, 136845, 136846, 136847, 136848, 136849, 136850, 136851, 136852, 136853, 136854 were selected from the ORFs having the nucleotide sequence represented by SEQ ID NO: 80172.

[11574] The probes having the nucleotide sequence represented by SEQ ID NOS: 136855, 136856, 136857, 136858, 136859, 136860, 136861, 136862, 136863, 136864, 136865 were selected from the ORFs having the nucleotide sequence represented by SEQ ID NO: 80173.

[11575] The probes having the nucleotide sequence represented by SEQ ID NOS: 136866, 136867, 136868, 136869, 136870, 136871, 136872, 136873, 136874, 136875, 136876 were selected from the ORFs having the nucleotide sequence represented by SEQ ID NO: 80174.

[11576] The probes having the nucleotide sequence represented by SEQ ID NOS: 136877, 136878, 136879, 136880, 136881, 136882, 136883, 136884, 136885, 136886, 136887 were selected from the ORFs having the nucleotide sequence represented by SEQ ID NO: 80175.

[11577] The probes having the nucleotide sequence represented by SEQ ID NOS: 136888, 136889, 136890, 136891, 136892, 136893, 136894, 136895, 136896, 136897, 136898 were selected from the ORFs having the nucleotide sequence represented by SEQ ID NO: 80176.

[11578] The probes having the nucleotide sequence represented by SEQ ID NOS: 136899, 136900, 136901, 136902, 136903, 136904, 136905, 136906, 136907, 136908, 136909 were selected from the ORFs having the nucleotide sequence represented by SEQ ID NO: 80177.

[11579] The probes having the nucleotide sequence represented by SEQ ID NOS: 136910, 136911, 136912, 136913, 136914, 136915, 136916, 136917, 136918, 136919, 136920 were selected from the ORFs having the nucleotide sequence represented by SEQ ID NO: 80178.

[11580] The probes having the nucleotide sequence represented by SEQ ID NOS: 136921, 136922, 136923, 136924, 136925, 136926, 136927, 136928, 136929, 136930, 136931 were selected from the ORFs having the nucleotide sequence represented by SEQ ID NO: 80179.

[11581] The probes having the nucleotide sequence represented by SEQ ID NOS: 136932, 136933, 136934, 136935, 136936, 136937, 136938, 136939, 136940, 136941, 136942 were selected from the ORFs having the nucleotide sequence represented by SEQ ID NO: 80180.

[11582] The probes having the nucleotide sequence represented by SEQ ID NOS: 136943, 136944, 136945, 136946, 136947, 136948, 136949, 136950, 136951, 136952, 136953 were selected from the ORFs having the nucleotide sequence represented by SEQ ID NO: 80181.

[11583] The probes having the nucleotide sequence represented by SEQ ID NOS: 136954, 136955, 136956, 136957, 136958, 136959, 136960, 136961, 136962, 136963, 136964 were selected from the ORFs having the nucleotide sequence represented by SEQ ID NO: 80182.

[11584] The probes having the nucleotide sequence represented by SEQ ID NOS: 136965, 136966, 136967, 136968, 136969, 136970, 136971, 136972, 136973, 136974, 136975 were selected from the ORFs having the nucleotide sequence represented by SEQ ID NO: 80183.

[11585] The probes having the nucleotide sequence represented by SEQ ID NOS: 136976, 136977, 136978, 136979, 136980, 136981, 136982, 136983, 136984, 136985, 136986 were selected from the ORFs having the nucleotide sequence represented by SEQ ID NO: 80184.

[11586] The probes having the nucleotide sequence represented by SEQ ID NOS: 136987, 136988, 136989, 136990, 136991, 136992, 136993, 136994, 136995, 136996, 136997 were selected from the ORFs having the nucleotide sequence represented by SEQ ID NO: 80185.

[11587] The probes having the nucleotide sequence represented by SEQ ID NOS: 136998, 136999, 137000, 137001, 137002, 137003, 137004, 137005, 137006, 137007, 137008 were selected from the ORFs having the nucleotide sequence represented by SEQ ID NO: 80186.

[11588] The probes having the nucleotide sequence represented by SEQ ID NOS: 137009, 137010, 137011, 137012, 137013, 137014, 137015, 137016, 137017, 137018, 137019 were selected from the ORFs having the nucleotide sequence represented by SEQ ID NO: 80187.

[11589] The probes having the nucleotide sequence represented by SEQ ID NOS: 137020, 137021, 137022, 137023, 137024, 137025, 137026, 137027, 137028, 137029, 137030 were selected from the ORFs having the nucleotide sequence represented by SEQ ID NO: 80188.

[11590] The probes having the nucleotide sequence represented by SEQ ID NOS: 137031, 137032, 137033, 137034, 137035, 137036, 137037, 137038, 137039, 137040, 137041 were selected from the ORFs having the nucleotide sequence represented by SEQ ID NO: 80189.

[11591] The probes having the nucleotide sequence represented by SEQ ID NOS: 137042, 137043, 137044, 137045, 137046, 137047, 137048, 137049, 137050, 137051, 137052 were selected from the ORFs having the nucleotide sequence represented by SEQ ID NO: 80190.

[11592] The probes having the nucleotide sequence represented by SEQ ID NOS: 137053, 137054, 137055, 137056, 137057, 137058, 137059, 137060, 137061, 137062, 137063 were selected from the ORFs having the nucleotide sequence represented by SEQ ID NO: 80191.

[11593] The probes having the nucleotide sequence represented by SEQ ID NOS: 137064, 137065, 137066, 137067, 137068, 137069, 137070, 137071, 137072, 137073, 137074 were selected from the ORFs having the nucleotide sequence represented by SEQ ID NO: 80192.

[11594] The probes having the nucleotide sequence represented by SEQ ID NOS: 137075, 137076, 137077, 137078, 137079, 137080, 137081, 137082, 137083, 137084, 137085, 137086, 137087, 137088, 137089, 137090, 137091, 137092, 137093, 137094, 137095, 137096 were selected from the ORFs having the nucleotide sequence represented by SEQ ID NO: 80193.

[11595] The probes having the nucleotide sequence represented by SEQ ID NOS: 137097, 137098, 137099, 137100, 137101, 137102, 137103, 137104, 137105, 137106, 137107 were selected from the ORFs having the nucleotide sequence represented by SEQ ID NO: 80194.

[11596] The probes having the nucleotide sequence represented by SEQ ID NOS: 137108, 137109, 137110, 137111, 137112, 137113, 137114, 137115, 137116, 137117, 137118 were selected from the ORFs having the nucleotide sequence represented by SEQ ID NO: 80195.

[11597] The probes having the nucleotide sequence represented by SEQ ID NOS: 137119, 137120, 137121, 137122, 137123, 137124, 137125, 137126, 137127, 137128, 137129 were selected from the ORFs having the nucleotide sequence represented by SEQ ID NO: 80196.

[11598] The probes having the nucleotide sequence represented by SEQ ID NOS: 137130, 137131, 137132, 137133, 137134, 137135, 137136, 137137, 137138, 137139, 137140 were selected from the ORFs having the nucleotide sequence represented by SEQ ID NO: 80197.

[11599] The probes having the nucleotide sequence represented by SEQ ID NOS: 137141, 137142, 137143, 137144, 137145, 137146, 137147, 137148, 137149, 137150, 137151 were selected from the ORFs having the nucleotide sequence represented by SEQ ID NO: 80198.

[11600] The probes having the nucleotide sequence represented by SEQ ID NOS: 137152, 137153, 137154, 137155, 137156, 137157, 137158, 137159, 137160, 137161, 137162 were selected from the ORFs having the nucleotide sequence represented by SEQ ID NO: 80199.

[11601] The probes having the nucleotide sequence represented by SEQ ID NOS: 137163, 137164, 137165, 137166, 137167, 137168, 137169, 137170, 137171, 137172, 137173 were selected from the ORFs having the nucleotide sequence represented by SEQ ID NO: 80200.

[11602] The probes having the nucleotide sequence represented by SEQ ID NOS: 137174, 137175, 137176, 137177, 137178, 137179, 137180, 137181, 137182, 137183, 137184 were selected from the ORFs having the nucleotide sequence represented by SEQ ID NO: 80201.

[11603] The probes having the nucleotide sequence represented by SEQ ID NOS: 137185, 137186, 137187, 137188, 137189, 137190, 137191, 137192, 137193, 137194, 137195 were selected from the ORFs having the nucleotide sequence represented by SEQ ID NO: 80202.

[11604] The probes having the nucleotide sequence represented by SEQ ID NOS: 137196, 137197, 137198, 137199, 137200, 137201, 137202, 137203, 137204, 137205, 137206 were selected from the ORFs having the nucleotide sequence represented by SEQ ID NO: 80203.

[11605] The probes having the nucleotide sequence represented by SEQ ID NOS: 137207, 137208, 137209, 137210, 137211, 137212, 137213, 137214, 137215, 137216, 137217 were selected from the ORFs having the nucleotide sequence represented by SEQ ID NO: 80204.

[11606] The probes having the nucleotide sequence represented by SEQ ID NOS: 137218, 137219, 137220, 137221, 137222, 137223, 137224, 137225, 137226, 137227, 137228 were selected from the ORFs having the nucleotide sequence represented by SEQ ID NO: 80205.

[11607] The probes having the nucleotide sequence represented by SEQ ID NOS: 137229, 137230, 137231, 137232, 137233, 137234, 137235, 137236, 137237, 137238, 137239 were selected from the ORFs having the nucleotide sequence represented by SEQ ID NO: 80206.

[11608] The probes having the nucleotide sequence represented by SEQ ID NOS: 137240, 137241, 137242, 137243, 137244, 137245, 137246, 137247, 137248, 137249, 137250 were selected from the ORFs having the nucleotide sequence represented by SEQ ID NO: 80207.

[11609] The probes having the nucleotide sequence represented by SEQ ID NOS: 137251, 137252, 137253, 137254, 137255, 137256, 137257, 137258, 137259, 137260, 137261 were selected from the ORFs having the nucleotide sequence represented by SEQ ID NO: 80208.

[11610] The probes having the nucleotide sequence represented by SEQ ID NOS: 137262, 137263, 137264, 137265, 137266, 137267, 137268, 137269, 137270, 137271, 137272 were selected from the ORFs having the nucleotide sequence represented by SEQ ID NO: 80209.

[11611] The probes having the nucleotide sequence represented by SEQ ID NOS: 137273, 137274, 137275, 137276, 137277, 137278, 137279, 137280, 137281, 137282, 137283 were selected from the ORFs having the nucleotide sequence represented by SEQ ID NO: 80210.

[11612] The probes having the nucleotide sequence represented by SEQ ID NOS: 137284, 137285, 137286, 137287, 137288, 137289, 137290, 137291, 137292, 137293, 137294 were selected from the ORFs having the nucleotide sequence represented by SEQ ID NO: 80211.

[11613] The probes having the nucleotide sequence represented by SEQ ID NOS: 137295, 137296, 137297, 137298, 137299, 137300, 137301, 137302, 137303, 137304, 137305 were selected from the ORFs having the nucleotide sequence represented by SEQ ID NO: 80212.

[11614] The probes having the nucleotide sequence represented by SEQ ID NOS: 137306, 137307, 137308, 137309, 137310, 137311, 137312, 137313, 137314, 137315, 137316 were selected from the ORFs having the nucleotide sequence represented by SEQ ID NO: 80213.

[11615] The probes having the nucleotide sequence represented by SEQ ID NOS: 137317, 137318, 137319, 137320, 137321, 137322, 137323, 137324, 137325, 137326, 137327, 137328, 137329, 137330, 137331, 137332, 137333, 137334, 137335, 137336, 137337, 137338 were selected from the ORFs having the nucleotide sequence represented by SEQ ID NO: 80214.

[11616] The probes having the nucleotide sequence represented by SEQ ID NOS: 137339, 137340, 137341, 137342, 137343, 137344, 137345, 137346, 137347, 137348, 137349 were selected from the ORFs having the nucleotide sequence represented by SEQ ID NO: 80215.

[11617] The probes having the nucleotide sequence represented by SEQ ID NOS: 137350, 137351, 137352, 137353, 137354, 137355, 137356, 137357, 137358, 137359, 137360 were selected from the ORFs having the nucleotide sequence represented by SEQ ID NO: 80216.

[11618] The probes having the nucleotide sequence represented by SEQ ID NOS: 137361, 137362, 137363, 137364, 137365, 137366, 137367, 137368, 137369, 137370, 137371 were selected from the ORFs having the nucleotide sequence represented by SEQ ID NO: 80217.

[11619] The probes having the nucleotide sequence represented by SEQ ID NOS: 137372, 137373, 137374, 137375, 137376, 137377, 137378, 137379, 137380, 137381, 137382 were selected from the ORFs having the nucleotide sequence represented by SEQ ID NO: 80218.

[11620] The probes having the nucleotide sequence represented by SEQ ID NOS: 137383, 137384, 137385, 137386, 137387, 137388, 137389, 137390, 137391, 137392, 137393 were selected from the ORFs having the nucleotide sequence represented by SEQ ID NO: 80219.

[11621] The probes having the nucleotide sequence represented by SEQ ID NOS: 137394, 137395, 137396, 137397, 137398, 137399, 137400, 137401, 137402, 137403, 137404 were selected from the ORFs having the nucleotide sequence represented by SEQ ID NO: 80220.

[11622] The probes having the nucleotide sequence represented by SEQ ID NOS: 137405, 137406, 137407, 137408, 137409, 137410, 137411, 137412, 137413, 137414, 137415 were selected from the ORFs having the nucleotide sequence represented by SEQ ID NO: 80221.

[11623] The probes having the nucleotide sequence represented by SEQ ID NOS: 137416, 137417, 137418, 137419, 137420, 137421, 137422, 137423, 137424, 137425, 137426 were selected from the ORFs having the nucleotide sequence represented by SEQ ID NO: 80222.

[11624] The probes having the nucleotide sequence represented by SEQ ID NOS: 137427, 137428, 137429, 137430, 137431, 137432, 137433, 137434, 137435, 137436, 137437 were selected from the ORFs having the nucleotide sequence represented by SEQ ID NO: 80223.

[11625] The probes having the nucleotide sequence represented by SEQ ID NOS: 137438, 137439, 137440, 137441, 137442, 137443, 137444, 137445, 137446, 137447, 137448, 137449, 137450, 137451, 137452, 137453, 137454, 137455, 137456, 137457, 137458, 137459 were selected from the ORFs having the nucleotide sequence represented by SEQ ID NO: 80224.

[11626] The probes having the nucleotide sequence represented by SEQ ID NOS: 137460, 137461, 137462, 137463, 137464, 137465, 137466, 137467, 137468, 137469, 137470 were selected from the ORFs having the nucleotide sequence represented by SEQ ID NO: 80225.

[11627] The probes having the nucleotide sequence represented by SEQ ID NOS: 137471, 137472, 137473, 137474, 137475, 137476, 137477, 137478, 137479, 137480, 137481 were selected from the ORFs having the nucleotide sequence represented by SEQ ID NO: 80226.

[11628] The probes having the nucleotide sequence represented by SEQ ID NOS: 137482, 137483, 137484, 137485, 137486, 137487, 137488, 137489, 137490, 137491, 137492 were selected from the ORFs having the nucleotide sequence represented by SEQ ID NO: 80227.

[11629] The probes having the nucleotide sequence represented by SEQ ID NOS: 137493, 137494, 137495, 137496, 137497, 137498, 137499, 137500, 137501, 137502, 137503, 137504, 137505, 137506, 137507, 137508, 137509, 137510, 137511, 137512, 137513, 137514 were selected from the ORFs having the nucleotide sequence represented by SEQ ID NO: 80228.

[11630] The probes having the nucleotide sequence represented by SEQ ID NOS: 137515, 137516, 137517, 137518, 137519, 137520, 137521, 137522, 137523, 137524, 137525 were selected from the ORFs having the nucleotide sequence represented by SEQ ID NO: 80229.

[11631] The probes having the nucleotide sequence represented by SEQ ID NOS: 137526, 137527, 137528, 137529, 137530, 137531, 137532, 137533, 137534, 137535, 137536 were selected from the ORFs having the nucleotide sequence represented by SEQ ID NO: 80230.

[11632] The probes having the nucleotide sequence represented by SEQ ID NOS: 137537, 137538, 137539, 137540, 137541, 137542, 137543, 137544, 137545, 137546, 137547 were selected from the ORFs having the nucleotide sequence represented by SEQ ID NO: 80231.

[11633] The probes having the nucleotide sequence represented by SEQ ID NOS: 137548, 137549, 137550, 137551, 137552, 137553, 137554, 137555, 137556, 137557, 137558 were selected from the ORFs having the nucleotide sequence represented by SEQ ID NO: 80232.

[11634] The probes having the nucleotide sequence represented by SEQ ID NOS: 137559, 137560, 137561, 137562, 137563, 137564, 137565, 137566, 137567, 137568, 137569 were selected from the ORFs having the nucleotide sequence represented by SEQ ID NO: 80233.

[11635] The probes having the nucleotide sequence represented by SEQ ID NOS: 137570, 137571, 137572, 137573, 137574, 137575, 137576, 137577, 137578, 137579, 137580 were selected from the ORFs having the nucleotide sequence represented by SEQ ID NO: 80234.

[11636] The probes having the nucleotide sequence represented by SEQ ID NOS: 137581, 137582, 137583, 137584, 137585, 137586, 137587, 137588, 137589, 137590, 137591 were selected from the ORFs having the nucleotide sequence represented by SEQ ID NO: 80235.

[11637] The probes having the nucleotide sequence represented by SEQ ID NOS: 137592, 137593, 137594, 137595, 137596, 137597, 137598, 137599, 137600, 137601, 137602 were selected from the ORFs having the nucleotide sequence represented by SEQ ID NO: 80236.

[11638] The probes having the nucleotide sequence represented by SEQ ID NOS: 137603, 137604, 137605, 137606, 137607, 137608, 137609, 137610, 137611, 137612, 137613 were selected from the ORFs having the nucleotide sequence represented by SEQ ID NO: 80237.

[11639] The probes having the nucleotide sequence represented by SEQ ID NOS: 137614, 137615, 137616, 137617, 137618, 137619, 137620, 137621, 137622, 137623, 137624 were selected from the ORFs having the nucleotide sequence represented by SEQ ID NO: 80238.

[11640] The probes having the nucleotide sequence represented by SEQ ID NOS: 137625, 137626, 137627, 137628, 137629, 137630, 137631, 137632, 137633, 137634, 137635 were selected from the ORFs having the nucleotide sequence represented by SEQ ID NO: 80239.

[11641] The probes having the nucleotide sequence represented by SEQ ID NOS: 137636, 137637, 137638, 137639, 137640, 137641, 137642, 137643, 137644, 137645, 137646 were selected from the ORFs having the nucleotide sequence represented by SEQ ID NO: 80240.

[11642] The probes having the nucleotide sequence represented by SEQ ID NOS: 137647, 137648, 137649, 137650, 137651, 137652, 137653, 137654, 137655, 137656, 137657 were selected from the ORFs having the nucleotide sequence represented by SEQ ID NO: 80241.

[11643] The probes having the nucleotide sequence represented by SEQ ID NOS: 137658, 137659, 137660, 137661, 137662, 137663, 137664, 137665, 137666, 137667, 137668 were selected from the ORFs having the nucleotide sequence represented by SEQ ID NO: 80242.

[11644] The probes having the nucleotide sequence represented by SEQ ID NOS: 137669, 137670, 137671, 137672, 137673, 137674, 137675, 137676, 137677, 137678, 137679 were selected from the ORFs having the nucleotide sequence represented by SEQ ID NO: 80243.

[11645] The probes having the nucleotide sequence represented by SEQ ID NOS: 137680, 137681, 137682, 137683, 137684, 137685, 137686, 137687, 137688, 137689, 137690 were selected from the ORFs having the nucleotide sequence represented by SEQ ID NO: 80244.

[11646] The probes having the nucleotide sequence represented by SEQ ID NOS: 137691, 137692, 137693, 137694, 137695, 137696, 137697, 137698, 137699, 137700, 137701 were selected from the ORFs having the nucleotide sequence represented by SEQ ID NO: 80245.

[11647] The probes having the nucleotide sequence represented by SEQ ID NOS: 137702, 137703, 137704, 137705, 137706, 137707, 137708, 137709, 137710, 137711, 137712, 137713, 137714, 137715, 137716, 137717, 137718, 137719, 137720, 137721, 137722, 137723 were selected from the ORFs having the nucleotide sequence represented by SEQ ID NO: 80246.

[11648] The probes having the nucleotide sequence represented by SEQ ID NOS: 137724, 137725, 137726, 137727, 137728, 137729, 137730, 137731, 137732, 137733, 137734 were selected from the ORFs having the nucleotide sequence represented by SEQ ID NO: 80247.

[11649] The probes having the nucleotide sequence represented by SEQ ID NOS: 137735, 137736, 137737, 137738, 137739, 137740, 137741, 137742, 137743, 137744, 137745 were selected from the ORFs having the nucleotide sequence represented by SEQ ID NO: 80248.

[11650] The probes having the nucleotide sequence represented by SEQ ID NOS: 137746, 137747, 137748, 137749, 137750, 137751, 137752, 137753, 137754, 137755, 137756 were selected from the ORFs having the nucleotide sequence represented by SEQ ID NO: 80249.

[11651] The probes having the nucleotide sequence represented by SEQ ID NOS: 137757, 137758, 137759, 137760, 137761, 137762, 137763, 137764, 137765, 137766, 137767 were selected from the ORFs having the nucleotide sequence represented by SEQ ID NO: 80250.

[11652] The probes having the nucleotide sequence represented by SEQ ID NOS: 137768, 137769, 137770, 137771, 137772, 137773, 137774, 137775, 137776, 137777, 137778 were selected from the ORFs having the nucleotide sequence represented by SEQ ID NO: 80251.

[11653] The probes having the nucleotide sequence represented by SEQ ID NOS: 137779, 137780, 137781, 137782, 137783, 137784, 137785, 137786, 137787, 137788, 137789 were selected from the ORFs having the nucleotide sequence represented by SEQ ID NO: 80252.

[11654] The probes having the nucleotide sequence represented by SEQ ID NOS: 137790, 137791, 137792, 137793, 137794, 137795, 137796, 137797, 137798, 137799, 137800 were selected from the ORFs having the nucleotide sequence represented by SEQ ID NO: 80253.

[11655] The probes having the nucleotide sequence represented by SEQ ID NOS: 137801, 137802, 137803, 137804, 137805, 137806, 137807, 137808, 137809, 137810, 137811 were selected from the ORFs having the nucleotide sequence represented by SEQ ID NO: 80254.

[11656] The probes having the nucleotide sequence represented by SEQ ID NOS: 137812, 137813, 137814, 137815, 137816, 137817, 137818, 137819, 137820, 137821, 137822 were selected from the ORFs having the nucleotide sequence represented by SEQ ID NO: 80255.

[11657] The probes having the nucleotide sequence represented by SEQ ID NOS: 137823, 137824, 137825, 137826, 137827, 137828, 137829, 137830, 137831, 137832, 137833 were selected from the ORFs having the nucleotide sequence represented by SEQ ID NO: 80256.

[11658] The probes having the nucleotide sequence represented by SEQ ID NOS: 137834, 137835, 137836, 137837, 137838, 137839, 137840, 137841, 137842, 137843, 137844 were selected from the ORFs having the nucleotide sequence represented by SEQ ID NO: 80257.

[11659] The probes having the nucleotide sequence represented by SEQ ID NOS: 137845, 137846, 137847, 137848, 137849, 137850, 137851, 137852, 137853, 137854, 137855 were selected from the ORFs having the nucleotide sequence represented by SEQ ID NO: 80258.

[11660] The probes having the nucleotide sequence represented by SEQ ID NOS: 137856, 137857, 137858, 137859, 137860, 137861, 137862, 137863, 137864, 137865, 137866 were selected from the ORFs having the nucleotide sequence represented by SEQ ID NO: 80259.

[11661] The probes having the nucleotide sequence represented by SEQ ID NOS: 137867, 137868, 137869, 137870, 137871, 137872, 137873, 137874, 137875, 137876, 137877 were selected from the ORFs having the nucleotide sequence represented by SEQ ID NO: 80260.

[11662] The probes having the nucleotide sequence represented by SEQ ID NOS: 137878, 137879, 137880, 137881, 137882, 137883, 137884, 137885, 137886, 137887, 137888 were selected from the ORFs having the nucleotide sequence represented by SEQ ID NO: 80261.

[11663] The probes having the nucleotide sequence represented by SEQ ID NOS: 137889, 137890, 137891, 137892, 137893, 137894, 137895, 137896, 137897, 137898, 137899 were selected from the ORFs having the nucleotide sequence represented by SEQ ID NO: 80262.

[11664] The probes having the nucleotide sequence represented by SEQ ID NOS: 137900, 137901, 137902, 137903, 137904, 137905, 137906, 137907, 137908, 137909, 137910 were selected from the ORFs having the nucleotide sequence represented by SEQ ID NO: 80263.

[11665] The probes having the nucleotide sequence represented by SEQ ID NOS: 137911, 137912, 137913, 137914, 137915, 137916, 137917, 137918, 137919, 137920, 137921, 137922, 137923, 137924, 137925, 137926, 137927, 137928, 137929, 137930, 137931, 137932 were selected from the ORFs having the nucleotide sequence represented by SEQ ID NO: 80264.

[11666] The probes having the nucleotide sequence represented by SEQ ID NOS: 137933, 137934, 137935, 137936, 137937, 137938, 137939, 137940, 137941, 137942, 137943 were selected from the ORFs having the nucleotide sequence represented by SEQ ID NO: 80265.

[11667] The probes having the nucleotide sequence represented by SEQ ID NOS: 137944, 137945, 137946, 137947, 137948, 137949, 137950, 137951, 137952, 137953, 137954 were selected from the ORFs having the nucleotide sequence represented by SEQ ID NO: 80266.

[11668] The probes having the nucleotide sequence represented by SEQ ID NOS: 137955, 137956, 137957, 137958, 137959, 137960, 137961, 137962, 137963, 137964, 137965 were selected from the ORFs having the nucleotide sequence represented by SEQ ID NO: 80267.

[11669] The probes having the nucleotide sequence represented by SEQ ID NOS: 137966, 137967, 137968, 137969, 137970, 137971, 137972, 137973, 137974, 137975, 137976 were selected from the ORFs having the nucleotide sequence represented by SEQ ID NO: 80268.

[11670] The probes having the nucleotide sequence represented by SEQ ID NOS: 137977, 137978, 137979, 137980, 137981, 137982, 137983, 137984, 137985, 137986, 137987 were selected from the ORFs having the nucleotide sequence represented by SEQ ID NO: 80269.

[11671] The probes having the nucleotide sequence represented by SEQ ID NOS: 137988, 137989, 137990, 137991, 137992, 137993, 137994, 137995, 137996, 137997, 137998 were selected from the ORFs having the nucleotide sequence represented by SEQ ID NO: 80270.

[11672] The probes having the nucleotide sequence represented by SEQ ID NOS: 137999, 138000, 138001, 138002, 138003, 138004, 138005, 138006, 138007, 138008, 138009 were selected from the ORFs having the nucleotide sequence represented by SEQ ID NO: 80271.

[11673] The probes having the nucleotide sequence represented by SEQ ID NOS: 138010, 138011, 138012, 138013, 138014, 138015, 138016, 138017, 138018, 138019, 138020 were selected from the ORFs having the nucleotide sequence represented by SEQ ID NO: 80272.

[11674] The probes having the nucleotide sequence represented by SEQ ID NOS: 138021, 138022, 138023, 138024, 138025, 138026, 138027, 138028, 138029, 138030, 138031 were selected from the ORFs having the nucleotide sequence represented by SEQ ID NO: 80273.

[11675] The probes having the nucleotide sequence represented by SEQ ID NOS: 138032, 138033, 138034, 138035, 138036, 138037, 138038, 138039, 138040, 138041, 138042 were selected from the ORFs having the nucleotide sequence represented by SEQ ID NO: 80274.

[11676] The probes having the nucleotide sequence represented by SEQ ID NOS: 138043, 138044, 138045, 138046, 138047, 138048, 138049, 138050, 138051, 138052, 138053 were selected from the ORFs having the nucleotide sequence represented by SEQ ID NO: 80275.

[11677] The probes having the nucleotide sequence represented by SEQ ID NOS: 138054, 138055, 138056, 138057, 138058, 138059, 138060, 138061, 138062, 138063, 138064 were selected from the ORFs having the nucleotide sequence represented by SEQ ID NO: 80276.

[11678] The probes having the nucleotide sequence represented by SEQ ID NOS: 138065, 138066, 138067, 138068, 138069, 138070, 138071, 138072, 138073, 138074, 138075 were selected from the ORFs having the nucleotide sequence represented by SEQ ID NO: 80277.

[11679] The probes having the nucleotide sequence represented by SEQ ID NOS: 138076, 138077, 138078, 138079, 138080, 138081, 138082, 138083, 138084, 138085, 138086 were selected from the ORFs having the nucleotide sequence represented by SEQ ID NO: 80278.

[11680] The probes having the nucleotide sequence represented by SEQ ID NOS: 138087, 138088, 138089, 138090, 138091, 138092, 138093, 138094, 138095, 138096, 138097 were selected from the ORFs having the nucleotide sequence represented by SEQ ID NO: 80279.

[11681] The probes having the nucleotide sequence represented by SEQ ID NOS: 138098, 138099, 138100, 138101, 138102, 138103, 138104, 138105, 138106, 138107, 138108 were selected from the ORFs having the nucleotide sequence represented by SEQ ID NO: 80280.

[11682] The probes having the nucleotide sequence represented by SEQ ID NOS: 138109, 138110, 138111, 138112, 138113, 138114, 138115, 138116, 138117, 138118, 138119 were selected from the ORFs having the nucleotide sequence represented by SEQ ID NO: 80281.

[11683] The probes having the nucleotide sequence represented by SEQ ID NOS: 138120, 138121, 138122, 138123, 138124, 138125, 138126, 138127, 138128, 138129, 138130 were selected from the ORFs having the nucleotide sequence represented by SEQ ID NO: 80282.

[11684] The probes having the nucleotide sequence represented by SEQ ID NOS: 138131, 138132, 138133, 138134, 138135, 138136, 138137, 138138, 138139, 138140, 138141 were selected from the ORFs having the nucleotide sequence represented by SEQ ID NO: 80283.

[11685] The probes having the nucleotide sequence represented by SEQ ID NOS: 138142, 138143, 138144, 138145, 138146, 138147, 138148, 138149, 138150, 138151, 138152 were selected from the ORFs having the nucleotide sequence represented by SEQ ID NO: 80284.

[11686] The probes having the nucleotide sequence represented by SEQ ID NOS: 138153, 138154, 138155, 138156, 138157, 138158, 138159, 138160, 138161, 138162, 138163 were selected from the ORFs having the nucleotide sequence represented by SEQ ID NO: 80285.

[11687] The probes having the nucleotide sequence represented by SEQ ID NOS: 138164, 138165, 138166, 138167, 138168, 138169, 138170, 138171, 138172, 138173, 138174 were selected from the ORFs having the nucleotide sequence represented by SEQ ID NO: 80286.

[11688] The probes having the nucleotide sequence represented by SEQ ID NOS: 138175, 138176, 138177, 138178, 138179, 138180, 138181, 138182, 138183, 138184, 138185 were selected from the ORFs having the nucleotide sequence represented by SEQ ID NO: 80287.

[11689] The probes having the nucleotide sequence represented by SEQ ID NOS: 138186, 138187, 138188, 138189, 138190, 138191, 138192, 138193, 138194, 138195, 138196 were selected from the ORFs having the nucleotide sequence represented by SEQ ID NO: 80288.

[11690] The probes having the nucleotide sequence represented by SEQ ID NOS: 138197, 138198, 138199, 138200, 138201, 138202, 138203, 138204, 138205, 138206, 138207 were selected from the ORFs having the nucleotide sequence represented by SEQ ID NO: 80289.

[11691] The probes having the nucleotide sequence represented by SEQ ID NOS: 138208, 138209, 138210, 138211, 138212, 138213, 138214, 138215, 138216, 138217, 138218 were selected from the ORFs having the nucleotide sequence represented by SEQ ID NO: 80290.

[11692] The probes having the nucleotide sequence represented by SEQ ID NOS: 138219, 138220, 138221, 138222, 138223, 138224, 138225, 138226, 138227, 138228, 138229 were selected from the ORFs having the nucleotide sequence represented by SEQ ID NO: 80291.

[11693] The probes having the nucleotide sequence represented by SEQ ID NOS: 138230, 138231, 138232, 138233, 138234, 138235, 138236, 138237, 138238, 138239, 138240 were selected from the ORFs having the nucleotide sequence represented by SEQ ID NO: 80292.

[11694] The probes having the nucleotide sequence represented by SEQ ID NOS: 138241, 138242, 138243, 138244, 138245, 138246, 138247, 138248, 138249, 138250, 138251 were selected from the ORFs having the nucleotide sequence represented by SEQ ID NO: 80293.

[11695] The probes having the nucleotide sequence represented by SEQ ID NOS: 138252, 138253, 138254, 138255, 138256, 138257, 138258, 138259, 138260, 138261, 138262 were selected from the ORFs having the nucleotide sequence represented by SEQ ID NO: 80294.

[11696] The probes having the nucleotide sequence represented by SEQ ID NOS: 138263, 138264, 138265, 138266, 138267, 138268, 138269, 138270, 138271, 138272, 138273 were selected from the ORFs having the nucleotide sequence represented by SEQ ID NO: 80295.

[11697] The probes having the nucleotide sequence represented by SEQ ID NOS: 138274, 138275, 138276, 138277, 138278, 138279, 138280, 138281, 138282, 138283, 138284 were selected from the ORFs having the nucleotide sequence represented by SEQ ID NO: 80296.

[11698] The probes having the nucleotide sequence represented by SEQ ID NOS: 138285, 138286, 138287, 138288, 138289, 138290, 138291, 138292, 138293, 138294, 138295 were selected from the ORFs having the nucleotide sequence represented by SEQ ID NO: 80297.

[11699] The probes having the nucleotide sequence represented by SEQ ID NOS: 138296, 138297, 138298, 138299, 138300, 138301, 138302, 138303, 138304, 138305, 138306 were selected from the ORFs having the nucleotide sequence represented by SEQ ID NO: 80298.

[11700] The probes having the nucleotide sequence represented by SEQ ID NOS: 138307, 138308, 138309, 138310, 138311, 138312, 138313, 138314, 138315, 138316, 138317 were selected from the ORFs having the nucleotide sequence represented by SEQ ID NO: 80299.

[11701] The probes having the nucleotide sequence represented by SEQ ID NOS: 138318, 138319, 138320, 138321, 138322, 138323, 138324, 138325, 138326, 138327, 138328 were selected from the ORFs having the nucleotide sequence represented by SEQ ID NO: 80300.

[11702] The probes having the nucleotide sequence represented by SEQ ID NOS: 138329, 138330, 138331, 138332, 138333, 138334, 138335, 138336, 138337, 138338, 138339 were selected from the ORFs having the nucleotide sequence represented by SEQ ID NO: 80301.

[11703] The probes having the nucleotide sequence represented by SEQ ID NOS: 138340, 138341, 138342, 138343, 138344, 138345, 138346, 138347, 138348, 138349, 138350 were selected from the ORFs having the nucleotide sequence represented by SEQ ID NO: 80302.

[11704] The probes having the nucleotide sequence represented by SEQ ID NOS: 138351, 138352, 138353, 138354, 138355, 138356, 138357, 138358, 138359, 138360, 138361 were selected from the ORFs having the nucleotide sequence represented by SEQ ID NO: 80303.

[11705] The probes having the nucleotide sequence represented by SEQ ID NOS: 138362, 138363, 138364, 138365, 138366, 138367, 138368, 138369, 138370, 138371, 138372 were selected from the ORFs having the nucleotide sequence represented by SEQ ID NO: 80304.

[11706] The probes having the nucleotide sequence represented by SEQ ID NOS: 138373, 138374, 138375, 138376, 138377, 138378, 138379, 138380, 138381, 138382, 138383 were selected from the ORFs having the nucleotide sequence represented by SEQ ID NO: 80305.

[11707] The probes having the nucleotide sequence represented by SEQ ID NOS: 138384, 138385, 138386, 138387, 138388, 138389, 138390, 138391, 138392, 138393, 138394 were selected from the ORFs having the nucleotide sequence represented by SEQ ID NO: 80306.

[11708] The probes having the nucleotide sequence represented by SEQ ID NOS: 138395, 138396, 138397, 138398, 138399, 138400, 138401, 138402, 138403, 138404, 138405 were selected from the ORFs having the nucleotide sequence represented by SEQ ID NO: 80307.

[11709] The probes having the nucleotide sequence represented by SEQ ID NOS: 138406, 138407, 138408, 138409, 138410, 138411, 138412, 138413, 138414, 138415, 138416 were selected from the ORFs having the nucleotide sequence represented by SEQ ID NO: 80308.

[11710] The probes having the nucleotide sequence represented by SEQ ID NOS: 138417, 138418, 138419, 138420, 138421, 138422, 138423, 138424, 138425, 138426, 138427 were selected from the ORFs having the nucleotide sequence represented by SEQ ID NO: 80309.

[11711] The probes having the nucleotide sequence represented by SEQ ID NOS: 138428, 138429, 138430, 138431, 138432, 138433, 138434, 138435, 138436, 138437, 138438 were selected from the ORFs having the nucleotide sequence represented by SEQ ID NO: 80310.

[11712] The probes having the nucleotide sequence represented by SEQ ID NOS: 138439, 138440, 138441, 138442, 138443, 138444, 138445, 138446, 138447, 138448, 138449 were selected from the ORFs having the nucleotide sequence represented by SEQ ID NO: 80311.

[11713] The probes having the nucleotide sequence represented by SEQ ID NOS: 138450, 138451, 138452, 138453, 138454, 138455, 138456, 138457, 138458, 138459, 138460 were selected from the ORFs having the nucleotide sequence represented by SEQ ID NO: 80312.

[11714] The probes having the nucleotide sequence represented by SEQ ID NOS: 138461, 138462, 138463, 138464, 138465, 138466, 138467, 138468, 138469, 138470, 138471 were selected from the ORFs having the nucleotide sequence represented by SEQ ID NO: 80313.

[11715] The probes having the nucleotide sequence represented by SEQ ID NOS: 138472, 138473, 138474, 138475, 138476, 138477, 138478, 138479, 138480, 138481, 138482 were selected from the ORFs having the nucleotide sequence represented by SEQ ID NO: 80314.

[11716] The probes having the nucleotide sequence represented by SEQ ID NOS: 138483, 138484, 138485, 138486, 138487, 138488, 138489, 138490, 138491, 138492, 138493 were selected from the ORFs having the nucleotide sequence represented by SEQ ID NO: 80315.

[11717] The probes having the nucleotide sequence represented by SEQ ID NOS: 138494, 138495, 138496, 138497, 138498, 138499, 138500, 138501, 138502, 138503, 138504 were selected from the ORFs having the nucleotide sequence represented by SEQ ID NO: 80316.

[11718] The probes having the nucleotide sequence represented by SEQ ID NOS: 138505, 138506, 138507, 138508, 138509, 138510, 138511, 138512, 138513, 138514, 138515 were selected from the ORFs having the nucleotide sequence represented by SEQ ID NO: 80317.

[11719] The probes having the nucleotide sequence represented by SEQ ID NOS: 138516, 138517, 138518, 138519, 138520, 138521, 138522, 138523, 138524, 138525, 138526 were selected from the ORFs having the nucleotide sequence represented by SEQ ID NO: 80318.

[11720] The probes having the nucleotide sequence represented by SEQ ID NOS: 138527, 138528, 138529, 138530, 138531, 138532, 138533, 138534, 138535, 138536, 138537 were selected from the ORFs having the nucleotide sequence represented by SEQ ID NO: 80319.

[11721] The probes having the nucleotide sequence represented by SEQ ID NOS: 138538, 138539, 138540, 138541, 138542, 138543, 138544, 138545, 138546, 138547, 138548 were selected from the ORFs having the nucleotide sequence represented by SEQ ID NO: 80320.

[11722] The probes having the nucleotide sequence represented by SEQ ID NOS: 138549, 138550, 138551, 138552, 138553, 138554, 138555, 138556, 138557, 138558, 138559 were selected from the ORFs having the nucleotide sequence represented by SEQ ID NO: 80321.

[11723] The probes having the nucleotide sequence represented by SEQ ID NOS: 138560, 138561, 138562, 138563, 138564, 138565, 138566, 138567, 138568, 138569, 138570 were selected from the ORFs having the nucleotide sequence represented by SEQ ID NO: 80322.

[11724] The probes having the nucleotide sequence represented by SEQ ID NOS: 138571, 138572, 138573, 138574, 138575, 138576, 138577, 138578, 138579, 138580, 138581 were selected from the ORFs having the nucleotide sequence represented by SEQ ID NO: 80323.

[11725] The probes having the nucleotide sequence represented by SEQ ID NOS: 138582, 138583, 138584, 138585, 138586, 138587, 138588, 138589, 138590, 138591, 138592 were selected from the ORFs having the nucleotide sequence represented by SEQ ID NO: 80324.

[11726] The probes having the nucleotide sequence represented by SEQ ID NOS: 138593, 138594, 138595, 138596, 138597, 138598, 138599, 138600, 138601, 138602, 138603 were selected from the ORFs having the nucleotide sequence represented by SEQ ID NO: 80325.

[11727] The probes having the nucleotide sequence represented by SEQ ID NOS: 138604, 138605, 138606, 138607, 138608, 138609, 138610, 138611, 138612, 138613, 138614 were selected from the ORFs having the nucleotide sequence represented by SEQ ID NO: 80326.

[11728] The probes having the nucleotide sequence represented by SEQ ID NOS: 138615, 138616, 138617, 138618, 138619, 138620, 138621, 138622, 138623, 138624, 138625 were selected from the ORFs having the nucleotide sequence represented by SEQ ID NO: 80327.

[11729] The probes having the nucleotide sequence represented by SEQ ID NOS: 138626, 138627, 138628, 138629, 138630, 138631, 138632, 138633, 138634, 138635, 138636 were selected from the ORFs having the nucleotide sequence represented by SEQ ID NO: 80328.

[11730] The probes having the nucleotide sequence represented by SEQ ID NOS: 138637, 138638, 138639, 138640, 138641, 138642, 138643, 138644, 138645, 138646, 138647 were selected from the ORFs having the nucleotide sequence represented by SEQ ID NO: 80329.

[11731] The probes having the nucleotide sequence represented by SEQ ID NOS: 138648, 138649, 138650, 138651, 138652, 138653, 138654, 138655, 138656, 138657, 138658 were selected from the ORFs having the nucleotide sequence represented by SEQ ID NO: 80330.

[11732] The probes having the nucleotide sequence represented by SEQ ID NOS: 138659, 138660, 138661, 138662, 138663, 138664, 138665, 138666, 138667, 138668, 138669 were selected from the ORFs having the nucleotide sequence represented by SEQ ID NO: 80331.

[11733] The probes having the nucleotide sequence represented by SEQ ID NOS: 138670, 138671, 138672, 138673, 138674, 138675, 138676, 138677, 138678, 138679, 138680 were selected from the ORFs having the nucleotide sequence represented by SEQ ID NO: 80332.

[11734] The probes having the nucleotide sequence represented by SEQ ID NOS: 138681, 138682, 138683, 138684, 138685, 138686, 138687, 138688, 138689, 138690, 138691 were selected from the ORFs having the nucleotide sequence represented by SEQ ID NO: 80333.

[11735] The probes having the nucleotide sequence represented by SEQ ID NOS: 138692, 138693, 138694, 138695, 138696, 138697, 138698, 138699, 138700, 138701, 138702 were selected from the ORFs having the nucleotide sequence represented by SEQ ID NO: 80334.

[11736] The probes having the nucleotide sequence represented by SEQ ID NOS: 138703, 138704, 138705, 138706, 138707, 138708, 138709, 138710, 138711, 138712, 138713 were selected from the ORFs having the nucleotide sequence represented by SEQ ID NO: 80335.

[11737] The probes having the nucleotide sequence represented by SEQ ID NOS: 138714, 138715, 138716, 138717, 138718, 138719, 138720, 138721, 138722, 138723, 138724 were selected from the ORFs having the nucleotide sequence represented by SEQ ID NO: 80336.

[11738] The probes having the nucleotide sequence represented by SEQ ID NOS: 138725, 138726, 138727, 138728, 138729, 138730, 138731, 138732, 138733, 138734, 138735 were selected from the ORFs having the nucleotide sequence represented by SEQ ID NO: 80337.

[11739] The probes having the nucleotide sequence represented by SEQ ID NOS: 138736, 138737, 138738, 138739, 138740, 138741, 138742, 138743, 138744, 138745, 138746 were selected from the ORFs having the nucleotide sequence represented by SEQ ID NO: 80338.

[11740] The probes having the nucleotide sequence represented by SEQ ID NOS: 138747, 138748, 138749, 138750, 138751, 138752, 138753, 138754, 138755, 138756, 138757 were selected from the ORFs having the nucleotide sequence represented by SEQ ID NO: 80339.

[11741] The probes having the nucleotide sequence represented by SEQ ID NOS: 138758, 138759, 138760, 138761, 138762, 138763, 138764, 138765, 138766, 138767, 138768 were selected from the ORFs having the nucleotide sequence represented by SEQ ID NO: 80340.

[11742] The probes having the nucleotide sequence represented by SEQ ID NOS: 138769, 138770, 138771, 138772, 138773, 138774, 138775, 138776, 138777, 138778, 138779, 138780, 138781, 138782, 138783, 138784, 138785, 138786, 138787, 138788, 138789, 138790 were selected from the ORFs having the nucleotide sequence represented by SEQ ID NO: 80341.

[11743] The probes having the nucleotide sequence represented by SEQ ID NOS: 138791, 138792, 138793, 138794, 138795, 138796, 138797, 138798, 138799, 138800, 138801 were selected from the ORFs having the nucleotide sequence represented by SEQ ID NO: 80342.

[11744] The probes having the nucleotide sequence represented by SEQ ID NOS: 138802, 138803, 138804, 138805, 138806, 138807, 138808, 138809, 138810, 138811, 138812 were selected from the ORFs having the nucleotide sequence represented by SEQ ID NO: 80343.

[11745] The probes having the nucleotide sequence represented by SEQ ID NOS: 138813, 138814, 138815, 138816, 138817, 138818, 138819, 138820, 138821, 138822, 138823 were selected from the ORFs having the nucleotide sequence represented by SEQ ID NO: 80344.

[11746] The probes having the nucleotide sequence represented by SEQ ID NOS: 138824, 138825, 138826, 138827, 138828, 138829, 138830, 138831, 138832, 138833, 138834 were selected from the ORFs having the nucleotide sequence represented by SEQ ID NO: 80345.

[11747] The probes having the nucleotide sequence represented by SEQ ID NOS: 138835, 138836, 138837, 138838, 138839, 138840, 138841, 138842, 138843, 138844, 138845 were selected from the ORFs having the nucleotide sequence represented by SEQ ID NO: 80346.

[11748] The probes having the nucleotide sequence represented by SEQ ID NOS: 138846, 138847, 138848, 138849, 138850, 138851, 138852, 138853, 138854, 138855, 138856 were selected from the ORFs having the nucleotide sequence represented by SEQ ID NO: 80347.

[11749] The probes having the nucleotide sequence represented by SEQ ID NOS: 138857, 138858, 138859, 138860, 138861, 138862, 138863, 138864, 138865, 138866, 138867 were selected from the ORFs having the nucleotide sequence represented by SEQ ID NO: 80348.

[11750] The probes having the nucleotide sequence represented by SEQ ID NOS: 138868, 138869, 138870, 138871, 138872, 138873, 138874, 138875, 138876, 138877, 138878 were selected from the ORFs having the nucleotide sequence represented by SEQ ID NO: 80349.

[11751] The probes having the nucleotide sequence represented by SEQ ID NOS: 138879, 138880, 138881, 138882, 138883, 138884, 138885, 138886, 138887, 138888, 138889 were selected from the ORFs having the nucleotide sequence represented by SEQ ID NO: 80350.

[11752] The probes having the nucleotide sequence represented by SEQ ID NOS: 138890, 138891, 138892, 138893, 138894, 138895, 138896, 138897, 138898, 138899, 138900 were selected from the ORFs having the nucleotide sequence represented by SEQ ID NO: 80351.

[11753] The probes having the nucleotide sequence represented by SEQ ID NOS: 138901, 138902, 138903, 138904, 138905, 138906, 138907, 138908, 138909, 138910, 138911 were selected from the ORFs having the nucleotide sequence represented by SEQ ID NO: 80352.

[11754] The probes having the nucleotide sequence represented by SEQ ID NOS: 138912, 138913, 138914, 138915, 138916, 138917, 138918, 138919, 138920, 138921, 138922 were selected from the ORFs having the nucleotide sequence represented by SEQ ID NO: 80353.

[11755] The probes having the nucleotide sequence represented by SEQ ID NOS: 138923, 138924, 138925, 138926, 138927, 138928, 138929, 138930, 138931, 138932, 138933 were selected from the ORFs having the nucleotide sequence represented by SEQ ID NO: 80354.

[11756] The probes having the nucleotide sequence represented by SEQ ID NOS: 138934, 138935, 138936, 138937, 138938, 138939, 138940, 138941, 138942, 138943, 138944 were selected from the ORFs having the nucleotide sequence represented by SEQ ID NO: 80355.

[11757] The probes having the nucleotide sequence represented by SEQ ID NOS: 138945, 138946, 138947, 138948, 138949, 138950, 138951, 138952, 138953, 138954, 138955 were selected from the ORFs having the nucleotide sequence represented by SEQ ID NO: 80356.

[11758] The probes having the nucleotide sequence represented by SEQ ID NOS: 138956, 138957, 138958, 138959, 138960, 138961, 138962, 138963, 138964, 138965, 138966 were selected from the ORFs having the nucleotide sequence represented by SEQ ID NO: 80357.

[11759] The probes having the nucleotide sequence represented by SEQ ID NOS: 138967, 138968, 138969, 138970, 138971, 138972, 138973, 138974, 138975, 138976, 138977 were selected from the ORFs having the nucleotide sequence represented by SEQ ID NO: 80358.

[11760] The probes having the nucleotide sequence represented by SEQ ID NOS: 138978, 138979, 138980, 138981, 138982, 138983, 138984, 138985, 138986, 138987, 138988 were selected from the ORFs having the nucleotide sequence represented by SEQ ID NO: 80359.

[11761] The probes having the nucleotide sequence represented by SEQ ID NOS: 138989, 138990, 138991, 138992, 138993, 138994, 138995, 138996, 138997, 138998, 138999 were selected from the ORFs having the nucleotide sequence represented by SEQ ID NO: 80360.

[11762] The probes having the nucleotide sequence represented by SEQ ID NOS: 139000, 139001, 139002, 139003, 139004, 139005, 139006, 139007, 139008, 139009, 139010 were selected from the ORFs having the nucleotide sequence represented by SEQ ID NO: 80361.

[11763] The probes having the nucleotide sequence represented by SEQ ID NOS: 139011, 139012, 139013, 139014, 139015, 139016, 139017, 139018, 139019, 139020, 139021 were selected from the ORFs having the nucleotide sequence represented by SEQ ID NO: 80362.

[11764] The probes having the nucleotide sequence represented by SEQ ID NOS: 139022, 139023, 139024, 139025, 139026, 139027, 139028, 139029, 139030, 139031, 139032 were selected from the ORFs having the nucleotide sequence represented by SEQ ID NO: 80363.

[11765] The probes having the nucleotide sequence represented by SEQ ID NOS: 139033, 139034, 139035, 139036, 139037, 139038, 139039, 139040, 139041, 139042, 139043 were selected from the ORFs having the nucleotide sequence represented by SEQ ID NO: 80364.

[11766] The probes having the nucleotide sequence represented by SEQ ID NOS: 139044, 139045, 139046, 139047, 139048, 139049, 139050, 139051, 139052, 139053, 139054 were selected from the ORFs having the nucleotide sequence represented by SEQ ID NO: 80365.

[11767] The probes having the nucleotide sequence represented by SEQ ID NOS: 139055, 139056, 139057, 139058, 139059, 139060, 139061, 139062, 139063, 139064, 139065 were selected from the ORFs having the nucleotide sequence represented by SEQ ID NO: 80366.

[11768] The probes having the nucleotide sequence represented by SEQ ID NOS: 139066, 139067, 139068, 139069, 139070, 139071, 139072, 139073, 139074, 139075, 139076 were selected from the ORFs having the nucleotide sequence represented by SEQ ID NO: 80367.

[11769] The probes having the nucleotide sequence represented by SEQ ID NOS: 139077, 139078, 139079, 139080, 139081, 139082, 139083, 139084, 139085, 139086, 139087 were selected from the ORFs having the nucleotide sequence represented by SEQ ID NO: 80368.

[11770] The probes having the nucleotide sequence represented by SEQ ID NOS: 139088, 139089, 139090, 139091, 139092, 139093, 139094, 139095, 139096, 139097, 139098 were selected from the ORFs having the nucleotide sequence represented by SEQ ID NO: 80369.

[11771] The probes having the nucleotide sequence represented by SEQ ID NOS: 139099, 139100, 139101, 139102, 139103, 139104, 139105, 139106, 139107, 139108, 139109 were selected from the ORFs having the nucleotide sequence represented by SEQ ID NO: 80370.

[11772] The probes having the nucleotide sequence represented by SEQ ID NOS: 139110, 139111, 139112, 139113, 139114, 139115, 139116, 139117, 139118, 139119, 139120 were selected from the ORFs having the nucleotide sequence represented by SEQ ID NO: 80371.

[11773] The probes having the nucleotide sequence represented by SEQ ID NOS: 139121, 139122, 139123, 139124, 139125, 139126, 139127, 139128, 139129, 139130, 139131 were selected from the ORFs having the nucleotide sequence represented by SEQ ID NO: 80372.

[11774] The probes having the nucleotide sequence represented by SEQ ID NOS: 139132, 139133, 139134, 139135, 139136, 139137, 139138, 139139, 139140, 139141, 139142 were selected from the ORFs having the nucleotide sequence represented by SEQ ID NO: 80373.

[11775] The probes having the nucleotide sequence represented by SEQ ID NOS: 139143, 139144, 139145, 139146, 139147, 139148, 139149, 139150, 139151, 139152, 139153 were selected from the ORFs having the nucleotide sequence represented by SEQ ID NO: 80374.

[11776] The probes having the nucleotide sequence represented by SEQ ID NOS: 139154, 139155, 139156, 139157, 139158, 139159, 139160, 139161, 139162, 139163, 139164 were selected from the ORFs having the nucleotide sequence represented by SEQ ID NO: 80375.

[11777] The probes having the nucleotide sequence represented by SEQ ID NOS: 139165, 139166, 139167, 139168, 139169, 139170, 139171, 139172, 139173, 139174, 139175 were selected from the ORFs having the nucleotide sequence represented by SEQ ID NO: 80376.

[11778] The probes having the nucleotide sequence represented by SEQ ID NOS: 139176, 139177, 139178, 139179, 139180, 139181, 139182, 139183, 139184, 139185, 139186 were selected from the ORFs having the nucleotide sequence represented by SEQ ID NO: 80377.

[11779] The probes having the nucleotide sequence represented by SEQ ID NOS: 139187, 139188, 139189, 139190, 139191, 139192, 139193, 139194, 139195, 139196, 139197 were selected from the ORFs having the nucleotide sequence represented by SEQ ID NO: 80378.

[11780] The probes having the nucleotide sequence represented by SEQ ID NOS: 139198, 139199, 139200, 139201, 139202, 139203, 139204, 139205, 139206, 139207, 139208 were selected from the ORFs having the nucleotide sequence represented by SEQ ID NO: 80379.

[11781] The probes having the nucleotide sequence represented by SEQ ID NOS: 139209, 139210, 139211, 139212, 139213, 139214, 139215, 139216, 139217, 139218, 139219 were selected from the ORFs having the nucleotide sequence represented by SEQ ID NO: 80380.

[11782] The probes having the nucleotide sequence represented by SEQ ID NOS: 139220, 139221, 139222, 139223, 139224, 139225, 139226, 139227, 139228, 139229, 139230 were selected from the ORFs having the nucleotide sequence represented by SEQ ID NO: 80381.

[11783] The probes having the nucleotide sequence represented by SEQ ID NOS: 139231, 139232, 139233, 139234, 139235, 139236, 139237, 139238, 139239, 139240, 139241 were selected from the ORFs having the nucleotide sequence represented by SEQ ID NO: 80382.

[11784] The probes having the nucleotide sequence represented by SEQ ID NOS: 139242, 139243, 139244, 139245, 139246, 139247, 139248, 139249, 139250, 139251, 139252 were selected from the ORFs having the nucleotide sequence represented by SEQ ID NO: 80383.

[11785] The probes having the nucleotide sequence represented by SEQ ID NOS: 139253, 139254, 139255, 139256, 139257, 139258, 139259, 139260, 139261, 139262, 139263 were selected from the ORFs having the nucleotide sequence represented by SEQ ID NO: 80384.

[11786] The probes having the nucleotide sequence represented by SEQ ID NOS: 139264, 139265, 139266, 139267, 139268, 139269, 139270, 139271, 139272, 139273, 139274 were selected from the ORFs having the nucleotide sequence represented by SEQ ID NO: 80385.

[11787] The probes having the nucleotide sequence represented by SEQ ID NOS: 139275, 139276, 139277, 139278, 139279, 139280, 139281, 139282, 139283, 139284, 139285 were selected from the ORFs having the nucleotide sequence represented by SEQ ID NO: 80386.

[11788] The probes having the nucleotide sequence represented by SEQ ID NOS: 139286, 139287, 139288, 139289, 139290, 139291, 139292, 139293, 139294, 139295, 139296 were selected from the ORFs having the nucleotide sequence represented by SEQ ID NO: 80387.

[11789] The probes having the nucleotide sequence represented by SEQ ID NOS: 139297, 139298, 139299, 139300, 139301, 139302, 139303, 139304, 139305, 139306, 139307, 139308, 139309, 139310, 139311, 139312, 139313, 139314, 139315, 139316, 139317, 139318 were selected from the ORFs having the nucleotide sequence represented by SEQ ID NO: 80388.

[11790] The probes having the nucleotide sequence represented by SEQ ID NOS: 139319, 139320, 139321, 139322, 139323, 139324, 139325, 139326, 139327, 139328, 139329 were selected from the ORFs having the nucleotide sequence represented by SEQ ID NO: 80389.

[11791] The probes having the nucleotide sequence represented by SEQ ID NOS: 139330, 139331, 139332, 139333, 139334, 139335, 139336, 139337, 139338, 139339, 139340 were selected from the ORFs having the nucleotide sequence represented by SEQ ID NO: 80390.

[11792] The probes having the nucleotide sequence represented by SEQ ID NOS: 139341, 139342, 139343, 139344, 139345, 139346, 139347, 139348, 139349, 139350, 139351 were selected from the ORFs having the nucleotide sequence represented by SEQ ID NO: 80391.

[11793] The probes having the nucleotide sequence represented by SEQ ID NOS: 139352, 139353, 139354, 139355, 139356, 139357, 139358, 139359, 139360, 139361, 139362 were selected from the ORFs having the nucleotide sequence represented by SEQ ID NO: 80392.

[11794] The probes having the nucleotide sequence represented by SEQ ID NOS: 139363, 139364, 139365, 139366, 139367, 139368, 139369, 139370, 139371, 139372, 139373 were selected from the ORFs having the nucleotide sequence represented by SEQ ID NO: 80393.

[11795] The probes having the nucleotide sequence represented by SEQ ID NOS: 139374, 139375, 139376, 139377, 139378, 139379, 139380, 139381, 139382, 139383, 139384 were selected from the ORFs having the nucleotide sequence represented by SEQ ID NO: 80394.

[11796] The probes having the nucleotide sequence represented by SEQ ID NOS: 139385, 139386, 139387, 139388, 139389, 139390, 139391, 139392, 139393, 139394, 139395 were selected from the ORFs having the nucleotide sequence represented by SEQ ID NO: 80395.

[11797] The probes having the nucleotide sequence represented by SEQ ID NOS: 139396, 139397, 139398, 139399, 139400, 139401, 139402, 139403, 139404, 139405, 139406 were selected from the ORFs having the nucleotide sequence represented by SEQ ID NO: 80396.

[11798] The probes having the nucleotide sequence represented by SEQ ID NOS: 139407, 139408, 139409, 139410, 139411, 139412, 139413, 139414, 139415, 139416, 139417 were selected from the ORFs having the nucleotide sequence represented by SEQ ID NO: 80397.

[11799] The probes having the nucleotide sequence represented by SEQ ID NOS: 139418, 139419, 139420, 139421, 139422, 139423, 139424, 139425, 139426, 139427, 139428 were selected from the ORFs having the nucleotide sequence represented by SEQ ID NO: 80398.

[11800] The probes having the nucleotide sequence represented by SEQ ID NOS: 139429, 139430, 139431, 139432, 139433, 139434, 139435, 139436, 139437, 139438, 139439 were selected from the ORFs having the nucleotide sequence represented by SEQ ID NO: 80399.

[11801] The probes having the nucleotide sequence represented by SEQ ID NOS: 139440, 139441, 139442, 139443, 139444, 139445, 139446, 139447, 139448, 139449, 139450 were selected from the ORFs having the nucleotide sequence represented by SEQ ID NO: 80400.

[11802] The probes having the nucleotide sequence represented by SEQ ID NOS: 139451, 139452, 139453, 139454, 139455, 139456, 139457, 139458, 139459, 139460, 139461 were selected from the ORFs having the nucleotide sequence represented by SEQ ID NO: 80401.

[11803] The probes having the nucleotide sequence represented by SEQ ID NOS: 139462, 139463, 139464, 139465, 139466, 139467, 139468, 139469, 139470, 139471, 139472 were selected from the ORFs having the nucleotide sequence represented by SEQ ID NO: 80402.

[11804] The probes having the nucleotide sequence represented by SEQ ID NOS: 139473, 139474, 139475, 139476, 139477, 139478, 139479, 139480, 139481, 139482, 139483 were selected from the ORFs having the nucleotide sequence represented by SEQ ID NO: 80403.

[11805] The probes having the nucleotide sequence represented by SEQ ID NOS: 139484, 139485, 139486, 139487, 139488, 139489, 139490, 139491, 139492, 139493, 139494 were selected from the ORFs having the nucleotide sequence represented by SEQ ID NO: 80404.

[11806] The probes having the nucleotide sequence represented by SEQ ID NOS: 139495, 139496, 139497, 139498, 139499, 139500, 139501, 139502, 139503, 139504, 139505 were selected from the ORFs having the nucleotide sequence represented by SEQ ID NO: 80405.

[11807] The probes having the nucleotide sequence represented by SEQ ID NOS: 139506, 139507, 139508, 139509, 139510, 139511, 139512, 139513, 139514, 139515, 139516 were selected from the ORFs having the nucleotide sequence represented by SEQ ID NO: 80406.

[11808] The probes having the nucleotide sequence represented by SEQ ID NOS: 139517, 139518, 139519, 139520, 139521, 139522, 139523, 139524, 139525, 139526, 139527 were selected from the ORFs having the nucleotide sequence represented by SEQ ID NO: 80407.

[11809] The probes having the nucleotide sequence represented by SEQ ID NOS: 139528, 139529, 139530, 139531, 139532, 139533, 139534, 139535, 139536, 139537, 139538 were selected from the ORFs having the nucleotide sequence represented by SEQ ID NO: 80408.

[11810] The probes having the nucleotide sequence represented by SEQ ID NOS: 139539, 139540, 139541, 139542, 139543, 139544, 139545, 139546, 139547, 139548, 139549 were selected from the ORFs having the nucleotide sequence represented by SEQ ID NO: 80409.

[11811] The probes having the nucleotide sequence represented by SEQ ID NOS: 139550, 139551, 139552, 139553, 139554, 139555, 139556, 139557, 139558, 139559, 139560 were selected from the ORFs having the nucleotide sequence represented by SEQ ID NO: 80410.

[11812] The probes having the nucleotide sequence represented by SEQ ID NOS: 139561, 139562, 139563, 139564, 139565, 139566, 139567, 139568, 139569, 139570, 139571 were selected from the ORFs having the nucleotide sequence represented by SEQ ID NO: 80411.

[11813] The probes having the nucleotide sequence represented by SEQ ID NOS: 139572, 139573, 139574, 139575, 139576, 139577, 139578, 139579, 139580, 139581, 139582 were selected from the ORFs having the nucleotide sequence represented by SEQ ID NO: 80412.

[11814] The probes having the nucleotide sequence represented by SEQ ID NOS: 139583, 139584, 139585, 139586, 139587, 139588, 139589, 139590, 139591, 139592, 139593 were selected from the ORFs having the nucleotide sequence represented by SEQ ID NO: 80413.

[11815] The probes having the nucleotide sequence represented by SEQ ID NOS: 139594, 139595, 139596, 139597, 139598, 139599, 139600, 139601, 139602, 139603, 139604 were selected from the ORFs having the nucleotide sequence represented by SEQ ID NO: 80414.

[11816] The probes having the nucleotide sequence represented by SEQ ID NOS: 139605, 139606, 139607, 139608, 139609, 139610, 139611, 139612, 139613, 139614, 139615 were selected from the ORFs having the nucleotide sequence represented by SEQ ID NO: 80415.

[11817] The probes having the nucleotide sequence represented by SEQ ID NOS: 139616, 139617, 139618, 139619, 139620, 139621, 139622, 139623, 139624, 139625, 139626 were selected from the ORFs having the nucleotide sequence represented by SEQ ID NO: 80416.

[11818] The probes having the nucleotide sequence represented by SEQ ID NOS: 139627, 139628, 139629, 139630, 139631, 139632, 139633, 139634, 139635, 139636, 139637 were selected from the ORFs having the nucleotide sequence represented by SEQ ID NO: 80417.

[11819] The probes having the nucleotide sequence represented by SEQ ID NOS: 139638, 139639, 139640, 139641, 139642, 139643, 139644, 139645, 139646, 139647, 139648 were selected from the ORFs having the nucleotide sequence represented by SEQ ID NO: 80418.

[11820] The probes having the nucleotide sequence represented by SEQ ID NOS: 139649, 139650, 139651, 139652, 139653, 139654, 139655, 139656, 139657, 139658, 139659 were selected from the ORFs having the nucleotide sequence represented by SEQ. ID NO: 80419.

[11821] The probes having the nucleotide sequence represented by SEQ ID NOS: 139660, 139661, 139662, 139663, 139664, 139665, 139666, 139667, 139668, 139669, 139670 were selected from the ORFs having the nucleotide sequence represented by SEQ ID NO: 80420.

[11822] The probes having the nucleotide sequence represented by SEQ ID NOS: 139671, 139672, 139673, 139674, 139675, 139676, 139677, 139678, 139679, 139680, 139681 were selected from the ORFs having the nucleotide sequence represented by SEQ ID NO: 80421.

[11823] The probes having the nucleotide sequence represented by SEQ ID NOS: 139682, 139683, 139684, 139685, 139686, 139687, 139688, 139689, 139690, 139691, 139692 were selected from the ORFs having the nucleotide sequence represented by SEQ ID NO: 80422.

[11824] The probes having the nucleotide sequence represented by SEQ ID NOS: 139693, 139694, 139695, 139696, 139697, 139698, 139699, 139700, 139701, 139702, 139703 were selected from the ORFs having the nucleotide sequence represented by SEQ ID NO: 80423.

[11825] The probes having the nucleotide sequence represented by SEQ ID NOS: 139704, 139705, 139706, 139707, 139708, 139709, 139710, 139711, 139712, 139713, 139714 were selected from the ORFs having the nucleotide sequence represented by SEQ ID NO: 80424.

[11826] The probes having the nucleotide sequence represented by SEQ ID NOS: 139715, 139716, 139717, 139718, 139719, 139720, 139721, 139722, 139723, 139724, 139725, 139726, 139727, 139728, 139729, 139730, 139731, 139732, 139733, 139734, 139735, 139736 were selected from the ORFs having the nucleotide sequence represented by SEQ ID NO: 80425.

[11827] The probes having the nucleotide sequence represented by SEQ ID NOS: 139737, 139738, 139739, 139740, 139741, 139742, 139743, 139744, 139745, 139746, 139747 were selected from the ORFs having the nucleotide sequence represented by SEQ ID NO: 80426.

[11828] The probes having the nucleotide sequence represented by SEQ ID NOS: 139748, 139749, 139750, 139751, 139752, 139753, 139754, 139755, 139756, 139757, 139758 were selected from the ORFs having the nucleotide sequence represented by SEQ ID NO: 80427.

[11829] The probes having the nucleotide sequence represented by SEQ ID NOS: 139759, 139760, 139761, 139762, 139763, 139764, 139765, 139766, 139767, 139768, 139769 were selected from the ORFs having the nucleotide sequence represented by SEQ ID NO: 80428.

[11830] The probes having the nucleotide sequence represented by SEQ ID NOS: 139770, 139771, 139772, 139773, 139774, 139775, 139776, 139777, 139778, 139779, 139780 were selected from the ORFs having the nucleotide sequence represented by SEQ ID NO: 80429.

[11831] The probes having the nucleotide sequence represented by SEQ ID NOS: 139781, 139782, 139783, 139784, 139785, 139786, 139787, 139788, 139789, 139790, 139791 were selected from the ORFs having the nucleotide sequence represented by SEQ ID NO: 80430.

[11832] The probes having the nucleotide sequence represented by SEQ ID NOS: 139792, 139793, 139794, 139795, 139796, 139797, 139798, 139799, 139800, 139801, 139802 were selected from the ORFs having the nucleotide sequence represented by SEQ ID NO: 80431.

[11833] The probes having the nucleotide sequence represented by SEQ ID NOS: 139803, 139804, 139805, 139806, 139807, 139808, 139809, 139810, 139811, 139812, 139813 were selected from the ORFs having the nucleotide sequence represented by SEQ ID NO: 80432.

[11834] The probes having the nucleotide sequence represented by SEQ ID NOS: 139814, 139815, 139816, 139817, 139818, 139819, 139820, 139821, 139822, 139823, 139824 were selected from the ORFs having the nucleotide sequence represented by SEQ ID NO: 80433.

[11835] The probes having the nucleotide sequence represented by SEQ ID NOS: 139825, 139826, 139827, 139828, 139829, 139830, 139831, 139832, 139833, 139834, 139835 were selected from the ORFs having the nucleotide sequence represented by SEQ ID NO: 80434.

[11836] The probes having the nucleotide sequence represented by SEQ ID NOS: 139836, 139837, 139838, 139839, 139840, 139841, 139842, 139843, 139844, 139845, 139846, 139847, 139848, 139849, 139850, 139851, 139852, 139853, 139854, 139855, 139856, 139857 were selected from the ORFs having the nucleotide sequence represented by SEQ ID NO: 80435.

[11837] The probes having the nucleotide sequence represented by SEQ ID NOS: 139858, 139859, 139860, 139861, 139862, 139863, 139864, 139865, 139866, 139867, 139868 were selected from the ORFs having the nucleotide sequence represented by SEQ ID NO: 80436.

[11838] The probes having the nucleotide sequence represented by SEQ ID NOS: 139869, 139870, 139871, 139872, 139873, 139874, 139875, 139876, 139877, 139878, 139879 were selected from the ORFs having the nucleotide sequence represented by SEQ ID NO: 80437.

[11839] The probes having the nucleotide sequence represented by SEQ ID NOS: 139880, 139881, 139882, 139883, 139884, 139885, 139886, 139887, 139888, 139889, 139890 were selected from the ORFs having the nucleotide sequence represented by SEQ ID NO: 80438.

[11840] The probes having the nucleotide sequence represented by SEQ ID NOS: 139891, 139892, 139893, 139894, 139895, 139896, 139897, 139898, 139899, 139900, 139901 were selected from the ORFs having the nucleotide sequence represented by SEQ ID NO: 80439.

[11841] The probes having the nucleotide sequence represented by SEQ ID NOS: 139902, 139903, 139904, 139905, 139906, 139907, 139908, 139909, 139910, 139911, 139912 were selected from the ORFs having the nucleotide sequence represented by SEQ ID NO: 80440.

[11842] The probes having the nucleotide sequence represented by SEQ ID NOS: 139913, 139914, 139915, 139916, 139917, 139918, 139919, 139920, 139921, 139922, 139923 were selected from the ORFs having the nucleotide sequence represented by SEQ ID NO: 80441.

[11843] The probes having the nucleotide sequence represented by SEQ ID NOS: 139924, 139925, 139926, 139927, 139928, 139929, 139930, 139931, 139932, 139933, 139934 were selected from the ORFs having the nucleotide sequence represented by SEQ ID NO: 80442.

[11844] The probes having the nucleotide sequence represented by SEQ ID NOS: 139935, 139936, 139937, 139938, 139939, 139940, 139941, 139942, 139943, 139944, 139945 were selected from the ORFs having the nucleotide sequence represented by SEQ ID NO: 80443.

[11845] The probes having the nucleotide sequence represented by SEQ ID NOS: 139946, 139947, 139948, 139949, 139950, 139951, 139952, 139953, 139954, 139955, 139956 were selected from the ORFs having the nucleotide sequence represented by SEQ ID NO: 80444.

[11846] The probes having the nucleotide sequence represented by SEQ ID NOS: 139957, 139958, 139959, 139960, 139961, 139962, 139963, 139964, 139965, 139966, 139967 were selected from the ORFs having the nucleotide sequence represented by SEQ ID NO: 80445.

[11847] The probes having the nucleotide sequence represented by SEQ ID NOS: 139968, 139969, 139970, 139971, 139972, 139973, 139974, 139975, 139976, 139977, 139978 were selected from the ORFs having the nucleotide sequence represented by SEQ ID NO: 80446.

[11848] The probes having the nucleotide sequence represented by SEQ ID NOS: 139979, 139980, 139981, 139982, 139983, 139984, 139985, 139986, 139987, 139988, 139989 were selected from the ORFs having the nucleotide sequence represented by SEQ ID NO: 80447.

[11849] The probes having the nucleotide sequence represented by SEQ ID NOS: 139990, 139991, 139992, 139993, 139994, 139995, 139996, 139997, 139998, 139999, 140000 were selected from the ORFs having the nucleotide sequence represented by SEQ ID NO: 80448.

[11850] The probes having the nucleotide sequence represented by SEQ ID NOS: 140001, 140002, 140003, 140004, 140005, 140006, 140007, 140008, 140009, 140010, 140011 were selected from the ORFs having the nucleotide sequence represented by SEQ ID NO: 80449.

[11851] The probes having the nucleotide sequence represented by SEQ ID NOS: 140012, 140013, 140014, 140015, 140016, 140017, 140018, 140019, 140020, 140021, 140022 were selected from the ORFs having the nucleotide sequence represented by SEQ ID NO: 80450.

[11852] The probes having the nucleotide sequence represented by SEQ ID NOS: 140023, 140024, 140025, 140026, 140027, 140028, 140029, 140030, 140031, 140032, 140033 were selected from the ORFs having the nucleotide sequence represented by SEQ ID NO: 80451.

[11853] The probes having the nucleotide sequence represented by SEQ ID NOS: 140034, 140035, 140036, 140037, 140038, 140039, 140040, 140041, 140042, 140043, 140044 were selected from the ORFs having the nucleotide sequence represented by SEQ ID NO: 80452.

[11854] The probes having the nucleotide sequence represented by SEQ ID NOS: 140045, 140046, 140047, 140048, 140049, 140050, 140051, 140052, 140053, 140054, 140055 were selected from the ORFs having the nucleotide sequence represented by SEQ ID NO: 80453.

[11855] The probes having the nucleotide sequence represented by SEQ ID NOS: 140056, 140057, 140058, 140059, 140060, 140061, 140062, 140063, 140064, 140065, 140066 were selected from the ORFs having the nucleotide sequence represented by SEQ ID NO: 80454.

[11856] The probes having the nucleotide sequence represented by SEQ ID NOS: 140067, 140068, 140069, 140070, 140071, 140072, 140073, 140074, 140075, 140076, 140077 were selected from the ORFs having the nucleotide sequence represented by SEQ ID NO: 80455.

[11857] The probes having the nucleotide sequence represented by SEQ ID NOS: 140078, 140079, 140080, 140081, 140082, 140083, 140084, 140085, 140086, 140087, 140088 were selected from the ORFs having the nucleotide sequence represented by SEQ ID NO: 80456.

[11858] The probes having the nucleotide sequence represented by SEQ ID NOS: 140089, 140090, 140091, 140092, 140093, 140094, 140095, 140096, 140097, 140098, 140099 were selected from the ORFs having the nucleotide sequence represented by SEQ ID NO: 80457

[11859] The probes having the nucleotide sequence represented by SEQ ID NOS: 140100, 140101, 140102, 140103, 140104, 140105, 140106, 140107, 140108, 140109, 140110 were selected from the ORFs having the nucleotide sequence represented by SEQ ID NO: 80458

[11860] The probes having the nucleotide sequence represented by SEQ ID NOS: 140111, 140112, 140113, 140114, 140115, 140116, 140117, 140118, 140119, 140120, 140121 were selected from the ORFs having the nucleotide sequence represented by SEQ ID NO: 80459

[11861] The probes having the nucleotide sequence represented by SEQ ID NOS: 140122, 140123, 140124, 140125, 140126, 140127, 140128, 140129, 140130, 140131, 140132 were selected from the ORFs having the nucleotide sequence represented by SEQ ID NO: 80460

[11862] The probes having the nucleotide sequence represented by SEQ ID NOS: 140133, 140134, 140135, 140136, 140137, 140138, 140139, 140140, 140141, 140142, 140143 were selected from the ORFs having the nucleotide sequence represented by SEQ ID NO: 80461

[11863] The probes having the nucleotide sequence represented by SEQ ID NOS: 140144, 140145, 140146, 140147, 140148, 140149, 140150, 140151, 140152, 140153, 140154 were selected from the ORFs having the nucleotide sequence represented by SEQ ID NO: 80462.

[11864] The probes having the nucleotide sequence represented by SEQ ID NOS: 140155, 140156, 140157, 140158, 140159, 140160, 140161, 140162, 140163, 140164, 140165 were selected from the ORFs having the nucleotide sequence represented by SEQ ID NO: 80463

[11865] The probes having the nucleotide sequence represented by SEQ ID NOS: 140166, 140167, 140168, 140169, 140170, 140171, 140172, 140173, 140174, 140175, 140176 were selected from the ORFs having the nucleotide sequence represented by SEQ ID NO: 80464

[11866] The probes having the nucleotide sequence represented by SEQ ID NOS: 140177, 140178, 140179, 140180, 140181, 140182, 140183, 140184, 140185, 140186, 140187 were selected from the ORFs having the nucleotide sequence represented by SEQ ID NO: 80465

[11867] The probes having the nucleotide sequence represented by SEQ ID NOS: 140188, 140189, 140190, 140191, 140192, 140193, 140194, 140195, 140196, 140197, 140198 were selected from the ORFs having the nucleotide sequence represented by SEQ ID NO: 80466

[11868] The probes having the nucleotide sequence represented by SEQ ID NOS: 140199, 140200, 140201, 140202, 140203, 140204, 140205, 140206, 140207, 140208, 140209 were selected from the ORFs having the nucleotide sequence represented by SEQ ID NO: 80467

[11869] The probes having the nucleotide sequence represented by SEQ ID NOS: 140210, 140211, 140212, 140213, 140214, 140215, 140216, 140217, 140218, 140219, 140220 were selected from the ORFs having the nucleotide sequence represented by SEQ ID NO: 80468

[11870] The probes having the nucleotide sequence represented by SEQ ID NOS: 140221, 140222, 140223, 140224, 140225, 140226, 140227, 140228, 140229, 140230, 140231 were selected from the ORFs having the nucleotide sequence represented by SEQ ID NO: 80469

[11871] The probes having the nucleotide sequence represented by SEQ ID NOS: 140232, 140233, 140234, 140235, 140236, 140237, 140238, 140239, 140240, 140241, 140242 were selected from the ORFs having the nucleotide sequence represented by SEQ ID NO: 80470

[11872] The probes having the nucleotide sequence represented by SEQ ID NOS: 140243, 140244, 140245, 140246, 140247, 140248, 140249, 140250, 140251, 140252, 140253 were selected from the ORFs having the nucleotide sequence represented by SEQ ID NO: 80471

[11873] The probes having the nucleotide sequence represented by SEQ ID NOS: 140254, 140255, 140256, 140257, 140258, 140259, 140260, 140261, 140262, 140263, 140264 were selected from the ORFs having the nucleotide sequence represented by SEQ ID NO: 80472

[11874] The probes having the nucleotide sequence represented by SEQ ID NOS: 140265, 140266, 140267, 140268, 140269, 140270, 140271, 140272, 140273, 140274, 140275 were selected from the ORFs having the nucleotide sequence represented by SEQ ID NO: 80473.

[11875] The probes having the nucleotide sequence represented by SEQ ID NOS: 140276, 140277, 140278, 140279, 140280, 140281, 140282, 140283, 140284, 140285, 140286 were selected from the ORFs having the nucleotide sequence represented by SEQ ID NO: 80474

[11876] The probes having the nucleotide sequence represented by SEQ ID NOS: 140287, 140288, 140289, 140290, 140291, 140292, 140293, 140294, 140295, 140296, 140297 were selected from the ORFs having the nucleotide sequence represented by SEQ ID NO: 80475

[11877] The probes having the nucleotide sequence represented by SEQ ID NOS: 140298, 140299, 140300, 140301, 140302, 140303, 140304, 140305, 140306, 140307, 140308 were selected from the ORFs having the nucleotide sequence represented by SEQ ID NO: 80476

[11878] The probes having the nucleotide sequence represented by SEQ ID NOS: 140309, 140310, 140311, 140312, 140313, 140314, 140315, 140316, 140317, 140318, 140319 were selected from the ORFs having the nucleotide sequence represented by SEQ ID NO: 80477

[11879] The probes having the nucleotide sequence represented by SEQ ID NOS: 140320, 140321, 140322, 140323, 140324, 140325, 140326, 140327, 140328, 140329, 140330 were selected from the ORFs having the nucleotide sequence represented by SEQ ID NO: 80478

[11880] The probes having the nucleotide sequence represented by SEQ ID NOS: 140331, 140332, 140333, 140334, 140335, 140336, 140337, 140338, 140339, 140340, 140341 were selected from the ORFs having the nucleotide sequence represented by SEQ ID NO: 80479

[11881] The probes having the nucleotide sequence represented by SEQ ID NOS: 140342, 140343, 140344, 140345, 140346, 140347, 140348, 140349, 140350, 140351, 140352 were selected from the ORFs having the nucleotide sequence represented by SEQ ID NO: 80480

[11882] The probes having the nucleotide sequence represented by SEQ ID NOS: 140353, 140354, 140355, 140356, 140357, 140358, 140359, 140360, 140361, 140362, 140363 were selected from the ORFs having the nucleotide sequence represented by SEQ ID NO: 80481

[11883] The probes having the nucleotide sequence represented by SEQ ID NOS: 140364, 140365, 140366, 140367, 140368, 140369, 140370, 140371, 140372, 140373, 140374 were selected from the ORFs having the nucleotide sequence represented by SEQ ID NO: 80482

[11884] The probes having the nucleotide sequence represented by SEQ ID NOS: 140375, 140376, 140377, 140378, 140379, 140380, 140381, 140382, 140383, 140384, 140385 were selected from the ORFs having the nucleotide sequence represented by SEQ ID NO: 80483

[11885] The probes having the nucleotide sequence represented by SEQ ID NOS: 140386, 140387, 140388, 140389, 140390, 140391, 140392, 140393, 140394, 140395, 140396 were selected from the ORFs having the nucleotide sequence represented by SEQ ID NO: 80484.

[11886] The probes having the nucleotide sequence represented by SEQ ID NOS: 140397, 140398, 140399, 140400, 140401, 140402, 140403, 140404, 140405, 140406, 140407 were selected from the ORFs having the nucleotide sequence represented by SEQ ID NO: 80485

[11887] The probes having the nucleotide sequence represented by SEQ ID NOS: 140408, 140409, 140410, 140411, 140412, 140413, 140414, 140415, 140416, 140417, 140418 were selected from the ORFs having the nucleotide sequence represented by SEQ ID NO: 80486

[11888] The probes having the nucleotide sequence represented by SEQ ID NOS: 140419, 140420, 140421, 140422, 140423, 140424, 140425, 140426, 140427, 140428, 140429 were selected from the ORFs having the nucleotide sequence represented by SEQ ID NO: 80487

[11889] The probes having the nucleotide sequence represented by SEQ ID NOS: 140430, 140431, 140432, 140433, 140434, 140435, 140436, 140437, 140438, 140439, 140440 were selected from the ORFs having the nucleotide sequence represented by SEQ ID NO: 80488

[11890] The probes having the nucleotide sequence represented by SEQ ID NOS: 140441, 140442, 140443, 140444, 140445, 140446, 140447, 140448, 140449, 140450, 140451 were selected from the ORFs having the nucleotide sequence represented by SEQ ID NO: 80489

[11891] The probes having the nucleotide sequence represented by SEQ ID NOS: 140452, 140453, 140454, 140455, 140456, 140457, 140458, 140459, 140460, 140461, 140462 were selected from the ORFs having the nucleotide sequence represented by SEQ ID NO: 80490

[11892] The probes having the nucleotide sequence represented by SEQ ID NOS: 140463, 140464, 140465, 140466, 140467, 140468, 140469, 140470, 140471, 140472, 140473 were selected from the ORFs having the nucleotide sequence represented by SEQ ID NO: 80491

[11893] The probes having the nucleotide sequence represented by SEQ ID NOS: 140474, 140475, 140476, 140477, 140478, 140479, 140480, 140481, 140482, 140483, 140484 were selected from the ORFs having the nucleotide sequence represented by SEQ ID NO: 80492

[11894] The probes having the nucleotide sequence represented by SEQ ID NOS: 140485, 140486, 140487, 140488, 140489, 140490, 140491, 140492, 140493, 140494, 140495 were selected from the ORFs having the nucleotide sequence represented by SEQ ID NO: 80493

[11895] The probes having the nucleotide sequence represented by SEQ ID NOS: 140496, 140497, 140498, 140499, 140500, 140501, 140502, 140503, 140504, 140505, 140506 were selected from the ORFs having the nucleotide sequence represented by SEQ ID NO: 80494

[11896] The probes having the nucleotide sequence represented by SEQ ID NOS: 140507, 140508, 140509, 140510, 140511, 140512, 140513, 140514, 140515, 140516, 140517 were selected from the ORFs having the nucleotide sequence represented by SEQ ID NO: 80495.

[11897] The probes having the nucleotide sequence represented by SEQ ID NOS: 140518, 140519, 140520, 140521, 140522, 140523, 140524, 140525, 140526, 140527, 140528 were selected from the ORFs having the nucleotide sequence represented by SEQ ID NO: 80496

[11898] The probes having the nucleotide sequence represented by SEQ ID NOS: 140529, 140530, 140531, 140532, 140533, 140534, 140535, 140536, 140537, 140538, 140539 were selected from the ORFs having the nucleotide sequence represented by SEQ ID NO: 80497

[11899] The probes having the nucleotide sequence represented by SEQ ID NOS: 140540, 140541, 140542, 140543, 140544, 140545, 140546, 140547, 140548, 140549, 140550 were selected from the ORFs having the nucleotide sequence represented by SEQ ID NO: 80498

[11900] The probes having the nucleotide sequence represented by SEQ ID NOS: 140551, 140552, 140553, 140554, 140555, 140556, 140557, 140558, 140559, 140560, 140561 were selected from the ORFs having the nucleotide sequence represented by SEQ ID NO: 80499

[11901] The probes having the nucleotide sequence represented by SEQ ID NOS: 140562, 140563, 140564, 140565, 140566, 140567, 140568, 140569, 140570, 140571, 140572 were selected from the ORFs having the nucleotide sequence represented by SEQ ID NO: 80500

[11902] The probes having the nucleotide sequence represented by SEQ ID NOS: 140573, 140574, 140575, 140576, 140577, 140578, 140579, 140580, 140581, 140582, 140583 were selected from the ORFs having the nucleotide sequence represented by SEQ ID NO: 80501

[11903] The probes having the nucleotide sequence represented by SEQ ID NOS: 140584, 140585, 140586, 140587, 140588, 140589, 140590, 140591, 140592, 140593, 140594 were selected from the ORFs having the nucleotide sequence represented by SEQ ID NO: 80502

[11904] The probes having the nucleotide sequence represented by SEQ ID NOS: 140595, 140596, 140597, 140598, 140599, 140600, 140601, 140602, 140603, 140604, 140605 were selected from the ORFs having the nucleotide sequence represented by SEQ ID NO: 80503

[11905] The probes having the nucleotide sequence represented by SEQ ID NOS: 140606, 140607, 140608, 140609, 140610, 140611, 140612, 140613, 140614, 140615, 140616 were selected from the ORFs having the nucleotide sequence represented by SEQ ID NO: 80504

[11906] The probes having the nucleotide sequence represented by SEQ ID NOS: 140617, 140618, 140619, 140620, 140621, 140622, 140623, 140624, 140625, 140626, 140627 were selected from the ORFs having the nucleotide sequence represented by SEQ ID NO: 80505

[11907] The probes having the nucleotide sequence represented by SEQ ID NOS: 140628, 140629, 140630, 140631, 140632, 140633, 140634, 140635, 140636, 140637, 140638 were selected from the ORFs having the nucleotide sequence represented by SEQ ID NO: 80506.

[11908] The probes having the nucleotide sequence represented by SEQ ID NOS: 140639, 140640, 140641, 140642, 140643, 140644, 140645, 140646, 140647, 140648, 140649 were selected from the ORFs having the nucleotide sequence represented by SEQ ID NO: 80507

[11909] The probes having the nucleotide sequence represented by SEQ ID NOS: 140650, 140651, 140652, 140653, 140654, 140655, 140656, 140657, 140658, 140659, 140660 were selected from the ORFs having the nucleotide sequence represented by SEQ ID NO: 80508

[11910] The probes having the nucleotide sequence represented by SEQ ID NOS: 140661, 140662, 140663, 140664, 140665, 140666, 140667, 140668, 140669, 140670, 140671 were selected from the ORFs having the nucleotide sequence represented by SEQ ID NO: 80509

[11911] The probes having the nucleotide sequence represented by SEQ ID NOS: 140672, 140673, 140674, 140675, 140676, 140677, 140678, 140679, 140680, 140681, 140682 were selected from the ORFs having the nucleotide sequence represented by SEQ ID NO: 80510

[11912] The probes having the nucleotide sequence represented by SEQ ID NOS: 140683, 140684, 140685, 140686, 140687, 140688, 140689, 140690, 140691, 140692, 140693 were selected from the ORFs having the nucleotide sequence represented by SEQ ID NO: 80511

[11913] The probes having the nucleotide sequence represented by SEQ ID NOS: 140694, 140695, 140696, 140697, 140698, 140699, 140700, 140701, 140702, 140703, 140704 were selected from the ORFs having the nucleotide sequence represented by SEQ ID NO: 80512

[11914] The probes having the nucleotide sequence represented by SEQ ID NOS: 140705, 140706, 140707, 140708, 140709, 140710, 140711, 140712, 140713, 140714, 140715 were selected from the ORFs having the nucleotide sequence represented by SEQ ID NO: 80513

[11915] The probes having the nucleotide sequence represented by SEQ ID NOS: 140716, 140717, 140718, 140719, 140720, 140721, 140722, 140723, 140724, 140725, 140726 were selected from the ORFs having the nucleotide sequence represented by SEQ ID NO: 80514

[11916] The probes having the nucleotide sequence represented by SEQ ID NOS: 140727, 140728, 140729, 140730, 140731, 140732, 140733, 140734, 140735, 140736, 140737 were selected from the ORFs having the nucleotide sequence represented by SEQ ID NO: 80515

[11917] The probes having the nucleotide sequence represented by SEQ ID NOS: 140738, 140739, 140740, 140741, 140742, 140743, 140744, 140745, 140746, 140747, 140748 were selected from the ORFs having the nucleotide sequence represented by SEQ ID NO: 80516.

[11918] The probes having the nucleotide sequence represented by SEQ ID NOS: 140749, 140750, 140751, 140752, 140753, 140754, 140755, 140756, 140757, 140758, 140759 were selected from the ORFs having the nucleotide sequence represented by SEQ ID NO: 80517.

[11919] The probes having the nucleotide sequence represented by SEQ ID NOS: 140760, 140761, 140762, 140763, 140764, 140765, 140766, 140767, 140768, 140769, 140770 were selected from the ORFs having the nucleotide sequence represented by SEQ ID NO: 80518

[11920] The probes having the nucleotide sequence represented by SEQ ID NOS: 140771, 140772, 140773, 140774, 140775, 140776, 140777, 140778, 140779, 140780, 140781 were selected from the ORFs having the nucleotide sequence represented by SEQ ID NO: 80519

[11921] The probes having the nucleotide sequence represented by SEQ ID NOS: 140782, 140783, 140784, 140785, 140786, 140787, 140788, 140789, 140790, 140791, 140792 were selected from the ORFs having the nucleotide sequence represented by SEQ ID NO: 80520

[11922] The probes having the nucleotide sequence represented by SEQ ID NOS: 140793, 140794, 140795, 140796, 140797, 140798, 140799, 140800, 140801, 140802, 140803 were selected from the ORFs having the nucleotide sequence represented by SEQ ID NO: 80521

[11923] The probes having the nucleotide sequence represented by SEQ ID NOS: 140804, 140805, 140806, 140807, 140808, 140809, 140810, 140811, 140812, 140813, 140814 were selected from the ORFs having the nucleotide sequence represented by SEQ ID NO: 80522

[11924] The probes having the nucleotide sequence represented by SEQ ID NOS: 140815, 140816, 140817, 140818, 140819, 140820, 140821, 140822, 140823, 140824, 140825 were selected from the ORFs having the nucleotide sequence represented by SEQ ID NO: 80523

[11925] The probes having the nucleotide sequence represented by SEQ ID NOS: 140826, 140827, 140828, 140829, 140830, 140831, 140832, 140833, 140834, 140835, 140836 were selected from the ORFs having the nucleotide sequence represented by SEQ ID NO: 80524

[11926] The probes having the nucleotide sequence represented by SEQ ID NOS: 140837, 140838, 140839, 140840, 140841, 140842, 140843, 140844, 140845, 140846, 140847 were selected from the ORFs having the nucleotide sequence represented by SEQ ID NO: 80525

[11927] The probes having the nucleotide sequence represented by SEQ ID NOS: 140848, 140849, 140850, 140851, 140852, 140853, 140854, 140855, 140856, 140857, 140858 were selected from the ORFs having the nucleotide sequence represented by SEQ ID NO: 80526

[11928] The probes having the nucleotide sequence represented by SEQ ID NOS: 140859, 140860, 140861, 140862, 140863, 140864, 140865, 140866, 140867, 140868, 140869 were selected from the ORFs having the nucleotide sequence represented by SEQ ID NO: 80527

[11929] The probes having the nucleotide sequence represented by SEQ ID NOS: 140870, 140871, 140872, 140873, 140874, 140875, 140876, 140877, 140878, 140879, 140880 were selected from the ORFs having the nucleotide sequence represented by SEQ ID NO: 80528.

[11930] The probes having the nucleotide sequence represented by SEQ ID NOS: 140881, 140882, 140883, 140884, 140885, 140886, 140887, 140888, 140889, 140890, 140891 were selected from the ORFs having the nucleotide sequence represented by SEQ ID NO: 80529

[11931] The probes having the nucleotide sequence represented by SEQ ID NOS: 140892, 140893, 140894, 140895, 140896, 140897, 140898, 140899, 140900, 140901, 140902 were selected from the ORFs having the nucleotide sequence represented by SEQ ID NO: 80530

[11932] The probes having the nucleotide sequence represented by SEQ ID NOS: 140903, 140904, 140905, 140906, 140907, 140908, 140909, 140910, 140911, 140912, 140913 were selected from the ORFs having the nucleotide sequence represented by SEQ ID NO: 80531

[11933] The probes having the nucleotide sequence represented by SEQ ID NOS: 140914, 140915, 140916, 140917, 140918, 140919, 140920, 140921, 140922, 140923, 140924 were selected from the ORFs having the nucleotide sequence represented by SEQ ID NO: 80532

[11934] The probes having the nucleotide sequence represented by SEQ ID NOS: 140925, 140926, 140927, 140928, 140929, 140930, 140931, 140932, 140933, 140934, 140935 were selected from the ORFs having the nucleotide sequence represented by SEQ ID NO: 80533

[11935] The probes having the nucleotide sequence represented by SEQ ID NOS: 140936, 140937, 140938, 140939, 140940, 140941, 140942, 140943, 140944, 140945, 140946 were selected from the ORFs having the nucleotide sequence represented by SEQ ID NO: 80534

[11936] The probes having the nucleotide sequence represented by SEQ ID NOS: 140947, 140948, 140949, 140950, 140951, 140952, 140953, 140954, 140955, 140956, 140957 were selected from the ORFs having the nucleotide sequence represented by SEQ ID NO: 80535

[11937] The probes having the nucleotide sequence represented by SEQ ID NOS: 140958, 140959, 140960, 140961, 140962, 140963, 140964, 140965, 140966, 140967, 140968 were selected from the ORFs having the nucleotide sequence represented by SEQ ID NO: 80536

[11938] The probes having the nucleotide sequence represented by SEQ ID NOS: 140969, 140970, 140971, 140972, 140973, 140974, 140975, 140976, 140977, 140978, 140979 were selected from the ORFs having the nucleotide sequence represented by SEQ ID NO: 80537

[11939] The probes having the nucleotide sequence represented by SEQ ID NOS: 140980, 140981, 140982, 140983, 140984, 140985, 140986, 140987, 140988, 140989, 140990 were selected from the ORFs having the nucleotide sequence represented by SEQ ID NO: 80538

[11940] The probes having the nucleotide sequence represented by SEQ ID NOS: 140991, 140992, 140993, 140994, 140995, 140996, 140997, 140998, 140999, 141000, 141001 were selected from the ORFs having the nucleotide sequence represented by SEQ ID NO: 80539.

[11941] The probes having the nucleotide sequence represented by SEQ ID NOS: 141002, 141003, 141004, 141005, 141006, 141007, 141008, 141009, 141010, 141011, 141012 were selected from the ORFs having the nucleotide sequence represented by SEQ ID NO: 80540

[11942] The probes having the nucleotide sequence represented by SEQ ID NOS: 141013, 141014, 141015, 141016, 141017, 141018, 141019, 141020, 141021, 141022, 141023 were selected from the ORFs having the nucleotide sequence represented by SEQ ID NO: 80541

[11943] The probes having the nucleotide sequence represented by SEQ ID NOS: 141024, 141025, 141026, 141027, 141028, 141029, 141030, 141031, 141032, 141033, 141034 were selected from the ORFs having the nucleotide sequence represented by SEQ ID NO: 80542

[11944] The probes having the nucleotide sequence represented by SEQ ID NOS: 141035, 141036, 141037, 141038, 141039, 141040, 141041, 141042, 141043, 141044, 141045 were selected from the ORFs having the nucleotide sequence represented by SEQ ID NO: 80543

[11945] The probes having the nucleotide sequence represented by SEQ ID NOS: 141046, 141047, 141048, 141049, 141050, 141051, 141052, 141053, 141054, 141055, 141056 were selected from the ORFs having the nucleotide sequence represented by SEQ ID NO: 80544

[11946] The probes having the nucleotide sequence represented by SEQ ID NOS: 141057, 141058, 141059, 141060, 141061, 141062, 141063, 141064, 141065, 141066, 141067 were selected from the ORFs having the nucleotide sequence represented by SEQ ID NO: 80545

[11947] The probes having the nucleotide sequence represented by SEQ ID NOS: 141068, 141069, 141070, 141071, 141072, 141073, 141074, 141075, 141076, 141077, 141078 were selected from the ORFs having the nucleotide sequence represented by SEQ ID NO: 80546

[11948] The probes having the nucleotide sequence represented by SEQ ID NOS: 141079, 141080, 141081, 141082, 141083, 141084, 141085, 141086, 141087, 141088, 141089 were selected from the ORFs having the nucleotide sequence represented by SEQ ID NO: 80547

[11949] The probes having the nucleotide sequence represented by SEQ ID NOS: 141090, 141091, 141092, 141093, 141094, 141095, 141096, 141097, 141098, 141099, 141100 were selected from the ORFs having the nucleotide sequence represented by SEQ ID NO: 80548

[11950] The probes having the nucleotide sequence represented by SEQ ID NOS: 141101, 141102, 141103, 141104, 141105, 141106, 141107, 141108, 141109, 141110, 141111 were selected from the ORFs having the nucleotide sequence represented by SEQ ID NO: 80549

[11951] The probes having the nucleotide sequence represented by SEQ ID NOS: 141112, 141113, 141114, 141115, 141116, 141117, 141118, 141119, 141120, 141121, 141122 were selected from the ORFs having the nucleotide sequence represented by SEQ ID NO: 80550.

[11952] The probes having the nucleotide sequence represented by SEQ ID NOS: 141123, 141124, 141125, 141126, 141127, 141128, 141129, 141130, 141131, 141132, 141133 were selected from the ORFs having the nucleotide sequence represented by SEQ ID NO: 80551

[11953] The probes having the nucleotide sequence represented by SEQ ID NOS: 141134, 141135, 141136, 141137, 141138, 141139, 141140, 141141, 141142, 141143, 141144 were selected from the ORFs having the nucleotide sequence represented by SEQ ID NO: 80552

[11954] The probes having the nucleotide sequence represented by SEQ ID NOS: 141145, 141146, 141147, 141148, 141149, 141150, 141151, 141152, 141153, 141154, 141155 were selected from the ORFs having the nucleotide sequence represented by SEQ ID NO: 80553

[11955] The probes having the nucleotide sequence represented by SEQ ID NOS: 141156, 141157, 141158, 141159, 141160, 141161, 141162, 141163, 141164, 141165, 141166 were selected from the ORFs having the nucleotide sequence represented by SEQ ID NO: 80554

[11956] The probes having the nucleotide sequence represented by SEQ ID NOS: 141167, 141168, 141169, 141170, 141171, 141172, 141173, 141174, 141175, 141176, 141177 were selected from the ORFs having the nucleotide sequence represented by SEQ ID NO: 80555

[11957] The probes having the nucleotide sequence represented by SEQ ID NOS: 141178, 141179, 141180, 141181, 141182, 141183, 141184, 141185, 141186, 141187, 141188 were selected from the ORFs having the nucleotide sequence represented by SEQ. ID NO: 80556

[11958] The probes having the nucleotide sequence represented by. SEQ ID NOS: 141189, 141190, 141191, 141192, 141193, 141194, 141195, 141196, 141197, 141198, 141199 were selected from the ORFs having the nucleotide sequence represented by SEQ ID NO: 80557

[11959] The probes having the nucleotide sequence represented by SEQ ID NOS: 141200, 141201, 141202, 141203, 141204, 141205, 141206, 141207, 141208, 141209, 141210 were selected from the ORFs having the nucleotide sequence represented by SEQ ID NO: 80558

[11960] The probes having the nucleotide sequence represented by SEQ ID NOS: 141211, 141212, 141213, 141214, 141215, 141216, 141217, 141218, 141219, 141220, 141221 were selected from the ORFs having the nucleotide sequence represented by SEQ ID NO: 80559

[11961] The probes having the nucleotide sequence represented by SEQ ID NOS: 141222, 141223, 141224, 141225, 141226, 141227, 141228, 141229, 141230, 141231, 141232 were selected from the ORFs having the nucleotide sequence represented by SEQ ID NO: 80560

[11962] The probes having the nucleotide sequence represented by SEQ ID NOS: 141233, 141234, 141235, 141236, 141237, 141238, 141239, 141240, 141241, 141242, 141243, 141244, 141245, 141246, 141247, 141248, 141249, 141250, 141251, 141252, 141253, 141254 were selected from the ORFs having the nucleotide sequence represented by SEQ ID NO: 80561.

[11963] The probes having the nucleotide sequence represented by SEQ ID NOS: 141255, 141256, 141257, 141258, 141259, 141260, 141261, 141262, 141263, 141264, 141265 were selected from the ORFs having the nucleotide sequence represented by SEQ ID NO: 80562

[11964] The probes having the nucleotide sequence represented by SEQ ID NOS: 141266, 141267, 141268, 141269, 141270, 141271, 141272, 141273, 141274, 141275, 141276 were selected from the ORFs having the nucleotide sequence represented by SEQ ID NO: 80563

[11965] The probes having the nucleotide sequence represented by SEQ ID NOS: 141277, 141278, 141279, 141280, 141281, 141282, 141283, 141284, 141285, 141286, 141287 were selected from the ORFs having the nucleotide sequence represented by SEQ ID NO: 80564

[11966] The probes having the nucleotide sequence represented by SEQ ID NOS: 141288, 141289, 141290, 141291, 141292, 141293, 141294, 141295, 141296, 141297, 141298 were selected from the ORFs having the nucleotide sequence represented by SEQ ID NO: 80565

[11967] The probes having the nucleotide sequence represented by SEQ ID NOS: 141299, 141300, 141301, 141302, 141303, 141304, 141305, 141306, 141307, 141308, 141309 were selected from the ORFs having the nucleotide sequence represented by SEQ ID NO: 80566

[11968] The probes having the nucleotide sequence represented by SEQ ID NOS: 141310, 141311, 141312, 141313, 141314, 141315, 141316, 141317, 141318, 141319, 141320 were selected from the ORFs having the nucleotide sequence represented by SEQ ID NO: 80567

[11969] The probes having the nucleotide sequence represented by SEQ ID NOS: 141321, 141322, 141323, 141324, 141325, 141326, 141327, 141328, 141329, 141330, 141331 were selected from the ORFs having the nucleotide sequence represented by SEQ ID NO: 80568

[11970] The probes having the nucleotide sequence represented by SEQ ID NOS: 141332, 141333, 141334, 141335, 141336, 141337, 141338, 141339, 141340, 141341, 141342 were selected from the ORFs having the nucleotide sequence represented by SEQ ID NO: 80569

[11971] The probes having the nucleotide sequence represented by SEQ ID NOS: 141343, 141344, 141345, 141346, 141347, 141348, 141349, 141350, 141351, 141352, 141353 were selected from the ORFs having the nucleotide sequence represented by SEQ ID NO: 80570.

[11972] The probes having the nucleotide sequence represented by SEQ ID NOS: 141354, 141355, 141356, 141357, 141358, 141359, 141360, 141361, 141362, 141363, 141364 were selected from the ORFs having the nucleotide sequence represented by SEQ ID NO: 80571

[11973] The probes having the nucleotide sequence represented by SEQ ID NOS: 141365, 141366, 141367, 141368, 141369, 141370, 141371, 141372, 141373, 141374, 141375 were selected from the ORFs having the nucleotide sequence represented by SEQ ID NO: 80572.

[11974] The probes having the nucleotide sequence represented by SEQ ID NOS: 141376, 141377, 141378, 141379, 141380, 141381, 141382, 141383, 141384, 141385, 141386 were selected from the ORFs having the nucleotide sequence represented by SEQ ID NO: 80573

[11975] The probes having the nucleotide sequence represented by SEQ ID NOS: 141387, 141388, 141389, 141390, 141391, 141392, 141393, 141394, 141395, 141396, 141397 were selected from the ORFs having the nucleotide sequence represented by SEQ ID NO: 80574

[11976] The probes having the nucleotide sequence represented by SEQ ID NOS: 141398, 141399, 141400, 141401, 141402, 141403, 141404, 141405, 141406, 141407, 141408 were selected from the ORFs having the nucleotide sequence represented by SEQ ID NO: 80575

[11977] The probes having the nucleotide sequence represented by SEQ ID NOS: 141409, 141410, 141411, 141412, 141413, 141414, 141415, 141416, 141417, 141418, 141419 were selected from the ORFs having the nucleotide sequence represented by SEQ ID NO: 80576

[11978] The probes having the nucleotide sequence represented by SEQ ID NOS: 141420, 141421, 141422, 141423, 141424, 141425, 141426, 141427, 141428, 141429, 141430 were selected from the ORFs having the nucleotide sequence represented by SEQ ID NO: 80577

[11979] The probes having the nucleotide sequence represented by SEQ ID NOS: 141431, 141432, 141433, 141434, 141435, 141436, 141437, 141438, 141439, 141440, 141441 were selected from the ORFs having the nucleotide sequence represented by SEQ ID NO: 80578

[11980] The probes having the nucleotide sequence represented by SEQ ID NOS: 141442, 141443, 141444, 141445, 141446, 141447, 141448, 141449, 141450, 141451, 141452 were selected from the ORFs having the nucleotide sequence represented by SEQ ID NO: 80579

[11981] The probes having the nucleotide sequence represented by SEQ ID NOS: 141453, 141454, 141455, 141456, 141457, 141458, 141459, 141460, 141461, 141462, 141463 were selected from the ORFs having the nucleotide sequence represented by SEQ ID NO: 80580

[11982] The probes having the nucleotide sequence represented by SEQ ID NOS: 141464, 141465, 141466, 141467, 141468, 141469, 141470, 141471, 141472, 141473, 141474 were selected from the ORFs having the nucleotide sequence represented by SEQ ID NO: 80581

[11983] The probes having the nucleotide sequence represented by SEQ ID NOS: 141475, 141476, 141477, 141478, 141479, 141480, 141481, 141482, 141483, 141484, 141485 were selected from the ORFs having the nucleotide sequence represented by SEQ ID NO: 80582

[11984] The probes having the nucleotide sequence represented by SEQ ID NOS: 141486, 141487, 141488, 141489, 141490, 141491, 141492, 141493, 141494, 141495, 141496 were selected from the ORFs having the nucleotide sequence represented by SEQ ID NO: 80583.

[11985] The probes having the nucleotide sequence represented by SEQ ID NOS: 141497, 141498, 141499, 141500, 141501, 141502, 141503, 141504, 141505, 141506, 141507 were selected from the ORFs having the nucleotide sequence represented by SEQ ID NO: 80584

[11986] The probes having the nucleotide sequence represented by SEQ ID NOS: 141508, 141509, 141510, 141511, 141512, 141513, 141514, 141515, 141516, 141517, 141518 were selected from the ORFs having the nucleotide sequence represented by SEQ ID NO: 80585

[11987] The probes having the nucleotide sequence represented by SEQ ID NOS: 141519, 141520, 141521, 141522, 141523, 141524, 141525, 141526, 141527, 141528, 141529 were selected from the ORFs having the nucleotide sequence represented by SEQ ID NO: 80586

[11988] The probes having the nucleotide sequence represented by SEQ ID NOS: 141530, 141531, 141532, 141533, 141534, 141535, 141536, 141537, 141538, 141539, 141540 were selected from the ORFs having the nucleotide sequence represented by SEQ ID NO: 80587

[11989] The probes having the nucleotide sequence represented by SEQ ID NOS: 141541, 141542, 141543, 141544, 141545, 141546, 141547, 141548, 141549, 141550, 141551 were selected from the ORFs having the nucleotide sequence represented by SEQ ID NO: 80588

[11990] The probes having the nucleotide sequence represented by SEQ ID NOS: 141552, 141553, 141554, 141555, 141556, 141557, 141558, 141559, 141560, 141561, 141562 were selected from the ORFs having the nucleotide sequence represented by SEQ ID NO: 80589

[11991] The probes having the nucleotide sequence represented by SEQ ID NOS: 141563, 141564, 141565, 141566, 141567, 141568, 141569, 141570, 141571, 141572, 141573 were selected from the ORFs having the nucleotide sequence represented by SEQ ID NO: 80590

[11992] The probes having the nucleotide sequence represented by SEQ ID NOS: 141574, 141575, 141576, 141577, 141578, 141579, 141580, 141581, 141582, 141583, 141584 were selected from the ORFs having the nucleotide sequence represented by SEQ ID NO: 80591

[11993] The probes having the nucleotide sequence represented by SEQ ID NOS: 141585, 141586, 141587, 141588, 141589, 141590, 141591, 141592, 141593, 141594, 141595 were selected from the ORFs having the nucleotide sequence represented by SEQ ID NO: 80592

[11994] The probes having the nucleotide sequence represented by SEQ ID NOS: 141596, 141597, 141598, 141599, 141600, 141601, 141602, 141603, 141604, 141605, 141606 were selected from the ORFs having the nucleotide sequence represented by SEQ ID NO: 80593

[11995] The probes having the nucleotide sequence represented by SEQ ID NOS: 141607, 141608, 141609, 141610, 141611, 141612, 141613, 141614, 141615, 141616, 141617 were selected from the ORFs having the nucleotide sequence represented by SEQ ID NO: 80594.

[11996] The probes having the nucleotide sequence represented by SEQ ID NOS: 141618, 141619, 141620, 141621, 141622, 141623, 141624, 141625, 141626, 141627, 141628 were selected from the ORFs having the nucleotide sequence represented by SEQ ID NO: 80595

[11997] The probes having the nucleotide sequence represented by SEQ ID NOS: 141629, 141630, 141631, 141632, 141633, 141634, 141635, 141636, 141637, 141638; 141639 were selected from the ORFs having the nucleotide sequence represented by SEQ ID NO: 80596

[11998] The probes having the nucleotide sequence represented by SEQ ID NOS: 141640, 141641, 141642, 141643, 141644, 141645, 141646, 141647, 141648, 141649, 141650 were selected from the ORFs having the nucleotide sequence represented by SEQ ID NO: 80597

[11999] The probes having the nucleotide sequence represented by SEQ ID NOS: 141651, 141652, 141653, 141654, 141655, 141656, 141657, 141658, 141659, 141660, 141661 were selected from the ORFs having the nucleotide sequence represented by SEQ ID NO: 80598

[12000] The probes having the nucleotide sequence represented by SEQ ID NOS: 141662, 141663, 141664, 141665, 141666, 141667, 141668, 141669, 141670, 141671, 141672 were selected from the ORFs having the nucleotide sequence represented by SEQ ID NO: 80599

[12001] The probes having the nucleotide sequence represented by SEQ ID NOS: 141673, 141674, 141675, 141676, 141677, 141678, 141679, 141680, 141681, 141682, 141683 were selected from the ORFs having the nucleotide sequence represented by SEQ ID NO: 80600

[12002] The probes having the nucleotide sequence represented by SEQ ID NOS: 141684, 141685, 141686, 141687, 141688, 141689, 141690, 141691, 141692, 141693, 141694 were selected from the ORFs having the nucleotide sequence represented by SEQ ID NO: 80601

[12003] The probes having the nucleotide sequence represented by SEQ ID NOS: 141695, 141696, 141697, 141698, 141699, 141700, 141701, 141702, 141703, 141704, 141705 were selected from the ORFs having the nucleotide sequence represented by SEQ ID NO: 80602

[12004] The probes having the nucleotide sequence represented by SEQ ID NOS: 141706, 141707, 141708, 141709, 141710, 141711, 141712, 141713, 141714, 141715, 141716 were selected from the ORFs having the nucleotide sequence represented by SEQ ID NO: 80603

[12005] The probes having the nucleotide sequence represented by SEQ ID NOS: 141717, 141718, 141719, 141720, 141721, 141722, 141723, 141724, 141725, 141726, 141727 were selected from the ORFs having the nucleotide sequence represented by SEQ ID NO: 80604

[12006] The probes having the nucleotide sequence represented by SEQ ID NOS: 141728, 141729, 141730, 141731, 141732, 141733, 141734, 141735, 141736, 141737, 141738 were selected from the ORFs having the nucleotide sequence represented by SEQ ID NO: 80605.

[12007] The probes having the nucleotide sequence represented by SEQ ID NOS: 141739, 141740, 141741, 141742, 141743, 141744, 141745, 141746, 141747, 141748, 141749 were selected from the ORFs having the nucleotide sequence represented by SEQ ID NO: 80606

[12008] The probes having the nucleotide sequence represented by SEQ ID NOS: 141750, 141751, 141752, 141753, 141754, 141755, 141756, 141757, 141758, 141759, 141760 were selected from the ORFs having the nucleotide sequence represented by SEQ ID NO: 80607

[12009] The probes having the nucleotide sequence represented by SEQ ID NOS: 141761, 141762, 141763, 141764, 141765, 141766, 141767, 141768, 141769, 141770, 141771 were selected from the ORFs having the nucleotide sequence represented by SEQ ID NO: 80608

[12010] The probes having the nucleotide sequence represented by SEQ ID NOS: 141772, 141773, 141774, 141775, 141776, 141777, 141778, 141779, 141780, 141781, 141782 were selected from the ORFs having the nucleotide sequence represented by SEQ ID NO: 80609

[12011] The probes having the nucleotide sequence represented by SEQ ID NOS: 141783, 141784, 141785, 141786, 141787, 141788, 141789, 141790, 141791, 141792, 141793 were selected from the ORFs having the nucleotide sequence represented by SEQ ID NO: 80610

[12012] The probes having the nucleotide sequence represented by SEQ ID NOS: 141794, 141795, 141796, 141797, 141798, 141799, 141800, 141801, 141802, 141803, 141804 were selected from the ORFs having the nucleotide sequence represented by SEQ ID NO: 80611

[12013] The probes having the nucleotide sequence represented by SEQ ID NOS: 141805, 141806, 141807, 141808, 141809, 141810, 141811, 141812, 141813, 141814, 141815 were selected from the ORFs having the nucleotide sequence represented by SEQ ID NO: 80612

[12014] The probes having the nucleotide sequence represented by SEQ ID NOS: 141816, 141817, 141818, 141819, 141820, 141821, 141822, 141823, 141824, 141825, 141826 were selected from the ORFs having the nucleotide sequence represented by SEQ ID NO: 80613

[12015] The probes having the nucleotide sequence represented by SEQ ID NOS: 141827, 141828, 141829, 141830, 141831, 141832, 141833, 141834, 141835, 141836, 141837 were selected from the ORFs having the nucleotide sequence represented by SEQ ID NO: 80614

[12016] The probes having the nucleotide sequence represented by SEQ ID NOS: 141838, 141839, 141840, 141841, 141842, 141843, 141844, 141845, 141846, 141847, 141848 were selected from the ORFs having the nucleotide sequence represented by SEQ ID NO: 80615

[12017] The probes having the nucleotide sequence represented by SEQ ID NOS: 141849, 141850, 141851, 141852, 141853, 141854, 141855, 141856, 141857, 141858, 141859, 141860, 141861, 141862, 141863, 141864, 141865, 141866, 141867, 141868, 141869, 141870 were selected from the ORFs having the nucleotide sequence represented by SEQ ID NO: 80616.

[12018] The probes having the nucleotide sequence represented by SEQ ID NOS: 141871, 141872, 141873, 141874, 141875, 141876, 141877, 141878, 141879, 141880, 141881 were selected from the ORFs having the nucleotide sequence represented by SEQ ID NO: 80617

[12019] The probes having the nucleotide sequence represented by SEQ ID NOS: 141882, 141883, 141884, 141885, 141886, 141887, 141888, 141889, 141890, 141891, 141892 were selected from the ORFs having the nucleotide sequence represented by SEQ ID NO: 80618

[12020] The probes having the nucleotide sequence represented by SEQ ID NOS: 141893, 141894, 141895, 141896, 141897, 141898, 141899, 141900, 141901, 141902, 141903 were selected from the ORFs having the nucleotide sequence represented by SEQ ID NO: 80619

[12021] The probes having the nucleotide sequence represented by SEQ ID NOS: 141904, 141905, 141906, 141907, 141908, 141909, 141910, 141911, 141912, 141913, 141914 were selected from the ORFs having the nucleotide sequence represented by SEQ ID NO: 80620

[12022] The probes having the nucleotide sequence represented by SEQ ID NOS: 141915, 141916, 141917, 141918, 141919, 141920, 141921, 141922, 141923, 141924, 141925 were selected from the ORFs having the nucleotide sequence represented by SEQ ID NO: 80621

[12023] The probes having the nucleotide sequence represented by SEQ ID NOS: 141926, 141927, 141928, 141929, 141930, 141931, 141932, 141933, 141934, 141935, 141936 were selected from the ORFs having the nucleotide sequence represented by SEQ ID NO: 80622

[12024] The probes having the nucleotide sequence represented by SEQ ID NOS: 141937, 141938, 141939, 141940, 141941, 141942, 141943, 141944, 141945, 141946, 141947 were selected from the ORFs having the nucleotide sequence represented by SEQ ID NO: 80623

[12025] The probes having the nucleotide sequence represented by SEQ ID NOS: 141948, 141949, 141950, 141951, 141952, 141953, 141954, 141955, 141956, 141957, 141958 were selected from the ORFs having the nucleotide sequence represented by SEQ ID NO: 80624

[12026] The probes having the nucleotide sequence represented by SEQ ID NOS: 141959, 141960, 141961, 141962, 141963, 141964, 141965, 141966, 141967, 141968, 141969 were selected from the ORFs having the nucleotide sequence represented by SEQ ID NO: 80625

[12027] The probes having the nucleotide sequence represented by SEQ ID NOS: 141970, 141971, 141972, 141973, 141974, 141975, 141976, 141977, 141978, 141979, 141980 were selected from the ORFs having the nucleotide sequence represented by SEQ ID NO: 80626

[12028] The probes having the nucleotide sequence represented by SEQ ID NOS: 141981, 141982, 141983, 141984, 141985, 141986, 141987, 141988, 141989, 141990, 141991 were selected from the ORFs having the nucleotide sequence represented by SEQ ID NO: 80627.

[12029] The probes having the nucleotide sequence represented by SEQ ID NOS: 141992, 141993, 141994, 141995, 141996, 141997, 141998, 141999, 142000, 142001, 142002 were selected from the ORFs having the nucleotide sequence represented by SEQ ID NO: 80628

[12030] The probes having the nucleotide sequence represented by SEQ ID NOS: 142003, 142004, 142005, 142006, 142007, 142008, 142009, 142010, 142011, 142012, 142013 were selected from the ORFs having the nucleotide sequence represented by SEQ ID NO: 80629

[12031] The probes having the nucleotide sequence represented by SEQ ID NOS: 142014, 142015, 142016, 142017, 142018, 142019, 142020, 142021, 142022, 142023, 142024 were selected from the ORFs having the nucleotide sequence represented by SEQ ID NO: 80630

[12032] The probes having the nucleotide sequence represented by SEQ ID NOS: 142025, 142026, 142027, 142028, 142029, 142030, 142031, 142032, 142033, 142034, 142035 were selected from the ORFs having the nucleotide sequence represented by SEQ ID NO: 80631

[12033] The probes having the nucleotide sequence represented by SEQ ID NOS: 142036, 142037, 142038, 142039, 142040, 142041, 142042, 142043, 142044, 142045, 142046 were selected from the ORFs having the nucleotide sequence represented by SEQ ID NO: 80632

[12034] The probes having the nucleotide sequence represented by SEQ ID NOS: 142047, 142048, 142049, 142050, 142051, 142052, 142053, 142054, 142055, 142056, 142057 were selected from the ORFs having the nucleotide sequence represented by SEQ ID NO: 80633

[12035] The probes having the nucleotide sequence represented by SEQ ID NOS: 142058, 142059, 142060, 142061, 142062, 142063, 142064, 142065, 142066, 142067, 142068 were selected from the ORFs having the nucleotide sequence represented by SEQ ID NO: 80634

[12036] The probes having the nucleotide sequence represented by SEQ ID NOS: 142069, 142070, 142071, 142072, 142073, 142074, 142075, 142076, 142077, 142078, 142079 were selected from the ORFs having the nucleotide sequence represented by SEQ ID NO: 80635

[12037] The probes having the nucleotide sequence represented by SEQ ID NOS: 142080, 142081, 142082, 142083, 142084, 142085, 142086, 142087, 142088, 142089, 142090 were selected from the ORFs having the nucleotide sequence represented by SEQ ID NO: 80636

[12038] The probes having the nucleotide sequence represented by SEQ ID NOS: 142091, 142092, 142093, 142094, 142095, 142096, 142097, 142098, 142099, 142100, 142101 were selected from the ORFs having the nucleotide sequence represented by SEQ ID NO: 80637

[12039] The probes having the nucleotide sequence represented by SEQ ID NOS: 142102, 142103, 142104, 142105, 142106, 142107, 142108, 142109, 142110, 142111, 142112 were selected from the ORFs having the nucleotide sequence represented by SEQ ID NO: 80638.

[12040] The probes having the nucleotide sequence represented by SEQ ID NOS: 142113, 142114, 142115, 142116, 142117, 142118, 142119, 142120, 142121, 142122, 142123 were selected from the ORFs having the nucleotide sequence represented by SEQ ID NO: 80639

[12041] The probes having the nucleotide sequence represented by SEQ ID NOS: 142124, 142125, 142126, 142127, 142128, 142129, 142130, 142131, 142132, 142133, 142134 were selected from the ORFs having the nucleotide sequence represented by SEQ ID NO: 80640

[12042] The probes having the nucleotide sequence represented by SEQ ID NOS: 142135, 142136, 142137, 142138, 142139, 142140, 142141, 142142, 142143, 142144, 142145 were selected from the ORFs having the nucleotide sequence represented by SEQ ID NO: 80641

[12043] The probes having the nucleotide sequence represented by SEQ ID NOS: 142146, 142147, 142148, 142149, 142150, 142151, 142152, 142153, 142154, 142155, 142156 were selected from the ORFs having the nucleotide sequence represented by SEQ ID NO: 80642

[12044] The probes having the nucleotide sequence represented by SEQ ID NOS: 142157, 142158, 142159, 142160, 142161, 142162, 142163, 142164, 142165, 142166, 142167 were selected from the ORFs having the nucleotide sequence represented by SEQ ID NO: 80643

[12045] The probes having the nucleotide sequence represented by SEQ ID NOS: 142168, 142169, 142170, 142171, 142172, 142173, 142174, 142175, 142176, 142177, 142178 were selected from the ORFs having the nucleotide sequence represented by SEQ ID NO: 80644

[12046] The probes having the nucleotide sequence represented by SEQ ID NOS: 142179, 142180, 142181, 142182, 142183, 142184, 142185, 142186, 142187, 142188, 142189 were selected from the ORFs having the nucleotide sequence represented by SEQ ID NO: 80645

[12047] The probes having the nucleotide sequence represented by SEQ ID NOS: 142190, 142191, 142192, 142193, 142194, 142195, 142196, 142197, 142198, 142199, 142200 were selected from the ORFs having the nucleotide sequence represented by SEQ ID NO: 80646

[12048] The probes having the nucleotide sequence represented by SEQ ID NOS: 142201, 142202, 142203, 142204, 142205, 142206, 142207, 142208, 142209, 142210, 142211 were selected from the ORFs having the nucleotide sequence represented by SEQ ID NO: 80647

[12049] The probes having the nucleotide sequence represented by SEQ ID NOS: 142212, 142213, 142214, 142215, 142216, 142217, 142218, 142219, 142220, 142221, 142222 were selected from the ORFs having the nucleotide sequence represented by SEQ ID NO: 80648

[12050] The probes having the nucleotide sequence represented by SEQ ID NOS: 142223, 142224, 142225, 142226, 142227, 142228, 142229, 142230, 142231, 142232, 142233 were selected from the ORFs having the nucleotide sequence represented by SEQ ID NO: 80649.

[12051] The probes having the nucleotide sequence represented by SEQ ID NOS: 142234, 142235, 142236, 142237, 142238, 142239, 142240, 142241, 142242, 142243, 142244 were selected from the ORFs having the nucleotide sequence represented by SEQ ID NO: 80650

[12052] The probes having the nucleotide sequence represented by SEQ ID NOS: 142245, 142246, 142247, 142248, 142249, 142250, 142251, 142252, 142253, 142254, 142255 were selected from the ORFs having the nucleotide sequence represented by SEQ ID NO: 80651

[12053] The probes having the nucleotide sequence represented by SEQ ID NOS: 142256, 142257, 142258, 142259, 142260, 142261, 142262, 142263, 142264, 142265, 142266 were selected from the ORFs having the nucleotide sequence represented by SEQ ID NO: 80652

[12054] The probes having the nucleotide sequence represented by SEQ ID NOS: 142267, 142268, 142269, 142270, 142271, 142272, 142273, 142274, 142275, 142276, 142277 were selected from the ORFs having the nucleotide sequence represented by SEQ ID NO: 80653

[12055] The probes having the nucleotide sequence represented by SEQ ID NOS: 142278, 142279, 142280, 142281, 142282, 142283, 142284, 142285, 142286, 142287, 142288 were selected from the ORFs having the nucleotide sequence represented by SEQ ID NO: 80654

[12056] The probes having the nucleotide sequence represented by SEQ ID NOS: 142289, 142290, 142291, 142292, 142293, 142294, 142295, 142296, 142297, 142298, 142299 were selected from the ORFs having the nucleotide sequence represented by SEQ ID NO: 80655

[12057] The probes having the nucleotide sequence represented by SEQ ID NOS: 142300, 142301, 142302, 142303, 142304, 142305, 142306, 142307, 142308, 142309, 142310 were selected from the ORFs having the nucleotide sequence represented by SEQ ID NO: 80656

[12058] The probes having the nucleotide sequence represented by SEQ ID NOS: 142311, 142312, 142313, 142314, 142315, 142316, 142317, 142318, 142319, 142320, 142321 were selected from the ORFs having the nucleotide sequence represented by SEQ ID NO: 80657

[12059] The probes having the nucleotide sequence represented by SEQ ID NOS: 142322, 142323, 142324, 142325, 142326, 142327, 142328, 142329, 142330, 142331, 142332, 142333, 142334, 142335, 142336, 142337, 142338, 142339, 142340, 142341, 142342, 142343, 142344, 142345, 142346, 142347, 142348, 142349, 142350, 142351, 142352, 142353, 142354 were selected from the ORFs having the nucleotide sequence represented by SEQ ID NO: 80658

[12060] The probes having the nucleotide sequence represented by SEQ ID NOS: 142355, 142356, 142357, 142358, 142359, 142360, 142361, 142362, 142363, 142364, 142365 were selected from the ORFs having the nucleotide sequence represented by SEQ ID NO: 80659

[12061] The probes having the nucleotide sequence represented by SEQ ID NOS: 142366, 142367, 142368, 142369, 142370, 142371, 142372, 142373, 142374, 142375, 142376 were selected from the ORFs having the nucleotide sequence represented by SEQ ID NO: 80660

[12062] The probes having the nucleotide sequence represented by SEQ ID NOS: 142377, 142378, 142379, 142380, 142381, 142382, 142383, 142384, 142385, 142386, 142387 were selected from the ORFs having the nucleotide sequence represented by SEQ ID NO: 80661

[12063] The probes having the nucleotide sequence represented by SEQ ID NOS: 142388, 142389, 142390, 142391, 142392, 142393, 142394, 142395, 142396, 142397, 142398 were selected from the ORFs having the nucleotide sequence represented by SEQ ID NO: 80662

[12064] The probes having the nucleotide sequence represented by SEQ ID NOS: 142399, 142400, 142401, 142402, 142403, 142404, 142405, 142406, 142407, 142408, 142409 were selected from the ORFs having the nucleotide sequence represented by SEQ ID NO: 80663

[12065] The probes having the nucleotide sequence represented by SEQ ID NOS: 142410, 142411, 142412, 142413, 142414, 142415, 142416, 142417, 142418, 142419, 142420 were selected from the ORFs having the nucleotide sequence represented by SEQ ID NO: 80664

[12066] The probes having the nucleotide sequence represented by SEQ ID NOS: 142421, 142422, 142423, 142424, 142425, 142426, 142427, 142428, 142429, 142430, 142431 were selected from the ORFs having the nucleotide sequence represented by SEQ ID NO: 80665.

[12067] The probes having the nucleotide sequence represented by SEQ ID NOS: 142432, 142433, 142434, 142435, 142436, 142437, 142438, 142439, 142440, 142441, 142442 were selected from the ORFs having the nucleotide sequence represented by SEQ ID NO: 80666

[12068] The probes having the nucleotide sequence represented by SEQ ID NOS: 142443, 142444, 142445, 142446, 142447, 142448, 142449, 142450, 142451, 142452, 142453 were selected from the ORFs having the nucleotide sequence represented by SEQ ID NO: 80667

[12069] The probes having the nucleotide sequence represented by SEQ ID NOS: 142454, 142455, 142456, 142457, 142458, 142459, 142460, 142461, 142462, 142463, 142464 were selected from the ORFs having the nucleotide sequence represented by SEQ ID NO: 80668

[12070] The probes having the nucleotide sequence represented by SEQ ID NOS: 142465, 142466, 142467, 142468, 142469, 142470, 142471, 142472, 142473, 142474, 142475 were selected from the ORFs having the nucleotide sequence represented by SEQ ID NO: 80669

[12071] The probes having the nucleotide sequence represented by SEQ ID NOS: 142476, 142477, 142478, 142479, 142480, 142481, 142482, 142483, 142484, 142485, 142486 were selected from the ORFs having the nucleotide sequence represented by SEQ ID NO: 80670

[12072] The probes having the nucleotide sequence represented by SEQ ID NOS: 142487, 142488, 142489, 142490, 142491, 142492, 142493, 142494, 142495, 142496, 142497 were selected from the ORFs having the nucleotide sequence represented by SEQ ID NO: 80671

[12073] The probes having the nucleotide sequence represented by SEQ ID NOS: 142498, 142499, 142500, 142501, 142502, 142503, 142504, 142505, 142506, 142507, 142508 were selected from the ORFs having the nucleotide sequence represented by SEQ ID NO: 80672

[12074] The probes having the nucleotide sequence represented by SEQ ID NOS: 142509, 142510, 142511, 142512, 142513, 142514, 142515, 142516, 142517, 142518, 142519 were selected from the ORFs having the nucleotide sequence represented by SEQ ID NO: 80673

[12075] The probes having the nucleotide sequence represented by SEQ ID NOS: 142520, 142521, 142522, 142523, 142524, 142525, 142526, 142527, 142528, 142529, 142530 were selected from the ORFs having the nucleotide sequence represented by SEQ ID NO: 80674

[12076] The probes having the nucleotide sequence represented by SEQ ID NOS: 142531, 142532, 142533, 142534, 142535, 142536, 142537, 142538, 142539, 142540, 142541 were selected from the ORFs having the nucleotide sequence represented by SEQ ID NO: 80675

[12077] The probes having the nucleotide sequence represented by SEQ ID NOS: 142542, 142543, 142544, 142545, 142546, 142547, 142548, 142549, 142550, 142551, 142552 were selected from the ORFs having the nucleotide sequence represented by SEQ ID NO: 80676.

[12078] The probes having the nucleotide sequence represented by SEQ ID NOS: 142553, 142554, 142555, 142556, 142557, 142558, 142559, 142560, 142561, 142562, 142563 were selected from the ORFs having the nucleotide sequence represented by SEQ ID NO: 80677

[12079] The probes having the nucleotide sequence represented by SEQ ID NOS: 142564, 142565, 142566, 142567, 142568, 142569, 142570, 142571, 142572, 142573, 142574 were selected from the ORFs having the nucleotide sequence represented by SEQ ID NO: 80678

[12080] The probes having the nucleotide sequence represented by SEQ ID NOS: 142575, 142576, 142577, 142578, 142579, 142580, 142581, 142582, 142583, 142584, 142585 were selected from the ORFs having the nucleotide sequence represented by SEQ ID NO: 80679

[12081] The probes having the nucleotide sequence represented by SEQ ID NOS: 142586, 142587, 142588, 142589, 142590, 142591, 142592, 142593, 142594, 142595, 142596 were selected from the ORFs having the nucleotide sequence represented by SEQ ID NO: 80680

[12082] The probes having the nucleotide sequence represented by SEQ ID NOS: 142597, 142598, 142599, 142600, 142601, 142602, 142603, 142604, 142605, 142606, 142607 were selected from the ORFs having the nucleotide sequence represented by SEQ ID NO: 80681

[12083] The probes having the nucleotide sequence represented by SEQ ID NOS: 142608, 142609, 142610, 142611, 142612, 142613, 142614, 142615, 142616, 142617, 142618 were selected from the ORFs having the nucleotide sequence represented by SEQ ID NO: 80682

[12084] The probes having the nucleotide sequence represented by SEQ ID NOS: 142619, 142620, 142621, 142622, 142623, 142624, 142625, 142626, 142627, 142628, 142629 were selected from the ORFs having the nucleotide sequence represented by SEQ ID NO: 80683

[12085] The probes having the nucleotide sequence represented by SEQ ID NOS: 142630, 142631, 142632, 142633, 142634, 142635, 142636, 142637, 142638, 142639, 142640 were selected from the ORFs having the nucleotide sequence represented by SEQ ID NO: 80684

[12086] The probes having the nucleotide sequence represented by SEQ ID NOS: 142641, 142642, 142643, 142644, 142645, 142646, 142647, 142648, 142649, 142650, 142651 were selected from the ORFs having the nucleotide sequence represented by SEQ ID NO: 80685

[12087] The probes having the nucleotide sequence represented by SEQ ID NOS: 142652, 142653, 142654, 142655, 142656, 142657, 142658, 142659, 142660, 142661, 142662 were selected from the ORFs having the nucleotide sequence represented by SEQ ID NO: 80686

[12088] The probes having the nucleotide sequence represented by SEQ ID NOS: 142663, 142664, 142665, 142666, 142667, 142668, 142669, 142670, 142671, 142672, 142673 were selected from the ORFs having the nucleotide sequence represented by SEQ ID NO: 80687.

[12089] The probes having the nucleotide sequence represented by SEQ ID NOS: 142674, 142675, 142676, 142677, 142678, 142679, 142680, 142681, 142682, 142683, 142684 were selected from the ORFs having the nucleotide sequence represented by SEQ ID NO: 80688

[12090] The probes having the nucleotide sequence represented by SEQ ID NOS: 142685, 142686, 142687, 142688, 142689, 142690, 142691, 142692, 142693, 142694, 142695 were selected from the ORFs having the nucleotide sequence represented by SEQ ID NO: 80689

[12091] The probes having the nucleotide sequence represented by SEQ ID NOS: 142696, 142697, 142698, 142699, 142700, 142701, 142702, 142703, 142704, 142705, 142706 were selected from the ORFs having the nucleotide sequence represented by SEQ ID NO: 80690

[12092] The probes having the nucleotide sequence represented by SEQ ID NOS: 142707, 142708, 142709, 142710, 142711, 142712, 142713, 142714, 142715, 142716, 142717 were selected from the ORFs having the nucleotide sequence represented by SEQ ID NO: 80691

[12093] The probes having the nucleotide sequence represented by SEQ ID NOS: 142718, 142719, 142720, 142721, 142722, 142723, 142724, 142725, 142726, 142727, 142728 were selected from the ORFs having the nucleotide sequence represented by SEQ ID NO: 80692

[12094] The probes having the nucleotide sequence represented by SEQ ID NOS: 142729, 142730, 142731, 142732, 142733, 142734, 142735, 142736, 142737, 142738, 142739 were selected from the ORFs having the nucleotide sequence represented by SEQ ID NO: 80693

[12095] The probes having the nucleotide sequence represented by SEQ ID NOS: 142740, 142741, 142742, 142743, 142744, 142745, 142746, 142747, 142748, 142749, 142750 were selected from the ORFs having the nucleotide sequence represented by SEQ ID NO: 80694

[12096] The probes having the nucleotide sequence represented by SEQ ID NOS: 142751, 142752, 142753, 142754, 142755, 142756, 142757, 142758, 142759, 142760, 142761 were selected from the ORFs having the nucleotide sequence represented by SEQ ID NO: 80695

[12097] The probes having the nucleotide sequence represented by SEQ ID NOS: 142762, 142763, 142764, 142765, 142766, 142767, 142768, 142769, 142770, 142771, 142772 were selected from the ORFs having the nucleotide sequence represented by SEQ ID NO: 80696

[12098] The probes having the nucleotide sequence represented by SEQ ID NOS: 142773, 142774, 142775, 142776, 142777, 142778, 142779, 142780, 142781, 142782, 142783 were selected from the ORFs having the nucleotide sequence represented by SEQ ID NO: 80697

[12099] The probes having the nucleotide sequence represented by SEQ ID NOS: 142784, 142785, 142786, 142787, 142788, 142789, 142790, 142791, 142792, 142793, 142794 were selected from the ORFs having the nucleotide sequence represented by SEQ ID NO: 80698.

[12100] The probes having the nucleotide sequence represented by SEQ ID NOS: 142795, 142796, 142797, 142798, 142799, 142800, 142801, 142802, 142803, 142804, 142805 were selected from the ORFs having the nucleotide sequence represented by SEQ ID NO: 80699

[12101] The probes having the nucleotide sequence represented by SEQ ID NOS: 142806, 142807, 142808, 142809, 142810, 142811, 142812, 142813, 142814, 142815, 142816 were selected from the ORFs having the nucleotide sequence represented by SEQ ID NO: 80700

[12102] The probes having the nucleotide sequence represented by SEQ ID NOS: 142817, 142818, 142819, 142820, 142821, 142822, 142823, 142824, 142825, 142826, 142827 were selected from the ORFs having the nucleotide sequence represented by SEQ ID NO: 80701

[12103] The probes having the nucleotide sequence represented by SEQ ID NOS: 142828, 142829, 142830, 142831, 142832, 142833, 142834, 142835, 142836, 142837, 142838 were selected from the ORFs having the nucleotide sequence represented by SEQ ID NO: 80702

[12104] The probes having the nucleotide sequence represented by SEQ ID NOS: 142839, 142840, 142841, 142842, 142843, 142844, 142845, 142846, 142847, 142848, 142849 were selected from the ORFs having the nucleotide sequence represented by SEQ ID NO: 80703

[12105] The probes having the nucleotide sequence represented by SEQ ID NOS: 142850, 142851, 142852, 142853, 142854, 142855, 142856, 142857, 142858, 142859, 142860 were selected from the ORFs having the nucleotide sequence represented by SEQ ID NO: 80704

[12106] The probes having the nucleotide sequence represented by SEQ ID NOS: 142861, 142862, 142863, 142864, 142865, 142866, 142867, 142868, 142869, 142870, 142871 were selected from the ORFs having the nucleotide sequence represented by SEQ ID NO: 80705

[12107] The probes having the nucleotide sequence represented by SEQ ID NOS: 142872, 142873, 142874, 142875, 142876, 142877, 142878, 142879, 142880, 142881, 142882 were selected from the ORFs having the nucleotide sequence represented by SEQ ID NO: 80706

[12108] The probes having the nucleotide sequence represented by SEQ ID NOS: 142883, 142884, 142885, 142886, 142887, 142888, 142889, 142890, 142891, 142892, 142893 were selected from the ORFs having the nucleotide sequence represented by SEQ ID NO: 80707

[12109] The probes having the nucleotide sequence represented by SEQ ID NOS: 142894, 142895, 142896, 142897, 142898, 142899, 142900, 142901, 142902, 142903, 142904 were selected from the ORFs having the nucleotide sequence represented by SEQ ID NO: 80708

[12110] The probes having the nucleotide sequence represented by SEQ ID NOS: 142905, 142906, 142907, 142908, 142909, 142910, 142911, 142912, 142913, 142914, 142915 were selected from the ORFs having the nucleotide sequence represented by SEQ ID NO: 80709.

[12111] The probes having the nucleotide sequence represented by SEQ ID NOS: 142916, 142917, 142918, 142919, 142920, 142921, 142922, 142923, 142924, 142925, 142926 were selected from the ORFs having the nucleotide sequence represented by SEQ ID NO: 80710

[12112] The probes having the nucleotide sequence represented by SEQ ID NOS: 142927, 142928, 142929, 142930, 142931, 142932, 142933, 142934, 142935, 142936, 142937 were selected from the ORFs having the nucleotide sequence represented by SEQ ID NO: 80711

[12113] The probes having the nucleotide sequence represented by SEQ ID NOS: 142938, 142939, 142940, 142941, 142942, 142943, 142944, 142945, 142946, 142947, 142948 were selected from the ORFs having the nucleotide sequence represented by SEQ ID NO: 80712

[12114] The probes having the nucleotide sequence represented by SEQ ID NOS: 142949, 142950, 142951, 142952, 142953, 142954, 142955, 142956, 142957, 142958, 142959 were selected from the ORFs having the nucleotide sequence represented by SEQ ID NO: 80713

[12115] The probes having the nucleotide sequence represented by SEQ ID NOS: 142960, 142961, 142962, 142963, 142964, 142965, 142966, 142967, 142968, 142969, 142970 were selected from the ORFs having the nucleotide sequence represented by SEQ ID NO: 80714

[12116] The probes having the nucleotide sequence represented by SEQ ID NOS: 142971, 142972, 142973, 142974, 142975, 142976, 142977, 142978, 142979, 142980, 142981 were selected from the ORFs having the nucleotide sequence represented by SEQ ID NO: 80715

[12117] The probes having the nucleotide sequence represented by SEQ ID NOS: 142982, 142983, 142984, 142985, 142986, 142987, 142988, 142989, 142990, 142991, 142992 were selected from the ORFs having the nucleotide sequence represented by SEQ ID NO: 80716

[12118] The probes having the nucleotide sequence represented by SEQ ID NOS: 142993, 142994, 142995, 142996, 142997, 142998, 142999, 143000, 143001, 143002, 143003 were selected from the ORFs having the nucleotide sequence represented by SEQ ID NO: 80717

[12119] The probes having the nucleotide sequence represented by SEQ ID NOS: 143004, 143005, 143006, 143007, 143008, 143009, 143010, 143011, 143012, 143013, 143014 were selected from the ORFs having the nucleotide sequence represented by SEQ ID NO: 80718

[12120] The probes having the nucleotide sequence represented by SEQ ID NOS: 143015, 143016, 143017, 143018, 143019, 143020, 143021, 143022, 143023, 143024, 143025 were selected from the ORFs having the nucleotide sequence represented by SEQ ID NO: 80719

[12121] The probes having the nucleotide sequence represented by SEQ ID NOS: 143026, 143027, 143028, 143029, 143030, 143031, 143032, 143033, 143034, 143035, 143036 were selected from the ORFs having the nucleotide sequence represented by SEQ ID NO: 80720.

[12122] The probes having the nucleotide sequence represented by SEQ ID NOS: 143037, 143038, 143039, 143040, 143041, 143042, 143043, 143044, 143045, 143046, 143047 were selected from the ORFs having the nucleotide sequence represented by SEQ ID NO: 80721

[12123] The probes having the nucleotide sequence represented by SEQ ID NOS: 143048, 143049, 143050, 143051, 143052, 143053, 143054, 143055, 143056, 143057, 143058 were selected from the ORFs having the nucleotide sequence represented by SEQ ID NO: 80722

[12124] The probes having the nucleotide sequence represented by SEQ ID NOS: 143059, 143060, 143061, 143062, 143063, 143064, 143065, 143066, 143067, 143068, 143069 were selected from the ORFs having the nucleotide sequence represented by SEQ ID NO: 80723

[12125] The probes having the nucleotide sequence represented by SEQ ID NOS: 143070, 143071, 143072, 143073, 143074, 143075, 143076, 143077, 143078, 143079, 143080 were selected from the ORFs having the nucleotide sequence represented by SEQ ID NO: 80724

[12126] The probes having the nucleotide sequence represented by SEQ ID NOS: 143081, 143082, 143083, 143084, 143085, 143086, 143087, 143088, 143089, 143090, 143091 were selected from the ORFs having the nucleotide sequence represented by SEQ ID NO: 80725

[12127] The probes having the nucleotide sequence represented by SEQ ID NOS: 143092, 143093, 143094, 143095, 143096, 143097, 143098, 143099, 143100, 143101, 143102 were selected from the ORFs having the nucleotide sequence represented by SEQ ID NO: 80726

[12128] The probes having the nucleotide sequence represented by SEQ ID NOS: 143103, 143104, 143105, 143106, 143107, 143108, 143109, 143110, 143111, 143112, 143113 were selected from the ORFs having the nucleotide sequence represented by SEQ ID NO: 80727

[12129] The probes having the nucleotide sequence represented by SEQ ID NOS: 143114, 143115, 143116, 143117, 143118, 143119, 143120, 143121, 143122, 143123, 143124 were selected from the ORFs having the nucleotide sequence represented by SEQ ID NO: 80728

[12130] The probes having the nucleotide sequence represented by SEQ ID NOS: 143125, 143126, 143127, 143128, 143129, 143130, 143131, 143132, 143133, 143134, 143135 were selected from the ORFs having the nucleotide sequence represented by SEQ ID NO: 80729

[12131] The probes having the nucleotide sequence represented by SEQ ID NOS: 143136, 143137, 143138, 143139, 143140, 143141, 143142, 143143, 143144, 143145, 143146 were selected from the ORFs having the nucleotide sequence represented by SEQ ID NO: 80730

[12132] The probes having the nucleotide sequence represented by SEQ ID NOS: 143147, 143148, 143149, 143150, 143151, 143152, 143153, 143154, 143155, 143156, 143157 were selected from the ORFs having the nucleotide sequence represented by SEQ ID NO: 80731.

[12133] The probes having the nucleotide sequence represented by SEQ ID NOS: 143158, 143159, 143160, 143161, 143162, 143163, 143164, 143165, 143166, 143167, 143168 were selected from the ORFs having the nucleotide sequence represented by SEQ ID NO: 80732

[12134] The probes having the nucleotide sequence represented by SEQ ID NOS: 143169, 143170, 143171, 143172, 143173, 143174, 143175, 143176, 143177, 143178, 143179 were selected from the ORFs having the nucleotide sequence represented by SEQ ID NO: 80733

[12135] The probes having the nucleotide sequence represented by SEQ ID NOS: 143180, 143181, 143182, 143183, 143184, 143185, 143186, 143187, 143188, 143189, 143190 were selected from the ORFs having the nucleotide sequence represented by SEQ ID NO: 80734

[12136] The probes having the nucleotide sequence represented by SEQ ID NOS: 143191, 143192, 143193, 143194, 143195, 143196, 143197, 143198, 143199, 143200, 143201 were selected from the ORFs having the nucleotide sequence represented by SEQ ID NO: 80735

[12137] The probes having the nucleotide sequence represented by SEQ ID NOS: 143202, 143203, 143204, 143205, 143206, 143207, 143208, 143209, 143210, 143211, 143212 were selected from the ORFs having the nucleotide sequence represented by SEQ ID NO: 80736

[12138] The probes having the nucleotide sequence represented by SEQ ID NOS: 143213, 143214, 143215, 143216, 143217, 143218, 143219, 143220, 143221, 143222, 143223 were selected from the ORFs having the nucleotide sequence represented by SEQ ID NO: 80737

[12139] The probes having the nucleotide sequence represented by SEQ ID NOS: 143224, 143225, 143226, 143227, 143228, 143229, 143230, 143231, 143232, 143233, 143234 were selected from the ORFs having the nucleotide sequence represented by SEQ ID NO: 80738

[12140] The probes having the nucleotide sequence represented by SEQ ID NOS: 143235, 143236, 143237, 143238, 143239, 143240, 143241, 143242; 143243, 143244, 143245 were selected from the ORFs having the nucleotide sequence represented by SEQ ID NO: 80739

[12141] The probes having the nucleotide sequence represented by SEQ ID NOS: 143246, 143247, 143248, 143249, 143250, 143251, 143252, 143253, 143254, 143255, 143256 were selected from the ORFs having the nucleotide sequence represented by SEQ ID NO: 80740

[12142] The probes having the nucleotide sequence represented by SEQ ID NOS: 143257, 143258, 143259, 143260, 143261, 143262, 143263, 143264, 143265, 143266, 143267 were selected from the ORFs having the nucleotide sequence represented by SEQ ID NO: 80741

[12143] The probes having the nucleotide sequence represented by SEQ ID NOS: 143268, 143269, 143270, 143271, 143272, 143273, 143274, 143275, 143276, 143277, 143278 were selected from the ORFs having the nucleotide sequence represented by SEQ ID NO: 80742.

[12144] The probes having the nucleotide sequence represented by SEQ ID NOS: 143279, 143280, 143281, 143282, 143283, 143284, 143285, 143286, 143287, 143288, 143289 were selected from the ORFs having the nucleotide sequence represented by SEQ ID NO: 80743

[12145] The probes having the nucleotide sequence represented by SEQ ID NOS: 143290, 143291, 143292, 143293, 143294, 143295, 143296, 143297, 143298, 143299, 143300 were selected from the ORFs having the nucleotide sequence represented by SEQ ID NO: 80744

[12146] The probes having the nucleotide sequence represented by SEQ ID NOS: 143301, 143302, 143303, 143304, 143305, 143306, 143307, 143308, 143309, 143310, 143311 were selected from the ORFs having the nucleotide sequence represented by SEQ ID NO: 80745

[12147] The probes having the nucleotide sequence represented by SEQ ID NOS: 143312, 143313, 143314, 143315, 143316, 143317, 143318, 143319, 143320, 143321, 143322 were selected from the ORFs having the nucleotide sequence represented by SEQ ID NO: 80746

[12148] The probes having the nucleotide sequence represented by SEQ ID NOS: 143323, 143324, 143325, 143326, 143327, 143328, 143329, 143330, 143331, 143332, 143333 were selected from the ORFs having the nucleotide sequence represented by SEQ ID NO: 80747

[12149] The probes having the nucleotide sequence represented by SEQ ID NOS: 143334, 143335, 143336, 143337, 143338, 143339, 143340, 143341, 143342, 143343, 143344 were selected from the ORFs having the nucleotide sequence represented by SEQ ID NO: 80748

[12150] The probes having the nucleotide sequence represented by SEQ ID NOS: 143345, 143346, 143347, 143348, 143349, 143350, 143351, 143352, 143353, 143354, 143355 were selected from the ORFs having the nucleotide sequence represented by SEQ ID NO: 80749

[12151] The probes having the nucleotide sequence represented by SEQ ID NOS: 143356, 143357, 143358, 143359, 143360, 143361, 143362, 143363, 143364, 143365, 143366 were selected from the ORFs having the nucleotide sequence represented by SEQ ID NO: 80750

[12152] The probes having the nucleotide sequence represented by SEQ ID NOS: 143367, 143368, 143369, 143370, 143371, 143372, 143373, 143374, 143375, 143376, 143377 were selected from the ORFs having the nucleotide sequence represented by SEQ ID NO: 80751

[12153] The probes having the nucleotide sequence represented by SEQ ID NOS: 143378, 143379, 143380, 143381, 143382, 143383, 143384, 143385, 143386, 143387, 143388 were selected from the ORFs having the nucleotide sequence represented by SEQ ID NO: 80752

[12154] The probes having the nucleotide sequence represented by SEQ ID NOS: 143389, 143390, 143391, 143392, 143393, 143394, 143395, 143396, 143397, 143398, 143399 were selected from the ORFs having the nucleotide sequence represented by SEQ ID NO: 80753.

[12155] The probes having the nucleotide sequence represented by SEQ ID NOS: 143400, 143401, 143402, 143403, 143404, 143405, 143406, 143407, 143408, 143409, 143410 were selected from the ORFs having the nucleotide sequence represented by SEQ ID NO: 80754

[12156] The probes having the nucleotide sequence represented by SEQ ID NOS: 143411, 143412, 143413, 143414, 143415, 143416, 143417, 143418, 143419, 143420, 143421, 143422, 143423, 143424, 143425, 143426, 143427, 143428, 143429, 143430, 143431, 143432 were selected from the ORFs having the nucleotide sequence represented by SEQ ID NO: 80755

[12157] The probes having the nucleotide sequence represented by SEQ ID NOS: 143433, 143434, 143435, 143436, 143437, 143438, 143439, 143440, 143441, 143442, 143443 were selected from the ORFs having the nucleotide sequence represented by SEQ ID NO: 80756

[12158] The probes having the nucleotide sequence represented by SEQ ID NOS: 143444, 143445, 143446, 143447, 143448, 143449, 143450, 143451, 143452, 143453, 143454 were selected from the ORFs having the nucleotide sequence represented by SEQ ID NO: 80757

[12159] The probes having the nucleotide sequence represented by SEQ ID NOS: 143455, 143456, 143457, 143458, 143459, 143460, 143461, 143462, 143463, 143464, 143465 were selected from the ORFs having the nucleotide sequence represented by SEQ ID NO: 80758

[12160] The probes having the nucleotide sequence represented by SEQ ID NOS: 143466, 143467, 143468, 143469, 143470, 143471, 143472, 143473, 143474, 143475, 143476 were selected from the ORFs having the nucleotide sequence represented by SEQ ID NO: 80759

[12161] The probes having the nucleotide sequence represented by SEQ ID NOS: 143477, 143478, 143479, 143480, 143481, 143482, 143483, 143484, 143485, 143486, 143487 were selected from the ORFs having the nucleotide sequence represented by SEQ ID NO: 80760

[12162] The probes having the nucleotide sequence represented by SEQ ID NOS: 143488, 143489, 143490, 143491, 143492, 143493, 143494, 143495, 143496, 143497, 143498 were selected from the ORFs having the nucleotide sequence represented by SEQ ID NO: 80761

[12163] The probes having the nucleotide sequence represented by SEQ ID NOS: 143499, 143500, 143501, 143502, 143503, 143504, 143505, 143506, 143507, 143508, 143509 were selected from the ORFs having the nucleotide sequence represented by SEQ ID NO: 80762

[12164] The probes having the nucleotide sequence represented by SEQ ID NOS: 143510, 143511, 143512, 143513, 143514, 143515, 143516, 143517, 143518, 143519, 143520 were selected from the ORFs having the nucleotide sequence represented by SEQ ID NO: 80763

[12165] The probes having the nucleotide sequence represented by SEQ ID NOS: 143521, 143522, 143523, 143524, 143525, 143526, 143527, 143528, 143529, 143530, 143531 were selected from the ORFs having the nucleotide sequence represented by SEQ ID NO: 80764.

[12166] The probes having the nucleotide sequence represented by SEQ ID NOS: 143532, 143533, 143534, 143535, 143536, 143537, 143538, 143539, 143540, 143541, 143542 were selected from the ORFs having the nucleotide sequence represented by SEQ ID NO: 80765

[12167] The probes having the nucleotide sequence represented by SEQ ID NOS: 143543, 143544, 143545, 143546, 143547, 143548, 143549, 143550, 143551, 143552, 143553 were selected from the ORFs having the nucleotide sequence represented by SEQ ID NO: 80766

[12168] The probes having the nucleotide sequence represented by SEQ ID NOS: 143554, 143555, 143556, 143557, 143558, 143559, 143560, 143561, 143562, 143563, 143564 were selected from the ORFs having the nucleotide sequence represented by SEQ ID NO: 80767

[12169] The probes having the nucleotide sequence represented by SEQ ID NOS: 143565, 143566, 143567, 143568, 143569, 143570, 143571, 143572, 143573, 143574, 143575 were selected from the ORFs having the nucleotide sequence represented by SEQ ID NO: 80768

[12170] The probes having the nucleotide sequence represented by SEQ ID NOS: 143576, 143577, 143578, 143579, 143580, 143581, 143582, 143583, 143584, 143585, 143586 were selected from the ORFs having the nucleotide sequence represented by SEQ ID NO: 80769

[12171] The probes having the nucleotide sequence represented by SEQ ID NOS: 143587, 143588, 143589, 143590, 143591, 143592, 143593, 143594, 143595, 143596, 143597 were selected from the ORFs having the nucleotide sequence represented by SEQ ID NO: 80770

[12172] The probes having the nucleotide sequence represented by SEQ ID NOS: 143598, 143599, 143600, 143601, 143602, 143603, 143604, 143605, 143606, 143607, 143608 were selected from the ORFs having the nucleotide sequence represented by SEQ ID NO: 80771

[12173] The probes having the nucleotide sequence represented by SEQ ID NOS: 143609, 143610, 143611, 143612, 143613, 143614, 143615, 143616, 143617, 143618, 143619 were selected from the ORFs having the nucleotide sequence represented by SEQ ID NO: 80772

[12174] The probes having the nucleotide sequence represented by SEQ ID NOS: 143620, 143621, 143622, 143623, 143624, 143625, 143626, 143627, 143628, 143629, 143630 were selected from the ORFs having the nucleotide sequence represented by SEQ ID NO: 80773

[12175] The probes having the nucleotide sequence represented by SEQ ID NOS: 143631, 143632, 143633, 143634, 143635, 143636, 143637, 143638, 143639, 143640, 143641 were selected from the ORFs having the nucleotide sequence represented by SEQ ID NO: 80774

[12176] The probes having the nucleotide sequence represented by SEQ ID NOS: 143642, 143643, 143644, 143645, 143646, 143647, 143648, 143649, 143650, 143651, 143652 were selected from the ORFs having the nucleotide sequence represented by SEQ ID NO: 80775.

[12177] The probes having the nucleotide sequence represented by SEQ ID NOS: 143653, 143654, 143655, 143656, 143657, 143658, 143659, 143660, 143661, 143662, 143663, 143664, 143665, 143666, 143667, 143668, 143669, 143670, 143671, 143672, 143673, 143674 were selected from the ORFs having the nucleotide sequence represented by SEQ ID NO: 80776

[12178] The probes having the nucleotide sequence represented by SEQ ID NOS: 143675, 143676, 143677, 143678, 143679, 143680, 143681, 143682, 143683, 143684, 143685 were selected from the ORFs having the nucleotide sequence represented by SEQ ID NO: 80777

[12179] The probes having the nucleotide sequence represented by SEQ ID NOS: 143686, 143687, 143688, 143689, 143690, 143691, 143692, 143693, 143694, 143695, 143696 were selected from the ORFs having the nucleotide sequence represented by SEQ ID NO: 80778

[12180] The probes having the nucleotide sequence represented by SEQ ID NOS: 143697, 143698, 143699, 143700, 143701, 143702, 143703, 143704, 143705, 143706, 143707 were selected from the ORFs having the nucleotide sequence represented by SEQ ID NO: 80779

[12181] The probes having the nucleotide sequence represented by SEQ ID NOS: 143708, 143709, 143710, 143711, 143712, 143713, 143714, 143715, 143716, 143717, 143718 were selected from the ORFs having the nucleotide sequence represented by SEQ ID NO: 80780

[12182] The probes having the nucleotide sequence represented by SEQ ID NOS: 143719, 143720, 143721, 143722, 143723, 143724, 143725, 143726, 143727, 143728, 143729 were selected from the ORFs having the nucleotide sequence represented by SEQ ID NO: 80781

[12183] The probes having the nucleotide sequence represented by SEQ ID NOS: 143730, 143731, 143732, 143733, 143734, 143735, 143736, 143737, 143738, 143739, 143740 were selected from the ORFs having the nucleotide sequence represented by SEQ ID NO: 80782

[12184] The probes having the nucleotide sequence represented by SEQ ID NOS: 143741, 143742, 143743, 143744, 143745, 143746, 143747, 143748, 143749, 143750, 143751 were selected from the ORFs having the nucleotide sequence represented by SEQ ID NO: 80783

[12185] The probes having the nucleotide sequence represented by SEQ ID NOS: 143752, 143753, 143754, 143755, 143756, 143757, 143758, 143759, 143760, 143761, 143762 were selected from the ORFs having the nucleotide sequence represented by SEQ ID NO: 80784

[12186] The probes having the nucleotide sequence represented by SEQ ID NOS: 143763, 143764, 143765, 143766, 143767, 143768, 143769, 143770, 143771, 143772, 143773 were selected from the ORFs having the nucleotide sequence represented by SEQ ID NO: 80785

[12187] The probes having the nucleotide sequence represented by SEQ ID NOS: 143774, 143775, 143776, 143777, 143778, 143779, 143780, 143781, 143782, 143783, 143784 were selected from the ORFs having the nucleotide sequence represented by SEQ ID NO: 80786.

[12188] The probes having the nucleotide sequence represented by SEQ ID NOS: 143785, 143786, 143787, 143788, 143789, 143790, 143791, 143792, 143793, 143794, 143795 were selected from the ORFs having the nucleotide sequence represented by SEQ ID NO: 80787

[12189] The probes having the nucleotide sequence represented by SEQ ID NOS: 143796, 143797, 143798, 143799, 143800, 143801, 143802, 143803, 143804, 143805, 143806, 143807, 143808, 143809, 143810, 143811, 143812, 143813, 143814, 143815, 143816, 143817 were selected from the ORFs having the nucleotide sequence represented by SEQ ID NO: 80788

[12190] The probes having the nucleotide sequence represented by SEQ ID NOS: 143818, 143819, 143820, 143821, 143822, 143823, 143824, 143825, 143826, 143827, 143828 were selected from the ORFs having the nucleotide sequence represented by SEQ ID NO: 80789

[12191] The probes having the nucleotide sequence represented by SEQ ID NOS: 143829, 143830, 143831, 143832, 143833, 143834, 143835, 143836, 143837, 143838, 143839 were selected from the ORFs having the nucleotide sequence represented by SEQ ID NO: 80790

[12192] The probes having the nucleotide sequence represented by SEQ ID NOS: 143840, 143841, 143842, 143843, 143844, 143845, 143846, 143847, 143848, 143849, 143850 were selected from the ORFs having the nucleotide sequence represented by SEQ ID NO: 80791

[12193] The probes having the nucleotide sequence represented by SEQ ID NOS: 143851, 143852, 143853, 143854, 143855, 143856, 143857, 143858, 143859, 143860, 143861 were selected from the ORFs having the nucleotide sequence represented by SEQ ID NO: 80792

[12194] The probes having the nucleotide sequence represented by SEQ ID NOS: 143862, 143863, 143864, 143865, 143866, 143867, 143868, 143869, 143870, 143871, 143872 were selected from the ORFs having the nucleotide sequence represented by SEQ ID NO: 80793

[12195] The probes having the nucleotide sequence represented by SEQ ID NOS: 143873, 143874, 143875, 143876, 143877, 143878, 143879, 143880, 143881, 143882, 143883 were selected from the ORFs having the nucleotide sequence represented by SEQ ID NO: 80794

[12196] The probes having the nucleotide sequence represented by SEQ ID NOS: 143884, 143885, 143886, 143887, 143888, 143889, 143890, 143891, 143892, 143893, 143894 were selected from the ORFs having the nucleotide sequence represented by SEQ ID NO: 80795

[12197] The probes having the nucleotide sequence represented by SEQ ID NOS: 143895, 143896, 143897, 143898, 143899, 143900, 143901, 143902, 143903, 143904, 143905 were selected from the ORFs having the nucleotide sequence represented by SEQ ID NO: 80796

[12198] The probes having the nucleotide sequence represented by SEQ ID NOS: 143906, 143907, 143908, 143909, 143910, 143911, 143912, 143913, 143914, 143915, 143916 were selected from the ORFs having the nucleotide sequence represented by SEQ ID NO: 80797.

[12199] The probes having the nucleotide sequence represented by SEQ ID NOS: 143917, 143918, 143919, 143920, 143921, 143922, 143923, 143924, 143925, 143926, 143927 were selected from the ORFs having the nucleotide sequence represented by SEQ ID NO: 80798

[12200] The probes having the nucleotide sequence represented by SEQ ID NOS: 143928, 143929, 143930, 143931, 143932, 143933, 143934, 143935, 143936, 143937, 143938 were selected from the ORFs having the nucleotide sequence represented by SEQ ID NO: 80799

[12201] The probes having the nucleotide sequence represented by SEQ ID NOS: 143939, 143940, 143941, 143942, 143943, 143944, 143945, 143946, 143947, 143948, 143949 were selected from the ORFs having the nucleotide sequence represented by SEQ ID NO: 80800

[12202] The probes having the nucleotide sequence represented by SEQ ID NOS: 143950, 143951, 143952, 143953, 143954, 143955, 143956, 143957, 143958, 143959, 143960 were selected from the ORFs having the nucleotide sequence represented by SEQ ID NO: 80801

[12203] The probes having the nucleotide sequence represented by SEQ ID NOS: 143961, 143962, 143963, 143964, 143965, 143966, 143967, 143968, 143969, 143970, 143971 were selected from the ORFs having the nucleotide sequence represented by SEQ ID NO: 80802

[12204] The probes having the nucleotide sequence represented by SEQ ID NOS: 143972, 143973, 143974, 143975, 143976, 143977, 143978, 143979, 143980, 143981, 143982 were selected from the ORFs having the nucleotide sequence represented by SEQ ID NO: 80803

[12205] The probes having the nucleotide sequence represented by SEQ ID NOS: 143983, 143984, 143985, 143986, 143987, 143988, 143989, 143990, 143991, 143992, 143993 were selected from the ORFs having the nucleotide sequence represented by SEQ ID NO: 80804

[12206] The probes having the nucleotide sequence represented by SEQ ID NOS: 143994, 143995, 143996, 143997, 143998, 143999, 144000, 144001, 144002, 144003, 144004 were selected from the ORFs having the nucleotide sequence represented by SEQ ID NO: 80805

[12207] The probes having the nucleotide sequence represented by SEQ ID NOS: 144005, 144006, 144007, 144008, 144009, 144010, 144011, 144012, 144013, 144014, 144015 were selected from the ORFs having the nucleotide sequence represented by SEQ ID NO: 80806

[12208] The probes having the nucleotide sequence represented by SEQ ID NOS: 144016, 144017, 144018, 144019, 144020, 144021, 144022, 144023, 144024, 144025, 144026 were selected from the ORFs having the nucleotide sequence represented by SEQ ID NO: 80807

[12209] The probes having the nucleotide sequence represented by SEQ ID NOS: 144027, 144028, 144029, 144030, 144031, 144032, 144033, 144034, 144035, 144036, 144037 were selected from the ORFs having the nucleotide sequence represented by SEQ ID NO: 80808.

[12210] The probes having the nucleotide sequence represented by SEQ ID NOS: 144038, 144039, 144040, 144041, 144042, 144043, 144044, 144045, 144046, 144047, 144048 were selected from the ORFs having the nucleotide sequence represented by SEQ ID NO: 80809

[12211] The probes having the nucleotide sequence represented by SEQ ID NOS: 144049, 144050, 144051, 144052, 144053, 144054, 144055, 144056, 144057, 144058, 144059 were selected from the ORFs having the nucleotide sequence represented by SEQ ID NO: 80810

[12212] The probes having the nucleotide sequence represented by SEQ ID NOS: 144060, 144061, 144062, 144063, 144064, 144065, 144066, 144067, 144068, 144069, 144070 were selected from the ORFs having the nucleotide sequence represented by SEQ ID NO: 80811

[12213] The probes having the nucleotide sequence represented by SEQ ID NOS: 144071, 144072, 144073, 144074, 144075, 144076, 144077, 144078, 144079, 144080, 144081 were selected from the ORFs having the nucleotide sequence represented by SEQ ID NO: 80812

[12214] The probes having the nucleotide sequence represented by SEQ ID NOS: 144082, 144083, 144084, 144085, 144086, 144087, 144088, 144089, 144090, 144091, 144092 were selected from the ORFs having the nucleotide sequence represented by SEQ ID NO: 80813

[12215] The probes having the nucleotide sequence represented by SEQ ID NOS: 144093, 144094, 144095, 144096, 144097, 144098, 144099, 144100, 144101, 144102, 144103 were selected from the ORFs having the nucleotide sequence represented by SEQ ID NO: 80814

[12216] The probes having the nucleotide sequence represented by SEQ ID NOS: 144104, 144105, 144106, 144107, 144108, 144109, 144110, 144111, 144112, 144113, 144114 were selected from the ORFs having the nucleotide sequence represented by SEQ ID NO: 80815

[12217] The probes having the nucleotide sequence represented by SEQ ID NOS: 144115, 144116, 144117, 144118, 144119, 144120, 144121, 144122, 144123, 144124, 144125 were selected from the ORFs having the nucleotide sequence represented by SEQ ID NO: 80816

[12218] The probes having the nucleotide sequence represented by SEQ ID NOS: 144126, 144127, 144128, 144129, 144130, 144131, 144132, 144133, 144134, 144135, 144136 were selected from the ORFs having the nucleotide sequence represented by SEQ ID NO: 80817

[12219] The probes having the nucleotide sequence represented by SEQ ID NOS: 144137, 144138, 144139, 144140, 144141, 144142, 144143, 144144, 144145, 144146, 144147 were selected from the ORFs having the nucleotide sequence represented by SEQ ID NO: 80818

[12220] The probes having the nucleotide sequence represented by SEQ ID NOS: 144148, 144149, 144150, 144151, 144152, 144153, 144154, 144155, 144156, 144157, 144158, 144159, 144160, 144161, 144162, 144163, 144164, 144165, 144166, 144167, 144168, 144169 were selected from the ORFs having the nucleotide sequence represented by SEQ ID NO: 80819.

[12221] The probes having the nucleotide sequence represented by SEQ ID NOS: 144170, 144171, 144172, 144173, 144174, 144175, 144176, 144177, 144178, 144179, 144180 were selected from the ORFs having the nucleotide sequence represented by SEQ ID NO: 80820

[12222] The probes having the nucleotide sequence represented by SEQ ID NOS: 144181, 144182, 144183, 144184, 144185, 144186, 144187, 144188, 144189, 144190, 144191 were selected from the ORFs having the nucleotide sequence represented by SEQ ID NO: 80821

[12223] The probes having the nucleotide sequence represented by SEQ ID NOS: 144192, 144193, 144194, 144195, 144196, 144197, 144198, 144199, 144200, 144201, 144202 were selected from the ORFs having the nucleotide sequence represented by SEQ ID NO: 80822

[12224] The probes having the nucleotide sequence represented by SEQ ID NOS: 144203, 144204, 144205, 144206, 144207, 144208, 144209, 144210, 144211, 144212, 144213 were selected from the ORFs having the nucleotide sequence represented by SEQ ID NO: 80823

[12225] The probes having the nucleotide sequence represented by SEQ ID NOS: 144214, 144215, 144216, 144217, 144218, 144219, 144220, 144221, 144222, 144223, 144224 were selected from the ORFs having the nucleotide sequence represented by SEQ ID NO: 80824

[12226] The probes having the nucleotide sequence represented by SEQ ID NOS: 144225, 144226, 144227, 144228, 144229, 144230, 144231, 144232, 144233, 144234, 144235 were selected from the ORFs having the nucleotide sequence represented by SEQ ID NO: 80825

[12227] The probes having the nucleotide sequence represented by SEQ ID NOS: 144236, 144237, 144238, 144239, 144240, 144241, 144242, 144243, 144244, 144245, 144246 were selected from the ORFs having the nucleotide sequence represented by SEQ ID NO: 80826

[12228] The probes having the nucleotide sequence represented by SEQ ID NOS: 144247, 144248, 144249, 144250, 144251, 144252, 144253, 144254, 144255, 144256, 144257 were selected from the ORFs having the nucleotide sequence represented by SEQ ID NO: 80827

[12229] The probes having the nucleotide sequence represented by SEQ ID NOS: 144258, 144259, 144260, 144261, 144262, 144263, 144264, 144265, 144266, 144267, 144268 were selected from the ORFs having the nucleotide sequence represented by SEQ ID NO: 80828

[12230] The probes having the nucleotide sequence represented by SEQ ID NOS: 144269, 144270, 144271, 144272, 144273, 144274, 144275, 144276, 144277, 144278, 144279 were selected from the ORFs having the nucleotide sequence represented by SEQ ID NO: 80829

[12231] The probes having the nucleotide sequence represented by SEQ ID NOS: 144280, 144281, 144282, 144283, 144284, 144285, 144286, 144287, 144288, 144289, 144290 were selected from the ORFs having the nucleotide sequence represented by SEQ ID NO: 80830.

[12232] The probes having the nucleotide sequence represented by SEQ ID NOS: 144291, 144292, 144293, 144294, 144295, 144296, 144297, 144298, 144299, 144300, 144301 were selected from the ORFs having the nucleotide sequence represented by SEQ ID NO: 80831

[12233] The probes having the nucleotide sequence represented by SEQ ID NOS: 144302, 144303, 144304, 144305, 144306, 144307, 144308, 144309, 144310, 144311, 144312 were selected from the ORFs having the nucleotide sequence represented by SEQ ID NO: 80832

[12234] The probes having the nucleotide sequence represented by SEQ ID NOS: 144313, 144314, 144315, 144316, 144317, 144318, 144319, 144320, 144321, 144322, 144323 were selected from the ORFs having the nucleotide sequence represented by SEQ ID NO: 80833

[12235] The probes having the nucleotide sequence represented by SEQ ID NOS: 144324, 144325, 144326, 144327, 144328, 144329, 144330, 144331, 144332, 144333, 144334 were selected from the ORFs having the nucleotide sequence represented by SEQ ID NO: 80834

[12236] The probes having the nucleotide sequence represented by SEQ ID NOS: 144335, 144336, 144337, 144338, 144339, 144340, 144341, 144342, 144343, 144344, 144345 were selected from the ORFs having the nucleotide sequence represented by SEQ ID NO: 80835

[12237] The probes having the nucleotide sequence represented by SEQ ID NOS: 144346, 144347, 144348, 144349, 144350, 144351, 144352, 144353, 144354, 144355, 144356 were selected from the ORFs having the nucleotide sequence represented by SEQ ID NO: 80836

[12238] The probes having the nucleotide sequence represented by SEQ ID NOS: 144357, 144358, 144359, 144360, 144361, 144362, 144363, 144364, 144365, 144366, 144367 were selected from the ORFs having the nucleotide sequence represented by SEQ ID NO: 80837

[12239] The probes having the nucleotide sequence represented by SEQ ID NOS: 144368, 144369, 144370, 144371, 144372, 144373, 144374, 144375, 144376, 144377, 144378 were selected from the ORFs having the nucleotide sequence represented by SEQ ID NO: 80838

[12240] The probes having the nucleotide sequence represented by SEQ ID NOS: 144379, 144380, 144381, 144382, 144383, 144384, 144385, 144386, 144387, 144388, 144389 were selected from the ORFs having the nucleotide sequence represented by SEQ ID NO: 80839

[12241] The probes having the nucleotide sequence represented by SEQ ID NOS: 144390, 144391, 144392, 144393, 144394, 144395, 144396, 144397, 144398, 144399, 144400 were selected from the ORFs having the nucleotide sequence represented by SEQ ID NO: 80840

[12242] The probes having the nucleotide sequence represented by SEQ ID NOS: 144401, 144402, 144403, 144404, 144405, 144406, 144407, 144408, 144409, 144410, 144411 were selected from the ORFs having the nucleotide sequence represented by SEQ ID NO: 80841.

[12243] The probes having the nucleotide sequence represented by SEQ ID NOS: 144412, 144413, 144414, 144415, 144416, 144417, 144418, 144419, 144420, 144421, 144422 were selected from the ORFs having the nucleotide sequence represented by SEQ ID NO: 80842

[12244] The probes having the nucleotide sequence represented by SEQ ID NOS: 144423, 144424, 144425, 144426, 144427, 144428, 144429, 144430, 144431, 144432, 144433 were selected from the ORFs having the nucleotide sequence represented by SEQ ID NO: 80843

[12245] The probes having the nucleotide sequence represented by SEQ ID NOS: 144434, 144435, 144436, 144437, 144438, 144439, 144440, 144441, 144442, 144443, 144444 were selected from the ORFs having the nucleotide sequence represented by SEQ ID NO: 80844

[12246] The probes having the nucleotide sequence represented by SEQ ID NOS: 144445, 144446, 144447, 144448, 144449, 144450, 144451, 144452, 144453, 144454, 144455 were selected from the ORFs having the nucleotide sequence represented by SEQ ID NO: 80845

[12247] The probes having the nucleotide sequence represented by SEQ ID NOS: 144456, 144457, 144458, 144459, 144460, 144461, 144462, 144463, 144464, 144465, 144466 were selected from the ORFs having the nucleotide sequence represented by SEQ ID NO: 80846

[12248] The probes having the nucleotide sequence represented by SEQ ID NOS: 144467, 144468, 144469, 144470, 144471, 144472, 144473, 144474, 144475, 144476, 144477 were selected from the ORFs having the nucleotide sequence represented by SEQ ID NO: 80847

[12249] The probes having the nucleotide sequence represented by SEQ ID NOS: 144478, 144479, 144480, 144481, 144482, 144483, 144484, 144485, 144486, 144487, 144488 were selected from the ORFs having the nucleotide sequence represented by SEQ ID NO: 80848

[12250] The probes having the nucleotide sequence represented by SEQ ID NOS: 144489, 144490, 144491, 144492, 144493, 144494, 144495, 144496, 144497, 144498, 144499 were selected from the ORFs having the nucleotide sequence represented by SEQ ID NO: 80849

[12251] The probes having the nucleotide sequence represented by SEQ ID NOS: 144500, 144501, 144502, 144503, 144504, 144505, 144506, 144507, 144508, 144509, 144510 were selected from the ORFs having the nucleotide sequence represented by SEQ ID NO: 80850

[12252] The probes having the nucleotide sequence represented by SEQ ID NOS: 144511, 144512, 144513, 144514, 144515, 144516, 144517, 144518, 144519, 144520, 144521 were selected from the ORFs having the nucleotide sequence represented by SEQ ID NO: 80851

[12253] The probes having the nucleotide sequence represented by SEQ ID NOS: 144522, 144523, 144524, 144525, 144526, 144527, 144528, 144529, 144530, 144531, 144532 were selected from the ORFs having the nucleotide sequence represented by SEQ ID NO: 80852.

[12254] The probes having the nucleotide sequence represented by SEQ ID NOS: 144533, 144534, 144535, 144536, 144537, 144538, 144539, 144540, 144541, 144542, 144543 were selected from the ORFs having the nucleotide sequence represented by SEQ ID NO: 80853.

[12255] The probes having the nucleotide sequence represented by SEQ ID NOS: 144544, 144545, 144546, 144547, 144548, 144549, 144550, 144551, 144552, 144553, 144554 were selected from the ORFs having the nucleotide sequence represented by SEQ ID NO: 80854.

[12256] The probes having the nucleotide sequence represented by SEQ ID NOS: 144555, 144556, 144557, 144558, 144559, 144560, 144561, 144562, 144563, 144564, 144565 were selected from the ORFs having the nucleotide sequence represented by SEQ ID NO: 80855.

[12257] The probes having the nucleotide sequence represented by SEQ ID NOS: 144566, 144567, 144568, 144569, 144570, 144571, 144572, 144573, 144574, 144575, 144576 were selected from the ORFs having the nucleotide sequence represented by SEQ ID NO: 80856.

[12258] The probes having the nucleotide sequence represented by SEQ ID NOS: 144577, 144578, 144579, 144580, 144581, 144582, 144583, 144584, 144585, 144586, 144587 were selected from the ORFs having the nucleotide sequence represented by SEQ ID NO: 80857.

[12259] The probes having the nucleotide sequence represented by SEQ ID NOS: 144588, 144589, 144590, 144591, 144592, 144593, 144594, 144595, 144596, 144597, 144598 were selected from the ORFs having the nucleotide sequence represented by SEQ ID NO: 80858.

[12260] The probes having the nucleotide sequence represented by SEQ ID NOS: 144599, 144600, 144601, 144602, 144603, 144604, 144605, 144606, 144607, 144608, 144609 were selected from the ORFs having the nucleotide sequence represented by SEQ ID NO: 80859.

[12261] The probes having the nucleotide sequence represented by SEQ ID NOS: 144610, 144611, 144612, 144613, 144614, 144615, 144616, 144617, 144618, 144619, 144620 were selected from the ORFs having the nucleotide sequence represented by SEQ ID NO: 80860.

[12262] The probes having the nucleotide sequence represented by SEQ ID NOS: 144621, 144622, 144623, 144624, 144625, 144626, 144627, 144628, 144629, 144630, 144631 were selected from the ORFs having the nucleotide sequence represented by SEQ ID NO: 80861.

[12263] The probes having the nucleotide sequence represented by SEQ ID NOS: 144632, 144633, 144634, 144635, 144636, 144637, 144638, 144639, 144640, 144641, 144642 were selected from the ORFs having the nucleotide sequence represented by SEQ ID NO: 80862.

[12264] The probes having the nucleotide sequence represented by SEQ ID NOS: 144643, 144644, 144645, 144646, 144647, 144648, 144649, 144650, 144651, 144652, 144653 were selected from the ORFs having the nucleotide sequence represented by SEQ ID NO: 80863.

[12265] The probes having the nucleotide sequence represented by SEQ ID NOS: 144654, 144655, 144656, 144657, 144658, 144659, 144660, 144661, 144662, 144663, 144664 were selected from the ORFs having the nucleotide sequence represented by SEQ ID NO: 80864.

[12266] The probes having the nucleotide sequence represented by SEQ ID NOS: 144665, 144666, 144667, 144668, 144669, 144670, 144671, 144672, 144673, 144674, 144675 were selected from the ORFs having the nucleotide sequence represented by SEQ ID NO: 80865.

[12267] The probes having the nucleotide sequence represented by SEQ ID NOS: 144676, 144677, 144678, 144679, 144680, 144681, 144682, 144683, 144684, 144685, 144686 were selected from the ORFs having the nucleotide sequence represented by SEQ ID NO: 80866.

[12268] The probes having the nucleotide sequence represented by SEQ ID NOS: 144687, 144688, 144689, 144690, 144691, 144692, 144693, 144694, 144695, 144696, 144697 were selected from the ORFs having the nucleotide sequence represented by SEQ ID NO: 80867.

[12269] The probes having the nucleotide sequence represented by SEQ ID NOS: 144698, 144699, 144700, 144701, 144702, 144703, 144704, 144705, 144706, 144707, 144708 were selected from the ORFs having the nucleotide sequence represented by SEQ ID NO: 80868.

[12270] The probes having the nucleotide sequence represented by SEQ ID NOS: 144709, 144710, 144711, 144712, 144713, 144714, 144715, 144716, 144717, 144718, 144719 were selected from the ORFs having the nucleotide sequence represented by SEQ ID NO: 80869.

[12271] The probes having the nucleotide sequence represented by SEQ ID NOS: 144720, 144721, 144722, 144723, 144724, 144725, 144726, 144727, 144728, 144729, 144730 were selected from the ORFs having the nucleotide sequence represented by SEQ ID NO: 80870.

[12272] The probes having the nucleotide sequence represented by SEQ ID NOS: 144731, 144732, 144733, 144734, 144735, 144736, 144737, 144738, 144739, 144740, 144741 were selected from the ORFs having the nucleotide sequence represented by SEQ ID NO: 80871.

[12273] The probes having the nucleotide sequence represented by SEQ ID NOS: 144742, 144743, 144744, 144745, 144746, 144747, 144748, 144749, 144750, 144751, 144752 were selected from the ORFs having the nucleotide sequence represented by SEQ ID NO: 80872.

[12274] The probes having the nucleotide sequence represented by SEQ ID NOS: 144753, 144754, 144755, 144756, 144757, 144758, 144759, 144760, 144761, 144762, 144763 were selected from the ORFs having the nucleotide sequence represented by SEQ ID NO: 80873.

[12275] The probes having the nucleotide sequence represented by SEQ ID NOS: 144764, 144765, 144766, 144767, 144768, 144769, 144770, 144771, 144772, 144773, 144774 were selected from the ORFs having the nucleotide sequence represented by SEQ ID NO: 80874.

[12276] The probes having the nucleotide sequence represented by SEQ ID NOS: 144775, 144776, 144777, 144778, 144779, 144780, 144781, 144782, 144783, 144784, 144785 were selected from the ORFs having the nucleotide sequence represented by SEQ ID NO: 80875.

[12277] The probes having the nucleotide sequence represented by SEQ ID NOS: 144786, 144787, 144788, 144789, 144790, 144791, 144792, 144793, 144794, 144795, 144796 were selected from the ORFs having the nucleotide sequence represented by SEQ ID NO: 80876.

[12278] The probes having the nucleotide sequence represented by SEQ ID NOS: 144797, 144798, 144799, 144800, 144801, 144802, 144803, 144804, 144805, 144806, 144807 were selected from the ORFs having the nucleotide sequence represented by SEQ ID NO: 80877.

[12279] The probes having the nucleotide sequence represented by SEQ ID NOS: 144808, 144809, 144810, 144811, 144812, 144813, 144814, 144815, 144816, 144817, 144818 were selected from the ORFs having the nucleotide sequence represented by SEQ ID NO: 80878.

[12280] The probes having the nucleotide sequence represented by SEQ ID NOS: 144819, 144820, 144821, 144822, 144823, 144824, 144825, 144826, 144827, 144828, 144829 were selected from the ORFs having the nucleotide sequence represented by SEQ ID NO: 80879.

[12281] The probes having the nucleotide sequence represented by SEQ ID NOS: 144830, 144831, 144832, 144833, 144834, 144835, 144836, 144837, 144838, 144839, 144840 were selected from the ORFs having the nucleotide sequence represented by SEQ ID NO: 80880.

[12282] The probes having the nucleotide sequence represented by SEQ ID NOS: 144841, 144842, 144843, 144844, 144845, 144846, 144847, 144848, 144849, 144850, 144851 were selected from the ORFs having the nucleotide sequence represented by SEQ ID NO: 80881.

[12283] The probes having the nucleotide sequence represented by SEQ ID NOS: 144852, 144853, 144854, 144855, 144856, 144857, 144858, 144859, 144860, 144861, 144862 were selected from the ORFs having the nucleotide sequence represented by SEQ ID NO: 80882.

[12284] The probes having the nucleotide sequence represented by SEQ ID NOS: 144863, 144864, 144865, 144866, 144867, 144868, 144869, 144870, 144871, 144872, 144873 were selected from the ORFs having the nucleotide sequence represented by SEQ ID NO: 80883.

[12285] The probes having the nucleotide sequence represented by SEQ ID NOS: 144874, 144875, 144876, 144877, 144878, 144879, 144880, 144881, 144882, 144883, 144884 were selected from the ORFs having the nucleotide sequence represented by SEQ ID NO: 80884.

[12286] The probes having the nucleotide sequence represented by SEQ ID NOS: 144885, 144886, 144887, 144888, 144889, 144890, 144891, 144892, 144893, 144894, 144895 were selected from the ORFs having the nucleotide sequence represented by SEQ ID NO: 80885.

[12287] The probes having the nucleotide sequence represented by SEQ ID NOS: 144896, 144897, 144898, 144899, 144900, 144901, 144902, 144903, 144904, 144905, 144906 were selected from the ORFs having the nucleotide sequence represented by SEQ ID NO: 80886.

[12288] The probes having the nucleotide sequence represented by SEQ ID NOS: 144907, 144908, 144909, 144910, 144911, 144912, 144913, 144914, 144915, 144916, 144917 were selected from the ORFs having the nucleotide sequence represented by SEQ ID NO: 80887.

[12289] The probes having the nucleotide sequence represented by SEQ ID NOS: 144918, 144919, 144920, 144921, 144922, 144923, 144924, 144925, 144926, 144927, 144928 were selected from the ORFs having the nucleotide sequence represented by SEQ ID NO: 80888.

[12290] The probes having the nucleotide sequence represented by SEQ ID NOS: 144929, 144930, 144931, 144932, 144933, 144934, 144935, 144936, 144937, 144938, 144939 were selected from the ORFs having the nucleotide sequence represented by SEQ ID NO: 80889.

[12291] The probes having the nucleotide sequence represented by SEQ ID NOS: 144940, 144941, 144942, 144943, 144944, 144945, 144946, 144947, 144948, 144949, 144950 were selected from the ORFs having the nucleotide sequence represented by SEQ ID NO: 80890.

[12292] The probes having the nucleotide sequence represented by SEQ ID NOS: 144951, 144952, 144953, 144954, 144955, 144956, 144957, 144958, 144959, 144960, 144961 were selected from the ORFs having the nucleotide sequence represented by SEQ ID NO: 80891.

[12293] The probes having the nucleotide sequence represented by SEQ ID NOS: 144962, 144963, 144964, 144965, 144966, 144967, 144968, 144969, 144970, 144971, 144972 were selected from the ORFs having the nucleotide sequence represented by SEQ ID NO: 80892.

[12294] The probes having the nucleotide sequence represented by SEQ ID NOS: 144973, 144974, 144975, 144976, 144977, 144978, 144979, 144980, 144981, 144982, 144983 were selected from the ORFs having the nucleotide sequence represented by SEQ ID NO: 80893.

[12295] The probes having the nucleotide sequence represented by SEQ ID NOS: 144984, 144985, 144986, 144987, 144988, 144989, 144990, 144991, 144992, 144993, 144994, 144995, 144996, 144997, 144998, 144999, 145000, 145001, 145002, 145003, 145004, 145005 were selected from the ORFs having the nucleotide sequence represented by SEQ ID NO: 80894.

[12296] The probes having the nucleotide sequence represented by SEQ ID NOS: 145006, 145007, 145008, 145009, 145010, 145011, 145012, 145013, 145014, 145015, 145016 were selected from the ORFs having the nucleotide sequence represented by SEQ ID NO: 80895.

[12297] The probes having the nucleotide sequence represented by SEQ ID NOS: 145017, 145018, 145019, 145020, 145021, 145022, 145023, 145024, 145025, 145026, 145027 were selected from the ORFs having the nucleotide sequence represented by SEQ ID NO: 80896.

[12298] The probes having the nucleotide sequence represented by SEQ ID NOS: 145028, 145029, 145030, 145031, 145032, 145033, 145034, 145035, 145036, 145037, 145038 were selected from the ORFs having the nucleotide sequence represented by SEQ ID NO: 80897.

[12299] The probes having the nucleotide sequence represented by SEQ ID NOS: 145039, 145040, 145041, 145042, 145043, 145044, 145045, 145046, 145047, 145048, 145049 were selected from the ORFs having the nucleotide sequence represented by SEQ ID NO: 80898.

[12300] The probes having the nucleotide sequence represented by SEQ ID NOS: 145050, 145051, 145052, 145053, 145054, 145055, 145056, 145057, 145058, 145059, 145060 were selected from the ORFs having the nucleotide sequence represented by SEQ ID NO: 80899.

[12301] The probes having the nucleotide sequence represented by SEQ ID NOS: 145061, 145062, 145063, 145064, 145065, 145066, 145067, 145068, 145069, 145070, 145071 were selected from the ORFs having the nucleotide sequence represented by SEQ ID NO: 80900.

[12302] The probes having the nucleotide sequence represented by SEQ ID NOS: 145072, 145073, 145074, 145075, 145076, 145077, 145078, 145079, 145080, 145081, 145082 were selected from the ORFs having the nucleotide sequence represented by SEQ ID NO: 80901.

[12303] The probes having the nucleotide sequence represented by SEQ ID NOS: 145083, 145084, 145085, 145086, 145087, 145088, 145089, 145090, 145091, 145092, 145093 were selected from the ORFs having the nucleotide sequence represented by SEQ ID NO: 80902.

[12304] The probes having the nucleotide sequence represented by SEQ ID NOS: 145094, 145095, 145096, 145097, 145098, 145099, 145100, 145101, 145102, 145103, 145104 were selected from the ORFs having the nucleotide sequence represented by SEQ ID NO: 80903.

[12305] The probes having the nucleotide sequence represented by SEQ ID NOS: 14510.5, 145106, 145107, 145108, 145109, 145110, 145111, 145112, 145113, 145114, 145115 were selected from the ORFs having the nucleotide sequence represented by SEQ ID NO: 80904.

[12306] The probes having the nucleotide sequence represented by SEQ ID NOS: 145116, 145117, 145118, 145119, 145120, 145121, 145122, 145123, 145124, 145125, 145126 were selected from the ORFs having the nucleotide sequence represented by SEQ ID NO: 80905.

[12307] The probes having the nucleotide sequence represented by SEQ ID NOS: 145127, 145128, 145129, 145130, 145131, 145132, 145133, 145134, 145135, 145136, 145137 were selected from the ORFs having the nucleotide sequence represented by SEQ ID NO: 80906.

[12308] The probes having the nucleotide sequence represented by SEQ ID NOS: 145138, 145139, 145140, 145141, 145142, 145143, 145144, 145145, 145146, 145147, 145148 were selected from the ORFs having the nucleotide sequence represented by SEQ ID NO: 80907.

[12309] The probes having the nucleotide sequence represented by SEQ ID NOS: 145149, 145150, 145151, 145152, 145153, 145154, 145155, 145156, 145157, 145158, 145159 were selected from the ORFs having the nucleotide sequence represented by SEQ ID NO: 80908.

[12310] The probes having the nucleotide sequence represented by SEQ ID NOS: 145160, 145161, 145162, 145163, 145164, 145165, 145166, 145167, 145168, 145169, 145170 were selected from the ORFs having the nucleotide sequence represented by SEQ ID NO: 80909.

[12311] The probes having the nucleotide sequence represented by SEQ ID NOS: 145171, 145172, 145173, 145174, 145175, 145176, 145177, 145178, 145179, 145180, 145181 were selected from the ORFs having the nucleotide sequence represented by SEQ ID NO: 80910.

[12312] The probes having the nucleotide sequence represented by SEQ ID NOS: 145182, 145183, 145184, 145185, 145186, 145187, 145188, 145189, 145190, 145191, 145192 were selected from the ORFs having the nucleotide sequence represented by SEQ ID NO: 80911.

[12313] The probes having the nucleotide sequence represented by SEQ ID NOS: 145193, 145194, 145195, 145196, 145197, 145198, 145199, 145200, 145201, 145202, 145203 were selected from the ORFs having the nucleotide sequence represented by SEQ ID NO: 80912.

[12314] The probes having the nucleotide sequence represented by SEQ ID NOS: 145204, 145205, 145206, 145207, 145208, 145209, 145210, 145211, 145212, 145213, 145214 were selected from the ORFs having the nucleotide sequence represented by SEQ ID NO: 80913.

[12315] The probes having the nucleotide sequence represented by SEQ ID NOS: 145215, 145216, 145217, 145218, 145219, 145220, 145221, 145222, 145223, 145224, 145225 were selected from the ORFs having the nucleotide sequence represented by SEQ ID NO: 80914.

[12316] The probes having the nucleotide sequence represented by SEQ ID NOS: 145226, 145227, 145228, 145229, 145230, 145231, 145232, 145233, 145234, 145235, 145236 were selected from the ORFs having the nucleotide sequence represented by SEQ ID NO: 80915.

[12317] The probes having the nucleotide sequence represented by SEQ ID NOS: 145237, 145238, 145239, 145240, 145241, 145242, 145243, 145244, 145245, 145246, 145247 were selected from the ORFs having the nucleotide sequence represented by SEQ ID NO: 80916.

[12318] The probes having the nucleotide sequence represented by SEQ ID NOS: 145248, 145249, 145250, 145251, 145252, 145253, 145254, 145255, 145256, 145257, 145258 were selected from the ORFs having the nucleotide sequence represented by SEQ ID NO: 80917.

[12319] The probes having the nucleotide sequence represented by SEQ ID NOS: 145259, 145260, 145261, 145262, 145263, 145264, 145265, 145266, 145267, 145268, 145269 were selected from the ORFs having the nucleotide sequence represented by SEQ ID NO: 80918.

[12320] The probes having the nucleotide sequence represented by SEQ ID NOS: 145270, 145271, 145272, 145273, 145274, 145275, 145276, 145277, 145278, 145279, 145280 were selected from the ORFs having the nucleotide sequence represented by SEQ ID NO: 80919.

[12321] The probes having the nucleotide sequence represented by SEQ ID NOS: 145281, 145282, 145283, 145284, 145285, 145286, 145287, 145288, 145289, 145290, 145291 were selected from the ORFs having the nucleotide sequence represented by SEQ ID NO: 80920.

[12322] The probes having the nucleotide sequence represented by SEQ ID NOS: 145292, 145293, 145294, 145295, 145296, 145297, 145298, 145299, 145300, 145301, 145302 were selected from the ORFs having the nucleotide sequence represented by SEQ ID NO: 80921.

[12323] The probes having the nucleotide sequence represented by SEQ ID NOS: 145303, 145304, 145305, 145306, 145307, 145308, 145309, 145310, 145311, 145312, 145313 were selected from the ORFs having the nucleotide sequence represented by SEQ ID NO: 80922.

[12324] The probes having the nucleotide sequence represented by SEQ ID NOS: 145314, 145315, 145316, 145317, 145318, 145319, 145320, 145321, 145322, 145323, 145324 were selected from the ORFs having the nucleotide sequence represented by SEQ ID NO: 80923.

[12325] The probes having the nucleotide sequence represented by SEQ ID NOS: 145325, 145326, 145327, 145328, 145329, 145330, 145331, 145332, 145333, 145334, 145335 were selected from the ORFs having the nucleotide sequence represented by SEQ ID NO: 80924.

[12326] The probes having the nucleotide sequence represented by SEQ ID NOS: 145336, 145337, 145338, 145339, 145340, 145341, 145342, 145343, 145344, 145345, 145346 were selected from the ORFs having the nucleotide sequence represented by SEQ ID NO: 80925.

[12327] The probes having the nucleotide sequence represented by SEQ ID NOS: 145347, 145348, 145349, 145350, 145351, 145352, 145353, 145354, 145355, 145356, 145357 were selected from the ORFs having the nucleotide sequence represented by SEQ ID NO: 80926.

[12328] The probes having the nucleotide sequence represented by SEQ ID NOS: 145358, 145359, 145360, 145361, 145362, 145363, 145364, 145365, 145366, 145367, 145368 were selected from the ORFs having the nucleotide sequence represented by SEQ ID NO: 80927.

[12329] The probes having the nucleotide sequence represented by SEQ ID NOS: 145369, 145370, 145371, 145372, 145373, 145374, 145375, 145376, 145377, 145378, 145379 were selected from the ORFs having the nucleotide sequence represented by SEQ ID NO: 80928.

[12330] The probes having the nucleotide sequence represented by SEQ ID NOS: 145380, 145381, 145382, 145383, 145384, 145385, 145386, 145387, 145388, 145389, 145390 were selected from the ORFs having the nucleotide sequence represented by SEQ ID NO: 80929.

[12331] The probes having the nucleotide sequence represented by SEQ ID NOS: 145391, 145392, 145393, 145394, 145395, 145396, 145397, 145398, 145399, 145400, 145401 were selected from the ORFs having the nucleotide sequence represented by SEQ ID NO: 80930.

[12332] The probes having the nucleotide sequence represented by SEQ ID NOS: 145402, 145403, 145404, 145405, 145406, 145407, 145408, 145409, 145410, 145411, 145412 were selected from the ORFs having the nucleotide sequence represented by SEQ ID NO: 80931.

[12333] The probes having the nucleotide sequence represented by SEQ ID NOS: 145413, 145414, 145415, 145416, 145417, 145418, 145419, 145420, 145421, 145422, 145423 were selected from the ORFs having the nucleotide sequence represented by SEQ ID NO: 80932.

[12334] The probes having the nucleotide sequence represented by SEQ ID NOS: 145424, 145425, 145426, 145427, 145428, 145429, 145430, 145431, 145432, 145433, 145434 were selected from the ORFs having the nucleotide sequence represented by SEQ ID NO: 80933.

[12335] The probes having the nucleotide sequence represented by SEQ ID NOS: 145435, 145436, 145437, 145438, 145439, 145440, 145441, 145442, 145443, 145444, 145445 were selected from the ORFs having the nucleotide sequence represented by SEQ ID NO: 80934.

[12336] The probes having the nucleotide sequence represented by SEQ ID NOS: 145446, 145447, 145448, 145449, 145450, 145451, 145452, 145453, 145454, 145455, 145456 were selected from the ORFs having the nucleotide sequence represented by SEQ ID NO: 80935.

[12337] The probes having the nucleotide sequence represented by SEQ ID NOS: 145457, 145458, 145459, 145460, 145461, 145462, 145463, 145464, 145465, 145466, 145467 were selected from the ORFs having the nucleotide sequence represented by SEQ ID NO: 80936.

[12338] The probes having the nucleotide sequence represented by SEQ ID NOS: 145468, 145469, 145470, 145471, 145472, 145473, 145474, 145475, 145476, 145477, 145478 were selected from the ORFs having the nucleotide sequence represented by SEQ ID NO: 80937.

[12339] The probes having the nucleotide sequence represented by SEQ ID NOS: 145479, 145480, 145481, 145482, 145483, 145484, 145485, 145486, 145487, 145488, 145489 were selected from the ORFs having the nucleotide sequence represented by SEQ ID NO: 80938.

[12340] The probes having the nucleotide sequence represented by SEQ ID NOS: 145490, 145491, 145492, 145493, 145494, 145495, 145496, 145497, 145498, 145499, 145500 were selected from the ORFs having the nucleotide sequence represented by SEQ ID NO: 80939.

[12341] The probes having the nucleotide sequence represented by SEQ ID NOS: 145501, 145502, 145503, 145504, 145505, 145506, 145507, 145508, 145509, 145510, 145511 were selected from the ORFs having the nucleotide sequence represented by SEQ ID NO: 80940.

[12342] The probes having the nucleotide sequence represented by SEQ ID NOS: 145512, 145513, 145514, 145515, 145516, 145517, 145518, 145519, 145520, 145521, 145522 were selected from the ORFs having the nucleotide sequence represented by SEQ ID NO: 80941.

[12343] The probes having the nucleotide sequence represented by SEQ ID NOS: 145523, 145524, 145525, 145526, 145527, 145528, 145529, 145530, 145531, 145532, 145533 were selected from the ORFs having the nucleotide sequence represented by SEQ ID NO: 80942.

[12344] The probes having the nucleotide sequence represented by SEQ ID NOS: 145534, 145535, 145536, 145537, 145538, 145539, 145540, 145541, 145542, 145543, 145544 were selected from the ORFs having the nucleotide sequence represented by SEQ ID NO: 80943.

[12345] The probes having the nucleotide sequence represented by SEQ ID NOS: 145545, 145546, 145547, 145548, 145549, 145550, 145551, 145552, 145553, 145554, 145555 were selected from the ORFs having the nucleotide sequence represented by SEQ ID NO: 80944.

[12346] The probes having the nucleotide sequence represented by SEQ ID NOS: 145556, 145557, 145558, 145559, 145560, 145561, 145562, 145563, 145564, 145565, 145566 were selected from the ORFs having the nucleotide sequence represented by SEQ ID NO: 80945.

[12347] The probes having the nucleotide sequence represented by SEQ ID NOS: 145567, 145568, 145569, 145570, 145571, 145572, 145573, 145574, 145575, 145576, 145577 were selected from the ORFs having the nucleotide sequence represented by SEQ ID NO: 80946.

[12348] The probes having the nucleotide sequence represented by SEQ ID NOS: 145578, 145579, 145580, 145581, 145582, 145583, 145584, 145585, 145586, 145587, 145588 were selected from the ORFs having the nucleotide sequence represented by SEQ ID NO: 80947.

[12349] The probes having the nucleotide sequence represented by SEQ ID NOS: 145589, 145590, 145591, 145592, 145593, 145594, 145595, 145596, 145597, 145598, 145599 were selected from the ORFs having the nucleotide sequence represented by SEQ ID NO: 80948.

[12350] The probes having the nucleotide sequence represented by SEQ ID NOS: 145600, 145601, 145602, 145603, 145604, 145605, 145606, 145607, 145608, 145609, 145610 were selected from the ORFs having the nucleotide sequence represented by SEQ ID NO: 80949.

[12351] The probes having the nucleotide sequence represented by SEQ ID NOS: 145611, 145612, 145613, 145614, 145615, 145616, 145617, 145618, 145619, 145620, 145621 were selected from the ORFs having the nucleotide sequence represented by SEQ ID NO: 80950.

[12352] The probes having the nucleotide sequence represented by SEQ ID NOS: 145622, 145623, 145624, 145625, 145626, 145627, 145628, 145629, 145630, 145631, 145632 were selected from the ORFs having the nucleotide sequence represented by SEQ ID NO: 80951.

[12353] The probes having the nucleotide sequence represented by SEQ ID NOS: 145633, 145634, 145635, 145636, 145637, 145638, 145639, 145640, 145641, 145642, 145643 were selected from the ORFs having the nucleotide sequence represented by SEQ ID NO: 80952.

[12354] The probes having the nucleotide sequence represented by SEQ ID NOS: 145644, 145645, 145646, 145647, 145648, 145649, 145650, 145651, 145652, 145653, 145654 were selected from the ORFs having the nucleotide sequence represented by SEQ ID NO: 80953.

[12355] The probes having the nucleotide sequence represented by SEQ ID NOS: 145655, 145656, 145657, 145658, 145659, 145660, 145661, 145662, 145663, 145664, 145665 were selected from the ORFs having the nucleotide sequence represented by SEQ ID NO: 80954.

[12356] The probes having the nucleotide sequence represented by SEQ ID NOS: 145666, 145667, 145668, 145669, 145670, 145671, 145672, 145673, 145674, 145675, 145676 were selected from the ORFs having the nucleotide sequence represented by SEQ ID NO: 80955.

[12357] The probes having the nucleotide sequence represented by SEQ ID NOS: 145677, 145678, 145679, 145680, 145681, 145682, 145683, 145684, 145685, 145686, 145687 were selected from the ORFs having the nucleotide sequence represented by SEQ ID NO: 80956.

[12358] The probes having the nucleotide sequence represented by SEQ ID NOS: 145688, 145689, 145690, 145691, 145692, 145693, 145694, 145695, 145696, 145697, 145698 were selected from the ORFs having the nucleotide sequence represented by SEQ ID NO: 80957.

[12359] The probes having the nucleotide sequence represented by SEQ ID NOS: 145699, 145700, 145701, 145702, 145703, 145704, 145705, 145706, 145707, 145708, 145709 were selected from the ORFs having the nucleotide sequence represented by SEQ ID NO: 80958.

[12360] The probes having the nucleotide sequence represented by SEQ ID NOS: 145710, 145711, 145712, 145713, 145714, 145715, 145716, 145717, 145718, 145719, 145720 were selected from the ORFs having the nucleotide sequence represented by SEQ ID NO: 80959.

[12361] The probes having the nucleotide sequence represented by SEQ ID NOS: 145721, 145722, 145723, 145724, 145725, 145726, 145727, 145728, 145729, 145730, 145731 were selected from the ORFs having the nucleotide sequence represented by SEQ ID NO: 80960.

[12362] The probes having the nucleotide sequence represented by SEQ ID NOS: 145732, 145733, 145734, 145735, 145736, 145737, 145738, 145739, 145740, 145741, 145742 were selected from the ORFs having the nucleotide sequence represented by SEQ ID NO: 80961.

[12363] The probes having the nucleotide sequence represented by SEQ ID NOS: 145743, 145744, 145745, 145746, 145747, 145748, 145749, 145750, 145751, 145752, 145753 were selected from the ORFs having the nucleotide sequence represented by SEQ ID NO: 80962.

[12364] The probes having the nucleotide sequence represented by SEQ ID NOS: 145754, 145755, 145756, 145757, 145758, 145759, 145760, 145761, 145762, 145763, 145764 were selected from the ORFs having the nucleotide sequence represented by SEQ ID NO: 80963.

[12365] The probes having the nucleotide sequence represented by SEQ ID NOS: 145765, 145766, 145767, 145768, 145769, 145770, 145771, 145772, 145773, 145774, 145775 were selected from the ORFs having the nucleotide sequence represented by SEQ ID NO: 80964.

[12366] The probes having the nucleotide sequence represented by SEQ ID NOS: 145776, 145777, 145778, 145779, 145780, 145781, 145782, 145783, 145784, 145785, 145786 were selected from the ORFs having the nucleotide sequence represented by SEQ ID NO: 80965.

[12367] The probes having the nucleotide sequence represented by SEQ ID NOS: 145787, 145788, 145789, 145790, 145791, 145792, 145793, 145794, 145795, 145796, 145797 were selected from the ORFs having the nucleotide sequence represented by SEQ ID NO: 80966.

[12368] The probes having the nucleotide sequence represented by SEQ ID NOS: 145798, 145799, 145800, 145801, 145802, 145803, 145804, 145805, 145806, 145807, 145808 were selected from the ORFs having the nucleotide sequence represented by SEQ ID NO: 80967.

[12369] The probes having the nucleotide sequence represented by SEQ ID NOS: 145809, 145810, 145811, 145812, 145813, 145814, 145815, 145816, 145817, 145818, 145819 were selected from the ORFs having the nucleotide sequence represented by SEQ ID NO: 80968.

[12370] The probes having the nucleotide sequence represented by SEQ ID NOS: 145820, 145821, 145822, 145823, 145824, 145825, 145826, 145827, 145828, 145829, 145830 were selected from the ORFs having the nucleotide sequence represented by SEQ ID NO: 80969.

[12371] The probes having the nucleotide sequence represented by SEQ ID NOS: 145831, 145832, 145833, 145834, 145835, 145836, 145837, 145838, 145839, 145840, 145841 were selected from the ORFs having the,nucleotide sequence represented by SEQ ID NO: 80970.

[12372] The probes having the nucleotide sequence represented by SEQ ID NOS: 145842, 145843, 145844, 145845, 145846, 145847, 145848, 145849, 145850 were selected from the ORFs having the nucleotide sequence represented by SEQ ID NO: 80971.

[12373] The probes having the nucleotide sequence represented by SEQ ID NOS: 145851, 145852, 145853, 145854, 145855, 145856, 145857, 145858, 145859, 145860 were selected from the ORFs having the nucleotide sequence represented by SEQ ID NO: 80972.

[12374] The probes having the nucleotide sequence represented by SEQ ID NOS: 145861, 145862, 145863, 145864, 145865, 145866, 145867, 145868, 145869, 145870, 145871 were selected from the ORFs having the nucleotide sequence represented by SEQ ID NO: 80973.

[12375] The probes having the nucleotide sequence represented by SEQ ID NOS: 145872, 145873, 145874, 145875, 145876, 145877, 145878, 145879, 145880, 145881, 145882 were selected from the ORFs having the nucleotide sequence represented by SEQ ID NO: 80974.

[12376] The probes having the nucleotide sequence represented by SEQ ID NOS: 145883, 145884, 145885, 145886, 145887, 145888, 145889, 145890, 145891, 145892, 145893 were selected from the ORFs having the nucleotide sequence represented by SEQ ID NO: 80975.

[12377] The probes having the nucleotide sequence represented by SEQ ID NOS: 145894, 145895, 145896, 145897, 145898, 145899, 145900, 145901, 145902, 145903, 145904 were selected from the ORFs having the nucleotide sequence represented by SEQ ID NO: 80976.

[12378] The probes having the nucleotide sequence represented by SEQ ID NOS: 145905, 145906, 145907, 145908, 145909, 145910, 145911, 145912, 145913, 145914, 145915 were selected from the ORFs having the nucleotide sequence represented by SEQ ID NO: 80977.

[12379] The probes having the nucleotide sequence represented by SEQ ID NOS: 145916, 145917, 145918, 145919, 145920, 145921, 145922, 145923, 145924, 145925, 145926 were selected from the ORFs having the nucleotide sequence represented by SEQ ID NO: 80978.

[12380] The probes having the nucleotide sequence represented by SEQ ID NOS: 145927, 145928, 145929, 145930, 145931, 145932, 145933, 145934, 145935, 145936, 145937 were selected from the ORFs having the nucleotide sequence represented by SEQ ID NO: 80979.

[12381] The probes having the nucleotide sequence represented by SEQ ID NOS: 145938, 145939, 145940, 145941, 145942, 145943, 145944, 145945, 145946, 145947, 145948 were selected from the ORFs having the nucleotide sequence represented by SEQ ID NO: 80980.

[12382] The probes having the nucleotide sequence represented by SEQ ID NOS: 145949, 145950, 145951, 145952, 145953, 145954, 145955, 145956, 145957, 145958, 145959 were selected from the ORFs having the nucleotide sequence represented by SEQ ID NO: 80981.

[12383] The probes having the nucleotide sequence represented by SEQ ID NOS: 145960, 145961, 145962, 145963, 145964, 145965, 145966, 145967, 145968, 145969, 145970 were selected from the ORFs having the nucleotide sequence represented by SEQ ID NO: 80982.

[12384] The probes having the nucleotide sequence represented by SEQ ID NOS: 145971, 145972, 145973, 145974, 145975, 145976, 145977, 145978, 145979, 145980, 145981 were selected from the ORFs having the nucleotide sequence represented by SEQ ID NO: 80983.

[12385] The probes having the nucleotide sequence represented by SEQ ID NOS: 145982, 145983, 145984, 145985, 145986, 145987, 145988, 145989, 145990, 145991, 145992 were selected from the ORFs having the nucleotide sequence represented by SEQ ID NO: 80984.

[12386] The probes having the nucleotide sequence represented by SEQ ID NOS: 145993, 145994, 145995, 145996, 145997, 145998, 145999, 146000, 146001, 146002, 146003 were selected from the ORFs having the nucleotide sequence represented by SEQ ID NO: 80985.

[12387] The probes having the nucleotide sequence represented by SEQ ID NOS: 146004, 146005, 146006, 146007, 146008, 146009, 146010, 146011, 146012, 146013, 146014 were selected from the ORFs having the nucleotide sequence represented by SEQ ID NO: 80986.

[12388] The probes having the nucleotide sequence represented by SEQ ID NOS: 146015, 146016, 146017, 146018, 146019, 146020, 146021, 146022, 146023, 146024, 146025, 146026, 146027, 146028, 146029, 146030, 146031, 146032, 146033, 146034, 146035, 146036 were selected from the ORFs having the nucleotide sequence represented by SEQ ID NO: 80987.

[12389] The probes having the nucleotide sequence represented by SEQ ID NOS: 146037, 146038, 146039, 146040, 146041, 146042, 146043, 146044, 146045, 146046, 146047 were selected from the ORFs having the nucleotide sequence represented by SEQ ID NO: 80988.

[12390] The probes having the nucleotide sequence represented by SEQ ID NOS: 146048, 146049, 146050, 146051, 146052, 146053, 146054, 146055, 146056, 146057, 146058 were selected from the ORFs having the nucleotide sequence represented by SEQ ID NO: 80989.

[12391] The probes having the nucleotide sequence represented by SEQ ID NOS: 146059, 146060, 146061, 146062, 146063, 146064, 146065, 146066, 146067, 146068, 146069 were selected from the ORFs having the nucleotide sequence represented by SEQ ID NO: 80990.

[12392] The probes having the nucleotide sequence represented by SEQ ID NOS: 146070, 146071, 146072, 146073, 146074, 146075, 146076, 146077, 146078, 146079, 146080 were selected from the ORFs having the nucleotide sequence represented by SEQ ID NO: 80991.

[12393] The probes having the nucleotide sequence represented by SEQ ID NOS: 146081, 146082, 146083, 146084, 146085, 146086, 146087, 146088, 146089, 146090, 146091 were selected from the ORFs having the nucleotide sequence represented by SEQ ID NO: 80992.

[12394] The probes having the nucleotide sequence represented by SEQ ID NOS: 146092, 146093, 146094, 146095, 146096, 146097, 146098, 146099, 146100, 146101, 146102 were selected from the ORFs having the nucleotide sequence represented by SEQ ID NO: 80993.

[12395] The probes having the nucleotide sequence represented by SEQ ID NOS: 146103, 146104, 146105, 146106, 146107, 146108, 146109, 146110, 146111, 146112, 146113 were selected from the ORFs having the nucleotide sequence represented by SEQ ID NO: 80994.

[12396] The probes having the nucleotide sequence represented by SEQ ID NOS: 146114, 146115, 146116, 146117, 146118, 146119, 146120, 146121, 146122, 146123, 146124 were selected from the ORFs having the nucleotide sequence represented by SEQ ID NO: 80995.

[12397] The probes having the nucleotide sequence represented by SEQ ID NOS: 146125, 146126, 146127, 146128, 146129, 146130, 146131, 146132, 146133, 146134, 146135 were selected from the ORFs having the nucleotide sequence represented by SEQ ID NO: 80996.

[12398] The probes having the nucleotide sequence represented by SEQ ID NOS: 146136, 146137, 146138, 146139, 146140, 146141, 146142, 146143, 146144, 146145, 146146 were selected from the ORFs having the nucleotide sequence represented by SEQ ID NO: 80997.

[12399] The probes having the nucleotide sequence represented by SEQ ID NOS: 146147, 146148, 146149, 146150, 146151, 146152, 146153, 146154, 146155, 146156, 146157 were selected from the ORFs having the nucleotide sequence represented by SEQ ID NO: 80998.

[12400] The probes having the nucleotide sequence represented by SEQ ID NOS: 146158, 146159, 146160, 146161, 146162, 146163, 146164, 146165, 146166, 146167, 146168 were selected from the ORFs having the nucleotide sequence represented by SEQ ID NO: 80999.

[12401] The probes having the nucleotide sequence represented by SEQ ID NOS: 146169, 146170, 146171, 146172, 146173, 146174, 146175, 146176, 146177, 146178, 146179 were selected from the ORFs having the nucleotide sequence represented by SEQ ID NO: 81000.

[12402] The probes having the nucleotide sequence represented by SEQ ID NOS: 146180, 146181, 146182, 146183, 146184, 146185, 146186, 146187, 146188, 146189, 146190 were selected from the ORFs having the nucleotide sequence represented by SEQ ID NO: 81001.

[12403] The probes having the nucleotide sequence represented by SEQ ID NOS: 146191, 146192, 146193, 146194, 146195, 146196, 146197, 146198, 146199, 146200, 146201 were selected from the ORFs having the nucleotide sequence represented by SEQ ID NO: 81002.

[12404] The probes having the nucleotide sequence represented by SEQ ID NOS: 146202, 146203, 146204, 146205, 146206, 146207, 146208, 146209, 146210, 146211, 146212 were selected from the ORFs having the nucleotide sequence represented by SEQ ID NO: 81003.

[12405] The probes having the nucleotide sequence represented by SEQ ID NOS: 146213, 146214, 146215, 146216, 146217, 146218, 146219, 146220, 146221, 146222, 146223 were selected from the ORFs having the nucleotide sequence represented by SEQ ID NO: 81004.

[12406] The probes having the nucleotide sequence represented by SEQ ID NOS: 146224, 146225, 146226, 146227, 146228, 146229, 146230, 146231, 146232, 146233, 146234 were selected from the ORFs having the nucleotide sequence represented by SEQ ID NO: 81005.

[12407] The probes having the nucleotide sequence represented by SEQ ID NOS: 146235, 146236, 146237, 146238, 146239, 146240, 146241, 146242, 146243, 146244, 146245 were selected from the ORFs having the nucleotide sequence represented by SEQ ID NO: 81006.

[12408] The probes having the nucleotide sequence represented by SEQ ID NOS: 146246, 146247, 146248, 146249, 146250, 146251, 146252, 146253, 146254, 146255, 146256 were selected from the ORFs having the nucleotide sequence represented by SEQ ID NO: 81007.

[12409] The probes having the nucleotide sequence represented by SEQ ID NOS: 146257, 146258, 146259, 146260, 146261, 146262, 146263, 146264, 146265, 146266, 146267 were selected from the ORFs having the nucleotide sequence represented by SEQ ID NO: 81008.

[12410] The probes having the nucleotide sequence represented by SEQ ID NOS: 146268, 146269, 146270, 146271, 146272, 146273, 146274, 146275, 146276, 146277, 146278 were selected from the ORFs having the nucleotide sequence represented by SEQ ID NO: 81009.

[12411] The probes having the nucleotide sequence represented by SEQ ID NOS: 146279, 146280, 146281, 146282, 146283, 146284, 146285, 146286, 146287, 146288, 146289 were selected from the ORFs having the nucleotide sequence represented by SEQ ID NO: 81010.

[12412] The probes having the nucleotide sequence represented by SEQ ID NOS: 146290, 146291, 146292, 146293, 146294, 146295, 146296, 146297, 146298, 146299, 146300 were selected from the ORFs having the nucleotide sequence represented by SEQ ID NO: 81011.

[12413] The probes having the nucleotide sequence represented by SEQ ID NOS: 146301, 146302, 146303, 146304, 146305, 146306, 146307, 146308, 146309, 146310, 146311 were selected from the ORFs having the nucleotide sequence represented by SEQ ID NO: 81012.

[12414] The probes having the nucleotide sequence represented by SEQ ID NOS: 146312, 146313, 146314, 146315, 146316, 146317, 146318, 146319, 146320, 146321, 146322 were selected from the ORFs having the nucleotide sequence represented by SEQ ID NO: 81013.

[12415] The probes having the nucleotide sequence represented by SEQ ID NOS: 146323, 146324, 146325, 146326, 146327, 146328, 146329, 146330, 146331, 146332, 146333 were selected from the ORFs having the nucleotide sequence represented by SEQ ID NO: 81014.

[12416] The probes having the nucleotide sequence represented by SEQ ID NOS: 146334, 146335, 146336, 146337, 146338, 146339, 146340, 146341, 146342, 146343, 146344 were selected from the ORFs having the nucleotide sequence represented by SEQ ID NO: 81015.

[12417] The probes having the nucleotide sequence represented by SEQ ID NOS: 146345, 146346, 146347, 146348, 146349, 146350, 146351, 146352, 146353, 146354, 146355 were selected from the ORFs having the nucleotide sequence represented by SEQ ID NO: 81016.

[12418] The probes having the nucleotide sequence represented by SEQ ID NOS: 146356, 146357, 146358, 146359, 146360, 146361, 146362, 146363, 146364, 146365, 146366 were selected from the ORFs having the nucleotide sequence represented by SEQ ID NO: 81017.

[12419] The probes having the nucleotide sequence represented by SEQ ID NOS: 146367, 146368, 146369, 146370, 146371, 146372, 146373, 146374, 146375, 146376, 146377 were selected from the ORFs having the nucleotide sequence represented by SEQ ID NO: 81018.

[12420] The probes having the nucleotide sequence represented by SEQ ID NOS: 146378, 146379, 146380, 146381, 146382, 146383, 146384, 146385, 146386, 146387, 146388 were selected from the ORFs having the nucleotide sequence represented by SEQ ID NO: 81019.

[12421] The probes having the nucleotide sequence represented by SEQ ID NOS: 146389, 146390, 146391, 146392, 146393, 146394, 146395, 146396, 146397, 146398, 146399 were selected from the ORFs having the nucleotide sequence represented by SEQ ID NO: 81020.

[12422] The probes having the nucleotide sequence represented by SEQ ID NOS: 146400, 146401, 146402, 146403, 146404, 146405, 146406, 146407, 146408, 146409, 146410 were selected from the ORFs having the nucleotide sequence represented by SEQ ID NO: 81021.

[12423] The probes having the nucleotide sequence represented by SEQ ID NOS: 146411, 146412, 146413, 146414, 146415, 146416, 146417, 146418, 146419, 146420, 146421 were selected from the ORFs having the nucleotide sequence represented by SEQ ID NO: 81022.

[12424] The probes having the nucleotide sequence represented by SEQ ID NOS: 146422, 146423, 146424, 146425, 146426, 146427, 146428, 146429, 146430, 146431, 146432 were selected from the ORFs having the nucleotide sequence represented by SEQ ID NO: 81023.

[12425] The probes having the nucleotide sequence represented by SEQ ID NOS: 146433, 146434, 146435, 146436, 146437, 146438, 146439, 146440, 146441, 146442, 146443 were selected from the ORFs having the nucleotide sequence represented by SEQ ID NO: 81024.

[12426] The probes having the nucleotide sequence represented by SEQ ID NOS: 146444, 146445, 146446, 146447, 146448, 146449, 146450, 146451, 146452, 146453, 146454 were selected from the ORFs having the nucleotide sequence represented by SEQ ID NO: 81025.

[12427] The probes having the nucleotide sequence represented by SEQ ID NOS: 146455, 146456, 146457, 146458, 146459, 146460, 146461, 146462, 146463, 146464, 146465 were selected from the ORFs having the nucleotide sequence represented by SEQ ID NO: 81026.

[12428] The probes having the nucleotide sequence represented by SEQ ID NOS: 146466, 146467, 146468, 146469, 146470, 146471, 146472, 146473, 146474, 146475, 146476 were selected from the ORFs having the nucleotide sequence represented by SEQ ID NO: 81027.

[12429] The probes having the nucleotide sequence represented by SEQ ID NOS: 146477, 146478, 146479, 146480, 146481, 146482, 146483, 146484, 146485, 146486, 146487 were selected from the ORFs having the nucleotide sequence represented by SEQ ID NO: 81028.

[12430] The probes having the nucleotide sequence represented by SEQ ID NOS: 146488, 146489, 146490, 146491, 146492, 146493, 146494, 146495, 146496, 146497, 146498 were selected from the ORFs having the nucleotide sequence represented by SEQ ID NO: 81029.

[12431] The probes having the,nucleotide sequence represented by SEQ ID NOS: 146499, 146500, 146501, 146502, 146503, 146504, 146505, 146506, 146507, 146508, 146509 were selected from the ORFs having the nucleotide sequence represented by SEQ ID NO: 81030.

[12432] The probes having the nucleotide sequence represented by SEQ ID NOS: 146510, 146511, 146512, 146513, 146514, 146515, 146516, 146517, 146518, 146519, 146520 were selected from the ORFs having the nucleotide sequence represented by SEQ ID NO: 81031.

[12433] The probes having the nucleotide sequence represented by SEQ ID NOS: 146521, 146522, 146523, 146524, 146525, 146526, 146527, 146528, 146529, 146530, 146531 were selected from the ORFs having the nucleotide sequence represented by SEQ ID NO: 81032.

[12434] The probes having the nucleotide sequence represented by SEQ ID NOS: 146532, 146533, 146534, 146535, 146536, 146537, 146538, 146539, 146540, 146541, 146542 were selected from the ORFs having the nucleotide sequence represented by SEQ ID NO: 81033.

[12435] The probes having the nucleotide sequence represented by SEQ ID NOS: 146543, 146544, 146545, 146546, 146547, 146548, 146549, 146550, 146551, 146552, 146553 were selected from the ORFs having the nucleotide sequence represented by SEQ ID NO: 81034.

[12436] The probes having the nucleotide sequence represented by SEQ ID NOS: 146554, 146555, 146556, 146557, 146558, 146559, 146560, 146561, 146562, 146563, 146564 were selected from the ORFs having the nucleotide sequence represented by SEQ ID NO: 81035.

[12437] The probes having the nucleotide sequence represented by SEQ ID NOS: 146565, 146566, 146567, 146568, 146569, 146570, 146571, 146572, 146573, 146574, 146575 were selected from the ORFs having the nucleotide sequence represented by SEQ ID NO: 81036.

[12438] The probes having the nucleotide sequence represented by SEQ ID NOS: 146576, 146577, 146578, 146579, 146580, 146581, 146582, 146583, 146584, 146585, 146586 were selected from the ORFs having the nucleotide sequence represented by SEQ ID NO: 81037.

[12439] The probes having the nucleotide sequence represented by SEQ ID NOS: 146587, 146588, 146589, 146590, 146591, 146592, 146593, 146594, 146595, 146596, 146597 were selected from the ORFs having the nucleotide sequence represented by SEQ ID NO: 81038.

[12440] The probes having the nucleotide sequence represented by SEQ ID NOS: 146598, 146599, 146600, 146601, 146602, 146603, 146604, 146605, 146606, 146607, 146608 were selected from the ORFs having the nucleotide sequence represented by SEQ ID NO: 81039.

[12441] The probes having the nucleotide sequence represented by SEQ ID NOS: 146609, 146610, 146611, 146612, 146613, 146614, 146615, 146616, 146617, 146618, 146619 were selected from the ORFs having the nucleotide sequence represented by SEQ ID NO: 81040.

[12442] The probes having the nucleotide sequence represented by SEQ ID NOS: 146620, 146621, 146622, 146623, 146624, 146625, 146626, 146627, 146628, 146629, 146630 were selected from the ORFs having the nucleotide sequence represented by SEQ ID NO: 81041.

[12443] The probes having the nucleotide sequence represented by SEQ ID NOS: 146631, 146632, 146633, 146634, 146635, 146636, 146637, 146638, 146639, 146640, 146641 were selected from the ORFs having the nucleotide sequence represented by SEQ ID NO: 81042.

[12444] The probes having the nucleotide sequence represented by SEQ ID NOS: 146642, 146643, 146644, 146645, 146646, 146647, 146648, 146649, 146650, 146651, 146652 were selected from the ORFs having the nucleotide sequence represented by SEQ ID NO: 81043.

[12445] The probes having the nucleotide sequence represented by SEQ ID NOS: 146653, 146654, 146655, 146656, 146657, 146658, 146659, 146660, 146661, 146662, 146663 were selected from the ORFs having the nucleotide sequence represented by SEQ ID NO: 81044.

[12446] The probes having the nucleotide sequence represented by SEQ ID NOS: 146664, 146665, 146666, 146667, 146668, 146669, 146670, 146671, 146672, 146673, 146674 were selected from the ORFs having the nucleotide sequence represented by SEQ ID NO: 81045.

[12447] The probes having the nucleotide sequence represented by SEQ ID NOS: 146675, 146676, 146677, 146678, 146679, 146680, 146681, 146682, 146683, 146684, 146685 were selected from the ORFs having the nucleotide sequence represented by SEQ ID NO: 81046.

[12448] The probes having the nucleotide sequence represented by SEQ ID NOS: 146686, 146687, 146688, 146689, 146690, 146691, 146692, 146693, 146694, 146695, 146696 were selected from the ORFs having the nucleotide sequence represented by SEQ ID NO: 81047.

[12449] The probes having the nucleotide sequence represented by SEQ ID NOS: 146697, 146698, 146699, 146700, 146701, 146702, 146703, 146704, 146705, 146706, 146707 were selected from the ORFs having the nucleotide sequence represented by SEQ ID NO: 81048.

[12450] The probes having the nucleotide sequence represented by SEQ ID NOS: 146708, 146709, 146710, 146711, 146712, 146713, 146714, 146715, 146716, 146717, 146718 were selected from the ORFs having the nucleotide sequence represented by SEQ ID NO: 81049.

[12451] The probes having the nucleotide sequence represented by SEQ ID NOS: 146719, 146720, 146721, 146722, 146723, 146724, 146725, 146726, 146727, 146728, 146729 were selected from the ORFs having the nucleotide sequence represented by SEQ ID NO: 81050.

[12452] The probes having the nucleotide sequence represented by SEQ ID NOS: 146730, 146731, 146732, 146733, 146734, 146735, 146736, 146737, 146738, 146739, 146740 were selected from the ORFs having the nucleotide sequence represented by SEQ ID NO: 81051.

[12453] The probes having the nucleotide sequence represented by SEQ ID NOS: 146741, 146742, 146743, 146744, 146745, 146746, 146747, 146748, 146749, 146750, 146751 were selected from the ORFs having the nucleotide sequence represented by SEQ ID NO: 81052.

[12454] The probes having the nucleotide sequence represented by SEQ ID NOS: 146752, 146753, 146754, 146755, 146756, 146757, 146758, 146759, 146760, 146761, 146762 were selected from the ORFs having the nucleotide sequence represented by SEQ ID NO: 81053.

[12455] The probes having the nucleotide sequence represented by SEQ ID NOS: 146763, 146764, 146765, 146766, 146767, 146768, 146769, 146770, 146771, 146772, 146773 were selected from the ORFs having the nucleotide sequence represented by SEQ ID NO: 81054.

[12456] The probes having the nucleotide sequence represented by SEQ ID NOS: 146774, 146775, 146776, 146777, 146778, 146779, 146780, 146781, 146782, 146783, 146784 were selected from the ORFs having the nucleotide sequence represented by SEQ ID NO: 81055.

[12457] The probes having the nucleotide sequence represented by SEQ ID NOS: 146785, 146786, 146787, 146788, 146789, 146790, 146791, 146792, 146793, 146794, 146795 were selected from the ORFs having the nucleotide sequence represented by SEQ ID NO: 81056.

[12458] The probes having the nucleotide sequence represented by SEQ ID NOS: 146796, 146797, 146798, 146799, 146800, 146801, 146802, 146803, 146804, 146805, 146806 were selected from the ORFs having the nucleotide sequence represented by SEQ ID NO: 81057.

[12459] The probes having the nucleotide sequence represented by SEQ ID NOS: 146807, 146808, 146809, 146810, 146811, 146812, 146813, 146814, 146815, 146816, 146817 were selected from the ORFs having the nucleotide sequence represented by SEQ ID NO: 81058.

[12460] The probes having the nucleotide sequence represented by SEQ ID NOS: 146818, 146819, 146820, 146821, 146822, 146823, 146824, 146825, 146826, 146827, 146828 were selected from the ORFs having the nucleotide sequence represented by SEQ ID NO: 81059.

[12461] The probes having the nucleotide sequence represented by SEQ ID NOS: 146829, 146830, 146831, 146832, 146833, 146834, 146835, 146836, 146837, 146838, 146839 were selected from the ORFs having the nucleotide sequence represented by SEQ ID NO: 81060.

[12462] The probes having the nucleotide sequence represented by SEQ ID NOS: 146840, 146841, 146842, 146843, 146844, 146845, 146846, 146847, 146848, 146849, 146850 were selected from the ORFs having the nucleotide sequence represented by SEQ ID NO: 81061.

[12463] The probes having the nucleotide sequence represented by SEQ ID NOS: 146851, 146852, 146853, 146854, 146855, 146856, 146857, 146858, 146859, 146860, 146861 were selected from the ORFs having the nucleotide sequence represented by SEQ ID NO: 81062.

[12464] The probes having the nucleotide sequence represented by SEQ ID NOS: 146862, 146863, 146864, 146865, 146866, 146867, 146868, 146869, 146870, 146871, 146872 were selected from the ORFs having the nucleotide sequence represented by SEQ ID NO: 81063.

[12465] The probes having the nucleotide sequence represented by SEQ ID NOS: 146873, 146874, 146875, 146876, 146877, 146878, 146879, 146880, 146881, 146882, 146883 were selected from the ORFs having the nucleotide sequence represented by SEQ ID NO: 81064.

[12466] The probes having the nucleotide sequence represented by SEQ ID NOS: 146884, 146885, 146886, 146887, 146888, 146889, 146890, 146891, 146892, 146893, 146894 were selected from the ORFs having the nucleotide sequence represented by SEQ ID NO: 81065.

[12467] The probes having the nucleotide sequence represented by SEQ ID NOS: 146895, 146896, 146897, 146898, 146899, 146900, 146901, 146902, 146903, 146904, 146905 were selected from the ORFs having the nucleotide sequence represented by SEQ ID NO: 81066.

[12468] The probes having the nucleotide sequence represented by SEQ ID NOS: 146906, 146907, 146908, 146909, 146910, 146911, 146912, 146913, 146914, 146915, 146916 were selected from the ORFs having the nucleotide sequence represented by SEQ ID NO: 81067.

[12469] The probes having the nucleotide sequence represented by SEQ ID NOS: 146917, 146918, 146919, 146920, 146921, 146922, 146923, 146924, 146925, 146926, 146927 were selected from the ORFs having the nucleotide sequence represented by SEQ ID NO: 81068.

[12470] The probes having the nucleotide sequence represented by SEQ ID NOS: 146928, 146929, 146930, 146931, 146932, 146933, 146934, 146935, 146936, 146937, 146938 were selected from the ORFs having the nucleotide sequence represented by SEQ ID NO: 81069.

[12471] The probes having the nucleotide sequence represented by SEQ ID NOS: 146939, 146940, 146941, 146942, 146943, 146944, 146945, 146946, 146947, 146948, 146949 were selected from the ORFs having the nucleotide sequence represented by SEQ ID NO: 81070.

[12472] The probes having the nucleotide sequence represented by SEQ ID NOS: 146950, 146951, 146952, 146953, 146954, 146955, 146956, 146957, 146958, 146959, 146960 were selected from the ORFs having the nucleotide sequence represented by SEQ ID NO: 81071.

[12473] The probes having the nucleotide sequence represented by SEQ ID NOS: 146961, 146962, 146963, 146964, 146965, 146966, 146967, 146968, 146969, 146970, 146971 were selected from the ORFs having the nucleotide sequence represented by SEQ ID NO: 81072.

[12474] The probes having the nucleotide sequence represented by SEQ ID NOS: 146972, 146973, 146974, 146975, 146976, 146977, 146978, 146979, 146980, 146981, 146982 were selected from the ORFs having the nucleotide sequence represented by SEQ ID NO: 81073.

[12475] The probes having the nucleotide sequence represented by SEQ ID NOS: 146983, 146984, 146985, 146986, 146987, 146988, 146989, 146990, 146991, 146992, 146993 were selected from the ORFs having the nucleotide sequence represented by SEQ ID NO: 81074.

[12476] The probes having the nucleotide sequence represented by SEQ ID NOS: 146994, 146995, 146996, 146997, 146998, 146999, 147000, 147001, 147002, 147003, 147004 were selected from the ORFs having the nucleotide sequence represented by SEQ ID NO: 81075.

[12477] The probes having the nucleotide sequence represented by SEQ ID NOS: 147005, 147006, 147007, 147008, 147009, 147010, 147011, 147012, 147013, 147014, 147015 were selected from the ORFs having the nucleotide sequence represented by SEQ ID NO: 81076.

[12478] The probes having the nucleotide sequence represented by SEQ ID NOS: 147016, 147017, 147018, 147019, 147020, 147021, 147022, 147023, 147024, 147025, 147026 were selected from the ORFs having the nucleotide sequence represented by SEQ ID NO: 81077.

[12479] The probes having the nucleotide sequence represented by SEQ ID NOS: 147027, 147028, 147029, 147030, 147031, 147032, 147033, 147034, 147035, 147036, 147037 were selected from the ORFs having the nucleotide sequence represented by SEQ ID NO: 81078.

[12480] The probes having the nucleotide sequence represented by SEQ ID NOS: 147038, 147039, 147040, 147041, 147042, 147043, 147044, 147045, 147046, 147047, 147048 were selected from the ORFs having the nucleotide sequence represented by SEQ ID NO: 81079.

[12481] The probes having the nucleotide sequence represented by SEQ ID NOS: 147049, 147050, 147051, 147052, 147053, 147054, 147055, 147056, 147057, 147058, 147059 were selected from the ORFs having the nucleotide sequence represented by SEQ ID NO: 81080.

[12482] The probes having the nucleotide sequence represented by SEQ ID NOS: 147060, 147061, 147062, 147063, 147064, 147065, 147066, 147067, 147068, 147069, 147070 were selected from the ORFs having the nucleotide sequence represented by SEQ ID NO: 81081.

[12483] The probes having the nucleotide sequence represented by SEQ ID NOS: 147071, 147072, 147073, 147074, 147075, 147076, 147077, 147078, 147079, 147080, 147081 were selected from the ORFs having the nucleotide sequence represented by SEQ ID NO: 81082.

[12484] The probes having the nucleotide sequence represented by SEQ ID NOS: 147082, 147083, 147084, 147085, 147086, 147087, 147088, 147089, 147090, 147091, 147092 were selected from the ORFs having the nucleotide sequence represented by SEQ ID NO: 81083.

[12485] The probes having the nucleotide sequence represented by SEQ ID NOS: 147093, 147094, 147095, 147096, 147097, 147098, 147099, 147100, 147101, 147102, 147103 were selected from the ORFs having the nucleotide sequence represented by SEQ ID NO: 81084.

[12486] The probes having the nucleotide sequence represented by SEQ ID NOS: 147104, 147105, 147106, 147107, 147108, 147109, 147110, 147111, 147112, 147113, 147114 were selected from the ORFs having the nucleotide sequence represented by SEQ ID NO: 81085.

[12487] The probes having the nucleotide sequence represented by SEQ ID NOS: 147115, 147116, 147117, 147118, 147119, 147120, 147121, 147122, 147123, 147124, 147125 were selected from the ORFs having the nucleotide sequence represented by SEQ ID NO: 81086.

[12488] The probes having the nucleotide sequence represented by SEQ ID NOS: 147126, 147127, 147128, 147129, 147130, 147131, 147132, 147133, 147134, 147135, 147136 were selected from the ORFs having the nucleotide sequence represented by SEQ ID NO: 81087.

[12489] The probes having the nucleotide sequence represented by SEQ ID NOS: 147137, 147138, 147139, 147140, 147141, 147142, 147143, 147144, 147145, 147146, 147147 were selected from the ORFs having the nucleotide sequence represented by SEQ ID NO: 81088.

[12490] The probes having the nucleotide sequence represented by SEQ ID NOS: 147148, 147149, 147150, 147151, 147152, 147153, 147154, 147155, 147156, 147157, 147158 were selected from the ORFs having the nucleotide sequence represented by SEQ ID NO: 81089.

[12491] The probes having the nucleotide sequence represented by SEQ ID NOS: 147159, 147160, 147161, 147162, 147163, 147164, 47165, 147166, 147167, 147168, 147169 were selected from the ORFs having the nucleotide sequence represented by SEQ ID NO: 81090.

[12492] The probes having the nucleotide sequence represented by SEQ ID NOS: 147170, 147171, 147172, 147173, 147174, 147175, 147176, 147177, 147178, 147179, 147180 were selected from the ORFs having the nucleotide sequence represented by SEQ ID NO: 81091.

[12493] The probes having the nucleotide sequence represented by SEQ ID NOS: 147181, 147182, 147183, 147184, 147185, 147186, 147187, 147188, 147189, 147190, 147191 were selected from the ORFs having the nucleotide sequence represented by SEQ ID NO: 81092.

[12494] The probes having the nucleotide sequence represented by SEQ ID NOS: 147192, 147193, 147194, 147195, 147196, 147197, 147198, 147199, 147200, 147201, 147202 were selected from the ORFs having the nucleotide sequence represented by SEQ ID NO: 81093.

[12495] The probes having the nucleotide sequence represented by SEQ ID NOS: 147203, 147204, 147205, 147206, 147207, 147208, 147209, 147210, 147211, 147212, 147213 were selected from the ORFs having the nucleotide sequence represented by SEQ ID NO: 81094.

[12496] The probes having the nucleotide sequence represented by SEQ ID NOS: 147214, 147215, 147216, 147217, 147218, 147219, 147220, 147221, 147222, 147223, 147224 were selected from the ORFs having the nucleotide sequence represented by SEQ ID NO: 81095.

[12497] The probes having the nucleotide sequence represented by SEQ ID NOS: 147225, 147226, 147227, 147228, 147229, 147230, 147231, 147232, 147233, 147234, 147235 were selected from the ORFs having the nucleotide sequence represented by SEQ ID NO: 81096.

[12498] The probes having the nucleotide sequence represented by SEQ ID NOS: 147236, 147237, 147238, 147239, 147240, 147241, 147242, 147243, 147244, 147245, 147246 were selected from the ORFs having the nucleotide sequence represented by SEQ ID NO: 81097.

[12499] The probes having the nucleotide sequence represented by SEQ ID NOS: 147247, 147248, 147249, 147250, 147251, 147252, 147253, 147254, 147255, 147256, 147257 were selected from the ORFs having the nucleotide sequence represented by SEQ ID NO: 81098.

[12500] The probes having the nucleotide sequence represented by SEQ ID NOS: 147258, 147259, 147260, 147261, 147262, 147263, 147264, 147265, 147266, 147267, 147268, 147269, 147270, 147271, 147272, 147273, 147274, 147275, 147276, 147277, 147278, 147279 were selected from the ORFs having the nucleotide sequence represented by SEQ ID NO: 81099.

[12501] The probes having the nucleotide sequence represented by SEQ ID NOS: 147280, 147281, 147282, 147283, 147284, 147285, 147286, 147287, 147288, 147289, 147290 were selected from the ORFs having the nucleotide sequence represented by SEQ ID NO: 81100.

[12502] The probes having the nucleotide sequence represented by SEQ ID NOS: 147291, 147292, 147293, 147294, 147295, 147296, 147297, 147298, 147299, 147300, 147301 were selected from the ORFs having the nucleotide sequence represented by SEQ ID NO: 81101.

[12503] The probes having the nucleotide sequence represented by SEQ ID NOS: 147302, 147303, 147304, 147305, 147306, 147307, 147308, 147309, 147310, 147311, 147312 were selected from the ORFs having the nucleotide sequence represented by SEQ ID NO: 81102.

[12504] The probes having the nucleotide sequence represented by SEQ ID NOS: 147313, 147314, 147315, 147316, 147317, 147318, 147319, 147320, 147321, 147322, 147323 were selected from the ORFs having the nucleotide sequence represented by SEQ ID NO: 81103.

[12505] The probes having the nucleotide sequence represented by SEQ ID NOS: 147324, 147325, 147326, 147327, 147328, 147329, 147330, 147331, 147332, 147333, 147334 were selected from the ORFs having the nucleotide sequence represented by SEQ ID NO: 81104.

[12506] The probes having the nucleotide sequence represented by SEQ ID NOS: 147335, 147336, 147337, 147338, 147339, 147340, 147341, 147342, 147343, 147344, 147345 were selected from the ORFs having the nucleotide sequence represented by SEQ ID NO: 81105.

[12507] The probes having the nucleotide sequence represented by SEQ ID NOS: 147346, 147347, 147348, 147349, 147350, 147351, 147352, 147353, 147354, 147355, 147356 were selected from the ORFs having the nucleotide sequence represented by SEQ ID NO: 81106.

[12508] The probes having the nucleotide sequence represented by SEQ ID NOS: 147357, 147358, 147359, 147360, 147361, 147362, 147363, 147364, 147365, 147366, 147367 were selected from the ORFs having the nucleotide sequence represented by SEQ ID NO: 81107.

[12509] The probes having the nucleotide sequence represented by SEQ ID NOS: 147368, 147369, 147370, 147371, 147372, 147373, 147374, 147375, 147376, 147377, 147378 were selected from the ORFs having the nucleotide sequence represented by SEQ ID NO: 81108.

[12510] The probes having the nucleotide sequence represented by SEQ ID NOS: 147379, 147380, 147381, 147382, 147383, 147384, 147385, 147386, 147387, 147388, 147389 were selected from the ORFs having the nucleotide sequence represented by SEQ ID NO: 81109.

[12511] The probes having the nucleotide sequence represented by SEQ ID NOS: 147390, 147391, 147392, 147393, 147394, 147395, 147396, 147397, 147398, 147399, 147400 were selected from the ORFs having the nucleotide sequence represented by SEQ ID NO: 81110.

[12512] The probes having the nucleotide sequence represented by SEQ ID NOS: 147401, 147402, 147403, 147404, 147405, 147406, 147407, 147408, 147409, 147410, 147411 were selected from the ORFs having the nucleotide sequence represented by SEQ ID NO: 81111.

[12513] The probes having the nucleotide sequence represented by SEQ ID NOS: 147412, 147413, 147414, 147415, 147416, 147417, 147418, 147419, 147420, 147421, 147422 were selected from the ORFs having the nucleotide sequence represented by SEQ ID NO: 81112.

[12514] The probes having the nucleotide sequence represented by SEQ ID NOS: 147423, 147424, 147425, 147426, 147427, 147428, 147429, 147430, 147431, 147432, 147433 were selected from the ORFs having the nucleotide sequence represented by SEQ ID NO: 81113.

[12515] The probes having the nucleotide sequence represented by SEQ ID NOS: 147434, 147435, 147436, 147437, 147438, 147439, 147440, 147441, 147442, 147443, 147444 were selected from the ORFs having the nucleotide sequence represented by SEQ ID NO: 81114.

[12516] The probes having the nucleotide sequence represented by SEQ ID NOS: 147445, 147446, 147447, 147448, 147449, 147450, 147451, 147452, 147453, 147454, 147455 were selected from the ORFs having the nucleotide sequence represented by SEQ ID NO: 81115.

[12517] The probes having the nucleotide sequence represented by SEQ ID NOS: 147456, 147457, 147458, 147459, 147460, 147461, 147462, 147463, 147464, 147465, 147466 were selected from the ORFs having the nucleotide sequence represented by SEQ ID NO: 81116.

[12518] The probes having the nucleotide sequence represented by SEQ ID NOS: 147467, 147468, 147469, 147470, 147471, 147472, 147473, 147474, 147475, 147476, 147477 were selected from the ORFs having the nucleotide sequence represented by SEQ ID NO: 81117.

[12519] The probes having the nucleotide sequence represented by SEQ ID NOS: 147478, 147479, 147480, 147481, 147482, 147483, 147484, 147485, 147486, 147487, 147488 were selected from the ORFs having the nucleotide sequence represented by SEQ ID NO: 81118.

[12520] The probes having the nucleotide sequence represented by SEQ ID NOS: 147489, 147490, 147491, 147492, 147493, 147494, 147495, 147496, 147497, 147498, 147499 were selected from the ORFs having the nucleotide sequence represented by SEQ ID NO: 81119.

[12521] The probes having the nucleotide sequence represented by SEQ ID NOS: 147500, 147501, 147502, 147503, 147504, 147505, 147506, 147507, 147508, 147509, 147510 were selected from the ORFs having the nucleotide sequence represented by SEQ ID NO: 81120.

[12522] The probes having the nucleotide sequence represented by SEQ ID NOS: 147511, 147512, 147513, 147514, 147515, 147516, 147517, 147518, 147519, 147520, 147521 were selected from the ORFs having the nucleotide sequence represented by SEQ ID NO: 81121.

[12523] The probes having the nucleotide sequence represented by SEQ ID NOS: 147522, 147523, 147524, 147525, 147526, 147527, 147528, 147529, 147530, 147531, 147532 were selected from the ORFs having the nucleotide sequence represented by SEQ ID NO: 81122.

[12524] The probes having the nucleotide sequence represented by SEQ ID NOS: 147533, 147534, 147535, 147536, 147537, 147538, 147539, 147540, 147541, 147542, 147543 were selected from the ORFs having the nucleotide sequence represented by SEQ ID NO: 81123.

[12525] The probes having the nucleotide sequence represented by SEQ ID NOS: 147544, 147545, 147546, 147547, 147548, 147549, 147550, 147551, 147552, 147553, 147554 were selected from the ORFs having the nucleotide sequence represented by SEQ ID NO: 81124.

[12526] The probes having the nucleotide sequence represented by SEQ ID NOS: 147555, 147556, 147557, 147558, 147559, 147560, 147561, 147562, 147563, 147564, 147565 were selected from the ORFs having the nucleotide sequence represented by SEQ ID NO: 81125.

[12527] The probes having the nucleotide sequence represented by SEQ ID NOS: 147566, 147567, 147568, 147569, 147570, 147571, 147572, 147573, 147574, 147575, 147576 were selected from the ORFs having the nucleotide sequence represented by SEQ ID NO: 81126.

[12528] The probes having the nucleotide sequence represented by SEQ ID NOS: 147577, 147578, 147579, 147580, 147581, 147582, 147583, 147584, 147585, 147586, 147587 were selected from the ORFs having the nucleotide sequence represented by SEQ ID NO: 81127.

[12529] The probes having the nucleotide sequence represented by SEQ ID NOS: 147588, 147589, 147590, 147591, 147592, 147593, 147594, 147595, 147596, 147597, 147598 were selected from the ORFs having the nucleotide sequence represented by SEQ ID NO: 81128.

[12530] The probes having the nucleotide sequence represented by SEQ ID NOS: 147599, 147600, 147601, 147602, 147603, 147604, 147605, 147606, 147607, 147608, 147609 were selected from the ORFs having the nucleotide sequence represented by SEQ ID NO: 81129.

[12531] The probes having the nucleotide sequence represented by SEQ ID NOS: 147610, 147611, 147612, 147613, 147614, 147615, 147616, 147617, 147618, 147619, 147620 were selected from the ORFs having the nucleotide sequence represented by SEQ ID NO: 81130.

[12532] The probes having the nucleotide sequence represented by SEQ ID NOS: 147621, 147622, 147623, 147624, 147625, 147626, 147627, 147628, 147629, 147630, 147631 were selected from the ORFs having the nucleotide sequence represented by SEQ ID NO: 81131.

[12533] The probes having the nucleotide sequence represented by SEQ ID NOS: 147632, 147633, 147634, 147635, 147636, 147637, 147638, 147639, 147640, 147641, 147642 were selected from the ORFs having the nucleotide sequence represented by SEQ ID NO: 81132.

[12534] The probes having the nucleotide sequence represented by SEQ ID NOS: 147643, 147644, 147645, 147646, 147647, 147648, 147649, 147650, 147651, 147652, 147653, 147654, 147655, 147656, 147657, 147658, 147659, 147660, 147661, 147662, 147663, 147664 were selected from the ORFs having the nucleotide sequence represented by SEQ ID NO: 81133.

[12535] The probes having the nucleotide sequence represented by SEQ ID NOS: 147665, 147666, 147667, 147668, 147669, 147670, 147671, 147672, 147673, 147674, 147675 were selected from the ORFs having the nucleotide sequence represented by SEQ ID NO: 81134.

[12536] The probes having the nucleotide sequence represented by SEQ ID NOS: 147676, 147677, 147678, 147679, 147680, 147681, 147682, 147683, 147684, 147685, 147686 were selected from the ORFs having the nucleotide sequence represented by SEQ ID NO: 81135.

[12537] The probes having the nucleotide sequence represented by SEQ ID NOS: 147687, 147688, 147689, 147690, 147691, 147692, 147693, 147694, 147695, 147696, 147697 were selected from the ORFs having the nucleotide sequence represented by SEQ ID NO: 81136.

[12538] The probes having the nucleotide sequence represented by SEQ ID NOS: 147698, 147699, 147700, 147701, 147702, 147703, 147704, 147705, 147706, 147707, 147708 were selected from the ORFs having the nucleotide sequence represented by SEQ ID NO: 81137.

[12539] The probes having the nucleotide sequence represented by SEQ ID NOS: 147709, 147710, 147711, 147712, 147713, 147714, 147715, 147716, 147717, 147718, 147719 were selected from the ORFs having the nucleotide sequence represented by SEQ ID NO: 81138.

[12540] The probes having the nucleotide sequence represented by SEQ ID NOS: 147720, 147721, 147722, 147723, 147724, 147725, 147726, 147727, 147728, 147729, 147730 were selected from the ORFs having the nucleotide sequence represented by SEQ ID NO: 81139.

[12541] The probes having the nucleotide sequence represented by SEQ ID NOS: 147731, 147732, 147733, 147734, 147735, 147736, 147737, 147738, 147739, 147740, 147741 were selected from the ORFs having the nucleotide sequence represented by SEQ ID NO: 81140.

[12542] The probes having the nucleotide sequence represented by SEQ ID NOS: 147742, 147743, 147744, 147745, 147746, 147747, 147748, 147749, 147750, 147751, 147752 were selected from the ORFs having the nucleotide sequence represented by SEQ ID NO: 81141.

[12543] The probes having the nucleotide sequence represented by SEQ ID NOS: 147753, 147754, 147755, 147756, 147757, 147758, 147759, 147760, 147761, 147762, 147763 were selected from the ORFs having the nucleotide sequence represented by SEQ ID NO: 81142.

[12544] The probes having the nucleotide sequence represented by SEQ ID NOS: 147764, 147765, 147766, 147767, 147768, 147769, 147770, 147771, 147772, 147773, 147774 were selected from the ORFs having the nucleotide sequence represented by SEQ ID NO: 81143.

[12545] The probes having the nucleotide sequence represented by SEQ ID NOS: 147775, 147776, 147777, 147778, 147779, 147780, 147781, 147782, 147783, 147784, 147785 were selected from the ORFs having the nucleotide sequence represented by SEQ ID NO: 81144.

[12546] The probes having the nucleotide sequence represented by SEQ ID NOS: 147786, 147787, 147788, 147789, 147790, 147791, 147792, 147793, 147794, 147795, 147796 were selected from the ORFs having the nucleotide sequence represented by SEQ ID NO: 81145.

[12547] The probes having the nucleotide sequence represented by SEQ ID NOS: 147797, 147798, 147799, 147800, 147801, 147802, 147803, 147804, 147805, 147806, 147807 were selected from the ORFs having the nucleotide sequence represented by SEQ ID NO: 81146.

[12548] The probes having the nucleotide sequence represented by SEQ ID NOS: 147808, 147809, 147810, 147811, 147812, 147813, 147814, 147815, 147816, 147817, 147818 were selected from the ORFs having the nucleotide sequence represented by SEQ ID NO: 81147.

[12549] The probes having the nucleotide sequence represented by SEQ ID NOS: 147819, 147820, 147821, 147822, 147823, 147824, 147825, 147826, 147827, 147828, 147829 were selected from the ORFs having the nucleotide sequence represented by SEQ ID NO: 81148.

[12550] The probes having the nucleotide sequence represented by SEQ ID NOS: 147830, 147831, 147832, 147833, 147834, 147835, 147836, 147837, 147838, 147839, 147840 were selected from the ORFs having the nucleotide sequence represented by SEQ ID NO: 81149.

[12551] The probes having the nucleotide sequence represented by SEQ ID NOS: 147841, 147842, 147843, 147844, 147845, 147846, 147847, 147848, 147849, 147850, 147851 were selected from the ORFs having the nucleotide sequence represented by SEQ ID NO: 81150.

[12552] The probes having the nucleotide sequence represented by SEQ ID NOS: 147852, 147853, 147854, 147855, 147856, 147857, 147858, 147859, 147860, 147861, 147862 were selected from the ORFs having the nucleotide sequence represented by SEQ ID NO: 81151.

[12553] The probes having the nucleotide sequence represented by SEQ ID NOS: 147863, 147864, 147865, 147866, 147867, 147868, 147869, 147870, 147871, 147872, 147873 were selected from the ORFs having the nucleotide sequence represented by SEQ ID NO: 81152.

[12554] The probes having the nucleotide sequence represented by SEQ ID NOS: 147874, 147875, 147876, 147877, 147878, 147879, 147880, 147881, 147882, 147883, 147884 were selected from the ORFs having the nucleotide sequence represented by SEQ ID NO: 81153.

[12555] The probes having the nucleotide sequence represented by SEQ ID NOS: 147885, 147886, 147887, 147888, 147889, 147890, 147891, 147892, 147893, 147894, 147895 were selected from the ORFs having the nucleotide sequence represented by SEQ ID NO: 81154.

[12556] The probes having the nucleotide sequence represented by SEQ ID NOS: 147896, 147897, 147898, 147899, 147900, 147901, 147902, 147903, 147904, 147905, 147906 were selected from the ORFs having the nucleotide sequence represented by SEQ ID NO: 81155.

[12557] The probes having the nucleotide sequence represented by SEQ ID NOS: 147907, 147908, 147909, 147910, 147911, 147912, 147913, 147914, 147915, 147916, 147917 were selected from the ORFs having the nucleotide sequence represented by SEQ ID NO: 81156.

[12558] The probes having the nucleotide sequence represented by SEQ ID NOS: 147918, 147919, 147920, 147921, 147922, 147923, 147924, 147925, 147926, 147927, 147928 were selected from the ORFs having the nucleotide sequence represented by SEQ ID NO: 81157.

[12559] The probes having the nucleotide sequence represented by SEQ ID NOS: 147929, 147930, 147931, 147932, 147933, 147934, 147935, 147936, 147937, 147938, 147939 were selected from the ORFs having the nucleotide sequence represented by SEQ ID NO: 81158.

[12560] The probes having the nucleotide sequence represented by SEQ ID NOS: 147940, 147941, 147942, 147943, 147944, 147945, 147946, 147947, 147948, 147949, 147950 were selected from the ORFs having the nucleotide sequence represented by SEQ ID NO: 81159.

[12561] The probes having the nucleotide sequence represented by SEQ ID NOS: 147951, 147952, 147953, 147954, 147955, 147956, 147957, 147958, 147959, 147960, 147961 were selected from the ORFs having the nucleotide sequence represented by SEQ ID NO: 81160.

[12562] The probes having the nucleotide sequence represented by SEQ ID NOS: 147962, 147963, 147964, 147965, 147966, 147967, 147968, 147969, 147970, 147971, 147972 were selected from the ORFs having the nucleotide sequence represented by SEQ ID NO: 81161.

[12563] The probes having the nucleotide sequence represented by SEQ ID NOS: 147973, 147974, 147975, 147976, 147977, 147978, 147979, 147980, 147981, 147982, 147983 were selected from the ORFs having the nucleotide sequence represented by SEQ ID NO: 81162.

[12564] The probes having the nucleotide sequence represented by SEQ ID NOS: 147984, 147985, 147986, 147987, 147988, 147989, 147990, 147991, 147992, 147993, 147994 were selected from the ORFs having the nucleotide sequence represented by SEQ ID NO: 81163.

[12565] The probes having the nucleotide sequence represented by SEQ ID NOS: 147995, 147996, 147997, 147998, 147999, 148000, 148001, 148002, 148003, 148004, 148005 were selected from the ORFs having the nucleotide sequence represented by SEQ ID NO: 81164.

[12566] The probes having the nucleotide sequence represented by SEQ ID NOS: 148006, 148007, 148008, 148009, 148010, 148011, 148012, 148013, 148014, 148015, 148016 were selected from the ORFs having the nucleotide sequence represented by SEQ ID NO: 81165.

[12567] The probes having the nucleotide sequence represented by SEQ ID NOS: 148017, 148018, 148019, 148020, 148021, 148022, 148023, 148024, 148025, 148026, 148027 were selected from the ORFs having the nucleotide sequence represented by SEQ ID NO: 81166.

[12568] The probes having the nucleotide sequence represented by SEQ ID NOS: 148028, 148029, 148030, 148031, 148032, 148033, 148034, 148035, 148036, 148037, 148038 were selected from the ORFs having the nucleotide sequence represented by SEQ ID NO: 81167.

[12569] The probes having the nucleotide sequence represented by SEQ ID NOS: 148039, 148040, 148041, 148042, 148043, 148044, 148045, 148046, 148047, 148048, 148049 were selected from the ORFs having the nucleotide sequence represented by SEQ ID NO: 81168.

[12570] The probes having the nucleotide sequence represented by SEQ ID NOS: 148050, 148051, 148052, 148053, 148054, 148055, 148056, 148057, 148058, 148059, 148060 were selected from the ORFs having the nucleotide sequence represented by SEQ ID NO: 81169.

[12571] The probes having the nucleotide sequence represented by SEQ ID NOS: 148061, 148062, 148063, 148064, 148065, 148066, 148067, 148068, 148069, 148070, 148071 were selected from the ORFs having the nucleotide sequence represented by SEQ ID NO: 81170.

[12572] The probes having the nucleotide sequence represented by SEQ ID NOS: 148072, 148073, 148074, 148075, 148076, 148077, 148078, 148079, 148080, 148081, 148082 were selected from the ORFs having the nucleotide sequence represented by SEQ ID NO: 81171.

[12573] The probes having the nucleotide sequence represented by SEQ ID NOS: 148083, 148084, 148085, 148086, 148087, 148088, 148089, 148090, 148091, 148092, 148093 were selected from the ORFs having the nucleotide sequence represented by SEQ ID NO: 81172.

[12574] The probes having the nucleotide sequence represented by SEQ ID NOS: 148094, 148095, 148096, 148097, 148098, 148099, 148100, 148101, 148102, 148103, 148104 were selected from the ORFs having the nucleotide sequence represented by SEQ ID NO: 81173.

[12575] The probes having the nucleotide sequence represented by SEQ ID NOS: 148105, 148106, 148107, 148108, 148109, 148110, 148111, 148112, 148113, 148114, 148115 were selected from the ORFs having the nucleotide sequence represented by SEQ ID NO: 81174.

[12576] The probes having the nucleotide sequence represented by SEQ ID NOS: 148116, 148117, 148118, 148119, 148120, 148121, 148122, 148123, 148124, 148125, 148126 were selected from the ORFs having the nucleotide sequence represented by SEQ ID NO: 81175.

[12577] The probes having the nucleotide sequence represented by SEQ ID NOS: 148127, 148128, 148129, 148130, 148131, 148132, 148133, 148134, 148135, 148136, 148137 were selected from the ORFs having the nucleotide sequence represented by SEQ ID NO: 81176.

[12578] The probes having the nucleotide sequence represented by SEQ ID NOS: 148138, 148139, 148140, 148141, 148142, 148143, 148144, 148145, 148146, 148147, 148148 were selected from the ORFs having the nucleotide sequence represented by SEQ ID NO: 81177.

[12579] The probes having the nucleotide sequence represented by SEQ ID NOS: 148149, 148150, 148151, 148152, 148153, 148154, 148155, 148156, 148157, 148158, 148159 were selected from the ORFs having the nucleotide sequence represented by SEQ ID NO: 81178.

[12580] The probes having the nucleotide sequence represented by SEQ ID NOS: 148160, 148161, 148162, 148163, 148164, 148165, 148166, 148167, 148168, 148169, 148170 were selected from the ORFs having the nucleotide sequence represented by SEQ ID NO: 81179.

[12581] The probes having the nucleotide sequence represented by SEQ ID NOS: 148171, 148172, 148173, 148174, 148175, 148176, 148177, 148178, 148179, 148180, 148181 were selected from the ORFs having the nucleotide sequence represented by SEQ ID NO: 81180.

[12582] The probes having the nucleotide sequence represented by SEQ ID NOS: 148182, 148183, 148184, 148185, 148186, 148187, 148188, 148189, 148190, 148191, 148192 were selected from the ORFs having the nucleotide sequence represented by SEQ ID NO: 81181.

[12583] The probes having the nucleotide sequence represented by SEQ ID NOS: 148193, 148194, 148195, 148196, 148197, 148198, 148199, 148200, 148201, 148202, 148203 were selected from the ORFs having the nucleotide sequence represented by SEQ ID NO: 81182.

[12584] The probes having the nucleotide sequence represented by SEQ ID NOS: 148204, 148205, 148206, 148207, 148208, 148209, 148210, 148211, 148212, 148213, 148214 were selected from the ORFs having the nucleotide sequence represented by SEQ ID NO: 81183.

[12585] The probes having the nucleotide sequence represented by SEQ ID NOS: 148215, 148216, 148217, 148218, 148219, 148220, 148221, 148222, 148223, 148224, 148225 were selected from the ORFs having the nucleotide sequence represented by SEQ ID NO: 81184.

[12586] The probes having the nucleotide sequence represented by SEQ ID NOS: 148226, 148227, 148228, 148229, 148230, 148231, 148232, 148233, 148234, 148235, 148236 were selected from the ORFs having the nucleotide sequence represented by SEQ ID NO: 81185.

[12587] The probes having the nucleotide sequence represented by SEQ ID NOS: 148237, 148238, 148239, 148240, 148241, 148242, 148243, 148244, 148245, 148246, 148247 were selected from the ORFs having the nucleotide sequence represented by SEQ ID NO: 81186.

[12588] The probes having the nucleotide sequence represented by SEQ ID NOS: 148248, 148249, 148250, 148251, 148252, 148253, 148254, 148255, 148256, 148257, 148258 were selected from the ORFs having the nucleotide sequence represented by SEQ ID NO: 81187.

[12589] The probes having the nucleotide sequence represented by SEQ ID NOS: 148259, 148260, 148261, 148262, 148263, 148264, 148265, 148266, 148267, 148268, 148269 were selected from the ORFs having the nucleotide sequence represented by SEQ ID NO: 81188.

[12590] The probes having the nucleotide sequence represented by SEQ ID NOS: 148270, 148271, 148272, 148273, 148274, 148275, 148276, 148277, 148278, 148279, 148280 were selected from the ORFs having the nucleotide sequence represented by SEQ ID NO: 81189.

[12591] The probes having the nucleotide sequence represented by SEQ ID NOS: 148281, 148282, 148283, 148284, 148285, 148286, 148287, 148288, 148289, 148290, 148291 were selected from the ORFs having the nucleotide sequence represented by SEQ ID NO: 81190.

[12592] The probes having the nucleotide sequence represented by SEQ ID NOS: 148292, 148293, 148294, 148295, 148296, 148297, 148298, 148299, 148300, 148301, 148302 were selected from the ORFs having the nucleotide sequence represented by SEQ ID NO: 81191.

[12593] The probes having the nucleotide sequence represented by SEQ ID NOS: 148303, 148304, 148305, 148306, 148307, 148308, 148309, 148310, 148311, 148312, 148313 were selected from the ORFs having the nucleotide sequence represented by SEQ ID NO: 81192.

[12594] The probes having the nucleotide sequence represented by SEQ ID NOS: 148314, 148315, 148316, 148317, 148318, 148319, 148320, 148321, 148322, 148323, 148324 were selected from the ORFs having the nucleotide sequence represented by SEQ ID NO: 81193.

[12595] The probes having the nucleotide sequence represented by SEQ ID NOS: 148325, 148326, 148327, 148328, 148329, 148330, 148331, 148332, 148333, 148334, 148335 were selected from the ORFs having the nucleotide sequence represented by SEQ ID NO: 81194.

[12596] The probes having the nucleotide sequence represented by SEQ ID NOS: 148336, 148337, 148338, 148339, 148340, 148341, 148342, 148343, 148344, 148345, 148346 were selected from the ORFs having the nucleotide sequence represented by SEQ ID NO: 81195.

[12597] The probes having the nucleotide sequence represented by SEQ ID NOS: 148347, 148348, 148349, 148350, 148351, 148352, 148353, 148354, 148355, 148356, 148357 were selected from the ORFs having the nucleotide sequence represented by SEQ ID NO: 81196.

[12598] The probes having the nucleotide sequence represented by SEQ ID NOS: 148358, 148359, 148360, 148361, 148362, 148363, 148364, 148365, 148366, 148367, 148368 were selected from the ORFs having the nucleotide sequence represented by SEQ ID NO: 81197.

[12599] The probes having the nucleotide sequence represented by SEQ ID NOS: 148369, 148370, 148371, 148372, 148373, 148374, 148375, 148376, 148377, 148378, 148379 were selected from the ORFs having the nucleotide sequence represented by SEQ ID NO: 81198.

[12600] The probes having the nucleotide sequence represented by SEQ ID NOS: 148380, 148381, 148382, 148383, 148384, 148385, 148386, 148387, 148388, 148389, 148390 were selected from the ORFs having the nucleotide sequence represented by SEQ ID NO: 81199.

[12601] The probes having the nucleotide sequence represented by SEQ ID NOS: 148391, 148392, 148393, 148394, 148395, 148396, 148397, 148398, 148399, 148400, 148401 were selected from the ORFs having the nucleotide sequence represented by SEQ ID NO: 81200.

[12602] The probes having the nucleotide sequence represented by SEQ ID NOS: 148402, 148403, 148404, 148405, 148406, 148407, 148408, 148409, 148410, 148411, 148412 were selected from the ORFs having the nucleotide sequence represented by SEQ ID NO: 81201.

[12603] The probes having the nucleotide sequence represented by SEQ ID NOS: 148413, 148414, 148415, 148416, 148417, 148418, 148419, 148420, 148421, 148422, 148423 were selected from the ORFs having the nucleotide sequence represented by SEQ ID NO: 81202.

[12604] The probes having the nucleotide sequence represented by SEQ ID NOS: 148424, 148425, 148426, 148427, 148428, 148429, 148430, 148431, 148432, 148433, 148434 were selected from the ORFs having the nucleotide sequence represented by SEQ ID NO: 81203.

[12605] The probes having the nucleotide sequence represented by SEQ ID NOS: 148435, 148436, 148437, 148438, 148439, 148440, 148441, 148442, 148443, 148444, 148445 were selected from the ORFs having the nucleotide sequence represented by SEQ ID NO: 81204.

[12606] The probes having the nucleotide sequence represented by SEQ ID NOS: 148446, 148447, 148448, 148449, 148450, 148451, 148452, 148453, 148454, 148455, 148456 were selected from the ORFs having the nucleotide sequence represented by SEQ ID NO: 81205.

[12607] The probes having the nucleotide sequence represented by SEQ ID NOS: 148457, 148458, 148459, 148460, 148461, 148462, 148463, 148464, 148465, 148466, 148467 were selected from the ORFs having the nucleotide sequence represented by SEQ ID NO: 81206.

[12608] The probes having the nucleotide sequence represented by SEQ ID NOS: 148468, 148469, 148470, 148471, 148472, 148473, 148474, 148475, 148476, 148477, 148478 were selected from the ORFs having the nucleotide sequence represented by SEQ ID NO: 81207.

[12609] The probes having the nucleotide sequence represented by SEQ ID NOS: 148479, 148480, 148481, 148482, 148483, 148484, 148485, 148486, 148487, 148488, 148489 were selected from the ORFs having the nucleotide sequence represented by SEQ ID NO: 81208.

[12610] The probes having the nucleotide sequence represented by SEQ ID NOS: 148490, 148491, 148492, 148493, 148494, 148495, 148496, 148497, 148498, 148499, 148500 were selected from the ORFs having the nucleotide sequence represented by SEQ ID NO: 81209.

[12611] The probes having the nucleotide sequence represented by SEQ ID NOS: 148501, 148502, 148503, 148504, 148505, 148506, 148507, 148508, 148509, 148510, 148511 were selected from the ORFs having the nucleotide sequence represented by SEQ ID NO: 81210.

[12612] The probes having the nucleotide sequence represented by SEQ ID NOS: 148512, 148513, 148514, 148515, 148516, 148517, 148518, 148519, 148520, 148521, 148522 were selected from the ORFs having the nucleotide sequence represented by SEQ ID NO: 81211.

[12613] The probes having the nucleotide sequence represented by SEQ ID NOS: 148523, 148524, 148525, 148526, 148527, 148528, 148529, 148530, 148531, 148532, 148533 were selected from the ORFs having the nucleotide sequence represented by SEQ ID NO: 81212.

[12614] The probes having the nucleotide sequence represented by SEQ ID NOS: 148534, 148535, 148536, 148537, 148538, 148539, 148540, 148541, 148542, 148543, 148544 were selected from the ORFs having the nucleotide sequence represented by SEQ ID NO: 81213.

[12615] The probes having the nucleotide sequence represented by SEQ ID NOS: 148545, 148546, 148547, 148548, 148549, 148550, 148551, 148552, 148553, 148554, 148555 were selected from the ORFs having the nucleotide sequence represented by SEQ ID NO: 81214.

[12616] The probes having the nucleotide sequence represented by SEQ ID NOS: 148556, 148557, 148558, 148559, 148560, 148561, 148562, 148563, 148564, 148565, 148566 were selected from the ORFs having the nucleotide sequence represented by SEQ ID NO: 81215.

[12617] The probes having the nucleotide sequence represented by SEQ ID NOS: 148567, 148568, 148569, 148570, 148571, 148572, 148573, 148574, 148575, 148576, 148577 were selected from the ORFs having the nucleotide sequence represented by SEQ ID NO: 81216.

[12618] The probes having the nucleotide sequence represented by SEQ ID NOS: 148578, 148579, 148580, 148581, 148582, 148583, 148584, 148585, 148586, 148587, 148588 were selected from the ORFs having the nucleotide sequence represented by SEQ ID NO: 81217.

[12619] The probes having the nucleotide sequence represented by SEQ ID NOS: 148589, 148590, 148591, 148592, 148593, 148594, 148595, 148596, 148597, 148598, 148599 were selected from the ORFs having the nucleotide sequence represented by SEQ ID NO: 81218.

[12620] The probes having the nucleotide sequence represented by SEQ ID NOS: 148600, 148601, 148602, 148603, 148604, 148605, 148606, 148607, 148608, 148609, 148610 were selected from the ORFs having the nucleotide sequence represented by SEQ ID NO: 81219.

[12621] The probes having the nucleotide sequence represented by SEQ ID NOS: 148611, 148612, 148613, 148614, 148615, 148616, 148617, 148618, 148619, 148620, 148621 were selected from the ORFs having the nucleotide sequence represented by SEQ ID NO: 81220.

[12622] The probes having the nucleotide sequence represented by SEQ ID NOS: 148622, 148623, 148624, 148625, 148626, 148627, 148628, 148629, 148630, 148631, 148632 were selected from the ORFs having the nucleotide sequence represented by SEQ ID NO: 81221.

[12623] The probes having the nucleotide sequence represented by SEQ ID NOS: 148633, 148634, 148635, 148636, 148637, 148638, 148639, 148640, 148641, 148642, 148643 were selected from the ORFs having the nucleotide sequence represented by SEQ ID NO: 81222.

[12624] The probes having the nucleotide sequence represented by SEQ ID NOS: 148644, 148645, 148646, 148647, 148648, 148649, 148650, 148651, 148652, 148653, 148654 were selected from the ORFs having the nucleotide sequence represented by SEQ ID NO: 81223.

[12625] The probes having the nucleotide sequence represented by SEQ ID NOS: 148655, 148656, 148657, 148658, 148659, 148660, 148661, 148662, 148663, 148664, 148665 were selected from the ORFs having the nucleotide sequence represented by SEQ ID NO: 81224.

[12626] The probes having the nucleotide sequence represented by SEQ ID NOS: 148666, 148667, 148668, 148669, 148670, 148671, 148672, 148673, 148674, 148675, 148676 were selected from the ORFs having the nucleotide sequence represented by SEQ ID NO: 81225.

[12627] The probes having the nucleotide sequence represented by SEQ ID NOS: 148677, 148678, 148679, 148680, 148681, 148682, 148683, 148684, 148685, 148686, 148687 were selected from the ORFs having the nucleotide sequence represented by SEQ ID NO: 81226.

[12628] The probes having the nucleotide sequence represented by SEQ ID NOS: 148688, 148689, 148690, 148691, 148692, 148693, 148694, 148695, 148696, 148697, 148698 were selected from the ORFs having the nucleotide sequence represented by SEQ ID NO: 81227.

[12629] The probes having the nucleotide sequence represented by SEQ ID NOS: 148699, 148700, 148701, 148702, 148703, 148704, 148705, 148706, 148707, 148708, 148709 were selected from the ORFs having the nucleotide sequence represented by SEQ ID NO: 81228.

[12630] The probes having the nucleotide sequence represented by SEQ ID NOS: 148710, 148711, 148712, 148713, 148714, 148715, 148716, 148717, 148718, 148719, 148720 were selected from the ORFs having the nucleotide sequence represented by SEQ ID NO: 81229.

[12631] The probes having the nucleotide sequence represented by SEQ ID NOS: 148721, 148722, 148723, 148724, 148725, 148726, 148727, 148728, 148729, 148730, 148731 were selected from the ORFs having the nucleotide sequence represented by SEQ ID NO: 81230.

[12632] The probes having the nucleotide sequence represented by SEQ ID NOS: 148732, 148733, 148734, 148735, 148736, 148737, 148738, 148739, 148740, 148741, 148742 were selected from the ORFs having the nucleotide sequence represented by SEQ ID NO: 81231.

[12633] The probes having the nucleotide sequence represented by SEQ ID NOS: 148743, 148744, 148745, 148746, 148747, 148748, 148749, 148750, 148751, 148752, 148753 were selected from the ORFs having the nucleotide sequence represented by SEQ ID NO: 81232.

[12634] The probes having the nucleotide sequence represented by SEQ ID NOS: 148754, 148755, 148756, 148757, 148758, 148759, 148760, 148761, 148762, 148763, 148764 were selected from the ORFs having the nucleotide sequence represented by SEQ ID NO: 81233.

[12635] The probes having the nucleotide sequence represented by SEQ ID NOS: 148765, 148766, 148767, 148768, 148769, 148770, 148771, 148772, 148773, 148774, 148775 were selected from the ORFs having the nucleotide sequence represented by SEQ ID NO: 81234.

[12636] The probes having the nucleotide sequence represented by SEQ ID NOS: 148776, 148777, 148778, 148779, 148780, 148781, 148782, 148783, 148784, 148785, 148786 were selected from the ORFs having the nucleotide sequence represented by SEQ ID NO: 81235.

[12637] The probes having the nucleotide sequence represented by SEQ ID NOS: 148787, 148788, 148789, 148790, 148791, 148792, 148793, 148794, 148795, 148796, 148797 were selected from the ORFs having the nucleotide sequence represented by SEQ ID NO: 81236.

[12638] The probes having the nucleotide sequence represented by SEQ ID NOS: 148798, 148799, 148800, 148801, 148802, 148803, 148804, 148805, 148806, 148807, 148808 were selected from the ORFs having the nucleotide sequence represented by SEQ ID NO: 81237.

[12639] The probes having the nucleotide sequence represented by SEQ ID NOS: 148809, 148810, 148811, 148812, 148813, 148814, 148815, 148816, 148817, 148818, 148819 were selected from the ORFs having the nucleotide sequence represented by SEQ ID NO: 81238.

[12640] The probes having the nucleotide sequence represented by SEQ ID NOS: 148820, 148821, 148822, 148823, 148824, 148825, 148826, 148827, 148828, 148829, 148830 were selected from the ORFs having the nucleotide sequence represented by SEQ ID NO: 81239.

[12641] The probes having the nucleotide sequence represented by SEQ ID NOS: 148831, 148832, 148833, 148834, 148835, 148836, 148837, 148838, 148839, 148840, 148841 were selected from the ORFs having the nucleotide sequence represented by SEQ ID NO: 81240.

[12642] The probes having the nucleotide sequence represented by SEQ ID NOS: 148842, 148843, 148844, 148845, 148846, 148847, 148848, 148849, 148850, 148851, 148852 were selected from the ORFs having the nucleotide sequence represented by SEQ ID NO: 81241.

[12643] The probes having the nucleotide sequence represented by SEQ ID NOS: 148853, 148854, 148855, 148856, 148857, 148858, 148859, 148860, 148861, 148862, 148863 were selected from the ORFs having the nucleotide sequence represented by SEQ ID NO: 81242.

[12644] The probes having the nucleotide sequence represented by SEQ ID NOS: 148864, 148865, 148866, 148867, 148868, 148869, 148870, 148871, 148872, 148873, 148874 were selected from the ORFs having the nucleotide sequence represented by SEQ ID NO: 81243.

[12645] The probes having the nucleotide sequence represented by SEQ ID NOS: 148875, 148876, 148877, 148878, 148879, 148880, 148881, 148882, 148883, 148884, 148885 were selected from the ORFs having the nucleotide sequence represented by SEQ ID NO: 81244.

[12646] The probes having the nucleotide sequence represented by SEQ ID NOS: 148886, 148887, 148888, 148889, 148890, 148891, 148892, 148893, 148894, 148895, 148896 were selected from the ORFs having the nucleotide sequence represented by SEQ ID NO: 81245.

[12647] The probes having the nucleotide sequence represented by SEQ ID NOS: 148897, 148898, 148899, 148900, 148901, 148902, 148903, 148904, 148905, 148906, 148907 were selected from the ORFs having the nucleotide sequence represented by SEQ ID NO: 81246.

[12648] The probes having the nucleotide sequence represented by SEQ ID NOS: 148908, 148909, 148910, 148911, 148912, 148913, 148914, 148915, 148916, 148917, 148918 were selected from the ORFs having the nucleotide sequence represented by SEQ ID NO: 81247.

[12649] The probes having the nucleotide sequence represented by SEQ ID NOS: 148919, 148920, 148921, 148922, 148923, 148924, 148925, 148926, 148927, 148928, 148929 were selected from the ORFs having the nucleotide sequence represented by SEQ ID NO: 81248.

[12650] The probes having the nucleotide sequence represented by SEQ ID NOS: 148930, 148931, 148932, 148933, 148934, 148935, 148936, 148937, 148938, 148939, 148940 were selected from the ORFs having the nucleotide sequence represented by SEQ ID NO: 81249.

[12651] The probes having the nucleotide sequence represented by SEQ ID NOS: 148941, 148942, 148943, 148944, 148945, 148946, 148947, 148948, 148949, 148950, 148951 were selected from the ORFs having the nucleotide sequence represented by SEQ ID NO: 81250.

[12652] The probes having the nucleotide sequence represented by SEQ ID NOS: 148952, 148953, 148954, 148955, 148956, 148957, 148958, 148959, 148960, 148961, 148962 were selected from the ORFs having the nucleotide sequence represented by SEQ ID NO: 81251.

[12653] The probes having the nucleotide sequence represented by SEQ ID NOS: 148963, 148964, 148965, 148966, 148967, 148968, 148969, 148970, 148971, 148972, 148973 were selected from the ORFs having the nucleotide sequence represented by SEQ ID NO: 81252.

[12654] The probes having the nucleotide sequence represented by SEQ ID NOS: 148974, 148975, 148976, 148977, 148978, 148979, 148980, 148981, 148982, 148983, 148984 were selected from the ORFs having the nucleotide sequence represented by SEQ ID NO: 81253.

[12655] The probes having the nucleotide sequence represented by SEQ ID NOS: 148985, 148986, 148987, 148988, 148989, 148990, 148991, 148992, 148993, 148994, 148995 were selected from the ORFs having the nucleotide sequence represented by SEQ ID NO: 81254.

[12656] The probes having the nucleotide sequence represented by SEQ ID NOS: 148996, 148997, 148998, 148999, 149000, 149001, 149002, 149003, 149004, 149005, 149006 were selected from the ORFs having the nucleotide sequence represented by SEQ ID NO: 81255.

[12657] The probes having the nucleotide sequence represented by SEQ ID NOS: 149007, 149008, 149009, 149010, 149011, 149012, 149013, 149014, 149015, 149016, 149017 were selected from the ORFs having the nucleotide sequence represented by SEQ ID NO: 81256.

[12658] The probes having the nucleotide sequence represented by SEQ ID NOS: 149018, 149019, 149020, 149021, 149022, 149023, 149024, 149025, 149026, 149027, 149028 were selected from the ORFs having the nucleotide sequence represented by SEQ ID NO: 81257.

[12659] The probes having the nucleotide sequence represented by SEQ ID NOS: 149029, 149030, 149031, 149032, 149033, 149034, 149035, 149036, 149037, 149038, 149039 were selected from the ORFs having the nucleotide sequence represented by SEQ ID NO: 81258.

[12660] The probes having the nucleotide sequence represented by SEQ ID NOS: 149040, 149041, 149042, 149043, 149044, 149045, 149046, 149047, 149048, 149049, 149050 were selected from the ORFs having the nucleotide sequence represented by SEQ ID NO: 81259.

[12661] The probes having the nucleotide sequence represented by SEQ ID NOS: 149051, 149052, 149053, 149054, 149055, 149056, 149057, 149058, 149059, 149060, 149061 were selected from the ORFs having the nucleotide sequence represented by SEQ ID NO: 81260.

[12662] The probes having the nucleotide sequence represented by SEQ ID NOS: 149062, 149063, 149064, 149065, 149066, 149067, 149068, 149069, 149070, 149071 were selected from the ORFs having the nucleotide sequence represented by SEQ ID NO: 81261.

[12663] The probes having the nucleotide sequence represented by SEQ ID NOS: 149072, 149073, 149074, 149075, 149076, 149077, 149078, 149079, 149080, 149081, 149082 were selected from the ORFs having the nucleotide sequence represented by SEQ ID NO: 81262.

[12664] The probes having the nucleotide sequence represented by SEQ ID NOS: 149083, 149084, 149085, 149086, 149087, 149088, 149089, 149090, 149091, 149092, 149093 were selected from the ORFs having the nucleotide sequence represented by SEQ ID NO: 81263.

[12665] The probes having the nucleotide sequence represented by SEQ ID NOS: 149094, 149095, 149096, 149097, 149098, 149099, 149100, 149101, 149102, 149103, 149104 were selected from the ORFs having the nucleotide sequence represented by SEQ ID NO: 81264.

[12666] The probes having the nucleotide sequence represented by SEQ ID NOS: 149105, 149106, 149107, 149108, 149109, 149110, 149111, 149112, 149113, 149114, 149115 were selected from the ORFs having the nucleotide sequence represented by SEQ ID NO: 81265.

[12667] The probes having the nucleotide sequence represented by SEQ ID NOS: 149116, 149117, 149118, 149119, 149120, 149121, 149122, 149123, 149124, 149125, 149126 were selected from the ORFs having the nucleotide sequence represented by SEQ ID NO: 81266.

[12668] The probes having the nucleotide sequence represented by SEQ ID NOS: 149127, 149128, 149129, 149130, 149131, 149132, 149133, 149134, 149135, 149136, 149137 were selected from the ORFs having the nucleotide sequence represented by SEQ ID NO: 81267.

[12669] The probes having the nucleotide sequence represented by SEQ ID NOS: 149138, 149139, 149140, 149141, 149142, 149143, 149144, 149145, 149146, 149147, 149148 were selected from the ORFs having the nucleotide sequence represented by SEQ ID NO: 81268.

[12670] The probes having the nucleotide sequence represented by SEQ ID NOS: 149149, 149150, 149151, 149152, 149153, 149154, 149155, 149156, 149157, 149158, 149159 were selected from the ORFs having the nucleotide sequence represented by SEQ ID NO: 81269.

[12671] The probes having the nucleotide sequence represented by SEQ ID NOS: 149160, 149161, 149162, 149163, 149164, 149165, 149166, 149167, 149168, 149169, 149170 were selected from the ORFs having the nucleotide sequence represented by SEQ ID NO: 81270.

[12672] The probes having the nucleotide sequence represented by SEQ ID NOS: 149171, 149172, 149173, 149174, 149175, 149176, 149177, 149178, 149179, 149180, 149181 were selected from the ORFs having the nucleotide sequence represented by SEQ ID NO: 81271.

[12673] The probes having the nucleotide sequence represented by SEQ ID NOS: 149182, 149183, 149184, 149185, 149186, 149187, 149188, 149189, 149190, 149191, 149192 were selected from the ORFs having the nucleotide sequence represented by SEQ ID NO: 81272.

[12674] The probes having the nucleotide sequence represented by SEQ ID NOS: 149193, 149194, 149195, 149196, 149197, 149198, 149199, 149200, 149201, 149202, 149203 were selected from the ORFs having the nucleotide sequence represented by SEQ ID NO: 81273.

[12675] The probes having the nucleotide sequence represented by SEQ ID NOS: 149204, 149205, 149206, 149207, 149208, 149209, 149210, 149211, 149212, 149213, 149214 were selected from the ORFs having the nucleotide sequence represented by SEQ ID NO: 81274.

[12676] The probes having the nucleotide sequence represented by SEQ ID NOS: 149215, 149216, 149217, 149218, 149219, 149220, 149221, 149222, 149223, 149224, 149225 were selected from the ORFs having the nucleotide sequence represented by SEQ ID NO: 81275.

[12677] The probes having the nucleotide sequence represented by SEQ ID NOS: 149226, 149227, 149228, 149229, 149230, 149231, 149232, 149233, 149234, 149235, 149236 were selected from the ORFs having the nucleotide sequence represented by SEQ ID NO: 81276.

[12678] The probes having the nucleotide sequence represented by SEQ ID NOS: 149237, 149238, 149239, 149240, 149241, 149242, 149243, 149244, 149245, 149246, 149247 were selected from the ORFs having the nucleotide sequence represented by SEQ ID NO: 81277.

[12679] The probes having the nucleotide sequence represented by SEQ ID NOS: 149248, 149249, 149250, 149251, 149252, 149253, 149254, 149255, 149256, 149257, 149258 were selected from the ORFs having the nucleotide sequence represented by SEQ ID NO: 81278.

[12680] The probes having the nucleotide sequence represented by SEQ ID NOS: 149259, 149260, 149261, 149262, 149263, 149264, 149265, 149266, 149267, 149268, 149269 were selected from the ORFs having the nucleotide sequence represented by SEQ ID NO: 81279.

[12681] The probes having the nucleotide sequence represented by SEQ ID NOS: 149270, 149271, 149272, 149273, 149274, 149275, 149276, 149277, 149278, 149279, 149280 were selected from the ORFs having the nucleotide sequence represented by SEQ ID NO: 81280.

[12682] The probes having the nucleotide sequence represented by SEQ ID NOS: 149281, 149282, 149283, 149284, 149285, 149286, 149287, 149288, 149289, 149290, 149291 were selected from the ORFs having the nucleotide sequence represented by SEQ ID NO: 81281.

[12683] The probes having the nucleotide sequence represented by SEQ ID NOS: 149292, 149293, 149294, 149295, 149296, 149297, 149298, 149299, 149300, 149301, 149302 were selected from the ORFs having the nucleotide sequence represented by SEQ ID NO: 81282.

[12684] The probes having the nucleotide sequence represented by SEQ ID NOS: 149303, 149304, 149305, 149306, 149307, 149308, 149309, 149310, 149311, 149312, 149313 were selected from the ORFs having the nucleotide sequence represented by SEQ ID NO: 81283.

[12685] The probes having the nucleotide sequence represented by SEQ ID NOS: 149314, 149315, 149316, 149317, 149318, 149319, 149320, 149321, 149322, 149323, 149324 were selected from the ORFs having the nucleotide sequence represented by SEQ ID NO: 81284.

[12686] The probes having the nucleotide sequence represented by SEQ ID NOS: 149325, 149326, 149327, 149328, 149329, 149330, 149331, 149332, 149333, 149334, 149335 were selected from the ORFs having the nucleotide sequence represented by SEQ ID NO: 81285.

[12687] The probes having the nucleotide sequence represented by SEQ ID NOS: 149336, 149337, 149338, 149339, 149340, 149341, 149342, 149343, 149344, 149345, 149346 were selected from the ORFs having the nucleotide sequence represented by SEQ ID NO: 81286.

[12688] The probes having the nucleotide sequence represented by SEQ ID NOS: 149347, 149348, 149349, 149350, 149351, 149352, 149353, 149354, 149355, 149356, 149357 were selected from the ORFs having the nucleotide sequence represented by SEQ ID NO: 81287.

[12689] The probes having the nucleotide sequence represented by SEQ ID NOS: 149358, 149359, 149360, 149361, 149362, 149363, 149364, 149365, 149366, 149367, 149368 were selected from the ORFs having the nucleotide sequence represented by SEQ ID NO: 81288.

[12690] The probes having the nucleotide sequence represented by SEQ ID NOS: 149369, 149370, 149371, 149372, 149373, 149374, 149375, 149376, 149377, 149378, 149379 were selected from the ORFs having the nucleotide sequence represented by SEQ ID NO: 81289.

[12691] The probes having the nucleotide sequence represented by SEQ ID NOS: 149380, 149381, 149382, 149383, 149384, 149385, 149386, 149387, 149388, 149389, 149390 were selected from the ORFs having the nucleotide sequence represented by SEQ ID NO: 81290.

[12692] The probes having the nucleotide sequence represented by SEQ ID NOS: 149391, 149392, 149393, 149394, 149395, 149396, 149397, 149398, 149399, 149400, 149401 were selected from the ORFs having the nucleotide sequence represented by SEQ ID NO: 81291.

[12693] The probes having the nucleotide sequence represented by SEQ ID NOS: 149402, 149403, 149404, 149405, 149406, 149407, 149408, 149409, 149410, 149411, 149412 were selected from the ORFs having the nucleotide sequence represented by SEQ ID NO: 81292.

[12694] The probes having the nucleotide sequence represented by SEQ ID NOS: 149413, 149414, 149415, 149416, 149417, 149418, 149419, 149420, 149421, 149422, 149423 were selected from the ORFs having the nucleotide sequence represented by SEQ ID NO: 81293.

[12695] The probes having the nucleotide sequence represented by SEQ ID NOS: 149424, 149425, 149426, 149427, 149428, 149429, 149430, 149431, 149432, 149433, 149434 were selected from the ORFs having the nucleotide sequence represented by SEQ ID NO: 81294.

[12696] The probes having the nucleotide sequence represented by SEQ ID NOS: 149435, 149436, 149437, 149438, 149439, 149440, 149441, 149442, 149443, 149444, 149445 were selected from the ORFs having the nucleotide sequence represented by SEQ ID NO: 81295.

[12697] The probes having the nucleotide sequence represented by SEQ ID NOS: 149446, 149447, 149448, 149449, 149450, 149451, 149452, 149453, 149454, 149455, 149456 were selected from the ORFs having the nucleotide sequence represented by SEQ ID NO: 81296.

[12698] The probes having the nucleotide sequence represented by SEQ ID NOS: 149457, 149458, 149459, 149460, 149461, 149462, 149463, 149464, 149465, 149466, 149467 were selected from the ORFs having the nucleotide sequence represented by SEQ ID NO: 81297.

[12699] The probes having the nucleotide sequence represented by SEQ ID NOS: 149468, 149469, 149470, 149471, 149472, 149473, 149474, 149475, 149476, 149477, 149478 were selected from the ORFs having the nucleotide sequence represented by SEQ ID NO: 81298.

[12700] The probes having the nucleotide sequence represented by SEQ ID NOS: 149479, 149480, 149481, 149482, 149483, 149484, 149485, 149486, 149487, 149488, 149489 were selected from the ORFs having the nucleotide sequence represented by SEQ ID NO: 81299.

[12701] The probes having the nucleotide sequence represented by SEQ ID NOS: 149490, 149491, 149492, 149493, 149494, 149495, 149496, 149497, 149498, 149499, 149500 were selected from the ORFs having the nucleotide sequence represented by SEQ ID NO: 81300.

[12702] The probes having the nucleotide sequence represented by SEQ ID NOS: 149501, 149502, 149503, 149504, 149505, 149506, 149507, 149508, 149509, 149510, 149511 were selected from the ORFs having the nucleotide sequence represented by SEQ ID NO: 81301.

[12703] The probes having the nucleotide sequence represented by SEQ ID NOS: 149512, 149513, 149514, 149515, 149516, 149517, 149518, 149519, 149520, 149521, 149522 were selected from the ORFs having the nucleotide sequence represented by SEQ ID NO: 81302.

[12704] The probes having the nucleotide sequence represented by SEQ ID NOS: 149523, 149524, 149525, 149526, 149527, 149528, 149529, 149530, 149531, 149532, 149533 were selected from the ORFs having the nucleotide sequence represented by SEQ ID NO: 81303.

[12705] The probes having the nucleotide sequence represented by SEQ ID NOS: 149534, 149535, 149536, 149537, 149538, 149539, 149540, 149541, 149542, 149543, 149544 were selected from the ORFs having the nucleotide sequence represented by SEQ ID NO: 81304.

[12706] The probes having the nucleotide sequence represented by SEQ ID NOS: 149545, 149546, 149547, 149548, 149549, 149550, 149551, 149552, 149553, 149554, 149555 were selected from the ORFs having the nucleotide sequence represented by SEQ ID NO: 81305.

[12707] The probes having the nucleotide sequence represented by SEQ ID NOS: 149556, 149557, 149558, 149559, 149560, 149561, 149562, 149563, 149564, 149565, 149566 were selected from the ORFs having the nucleotide sequence represented by SEQ ID NO: 81306.

[12708] The probes having the nucleotide sequence represented by SEQ ID NOS: 149567, 149568, 149569, 149570, 149571, 149572, 149573, 149574, 149575, 149576, 149577 were selected from the ORFs having the nucleotide sequence represented by SEQ ID NO: 81307.

[12709] The probes having the nucleotide sequence represented by SEQ ID NOS: 149578, 149579, 149580, 149581, 149582, 149583, 149584, 149585, 149586, 149587, 149588 were selected from the ORFs having the nucleotide sequence represented by SEQ ID NO: 81308.

[12710] The probes having the nucleotide sequence represented by SEQ ID NOS: 149589, 149590, 149591, 149592, 149593, 149594, 149595, 149596, 149597, 149598, 149599 were selected from the ORFs having the nucleotide sequence represented by SEQ ID NO: 81309.

[12711] The probes having the nucleotide sequence represented by SEQ ID NOS: 149600, 149601, 149602, 149603, 149604, 149605, 149606, 149607, 149608, 149609, 149610 were selected from the ORFs having the nucleotide sequence represented by SEQ ID NO: 81310.

[12712] The probes having the nucleotide sequence represented by SEQ ID NOS: 149611, 149612, 149613, 149614, 149615, 149616, 149617, 149618, 149619, 149620, 149621 were selected from the ORFs having the nucleotide sequence represented by SEQ ID NO: 81311.

[12713] The probes having the nucleotide sequence represented by SEQ ID NOS: 149622, 149623, 149624, 149625, 149626, 149627, 149628, 149629, 149630, 149631, 149632 were selected from the ORFs having the nucleotide sequence represented by SEQ ID NO: 81312.

[12714] The probes having the nucleotide sequence represented by SEQ ID NOS: 149633, 149634, 149635, 149636, 149637, 149638, 149639, 149640, 149641, 149642, 149643 were selected from the ORFs having the nucleotide sequence represented by SEQ ID NO: 81313.

[12715] The probes having the nucleotide sequence represented by SEQ ID NOS: 149644, 149645, 149646, 149647, 149648, 149649, 149650, 149651, 149652, 149653, 149654 were selected from the ORFs having the nucleotide sequence represented by SEQ ID NO: 81314.

[12716] The probes having the nucleotide sequence represented by SEQ ID NOS: 149655, 149656, 149657, 149658, 149659, 149660, 149661, 149662, 149663, 149664, 149665 were selected from the ORFs having the nucleotide sequence represented by SEQ ID NO: 81315.

[12717] The probes having the nucleotide sequence represented by SEQ ID NOS: 149666, 149667, 149668, 149669, 149670, 149671, 149672, 149673, 149674, 149675, 149676 were selected from the ORFs having the nucleotide sequence represented by SEQ ID NO: 81316.

[12718] The probes having the nucleotide sequence represented by SEQ ID NOS: 149677, 149678, 149679, 149680, 149681, 149682, 149683, 149684, 149685, 149686, 149687 were selected from the ORFs having the nucleotide sequence represented by SEQ ID NO: 81317.

[12719] The probes having the nucleotide sequence represented by SEQ ID NOS: 149688, 149689, 149690, 149691, 149692, 149693, 149694, 149695, 149696, 149697, 149698 were selected from the ORFs having the nucleotide sequence represented by SEQ ID NO: 81318.

[12720] The probes having the nucleotide sequence represented by SEQ ID NOS: 149699, 149700, 149701, 149702, 149703, 149704, 149705, 149706, 149707, 149708, 149709 were selected from the ORFs having the nucleotide sequence represented by SEQ ID NO: 81319.

[12721] The probes having the nucleotide sequence represented by SEQ ID NOS: 149710, 149711, 149712, 149713, 149714, 149715, 149716, 149717, 149718, 149719, 149720 were selected from the ORFs having the nucleotide sequence represented by SEQ ID NO: 81320.

[12722] The probes having the nucleotide sequence represented by SEQ ID NOS: 149721, 149722, 149723, 149724, 149725, 149726, 149727, 149728, 149729, 149730, 149731 were selected from the ORFs having the nucleotide sequence represented by SEQ ID NO: 81321.

[12723] The probes having the nucleotide sequence represented by SEQ ID NOS: 149732, 149733, 149734, 149735, 149736, 149737, 149738, 149739, 149740, 149741, 149742 were selected from the ORFs having the nucleotide sequence represented by SEQ ID NO: 81322.

[12724] The probes having the nucleotide sequence represented by SEQ ID NOS: 149743, 149744, 149745, 149746, 149747, 149748, 149749, 149750, 149751, 149752, 149753 were selected from the ORFs having the nucleotide sequence represented by SEQ ID NO: 81323.

[12725] The probes having the nucleotide sequence represented by SEQ ID NOS: 149754, 149755, 149756, 149757, 149758, 149759, 149760, 149761, 149762, 149763, 149764 were selected from the ORFs having the nucleotide sequence represented by SEQ ID NO: 81324.

[12726] The probes having the nucleotide sequence represented by SEQ ID NOS: 149765, 149766, 149767, 149768, 149769, 149770, 149771, 149772, 149773, 149774, 149775 were selected from the ORFs having the nucleotide sequence represented by SEQ ID NO: 81325.

[12727] The probes having the nucleotide sequence represented by SEQ ID NOS: 149776, 149777, 149778, 149779, 149780, 149781, 149782, 149783, 149784, 149785, 149786 were selected from the ORFs having the nucleotide sequence represented by SEQ ID NO: 81326.

[12728] The probes having the nucleotide sequence represented by SEQ ID NOS: 149787, 149788, 149789, 149790, 149791, 149792, 149793, 149794, 149795, 149796, 149797 were selected from the ORFs having the nucleotide sequence represented by SEQ ID NO: 81327.

[12729] The probes having the nucleotide sequence represented by SEQ ID NOS: 149798, 149799, 149800, 149801, 149802, 149803, 149804, 149805, 149806, 149807, 149808 were selected from the ORFs having the nucleotide sequence represented by SEQ ID NO: 81328.

[12730] The probes having the nucleotide sequence represented by SEQ ID NOS: 149809, 149810, 149811, 149812, 149813, 149814, 149815, 149816, 149817, 149818, 149819 were selected from the ORFs having the nucleotide sequence represented by SEQ ID NO: 81329.

[12731] The probes having the nucleotide sequence represented by SEQ ID NOS: 149820, 149821, 149822, 149823, 149824, 149825, 149826, 149827, 149828, 149829, 149830 were selected from the ORFs having the nucleotide sequence represented by SEQ ID NO: 81330.

[12732] The probes having the nucleotide sequence represented by SEQ ID NOS: 149831, 149832, 149833, 149834, 149835, 149836, 149837, 149838, 149839, 149840, 149841 were selected from the ORFs having the nucleotide sequence represented by SEQ ID NO: 81331.

[12733] The probes having the nucleotide sequence represented by SEQ ID NOS: 149842, 149843, 149844, 149845, 149846, 149847, 149848, 149849, 149850, 149851, 149852 were selected from the ORFs having the nucleotide sequence represented by SEQ ID NO: 81332.

[12734] The probes having the nucleotide sequence represented by SEQ ID NOS: 149853, 149854, 149855, 149856, 149857, 149858, 149859, 149860, 149861, 149862, 149863 were selected from the ORFs having the nucleotide sequence represented by SEQ ID NO: 81333.

[12735] The probes having the nucleotide sequence represented by SEQ ID NOS: 149864, 149865, 149866, 149867, 149868, 149869, 149870, 149871, 149872, 149873, 149874 were selected from the ORFs having the nucleotide sequence represented by SEQ ID NO: 81334.

[12736] The probes having the nucleotide sequence represented by SEQ ID NOS: 149875, 149876, 149877, 149878, 149879, 149880, 149881, 149882, 149883, 149884, 149885 were selected from the ORFs having the nucleotide sequence represented by SEQ ID NO: 81335.

[12737] The probes having the nucleotide sequence represented by SEQ ID NOS: 149886, 149887, 149888, 149889, 149890, 149891, 149892, 149893, 149894, 149895, 149896 were selected from the ORFs having the nucleotide sequence represented by SEQ ID NO: 81336.

[12738] The probes having the nucleotide sequence represented by SEQ ID NOS: 149897, 149898, 149899, 149900, 149901, 149902, 149903, 149904, 149905, 149906, 149907 were selected from the ORFs having the nucleotide sequence represented by SEQ ID NO: 81337.

[12739] The probes having the nucleotide sequence represented by SEQ ID NOS: 149908, 149909, 149910, 149911, 149912, 149913, 149914, 149915, 149916, 149917, 149918 were selected from the ORFs having the nucleotide sequence represented by SEQ ID NO: 81338.

[12740] The probes having the nucleotide sequence represented by SEQ ID NOS: 149919, 149920, 149921, 149922, 149923, 149924, 149925, 149926, 149927, 149928, 149929 were selected from the ORFs having the nucleotide sequence represented by SEQ ID NO: 81339.

[12741] The probes having the nucleotide sequence represented by SEQ ID NOS: 149930, 149931, 149932, 149933, 149934, 149935, 149936, 149937, 149938, 149939, 149940 were selected from the ORFs having the nucleotide sequence represented by SEQ ID NO: 81340.

[12742] The probes having the nucleotide sequence represented by SEQ ID NOS: 149941, 149942, 149943, 149944, 149945, 149946, 149947, 149948, 149949, 149950, 149951 were selected from the ORFs having the nucleotide sequence represented by SEQ ID NO: 81341.

[12743] The probes having the nucleotide sequence represented by SEQ ID NOS: 149952, 149953, 149954, 149955, 149956, 149957, 149958, 149959, 149960, 149961, 149962 were selected from the ORFs having the nucleotide sequence represented by SEQ ID NO: 81342.

[12744] The probes having the nucleotide sequence represented by SEQ ID NOS: 149963, 149964, 149965, 149966, 149967, 149968, 149969, 149970, 149971, 149972, 149973 were selected from the ORFs having the nucleotide sequence represented by SEQ ID NO: 81343.

[12745] The probes having the nucleotide sequence represented by SEQ ID NOS: 149974, 149975, 149976, 149977, 149978, 149979, 149980, 149981, 149982, 149983, 149984 were selected from the ORFs having the nucleotide sequence represented by SEQ ID NO: 81344.

[12746] The probes having the nucleotide sequence represented by SEQ ID NOS: 149985, 149986, 149987, 149988, 149989, 149990, 149991, 149992, 149993, 149994, 149995 were selected from the ORFs having the nucleotide sequence represented by SEQ ID NO: 81345.

[12747] The probes having the nucleotide sequence represented by SEQ ID NOS: 149996, 149997, 149998, 149999, 150000, 150001, 150002, 150003, 150004, 150005, 150006 were selected from the ORFs having the nucleotide sequence represented by SEQ ID NO: 81346.

[12748] The probes having the nucleotide sequence represented by SEQ ID NOS: 150007, 150008, 150009, 150010, 150011, 150012, 150013, 150014, 150015, 150016, 150017 were selected from the ORFs having the nucleotide sequence represented by SEQ ID NO: 81347.

[12749] The probes having the nucleotide sequence represented by SEQ ID NOS: 150018, 150019, 150020, 150021, 150022, 150023, 150024, 150025, 150026, 150027, 150028 were selected from the ORFs having the nucleotide sequence represented by SEQ ID NO: 81348.

[12750] The probes having the nucleotide sequence represented by SEQ ID NOS: 150029, 150030, 150031, 150032, 150033, 150034, 150035, 150036, 150037, 150038, 150039 were selected from the ORFs having the nucleotide sequence represented by SEQ ID NO: 81349.

[12751] The probes having the nucleotide sequence represented by SEQ ID NOS: 150040, 150041, 150042, 150043, 150044, 150045, 150046, 150047, 150048, 150049, 150050 were selected from the ORFs having the nucleotide sequence represented by SEQ ID NO: 81350.

[12752] The probes having the nucleotide sequence represented by SEQ ID NOS: 150051, 150052, 150053, 150054, 150055, 150056, 150057, 150058, 150059, 150060, 150061 were selected from the ORFs having the nucleotide sequence represented by SEQ ID NO: 81351.

[12753] The probes having the nucleotide sequence represented by SEQ ID NOS: 150062, 150063, 150064, 150065, 150066, 150067, 150068, 150069, 150070, 150071, 150072 were selected from the ORFs having the nucleotide sequence represented by SEQ ID NO: 81352.

[12754] The probes having the nucleotide sequence represented by SEQ ID NOS: 150073, 150074, 150075, 150076, 150077, 150078, 150079, 150080, 150081, 150082, 150083 were selected from the ORFs having the nucleotide sequence represented by SEQ ID NO: 81353.

[12755] The probes having the nucleotide sequence represented by SEQ ID NOS: 150084, 150085, 150086, 150087, 150088, 150089, 150090, 150091, 150092, 150093, 150094 were selected from the ORFs having the nucleotide sequence represented by SEQ ID NO: 81354.

[12756] The probes having the nucleotide sequence represented by SEQ ID NOS: 150095, 150096, 150097, 150098, 150099, 150100, 150101, 150102, 150103, 150104, 150105 were selected from the ORFs having the nucleotide sequence represented by SEQ ID NO: 81355.

[12757] The probes having the nucleotide sequence represented by SEQ ID NOS: 150106, 150107, 150108, 150109, 150110, 150111, 150112, 150113, 150114, 150115, 150116 were selected from the ORFs having the nucleotide sequence represented by SEQ ID NO: 81356.

[12758] The probes having the nucleotide sequence represented by SEQ ID NOS: 150117, 150118, 150119, 150120, 150121, 150122, 150123, 150124, 150125, 150126, 150127 were selected from the ORFs having the nucleotide sequence represented by SEQ ID NO: 81357.

[12759] The probes having the nucleotide sequence represented by SEQ ID NOS: 150128, 150129, 150130, 150131, 150132, 150133, 150134, 150135, 150136, 150137, 150138 were selected from the ORFs having the nucleotide sequence represented by SEQ ID NO: 81358.

[12760] The probes having the nucleotide sequence represented by SEQ ID NOS: 150139, 150140, 150141, 150142, 150143, 150144, 150145, 150146, 150147, 150148, 150149 were selected from the ORFs having the nucleotide sequence represented by SEQ ID NO: 81359.

[12761] The probes having the nucleotide sequence represented by SEQ ID NOS: 150150, 150151, 150152, 150153, 150154, 150155, 150156, 150157, 150158, 150159, 150160 were selected from the ORFs having the nucleotide sequence represented by SEQ ID NO: 81360.

[12762] The probes having the nucleotide sequence represented by SEQ ID NOS: 150161, 150162, 150163, 150164, 150165, 150166, 150167, 150168, 150169, 150170, 150171 were selected from the ORFs having the nucleotide sequence represented by SEQ ID NO: 81361.

[12763] The probes having the nucleotide sequence represented by SEQ ID NOS: 150172, 150173, 150174, 150175, 150176, 150177, 150178, 150179, 150180, 150181, 150182 were selected from the ORFs having the nucleotide sequence represented by SEQ ID NO: 81362.

[12764] The probes having the nucleotide sequence represented by SEQ ID NOS: 150183, 150184, 150185, 150186, 150187, 150188, 150189, 150190, 150191, 150192, 150193 were selected from the ORFs having the nucleotide sequence represented by SEQ ID NO: 81363.

[12765] The probes having the nucleotide sequence represented by SEQ ID NOS: 150194, 150195, 150196, 150197, 150198, 150199, 150200, 150201, 150202, 150203, 150204 were selected from the ORFs having the nucleotide sequence represented by SEQ ID NO: 81364.

[12766] The probes having the nucleotide sequence represented by SEQ ID NOS: 150205, 150206, 150207, 150208, 150209, 150210, 150211, 150212, 150213, 150214, 150215 were selected from the ORFs having the nucleotide sequence represented by SEQ ID NO: 81365.

[12767] The probes having the nucleotide sequence represented by SEQ ID NOS: 150216, 150217, 150218, 150219, 150220, 150221, 150222, 150223, 150224, 150225, 150226 were selected from the ORFs having the nucleotide sequence represented by SEQ ID NO: 81366.

[12768] The probes having the nucleotide sequence represented by SEQ ID NOS: 150227, 150228, 150229, 150230, 150231, 150232, 150233, 150234, 150235, 150236, 150237 were selected from the ORFs having the nucleotide sequence represented by SEQ ID NO: 81367.

[12769] The probes having the nucleotide sequence represented by SEQ ID NOS: 150238, 150239, 150240, 150241, 150242, 150243, 150244, 150245, 150246, 150247, 150248 were selected from the ORFs having the nucleotide sequence represented by SEQ ID NO: 81368.

[12770] The probes having the nucleotide sequence represented by SEQ ID NOS: 150249, 150250, 150251, 150252, 150253, 150254, 150255, 150256, 150257, 150258, 150259 were selected from the ORFs having the nucleotide sequence represented by SEQ ID NO: 81369.

[12771] The probes having the nucleotide sequence represented by SEQ ID NOS: 150260, 150261, 150262, 150263, 150264, 150265, 150266, 150267, 150268, 150269, 150270 were selected from the ORFs having the nucleotide sequence represented by SEQ ID NO: 81370.

[12772] The probes having the nucleotide sequence represented by SEQ ID NOS: 150271, 150272, 150273, 150274, 150275, 150276, 150277, 150278, 150279, 150280, 150281 were selected from the ORFs having the nucleotide sequence represented by SEQ ID NO: 81371.

[12773] The probes having the nucleotide sequence represented by SEQ ID NOS: 150282, 150283, 150284, 150285, 150286, 150287, 150288, 150289, 150290, 150291, 150292 were selected from the ORFs having the nucleotide sequence represented by SEQ ID NO: 81372.

[12774] The probes having the nucleotide sequence represented by SEQ ID NOS: 150293, 150294, 150295, 150296, 150297, 150298, 150299, 150300, 150301, 150302, 150303 were selected from the ORFs having the nucleotide sequence represented by SEQ ID NO: 81373.

[12775] The probes having the nucleotide sequence represented by SEQ ID NOS: 150304, 150305, 150306, 150307, 150308, 150309, 150310, 150311, 150312, 150313, 150314 were selected from the ORFs having the nucleotide sequence represented by SEQ ID NO: 81374.

[12776] The probes having the nucleotide sequence represented by SEQ ID NOS: 150315, 150316, 150317, 150318, 150319, 150320, 150321, 150322, 150323, 150324, 150325 were selected from the ORFs having the nucleotide sequence represented by SEQ ID NO: 81375.

[12777] The probes having the nucleotide sequence represented by SEQ ID NOS: 150326, 150327, 150328, 150329, 150330, 150331, 150332, 150333, 150334, 150335, 150336 were selected from the ORFs having the nucleotide sequence represented by SEQ ID NO: 81376.

[12778] The probes having the nucleotide sequence represented by SEQ ID NOS: 150337, 150338, 150339, 150340, 150341, 150342, 150343, 150344, 150345, 150346, 150347 were selected from the ORFs having the nucleotide sequence represented by SEQ ID NO: 81377.

[12779] The probes having the nucleotide sequence represented by SEQ ID NOS: 150348, 150349, 150350, 150351, 150352, 150353, 150354, 150355, 150356, 150357, 150358 were selected from the ORFs having the nucleotide sequence represented by SEQ ID NO: 81378.

[12780] The probes having the nucleotide sequence represented by SEQ ID NOS: 150359, 150360, 150361, 150362, 150363, 150364, 150365, 150366, 150367, 150368, 150369 were selected from the ORFs having the nucleotide sequence represented by SEQ ID NO: 81379.

[12781] The probes having the nucleotide sequence represented by SEQ ID NOS: 150370, 150371, 150372, 150373, 150374, 150375, 150376, 150377, 150378, 150379, 150380 were selected from the ORFs having the nucleotide sequence represented by SEQ ID NO: 81380.

[12782] The probes having the nucleotide sequence represented by SEQ ID NOS: 150381, 150382, 150383, 150384, 150385, 150386, 150387, 150388, 150389, 150390, 150391 were selected from the ORFs having the nucleotide sequence represented by SEQ ID NO: 81381.

[12783] The probes having the nucleotide sequence represented by SEQ ID NOS: 150392, 150393, 150394, 150395, 150396, 150397, 150398, 150399, 150400, 150401, 150402 were selected from the ORFs having the nucleotide sequence represented by SEQ ID NO: 81382.

[12784] The probes having the nucleotide sequence represented by SEQ ID NOS: 150403, 150404, 150405, 150406, 150407, 150408, 150409, 150410, 150411, 150412, 150413 were selected from the ORFs having the nucleotide sequence represented by SEQ ID NO: 81383.

[12785] The probes having the nucleotide sequence represented by SEQ ID NOS: 150414, 150415, 150416, 150417, 150418, 150419, 150420, 150421, 150422, 150423, 150424 were selected from the ORFs having the nucleotide sequence represented by SEQ ID NO: 81384.

[12786] The probes having the nucleotide sequence represented by SEQ ID NOS: 150425, 150426, 150427, 150428, 150429, 150430, 150431, 150432, 150433, 150434, 150435 were selected from the ORFs having the nucleotide sequence represented by SEQ ID NO: 81385.

[12787] The probes having the nucleotide sequence represented by SEQ ID NOS: 150436, 150437, 150438, 150439, 150440, 150441, 150442, 150443, 150444, 150445, 150446 were selected from the ORFs having the nucleotide sequence represented by SEQ ID NO: 81386.

[12788] The probes having the nucleotide sequence represented by SEQ ID NOS: 150447, 150448, 150449, 150450, 150451, 150452, 150453, 150454, 150455, 150456, 150457 were selected from the ORFs having the nucleotide sequence represented by SEQ ID NO: 81387.

[12789] The probes having the nucleotide sequence represented by SEQ ID NOS: 150458, 150459, 150460, 150461, 150462, 150463, 150464, 150465, 150466, 150467, 150468 were selected from the ORFs having the nucleotide sequence represented by SEQ ID NO: 81388.

[12790] The probes having the nucleotide sequence represented by SEQ ID NOS: 150469, 150470, 150471, 150472, 150473, 150474, 150475, 150476, 150477, 150478, 150479 were selected from the ORFs having the nucleotide sequence represented by SEQ ID NO: 81389.

[12791] The probes having the nucleotide sequence represented by SEQ ID NOS: 150480, 150481, 150482, 150483, 150484, 150485, 150486, 150487, 150488, 150489, 150490 were selected from the ORFs having the nucleotide sequence represented by SEQ ID NO: 81390.

[12792] The probes having the nucleotide sequence represented by SEQ ID NOS: 150491, 150492, 150493, 150494, 150495, 150496, 150497, 150498, 150499, 150500, 150501 were selected from the ORFs having the nucleotide sequence represented by SEQ ID NO: 81391.

[12793] The probes having the nucleotide sequence represented by SEQ ID NOS: 150502, 150503, 150504, 150505, 150506, 150507, 150508, 150509, 150510, 150511, 150512 were selected from the ORFs having the nucleotide sequence represented by SEQ ID NO: 81392.

[12794] The probes having the nucleotide sequence represented by SEQ ID NOS: 150513, 150514, 150515, 150516, 150517, 150518, 150519, 150520, 150521, 150522, 150523 were selected from the ORFs having the nucleotide sequence represented by SEQ ID NO: 81393.

[12795] The probes having the nucleotide sequence represented by SEQ ID NOS: 150524, 150525, 150526, 150527, 150528, 150529, 150530, 150531, 150532, 150533, 150534 were selected from the ORFs having the nucleotide sequence represented by SEQ ID NO: 81394.

[12796] The probes having the nucleotide sequence represented by SEQ ID NOS: 150535, 150536, 150537, 150538, 150539, 150540, 150541, 150542, 150543, 150544, 150545 were selected from the ORFs having the nucleotide sequence represented by SEQ ID NO: 81395.

[12797] The probes having the nucleotide sequence represented by SEQ ID NOS: 150546, 150547, 150548, 150549, 150550, 150551, 150552, 150553, 150554, 150555, 150556 were selected from the ORFs having the nucleotide sequence represented by SEQ ID NO: 81396.

[12798] The probes having the nucleotide sequence represented by SEQ ID NOS: 150557, 150558, 150559, 150560, 150561, 150562, 150563, 150564, 150565, 150566, 150567 were selected from the ORFs having the nucleotide sequence represented by SEQ ID NO: 81397.

[12799] The probes having the nucleotide sequence represented by SEQ ID NOS: 150568, 150569, 150570, 150571, 150572, 150573, 150574, 150575, 150576, 150577, 150578 were selected from the ORFs having the nucleotide sequence represented by SEQ ID NO: 81398.

[12800] The probes having the nucleotide sequence represented by SEQ ID NOS: 150579, 150580, 150581, 150582, 150583, 150584, 150585, 150586, 150587, 150588, 150589 were selected from the ORFs having the nucleotide sequence represented by SEQ ID NO: 81399.

[12801] The probes having the nucleotide sequence represented by SEQ ID NOS: 150590, 150591, 150592, 150593, 150594, 150595, 150596, 150597, 150598, 150599, 150600 were selected from the ORFs having the nucleotide sequence represented by SEQ ID NO: 81400.

[12802] The probes having the nucleotide sequence represented by SEQ ID NOS: 150601, 150602, 150603, 150604, 150605, 150606, 150607, 150608, 150609, 150610, 150611 were selected from the ORFs having the nucleotide sequence represented by SEQ ID NO: 81401.

[12803] The probes having the nucleotide sequence represented by SEQ ID NOS: 150612, 150613, 150614, 150615, 150616, 150617, 150618, 150619, 150620, 150621, 150622 were selected from the ORFs having the nucleotide sequence represented by SEQ ID NO: 81402.

[12804] The probes having the nucleotide sequence represented by SEQ ID NOS: 150623, 150624, 150625, 150626, 150627, 150628, 150629, 150630, 150631, 150632, 150633 were selected from the ORFs having the nucleotide sequence represented by SEQ ID NO: 81403.

[12805] The probes having the nucleotide sequence represented by SEQ ID NOS: 150634, 150635, 150636, 150637, 150638, 150639, 150640, 150641, 150642, 150643, 150644 were selected from the ORFs having the nucleotide sequence represented by SEQ ID NO: 81404.

[12806] The probes having the nucleotide sequence represented by SEQ ID NOS: 150645, 150646, 150647, 150648, 150649, 150650, 150651, 150652, 150653, 150654, 150655 were selected from the ORFs having the nucleotide sequence represented by SEQ ID NO: 81405.

[12807] The probes having the nucleotide sequence represented by SEQ ID NOS: 150656, 150657, 150658, 150659, 150660, 150661, 150662, 150663, 150664, 150665, 150666 were selected from the ORFs having the nucleotide sequence represented by SEQ ID NO: 81406.

[12808] The probes having the nucleotide sequence represented by SEQ ID NOS: 150667, 150668, 150669, 150670, 150671, 150672, 150673, 150674, 150675, 150676, 150677 were selected from the ORFs having the nucleotide sequence represented by SEQ ID NO: 81407.

[12809] The probes having the nucleotide sequence represented by SEQ ID NOS: 150678, 150679, 150680, 150681, 150682, 150683, 150684, 150685, 150686, 150687, 150688 were selected from the ORFs having the nucleotide sequence represented by SEQ ID NO: 81408.

[12810] The probes having the nucleotide sequence represented by SEQ ID NOS: 150689, 150690, 150691, 150692, 150693, 150694, 150695, 150696, 150697, 150698, 150699, 150700, 150701, 150702, 150703, 150704, 150705, 150706, 150707, 150708, 150709, 150710 were selected from the ORFs having the nucleotide sequence represented by SEQ ID NO: 81409.

[12811] The probes having the nucleotide sequence represented by SEQ ID NOS: 150711, 150712, 150713, 150714, 150715, 150716, 150717, 150718, 150719, 150720, 150721 were selected from the ORFs having the nucleotide sequence represented by SEQ ID NO: 81410.

[12812] The probes having the nucleotide sequence represented by SEQ ID NOS: 150722, 150723, 150724, 150725, 150726, 150727, 150728, 150729, 150730, 150731, 150732 were selected from the ORFs having the nucleotide sequence represented by SEQ ID NO: 81411.

[12813] The probes having the nucleotide sequence represented by SEQ ID NOS: 150733, 150734, 150735, 150736, 150737, 150738, 150739, 150740, 150741, 150742, 150743 were selected from the ORFs having the nucleotide sequence represented by SEQ ID NO: 81412.

[12814] The probes having the nucleotide sequence represented by SEQ ID NOS: 150744, 150745, 150746, 150747, 150748, 150749, 150750, 150751, 150752, 150753, 150754 were selected from the ORFs having the nucleotide sequence represented by SEQ ID NO: 81413.

[12815] The probes having the nucleotide sequence represented by SEQ ID NOS: 150755, 150756, 150757, 150758, 150759, 150760, 150761, 150762, 150763, 150764, 150765 were selected from the ORFs having the nucleotide sequence represented by SEQ ID NO: 81414.

[12816] The probes having the nucleotide sequence represented by SEQ ID NOS: 150766, 150767, 150768, 150769, 150770, 150771, 150772, 150773, 150774, 150775, 150776 were selected from the ORFs having the nucleotide sequence represented by SEQ ID NO: 81415.

[12817] The probes having the nucleotide sequence represented by SEQ ID NOS: 150777, 150778, 150779, 150780, 150781, 150782, 150783, 150784, 150785, 150786, 150787 were selected from the ORFs having the nucleotide sequence represented by SEQ ID NO: 81416.

[12818] The probes having the nucleotide sequence represented by SEQ ID NOS: 150788, 150789, 150790, 150791, 150792, 150793, 150794, 150795, 150796, 150797, 150798, 150799, 150800, 150801, 150802, 150803, 150804, 150805, 150806, 150807, 150808, 150809 were selected from the ORFs having the nucleotide sequence represented by SEQ ID NO: 81417.

[12819] The probes having the nucleotide sequence represented by SEQ ID NOS: 150810, 150811, 150812, 150813, 150814, 150815, 150816, 150817, 150818, 150819, 150820 were selected from the ORFs having the nucleotide sequence represented by SEQ ID NO: 81418.

[12820] The probes having the nucleotide sequence represented by SEQ ID NOS: 150821, 150822, 150823, 150824, 150825, 150826, 150827, 150828, 150829, 150830, 150831 were selected from the ORFs having the nucleotide sequence represented by SEQ ID NO: 81419.

[12821] The probes having the nucleotide sequence represented by SEQ ID NOS: 150832, 150833, 150834, 150835, 150836, 150837, 150838, 150839, 150840, 150841, 150842 were selected from the ORFs having the nucleotide sequence represented by SEQ ID NO: 81420.

[12822] The probes having the nucleotide sequence represented by SEQ ID NOS: 150843, 150844, 150845, 150846, 150847, 150848, 150849, 150850, 150851, 150852, 150853 were selected from the ORFs having the nucleotide sequence represented by SEQ ID NO: 81421.

[12823] The probes having the nucleotide sequence represented by SEQ ID NOS: 150854, 150855, 150856, 150857, 150858, 150859, 150860, 150861, 150862, 150863, 150864 were selected from the ORFs having the nucleotide sequence represented by SEQ ID NO: 81422.

[12824] The probes having the nucleotide sequence represented by SEQ ID NOS: 150865, 150866, 150867, 150868, 150869, 150870, 150871, 150872, 150873, 150874, 150875 were selected from the ORFs having the nucleotide sequence represented by SEQ ID NO: 81423.

[12825] The probes having the nucleotide sequence represented by SEQ ID NOS: 150876, 150877, 150878, 150879, 150880, 150881, 150882, 150883, 150884, 150885, 150886 were selected from the ORFs having the nucleotide sequence represented by SEQ ID NO: 81424.

[12826] The probes having the nucleotide sequence represented by SEQ ID NOS: 150887, 150888, 150889, 150890, 150891, 150892, 150893, 150894, 150895, 150896, 150897 were selected from the ORFs having the nucleotide sequence represented by SEQ ID NO: 81425.

[12827] The probes having the nucleotide sequence represented by SEQ ID NOS: 150898, 150899, 150900, 150901, 150902, 150903, 150904, 150905, 150906, 150907, 150908 were selected from the ORFs having the nucleotide sequence represented by SEQ ID NO: 81426.

[12828] The probes having the nucleotide sequence represented by SEQ ID NOS: 150909, 150910, 150911, 150912, 150913, 150914, 150915, 150916, 150917, 150918, 150919 were selected from the ORFs having the nucleotide sequence represented by SEQ ID NO: 81427.

[12829] The probes having the nucleotide sequence represented by SEQ ID NOS: 150920, 150921, 150922, 150923, 150924, 150925, 150926, 150927, 150928, 150929, 150930 were selected from the ORFs having the nucleotide sequence represented by SEQ ID NO: 81428.

[12830] The probes having the nucleotide sequence represented by SEQ ID NOS: 150931, 150932, 150933, 150934, 150935, 150936, 150937, 150938, 150939, 150940, 150941 were selected from the ORFs having the nucleotide sequence represented by SEQ ID NO: 81429.

[12831] The probes having the nucleotide sequence represented by SEQ ID NOS: 150942, 150943, 150944, 150945, 150946, 150947, 150948, 150949, 150950, 150951, 150952, 150953, 150954, 150955, 150956, 150957, 150958, 150959, 150960, 150961, 150962, 150963 were selected from the ORFs having the nucleotide sequence represented by SEQ ID NO: 81430.

[12832] The probes having the nucleotide sequence represented by SEQ ID NOS: 150964, 150965, 150966, 150967, 150968, 150969, 150970, 150971, 150972, 150973, 150974 were selected from the ORFs having the nucleotide sequence represented by SEQ ID NO: 81431.

[12833] The probes having the nucleotide sequence represented by SEQ ID NOS: 150975, 150976, 150977, 150978, 150979, 150980, 150981, 150982, 150983, 150984, 150985 were selected from the ORFs having the nucleotide sequence represented by SEQ ID NO: 81432.

[12834] The probes having the nucleotide sequence represented by SEQ ID NOS: 150986, 150987, 150988, 150989, 150990, 150991, 150992, 150993, 150994, 150995, 150996 were selected from the ORFs having the nucleotide sequence represented by SEQ ID NO: 81433.

[12835] The probes having the nucleotide sequence represented by SEQ ID NOS: 150997, 150998, 150999, 151000, 151001, 151002, 151003, 151004, 151005, 151006, 151007 were selected from the ORFs having the nucleotide sequence represented by SEQ ID NO: 81434.

[12836] The probes having the nucleotide sequence represented by SEQ ID NOS: 151008, 151009, 151010, 151011, 151012, 151013, 151014, 151015, 151016, 151017, 151018 were selected from the ORFs having the nucleotide sequence represented by SEQ ID NO: 81435.

[12837] The probes having the nucleotide sequence represented by SEQ ID NOS: 151019, 151020, 151021, 151022, 151023, 151024, 151025, 151026, 151027, 151028, 151029 were selected from the ORFs having the nucleotide sequence represented by SEQ ID NO: 81436.

[12838] The probes having the nucleotide sequence represented by SEQ ID NOS: 151030, 151031, 151032, 151033, 151034, 151035, 151036, 151037, 151038, 151039, 151040 were selected from the ORFs having the nucleotide sequence represented by SEQ ID NO: 81437.

[12839] The probes having the nucleotide sequence represented by SEQ ID NOS: 151041, 151042, 151043, 151044, 151045, 151046, 151047, 151048, 151049, 151050, 151051 were selected from the ORFs having the nucleotide sequence represented by SEQ ID NO: 81438.

[12840] The probes having the nucleotide sequence represented by SEQ ID NOS: 151052, 151053, 151054, 151055, 151056, 151057, 151058, 151059, 151060, 151061, 151062 were selected from the ORFs having the nucleotide sequence represented by SEQ ID NO: 81439.

[12841] The probes having the nucleotide sequence represented by SEQ ID NOS: 151063, 151064, 151065, 151066, 151067, 151068, 151069, 151070, 151071, 151072, 151073 were selected from the ORFs having the nucleotide sequence represented by SEQ ID NO: 81440.

[12842] The probes having the nucleotide sequence represented by SEQ ID NOS: 151074, 151075, 151076, 151077, 151078, 151079, 151080, 151081, 151082, 151083, 151084 were selected from the ORFs having the nucleotide sequence represented by SEQ ID NO: 81441.

[12843] The probes having the nucleotide sequence represented by SEQ ID NOS: 151085, 151086, 151087, 151088, 151089, 151090, 151091, 151092, 151093, 151094, 151095 were selected from the ORFs having the nucleotide sequence represented by SEQ ID NO: 81442.

[12844] The probes having the nucleotide sequence represented by SEQ ID NOS: 151096, 151097, 151098, 151099, 151100, 151101, 151102, 151103, 151104, 151105, 151106 were selected from the ORFs having the nucleotide sequence represented by SEQ ID NO: 81443.

[12845] The probes having the nucleotide sequence represented by SEQ ID NOS: 151107, 151108, 151109, 151110, 151111, 151112, 151113, 151114, 151115, 151116, 151117 were selected from the ORFs having the nucleotide sequence represented by SEQ ID NO: 81444.

[12846] The probes having the nucleotide sequence represented by SEQ ID NOS: 151118, 151119, 151120, 151121, 151122, 151123, 151124, 151125, 151126, 151127, 151128 were selected from the ORFs having the nucleotide sequence represented by SEQ ID NO: 81445.

[12847] The probes having the nucleotide sequence represented by SEQ ID NOS: 151129, 151130, 151131, 151132, 151133, 151134, 151135, 151136, 151137, 151138, 151139 were selected from the ORFs having the nucleotide sequence represented by SEQ ID NO: 81446.

[12848] The probes having the nucleotide sequence represented by SEQ ID NOS: 151140, 151141, 151142, 151143, 151144, 151145, 151146, 151147, 151148, 151149, 151150 were selected from the ORFs having the nucleotide sequence represented by SEQ ID NO: 81447.

[12849] The probes having the nucleotide sequence represented by SEQ ID NOS: 151151, 151152, 151153, 151154, 151155, 151156, 151157, 151158, 151159, 151160, 151161 were selected from the ORFs having the nucleotide sequence represented by SEQ ID NO: 81448.

[12850] The probes having the nucleotide sequence represented by SEQ ID NOS: 151162, 151163, 151164, 151165, 151166, 151167, 151168, 151169, 151170, 151171, 151172 were selected from the ORFs having the nucleotide sequence represented by SEQ ID NO: 81449.

[12851] The probes having the nucleotide sequence represented by SEQ ID NOS: 151173, 151174, 151175, 151176, 151177, 151178, 151179, 151180, 151181, 151182, 151183 were selected from the ORFs having the nucleotide sequence represented by SEQ ID NO: 81450.

[12852] The probes having the nucleotide sequence represented by SEQ ID NOS: 151184, 151185, 151186, 151187, 151188, 151189, 151190, 151191, 151192, 151193, 151194 were selected from the ORFs having the nucleotide sequence represented by SEQ ID NO: 81451.

[12853] The probes having the nucleotide sequence represented by SEQ ID NOS: 151195, 151196, 151197, 151198, 151199, 151200, 151201, 151202, 151203, 151204, 151205 were selected from the ORFs having the nucleotide sequence represented by SEQ ID NO: 81452.

[12854] The probes having the nucleotide sequence represented by SEQ ID NOS: 151206, 151207, 151208, 151209, 151210, 151211, 151212, 151213, 151214, 151215, 151216 were selected from the ORFs having the nucleotide sequence represented by SEQ ID NO: 81453.

[12855] The probes having the nucleotide sequence represented by SEQ ID NOS: 151217, 151218, 151219, 151220, 151221, 151222, 151223, 151224, 151225, 151226, 151227 were selected from the ORFs having the nucleotide sequence represented by SEQ ID NO: 81454.

[12856] The probes having the nucleotide sequence represented by SEQ ID NOS: 151228, 151229, 151230, 151231, 151232, 151233, 151234, 151235, 151236, 151237, 151238 were selected from the ORFs having the nucleotide sequence represented by SEQ ID NO: 81455.

[12857] The probes having the nucleotide sequence represented by SEQ ID NOS: 151239, 151240, 151241, 151242, 151243, 151244, 151245, 151246, 151247, 151248, 151249 were selected from the ORFs having the nucleotide sequence represented by SEQ ID NO: 81456.

[12858] The probes having the nucleotide sequence represented by SEQ ID NOS: 151250, 151251, 151252, 151253, 151254, 151255, 151256, 151257, 151258, 151259, 151260 were selected from the ORFs having the nucleotide sequence represented by SEQ ID NO: 81457.

[12859] The probes having the nucleotide sequence represented by SEQ ID NOS: 151261, 151262, 151263, 151264, 151265, 151266, 151267, 151268, 151269, 151270, 151271 were selected from the ORFs having the nucleotide sequence represented by SEQ ID NO: 81458.

[12860] The probes having the nucleotide sequence represented by SEQ ID NOS: 151272, 151273, 151274, 151275, 151276, 151277, 151278, 151279, 151280, 151281, 151282 were selected from the ORFs having the nucleotide sequence represented by SEQ ID NO: 81459.

[12861] The probes having the nucleotide sequence represented by SEQ ID NOS: 151283, 151284, 151285, 151286, 151287, 151288, 151289, 151290, 151291, 151292, 151293 were selected from the ORFs having the nucleotide sequence represented by SEQ ID NO: 81460.

[12862] The probes having the nucleotide sequence represented by SEQ ID NOS: 151294, 151295, 151296, 151297, 151298, 151299, 151300, 151301, 151302, 151303, 151304 were selected from the ORFs having the nucleotide sequence represented by SEQ ID NO: 81461.

[12863] The probes having the nucleotide sequence represented by SEQ ID NOS: 151305, 151306, 151307, 151308, 151309, 151310, 151311, 151312, 151313, 151314, 151315 were selected from the ORFs having the nucleotide sequence represented by SEQ ID NO: 81462.

[12864] The probes having the nucleotide sequence represented by SEQ ID NOS: 151316, 151317, 151318, 151319, 151320, 151321, 151322, 151323, 151324, 151325, 151326 were selected from the ORFs having the nucleotide sequence represented by SEQ ID NO: 81463.

[12865] The probes having the nucleotide sequence represented by SEQ ID NOS: 151327, 151328, 151329, 151330, 151331, 151332, 151333, 151334, 151335, 151336, 151337 were selected from the ORFs having the nucleotide sequence represented by SEQ ID NO: 81464.

[12866] The probes having the nucleotide sequence represented by SEQ ID NOS: 151338, 151339, 151340, 151341, 151342, 151343, 151344, 151345, 151346, 151347, 151348 were selected from the ORFs having the nucleotide sequence represented by SEQ ID NO: 81465.

[12867] The probes having the nucleotide sequence represented by SEQ ID NOS: 151349, 151350, 151351, 151352, 151353, 151354, 151355, 151356, 151357, 151358, 151359 were selected from the ORFs having the nucleotide sequence represented by SEQ ID NO: 81466.

[12868] The probes having the nucleotide sequence represented by SEQ ID NOS: 151360, 151361, 151362, 151363, 151364, 151365, 151366, 151367, 151368, 151369, 151370 were selected from the ORFs having the nucleotide sequence represented by SEQ ID NO: 81467.

[12869] The probes having the nucleotide sequence represented by SEQ ID NOS: 151371, 151372, 151373, 151374, 151375, 151376, 151377, 151378, 151379, 151380, 151381 were selected from the ORFs having the nucleotide sequence represented by SEQ ID NO: 81468.

[12870] The probes having the nucleotide sequence represented by SEQ ID NOS: 151382, 151383, 151384, 151385, 151386, 151387, 151388, 151389, 151390, 151391, 151392 were selected from the ORFs having the nucleotide sequence represented by SEQ ID NO: 81469.

[12871] The probes having the nucleotide sequence represented by SEQ ID NOS: 151393, 151394, 151395, 151396, 151397, 151398, 151399, 151400, 151401, 151402, 151403 were selected from the ORFs having the nucleotide sequence represented by SEQ ID NO: 81470.

[12872] The probes having the nucleotide sequence represented by SEQ ID NOS: 151404, 151405, 151406, 151407, 151408, 151409, 151410, 151411, 151412, 151413, 151414 were selected from the ORFs having the nucleotide sequence represented by SEQ ID NO: 81471.

[12873] The probes having the nucleotide sequence represented by SEQ ID NOS: 151415, 151416, 151417, 151418, 151419, 151420, 151421, 151422, 151423, 151424, 151425 were selected from the ORFs having the nucleotide sequence represented by SEQ ID NO: 81472.

[12874] The probes having the nucleotide sequence represented by SEQ ID NOS: 151426, 151427, 151428, 151429, 151430, 151431, 151432, 151433, 151434, 151435, 151436 were selected from the ORFs having the nucleotide sequence represented by SEQ ID NO: 81473.

[12875] The probes having the nucleotide sequence represented by SEQ ID NOS: 151437, 151438, 151439, 151440, 151441, 151442, 151443, 151444, 151445, 151446, 151447 were selected from the ORFs having the nucleotide sequence represented by SEQ ID NO: 81474.

[12876] The probes having the nucleotide sequence represented by SEQ ID NOS: 151448, 151449, 151450, 151451, 151452, 151453, 151454, 151455, 151456, 151457, 151458 were selected from the ORFs having the nucleotide sequence represented by SEQ ID NO: 81475.

[12877] The probes having the nucleotide sequence represented by SEQ ID NOS: 151459, 151460, 151461, 151462, 151463, 151464, 151465, 151466, 151467, 151468, 151469, 151470, 151471, 151472, 151473, 151474, 151475, 151476, 151477, 151478, 151479, 151480 were selected from the ORFs having the nucleotide sequence represented by SEQ ID NO: 81476.

[12878] The probes having the nucleotide sequence represented by SEQ ID NOS: 151481, 151482, 151483, 151484, 151485, 151486, 151487, 151488, 151489, 151490, 151491 were selected from the ORFs having the nucleotide sequence represented by SEQ ID NO: 81477.

[12879] The probes having the nucleotide sequence represented by SEQ ID NOS: 151492, 151493, 151494, 151495, 151496, 151497, 151498, 151499, 151500, 151501, 151502 were selected from the ORFs having the nucleotide sequence represented by SEQ ID NO: 81478.

[12880] The probes having the nucleotide sequence represented by SEQ ID NOS: 151503, 151504, 151505, 151506, 151507, 151508, 151509, 151510, 151511, 151512, 151513 were selected from the ORFs having the nucleotide sequence represented by SEQ ID NO: 81479.

[12881] The probes having the nucleotide sequence represented by SEQ ID NOS: 151514, 151515, 151516, 151517, 151518, 151519, 151520, 151521, 151522, 151523, 151524 were selected from the ORFs having the nucleotide sequence represented by SEQ ID NO: 81480.

[12882] The probes having the nucleotide sequence represented by SEQ ID NOS: 151525, 151526, 151527, 151528, 151529, 151530, 151531, 151532, 151533, 151534, 151535 were selected from the ORFs having the nucleotide sequence represented by SEQ ID NO: 81481.

[12883] The probes having the nucleotide sequence represented by SEQ ID NOS: 151536, 151537, 151538, 151539, 151540, 151541, 151542, 151543, 151544, 151545, 151546 were selected from the ORFs having the nucleotide sequence represented by SEQ ID NO: 81482.

[12884] The probes having the nucleotide sequence represented by SEQ ID NOS: 151547, 151548, 151549, 151550, 151551, 151552, 151553, 151554, 151555, 151556, 151557 were selected from the ORFs having the nucleotide sequence represented by SEQ ID NO: 81483.

[12885] The probes having the nucleotide sequence represented by SEQ ID NOS: 151558, 151559, 151560, 151561, 151562, 151563, 151564, 151565, 151566, 151567, 151568 were selected from the ORFs having the nucleotide sequence represented by SEQ ID NO: 81484.

[12886] The probes having the nucleotide sequence represented by SEQ ID NOS: 151569, 151570, 151571, 151572, 151573, 151574, 151575, 151576, 151577, 151578, 151579 were selected from the ORFs having the nucleotide sequence represented by SEQ ID NO: 81485.

[12887] The probes having the nucleotide sequence represented by SEQ ID NOS: 151580, 151581, 151582, 151583, 151584, 151585, 151586, 151587, 151588, 151589, 151590 were selected from the ORFs having the nucleotide sequence represented by SEQ ID NO: 81486.

[12888] The probes having the nucleotide sequence represented by SEQ ID NOS: 151591, 151592, 151593, 151594, 151595, 151596, 151597, 151598, 151599, 151600, 151601 were selected from the ORFs having the nucleotide sequence represented by SEQ ID NO: 81487.

[12889] The probes having the nucleotide sequence represented by SEQ ID NOS: 151602, 151603, 151604, 151605, 151606, 151607, 151608, 151609, 151610, 151611, 151612 were selected from the ORFs having the nucleotide sequence represented by SEQ ID NO: 81488.

[12890] The probes having the nucleotide sequence represented by SEQ ID NOS: 151613, 151614, 151615, 151616, 151617, 151618, 151619, 151620, 151621, 151622, 151623 were selected from the ORFs having the nucleotide sequence represented by SEQ ID NO: 81489.

[12891] The probes having the nucleotide sequence represented by SEQ ID NOS: 151624, 151625, 151626, 151627, 151628, 151629, 151630, 151631, 151632, 151633, 151634 were selected from the ORFs having the nucleotide sequence represented by SEQ ID NO: 81490.

[12892] The probes having the nucleotide sequence represented by SEQ ID NOS: 151635, 151636, 151637, 151638, 151639, 151640, 151641, 151642, 151643, 151644, 151645 were selected from the ORFs having the nucleotide sequence represented by SEQ ID NO: 81491.

[12893] The probes having the nucleotide sequence represented by SEQ ID NOS: 151646, 151647, 151648, 151649, 151650, 151651, 151652, 151653, 151654, 151655, 151656 were selected from the ORFs having the nucleotide sequence represented by SEQ ID NO: 81492.

[12894] The probes having the nucleotide sequence represented by SEQ ID NOS: 151657, 151658, 151659, 151660, 151661, 151662, 151663, 151664, 151665, 151666, 151667 were selected from the ORFs having the nucleotide sequence represented by SEQ ID NO: 81493.

[12895] The probes having the nucleotide sequence represented by SEQ ID NOS: 151668, 151669, 151670, 151671, 151672, 151673, 151674, 151675, 151676, 151677, 151678 were selected from the ORFs having the nucleotide sequence represented by SEQ ID NO: 81494.

[12896] The probes having the nucleotide sequence represented by SEQ ID NOS: 151679, 151680, 151681, 151682, 151683, 151684, 151685, 151686, 151687, 151688, 151689 were selected from the ORFs having the nucleotide sequence represented by SEQ ID NO: 81495.

[12897] The probes having the nucleotide sequence represented by SEQ ID NOS: 151690, 151691, 151692, 151693, 151694, 151695, 151696, 151697, 151698, 151699, 151700 were selected from the ORFs having the nucleotide sequence represented by SEQ ID NO: 81496.

[12898] The probes having the nucleotide sequence represented by SEQ ID NOS: 151701, 151702, 151703, 151704, 151705, 151706, 151707, 151708, 151709, 151710, 151711 were selected from the ORFs having the nucleotide sequence represented by SEQ ID NO: 81497.

[12899] The probes having the nucleotide sequence represented by SEQ ID NOS: 151712, 151713, 151714, 151715, 151716, 151717, 151718, 151719, 151720, 151721, 151722 were selected from the ORFs having the nucleotide sequence represented by SEQ ID NO: 81498.

[12900] The probes having the nucleotide sequence represented by SEQ ID NOS: 151723, 151724, 151725, 151726, 151727, 151728, 151729, 151730, 151731, 151732, 151733 were selected from the ORFs having the nucleotide sequence represented by SEQ ID NO: 81499.

[12901] The probes having the nucleotide sequence represented by SEQ ID NOS: 151734, 151735, 151736, 151737, 151738, 151739, 151740, 151741, 151742, 151743, 151744 were selected from the ORFs having the nucleotide sequence represented by SEQ ID NO: 81500.

[12902] The probes having the nucleotide sequence represented by SEQ ID NOS: 151745, 151746, 151747, 151748, 151749, 151750, 151751, 151752, 151753, 151754, 151755 were selected from the ORFs having the nucleotide sequence represented by SEQ ID NO: 81501.

[12903] The probes having the nucleotide sequence represented by SEQ ID NOS: 151756, 151757, 151758, 151759, 151760, 151761, 151762, 151763, 151764, 151765, 151766 were selected from the ORFs having the nucleotide sequence represented by SEQ ID NO: 81502.

[12904] The probes having the nucleotide sequence represented by SEQ ID NOS: 151767, 151768, 151769, 151770, 151771, 151772, 151773, 151774, 151775, 151776, 151777 were selected from the ORFs having the nucleotide sequence represented by SEQ ID NO: 81503.

[12905] The probes having the nucleotide sequence represented by SEQ ID NOS: 151778, 151779, 151780, 151781, 151782, 151783, 151784, 151785, 151786, 151787, 151788 were selected from the ORFs having the nucleotide sequence represented by SEQ ID NO: 81504.

[12906] The probes having the nucleotide sequence represented by SEQ ID NOS: 151789, 151790, 151791, 151792, 151793, 151794, 151795, 151796, 151797, 151798, 151799 were selected from the ORFs having the nucleotide sequence represented by SEQ ID NO: 81505.

[12907] The probes having the nucleotide sequence represented by SEQ ID NOS: 151800, 151801, 151802, 151803, 151804, 151805, 151806, 151807, 151808, 151809, 151810 were selected from the ORFs having the nucleotide sequence represented by SEQ ID NO: 81506.

[12908] The probes having the nucleotide sequence represented by SEQ ID NOS: 151811, 151812, 151813, 151814, 151815, 151816, 151817, 151818, 151819, 151820, 151821 were selected from the ORFs having the nucleotide sequence represented by SEQ ID NO: 81507.

[12909] The probes having the nucleotide sequence represented by SEQ ID NOS: 151822, 151823, 151824, 151825, 151826, 151827, 151828, 151829, 151830, 151831, 151832 were selected from the ORFs having the nucleotide sequence represented by SEQ ID NO: 81508.

[12910] The probes having the nucleotide sequence represented by SEQ ID NOS: 151833, 151834, 151835, 151836, 151837, 151838, 151839, 151840, 151841, 151842, 151843 were selected from the ORFs having the nucleotide sequence represented by SEQ ID NO: 81509.

[12911] The probes having the nucleotide sequence represented by SEQ ID NOS: 151844, 151845, 151846, 151847, 151848, 151849, 151850, 151851, 151852, 151853, 151854 were selected from the ORFs having the nucleotide sequence represented by SEQ ID NO: 81510.

[12912] The probes having the nucleotide sequence represented by SEQ ID NOS: 151855, 151856, 151857, 151858, 151859, 151860, 151861, 151862, 151863, 151864, 151865 were selected from the ORFs having the nucleotide sequence represented by SEQ ID NO: 81511.

[12913] The probes having the nucleotide sequence represented by SEQ ID NOS: 151866, 151867, 151868, 151869, 151870, 151871, 151872, 151873, 151874, 151875, 151876 were selected from the ORFs having the nucleotide sequence represented by SEQ ID NO: 81512.

[12914] The probes having the nucleotide sequence represented by SEQ ID NOS: 151877, 151878, 151879, 151880, 151881, 151882, 151883, 151884, 151885, 151886, 151887 were selected from the ORFs having the nucleotide sequence represented by SEQ ID NO: 81513.

[12915] The probes having the nucleotide sequence represented by SEQ ID NOS: 151888, 151889, 151890, 151891, 151892, 151893, 151894, 151895, 151896, 151897, 151898 were selected from the ORFs having the nucleotide sequence represented by SEQ ID NO: 81514.

[12916] The probes having the nucleotide sequence represented by SEQ ID NOS: 151899, 151900, 151901, 151902, 151903, 151904, 151905, 151906, 151907, 151908, 151909 were selected from the ORFs having the nucleotide sequence represented by SEQ ID NO: 81515.

[12917] The probes having the nucleotide sequence represented by SEQ ID NOS: 151910, 151911, 151912, 151913, 151914, 151915, 151916, 151917, 151918, 151919, 151920 were selected from the ORFs having the nucleotide sequence represented by SEQ ID NO: 81516.

[12918] The probes having the nucleotide sequence represented by SEQ ID NOS: 151921, 151922, 151923, 151924, 151925, 151926, 151927, 151928, 151929, 151930, 151931 were selected from the ORFs having the nucleotide sequence represented by SEQ ID NO: 81517.

[12919] The probes having the nucleotide sequence represented by SEQ ID NOS: 151932, 151933, 151934, 151935, 151936, 151937, 151938, 151939, 151940, 151941, 151942, 151943, 151944, 151945, 151946, 151947, 151948, 151949, 151950, 151951, 151952, 151953 were selected from the ORFs having the nucleotide sequence represented by SEQ ID NO: 81518.

[12920] The probes having the nucleotide sequence represented by SEQ ID NOS: 151954, 151955, 151956, 151957, 151958, 151959, 151960, 151961, 151962, 151963, 151964 were selected from the ORFs having the nucleotide sequence represented by SEQ ID NO: 81519.

[12921] The probes having the nucleotide sequence represented by SEQ ID NOS: 151965, 151966, 151967, 151968, 151969, 151970, 151971, 151972, 151973, 151974, 151975 were selected from the ORFs having the nucleotide sequence represented by SEQ ID NO: 81520.

[12922] The probes having the nucleotide sequence represented by SEQ ID NOS: 151976, 151977, 151978, 151979, 151980, 151981, 151982, 151983, 151984, 151985, 151986 were selected from the ORFs having the nucleotide sequence represented by SEQ ID NO: 81521.

[12923] The probes having the nucleotide sequence represented by SEQ ID NOS: 151987, 151988, 151989, 151990, 151991, 151992, 151993, 151994, 151995, 151996, 151997 were selected from the ORFs having the nucleotide sequence represented by SEQ ID NO: 81522.

[12924] The probes having the nucleotide sequence represented by SEQ ID NOS: 151998, 151999, 152000, 152001, 152002, 152003, 152004, 152005, 152006, 152007, 152008 were selected from the ORFs having the nucleotide sequence represented by SEQ ID NO: 81523.

[12925] The probes having the nucleotide sequence represented by SEQ ID NOS: 152009, 152010, 152011, 152012, 152013, 152014, 152015, 152016, 152017, 152018, 152019 were selected from the ORFs having the nucleotide sequence represented by SEQ ID NO: 81524.

[12926] The probes having the nucleotide sequence represented by SEQ ID NOS: 152020, 152021, 152022, 152023, 152024, 152025, 152026, 152027, 152028, 152029, 152030 were selected from the ORFs having the nucleotide sequence represented by SEQ ID NO: 81525.

[12927] The probes having the nucleotide sequence represented by SEQ ID NOS: 152031, 152032, 152033, 152034, 152035, 152036, 152037, 152038, 152039, 152040, 152041 were selected from the ORFs having the nucleotide sequence represented by SEQ ID NO: 81526.

[12928] The probes having the nucleotide sequence represented by SEQ ID NOS: 152042, 152043, 152044, 152045, 152046, 152047, 152048, 152049, 152050, 152051, 152052 were selected from the ORFs having the nucleotide sequence represented by SEQ ID NO: 81527.

[12929] The probes having the nucleotide sequence represented by SEQ ID NOS: 152053, 152054, 152055, 152056, 152057, 152058, 152059, 152060, 152061, 152062, 152063 were selected from the ORFs having the nucleotide sequence represented by SEQ ID NO: 81528.

[12930] The probes having the nucleotide sequence represented by SEQ ID NOS: 152064, 152065, 152066, 152067, 152068, 152069, 152070, 152071, 152072, 152073, 152074 were selected from the ORFs having the nucleotide sequence represented by SEQ ID NO: 81529.

[12931] The probes having the nucleotide sequence represented by SEQ ID NOS: 152075, 152076, 152077, 152078, 152079, 152080, 152081, 152082, 152083, 152084, 152085 were selected from the ORFs having the nucleotide sequence represented by SEQ ID NO: 81530.

[12932] The probes having the nucleotide sequence represented by SEQ ID NOS: 152086, 152087, 152088, 152089, 152090, 152091, 152092, 152093, 152094, 152095, 152096 were selected from the ORFs having the nucleotide sequence represented by SEQ ID NO: 81531.

[12933] The probes having the nucleotide sequence represented by SEQ ID NOS: 152097, 152098, 152099, 152100, 152101, 152102, 152103, 152104, 152105, 152106, 152107 were selected from the ORFs having the nucleotide sequence represented by SEQ ID NO: 81532.

[12934] The probes having the nucleotide sequence represented by SEQ ID NOS: 152108, 152109, 152110, 152111, 152112, 152113, 152114, 152115, 152116, 152117, 152118 were selected from the ORFs having the nucleotide sequence represented by SEQ ID NO: 81533.

[12935] The probes having the nucleotide sequence represented by SEQ ID NOS: 152119, 152120, 152121, 152122, 152123, 152124, 152125, 152126, 152127, 152128, 152129 were selected from the ORFs having the nucleotide sequence represented by SEQ ID NO: 81534.

[12936] The probes having the nucleotide sequence represented by SEQ ID NOS: 152130, 152131, 152132, 152133, 152134, 152135, 152136, 152137, 152138, 152139, 152140 were selected from the ORFs having the nucleotide sequence represented by SEQ ID NO: 81535.

[12937] The probes having the nucleotide sequence represented by SEQ ID NOS: 152141, 152142, 152143, 152144, 152145, 152146, 152147, 152148, 152149, 152150, 152151 were selected from the ORFs having the nucleotide sequence represented by SEQ ID NO: 81536.

[12938] The probes having the nucleotide sequence represented by SEQ ID NOS: 152152, 152153, 152154, 152155, 152156, 152157, 152158, 152159, 152160, 152161, 152162 were selected from the ORFs having the nucleotide sequence represented by SEQ ID NO: 81537.

[12939] The probes having the nucleotide sequence represented by SEQ ID NOS: 152163, 152164, 152165, 152166, 152167, 152168, 152169, 152170, 152171, 152172, 152173 were selected from the ORFs having the nucleotide sequence represented by SEQ ID NO: 81538.

[12940] The probes having the nucleotide sequence represented by SEQ ID NOS: 152174, 152175, 152176, 152177, 152178, 152179, 152180, 152181, 152182, 152183, 152184 were selected from the ORFs having the nucleotide sequence represented by SEQ ID NO: 81539.

[12941] The probes having the nucleotide sequence represented by SEQ ID NOS: 152185, 152186, 152187, 152188, 152189, 152190, 152191, 152192, 152193, 152194, 152195 were selected from the ORFs having the nucleotide sequence represented by SEQ ID NO: 81540.

[12942] The probes having the nucleotide sequence represented by SEQ ID NOS: 152196, 152197, 152198, 152199, 152200, 152201, 152202, 152203, 152204, 152205, 152206 were selected from the ORFs having the nucleotide sequence represented by SEQ ID NO: 81541.

[12943] The probes having the nucleotide sequence represented by SEQ ID NOS: 152207, 152208, 152209, 152210, 152211, 152212, 152213, 152214, 152215, 152216, 152217 were selected from the ORFs having the nucleotide sequence represented by SEQ ID NO: 81542.

[12944] The probes having the nucleotide sequence represented by SEQ ID NOS: 152218, 152219, 152220, 152221, 152222, 152223, 152224, 152225, 152226, 152227, 152228 were selected from the ORFs having the nucleotide sequence represented by SEQ ID NO: 81543.

[12945] The probes having the nucleotide sequence represented by SEQ ID NOS: 152229, 152230, 152231, 152232, 152233, 152234, 152235, 152236, 152237, 152238, 152239 were selected from the ORFs having the nucleotide sequence represented by SEQ ID NO: 81544.

[12946] The probes having the nucleotide sequence represented by SEQ ID NOS: 152240, 152241, 152242, 152243, 152244, 152245, 152246, 152247, 152248, 152249, 152250 were selected from the ORFs having the nucleotide sequence represented by SEQ ID NO: 81545.

[12947] The probes having the nucleotide sequence represented by SEQ ID NOS: 152251, 152252, 152253, 152254, 152255, 152256, 152257, 152258, 152259, 152260, 152261 were selected from the ORFs having the nucleotide sequence represented by SEQ ID NO: 81546.

[12948] The probes having the nucleotide sequence represented by SEQ ID NOS: 152262, 152263, 152264, 152265, 152266, 152267, 152268, 152269, 152270, 152271, 152272 were selected from the ORFs having the nucleotide sequence represented by SEQ ID NO: 81547.

[12949] The probes having the nucleotide sequence represented by SEQ ID NOS: 152273, 152274, 152275, 152276, 152277, 152278, 152279, 152280, 152281, 152282, 152283 were selected from the ORFs having the nucleotide sequence represented by SEQ ID NO: 81548.

[12950] The probes having the nucleotide sequence represented by SEQ ID NOS: 152284, 152285, 152286, 152287, 152288, 152289, 152290, 152291, 152292, 152293, 152294 were selected from the ORFs having the nucleotide sequence represented by SEQ ID NO: 81549.

[12951] The probes having the nucleotide sequence represented by SEQ ID NOS: 152295, 152296, 152297, 152298, 152299, 152300, 152301, 152302, 152303, 152304, 152305 were selected from the ORFs having the nucleotide sequence represented by SEQ ID NO: 81550.

[12952] The probes having the nucleotide sequence represented by SEQ ID NOS: 152306, 152307, 152308, 152309, 152310, 152311, 152312, 152313, 152314, 152315, 152316 were selected from the ORFs having the nucleotide sequence represented by SEQ ID NO: 81551.

[12953] The probes having the nucleotide sequence represented by SEQ ID NOS: 152317, 152318, 152319, 152320, 152321, 152322, 152323, 152324, 152325, 152326, 152327 were selected from the ORFs having the nucleotide sequence represented by SEQ ID NO: 81552.

[12954] The probes having the nucleotide sequence represented by SEQ ID NOS: 152328, 152329, 152330, 152331, 152332, 152333, 152334, 152335, 152336, 152337, 152338 were selected from the ORFs having the nucleotide sequence represented by SEQ ID NO: 81553.

[12955] The probes having the nucleotide sequence represented by SEQ ID NOS: 152339, 152340, 152341, 152342, 152343, 152344, 152345, 152346, 152347, 152348, 152349 were selected from the ORFs having the nucleotide sequence represented by SEQ ID NO: 81554.

[12956] The probes having the nucleotide sequence represented by SEQ ID NOS: 152350, 152351, 152352, 152353, 152354, 152355, 152356, 152357, 152358, 152359, 152360 were selected from the ORFs having the nucleotide sequence represented by SEQ ID NO: 81555.

[12957] The probes having the nucleotide sequence represented by SEQ ID NOS: 152361, 152362, 152363, 152364, 152365, 152366, 152367, 152368, 152369, 152370, 152371 were selected from the ORFs having the nucleotide sequence represented by SEQ ID NO: 81556.

[12958] The probes having the nucleotide sequence represented by SEQ ID NOS: 152372, 152373, 152374, 152375, 152376, 152377, 152378, 152379, 152380, 152381, 152382 were selected from the ORFs having the nucleotide sequence represented by SEQ ID NO: 81557.

[12959] The probes having the nucleotide sequence represented by SEQ ID NOS: 152383, 152384, 152385, 152386, 152387, 152388, 152389, 152390, 152391, 152392, 152393 were selected from the ORFs having the nucleotide sequence represented by SEQ ID NO: 81558.

[12960] The probes having the nucleotide sequence represented by SEQ ID NOS: 152394, 152395, 152396, 152397, 152398, 152399, 152400, 152401, 152402, 152403, 152404 were selected from the ORFs having the nucleotide sequence represented by SEQ ID NO: 81559.

[12961] The probes having the nucleotide sequence represented by SEQ ID NOS: 152405, 152406, 152407, 152408, 152409, 152410, 152411, 152412, 152413, 152414, 152415 were selected from the ORFs having the nucleotide sequence represented by SEQ ID NO: 81560.

[12962] The probes having the nucleotide sequence represented by SEQ ID NOS: 152416, 152417, 152418, 152419, 152420, 152421, 152422, 152423, 152424, 152425, 152426 were selected from the ORFs having the nucleotide sequence represented by SEQ ID NO: 81561.

[12963] The probes having the nucleotide sequence represented by SEQ ID NOS: 152427, 152428, 152429, 152430, 152431, 152432, 152433, 152434, 152435, 152436, 152437 were selected from the ORFs having the nucleotide sequence represented by SEQ ID NO: 81562.

[12964] The probes having the nucleotide sequence represented by SEQ ID NOS: 152438, 152439, 152440, 152441, 152442, 152443, 152444, 152445, 152446, 152447, 152448 were selected from the ORFs having the nucleotide sequence represented by SEQ ID NO: 81563.

[12965] The probes having the nucleotide sequence represented by SEQ ID NOS: 152449, 152450, 152451, 152452, 152453, 152454, 152455, 152456, 152457, 152458, 152459 were selected from the ORFs having the nucleotide sequence represented by SEQ ID NO: 81564.

[12966] The probes having the nucleotide sequence represented by SEQ ID NOS: 152460, 152461, 152462, 152463, 152464, 152465, 152466, 152467, 152468, 152469, 152470, 152471, 152472, 152473, 152474, 152475, 152476, 152477, 152478, 152479, 152480, 152481 were selected from the ORFs having the nucleotide sequence represented by SEQ ID NO: 81565.

[12967] The probes having the nucleotide sequence represented by SEQ ID NOS: 152482, 152483, 152484, 152485, 152486, 152487, 152488, 152489, 152490, 152491, 152492 were selected from the ORFs having the nucleotide sequence represented by SEQ ID NO: 81566.

[12968] The probes having the nucleotide sequence represented by SEQ ID NOS: 152493, 152494, 152495, 152496, 152497, 152498, 152499, 152500, 152501, 152502, 152503 were selected from the ORFs having the nucleotide sequence represented by SEQ ID NO: 81567.

[12969] The probes having the nucleotide sequence represented by SEQ ID NOS: 152504, 152505, 152506, 152507, 152508, 152509, 152510, 152511, 152512, 152513, 152514 were selected from the ORFs having the nucleotide sequence represented by SEQ ID NO: 81568.

[12970] The probes having the nucleotide sequence represented by SEQ ID NOS: 152515, 152516, 152517, 152518, 152519, 152520, 152521, 152522, 152523, 152524, 152525 were selected from the ORFs having the nucleotide sequence represented by SEQ ID NO: 81569.

[12971] The probes having the nucleotide sequence represented by SEQ ID NOS: 152526, 152527, 152528, 152529, 152530, 152531, 152532, 152533, 152534, 152535, 152536 were selected from the ORFs having the nucleotide sequence represented by SEQ ID NO: 81570.

[12972] The probes having the nucleotide sequence represented by SEQ ID NOS: 152537, 152538, 152539, 152540, 152541, 152542, 152543, 152544, 152545, 152546, 152547 were selected from the ORFs having the nucleotide sequence represented by SEQ ID NO: 81571.

[12973] The probes having the nucleotide sequence represented by SEQ ID NOS: 152548, 152549, 152550, 152551, 152552, 152553, 152554, 152555, 152556, 152557, 152558 were selected from the ORFs having the nucleotide sequence represented by SEQ ID NO: 81572.

[12974] The probes having the nucleotide sequence represented by SEQ ID NOS: 152559, 152560, 152561, 152562, 152563, 152564, 152565, 152566, 152567, 152568, 152569 were selected from the ORFs having the nucleotide sequence represented by SEQ ID NO: 81573.

[12975] The probes having the nucleotide sequence represented by SEQ ID NOS: 152570, 152571, 152572, 152573, 152574, 152575, 152576, 152577, 152578, 152579, 152580 were selected from the ORFs having the nucleotide sequence represented by SEQ ID NO: 81574.

[12976] The probes having the nucleotide sequence represented by SEQ ID NOS: 152581, 152582, 152583, 152584, 152585, 152586, 152587, 152588, 152589, 152590, 152591were selected from the ORFs having the nucleotide sequence represented by SEQ ID NO: 81575.

[12977] The probes having the nucleotide sequence represented by SEQ ID NOS: 152592, 152593, 152594, 152595, 152596, 152597, 152598, 152599, 152600, 152601, 152602 were selected from the ORFs having the nucleotide sequence represented by SEQ ID NO: 81576.

[12978] The probes having the nucleotide sequence represented by SEQ ID NOS: 152603, 152604, 152605, 152606, 152607, 152608, 152609, 152610, 152611, 152612, 152613 were selected from the ORFs having the nucleotide sequence represented by SEQ ID NO: 81577.

[12979] The probes having the nucleotide sequence represented by SEQ ID NOS: 152614, 152615, 152616, 152617, 152618, 152619, 152620, 152621, 152622, 152623, 152624 were selected from the ORFs having the nucleotide sequence represented by SEQ ID NO: 81578.

[12980] The probes having the nucleotide sequence represented by SEQ ID NOS: 152625, 152626, 152627, 152628, 152629, 152630, 152631, 152632, 152633, 152634, 152635 were selected from the ORFs having the nucleotide sequence represented by SEQ ID NO: 81579.

[12981] The probes having the nucleotide sequence represented by SEQ ID NOS: 152636, 152637, 152638, 152639, 152640, 152641, 152642, 152643, 152644, 152645, 152646 were selected from the ORFs having the nucleotide sequence represented by SEQ ID NO: 81580.

[12982] The probes having the nucleotide sequence represented by SEQ ID NOS: 152647, 152648, 152649, 152650, 152651, 152652, 152653, 152654, 152655, 152656 were selected from the ORFs having the nucleotide sequence represented by SEQ ID NO: 81581.

[12983] The probes having the nucleotide sequence represented by SEQ ID NOS: 152657, 152658, 152659, 152660, 152661, 152662, 152663, 152664, 152665, 152666, 152667 were selected from the ORFs having the nucleotide sequence represented by SEQ ID NO: 81582.

[12984] The probes having the nucleotide sequence represented by SEQ ID NOS: 152668, 152669, 152670, 152671, 152672, 152673, 152674, 152675, 152676, 152677, 152678 were selected from the ORFs having the nucleotide sequence represented by SEQ ID NO: 81583.

[12985] The probes having the nucleotide sequence represented by SEQ ID NOS: 152679, 152680, 152681, 152682, 152683, 152684, 152685, 152686, 152687, 152688, 152689 were selected from the ORFs having the nucleotide sequence represented by SEQ ID NO: 81584.

[12986] The probes having the nucleotide sequence represented by SEQ ID NOS: 152690, 152691, 152692, 152693, 152694, 152695, 152696, 152697, 152698, 152699, 152700 were selected from the ORFs having the nucleotide sequence represented by SEQ ID NO: 81585.

[12987] The probes having the nucleotide sequence represented by SEQ ID NOS: 152701, 152702, 152703, 152704, 152705, 152706, 152707, 152708, 152709, 152710, 152711 were selected from the ORFs having the nucleotide sequence represented by SEQ ID NO: 81586.

[12988] The probes having the nucleotide sequence represented by SEQ ID NOS: 152712, 152713, 152714, 152715, 152716, 152717, 152718, 152719, 152720, 152721, 152722 were selected from the ORFs having the nucleotide sequence represented by SEQ ID NO: 81587.

[12989] The probes having the nucleotide sequence represented by SEQ ID NOS: 152723, 152724, 152725, 152726, 152727, 152728, 152729, 152730, 152731, 152732, 152733 were selected from the ORFs having the nucleotide sequence represented by SEQ ID NO: 81588.

[12990] The probes having the nucleotide sequence represented by SEQ ID NOS: 152734, 152735, 152736, 152737, 152738, 152739, 152740, 152741, 152742, 152743, 152744 were selected from the ORFs having the nucleotide sequence represented by SEQ ID NO: 81589.

[12991] The probes having the nucleotide sequence represented by SEQ ID NOS: 152745, 152746, 152747, 152748, 152749, 152750, 152751, 152752, 152753, 152754, 152755 were selected from the ORFs having the nucleotide sequence represented by SEQ ID NO: 81590.

[12992] The probes having the nucleotide sequence represented by SEQ ID NOS: 152756, 152757, 152758, 152759, 152760, 152761, 152762, 152763, 152764, 152765, 152766 were selected from the ORFs having the nucleotide sequence represented by SEQ ID NO: 81591.

[12993] The probes having the nucleotide sequence represented by SEQ ID NOS: 152767, 152768, 152769, 152770, 152771, 152772, 152773, 152774, 152775, 152776, 152777 were selected from the ORFs having the nucleotide sequence represented by SEQ ID NO: 81592.

[12994] The probes having the nucleotide sequence represented by SEQ ID NOS: 152778, 152779, 152780, 152781, 152782, 152783, 152784, 152785, 152786, 152787, 152788 were selected from the ORFs having the nucleotide sequence represented by SEQ ID NO: 81593.

[12995] The probes having the nucleotide sequence represented by SEQ ID NOS: 152789, 152790, 152791, 152792, 152793, 152794, 152795, 152796, 152797, 152798, 152799 were selected from the ORFs having the nucleotide sequence represented by SEQ ID NO: 81594.

[12996] The probes having the nucleotide sequence represented by SEQ ID NOS: 152800, 152801, 152802, 152803, 152804, 152805, 152806, 152807, 152808, 152809, 152810 were selected from the ORFs having the nucleotide sequence represented by SEQ ID NO: 81595.

[12997] The probes having the nucleotide sequence represented by SEQ ID NOS: 152811, 152812, 152813, 152814, 152815, 152816, 152817, 152818, 152819, 152820, 152821 were selected from the ORFs having the nucleotide sequence represented by SEQ ID NO: 81596.

[12998] The probes having the nucleotide sequence represented by SEQ ID NOS: 152822, 152823, 152824, 152825, 152826, 152827, 152828, 152829, 152830, 152831, 152832 were selected from the ORFs having the nucleotide sequence represented by SEQ ID NO: 81597.

[12999] The probes having the nucleotide sequence represented by SEQ ID NOS: 152833, 152834, 152835, 152836, 152837, 152838, 152839, 152840, 152841, 152842, 152843 were selected from the ORFs having the nucleotide sequence represented by SEQ ID NO: 81598.

[13000] The probes having the nucleotide sequence represented by SEQ ID NOS: 152844, 152845, 152846, 152847, 152848, 152849, 152850, 152851, 152852, 152853, 152854 were selected from the ORFs having the nucleotide sequence represented by SEQ ID NO: 81599.

[13001] The probes having the nucleotide sequence represented by SEQ ID NOS: 152855, 152856, 152857, 152858, 152859, 152860, 152861, 152862, 152863, 152864, 152865 were selected from the ORFs having the nucleotide sequence represented by SEQ ID NO: 81600.

[13002] The probes having the nucleotide sequence represented by SEQ ID NOS: 152866, 152867, 152868, 152869, 152870, 152871, 152872, 152873, 152874, 152875, 152876 were selected from the ORFs having the nucleotide sequence represented by SEQ ID NO: 81601.

[13003] The probes having the nucleotide sequence represented by SEQ ID NOS: 152877, 152878, 152879, 152880, 152881, 152882, 152883, 152884, 152885, 152886, 152887 were selected from the ORFs having the nucleotide sequence represented by SEQ ID NO: 81602.

[13004] The probes having the nucleotide sequence represented by SEQ ID NOS: 152888, 152889, 152890, 152891, 152892, 152893, 152894, 152895, 152896, 152897, 152898 were selected from the ORFs having the nucleotide sequence represented by SEQ ID NO: 81603.

[13005] The probes having the nucleotide sequence represented by SEQ ID NOS: 152899, 152900, 152901, 152902, 152903, 152904, 152905, 152906, 152907, 152908, 152909 were selected from the ORFs having the nucleotide sequence represented by SEQ ID NO: 81604.

[13006] The probes having the nucleotide sequence represented by SEQ ID NOS: 152910, 152911, 152912, 152913, 152914, 152915, 152916, 152917, 152918, 152919, 152920 were selected from the ORFs having the nucleotide sequence represented by SEQ ID NO: 81605.

[13007] The probes having the nucleotide sequence represented by SEQ ID NOS: 152921, 152922, 152923, 152924, 152925, 152926, 152927, 152928, 152929, 152930, 152931 were selected from the ORFs having the nucleotide sequence represented by SEQ ID NO: 81606.

[13008] The probes having the nucleotide sequence represented by SEQ ID NOS: 152932, 152933, 152934, 152935, 152936, 152937, 152938, 152939, 152940, 152941, 152942 were selected from the ORFs having the nucleotide sequence represented by SEQ ID NO: 81607.

[13009] The probes having the nucleotide sequence represented by SEQ ID NOS: 152943, 152944, 152945, 152946, 152947, 152948, 152949, 152950, 152951, 152952, 152953 were selected from the ORFs having the nucleotide sequence represented by SEQ ID NO: 81608.

[13010] The probes having the nucleotide sequence represented by SEQ ID NOS: 152954, 152955, 152956, 152957, 152958, 152959, 152960, 152961, 152962, 152963, 152964 were selected from the ORFs having the nucleotide sequence represented by SEQ ID NO: 81609.

[13011] The probes having the nucleotide sequence represented by SEQ ID NOS: 152965, 152966, 152967, 152968, 152969, 152970, 152971, 152972, 152973, 152974, 152975 were selected from the ORFs having the nucleotide sequence represented by SEQ ID NO: 81610.

[13012] The probes having the nucleotide sequence represented by SEQ ID NOS: 152976, 152977, 152978, 152979, 152980, 152981, 152982, 152983, 152984, 152985, 152986 were selected from the ORFs having the nucleotide sequence represented by SEQ ID NO: 81611.

[13013] The probes having the nucleotide sequence represented by SEQ ID NOS: 152987, 152988, 152989, 152990, 152991, 152992, 152993, 152994, 152995, 152996, 152997 were selected from the ORFs having the nucleotide sequence represented by SEQ ID NO: 81612.

[13014] The probes having the nucleotide sequence represented by SEQ ID NOS: 152998, 152999, 153000, 153001, 153002, 153003, 153004, 153005, 153006, 153007, 153008 were selected from the ORFs having the nucleotide sequence represented by SEQ ID NO: 81613.

[13015] The probes having the nucleotide sequence represented by SEQ ID NOS: 153009, 153010, 153011, 153012, 153013, 153014, 153015, 153016, 153017, 153018, 153019 were selected from the ORFs having the nucleotide sequence represented by SEQ ID NO: 81614.

[13016] The probes having the nucleotide sequence represented by SEQ ID NOS: 153020, 153021, 153022, 153023, 153024, 153025, 153026, 153027, 153028, 153029, 153030 were selected from the ORFs having the nucleotide sequence represented by SEQ ID NO: 81615.

[13017] The probes having the nucleotide sequence represented by SEQ ID NOS: 153031, 153032, 153033, 153034, 153035, 153036, 153037, 153038, 153039, 153040, 153041 were selected from the ORFs having the nucleotide sequence represented by SEQ ID NO: 81616.

[13018] The probes having the nucleotide sequence represented by SEQ ID NOS: 153042, 153043, 153044, 153045, 153046, 153047, 153048, 153049, 153050, 153051, 153052 were selected from the ORFs having the nucleotide sequence represented by SEQ ID NO: 81617.

[13019] The probes having the nucleotide sequence represented by SEQ ID NOS: 153053, 153054, 153055, 153056, 153057, 153058, 153059, 153060, 153061, 153062, 153063 were selected from the ORFs having the nucleotide sequence represented by SEQ ID NO: 81618.

[13020] The probes having the nucleotide sequence represented by SEQ ID NOS: 153064, 153065, 153066, 153067, 153068, 153069, 153070, 153071, 153072, 153073, 153074, 153075, 153076, 153077, 153078, 153079, 153080, 153081, 153082, 153083, 153084, 153085 were selected from the ORFs having the nucleotide sequence represented by SEQ ID NO: 81619.

[13021] The probes having the nucleotide sequence represented by SEQ ID NOS: 153086, 153087, 153088, 153089, 153090, 153091, 153092, 153093, 153094, 153095, 153096 were selected from the ORFs having the nucleotide sequence represented by SEQ ID NO: 81620.

[13022] The probes having the nucleotide sequence represented by SEQ ID NOS: 153097, 153098, 153099, 153100, 153101, 153102, 153103, 153104, 153105, 153106, 153107 were selected from the ORFs having the nucleotide sequence represented by SEQ ID NO: 81621.

[13023] The probes having the nucleotide sequence represented by SEQ ID NOS: 153108, 153109, 153110, 153111, 153112, 153113, 153114, 153115, 153116, 153117, 153118 were selected from the ORFs having the nucleotide sequence represented by SEQ ID NO: 81622.

[13024] The probes having the nucleotide sequence represented by SEQ ID NOS: 153119, 153120, 153121, 153122, 153123, 153124, 153125, 153126, 153127, 153128, 153129 were selected from the ORFs having the nucleotide sequence represented by SEQ ID NO: 81623.

[13025] The probes having the nucleotide sequence represented by SEQ ID NOS: 153130, 153131, 153132, 153133, 153134, 153135, 153136, 153137, 153138, 153139, 153140 were selected from the ORFs having the nucleotide sequence represented by SEQ ID NO: 81624.

[13026] The probes having the nucleotide sequence represented by SEQ ID NOS: 153141, 153142, 153143, 153144, 153145, 153146, 153147, 153148, 153149, 153150, 153151 were selected from the ORFs having the nucleotide sequence represented by SEQ ID NO: 81625.

[13027] The probes having the nucleotide sequence represented by SEQ ID NOS: 153152, 153153, 153154, 153155, 153156, 153157, 153158, 153159, 153160, 153161, 153162 were selected from the ORFs having the nucleotide sequence represented by SEQ ID NO: 81626.

[13028] The probes having the nucleotide sequence represented by SEQ ID NOS: 153163, 153164, 153165, 153166, 153167, 153168, 153169, 153170, 153171, 153172, 153173 were selected from the ORFs having the nucleotide sequence represented by SEQ ID NO: 81627.

[13029] The probes having the nucleotide sequence represented by SEQ ID NOS: 153174, 153175, 153176, 153177, 153178, 153179, 153180, 153181, 153182, 153183, 153184 were selected from the ORFs having the nucleotide sequence represented by SEQ ID NO: 81628.

[13030] The probes having the nucleotide sequence represented by SEQ ID NOS: 153185, 153186, 153187, 153188, 153189, 153190, 153191, 153192, 153193, 153194, 153195 were selected from the ORFs having the nucleotide sequence represented by SEQ ID NO: 81629.

[13031] The probes having the nucleotide sequence represented by SEQ ID NOS: 153196, 153197, 153198, 153199, 153200, 153201, 153202, 153203, 153204, 153205, 153206 were selected from the ORFs having the nucleotide sequence represented by SEQ ID NO: 81630.

[13032] The probes having the nucleotide sequence represented by SEQ ID NOS: 153207, 153208, 153209, 153210, 153211, 153212, 153213, 153214, 153215, 153216, 153217 were selected from the ORFs having the nucleotide sequence represented by SEQ ID NO: 81631.

[13033] The probes having the nucleotide sequence represented by SEQ ID NOS: 153218, 153219, 153220, 153221, 153222, 153223, 153224, 153225, 153226, 153227, 153228 were selected from the ORFs having the nucleotide sequence represented by SEQ ID NO: 81632.

[13034] The probes having the nucleotide sequence represented by SEQ ID NOS: 153229, 153230, 153231, 153232, 153233, 153234, 153235, 153236, 153237, 153238, 153239 were selected from the ORFs having the nucleotide sequence represented by SEQ ID NO: 81633.

[13035] The probes having the nucleotide sequence represented by SEQ ID NOS: 153240, 153241, 153242, 153243, 153244, 153245, 153246, 153247, 153248, 153249, 153250 were selected from the ORFs having the nucleotide sequence represented by SEQ ID NO: 81634.

[13036] The probes having the nucleotide sequence represented by SEQ ID NOS: 153251, 153252, 153253, 153254, 153255, 153256, 153257, 153258, 153259, 153260, 153261 were selected from the ORFs having the nucleotide sequence represented by SEQ ID NO: 81635.

[13037] The probes having the nucleotide sequence represented by SEQ ID NOS: 153262, 153263, 153264, 153265, 153266, 153267, 153268, 153269, 153270, 153271, 153272 were selected from the ORFs having the nucleotide sequence represented by SEQ ID NO: 81636.

[13038] The probes having the nucleotide sequence represented by SEQ ID NOS: 153273, 153274, 153275, 153276, 153277, 153278, 153279, 153280, 153281, 153282, 153283 were selected from the ORFs having the nucleotide sequence represented by SEQ ID NO: 81637.

[13039] The probes having the nucleotide sequence represented by SEQ ID NOS: 153284, 153285, 153286, 153287, 153288, 153289, 153290, 153291, 153292, 153293, 153294 were selected from the ORFs having the nucleotide sequence represented by SEQ ID NO: 81638.

[13040] The probes having the nucleotide sequence represented by SEQ ID NOS: 153295, 153296, 153297, 153298, 153299, 153300, 153301, 153302, 153303, 153304, 153305 were selected from the ORFs having the nucleotide sequence represented by SEQ ID NO: 81639.

[13041] The probes having the nucleotide sequence represented by SEQ ID NOS: 153306, 153307, 153308, 153309, 153310, 153311, 153312, 153313, 153314, 153315, 153316 were selected from the ORFs having the nucleotide sequence represented by SEQ ID NO: 81640.

[13042] The probes having the nucleotide sequence represented by SEQ ID NOS: 153317, 153318, 153319, 153320, 153321, 153322, 153323, 153324, 153325, 153326, 153327 were selected from the ORFs having the nucleotide sequence represented by SEQ ID NO: 81641.

[13043] The probes having the nucleotide sequence represented by SEQ ID NOS: 153328, 153329, 153330, 153331, 153332, 153333, 153334, 153335, 153336, 153337, 153338 were selected from the ORFs having the nucleotide sequence represented by SEQ ID NO: 81642.

[13044] The probes having the nucleotide sequence represented by SEQ ID NOS: 153339, 153340, 153341, 153342, 153343, 153344, 153345, 153346, 153347, 153348, 153349 were selected from the ORFs having the nucleotide sequence represented by SEQ ID NO: 81643.

[13045] The probes having the nucleotide sequence represented by SEQ ID NOS: 153350, 153351, 153352, 153353, 153354, 153355, 153356, 153357, 153358, 153359, 153360 were selected from the ORFs having the nucleotide sequence represented by SEQ ID NO: 81644.

[13046] The probes having the nucleotide sequence represented by SEQ ID NOS: 153361, 153362, 153363, 153364, 153365, 153366, 153367, 153368, 153369, 153370, 153371 were selected from the ORFs having the nucleotide sequence represented by SEQ ID NO: 81645.

[13047] The probes having the nucleotide sequence represented by SEQ ID NOS: 153372, 153373, 153374, 153375, 153376, 153377, 153378, 153379, 153380, 153381, 153382 were selected from the ORFs having the nucleotide sequence represented by SEQ ID NO: 81646.

[13048] The probes having the nucleotide sequence represented by SEQ ID NOS: 153383, 153384, 153385, 153386, 153387, 153388, 153389, 153390, 153391, 153392, 153393 were selected from the ORFs having the nucleotide sequence represented by SEQ ID NO: 81647.

[13049] The probes having the nucleotide sequence represented by SEQ ID NOS: 153394, 153395, 153396, 153397, 153398, 153399, 153400, 153401, 153402, 153403, 153404 were selected from the ORFs having the nucleotide sequence represented by SEQ ID NO: 81648.

[13050] The probes having the nucleotide sequence represented by SEQ ID NOS: 153405, 153406, 153407, 153408, 153409, 153410, 153411, 153412, 153413, 153414, 153415 were selected from the ORFs having the nucleotide sequence represented by SEQ ID NO: 81649.

[13051] The probes having the nucleotide sequence represented by SEQ ID NOS: 153416, 153417, 153418, 153419, 153420, 153421, 153422, 153423, 153424, 153425, 153426 were selected from the ORFs having the nucleotide sequence represented by SEQ ID NO: 81650.

[13052] The probes having the nucleotide sequence represented by SEQ ID NOS: 153427, 153428, 153429, 153430, 153431, 153432, 153433, 153434, 153435, 153436, 153437 were selected from the ORFs having the nucleotide sequence represented by SEQ ID NO: 81651.

[13053] The probes having the nucleotide sequence represented by SEQ ID NOS: 153438, 153439, 153440, 153441, 153442, 153443, 153444, 153445, 153446, 153447, 153448 were selected from the ORFs having the nucleotide sequence represented by SEQ ID NO: 81652.

[13054] The probes having the nucleotide sequence represented by SEQ ID NOS: 153449, 153450, 153451, 153452, 153453, 153454, 153455, 153456, 153457, 153458, 153459 were selected from the ORFs having the nucleotide sequence represented by SEQ ID NO: 81653.

[13055] The probes having the nucleotide sequence represented by SEQ ID NOS: 153460, 153461, 153462, 153463, 153464, 153465, 153466, 153467, 153468, 153469, 153470 were selected from the ORFs having the nucleotide sequence represented by SEQ ID NO: 81654.

[13056] The probes having the nucleotide sequence represented by SEQ ID NOS: 153471, 153472, 153473, 153474, 153475, 153476, 153477, 153478, 153479, 153480, 153481 were selected from the ORFs having the nucleotide sequence represented by SEQ ID NO: 81655.

[13057] The probes having the nucleotide sequence represented by SEQ ID NOS: 153482, 153483, 153484, 153485, 153486, 153487, 153488, 153489, 153490, 153491, 153492 were selected from the ORFs having the nucleotide sequence represented by SEQ ID NO: 81656.

[13058] The probes having the nucleotide sequence represented by SEQ ID NOS: 153493, 153494, 153495, 153496, 153497, 153498, 153499, 153500, 153501, 153502, 153503 were selected from the ORFs having the nucleotide sequence represented by SEQ ID NO: 81657.

[13059] The probes having the nucleotide sequence represented by SEQ ID NOS: 153504, 153505, 153506, 153507, 153508, 153509, 153510, 153511, 153512, 153513, 153514 were selected from the ORFs having the nucleotide sequence represented by SEQ ID NO: 81658.

[13060] The probes having the nucleotide sequence represented by SEQ ID NOS: 153515, 153516, 153517, 153518, 153519, 153520, 153521, 153522, 153523, 153524, 153525 were selected from the ORFs having the nucleotide sequence represented by SEQ ID NO: 81659.

[13061] The probes having the nucleotide sequence represented by SEQ ID NOS: 153526, 153527, 153528, 153529, 153530, 153531, 153532, 153533, 153534, 153535, 153536 were selected from the ORFs having the nucleotide sequence represented by SEQ ID NO: 81660.

[13062] The probes having the nucleotide sequence represented by SEQ ID NOS: 153537, 153538, 153539, 153540, 153541, 153542, 153543, 153544, 153545, 153546, 153547 were selected from the ORFs having the nucleotide sequence represented by SEQ ID NO: 81661.

[13063] The probes having the nucleotide sequence represented by SEQ ID NOS: 153548, 153549, 153550, 153551, 153552, 153553, 153554, 153555, 153556, 153557, 153558 were selected from the ORFs having the nucleotide sequence represented by SEQ ID NO: 81662.

[13064] The probes having the nucleotide sequence represented by SEQ ID NOS: 153559, 153560, 153561, 153562, 153563, 153564, 153565, 153566, 153567, 153568, 153569 were selected from the ORFs having the nucleotide sequence represented by SEQ ID NO: 81663.

[13065] The probes having the nucleotide sequence represented by SEQ ID NOS: 153570, 153571, 153572, 153573, 153574, 153575, 153576, 153577, 153578, 153579, 153580 were selected from the ORFs having the nucleotide sequence represented by SEQ ID NO: 81664.

[13066] The probes having the nucleotide sequence represented by SEQ ID NOS: 153581, 153582, 153583, 153584, 153585, 153586, 153587, 153588, 153589, 153590, 153591 were selected from the ORFs having the nucleotide sequence represented by SEQ ID NO: 81665.

[13067] The probes having the nucleotide sequence represented by SEQ ID NOS: 153592, 153593, 153594, 153595, 153596, 153597, 153598, 153599, 153600, 153601, 153602 were selected from the ORFs having the nucleotide sequence represented by SEQ ID NO: 81666.

[13068] The probes having the nucleotide sequence represented by SEQ ID NOS: 153603, 153604, 153605, 153606, 153607, 153608, 153609, 153610, 153611, 153612, 153613 were selected from the ORFs having the nucleotide sequence represented by SEQ ID NO: 81667.

[13069] The probes having the nucleotide sequence represented by SEQ ID NOS: 153614, 153615, 153616, 153617, 153618, 153619, 153620, 153621, 153622, 153623, 153624 were selected from the ORFs having the nucleotide sequence represented by SEQ ID NO: 81668.

[13070] The probes having the nucleotide sequence represented by SEQ ID NOS: 153625, 153626, 153627, 153628, 153629, 153630, 153631, 153632, 153633, 153634, 153635 were selected from the ORFs having the nucleotide sequence represented by SEQ ID NO: 81669.

[13071] The probes having the nucleotide sequence represented by SEQ ID NOS: 153636, 153637, 153638, 153639, 153640, 153641, 153642, 153643, 153644, 153645, 153646 were selected from the ORFs having the nucleotide sequence represented by SEQ ID NO: 81670.

[13072] The probes having the nucleotide sequence represented by SEQ ID NOS: 153647, 153648, 153649, 153650, 153651, 153652, 153653, 153654, 153655, 153656, 153657 were selected from the ORFs having the nucleotide sequence represented by SEQ ID NO: 81671.

[13073] The probes having the nucleotide sequence represented by SEQ ID NOS: 153658, 153659, 153660, 153661, 153662, 153663, 153664, 153665, 153666, 153667, 153668 were selected from the ORFs having the nucleotide sequence represented by SEQ ID NO: 81672.

[13074] The probes having the nucleotide sequence represented by SEQ ID NOS: 153669, 153670, 153671, 153672, 153673, 153674, 153675, 153676, 153677, 153678, 153679 were selected from the ORFs having the nucleotide sequence represented by SEQ ID NO: 81673.

[13075] The probes having the nucleotide sequence represented by SEQ ID NOS: 153680, 153681, 153682, 153683, 153684, 153685, 153686, 153687, 153688, 153689, 153690 were selected from the ORFs having the nucleotide sequence represented by SEQ ID NO: 81674.

[13076] The probes having the nucleotide sequence represented by SEQ ID NOS: 153691, 153692, 153693, 153694, 153695, 153696, 153697, 153698, 153699, 153700, 153701 were selected from the ORFs having the nucleotide sequence represented by SEQ ID NO: 81675.

[13077] The probes having the nucleotide sequence represented by SEQ ID NOS: 153702, 153703, 153704, 153705, 153706, 153707, 153708, 153709, 153710, 153711, 153712 were selected from the ORFs having the nucleotide sequence represented by SEQ ID NO: 81676.

[13078] The probes having the nucleotide sequence represented by SEQ ID NOS: 153713, 153714, 153715, 153716, 153717, 153718, 153719, 153720, 153721, 153722, 153723 were selected from the ORFs having the nucleotide sequence represented by SEQ ID NO: 81677.

[13079] The probes having the nucleotide sequence represented by SEQ ID NOS: 153724, 153725, 153726, 153727, 153728, 153729, 153730, 153731, 153732, 153733, 153734 were selected from the ORFs having the nucleotide sequence represented by SEQ ID NO: 81678.

[13080] The probes having the nucleotide sequence represented by SEQ ID NOS: 153735, 153736, 153737, 153738, 153739, 153740, 153741, 153742, 153743, 153744, 153745 were selected from the ORFs having the nucleotide sequence represented by SEQ ID NO: 81679.

[13081] The probes having the nucleotide sequence represented by SEQ ID NOS: 153746, 153747, 153748, 153749, 153750, 153751, 153752, 153753, 153754, 153755, 153756 were selected from the ORFs having the nucleotide sequence represented by SEQ ID NO: 81680.

[13082] The probes having the nucleotide sequence represented by SEQ ID NOS: 153757, 153758, 153759, 153760, 153761, 153762, 153763, 153764, 153765, 153766, 153767 were selected from the ORFs having the nucleotide sequence represented by SEQ ID NO: 81681.

[13083] The probes having the nucleotide sequence represented by SEQ ID NOS: 153768, 153769, 153770, 153771, 153772, 153773, 153774, 153775, 153776, 153777, 153778 were selected from the ORFs having the nucleotide sequence represented by SEQ ID NO: 81682.

[13084] The probes having the nucleotide sequence represented by SEQ ID NOS: 153779, 153780, 153781, 153782, 153783, 153784, 153785, 153786, 153787, 153788, 153789 were selected from the ORFs having the nucleotide sequence represented by SEQ ID NO: 81683.

[13085] The probes having the nucleotide sequence represented by SEQ ID NOS: 153790, 153791, 153792, 153793, 153794, 153795, 153796, 153797, 153798, 153799, 153800 were selected from the ORFs having the nucleotide sequence represented by SEQ ID NO: 81684.

[13086] The probes having the nucleotide sequence represented by SEQ ID NOS: 153801, 153802, 153803, 153804, 153805, 153806, 153807, 153808, 153809, 153810, 153811 were selected from the ORFs having the nucleotide sequence represented by SEQ ID NO: 81685.

[13087] The probes having the nucleotide sequence represented by SEQ ID NOS: 153812, 153813, 153814, 153815, 153816, 153817, 153818, 153819, 153820, 153821, 153822 were selected from the ORFs having the nucleotide sequence represented by SEQ ID NO: 81686.

[13088] The probes having the nucleotide sequence represented by SEQ ID NOS: 153823, 153824, 153825, 153826, 153827, 153828, 153829, 153830, 153831, 153832, 153833 were selected from the ORFs having the nucleotide sequence represented by SEQ ID NO: 81687.

[13089] The probes having the nucleotide sequence represented by SEQ ID NOS: 153834, 153835, 153836, 153837, 153838, 153839, 153840, 153841, 153842, 153843, 153844 were selected from the ORFs having the nucleotide sequence represented by SEQ ID NO: 81688.

[13090] The probes having the nucleotide sequence represented by SEQ ID NOS: 153845, 153846, 153847, 153848, 153849, 153850, 153851, 153852, 153853, 153854, 153855 were selected from the ORFs having the nucleotide sequence represented by SEQ ID NO: 81689.

[13091] The probes having the nucleotide sequence represented by SEQ ID NOS: 153856, 153857, 153858, 153859, 153860, 153861, 153862, 153863, 153864, 153865, 153866 were selected from the ORFs having the nucleotide sequence represented by SEQ ID NO: 81690.

[13092] The probes having the nucleotide sequence represented by SEQ ID NOS: 153867, 153868, 153869, 153870, 153871, 153872, 153873, 153874, 153875, 153876, 153877 were selected from the ORFs having the nucleotide sequence represented by SEQ ID NO: 81691.

[13093] The probes having the nucleotide sequence represented by SEQ ID NOS: 153878, 153879, 153880, 153881, 153882, 153883, 153884, 153885, 153886 were selected from the ORFs having the nucleotide sequence represented by SEQ ID NO: 81692.

[13094] The probes having the nucleotide sequence represented by SEQ ID NOS: 153887, 153888, 153889, 153890, 153891, 153892, 153893, 153894, 153895, 153896, 153897 were selected from the ORFs having the nucleotide sequence represented by SEQ ID NO: 81693.

[13095] The probes having the nucleotide sequence represented by SEQ ID NOS: 153898, 153899, 153900, 153901, 153902, 153903, 153904, 153905, 153906, 153907, 153908 were selected from the ORFs having the nucleotide sequence represented by SEQ ID NO: 81694.

[13096] The probes having the nucleotide sequence represented by SEQ ID NOS: 153909, 153910, 153911, 153912, 153913, 153914, 153915, 153916, 153917, 153918, 153919 were selected from the ORFs having the nucleotide sequence represented by SEQ ID NO: 81695.

[13097] The probes having the nucleotide sequence represented by SEQ ID NOS: 153920, 153921, 153922, 153923, 153924, 153925, 153926, 153927, 153928, 153929, 153930 were selected from the ORFs having the nucleotide sequence represented by SEQ ID NO: 81696.

[13098] The probes having the nucleotide sequence represented by SEQ ID NOS: 153931, 153932, 153933, 153934, 153935, 153936, 153937, 153938, 153939, 153940, 153941 were selected from the ORFs having the nucleotide sequence represented by SEQ ID NO: 81697.

[13099] The probes having the nucleotide sequence represented by SEQ ID NOS: 153942, 153943, 153944, 153945, 153946, 153947, 153948, 153949, 153950, 153951, 153952 were selected from the ORFs having the nucleotide sequence represented by SEQ ID NO: 81698.

[13100] The probes having the nucleotide sequence represented by SEQ ID NOS: 153953, 153954, 153955, 153956, 153957, 153958, 153959, 153960, 153961, 153962, 153963 were selected from the ORFs having the nucleotide sequence represented by SEQ ID NO: 81699.

[13101] The probes having the nucleotide sequence represented by SEQ ID NOS: 153964, 153965, 153966, 153967, 153968, 153969, 153970, 153971, 153972, 153973, 153974 were selected from the ORFs having the nucleotide sequence represented by SEQ ID NO: 81700.

[13102] The probes having the nucleotide sequence represented by SEQ ID NOS: 153975, 153976, 153977, 153978, 153979, 153980, 153981, 153982, 153983, 153984, 153985 were selected from the ORFs having the nucleotide sequence represented by SEQ ID NO: 81701.

[13103] The probes having the nucleotide sequence represented by SEQ ID NOS: 153986, 153987, 153988, 153989, 153990, 153991, 153992, 153993, 153994, 153995, 153996 were selected from the ORFs having the nucleotide sequence represented by SEQ ID NO: 81702.

[13104] The probes having the nucleotide sequence represented by SEQ ID NOS: 153997, 153998, 153999, 154000, 154001, 154002, 154003, 154004, 154005, 154006, 154007 were selected from the ORFs having the nucleotide sequence represented by SEQ ID NO: 81703.

[13105] The probes having the nucleotide sequence represented by SEQ ID NOS: 154008, 154009, 154010, 154011, 154012, 154013, 154014, 154015, 154016, 154017, 154018 were selected from the ORFs having the nucleotide sequence represented by SEQ ID NO: 81704.

[13106] The probes having the nucleotide sequence represented by SEQ ID NOS: 154019, 154020, 154021, 154022, 154023, 154024, 154025, 154026, 154027, 154028, 154029 were selected from the ORFs having the nucleotide sequence represented by SEQ ID NO: 81705.

[13107] The probes having the nucleotide sequence represented by SEQ ID NOS: 154030, 154031, 154032, 154033, 154034, 154035, 154036, 154037, 154038, 154039, 154040 were selected from the ORFs having the nucleotide sequence represented by SEQ ID NO: 81706.

[13108] The probes having the nucleotide sequence represented by SEQ ID NOS: 154041, 154042, 154043, 154044, 154045, 154046, 154047, 154048, 154049, 154050, 154051 were selected from the ORFs having the nucleotide sequence represented by SEQ ID NO: 81707.

[13109] The probes having the nucleotide sequence represented by SEQ ID NOS: 154052, 154053, 154054, 154055, 154056, 154057, 154058, 154059, 154060, 154061, 154062 were selected from the ORFs having the nucleotide sequence represented by SEQ ID NO: 81708.

[13110] The probes having the nucleotide sequence represented by SEQ ID NOS: 154063, 154064, 154065, 154066, 154067, 154068, 154069, 154070, 154071, 154072, 154073 were selected from the ORFs having the nucleotide sequence represented by SEQ ID NO: 81709.

[13111] The probes having the nucleotide sequence represented by SEQ ID NOS: 154074, 154075, 154076, 154077, 154078, 154079, 154080, 154081, 154082, 154083, 154084 were selected from the ORFs having the nucleotide sequence represented by SEQ ID NO: 81710.

[13112] The probes having the nucleotide sequence represented by SEQ ID NOS: 154085, 154086, 154087, 154088, 154089, 154090, 154091, 154092, 154093, 154094, 154095 were selected from the ORFs having the nucleotide sequence represented by SEQ ID NO: 81711.

[13113] The probes having the nucleotide sequence represented by SEQ ID NOS: 154096, 154097, 154098, 154099, 154100, 154101, 154102, 154103, 154104, 154105, 154106 were selected from the ORFs having the nucleotide sequence represented by SEQ ID NO: 81712.

[13114] The probes having the nucleotide sequence represented by SEQ ID NOS: 154107, 154108, 154109, 154110, 154111, 154112, 154113, 154114, 154115, 154116, 154117 were selected from the ORFs having the nucleotide sequence represented by SEQ ID NO: 81713.

[13115] The probes having the nucleotide sequence represented by SEQ ID NOS: 154118, 154119, 154120, 154121, 154122, 154123, 154124, 154125, 154126, 154127, 154128 were selected from the ORFs having the nucleotide sequence represented by SEQ ID NO: 81714.

[13116] The probes having the nucleotide sequence represented by SEQ ID NOS: 154129, 154130, 154131, 154132, 154133, 154134, 154135, 154136, 154137, 154138, 154139 were selected from the ORFs having the nucleotide sequence represented by SEQ ID NO: 81715.

[13117] The probes having the nucleotide sequence represented by SEQ ID NOS: 154140, 154141, 154142, 154143, 154144, 154145, 154146, 154147, 154148, 154149, 154150 were selected from the ORFs having the nucleotide sequence represented by SEQ ID NO: 81716.

[13118] The probes having the nucleotide sequence represented by SEQ ID NOS: 154151, 154152, 154153, 154154, 154155, 154156, 154157, 1541,58, 154159, 154160, 154161 were selected from the ORFs having the nucleotide sequence represented by SEQ ID NO: 81717.

[13119] The probes having the nucleotide sequence represented by SEQ ID NOS: 154162, 154163, 154164, 154165, 154166, 154167, 154168, 154169, 154170, 154171, 154172 were selected from the ORFs having the nucleotide sequence represented by SEQ ID NO: 81718.

[13120] The probes having the nucleotide sequence represented by SEQ ID NOS: 154173, 154174, 154175, 154176, 154177, 154178, 154179, 154180, 154181, 154182, 154183 were selected from the ORFs having the nucleotide sequence represented by SEQ ID NO: 81719.

[13121] The probes having the nucleotide sequence represented by SEQ ID NOS: 154184, 154185, 154186, 154187, 154188, 154189, 154190, 154191, 154192, 154193, 154194 were selected from the ORFs having the nucleotide sequence represented by SEQ ID NO: 81720.

[13122] The probes having the nucleotide sequence represented by SEQ ID NOS: 154195, 154196, 154197, 154198, 154199, 154200, 154201, 154202, 154203, 154204, 154205 were selected from the ORFs having the nucleotide sequence represented by SEQ ID NO: 81721.

[13123] The probes having the nucleotide sequence represented by SEQ ID NOS: 154206, 154207, 154208, 154209, 154210, 154211, 154212, 154213, 154214, 154215, 154216 were selected from the ORFs having the nucleotide sequence represented by SEQ ID NO: 81722.

[13124] The probes having the nucleotide sequence represented by SEQ ID NOS: 154217, 154218, 154219, 154220, 154221, 154222, 154223, 154224, 154225, 154226, 154227 were selected from the ORFs having the nucleotide sequence represented by SEQ ID NO: 81723.

[13125] The probes having the nucleotide sequence represented by SEQ ID NOS: 154228, 154229, 154230, 154231, 154232, 154233, 154234, 154235, 154236, 154237, 154238 were selected from the ORFs having the nucleotide sequence represented by SEQ ID NO: 81724.

[13126] The probes having the nucleotide sequence represented by SEQ ID NOS: 154239, 154240, 154241, 154242, 154243, 154244, 154245, 154246, 154247, 154248, 154249 were selected from the ORFs having the nucleotide sequence represented by SEQ ID NO: 81725.

[13127] The probes having the nucleotide sequence represented by SEQ ID NOS: 154250, 154251, 154252, 154253, 154254, 154255, 154256, 154257, 154258, 154259, 154260 were selected from the ORFs having the nucleotide sequence represented by SEQ ID NO: 81726.

[13128] The probes having the nucleotide sequence represented by SEQ ID NOS: 154261, 154262, 154263, 154264, 154265, 154266, 154267, 154268, 154269, 154270, 154271 were selected from the ORFs having the nucleotide sequence represented by SEQ ID NO: 81727.

[13129] The probes having the nucleotide sequence represented by SEQ ID NOS: 154272, 154273, 154274, 154275, 154276, 154277, 154278, 154279, 154280, 154281, 154282 were selected from the ORFs having the nucleotide sequence represented by SEQ ID NO: 81728.

[13130] The probes having the nucleotide sequence represented by SEQ ID NOS: 154283, 154284, 154285, 154286, 154287, 154288, 154289, 154290, 154291, 154292, 154293 were selected from the ORFs having the nucleotide sequence represented by SEQ ID NO: 81729.

[13131] The probes having the nucleotide sequence represented by SEQ ID NOS: 154294, 154295, 154296, 154297, 154298, 154299, 154300, 154301, 154302, 154303, 154304 were selected from the ORFs having the nucleotide sequence represented by SEQ ID NO: 81730.

[13132] The probes having the nucleotide sequence represented by SEQ ID NOS: 154305, 154306, 154307, 154308, 154309, 154310, 154311, 154312, 154313, 154314, 154315 were selected from the ORFs having the nucleotide sequence represented by SEQ ID NO: 81731.

[13133] The probes having the nucleotide sequence represented by SEQ ID NOS: 154316, 154317, 154318, 154319, 154320, 154321, 154322, 154323, 154324, 154325, 154326 were selected from the ORFs having the nucleotide sequence represented by SEQ ID NO: 81732.

[13134] The probes having the nucleotide sequence represented by SEQ ID NOS: 154327, 154328, 154329, 154330, 154331, 154332, 154333, 154334, 154335, 154336, 154337 were selected from the ORFs having the nucleotide sequence represented by SEQ ID NO: 81733.

[13135] The probes having the nucleotide sequence represented by SEQ ID NOS: 154338, 154339, 154340, 154341, 154342, 154343, 154344, 154345, 154346, 154347, 154348 were selected from the ORFs having the nucleotide sequence represented by SEQ ID NO: 81734.

[13136] The probes having the nucleotide sequence represented by SEQ ID NOS: 154349, 154350, 154351, 154352, 154353, 154354, 154355, 154356, 154357, 154358, 154359, 154360, 154361, 154362, 154363, 154364, 154365, 154366, 154367, 154368, 154369, 154370 were selected from the ORFs having the nucleotide sequence represented by SEQ ID NO: 81735.

[13137] The probes having the nucleotide sequence represented by SEQ ID NOS: 154371, 154372, 154373, 154374, 154375, 154376, 154377, 154378, 154379, 154380, 154381 were selected from the ORFs having the nucleotide sequence represented by SEQ ID NO: 81736.

[13138] The probes having the nucleotide sequence represented by SEQ ID NOS: 154382, 154383, 154384, 154385, 154386, 154387, 154388, 154389, 154390, 154391, 154392 were selected from the ORFs having the nucleotide sequence represented by SEQ ID NO: 81737.

[13139] The probes having the nucleotide sequence represented by SEQ ID NOS: 154393, 154394, 154395, 154396, 154397, 154398, 154399, 154400, 154401, 154402, 154403, 154404, 154405, 154406, 154407, 154408, 154409, 154410, 154411, 154412, 154413, 154414 were selected from the ORFs having the nucleotide sequence represented by SEQ ID NO: 81738.

[13140] The probes having the nucleotide sequence represented by SEQ ID NOS: 154415, 154416, 154417, 154418, 154419, 154420, 154421, 154422, 154423, 154424, 154425, 154426, 154427, 154428, 154429, 154430, 154431, 154432, 154433, 154434, 154435, 154436 were selected from the ORFs having the nucleotide sequence represented by SEQ ID NO: 81739.

[13141] The probes having the nucleotide sequence represented by SEQ ID NOS: 154437, 154438, 154439, 154440, 154441, 154442, 154443, 154444, 154445, 154446, 154447 were selected from the ORFs having the nucleotide sequence represented by SEQ ID NO: 81740.

[13142] The probes having the nucleotide sequence represented by SEQ ID NOS: 154448, 154449, 154450, 154451, 154452, 154453, 154454, 154455, 154456, 154457, 154458 were selected from the ORFs having the nucleotide sequence represented by SEQ ID NO: 81741.

[13143] The probes having the nucleotide sequence represented by SEQ ID NOS: 154459, 154460, 154461, 154462, 154463, 154464, 154465, 154466, 154467, 154468, 154469 were selected from the ORFs having the nucleotide sequence represented by SEQ ID NO: 81742.

[13144] The probes having the nucleotide sequence represented by SEQ ID NOS: 154470, 154471, 154472, 154473, 154474, 154475, 154476, 154477, 154478, 154479, 154480 were selected from the ORFs having the nucleotide sequence represented by SEQ ID NO: 81743.

[13145] The probes having the nucleotide sequence represented by SEQ ID NOS: 154481, 154482, 154483, 154484, 154485, 154486, 154487, 154488, 154489, 154490, 154491 were selected from the ORFs having the nucleotide sequence represented by SEQ ID NO: 81744.

[13146] The probes having the nucleotide sequence represented by SEQ ID NOS: 154492, 154493, 154494, 154495, 154496, 154497, 154498, 154499, 154500, 154501, 154502 were selected from the ORFs having the nucleotide sequence represented by SEQ ID NO: 81745.

[13147] The probes having the nucleotide sequence represented by SEQ ID NOS: 154503, 154504, 154505, 154506, 154507, 154508, 154509, 154510, 154511, 154512, 154513 were selected from the ORFs having the nucleotide sequence represented by SEQ ID NO: 81746.

[13148] The probes having the nucleotide sequence represented by SEQ ID NOS: 154514, 154515, 154516, 154517, 154518, 154519, 154520, 154521, 154522, 154523, 154524 were selected from the ORFs having the nucleotide sequence represented by SEQ ID NO: 81747.

[13149] The probes having the nucleotide sequence represented by SEQ ID NOS: 154525, 154526, 154527, 154528, 154529, 154530, 154531, 154532, 154533, 154534, 154535 were selected from the ORFs having the nucleotide sequence represented by SEQ ID NO: 81748.

[13150] The probes having the nucleotide sequence represented by SEQ ID NOS: 154536, 154537, 154538, 154539, 154540, 154541, 154542, 154543, 154544, 154545, 154546 were selected from the ORFs having the nucleotide sequence represented by SEQ ID NO: 81749.

[13151] The probes having the nucleotide sequence represented by SEQ ID NOS: 154547, 154548, 154549, 154550, 154551, 154552, 154553, 154554, 154555, 154556, 154557 were selected from the ORFs having the nucleotide sequence represented by SEQ ID NO: 81750.

[13152] The probes having the nucleotide sequence represented by SEQ ID NOS: 154558, 154559, 154560, 154561, 154562, 154563, 154564, 154565, 154566, 154567, 154568 were selected from the ORFs having the nucleotide sequence represented by SEQ ID NO: 81751.

[13153] The probes having the nucleotide sequence represented by SEQ ID NOS: 154569, 154570, 154571, 154572, 154573, 154574, 154575, 154576, 154577, 154578, 154579 were selected from the ORFs having the nucleotide sequence represented by SEQ ID NO: 81752.

[13154] The probes having the nucleotide sequence represented by SEQ ID NOS: 154580, 154581, 154582, 154583, 154584, 154585, 154586, 154587, 154588, 154589, 154590 were selected from the ORFs having the nucleotide sequence represented by SEQ ID NO: 81753.

[13155] The probes having the nucleotide sequence represented by SEQ ID NOS: 154591, 154592, 154593, 154594, 154595, 154596, 154597, 154598, 154599, 154600, 154601 were selected from the ORFs having the nucleotide sequence represented by SEQ ID NO: 81754.

[13156] The probes having the nucleotide sequence represented by SEQ ID NOS: 154602, 154603, 154604, 154605, 154606, 154607, 154608, 154609, 154610, 154611, 154612 were selected from the ORFs having the nucleotide sequence represented by SEQ ID NO: 81755.

[13157] The probes having the nucleotide sequence represented by SEQ ID NOS: 154613, 154614, 154615, 154616, 154617, 154618, 154619, 154620, 154621, 154622, 154623 were selected from the ORFs having the nucleotide sequence represented by SEQ ID NO: 81756.

[13158] The probes having the nucleotide sequence represented by SEQ ID NOS: 154624, 154625, 154626, 154627, 154628, 154629, 154630, 154631, 154632, 154633, 154634 were selected from the ORFs having the nucleotide sequence represented by SEQ ID NO: 81757.

[13159] The probes having the nucleotide sequence represented by SEQ ID NOS: 154635, 154636, 154637, 154638, 154639, 154640, 154641, 154642, 154643, 154644, 154645 were selected from the ORFs having the nucleotide sequence represented by SEQ ID NO: 81758.

[13160] The probes having the nucleotide sequence represented by SEQ ID NOS: 154646, 154647, 154648, 154649, 154650, 154651, 154652, 154653, 154654, 154655, 154656 were selected from the ORFs having the nucleotide sequence represented by SEQ ID NO: 81759.

[13161] The probes having the nucleotide sequence represented by SEQ ID NOS: 154657, 154658, 154659, 154660, 154661, 154662, 154663, 154664, 154665, 154666, 154667 were selected from the ORFs having the nucleotide sequence represented by SEQ ID NO: 81760.

[13162] The probes having the nucleotide sequence represented by SEQ ID NOS: 154668, 154669, 154670, 154671, 154672, 154673, 154674, 154675, 154676, 154677, 154678 were selected from the ORFs having the nucleotide sequence represented by SEQ ID NO: 81761.

[13163] The probes having the nucleotide sequence represented by SEQ ID NOS: 154679, 154680, 154681, 154682, 154683, 154684, 154685, 154686, 154687, 154688, 154689 were selected from the ORFs having the nucleotide sequence represented by SEQ ID NO: 81762.

[13164] The probes having the nucleotide sequence represented by SEQ ID NOS: 154690, 154691, 154692, 154693, 154694, 154695, 154696, 154697, 154698, 154699, 154700 were selected from the ORFs having the nucleotide sequence represented by SEQ ID NO: 81763.

[13165] The probes having the nucleotide sequence represented by SEQ ID NOS: 154701, 154702, 154703, 154704, 154705, 154706, 154707, 154708, 154709, 154710, 154711 were selected from the ORFs having the nucleotide sequence represented by SEQ ID NO: 81764.

[13166] The probes having the nucleotide sequence represented by SEQ ID NOS: 154712, 154713, 154714, 154715, 154716, 154717, 154718, 154719, 154720, 154721, 154722 were selected from the ORFs having the nucleotide sequence represented by SEQ ID NO: 81765.

[13167] The probes having the nucleotide sequence represented by SEQ ID NOS: 154723, 154724, 154725, 154726, 154727, 154728, 154729, 154730, 154731, 154732, 154733 were selected from the ORFs having the nucleotide sequence represented by SEQ ID NO: 81766.

[13168] The probes having the nucleotide sequence represented by SEQ ID NOS: 154734, 154735, 154736, 154737, 154738, 154739, 154740, 154741, 154742, 154743, 154744 were selected from the ORFs having the nucleotide sequence represented by SEQ ID NO: 81767.

[13169] The probes having the nucleotide sequence represented by SEQ ID NOS: 154745, 154746, 154747, 154748, 154749, 154750, 154751, 154752, 154753, 154754, 154755 were selected from the ORFs having the nucleotide sequence represented by SEQ ID NO: 81768.

[13170] The probes having the nucleotide sequence represented by SEQ ID NOS: 154756, 154757, 154758, 154759, 154760, 154761, 154762, 154763, 154764, 154765, 154766 were selected from the ORFs having the nucleotide sequence represented by SEQ ID NO: 81769.

[13171] The probes having the nucleotide sequence represented by SEQ ID NOS: 154767, 154768, 154769, 154770, 154771, 154772, 154773, 154774, 154775, 154776, 154777 were selected from the ORFs having the nucleotide sequence represented by SEQ ID NO: 81770.

[13172] The probes having the nucleotide sequence represented by SEQ ID NOS: 154778, 154779, 154780, 154781, 154782, 154783, 154784, 154785, 154786, 154787, 154788 were selected from the ORFs having the nucleotide sequence represented by SEQ ID NO: 81771.

[13173] The probes having the nucleotide sequence represented by SEQ ID NOS: 154789, 154790, 154791, 154792, 154793, 154794, 154795, 154796, 154797, 154798, 154799 were selected from the ORFs having the nucleotide sequence represented by SEQ ID NO: 81772.

[13174] The probes having the nucleotide sequence represented by SEQ ID NOS: 154800, 154801, 154802, 154803, 154804, 154805, 154806, 154807, 154808, 154809, 154810 were selected from the ORFs having the nucleotide sequence represented by SEQ ID NO: 81773.

[13175] The probes having the nucleotide sequence represented by SEQ ID NOS: 154811, 154812, 154813, 154814, 154815, 154816, 154817, 154818, 154819, 154820, 154821 were selected from the ORFs having the nucleotide sequence represented by SEQ ID NO: 81774.

[13176] The probes having the nucleotide sequence represented by SEQ ID NOS: 154822, 154823, 154824, 154825, 154826, 154827, 154828, 154829, 154830, 154831, 154832 were selected from the ORFs having the nucleotide sequence represented by SEQ ID NO: 81775.

[13177] The probes having the nucleotide sequence represented by SEQ ID NOS: 154833, 154834, 154835, 154836, 154837, 154838, 154839, 154840, 154841, 154842, 154843 were selected from the ORFs having the nucleotide sequence represented by SEQ ID NO: 81776.

[13178] The probes having the nucleotide sequence represented by SEQ ID NOS: 154844, 154845, 154846, 154847, 154848, 154849, 154850, 154851, 154852, 154853, 154854 were selected from the ORFs having the nucleotide sequence represented by SEQ ID NO: 81777.

[13179] The probes having the nucleotide sequence represented by SEQ ID NOS: 154855, 154856, 154857, 154858, 154859, 154860, 154861, 154862, 154863, 154864, 154865 were selected from the ORFs having the nucleotide sequence represented by SEQ ID NO: 81778.

[13180] The probes having the nucleotide sequence represented by SEQ ID NOS: 154866, 154867, 154868, 154869, 154870, 154871, 154872, 154873, 154874, 154875, 154876 were selected from the ORFs having the nucleotide sequence represented by SEQ ID NO: 81779.

[13181] The probes having the nucleotide sequence represented by SEQ ID NOS: 154877, 154878, 154879, 154880, 154881, 154882, 154883, 154884, 154885, 154886, 154887 were selected from the ORFs having the nucleotide sequence represented by SEQ ID NO: 81780.

[13182] The probes having the nucleotide sequence represented by SEQ ID NOS: 154888, 154889, 154890, 154891, 154892, 154893, 154894, 154895, 154896, 154897, 154898 were selected from the ORFs having the nucleotide sequence represented by SEQ ID NO: 81781.

[13183] The probes having the nucleotide sequence represented by SEQ ID NOS: 154899, 154900, 154901, 154902, 154903, 154904, 154905, 154906, 154907, 154908, 154909 were selected from the ORFs having the nucleotide sequence represented by SEQ ID NO: 81782.

[13184] The probes having the nucleotide sequence represented by SEQ ID NOS: 154910, 154911, 154912, 154913, 154914, 154915, 154916, 154917, 154918, 154919, 154920 were selected from the ORFs having the nucleotide sequence represented by SEQ ID NO: 81783.

[13185] The probes having the nucleotide sequence represented by SEQ ID NOS: 154921, 154922, 154923, 154924, 154925, 154926, 154927, 154928, 154929, 154930, 154931 were selected from the ORFs having the nucleotide sequence represented by SEQ ID NO: 81784.

[13186] The probes having the nucleotide sequence represented by SEQ ID NOS: 154932, 154933, 154934, 154935, 154936, 154937, 154938, 154939, 154940, 154941, 154942 were selected from the ORFs having the nucleotide sequence represented by SEQ ID NO: 81785.

[13187] The probes having the nucleotide sequence represented by SEQ ID NOS: 154943, 154944, 154945, 154946, 154947, 154948, 154949, 154950, 154951, 154952, 154953 were selected from the ORFs having the nucleotide sequence represented by SEQ ID NO: 81786.

[13188] The probes having the nucleotide sequence represented by SEQ ID NOS: 154954, 154955, 154956, 154957, 154958, 154959, 154960, 154961, 154962, 154963, 154964 were selected from the ORFs having the nucleotide sequence represented by SEQ ID NO: 81787.

[13189] The probes having the nucleotide sequence represented by SEQ ID NOS: 154965, 154966, 154967, 154968, 154969, 154970, 154971, 154972, 154973, 154974, 154975 were selected from the ORFs having the nucleotide sequence represented by SEQ ID NO: 81788.

[13190] The probes having the nucleotide sequence represented by SEQ ID NOS: 154976, 154977, 154978, 154979, 154980, 154981, 154982, 154983, 154984, 154985, 154986 were selected from the ORFs having the nucleotide sequence represented by SEQ ID NO: 81789.

[13191] The probes having the nucleotide sequence represented by SEQ ID NOS: 154987, 154988, 154989, 154990, 154991, 154992, 154993, 154994, 154995, 154996, 154997 were selected from the ORFs having the nucleotide sequence represented by SEQ ID NO: 81790.

[13192] The probes having the nucleotide sequence represented by SEQ ID NOS: 154998, 154999, 155000, 155001, 155002, 155003, 155004, 155005, 155006, 155007, 155008 were selected from the ORFs having the nucleotide sequence represented by SEQ ID NO: 81791.

[13193] The probes having the nucleotide sequence represented by SEQ ID NOS: 155009, 155010, 155011, 155012, 155013, 155014, 155015, 155016, 155017, 155018, 155019 were selected from the ORFs having the nucleotide sequence represented by SEQ ID NO: 81792.

[13194] The probes having the nucleotide sequence represented by SEQ ID NOS: 155020, 155021, 155022, 155023, 155024, 155025, 155026, 155027, 155028, 155029, 155030 were selected from the ORFs having the nucleotide sequence represented by SEQ ID NO: 81793.

[13195] The probes having the nucleotide sequence represented by SEQ ID NOS: 155031, 155032, 155033, 155034, 155035, 155036, 155037, 155038, 155039, 155040, 155041 were selected from the ORFs having the nucleotide sequence represented by SEQ ID NO: 81794.

[13196] The probes having the nucleotide sequence represented by SEQ ID NOS: 155042, 155043, 155044, 155045, 155046, 155047, 155048, 155049, 155050, 155051, 155052 were selected from the ORFs having the nucleotide sequence represented by SEQ ID NO: 81795.

[13197] The probes having the nucleotide sequence represented by SEQ ID NOS: 155053, 155054, 155055, 155056, 155057, 155058, 155059, 155060, 155061, 155062, 155063 were selected from the ORFs having the nucleotide sequence represented by SEQ ID NO: 81796.

[13198] The probes having the nucleotide sequence represented by SEQ ID NOS: 155064, 155065, 155066, 155067, 155068, 155069, 155070, 155071, 155072, 155073, 155074 were selected from the ORFs having the nucleotide sequence represented by SEQ ID NO: 81797.

[13199] The probes having the nucleotide sequence represented by SEQ ID NOS: 155075, 155076, 155077, 155078, 155079, 155080, 155081, 155082, 155083, 155084, 155085 were selected from the ORFs having the nucleotide sequence represented by SEQ ID NO: 81798.

[13200] The probes having the nucleotide sequence represented by SEQ ID NOS: 155086, 155087, 155088, 155089, 155090, 155091, 155092, 155093, 155094, 155095, 155096 were selected from the ORFs having the nucleotide sequence represented by SEQ ID NO: 81799.

[13201] The probes having the nucleotide sequence represented by SEQ ID NOS: 155097, 155098, 155099, 155100, 155101, 155102, 155103, 155104, 155105, 155106, 155107 were selected from the ORFs having the nucleotide sequence represented by SEQ ID NO: 81800.

[13202] The probes having the nucleotide sequence represented by SEQ ID NOS: 155108, 155109, 155110, 155111, 155112, 155113, 155114, 155115, 155116, 155117, 155118 were selected from the ORFs having the nucleotide sequence represented by SEQ ID NO: 81801.

[13203] The probes having the nucleotide sequence represented by SEQ ID NOS: 155119, 155120, 155121, 155122, 155123, 155124, 155125, 155126, 155127, 155128, 155129 were selected from the ORFs having the nucleotide sequence represented by SEQ ID NO: 81802.

[13204] The probes having the nucleotide sequence represented by SEQ ID NOS: 155130, 155131, 155132, 155133, 155134, 155135, 155136, 155137, 155138, 155139, 155140 were selected from the ORFs having the nucleotide sequence represented by SEQ ID NO: 81803.

[13205] The probes having the nucleotide sequence represented by SEQ ID NOS: 155141, 155142, 155143, 155144, 155145, 155146, 155147, 155148, 155149, 155150, 155151 were selected from the ORFs having the nucleotide sequence represented by SEQ ID NO: 81804.

[13206] The probes having the nucleotide sequence represented by SEQ ID NOS: 155152, 155153, 155154, 155155, 155156, 155157, 155158, 155159, 155160, 155161, 155162 were selected from the ORFs having the nucleotide sequence represented by SEQ ID NO: 81805.

[13207] The probes having the nucleotide sequence represented by SEQ ID NOS: 155163, 155164, 155165, 155166, 155167, 155168, 155169, 155170, 155171, 155172, 155173 were selected from the ORFs having the nucleotide sequence represented by SEQ ID NO: 81806.

[13208] The probes having the nucleotide sequence represented by SEQ ID NOS: 155174, 155175, 155176, 155177, 155178, 155179, 155180, 155181, 155182, 155183, 155184 were selected from the ORFs having the nucleotide sequence represented by SEQ ID NO: 81807.

[13209] The probes having the nucleotide sequence represented by SEQ ID NOS: 155185, 155186, 155187, 155188, 155189, 155190, 155191, 155192, 155193, 155194, 155195 were selected from the ORFs having the nucleotide sequence represented by SEQ ID NO: 81808.

[13210] The probes having the nucleotide sequence represented by SEQ ID NOS: 155196, 155197, 155198, 155199, 155200, 155201, 155202, 155203, 155204, 155205, 155206 were selected from the ORFs having the nucleotide sequence represented by SEQ ID NO: 81809.

[13211] The probes having the nucleotide sequence represented by SEQ ID NOS: 155207, 155208, 155209, 155210, 155211, 155212, 155213, 155214, 155215, 155216, 155217 were selected from the ORFs having the nucleotide sequence represented by SEQ ID NO: 81810.

[13212] The probes having the nucleotide sequence represented by SEQ ID NOS: 155218, 155219, 155220, 155221, 155222, 155223, 155224, 155225, 155226, 155227, 155228 were selected from the ORFs having the nucleotide sequence represented by SEQ ID NO: 81811.

[13213] The probes having the nucleotide sequence represented by SEQ ID NOS: 155229, 155230, 155231, 155232, 155233, 155234, 155235, 155236, 155237, 155238, 155239 were selected from the ORFs having the nucleotide sequence represented by SEQ ID NO: 81812.

[13214] The probes having the nucleotide sequence represented by SEQ ID NOS: 155240, 155241, 155242, 155243, 155244, 155245, 155246, 155247, 155248, 155249, 155250 were selected from the ORFs having the nucleotide sequence represented by SEQ ID NO: 81813.

[13215] The probes having the nucleotide sequence represented by SEQ ID NOS: 155251, 155252, 155253, 155254, 155255, 155256, 155257, 155258, 155259, 155260, 155261 were selected from the ORFs having the nucleotide sequence represented by SEQ ID NO: 81814.

[13216] The probes having the nucleotide sequence represented by SEQ ID NOS: 155262, 155263, 155264, 155265, 155266, 155267, 155268, 155269, 155270, 155271, 155272 were selected from the ORFs having the nucleotide sequence represented by SEQ ID NO: 81815.

[13217] The probes having the nucleotide sequence represented by SEQ ID NOS: 155273, 155274, 155275, 155276, 155277, 155278, 155279, 155280, 155281, 155282, 155283 were selected from the ORFs having the nucleotide sequence represented by SEQ ID NO: 81816.

[13218] The probes having the nucleotide sequence represented by SEQ ID NOS: 155284, 155285, 155286, 155287, 155288, 155289, 155290, 155291, 155292, 155293, 155294 were selected from the ORFs having the nucleotide sequence represented by SEQ ID NO: 81817.

[13219] The probes having the nucleotide sequence represented by SEQ ID NOS: 155295, 155296, 155297, 155298, 155299, 155300, 155301, 155302, 155303, 155304, 155305 were selected from the ORFs having the nucleotide sequence represented by SEQ ID NO: 81818.

[13220] The probes having the nucleotide sequence represented by SEQ ID NOS: 155306, 155307, 155308, 155309, 155310, 155311, 155312, 155313, 155314, 155315, 155316 were selected from the ORFs having the nucleotide sequence represented by SEQ ID NO: 81819.

[13221] The probes having the nucleotide sequence represented by SEQ ID NOS: 155317, 155318, 155319, 155320, 155321, 155322, 155323, 155324, 155325, 155326, 155327 were selected from the ORFs having the nucleotide sequence represented by SEQ ID NO: 81820.

[13222] The probes having the nucleotide sequence represented by SEQ ID NOS: 155328, 155329, 155330, 155331, 155332, 155333, 155334, 155335, 155336, 155337, 155338 were selected from the ORFs having the nucleotide sequence represented by SEQ ID NO: 81821.

[13223] The probes having the nucleotide sequence represented by SEQ ID NOS: 155339, 155340, 155341, 155342, 155343, 155344, 155345, 155346, 155347, 155348, 155349 were selected from the ORFs having the nucleotide sequence represented by SEQ ID NO: 81822.

[13224] The probes having the nucleotide sequence represented by SEQ ID NOS: 155350, 155351, 155352, 155353, 155354, 155355, 155356, 155357, 155358, 155359, 155360 were selected from the ORFs having the nucleotide sequence represented by SEQ ID NO: 81823.

[13225] The probes having the nucleotide sequence represented by SEQ ID NOS: 155361, 155362, 155363, 155364, 155365, 155366, 155367, 155368, 155369, 155370, 155371 were selected from the ORFs having the nucleotide sequence represented by SEQ ID NO: 81824.

[13226] The probes having the nucleotide sequence represented by SEQ ID NOS: 155372, 155373, 155374, 155375, 155376, 155377, 155378, 155379, 155380, 155381, 155382 were selected from the ORFs having the nucleotide sequence represented by SEQ ID NO: 81825.

[13227] The probes having the nucleotide sequence represented by SEQ ID NOS: 155383, 155384, 155385, 155386, 155387, 155388, 155389, 155390, 155391, 155392, 155393 were selected from the ORFs having the nucleotide sequence represented by SEQ ID NO: 81826.

[13228] The probes having the nucleotide sequence represented by SEQ ID NOS: 155394, 155395, 155396, 155397, 155398, 155399, 155400, 155401, 155402, 155403, 155404 were selected from the ORFs having the nucleotide sequence represented by SEQ ID NO: 81827.

[13229] The probes having the nucleotide sequence represented by SEQ ID NOS: 155405, 155406, 155407, 155408, 155409, 155410, 155411, 155412, 155413, 155414, 155415 were selected from the ORFs having the nucleotide sequence represented by SEQ ID NO: 81828.

[13230] The probes having the nucleotide sequence represented by SEQ ID NOS: 155416, 155417, 155418, 155419, 155420, 155421, 155422, 155423, 155424, 155425, 155426 were selected from the ORFs having the nucleotide sequence represented by SEQ ID NO: 81829.

[13231] The probes having the nucleotide sequence represented by SEQ ID NOS: 155427, 155428, 155429, 155430, 155431, 155432, 155433, 155434 were selected from the ORFs having the nucleotide sequence represented by SEQ ID NO: 81830.

[13232] The probes having the nucleotide sequence represented by SEQ ID NOS: 155435, 155436, 155437, 155438, 155439, 155440, 155441, 155442, 155443, 155444, 155445 were selected from the ORFs having the nucleotide sequence represented by SEQ ID NO: 81831.

[13233] The probes having the nucleotide sequence represented by SEQ ID NOS: 155446, 155447, 155448, 155449, 155450, 155451, 155452, 155453, 155454, 155455, 155456 were selected from the ORFs having the nucleotide sequence represented by SEQ ID NO: 81832.

[13234] The probes having the nucleotide sequence represented by SEQ ID NOS: 155457, 155458, 155459, 155460, 155461, 155462, 155463, 155464, 155465, 155466, 155467 were selected from the ORFs having the nucleotide sequence represented by SEQ ID NO: 81833.

[13235] The probes having the nucleotide sequence represented by SEQ ID NOS: 155468, 155469, 155470, 155471, 155472, 155473, 155474, 155475, 155476, 155477, 155478 were selected from the ORFs having the nucleotide sequence represented by SEQ ID NO: 81834.

[13236] The probes having the nucleotide sequence represented by SEQ ID NOS: 155479, 155480, 155481, 155482, 155483, 155484, 155485, 155486, 155487, 155488, 155489 were selected from the ORFs having the nucleotide sequence represented by SEQ ID NO: 81835.

[13237] The probes having the nucleotide sequence represented by SEQ ID NOS: 155490, 155491, 155492, 155493, 155494, 155495, 155496, 155497, 155498, 155499, 155500 were selected from the ORFs having the nucleotide sequence represented by SEQ ID NO: 81836.

[13238] The probes having the nucleotide sequence represented by SEQ ID NOS: 155501, 155502, 155503, 155504, 155505, 155506, 155507, 155508, 155509, 155510, 155511 were selected from the ORFs having the nucleotide sequence represented by SEQ ID NO: 81837.

[13239] The probes having the nucleotide sequence represented by SEQ ID NOS: 155512, 155513, 155514, 155515, 155516, 155517, 155518, 155519, 155520, 155521, 155522 were selected from the ORFs having the nucleotide sequence represented by SEQ ID NO: 81838.

[13240] The probes having the nucleotide sequence represented by SEQ ID NOS: 155523, 155524, 155525, 155526, 155527, 155528, 155529, 155530, 155531, 155532, 155533 were selected from the ORFs having the nucleotide sequence represented by SEQ ID NO: 81839.

[13241] The probes having the nucleotide sequence represented by SEQ ID NOS: 155534, 155535, 155536, 155537, 155538, 155539, 155540, 155541, 155542, 155543, 155544 were selected from the ORFs having the nucleotide sequence represented by SEQ ID NO: 81840.

[13242] The probes having the nucleotide sequence represented by SEQ ID NOS: 155545, 155546, 155547, 155548, 155549, 155550, 155551, 155552, 155553, 155554, 155555 were selected from the ORFs having the nucleotide sequence represented by SEQ ID NO: 81841.

[13243] The probes having the nucleotide sequence represented by SEQ ID NOS: 155556, 155557, 155558, 155559, 155560, 155561, 155562, 155563, 155564, 155565, 155566 were selected from the ORFs having the nucleotide sequence represented by SEQ ID NO: 81842.

[13244] The probes having the nucleotide sequence represented by SEQ ID NOS: 155567, 155568, 155569, 155570, 155571, 155572, 155573, 155574, 155575, 155576, 155577 were selected from the ORFs having the nucleotide sequence represented by SEQ ID NO: 81843.

[13245] The probes having the nucleotide sequence represented by SEQ ID NOS: 155578, 155579, 155580, 155581, 155582, 155583, 155584, 155585, 155586, 155587, 155588 were selected from the ORFs having the nucleotide sequence represented by SEQ ID NO: 81844.

[13246] The probes having the nucleotide sequence represented by SEQ ID NOS: 155589, 155590, 155591, 155592, 155593, 155594, 155595, 155596, 155597, 155598, 155599 were selected from the ORFs having the nucleotide sequence represented by SEQ ID NO: 81845.

[13247] The probes having the nucleotide sequence represented by SEQ ID NOS: 155600, 155601, 155602, 155603, 155604, 155605, 155606, 155607, 155608, 155609, 155610 were selected from the ORFs having the nucleotide sequence represented by SEQ ID NO: 81846.

[13248] The probes having the nucleotide sequence represented by SEQ ID NOS: 155611, 155612, 155613, 155614, 155615, 155616, 155617, 155618, 155619, 155620, 155621 were selected from the ORFs having the nucleotide sequence represented by SEQ ID NO: 81847.

[13249] The probes having the nucleotide sequence represented by SEQ ID NOS: 155622, 155623, 155624, 155625, 155626, 155627, 155628, 155629, 155630, 155631, 155632 were selected from the ORFs having the nucleotide sequence represented by SEQ ID NO: 81848.

[13250] The probes having the nucleotide sequence represented by SEQ ID NOS: 155633, 155634, 155635, 155636, 155637, 155638, 155639, 155640, 155641, 155642, 155643 were selected from the ORFs having the nucleotide sequence represented by SEQ ID NO: 81849.

[13251] The probes having the nucleotide sequence represented by SEQ ID NOS: 155644, 155645, 155646, 155647, 155648, 155649, 155650, 155651, 155652, 155653, 155654 were selected from the ORFs having the nucleotide sequence represented by SEQ ID NO: 81850.

[13252] The probes having the nucleotide sequence represented by SEQ ID NOS: 155655, 155656, 155657, 155658, 155659, 155660, 155661, 155662, 155663, 155664, 155665 were selected from the ORFs having the nucleotide sequence represented by SEQ ID NO: 81851.

[13253] The probes having the nucleotide sequence represented by SEQ ID NOS: 155666, 155667, 155668, 155669, 155670, 155671, 155672, 155673, 155674, 155675, 155676 were selected from the ORFs having the nucleotide sequence represented by SEQ ID NO: 81852.

[13254] The probes having the nucleotide sequence represented by SEQ ID NOS: 155677, 155678, 155679, 155680, 155681, 155682, 155683, 155684, 155685, 155686, 155687 were selected from the ORFs having the nucleotide sequence represented by SEQ ID NO: 81853.

[13255] The probes having the nucleotide sequence represented by SEQ ID NOS: 155688, 155689, 155690, 155691, 155692, 155693, 155694, 155695, 155696, 155697, 155698 were selected from the ORFs having the nucleotide sequence represented by SEQ ID NO: 81854.

[13256] The probes having the nucleotide sequence represented by SEQ ID NOS: 155699, 155700, 155701, 155702, 155703, 155704, 155705, 155706, 155707, 155708, 155709 were selected from the ORFs having the nucleotide sequence represented by SEQ ID NO: 81855.

[13257] The probes having the nucleotide sequence represented by SEQ ID NOS: 155710, 155711, 155712, 155713, 155714, 155715, 155716, 155717, 155718, 155719, 155720 were selected from the ORFs having the nucleotide sequence represented by SEQ ID NO: 81856.

[13258] The probes having the nucleotide sequence represented by SEQ ID NOS: 155721, 155722, 155723, 155724, 155725, 155726, 155727, 155728, 155729, 155730, 155731 were selected from the ORFs having the nucleotide sequence represented by SEQ ID NO: 81857.

[13259] The probes having the nucleotide sequence represented by SEQ ID NOS: 155732, 155733, 155734, 155735, 155736, 155737, 155738, 155739, 155740, 155741, 155742 were selected from the ORFs having the nucleotide sequence represented by SEQ ID NO: 81858.

[13260] The probes having the nucleotide sequence represented by SEQ ID NOS: 155743, 155744, 155745, 155746, 155747, 155748, 155749, 155750, 155751, 155752, 155753 were selected from the ORFs having the nucleotide sequence represented by SEQ ID NO: 81859.

[13261] The probes having the nucleotide sequence represented by SEQ ID NOS: 155754, 155755, 155756, 155757, 155758, 155759, 155760, 155761, 155762, 155763, 155764 were selected from the ORFs having the nucleotide sequence represented by SEQ ID NO: 81860.

[13262] The probes having the nucleotide sequence represented by SEQ ID NOS: 155765, 155766, 155767, 155768, 155769, 155770, 155771, 155772, 155773, 155774, 155775 were selected from the ORFs having the nucleotide sequence represented by SEQ ID NO: 81861.

[13263] The probes having the nucleotide sequence represented by SEQ ID NOS: 155776, 155777, 155778, 155779, 155780, 155781, 155782, 155783, 155784, 155785, 155786 were selected from the ORFs having the nucleotide sequence represented by SEQ ID NO: 81862.

[13264] The probes having the nucleotide sequence represented by SEQ ID NOS: 155787, 155788, 155789, 155790, 155791, 155792, 155793, 155794, 155795, 155796, 155797 were selected from the ORFs having the nucleotide sequence represented by SEQ ID NO: 81863.

[13265] The probes having the nucleotide sequence represented by SEQ ID NOS: 155798, 155799, 155800, 155801, 155802, 155803, 155804, 155805, 155806, 155807, 155808 were selected from the ORFs having the nucleotide sequence represented by SEQ ID NO: 81864.

[13266] The probes having the nucleotide sequence represented by SEQ ID NOS: 155809, 155810, 155811, 155812, 155813, 155814, 155815, 155816, 155817, 155818, 155819 were selected from the ORFs having the nucleotide sequence represented by SEQ ID NO: 81865.

[13267] The probes having the nucleotide sequence represented by SEQ ID NOS: 155820, 155821, 155822, 155823, 155824, 155825, 155826, 155827, 155828, 155829, 155830 were selected from the ORFs having the nucleotide sequence represented by SEQ ID NO: 81866.

[13268] The probes having the nucleotide sequence represented by SEQ ID NOS: 155831, 155832, 155833, 155834, 155835, 155836, 155837, 155838, 155839, 155840, 155841 were selected from the ORFs having the nucleotide sequence represented by SEQ ID NO: 81867.

[13269] The probes having the nucleotide sequence represented by SEQ ID NOS: 155842, 155843, 155844, 155845, 155846, 155847, 155848, 155849, 155850, 155851, 155852 were selected from the ORFs having the nucleotide sequence represented by SEQ ID NO: 81868.

[13270] The probes having the nucleotide sequence represented by SEQ ID NOS: 155853, 155854, 155855, 155856, 155857, 155858, 155859, 155860, 155861, 155862, 155863 were selected from the ORFs having the nucleotide sequence represented by SEQ ID NO: 81869.

[13271] The probes having the nucleotide sequence represented by SEQ ID NOS: 155864, 155865, 155866, 155867, 155868, 155869, 155870, 155871, 155872, 155873, 155874 were selected from the ORFs having the nucleotide sequence represented by SEQ ID NO: 81870.

[13272] The probes having the nucleotide sequence represented by SEQ ID NOS: 155875, 155876, 155877, 155878, 155879, 155880, 155881, 155882, 155883, 155884, 155885 were selected from the ORFs having the nucleotide sequence represented by SEQ ID NO: 81871.

[13273] The probes having the nucleotide sequence represented by SEQ ID NOS: 155886, 155887, 155888, 155889, 155890, 155891, 155892, 155893, 155894, 155895, 155896 were selected from the ORFs having the nucleotide sequence represented by SEQ ID NO: 81872.

[13274] The probes having the nucleotide sequence represented by SEQ ID NOS: 155897, 155898, 155899, 155900, 155901, 155902, 155903, 155904, 155905, 155906, 155907 were selected from the ORFs having the nucleotide sequence represented by SEQ ID NO: 81873.

[13275] The probes having the nucleotide sequence represented by SEQ ID NOS: 155908, 155909, 155910, 155911, 155912, 155913, 155914, 155915, 155916, 155917, 155918 were selected from the ORFs having the nucleotide sequence represented by SEQ ID NO: 81874.

[13276] The probes having the nucleotide sequence represented by SEQ ID NOS: 155919, 155920, 155921, 155922, 155923, 155924, 155925, 155926, 155927, 155928, 155929 were selected from the ORFs having the nucleotide sequence represented by SEQ ID NO: 81875.

[13277] The probes having the nucleotide sequence represented by SEQ ID NOS: 155930, 155931, 155932, 155933, 155934, 155935, 155936, 155937, 155938, 155939, 155940 were selected from the ORFs having the nucleotide sequence represented by SEQ ID NO: 81876.

[13278] The probes having the nucleotide sequence represented by SEQ ID NOS: 155941, 155942, 155943, 155944, 155945, 155946, 155947, 155948, 155949, 155950, 155951 were selected from the ORFs having the nucleotide sequence represented by SEQ ID NO: 81877.

[13279] The probes having the nucleotide sequence represented by SEQ ID NOS: 155952, 155953, 155954, 155955, 155956, 155957, 155958, 155959, 155960, 155961, 155962 were selected from the ORFs having the nucleotide sequence represented by SEQ ID NO: 81878.

[13280] The probes having the nucleotide sequence represented by SEQ ID NOS: 155963, 155964, 155965, 155966, 155967, 155968, 155969, 155970, 155971, 155972, 155973 were selected from the ORFs having the nucleotide sequence represented by SEQ ID NO: 81879.

[13281] The probes having the nucleotide sequence represented by SEQ ID NOS: 155974, 155975, 155976, 155977, 155978, 155979, 155980, 155981, 155982, 155983, 155984 were selected from the ORFs having the nucleotide sequence represented by SEQ ID NO: 81880.

[13282] The probes having the nucleotide sequence represented by SEQ ID NOS: 155985, 155986, 155987, 155988, 155989, 155990, 155991, 155992, 155993, 155994, 155995 were selected from the ORFs having the nucleotide sequence represented by SEQ ID NO: 81881.

[13283] The probes having the nucleotide sequence represented by SEQ ID NOS: 155996, 155997, 155998, 155999, 156000, 156001, 156002, 156003, 156004, 156005, 156006 were selected from the ORFs having the nucleotide sequence represented by SEQ ID NO: 81882.

[13284] The probes having the nucleotide sequence represented by SEQ ID NOS: 156007, 156008, 156009, 156010, 156011, 156012, 156013, 156014, 156015, 156016, 156017 were selected from the ORFs having the nucleotide sequence represented by SEQ ID NO: 81883.

[13285] The probes having the nucleotide sequence represented by SEQ ID NOS: 156018, 156019, 156020, 156021, 156022, 156023, 156024, 156025, 156026, 156027, 156028 were selected from the ORFs having the nucleotide sequence represented by SEQ ID NO: 81884.

[13286] The probes having the nucleotide sequence represented by SEQ ID NOS: 156029, 156030, 156031, 156032, 156033, 156034, 156035, 156036, 156037, 156038, 156039 were selected from the ORFs having the nucleotide sequence represented by SEQ ID NO: 81885.

[13287] The probes having the nucleotide sequence represented by SEQ ID NOS: 156040, 156041, 156042, 156043, 156044, 156045, 156046, 156047, 156048, 156049, 156050 were selected from the ORFs having the nucleotide sequence represented by SEQ ID NO: 81886.

[13288] The probes having the nucleotide sequence represented by SEQ ID NOS: 156051, 156052, 156053, 156054, 156055, 156056, 156057, 156058, 156059, 156060, 156061 were selected from the ORFs having the nucleotide sequence represented by SEQ ID NO: 81887.

[13289] The probes having the nucleotide sequence represented by SEQ ID NOS: 156062, 156063, 156064, 156065, 156066, 156067, 156068, 156069, 156070, 156071, 156072 were selected from the ORFs having the nucleotide sequence represented by SEQ ID NO: 81888.

[13290] The probes having the nucleotide sequence represented by SEQ ID NOS: 156073, 156074, 156075, 156076, 156077, 156078, 156079, 156080, 156081, 156082, 156083 were selected from the ORFs having the nucleotide sequence represented by SEQ ID NO: 81889.

[13291] The probes having the nucleotide sequence represented by SEQ ID NOS: 156084, 156085, 156086, 156087, 156088, 156089, 156090, 156091, 156092, 156093, 156094 were selected from the ORFs having the nucleotide sequence represented by SEQ ID NO: 81890.

[13292] The probes having the nucleotide sequence represented by SEQ ID NOS: 156095, 156096, 156097, 156098, 156099, 156100, 156101, 156102, 156103, 156104, 156105 were selected from the ORFs having the nucleotide sequence represented by SEQ ID NO: 81891.

[13293] The probes having the nucleotide sequence represented by SEQ ID NOS: 156106, 156107, 156108, 156109, 156110, 156111, 156112, 156113, 156114, 156115, 156116 were selected from the ORFs having the nucleotide sequence represented by SEQ ID NO: 81892.

[13294] The probes having the nucleotide sequence represented by SEQ ID NOS: 156117, 156118, 156119, 156120, 156121, 156122, 156123, 156124, 156125, 156126, 156127 were selected from the ORFs having the nucleotide sequence represented by SEQ ID NO: 81893.

[13295] The probes having the nucleotide sequence represented by SEQ ID NOS: 156128, 156129, 156130, 156131, 156132, 156133, 156134, 156135, 156136, 156137, 156138, 156139, 156140, 156141, 156142, 156143, 156144, 156145, 156146, 156147, 156148, 156149 were selected from the ORFs having the nucleotide sequence represented by SEQ ID NO: 81894.

[13296] The probes having the nucleotide sequence represented by SEQ ID NOS: 156150, 156151, 156152, 156153, 156154, 156155, 156156, 156157, 156158, 156159, 156160 were selected from the ORFs having the nucleotide sequence represented by SEQ ID NO: 81895.

[13297] The probes having the nucleotide sequence represented by SEQ ID NOS: 156161, 156162, 156163, 156164, 156165, 156166, 156167, 156168, 156169, 156170, 156171 were selected from the ORFs having the nucleotide sequence represented by SEQ ID NO: 81896.

[13298] The probes having the nucleotide sequence represented by SEQ ID NOS: 156172, 156173, 156174, 156175, 156176, 156177, 56178, 156179, 156180, 156181, 156182 were selected from the ORFs having the nucleotide sequence represented by SEQ ID NO: 81897.

[13299] The probes having the nucleotide sequence represented by SEQ ID NOS: 156183, 156184, 156185, 156186, 156187, 156188, 156189, 156190, 156191, 156192, 156193 were selected from the ORFs having the nucleotide sequence represented by SEQ ID NO: 81898.

[13300] The probes having the nucleotide sequence represented by SEQ ID NOS: 156194, 156195, 156196, 156197, 156198, 156199, 156200, 156201, 156202, 156203, 156204 were selected from the ORFs having the nucleotide sequence represented by SEQ ID NOS: 81899.

[13301] The probes having the nucleotide sequence represented by SEQ ID NOS: 156205, 156206, 156207, 156208, 156209, 156210, 156211, 156212, 156213, 156214, 156215 were selected from the ORFs having the nucleotide sequence represented by SEQ ID NO: 81900.

[13302] The probes having the nucleotide sequence represented by SEQ ID NOS: 156216, 156217, 156218, 156219, 156220, 156221, 156222, 156223, 156224, 156225, 156226 were selected from the ORFs having the nucleotide sequence represented by SEQ ID NO: 81901.

[13303] The probes having the nucleotide sequence represented by SEQ ID NOS: 156227, 156228, 156229, 156230, 156231, 156232, 156233, 156234, 156235, 156236, 156237 were selected from the ORFs having the nucleotide sequence represented by SEQ ID NO: 81902.

[13304] The probes having the nucleotide sequence represented by SEQ ID NOS: 156238, 156239, 156240, 156241, 156242, 156243, 156244, 156245, 156246, 156247, 156248 were selected from the ORFs having the nucleotide sequence represented by SEQ ID NO: 81903.

[13305] The probes having the nucleotide sequence represented by SEQ ID NOS: 156249, 156250, 156251, 156252, 156253, 156254, 156255, 156256, 156257, 156258, 156259 were selected from the ORFs having the nucleotide sequence represented by SEQ ID NO: 81904.

[13306] The probes having the nucleotide sequence represented by SEQ ID NOS: 156260, 156261, 156262, 156263, 156264, 156265, 156266, 156267, 156268, 156269, 156270 were selected from the ORFs having the nucleotide sequence represented by SEQ ID NO: 81905.

[13307] The probes having the nucleotide sequence represented by SEQ ID NOS: 156271, 156272, 156273, 156274, 156275, 156276, 156277, 156278, 156279, 156280, 156281 were selected from the ORFs having the nucleotide sequence represented by SEQ ID NO: 81906.

[13308] The probes having the nucleotide sequence represented by SEQ ID NOS: 156282, 156283, 156284, 156285, 156286, 156287, 156288, 156289, 156290, 156291, 156292 were selected from the ORFs having the nucleotide sequence represented by SEQ ID NO: 81907.

[13309] The probes having the nucleotide sequence represented by SEQ ID NOS: 156293, 156294, 156295, 156296, 156297, 156298, 156299, 156300, 156301, 156302, 156303 were selected from the ORFs having the nucleotide sequence represented by SEQ ID NO: 81908.

[13310] The probes having the nucleotide sequence represented by SEQ ID NOS: 156304, 156305, 156306, 156307, 156308, 156309, 156310, 156311, 156312, 156313, 156314 were selected from the ORFs having the nucleotide sequence represented by SEQ ID NO: 81909.

[13311] The probes having the nucleotide sequence represented by SEQ ID NOS: 156315, 156316, 156317, 156318, 156319, 156320, 156321, 156322, 156323, 156324, 156325 were selected from the ORFs having the nucleotide sequence represented by SEQ ID NO: 81910.

[13312] The probes having the nucleotide sequence represented by SEQ ID NOS: 156326, 156327, 156328, 156329, 156330, 156331, 156332, 156333, 156334, 156335, 156336 were selected from the ORFs having the nucleotide sequence represented by SEQ ID NO: 81911.

[13313] The probes having the nucleotide sequence represented by SEQ ID NOS: 156337, 156338, 156339, 156340, 156341, 156342, 156343, 156344, 156345, 156346, 156347 were selected from the ORFs having the nucleotide sequence represented by SEQ ID NO: 81912.

[13314] The probes having the nucleotide sequence represented by SEQ ID NOS: 156348, 156349, 156350, 156351, 156352, 156353, 156354, 156355, 156356, 156357, 156358 were selected from the ORFs having the nucleotide sequence represented by SEQ ID NO: 81913.

[13315] The probes having the nucleotide sequence represented by SEQ ID NOS: 156359, 156360, 156361, 156362, 156363, 156364, 156365, 156366, 156367, 156368, 156369, 156370, 156371, 156372, 156373, 156374, 156375, 156376, 156377, 156378, 156379, 156380 were selected from the ORFs having the nucleotide sequence represented by SEQ ID NO: 81914.

[13316] The probes having the nucleotide sequence represented by SEQ ID NOS: 156381, 156382, 156383, 156384, 156385, 156386, 156387, 156388, 156389, 156390, 156391 were selected from the ORFs having the nucleotide sequence represented by SEQ ID NO: 81915.

[13317] The probes having the nucleotide sequence represented by SEQ ID NOS: 156392, 156393, 156394, 156395, 156396, 156397, 156398, 156399, 156400, 156401, 156402 were selected from the ORFs having the nucleotide sequence represented by SEQ ID NO: 81916.

[13318] The probes having the nucleotide sequence represented by SEQ ID NOS: 156403, 156404, 156405, 156406, 156407, 156408, 156409, 156410, 156411, 156412, 156413 were selected from the ORFs having the nucleotide sequence represented by SEQ ID NO: 81917.

[13319] The probes having the nucleotide sequence represented by SEQ ID NOS: 156414, 156415, 156416, 156417, 156418, 156419, 156420, 156421, 156422, 156423, 156424 were selected from the ORFs having the nucleotide sequence represented by SEQ ID NO: 81918.

[13320] The probes having the nucleotide sequence represented by SEQ ID NOS: 156425, 156426, 156427, 156428, 156429, 156430, 156431, 156432, 156433, 156434, 156435 were selected from the ORFs having the nucleotide sequence represented by SEQ ID NO: 81919.

[13321] The probes having the nucleotide sequence represented by SEQ ID NOS: 156436, 156437, 156438, 156439, 156440, 156441, 156442, 156443, 156444, 156445, 156446 were selected from the ORFs having the nucleotide sequence represented by SEQ ID NO: 81920.

[13322] The probes having the nucleotide sequence represented by SEQ ID NOS: 156447, 156448, 156449, 156450, 156451, 156452, 156453, 156454, 156455, 156456, 156457 were selected from the ORFs having the nucleotide sequence represented by SEQ ID NO: 81921.

[13323] The probes having the nucleotide sequence represented by SEQ ID NOS: 156458, 156459, 156460, 156461, 156462, 156463, 156464, 156465, 156466, 156467, 156468 were selected from the ORFs having the nucleotide sequence represented by SEQ ID NO: 81922.

[13324] The probes having the nucleotide sequence represented by SEQ ID NOS: 156469, 156470, 156471, 156472, 156473, 156474, 156475, 156476, 156477, 156478, 156479 were selected from the ORFs having the nucleotide sequence represented by SEQ ID NO: 81923.

[13325] The probes having the nucleotide sequence represented by SEQ ID NOS: 156480, 156481, 156482, 156483, 156484, 156485, 156486, 156487, 156488, 156489, 156490 were selected from the ORFs having the nucleotide sequence represented by SEQ ID NO: 81924.

[13326] The probes having the nucleotide sequence represented by SEQ ID NOS: 156491, 156492, 156493, 156494, 156495, 156496, 156497, 156498, 156499, 156500, 156501 were selected from the ORFs having the nucleotide sequence represented by SEQ ID NO: 81925.

[13327] The probes having the nucleotide sequence represented by SEQ ID NOS: 156502, 156503, 156504, 156505, 156506, 156507, 156508, 156509, 156510, 156511, 156512 were selected from the ORFs having the nucleotide sequence represented by SEQ ID NO: 81926.

[13328] The probes having the nucleotide sequence represented by SEQ ID NOS: 156513, 156514, 156515, 156516, 156517, 156518, 156519, 156520, 156521, 156522, 156523 were selected from the ORFs having the nucleotide sequence represented by SEQ ID NO: 81927.

[13329] The probes having the nucleotide sequence represented by SEQ ID NOS: 156524, 156525, 156526, 156527, 156528, 156529, 156530, 156531, 156532, 156533, 156534 were selected from the ORFs having the nucleotide sequence represented by SEQ ID NO: 81928.

[13330] The probes having the nucleotide sequence represented by SEQ ID NOS: 156535, 156536, 156537, 156538, 156539, 156540, 156541, 156542, 156543, 156544, 156545 were selected from the ORFs having the nucleotide sequence represented by SEQ ID NO: 81929.

[13331] The probes having the nucleotide sequence represented by SEQ ID NOS: 156546, 156547, 156548, 156549, 156550, 156551, 156552, 156553, 156554, 156555, 156556 were selected from the ORFs having the nucleotide sequence represented by SEQ ID NO: 81930.

[13332] The probes having the nucleotide sequence represented by SEQ ID NOS: 156557, 156558, 156559, 156560, 156561, 156562, 56563, 156564, 156565, 156566, 156567 were selected from the ORFs having the nucleotide sequence represented by SEQ ID NO: 81931.

[13333] The probes having the nucleotide sequence represented by SEQ ID NOS: 156568, 156569, 156570, 156571, 156572, 156573, 156574, 156575, 156576, 156577, 156578 were selected from the ORFs having the nucleotide sequence represented by SEQ ID NO: 81932.

[13334] The probes having the nucleotide sequence represented by SEQ ID NOS: 156579, 156580, 156581, 156582, 156583, 156584, 156585, 156586, 156587, 156588, 156589 were selected from the ORFs having the nucleotide sequence represented by SEQ ID NO: 81933.

[13335] The probes having the nucleotide sequence represented by SEQ ID NOS: 156590, 156591, 156592, 156593, 156594, 156595, 156596, 156597, 156598, 156599, 156600 were selected from the ORFs having the nucleotide sequence represented by SEQ ID NO: 81934.

[13336] The probes having the nucleotide sequence represented by SEQ ID NOS: 156601, 156602, 156603, 156604, 156605, 156606, 156607, 156608, 156609, 156610, 156611 were selected from the ORFs having the nucleotide sequence represented by SEQ ID NO: 81935.

[13337] The probes having the nucleotide sequence represented by SEQ ID NOS: 156612, 156613, 156614, 156615, 156616, 156617, 156618, 156619, 156620, 156621, 156622 were selected from the ORFs having the nucleotide sequence represented by SEQ ID NO: 81936.

[13338] The probes having the nucleotide sequence represented by SEQ ID NOS: 156623, 156624, 156625, 156626, 156627, 156628, 156629, 156630, 156631, 156632, 156633 were selected from the ORFs having the nucleotide sequence represented by SEQ ID NO: 81937.

[13339] The probes having the nucleotide sequence represented by SEQ ID NOS: 156634, 156635, 156636, 156637, 156638, 156639, 156640, 156641, 156642, 156643, 156644 were selected from the ORFs having the nucleotide sequence represented by SEQ ID NO: 81938.

[13340] The probes having the nucleotide sequence represented by SEQ ID NOS: 156645, 156646, 156647, 156648, 156649, 156650, 156651, 156652, 156653, 156654, 156655 were selected from the ORFs having the nucleotide sequence represented by SEQ ID NO: 81939.

[13341] The probes having the nucleotide sequence represented by SEQ ID NOS: 156656, 156657, 156658, 156659, 156660, 156661, 156662, 156663, 156664, 156665, 156666 were selected from the ORFs having the nucleotide sequence represented by SEQ ID NO: 81940.

[13342] The probes having the nucleotide sequence represented by SEQ ID NOS: 156667, 156668, 156669, 156670, 156671, 156672, 156673, 156674, 156675, 156676, 156677 were selected from the ORFs having the nucleotide sequence represented by SEQ ID NO: 81941.

[13343] The probes having the nucleotide sequence represented by SEQ ID NOS: 156678, 156679, 156680, 156681, 156682, 156683, 156684, 156685, 156686, 156687, 156688 were selected from the ORFs having the nucleotide sequence represented by SEQ ID NO: 81942.

[13344] The probes having the nucleotide sequence represented by SEQ ID NOS: 156689, 156690, 156691, 156692, 156693, 156694, 156695, 156696, 156697, 156698, 156699 were selected from the ORFs having the nucleotide sequence represented by SEQ ID NO: 81943.

[13345] The probes having the nucleotide sequence represented by SEQ ID NOS: 156700, 156701, 156702, 156703, 156704, 156705, 156706, 156707, 156708, 156709, 156710 were selected from the ORFs having the nucleotide sequence represented by SEQ ID NO: 81944.

[13346] The probes having the nucleotide sequence represented by SEQ ID NOS: 156711, 156712, 156713, 156714, 156715, 156716, 156717, 156718, 156719, 156720, 156721 were selected from the ORFs having the nucleotide sequence represented by SEQ ID NO: 81945.

[13347] The probes having the nucleotide sequence represented by SEQ ID NOS: 156722, 156723, 156724, 156725, 156726, 156727, 156728, 156729, 156730, 156731, 156732 were selected from the ORFs having the nucleotide sequence represented by SEQ ID NO: 81946.

[13348] The probes having the nucleotide sequence represented by SEQ ID NOS: 156733, 156734, 156735, 156736, 156737, 156738, 156739, 156740, 156741, 156742, 156743 were selected from the ORFs having the nucleotide sequence represented by SEQ ID NO: 81947.

[13349] The probes having the nucleotide sequence represented by SEQ ID NOS: 156744, 156745, 156746, 156747, 156748, 156749, 156750, 156751, 156752, 156753, 156754 were selected from the ORFs having the nucleotide sequence represented by SEQ ID NO: 81948.

[13350] The probes having the nucleotide sequence represented by SEQ ID NOS: 156755, 156756, 156757, 156758, 156759, 156760, 156761, 156762, 156763, 156764, 156765 were selected from the ORFs having the nucleotide sequence represented by SEQ ID NO: 81949.

[13351] The probes having the nucleotide sequence represented by SEQ ID NOS: 156766, 156767, 156768, 156769, 156770, 156771, 156772, 156773, 156774, 156775, 156776 were selected from the ORFs having the nucleotide sequence represented by SEQ ID NO: 81950.

[13352] The probes having the nucleotide sequence represented by SEQ ID NOS: 156777, 156778, 156779, 156780, 156781, 156782, 156783, 156784, 156785, 156786, 156787 were selected from the ORFs having the nucleotide sequence represented by SEQ ID NO: 81951.

[13353] The probes having the nucleotide sequence represented by SEQ ID NOS: 156788, 156789, 156790, 156791, 156792, 156793, 156794, 156795, 156796, 156797, 156798 were selected from the ORFs having the nucleotide sequence represented by SEQ ID NO: 81952.

[13354] The probes having the nucleotide sequence represented by SEQ ID NOS: 156799, 156800, 156801, 156802, 156803, 156804, 156805, 156806, 156807, 156808, 156809 were selected from the ORFs having the nucleotide sequence represented by SEQ ID NO: 81953.

[13355] The probes having the nucleotide sequence represented by SEQ ID NOS: 156810, 156811, 156812, 156813, 156814, 156815, 156816, 156817, 156818, 156819, 156820 were selected from the ORFs having the nucleotide sequence represented by SEQ ID NO: 81954.

[13356] The probes having the nucleotide sequence represented by SEQ ID NOS: 156821, 156822, 156823, 156824, 156825, 156826, 156827, 156828, 156829, 156830, 156831 were selected from the ORFs having the nucleotide sequence represented by SEQ ID NO: 81955.

[13357] The probes having the nucleotide sequence represented by SEQ ID NOS: 156832, 156833, 156834, 156835, 156836, 156837, 156838, 156839, 156840, 156841, 156842 were selected from the ORFs having the nucleotide sequence represented by SEQ ID NO: 81956.

[13358] The probes having the nucleotide sequence represented by SEQ ID NOS: 156843, 156844, 156845, 156846, 156847, 156848, 156849, 156850, 156851, 156852, 156853 were selected from the ORFs having the nucleotide sequence represented by SEQ ID NO: 81957.

[13359] The probes having the nucleotide sequence represented by SEQ ID NOS: 156854, 156855, 156856, 156857, 156858, 156859, 156860, 156861, 156862, 156863, 156864 were selected from the ORFs having the nucleotide sequence represented by SEQ ID NO: 81958.

[13360] The probes having the nucleotide sequence represented by SEQ ID NOS: 156865, 156866, 156867, 156868, 156869, 156870, 156871, 156872, 156873, 156874, 156875 were selected from the ORFs having the nucleotide sequence represented by SEQ ID NO: 81959.

[13361] The probes having the nucleotide sequence represented by SEQ ID NOS: 156876, 156877, 156878, 156879, 156880, 156881, 156882, 156883, 156884, 156885, 156886 were selected from the ORFs having the nucleotide sequence represented by SEQ ID NO: 81960.

[13362] The probes having the nucleotide sequence represented by SEQ ID NOS: 156887, 156888, 156889, 156890, 156891, 156892, 156893, 156894, 156895, 156896, 156897 were selected from the ORFs having the nucleotide sequence represented by SEQ ID NO: 81961.

[13363] The probes having the nucleotide sequence represented by SEQ ID NOS: 156898, 156899, 156900, 156901, 156902, 156903, 156904, 156905, 156906, 156907, 156908 were selected from the ORFs having the nucleotide sequence represented by SEQ ID NO: 81962.

[13364] The probes having the nucleotide sequence represented by SEQ ID NOS: 156909, 156910, 156911, 156912, 156913, 156914, 156915, 156916, 156917, 156918, 156919 were selected from the ORFs having the nucleotide sequence represented by SEQ ID NO: 81963.

[13365] The probes having the nucleotide sequence represented by SEQ ID NOS: 156920, 156921, 156922, 156923, 156924, 156925, 156926, 156927, 156928, 156929, 156930 were selected from the ORFs having the nucleotide sequence represented by SEQ ID NO: 81964.

[13366] The probes having the nucleotide sequence represented by SEQ ID NOS: 156931, 156932, 156933, 156934, 156935, 156936, 156937, 156938, 156939, 156940, 156941 were selected from the ORFs having the nucleotide sequence represented by SEQ ID NO: 81965.

[13367] The probes having the nucleotide sequence represented by SEQ ID NOS: 156942, 156943, 156944, 156945, 156946, 156947, 156948, 156949, 156950, 156951, 156952 were selected from the ORFs having the nucleotide sequence represented by SEQ ID NO: 81966.

[13368] The probes having the nucleotide sequence represented by SEQ ID NOS: 156953, 156954, 156955, 156956, 156957, 156958, 156959, 156960, 156961, 156962, 156963 were selected from the ORFs having the nucleotide sequence represented by SEQ ID NO: 81967.

[13369] The probes having the nucleotide sequence represented by SEQ ID NOS: 156964, 156965, 156966, 156967, 156968, 156969, 156970, 156971, 156972, 156973, 156974 were selected from the ORFs having the nucleotide sequence represented by SEQ ID NO: 81968.

[13370] The probes having the nucleotide sequence represented by SEQ ID NOS: 156975, 156976, 156977, 156978, 156979, 156980, 156981, 156982, 156983, 156984, 156985 were selected from the ORFs having the nucleotide sequence represented by SEQ ID NO: 81969.

[13371] The probes having the nucleotide sequence represented by SEQ ID NOS: 156986, 156987, 156988, 156989, 156990, 156991, 156992, 156993, 156994, 156995, 156996 were selected from the ORFs having the nucleotide sequence represented by SEQ ID NO: 81970.

[13372] The probes having the nucleotide sequence represented by SEQ ID NOS: 156997, 156998, 156999, 157000, 157001, 157002, 157003, 157004, 157005, 157006, 157007 were selected from the ORFs having the nucleotide sequence represented by SEQ ID NO: 81971.

[13373] The probes having the nucleotide sequence represented by SEQ ID NOS: 157008, 157009, 157010, 157011, 157012, 157013, 157014, 157015, 157016, 157017, 157018 were selected from the ORFs having the nucleotide sequence represented by SEQ ID NO: 81972.

[13374] The probes having the nucleotide sequence represented by SEQ ID NOS: 157019, 157020, 157021, 157022, 157023, 157024, 157025, 157026, 157027, 157028, 157029 were selected from the ORFs having the nucleotide sequence represented by SEQ ID NO: 81973.

[13375] The probes having the nucleotide sequence represented by SEQ ID NOS: 157030, 157031, 157032, 157033, 157034, 157035, 157036, 157037, 157038, 157039, 157040 were selected from the ORFs having the nucleotide sequence represented by SEQ ID NO: 81974.

[13376] The probes having the nucleotide sequence represented by SEQ ID NOS: 157041, 157042, 157043, 157044, 157045, 157046, 157047, 157048, 157049, 157050, 157051 were selected from the ORFs having the nucleotide sequence represented by SEQ ID NO: 81975.

[13377] The probes having the nucleotide sequence represented by SEQ ID NOS: 157052, 157053, 157054, 157055, 157056, 157057, 157058, 157059 were selected from the ORFs having the nucleotide sequence represented by SEQ ID NO: 81976.

[13378] The probes having the nucleotide sequence represented by SEQ ID NOS: 157060, 157061, 157062, 157063, 157064, 157065, 157066, 157067, 157068, 157069, 157070 were selected from the ORFs having the nucleotide sequence represented by SEQ ID NO: 81977.

[13379] The probes having the nucleotide sequence represented by SEQ ID NOS: 157071, 157072, 157073, 157074, 157075, 157076, 157077, 157078, 157079, 157080, 157081 were selected from the ORFs having the nucleotide sequence represented by SEQ ID NO: 81978.

[13380] The probes having the nucleotide sequence represented by SEQ ID NOS: 157082, 157083, 157084, 157085, 157086, 157087, 157088, 157089, 157090, 157091, 157092 were selected from the ORFs having the nucleotide sequence represented by SEQ ID NO: 81979.

[13381] The probes having the nucleotide sequence represented by SEQ ID NOS: 157093, 157094, 157095, 157096, 157097, 157098, 157099, 157100, 157101, 157102, 157103 were selected from the ORFs having the nucleotide sequence represented by SEQ ID NO: 81980.

[13382] The probes having the nucleotide sequence represented by SEQ ID NOS: 157104, 157105, 157106, 157107, 157108, 157109, 157110, 157111, 157112, 157113, 157114 were selected from the ORFs having the nucleotide sequence represented by SEQ ID NO: 81981.

[13383] The probes having the nucleotide sequence represented by SEQ ID NOS: 157115, 157116, 157117, 157118, 157119, 157120, 157121, 157122, 157123, 157124, 157125 were selected from the ORFs having the nucleotide sequence represented by SEQ ID NO: 81982.

[13384] The probes having the nucleotide sequence represented by SEQ ID NOS: 157126, 157127, 157128, 157129, 157130, 157131, 157132, 157133, 157134, 157135, 157136 were selected from the ORFs having the nucleotide sequence represented by SEQ ID NO: 81983.

[13385] The probes having the nucleotide sequence represented by SEQ ID NOS: 157137, 157138, 157139, 157140, 157141, 157142, 157143, 157144, 157145, 157146, 157147 were selected from the ORFs having the nucleotide sequence represented by SEQ ID NO: 81984.

[13386] The probes having the nucleotide sequence represented by SEQ ID NOS: 157148, 157149, 157150, 157151, 157152, 157153, 157154, 157155, 157156, 157157, 157158 were selected from the ORFs having the nucleotide sequence represented by SEQ ID NO: 81985.

[13387] The probes having the nucleotide sequence represented by SEQ ID NOS: 157159, 157160, 157161, 157162, 157163, 157164, 157165, 157166, 157167, 157168, 157169 were selected from the ORFs having the nucleotide sequence represented by SEQ ID NO: 81986.

[13388] The probes having the nucleotide sequence represented by SEQ ID NOS: 157170, 157171, 157172, 157173, 157174, 157175, 157176, 157177, 157178, 157179, 157180 were selected from the ORFs having the nucleotide sequence represented by SEQ ID NO: 81987.

[13389] The probes having the nucleotide sequence represented by SEQ ID NOS: 157181, 157182, 157183, 157184, 157185, 157186, 157187, 157188, 157189, 157190, 157191 were selected from the ORFs having the nucleotide sequence represented by SEQ ID NO: 81988.

[13390] The probes having the nucleotide sequence represented by SEQ ID NOS: 157192, 157193, 157194, 157195, 157196, 157197, 157198, 157199, 157200, 157201, 157202 were selected from the ORFs having the nucleotide sequence represented by SEQ ID NO: 81989.

[13391] The probes having the nucleotide sequence represented by SEQ ID NOS: 157203, 157204, 157205, 157206, 157207, 157208, 157209, 157210, 157211, 157212, 157213 were selected from the ORFs having the nucleotide sequence represented by SEQ ID NO: 81990.

[13392] The probes having the nucleotide sequence represented by SEQ ID NOS: 157214, 157215, 157216, 157217, 157218, 157219, 157220, 157221, 157222, 157223, 157224 were selected from the ORFs having the nucleotide sequence represented by SEQ ID NO: 81991.

[13393] The probes having the nucleotide sequence represented by SEQ ID NOS: 157225, 157226, 157227, 157228, 157229, 157230, 157231, 157232, 157233, 157234, 157235 were selected from the ORFs having the nucleotide sequence represented by SEQ ID NO: 81992.

[13394] The probes having the nucleotide sequence represented by SEQ ID NOS: 157236, 157237, 157238, 157239, 157240, 157241, 157242, 157243, 157244, 157245, 157246 were selected from the ORFs having the nucleotide sequence represented by SEQ ID NO: 81993.

[13395] The probes having the nucleotide sequence represented by SEQ ID NOS: 157247, 157248, 157249, 157250, 157251, 157252, 157253, 157254, 157255, 157256, 157257 were selected from the ORFs having the nucleotide sequence represented by SEQ ID NO: 81994.

[13396] The probes having the nucleotide sequence represented by SEQ ID NOS: 157258, 157259, 157260, 157261, 157262, 157263, 157264, 157265, 157266, 157267, 157268 were selected from the ORFs having the nucleotide sequence represented by SEQ ID NO: 81995.

[13397] The probes having the nucleotide sequence represented by SEQ ID NOS: 157269, 157270, 157271, 157272, 157273, 157274, 157275, 157276, 157277, 157278, 157279 were selected from the ORFs having the nucleotide sequence represented by SEQ ID NO: 81996.

[13398] The probes having the nucleotide sequence represented by SEQ ID NOS: 157280, 157281, 157282, 157283, 157284, 157285, 157286, 157287, 157288, 157289, 157290 were selected from the ORFs having the nucleotide sequence represented by SEQ ID NO: 81997.

[13399] The probes having the nucleotide sequence represented by SEQ ID NOS: 157291, 157292, 157293, 157294, 157295, 157296, 157297, 157298, 157299, 157300, 157301 were selected from the ORFs having the nucleotide sequence represented by SEQ ID NO: 81998.

[13400] The probes having the nucleotide sequence represented by SEQ ID NOS: 157302, 157303, 157304, 157305, 157306, 157307, 157308, 157309, 157310, 157311, 157312 were selected from the ORFs having the nucleotide sequence represented by SEQ ID NO: 81999.

[13401] The probes having the nucleotide sequence represented by SEQ ID NOS: 157313, 157314, 157315, 157316, 157317, 157318, 157319, 157320, 157321, 157322, 157323 were selected from the ORFs having the nucleotide sequence represented by SEQ ID NO: 82000.

[13402] The probes having the nucleotide sequence represented by SEQ ID NOS: 157324, 157325, 157326, 157327, 157328, 157329, 157330, 157331, 157332, 157333, 157334 were selected from the ORFs having the nucleotide sequence represented by SEQ ID NO: 82001.

[13403] The probes having the nucleotide sequence represented by SEQ ID NOS: 157335, 157336, 157337, 157338, 157339, 157340, 157341, 157342, 157343, 157344, 157345 were selected from the ORFs having the nucleotide sequence represented by SEQ ID NO: 82002.

[13404] The probes having the nucleotide sequence represented by SEQ ID NOS: 157346, 157347, 157348, 157349, 157350, 157351, 157352, 157353, 157354, 157355, 157356 were selected from the ORFs having the nucleotide sequence represented by SEQ ID NO: 82003.

[13405] The probes having the nucleotide sequence represented by SEQ ID NOS: 157357, 157358, 157359, 157360, 157361, 157362, 157363, 157364, 157365, 157366, 157367 were selected from the ORFs having the nucleotide sequence represented by SEQ ID NO: 82004.

[13406] The probes having the nucleotide sequence represented by SEQ ID NOS: 157368, 157369, 157370, 157371, 157372, 157373, 157374, 157375, 157376, 157377, 157378 were selected from the ORFs having the nucleotide sequence represented by SEQ ID NO: 82005.

[13407] The probes having the nucleotide sequence represented by SEQ ID NOS: 157379, 157380, 157381, 157382, 157383, 157384, 157385, 157386, 157387, 157388, 157389 were selected from the ORFs having the nucleotide sequence represented by SEQ ID NO: 82006.

[13408] The probes having the nucleotide sequence represented by SEQ ID NOS: 157390, 157391, 157392, 157393, 157394, 157395, 157396, 157397, 157398, 157399, 157400 were selected from the ORFs having the nucleotide sequence represented by SEQ ID NO: 82007.

[13409] The probes having the nucleotide sequence represented by SEQ ID NOS: 157401, 157402, 157403, 157404, 157405, 157406, 157407, 157408, 157409, 157410, 157411 were selected from the ORFs having the nucleotide sequence represented by SEQ ID NO: 82008.

[13410] The probes having the nucleotide sequence represented by SEQ ID NOS: 157412, 157413, 157414, 157415, 157416, 157417, 157418, 157419, 157420, 157421, 157422 were selected from the ORFs having the nucleotide sequence represented by SEQ ID NO: 82009.

[13411] The probes having the nucleotide sequence represented by SEQ ID NOS: 157423, 157424, 157425, 157426, 157427, 157428, 157429, 157430, 157431, 157432, 157433 were selected from the ORFs having the nucleotide sequence represented by SEQ ID NO: 82010.

[13412] The probes having the nucleotide sequence represented by SEQ ID NOS: 157434, 157435, 157436, 157437, 157438, 157439, 157440, 157441, 157442, 157443, 157444 were selected from the ORFs having the nucleotide sequence represented by SEQ ID NO: 82011.

[13413] The probes having the nucleotide sequence represented by SEQ ID NOS: 157445, 157446, 157447, 157448, 157449, 157450, 157451, 157452, 157453, 157454, 157455 were selected from the ORFs having the nucleotide sequence represented by SEQ ID NO: 82012.

[13414] The probes having the nucleotide sequence represented by SEQ ID NOS: 157456, 157457, 157458, 157459, 157460, 157461, 157462, 157463, 157464, 157465, 157466 were selected from the ORFs having the nucleotide sequence represented by SEQ ID NO: 82013.

[13415] The probes having the nucleotide sequence represented by SEQ ID NOS: 157467, 157468, 157469, 157470, 157471, 157472, 157473, 157474, 157475, 157476, 157477 were selected from the ORFs having the nucleotide sequence represented by SEQ ID NO: 82014.

[13416] The probes having the nucleotide sequence represented by SEQ ID NOS: 157478, 157479, 157480, 157481, 157482, 157483, 157484, 157485, 157486, 157487, 157488 were selected from the ORFs having the nucleotide sequence represented by SEQ ID NO: 82015.

[13417] The probes having the nucleotide sequence represented by SEQ ID NOS: 157489, 157490, 157491, 157492, 157493, 157494, 157495, 157496, 157497, 157498, 157499were selected from the ORFs having the nucleotide sequence represented by SEQ ID NO: 82016.

[13418] The probes having the nucleotide sequence represented by SEQ ID NOS: 157500, 157501, 157502, 157503, 157504, 157505, 157506, 157507, 157508, 157509, 157510 were selected from the ORFs having the nucleotide sequence represented by SEQ ID NO: 82017.

[13419] The probes having the nucleotide sequence represented by SEQ ID NOS: 157511, 157512, 157513, 157514, 157515, 157516, 157517, 157518, 157519, 157520, 157521 were selected from the ORFs having the nucleotide sequence represented by SEQ ID NO: 82018.

[13420] The probes having the nucleotide sequence represented by SEQ ID NOS: 157522, 157523, 157524, 157525, 157526, 157527, 157528, 157529, 157530, 157531, 157532 were selected from the ORFs having the nucleotide sequence represented by SEQ ID NO: 82019.

[13421] The probes having the nucleotide sequence represented by SEQ ID NOS: 157533, 157534, 157535, 157536, 157537, 157538, 157539, 157540, 157541, 157542, 157543 were selected from the ORFs having the nucleotide sequence represented by SEQ ID NO: 82020.

[13422] The probes having the nucleotide sequence represented by SEQ ID NOS: 157544, 157545, 157546, 157547, 157548, 157549, 157550, 157551, 157552, 157553, 157554 were selected from the ORFs having the nucleotide sequence represented by SEQ ID NO: 82021.

[13423] The probes having the nucleotide sequence represented by SEQ ID NOS: 157555, 157556, 157557, 157558, 157559, 157560 157561, 157562, 157563, 157564, 157565 were selected from the ORFs having the nucleotide sequence represented by SEQ ID NO: 82022.

[13424] The probes having the nucleotide sequence represented by SEQ ID NOS: 157566, 157567, 157568, 157569, 157570, 157571, 157572, 157573, 157574, 157575, 157576 were selected from the ORFs having the nucleotide sequence represented by SEQ ID NO: 82023.

[13425] The probes having the nucleotide sequence represented by SEQ ID NOS: 157577, 157578, 157579, 157580, 157581, 157582, 157583, 157584, 157585, 157586, 157587 were selected from the ORFs having the nucleotide sequence represented by SEQ ID NO: 82024.

[13426] The probes having the nucleotide sequence represented by SEQ ID NOS: 157588, 157589, 157590, 157591, 157592, 157593, 157594, 157595, 157596, 157597, 157598 were selected from the ORFs having the nucleotide sequence represented by SEQ ID NO: 82025.

[13427] The probes having the nucleotide sequence represented by SEQ ID NOS: 157599, 157600, 157601, 157602, 157603, 157604, 157605, 157606, 157607, 157608, 157609 were selected from the ORFs having the nucleotide sequence represented by SEQ ID NO: 82026.

[13428] The probes having the nucleotide sequence represented by SEQ ID NOS: 157610, 157611, 157612, 157613, 157614, 157615, 157616, 157617, 157618, 157619, 157620 were selected from the ORFs having the nucleotide sequence represented by SEQ ID NO: 82027.

[13429] The probes having the nucleotide sequence represented by SEQ ID NOS: 157621, 157622, 157623, 157624, 157625, 157626, 157627, 157628, 157629, 157630, 157631 were selected from the ORFs having the nucleotide sequence represented by SEQ ID NO: 82028.

[13430] The probes having the nucleotide sequence represented by SEQ ID NOS: 157632, 157633, 157634, 157635, 157636, 157637, 157638, 157639, 157640, 157641, 157642 were selected from the ORFs having the nucleotide sequence represented by SEQ ID NO: 82029.

[13431] The probes having the nucleotide sequence represented by SEQ ID NOS: 157643, 157644, 157645, 157646, 157647, 157648, 157649, 157650, 157651, 157652, 157653 were selected from the ORFs having the nucleotide sequence represented by SEQ ID NO: 82030.

[13432] The probes having the nucleotide sequence represented by SEQ ID NOS: 157654, 157655, 157656, 157657, 157658, 157659, 157660, 157661, 157662, 157663, 157664 were selected from the ORFs having the nucleotide sequence represented by SEQ ID NO: 82031.

[13433] The probes having the nucleotide sequence represented by SEQ ID NOS: 157665, 157666, 157667, 157668, 157669, 157670, 157671, 157672, 157673, 157674, 157675 were selected from the ORFs having the nucleotide sequence represented by SEQ ID NO: 82032.

[13434] The probes having the nucleotide sequence represented by SEQ ID NOS: 157676, 157677, 157678, 157679, 157680, 157681, 157682, 157683, 157684, 157685, 157686 were selected from the ORFs having the nucleotide sequence represented by SEQ ID NO: 82033.

[13435] The probes having the nucleotide sequence represented by SEQ ID NOS: 157687, 157688, 157689, 157690, 157691, 157692, 157693, 157694, 157695, 157696, 157697 were selected from the ORFs having the nucleotide sequence represented by SEQ ID NO: 82034.

[13436] The probes having the nucleotide sequence represented by SEQ ID NOS: 157698, 157699, 157700, 157701, 157702, 157703, 157704, 157705, 157706, 157707, 157708 were selected from the ORFs having the nucleotide sequence represented by SEQ ID NO: 82035.

[13437] The probes having the nucleotide sequence represented by SEQ ID NOS: 157709, 157710, 157711, 157712, 157713, 157714, 157715, 157716, 157717, 157718, 157719 were selected from the ORFs having the nucleotide sequence represented by SEQ ID NO: 82036.

[13438] The probes having the nucleotide sequence represented by SEQ ID NOS: 157720, 157721, 157722, 157723, 157724, 157725, 157726, 157727, 157728, 157729, 157730 were selected from the ORFs having the nucleotide sequence represented by SEQ ID NO: 82037.

[13439] The probes having the nucleotide sequence represented by SEQ ID NOS: 157731, 157732, 157733, 157734, 157735, 157736, 157737, 157738, 157739, 157740, 157741 were selected from the ORFs having the nucleotide sequence represented by SEQ ID NO: 82038.

[13440] The probes having the nucleotide sequence represented by SEQ ID NOS: 157742, 157743, 157744, 157745, 157746, 157747, 157748, 157749, 157750, 157751, 157752 were selected from the ORFs having the nucleotide sequence represented by SEQ ID NO: 82039.

[13441] The probes having the nucleotide sequence represented by SEQ ID NOS: 157753, 157754, 157755, 157756, 157757, 157758, 157759, 157760, 157761, 157762, 157763 were selected from the ORFs having the nucleotide sequence represented by SEQ ID NO: 82040.

[13442] The probes having the nucleotide sequence represented by SEQ ID NOS: 157764, 157765, 157766, 157767, 157768, 157769, 157770, 157771, 157772, 157773, 157774 were selected from the ORFs having the nucleotide sequence represented by SEQ ID NO: 82041.

[13443] The probes having the nucleotide sequence represented by SEQ ID NOS: 157775, 157776, 157777, 157778, 157779, 157780, 157781, 157782, 157783, 157784, 157785 were selected from the ORFs having the nucleotide sequence represented by SEQ ID NO: 82042.

[13444] The probes having the nucleotide sequence represented by SEQ ID NOS: 157786, 157787, 157788, 157789, 157790, 157791, 157792, 157793, 157794, 157795, 157796 were selected from the ORFs having the nucleotide sequence represented by SEQ ID NO: 82043.

[13445] The probes having the nucleotide sequence represented by SEQ ID NOS: 157797, 157798, 157799, 157800, 157801, 157802, 157803, 157804, 157805, 157806, 157807 were selected from the ORFs having the nucleotide sequence represented by SEQ ID NO: 82044.

[13446] The probes having the nucleotide sequence represented by SEQ ID NOS: 157808, 157809, 157810, 157811, 157812, 157813, 157814, 157815, 157816, 157817, 157818 were selected from the ORFs having the nucleotide sequence represented by SEQ ID NO: 82045.

[13447] The probes having the nucleotide sequence represented by SEQ ID NOS: 157819, 157820, 157821, 157822, 157823, 157824, 157825, 157826, 157827, 157828, 157829 were selected from the ORFs having the nucleotide sequence represented by SEQ ID NO: 82046.

[13448] The probes having the nucleotide sequence represented by SEQ ID NOS: 157830, 157831, 157832, 157833, 157834, 157835, 157836, 157837, 157838, 157839, 157840 were selected from the ORFs having the nucleotide sequence represented by SEQ ID NO: 82047.

[13449] The probes having the nucleotide sequence represented by SEQ ID NOS: 157841, 157842, 157843, 157844, 157845, 157846, 157847, 157848, 157849, 157850, 157851 were selected from the ORFs having the nucleotide sequence represented by SEQ ID NO: 82048.

[13450] The probes having the nucleotide sequence represented by SEQ ID NOS: 157852, 157853, 157854, 157855, 157856, 157857, 157858, 157859, 157860, 157861, 157862 were selected from the ORFs having the nucleotide sequence represented by SEQ ID NO: 82049.

[13451] The probes having the nucleotide sequence represented by SEQ ID NOS: 157863, 157864, 157865, 157866, 157867, 157868, 157869, 157870, 157871, 157872, 157873 were selected from the ORFs having the nucleotide sequence represented by SEQ ID NO: 82050.

[13452] The probes having the nucleotide sequence represented by SEQ ID NOS: 157874, 157875, 157876, 157877, 157878, 157879, 157880, 157881, 157882, 157883, 157884 were selected from the ORFs having the nucleotide sequence represented by SEQ ID NO: 82051.

[13453] The probes having the nucleotide sequence represented by SEQ ID NOS: 157885, 157886, 157887, 157888, 157889, 157890, 157891, 157892, 157893, 157894, 157895 were selected from the ORFs having the nucleotide sequence represented by SEQ ID NO: 82052.

[13454] The probes having the nucleotide sequence represented by SEQ ID NOS: 157896, 157897, 157898, 157899, 157900, 157901, 157902, 157903, 157904, 157905, 157906 were selected from the ORFs having the nucleotide sequence represented by SEQ ID NO: 82053.

[13455] The probes having the nucleotide sequence represented by SEQ ID NOS: 157907, 157908, 157909, 157910, 157911, 157912, 157913, 157914, 157915, 157916, 157917 were selected from the ORFs having the nucleotide sequence represented by SEQ ID NO: 82054.

[13456] The probes having the nucleotide sequence represented by SEQ ID NOS: 157918, 157919, 157920, 157921, 157922, 157923, 157924, 157925, 157926, 157927, 157928 were selected from the ORFs having the nucleotide sequence represented by SEQ ID NO: 82055.

[13457] The probes having the nucleotide sequence represented by SEQ ID NOS: 157929, 157930, 157931, 157932, 157933, 157934, 157935, 157936, 157937, 157938, 157939 were selected from the ORFs having the nucleotide sequence represented by SEQ ID NO: 82056.

[13458] The probes having the nucleotide sequence represented by SEQ ID NOS: 157940, 157941, 157942, 157943, 157944, 157945, 157946, 157947, 157948, 157949, 157950 were selected from the ORFs having the nucleotide sequence represented by SEQ ID NO: 82057.

[13459] The probes having the nucleotide sequence represented by SEQ ID NOS: 157951, 157952, 157953, 157954, 157955, 157956, 157957, 157958, 157959, 157960, 157961 were selected from the ORFs having the nucleotide sequence represented by SEQ ID NO: 82058.

[13460] The probes having the nucleotide sequence represented by SEQ ID NOS: 157962, 157963, 157964, 157965, 157966, 157967, 157968, 157969, 157970, 157971, 157972 were selected from the ORFs having the nucleotide sequence represented by SEQ ID NO: 82059.

[13461] The probes having the nucleotide sequence represented by SEQ ID NOS: 157973, 157974, 157975, 157976, 157977, 157978, 157979, 157980, 157981, 157982, 157983 were selected from the ORFs having the nucleotide sequence represented by SEQ ID NO: 82060.

[13462] The probes having the nucleotide sequence represented by SEQ ID NOS: 157984, 157985, 157986, 157987, 157988, 157989, 157990, 157991, 157992, 157993, 157994 were selected from the ORFs having the nucleotide sequence represented by SEQ ID NO: 82061.

[13463] The probes having the nucleotide sequence represented by SEQ ID NOS: 157995, 157996, 157997, 157998, 157999, 158000, 158001, 158002, 158003, 158004, 158005 were selected from the ORFs having the nucleotide sequence represented by SEQ ID NO: 82062.

[13464] The probes having the nucleotide sequence represented by SEQ ID NOS: 158006, 158007, 158008, 158009, 158010, 158011, 158012, 158013, 158014, 158015, 158016 were selected from the ORFs having the nucleotide sequence represented by SEQ ID NO: 82063.

[13465] The probes having the nucleotide sequence represented by SEQ ID NOS: 158017, 158018, 158019, 158020, 158021, 158022, 158023, 158024, 158025, 158026, 158027 were selected from the ORFs having the nucleotide sequence represented by SEQ ID NO: 82064.

[13466] The probes having the nucleotide sequence represented by SEQ ID NOS: 158028, 158029, 158030, 158031, 158032, 158033, 158034, 158035, 158036, 158037, 158038 were selected from the ORFs having the nucleotide sequence represented by SEQ ID NO: 82065.

[13467] The probes having the nucleotide sequence represented by SEQ ID NOS: 158039, 158040, 158041, 158042, 158043, 158044, 158045, 158046, 158047, 158048, 158049 were selected from the ORFs having the nucleotide sequence represented by SEQ ID NO: 82066.

[13468] The probes having the nucleotide sequence represented by SEQ ID NOS: 158050, 158051, 158052, 158053, 158054, 158055, 158056, 158057, 158058, 158059, 158060 were selected from the ORFs having the nucleotide sequence represented by SEQ ID NO: 82067.

[13469] The probes having the nucleotide sequence represented by SEQ ID NOS: 158061, 158062, 158063, 158064, 158065, 158066, 158067, 158068, 158069, 158070, 158071 were selected from the ORFs having the nucleotide sequence represented by SEQ ID NO: 82068.

[13470] The probes having the nucleotide sequence represented by SEQ ID NOS: 158072, 158073, 158074, 158075, 158076, 158077, 158078, 158079, 158080, 158081, 158082 were selected from the ORFs having the nucleotide sequence represented by SEQ ID NO: 82069.

[13471] The probes having the nucleotide sequence represented by SEQ ID NOS: 158083, 158084, 158085, 158086, 158087, 158088, 158089, 158090, 158091, 158092, 158093were selected from the ORFs having the nucleotide sequence represented by SEQ ID NO: 82070.

[13472] The probes having the nucleotide sequence represented by SEQ ID NOS: 158094, 158095, 158096, 158097, 158098, 158099, 158100, 158101, 158102, 158103, 158104 were selected from the ORFs having the nucleotide sequence represented by SEQ ID NO: 82071.

[13473] The probes having the nucleotide sequence represented by SEQ ID NOS: 158105, 158106, 158107, 158108, 158109, 158110, 158111, 158112, 158113, 158114, 158115 were selected from the ORFs having the nucleotide sequence represented by SEQ ID NO: 82072.

[13474] The probes having the nucleotide sequence represented by SEQ ID NOS: 158116, 158117, 158118, 158119, 158120, 158121, 158122, 158123, 158124, 158125, 158126 were selected from the ORFs having the nucleotide sequence represented by SEQ ID NO: 82073.

[13475] The probes having the nucleotide sequence represented by SEQ ID NOS: 158127, 158128, 158129, 158130, 158131, 158132, 158133, 158134, 158135, 158136, 158137, 158138, 158139, 158140, 158141, 158142, 158143, 158144, 158145, 158146, 158147 were selected from the ORFs having the nucleotide sequence represented by SEQ ID NO: 82074.

[13476] The probes having the nucleotide sequence represented by SEQ ID NOS: 158148, 158149, 158150, 158151, 158152, 158153, 158154, 158155, 158156, 158157, 158158 were selected from the ORFs having the nucleotide sequence represented by SEQ ID NO: 82075.

[13477] The probes having the nucleotide sequence represented by SEQ ID NOS: 158159, 158160, 158161, 158162, 158163, 158164, 158165, 158166, 158167, 158168, 158169 were selected from the ORFs having the nucleotide sequence represented by SEQ ID NO: 82076.

[13478] The probes having the nucleotide sequence represented by SEQ ID NOS: 158170, 158171, 158172, 158173, 158174, 158175, 158176, 158177, 158178, 158179, 158180 were selected from the ORFs having the nucleotide sequence represented by SEQ ID NO: 82077.

[13479] The probes having the nucleotide sequence represented by SEQ ID NOS: 158181, 158182, 158183, 158184, 158185, 158186, 158187, 158188, 158189, 158190, 158191 were selected from the ORFs having the nucleotide sequence represented by SEQ ID NO: 82078.

[13480] The probes having the nucleotide sequence represented by SEQ ID NOS: 158192, 158193, 158194, 158195, 158196, 158197, 158198, 158199, 158200, 158201, 158202 were selected from the ORFs having the nucleotide sequence represented by SEQ ID NO: 82079.

[13481] The probes having the nucleotide sequence represented by SEQ ID NOS: 158203, 158204, 158205, 158206, 158207, 158208, 158209, 158210, 158211, 158212, 158213 were selected from the ORFs having the nucleotide sequence represented by SEQ ID NO: 82080.

[13482] The probes having the nucleotide sequence represented by SEQ ID NOS: 158214, 158215, 158216, 158217, 158218, 158219, 158220, 158221, 158222, 158223, 158224 were selected from the ORFs having the nucleotide sequence represented by SEQ ID NO: 82081.

[13483] The probes having the nucleotide sequence represented by SEQ ID NOS: 158225, 158226, 158227, 158228, 158229, 158230, 158231, 158232, 158233, 158234, 158235 were selected from the ORFs having the nucleotide sequence represented by SEQ ID NO: 82082.

[13484] The probes having the nucleotide sequence represented by SEQ ID NOS: 158236, 158237, 158238, 158239, 158240, 158241, 158242, 158243, 158244, 158245, 158246 were selected from the ORFs having the nucleotide sequence represented by SEQ ID NO: 82083.

[13485] The probes having the nucleotide sequence represented by SEQ ID NOS: 158247, 158248, 158249, 158250, 158251, 158252, 158253, 158254, 158255, 158256, 158257 were selected from the ORFs having the nucleotide sequence represented by SEQ ID NO: 82084.

[13486] The probes having the nucleotide sequence represented by SEQ ID NOS: 158258, 158259, 158260, 158261, 158262, 158263, 158264, 158265, 158266, 158267, 158268 were selected from the ORFs having the nucleotide sequence represented by SEQ ID NO: 82085.

[13487] The probes having the nucleotide sequence represented by SEQ ID NOS: 158269, 158270, 158271, 158272, 158273, 158274, 158275, 158276, 158277, 158278, 158279 were selected from the ORFs having the nucleotide sequence represented by SEQ ID NO: 82086.

[13488] The probes having the nucleotide sequence represented by SEQ ID NOS: 158280, 158281, 158282, 158283, 158284, 158285, 158286, 158287, 158288, 158289, 158290 were selected from the ORFs having the nucleotide sequence represented by SEQ ID NO: 82087.

[13489] The probes having the nucleotide sequence represented by SEQ ID NOS: 158291, 158292, 158293, 158294, 158295, 158296, 158297, 158298, 158299, 158300, 158301 were selected from the ORFs having the nucleotide sequence represented by SEQ ID NO: 82088.

[13490] The probes having the nucleotide sequence represented by SEQ ID NOS: 158302, 158303, 158304, 158305, 158306, 158307, 158308, 158309, 158310, 158311, 158312 were selected from the ORFs having the nucleotide sequence represented by SEQ ID NO: 82089.

[13491] The probes having the nucleotide sequence represented by SEQ ID NOS: 158313, 158314, 158315, 158316, 158317, 158318, 158319, 158320, 158321, 158322, 158323 were selected from the ORFs having the nucleotide sequence represented by SEQ ID NO: 82090.

[13492] The probes having the nucleotide sequence represented by SEQ ID NOS: 158324, 158325, 158326, 158327, 158328, 158329, 158330, 158331, 158332, 158333, 158334, 158335, 158336, 158337, 158338, 158339, 158340, 158341, 158342, 158343, 158344, 158345 were selected from the ORFs having the nucleotide sequence represented by SEQ ID NO: 82091.

[13493] The probes having the nucleotide sequence represented by SEQ ID NOS: 158346, 158347, 158348, 158349, 158350, 158351, 158352, 158353, 158354, 158355, 158356 were selected from the ORFs having the nucleotide sequence represented by SEQ ID NO: 82092.

[13494] The probes having the nucleotide sequence represented by SEQ ID NOS: 158357, 158358, 158359, 158360, 158361, 158362, 158363, 158364, 158365, 158366, 158367 were selected from the ORFs having the nucleotide sequence represented by SEQ ID NO: 82093.

[13495] The probes having the nucleotide sequence represented by SEQ ID NOS: 158368, 158369, 158370, 158371, 158372, 158373, 158374, 158375, 158376, 158377, 158378 were selected from the ORFs having the nucleotide sequence represented by SEQ ID NO: 82094.

[13496] The probes having the nucleotide sequence represented by SEQ ID NOS: 158379, 158380, 158381, 158382, 158383, 158384, 158385, 158386, 158387, 158388, 158389 were selected from the ORFs having the nucleotide sequence represented by SEQ ID NO: 82095.

[13497] The probes having the nucleotide sequence represented by SEQ ID NOS: 158390, 158391, 158392, 158393, 158394, 158395, 158396, 158397, 158398, 158399, 158400, 158401, 158402, 158403, 158404, 158405, 158406, 158407, 158408, 158409, 158410, 158411 were selected from the ORFs having the nucleotide sequence represented by SEQ ID NO: 82096.

[13498] The probes having the nucleotide sequence represented by SEQ ID NOS: 158412, 158413, 158414, 158415, 158416, 158417, 158418, 158419, 158420, 158421, 158422 were selected from the ORFs having the nucleotide sequence represented by SEQ ID NO: 82097.

[13499] The probes having the nucleotide sequence represented by SEQ ID NOS: 158423, 158424, 158425, 158426, 158427, 158428, 158429, 158430, 158431, 158432, 158433 were selected from the ORFs having the nucleotide sequence represented by SEQ ID NO: 82098.

[13500] The probes having the nucleotide sequence represented by SEQ ID NOS: 158434, 158435, 158436, 158437, 158438, 158439, 158440, 158441, 158442, 158443, 158444 were selected from the ORFs having the nucleotide sequence represented by SEQ ID NO: 82099.

[13501] The probes having the nucleotide sequence represented by SEQ ID NOS: 158445, 158446, 158447, 158448, 158449, 158450, 158451, 158452, 158453, 158454, 158455 were selected from the ORFs having the nucleotide sequence represented by SEQ ID NO: 82100.

[13502] The probes having the nucleotide sequence represented by SEQ ID NOS: 158456, 158457, 158458, 158459, 158460, 158461, 158462, 158463, 158464, 158465, 158466 were selected from the ORFs having the nucleotide sequence represented by SEQ ID NO: 82101.

[13503] The probes having the nucleotide sequence represented by SEQ ID NOS: 158467, 158468, 158469, 158470, 158471, 158472, 158473, 158474, 158475, 158476, 158477 were selected from the ORFs having the nucleotide sequence represented by SEQ ID NO: 82102.

[13504] The probes having the nucleotide sequence represented by SEQ ID NOS: 158478, 158479, 158480, 158481, 158482, 158483, 158484, 158485, 158486, 158487, 158488 were selected from the ORFs having the nucleotide sequence represented by SEQ ID NO: 82103.

[13505] The probes having the nucleotide sequence represented by SEQ ID NOS: 158489, 158490, 158491, 158492, 158493, 158494, 158495, 158496, 158497, 158498, 158499 were selected from the ORFs having the nucleotide sequence represented by SEQ ID NO: 82104.

[13506] The probes having the nucleotide sequence represented by SEQ ID NOS: 158500, 158501, 158502, 158503, 158504, 158505, 158506, 158507, 158508, 158509, 158510 were selected from the ORFs having the nucleotide sequence represented by SEQ ID NO: 82105.

[13507] The probes having the nucleotide sequence represented by SEQ ID NOS: 158511, 158512, 158513, 158514, 158515, 158516, 158517, 158518, 158519, 158520, 158521 were selected from the ORFs having the nucleotide sequence represented by SEQ ID NO: 82106.

[13508] The probes having the nucleotide sequence represented by SEQ ID NOS: 158522, 158523, 158524, 158525, 158526, 158527, 158528, 158529, 158530, 158531, 158532 were selected from the ORFs having the nucleotide sequence represented by SEQ ID NO: 82107.

[13509] The probes having the nucleotide sequence represented by SEQ ID NOS: 158533, 158534, 158535, 158536, 158537, 158538, 158539, 158540, 158541, 158542, 158543 were selected from the ORFs having the nucleotide sequence represented by SEQ ID NO: 82108.

[13510] The probes having the nucleotide sequence represented by SEQ ID NOS: 158544, 158545, 158546, 158547, 158548, 158549, 158550, 158551, 158552, 158553, 158554 were selected from the ORFs having the nucleotide sequence represented by SEQ ID NO: 82109.

[13511] The probes having the nucleotide sequence represented by SEQ ID NOS: 158555, 158556, 158557, 158558, 158559, 158560, 158561, 158562, 158563, 158564, 158565 were selected from the ORFs having the nucleotide sequence represented by SEQ ID NO: 82110.

[13512] The probes having the nucleotide sequence represented by SEQ ID NOS: 158566, 158567, 158568, 158569, 158570, 158571, 158572, 158573, 158574, 158575, 158576 were selected from the ORFs having the nucleotide sequence represented by SEQ ID NO: 82111.

[13513] The probes having the nucleotide sequence represented by SEQ ID NOS: 158577, 158578, 158579, 158580, 158581, 158582, 158583, 158584, 158585, 158586, 158587 were selected from the ORFs having the nucleotide sequence represented by SEQ ID NO: 82112.

[13514] The probes having the nucleotide sequence represented by SEQ ID NOS: 158588, 158589, 158590, 158591, 158592, 158593, 158594, 158595, 158596, 158597, 158598 were selected from the ORFs having the nucleotide sequence represented by SEQ ID NO: 82113.

[13515] The probes having the nucleotide sequence represented by SEQ ID NOS: 158599, 158600, 158601, 158602, 158603, 158604, 158605, 158606, 158607, 158608, 158609 were selected from the ORFs having the nucleotide sequence represented by SEQ ID NO: 82114.

[13516] The probes having the nucleotide sequence represented by SEQ ID NOS: 158610, 158611, 158612, 158613, 158614, 158615, 158616, 158617, 158618, 158619, 158620 were selected from the ORFs having the nucleotide sequence represented by SEQ ID NO: 82115.

[13517] The probes having the nucleotide sequence represented by SEQ ID NOS: 158621, 158622, 158623, 158624, 158625, 158626, 158627, 158628, 158629, 158630, 158631 were selected from the ORFs having the nucleotide sequence represented by SEQ ID NO: 82116.

[13518] The probes having the nucleotide sequence represented by SEQ ID NOS: 158632, 158633, 158634, 158635, 158636, 158637, 158638, 158639, 158640, 158641, 158642 were selected from the ORFs having the nucleotide sequence represented by SEQ ID NO: 82117.

[13519] The probes having the nucleotide sequence represented by SEQ ID NOS: 158643, 158644, 158645, 158646, 158647, 158648, 158649, 158650, 158651, 158652, 158653 were selected from the ORFs having the nucleotide sequence represented by SEQ ID NO: 82118.

[13520] The probes having the nucleotide sequence represented by SEQ ID NOS: 158654, 158655, 158656, 158657, 158658, 158659, 158660, 158661, 158662, 158663, 158664 were selected from the ORFs having the nucleotide sequence represented by SEQ ID NO: 82119.

[13521] The probes having the nucleotide sequence represented by SEQ ID NOS: 158665, 158666, 158667, 158668, 158669, 158670, 158671, 158672, 158673, 158674, 158675 were selected from the ORFs having the nucleotide sequence represented by SEQ ID NO: 82120.

[13522] The probes having the nucleotide sequence represented by SEQ ID NOS: 158676, 158677, 158678, 158679, 158680, 158681, 158682, 158683, 158684, 158685, 158686 were selected from the ORFs having the nucleotide sequence represented by SEQ ID NO: 82121.

[13523] The probes having the nucleotide sequence represented by SEQ ID NOS: 158687, 158688, 158689, 158690, 158691, 158692, 158693, 158694, 158695, 158696, 158697 were selected from the ORFs having the nucleotide sequence represented by SEQ ID NO: 82122.

[13524] The probes having the nucleotide sequence represented by SEQ ID NOS: 158698, 158699, 158700, 158701, 158702, 158703, 158704, 158705, 158706, 158707, 158708 were selected from the ORFs having the nucleotide sequence represented by SEQ ID NO: 82123.

[13525] The probes having the nucleotide sequence represented by SEQ ID NOS: 158709, 158710, 158711, 158712, 158713, 158714, 158715, 158716, 158717, 158718, 158719 were selected from the ORFs having the nucleotide sequence represented by SEQ ID NO: 82124.

[13526] The probes having the nucleotide sequence represented by SEQ ID NOS: 158720, 158721, 158722, 158723, 158724, 158725, 158726, 158727, 158728, 158729, 158730 were selected from the ORFs having the nucleotide sequence represented by SEQ ID NO: 82125.

[13527] The probes having the nucleotide sequence represented by SEQ ID NOS: 158731, 158732, 158733, 158734, 158735, 158736, 158737, 158738, 158739, 158740, 158741 were selected from the ORFs having the nucleotide sequence represented by SEQ ID NO: 82126.

[13528] The probes having the nucleotide sequence represented by SEQ ID NOS: 158742, 158743, 158744, 158745, 158746, 158747, 158748, 158749, 158750, 158751, 158752 were selected from the ORFs having the nucleotide sequence represented by SEQ ID NO: 82127.

[13529] The probes having the nucleotide sequence represented by SEQ ID NOS: 158753, 158754, 158755, 158756, 158757, 158758, 158759, 158760, 158761, 158762, 158763 were selected from the ORFs having the nucleotide sequence represented by SEQ ID NO: 82128.

[13530] The probes having the nucleotide sequence represented by SEQ ID NOS: 158764, 158765, 158766, 158767, 158768, 158769, 158770, 158771, 158772, 158773, 158774 were selected from the ORFs having the nucleotide sequence represented by SEQ ID NO: 82129.

[13531] The probes having the nucleotide sequence represented by SEQ ID NOS: 158775, 158776, 158777, 158778, 158779, 158780, 158781, 158782, 158783, 158784, 158785 were selected from the ORFs having the nucleotide sequence represented by SEQ ID NO: 82130.

[13532] The probes having the nucleotide sequence represented by SEQ ID NOS: 158786, 158787, 158788, 158789, 158790, 158791, 158792, 158793, 158794, 158795, 158796 were selected from the ORFs having the nucleotide sequence represented by SEQ ID NO: 82131.

[13533] The probes having the nucleotide sequence represented by SEQ ID NOS: 158797, 158798, 158799, 158800, 158801, 158802, 158803, 158804, 158805, 158806, 158807 were selected from the ORFs having the nucleotide sequence represented by SEQ ID NO: 82132.

[13534] The probes having the nucleotide sequence represented by SEQ ID NOS: 158808, 158809, 158810, 158811, 158812, 158813, 158814, 158815, 158816, 158817, 158818 were selected from the ORFs having the nucleotide sequence represented by SEQ ID NO: 82133.

[13535] The probes having the nucleotide sequence represented by SEQ ID NOS: 158819, 158820, 158821, 158822, 158823, 158824, 158825, 158826, 158827, 158828, 158829 were selected from the ORFs having the nucleotide sequence represented by SEQ ID NO: 82134.

[13536] The probes having the nucleotide sequence represented by SEQ ID NOS: 158830, 158831, 158832, 158833, 158834, 158835, 158836, 158837, 158838, 158839, 158840 were selected from the ORFs having the nucleotide sequence represented by SEQ ID NO: 82135.

[13537] The probes having the nucleotide sequence represented by SEQ ID NOS: 158841, 158842, 158843, 158844, 158845, 158846, 158847, 158848, 158849, 158850, 158851 were selected from the ORFs having the nucleotide sequence represented by SEQ ID NO: 82136.

[13538] The probes having the nucleotide sequence represented by SEQ ID NOS: 158852, 158853, 158854, 158855, 158856, 158857, 158858, 158859, 158860, 158861, 158862 were selected from the ORFs having the nucleotide sequence represented by SEQ ID NO: 82137.

[13539] The probes having the nucleotide sequence represented by SEQ ID NOS: 158863, 158864, 158865, 158866, 158867, 158868, 158869, 158870, 158871, 158872, 158873 were selected from the ORFs having the nucleotide sequence represented by SEQ ID NO: 82138.

[13540] The probes having the nucleotide sequence represented by SEQ ID NOS: 158874, 158875, 158876, 158877, 158878, 158879, 158880, 158881, 158882, 158883, 158884 were selected from the ORFs having the nucleotide sequence represented by SEQ ID NO: 82139.

[13541] The probes having the nucleotide sequence represented by SEQ ID NOS: 158885, 158886, 158887, 158888, 158889, 158890, 158891, 158892, 158893, 158894, 158895 were selected from the ORFs having the nucleotide sequence represented by SEQ ID NO: 82140.

[13542] The probes having the nucleotide sequence represented by SEQ ID NOS: 158896, 158897, 158898, 158899, 158900, 158901, 158902, 158903, 158904, 158905, 158906 were selected from the ORFs having the nucleotide sequence represented by SEQ ID NO: 82141.

[13543] The probes having the nucleotide sequence represented by SEQ ID NOS: 158907, 158908, 158909, 158910, 158911, 158912, 158913, 158914, 158915, 158916, 158917 were selected from the ORFs having the nucleotide sequence represented by SEQ ID NO: 82142.

[13544] The probes having the nucleotide sequence represented by SEQ ID NOS: 158918, 158919, 158920, 158921, 158922, 158923, 158924, 158925, 158926, 158927, 158928 were selected from the ORFs having the nucleotide sequence represented by SEQ ID NO: 82143.

[13545] The probes having the nucleotide sequence represented by SEQ ID NOS: 158929, 158930, 158931, 158932, 158933, 158934, 158935, 158936, 158937, 158938, 158939 were selected from the ORFs having the nucleotide sequence represented by SEQ ID NO: 82144.

[13546] The probes having the nucleotide sequence represented by SEQ ID NOS: 158940, 158941, 158942, 158943, 158944, 158945, 158946, 158947, 158948, 158949, 158950 were selected from the ORFs having the nucleotide sequence represented by SEQ ID NO: 82145.

[13547] The probes having the nucleotide sequence represented by SEQ ID NOS: 158951, 158952, 158953, 158954, 158955, 158956, 158957, 158958, 158959, 158960, 158961 were selected from the ORFs having the nucleotide sequence represented by SEQ ID NO: 82146.

[13548] The probes having the nucleotide sequence represented by SEQ ID NOS: 158962, 158963, 158964, 158965, 158966, 158967, 158968, 158969, 158970, 158971, 158972 were selected from the ORFs having the nucleotide sequence represented by SEQ ID NO: 82147.

[13549] The probes having the nucleotide sequence represented by SEQ ID NOS: 158973, 158974, 158975, 158976, 158977, 158978, 158979, 158980, 158981, 158982, 158983 were selected from the ORFs having the nucleotide sequence represented by SEQ ID NO: 82148.

[13550] The probes having the nucleotide sequence represented by SEQ ID NOS: 158984, 158985, 158986, 158987, 158988, 158989, 158990, 158991, 158992, 158993, 158994 were selected from the ORFs having the nucleotide sequence represented by SEQ ID NO: 82149.

[13551] The probes having the nucleotide sequence represented by SEQ ID NOS: 158995, 158996, 158997, 158998, 158999, 159000, 159001, 159002, 159003, 159004, 159005 were selected from the ORFs having the nucleotide sequence represented by SEQ ID NO: 82150.

[13552] The probes having the nucleotide sequence represented by SEQ ID NOS: 159006, 159007, 159008, 159009, 159010, 159011, 159012, 159013, 159014, 159015, 159016 were selected from the ORFs having the nucleotide sequence represented by SEQ ID NO: 82151.

[13553] The probes having the nucleotide sequence represented by SEQ ID NOS: 159017, 159018, 159019, 159020, 159021, 159022, 159023, 159024, 159025, 159026, 159027 were selected from the ORFs having the nucleotide sequence represented by SEQ ID NO: 82152.

[13554] The probes having the nucleotide sequence represented by SEQ ID NOS: 159028, 159029, 159030, 159031, 159032, 159033, 159034, 159035, 159036, 159037, 159038 were selected from the ORFs having the nucleotide sequence represented by SEQ ID NO: 82153.

[13555] The probes having the nucleotide sequence represented by SEQ ID NOS: 159039, 159040, 159041, 159042, 159043, 159044, 159045, 159046, 159047, 159048, 159049 were selected from the ORFs having the nucleotide sequence represented by SEQ ID NO: 82154.

[13556] The probes having the nucleotide sequence represented by SEQ ID NOS: 159050, 159051, 159052, 159053, 159054, 159055, 159056, 159057, 159058, 159059, 159060 were selected from the ORFs having the nucleotide sequence represented by SEQ ID NO: 82155.

[13557] The probes having the nucleotide sequence represented by SEQ ID NOS: 159061, 159062, 159063, 159064, 159065, 159066, 159067, 159068, 159069, 159070, 159071 were selected from the ORFs having the nucleotide sequence represented by SEQ ID NO: 82156.

[13558] The probes having the nucleotide sequence represented by SEQ ID NOS: 159072, 159073, 159074, 159075, 159076, 159077, 159078, 159079, 159080, 159081, 159082 were selected from the ORFs having the nucleotide sequence represented by SEQ ID NO: 82157.

[13559] The probes having the nucleotide sequence represented by SEQ ID NOS: 159083, 159084, 159085, 159086, 159087, 159088, 159089, 159090, 159091, 159092, 159093 were selected from the ORFs having the nucleotide sequence represented by SEQ ID NO: 82158.

[13560] The probes having the nucleotide sequence represented by SEQ ID NOS: 159094, 159095, 159096, 159097, 159098, 159099, 159100, 159101, 159102, 159103, 159104 were selected from the ORFs having the nucleotide sequence represented by SEQ ID NO: 82159.

[13561] The probes having the nucleotide sequence represented by SEQ ID NOS: 159105, 159106, 159107, 159108, 159109, 159110, 159111, 159112, 159113, 159114, 159115 were selected from the ORFs having the nucleotide sequence represented by SEQ ID NO: 82160.

[13562] The probes having the nucleotide sequence represented by SEQ ID NOS: 159116, 159117, 159118, 159119, 159120, 159121, 159122, 159123, 159124, 159125, 159126 were selected from the ORFs having the nucleotide sequence represented by SEQ ID NO: 82161.

[13563] The probes having the nucleotide sequence represented by SEQ ID NOS: 159127, 159128, 159129, 159130, 159131, 159132, 159133, 159134, 159135, 159136, 159137 were selected from the ORFs having the nucleotide sequence represented by SEQ ID NO: 82162.

[13564] The probes having the nucleotide sequence represented by SEQ ID NOS: 159138, 159139, 159140, 159141, 159142, 159143, 159144, 159145, 159146, 159147, 159148 were selected from the ORFs having the nucleotide sequence represented by SEQ ID NO: 82163.

[13565] The probes having the nucleotide sequence represented by SEQ ID NOS: 159149, 159150, 159151, 159152, 159153, 159154, 159155, 159156, 159157, 159158, 159159 were selected from the ORFs having the nucleotide sequence represented by SEQ ID NO: 82164.

[13566] The probes having the nucleotide sequence represented by SEQ ID NOS: 159160, 159161, 159162, 159163, 159164, 159165, 159166, 159167, 159168, 159169, 159170 were selected from the ORFs having the nucleotide sequence represented by SEQ ID NO: 82165.

[13567] The probes having the nucleotide sequence represented by SEQ ID NOS: 159171, 159172, 159173, 159174, 159175, 159176, 159177, 159178, 159179, 159180, 159181 were selected from the ORFs having the nucleotide sequence represented by SEQ ID NO: 82166.

[13568] The probes having the nucleotide sequence represented by SEQ ID NOS: 159182, 159183, 159184, 159185, 159186, 159187, 159188, 159189, 159190, 159191, 159192 were selected from the ORFs having the nucleotide sequence represented by SEQ ID NO: 82167.

[13569] The probes having the nucleotide sequence represented by SEQ ID NOS: 159193, 159194, 159195, 159196, 159197, 159198, 159199, 159200, 159201, 159202, 159203 were selected from the ORFs having the nucleotide sequence represented by SEQ ID NO: 82168.

[13570] The probes having the nucleotide sequence represented by SEQ ID NOS: 159204, 159205, 159206, 159207, 159208, 159209, 159210, 159211, 159212, 159213, 159214 were selected from the ORFs having the nucleotide sequence represented by SEQ ID NO: 82169.

[13571] The probes having the nucleotide sequence represented by SEQ ID NOS: 159215, 159216, 159217, 159218, 159219, 159220, 159221, 159222, 159223, 159224, 159225, 159226, 159227, 159228, 159229, 159230, 159231, 159232, 159233 were selected from the ORFs having the nucleotide sequence represented by SEQ ID NO: 82170.

[13572] The probes having the nucleotide sequence represented by SEQ ID NOS: 159234, 159235, 159236, 159237, 159238, 159239, 159240, 159241, 159242, 159243, 159244 were selected from the ORFs having the nucleotide sequence represented by SEQ ID NO: 82171.

[13573] The probes having the nucleotide sequence represented by SEQ ID NOS: 159245, 159246, 159247, 159248, 159249, 159250, 159251, 159252, 159253, 159254, 159255 were selected from the ORFs having the nucleotide sequence represented by SEQ ID NO: 82172.

[13574] The probes having the nucleotide sequence represented by SEQ ID NOS: 159256, 159257, 159258, 159259, 159260, 159261, 159262, 159263, 159264, 159265, 159266 were selected from the ORFs having the nucleotide sequence represented by SEQ ID NO: 82173.

[13575] The probes having the nucleotide sequence represented by SEQ ID NOS: 159267, 159268, 159269, 159270, 159271, 159272, 159273, 159274, 159275, 159276, 159277 were selected from the ORFs having the nucleotide sequence represented by SEQ ID NO: 82174.

[13576] The probes having the nucleotide sequence represented by SEQ ID NOS: 159278, 159279, 159280, 159281, 159282, 159283, 159284, 159285, 159286, 159287, 159288 were selected from the ORFs having the nucleotide sequence represented by SEQ ID NO: 82175.

[13577] The probes having the nucleotide sequence represented by SEQ ID NOS: 159289, 159290, 159291, 159292, 159293, 159294, 159295, 159296, 159297, 159298, 159299 were selected from the ORFs having the nucleotide sequence represented by SEQ ID NO: 82176.

[13578] The probes having the nucleotide sequence represented by SEQ ID NOS: 159300, 159301, 159302, 159303, 159304, 159305, 159306, 159307, 159308, 159309, 159310 were selected from the ORFs having the nucleotide sequence represented by SEQ ID NO: 82177.

[13579] The probes having the nucleotide sequence represented by SEQ ID NOS: 159311, 159312, 159313, 159314, 159315, 159316, 159317, 159318, 159319, 159320, 159321, 159322, 159323, 159324, 159325, 159326, 159327, 159328, 159329, 159330, 159331, 159332 were selected from the ORFs having the nucleotide sequence represented by SEQ ID NO: 82178.

[13580] The probes having the nucleotide sequence represented by SEQ ID NOS: 159333, 159334, 159335, 159336, 159337, 159338, 159339, 159340, 159341, 159342, 159343 were selected from the ORFs having the nucleotide sequence represented by SEQ ID NO: 82179.

[13581] The probes having the nucleotide sequence represented by SEQ ID NOS: 159344, 159345, 159346, 159347, 159348, 159349, 159350, 159351, 159352, 159353, 159354 were selected from the ORFs having the nucleotide sequence represented by SEQ ID NO: 82180.

[13582] The probes having the nucleotide sequence represented by SEQ ID NOS: 159355, 159356, 159357, 159358, 159359, 159360, 159361, 159362, 159363, 159364, 159365 were selected from the ORFs having the nucleotide sequence represented by SEQ ID NO: 82181.

[13583] The probes having the nucleotide sequence represented by SEQ ID NOS: 159366, 159367, 159368, 159369, 159370, 159371, 159372, 159373, 159374, 159375, 159376 were selected from the ORFs having the nucleotide sequence represented by SEQ ID NO: 82182.

[13584] The probes having the nucleotide sequence represented by SEQ ID NOS: 159377, 159378, 159379, 159380, 159381, 159382, 159383, 159384, 159385, 159386, 159387 were selected from the ORFs having the nucleotide sequence represented by SEQ ID NO: 82183.

[13585] The probes having the nucleotide sequence represented by SEQ ID NOS: 159388, 159389, 159390, 159391, 159392, 159393, 159394, 159395, 159396, 159397, 159398 were selected from the ORFs having the nucleotide sequence represented by SEQ ID NO: 82184.

[13586] The probes having the nucleotide sequence represented by SEQ ID NOS: 159399, 159400, 159401, 159402, 159403, 159404, 159405, 159406, 159407, 159408, 159409 were selected from the ORFs having the nucleotide sequence represented by SEQ ID NO: 82185.

[13587] The probes having the nucleotide sequence represented by SEQ ID NOS: 159410, 159411, 159412, 159413, 159414, 159415, 159416, 159417, 159418, 159419, 159420 were selected from the ORFs having the nucleotide sequence represented by SEQ ID NO: 82186.

[13588] The probes having the nucleotide sequence represented by SEQ ID NOS: 159421, 159422, 159423, 159424, 159425, 159426, 159427, 159428, 159429, 159430, 159431 were selected from the ORFs having the nucleotide sequence represented by SEQ ID NO: 82187.

[13589] The probes having the nucleotide sequence represented by SEQ ID NOS: 159432, 159433, 159434, 159435, 159436, 159437, 159438, 159439, 159440, 159441, 159442 were selected from the ORFs having the nucleotide sequence represented by SEQ ID NO: 82188.

[13590] The probes having the nucleotide sequence represented by SEQ ID NOS: 159443, 159444, 159445, 159446, 159447, 159448, 159449, 159450, 159451, 159452, 159453, 159454, 159455, 159456, 159457, 159458, 159459, 159460, 159461, 159462, 159463, 159464 were selected from the ORFs having the nucleotide sequence represented by SEQ ID NO: 82189.

[13591] The probes having the nucleotide sequence represented by SEQ ID NOS: 159465, 159466, 159467, 159468, 159469, 159470, 159471, 159472, 159473 were selected from the ORFs having the nucleotide sequence represented by SEQ ID NO: 82190.

[13592] The probes having the nucleotide sequence represented by SEQ ID NOS: 159474, 159475, 159476, 159477, 159478, 159479, 159480, 159481, 159482, 159483, 159484 were selected from the ORFs having the nucleotide sequence represented by SEQ ID NO: 82191.

[13593] The probes having the nucleotide sequence represented by SEQ ID NOS: 159485, 159486, 159487, 159488, 159489, 159490, 159491, 159492, 159493, 159494, 159495 were selected from the ORFs having the nucleotide sequence represented by SEQ ID NO: 82192.

[13594] The probes having the nucleotide sequence represented by SEQ ID NOS: 159496, 159497, 159498, 159499, 159500, 159501, 159502, 159503, 159504, 159505, 159506, 159507, 159508, 159509, 159510, 159511, 159512, 159513, 159514, 159515, 159516, 159517 were selected from the ORFs having the nucleotide sequence represented by SEQ ID NO: 82193.

[13595] The probes having the nucleotide sequence represented by SEQ ID NOS: 159518, 159519, 159520, 159521, 159522, 159523, 159524, 159525, 159526, 159527, 159528 were selected from the ORFs having the nucleotide sequence represented by SEQ ID NO: 82194.

[13596] The probes having the nucleotide sequence represented by SEQ ID NOS: 159529, 159530, 159531, 159532, 159533, 159534, 159535, 159536, 159537, 159538, 159539 were selected from the ORFs having the nucleotide sequence represented by SEQ ID NO: 82195.

[13597] The probes having the nucleotide sequence represented by SEQ ID NOS: 159540, 159541, 159542, 159543, 159544, 159545, 159546, 159547, 159548, 159549, 159550 were selected from the ORFs having the nucleotide sequence represented by SEQ ID NO: 82196.

[13598] The probes having the nucleotide sequence represented by SEQ ID NOS: 159551, 159552, 159553, 159554, 159555, 159556, 159557, 159558, 159559, 159560, 159561 were selected from the ORFs having the nucleotide sequence represented by SEQ ID NO: 82197.

[13599] The probes having the nucleotide sequence represented by SEQ ID NOS: 159562, 159563, 159564, 159565, 159566, 159567, 159568, 159569, 159570, 159571, 159572 were selected from the ORFs having the nucleotide sequence represented by SEQ ID NO: 82198.

[13600] The probes having the nucleotide sequence represented by SEQ ID NOS: 159573, 159574, 159575, 159576, 159577, 159578, 159579, 159580, 159581, 159582, 159583 were selected from the ORFs having the nucleotide sequence represented by SEQ ID NO: 82199.

[13601] The probes having the nucleotide sequence represented by SEQ ID NOS: 159584, 159585, 159586, 159587, 159588, 159589, 159590, 159591, 159592, 159593, 159594 were selected from the ORFs having the nucleotide sequence represented by SEQ ID NO: 82200.

[13602] The probes having the nucleotide sequence represented by SEQ ID NOS: 159595, 159596, 159597, 159598, 159599, 159600, 159601, 159602, 159603, 159604, 159605 were selected from the ORFs having the nucleotide sequence represented by SEQ ID NO: 82201.

[13603] The probes having the nucleotide sequence represented by SEQ ID NOS: 159606, 159607, 159608, 159609, 159610, 159611, 159612, 159613, 159614, 159615, 159616 were selected from the ORFs having the nucleotide sequence represented by SEQ ID NO: 82202.

[13604] The probes having the nucleotide sequence represented by SEQ ID NOS: 159617, 159618, 159619, 159620, 159621, 159622, 159623, 159624, 159625, 159626, 159627 were selected from the ORFs having the nucleotide sequence represented by SEQ ID NO: 82203.

[13605] The probes having the nucleotide sequence represented by SEQ ID NOS: 159628, 159629, 159630, 159631, 159632, 159633, 159634, 159635, 159636, 159637, 159638 were selected from the ORFs having the nucleotide sequence represented by SEQ ID NO: 82204.

[13606] The probes having the nucleotide sequence represented by SEQ ID NOS: 159639, 159640, 159641, 159642, 159643, 159644, 159645, 159646, 159647, 159648, 159649 were selected from the ORFs having the nucleotide sequence represented by SEQ ID NO: 82205.

[13607] The probes having the nucleotide sequence represented by SEQ ID NOS: 159650, 159651, 159652, 159653, 159654, 159655, 159656, 159657, 159658, 159659, 159660 were selected from the ORFs having the nucleotide sequence represented by SEQ ID NO: 82206.

[13608] The probes having the nucleotide sequence represented by SEQ ID NOS: 159661, 159662, 159663, 159664, 159665, 159666, 159667, 159668, 159669, 159670, 159671 were selected from the ORFs having the nucleotide sequence represented by SEQ ID NO: 82207.

[13609] The probes having the nucleotide sequence represented by SEQ ID NOS: 159672, 159673, 159674, 159675, 159676, 159677, 159678, 159679, 159680, 159681, 159682 were selected from the ORFs having the nucleotide sequence represented by SEQ ID NO: 82208.

[13610] The probes having the nucleotide sequence represented by SEQ ID NOS: 159683, 159684, 159685, 159686, 159687, 159688, 159689, 159690, 159691, 159692, 159693 were selected from the ORFs having the nucleotide sequence represented by SEQ ID NO: 82209.

[13611] The probes having the nucleotide sequence represented by SEQ ID NOS: 159694, 159695, 159696, 159697, 159698, 159699, 159700, 159701, 159702, 159703, 159704 were selected from the ORFs having the nucleotide sequence represented by SEQ ID NO: 82210.

[13612] The probes having the nucleotide sequence represented by SEQ ID NOS: 159705, 159706, 159707, 159708, 159709, 159710, 159711, 159712, 159713, 159714, 159715 were selected from the ORFs having the nucleotide sequence represented by SEQ ID NO: 82211.

[13613] The probes having the nucleotide sequence represented by SEQ ID NOS: 159716, 159717, 159718, 159719, 159720, 159721, 159722, 159723, 159724, 159725, 159726 were selected from the ORFs having the nucleotide sequence represented by SEQ ID NO: 82212.

[13614] The probes having the nucleotide sequence represented by SEQ ID NOS: 159727, 159728, 159729, 159730, 159731, 159732, 159733, 159734, 159735, 159736, 159737 were selected from the ORFs having the nucleotide sequence represented by SEQ ID NO: 82213.

[13615] The probes having the nucleotide sequence represented by SEQ ID NOS: 159738, 159739, 159740, 159741, 159742, 159743, 159744, 159745, 159746, 159747, 159748, 159749, 159750, 159751, 159752, 159753, 159754, 159755, 159756, 159757, 159758, 159759 were selected from the ORFs having the nucleotide sequence represented by SEQ ID NO: 82214.

[13616] The probes having the nucleotide sequence represented by SEQ ID NOS: 159760, 159761, 159762, 159763, 159764, 159765, 159766, 159767, 159768, 159769, 159770 were selected from the ORFs having the nucleotide sequence represented by SEQ ID NO: 82215.

[13617] The probes having the nucleotide sequence represented by SEQ ID NOS: 159771, 159772, 159773, 159774, 159775, 159776, 159777, 159778, 159779, 159780, 159781 were selected from the ORFs having the nucleotide sequence represented by SEQ ID NO: 82216.

[13618] The probes having the nucleotide sequence represented by SEQ ID NOS: 159782, 159783, 159784, 159785, 159786, 159787, 159788, 159789, 159790, 159791, 159792 were selected from the ORFs having the nucleotide sequence represented by SEQ ID NO: 82217.

[13619] The probes having the nucleotide sequence represented by SEQ ID NOS: 159793, 159794, 159795, 159796, 159797, 159798, 159799, 159800, 159801, 159802, 159803 were selected from the ORFs having the nucleotide sequence represented by SEQ ID NO: 82218.

[13620] The probes having the nucleotide sequence represented by SEQ ID NOS: 159804, 159805, 159806, 159807, 159808, 159809, 159810, 159811, 159812, 159813, 159814 were selected from the ORFs having the nucleotide sequence represented by SEQ ID NO: 82219.

[13621] The probes having the nucleotide sequence represented by SEQ ID NOS: 159815, 159816, 159817, 159818, 159819, 159820, 159821, 159822, 159823, 159824, 159825 were selected from the ORFs having the nucleotide sequence represented by SEQ ID NO: 82220.

[13622] The probes having the nucleotide sequence represented by SEQ ID NOS: 159826, 159827, 159828, 159829, 159830, 159831, 159832, 159833, 159834, 159835, 159836 were selected from the ORFs having the nucleotide sequence represented by SEQ ID NO: 82221.

[13623] The probes having the nucleotide sequence represented by SEQ ID NOS: 159837, 159838, 159839, 159840, 159841, 159842, 159843, 159844, 159845, 159846, 159847 were selected from the ORFs having the nucleotide sequence represented by SEQ ID NO: 82222.

[13624] The probes having the nucleotide sequence represented by SEQ ID NOS: 159848, 159849, 159850, 159851, 159852, 159853, 159854, 159855, 159856, 159857, 159858 were selected from the ORFs having the nucleotide sequence represented by SEQ ID NO: 82223.

[13625] The probes having the nucleotide sequence represented by SEQ ID NOS: 159859, 159860, 159861, 159862, 159863, 159864, 159865, 159866, 159867, 159868, 159869 were selected from the ORFs having the nucleotide sequence represented by SEQ ID NO: 82224.

[13626] The probes having the nucleotide sequence represented by SEQ ID NOS: 159870, 159871, 159872, 159873, 159874, 159875, 159876, 159877, 159878, 159879, 159880 were selected from the ORFs having the nucleotide sequence represented by SEQ ID NO: 82225.

[13627] The probes having the nucleotide sequence represented by SEQ ID NOS: 159881, 159882, 159883, 159884, 159885, 159886, 159887, 159888, 159889, 159890, 159891 were selected from the ORFs having the nucleotide sequence represented by SEQ ID NO: 82226.

[13628] The probes having the nucleotide sequence represented by SEQ ID NOS: 159892, 159893, 159894, 159895, 159896, 159897, 159898, 159899, 159900, 159901, 159902 were selected from the ORFs having the nucleotide sequence represented by SEQ ID NO: 82227.

[13629] The probes having the nucleotide sequence represented by SEQ ID NOS: 159903, 159904, 159905, 159906, 159907, 159908, 159909, 159910, 159911, 159912, 159913 were selected from the ORFs having the nucleotide sequence represented by SEQ ID NO: 82228.

[13630] The probes having the nucleotide sequence represented by SEQ ID NOS: 159914, 159915, 159916, 159917, 159918, 159919, 159920, 159921, 159922, 159923, 159924 were selected from the ORFs having the nucleotide sequence represented by SEQ ID NO: 82229.

[13631] The probes having the nucleotide sequence represented by SEQ ID NOS: 159925, 159926, 159927, 159928, 159929, 159930, 159931, 159932, 159933, 159934, 159935 were selected from the ORFs having the nucleotide sequence represented by SEQ ID NO: 82230.

[13632] The probes having the nucleotide sequence represented by SEQ ID NOS: 159936, 159937, 159938, 159939, 159940, 159941, 159942, 159943, 159944, 159945, 159946 were selected from the ORFs having the nucleotide sequence represented by SEQ ID NO: 82231.

[13633] The probes having the nucleotide sequence represented by SEQ ID NOS: 159947, 159948, 159949, 159950, 159951, 159952, 159953, 159954, 159955, 159956, 159957 were selected from the ORFs having the nucleotide sequence represented by SEQ ID NO: 82232.

[13634] The probes having the nucleotide sequence represented by SEQ ID NOS: 159958, 159959, 159960, 159961, 159962, 159963, 159964, 159965, 159966, 159967, 159968 were selected from the ORFs having the nucleotide sequence represented by SEQ ID NO: 82233.

[13635] The probes having the nucleotide sequence represented by SEQ ID NOS: 159969, 159970, 159971, 159972, 159973, 159974, 159975, 159976, 159977, 159978, 159979 were selected from the ORFs having the nucleotide sequence represented by SEQ ID NO: 82234.

[13636] The probes having the nucleotide sequence represented by SEQ ID NOS: 159980, 159981, 159982, 159983, 159984, 159985, 159986, 159987, 159988, 159989, 159990 were selected from the ORFs having the nucleotide sequence represented by SEQ ID NO: 82235.

[13637] The probes having the nucleotide sequence represented by SEQ ID NOS: 159991, 159992, 159993, 159994, 159995, 159996, 159997, 159998, 159999, 160000, 160001 were selected from the ORFs having the nucleotide sequence represented by SEQ ID NO: 82236.

[13638] The probes having the nucleotide sequence represented by SEQ ID NOS: 160002, 160003, 160004, 160005, 160006, 160007, 160008, 160009, 160010, 160011, 160012 were selected from the ORFs having the nucleotide sequence represented by SEQ ID NO: 82237.

[13639] The probes having the nucleotide sequence represented by SEQ ID NOS: 160013, 160014, 160015, 160016, 160017, 160018, 160019, 160020, 160021, 160022, 160023 were selected from the ORFs having the nucleotide sequence represented by SEQ ID NO: 82238.

[13640] The probes having the nucleotide sequence represented by SEQ ID NOS: 160024, 160025, 160026, 160027, 160028, 160029, 160030, 160031, 160032, 160033, 160034 were selected from the ORFs having the nucleotide sequence represented by SEQ ID NO: 82239.

[13641] The probes having the nucleotide sequence represented by SEQ ID NOS: 160035, 160036, 160037, 160038, 160039, 160040, 160041, 160042, 160043, 160044, 160045 were selected from the ORFs having the nucleotide sequence represented by SEQ ID NO: 82240.

[13642] The probes having the nucleotide sequence represented by SEQ ID NOS: 160046, 160047, 160048, 160049, 160050, 160051, 160052, 160053, 160054, 160055, 160056 were selected from the ORFs having the nucleotide sequence represented by SEQ ID NO: 82241.

[13643] The probes having the nucleotide sequence represented by SEQ ID NOS: 160057, 160058, 160059, 160060, 160061, 160062, 160063, 160064, 160065, 160066, 160067 were selected from the ORFs having the nucleotide sequence represented by SEQ. ID NO: 82242.

[13644] The probes having the nucleotide sequence represented by SEQ ID NOS: 160068, 160069, 160070, 160071, 160072, 160073, 160074, 160075, 160076, 160077, 160078 were selected from the ORFs having the nucleotide sequence represented by SEQ ID NO: 82243.

[13645] The probes having the nucleotide sequence represented by SEQ ID NOS: 160079, 160080, 160081, 160082, 160083, 160084, 160085, 160086, 160087, 160088, 160089 were selected from the ORFs having the nucleotide sequence represented by SEQ ID NO: 82244.

[13646] The probes having the nucleotide sequence represented by SEQ ID NOS: 160090, 160091, 160092, 160093, 160094, 160095, 160096, 160097, 160098, 160099, 160100 were selected from the ORFs having the nucleotide sequence represented by SEQ ID NO: 82245.

[13647] The probes having the nucleotide sequence represented by SEQ ID NOS: 160101, 160102, 160103, 160104, 160105, 160106, 160107, 160108, 160109, 160110, 160111 were selected from the ORFs having the nucleotide sequence represented by SEQ ID NO: 82246.

[13648] The probes having the nucleotide sequence represented by SEQ ID NOS: 160112, 160113, 160114, 160115, 160116, 160117, 160118, 160119, 160120, 160121, 160122 were selected from the ORFs having the nucleotide sequence represented by SEQ ID NO: 82247.

[13649] The probes having the nucleotide sequence represented by SEQ ID NOS: 160123, 160124, 160125, 160126, 160127, 160128, 160129, 160130, 160131, 160132, 160133 were selected from the ORFs having the nucleotide sequence represented by SEQ ID NO: 82248.

[13650] The probes having the nucleotide sequence represented by SEQ ID NOS: 160134, 160135, 160136, 160137, 160138, 160139, 160140, 160141, 160142, 160143, 160144 were selected from the ORFs having the nucleotide sequence represented by SEQ ID NO: 82249.

[13651] The probes having the nucleotide sequence represented by SEQ ID NOS: 160145, 160146, 160147, 160148, 160149, 160150, 160151, 160152, 160153, 160154, 160155 were selected from the ORFs having the nucleotide sequence represented by SEQ ID NO: 82250.

[13652] The probes having the nucleotide sequence represented by SEQ ID NOS: 160156, 160157, 160158, 160159, 160160, 160161, 160162, 160163, 160164, 160165, 160166 were selected from the ORFs having the nucleotide sequence represented by SEQ ID NO: 82251.

[13653] The probes having the nucleotide sequence represented by SEQ ID NOS: 160167, 160168, 160169, 160170, 160171, 160172, 160173, 160174, 160175, 160176, 160177 were selected from the ORFs having the nucleotide sequence represented by SEQ ID NO: 82252.

[13654] The probes having the nucleotide sequence represented by SEQ ID NOS: 160178, 160179, 160180, 160181, 160182, 160183, 160184, 160185, 160186, 160187, 160188 were selected from the ORFs having the nucleotide sequence represented by SEQ ID NO: 82253.

[13655] The probes having the nucleotide sequence represented by SEQ ID NOS: 160189, 160190, 160191, 160192, 160193, 160194, 160195, 160196, 160197, 160198, 160199 were selected from the ORFs having the nucleotide sequence represented by SEQ ID NO: 82254.

[13656] The probes having the nucleotide sequence represented by SEQ ID NOS: 160200, 160201, 160202, 160203, 160204, 160205, 160206, 160207, 160208, 160209, 160210 were selected from the ORFs having the nucleotide sequence represented by SEQ ID NO: 82255.

[13657] The probes having the nucleotide sequence represented by SEQ ID NOS: 160211, 160212, 160213, 160214, 160215, 160216, 160217, 160218, 160219, 160220, 160221 were selected from the ORFs having the nucleotide sequence represented by SEQ ID NO: 82256.

[13658] The probes having the nucleotide sequence represented by SEQ ID NOS: 160222, 160223, 160224, 160225, 160226, 160227, 160228, 160229, 160230, 160231, 160232 were selected from the ORFs having the nucleotide sequence represented by SEQ ID NO: 82257.

[13659] The probes having the nucleotide sequence represented by SEQ ID NOS: 160233, 160234, 160235, 160236, 160237, 160238, 160239, 160240, 160241, 160242, 160243 were selected from the ORFs having the nucleotide sequence represented by SEQ ID NO: 82258.

[13660] The probes having the nucleotide sequence represented by SEQ ID NOS: 160244, 160245, 160246, 160247, 160248, 160249, 160250, 160251, 160252, 160253, 160254 were selected from the ORFs having the nucleotide sequence represented by SEQ ID NO: 82259.

[13661] The probes having the nucleotide sequence represented by SEQ ID NOS: 160255, 160256, 160257, 160258, 160259, 160260, 160261, 160262, 160263, 160264, 160265 were selected from the ORFs having the nucleotide sequence represented by SEQ ID NO: 82260.

[13662] The probes having the nucleotide sequence represented by SEQ ID NOS: 160266, 160267, 160268, 160269, 160270, 160271, 160272, 160273, 160274, 160275, 160276 were selected from the ORFs having the nucleotide sequence represented by SEQ ID NO: 82261.

[13663] The probes having the nucleotide sequence represented by SEQ ID NOS: 160277, 160278, 160279, 160280, 160281, 160282, 160283, 160284, 160285, 160286, 160287 were selected from the ORFs having the nucleotide sequence represented by SEQ ID NO: 82262.

[13664] The probes having the nucleotide sequence represented by SEQ ID NOS: 160288, 160289, 160290, 160291, 160292, 160293, 160294, 160295, 160296, 160297, 160298 were selected from the ORFs having the nucleotide sequence represented by SEQ ID NO: 82263.

[13665] The probes having the nucleotide sequence represented by SEQ ID NOS: 160299, 160300, 160301, 160302, 160303, 160304, 160305, 160306, 160307, 160308, 160309 were selected from the ORFs having the nucleotide sequence represented by SEQ ID NO: 82264.

[13666] The probes having the nucleotide sequence represented by SEQ ID NOS: 160310, 160311, 160312, 160313, 160314, 160315, 160316, 160317, 160318, 160319, 160320 were selected from the ORFs having the nucleotide sequence represented by SEQ ID NO: 82265.

[13667] The probes having the nucleotide sequence represented by SEQ ID NOS: 160321, 160322, 160323, 160324, 160325, 160326, 160327, 160328, 160329, 160330, 160331 were selected from the ORFs having the nucleotide sequence represented by SEQ ID NO: 82266.

[13668] The probes having the nucleotide sequence represented by SEQ ID NOS: 160332, 160333, 160334, 160335, 160336, 160337, 160338, 160339, 160340, 160341, 160342 were selected from the ORFs having the nucleotide sequence represented by SEQ ID NO: 82267.

[13669] The probes having the nucleotide sequence represented by SEQ ID NOS: 160343, 160344, 160345, 160346, 160347, 160348, 160349, 160350, 160351, 160352, 160353 were selected from the ORFs having the nucleotide sequence represented by SEQ ID NO: 82268.

[13670] The probes having the nucleotide sequence represented by SEQ ID NOS: 160354, 160355, 160356, 160357, 160358, 160359, 160360, 160361, 160362, 160363, 160364 were selected from the ORFs having the nucleotide sequence represented by SEQ ID NO: 82269.

[13671] The probes having the nucleotide sequence represented by SEQ ID NOS: 160365, 160366, 160367, 160368, 160369, 160370, 160371, 160372, 160373, 160374, 160375 were selected from the ORFs having the nucleotide sequence represented by SEQ ID NO: 82270.

[13672] The probes having the nucleotide sequence represented by SEQ ID NOS: 160376, 160377, 160378, 160379, 160380, 160381, 160382, 160383, 160384, 160385, 160386 were selected from the ORFs having the nucleotide sequence represented by SEQ ID NO: 82271.

[13673] The probes having the nucleotide sequence represented by SEQ ID NOS: 160387, 160388, 160389, 160390, 160391, 160392, 160393, 160394, 160395, 160396, 160397 were selected from the ORFs having the nucleotide sequence represented by SEQ ID NO: 82272.

[13674] The probes having the nucleotide sequence represented by SEQ ID NOS: 160398, 160399, 160400, 160401, 160402, 160403, 160404, 160405, 160406, 160407, 160408 were selected from the ORFs having the nucleotide sequence represented by SEQ ID NO: 82273.

[13675] The probes having the nucleotide sequence represented by SEQ ID NOS: 160409, 160410, 160411, 160412, 160413, 160414, 160415, 160416, 160417, 160418, 160419 were selected from the ORFs having the nucleotide sequence represented by SEQ ID NO: 82274.

[13676] The probes having the nucleotide sequence represented by SEQ ID NOS: 160420, 160421, 160422, 160423, 160424, 160425, 160426, 160427, 160428, 160429, 160430 were selected from the ORFs having the nucleotide sequence represented by SEQ ID NO: 82275.

[13677] The probes having the nucleotide sequence represented by SEQ ID NOS: 160431, 160432, 160433, 160434, 160435, 160436, 160437, 160438, 160439, 160440, 160441 were selected from the ORFs having the nucleotide sequence represented by SEQ ID NO: 82276.

[13678] The probes having the nucleotide sequence represented by SEQ ID NOS: 160442, 160443, 160444, 160445, 160446, 160447, 160448, 160449, 160450, 160451, 160452 were selected from the ORFs having the nucleotide sequence represented by SEQ ID NO: 82277.

[13679] The probes having the nucleotide sequence represented by SEQ ID NOS: 160453, 160454, 160455, 160456, 160457, 160458, 160459, 160460, 160461, 160462, 160463 were selected from the ORFs having the nucleotide sequence represented by SEQ ID NO: 82278.

[13680] The probes having the nucleotide sequence represented by SEQ ID NOS: 160464, 160465, 160466, 160467, 160468, 160469, 160470, 160471, 160472, 160473, 160474 were selected from the ORFs having the nucleotide sequence represented by SEQ ID NO: 82279.

[13681] The probes having the nucleotide sequence represented by SEQ ID NOS: 160475, 160476, 160477, 160478, 160479, 160480, 160481, 160482, 160483, 160484, 160485 were selected from the ORFs having the nucleotide sequence represented by SEQ ID NO: 82280.

[13682] The probes having the nucleotide sequence represented by SEQ ID NOS: 160486, 160487, 160488, 160489, 160490, 160491, 160492, 160493, 160494, 160495, 160496 were selected from the ORFs having the nucleotide sequence represented by SEQ ID NO: 82281.

[13683] The probes having the nucleotide sequence represented by SEQ ID NOS: 160497, 160498, 160499, 160500, 160501, 160502, 160503, 160504, 160505, 160506, 160507 were selected from the ORFs having the nucleotide sequence represented by SEQ ID NO: 82282.

[13684] The probes having the nucleotide sequence represented by SEQ ID NOS: 160508, 160509, 160510, 160511, 160512, 160513, 160514, 160515, 160516, 160517, 160518 were selected from the ORFs having the nucleotide sequence represented by SEQ ID NO: 82283.

[13685] The probes having the nucleotide sequence represented by SEQ ID NOS: 160519, 160520, 160521, 160522, 160523, 160524, 160525, 160526, 160527, 160528, 160529 were selected from the ORFs having the nucleotide sequence represented by SEQ ID NO: 82284.

[13686] The probes having the nucleotide sequence represented by SEQ ID NOS: 160530, 160531, 160532, 160533, 160534, 160535, 160536, 160537, 160538, 160539, 160540 were selected from the ORFs having the nucleotide sequence represented by SEQ ID NO: 82285.

[13687] The probes having the nucleotide sequence represented by SEQ ID NOS: 160541, 160542, 160543, 160544, 160545, 160546, 160547, 160548, 160549, 160550, 160551 were selected from the ORFs having the nucleotide sequence represented by SEQ ID NO: 82286.

[13688] The probes having the nucleotide sequence represented by SEQ ID NOS: 160552, 160553, 160554, 160555, 160556, 160557, 160558, 160559, 160560, 160561, 160562 were selected from the ORFs having the nucleotide sequence represented by SEQ ID NO: 82287.

[13689] The probes having the nucleotide sequence represented by SEQ ID NOS: 160563, 160564, 160565, 160566, 160567, 160568, 160569, 160570, 160571, 160572, 160573 were selected from the ORFs having the nucleotide sequence represented by SEQ ID NO: 82288.

[13690] The probes having the nucleotide sequence represented by SEQ ID NOS: 160574, 160575, 160576, 160577, 160578, 160579, 160580, 160581, 160582, 160583, 160584 were selected from the ORFs having the nucleotide sequence represented by SEQ ID NO: 82289.

[13691] The probes having the nucleotide sequence represented by SEQ ID NOS: 160585, 160586, 160587, 160588, 160589, 160590, 160591, 160592, 160593, 160594, 160595 were selected from the ORFs having the nucleotide sequence represented by SEQ ID NO: 82290.

[13692] The probes having the nucleotide sequence represented by SEQ ID NOS: 160596, 160597, 160598, 160599, 160600, 160601, 160602, 160603, 160604, 160605, 160606 were selected from the ORFs having the nucleotide sequence represented by SEQ ID NO: 82291.

[13693] The probes having the nucleotide sequence represented by SEQ ID NOS: 160607, 160608, 160609, 160610, 160611, 160612, 160613, 160614, 160615, 160616, 160617 were selected from the ORFs having the nucleotide sequence represented by SEQ ID NO: 82292.

[13694] The probes having the nucleotide sequence represented by SEQ ID NOS: 160618, 160619, 160620, 160621, 160622, 160623, 160624, 160625, 160626, 160627, 160628 were selected from the ORFs having the nucleotide sequence represented by SEQ ID NO: 82293.

[13695] The probes having the nucleotide sequence represented by SEQ ID NOS: 160629, 160630, 160631, 160632, 160633, 160634, 160635, 160636, 160637, 160638, 160639 were selected from the ORFs having the nucleotide sequence represented by SEQ ID NO: 82294.

[13696] The probes having the nucleotide sequence represented by SEQ ID NOS: 160640, 160641, 160642, 160643, 160644, 160645, 160646, 160647, 160648, 160649, 160650 were selected from the ORFs having the nucleotide sequence represented by SEQ ID NO: 82295.

[13697] The probes having the nucleotide sequence represented by SEQ ID NOS: 160651,. 160652, 160653, 160654, 160655, 160656, 160657, 160658, 160659, 160660, 160661 were selected from the ORFs having the nucleotide sequence represented by SEQ ID NO: 82296.

[13698] The probes having the nucleotide sequence represented by SEQ ID NOS: 160662, 160663, 160664, 160665, 160666, 160667, 160668, 160669, 160670, 160671, 160672 were selected from the ORFs having the nucleotide sequence represented by SEQ ID NO: 82297.

[13699] The probes having the nucleotide sequence represented by SEQ ID NOS: 160673, 160674, 160675, 160676, 160677, 160678, 160679, 160680, 160681, 160682, 160683 were selected from the ORFs having the nucleotide sequence represented by SEQ ID NO: 82298.

[13700] The probes having the nucleotide sequence represented by SEQ ID NOS: 160684, 160685, 160686, 160687, 160688, 160689, 160690, 160691, 160692, 160693, 160694 were selected from the ORFs having the nucleotide sequence represented by SEQ ID NO: 82299.

[13701] The probes having the nucleotide sequence represented by SEQ ID NOS: 160695, 160696, 160697, 160698, 160699, 160700, 160701, 160702, 160703, 160704, 160705 were selected from the ORFs having the nucleotide sequence represented by SEQ ID NO: 82300.

[13702] The probes having the nucleotide sequence represented by SEQ ID NOS: 160706, 160707, 160708, 160709, 160710, 160711, 160712, 160713, 160714, 160715, 160716 were selected from the ORFs having the nucleotide sequence represented by SEQ ID NO: 82301.

[13703] The probes having the nucleotide sequence represented by SEQ ID NOS: 160717, 160718, 160719, 160720, 160721, 160722, 160723, 160724, 160725, 160726, 160727 were selected from the ORFs having the nucleotide sequence represented by SEQ ID NO: 82302.

[13704] The probes having the nucleotide sequence represented by SEQ ID NOS: 160728, 160729, 160730, 160731, 160732, 160733, 160734, 160735, 160736, 160737, 160738 were selected from the ORFs having the nucleotide sequence represented by SEQ ID NO: 82303.

[13705] The probes having the nucleotide sequence represented by SEQ ID NOS: 160739, 160740, 160741, 160742, 160743, 160744, 160745, 160746, 160747, 160748, 160749 were selected from the ORFs having the nucleotide sequence represented by SEQ ID NO: 82304.

[13706] The probes having the nucleotide sequence represented by SEQ ID NOS: 160750, 160751, 160752, 160753, 160754, 160755, 160756, 160757, 160758, 160759, 160760 were selected from the ORFs having the nucleotide sequence represented by SEQ ID NO: 82305.

[13707] The probes having the nucleotide sequence represented by SEQ ID NOS: 160761, 160762, 160763, 160764, 160765, 160766, 160767, 160768, 160769, 160770, 160771 were selected from the ORFs having the nucleotide sequence represented by SEQ ID NO: 82306.

[13708] The probes having the nucleotide sequence represented by SEQ ID NOS: 160772, 160773, 160774, 160775, 160776, 160777, 160778, 160779, 160780, 160781, 160782 were selected from the ORFs having the nucleotide sequence represented by SEQ ID NO: 82307.

[13709] The probes having the nucleotide sequence represented by SEQ ID NOS: 160783, 160784, 160785, 160786, 160787, 160788, 160789, 160790, 160791, 160792, 160793 were selected from the ORFs having the nucleotide sequence represented by SEQ ID NO: 82308.

[13710] The probes having the nucleotide sequence represented by SEQ ID NOS: 160794, 160795, 160796, 160797, 160798, 160799, 160800, 160801, 160802, 160803, 160804 were selected from the ORFs having the nucleotide sequence represented by SEQ ID NO: 82309.

[13711] The probes having the nucleotide sequence represented by SEQ ID NOS: 160805, 160806, 160807, 160808, 160809, 160810, 160811, 160812, 160813, 160814, 160815 were selected from the ORFs having the nucleotide sequence represented by SEQ ID NO: 82310.

[13712] The probes having the nucleotide sequence represented by SEQ ID NOS: 160816, 160817, 160818, 160819, 160820, 160821, 160822, 160823, 160824, 160825, 160826 were selected from the ORFs having the nucleotide sequence represented by SEQ ID NO: 82311.

[13713] The probes having the nucleotide sequence represented by SEQ ID NOS: 160827, 160828, 160829, 160830, 160831, 160832, 160833, 160834, 160835, 160836, 160837 were selected from the ORFs having the nucleotide sequence represented by SEQ ID NO: 82312.

[13714] The probes having the nucleotide sequence represented by SEQ ID NOS: 160838, 160839, 160840, 160841, 160842, 160843, 160844, 160845, 160846, 160847, 160848 were selected from the ORFs having the nucleotide sequence represented by SEQ ID NO: 82313.

[13715] The probes having the nucleotide sequence represented by SEQ ID NOS: 160849, 160850, 160851, 160852, 160853, 160854, 160855, 160856, 160857, 160858, 160859 were selected from the ORFs having the nucleotide sequence represented by SEQ ID NO: 82314.

[13716] The probes having the nucleotide sequence represented by SEQ ID NOS: 160860, 160861, 160862, 160863, 160864, 160865, 160866, 160867, 160868, 160869, 160870 were selected from the ORFs having the nucleotide sequence represented by SEQ ID NO: 82315.

[13717] The probes having the nucleotide sequence represented by SEQ ID NOS: 160871, 160872, 160873, 160874, 160875, 160876, 160877, 160878, 160879, 160880, 160881 were selected from the ORFs having the nucleotide sequence represented by SEQ ID NO: 82316.

[13718] The probes having the nucleotide sequence represented by SEQ ID NOS: 160882, 160883, 160884, 160885, 160886, 160887, 160888, 160889, 160890, 160891, 160892 were selected from the ORFs having the nucleotide sequence represented by SEQ ID NO: 82317.

[13719] The probes having the nucleotide sequence represented by SEQ ID NOS: 160893, 160894, 160895, 160896, 160897, 160898, 160899, 160900, 160901, 160902, 160903 were selected from the ORFs having the nucleotide sequence represented by SEQ ID NO: 82318.

[13720] The probes having the nucleotide sequence represented by SEQ ID NOS: 160904, 160905, 160906, 160907, 160908, 160909, 160910, 160911, 160912, 160913, 160914 were selected from the ORFs having the nucleotide sequence represented by SEQ ID NO: 82319.

[13721] The probes having the nucleotide sequence represented by SEQ ID NOS: 160915, 160916, 160917, 160918, 160919, 160920, 160921, 160922, 160923, 160924, 160925 were selected from the ORFs having the nucleotide sequence represented by SEQ ID NO: 82320.

[13722] The probes having the nucleotide sequence represented by SEQ ID NOS: 160926, 160927, 160928, 160929, 160930, 160931, 160932, 160933, 160934, 160935, 160936 were selected from the ORFs having the nucleotide sequence represented by SEQ ID NO: 82321.

[13723] The probes having the nucleotide sequence represented by SEQ ID NOS: 160937, 160938, 160939, 160940, 160941, 160942, 160943, 160944, 160945, 160946, 160947 were selected from the ORFs having the nucleotide sequence represented by SEQ ID NO: 82322.

[13724] The probes having the nucleotide sequence represented by SEQ ID NOS: 160948, 160949, 160950, 160951, 160952, 160953, 160954, 160955, 160956, 160957, 160958 were selected from the ORFs having the nucleotide sequence represented by SEQ ID NO: 82323.

[13725] The probes having the nucleotide sequence represented by SEQ ID NOS: 160959, 160960, 160961, 160962, 160963, 160964, 160965, 160966, 160967, 160968, 160969 were selected from the ORFs having the nucleotide sequence represented by SEQ ID NO: 82324.

[13726] The probes having the nucleotide sequence represented by SEQ ID NOS: 160970, 160971, 160972, 160973, 160974, 160975, 160976, 160977, 160978, 160979, 160980 were selected from the ORFs having the nucleotide sequence represented by SEQ ID NO: 82325.

[13727] The probes having the nucleotide sequence represented by SEQ ID NOS: 160981, 160982, 160983, 160984, 160985, 160986, 160987, 160988, 160989, 160990, 160991 were selected from the ORFs having the nucleotide sequence represented by SEQ ID NO: 82326.

[13728] The probes having the nucleotide sequence represented by SEQ ID NOS: 160992, 160993, 160994, 160995, 160996, 160997, 160998, 160999, 161000, 161001, 161002 were selected from the ORFs having the nucleotide sequence represented by SEQ ID NO: 82327.

[13729] The probes having the nucleotide sequence represented by SEQ ID NOS: 161003, 161004, 161005, 161006, 161007, 161008, 161009, 161010, 161011, 161012, 161013 were selected from the ORFs having the nucleotide sequence represented by SEQ ID NO: 82328.

[13730] The probes having the nucleotide sequence represented by SEQ ID NOS: 161014, 161015, 161016, 161017, 161018, 161019, 161020, 161021, 161022, 161023, 161024 were selected from the ORFs having the nucleotide sequence represented by SEQ ID NO: 82329.

[13731] The probes having the nucleotide sequence represented by SEQ ID NOS: 161025, 161026, 161027, 161028, 161029, 161030, 161031, 161032, 161033, 161034, 161035 were selected from the ORFs having the nucleotide sequence represented by SEQ ID NO: 82330.

[13732] The probes having the nucleotide sequence represented by SEQ ID NOS: 161036, 161037, 161038, 161039, 161040, 161041, 161042, 161043, 161044, 161045, 161046, 161047, 161048, 161049, 161050, 161051, 161052, 161053, 161054, 161055, 161056, 161057 were selected from the ORFs having the nucleotide sequence represented by SEQ ID NO: 82331.

[13733] The probes having the nucleotide sequence represented by SEQ ID NOS: 161058, 161059, 161060, 161061, 161062, 161063, 161064, 161065, 161066, 161067, 161068 were selected from the ORFs having the nucleotide sequence represented by SEQ ID NO: 82332.

[13734] The probes having the nucleotide sequence represented by SEQ ID NOS: 161069, 161070, 161071, 161072, 161073, 161074, 161075, 161076, 161077, 161078, 161079 were selected from the ORFs having the nucleotide sequence represented by SEQ ID NO: 82333.

[13735] The probes having the nucleotide sequence represented by SEQ ID NOS: 161080, 161081, 161082, 161083, 161084, 161085, 161086, 161087, 161088, 161089, 161090 were selected from the ORFs having the nucleotide sequence represented by SEQ ID NO: 82334.

[13736] The probes having the nucleotide sequence represented by SEQ ID NOS: 161091, 161092, 161093, 161094, 161095, 161096, 161097, 161098, 161099, 161100, 161101 were selected from the ORFs having the nucleotide sequence represented by SEQ ID NO: 82335.

[13737] The probes having the nucleotide sequence represented by SEQ ID NOS: 161102, 161103, 161104, 161105, 161106, 161107, 161108, 161109, 161110, 161111, 161112 were selected from the ORFs having the nucleotide sequence represented by SEQ ID NO: 82336.

[13738] The probes having the nucleotide sequence represented by SEQ ID NOS: 161113, 161114, 161115, 161116, 161117, 161118, 161119, 161120, 161121, 161122, 161123, 161124, 161125, 161126, 161127, 161128, 161129, 161130, 161131, 161132, 161133, 161134 were selected from the ORFs having the nucleotide sequence represented by SEQ ID NO: 82337.

[13739] The probes having the nucleotide sequence represented by SEQ ID NOS: 161135, 161136, 161137, 161138, 161139, 161140, 161141, 161142, 161143, 161144, 161145 were selected from the ORFs having the nucleotide sequence represented by SEQ ID NO: 82338.

[13740] The probes having the nucleotide sequence represented by SEQ ID NOS: 161146, 161147, 161148, 161149, 161150, 161151, 161152, 161153, 161154, 161155, 161156 were selected from the ORFs having the nucleotide sequence represented by SEQ ID NO: 82339.

[13741] The probes having the nucleotide sequence represented by SEQ ID NOS: 161157, 161158, 161159, 161160, 161161, 161162, 161163, 161164, 161165, 161166, 161167 were selected from the ORFs having the nucleotide sequence represented by SEQ ID NO: 82340.

[13742] The probes having the nucleotide sequence represented by SEQ ID NOS: 161168, 161169, 161170, 161171, 161172, 161173, 161174, 161175, 161176, 161177, 161178 were selected from the ORFs having the nucleotide sequence represented by SEQ ID NO: 82341.

[13743] The probes having the nucleotide sequence represented by SEQ ID NOS: 161179, 161180, 161181, 161182, 161183, 161184, 161185, 161186, 161187, 161188, 161189 were selected from the ORFs having the nucleotide sequence represented by SEQ ID NO: 82342.

[13744] The probes having the nucleotide sequence represented by SEQ ID NOS: 161190, 161191, 161192, 161193, 161194, 161195, 161196, 161197, 161198, 161199, 161200 were selected from the ORFs having the nucleotide sequence represented by SEQ ID NO: 82343.

[13745] The probes having the nucleotide sequence represented by SEQ ID NOS: 161201, 161202, 161203, 161204, 161205, 161206, 161207, 161208, 161209, 161210, 161211 were selected from the ORFs having the nucleotide sequence represented by SEQ ID NO: 82344.

[13746] The probes having the nucleotide sequence represented by SEQ ID NOS: 161212, 161213, 161214, 161215, 161216, 161217, 161218, 161219, 161220, 161221, 161222 were selected from the ORFs having the nucleotide sequence represented by SEQ ID NO: 82345.

[13747] The probes having the nucleotide sequence represented by SEQ ID NOS: 161223, 161224, 161225, 161226, 161227, 161228, 161229, 161230, 161231, 161232, 161233 were selected from the ORFs having the nucleotide sequence represented by SEQ ID NO: 82346.

[13748] The probes having the nucleotide sequence represented by SEQ ID NOS: 161234, 161235, 161236, 161237, 161238, 161239, 161240, 161241, 161242, 161243, 161244 were selected from the ORFs having the nucleotide sequence represented by SEQ ID NO: 82347.

[13749] The probes having the nucleotide sequence represented by SEQ ID NOS: 161245, 161246, 161247, 161248, 161249, 161250, 161251, 161252, 161253, 161254, 161255 were selected from the ORFs having the nucleotide sequence represented by SEQ ID NO: 82348.

[13750] The probes having the nucleotide sequence represented by SEQ ID NOS: 161256, 161257, 161258, 161259, 161260, 161261, 161262, 161263, 161264, 161265, 161266 were selected from the ORFs having the nucleotide sequence represented by SEQ ID NO: 82349.

[13751] The probes having the nucleotide sequence represented by SEQ ID NOS: 161267, 161268, 161269, 161270, 161271, 161272, 161273, 161274, 161275, 161276, 161277 were selected from the ORFs having the nucleotide sequence represented by SEQ ID NO: 82350.

[13752] The probes having the nucleotide sequence represented by SEQ ID NOS: 161278, 161279, 161280, 161281, 161282, 161283, 161284, 161285, 161286, 161287, 161288 were selected from the ORFs having the nucleotide sequence represented by SEQ ID NO: 82351.

[13753] The probes having the nucleotide sequence represented by SEQ ID NOS: 161289, 161290, 161291, 161292, 161293, 161294, 161295, 161296, 161297, 161298, 161299, 161300, 161301, 161302, 161303, 161304, 161305, 161306, 161307, 161308, 161309, 161310 were selected from the ORFs having the nucleotide sequence represented by SEQ ID NO: 82352.

[13754] The probes having the nucleotide sequence represented by SEQ ID NOS: 161311, 161312, 161313, 161314, 161315, 161316, 161317, 161318, 161319, 161320, 161321 were selected from the ORFs having the nucleotide sequence represented by SEQ ID NO: 82353.

[13755] The probes having the nucleotide sequence represented by SEQ ID NOS: 161322, 161323, 161324, 161325, 161326, 161327, 161328, 161329, 161330, 161331, 161332 were selected from the ORFs having the nucleotide sequence represented by SEQ ID NO: 82354.

[13756] The probes having the nucleotide sequence represented by SEQ ID NOS: 161333, 161334, 161335, 161336, 161337, 161338, 161339, 161340, 161341, 161342, 161343 were selected from the ORFs having the nucleotide sequence represented by SEQ ID NO: 82355.

[13757] The probes having the nucleotide sequence represented by SEQ ID NOS: 161344, 161345, 161346, 161347, 161348, 161349, 161350, 161351, 161352, 161353, 161354 were selected from the ORFs having the nucleotide sequence represented by SEQ ID NO: 82356.

[13758] The probes having the nucleotide sequence represented by SEQ ID NOS: 161355, 161356, 161357, 161358, 161359, 161360, 161361, 161362, 161363 were selected from the ORFs having the nucleotide sequence represented by SEQ ID NO: 82357.

[13759] The probes having the nucleotide sequence represented by SEQ ID NOS: 161364, 161365, 161366, 161367, 161368, 161369, 161370, 161371, 161372, 161373, 161374 were selected from the ORFs having the nucleotide sequence represented by SEQ ID NO: 82358.

[13760] The probes having the nucleotide sequence represented by SEQ ID NOS: 161375, 161376, 161377, 161378, 161379, 161380, 161381, 161382, 161383, 161384, 161385 were selected from the ORFs having the nucleotide sequence represented by SEQ ID NO: 82359.

[13761] The probes having the nucleotide sequence represented by SEQ ID NOS: 161386, 161387, 161388, 161389, 161390, 161391, 161392, 161393, 161394, 161395, 161396 were selected from the ORFs having the nucleotide sequence represented by SEQ ID NO: 82360.

[13762] The probes having the nucleotide sequence represented by SEQ ID NOS: 161397, 161398, 161399, 161400, 161401, 161402, 161403, 161404, 161405, 161406, 161407 were selected from the ORFs having the nucleotide sequence represented by SEQ ID NO: 82361.

[13763] The probes having the nucleotide sequence represented by SEQ ID NOS: 161408, 161409, 161410, 161411, 161412, 161413, 161414, 161415, 161416, 161417, 161418, 161419, 161420, 161421, 161422, 161423, 161424, 161425, 161426, 161427, 161428, 161429 were selected from the ORFs having the nucleotide sequence represented by SEQ ID NO: 82362.

[13764] The probes having the nucleotide sequence represented by SEQ ID NOS: 161430, 161431, 161432, 161433, 161434, 161435, 161436, 161437, 161438, 161439, 161440 were selected from the ORFs having the nucleotide sequence represented by SEQ ID NO: 82363.

[13765] The probes having the nucleotide sequence represented by SEQ ID NOS: 161441, 161442, 161443, 161444, 161445, 161446, 161447, 161448, 161449, 161450, 161451 were selected from the ORFs having the nucleotide sequence represented by SEQ ID NO: 82364.

[13766] The probes having the nucleotide sequence represented by SEQ ID NOS: 161452, 161453, 161454, 161455, 161456, 161457, 161458, 161459, 161460, 161461, 161462 were selected from the ORFs having the nucleotide sequence represented by SEQ ID NO: 82365.

[13767] The probes having the nucleotide sequence represented by SEQ ID NOS: 161463, 161464, 161465, 161466, 161467, 161468, 161469, 161470, 161471, 161472, 161473 were selected from the ORFs having the nucleotide sequence represented by SEQ ID NO: 82366.

[13768] The probes having the nucleotide sequence represented by SEQ ID NOS: 161474, 161475, 161476, 161477, 161478, 161479, 161480, 161481, 161482, 161483, 161484 were selected from the ORFs having the nucleotide sequence represented by SEQ ID NO: 82367.

[13769] The probes having the nucleotide sequence represented by SEQ ID NOS: 161485, 161486, 161487, 161488, 161489, 161490, 161491, 161492, 161493, 161494, 161495 were selected from the ORFs having the nucleotide sequence represented by SEQ ID NO: 82368.

[13770] The probes having the nucleotide sequence represented by SEQ ID NOS: 161496, 161497, 161498, 161499, 161500, 161501, 161502, 161503, 161504, 161505, 161506 were selected from the ORFs having the nucleotide sequence represented by SEQ ID NO: 82369.

[13771] The probes having the nucleotide sequence represented by SEQ ID NOS: 161507, 161508, 161509, 161510, 161511, 161512, 161513, 161514, 161515, 161516, 161517 were selected from the ORFs having the nucleotide sequence represented by SEQ ID NO: 82370.

[13772] The probes having the nucleotide sequence represented by SEQ ID NOS: 161518, 161519, 161520, 161521, 161522, 161523, 161524, 161525, 161526, 161527, 161528 were selected from the ORFs having the nucleotide sequence represented by SEQ ID NO: 82371.

[13773] The probes having the nucleotide sequence represented by SEQ ID NOS: 161529, 161530, 161531, 161532, 161533, 161534, 161535, 161536, 161537, 161538, 161539 were selected from the ORFs having the nucleotide sequence represented by SEQ ID NO: 82372.

[13774] The probes having the nucleotide sequence represented by SEQ ID NOS: 161540, 161541, 161542, 161543, 161544, 161545, 161546, 161547, 161548, 161549, 161550 were selected from the ORFs having the nucleotide sequence represented by SEQ ID NO: 82373.

[13775] The probes having the nucleotide sequence represented by SEQ ID NOS: 161551, 161552, 161553, 161554, 161555, 161556, 161557, 161558, 161559, 161560, 161561 were selected from the ORFs having the nucleotide sequence represented by SEQ ID NO: 82374.

[13776] The probes having the nucleotide sequence represented by SEQ ID NOS: 161562, 161563, 161564, 161565, 161566, 161567, 161568, 161569, 161570, 161571, 161572 were selected from the ORFs having the nucleotide sequence represented by SEQ ID NO: 82375.

[13777] The probes having the nucleotide sequence represented by SEQ ID NOS: 161573, 161574, 161575, 161576, 161577, 161578, 161579, 161580, 161581, 161582, 161583 were selected from the ORFs having the nucleotide sequence represented by SEQ ID NO: 82376.

[13778] The probes having the nucleotide sequence represented by SEQ ID NOS: 161584, 161585, 161586, 161587, 161588, 161589, 161590, 161591, 161592, 161593, 161594 were selected from the ORFs having the nucleotide sequence represented by SEQ ID NO: 82377.

[13779] The probes having the nucleotide sequence represented by SEQ ID NOS: 161595, 161596, 161597, 161598, 161599, 161600, 161601, 161602, 161603, 161604, 161605 were selected from the ORFs having the nucleotide sequence represented by SEQ ID NO: 82378.

[13780] The probes having the nucleotide sequence represented by SEQ ID NOS: 161606, 161607, 161608, 161609, 161610, 161611, 161612, 161613, 161614, 161615, 161616 were selected from the ORFs having the nucleotide sequence represented by SEQ ID NO: 82379.

[13781] The probes having the nucleotide sequence represented by SEQ ID NOS: 161617, 161618, 161619, 161620, 161621, 161622, 161623, 161624, 161625, 161626, 161627 were selected from the ORFs having the nucleotide sequence represented by SEQ ID NO: 82380.

[13782] The probes having the nucleotide sequence represented by SEQ ID NOS: 161628, 161629, 161630, 161631, 161632, 161633, 161634, 161635, 161636, 161637, 161638 were selected from the ORFs having the nucleotide sequence represented by SEQ ID NO: 82381.

[13783] The probes having the nucleotide sequence represented by SEQ ID NOS: 161639, 161640, 161641, 161642, 161643, 161644, 161645, 161646, 161647, 161648, 161649 were selected from the ORFs having the nucleotide sequence represented by SEQ ID NO: 82382.

[13784] The probes having the nucleotide sequence represented by SEQ ID NOS: 161650, 161651, 161652, 161653, 161654, 161655, 161656, 161657, 161658, 161659, 161660 were selected from the ORFs having the nucleotide sequence represented by SEQ ID NO: 82383.

[13785] The probes having the nucleotide sequence represented by SEQ ID NOS: 161661, 161662, 161663, 161664, 161665, 161666, 161667, 161668, 161669, 161670, 161671 were selected from the ORFs having the nucleotide sequence represented by SEQ ID NO: 82384.

[13786] The probes having the nucleotide sequence represented by SEQ ID NOS: 161672, 161673, 161674, 161675, 161676, 161677, 161678, 161679, 161680, 161681, 161682 were selected from the ORFs having the nucleotide sequence represented by SEQ ID NO: 82385.

[13787] The probes having the nucleotide sequence represented by SEQ ID NOS: 161683, 161684, 161685, 161686, 161687, 161688, 161689, 161690, 161691, 161692, 161693 were selected from the ORFs having the nucleotide sequence represented by SEQ ID NO: 82386.

[13788] The probes having the nucleotide sequence represented by SEQ ID NOS: 161694, 161695, 161696, 161697, 161698, 161699, 161700, 161701, 161702, 161703, 161704 were selected from the ORFs having the nucleotide sequence represented by SEQ ID NO: 82387.

[13789] The probes having the nucleotide sequence represented by SEQ ID NOS: 161705, 161706, 161707, 161708, 161709, 161710, 161711, 161712, 161713, 161714, 161715 were selected from the ORFs having the nucleotide sequence represented by SEQ ID NO: 82388.

[13790] The probes having the nucleotide sequence represented by SEQ ID NOS: 161716, 161717, 161718, 161719, 161720, 161721, 161722, 161723, 161724, 161725, 161726 were selected from the ORFs having the nucleotide sequence represented by SEQ ID NO: 82389.

[13791] The probes having the nucleotide sequence represented by SEQ ID NOS: 161727, 161728, 161729, 161730, 161731, 161732, 161733, 161734, 161735, 161736, 161737 were selected from the ORFs having the nucleotide sequence represented by SEQ ID NO: 82390.

[13792] The probes having the nucleotide sequence represented by SEQ ID NOS: 161738, 161739, 161740, 161741, 161742, 161743, 161744, 161745, 161746, 161747, 161748 were selected from the ORFs having the nucleotide sequence represented by SEQ ID NO: 82391.

[13793] The probes having the nucleotide sequence represented by SEQ ID NOS: 161749, 161750, 161751, 161752, 161753, 161754, 161755, 161756, 161757, 161758, 161759 were selected from the ORFs having the nucleotide sequence represented by SEQ ID NO: 82392.

[13794] The probes having the nucleotide sequence represented by SEQ ID NOS: 161760, 161761, 161762, 161763, 161764, 161765, 161766, 161767, 161768, 161769, 161770 were selected from the ORFs having the nucleotide sequence represented by SEQ ID NO: 82393.

[13795] The probes having the nucleotide sequence represented by SEQ ID NOS: 161771, 161772, 161773, 161774, 161775, 161776, 161777, 161778, 161779, 161780, 161781, 161782, 161783, 161784, 161785, 161786, 161787, 161788, 161789, 161790, 161791, 161792 were selected from the ORFs having the nucleotide sequence represented by SEQ ID NO: 82394.

[13796] The probes having the nucleotide sequence represented by SEQ ID NOS: 161793, 161794, 161795, 161796, 161797, 161798, 161799, 161800, 161801, 161802, 161803 were selected from the ORFs having the nucleotide sequence represented by SEQ ID NO: 82395.

[13797] The probes having the nucleotide sequence represented by SEQ ID NOS: 161804, 161805, 161806, 161807, 161808, 161809, 161810, 161811, 161812, 161813, 161814 were selected from the ORFs having the nucleotide sequence represented by SEQ ID NO: 82396.

[13798] The probes having the nucleotide sequence represented by SEQ ID NOS: 161815, 161816, 161817, 161818, 161819, 161820, 161821, 161822, 161823, 161824, 161825 were selected from the ORFs having the nucleotide sequence represented by SEQ ID NO: 82397.

[13799] The probes having the nucleotide sequence represented by SEQ ID NOS: 161826, 161827, 161828, 161829, 161830, 161831, 161832, 161833, 161834, 161835, 161836 were selected from the ORFs having the nucleotide sequence represented by SEQ ID NO: 82398.

[13800] The probes having the nucleotide sequence represented by SEQ ID NOS: 161837, 161838, 161839, 161840, 161841, 161842, 161843, 161844, 161845, 161846, 161847 were selected from the ORFs having the nucleotide sequence represented by SEQ ID NO: 82399.

[13801] The probes having the nucleotide sequence represented by SEQ ID NOS: 161848, 161849, 161850, 161851, 161852, 161853, 161854, 161855, 161856, 161857, 161858 were selected from the ORFs having the nucleotide sequence represented by SEQ ID NO: 82400.

[13802] The probes having the nucleotide sequence represented by SEQ ID NOS: 161859, 161860, 161861, 161862, 161863, 161864, 161865, 161866, 161867, 161868, 161869 were selected from the ORFs having the nucleotide sequence represented by SEQ ID NO: 82401.

[13803] The probes having the nucleotide sequence represented by SEQ ID NOS: 161870, 161871, 161872, 161873, 161874, 161875, 161876, 161877, 161878, 161879, 161880 were selected from the ORFs having the nucleotide sequence represented by SEQ ID NO: 82402.

[13804] The probes having the nucleotide sequence represented by SEQ ID NOS: 161881, 161882, 161883, 161884, 161885, 161886, 161887, 161888, 161889, 161890, 161891 were selected from the ORFs having the nucleotide sequence represented by SEQ ID NO: 82403.

[13805] The probes having the nucleotide sequence represented by SEQ ID NOS: 161892, 161893, 161894, 161895, 161896, 161897, 161898, 161899, 161900, 161901, 161902 were selected from the ORFs having the nucleotide sequence represented by SEQ ID NO: 82404.

[13806] The probes having the nucleotide sequence represented by SEQ ID NOS: 161903, 161904, 161905, 161906, 161907, 161908, 161909, 161910, 161911, 161912, 161913 were selected from the ORFs having the nucleotide sequence represented by SEQ ID NO: 82405.

[13807] The probes having the nucleotide sequence represented by SEQ ID NOS: 161914, 161915, 161916, 161917, 161918, 161919, 161920, 161921, 161922, 161923, 161924 were selected from the ORFs having the nucleotide sequence represented by SEQ ID NO: 82406.

[13808] The probes having the nucleotide sequence represented by SEQ ID NOS:. 161925, 161926, 161927, 161928, 161929, 161930, 161931, 161932, 161933, 161934, 161935 were selected from the ORFs having the nucleotide sequence represented by SEQ ID NO: 82407.

[13809] The probes having the nucleotide sequence represented by SEQ ID NOS: 161936, 161937, 161938, 161939, 161940, 161941, 161942, 161943, 161944, 161945, 161946 were selected from the ORFs having the nucleotide sequence represented by SEQ ID NO: 82408.

[13810] The probes having the nucleotide sequence represented by SEQ ID NOS: 161947, 161948, 161949, 161950, 161951, 161952, 161953, 161954, 161955, 161956, 161957 were selected from the ORFs having the nucleotide sequence represented by SEQ ID NO: 82409.

[13811] The probes having the nucleotide sequence represented by SEQ ID NOS: 161958, 161959, 161960, 161961, 161962, 161963, 161964, 161965, 161966, 161967, 161968 were selected from the ORFs having the nucleotide sequence represented by SEQ ID NO: 82410.

[13812] The probes having the nucleotide sequence represented by SEQ ID NOS: 161969, 161970, 161971, 161972, 161973, 161974, 161975, 161976, 161977, 161978, 161979 were selected from the ORFs having the nucleotide sequence represented by SEQ ID NO: 82411.

[13813] The probes having the nucleotide sequence represented by SEQ ID NOS: 161980, 161981, 161982, 161983, 161984, 161985, 161986, 161987, 161988, 161989, 161990 were selected from the ORFs having the nucleotide sequence represented by SEQ ID NO: 82412.

[13814] The probes having the nucleotide sequence represented by SEQ ID NOS: 161991, 161992, 161993, 161994, 161995, 161996, 161997, 161998, 161999, 162000, 162001 were selected from the ORFs having the nucleotide sequence represented by SEQ ID NO: 82413.

[13815] The probes having the nucleotide sequence represented by SEQ ID NOS: 162002, 162003, 162004, 162005, 162006, 162007, 162008, 162009, 162010, 162011, 162012 were selected from the ORFs having the nucleotide sequence represented by SEQ ID NO: 82414.

[13816] The probes having the nucleotide sequence represented by SEQ ID NOS: 162013, 162014, 162015, 162016, 162017, 162018, 162019, 162020, 162021, 162022, 162023 were selected from the ORFs having the nucleotide sequence represented by SEQ ID NO: 82415.

[13817] The probes having the nucleotide sequence represented by SEQ ID NOS: 162024, 162025, 162026, 162027, 162028, 162029, 162030, 162031, 162032, 162033, 162034 were selected from the ORFs having the nucleotide sequence represented by SEQ ID NO: 82416.

[13818] The probes having the nucleotide sequence represented by SEQ ID NOS: 162035, 162036, 162037, 162038, 162039, 162040, 162041, 162042, 162043, 162044, 162045 were selected from the ORFs having the nucleotide sequence represented by SEQ ID NO: 82417.

[13819] The probes having the nucleotide sequence represented by SEQ ID NOS: 162046, 162047, 162048, 162049, 162050, 162051, 162052, 162053, 162054, 162055, 162056 were selected from the ORFs having the nucleotide sequence represented by SEQ ID NO: 82418.

[13820] The probes having the nucleotide sequence represented by SEQ ID NOS: 162057, 162058, 162059, 162060, 162061, 162062, 162063, 162064, 162065, 162066, 162067 were selected from the ORFs having the nucleotide sequence represented by SEQ ID NO: 82419.

[13821] The probes having the nucleotide sequence represented by SEQ ID NOS: 162068, 162069, 162070, 162071, 162072, 162073, 162074, 162075, 162076, 162077, 162078 were selected from the ORFs having the nucleotide sequence represented by SEQ ID NO: 82420.

[13822] The probes having the nucleotide sequence represented by SEQ ID NOS: 162079, 162080, 162081, 162082, 162083, 162084, 162085, 162086, 162087, 162088, 162089 were selected from the ORFs having the nucleotide sequence represented by SEQ ID NO: 82421.

[13823] The probes having the nucleotide sequence represented by SEQ ID NOS: 162090, 162091, 162092, 162093, 162094, 162095, 162096, 162097, 162098, 162099, 162100 were selected from the ORFs having the nucleotide sequence represented by SEQ ID NO: 82422.

[13824] The probes having the nucleotide sequence represented by SEQ ID NOS: 162101, 162102, 162103, 162104, 162105, 162106, 162107, 162108, 162109, 162110,: 162111 were selected from the ORFs having the nucleotide sequence represented by SEQ ID NO: 82423.

[13825] The probes having the nucleotide sequence represented by SEQ ID NOS: 162112, 162113, 162114, 162115, 162116, 162117, 162118, 162119, 162120, 162121, 162122 were selected from the ORFs having the nucleotide sequence represented by SEQ ID NO: 82424.

[13826] The probes having the nucleotide sequence represented by SEQ ID NOS: 162123, 162124, 162125, 162126, 162127, 162128, 162129, 162130, 162131, 162132, 162133 were selected from the ORFs having the nucleotide sequence represented by SEQ ID NO: 82425.

[13827] The probes having the nucleotide sequence represented by SEQ ID NOS: 162134, 162135, 162136, 162137, 162138, 162139, 162140, 162141, 162142, 162143, 162144 were selected from the ORFs having the nucleotide sequence represented by SEQ ID NO: 82426.

[13828] The probes having the nucleotide sequence represented by SEQ ID NOS: 162145, 162146, 162147, 162148, 162149, 162150, 162151, 162152, 162153, 162154, 162155 were selected from the ORFs having the nucleotide sequence represented by SEQ ID NO: 82427.

[13829] The probes having the nucleotide sequence represented by SEQ ID NOS: 162156, 162157, 162158, 162159, 162160, 162161, 162162, 162163, 162164, 162165, 162166 were selected from the ORFs having the nucleotide sequence represented by SEQ ID NO: 82428.

[13830] The probes having the nucleotide sequence represented by SEQ ID NOS: 162167, 162168, 162169, 162170, 162171, 162172, 162173, 162174, 162175, 162176, 162177 were selected from the ORFs having the nucleotide sequence represented by SEQ ID NO: 82429.

[13831] The probes having the nucleotide sequence represented by SEQ ID NOS: 162178, 162179, 162180, 162181, 162182, 162183, 162184, 162185, 162186, 162187, 162188 were selected from the ORFs having the nucleotide sequence represented by SEQ ID NO: 82430.

[13832] The probes having the nucleotide sequence represented by SEQ ID NOS: 162189, 162190, 162191, 162192, 162193, 162194, 162195, 162196, 162197, 162198, 162199 were selected from the ORFs having the nucleotide sequence represented by SEQ ID NO: 82431.

[13833] The probes having the nucleotide sequence represented by SEQ ID NOS: 162200, 162201, 162202, 162203, 162204, 162205, 162206, 162207, 162208, 162209, 162210 were selected from the ORFs having the nucleotide sequence represented by SEQ ID NO: 82432.

[13834] The probes having the nucleotide sequence represented by SEQ ID NOS: 162211, 162212, 162213, 162214, 162215, 162216, 162217, 162218, 162219, 162220, 162221 were selected from the ORFs having the nucleotide sequence represented by SEQ ID NO: 82433.

[13835] The probes having the nucleotide sequence represented by SEQ ID NOS: 162222, 162223, 162224, 162225, 162226, 162227, 162228, 162229, 162230, 162231, 162232 were selected from the ORFs having the nucleotide sequence represented by SEQ ID NO: 82434.

[13836] The probes having the nucleotide sequence represented by SEQ ID NOS: 162233, 162234, 162235, 162236, 162237, 162238, 162239, 162240, 162241, 162242, 162243 were selected from the ORFs having the nucleotide sequence represented by SEQ ID NO: 82435.

[13837] The probes having the nucleotide sequence represented by SEQ ID NOS: 162244, 162245, 162246, 162247, 162248, 162249, 162250, 162251, 162252, 162253, 162254 were selected from the ORFs having the nucleotide sequence represented by SEQ ID NO: 82436.

[13838] The probes having the nucleotide sequence represented by SEQ ID NOS: 162255, 162256, 162257, 162258, 162259, 162260, 162261, 162262, 162263, 162264, 162265 were selected from the ORFs having the nucleotide sequence represented by SEQ ID NO: 82437.

[13839] The probes having the nucleotide sequence represented by SEQ ID NOS: 162266, 162267, 162268, 162269, 162270, 162271, 162272, 162273, 162274, 162275, 162276 were selected from the ORFs having the nucleotide sequence represented by SEQ ID NO: 82438.

[13840] The probes having the nucleotide sequence represented by SEQ ID NOS: 162277, 162278, 162279, 162280, 162281, 162282, 162283, 162284, 162285, 162286, 162287 were selected from the ORFs having the nucleotide sequence represented by SEQ ID NO: 82439.

[13841] The probes having the nucleotide sequence represented by SEQ ID NOS: 162288, 162289, 162290, 162291, 162292, 162293, 162294, 162295, 162296, 162297, 162298 were selected from the ORFs having the nucleotide sequence represented by SEQ ID NO: 82440.

[13842] The probes having the nucleotide sequence represented by SEQ ID NOS: 162299, 162300, 162301, 162302, 162303, 162304, 162305, 162306, 162307, 162308, 162309 were selected from the ORFs having the nucleotide sequence represented by SEQ ID NO: 82441.

[13843] The probes having the nucleotide sequence represented by SEQ ID NOS: 162310, 162311, 162312, 162313, 162314, 162315, 162316, 162317, 162318, 162319, 162320 were selected from the ORFs having the nucleotide sequence represented by SEQ ID NO: 82442.

[13844] The probes having the nucleotide sequence represented by SEQ ID NOS: 162321, 162322, 162323, 162324, 162325, 162326, 162327, 162328, 162329, 162330, 162331 were selected from the ORFs having the nucleotide sequence represented by SEQ ID NO: 82443.

[13845] The probes having the nucleotide sequence represented by SEQ ID NOS: 162332, 162333, 162334, 162335, 162336, 162337, 162338, 162339, 162340, 162341, 162342, 162343, 162344, 162345, 162346, 162347, 162348, 162349, 162350, 162351, 162352, 162353 were selected from the ORFs having the nucleotide sequence represented by SEQ ID NO: 82444.

[13846] The probes having the nucleotide sequence represented by SEQ ID NOS: 162354, 162355, 162356, 162357, 162358, 162359, 162360, 162361, 162362, 162363, 162364 were selected from the ORFs having the nucleotide sequence represented by SEQ ID NO: 82445.

[13847] The probes having the nucleotide sequence represented by SEQ ID NOS: 162365, 162366, 162367, 162368, 162369, 162370, 162371, 162372, 162373, 162374, 162375 were selected from the ORFs having the nucleotide sequence represented by SEQ ID NO: 82446.

[13848] The probes having the nucleotide sequence represented by SEQ ID NOS: 162376, 162377, 162378, 162379, 162380, 162381, 162382, 162383, 162384, 162385, 162386 were selected from the ORFs having the nucleotide sequence represented by SEQ ID NO: 82447.

[13849] The probes having the nucleotide sequence represented by SEQ ID NOS: 162387, 162388, 162389, 162390, 162391, 162392, 162393, 162394, 162395, 162396, 162397 were selected from the ORFs having the nucleotide sequence represented by SEQ ID NO: 82448.

[13850] The probes having the nucleotide sequence represented by SEQ ID NOS: 162398, 162399, 162400, 162401, 162402, 162403, 162404, 162405, 162406, 162407, 162408 were selected from the ORFs having the nucleotide sequence represented by SEQ ID NO: 82449.

[13851] The probes having the nucleotide sequence represented by SEQ ID NOS: 162409, 162410, 162411, 162412, 162413, 162414, 162415, 162416, 162417, 162418, 162419 were selected from the ORFs having the nucleotide sequence represented by SEQ ID NO: 82450.

[13852] The probes having the nucleotide sequence represented by SEQ ID NOS: 162420, 162421, 162422, 162423, 162424, 162425, 162426, 162427, 162428, 162429, 162430 were selected from the ORFs having the nucleotide sequence represented by SEQ ID NO: 82451.

[13853] The probes having the nucleotide sequence represented by SEQ ID NOS: 162431, 162432, 162433, 162434, 162435, 162436, 162437, 162438, 162439, 162440, 162441 were selected from the ORFs having the nucleotide sequence represented by SEQ ID NO: 82452.

[13854] The probes having the nucleotide sequence represented by SEQ ID NOS: 162442, 162443, 162444, 162445, 162446, 162447, 162448, 162449, 162450, 162451, 162452 were selected from the ORFs having the nucleotide sequence represented by SEQ ID NO: 82453.

[13855] The probes having the nucleotide sequence represented by SEQ ID NOS: 162453, 162454, 162455, 162456, 162457, 162458, 162459, 162460, 162461, 162462, 162463 were selected from the ORFs having the nucleotide sequence represented by SEQ ID NO: 82454.

[13856] The probes having the nucleotide sequence represented by SEQ ID NOS: 162464, 162465, 162466, 162467, 162468, 162469, 162470, 162471, 162472, 162473, 162474 were selected from the ORFs having the nucleotide sequence represented by SEQ ID NO: 82455.

[13857] The probes having the nucleotide sequence represented by SEQ ID NOS: 162475, 162476, 162477, 162478, 162479, 162480, 162481, 162482, 162483, 162484, 162485 were selected from the ORFs having the nucleotide sequence represented by SEQ ID NO: 82456.

[13858] The probes having the nucleotide sequence represented by SEQ ID NOS: 162486, 162487, 162488, 162489, 162490, 162491, 162492, 162493, 162494, 162495, 162496 were selected from the ORFs having the nucleotide sequence represented by SEQ ID NO: 82457.

[13859] The probes having the nucleotide sequence represented by SEQ ID NOS: 162497, 162498, 162499, 162500, 162501, 162502, 162503, 162504, 162505, 162506, 162507 were selected from the ORFs having the nucleotide sequence represented by SEQ ID NO: 82458.

[13860] The probes having the nucleotide sequence represented by SEQ ID NOS: 162508, 162509, 162510, 162511, 162512, 162513, 162514, 162515 were selected from the ORFs having the nucleotide sequence represented by SEQ ID NO: 82459.

[13861] The probes having the nucleotide sequence represented by SEQ ID NOS: 162516, 162517, 162518, 162519, 162520, 162521, 162522, 162523, 162524, 162525, 162526 were selected from the ORFs having the nucleotide sequence represented by SEQ ID NO: 82460.

[13862] The probes having the nucleotide sequence represented by SEQ ID NOS: 162527, 162528, 162529, 162530, 162531, 162532, 162533, 162534, 162535, 162536, 162537 were selected from the ORFs having the nucleotide sequence represented by SEQ ID NO: 82461.

[13863] The probes having the nucleotide sequence represented by SEQ ID NOS: 162538, 162539, 162540, 162541, 162542, 162543, 162544, 162545, 162546, 162547, 162548 were selected from the ORFs having the nucleotide sequence represented by SEQ ID NO: 82462.

[13864] The probes having the nucleotide sequence represented by SEQ ID NOS: 162549, 162550, 162551, 162552, 162553, 162554, 162555, 162556, 162557, 162558, 162559 were selected from the ORFs having the nucleotide sequence represented by SEQ ID NO: 82463.

[13865] The probes having the nucleotide sequence represented by SEQ ID NOS: 162560, 162561, 162562, 162563, 162564, 162565, 162566, 162567, 162568, 162569, 162570 were selected from the ORFs having the nucleotide sequence represented by SEQ ID NO: 82464.

[13866] The probes having the nucleotide sequence represented by SEQ ID NOS: 162571, 162572, 162573, 162574, 162575, 162576, 162577, 162578, 162579, 162580, 162581 were selected from the ORFs having the nucleotide sequence represented by SEQ ID NO: 82465.

[13867] The probes having the nucleotide sequence represented by SEQ ID NOS: 162582, 162583, 162584, 162585, 162586, 162587, 162588, 162589, 162590, 162591, 162592 were selected from the ORFs having the nucleotide sequence represented by SEQ ID NO: 82466.

[13868] The probes having the nucleotide sequence represented by SEQ ID NOS: 162593, 162594, 162595, 162596, 162597, 162598, 162599, 162600, 162601, 162602, 162603 were selected from the ORFs having the nucleotide sequence represented by SEQ ID NO: 82467.

[13869] The probes having the nucleotide sequence represented by SEQ ID NOS: 162604, 162605, 162606, 162607, 162608, 162609, 162610, 162611, 162612, 162613, 162614 were selected from the ORFs having the nucleotide sequence represented by SEQ ID NO: 82468.

[13870] The probes having the nucleotide sequence represented by SEQ ID NOS: 162615, 162616, 162617, 162618, 162619, 162620, 162621, 162622, 162623, 162624, 162625 were selected from the ORFs having the nucleotide sequence represented by SEQ ID NO: 82469.

[13871] The probes having the nucleotide sequence represented by SEQ ID NOS: 162626, 162627, 162628, 162629, 162630, 162631, 162632, 162633, 162634, 162635, 162636 were selected from the ORFs having the nucleotide sequence represented by SEQ ID NO: 82470.

[13872] The probes having the nucleotide sequence represented by SEQ ID NOS: 162637, 162638, 162639, 162640, 162641, 162642, 162643, 162644, 162645, 162646, 162647 were selected from the ORFs having the nucleotide sequence represented by SEQ ID NO: 82471.

[13873] The probes having the nucleotide sequence represented by SEQ ID NOS: 162648, 162649, 162650, 162651, 162652, 162653, 162654, 162655, 162656, 162657, 162658 were selected from the ORFs having the nucleotide sequence represented by SEQ ID NO: 82472.

[13874] The probes having the nucleotide sequence represented by SEQ ID NOS: 162659, 162660, 162661, 162662, 162663, 162664, 162665, 162666, 162667, 162668, 162669 were selected from the ORFs having the nucleotide sequence represented by SEQ ID NO: 82473.

[13875] The probes having the nucleotide sequence represented by SEQ ID NOS: 162670, 162671, 162672, 162673, 162674, 162675, 162676, 162677, 162678, 162679, 162680 were selected from the ORFs having the nucleotide sequence represented by SEQ ID NO: 82474.

[13876] The probes having the nucleotide sequence represented by SEQ ID NOS: 162681, 162682, 162683, 162684, 162685, 162686, 162687, 162688, 162689, 162690, 162691 were selected from the ORFs having the nucleotide sequence represented by SEQ ID NO: 82475.

[13877] The probes having the nucleotide sequence represented by SEQ ID NOS: 162692, 162693, 162694, 162695, 162696, 162697, 162698, 162699, 162700, 162701, 162702 were selected from the ORFs having the nucleotide sequence represented by SEQ ID NO: 82476.

[13878] The probes having the nucleotide sequence represented by SEQ ID NOS: 162703, 162704, 162705, 162706, 162707, 162708, 162709, 162710, 162711, 162712, 162713 were selected from the ORFs having the nucleotide sequence represented by SEQ ID NO: 82477.

[13879] The probes having the nucleotide sequence represented by SEQ ID NOS: 162714, 162715, 162716, 162717, 162718, 162719, 162720, 162721, 162722, 162723, 162724 were selected from the ORFs having the nucleotide sequence represented by SEQ ID NO: 82478.

[13880] The probes having the nucleotide sequence represented by SEQ ID NOS: 162725, 162726, 162727, 162728, 162729, 162730, 162731, 162732, 162733, 162734, 162735 were selected from the ORFs having the nucleotide sequence represented by SEQ ID NO: 82479.

[13881] The probes having the nucleotide sequence represented by SEQ ID NOS: 162736, 162737, 162738, 162739, 162740, 162741, 162742, 162743, 162744, 162745, 162746 were selected from the ORFs having the nucleotide sequence represented by SEQ ID NO: 82480.

[13882] The probes having the nucleotide sequence represented by SEQ ID NOS: 162747, 162748, 162749, 162750, 162751, 162752, 162753, 162754, 162755, 162756, 162757 were selected from the ORFs having the nucleotide sequence represented by SEQ ID NO: 82481.

[13883] The probes having the nucleotide sequence represented by SEQ ID NOS: 162758, 162759, 162760, 162761, 162762, 162763, 162764, 162765, 162766, 162767, 162768 were selected from the ORFs having the nucleotide sequence represented by SEQ ID NO: 82482.

[13884] The probes having the nucleotide sequence represented by SEQ ID NOS: 162769, 162770, 162771, 162772, 162773, 162774, 162775, 162776, 162777, 162778, 162779 were selected from the ORFs having the nucleotide sequence represented by SEQ ID NO: 82483.

[13885] The probes having the nucleotide sequence represented by SEQ ID NOS: 162780, 162781, 162782, 162783, 162784, 162785, 162786, 162787, 162788, 162789, 162790 were selected from the ORFs having the nucleotide sequence represented by SEQ ID NO: 82484.

[13886] The probes having the nucleotide sequence represented by SEQ ID NOS: 162791, 162792, 162793, 162794, 162795, 162796, 162797, 162798, 162799, 162800, 162801 were selected from the ORFs having the nucleotide sequence represented by SEQ ID NO: 82485.

[13887] The probes having the nucleotide sequence represented by SEQ ID NOS: 162802, 162803, 162804, 162805, 162806, 162807, 162808, 162809, 162810, 162811, 162812 were selected from the ORFs having the nucleotide sequence represented by SEQ ID NO: 82486.

[13888] The probes having the nucleotide sequence represented by SEQ ID NOS: 162813, 162814, 162815, 162816, 162817, 162818, 162819, 162820, 162821, 162822, 162823 were selected from the ORFs having the nucleotide sequence represented by SEQ ID NO: 82487.

[13889] The probes having the nucleotide sequence represented by SEQ ID NOS: 162824, 162825, 162826, 162827, 162828, 162829, 162830, 162831, 162832, 162833, 162834 were selected from the ORFs having the nucleotide sequence represented by SEQ ID NO: 82488.

[13890] The probes having the nucleotide sequence represented by SEQ ID NOS: 162835, 162836, 162837, 162838, 162839, 162840, 162841, 162842, 162843, 162844, 162845 were selected from the ORFs having the nucleotide sequence represented by SEQ ID NO: 82489.

[13891] The probes having the nucleotide sequence represented by SEQ ID NOS: 162846, 162847, 162848, 162849, 162850, 162851, 162852, 162853, 162854, 162855, 162856 were selected from the ORFs having the nucleotide sequence represented by SEQ ID NO: 82490.

[13892] The probes having the nucleotide sequence represented by SEQ ID NOS: 162857, 162858, 162859, 162860, 162861, 162862, 162863, 162864, 162865, 162866, 162867 were selected from the ORFs having the nucleotide sequence represented by SEQ ID NO: 82491.

[13893] The probes having the nucleotide sequence represented by SEQ ID NOS: 162868, 162869, 162870, 162871, 162872, 162873, 162874, 162875, 162876, 162877, 162878 were selected from the ORFs having the nucleotide sequence represented by SEQ ID NO: 82492.

[13894] The probes having the nucleotide sequence represented by SEQ ID NOS: 162879, 162880, 162881, 162882, 162883, 162884, 162885, 162886, 162887, 162888, 162889 were selected from the ORFs having the nucleotide sequence represented by SEQ ID NO: 82493.

[13895] The probes having the nucleotide sequence represented by SEQ ID NOS: 162890, 162891, 162892, 162893, 162894, 162895, 162896, 162897, 162898, 162899, 162900 were selected from the ORFs having the nucleotide sequence represented by SEQ ID NO: 82494.

[13896] The probes having the nucleotide sequence represented by SEQ ID NOS: 162901, 162902, 162903, 162904, 162905, 162906, 162907, 162908, 162909, 162910, 162911 were selected from the ORFs having the nucleotide sequence represented by SEQ ID NO: 82495.

[13897] The probes having the nucleotide sequence represented by SEQ ID NOS: 162912, 162913, 162914, 162915, 162916, 162917, 162918, 162919, 162920, 162921, 162922 were selected from the ORFs having the nucleotide sequence represented by SEQ ID NO: 82496.

[13898] The probes having the nucleotide sequence represented by SEQ ID NOS: 162923, 162924, 162925, 162926, 162927, 162928, 162929, 162930, 162931, 162932, 162933 were selected from the ORFs having the nucleotide sequence represented by SEQ ID NO: 82497.

[13899] The probes having the nucleotide sequence represented by SEQ ID NOS: 162934, 162935, 162936, 162937, 162938, 162939, 162940, 162941, 162942, 162943, 162944 were selected from the ORFs having the nucleotide sequence represented by SEQ ID NO: 82498.

[13900] The probes having the nucleotide sequence represented by SEQ ID NOS: 162945, 162946, 162947, 162948, 162949, 162950, 162951, 162952, 162953, 162954, 162955 were selected from the ORFs having the nucleotide sequence represented by SEQ ID NO: 82499.

[13901] The probes having the nucleotide sequence represented by SEQ ID NOS: 162956, 162957, 162958, 162959, 162960, 162961, 162962, 162963, 162964, 162965, 162966 were selected from the ORFs having the nucleotide sequence represented by SEQ ID NO: 82500.

[13902] The probes having the nucleotide sequence represented by SEQ ID NOS: 162967, 162968, 162969, 162970, 162971, 162972, 162973, 162974, 162975, 162976, 162977 were selected from the ORFs having the nucleotide sequence represented by SEQ ID NO: 82501.

[13903] The probes having the nucleotide sequence represented by SEQ ID NOS: 162978, 162979, 162980, 162981, 162982, 162983, 162984, 162985, 162986, 162987, 162988 were selected from the ORFs having the nucleotide sequence represented by SEQ ID NO: 82502.

[13904] The probes having the nucleotide sequence represented by SEQ ID NOS: 162989, 162990, 162991, 162992, 162993, 162994, 162995, 162996, 162997, 162998, 162999 were selected from the ORFs having the nucleotide sequence represented by SEQ ID NO: 82503.

[13905] The probes having the nucleotide sequence represented by SEQ ID NOS: 163000, 163001, 163002, 163003, 163004, 163005, 163006, 163007, 163008, 163009, 163010 were selected from the ORFs having the nucleotide sequence represented by SEQ ID NO: 82504.

[13906] The probes having the nucleotide sequence represented by SEQ ID NOS: 163011, 163012, 163013, 163014, 163015, 163016, 163017, 163018, 163019, 163020, 163021 were selected from the ORFs having the nucleotide sequence represented by SEQ ID NO: 82505.

[13907] The probes having the nucleotide sequence represented by SEQ ID NOS: 163022, 163023, 163024, 163025, 163026, 163027, 163028, 163029, 163030, 163031, 163032 were selected from the ORFs having the nucleotide sequence represented by SEQ ID NO: 82506.

[13908] The probes having the nucleotide sequence represented by SEQ ID NOS: 163033, 163034, 163035, 163036, 163037, 163038, 163039, 163040, 163041, 163042, 163043 were selected from the ORFs having the nucleotide sequence represented by SEQ ID NO: 82507.

[13909] The probes having the nucleotide sequence represented by SEQ ID NOS: 163044, 163045, 163046, 163047, 163048, 163049, 163050, 163051, 163052, 163053, 163054 were selected from the ORFs having the nucleotide sequence represented by SEQ ID NO: 82508.

[13910] The probes having the nucleotide sequence represented by SEQ ID NOS: 163055, 163056, 163057, 163058, 163059, 163060, 163061, 163062, 163063, 163064, 163065 were selected from the ORFs having the nucleotide sequence represented by SEQ ID NO: 82509.

[13911] The probes having the nucleotide sequence represented by SEQ ID NOS: 163066, 163067, 163068, 163069, 163070, 163071, 163072, 163073, 163074, 163075, 163076 were selected from the ORFs having the nucleotide sequence represented by SEQ ID NO: 82510.

[13912] The probes having the nucleotide sequence represented by SEQ ID NOS: 163077, 163078, 163079, 163080, 163081, 163082, 163083, 163084, 163085, 163086, 163087 were selected from the ORFs having the nucleotide sequence represented by SEQ ID NO: 82511.

[13913] The probes having the nucleotide sequence represented by SEQ ID NOS: 163088, 163089, 163090, 163091, 163092, 163093, 163094, 163095, 163096, 163097, 163098 were selected from the ORFs having the nucleotide sequence represented by SEQ ID NO: 82512.

[13914] The probes having the nucleotide sequence represented by SEQ ID NOS: 163099, 163100, 163101, 163102, 163103, 163104, 163105, 163106, 163107, 163108, 163109 were selected from the ORFs having the nucleotide sequence represented by SEQ ID NO: 82513.

[13915] The probes having the nucleotide sequence represented by SEQ ID NOS: 163110, 163111, 163112, 163113, 163114, 163115, 163116, 163117, 163118, 163119, 163120 were selected from the ORFs having the nucleotide sequence represented by SEQ ID NO: 82514.

[13916] The probes having the nucleotide sequence represented by SEQ ID NOS: 163121, 163122, 163123, 163124, 163125, 163126, 163127, 163128, 163129, 163130, 163131 were selected from the ORFs having the nucleotide sequence represented by SEQ ID NO: 82515.

[13917] The probes having the nucleotide sequence represented by SEQ ID NOS: 163132, 163133, 163134, 163135, 163136, 163137, 163138, 163139, 163140, 163141, 163142 were selected from the ORFs having the nucleotide sequence represented by SEQ ID NO: 82516.

[13918] The probes having the nucleotide sequence represented by SEQ ID NOS: 163143, 163144, 163145, 163146, 163147, 163148, 163149, 163150, 163151, 163152, 163153 were selected from the ORFs having the nucleotide sequence represented by SEQ ID NO: 82517.

[13919] The probes having the nucleotide sequence represented by SEQ ID NOS: 163154, 163155, 163156, 163157, 163158, 163159, 163160, 163161, 163162, 163163, 163164 were selected from the ORFs having the nucleotide sequence represented by SEQ ID NO: 82518.

[13920] The probes having the nucleotide sequence represented by SEQ ID NOS: 163165, 163166, 163167, 163168, 163169, 163170, 163171, 163172, 163173, 163174, 163175 were selected from the ORFs having the nucleotide sequence represented by SEQ ID NO: 82519.

[13921] The probes having the nucleotide sequence represented by SEQ ID NOS: 163176, 163177, 163178, 163179, 163180, 163181, 163182, 163183, 163184, 163185, 163186 were selected from the ORFs having the nucleotide sequence represented by SEQ ID NO: 82520.

[13922] The probes having the nucleotide sequence represented by SEQ ID NOS: 163187, 163188, 163189, 163190, 163191, 163192, 163193, 163194, 163195, 163196, 163197 were selected from the ORFs having the nucleotide sequence represented by SEQ ID NO: 82521.

[13923] The probes having the nucleotide sequence represented by SEQ ID NOS: 163198, 163199, 163200, 163201, 163202, 163203, 163204, 163205, 163206, 163207, 163208 were selected from the ORFs having the nucleotide sequence represented by SEQ ID NO: 82522.

[13924] The probes having the nucleotide sequence represented by SEQ ID NOS: 163209, 163210, 163211, 163212, 163213, 163214, 163215, 163216, 163217, 163218, 163219 were selected from the ORFs having the nucleotide sequence represented by SEQ ID NO: 82523.

[13925] The probes having the nucleotide sequence represented by SEQ ID NOS: 163220, 163221, 163222, 163223, 163224, 163225, 163226, 163227, 163228, 163229, 163230 were selected from the ORFs having the nucleotide sequence represented by SEQ ID NO: 82524.

[13926] The probes having the nucleotide sequence represented by SEQ ID NOS: 163231, 163232, 163233, 163234, 163235, 163236, 163237, 163238, 163239, 163240, 163241 were selected from the ORFs having the nucleotide sequence represented by SEQ ID NO: 82525.

[13927] The probes having the nucleotide sequence represented by SEQ ID NOS: 163242, 163243, 163244, 163245, 163246, 163247, 163248, 163249, 163250, 163251, 163252 were selected from the ORFs having the nucleotide sequence represented by SEQ ID NO: 82526.

[13928] The probes having the nucleotide sequence represented by SEQ ID NOS: 163253, 163254, 163255, 163256, 163257, 163258, 163259, 163260, 163261, 163262, 163263 were selected from the ORFs having the nucleotide sequence represented by SEQ ID NO: 82527.

[13929] The probes having the nucleotide sequence represented by SEQ ID NOS: 163264, 163265, 163266, 163267, 163268, 163269, 163270, 163271, 163272, 163273, 163274 were selected from the ORFs having the nucleotide sequence represented by SEQ ID NO: 82528.

[13930] The probes having the nucleotide sequence represented by SEQ ID NOS: 163275, 163276, 163277, 163278, 163279, 163280, 163281, 163282, 163283, 163284, 163285 were selected from the ORFs having the nucleotide sequence represented by SEQ ID NO: 82529.

[13931] The probes having the nucleotide sequence represented by SEQ ID NOS: 163286, 163287, 163288, 163289, 163290, 163291, 163292, 163293, 163294, 163295, 163296 were selected from the ORFs having the nucleotide sequence represented by SEQ ID NO: 82530.

[13932] The probes having the nucleotide sequence represented by SEQ ID NOS: 163297, 163298, 163299, 163300, 163301, 163302, 163303, 163304, 163305, 163306, 163307 were selected from the ORFs having the nucleotide sequence represented by SEQ ID NO: 82531.

[13933] The probes having the nucleotide sequence represented by SEQ ID NOS: 163308, 163309, 163310, 163311, 163312, 163313, 163314, 163315, 163316, 163317, 163318 were selected from the ORFs having the nucleotide sequence represented by SEQ ID NO: 82532.

[13934] The probes having the nucleotide sequence represented by SEQ ID NOS: 163319, 163320, 163321, 163322, 163323, 163324, 163325, 163326, 163327, 163328, 163329 were selected from the ORFs having the nucleotide sequence represented by SEQ ID NO: 82533.

[13935] The probes having the nucleotide sequence represented by SEQ ID NOS: 163330, 163331, 163332, 163333, 163334, 163335, 163336, 163337, 163338, 163339, 163340 were selected from the ORFs having the nucleotide sequence represented by SEQ ID NO: 82534.

[13936] The probes having the nucleotide sequence represented by SEQ ID NOS: 163341, 163342, 163343, 163344, 163345, 163346, 163347, 163348, 163349, 163350, 163351 were selected from the ORFs having the nucleotide sequence represented by SEQ ID NO: 82535.

[13937] The probes having the nucleotide sequence represented by SEQ ID NOS: 163352, 163353, 163354, 163355, 163356, 163357, 163358, 163359, 163360, 163361, 163362 were selected from the ORFs having the nucleotide sequence represented by SEQ ID NO: 82536.

[13938] The probes having the nucleotide sequence represented by SEQ ID NOS: 163363, 163364, 163365, 163366, 163367, 163368, 163369, 163370, 163371, 163372, 163373 were selected from the ORFs having the nucleotide sequence represented by SEQ ID NO: 82537.

[13939] The probes having the nucleotide sequence represented by SEQ ID NOS: 163374, 163375, 163376, 163377, 163378, 163379, 163380, 163381, 163382, 163383, 163384 were selected from the ORFs having the nucleotide sequence represented by SEQ ID NO: 82538.

[13940] The probes having the nucleotide sequence represented by SEQ ID NOS: 163385, 163386, 163387, 163388, 163389, 163390, 163391, 163392, 163393, 163394, 163395 were selected from the ORFs having the nucleotide sequence represented by SEQ ID NO: 82539.

[13941] The probes having the nucleotide sequence represented by SEQ ID NOS: 163396, 163397, 163398, 163399, 163400, 163401, 163402, 163403, 163404, 163405, 163406 were selected from the ORFs having the nucleotide sequence represented by SEQ ID NO: 82540.

[13942] The probes having the nucleotide sequence represented by SEQ ID NOS: 163407, 163408, 163409, 163410, 163411, 163412, 163413, 163414, 163415, 163416, 163417 were selected from the ORFs having the nucleotide sequence represented by SEQ ID NO: 82541.

[13943] The probes having the nucleotide sequence represented by SEQ ID NOS: 163418, 163419, 163420, 163421, 163422, 163423, 163424, 163425, 163426, 163427, 163428 were selected from the ORFs having the nucleotide sequence represented by SEQ ID NO: 82542.

[13944] The probes having the nucleotide sequence represented by SEQ ID NOS: 163429, 163430, 163431, 163432, 163433, 163434, 163435, 163436, 163437, 163438, 163439 were selected from the ORFs having the nucleotide sequence represented by SEQ ID NO: 82543.

[13945] The probes having the nucleotide sequence represented by SEQ ID NOS: 163440, 163441, 163442, 163443, 163444, 163445, 163446, 163447, 163448, 163449, 163450 were selected from the ORFs having the nucleotide sequence represented by SEQ ID NO: 82544.

[13946] The probes having the nucleotide sequence represented by SEQ ID NOS: 163451, 163452, 163453, 163454, 163455, 163456, 163457, 163458, 163459, 163460, 163461 were selected from the ORFs having the nucleotide sequence represented by SEQ ID NO: 82545.

[13947] The probes having the nucleotide sequence represented by SEQ ID NOS: 163462, 163463, 163464, 163465, 163466, 163467, 163468, 163469, 163470, 163471, 163472 were selected from the ORFs having the nucleotide sequence represented by SEQ ID NO: 82546.

[13948] The probes having the nucleotide sequence represented by SEQ ID NOS: 163473, 163474, 163475, 163476, 163477, 163478, 163479, 163480, 163481, 163482, 163483 were selected from the ORFs having the nucleotide sequence represented by SEQ ID NO: 82547.

[13949] The probes having the nucleotide sequence represented by SEQ ID NOS: 163484, 163485, 163486, 163487, 163488, 163489, 163490, 163491, 163492, 163493, 163494 were selected from the ORFs having the nucleotide sequence represented by SEQ ID NO: 82548.

[13950] The probes having the nucleotide sequence represented by SEQ ID NOS: 163495, 163496, 163497, 163498, 163499, 163500, 163501, 163502, 163503, 163504, 163505 were selected from the ORFs having the nucleotide sequence represented by SEQ ID NO: 82549.

[13951] The probes having the nucleotide sequence represented by SEQ ID NOS: 163506, 163507, 163508, 163509, 163510, 163511, 163512, 163513, 163514, 163515, 163516 were selected from the ORFs having the nucleotide sequence represented by SEQ ID NO: 82550.

[13952] The probes having the nucleotide sequence represented by SEQ ID NOS: 163517, 163518, 163519, 163520, 163521, 163522, 163523, 163524, 163525, 163526, 163527 were selected from the ORFs having the nucleotide sequence represented by SEQ ID NO: 82551.

[13953] The probes having the nucleotide sequence represented by SEQ ID NOS: 163528, 163529, 163530, 163531, 163532, 163533, 163534, 163535, 163536, 163537, 163538 were selected from the ORFs having the nucleotide sequence represented by SEQ ID NO: 82552.

[13954] The probes having the nucleotide sequence represented by SEQ ID NOS: 163539, 163540, 163541, 163542, 163543, 163544, 163545, 163546, 163547, 163548, 163549, 163550, 163551, 163552, 163553, 163554, 163555, 163556, 163557, 163558, 163559, 163560 were selected from the ORFs having the nucleotide sequence represented by SEQ ID NO: 82553.

[13955] The probes having the nucleotide sequence represented by SEQ ID NOS: 163561, 163562, 163563, 163564, 163565, 163566, 163567, 163568, 163569, 163570, 163571 were selected from the ORFs having the nucleotide sequence represented by SEQ ID NO: 82554.

[13956] The probes having the nucleotide sequence represented by SEQ ID NOS: 163572, 163573, 163574, 163575, 163576, 163577, 163578, 163579, 163580, 163581, 163582 were selected from the ORFs having the nucleotide sequence represented by SEQ ID NO: 82555.

[13957] The probes having the nucleotide sequence represented by SEQ ID NOS: 163583, 163584, 163585, 163586, 163587, 163588, 163589, 163590, 163591, 163592, 163593 were selected from the ORFs having the nucleotide sequence represented by SEQ ID NO: 82556.

[13958] The probes having the nucleotide sequence represented by SEQ ID NOS: 163594, 163595, 163596, 163597, 163598, 163599, 163600, 163601, 163602, 163603, 163604 were selected from the ORFs having the nucleotide sequence represented by SEQ ID NO: 82557.

[13959] The probes having the nucleotide sequence represented by SEQ ID NOS: 163605, 163606, 163607, 163608, 163609, 163610, 163611, 163612, 163613, 163614, 163615 were selected from the ORFs having the nucleotide sequence represented by SEQ ID NO: 82558.

[13960] The probes having the nucleotide sequence represented by SEQ ID NOS: 163616, 163617, 163618, 163619, 163620, 163621, 163622, 163623, 163624, 163625, 163626 were selected from the ORFs having the nucleotide sequence represented by SEQ ID NO: 82559.

[13961] The probes having the nucleotide sequence represented by SEQ ID NOS: 163627, 163628, 163629, 163630, 163631, 163632, 163633, 163634, 163635, 163636, 163637 were selected from the ORFs having the nucleotide sequence represented by SEQ ID NO: 82560.

[13962] The probes having the nucleotide sequence represented by SEQ ID NOS: 163638, 163639, 163640, 163641, 163642, 163643, 163644, 163645, 163646, 163647, 163648 were selected from the ORFs having the nucleotide sequence represented by SEQ ID NO: 82561.

[13963] The probes having the nucleotide sequence represented by SEQ ID NOS: 163649, 163650, 163651, 163652, 163653, 163654, 163655, 163656, 163657, 163658, 163659 were selected from the ORFs having the nucleotide sequence represented by SEQ ID NO: 82562.

[13964] The probes having the nucleotide sequence represented by SEQ ID NOS: 163660, 163661, 163662, 163663, 163664, 163665, 163666, 163667, 163668, 163669, 163670 were selected from the ORFs having the nucleotide sequence represented by SEQ ID NO: 82563.

[13965] The probes having the nucleotide sequence represented by SEQ ID NOS: 163671, 163672, 163673, 163674, 163675, 163676, 163677, 163678, 163679, 163680, 163681 were selected from the ORFs having the nucleotide sequence represented by SEQ ID NO: 82564.

[13966] The probes having the nucleotide sequence represented by SEQ ID NOS: 163682, 163683, 163684, 163685, 163686, 163687, 163688, 163689, 163690 were selected from the ORFs having the nucleotide sequence represented by SEQ ID NO: 82565.

[13967] The probes having the nucleotide sequence represented by SEQ ID NOS: 163691, 163692, 163693, 163694, 163695, 163696, 163697, 163698, 163699, 163700, 163701 were selected from the ORFs having the nucleotide sequence represented by SEQ ID NO: 82566.

[13968] The probes having the nucleotide sequence represented by SEQ ID NOS: 163702, 163703, 163704, 163705, 163706, 163707, 163708, 163709, 163710, 163711, 163712 were selected from the ORFs having the nucleotide sequence represented by SEQ ID NO: 82567.

[13969] The probes having the nucleotide sequence represented by SEQ ID NOS: 163713, 163714, 163715, 163716, 163717, 163718, 163719, 163720, 163721, 163722, 163723 were selected from the ORFs having the nucleotide sequence represented by SEQ ID NO: 82568.

[13970] The probes having the nucleotide sequence represented by SEQ ID NOS: 163724, 163725, 163726, 163727, 163728, 163729, 163730, 163731, 163732, 163733, 163734 were selected from the ORFs having the nucleotide sequence represented by SEQ ID NO: 82569.

[13971] The probes having the nucleotide sequence represented by SEQ ID NOS: 163735, 163736, 163737, 163738, 163739, 163740, 163741, 163742, 163743, 163744, 163745 were selected from the ORFs having the nucleotide sequence represented by SEQ ID NO: 82570.

[13972] The probes having the nucleotide sequence represented by SEQ ID NOS: 163746, 163747, 163748, 163749, 163750, 163751, 163752, 163753, 163754, 163755, 163756 were selected from the ORFs having the nucleotide sequence represented by SEQ ID NO: 82571.

[13973] The probes having the nucleotide sequence represented by SEQ ID NOS: 163757, 163758, 163759, 163760, 163761, 163762, 163763, 163764, 163765, 163766, 163767 were selected from the ORFs having the nucleotide sequence represented by SEQ ID NO: 82572.

[13974] The probes having the nucleotide sequence represented by SEQ ID NOS: 163768, 163769, 163770, 163771, 163772, 163773, 163774, 163775, 163776, 163777, 163778 were selected from the ORFs having the nucleotide sequence represented by SEQ ID NO: 82573.

[13975] The probes having the nucleotide sequence represented by SEQ ID NOS: 163779, 163780, 163781, 163782, 163783, 163784, 163785, 163786, 163787, 163788, 163789 were selected from the ORFs having the nucleotide sequence represented by SEQ ID NO: 82574.

[13976] The probes having the nucleotide sequence represented by SEQ ID NOS: 163790, 163791, 163792, 163793, 163794, 163795, 163796, 163797, 163798, 163799, 163800 were selected from the ORFs having the nucleotide sequence represented by SEQ ID NO: 82575.

[13977] The probes having the nucleotide sequence represented by SEQ ID NOS: 163801, 163802, 163803, 163804, 163805, 163806, 163807, 163808, 163809, 163810, 163811 were selected from the ORFs having the nucleotide sequence represented by SEQ ID NO: 82576.

[13978] The probes having the nucleotide sequence represented by SEQ ID NOS: 163812, 163813, 163814, 163815, 163816, 163817, 163818, 163819, 163820, 163821, 163822 were selected from the ORFs having the nucleotide sequence represented by SEQ ID NO: 82577.

[13979] The probes having the nucleotide sequence represented by SEQ ID NOS: 163823, 163824, 163825, 163826, 163827, 163828, 163829, 163830, 163831, 163832, 163833 were selected from the ORFs having the nucleotide sequence represented by SEQ ID NO: 82578.

[13980] The probes having the nucleotide sequence represented by SEQ ID NOS: 163834, 163835, 163836, 163837, 163838, 163839, 163840, 163841, 163842, 163843, 163844 were selected from the ORFs having the nucleotide sequence represented by SEQ ID NO: 82579.

[13981] The probes having the nucleotide sequence represented by SEQ ID NOS: 163845, 163846, 163847, 163848, 163849, 163850, 163851, 163852, 163853, 163854, 163855 were selected from the ORFs having the nucleotide sequence represented by SEQ ID NO: 82580.

[13982] The probes having the nucleotide sequence represented by SEQ ID NOS: 163856, 163857, 163858, 163859, 163860, 163861, 163862, 163863, 163864, 163865, 163866 were selected from the ORFs having the nucleotide sequence represented by SEQ ID NO: 82581.

[13983] The probes having the nucleotide sequence represented by SEQ ID NOS: 163867, 163868, 163869, 163870, 163871, 163872, 163873, 163874, 163875, 163876, 163877 were selected from the ORFs having the nucleotide sequence represented by SEQ ID NO: 82582.

[13984] The probes having the nucleotide sequence represented by SEQ ID NOS: 163878, 163879, 163880, 163881, 163882, 163883, 163884, 163885, 163886, 163887, 163888 were selected from the ORFs having the nucleotide sequence represented by SEQ ID NO: 82583.

[13985] The probes having the nucleotide sequence represented by SEQ ID NOS: 163889, 163890, 163891, 163892, 163893, 163894, 163895, 163896, 163897, 163898, 163899 were selected from the ORFs having the nucleotide sequence represented by SEQ ID NO: 82584.

[13986] The probes having the nucleotide sequence represented by SEQ ID NOS: 163900, 163901, 163902, 163903, 163904, 163905, 163906, 163907, 163908, 163909, 163910 were selected from the ORFs having the nucleotide sequence represented by SEQ ID NO: 82585.

[13987] The probes having the nucleotide sequence represented by SEQ ID NOS: 163911, 163912, 163913, 163914, 163915, 163916, 163917, 163918, 163919, 163920, 163921 were selected from the ORFs having the nucleotide sequence represented by SEQ ID NO: 82586.

[13988] The probes having the nucleotide sequence represented by SEQ ID NOS: 163922, 163923, 163924, 163925, 163926, 163927, 163928, 163929, 163930, 163931, 163932 were selected from the ORFs having the nucleotide sequence represented by SEQ ID NO: 82587.

[13989] The probes having the nucleotide sequence represented by SEQ ID NOS: 163933, 163934, 163935, 163936, 163937, 163938, 163939, 163940, 163941, 163942, 163943 were selected from the ORFs having the nucleotide sequence represented by SEQ ID NO: 82588.

[13990] The probes having the nucleotide sequence represented by SEQ ID NOS: 163944, 163945, 163946, 163947, 163948, 163949, 163950, 163951, 163952, 163953, 163954 were selected from the ORFs having the nucleotide sequence represented by SEQ ID NO: 82589.

[13991] The probes having the nucleotide sequence represented by SEQ ID NOS: 163955, 163956, 163957, 163958, 163959, 163960, 163961, 163962, 163963, 163964, 163965 were selected from the ORFs having the nucleotide sequence represented by SEQ ID NO: 82590.

[13992] The probes having the nucleotide sequence represented by SEQ ID NOS: 163966, 163967, 163968, 163969, 163970, 163971, 163972, 163973, 163974, 163975, 163976, 163977, 163978, 163979, 163980, 163981, 163982, 163983, 163984, 163985, 163986, 163987 were selected from the ORFs having the nucleotide sequence represented by SEQ ID NO: 82591.

[13993] The probes having the nucleotide sequence represented by SEQ ID NOS: 163988, 163989, 163990, 163991, 163992, 163993, 163994, 163995, 163996, 163997, 163998 were selected from the ORFs having the nucleotide sequence represented by SEQ ID NO: 82592.

[13994] The probes having the nucleotide sequence represented by SEQ ID NOS: 163999, 164000, 164001, 164002, 164003, 164004, 164005, 164006, 164007, 164008, 164009 were selected from the ORFs having the nucleotide sequence represented by SEQ ID NO: 82593.

[13995] The probes having the nucleotide sequence represented by SEQ ID NOS: 164010, 164011, 164012, 164013, 164014, 164015, 164016, 164017, 164018, 164019, 164020 were selected from the ORFs having the nucleotide sequence represented by SEQ ID NO: 82594.

[13996] The probes having the nucleotide sequence represented by SEQ ID NOS: 164021, 164022, 164023, 164024, 164025, 164026, 164027, 164028, 164029, 164030, 164031 were selected from the ORFs having the nucleotide sequence represented by SEQ ID NO: 82595.

[13997] The probes having the nucleotide sequence represented by SEQ ID NOS: 164032, 164033, 164034, 164035, 164036, 164037, 164038, 164039, 164040, 164041, 164042 were selected from the ORFs having the nucleotide sequence represented by SEQ ID NO: 82596.

[13998] The probes having the nucleotide sequence represented by SEQ ID NOS: 164043, 164044, 164045, 164046, 164047, 164048, 164049, 164050, 164051, 164052, 164053 were selected from the ORFs having the nucleotide sequence represented by SEQ ID NO: 82597.

[13999] The probes having the nucleotide sequence represented by SEQ ID NOS: 164054, 164055, 164056, 164057, 164058, 164059, 164060, 164061, 164062, 164063, 164064 were selected from the ORFs having the nucleotide sequence represented by SEQ ID NO: 82598.

[14000] The probes having the nucleotide sequence represented by SEQ ID NOS: 164065, 164066, 164067, 164068, 164069, 164070, 164071, 164072, 164073, 164074, 164075 were selected from the ORFs having the nucleotide sequence represented by SEQ ID NO: 82599.

[14001] The probes having the nucleotide sequence represented by SEQ ID NOS: 164076, 164077, 164078, 164079, 164080, 164081, 164082, 164083, 164084, 164085, 164086 were selected from the ORFs having the nucleotide sequence represented by SEQ ID NO: 82600.

[14002] The probes having the nucleotide sequence represented by SEQ ID NOS: 164087, 164088, 164089, 164090, 164091, 164092, 164093, 164094, 164095, 164096, 164097 were selected from the ORFs having the nucleotide sequence represented by SEQ ID NO: 82601.

[14003] The probes having the nucleotide sequence represented by SEQ ID NOS: 164098, 164099, 164100, 164101, 164102, 164103, 164104, 164105, 164106, 164107, 164108 were selected from the ORFs having the nucleotide sequence represented by SEQ ID NO: 82602.

[14004] The probes having the nucleotide sequence represented by SEQ ID NOS: 164109, 164110, 164111, 164112, 164113, 164114, 164115, 164116, 164117, 164118, 164119 were selected from the ORFs having the nucleotide sequence represented by SEQ ID NO: 82603.

[14005] The probes having the nucleotide sequence represented by SEQ ID NOS: 164120, 164121, 164122, 164123, 164124, 164125, 164126, 164127, 164128, 164129, 164130 were selected from the ORFs having the nucleotide sequence represented by SEQ ID NO: 82604.

[14006] The probes having the nucleotide sequence represented by SEQ ID NOS: 164131, 164132, 164133, 164134, 164135, 164136, 164137, 164138, 164139, 164140, 164141 were selected from the ORFs having the nucleotide sequence represented by SEQ ID NO: 82605.

[14007] The probes having the nucleotide sequence represented by SEQ ID NOS: 164142, 164143, 164144, 164145, 164146, 164147, 164148, 164149, 164150, 164151, 164152 were selected from the ORFs having the nucleotide sequence represented by SEQ ID NO: 82606.

[14008] The probes having the nucleotide sequence represented by SEQ ID NOS: 164153, 164154, 164155, 164156, 164157, 164158, 164159, 164160, 164161, 164162, 164163 were selected from the ORFs having the nucleotide sequence represented by SEQ ID NO: 82607.

[14009] The probes having the nucleotide sequence represented by SEQ ID NOS: 164164, 164165, 164166, 164167, 164168, 164169, 164170, 164171, 164172, 164173, 164174 were selected from the ORFs having the nucleotide sequence represented by SEQ ID NO: 82608.

[14010] The probes having the nucleotide sequence represented by SEQ ID NOS: 164175, 164176, 164177, 164178, 164179, 164180, 164181, 164182, 164183, 164184, 164185 were selected from the ORFs having the nucleotide sequence represented by SEQ ID NO: 82609.

[14011] The probes having the nucleotide sequence represented by SEQ ID NOS: 164186, 164187, 164188, 164189, 164190, 164191, 164192, 164193, 164194, 164195, 164196 were selected from the ORFs having the nucleotide sequence represented by SEQ ID NO: 82610.

[14012] The probes having the nucleotide sequence represented by SEQ ID NOS: 164197, 164198, 164199, 164200, 164201, 164202, 164203, 164204, 164205, 164206, 164207 were selected from the ORFs having the nucleotide sequence represented by SEQ ID NO: 82611.

[14013] The probes having the nucleotide sequence represented by SEQ ID NOS: 164208, 164209, 164210, 164211, 164212, 164213, 164214, 164215, 164216, 164217, 164218 were selected from the ORFs having the nucleotide sequence represented by SEQ ID NO: 82612.

[14014] The probes having the nucleotide sequence represented by SEQ ID NOS: 164219, 164220, 164221, 164222, 164223, 164224, 164225, 164226, 164227, 164228, 164229 were selected from the ORFs having the nucleotide sequence represented by SEQ ID NO: 82613.

[14015] The probes having the nucleotide sequence represented by SEQ ID NOS: 164230, 164231, 164232, 164233, 164234, 164235, 164236, 164237, 164238, 164239, 164240 were selected from the ORFs having the nucleotide sequence represented by SEQ ID NO: 82614.

[14016] The probes having the nucleotide sequence represented by SEQ ID NOS: 164241, 164242, 164243, 164244, 164245, 164246, 164247, 164248, 164249, 164250, 164251 were selected from the ORFs having the nucleotide sequence represented by SEQ ID NO: 82615.

[14017] The probes having the nucleotide sequence represented by SEQ ID NOS: 164252, 164253, 164254, 164255, 164256, 164257, 164258, 164259, 164260, 164261, 164262 were selected from the ORFs having the nucleotide sequence represented by SEQ ID NO: 82616.

[14018] The probes having the nucleotide sequence represented by SEQ ID NOS: 164263, 164264, 164265, 164266, 164267, 164268, 164269, 164270, 164271, 164272, 164273 were selected from the ORFs having the nucleotide sequence represented by SEQ ID NO: 82617.

[14019] The probes having the nucleotide sequence represented by SEQ ID NOS: 164274, 164275, 164276, 164277, 164278, 164279, 164280, 164281, 164282, 164283, 164284 were selected from the ORFs having the nucleotide sequence represented by SEQ ID NO: 82618.

[14020] The probes having the nucleotide sequence represented by SEQ ID NOS: 164285, 164286, 164287, 164288, 164289, 164290, 164291, 164292, 164293, 164294, 164295 were selected from the ORFs having the nucleotide sequence represented by SEQ ID NO: 82619.

[14021] The probes having the nucleotide sequence represented by SEQ ID NOS: 164296, 164297, 164298, 164299, 164300, 164301, 164302, 164303, 164304, 164305, 164306 were selected from the ORFs having the nucleotide sequence represented by SEQ ID NO: 82620.

[14022] The probes having the nucleotide sequence represented by SEQ ID NOS: 164307, 164308, 164309, 164310, 164311, 164312, 164313, 164314, 164315, 164316, 164317 were selected from the ORFs having the nucleotide sequence represented by SEQ ID NO: 82621.

[14023] The probes having the nucleotide sequence represented by SEQ ID NOS: 164318, 164319, 164320, 164321, 164322, 164323, 164324, 164325, 164326, 164327, 164328 were selected from the ORFs having the nucleotide sequence represented by SEQ ID NO: 82622.

[14024] The probes having the nucleotide sequence represented by SEQ ID NOS: 164329, 164330, 164331, 164332, 164333, 164334, 164335, 164336, 164337, 164338, 164339 were selected from the ORFs having the nucleotide sequence represented by SEQ ID NO: 82623.

[14025] The probes having the nucleotide sequence represented by SEQ ID NOS: 164340, 164341, 164342, 164343, 164344, 164345, 164346, 164347, 164348, 164349, 164350 were selected from the ORFs having the nucleotide sequence represented by SEQ ID NO: 82624.

[14026] The probes having the nucleotide sequence represented by SEQ ID NOS: 164351, 164352, 164353, 164354, 164355, 164356, 164357, 164358, 164359, 164360, 164361 were selected from the ORFs having the nucleotide sequence represented by SEQ ID NO: 82625.

[14027] The probes having the nucleotide sequence represented by SEQ ID NOS: 164362, 164363, 164364, 164365, 164366, 164367, 164368, 164369, 164370, 164371, 164372 were selected from the ORFs having the nucleotide sequence represented by SEQ ID NO: 82626.

[14028] The probes having the nucleotide sequence represented by SEQ ID NOS: 164373, 164374, 164375, 164376, 164377, 164378, 164379, 164380, 164381, 164382, 164383 were selected from the ORFs having the nucleotide sequence represented by SEQ ID NO: 82627.

[14029] The probes having the nucleotide sequence represented by SEQ ID NOS: 164384, 164385, 164386, 164387, 164388, 164389, 164390, 164391, 164392, 164393, 164394 were selected from the ORFs having the nucleotide sequence represented by SEQ ID NO: 82628.

[14030] The probes having the nucleotide sequence represented by SEQ ID NOS: 164395, 164396, 164397, 164398, 164399, 164400, 164401, 164402, 164403, 164404, 164405 were selected from the ORFs having the nucleotide sequence represented by SEQ ID NO: 82629.

[14031] The probes having the nucleotide sequence represented by SEQ ID NOS: 164406, 164407, 164408, 164409, 164410, 164411, 164412, 164413, 164414, 164415, 164416 were selected from the ORFs having the nucleotide sequence represented by SEQ ID NO: 82630.

[14032] The probes having the nucleotide sequence represented by SEQ ID NOS: 164417, 164418, 164419, 164420, 164421, 164422, 164423, 164424, 164425, 164426, 164427 were selected from the ORFs having the nucleotide sequence represented by SEQ ID NO: 82631.

[14033] The probes having the nucleotide sequence represented by SEQ ID NOS: 164428, 164429, 164430, 164431, 164432, 164433, 164434, 164435, 164436, 164437, 164438 were selected from the ORFs having the nucleotide sequence represented by SEQ ID NO: 82632.

[14034] The probes having the nucleotide sequence represented by SEQ ID NOS: 164439, 164440, 164441, 164442, 164443, 164444, 164445, 164446, 164447, 164448, 164449 were selected from the ORFs having the nucleotide sequence represented by SEQ ID NO: 82633.

[14035] The probes having the nucleotide sequence represented by SEQ ID NOS: 164450, 164451, 164452, 164453, 164454, 164455, 164456, 164457, 164458, 164459, 164460 were selected from the ORFs having the nucleotide sequence represented by SEQ ID NO: 82634.

[14036] The probes having the nucleotide sequence represented by SEQ ID NOS: 164461, 164462, 164463, 164464, 164465, 164466, 164467, 164468, 164469, 164470, 164471 were selected from the ORFs having the nucleotide sequence represented by SEQ ID NO: 82635.

[14037] The probes having the nucleotide sequence represented by SEQ ID NOS: 164472, 164473, 164474, 164475, 164476, 164477, 164478, 164479, 164480, 164481, 164482 were selected from the ORFs having the nucleotide sequence represented by SEQ ID NO: 82636.

[14038] The probes having the nucleotide sequence represented by SEQ ID NOS: 164483, 164484, 164485, 164486, 164487, 164488, 164489, 164490, 164491, 164492, 164493 were selected from the ORFs having the nucleotide sequence represented by SEQ ID NO: 82637.

[14039] The probes having the nucleotide sequence represented by SEQ ID NOS: 164494, 164495, 164496, 164497, 164498, 164499, 164500, 164501, 164502, 164503, 164504 were selected from the ORFs having the nucleotide sequence represented by SEQ ID NO: 82638.

[14040] The probes having the nucleotide sequence represented by SEQ ID NOS: 164505, 164506, 164507, 164508, 164509, 164510, 164511, 164512, 164513, 164514, 164515 were selected from the ORFs having the nucleotide sequence represented by SEQ ID NO: 82639.

[14041] The probes having the nucleotide sequence represented by SEQ ID NOS: 164516, 164517, 164518, 164519, 164520, 164521, 164522, 164523, 164524, 164525, 164526 were selected from the ORFs having the nucleotide sequence represented by SEQ ID NO: 82640.

[14042] The probes having the nucleotide sequence represented by SEQ ID NOS: 164527, 164528, 164529, 164530, 164531, 164532, 164533, 164534, 164535, 164536, 164537 were selected from the ORFs having the nucleotide sequence represented by SEQ ID NO: 82641.

[14043] The probes having the nucleotide sequence represented by SEQ ID NOS: 164538, 164539, 164540, 164541, 164542, 164543, 164544, 164545, 164546, 164547, 164548 were selected from the ORFs having the nucleotide sequence represented by SEQ ID NO: 82642.

[14044] The probes having the nucleotide sequence represented by SEQ ID NOS: 164549, 164550, 164551, 164552, 164553, 164554, 164555, 164556, 164557, 164558, 164559 were selected from the ORFs having the nucleotide sequence represented by SEQ ID NO: 82643.

[14045] The probes having the nucleotide sequence represented by SEQ ID NOS: 164560, 164561, 164562, 164563, 164564, 164565, 164566, 164567, 164568, 164569, 164570 were selected from the ORFs having the nucleotide sequence represented by SEQ ID NO: 82644.

[14046] The probes having the nucleotide sequence represented by SEQ ID NOS: 164571, 164572, 164573, 164574, 164575, 164576, 164577, 164578, 164579, 164580, 164581 were selected from the ORFs having the nucleotide sequence represented by SEQ ID NO: 82645.

[14047] The probes having the nucleotide sequence represented by SEQ ID NOS: 164582, 164583, 164584, 164585, 164586, 164587, 164588, 164589, 164590, 164591, 164592 were selected from the ORFs having the nucleotide sequence represented by SEQ ID NO: 82646.

[14048] The probes having the nucleotide sequence represented by SEQ ID NOS: 164593, 164594, 164595, 164596, 164597, 164598, 164599, 164600, 164601, 164602, 164603 were selected from the ORFs having the nucleotide sequence represented by SEQ ID NO: 82647.

[14049] The probes having the nucleotide sequence represented by SEQ ID NOS: 164604, 164605, 164606, 164607, 164608, 164609, 164610, 164611, 164612, 164613, 164614 were selected from the ORFs having the nucleotide sequence represented by SEQ ID NO: 82648.

[14050] The probes having the nucleotide sequence represented by SEQ ID NOS: 164615, 164616, 164617, 164618, 164619, 164620, 164621, 164622, 164623, 164624, 164625 were selected from the ORFs having the nucleotide sequence represented by SEQ ID NO: 82649.

[14051] The probes having the nucleotide sequence represented by SEQ ID NOS: 164626, 164627, 164628, 164629, 164630, 164631, 164632, 164633, 164634, 164635, 164636 were selected from the ORFs having the nucleotide sequence represented by SEQ ID NO: 82650.

[14052] The probes having the nucleotide sequence represented by SEQ ID NOS: 164637, 164638, 164639, 164640, 164641, 164642, 164643, 164644, 164645, 164646, 164647 were selected from the ORFs having the nucleotide sequence represented by SEQ ID NO: 82651.

[14053] The probes having the nucleotide sequence represented by SEQ ID NOS: 164648, 164649, 164650, 164651, 164652, 164653, 164654, 164655, 164656, 164657, 164658 were selected from the ORFs having the nucleotide sequence represented by SEQ ID NO: 82652.

[14054] The probes having the nucleotide sequence represented by SEQ ID NOS: 164659, 164660, 164661, 164662, 164663, 164664, 164665, 164666, 164667, 164668, 164669 were selected from the ORFs having the nucleotide sequence represented by SEQ ID NO: 82653.

[14055] The probes having the nucleotide sequence represented by SEQ ID NOS: 164670, 164671, 164672, 164673, 164674, 164675, 164676, 164677, 164678, 164679, 164680 were selected from the ORFs having the nucleotide sequence represented by SEQ ID NO: 82654.

[14056] The probes having the nucleotide sequence represented by SEQ ID NOS: 164681, 164682, 164683, 164684, 164685, 164686, 164687, 164688, 164689, 164690, 164691 were selected from the ORFs having the nucleotide sequence represented by SEQ ID NO: 82655.

[14057] The probes having the nucleotide sequence represented by SEQ ID NOS: 164692, 164693, 164694, 164695, 164696, 164697, 164698, 164699, 164700, 164701, 164702 were selected from the ORFs having the nucleotide sequence represented by SEQ ID NO: 82656.

[14058] The probes having the nucleotide sequence represented by SEQ ID NOS: 164703, 164704, 164705, 164706, 164707, 164708, 164709, 164710, 164711, 164712, 164713 were selected from the ORFs having the nucleotide sequence represented by SEQ ID NO: 82657.

[14059] The probes having the nucleotide sequence represented by SEQ ID NOS: 164714, 164715, 164716, 164717, 164718, 164719, 164720, 164721, 164722, 164723, 164724 were selected from the ORFs having the nucleotide sequence represented by SEQ ID NO: 82658.

[14060] The probes having the nucleotide sequence represented by SEQ ID NOS: 164725, 164726, 164727, 164728, 164729, 164730, 164731, 164732, 164733, 164734, 164735 were selected from the ORFs having the nucleotide sequence represented by SEQ ID NO: 82659.

[14061] The probes having the nucleotide sequence represented by SEQ ID NOS: 164736, 164737, 164738, 164739, 164740, 164741, 164742, 164743, 164744, 164745, 164746 were selected from the ORFs having the nucleotide sequence represented by SEQ ID NO: 82660.

[14062] The probes having the nucleotide sequence represented by SEQ ID NOS: 164747, 164748, 164749, 164750, 164751, 164752, 164753, 164754, 164755, 164756, 164757 were selected from the ORFs having the nucleotide sequence represented by SEQ ID NO: 82661.

[14063] The probes having the nucleotide sequence represented by SEQ ID NOS: 164758, 164759, 164760, 164761, 164762, 164763, 164764, 164765, 164766, 164767, 164768 were selected from the ORFs having the nucleotide sequence represented by SEQ ID NO: 82662.

[14064] The probes having the nucleotide sequence represented by SEQ ID NOS: 164769, 164770, 164771, 164772, 164773, 164774, 164775, 164776, 164777, 164778, 164779 were selected from the ORFs having the nucleotide sequence represented by SEQ ID NO: 82663.

[14065] The probes having the nucleotide sequence represented by SEQ ID NOS: 164780, 164781, 164782, 164783, 164784, 164785, 164786, 164787, 164788, 164789, 164790 were selected from the ORFs having the nucleotide sequence represented by SEQ ID NO: 82664.

[14066] The probes having the nucleotide sequence represented by SEQ ID NOS: 164791, 164792, 164793, 164794, 164795, 164796, 164797, 164798, 164799, 164800, 164801 were selected from the ORFs having the nucleotide sequence represented by SEQ ID NO: 82665.

[14067] The probes having the nucleotide sequence represented by SEQ ID NOS: 164802, 164803, 164804, 164805, 164806, 164807, 164808, 164809, 164810, 164811, 164812 were selected from the ORFs having the nucleotide sequence represented by SEQ ID NO: 82666.

[14068] The probes having the nucleotide sequence represented by SEQ ID NOS: 164813, 164814, 164815, 164816, 164817, 164818, 164819, 164820, 164821, 164822, 164823 were selected from the ORFs having the nucleotide sequence represented by SEQ ID NO: 82667.

[14069] The probes having the nucleotide sequence represented by SEQ ID NOS: 164824, 164825, 164826, 164827, 164828, 164829, 164830, 164831, 164832, 164833, 164834 were selected from the ORFs having the nucleotide sequence represented by SEQ ID NO: 82668.

[14070] The probes having the nucleotide sequence represented by SEQ ID NOS: 164835, 164836, 164837, 164838, 164839, 164840, 164841, 164842, 164843, 164844, 164845 were selected from the ORFs having the nucleotide sequence represented by SEQ ID NO: 82669.

[14071] The probes having the nucleotide sequence represented by SEQ ID NOS: 164846, 164847, 164848, 164849, 164850, 164851, 164852, 164853, 164854, 164855, 164856 were selected from the ORFs having the nucleotide sequence represented by SEQ ID NO: 82670.

[14072] The probes having the nucleotide sequence represented by SEQ ID NOS: 164857, 164858, 164859, 164860, 164861, 164862, 164863, 164864, 164865, 164866, 164867 were selected from the ORFs having the nucleotide sequence represented by SEQ ID NO: 82671.

[14073] The probes having the nucleotide sequence represented by SEQ ID NOS: 164868, 164869, 164870, 164871, 164872, 164873, 164874, 164875, 164876, 164877, 164878 were selected from the ORFs having the nucleotide sequence represented by SEQ ID NO: 82672.

[14074] The probes having the nucleotide sequence represented by SEQ ID NOS: 164879, 164880, 164881, 164882, 164883, 164884, 164885, 164886, 164887, 164888, 164889 were selected from the ORFs having the nucleotide sequence represented by SEQ ID NO: 82673.

[14075] The probes having the nucleotide sequence represented by SEQ ID NOS: 164890, 164891, 164892, 164893, 164894, 164895, 164896, 164897, 164898, 164899, 164900 were selected from the ORFs having the nucleotide sequence represented by SEQ ID NO: 82674.

[14076] The probes having the nucleotide sequence represented by SEQ ID NOS: 164901, 164902, 164903, 164904, 164905, 164906, 164907, 164908, 164909, 164910, 164911 were selected from the ORFs having the nucleotide sequence represented by SEQ ID NO: 82675.

[14077] The probes having the nucleotide sequence represented by SEQ ID NOS: 164912, 164913, 164914, 164915, 164916, 164917, 164918, 164919, 164920, 164921, 164922 were selected from the ORFs having the nucleotide sequence represented by SEQ ID NO: 82676.

[14078] The probes having the nucleotide sequence represented by SEQ ID NOS: 164923, 164924, 164925, 164926, 164927, 164928, 164929, 164930, 164931, 164932, 164933 were selected from the ORFs having the nucleotide sequence represented by SEQ ID NO: 82677.

[14079] The probes having the nucleotide sequence represented by SEQ ID NOS: 164934, 164935, 164936, 164937, 164938, 164939, 164940, 164941, 164942, 164943, 164944 were selected from the ORFs having the nucleotide sequence represented by SEQ ID NO: 82678.

[14080] The probes having the nucleotide sequence represented by SEQ ID NOS: 164945, 164946, 164947, 164948, 164949, 164950, 164951, 164952, 164953, 164954, 164955 were selected from the ORFs having the nucleotide sequence represented by SEQ ID NO: 82679.

[14081] The probes having the nucleotide sequence represented by SEQ ID NOS: 164956, 164957, 164958, 164959, 164960, 164961, 164962, 164963, 164964, 164965, 164966 were selected from the ORFs having the nucleotide sequence represented by SEQ ID NO: 82680.

[14082] The probes having the nucleotide sequence represented by SEQ ID NOS: 164967, 164968, 164969, 164970, 164971, 164972, 164973, 164974, 164975, 164976, 164977 were selected from the ORFs having the nucleotide sequence represented by SEQ ID NO: 82681.

[14083] The probes having the nucleotide sequence represented by SEQ ID NOS: 164978, 164979, 164980, 164981, 164982, 164983, 164984, 164985, 164986, 164987, 164988 were selected from the ORFs having the nucleotide sequence represented by SEQ ID NO: 82682.

[14084] The probes having the nucleotide sequence represented by SEQ ID NOS: 164989, 164990, 164991, 164992, 164993, 164994, 164995, 164996, 164997, 164998, 164999 were selected from the ORFs having the nucleotide sequence represented by SEQ ID NO: 82683.

[14085] The probes having the nucleotide sequence represented by SEQ ID NOS: 165000, 165001, 165002, 165003, 165004, 165005, 165006, 165007, 165008, 165009, 165010 were selected from the ORFs having the nucleotide sequence represented by SEQ ID NO: 82684.

[14086] The probes having the nucleotide sequence represented by SEQ ID NOS: 165011, 165012, 165013, 165014, 165015, 165016, 165017, 165018, 165019, 165020, 165021 were selected from the ORFs having the nucleotide sequence represented by SEQ ID NO: 82685.

[14087] The probes having the nucleotide sequence represented by SEQ ID NOS: 165022, 165023, 165024, 165025, 165026, 165027, 165028, 165029, 165030, 165031, 165032 were selected from the ORFs having the nucleotide sequence represented by SEQ ID NO: 82686.

[14088] The probes having the nucleotide sequence represented by SEQ ID NOS: 165033, 165034, 165035, 165036, 165037, 165038, 165039, 165040, 165041, 165042, 165043 were selected from the ORFs having the nucleotide sequence represented by SEQ ID NO: 82687.

[14089] The probes having the nucleotide sequence represented by SEQ ID NOS: 165044, 165045, 165046, 165047, 165048, 165049, 165050, 165051, 165052, 165053, 165054 were selected from the ORFs having the nucleotide sequence represented by SEQ ID NO: 82688.

[14090] The probes having the nucleotide sequence represented by SEQ ID NOS: 165055, 165056, 165057, 165058, 165059, 165060, 165061, 165062, 165063, 165064, 165065 were selected from the ORFs having the nucleotide sequence represented by SEQ ID NO: 82689.

[14091] The probes having the nucleotide sequence represented by SEQ ID NOS: 165066, 165067, 165068, 165069, 165070, 165071, 165072, 165073, 165074, 165075, 165076 were selected from the ORFs having the nucleotide sequence represented by SEQ ID NO: 82690.

[14092] The probes having the nucleotide sequence represented by SEQ ID NOS: 165077, 165078, 165079, 165080, 165081, 165082, 165083, 165084, 165085, 165086, 165087 were selected from the ORFs having the nucleotide sequence represented by SEQ ID NO: 82691.

[14093] The probes having the nucleotide sequence represented by SEQ ID NOS: 165088, 165089, 165090, 165091, 165092, 165093, 165094, 165095, 165096, 165097, 165098 were selected from the ORFs having the nucleotide sequence represented by SEQ ID NO: 82692.

[14094] The probes having the nucleotide sequence represented by SEQ ID NOS: 165099, 165100, 165101, 165102, 165103, 165104, 165105, 165106, 165107, 165108, 165109 were selected from the ORFs having the nucleotide sequence represented by SEQ ID NO: 82693.

[14095] The probes having the nucleotide sequence represented by SEQ ID NOS: 165110, 165111, 165112, 165113, 165114, 165115,. 165116, 165117, 165118, 165119, 165120 were selected from the ORFs having the nucleotide sequence represented by SEQ ID NO: 82694.

[14096] The probes having the nucleotide sequence represented by SEQ ID NOS: 165121, 165122, 165123, 165124, 165125, 165126, 165127, 165128, 165129, 165130, 165131 were selected from the ORFs having the nucleotide sequence represented by SEQ ID NO: 82695.

[14097] The probes having the nucleotide sequence represented by SEQ ID NOS: 165132, 165133, 165134, 165135, 165136, 165137, 165138, 165139, 165140, 165141, 165142 were selected from the ORFs having the nucleotide sequence represented by SEQ ID NO: 82696.

[14098] The probes having the nucleotide sequence represented by SEQ ID NOS: 165143, 165144, 165145, 165146, 165147, 165148, 165149, 165150, 165151, 165152, 165153 were selected from the ORFs having the nucleotide sequence represented by SEQ ID NO: 82697.

[14099] The probes having the nucleotide sequence represented by SEQ ID NOS: 165154, 165155, 165156, 165157, 165158, 165159, 165160, 165161, 165162, 165163, 165164 were selected from the ORFs having the nucleotide sequence represented by SEQ ID NO: 82698.

[14100] The probes having the nucleotide sequence represented by SEQ ID NOS: 165165, 165166, 165167, 165168, 165169, 165170, 165171, 165172, 165173, 165174, 165175 were selected from the ORFs having the nucleotide sequence represented by SEQ ID NO: 82699.

[14101] The probes having the nucleotide sequence represented by SEQ ID NOS: 165176, 165177, 165178, 165179, 165180, 165181, 165182, 165183, 165184, 165185, 165186 were selected from the ORFs having the nucleotide sequence represented by SEQ ID NO: 82700.

[14102] The probes having the nucleotide sequence represented by SEQ ID NOS: 165187, 165188, 165189, 165190, 165191, 165192, 165193, 165194, 165195, 165196, 165197 were selected from the ORFs having the nucleotide sequence represented by SEQ ID NO: 82701.

[14103] The probes having the nucleotide sequence represented by SEQ ID NOS: 165198, 165199, 165200, 165201, 165202, 165203, 165204, 165205, 165206, 165207, 165208 were selected from the ORFs having the nucleotide sequence represented by SEQ ID NO: 82702.

[14104] The probes having the nucleotide sequence represented by SEQ ID NOS: 165209, 165210, 165211, 165212, 165213, 165214, 165215, 165216, 165217, 165218, 1.65219, 165220, 165221, 165222, 165223, 165224, 165225, 165226, 165227, 165228, 165229, 165230 were selected from the ORFs having the nucleotide sequence represented by SEQ ID NO: 82703.

[14105] The probes having the nucleotide sequence represented by SEQ ID NOS: 165231, 165232, 165233, 165234, 165235, 165236, 165237, 165238, 165239, 165240, 165241 were selected from the ORFs having the nucleotide sequence represented by SEQ ID NO: 82704.

[14106] The probes having the nucleotide sequence represented by SEQ ID NOS: 165242, 165243, 165244, 165245, 165246, 165247, 165248, 165249, 165250, 165251, 165252, 165253, 165254, 165255, 165256, 165257, 165258, 165259, 165260, 165261, 165262, 165263 were selected from the ORFs having the nucleotide sequence represented by SEQ ID NO: 82705.

[14107] The probes having the nucleotide sequence represented by SEQ ID NOS: 165264, 165265, 165266, 165267, 165268, 165269, 165270, 165271, 165272, 165273, 165274 were selected from the ORFs having the nucleotide sequence represented by SEQ ID NO: 82706.

[14108] The probes having the nucleotide sequence represented by SEQ ID NOS: 165275, 165276, 165277, 165278, 165279, 165280, 165281, 165282, 165283, 165284, 165285 were selected from the ORFs having the nucleotide sequence represented by SEQ ID NO: 82707.

[14109] The probes having the nucleotide sequence represented by SEQ ID NOS: 165286, 165287, 165288, 165289, 165290, 165291, 165292, 165293, 165294, 165295, 165296 were selected from the ORFs having the nucleotide sequence represented by SEQ ID NO: 82708.

[14110] The probes having the nucleotide sequence represented by SEQ ID NOS: 165297, 165298, 165299, 165300, 165301, 165302, 165303, 165304, 165305, 165306, 165307 were selected from the ORFs having the nucleotide sequence represented by SEQ ID NO: 82709.

[14111] The probes having the nucleotide sequence represented by SEQ ID NOS: 165308, 165309, 165310, 165311, 165312, 165313, 165314, 165315, 165316, 165317, 165318 were selected from the ORFs having the nucleotide sequence represented by SEQ ID NO: 82710.

[14112] The probes having the nucleotide sequence represented by SEQ ID NOS: 165319, 165320, 165321, 165322, 165323, 165324, 165325, 165326, 165327, 165328, 165329 were selected from the ORFs having the nucleotide sequence represented by SEQ ID NO: 82711.

[14113] The probes having the nucleotide sequence represented by SEQ ID NOS: 165330, 165331, 165332, 165333, 165334, 165335, 165336, 165337, 165338, 165339, 165340 were selected from the ORFs having the nucleotide sequence represented by SEQ ID NO: 82712.

[14114] The probes having the nucleotide sequence represented by SEQ ID NOS: 165341, 165342, 165343, 165344, 165345, 165346, 165347, 165348, 165349, 165350, 165351 were selected from the ORFs having the nucleotide sequence represented by SEQ ID NO: 82713.

[14115] The probes having the nucleotide sequence represented by SEQ ID NOS: 165352, 165353, 165354, 165355, 165356, 165357, 165358, 165359, 165360, 165361, 165362 were selected from the ORFs having the nucleotide sequence represented by SEQ ID NO: 82714.

[14116] The probes having the nucleotide sequence represented by SEQ ID NOS: 165363, 165364, 165365, 165366, 165367, 165368, 165369, 165370, 165371, 165372, 165373 were selected from the ORFs having the nucleotide sequence represented by SEQ ID NO: 82715.

[14117] The probes having the nucleotide sequence represented by SEQ ID NOS: 165374, 165375, 165376, 165377, 165378, 165379, 165380, 165381, 165382, 165383 were selected from the ORFs having the nucleotide sequence represented by SEQ ID NO: 82716.

[14118] The probes having the nucleotide sequence represented by SEQ ID NOS: 165384, 165385, 165386, 165387, 165388, 165389, 165390, 165391, 165392, 165393, 165394 were selected from the ORFs having the nucleotide sequence represented by SEQ ID NO: 82717.

[14119] The probes having the nucleotide sequence represented by SEQ ID NOS: 165395, 165396, 165397, 165398, 165399, 165400, 165401, 165402, 165403, 165404, 165405 were selected from the ORFs having the nucleotide sequence represented by SEQ ID NO: 82718.

[14120] The probes having the nucleotide sequence represented by SEQ ID NOS: 165406, 165407, 165408, 165409, 165410, 165411, 165412, 165413, 165414, 165415, 165416 were selected from the ORFs having the nucleotide sequence represented by SEQ ID NO: 82719.

[14121] The probes having the nucleotide sequence represented by SEQ ID NOS: 165417, 165418, 165419, 165420, 165421, 165422, 165423, 165424, 165425, 165426, 165427 were selected from the ORFs having the nucleotide sequence represented by SEQ ID NO: 82720.

[14122] The probes having the nucleotide sequence represented by SEQ ID NOS: 165428, 165429, 165430, 165431, 165432, 165433, 165434, 165435, 165436, 165437, 165438 were selected from the ORFs having the nucleotide sequence represented by SEQ ID NO: 82721.

[14123] The probes having the nucleotide sequence represented by SEQ ID NOS: 165439, 165440, 165441, 165442, 165443, 165444, 165445, 165446, 165447, 165448, 165449 were selected from the ORFs having the nucleotide sequence represented by SEQ ID NO: 82722.

[14124] The probes having the nucleotide sequence represented by SEQ ID NOS: 165450, 165451, 165452, 165453, 165454, 165455, 165456, 165457, 165458, 165459, 165460 were selected from the ORFs having the nucleotide sequence represented by SEQ ID NO: 82723.

[14125] The probes having the nucleotide sequence represented by SEQ ID NOS: 165461, 165462, 165463, 165464, 165465, 165466, 165467, 165468, 165469, 165470, 165471 were selected from the ORFs having the nucleotide sequence represented by SEQ ID NO: 82724.

[14126] The probes having the nucleotide sequence represented by SEQ ID NOS: 165472, 165473, 165474, 165475, 165476, 165477, 165478, 165479, 165480, 165481, 165482 were selected from the ORFs having the nucleotide sequence represented by SEQ ID NO: 82725.

[14127] The probes having the nucleotide sequence represented by SEQ ID NOS: 165483, 165484, 165485, 165486, 165487, 165488, 165489, 165490, 165491, 165492, 165493 were selected from the ORFs having the nucleotide sequence represented by SEQ ID NO: 82726.

[14128] The probes having the nucleotide sequence represented by SEQ ID NOS: 165494, 165495, 165496, 165497, 165498, 165499, 165500, 165501, 165502, 165503, 165504 were selected from the ORFs having the nucleotide sequence represented by SEQ ID NO: 82727.

[14129] The probes having the nucleotide sequence represented by SEQ ID NOS: 165505, 165506, 165507, 165508, 165509, 165510, 165511, 165512, 165513, 165514, 165515 were selected from the ORFs having the nucleotide sequence represented by SEQ ID NO: 82728.

[14130] The probes having the nucleotide sequence represented by SEQ ID NOS: 165516, 165517, 165518, 165519, 165520, 165521, 165522, 165523, 165524, 165525, 165526 were selected from the ORFs having the nucleotide sequence represented by SEQ ID NO: 82729.

[14131] The probes having the nucleotide sequence represented by SEQ ID NOS: 165527, 165528, 165529, 165530, 165531, 165532, 165533, 165534, 165535, 165536, 165537 were selected from the ORFs having the nucleotide sequence represented by SEQ ID NO: 82730.

[14132] The probes having the nucleotide sequence represented by SEQ ID NOS: 165538, 165539, 165540, 165541, 165542, 165543, 165544, 165545, 165546, 165547, 165548 were selected from the ORFs having the nucleotide sequence represented by SEQ ID NO: 82731.

[14133] The probes having the nucleotide sequence represented by SEQ ID NOS: 165549, 165550, 165551, 165552, 165553, 165554, 165555, 165556, 165557, 165558, 165559 were selected from the ORFs having the nucleotide sequence represented by SEQ ID NO: 82732.

[14134] The probes having the nucleotide sequence represented by SEQ ID NOS: 165560, 165561, 165562, 165563, 165564, 165565, 165566, 165567, 165568, 165569, 165570 were selected from the ORFs having the nucleotide sequence represented by SEQ ID NO: 82733.

[14135] The probes having the nucleotide sequence represented by SEQ ID NOS: 165571, 165572, 165573, 165574, 165575, 165576, 165577, 165578, 165579, 165580, 165581 were selected from the ORFs having the nucleotide sequence represented by SEQ ID NO: 82734.

[14136] The probes having the nucleotide sequence represented by SEQ ID NOS: 165582, 165583, 165584, 165585, 165586, 165587, 165588, 165589, 165590, 165591, 165592 were selected from the ORFs having the nucleotide sequence represented by SEQ ID NO: 82735.

[14137] The probes having the nucleotide sequence represented by SEQ ID NOS: 165593, 165594, 165595, 165596, 165597, 165598, 165599, 165600, 165601, 165602, 165603 were selected from the ORFs having the nucleotide sequence represented by SEQ ID NO: 82736.

[14138] The probes having the nucleotide sequence represented by SEQ ID NOS: 165604, 165605, 165606, 165607, 165608, 165609, 165610, 165611, 165612, 165613, 165614 were selected from the ORFs having the nucleotide sequence represented by SEQ ID NO: 82737.

[14139] The probes having the nucleotide sequence represented by SEQ ID NOS: 165615, 165616, 165617, 165618, 165619, 165620, 165621, 165622, 165623, 165624, 165625 were selected from the ORFs having the nucleotide sequence represented by SEQ ID NO: 82738.

[14140] The probes having the nucleotide sequence represented by SEQ ID NOS: 165626, 165627, 165628, 165629, 165630, 165631, 165632, 165633, 165634, 165635, 165636 were selected from the ORFs having the nucleotide sequence represented by SEQ ID NO: 82739.

[14141] The probes having the nucleotide sequence represented by SEQ ID NOS: 165637, 165638, 165639, 165640, 165641, 165642, 165643, 165644, 165645, 165646, 165647 were selected from the ORFs having the nucleotide sequence represented by SEQ ID NO: 82740.

[14142] The probes having the nucleotide sequence represented by SEQ ID NOS: 165648, 165649, 165650, 165651, 165652, 165653, 165654, 165655, 165656, 165657, 165658 were selected from the ORFs having the nucleotide sequence represented by SEQ ID NO: 82741.

[14143] The probes having the nucleotide sequence represented by SEQ ID NOS: 165659, 165660, 165661, 165662, 165663, 165664, 165665, 165666, 165667, 165668, 165669 were selected from the ORFs having the nucleotide sequence represented by SEQ ID NO: 82742.

[14144] The probes having the nucleotide sequence represented by SEQ ID NOS: 165670, 165671, 165672, 165673, 165674, 165675, 165676, 165677, 165678, 165679, 165680 were selected from the ORFs having the nucleotide sequence represented by SEQ ID NO: 82743.

[14145] The probes having the nucleotide sequence represented by SEQ ID NOS: 165681, 165682, 165683, 165684, 165685, 165686, 165687, 165688, 165689, 165690, 165691 were selected from the ORFs having the nucleotide sequence represented by SEQ ID NO: 82744.

[14146] The probes having the nucleotide sequence represented by SEQ ID NOS: 165692, 165693, 165694, 165695, 165696, 165697, 165698, 165699, 165700, 165701, 165702 were selected from the ORFs having the nucleotide sequence represented by SEQ ID NO: 82745.

[14147] The probes having the nucleotide sequence represented by SEQ ID NOS: 165703, 165704, 165705, 165706, 165707, 165708, 165709, 165710, 165711, 165712, 165713 were selected from the ORFs having the nucleotide sequence represented by SEQ ID NO: 82746.

[14148] The probes having the nucleotide sequence represented by SEQ ID NOS: 165714, 165715, 165716, 165717, 165718, 165719, 165720, 165721, 165722, 165723, 165724 were selected from the ORFs having the nucleotide sequence represented by SEQ ID NO: 82747.

[14149] The probes having the nucleotide sequence represented by SEQ ID NOS: 165725, 165726, 165727, 165728, 165729, 165730, 165731, 165732, 165733, 165734, 165735 were selected from the ORFs having the nucleotide sequence represented by SEQ ID NO: 82748.

[14150] The probes having the nucleotide sequence represented by SEQ ID NOS: 165736, 165737, 165738, 165739, 165740, 165741, 165742, 165743, 165744, 165745, 165746 were selected from the ORFs having the nucleotide sequence represented by SEQ ID NO: 82749.

[14151] The probes having the nucleotide sequence represented by SEQ ID NOS: 165747, 165748, 165749, 165750, 165751, 165752, 165753, 165754, 165755, 165756, 165757 were selected from the ORFs having the nucleotide sequence represented by SEQ ID NO: 82750.

[14152] The probes having the nucleotide sequence represented by SEQ ID NOS: 165758, 165759, 165760, 165761, 165762, 165763, 165764, 165765, 165766, 165767, 165768 were selected from the ORFs having the nucleotide sequence represented by SEQ ID NO: 82751.

[14153] The probes having the nucleotide sequence represented by SEQ ID NOS: 165769, 165770, 165771, 165772, 165773, 165774, 165775, 165776, 165777, 165778, 165779 were selected from the ORFs having the nucleotide sequence represented by SEQ ID NO: 82752.

[14154] The probes having the nucleotide sequence represented by SEQ ID NOS: 165780, 165781, 165782, 165783, 165784, 165785, 165786, 165787, 165788, 165789, 165790 were selected from the ORFs having the nucleotide sequence represented by SEQ ID NO: 82753.

[14155] The probes having the nucleotide sequence represented by SEQ ID NOS: 165791, 165792, 165793, 165794, 165795, 165796, 165797, 165798, 165799, 165800, 165801 were selected from the ORFs having the nucleotide sequence represented by SEQ ID NO: 82754.

[14156] The probes having the nucleotide sequence represented by SEQ ID NOS: 165802, 165803, 165804, 165805, 165806, 165807, 165808, 165809, 165810, 165811, 165812 were selected from the ORFs having the nucleotide sequence represented by SEQ ID NO: 82755.

[14157] The probes having the nucleotide sequence represented by SEQ ID NOS: 165813, 165814, 165815, 165816, 165817, 165818, 165819, 165820, 165821, 165822, 165823 were selected from the ORFs having the nucleotide sequence represented by SEQ ID NO: 82756.

[14158] The probes having the nucleotide sequence represented by SEQ ID NOS: 165824, 165825, 165826, 165827, 165828, 165829, 165830, 165831, 165832, 165833, 165834 were selected from the ORFs having the nucleotide sequence represented by SEQ ID NO: 82757.

[14159] The probes having the nucleotide sequence represented by SEQ ID NOS: 165835, 165836, 165837, 165838, 165839, 165840, 165841, 165842, 165843, 165844, 165845, 165846, 165847, 165848, 165849, 165850, 165851, 165852, 165853, 165854, 165855, 165856 were selected from the ORFs having the nucleotide sequence represented by SEQ ID NO: 82758.

[14160] The probes having the nucleotide sequence represented by SEQ ID NOS: 165857, 165858, 165859, 165860, 165861, 165862, 165863, 165864, 165865, 165866, 165867 were selected from the ORFs having the nucleotide sequence represented by SEQ ID NO: 82759.

[14161] The probes having the nucleotide sequence represented by SEQ ID NOS: 165868, 165869, 165870, 165871, 165872, 165873, 165874, 165875, 165876, 165877, 165878 were selected from the ORFs having the nucleotide sequence represented by SEQ ID NO: 82760.

[14162] The probes having the nucleotide sequence represented by SEQ ID NOS: 165879, 165880, 165881, 165882, 165883, 165884, 165885, 165886, 165887, 165888, 165889 were selected from the ORFs having the nucleotide sequence represented by SEQ ID NO: 82761.

[14163] The probes having the nucleotide sequence represented by SEQ ID NOS: 165890, 165891, 165892, 165893, 165894, 165895, 165896, 165897, 165898, 165899, 165900 were selected from the ORFs having the nucleotide sequence represented by SEQ ID NO: 82762.

[14164] The probes having the nucleotide sequence represented by SEQ ID NOS: 165901, 165902, 165903, 165904, 165905, 165906, 165907, 165908, 165909, 165910, 165911, 165912, 165913, 165914, 165915, 165916, 165917, 165918, 165919, 165920, 165921, 165922 were selected from the ORFs having the nucleotide sequence represented by SEQ ID NO: 82763.

[14165] The probes having the nucleotide sequence represented by SEQ ID NOS: 165923, 165924, 165925, 165926, 165927, 165928, 165929, 165930, 165931, 165932, 165933 were selected from the ORFs having the nucleotide sequence represented by SEQ ID NO: 82764.

[14166] The probes having the nucleotide sequence represented by SEQ ID NOS: 165934, 165935, 165936, 165937, 165938, 165939, 165940, 165941, 165942, 165943, 165944 were selected from the ORFs having the nucleotide sequence represented by SEQ ID NO: 82765.

[14167] The probes having the nucleotide sequence represented by SEQ ID NOS: 165945, 165946, 165947, 165948, 165949, 165950, 165951, 165952, 165953, 165954, 165955 were selected from the ORFs having the nucleotide sequence represented by SEQ ID NO: 82766.

[14168] The probes having the nucleotide sequence represented by SEQ ID NOS: 165956, 165957, 165958, 165959, 165960, 165961, 165962, 165963, 165964, 165965, 165966 were selected from the ORFs having the nucleotide sequence represented by SEQ ID NO: 82767.

[14169] The probes having the nucleotide sequence represented by SEQ ID NOS: 165967, 165968, 165969, 165970, 165971, 165972, 165973, 165974, 165975, 165976, 165977 were selected from the ORFs having the nucleotide sequence represented by SEQ ID NO: 82768.

[14170] The probes having the nucleotide sequence represented by SEQ ID NOS: 165978, 165979, 165980, 165981, 165982, 165983, 165984, 165985, 165986, 165987, 165988 were selected from the ORFs having the nucleotide sequence represented by SEQ ID NO: 82769.

[14171] The probes having the nucleotide sequence represented by SEQ ID NOS: 165989, 165990, 165991, 165992, 165993, 165994, 165995, 165996, 165997, 165998, 165999 were selected from the ORFs having the nucleotide sequence represented by SEQ ID NO: 82770.

[14172] The probes having the nucleotide sequence represented by SEQ ID NOS: 166000, 166001, 166002, 166003, 166004, 166005, 166006, 166007, 166008, 166009, 166010 were selected from the ORFs having the nucleotide sequence represented by SEQ ID NO: 82771.

[14173] The probes having the nucleotide sequence represented by SEQ ID NOS: 166011, 166012, 166013, 166014, 166015, 166016, 166017, 166018, 166019, 166020, 166021 were selected from the ORFs having the nucleotide sequence represented by SEQ ID NO: 82772.

[14174] The probes having the nucleotide sequence represented by SEQ ID NOS: 166022, 166023, 166024, 166025, 166026, 166027, 166028, 166029, 166030, 166031, 166032 were selected from the ORFs having the nucleotide sequence represented by SEQ ID NO: 82773.

[14175] The probes having the nucleotide sequence represented by SEQ ID NOS: 166033, 166034, 166035, 166036, 166037, 166038, 166039, 166040, 166041, 166042, 166043 were selected from the ORFs having the nucleotide sequence represented by SEQ ID NO: 82774.

[14176] The probes having the nucleotide sequence represented by SEQ ID NOS: 166044, 166045, 166046, 166047, 166048, 166049, 166050, 166051, 166052, 166053, 166054 were selected from the ORFs having the nucleotide sequence represented by SEQ ID NO: 82775.

[14177] The probes having the nucleotide sequence represented by SEQ ID NOS: 166055, 166056, 166057, 166058, 166059, 166060, 166061, 166062, 166063, 166064, 166065 were selected from the ORFs having the nucleotide sequence represented by SEQ ID NO: 82776.

[14178] The probes having the nucleotide sequence represented by SEQ ID NOS: 166066, 166067, 166068, 166069, 166070, 166071, 166072, 166073, 166074, 166075, 166076 were selected from the ORFs having the nucleotide sequence represented by SEQ ID NO: 82777.

[14179] The probes having the nucleotide sequence represented by SEQ ID NOS: 166077, 166078, 166079, 166080, 166081, 166082, 166083, 166084, 166085, 166086, 166087 were selected from the ORFs having the nucleotide sequence represented by SEQ ID NO: 82778.

[14180] The probes having the nucleotide sequence represented by SEQ ID NOS: 166088, 166089, 166090, 166091, 166092, 166093, 166094, 166095, 166096, 166097, 166098 were selected from the ORFs having the nucleotide sequence represented by SEQ ID NO: 82779.

[14181] The probes having the nucleotide sequence represented by SEQ ID NOS: 166099, 166100, 166101, 166102, 166103, 166104, 166105, 166106, 166107, 166108, 166109 were selected from the ORFs having the nucleotide sequence represented by SEQ ID NO: 82780.

[14182] The probes having the nucleotide sequence represented by SEQ ID NOS: 166110, 166111, 166112, 166113, 166114, 166115, 166116, 166117, 166118, 166119, 166120 were selected from the ORFs having the nucleotide sequence represented by SEQ ID NO: 82781.

[14183] The probes having the nucleotide sequence represented by SEQ ID NOS: 166121, 166122, 166123, 166124, 166125, 166126, 166127, 166128, 166129, 166130, 166131 were selected from the ORFs having the nucleotide sequence represented by SEQ ID NO: 82782.

[14184] The probes having the nucleotide sequence represented by SEQ ID NOS: 166132, 166133, 166134, 166135, 166136, 166137, 166138, 166139, 166140, 166141, 166142 were selected from the ORFs having the nucleotide sequence represented by SEQ ID NO: 82783.

[14185] The probes having the nucleotide sequence represented by SEQ ID NOS: 166143, 166144, 166145, 166146, 166147, 166148, 166149, 166150, 166151, 166152, 166153 were selected from the ORFs having the nucleotide sequence represented by SEQ ID NO: 82784.

[14186] The probes from 28 DNA sequences of mitochondrial ORFs described as above (1-C) were as follows:

[14187] The probes having the nucleotide sequence represented by SEQ ID NOS: 166182, 166183, 166184, 166185, 166186, 166187, 166188, 166189, 166190, 166191, 166192 were selected from the ORFs having the nucleotide sequence represented by SEQ ID NO: 166154.

[14188] The probes having the nucleotide sequence represented by SEQ ID NOS: 166193, 166194, 166195, 166196, 166197, 166198, 166199, 166200, 166201, 166202, 166203 were selected from the ORFs having the nucleotide sequence represented by SEQ ID NO: 166155.

[14189] The probes having the nucleotide sequence represented by SEQ ID NOS: 166204, 166205, 166206, 166207, 166208, 166209, 166210, 166211, 166212, 166213, 166214 were selected from the ORFs having the nucleotide sequence represented by SEQ ID NO: 166156.

[14190] The probes having the nucleotide sequence represented by SEQ ID NOS: 166215, 166216, 166217, 166218, 166219, 166220, 166221, 166222, 166223, 166224, 166225 were selected from the ORFs having the nucleotide sequence represented by SEQ ID NO: 166157.

[14191] The probes having the nucleotide sequence represented by SEQ ID NOS: 166226, 166227, 166228, 166229, 166230, 166231, 166232, 166233, 166234, 166235, 166236 were selected from the ORFs having the nucleotide sequence represented by SEQ ID NO: 166158.

[14192] The probes having the nucleotide sequence represented by SEQ ID NOS: 166237, 166238, 166239, 166240, 166241, 166242, 166243, 166244, 166245, 166246, 166247 were selected from the ORFs having the nucleotide sequence represented by SEQ ID NO: 166159.

[14193] The probes having the nucleotide sequence represented by SEQ ID NOS: 166248, 166249, 166250, 166251, 166252, 166253, 166254, 166255, 166256, 166257, 166258 were selected from the ORFs having the nucleotide sequence represented by SEQ ID NO: 166160.

[14194] The probes having the nucleotide sequence represented by SEQ ID NOS: 166259, 166260, 166261, 166262, 166263, 166264,

[14195] 166265, 166266, 166267, 166268, 166269 were selected from the ORFs having the nucleotide sequence represented by SEQ ID NO: 166161.

[14196] The probes having the nucleotide sequence represented by SEQ ID NOS: 166270, 166271, 166272, 166273, 166274, 166275, 166276, 166277, 166278, 166279, 166280 were selected from the ORFs having the nucleotide sequence represented by SEQ ID NO: 166162.

[14197] The probes having the nucleotide sequence represented by SEQ ID NOS: 166281, 166282, 166283, 166284, 166285, 166286, 166287, 166288, 166289, 166290, 166291 were selected from the ORFs having the nucleotide sequence represented by SEQ ID NO: 166163.

[14198] The probes having the nucleotide sequence represented by SEQ ID NOS: 166292, 166293, 166294, 166295, 166296, 166297, 166298, 166299, 166300, 166301, 166302 were selected from the ORFs having the nucleotide sequence represented by SEQ ID NO: 166164.

[14199] The probes having the nucleotide sequence represented by SEQ ID NOS: 166303, 166304, 166305, 166306, 166307, 166308, 166309, 166310, 166311, 166312, 166313 were selected from the ORFs having the nucleotide sequence represented by SEQ ID NO: 166165.

[14200] The probes having the nucleotide sequence represented by SEQ ID NOS: 166314, 166315, 166316, 166317, 166318, 166319, 166320, 166321, 166322, 166323, 166324 were selected from the ORFs having the nucleotide sequence represented by SEQ ID NO: 166166.

[14201] The probes having the nucleotide sequence represented by SEQ ID NOS: 166325, 166326, 166327, 166328, 166329, 166330, 166331, 166332, 166333, 166334, 166335 were selected from the ORFs having the nucleotide sequence represented by SEQ ID NO: 166167.

[14202] The probes having the nucleotide sequence represented by SEQ ID NOS: 166336, 166337, 166338, 166339, 166340, 166341, 166342, 166343, 166344, 166345, 166346 were selected from the ORFs having the nucleotide sequence represented by SEQ ID NO: 166168.

[14203] The probes having the nucleotide sequence represented by SEQ ID NOS: 166347, 166348, 166349, 166350, 166351, 166352, 166353, 166354, 166355, 166356, 166357 were selected from the ORFs having the nucleotide sequence represented by SEQ ID NO: 166169.

[14204] The probes having the nucleotide sequence represented by SEQ ID NOS: 166358, 166359, 166360, 166361, 166362, 166363, 166364, 166365, 166366, 166367, 166368 were selected from the ORFs having the nucleotide sequence represented by SEQ ID NO: 166170.

[14205] The probes having the nucleotide sequence represented by SEQ ID NOS: 166369, 166370, 166371, 166372, 166373, 166374, 166375, 166376, 166377, 166378, 166379 were selected from the ORFs having the nucleotide sequence represented by SEQ ID NO: 166171.

[14206] The probes having the nucleotide sequence represented by SEQ ID NOS: 166380, 166381, 166382, 166383, 166384, 166385, 166386, 166387, 166388, 166389, 166390 were selected from the ORFs having the nucleotide sequence represented by SEQ ID NO: 166172.

[14207] The probes having the nucleotide sequence represented by SEQ ID NOS: 166391, 166392, 166393, 166394, 166395, 166396, 166397, 166398, 166399, 166400, 166401 were selected from the ORFs having the nucleotide sequence represented by SEQ ID NO: 166173

[14208] The probes having the nucleotide sequence represented by SEQ ID NOS: 166402, 166403, 166404, 166405, 166406, 166407, 166408, 166409, 166410, 166411, 166412 were selected from the ORFs having the nucleotide sequence represented by SEQ ID NO: 166174.

[14209] The probes having the nucleotide sequence represented by SEQ ID NOS: 166413, 166414, 166415, 166416, 166417, 166418, 166419, 166420, 166421, 166422, 166423 were selected from the ORFs having the nucleotide sequence represented by SEQ ID NO: 166175.

[14210] The probes having the nucleotide sequence represented by SEQ ID NOS: 166424, 166425, 166426, 166427, 166428, 166429, 166430, 166431, 166432, 166433, 166434 were selected from the ORFs having the nucleotide sequence represented by SEQ ID NO: 166176.

[14211] The probes having the nucleotide sequence represented by SEQ ID NOS: 166435, 166436, 166437, 166438, 166439, 166440, 166441, 166442, 166443, 166444, 166445 were selected from the ORFs having the nucleotide sequence represented by SEQ ID NO: 166177.

[14212] The probes having the nucleotide sequence represented by SEQ ID NOS: 166446, 166447, 166448, 166449, 166450, 166451, 166452, 166453, 166454, 166455, 166456 were selected from the ORFs having the nucleotide sequence represented by SEQ ID NO: 166178.

[14213] The probes having the nucleotide sequence represented by SEQ ID NOS: 166457, 166458, 166459, 166460, 166461, 166462, 166463, 166464, 166465, 166466, 166467 were selected from the ORFs having the nucleotide sequence represented by SEQ ID NO: 166179.

[14214] The probes having the nucleotide sequence represented by SEQ ID NOS: 166468, 166469, 166470, 166471, 166472, 166473, 166474, 166475, 166476, 166477, 166478 were selected from the ORFs having the nucleotide sequence represented by SEQ ID NO: 166180.

[14215] The probes having the nucleotide sequence represented by SEQ ID NOS: 166479, 166480, 166481, 166482, 166483, 166484, 166485, 166486, 166487, 166488, 166489 were selected from the ORFs having the nucleotide sequence represented by SEQ ID NO: 166181.

[14216] The probes from 553 DNA sequences described as above (1-D) were as follows:

[14217] The probes having the nucleotide sequence represented by SEQ ID NOS: 167043, 167044, 167045, 167046, 167047, 167048, 167049, 167050, 167051, 167052, 167053 were selected from the ORFs having the nucleotide sequence represented by SEQ ID NO: 166490.

[14218] The probes having the nucleotide sequence represented by SEQ ID NOS: 167054, 167055, 167056, 167057, 167058, 167059, 167060, 167061, 167062, 167063, 167064 were selected from the ORFs having the nucleotide sequence represented by SEQ ID NO: 16649.

[14219] The probes having the nucleotide sequence represented by SEQ ID NOS: 167065, 167066, 167067, 167068, 167069, 167070, 167071, 167072, 167073, 167074, 167075 were selected from the ORFs having the nucleotide sequence represented by SEQ ID NO: 166492.

[14220] The probes having the nucleotide sequence represented by SEQ ID NOS: 167076, 167077, 167078, 167079, 167080, 167081, 167082, 167083, 167084, 167085, 167086 were selected from the ORFs having the nucleotide sequence represented by SEQ ID NO: 166493.

[14221] The probes having the nucleotide sequence represented by SEQ ID NOS: 167087, 167088, 167089, 167090, 167091, 167092, 167093, 167094, 167095, 167096, 167097 were selected from the ORFs having the nucleotide sequence represented by SEQ ID NO: 166494.

[14222] The probes having the nucleotide sequence represented by SEQ ID NOS: 167098, 167099, 167100, 167101, 167102, 167103, 167104, 167105, 167106, 167107, 167108 were selected from the ORFs having the nucleotide sequence represented by SEQ ID NO: 166495.

[14223] The probes having the nucleotide sequence represented by SEQ ID NOS: 167109, 167110, 167111, 167112, 167113, 167114, 167115, 167116, 167117, 167118, 167119 were selected from the ORFs having the nucleotide sequence represented by SEQ ID NO: 166496.

[14224] The probes having the nucleotide sequence represented by SEQ ID NOS: 167120, 167121, 167122, 167123, 167124, 167125, 167126, 167127, 167128, 167129, 167130 were selected from the ORFs having the nucleotide sequence represented by SEQ ID NO: 166497.

[14225] The probes having the nucleotide sequence represented by SEQ ID NOS: 167131, 167132, 167133, 167134, 167135, 167136, 167137, 167138, 167139, 167140, 167141 were selected from the ORFs having the nucleotide sequence represented by SEQ ID NO: 166498.

[14226] The probes having the nucleotide sequence represented by SEQ ID NOS: 167142, 167143, 167144, 167145, 167146, 167147, 167148, 167149, 167150, 167151, 167152 were selected from the ORFs having the nucleotide sequence represented by SEQ ID NO: 166499.

[14227] The probes having the nucleotide sequence represented by SEQ ID NOS: 167153, 167154, 167155, 167156, 167157, 167158, 167159, 167160, 167161, 167162, 167163 were selected from the ORFs having the nucleotide sequence represented by SEQ ID NO: 166500.

[14228] The probes having the nucleotide sequence represented by SEQ ID NOS: 167164, 167165, 167166, 167167, 167168, 167169, 167170, 167171, 167172, 167173, 167174 were selected from the ORFs having the nucleotide sequence represented by SEQ ID NO: 166501.

[14229] The probes having the nucleotide sequence represented by SEQ ID NOS: 167175, 167176, 167177, 167178, 167179, 167180, 167181, 167182, 167183, 167184, 167185 were selected from the ORFs having the nucleotide sequence represented by SEQ ID NO: 166502.

[14230] The probes having the nucleotide sequence represented by SEQ ID NOS: 167186, 167187, 167188, 167189, 167190, 167191, 167192, 167193, 167194, 167195, 167196 were selected from the ORFs having the nucleotide sequence represented by SEQ ID NO: 166503.

[14231] The probes having the nucleotide sequence represented by SEQ ID NOS: 167197, 167198, 167199, 167200, 167201, 167202, 167203, 167204, 167205, 167206, 167207 were selected from the ORFs having the nucleotide sequence represented by SEQ ID NO: 166504.

[14232] The probes having the nucleotide sequence represented by SEQ ID NOS: 167208, 167209, 167210, 167211, 167212, 167213, 167214, 167215, 167216, 167217, 167218 were selected from the ORFs having the nucleotide sequence represented by SEQ ID NO: 166505.

[14233] The probes having the nucleotide sequence represented by SEQ ID NOS: 167219, 167220, 167221, 167222, 167223, 167224, 167225, 167226, 167227, 167228, 167229 were selected from the ORFs having the nucleotide sequence represented by SEQ ID NO: 166506.

[14234] The probes having the nucleotide sequence represented by SEQ ID NOS: 167230, 167231, 167232, 167233, 167234, 167235, 167236, 167237, 167238, 167239, 167240 were selected from the ORFs having the nucleotide sequence represented by SEQ ID NO: 166507.

[14235] The probes having the nucleotide sequence represented by SEQ ID NOS: 167241, 167242, 167243, 167244, 167245, 167246, 167247, 167248, 167249, 167250, 167251 were selected from the ORFs having the nucleotide sequence represented by SEQ ID NO: 166508.

[14236] The probes having the nucleotide sequence represented by SEQ ID NOS: 167252, 167253, 167254, 167255, 167256, 167257, 167258, 167259, 167260, 167261, 167262 were selected from the ORFs having the nucleotide sequence represented by SEQ ID NO: 166509.

[14237] The probes having the nucleotide sequence represented by SEQ ID NOS: 167263, 167264, 167265, 167266, 167267, 167268, 167269, 167270, 167271, 167272, 167273 were selected from the ORFs having the nucleotide sequence represented by SEQ ID NO: 166510.

[14238] The probes having the nucleotide sequence represented by SEQ ID NOS: 167274, 167275, 167276, 167277, 167278, 167279, 167280, 167281, 167282, 167283, 167284 were selected from the ORFs having the nucleotide sequence represented by SEQ ID NO: 166511.

[14239] The probes having the nucleotide sequence represented by SEQ ID NOS: 167285, 167286, 167287, 167288, 167289, 167290, 167291, 167292, 167293, 167294, 167295 were selected from the ORFs having the nucleotide sequence represented by SEQ ID NO: 166512.

[14240] The probes having the nucleotide sequence represented by SEQ ID NOS: 167296, 167297, 167298, 167299, 167300, 167301, 167302, 167303, 167304, 167305, 167306 were selected from the ORFs having the nucleotide sequence represented by SEQ ID NO: 166513.

[14241] The probes having the nucleotide sequence represented by SEQ ID NOS: 167307, 167308, 167309, 167310, 167311, 167312, 167313, 167314, 167315, 167316, 167317 were selected from the ORFs having the nucleotide sequence represented by SEQ ID NO: 166514.

[14242] The probes having the nucleotide sequence represented by SEQ ID NOS: 167318, 167319, 167320, 167321, 167322, 167323, 167324, 167325, 167326, 167327, 167328 were selected from the ORFs having the nucleotide sequence represented by SEQ ID NO: 166515.

[14243] The probes having the nucleotide sequence represented by SEQ ID NOS: 167329, 167330, 167331, 167332, 167333, 167334, 167335, 167336, 167337, 167338, 167339 were selected from the ORFs having the nucleotide sequence represented by SEQ ID NO: 166516.

[14244] The probes having the nucleotide sequence represented by SEQ ID NOS: 167340, 167341, 167342, 167343, 167344, 167345, 167346, 167347, 167348, 167349, 167350 were selected from the ORFs having the nucleotide sequence represented by SEQ ID NO: 166517.

[14245] The probes having the nucleotide sequence represented by SEQ ID NOS: 167351, 167352, 167353, 167354, 167355, 167356, 167357, 167358, 167359, 167360, 167361 were selected from the ORFs having the nucleotide sequence represented by SEQ ID NO: 166518.

[14246] The probes having the nucleotide sequence represented by SEQ ID NOS: 167362, 167363, 167364, 167365, 167366, 167367, 167368, 167369, 167370, 167371, 167372 were selected from the ORFs having the nucleotide sequence represented by SEQ ID NO: 166519.

[14247] The probes having the nucleotide sequence represented by SEQ ID NOS: 167373, 167374, 167375, 167376, 167377, 167378, 167379, 167380, 167381, 167382, 167383 were selected from the ORFs having the nucleotide sequence represented by SEQ ID NO: 166520.

[14248] The probes having the nucleotide sequence represented by SEQ ID NOS: 167384, 167385, 167386, 167387, 167388, 167389, 167390, 167391, 167392, 167393, 167394 were selected from the ORFs having the nucleotide sequence represented by SEQ ID NO: 166521.

[14249] The probes having the nucleotide sequence represented by SEQ ID NOS: 167395, 167396, 167397, 167398, 167399, 167400, 167401, 167402, 167403, 167404, 167405 were selected from the ORFs having the nucleotide sequence represented by SEQ ID NO: 166522.

[14250] The probes having the nucleotide sequence represented by SEQ ID NOS: 167406, 167407, 167408, 167409, 167410, 167411, 167412, 167413, 167414, 167415, 167416 were selected from the ORFs having the nucleotide sequence represented by SEQ ID NO: 166523.

[14251] The probes having the nucleotide sequence represented by SEQ ID NOS: 167417, 167418, 167419, 167420, 167421, 167422, 167423, 167424, 167425, 167426, 167427 were selected from the ORFs having the nucleotide sequence represented by SEQ ID NO: 166524.

[14252] The probes having the nucleotide sequence represented by SEQ ID NOS: 167428, 167429, 167430, 167431, 167432, 167433, 167434, 167435, 167436, 167437, 167438 were selected from the ORFs having the nucleotide sequence represented by SEQ ID NO: 166525.

[14253] The probes having the nucleotide sequence represented by SEQ ID NOS: 167439, 167440, 167441, 167442, 167443, 167444, 167445, 167446, 167447, 167448, 167449 were selected from the ORFs having the nucleotide sequence represented by SEQ ID NO: 166526.

[14254] The probes having the nucleotide sequence represented by SEQ ID NOS: 167450, 167451, 167452, 167453, 167454, 167455, 167456, 167457, 167458, 167459, 167460 were selected from the ORFs having the nucleotide sequence represented by SEQ ID NO: 166527.

[14255] The probes having the nucleotide sequence represented by SEQ ID NOS: 167461, 167462, 167463, 167464, 167465, 167466, 167467, 167468, 167469, 167470, 167471 were selected from the ORFs having the nucleotide sequence represented by SEQ ID NO: 166528.

[14256] The probes having the nucleotide sequence represented by SEQ ID NOS: 167472, 167473, 167474, 167475, 167476, 167477, 167478, 167479, 167480, 167481, 167482 were selected from the ORFs having the nucleotide sequence represented by SEQ ID NO: 166529.

[14257] The probes having the nucleotide sequence represented by SEQ ID NOS: 167483, 167484, 167485, 167486, 167487, 167488, 167489, 167490, 167491, 167492, 167493 were selected from the ORFs having the nucleotide sequence represented by SEQ ID NO: 166530.

[14258] The probes having the nucleotide sequence represented by SEQ ID NOS: 167494, 167495, 167496, 167497, 167498, 167499, 167500, 167501, 167502, 167503, 167504 were selected from the ORFs having the nucleotide sequence represented by SEQ ID NO: 166531.

[14259] The probes having the nucleotide sequence represented by SEQ ID NOS: 167505, 167506, 167507, 167508, 167509, 167510, 167511, 167512, 167513, 167514, 167515 were selected from the ORFs having the nucleotide sequence represented by SEQ ID NO: 166532.

[14260] The probes having the nucleotide sequence represented by SEQ ID NOS: 167516, 167517, 167518, 167519, 167520, 167521, 167522, 167523, 167524, 167525, 167526 were selected from the ORFs having the nucleotide sequence represented by SEQ ID NO: 166533.

[14261] The probes having the nucleotide sequence represented by SEQ ID NOS: 167527, 167528, 167529, 167530, 167531, 167532, 167533, 167534, 167535, 167536, 167537 were selected from the ORFs having the nucleotide sequence represented by SEQ ID NO: 166534.

[14262] The probes having the nucleotide sequence represented by SEQ ID NOS: 167538, 167539, 167540, 167541, 167542, 167543, 167544, 167545, 167546, 167547, 167548 were selected from the ORFs having the nucleotide sequence represented by SEQ ID NO: 166535.

[14263] The probes having the nucleotide sequence represented by SEQ ID NOS: 167549, 167550, 167551, 167552, 167553, 167554, 167555, 167556, 167557, 167558, 167559 were selected from the ORFs having the nucleotide sequence represented by SEQ ID NO: 166536.

[14264] The probes having the nucleotide sequence represented by SEQ ID NOS: 167560, 167561, 167562, 167563, 167564, 167565, 167566, 167567, 167568, 167569, 167570 were selected from the ORFs having the nucleotide sequence represented by SEQ ID NO: 166537.

[14265] The probes having the nucleotide sequence represented by SEQ ID NOS: 167571, 167572, 167573, 167574, 167575, 167576, 167577, 167578, 167579, 167580, 167581 were selected from the ORFs having the nucleotide sequence represented by SEQ ID NO: 166538.

[14266] The probes having the nucleotide sequence represented by SEQ ID NOS: 167582, 167583, 167584, 167585, 167586, 167587, 167588, 167589, 167590, 167591, 167592 were selected from the ORFs having the nucleotide sequence represented by SEQ ID NO: 166539.

[14267] The probes having the nucleotide sequence represented by SEQ ID NOS: 167593, 167594, 167595, 167596, 167597, 167598, 167599, 167600, 167601, 167602, 167603 were selected from the ORFs having the nucleotide sequence represented by SEQ ID NO: 166540.

[14268] The probes having the nucleotide sequence represented by SEQ ID NOS: 167604, 167605, 167606, 167607, 167608, 167609, 167610, 167611, 167612, 167613, 167614 were selected from the ORFs having the nucleotide sequence represented by SEQ ID NO: 166541.

[14269] The probes having the nucleotide sequence represented by SEQ ID NOS: 167615, 167616, 167617, 167618, 167619, 167620, 167621, 167622, 167623, 167624, 167625 were selected from the ORFs having the nucleotide sequence represented by SEQ ID NO: 166542.

[14270] The probes having the nucleotide sequence represented by SEQ ID NOS: 167626, 167627, 167628, 167629, 167630, 167631, 167632, 167633, 167634, 167635, 167636 were selected from the ORFs having the nucleotide sequence represented by SEQ ID NO: 166543.

[14271] The probes having the nucleotide sequence represented by SEQ ID NOS: 167637, 167638, 167639, 167640, 167641, 167642, 167643, 167644, 167645, 167646, 167647 were selected from the ORFs having the nucleotide sequence represented by SEQ ID NO: 166544.

[14272] The probes having the nucleotide sequence represented by SEQ ID NOS: 167648, 167649, 167650, 167651, 167652, 167653, 167654, 167655, 167656, 167657, 167658 were selected from the ORFs having the nucleotide sequence represented by SEQ ID NO: 166545.

[14273] The probes having the nucleotide sequence represented by SEQ ID NOS: 167659, 167660, 167661, 167662, 167663, 167664, 167665, 167666, 167667, 167668, 167669 were selected from the ORFs having the nucleotide sequence represented by SEQ ID NO: 166546.

[14274] The probes having the nucleotide sequence represented by SEQ ID NOS: 167670, 167671, 167672, 167673, 167674, 167675, 167676, 167677, 167678, 167679, 167680 were selected from the ORFs having the nucleotide sequence represented by SEQ ID NO: 166547.

[14275] The probes having the nucleotide sequence represented by SEQ ID NOS: 167681, 167682, 167683, 167684, 167685, 167686, 167687, 167688, 167689, 167690, 167691 were selected from the ORFs having the nucleotide sequence represented by SEQ ID NO: 166548.

[14276] The probes having the nucleotide sequence represented by SEQ ID NOS: 167692, 167693, 167694, 167695, 167696, 167697, 167698, 167699, 167700, 167701, 167702 were selected from the ORFs having the nucleotide sequence represented by SEQ ID NO: 166549.

[14277] The probes having the nucleotide sequence represented by SEQ ID NOS: 167703, 167704, 167705, 167706, 167707, 167708, 167709, 167710, 167711, 167712, 167713 were selected from the ORFs having the nucleotide sequence represented by SEQ ID NO: 166550.

[14278] The probes having the nucleotide sequence represented by SEQ ID NOS: 167714, 167715, 167716, 167717, 167718, 167719, 167720, 167721, 167722, 167723, 167724 were selected from the ORFs having the nucleotide sequence represented by SEQ ID NO: 166551.

[14279] The probes having the nucleotide sequence represented by SEQ ID NOS: 167725, 167726, 167727, 167728, 167729, 167730, 167731, 167732, 167733, 167734, 167735 were selected from the ORFs having the nucleotide sequence represented by SEQ ID NO: 166552.

[14280] The probes having the nucleotide sequence represented by SEQ ID NOS: 167736, 167737, 167738, 167739, 167740, 167741, 167742, 167743, 167744, 167745, 167746 were selected from the ORFs having the nucleotide sequence represented by SEQ ID NO: 166553.

[14281] The probes having the nucleotide sequence represented by SEQ ID NOS: 167747, 167748, 167749, 167750, 167751, 167752, 167753, 167754, 167755, 167756, 167757 were selected from the ORFs having the nucleotide sequence represented by SEQ ID NO: 166554.

[14282] The probes having the nucleotide sequence represented by SEQ ID NOS: 167758, 167759, 167760, 167761, 167762, 167763, 167764, 167765, 167766, 167767, 167768 were selected from the ORFs having the nucleotide sequence represented by SEQ ID NO: 166555.

[14283] The probes having the nucleotide sequence represented by SEQ ID NOS: 167769, 167770, 167771, 167772, 167773, 167774, 167775, 167776, 167777, 167778, 167779 were selected from the ORFs having the nucleotide sequence represented by SEQ ID NO: 166556.

[14284] The probes having the nucleotide sequence represented by SEQ ID NOS: 167780, 167781, 167782, 167783, 167784, 167785, 167786, 167787, 167788, 167789, 167790 were selected from the ORFs having the nucleotide sequence represented by SEQ ID NO: 166557.

[14285] The probes having the nucleotide sequence represented by SEQ ID NOS: 167791, 167792, 167793, 167794, 167795, 167796, 167797, 167798, 167799, 167800, 167801 were selected from the ORFs having the nucleotide sequence represented by SEQ ID NO: 166558.

[14286] The probes having the nucleotide sequence represented by SEQ ID NOS: 167802, 167803, 167804, 167805, 167806, 167807, 167808, 167809, 167810, 167811, 167812 were selected from the ORFs having the nucleotide sequence represented by SEQ ID NO: 166559.

[14287] The probes having the nucleotide sequence represented by SEQ ID NOS: 167813, 167814, 167815, 167816, 167817, 167818, 167819, 167820, 167821, 167822, 167823 were selected from the ORFs having the nucleotide sequence represented by SEQ ID NO: 166560.

[14288] The probes having the nucleotide sequence represented by SEQ ID NOS: 167824, 167825, 167826, 167827, 167828, 167829, 167830, 167831, 167832, 167833, 167834 were selected from the ORFs having the nucleotide sequence represented by SEQ ID NO: 166561.

[14289] The probes having the nucleotide sequence represented by SEQ ID NOS: 167835, 167836, 167837, 167838, 167839, 167840, 167841, 167842, 167843, 167844, 167845 were selected from the ORFs having the nucleotide sequence represented by SEQ ID NO: 166562.

[14290] The probes having the nucleotide sequence represented by SEQ ID NOS: 167846, 167847, 167848, 167849, 167850, 167851, 167852, 167853, 167854, 167855, 167856 were selected from the ORFs having the nucleotide sequence represented by SEQ ID NO: 166563.

[14291] The probes having the nucleotide sequence represented by SEQ ID NOS: 167857, 167858, 167859, 167860, 167861, 167862, 167863, 167864, 167865, 167866, 167867 were selected from the ORFs having the nucleotide sequence represented by SEQ ID NO: 166564.

[14292] The probes having the nucleotide sequence represented by SEQ ID NOS: 167868, 167869, 167870, 167871, 167872, 167873, 167874, 167875, 167876, 167877, 167878 were selected from the ORFs having the nucleotide sequence represented by SEQ ID NO: 166565.

[14293] The probes having the nucleotide sequence represented by SEQ ID NOS: 167879, 167880, 167881, 167882, 167883, 167884, 167885, 167886, 167887, 167888, 167889 were selected from the ORFs having the nucleotide sequence represented by SEQ ID NO: 166566.

[14294] The probes having the nucleotide sequence represented by SEQ ID NOS: 167890, 167891, 167892, 167893, 167894, 167895, 167896, 167897, 167898, 167899, 167900 were selected from the ORFs having the nucleotide sequence represented by SEQ ID NO: 166567.

[14295] The probes having the nucleotide sequence represented by SEQ ID NOS: 167901, 167902, 167903, 167904, 167905, 167906, 167907, 167908, 167909, 167910, 167911 were selected from the ORFs having the nucleotide sequence represented by SEQ ID NO: 166568.

[14296] The probes having the nucleotide sequence represented by SEQ ID NOS: 167912, 167913, 167914, 167915, 167916, 167917, 167918, 167919, 167920, 167921, 167922 were selected from the ORFs having the nucleotide sequence represented by SEQ ID NO: 166569.

[14297] The probes having the nucleotide sequence represented by SEQ ID NOS: 167923, 167924, 167925, 167926, 167927, 167928, 167929, 167930, 167931, 167932, 167933 were selected from the ORFs having the nucleotide sequence represented by SEQ ID NO: 166570.

[14298] The probes having the nucleotide sequence represented by SEQ ID NOS: 167934, 167935, 167936, 167937, 167938, 167939, 167940, 167941, 167942, 167943, 167944 were selected from the ORFs having the nucleotide sequence represented by SEQ ID NO: 166571.

[14299] The probes having the nucleotide sequence represented by SEQ ID NOS: 167945, 167946, 167947, 167948, 167949, 167950, 167951, 167952, 167953, 167954, 167955 were selected from the ORFs having the nucleotide sequence represented by SEQ ID NO: 166572.

[14300] The probes having the nucleotide sequence represented by SEQ ID NOS: 167956, 167957, 167958, 167959, 167960, 167961, 167962, 167963, 167964, 167965, 167966 were selected from the ORFs having the nucleotide sequence represented by SEQ ID NO: 166573.

[14301] The probes having the nucleotide sequence represented by SEQ ID NOS: 167967, 167968, 167969, 167970, 167971, 167972, 167973, 167974, 167975, 167976, 167977 were selected from the ORFs having the nucleotide sequence represented by SEQ ID NO: 166574.

[14302] The probes having the nucleotide sequence represented by SEQ ID NOS: 167978, 167979, 167980, 167981, 167982, 167983, 167984, 167985, 167986, 167987, 167988 were selected from the ORFs having the nucleotide sequence represented by SEQ ID NO: 166575.

[14303] The probes having the nucleotide sequence represented by SEQ ID NOS: 167989, 167990, 167991, 167992, 167993, 167994, 167995, 167996, 167997, 167998, 167999 were selected from the ORFs having the nucleotide sequence represented by SEQ ID NO: 166576.

[14304] The probes having the nucleotide sequence represented by SEQ ID NOS: 168000, 168001, 168002, 168003, 168004, 168005, 168006, 168007, 168008, 168009, 168010 were selected from the ORFs having the nucleotide sequence represented by SEQ ID NO: 166577.

[14305] The probes having the nucleotide sequence represented by SEQ ID NOS: 168011, 168012, 168013, 168014, 168015, 168016, 168017, 168018, 168019, 168020, 168021 were selected from the ORFs having the nucleotide sequence represented by SEQ ID NO: 166578.

[14306] The probes having the nucleotide sequence represented by SEQ ID NOS: 168022, 168023, 168024, 168025, 168026, 168027, 168028, 168029, 168030, 168031, 168032 were selected from the ORFs having the nucleotide sequence represented by SEQ ID NO: 166579.

[14307] The probes having the nucleotide sequence represented by SEQ ID NOS: 168033, 168034, 168035, 168036, 168037, 168038, 168039, 168040, 168041, 168042, 168043 were selected from the ORFs having the nucleotide sequence represented by SEQ ID NO: 166580.

[14308] The probes having the nucleotide sequence represented by SEQ ID NOS: 168044, 168045, 168046, 168047, 168048, 168049, 168050, 168051, 168052, 168053, 168054 were selected from the ORFs having the nucleotide sequence represented by SEQ ID NO: 166581.

[14309] The probes having the nucleotide sequence represented by SEQ ID NOS: 168055, 168056, 168057, 168058, 168059, 168060, 168061, 168062, 168063, 168064, 168065 were selected from the ORFs having the nucleotide sequence represented by SEQ ID NO: 166582.

[14310] The probes having the nucleotide sequence represented by SEQ ID NOS: 168066, 168067, 168068, 168069, 168070, 168071, 168072, 168073, 168074, 168075, 168076 were selected from the ORFs having the nucleotide sequence represented by SEQ ID NO: 166583.

[14311] The probes having the nucleotide sequence represented by SEQ ID NOS: 168077, 168078, 168079, 168080, 168081, 168082, 168083, 168084, 168085, 168086, 168087 were selected from the ORFs having the nucleotide sequence represented by SEQ ID NO: 166584.

[14312] The probes having the nucleotide sequence represented by SEQ ID NOS: 168088, 168089, 168090, 168091, 168092, 168093, 168094, 168095, 168096, 168097, 168098 were selected from the ORFs having the nucleotide sequence represented by SEQ ID NO: 166585.

[14313] The probes having the nucleotide sequence represented by SEQ ID NOS: 168099, 168100, 168101, 168102, 168103, 168104, 168105, 168106, 168107, 168108, 168109 were selected from the ORFs having the nucleotide sequence represented by SEQ ID NO: 166586.

[14314] The probes having the nucleotide sequence represented by SEQ ID NOS: 168110, 168111, 168112, 168113, 168114, 168115, 168116, 168117, 168118, 168119, 168120 were selected from the ORFs having the nucleotide sequence represented by SEQ ID NO: 166587.

[14315] The probes having the nucleotide sequence represented by SEQ ID NOS: 168121, 168122, 168123, 168124, 168125, 168126, 168127, 168128, 168129, 168130, 168131 were selected from the ORFs having the nucleotide sequence represented by. SEQ ID NO: 166588.

[14316] The probes having the nucleotide sequence represented by SEQ ID NOS: 168132, 168133, 168134, 168135, 168136, 168137, 168138, 168139, 168140, 168141, 168142 were selected from the ORFs having the nucleotide sequence represented by SEQ ID NO: 166589.

[14317] The probes having the nucleotide sequence represented by SEQ ID NOS: 168143, 168144, 168145, 168146, 168147, 168148, 168149, 168150, 168151, 168152, 168153 were selected from the ORFs having the nucleotide sequence represented by SEQ ID NO: 166590.

[14318] The probes having the nucleotide sequence represented by SEQ ID NOS: 168154, 168155, 168156, 168157, 168158, 168159, 168160, 168161, 168162, 168163, 168164 were selected from he ORFs having the nucleotide sequence represented by SEQ ID NO: 166591.

[14319] The probes having the nucleotide sequence represented by SEQ ID NOS: 168165, 168166, 168167, 168168, 168169, 168170, 168171, 168172, 168173, 168174, 168175 were selected from the ORFs having the nucleotide sequence represented by SEQ ID NO: 166592.

[14320] The probes having the nucleotide sequence represented by SEQ ID NOS: 168176, 168177, 168178, 168179, 168180, 168181, 168182, 168183, 168184, 168185, 168186 were selected from the ORFs having the nucleotide sequence represented by SEQ ID NO: 166593.

[14321] The probes having the nucleotide sequence represented by SEQ ID NOS: 168187, 168188, 168189, 168190, 168191, 168192, 168193, 168194, 168195, 168196, 168197 were selected from the ORFs having the nucleotide sequence represented by SEQ ID NO: 166594.

[14322] The probes having the nucleotide sequence represented by SEQ ID NOS: 168198, 168199, 168200, 168201, 168202, 168203, 168204, 168205, 168206, 168207, 168208 were selected from the ORFs having the nucleotide sequence represented by SEQ ID NO: 166595.

[14323] The probes having the nucleotide sequence represented by SEQ ID NOS: 168209, 168210, 168211, 168212, 168213, 168214, 168215, 168216, 168217, 168218, 168219 were selected from the ORFs having the nucleotide sequence represented by SEQ ID NO: 166596.

[14324] The probes having the nucleotide sequence represented by SEQ ID NOS: 168220, 168221, 168222, 168223, 168224, 168225, 168226, 168227, 168228, 168229, 168230 were selected from the ORFs having the nucleotide sequence represented by SEQ ID NO: 166597.

[14325] The probes having the nucleotide sequence represented by SEQ ID NOS: 168231, 168232, 168233, 168234, 168235, 168236, 168237, 168238, 168239, 168240, 168241 were selected from the ORFs having the nucleotide sequence represented by SEQ ID NO: 166598.

[14326] The probes having the nucleotide sequence represented by SEQ ID NOS: 168242, 168243, 168244, 168245, 168246, 168247, 168248, 168249, 168250, 168251, 168252 were selected from the ORFs having the nucleotide sequence represented by SEQ ID NO: 166599.

[14327] The probes having the nucleotide sequence represented by SEQ ID NOS: 168253, 168254, 168255, 168256, 168257, 168258, 168259, 168260, 168261, 168262, 168263 were selected from the ORFs having the nucleotide sequence represented by SEQ ID NO: 166600.

[14328] The probes having the nucleotide sequence represented by SEQ ID NOS: 168264, 168265, 168266, 168267, 168268, 168269, 168270, 168271, 168272, 168273, 168274 were selected from the ORFs having the nucleotide sequence represented by SEQ ID NO: 166601.

[14329] The probes having the nucleotide sequence represented by SEQ ID NOS: 168275, 168276, 168277, 168278, 168279, 168280, 168281, 168282, 168283, 168284, 168285 were selected from the ORFs having the nucleotide sequence represented by SEQ ID NO: 166602.

[14330] The probes having the nucleotide sequence represented by SEQ ID NOS: 168286, 168287, 168288, 168289, 168290, 168291, 168292, 168293, 168294, 168295, 168296 were selected from the ORFs having the nucleotide sequence represented by SEQ ID NO: 166603.

[14331] The probes having the nucleotide sequence represented by SEQ ID NOS: 168297, 168298, 168299, 168300, 168301, 168302, 168303, 168304, 168305, 168306, 168307 were selected from the ORFs having the nucleotide sequence represented by SEQ ID NO: 166604.

[14332] The probes having the nucleotide sequence represented by SEQ ID NOS: 168308, 168309, 168310, 168311, 168312, 168313, 168314, 168315, 168316, 168317, 168318 were selected from the ORFs having the nucleotide sequence represented by SEQ ID NO: 166605.

[14333] The probes having the nucleotide sequence represented by SEQ ID NOS: 168319, 168320, 168321, 168322, 168323, 168324, 168325, 168326, 168327, 168328, 168329 were selected from the ORFs having the nucleotide sequence represented by SEQ ID NO: 166606.

[14334] The probes having the nucleotide sequence represented by SEQ ID NOS: 168330, 168331, 168332, 168333, 168334, 168335, 168336, 168337, 168338, 168339, 168340 were selected from the ORFs having the nucleotide sequence represented by SEQ ID NO: 166607.

[14335] The probes having the nucleotide sequence represented by SEQ ID NOS: 168341, 168342, 168343, 168344, 168345, 168346, 168347, 168348, 168349, 168350, 168351 were selected from the ORFs having the nucleotide sequence represented by SEQ ID NO: 166608.

[14336] The probes having the nucleotide sequence represented by SEQ ID NOS: 168352, 168353, 168354, 168355, 168356, 168357, 168358, 168359, 168360, 168361, 168362 were selected from the ORFs having the nucleotide sequence represented by SEQ ID NO: 166609.

[14337] The probes having the nucleotide sequence represented by SEQ ID NOS: 168363, 168364, 168365, 168366, 168367, 168368, 168369, 168370, 168371, 168372, 168373 were selected from the ORFs having the nucleotide sequence represented by SEQ ID NO: 166610.

[14338] The probes having the nucleotide sequence represented by SEQ ID NOS: 168374, 168375, 168376, 168377, 168378, 168379, 168380, 168381, 168382, 168383, 168384 were selected from the ORFs having the nucleotide sequence represented by SEQ ID NO: 166611.

[14339] The probes having the nucleotide sequence represented by SEQ ID NOS: 168385, 168386, 168387, 168388, 168389, 168390, 168391, 168392, 168393, 168394, 168395 were selected from the ORFs having the nucleotide sequence represented by SEQ ID NO: 166612.

[14340] The probes having the nucleotide sequence represented by SEQ ID NOS: 168396, 168397, 168398, 168399, 168400, 168401, 168402, 168403, 168404, 168405, 168406 were selected from the ORFs having the nucleotide sequence represented by SEQ ID NO: 166613.

[14341] The probes having the nucleotide sequence represented by SEQ ID NOS: 168407, 168408, 168409, 168410, 168411, 168412, 168413, 168414, 168415, 168416, 168417 were selected from the ORFs having the nucleotide sequence represented by SEQ ID NO: 166614.

[14342] The probes having the nucleotide sequence represented by SEQ ID NOS: 168418, 168419, 168420, 168421, 168422, 168423, 168424, 168425, 168426, 168427, 168428 were selected from the ORFs having the nucleotide sequence represented by SEQ ID NO: 166615.

[14343] The probes having the nucleotide sequence represented by SEQ ID NOS: 168429, 168430, 168431, 168432, 168433, 168434, 168435, 168436, 168437, 168438, 168439 were selected from the ORFs having the nucleotide sequence represented by SEQ ID NO: 166616.

[14344] The probes having the nucleotide sequence represented by SEQ ID NOS: 168440, 168441, 168442, 168443, 168444, 168445, 168446, 168447, 168448, 168449, 168450 were selected from the ORFs having the nucleotide sequence represented by SEQ ID NO: 166617.

[14345] The probes having the nucleotide sequence represented by SEQ ID NOS: 168451, 168452, 168453, 168454, 168455, 168456, 168457, 168458, 168459, 168460, 168461 were selected from the ORFs having the nucleotide sequence represented by SEQ ID NO: 166618.

[14346] The probes having the nucleotide sequence represented by SEQ ID NOS: 168462, 168463, 168464, 168465, 168466, 168467, 168468, 168469, 168470, 168471, 168472 were selected from the ORFs having the nucleotide sequence represented by SEQ ID NO: 166619.

[14347] The probes having the nucleotide sequence represented by SEQ ID NOS: 168473, 168474, 168475, 168476, 168477, 168478, 168479, 168480, 168481, 168482, 168483 were selected from the ORFs having the nucleotide sequence represented by SEQ ID NO: 166620.

[14348] The probes having the nucleotide sequence represented by SEQ ID NOS: 168484, 168485, 168486, 168487, 168488, 168489, 168490, 168491, 168492, 168493, 168494 were selected from the ORFs having the nucleotide sequence represented by SEQ ID NO: 166621.

[14349] The probes having the nucleotide sequence represented by SEQ ID NOS: 168495, 168496, 168497, 168498, 168499, 168500, 168501, 168502, 168503, 168504, 168505 were selected from the ORFs having the nucleotide sequence represented by SEQ ID NO: 166622.

[14350] The probes having the nucleotide sequence represented by SEQ ID NOS: 168506, 168507, 168508, 168509, 168510, 168511, 168512, 168513, 168514, 168515, 168516 were selected from the ORFs having the nucleotide sequence represented by SEQ ID NO: 166623.

[14351] The probes having the nucleotide sequence represented by SEQ ID NOS: 168517, 168518, 168519, 168520, 168521, 168522, 168523, 168524, 168525, 168526, 168527 were selected from the ORFs having the nucleotide sequence represented by SEQ ID NO: 166624.

[14352] The probes having the nucleotide sequence represented by SEQ ID NOS: 168528, 168529, 168530, 168531, 168532, 168533, 168534, 168535, 168536, 168537, 168538 were selected from the ORFs having the nucleotide sequence represented by SEQ ID NO: 166625.

[14353] The probes having the nucleotide sequence represented by SEQ ID NOS: 168539, 168540, 168541, 168542, 168543, 168544, 168545, 168546, 168547, 168548, 168549 were selected from the ORFs having the nucleotide sequence represented by SEQ ID NO: 166626.

[14354] The probes having the nucleotide sequence represented by SEQ ID NOS: 168550, 168551, 168552, 168553, 168554, 168555, 168556, 168557, 168558, 168559, 168560 were selected from the ORFs having the nucleotide sequence represented by SEQ ID NO: 166627.

[14355] The probes having the nucleotide sequence represented by SEQ ID NOS: 168561, 168562, 168563, 168564, 168565, 168566, 168567, 168568, 168569, 168570, 168571 were selected from the ORFs having the nucleotide sequence represented by SEQ ID NO: 166628.

[14356] The probes having the nucleotide sequence represented by SEQ ID NOS: 168572, 168573, 168574, 168575, 168576, 168577, 168578, 168579, 168580, 168581, 168582 were selected from the ORFs having the nucleotide sequence represented by SEQ ID NO: 166629.

[14357] The probes having the nucleotide sequence represented by SEQ ID NOS: 168583, 168584, 168585, 168586, 168587, 168588, 168589, 168590, 168591, 168592, 168593 were selected from the ORFs having the nucleotide sequence represented by SEQ ID NO: 166630.

[14358] The probes having the nucleotide sequence represented by SEQ ID NOS: 168594, 168595, 168596, 168597, 168598, 168599, 168600, 168601, 168602, 168603, 168604 were selected from the ORFs having the nucleotide sequence represented by SEQ ID NO: 166631.

[14359] The probes having the nucleotide sequence represented by SEQ ID NOS: 168605, 168606, 168607, 168608, 168609, 168610, 168611, 168612, 168613, 168614, 168615 were selected from the ORFs having the nucleotide sequence represented by SEQ ID NO: 166632.

[14360] The probes having the nucleotide sequence represented by SEQ ID NOS: 168616, 168617, 168618, 168619, 168620, 168621, 168622, 168623, 168624, 168625, 168626 were selected from the ORFs having the nucleotide sequence represented by SEQ ID NO: 166633.

[14361] The probes having the nucleotide sequence represented by SEQ ID NOS: 168627, 168628, 168629, 168630, 168631, 168632, 168633, 168634, 168635, 168636, 168637 were selected from the ORFs having the nucleotide sequence represented by SEQ ID NO: 166634.

[14362] The probes having the nucleotide sequence represented by SEQ ID NOS: 168638, 168639, 168640, 168641, 168642, 168643, 168644, 168645, 168646, 168647, 168648 were selected from the ORFs having the nucleotide sequence represented by SEQ ID NO: 166635.

[14363] The probes having the nucleotide sequence represented by SEQ ID NOS: 168649, 168650, 168651, 168652, 168653, 168654, 168655, 168656, 168657, 168658, 168659 were selected from the ORFs having the nucleotide sequence represented by SEQ ID NO: 166636.

[14364] The probes having the nucleotide sequence represented by SEQ ID NOS: 168660, 168661, 168662, 168663, 168664, 168665, 168666, 168667, 168668, 168669, 168670 were selected from the ORFs having the nucleotide sequence represented by SEQ ID NO: 166637.

[14365] The probes having the nucleotide sequence represented by SEQ ID NOS: 168671, 168672, 168673, 168674, 168675, 168676, 168677, 168678, 168679, 168680, 168681 were selected from the ORFs having the nucleotide sequence represented by SEQ ID NO: 166638.

[14366] The probes having the nucleotide sequence represented by SEQ ID NOS: 168682, 168683, 168684, 168685, 168686, 168687, 168688, 168689, 168690, 168691, 168692 were selected from the ORFs having the nucleotide sequence represented by SEQ ID NO: 166639.

[14367] The probes having the nucleotide sequence represented by SEQ ID NOS: 168693, 168694, 168695, 168696, 168697, 168698, 168699, 168700, 168701, 168702, 168703 were selected from the ORFs having the nucleotide sequence represented by SEQ ID NO: 166640.

[14368] The probes having the nucleotide sequence represented by SEQ ID NOS: 168704, 168705, 168706, 168707, 168708, 168709, 168710, 168711, 168712, 168713, 168714 were selected from the ORFs having the nucleotide sequence represented by SEQ ID NO: 166641.

[14369] The probes having the nucleotide sequence represented by SEQ ID NOS: 168715, 168716, 168717, 168718, 168719, 168720, 168721, 168722, 168723, 168724, 168725 were selected from the ORFs having the nucleotide sequence represented by SEQ ID NO: 166642.

[14370] The probes having the nucleotide sequence represented by SEQ ID NOS: 168726, 168727, 168728, 168729, 168730, 168731, 168732, 168733, 168734, 168735, 168736 were selected from the ORFs having the nucleotide sequence represented by SEQ ID NO: 166643.

[14371] The probes having the nucleotide sequence represented by SEQ ID NOS: 168737, 168738, 168739, 168740, 168741, 168742, 168743, 168744, 168745, 168746, 168747 were selected from the ORFs having the nucleotide sequence represented by SEQ ID NO: 166644.

[14372] The probes having the nucleotide sequence represented by SEQ ID NOS: 168748., 168749, 168750, 168751, 168752, 168753, 168754, 168755, 168756, 168757, 168758 were selected from the ORFs having the nucleotide sequence represented by SEQ ID NO: 166645.

[14373] The probes having the nucleotide sequence represented by SEQ ID NOS: 168759, 168760, 168761, 168762, 168763, 168764, 168765, 168766, 168767, 168768, 168769 were selected from the ORFs having the nucleotide sequence represented by SEQ ID NO: 166646.

[14374] The probes having the nucleotide sequence represented by SEQ ID NOS: 168770, 168771, 168772, 168773, 168774, 168775, 168776, 168777, 168778, 168779, 168780 were selected from the ORFs having the nucleotide sequence represented by SEQ ID NO: 166647.

[14375] The probes having the nucleotide sequence represented by SEQ ID NOS: 168781, 168782, 168783, 168784, 168785, 168786, 168787, 168788, 168789, 168790, 168791 were selected from the ORFs having the nucleotide sequence represented by SEQ ID NO: 166648.

[14376] The probes having the nucleotide sequence represented by SEQ ID NOS: 168792, 168793, 168794, 168795, 168796, 168797, 168798, 168799, 168800, 168801, 168802 were selected from the ORFs having the nucleotide sequence represented by SEQ ID NO: 166649.

[14377] The probes having the nucleotide sequence represented by SEQ ID NOS: 168803, 168804, 168805, 168806, 168807, 168808, 168809, 168810, 168811, 168812, 168813 were selected from the ORFs having the nucleotide sequence represented by SEQ ID NO: 166650.

[14378] The probes having the nucleotide sequence represented by SEQ ID NOS: 168814, 168815, 168816, 168817, 168818, 168819, 168820, 168821, 168822, 168823, 168824 were selected from the ORFs having the nucleotide sequence represented by SEQ ID NO: 166651.

[14379] The probes having the nucleotide sequence represented by SEQ ID NOS: 168825, 168826, 168827, 168828, 168829, 168830, 168831, 168832, 168833, 168834, 168835 were selected from the ORFs having the nucleotide sequence represented by SEQ ID NO: 166652.

[14380] The probes having the nucleotide sequence represented by SEQ ID NOS: 168836, 168837, 168838, 168839, 168840, 168841, 168842, 168843, 168844, 168845, 168846 were selected from the ORFs having the nucleotide sequence represented by SEQ ID NO: 166653.

[14381] The probes having the nucleotide sequence represented by SEQ ID NOS: 168847, 168848, 168849, 168850, 168851, 168852, 168853, 168854, 168855, 168856, 168857 were selected from the ORFs having the nucleotide sequence represented by SEQ ID NO: 166654.

[14382] The probes having the nucleotide sequence represented by SEQ ID NOS: 168858, 168859, 168860, 168861, 168862, 168863, 168864, 168865, 168866, 168867, 168868 were selected from the ORFs having the nucleotide sequence represented by SEQ ID NO: 166655.

[14383] The probes having the nucleotide sequence represented by SEQ ID NOS: 168869, 168870, 168871, 168872, 168873, 168874, 168875, 168876, 168877, 168878, 168879 were selected from the ORFs having the nucleotide sequence represented by SEQ ID NO: 166656.

[14384] The probes having the nucleotide sequence represented by SEQ ID NOS: 168880, 168881, 168882, 168883, 168884, 168885, 168886, 168887, 168888, 168889, 168890 were selected from the ORFs having the nucleotide sequence represented by SEQ ID NO: 166657.

[14385] The probes having the nucleotide sequence represented by SEQ ID NOS: 168891, 168892, 168893, 168894, 168895, 168896, 168897, 168898, 168899, 168900, 168901 were selected from the ORFs having the nucleotide sequence represented by SEQ ID NO: 166658.

[14386] The probes having the nucleotide sequence represented by SEQ ID NOS: 168902, 168903, 168904, 168905, 168906, 168907, 168908, 168909, 168910, 168911, 168912 were selected from the ORFs having the nucleotide sequence represented by SEQ ID NO: 166659.

[14387] The probes having the nucleotide sequence represented by SEQ ID NOS: 168913, 168914, 168915, 168916, 168917, 168918, 168919, 168920, 168921, 168922, 168923 were selected from the ORFs having the nucleotide sequence represented by SEQ ID NO: 166660.

[14388] The probes having the nucleotide sequence represented by SEQ ID NOS: 168924, 168925, 168926, 168927, 168928, 168929, 168930, 168931, 168932, 168933, 168934 were selected from the ORFs having the nucleotide sequence represented by SEQ ID NO: 166661.

[14389] The probes having the nucleotide sequence represented by SEQ ID NOS: 168935, 168936, 168937, 168938, 168939, 168940, 168941, 168942, 168943, 168944, 168945 were selected from the ORFs having the nucleotide sequence represented by SEQ ID NO: 166662.

[14390] The probes having the nucleotide sequence represented by SEQ ID NOS: 168946, 168947, 168948, 168949, 168950, 168951, 168952, 168953, 168954, 168955, 168956 were selected from the ORFs having the nucleotide sequence represented by SEQ ID NO: 166663.

[14391] The probes having the nucleotide sequence represented by SEQ ID NOS: 168957, 168958, 168959, 168960, 168961, 168962, 168963, 168964, 168965, 168966, 168967 were selected from the ORFs having the nucleotide sequence represented by SEQ ID NO: 166664.

[14392] The probes having the nucleotide sequence represented by SEQ ID NOS: 168968, 168969, 168970, 168971, 168972, 168973, 168974, 168975, 168976, 168977, 168978 were selected from the ORFs having the nucleotide sequence represented by SEQ ID NO: 166665.

[14393] The probes having the nucleotide sequence represented by SEQ ID NOS: 168979, 168980, 168981, 168982, 168983, 168984, 168985, 168986, 168987, 168988, 168989 were selected from the ORFs having the nucleotide sequence represented by SEQ ID NO: 166666.

[14394] The probes having the nucleotide sequence represented by SEQ ID NOS: 168990, 168991, 168992, 168993, 168994, 168995, 168996, 168997, 168998, 168999, 169000 were selected from the ORFs having the nucleotide sequence represented by SEQ ID NO: 166667.

[14395] The probes having the nucleotide sequence represented by SEQ ID NOS: 169001, 169002, 169003, 169004, 169005, 169006, 169007, 169008, 169009, 169010, 169011 were selected from the ORFs having the nucleotide sequence represented by SEQ ID NO: 166668.

[14396] The probes having the nucleotide sequence represented by SEQ ID NOS: 169012, 169013, 169014, 169015, 169016, 169017, 169018, 169019, 169020, 169021, 169022 were selected from the ORFs having the nucleotide sequence represented by SEQ ID NO: 166669.

[14397] The probes having the nucleotide sequence represented by SEQ ID NOS: 169023, 169024, 169025, 169026, 169027, 169028, 169029, 169030, 169031, 169032, 169033 were selected from the ORFs having the nucleotide sequence represented by SEQ ID NO: 166670.

[14398] The probes having the nucleotide sequence represented by SEQ ID NOS: 169034, 169035, 169036, 169037, 169038, 169039, 169040, 169041, 169042, 169043, 169044 were selected from the ORFs having the nucleotide sequence represented by SEQ ID NO: 166671.

[14399] The probes having the nucleotide sequence represented by SEQ ID NOS: 169045, 169046, 169047, 169048, 169049, 169050, 169051, 169052, 169053, 169054, 169055 were selected from the ORFs having the nucleotide sequence represented by SEQ ID NO: 166672.

[14400] The probes having the nucleotide sequence represented by SEQ ID NOS: 169056, 169057, 169058, 169059, 169060, 169061, 169062, 169063, 169064, 169065, 169066 were selected from the ORFs having the nucleotide sequence represented by SEQ ID NO: 166673.

[14401] The probes having the nucleotide sequence represented by SEQ ID NOS: 169067, 169068, 169069, 169070, 169071, 169072, 169073, 169074, 169075, 169076, 169077 were selected from the ORFs having the nucleotide sequence represented by SEQ ID NO: 166674.

[14402] The probes having the nucleotide sequence represented by SEQ ID NOS: 169078, 169079, 169080, 169081, 169082, 169083, 169084, 169085, 169086, 169087, 169088 were selected from the ORFs having the nucleotide sequence represented by SEQ ID NO: 166675.

[14403] The probes having the nucleotide sequence represented by SEQ ID NOS: 169089, 169090, 169091, 169092, 169093, 169094, 169095, 169096, 169097, 169098, 169099 were selected from the ORFs having the nucleotide sequence represented by SEQ ID NO: 166676.

[14404] The probes having the nucleotide sequence represented by SEQ ID NOS: 169100, 169101, 169102, 169103, 169104, 169105, 169106, 169107, 169108, 169109, 169110 were selected from the ORFs having the nucleotide sequence represented by SEQ ID NO: 166677.

[14405] The probes having the nucleotide sequence represented by SEQ ID NOS: 169111, 169112, 169113, 169114, 169115, 169116, 169117, 169118, 169119, 169120, 169121 were selected from the ORFs having the nucleotide sequence represented by SEQ ID NO: 166678.

[14406] The probes having the nucleotide sequence represented by SEQ ID NOS: 169122, 169123, 169124, 169125, 169126, 169127, 169128, 169129, 169130, 169131, 169132 were selected from the ORFs having the nucleotide sequence represented by SEQ ID NO: 166679.

[14407] The probes having the nucleotide sequence represented by SEQ ID NOS: 169133, 169134, 169135, 169136, 169137, 169138, 169139, 169140, 169141, 169142, 169143 were selected from the ORFs having the nucleotide sequence represented by SEQ ID NO: 166680.

[14408] The probes having the nucleotide sequence represented by SEQ ID NOS: 169144, 169145, 169146, 169147, 169148, 169149, 169150, 169151, 169152, 169153, 169154 were selected from the ORFs having the nucleotide sequence represented by SEQ ID NO: 166681.

[14409] The probes having the nucleotide sequence represented by SEQ ID NOS: 169155, 169156, 169157, 169158, 169159, 169160, 169161, 169162, 169163, 169164, 169165 were selected from the ORFs having the nucleotide sequence represented by SEQ ID NO: 166682.

[14410] The probes having the nucleotide sequence represented by SEQ ID NOS: 169166, 169167, 169168, 169169, 169170, 169171, 169172, 169173, 169174, 169175, 169176 were selected from the ORFs having the nucleotide sequence represented by SEQ ID NO: 166683.

[14411] The probes having the nucleotide sequence represented by SEQ ID NOS: 169177, 169178, 169179, 169180, 169181, 169182, 169183, 169184, 169185, 169186, 169187 were selected from the ORFs having the nucleotide sequence represented by SEQ ID NO: 166684.

[14412] The probes having the nucleotide sequence represented by SEQ ID NOS: 169188, 169189, 169190, 169191, 169192, 169193, 169194, 169195, 169196, 169197, 169198 were selected from the ORFs having the nucleotide sequence represented by SEQ ID NO: 166685.

[14413] The probes having the nucleotide sequence represented by SEQ ID NOS: 169199, 169200, 169201, 169202, 169203, 169204, 169205, 169206, 169207, 169208, 169209 were selected from the ORFs having the nucleotide sequence represented by SEQ ID NO: 166686.

[14414] The probes having the nucleotide sequence represented by SEQ ID NOS: 169210, 169211, 169212, 169213, 169214, 169215, 169216, 169217, 169218, 169219, 169220 were selected from the ORFs having the nucleotide sequence represented by SEQ ID NO: 166687.

[14415] The probes having the nucleotide sequence represented by SEQ ID NOS: 169221, 169222, 169223, 169224, 169225, 169226, 169227, 169228, 169229, 169230, 169231 were selected from the ORFs having the nucleotide sequence represented by SEQ ID NO: 166688.

[14416] The probes having the nucleotide sequence represented by SEQ ID NOS: 169232, 169233, 169234, 169235, 169236, 169237, 169238, 169239, 169240, 169241, 169242 were selected from the ORFs having the nucleotide sequence represented by SEQ ID NO: 166689.

[14417] The probes having the nucleotide sequence represented by SEQ ID NOS: 169243, 169244, 169245, 169246, 169247, 169248, 169249, 169250, 169251, 169252, 169253 were selected from the ORFs having the nucleotide sequence represented by SEQ ID NO: 166690.

[14418] The probes having the nucleotide sequence represented by SEQ ID NOS: 169254, 169255, 169256, 169257, 169258, 169259, 169260, 169261, 169262, 169263, 169264 were selected from the ORFs having the nucleotide sequence represented by SEQ ID NO: 166691.

[14419] The probes having the nucleotide sequence represented by SEQ ID NOS: 169265, 169266, 169267, 169268, 169269, 169270, 169271, 169272, 169273, 169274, 169275 were selected from the ORFs having the nucleotide sequence represented by SEQ ID NO: 166692.

[14420] The probes having the nucleotide sequence represented by SEQ ID NOS: 169276, 169277, 169278, 169279, 169280, 169281, 169282, 169283, 169284, 169285, 169286 were selected from the ORFs having the nucleotide sequence represented by SEQ ID NO: 166693.

[14421] The probes having the nucleotide sequence represented by SEQ ID NOS: 169287, 169288, 169289, 169290, 169291, 169292, 169293, 169294, 169295, 169296, 169297 were selected from the ORFs having the nucleotide sequence represented by SEQ ID NO: 166694.

[14422] The probes having the nucleotide sequence represented by SEQ ID NOS: 169298, 169299, 169300, 169301, 169302, 169303, 169304, 169305, 169306, 169307, 169308 were selected from the ORFs having the nucleotide sequence represented by SEQ ID NO: 166695.

[14423] The probes having the nucleotide sequence represented by SEQ ID NOS: 169309, 169310, 169311, 169312, 169313, 169314, 169315, 169316, 169317, 169318, 169319 were selected from the ORFs having the nucleotide sequence represented by SEQ ID NO: 166696.

[14424] The probes having the nucleotide sequence represented by SEQ ID NOS: 169320, 169321, 169322, 169323, 169324, 169325, 169326, 169327, 169328, 169329, 169330 were selected from the ORFs having the nucleotide sequence represented by SEQ ID NO: 166697.

[14425] The probes having the nucleotide sequence represented by SEQ ID NOS: 169331, 169332, 169333, 169334, 169335, 169336, 169337, 169338, 169339, 169340, 169341 were selected from the ORFs having the nucleotide sequence represented by SEQ ID NO: 166698.

[14426] The probes having the nucleotide sequence represented by SEQ ID NOS: 169342, 169343, 169344, 169345, 169346, 169347, 169348, 169349, 169350, 169351, 169352 were selected from the ORFs having the nucleotide sequence represented by SEQ ID NO: 166699.

[14427] The probes having the nucleotide sequence represented by SEQ ID NOS: 169353, 169354, 169355, 169356, 169357, 169358, 169359, 169360, 169361, 169362, 169363 were selected from the ORFs having the nucleotide sequence represented by SEQ ID NO: 166700.

[14428] The probes having the nucleotide sequence represented by SEQ ID NOS: 169364, 169365, 169.366, 169367, 169368, 169369, 169370, 169371, 169372, 169373, 169374 were selected from the ORFs having the nucleotide sequence represented by SEQ ID NO: 166701.

[14429] The probes having the nucleotide sequence represented by SEQ ID NOS: 169375, 169376, 169377, 169378, 169379, 169380, 169381, 169382, 169383, 169384, 169385 were selected from the ORFs having the nucleotide sequence represented by SEQ ID NO: 166702.

[14430] The probes having the nucleotide sequence represented by SEQ ID NOS: 169386, 169387, 169388, 169389, 169390, 169391, 169392, 169393, 169394, 169395, 169396 were selected from the ORFs having the nucleotide sequence represented by SEQ ID NO: 166703.

[14431] The probes having the nucleotide sequence represented by SEQ ID NOS: 169397, 169398, 169399, 169400, 169401, 169402, 169403, 169404, 169405, 169406, 169407 were selected from the ORFs having the nucleotide sequence represented by SEQ ID NO: 166704.

[14432] The probes having the nucleotide sequence represented by SEQ ID NOS: 169408, 169409, 169410, 169411, 169412, 169413, 169414, 169415, 169416, 169417, 169418 were selected from the ORFs having the nucleotide sequence represented by SEQ ID NO: 166705.

[14433] The probes having the nucleotide sequence represented by SEQ ID NOS: 169419, 169420, 169421, 169422, 169423, 169424, 169425, 169426, 169427, 169428, 169429 were selected from the ORFs having the nucleotide sequence represented by SEQ ID NO: 166706.

[14434] The probes having the nucleotide sequence represented by SEQ ID NOS: 169430, 169431, 169432, 169433, 169434, 169435, 169436, 169437, 169438, 169439, 169440 were selected from the ORFs having the nucleotide sequence represented by SEQ ID NO: 166707.

[14435] The probes having the nucleotide sequence represented by SEQ ID NOS: 169441, 169442, 169443, 169444, 169445, 169446, 169447, 169448, 169449, 169450, 169451 were selected from the ORFs having the nucleotide sequence represented by SEQ ID NO: 166708.

[14436] The probes having the nucleotide sequence represented by SEQ ID NOS: 169452, 169453, 169454, 169455, 169456, 169457, 169458, 169459, 169460, 169461, 169462 were selected from the ORFs having the nucleotide sequence represented by SEQ ID NO: 166709.

[14437] The probes having the nucleotide sequence represented by SEQ ID NOS: 169463, 169464, 169465, 169466, 169467, 169468, 169469, 169470, 169471, 169472, 169473 were selected from the ORFs having the nucleotide sequence represented by SEQ ID NO: 166710.

[14438] The probes having the nucleotide sequence represented by SEQ ID NOS: 169474, 169475, 169476, 169477, 169478, 169479, 169480, 169481, 169482, 169483, 169484 were selected from the ORFs having the nucleotide sequence represented by SEQ ID NO: 166711.

[14439] The probes having the nucleotide sequence represented by SEQ ID NOS: 169485, 169486, 169487, 169488, 169489, 169490, 169491, 169492, 169493, 169494, 169495 were selected from the ORFs having the nucleotide sequence represented by SEQ ID NO: 166712.

[14440] The probes having the nucleotide sequence represented by SEQ ID NOS: 169496, 169497, 169498, 169499, 169500, 169501, 169502, 169503, 169504, 169505, 169506 were selected from the ORFs having the nucleotide sequence represented by SEQ ID NO: 166713.

[14441] The probes having the nucleotide sequence represented by SEQ ID NOS: 169507, 169508, 169509, 169510, 169511, 169512, 169513, 169514, 169515, 169516, 169517 were selected from the ORFs having the nucleotide sequence represented by SEQ ID NO: 166714.

[14442] The probes having the nucleotide sequence represented by SEQ ID NOS: 169518, 169519, 169520, 169521, 169522, 169523, 169524, 169525, 169526, 169527, 169528 were selected from the ORFs having the nucleotide sequence represented by SEQ ID NO: 166715.

[14443] The probes having the nucleotide sequence represented by SEQ ID NOS: 169529., 169530, 169531, 169532, 169533, 169534, 169535, 169536, 169537, 169538, 169539 were selected from the ORFs having the nucleotide sequence represented by SEQ ID NO: 166716.

[14444] The probes having the nucleotide sequence represented by SEQ ID NOS: 169540, 169541, 169542, 169543, 169544, 169545, 169546, 169547, 169548, 169549, 169550 were selected from the ORFs having the nucleotide sequence represented by SEQ ID NO: 166717.

[14445] The probes having the nucleotide sequence represented by SEQ ID NOS: 169551, 169552, 169553, 169554, 169555, 169556, 169557, 169558, 169559, 169560, 169561 were selected from the ORFs having the nucleotide sequence represented by SEQ ID NO: 166718.

[14446] The probes having the nucleotide sequence represented by SEQ ID NOS: 169562, 169563, 169564, 169565, 169566, 169567, 169568, 169569, 169570, 169571, 169572 were selected from the ORFs having the nucleotide sequence represented by SEQ ID NO: 166719.

[14447] The probes having the nucleotide sequence represented by SEQ ID NOS: 169573, 169574, 169575, 169576, 169577, 169578, 169579, 169580, 169581, 169582, 169583 were selected from the ORFs having the nucleotide sequence represented by SEQ ID NO: 166720.

[14448] The probes having the nucleotide sequence represented by SEQ ID NOS: 169584, 169585, 169586, 169587, 169588, 169589, 169590, 169591, 169592, 169593, 169594 were selected from the ORFs having the nucleotide sequence represented by SEQ ID NO: 166721.

[14449] The probes having the nucleotide sequence represented by SEQ ID NOS: 169595, 169596, 169597, 169598, 169599, 169600, 169601, 169602, 169603, 169604, 169605 were selected from the ORFs having the nucleotide sequence represented by SEQ ID NO: 166722.

[14450] The probes having the nucleotide sequence represented by SEQ ID NOS: 169606, 169607, 169608, 169609, 169610, 169611, 169612, 169613, 169614, 169615, 169616 were selected from the ORFs having the nucleotide sequence represented by SEQ ID NO: 166723.

[14451] The probes having the nucleotide sequence represented by SEQ ID NOS: 169617, 169618, 169619, 169620, 169621, 169622, 169623, 169624, 169625, 169626, 169627 were selected from the ORFs having the nucleotide sequence represented by SEQ ID NO: 166724.

[14452] The probes having the nucleotide sequence represented by SEQ ID NOS: 169628, 169629, 169630, 169631, 169632, 169633, 169634, 169635, 169636, 169637, 169638 were selected from the ORFs having the nucleotide sequence represented by SEQ ID NO: 166725.

[14453] The probes having the nucleotide sequence represented by SEQ ID NOS: 169639, 169640, 169641, 169642, 169643, 169644, 169645, 169646, 169647, 169648, 169649 were selected from the ORFs having the nucleotide sequence represented by SEQ ID NO: 166726.

[14454] The probes having the nucleotide sequence represented by SEQ ID NOS: 169650, 169651, 169652, 169653, 169654, 169655, 169656, 169657, 169658, 169659, 169660 were selected from the ORFs having the nucleotide sequence represented by SEQ ID NO: 166727.

[14455] The probes having the nucleotide sequence represented by SEQ ID NOS: 169661, 169662, 169663, 169664, 169665, 169666, 169667, 169668, 169669, 169670, 169671 were selected from the ORFs having the nucleotide sequence represented by SEQ ID NO: 166728.

[14456] The probes having the nucleotide sequence represented by SEQ ID NOS: 169672, 169673, 169674, 169675, 169676, 169677, 169678, 169679, 169680, 169681, 169682 were selected from the ORFs having the nucleotide sequence represented by SEQ ID NO: 166729.

[14457] The probes having the nucleotide sequence represented by SEQ ID NOS: 169683, 169684, 169685, 169686, 169687, 169688, 169689, 169690, 169691, 169692, 169693 were selected from the ORFs having the nucleotide sequence represented by SEQ ID NO: 166730.

[14458] The probes having the nucleotide sequence represented by SEQ ID NOS: 169694, 169695, 169696, 169697, 169698, 169699, 169700, 169701, 169702, 169703, 169704 were selected from the ORFs having the nucleotide sequence represented by SEQ ID NO: 166731.

[14459] The probes having the nucleotide sequence represented by SEQ ID NOS: 169705, 169706, 169707, 169708, 169709, 169710, 169711, 169712, 169713, 169714, 169715 were selected from the ORFs having the nucleotide sequence represented by SEQ ID NO: 166732.

[14460] The probes having the nucleotide sequence represented by SEQ ID NOS: 169716, 169717, 169718, 169719, 169720, 169721, 169722, 169723, 169724, 169725, 169726 were selected from the ORFs having the nucleotide sequence represented by SEQ ID NO: 166733.

[14461] The probes having the nucleotide sequence represented by SEQ ID NOS: 169727, 169728, 169729, 169730, 169731, 169732, 169733, 169734, 169735, 169736, 169737 were selected from the ORFs having the nucleotide sequence represented by SEQ ID NO: 166734.

[14462] The probes having the nucleotide sequence represented by SEQ ID NOS: 169738, 169739, 169740, 169741, 169742, 169743, 169744, 169745, 169746, 169747, 169748 were selected from the ORFs having the nucleotide sequence represented by SEQ ID NO: 166735.

[14463] The probes having the nucleotide sequence represented by SEQ ID NOS: 169749, 169750, 169751, 169752, 169753, 169754, 169755, 169756, 169757, 169758, 169759 were selected from the ORFs having the nucleotide sequence represented by SEQ ID NO: 166736.

[14464] The probes having the nucleotide sequence represented by SEQ. ID NOS: 169760, 169761, 169762, 169763, 169764, 169765, 169766, 169767, 169768, 169769, 169770 were selected from the ORFs having the nucleotide sequence represented by SEQ ID NO: 166737.

[14465] The probes having the nucleotide sequence represented by SEQ ID NOS: 169771, 169772, 169773, 169774, 169775, 169776, 169777, 169778, 169779, 169780, 169781 were selected from the ORFs having the nucleotide sequence represented by SEQ ID NO: 166738.

[14466] The probes having the nucleotide sequence represented by SEQ ID NOS: 169782, 169783, 169784, 169785, 169786, 169787, 169788, 169789, 169790, 169791, 169792 were selected from the ORFs having the nucleotide sequence represented by SEQ ID NO: 166739.

[14467] The probes having the nucleotide sequence represented by SEQ ID NOS: 169793, 169794, 169795, 169796, 169797, 169798, 169799, 169800, 169801, 169802, 169803 were selected from the ORFs having the nucleotide sequence represented by SEQ ID NO: 166740.

[14468] The probes having the nucleotide sequence represented by SEQ ID NOS: 169804, 169805, 169806, 169807, 169808, 169809, 169810, 169811, 169812, 169813, 169814 were selected from the ORFs having the nucleotide sequence represented by SEQ ID NO: 166741.

[14469] The probes having the nucleotide sequence represented by SEQ ID NOS: 169815, 169816, 169817, 169818, 169819, 169820, 169821, 169822, 169823, 169824, 169825 were selected from the ORFs having the nucleotide sequence represented by SEQ ID NO: 166742.

[14470] The probes having the nucleotide sequence represented by SEQ ID NOS: 169826, 169827, 169828, 169829, 169830, 169831, 169832, 169833, 169834, 169835, 169836 were selected from the ORFs having the nucleotide sequence represented by SEQ ID NO: 166743.

[14471] The probes having the nucleotide sequence represented by SEQ ID NOS: 169837, 169838, 169839, 169840, 169841, 169842, 169843, 169844, 169845, 169846, 169847 were selected from the ORFs having the nucleotide sequence represented by SEQ ID NO: 166744.

[14472] The probes having the nucleotide sequence represented by SEQ ID NOS: 169848, 169849, 169850, 169851, 169852, 169853, 169854, 169855, 169856, 169857, 169858 were selected from the ORFs having the nucleotide sequence represented by SEQ ID NO: 166745.

[14473] The probes having the nucleotide sequence represented by SEQ ID NOS: 169859, 169860, 169861, 169862, 169863, 169864, 169865, 169866, 169867, 169868, 169869 were selected from the ORFs having the nucleotide sequence represented by SEQ ID NO: 166746.

[14474] The probes having the nucleotide sequence represented by SEQ ID NOS: 169870, 169871, 169872, 169873, 169874, 169875, 169876, 169877, 169878, 169879, 169880 were selected from the ORFs having the nucleotide sequence represented by SEQ ID NO: 166747.

[14475] The probes having the nucleotide sequence represented by SEQ ID NOS: 169881, 169882, 169883, 169884, 169885, 169886, 169887, 169888, 169889, 169890, 169891 were selected from the ORFs having the nucleotide sequence represented by SEQ ID NO: 166748.

[14476] The probes having the nucleotide sequence represented by SEQ ID NOS: 169892, 169893, 169894, 169895, 169896, 169897, 169898, 169899, 169900, 169901, 169902 were selected from the ORFs having the nucleotide sequence represented by SEQ ID NO: 166749.

[14477] The probes having the nucleotide sequence represented by SEQ ID NOS: 169903, 169904, 169905, 169906, 169907, 169908, 169909, 169910, 169911, 169912, 169913 were selected from the ORFs having the nucleotide sequence represented by SEQ ID NO: 166750.

[14478] The probes having the nucleotide sequence represented by SEQ ID NOS: 169914, 169915, 169916, 169917, 169918, 169919, 169920, 169921, 169922, 169923, 169924 were selected from the ORFs having the nucleotide sequence represented by SEQ ID NO: 166751.

[14479] The probes having the nucleotide sequence represented by SEQ ID NOS: 169925, 169926, 169927, 169928, 169929, 169930, 169931, 169932, 169933, 169934, 169935 were selected from the ORFs having the nucleotide sequence represented by SEQ ID NO: 166752.

[14480] The probes having the nucleotide sequence represented by SEQ ID NOS: 169936, 169937, 169938, 169939, 169940, 169941, 169942, 169943, 169944, 169945, 169946 were selected from the ORFs having the nucleotide sequence represented by SEQ ID NO: 166753.

[14481] probes having the nucleotide sequence represented by SEQ ID NOS: 169947, 169948, 169949, 169950, 169951, 169952, 169953, 169954, 169955, 169956, 169957 were selected from the ORFs having the nucleotide sequence represented by SEQ ID NO: 166754.

[14482] The probes having the nucleotide sequence represented by SEQ ID NOS: 169958, 169959, 169960, 169961, 169962, 169963, 169964, 169965, 169966, 169967, 169968 were selected from the ORFs having the nucleotide sequence represented by SEQ ID NO: 166755.

[14483] The probes having the nucleotide sequence represented by SEQ ID NOS: 169969, 169970, 169971, 169972, 169973, 169974, 169975, 169976, 169977, 169978, 169979 were selected from the ORFs having the nucleotide sequence represented by SEQ ID NO: 166756.

[14484] The probes having the nucleotide sequence represented by SEQ ID NOS: 169980, 169981, 169982, 169983, 169984, 169985, 169986, 169987, 169988, 169989, 169990 were selected from the ORFs having the nucleotide sequence represented by SEQ ID NO: 166757.

[14485] The probes having the nucleotide sequence represented by SEQ ID NOS: 169991, 169992, 169993, 169994, 169995, 169996, 169997, 169998, 169999, 170000, 170001 were selected from the ORFs having the nucleotide sequence represented by SEQ ID NO: 166758.

[14486] The probes having the nucleotide sequence represented by SEQ ID NOS: 170002, 170003, 170004, 170005, 170006, 170007, 170008, 170009, 170010, 170011, 170012 were selected from the ORFs having the nucleotide sequence represented by SEQ ID NO: 166759.

[14487] The probes having the nucleotide sequence represented by SEQ ID NOS: 170013, 170014, 170015, 170016, 170017, 170018, 170019, 170020, 170021, 170022, 170023 were selected from the ORFs having the nucleotide sequence represented by SEQ ID NO: 166760.

[14488] The probes having the nucleotide sequence represented by SEQ ID NOS: 170024, 170025, 170026, 170027, 170028, 170029, 170030, 170031, 170032, 170033, 170034 were selected from the ORFs having the nucleotide sequence represented by SEQ ID NO: 166761.

[14489] The probes having the nucleotide sequence represented by SEQ ID NOS: 170035, 170036, 170037, 170038, 170039, 170040, 170041, 170042, 170043, 170044, 170045 were selected from the ORFs having the nucleotide sequence represented by SEQ ID NO: 166762.

[14490] The probes having the nucleotide sequence represented by SEQ ID NOS: 170046, 170047, 170048, 170049, 170050, 170051, 170052, 170053, 170054, 170055, 170056 were selected from the ORFs having the nucleotide sequence represented by SEQ ID NO: 166763.

[14491] The probes having the nucleotide sequence represented by SEQ ID NOS: 170057, 170058, 170059, 170060, 170061, 170062, 170063, 170064, 170065, 170066, 170067 were selected from the ORFs having the nucleotide sequence represented by SEQ ID NO: 166764.

[14492] The probes having the nucleotide sequence represented by SEQ ID NOS: 170068, 170069, 170070, 170071, 170072, 170073, 170074, 170075, 170076, 170077, 170078 were selected from the ORFs having the nucleotide sequence represented by SEQ ID NO: 166765.

[14493] The probes having the nucleotide sequence represented by SEQ ID NOS: 170079, 170080, 170081, 170082, 170083, 170084, 170085, 170086, 170087, 170088, 170089 were selected from the ORFs having the nucleotide sequence represented by SEQ ID NO: 166766.

[14494] The probes having the nucleotide sequence represented by SEQ ID NOS: 170090, 170091, 170092, 170093, 170094, 170095, 170096, 170097, 170098, 170099, 170100 were selected from the ORFs having the nucleotide sequence represented by SEQ ID NO: 166767.

[14495] The probes having the nucleotide sequence represented by SEQ ID NOS: 170101, 170102, 170103, 170104, 170105, 170106, 170107, 170108, 170109, 170110, 170111 were selected from the ORFs having the nucleotide sequence represented by SEQ ID NO: 166768.

[14496] The probes having the nucleotide sequence represented by SEQ ID NOS: 170112, 170113, 170114, 170115, 170116, 170117, 170118, 170119, 170120, 170121, 170122 were selected from the ORFs having the nucleotide sequence represented by SEQ ID NO: 166769.

[14497] The probes having the nucleotide sequence represented by SEQ ID NOS: 170123, 170124, 170125, 170126, 170127, 170128, 170129, 170130, 170131, 170132, 170133 were selected from the ORFs having the nucleotide sequence represented by SEQ ID NO: 166770.

[14498] The probes having the nucleotide sequence represented by SEQ ID NOS: 170134, 170135, 170136, 170137, 170138, 170139, 170140, 170141, 170142, 170143, 170144 were selected from the ORFs having the nucleotide sequence represented by SEQ ID NO: 166771.

[14499] The probes having the nucleotide sequence represented by SEQ ID NOS: 170145, 170146, 170147, 170148, 170149, 170150, 170151, 170152, 170153, 170154, 170155 were selected from the ORFs having the nucleotide sequence represented by SEQ ID NO: 166772.

[14500] The probes having the nucleotide sequence represented by SEQ ID NOS: 170156, 170157, 170158, 170159, 170160, 170161, 170162, 170163, 170164, 170165, 170166 were selected from the ORFs having the nucleotide sequence represented by SEQ ID NO: 166773.

[14501] The probes having the nucleotide sequence represented by SEQ ID NOS: 170167, 170168, 170169, 170170, 170171, 170172, 170173, 170174, 170175, 170176, 170177 were selected from the ORFs having the nucleotide sequence represented by SEQ ID NO: 166774.

[14502] The probes having the nucleotide sequence represented by SEQ ID NOS: 170178, 170179, 170180, 170181, 170182, 170183, 170184, 170185, 170186, 170187, 170188 were selected from the ORFs having the nucleotide sequence represented by SEQ ID NO: 166775.

[14503] The probes having the nucleotide sequence represented by SEQ ID NOS: 170189, 170190, 170191, 170192, 170193, 170194, 170195, 170196, 170197, 170198, 170199 were selected from the ORFs having the nucleotide sequence represented by SEQ ID NO: 166776.

[14504] The probes having the nucleotide sequence represented by SEQ ID NOS: 170200, 170201, 170202, 170203, 170204, 170205, 170206, 170207, 170208, 170209, 170210 were selected from the ORFs having the nucleotide sequence represented by SEQ ID NO: 166777.

[14505] The probes having the nucleotide sequence represented by SEQ ID NOS: 170211, 170212, 170213, 170214, 170215, 170216, 170217, 170218, 170219, 170220, 170221 were selected from the ORFs having the nucleotide sequence represented by SEQ ID NO: 166778.

[14506] The probes having the nucleotide sequence represented by SEQ ID NOS: 170222, 170223, 170224, 170225, 170226, 170227, 170228, 170229, 170230, 170231, 170232 were selected from the ORFs having the nucleotide sequence represented by SEQ ID NO: 166779.

[14507] The probes having the nucleotide sequence represented by SEQ ID NOS: 170233, 170234, 170235, 170236, 170237, 170238, 170239, 170240, 170241, 170242, 170243 were selected from the ORFs having the nucleotide sequence represented by SEQ ID NO: 166780.

[14508] The probes having the nucleotide sequence represented by SEQ ID NOS: 170244, 170245, 170246, 170247, 170248, 170249, 170250, 170251, 170252, 170253, 170254 were selected from the ORFs having the nucleotide sequence represented by SEQ ID NO: 166781.

[14509] The probes having the nucleotide sequence represented by SEQ ID NOS: 170255, 170256, 170257, 170258, 170259, 170260, 170261, 170262, 170263, 170264, 170265 were selected from the ORFs having the nucleotide sequence represented by SEQ ID NO: 166782.

[14510] The probes having the nucleotide sequence represented by SEQ ID NOS: 170266, 170267, 170268, 170269, 170270, 170271, 170272, 170273, 170274, 170275, 170276 were selected from the ORFs having the nucleotide sequence represented by SEQ ID NO: 166783.

[14511] The probes having the nucleotide sequence represented by SEQ ID NOS: 170277, 170278, 170279, 170280, 170281, 170282, 170283, 170284, 170285, 170286, 170287 were selected from the ORFs having the nucleotide sequence represented by SEQ ID NO: 166784.

[14512] The probes having the nucleotide sequence represented by SEQ ID NOS: 170288, 170289, 170290, 170291, 170292, 170293, 170294, 170295, 170296, 170297, 170298 were selected from the ORFs having the nucleotide sequence represented by SEQ ID NO: 166785.

[14513] The probes having the nucleotide sequence represented by SEQ ID NOS: 170299, 170300, 170301, 170302, 170303, 170304, 170305, 170306, 170307, 170308, 170309 were selected from the ORFs having the nucleotide sequence represented by SEQ ID NO: 166786.

[14514] The probes having the nucleotide sequence represented by SEQ ID NOS: 170310, 170311, 170312, 170313, 170314, 170315, 170316, 170317, 170318, 170319, 170320 were selected from the ORFs having the nucleotide sequence represented by SEQ ID NO: 166787.

[14515] The probes having the nucleotide sequence represented by SEQ ID NOS: 170321, 170322, 170323, 170324, 170325, 170326, 170327, 170328, 170329, 170330, 170331 were selected from the ORFs having the nucleotide sequence represented by SEQ ID NO: 166788.

[14516] The probes having the nucleotide sequence represented by SEQ ID NOS: 170332, 170333, 170334, 170335, 170336, 170337, 170338, 170339, 170340, 170341, 170342 were selected from the ORFs having the nucleotide sequence represented by SEQ ID NO: 166789.

[14517] The probes having the nucleotide sequence represented by SEQ ID NOS: 170343, 170344, 170345, 170346, 170347, 170348, 170349, 170350, 170351, 170352, 170353 were selected from the ORFs having the nucleotide sequence represented by SEQ ID NO: 166790.

[14518] The probes having the nucleotide sequence represented by SEQ ID NOS: 170354, 170355, 170356, 170357, 170358, 170359, 170360, 170361, 170362, 170363, 170364 were selected from the ORFs having the nucleotide sequence represented by SEQ ID NO: 166791.

[14519] The probes having the nucleotide sequence represented by SEQ ID NOS: 170365, 170366, 170367, 170368, 170369, 170370, 170371, 170372, 170373, 170374, 170375 were selected from the ORFs having the nucleotide sequence represented by SEQ ID NO: 166792.

[14520] The probes having the nucleotide sequence represented by SEQ ID NOS: 170376, 170377, 170378, 170379, 170380, 170381, 170382, 170383, 170384, 170385, 170386 were selected from the ORFs having the nucleotide sequence represented by SEQ ID NO: 166793.

[14521] The probes having the nucleotide sequence represented by SEQ ID NOS: 170387, 170388, 170389, 170390, 170391, 170392, 170393, 170394, 170395, 170396, 170397 were selected from the ORFs having the nucleotide sequence represented by SEQ ID NO: 166794.

[14522] The probes having the nucleotide sequence represented by SEQ ID NOS: 170398, 170399, 170400, 170401, 170402, 170403, 170404, 170405, 170406, 170407, 170408 were selected from the ORFs having the nucleotide sequence represented by SEQ ID NO: 166795.

[14523] The probes having the nucleotide sequence represented by SEQ ID NOS: 170409, 170410, 170411, 170412, 170413, 170414, 170415, 170416, 170417, 170418, 170419 were selected from the ORFs having the nucleotide sequence represented by SEQ ID NO: 166796.

[14524] The probes having the nucleotide sequence represented by SEQ ID NOS: 170420, 170421, 170422, 170423, 170424, 170425, 170426, 170427, 170428, 170429, 170430 were selected from the ORFs having the nucleotide sequence represented by SEQ ID NO: 166797.

[14525] The probes having the nucleotide sequence represented by SEQ ID NOS: 170431, 170432, 170433, 170434, 170435, 170436, 170437, 170438, 170439, 170440, 170441 were selected from the ORFs having the nucleotide sequence represented by SEQ ID NO: 166798.

[14526] The probes having the nucleotide sequence represented by SEQ ID NOS: 170442, 170443, 170444, 170445, 170446, 170447, 170448, 170449, 170450, 170451, 170452 were selected from the ORFs having the nucleotide sequence represented by SEQ ID NO: 166799.

[14527] The probes having the nucleotide sequence represented by SEQ ID NOS: 170453, 170454, 170455, 170456, 170457, 170458, 170459, 170460, 170461, 170462, 170463 were selected from the ORFs having the nucleotide sequence represented by SEQ ID NO: 166800.

[14528] The probes having the nucleotide sequence represented by SEQ ID NOS: 170464, 170465, 170466, 170467, 170468, 170469, 170470, 170471, 170472, 170473, 170474 were selected from the ORFs having the nucleotide sequence represented by SEQ ID NO: 166801.

[14529] The probes having the nucleotide sequence represented by SEQ ID NOS: 170475, 170476, 170477, 170478, 170479, 170480, 170481, 170482, 170483, 170484, 170485 were selected from the ORFs having the nucleotide sequence represented by SEQ ID NO: 166802.

[14530] The probes having the nucleotide sequence represented by SEQ ID NOS: 170486, 170487, 170488, 170489, 170490, 170491, 170492, 170493, 170494, 170495, 170496 were selected from the ORFs having the nucleotide sequence represented by SEQ ID NO: 166803.

[14531] The probes having the nucleotide sequence represented by SEQ ID NOS: 170497, 170498, 170499, 170500, 170501, 170502, 170503, 170504, 170505, 170506, 170507 were selected from the ORFs having the nucleotide sequence represented by SEQ ID NO: 166804.

[14532] The probes having the nucleotide sequence represented by SEQ ID NOS: 170508, 170509, 170510, 170511, 170512, 170513, 170514, 170515, 170516, 170517, 170518 were selected from the ORFs having the nucleotide sequence represented by SEQ ID NO: 166805.

[14533] The probes having the nucleotide sequence represented by SEQ ID NOS: 170519, 170520, 170521, 170522, 170523, 170524, 170525, 170526, 170527, 170528, 170529 were selected from the ORFs having the nucleotide sequence represented by SEQ ID NO: 166806.

[14534] The probes having the nucleotide sequence represented by SEQ ID NOS: 170530, 170531, 170532, 170533, 170534, 170535, 170536, 170537, 170538, 170539, 170540 were selected from the ORFs having the nucleotide sequence represented by SEQ ID NO: 166807.

[14535] The probes having the nucleotide sequence represented by SEQ ID NOS: 170541, 170542, 170543, 170544, 170545, 170546, 170547, 170548, 170549, 170550, 170551 were selected from the ORFs having the nucleotide sequence represented by SEQ ID NO: 166808.

[14536] The probes having the nucleotide sequence represented by SEQ ID NOS: 170552, 170553, 170554, 170555, 170556, 170557, 170558, 170559, 170560, 170561, 170562 were selected from the ORFs having the nucleotide sequence represented by SEQ ID NO: 166809.

[14537] The probes having the nucleotide sequence represented by SEQ ID NOS: 170563, 170564, 170565, 170566, 170567, 170568, 170569, 170570, 170571, 170572, 170573 were selected from the ORFs having the nucleotide sequence represented by SEQ ID NO: 166810.

[14538] The probes having the nucleotide sequence represented by SEQ ID NOS: 170574, 170575, 170576, 170577, 170578, 170579, 170580, 170581, 170582, 170583, 170584 were selected from the ORFs having the nucleotide sequence represented by SEQ ID NO: 166811.

[14539] The probes having the nucleotide sequence represented by SEQ ID NOS: 170585, 170586, 170587, 170588, 170589, 170590, 170591, 170592, 170593, 170594, 170595 were selected from the ORFs having the nucleotide sequence represented by SEQ ID NO: 166812.

[14540] The probes having the nucleotide sequence represented by SEQ ID NOS: 170596, 170597, 170598, 170599, 170600, 170601, 170602, 170603, 170604, 170605, 170606 were selected from the ORFs having the nucleotide sequence represented by SEQ ID NO: 166813.

[14541] The probes having the nucleotide sequence represented by SEQ ID NOS: 170607, 170608, 170609, 170610, 170611, 170612, 170613, 170614, 170615, 170616, 170617 were selected from the ORFs having the nucleotide sequence represented by SEQ ID NO: 166814.

[14542] The probes having the nucleotide sequence represented by SEQ ID NOS: 170618, 170619, 170620, 170621, 170622, 170623, 170624, 170625, 170626, 170627, 170628 were selected from the ORFs having the nucleotide sequence represented by SEQ ID NO: 166815.

[14543] The probes having the nucleotide sequence represented by SEQ ID NOS: 170629, 170630, 170631, 170632, 170633, 170634, 170635, 170636, 170637, 170638, 170639 were selected from the ORFs having the nucleotide sequence represented by SEQ ID NO: 166816.

[14544] The probes having the nucleotide sequence represented by SEQ ID NOS: 170640, 170641, 170642, 170643, 170644, 170645, 170646, 170647, 170648, 170649, 170650 were selected from the ORFs having the nucleotide sequence represented by SEQ ID NO: 166817.

[14545] The probes having the nucleotide sequence represented by SEQ ID NOS: 1706.51, 170652, 170653, 170654, 170655, 170656, 170657, 170658, 170659, 170660, 170661 were selected from the ORFs having the nucleotide sequence represented by SEQ ID NO: 166818.

[14546] The probes having the nucleotide sequence represented by SEQ ID NOS: 170662, 170663, 170664, 170665, 170666, 170667, 170668, 170669, 170670, 170671, 170672 were selected from the ORFs having the nucleotide sequence represented by SEQ ID NO: 166819.

[14547] The probes having the nucleotide sequence represented by SEQ ID NOS: 170673, 170674, 170675, 170676, 170677, 170678, 170679, 170680, 170681, 170682, 170683 were selected from the ORFs having the nucleotide sequence represented by SEQ ID NO: 166820.

[14548] The probes having the nucleotide sequence represented by SEQ ID NOS: 170684, 170685, 170686, 170687, 170688, 170689, 170690, 170691, 170692, 170693, 170694 were selected from the ORFs having the nucleotide sequence represented by SEQ ID NO: 166821.

[14549] The probes having the nucleotide sequence represented by SEQ ID NOS: 170695, 170696, 170697, 170698, 170699, 170700, 170701, 170702, 170703, 170704, 170705 were selected from the ORFs having the nucleotide sequence represented by SEQ ID NO: 166822.

[14550] The probes having the nucleotide sequence represented by SEQ ID NOS: 170706, 170707, 170708, 170709, 170710, 170711, 170712, 170713, 170714, 170715, 170716 were selected from the ORFs having the nucleotide sequence represented by SEQ ID NO: 166823.

[14551] The probes having the nucleotide sequence represented by SEQ ID NOS: 170717, 170718, 170719, 170720, 170721, 170722, 170723, 170724, 170725, 170726, 170727 were selected from the ORFs having the nucleotide sequence represented by SEQ ID NO: 166824.

[14552] The probes having the nucleotide sequence represented by SEQ ID NOS: 170728, 170729, 170730, 170731, 170732, 170733, 170734, 170735, 170736, 170737, 170738 were selected from the ORFs having the nucleotide sequence represented by SEQ ID NO: 166825.

[14553] The probes having the nucleotide sequence represented by SEQ ID NOS: 170739, 170740, 170741, 170742, 170743, 170744, 170745, 170746, 170747, 170748, 170749 were selected from the ORFs having the nucleotide sequence represented by SEQ ID NO: 166826.

[14554] The probes having the nucleotide sequence represented by SEQ ID NOS: 170750, 170751, 170752, 170753, 170754, 170755, 170756, 170757, 170758, 170759, 170760 were selected from the ORFs having the nucleotide sequence represented by SEQ ID NO: 166827.

[14555] The probes having the nucleotide sequence represented by SEQ ID NOS: 170761, 170762, 170763, 170764, 170765, 170766, 170767, 170768, 170769, 170770, 170771 were selected from the ORFs having the nucleotide sequence represented by SEQ ID NO: 166828.

[14556] The probes having the nucleotide sequence represented by SEQ ID NOS: 170772, 170773, 170774, 170775, 170776, 170777, 170778, 170779, 170780, 170781, 170782 were selected from the ORFs having the nucleotide sequence represented by SEQ ID NO: 166829.

[14557] The probes having the nucleotide sequence represented by SEQ ID NOS: 170783, 170784, 170785, 170786, 170787, 170788, 170789, 170790, 170791, 170792, 170793 were selected from the ORFs having the nucleotide sequence represented by SEQ ID NO: 166830.

[14558] The probes having the nucleotide sequence represented by SEQ ID NOS: 170794, 170795, 170796, 170797, 170798, 170799, 170800, 170801, 170802, 170803, 170804 were selected from the ORFs having the nucleotide sequence represented by SEQ ID NO: 166831.

[14559] The probes having the nucleotide sequence represented by SEQ ID NOS: 170805, 170806, 170807, 170808, 170809, 170810, 170811, 170812, 170813, 170814, 170815 were selected from the ORFs having the nucleotide sequence represented by SEQ ID NO: 166832.

[14560] The probes having the nucleotide sequence represented by SEQ ID NOS: 170816, 170817, 170818, 170819, 170820, 170821, 170822, 170823, 170824, 170825, 170826 were selected from the ORFs having the nucleotide sequence represented by SEQ ID NO: 166833.

[14561] The probes having the nucleotide sequence represented by SEQ ID NOS: 170827, 170828, 170829, 170830, 170831, 170832, 170833, 170834, 170835, 170836, 170837 were selected from the ORFs having the nucleotide sequence represented by SEQ ID NO: 166834.

[14562] The probes having the nucleotide sequence represented by SEQ ID NOS: 170838, 170839, 170840, 170841, 170842, 170843, 170844, 170845, 170846, 170847, 170848 were selected from the ORFs having the nucleotide sequence represented by SEQ ID NO: 166835.

[14563] The probes having the nucleotide sequence represented by SEQ ID NOS: 170849, 170850, 170851, 170852, 170853, 170854, 170855, 170856, 170857, 170858, 170859 were selected from the ORFs having the nucleotide sequence represented by SEQ ID NO: 166836.

[14564] The probes having the nucleotide sequence represented by SEQ ID NOS: 170860, 170861, 170862, 170863, 170864, 170865, 170866, 170867, 170868, 170869, 1i0870 were selected from the ORFs having the nucleotide sequence represented by SEQ ID NO: 166837.

[14565] The probes having the nucleotide sequence represented by SEQ ID NOS: 170871, 170872, 170873, 170874, 170875, 170876, 170877, 170878, 170879, 170880, 170881 were selected from the ORFs having the nucleotide sequence represented by SEQ ID NO: 166838.

[14566] The probes having the nucleotide sequence represented by SEQ ID NOS: 170882, 170883, 170884, 170885, 170886, 170887, 170888, 170889, 170890, 170891, 170892 were selected from the ORFs having the nucleotide sequence represented by SEQ ID NO: 166839.

[14567] The probes having the nucleotide sequence represented by SEQ ID NOS: 170893, 170894, 170895, 170896, 170897, 170898, 170899, 170900, 170901, 170902, 170903 were selected from the ORFs having the nucleotide sequence represented by SEQ ID NO: 166840.

[14568] The probes having the nucleotide sequence represented by SEQ ID NOS: 170904, 170905, 170906, 170907, 170908, 170909, 170910, 170911, 170912, 170913, 170914 were selected from the ORFs having the nucleotide sequence represented by SEQ ID NO: 166841.

[14569] The probes having the nucleotide sequence represented by SEQ ID NOS: 170915, 170916, 170917, 170918, 170919, 170920, 170921, 170922, 170923, 170924, 170925 were selected from the ORFs having the nucleotide sequence represented by SEQ ID NO: 166842.

[14570] The probes having the nucleotide sequence represented by SEQ ID NOS: 170926, 170927, 170928, 170929, 170930, 170931, 170932, 170933, 170934, 170935, 170936 were selected from the ORFs having the nucleotide sequence represented by SEQ ID NO: 166843.

[14571] The probes having the nucleotide sequence represented by SEQ ID NOS: 170937, 170938, 170939, 170940, 170941, 170942, 170943, 170944, 170945, 170946, 170947 were selected from the ORFs having the nucleotide sequence represented by SEQ ID NO: 166844.

[14572] The probes having the nucleotide sequence represented by SEQ ID NOS: 170948, 170949, 170950, 170951, 170952, 170953, 170954, 170955, 170956, 170957, 170958 were selected from the ORFs having the nucleotide sequence represented by SEQ ID NO: 166845.

[14573] The probes having the nucleotide sequence represented by SEQ ID NOS: 170959, 170960, 170961, 170962, 170963, 170964, 170965, 170966, 170967, 170968, 170969 were selected from the ORFs having the nucleotide sequence represented by SEQ ID NO: 166846.

[14574] The probes having the nucleotide sequence represented by SEQ ID NOS: 170970, 170971, 170972, 170973, 170974, 170975, 170976, 170977, 170978, 170979, 170980 were selected from the ORFs having the nucleotide sequence represented by SEQ ID NO: 166847.

[14575] The probes having the nucleotide sequence represented by SEQ ID NOS: 170981, 170982, 170983, 170984, 170985, 170986, 170987, 170988, 170989, 170990, 170991 were selected from the ORFs having the nucleotide sequence represented by SEQ ID NO: 166848.

[14576] The probes having the nucleotide sequence represented by SEQ ID NOS: 170992, 170993, 170994, 170995, 170996, 170997, 170998, 170999, 171000, 171001, 171002 were selected from the ORFs having the nucleotide sequence represented by SEQ ID NO: 166849.

[14577] The probes having the nucleotide sequence represented by SEQ ID NOS: 171003, 171004, 171005, 171006, 171007, 171008, 171009, 171010, 171011, 171012, 171013 were selected from the ORFs having the nucleotide sequence represented by SEQ ID NO: 166850.

[14578] The probes having the nucleotide sequence represented by SEQ ID NOS: 171014, 171015, 171016, 171017, 171018, 171019, 171020, 171021, 171022, 171023, 171024 were selected from the ORFs having the nucleotide sequence represented by SEQ ID NO: 166851.

[14579] The probes having the nucleotide sequence represented by SEQ ID NOS: 171025, 171026, 171027, 171028, 171029, 171030, 171031, 171032, 171033, 171034, 171035 were selected from the ORFs having the nucleotide sequence represented by SEQ ID NO: 166852.

[14580] The probes having the nucleotide sequence represented by SEQ ID NOS: 171036, 171037, 171038, 171039, 171040, 171041, 171042, 171043, 171044, 171045, 171046 were selected from the ORFs having the nucleotide sequence represented by SEQ ID NO: 166853.

[14581] The probes having the nucleotide sequence represented by SEQ ID NOS: 171047, 171048, 171049, 171050, 171051, 171052, 171053, 171054, 171055, 171056, 171057 were selected from the ORFs having the nucleotide sequence represented by SEQ ID NO: 166854.

[14582] The probes having the nucleotide sequence represented by SEQ ID NOS: 171058, 171059, 171060, 171061, 171062, 171063, 171064, 171065, 171066, 171067, 171068 were selected from the ORFs having the nucleotide sequence represented by SEQ ID NO: 166855.

[14583] The probes having the nucleotide sequence represented by SEQ ID NOS: 171069, 171070, 171071, 171072, 171073, 171074, 171075, 171076, 171077, 171078, 171079 were selected from the ORFs having the nucleotide sequence represented by SEQ ID NO: 166856.

[14584] The probes having the nucleotide sequence represented by SEQ ID NOS: 171080, 171081, 171082, 171083, 171084, 171085, 171086, 171087, 171088, 171089, 171090 were selected from the ORFs having the nucleotide sequence represented by SEQ ID NO: 166857.

[14585] The probes having the nucleotide sequence represented by SEQ ID NOS: 171091, 171092, 171093, 171094, 171095, 171096, 171097, 171098, 171099, 171100, 171101 were selected from the ORFs having the nucleotide sequence represented by SEQ ID NO: 166858.

[14586] The probes having the nucleotide sequence represented by SEQ ID NOS: 171102, 171103, 171104, 171105, 171106, 171107, 171108, 171109, 171110, 171111, 171112 were selected from the ORFs having the nucleotide sequence represented by SEQ ID NO: 166859.

[14587] The probes having the nucleotide sequence represented by SEQ ID NOS: 171113, 171114, 171115, 171116, 171117, 171118, 171119, 171120, 171121, 171122, 171123 were selected from the ORFs having the nucleotide sequence represented by SEQ ID NO: 166860.

[14588] The probes having the nucleotide sequence represented by SEQ ID NOS: 171124, 171125, 171126, 171127, 171128, 171129, 171130, 171131, 171132, 171133, 171134 were selected from the ORFs having the nucleotide sequence represented by SEQ ID NO: 166861.

[14589] The probes having the nucleotide sequence represented by SEQ ID NOS: 171135, 171136, 171137, 171138, 171139, 171140, 171141, 171142, 171143, 171144, 171145 were selected from the ORFs having the nucleotide sequence represented by SEQ ID NO: 166862.

[14590] The probes having the nucleotide sequence represented by SEQ ID NOS: 171146, 171147, 171148, 171149, 171150, 171151, 171152, 171153, 171154, 171155, 171156 were selected from the ORFs having the nucleotide sequence represented by SEQ ID NO: 166863

[14591] The probes having the nucleotide sequence represented by SEQ ID NOS: 171157, 171158, 171159, 171160, 171161, 171162, 171163, 171164, 171165, 171166, 171167 were selected from the ORFs having the nucleotide sequence represented by SEQ ID NO: 166864.

[14592] The probes having the nucleotide sequence represented by SEQ ID NOS: 171168, 171169, 171170, 171171, 171172, 171173, 171174, 171175, 171176, 171177, 171178 were selected from the ORFs having the nucleotide sequence represented by SEQ ID NO: 166865.

[14593] The probes having the nucleotide sequence represented by SEQ ID NOS: 171179, 171180, 171181, 171182, 171183, 171184, 171185, 171186, 171187, 171188, 171189 were selected from the ORFs having the nucleotide sequence represented by SEQ ID NO: 166866.

[14594] The probes having the nucleotide sequence represented by SEQ ID NOS: 171190, 171191, 171192, 171193, 171194, 171195, 171196, 171197, 171198, 171199, 171200 were selected from the ORFs having the nucleotide sequence represented by SEQ ID NO: 166867.

[14595] The probes having the nucleotide sequence represented by SEQ ID NOS: 171201, 171202, 171203, 171204, 171205, 171206, 171207, 171208, 171209, 171210, 171211 were selected from the ORFs having the nucleotide sequence represented by SEQ ID NO: 166868.

[14596] The probes having the nucleotide sequence represented by SEQ ID NOS: 171212, 171213, 171214, 171215, 171216, 171217, 171218, 171219, 171220, 171221, 171222 were selected from the ORFs having the nucleotide sequence represented by SEQ ID NO: 166869.

[14597] The probes having the nucleotide sequence represented by SEQ ID NOS: 171223, 171224, 171225, 171226, 171227, 171228, 171229, 171230, 171231, 171232, 171233 were selected from the ORFs having the nucleotide sequence represented by SEQ ID NO: 166870.

[14598] The probes having the nucleotide sequence represented by SEQ ID NOS: 171234, 171235, 171236, 171237, 171238, 171239, 171240, 171241, 171242, 171243, 171244 were selected from the ORFs having the nucleotide sequence represented by SEQ ID NO: 166871.

[14599] The probes having the nucleotide sequence represented by SEQ ID NOS: 171245, 171246, 171247, 171248, 171249, 171250, 171251, 171252, 171253, 171254, 171255 were selected from the ORFs having the nucleotide sequence represented by SEQ ID NO: 166872.

[14600] The probes having the nucleotide sequence represented by SEQ ID NOS: 171256, 171257, 171258, 171259, 171260, 171261, 171262, 171263, 171264, 171265, 171266 were selected from the ORFs having the nucleotide sequence represented by SEQ ID NO: 166873.

[14601] The probes having the nucleotide sequence represented by SEQ ID NOS: 171267, 171268, 171269, 171270, 171271, 171272, 171273, 171274, 171275, 171276, 171277 were selected from the ORFs having the nucleotide sequence represented by SEQ ID NO: 166874.

[14602] The probes having the nucleotide sequence represented by SEQ ID NOS: 171278, 171279, 171280, 171281, 171282, 171283, 171284, 171285, 171286, 171287, 171288 were selected from the ORFs having the nucleotide sequence represented by SEQ ID NO: 166875.

[14603] The probes having the nucleotide sequence represented by SEQ ID NOS: 171289, 171290, 171291, 171292, 171293, 171294, 171295, 171296, 171297, 171298, 171299 were selected from the ORFs having the nucleotide sequence represented by SEQ ID NO: 166876.

[14604] The probes having the nucleotide sequence represented by SEQ ID NOS: 171300, 171301, 171302, 171303, 171304, 171305, 171306, 171307, 171308, 171309, 171310 were selected from the ORFs having the nucleotide sequence represented by SEQ ID NO: 166877.

[14605] The probes having the nucleotide sequence represented by SEQ ID NOS: 171311, 171312, 171313, 171314, 171315, 171316, 171317, 171318, 171319, 171320, 171321 were selected from the ORFs having the nucleotide sequence represented by SEQ ID NO: 166878.

[14606] The probes having the nucleotide sequence represented by SEQ ID NOS: 171322, 171323, 171324, 171325, 171326, 171327, 171328, 171329, 171330, 171331, 171332 were selected from the ORFs having the nucleotide sequence represented by SEQ ID NO: 166879.

[14607] The probes having the nucleotide sequence represented by SEQ ID NOS: 171333, 171334, 171335, 171336, 171337, 171338, 171339, 171340, 171341, 171342, 171343 were selected from the ORFs having the nucleotide sequence represented by SEQ ID NO: 166880.

[14608] The probes having the nucleotide sequence represented by SEQ ID NOS: 171344, 171345, 171346, 171347, 171348, 171349, 171350, 171351, 171352, 171353 were selected from the ORFs having the nucleotide sequence represented by SEQ ID NO: 166881.

[14609] The probes having the nucleotide sequence represented by SEQ ID NOS: 171354, 171355, 171356, 171357, 171358, 171359, 171360, 171361, 171362, 171363, 171364 were selected from the ORFs having the nucleotide sequence represented by SEQ ID NO: 166882.

[14610] The probes having the nucleotide sequence represented by SEQ ID NOS: 171365, 171366, 171367, 171368, 171369, 171370, 171371, 171372, 171373, 171374, 171375 were selected from the ORFs having the nucleotide sequence represented by SEQ ID NO: 166883.

[14611] The probes having the nucleotide sequence represented by SEQ ID NOS: 171376, 171377, 171378, 171379, 171380, 171381, 171382, 171383, 171384, 171385, 171386 were selected from the ORFs having the nucleotide sequence represented by SEQ ID NO: 166884.

[14612] The probes having the nucleotide sequence represented by SEQ ID NOS: 171387, 171388, 171389, 171390, 171391, 171392, 171393, 171394, 171395, 171396, 171397 were selected from the ORFs having the nucleotide sequence represented by SEQ ID NO: 166885.

[14613] The probes having the nucleotide sequence represented by SEQ ID NOS: 171398, 171399, 171400, 171401, 171402, 171403, 171404, 171405, 171406, 171407, 171408 were selected from the ORFs having the nucleotide sequence represented by SEQ ID NO: 166886.

[14614] The probes having the nucleotide sequence represented by SEQ ID NOS: 171409, 171410, 171411, 171412, 171413, 171414, 171415, 171416, 171417, 171418, 171419 were selected from the ORFs having the nucleotide sequence represented by SEQ ID NO: 166887.

[14615] The probes having the nucleotide sequence represented by SEQ ID NOS: 171420, 171421, 171422, 171423, 171424, 171425, 171426, 171427, 171428, 171429, 171430 were selected from the ORFs having the nucleotide sequence represented by SEQ ID NO: 166888.

[14616] The probes having the nucleotide sequence represented by SEQ ID NOS: 171431, 171432, 171433, 171434, 171435, 171436, 171437, 171438, 171439, 171440, 171441 were selected from the ORFs having the nucleotide sequence represented by SEQ ID NO: 166889.

[14617] The probes having the nucleotide sequence represented by SEQ ID NOS: 171442, 171443, 171444, 171445, 171446, 171447, 171448, 171449, 171450, 171451, 171452 were selected from the ORFs having the nucleotide sequence represented by SEQ ID NO: 166890.

[14618] The probes having the nucleotide sequence represented by SEQ ID NOS: 171453, 171454, 171455, 171456, 171457, 171458, 171459, 171460, 171461, 171462, 171463 were selected from the ORFs having the nucleotide sequence represented by SEQ ID NO: 166891.

[14619] The probes having the nucleotide sequence represented by SEQ ID NOS: 171464, 171465, 171466, 171467, 171468, 171469, 171470, 171471, 171472, 171473, 171474 were selected from the ORFs having the nucleotide sequence represented by SEQ ID NO: 166892.

[14620] The probes having the nucleotide sequence represented by SEQ ID NOS: 171475, 171476, 171477, 171478, 171479, 171480, 171481, 171482, 171483, 171484, 171485 were selected from the ORFs having the nucleotide sequence represented by SEQ ID NO: 166893.

[14621] The probes having the nucleotide sequence represented by SEQ ID NOS: 171486, 171487, 171488, 171489, 171490, 171491, 171492, 171493, 171494, 171495, 171496 were selected from the ORFs having the nucleotide sequence represented by SEQ ID NO: 166894.

[14622] The probes having the nucleotide sequence represented by SEQ ID NOS: 171497, 171498, 171499, 171500, 171501, 171502, 171503, 171504, 171505, 171506, 171507 were selected from the ORFs having the nucleotide sequence represented by SEQ ID NO: 166895.

[14623] The probes having the nucleotide sequence represented by SEQ ID NOS: 171508, 171509, 171510, 171511, 171512, 171513, 171514, 171515, 171516, 171517, 171518 were selected from the ORFs having the nucleotide sequence represented by SEQ ID NO: 166896.

[14624] The probes having the nucleotide sequence represented by SEQ ID NOS: 171519, 171520, 171521, 171522, 171523, 171524, 171525, 171526, 171527, 171528, 171529 were selected from the ORFs having the nucleotide sequence represented by SEQ ID NO: 166897.

[14625] The probes having the nucleotide sequence represented by SEQ ID NOS: 171530, 171531, 171532, 171533, 171534, 171535, 171536, 171537, 171538, 171539, 171540 were selected from the ORFs having the nucleotide sequence represented by SEQ ID NO: 166898.

[14626] The probes having the nucleotide sequence represented by SEQ ID NOS: 171541, 171542, 171543, 171544, 171545, 171546, 171547, 171548, 171549, 171550, 171551 were selected from the ORFs having the nucleotide sequence represented by SEQ ID NO: 166899.

[14627] The probes having the nucleotide sequence represented by SEQ ID NOS: 171552, 171553, 171554, 171555, 171556, 171557, 171558, 171559, 171560, 171561, 171562 were selected from the ORFs having the nucleotide sequence represented by SEQ ID NO: 166900.

[14628] The probes having the nucleotide sequence represented by SEQ ID NOS: 171563, 171564, 171565, 171566, 171567, 171568, 171569, 171570, 171571, 171572, 171573 were selected from the ORFs having the nucleotide sequence represented by SEQ ID NO: 166901.

[14629] The probes having the nucleotide sequence represented by SEQ ID NOS: 171574, 171575, 171576, 171577, 171578, 171579, 171580, 171581, 171582, 171583, 171584 were selected from the ORFs having the nucleotide sequence represented by SEQ ID NO: 166902.

[14630] The probes having the nucleotide sequence represented by SEQ ID NOS: 171585, 171586, 171587, 171588, 171589, 171590, 171591, 171592, 171593, 171594, 171595 were selected from the ORFs having the nucleotide sequence represented by SEQ ID NO: 166903.

[14631] The probes having the nucleotide sequence represented by SEQ ID NOS: 171596, 171597, 171598, 171599, 171600, 171601, 171602, 171603, 171604, 171605, 171606 were selected from the ORFs having the nucleotide sequence represented by SEQ ID NO: 166904.

[14632] The probes having the nucleotide sequence represented by SEQ ID NOS: 171607, 171608, 171609, 171610, 171611, 171612, 171613, 171614, 171615, 171616, 171617 were selected from the ORFs having the nucleotide sequence represented by SEQ ID NO: 166905.

[14633] The probes having the nucleotide sequence represented by SEQ ID NOS: 171618, 171619, 171620, 171621, 171622, 171623, 171624, 171625, 171626, 171627, 171628 were selected from the ORFs having the nucleotide sequence represented by SEQ ID NO: 166906.

[14634] The probes having the nucleotide sequence represented by SEQ ID NOS: 171629, 171630, 171631, 171632, 171633, 171634, 171635, 171636, 171637, 171638, 171639 were selected from the ORFs having the nucleotide sequence represented by SEQ ID NO: 166907.

[14635] The probes having the nucleotide sequence represented by SEQ ID NOS: 171640, 171641, 171642, 171643, 171644, 171645, 171646, 171647, 171648, 171649, 171650 were selected from the ORFs having the nucleotide sequence represented by SEQ ID NO: 166908.

[14636] The probes having the nucleotide sequence represented by SEQ ID NOS: 171651, 171652, 171653, 171654, 171655, 171656, 171657, 171658, 171659, 171660, 171661 were selected from the ORFs having the nucleotide sequence represented by SEQ ID NO: 166909.

[14637] The probes having the nucleotide sequence represented by SEQ ID NOS: 171662, 171663, 171664, 171665, 171666, 171667, 171668, 171669, 171670, 171671, 171672 were selected from the ORFs having the nucleotide sequence represented by SEQ ID NO: 166910.

[14638] The probes having the nucleotide sequence represented by SEQ ID NOS: 171673, 171674, 171675, 171676, 171677, 171678, 171679, 171680, 171681, 171682, 171683 were selected from the ORFs having the nucleotide sequence represented by SEQ ID NO: 166911.

[14639] The probes having the nucleotide sequence represented by SEQ ID NOS: 171684, 171685, 171686, 171687, 171688, 171689, 171690, 171691, 171692, 171693, 171694 were selected from the ORFs having the nucleotide sequence represented by SEQ ID NO: 166912.

[14640] The probes having the nucleotide sequence represented by SEQ ID NOS: 171695, 171696, 171697, 171698, 171699, 171700, 171701, 171702, 171703, 171704, 171705 were selected from the ORFs having the nucleotide sequence represented by SEQ. ID NO: 166913.

[14641] The probes having the nucleotide sequence represented by SEQ ID NOS: 171706, 171707, 171708, 171709, 171710, 171711, 171712, 171713, 171714, 171715, 171716 were selected from the ORFs having the nucleotide sequence represented by SEQ ID NO: 166914.

[14642] The probes having the nucleotide sequence represented by SEQ ID NOS: 171717, 171718, 171719, 171720, 171721, 171722, 171723, 171724, 171725, 171726, 171727 were selected from the ORFs having the nucleotide sequence represented by SEQ ID NO: 166915.

[14643] The probes having the nucleotide sequence represented by SEQ ID NOS: 171728, 171729, 171730, 171731, 171732, 171733, 171734, 171735, 171736, 171737, 171738 were selected from the ORFs having the nucleotide sequence represented by SEQ ID NO: 166916.

[14644] The probes having the nucleotide sequence represented by SEQ ID NOS: 171739, 171740, 171741, 171742, 171743, 171744, 171745, 171746, 171747, 171748, 171749 were selected from the ORFs having the nucleotide sequence represented by SEQ ID NO: 166917.

[14645] The probes having the nucleotide sequence represented by SEQ ID NOS: 171750, 171751, 171752, 171753, 171754, 171755, 171756, 171757, 171758, 171759, 171760 were selected from the ORFs having the nucleotide sequence represented by SEQ ID NO: 166918.

[14646] The probes having the nucleotide sequence represented by SEQ ID NOS: 171761, 171762, 171763, 171764, 171765, 171766, 171767, 171768, 171769, 171770, 171771 were selected from the ORFs having the nucleotide sequence represented by SEQ ID NO: 166919.

[14647] The probes having the nucleotide sequence represented by SEQ ID NOS: 171772, 171773, 171774, 171775, 171776, 171777, 171778, 171779, 171780, 171781, 171782 were selected from the ORFs having the nucleotide sequence represented by SEQ ID NO: 166920.

[14648] The probes having the nucleotide sequence represented by SEQ ID NOS: 171783, 171784, 171785, 171786, 171787, 171788, 171789, 171790, 171791, 171792, 171793 were selected from the ORFs having the nucleotide sequence represented by SEQ ID NO: 166921.

[14649] The probes having the nucleotide sequence represented by SEQ ID NOS: 171794, 171795, 171796, 171797, 171798, 171799, 171800, 171801, 171802, 171803, 171804 were selected from the ORFs having the nucleotide sequence represented by SEQ ID NO: 166922.

[14650] The probes having the nucleotide sequence represented by SEQ ID NOS: 171805, 171806, 171807, 171808, 171809, 171810, 171811, 171812, 171813, 171814, 171815 were selected from the ORFs having the nucleotide sequence represented by SEQ ID NO: 166923.

[14651] The probes having the nucleotide sequence represented by SEQ ID NOS: 171816, 171817, 171818, 171819, 171820, 171821, 171822, 171823, 171824, 171825, 171826 were selected from the ORFs having the nucleotide sequence represented by SEQ ID NO: 166924.

[14652] The probes having the nucleotide sequence represented by SEQ ID NOS: 171827, 171828, 171829, 171830, 171831, 171832, 171833, 171834, 171835, 171836, 171837 were selected from the ORFs having the nucleotide sequence represented by SEQ ID NO: 166925.

[14653] The probes having the nucleotide sequence represented by SEQ ID NOS: 171838, 171839, 171840, 171841, 171842, 171843, 171844, 171845, 171846, 171847, 171848 were selected from the ORFs having the nucleotide sequence represented by SEQ ID NO: 166926.

[14654] The probes having the nucleotide sequence represented by SEQ ID NOS: 171849, 171850, 171851, 171852, 171853, 171854, 171855, 171856, 171857, 171858, 171859 were selected from the ORFs having the nucleotide sequence represented by SEQ ID NO: 166927.

[14655] The probes having the nucleotide sequence represented by SEQ ID NOS: 171860, 171861, 171862, 171863, 171864, 171865, 171866, 171867, 171868, 171869, 171870 were selected from the ORFs having the nucleotide sequence represented by SEQ ID NO: 166928. The probes having the nucleotide sequence represented by SEQ ID NOS: 171871, 171872, 171873, 171874, 171875, 171876, 171877, 171878, 171879, 171880, 171881 were selected from the ORFs having the nucleotide sequence represented by SEQ ID NO: 166929.

[14656] The probes having the nucleotide sequence represented by SEQ ID NOS: 171882, 171883, 171884, 171885, 171886, 171887, 171888, 171889, 171890, 171891, 171892 were selected from the ORFs having the nucleotide sequence represented by SEQ ID NO: 166930.

[14657] The probes having the nucleotide sequence represented by SEQ ID NOS: 171893, 171894, 171895, 171896, 171897, 171898, 171899, 171900, 171901, 171902, 171903 were selected from the ORFs having the nucleotide sequence represented by SEQ ID NO: 166931.

[14658] The probes having the nucleotide sequence represented by SEQ ID NOS: 171904, 171905, 171906, 171907, 171908, 171909, 171910, 171911, 171912, 171913, 171914 were selected from the ORFs having the nucleotide sequence represented by SEQ ID NO: 166932.

[14659] The probes having the nucleotide sequence represented by SEQ ID NOS: 171915, 171916, 171917, 171918, 171919, 171920, 171921, 171922, 171923, 171924, 171925 were selected from the ORFs having the nucleotide sequence represented by SEQ ID NO: 166933.

[14660] The probes having the nucleotide sequence represented by SEQ ID NOS: 171926, 171927, 171928, 171929, 171930, 171931, 171932, 171933, 171934, 171935, 171936 were selected from the ORFs having the nucleotide sequence represented by SEQ ID NO: 166934.

[14661] The probes having the nucleotide sequence represented by SEQ ID NOS: 171937, 171938, 171939, 171940, 171941, 171942, 171943, 171944, 171945, 171946, 171947 were selected from the ORFs having the nucleotide sequence represented by SEQ ID NO: 166935.

[14662] The probes having the nucleotide sequence represented by SEQ ID NOS: 171948, 171949, 171950, 171951, 171952, 171953, 171954, 171955, 171956, 171957, 171958 were selected from the ORFs having the nucleotide sequence represented by SEQ ID NO: 166936.

[14663] The probes having the nucleotide sequence represented by SEQ ID NOS: 171959, 171960, 171961, 171962, 171963, 171964, 171965, 171966, 171967, 171968, 171969 were selected from the ORFs having the nucleotide sequence represented by SEQ ID NO: 166937.

[14664] The probes having the nucleotide sequence represented by SEQ ID NOS: 171970, 171971, 171972, 171973, 171974, 171975, 171976, 171977, 171978, 171979, 171980 were selected from the ORFs having the nucleotide sequence represented by SEQ ID NO: 166938.

[14665] The probes having the nucleotide sequence represented by SEQ ID NOS: 171981, 171982, 171983, 171984, 171985, 171986, 171987, 171988, 171989, 171990, 171991 were selected from the ORFs having the nucleotide sequence represented by SEQ ID NO: 166939.

[14666] The probes having the nucleotide sequence represented by SEQ ID NOS: 171992, 171993, 171994, 171995, 171996, 171997, 171998, 171999, 172000, 172001, 172002 were selected from the ORFs having the nucleotide sequence represented by SEQ ID NO: 166940.

[14667] The probes having the nucleotide sequence represented by SEQ ID NOS: 172003, 172004, 172005, 172006, 172007, 172008, 172009, 172010, 172011, 172012, 172013 were selected from the ORFs having the nucleotide sequence represented by SEQ ID NO: 166941.

[14668] The probes having the nucleotide sequence represented by SEQ ID NOS: 172014, 172015, 172016, 172017, 172018, 172019, 172020, 172021, 172022, 172023, 172024 were selected from the ORFs having the nucleotide sequence represented by SEQ ID NO: 166942.

[14669] The probes having the nucleotide sequence represented by SEQ ID NOS: 172025, 172026, 172027, 172028, 172029, 172030, 172031, 172032, 172033, 172034, 172035 were selected from the ORFs having the nucleotide sequence represented by SEQ ID NO: 166943.

[14670] The probes having the nucleotide sequence represented by SEQ ID NOS: 172036, 172037, 172038, 172039, 172040, 172041, 172042, 172043, 172044, 172045, 172046 were selected from the ORFs having the nucleotide sequence represented by SEQ ID NO: 166944.

[14671] The probes having the nucleotide sequence represented by SEQ ID NOS: 172047, 172048, 172049, 172050, 172051, 172052, 172053, 172054, 172055, 172056, 172057 were selected from the ORFs having the nucleotide sequence represented by SEQ ID NO: 166945.

[14672] The probes having the nucleotide sequence represented by SEQ ID NOS: 172058, 172059, 172060, 172061, 172062, 172063, 172064, 172065, 172066, 172067, 172068 were selected from the ORFs having the nucleotide sequence represented by SEQ ID NO: 166946.

[14673] The probes having the nucleotide sequence represented by SEQ ID NOS: 172069, 172070, 172071, 172072, 172073, 172074, 172075, 172076, 172077, 172078, 172079 were selected from the ORFs having the nucleotide sequence represented by SEQ ID NO: 166947.

[14674] The probes having the nucleotide sequence represented by SEQ ID NOS: 172080, 172081, 172082, 172083, 172084, 172085, 172086, 172087, 172088, 172089, 172090 were selected from the ORFs having the nucleotide sequence represented by SEQ ID NO: 166948.

[14675] The probes having the nucleotide sequence represented by SEQ ID NOS: 172091, 172092, 172093, 172094, 172095, 172096, 172097, 172098, 172099, 172100, 172101 were selected from the ORFs having the nucleotide sequence represented by SEQ ID NO: 166949.

[14676] The probes having the nucleotide sequence represented by SEQ ID NOS: 172102, 172103, 172104, 172105, 172106, 172107, 172108, 172109, 172110, 172111, 172112 were selected from the ORFs having the nucleotide sequence represented by SEQ ID NO: 166950.

[14677] The probes having the nucleotide sequence represented by SEQ ID NOS: 172113, 172114, 172115, 172116, 172117, 172118, 172119, 172120, 172121, 172122, 172123 were selected from the ORFs having the nucleotide sequence represented by SEQ ID NO: 166951.

[14678] The probes having the nucleotide sequence represented by SEQ ID NOS: 172124, 172125, 172126, 172127, 172128, 172129, 172130, 172131, 172132, 172133, 172134 were selected from the ORFs having the nucleotide sequence represented by SEQ ID NO: 166952.

[14679] The probes having the nucleotide sequence represented by SEQ ID NOS: 172135, 172136, 172137, 172138, 172139, 172140, 172141, 172142, 172143, 172144, 172145 were selected from the ORFs having the nucleotide sequence represented by SEQ ID NO: 166953.

[14680] The probes having the nucleotide sequence represented by SEQ ID NOS: 172146, 172147, 172148, 172149, 172150, 172151, 172152, 172153, 172154, 172155, 172156 were selected from the ORFs having the nucleotide sequence represented by SEQ ID NO: 166954.

[14681] The probes having the nucleotide sequence represented by SEQ ID NOS: 172157, 172158, 172159, 172160, 172161, 172162, 172163, 172164, 172165, 172166, 172167 were selected from the ORFs having the nucleotide sequence represented by SEQ ID NO: 166955.

[14682] The probes having the nucleotide sequence represented by SEQ ID NOS: 172168, 172169, 172170, 172171, 172172, 172173, 172174, 172175, 172176, 172177, 172178 were selected from the ORFs having the nucleotide sequence represented by SEQ ID NO: 166956.

[14683] The probes having the nucleotide sequence represented by SEQ ID NOS: 172179, 172180, 172181, 172182, 172183, 172184, 172185, 172186, 172187, 172188, 172189 were selected from the ORFs having the nucleotide sequence represented by SEQ ID NO: 166957.

[14684] The probes having the nucleotide sequence represented by SEQ ID NOS: 172190, 172191, 172192, 172193, 172194, 172195, 172196, 172197, 172198, 172199, 172200 were selected from the ORFs having the nucleotide sequence represented by SEQ ID NO: 166958.

[14685] The probes having the nucleotide sequence represented by SEQ ID NOS: 172201, 172202, 172203, 172204, 172205, 172206, 172207, 172208, 172209, 172210, 172211 were selected from the ORFs having the nucleotide sequence represented by SEQ ID NO: 166959.

[14686] The probes having the nucleotide sequence represented by SEQ ID NOS: 172212, 172213, 172214, 172215, 172216, 172217, 172218, 172219, 172220, 172221, 172222 were selected from the ORFs having the nucleotide sequence represented by SEQ ID NO: 166960.

[14687] The probes having the nucleotide sequence represented by SEQ ID NOS: 172223, 172224, 172225, 172226, 172227, 172228, 172229, 172230, 172231, 172232, 172233 were selected from the ORFs having the nucleotide sequence represented by SEQ ID NO: 166961.

[14688] The probes having the nucleotide sequence represented by SEQ ID NOS: 172234, 172235, 172236, 172237, 172238, 172239, 172240, 172241, 172242, 172243, 172244 were selected from the ORFs having the nucleotide sequence represented by SEQ ID NO: 166962.

[14689] The probes having the nucleotide sequence represented by SEQ ID NOS: 172245, 172246, 172247, 172248, 172249, 172250, 172251, 172252, 172253, 172254, 172255 were selected from the ORFs having the nucleotide sequence represented by SEQ ID NO: 166963.

[14690] The probes having the nucleotide sequence represented by SEQ ID NOS: 172256, 172257, 172258, 172259, 172260, 172261, 172262, 172263, 172264, 172265, 172266 were selected from the ORFs having the nucleotide sequence represented by SEQ ID NO: 166964.

[14691] The probes having the nucleotide sequence represented by SEQ ID NOS: 172267, 172268, 172269, 172270, 172271, 172272, 172273, 172274, 172275, 172276, 172277 were selected from the ORFs having the nucleotide sequence represented by SEQ ID NO: 166965.

[14692] The probes having the nucleotide sequence represented by SEQ ID NOS: 172278, 172279, 172280, 172281, 172282, 172283, 172284, 172285, 172286, 172287, 172288 were selected from the ORFs having the nucleotide sequence represented by SEQ ID NO: 166966.

[14693] The probes having the nucleotide sequence represented by SEQ ID NOS: 172289, 172290, 172291, 172292, 172293, 172294, 172295, 172296, 172297, 172298, 172299 were selected from the ORFs having the nucleotide sequence represented by SEQ ID NO: 166967.

[14694] The probes having the nucleotide sequence represented by SEQ ID NOS: 172300, 172301, 172302, 172303, 172304, 172305, 172306, 172307, 172308, 172309, 172310 were selected from the ORFs having the nucleotide sequence represented by SEQ ID NO: 166968.

[14695] The probes having the nucleotide sequence represented by SEQ ID NOS: 172311, 172312, 172313, 172314, 172315, 172316, 172317, 172318, 172319, 172320, 172321 were selected from the ORFs having the nucleotide sequence represented by SEQ ID NO: 166969.

[14696] The probes having the nucleotide sequence represented by SEQ ID NOS: 172322, 172323, 172324, 172325, 172326, 172327, 172328, 172329, 172330, 172331, 172332 were selected from the ORFs having the nucleotide sequence represented by SEQ ID NO: 166970.

[14697] The probes having the nucleotide sequence represented by SEQ ID NOS: 172333, 172334, 172335, 172336, 172337, 172338, 172339, 172340, 172341, 172342, 172343 were selected from the ORFs having the nucleotide sequence represented by SEQ ID NO: 166971.

[14698] The probes having the nucleotide sequence represented by SEQ ID NOS: 172344, 172345, 172346, 172347, 172348, 172349, 172350, 172351, 172352, 172353, 172354 were selected from the ORFs having the nucleotide sequence represented by SEQ ID NO: 166972.

[14699] The probes having the nucleotide sequence represented by SEQ ID NOS: 172355, 172356, 172357, 172358, 172359, 172360, 172361, 172362, 172363, 172364, 172365 were selected from the ORFs having the nucleotide sequence represented by SEQ ID NO: 166973.

[14700] The probes having the nucleotide sequence represented by SEQ ID NOS: 172366, 172367, 172368, 172369, 172370, 172371, 172372, 172373, 172374, 172375, 172376 were selected from the ORFs having the nucleotide sequence represented by SEQ ID NO: 166974.

[14701] The probes having the nucleotide sequence represented by SEQ ID NOS: 172377, 172378, 172379, 172380, 172381, 172382, 172383, 172384, 172385, 172386, 172387 were selected from the ORFs having the nucleotide sequence represented by SEQ ID NO: 166975.

[14702] The probes having the nucleotide sequence represented by SEQ ID NOS: 172388, 172389, 172390, 172391, 172392, 172393, 172394, 172395, 172396, 172397, 172398 were selected from the ORFs having the nucleotide sequence represented by SEQ ID NO: 166976.

[14703] The probes having the nucleotide sequence represented by SEQ ID NOS: 172399, 172400, 172401, 172402, 172403, 172404, 172405, 172406, 172407, 172408, 172409 were selected from the ORFs having the nucleotide sequence represented by SEQ ID NO: 166977.

[14704] The probes having the nucleotide sequence represented by SEQ ID NOS: 172410, 172411, 172412, 172413, 172414, 172415, 172416, 172417, 172418, 172419, 172420 were selected from the ORFs having the nucleotide sequence represented by SEQ ID NO: 166978.

[14705] The probes having the nucleotide sequence represented by SEQ ID NOS: 172421, 172422, 172423, 172424, 172425, 172426, 172427, 172428, 172429, 172430, 172431 were selected from the ORFs having the nucleotide sequence represented by SEQ ID NO: 166979.

[14706] The probes having the nucleotide sequence represented by SEQ ID NOS: 172432, 172433, 172434, 172435, 172436, 172437, 172438, 172439, 172440, 172441, 172442 were selected from the ORFs having the nucleotide sequence represented by SEQ ID NO: 166980.

[14707] The probes having the nucleotide sequence represented by SEQ ID NOS: 172443, 172444, 172445, 172446, 172447, 172448, 172449, 172450, 172451, 172452, 172453 were selected from the ORFs having the nucleotide sequence represented by SEQ ID NO: 166981.

[14708] The probes having the nucleotide sequence represented by SEQ ID NOS: 172454, 172455, 172456, 172457, 172458, 172459, 172460, 172461, 172462, 172463, 172464 were selected from the ORFs having the nucleotide sequence represented by SEQ ID NO: 166982.

[14709] The probes having the nucleotide sequence represented by SEQ ID NOS: 172465, 172466, 172467, 172468, 172469, 172470, 172471, 172472, 172473, 172474, 172475 were selected from the ORFs having the nucleotide sequence represented by SEQ ID NO: 166983.

[14710] The probes having the nucleotide sequence represented by SEQ ID NOS: 172476, 172477, 172478, 172479, 172480, 172481, 172482, 172483, 172484, 172485, 172486 were selected from the ORFs having the nucleotide sequence represented by SEQ ID NO: 166984.

[14711] The probes having the nucleotide sequence represented by SEQ ID NOS: 172487, 172488, 172489, 172490, 1724.91, 172492, 172493, 172494, 172495, 172496, 172497 were selected from the ORFs having the nucleotide sequence represented by SEQ ID NO: 166985.

[14712] The probes having the nucleotide sequence represented by SEQ ID NOS: 172498, 172499, 172500, 172501, 172502, 172503, 172504, 172505, 172506, 172507, 172508 were selected from the ORFs having the nucleotide sequence represented by SEQ ID NO: 166986.

[14713] The probes having the nucleotide sequence represented by SEQ ID NOS: 172509, 172510, 172511, 172512, 172513, 172514, 172515, 172516, 172517, 172518, 172519 were selected from the ORFs having the nucleotide sequence represented by SEQ ID NO: 166987.

[14714] The probes having the nucleotide sequence represented by SEQ ID NOS: 172520, 172521, 172522, 172523, 172524, 172525, 172526, 172527, 172528, 172529, 172530 were selected from the ORFs having the nucleotide sequence represented by SEQ ID NO: 166988.

[14715] The probes having the nucleotide sequence represented by SEQ ID NOS: 172531, 172532, 172533, 172534, 172535, 172536, 172537, 172538, 172539, 172540, 172541 were selected from the ORFs having the nucleotide sequence represented by SEQ ID NO: 166989.

[14716] The probes having the nucleotide sequence represented by SEQ ID NOS: 172542, 172543, 172544, 172545, 172546, 172547, 172548, 172549, 172550, 172551, 172552 were selected from the ORFs having the nucleotide sequence represented by SEQ ID NO: 166990.

[14717] The probes having the nucleotide sequence represented by SEQ ID NOS: 172553, 172554, 172555, 172556, 172557, 172558, 172559, 172560, 172561, 172562, 172563 were selected from the ORFs having the nucleotide sequence represented by SEQ ID NO: 166991.

[14718] The probes having the nucleotide sequence represented by SEQ ID NOS: 172564, 172565, 172566, 172567, 172568, 172569, 172570, 172571, 172572, 172573, 172574 were selected from the ORFs having the nucleotide sequence represented by SEQ ID NO: 166992.

[14719] The probes having the nucleotide sequence represented by SEQ ID NOS: 172575, 172576, 172577, 172578, 172579, 172580, 172581, 172582, 172583, 172584, 172585 were selected from the ORFs having the nucleotide sequence represented by SEQ ID NO: 166993.

[14720] The probes having the nucleotide sequence represented by SEQ ID NOS: 172586, 172587, 172588, 172589, 172590, 172591, 172592, 172593, 172594, 172595, 172596 were selected from the ORFs having the nucleotide sequence represented by SEQ ID NO: 166994.

[14721] The probes having the nucleotide sequence represented by SEQ ID NOS: 172597, 172598, 172599, 172600, 172601, 172602, 172603, 172604, 172605, 172606, 172607 were selected from the ORFs having the nucleotide sequence represented by SEQ ID NO: 166995.

[14722] The probes having the nucleotide sequence represented by SEQ ID NOS: 172608, 172609, 172610, 172611, 172612, 172613, 172614, 172615, 172616, 172617, 172618 were selected from the ORFs having the nucleotide sequence represented by SEQ ID NO: 166996.

[14723] The probes having the nucleotide sequence represented by SEQ ID NOS: 172619, 172620, 172621, 172622, 172623, 172624, 172625, 172626, 172627, 172628, 172629 were selected from the ORFs having the nucleotide sequence represented by SEQ ID NO: 166997.

[14724] The probes having the nucleotide sequence represented by SEQ ID NOS: 172630, 172631, 172632, 172633, 172634, 172635, 172636, 172637, 172638, 172639, 172640 were selected from the ORFs having the nucleotide sequence represented by SEQ ID NO: 166998.

[14725] The probes having the nucleotide sequence represented by SEQ ID NOS: 172641, 172642, 172643, 172644, 172645, 172646, 172647, 172648, 172649, 172650, 172651 were selected from the ORFs having the nucleotide sequence represented by SEQ ID NO: 166999.

[14726] The probes having the nucleotide sequence represented by SEQ ID NOS: 172652, 172653, 172654, 172655, 172656, 172657, 172658, 172659, 172660, 172661, 172662 were selected from the ORFs having the nucleotide sequence represented by SEQ ID NO: 167000.

[14727] The probes having the nucleotide sequence represented by SEQ ID NOS: 172663, 172664, 172665, 172666, 172667, 172668, 172669, 172670, 172671, 172672, 172673 were selected from the ORFs having the nucleotide sequence represented by SEQ ID NO: 167001.

[14728] The probes having the nucleotide sequence represented by SEQ ID NOS: 172674, 172675, 172676, 172677, 172678, 172679, 172680, 172681, 172682, 172683, 172684 were selected from the ORFs having the nucleotide sequence represented by SEQ ID NO: 167002.

[14729] The probes having the nucleotide sequence represented by SEQ ID NOS: 172685, 172686, 172687, 172688, 172689, 172690, 172691, 172692, 172693, 172694, 172695 were selected from the ORFs having the nucleotide sequence represented by SEQ ID NO: 167003.

[14730] The probes having the nucleotide sequence represented by SEQ ID NOS: 172696, 172697, 172698, 172699, 172700, 172701, 172702, 172703, 172704, 172705, 172706 were selected from the ORFs having the nucleotide sequence represented by SEQ ID NO: 167004.

[14731] The probes having the nucleotide sequence represented by SEQ ID NOS: 172707, 172708, 172709, 172710, 172711, 172712, 172713, 172714, 172715, 172716, 172717 were selected from the ORFs having the nucleotide sequence represented by SEQ ID NO: 167005.

[14732] The probes having the nucleotide sequence represented by SEQ ID NOS: 172718, 172719, 172720, 172721, 172722, 172723, 172724, 172725, 172726, 172727, 172728 were selected from the ORFs having the nucleotide sequence represented by SEQ ID NO: 167006.

[14733] The probes having the nucleotide sequence represented by SEQ ID NOS: 172729, 172730, 172731, 172732, 172733, 172734, 172735, 172736, 172737, 172738, 172739 were selected from the ORFs having the nucleotide sequence represented by SEQ ID NO: 167007.

[14734] The probes having the nucleotide sequence represented by SEQ ID NOS: 172740, 172741, 172742, 172743, 172744, 172745, 172746, 172747, 172748, 172749, 172750 were selected from the ORFs having the nucleotide sequence represented by SEQ ID NO: 167008.

[14735] The probes having the nucleotide sequence represented by SEQ ID NOS: 172751, 172752, 172753, 172754, 172755, 172756, 172757, 172758, 172759, 172760, 172761 were selected from the ORFs having the nucleotide sequence represented by SEQ ID NO: 167009.

[14736] The probes having the nucleotide sequence represented by SEQ ID NOS: 172762, 172763, 172764, 172765, 172766, 172767, 172768, 172769, 172770, 172771, 172772 were selected from the ORFs having the nucleotide sequence represented by SEQ ID NO: 167010.

[14737] The probes having the nucleotide sequence represented by SEQ ID NOS: 172773, 172774, 172775, 172776, 172777, 172778, 172779, 172780, 172781, 172782, 172783 were selected from the ORFs having the nucleotide sequence represented by SEQ ID NO: 167011.

[14738] The probes having the nucleotide sequence represented by SEQ ID NOS: 172784, 172785, 172786, 172787, 172788, 172789, 172790, 172791, 172792, 172793, 172794 were selected from the ORFs having the nucleotide sequence represented by SEQ ID NO: 167012.

[14739] The probes having the nucleotide sequence represented by SEQ ID NOS: 172795, 172796, 172797, 172798, 172799, 172800, 172801, 172802,. 172803, 172804, 172805 were selected from the ORFs having the nucleotide sequence represented by SEQ ID NO: 167013.

[14740] The probes having the nucleotide sequence represented by SEQ ID NOS: 172806, 172807, 172808, 172809, 172810, 172811, 172812, 172813, 172814, 172815, 172816 were selected from the ORFs having the nucleotide sequence represented by SEQ ID NO: 167014.

[14741] The probes having the nucleotide sequence represented by SEQ ID NOS: 172817, 172818, 172819, 172820, 172821, 172822, 172823, 172824, 172825, 172826, 172827 were selected from the ORFs having the nucleotide sequence represented by SEQ ID NO: 167015.

[14742] The probes having the nucleotide sequence represented by SEQ ID NOS: 172828, 172829, 172830, 172831, 172832, 172833, 172834, 172835, 172836, 172837, 172838 were selected from the ORFs having the nucleotide sequence represented by SEQ ID NO: 167016.

[14743] The probes having the nucleotide sequence represented by SEQ ID NOS: 172839, 172840, 172841, 172842, 172843, 172844, 172845, 172846, 172847, 172848, 172849 were selected from the ORFs having the nucleotide sequence represented by SEQ ID NO: 167017.

[14744] The probes having the nucleotide sequence represented by SEQ ID NOS: 172850, 172851, 172852, 172853, 172854, 172855, 172856, 172857, 172858, 172859, 172860 were selected from the ORFs having the nucleotide sequence represented by SEQ ID NO: 167018.

[14745] The probes having the nucleotide sequence represented by SEQ ID NOS: 172861, 172862, 172863, 172864, 172865, 172866, 172867, 172868, 172869, 172870, 172871 were selected from the ORFs having the nucleotide sequence represented by SEQ ID NO: 167019.

[14746] The probes having the nucleotide sequence represented by SEQ ID NOS: 172872, 172873, 172874, 172875, 172876, 172877, 172878, 172879, 172880, 172881, 172882 were selected from the ORFs having the nucleotide sequence represented by SEQ ID NO: 167020.

[14747] The probes having the nucleotide sequence represented by SEQ ID NOS: 172883, 172884, 172885, 172886, 172887, 172888, 172889, 172890, 172891, 172892, 172893 were selected from the ORFs having the nucleotide sequence represented by SEQ ID NO: 167021.

[14748] The probes having the nucleotide sequence represented by SEQ ID NOS: 172894, 172895, 172896, 172897, 172898, 172899, 172900, 172901, 172902, 172903, 172904 were selected from the ORFs having the nucleotide sequence represented by SEQ ID NO: 167022.

[14749] The probes having the nucleotide sequence represented by SEQ ID NOS: 172905, 172906, 172907, 172908, 172909, 172910, 172911, 172912, 172913, 172914, 172915 were selected from the ORFs having the nucleotide sequence represented by SEQ ID NO: 167023.

[14750] The probes having the nucleotide sequence represented by SEQ ID NOS: 172916, 172917, 172918, 172919, 172920, 172921, 172922, 172923, 172924, 172925, 172926 were selected from the ORFs having the nucleotide sequence represented by SEQ ID NO: 167024.

[14751] The probes having the nucleotide sequence represented by SEQ ID NOS: 172927, 172928, 172929, 172930, 172931, 172932, 172933, 172934, 172935, 172936, 172937 were selected from the ORFs having the nucleotide sequence represented by SEQ ID NO: 167025.

[14752] The probes having the nucleotide sequence represented by SEQ ID NOS: 172938, 172939, 172940, 172941, 172942, 172943, 172944, 172945, 172946, 172947, 172948 were selected from the ORFs having the nucleotide sequence represented by SEQ ID NO: 167026.

[14753] The probes having the nucleotide sequence represented by SEQ ID NOS: 172949, 172950, 172951, 172952, 172953, 172954, 172955, 172956, 172957, 172958, 172959 were selected from the ORFs having the nucleotide sequence represented by SEQ ID NO: 167027.

[14754] The probes having the nucleotide sequence represented by SEQ ID NOS: 172960, 172961, 172962, 172963, 172964, 172965, 172966, 172967, 172968, 172969, 172970 were selected from the ORFs having the nucleotide sequence represented by SEQ ID NO: 167028.

[14755] The probes having the nucleotide sequence represented by SEQ ID NOS: 172971, 172972, 172973, 172974, 172975, 172976, 172977, 172978, 172979, 172980, 172981 were selected from the ORFs having the nucleotide sequence represented by SEQ ID NO: 167029.

[14756] The probes having the nucleotide sequence represented by SEQ ID NOS: 172982, 172983, 172984, 172985, 172986, 172987, 172988, 172989, 172990, 172991, 172992 were selected from the ORFs having the nucleotide sequence represented by SEQ ID NO: 167030.

[14757] The probes having the nucleotide sequence represented by SEQ ID NOS: 172993, 172994, 172995, 172996, 172997, 172998, 172999, 173000, 173001, 173002, 173003 were selected from the ORFs having the nucleotide sequence represented by SEQ ID NO: 167031.

[14758] The probes having the nucleotide sequence represented by SEQ ID NOS: 173004, 173005, 173006, 173007, 173008, 173009, 173010, 173011, 173012, 173013, 173014 were selected from the ORFs having the nucleotide sequence represented by SEQ ID NO: 167032.

[14759] The probes having the nucleotide sequence represented by SEQ ID NOS: 173015, 173016, 173017, 173018, 173019, 173020, 173021, 173022, 173023, 173024, 173025 were selected from the ORFs having the nucleotide sequence represented by SEQ ID NO: 167033.

[14760] The probes having the nucleotide sequence represented by SEQ ID NOS: 173026, 173027, 173028, 173029, 173030, 173031, 173032, 173033, 173034, 173035, 173036 were selected from the ORFs having the nucleotide sequence represented by SEQ ID NO: 167034.

[14761] The probes having the nucleotide sequence represented by SEQ ID NOS: 173037, 173038, 173039, 173040, 173041, 173042, 173043, 173044, 173045, 173046, 173047 were selected from the ORFs having the nucleotide sequence represented by SEQ ID NO: 167035.

[14762] The probes having the nucleotide sequence represented by SEQ ID NOS: 173048, 173049, 173050, 173051, 173052, 173053, 173054, 173055, 173056, 173057, 173058 were selected from the ORFs having the nucleotide sequence represented by SEQ ID NO: 167036.

[14763] The probes having the nucleotide sequence represented by SEQ ID NOS: 173059, 173060, 173061, 173062, 173063, 173064, 173065, 173066, 173067, 173068, 173069 were selected from the ORFs having the nucleotide sequence represented by SEQ ID NO: 167037.

[14764] The probes having the nucleotide sequence represented by SEQ ID NOS: 173070, 173071, 173072, 173073, 173074, 173075, 173076, 173077, 173078, 173079, 173080 were selected from the ORFs having the nucleotide sequence represented by SEQ ID NO: 167038.

[14765] The probes having the nucleotide sequence represented by SEQ ID NOS: 173081, 173082, 173083, 173084, 173085, 173086, 173087, 173088, 173089, 173090, 173091 were selected from the ORFs having the nucleotide sequence represented by SEQ ID NO: 167039.

[14766] The probes having the nucleotide sequence represented by SEQ ID NOS: 173092, 173093, 173094, 173095, 173096, 173097, 173098, 173099, 173100, 173101, 173102 were selected from the ORFs having the nucleotide sequence represented by SEQ ID NO: 167040.

[14767] The probes having the nucleotide sequence represented by SEQ ID NOS: 173103, 173104, 173105, 173106, 173107, 173108, 173109, 173110, 173111, 173112, 173113 were selected from the ORFs having the nucleotide sequence represented by SEQ ID NO: 167041.

[14768] The probes having the nucleotide sequence represented by SEQ ID NOS: 173114, 173115, 173116, 173117, 173118, 173119, 173120, 173121, 173122, 173123, 173124 were selected from the ORFs having the nucleotide sequence represented by SEQ ID NO: 167042.

[14769] The probes from 1479 ORF sequences described as above (1-E) were as follows:

[14770] The probes having the nucleotide sequence represented by SEQ ID NOS: 174604, 174605, 174606, 174607, 174608, 174609, 174610, 174611, 174612, 174613, 174614 were selected from the ORFs having the nucleotide sequence represented by SEQ ID NO: 173125.

[14771] The probes having the nucleotide sequence represented by SEQ ID NOS: 174615, 174616, 174617, 174618, 174619, 174620, 174621, 174622, 174623, 174624, 174625 were selected from the ORFs having the nucleotide sequence represented by SEQ ID NO: 173126.

[14772] The probes having the nucleotide sequence represented by SEQ ID NOS: 174626, 174627, 174628, 174629, 174630, 174631, 174632, 174633, 174634, 174635, 174636 were selected from the ORFs having the nucleotide sequence represented by SEQ ID NO: 173127.

[14773] The probes having the nucleotide sequence represented by SEQ ID NOS: 174637, 174638, 174639, 174640, 174641, 174642, 174643, 174644, 174645, 174646, 174647 were selected from the ORFs having the nucleotide sequence represented by SEQ ID NO: 173128.

[14774] The probes having the nucleotide sequence represented by SEQ ID NOS: 174648, 174649, 174650, 174651, 174652, 174653, 174654, 174655, 174656, 174657, 174658 were selected from the ORFs having the nucleotide sequence represented by SEQ ID NO: 173129.

[14775] The probes having the nucleotide sequence represented by SEQ ID NOS: 174659, 174660, 174661, 174662, 174663, 174664, 174665, 174666, 174667, 174668 were selected from the ORFs having the nucleotide sequence represented by SEQ ID NO: 173130.

[14776] The probes having the nucleotide sequence represented by SEQ ID NOS: 174669, 174670, 174671, 174672, 174673, 174674, 174675, 174676, 174677, 174678, 174679 were selected from the ORFs having the nucleotide sequence represented by SEQ ID NO: 173131.

[14777] The probes having the nucleotide sequence represented by SEQ ID NOS: 174680, 174681, 174682, 174683, 174684, 174685, 174686, 174687, 174688, 174689, 174690 were selected from the ORFs having the nucleotide sequence represented by SEQ ID NO: 173132.

[14778] The probes having the nucleotide sequence represented by SEQ ID NOS: 174691, 174692, 174693, 174694, 174695, 174696, 174697, 174698, 174699, 174700, 174701 were selected from the ORFs having the nucleotide sequence represented by SEQ ID NO: 173133.

[14779] The probes having the nucleotide sequence represented by SEQ ID NOS: 174702, 174703, 174704, 174705, 174706, 174707, 174708, 174709, 174710, 174711, 174712 were selected from the ORFs having the nucleotide sequence represented by SEQ ID NO: 173134.

[14780] The probes having the nucleotide sequence represented by SEQ ID NOS: 174713, 174714, 174715, 174716, 174717, 174718, 174719, 174720, 174721, 174722, 174723 were selected from the ORFs having the nucleotide sequence represented by SEQ ID NO: 173135.

[14781] The probes having the nucleotide sequence represented by SEQ ID NOS: 174724, 174725, 174726, 174727, 174728, 174729, 174730, 174731, 174732, 174733, 174734 were selected from the ORFs having the nucleotide sequence represented by SEQ ID NO: 173136.

[14782] The probes having the nucleotide sequence represented by SEQ ID NOS: 174735, 174736, 174737, 174738, 174739, 174740, 174741, 174742, 174743, 174744 were selected from the ORFs having the nucleotide sequence represented by SEQ ID NO: 173137.

[14783] The probes having the nucleotide sequence represented by SEQ ID NOS: 174745, 174746, 174747, 174748, 174749, 174750, 174751, 174752, 174753, 174754, 174755 were selected from the ORFs having the nucleotide sequence represented by SEQ ID NO: 173138.

[14784] The probes having the nucleotide sequence represented by SEQ ID NOS: 174756, 174757, 174758, 174759, 174760, 174761, 174762, 174763, 174764, 174765, 174766 were selected from the ORFs having the nucleotide sequence represented by SEQ ID NO: 173139.

[14785] The probes having the nucleotide sequence represented by SEQ ID NOS: 174767, 174768, 174769, 174770, 174771, 174772, 174773, 174774, 174775, 174776, 174777 were selected from the ORFs having the nucleotide sequence represented by SEQ ID NO: 173140.

[14786] The probes having the nucleotide sequence represented by SEQ ID NOS: 174778, 174779, 174780, 174781, 174782, 174783, 174784, 174785, 174786, 174787, 174788 were selected from the ORFs having the nucleotide sequence represented by SEQ ID NO: 173141.

[14787] The probes having the nucleotide sequence represented by SEQ ID NOS: 174789, 174790, 174791, 174792, 174793, 174794, 174795, 174796, 174797, 174798, 174799 were selected from the ORFs having the nucleotide sequence represented by SEQ ID NO: 173142.

[14788] The probes having the nucleotide sequence represented by SEQ ID NOS: 174800, 174801, 174802, 174803, 174804, 174805, 174806, 174807, 174808, 174809, 174810 were selected from the ORFs having the nucleotide sequence represented by SEQ ID NO: 173143.

[14789] The probes having the nucleotide sequence represented by SEQ ID NOS: 174811, 174812, 174813, 174814, 174815, 174816, 174817, 174818, 174819, 174820, 174821 were selected from the ORFs having the nucleotide sequence represented by SEQ ID NO: 173144.

[14790] The probes having the nucleotide sequence represented by SEQ ID NOS: 174822, 174823, 174824, 174825, 174826, 174827, 174828, 174829, 174830, 174831, 174832 were selected from the ORFs having the nucleotide sequence represented by SEQ ID NO: 173145.

[14791] The probes having the nucleotide sequence represented by SEQ ID NOS: 174833, 174834, 174835, 174836, 174837, 174838, 174839, 174840, 174841, 174842, 174843 were selected from the ORFs having the nucleotide sequence represented by SEQ ID NO: 173146.

[14792] The probes having the nucleotide sequence represented by SEQ ID NOS: 174844, 174845, 174846, 174847, 174848, 174849, 174850, 174851, 174852, 174853, 174854 were selected from the ORFs having the nucleotide sequence represented by SEQ ID NO: 173147.

[14793] The probes having the nucleotide sequence represented by SEQ ID NOS: 174855, 174856, 174857, 174858, 174859, 174860, 174861, 174862, 174863, 174864, 174865 were selected from the ORFs having the nucleotide sequence represented by SEQ ID NO: 173148.

[14794] The probes having the nucleotide sequence represented by SEQ ID NOS: 174866, 174867, 174868, 174869, 174870, 174871, 174872, 174873, 174874, 174875, 174876 were selected from the ORFs having the nucleotide sequence represented by SEQ ID NO: 173149.

[14795] The probes having the nucleotide sequence represented by SEQ ID NOS: 174877, 174878, 174879, 174880, 174881, 174882, 174883, 174884, 174885, 174886, 174887 were selected from the ORFs having the nucleotide sequence represented by SEQ ID NO: 173150.

[14796] The probes having the nucleotide sequence represented by SEQ ID NOS: 174888, 174889, 174890, 174891, 174892, 174893, 174894, 174895, 174896, 174897, 174898 were selected from the ORFs having the nucleotide sequence represented by SEQ ID NO: 173151.

[14797] The probes having the nucleotide sequence represented by SEQ ID NOS: 174899, 174900, 174901, 174902, 174903, 174904, 174905, 174906, 174907, 174908, 174909 were selected from the ORFs having the nucleotide sequence represented by SEQ ID NO: 173152.

[14798] The probes having the nucleotide sequence represented by SEQ ID NOS: 174910, 174911, 174912, 174913, 174914, 174915, 174916, 174917 were selected from the ORFs having the nucleotide sequence represented by SEQ ID NO: 173153.

[14799] The probes having the nucleotide sequence represented by SEQ ID NOS: 174918, 174919, 174920, 174921, 174922, 174923, 174924, 174925, 174926, 174927, 174928 were selected from the ORFs having the nucleotide sequence represented by SEQ ID NO: 173154.

[14800] The probes having the nucleotide sequence represented by SEQ ID NOS: 174929, 174930, 174931, 174932, 174933, 174934, 174935, 174936, 174937, 174938, 174939 were selected from the ORFs having the nucleotide sequence represented by SEQ ID NO: 173155.

[14801] The probes having the nucleotide sequence represented by SEQ ID NOS: 174940, 174941, 174942, 174943, 174944, 174945, 174946, 174947, 174948, 174949, 174950 were selected from the ORFs having the nucleotide sequence represented by SEQ ID NO: 173156.

[14802] The probes having the nucleotide sequence represented by SEQ ID NOS: 174951, 174952, 174953, 174954, 174955, 174956, 174957, 174958, 174959, 174960, 174961 were selected from the ORFs having the nucleotide sequence represented by SEQ ID NO: 173157.

[14803] The probes having the nucleotide sequence represented by SEQ ID NOS: 174962, 174963, 174964, 174965, 174966, 174967, 174968, 174969, 174970, 174971, 174972 were selected from the ORFs having the nucleotide sequence represented by SEQ ID NO: 173158.

[14804] The probes having the nucleotide sequence represented by SEQ ID NOS: 174973, 174974, 174975, 174976, 174977, 174978, 174979, 174980, 174981, 174982, 174983 were selected from the ORFs having the nucleotide sequence represented by SEQ ID NO: 173159.

[14805] The probes having the nucleotide sequence represented by SEQ ID NOS: 174984, 174985, 174986, 174987, 174988, 174989, 174990, 174991, 174992, 174993, 174994 were selected from the ORFs having the nucleotide sequence represented by SEQ ID NO: 173160.

[14806] The probes having the nucleotide sequence represented by SEQ ID NOS: 174995, 174996, 174997, 174998, 174999, 175000, 175001, 175002, 175003, 175004, 175005 were selected from the ORFs having the nucleotide sequence represented by SEQ ID NO: 173161.

[14807] The probes having the nucleotide sequence represented by SEQ ID NOS: 175006, 175007, 175008, 175009, 175010, 175011, 175012, 175013, 175014, 175015 were selected from the ORFs having the nucleotide sequence represented by SEQ ID NO: 173162.

[14808] The probes having the nucleotide sequence represented by SEQ ID NOS: 175016, 175017, 175018, 175019, 175020, 175021, 175022, 175023, 175024, 175025, 175026 were selected from the ORFs having the nucleotide sequence represented by SEQ ID NO: 173163.

[14809] The probes having the nucleotide sequence represented by SEQ ID NOS: 175027, 175028, 175029, 175030, 175031, 175032, 175033, 175034, 175035, 175036, 175037 were selected from the ORFs having the nucleotide sequence represented by SEQ ID NO: 173164.

[14810] The probes having the nucleotide sequence represented by SEQ ID NOS: 175038, 175039, 175040, 175041, 175042, 175043, 175044, 175045, 175046, 175047, 175048 were selected from the ORFs having the nucleotide sequence represented by SEQ ID NO: 173165.

[14811] The probes having the nucleotide sequence represented by SEQ ID NOS: 175049, 175050, 175051, 175052, 175053, 175054, 175055, 175056, 175057, 175058, 175059 were selected from the ORFs having the nucleotide sequence represented by SEQ ID NO: 173166.

[14812] The probes having the nucleotide sequence represented by SEQ ID NOS: 175060, 175061, 175062, 175063, 175064, 175065, 175066, 175067, 175068, 175069, 175070 were selected from the ORFs having the nucleotide sequence represented by SEQ ID NO: 173167.

[14813] The probes having the nucleotide sequence represented by SEQ ID NOS: 175071, 175072, 175073, 175074, 175075, 175076, 175077, 175078, 175079, 175080, 175081 were selected from the ORFs having the nucleotide sequence represented by SEQ ID NO: 173168.

[14814] The probes having the nucleotide sequence represented by SEQ ID NOS: 175082, 175083, 175084, 175085, 175086, 175087, 175088, 175089, 175090, 175091, 175092 were selected from the ORFs having the nucleotide sequence represented by SEQ ID NO: 173169.

[14815] The probes having the nucleotide sequence represented by SEQ ID NOS: 175093, 175094, 175095, 175096, 175097, 175098, 175099, 175100, 175101, 175102, 175103 were selected from the ORFs having the nucleotide sequence represented by SEQ ID NO: 173170.

[14816] The probes having the nucleotide sequence represented by SEQ ID NOS: 175104, 175105, 175106, 175107, 175108, 175109, 175110, 175111, 175112, 175113, 175114 were selected from the ORFs having the nucleotide sequence represented by SEQ ID NO: 173171.

[14817] The probes having the nucleotide sequence represented by SEQ ID NOS: 175115, 175116, 175117, 175118, 175119, 175120, 175121, 175122, 175123, 175124, 175125 were selected from the ORFs having the nucleotide sequence represented by SEQ ID NO: 173172.

[14818] The probes having the nucleotide sequence represented by SEQ ID NOS: 175126, 175127, 175128, 175129, 175130, 175131, 175132, 175133, 175134, 175135, 175136 were selected from the ORFs having the nucleotide sequence represented by SEQ ID NO: 173173.

[14819] The probes having the nucleotide sequence represented by SEQ ID NOS: 175137, 175138, 175139, 175140, 175141, 175142, 175143, 175144, 175145 were selected from the ORFs having the nucleotide sequence represented by SEQ ID NO: 173174.

[14820] The probes having the nucleotide sequence represented by SEQ ID NOS: 175146, 175147, 175148, 175149, 175150, 175151, 175152, 175153, 175154, 175155, 175156 were selected from the ORFs having the nucleotide sequence represented by SEQ ID NO: 173175.

[14821] The probes having the nucleotide sequence represented by SEQ ID NOS: 175157, 175158, 175159, 175160, 175161, 175162, 175163, 175164, 175165, 175166, 175167 were selected from the ORFs having the nucleotide sequence represented by SEQ ID NO: 173176.

[14822] The probes having the nucleotide sequence represented by SEQ ID NOS: 175168, 175169, 175170, 175171, 175172, 175173, 175174, 175175, 175176, 175177, 175178 were selected from the ORFs having the nucleotide sequence represented by SEQ ID NO: 173177.

[14823] The probes having the nucleotide sequence represented by SEQ ID NOS: 175179, 175180, 175181, 175182, 175183, 175184, 175185, 175186, 175187, 175188, 175189 were selected from the ORFs having the nucleotide sequence represented by SEQ ID NO: 173178.

[14824] The probes having the nucleotide sequence represented by SEQ ID NOS: 175190, 175191, 175192, 175193, 175194, 175195, 175196, 175197, 175198, 175199, 175200 were selected from the ORFs having the nucleotide sequence represented by SEQ ID NO: 173179.

[14825] The probes having the nucleotide sequence represented by SEQ ID NOS: 175201, 175202, 175203, 175204, 175205, 175206, 175207, 175208, 175209, 175210, 175211 were selected from the ORFs having the nucleotide sequence represented by SEQ ID NO: 173180.

[14826] The probes having the nucleotide sequence represented by SEQ ID NOS: 175212, 175213, 175214, 175215, 175216, 175217, 175218, 175219, 175220, 175221, 175222 were selected from the ORFs having the nucleotide sequence represented by SEQ ID NO: 173181.

[14827] The probes having the nucleotide sequence represented by SEQ ID NOS: 175223, 175224, 175225, 175226, 175227, 175228, 175229, 175230, 175231, 175232, 175233 were selected from the ORFs having the nucleotide sequence represented by SEQ ID NO: 173182.

[14828] The probes having the nucleotide sequence represented by SEQ ID NOS: 175234, 175235, 175236, 175237, 175238, 175239, 175240, 175241, 175242, 175243, 175244 were selected from the ORFs having the nucleotide sequence represented by SEQ ID NO: 173183.

[14829] The probes having the nucleotide sequence represented by SEQ ID NOS: 175245, 175246, 175247, 175248, 175249, 175250, 175251, 175252, 175253, 175254 were selected from the ORFs having the nucleotide sequence represented by SEQ ID NO: 173184.

[14830] The probes having the nucleotide sequence represented by SEQ ID NOS: 175255, 175256, 175257, 175258, 175259, 175260, 175261, 175262, 175263, 175264, 175265 were selected from the ORFs having the nucleotide sequence represented by SEQ ID NO: 173185.

[14831] The probes having the nucleotide sequence represented by SEQ ID NOS: 175266, 175267, 175268, 175269, 175270, 175271, 175272, 175273, 175274, 175275, 175276 were selected from the ORFs having the nucleotide sequence represented by SEQ ID NO: 173186.

[14832] The probes having the nucleotide sequence represented by SEQ ID NOS: 175277, 175278, 175279, 175280, 175281, 175282, 175283, 175284, 175285, 175286, 175287 were selected from the ORFs having the nucleotide sequence represented by SEQ ID NO: 173187.

[14833] The probes having the nucleotide sequence represented by SEQ ID NOS: 175288, 175289, 175290, 175291, 175292, 175293, 175294, 175295, 175296, 175297, 175298 were selected from the ORFs having the nucleotide sequence represented by SEQ ID NO: 173188.

[14834] The probes having the nucleotide sequence represented by SEQ ID NOS: 175299, 175300, 175301, 175302, 175303, 175304, 175305, 175306, 175307, 175308, 175309 were selected from the ORFs having the nucleotide sequence represented by SEQ ID NO: 173189.

[14835] The probes having the nucleotide sequence represented by SEQ ID NOS: 175310, 175311, 175312, 175313, 175314, 175315, 175316, 175317, 175318, 175319, 175320 were selected from the ORFs having the nucleotide sequence represented by SEQ ID NO: 173190.

[14836] The probes having the nucleotide sequence represented by SEQ ID NOS: 175321, 175322, 175323, 175324, 175325, 175326, 175327, 175328, 175329, 175330, 175331 were selected from the ORFs having the nucleotide sequence represented by SEQ ID NO: 173191.

[14837] The probes having the nucleotide sequence represented by SEQ ID NOS: 175332, 175333, 175334, 175335, 175336, 175337, 175338, 175339, 175340, 175341, 175342 were selected from the ORFs having the nucleotide sequence represented by SEQ ID NO: 173192.

[14838] The probes having the nucleotide sequence represented by SEQ ID NOS: 175343, 175344, 175345, 175346, 175347, 175348, 175349, 175350, 175351, 175352, 175353 were selected from the ORFs having the nucleotide sequence represented by SEQ ID NO: 173193.

[14839] The probes having the nucleotide sequence represented by SEQ ID NOS: 175354, 175355, 175356, 175357, 175358, 175359, 175360, 175361, 175362, 175363, 175364 were selected from the ORFs having the nucleotide sequence represented by SEQ ID NO: 173194.

[14840] The probes having the nucleotide sequence represented by SEQ ID NOS: 175365, 175366, 175367, 175368, 175369, 175370, 175371, 175372, 175373, 175374, 175375 were selected from the ORFs having the nucleotide sequence represented by SEQ ID NO: 173195.

[14841] The probes having the nucleotide sequence represented by SEQ ID NOS: 175376, 175377, 175378, 175379, 175380, 175381, 175382, 175383, 175384, 175385, 175386 were selected from the ORFs having the nucleotide sequence represented by SEQ ID NO: 173196.

[14842] The probes having the nucleotide sequence represented by SEQ ID NOS: 175387, 175388, 175389, 175390, 175391, 175392, 175393, 175394, 175395, 175396, 175397 were selected from the ORFs having the nucleotide sequence represented by SEQ ID NO: 173197.

[14843] The probes having the nucleotide sequence represented by SEQ ID NOS: 175398, 175399, 175400, 175401, 175402, 175403, 175404, 175405, 175406, 175407, 175408 were selected from the ORFs having the nucleotide sequence represented by SEQ ID NO: 173198.

[14844] The probes having the nucleotide sequence represented by SEQ ID NOS: 175409, 175410, 175411, 175412, 175413, 175414, 175415, 175416, 175417, 175418, 175419 were selected from the ORFs having the nucleotide sequence represented by SEQ ID NO: 173199.

[14845] The probes having the nucleotide sequence represented by SEQ ID NOS: 175420, 175421, 175422, 175423, 175424, 175425, 175426, 175427, 175428, 175429, 175430 were selected from the ORFs having the nucleotide sequence represented by SEQ ID NO: 173200.

[14846] The probes having the nucleotide sequence represented by SEQ ID NOS: 175431, 175432, 175433, 175434, 175435, 175436, 175437, 175438, 175439, 175440, 175441 were selected from the ORFs having the nucleotide sequence represented by SEQ ID NO: 173201.

[14847] The probes having the nucleotide sequence represented by SEQ ID NOS: 175442, 175443, 175444, 175445, 175446, 175447, 175448, 175449, 175450, 175451, 175452 were selected from the ORFs having the nucleotide sequence represented by SEQ ID NO: 173202.

[14848] The probes having the nucleotide sequence represented by SEQ ID NOS: 175453, 175454, 175455, 175456, 175457, 175458, 175459, 175460, 175461, 175462, 175463 were selected from the ORFs having the nucleotide sequence represented by SEQ ID NO: 173203.

[14849] The probes having the nucleotide sequence represented by SEQ ID NOS: 175464, 175465, 175466, 175467, 175468, 175469, 175470, 175471, 175472, 175473, 175474 were selected from the ORFs having the nucleotide sequence represented by SEQ ID NO: 173204.

[14850] The probes having the nucleotide sequence represented by SEQ ID NOS: 175475, 175476, 175477, 175478, 175479, 175480, 175481, 175482, 175483, 175484, 175485 were selected from the ORFs having the nucleotide sequence represented by SEQ ID NO: 173205.

[14851] The probes having the nucleotide sequence represented by SEQ ID NOS: 175486, 175487, 175488, 175489, 175490, 175491, 175492, 175493, 175494, 175495, 175496 were selected from the ORFs having the nucleotide sequence represented by SEQ ID NO: 173206.

[14852] The probes having the nucleotide sequence represented by SEQ ID NOS: 175497, 175498, 175499, 175500, 175501, 175502, 175503, 175504, 175505, 175506, 175507 were selected from the ORFs having the nucleotide sequence represented by SEQ ID NO: 173207.

[14853] The probes having the nucleotide sequence represented by SEQ ID NOS: 175508, 175509, 175510, 175511, 175512, 175513, 175514, 175515, 175516, 175517, 175518 were selected from the ORFs having the nucleotide sequence represented by SEQ ID NO: 173208.

[14854] The probes having the nucleotide sequence represented by SEQ ID NOS: 175519, 175520, 175521, 175522, 175523, 175524, 175525, 175526, 175527, 175528, 175529 were selected from the ORFs having the nucleotide sequence represented by SEQ ID NO: 173209.

[14855] The probes having the nucleotide sequence represented by SEQ ID NOS: 175530, 175531, 175532, 175533, 175534, 175535, 175536, 175537, 175538, 175539, 175540 were selected from the ORFs having the nucleotide sequence represented by SEQ ID NO: 173210.

[14856] The probes having the nucleotide sequence represented by SEQ ID NOS: 175541, 175542, 175543, 175544, 175545, 175546, 175547, 175548, 175549, 175550, 175551 were selected from the ORFs having the nucleotide sequence represented by SEQ ID NO: 173211.

[14857] The probes having the nucleotide sequence represented by SEQ ID NOS: 175552, 175553, 175554, 175555, 175556, 175557, 175558, 175559, 175560, 175561, 175562 were selected from the ORFs having the nucleotide sequence represented by SEQ ID NO: 173212.

[14858] The probes having the nucleotide sequence represented by SEQ ID NOS: 175563, 175564, 175565, 175566, 175567, 175568, 175569, 175570, 175571, 175572, 175573 were selected from the ORFs having the nucleotide sequence represented by SEQ ID NO: 173213.

[14859] The probes having the nucleotide sequence represented by SEQ ID NOS: 175574, 175575, 175576, 175577, 175578, 175579, 175580, 175581, 175582, 175583, 175584 were selected from the ORFs having the nucleotide sequence represented by SEQ ID NO: 173214.

[14860] The probes having the nucleotide sequence represented by SEQ ID NOS: 175585, 175586, 175587, 175588, 175589, 175590, 175591, 175592, 175593, 175594, 175595 were selected from the ORFs having the nucleotide sequence represented by SEQ ID NO: 173215.

[14861] The probes having the nucleotide sequence represented by SEQ ID NOS: 175596, 175597, 175598, 175599, 175600, 175601, 175602, 175603, 175604, 175605, 175606 were selected from the ORFs having the nucleotide sequence represented by SEQ ID NO: 173216.

[14862] The probes having the nucleotide sequence represented by SEQ ID NOS: 175607, 175608, 175609, 175610, 175611, 175612, 175613, 175614, 175615, 175616, 175617 were selected from the ORFs having the nucleotide sequence represented by SEQ ID NO: 173217.

[14863] The probes having the nucleotide sequence represented by SEQ ID NOS: 175618, 175619, 175620, 175621, 175622, 175623, 175624, 175625, 175626, 175627, 175628 were selected from the ORFs having the nucleotide sequence represented by SEQ ID NO: 173218.

[14864] The probes having the nucleotide sequence represented by SEQ ID NOS: 175629, 175630, 175631, 175632, 175633, 175634, 175635, 175636, 175637, 175638, 175639 were selected from the ORFs having the nucleotide sequence represented by SEQ ID NO: 173219.

[14865] The probes having the nucleotide sequence represented by SEQ ID NOS: 175640, 175641, 175642, 175643, 175644, 175645, 175646, 175647, 175648, 175649, 175650 were selected from the ORFs having the nucleotide sequence represented by SEQ ID NO: 173220.

[14866] The probes having the nucleotide sequence represented by SEQ ID NOS: 175651, 175652, 175653, 175654, 175655, 175656, 175657, 175658, 175659, 175660, 175661 were selected from the ORFs having the nucleotide sequence represented by SEQ ID NO: 173221.

[14867] The probes having the nucleotide sequence represented by SEQ ID NOS: 175662, 175663, 175664, 175665, 175666, 175667, 175668, 175669, 175670, 175671, 175672 were selected from the ORFs having the nucleotide sequence represented by SEQ ID NO: 173222.

[14868] The probes having the nucleotide sequence represented by SEQ ID NOS: 175673, 175674, 175675, 175676, 175677, 175678, 175679, 175680, 175681, 175682, 175683 were selected from the ORFs having the nucleotide sequence represented by SEQ ID NO: 173223.

[14869] The probes having the nucleotide sequence represented by SEQ ID NOS: 175684, 175685, 175686, 175687, 175688, 175689, 175690, 175691, 175692, 175693, 175694 were selected from the ORFs having the nucleotide sequence represented by SEQ ID NO: 173224.

[14870] The probes having the nucleotide sequence represented by SEQ ID NOS: 175695, 175696, 175697, 175698, 175699, 175700, 175701, 175702, 175703, 175704, 175705 were selected from the ORFs having the nucleotide sequence represented by SEQ ID NO: 173225.

[14871] The probes having the nucleotide sequence represented by SEQ ID NOS: 175706, 175707, 175708, 175709, 175710, 175711, 175712, 175713, 175714, 175715, 175716 were selected from the ORFs having the nucleotide sequence represented by SEQ ID NO: 173226.

[14872] The probes having the nucleotide sequence represented by SEQ ID NOS: 175717, 175718, 175719, 175720, 175721, 175722, 175723, 175724, 175725, 175726, 175727 were selected from the ORFs having the nucleotide sequence represented by SEQ ID NO: 173227.

[14873] The probes having the nucleotide sequence represented by SEQ ID NOS: 175728, 175729, 175730, 175731, 175732, 175733, 175734, 175735, 175736, 175737, 175738 were selected from he ORFs having the nucleotide sequence represented by SEQ ID NO: 173228.

[14874] The probes having the nucleotide sequence represented by SEQ ID NOS: 175739, 175740, 175741, 175742, 175743, 175744, 175745, 175746 were selected from the ORFs having the nucleotide sequence represented by SEQ ID NO: 173229.

[14875] The probes having the nucleotide sequence represented by SEQ ID NOS: 175747, 175748, 175749, 175750, 175751, 175752, 175753, 175754, 175755, 175756, 175757 were selected from the ORFs having the nucleotide sequence represented by SEQ ID NO: 173230.

[14876] The probes having the nucleotide sequence represented by SEQ ID NOS: 175758, 175759, 175760, 175761, 175762, 175763, 175764, 175765, 175766, 175767, 175768 were selected from the ORFs having the nucleotide sequence represented by SEQ ID NO: 173231.

[14877] The probes having the nucleotide sequence represented by SEQ ID NOS: 175769, 175770, 175771, 175772, 175773, 175774, 175775, 175776, 175777, 175778, 175779 were selected from the ORFs having the nucleotide sequence represented by SEQ ID NO: 173232.

[14878] The probes having the nucleotide sequence represented by SEQ ID NOS: 175780, 175781, 175782, 175783, 175784, 175785, 175786, 175787, 175788, 175789, 175790 were selected from the ORFs having the nucleotide sequence represented by SEQ ID NO: 173233.

[14879] The probes having the nucleotide sequence represented by SEQ ID NOS: 175791, 175792, 175793, 175794, 175795, 175796, 175797, 175798, 175799, 175800, 175801 were selected from the ORFs having the nucleotide sequence represented by SEQ ID NO: 173234.

[14880] The probes having the nucleotide sequence represented by SEQ ID NOS: 175802, 175803, 175804, 175805, 175806, 175807, 175808, 175809, 175810, 175811, 175812 were selected from the ORFs having the nucleotide sequence represented by SEQ ID NO: 173235.

[14881] The probes having the nucleotide sequence represented by SEQ ID NOS: 175813, 175814, 175815, 175816, 175817, 175818, 175819, 175820, 175821, 175822, 175823 were selected from the ORFs having the nucleotide sequence represented by SEQ ID NO: 173236.

[14882] The probes having the nucleotide sequence represented by SEQ ID NOS: 175824, 175825, 175826, 175827, 175828, 175829, 175830, 175831, 175832, 175833, 175834 were selected from the ORFs having the nucleotide sequence represented by SEQ ID NO: 173237.

[14883] The probes having the nucleotide sequence represented by SEQ ID NOS: 175835, 175836, 175837, 175838, 175839, 175840, 175841, 175842, 175843, 175844, 175845 were selected from the ORFs having the nucleotide sequence represented by SEQ ID NO: 173238.

[14884] The probes having the nucleotide sequence represented by SEQ ID NOS: 175846, 175847, 175848, 175849, 175850, 175851, 175852, 175853, 175854, 175855, 175856 were selected from the ORFs having the nucleotide sequence represented by SEQ ID NO: 173239.

[14885] The probes having the nucleotide sequence represented by SEQ ID NOS: 175857, 175858, 175859, 175860, 175861, 175862, 175863, 175864, 175865, 175866, 175867 were selected from the ORFs having the nucleotide sequence represented by SEQ ID NO: 173240.

[14886] The probes having the nucleotide sequence represented by SEQ ID NOS: 175868, 175869, 175870, 175871, 175872, 175873, 175874, 175875, 175876, 175877, 175878 were selected from the ORFs having the nucleotide sequence represented by SEQ ID NO: 173241.

[14887] The probes having the nucleotide sequence represented by SEQ ID NOS: 175879, 175880, 175881, 175882, 175883, 175884, 175885, 175886, 175887, 175888, 175889 were selected from the ORFs having the nucleotide sequence represented by SEQ ID NO: 173242.

[14888] The probes having the nucleotide sequence represented by SEQ ID NOS: 175890, 175891, 175892, 175893, 175894, 175895, 175896, 175897, 175898, 175899, 175900 were selected from the ORFs having the nucleotide sequence represented by SEQ ID NO: 173243.

[14889] The probes having the nucleotide sequence represented by SEQ ID NOS: 175901, 175902, 175903, 175904, 175905, 175906, 175907, 175908, 175909, 175910, 175911 were selected from he ORFs having the nucleotide sequence represented by SEQ D NO: 173244.

[14890] The probes having the nucleotide sequence represented by SEQ ID NOS: 175912, 175913, 175914, 175915, 175916, 175917, 175918, 175919, 175920, 175921, 175922 were selected from the ORFs having the nucleotide sequence represented by SEQ ID NO: 173245.

[14891] The probes having the nucleotide sequence represented by SEQ ID NOS: 175923, 175924, 175925, 175926, 175927, 175928, 175929, 175930, 175931, 175932 were selected from the ORFs having the nucleotide sequence represented by SEQ ID NO: 173246.

[14892] The probes having the nucleotide sequence represented by SEQ ID NOS: 175933, 175934, 175935, 175936, 175937, 175938, 175939, 175940, 175941, 175942, 175943 were selected from the ORFs having the nucleotide sequence represented by SEQ ID NO: 173247.

[14893] The probes having the nucleotide sequence represented by SEQ ID NOS: 175944, 175945, 175946, 175947, 175948, 175949, 175950, 175951, 175952, 175953, 175954 were selected from the ORFs having the nucleotide sequence represented by SEQ ID NO: 173248.

[14894] The probes having the nucleotide sequence represented by SEQ ID NOS: 175955, 175956, 175957, 175958, 175959, 175960, 175961, 175962, 175963, 175964, 175965 were selected from the ORFs having the nucleotide sequence represented by SEQ ID NO: 173249.

[14895] The probes having the nucleotide sequence represented by SEQ ID NOS: 175966, 175967, 175968, 175969, 175970, 175971, 175972, 175973, 175974, 175975, 175976 were selected from the ORFs having the nucleotide sequence represented by SEQ ID NO: 173250.

[14896] The probes having the nucleotide sequence represented by SEQ ID NOS: 175977, 175978, 175979, 175980, 175981, 175982, 175983, 175984, 175985, 175986, 175987 were selected from the ORFs having the nucleotide sequence represented by SEQ ID NO: 173251.

[14897] The probes having the nucleotide sequence represented by SEQ ID NOS: 175988, 175989, 175990, 175991, 175992, 175993, 175994, 175995, 175996, 175997, 175998 were selected from the ORFs having the nucleotide sequence represented by SEQ ID NO: 173252.

[14898] The probes having the nucleotide sequence represented by SEQ ID NOS: 175999, 176000, 176001, 176002, 176003, 176004, 176005, 176006, 176007, 176008, 176009 were selected from the ORFs having the nucleotide sequence represented by SEQ ID NO: 173253.

[14899] The probes having the nucleotide sequence represented by SEQ ID NOS: 176010, 176011, 176012, 176013, 176014, 176015, 176016, 176017, 176018, 176019, 176020 were selected from the ORFs having the nucleotide sequence represented by SEQ ID NO: 173254.

[14900] The probes having the nucleotide sequence represented by SEQ ID NOS: 176021, 176022, 176023, 176024, 176025, 176026, 176027, 176028, 176029, 176030, 176031 were selected from the ORFs having the nucleotide sequence represented by SEQ ID NO: 173255.

[14901] The probes having the nucleotide sequence represented by SEQ ID NOS: 176032, 176033, 176034, 176035, 176036, 176037, 176038, 176039, 176040, 176041, 176042 were selected from the ORFs having the nucleotide sequence represented by SEQ ID NO: 173256.

[14902] The probes having the nucleotide sequence represented by SEQ ID NOS: 176043, 176044, 176045, 176046, 176047, 176048, 176049, 176050, 176051, 176052, 176053 were selected from the ORFs having the nucleotide sequence represented by SEQ ID NO: 173257.

[14903] The probes having the nucleotide sequence represented by SEQ ID NOS: 176054, 176055, 176056, 176057, 176058, 176059, 176060, 176061, 176062, 176063, 176064 were selected from the ORFs having the nucleotide sequence represented by SEQ ID NO: 173258.

[14904] The probes having the nucleotide sequence represented by SEQ ID NOS: 176065, 176066, 176067, 176068, 176069, 176070, 176071, 176072, 176073, 176074, 176075 were selected from the ORFs having the nucleotide sequence represented by SEQ ID NO: 173259.

[14905] The probes having the nucleotide sequence represented by SEQ ID NOS: 176076, 176077, 176078, 176079, 176080, 176081, 176082, 176083, 176084, 176085, 176086 were selected from the ORFs having the nucleotide sequence represented by SEQ ID NO: 173260.

[14906] The probes having the nucleotide sequence represented by SEQ ID NOS: 176087, 176088, 176089, 176090, 176091, 176092, 176093, 176094, 176095, 176096, 176097 were selected from the ORFs having the nucleotide sequence represented by SEQ ID NO: 173261.

[14907] The probes having the nucleotide sequence represented by SEQ ID NOS: 176098, 176099, 176100, 176101, 176102, 176103, 176104, 176105, 176106, 176107, 176108 were selected from the ORFs having the nucleotide sequence represented by SEQ ID NO: 173262.

[14908] The probes having the nucleotide sequence represented by SEQ ID NOS: 176109, 176110, 176111, 176112, 176113, 176114, 176115, 176116, 176117, 176118, 176119 were selected from the ORFs having the nucleotide sequence represented by SEQ ID NO: 173263.

[14909] The probes having the nucleotide sequence represented by SEQ ID NOS: 176120, 176121, 176122, 176123, 176124, 176125, 176126, 176127, 176128, 176129, 176130 were selected from the ORFs having the nucleotide sequence represented by SEQ ID NO: 173264.

[14910] The probes having the nucleotide sequence represented by SEQ ID NOS: 176131, 176132, 176133, 176134, 176135, 176136, 176137, 176138, 176139, 176140, 176141 were selected from the ORFs having the nucleotide sequence represented by SEQ ID NO: 173265.

[14911] The probes having the nucleotide sequence represented by SEQ ID NOS: 176142, 176143, 176144, 176145, 176146, 176147, 176148, 176149, 176150, 176151, 176152 were selected from the ORFs having the nucleotide sequence represented by SEQ ID NO: 173266.

[14912] The probes having the nucleotide sequence represented by SEQ ID NOS: 176153, 176154, 176155, 176156, 176157, 176158, 176159, 176160, 176161, 176162, 176163 were selected from the ORFs having the nucleotide sequence represented by SEQ ID NO: 173267.

[14913] The probes having the nucleotide sequence represented by SEQ ID NOS: 176164, 176165, 176166, 176167, 176168, 176169, 176170, 176171, 176172, 176173, 176174 were selected from the ORFs having the nucleotide sequence represented by SEQ ID NO: 173268.

[14914] The probes having the nucleotide sequence represented by SEQ ID NOS: 176175, 176176, 176177, 176178, 176179, 176180, 176181, 176182, 176183, 176184, 176185 were selected from the ORFs having the nucleotide sequence represented by SEQ ID NO: 173269.

[14915] The probes having the nucleotide sequence represented by SEQ ID NOS: 176186, 176187, 176188, 176189, 176190, 176191, 176192, 176193, 176194, 176195, 176196 were selected from the ORFs having the nucleotide sequence represented by SEQ ID NO: 173270.

[14916] The probes having the nucleotide sequence represented by SEQ ID NOS: 176197, 176198, 176199, 176200, 176201, 176202, 176203, 176204, 176205, 176206, 176207 were selected from the ORFs having the nucleotide sequence represented by SEQ ID NO: 173271.

[14917] The probes having the nucleotide sequence represented by SEQ ID NOS: 176208, 176209, 176210, 176211, 176212, 176213, 176214, 176215, 176216, 176217, 176218 were selected from the ORFs having the nucleotide sequence represented by SEQ ID NO: 173272.

[14918] The probes having the nucleotide sequence represented by SEQ ID NOS: 176219, 176220, 176221, 176222, 176223, 176224, 176225, 176226, 176227, 176228, 176229 were selected from the ORFs having the nucleotide sequence represented by SEQ ID NO: 173273.

[14919] The probes having the nucleotide sequence represented by SEQ ID NOS: 176230, 176231, 176232, 176233, 176234, 176235, 176236, 176237, 176238, 176239, 176240 were selected from the ORFs having the nucleotide sequence represented by SEQ ID NO: 173274.

[14920] The probes having the nucleotide sequence represented by SEQ ID NOS: 176241, 176242, 176243, 176244, 176245, 176246, 176247, 176248, 176249, 176250, 176251 were selected from the ORFs having the nucleotide sequence represented by SEQ ID NO: 173275.

[14921] The probes having the nucleotide sequence represented by SEQ ID NOS: 176252, 176253, 176254, 176255, 176256, 176257, 176258, 176259, 176260, 176261, 176262 were selected from the ORFs having the nucleotide sequence represented by SEQ ID NO: 173276.

[14922] The probes having the nucleotide sequence represented by SEQ ID NOS: 176263, 176264, 176265, 176266, 176267, 176268, 176269, 176270, 176271, 176272, 176273 were selected from the ORFs having the nucleotide sequence represented by SEQ ID NO: 173277.

[14923] The probes having the nucleotide sequence represented by SEQ ID NOS: 176274, 176275, 176276, 176277, 176278, 176279, 176280, 176281, 176282, 176283, 176284 were selected from the ORFs having the nucleotide sequence represented by SEQ ID NO: 173278.

[14924] The probes having the nucleotide sequence represented by SEQ ID NOS: 176285, 176286, 176287, 176288, 176289, 176290, 176291, 176292, 176293, 176294, 176295 were selected from the ORFs having the nucleotide sequence represented by SEQ ID NO: 173279.

[14925] The probes having the nucleotide sequence represented by SEQ ID NOS: 176296, 176297, 176298, 176299, 176300, 176301, 176302, 176303, 176304, 176305, 176306 were selected from the ORFs having the nucleotide sequence represented by SEQ ID NO: 173280.

[14926] The probes having the nucleotide sequence represented by SEQ ID NOS: 176307, 176308, 176309, 176310, 176311, 176312, 176313, 176314, 176315, 176316, 176317 were selected from the ORFs having the nucleotide sequence represented by SEQ ID NO: 173281.

[14927] The probes having the nucleotide sequence represented by SEQ ID NOS: 176318, 176319, 176320, 176321, 176322, 176323, 176324, 176325, 176326, 176327, 176328 were selected from the ORFs having the nucleotide sequence represented by SEQ ID NO: 173282.

[14928] The probes having the nucleotide sequence represented by SEQ ID NOS: 176329, 176330, 176331, 176332, 176333, 176334, 176335, 176336, 176337, 176338, 176339 were selected from the ORFs having the nucleotide sequence represented by SEQ ID NO: 173283.

[14929] The probes having the nucleotide sequence represented by SEQ ID NOS: 176340, 176341, 176342, 176343, 176344, 176345, 176346, 176347, 176348, 176349, 176350 were selected from the ORFs having the nucleotide sequence represented by SEQ ID NO: 173284.

[14930] The probes having the nucleotide sequence represented by SEQ ID NOS: 176351, 176352, 176353, 176354, 176355, 176356, 176357, 176358, 176359, 176360, 176361 were selected from the ORFs having the nucleotide sequence represented by SEQ ID NO: 173285.

[14931] The probes having the nucleotide sequence represented by SEQ ID NOS: 176362, 176363, 176364, 176365, 176366, 176367, 176368, 176369, 176370, 176371, 176372 were selected from the ORFs having the nucleotide sequence represented by SEQ ID NO: 173286.

[14932] The probes having the nucleotide sequence represented by SEQ ID NOS: 176373, 176374, 176375, 176376, 176377, 176378, 176379, 176380, 176381, 176382, 176383 were selected from the ORFs having the nucleotide sequence represented by SEQ ID NO: 173287.

[14933] The probes having the nucleotide sequence represented by SEQ ID NOS: 176384, 176385, 176386, 176387, 176388, 176389, 176390, 176391, 176392, 176393, 176394 were selected from the ORFs having the nucleotide sequence represented by SEQ ID NO: 173288.

[14934] The probes having the nucleotide sequence represented by SEQ ID NOS: 176395, 176396, 176397, 176398, 176399, 176400, 176401, 176402, 176403, 176404, 176405 were selected from the ORFs having the nucleotide sequence represented by SEQ ID NO: 173289.

[14935] The probes having the nucleotide sequence represented by SEQ ID NOS: 176406, 176407, 176408, 176409, 176410, 176411, 176412, 176413 were selected from the ORFs having the nucleotide sequence represented by SEQ ID NO: 173290.

[14936] The probes having the nucleotide sequence represented by SEQ ID NOS: 176414, 176415, 176416, 176417, 176418, 176419, 176420, 176421, 176422, 176423, 176424 were selected from the ORFs having the nucleotide sequence represented by SEQ ID NO: 173291.

[14937] The probes having the nucleotide sequence represented by SEQ ID NOS: 176425, 176426, 176427, 176428, 176429, 176430, 176431, 176432, 176433, 176434, 176435 were selected from the ORFs having the nucleotide sequence represented by SEQ ID NO: 173292.

[14938] The probes having the nucleotide sequence represented by SEQ ID NOS: 176436, 176437, 176438, 176439, 176440, 176441, 176442, 176443, 176444, 176445, 176446 were selected from the ORFs having the nucleotide sequence represented by SEQ ID NO: 173293.

[14939] The probes having the nucleotide sequence represented by SEQ ID NOS: 176447, 176448, 176449, 176450, 176451, 176452, 176453, 176454, 176455, 176456, 176457 were selected from the ORFs having the nucleotide sequence represented by SEQ ID NO: 173294.

[14940] The probes having the nucleotide sequence represented by SEQ ID NOS: 176458, 176459, 176460, 176461, 176462, 176463, 176464, 176465, 176466, 176467, 176468 were selected from the ORFs having the nucleotide sequence represented by SEQ ID NO: 173295.

[14941] The probes having the nucleotide sequence represented by SEQ ID NOS: 176469, 176470, 176471, 176472, 176473, 176474, 176475, 176476, 176477, 176478, 176479 were selected from the ORFs having the nucleotide sequence represented by SEQ ID NO: 173296.

[14942] The probes having the nucleotide sequence represented by SEQ ID NOS: 176480, 176481, 176482, 176483, 176484, 176485, 176486, 176487, 176488, 176489, 176490 were selected from the ORFs having the nucleotide sequence represented by SEQ ID NO: 173297.

[14943] The probes having the nucleotide sequence represented by SEQ ID NOS: 176491, 176492, 176493, 176494, 176495, 176496, 176497, 176498, 176499, 176500, 176501 were selected from the ORFs having the nucleotide sequence represented by SEQ ID NO: 173298.

[14944] The probes having the nucleotide sequence represented by SEQ ID NOS: 176502, 176503, 176504, 176505, 176506, 176507, 176508, 176509, 176510, 176511, 176512 were selected from the ORFs having the nucleotide sequence represented by SEQ ID NO: 173299.

[14945] The probes having the nucleotide sequence represented by SEQ ID NOS: 176513, 176514, 176515, 176516, 176517, 176518, 176519, 176520, 176521, 176522, 176523 were selected from the ORFs having the nucleotide sequence represented by SEQ ID NO: 173300.

[14946] The probes having the nucleotide sequence represented by SEQ ID NOS: 176524, 176525, 176526, 176527, 176528, 176529, 176530, 176531, 176532, 176533, 176534 were selected from the ORFs having the nucleotide sequence represented by SEQ ID NO: 173301.

[14947] The probes having the nucleotide sequence represented by SEQ ID NOS: 176535, 176536, 176537, 176538, 176539, 176540, 176541, 176542, 176543, 176544, 176545 were selected from the ORFs having the nucleotide sequence represented by SEQ ID NO: 173302.

[14948] The probes having the nucleotide sequence represented by SEQ ID NOS: 176546, 176547, 176548, 176549, 176550, 176551, 176552, 176553, 176554, 176555, 176556 were selected from the ORFs having the nucleotide sequence represented by SEQ ID NO: 173303.

[14949] The probes having the nucleotide sequence represented by SEQ ID NOS: 176557, 176558, 176559, 176560, 176561, 176562, 176563, 176564, 176565, 176566, 176567 were selected from the ORFs having the nucleotide sequence represented by SEQ ID NO: 173304.

[14950] The probes having the nucleotide sequence represented by SEQ ID NOS: 176568, 176569, 176570, 176571, 176572, 176573, 176574, 176575, 176576, 176577, 176578 were selected from the ORFs having the nucleotide sequence represented by SEQ ID NO: 173305.

[14951] The probes having the nucleotide sequence represented by SEQ ID NOS: 176579, 176580, 176581, 176582, 176583, 176584, 176585, 176586, 176587, 176588, 176589 were selected from the ORFs having the nucleotide sequence represented by SEQ ID NO: 173306.

[14952] The probes having the nucleotide sequence represented by SEQ ID NOS: 176590, 176591, 176592, 176593, 176594, 176595, 176596, 176597, 176598, 176599, 176600 were selected from the ORFs having the nucleotide sequence represented by SEQ ID NO: 173307.

[14953] The probes having the nucleotide sequence represented by SEQ ID NOS: 176601, 176602, 176603, 176604, 176605, 176606, 176607, 176608 were selected from the ORFs having the nucleotide sequence represented by SEQ ID NO: 173308.

[14954] The probes having the nucleotide sequence represented by SEQ ID NOS: 176609, 176610, 176611, 176612, 176613, 176614, 176615, 176616, 176617, 176618, 176619 were selected from the ORFs having the nucleotide sequence represented by SEQ ID NO: 173309.

[14955] The probes having the nucleotide sequence represented by SEQ ID NOS: 176620, 176621, 176622, 176623, 176624, 176625, 176626, 176627, 176628, 176629, 176630 were selected from the ORFs having the nucleotide sequence represented by SEQ ID NO: 173310.

[14956] The probes having the nucleotide sequence represented by SEQ ID NOS: 176631, 176632, 176633, 176634, 176635, 176636, 176637, 176638, 176639, 176640, 176641 were selected from the ORFs having the nucleotide sequence represented by SEQ ID NO: 173311.

[14957] The probes having the nucleotide sequence represented by SEQ ID NOS: 176642, 176643, 176644, 176645, 176646, 176647, 176648, 176649, 176650, 176651, 176652 were selected from the ORFs having the nucleotide sequence represented by SEQ ID NO: 173312.

[14958] The probes having the nucleotide sequence represented by SEQ ID NOS: 176653, 176654, 176655, 176656, 176657, 176658, 176659, 176660, 176661, 176662, 176663 were selected from the ORFs having the nucleotide sequence represented by SEQ ID NO: 173313.

[14959] The probes having the nucleotide sequence represented by SEQ ID NOS: 176664, 176665, 176666, 176667, 176668, 176669, 176670, 176671, 176672, 176673, 176674 were selected from the ORFs having the nucleotide sequence represented by SEQ ID NO: 173314.

[14960] The probes having the nucleotide sequence represented by SEQ ID NOS: 176675, 176676, 176677, 176678, 176679, 176680, 176681, 176682, 176683, 176684, 176685 were selected from the ORFs having the nucleotide sequence represented by SEQ ID NO: 173315.

[14961] The probes having the nucleotide sequence represented by SEQ ID NOS: 176686, 176687, 176688, 176689, 176690, 176691, 176692, 176693, 176694, 176695, 176696 were selected from the ORFs having the nucleotide sequence represented by SEQ ID NO: 173316.

[14962] The probes having the nucleotide sequence represented by SEQ ID NOS: 176697, 176698, 176699, 176700, 176701, 176702, 176703, 176704, 176705, 176706, 176707 were selected from the ORFs having the nucleotide sequence represented by SEQ ID NO: 173317.

[14963] The probes having the nucleotide sequence represented by SEQ ID NOS: 176708, 176709, 176710, 176711, 176712, 176713, 176714, 176715, 176716, 176717, 176718 were selected from the ORFs having the nucleotide sequence represented by SEQ ID NO: 173318.

[14964] The probes having the nucleotide sequence represented by SEQ ID NOS: 176719, 176720, 176721, 176722, 176723, 176724, 176725, 176726, 176727, 176728, 176729 were selected from the ORFs having the nucleotide sequence represented by SEQ ID NO: 173319.

[14965] The probes having the nucleotide sequence represented by SEQ ID NOS: 176730, 176731, 176732, 176733, 176734, 176735, 176736, 176737, 176738, 176739, 176740 were selected from the ORFs having the nucleotide sequence represented by SEQ ID NO: 173320.

[14966] The probes having the nucleotide sequence represented by SEQ ID NOS: 176741, 176742, 176743, 176744, 176745, 176746, 176747, 176748, 176749, 176750, 176751 were selected from the ORFs having the nucleotide sequence represented by SEQ ID NO: 173321.

[14967] The probes having the nucleotide sequence represented by SEQ ID NOS: 176752, 176753, 176754, 176755, 176756, 176757, 176758, 176759, 176760, 176761, 176762 were selected from the ORFs having the nucleotide sequence represented by SEQ ID NO: 173322.

[14968] The probes having the nucleotide sequence represented by SEQ ID NOS: 176763, 176764, 176765, 176766, 176767, 176768, 176769, 176770, 176771, 176772, 176773 were selected from the ORFs having the nucleotide sequence represented by SEQ ID NO: 173323.

[14969] The probes having the nucleotide sequence represented by SEQ ID NOS: 176774, 176775, 176776, 176777, 176778, 176779, 176780, 176781, 176782, 176783, 176784 were selected from the ORFs having the nucleotide sequence represented by SEQ ID NO: 173324.

[14970] The probes having the nucleotide sequence represented by SEQ ID NOS: 176785, 176786, 176787, 176788, 176789, 176790, 176791, 176792, 176793, 176794, 176795 were selected from the ORFs having the nucleotide sequence represented by SEQ ID NO: 173325.

[14971] The probes having the nucleotide sequence represented by SEQ ID NOS: 176796, 176797, 176798, 176799, 176800, 176801, 176802, 176803, 176804, 176805, 176806 were selected from the ORFs having the nucleotide sequence represented by SEQ ID NO: 173326.

[14972] The probes having the nucleotide sequence represented by SEQ ID NOS: 176807, 176808, 176809, 176810, 176811, 176812, 176813, 176814, 176815, 176816, 176817 were selected from the ORFs having the nucleotide sequence represented by SEQ ID NO: 173327.

[14973] The probes having the nucleotide sequence represented by SEQ ID NOS: 176818, 176819, 176820, 176821, 176822, 176823, 176824, 176825, 176826, 176827, 176828 were selected from the ORFs having the nucleotide sequence represented by SEQ ID NO: 173328.

[14974] The probes having the nucleotide sequence represented by SEQ ID NOS: 176829, 176830, 176831, 176832, 176833, 176834, 176835, 176836, 176837, 176838, 176839 were selected from the ORFs having the nucleotide sequence represented by SEQ ID NO: 173329.

[14975] The probes having the nucleotide sequence represented by SEQ ID NOS: 176840, 176841, 176842, 176843, 176844, 176845, 176846, 176847, 176848, 176849, 176850 were selected from the ORFs having the nucleotide sequence represented by SEQ ID NO: 173330.

[14976] The probes having the nucleotide sequence represented by SEQ ID NOS: 176851, 176852, 176853, 176854, 176855, 176856, 176857, 176858, 176859, 176860, 176861 were selected from the ORFs having the nucleotide sequence represented by SEQ ID NO: 173331.

[14977] The probes having the nucleotide sequence represented by SEQ ID NOS: 176862, 176863, 176864, 176865, 176866, 176867, 176868, 176869, 176870, 176871, 176872 were selected from the ORFs having the nucleotide sequence represented by SEQ ID NO: 173332.

[14978] The probes having the nucleotide sequence represented by SEQ ID NOS: 176873, 176874, 176875, 176876, 176877, 176878, 176879, 176880, 176881, 176882, 176883 were selected from the ORFs having the nucleotide sequence represented by SEQ ID NO: 173333.

[14979] The probes having the nucleotide sequence represented by SEQ ID NOS: 176884, 176885, 176886, 176887, 176888, 176889, 176890, 176891, 176892, 176893, 176894 were selected from the ORFs having the nucleotide sequence represented by SEQ ID NO: 173334.

[14980] The probes having the nucleotide sequence represented by SEQ ID NOS: 176895, 176896, 176897, 176898, 176899, 176900, 176901, 176902., 176903, 176904, 176905 were selected from the ORFs having the nucleotide sequence represented by SEQ ID NO: 173335.

[14981] The probes having the nucleotide sequence represented by SEQ ID NOS: 176906, 176907, 176908, 176909, 176910, 176911, 176912, 176913, 176914, 176915, 176916 were selected from the ORFs having the nucleotide sequence represented by SEQ ID NO: 173336.

[14982] The probes having the nucleotide sequence represented by SEQ ID NOS: 176917, 176918, 176919, 176920, 176921, 176922, 176923, 176924 were selected from the ORFs having the nucleotide sequence represented by SEQ ID NO: 173337.

[14983] The probes having the nucleotide sequence represented by SEQ ID NOS: 176925, 176926, 176927, 176928, 176929, 176930, 176931, 176932, 176933, 176934, 176935 were selected from the ORFs having the nucleotide sequence represented by SEQ ID NO: 173338.

[14984] The probes having the nucleotide sequence represented by SEQ ID NOS: 176936, 176937, 176938, 176939, 176940, 176941, 176942, 176943, 176944, 176945, 176946 were selected from the ORFs having the nucleotide sequence represented by SEQ ID NO: 173339.

[14985] The probes having the nucleotide sequence represented by SEQ ID NOS: 176947, 176948, 176949, 176950, 176951, 176952, 176953, 176954, 176955, 176956, 176957 were selected from the ORFs having the nucleotide sequence represented by SEQ ID NO: 173340.

[14986] The probes having the,nucleotide sequence represented by SEQ ID NOS: 176958, 176959, 176960, 176961, 176962, 176963, 176964, 176965, 176966, 176967, 176968 were selected from the ORFs having the nucleotide sequence represented by SEQ ID NO: 173341.

[14987] The probes having the nucleotide sequence represented by SEQ ID NOS: 176969, 176970, 176971, 176972, 176973, 176974, 176975, 176976, 176977, 176978, 176979 were selected from the ORFs having the nucleotide sequence represented by SEQ ID NO: 173342.

[14988] The probes having the nucleotide sequence represented by SEQ ID NOS: 176980, 176981, 176982, 176983, 176984, 176985, 176986, 176987, 176988, 176989, 176990 were selected from the ORFs having the nucleotide sequence represented by SEQ ID NO: 173343.

[14989] The probes having the nucleotide sequence represented by SEQ ID NOS: 176991, 176992, 176993, 176994, 176995, 176996, 176997, 176998, 176999, 177000, 177001 were selected from the ORFs having the nucleotide sequence represented by SEQ ID NO: 173344.

[14990] The probes having the nucleotide sequence represented by SEQ ID NOS: 177002, 177003, 177004, 177005, 177006, 177007, 177008, 177009, 177010, 177011, 177012 were selected from the ORFs having the nucleotide sequence represented by SEQ ID NO: 173345.

[14991] The probes having the nucleotide sequence represented by SEQ ID NOS: 177013, 177014, 177015, 177016, 177017, 177018, 177019, 177020, 177021, 177022, 177023 were selected from the ORFs having the nucleotide sequence represented by SEQ ID NO: 173346.

[14992] The probes having the nucleotide sequence represented by SEQ ID NOS: 177024, 177025, 177026, 177027, 177028, 177029, 177030, 177031, 177032, 177033, 177034 were selected from the ORFs having the nucleotide sequence represented by SEQ ID NO: 173347.

[14993] The probes having the nucleotide sequence represented by SEQ ID NOS: 177035, 177036, 177037, 177038, 177039, 177040, 177041, 177042, 177043, 177044, 177045 were selected from the ORFs having the nucleotide sequence represented by SEQ ID NO: 173348.

[14994] The probes having the nucleotide sequence represented by SEQ ID NOS: 177046, 177047, 177048, 177049, 177050, 177051, 177052, 177053, 177054, 177055, 177056 were selected from the ORFs having the nucleotide sequence represented by SEQ ID NO: 173349.

[14995] The probes having the nucleotide sequence represented by SEQ ID NOS: 177057, 177058, 177059, 177060, 177061, 177062, 177063, 177064, 177065, 177066, 177067 were selected from the ORFs having the nucleotide sequence represented by SEQ ID NO: 173350.

[14996] The probes having the nucleotide sequence represented by SEQ ID NOS: 177068, 177069, 177070, 177071, 177072, 177073, 177074, 177075, 177076, 177077, 177078 were selected from the ORFs having the nucleotide sequence represented by SEQ ID NO: 173351.

[14997] The probes having the nucleotide sequence represented by SEQ ID NOS: 177079, 177080, 177081, 177082, 177083, 177084, 177085, 177086, 177087, 177088, 177089 were selected from the ORFs having the nucleotide sequence represented by SEQ ID NO: 173352.

[14998] The probes having the nucleotide sequence represented by SEQ ID NOS: 177090, 177091, 177092, 177093, 177094, 177095, 177096, 177097, 177098, 177099, 177100 were selected from the ORFs having the nucleotide sequence represented by SEQ ID NO: 173353.

[14999] The probes having the nucleotide sequence represented by SEQ ID NOS: 177101, 177102, 177103, 177104, 177105, 177106, 177107, 177108, 177109, 177110, 177111 were selected from the ORFs having the nucleotide sequence represented by SEQ ID NO: 173354.

[15000] The probes having the nucleotide sequence represented by SEQ ID NOS: 177112, 177113, 177114, 177115, 177116, 177117, 177118, 177119, 177120, 177121, 177122 were selected from the ORFs having the nucleotide sequence represented by SEQ ID NO: 173355.

[15001] The probes having the nucleotide sequence represented by SEQ ID NOS: 177123, 177124, 177125, 177126, 177127, 177128, 177129, 177130, 177131, 177132, 177133 were selected from the ORFs having the nucleotide sequence represented by SEQ ID NO: 173356.

[15002] The probes having the nucleotide sequence represented by SEQ ID NOS: 177134, 177135, 177136, 177137, 177138, 177139, 177140, 177141, 177142, 177143, 177144 were selected from the ORFs having the nucleotide sequence represented by SEQ ID NO: 13357.

[15003] The probes having the nucleotide sequence represented by SEQ ID NOS: 177145, 177146, 177147, 177148, 177149, 177150, 177151, 177152, 177153, 177154, 177155 were selected from the ORFs having the nucleotide sequence represented by SEQ ID NO: 173358.

[15004] The probes having the nucleotide sequence represented by SEQ ID NOS: 177156, 177157, 177158, 177159, 177160, 177161, 177162, 177163, 177164, 177165, 177166 were selected from the ORFs having the nucleotide sequence represented by SEQ ID NO: 173359.

[15005] The probes having the nucleotide sequence represented by SEQ ID NOS: 177167, 177168, 177169, 177170, 177171, 177172, 177173, 177174, 177175, 177176, 177177 were selected from the ORFs having the nucleotide sequence represented by SEQ ID NO: 173360.

[15006] The probes having the nucleotide sequence represented by SEQ ID NOS: 177178, 177179, 177180, 177181, 177182, 177183, 177184, 177185, 177186, 177187, 177188 were selected from the ORFs having the nucleotide sequence represented by SEQ ID NO: 173361.

[15007] The probes having the nucleotide sequence represented by SEQ ID NOS: 177189, 177190, 177191, 177192, 177193, 177194, 177195, 177196, 177197, 177198, 177199 were selected from the ORFs having the nucleotide sequence represented by SEQ ID NO: 173362.

[15008] The probes having the nucleotide sequence represented by SEQ ID NOS: 177200, 177201, 177202, 177203, 177204, 177205, 177206, 177207, 177208, 177209, 177210 were selected from the ORFs having the nucleotide sequence represented by SEQ ID NO: 173363.

[15009] The probes having the nucleotide sequence represented by SEQ ID NOS: 177211, 177212, 177213, 177214, 177215, 177216, 177217, 177218, 177219, 177220, 177221 were selected from the ORFs having the nucleotide sequence represented by SEQ ID NO: 173364.

[15010] The probes having the nucleotide sequence represented by SEQ ID NOS: 177222, 177223, 177224, 177225, 177226, 177227, 177228, 177229, 177230, 177231, 177232 were selected from the ORFs having the nucleotide sequence represented by SEQ ID NO: 173365.

[15011] The probes having the nucleotide sequence represented by SEQ ID NOS: 177233, 177234, 177235, 177236, 177237, 177238, 177239, 177240, 177241, 177242, 177243 were selected from the ORFs having the nucleotide sequence represented by SEQ ID NO: 173366.

[15012] The probes having the nucleotide sequence represented by SEQ ID NOS: 177244, 177245, 177246, 177247, 177248, 177249, 177250, 177251, 177252, 177253, 177254 were selected from the ORFs having the nucleotide sequence represented by SEQ ID NO: 173367.

[15013] The probes having the nucleotide sequence represented by SEQ ID NOS: 177255, 177256, 177257, 177258, 177259, 177260, 177261, 177262, 177263, 177264, 177265 were selected from the ORFs having the nucleotide sequence represented by SEQ ID NO: 173368.

[15014] The probes having the nucleotide sequence represented by SEQ ID NOS: 177266, 177267, 177268, 177269, 177270, 177271, 177272, 177273, 177274, 177275, 177276 were selected from the ORFs having the nucleotide sequence represented by SEQ ID NO: 173369.

[15015] The probes having the nucleotide sequence represented by SEQ ID NOS: 177277, 177278, 177279, 177280, 177281, 177282, 177283, 177284, 177285, 177286, 177287 were selected from the ORFs having the nucleotide sequence represented by SEQ ID NO: 173370.

[15016] The probes having the nucleotide sequence represented by SEQ ID NOS: 177288, 177289, 177290, 177291, 177292, 177293, 177294, 177295, 177296, 177297, 177298 were selected from the ORFs having the nucleotide sequence represented by SEQ ID NO: 173371.

[15017] The probes having the nucleotide sequence represented by SEQ ID NOS: 177299, 177300, 177301, 177302, 177303, 177304, 177305, 177306, 177307, 177308, 177309 were selected from the ORFs having the nucleotide sequence represented by SEQ ID NO: 173372.

[15018] The probes having the nucleotide sequence represented by SEQ ID NOS: 177310, 177311, 177312, 177313, 177314, 177315, 177316, 177317, 177318, 177319, 177320 were selected from the ORFs having the nucleotide sequence represented by SEQ ID NO: 173373.

[15019] The probes having the nucleotide sequence represented by SEQ ID NOS: 177321, 177322, 177323, 177324, 177325, 177326, 177327, 177328, 177329, 177330, 177331 were selected from the ORFs having the nucleotide sequence represented by SEQ ID NO: 173374.

[15020] The probes having the nucleotide sequence represented by SEQ ID NOS: 177332, 177333, 177334, 177335, 177336, 177337, 177338, 177339, 177340, 177341, 177342 were selected from the ORFs having the nucleotide sequence represented by SEQ ID NO: 173375.

[15021] The probes having the nucleotide sequence represented by SEQ ID NOS: 177343, 177344, 177345, 177346, 177347, 177348, 177349, 177350, 177351, 177352, 177353 were selected from the ORFs having the nucleotide sequence represented by SEQ ID NO: 173376.

[15022] The probes having the nucleotide sequence represented by SEQ ID NOS: 177354, 177355, 177356, 177357, 177358, 177359, 177360, 177361, 177362, 177363, 177364 were selected from the ORFs having the nucleotide sequence represented by SEQ ID NO: 173377.

[15023] The probes having the nucleotide sequence represented by SEQ ID NOS: 177365, 177366, 177367, 177368, 177369, 177370, 177371, 177372, 177373, 177374, 177375 were selected from the ORFs having the nucleotide sequence represented by SEQ ID NO: 173378.

[15024] The probes having the nucleotide sequence represented by SEQ ID NOS: 177376, 177377, 177378, 177379, 177380, 177381, 177382, 177383, 177384, 177385, 177386 were selected from the ORFs having the nucleotide sequence represented by SEQ ID NO: 173379.

[15025] The probes having the nucleotide sequence represented by SEQ ID NOS: 177387, 177388, 177389, 177390, 177391, 177392, 177393, 177394, 177395, 177396, 177397 were selected from the ORFs having the nucleotide sequence represented by SEQ ID NO: 173380.

[15026] The probes having the nucleotide sequence represented by SEQ ID NOS: 177398, 177399, 177400, 177401, 177402, 177403, 177404, 177405, 177406, 177407, 177408 were selected from the ORFs having the nucleotide sequence represented by SEQ ID NO: 173381.

[15027] The probes having the nucleotide sequence represented by SEQ ID NOS: 177409, 177410, 177411, 177412, 177413, 177414, 177415, 177416, 177417, 177418, 177419 were selected from the ORFs having the nucleotide sequence represented by SEQ ID NO: 173382.

[15028] The probes having the nucleotide sequence represented by SEQ ID NOS: 177420, 177421, 177422, 177423, 177424, 177425, 177426, 177427, 177428, 177429, 177430 were selected from the ORFs having the nucleotide sequence represented by SEQ ID NO: 173383.

[15029] The probes having the nucleotide sequence represented by SEQ ID NOS: 177431, 177432, 177433, 177434, 177435, 177436, 177437, 177438, 177439, 177440, 177441 were selected from the ORFs having the nucleotide sequence represented by SEQ ID NO: 173384.

[15030] The probes having the nucleotide sequence represented by SEQ ID NOS: 177442, 177443, 177444, 177445, 177446, 177447, 177448, 177449, 177450, 177451, 177452 were selected from the ORFs having the nucleotide sequence represented by SEQ ID NO: 173385.

[15031] The probes having the nucleotide sequence represented by SEQ ID NOS: 177453, 177454, 177455, 177456, 177457, 177458, 177459, 177460, 177461, 177462, 177463 were selected from the ORFs having the nucleotide sequence represented by SEQ ID NO: 173386.

[15032] The probes having the nucleotide sequence represented by SEQ ID NOS: 177464, 177465, 177466, 177467, 177468, 177469, 177470, 177471, 177472, 177473, 177474 were selected from the ORFs having the nucleotide sequence represented by SEQ ID NO: 173387.

[15033] The probes having the nucleotide sequence represented by SEQ ID NOS: 177475, 177476, 177477, 177478, 177479, 177480, 177481, 177482, 177483, 177484, 177485 were selected from the ORFs having the nucleotide sequence represented by SEQ ID NO: 173388.

[15034] The probes having the nucleotide sequence represented by SEQ ID NOS: 177486, 177487, 177488, 177489, 177490, 177491, 177492, 177493, 177494, 177495, 177496 were selected from the ORFs having the nucleotide sequence represented by SEQ ID NO: 173389.

[15035] The probes having the nucleotide sequence represented by SEQ ID NOS: 177497, 177498, 177499, 177500, 177501, 177502, 177503, 177504, 177505, 177506, 177507 were selected from the ORFs having the nucleotide sequence represented by SEQ ID NO: 173390.

[15036] The probes having the nucleotide sequence represented by SEQ ID NOS: 177508, 177509, 177510, 177511, 177512, 177513, 177514, 177515, 177516, 177517, 177518 were selected from the ORFs having the nucleotide sequence represented by SEQ ID NO: 173391.

[15037] The probes having the nucleotide sequence represented by SEQ ID NOS: 177519, 177520, 177521, 177522, 177523, 177524, 177525, 177526, 177527, 177528, 177529 were selected from the ORFs having the nucleotide sequence represented by SEQ ID NO: 173392.

[15038] The probes having the nucleotide sequence represented by SEQ ID NOS: 177530, 177531, 177532, 177533, 177534, 177535, 177536, 177537, 177538, 177539, 177540 were selected from the ORFs having the nucleotide sequence represented by SEQ ID NO: 173393.

[15039] The probes having the nucleotide sequence represented by SEQ ID NOS: 177541, 177542, 177543, 177544, 177545, 177546, 177547, 177548, 177549, 177550, 177551 were selected from the ORFs having the nucleotide sequence represented by SEQ ID NO: 173394.

[15040] The probes having the nucleotide sequence represented by SEQ ID NOS: 177552, 177553, 177554, 177555, 177556, 177557, 177558, 177559, 177560, 177561, 177562 were selected from the ORFs having the nucleotide sequence represented by SEQ ID NO: 173395.

[15041] The probes having the nucleotide sequence represented by SEQ ID NOS: 177563, 177564, 177565, 177566, 177567, 177568, 177569, 177570, 177571, 177572, 177573 were selected from the ORFs having the nucleotide sequence represented by SEQ ID NO: 173396.

[15042] The probes having the nucleotide sequence represented by SEQ ID NOS: 177574, 177575, 177576, 177577, 177578, 177579, 177580, 177581, 177582, 177583, 177584 were selected from the ORFs having the nucleotide sequence represented by SEQ ID NO: 173397.

[15043] The probes having the nucleotide sequence represented by SEQ ID NOS: 177585, 177586, 177587, 177588, 177589, 177590, 177591, 177592, 177593, 177594, 177595 were selected from the ORFs having the nucleotide sequence represented by SEQ ID NO: 173398.

[15044] The probes having the nucleotide sequence represented by SEQ ID NOS: 177596, 177597, 177598, 177599, 177600, 177601, 177602, 177603, 177604, 177605, 177606 were selected from the ORFs having the nucleotide sequence represented by SEQ ID NO: 173399.

[15045] The probes having the nucleotide sequence represented by SEQ ID NOS: 177607, 177608, 177609, 177610, 177611, 177612, 177613, 177614, 177615, 177616, 177617 were selected from the ORFs having the nucleotide sequence represented by SEQ ID NO: 173400.

[15046] The probes having the nucleotide sequence represented by SEQ ID NOS: 177618, 177619, 177620, 177621, 177622, 177623, 177624, 177625, 177626, 177627, 177628 were selected from the ORFs having the nucleotide sequence represented by SEQ ID NO: 173401.

[15047] The probes having the nucleotide sequence represented by SEQ ID NOS: 177629, 177630, 177631, 177632, 177633, 177634, 177635, 177636, 177637, 177638, 177639 were selected from the ORFs having the nucleotide sequence represented by SEQ ID NO: 173402.

[15048] The probes having the nucleotide sequence represented by SEQ ID NOS: 177640, 177641, 177642, 177643, 177644, 177645, 177646, 177647, 177648, 177649, 177650 were selected from the ORFs having the nucleotide sequence represented by SEQ ID NO: 173403.

[15049] The probes having the nucleotide sequence represented by SEQ ID NOS: 177651, 177652, 177653, 177654, 177655, 177656, 177657, 177658, 177659, 177660, 177661 were selected from the ORFs having the nucleotide sequence represented by SEQ ID NO: 173404.

[15050] The probes having the nucleotide sequence represented by SEQ ID NOS: 177662, 177663, 177664, 177665, 177666, 177667, 177668, 177669, 177670, 177671, 177672 were selected from the ORFs having the nucleotide sequence represented by SEQ ID NO: 173405.

[15051] The probes having the nucleotide sequence represented by SEQ ID NOS: 177673, 177674, 177675, 177676, 177677, 177678, 177679, 177680, 177681, 177682, 177683 were selected from the ORFs having the nucleotide sequence represented by SEQ ID NO: 173406.

[15052] The probes having the nucleotide sequence represented by SEQ ID NOS: 177684, 177685, 177686, 177687, 177688, 177689, 177690, 177691, 177692, 177693, 177694 were selected from the ORFs having the nucleotide sequence represented by SEQ ID NO: 173407.

[15053] The probes having the nucleotide sequence represented by SEQ ID NOS: 177695, 177696, 177697, 177698, 177699, 177700, 177701, 177702, 177703, 177704, 177705 were selected from the ORFs having the nucleotide sequence represented by SEQ ID NO: 173408.

[15054] The probes having the nucleotide sequence represented by SEQ ID NOS: 177706, 177707, 177708, 177709, 177710, 177711, 177712, 177713, 177714, 177715, 177716 were selected from the ORFs having the nucleotide sequence represented by SEQ ID NO: 173409.

[15055] The probes having the nucleotide sequence represented by SEQ ID NOS: 177717, 177718, 177719, 177720, 177721, 177722, 177723, 177724, 177725 were selected from the ORFs having the nucleotide sequence represented by SEQ ID NO: 173410.

[15056] The probes having the nucleotide sequence represented by SEQ ID NOS: 177726, 177727, 177728, 177729, 177730, 177731, 177732, 177733, 177734, 177735, 177736 were selected from the ORFs having the nucleotide sequence represented by SEQ ID NO: 173411.

[15057] The probes having the nucleotide sequence represented by SEQ ID NOS: 177737, 177738, 177739, 177740, 177741, 177742, 177743, 177744, 177745 were selected from the ORFs having the nucleotide sequence represented by SEQ ID NO: 173412.

[15058] The probes having the nucleotide sequence represented by SEQ ID NOS: 177746, 177747, 177748, 177749, 177750, 177751, 177752, 177753, 177754, 177755, 177756 were selected from the ORFs having the nucleotide sequence represented by SEQ ID NO: 173413.

[15059] The probes having the nucleotide sequence represented by SEQ ID NOS: 177757, 177758, 177759, 177760, 177761, 177762, 177763, 177764, 177765, 177766, 177767 were selected from the ORFs having the nucleotide sequence represented by SEQ ID NO: 173414.

[15060] The probes having the nucleotide sequence represented by SEQ ID NOS: 177768, 177769, 177770, 177771, 177772, 177773, 177774, 177775, 177776, 177777, 177778 were selected from the ORFs having the nucleotide sequence represented by SEQ ID NO: 173415.

[15061] The probes having the nucleotide sequence represented by SEQ ID NOS: 177779, 177780, 177781, 177782, 177783, 177784, 177785, 177786, 177787, 177788, 177789 were selected from the ORFs having the nucleotide sequence represented by SEQ ID NO: 173416.

[15062] The probes having the nucleotide sequence represented by SEQ ID NOS: 177790, 177791, 177792, 177793, 177794, 177795, 177796, 177797, 177798, 177799, 177800 were selected from the ORFs having the nucleotide sequence represented by SEQ ID NO: 173417.

[15063] The probes having the nucleotide sequence represented by SEQ ID NOS: 177801, 177802, 177803, 177804, 177805, 177806, 177807, 177808, 177809, 177810, 177811 were selected from the ORFs having the nucleotide sequence represented by SEQ ID NO: 173418.

[15064] The probes having the nucleotide sequence represented by SEQ ID NOS: 177812, 177813, 177814, 177815, 177816, 177817, 177818, 177819, 177820, 177821, 177822 were selected from the ORFs having the nucleotide sequence represented by SEQ ID NO: 173419.

[15065] The probes having the nucleotide sequence represented by SEQ ID NOS: 177823, 177824, 177825, 177826, 177827, 177828, 177829, 177830, 177831, 177832, 177833 were selected from the ORFs having the nucleotide sequence represented by SEQ ID NO: 173420.

[15066] The probes having the nucleotide sequence represented by SEQ ID NOS: 177834, 177835, 177836, 177837, 177838, 177839, 177840, 177841, 177842, 177843, 177844 were selected from the ORFs having the nucleotide sequence represented by SEQ ID NO: 173421.

[15067] The probes having the nucleotide sequence represented by SEQ ID NOS: 177845, 177846, 177847, 177848, 177849, 177850, 177851, 177852, 177853, 177854, 177855 were selected from the ORFs having the nucleotide sequence represented by SEQ ID NO: 173422.

[15068] The probes having the nucleotide sequence represented by SEQ ID NOS: 177856, 177857, 177858, 177859, 177860, 177861, 177862, 177863, 177864, 177865, 177866 were selected from the ORFs having the nucleotide sequence represented by SEQ ID NO: 173423.

[15069] The probes having the nucleotide sequence represented by SEQ ID NOS: 177867, 177868, 177869, 177870, 177871, 177872, 177873, 177874, 177875, 177876, 177877 were selected from the ORFs having the nucleotide sequence represented by SEQ ID NO: 173424.

[15070] The probes having the nucleotide sequence represented by SEQ ID NOS: 177878, 177879, 177880, 177881, 177882, 177883, 177884, 177885, 177886, 177887, 177888 were selected from the ORFs having the nucleotide sequence represented by SEQ ID NO: 173425.

[15071] The probes having the nucleotide sequence represented by SEQ ID NOS: 177889, 177890, 177891, 177892, 177893, 177894, 177895, 177896, 177897, 177898, 177899 were selected from the ORFs having the nucleotide sequence represented by SEQ ID NO: 173426.

[15072] The probes having the nucleotide sequence represented by SEQ ID NOS: 177900, 177901, 177902, 177903, 177904, 177905, 177906, 177907, 177908, 177909, 177910 were selected from the ORFs having the nucleotide sequence represented by SEQ ID NO: 173427.

[15073] The probes having the nucleotide sequence represented by SEQ ID NOS: 177911, 177912, 177913, 177914, 177915, 177916, 177917, 177918, 177919, 177920, 177921 were selected from the ORFs having the nucleotide sequence represented by SEQ ID NO: 173428.

[15074] The probes having the nucleotide sequence represented by SEQ ID NOS: 177922, 177923, 177924, 177925, 177926, 177927, 177928, 177929, 177930, 177931, 177932 were selected from the ORFs having the nucleotide sequence represented by SEQ ID NO: 173429.

[15075] The probes having the nucleotide sequence represented by SEQ ID NOS: 177933, 177934, 177935, 177936, 177937, 177938, 177939, 177940, 177941, 177942, 177943 were selected from the ORFs having the nucleotide sequence represented by SEQ ID NO: 173430.

[15076] The probes having the nucleotide sequence represented by SEQ ID NOS: 177944, 177945, 177946, 177947, 177948, 177949, 177950, 177951, 177952, 177953, 177954 were selected from the ORFs having the nucleotide sequence represented by SEQ ID NO: 173431.

[15077] The probes having the nucleotide sequence represented by SEQ ID NOS: 177955, 177956, 177957, 177958, 177959, 177960, 177961, 177962, 177963, 177964, 177965 were selected from the ORFs having the nucleotide sequence represented by SEQ ID NO: 173432.

[15078] The probes having the nucleotide sequence represented by SEQ ID NOS: 177966, 177967, 177968, 177969, 177970, 177971, 177972, 177973, 177974, 177975, 177976 were selected from the ORFs having the nucleotide sequence represented by SEQ ID NO: 173433.

[15079] The probes having the nucleotide sequence represented by SEQ ID NOS: 177977, 177978, 177979, 177980, 177981, 177982, 177983, 177984 were selected from the ORFs having the nucleotide sequence represented by SEQ ID NO: 173434.

[15080] The probes having the nucleotide sequence represented by SEQ ID NOS: 177985, 177986, 177987; 177988, 177989, 177990, 177991, 177992, 177993, 177994, 177995 were selected from the ORFs having the nucleotide sequence represented by SEQ ID NO: 173435.

[15081] The probes having the nucleotide sequence represented by SEQ ID NOS: 177996, 177997, 177998, 177999, 178000, 178001, 178002, 178003, 178004, 178005, 178006 were selected from the ORFs having the nucleotide sequence represented by SEQ ID NO: 173436.

[15082] The probes having the nucleotide sequence represented by SEQ ID NOS: 178007, 178008, 178009, 178010, 178011, 178012, 178013, 178014, 178015, 178016, 178017 were selected from the ORFs having the nucleotide sequence represented by SEQ ID NO: 173437.

[15083] The probes having the nucleotide sequence represented by SEQ ID NOS: 178018, 178019, 178020, 178021, 178022, 178023, 178024, 178025, 178026, 178027, 178028 were selected from the ORFs having the nucleotide sequence represented by SEQ ID NO: 173438.

[15084] The probes having the nucleotide sequence represented by SEQ ID NOS: 178029, 178030, 178031, 178032, 178033, 178034, 178035, 178036, 178037, 178038, 178039 were selected from the ORFs having the nucleotide sequence represented by SEQ ID NO: 173439.

[15085] The probes having the nucleotide sequence represented by SEQ ID NOS: 178040, 178041, 178042, 178043, 178044, 178045, 178046, 178047, 178048, 178049, 178050 were selected from the ORFs having the nucleotide sequence represented by SEQ ID NO: 173440.

[15086] The probes having the nucleotide sequence represented by SEQ ID NOS: 178051, 178052, 178053, 178054, 178055, 178056, 178057, 178058, 178059, 178060, 178061 were selected from the ORFs having the nucleotide sequence represented by SEQ ID NO: 173441.

[15087] The probes having the nucleotide sequence represented by SEQ ID NOS: 178062, 178063, 178064, 178065, 178066, 178067, 178068, 178069, 178070, 178071, 178072 were selected from the ORFs having the nucleotide sequence represented by SEQ ID NO: 173442.

[15088] The probes having the nucleotide sequence represented by SEQ ID NOS: 178073, 178074, 178075, 178076, 178077, 178078, 178079, 178080, 178081, 178082, 178083 were selected from the ORFs having the nucleotide sequence represented by SEQ ID NO: 173443.

[15089] The probes having the nucleotide sequence represented by SEQ ID NOS: 178084, 178085, 178086, 178087, 178088, 178089, 178090, 178091, 178092, 178093, 178094 were selected from the ORFs having the nucleotide sequence represented by SEQ ID NO: 173444.

[15090] The probes having the nucleotide sequence represented by SEQ ID NOS: 178095, 178096, 178097, 178098, 178099, 178100, 178101, 178102, 178103, 178104, 178105 were selected from the ORFs having the nucleotide sequence represented by SEQ ID NO: 173445.

[15091] The probes having the nucleotide sequence represented by SEQ ID NOS: 178106, 178107, 178108, 178109, 178110, 178111, 178112, 178113, 178114, 178115, 178116 were selected from the ORFs having the nucleotide sequence represented by SEQ ID NO: 173446.

[15092] The probes having the nucleotide sequence represented by SEQ ID NOS: 178117, 178118, 178119, 178120, 178121, 178122, 178123, 178124, 178125, 178126, 178127 were selected from the ORFs having the nucleotide sequence represented by SEQ ID NO: 173447.

[15093] The probes having the nucleotide sequence represented by SEQ ID NOS: 178128, 178129, 178130, 178131, 178132, 178133, 178134, 178135, 178136, 178137, 178138 were selected from the ORFs having the nucleotide sequence represented by SEQ ID NO: 173448.

[15094] The probes having the nucleotide sequence represented by SEQ ID NOS: 178139, 178140, 178141, 178142, 178143, 178144, 178145, 178146, 178147, 178148, 178149 were selected from the ORFs having the nucleotide sequence represented by SEQ ID NO: 173449.

[15095] The probes having the nucleotide sequence represented by SEQ ID NOS: 178150, 178151, 178152, 178153, 178154, 178155, 178156, 178157, 178158, 178159, 178160 were selected from the ORFs having the nucleotide sequence represented by SEQ ID NO: 173450.

[15096] The probes having the nucleotide sequence represented by SEQ ID NOS: 178161, 178162, 178163, 178164, 178165, 178166, 178167, 178168, 178169, 178170, 178171 were selected from the ORFs having the nucleotide sequence represented by SEQ ID NO: 173451.

[15097] The probes having the nucleotide sequence represented by SEQ ID NOS: 178172, 178173, 178174, 178175, 178176, 178177, 178178, 178179, 178180, 178181, 178182 were selected from the ORFs having the nucleotide sequence represented by SEQ ID NO: 173452.

[15098] The probes having the nucleotide sequence represented by SEQ ID NOS: 178183, 178184, 178185, 178186, 178187, 178188, 178189, 178190, 178191, 178192, 178193 were selected from the ORFs having the nucleotide sequence represented by SEQ ID NO: 173453.

[15099] The probes having the nucleotide sequence represented by SEQ ID NOS: 178194, 178195, 178196, 178197, 178198, 178199, 178200, 178201, 178202, 178203, 178204 were selected from the ORFs having the nucleotide sequence represented by SEQ ID NO: 173454.

[15100] The probes having the nucleotide sequence represented by SEQ ID NOS: 178205, 178206, 178207, 178208, 178209, 178210, 178211, 178212, 178213, 178214, 178215 were selected from the ORFs having the nucleotide sequence represented by SEQ ID NO: 173455.

[15101] The probes having the nucleotide sequence represented by SEQ ID NOS: 178216, 178217, 178218, 178219, 178220, 178221, 178222, 178223, 178224, 178225, 178226 were selected from the ORFs having the nucleotide sequence represented by SEQ ID NO: 173456.

[15102] The probes having the nucleotide sequence represented by SEQ ID NOS: 178227, 178228, 178229, 178230, 178231, 178232, 178233, 178234, 178235, 178236, 178237 were selected from the ORFs having the nucleotide sequence represented by SEQ ID NO: 173457.

[15103] The probes having the nucleotide sequence represented by SEQ ID NOS: 178238, 178239, 178240, 178241, 178242, 178243, 178244, 178245, 178246, 178247, 178248 were selected from the ORFs having the nucleotide sequence represented by SEQ ID NO: 173458.

[15104] The probes having the nucleotide sequence represented by SEQ ID NOS: 178249, 178250, 178251, 178252, 178253, 178254, 178255, 178256, 178257, 178258, 178259 were selected from the ORFs having the nucleotide sequence represented by SEQ ID NO: 173459.

[15105] The probes having the nucleotide sequence represented by SEQ ID NOS: 178260, 178261, 178262, 178263, 178264, 178265, 178266, 178267, 178268, 178269, 178270 were selected from the ORFs having the nucleotide sequence represented by SEQ ID NO: 173460.

[15106] The probes having the nucleotide sequence represented by SEQ ID NOS: 178271, 178272, 178273, 178274, 178275, 178276, 178277, 178278, 178279, 178280, 178281 were selected from the ORFs having the nucleotide sequence represented by SEQ ID NO: 173461.

[15107] The probes having the nucleotide sequence represented by SEQ ID NOS: 178282, 178283, 178284, 178285, 178286, 178287, 178288, 178289, 178290, 178291, 178292 were selected from the ORFs having the nucleotide sequence represented by SEQ ID NO: 173462.

[15108] The probes having the nucleotide sequence represented by SEQ ID NOS: 178293, 178294, 178295, 178296, 178297, 178298, 178299, 178300, 178301, 178302, 178303 were selected from the ORFs having the nucleotide sequence represented by SEQ ID NO: 173463.

[15109] The probes having the nucleotide sequence represented by SEQ ID NOS: 178304, 178305, 178306, 178307, 178308, 178309, 178310, 178311, 178312, 178313, 178314 were selected from the ORFs having the nucleotide sequence represented by SEQ ID NO: 173464.

[15110] The probes having the nucleotide sequence represented by SEQ ID NOS: 178315, 178316, 178317, 178318, 178319, 178320, 178321, 178322, 178323, 178324, 178325 were selected from the ORFs having the nucleotide sequence represented by SEQ ID NO: 173465.

[15111] The probes having the nucleotide sequence represented by SEQ ID NOS: 178326, 178327, 178328, 178329, 178330, 178331, 178332, 178333, 178334, 178335, 178336 were selected from the ORFs having the nucleotide sequence represented by SEQ ID NO: 173466.

[15112] The probes having the nucleotide sequence represented by SEQ ID NOS: 178337, 178338, 178339, 178340, 178341, 178342, 178343, 178344, 178345, 178346, 178347 were selected from the ORFs having the nucleotide sequence represented by SEQ ID NO: 173467.

[15113] The probes having the nucleotide sequence represented by SEQ ID NOS: 178348, 178349, 178350, 178351, 178352, 178353, 178354, 178355, 178356, 178357, 178358 were selected from the ORFs having the nucleotide sequence represented by SEQ ID NO: 173468.

[15114] The probes having the nucleotide sequence represented by SEQ ID NOS: 178359, 178360, 178361, 178362, 178363, 178364, 178365, 178366, 178367, 178368, 178369 were selected from the ORFs having the nucleotide sequence represented by SEQ ID NO: 173469.

[15115] The probes having the nucleotide sequence represented by SEQ ID NOS: 178370, 178371, 178372, 178373, 178374, 178375, 178376, 178377, 178378, 178379, 178380 were selected from the ORFs having the nucleotide sequence represented by SEQ ID NO: 173470.

[15116] The probes having the nucleotide sequence represented by SEQ ID NOS: 178381, 178382, 178383, 178384, 178385, 178386, 178387, 178388, 178389, 178390, 178391 were selected from the ORFs having the nucleotide sequence represented by SEQ ID NO: 173471.

[15117] The probes having the nucleotide sequence represented by SEQ ID NOS: 178392, 178393, 178394, 178395, 178396, 178397, 178398, 178399, 178400, 178401, 178402 were selected from the ORFs having the nucleotide sequence represented by SEQ ID NO: 173472.

[15118] The probes having the nucleotide sequence represented by SEQ ID NOS: 178403, 178404, 178405, 178406, 178407, 178408, 178409, 178410, 178411, 178412, 178413 were selected from the ORFs having the nucleotide sequence represented by SEQ ID NO: 173473.

[15119] The probes having the nucleotide sequence represented by SEQ ID NOS: 178414, 178415, 178416, 178417, 178418, 178419, 178420, 178421, 178422, 178423, 178424 were selected from the ORFs having the nucleotide sequence represented by SEQ ID NO: 173474.

[15120] The probes having the nucleotide sequence represented by SEQ ID NOS: 178425, 178426, 178427, 178428, 178429, 178430, 178431, 178432, 178433, 178434, 178435 were selected from the ORFs having the nucleotide sequence represented by SEQ ID NO: 173475.

[15121] The probes having the nucleotide sequence represented by SEQ ID NOS: 178436, 178437, 178438, 178439, 178440, 178441, 178442, 178443, 178444, 178445, 178446 were selected from the ORFs having the nucleotide sequence represented by SEQ ID NO: 173476.

[15122] The probes having the nucleotide sequence represented by SEQ ID NOS: 178447, 178448, 178449, 178450, 178451, 178452, 178453, 178454, 178455, 178456, 178457 were selected from the ORFs having the nucleotide sequence represented by SEQ ID NO: 173477.

[15123] The probes having the nucleotide sequence represented by SEQ ID NOS: 178458, 178459, 178460, 178461, 178462, 178463, 178464, 178465, 178466, 178467, 178468 were selected from the ORFs having the nucleotide sequence represented by SEQ ID NO: 173478.

[15124] The probes having the nucleotide sequence represented by SEQ ID NOS: 178469, 178470, 178471, 178472, 178473, 178474, 178475, 178476, 178477, 178478, 178479 were selected from the ORFs having the nucleotide sequence represented by SEQ ID NO: 173479.

[15125] The probes having the nucleotide sequence represented by SEQ ID NOS: 178480, 178481, 178482, 178483, 178484, 178485, 178486, 178487, 178488, 178489, 178490 were selected from the ORFs having the nucleotide sequence represented by SEQ ID NO: 173480.

[15126] The probes having the nucleotide sequence represented by SEQ ID NOS: 178491, 178492, 178493, 178494, 178495, 178496, 178497, 178498, 178499, 178500, 178501 were selected from the ORFs having the nucleotide sequence represented by SEQ ID NO: 173481.

[15127] The probes having the nucleotide sequence represented by SEQ ID NOS: 178502, 178503, 178504, 178505, 178506, 178507, 178508, 178509, 178510, 178511, 178512 were selected from the ORFs having the nucleotide sequence represented by SEQ ID NO: 173482.

[15128] The probes having the nucleotide sequence represented by SEQ ID NOS: 178513, 178514, 178515, 178516, 178517, 178518, 178519, 178520, 178521, 178522, 178523 were selected from the ORFs having the nucleotide sequence represented by SEQ ID NO: 173483.

[15129] The probes having the nucleotide sequence represented by SEQ ID NOS: 178524, 178525, 178526, 178527, 178528, 178529, 178530, 178531, 178532, 178533, 178534 were selected from the ORFs having the nucleotide sequence represented by SEQ ID NO: 173484.

[15130] The probes having the nucleotide sequence represented by SEQ ID NOS: 178535, 178536, 178537, 178538, 178539, 178540, 178541, 178542, 178543, 178544, 178545 were selected from the ORFs having the nucleotide sequence represented by SEQ ID NO: 173485.

[15131] The probes having the nucleotide sequence represented by SEQ ID NOS: 178546, 178547, 178548, 178549, 178550, 178551, 178552, 178553, 178554, 178555, 178556 were selected from the ORFs having the nucleotide sequence represented by SEQ ID NO: 173486.

[15132] The probes having the nucleotide sequence represented by SEQ ID NOS: 178557, 178558, 178559, 178560, 178561, 178562, 178563, 178564, 178565, 178566, 178567 were selected from the ORFs having the nucleotide sequence represented by SEQ ID NO: 173487.

[15133] The probes having the nucleotide sequence represented by SEQ ID NOS: 178568, 178569, 178570, 178571, 178572, 178573, 178574, 178575, 178576, 178577, 178578 were selected from the ORFs having the nucleotide sequence represented by SEQ ID NO: 173488.

[15134] The probes having the nucleotide sequence represented by SEQ ID NOS: 178579, 178580, 178581, 178582, 178583, 178584, 178585, 178586, 178587, 178588, 178589 were selected from the ORFs having the nucleotide sequence represented by SEQ ID NO: 173489.

[15135] The probes having the nucleotide sequence represented by SEQ ID NOS: 178590, 178591, 178592, 178593, 178594, 178595, 178596, 178597, 178598, 178599, 178600 were selected from the ORFs having the nucleotide sequence represented by SEQ ID NO: 173490.

[15136] The probes having the nucleotide sequence represented by SEQ ID NOS: 178601, 178602, 178603, 178604, 178605, 178606, 178607, 178608, 178609, 178610, 178611 were selected from the ORFs having the nucleotide sequence represented by SEQ ID NO: 173491.

[15137] The probes having the nucleotide sequence represented by SEQ ID NOS: 178612, 178613, 178614, 178615, 178616, 178617, 178618, 178619, 178620, 178621, 178622 were selected from the ORFs having the nucleotide sequence represented by SEQ ID NO: 173492.

[15138] The probes having the nucleotide sequence represented by SEQ ID NOS: 178623, 178624, 178625, 178626, 178627, 178628, 178629, 178630, 178631, 178632, 178633 were selected from the ORFs having the nucleotide sequence represented by SEQ ID NO: 173493.

[15139] The probes having the nucleotide sequence represented by SEQ ID NOS: 178634, 178635, 178636, 178637, 178638, 178639, 178640, 178641, 178642, 178643, 178644 were selected from the ORFs having the nucleotide sequence represented by SEQ ID NO: 173494.

[15140] The probes having the nucleotide sequence represented by SEQ ID NOS: 178645, 178646, 178647, 178648, 178649, 178650, 178651, 178652, 178653, 178654, 178655 were selected from the ORFs having the nucleotide sequence represented by SEQ ID NO: 173495.

[15141] The probes having the nucleotide sequence represented by SEQ ID NOS: 178656, 178657, 178658, 178659, 178660, 178661, 178662, 178663, 178664, 178665, 178666 were selected from the ORFs having the nucleotide sequence represented by SEQ ID NO: 173496.

[15142] The probes having the nucleotide sequence represented by SEQ ID NOS: 178667, 178668, 178669, 178670, 178671, 178672, 178673, 178674, 178675, 178676, 178677 were selected from the ORFs having the nucleotide sequence represented by SEQ ID NO: 173497.

[15143] The probes having the nucleotide sequence represented by SEQ ID NOS: 178678, 178679, 178680, 178681, 178682, 178683, 178684, 178685, 178686, 178687, 178688 were selected from the ORFs having the nucleotide sequence represented by SEQ ID NO: 173498.

[15144] The probes having the nucleotide sequence represented by SEQ ID NOS: 178689, 178690, 178691, 178692, 178693, 178694, 178695, 178696, 178697, 178698, 178699 were selected from the ORFs having the nucleotide sequence represented by SEQ ID NO: 173499.

[15145] The probes having the nucleotide sequence represented by SEQ ID NOS: 178700, 178701, 178702, 178703, 178704, 178705, 178706, 178707, 178708, 178709, 178710 were selected from the ORFs having the nucleotide sequence represented by SEQ ID NO: 173500.

[15146] The probes having the nucleotide sequence represented by SEQ ID NOS: 178711, 178712, 178713, 178714, 178715, 178716, 178717, 178718, 178719, 178720, 178721 were selected from the ORFs having the nucleotide sequence represented by SEQ ID NO: 173501.

[15147] The probes having the nucleotide sequence represented by SEQ ID NOS: 178722, 178723, 178724, 178725, 178726, 178727, 178728, 178729, 178730, 178731, 178732 were selected from the ORFs having the nucleotide sequence represented by SEQ ID NO: 173502.

[15148] The probes having the nucleotide sequence represented by SEQ ID NOS: 178733, 178734, 178735, 178736, 178737, 178738, 178739, 178740, 178741, 178742, 178743 were selected from the ORFs having the nucleotide sequence represented by SEQ ID NO: 173503.

[15149] The probes having the nucleotide sequence represented by SEQ ID NOS: 178744, 178745, 178746, 178747, 178748, 178749, 178750, 178751, 178752, 178753, 178754 were selected from the ORFs having the nucleotide sequence represented by SEQ ID NO: 173504.

[15150] The probes having the nucleotide sequence represented by SEQ ID NOS: 178755, 178756, 178757, 178758, 178759, 178760, 178761, 178762, 178763, 178764, 178765 were selected from the ORFs having the nucleotide sequence represented by SEQ ID NO: 173505.

[15151] The probes having the nucleotide sequence represented by SEQ ID NOS: 178766, 178767, 178768, 178769, 178770, 178771, 178772, 178773, 178774, 178775, 178776 were selected from the ORFs having the nucleotide sequence represented by SEQ ID NO: 173506.

[15152] The probes having the nucleotide sequence represented by SEQ ID NOS: 178777, 178778, 178779, 178780, 178781, 178782, 178783, 178784, 178785, 178786, 178787 were selected from the ORFs having the nucleotide sequence represented by SEQ ID NO: 173507.

[15153] The probes having the nucleotide sequence represented by SEQ ID NOS: 178788, 178789, 178790, 178791, 178792, 178793, 178794, 178795, 178796, 178797, 178798 were selected from the ORFs having the nucleotide sequence represented by SEQ ID NO: 173508.

[15154] The probes having the nucleotide sequence represented by SEQ ID NOS: 178799, 178800, 178801, 178802, 178803, 178804, 178805, 178806, 178807, 178808, 178809 were selected from the ORFs having the nucleotide sequence represented by SEQ ID NO: 173509.

[15155] The probes having the nucleotide sequence represented by SEQ ID NOS: 178810, 178811, 178812, 178813, 178814, 178815, 178816, 178817, 178818, 178819, 178820 were selected from the ORFs having the nucleotide sequence represented by SEQ ID NO: 173510.

[15156] The probes having the nucleotide sequence represented by SEQ ID NOS: 178821, 178822, 178823, 178824, 178825, 178826, 178827, 178828, 178829, 178830, 178831 were selected from the ORFs having the nucleotide sequence represented by SEQ ID NO: 173511.

[15157] The probes having the nucleotide sequence represented by SEQ ID NOS: 178832, 178833, 178834, 178835, 178836, 178837, 178838, 178839, 178840, 178841, 178842 were selected from the ORFs having the nucleotide sequence represented by SEQ ID NO: 173512.

[15158] The probes having the nucleotide sequence represented by SEQ ID NOS: 178843, 178844, 178845, 178846, 178847, 178848, 178849, 178850, 178851, 178852, 178853 were selected from the ORFs having the nucleotide sequence represented by SEQ ID NO: 173513.

[15159] The probes having the nucleotide sequence represented by SEQ ID NOS: 178854, 178855, 178856, 178857, 178858, 178859, 178860, 178861, 178862, 178863, 178864 were selected from the ORFs having the nucleotide sequence represented by SEQ ID NO: 173514.

[15160] The probes having the nucleotide sequence represented by SEQ ID NOS: 178865, 178866, 178867, 178868, 178869, 178870, 178871, 178872, 178873, 178874, 178875 were selected from the ORFs having the nucleotide sequence represented by SEQ ID NO: 173515.

[15161] The probes having the nucleotide sequence represented by SEQ ID NOS: 178876, 178877, 178878, 178879, 178880, 178881, 178882, 178883, 178884, 178885, 178886 were selected from the ORFs having the nucleotide sequence represented by SEQ ID NO: 173516.

[15162] The probes having the nucleotide sequence represented by SEQ ID NOS: 178887, 178888, 178889, 178890, 178891, 178892, 178893, 178894, 178895, 178896, 178897 were selected from the ORFs having the nucleotide sequence represented by SEQ ID NO: 173517.

[15163] The probes having the nucleotide sequence represented by SEQ ID NOS: 178898, 178899, 178900, 178901, 178902, 178903, 178904, 178905, 178906, 178907, 178908 were selected from the ORFs having the nucleotide sequence represented by SEQ ID NO: 173518.

[15164] The probes having the nucleotide sequence represented by SEQ ID NOS: 178909, 178910, 178911, 178912, 178913, 178914, 178915, 178916, 178917, 178918, 178919 were selected from the ORFs having the nucleotide sequence represented by SEQ ID NO: 173519.

[15165] The probes having the nucleotide sequence represented by SEQ ID NOS: 178920, 178921, 178922, 178923, 178924, 178925, 178926, 178927, 178928, 178929, 178930 were selected from the ORFs having the nucleotide sequence represented by SEQ ID NO: 173520.

[15166] The probes having the nucleotide sequence represented by SEQ ID NOS: 178931, 178932, 178933, 178934, 178935, 178936, 178937, 178938, 178939, 178940, 178941 were selected from the ORFs having the nucleotide sequence represented by SEQ ID NO: 173521.

[15167] The probes having the nucleotide sequence represented by SEQ ID NOS: 178942, 178943, 178944, 178945, 178946, 178947, 178948, 178949, 178950, 178951, 178952 were selected from the ORFs having the nucleotide sequence represented by SEQ ID NO: 173522.

[15168] The probes having the nucleotide sequence represented by SEQ ID NOS: 178953, 178954, 178955, 178956, 178957, 178958, 178959, 178960, 178961, 178962, 178963 were selected from the ORFs having the nucleotide sequence represented by SEQ ID NO: 173523.

[15169] The probes having the nucleotide sequence represented by SEQ ID NOS: 178964, 178965, 178966, 178967, 178968, 178969, 178970, 178971, 178972, 178973, 178974 were selected from the ORFs having the nucleotide sequence represented by SEQ ID NO: 173524.

[15170] The probes having the nucleotide sequence represented by SEQ ID NOS: 178975, 178976, 178977, 178978, 178979, 178980, 178981, 178982, 178983, 178984, 178985 were selected from the ORFs having the nucleotide sequence represented by SEQ ID NO: 173525.

[15171] The probes having the nucleotide sequence represented by SEQ ID NOS: 178986, 178987, 178988, 178989, 178990, 178991, 178992, 178993, 178994, 178995, 178996 were selected from the ORFs having the nucleotide sequence represented by SEQ ID NO: 173526.

[15172] The probes having the nucleotide sequence represented by SEQ ID NOS: 178997, 178998, 178999, 179000, 179001, 179002, 179003, 179004, 179005, 179006, 179007 were selected from the ORFs having the nucleotide sequence represented by SEQ ID NO: 173527.

[15173] The probes having the nucleotide sequence represented by SEQ ID NOS: 179008, 179009, 179010, 179011, 179012, 179013, 179014, 179015, 179016, 179017, 179018 were selected from the ORFs having the nucleotide sequence represented by SEQ ID NO: 173528.

[15174] The probes having the nucleotide sequence represented by SEQ ID NOS: 179019, 179020, 179021, 179022, 179023, 179024, 179025, 179026, 179027, 179028, 179029 were selected from the ORFs having the nucleotide sequence represented by SEQ ID NO: 173529.

[15175] The probes having the nucleotide sequence represented by SEQ ID NOS: 179030, 179031, 179032, 179033, 179034, 179035, 179036, 179037, 179038, 179039, 179040 were selected from the ORFs having the nucleotide sequence represented by SEQ ID NO: 173530.

[15176] The probes having the nucleotide sequence represented by SEQ ID NOS: 179041, 179042, 179043, 179044, 179045, 179046, 179047, 179048, 179049, 179050, 179051 were selected from the ORFs having the nucleotide sequence represented by SEQ ID NO: 173531.

[15177] The probes having the nucleotide sequence represented by SEQ ID NOS: 179052, 179053, 179054, 179055, 179056, 179057, 179058, 179059, 179060, 179061, 179062 were selected from the ORFs having the nucleotide sequence represented by SEQ ID NO: 173532.

[15178] The probes having the nucleotide sequence represented by SEQ ID NOS: 179063, 179064, 179065, 179066, 179067, 179068, 179069, 179070, 179071, 179072, 179073 were selected from the ORFs having the nucleotide sequence represented by SEQ ID NO: 173533.

[15179] The probes having the nucleotide sequence represented by SEQ ID NOS: 179074, 179075, 179076, 179077, 179078, 179079, 179080, 179081, 179082, 179083, 179084 were selected from the ORFs having the nucleotide sequence represented by SEQ ID NO: 173534.

[15180] The probes having the nucleotide sequence represented by SEQ ID NOS: 179085, 179086, 179087, 179088, 179089, 179090, 179091, 179092, 179093, 179094, 179095 were selected from the ORFs having the nucleotide sequence represented by SEQ ID NO: 173535.

[15181] The probes having the nucleotide sequence represented by SEQ ID NOS: 179096, 179097, 179098, 179099, 179100, 179101, 179102, 179103, 179104, 179105, 179106 were selected from the ORFs having the nucleotide sequence represented by SEQ ID NO: 173536.

[15182] The probes having the nucleotide sequence represented by SEQ ID NOS: 179107, 179108, 179109, 179110, 179111, 179112, 179113, 179114, 179115, 179116, 179117 were selected from the ORFs having the nucleotide sequence represented by SEQ ID NO: 173537.

[15183] The probes having the nucleotide sequence represented by SEQ ID NOS: 179118, 179119, 179120, 179121, 179122, 179123, 179124, 179125, 179126, 179127, 179128 were selected from the ORFs having the nucleotide sequence represented by SEQ ID NO: 173538.

[15184] The probes having the nucleotide sequence represented by SEQ ID NOS: 179129, 179130, 179131, 179132, 179133, 179134, 179135, 179136, 179137, 179138, 179139 were selected from the ORFs having the nucleotide sequence represented by SEQ ID NO: 173539.

[15185] The probes having the nucleotide sequence represented by SEQ ID NOS: 179140, 179141, 179142, 179143, 179144, 179145, 179146, 179147, 179148, 179149, 179150 were selected from the ORFs having the nucleotide sequence represented by SEQ ID NO: 173540.

[15186] The probes having the nucleotide sequence represented by SEQ ID NOS: 179151, 179152, 179153, 179154, 179155, 179156, 179157, 179158, 179159, 179160, 179161 were selected from the ORFs having the nucleotide sequence represented by SEQ ID NO: 173541.

[15187] The probes having the nucleotide sequence represented by SEQ ID NOS: 179162, 179163, 179164, 179165, 179166, 179167, 179168, 179169, 179170, 179171, 179172 were selected from the ORFs having the nucleotide sequence represented by SEQ ID NO: 173542.

[15188] The probes having the nucleotide sequence represented by SEQ ID NOS: 179173, 179174, 179175, 179176, 179177, 179178, 179179, 179180, 179181, 179182, 179183 were selected from the ORFs having the nucleotide sequence represented by SEQ ID NO: 173543.

[15189] The probes having the nucleotide sequence represented by SEQ ID NOS: 179184, 179185, 179186, 179187, 179188, 179189, 179190, 179191, 179192, 179193, 179194 were selected from the ORFs having the nucleotide sequence represented by SEQ ID NO: 173544.

[15190] The probes having the nucleotide sequence represented by SEQ ID NOS: 179195, 179196, 179197, 179198, 179199, 179200, 179201, 179202, 179203, 179204, 179205 were selected from the ORFs having the nucleotide sequence represented by SEQ ID NO: 173545.

[15191] The probes having the nucleotide sequence represented by SEQ ID NOS: 179206, 179207, 179208, 179209, 179210, 179211, 179212, 179213, 179214, 179215, 179216 were selected from the ORFs having the nucleotide sequence represented by SEQ ID NO: 173546.

[15192] The probes having the nucleotide sequence represented by SEQ ID NOS: 179217, 179218, 179219, 179220, 179221, 179222, 179223, 179224, 179225, 179226, 179227 were selected from the ORFs having the nucleotide sequence represented by SEQ ID NO: 173547.

[15193] The probes having the nucleotide sequence represented by SEQ ID NOS: 179228, 179229, 179230, 179231, 179232, 179233, 179234, 179235, 179236, 179237, 179238 were selected from the ORFs having the nucleotide sequence represented by SEQ ID NO: 173548.

[15194] The probes having the nucleotide sequence represented by SEQ ID NOS: 179239, 179240, 179241, 179242, 179243, 179244, 179245, 179246, 179247, 179248, 179249 were selected from the ORFs having the nucleotide sequence represented by SEQ ID NO: 173549.

[15195] The probes having the nucleotide sequence represented by SEQ ID NOS: 179250, 179251, 179252, 179253, 179254, 179255, 179256, 179257, 179258, 179259, 179260 were selected from the ORFs having the nucleotide sequence represented by SEQ ID NO: 173550.

[15196] The probes having the nucleotide sequence represented by SEQ ID NOS: 179261, 179262, 179263, 179264, 179265, 179266, 179267, 179268, 179269, 179270, 179271 were selected from the ORFs having the nucleotide sequence represented by SEQ ID NO: 173551.

[15197] The probes having the nucleotide sequence represented by SEQ ID NOS: 179272, 179273, 179274, i79275, 179276, 179277, 179278, 179279, 179280, 179281, 179282 were selected from the ORFs having the nucleotide sequence represented by SEQ ID NO: 173552.

[15198] The probes having the nucleotide sequence represented by SEQ ID NOS: 179283, 179284, 179285, 179286, 179287, 179288, 179289, 179290, 179291, 179292, 179293 were selected from the ORFs having the nucleotide sequence represented by SEQ ID NO: 173553.

[15199] The probes having the nucleotide sequence represented by SEQ ID NOS: 179294, 179295, 179296, 179297, 179298, 179299, 179300, 179301, 179302, 179303, 179304 were selected from the ORFs having the nucleotide sequence represented by SEQ ID NO: 173554.

[15200] The probes having the nucleotide sequence represented by SEQ ID NOS: 179305, 179306, 179307, 179308, 179309, 179310, 179311, 179312, 179313, 179314, 179315 were selected from the ORFs having the nucleotide sequence represented by SEQ ID NO: 173555.

[15201] The probes having the nucleotide sequence represented by SEQ ID NOS: 179316, 179317, 179318, 179319, 179320, 179321, 179322, 179323, 179324, 179325, 179326 were selected from the ORFs having the nucleotide sequence represented by SEQ ID NO: 173556.

[15202] The probes having the nucleotide sequence represented by SEQ ID NOS: 179327, 179328, 179329, 179330, 179331, 179332, 179333, 179334, 179335, 179336, 179337 were selected from the ORFs having the nucleotide sequence represented by SEQ ID NO: 173557.

[15203] The probes having the nucleotide sequence represented by SEQ ID NOS: 179338, 179339, 179340, 179341, 179342, 179343, 179344, 179345, 179346, 179347, 179348 were selected from the ORFs having the nucleotide sequence represented by SEQ ID NO: 173558.

[15204] The probes having the nucleotide sequence represented by SEQ ID NOS: 179349, 179350, 179351, 179352, 179353, 179354, 179355, 179356, 179357, 179358, 179359 were selected from the ORFs having the nucleotide sequence represented by SEQ ID NO: 173559.

[15205] The probes having the nucleotide sequence represented by SEQ ID NOS: 179360, 179361, 179362, 179363, 179364, 179365, 179366, 179367, 179368, 179369, 179370 were selected from the ORFs having the nucleotide sequence represented by SEQ ID NO: 173560.

[15206] The probes having the nucleotide sequence represented by SEQ. ID NOS: 179371, 179372, 179373, 179374, 179375, 179376, 179377, 179378, 179379, 179380, 179381 were selected from the ORFs having the nucleotide sequence represented by SEQ ID NO: 173561.

[15207] The probes having the nucleotide sequence represented by SEQ ID NOS: 179382, 179383, 179384, 179385, 179386, 179387, 179388, 179389, 179390, 179391, 179392 were selected from the ORFs having the nucleotide sequence represented by SEQ ID NO: 173562.

[15208] The probes having the nucleotide sequence represented by SEQ ID NOS: 179393, 179394, 179395, 179396, 179397, 179398, 179399, 179400, 179401, 179402, 179403 were selected from the ORFs having the nucleotide sequence represented by SEQ ID NO: 173563.

[15209] The probes having the nucleotide sequence represented by SEQ ID NOS: 179404, 179405, 179406, 179407, 179408, 179409, 179410, 179411, 179412, 179413, 179414 were selected from the ORFs having the nucleotide sequence represented by SEQ ID NO: 173564.

[15210] The probes having the nucleotide sequence represented by SEQ ID NOS: 179415, 179416, 179417, 179418, 179419, 179420, 179421, 179422, 179423, 179424, 179425 were selected from the ORFs having the nucleotide sequence represented by SEQ ID NO: 173565.

[15211] The probes having the nucleotide sequence represented by SEQ ID NOS: 179426, 179427, 179428, 179429, 179430, 179431, 179432, 179433, 179434, 179435, 179436 were selected from the ORFs having the nucleotide sequence represented by SEQ ID NO: 173566.

[15212] The probes having the nucleotide sequence represented by SEQ ID NOS: 179437, 179438, 179439, 179440, 179441, 179442, 179443, 179444, 179445, 179446, 179447 were selected from the ORFs having the nucleotide sequence represented by SEQ ID NO: 173567.

[15213] The probes having the nucleotide sequence represented by SEQ ID NOS: 179448, 179449, 179450, 179451, 179452, 179453, 179454, 179455, 179456, 179457, 179458 were selected from the ORFs having the nucleotide sequence represented by SEQ ID NO: 173568.

[15214] The probes having the nucleotide sequence represented by SEQ ID NOS: 179459, 179460, 179461, 179462, 179463, 179464, 179465, 179466, 179467, 179468, 179469 were selected from the ORFs having the nucleotide sequence represented by SEQ ID NO: 173569.

[15215] The probes having the nucleotide sequence represented by SEQ ID NOS: 179470, 179471, 179472, 179473, 179474, 179475, 179476, 179477, 179478, 179479, 179480 were selected from the ORFs having the nucleotide sequence represented by SEQ ID NO: 173570.

[15216] The probes having the nucleotide sequence represented by SEQ ID NOS: 179481, 179482, 179483, 179484, 179485, 179486, 179487, 179488, 179489, 179490, 179491 were selected from the ORFs having the nucleotide sequence represented by SEQ ID NO: 173571.

[15217] The probes having the nucleotide sequence represented by SEQ ID NOS: 179492, 179493, 179494, 179495, 179496, 179497, 179498, 179499, 179500, 179501, 179502 were selected from the ORFs having the nucleotide sequence represented by SEQ ID NO: 173572.

[15218] The probes having the nucleotide sequence represented by SEQ ID NOS: 179503, 179504, 179505, 179506, 179507, 179508, 179509, 179510, 179511, 179512, 179513 were selected from the ORFs having the nucleotide sequence represented by SEQ ID NO: 173573.

[15219] The probes having the nucleotide sequence represented by SEQ ID NOS: 179514, 179515, 179516, 179517, 179518, 179519, 179520, 179521, 179522, 179523, 179524 were selected from the ORFs having the nucleotide sequence represented by SEQ ID NO: 173574.

[15220] The probes having the nucleotide sequence represented by SEQ ID NOS: 179525, 179526, 179527, 179528, 179529, 179530, 179531, 179532, 179533, 179534, 179535 were selected from the ORFs having the nucleotide sequence represented by SEQ ID NO: 173575.

[15221] The probes having the nucleotide sequence represented by SEQ ID NOS: 179536, 179537, 179538, 179539, 179540, 179541, 179542, 179543, 179544, 179545, 179546 were selected from the ORFs having the nucleotide sequence represented by SEQ ID NO: 173576.

[15222] The probes having the nucleotide sequence represented by SEQ ID NOS: 179547, 179548, 179549, 179550, 179551, 179552, 179553, 179554, 179555, 179556, 179557 were selected from the ORFs having the nucleotide sequence represented by SEQ ID NO: 173577.

[15223] The probes having the nucleotide sequence represented by SEQ ID NOS: 179558, 179559, 179560, 179561, 179562, 179563, 179564, 179565, 179566, 179567, 179568 were selected from the ORFs having the nucleotide sequence represented by SEQ ID NO: 173578.

[15224] The probes having the nucleotide sequence represented by SEQ ID NOS: 179569, 179570, 179571, 179572, 179573, 179574, 179575, 179576, 179577, 179578, 179579 were selected from the ORFs having the nucleotide sequence represented by SEQ ID NO: 173579.

[15225] The probes having the nucleotide sequence represented by SEQ ID NOS: 179580, 179581, 179582, 179583, 179584, 179585, 179586, 179587, 179588, 179589, 179590 were selected from the ORFs having the nucleotide sequence represented by SEQ ID NO: 173580.

[15226] The probes having the nucleotide sequence represented by SEQ ID NOS: 179591, 179592, 179593, 179594, 179595, 179596, 179597, 179598, 179599, 179600, 179601 were selected from the ORFs having the nucleotide sequence represented by SEQ ID NO: 173581.

[15227] The probes having the nucleotide sequence represented by SEQ ID NOS: 179602, 179603, 179604, 179605, 179606, 179607, 179608, 179609, 179610, 179611, 179612 were selected from the ORFs having the nucleotide sequence represented by SEQ ID NO: 173582.

[15228] The probes having the nucleotide sequence represented by SEQ ID NOS: 179613, 179614, 179615, 179616, 179617, 179618, 179619, 179620, 179621, 179622, 179623 were selected from the ORFs having the nucleotide sequence represented by SEQ ID NO: 173583.

[15229] The probes having the nucleotide sequence represented by SEQ ID NOS: 179624, 179625, 179626, 179627, 179628, 179629, 179630, 179631, 179632., 179633, 179634 were selected from the ORFs having the nucleotide sequence represented by SEQ ID NO: 173584.

[15230] The probes having the nucleotide sequence represented by SEQ ID NOS: 179635, 179636, 179637, 179638, 179639, 179640, 179641, 179642, 179643, 179644, 179645 were selected from the ORFs having the nucleotide sequence represented by SEQ ID NO: 173585.

[15231] The probes having the nucleotide sequence represented by SEQ ID NOS: 179646, 179647, 179648, 179649, 179650, 179651, 179652, 179653, 179654, 179655, 179656 were selected from the ORFs having the nucleotide sequence represented by SEQ ID NO: 173586.

[15232] The probes having the nucleotide sequence represented by SEQ ID NOS: 179657, 179658, 179659, 179660, 179661, 179662, 179663, 179664, 179665, 179666, 179667 were selected from the ORFs having the nucleotide sequence represented by SEQ ID NO: 173587.

[15233] The probes having the nucleotide sequence represented by SEQ ID NOS: 179668, 179669, 179670, 179671, 179672, 179673, 179674, 179675, 179676, 179677, 179678 were selected from the ORFs having the nucleotide sequence represented by SEQ ID NO: 173588.

[15234] The probes having the nucleotide sequence represented by SEQ ID NOS: 179679, 179680, 179681, 179682, 179683, 179684, 179685, 179686, 179687, 179688, 179689 were selected from the ORFs having the nucleotide sequence represented by SEQ ID NO: 173589.

[15235] The probes having the nucleotide sequence represented by SEQ ID NOS: 179690, 179691, 179692, 179693, 179694, 179695, 179696, 179697, 179698, 179699, 179700 were selected from the ORFs having the nucleotide sequence represented by SEQ ID NO: 173590.

[15236] The probes having the nucleotide sequence represented by SEQ ID NOS: 179701, 179702, 179703, 179704, 179705, 179706, 179707, 179708, 179709, 179710, 179711 were selected from the ORFs having the nucleotide sequence represented by SEQ ID NO: 173591.

[15237] The probes having the nucleotide sequence represented by SEQ ID NOS: 179712, 179713, 179714, 179715, 179716, 179717, 179718, 179719, 179720, 179721, 179722 were selected from the ORFs having the nucleotide sequence represented by SEQ ID NO: 173592.

[15238] The probes having the nucleotide sequence represented by SEQ ID NOS: 179723, 179724, 179725, 179726, 179727, 179728, 179729, 179730, 179731, 179732, 179733 were selected from the ORFs having the nucleotide sequence represented by SEQ ID NO: 173593.

[15239] The probes having the nucleotide sequence represented by SEQ ID NOS: 179734, 179735, 179736, 179737, 179738, 179739, 179740, 179741, 179742, 179743, 179744 were selected from the ORFs having the nucleotide sequence represented by SEQ ID NO: 173594.

[15240] The probes having the nucleotide sequence represented by SEQ ID NOS: 179745, 179746, 179747, 179748, 179749, 179750, 179751, 179752, 179753, 179754, 179755 were selected from the ORFs having the nucleotide sequence represented by SEQ ID NO: 173595.

[15241] The probes having the nucleotide sequence represented by SEQ ID NOS: 179756, 179757, 179758, 179759, 179760, 179761, 179762, 179763, 179764, 179765, 179766 were selected from the ORFs having the nucleotide sequence represented by SEQ ID NO: 173596.

[15242] The probes having the nucleotide sequence represented by SEQ ID NOS: 179767, 179768, 179769, 179770, 179771, 179772, 179773, 179774, 179775, 179776, 179777 were selected from the ORFs having the nucleotide sequence represented by SEQ ID NO: 173597.

[15243] The probes having the nucleotide sequence represented by SEQ ID NOS: 179778, 179779, 179780, 179781, 179782, 179783, 179784, 179785, 179786, 179787, 179788 were selected from the ORFs having the nucleotide sequence represented by SEQ ID NO: 173598.

[15244] The probes having the nucleotide sequence represented by SEQ ID NOS: 179789, 179790, 179791, 179792, 179793, 179794, 179795, 179796, 179797, 179798, 179799 were selected from the ORFs having the nucleotide sequence represented by SEQ ID NO: 173599.

[15245] The probes having the nucleotide sequence represented by SEQ ID NOS: 179800, 179801, 179802, 179803, 179804, 179805, 179806, 179807, 179808, 179809, 179810 were selected from the ORFs having the nucleotide sequence represented by SEQ ID NO: 173600.

[15246] The probes having the nucleotide sequence represented by SEQ ID NOS: 179811, 179812, 179813, 179814, 179815, 179816, 179817, 179818, 179819, 179820, 179821 were selected from the ORFs having the nucleotide sequence represented by SEQ ID NO: 173601.

[15247] The probes having the nucleotide sequence represented by SEQ ID NOS: 179822, 179823, 179824, 179825, 179826, 179827, 179828, 179829, 179830, 179831, 179832 were selected from the ORFs having the nucleotide sequence represented by SEQ ID NO: 173602.

[15248] The probes having the nucleotide sequence represented by SEQ ID NOS: 179833, 179834, 179835, 179836, 179837, 179838, 179839, 179840, 179841, 179842, 179843 were selected from the ORFs having the nucleotide sequence represented by SEQ ID NO: 173603.

[15249] The probes having the nucleotide sequence represented by SEQ ID NOS: 179844, 179845, 179846, 179847, 179848, 179849, 179850, 179851, 179852, 179853, 179854 were selected from the ORFs having the nucleotide sequence represented by SEQ ID NO: 173604.

[15250] The probes having the nucleotide sequence represented by SEQ ID NOS: 179855, 179856, 179857, 179858, 179859, 179860, 179861, 179862, 179863, 179864, 179865 were selected from the ORFs having the nucleotide sequence represented by SEQ ID NO: 173605.

[15251] The probes having the nucleotide sequence represented by SEQ ID NOS: 179866, 179867, 179868, 179869, 179870, 179871, 179872, 179873, 179874, 179875, 179876 were selected from the ORFs having the nucleotide sequence represented by SEQ ID NO: 173606.

[15252] The probes having the nucleotide sequence represented by SEQ ID NOS: 179877, 179878, 179879, 179880, 179881, 179882, 179883, 179884, 179885, 179886, 179887 were selected from the ORFs having the nucleotide sequence represented by SEQ ID NO: 173607.

[15253] The probes having the nucleotide sequence represented by SEQ ID NOS: 179888, 179889, 179890, 179891, 179892, 179893, 179894, 179895, 179896, 179897, 179898 were selected from the ORFs having the nucleotide sequence represented by SEQ ID NO: 173608.

[15254] The probes having the nucleotide sequence represented by SEQ ID NOS: 179899, 179900, 179901, 179902, 179903, 179904, 179905, 179906, 179907, 179908, 179909 were selected from the ORFs having the nucleotide sequence represented by SEQ ID NO: 173609.

[15255] The probes having the nucleotide sequence represented by SEQ ID NOS: 179910, 179911, 179912, 179913, 179914, 179915, 179916, 179917, 179918, 179919, 179920 were selected from the ORFs having the nucleotide sequence represented by SEQ ID NO: 173610.

[15256] The probes having the nucleotide sequence represented by SEQ ID NOS: 179921, 179922, 179923, 179924, 179925, 179926, 179927, 179928, 179929, 179930, 179931 were selected from the ORFs having the nucleotide sequence represented by SEQ ID NO: 173611.

[15257] The probes having the nucleotide sequence represented by SEQ ID NOS: 179932, 179933, 179934, 179935, 179936, 179937, 179938, 179939, 179940, 179941, 179942 were selected from the ORFs having the nucleotide sequence represented by SEQ ID NO: 173612.

[15258] The probes having the nucleotide sequence represented by SEQ ID NOS: 179943, 179944, 179945, 179946, 179947, 179948, 179949, 179950, 179951, 179952, 179953 were selected from the ORFs having the nucleotide sequence represented by SEQ ID NO: 173613.

[15259] The probes having the nucleotide sequence represented by SEQ ID NOS: 179954, 179955, 179956, 179957, 179958, 179959, 179960, 179961, 179962, 179963, 179964 were selected from the ORFs having the nucleotide sequence represented by SEQ ID NO: 173614.

[15260] The probes having the nucleotide sequence represented by SEQ ID NOS: 179965, 179966, 179967, 179968, 179969, 179970, 179971, 179972, 179973, 179974, 179975 were selected from the ORFs having the nucleotide sequence represented by SEQ ID NO: 173615.

[15261] The probes having the nucleotide sequence represented by SEQ ID NOS: 179976, 179977, 179978, 179979, 179980, 179981, 179982, 179983, 179984, 179985, 179986 were selected from the ORFs having the nucleotide sequence represented by SEQ ID NO: 173616.

[15262] The probes having the nucleotide sequence represented by SEQ ID NOS: 179987, 179988, 179989, 179990, 179991, 179992, 179993, 179994, 179995, 179996, 179997 were selected from the ORFs having the nucleotide sequence represented by SEQ ID NO: 173617.

[15263] The probes having the nucleotide sequence represented by SEQ ID NOS: 179998, 179999, 180000, 180001, 180002, 180003, 180004, 180005, 180006, 180007, 180008 were selected from the ORFs having the nucleotide sequence represented by SEQ ID NO: 173618.

[15264] The probes having the nucleotide sequence represented by SEQ ID NOS: 180009, 180010, 180011, 180012, 180013, 180014, 180015, 180016, 180017, 180018, 180019 were selected from the ORFs having the nucleotide sequence represented by SEQ ID NO: 173619.

[15265] The probes having the nucleotide sequence represented by SEQ ID NOS: 180020, 180021, 180022, 180023, 180024, 180025, 180026, 180027, 180028, 180029, 180030 were selected from the ORFs having the nucleotide sequence represented by SEQ ID NO: 173620.

[15266] The probes having the nucleotide sequence represented by SEQ ID NOS: 180031, 180032, 180033, 180034, 180035, 180036, 180037, 180038, 180039, 180040, 180041 were selected from the ORFs having the nucleotide sequence represented by SEQ ID NO: 173621.

[15267] The probes having the nucleotide sequence represented by SEQ ID NOS: 180042, 180043, 180044, 180045, 180046, 180047, 180048, 180049, 180050, 180051, 180052 were selected from the ORFs having the nucleotide sequence represented by SEQ ID NO: 173622.

[15268] The probes having the nucleotide sequence represented by SEQ ID NOS: 180053, 180054, 180055, 180056, 180057, 180058, 180059, 180060, 180061, 180062, 180063 were selected from the ORFs having the nucleotide sequence represented by SEQ ID NO: 173623.

[15269] The probes having the nucleotide sequence represented by SEQ ID NOS: 180064, 180065, 180066, 180067, 180068, 180069, 180070, 180071, 180072, 180073, 180074 were selected from the ORFs having the nucleotide sequence represented by SEQ ID NO: 173624.

[15270] The probes having the nucleotide sequence represented by SEQ ID NOS: 180075, 180076, 180077, 180078, 180079, 180080, 180081, 180082, 180083, 180084, 180085 were selected from the ORFs having the nucleotide sequence represented by SEQ ID NO: 173625.

[15271] The probes having the nucleotide sequence represented by SEQ ID NOS: 180086, 180087, 180088, 180089, 180090, 180091, 180092, 180093, 180094 were selected from the ORFs having the nucleotide sequence represented by SEQ ID NO: 173626.

[15272] The probes having the nucleotide sequence represented by SEQ ID NOS: 180095, 180096, 180097, 180098, 180099, 180100, 180101, 180102, 180103, 180104, 180105 were selected from the ORFs having the nucleotide sequence represented by SEQ ID NO: 173627.

[15273] The probes having the nucleotide sequence represented by SEQ ID NOS: 180106, 180107, 180108, 180109, 180110, 180111, 180112, 180113, 180114, 180115, 180116 were selected from the ORFs having the nucleotide sequence represented by SEQ ID NO: 173628.

[15274] The probes having the nucleotide sequence represented by SEQ ID NOS: 180117, 180118, 180119, 180120, 180121, 180122, 180123, 180124, 180125, 180126, 180127 were selected from the ORFs having the nucleotide sequence represented by SEQ ID NO: 173629.

[15275] The probes having the nucleotide sequence represented by SEQ ID NOS: 180128, 180129, 180130, 180131, 180132, 180133, 180134, 180135, 180136, 180137, 180138 were selected from the ORFs having the nucleotide sequence represented by SEQ ID NO: 173630.

[15276] The probes having the nucleotide sequence represented by SEQ ID NOS: 180139, 180140, 180141, 180142, 180143, 180144, 180145, 180146, 180147, 180148, 180149 were selected from the ORFs having the nucleotide sequence represented by SEQ ID NO: 173631.

[15277] The probes having the nucleotide sequence represented by SEQ ID NOS: 180150, 180151, 180152, 180153, 180154, 180155, 180156, 180157, 180158, 180159, 180160 were selected from the ORFs having the nucleotide sequence represented by SEQ ID NO: 173632.

[15278] The probes having the nucleotide sequence represented by SEQ ID NOS: 180161, 180162, 180163, 180164, 180165, 180166, 180167, 180168, 180169, 180170, 180171 were selected from the ORFs having the nucleotide sequence represented by SEQ ID NO: 173633.

[15279] The probes having the nucleotide sequence represented by SEQ ID NOS: 180172, 180173, 180174, 180175, 180176, 180177, 180178, 180179, 180180, 180181, 180182 were selected from the ORFs having the nucleotide sequence represented by SEQ ID NO: 173634.

[15280] The probes having the nucleotide sequence represented by SEQ ID NOS: 180183, 180184, 180185, 180186, 180187, 180188, 180189, 180190, 180191, 180192, 180193 were selected from the ORFs having the nucleotide sequence represented by SEQ ID NO: 173635.

[15281] The probes having the nucleotide sequence represented by SEQ ID NOS: 180194, 180195, 180196, 180197, 180198, 180199, 180200, 180201, 180202, 180203, 180204 were selected from the ORFs having the nucleotide sequence represented by SEQ ID NO: 173636.

[15282] The probes having the nucleotide sequence represented by SEQ ID NOS: 180205, 180206, 180207, 180208, 180209, 180210, 180211, 180212, 180213, 180214, 180215 were selected from the ORFs having the nucleotide sequence represented by SEQ ID NO: 173637.

[15283] The probes having the nucleotide sequence represented by SEQ ID NOS: 180216, 180217, 180218, 180219, 180220, 180221, 180222, 180223, 180224, 180225, 180226 were selected from the ORFs having the nucleotide sequence represented by SEQ ID NO: 173638.

[15284] The probes having the nucleotide sequence represented by SEQ ID NOS: 180227, 180228, 180229, 180230, 180231, 180232, 180233, 180234, 180235, 180236, 180237 were selected from the ORFs having the nucleotide sequence represented by SEQ ID NO: 173639.

[15285] The probes having the nucleotide sequence represented by SEQ ID NOS: 180238, 180239, 180240, 180241, 180242, 180243, 180244, 180245, 180246, 180247, 180248 were selected from the ORFs having the nucleotide sequence represented by SEQ ID NO: 173640.

[15286] The probes having the nucleotide sequence represented by SEQ ID NOS: 180249, 180250, 180251, 180252, 180253, 180254, 180255, 180256, 180257, 180258, 180259 were selected from the ORFs having the nucleotide sequence represented by SEQ ID NO: 173641.

[15287] The probes having the nucleotide sequence represented by SEQ ID NOS: 180260, 180261, 180262, 180263, 180264, 180265, 180266, 180267, 180268, 180269, 180270 were selected from the ORFs having the nucleotide sequence represented by SEQ ID NO: 173642.

[15288] The probes having the nucleotide sequence represented by SEQ ID NOS: 180271, 180272, 180273, 180274, 180275, 180276, 180277, 180278, 180279, 180280, 180281 were selected from the ORFs having the nucleotide sequence represented by SEQ ID NO: 173643.

[15289] The probes having the nucleotide sequence represented by SEQ ID NOS: 180282, 180283, 180284, 180285, 180286, 180287, 180288, 180289, 180290, 180291, 180292 were selected from the ORFs having the nucleotide sequence represented by SEQ ID NO: 173644.

[15290] The probes having the nucleotide sequence represented by SEQ ID NOS: 180293, 180294, 180295, 180296, 180297, 180298, 180299, 180300, 180301, 180302, 180303 were selected from the ORFs having the nucleotide sequence represented by SEQ ID NO: 173645.

[15291] The probes having the nucleotide sequence represented by SEQ ID NOS: 180304, 180305, 180306, 180307, 180308, 180309, 180310, 180311 were selected from the ORFs having the nucleotide sequence represented by SEQ ID NO: 173646.

[15292] The probes having the nucleotide sequence represented by SEQ ID NOS: 180312, 180313, 180314, 180315, 180316, 180317, 180318, 180319, 180320, 180321, 180322 were selected from the ORFs having the nucleotide sequence represented by SEQ ID NO: 173647.

[15293] The probes having the nucleotide sequence represented by SEQ ID NOS: 180323, 180324, 180325, 180326, 180327, 180328, 180329, 180330, 180331, 180332, 180333 were selected from the ORFs having the nucleotide sequence represented by SEQ ID NO: 173648.

[15294] The probes having the nucleotide sequence represented by SEQ ID NOS: 180334, 180335, 180336, 180337, 180338, 180339, 180340, 180341, 180342, 180343, 180344 were selected from the ORFs having the nucleotide sequence represented by SEQ ID NO: 173649.

[15295] The probes having the nucleotide sequence represented by SEQ ID NOS: 180345, 180346, 180347, 180348, 180349, 180350, 180351, 180352, 180353, 180354, 180355 were selected from the ORFs having the nucleotide sequence represented by SEQ ID NO: 173650.

[15296] The probes having the nucleotide sequence represented by SEQ ID NOS: 180356, 180357, 180358, 180359, 180360, 180361, 180362, 180363, 180364, 180365, 180366 were selected from the ORFs having the nucleotide sequence represented by SEQ ID NO: 173651.

[15297] The probes having the nucleotide sequence represented by SEQ ID NOS: 180367, 180368, 180369, 180370, 180371, 180372, 180373, 180374, 180375, 180376, 180377 were selected from the ORFs having the nucleotide sequence represented by SEQ ID NO: 173652.

[15298] The probes having the nucleotide sequence represented by SEQ ID NOS: 180378, 180379, 180380, 180381, 180382, 180383, 180384, 180385, 180386, 180387, 180388 were selected from the ORFs having the nucleotide sequence represented by SEQ ID NO: 173653.

[15299] The probes having the nucleotide sequence represented by SEQ ID NOS: 180389, 180390, 180391, 180392, 180393, 180394, 180395, 180396, 180397, 180398, 180399 were selected from the ORFs having the nucleotide sequence represented by SEQ ID NO: 173654.

[15300] The probes having the nucleotide sequence represented by SEQ ID NOS: 180400, 180401, 180402, 180403, 180404, 180405, 180406, 180407, 180408, 180409, 180410 were selected from the ORFs having the nucleotide sequence represented by SEQ ID NO: 173655.

[15301] The probes having the nucleotide sequence represented by SEQ ID NOS: 180411, 180412, 180413, 180414, 180415, 180416, 180417, 180418, 180419, 180420, 180421 were selected from the ORFs having the nucleotide sequence represented by SEQ ID NO: 173656.

[15302] The probes having the nucleotide sequence represented by SEQ ID NOS: 180422, 180423, 180424, 180425, 180426, 180427, 180428, 180429, 180430, 180431, 180432 were selected from the ORFs having the nucleotide sequence represented by SEQ ID NO: 173657.

[15303] The probes having the nucleotide sequence represented by SEQ ID NOS: 180433, 180434, 180435, 180436, 180437, 180438, 180439, 180440, 180441, 180442, 180443 were selected from the ORFs having the nucleotide sequence represented by SEQ ID NO: 173658.

[15304] The probes having the nucleotide sequence represented by SEQ ID NOS: 180444, 180445, 180446, 180447, 180448, 180449, 180450, 180451, 180452, 180453, 180454 were selected from the ORFs having the nucleotide sequence represented by SEQ ID NO: 173659.

[15305] The probes having the nucleotide sequence represented by SEQ ID NOS: 180455, 180456, 180457, 180458, 180459, 180460, 180461, 180462, 180463, 180464, 180465 were selected from the ORFs having the nucleotide sequence represented by SEQ ID NO: 173660.

[15306] The probes having the nucleotide sequence represented by SEQ ID NOS: 180466, 180467, 180468, 180469, 180470, 180471, 180472, 180473, 180474, 180475, 180476 were selected from the ORFs having the nucleotide sequence represented by SEQ ID NO: 173661.

[15307] The probes having the nucleotide sequence represented by SEQ ID NOS: 180477, 180478, 180479, 180480, 180481, 180482, 180483, 180484, 180485, 180486, 180487 were selected from the ORFs having the nucleotide sequence represented by SEQ ID NO: 173662.

[15308] The probes having the nucleotide sequence represented by SEQ ID NOS: 180488, 180489, 180490, 180491, 180492, 180493, 180494, 180495, 180496, 180497, 180498 were selected from the ORFs having the nucleotide sequence represented by SEQ ID NO: 173663.

[15309] The probes having the nucleotide sequence represented by SEQ ID NOS: 180499, 180500, 180501, 180502, 180503, 180504, 180505, 180506, 180507, 180508, 180509 were selected from the ORFs having the nucleotide sequence represented by SEQ ID NO: 173664.

[15310] The probes having the nucleotide sequence represented by SEQ ID NOS: 180510, 180511, 180512, 180513, 180514, 180515, 180516, 180517, 180518, 180519, 180520 were selected from the ORFs having the nucleotide sequence represented by SEQ ID NO: 173665.

[15311] The probes having the nucleotide sequence represented by SEQ ID NOS: 180521, 180522, 180523, 180524, 180525, 180526, 180527, 180528, 180529, 180530, 180531 were selected from the ORFs having the nucleotide sequence represented by SEQ ID NO: 173666.

[15312] The probes having the nucleotide sequence represented by SEQ ID NOS: 180532, 180533, 180534, 180535, 180536, 180537, 180538, 180539, 180540, 180541, 180542 were selected from the ORFs having the nucleotide sequence represented by SEQ ID NO: 173667.

[15313] The probes having the nucleotide sequence represented by SEQ ID NOS: 180543, 180544, 180545, 180546, 180547, 180548, 180549, 180550, 180551, 180552, 180553 were selected from the ORFs having the nucleotide sequence represented by SEQ ID NO: 173668.

[15314] The probes having the nucleotide sequence represented by SEQ ID NOS: 180554, 180555, 180556, 180557, 180558, 180559, 180560, 180561, 180562, 180563, 180564 were selected from the ORFs having the nucleotide sequence represented by SEQ ID NO: 173669.

[15315] The probes having the nucleotide sequence represented by SEQ ID NOS: 180565, 180566, 180567, 180568, 180569, 180570, 180571, 180572, 180573, 180574, 180575 were selected from the ORFs having the nucleotide sequence represented by SEQ ID NO: 173670.

[15316] The probes having the nucleotide sequence represented by SEQ ID NOS: 180576, 180577, 180578, 180579, 180580, 180581, 180582, 180583, 180584, 180585, 180586 were selected from the ORFs having the nucleotide sequence represented by SEQ ID NO: 173671.

[15317] The probes having the nucleotide sequence represented by SEQ ID NOS: 180587, 180588, 180589, 180590, 180591, 180592, 180593, 180594, 180595, 180596, 180597 were selected from the ORFs having the nucleotide sequence represented by SEQ ID NO: 173672.

[15318] The probes having the nucleotide sequence represented by SEQ ID NOS: 180598, 180599, 180600, 180601, 180602, 180603, 180604, 180605, 180606, 180607, 180608 were selected from the ORFs having the nucleotide sequence represented by SEQ ID NO: 173673.

[15319] The probes having the nucleotide sequence represented by SEQ ID NOS: 180609, 180610, 180611, 180612, 180613, 180614, 180615, 180616, 180617, 180618, 180619 were selected from the ORFs having the nucleotide sequence represented by SEQ ID NO: 173674.

[15320] The probes having the nucleotide sequence represented by SEQ ID NOS: 180620, 180621, 180622, 180623, 180624, 180625, 180626, 180627, 180628, 180629, 180630 were selected from the ORFs having the nucleotide sequence represented by SEQ ID NO: 173675.

[15321] The probes having the nucleotide sequence represented by SEQ ID NOS: 180631, 180632, 180633, 180634, 180635, 180636, 180637, 180638, 180639, 180640, 180641 were selected from the ORFs having the nucleotide sequence represented by SEQ ID NO: 173676.

[15322] The probes having the nucleotide sequence represented by SEQ ID NOS: 180642, 180643, 180644, 180645, 180646, 180647, 180648, 180649, 180650, 180651, 180652 were selected from the ORFs having the nucleotide sequence represented by SEQ ID NO: 173677.

[15323] The probes having the nucleotide sequence represented by SEQ ID NOS: 180653, 180654, 180655, 180656, 180657, 180658, 180659, 180660, 180661, 180662, 180663 were selected from the ORFs having the nucleotide sequence represented by SEQ ID NO: 173678.

[15324] The probes having the nucleotide sequence represented by SEQ ID NOS: 180664, 180665, 180666, 180667, 180668, 180669, 180670, 180671 were selected from the ORFs having the nucleotide sequence represented by SEQ ID NO: 173679.

[15325] The probes having the nucleotide sequence represented by SEQ ID NOS: 180672, 180673, 180674, 180675, 180676, 180677, 180678, 180679, 180680, 180681, 180682 were selected from the ORFs having the nucleotide sequence represented by SEQ ID NO: 173680.

[15326] The probes having the nucleotide sequence represented by SEQ ID NOS: 180683, 180684, 180685, 180686, 180687, 180688, 180689, 180690, 180691, 180692, 180693 were selected from the ORFs having the nucleotide sequence represented by SEQ ID NO: 173681.

[15327] The probes having the nucleotide sequence represented by SEQ ID NOS: 180694, 180695, 180696, 180697, 180698, 180699, 180700, 180701, 180702, 180703, 180704 were selected from the ORFs having the nucleotide sequence represented by SEQ ID NO: 173682.

[15328] The probes having the nucleotide sequence represented by SEQ ID NOS: 180705, 180706, 180707, 180708, 180709, 180710, 180711, 180712, 180713, 180714, 180715 were selected from the ORFs having the nucleotide sequence represented by SEQ ID NO: 173683.

[15329] The probes having the nucleotide sequence represented by SEQ ID NOS: 180716, 180717, 180718, 180719, 180720, 180721, 180722, 180723, 180724, 180725, 180726 were selected from the ORFs having the nucleotide sequence represented by SEQ ID NO: 173684.

[15330] The probes having the nucleotide sequence represented by SEQ ID NOS: 180727, 180728, 180729, 180730, 180731, 180732, 180733, 180734, 180735, 180736, 180737 were selected from the ORFs having the nucleotide sequence represented by SEQ ID NO: 173685.

[15331] The probes having the nucleotide sequence represented by SEQ ID NOS: 180738, 180739, 180740, 180741, 180742, 180743, 180744, 180745, 180746, 180747, 180748 were selected from the ORFs having the nucleotide sequence represented by SEQ ID NO: 173686.

[15332] The probes having the nucleotide sequence represented by SEQ ID NOS: 180749, 180750, 180751, 180752, 180753, 180754, 180755, 180756, 180757, 180758, 180759 were selected from the ORFs having the nucleotide sequence represented by SEQ ID NO: 173687.

[15333] The probes having the nucleotide sequence represented by SEQ ID NOS: 180760, 180761, 180762, 180763, 180764, 180765, 180766, 180767, 180768, 180769, 180770 were selected from the ORFs having the nucleotide sequence represented by SEQ ID NO: 173688.

[15334] The probes having the nucleotide sequence represented by SEQ ID NOS: 180771, 180772, 180773, 180774, 180775, 180776, 180777, 180778, 180779, 180780, 180781 were selected from the ORFs having the nucleotide sequence represented by SEQ ID NO: 173689.

[15335] The probes having the nucleotide sequence represented by SEQ ID NOS: 180782, 180783, 180784, 180785, 180786, 180787, 180788, 180789, 180790, 180791, 180792 were selected from the ORFs having the nucleotide sequence represented by SEQ ID NO: 173690.

[15336] The probes having the nucleotide sequence represented by SEQ ID NOS: 180793, 180794, 180795, 180796, 180797, 180798, 180799, 180800, 180801, 180802, 180803 were selected from the ORFs having the nucleotide sequence represented by SEQ ID NO: 173691.

[15337] The probes having the nucleotide sequence represented by SEQ ID NOS: 180804, 180805, 180806, 180807, 180808, 180809, 180810, 180811, 180812, 180813, 180814 were selected from the ORFs having the nucleotide sequence represented by SEQ ID NO: 173692.

[15338] The probes having the nucleotide sequence represented by SEQ ID NOS: 180815, 180816, 180817, 180818, 180819, 180820, 180821, 180822, 180823, 180824, 180825 were selected from the ORFs having the nucleotide sequence represented by SEQ ID NO: 173693.

[15339] The probes having the nucleotide sequence represented by SEQ ID NOS: 180826, 180827, 180828, 180829, 180830, 180831, 180832, 180833, 180834, 180835, 180836 were selected from the ORFs having the nucleotide sequence represented by SEQ ID NO: 173694.

[15340] The probes having the nucleotide sequence represented by SEQ ID NOS: 180837, 180838, 180839, 180840, 180841, 180842, 180843, 180844, 180845, 180846 were selected from the ORFs having the nucleotide sequence represented by SEQ ID NO: 173695.

[15341] The probes having the nucleotide sequence represented by SEQ ID NOS: 180847, 180848, 180849, 180850, 180851, 180852, 186853, 180854, 180855, 180856, 180857 were selected from the ORFs having the nucleotide sequence represented by SEQ ID NO: 173696.

[15342] The probes having the nucleotide sequence represented by SEQ ID NOS: 180858, 180859, 180860, 180861, 180862, 180863, 180864, 180865, 180866, 180867, 180868 were selected from the ORFs having the nucleotide sequence represented by SEQ ID NO: 173697.

[15343] The probes having the nucleotide sequence represented by SEQ ID NOS: 180869, 180870, 180871, 180872, 180873, 180874, 180875, 180876, 180877, 180878, 180879 were selected from the ORFs having the nucleotide sequence represented by SEQ ID NO: 173698.

[15344] The probes having the nucleotide sequence represented by SEQ ID NOS: 180880, 180881, 180882, 180883, 180884, 180885, 180886, 180887, 180888, 180889, 180890 were selected from the ORFs having the nucleotide sequence represented by SEQ ID NO: 173699.

[15345] The probes having the nucleotide sequence represented by SEQ ID NOS: 180891, 180892, 180893, 180894, 180895, 180896, 180897, 180898, 180899, 180900, 180901 were selected from the ORFs having the nucleotide sequence represented by SEQ ID NO: 173700.

[15346] The probes having the nucleotide sequence represented by SEQ ID NOS: 180902, 180903, 180904, 180905, 180906, 180907, 180908, 180909, 180910, 180911, 180912 were selected from the ORFs having the nucleotide sequence represented by SEQ ID NO: 173701.

[15347] The probes having the nucleotide sequence represented by SEQ ID NOS: 180913, 180914, 180915, 180916, 180917, 180918, 180919, 180920, 180921, 180922, 180923 were selected from the ORFs having the nucleotide sequence represented by SEQ ID NO: 173702.

[15348] The probes having the nucleotide sequence represented by SEQ ID NOS: 180924, 180925, 180926, 180927, 180928, 180929, 180930, 180931, 180932, 180933, 180934 were selected from the ORFs having the nucleotide sequence represented by SEQ ID NO: 173703.

[15349] The probes having the nucleotide sequence represented by SEQ ID NOS: 180935, 180936, 180937, 180938, 180939, 180940, 180941, 180942, 180943, 180944, 180945 were selected from the ORFs having the nucleotide sequence represented by SEQ ID NO: 173704.

[15350] The probes having the nucleotide sequence represented by SEQ ID NOS: 180946, 180947, 180948, 180949, 180950, 180951, 180952, 180953, 180954, 180955, 180956 were selected from the ORFs having the nucleotide sequence represented by SEQ ID NO: 173705.

[15351] The probes having the nucleotide sequence represented by SEQ ID NOS: 180957, 180958, 180959, 180960, 180961, 180962, 180963, 180964, 180965, 180966, 180967 were selected from the ORFs having the nucleotide sequence represented by SEQ ID NO: 173706.

[15352] The probes having the nucleotide sequence represented by SEQ ID NOS: 180968, 180969, 180970, 180971, 180972, 180973, 180974, 180975, 180976, 180977, 180978 were selected from the ORFs having the nucleotide sequence represented by SEQ ID NO: 173707.

[15353] The probes having the nucleotide sequence represented by SEQ ID NOS: 180979, 180980, 180981, 180982, 180983, 180984, 180985, 180986, 180987, 180988, 180989 were selected from the ORFs having the nucleotide sequence represented by SEQ ID NO: 173708.

[15354] The probes having the nucleotide sequence represented by SEQ ID NOS: 180990, 180991, 180992, 180993, 180994, 180995, 180996, 180997, 180998, 180999, 181000 were selected from the ORFs having the nucleotide sequence represented by SEQ ID NO: 173709.

[15355] The probes having the nucleotide sequence represented by SEQ ID NOS: 181001, 181002, 181003, 181004, 181005, 181006, 181007, 181008, 181009, 181010, 181011 were selected from the ORFs having the nucleotide sequence represented by SEQ ID NO: 173710.

[15356] The probes having the nucleotide sequence represented by SEQ ID NOS: 181012, 181013, 181014, 181015, 181016, 181017, 181018, 181019, 181020, 181021, 181022 were selected from the ORFs having the nucleotide sequence represented by SEQ ID NO: 173711.

[15357] The probes having the nucleotide sequence represented by SEQ ID NOS: 181023, 181024, 181025, 181026, 181027, 181028, 181029, 181030, 181031, 181032, 181033 were selected from the ORFs having the nucleotide sequence represented by SEQ ID NO: 173712.

[15358] The probes having the nucleotide sequence represented by SEQ ID NOS: 181034, 181035, 181036, 181037, 181038, 181039, 181040, 181041, 181042, 181043, 181044 were selected from the ORFs having the nucleotide sequence represented by SEQ ID NO: 173713.

[15359] The probes having the nucleotide sequence represented by SEQ ID NOS: 181045, 181046, 181047, 181048, 181049, 181050, 181051, 181052, 181053, 181054, 181055 were selected from the ORFs having the nucleotide sequence represented by SEQ ID NO: 173714.

[15360] The probes having the nucleotide sequence represented by SEQ ID NOS: 181056, 181057, 181058, 181059, 181060, 181061, 181062, 181063, 181064, 181065, 181066 were selected from the ORFs having the nucleotide sequence represented by SEQ ID NO: 173715.

[15361] The probes having the nucleotide sequence represented by SEQ ID NOS: 181067, 181068, 181069, 181070, 181071, 181072, 181073, 181074, 181075, 181076, 181077 were selected from the ORFs having the nucleotide sequence represented by SEQ ID NO: 173716.

[15362] The probes having the nucleotide sequence represented by SEQ ID NOS: 181078, 181079, 181080, 181081, 181082, 181083, 181084, 181085, 181086, 181087, 181088 were selected from the ORFs having the nucleotide sequence represented by SEQ ID NO: 173717.

[15363] The probes having the nucleotide sequence represented by SEQ ID NOS: 181089, 181090, 181091, 181092, 181093, 181094, 181095, 181096, 181097, 181098, 181099 were selected from the ORFs having the nucleotide sequence represented by SEQ ID NO: 173718.

[15364] The probes having the nucleotide sequence represented by SEQ ID NOS: 181100, 181101, 181102, 181103, 181104, 181105, 181106, 181107, 181108, 181109, 181110 were selected from the ORFs having the nucleotide sequence represented by SEQ ID NO: 173719.

[15365] The probes having the nucleotide sequence represented by SEQ ID NOS: 181111, 181112, 181113, 181114, 181115, 181116, 181117, 181118, 181119, 181120, 181121 were selected from the ORFs having the nucleotide sequence represented by SEQ ID NO: 173720.

[15366] The probes having the nucleotide sequence represented by SEQ ID NOS: 181122, 181123, 181124, 181125, 181126, 181127, 181128, 181129, 181130, 181131, 181132 were selected from the ORFs having the nucleotide sequence represented by SEQ ID NO: 173721.

[15367] The probes having the nucleotide sequence represented by SEQ ID NOS: 181133, 181134, 181135, 181136, 181137, 181138, 181139, 181140, 181141, 181142, 181143 were selected from the ORFs having the nucleotide sequence represented by SEQ ID NO: 173722.

[15368] The probes having the nucleotide sequence represented by SEQ ID NOS: 181144, 181145, 181146, 181147, 181148, 181149, 181150, 181151, 181152, 181153, 181154 were selected from the ORFs having the nucleotide sequence represented by SEQ ID NO: 173723.

[15369] The probes having the nucleotide sequence represented by SEQ ID NOS: 181155, 181156, 181157, 181158, 181159, 181160, 181161, 181162, 181163, 181164, 181165 were selected from the ORFs having the nucleotide sequence represented by SEQ ID NO: 173724.

[15370] The probes having the nucleotide sequence represented by SEQ ID NOS: 181166, 181167, 181168, 181169, 181170, 181171, 181172, 181173, 181174, 181175, 181176 were selected from the ORFs having the nucleotide sequence represented by SEQ ID NO: 173725.

[15371] The probes having the nucleotide sequence represented by SEQ ID NOS: 181177, 181178, 181179, 181180, 181181, 181182, 181183, 181184, 181185, 181186, 181187 were selected from the ORFs having the nucleotide sequence represented by SEQ ID NO: 173726.

[15372] The probes having the nucleotide sequence represented by SEQ ID NOS: 181188, 181189, 181190, 181191, 181192, 181193, 181194, 181195, 181196, 181197, 181198 were selected from the ORFs having the nucleotide sequence represented by SEQ ID NO: 173727.

[15373] The probes having the nucleotide sequence represented by SEQ ID NOS: 181199, 181200, 181201, 181202, 181203, 181204, 181205, 181206, 181207, 181208, 181209 were selected from the ORFs having the nucleotide sequence represented by SEQ ID NO: 173728.

[15374] The probes having the nucleotide sequence represented by SEQ ID NOS: 181210, 181211, 181212, 181213, 181214, 181215, 181216, 181217, 181218, 181219, 181220 were selected from the ORFs having the nucleotide sequence represented by SEQ ID NO: 173729.

[15375] The probes having the nucleotide sequence represented by SEQ ID NOS: 181221, 181222, 181223, 181224, 181225, 181226, 181227, 181228, 181229, 181230, 181231 were selected from the ORFs having the nucleotide sequence represented by SEQ ID NO: 173730.

[15376] The probes having the nucleotide sequence represented by SEQ ID NOS: 181232, 181233, 181234, 181235, 181236, 181237, 181238, 181239, 181240, 181241, 181242 were selected from the ORFs having the nucleotide sequence represented by SEQ ID NO: 173731.

[15377] The probes having the nucleotide sequence represented by SEQ ID NOS: 181243, 181244, 181245, 181246, 181247, 181248, 181249, 181250, 181251, 181252, 181253 were selected from the ORFs having the nucleotide sequence represented by SEQ ID NO: 173732.

[15378] The probes having the nucleotide sequence represented by SEQ ID NOS: 181254, 181255, 181256, 181257, 181258, 181259, 181260, 181261, 181262, 181263, 181264 were selected from the ORFs having the nucleotide sequence represented by SEQ ID NO: 173733.

[15379] The probes having the nucleotide sequence represented by SEQ ID NOS: 181265, 181266, 181267, 181268, 181269, 181270, 181271, 181272, 181273, 181274, 181275 were selected from the ORFs having the nucleotide sequence represented by SEQ ID NO: 173734.

[15380] The probes having the nucleotide sequence represented by SEQ ID NOS: 181276, 181277, 181278, 181279, 181280, 181281, 181282, 181283, 181284, 181285, 181286 were selected from the ORFs having the nucleotide sequence represented by SEQ ID NO: 173735.

[15381] The probes having the nucleotide sequence represented by SEQ ID NOS: 181287, 181288, 181289, 181290, 181291, 181292, 181293, 181294, 181295, 181296, 181297 were selected from the ORFs having the nucleotide sequence represented by SEQ ID NO: 173736.

[15382] The probes having the nucleotide sequence represented by SEQ ID NOS: 181298, 181299, 181300, 181301, 181302, 181303, 181304, 181305, 181306, 181307, 181308 were selected from the ORFs having the nucleotide sequence represented by SEQ ID NO: 173737.

[15383] The probes having the nucleotide sequence represented by SEQ ID NOS: 181309, 181310, 181311, 181312, 181313, 181314, 181315, 181316, 181317, 181318, 181319 were selected from the ORFs having the nucleotide sequence represented by SEQ ID NO: 173738.

[15384] The probes having the nucleotide sequence represented by SEQ ID NOS: 181320, 181321, 181322, 181323, 181324, 181325, 181326, 181327, 181328, 181329, 181330 were selected from the ORFs having the nucleotide sequence represented by SEQ ID NO: 173739.

[15385] The probes having the nucleotide sequence represented by SEQ ID NOS: 181331, 181332, 181333, 181334, 181335, 181336, 181337, 181338, 181339, 181340, 181341 were selected from the ORFs having the nucleotide sequence represented by SEQ ID NO: 173740.

[15386] The probes having the nucleotide sequence represented by SEQ ID NOS: 181342, 181343, 181344, 181345, 181346, 181347, 181348, 181349, 181350, 181351, 181352 were selected from the ORFs having the nucleotide sequence represented by SEQ ID NO: 173741.

[15387] The probes having the nucleotide sequence represented by SEQ ID NOS: 181353, 181354, 181355, 181356, 181357, 181358, 181359, 181360, 181361, 181362, 181363 were selected from the ORFs having the nucleotide sequence represented by SEQ ID NO: 173742.

[15388] The probes having the nucleotide sequence represented by SEQ ID NOS: 181364, 181365, 181366, 181367, 181368, 181369, 181370, 181371, 181372, 181373, 181374 were selected from the ORFs having the nucleotide sequence represented by SEQ ID NO: 173743.

[15389] The probes having the nucleotide sequence represented by SEQ ID NOS: 181375, 181376, 181377, 181378, 181379, 181380, 181381, 181382, 181383, 181384, 181385 were selected from the ORFs having the nucleotide sequence represented by SEQ ID NO: 173744.

[15390] The probes having the nucleotide sequence represented by SEQ ID NOS: 181386, 181387, 181388, 181389, 181390, 181391, 181392, 181393, 181394, 181395, 181396 were selected from the ORFs having the nucleotide sequence represented by SEQ ID NO: 173745.

[15391] The probes having the nucleotide sequence represented by SEQ ID NOS: 181397, 181398, 181399, 181400, 181401, 181402, 181403, 181404, 181405, 181406, 181407 were selected from the ORFs having the nucleotide sequence represented by SEQ ID NO: 173746.

[15392] The probes having the nucleotide sequence represented by SEQ ID NOS: 181408, 181409, 181410, 181411, 181412, 181413, 181414, 181415, 181416, 181417, 181418 were selected from the ORFs having the nucleotide sequence represented by SEQ ID NO: 173747.

[15393] The probes having the nucleotide sequence represented by SEQ ID NOS: 181419, 181420, 181421, 181422, 181423, 181424, 181425, 181426, 181427, 181428, 181429 were selected from the ORFs having the nucleotide sequence represented by SEQ ID NO: 173748.

[15394] The probes having the nucleotide sequence represented by SEQ ID NOS: 181430, 181431, 181432, 181433, 181434, 181435, 181436, 181437, 181438, 181439, 181440 were selected from the ORFs having the nucleotide sequence represented by SEQ ID NO: 173749.

[15395] The probes having the nucleotide sequence represented by SEQ ID NOS: 181441, 181442, 181443, 181444, 181445, 181446, 181447, 181448, 181449, 181450, 181451 were selected from the ORFs having the nucleotide sequence represented by SEQ ID NO: 173750.

[15396] The probes having the nucleotide sequence represented by SEQ ID NOS: 181452, 181453, 181454, 181455, 181456, 181457, 181458, 181459, 181460, 181461, 181462 were selected from the ORFs having the nucleotide sequence represented by SEQ ID NO: 173751.

[15397] The probes having the nucleotide sequence represented by SEQ ID NOS: 181463, 181464, 181465, 181466, 181467, 181468, 181469, 181470, 181471, 181472, 181473 were selected from the ORFs having the nucleotide sequence represented by SEQ ID NO: 173752.

[15398] The probes having the nucleotide sequence represented by SEQ ID NOS: 181474, 181475, 181476, 181477, 181478, 181479, 181480, 181481, 181482, 181483, 181484 were selected from the ORFs having the nucleotide sequence represented by SEQ ID NO: 173753.

[15399] The probes having the nucleotide sequence represented by SEQ ID NOS: 181485, 181486, 181487, 181488, 181489, 181490, 181491, 181492, 181493, 181494, 181495 were selected from the ORFs having the nucleotide sequence represented by SEQ ID NO: 173754.

[15400] The probes having the nucleotide sequence represented by SEQ ID NOS: 181496, 181497, 181498, 181499, 181500, 181501, 181502, 181503, 181504, 181505, 181506 were selected from the ORFs having the nucleotide sequence represented by SEQ ID NO: 173755.

[15401] The probes having the nucleotide sequence represented by SEQ ID NOS: 181507, 181508, 181509, 181510, 181511, 181512, 181513, 181514, 181515, 181516, 181517 were selected from the ORFs having the nucleotide sequence represented by SEQ ID NO: 173756.

[15402] The probes having the nucleotide sequence represented by SEQ ID NOS: 181518, 181519, 181520, 181521, 181522, 181523, 181524, 181525, 181526, 181527, 181528 were selected from the ORFs having the nucleotide sequence represented by SEQ ID NO: 173757.

[15403] The probes having the nucleotide sequence represented by SEQ ID NOS: 181529, 181530, 181531, 181532, 181533, 181534, 181535, 181536, 181537, 181538, 181539 were selected from the ORFs having the nucleotide sequence represented by SEQ ID NO: 173758.

[15404] The probes having the nucleotide sequence represented by SEQ ID NOS: 181540, 181541, 181542, 181543, 181544, 181545, 181546, 181547, 181548, 181549, 181550 were selected from the ORFs having the nucleotide sequence represented by SEQ ID NO: 173759.

[15405] The probes having the nucleotide sequence represented by SEQ ID NOS: 181551, 181552, 181553, 181554, 181555, 181556, 181557, 181558, 181559, 181560, 181561 were selected from the ORFs having the nucleotide sequence represented by SEQ ID NO: 173760.

[15406] The probes having the nucleotide sequence represented by SEQ ID NOS: 181562, 181563, 181564, 181565, 181566, 181567, 181568, 181569, 181570, 181571, 181572 were selected from the ORFs having the nucleotide sequence represented by SEQ ID NO: 173761.

[15407] The probes having the nucleotide sequence represented by SEQ ID NOS: 181573, 181574, 181575, 181576, 181577, 181578, 181579, 181580, 181581, 181582, 181583 were selected from the ORFs having the nucleotide sequence represented by SEQ ID NO: 173762.

[15408] The probes having the nucleotide sequence represented by SEQ ID NOS: 181584, 181585, 181586, 181587, 181588, 181589, 181590, 181591, 181592, 181593, 181594 were selected from the ORFs having the nucleotide sequence represented by SEQ ID NO: 173763.

[15409] The probes having the nucleotide sequence represented by SEQ ID NOS: 181595, 181596, 181597, 181598, 181599, 181600, 181601, 181602, 181603, 181604, 181605 were selected from the ORFs having the nucleotide sequence represented by SEQ ID NO: 173764.

[15410] The probes having the nucleotide sequence represented by SEQ ID NOS: 181606, 181607, 181608, 181609, 181610, 181611, 181612, 181613, 181614, 181615, 181616 were selected from the ORFs having the nucleotide sequence represented by SEQ ID NO: 173765.

[15411] The probes having the nucleotide sequence represented by SEQ ID NOS: 181617, 181618, 181619, 181620, 181621, 181622, 181623, 181624, 181625, 181626, 181627 were selected from the ORFs having the nucleotide sequence represented by SEQ ID NO: 173766.

[15412] The probes having the nucleotide sequence represented by SEQ ID NOS: 181628, 181629, 181630, 181631, 181632, 181633, 181634, 181635, 181636, 181637, 181638 were selected from the ORFs having the nucleotide sequence represented by SEQ ID NO: 173767.

[15413] The probes having the nucleotide sequence represented by SEQ ID NOS: 181639, 181640, 181641, 181642, 181643, 181644, 181645, 181646, 181647, 181648, 181649 were selected from the ORFs having the nucleotide sequence represented by SEQ ID NO: 173768.

[15414] The probes having the nucleotide sequence represented by SEQ ID NOS: 181650, 181651, 181652, 181653, 181654, 181655, 181656, 181657, 181658, 181659, 181660 were selected from the ORFs having the nucleotide sequence represented by SEQ ID NO: 173769.

[15415] The probes having the nucleotide sequence represented by SEQ ID NOS: 181661, 181662, 181663, 181664, 181665, 181666, 181667, 181668, 181669, 181670, 181671 were selected from the ORFs having the nucleotide sequence represented by SEQ ID NO: 173770.

[15416] The probes having the nucleotide sequence represented by SEQ ID NOS: 181672, 181673, 181674, 181675, 181676, 181677, 181678, 181679, 181680, 181681, 181682 were selected from the ORFs having the nucleotide sequence represented by SEQ ID NO: 173771.

[15417] The probes having the nucleotide sequence represented by SEQ ID NOS: 181683, 181684, 181685, 181686, 181687, 181688, 181689, 181690, 181691, 181692, 181693 were selected from the ORFs having the nucleotide sequence represented by SEQ ID NO: 173772.

[15418] The probes having the nucleotide sequence represented by SEQ ID NOS: 181694, 181695, 181696, 181697, 181698, 181699, 181700, 181701, 181702, 181703, 181704 were selected from the ORFs having the nucleotide sequence represented by SEQ ID NO: 173773.

[15419] The probes having the nucleotide sequence represented by SEQ ID NOS: 181705, 181706, 181707, 181708, 181709, 181710, 181711, 181712, 181713, 181714, 181715 were selected from the ORFs having the nucleotide sequence represented by SEQ ID NO: 173774.

[15420] The probes having the nucleotide sequence represented by SEQ ID NOS: 181716, 181717, 181718, 181719, 181720, 181721, 181722, 181723, 181724, 181725, 181726 were selected from the ORFs having the nucleotide sequence represented by SEQ ID NO: 173775.

[15421] The probes having the nucleotide sequence represented by SEQ ID NOS: 181727, 181728, 181729, 181730, 181731, 181732, 181733, 181734, 181735, 181736, 181737 were selected from the ORFs having the nucleotide sequence represented by SEQ ID NO: 173776.

[15422] The probes having the nucleotide sequence represented by SEQ ID NOS: 181738, 181739, 181740, 181741, 181742, 181743, 181744, 181745, 181746, 181747, 181748 were selected from the ORFs having the nucleotide sequence represented by SEQ ID NO: 173777.

[15423] The probes having the nucleotide sequence represented by SEQ ID NOS: 181749, 181750, 181751, 181752, 181753, 181754, 181755, 181756, 181757, 181758, 181759 were selected from the ORFs having the nucleotide sequence represented by SEQ ID NO: 173778.

[15424] The probes having the nucleotide sequence represented by SEQ ID NOS: 181760, 181761, 181762, 181763, 181764, 181765, 181766, 181767, 181768, 181769, 181770 were selected from the ORFs having the nucleotide sequence represented by SEQ ID NO: 173779.

[15425] The probes having the nucleotide sequence represented by SEQ ID NOS: 181771, 181772, 181773, 181774, 181775, 181776, 181777, 181778, 181779, 181780, 181781 were selected from the ORFs having the nucleotide sequence represented by SEQ ID NO: 173780.

[15426] The probes having the nucleotide sequence represented by SEQ ID NOS: 181782, 181783, 181784, 181785, 181786, 181787, 181788, 181789, 181790, 181791, 181792 were selected from the ORFs having the nucleotide sequence represented by SEQ ID NO: 173781.

[15427] The probes having the nucleotide sequence represented by SEQ ID NOS: 181793, 181794, 181795, 181796, 181797, 181798, 181799, 181800, 181801, 181802, 181803 were selected from the ORFs having the nucleotide sequence represented by SEQ ID NO: 173782.

[15428] The probes having the nucleotide sequence represented by SEQ ID NOS: 181804, 181805, 181806, 181807, 181808, 181809, 181810, 181811, 181812, 181813, 181814 were selected from the ORFs having the nucleotide sequence represented by SEQ ID NO: 173783.

[15429] The probes having the nucleotide sequence represented by SEQ ID NOS: 181815, 181816, 181817, 181818, 181819, 181820, 181821, 181822, 181823, 181824, 181825 were selected from the ORFs having the nucleotide sequence represented by SEQ ID NO: 173784.

[15430] The probes having the nucleotide sequence represented by SEQ ID NOS: 181826, 181827, 181828, 181829, 181830, 181831, 181832, 181833, 181834, 181835, 181836 were selected from the ORFs having the nucleotide sequence represented by SEQ ID NO: 173785.

[15431] The probes having the nucleotide sequence represented by SEQ ID NOS: 181837, 181838, 181839, 181840, 181841, 181842, 181843, 181844, 181845, 181846, 181847 were selected from the ORFs having the nucleotide sequence represented by SEQ ID NO: 173786.

[15432] The probes having the nucleotide sequence represented by SEQ ID NOS: 181848, 181849, 181850, 181851, 181852, 181853, 181854, 181855, 181856, 181857, 181858 were selected from the ORFs having the nucleotide sequence represented by SEQ ID NO: 173787.

[15433] The probes having the nucleotide sequence represented by SEQ ID NOS: 181859, 181860, 181861, 181862, 181863, 181864, 181865, 181866, 181867, 181868, 181869 were selected from the ORFs having the nucleotide sequence represented by SEQ ID NO: 173788.

[15434] The probes having the nucleotide sequence represented by SEQ ID NOS: 181870, 181871, 181872, 181873, 181874, 181875, 181876, 181877, 181878, 181879, 181880 were selected from the ORFs having the nucleotide sequence represented by SEQ ID NO: 173789.

[15435] The probes having the nucleotide sequence represented by SEQ ID NOS: 181881, 181882, 181883, 181884, 181885, 181886, 181887, 181888, 181889, 181890, 181891 were selected from the ORFs having the nucleotide sequence represented by SEQ ID NO: 173790.

[15436] The probes having the nucleotide sequence represented by SEQ ID NOS: 181892, 181893, 181894, 181895, 181896, 181897, 181898, 181899, 181900, 181901, 181902 were selected from the ORFs having the nucleotide sequence represented by SEQ ID NO: 173791.

[15437] The probes having the nucleotide sequence represented by SEQ ID NOS: 181903, 181904, 181905, 181906, 181907, 181908, 181909, 181910, 181911, 181912, 181913 were selected from the ORFs having the nucleotide sequence represented by SEQ ID NO: 173792.

[15438] The probes having the nucleotide sequence represented by SEQ ID NOS: 181914, 181915, 181916, 181917, 181918, 181919, 181920, 181921, 181922, 181923, 181924 were selected from the ORFs having the nucleotide sequence represented by SEQ ID NO: 173793.

[15439] The probes having the nucleotide sequence represented by SEQ ID NOS: 181925, 181926, 181927, 181928, 181929, 181930, 181931, 181932, 181933, 181934, 181935 were selected from the ORFs having the nucleotide sequence represented by SEQ ID NO: 173794.

[15440] The probes having the nucleotide sequence represented by SEQ ID NOS: 181936, 181937, 181938, 181939, 181940, 181941, 181942, 181943, 181944, 181945, 181946 were selected from the ORFs having the nucleotide sequence represented by SEQ ID NO: 173795.

[15441] The probes having the nucleotide sequence represented by SEQ ID NOS: 181947, 181948, 181949, 181950, 181951, 181952, 181953, 181954, 181955, 181956, 181957 were selected from the ORFs having the nucleotide sequence represented by SEQ ID NO: 173796.

[15442] The probes having the nucleotide sequence represented by SEQ ID NOS: 181958, 181959, 181960, 181961, 181962, 181963, 181964, 181965, 181966, 181967, 181968 were selected from the ORFs having the nucleotide sequence represented by SEQ ID NO: 173797.

[15443] The probes having the nucleotide sequence represented by SEQ ID NOS: 181969, 181970, 181971, 181972, 181973, 181974, 181975, 181976, 181977, 181978 were selected from the ORFs having the nucleotide sequence represented by SEQ ID NO: 173798.

[15444] The probes having the nucleotide sequence represented by SEQ ID NOS: 181979, 181980, 181981, 181982, 181983, 181984, 181985, 181986, 181987, 181988, 181989 were selected from the ORFs having the nucleotide sequence represented by SEQ ID NO: 173799.

[15445] The probes having the nucleotide sequence represented by SEQ ID NOS: 181990, 181991, 181992, 181993, 181994, 181995, 181996, 181997, 181998, 181999, 182000 were selected from the ORFs having the nucleotide sequence represented by SEQ ID NO: 173800.

[15446] The probes having the nucleotide sequence represented by SEQ ID NOS: 182001, 182002, 182003, 182004, 182005, 182006, 182007, 182008, 182009, 182010, 182011 were selected from the ORFs having the nucleotide sequence represented by SEQ ID NO: 173801.

[15447] The probes having the nucleotide sequence represented by SEQ ID NOS: 182012, 182013, 182014, 182015, 182016, 182017, 182018, 182019, 182020, 182021, 182022 were selected from the ORFs having the nucleotide sequence represented by SEQ ID NO: 173802.

[15448] The probes having the nucleotide sequence represented by SEQ ID NOS: 182023, 182024, 182025, 182026, 182027, 182028, 182029, 182030, 182031, 182032, 182033 were selected from the ORFs having the nucleotide sequence represented by SEQ ID NO: 173803.

[15449] The probes having the nucleotide sequence represented by SEQ ID NOS: 182034, 182035, 182036, 182037, 182038, 182039, 182040, 182041, 182042, 182043, 182044 were selected from the ORFs having the nucleotide sequence represented by SEQ ID NO: 173804.

[15450] The probes having the nucleotide sequence represented by SEQ ID NOS: 182045, 182046, 182047, 182048, 182049, 182050, 182051, 182052, 182053, 182054, 182055 were selected from the ORFs having the nucleotide sequence represented by SEQ ID NO: 173805.

[15451] The probes having the nucleotide sequence represented by SEQ ID NOS: 182056, 182057, 182058, 182059, 182060, 182061, 182062, 182063, 182064, 182065, 182066 were selected from the ORFs having the nucleotide sequence represented by SEQ ID NO: 173806.

[15452] The probes having the nucleotide sequence represented by SEQ ID NOS: 182067, 182068, 182069, 182070, 182071, 182072, 182073, 182074, 182075, 182076, 182077 were selected from the ORFs having the nucleotide sequence represented by SEQ ID NO: 173807.

[15453] The probes having the nucleotide sequence represented by SEQ ID NOS: 182078, 182079, 182080, 182081, 182082, 182083, 182084, 182085, 182086, 182087, 182088 were selected from the ORFs having the nucleotide sequence represented by SEQ ID NO: 173808.

[15454] The probes having the nucleotide sequence represented by SEQ ID NOS: 182089, 182090, 182091, 182092, 182093, 182094, 182095, 182096, 182097, 182098, 182099 were selected from the ORFs having the nucleotide sequence represented by SEQ ID NO: 173809.

[15455] The probes having the nucleotide sequence represented by SEQ ID NOS: 182100, 182101, 182102, 182103, 182104, 182105, 182106, 182107, 182108, 182109, 182110 were selected from the ORFs having the nucleotide sequence represented by SEQ ID NO: 173810.

[15456] The probes having the nucleotide sequence represented by SEQ ID NOS: 182111, 182112, 182113, 182114, 182115, 182116, 182117, 182118, 182119, 182120, 182121 were selected from the ORFs having the nucleotide sequence represented by SEQ ID NO: 173811.

[15457] The probes having the nucleotide sequence represented by SEQ ID NOS: 182122, 182123, 182124, 182125, 182126, 182127, 182128, 182129, 182130, 182131, 182132 were selected from the ORFs having the nucleotide sequence represented by SEQ ID NO: 173812.

[15458] The probes having the nucleotide sequence represented by SEQ ID NOS: 182133, 182134, 182135, 182136, 182137, 182138, 182139, 182140, 182141, 182142, 182143 were selected from the ORFs having the nucleotide sequence represented by SEQ ID NO: 173813.

[15459] The probes having the nucleotide sequence represented by SEQ ID NOS: 182144, 182145, 182146, 182147, 182148, 182149, 182150, 182151, 182152, 182153, 182154 were selected from the ORFs having the nucleotide sequence represented by SEQ ID NO: 173814.

[15460] The probes having the nucleotide sequence represented by SEQ ID NOS: 182155, 182156, 182157, 182158, 182159, 182160, 182161, 182162, 182163, 182164, 182165 were selected from the ORFs having the nucleotide sequence represented by SEQ ID NO: 173815.

[15461] The probes having the nucleotide sequence represented by SEQ ID NOS: 182166, 182167, 182168, 182169, 182170, 182171, 182172, 182173, 182174, 182175, 182176 were selected from the ORFs having the nucleotide sequence represented by SEQ ID NO: 173816.

[15462] The probes having the nucleotide sequence represented by SEQ ID NOS: 182177, 182178, 182179, 182180, 182181, 182182, 182183, 182184, 182185, 182186, 182187 were selected from the ORFs having the nucleotide sequence represented by SEQ ID NO: 173817.

[15463] The probes having the nucleotide sequence represented by SEQ ID NOS: 182188, 182189, 182190, 182191, 182192, 182193, 182194, 182195, 182196, 182197, 182198 were selected from the ORFs having the nucleotide sequence represented by SEQ ID NO: 173818.

[15464] The probes having the nucleotide sequence represented by SEQ ID NOS: 182199, 182200, 182201, 182202, 182203, 182204, 182205, 182206, 182207, 182208, 182209 were selected from the ORFs having the nucleotide sequence represented by SEQ ID NO: 173819.

[15465] The probes having the nucleotide sequence represented by SEQ ID NOS: 182210, 182211, 182212, 182213, 182214, 182215, 182216, 182217, 182218, 182219, 182220 were selected from the ORFs having the nucleotide sequence represented by SEQ ID NO: 173820.

[15466] The probes having the nucleotide sequence represented by SEQ ID NOS: 182221, 182222, 182223, 182224, 182225, 182226, 182227, 182228, 182229, 182230, 182231 were selected from the ORFs having the nucleotide sequence represented by SEQ ID NO: 173821.

[15467] The probes having the nucleotide sequence represented by SEQ ID NOS: 182232, 182233, 182234, 182235, 182236, 182237, 182238, 182239, 182240, 182241, 182242 were selected from the ORFs having the nucleotide sequence represented by SEQ ID NO: 173822.

[15468] The probes having the nucleotide sequence represented by SEQ ID NOS: 182243, 182244, 182245, 182246, 182247, 182248, 182249, 182250, 182251, 182252, 182253 were selected from the ORFs having the nucleotide sequence represented by SEQ ID NO: 173823.

[15469] The probes having the nucleotide sequence represented by SEQ ID NOS: 182254, 182255, 182256, 182257, 182258, 182259, 182260, 182261, 182262, 182263, 182264 were selected from the ORFs having the nucleotide sequence represented by SEQ ID NO: 173824.

[15470] The probes having the nucleotide sequence represented by SEQ ID NOS: 182265, 182266, 182267, 182268, 182269, 182270, 182271, 182272, 182273, 182274, 182275 were selected from the ORFs having the nucleotide sequence represented by SEQ ID NO: 173825.

[15471] The probes having the nucleotide sequence represented by SEQ ID NOS: 182276, 182277, 182278, 182279, 182280, 182281, 182282, 182283, 182284, 182285, 182286 were selected from the ORFs having the nucleotide sequence represented by SEQ ID NO: 173826.

[15472] The probes having the nucleotide sequence represented by SEQ ID NOS: 182287, 182288, 182289, 182290, 182291, 182292, 182293, 182294, 182295, 182296, 182297 were selected from the ORFs having the nucleotide sequence represented by SEQ ID NO: 173827.

[15473] The probes having the nucleotide sequence represented by SEQ ID NOS: 182298, 182299, 182300, 182301, 182302, 182303, 182304, 182305, 182306, 182307, 182308 were selected from the ORFs having the nucleotide sequence represented by SEQ ID NO: 173828.

[15474] The probes having the nucleotide sequence represented by SEQ ID NOS: 182309, 182310, 182311, 182312, 182313, 182314, 182315, 182316, 182317, 182318, 182319 were selected from the ORFs having the nucleotide sequence represented by SEQ ID NO: 173829.

[15475] The probes having the nucleotide sequence represented by SEQ ID NOS: 182320, 182321, 182322, 182323, 182324, 182325, 182326, 182327, 182328, 182329, 182330 were selected from the ORFs having the nucleotide sequence represented by SEQ ID NO: 173830.

[15476] The probes having the nucleotide sequence represented by SEQ ID NOS: 182331, 182332, 182333, 182334, 182335, 182336, 182337, 182338, 182339, 182340, 182341 were selected from the ORFs having the nucleotide sequence represented by SEQ ID NO: 173831.

[15477] The probes having the nucleotide sequence represented by SEQ ID NOS: 182342, 182343, 182344, 182345, 182346, 182347, 182348, 182349, 182350, 182351, 182352 were selected from the ORFs having the nucleotide sequence represented by SEQ ID NO: 173832.

[15478] The probes having the nucleotide sequence represented by SEQ ID NOS: 182353, 182354, 182355, 182356, 182357, 182358, 182359, 182360, 182361, 182362, 182363 were selected from the ORFs having the nucleotide sequence represented by SEQ ID NO: 173833.

[15479] The probes having the nucleotide sequence represented by SEQ ID NOS: 182364, 182365, 182366, 182367, 182368, 182369, 182370, 182371, 182372, 182373, 182374 were selected from the ORFs having the nucleotide sequence represented by SEQ ID NO: 173834.

[15480] The probes having the nucleotide sequence represented by SEQ ID NOS: 182375, 182376, 182377, 182378, 182379, 182380, 182381, 182382, 182383, 182384, 182385 were selected from the ORFs having the nucleotide sequence represented by SEQ ID NO: 173835.

[15481] The probes having the nucleotide sequence represented by SEQ ID NOS: 182386, 182387, 182388, 182389, 182390, 182391, 182392, 182393, 182394, 182395, 182396 were selected from the ORFs having the nucleotide sequence represented by SEQ ID NO: 173836.

[15482] The probes having the nucleotide sequence represented by SEQ ID NOS: 182397, 182398, 182399, 182400, 182401, 182402, 182403, 182404, 182405, 182406, 182407 were selected from the ORFs having the nucleotide sequence represented by SEQ ID NO: 173837.

[15483] The probes having the nucleotide sequence represented by SEQ ID NOS: 182408, 182409, 182410, 182411, 182412, 182413, 182414, 182415, 182416, 182417, 182418 were selected from the ORFs having the nucleotide sequence represented by SEQ ID NO: 173838.

[15484] The probes having the nucleotide sequence represented by SEQ ID NOS: 182419, 182420, 182421, 182422, 182423, 182424, 182425, 182426, 182427, 182428, 182429 were selected from the ORFs having the nucleotide sequence represented by SEQ ID NO: 173839.

[15485] The probes having the nucleotide sequence represented by SEQ ID NOS: 182430, 182431, 182432, 182433, 182434, 182435, 182436, 182437, 182438, 182439, 182440 were selected from the ORFs having the nucleotide sequence represented by SEQ ID NO: 173840.

[15486] The probes having the nucleotide sequence represented by SEQ ID NOS: 182441, 182442, 182443, 182444, 182445, 182446, 182447, 182448, 182449, 182450, 182451 were selected from the ORFs having the nucleotide sequence represented by SEQ ID NO: 173841.

[15487] The probes having the nucleotide sequence represented by SEQ ID NOS: 182452, 182453, 182454, 182455, 182456, 182457, 182458, 182459, 182460, 182461, 182462 were selected from the ORFs having the nucleotide sequence represented by SEQ ID NO: 173842.

[15488] The probes having the nucleotide sequence represented by SEQ ID NOS: 182463, 182464, 182465, 182466, 182467, 182468, 182469, 182470, 182471, 182472, 182473 were selected from the ORFs having the nucleotide sequence represented by SEQ ID NO: 173843.

[15489] The probes having the nucleotide sequence represented by SEQ ID NOS: 182474, 182475, 182476, 182477, 182478, 182479, 182480, 182481, 182482, 182483, 182484 were selected from the ORFs having the nucleotide sequence represented by SEQ ID NO: 173844.

[15490] The probes having the nucleotide sequence represented by SEQ ID NOS: 182485, 182486, 182487, 182488, 182489, 182490, 182491, 182492, 182493, 182494, 182495 were selected from the ORFs having the nucleotide sequence represented by SEQ ID NO: 173845.

[15491] The probes having the nucleotide sequence represented by SEQ ID NOS: 182496, 182497, 182498, 182499, 182500, 182501, 182502, 182503, 182504, 182505, 182506 were selected from the ORFs having the nucleotide sequence represented by SEQ ID NO: 173846.

[15492] The probes having the nucleotide sequence represented by SEQ ID NOS: 182507, 182508, 182509, 182510, 182511, 182512, 182513, 182514, 182515, 182516, 182517 were selected from the ORFs having the nucleotide sequence represented by SEQ ID NO: 173847.

[15493] The probes having the nucleotide sequence represented by SEQ ID NOS: 182518, 182519, 182520, 182521, 182522, 182523, 182524, 182525, 182526, 182527, 182528 were selected from the ORFs having the nucleotide sequence represented by SEQ ID NO: 173848.

[15494] The probes having the nucleotide sequence represented by SEQ ID NOS: 182529, 182530, 182531, 182532, 182533, 182534, 182535, 182536, 182537, 182538, 182539 were selected from the ORFs having the nucleotide sequence represented by SEQ ID NO: 173849.

[15495] The probes having the nucleotide sequence represented by SEQ ID NOS: 182540, 182541, 182542, 182543, 182544, 182545, 182546, 182547, 182548, 182549, 182550 were selected from the ORFs having the nucleotide sequence represented by SEQ ID NO: 173850.

[15496] The probes having the nucleotide sequence represented by SEQ ID NOS: 182551, 182552, 182553, 182554, 182555, 182556, 182557, 182558, 182559, 182560, 182561 were selected from the ORFs having the nucleotide sequence represented by SEQ ID NO: 173851.

[15497] The probes having the nucleotide sequence represented by SEQ ID NOS: 182562, 182563, 182564, 182565, 182566, 182567, 182568, 182569, 182570, 182571, 182572 were selected from the ORFs having the nucleotide sequence represented by SEQ ID NO: 173852.

[15498] The probes having the nucleotide sequence represented by SEQ ID NOS: 182573, 182574, 182575, 182576, 182577, 182578, 182579, 182580, 182581, 182582, 182583 were selected from the ORFs having the nucleotide sequence represented by SEQ ID NO: 173853.

[15499] The probes having the nucleotide sequence represented by SEQ ID NOS: 182584, 182585, 182586, 182587, 182588, 182589, 182590, 182591, 182592, 182593, 182594 were selected from the ORFs having the nucleotide sequence represented by SEQ ID NO: 173854.

[15500] The probes having the nucleotide sequence represented by SEQ ID NOS: 182595, 182596, 182597, 182598, 182599, 182600, 182601, 182602, 182603, 182604, 182605 were selected from the ORFs having the nucleotide sequence represented by SEQ ID NO: 173855.

[15501] The probes having the nucleotide sequence represented by SEQ ID NOS: 182606, 182607, 182608, 182609, 182610, 182611, 182612, 182613, 182614, 182615, 182616 were selected from the ORFs having the nucleotide sequence represented by SEQ ID NO: 173856.

[15502] The probes having the nucleotide sequence represented by SEQ ID NOS: 182617, 182618, 182619, 182620, 182621, 182622, 182623, 182624, 182625, 182626, 182627 were selected from the ORFs having the nucleotide sequence represented by SEQ ID NO: 173857.

[15503] The probes having the nucleotide sequence represented by SEQ ID NOS: 182628, 182629, 182630, 182631, 182632, 182633, 182634, 182635, 182636, 182637, 182638 were selected from the ORFs having the nucleotide sequence represented by SEQ ID NO: 173858.

[15504] The probes having the nucleotide sequence represented by SEQ ID NOS: 182639, 182640, 182641, 182642, 182643, 182644, 182645, 182646, 182647, 182648, 182649 were selected from the ORFs having the nucleotide sequence represented by SEQ ID NO: 173859.

[15505] The probes having the nucleotide sequence represented by SEQ ID NOS: 182650, 182651, 182652, 182653, 182654, 182655, 182656, 182657, 182658, 182659, 182660 were selected from the ORFs having the nucleotide sequence represented by SEQ ID NO: 173860.

[15506] The probes having the nucleotide sequence represented by SEQ ID NOS: 182661, 182662, 182663, 182664, 182665, 182666, 182667, 182668, 182669, 182670, 182671 were selected from the ORFs having the nucleotide sequence represented by SEQ ID NO: 173861.

[15507] The probes having the nucleotide sequence represented by SEQ ID NOS: 182672, 182673, 182674, 182675, 182676, 182677, 182678, 182679, 182680, 182681, 182682 were selected from the ORFs having the nucleotide sequence represented by SEQ ID NO: 173862.

[15508] The probes having the nucleotide sequence represented by SEQ ID NOS: 182683, 182684, 182685, 182686, 182687, 182688, 182689, 182690, 182691, 182692, 182693 were selected from the ORFs having the nucleotide sequence represented by SEQ ID NO: 173863.

[15509] The probes having the nucleotide sequence represented by SEQ ID NOS: 182694, 182695, 182696, 182697, 182698, 182699, 182700, 182701, 182702, 182703, 182704 were selected from the ORFs having the nucleotide sequence represented by SEQ ID NO: 173864.

[15510] The probes having the nucleotide sequence represented by SEQ ID NOS: 182705, 182706, 182707, 182708, 182709, 182710, 182711, 182712, 182713, 182714, 182715 were selected from the ORFs having the nucleotide sequence represented by SEQ ID NO: 173865.

[15511] The probes having the nucleotide sequence represented by SEQ ID NOS: 182716, 182717, 182718, 182719, 182720, 182721, 182722, 182723, 182724, 182725, 182726 were selected from the ORFs having the nucleotide sequence represented by SEQ ID NO: 173866.

[15512] The probes having the nucleotide sequence represented by SEQ ID NOS: 182727, 182728, 182729, 182730, 182731, 182732, 182733, 182734, 182735, 182736, 182737 were selected from the ORFs having the nucleotide sequence represented by SEQ ID NO: 173867.

[15513] The probes having the nucleotide sequence represented by SEQ ID NOS: 182738, 182739, 182740, 182741, 182742, 182743, 182744, 182745, 182746, 182747, 182748 were selected from the ORFs having the nucleotide sequence represented by SEQ ID NO: 173868.

[15514] The probes having the nucleotide sequence represented by SEQ ID NOS: 182749, 182750, 182751, 182752, 182753, 182754, 182755, 182756, 182757, 182758, 182759 were selected from the ORFs having the nucleotide sequence represented by SEQ ID NO: 173869.

[15515] The probes having the nucleotide sequence represented by SEQ ID NOS: 182760, 182761, 182762, 182763, 182764, 182765, 182766, 182767, 182768, 182769, 182770 were selected from the ORFs having the nucleotide sequence represented by SEQ ID NO: 173870.

[15516] The probes having the nucleotide sequence represented by SEQ ID NOS: 182771, 182772, 182773, 182774, 182775, 182776, 182777, 182778, 182779, 182780, 182781 were selected from the ORFs having the nucleotide sequence represented by SEQ ID NO: 173871.

[15517] The probes having the nucleotide sequence represented by SEQ ID NOS: 182782, 182783, 182784, 182785, 182786, 182787, 182788, 182789, 182790, 182791, 182792 were selected from the ORFs having the nucleotide sequence represented by SEQ ID NO: 173872.

[15518] The probes having the nucleotide sequence represented by SEQ ID NOS: 182793, 182794, 182795, 182796, 182797, 182798, 182799, 182800, 182801, 182802, 182803 were selected from the ORFs having the nucleotide sequence represented by SEQ ID NO: 173873.

[15519] The probes having the nucleotide sequence represented by SEQ ID NOS: 182804, 182805, 182806, 182807, 182808, 182809, 182810, 182811, 182812, 182813, 182814 were selected from the ORFs having the nucleotide sequence represented by SEQ ID NO: 173874.

[15520] The probes having the nucleotide sequence represented by SEQ ID NOS: 182815, 182816, 182817, 182818, 182819, 182820, 182821, 182822, 182823, 182824, 182825 were selected from the ORFs having the nucleotide sequence represented by SEQ ID NO: 173875.

[15521] The probes having the nucleotide sequence represented by SEQ ID NOS: 182826, 182827, 182828, 182829, 182830, 182831, 182832, 182833, 182834, 182835, 182836 were selected from the ORFs having the nucleotide sequence represented by SEQ ID NO: 173876.

[15522] The probes having the nucleotide sequence represented by SEQ ID NOS: 182837, 182838, 182839, 182840, 182841, 182842, 182843, 182844, 182845, 182846, 182847 were selected from the ORFs having the nucleotide sequence represented by SEQ ID NO: 173877.

[15523] The probes having the nucleotide sequence represented by SEQ ID NOS: 182848, 182849, 182850, 182851, 182852, 182853, 182854, 182855, 182856, 182857, 182858 were selected from the ORFs having the nucleotide sequence represented by SEQ ID NO: 173878.

[15524] The probes having the nucleotide sequence represented by SEQ ID NOS: 182859, 182860, 182861, 182862, 182863, 182864, 182865, 182866, 182867, 182868, 182869 were selected from the ORFs having the nucleotide sequence represented by SEQ ID NO: 173879.

[15525] The probes having the nucleotide sequence represented by SEQ ID NOS: 182870, 182871, 182872, 182873, 182874, 182875, 182876, 182877, 182878, 182879, 182880 were selected from the ORFs having the nucleotide sequence represented by SEQ ID NO: 173880.

[15526] The probes having the nucleotide sequence represented by SEQ ID NOS: 182881, 182882, 182883, 182884, 182885, 182886, 182887, 182888, 182889, 182890, 182891 were selected from the ORFs having the nucleotide sequence represented by SEQ ID NO: 173881.

[15527] The probes having the nucleotide sequence represented by SEQ ID NOS: 182892, 182893, 182894, 182895, 182896, 182897, 182898, 182899, 182900, 182901, 182902 were selected from the ORFs having the nucleotide sequence represented by SEQ ID NO: 173882.

[15528] The probes having the nucleotide sequence represented by SEQ ID NOS: 182903, 182904, 182905, 182906, 182907, 182908, 182909, 182910, 182911, 182912, 182913 were selected from the ORFs having the nucleotide sequence represented by SEQ ID NO: 173883.

[15529] The probes having the nucleotide sequence represented by SEQ ID NOS: 182914, 182915, 182916, 182917, 182918, 182919, 182920, 182921, 182922, 182923, 182924 were selected from the ORFs having the nucleotide sequence represented by SEQ ID NO: 173884.

[15530] The probes having the nucleotide sequence represented by SEQ ID NOS: 182925, 182926, 182927, 182928, 182929, 182930, 182931, 182932, 182933, 182934, 182935 were selected from the ORFs having the nucleotide sequence represented by SEQ ID NO: 173885.

[15531] The probes having the nucleotide sequence represented by SEQ ID NOS: 182936, 182937, 182938, 182939, 182940, 182941, 182942, 182943, 182944, 182945, 182946 were selected from the ORFs having the nucleotide sequence represented by SEQ ID NO: 173886.

[15532] The probes having the nucleotide sequence represented by SEQ ID NOS: 182947, 182948, 182949, 182950, 182951, 182952, 182953, 182954, 182955, 182956, 182957 were selected from the ORFs having the nucleotide sequence represented by SEQ ID NO: 173887.

[15533] The probes having the nucleotide sequence represented by SEQ ID NOS: 182958, 182959, 182960, 182961, 182962, 182963, 182964, 182965, 182966, 182967, 182968 were selected from the ORFs having the nucleotide sequence represented by SEQ ID NO: 173888.

[15534] The probes having the nucleotide sequence represented by SEQ ID NOS: 182969, 182970, 182971, 182972, 182973, 182974, 182975, 182976, 182977, 182978, 182979 were selected from the ORFs having the nucleotide sequence represented by SEQ ID NO: 173889.

[15535] The probes having the nucleotide sequence represented by SEQ ID NOS: 182980, 182981, 182982, 182983, 182984, 182985, 182986, 182987, 182988, 182989, 182990 were selected from the ORFs having the nucleotide sequence represented by SEQ ID NO: 173890.

[15536] The probes having the nucleotide sequence represented by SEQ ID NOS: 182991, 182992, 182993, 182994, 182995, 182996, 182997, 182998, 182999, 183000, 183001 were selected from the ORFs having the nucleotide sequence represented by SEQ ID NO: 173891.

[15537] The probes having the nucleotide sequence represented by SEQ ID NOS: 183002, 183003, 183004, 183005, 183006, 183007, 183008, 183009, 183010, 183011, 183012 were selected from the ORFs having the nucleotide sequence represented by SEQ ID NO: 173892.

[15538] The probes having the nucleotide sequence represented by SEQ ID NOS: 183013, 183014, 183015, 183016, 183017, 183018, 183019, 183020, 183021, 183022, 183023 were selected from the ORFs having the nucleotide sequence represented by SEQ ID NO: 173893.

[15539] The probes having the nucleotide sequence represented by SEQ ID NOS: 183024, 183025, 183026, 183027, 183028, 183029, 183030, 183031, 183032, 183033, 183034 were selected from the ORFs having the nucleotide sequence represented by SEQ ID NO: 173894.

[15540] The probes having the nucleotide sequence represented by SEQ ID NOS: 183035, 183036, 183037, 183038, 183039, 183040, 183041, 183042, 183043, 183044, 183045 were selected from the ORFs having the nucleotide sequence represented by SEQ ID NO: 173895.

[15541] The probes having the nucleotide sequence represented by SEQ ID NOS: 183046, 183047, 183048, 183049, 183050, 183051, 183052, 183053, 183054, 183055, 183056 were selected from the ORFs having the nucleotide sequence represented by SEQ ID NO: 173896.

[15542] The probes having the nucleotide sequence represented by SEQ ID NOS: 183057, 183058, 183059, 183060, 183061, 183062, 183063, 183064, 183065, 183066, 183067 were selected from the ORFs having the nucleotide sequence represented by SEQ ID NO: 173897.

[15543] The probes having the nucleotide sequence represented by SEQ ID NOS: 183068, 183069, 183070, 183071, 183072, 183073, 183074, 183075, 183076, 183077, 183078 were selected from the ORFs having the nucleotide sequence represented by SEQ ID NO: 173898.

[15544] The probes having the nucleotide sequence represented by SEQ ID NOS: 183079, 183080, 183081, 183082, 183083, 183084, 183085, 183086, 183087, 183088, 183089 were selected from the ORFs having the nucleotide sequence represented by SEQ ID NO: 173899.

[15545] The probes having the nucleotide sequence represented by SEQ ID NOS: 183090, 183091, 183092, 183093, 183094, 183095, 183096, 183097, 183098, 183099, 183100 were selected from the ORFs having the nucleotide sequence represented by SEQ ID NO: 173900.

[15546] The probes having the nucleotide sequence represented by SEQ ID NOS: 183101, 183102, 183103, 183104, 183105, 183106, 183107, 183108, 183109, 183110, 183111 were selected from the ORFs having the nucleotide sequence represented by SEQ ID NO: 173901.

[15547] The probes having the nucleotide sequence represented by SEQ ID NOS: 183112, 183113, 183114, 183115, 183116, 183117, 183118, 183119, 183120, 183121, 183122 were selected from the ORFs having the nucleotide sequence represented by SEQ ID NO: 173902.

[15548] The probes having the nucleotide sequence represented by SEQ ID NOS: 183123, 183124, 183125, 183126, 183127, 183128, 183129, 183130, 183131, 183132, 183133 were selected from the ORFs having the nucleotide sequence represented by SEQ ID NO: 173903.

[15549] The probes having the nucleotide sequence represented by SEQ ID NOS: 183134, 183135, 183136, 183137, 183138, 183139, 183140, 183141, 183142, 183143, 183144 were selected from the ORFs having the nucleotide sequence represented by SEQ ID NO: 173904.

[15550] The probes having the nucleotide sequence represented by SEQ ID NOS: 183145, 183146, 183147, 183148, 183149, 183150, 183151, 183152, 183153, 183154, 183155 were selected from the ORFs having the nucleotide sequence represented by SEQ ID NO: 173905.

[15551] The probes having the nucleotide sequence represented by SEQ ID NOS: 183156, 183157, 183158, 183159, 183160, 183161, 183162, 183163, 183164, 183165, 183166 were selected from the ORFs having the nucleotide sequence represented by SEQ ID NO: 173906.

[15552] The probes having the nucleotide sequence represented by SEQ ID NOS: 183167, 183168, 183169, 183170, 183171, 183172, 183173, 183174, 183175, 183176, 183177 were selected from the ORFs having the nucleotide sequence represented by SEQ ID NO: 173907.

[15553] The probes having the nucleotide sequence represented by SEQ ID NOS: 183178, 183179, 183180, 183181, 183182, 183183, 183184, 183185, 183186, 183187, 183188 were selected from the ORFs having the nucleotide sequence represented by SEQ ID NO: 173908.

[15554] The probes having the nucleotide sequence represented by SEQ ID NOS: 183189, 183190, 183191, 183192, 183193, 183194, 183195, 183196, 183197, 183198, 183199 were selected from the ORFs having the nucleotide sequence represented by SEQ ID NO: 173909.

[15555] The probes having the nucleotide sequence represented by SEQ ID NOS: 183200, 183201, 183202, 183203, 183204, 183205, 183206, 183207, 183208, 183209, 183210 were selected from the ORFs having the nucleotide sequence represented by SEQ ID NO: 173910.

[15556] The probes having the nucleotide sequence represented by SEQ ID NOS: 183211, 183212, 183213, 183214, 183215, 183216, 183217, 183218, 183219, 183220, 183221 were selected from the ORFs having the nucleotide sequence represented by SEQ ID NO: 173911.

[15557] The probes having the nucleotide sequence represented by SEQ ID NOS: 183222, 183223, 183224, 183225, 183226, 183227, 183228, 183229, 183230, 183231, 183232 were selected from the ORFs having the nucleotide sequence represented by SEQ ID NO: 173912.

[15558] The probes having the nucleotide sequence represented by SEQ ID NOS: 183233, 183234, 183235, 183236, 183237, 183238, 183239, 183240, 183241, 183242, 183243 were selected from the ORFs having the nucleotide sequence represented by SEQ ID NO: 173913.

[15559] The probes having the nucleotide sequence represented by SEQ ID NOS: 183244, 183245, 183246, 183247, 183248, 183249, 183250, 183251, 183252, 183253, 183254 were selected from the ORFs having the nucleotide sequence represented by SEQ ID NO: 173914.

[15560] The probes having the nucleotide sequence represented by SEQ ID NOS: 183255, 183256, 183257, 183258, 183259, 183260, 183261, 183262, 183263, 183264, 183265 were selected from the ORFs having the nucleotide sequence represented by SEQ ID NO: 173915.

[15561] The probes having the nucleotide sequence represented by SEQ ID NOS: 183266, 183267, 183268, 183269, 183270, 183271, 183272, 183273, 183274, 183275, 183276 were selected from the ORFs having the nucleotide sequence represented by SEQ ID NO: 173916.

[15562] The probes having the nucleotide sequence represented by SEQ ID NOS: 183277, 183278, 183279, 183280, 183281, 183282, 183283, 183284, 183285, 183286, 183287 were selected from the ORFs having the nucleotide sequence represented by SEQ ID NO: 173917.

[15563] The probes having the nucleotide sequence represented by SEQ ID NOS: 183288, 183289, 183290, 183291, 183292, 183293, 183294, 183295, 183296, 183297, 183298 were selected from the ORFs having the nucleotide sequence represented by SEQ ID NO: 173918.

[15564] The probes having the nucleotide sequence represented by SEQ ID NOS: 183299, 183300, 183301, 183302, 183303, 183304, 183305, 183306, 183307, 183308, 183309 were selected from the ORFs having the nucleotide sequence represented by SEQ ID NO: 173919.

[15565] The probes having the nucleotide sequence represented by SEQ ID NOS: 183310, 183311, 183312, 183313, 183314, 183315, 183316, 183317, 183318, 183319, 183320 were selected from the ORFs having the nucleotide sequence represented by SEQ ID NO: 173920.

[15566] The probes having the nucleotide sequence represented by SEQ ID NOS: 183321, 183322, 183323, 183324, 183325, 183326, 183327, 183328, 183329, 183330, 183331 were selected from the ORFs having the nucleotide sequence represented by SEQ ID NO: 173921.

[15567] The probes having the nucleotide sequence represented by SEQ ID NOS: 183332, 183333, 183334, 183335, 183336, 183337, 183338, 183339, 183340, 183341, 183342 were selected from the ORFs having the nucleotide sequence represented by SEQ ID NO: 173922.

[15568] The probes having the nucleotide sequence represented by SEQ ID NOS: 183343, 183344, 183345, 183346, 183347, 183348, 183349, 183350, 183351, 183352, 183353 were selected from the ORFs having the nucleotide sequence represented by SEQ ID NO: 173923.

[15569] The probes having the nucleotide sequence represented by SEQ ID NOS: 183354, 183355, 183356, 183357, 183358, 183359, 183360, 183361, 183362, 183363, 183364 were selected from the ORFs having the nucleotide sequence represented by SEQ ID NO: 173924.

[15570] The probes having the nucleotide sequence represented by SEQ ID NOS: 183365, 183366, 183367, 183368, 183369, 183370, 183371, 183372, 183373, 183374, 183375 were selected from the ORFs having the nucleotide sequence represented by SEQ ID NO: 173925.

[15571] The probes having the nucleotide sequence represented by SEQ ID NOS: 183376, 183377, 183378, 183379, 183380, 183381, 183382, 183383, 183384, 183385, 183386 were selected from the ORFs having the nucleotide sequence represented by SEQ ID NO: 173926.

[15572] The probes having the nucleotide sequence represented by SEQ ID NOS: 183387, 183388, 183389, 183390, 183391, 183392, 183393, 183394, 183395, 183396, 183397 were selected from the ORFs having the nucleotide sequence represented by SEQ ID NO: 173927.

[15573] The probes having the nucleotide sequence represented by SEQ ID NOS: 183398, 183399, 183400, 183401, 183402, 183403, 183404, 183405, 183406, 183407, 183408 were selected from the ORFs having the nucleotide sequence represented by SEQ ID NO: 173928.

[15574] The probes having the nucleotide sequence represented by SEQ ID NOS: 183409, 183410, 183411, 183412, 183413, 183414, 183415, 183416, 183417, 183418, 183419 were selected from the ORFs having the nucleotide sequence represented by SEQ ID NO: 173929.

[15575] The probes having the nucleotide sequence represented by SEQ ID NOS: 183420, 183421, 183422, 183423, 183424, 183425, 183426, 183427, 183428, 183429, 183430 were selected from the ORFs having the nucleotide sequence represented by SEQ ID NO: 173930.

[15576] The probes having the nucleotide sequence represented by SEQ ID NOS: 183431, 183432, 183433, 183434, 183435, 183436, 183437, 183438, 183439, 183440, 183441 were selected from the ORFs having the nucleotide sequence represented by SEQ ID NO: 173931.

[15577] The probes having the nucleotide sequence represented by SEQ ID NOS: 183442, 183443, 183444, 183445, 183446, 183447, 183448, 183449, 183450, 183451, 183452 were selected from the ORFs having the nucleotide sequence represented by SEQ ID NO: 173932.

[15578] The probes having the nucleotide sequence represented by SEQ ID NOS: 183453, 183454, 183455, 183456, 183457, 183458, 183459, 183460 were selected from the ORFs having the nucleotide sequence represented by SEQ ID NO: 173933.

[15579] The probes having the nucleotide sequence represented by SEQ ID NOS: 183461, 183462, 183463, 183464, 183465, 183466, 183467, 183468, 183469, 183470, 183471 were selected from the ORFs having the nucleotide sequence represented by SEQ ID NO: 173934.

[15580] The probes having the nucleotide sequence represented by SEQ ID NOS: 183472, 183473, 183474, 183475, 183476, 183477, 183478, 183479, 183480, 183481, 183482 were selected from the ORFs having the nucleotide sequence represented by SEQ ID NO: 173935.

[15581] The probes having the nucleotide sequence represented by SEQ ID NOS: 183483, 183484, 183485, 183486, 183487, 183488, 183489, 183490, 183491, 183492, 183493 were selected from the ORFs having the nucleotide sequence represented by SEQ ID NO: 173936.

[15582] The probes having the nucleotide sequence represented by SEQ ID NOS: 183494, 183495, 183496, 183497, 183498, 183499, 183500, 183501, 183502, 183503, 183504 were selected from the ORFs having the nucleotide sequence represented by SEQ ID NO: 173937.

[15583] The probes having the nucleotide sequence represented by SEQ ID NOS: 183505, 183506, 183507, 183508, 183509, 183510, 183511, 183512, 183513, 183514, 183515 were selected from the ORFs having the nucleotide sequence represented by SEQ ID NO: 173938.

[15584] The probes having the nucleotide sequence represented by SEQ ID NOS: 183516, 183517, 183518, 183519, 183520, 183521, 183522, 183523, 183524, 183525, 183526 were selected from the ORFs having the nucleotide sequence represented by SEQ ID NO: 173939.

[15585] The probes having the nucleotide sequence represented by SEQ ID NOS: 183527, 183528, 183529, 183530, 183531, 183532, 183533, 183534, 183535, 183536, 183537 were selected from the ORFs having the nucleotide sequence represented by SEQ ID NO: 173940.

[15586] The probes having the nucleotide sequence represented by SEQ ID NOS: 183538, 183539, 183540, 183541, 183542, 183543, 183544, 183545, 183546, 183547, 183548 were selected from the ORFs having the nucleotide sequence represented by SEQ ID NO: 173941.

[15587] The probes having the nucleotide sequence represented by SEQ ID NOS: 183549, 183550, 183551, 183552, 183553, 183554, 183555, 183556, 183557, 183558, 183559 were selected from the ORFs having the nucleotide sequence represented by SEQ ID NO: 173942.

[15588] The probes having the nucleotide sequence represented by SEQ ID NOS: 183560, 183561, 183562, 183563, 183564, 183565, 183566, 183567, 183568, 183569, 183570 were selected from the ORFs having the nucleotide sequence represented by SEQ ID NO: 173943.

[15589] The probes having the nucleotide sequence represented by SEQ ID NOS: 183571, 183572, 183573, 183574, 183575, 183576, 183577, 183578, 183579, 183580, 183581 were selected from the ORFs having the nucleotide sequence represented by SEQ ID NO: 173944.

[15590] The probes having the nucleotide sequence represented by SEQ ID NOS: 183582, 183583, 183584, 183585, 183586, 183587, 183588, 183589, 183590, 183591, 183592 were selected from the ORFs having the nucleotide sequence represented by SEQ ID NO: 173945.

[15591] The probes having the nucleotide sequence represented by SEQ ID NOS: 183593, 183594, 183595, 183596, 183597, 183598, 183599, 183600, 183601, 183602, 183603 were selected from the ORFs having the nucleotide sequence represented by SEQ ID NO: 173946.

[15592] The probes having the nucleotide sequence represented by SEQ ID NOS: 183604, 183605, 183606, 183607, 183608, 183609, 183610, 183611, 183612, 183613, 183614 were selected from the ORFs having the nucleotide sequence represented by SEQ ID NO: 173947.

[15593] The probes having the nucleotide sequence represented by SEQ ID NOS: 183615, 183616, 183617, 183618, 183619, 183620, 183621, 183622, 183623, 183624, 183625 were selected from the ORFs having the nucleotide sequence represented by SEQ ID NO: 173948.

[15594] The probes having the nucleotide sequence represented by SEQ ID NOS: 183626, 183627, 183628, 183629, 183630, 183631, 183632, 183633, 183634, 183635, 183636 were selected from the ORFs having the nucleotide sequence represented by SEQ ID NO: 173949.

[15595] The probes having the nucleotide sequence represented by SEQ ID NOS: 183637, 183638, 183639, 183640, 183641, 183642, 183643, 183644, 183645, 183646, 183647 were selected from the ORFs having the nucleotide sequence represented by SEQ ID NO: 173950.

[15596] The probes having the nucleotide sequence represented by SEQ ID NOS: 183648, 183649, 183650, 183651, 183652, 183653, 183654, 183655, 183656, 183657, 183658 were selected from the ORFs having the nucleotide sequence represented by SEQ ID NO: 173951.

[15597] The probes having the nucleotide sequence represented by SEQ ID NOS: 183659, 183660, 183661, 183662, 183663, 183664, 183665, 183666, 183667, 183668, 183669 were selected from the ORFs having the nucleotide sequence represented by SEQ ID NO: 173952.

[15598] The probes having the nucleotide sequence represented by SEQ ID NOS: 183670, 183671, 183672, 183673, 183674, 183675, 183676, 183677, 183678, 183679, 183680 were selected from the ORFs having the nucleotide sequence represented by SEQ ID NO: 173953.

[15599] The probes having the nucleotide sequence represented by SEQ ID NOS: 183681, 183682, 183683, 183684, 183685, 183686, 183687, 183688, 183689, 183690, 183691 were selected from the ORFs having the nucleotide sequence represented by SEQ ID NO: 173954.

[15600] The probes having the nucleotide sequence represented by SEQ ID NOS: 183692, 183693, 183694, 183695, 183696, 183697, 183698, 183699, 183700, 183701, 183702 were selected from the ORFs having the nucleotide sequence represented by SEQ ID NO: 173955.

[15601] The probes having the nucleotide sequence represented by SEQ ID NOS: 183703, 183704, 183705, 183706, 183707, 183708, 183709, 183710, 183711, 183712, 183713 were selected from the ORFs having the nucleotide sequence represented by SEQ ID NO: 173956.

[15602] The probes having the nucleotide sequence represented by SEQ ID NOS: 183714, 183715, 183716, 183717, 183718, 183719, 183720, 183721, 183722, 183723, 183724 were selected from the ORFs having the nucleotide sequence represented by SEQ ID NO: 173957.

[15603] The probes having the nucleotide sequence represented by SEQ ID NOS: 183725, 183726, 183727, 183728, 183729, 183730, 183731, 183732, 183733, 183734, 183735 were selected from the ORFs having the nucleotide sequence represented by SEQ ID NO: 173958.

[15604] The probes having the nucleotide sequence represented by SEQ ID NOS: 183736, 183737, 183738, 183739, 183740, 183741, 183742, 183743, 183744, 183745, 183746 were selected from the ORFs having the nucleotide sequence represented by SEQ ID NO: 173959.

[15605] The probes having the nucleotide sequence represented by SEQ ID NOS: 183747, 183748, 183749, 183750, 183751, 183752, 183753, 183754, 183755, 183756, 183757 were selected from the ORFs having the nucleotide sequence represented by SEQ ID NO: 173960.

[15606] The probes having the nucleotide sequence represented by SEQ ID NOS: 183758, 183759, 183760, 183761, 183762, 183763, 183764, 183765, 183766, 183767, 183768 were selected from the ORFs having the nucleotide sequence represented by SEQ ID NO: 173961.

[15607] The probes having the nucleotide sequence represented by SEQ ID NOS: 183769, 183770, 183771, 183772, 183773, 183774, 183775, 183776, 183777, 183778, 183779 were selected from the ORFs having the nucleotide sequence represented by SEQ ID NO: 173962.

[15608] The probes having the nucleotide sequence represented by SEQ ID NOS: 183780, 183781, 183782, 183783, 183784, 183785, 183786, 183787, 183788, 183789, 183790 were selected from the ORFs having the nucleotide sequence represented by SEQ ID NO: 173963.

[15609] The probes having the nucleotide sequence represented by SEQ ID NOS: 183791, 183792, 183793, 183794, 183795, 183796, 183797, 183798, 183799, 183800, 183801 were selected from the ORFs having the nucleotide sequence represented by SEQ ID NO: 173964.

[15610] The probes having the nucleotide sequence represented by SEQ ID NOS: 183802, 183803, 183804, 183805, 183806, 183807, 183808, 183809, 183810, 183811, 183812 were selected from the ORFs having the nucleotide sequence represented by SEQ ID NO: 173965.

[15611] The probes having the nucleotide sequence represented by SEQ ID NOS: 183813, 183814, 183815, 183816, 183817, 183818, 183819, 183820, 183821, 183822, 183823 were selected from the ORFs having the nucleotide sequence represented by SEQ ID NO: 173966.

[15612] The probes having the nucleotide sequence represented by SEQ ID NOS: 183824, 183825, 183826, 183827, 183828, 183829, 183830, 183831, 183832, 183833, 183834 were selected from the ORFs having the nucleotide sequence represented by SEQ ID NO: 173967.

[15613] The probes having the nucleotide sequence represented by SEQ ID NOS: 183835, 183836, 183837, 183838, 183839, 183840, 183841, 183842, 183843, 183844, 183845 were selected from the ORFs having the nucleotide sequence represented by SEQ ID NO: 173968.

[15614] The probes having the nucleotide sequence represented by SEQ ID NOS: 183846, 183847, 183848,. 183849, 183850, 183851, 183852, 183853, 183854, 183855, 183856 were selected from the ORFs having the nucleotide sequence represented by SEQ ID NO: 173969.

[15615] The probes having the nucleotide sequence represented by SEQ ID NOS: 183857, 183858, 183859, 183860, 183861, 183862, 183863, 183864, 183865, 183866, 183867 were selected from the ORFs having the nucleotide sequence represented by SEQ ID NO: 173970.

[15616] The probes having the nucleotide sequence represented by SEQ ID NOS: 183868, 183869, 183870, 183871, 183872, 183873, 183874, 183875, 183876, 183877, 183878 were selected from the ORFs having the nucleotide sequence represented by SEQ ID NO: 173971.

[15617] The probes having the nucleotide sequence represented by SEQ ID NOS: 183879, 183880, 183881, 183882, 183883, 183884, 183885, 183886, 183887, 183888, 183889 were selected from the ORFs having the nucleotide sequence represented by SEQ ID NO: 173972.

[15618] The probes having the nucleotide sequence represented by SEQ ID NOS: 183890, 183891, 183892, 183893, 183894, 183895, 183896, 183897, 183898, 183899, 183900 were selected from the ORFs having the nucleotide sequence represented by SEQ ID NO: 173973.

[15619] The probes having the nucleotide sequence represented by SEQ ID NOS: 183901, 183902, 183903, 183904, 183905, 183906, 183907, 183908, 183909, 183910, 183911 were selected from the ORFs having the nucleotide sequence represented by SEQ ID NO: 173974.

[15620] The probes having the nucleotide sequence represented by SEQ ID NOS: 183912, 183913, 183914, 183915, 183916, 183917, 183918, 183919, 183920, 183921, 183922 were selected from the ORFs having the nucleotide sequence represented by SEQ ID NO: 173975.

[15621] The probes having the nucleotide sequence represented by SEQ ID NOS: 183923, 183924, 183925, 183926, 183927, 183928, 183929, 183930, 183931, 183932, 183933 were selected from the ORFs having the nucleotide sequence represented by SEQ ID NO: 173976.

[15622] The probes having the nucleotide sequence represented by SEQ ID NOS: 183934, 183935, 183936, 183937, 183938, 183939, 183940, 183941, 183942, 183943, 183944 were selected from the ORFs having the nucleotide sequence represented by SEQ ID NO: 173977.

[15623] The probes having the nucleotide sequence represented by SEQ ID NOS: 183945, 183946, 183947, 183948, 183949, 183950, 183951, 183952, 183953, 183954, 183955 were selected from the ORFs having the nucleotide sequence represented by SEQ ID NO: 173978.

[15624] The probes having the nucleotide sequence represented by SEQ ID NOS: 183956, 183957, 183958, 183959, 183960, 183961, 183962, 183963, 183964, 183965, 183966 were selected from the ORFs having the nucleotide sequence represented by SEQ ID NO: 173979.

[15625] The probes having the nucleotide sequence represented by SEQ ID NOS: 183967, 183968, 183969, 183970, 183971, 183972, 183973, 183974, 183975, 183976, 183977 were selected from the ORFs having the nucleotide sequence represented by SEQ ID NO: 173980.

[15626] The probes having the nucleotide sequence represented by SEQ ID NOS: 183978, 183979, 183980, 183981, 183982, 183983, 183984, 183985, 183986, 183987, 183988 were selected from the ORFs having the nucleotide sequence represented by SEQ ID NO: 173981.

[15627] The probes having the nucleotide sequence represented by SEQ ID NOS: 183989, 183990, 183991, 183992, 183993, 183994, 183995, 183996, 183997, 183998, 183999 were selected from the ORFs having the nucleotide sequence represented by SEQ ID NO: 173982.

[15628] The probes having the nucleotide sequence represented by SEQ ID NOS: 184000, 184001, 184002, 184003, 184004, 184005, 184006, 184007, 184008, 184009, 184010 were selected from the ORFs having the nucleotide sequence represented by SEQ ID NO: 173983.

[15629] The probes having the nucleotide sequence represented by SEQ ID NOS: 184011, 184012, 184013, 184014, 184015, 184016, 184017, 184018, 184019, 184020, 184021 were selected from the ORFs having the nucleotide sequence represented by SEQ ID NO: 173984.

[15630] The probes having the nucleotide sequence represented by SEQ ID NOS: 184022, 184023, 184024, 184025, 184026, 184027, 184028, 184029, 184030, 184031, 184032 were selected from the ORFs having the nucleotide sequence represented by SEQ ID NO: 173985.

[15631] The probes having the nucleotide sequence represented by SEQ ID NOS: 184033, 184034, 184035, 184036, 184037, 184038, 184039, 184040, 184041, 184042, 184043 were selected from the ORFs having the nucleotide sequence represented by SEQ ID NO: 173986.

[15632] The probes having the nucleotide sequence represented by SEQ ID NOS: 184044, 184045, 184046, 184047, 184048, 184049, 184050, 184051, 184052, 184053, 184054 were selected from the ORFs having the nucleotide sequence represented by SEQ ID NO: 173987.

[15633] The probes having the nucleotide sequence represented by SEQ ID NOS: 184055, 184056, 184057, 184058, 184059, 184060, 184061, 184062, 184063, 184064, 184065 were selected from the ORFs having the nucleotide sequence represented by SEQ ID NO: 173988.

[15634] The probes having the nucleotide sequence represented by SEQ ID NOS: 184066, 184067, 184068, 184069, 184070, 184071, 184072, 184073, 184074, 184075, 184076 were selected from the ORFs having the nucleotide sequence represented by SEQ ID NO: 173989.

[15635] The probes having the nucleotide sequence represented by SEQ ID NOS: 184077, 184078, 184079, 184080, 184081, 184082, 184083, 184084, 184085, 184086, 184087 were selected from the ORFs having the nucleotide sequence represented by SEQ ID NO: 173990.

[15636] The probes having the nucleotide sequence represented by SEQ ID NOS: 184088, 184089, 184090, 184091, 184092, 184093, 184094, 184095, 184096, 184097, 184098 were selected from the ORFs having the nucleotide sequence represented by SEQ ID NO: 173991.

[15637] The probes having the nucleotide sequence represented by SEQ ID NOS: 184099, 184100, 184101, 184102, 184103, 184104, 184105, 184106, 184107, 184108, 184109 were selected from the ORFs having the nucleotide sequence represented by SEQ ID NO: 173992.

[15638] The probes having the nucleotide sequence represented by SEQ ID NOS: 184110, 184111, 184112, 184113, 184114, 184115, 184116, 184117, 184118, 184119, 184120 were selected from the ORFs having the nucleotide sequence represented by SEQ ID NO: 173993.

[15639] The probes having the nucleotide sequence represented by SEQ ID NOS: 184121, 184122, 184123, 184124, 184125, 184126, 184127, 184128, 184129, 184130, 184131 were selected from the ORFs having the nucleotide sequence represented by SEQ ID NO: 173994.

[15640] The probes having the nucleotide sequence represented by SEQ ID NOS: 184132, 184133, 184134, 184135, 184136, 184137, 184138, 184139, 184140, 184141, 184142 were selected from the ORFs having the nucleotide sequence represented by SEQ ID NO: 173995.

[15641] The probes having the nucleotide sequence represented by SEQ ID NOS: 184143, 184144, 184145, 184146, 184147, 184148, 184149, 184150, 184151, 184152, 184153 were selected from the ORFs having the nucleotide sequence represented by SEQ ID NO: 173996.

[15642] The probes having the nucleotide sequence represented by SEQ ID NOS: 184154, 184155, 184156, 184157, 184158, 184159, 184160, 184161, 184162, 184163, 184164 were selected from the ORFs having the nucleotide sequence represented by SEQ ID NO: 173997.

[15643] The probes having the nucleotide sequence represented by SEQ ID NOS: 184165, 184166, 184167, 184168, 184169, 184170, 184171, 184172, 184173, 184174, 184175 were selected from the ORFs having the nucleotide sequence represented by SEQ ID NO: 173998.

[15644] The probes having the nucleotide sequence represented by SEQ ID NOS: 184176, 184177, 184178, 184179, 184180, 184181, 184182, 184183, 184184, 184185, 184186 were selected from the ORFs having the nucleotide sequence represented by SEQ ID NO: 173999.

[15645] The probes having the nucleotide sequence represented by SEQ ID NOS: 184187, 184188, 184189, 184190, 184191, 184192, 184193, 184194, 184195, 184196, 184197 were selected from the ORFs having the nucleotide sequence represented by SEQ ID NO: 174000.

[15646] The probes having the nucleotide sequence represented by SEQ ID NOS: 184198, 184199, 184200, 184201, 184202, 184203, 184204, 184205, 184206, 184207, 184208 were selected from the ORFs having the nucleotide sequence represented by SEQ ID NO: 174001.

[15647] The probes having the nucleotide sequence represented by SEQ ID NOS: 184209, 184210, 184211, 184212, 184213, 184214, 184215, 184216, 184217, 184218, 184219 were selected from the ORFs having the nucleotide sequence represented by SEQ ID NO: 174002.

[15648] The probes having the nucleotide sequence represented by SEQ ID NOS: 184220, 184221, 184222, 184223, 184224, 184225, 184226, 184227, 184228, 184229, 184230 were selected from the ORFs having the nucleotide sequence represented by SEQ ID NO: 174003.

[15649] The probes having the nucleotide sequence represented by SEQ ID NOS: 184231, 184232, 184233, 184234, 184235, 184236, 184237, 184238, 184239, 184240, 184241 were selected from the ORFs having the nucleotide sequence represented by SEQ ID NO: 174004.

[15650] The probes having the nucleotide sequence represented by SEQ ID NOS: 184242, 184243, 184244, 184245, 184246, 184247, 184248, 184249, 184250, 184251, 184252 were selected from the ORFs having the nucleotide sequence represented by SEQ ID NO: 174005.

[15651] The probes having the nucleotide sequence represented by SEQ ID NOS: 184253, 184254, 184255, 184256, 184257, 184258, 184259, 184260, 184261, 184262, 184263 were selected from the ORFs having the nucleotide sequence represented by SEQ ID NO: 174006.

[15652] The probes having the nucleotide sequence represented by SEQ ID NOS: 184264, 184265, 184266, 184267, 184268, 184269, 184270, 184271, 184272, 184273, 184274 were selected from the ORFs having the nucleotide sequence represented by SEQ ID NO: 174007.

[15653] The probes having the nucleotide sequence represented by SEQ ID NOS: 184275, 184276, 184277, 184278, 184279, 184280, 184281, 184282, 184283, 184284, 184285 were selected from the ORFs having the nucleotide sequence represented by SEQ ID NO: 174008.

[15654] The probes having the nucleotide sequence represented by SEQ ID NOS: 184286, 184287, 184288, 184289, 184290, 184291, 184292, 184293, 184294, 184295, 184296 were selected from the ORFs having the nucleotide sequence represented by SEQ ID NO: 174009.

[15655] The probes having the nucleotide sequence represented by SEQ ID NOS: 184297, 184298, 184299, 184300, 184301, 184302, 184303, 184304, 184305, 184306, 184307 were selected from the ORFs having the nucleotide sequence represented by SEQ ID NO: 174010.

[15656] The probes having the nucleotide sequence represented by SEQ ID NOS: 184308, 184309, 184310, 184311, 184312, 184313, 184314, 184315, 184316, 184317, 184318 were selected from the ORFs having the nucleotide sequence represented by SEQ ID NO: 174011.

[15657] The probes having the nucleotide sequence represented by SEQ ID NOS: 184319, 184320, 184321, 184322, 184323, 184324, 184325, 184326, 184327, 184328, 184329 were selected from the ORFs having the nucleotide sequence represented by SEQ ID NO: 174012.

[15658] The probes having the nucleotide sequence represented by SEQ ID NOS: 184330, 184331, 184332, 184333, 184334, 184335, 184336, 184337, 184338, 184339, 184340 were selected from the ORFs having the nucleotide sequence represented by SEQ ID NO: 174013.

[15659] The probes having the nucleotide sequence represented by SEQ ID NOS: 184341, 184342, 184343, 184344, 184345, 184346, 184347, 184348, 184349, 184350, 184351 were selected from the ORFs having the nucleotide sequence represented by SEQ ID NO: 174014.

[15660] The probes having the nucleotide sequence represented by SEQ ID NOS: 184352, 184353, 184354, 184355, 184356, 184357, 184358, 184359, 184360, 184361, 184362 were selected from the ORFs having the nucleotide sequence represented by SEQ ID NO: 174015.

[15661] The probes having the nucleotide sequence represented by SEQ ID NOS: 184363, 184364, 184365, 184366, 184367, 184368, 184369, 184370, 184371, 184372, 184373 were selected from the ORFs having the nucleotide sequence represented by SEQ ID NO: 174016.

[15662] The probes having the nucleotide sequence represented by SEQ ID NOS: 184374, 184375, 184376, 184377, 184378, 184379, 184380, 184381, 184382, 184383, 184384 were selected from the ORFs having the nucleotide sequence represented by SEQ ID NO: 174017.

[15663] The probes having the nucleotide sequence represented by SEQ ID NOS: 184385, 184386, 184387, 184388, 184389, 184390, 184391, 184392, 184393, 184394, 184395 were selected from the ORFs having the nucleotide sequence represented by SEQ ID NO: 174018.

[15664] The probes having the nucleotide sequence represented by SEQ ID NOS: 184396, 184397, 184398, 184399, 184400, 184401, 184402, 184403, 184404, 184405, 184406 were selected from the ORFs having the nucleotide sequence represented by SEQ ID NO: 174019.

[15665] The probes having the nucleotide sequence represented by SEQ ID NOS: 184407, 184408, 184409, 184410, 184411, 184412, 184413, 184414, 184415, 184416, 184417 were selected from the ORFs having the nucleotide sequence represented by SEQ ID NO: 174020.

[15666] The probes having the nucleotide sequence represented by SEQ ID NOS: 184418, 184419, 184420, 184421, 184422, 184423, 184424, 184425, 184426, 184427, 184428 were selected from the ORFs having the nucleotide sequence represented by SEQ ID NO: 174021.

[15667] The probes having the nucleotide sequence represented by SEQ ID NOS: 184429, 184430, 184431, 184432, 184433, 184434, 184435, 184436, 184437, 184438, 184439 were selected from the ORFs having the nucleotide sequence represented by SEQ ID NO: 174022.

[15668] The probes having the nucleotide sequence represented by SEQ ID NOS: 184440, 184441, 184442, 184443, 184444, 184445, 184446, 184447, 184448, 184449, 184450 were selected from the ORFs having the nucleotide sequence represented by SEQ ID NO: 174023.

[15669] The probes having the nucleotide sequence represented by SEQ ID NOS: 184451, 184452, 184453, 184454, 184455, 184456, 184457, 184458, 184459, 184460, 184461 were selected from the ORFs having the nucleotide sequence represented by SEQ ID NO: 174024.

[15670] The probes having the nucleotide sequence represented by SEQ ID NOS: 184462, 184463, 184464, 184465, 184466, 184467, 184468, 184469, 184470, 184471, 184472 were selected from the ORFs having the nucleotide sequence represented by SEQ ID NO: 174025.

[15671] The probes having the nucleotide sequence represented by SEQ ID NOS: 184473, 184474, 184475, 184476, 184477, 184478, 184479, 184480, 184481, 184482, 184483 were selected from the ORFs having the nucleotide sequence represented by SEQ ID NO: 174026.

[15672] The probes having the nucleotide sequence represented by SEQ ID NOS: 184484, 184485, 184486, 184487, 184488, 184489, 184490, 184491, 184492, 184493, 184494 were selected from the ORFs having the nucleotide sequence represented by SEQ ID NO: 174027.

[15673] The probes having the nucleotide sequence represented by SEQ ID NOS: 184495, 184496, 184497, 184498, 184499, 184500, 184501, 184502, 184503, 184504, 184505 were selected from the ORFs having the nucleotide sequence represented by SEQ ID NO: 174028.

[15674] The probes having the nucleotide sequence represented by SEQ ID NOS: 184506, 184507, 184508, 184509, 184510, 184511, 184512, 184513, 184514, 184515, 184516 were selected from the ORFs having the nucleotide sequence represented by SEQ ID NO: 174029.

[15675] The probes having the nucleotide sequence represented by SEQ ID NOS: 184517, 184518, 184519, 184520, 184521, 184522, 184523, 184524, 184525, 184526, 184527 were selected from the ORFs having the nucleotide sequence represented by SEQ ID NO: 174030.

[15676] The probes having the nucleotide sequence represented by SEQ ID NOS: 184528, 184529, 184530, 184531, 184532, 184533, 184534, 184535, 184536, 184537, 184538 were selected from the ORFs having the nucleotide sequence represented by SEQ ID NO: 174031.

[15677] The probes having the nucleotide sequence represented by SEQ ID NOS: 184539, 184540, 184541, 184542, 184543, 184544, 184545, 184546, 184547, 184548, 184549 were selected from the ORFs having the nucleotide sequence represented by SEQ ID NO: 174032.

[15678] The probes having the nucleotide sequence represented by SEQ ID NOS: 184550, 184551, 184552, 184553, 184554, 184555, 184556, 184557, 184558, 184559, 184560 were selected from the ORFs having the nucleotide sequence represented by SEQ ID NO: 174033.

[15679] The probes having the nucleotide sequence represented by SEQ ID NOS: 184561, 184562, 184563, 184564, 184565, 184566, 184567, 184568, 184569, 184570, 184571 were selected from the ORFs having the nucleotide sequence represented by SEQ ID NO: 174034.

[15680] The probes having the nucleotide sequence represented by SEQ ID NOS: 184572, 184573, 184574, 184575, 184576, 184577, 184578, 184579, 184580, 184581, 184582 were selected from the ORFs having the nucleotide sequence represented by SEQ ID NO: 174035.

[15681] The probes having the nucleotide sequence represented by SEQ ID NOS: 184583, 184584, 184585, 184586, 184587, 184588, 184589, 184590, 184591, 184592, 184593 were selected from the ORFs having the nucleotide sequence represented by SEQ ID NO: 174036.

[15682] The probes having the nucleotide sequence represented by SEQ ID NOS: 184594, 184595, 184596, 184597, 184598, 184599, 184600, 184601, 184602, 184603, 184604 were selected from the ORFs having the nucleotide sequence represented by SEQ ID NO: 174037.

[15683] The probes having the nucleotide sequence represented by SEQ ID NOS: 184605, 184606, 184607, 184608, 184609, 184610, 184611, 184612, 184613, 184614, 184615 were selected from the ORFs having the nucleotide sequence represented by SEQ ID NO: 174038.

[15684] The probes having the nucleotide sequence represented by SEQ ID NOS: 184616, 184617, 184618, 184619, 184620, 184621, 184622, 184623, 184624, 184625, 184626 were selected from the ORFs having the nucleotide sequence represented by SEQ ID NO: 174039.

[15685] The probes having the nucleotide sequence represented by SEQ ID NOS: 184627, 184628, 184629, 184630, 184631, 184632, 184633, 184634, 184635, 184636, 184637 were selected from the ORFs having the nucleotide sequence represented by SEQ ID NO: 174040.

[15686] The probes having the nucleotide sequence represented by SEQ ID NOS: 184638, 184639, 184640, 184641, 184642, 184643, 184644, 184645, 184646, 184647, 184648 were selected from the ORFs having the nucleotide sequence represented by SEQ ID NO: 174041.

[15687] The probes having the nucleotide sequence represented by SEQ ID NOS: 184649, 184650, 184651, 184652, 184653, 184654, 184655, 184656, 184657, 184658, 184659 were selected from the ORFs having the nucleotide sequence represented by SEQ ID NO: 174042.

[15688] The probes having the nucleotide sequence represented by SEQ ID NOS: 184660, 184661, 184662, 184663, 184664, 184665, 184666, 184667, 184668, 184669, 184670 were selected from the ORFs having the nucleotide sequence represented by SEQ ID NO: 174043.

[15689] The probes having the nucleotide sequence represented by SEQ ID NOS: 184671, 184672, 184673, 184674, 184675, 184676, 184677, 184678, 184679, 184680, 184681 were selected from the ORFs having the nucleotide sequence represented by SEQ ID NO: 174044.

[15690] The probes having the nucleotide sequence represented by SEQ ID NOS: 184682, 184683, 184684, 184685, 184686, 184687, 184688, 184689, 184690, 184691, 184692 were selected from the ORFs having the nucleotide sequence represented by SEQ ID NO: 174045.

[15691] The probes having the nucleotide sequence represented by SEQ ID NOS: 184693, 184694, 184695, 184696, 184697, 184698, 184699, 184700, 184701, 184702, 184703 were selected from the ORFs having the nucleotide sequence represented by SEQ ID NO: 174046.

[15692] The probes having the nucleotide sequence represented by SEQ ID NOS: 184704, 184705, 184706, 184707, 184708, 184709, 184710, 184711, 184712 were selected from the ORFs having the nucleotide sequence represented by SEQ ID NO: 174047.

[15693] The probes having the nucleotide sequence represented by SEQ ID NOS: 184713, 184714, 184715, 184716, 184717, 184718, 184719, 184720, 184721, 184722, 184723 were selected from the ORFs having the nucleotide sequence represented by SEQ ID NO: 174048.

[15694] The probes having the nucleotide sequence represented by SEQ ID NOS: 184724, 184725, 184726, 184727, 184728, 184729, 184730, 184731, 184732, 184733, 184734 were selected from the ORFs having the nucleotide sequence represented by SEQ ID NO: 174049.

[15695] The probes having the nucleotide sequence represented by SEQ ID NOS: 184735, 184736, 184737, 184738, 184739, 184740, 184741, 184742, 184743, 184744, 184745 were selected from the ORFs having the nucleotide sequence represented by SEQ ID NO: 174050.

[15696] The probes having the nucleotide sequence represented by SEQ ID NOS: 184746, 184747, 184748, 184749, 184750, 184751, 184752, 184753, 184754, 184755, 184756 were selected from the ORFs having the nucleotide sequence represented by SEQ ID NO: 174051.

[15697] The probes having the nucleotide sequence represented by SEQ ID NOS: 184757, 184758, 184759, 184760, 184761, 184762, 184763, 184764, 184765, 184766, 184767 were selected from the ORFs having the nucleotide sequence represented by SEQ ID NO: 174052.

[15698] The probes having the nucleotide sequence represented by SEQ ID NOS: 184768, 184769, 184770, 184771, 184772, 184773, 184774, 184775, 184776, 184777, 184778 were selected from the ORFs having the nucleotide sequence represented by SEQ ID NO: 174053.

[15699] The probes having the nucleotide sequence represented by SEQ ID NOS: 184779, 184780, 184781, 184782, 184783, 184784, 184785, 184786, 184787, 184788, 184789 were selected from the ORFs having the nucleotide sequence represented by SEQ ID NO: 174054.

[15700] The probes having the nucleotide sequence represented by SEQ ID NOS: 184790, 184791, 184792, 184793, 184794, 184795, 184796, 184797, 184798, 184799, 184800 were selected from the ORFs having the nucleotide sequence represented by SEQ ID NO: 174055.

[15701] The probes having the nucleotide sequence represented by SEQ ID NOS: 184801, 184802, 184803, 184804, 184805, 184806, 184807, 184808, 184809, 184810, 184811 were selected from the ORFs having the nucleotide sequence represented by SEQ ID NO: 174056.

[15702] The probes having the nucleotide sequence represented by SEQ ID NOS: 184812, 184813, 184814, 184815, 184816, 184817, 184818, 184819, 184820, 184821, 184822 were selected from the ORFs having the nucleotide sequence represented by SEQ ID NO: 174057.

[15703] The probes having the nucleotide sequence represented by SEQ ID NOS: 184823, 184824, 184825, 184826, 184827, 184828, 184829, 184830, 184831, 184832, 184833 were selected from the ORFs having the nucleotide sequence represented by SEQ ID NO: 174058.

[15704] The probes having the nucleotide sequence represented by SEQ ID NOS: 184834, 184835, 184836, 184837, 184838, 184839, 184840, 184841, 184842, 184843, 184844 were selected from the ORFs having the nucleotide sequence represented by SEQ ID NO: 174059.

[15705] The probes having the nucleotide sequence represented by SEQ ID NOS: 184845, 184846, 184847, 184848, 184849, 184850, 184851, 184852, 184853, 184854, 184855 were selected from the ORFs having the nucleotide sequence represented by SEQ ID NO: 174060.

[15706] The probes having the nucleotide sequence represented by SEQ ID NOS: 184856, 184857, 184858, 184859, 184860, 184861, 184862, 184863, 184864, 184865, 184866 were selected from the ORFs having the nucleotide sequence represented by SEQ ID NO: 174061.

[15707] The probes having the nucleotide sequence represented by SEQ ID NOS: 184867, 184868, 184869, 184870, 184871, 184872, 184873, 184874, 184875, 184876, 184877 were selected from the ORFs having the nucleotide sequence represented by SEQ ID NO: 174062.

[15708] The probes having the nucleotide sequence represented by SEQ ID NOS: 184878, 184879, 184880, 184881, 184882, 184883, 184884, 184885, 184886, 184887, 184888 were selected from the ORFs having the nucleotide sequence represented by SEQ ID NO: 174063.

[15709] The probes having the nucleotide sequence represented by SEQ ID NOS: 184889, 184890, 184891, 184892, 184893, 184894, 184895, 184896, 184897, 184898, 184899 were selected from the ORFs having the nucleotide sequence represented by SEQ ID NO: 174064.

[15710] The probes having the nucleotide sequence represented by SEQ ID NOS: 184900, 184901, 184902, 184903, 184904, 184905, 184906, 184907, 184908, 184909, 184910 were selected from the ORFs having the nucleotide sequence represented by SEQ ID NO: 174065.

[15711] The probes having the nucleotide sequence represented by SEQ ID NOS: 184911, 184912, 184913, 184914, 184915, 184916, 184917, 184918, 184919, 184920, 184921 were selected from the ORFs having the nucleotide sequence represented by SEQ ID NO: 174066.

[15712] The probes having the nucleotide sequence represented by SEQ ID NOS: 184922, 184923, 184924, 184925, 184926, 184927, 184928, 184929, 184930, 184931, 184932 were selected from the ORFs having the nucleotide sequence represented by SEQ ID NO: 174067.

[15713] The probes having the nucleotide sequence represented by SEQ ID NOS: 184933, 184934, 184935, 184936, 184937, 184938, 184939, 184940, 184941, 184942, 184943 were selected from the ORFs having the nucleotide sequence represented by SEQ ID NO: 174068.

[15714] The probes having the nucleotide sequence represented by SEQ ID NOS: 184944, 184945, 184946, 184947, 184948, 184949, 184950, 184951, 184952, 184953, 184954 were selected from the ORFs having the nucleotide sequence represented by SEQ ID NO: 174069.

[15715] The probes having the nucleotide sequence represented by SEQ ID NOS: 184955, 184956, 184957, 184958, 184959, 184960, 184961, 184962, 184963, 184964, 184965 were selected from the ORFs having the nucleotide sequence represented by SEQ ID NO: 174070.

[15716] The probes having the nucleotide sequence represented by SEQ ID NOS: 184966, 184967, 184968, 184969, 184970, 184971, 184972, 184973, 184974, 184975, 184976 were selected from the ORFs having the nucleotide sequence represented by SEQ ID NO: 174071.

[15717] The probes having the nucleotide sequence represented by SEQ ID NOS: 184977, 184978, 184979, 184980, 184981, 184982, 184983, 184984, 184985, 184986, 184987 were selected from the ORFs having the nucleotide sequence represented by SEQ ID NO: 174072.

[15718] The probes having the nucleotide sequence represented by SEQ ID NOS: 184988, 184989, 184990, 184991, 184992, 184993, 184994, 184995, 184996, 184997, 184998 were selected from the ORFs having the nucleotide sequence represented by SEQ ID NO: 174073.

[15719] The probes having the nucleotide sequence represented by SEQ ID NOS: 184999, 185000, 185001, 185002, 185003, 185004, 185005, 185006, 185007, 185008, 185009 were selected from the ORFs having the nucleotide sequence represented by SEQ ID NO: 174074.

[15720] The probes having the nucleotide sequence represented by SEQ ID NOS: 185010, 185011, 185012, 185013, 185014, 185015, 185016, 185017, 185018, 185019, 185020 were selected from the ORFs having the nucleotide sequence represented by SEQ ID NO: 174075.

[15721] The probes having the nucleotide sequence represented by SEQ ID NOS: 185021, 185022, 185023, 185024, 185025, 185026, 185027, 185028, 185029, 185030, 185031 were selected from the ORFs having the nucleotide sequence represented by SEQ ID NO: 174076.

[15722] The probes having the nucleotide sequence represented by SEQ ID NOS: 185032, 185033, 185034, 185035, 185036, 185037, 185038, 185039, 185040, 185041, 185042 were selected from the ORFs having the nucleotide sequence represented by SEQ ID NO: 174077.

[15723] The probes having the nucleotide sequence represented by SEQ ID NOS: 185043, 185044, 185045, 185046, 185047, 185048, 185049, 185050, 185051, 185052, 185053 were selected from the ORFs having the nucleotide sequence represented by SEQ ID NO: 174078.

[15724] The probes having the nucleotide sequence represented by SEQ ID NOS: 185054, 185055, 185056, 185057, 185058, 185059, 185060, 185061, 185062, 185063, 185064 were selected from the ORFs having the nucleotide sequence represented by SEQ ID NO: 174079.

[15725] The probes having the nucleotide sequence represented by SEQ ID NOS: 185065, 185066, 185067, 185068, 185069, 185070, 185071, 185072, 185073, 185074, 185075 were selected from the ORFs having the nucleotide sequence represented by SEQ ID NO: 174080.

[15726] The probes having the nucleotide sequence represented by SEQ ID NOS: 185076, 185077, 185078, 185079, 185080, 185081, 185082, 185083, 185084, 185085, 185086 were selected from the ORFs having the nucleotide sequence represented by SEQ ID NO: 174081.

[15727] The probes having the nucleotide sequence represented by SEQ ID NOS: 185087, 185088, 185089, 185090, 185091, 185092, 185093, 185094, 185095, 185096, 185097 were selected from the ORFs having the nucleotide sequence represented by SEQ ID NO: 174082.

[15728] The probes having the nucleotide sequence represented by SEQ ID NOS: 185098, 185099, 185100, 185101, 185102, 185103, 185104, 185105, 185106, 185107, 185108 were selected from the ORFs having the nucleotide sequence represented by SEQ ID NO: 174083.

[15729] The probes having the nucleotide sequence represented by SEQ ID NOS: 185109, 185110, 185111, 185112, 185113, 185114, 185115, 185116, 185117, 185118, 185119 were selected from the ORFs having the nucleotide sequence represented by SEQ ID NO: 174084.

[15730] The probes having the nucleotide sequence represented by SEQ ID NOS: 185120, 185121, 185122, 185123, 185124, 185125, 185126, 185127, 185128, 185129, 185130 were selected from the ORFs having the nucleotide sequence represented by SEQ ID NO: 174085.

[15731] The probes having the nucleotide sequence represented by SEQ ID NOS: 185131, 185132, 185133, 185134, 185135, 185136, 185137, 185138, 185139, 185140, 185141 were selected from the ORFs having the nucleotide sequence represented by SEQ ID NO: 174086.

[15732] The probes having the nucleotide sequence represented by SEQ ID NOS: 185142, 185143, 185144, 185145, 185146, 185147, 185148, 185149, 185150, 185151, 185152 were selected from the ORFs having the nucleotide sequence represented by SEQ ID NO: 174087.

[15733] The probes having the nucleotide sequence represented by SEQ ID NOS: 185153, 185154, 185155, 185156, 185157, 185158, 185159, 185160, 185161, 185162, 185163 were selected from the ORFs having the nucleotide sequence represented by SEQ ID NO: 174088.

[15734] The probes having the nucleotide sequence represented by SEQ ID NOS: 185164, 185165, 185166, 185167, 185168, 185169, 185170, 185171, 185172, 185173, 185174 were selected from the ORFs having the nucleotide sequence represented by SEQ ID NO: 174089.

[15735] The probes having the nucleotide sequence represented by SEQ ID NOS: 185175, 185176, 185177, 185178, 185179, 185180, 185181, 185182, 185183, 185184, 185185 were selected from the ORFs having the nucleotide sequence represented by SEQ ID NO: 174090.

[15736] The probes having the nucleotide sequence represented by SEQ ID NOS: 185186, 185187, 185188, 185189, 185190, 185191, 185192, 185193, 185194, 185195, 185196 were selected from the ORFs having the nucleotide sequence represented by SEQ ID NO: 174091.

[15737] The probes having the nucleotide sequence represented by SEQ ID NOS: 185197, 185198, 185199, 185200, 185201, 185202, 185203, 185204, 185205, 185206, 185207 were selected from the ORFs having the nucleotide sequence represented by SEQ ID NO: 174092.

[15738] The probes having the nucleotide sequence represented by SEQ ID NOS: 185208, 185209, 185210, 185211, 185212, 185213, 185214, 185215, 185216, 185217, 185218 were selected from the ORFs having the nucleotide sequence represented by SEQ ID NO: 174093.

[15739] The probes having the nucleotide sequence represented by SEQ ID NOS: 185219, 185220, 185221, 185222, 185223, 185224, 185225, 185226, 185227, 185228, 185229 were selected from the ORFs having the nucleotide sequence represented by SEQ ID NO: 174094.

[15740] The probes having the nucleotide sequence represented by SEQ ID NOS: 185230, 185231, 185232, 185233, 185234, 185235, 185236, 185237, 185238, 185239, 185240 were selected from the ORFs having the nucleotide sequence represented by SEQ ID NO: 174095.

[15741] The probes having the nucleotide sequence represented by SEQ ID NOS: 185241, 185242, 185243, 185244, 185245, 185246, 185247, 185248, 185249, 185250, 185251 were selected from the ORFs having the nucleotide sequence represented by SEQ ID NO: 174096.

[15742] The probes having the nucleotide sequence represented by SEQ ID NOS: 185252, 185253, 185254, 185255, 185256, 185257, 185258, 185259, 185260, 185261, 185262 were selected from the ORFs having the nucleotide sequence represented by SEQ ID NO: 174097.

[15743] The probes having the nucleotide sequence represented by SEQ ID NOS: 185263, 185264, 185265, 185266, 185267, 185268, 185269, 185270, 185271, 185272, 185273 were selected from the ORFs having the nucleotide sequence represented by SEQ ID NO: 174098.

[15744] The probes having the nucleotide sequence represented by SEQ ID NOS: 185274, 185275, 185276, 185277, 185278, 185279, 185280, 185281, 185282, 185283, 185284 were selected from the ORFs having the nucleotide sequence represented by SEQ ID NO: 174099.

[15745] The probes having the nucleotide sequence represented by SEQ ID NOS: 185285, 185286, 185287, 185288, 185289, 185290, 185291, 185292, 185293, 185294, 185295 were selected from the ORFs having the nucleotide sequence represented by SEQ ID NO: 174100.

[15746] The probes having the nucleotide sequence represented by SEQ ID NOS: 185296, 185297, 185298, 185299, 185300, 185301, 185302, 185303, 185304, 185305, 185306 were selected from the ORFs having the nucleotide sequence represented by SEQ ID NO: 174101.

[15747] The probes having the nucleotide sequence represented by SEQ ID NOS: 185307, 185308, 185309, 185310, 185311, 185312, 185313, 185314, 185315, 185316, 185317 were selected from the ORFs having the nucleotide sequence represented by SEQ ID NO: 174102.

[15748] The probes having the nucleotide sequence represented by SEQ ID NOS: 185318, 185319, 185320, 185321, 185322, 185323, 185324, 185325, 185326, 185327, 185328 were selected from the ORFs having the nucleotide sequence represented by SEQ ID NO: 174103.

[15749] The probes having the nucleotide sequence represented by SEQ ID NOS: 185329, 185330, 185331, 185332, 185333, 185334, 185335, 185336, 185337, 185338, 185339 were selected from the ORFs having the nucleotide sequence represented by SEQ ID NO: 174104.

[15750] The probes having the nucleotide sequence represented by SEQ ID NOS: 185340, 185341, 185342, 185343, 185344, 185345, 185346, 185347, 185348, 185349, 185350 were selected from the ORFs having the nucleotide sequence represented by SEQ ID NO: 174105.

[15751] The probes having the nucleotide sequence represented by SEQ ID NOS: 185351, 185352, 185353, 185354, 185355, 185356, 185357, 185358, 185359, 185360, 185361 were selected from the ORFs having the nucleotide sequence represented by SEQ ID NO: 174106.

[15752] The probes having the nucleotide sequence represented by SEQ ID NOS: 185362, 185363, 185364, 185365, 185366, 185367, 185368, 185369, 185370, 185371, 185372 were selected from the ORFs having the nucleotide sequence represented by SEQ ID NO: 174107.

[15753] The probes having the nucleotide sequence represented by SEQ ID NOS: 185373, 185374, 185375, 185376, 185377, 185378, 185379, 185380, 185381, 185382, 185383 were selected from the ORFs having the nucleotide sequence represented by SEQ ID NO: 174108.

[15754] The probes having the nucleotide sequence represented by SEQ ID NOS: 185384, 185385, 185386, 185387, 185388, 185389, 185390, 185391, 185392, 185393, 185394 were selected from the ORFs having the nucleotide sequence represented by SEQ ID NO: 174109.

[15755] The probes having the nucleotide sequence represented by SEQ ID NOS: 185395, 185396, 185397, 185398, 185399, 185400, 185401, 185402, 185403, 185404, 185405 were selected from the ORFs having the nucleotide sequence represented by SEQ ID NO: 174110.

[15756] The probes having the nucleotide sequence represented by SEQ ID NOS: 185406, 185407, 185408, 185409, 185410, 185411, 185412, 185413, 185414, 185415, 185416 were selected from the ORFs having the nucleotide sequence represented by SEQ ID NO: 174111.

[15757] The probes having the nucleotide sequence represented by SEQ ID NOS: 185417, 185418, 185419, 185420, 185421, 185422, 185423, 185424, 185425, 185426, 185427 were selected from the ORFs having the nucleotide sequence represented by SEQ ID NO: 174112.

[15758] The probes having the nucleotide sequence represented by SEQ ID NOS: 185428, 185429, 185430, 185431, 185432, 185433, 185434, 185435, 185436, 185437, 185438 were selected from the ORFs having the nucleotide sequence represented by SEQ ID NO: 174113.

[15759] The probes having the nucleotide sequence represented by SEQ ID NOS: 185439, 185440, 185441, 185442, 185443, 185444, 185445, 185446, 185447, 185448, 185449 were selected from the ORFs having the nucleotide sequence represented by SEQ ID NO: 174114.

[15760] The probes having the nucleotide sequence represented by SEQ ID NOS: 185450, 185451, 185452, 185453, 185454, 185455, 185456, 185457, 185458, 185459, 185460 were selected from the ORFs having the nucleotide sequence represented by SEQ ID NO: 174115.

[15761] The probes having the nucleotide sequence represented by SEQ ID NOS: 185461, 185462, 185463, 185464, 185465, 185466, 185467, 185468, 185469, 185470, 185471 were selected from the ORFs having the nucleotide sequence represented by SEQ ID NO: 174116.

[15762] The probes having the nucleotide sequence represented by SEQ ID NOS: 185472, 185473, 185474, 185475, 185476, 185477, 185478, 185479, 185480, 185481, 185482 were selected from the ORFs having the nucleotide sequence represented by SEQ ID NO: 174117.

[15763] The probes having the nucleotide sequence represented by SEQ ID NOS: 185483, 185484, 185485, 185486, 185487, 185488, 185489, 185490, 185491, 185492, 185493 were selected from the ORFs having the nucleotide sequence represented by SEQ ID NO: 174118.

[15764] The probes having the nucleotide sequence represented by SEQ ID NOS: 185494, 185495, 185496, 185497, 185498, 185499, 185500, 185501, 185502, 185503, 185504 were selected from the ORFs having the nucleotide sequence represented by SEQ ID NO: 174119.

[15765] The probes having the nucleotide sequence represented by SEQ ID NOS: 185505, 185506, 185507, 185508, 185509, 185510, 185511, 185512, 185513, 185514, 185515 were selected from the ORFs having the nucleotide sequence represented by SEQ ID NO: 174120.

[15766] The probes having the nucleotide sequence represented by SEQ ID NOS: 185516, 185517, 185518, 185519, 185520, 185521, 185522, 185523, 185524, 185525, 185526 were selected from the ORFs having the nucleotide sequence represented by SEQ ID NO: 174121.

[15767] The probes having the nucleotide sequence represented by SEQ ID NOS: 185527, 185528, 185529, 185530, 185531, 185532, 185533, 185534, 185535, 185536, 185537 were selected from the ORFs having the nucleotide sequence represented by SEQ ID NO: 174122.

[15768] The probes having the nucleotide sequence represented by SEQ ID NOS: 185538, 185539, 185540, 185541, 185542, 185543, 185544, 185545, 185546, 185547, 185548 were selected from the ORFs having the nucleotide sequence represented by SEQ ID NO: 174123.

[15769] The probes having the nucleotide sequence represented by SEQ ID NOS: 185549, 185550, 185551, 185552, 185553, 185554, 185555, 185556, 185557, 185558, 185559 were selected from the ORFs having the nucleotide sequence represented by SEQ ID NO: 174124.

[15770] The probes having the nucleotide sequence represented by SEQ ID NOS: 185560, 185561, 185562, 185563, 185564, 185565, 185566, 185567, 185568, 185569, 185570 were selected from the ORFs having the nucleotide sequence represented by SEQ ID NO: 174125.

[15771] The probes having the nucleotide sequence represented by SEQ ID NOS: 185571, 185572, 185573, 185574, 185575, 185576, 185577, 185578, 185579, 185580, 185581 were selected from the ORFs having the nucleotide sequence represented by SEQ ID NO: 174126.

[15772] The probes having the nucleotide sequence represented by SEQ ID NOS: 185582, 185583, 185584, 185585, 185586, 185587, 185588, 185589, 185590, 185591, 185592 were selected from the ORFs having the nucleotide sequence represented by SEQ ID NO: 174127.

[15773] The probes having the nucleotide sequence represented by SEQ ID NOS: 185593, 185594, 185595, 185596, 185597, 185598, 185599, 185600, 185601, 185602, 185603 were selected from the ORFs having the nucleotide sequence represented by SEQ ID NO: 174128.

[15774] The probes having the nucleotide sequence represented by SEQ ID NOS: 185604, 185605, 185606, 185607, 185608, 185609, 185610, 185611, 185612, 185613, 185614 were selected from the ORFs having the nucleotide sequence represented by SEQ ID NO: 174129.

[15775] The probes having the nucleotide sequence represented by SEQ ID NOS: 185615, 185616, 185617, 185618, 185619, 185620, 185621, 185622, 185623, 185624, 185625 were selected from the ORFs having the nucleotide sequence represented by SEQ ID NO: 174130.

[15776] The probes having the nucleotide sequence represented by SEQ ID NOS: 185626, 185627, 185628, 185629, 185630, 185631, 185632, 185633, 185634, 185635, 185636 were selected from the ORFs having the nucleotide sequence represented by SEQ ID NO: 174131.

[15777] The probes having the nucleotide sequence represented by SEQ ID NOS: 185637, 185638, 185639, 185640, 185641, 185642, 185643, 185644, 185645, 185646, 185647 were selected from the ORFs having the nucleotide sequence represented by SEQ ID NO: 174132.

[15778] The probes having the nucleotide sequence represented by SEQ ID NOS: 185648, 185649, 185650, 185651, 185652, 185653, 185654, 185655, 185656, 185657, 185658 were selected from the ORFs having the nucleotide sequence represented by SEQ ID NO: 174133.

[15779] The probes having the nucleotide sequence represented by SEQ ID NOS: 185659, 185660, 185661, 185662, 185663, 185664, 185665, 185666, 185667 were selected from the ORFs having the nucleotide sequence represented by SEQ ID NO: 174134.

[15780] The probes having the nucleotide sequence represented by SEQ ID NOS: 185668, 185669, 185670, 185671, 185672, 185673, 185674, 185675, 185676, 185677, 185678 were selected from the ORFs having the nucleotide sequence represented by SEQ ID NO: 174135.

[15781] The probes having the nucleotide sequence represented by SEQ ID NOS: 185679, 185680, 185681, 185682, 185683, 185684, 185685, 185686, 185687, 185688, 185689 were selected from the ORFs having the nucleotide sequence represented by SEQ ID NO: 174136.

[15782] The probes having the nucleotide sequence represented by SEQ ID NOS: 185690, 185691, 185692, 185693, 185694, 185695, 185696, 185697, 185698, 185699, 185700 were selected from the ORFs having the nucleotide sequence represented by SEQ ID NO: 174137.

[15783] The probes having the nucleotide sequence represented by SEQ ID NOS: 185701, 185702, 185703, 185704, 185705, 185706, 185707, 185708, 185709, 185710, 185711 were selected from the ORFs having the nucleotide sequence represented by SEQ ID NO: 174138.

[15784] The probes having the nucleotide sequence represented by SEQ ID NOS: 185712, 185713, 185714, 185715, 185716, 185717, 185718, 185719, 185720, 185721, 185722 were selected from the ORFs having the nucleotide sequence represented by SEQ ID NO: 174139.

[15785] The probes having the nucleotide sequence represented by SEQ ID NOS: 185723, 185724, 185725, 185726, 185727, 185728, 185729, 185730, 185731, 185732, 185733 were selected from the ORFs having the nucleotide sequence represented by SEQ ID NO: 174140.

[15786] The probes having the nucleotide sequence represented by SEQ ID NOS: 185734, 185735, 185736, 185737, 185738, 185739, 185740, 185741, 185742, 185743, 185744 were selected from the ORFs having the nucleotide sequence represented by SEQ ID NO: 174141.

[15787] The probes having the nucleotide sequence represented by SEQ ID NOS: 185745, 185746, 185747, 185748, 185749, 185750, 185751, 185752 were selected from the ORFs having the nucleotide sequence represented by SEQ ID NO: 174142.

[15788] The probes having the nucleotide sequence represented by SEQ ID NOS: 185753, 185754, 185755, 185756, 185757, 185758, 185759, 185760, 185761, 185762, 185763 were selected from the ORFs having the nucleotide sequence represented by SEQ ID NO: 174143.

[15789] The probes having the nucleotide sequence represented by SEQ ID NOS: 185764, 185765, 185766, 185767, 185768, 185769, 185770, 185771, 185772, 185773, 185774 were selected from the ORFs having the nucleotide sequence represented by SEQ ID NO: 174144.

[15790] The probes having the nucleotide sequence represented by SEQ ID NOS: 185775, 185776, 185777, 185778, 185779, 185780, 185781, 185782, 185783, 185784, 185785 were selected from the ORFs having the nucleotide sequence represented by SEQ ID NO: 174145.

[15791] The probes having the nucleotide sequence represented by SEQ ID NOS: 185786, 185787, 185788, 185789, 185790, 185791, 185792, 185793, 185794, 185795, 185796 were selected from the ORFs having the nucleotide sequence represented by SEQ ID NO: 174146.

[15792] The probes having the nucleotide sequence represented by SEQ ID NOS: 185797, 185798, 185799, 185800, 185801, 185802, 185803, 185804, 185805, 185806, 185807 were selected from the ORFs having the nucleotide sequence represented by SEQ ID NO: 174147.

[15793] The probes having the nucleotide sequence represented by SEQ ID NOS: 185808, 185809, 185810, 185811, 185812, 185813, 185814, 185815, 185816, 185817, 185818 were selected from the ORFs having the nucleotide sequence represented by SEQ ID NO: 174148.

[15794] The probes having the nucleotide sequence represented by SEQ ID NOS: 185819, 185820, 185821, 185822, 185823, 185824, 185825, 185826, 185827, 185828, 185829 were selected from the ORFs having the nucleotide sequence represented by SEQ ID NO: 174149.

[15795] The probes having the nucleotide sequence represented by SEQ ID NOS: 185830, 185831, 185832, 185833, 185834, 185835, 185836, 185837, 185838, 185839, 185840 were selected from the ORFs having the nucleotide sequence represented by SEQ ID NO: 174150.

[15796] The probes having the nucleotide sequence represented by SEQ ID NOS: 185841, 185842, 185843, 185844, 185845, 185846, 185847, 185848, 185849, 185850, 185851 were selected from the ORFs having the nucleotide sequence represented by SEQ ID NO: 174151.

[15797] The probes having the nucleotide sequence represented by SEQ ID NOS: 185852, 185853, 185854, 185855, 185856, 185857, 185858, 185859, 185860, 185861, 185862 were selected from the ORFs having the nucleotide sequence represented by SEQ ID NO: 174152.

[15798] The probes having the nucleotide sequence represented by SEQ ID NOS: 185863, 185864, 185865, 185866, 185867, 185868, 185869, 185870, 185871, 185872, 185873 were selected from the ORFs having the nucleotide sequence represented by SEQ ID NO: 174153.

[15799] The probes having the nucleotide sequence represented by SEQ ID NOS: 185874, 185875, 185876, 185877, 185878, 185879, 185880, 185881, 185882, 185883, 185884 were selected from the ORFs having the nucleotide sequence represented by SEQ ID NO: 174154.

[15800] The probes having the nucleotide sequence represented by SEQ ID NOS: 185885, 185886, 185887, 185888, 185889, 185890, 185891, 185892, 185893, 185894, 185895 were selected from the ORFs having the nucleotide sequence represented by SEQ ID NO: 174155.

[15801] The probes having the nucleotide sequence represented by SEQ ID NOS: 185896, 185897, 185898, 185899, 185900, 185901, 185902, 185903, 185904, 185905, 185906 were selected from the ORFs having the nucleotide sequence represented by SEQ ID NO: 174156.

[15802] The probes having the nucleotide sequence represented by SEQ ID NOS: 185907, 185908, 185909, 185910, 185911, 185912, 185913, 185914, 185915, 185916, 185917 were selected from the ORFs having the nucleotide sequence represented by SEQ ID NO: 174157.

[15803] The probes having the nucleotide sequence represented by SEQ ID NOS: 185918, 185919, 185920, 185921, 185922, 185923, 185924, 185925, 185926, 185927, 185928 were selected from the ORFs having the nucleotide sequence represented by SEQ ID NO: 174158.

[15804] The probes having the nucleotide sequence represented by SEQ ID NOS: 185929, 185930, 185931, 185932, 185933, 185934, 185935, 185936, 185937, 185938, 185939 were selected from the ORFs having the nucleotide sequence represented by SEQ ID NO: 174159.

[15805] The probes having the nucleotide sequence represented by SEQ ID NOS: 185940, 185941, 185942, 185943, 185944, 185945, 185946, 185947, 185948, 185949, 185950 were selected from the ORFs having the nucleotide sequence represented by SEQ ID NO: 174160.

[15806] The probes having the nucleotide sequence represented by SEQ ID NOS: 185951, 185952, 185953, 185954, 185955, 185956, 185957, 185958, 185959, 185960, 185961 were selected from the ORFs having the nucleotide sequence represented by SEQ ID NO: 174161.

[15807] The probes having the nucleotide sequence represented by SEQ ID NOS: 185962, 185963, 185964, 185965, 185966, 185967, 185968, 185969, 185970, 185971, 185972 were selected from the ORFs having the nucleotide sequence represented by SEQ ID NO: 174162.

[15808] The probes having the nucleotide sequence represented by SEQ ID NOS: 185973, 185974, 185975, 185976, 185977, 185978, 185979, 185980, 185981, 185982, 185983 were selected from the ORFs having the nucleotide sequence represented by SEQ ID NO: 174163.

[15809] The probes having the nucleotide sequence represented by SEQ ID NOS: 185984, 185985, 185986, 185987, 185988, 185989, 185990, 185991, 185992, 185993, 185994 were selected from the ORFs having the nucleotide sequence represented by SEQ ID NO: 174164.

[15810] The probes having the nucleotide sequence represented by SEQ ID NOS: 185995, 185996, 185997, 185998, 185999, 186000, 186001, 186002, 186003, 186004, 186005 were selected from the ORFs having the nucleotide sequence represented by SEQ ID NO: 174165.

[15811] The probes having the nucleotide sequence represented by SEQ ID NOS: 186006, 186007, 186008, 186009, 186010, 186011, 186012, 186013, 186014, 186015, 186016 were selected from the ORFs having the nucleotide sequence represented by SEQ ID NO: 174166.

[15812] The probes having the nucleotide sequence represented by SEQ ID NOS: 186017, 186018, 186019, 186020, 186021, 186022, 186023, 186024, 186025, 186026, 186027 were selected from the ORFs having the nucleotide sequence represented by SEQ ID NO: 174167.

[15813] The probes having the nucleotide sequence represented by SEQ ID NOS: 186028, 186029, 186030, 186031, 186032, 186033, 186034, 186035, 186036, 186037, 186038 were selected from the ORFs having the nucleotide sequence represented by SEQ ID NO: 174168.

[15814] The probes having the nucleotide sequence represented by SEQ ID NOS: 186039, 186040, 186041, 186042, 186043, 186044, 186045, 186046, 186047, 186048, 186049 were selected from the ORFs having the nucleotide sequence represented by SEQ ID NO: 174169.

[15815] The probes having the nucleotide sequence represented by SEQ ID NOS: 186050, 186051, 186052, 186053, 186054, 186055, 186056, 186057, 186058, 186059, 186060 were selected from the ORFs having the nucleotide sequence represented by SEQ ID NO: 174170.

[15816] The probes having the nucleotide sequence represented by SEQ ID NOS: 186061, 186062, 186063, 186064, 186065, 186066, 186067, 186068, 186069, 186070, 186071 were selected from the ORFs having the nucleotide sequence represented by SEQ ID NO: 174171.

[15817] The probes having the nucleotide sequence represented by SEQ ID NOS: 186072, 186073, 186074, 186075, 186076, 186077, 186078, 186079, 186080, 186081, 186082 were selected from the ORFs having the nucleotide sequence represented by SEQ ID NO: 174172.

[15818] The probes having the nucleotide sequence represented by SEQ ID NOS: 186083, 186084, 186085, 186086, 186087, 186088, 186089, 186090, 186091, 186092, 186093 were selected from the ORFs having the nucleotide sequence represented by SEQ ID NO: 174173.

[15819] The probes having the nucleotide sequence represented by SEQ ID NOS: 186094, 186095, 186096, 186097, 186098, 186099, 186100, 186101, 186102, 186103, 186104 were selected from the ORFs having the nucleotide sequence represented by SEQ ID NO: 174174.

[15820] The probes having the nucleotide sequence represented by SEQ ID NOS: 186105, 186106, 186107, 186108, 186109, 186110, 186111, 186112, 186113, 186114, 186115 were selected from the ORFs having the nucleotide sequence represented by SEQ ID NO: 174175.

[15821] The probes having the nucleotide sequence represented by SEQ ID NOS: 186116, 186117, 186118, 186119, 186120, 186121, 186122, 186123, 186124, 186125, 186126 were selected from the ORFs having the nucleotide sequence represented by SEQ ID NO: 174176.

[15822] The probes having the nucleotide sequence represented by SEQ ID NOS: 186127, 186128, 186129, 186130, 186131, 186132, 186133, 186134, 186135, 186136, 186137 were selected from the ORFs having the nucleotide sequence represented by SEQ ID NO: 174177.

[15823] The probes having the nucleotide sequence represented by SEQ ID NOS: 186138, 186139, 186140, 186141, 186142, 186143, 186144, 186145, 186146, 186147, 186148 were selected from the ORFs having the nucleotide sequence represented by SEQ ID NO: 174178.

[15824] The probes having the nucleotide sequence represented by SEQ ID NOS: 186149, 186150, 186151, 186152, 186153, 186154, 186155, 186156, 186157, 186158, 186159 were selected from the ORFs having the nucleotide sequence represented by SEQ ID NO: 174179.

[15825] The probes having the nucleotide sequence represented by SEQ ID NOS: 186160, 186161, 186162, 186163, 186164, 186165, 186166, 186167, 186168, 186169, 186170 were selected from the ORFs having the nucleotide sequence represented by SEQ ID NO: 174180.

[15826] The probes having the nucleotide sequence represented by SEQ ID NOS: 186171, 186172, 186173, 186174, 186175, 186176, 186177, 186178, 186179 were selected from the ORFs having the nucleotide sequence represented by SEQ ID NO: 174181.

[15827] The probes having the nucleotide sequence represented by SEQ ID NOS: 186180, 186181, 186182, 186183, 186184, 186185, 186186, 186187, 186188, 186189, 186190 were selected from the ORFs having the nucleotide sequence represented by SEQ ID NO: 174182.

[15828] The probes having the nucleotide sequence represented by SEQ ID NOS: 186191, 186192, 186193, 186194, 186195, 186196, 186197, 186198, 186199, 186200, 186201 were selected from the ORFs having the nucleotide sequence represented by SEQ ID NO: 174183.

[15829] The probes having the nucleotide sequence represented by SEQ ID NOS: 186202, 186203, 186204, 186205, 186206, 186207, 186208, 186209, 186210, 186211, 186212 were selected from the ORFs having the nucleotide sequence represented by SEQ ID NO: 174184.

[15830] The probes having the nucleotide sequence represented by SEQ ID NOS: 186213, 186214, 186215, 186216, 186217, 186218, 186219, 186220, 186221, 186222, 186223 were selected from the ORFs having the nucleotide sequence represented by SEQ ID NO: 174185.

[15831] The probes having the nucleotide sequence represented by SEQ ID NOS: 186224, 186225, 186226, 186227, 186228, 186229, 186230, 186231, 186232, 186233, 186234 were selected from the ORFs having the nucleotide sequence represented by SEQ ID NO: 174186.

[15832] The probes having the nucleotide sequence represented by SEQ ID NOS: 186235, 186236, 186237, 186238, 186239, 186240, 186241, 186242, 186243, 186244, 186245 were selected from the ORFs having the nucleotide sequence represented by SEQ ID NO: 174187.

[15833] The probes having the nucleotide sequence represented by SEQ ID NOS: 186246, 186247, 186248, 186249, 186250, 186251, 186252, 186253, 186254, 186255, 186256 were selected from the ORFs having the nucleotide sequence represented by SEQ ID NO: 174188.

[15834] The probes having the nucleotide sequence represented by SEQ ID NOS: 186257, 186258, 186259, 186260, 186261, 186262, 186263, 186264, 186265, 186266, 186267 were selected from the ORFs having the nucleotide sequence represented by SEQ ID NO: 174189.

[15835] The probes having the nucleotide sequence represented by SEQ ID NOS: 186268, 186269, 186270, 186271, 186272, 186273, 186274, 186275, 186276, 186277, 186278 were selected from the ORFs having the nucleotide sequence represented by SEQ ID NO: 174190.

[15836] The probes having the nucleotide sequence represented by SEQ ID NOS: 186279, 186280, 186281, 186282, 186283, 186284, 186285, 186286, 186287, 186288, 186289 were selected from the ORFs having the nucleotide sequence represented by SEQ ID NO: 174191.

[15837] The probes having the nucleotide sequence represented by SEQ ID NOS: 186290, 186291, 186292, 186293, 186294, 186295, 186296, 186297, 186298, 186299, 186300 were selected from the ORFs having the nucleotide sequence represented by SEQ ID NO: 174192.

[15838] The probes having the nucleotide sequence represented by SEQ ID NOS: 186301, 186302, 186303, 186304, 186305, 186306, 186307, 186308, 186309, 186310, 186311 were selected from the ORFs having the nucleotide sequence represented by SEQ ID NO: 174193.

[15839] The probes having the nucleotide sequence represented by SEQ ID NOS: 186312, 186313, 186314, 186315, 186316, 186317, 186318, 186319, 186320, 186321, 186322 were selected from the ORFs having the nucleotide sequence represented by SEQ ID NO: 174194.

[15840] The probes having the nucleotide sequence represented by SEQ ID NOS: 186323, 186324, 186325, 186326, 186327, 186328, 186329, 186330, 186331, 186332, 186333 were selected from the ORFs having the nucleotide sequence represented by SEQ ID NO: 174195.

[15841] The probes having the nucleotide sequence represented by SEQ ID NOS: 186334, 186335, 186336, 186337, 186338, 186339, 186340, 186341 were selected from the ORFs having the nucleotide sequence represented by SEQ ID NO: 174196.

[15842] The probes having the nucleotide sequence represented by SEQ ID NOS: 186342, 186343, 186344, 186345, 186346, 186347, 186348, 186349, 186350, 186351, 186352 were selected from the ORFs having the nucleotide sequence represented by SEQ ID NO: 174197.

[15843] The probes having the nucleotide sequence represented by SEQ ID NOS: 186353, 186354, 186355, 186356, 186357, 186358, 186359, 186360, 186361, 186362, 186363 were selected from the ORFs having the nucleotide sequence represented by SEQ ID NO: 174198.

[15844] The probes having the nucleotide sequence represented by SEQ ID NOS: 186364, 186365, 186366, 186367, 186368, 186369, 186370, 186371, 186372, 186373, 186374 were selected from the ORFs having the nucleotide sequence represented by SEQ ID NO: 174199.

[15845] The probes having the nucleotide sequence represented by SEQ ID NOS: 186375, 186376, 186377, 186378, 186379, 186380, 186381, 186382, 186383, 186384, 186385 were selected from the ORFs having the nucleotide sequence represented by SEQ ID NO: 174200.

[15846] The probes having the nucleotide sequence represented by SEQ ID NOS: 186386, 186387, 186388, 186389, 186390, 186391, 186392, 186393, 186394, 186395, 186396 were selected from the ORFs having the nucleotide sequence represented by SEQ ID NO: 174201.

[15847] The probes having the nucleotide sequence represented by SEQ ID NOS: 186397, 186398, 186399, 186400, 186401, 186402, 186403, 186404, 186405, 186406, 186407 were selected from the ORFs having the nucleotide sequence represented by SEQ ID NO: 174202.

[15848] The probes having the nucleotide sequence represented by SEQ ID NOS: 186408, 186409, 186410, 186411, 186412, 186413, 186414, 186415, 186416, 186417, 186418 were selected from the ORFs having the nucleotide sequence represented by SEQ ID NO: 174203.

[15849] The probes having the nucleotide sequence represented by SEQ ID NOS: 186419, 186420, 186421, 186422, 186423, 186424, 186425, 186426, 186427, 186428, 186429 were selected from the ORFs having the nucleotide sequence represented by SEQ ID NO: 174204.

[15850] The probes having the nucleotide sequence represented by SEQ ID NOS: 186430, 186431, 186432, 186433, 186434, 186435, 186436, 186437, 186438, 186439, 186440 were selected from the ORFs having the nucleotide sequence represented by SEQ ID NO: 174205.

[15851] The probes having the nucleotide sequence represented by SEQ ID NOS: 186441, 186442, 186443, 186444, 186445, 186446, 186447, 186448, 186449, 186450, 186451 were selected from the ORFs having the nucleotide sequence represented by SEQ ID NO: 174206.

[15852] The probes having the nucleotide sequence represented by SEQ ID NOS: 186452, 186453, 186454, 186455, 186456, 186457, 186458, 186459, 186460, 186461, 186462 were selected from the ORFs having the nucleotide sequence represented by SEQ ID NO: 174207.

[15853] The probes having the nucleotide sequence represented by SEQ ID NOS: 186463, 186464, 186465, 186466, 186467, 186468, 186469, 186470, 186471, 186472, 186473 were selected from the ORFs having the nucleotide sequence represented by SEQ ID NO: 174208.

[15854] The probes having the nucleotide sequence represented by SEQ ID NOS: 186474, 186475, 186476, 186477, 186478, 186479, 186480, 186481, 186482, 186483, 186484 were selected from the ORFs having the nucleotide sequence represented by SEQ ID NO: 174209.

[15855] The probes having the nucleotide sequence represented by SEQ ID NOS: 186485, 186486, 186487, 186488, 186489, 186490, 186491, 186492, 186493, 186494, 186495 were selected from the ORFs having the nucleotide sequence represented by SEQ ID NO: 174210.

[15856] The probes having the nucleotide sequence represented by SEQ ID NOS: 186496, 186497, 186498, 186499, 186500, 186501, 186502, 186503, 186504, 186505, 186506 were selected from the ORFs having the nucleotide sequence represented by SEQ ID NO: 174211.

[15857] The probes having the nucleotide sequence represented by SEQ ID NOS: 186507, 186508, 186509, 186510, 186511, 186512, 186513, 186514, 186515, 186516, 186517 were selected from the ORFs having the nucleotide sequence represented by SEQ ID NO: 174212.

[15858] The probes having the nucleotide sequence represented by SEQ ID NOS: 186518, 186519, 186520, 186521, 186522, 186523, 186524, 186525, 186526, 186527, 186528 were selected from the ORFs having the nucleotide sequence represented by SEQ ID NO: 174213.

[15859] The probes having the nucleotide sequence represented by SEQ ID NOS: 186529, 186530, 186531, 186532, 186533, 186534, 186535, 186536, 186537, 186538, 186539 were selected from the ORFs having the nucleotide sequence represented by SEQ ID NO: 174214.

[15860] The probes having the nucleotide sequence represented by SEQ ID NOS: 186540, 186541, 186542, 186543, 186544, 186545, 186546, 186547, 186548, 186549, 186550 were selected from the ORFs having the nucleotide sequence represented by SEQ ID NO: 174215.

[15861] The probes having the nucleotide sequence represented by SEQ ID NOS: 186551, 186552, 186553, 186554, 186555, 186556, 186557, 186558, 186559, 186560, 186561 were selected from the ORFs having the nucleotide sequence represented by SEQ ID NO: 174216.

[15862] The probes having the nucleotide sequence represented by SEQ ID NOS: 186562, 186563, 186564, 186565, 186566, 186567, 186568, 186569, 186570, 186571, 186572 were selected from the ORFs having the nucleotide sequence represented by SEQ ID NO: 174217.

[15863] The probes having the nucleotide sequence represented by SEQ ID NOS: 186573, 186574, 186575, 186576, 186577, 186578, 186579, 186580, 186581, 186582, 186583 were selected from the ORFs having the nucleotide sequence represented by SEQ ID NO: 174218.

[15864] The probes having the nucleotide sequence represented by SEQ ID NOS: 186584, 186585, 186586, 186587, 186588, 186589, 186590, 186591, 186592, 186593, 186594 were selected from the ORFs having the nucleotide sequence represented by SEQ ID NO: 174219.

[15865] The probes having the nucleotide sequence represented by SEQ ID NOS: 186595, 186596, 186597, 186598, 186599, 186600, 186601, 186602, 186603, 186604, 186605 were selected from the ORFs having the nucleotide sequence represented by SEQ ID NO: 174220.

[15866] The probes having the nucleotide sequence represented by SEQ ID NOS: 186606, 186607, 186608, 186609, 186610, 186611, 186612, 186613, 186614, 186615, 186616 were selected from the ORFs having the nucleotide sequence represented by SEQ ID NO: 174221.

[15867] The probes having the nucleotide sequence represented by SEQ ID NOS: 186617, 186618, 186619, 186620, 186621, 186622, 186623, 186624, 186625, 186626, 186627 were selected from the ORFs having the nucleotide sequence represented by SEQ ID NO: 174222.

[15868] The probes having the nucleotide sequence represented by SEQ ID NOS: 186628, 186629, 186630, 186631, 186632, 186633, 186634, 186635, 186636, 186637, 186638 were selected from the ORFs having the nucleotide sequence represented by SEQ ID NO: 174223.

[15869] The probes having the nucleotide sequence represented by SEQ ID NOS: 186639, 186640, 186641, 186642, 186643, 186644, 186645, 186646, 186647, 186648, 186649 were selected from the ORFs having the nucleotide sequence represented by SEQ ID NO: 174224.

[15870] The probes having the nucleotide sequence represented by SEQ ID NOS: 186650, 186651, 186652, 186653, 186654, 186655, 186656, 186657, 186658, 186659, 186660 were selected from the ORFs having the nucleotide sequence represented by SEQ ID NO: 174225.

[15871] The probes having the nucleotide sequence represented by SEQ ID NOS: 186661, 186662, 186663, 186664, 186665, 186666, 186667, 186668, 186669, 186670, 186671 were selected from the ORFs having the nucleotide sequence represented by SEQ ID NO: 174226.

[15872] The probes having the nucleotide sequence represented by SEQ ID NOS: 186672, 186673, 186674, 186675, 186676, 186677, 186678, 186679, 186680, 186681, 186682 were selected from the ORFs having the nucleotide sequence represented by SEQ ID NO: 174227.

[15873] The probes having the nucleotide sequence represented by SEQ ID NOS: 186683, 186684, 186685, 186686, 186687, 186688, 186689, 186690, 186691, 186692, 186693 were selected from the ORFs having the nucleotide sequence represented by SEQ ID NO: 174228.

[15874] The probes having the nucleotide sequence represented by SEQ ID NOS: 186694, 186695, 186696, 186697, 186698, 186699, 186700, 186701, 186702, 186703, 186704 were selected from the ORFs having the nucleotide sequence represented by SEQ ID NO: 174229.

[15875] The probes having the nucleotide sequence represented by SEQ ID NOS: 186705, 186706, 186707, 186708, 186709, 186710, 186711, 186712, 186713, 186714, 186715 were selected from the ORFs having the nucleotide sequence represented by SEQ ID NO: 174230.

[15876] The probes having the nucleotide sequence represented by SEQ ID NOS: 186716, 186717, 186718, 186719, 186720, 186721, 186722, 186723, 186724, 186725, 186726 were selected from the ORFs having the nucleotide sequence represented by SEQ ID NO: 174231.

[15877] The probes having the nucleotide sequence represented by SEQ ID NOS: 186727, 186728, 186729, 186730, 186731, 186732, 186733, 186734, 186735, 186736, 186737 were selected from the ORFs having the nucleotide sequence represented by SEQ ID NO: 174232.

[15878] The probes having the nucleotide sequence represented by SEQ ID NOS: 186738, 186739, 186740, 186741, 186742, 186743, 186744, 186745, 186746, 186747, 186748 were selected from the ORFs having the nucleotide sequence represented by SEQ ID NO: 174233.

[15879] The probes having the nucleotide sequence represented by SEQ ID NOS: 186749, 186750, 186751, 186752, 186753, 186754, 186755, 186756, 186757, 186758, 186759 were selected from the ORFs having the nucleotide sequence represented by SEQ ID NO: 174234.

[15880] The probes having the nucleotide sequence represented by SEQ ID NOS: 186760, 186761, 186762, 186763, 186764, 186765, 186766, 186767, 186768, 186769, 186770 were selected from the ORFs having the nucleotide sequence represented by SEQ ID NO: 174235.

[15881] The probes having the nucleotide sequence represented by SEQ ID NOS: 186771, 186772, 186773, 186774, 186775, 186776, 186777, 186778, 186779, 186780, 186781 were selected from the ORFs having the nucleotide sequence represented by SEQ ID NO: 174236.

[15882] The probes having the nucleotide sequence represented by SEQ ID NOS: 186782, 186783, 186784, 186785, 186786, 186787, 186788, 186789, 186790, 186791, 186792 were selected from the ORFs having the nucleotide sequence represented by SEQ ID NO: 174237.

[15883] The probes having the nucleotide sequence represented by SEQ ID NOS: 186793, 186794, 186795, 186796, 186797, 186798, 186799, 186800, 186801, 186802, 186803 were selected from the ORFs having the nucleotide sequence represented by SEQ ID NO: 174238.

[15884] The probes having the nucleotide sequence represented by SEQ ID NOS: 186804, 186805, 186806, 186807, 186808, 186809, 186810, 186811, 186812, 186813, 186814 were selected from the ORFs having the nucleotide sequence represented by SEQ ID NO: 174239.

[15885] The probes having the nucleotide sequence represented by SEQ ID NOS: 186815, 186816, 186817, 186818, 186819, 186820, 186821, 186822, 186823, 186824, 186825 were selected from the ORFs having the nucleotide sequence represented by SEQ ID NO: 174240.

[15886] The probes having the nucleotide sequence represented by SEQ ID NOS: 186826, 186827, 186828, 186829, 186830, 186831, 186832, 186833, 186834, 186835, 186836 were selected from the ORFs having the nucleotide sequence represented by SEQ ID NO: 174241.

[15887] The probes having the nucleotide sequence represented by SEQ ID NOS: 186837, 186838, 186839, 186840, 186841, 186842, 186843, 186844, 186845, 186846, 186847 were selected from the ORFs having the nucleotide sequence represented by SEQ ID NO: 174242.

[15888] The probes having the nucleotide sequence represented by SEQ ID NOS: 186848, 186849, 186850, 186851, 186852, 186853, 186854, 186855, 186856, 186857, 186858 were selected from the ORFs having the nucleotide sequence represented by SEQ ID NO: 174243.

[15889] The probes having the nucleotide sequence represented by SEQ ID NOS: 186859, 186860, 186861, 186862, 186863, 186864, 186865, 186866, 186867, 186868, 186869 were selected from the ORFs having the nucleotide sequence represented by SEQ ID NO: 174244.

[15890] The probes having the nucleotide sequence represented by SEQ ID NOS: 186870, 186871, 186872, 186873, 186874, 186875, 186876, 186877, 186878, 186879, 186880 were selected from the ORFs having the nucleotide sequence represented by SEQ ID NO: 174245.

[15891] The probes having the nucleotide sequence represented by SEQ ID NOS: 186881, 186882, 186883, 186884, 186885, 186886, 186887, 186888, 186889, 186890, 186891 were selected from the ORFs having the nucleotide sequence represented by SEQ ID NO: 174246.

[15892] The probes having the nucleotide sequence represented by SEQ ID NOS: 186892, 186893, 186894, 186895, 186896, 186897, 186898, 186899, 186900, 186901, 186902 were selected from the ORFs having the nucleotide sequence represented by SEQ ID NO: 174247.

[15893] The probes having the nucleotide sequence represented by SEQ ID NOS: 186903, 186904, 186905, 186906, 186907, 186908, 186909, 186910, 186911, 186912, 186913 were selected from the ORFs having the nucleotide sequence represented by SEQ ID NO: 174248.

[15894] The probes having the nucleotide sequence represented by SEQ ID NOS: 186914, 186915, 186916, 186917, 186918, 186919, 186920, 186921, 186922, 186923, 186924 were selected from the ORFs having the nucleotide sequence represented by SEQ ID NO: 174249.

[15895] The probes having the nucleotide sequence represented by SEQ ID NOS: 186925, 186926, 186927, 186928, 186929, 186930, 186931, 186932, 186933, 186934, 186935 were selected from the ORFs having the nucleotide sequence represented by SEQ ID NO: 174250.

[15896] The probes having the nucleotide sequence represented by SEQ ID NOS: 186936, 186937, 186938, 186939, 186940, 186941, 186942, 186943, 186944 were selected from the ORFs having the nucleotide sequence represented by SEQ ID NO: 174251.

[15897] The probes having the nucleotide sequence represented by SEQ ID NOS: 186945, 186946, 186947, 186948, 186949, 186950, 186951, 186952, 186953, 186954, 186955 were selected from the ORFs having the nucleotide sequence represented by SEQ ID NO: 174252.

[15898] The probes having the nucleotide sequence represented by SEQ ID NOS: 186956, 186957, 186958, 186959, 186960, 186961, 186962, 186963, 186964, 186965, 186966 were selected from the ORFs having the nucleotide sequence represented by SEQ ID NO: 174253.

[15899] The probes having the nucleotide sequence represented by SEQ ID NOS: 186967, 186968, 186969, 186970, 186971, 186972, 186973, 186974, 186975, 186976, 186977 were selected from the ORFs having the nucleotide sequence represented by SEQ ID NO: 174254.

[15900] The probes having the nucleotide sequence represented by SEQ ID NOS: 186978, 186979, 186980, 186981, 186982, 186983, 186984, 186985, 186986, 186987, 186988 were selected from the ORFs having the nucleotide sequence represented by SEQ ID NO: 174255.

[15901] The probes having the nucleotide sequence represented by SEQ ID NOS: 186989, 186990, 186991, 186992, 186993, 186994, 186995, 186996, 186997, 186998, 186999 were selected from the ORFs having the nucleotide sequence represented by SEQ ID NO: 174256.

[15902] The probes having the nucleotide sequence represented by SEQ ID NOS: 187000, 187001, 187002, 187003, 187004, 187005, 187006, 187007, 187008, 187009, 187010 were selected from the ORFs having the nucleotide sequence represented by SEQ ID NO: 174257.

[15903] The probes having the nucleotide sequence represented by SEQ ID NOS: 187011, 187012, 187013, 187014, 187015, 187016, 187017, 187018, 187019, 187020, 187021 were selected from the ORFs having the nucleotide sequence represented by SEQ ID NO: 174258.

[15904] The probes having the nucleotide sequence represented by SEQ ID NOS: 187022, 187023, 187024, 187025, 187026, 187027, 187028, 187029, 187030, 187031, 187032 were selected from the ORFs having the nucleotide sequence represented by SEQ ID NO: 174259.

[15905] The probes having the nucleotide sequence represented by SEQ ID NOS: 187033, 187034, 187035, 187036, 187037, 187038, 187039, 187040, 187041, 187042, 187043 were selected from the ORFs having the nucleotide sequence represented by SEQ ID NO: 174260.

[15906] The probes having the nucleotide sequence represented by SEQ ID NOS: 187044, 187045, 187046, 187047, 187048, 187049, 187050, 187051, 187052, 187053, 187054 were selected from the ORFs having the nucleotide sequence represented by SEQ ID NO: 174261.

[15907] The probes having the nucleotide sequence represented by SEQ ID NOS: 187055, 187056, 187057, 187058, 187059, 187060, 187061, 187062, 187063, 187064, 187065 were selected from the ORFs having the nucleotide sequence represented by SEQ ID NO: 174262.

[15908] The probes having the nucleotide sequence represented by SEQ ID NOS: 187066, 187067, 187068, 187069, 187070, 187071, 187072, 187073, 187074, 187075, 187076 were selected from the ORFs having the nucleotide sequence represented by SEQ. ID NO: 174263.

[15909] The probes having the nucleotide sequence represented by SEQ ID NOS: 187077, 187078, 187079, 187080, 187081, 187082, 187083, 187084, 187085, 187086, 187087 were selected from the ORFs having the nucleotide sequence represented by SEQ ID NO: 174264.

[15910] The probes having the nucleotide sequence represented by SEQ ID NOS: 187088, 187089, 187090, 187091, 187092, 187093, 187094, 187095, 187096, 187097, 187098 were selected from the ORFs having the nucleotide sequence represented by SEQ ID NO: 174265.

[15911] The probes having the nucleotide sequence represented by SEQ ID NOS: 187099, 187100, 187101, 187102, 187103, 187104, 187105, 187106, 187107, 187108, 187109 were selected from the ORFs having the nucleotide sequence represented by SEQ ID NO: 174266.

[15912] The probes having the nucleotide sequence represented by SEQ ID NOS: 187110, 187111, 187112, 187113, 187114, 187115, 187116, 187117, 187118, 187119, 187120 were selected from the ORFs having the nucleotide sequence represented by SEQ ID NO: 174267.

[15913] The probes having the nucleotide sequence represented by SEQ ID NOS: 187121, 187122, 187123, 187124, 187125, 187126, 187127, 187128, 187129, 187130, 187131 were selected from the ORFs having the nucleotide sequence represented by SEQ ID NO: 174268.

[15914] The probes having the nucleotide sequence represented by SEQ ID NOS: 187132, 187133, 187134, 187135, 187136, 187137, 187138, 187139, 187140, 187141, 187142 were selected from the ORFs having the nucleotide sequence represented by SEQ ID NO: 174269.

[15915] The probes having the nucleotide sequence represented by SEQ ID NOS: 187143, 187144, 187145, 187146, 187147, 187148, 187149, 187150, 187151, 187152, 187153 were selected from the ORFs having the nucleotide sequence represented by SEQ ID NO: 174270.

[15916] The probes having the nucleotide sequence represented by SEQ ID NOS: 187154, 187155, 187156, 187157, 187158, 187159, 187160, 187161, 187162, 187163, 187164 were selected from the ORFs having the nucleotide sequence represented by SEQ ID NO: 174271.

[15917] The probes having the nucleotide sequence represented by SEQ ID NOS: 187165, 187166, 187167, 187168, 187169, 187170, 187171, 187172, 187173, 187174, 187175 were selected from the ORFs having the nucleotide sequence represented by SEQ ID NO: 174272.

[15918] The probes having the nucleotide sequence represented by SEQ ID NOS: 187176, 187177, 187178, 187179, 187180, 187181, 187182, 187183, 187184, 187185, 187186 were selected from the ORFs having the nucleotide sequence represented by SEQ ID NO: 174273.

[15919] The probes having the nucleotide sequence represented by SEQ ID NOS: 187187, 187188, 187189, 187190, 187191, 187192, 187193, 187194, 187195, 187196, 187197 were selected from the ORFs having the nucleotide sequence represented by SEQ ID NO: 174274.

[15920] The probes having the nucleotide sequence represented by SEQ ID NOS: 187198, 187199, 187200, 187201, 187202, 187203, 187204, 187205, 187206, 187207, 187208 were selected from the ORFs having the nucleotide sequence represented by SEQ ID NO: 174275.

[15921] The probes having the nucleotide sequence represented by SEQ ID NOS: 187209, 187210, 187211, 187212, 187213, 187214, 187215, 187216, 187217, 187218, 187219 were selected from the ORFs having the nucleotide sequence represented by SEQ ID NO: 174276.

[15922] The probes having the nucleotide sequence represented by SEQ ID NOS: 187220, 187221, 187222, 187223, 187224, 187225, 187226, 187227, 187228, 187229, 187230 were selected from the ORFs having the nucleotide sequence represented by SEQ ID NO: 174277.

[15923] The probes having the nucleotide sequence represented by SEQ ID NOS: 187231, 187232, 187233, 187234, 187235, 187236, 187237, 187238, 187239, 187240, 187241 were selected from the ORFs having the nucleotide sequence represented by SEQ ID NO: 174278.

[15924] The probes having the nucleotide sequence represented by SEQ ID NOS: 187242, 187243, 187244, 187245, 187246, 187247, 187248, 187249, 187250, 187251, 187252 were selected from the ORFs having the nucleotide sequence represented by SEQ ID NO: 174279.

[15925] The probes having the nucleotide sequence represented by SEQ ID NOS: 187253, 187254, 187255, 187256, 187257, 187258, 187259, 187260, 187261, 187262, 187263 were selected from the ORFs having the nucleotide sequence represented by SEQ ID NO: 174280.

[15926] The probes having the nucleotide sequence represented by SEQ ID NOS: 187264, 187265, 187266, 187267, 187268, 187269, 187270, 187271, 187272, 187273, 187274 were selected from the ORFs having the nucleotide sequence represented by SEQ ID NO: 174281.

[15927] The probes having the nucleotide sequence represented by SEQ ID NOS: 187275, 187276, 187277, 187278, 187279, 187280, 187281, 187282, 187283, 187284, 187285 were selected from the ORFs having the nucleotide sequence represented by SEQ ID NO: 174282.

[15928] The probes having the nucleotide sequence represented by SEQ ID NOS: 187286, 187287, 187288, 187289, 187290, 187291, 187292, 187293, 187294, 187295, 187296 were selected from the ORFs having the nucleotide sequence represented by SEQ ID NO: 174283.

[15929] The probes having the nucleotide sequence represented by SEQ ID NOS: 187297, 187298, 187299, 187300, 187301, 187302, 187303, 187304, 187305, 187306, 187307 were selected from the ORFs having the nucleotide sequence represented by SEQ ID NO: 174284.

[15930] The probes having the nucleotide sequence represented by SEQ ID NOS: 187308, 187309, 187310, 187311, 187312, 187313, 187314, 187315, 187316, 187317, 187318 were selected from the ORFs having the nucleotide sequence represented by SEQ ID NO: 174285.

[15931] The probes having the nucleotide sequence represented by SEQ ID NOS: 187319, 187320, 187321, 187322, 187323, 187324, 187325, 187326, 187327, 187328, 187329 were selected from the ORFs having the nucleotide sequence represented by SEQ ID NO: 174286.

[15932] The probes having the nucleotide sequence represented by SEQ ID NOS: 187330, 187331, 187332, 187333, 187334, 187335, 187336, 187337, 187338, 187339, 187340 were selected from the ORFs having the nucleotide sequence represented by SEQ ID NO: 174287.

[15933] The probes having the nucleotide sequence represented by SEQ ID NOS: 187341, 187342, 187343, 187344, 187345, 187346, 187347, 187348, 187349, 187350, 187351 were selected from the ORFs having the nucleotide sequence represented by SEQ ID NO: 174288.

[15934] The probes having the nucleotide sequence represented by SEQ ID NOS: 187352, 187353, 187354, 187355, 187356, 187357, 187358, 187359, 187360, 187361, 187362 were selected from the ORFs having the nucleotide sequence represented by SEQ ID NO: 174289.

[15935] The probes having the nucleotide sequence represented by SEQ ID NOS: 187363, 187364, 187365, 187366, 187367, 187368, 187369, 187370, 187371, 187372, 187373 were selected from the ORFs having the nucleotide sequence represented by SEQ ID NO: 174290.

[15936] The probes having the nucleotide sequence represented by SEQ ID NOS: 187374, 187375, 187376, 187377, 187378, 187379, 187380, 187381, 187382, 187383, 187384 were selected from the ORFs having the nucleotide sequence represented by SEQ ID NO: 174291.

[15937] The probes having the nucleotide sequence represented by SEQ ID NOS: 187385, 187386, 187387, 187388, 187389, 187390, 187391, 187392, 187393, 187394, 187395 were selected from the ORFs having the nucleotide sequence represented by SEQ ID NO: 174292.

[15938] The probes having the nucleotide sequence represented by SEQ ID NOS: 187396, 187397, 187398, 187399, 187400, 187401, 187402, 187403, 187404, 187405, 187406 were selected from the ORFs having the nucleotide sequence represented by SEQ ID NO: 174293.

[15939] The probes having the nucleotide sequence represented by SEQ ID NOS: 187407, 187408, 187409, 187410, 187411, 187412, 187413, 187414, 187415, 187416, 187417 were selected from the ORFs having the nucleotide sequence represented by SEQ ID NO: 174294.

[15940] The probes having the nucleotide sequence represented by SEQ ID NOS: 187418, 187419, 187420, 187421, 187422, 187423, 187424, 187425, 187426, 187427, 187428 were selected from the ORFs having the nucleotide sequence represented by SEQ ID NO: 174295.

[15941] The probes having the nucleotide sequence represented by SEQ ID NOS: 187429, 187430, 187431, 187432, 187433, 187434, 187435, 187436, 187437, 187438, 187439 were selected from the ORFs having the nucleotide sequence represented by SEQ ID NO: 174296.

[15942] The probes having the nucleotide sequence represented by SEQ ID NOS: 187440, 187441, 187442, 187443, 187444, 187445, 187446, 187447, 187448, 187449, 187450 were selected from the ORFs having the nucleotide sequence represented by SEQ ID NO: 174297.

[15943] The probes having the nucleotide sequence represented by SEQ ID NOS: 187451, 187452, 187453, 187454, 187455, 187456, 187457, 187458, 187459, 187460, 187461 were selected from the ORFs having the nucleotide sequence represented by SEQ ID NO: 174298.

[15944] The probes having the nucleotide sequence represented by SEQ ID NOS: 187462, 187463, 187464, 187465, 187466, 187467, 187468, 187469, 187470, 187471, 187472 were selected from the ORFs having the nucleotide sequence represented by SEQ ID NO: 174299.

[15945] The probes having the nucleotide sequence represented by SEQ ID NOS: 187473, 187474, 187475, 187476, 187477, 187478, 187479, 187480, 187481, 187482, 187483 were selected from the ORFs having the nucleotide sequence represented by SEQ ID NO: 174300.

[15946] The probes having the nucleotide sequence represented by SEQ ID NOS: 187484, 187485, 187486, 187487, 187488, 187489, 187490, 187491, 187492, 187493, 187494 were selected from the ORFs having the nucleotide sequence represented by SEQ ID NO: 174301.

[15947] The probes having the nucleotide sequence represented by SEQ ID NOS: 187495, 187496, 187497, 187498, 187499, 187500, 187501, 187502, 187503, 187504, 187505 were selected from the ORFs having the nucleotide sequence represented by SEQ ID NO: 174302.

[15948] The probes having the nucleotide sequence represented by SEQ ID NOS: 187506, 187507, 187508, 187509, 187510, 187511, 187512, 187513, 187514, 187515, 187516 were selected from the ORFs having the nucleotide sequence represented by SEQ ID NO: 174303.

[15949] The probes having the nucleotide sequence represented by SEQ ID NOS: 187517, 187518, 187519, 187520, 187521, 187522, 187523, 187524, 187525, 187526, 187527 were selected from the ORFs having the nucleotide sequence represented by SEQ ID NO: 174304.

[15950] The probes having the nucleotide sequence represented by SEQ ID NOS: 187528, 187529, 187530, 187531, 187532, 187533, 187534, 187535, 187536, 187537, 187538 were selected from the ORFs having the nucleotide sequence represented by SEQ ID NO: 174305.

[15951] The probes having the nucleotide sequence represented by SEQ ID NOS: 187539, 187540, 187541, 187542, 187543, 187544, 187545, 187546, 187547, 187548, 187549 were selected from the ORFs having the nucleotide sequence represented by SEQ ID NO: 174306.

[15952] The probes having the nucleotide sequence represented by SEQ ID NOS: 187550, 187551, 187552, 187553, 187554, 187555, 187556, 187557, 187558, 187559, 187560 were selected from the ORFs having the nucleotide sequence represented by SEQ ID NO: 174307.

[15953] The probes having the nucleotide sequence represented by SEQ ID NOS: 187561, 187562, 187563, 187564, 187565, 187566, 187567, 187568, 187569, 187570, 187571 were selected from the ORFs having the nucleotide sequence represented by SEQ ID NO: 174308.

[15954] The probes having the nucleotide sequence represented by SEQ ID NOS: 187572, 187573, 187574, 187575, 187576, 187577, 187578, 187579, 187580, 187581, 187582 were selected from the ORFs having the nucleotide sequence represented by SEQ ID NO: 174309.

[15955] The probes having the nucleotide sequence represented by SEQ ID NOS: 187583, 187584, 187585, 187586, 187587, 187588, 187589, 187590, 187591, 187592, 187593 were selected from the ORFs having the nucleotide sequence represented by SEQ ID NO: 174310.

[15956] The probes having the nucleotide sequence represented by SEQ ID NOS: 187594, 187595, 187596, 187597, 187598, 187599, 187600, 187601, 187602, 187603, 187604 were selected from the ORFs having the nucleotide sequence represented by SEQ ID NO: 174311.

[15957] The probes having the nucleotide sequence represented by SEQ ID NOS: 187605, 187606, 187607, 187608, 187609, 187610, 187611, 187612, 187613, 187614, 187615 were selected from the ORFs having the nucleotide sequence represented by SEQ ID NO: 174312.

[15958] The probes having the nucleotide sequence represented by SEQ ID NOS: 187616, 187617, 187618, 187619, 187620, 187621, 187622, 187623, 187624, 187625, 187626 were selected from the ORFs having the nucleotide sequence represented by SEQ ID NO: 174313.

[15959] The probes having the nucleotide sequence represented by SEQ ID NOS: 187627, 187628, 187629, 187630, 187631, 187632, 187633, 187634, 187635, 187636, 187637 were selected from the ORFs having the nucleotide sequence represented by SEQ ID NO: 174314.

[15960] The probes having the nucleotide sequence represented by SEQ ID NOS: 187638, 187639, 187640, 187641, 187642, 187643, 187644, 187645, 187646, 187647, 187648 were selected from the ORFs having the nucleotide sequence represented by SEQ ID NO: 174315.

[15961] The probes having the nucleotide sequence represented by SEQ ID NOS: 187649, 187650, 187651, 187652, 187653, 187654, 187655, 187656, 187657, 187658, 187659 were selected from the ORFs having the nucleotide sequence represented by SEQ ID NO: 174316.

[15962] The probes having the nucleotide sequence represented by SEQ ID NOS: 187660, 187661, 187662, 187663, 187664, 187665, 187666, 187667, 187668, 187669, 187670 were selected from the ORFs having the nucleotide sequence represented by SEQ ID NO: 174317.

[15963] The probes having the nucleotide sequence represented by SEQ ID NOS: 187671, 187672, 187673, 187674, 187675, 187676, 187677, 187678, 187679, 187680, 187681 were selected from the ORFs having the nucleotide sequence represented by SEQ ID NO: 174318.

[15964] The probes having the nucleotide sequence represented by SEQ ID NOS: 187682, 187683, 187684, 187685, 187686, 187687, 187688, 187689, 187690, 187691, 187692 were selected from the ORFs having the nucleotide sequence represented by SEQ ID NO: 174319.

[15965] The probes having the nucleotide sequence represented by SEQ ID NOS: 187693, 187694, 187695, 187696, 187697, 187698, 187699, 187700, 187701, 187702, 187703 were selected from the ORFs having the nucleotide sequence represented by SEQ ID NO: 174320.

[15966] The probes having the nucleotide sequence represented by SEQ ID NOS: 187704, 187705, 187706, 187707, 187708, 187709, 187710, 187711, 187712, 187713, 187714 were selected from the ORFs having the nucleotide sequence represented by SEQ ID NO: 174321.

[15967] The probes having the nucleotide sequence represented by SEQ ID NOS: 187715, 187716, 187717, 187718, 187719, 187720, 187721, 187722, 187723, 187724, 187725 were selected from the ORFs having the nucleotide sequence represented by SEQ ID NO: 174322.

[15968] The probes having the nucleotide sequence represented by SEQ ID NOS: 187726, 187727, 187728, 187729, 187730, 187731, 187732, 187733, 187734, 187735, 187736 were selected from the ORFs having the nucleotide sequence represented by SEQ ID NO: 174323.

[15969] The probes having the nucleotide sequence represented by SEQ ID NOS: 187737, 187738, 187739, 187740, 187741, 187742, 187743, 187744, 187745, 187746, 187747 were selected from the ORFs having the nucleotide sequence represented by SEQ ID NO: 174324.

[15970] The probes having the nucleotide sequence represented by SEQ ID NOS: 187748, 187749, 187750, 187751, 187752, 187753, 187754, 187755, 187756, 187757, 187758 were selected from the ORFs having the nucleotide sequence represented by SEQ ID NO: 174325.

[15971] The probes having the nucleotide sequence represented by SEQ ID NOS: 187759, 187760, 187761, 187762, 187763, 187764, 187765, 187766, 187767, 187768, 187769 were selected from the ORFs having the nucleotide sequence represented by SEQ ID NO: 174326.

[15972] The probes having the nucleotide sequence represented by SEQ ID NOS: 187770, 187771, 187772, 187773, 187774, 187775, 187776, 187777, 187778, 187779, 187780 were selected from the ORFs having the nucleotide sequence represented by SEQ ID NO: 174327.

[15973] The probes having the nucleotide sequence represented by SEQ ID NOS: 187781, 187782, 187783, 187784, 187785, 187786, 187787, 187788, 187789, 187790, 187791 were selected from the ORFs having the nucleotide sequence represented by SEQ ID NO: 174328.

[15974] The probes having the nucleotide sequence represented by SEQ ID NOS: 187792, 187793, 187794, 187795, 187796, 187797, 187798, 187799, 187800, 187801 were selected from the ORFs having the nucleotide sequence represented by SEQ ID NO: 174329.

[15975] The probes having the nucleotide sequence represented by SEQ ID NOS: 187802, 187803, 187804, 187805, 187806, 187807, 187808, 187809, 187810, 187811, 187812 were selected from the ORFs having the nucleotide sequence represented by SEQ ID NO: 174330.

[15976] The probes having the nucleotide sequence represented by SEQ ID NOS: 187813, 187814, 187815, 187816, 187817, 187818, 187819, 187820, 187821, 187822, 187823 were selected from the ORFs having the nucleotide sequence represented by SEQ ID NO: 174331.

[15977] The probes having the nucleotide sequence represented by SEQ ID NOS: 187824, 187825, 187826, 187827, 187828, 187829, 187830, 187831, 187832, 187833, 187834 were selected from the ORFs having the nucleotide sequence represented by SEQ ID NO: 174332.

[15978] The probes having the nucleotide sequence represented by SEQ ID NOS: 187835, 187836, 187837, 187838, 187839, 187840, 187841, 187842, 187843, 187844, 187845 were selected from the ORFs having the nucleotide sequence represented by SEQ ID NO: 174333.

[15979] The probes having the nucleotide sequence represented by SEQ ID NOS: 187846, 187847, 187848, 187849, 187850, 187851, 187852, 187853, 187854, 187855, 187856 were selected from the ORFs having the nucleotide sequence represented by SEQ ID NO: 174334.

[15980] The probes having the nucleotide sequence represented by SEQ ID NOS: 187857, 187858, 187859, 187860, 187861, 187862, 187863, 187864, 187865, 187866, 187867 were selected from the ORFs having the nucleotide sequence represented by SEQ ID NO: 174335.

[15981] The probes having the nucleotide sequence represented by SEQ ID NOS: 187868, 187869, 187870, 187871, 187872, 187873, 187874, 187875, 187876, 187877 were selected from the ORFs having the nucleotide sequence represented by SEQ ID NO: 174336.

[15982] The probes having the nucleotide sequence represented by SEQ ID NOS: 187878, 187879, 187880, 187881, 187882, 187883, 187884, 187885, 187886, 187887, 187888 were selected from the ORFs having the nucleotide sequence represented by SEQ ID NO: 174337.

[15983] The probes having the nucleotide sequence represented by SEQ ID NOS: 187889, 187890, 187891, 187892, 187893, 187894, 187895, 187896, 187897, 187898, 187899 were selected from the ORFs having the nucleotide sequence represented by SEQ ID NO: 174338.

[15984] The probes having the nucleotide sequence represented by SEQ ID NOS: 187900, 187901, 187902, 187903, 187904, 187905, 187906, 187907, 187908, 187909, 187910 were selected from the ORFs having the nucleotide sequence represented by SEQ ID NO: 174339.

[15985] The probes having the nucleotide sequence represented by SEQ ID NOS: 187911, 187912, 187913, 187914, 187915, 187916, 187917, 187918, 187919, 187920, 187921 were selected from the ORFs having the nucleotide sequence represented by SEQ ID NO: 174340.

[15986] The probes having the nucleotide sequence represented by SEQ ID NOS: 187922, 187923, 187924, 187925, 187926, 187927, 187928, 187929, 187930, 187931, 187932 were selected from the ORFs having the nucleotide sequence represented by SEQ ID NO: 174341.

[15987] The probes having the nucleotide sequence represented by SEQ ID NOS: 187933, 187934, 187935, 187936, 187937, 187938, 187939, 187940, 187941, 187942, 187943 were selected from the ORFs having the nucleotide sequence represented by SEQ ID NO: 174342.

[15988] The probes having the nucleotide sequence represented by SEQ ID NOS: 187944, 187945, 187946, 187947, 187948, 187949, 187950, 187951, 187952, 187953, 187954 were selected from the ORFs having the nucleotide sequence represented by SEQ ID NO: 174343.

[15989] The probes having the nucleotide sequence represented by SEQ ID NOS: 187955, 187956, 187957, 187958, 187959, 187960, 187961, 187962, 187963, 187964, 187965 were selected from the ORFs having the nucleotide sequence represented by SEQ ID NO: 174344.

[15990] The probes having the nucleotide sequence represented by SEQ ID NOS: 187966, 187967, 187968, 187969, 187970, 187971, 187972, 187973, 187974, 187975, 187976 were selected from the ORFs having the nucleotide sequence represented by SEQ ID NO: 174345.

[15991] The probes having the nucleotide sequence represented by SEQ ID NOS: 187977, 187978, 187979, 187980, 187981, 187982, 187983, 187984, 187985, 187986, 187987 were selected from the ORFs having the nucleotide sequence represented by SEQ ID NO: 174346.

[15992] The probes having the nucleotide sequence represented by SEQ ID NOS: 187988, 187989, 187990, 187991, 187992, 187993, 187994, 187995, 187996, 187997, 187998 were selected from the ORFs having the nucleotide sequence represented by SEQ ID NO: 174347.

[15993] The probes having the nucleotide sequence represented by SEQ ID NOS: 187999, 188000, 188001, 188002, 188003, 188004, 188005, 188006, 188007, 188008, 188009 were selected from the ORFs having the nucleotide sequence represented by SEQ ID NO: 174348.

[15994] The probes having the nucleotide sequence represented by SEQ ID NOS: 188010, 188011, 188012, 188013, 188014, 188015, 188016, 188017, 188018, 188019, 188020 were selected from the ORFs having the nucleotide sequence represented by SEQ ID NO: 174349.

[15995] The probes having the nucleotide sequence represented by SEQ ID NOS: 188021, 188022, 188023, 188024, 188025, 188026, 188027, 188028, 188029, 188030, 188031 were selected from the ORFs having the nucleotide sequence represented by SEQ ID NO: 174350.

[15996] The probes having the nucleotide sequence represented by SEQ ID NOS: 188032, 188033, 188034, 188035, 188036, 188037, 188038, 188039, 188040, 188041, 188042 were selected from the ORFs having the nucleotide sequence represented by SEQ ID NO: 174351.

[15997] The probes having the nucleotide sequence represented by SEQ ID NOS: 188043, 188044, 188045, 188046, 188047, 188048, 188049, 188050, 188051, 188052, 188053 were selected from the ORFs having the nucleotide sequence represented by SEQ ID NO: 174352.

[15998] The probes having the nucleotide sequence represented by SEQ ID NOS: 188054, 188055, 188056, 188057, 188058, 188059, 188060, 188061, 188062, 188063, 188064 were selected from the ORFs having the nucleotide sequence represented by SEQ ID NO: 174353.

[15999] The probes having the nucleotide sequence represented by SEQ ID NOS: 188065, 188066, 188067, 188068, 188069, 188070, 188071, 188072, 188073, 188074, 188075 were selected from the ORFs having the nucleotide sequence represented by SEQ ID NO: 174354.

[16000] The probes having the nucleotide sequence represented by SEQ ID NOS: 188076, 188077, 188078, 188079, 188080, 188081, 188082, 188083, 188084, 188085, 188086 were selected from the ORFs having the nucleotide sequence represented by SEQ ID NO: 174355.

[16001] The probes having the nucleotide sequence represented by SEQ ID NOS: 188087, 188088, 188089, 188090, 188091, 188092, 188093, 188094, 188095, 188096, 188097 were selected from the ORFs having the nucleotide sequence represented by SEQ ID NO: 174356.

[16002] The probes having the nucleotide sequence represented by SEQ ID NOS: 188098, 188099, 188100, 188101, 188102, 188103, 188104, 188105, 188106, 188107, 188108 were selected from the ORFs having the nucleotide sequence represented by SEQ ID NO: 174357.

[16003] The probes having the nucleotide sequence represented by SEQ ID NOS: 188109, 188110, 188111, 188112, 188113, 188114, 188115, 188116, 188117, 188118, 188119 were selected from the ORFs having the nucleotide sequence represented by SEQ ID NO: 174358.

[16004] The probes having the nucleotide sequence represented by SEQ ID NOS: 188120, 188121, 188122, 188123, 188124, 188125, 188126, 188127, 188128, 188129, 188130 were selected from the ORFs having the nucleotide sequence represented by SEQ ID NO: 174359.

[16005] The probes having the nucleotide sequence represented by SEQ ID NOS: 188131, 188132, 188133, 188134, 188135, 188136, 188137, 188138, 188139, 188140, 188141 were selected from the ORFs having the nucleotide sequence represented by SEQ ID NO: 174360.

[16006] The probes having the nucleotide sequence represented by SEQ ID NOS: 188142, 188143, 188144, 188145, 188146, 188147, 188148, 188149, 188150, 188151, 188152 were selected from the ORFs having the nucleotide sequence represented by SEQ ID NO: 174361.

[16007] The probes having the nucleotide sequence represented by SEQ ID NOS: 188153, 188154, 188155, 188156, 188157, 188158, 188159, 188160, 188161, 188162, 188163 were selected from the ORFs having the nucleotide sequence represented by SEQ ID NO: 174362.

[16008] The probes having the nucleotide sequence represented by SEQ ID NOS: 188164, 188165, 188166, 188167, 188168, 188169, 188170, 188171, 188172, 188173, 188174 were selected from the ORFs having the nucleotide sequence represented by SEQ ID NO: 174363.

[16009] The probes having the nucleotide sequence represented by SEQ ID NOS: 188175, 188176, 188177, 188178, 188179, 188180, 188181, 188182, 188183, 188184, 188185 were selected from the ORFs having the nucleotide sequence represented by SEQ ID NO: 174364.

[16010] The probes having the nucleotide sequence represented by SEQ ID NOS: 188186, 188187, 188188, 188189, 188190, 188191, 188192, 188193, 188194, 188195, 188196 were selected from the ORFs having the nucleotide sequence represented by SEQ ID NO: 174365.

[16011] The probes having the nucleotide sequence represented by SEQ ID NOS: 188197, 188198, 188199, 188200, 188201, 188202, 188203, 188204, 188205, 188206, 188207 were selected from the ORFs having the nucleotide sequence represented by SEQ ID NO: 174366.

[16012] The probes having the nucleotide sequence represented by SEQ ID NOS: 188208, 188209, 188210, 188211, 188212, 188213, 188214, 188215, 188216, 188217, 188218 were selected from the ORFs having the nucleotide sequence represented by SEQ ID NO: 174367.

[16013] The probes having the nucleotide sequence represented by SEQ ID NOS: 188219, 188220, 188221, 188222, 188223, 188224, 188225, 188226, 188227, 188228, 188229 were selected from the ORFs having the nucleotide sequence represented by SEQ ID NO: 174368.

[16014] The probes having the nucleotide sequence represented by SEQ ID NOS: 188230, 188231, 188232, 188233, 188234, 188235, 188236, 188237, 188238, 188239, 188240 were selected from the ORFs having the nucleotide sequence represented by SEQ ID NO: 174369.

[16015] The probes having the nucleotide sequence represented by SEQ ID NOS: 188241, 188242, 188243, 188244, 188245, 188246, 188247, 188248, 188249, 188250, 188251 were selected from the ORFs having the nucleotide sequence represented by SEQ ID NO: 174370.

[16016] The probes having the nucleotide sequence represented by SEQ ID NOS: 188252, 188253, 188254, 188255, 188256, 188257, 188258, 188259, 188260, 188261, 188262 were selected from the ORFs having the nucleotide sequence represented by SEQ ID NO: 174371.

[16017] The probes having the nucleotide sequence represented by SEQ ID NOS: 188263, 188264, 188265, 188266, 188267, 188268, 188269, 188270, 188271, 188272, 188273 were selected from the ORFs having the nucleotide sequence represented by SEQ ID NO: 174372.

[16018] The probes having the nucleotide sequence represented by SEQ ID NOS: 188274, 188275, 188276, 188277, 188278, 188279, 188280, 188281, 188282, 188283, 188284 were selected from the ORFs having the nucleotide sequence represented by SEQ ID NO: 174373.

[16019] The probes having the nucleotide sequence represented by SEQ ID NOS: 188285, 188286, 188287, 188288, 188289, 188290, 188291, 188292, 188293, 188294, 188295 were selected from the ORFs having the nucleotide sequence represented by SEQ ID NO: 174374.

[16020] The probes having the nucleotide sequence represented by SEQ ID NOS: 188296, 188297, 188298, 188299, 188300, 188301, 188302, 188303, 188304, 188305, 188306 were selected from the ORFs having the nucleotide sequence represented by SEQ ID NO: 174375.

[16021] The probes having the nucleotide sequence represented by SEQ ID NOS: 188307, 188308, 188309, 188310, 188311, 188312, 188313, 188314, 188315, 188316, 188317 were selected from the ORFs having the nucleotide sequence represented by SEQ ID NO: 174376.

[16022] The probes having the nucleotide sequence represented by SEQ ID NOS: 188318, 188319, 188320, 188321, 188322, 188323, 188324, 188325, 188326, 188327, 188328 were selected from the ORFs having the nucleotide sequence represented by SEQ ID NO: 174377.

[16023] The probes having the nucleotide sequence represented by SEQ ID NOS: 188329, 188330, 188331, 188332, 188333, 188334, 188335, 188336, 188337, 188338, 188339 were selected from the ORFs having the nucleotide sequence represented by SEQ ID NO: 174378.

[16024] The probes having the nucleotide sequence represented by SEQ ID NOS: 188340, 188341, 188342, 188343, 188344, 188345, 188346, 188347, 188348, 188349, 188350 were selected from the ORFs having the nucleotide sequence represented by SEQ ID NO: 174379.

[16025] The probes having the nucleotide sequence represented by SEQ ID NOS: 188351, 188352, 188353, 188354, 188355, 188356, 188357, 188358, 188359, 188360, 188361 were selected from the ORFs having the nucleotide sequence represented by SEQ ID NO: 174380.

[16026] The probes having the nucleotide sequence represented by SEQ ID NOS: 188362, 188363, 188364, 188365, 188366, 188367, 188368, 188369 were selected from the ORFs having the nucleotide sequence represented by SEQ ID NO: 174381.

[16027] The probes having the nucleotide sequence represented by SEQ ID NOS: 188370, 188371, 188372, 188373, 188374, 188375, 188376, 188377, 188378, 188379, 188380 were selected from the ORFs having the nucleotide sequence represented by SEQ ID NO: 174382.

[16028] The probes having the nucleotide sequence represented by SEQ ID NOS: 188381, 188382, 188383, 188384, 188385, 188386, 188387, 188388, 188389, 188390, 188391 were selected from the ORFs having the nucleotide sequence represented by SEQ ID NO: 174383.

[16029] The probes having the nucleotide sequence represented by SEQ ID NOS: 188392, 188393, 188394, 188395, 188396, 188397, 188398, 188399, 188400, 188401, 188402 were selected from the ORFs having the nucleotide sequence represented by SEQ ID NO: 174384.

[16030] The probes having the nucleotide sequence represented by SEQ ID NOS: 188403, 188404, 188405, 188406, 188407, 188408, 188409, 188410, 188411, 188412, 188413 were selected from the ORFs having the nucleotide sequence represented by SEQ ID NO: 174385.

[16031] The probes having the nucleotide sequence represented by SEQ ID NOS: 188414, 188415, 188416, 188417, 188418, 188419, 188420, 188421, 188422, 188423, 188424 were selected from the ORFs having the nucleotide sequence represented by SEQ ID NO: 174386.

[16032] The probes having the nucleotide sequence represented by SEQ ID NOS: 188425, 188426, 188427, 188428, 188429, 188430, 188431, 188432, 188433, 188434, 188435 were selected from the ORFs having the nucleotide sequence represented by SEQ ID NO: 174387.

[16033] The probes having the nucleotide sequence represented by SEQ ID NOS: 188436, 188437, 188438, 188439, 188440, 188441, 188442, 188443, 188444, 188445, 188446 were selected from the ORFs having the nucleotide sequence represented by SEQ ID NO: 174388.

[16034] The probes having the nucleotide sequence represented by SEQ ID NOS: 188447, 188448, 188449, 188450, 188451, 188452, 188453, 188454, 188455, 188456, 188457 were selected from the ORFs having the nucleotide sequence represented by SEQ ID NO: 174389.

[16035] The probes having the nucleotide sequence represented by SEQ ID NOS: 188458, 188459, 188460, 188461, 188462, 188463, 188464, 188465, 188466, 188467, 188468 were selected from the ORFs having the nucleotide sequence represented by SEQ ID NO: 174390.

[16036] The probes having the nucleotide sequence represented by SEQ ID NOS: 188469, 188470, 188471, 188472, 188473, 188474, 188475, 188476, 188477, 188478, 188479 were selected from the ORFs having the nucleotide sequence represented by SEQ ID NO: 174391.

[16037] The probes having the nucleotide sequence represented by SEQ ID NOS: 188480, 188481, 188482, 188483, 188484, 188485, 188486, 188487, 188488, 188489, 188490 were selected from the ORFs having the nucleotide sequence represented by SEQ ID NO: 174392.

[16038] The probes having the nucleotide sequence represented by SEQ ID NOS: 188491, 188492, 188493, 188494, 188495, 188496, 188497, 188498, 188499, 188500, 188501 were selected from the ORFs having the nucleotide sequence represented by SEQ ID NO: 174393.

[16039] The probes having the nucleotide sequence represented by SEQ ID NOS: 188502, 188503, 188504, 188505, 188506, 188507, 188508, 188509, 188510, 188511, 188512 were selected from the ORFs having the nucleotide sequence represented by SEQ ID NO: 174394.

[16040] The probes having the nucleotide sequence represented by SEQ ID NOS: 188513, 188514, 188515, 188516, 188517, 188518, 188519, 188520, 188521, 188522, 188523 were selected from the ORFs having the nucleotide sequence represented by SEQ ID NO: 174395.

[16041] The probes having the nucleotide sequence represented by SEQ ID NOS: 188524, 188525, 188526, 188527, 188528, 188529, 188530, 188531, 188532, 188533, 188534 were selected from the ORFs having the nucleotide sequence represented by SEQ ID NO: 174396.

[16042] The probes having the nucleotide sequence represented by SEQ ID NOS: 188535, 188536, 188537, 188538, 188539, 188540, 188541, 188542, 188543, 188544, 188545 were selected from the ORFs having the nucleotide sequence represented by SEQ ID NO: 174397.

[16043] The probes having the nucleotide sequence represented by SEQ ID NOS: 188546, 188547, 188548, 188549, 188550, 188551, 188552, 188553, 188554, 188555, 188556 were selected from the ORFs having the nucleotide sequence represented by SEQ ID NO: 174398.

[16044] The probes having the nucleotide sequence represented by SEQ ID NOS: 188557, 188558, 188559, 188560, 188561, 188562, 188563, 188564, 188565, 188566, 188567 were selected from the ORFs having the nucleotide sequence represented by SEQ ID NO: 174399.

[16045] The probes having the nucleotide sequence represented by SEQ ID NOS: 188568, 188569, 188570, 188571, 188572, 188573, 188574, 188575, 188576, 188577, 188578 were selected from the ORFs having the nucleotide sequence represented by SEQ ID NO: 174400.

[16046] The probes having the nucleotide sequence represented by SEQ ID NOS: 188579, 188580, 188581, 188582, 188583, 188584, 188585, 188586, 188587, 188588, 188589 were selected from the ORFs having the nucleotide sequence represented by SEQ ID NO: 174401.

[16047] The probes having the nucleotide sequence represented by SEQ ID NOS: 188590, 188591, 188592, 188593, 188594, 188595, 188596, 188597, 188598, 188599, 188600 were selected from the ORFs having the nucleotide sequence represented by SEQ ID NO: 174402.

[16048] The probes having the nucleotide sequence represented by SEQ ID NOS: 188601, 188602, 188603, 188604, 188605, 188606, 188607, 188608, 188609, 188610, 188611 were selected from the ORFs having the nucleotide sequence represented by SEQ ID NO: 174403.

[16049] The probes having the nucleotide sequence represented by SEQ ID NOS: 188612, 188613, 188614, 188615, 188616, 188617, 188618, 188619, 188620, 188621, 188622 were selected from the ORFs having the nucleotide sequence represented by SEQ ID NO: 174404.

[16050] The probes having the nucleotide sequence represented by SEQ ID NOS: 188623, 188624, 188625, 188626, 188627, 188628, 188629, 188630, 188631, 188632, 188633 were selected from the ORFs having the nucleotide sequence represented by SEQ ID NO: 174405.

[16051] The probes having the nucleotide sequence represented by SEQ ID NOS: 188634, 188635, 188636, 188637, 188638, 188639, 188640, 188641, 188642, 188643, 188644 were selected from the ORFs having the nucleotide sequence represented by SEQ ID NO: 174406.

[16052] The probes having the nucleotide sequence represented by SEQ ID NOS: 188645, 188646, 188647, 188648, 188649, 188650, 188651, 188652, 188653, 188654, 188655 were selected from the ORFs having the nucleotide sequence represented by SEQ ID NO: 174407.

[16053] The probes having the nucleotide sequence represented by SEQ ID NOS: 188656, 188657, 188658, 188659, 188660, 188661, 188662, 188663, 188664, 188665, 188666 were selected from the ORFs having the nucleotide sequence represented by SEQ ID NO: 174408.

[16054] The probes having the nucleotide sequence represented by SEQ ID NOS: 188667, 188668, 188669, 188670, 188671, 188672, 188673, 188674, 188675, 188676, 188677 were selected from the ORFs having the nucleotide sequence represented by SEQ ID NO: 174409.

[16055] The probes having the nucleotide sequence represented by SEQ ID NOS: 188678, 188679, 188680, 188681, 188682, 188683, 188684, 188685, 188686, 188687, 188688 were selected from the ORFs having the nucleotide sequence represented by SEQ ID NO: 174410.

[16056] The probes having the nucleotide sequence represented by SEQ ID NOS: 188689, 188690, 188691, 188692, 188693, 188694, 188695, 188696, 188697, 188698, 188699 were selected from the ORFs having the nucleotide sequence represented by SEQ ID NO: 174411.

[16057] The probes having the nucleotide sequence represented by SEQ ID NOS: 188700, 188701, 188702, 188703, 188704, 188705, 188706, 188707, 188708, 188709, 188710 were selected from the ORFs having the nucleotide sequence represented by SEQ ID NO: 174412.

[16058] The probes having the nucleotide sequence represented by SEQ ID NOS: 188711, 188712, 188713, 188714, 188715, 188716, 188717, 188718, 188719, 188720, 188721 were selected from the ORFs having the nucleotide sequence represented by SEQ ID NO: 174413.

[16059] The probes having the nucleotide sequence represented by SEQ ID NOS: 188722, 188723, 188724, 188725, 188726, 188727, 188728, 188729, 188730, 188731, 188732 were selected from the ORFs having the nucleotide sequence represented by SEQ ID NO: 174414.

[16060] The probes having the nucleotide sequence represented by SEQ ID NOS: 188733, 188734, 188735, 188736, 188737, 188738, 188739, 188740, 188741, 188742, 188743 were selected from the ORFs having the nucleotide sequence represented by SEQ ID NO: 174415.

[16061] The probes having the nucleotide sequence represented by SEQ ID NOS: 188744, 188745, 188746, 188747, 188748, 188749, 188750, 188751, 188752, 188753, 188754 were selected from the ORFs having the nucleotide sequence represented by SEQ ID NO: 174416.

[16062] The probes having the nucleotide sequence represented by SEQ ID NOS: 188755, 188756, 188757, 188758, 188759, 188760, 188761, 188762, 188763, 188764, 188765 were selected from the ORFs having the nucleotide sequence represented by SEQ ID NO: 174417.

[16063] The probes having the nucleotide sequence represented by SEQ ID NOS: 188766, 188767, 188768, 188769, 188770, 188771, 188772, 188773, 188774, 188775, 188776 were selected from the ORFs having the nucleotide sequence represented by SEQ ID NO: 174418.

[16064] The probes having the nucleotide sequence represented by SEQ ID NOS: 188777, 188778, 188779, 188780, 188781, 188782, 188783, 188784, 188785, 188786, 188787 were selected from the ORFs having the nucleotide sequence represented by SEQ ID NO: 174419.

[16065] The probes having the nucleotide sequence represented by SEQ ID NOS: 188788, 188789, 188790, 188791, 188792, 188793, 188794, 188795, 188796, 188797, 188798 were selected from the ORFs having the nucleotide sequence represented by SEQ ID NO: 174420.

[16066] The probes having the nucleotide sequence represented by SEQ ID NOS: 188799, 188800, 188801, 188802, 188803, 188804, 188805, 188806, 188807, 188808, 188809 were selected from the ORFs having the nucleotide sequence represented by SEQ ID NO: 174421.

[16067] The probes having the nucleotide sequence represented by SEQ ID NOS: 188810, 188811, 188812, 188813, 188814, 188815, 188816, 188817, 188818, 188819, 188820 were selected from the ORFs having the nucleotide sequence represented by SEQ ID NO: 174422.

[16068] The probes having the nucleotide sequence represented by SEQ ID NOS: 188821, 188822, 188823, 188824, 188825, 188826, 188827, 188828, 188829, 188830, 188831 were selected from the ORFs having the nucleotide sequence represented by SEQ ID NO: 174423.

[16069] The probes having the nucleotide sequence represented by SEQ ID NOS: 188832, 188833, 188834, 188835, 188836, 188837, 188838, 188839, 188840, 188841, 188842 were selected from the ORFs having the nucleotide sequence represented by SEQ ID NO: 174424.

[16070] The probes having the nucleotide sequence represented by SEQ ID NOS: 188843, 188844, 188845, 188846, 188847, 188848, 188849, 188850, 188851, 188852, 188853 were selected from the ORFs having the nucleotide sequence represented by SEQ ID NO: 174425.

[16071] The probes having the nucleotide sequence represented by SEQ ID NOS: 188854, 188855, 188856, 188857, 188858, 188859, 188860, 188861, 188862, 188863, 188864 were selected from the ORFs having the nucleotide sequence represented by SEQ ID NO: 174426.

[16072] The probes having the nucleotide sequence represented by SEQ ID NOS: 188865, 188866, 188867, 188868, 188869, 188870, 188871, 188872, 188873, 188874, 188875 were selected from the ORFs having the nucleotide sequence represented by SEQ ID NO: 174427.

[16073] The probes having the nucleotide sequence represented by SEQ ID NOS: 188876, 188877, 188878, 188879, 188880, 188881, 188882, 188883, 188884, 188885, 188886 were selected from the ORFs having the nucleotide sequence represented by SEQ ID NO: 174428.

[16074] The probes having the nucleotide sequence represented by SEQ ID NOS: 188887, 188888, 188889, 188890, 188891, 188892, 188893, 188894, 188895, 188896, 188897 were selected from the ORFs having the nucleotide sequence represented by SEQ ID NO: 174429.

[16075] The probes having the nucleotide sequence represented by SEQ ID NOS: 188898, 188899, 188900, 188901, 188902, 188903, 188904, 188905, 188906, 188907, 188908 were selected from the ORFs having the nucleotide sequence represented by SEQ ID NO: 174430.

[16076] The probes having the nucleotide sequence represented by SEQ ID NOS: 188909, 188910, 188911, 188912, 188913, 188914, 188915, 188916, 188917, 188918, 188919 were selected from the ORFs having the nucleotide sequence represented by SEQ ID NO: 174431.

[16077] The probes having the nucleotide sequence represented by SEQ ID NOS: 188920, 188921, 188922, 188923, 188924, 188925, 188926, 188927, 188928, 188929, 188930 were selected from the ORFs having the nucleotide sequence represented by SEQ ID NO: 174432.

[16078] The probes having the nucleotide sequence represented by SEQ ID NOS: 188931, 188932, 188933, 188934, 188935, 188936, 188937, 188938, 188939, 188940, 188941 were selected from the ORFs having the nucleotide sequence represented by SEQ ID NO: 174433.

[16079] The probes having the nucleotide sequence represented by SEQ ID NOS: 188942, 188943, 188944, 188945, 188946, 188947, 188948, 188949, 188950, 188951, 188952 were selected from the ORFs having the nucleotide sequence represented by SEQ ID NO: 174434.

[16080] The probes having the nucleotide sequence represented by SEQ ID NOS: 188953, 188954, 188955, 188956, 188957, 188958, 188959, 188960, 188961, 188962, 188963 were selected from the ORFs having the nucleotide sequence represented by SEQ ID NO: 174435.

[16081] The probes having the nucleotide sequence represented by SEQ ID NOS: 188964, 188965, 188966, 188967, 188968, 188969, 188970, 188971, 188972, 188973, 188974 were selected from the ORFs having the nucleotide sequence represented by SEQ ID NO: 174436.

[16082] The probes having the nucleotide sequence represented by SEQ ID NOS: 188975, 188976, 188977, 188978, 188979, 188980, 188981, 188982, 188983, 188984, 188985 were selected from the ORFs having the nucleotide sequence represented by SEQ ID NO: 174437.

[16083] The probes having the nucleotide sequence represented by SEQ ID NOS: 188986, 188987, 188988, 188989, 188990, 188991, 188992, 188993, 188994, 188995, 188996 were selected from the ORFs having the nucleotide sequence represented by SEQ ID NO: 174438.

[16084] The probes having the nucleotide sequence represented by SEQ ID NOS: 188997, 188998, 188999, 189000, 189001, 189002, 189003, 189004, 189005, 189006, 189007 were selected from the ORFs having the nucleotide sequence represented by SEQ ID NO: 174439.

[16085] The probes having the nucleotide sequence represented by SEQ ID NOS: 189008, 189009, 189010, 189011, 189012, 189013, 189014, 189015, 189016, 189017, 189018 were selected from the ORFs having the nucleotide sequence represented by SEQ ID NO: 174440.

[16086] The probes having the nucleotide sequence represented by SEQ ID NOS: 189019, 189020, 189021, 189022, 189023, 189024, 189025, 189026, 189027, 189028, 189029 were selected from the ORFs having the nucleotide sequence represented by SEQ ID NO: 174441.

[16087] The probes having the nucleotide sequence represented by SEQ ID NOS: 189030, 189031, 189032, 189033, 189034, 189035, 189036, 189037, 189038, 189039, 189040 were selected from the ORFs having the nucleotide sequence represented by SEQ ID NO: 174442.

[16088] The probes having the nucleotide sequence represented by SEQ ID NOS: 189041, 189042, 189043, 189044, 189045, 189046, 189047, 189048, 189049, 189050, 189051 were selected from the ORFs having the nucleotide sequence represented by SEQ ID NO: 174443.

[16089] The probes having the nucleotide sequence represented by SEQ ID NOS: 189052, 189053, 189054, 189055, 189056, 189057, 189058, 189059, 189060, 189061, 189062 were selected from the ORFs having the nucleotide sequence represented by SEQ ID NO: 174444.

[16090] The probes having the nucleotide sequence represented by SEQ ID NOS: 189063, 189064, 189065, 189066, 189067, 189068, 189069, 189070, 189071, 189072, 189073 were selected from the ORFs having the nucleotide sequence represented by SEQ ID NO: 174445.

[16091] The probes having the nucleotide sequence represented by SEQ ID NOS: 189074, 189075, 189076, 189077, 189078, 189079, 189080, 189081, 189082, 189083, 189084 were selected from the ORFs having the nucleotide sequence represented by SEQ ID NO: 174446.

[16092] The probes having the nucleotide sequence represented by SEQ ID NOS: 189085, 189086, 189087, 189088, 189089, 189090, 189091, 189092, 189093, 189094, 189095 were selected from the ORFs having the nucleotide sequence represented by SEQ ID NO: 174447.

[16093] The probes having the nucleotide sequence represented by SEQ ID NOS: 189096, 189097, 189098, 189099, 189100, 189101, 189102, 189103, 189104, 189105, 189106 were selected from the ORFs having the nucleotide sequence represented by SEQ ID NO: 174448.

[16094] The probes having the nucleotide sequence represented by SEQ ID NOS: 189107, 189108, 189109, 189110, 189111, 189112, 189113, 189114, 189115, 189116, 189117 were selected from the ORFs having the nucleotide sequence represented by SEQ ID NO: 174449.

[16095] The probes having the nucleotide sequence represented by SEQ ID NOS: 189118, 189119, 189120, 189121, 189122, 189123, 189124, 189125, 189126, 189127, 189128 were selected from the ORFs having the nucleotide sequence represented by SEQ ID NO: 174450.

[16096] The probes having the nucleotide sequence represented by SEQ ID NOS: 189129, 189130, 189131, 189132, 189133, 189134, 189135, 189136, 189137, 189138, 189139 were selected from the ORFs having the nucleotide sequence represented by SEQ ID NO: 174451.

[16097] The probes having the nucleotide sequence represented by SEQ ID NOS:. 189140, 189141, 189142, 189143, 189144, 189145, 189146, 189147, 189148, 189149, 189150 were selected from the ORFs having the nucleotide sequence represented by SEQ ID NO: 174452.

[16098] The probes having the nucleotide sequence represented by SEQ ID NOS: 189151, 189152, 189153, 189154, 189155, 189156, 189157, 189158, 189159, 189160, 189161 were selected from the ORFs having the nucleotide sequence represented by SEQ ID NO: 174453.

[16099] The probes having the nucleotide sequence represented by SEQ ID NOS: 189162, 189163, 189164, 189165, 189166, 189167, 189168, 189169, 189170, 189171, 189172 were selected from the ORFs having the nucleotide sequence represented by SEQ ID NO: 174454.

[16100] The probes having the nucleotide sequence represented by SEQ ID NOS: 189173, 189174, 189175, 189176, 189177, 189178, 189179, 189180, 189181, 189182, 189183 were selected from the ORFs having the nucleotide sequence represented by SEQ ID NO: 174455.

[16101] The probes having the nucleotide sequence represented by SEQ ID NOS: 189184, 189185, 189186, 189187, 189188, 189189, 189190, 189191, 189192, 189193, 189194 were selected from the ORFs having the nucleotide sequence represented by SEQ ID NO: 174456.

[16102] The probes having the nucleotide sequence represented by SEQ ID NOS: 189195, 189196, 189197, 189198, 189199, 189200, 189201, 189202, 189203, 189204, 189205 were selected from the ORFs having the nucleotide sequence represented by SEQ ID NO: 174457.

[16103] The probes having the nucleotide sequence represented by SEQ ID NOS: 189206, 189207, 189208, 189209, 189210, 189211, 189212, 189213, 189214, 189215, 189216 were selected from the ORFs having the nucleotide sequence represented by SEQ ID NO: 174458.

[16104] The probes having the nucleotide sequence represented by SEQ ID NOS: 189217, 189218, 189219, 189220, 189221, 189222, 189223, 189224, 189225, 189226, 189227 were selected from the ORFs having the nucleotide sequence represented by SEQ ID NO: 174459.

[16105] The probes having the nucleotide sequence represented by SEQ ID NOS: 189228, 189229, 189230, 189231, 189232, 189233, 189234, 189235, 189236, 189237, 189238 were selected from the ORFs having the nucleotide sequence represented by SEQ ID NO: 174460.

[16106] The probes having the nucleotide sequence represented by SEQ ID NOS: 189239, 189240, 189241, 189242, 189243, 189244, 189245, 189246, 189247, 189248, 189249 were selected from the ORFs having the nucleotide sequence represented by SEQ ID NO: 174461.

[16107] The probes having the nucleotide sequence represented by SEQ ID NOS: 189250, 189251, 189252, 189253, 189254, 189255, 189256, 189257, 189258, 189259, 189260 were selected from the ORFs having the nucleotide sequence represented by SEQ ID NO: 174462.

[16108] The probes having the nucleotide sequence represented by SEQ ID NOS: 189261, 189262, 189263, 189264, 189265, 189266, 189267, 189268, 189269, 189270, 189271 were selected from the ORFs having the nucleotide sequence represented by SEQ ID NO: 174463.

[16109] The probes having the nucleotide sequence represented by SEQ ID NOS: 189272, 189273, 189274, 189275, 189276, 189277, 189278, 189279, 189280, 189281, 189282 were selected from the ORFs having the nucleotide sequence represented by SEQ ID NO: 174464.

[16110] The probes having the nucleotide sequence represented by SEQ ID NOS: 189283, 189284, 189285, 189286, 189287, 189288, 189289, 189290, 189291, 189292, 189293 were selected from the ORFs having the nucleotide sequence represented by SEQ ID NO: 174465.

[16111] The probes having the nucleotide sequence represented by SEQ ID NOS: 189294, 189295, 189296, 189297, 189298, 189299, 189300, 189301, 189302, 189303, 189304 were selected from the ORFs having the nucleotide sequence represented by SEQ ID NO: 174466.

[16112] The probes having the nucleotide sequence represented by SEQ ID NOS: 189305, 189306, 189307, 189308, 189309, 189310, 189311, 189312, 189313, 189314, 189315 were selected from the ORFs having the nucleotide sequence represented by SEQ ID NO: 174467.

[16113] The probes having the nucleotide sequence represented by SEQ ID NOS: 189316, 189317, 189318, 189319, 189320, 189321, 189322, 189323, 189324, 189325, 189326 were selected from the ORFs having the nucleotide sequence represented by SEQ ID NO: 174468.

[16114] The probes having the nucleotide sequence represented by SEQ ID NOS: 189327, 189328, 189329, 189330, 189331, 189332, 189333, 189334, 189335, 189336, 189337 were selected from the ORFs having the nucleotide sequence represented by SEQ ID NO: 174469.

[16115] The probes having the nucleotide sequence represented by SEQ ID NOS: 189338, 189339, 189340, 189341, 189342, 189343, 189344, 189345, 189346, 189347, 189348 were selected from the ORFs having the nucleotide sequence represented by SEQ ID NO: 174470.

[16116] The probes having the nucleotide sequence represented by SEQ ID NOS: 189349, 189350, 189351, 189352, 189353, 189354, 189355, 189356, 189357, 189358, 189359 were selected from the ORFs having the nucleotide sequence represented by SEQ ID NO: 174471.

[16117] The probes having the nucleotide sequence represented by SEQ ID NOS: 189360, 189361, 189362, 189363, 189364, 189365, 189366, 189367, 189368, 189369, 189370 were selected from the ORFs having the nucleotide sequence represented by SEQ ID NO: 174472.

[16118] The probes having the nucleotide sequence represented by SEQ ID NOS: 189371, 189372, 189373, 189374, 189375, 189376, 189377, 189378, 189379, 189380, 189381 were selected from the ORFs having the nucleotide sequence represented by SEQ ID NO: 174473.

[16119] The probes having the nucleotide sequence represented by SEQ ID NOS: 189382, 189383, 189384, 189385, 189386, 189387, 189388, 189389, 189390, 189391, 189392 were selected from the ORFs having the nucleotide sequence represented by SEQ ID NO: 174474.

[16120] The probes having the nucleotide sequence represented by SEQ ID NOS: 189393, 189394, 189395, 189396, 189397, 189398, 189399, 189400, 189401, 189402, 189403 were selected from the ORFs having the nucleotide sequence represented by SEQ ID NO: 174475.

[16121] The probes having the nucleotide sequence represented by SEQ ID NOS: 189404, 189405, 189406, 189407, 189408, 189409, 189410, 189411, 189412, 189413, 189414 were selected from the ORFs having the nucleotide sequence represented by SEQ ID NO: 174476.

[16122] The probes having the nucleotide sequence represented by SEQ ID NOS: 189415, 189416, 189417, 189418, 189419, 189420, 189421, 189422, 189423, 189424, 189425 were selected from the ORFs having the nucleotide sequence represented by SEQ ID NO: 174477.

[16123] The probes having the nucleotide sequence represented by SEQ ID NOS: 189426, 189427, 189428, 189429, 189430, 189431, 189432, 189433, 189434, 189435, 189436 were selected from the ORFs having the nucleotide sequence represented by SEQ ID NO: 174478.

[16124] The probes having the nucleotide sequence represented by SEQ ID NOS: 189437, 189438, 189439, 189440, 189441, 189442, 189443, 189444, 189445, 189446 were selected from the ORFs having the nucleotide sequence represented by SEQ ID NO: 174479.

[16125] The probes having the nucleotide sequence represented by SEQ ID NOS: 189447, 189448, 189449, 189450, 189451, 189452, 189453, 189454, 189455, 189456, 189457 were selected from the ORFs having the nucleotide sequence represented by SEQ ID NO: 174480.

[16126] The probes having the nucleotide sequence represented by SEQ ID NOS: 189458, 189459, 189460, 189461, 189462, 189463, 189464, 189465, 189466, 189467, 189468 were selected from the ORFs having the nucleotide sequence represented by SEQ ID NO: 174481.

[16127] The probes having the nucleotide sequence represented by SEQ ID NOS: 189469, 189470, 189471, 189472, 189473, 189474, 189475, 189476, 189477, 189478, 189479 were selected from the ORFs having the nucleotide sequence represented by SEQ ID NO: 174482.

[16128] The probes having the nucleotide sequence represented by SEQ ID NOS: 189480, 189481, 189482, 189483, 189484, 189485, 189486, 189487, 189488, 189489, 189490 were selected from the ORFs having the nucleotide sequence represented by SEQ ID NO: 174483.

[16129] The probes having the nucleotide sequence represented by SEQ ID NOS: 189491, 189492, 189493, 189494, 189495, 189496, 189497, 189498, 189499, 189500, 189501 were selected from the ORFs having the nucleotide sequence represented by SEQ ID NO: 174484.

[16130] The probes having the nucleotide sequence represented by SEQ ID NOS: 189502, 189503, 189504, 189505, 189506, 189507, 189508, 189509, 189510, 189511, 189512 were selected from the ORFs having the nucleotide sequence represented by SEQ ID NO: 174485.

[16131] The probes having the nucleotide sequence represented by SEQ ID NOS: 189513, 189514, 189515, 189516, 189517, 189518, 189519, 189520, 189521, 189522, 189523 were selected from the ORFs having the nucleotide sequence represented by SEQ ID NO: 174486.

[16132] The probes having the nucleotide sequence represented by SEQ ID NOS: 189524, 189525, 189526, 189527, 189528, 189529, 189530, 189531, 189532, 189533, 189534 were selected from the ORFs having the nucleotide sequence represented by SEQ ID NO: 174487.

[16133] The probes having the nucleotide sequence represented by SEQ ID NOS: 189535, 189536, 189537, 189538, 189539, 189540, 189541, 189542, 189543, 189544, 189545 were selected from the ORFs having the nucleotide sequence represented by SEQ ID NO: 174488.

[16134] The probes having the nucleotide sequence represented by SEQ ID NOS: 189546, 189547, 189548, 189549, 189550, 189551, 189552, 189553, 189554, 189555, 189556 were selected from the ORFs having the nucleotide sequence represented by SEQ ID NO: 174489.

[16135] The probes having the nucleotide sequence represented by SEQ ID NOS: 189557, 189558, 189559, 189560, 189561, 189562, 189563, 189564, 189565, 189566, 189567 were selected from the ORFs having the nucleotide sequence represented by SEQ ID NO: 174490.

[16136] The probes having the nucleotide sequence represented by SEQ ID NOS: 189568, 189569, 189570, 189571, 189572, 189573, 189574, 189575, 189576, 189577, 189578 were selected from the ORFs having the nucleotide sequence represented by SEQ ID NO: 174491.

[16137] The probes having the nucleotide sequence represented by SEQ ID NOS: 189579, 189580, 189581, 189582, 189583, 189584, 189585, 189586, 189587, 189588, 189589 were selected from the ORFs having the nucleotide sequence represented by SEQ ID NO: 174492.

[16138] The probes having the nucleotide sequence represented by SEQ ID NOS: 189590, 189591, 189592, 189593, 189594, 189595, 189596, 189597, 189598, 189599, 189600 were selected from the ORFs having the nucleotide sequence represented by SEQ ID NO: 174493.

[16139] The probes having the nucleotide sequence represented by SEQ ID NOS: 189601, 189602, 189603, 189604, 189605, 189606, 189607, 189608, 189609, 189610, 189611 were selected from the ORFs having the nucleotide sequence represented by SEQ ID NO: 174494.

[16140] The probes having the nucleotide sequence represented by SEQ ID NOS: 189612, 189613, 189614, 189615, 189616, 189617, 189618, 189619, 189620, 189621, 189622 were selected from the ORFs having the nucleotide sequence represented by SEQ ID NO: 174495.

[16141] The probes having the nucleotide sequence represented by SEQ ID NOS: 189623, 189624, 189625, 189626, 189627, 189628, 189629, 189630, 189631, 189632, 189633 were selected from the ORFs having the nucleotide sequence represented by SEQ ID NO: 174496.

[16142] The probes having the nucleotide sequence represented by SEQ ID NOS: 189634, 189635, 189636, 189637, 189638, 189639, 189640, 189641, 189642, 189643, 189644 were selected from the ORFs having the nucleotide sequence represented by SEQ ID NO: 174497.

[16143] The probes having the nucleotide sequence represented by SEQ ID NOS: 189645, 189646, 189647, 189648, 189649, 189650, 189651, 189652, 189653, 189654, 189655 were selected from the ORFs having the nucleotide sequence represented by SEQ ID NO: 174498.

[16144] The probes having the nucleotide sequence represented by SEQ ID NOS: 189656, 189657, 189658, 189659, 189660, 189661, 189662, 189663, 189664, 189665, 189666 were selected from the ORFs having the nucleotide sequence represented by SEQ ID NO: 174499.

[16145] The probes having the nucleotide sequence represented by SEQ ID NOS: 189667, 189668, 189669, 189670, 189671, 189672, 189673, 189674, 189675, 189676, 189677 were selected from the ORFs having the nucleotide sequence represented by SEQ ID NO: 174500.

[16146] The probes having the nucleotide sequence represented by SEQ ID NOS: 189678, 189679, 189680, 189681, 189682, 189683, 189684, 189685, 189686, 189687, 189688 were selected from the ORFs having the nucleotide sequence represented by SEQ ID NO: 174501.

[16147] The probes having the nucleotide sequence represented by SEQ ID NOS: 189689, 189690, 189691, 189692, 189693, 189694, 189695, 189696, 189697, 189698, 189699 were selected from the ORFs having the nucleotide sequence represented by SEQ ID NO: 174502.

[16148] The probes having the nucleotide sequence represented by SEQ ID NOS: 189700, 189701, 189702, 189703, 189704, 189705, 189706, 189707, 189708, 189709, 189710 were selected from the ORFs having the nucleotide sequence represented by SEQ ID NO: 174503.

[16149] The probes having the nucleotide sequence represented by SEQ ID NOS: 189711, 189712, 189713, 189714, 189715, 189716, 189717, 189718, 189719, 189720, 189721 were selected from the ORFs having the nucleotide sequence represented by SEQ ID NO: 174504.

[16150] The probes having the nucleotide sequence represented by SEQ ID NOS: 189722, 189723, 189724, 189725, 189726, 189727, 189728, 189729, 189730, 189731, 189732 were selected from the ORFs having the nucleotide sequence represented by SEQ ID NO: 174505.

[16151] The probes having the nucleotide sequence represented by SEQ ID NOS: 189733, 189734, 189735, 189736, 189737, 189738, 189739, 189740, 189741, 189742, 189743 were selected from the ORFs having the nucleotide sequence represented by SEQ ID NO: 174506.

[16152] The probes having the nucleotide sequence represented by SEQ ID NOS: 189744, 189745, 189746, 189747, 189748, 189749, 189750, 189751, 189752, 189753, 189754 were selected from the ORFs having the nucleotide sequence represented by SEQ ID NO: 174507.

[16153] The probes having the nucleotide sequence represented by SEQ ID NOS: 189755, 189756, 189757, 189758, 189759, 189760, 189761, 189762, 189763, 189764, 189765 were selected from the ORFs having the nucleotide sequence represented by SEQ ID NO: 174508.

[16154] The probes having the nucleotide sequence represented by SEQ ID NOS: 189766, 189767, 189768, 189769, 189770, 189771, 189772, 189773, 189774, 189775, 189776 were selected from the ORFs having the nucleotide sequence represented by SEQ ID NO: 174509.

[16155] The probes having the nucleotide sequence represented by SEQ ID NOS: 189777, 189778, 189779, 189780, 189781, 189782, 189783, 189784, 189785, 189786, 189787 were selected from the ORFs having the nucleotide sequence represented by SEQ ID NO: 174510.

[16156] The probes having the nucleotide sequence represented by SEQ ID NOS: 189788, 189789, 189790, 189791, 189792, 189793, 189794, 189795, 189796, 189797, 189798 were selected from the ORFs having the nucleotide sequence represented by SEQ ID NO: 174511.

[16157] The probes having the nucleotide sequence represented by SEQ ID NOS: 189799, 189800, 189801, 189802, 189803, 189804, 189805, 189806, 189807, 189808, 189809 were selected from the ORFs having the nucleotide sequence represented by SEQ ID NO: 174512.

[16158] The probes having the nucleotide sequence represented by SEQ ID NOS: 189810, 189811, 189812, 189813, 189814, 189815, 189816, 189817, 189818, 189819, 189820 were selected from the ORFs having the nucleotide sequence represented by SEQ ID NO: 174513.

[16159] The probes having the nucleotide sequence represented by SEQ ID NOS: 189821, 189822, 189823, 189824, 189825, 189826, 189827, 189828, 189829, 189830, 189831 were selected from the ORFs having the nucleotide sequence represented by SEQ ID NO: 174514.

[16160] The probes having the nucleotide sequence represented by SEQ ID NOS: 189832, 189833, 189834, 189835, 189836, 189837, 189838, 189839, 189840, 189841, 189842 were selected from the ORFs having the nucleotide sequence represented by SEQ ID NO: 174515.

[16161] The probes having the nucleotide sequence represented by SEQ ID NOS: 189843, 189844, 189845, 189846, 189847, 189848, 189849, 189850, 189851, 189852, 189853 were selected from the ORFs having the nucleotide sequence represented by SEQ ID NO: 174516.

[16162] The probes having the nucleotide sequence represented by SEQ ID NOS: 189854, 189855, 189856, 189857, 189858, 189859, 189860, 189861, 189862, 189863, 189864 were selected from the ORFs having the nucleotide sequence represented by SEQ ID NO: 174517.

[16163] The probes having the nucleotide sequence represented by SEQ ID NOS: 189865, 189866, 189867, 189868, 189869, 189870, 189871, 189872, 189873, 189874, 189875 were selected from the ORFs having the nucleotide sequence represented by SEQ ID NO: 174518.

[16164] The probes having the nucleotide sequence represented by SEQ ID NOS: 189876, 189877, 189878, 189879, 189880, 189881, 189882, 189883, 189884, 189885, 189886 were selected from the ORFs having the nucleotide sequence represented by SEQ ID NO: 174519.

[16165] The probes having the nucleotide sequence represented by SEQ ID NOS: 189887, 189888, 189889, 189890, 189891, 189892, 189893, 189894, 189895, 189896, 189897 were selected from the ORFs having the nucleotide sequence represented by SEQ ID NO: 174520.

[16166] The probes having the nucleotide sequence represented by SEQ ID NOS: 189898, 189899, 189900, 189901, 189902, 189903, 189904, 189905, 189906, 189907, 189908 were selected from the ORFs having the nucleotide sequence represented by SEQ ID NO: 174521.

[16167] The probes having the nucleotide sequence represented by SEQ ID NOS: 189909, 189910, 189911, 189912, 189913, 189914, 189915, 189916, 189917, 189918, 189919 were selected from the ORFs having the nucleotide sequence represented by SEQ ID NO: 174522.

[16168] The probes having the nucleotide sequence represented by SEQ ID NOS: 189920, 189921, 189922, 189923, 189924, 189925, 189926, 189927, 189928, 189929, 189930 were selected from the ORFs having the nucleotide sequence represented by SEQ ID NO: 174523.

[16169] The probes having the nucleotide sequence represented by SEQ ID NOS: 189931, 189932, 189933, 189934, 189935, 189936, 189937, 189938, 189939, 189940, 189941 were selected from the ORFs having the nucleotide sequence represented by SEQ ID NO: 174524.

[16170] The probes having the nucleotide sequence represented by SEQ ID NOS: 189942, 189943, 189944, 189945, 189946, 189947, 189948, 189949, 189950, 189951, 189952 were selected from the ORFs having the nucleotide sequence represented by SEQ ID NO: 174525.

[16171] The probes having the nucleotide sequence represented by SEQ ID NOS: 189953, 189954, 189955, 189956, 189957, 189958, 189959, 189960, 189961, 189962, 189963 were selected from the ORFs having the nucleotide sequence represented by SEQ ID NO: 174526.

[16172] The probes having the nucleotide sequence represented by SEQ ID NOS: 189964, 189965, 189966, 189967, 189968, 189969, 189970, 189971, 189972, 189973, 189974 were selected from the ORFs having the nucleotide sequence represented by SEQ ID NO: 174527.

[16173] The probes having the nucleotide sequence represented by SEQ ID NOS: 189975, 189976, 189977, 189978, 189979, 189980, 189981, 189982, 189983, 189984, 189985 were selected from the ORFs having the nucleotide sequence represented by SEQ ID NO: 174528.

[16174] The probes having the nucleotide sequence represented by SEQ ID NOS: 189986, 189987, 189988, 189989, 189990, 189991, 189992, 189993, 189994, 189995, 189996 were selected from the ORFs having the nucleotide sequence represented by SEQ ID NO: 174529.

[16175] The probes having the nucleotide sequence represented by SEQ ID NOS: 189997, 189998, 189999, 190000, 190001, 190002, 190003, 190004, 190005, 190006, 190007 were selected from the ORFs having the nucleotide sequence represented by SEQ ID NO: 174530.

[16176] The probes having the nucleotide sequence represented by SEQ ID NOS: 190008, 190009, 190010, 190011, 190012, 190013, 190014, 190015, 190016, 190017, 190018 were selected from the ORFs having the nucleotide sequence represented by SEQ ID NO: 174531.

[16177] The probes having the nucleotide sequence represented by SEQ ID NOS: 190019, 190020, 190021, 190022, 190023, 190024, 190025, 190026, 190027, 190028, 190029 were selected from the ORFs having the nucleotide sequence represented by SEQ ID NO: 174532.

[16178] The probes having the nucleotide sequence represented by SEQ ID NOS: 190030, 190031, 190032, 190033, 190034, 190035, 190036, 190037, 190038, 190039, 190040 were selected from the ORFs having the nucleotide sequence represented by SEQ ID NO: 174533.

[16179] The probes having the nucleotide sequence represented by SEQ ID NOS: 190041, 190042, 190043, 190044, 190045, 190046, 190047, 190048, 190049, 190050, 190051 were selected from the ORFs having the nucleotide sequence represented by SEQ ID NO: 174534.

[16180] The probes having the nucleotide sequence represented by SEQ ID NOS: 190052, 190053, 190054, 190055, 190056, 190057, 190058, 190059, 190060, 190061, 190062 were selected from the ORFs having the nucleotide sequence represented by SEQ ID NO: 174535.

[16181] The probes having the nucleotide sequence represented by SEQ ID NOS: 190063, 190064, 190065, 190066, 190067, 190068, 190069, 190070, 190071, 190072, 190073 were selected from the ORFs having the nucleotide sequence represented by SEQ ID NO: 174536.

[16182] The probes having the nucleotide sequence represented by SEQ ID NOS: 190074, 190075, 190076, 190077, 190078, 190079, 190080, 190081, 190082, 190083, 190084 were selected from the ORFs having the nucleotide sequence represented by SEQ ID NO: 174537.

[16183] The probes having the nucleotide sequence represented by SEQ ID NOS: 190085, 190086, 190087, 190088, 190089, 190090, 190091, 190092, 190093, 190094, 190095 were selected from the ORFs having the nucleotide sequence represented by SEQ ID NO: 174538.

[16184] The probes having the nucleotide sequence represented by SEQ ID NOS: 190096, 190097, 190098, 190099, 190100, 190101, 190102, 190103, 190104, 190105, 190106 were selected from the ORFs having the nucleotide sequence represented by SEQ ID NO: 174539.

[16185] The probes having the nucleotide sequence represented by SEQ ID NOS: 190107, 190108, 190109, 190110, 190111, 190112, 190113, 190114, 190115, 190116, 190117 were selected from the ORFs having the nucleotide sequence represented by SEQ ID NO: 174540.

[16186] The probes having the nucleotide sequence represented by SEQ ID NOS: 190118, 190119, 190120, 190121, 190122, 190123, 190124, 190125, 190126, 190127, 190128 were selected from the ORFs having the nucleotide sequence represented by SEQ ID NO: 174541.

[16187] The probes having the nucleotide sequence represented by SEQ ID NOS: 190129, 190130, 190131, 190132, 190133, 190134, 190135, 190136, 190137, 190138, 190139 were selected from the ORFs having the nucleotide sequence represented by SEQ ID NO: 174542.

[16188] The probes having the nucleotide sequence represented by SEQ ID NOS: 190140, 190141, 190142, 190143, 190144, 190145, 190146, 190147, 190148, 190149, 190150 were selected from the ORFs having the nucleotide sequence represented by SEQ ID NO: 174543.

[16189] The probes having the nucleotide sequence represented by SEQ ID NOS: 190151, 190152, 190153, 190154, 190155, 190156, 190157, 190158, 190159, 190160, 190161 were selected from the ORFs having the nucleotide sequence represented by SEQ ID NO: 174544.

[16190] The probes having the nucleotide sequence represented by SEQ ID NOS: 190162, 190163, 190164, 190165, 190166, 190167, 190168, 190169, 190170, 190171, 190172 were selected from the ORFs having the nucleotide sequence represented by SEQ ID NO: 174545.

[16191] The probes having the nucleotide sequence represented by SEQ ID NOS: 190173, 190174, 190175, 190176, 190177, 190178, 190179, 190180, 190181, 190182, 190183 were selected from the ORFs having the nucleotide sequence represented by SEQ ID NO: 174546.

[16192] The probes having the nucleotide sequence represented by SEQ ID NOS: 190184, 190185, 190186, 190187, 190188, 190189, 190190, 190191, 190192, 190193, 190194 were selected from the ORFs having the nucleotide sequence represented by SEQ ID NO: 174547.

[16193] The probes having the nucleotide sequence represented by SEQ ID NOS: 190195, 190196, 190197, 190198, 190199, 190200, 190201, 190202, 190203, 190204, 190205 were selected from the ORFs having the nucleotide sequence represented by SEQ ID NO: 174548.

[16194] The probes having the nucleotide sequence represented by SEQ ID NOS: 190206, 190207, 190208, 190209, 190210, 190211, 190212, 190213, 190214, 190215, 190216 were selected from the ORFs having the nucleotide sequence represented by SEQ ID NO: 174549.

[16195] The probes having the nucleotide sequence represented by SEQ ID NOS: 190217, 190218, 190219, 190220, 190221, 190222, 190223, 190224, 190225, 190226, 190227 were selected from the ORFs having the nucleotide sequence represented by SEQ ID NO: 174550.

[16196] The probes having the nucleotide sequence represented by SEQ ID NOS: 190228, 190229, 190230, 190231, 190232, 190233, 190234, 190235, 190236, 190237, 190238 were selected from the ORFs having the nucleotide sequence represented by SEQ ID NO: 174551.

[16197] The probes having the nucleotide sequence represented by SEQ ID NOS: 190239, 190240, 190241, 190242, 190243, 190244, 190245, 190246, 190247, 190248, 190249 were selected from the ORFs having the nucleotide sequence represented by SEQ ID NO: 174552.

[16198] The probes having the nucleotide sequence represented by SEQ ID NOS: 190250, 190251, 190252, 190253, 190254, 190255, 190256, 190257, 190258, 190259, 190260 were selected from the ORFs having the nucleotide sequence represented by SEQ ID NO: 174553.

[16199] The probes having the nucleotide sequence represented by SEQ ID NOS: 190261, 190262, 190263, 190264, 190265, 190266, 190267, 190268, 190269, 190270, 190271 were selected from the ORFs having the nucleotide sequence represented by SEQ ID NO: 174554.

[16200] The probes having the nucleotide sequence represented by SEQ ID NOS: 190272, 190273, 190274, 190275, 190276, 190277, 190278, 190279, 190280, 190281, 190282 were selected from the ORFs having the nucleotide sequence represented by SEQ ID NO: 174555.

[16201] The probes having the nucleotide sequence represented by SEQ ID NOS: 190283, 190284, 190285, 190286, 190287, 190288, 190289, 190290, 190291, 190292, 190293 were selected from the ORFs having the nucleotide sequence represented by SEQ ID NO: 174556.

[16202] The probes having the nucleotide sequence represented by SEQ ID NOS: 190294, 190295, 190296, 190297, 190298, 190299, 190300, 190301, 190302, 190303, 190304 were selected from the ORFs having the nucleotide sequence represented by SEQ ID NO: 174557.

[16203] The probes having the nucleotide sequence represented by SEQ ID NOS: 190305, 190306, 190307, 190308, 190309, 190310, 190311, 190312, 190313, 190314, 190315 were selected from the ORFs having the nucleotide sequence represented by SEQ ID NO: 174558.

[16204] The probes having the nucleotide sequence represented by SEQ ID NOS: 190316, 190317, 190318, 190319, 190320, 190321, 190322, 190323, 190324, 190325, 190326 were selected from the ORFs having the nucleotide sequence represented by SEQ ID NO: 174559.

[16205] The probes having the nucleotide sequence represented by SEQ ID NOS: 190327, 190328, 190329, 190330, 190331, 190332, 190333, 190334, 190335, 190336, 190337 were selected from the ORFs having the nucleotide sequence represented by SEQ ID NO: 174560.

[16206] The probes having the nucleotide sequence represented by SEQ ID NOS: 190338, 190339, 190340, 190341, 190342, 190343, 190344, 190345, 190346, 190347, 190348 were selected from the ORFs having the nucleotide sequence represented by SEQ ID NO: 174561.

[16207] The probes having the nucleotide sequence represented by SEQ ID NOS: 190349, 190350, 190351, 190352, 190353, 190354, 190355, 190356, 190357, 190358, 190359 were selected from the ORFs having the nucleotide sequence represented by SEQ ID NO: 174562.

[16208] The probes having the nucleotide sequence represented by SEQ ID NOS: 190360, 190361, 190362, 190363, 190364, 190365, 190366, 190367, 190368, 190369, 190370 were selected from the ORFs having the nucleotide sequence represented by SEQ ID NO: 174563.

[16209] The probes having the nucleotide sequence represented by SEQ ID NOS: 190371, 190372, 190373, 190374, 190375, 190376, 190377, 190378, 190379, 190380, 190381 were selected from the ORFs having the nucleotide sequence represented by SEQ ID NO: 174564.

[16210] The probes having the nucleotide sequence represented by SEQ ID NOS: 190382, 190383, 190384, 190385, 190386, 190387, 190388, 190389, 190390, 190391, 190392 were selected from the ORFs having the nucleotide sequence represented by SEQ ID NO: 174565.

[16211] The probes having the nucleotide sequence represented by SEQ ID NOS: 190393, 190394, 190395, 190396, 190397, 190398, 190399, 190400, 190401, 190402, 190403 were selected from the ORFs having the nucleotide sequence represented by SEQ ID NO: 174566.

[16212] The probes having the nucleotide sequence represented by SEQ ID NOS: 190404, 190405, 190406, 190407, 190408, 190409, 190410, 190411, 190412, 190413, 190414 were selected from the ORFs having the nucleotide sequence represented by SEQ ID NO: 174567.

[16213] The probes having the nucleotide sequence represented by SEQ ID NOS: 190415, 190416, 190417, 190418, 190419, 190420, 190421, 190422, 190423, 190424, 190425 were selected from the ORFs having the nucleotide sequence represented by SEQ ID NO: 174568.

[16214] The probes having the nucleotide sequence represented by SEQ ID NOS: 190426, 190427, 190428, 190429, 190430, 190431, 190432, 190433, 190434, 190435, 190436 were selected from the ORFs having the nucleotide sequence represented by SEQ ID NO: 174569.

[16215] The probes having the nucleotide sequence represented by SEQ ID NOS: 190437, 190438, 190439, 190440, 190441, 190442, 190443, 190444, 190445, 190446, 190447 were selected from the ORFs having the nucleotide sequence represented by SEQ ID NO: 174570.

[16216] The probes having the nucleotide sequence represented by SEQ ID NOS: 190448, 190449, 190450, 190451, 190452, 190453, 190454, 190455, 190456, 190457, 190458 were selected from the ORFs having the nucleotide sequence represented by SEQ ID NO: 174571.

[16217] The probes having the nucleotide sequence represented by SEQ ID NOS: 190459, 190460, 190461, 190462, 190463, 190464, 190465, 190466, 190467, 190468, 190469 were selected from the ORFs having the nucleotide sequence represented by SEQ ID NO: 174572.

[16218] The probes having the nucleotide sequence represented by SEQ ID NOS: 190470, 190471, 190472, 190473, 190474, 190475, 190476, 190477, 190478, 190479, 190480 were selected from the ORFs having the nucleotide sequence represented by SEQ ID NO: 174573.

[16219] The probes having the nucleotide sequence represented by SEQ ID NOS: 190481, 190482, 190483, 190484, 190485, 190486, 190487, 190488, 190489, 190490, 190491 were selected from the ORFs having the nucleotide sequence represented by SEQ ID NO: 174574.

[16220] The probes having the nucleotide sequence represented by SEQ ID NOS: 190492, 190493, 190494, 190495, 190496, 190497, 190498, 190499, 190500, 190501, 190502 were selected from the ORFs having the nucleotide sequence represented by SEQ ID NO: 174575.

[16221] The probes having the nucleotide sequence represented by SEQ ID NOS: 190503, 190504, 190505, 190506, 190507, 190508, 190509, 190510, 190511, 190512, 190513 were selected from the ORFs having the nucleotide sequence represented by SEQ ID NO: 174576.

[16222] The probes having the nucleotide sequence represented by SEQ ID NOS: 190514, 190515, 190516, 190517, 190518, 190519, 190520, 190521, 190522, 190523, 190524 were selected from the ORFs having the nucleotide sequence represented by SEQ ID NO: 174577.

[16223] The probes having the nucleotide sequence represented by SEQ ID NOS: 190525, 190526, 190527, 190528, 190529, 190530, 190531, 190532, 190533, 190534, 190535 were selected from the ORFs having the nucleotide sequence represented by SEQ ID NO: 174578.

[16224] The probes having the nucleotide sequence represented by SEQ ID NOS: 190536, 190537, 190538, 190539, 190540, 190541, 190542, 190543, 190544, 190545, 190546 were selected from the ORFs having the nucleotide sequence represented by SEQ ID NO: 174579.

[16225] The probes having the nucleotide sequence represented by SEQ ID NOS: 190547, 190548, 190549, 190550, 190551, 190552, 190553, 190554, 190555, 190556, 190557 were selected from the ORFs having the nucleotide sequence represented by SEQ ID NO: 174580.

[16226] The probes having the nucleotide sequence represented by SEQ ID NOS: 190558, 190559, 190560, 190561, 190562, 190563, 190564, 190565, 190566, 190567, 190568 were selected from the ORFs having the nucleotide sequence represented by SEQ ID NO: 174581.

[16227] The probes having the nucleotide sequence represented by SEQ ID NOS: 190569, 190570, 190571, 190572, 190573, 190574, 190575, 190576, 190577, 190578, 190579 were selected from the ORFs having the nucleotide sequence represented by SEQ ID NO: 174582.

[16228] The probes having the nucleotide sequence represented by SEQ ID NOS: 190580, 190581, 190582, 190583, 190584, 190585, 190586, 190587, 190588, 190589, 190590 were selected from the ORFs having the nucleotide sequence represented by SEQ ID NO: 174583.

[16229] The probes having the nucleotide sequence represented by SEQ ID NOS: 190591, 190592, 190593, 190594, 190595, 190596, 190597, 190598, 190599, 190600, 190601 were selected from the ORFs having the nucleotide sequence represented by SEQ ID NO: 174584.

[16230] The probes having the nucleotide sequence represented by SEQ ID NOS: 190602, 190603, 190604, 190605, 190606, 190607, 190608, 190609, 190610, 190611, 190612 were selected from the ORFs having the nucleotide sequence represented by SEQ ID NO: 174585.

[16231] The probes having the nucleotide sequence represented by SEQ ID NOS: 190613, 190614, 190615, 190616, 190617, 190618, 190619, 190620, 190621, 190622, 190623 were selected from the ORFs having the nucleotide sequence represented by SEQ ID NO: 174586.

[16232] The probes having the nucleotide sequence represented by SEQ ID NOS: 190624, 190625, 190626, 190627, 190628, 190629, 190630, 190631, 190632, 190633, 190634 were selected from the ORFs having the nucleotide sequence represented by SEQ ID NO: 174587.

[16233] The probes having the nucleotide sequence represented by SEQ ID NOS: 190635, 190636, 190637, 190638, 190639, 190640, 190641, 190642, 190643, 190644, 190645 were selected from the ORFs having the nucleotide sequence represented by SEQ ID NO: 174588.

[16234] The probes having the nucleotide sequence represented by SEQ ID NOS: 190646, 190647, 190648, 190649, 190650, 190651, 190652, 190653, 190654, 190655, 190656 were selected from the ORFs having the nucleotide sequence represented by SEQ ID NO: 174589.

[16235] The probes having the nucleotide sequence represented by SEQ ID NOS: 190657, 190658, 190659, 190660, 190661, 190662, 190663, 190664, 190665, 190666, 190667 were selected from the ORFs having the nucleotide sequence represented by SEQ ID NO: 174590.

[16236] The probes having the nucleotide sequence represented by SEQ ID NOS: 190668, 190669, 190670, 190671, 190672, 190673, 190674, 190675, 190676, 190677, 190678 were selected from the ORFs having the nucleotide sequence represented by SEQ ID NO: 174591.

[16237] The probes having the nucleotide sequence represented by SEQ ID NOS: 190679, 190680, 190681, 190682, 190683, 190684, 190685, 190686, 190687, 190688, 190689 were selected from the ORFs having the nucleotide sequence represented by SEQ ID NO: 174592.

[16238] The probes having the nucleotide sequence represented by SEQ ID NOS: 190690, 190691, 190692, 190693, 190694, 190695, 190696, 190697, 190698, 190699, 190700 were selected from the ORFs having the nucleotide sequence represented by SEQ ID NO: 174593.

[16239] The probes having the nucleotide sequence represented by SEQ ID NOS: 190701, 190702, 190703, 190704, 190705, 190706, 190707, 190708, 190709, 190710, 190711 were selected from the ORFs having the nucleotide sequence represented by SEQ ID NO: 174594.

[16240] The probes having the nucleotide sequence represented by SEQ ID NOS: 190712, 190713, 190714, 190715, 190716, 190717, 190718, 190719, 190720, 190721, 190722 were selected from the ORFs having the nucleotide sequence represented by SEQ ID NO: 174595.

[16241] The probes having the nucleotide sequence represented by SEQ ID NOS: 190723, 190724, 190725, 190726, 190727, 190728, 190729, 190730, 190731, 190732, 190733 were selected from the ORFs having the nucleotide sequence represented by SEQ ID NO: 174596.

[16242] The probes having the nucleotide sequence represented by SEQ ID NOS: 190734, 190735, 190736, 190737, 190738, 190739, 190740, 190741, 190742, 190743, 190744 were selected from the ORFs having the nucleotide sequence represented by SEQ ID NO: 174597.

[16243] The probes having the nucleotide sequence represented by SEQ ID NOS: 190745, 190746, 190747, 190748, 190749, 190750, 190751, 190752, 190753, 190754, 190755 were selected from the ORFs having the nucleotide sequence represented by SEQ ID NO: 174598.

[16244] The probes having the nucleotide sequence represented by SEQ ID NOS: 190756, 190757, 190758, 190759, 190760, 190761, 190762, 190763, 190764, 190765, 190766 were selected from the ORFs having the nucleotide sequence represented by SEQ ID NO: 174599.

[16245] The probes having the nucleotide sequence represented by SEQ ID NOS: 190767, 190768, 190769, 190770, 190771, 190772, 190773, 190774, 190775, 190776, 190777 were selected from the ORFs having the nucleotide sequence represented by SEQ ID NO: 174600.

[16246] The probes having the nucleotide sequence represented by SEQ ID NOS: 190778, 190779, 190780, 190781, 190782, 190783, 190784, 190785, 190786, 190787, 190788 were selected from the ORFs having the nucleotide sequence represented by SEQ ID NO: 174601.

[16247] The probes having the nucleotide sequence represented by SEQ ID NOS: 190789, 190790, 190791, 190792, 190793, 190794, 190795, 190796, 190797, 190798, 190799 were selected from the ORFs having the nucleotide sequence represented by SEQ ID NO: 174602.

[16248] The probes having the nucleotide sequence represented by SEQ ID NOS: 190800, 190801, 190802, 190803, 190804, 190805, 190806, 190807, 190808, 190809, 190810 were selected from the ORFs having the nucleotide sequence represented by SEQ ID NO: 174603.

[16249] The probes from 403 S. cerevisiae ORFs described as above (2) were as follows:

[16250] The probes having the nucleotide sequence represented by SEQ ID NOS: 191214, 191215, 191216, 191217, 191218, 191219, 191220, 191221, 191222, 191223, 191224 were selected from the ORFs having the nucleotide sequence represented by SEQ ID NO: 190811.

[16251] The probes having the nucleotide sequence represented by SEQ ID NOS: 191225, 191226, 191227, 191228, 191229, 191230, 191231, 191232, 191233, 191234, 191235 were selected from the ORFs having the nucleotide sequence represented by SEQ ID NO: 190812.

[16252] The probes having the nucleotide sequence represented by SEQ ID NOS: 191236, 191237, 191238, 191239, 191240, 191241, 191242, 191243, 191244, 191245, 191246 were selected from the ORFs having the nucleotide sequence represented by SEQ ID NO: 190813.

[16253] The probes having the nucleotide sequence represented by SEQ ID NOS: 191247, 191248, 191249, 191250, 191251, 191252, 191253, 191254, 191255, 191256, 191257 were selected from the ORFs having the nucleotide sequence represented by SEQ ID NO: 190814.

[16254] The probes having the nucleotide sequence represented by SEQ ID NOS: 191258, 191259, 191260, 191261, 191262, 191263, 191264, 191265, 191266, 191267, 191268 were selected from the ORFs having the nucleotide sequence represented by SEQ ID NO: 190815.

[16255] The probes having the nucleotide sequence represented by SEQ ID NOS: 191269, 191270, 191271, 191272, 191273, 191274, 191275, 191276, 191277, 191278, 191279 were selected from the ORFs having the nucleotide sequence represented by SEQ ID NO: 190816.

[16256] The probes having the nucleotide sequence represented by SEQ ID NOS: 191280, 191281, 191282, 191283, 191284, 191285, 191286, 191287, 191288, 191289, 191290 were selected from the ORFs having the nucleotide sequence represented by SEQ ID NO: 190817.

[16257] The probes having the nucleotide sequence represented by SEQ ID NOS: 191291, 191292, 191293, 191294, 191295, 191296, 191297, 191298, 191299, 191300, 191301 were selected from the ORFs having the nucleotide sequence represented by SEQ ID NO: 190818.

[16258] The probes having the nucleotide sequence represented by SEQ ID NOS: 191302, 191303, 191304, 191305, 191306, 191307, 191308, 191309, 191310, 191311, 191312 were selected from the ORFs having the nucleotide sequence represented by SEQ ID NO: 190819.

[16259] The probes having the nucleotide sequence represented by SEQ ID NOS: 191313, 191314, 191315, 191316, 191317, 191318, 191319, 191320, 191321, 191322, 191323 were selected from the ORFs having the nucleotide sequence represented by SEQ ID NO: 190820.

[16260] The probes having the nucleotide sequence represented by SEQ ID NOS: 191324, 191325, 191326, 191327, 191328, 191329, 191330, 191331, 191332, 191333, 191334 were selected from the ORFs having the nucleotide sequence represented by SEQ ID NO: 190821.

[16261] The probes having the nucleotide sequence represented by SEQ ID NOS: 191335, 191336, 191337, 191338, 191339, 191340, 191341, 191342, 191343, 191344, 191345 were selected from the ORFs having the nucleotide sequence represented by SEQ ID NO: 190822.

[16262] The probes having the nucleotide sequence represented by SEQ ID NOS: 191346, 191347, 191348, 191349, 191350, 191351, 191352, 191353, 191354, 191355, 191356 were selected from the ORFs having the nucleotide sequence represented by SEQ ID NO: 190823.

[16263] The probes having the nucleotide sequence represented by SEQ ID NOS: 191357, 191358, 191359, 191360, 191361, 191362, 191363, 191364, 191365, 191366, 191367 were selected from the ORFs having the nucleotide sequence represented by SEQ ID NO: 190824.

[16264] The probes having the nucleotide sequence represented by SEQ ID NOS: 191368, 191369, 191370, 191371, 191372, 191373, 191374, 191375, 191376, 191377, 191378 were selected from the ORFs having the nucleotide sequence represented by SEQ ID NO: 190825.

[16265] The probes having the nucleotide sequence represented by SEQ ID NOS: 191379, 191380, 191381, 191382, 191383, 191384, 191385, 191386, 191387, 191388, 191389 were selected from the ORFs having the nucleotide sequence represented by SEQ ID NO: 190826.

[16266] The probes having the nucleotide sequence represented by SEQ ID NOS: 191390, 191391, 191392, 191393, 191394, 191395, 191396, 191397, 191398, 191399, 191400 were selected from the ORFs having the nucleotide sequence represented by SEQ ID NO: 190827.

[16267] The probes having the nucleotide sequence represented by SEQ ID NOS: 191401, 191402, 191403, 191404, 191405, 191406, 191407, 191408, 191409, 191410, 191411 were selected from the ORFs having the nucleotide sequence represented by SEQ ID NO: 190828.

[16268] The probes having the nucleotide sequence represented by SEQ ID NOS: 191412, 191413, 191414, 191415, 191416, 191417, 191418, 191419, 191420, 191421, 191422 were selected from the ORFs having the nucleotide sequence represented by SEQ ID NO: 190829.

[16269] The probes having the nucleotide sequence represented by SEQ ID NOS: 191423, 191424, 191425, 191426, 191427, 191428, 191429, 191430, 191431, 191432, 191433 were selected from the ORFs having the nucleotide sequence represented by SEQ ID NO: 190830.

[16270] The probes having the nucleotide sequence represented by SEQ ID NOS: 191434, 191435, 191436, 191437, 191438, 191439, 191440, 191441, 191442, 191443, 191444 were selected from the ORFs having the nucleotide sequence represented by SEQ ID NO: 190831.

[16271] The probes having the nucleotide sequence represented by SEQ ID NOS: 191445, 191446, 191447, 191448, 191449, 191450, 191451, 191452, 191453, 191454, 191455 were selected from the ORFs having the nucleotide sequence represented by SEQ ID NO: 190832.

[16272] The probes having the nucleotide sequence represented by SEQ ID NOS: 191456, 191457, 191458, 191459, 191460, 191461, 191462, 191463, 191464, 191465, 191466 were selected from the ORFs having the nucleotide sequence represented by SEQ ID NO: 190833.

[16273] The probes having the nucleotide sequence represented by SEQ ID NOS: 191467, 191468, 191469, 191470, 191471, 191472, 191473, 191474, 191475, 191476, 191477 were selected from the ORFs having the nucleotide sequence represented by SEQ ID NO: 190834.

[16274] The probes having the nucleotide sequence represented by SEQ ID NOS: 191478, 191479, 191480, 191481, 191482, 191483, 191484, 191485 were selected from the ORFs having the nucleotide sequence represented by SEQ ID NO: 190835.

[16275] The probes having the nucleotide sequence represented by SEQ ID NOS: 191486, 191487, 191488, 191489, 191490, 191491, 191492, 191493, 191494, 191495, 191496 were selected from the ORFs having the nucleotide sequence represented by SEQ ID NO: 190836.

[16276] The probes having the nucleotide sequence represented by SEQ ID NOS: 191497, 191498, 191499, 191500, 191501, 191502, 191503, 191504, 191505, 191506, 191507 were selected from the ORFs having the nucleotide sequence represented by SEQ ID NO: 190837.

[16277] The probes having the nucleotide sequence represented by SEQ ID NOS: 191508, 191509, 191510, 191511, 191512, 191513, 191514, 191515, 191516, 191517, 191518 were selected from the ORFs having the nucleotide sequence represented by SEQ ID NO: 190838.

[16278] The probes having the nucleotide sequence represented by SEQ ID NOS: 191519, 191520, 191521, 191522, 191523, 191524, 191525, 191526, 191527, 191528, 191529 were selected from the ORFs having the nucleotide sequence represented by SEQ ID NO: 190839.

[16279] The probes having the nucleotide sequence represented by SEQ ID NOS: 191530, 191531, 191532, 191533, 191534, 191535, 191536, 191537, 191538, 191539, 191540 were selected from the ORFs having the nucleotide sequence represented by SEQ ID NO: 190840.

[16280] The probes having the nucleotide sequence represented by SEQ ID NOS: 191541, 191542, 191543, 191544, 191545, 191546, 191547, 191548 were selected from the ORFs having the nucleotide sequence represented by SEQ ID NO: 190841.

[16281] The probes having the nucleotide sequence represented by SEQ ID NOS: 191549, 191550, 191551, 191552, 191553, 191554, 191555, 191556, 191557, 191558, 191559 were selected from the ORFs having the nucleotide sequence represented by SEQ ID NO: 190842.

[16282] The probes having the nucleotide sequence represented by SEQ ID NOS: 191560, 191561, 191562, 191563, 191564, 191565, 191566, 191567 were selected from the ORFs having the nucleotide sequence represented by SEQ ID NO: 190843.

[16283] The probes having the nucleotide sequence represented by SEQ ID NOS: 191568, 191569, 191570, 191571, 191572, 191573, 191574, 191575, 191576, 191577, 191578 were selected from the ORFs having the nucleotide sequence represented by SEQ ID NO: 190844.

[16284] The probes having the nucleotide sequence represented by SEQ ID NOS: 191579, 191580, 191581, 191582, 191583, 191584, 191585, 191586, 191587, 191588, 191589 were selected from the ORFs having the nucleotide sequence represented by SEQ ID NO: 190845.

[16285] The probes having the nucleotide sequence represented by SEQ ID NOS: 191590, 191591, 191592, 191593, 191594, 191595, 191596, 191597, 191598, 191599, 191600 were selected from the ORFs having the nucleotide sequence represented by SEQ ID NO: 190846.

[16286] The probes having the nucleotide sequence represented by SEQ ID NOS: 191601, 191602, 191603, 191604, 191605, 191606, 191607, 191608, 191609, 191610, 191611 were selected from the ORFs having the nucleotide sequence represented by SEQ ID NO: 190847.

[16287] The probes having the nucleotide sequence represented by SEQ ID NOS: 191612, 191613, 191614, 191615, 191616, 191617, 191618, 191619, 191620, 191621, 191622 were selected from the ORFs having the nucleotide sequence represented by SEQ ID NO: 190848.

[16288] The probes having the nucleotide sequence represented by SEQ ID NOS: 191623, 191624, 191625, 191626, 191627, 191628, 191629, 191630, 191631, 191632, 191633 were selected from the ORFs having the nucleotide sequence represented by SEQ ID NO: 190849.

[16289] The probes having the nucleotide sequence represented by SEQ ID NOS: 191634, 191635, 191636, 191637, 191638, 191639, 191640, 191641, 191642, 191643, 191644 were selected from the ORFs having the nucleotide sequence represented by SEQ ID NO: 190850.

[16290] The probes having the nucleotide sequence represented by SEQ ID NOS: 191645, 191646, 191647, 191648, 191649, 191650, 191651, 191652, 191653, 191654, 191655 were selected from the ORFs having the nucleotide sequence represented by SEQ ID NO: 190851.

[16291] The probes having the nucleotide sequence represented by SEQ ID NOS: 191656, 191657, 191658, 191659, 191660, 191661, 191662, 191663, 191664, 191665, 191666 were selected from the ORFs having the nucleotide sequence represented by SEQ ID NO: 190852.

[16292] The probes having the nucleotide sequence represented by SEQ ID NOS: 191667, 191668, 191669, 191670, 191671, 191672, 191673, 191674, 191675, 191676, 191677 were selected from the ORFs having the nucleotide sequence represented by SEQ ID NO: 190853.

[16293] The probes having the nucleotide sequence represented by SEQ ID NOS: 191678, 191679, 191680, 191681, 191682, 191683, 191684, 191685, 191686, 191687, 191688 were selected from the ORFs having the nucleotide sequence represented by SEQ ID NO: 190854.

[16294] The probes having the nucleotide sequence represented by SEQ ID NOS: 191689, 191690, 191691, 191692, 191693, 191694, 191695, 191696, 191697, 191698, 191699 were selected from the ORFs having the nucleotide sequence represented by SEQ ID NO: 190855.

[16295] The probes having the nucleotide sequence represented by SEQ ID NOS: 191700, 191701, 191702, 191703, 191704, 191705, 191706, 191707, 191708, 191709, 191710 were selected from the ORFs having the nucleotide sequence represented by SEQ ID NO: 190856.

[16296] The probes having the nucleotide sequence represented by SEQ ID NOS: 191711, 191712, 191713, 191714, 191715, 191716, 191717, 191718, 191719, 191720, 191721 were selected from the ORFs having the nucleotide sequence represented by SEQ ID NO: 190857.

[16297] The probes having the nucleotide sequence represented by SEQ ID NOS: 191722, 191723, 191724, 191725, 191726, 191727, 191728, 191729, 191730, 191731, 191732 were selected from the ORFs having the nucleotide sequence represented by SEQ ID NO: 190858.

[16298] The probes having the nucleotide sequence represented by SEQ ID NOS: 191733, 191734, 191735, 191736, 191737, 191738, 191739, 191740, 191741, 191742, 191743 were selected from the ORFs having the nucleotide sequence represented by SEQ ID NO: 190859.

[16299] The probes having the nucleotide sequence represented by SEQ ID NOS: 191744, 191745, 191746, 191747, 191748, 191749, 191750, 191751, 191752, 191753, 191754 were selected from the ORFs having the nucleotide sequence represented by SEQ ID NO: 190860.

[16300] The probes having the nucleotide sequence represented by SEQ ID NOS: 191755, 191756, 191757, 191758, 191759, 191760, 191761, 191762, 191763, 191764, 191765 were selected from the ORFs having the nucleotide sequence represented by SEQ ID NO: 190861.

[16301] The probes having the nucleotide sequence represented by SEQ ID NOS: 191766, 191767, 191768, 191769, 191770, 191771, 191772, 191773, 191774, 191775, 191776 were selected from the ORFs having the nucleotide sequence represented by SEQ ID NO: 190862.

[16302] The probes having the nucleotide sequence represented by SEQ ID NOS: 191777, 191778, 191779, 191780, 191781, 191782, 191783, 191784, 191785, 191786, 191787 were selected from the ORFs having the nucleotide sequence represented by SEQ ID NO: 190863.

[16303] The probes having the nucleotide sequence represented by SEQ ID NOS: 191788, 191789, 191790, 191791, 191792, 191793, 191794, 191795, 191796, 191797, 191798 were selected from the ORFs having the nucleotide sequence represented by SEQ ID NO: 190864.

[16304] The probes having the nucleotide sequence represented by SEQ ID NOS: 191799, 191800, 191801, 191802, 191803, 191804, 191805, 191806, 191807, 191808, 191809 were selected from the ORFs having the nucleotide sequence represented by SEQ ID NO: 190865.

[16305] The probes having the nucleotide sequence represented by SEQ ID NOS: 191810, 191811, 191812, 191813, 191814, 191815, 191816, 191817, 191818, 191819, 191820 were selected from the ORFs having the nucleotide sequence represented by SEQ ID NO: 190866.

[16306] The probes having the nucleotide sequence represented by SEQ ID NOS: 191821, 191822, 191823, 191824, 191825, 191826, 191827, 191828, 191829, 191830, 191831 were selected from the ORFs having the nucleotide sequence represented by SEQ ID NO: 190867.

[16307] The probes having the nucleotide sequence represented by SEQ ID NOS: 191832, 191833, 191834, 191835, 191836, 191837, 191838, 191839, 191840, 191841, 191842 were selected from the ORFs having the nucleotide sequence represented by SEQ ID NO: 190868.

[16308] The probes having the nucleotide sequence represented by SEQ ID NOS: 191843, 191844, 191845, 191846, 191847, 191848, 191849, 191850, 191851, 191852, 191853 were selected from the ORFs having the nucleotide sequence represented by SEQ ID NO: 190869.

[16309] The probes having the nucleotide sequence represented by SEQ ID NOS: 191854, 191855, 191856, 191857, 191858, 191859, 191860, 191861, 191862, 191863, 191864 were selected from the ORFs having the nucleotide sequence represented by SEQ ID NO: 190870.

[16310] The probes having the nucleotide sequence represented by SEQ ID NOS: 191865, 191866, 191867, 191868, 191869, 191870, 191871, 191872, 191873, 191874, 191875 were selected from the ORFs having the nucleotide sequence represented by SEQ ID NO: 190871.

[16311] The probes having the nucleotide sequence represented by SEQ ID NOS: 191876, 191877, 191878, 191879, 191880, 191881, 191882, 191883, 191884, 191885, 191886 were selected from the ORFs having the nucleotide sequence represented by SEQ ID NO: 190872.

[16312] The probes having the nucleotide sequence represented by SEQ ID NOS: 191887, 191888, 191889, 191890, 191891, 191892, 191893, 191894, 191895, 191896, 191897 were selected from the ORFs having the nucleotide sequence represented by SEQ ID NO: 190873.

[16313] The probes having the nucleotide sequence represented by SEQ ID NOS: 191898, 191899, 191900, 191901, 191902, 191903, 191904, 191905, 191906, 191907, 191908 were selected from the ORFs having the nucleotide sequence represented by SEQ ID NO: 190874.

[16314] The probes having the nucleotide sequence represented by SEQ ID NOS: 191909, 191910, 191911, 191912, 191913, 191914, 191915, 191916, 191917, 191918, 191919 were selected from the ORFs having the nucleotide sequence represented by SEQ ID NO: 190875.

[16315] The probes having the nucleotide sequence represented by SEQ ID NOS: 191920, 191921, 191922, 191923, 191924, 191925, 191926, 191927, 191928, 191929, 191930 were selected from the ORFs having the nucleotide sequence represented by SEQ ID NO: 190876.

[16316] The probes having the nucleotide sequence represented by SEQ ID NOS: 191931, 191932, 191933, 191934, 191935, 191936, 191937, 191938, 191939, 191940, 191941 were selected from the ORFs having the nucleotide sequence represented by SEQ ID NO: 190877.

[16317] The probes having the nucleotide sequence represented by SEQ ID NOS: 191942, 191943, 191944, 191945, 191946, 191947, 191948, 191949, 191950, 191951, 191952 were selected from the ORFs having the nucleotide sequence represented by SEQ ID NO: 190878.

[16318] The probes having the nucleotide sequence represented by SEQ ID NOS: 191953, 191954, 191955, 191956, 191957, 191958, 191959, 191960, 191961, 191962, 191963 were selected from the ORFs having the nucleotide sequence represented by SEQ ID NO: 190879.

[16319] The probes having the nucleotide sequence represented by SEQ ID NOS: 191964, 191965, 191966, 191967, 191968, 191969, 191970, 191971 were selected from the ORFs having the nucleotide sequence represented by SEQ ID NO: 190880.

[16320] The probes having the nucleotide sequence represented by SEQ ID NOS: 191972, 191973, 191974, 191975, 191976, 191977, 191978, 191979, 191980, 191981, 191982 were selected from the ORFs having the nucleotide sequence represented by SEQ ID NO: 190881.

[16321] The probes having the nucleotide sequence represented by SEQ ID NOS: 191983, 191984, 191985, 191986, 191987, 191988, 191989, 191990, 191991, 191992, 191993 were selected from the ORFs having the nucleotide sequence represented by SEQ ID NO: 190882.

[16322] The probes having the nucleotide sequence represented by SEQ ID NOS: 191994, 191995, 191996, 191997, 191998, 191999, 192000, 192001 were selected from the ORFs having the nucleotide sequence represented by SEQ ID NO: 190883.

[16323] The probes having the nucleotide sequence represented by SEQ ID NOS: 192002, 192003, 192004, 192005, 192006, 192007, 192008, 192009, 192010, 192011, 192012 were selected from the ORFs having the nucleotide sequence represented by SEQ ID NO: 190884.

[16324] The probes having the nucleotide sequence represented by SEQ ID NOS: 192013, 192014, 192015, 192016, 192017, 192018, 192019, 192020 were selected from the ORFs having the nucleotide sequence represented by SEQ ID NO:. 190885.

[16325] The probes having the nucleotide sequence represented by SEQ ID NOS: 192021, 192022, 192023, 192024, 192025, 192026, 192027, 192028 were selected from the ORFs having the nucleotide sequence represented by SEQ ID NO: 190886.

[16326] The probes having the nucleotide sequence represented by SEQ ID NOS: 192029, 192030, 192031, 192032, 192033, 192034, 192035, 192036, 192037, 192038, 192039 were selected from the ORFs having the nucleotide sequence represented by SEQ ID NO: 190887.

[16327] The probes having the nucleotide sequence represented by SEQ ID NOS: 192040, 192041, 192042, 192043, 192044, 192045, 192046, 192047, 192048, 192049, 192050 were selected from the ORFs having the nucleotide sequence represented by SEQ ID NO: 190888.

[16328] The probes having the nucleotide sequence represented by SEQ ID NOS: 192051, 192052, 192053, 192054, 192055, 192056, 192057, 192058, 192059, 192060, 192061 were selected from the ORFs having the nucleotide sequence represented by SEQ ID NO: 190889.

[16329] The probes having the nucleotide sequence represented by SEQ ID NOS: 192062, 192063, 192064, 192065, 192066, 192067, 192068, 192069, 192070, 192071, 192072 were selected from the ORFs having the nucleotide sequence represented by SEQ ID NO: 190890.

[16330] The probes having the nucleotide sequence represented by SEQ ID NOS: 192073, 192074, 192075, 192076, 192077, 192078, 192079, 192080, 192081, 192082, 192083 were selected from the ORFs having the nucleotide sequence represented by SEQ ID NO: 190891.

[16331] The probes having the nucleotide sequence represented by SEQ ID NOS: 192084, 192085, 192086, 192087, 192088, 192089, 192090, 192091, 192092, 192093, 192094 were selected from the ORFs having the nucleotide sequence represented by SEQ ID NO: 190892.

[16332] The probes having the nucleotide sequence represented by SEQ ID NOS: 192095, 192096, 192097, 192098, 192099, 192100, 192101, 192102, 192103, 192104, 192105 were selected from the ORFs having the nucleotide sequence represented by SEQ ID NO: 190893.

[16333] The probes having the nucleotide sequence represented by SEQ ID NOS: 192106, 192107, 192108, 192109, 192110, 192111, 192112, 192113, 192114, 192115, 192116 were selected from the ORFs having the nucleotide sequence represented by SEQ ID NO: 190894.

[16334] The probes having the nucleotide sequence represented by SEQ ID NOS: 192117, 192118, 192119, 192120, 192121, 192122, 192123, 192124, 192125, 192126, 192127 were selected from the ORFs having the nucleotide sequence represented by SEQ ID NO: 190895.

[16335] The probes having the nucleotide sequence represented by SEQ ID NOS: 192128, 192129, 192130, 192131, 192132, 192133, 192134, 192135, 192136, 192137, 192138 were selected from the ORFs having the nucleotide sequence represented by SEQ ID NO: 190896.

[16336] The probes having the nucleotide sequence represented by SEQ ID NOS: 192139, 192140, 192141, 192142, 192143, 192144, 192145, 192146, 192147, 192148, 192149 were selected from the ORFs having the nucleotide sequence represented by SEQ ID NO: 190897.

[16337] The probes having the nucleotide sequence represented by SEQ ID NOS: 192150, 192151, 192152, 192153, 192154, 192155, 192156, 192157, 192158, 192159, 192160 were selected from the ORFs having the nucleotide sequence represented by SEQ ID NO: 190898.

[16338] The probes having the nucleotide sequence represented by SEQ ID NOS: 192161, 192162, 192163, 192164, 192165, 192166, 192167, 192168 were selected from the ORFs having the nucleotide sequence represented by SEQ ID NO: 190899.

[16339] The probes having the nucleotide sequence represented by SEQ ID NOS: 192169, 192170, 192171, 192172, 192173, 192174, 192175, 192176, 192177, 192178, 192179 were selected from the ORFs having the nucleotide sequence represented by SEQ ID NO: 190900.

[16340] The probes having the nucleotide sequence represented by SEQ ID NOS: 192180, 192181, 192182, 192183, 192184, 192185, 192186, 192187, 192188, 192189, 192190 were selected from the ORFs having the nucleotide sequence represented by SEQ ID NO: 190901.

[16341] The probes having the nucleotide sequence represented by SEQ ID NOS: 192191, 192192, 192193, 192194, 192195, 192196, 192197, 192198, 192199, 192200, 192201 were selected from the ORFs having the nucleotide sequence represented by SEQ ID NO: 190902.

[16342] The probes having the nucleotide sequence represented by SEQ ID NOS: 192202, 192203, 192204, 192205, 192206, 192207, 192208, 192209, 192210, 192211, 192212 were selected from the ORFs having the nucleotide sequence represented by SEQ ID NO: 190903.

[16343] The probes having the nucleotide sequence represented by SEQ ID NOS: 192213, 192214, 192215, 192216, 192217, 192218, 192219, 192220, 192221, 192222, 192223 were selected from the ORFs having the nucleotide sequence represented by SEQ ID NO: 190904.

[16344] The probes having the nucleotide sequence represented by SEQ ID NOS: 192224, 192225, 192226, 192227, 192228, 192229, 192230, 192231, 192232, 192233, 192234 were selected from the ORFs having the nucleotide sequence represented by SEQ ID NO: 190905.

[16345] The probes having the nucleotide sequence represented by SEQ ID NOS: 192235, 192236, 192237, 192238, 192239, 192240, 192241, 192242, 192243, 192244, 192245 were selected from the ORFs having the nucleotide sequence represented by SEQ ID NO: 190906.

[16346] The probes having the nucleotide sequence represented by SEQ ID NOS: 192246, 192247, 192248, 192249, 192250, 192251, 192252, 192253 were selected from the ORFs having the nucleotide sequence represented by SEQ ID NO: 190907.

[16347] The probes having the nucleotide sequence represented by SEQ ID NOS: 192254, 192255, 192256, 192257, 192258, 192259, 192260, 192261, 192262, 192263, 192264 were selected from the ORFs having the nucleotide sequence represented by SEQ ID NO: 190908.

[16348] The probes having the nucleotide sequence represented by SEQ ID NOS: 192265, 192266, 192267, 192268, 192269, 192270, 192271, 192272, 192273, 192274, 192275 were selected from the ORFs having the nucleotide sequence represented by SEQ ID NO: 190909.

[16349] The probes having the nucleotide sequence represented by SEQ ID NOS: 192276, 192277, 192278, 192279, 192280, 192281, 192282, 192283, 192284, 192285, 192286 were selected from the ORFs having the nucleotide sequence represented by SEQ ID NO: 190910.

[16350] The probes having the nucleotide sequence represented by SEQ ID NOS: 192287, 192288, 192289, 192290, 192291, 192292, 192293, 192294, 192295, 192296, 192297 were selected from the ORFs having the nucleotide sequence represented by SEQ ID NO: 190911.

[16351] The probes having the nucleotide sequence represented by SEQ ID NOS: 192298, 192299, 192300, 192301, 192302, 192303, 192304, 192305, 192306, 192307, 192308 were selected from the ORFs having the nucleotide sequence represented by SEQ ID NO: 190912.

[16352] The probes having the nucleotide sequence represented by SEQ ID NOS: 192309, 192310, 192311, 192312, 192313, 192314, 192315, 192316, 192317, 192318, 192319 were selected from the ORFs having the nucleotide sequence represented by SEQ ID NO: 190913.

[16353] The probes having the nucleotide sequence represented by SEQ ID NOS: 192320, 192321, 192322, 192323, 192324, 192325, 192326, 192327, 192328, 192329, 192330 were selected from the ORFs having the nucleotide sequence represented by SEQ ID NO: 190914.

[16354] The probes having the nucleotide sequence represented by SEQ ID NOS: 192331, 192332, 192333, 192334, 192335, 192336, 192337, 192338, 192339, 192340, 192341 were selected from the ORFs having the nucleotide sequence represented by SEQ ID NO: 190915.

[16355] The probes having the nucleotide sequence represented by SEQ ID NOS: 192342, 192343, 192344, 192345, 192346, 192347, 192348, 192349, 192350, 192351, 192352 were selected from the ORFs having the nucleotide sequence represented by SEQ ID NO: 190916.

[16356] The probes having the nucleotide sequence represented by SEQ ID NOS: 192353, 192354, 192355, 192356, 192357, 192358, 192359, 192360 were selected from the ORFs having the nucleotide sequence represented by SEQ ID NO: 190917.

[16357] The probes having the nucleotide sequence represented by SEQ ID NOS: 192361, 192362, 192363, 192364, 192365, 192366, 192367, 192368, 192369, 192370, 192371 were selected from the ORFs having the nucleotide sequence represented by SEQ, ID NO: 190918.

[16358] The probes having the nucleotide sequence represented by SEQ ID NOS: 192372, 192373, 192374, 192375, 192376, 192377, 192378, 192379, 192380, 192381, 192382 were selected from the ORFs having the nucleotide sequence represented by SEQ ID NO: 190919.

[16359] The probes having the nucleotide sequence represented by SEQ ID NOS: 192383, 192384, 192385, 192386, 192387, 192388, 192389, 192390, 192391, 192392, 192393 were selected from the ORFs having the nucleotide sequence represented by SEQ ID NO: 190920.

[16360] The probes having the nucleotide sequence represented by SEQ ID NOS: 192394, 192395, 192396, 192397, 192398, 192399, 192400, 192401, 192402, 192403, 192404 were selected from the ORFs having the nucleotide sequence represented by SEQ ID NO: 190921.

[16361] The probes having the nucleotide sequence represented by SEQ ID NOS: 192405, 192406, 192407, 192408, 192409, 192410, 192411, 192412, 192413, 192414, 192415 were selected from the ORFs having the nucleotide sequence represented by SEQ ID NO: 190922.

[16362] The probes having the nucleotide sequence represented by SEQ ID NOS: 192416, 192417, 192418, 192419, 192420, 192421, 192422, 192423, 192424, 192425, 192426 were selected from the ORFs having the nucleotide sequence represented by SEQ ID NO: 190923.

[16363] The probes having the nucleotide sequence represented by SEQ ID NOS: 192427, 192428, 192429, 192430, 192431, 192432, 192433, 192434, 192435, 192436, 192437 were selected from the ORFs having the nucleotide sequence represented by SEQ ID NO: 190924.

[16364] The probes having the nucleotide sequence represented by SEQ ID NOS: 192438, 192439, 192440, 192441, 192442, 192443, 192444, 192445, 192446, 192447, 192448 were selected from the ORFs having the nucleotide sequence represented by SEQ ID NO: 190925.

[16365] The probes having the nucleotide sequence represented by SEQ ID NOS: 192449, 192450, 192451, 192452, 192453, 192454, 192455, 192456, 192457, 192458, 192459 were selected from the ORFs having the nucleotide sequence represented by SEQ ID NO: 190926.

[16366] The probes having the nucleotide sequence represented by SEQ ID NOS: 192460, 192461, 192462, 192463, 192464, 192465, 192466, 192467, 192468, 192469, 192470 were selected from the ORFs having the nucleotide sequence represented by SEQ ID NO: 190927.

[16367] The probes having the nucleotide sequence represented by SEQ ID NOS: 192471, 192472, 192473, 192474, 192475, 192476, 192477, 192478, 192479, 192480, 192481 were selected from the ORFs having the nucleotide sequence represented by SEQ ID NO: 190928.

[16368] The probes having the nucleotide sequence represented by SEQ ID NOS: 192482, 192483, 192484, 192485, 192486, 192487, 192488, 192489, 192490, 192491, 192492 were selected from the ORFs having the nucleotide sequence represented by SEQ ID NO: 190929.

[16369] The probes having the nucleotide sequence represented by SEQ ID NOS: 192493, 192494, 192495, 192496, 192497, 192498, 192499, 192500, 192501, 192502, 192503 were selected from the ORFs having the nucleotide sequence represented by SEQ ID NO: 190930.

[16370] The probes having the nucleotide sequence represented by SEQ ID NOS: 192504, 192505, 192506, 192507, 192508, 192509, 192510, 192511, 192512, 192513, 192514 were selected from the ORFs having the nucleotide sequence represented by SEQ ID NO: 190931.

[16371] The probes having the nucleotide sequence represented by SEQ ID NOS: 192515, 192516, 192517, 192518, 192519, 192520, 192521, 192522, 192523, 192524, 192525 were selected from the ORFs having the nucleotide sequence represented by SEQ ID NO: 190932.

[16372] The probes having the nucleotide sequence represented by SEQ ID NOS: 192526, 192527, 192528, 192529, 192530, 192531, 192532, 192533, 192534, 192535 were selected from the ORFs having the nucleotide sequence represented by SEQ ID NO: 190933.

[16373] The probes having the nucleotide sequence represented by SEQ ID NOS: 192536, 192537, 192538, 192539, 192540, 192541, 192542, 192543, 192544, 192545, 192546 were selected from the ORFs having the nucleotide sequence represented by SEQ ID NO: 190934.

[16374] The probes having the nucleotide sequence represented by SEQ ID NOS: 192547, 192548, 192549, 192550, 192551, 192552, 192553, 192554, 192555, 192556, 192557 were selected from the ORFs having the nucleotide sequence represented by SEQ ID NO: 190935.

[16375] The probes having the nucleotide sequence represented by SEQ ID NOS: 192558, 192559, 192560, 192561, 192562, 192563, 192564, 192565, 192566, 192567, 192568 were selected from the ORFs having the nucleotide sequence represented by SEQ ID NO: 190936.

[16376] The probes having the nucleotide sequence represented by SEQ ID NOS: 192569, 192570, 192571, 192572, 192573, 192574, 192575, 192576, 192577, 192578, 192579 were selected from the ORFs having the nucleotide sequence represented by SEQ ID NO: 190937.

[16377] The probes having the nucleotide sequence represented by SEQ ID NOS: 192580, 192581, 192582, 192583, 192584, 192585, 192586, 192587, 192588, 192589, 192590 were selected from the ORFs having the nucleotide sequence represented by SEQ ID NO: 190938.

[16378] The probes having the nucleotide sequence represented by SEQ ID NOS: 192591, 192592, 192593, 192594, 192595, 192596, 192597, 192598, 192599, 192600, 192601 were selected from the ORFs having the nucleotide sequence represented by SEQ ID NO: 190939.

[16379] The probes having the nucleotide sequence represented by SEQ ID NOS: 192602, 192603, 192604, 192605, 192606, 192607, 192608, 192609, 192610, 192611, 192612 were selected from the ORFs having the nucleotide sequence represented by SEQ ID NO: 190940.

[16380] The probes having the nucleotide sequence represented by SEQ ID NOS: 192613, 192614, 192615, 192616, 192617, 192618, 192619, 192620, 192621, 192622, 192623 were selected from the ORFs having the nucleotide sequence represented by SEQ ID NO: 190941.

[16381] The probes having the nucleotide sequence represented by SEQ ID NOS: 192624, 192625, 192626, 192627, 192628, 192629, 192630, 192631, 192632, 192633, 192634 were selected from the ORFs having the nucleotide sequence represented by SEQ ID NO: 190942.

[16382] The probes having the nucleotide sequence represented by SEQ ID NOS: 192635, 192636, 192637, 192638, 192639, 192640, 192641, 192642, 192643, 192644, 192645 were selected from the ORFs having the nucleotide sequence represented by SEQ ID NO: 190943.

[16383] The probes having the nucleotide sequence represented by SEQ ID NOS: 192646, 192647, 192648, 192649, 192650, 192651, 192652, 192653 were selected from the ORFs having the nucleotide sequence represented by SEQ ID NO: 190944.

[16384] The probes having the nucleotide sequence represented by SEQ ID NOS: 192654, 192655, 192656, 192657, 192658, 192659, 192660, 192661, 192662, 192663, 192664 were selected from the ORFs having the nucleotide sequence represented by SEQ ID NO: 190945.

[16385] The probes having the nucleotide sequence represented by SEQ ID NOS: 192665, 192666, 192667, 192668, 192669, 192670, 192671, 192672, 192673, 192674, 192675 were selected from the ORFs having the nucleotide sequence represented by SEQ ID NO: 190946.

[16386] The probes having the nucleotide sequence represented by SEQ ID NOS: 192676, 192677, 192678, 192679, 192680, 192681, 192682, 192683, 192684, 192685, 192686 were selected from the ORFs having the nucleotide sequence represented by SEQ ID NO: 190947.

[16387] The probes having the nucleotide sequence represented by SEQ ID NOS: 192687, 192688, 192689, 192690, 192691, 192692, 192693, 192694, 192695, 192696, 192697 were selected from the ORFs having the nucleotide sequence represented by SEQ ID NO: 190948.

[16388] The probes having the nucleotide sequence represented by SEQ ID NOS: 192698, 192699, 192700, 192701, 192702, 192703, 192704, 192705, 192706, 192707, 192708 were selected from the ORFs having the nucleotide sequence represented by SEQ ID NO: 190949.

[16389] The probes having the nucleotide sequence represented by SEQ ID NOS: 192709, 192710, 192711, 192712, 192713, 192714, 192715, 192716, 192717, 192718, 192719 were selected from the ORFs having the nucleotide sequence represented by SEQ ID NO: 190950.

[16390] The probes having the nucleotide sequence represented by SEQ ID NOS: 192720, 192721, 192722, 192723, 192724, 192725, 192726, 192727 were selected from the ORFs having the nucleotide sequence represented by SEQ ID NO: 190951.

[16391] The probes having the nucleotide sequence represented by SEQ ID NOS: 192728, 192729, 192730, 192731, 192732, 192733, 192734, 192735, 192736, 192737, 192738 were selected from the ORFs having the nucleotide sequence represented by SEQ ID NO: 190952.

[16392] The probes having the nucleotide sequence represented by SEQ ID NOS: 192739, 192740, 192741, 192742, 192743, 192744, 192745, 192746, 192747, 192748, 192749 were selected from the ORFs having the nucleotide sequence represented by SEQ ID NO: 190953.

[16393] The probes having the nucleotide sequence represented by SEQ ID NOS: 192750, 192751, 192752, 192753, 192754, 192755, 192756, 192757, 192758, 192759, 192760 were selected from the ORFs having the nucleotide sequence represented by SEQ ID NO: 190954.

[16394] The probes having the nucleotide sequence represented by SEQ ID NOS: 192761, 192762, 192763, 192764, 192765, 192766, 192767, 192768, 192769, 192770, 192771 were selected from the ORFs having the nucleotide sequence represented by SEQ ID NO: 190955.

[16395] The probes having the nucleotide sequence represented by SEQ ID NOS: 192772, 192773, 192774, 192775, 192776, 192777, 192778, 192779, 192780, 192781, 192782 were selected from the ORFs having the nucleotide sequence represented by SEQ ID NO: 190956.

[16396] The probes having the nucleotide sequence represented by SEQ ID NOS: 192783, 192784, 192785, 192786, 192787, 192788, 192789, 192790, 192791, 192792, 192793 were selected from the ORFs having the nucleotide sequence represented by SEQ ID NO: 190957.

[16397] The probes having the nucleotide sequence represented by SEQ ID NOS: 192794, 192795, 192796, 192797, 192798, 192799, 192800, 192801, 192802, 192803, 192804 were selected from the ORFs having the nucleotide sequence represented by SEQ ID NO: 190958.

[16398] The probes having the nucleotide sequence represented by SEQ ID NOS: 192805, 192806, 192807, 192808, 192809, 192810, 192811, 192812, 192813, 192814, 192815 were selected from the ORFs having the nucleotide sequence represented by SEQ ID NO: 190959.

[16399] The probes having the nucleotide sequence represented by SEQ ID NOS: 192816, 192817, 192818, 192819, 192820, 192821, 192822, 192823, 192824, 192825, 192826 were selected from the ORFs having the nucleotide sequence represented by SEQ ID NO: 190960.

[16400] The probes having the nucleotide sequence represented by SEQ ID NOS: 192827, 192828, 192829, 192830, 192831, 192832, 192833, 192834, 192835, 192836, 192837 were selected from the ORFs having the nucleotide sequence represented by SEQ ID NO: 190961.

[16401] The probes having the nucleotide sequence represented by SEQ ID NOS: 192838, 192839, 192840, 192841, 192842, 192843, 192844, 192845, 192846, 192847, 192848 were selected from the ORFs having the nucleotide sequence represented by SEQ ID NO: 190962.

[16402] The probes having the nucleotide sequence represented by SEQ ID NOS: 192849, 192850, 192851, 192852, 192853, 192854, 192855, 192856, 192857, 192858, 192859 were selected from the ORFs having the nucleotide sequence represented by SEQ ID NO: 190963.

[16403] The probes having the nucleotide sequence represented by SEQ ID NOS: 192860, 192861, 192862, 192863, 192864, 192865, 192866, 192867, 192868, 192869, 192870 were selected from the ORFs having the nucleotide sequence represented by SEQ ID NO: 190964.

[16404] The probes having the nucleotide sequence represented by SEQ ID NOS: 192871, 192872, 192873, 192874, 192875, 192876, 192877, 192878, 192879, 192880, 192881 were selected from the ORFs having the nucleotide sequence represented by SEQ ID NO: 190965.

[16405] The probes having the nucleotide sequence represented by SEQ ID NOS: 192882, 192883, 192884, 192885, 192886, 192887, 192888, 192889, 192890, 192891, 192892 were selected from the ORFs having the nucleotide sequence represented by SEQ ID NO: 190966.

[16406] The probes having the nucleotide sequence represented by SEQ ID NOS: 192893, 192894, 192895, 192896, 192897, 192898, 192899, 192900, 192901, 192902, 192903 were selected from the ORFs having the nucleotide sequence represented by SEQ ID NO: 190967.

[16407] The probes having the nucleotide sequence represented by SEQ ID NOS: 192904, 192905, 192906, 192907, 192908, 192909, 192910, 192911, 192912, 192913, 192914 were selected from the ORFs having the nucleotide sequence represented by SEQ ID NO: 190968.

[16408] The probes having the nucleotide sequence represented by SEQ ID NOS: 192915, 192916, 192917, 192918, 192919, 192920, 192921, 192922, 192923, 192924, 192925 were selected from the ORFs having the nucleotide sequence represented by SEQ ID NO: 190969.

[16409] The probes having the nucleotide sequence represented by SEQ ID NOS: 192926, 192927, 192928, 192929, 192930, 192931, 192932, 192933, 192934, 192935, 192936 were selected from the ORFs having the nucleotide sequence represented by SEQ ID NO: 190970.

[16410] The probes having the nucleotide sequence represented by SEQ ID NOS: 192937, 192938, 192939, 192940, 192941, 192942, 192943, 192944, 192945, 192946, 192947 were selected from the ORFs having the nucleotide sequence represented by SEQ ID NO: 190971.

[16411] The probes having the nucleotide sequence represented by SEQ ID NOS: 192948, 192949, 192950, 192951, 192952, 192953, 192954, 192955, 192956, 192957, 192958 were selected from the ORFs having the nucleotide sequence represented by SEQ ID NO: 190972.

[16412] The probes having the nucleotide sequence represented by SEQ ID NOS: 192959, 192960, 192961, 192962, 192963, 192964, 192965, 192966, 192967, 192968, 192969 were selected from the ORFs having the nucleotide sequence represented by SEQ ID NO: 190973.

[16413] The probes having the nucleotide sequence represented by SEQ ID NOS: 192970, 192971, 192972, 192973, 192974, 192975, 192976, 192977, 192978, 192979, 192980 were selected from the ORFs having the nucleotide sequence represented by SEQ ID NO: 190974.

[16414] The probes having the nucleotide sequence represented by SEQ ID NOS: 192981, 192982, 192983, 192984, 192985, 192986, 192987, 192988, 192989, 192990, 192991 were selected from the ORFs having the nucleotide sequence represented by SEQ ID NO: 190975.

[16415] The probes having the nucleotide sequence represented by SEQ ID NOS: 192992, 192993, 192994, 192995, 192996, 192997, 192998, 192999, 193000, 193001, 193002 were selected from the ORFs having the nucleotide sequence represented by SEQ ID NO: 190976.

[16416] The probes having the nucleotide sequence represented by SEQ ID NOS: 193003, 193004, 193005, 193006, 193007, 193008, 193009, 193010, 193011, 193012, 193013 were selected from the ORFs having the nucleotide sequence represented by SEQ ID NO: 190977.

[16417] The probes having the nucleotide sequence represented by SEQ ID NOS: 193014, 193015, 193016, 193017, 193018, 193019, 193020, 193021, 193022, 193023, 193024 were selected from the ORFs having the nucleotide sequence represented by SEQ ID NO: 190978.

[16418] The probes having the nucleotide sequence represented by SEQ ID NOS: 193036, 193037, 193038, 193039, 193040, 193041, 193042, 193043, 193044, 193045, 193046 were selected from the ORFs having the nucleotide sequence represented by SEQ ID NO: 190979.

[16419] The probes having the nucleotide sequence represented by SEQ ID NOS: 193025, 193026, 193027, 193028, 193029, 193030, 193031, 193032, 193033, 193034, 193035 were selected from the ORFs having the nucleotide sequence represented by SEQ ID NO: 190980.

[16420] The probes having the nucleotide sequence represented by SEQ ID NOS: 193047, 193048, 193049, 193050, 193051, 193052, 193053, 193054, 193055, 193056, 193057 were selected from the ORFs having the nucleotide sequence represented by SEQ ID NO: 190981.

[16421] The probes having the nucleotide sequence represented by SEQ ID NOS: 193058, 193059, 193060, 193061, 193062, 193063, 193064, 193065, 193066, 193067, 193068 were selected from the ORFs having the nucleotide sequence represented by SEQ ID NO: 190982.

[16422] The probes having the nucleotide sequence represented by SEQ ID NOS: 193069, 193070, 193071, 193072, 193073, 193074, 193075, 193076, 193077, 193078, 193079 were selected from the ORFs having the nucleotide sequence represented by SEQ ID NO: 190983.

[16423] The probes having the nucleotide sequence represented by SEQ ID NOS: 193080, 193081, 193082, 193083, 193084, 193085, 193086, 193087, 193088, 193089, 193090 were selected from the ORFs having the nucleotide sequence represented by SEQ ID NO: 190984.

[16424] The probes having the nucleotide sequence represented by SEQ ID NOS: 193091, 193092, 193093, 193094, 193095, 193096, 193097, 193098, 193099, 193100, 193101 were selected from the ORFs having the nucleotide sequence represented by SEQ ID NO: 190985.

[16425] The probes having the nucleotide sequence represented by SEQ ID NOS: 193102, 193103, 193104, 193105, 193106, 193107, 193108, 193109, 193110, 193111, 193112 were selected from the ORFs having the nucleotide sequence represented by SEQ ID NO: 190986.

[16426] The probes having the nucleotide sequence represented by SEQ ID NOS: 193113, 193114, 193115, 193116, 193117, 193118, 193119, 193120, 193121, 193122, 193123 were selected from the ORFs having the nucleotide sequence represented by SEQ ID NO: 190987.

[16427] The probes having the nucleotide sequence represented by SEQ ID NOS: 193124, 193125, 193126, 193127, 193128, 193129, 193130, 193131, 193132, 193133, 193134 were selected from the ORFs having the nucleotide sequence represented by SEQ ID NO: 190988.

[16428] The probes having the nucleotide sequence represented by SEQ ID NOS: 193135, 193136, 193137, 193138, 193139, 193140, 193141, 193142, 193143, 193144, 193145 were selected from the ORFs having the nucleotide sequence represented by SEQ ID NO: 190989.

[16429] The probes having the nucleotide sequence represented by SEQ ID NOS: 193146, 193147, 193148, 193149, 193150, 193151, 193152, 193153, 193154, 193155, 193156 were selected from the ORFs having the nucleotide sequence represented by SEQ ID NO: 190990.

[16430] The probes having the nucleotide sequence represented by SEQ ID NOS: 193157, 193158, 193159, 193160, 193161, 193162, 193163, 193164, 193165, 193166, 193167 were selected from the ORFs having the nucleotide sequence represented by SEQ ID NO: 190991.

[16431] The probes having the nucleotide sequence represented by SEQ ID NOS: 193168, 193169, 193170, 193171, 193172, 193173, 193174, 193175, 193176, 193177, 193178 were selected from the ORFs having the nucleotide sequence represented by SEQ ID NO: 190992.

[16432] The probes having the nucleotide sequence represented by SEQ ID NOS: 193179, 193180, 193181, 193182, 193183, 193184, 193185, 193186, 193187, 193188, 193189 were selected from the ORFs having the nucleotide sequence represented by SEQ ID NO: 190993.

[16433] The probes having the nucleotide sequence represented by SEQ ID NOS: 193190, 193191, 193192, 193193, 193194, 193195, 193196, 193197, 193198, 193199, 193200 were selected from the ORFs having the nucleotide sequence represented by SEQ ID NO: 190994.

[16434] The probes having the nucleotide sequence represented by SEQ ID NOS: 193201, 193202, 193203, 193204, 193205, 193206, 193207, 193208, 193209, 193210, 193211 were selected from the ORFs having the nucleotide sequence represented by SEQ ID NO: 190995.

[16435] The probes having the nucleotide sequence represented by SEQ ID NOS: 193212, 193213, 193214, 193215, 193216, 193217, 193218, 193219, 193220, 193221, 193222 were selected from the ORFs having the nucleotide sequence represented by SEQ ID NO: 190996.

[16436] The probes having the nucleotide sequence represented by SEQ ID NOS: 193223, 193224, 193225, 193226, 193227, 193228, 193229, 193230, 193231, 193232, 193233 were selected from the ORFs having the nucleotide sequence represented by SEQ ID NO: 190997.

[16437] The probes having the nucleotide sequence represented by SEQ ID NOS: 193234, 193235, 193236, 193237, 193238, 193239, 193240, 193241, 193242, 193243, 193244 were selected from the ORFs having the nucleotide sequence represented by SEQ ID NO: 190998.

[16438] The probes having the nucleotide sequence represented by SEQ ID NOS: 193245, 193246, 193247, 193248, 193249, 193250, 193251, 193252, 193253, 193254, 193255 were selected from the ORFs having the nucleotide sequence represented by SEQ ID NO: 190999.

[16439] The probes having the nucleotide sequence represented by SEQ ID NOS: 193256, 193257, 193258, 193259, 193260, 193261, 193262, 193263, 193264, 193265, 193266 were selected from the ORFs having the nucleotide sequence represented by SEQ ID NO: 191000.

[16440] The probes having the nucleotide sequence represented by SEQ ID NOS: 193267, 193268, 193269, 193270, 193271, 193272, 193273, 193274, 193275, 193276, 193277 were selected from the ORFs having the nucleotide sequence represented by SEQ ID NO: 191001.

[16441] The probes having the nucleotide sequence represented by SEQ ID NOS: 193278, 193279, 193280, 193281, 193282, 193283, 193284, 193285, 193286, 193287, 193288 were selected from the ORFs having the nucleotide sequence represented by SEQ ID NO: 191002.

[16442] The probes having the nucleotide sequence represented by SEQ ID NOS: 193289, 193290, 193291, 193292, 193293, 193294, 193295, 193296, 193297, 193298, 193299 were selected from the ORFs having the nucleotide sequence represented by SEQ ID NO: 191003.

[16443] The probes having the nucleotide sequence represented by SEQ ID NOS: 193300, 193301, 193302, 193303, 193304, 193305, 193306, 193307, 193308, 193309, 193310 were selected from the ORFs having the nucleotide sequence represented by SEQ ID NO: 191004.

[16444] The probes having the nucleotide sequence represented by SEQ ID NOS: 193311, 193312, 193313, 193314, 193315, 193316, 193317, 193318, 193319, 193320, 193321 were selected from the ORFs having the nucleotide sequence represented by SEQ ID NO: 191005.

[16445] The probes having the nucleotide sequence represented by SEQ ID NOS: 193322, 193323, 193324, 193325, 193326, 193327, 193328, 193329, 193330, 193331, 193332 were selected from the ORFs having the nucleotide sequence represented by SEQ ID NO: 191006.

[16446] The probes having the nucleotide sequence represented by SEQ ID NOS: 193333, 193334, 193335, 193336, 193337, 193338, 193339, 193340, 193341, 193342, 193343 were selected from the ORFs having the nucleotide sequence represented by SEQ ID NO: 191007.

[16447] The probes having the nucleotide sequence represented by SEQ ID NOS: 193344, 193345, 193346, 193347, 193348, 193349, 193350, 193351, 193352, 193353, 193354 were selected from the ORFs having the nucleotide sequence represented by SEQ ID NO: 191008.

[16448] The probes having the nucleotide sequence represented by SEQ ID NOS: 193355, 193356, 193357, 193358, 193359, 193360, 193361, 193362, 193363, 193364, 193365 were selected from the ORFs having the nucleotide sequence represented by SEQ ID NO: 191009.

[16449] The probes having the nucleotide sequence represented by SEQ ID NOS: 193366, 193367, 193368, 193369, 193370, 193371, 193372, 193373, 193374, 193375, 193376 were selected from the ORFs having the nucleotide sequence represented by SEQ ID NO: 191010.

[16450] The probes having the nucleotide sequence represented by SEQ ID NOS: 193377, 193378, 193379, 193380, 193381, 193382, 193383, 193384, 193385, 193386, 193387 were selected from the ORFs having the nucleotide sequence represented by SEQ ID NO: 191011.

[16451] The probes having the nucleotide sequence represented by SEQ ID NOS: 193388, 193389, 193390, 193391, 193392, 193393, 193394, 193395, 193396, 193397, 193398 were selected from the ORFs having the nucleotide sequence represented by SEQ ID NO: 191012.

[16452] The probes having the nucleotide sequence represented by SEQ ID NOS: 193399, 193400, 193401, 193402, 193403, 193404, 193405, 193406, 193407, 193408, 193409 were selected from the ORFs having the nucleotide sequence represented by SEQ ID NO: 191013.

[16453] The probes having the nucleotide sequence represented by SEQ ID NOS: 193410, 193411, 193412, 193413, 193414, 193415, 193416, 193417, 193418, 193419, 193420 were selected from the ORFs having the nucleotide sequence represented by SEQ ID NO: 191014.

[16454] The probes having the nucleotide sequence represented by SEQ ID NOS: 193421, 193422, 193423, 193424, 193425, 193426, 193427, 193428, 193429, 193430, 193431 were selected from the ORFs having the nucleotide sequence represented by SEQ ID NO: 191015.

[16455] The probes having the nucleotide sequence represented by SEQ ID NOS: 193432, 193433, 193434, 193435, 193436, 193437, 193438, 193439, 193440, 193441, 193442 were selected from the ORFs having the nucleotide sequence represented by SEQ ID NO: 191016.

[16456] The probes having the nucleotide sequence represented by SEQ ID NOS: 193443, 193444, 193445, 193446, 193447, 193448, 193449, 193450, 193451, 193452, 193453 were selected from the ORFs having the nucleotide sequence represented by SEQ ID NO: 191017.

[16457] The probes having the nucleotide sequence represented by SEQ ID NOS: 193454, 193455, 193456, 193457, 193458, 193459, 193460, 193461, 193462, 193463, 193464 were selected from the ORFs having the nucleotide sequence represented by SEQ ID NO: 191018.

[16458] The probes having the nucleotide sequence represented by SEQ ID NOS: 193465, 193466, 193467, 193468, 193469, 193470, 193471, 193472, 193473, 193474, 193475 were selected from the ORFs having the nucleotide sequence represented by SEQ ID NO: 191019.

[16459] The probes having the nucleotide sequence represented by SEQ ID NOS: 193476, 193477, 193478, 193479, 193480, 193481, 193482, 193483, 193484, 193485, 193486 were selected from the ORFs having the nucleotide sequence represented by SEQ ID NO: 191020.

[16460] The probes having the nucleotide sequence represented by SEQ ID NOS: 193487, 193488, 193489, 193490, 193491, 193492, 193493, 193494, 193495, 193496, 193497 were selected from the ORFs having the nucleotide sequence represented by SEQ ID NO: 191021.

[16461] The probes having the nucleotide sequence represented by SEQ ID NOS: 193498, 193499, 193500, 193501, 193502, 193503, 193504, 193505, 193506, 193507, 193508 were selected from the ORFs having the nucleotide sequence represented by SEQ ID NO: 191022.

[16462] The probes having the nucleotide sequence represented by SEQ ID NOS: 193509, 193510, 193511, 193512, 193513, 193514, 193515, 193516, 193517, 193518, 193519 were selected from the ORFs having the nucleotide sequence represented by SEQ ID NO: 191023.

[16463] The probes having the nucleotide sequence represented by SEQ ID NOS: 193520, 193521, 193522, 193523, 193524, 193525, 193526, 193527, 193528, 193529, 193530 were selected from the ORFs having the nucleotide sequence represented by SEQ ID NO: 191024.

[16464] The probes having the nucleotide sequence represented by SEQ ID NOS: 193531, 193532, 193533, 193534, 193535, 193536, 193537, 193538, 193539, 193540, 193541 were selected from the ORFs having the nucleotide sequence represented by SEQ ID NO: 191025.

[16465] The probes having the nucleotide sequence represented by SEQ ID NOS: 193542, 193543, 193544, 193545, 193546, 193547, 193548, 193549, 193550, 193551, 193552 were selected from the ORFs having the nucleotide sequence represented by SEQ ID NO: 191026.

[16466] The probes having the nucleotide sequence represented by SEQ ID NOS: 193553, 193554, 193555, 193556, 193557, 193558, 193559, 193560, 193561, 193562, 193563 were selected from the ORFs having the nucleotide sequence represented by SEQ ID NO: 191027.

[16467] The probes having the nucleotide sequence represented by SEQ ID NOS: 193564, 193565, 193566, 193567, 193568, 193569, 193570, 193571, 193572, 193573, 193574 were selected from the ORFs having the nucleotide sequence represented by SEQ ID NO: 191028.

[16468] The probes having the nucleotide sequence represented by SEQ ID NOS: 193575, 193576, 193577, 193578, 193579, 193580, 193581, 193582, 193583, 193584, 193585 were selected from the ORFs having the nucleotide sequence represented by SEQ ID NO: 191029.

[16469] The probes having the nucleotide sequence represented by SEQ ID NOS: 193586, 193587, 193588, 193589, 193590, 193591, 193592, 193593, 193594, 193595, 193596 were selected from the ORFs having the nucleotide sequence represented by SEQ ID NO: 191030.

[16470] The probes having the nucleotide sequence represented by SEQ ID NOS: 193597, 193598, 193599, 193600, 193601, 193602, 193603, 193604, 193605, 193606, 193607 were selected from the ORFs having the nucleotide sequence represented by SEQ ID NO: 191031.

[16471] The probes having the nucleotide sequence represented by SEQ ID NOS: 193608, 193609, 193610, 193611, 193612, 193613, 193614, 193615, 193616, 193617, 193618 were selected from the ORFs having the nucleotide sequence represented by SEQ ID NO: 191032.

[16472] The probes having the nucleotide sequence represented by SEQ ID NOS: 193619, 193620, 193621, 193622, 193623, 193624, 193625, 193626, 193627, 193628, 193629 were selected from the ORFs having the nucleotide sequence represented by SEQ ID NO: 191033.

[16473] The probes having the nucleotide sequence represented by SEQ ID NOS: 193630, 193631, 193632, 193633, 193634, 193635, 193636, 193637, 193638, 193639, 193640 were selected from the ORFs having the nucleotide sequence represented by SEQ ID NO: 191034.

[16474] The probes having the nucleotide sequence represented by SEQ ID NOS: 193641, 193642, 193643, 193644, 193645, 193646, 193647, 193648, 193649, 193650, 193651 were selected from the ORFs having the nucleotide sequence represented by SEQ ID NO: 191035.

[16475] The probes having the nucleotide sequence represented by SEQ ID NOS: 193652, 193653, 193654, 193655, 193656, 193657, 193658, 193659, 193660, 193661, 193662 were selected from the ORFs having the nucleotide sequence represented by SEQ ID NO: 191036.

[16476] The probes having the nucleotide sequence represented by SEQ ID NOS: 193663, 193664, 193665, 193666, 193667, 193668, 193669, 193670, 193671, 193672, 193673 were selected from the ORFs having the nucleotide sequence represented by SEQ ID NO: 191037.

[16477] The probes having the nucleotide sequence represented by SEQ ID NOS: 193674, 193675, 193676, 193677, 193678, 193679, 193680, 193681, 193682, 193683, 193684 were selected from the ORFs having the nucleotide sequence represented by SEQ ID NO: 191038.

[16478] The probes having the nucleotide sequence represented by SEQ ID NOS: 193685, 193686, 193687, 193688, 193689, 193690, 193691, 193692, 193693, 193694, 193695 were selected from the ORFs having the nucleotide sequence represented by SEQ ID NO: 191039.

[16479] The probes having the nucleotide sequence represented by SEQ ID NOS: 193696, 193697, 193698, 193699, 193700, 193701, 193702, 193703, 193704, 193705, 193706 were selected from the ORFs having the nucleotide sequence represented by SEQ ID NO: 191040.

[16480] The probes having the nucleotide sequence represented by SEQ ID NOS: 193707, 193708, 193709, 193710, 193711, 193712, 193713, 193714, 193715, 193716, 193717 were selected from the ORFs having the nucleotide sequence represented by SEQ ID NO: 191041.

[16481] The probes having the nucleotide sequence represented by SEQ ID NOS: 193718, 193719, 193720, 193721, 193722, 193723, 193724, 193725, 193726, 193727, 193728 were selected from the ORFs having the nucleotide sequence represented by SEQ ID NO: 191042.

[16482] The probes having the nucleotide sequence represented by SEQ ID NOS: 193729, 193730, 193731, 193732, 193733, 193734, 193735, 193736, 193737, 193738, 193739 were selected from the ORFs having the nucleotide sequence represented by SEQ ID NO: 191043.

[16483] The probes having the nucleotide sequence represented by SEQ ID NOS: 193740, 193741, 193742, 193743, 193744, 193745, 193746, 193747, 193748, 193749, 193750 were selected from the ORFs having the nucleotide sequence represented by SEQ ID NO: 191044.

[16484] The probes having the nucleotide sequence represented by SEQ ID NOS: 193751, 193752, 193753, 193754, 193755, 193756, 193757, 193758, 193759, 193760, 193761 were selected from the ORFs having the nucleotide sequence represented by SEQ ID NO: 191045.

[16485] The probes having the nucleotide sequence represented by SEQ ID NOS: 193762, 193763, 193764, 193765, 193766, 193767, 193768, 193769, 193770, 193771, 193772 were selected from the ORFs having the nucleotide sequence represented by SEQ ID NO: 191046.

[16486] The probes having the nucleotide sequence represented by SEQ ID NOS: 193773, 193774, 193775, 193776, 193777, 193778, 193779, 193780, 193781, 193782, 193783 were selected from the ORFs having the nucleotide sequence represented by SEQ ID NO: 191047.

[16487] The probes having the nucleotide sequence represented by SEQ ID NOS: 193784, 193785, 193786, 193787, 193788, 193789, 193790, 193791, 193792, 193793, 193794 were selected from the ORFs having the nucleotide sequence represented by SEQ ID NO: 191048.

[16488] The probes having the nucleotide sequence represented by SEQ ID NOS: 193795, 193796, 193797, 193798, 193799, 193800, 193801, 193802, 193803, 193804, 193805 were selected from the ORFs having the nucleotide sequence represented by SEQ ID NO: 191049.

[16489] The probes having the nucleotide sequence represented by SEQ ID NOS: 193806, 193807, 193808, 193809, 193810, 193811, 193812, 193813, 193814, 193815, 193816 were selected from the ORFs having the nucleotide sequence represented by SEQ ID NO: 191050.

[16490] The probes having the nucleotide sequence represented by SEQ ID NOS: 193817, 193818, 193819, 193820, 193821, 193822, 193823, 193824, 193825, 193826, 193827 were selected from the ORFs having the nucleotide sequence represented by SEQ ID NO: 191051.

[16491] The probes having the nucleotide sequence represented by SEQ ID NOS: 193828, 193829, 193830, 193831, 193832, 193833, 193834, 193835, 193836, 193837, 193838 were selected from the ORFs having the nucleotide sequence represented by SEQ ID NO: 191052.

[16492] The probes having the nucleotide sequence represented by SEQ ID NOS: 193839, 193840, 193841, 193842, 193843, 193844, 193845, 193846, 193847, 193848, 193849 were selected from the ORFs having the nucleotide sequence represented by SEQ ID NO: 191053.

[16493] The probes having the nucleotide sequence represented by SEQ ID NOS: 193850, 193851, 193852, 193853, 193854, 193855, 193856, 193857, 193858, 193859, 193860 were selected from the ORFs having the nucleotide sequence represented by SEQ ID NO: 191054.

[16494] The probes having the nucleotide sequence represented by SEQ ID NOS: 193861, 193862, 193863, 193864, 193865, 193866, 193867, 193868, 193869, 193870, 193871 were selected from the ORFs having the nucleotide sequence represented by SEQ ID NO: 191055.

[16495] The probes having the nucleotide sequence represented by SEQ ID NOS: 193872, 193873, 193874, 193875, 193876, 193877, 193878, 193879, 193880, 193881, 193882 were selected from the ORFs having the nucleotide sequence represented by SEQ ID NO: 191056.

[16496] The probes having the nucleotide sequence represented by SEQ ID NOS: 193883, 193884, 193885, 193886, 193887, 193888, 193889, 193890, 193891, 193892 were selected from the ORFs having the nucleotide sequence represented by SEQ ID NO: 191057.

[16497] The probes having the nucleotide sequence represented by SEQ ID NOS: 193893, 193894, 193895, 193896, 193897, 193898, 193899, 193900, 193901, 193902, 193903 were selected from the ORFs having the nucleotide sequence represented by SEQ ID NO: 191058.

[16498] The probes having the nucleotide sequence represented by SEQ ID NOS: 193904, 193905, 193906, 193907, 193908, 193909, 193910, 193911, 193912, 193913, 193914 were selected from the ORFs having. the nucleotide sequence represented by SEQ ID NO: 191059.

[16499] The probes having the nucleotide sequence represented by SEQ ID NOS: 193915, 193916, 193917, 193918, 193919, 193920, 193921, 193922, 193923, 193924, 193925 were selected from the ORFs having the nucleotide sequence represented by SEQ ID NO: 191060.

[16500] The probes having the nucleotide sequence represented by SEQ ID NOS: 193926, 193927, 193928, 193929, 193930, 193931, 193932, 193933, 193934, 193935, 193936 were selected from the ORFs having the nucleotide sequence represented by SEQ ID NO: 191061.

[16501] The probes having the nucleotide sequence represented by SEQ ID NOS: 193937, 193938, 193939, 193940, 193941, 193942, 193943, 193944, 193945, 193946, 193947 were selected from the ORFs having the nucleotide sequence represented by SEQ ID NO: 191062.

[16502] The probes having the nucleotide sequence represented by SEQ ID NOS: 193948, 193949, 193950, 193951, 193952, 193953, 193954, 193955, 193956, 193957, 193958 were selected from the ORFs having the nucleotide sequence represented by SEQ ID NO: 191063.

[16503] The probes having the nucleotide sequence represented by SEQ ID NOS: 193959, 193960, 193961, 193962, 193963, 193964, 193965, 193966, 193967, 193968, 193969 were selected from the ORFs having the nucleotide sequence represented by SEQ ID NO: 191064.

[16504] The probes having the nucleotide sequence represented by SEQ ID NOS: 193970, 193971, 193972, 193973, 193974, 193975, 193976, 193977, 193978, 193979, 193980 were selected from the ORFs having the nucleotide sequence represented by SEQ ID NO: 191065.

[16505] The probes having the nucleotide sequence represented by SEQ ID NOS: 193981, 193982, 193983, 193984, 193985, 193986, 193987, 193988, 193989, 193990, 193991 were selected from the ORFs having the nucleotide sequence represented by SEQ ID NO: 191066.

[16506] The probes having the nucleotide sequence represented by SEQ ID NOS: 193992, 193993, 193994, 193995, 193996, 193997, 193998, 193999, 194000, 194001, 194002 were selected from the ORFs having the nucleotide sequence represented by SEQ ID NO: 191067.

[16507] The probes having the nucleotide sequence represented by SEQ ID NOS: 194003, 194004, 194005, 194006, 194007, 194008, 194009, 194010, 194011, 194012, 194013 were selected from the ORFs having the nucleotide sequence represented by SEQ ID NO: 191068.

[16508] The probes having the nucleotide sequence represented by SEQ ID NOS: 194014, 194015, 194016, 194017, 194018, 194019, 194020, 194021, 194022, 194023, 194024 were selected from the ORFs having the nucleotide sequence represented by SEQ ID NO: 191069.

[16509] The probes having the nucleotide sequence represented by SEQ ID NOS: 194025, 194026, 194027, 194028, 194029, 194030, 194031, 194032, 194033, 194034, 194035 were selected from the ORFs having the nucleotide sequence represented by SEQ ID NO: 191070.

[16510] The probes having the nucleotide sequence represented by SEQ ID NOS: 194036, 194037, 194038, 194039, 194040, 194041, 194042, 194043, 194044, 194045, 194046 were selected from the ORFs having the nucleotide sequence represented by SEQ ID NO: 191071.

[16511] The probes having the nucleotide sequence represented by SEQ ID NOS: 194047, 194048, 194049, 194050, 194051, 194052, 194053, 194054, 194055, 194056, 194057 were selected from the ORFs having the nucleotide sequence represented by SEQ ID NO: 191072.

[16512] The probes having the nucleotide sequence represented by SEQ ID NOS: 194058, 194059, 194060, 194061, 194062, 194063, 194064, 194065, 194066, 194067, 194068 were selected from the ORFs having the nucleotide sequence represented by SEQ ID NO: 191073.

[16513] The probes having the nucleotide sequence represented by SEQ ID NOS: 194069, 194070, 194071, 194072, 194073, 194074, 194075, 194076, 194077, 194078, 194079 were selected from the ORFs having the nucleotide sequence represented by SEQ ID NO: 191074.

[16514] The probes having the nucleotide sequence represented by SEQ ID NOS: 194080, 194081, 194082, 194083, 194084, 194085, 194086, 194087, 194088, 194089, 194090 were selected from the ORFs having the nucleotide sequence represented by SEQ ID NO: 191075.

[16515] The probes having the nucleotide sequence represented by SEQ ID NOS: 194091, 194092, 194093, 194094, 194095, 194096, 194097, 194098, 194099, 194100, 194101 were selected from the ORFs having the nucleotide sequence represented by SEQ ID NO: 191076.

[16516] The probes having the nucleotide sequence represented by SEQ ID NOS: 194102, 194103, 194104, 194105, 194106, 194107, 194108, 194109, 194110, 194111, 194112 were selected from the ORFs having the nucleotide sequence represented by SEQ ID NO: 191077.

[16517] The probes having the nucleotide sequence represented by SEQ ID NOS: 194113, 194114, 194115, 194116, 194117, 194118, 194119, 194120, 194121, 194122, 194123 were selected from the ORFs having the nucleotide sequence represented by SEQ ID NO: 191078.

[16518] The probes having the nucleotide sequence represented by SEQ ID NOS: 194124, 194125, 194126, 194127, 194128, 194129, 194130, 194131, 194132, 194133, 194134 were selected from the ORFs having the nucleotide sequence represented by SEQ ID NO: 191079.

[16519] The probes having the nucleotide sequence represented by SEQ ID NOS: 194135, 194136, 194137, 194138, 194139, 194140, 194141, 194142, 194143, 194144, 194145 were selected from the ORFs having the nucleotide sequence represented by SEQ ID NO: 191080.

[16520] The probes having the nucleotide sequence represented by SEQ ID NOS: 194146, 194147, 194148, 194149, 194150, 194151, 194152, 194153, 194154, 194155, 194156 were selected from the ORFs having the nucleotide sequence represented by SEQ ID NO: 191081.

[16521] The probes having the nucleotide sequence represented by SEQ ID NOS: 194157, 194158, 194159, 194160, 194161, 194162, 194163, 194164 were selected from the ORFs having the nucleotide sequence represented by SEQ ID NO: 191082.

[16522] The probes having the nucleotide sequence represented by SEQ ID NOS: 194165, 194166, 194167, 194168, 194169, 194170, 194171, 194172, 194173, 194174, 194175 were selected from the ORFs having the nucleotide sequence represented by SEQ ID NO: 191083.

[16523] The probes having the nucleotide sequence represented by SEQ ID NOS: 194176, 194177, 194178, 194179, 194180, 194181, 194182, 194183, 194184, 194185, 194186 were selected from the ORFs having the nucleotide sequence represented by SEQ ID NO: 191084.

[16524] The probes having the nucleotide sequence represented by SEQ ID NOS: 194187, 194188, 194189, 194190, 194191, 194192, 194193, 194194, 194195, 194196, 194197 were selected from the ORFs having the nucleotide sequence represented by SEQ ID NO: 191085.

[16525] The probes having the nucleotide sequence represented by SEQ ID NOS: 194198, 194199, 194200, 194201, 194202, 194203, 194204, 194205, 194206, 194207, 194208 were selected from the ORFs having the nucleotide sequence represented by SEQ ID NO: 191086.

[16526] The probes having the nucleotide sequence represented by SEQ ID NOS: 194209, 194210, 194211, 194212, 194213, 194214, 194215, 194216, 194217, 194218, 194219 were selected from the ORFs having the nucleotide sequence represented by SEQ ID NO: 191087.

[16527] The probes having the nucleotide sequence represented by SEQ ID NOS: 194220, 194221, 194222, 194223, 194224, 194225, 194226, 194227, 194228, 194229, 194230 were selected from the ORFs having the nucleotide sequence represented by SEQ ID NO: 191088.

[16528] The probes having the nucleotide sequence represented by SEQ ID NOS: 194231, 194232, 194233, 194234, 194235, 194236, 194237, 194238, 194239, 194240, 194241 were selected from the ORFs having the nucleotide sequence represented by SEQ ID NO: 191089.

[16529] The probes having the nucleotide sequence represented by SEQ ID NOS: 194242, 194243, 194244, 194245, 194246, 194247, 194248, 194249, 194250, 194251, 194252 were selected from the ORFs having the nucleotide sequence represented by SEQ ID NO: 191090.

[16530] The probes having the nucleotide sequence represented by SEQ ID NOS: 194253, 194254, 194255, 194256, 194257, 194258, 194259, 194260, 194261, 194262, 194263 were selected from the ORFs having the nucleotide sequence represented by SEQ ID NO: 191091.

[16531] The probes having the nucleotide sequence represented by SEQ ID NOS: 194264, 194265, 194266, 194267, 194268, 194269, 194270, 194271, 194272, 194273, 194274 were selected from the ORFs having the nucleotide sequence represented by SEQ ID NO: 191092.

[16532] The probes having the nucleotide sequence represented by SEQ ID NOS: 194275, 194276, 194277, 194278, 194279, 194280, 194281, 194282, 194283, 194284, 194285 were selected from the ORFs having the nucleotide sequence represented by SEQ ID NO: 191093.

[16533] The probes having the nucleotide sequence represented by SEQ ID NOS: 194286, 194287, 194288, 194289, 194290, 194291, 194292, 194293, 194294, 194295, 194296 were selected from the ORFs having the nucleotide sequence represented by SEQ ID NO: 191094.

[16534] The probes having the nucleotide sequence represented by SEQ ID NOS: 194297, 194298, 194299, 194300, 194301, 194302, 194303, 194304, 194305, 194306, 194307 were selected from the ORFs having the nucleotide sequence represented by SEQ ID NO: 191095.

[16535] The probes having the nucleotide sequence represented by SEQ ID NOS: 194308, 194309, 194310, 194311, 194312, 194313, 194314, 194315, 194316, 194317, 194318 were selected from the ORFs having the nucleotide sequence represented by SEQ ID NO: 191096.

[16536] The probes having the nucleotide sequence represented by SEQ ID NOS: 194319, 194320, 194321, 194322, 194323, 194324, 194325, 194326, 194327, 194328, 194329 were selected from the ORFs having the nucleotide sequence represented by SEQ ID NO: 191097.

[16537] The probes having the nucleotide sequence represented by SEQ ID NOS: 194330, 194331, 194332, 194333, 194334, 194335, 194336, 194337, 194338, 194339, 194340 were selected from the ORFs having the nucleotide sequence represented by SEQ ID NO: 191098.

[16538] The probes having the nucleotide sequence represented by SEQ ID NOS: 194341, 194342, 194343, 194344, 194345, 194346, 194347, 194348, 194349, 194350, 194351 were selected from the ORFs having the nucleotide sequence represented by SEQ ID NO: 191099.

[16539] The probes having the nucleotide sequence represented by SEQ ID NOS: 194352, 194353, 194354, 194355, 194356, 194357, 194358, 194359, 194360, 194361, 194362 were selected from the ORFs having the nucleotide sequence represented by SEQ ID NO: 191100.

[16540] The probes having the nucleotide sequence represented by SEQ ID NOS: 194363, 194364, 194365, 194366, 194367, 194368, 194369, 194370, 194371, 194372, 194373 were selected from the ORFs having the nucleotide sequence represented by SEQ ID NO: 191101.

[16541] The probes having the nucleotide sequence represented by SEQ ID NOS: 194374, 194375, 194376, 194377, 194378, 194379, 194380, 194381, 194382, 194383, 194384 were selected from the ORFs having the nucleotide sequence represented by SEQ ID NO: 191102.

[16542] The probes having the nucleotide sequence represented by SEQ ID NOS: 194385, 194386, 194387, 194388, 194389, 194390, 194391, 194392, 194393, 194394, 194395 were selected from the ORFs having the nucleotide sequence represented by SEQ ID NO: 191103.

[16543] The probes having the nucleotide sequence represented by SEQ ID NOS: 194396, 194397, 194398, 194399, 194400, 194401, 194402, 194403 were selected from the ORFs having the nucleotide sequence represented by SEQ ID NO: 191104.

[16544] The probes having the nucleotide sequence represented by SEQ ID NOS: 194404, 194405, 194406, 194407, 194408, 194409, 194410, 194411, 194412, 194413, 194414 were selected from the ORFs having the nucleotide sequence represented by SEQ ID NO: 191105.

[16545] The probes having the nucleotide sequence represented by SEQ ID NOS: 194415, 194416, 194417, 194418, 194419, 194420, 194421, 194422, 194423, 194424, 194425 were selected from the ORFs having the nucleotide sequence represented by SEQ ID NO: 191106.

[16546] The probes having the nucleotide sequence represented by SEQ ID NOS: 194426, 194427, 194428, 194429, 194430, 194431, 194432, 194433, 194434, 194435, 194436 were selected from the ORFs having the nucleotide sequence represented by SEQ ID NO: 191107.

[16547] The probes having the nucleotide sequence represented by SEQ ID NOS: 194437, 194438, 194439, 194440, 194441, 194442, 194443, 194444, 194445, 194446, 194447 were selected from the ORFs having the nucleotide sequence represented by SEQ ID NO: 191108.

[16548] The probes having the nucleotide sequence represented by SEQ ID NOS: 194448, 194449, 194450, 194451, 194452, 194453, 194454, 194455, 194456, 194457, 194458 were selected from the ORFs having the nucleotide sequence represented by SEQ ID NO: 191109.

[16549] The probes having the nucleotide sequence represented by SEQ ID NOS: 194459, 194460, 194461, 194462, 194463, 194464, 194465, 194466, 194467, 194468, 194469 were selected from the ORFs having the nucleotide sequence represented by SEQ ID NO: 191110.

[16550] The probes having the nucleotide sequence represented by SEQ ID NOS: 194470, 194471, 194472, 194473, 194474, 194475, 194476, 194477, 194478, 194479, 194480 were selected from the ORFs having the nucleotide sequence represented by SEQ ID NO: 191111.

[16551] The probes having the nucleotide sequence represented by SEQ ID NOS: 194481, 194482, 194483, 194484, 194485, 194486, 194487, 194488 were selected from the ORFs having the nucleotide sequence represented by SEQ ID NO: 191112.

[16552] The probes having the nucleotide sequence represented by SEQ ID NOS: 194489, 194490, 194491, 194492, 194493, 194494, 194495, 194496, 194497, 194498, 194499 were selected from the ORFs having the nucleotide sequence represented by SEQ ID NO: 191113.

[16553] The probes having the nucleotide sequence represented by SEQ ID NOS: 194500, 194501, 194502, 194503, 194504, 194505, 194506, 194507, 194508, 194509, 194510 were selected from the ORFs having the nucleotide sequence represented by SEQ ID NO: 191114.

[16554] The probes having the nucleotide sequence represented by SEQ ID NOS: 194511, 194512, 194513, 194514, 194515, 194516, 194517, 194518, 194519, 194520, 194521 were selected from the ORFs having the nucleotide sequence represented by SEQ ID NO: 191115.

[16555] The probes having the nucleotide sequence represented by SEQ ID NOS: 194522, 194523, 194524, 194525, 194526, 194527, 194528, 194529, 194530, 194531, 194532 were selected from the ORFs having the nucleotide sequence represented by SEQ ID NO: 191116.

[16556] The probes having the nucleotide sequence represented by SEQ ID NOS: 194533, 194534, 194535, 194536, 194537, 194538, 194539, 194540, 194541, 194542, 194543 were selected from the ORFs having the nucleotide sequence represented by SEQ ID NO: 191117.

[16557] The probes having the nucleotide sequence represented by SEQ ID NOS: 194544, 194545, 194546, 194547, 194548, 194549, 194550, 194551, 194552, 194553, 194554 were selected from the ORFs having the nucleotide sequence represented by SEQ ID NO: 191118.

[16558] The probes having the nucleotide sequence represented by SEQ ID NOS: 194555, 194556, 194557, 194558, 194559, 194560, 194561, 194562, 194563, 194564, 194565 were selected from the ORFs having the nucleotide sequence represented by SEQ ID NO: 191119.

[16559] The probes having the nucleotide sequence represented by SEQ ID NOS: 194566, 194567, 194568, 194569, 194570, 194571, 194572, 194573, 194574, 194575, 194576 were selected from the ORFs having the nucleotide sequence represented by SEQ ID NO: 191120.

[16560] The probes having the nucleotide sequence represented by SEQ ID NOS: 194577, 194578, 194579, 194580, 194581, 194582, 194583, 194584, 194585, 194586, 194587 were selected from the ORFs having the nucleotide sequence represented by SEQ ID NO: 191121.

[16561] The probes having the nucleotide sequence represented by SEQ ID NOS: 194588, 194589, 194590, 194591, 194592, 194593, 194594, 194595, 194596, 194597, 194598 were selected from the ORFs having the nucleotide sequence represented by SEQ ID NO: 191122.

[16562] The probes having the nucleotide sequence represented by SEQ ID NOS: 194599, 194600, 194601, 194602, 194603, 194604, 194605, 194606, 194607, 194608, 194609 were selected from the ORFs having the nucleotide sequence represented by SEQ ID NO: 191123.

[16563] The probes having the nucleotide sequence represented by SEQ ID NOS: 194610, 194611, 194612, 194613, 194614, 194615, 194616, 194617, 194618, 194619, 194620 were selected from the ORFs having the nucleotide sequence represented by SEQ ID NO: 191124.

[16564] The probes having the nucleotide sequence represented by SEQ ID NOS: 194621, 194622, 194623, 194624, 194625, 194626, 194627, 194628, 194629, 194630, 194631 were selected from the ORFs having the nucleotide sequence represented by SEQ ID NO: 191125.

[16565] The probes having the nucleotide sequence represented by SEQ ID NOS: 194632, 194633, 194634, 194635, 194636, 194637, 194638, 194639, 194640, 194641, 194642 were selected from the ORFs having the nucleotide sequence represented by SEQ ID NO: 191126.

[16566] The probes having the nucleotide sequence represented by SEQ ID NOS: 194643, 194644, 194645, 194646, 194647, 194648, 194649, 194650 were selected from the ORFs having the nucleotide sequence represented by SEQ ID NO: 191127.

[16567] The probes having the nucleotide sequence represented by SEQ ID NOS: 194651, 194652, 194653, 194654, 194655, 194656, 194657, 194658, 194659, 194660, 194661 were selected from the ORFs having the nucleotide sequence represented by SEQ ID NO: 191128.

[16568] The probes having the nucleotide sequence represented by SEQ ID NOS: 194662, 194663, 194664, 194665, 194666, 194667, 194668, 194669, 194670, 194671, 194672 were selected from the ORFs having the nucleotide sequence represented by SEQ ID NO: 191129.

[16569] The probes having the nucleotide sequence represented by SEQ ID NOS: 194673, 194674, 194675, 194676, 194677, 194678, 194679, 194680, 194681, 194682, 194683 were selected from the ORFs having the nucleotide sequence represented by SEQ ID NO: 191130.

[16570] The probes having the nucleotide sequence represented by SEQ ID NOS: 194684, 194685, 194686, 194687, 194688, 194689, 194690, 194691, 194692, 194693, 194694 were selected from the ORFs having the nucleotide sequence represented by SEQ ID NO: 191131.

[16571] The probes having the nucleotide sequence represented by SEQ ID NOS: 194695, 194696, 194697, 194698, 194699, 194700, 194701, 194702, 194703, 194704, 194705 were selected from the ORFs having the nucleotide sequence represented by SEQ ID NO: 191132.

[16572] The probes having the nucleotide sequence represented by SEQ ID NOS: 194706, 194707, 194708, 194709, 194710, 194711, 194712, 194713, 194714, 194715, 194716 were selected from the ORFs having the nucleotide sequence represented by SEQ ID NO: 191133.

[16573] The probes having the nucleotide sequence represented by SEQ ID NOS: 194717, 194718, 194719, 194720, 194721, 194722, 194723, 194724, 194725, 194726, 194727 were selected from the ORFs having the nucleotide sequence represented by SEQ ID NO: 191134.

[16574] The probes having the nucleotide sequence represented by SEQ ID NOS: 194728, 194729, 194730, 194731, 194732, 194733, 194734, 194735, 194736, 194737, 194738 were selected from the ORFs having the nucleotide sequence represented by SEQ ID NO: 191135.

[16575] The probes having the nucleotide sequence represented by SEQ ID NOS: 194739, 194740, 194741, 194742, 194743, 194744, 194745, 194746, 194747, 194748, 194749 were selected from the ORFs having the nucleotide sequence represented by SEQ ID NO: 191136.

[16576] The probes having the nucleotide sequence represented by SEQ ID NOS: 194750, 194751, 194752, 194753, 194754, 194755, 194756, 194757, 194758, 194759, 194760 were selected from the ORFs having the nucleotide sequence represented by SEQ ID NO: 191137.

[16577] The probes having the nucleotide sequence represented by SEQ ID NOS: 194761, 194762, 194763, 194764, 194765, 194766, 194767, 194768, 194769, 194770, 194771 were selected from the ORFs having the nucleotide sequence represented by SEQ ID NO: 191138.

[16578] The probes having the nucleotide sequence represented by SEQ ID NOS: 194783, 194784, 194785, 194786, 194787, 194788, 194789, 194790, 194791, 194792, 194793 were selected from the ORFs having the nucleotide sequence represented by SEQ ID NO: 191139.

[16579] The probes having the nucleotide sequence represented by SEQ ID NOS: 194772, 194773, 194774, 194775, 194776, 194777, 194778, 194779, 194780, 194781, 194782 were selected from the ORFs having the nucleotide sequence represented by SEQ ID NO: 191140.

[16580] The probes having the nucleotide sequence represented by SEQ ID NOS: 194794, 194795, 194796, 194797, 194798, 194799, 194800, 194801, 194802, 194803, 194804 were selected from the ORFs having the nucleotide sequence represented by SEQ ID NO: 191141.

[16581] The probes having the nucleotide sequence represented by SEQ ID NOS: 194805, 194806, 194807, 194808, 194809, 194810, 194811, 194812, 194813, 194814, 194815 were selected from the ORFs having the nucleotide sequence represented by SEQ ID NO: 191142.

[16582] The probes having the nucleotide sequence represented by SEQ ID NOS: 194816, 194817, 194818, 194819, 194820, 194821, 194822, 194823, 194824, 194825, 194826 were selected from the ORFs having the nucleotide sequence represented by SEQ ID NO: 191143.

[16583] The probes having the nucleotide sequence represented by SEQ ID NOS: 194827, 194828, 194829, 194830, 194831, 194832, 194833, 194834, 194835, 194836, 194837 were selected from the ORFs having the nucleotide sequence represented by SEQ ID NO: 191144.

[16584] The probes having the nucleotide sequence represented by SEQ ID NOS: 194838, 194839, 194840, 194841, 194842, 194843, 194844, 194845, 194846, 194847, 194848 were selected from the ORFs having the nucleotide sequence represented by SEQ ID NO: 191145.

[16585] The probes having the nucleotide sequence represented by SEQ ID NOS: 194849, 194850, 194851, 194852, 194853, 194854, 194855, 194856, 194857, 194858, 194859 were selected from the ORFs having the nucleotide sequence represented by SEQ ID NO: 191146.

[16586] The probes having the nucleotide sequence represented by SEQ ID NOS: 194860, 194861, 194862, 194863, 194864, 194865, 194866, 194867 were selected from the ORFs having the nucleotide sequence represented by SEQ ID NO: 191147.

[16587] The probes having the nucleotide sequence represented by SEQ ID NOS: 194868, 194869, 194870, 194871, 194872, 194873, 194874, 194875, 194876, 194877, 194878 were selected from the ORFs having the nucleotide sequence represented by SEQ ID NO: 191148.

[16588] The probes having the nucleotide sequence represented by SEQ ID NOS: 194879, 194880, 194881, 194882, 194883, 194884, 194885, 194886, 194887, 194888, 194889 were selected from the ORFs having the nucleotide sequence represented by SEQ ID NO: 191149.

[16589] The probes having the nucleotide sequence represented by SEQ ID NOS: 194890, 194891, 194892, 194893, 194894, 194895, 194896, 194897, 194898, 194899, 194900 were selected from the ORFs having the nucleotide sequence represented by SEQ ID NO: 191150.

[16590] The probes having the nucleotide sequence represented by SEQ ID NOS: 194901, 194902, 194903, 194904, 194905, 194906, 194907, 194908 were selected from the ORFs having the nucleotide sequence represented by SEQ ID NO: 191151.

[16591] The probes having the nucleotide sequence represented by SEQ ID NOS: 194909, 194910, 194911, 194912, 194913, 194914, 194915, 194916, 194917, 194918, 194919 were selected from the ORFs having the nucleotide sequence represented by SEQ ID NO: 191152.

[16592] The probes having the nucleotide sequence represented by SEQ ID NOS: 194920, 194921, 194922, 194923, 194924, 194925, 194926, 194927, 194928, 194929, 194930 were selected from the ORFs having the nucleotide sequence represented by SEQ ID NO: 191153.

[16593] The probes having the nucleotide sequence represented by SEQ ID NOS: 194931, 194932, 194933, 194934, 194935, 194936, 194937, 194938, 194939, 194940, 194941 were selected from the ORFs having the nucleotide sequence represented by SEQ ID NO: 191154.

[16594] The probes having the nucleotide sequence represented by SEQ ID NOS: 194942, 194943, 194944, 194945, 194946, 194947, 194948, 194949, 194950, 194951, 194952 were selected from the ORFs having the nucleotide sequence represented by SEQ ID NO: 191155.

[16595] The probes having the nucleotide sequence represented by SEQ ID NOS: 194953, 194954, 194955, 194956, 194957, 194958, 194959, 194960, 194961, 194962, 194963 were selected from the ORFs having the nucleotide sequence represented by SEQ ID NO: 191156.

[16596] The probes having the nucleotide sequence represented by SEQ ID NOS: 194964, 194965, 194966, 194967, 194968, 194969, 194970, 194971, 194972, 194973, 194974 were selected from the ORFs having the nucleotide sequence represented by SEQ ID NO: 191157.

[16597] The probes having the nucleotide sequence represented by SEQ ID NOS: 194975, 194976, 194977, 194978, 194979, 194980, 194981, 194982, 194983, 194984, 194985 were selected from the ORFs having the nucleotide sequence represented by SEQ ID NO: 191158.

[16598] The probes having the nucleotide sequence represented by SEQ ID NOS: 194986, 194987, 194988, 194989, 194990, 194991, 194992, 194993, 194994, 194995, 194996 were selected from the ORFs having the nucleotide sequence represented by SEQ ID NO: 191159.

[16599] The probes having the nucleotide sequence represented by SEQ ID NOS: 194997, 194998, 194999, 195000, 195001, 195002, 195003, 195004, 195005, 195006, 195007 were selected from the ORFs having the nucleotide sequence represented by SEQ ID NO: 191160.

[16600] The probes having the nucleotide sequence represented by SEQ ID NOS: 195008, 195009, 195010, 195011, 195012, 195013, 195014, 195015, 195016, 195017, 195018 were selected from the ORFs having the nucleotide sequence represented by SEQ ID NO: 191161.

[16601] The probes having the nucleotide sequence represented by SEQ ID NOS: 195019, 195020, 195021, 195022, 195023, 195024, 195025, 195026, 195027, 195028, 195029 were selected from the ORFs having the nucleotide sequence represented by SEQ ID NO: 191162.

[16602] The probes having the nucleotide sequence represented by SEQ ID NOS: 195030, 195031, 195032, 195033, 195034, 195035, 195036, 195037, 195038, 195039, 195040 were selected from the ORFs having the nucleotide sequence represented by SEQ ID NO: 191163.

[16603] The probes having the nucleotide sequence represented by SEQ ID NOS: 195041, 195042, 195043, 195044, 195045, 195046, 195047, 195048, 195049, 195050, 195051 were selected from the ORFs having the nucleotide sequence represented by SEQ ID NO: 191164.

[16604] The probes having the nucleotide sequence represented by SEQ ID NOS: 195052, 195053, 195054, 195055, 195056, 195057, 195058, 195059, 195060, 195061, 195062 were selected from the ORFs having the nucleotide sequence represented by SEQ ID NO: 191165.

[16605] The probes having the nucleotide sequence represented by SEQ ID NOS: 195063, 195064, 195065, 195066, 195067, 195068, 195069, 195070, 195071, 195072, 195073 were selected from the ORFs having the nucleotide sequence represented by SEQ ID NO: 191166.

[16606] The probes having the nucleotide sequence represented by SEQ ID NOS: 195074, 195075, 195076, 195077, 195078, 195079, 195080, 195081, 195082, 195083, 195084 were selected from the ORFs having the nucleotide sequence represented by SEQ ID NO: 191167.

[16607] The probes having the nucleotide sequence represented by SEQ ID NOS: 195085, 195086, 195087, 195088, 195089, 195090, 195091, 195092, 195093, 195094, 195095 were selected from the ORFs having the nucleotide sequence represented by SEQ ID NO: 191168.

[16608] The probes having the nucleotide sequence represented by SEQ ID NOS: 195096, 195097, 195098, 195099, 195100, 195101, 195102, 195103, 195104, 195105, 195106 were selected from the ORFs having the nucleotide sequence represented by SEQ ID NO: 191169.

[16609] The probes having the nucleotide sequence represented by SEQ ID NOS: 195107, 195108, 195109, 195110, 195111, 195112, 195113, 195114, 195115, 195116, 195117 were selected from the ORFs having the nucleotide sequence represented by SEQ ID NO: 191170.

[16610] The probes having the nucleotide sequence represented by SEQ ID NOS: 195118, 195119, 195120, 195121, 195122, 195123, 195124, 195125, 195126, 195127, 195128 were selected from the ORFs having the nucleotide sequence represented by SEQ ID NO: 191171.

[16611] The probes having the nucleotide sequence represented by SEQ ID NOS: 195129, 195130, 195131, 195132, 195133, 195134, 195135, 195136, 195137, 195138, 195139 were selected from the ORFs having the nucleotide sequence represented by SEQ ID NO: 191172.

[16612] The probes having the nucleotide sequence represented by SEQ ID NOS: 195140, 195141, 195142, 195143, 195144, 195145, 195146, 195147, 195148, 195149, 195150 were selected from the ORFs having the nucleotide sequence represented by SEQ ID NO: 191173.

[16613] The probes having the nucleotide sequence represented by SEQ ID NOS: 195151, 195152, 195153, 195154, 195155, 195156, 195157, 195158, 195159, 195160, 195161 were selected from the ORFs having the nucleotide sequence represented by SEQ ID NO: 191174.

[16614] The probes having the nucleotide sequence represented by SEQ ID NOS: 195162, 195163, 195164, 195165, 195166, 195167, 195168, 195169, 195170, 195171, 195172 were selected from the ORFs having the nucleotide sequence represented by SEQ ID NO: 191175.

[16615] The probes having the nucleotide sequence represented by SEQ ID NOS: 195173, 195174, 195175, 195176, 195177, 195178, 195179, 195180, 195181, 195182, 195183 were selected from the ORFs having the nucleotide sequence represented by SEQ ID NO: 191176.

[16616] The probes having the nucleotide sequence represented by SEQ ID NOS: 195184, 195185, 195186, 195187, 195188, 195189, 195190, 195191, 195192, 195193, 195194 were selected from the ORFs having the nucleotide sequence represented by SEQ ID NO: 191177.

[16617] The probes having the nucleotide sequence represented by SEQ ID NOS: 195195, 195196, 195197, 195198, 195199, 195200, 195201, 195202, 195203, 195204, 195205 were selected from the ORFs having the nucleotide sequence represented by SEQ ID NO: 191178.

[16618] The probes having the nucleotide sequence represented by SEQ ID NOS: 195206, 195207, 195208, 195209, 195210, 195211, 195212, 195213, 195214, 195215, 195216 were selected from the ORFs having the nucleotide sequence represented by SEQ ID NO: 191179.

[16619] The probes having the nucleotide sequence represented by SEQ ID NOS: 195217, 195218, 195219, 195220, 195221, 195222, 195223, 195224, 195225, 195226, 195227 were selected from the ORFs having the nucleotide sequence represented by SEQ ID NO: 191180.

[16620] The probes having the nucleotide sequence represented by SEQ ID NOS: 195228, 195229, 195230, 195231, 195232, 195233, 195234, 195235 were selected from the ORFs having the nucleotide sequence represented by SEQ ID NO: 191181.

[16621] The probes having the nucleotide sequence represented by SEQ ID NOS: 195236, 195237, 195238, 195239, 195240, 195241, 195242, 195243, 195244, 195245, 195246 were selected from the ORFs having the nucleotide sequence represented by SEQ ID NO: 191182.

[16622] The probes having the nucleotide sequence represented by SEQ ID NOS: 195247, 195248, 195249, 195250, 195251, 195252, 195253, 195254, 195255, 195256, 195257 were selected from the ORFs having the nucleotide sequence represented by SEQ ID NO: 191183.

[16623] The probes having the nucleotide sequence represented by SEQ ID NOS: 195258, 195259, 195260, 195261, 195262, 195263, 195264, 195265, 195266, 195267, 195268 were selected from the ORFs having the nucleotide sequence represented by SEQ ID NO: 191184.

[16624] The probes having the nucleotide sequence represented by SEQ ID NOS: 195269, 195270, 195271, 195272, 195273, 195274, 195275, 195276, 195277, 195278, 195279 were selected from the ORFs having the nucleotide sequence represented by SEQ ID NO: 191185.

[16625] The probes having the nucleotide sequence represented by SEQ ID NOS: 195280, 195281, 195282, 195283, 195284, 195285, 195286, 195287, 195288, 195289, 195290 were selected from the ORFs having the nucleotide sequence represented by SEQ ID NO: 191186.

[16626] The probes having the nucleotide sequence represented by SEQ ID NOS: 195291, 195292, 195293, 195294, 195295, 195296, 195297, 195298, 195299, 195300, 195301 were selected from the ORFs having the nucleotide sequence represented by SEQ ID NO: 191187.

[16627] The probes having the nucleotide sequence represented by SEQ ID NOS: 195302, 195303, 195304, 195305, 195306, 195307, 195308, 195309, 195310, 195311, 195312 were selected from the ORFs having the nucleotide sequence represented by SEQ ID NO: 191188.

[16628] The probes having the nucleotide sequence represented by SEQ ID NOS: 195313, 195314, 195315, 195316, 195317, 195318, 195319, 195320, 195321, 195322, 195323 were selected from the ORFs having the nucleotide sequence represented by SEQ ID NO: 191189.

[16629] The probes having the nucleotide sequence represented by SEQ ID NOS: 195335, 195336, 195337, 195338, 195339, 195340, 195341, 195342, 195343, 195344, 195345 were selected from the ORFs having the nucleotide sequence represented by SEQ ID NO: 191190.

[16630] The probes having the nucleotide sequence represented by SEQ ID NOS: 195324, 195325, 195326, 195327, 195328, 195329, 195330, 195331, 195332, 195333, 195334 were selected from the ORFs having the nucleotide sequence represented by SEQ ID NO: 191191.

[16631] The probes having the nucleotide sequence represented by SEQ ID NOS: 195346, 195347, 195348, 195349, 195350, 195351, 195352, 195353, 195354, 195355, 195356 were selected from the ORFs having the nucleotide sequence represented by SEQ ID NO: 191192.

[16632] The probes having the nucleotide sequence represented by SEQ ID NOS: 195357, 195358, 195359, 195360, 195361, 195362, 195363, 195364, 195365, 195366, 195367 were selected from the ORFs having the nucleotide sequence represented by SEQ ID NO: 191193.

[16633] The probes having the nucleotide sequence represented by SEQ ID NOS: 195368, 195369, 195370, 195371, 195372, 195373, 195374, 195375, 195376, 195377, 195378 were selected from the ORFs having the nucleotide sequence represented by SEQ ID NO: 191194.

[16634] The probes having the nucleotide sequence represented by SEQ ID NOS: 195379, 195380, 195381, 195382, 195383, 195384, 195385, 195386, 195387, 195388, 195389 were selected from the ORFs having the nucleotide sequence represented by SEQ ID NO: 191195.

[16635] The probes having the nucleotide sequence represented by SEQ ID NOS: 195390, 195391, 195392, 195393, 195394, 195395, 195396, 195397, 195398, 195399, 195400 were selected from the ORFs having the nucleotide sequence represented by SEQ ID NO: 191196.

[16636] The probes having the nucleotide sequence represented by SEQ ID NOS: 195401, 195402, 195403, 195404, 195405, 195406, 195407, 195408, 195409, 195410, 195411 were selected from the ORFs having the nucleotide sequence represented by SEQ ID NO: 191197.

[16637] The probes having the nucleotide sequence represented by SEQ ID NOS: 195412, 195413, 195414, 195415, 195416, 195417, 195418, 195419, 195420, 195421, 195422 were selected from the ORFs having the nucleotide sequence represented by SEQ ID NO: 191198.

[16638] The probes having the nucleotide sequence represented by SEQ ID NOS: 195423, 195424, 195425, 195426, 195427, 195428, 195429, 195430, 195431, 195432, 195433 were selected from the ORFs having the nucleotide sequence represented by SEQ ID NO: 191199.

[16639] The probes having the nucleotide sequence represented by SEQ ID NOS: 195434, 195435, 195436, 195437, 195438, 195439, 195440, 195441, 195442, 195443, 195444 were selected from the ORFs having the nucleotide sequence represented by SEQ ID NO: 191200.

[16640] The probes having the nucleotide sequence represented by SEQ ID NOS: 195445, 195446, 195447, 195448, 195449, 195450, 195451, 195452, 195453, 195454, 195455 were selected from the ORFs having the nucleotide sequence represented by SEQ ID NO: 191201.

[16641] The probes having the nucleotide sequence represented by SEQ ID NOS: 195456, 195457, 195458, 195459, 195460, 195461, 195462, 195463, 195464, 195465, 195466 were selected from the ORFs having the nucleotide sequence represented by SEQ ID NO: 191202.

[16642] The probes having the nucleotide sequence represented by SEQ ID NOS: 195467, 195468, 195469, 195470, 195471, 195472, 195473, 195474, 195475, 195476, 195477 were selected from the ORFs having the nucleotide sequence represented by SEQ ID NO: 191203.

[16643] The probes having the nucleotide sequence represented by SEQ ID NOS: 195478, 195479, 195480, 195481, 195482, 195483, 195484, 195485, 195486, 195487, 195488 were selected from the ORFs having the nucleotide sequence represented by SEQ ID NO: 191204.

[16644] The probes having the nucleotide sequence represented by SEQ ID NOS: 195489, 195490, 195491, 195492, 195493, 195494, 195495, 195496, 195497, 195498, 195499 were selected from the ORFs having the nucleotide sequence represented by SEQ ID NO: 191205.

[16645] The probes having the nucleotide sequence represented by SEQ ID NOS: 195500, 195501, 195502, 195503, 195504, 195505, 195506, 195507, 195508, 195509, 195510 were selected from the ORFs having the nucleotide sequence represented by SEQ ID NO: 191206.

[16646] The probes having the nucleotide sequence represented by SEQ ID NOS: 195511, 195512, 195513, 195514, 195515, 195516, 195517, 195518, 195519, 195520, 195521 were selected from the ORFs having the nucleotide sequence represented by SEQ ID NO: 191207.

[16647] The probes having the nucleotide sequence represented by SEQ ID NOS: 195522, 195523, 195524, 195525, 195526, 195527, 195528, 195529, 195530, 195531, 195532 were selected from the ORFs having the nucleotide sequence represented by SEQ ID NO: 191208.

[16648] The probes having the nucleotide sequence represented by SEQ ID NOS: 195533, 195534, 195535, 195536, 195537, 195538, 195539, 195540, 195541, 195542, 195543 were selected from the ORFs having the nucleotide sequence represented by SEQ ID NO: 191209.

[16649] The probes having the nucleotide sequence represented by SEQ ID NOS: 195544, 195545, 195546, 195547, 195548, 195549, 195550, 195551, 195552, 195553, 195554 were selected from the ORFs having the nucleotide sequence represented by SEQ ID NO: 191210.

[16650] The probes having the nucleotide sequence represented by SEQ ID NOS: 195555, 195556, 195557, 195558, 195559, 195560, 195561, 195562, 195563, 195564, 195565 were selected from the ORFs having the nucleotide sequence represented by SEQ ID NO: 191211.

[16651] The probes having the nucleotide sequence represented by SEQ ID NOS: 195566, 195567, 195568, 195569, 195570, 195571, 195572, 195573, 195574, 195575, 195576 were selected from the ORFs having the nucleotide sequence represented by SEQ ID NO: 191212.

[16652] The probes having the nucleotide sequence represented by SEQ ID NOS: 195577, 195578, 195579, 195580, 195581, 195582, 195583, 195584, 195585, 195586, 195587 were selected from the ORFs having the nucleotide sequence represented by SEQ ID NO: 191213.

[16653] The probes from 64 DNA sequences of genes used as internal standard described as above (3) were as follows: The probes having the nucleotide sequence represented by SEQ ID NOS: 195652, 195653, 195654, 195655, 195656, 195657, 195658, 195659, 195660, 195661, 195662, 195663, 195664, 195665, 195666, 195667, 195668, 195669, 195670, 195671, 195672 were selected from the ORFs having the nucleotide sequence represented by SEQ ID NO: 195588.

[16654] The probes having the nucleotide sequence represented by SEQ ID NOS: 195673, 195674, 195675, 195676, 195677, 195678, 195679, 195680, 195681, 195682, 195683, 195684, 195685, 195686, 195687, 195688, 195689, 195690, 195691, 195692 were selected from the ORFs having the nucleotide sequence represented by SEQ ID NO: 195589.

[16655] The probes having the nucleotide sequence represented by SEQ ID NOS: 195693, 195694, 195695, 195696, 195697, 195698, 195699, 195700, 195701, 195702, 195703, 195704, 195705, 195706, 195707, 195708, 195709, 195710, 195711, 195712, 195713 were selected from the ORFs having the nucleotide sequence represented by SEQ ID NO: 195590.

[16656] The probes having the nucleotide sequence represented by SEQ ID NOS: 195714, 195715, 195716, 195717, 195718, 195719, 195720, 195721, 195722, 195723, 195724, 195725, 195726, 195727, 195728, 195729, 195730, 195731, 195732, 195733 were selected from the ORFs having the nucleotide sequence represented by SEQ ID NO: 195591.

[16657] The probes having the nucleotide sequence represented by SEQ ID NOS: 195734, 195735, 195736, 195737, 195738, 195739, 195740, 195741, 195742, 195743, 195744, 195745, 195746, 195747, 195748, 195749, 195750, 195751, 195752, 195753 were selected from the ORFs having the nucleotide sequence represented by SEQ ID NO: 195592.

[16658] The probes having the nucleotide sequence represented by SEQ ID NOS: 195754, 195755, 195756, 195757, 195758, 195759, 195760, 195761, 195762, 195763, 195764, 195765, 195766, 195767, 195768, 195769, 195770, 195771, 195772, 195773, 195774 were selected from the ORFs having the nucleotide sequence represented by SEQ ID NO: 195593.

[16659] The probes having the nucleotide sequence represented by SEQ ID NOS: 195775, 195776, 195777, 195778, 195779, 195780, 195781, 195782, 195783, 195784, 195785, 195786, 195787, 195788, 195789, 195790, 195791, 195792, 195793, 195794 were selected from the ORFs having the nucleotide sequence represented by SEQ ID NO: 195594.

[16660] The probes having the nucleotide sequence represented by SEQ ID NOS: 195795, 195796, 195797, 195798, 195799, 195800, 195801, 195802, 195803, 195804, 195805, 195806, 195807, 195808, 195809, 195810, 195811, 195812, 195813, 195814, 195815 were selected from the ORFs having the nucleotide sequence represented by SEQ ID NO: 195595.

[16661] The probes having the nucleotide sequence represented by SEQ ID NOS: 195816, 195817, 195818, 195819, 195820, 195821, 195822, 195823, 195824, 195825, 195826, 195827, 195828, 195829, 195830, 195831, 195832, 195833, 195834, 195835 were selected from the ORFs having the nucleotide sequence represented by SEQ ID NO: 195596.

[16662] The probes having the nucleotide sequence represented by SEQ ID NOS: 195836, 195837, 195838, 195839, 195840, 195841, 195842, 195843, 195844, 195845, 195846, 195847, 195848, 195849, 195850, 195851, 195852, 195853, 195854, 195855, 195856 were selected from the ORFs having the nucleotide sequence represented by SEQ ID NO: 195597.

[16663] The probes having the nucleotide sequence represented by SEQ ID NOS: 195857, 195858, 195859, 195860, 195861, 195862, 95863, 195864, 195865, 195866, 195867, 195868, 195869, 95870, 195871, 195872, 195873, 195874, 195875, 195876 were elected from the ORFs having the nucleotide sequence represented by SEQ ID NO: 195598.

[16664] The probes having the nucleotide sequence represented by SEQ ID NOS: 195877, 195878, 195879, 195880, 195881, 195882, 195883, 195884, 195885, 195886, 195887, 195888, 195889, 195890, 195891, 195892, 195893, 195894, 195895, 195896 were selected from the ORFs having the nucleotide sequence represented by SEQ ID NO: 195599.

[16665] The probes having the nucleotide sequence represented by SEQ ID NOS: 195897, 195898, 195899, 195900, 195901, 195902, 195903, 195904, 195905, 195906, 195907, 195908, 195909, 195910, 195911, 195912, 195913, 195914, 195915, 195916 were selected from the ORFs having the nucleotide sequence represented by SEQ ID NO: 195600.

[16666] The probes having the nucleotide sequence represented by SEQ ID NOS: 195917, 195918, 195919, 195920, 195921, 195922, 195923, 195924, 195925, 195926, 195927, 195928, 195929, 195930, 195931, 195932, 195933, 195934, 195935, 195936 were selected from the ORFs having the nucleotide sequence represented by SEQ ID NO: 195601.

[16667] The probes having the nucleotide sequence represented by SEQ ID NOS: 195937, 195938, 195939, 195940, 195941, 195942, 195943, 195944, 195945, 195946, 195947, 195948, 195949, 195950, 195951, 195952, 195953, 195954, 195955, 195956 were selected from the ORFs having the nucleotide sequence represented by SEQ ID NO: 195602.

[16668] The probes having the nucleotide sequence represented by SEQ ID NOS: 195957, 195958, 195959, 195960, 195961, 195962, 95963, 195964, 195965, 195966, 195967, 195968, 195969, 195970, 195971, 195972, 195973, 195974, 195975, 195976 were selected from the ORFs having the nucleotide sequence represented by SEQ ID NO: 195603.

[16669] The probes having the nucleotide sequence represented by SEQ ID NOS: 195977, 195978, 195979, 195980, 195981, 195982, 195983, 195984, 195985, 195986, 195987, 195988, 195989, 195990, 195991, 195992, 195993, 195994, 195995, 195996 were selected from the ORFs having the nucleotide sequence represented by SEQ ID NO: 195604.

[16670] The probes having the nucleotide sequence represented by SEQ ID NOS: 195997, 195998, 195999, 196000, 196001, 196002, 196003, 196004, 196005, 196006, 196007, 196008, 196009, 196010, 196011, 196012, 196013, 196014, 196015, 196016 were selected from the ORFs having the nucleotide sequence represented by SEQ ID NO: 195605.

[16671] The probes having the nucleotide sequence represented by SEQ ID NOS: 196017, 196018, 196019, 196020, 196021, 196022, 196023, 196024, 196025, 196026, 196027, 196028, 196029, 196030, 196031, 196032, 196033, 196034, 196035, 196036 were selected from the ORFs having the nucleotide sequence represented by SEQ ID NO: 195606.

[16672] The probes having the nucleotide sequence represented by SEQ ID NOS: 196037, 196038, 196039, 196040, 196041, 196042, 196043, 196044, 196045, 196046, 196047, 196048, 196049, 196050, 196051, 196052, 196053, 196054, 196055, 196056 were selected from the ORFs having the nucleotide sequence represented by SEQ ID NO: 195607.

[16673] The probes having the nucleotide sequence represented by SEQ ID NOS: 196057, 196058, 196059, 196060, 196061, 196062, 196063, 196064, 196065, 196066, 196067, 196068, 196069, 196070, 196071, 196072, 196073, 196074, 196075, 196076 were selected from the ORFs having the nucleotide sequence represented by SEQ ID NO: 195608.

[16674] The probes having the nucleotide sequence represented by SEQ ID NOS: 196077, 196078, 196079, 196080, 196081, 196082, 196083, 196084, 196085, 196086, 196087, 196088, 196089, 196090, 196091, 196092, 196093, 196094, 196095, 196096 were selected from the ORFs having the nucleotide sequences represented by SEQ ID NO: 195609.

[16675] The probes having the nucleotide sequence represented by SEQ ID NOS: 196097, 196098, 196099, 196100, 196101, 196102, 196103, 196104, 196105, 196106, 196107, 196108, 196109, 196110, 196111, 196112, 196113, 196114, 196115, 196116 were selected from the ORFs having the nucleotide sequence represented by SEQ ID NO: 195610.

[16676] The probes having the nucleotide sequence represented by SEQ ID NOS: 196117, 196118, 196119, 196120, 196121, 196122, 196123, 196124, 196125, 196126, 196127, 196128, 196129, 196130, 196131, 196132, 196133, 196134, 196135, 196136 were selected from the ORFs having the nucleotide sequence represented by SEQ ID NO: 195611.

[16677] The probes having the nucleotide sequence represented by SEQ ID NOS: 196137, 196138, 196139, 196140, 196141, 196142, 196143, 196144, 196145, 196146, 196147, 196148, 196149, 196150, 196151, 196152, 196153, 196154, 196155, 196156 were selected from the ORFs having the nucleotide sequence represented by SEQ ID NO: 195612.

[16678] The probes having the nucleotide sequence represented by SEQ ID NOS: 196157, 196158, 196159, 196160, 196161, 196162, 196163, 196164, 196165, 196166, 196167, 196168, 196169, 196170, 196171, 196172, 196173, 196174, 196175, 196176 were selected from the ORFs having the nucleotide sequence represented by SEQ ID NO: 195613.

[16679] The probes having the nucleotide sequence represented by SEQ ID NOS: 196177, 196178, 196179, 196180, 196181, 196182, 196183, 196184, 196185, 196186, 196187, 196188, 196189, 196190, 196191, 196192, 196193, 196194, 196195, 196196 were selected from the ORFs having the nucleotide sequence represented by SEQ ID NO: 195614.

[16680] The probes having the nucleotide sequence represented by SEQ ID NOS: 196197, 196198, 196199, 196200, 196201, 196202, 196203, 196204, 196205, 196206, 196207, 196208, 196209, 196210, 196211, 196212, 196213, 196214, 196215, 196216 were selected from the ORFs having the nucleotide sequence represented by SEQ ID NO: 195615.

[16681] The probes having the nucleotide sequence represented by SEQ ID NOS: 196217, 196218, 196219, 196220, 196221, 196222, 196223, 196224, 196225, 196226, 196227, 196228, 196229, 196230, 196231, 196232, 196233, 196234, 196235, 196236 were selected from the ORFs having the nucleotide sequence represented by SEQ ID NO: 195616.

[16682] The probes having the nucleotide sequence represented by SEQ ID NOS: 196237, 196238, 196239, 196240, 196241, 196242, 196243, 196244, 196245, 196246, 196247, 196248, 196249, 196250, 196251, 196252, 196253, 196254, 196255, 196256 were selected from the ORFs having the nucleotide sequence represented by SEQ ID NO: 195617.

[16683] The probes having the nucleotide sequence represented by SEQ ID NOS: 196257, 196258, 196259, 196260, 196261, 196262, 196263, 196264, 196265, 196266, 196267, 196268, 196269, 196270, 196271, 196272, 196273, 196274, 196275, 196276 were selected from the ORFs having the nucleotide sequence represented by SEQ ID NO: 195618.

[16684] The probes having the nucleotide sequence represented by SEQ ID NOS: 196277, 196278, 196279, 196280, 196281, 196282, 196283, 196284, 196285, 196286, 196287, 196288, 196289, 196290, 196291, 196292, 196293, 196294, 196295, 196296 were selected from the ORFs having the nucleotide sequence represented by SEQ ID NO: 195619.

[16685] The probes having the nucleotide sequence represented by SEQ ID NOS: 196297, 196298, 196299, 196300, 196301, 196302, 196303, 196304, 196305, 196306, 196307, 196308, 196309, 196310, 196311, 196312, 196313, 196314, 196315, 196316 were selected from the ORFs having the nucleotide sequence represented by SEQ ID NO: 195620.

[16686] The probes having the nucleotide sequence represented by SEQ ID NOS: 196317, 196318, 196319, 196320, 196321, 196322, 196323, 196324, 196325, 196326, 196327, 196328, 196329, 196330, 196331, 196332, 196333, 196334, 196335, 196336 were selected from the ORFs having the nucleotide sequence represented by SEQ ID NO: 195621.

[16687] The probes having the nucleotide sequence represented by SEQ ID NOS: 196337, 196338, 196339, 196340, 196341, 196342, 196343, 196344, 196345, 196346, 196347, 196348, 196349, 196350, 196351, 196352, 196353,. 196354, 196355, 196356, 196357, 196358, 196359, 196360, 196361, 196362, 196363, 196364, 196365, 196366, 196367, 196368, 196369, 196370, 196371, 196372, 196373, 196374, 196375, 196376, 196377, 196378, 196379, 196380, 196381, 196382, 196383, 196384, 196385, 196386 were selected from the ORFs having the nucleotide sequence represented by SEQ ID NO: 195622.

[16688] The probes having the nucleotide sequence represented by SEQ ID NOS: 196387, 196388, 196389, 196390, 196391, 196392, 196393, 196394, 196395, 196396, 196397, 196398, 196399, 196400, 196401, 196402, 196403, 196404, 196405, 196406, 196407, 196408, 196409, 196410, 196411, 196412, 196413, 196414, 196415, 196416, 196417, 196418, 196419, 196420, 196421, 196422, 196423, 196424, 196425, 196426, 196427, 196428, 196429, 196430, 196431, 196432, 196433, 196434, 196435, 196436, 196437 were selected from the ORFs having the nucleotide sequence represented by SEQ ID NO: 195623.

[16689] The probes having the nucleotide sequence represented by SEQ ID NOS: 196438, 196439, 196440, 196441, 196442, 196443, 25 196444, 196445, 196446, 196447, 196448, 196449, 196450, 196451, 196452, 196453, 196454, 196455, 196456, 196457, 196458, 196459, 196460, 196461, 196462, 196463, 196464, 196465, 196466, 196467, 196468, 196469, 196470, 196471, 96472, 196473, 196474, 196475, 196476, 196477, 196478, 196479, 196480, 196481, 196482, 196483, 196484, 196485, 196486, 196487 were selected from the ORFs having the nucleotide sequence represented by SEQ ID NO: 195624.

[16690] The probes having the nucleotide sequence represented by SEQ ID NOS: 196488, 196489, 196490, 196491, 196492, 196493, 196494, 196495, 196496, 196497, 196498, 196499, 196500, 196501, 196502, 196503, 196504,. 196505, 196506, 196507, 196508, 196509, 196510, 196511, 196512, 196513, 196514, 196515, 196516, 196517, 196518, 196519, 196520, 196521, 196522, 196523, 196524, 196525, 196526, 196527, 196528, 196529, 196530, 196531, 196532, 196533, 196534, 196535, 196536, 196537 were selected from the ORFs having the nucleotide sequence represented by SEQ ID NO: 195625.

[16691] The probes having the nucleotide sequence represented by SEQ ID NOS: 196538, 196539, 196540, 196541, 196542, 196543, 196544, 196545, 196546, 196547, 196548, 196549, 196550, 196551, 196552, 196553, 196554, 196555, 196556, 196557, 196558, 196559, 196560, 196561, 196562, 196563, 196564, 196565, 196566, 196567, 196568, 196569, 196570, 196571, 196572, 196573, 196574, 196575, 196576, 196577, 196578, 196579, 196580, 196581, 196582, 196583, 196584, 196585, 196586, 196587, 196588 were selected from the ORFs having the nucleotide sequence represented by SEQ ID NO: 195626.

[16692] The probes having the nucleotide sequence represented by SEQ ID NOS: 196589, 196590, 196591, 196592, 196593, 196594, 196595, 196596, 196597, 196598, 196599, 196600, 196601, 196602, 196603, 196604, 196605, 196606, 196607, 196608, 196609, 196610, 196611, 196612, 196613, 196614, 196615, 196616, 196617, 196618, 196619, 196620, 196621, 196622, 196623, 196624, 196625, 196626, 196627, 196628, 196629, 196630, 196631, 196632, 196633, 196634, 196635, 196636, 196637, 196638 were selected from the ORFs having the nucleotide sequence represented by SEQ ID NO: 195627.

[16693] The probes having the nucleotide sequence represented by SEQ ID NOS: 196639, 196640, 196641, 196642, 196643, 196644, 196645, 196646, 196647, 196648, 196649, 196650, 196651, 196652, 196653, 196654, 196655, 196656, 196657, 196658, 196659, 196660, 196661, 196662, 196663, 196664, 196665, 196666, 196667, 196668, 196669, 196670, 196671, 196672, 196673, 196674, 196675, 196676, 196677, 196678, 196679, 196680, 196681, 196682, 196683, 196684, 196685, 196686, 196687, 196688, 196689 were selected from the ORFs having the nucleotide sequence represented by SEQ ID NO: 195628.

[16694] The probes having the nucleotide sequence represented by SEQ ID NOS: 196690, 196691, 196692, 196693, 196694, 196695, 196696, 196697, 196698, 196699, 196700, 196701, 196702, 196703, 196704, 196705, 196706, 196707, 196708, 196709, 196710, 196711, 196712, 196713, 196714, 196715, 196716, 196717, 196718, 196719, 196720, 196721, 196722, 196723, 196724, 196725, 196726, 196727, 196728, 196729, 196730, 196731, 196732, 196733, 196734, 196735, 196736, 196737, 196738, 196739, 196740 were selected from the ORFs having the nucleotide sequence represented by SEQ ID NO: 195629.

[16695] The probes having the nucleotide sequence represented by SEQ ID NOS: 196741, 196742, 196743, 196744, 196745, 196746, 196747, 196748, 196749, 196750, 196751, 196752, 196753, 196754, 196755, 196756, 196757, 196758, 196759, 196760, 196761, 196762, 196763, 196764, 196765, 196766, 196767, 196768, 196769, 196770, 196771, 196772, 196773, 196774, 196775, 196776, 196777, 196778, 196779, 196780, 196781, 196782, 196783, 196784, 196785, 196786, 196787, 196788, 196789, 196790 were selected from the ORFs having the nucleotide sequence represented by SEQ ID NO: 195630.

[16696] The probes having the nucleotide sequence represented by SEQ ID NOS: 196791, 196792, 196793, 196794, 196795, 196796, 196797, 196798, 196799, 196800, 196801 were selected from the ORFs having the nucleotide sequence represented by SEQ ID NO: 195631.

[16697] The probes having the nucleotide sequence represented by SEQ ID NOS: 196802, 196803, 196804, 196805, 196806, 196807, 196808, 196809, 196810, 196811, 196812 were selected from the ORFs having the nucleotide sequence represented by SEQ ID NO: 195632.

[16698] The probes having the nucleotide sequence represented by SEQ ID NOS: 196813, 196814, 196815, 196816, 196817, 196818, 196819, 196820, 196821, 196822, 196823 were selected from the ORFs having the nucleotide sequence represented by SEQ ID NO: 195633.

[16699] The probes having the nucleotide sequence represented by SEQ ID NOS: 196824, 196825, 196826, 196827, 196828, 196829, 196830, 196831, 196832, 196833, 196834 were selected from the ORFs having the nucleotide sequence represented by SEQ ID NO: 195634.

[16700] The probes having the nucleotide sequence represented by SEQ ID NOS: 196835, 196836, 196837, 196838, 196839, 196840, 196841, 196842, 196843, 196844, 196845 were selected from the ORFs having the nucleotide sequence represented by SEQ ID NO: 195635.

[16701] The probes having the nucleotide sequence represented by SEQ ID NOS: 196846, 196847, 196848, 196849, 196850, 196851, 196852, 196853, 196854, 196855, 196856 were selected from the ORFs having the nucleotide sequence represented by SEQ ID NO: 195636.

[16702] The probes having the nucleotide sequence represented by SEQ ID NOS: 196857, 196858, 196859, 196860, 196861, 196862, 196863, 196864, 196865, 196866, 196867 were selected from the ORFs having the nucleotide sequence represented by SEQ ID NO: 195637.

[16703] The probes having the nucleotide sequence represented by SEQ ID NOS: 196868, 196869, 196870, 196871, 196872, 196873, 196874, 196875, 196876, 196877, 196878 were selected from the ORFs having the nucleotide sequence represented by SEQ ID NO: 195638.

[16704] The probes having the nucleotide sequence represented by SEQ ID NOS: 196879, 196880, 196881, 196882, 196883, 196884, 196885, 196886, 196887, 196888, 196889 were selected from the ORFs having the nucleotide sequence represented by SEQ ID NO: 195639.

[16705] The probes having the nucleotide sequence represented by SEQ ID NOS: 196890, 196891, 196892, 196893, 196894, 196895, 196896, 196897, 196898, 196899, 196900 were selected from the ORFs having the nucleotide sequence represented by SEQ ID NO: 195640.

[16706] The probes having the nucleotide sequence represented by SEQ ID NOS: 196901, 196902, 196903, 196904, 196905, 196906, 196907, 196908, 196909, 196910, 196911 were selected from the ORFs having the nucleotide sequence represented by SEQ ID NO: 195641.

[16707] The probes having the nucleotide sequence represented by SEQ ID NOS: 196912, 196913, 196914, 196915, 196916, 196917, 196918, 196919, 196920, 196921, 196922 were selected from the ORFs having the nucleotide sequence represented by SEQ ID NO: 195642.

[16708] The probes having the nucleotide sequence represented by SEQ ID NOS: 196923, 196924, 196925, 196926, 196927, 196928, 196929, 196930, 196931, 196932, 196933 were selected from the ORFs having the nucleotide sequence represented by SEQ ID NO: 195643.

[16709] The probes having the nucleotide sequence represented by SEQ ID NOS: 196934, 196935, 196936, 196937, 196938, 196939, 196940, 196941, 196942, 196943, 196944 were selected from the ORFs having the nucleotide sequence represented by SEQ ID NO: 195644.

[16710] The probes having the nucleotide sequence represented by SEQ ID NOS: 196945, 196946, 196947, 196948, 196949, 196950, 196951, 196952, 196953, 196954, 196955 were selected from the ORFs having the nucleotide sequence represented by SEQ ID NO: 195645.

[16711] The probes having the nucleotide sequence represented by SEQ ID NOS: 196956, 196957, 196958, 196959, 196960, 196961, 196962, 196963, 196964, 196965, 196966 were selected from the ORFs having the nucleotide sequence represented by SEQ ID NO: 195646.

[16712] The probes having the nucleotide sequence represented by SEQ ID NOS: 196967, 196968, 196969, 196970, 196971, 196972, 196973, 196974, 196975, 196976, 196977 were selected from the ORFs having the nucleotide sequence represented by SEQ ID NO: 195647.

[16713] The probes having the nucleotide sequence represented by SEQ ID NOS: 196978, 196979, 196980, 196981, 196982, 196983, 196984, 196985, 196986, 196987, 196988 were selected from the ORFs having the nucleotide sequence represented by SEQ ID NO: 195648.

[16714] The probes having the nucleotide sequence represented by SEQ ID NOS: 196989, 196990, 196991, 196992, 196993, 196994, 196995, 196996, 196997, 196998, 196999 were selected from the ORFs having the nucleotide sequence represented by SEQ ID NO: 195649.

[16715] The probes having the nucleotide sequence represented by SEQ ID NOS: 197000, 197001, 197002, 197003, 197004, 197005, 197006, 197007, 197008, 197009, 197010 were selected from the ORFs having the nucleotide sequence represented by SEQ ID NO: 195650.

[16716] The probes having the nucleotide sequence represented by SEQ ID NOS: 197011, 197012, 197013, 197014, 197015, 197016, 197017, 197018, 197019, 197020, 197021 were selected from the ORFs having the nucleotide sequence represented by SEQ ID NO: 195651.

### Example 18

### Identification Molecular Markers that are Highly Inducible in Zinc Depleted Condition

[16717] 1. Preparation of mRNA

[16718] Strain 34/70 was grown overnight in LZMM medium+40 μM zinc sulfate at 30° C. with shaking. LZMM medium contains 0.17% yeast nitrogen base w/o amino acids (manufactured by DIFCO), 0.5% ammonium sulfate, 20 mM sodium citrate (pH 4.2), 125 μM MnCl2, 10 μM FeCl2, 2% maltose, 10 mM EDTA (pH 8.0). Cells were harvested and washed three times with sterile distilled water before inoculation to an optical density (OD600) of 0.25 in 500 ml of 1) zinc depleted medium (LZMM medium), 2) zinc replete medium (LZMM+40 μM zinc sulfate), 3) oxidative stress medium (LZMM+40 μM zinc sulfate+2 mM H₂O₂), 4) carbon starvation medium (deleting maltose from above LZMM+40 μM zinc sulfate). Cells were grown at 30° C. for 6 hours and harvested for RNA preparation.

[16719] Preparation of total RNA was carried out using RNeasy® Mini Kit (manufactured by QIAGEN) according to a manual. Preparation of Poly(A)+mRNA from total RNA was carried out using Oligotex Direct mRNA kit (manufactured by QIAGEN) according to a manual.

2. Synthesis of Biotin-Labeled cRNA

[16720] Synthesis of Biotin-Labeled cRNA was carried out using BioArray HighYield RNA Transcript Labeling Kit (manufactured by Affymetrix) according to a manual.

3. Hybridization

[16721] 5 μg of Biotin-Labeled cRNA, 1.7 μl of 3 nM Control Oligonucleotide B2 (manufactured by Affymetrix), 5 μl of 20× Eukaryotic Hybridization Controls (manufactured by Affymetrix), 1 μl of 10 mg/ml Herring Sperm DNA (manufactured by Affymetrix), 1 μl of 50 mg/ml Acetylated BSA (manufactured by Affymetrix), 50 μl of 2× Hybridization buffer (manufactured by Affymetrix), and water (manufactured by Affymetrix) to give final volume of 100 μl were mixed and hybridized to the DNA array according to a Technical Manual of Affymetrix.

[16722] After 16 hours of hybridization, hybridization cocktail was removed and the DNA array was washed using the GeneChip® Fludics Station (manufactured by Affymetrix), and stained with 600 μl of Streptavidin Phycoerythrin (300 μl of 2× MES Stain Buffer (manufactured by Affymetrix), 24 μl of 50 mg/ml acetylated BSA (manufactured by Affymetrix), 6 μl of 1 mg/ml StreptAvidin-Phycoerythrin (manufactured by Affymetrix), 270 μl of water (manufactured by Affymetrix) according to a Technical Manual of Affymetrix.

4. Data analysis

[16723] Detection of the signal intensity of the DNA array was carried out using Gene Chip Analysis Basic System and analysis software (GCOS; GeneChip Operating Software 1.0) according to a Technical Manual of Affymetrix.

[16724] Normalization was carried out using the All Probe Sets method in GCOS to adjust a signal in comparison analysis. The comparison files of gene expression which were compared (1) zinc depleted condition to zinc replete condition, (2) oxidative stress condition to zinc replete condition and (3) carbon starvation condition to zinc replete condition were created using GCOS, respectively. The genes whose expressions were increased by more than 0.3 at signal log ratio only in above comparison (1) were shown in Table 4.

[16725] Sc-1159-1_at, Sc-1161-1_at, Sc-5030-1_at, Sc-2123-1_at is Sc YGL258W, Sc YGL256W, Sc YOL154W, Sc YKL175W, respectively. And it is known that these genes are transcriptionally induced in zinc depleted condition (Higgins, V. J. et al., Appl. Environ. Microbiol., 69: 7535-7540(2003)). Lg-4216-1_s_at was designed to correspond to Non-Sc YKL175W whose function was assigned zinc ion transporter activity. It is known that zinc ion transporter is transcriptionally induced in zinc depleted condition.

[16726] In conclusion, it is shown that the molecular markers that are highly induced in zinc depleted condition can be identified using the bottom fermenting yeast DNA array.

TABLE 4

| | (1) zinc deplete/zinc replete | | | (2) oxidative stress/zinc replete | | | | | | | |
|---|---|---|---|---|---|---|---|---|---|---|---|
| | Signal | | | Signal | | | (3) carbon starvation/zinc replete | | | annotation | |
| probe set | Log Ratio | Detection | Change | Log Ratio | Detection | Change | Signal Log Ratio | Detection | Change | Gene name | Type |
| Sc-1159-1_at | 3.1 | P | I | −0.6 | A | NC | −0.5 | A | NC | YGL258W | Sc |
| Lg-4570-1_at | 1.2 | P | I | 0.1 | P | NC | −0.7 | A | D | YNL254C | Non-Sc |
| Sc-1161-1_at | 1.1 | P | I | −1.1 | P | D | −1.2 | P | D | YGL256W | Sc |
| Lg-3847-1_at | 0.9 | P | I | −0.6 | P | D | −1.1 | P | D | YGL256W | Non-Sc |
| Sc-2889-1_at | 0.7 | P | I | −0.5 | P | D | −1.8 | P | D | YNL254C | Sc |
| Lg-4216-1_s_at | 0.6 | P | I | −0.6 | P | D | −0.4 | P | D | YKL175W | Non-Sc |
| Sc-5030-1_at | 0.5 | P | I | −3.6 | P | D | −3.8 | P | D | YOL154W | Sc |
| Sc-1160-1_at | 0.4 | P | I | −1.1 | P | D | −0.9 | P | D | YGL257C | Sc |
| Lg-1751-1_at | 0.4 | P | I | −1 | P | D | −0.7 | P | D | YLR209C | Non-Sc |
| Sc-3567-1_at | 0.4 | P | I | 0.2 | P | NC | −0.4 | P | NC | YPL148C | Sc |
| Lg-3161-1_at | 0.4 | P | I | −0.8 | P | D | −0.9 | P | D | YMR020W | Non-Sc |
| Sc-3984-1_x_at | 0.4 | P | I | 0.2 | P | NC | −1.3 | P | D | YDL150W | Sc |
| Lg-4390-2_x_at | 0.4 | P | I | 0.3 | P | NC | −0.5 | P | NC | YLR339C | Non-Sc |
| Sc-4798-1_at | 0.4 | P | I | 0.2 | P | NC | −2.3 | P | D | YLR435W | Sc |
| Lg-5145-1_s_at | 0.4 | P | I | 0.2 | P | NC | −2.3 | P | D | YDR312W | Non-Sc |
| Lg-139-1_at | 0.3 | P | I | −0.3 | P | NC | −4.1 | A | D | YBR104W | Non-Sc |
| Lg-467-1_at | 0.3 | P | I | 0.1 | P | NC | −2 | P | D | YDR161W | Non-Sc |
| Sc-1412-1_at | 0.3 | P | I | 0 | P | NC | −2 | P | D | YGR081C | Sc |
| Lg-961-1_at | 0.3 | P | I | 0.2 | P | NC | −1.5 | P | D | YGR103W | Non-Sc |
| Sc-2122-1_at | 0.3 | P | I | −0.3 | P | NC | 0.1 | P | NC | YKL176C | Sc |
| Sc-2123-1_at | 0.3 | P | I | −0.5 | P | D | −1.1 | P | D | YKL175W | Sc |
| Sc-2209-1_at | 0.3 | P | I | 0.2 | P | NC | −1.7 | P | D | YKL072W | Sc |
| Sc-2356-1_at | 0.3 | P | I | −0.1 | P | NC | −2.4 | P | D | YLR129W | Sc |
| Lg-1955-1_at | 0.3 | P | I | −0.1 | P | NC | 0 | P | NC | YMR096W | Non-Sc |
| Sc-2890-1_at | 0.3 | P | I | −0.3 | P | NC | −1.2 | P | D | YNL253W | Sc |
| Lg-2100-1_at | 0.3 | P | I | −0.8 | P | D | −1.7 | P | D | YNL217W | Non-Sc |
| Sc-2920-1_at | 0.3 | P | I | 0.3 | P | MI | −2.4 | P | D | YNL207W | Sc |
| Lg-2258-1_at | 0.3 | P | I | 0.1 | P | NC | −1.8 | P | D | YOL125W | Non-Sc |
| Sc-3203-1_at | 0.3 | P | I | 0.1 | P | NC | −0.8 | P | D | YOL022C | Sc |
| Sc-3651-1_s_at | 0.3 | P | I | 0.1 | P | NC | −0.1 | P | NC | YPR044C | Sc |
| Lg-2648-1_at | 0.3 | P | I | 0.1 | P | NC | −2.1 | P | D | YPR048W | Non-Sc |
| Lg-3014-1_at | 0.3 | P | I | −0.7 | P | D | −0.3 | P | NC | YJL055W | Non-Sc |
| Sc-4034-1_at | 0.3 | P | I | 0.1 | P | NC | 0.3 | P | NC | YDR017C | Sc |
| Lg-3620-1_at | 0.3 | P | I | 0.4 | P | NC | −2.1 | P | D | YDR087C | Non-Sc |
| Sc-4163-1_at | 0.3 | P | I | 0.1 | P | NC | −2.5 | M | D | YDR449C | Sc |
| Sc-4365-1_at | 0.3 | P | I | 0.3 | P | NC | −1.4 | P | D | YGR145W | Sc |
| Sc-4454-1_at | 0.3 | P | I | 0.4 | P | NC | −1.8 | P | D | YHR197W | Sc |
| Lg-4608-2_at | 0.3 | P | I | −0.3 | P | D | −1.9 | P | D | YNL112W | Non-Sc |
| Lg-4622-1_at | 0.3 | P | I | 0.1 | P | NC | −2.5 | P | D | YNL062C | Non-Sc |
| Sc-5321-1_at | 0.3 | P | I | 0.4 | P | NC | −1.1 | P | D | YGR272C | Sc |
| Lg-5125-1_at | 0.3 | P | I | 0.2 | P | NC | −2.4 | P | D | YDR101C | Non-Sc |

[16727] Signal Log Ratio (2n) indicates the magnitude and direction of a transcript when two arrays were compared. Detection indicates whether a transcript was reliably detected (P; Present) or not detected (A; Absent) based on the Detection p-value calculated by Detection Algorithm with default paramater in GCOS. Change indicates whether a transcript was reliably increased (I; Increase) or decreased (D; Decrease) or not changed (NC; No Change) based on the Change p-value calculated by Change Algorithm with default paramater in GCOS. Gene name indicates where the corresponding probe set was designed. Type indicates whether a gene is Sc ORF (Sc) or Non-Sc ORF (Non-Sc).

### Example 19

### Gene Expression Analysis of Brewing Yeast Under Beer Fermenting Condition

[16728] Fermentation test using strain 34/70 was carried out under the following condition.

[16729] Original extract: 12.84%

[16730] Fermentation scale: 2 liters

[16731] Dissolved oxygen concentration: about 9 ppm

[16732] Fermentation temperature: 15° C.

[16733] Pitching rate: 10 g of wet yeast cells/2 L of wort

[16734] Wort is periodically sampled and monitored in cell growth (OD 600) (FIG. 12-(a)) and apparent extract (FIG. 12-b)). mRNA was extracted from the cells withdrawn from the fermentation tubes 42 hours after inoculation, biotin labeled and hybridized to the bottom fermenting yeast DNA array as described in example 18. Detection of the signal intensity was carried out using a Gene Chip Analysis Basic System and analysis soft ware (GCOS; GeneChip Operating Software 1.0) manufactured by Affymetrix.

[16735] There were more than a few genes whose Sc type probe sets and non-Sc type probe sets showed quite different signal intensities. Examples of SSU1 genes and MET14 genes, which are related to sulfite production during beer fermentation are shown in Table 5. In the case of SSU1 genes and MET14 genes of strain 34/70, the expressions of non-Sc type were higher than those of Sc type, by 3.4-fold and 7-fold, respectively.

[16736] In order to confirm this difference is due to neither the difference of hybridization efficiency of each probe set nor cross hybridization between Sc and non-Sc type probe sets, comparative genomic hybridization with the bottom fermenting yeast DNA array was carried out using strain 34/70, a laboratory strain (S. cerevisiae) S288C and S. carlsbergensis strain IF011023. The preparation of genomic DNA, hybridization to DNA array and detection of the signal intensities were carried out with the method described before. As shown in Table 6, the ratio of signal intensity of non-Sc type to that of Sc type was 1.0 for SSU1 genes and 1.3 for MET14 genes in strain 34/70. This result shows that hybridization efficiencies of Sc and non-Sc probe sets were almost same.

[16737] Furthermore, strain S288C, which does not have non-Sc type genes, showed very low signal intensities to non-Sc type probe sets, and strain IF011023, which does not have Sc type SSU1 gene and Sc type MET14, showed very low signal intensities to Sc type SSU1 and Sc type MET14 probe sets. These results clearly show that cross hybridization did not occur between Sc and non-Sc type probe sets.

[16738] From these results, in strain 34/70, the expressions of non-Sc SSU1 and non-Sc MET14 were significantly higher than those of Sc SSU1 and Sc MET14, respectively. These genes are thought to be candidates which contribute to the high sulfite production ability of bottom fermenting yeast.

[16739] In conclusion, it was revealed that gene expression analysis of brewing yeast strains using the bottom fermenting yeast DNA array was useful for the selection of gene(s) for functional analysis.

TABLE 5

| | gene | | | |
|---|---|---|---|---|
| | Sc_SSU1 | non_Sc_SSU1 | Sc_MET14 | non_Sc_MET14 |
| | probe set | | | |
| | Sc-3594-1 at | Lg-3333-1 at | Sc-2246-1 at | Lg-1564-1 at |
| signal | 145.2 | 490.4 | 177.3 | 1245.8 |
| inten- | | | | |
| sity | | | | |

[16740] TABLE 6

| | gene | Sc_SSUI | non_Sc_SSUI | Sc_MET14 | non_Sc_MET14 |
|---|---|---|---|---|---|
| strains | probe set | Sc-3594-1_at | Lg-3333-1_at | Sc-2246-1_at | Lg-1564-1_at |
| 34/70 | signal | 360.9 | 356.8 | 244.2 | 324.8 |
| S288C | intensity | 516.2 | 6.5 | 405.3 | 13.4 |
| S. carlsbergensis IFO11023 | | 8.5 | 746.9 | 6.8 | 508.4 |

### Example 20

### Classification of Brewing Strains by Comparative Genomic Hybridization with the Bottom Fermenting Yeast DNA Array

[16741] Preparation of yeast genomic DNA and hybridization to the DNA array was carried out as described in (Example 8). Detection of the signal intensity of the DNA array was carried out using a Gene Chip Analysis Basic System and analysis soft ware (GCOS; GeneChip Operating Software 1.0) manufactured by Affymetrix. The percentage of probes, which the DNA of brewing yeast hybridized was calculated and the identity between strain 34/70 and the tested strain was estimated as shown in Table 7. Strains BH225, BH232 and BH235 hybridized to more than 99% of both Sc type and non-Sc type probes of the bottom fermenting yeast DNA array. It suggests that these strains are very close to strain 34/70, and that this array is useful for the gene expression analysis of these strains. On the other hand, strain BH212 showed relatively low (97.8 and 97.7% for Sc type and non-Sc type probe, respectively) percentage of hybridization, which means this strain is a little bit different from strain 34/70. From these results, relationship among lager brewing strains can be estimated and classification of lager brewing strains can be carried out.

[16742] From the result of analysis of strain BH212, some loci which showed very low signal intensities were found. They may be lost in strain BH212 or their sequences may be different from those of strain 34/70. In contrast, some loci which showed high signal intensities were also found. They may be high in copy number in strain BH212. Such loci can be selected for functional analysis because they may contribute to the difference of fermentation character between strain BH212 and strain 34/70.

TABLE 7
percentage of hybridized probes

| | Strain No. | | | | |
|---|---|---|---|---|---|
| | 34/70 | BH225 | BH232 | BH235 | BH212 |
| Sc type | 99.6 | 99.8 | 99.8 | 99.8 | 97.8 |
| Non-Sc | 99.5 | 99.9 | 99.9 | 99.6 | 97.7 |
| type | | | | | |

### Example 21

### Detection of Nucleotide Polymorphism

[16743] Furthermore, (single) nucleotide polymorphism was detectable by the analysis of comparative genomic hybridization. The sets of oligonucleotides for each probe consist of Perfect Match oligonucleotide (PM) which is identical to the sequence of strain 34/70 and MisMatch oligonucleotide (MM) which contains a single base mismatch in the central position of the oligonucleotide. Genomic DNA of a laboratory strain S288C was hybridized to the bottom fermenting yeast DNA array. As shown in Table 8, probes which showed higher (more than 5-fold) signal in MM than in PM had single nucleotide polymorphism.

TABLE 8

| | signal of | signal of MM | | |
|---|---|---|---|---|
| probe | PM probe | probe | | |
| Mt6s at 653 337 | 11238 | 63439 | DNA sequence of PM | GAATCAATTAACTTATGGTTTCTTA |
| | | | | \|\|\|\|\|\|\|\|\|\|\|\| \|\|\|\|\|\|\|\|\|\|\|\|\| |
| | | | DNA sequence of tested strain | GAATCAATTAACATATGGTTTCTTA |
| Sc-21 33-1 _at 59 _283 | 4725 | 27825 | DNA sequence of PM | CCCCTTAGTGGCGAAGATATCTTTT |
| | | | | \| \|\|\| \|\|\| \| \| \|\|\|\| \|\|\|\| |
| | | | DNA sequence of tested strain | GCTCTTGGTGACCAGGATACTTTTT |

### INDUSTRIAL APPLICABILITY

[16744] A database compiling the data of the whole genome sequences of an industrial yeast or, particularly, of a brewing yeast used for the production of alcoholic beverages such as beer is prepared. Using such a database, genes of brewing yeast are selected, and functions of the genes are analyzed by disruption or overexpression in yeast cells, and find genes participating in the desired brewing character. Furthermore, it is possible to breed yeast strains by controlling the expression of the said genes, and produce an alcohol or an alcoholic beverage where productivity and quality are improved, such as alcoholic beverages with high concentration of sulfite which shows antioxidant activity in the product, excellent flavor stability and a longer quality preservation period.

[16745] Based on the database compiling the data of the whole genome sequences of an industrial yeast or, particularly, of a brewing yeast, a DNA array is produced. Using the DNA array, it is possible to analyze functions of the genes, classify industrial yeasts and detect nucleotide polymorphism and so on.

1. A method for analyzing gene of an industrial yeast comprising
(a) determining nucleotide sequence of the whole genome sequence of the industrial yeast; and
(c-1) selecting a gene of the industrial yeast encoding an amino acid sequence having 70 to 97% identity to an amino acid sequence encoded by the gene of Saccharomyces cerevisiae, or
(c-2) selecting a gene of the industrial yeast consisting of a nucleotide sequence having 60 to 94% identity to the nucleotide sequence of the gene of Saccharomyces cerevisiae.

2. The analyzing method according to claim 1, comprising,
(b) comparing the genome sequence with the whole genome sequence of Saccharomyces cerevisiae after the step (a) and before the step (c-1) or (c-2).

3. The analyzing method according to claim 1, comprising
(d) carrying out functional analysis of the selected gene
after the step (c-1) or (c-2).

4. The analyzing method according to claim 3, which comprises screening genes participating in increase in productivity and/or improvement in flavor in the production of an alcohol or an alcoholic beverage by the functional analysis of the step (d).

5. The analyzing method according to claim 3, wherein functional analysis is performed by disruption of a gene or overexpression of a gene.

6. The analyzing method according to claim 1, wherein the industrial yeast is a brewing yeast.

7. The analyzing method according to claim 6, wherein the brewing yeast is a beer yeast.

8. The analyzing method according to claim 7, wherein the beer yeast is a bottom fermenting yeast.

9. A gene of the industrial yeast encoding an amino acid sequence having 70 to 97% identity to an amino acid sequence encoded by the gene of Saccharomyces cerevisiae, or consisting of a nucleotide sequence having 60 to 94% identity to the nucleotide sequence of the gene of Saccharomyces cerevisiae, which is obtained by the analyzing method according to any one of claims 1-8.

10. A gene library comprising one or more of genes of the industrial yeast each of which encodes an amino acid sequence having 70 to 97% identity to an amino acid sequence encoded by the gene of Saccharomyces cerevisiae, or consists of a nucleotide sequence having 60 to 94% identity to the nucleotide sequence of the gene of Saccharomyces cerevisiae, which is obtained by the analyzing method according to any one of claim 1.

11. The gene library according to claim 10, wherein the gene of the industrial yeast is comprised in, consists of or has any nucleotide sequence selected from SEQ ID NOs:33 to 6236, SEQ ID NOs:166154 to 166181, SEQ ID NOs:166490 to 167042 and SEQ ID NOs:173125 to 174603.

12. A DNA array comprising one or more of DNAs, wherein each DNA is selected from at least one group of (1) to (4):
(1) DNA consisting of a nucleotide sequence of an open reading frame of the genome sequence of an industrial yeast which encodes an amino acid sequence having 70 to 97% identity to an amino acid sequence encoded by the gene of Saccharomyces cerevisiae, or a nucleotide sequence complementary to the above nucleotide sequence, or a nucleotide sequence of continuous 10 or more nucleotides selected from the above nucleotide sequences;
(2) DNA consisting of a nucleotide sequence of the genome sequence of an industrial yeast other than from open reading frames which consists of a nucleotide sequence having 60 to 94% identity to the nucleotide sequence of the gene of Saccharomyces cerevisiae, or a nucleotide sequence complementary to the above nucleotide sequence, or a nucleotide sequence of continuous 10 or more nucleotides selected from the above nucleotide sequences;
(3) DNA having a nucleotide sequence of any of SEQ ID NOs:166490 to 167042, or DNA having a nucleotide sequence of any of SEQ ID NOs:167043 to 173124; and
(4) DNA having a nucleotide sequence of any of SEQ ID NOs:173125 to 174603, or DNA having a nucleotide sequence of any of SEQ ID NOs:174604 to 190810.

13. The DNA array according to claim 12 comprising DNAs wherein at least one DNA is selected from every group of (1) to (4).

14. The DNA array according to claim 12, wherein the DNAs of (1) is comprised in, consists of or has any nucleotide sequence selected from SEQ ID NOs:33 to 6236 and SEQ ID NOs:166154 to 166181, and SEQ ID NOs:6237 to 75336 and SEQ ID NOs:166182 to 166489.

15. The DNA array according to any one of claim 12, which further comprises, in addition to at least one group of DNAs selected from (1) to (4), DNAs of the following (5) and/or (6):
(5) DNA consisting of a nucleotide sequence of an open reading frame of the genome sequence of an industrial yeast which encodes an amino acid sequence having identity of more than 97% to an amino acid sequence encoded by the gene of Saccharomyces cerevisiae, or a nucleotide sequence complementary to the above nucleotide sequence, or a nucleotide sequence of continuous 10 or more nucleotides selected from the above nucleotide sequences; and
(6) DNA consisting of a nucleotide sequence of the genome sequence of an industrial yeast other than from open reading frames which consists of a nucleotide sequence having identity of more than 94% to the nucleotide sequence of the gene of Saccharomyces cerevisiae, or a nucleotide sequence complementary to the above nucleotide sequence, or a nucleotide sequence of continuous 10 or more nucleotides selected from the above nucleotide sequences, and optionally DNAs of the following (5′) and/or (6′):
(5′) DNA consisting of a nucleotide sequence which contains mismatch of 1 or more base(s) to the DNA of (5), or a nucleotide sequence complementary to the above nucleotide sequence; and
(6′) DNA consisting of a nucleotide sequence which contains mismatch of 1 or more base(s) to the DNA of (6), or a nucleotide sequence complementary to the above nucleotide sequence.

16. The DNA array according to claim 15, wherein the DNAs of (5) has a nucleotide sequence of any one of SEQ ID NOs:75337 to 82784, or SEQ ID NOs:82785 to 166153.

17. The DNA array according to any one of claim 12, which comprises, in addition to at least one group of DNAs selected from (1) to (4), DNAs selected from at least one group of (7) to (10):
(7) DNA consisting of a nucleotide sequence which contains mismatch of 1 or more base(s) to the DNA of (1), or a nucleotide sequence complementary to the above nucleotide sequence;
(8) DNA consisting of a nucleotide sequence which contains mismatch of 1 or more base(s) to the DNA of (2), or a nucleotide sequence complementary to the above nucleotide sequence;
(9) DNA consisting of a nucleotide sequence which contains mismatch of 1 or more base(s) to the DNA of (3), or a nucleotide sequence complementary to the above nucleotide sequence; and
(10) DNA consisting of a nucleotide sequence which contains mismatch of 1 or more base(s) to the DNA of (4), or a nucleotide sequence complementary to the above nucleotide sequence.

18. The DNA array according to claim 17, which comprises, in addition to at least one group of DNAs elected from (1) to (4), DNAs selected from at least one group of (7-1) to (10-1):
(7-1) DNA consisting of a nucleotide sequence which contains mismatch of 1 base to the DNA of (1), or a nucleotide sequence complementary to the above nucleotide sequence;
(8-1) DNA consisting of a nucleotide sequence which contains mismatch of 1 base to the DNA of (2), or a nucleotide sequence complementary to the above nucleotide sequence;
(9-1) DNA consisting of a nucleotide sequence which contains mismatch of 1 base to the DNA of (3), or a nucleotide sequence complementary to the above nucleotide sequence; and
(10-1) DNA consisting of a nucleotide sequence which contains mismatch of 1 base to the DNA of (4), or a nucleotide sequence complementary to the above nucleotide sequence.

19. A DNA array comprising:
I) at least one group of DNAs selected from at least one group of (1) to (4):
(1) DNA consisting of a nucleotide sequence of an open reading frame of the genome sequence of an industrial yeast which encodes an amino acid sequence having 70 to 97% identity to an amino acid sequence encoded by the gene of Saccharomyces cerevisiae, or a nucleotide sequence complementary to the above nucleotide sequence, or a nucleotide sequence of continuous 10 or more nucleotides selected from the above nucleotide sequences;
(2) DNA consisting of a nucleotide sequence of the genome sequence of an industrial yeast other than from open reading frames which consists of a nucleotide sequence having 60 to 94% identity to the nucleotide sequence of the gene of Saccharomyces cerevisiae, or a nucleotide sequence complementary to the above nucleotide sequence, or a nucleotide sequence of continuous 10 or more nucleotides selected from the above nucleotide sequences;
(3) DNA having a nucleotide sequence of any of SEQ ID NOs:166490 to 167042, or DNA having a nucleotide sequence of any of SEQ ID NOs:167043 to 173124; and
(4) DNA having a nucleotide sequence of any of SEQ ID NOs:173125 to 174603, or DNA having a nucleotide sequence of any of SEQ ID NOs:174604 to 190810:
II) at least one group of DNAs selected from at least one group of (7) to (10):
(7) DNA consisting of a nucleotide sequence which contains mismatch of 1 or more base(s) to the DNA of (1), or a nucleotide sequence complementary to the above nucleotide sequence;
(8) DNA consisting of a nucleotide sequence which contains mismatch of 1 or more base(s) to the DNA of (2), or a nucleotide sequence complementary to the above nucleotide sequence;
(9) DNA consisting of a nucleotide sequence which contains mismatch of 1 or more base(s) to the DNA of (3), or a nucleotide sequence complementary to the above nucleotide sequence; and
(10) DNA consisting of a nucleotide sequence which contains mismatch of 1 or more base(s) to the DNA of (4), or a nucleotide sequence complementary to the above nucleotide sequence:
III) DNAs of the following (5) and/or (6):
(5) DNA consisting of a nucleotide sequence of an open reading frame of the genome sequence of an industrial yeast which encodes an amino said sequence having identity of more than 97% to an amino acid sequence encoded by the gene of Saccharomyces cerevisiae, or a nucleotide sequence complementary to the above nucleotide sequence, or a nucleotide sequence of continuous 10 or more nucleotide selected from the above nucleotide sequences; and
(6) DNA consisting of a nucleotide sequence of the genome sequence of an industrial yeast other than from open reading frames which consists of a nucleotide sequence having identity of more than 94% to the nucleotide sequence of the gene of Saccharomyces cerevisiae, or a nucleotide sequence complementary to the above nucleotide sequence, or a nucleotide sequence of continuous 10 or more nucleotides selected from the above nucleotide sequences; and
IV) DNAs of the following (5′) and/or (6′):
(5′) DNA consisting of a nucleotide sequence which contains mismatch of 1 or more base(s) to the DNA of (5), or a nucleotide sequence complementary to the above nucleotide sequence; and
(6′) DNA consisting of a nucleotide sequence which contains mismatch of 1 or more base(s) to the DNA of (6), r a nucleotide sequence complementary to the above nucleotide sequence.

20. The DNA array according to claim 12 or 19, wherein the DNAs are oligonucleotides consisting of 10-30 nucleotides.

21. A method for analyzing genes of an industrial yeast comprising hybridizing genes of the industrial yeast to the DNA array according to claim 12 or 19.

22. A method for classifying an industrial yeast comprising
(a) hybridizing genomic DNA prepared from the industrial yeast to the DNA array of claim 15 or 19; and
(b) calculating percentage to hybridize DNAs of any of (1) to (4), and percentage to hybridize DNAs of (5) and/or (6).

23. The method for classification according to claim 22,
wherein the DNA array comprises at least one group of DNAs selected from (1) to (4), at least one group of DNAs selected from (7) to (10), DNAs of (5) and/or (6) and DNAs of (5′) and/or (6′), and
percentage of genes which hybridize to DNAs of (1) and/or (2), but not to DNAs of (7) and/or (8) is determined as percentage to hybridize DNAs of any of (1) to (4), and percentage of genes which hybridize to DNAs of (5) and/or (6), but not to DNAs of (5′) and/or (6′) is determined as percentage to hybridize DNAs of any of (5) and/or (6).

24. A method for detecting nucleotide polymorphism in genome of an industrial yeast comprising
(a) hybridizing genomic DNA prepared from the industrial yeast to the DNA array of any one of claims 17 or 19; and
(b) selecting a gene wherein hybridization intensity to the DNAs of any of (7) to (10) is higher than hybridization intensity to the DNAs of any of (1) to (4).

25. A method for screening a useful strain of industrial yeast, comprising
(a) hybridizing genomic DNA prepared from the industrial yeast strain to the DNA array of claim 12 or 19; and
(b) determining the industrial yeast strain as useful when the strain contain 1 or more genes wherein hybridization intensity thereof is 1.5 times higher, or ⅔ or less compared to an average hybridization intensity to the DNAs of any of (1) to (4).

26. A method for screening a gene of an industrial yeast, comprising
(a) hybridizing genomic DNA prepared from the industrial yeast strain to the DNA array of claim 12 or 19; and
(b) selecting a gene wherein hybridization intensity thereof is 1.5 times higher, or ⅔ or less compared to an average hybridization intensity to the DNAs of any of (1) to (4).

27. A method for screening a gene of an industrial yeast, comprising
(a-1) hybridizing genomic DNA, cDNA or cRNA prepared from the industrial yeast to a DNA array comprising one or more of DNAs, wherein each DNA is selected from at least one group of (1) to (4):
(1) DNA consisting of a nucleotide sequence of an open reading frame of the genome sequence or an industrial yeast which encodes an amino acid sequence having 70 to 97% identity to an amino acid sequence encoded by the gene of Saccharomyces cerevisiae, or a nucleotide sequence complementary to the above nucleotide sequence, or a nucleotide sequence of continuous 10 or more nucleotides selected from the above nucleotide sequences;
(2) DNA consisting of a nucleotide sequence of the genome sequence of an industrial yeast other than from open reading frames which consists of a nucleotide sequence of having 60 to 94% identity to the nucleotide sequence of the gene of Saccharomyces cerevisiae, or a nucleotide sequence complementary to the above nucleotide sequence, or a nucleotide sequence of continuous 10 or more nucleotides selected from the above nucleotide sequences;
(3) DNA having a nucleotide sequence of any of SEQ ID Nos: 166490 to 167042, or DNA having a nucleotide sequence of any of SEQ ID NOs: 167043 to 173124; and
(4) DNA having a nucleotide sequence of any of SEQ ID NOs: 173125 to 174603, or DNA having a nucleotide sequence of any of SEQ ID NOs: 174604 to 190810:
(a-2) independently from the step of (a-1), hybridizing genomic DNA, cDNA or cRNA prepared from the industrial yeast of the strain used for preparing the DNA array to the DNA array comprising one or more of DNAs, wherein each DNA is selected from at least one group of (1) to (4):
(1) DNA consisting of a nucleotide sequence of an open reading frame of the genome sequence of an industrial yeast which encodes an amino acid sequence having 70 to 97% identity to an amino acid sequence encoded by the gene of Saccharomyces cerevisiae, or a nucleotide sequence complementary to the above nucleotide sequence, or a nucleotide sequence of continuous 10 or more nucleotides selected from the above nucleotide sequences;
(2) DNA consisting of a nucleotide sequence of the genome sequence of an industrial yeast other than from pen reading frames which consists of a nucleotide sequence having 60 to 94% identity to the nucleotide sequence of the gene of Saccharomyces cerevisiae, or a nucleotide sequence complementary to the above nucleotide sequences;
(3) DNA having a nucleotide sequence of any of SEQ ID NOs: 166490 to 167042, or DNA having a nucleotide sequence of any of SEQ ID NOs: 167043 to 173124; and
(4) DNA having a nucleotide sequence of any of SEQ ID NOs: 173125 to 174603, or DNA having a nucleotide sequence of any of SEQ ID NOs: 174604 to 190810; and
(b) selecting a gene wherein hybridization intensity thereof to the DNAs of any of (1) to (4) in the step (a-1) is significantly different from hybridization intensity thereof in the step (a-2).

28. A method for screening a gene of an industrial yeast, comprising
(a-1) hybridizing cDNA or cRNA prepared from the industrial yeast to a DNA array comprising one or more of DNAs, wherein each DNA is selected from at least one group of (1) to (4):
(1) DNA consisting of a nucleotide sequence of an open reading frame of the genome sequence of an industrial yeast which encodes an amino acid sequence having 70 to 97% identity to an amino acid sequence encoded by the gene of Saccharomyces cerevisiae, or a nucleotide sequence complementary to the above nucleotide sequence, or a nucleotide sequence of continuous 10 or more nucleotides selected from the above nucleotide sequences;
(2) DNA consisting of a nucleotide sequence of the genome sequence of an industrial yeast other than from open reading frames which consists of a nucleotide sequence having 60 to 94% identity to the nucleotide sequence of the gene of Saccharomyces cerevisiae, or a nucleotide sequence complementary to the above nucleotide sequence, or a nucleotide sequence of continuous 10 or more nucleotides selected from the above nucleotide sequences;
(3) DNA having a nucleotide sequence of any of SEQ ID NOs: 166490 to 167042, or DNA having a nucleotide sequence of any of SEQ ID NOs: 167043 to 173124; and
(4) DNA having a nucleotide sequence of any of SEQ ID NOs: 173125 to 174603, or DNA having a nucleotide sequence of any of SEQ ID NOs: 174604 to 190810;
(a-2) independently from the step of (a-1), hybridizing cDNA or cRNA prepared from another industrial yeast to a DNA array comprising one or more of DNAs, wherein each DNA is selected from at least one group of (1) to (4):
(1) DNA consisting of a nucleotide sequence of an open reading frame of the genome sequence of an industrial yeast which encodes an amino acid sequence having 70 to 97% identity to an amino acid sequence encoded by the gene of Saccharomyces cerevisiae, or a nucleotide sequence complementary to the above nucleotide sequence, or a nucleotide sequence of continuous 10 or more nucleotides selected from the above nucleotide sequences;
(2) DNA consisting of a nucleotide sequence of the genome sequence of an industrial yeast other than from open reading frames which consists of a nucleotide sequence having 60 to 94% identity to the nucleotide sequence of the gene of Saccharomyces cerevisiae, or a nucleotide sequence complementary to the above nucleotide sequence, or a nucleotide sequence of continuous 10 or more nucleotides selected from the above nucleotide sequences;
(3) DNA having a nucleotide sequence of any of SEQ ID NOs: 166490 to 167042, or DNA having a nucleotide sequence of any of SEQ ID NOs: 167043 to 173124; and
(4) DNA having a nucleotide sequence of any of SEQ ID NOs: 173125 to 174603, or DNA having a nucleotide sequence of any of SEQ ID NOs: 174604 to 190810;
wherein the industrial yeast of (a-2) has been cultured in a different condition from the culture condition for the industrial yeast of (a-1); and
(b) selecting a gene wherein hybridization intensity thereof to the DNAs of any of (1) to (4) in the step (a-1) is significantly different from hybridization intensity thereof in the step (a-2).

29. A gene obtained by the screening method of claim 26.

30. The gene according to claim 9, characterized in that concentration of sulfite in a culture medium of an industrial yeast increases when the gene is expressed in the yeast.

31. A nucleic acid encoding a polypeptide of any one of the following i) and ii):
i) a polypeptide having the amino acid sequence represented by SEQ ID NO:3, and
ii) a polypeptide having an amino acid sequence wherein one or more amino acid residue(s) is deleted, substituted and/or added to the amino acid sequence represented by SEQ ID NO:3, and having an activity to increase concentration of sulfite in a culture medium of an industrial yeast when the gene is expressed in the yeast.

32. The nucleic acid according to claim 31, which is selected from the following a) and b):
(a) a nucleic acid having the nucleotide sequence represented by SEQ ID NO:1; and
(b) a nucleic acid having a nucleotide sequence which hybridizes to the nucleotide sequence complementary to the nucleotide sequence represented by SEQ ID NO:1 under a stringent condition, and encodes a polypeptide having an activity to increase concentration of sulfite in a culture medium of an industrial yeast when the gene is expressed in the yeast.

33. A recombinant vector containing the gene of claim 9.

34. A transformant comprising the recombinant vector of claim 33.

35. The transformant according to claim 34, which is yeast of genus Saccharomyces.

36. A polypeptide of any one of the following i) and ii):
i) a polypeptide having the amino acid sequence represented by SEQ ID NO:3; and
ii) a polypaptide having an amino acid sequence wherein one or more amino acid residue(s) is deleted, substituted and/or added to the amino acid sequence represented by SEQ ID N:3, and having an activity to increase concentration of sulfite in a culture medium of an industrial yeast when the gene is expressed in the yeast.

37. The polypeptide according to claim 36, which is encoded by a nucleic acid selected from the following a) and b):
(a) a nucleic acid having the nucleotide sequence represented by SEQ ID NO:1; and
(b) a nucleic acid having a nucleotide sequence which hybridizes to the nucleotide sequence complementary to the nucleotide sequence represented by SEQ ID NO:1 under a stringent condition, and encodes a polypeptide having an activity to increase concentration of sulfite in a culture medium of an industrial yeast when the gene is expressed in the yeast.

38. A method for producing an alcohol or an alcoholic beverage, comprising culturing the transformant of claim 34.

39. A breeding method of yeast which is suitable for the production of an alcohol or an alcoholic beverage, characterized in that, expression of the gene of claim 9 is controlled.

40. The breeding method according to claim 39, wherein the yeast belongs to the genus Saccharomyces.

41. Yeast obtained by the breeding method of claim 39.

42. A method for producing an alcohol or an alcoholic beverage comprising culturing the yeast of claim 41.

43. An alcohol or an alcoholic beverage which is produced by the producing method of claim 42.

44. The gene according to claim 29 characterized in that concentration of sulfite in a culture medium of an industrial yeast increases when the gene is expressed in the yeast.

45. A recombinant vector containing the gene of claim 29.

46. A recombinant vector containing the nucleic acid of claim 21.

47. A breeding method of yeast which is suitable for the production of an alcohol or alcoholic beverage, characterized in that, expression of the gene of claim 29 is controlled.

48. A breeding method of yeast which is suitable for the production of an alcohol or an alcoholic beverage, characterized in that, expression of the nuclec acid of claim 31 is controlled.

The application's sequence listing, which the Patent Office published only in electronic form, follows.

SEQUENCE LISTING (197023 sequences)

SEQ ID NO: 1 - DNA, 1377 bp, Saccharomyces sp.
atggtcgctagttggatgctcactgccacaagggatttcaaccctttcatgtttgtcatggttatgggggtcggtatttcatcgaatattctgtacagcttcccgtatccggcgaggtggctgaggatatgctcgtacatcatgtttgccattacatgtttgattttcatctctgtacaggcgctgcagcttttgcacatggtcatctatatcaaagaaaaaagctttagagattacttcaatgaatatttcagaagtctgaagtacaatttattttggggtacttatcccatgggattagtaacaatcataaattttttgggggcgctgtcacaaaaatttaccacgacaagccctgcgaatgccaagcacttgatcatttttgtttacgtcctgtggtggtatgacctcgcggtttgtttagtaaccgcttgggggatttcattcctcatctggcaaaagtactacttcgtggacggggttggaaatcactcttcatacagttcacgaatggcttccgaccacatgaaaagcgtactgttgctagatatcattccgctggtcgttgtcgcttcgagcggtgggacatttacaatgtcaaaaatattcggtaccacttttgataggaatattcaattgctaacactggtcatctgtgccctggtttggctacacgctcttatatttgtctttattctgattacaatatacttctggaatctttacatcaataagataccaccaatgacgcaggtatttacgttgttcttggtattggggccattgggccaaggaagttttggtattttgttgcttactgacaatataagaaagtatgtagaaaaatactacccaagggaaaacatcaccatggaacaagaaatactaaccattatggttccgtggtgtttcaaggttctgggcatgacatttgctttggcattaatcgctatgggttacttctttacggtaatttcccttatttcgattttatcatactacaatgaaagagttgttgacaatgaaacaggcaaagtgaaaaggatctacactttccataaaggtttctgggggatgactttcccgatgggtaccatgtctttgggaaacgaggagctgtatctgcaatacaaccagtatgttcccttatatgcattcagagtcatagctaccatatatggtggtatttgtgtttgctggtcaatcttatgcctctcgtgcacgttgtatggttacctgaaaacgattctccatgctgcccgtaaaccttcgtttttatcagaggaagggacggagaagactgtcaattctcctttcaacagcatcgaaagtgtggaggaatcaaactcggctatcgatagtacatatttaacataa

SEQ ID NO: 2 - DNA, 609 bp, Saccharomyces sp.
atggctactaatatcacttggcatccaaatcttacctacgacgaacgtaaggaattaagaaagcaagacggctgtaccgtttggttgaccggtctaagtgcgtcaggaaaaagtacaatagcttgtgcactggaacaattactgcttcaaaaaaacttatctgcttataggttagatggtgataacattcgttttggtttgaataaggatttgggcttctcagaaaaggacagaaatgaaaacattcgtagaattagtgaagtatccaagctattcgctgattcgtgtgctgtatccatcacttcatttatttccccatacagagtcgatagagacagagcccgtgatttacataaggaagcaggcttgaagttcattgaaatttttgttgatgttccattagaagtcgctgagcaaagagaccctaagggtttgtataagaaagccagagaaggtgtgattaaagagttcactggtatttcagctccttacgaagctccaaaggccccagagttgcatttaagaactgaccaaaagactgttgaagaatgtgctgctatcatttatgagtacctggtcaatgagaagattatccggaagcatctataa

SEQ ID NO: 3 - protein, 458 aa, Saccharomyces sp.
MVASWMLTATRDFNPFMFVMVMGVGISSNILYSFPYPARWLRICSYIMFAITCLIFISVQALQLLHMVIYIKEKSFRDYFNEYFRSLKYNLFWGTYPMGLVTIINFLGALSQKFTTTSPANAKHLIIFVYVLWWYDLAVCLVTAWGISFLIWQKYYFVDGVGNHSSYSSRMASDHMKSVLLLDIIPLVVVASSGGTFTMSKIFGTTFDRNIQLLTLVICALVWLHALIFVFILITIYFWNLYINKIPPMTQVFTLFLVLGPLGQGSFGILLLTDNIRKYVEKYYPRENITMEQEILTIMVPWCFKVLGMTFALALIAMGYFFTVISLISILSYYNERVVDNETGKVKRIYTFHKGFWGMTFPMGTMSLGNEELYLQYNQYVPLYAFRVIATIYGGICVCWSILCLSCTLYGYLKTILHAARKPSFLSEEGTEKTVNSPFNSIESVEESNSAIDSTYLT

SEQ ID NO: 4 - protein, 202 aa, Saccharomyces sp.
MATNITWHPNLTYDERKELRKQDGCTVWLTGLSASGKSTIACALEQLLLQKNLSAYRLDGDNIRFGLNKDLGFSEKDRNENIRRISEVSKLFADSCAVSITSFISPYRVDRDRARDLHKEAGLKFIEIFVDVPLEVAEQRDPKGLYKKAREGVIKEFTGISAPYEAPKAPELHLRTDQKTVEECAAIIYEYLVNEKIIRKHL

SEQ ID NO: 5 - DNA, 15 bp, Artificial Sequence
  Description of Artificial Sequence: Synthetic oligo M13_for
agtcacgacgttgta

SEQ ID NO: 6 - DNA, 17 bp, Artificial Sequence
  Description of Artificial Sequence: Synthetic oligo M13_rv
caggaaacagctatgac

SEQ ID NO: 7 - DNA, 22 bp, Artificial Sequence
  Description of Artificial Sequence: Synthetic oligo SS-cosF.1
aggcgtatcacgaggccctttc

SEQ ID NO: 8 - DNA, 29 bp, Artificial Sequence
  Description of Artificial Sequence: Synthetic oligo SS-cosR.1
cttatcgatgataagcggtcaaacatgag

SEQ ID NO: 9 - DNA, 36 bp, Artificial Sequence
  Description of Artificial Sequence: Synthetic oligo XVI-1(L)cer-95894
cgcaagctccgtacgttcaacattcttatgaacggc

SEQ ID NO: 10 - DNA, 36 bp, Artificial Sequence
  Description of Artificial Sequence: Synthetic oligo XVI-1(R)nonSc-106302rv
gcatcatcgtcgtgatccttctttggcaaatgcagg

SEQ ID NO: 11 - DNA, 36 bp, Artificial Sequence
  Description of Artificial Sequence: Synthetic oligo XVI-2(L)cer-859737
gcgggtattttgatggtaaatctacaagccctcggc

SEQ ID NO: 12 - DNA, 35 bp, Artificial Sequence
  Description of Artificial Sequence: Synthetic oligo XVI-2(R)nonSc-864595rv
cccagacacagtttccagtatcatcctcgcagaac

SEQ ID NO: 13 - DNA, 26 bp, Artificial Sequence
  Description of Artificial Sequence: Synthetic oligo SacI-nonScSSU1_for1
gagctcatggtcgctagttggatgct

SEQ ID NO: 14 - DNA, 26 bp, Artificial Sequence
  Description of Artificial Sequence: Synthetic oligo BglII-nonScSSU1_rv1460
agatctcagcttcagcccaatccatt

SEQ ID NO: 15 - DNA, 26 bp, Artificial Sequence
  Description of Artificial Sequence: Synthetic oligo SacI-ScSSU1_for1
gagctcatggttgccaattgggtact

SEQ ID NO: 16 - DNA, 26 bp, Artificial Sequence
  Description of Artificial Sequence: Synthetic oligo BglII-ScSSU1_rv1406
agatctctcctacatgaaatgcttgc

SEQ ID NO: 17 - DNA, 120 bp, Artificial Sequence
  Description of Artificial Sequence: Synthetic oligo nonScSSU1_for
atggtcgctagttggatgctcactgccacaagggatttcaaccctttcatatcgaatattctgtacagctgtttgtcatggttatgggggtcggtatttcccttgacagtcttgacgtgc

SEQ ID NO: 18 - DNA, 120 bp, Artificial Sequence
  Description of Artificial Sequence: Synthetic oligo nonScSSU1_rv
tgttaaatatgtactatcgatagccgagtttgattcctccacactttcgaacagtcttctccgtcccttcctctgataaatgctgttgaaaggagaattgcgcacttaacttcgcatctg

SEQ ID NO: 19 - DNA, 120 bp, Artificial Sequence
  Description of Artificial Sequence: Synthetic oligo ScSSU1_for
atggttgccaattgggtacttgctcttacgaggcagtttgaccccttcatgtttatgatggtcatgggtgtcggcatttcatcgaatattctatatagctccttgacagtcttgacgtgc

SEQ ID NO: 20 - DNA, 120 bp, Artificial Sequence
  Description of Artificial Sequence: Synthetic oligo ScSSU1_rv
ttatgctaaacgcgtaaaatctagagccgagtttgattcttccacgctttcaatgctgttatacggagaaactgtcgtcttttccgtacctgactctgaacgcacttaacttcgcatctg

SEQ ID NO: 21 - DNA, 120 bp, Artificial Sequence
  Description of Artificial Sequence: Synthetic oligo nonScSSU1_for+pGAPAUR
atggtcgctagttggatgctcactgccacaagggatttcaaccctttcatgtttgtcatggttatgggggtcggtatttcatcgaatattctgtacagctccggagcttaccagttctca

SEQ ID NO: 22 - DNA, 120 bp, Artificial Sequence
  Description of Artificial Sequence: Synthetic oligo nonScSSU1_rv+AUR1-C
tgttaaatatgtactatcgatagccgagtttgattcctccacactttcgatgctgttgaaaggagaattgacagtcttctccgtcccttcctctgataaatcgactctagaggatccaga

SEQ ID NO: 23 - DNA, 20 bp, Artificial Sequence
  Description of Artificial Sequence: Synthetic oligo ScSSU1_for331
tcgaaagcgaacacgacgaa

SEQ ID NO: 24 - DNA, 21 bp, Artificial Sequence
  Description of Artificial Sequence: Synthetic oligo ScSSU1_982rv
cgacagaaatcacggtgaaaa

SEQ ID NO: 25 - DNA, 22 bp, Artificial Sequence
  Description of Artificial Sequence: Synthetic oligo nonScSSU1_329
tgtcacaaaaatttaccacgac

SEQ ID NO: 26 - DNA, 22 bp, Artificial Sequence
  Description of Artificial Sequence: Synthetic oligo nonScSSU1_981rv
aagggaaattaccgtaaagaag

SEQ ID NO: 27 - DNA, 21 bp, Artificial Sequence
  Description of Artificial Sequence: Synthetic oligo PDA1_for1
atgtttgtcgcacctgtatct

SEQ ID NO: 28 - DNA, 18 bp, Artificial Sequence
  Description of Artificial Sequence: Synthetic oligo PDA1_730rv
gattagaggcaccatcac

SEQ ID NO: 29 - DNA, 33 bp, Artificial Sequence
  Description of Artificial Sequence: Synthetic oligo SacI-nonSc-MET14_for-21
ctcgagctctcgtgaaattcattgaaacaaatg

SEQ ID NO: 30 - DNA, 30 bp, Artificial Sequence
  Description of Artificial Sequence: Synthetic oligo BamHI-nonSc-MET14_rv618
ggatccttataagatttatagatgcttccg

SEQ ID NO: 31 - DNA, 33 bp, Artificial Sequence
  Description of Artificial Sequence: Synthetic oligo SacI-ScMET14_for
ctcgagctcagaaaagttggaattatttctcca

SEQ ID NO: 32 - DNA, 30 bp, Artificial Sequence
  Description of Artificial Sequence: Synthetic oligo BamHI-ScMET14_rv
ggatccaatgtacagtaatcggtcaaatta

SEQ ID NO: 33 - DNA, 1254 bp, Saccharomyces pastorianus
atgagagcattggcatacttcggtaagggtgacatcaggttcaccaaccatctggaagagccccggatcgtggctcccgacgagcttgttctcgatatcgcatggtgcggtatttgcggtacggacctgcatgagtacacagacggtcccatcttcttcccagaggacgggcacacgaacgagatcagccacaacccattgcctcaggcaatgggccacgagatggcaggcactgttttaaaagtgggtcccggcgtgacgcagttcaaggtgggcgacaaggtggtcgttgagcccacgggtacgtgcagggaccgctaccgttggcccgactcaccaaacgtggacaaggagtggtgtgccgcgtgcaaaaggggcctctacaacatctgctcgtacttgggcctttgtggtgccggcgtgcagagtggtgggttcgcagagcgggtggtgataaacgagtcgcattgctacaaggtgcctgagttcgtgccattggacgttgctgctttgatccagccgttggccgtgtgctggcatgcgatcagcgtctgcgacttcaaagccgggtccactgctctgatcattggtgccggcccaatcggcctgggtaccattctagcactcaatgcggccggttgcagtgacattgccgtctcagagcctgctaaggtaagaagagagttggctgagaagatgggagctagggtgttcgacccgactgcgcacgccgctaaggacagtatcgaatatttgcggtcggtcgctcctggcggcgacggatacgactacactttcgactgctccgggctggaagttacgttgaatgcttccattcaatgtctgacgtttagaggcaccgccgtgaatctggccatgtggggccaccacaagatacagttctctccaatggacatcacgctgcatgagagaaagtacacggggtccatgtgctacactcaccatgacttcgaggcggtgatccaggctatggaagagcgcaggattgatgttgccaaggccagacacatgatcactggtagagtcagtctcgaagacggtcttaacggtgccatcatgaagctgataaacgaaaagcagtccaccatcaagattattctgactccgaacaatcacggcgaattggaaagagaaccggataacgaaaaggaagatatttccgaactcagcaactgcaaggaccaagaaagactcaaagagtccatgaacgaggccaagctgcgtcacacatga

SEQ ID NO: 34 - DNA, 1149 bp, Saccharomyces pastorianus
atgagagctttggcatattttaagaagggtgatattcatttcaccaatgatattcccaagccggaaatccaggccgacgatgaagtcatcctcgatgtctcctggtgtgggatttgcggttcggacttacacgaatacacggatgggccaatctttatgccgaaagatggggaatgccatcccctgtccagcgctgctttaccactggcaatgggacacgaaatgtccggtattatttcgaaagtggggcctaaagtgacaaaggtcaaagtgggcgaccatgtggtcgtcgaagccggtagttgttgtgccgatttgcattgctggccgcattcgaaacattacaattccaagccttgcgatgcctgcaagaagggctgtgagaacctttgtacacatgcaggtttcattgggctaggtgtgatcagtggtgggtttgctgaacaagtcgttgtcactgagcaccatatcatcccggtccccaaggaaatcccgttggatgtggctgccttagtggaacctttgtctgttacctggcacgcagtcaagctgtcaggcttccaaaaaggtagttcagcttcggttcttggtgcgggccctattgggttgtgtaccatcttggtactaaagggaatgggcgccggccagatagtggtctctgaagttgcagaaagaaggatggaaatggccagacgcctaggtgtcgagatttttgaccctaggaagcacggcgagaaatccgtggaagcactacgtggtttgaccaagagccacgacgggtttgattacagttatgactgttctggtattcaagctactttcgatgcctccttaaaagcattaacgtttaagggaactgccactaacattgcagtttggggcccaaatcctgtaccattccagccaatgaacgtcactcttcaagagaagataatcaccggttcgattggctatgtcgtcgatgattttgaagaggtcgtccaggcgattcacaacggtgacatcaccattgaagactgtaaccatttgattacaggtaagcagaaaatcgaagatggttgggaaaagggatttgaggaactaatgaaccataaggagtccaacgtcaagattctgttgactcccaacaatcacggtgaaatgaagtaa

SEQ ID NO: 35 - DNA, 537 bp, Saccharomyces pastorianus
atgacaccaggatcgagtagaaggctgagcaaatcaaaaacagtgggtgtagtgggtgcaacggtagcaattctagccacatcctattacctataccaaaaattaacaagcgtaaacgacactaacgatgccctgcctcgagaaagtgactcttcggccaaagacaaaacaacaaggaaaagcaaatgtattataatgagtaagtctgtccaagggctgtctatcgactggagcgaatacgttgctgacgaagtggttcttttggtccctacgagtcatactaacgaatcattcaaccgggtcatcaaggatgcgttctataactctgggaatgaacacaaggttatatactgcgatagtatggacggactatggtcttgtgtaagaaggttgcgcaagttccaatgcatactgaactctaaggactttgcgggtgatggtggcgctacgatcgttcctgaagatgtgcagagatttgtcaggttcgtcattgacagtgatgaggaagatgtgctagttgatacgatatgtagttga

SEQ ID NO: 36 - DNA, 2142 bp, Saccharomyces pastorianus
atgtctccctctgcagtacaatcttcgaaagcccaagagcagtcgagcaaaattgacgacttgaaagcacaaatgtccaagtccgccgccaccccagaacagaaaaagaaccacgaatacgaacatctgacatccgtcaagatcgtgccccagcggcccgtttctgataggttgcaacccgagattgcggaccattattctccgcacttgaatgggctgcaagattaccagcgcctgtacaagcagtccattgaagatccgggcaagttcttcggctccaaagccacccagtttttgaactggtccaagcccttcgacagggtgttcatcccggatccagaaactggcaggccctctttccagaacaatgcctggtttttgaacggccaattgaacgcgtgctataactgtgttgacaggcacgcgttcaagacgcccaacaagagggccatcatcttcgaggccgacgagccgggccagggctactccattacctacaagcagctgctcgaggaggtgtgccaagtggcgcaggttctatactactccatgggagtccgcaagggcgacaccgtcgcagtgtacatgcccatggtccccgaggctatcatcaccttgctggccatctcccgtatcggcgccattcattccgtggtctttgctgggttttcctccaactctttgagggaccgcatcaacgatggggactccaaagtcgtcatcaccactgatgagtctaacagaggcggcaaaatcatcgaaaccaagaggattgtcgacgacgcgctgagggaagcccctggtgtgagacacgtcttggtttataaaaagaccaataacccatctgttgccttccaggcccccagagatttggactgggccactgagaagaagaagtacaagacctactatccctgcactcccgtcgattctgaggaccctctattcttgctatatacttctggttccacaggcgcccccaagggtgttcagcactccaccgcaggctacttgctgggcgctctattgaccatgcgttacacttttgacacccaccaagaagatattttcttcactgcgggggacattggctggatcacaggccacacttacgtggtttacggtcccttgttgtacggctgtgccactttggtctttgaaggtactccggcctatcctgactattcccgttactgggatgttattgataaacataaagtcacccagttttacgtagcacctactgctttgcgtttgttgaaaagagccggcgactcgttcattgaaaaccattctttgaagtctttgcgctgtttaggctctgtcggagaaccgattgccgctgaagtttgggaatggtactctgaaaaaattggtaagaatgaaatccccattgtcgacacctactggcaaaccgaatctggctcgcatttggtcaccccactggctggcggtgtaacaccaatgaaacctggttctgcctcgttccccttcttcggtatcgatgcggttgtccttgatccaaccacaggtgaagaagtcaaatcctcccacgcagaaggtgtccttgccgtcaaatctgcatggccatcgtttgcaagaaccatttggaagaaccatgatagatatttagacacttatttgaatccttatcccggttattacttcacaggcgatggtgccgcaaaggacaaggatggttatatctggattttgggccgtgttgatgatgtggtaaatgtatccggacatcgtctatcaaccgctgagatagaagccgccatcatcgaggacccaatcgtggcggaatgtgctgtggtgggattcaatgatgacttgaccggtcaggcggtagccgcatttgtggtcttaaagaataaatctagttggtccacagcaacagaaagtgagctacaagatatcaaaaaacacttggttttcactgtcagaaaggacatcggtccatttgccgcccccaaactaatcatcttggtagacgatttacccaaaacaagatctggtaagattatgagacgtatcttgagaaaaattctagcaggagaaagcgatcaattaggcgacgtttctactttagccaaccctggcattgttagacatttgattgactcagtcaaactgtaa

SEQ ID NO: 37 - DNA, 2361 bp, Saccharomyces pastorianus
atgatccttctgaacacctttgtgaggtgccttttgacgtgtctcatgctctgcagtggcagagcacactccgctgattctgacacgaacgacacgacgccagcgtccgcaaagcatcttcagacaacttctttgctaacgtgcatggataactcgcaattaacagcttctttttttgatgtgaagttttaccctggaaacaacaccatcatctttgatatcgacgctaccacgacactgaacgggaacgtcactgtgaaggcggagctgcttgcctacgggctcaagatcctggacagaacttttgacttgtgttccctgaatgaagtgtcgctgtgccccctaagtgctgggcgtatcgatatcatgtccacgtatgtgatcgatgcctctattaccaagcagtttcccggcattgcgtacacgattccagatctggacgcccaggtccgtgtggtagcgtactcacaaaacgataccagtttcgaaacccctctcgcttgcgtgcaggccattctgagcaacgggaaaacagtgcagaccaagtatgcatcatggcccatcgctgccatctcaggtgttggtgtactcacttccgggttcgtgtctgtgatcggttactcctccaccgccacccatattgcctccaactcgatctcgctgttcatctactttcagaacttagccatcactgccatgatgggtgtttccagggtcccgcccatcgctgccgcatggacgcagaattttcaatggtcgatgggtatcatcaatgccggctttatgcagaagattttccactggtacgtgcaagccactaacggtgtttccaacgtcgtggtggccaacaaggacgtgttgtctatcagcgtgcagaaaaaacgtggtatctccgttgcctcgtctagcgattacaatttcgactccattctggatgactcgaatctgtacactacttccgaaaaggatccaagtgactactcgaccaagatcctcgtgctaagaggtattgaaagagtcgcatatttggcaaacatcgaactgtccaattttttcttgacagggattgttttcttcctgttctttgtcttcgttgttattgtttctttgattttcttcaaagccttactagaagtcctgacaagagccgggattttgaaagagacttccaatttcttccagtaccggaaaaactgggggagcattatcaagggtactcttttcagactgtcaatcatcgcgttccctcaagtctcgctattgaccatttgggaattcacccaagtagactccccggcagtagtcgtcgacgcggtcgtgatcctgttggtcatcactgggctgttagtttacggaaccacaagagttttaattaaggggagggagtcgctcagactatacaagaaccccgcatatttgctttacagtgatacctacttcttaaacaaatttgggttcttgtacgtgcaattcaaagcagacagattttggtggcttttacccctactgagttatgcctttttaagatcgctttttgttgctgttttacaaaaccaaggtaaggcccaggccatgattatttttatcattgaattggtgtatttcgtttgcctgtgctggattaggccatatttggacaagagaaccaacattttcaatattgctatccacttggtcaatatgatcaacgcgtttttctttttattcttcagtaatttgttcaaacagccagcagtggtctcctcggtgatggcggtgattttgtttgttttgaatgcagtgttcgctttgttcttactactattcaccattgtcacctgtactttggcattgcttcacagaaatccggatgttcgttaccaaccaatgaaagacgaccgtgtgtccttcatccccaagattcaaaatgatttcgacgacgaaaacaaaaacgatgccgagctattcgaaatgaggaaggccgtcatggacaccaatgagaatgagcaggaaaaattgttccgtgacgataccttcggcaagaatctcaatacaaccacgaatacgactaggctattcgacgacgaaacgagttcgtcctctttcaaacagacctcgtctccctttgacagctcggatgtaacggagcaacctgtacaacctacatctgccgttatgggcacaggtggtaactttctgtctccacaataccaacgcgcctcatctgtgtcccgcaccaacttggtaccaaataatttgagcacatccagcttgaaaaaacccgaatcaagtctttacgtcgggacttccaatcaatcatattcgcattttaacaataacaacaacaataccaacggccgtaatactaacccatacttgtaa

SEQ ID NO: 38 - DNA, 1977 bp, Saccharomyces pastorianus
atgactaaagaaacaattcgagtggtgatatgcggtgacgaaggcgttggtaaatcaagtctaattgtttccttaacgaaagctgaattcatacccattatacaagacgttttaccaccaattactatcccaagagacttttcgtcatcaccttcatattccccaaagaatacagtacttatagacactacagattcggacctcatggttttggaccatgaattgaaatctgccgatgtcatttggcttgtttattgcgatcacgaatcatacgagcatgtttcccttttttggttacctcatttcagatctttgggactaaatatcccagtcatcctttgcaaaaacaagtgtgactctatatcgagtgccaatgcgaatgcaatgatggcatcagcggatattgatactaaggtagaggacgaagagtttattccaattttaatggaatttaaggaaatcgacacctgtatcaaaacaagcgccaagactcaatttgatctcaatcaagcgttctacctttgtcaaagggctataactcacccaatttctcctctgtttgatgcgatggtgggagaattgaagccattggccgtcatggctttgaaaagaattttccttttgagtgatttgaaccaagactcatatttggatgataacgaggtattaggcctacaaaaaaaatgctttaacaagagtatcgatgtaaatgagctgaacttcattaaggatttgctactcgatatttctaaagataatcaagagtacgctaatcgaaagctatacgtaccaggaaaaggtatcaccaaggatggatttcttgtactaaacaaaatatatgccgaaagaggaagacatgagactacgtgggccatattaaggacctttcattatacagattccctttgtattaatgataaaattcttcatccgagattgtttgtgcctgaaacttctagtgtggagttgagccccaaaggttacagatttcttgtggatattttcttgaaatttgatgccgataatgatggtggtttgaataatcaagaattgcaccatatcttcaagtgtacaccgggattaccaaaatcatggaccttgacaaacttccccttttctacggtagtaaacaacaagagctgcattactttacaaggttggctagcacaatggagtatgacgacgttcctgaactataacacgactacagaatacttagtatattttggctttcaggaagatgcaaagctggctgtacaagtaaccaagcaaagaaaaatgaggcgtcgttccgggaagctgtatagatcgagtgttaacgacaggaaagtctttaactgctttgtcatcgggaagccatgctgtgggaaaagttctttattggaggcttttttgggcagatcgttctcagagttgtattctccaacgatcaagccaaggattgctgtcaacagtttggaactaaaaggtggcaaacagtactatctaattttgcaagaattgggcgaacaagaatacgccatactagagaataaagaaaaattaaaggagtgtgatgtgatctgtctaacgtacgattcgagcgatccggagtcgttctcctatttggtttcgctcctggacaaattcacccacctacaagatctaccattggtatttgtggcctccaaggcagacctagataaacagcaacaaagatgccacatgcaacccgatgaactagcagatgagcttttcgtgaaccacccattgcacatatcatcgaggtggttaagttcactaaatgagctgttcatcagaatcacggaagctgcactggatcctggtaaaaacaccccagggttgccagaagaagccacgacaaaggacgcagactacagacaaacagctctcatcttagggtctaccgtcggttttgtggctctctgctctttcacgctgatgaaactcttcaagccctcgagctttcacaaataa

SEQ ID NO: 39 - DNA, 1248 bp, Saccharomyces pastorianus
atgaagaggtccacgttgctgtcgctggacgcattcgctaagaccgaagaggacgtgcgggtccgcaccaaggccggcgggctgatcacgctgtcatgtatcctgaccacgctattcctgctagtgaacgaatggagacaattcaactctgtagtaactcggccgcagctggtggtagaccgtgatcgtcacgcgaagctggagctgaacgtggacgtgacgttcccgtcgatgccatgcgacctggtgaacctcgacatcatggacgactctggggagctgcaactggacatacttgatgccggattcacgatgaccaggctggaccgtgagggcaattccgtgggtgacgctgctgaactgcatgttggtgggaatggcgaagctgtcacgccggccaacgacgaccccaactactgtgggccctgctacggttccaaggaccagacacaaaacgacaatttggctcaggcagacaaggtgtgctgtcaagactgtgacgcggtgaggtccgcgtatctggagtcaggatgggcgttttttgacgggaagaacatcgagcaatgtgaaagagagggctacgtgaacaggattaacgagcacctacacgagggttgccggatcgaggggtctgcgcagatcaaccgaattcaggggaacatccactttgctcctggcaagccataccagaacatccaaggccacttccacgatacttcgctgtacgacaagacatccgacctgaacttcaaccacatcgtcaatcacctgagcttcggcaagccaatccagtcgcaccacaaactgctggccaacgccaagcgccacggcgacgccgtggcctccacggcccccttggacgggcgccaggtgtttccggacattgccacgcactttcaccagttctcgtactttgccaagatcgtccccaccaggtacgagtacctagacagtgaggtcatcgagaccgctcagttcagtgccacgtaccactcgcgacccctcattggtgggagggataaggaccaccccaacacgatccacaccaggggcggcatcccgggtctgttcgtgttcttcgagatgtctccgcttaaggtcatcaacaaggaacaacacggccagagctggtccggcttcatcctgaactgtatcaccagcattggcggtgtcctggctgtgggcaccgtcatggacaagctgctctacaaggcgcagagatcgatttggggcaagaagagccagtag

SEQ ID NO: 40 - DNA, 1740 bp, Saccharomyces pastorianus
atggccatattgaaagacaccatagttagatacgctaacgcgagctatgcacccgctgctgctgctgctgctgccacgaccacgaccacgaccacagcatatccaaacctgtccctgctcttgcaaaagagacggtctattgccaacgccaagtcgaaaaactccaacctcgtgaaaagagaactgcaatcgcaccattcggccatcagcgagtacaacaatgaccaattgaaccattacttccaactttcgcaaacggaaaaaccgctgtacagcctgaccaacttcacgtctcagccgcaggtcaacccgaaaatgcggttcctgatcttcgacttcatcatgtactgccacacaccactcaatctctcgacgtccactctgttcctcacgttcaccatcctggacaagtactcctcgcgcttcatcatcaagagctacaattaccagctcctgtcgcttaccgcgctgtggatctcatccaagttctgggactccaagaacagaatggccacgttgaaagtcctgcagaacttgtgttgcaaccaatattccataaaacagttcacctccatggaaatgcatctcttcaaatccctcgactggtccatctgccagtccgctacattcgactcgttcatcgatatattcctgttccagtccacgtccccattgctgtctacccccacgctctctgcccccttggaagctttcattcaacagaaactggccttattaaacgatgctgctggtactgctattaataaatcctcgcctcagggccccgcttttaacatcaatgaaataaaactgggcgccatcatgttgtgcgaattggcttccttcaacctcgaactatcatttaagtatgatcgttccttaattgcgctgggtgcaattaacctcatcaagttgtctttaaactactacaattcaaacgtttgggagaatttcgatttggccccggagggacccgcccaggatctcgacatcagcttatccgagatttcaaacttgctattggacatcgccatggaccaagattccttcccctccagcttcaaatcgaaatacctaaaccataataaggcctccccggcaaaatccctcttggacgcattacagaactattgcgttcagttgaaattggaggaattctaccgttcccaagaactggaaaccatgtacagtaacatctttgcccaatccttcgaggacgacccattagcttgcgtctatccgaataccaccaccccaaagagcgccactgcttcttcctccgccgccacagattatttctcagatcatactcatataagaagattaactaaagagaacatctctacgccctttgcattcaccccaacatcatcttcgtcctccccatccccattcacttctccttacaagacttcaagctctatgacaaccccggattctgcatatcatcacgcccattcgaattcgttctcgtccactcaatattctttcaaaagatcgttgagtattccacaaaactcaaacatcttttggccaagcccactaacccccaccacaccgtctcttatgtcaaacagaaagttgctacaaaatttaccgatgcgctcaaaaagattaatgcccatcagacccatagtcagtgcacactcatacgctgcccctacacacttaaagaaaagatcaacttcatccacggattgtgatttcaatgatggtagtaacctcaagaaaactcgctga

SEQ ID NO: 41 - DNA, 1503 bp, Saccharomyces pastorianus
atgtctagattagaaagattgacttcattgaacgttgttgctggttccgacttgagaagaacctccatcattggtaccatcggtccaaagaccaacaacccagaaactttggttgctttgagaaaggctggtttgaacattgttcgtatgaacttctctcacggttcttacgaataccacaagtctgttgttgacaacgccagaaagtccgaagaattgtacccaggtagaccattggctattgctttggacaccaagggtccagaaatcagaactggtaccaccaccaacgatgtcgactacccaatcccaccaaaccacgaaatgatcttctctaccgatgacaagtacgctaaggcttgtgatgacaaggtcatgttcgttgactacaagaacatcaccaaggttatctccgctggtaaaatcatctacgttgatgatggtgttttgtctttcgaagttttggaagtcgttgactctaagactttgaaggtcaaggcaatgaacgccggtaagatctgttcccacaagggtgttaacttgccaggtaccgatgtcgatttgccagctttgtccgaaaaggacaaggaagatttgagattcggtgtcagaaacggtgtccacatggtcttcgcttctttcatcagaaccgccaacgatgttttgaccatcagagaagttttgggtgaagaaggtaaggacgtcaagatcattgtcaagattgaaaaccaacaaggtgttaacaacttcgacgaaatcttgaaggtcactgacggtgttatggttgccagaggtgacttaggtatcgaaatcccagccccagaagtcttggccgttcaaaagaaattgatcgctaagtctaacttggccggtaagccagttatctgtgctacccaaatgttggaatccatgacctacaacccaagaccaaccagagctgaagtctccgatgttggtaacgctatcttggatggtgctgactgtgttatgttatctggtgaaaccgccaagggtaactacccaatcaacgccgttaccaccatggctgaaaccgctgtcattgccgaacaagctattgcttacttgccaaactacgatgacatgagaaactgtactccaaagccaacctctaccaccgaaaccgtcgctgcctctgctgtcgccgctgttttcgaacaaaaggccaaggctatcattgtcttgtccacttccggtaacaccccaagattggtttccaagtacagaccaaactgtccaatcatcttggtcaccagatgcccaagagccgccagattctctcacttgtacagaggtgtcttcccattcgttttcgaaaaggaagctgtctctgactggactgaagatgttgaagcccgtatcaacttcggtattcaaaaggctaaggaattcggtatcttgaaggacaacgacacttacgtctccatccaaggtttcaaggccggtgctggtcactccaacactttgcaagtctctactgtttaa

SEQ ID NO: 42 - DNA, 801 bp, Saccharomyces pastorianus
atgactgtggaggaggaaagcccagagacggatgatttgcgattgcagcagctggacaataatatttttttcgggtcctgtgaagtactagcacagcctattcttttacagtacgagaatatcaaatttattataggtgttaacctaactactgagaagatagcatcgttttatactgtgtatttccagcattcaaattcactaattgtaaattttgattcgtcgtcaacccaagaaacgatagagacgccagtggaattgtataatcgaaataatacgattctattacagaaattcgtcagtcagtacttacaaatgggaaaaacaaacaccccgttatccttaacatggtttggcaaaatccagtcactaccgcaattttgtaattcaaacgttctcaccggcgaaccgttggtgcaataccaggcgttcaatgatctattgacactttttaaatcttttaaacatctcggtaacatcttggtggtatcatcacactcacatgatcctacactcatcaaatttctcgtatctagagtaattgcttgtcacccatcagtgactattcaggagtctttacagtacacgagagcaatcctgaacttacccattaatgcatgcgatgaatttgatattctaaacgacaaaggactacaagagctcgcgcaagccccagaattacaacaacaaaggtcaaagtgttcctctaagagaaggtgtggcaacctacccgagaattacttcgtcgataacaagagtcttacgggccccagcgagcatattaaacgaggtcatttctaa

SEQ ID NO: 43 - DNA, 1110 bp, Saccharomyces pastorianus
atgtctaccactgttgaaaaaattaaagctgtcgaggatgaaatggcccgtacccaaaagaataaggccacatccttccatctgggtcagttgaaggccaaactggccaagctgagaagagaactactaaccagtgcctcctctggtagcggtggtggtgctggtgtggggtttgatgtggccagaactggggtggctagtgtggggtttgtcgggttcccgtcggtgggtaaatccacactattgtccaagttgactggtacggagtctgaagttgccgagtatgagtttaccacgttggtcaccgtgccaggtgttatccgttacaaaggtgccaagatccaaatgctagatttgcctggtatcatcgacggtgctaaagatggtagaggtagaggtaagcaagtcattgccgtggccagaacttgtaacctgttatttatcattctggatgttaacaagcctttgctccataagcaaatcattgagaaagaactggaaggtgtggggatccgtttgaacaagtctccacctgacattttgatcaagaagaaagaaaagggtggtatttctatcacgaacacagttcctttgacccacttggggaccgacgaaatcagagccgtgatgggtgaatacagaataaatagtgcagagattgccatcagatgtgatgcgactgtggatgacttgattgatgtcctggaggcctcgtccagaaggtacatgcctgcagtttatgctttgaacaagatcgattccctatcgttagaagaactggagttgctatacagaatccccaacgcggtccccatctcgtccggtcaagattggaatttggatgagttgttgcaagtcatgtgggataggttgaacctagtccgtatttacactaaaccaaagggccaaatacctgattttaccgatccggtggtcttaagatcggaccactgtagtgtcaaagatttctgtaaccaaatccataaatccttggtggacgatttcagaaatgctttggttttcggtagcagtgtcaagcaccaacctcagtatgtggggttgaaccatgttttggaagacgaagatgtcgttactatcttgaagaaatga

SEQ ID NO: 44 - DNA, 2958 bp, Saccharomyces pastorianus
atggcgaagaagagcaagaaggaccaaaagaactactgggacgaggatttcgaagaggacgctccccagggcgaagaaatcggcgccacaccaaccccagaaccggaaagtagtatggaagtagaagacacttccaaagaggctactgaagccactgaagaggacttcatgtctgctttgaagcagtccaagaagaagcaagaaaagaaggtcaccgaagacaagaaagacggtaagcctgtgctgaaatccaagaaggaaaaggagaaggaaaagaaggaaatggagaagcagaagaagaaagagcaagctgccaagaagaaggcccaacagcaggcccagaaggaaaagaataaggagttgaacaagcaaaatgtcgaaaaggctgctgctgaaaaggcccaaaagtctcagaatggcgacaatgacaagccaagcactagcaccaagaagcccgccaagaaagtgcctgctggtttggctgctttgagacgtcaattggagttaaagaaacagattgaagaacaggaaaagttcgaaagagaggaagaagaaagattggaaaaagaagaagaagaaaggttggccaacgaagaaaaattgcttgaagaatccagatctgccaagaaggagaaggagagggccaagcgtgagaaattaaaggctgaaggtaagctgttgaccagaaagcaaaaggaggaaaagaaattgttggaaagaagacgtgctgcacttttgtcttctagtaacgttaaagttgctggtttgtctaagaaggaaggcgaagaaagtaaaccaaagaaggtcgtctacaacaagaagaagaagagaacaacccaagaagcaacctcagaagccgtcaagtctgattccaagaaggatgccgaagtcatacccgatgacatcaaagaatctgaggatgtcttgattgacgattgggagaatctggatttcggtgaagacgatgaagaggaaaccaacgaggaaacgtctaccgcccaagaatctactacaaatccagaagatcatgaagatgaagatgaaaaccacgaaggtaatgaagaagaagaagaatctagtcaagtggaggaaattgtcagaagcactcctgccagtacaccaaccccatccagttcttccccaaacaagaaagatctacgttctccaatttgttgtatcttgggtcatgttgataccggtaagactaaattgttagataaggttagacaaaccaacgttcaaggtggtgaagctggtggtattacccaacaaattggtgccacctatttcccaattgatgccatcaagtccaagacaaaggtcatgactcattacgaaaagcaaactttcgatgttccaggtcttttggtcattgataccccaggtcacgaatctttctccaatttacgttcgagaggttcctcattgtgtaacattgccattttggttattgatattatgcatggtttggaacaacaaaccatcgagtctatcaaactattaagagatagaaaggctccatttattgttgccttgaataagatcgatagattatacgactggaaacctattccaaacgaatcattcagagcctcctttgcaaagcaagcgagagccgttcaagaagagttccaatctagatattccaaaattcaattagaactatccgagcaaggtttaaattcagaactgtatttccaaaacaaaaacatggctaaatacgtctctattgttccaacatctgccgtcaccggtgaaggtgttccagatttattgtggttactattggaattaacccaaaagagaatgtctaagcaattgatgtacttgtctcatgtggaagccactgttttggaagttaaagttgtggaaggtttcggtaccaccattgatgtcatcttgtctaacggttacttaagagaaggtgatcgtatcgtattatgtggtatgaacggcccaattgtaacgaatatcagagccctactaacaccgcaaccattgcgtgaattacgtttgaagtccgaatatgttcatcacaaggaagtcaaagctgctttaggtgtcaagattgctgctaacgatctagagaaagccgtttctggttctagattattggttgtcggtccagaagatgacgaagatgaactaatggacgatgttatggatgatttaaccgggttgctggattccgttgacactgccggtagaggtgttgttgtgcaagcttccaccttgggttctttggaagccttattggatttcttgaaggatatgaagatccctgtgatgtctatcgggttaggtccagtctacaagcgtgatgttatgaaggcttctacaatgttagaaaaggcaccagaatatgccgtaatgttgtgtttcgatgtcaaagtggataaggaagctgaacaatatgccgaacaagaaggtattagaatctttaatgccgacattatctatcacttattcgattcatttactgcataccaagagaaactattggaagaacgtcgtaaagatttcttagattatgctattttcccatgtgtcttacaaactttacaaatcatcaacaagcgtggtccaatgatcgtgggtgtagatgttttggaaggtactctacgtgtggggactccaatatgtactgttaaaattgatccaatcaccaaggaaaagcaaactttactgttgggtagagtcatttctttggaaatcaaccatcaacctgttccagaagtcaagaagggccaaactgccgccggtgttgctgtccgtctggaagatccttctggccaacaacctatctggggtcgtcatgttgacgaatctgatacattatattccatgatttcaagaagatctctggatactttgaaggacaaagcatttagagaccaagttgctagatctgattggctactgttgaagaagttgaaggtcgtttttggtatcgaatga

SEQ ID NO: 45 - DNA, 867 bp, Saccharomyces pastorianus
atgtcggcaccgacaatgagatcgacgtcaatactgacggagcatttggggtacccacctatctcgctcgttgatgatatcatcaatgctgtgaatgaaattatgtataagtgcacagctgccatggaaaagtatttgttatccaagagtcggattggtgaagaggattatggggaagagatcaaaaacggagtggccaagttggagtcgctattggagaattctgtggataaaaattttgacaaactagaactatatgttttgagaaacgttctccgaattcctgaagaatttttagatgccaatgttttcagactagagaaccaaaaggatctggttattgtggatgataacgagataaaaaggagcgaggaggaactcagagagaaagtgaatgacgttgaattggcattcaaaaaaaatgaaatgttaatgaaaagggttgccaaagtgaaaaaactactcgttagcataagaggtttcaagcagaaactgagtgacttgttgaagtgcaaggatgacgagcagttgcaaaagattttggagtcgttaaaacctatagacgacacaatgacattactgagtagttcattacgaaaattatacgtggatagtgaaagcaccagttcaacagaggaagtggaggcactattacaaaaactgaaggccaatgggaaacacagcaaggattatagaacgcgatatatagacataaggactaacaatatcttacggaggttggggttactaggcgatggcgagacagaaggccagtccgctgaatctagtataggggtgcaagggaaggaagctgtcaaactagatatcgaagaacctcgattggatttactcgatgatgtattataa

SEQ ID NO: 46 - DNA, 2283 bp, Saccharomyces pastorianus
atggtggacgtgcaaaggaggaaaaaaatgcttgccaaggctgctgccggagcgtctattccggcaatcaagggttctgttccgttggactcatttgatatcaaggtgattcagtacaagaacgctctttataagctgaatgagctgagccggctgttgaacgtgctggtgccgcacttgaagaggaagggggacagcgactcgtacacgatcatcccccttgtcaatttcatcttatcgctttgtgagggccctatatttagcgtgaaccccgtattggccaaaagatatcacttactttgccggttccaatcggtgaagctgactgaagtgcagcagaagttatcgacaactttcgtcgacatcgatggttggatgtttcccgaggagatgcctctagagcactataaatcgtgcatttataataacccgttgcagtggaaggttttgaattctctttcctgcattgcgcaaaatgccatcaagatatacgatgcaaaactgagtcaaattctgctggagagagacgcttacaaggcgcgttcgctgccattagacacttcggccattgaggatttgttaaacccgttggaaatgtcactgatactggatcttgccgttttgatcaacgacccgataaaagacaagtcaacctactccttttacaagttgcagtggcaggtcatggacaagttcaattcatgtattcattctaaaatttttcccgttctgagaacatattataaccaattgcagaaattctcggagacaaggccggtttccctattaaacttacaaaacaatctgccacattgggagtggaccttacacaggatgtacaccttccacttgcgtgttttgtctgtgctatgtgtcatcatcagtctttccagacaaattttcctgccgaacaagcagcattttctggatgtcaagacaagattgtccagtcaaaacgcgtacctatatgatatggtgatcaatgagctgatggcgttattgtccccgcaaagtgacgagctttcgactttgggggaactgcaagaagatctaaagatttggactcaaacgactcgtgcggataataatttattgagaacgcctattttccatctccaacccggtttaatcatcgaattgtttaataatcacatcagcaaaattataccgaaattgagatctatcatgacactgctatccaattggatggattgctggaaatacattgagaaaaacttcaaagcttttgacaacgcagatgtcgatttacaagatttattgaacgaaaagctggcgaaagataaaacggcatacatagaacttaggaacacgaaaagcaagctaaagaaaaagccatcaatttcaaaattgtcagcttcctcttctccatctccttcccccatgtcttcggcaagcccatcaagacaaccctctttagaggccgtgagaacaaaagcaagggcgcatgttacctcagcttcatcaagatctccctcactgtcgcccacaagaacaaatagtaacagcaagactgcagaaatgaagaaaagcgtggtgtccccggagagaaggaagataattaacgggagaaggccaagatcttcatctttacaatcgtatacaaacaaacaacaaacaacatatttgagctctactaggcatccgccaataatgccacattcaaaactcaataaccagaggtctaattccttacaagcttccactatgaccctaaaccaaaagatagtgcaagacacagtgcgacacttgatgaacaaaacttcctctacgccttcctcgtccgtatcctcctcgtcggcgccctcaccaaaggtatcgagtataagtaactctccctcagtgaaatcatcgagcgctctgacagcgaatggcggtgaaaccttggctatagaaacattgtacctggattcggaatcaaacgccggcgaaatatcgaccagaagagtaagattcaccggtgtgccaccaatgacggacacagaaaaccccaagccaacgaagatggggtggtacaagaagccggcggtgttacactatccaccaatacctgcctcagcaatgatcaagccattacaacataagtccaagtatagcacgttaagacaagaagaagggttcaccttcagaaaaagtcttcgagatggattagagttggaaaacggtgcaactaatgcagagactaatatgatgccatttgggatcgacatcaaagaatctgcagggcatcgaatagccactaagatcagaaacaaattgaggtag

SEQ ID NO: 47 - DNA, 4416 bp, Saccharomyces pastorianus
atgtcttttgaaataggtactaggtgctggtatccacacaaagaacaaggttggataggcggtgaagtcactcaaaatgagttttgtgacggtgcataccatttggagttgaagttggaggacggtgagactgtgtccattgaaacagacagcttggaagacgatggtcaccatccaacgttgccggtactgcgaaaccctcctgtcttggaatccactaatgacttgaccacgctatcgtatttgaacgaacctgcggtgttgcatgcgataaagaaaaggtacttgaactcgcagatttacacttattctggtattgttcttattgctacgaacccctttgctgaagtcgaccatctgtactctcgcgagactatacagagctattccaccaaacgtaaggacgaattggaaccgcatctgtttgccattgcagaggaggcgtacaggttaatgactaaggaaaatgccaatcagactattgtcgttagtggtgagtctggtgctggtaagaccgtgtctgctaaatacattatgaggtatttcgcctcagtgcaagaaatcaacgatcaagaaggaaaaatggagatgtctgagatcgagagccaaatcctggctacgaaccccattatggaagcctttgggaatgcaaagaccattagaaacgataattcatcgcggttcggtaagtacttgcaaattttattcgatggcgataccactatcagagggtccaagatcaggacataccttttggaaaaatccagattggtttaccaaccggaaacagaaaggaactaccatattttctatcaaatgttggaaggtttaccagaacccttgaaacaagaattgcatttgtcatctgccaaagactaccattatacaaatcagggtggacaaccggatatagtcggcgtagatgatgcagaagaataccggataacaaccgatgccctgtcattggtcggcataaaccacgagactcagtttgagatcttcaaggtccttgcaggtctgttacacattggtaacatcgaaatgaaaatgacaagaaacgatgcatctttgtcatctgatgaaccaaatttacaaatcgcgtgtgaattactaggaatcgattccgtcgagtttgccaaatggattgtcaagaagcaaattgtcaccagatctgaaaaaatcatcactaacctaaattataatcaggcaataattgccaaggactctgtggcaaagttcatctattctacactttttgattggttggtagataatatcaataaaaccttatacgatcctaaactggaccaacaagaccaggttctttcctttattggtatcctagatatttatgggtttgagcattttgaaaaaaactcgtttgaacagttttgtataaactatgctaatgaaaaattacaacaagagttcaatcaacacgttttcaaattagagcaagaagaatacgttagggaagaaatcgaatggtctttcatcgaatttaccgataaccaaccttgcatagatttgattgaaaataagctaggtatactttcccttttagatgaagagagtggattaccatcgggttccgatgaatcatggacctcgaaactatactccactttcaacaagccgccctctaaccaagtcttctctaaacccagatttggacagactaaattcatagtgagccactatgccattgatgtcgcatatgaagtggaaggtttcattgaaaaaaatagggacagtgtttccatgggtcacttatgtgttttcaaagccacaacaaacccaattttcaagcagattttggaaaatagagacaccaaggaaagtaatgcgtctcaagaacaagatgccaaaacaaccacagtagttccaacaagactaagtcaaaagaagccaactttggggtccatgttcaaaaaatccttaagtgaattaatggcaatcatcaattccactaatgtccattatattcgttgcataaaaccaaattctgagagatcatcctgggaattcaataacttaatggtcttatctcagttgagagcatgtggtgtattggaaacaatcagaatttcgtgtgcagggttcccatcgagatggacttttgaagaatttgttcaaagatattacatcttaacaaaccatgaccagtggagtaggatcctttataattcagatgttttaaaagaagaaatcgttgagttttgccaacttatattagatgcttctatcaatgatgtaaccaagtatcaaattggtaacaccaagatttttttcaaagctggaatgcttgcatttttggaaaaaattaggaccaatataatgactaaaatttgcactttaattcaaaaaaagatgagagcaagataccatagaaagcaatatttgcaaattttattatcaattaggagatgccaaaatcaaatcagaagtcatttggttcgtgcaagggtcgatcgtgaactaaagacacgtgcagccatcttaatccaatccaacatcagaggtcattggaaacatcaatacttcaaagacgctgttagccaggtaataaaactgcagtgtacctgtaaaggaaaattgatactcgaatatgtagataaacaatttacacgcatggctacaattatcatccaaaaccatattagatcgtacggacacaagatgcattacagaacaatgaaaaagagctccgtattgatgcagagcgtcataagaaggcagttggcacaaaaaaaatatacagaattgaagagggaagctgaggaacgcaatattaaaacaaattatggaatcgggctattagaagaagctattgaattcagaaactcgttcattttgggtttagaaaccttaaatgactcatatacaagattaacgcaattgctacacggtgatttatccaatgttccttctgaggaaaggcacgaatacgaaatgctagtgagcggttacaatagcaagctcttcgagctaaaaaccttacaaggtgaaattatgagaactttggatgaacaaaacaatctaaaggagaggaagaaaaagcagtctgctatgatccgttcgcatagacaaaattcaactgctagcaaaagtaagaaattcttaagtctaggcgatgaggtcaataagataaagcaagaactatcgtttatcgaaaatgtattaacgcaggattttactgctacttattccactagcaagaatgataaaatgaaaggtctaggaatcacaggacagcagaaaagatcaaagttggtcaatgtgatccgtagagaatcagggaatcccgatttactagaattattgatggatttgaatggatacacattagaaattacagaaagtttcttgaaaaaaattaatgtttctgaattagatgaaaacagcgccttgggtcctgtacaagccatcagtactattgtgaacagtctagtgagacacgggttactgatccaaaccagcaagttcatgtcaaaggtgttgttgacctttgaaagcattgttatgactttaccaagggacaaaaccatggtgggcggtatcttttggttaagtaatctttcgcgattcccgccgtttgttgcaaatcagaaaacactgtacgatgggaatggcaaggatgagaaagatagactgactttagtatatctgaatgagctggagaatgaatcggtcagggtatttgacaagatttactcgatttggctagtaaagttgatgaaacaagtttcagtgaacatgaaaatcagtgaactggtgttgaacgaaggcacgtttgcaacccctagtggtgaaaagtttgctgagatacgggcatttttaaatgatttcgatgcagctatgcttcaattcaaattccacggtacagtgcgtacgaagatttacaatgacatctcaaagtatttcaacgtaatgctattcaacgacctaataaccaaatgtcccacattaaactggaaatacgggtacgaggtggacaagaacatcagacagttaatggcatggtttgagccaaaaaccgacgatgcgcgttctaaccttattcaaactgttcaaagtgtcaagctcctacagttcaaaatgagcaacctaaaggaattcaaactgctattcgatttctggtatgctttgaaccctgcacaaatacaagcgatcctgttgaagtacaaacccaccagcaagaacgaagccggcgtaccgaacgaaatcttgaactatttagccaacttggtcaagagagaaaactcgttattacctggaaagatggagatcatgctcaccaacgatttcgactctattaagaagcatctgcacgatggggccgatgagatccctcgtggcttcgacgcacaaggcttagccatcgtcaataaaattatagaattaagtttaaaatag

SEQ ID NO: 48 - DNA, 4068 bp, Saccharomyces pastorianus
atgagtgacgataaaaaaacgcctctacagaggaaacctggggaagatgacacgcttttcgatatcgatttcttggacgagagcacctctccctcggggtcccattcaaagactacaagctcacatgctaatgcgaattatgtgccaccggtccatgcatttcccgaggaaacgatcgatttagatgctgacgatgataatattgagaacgatatgcgcgaaaatccatttatgagtaacaacgatgatgaccaaacgtcttggaatgccaataggtttgactcgaatgcataccagccgcaatctttgaggggcggtaagcctcccggtgtctttgctaggttcggtaatggtctcaaaaacgccttcacattcaaaagaaagaaagggcctgaaagcttcgaaatgaatccttacaatgcagtaaccaacaatgaagtcgatgatagctatttgaactcgaggaacaagttcgacatcaagattcttttcaaccgatacatcttaagaaaaaatgttggtgatgcagatggcaacggcgaaccacgacttattcatgtcaacgactctctggccaactcatcgtttggttatagcgataatcatatatctactaccaagtataactttgctacatttttgcccaagtttctgttccaagaattctcaaaatatgccaatctattttttttatgcacatctgccattcaacaagtgccccacgtctcaccaaccaatagatacaccaccatcggtactttacttgtggtgctcattgtctctgccatgaaagaatgtatcgaagatatcaagagagccaattctgataaagaattaaataattcgaccgcagaaatcttctcggaagcacaagatgacttcgttgagaaaagatggattgacattcgtgttggtgacgtaattagggtaaaatcagaagaacctattcctgctgacactatagtcctgtcatcctcggaacccgaaggtctctgctatatcgaaactgccaacttggatggtgaaacgaatctaaagatcaaacagtcaagagaggaaacagccaaattcatcgattctagaactttaaaaaatatgaaagggaaggttgtttccgaacaaccaaactccagcttatatacgtatgaaggtactatgacgttaaatgatcgccaaataccgttatcgccagaacaaatgattctgagaggtgcaactttgagaaacactgcttggatatttggcctagttatatttactggtcatgaaaccaaactgatgcgtaatgctactgcaacccccatcaagagaaccgcggttgaaaagattatcaacaggcaaatcattgcattattcacagtcttgatcgtgctgattttgatttcttctattggtaacgtaattatgtccactgctgatgccaaacatctttcttatctttacctggagggaaccaacaaagctgggttattttttagagatttcctaacgttttggattttattttccaatttggtccccatttctttatttgttaccgttgaactgataaaatattaccaagcgtttatgataggttcggatttagatttatactacgaagaaaccgatactcccactgtggttcgtacatcctctttggtcgaagagcttggtcaaattgaatatattttcagtgacaagacgggaactttgactagaaatattatggaattcaagtcttgctctatcgcaggacgttgttatattgataaaataccagaggacaaaatagctaccatagaagacgggattgaagttggttttagaaaatttgaagatttgagaaaaaaactaaatgatccttctgacgaggattcacctattatcaatgatttcttgacattattggctacatgccataccgttattccagaattccaaagcgatggttctattaaatatcaagcagcttctccagacgaaggtgcgcttgttcaaggtggtgcggatttgggatataagtttattattcgtaagccaaactctgtaaccgtactaattgaagaaactggtgaagaaaaagaatatcaactattgaacatttgcgaattcaattctactagaaaaagaatgagcgcaatattcagatttccggatggctcgattaaattattctgtaaaggtgcagatactgtcattttggaaagactaaacgatgaagctaacgaatatgtggaagctacaatgagacatttggaagattacgcatcggaaggtctaagaaccttatgtctggccgtaagggatatacctgaaggagaatatgaagaatggaataatatttacaatgaggctgccacgacattagataacagagctcaaaaattagatgatgcagcaaatctaattgaaaaaaatctgttattaattggtgcaactgctattgaagataagttacaagatggtgttccagagaccattcacacattacaagaagcgggtatcaaaatctgggtgttaactggtgataaacaagagactgctgtcaatattggtatgagttgtcgattactgagtgaagatatgaatctactgatcatcaatgaagaaagtaaagaggacactgaaaggaatttgttagaaaagattgatgctcttaacgagcatcaactatcaacgcacgacatgaacactttggcacttgttattgatggtaagtcattaagctttgccctggaatcagaattggaagattacttactaactgtagccaagctttgcaaagcagttatatgttgtcgtgtgtctccgctacaaaaggctttggttgtaaaaatggttaaaagaaagacatcctcgctattactagccattggtgatggtgctaacgatgttagtatgattcaagccgctcatgtcggtgttggtataagtggtatggaaggtatgcaagctgcccgctctgctgatatagctgttggtcagttcagatacttgaagaaattgttactggtccatggttcctggtcttatcaaagaatctctgtggcaatcttgtattcattttacaaaaatacagctttatacatgacacaattttggtacgttttcgcaaatgctttttcgggtcaatcaattatggaatcatggacgatgagtttctacaatttgttttttactgtttggcccccttttgttattggagtttttgaccaatttgttagtagtagattacttgagcgttatccacaaatatacaaattgggacaaaagggccaattcttctcggtctacatcttttggggatggattatcaatggatttttccattctgcaatagttttcattgggaccattttgatttacagatacgggtttgccttaaacatgcacggcgagctggcagatcattggtcttggggtatagctgtttacactacaagtgttattattgttctggggaaagccgctttagttactaaccagtggaccaagtttactctagttgccatccctggatccttcttattttggttagtatttttcccaatttacgcttccattttcccacacgctaacgtttcaagagaatattacggtgtggttaaacatacgtatgggtccggtgtgttttggttgactttaattgtcttaccgatttttgccttagtcagagacttcttatggaaatattataaaagaatgtacgaaccggaaacataccatgttatccaagaaatgcaaaagtataatataaccgattcaaggccgcatgtccagcaatttcagaatgctatcaggaaagtgagacaagtacaaagaatgaaaaaacaaagagggtttgccttttcccaggctgaagaaggtggtcaagaaaagatcatcagaatgtacgatactacccaaaagagaggtaagtacggtgagttgcaagatgcttctgcgaacccctttagtgataataatggatttgaaaatgacggctttggaaacacagaaccgtttattgaaaacccattcgccgatgatactaggaacgctcataaagccaattcctcaagagacgactttacatttgatttgtga

SEQ ID NO: 49 - DNA, 912 bp, Saccharomyces pastorianus
atgtctgacgaaattgtttggcaagtgatcaaccagagcttctgctcccatagaatcaagacacctagtggtcaaactttctgtagaaatgagtataacgtcaccgggttgtgtaccagacagtcatgcccgttagccaactccaagtatgcaacagtaaagaatgataacgggaagttgtacctgtatatgaagacgccagagagagcacatacccctgccaaattgtgggaaagaatcaaactatccaagaattattccaaggccttacaacagatcgacgaacatctactgcattggagtaagtttttccgtcacaagtgtaagcaaagatttaccaagttgacgcaggtcatgataacggagagacgtttggcgctaagggaagatgaaaggcattacgttggtgtggcaccaaaggtcaagagaagagaagagaacagagaaagaaaggcattggtggctgccaagatcgaaaaggcaattgaaaaggaattgatggacagattgaagagtggtgcttacggtgacaagccattgaacgtggacgaaaaggtctggaaaaagataatgggtcaaatggaagaagaaaacgaccaagacgaggaagaagactgggacgaagaagaagaagagagcgatgacggtgaggtcgaatacgtggaagacgacggtgaaggtgaatacgtcgacgtgaacgatctagaaaaatggttagccgattctgataaagaagcatcaagtgccagtgaaagcgaaagcgatagcgatagcgacagtgacgatgaagacaaggatagctccaagagacgtaagaagaccgctagcactaaggctaaacgtccaaaggtcgaaatcgaatacgaagaggagcacgaacttcaaaatgctgaacaagaaatggcccaataa

SEQ ID NO: 50 - DNA, 4323 bp, Saccharomyces pastorianus
atggaaatattcagccagagagattactacccgaccccatcgtccaatgttattagttatgagtgtggtaccgtgccaagatctgcaaacgagccagtgaatagtgcggatttgcccgctctaattgtacatctttcttctcctttggaaggggtagattacagcgcatttgcagatttcttcctcatttatagaaatttcataacacctcaagacttacacgatttgctcatctacaggtttcgatggtgcattcgggagatcactacaaatgaggcaaaggccaagagaaggcaggttggtgaggtggctttagtgagaacgtttgtgttattgaggcattccatactgaattattttgttcaagattttttaccaaacatcacattgaggctccggttgatcgaatttttgaacgatagacatatttcgcattatcccaaaataatctccagttgtttgatcaacctgaaaaaaaactgggtacactgttccaagttggtttgggagaacataaaattaaacgaacctgataaaaaagattttgaagcgtggttacactactctttgagggattttacgcaactggaaagtttgcacagaagagtaagccgactgagtatttacgcaagacagagtgctgctagccctgatttccgtaatcaaagcgttttatcactatataaaacttcagatattttcaaactacccgataaccagcagtccttgaaatcttccaaaagccaacggaccccctcaatgctcttatttcctgataatacatcaaacgtttattctaggcaccgaacagtgaaagaaccgtccattgatatggaaagtgacaaaataccagagaacaaccgaaagataagtcgtttatccaaggtgactcttgtttccacacttatgaaaggtgtagactatccatcatcatatgcagtgaataagataatgcctcccacaccggccaaaaacgttgagttcatcataaattctctatatcttcccgaggaactaaatgaacaaaatggaacactacaaggggtgtcaacggtgtcatctatagataacaatagcaacagcaacagcaggtctaacacatcttcaatgtcattgctacaccgcagtgcccttgggcttttagccaagtggatgaaaaaccataaccgcaatgatagcagcaatgataaaaaatttatgaacactattaaccaaactaatcaaaaaccagaaatggatgcatttgtcaaatacgttgtgtcaatatcgtctcttaataggaaattttccaaagaagaagaagaagaagaactttccaattctgactcttccagatttgatatcttgagcgcgagaactatagacgaagtggaatccttgctaactttacagaatcaactaatagaaaaaatccaaacacacacagatgggaacgaatatcttacagaggagatggatggcacacaccaagaacgtataaatgatattaagcttctaaaacgaaatagctttaaaccaagcaacgataattttagcgccatggacaatttggatttataccaaactgtgagctcgattgctcaatccgtcatttctctaaccaacaccttaaacaagaaactacagaacaatgattctaacacactaccgtccccttcgtatgatgcgctgcaacgaagaaaagttaaaagtgtcaccgcagcttatttcaataaagcaaatggcaattactcaacagaaagtatgagactttttgataaagatacaggtacttcacacgtggacgagaatggacctcaaaggttactcttccatgaaactaaaaataataactcagaaacgacttcaagtatgacgccaagaaggaaaaacaattcacaatctcaaaaaagcattccatcttcacctttgaaaaatgttctacctgatcttaaagaatcgtcacccctaaatgacagcagggatgataacgaatcagccacatattcgtacgattctgagctgtcatccagttctcctcccagagatattgtagtaaaaaaattaagaaatgtcaaccataccatggatactccgtcattgaagaccaaaactgggtttctaaatttaagagagtttacatttgaagataccaagtccttaggcaacaagaaaatttgtgacgaaaaagaaagcaatacaagcgaggaagctgaaaattgtaataacgaacgtaatgaaacatcacgcaaaaaagaaaaagaaatcgaagatttcgtcaatgcgtcattaaactcagataattgtgattcaaccaaaatcaacaaacgatccccatccatccgtgggatcaaacaagcagccgttagacccgctagtggaagaattagtattgctagagtccaaagtatagccataactccaacaaaacagttaaccattgtagatcctgtacgaagcagttcgaagtccattatagaggaaataagtgaggtcgaacctctcaatttagaacataataaggatgtcaccatatattctgatacatcatccaccgttatcagtgtgtctacgagtaagctttttgaatcttcgaacaatagcccaataaaacaaactagaagcccgcagagagaattggcaaacggtaccgtgatgagtgaatccaatagaatcagattgtccatggcacctacaatacaatctgttgtaagtgatttagactcgattaccactggcagtacaatggaaacatttgaaacatctagagatacaccaatgcaatatgaaaggatagatttgagagaggaatatcaaagagggaaccaggacctgatttcaaatatatcatctttgcatgaaatgaaaacaattgacctcagtgattctaataatgatcttgatagcccaagtcaccatgctaaaaacaacaagtacttcttctcaccagatgatggtagcattgatgttgcttcgccagcgaaaaatgttgaagaattaaaaagtaaatttttgaagaatgaaaatgataccaatagtcacgtggcagaaagcatattaacaatggatgatcttgggatcaatgatacatcaagcggtcggaacacacaaacggccgatcctgaaccagccttggcgggtgccctagataagaaagatttgaacgacattgccaatatgcccgatgattcaattaatgatgaccccatcacagtggccttgatgaaattggaaggaacatatgcgaaaacatctggaaagccagaaaagagtaagagtagtgatgctcttcgattaaaaacaaacagattggcggatgaagtggacatgctagacattaaattgccgtcattcccaaatagtcccgcagaaaaacggaaatcgttattaatcgagagaaggagacaaacgataatgaacattccatttactcccaaccaaccagagaaggacgattttgcttcctcttcacccgaaaagaacagcactcccaatgctgatgatatcgctgtccaagcagcgcaaatccaagaactgatcagccagtataagatccaagatccgaggctgatggtgtctaacaatgaaaatcatatccccttcatattaatgtatgattcactgtctgtggcgcaacaaatgacgttgatagaaaaggagattttgggtgaaatagattggaaagacttgttggacttgaagatgagacacgaaggcccacaagtcataagctggttacaactactggtgagaaatgagactttatccgggattgatttggcaatttcaaggttcaacctgactgtggactggattatttcagagattcttcttaccaaaagctccaaaatgaaaagaaatgtcattcagcgatttattcatgttgcggaccattgtaaaaaatttcaaaacttcaacacactgatggaaataatcttggctttaagttcatcggttgttcaaaggtttaccgacgcttggcgtttgatcgagccaggcgatcttttaacttgggaagaactaaagaagattccgtcattagacaggaactattctgcgataagaaatctgctaaactcagtaaacccactggtaggctgcgtccccttcatcgtcgtgtacctttcggacttgtcagcaaactctgaaaagaaggactggatcttggaagataaagtcgtgaactacaacaaatttgacaccaacgttcaaatagtaaagaatttcattcagagagttcaatggtcgaagttttacgctttcgaagttaaccacgaactactgagtaaatgcgtttacattagcacactatcacaagaggaaatcaaggaactatccacatga

SEQ ID NO: 51 - DNA, 2280 bp, Saccharomyces pastorianus
atgtccacgtcttcgtctaccgggtacagcaacaagaatgccgcccatattaagcaagagaacatactgagacaaagagagacgtcctccgtcaacgccagtgacgagctgctaggtacagatgagcaaaacatggaagatttctcgaaggcgaagatcgctgcgaaagactcgttgtttcgtctcgaagccatcctgatgcccgtggtgtttaccgcgttggctttgttcaccaggatgtacaagatcggcatcaacaaccgtgttgtttgggatgaagcgcattttggtaagttcgggtcgtactacttaagacacgaattttaccatgatgtccatccccccctggggaagatgcttgtcgggttgtccggttacttagcagggtacaatggctcctgggacttcccctccggtgagctctacccagactacttagactacgtcaagatgagactgtttaacgcgtcattttctgcgctttgtgttcccttggcttacttcaccgccaaggctattggattctcgctgcccactgtttggttgatgactgttttggttctgttcgaaaactcgtacagtactttgggtaggttcattcttttggactccatgctgctgtttttcactgtagcatccttctttagtttcgtcatgttccacaaccaaagatccaagcccttctccagaaaatggtggaaatggctattgatcacgggtatttccctgggttgtacgatctccgtcaagatggttggtctacttatcatcactatggtcggtatctatactgtgattgacttgtggaccttcttggcggacaaaaccatgtcgtggaaaacctacatcaaccattggttggcaagaatcttcgggctcattatcgttccctccctcattttcctactgtgtttcaagatccattttgacctactatcccactctggtactggggatgctaacatgccatcgcttttccaagcaagattaatcgggtccgatgttggacaaggtcctcgtgatattgccctcggctcatccgtcgtttcgatcaaaaaccaggctcttggaggctccctattgcactcgcatatacaaggttacccagaaggttccaaccaacaacaggttaccggttatggttacaaagatgcaaacaacgcgtggttcttcaacagagaaagaggcctaccatcctggtcggaaaacgaaaccgatattgaattcctgaaagccggtgccagttatagattggtacacaaaagtacaggtagaaatctgcacactcatccagtcgccgcaccagtgtccaagtcacagtgggaagtctccggttacggtgacgactttgttggtgacaacaaggacaattgggtcatcgaaatcatggaccaaagaggggatgaagacccagagaagttgcataccttgaccacttctttccgtatcaaaaacacggaaatgaactgttacttggctcaaaccggtaacagtttgccagaatgggggtttagacagcaggaaattgtttgtatgaaaaatccctttagaagggataaaagaacatggtggaacatcgaaactcatgaaaacgaaaacttaccaccaagacctgaagacttcacatatccaaagaccaatttcttcaaagattttattcatttgaacctagccatgatggccactaataacgccctattaccagatccagacaaattcgactatttggcttcttccgcttggcaatggccaactttgaacactggtttgagactatgtggctggggagacgataatccaaagtacttcctactaggtaccccggtctccacatgggcttctagtgttgctgtcatagcattcatggccactgtagtcatcctactgataagatggcaaagacaatacgttgacttgaccaatccatccagctggaacgttttcctaatgggtgggttctacccgctactagcctggggtctacatttcgttccatttgtcatcatgtctagagtcacgtatgttcaccactacttgccggcattgtatttcgcattgatcattttggcttactgtttcgacgccggtttgcaaaaatggtccaggtccaaatgcggccgtattatgcgtttcgtcttatacgctggtttcatcgcccttgtaatcggctgctaccagtacttctcccccatttcattcggaatggagggctcgagccaaaacttccgttatttgaactggctatccacctgggatattgttgacaaacaagaagcatga

SEQ ID NO: 52 - DNA, 2505 bp, Saccharomyces pastorianus
atgaacgatccctctttactaggctataccaacctgggcccacagcagcagcaacagccgcagcagcagcagcagcacgccgggctactgggaaagggtacaccgaacactctgcagcagcagctgcacatgaaccagctctccggcatgcctcctcccgggctgatgggcagcaacgacgtgcacactcctgctaacaacaactcgcgccagttactcgaccaattggccaacgggaacacaaacatgctcaatttgagcatggacaacaacaacaacaacaacaacagcaacagcaacaacaacaatagcagcggaatggtgatgaacgctcccacggccaccgccacggccaaccctctagggatgattccgacagtgggcacccccgttaacctcaacgtgaacgccagcaaccctttactacacccgcacttggatgacccttcgctactgaacaatcctatctggaagcttcaattgcatctggctgcggtgtccgcacagtccctggggcagcccaacatttacgctaggcaaaacgcaatgaagaagtacctagccacgcaacaggcgcaacagcaagcacaacaacaggcgcaacaacaagccccgggccaaatcggccccccacctcaaatcccaccaccggccttgcagcccaccgatttccagcagtctcacatcgcagaggcctcgaagtcactggtcgactgcactaagcaggccctgatggagatggccgacactctcatcgacggtaagacagcaaagaaacagcagcctacgggggacagcacaccctctggcactgcagccaacagcaccgtgtccacgccgttgaccccgaagatagagctgtttgccaacggcaaggatgaggccaacctggcgctcttacagcacaaaaaactgtcccagtacagcatcgatgaagacgacgacattgaaaacagaatggtcatgccaaaggactccaaatacgacgaccagttgtggcacgcgctggacctgtccaacctgcaaatcttcagcatcagcccaaacatcttcaagtatgatttcctcacaagactgtacttgaacggtaacggcctcacggaactgccaccggagattaagcgtttggacaacctgcgtgtcttggacttgtcccataataggttgaccgcgctaccagcggaactgggctcctgcttccagttgaagtacctgtatttcttcgataacatggtcaccacgctaccatgggaattcggcaatctgtacaacttgcagtttctcggtgtagagggcaatcccttggagaggcagcttttgaagatcctcacagaaaaatctgtcacgggactgatcttctacctaagagacaacagaccggagatcaccttacctcacgagcgcaggttcatcgagatcaatactgatggggaaccacaaagagaatatgactccttgcaacaatcgacggaacacttgaccgcggatctggccaagagatcgttcaccgtgctatcgtacaatactctgtgccaacactacgccactcccaaaatgtaccgttacacaccatcatgggcattgagttgggattacagacgtaacaagctaaaggaacagattttgtcatacagtagtgacgtgttgtgtttacaagaagtcgaatccaagacgtttgaagactactgggtgcccctgttagaaaaacacggttataccggtattttccatgcaaaggcaagagcaaagaccatgcactccaaggactccaagaaagtcgatgggtgttgtattttctttaaaagagaccaattcaaactggtcaacaaagactccatggatttcagcggtgcttggatgaagcacaagaagtttcaaagaacagaagactatttgaaccgcgctatgaacaaggacaacgtcgcgctgtttttgaaacttcagcacgtctccagcggcgataccatttgggtggtcaccacacatttacactgggatcccaaattcaacgacgtgaagacgttccaagtgggtgtcttactagaccatctagaaacgttgttgaaagaggacacaacgctcaattccagacaggacatcaagaaatcccccgtgctcatttgcggtgacttcaattcgtacatcaactccgccgtatacgaattgataagtacaggccgcgttcaagtacaccaagagggcagcagcagagatttcggctacatgtcagagaaaaacttctcgcacaatttggccctaaaatcaagctacaactgtatcggagagttgccattcaccaatttcacaccttcattcacagacgtcattgactacatatggttctccacgcacgcgctaagagtgcgtgggctattgggcgaagtggaccctgagtacgtggataagtttatcgggttccccaatgacaaattccccagtgaccatataccattgctagcaaggtttgagttcatgaagacgaatacaggcagcaggaaagtgtaa

SEQ ID NO: 53 - DNA, 4053 bp, Saccharomyces pastorianus
atgccctacattggagcttccaacatatcagagcattcctttgttaatttgaaggaaaagcacgcgatcacacataaaggtgctgttaactctgcaacgtctttgcaaacacccccaagcccggatcaggagaaccaggtcgataacgaattaggagactacgacacttctttgagtgatgtttccactccgaataaaaatgaagaagacgggtttgaccgaagcataaaggacacgttggccaggtttggtaagaccaaatcaccgcctgctcttgattttgaacaaccgagacttctgtcaacagtgtcttcatctgcggactccacggcgtcttcaccgttaactgatgaagacataaaagaactagagtttcttccgaatgaatctactcattcctactcctacaatcctctctcgccaaactctctagcggtcagattaaggattttgaaaagatctctagaaatcataatacagaacccaagtatgctgttggaacccactccggacgagttgcctcctttgaaggattttcccggtcgtagaagaagtatgccaagggcatccgcttccgcgaacaatctgatgaatagaaacaagagccaaatctggaacacgacttccgccactttaaacgcatttgtaaataatacctcttcttcttcggcagtatcatctgcttcgtctgacaaacagcagggcaccccagttttccctaatttagacccaactcattcccagacattccatagagctaactctttagcttatttgccttccattttacccaagcaagacccgctgcttagacatagcagctcattattccgtggcaactatggaaacagcataagctctgaaaggccgaattttagacaaccgtttacagaccaaaccaacaccaaccacactagcagcttgttgaatgagaaatcttatccagaagaagaaacatttccgtcccatcacaaaccttctatagattcactaaatgagcaaagggcgaacttgaagagccttttggatttactcaacgaaacgctggaaaagaacacttccgagagagcttccgatctgcacatgatatcactgttcaatctgaacaaactaatgcttggagaccccaagaagaataattccgaatccgataaaaggacagacaacttgaaaagaaccttgctagatagtctggcagaaccattttttgaacactataattttatggaaggcaattcaaccgaagattcagatgaattgaaggaggaaatcgatgaattcacaggttccggagataccactgcgataacggatatgcggccccaacaggactatggtcgtattttaaggactttcacatctacaaagaattctgccccacaggcgatttttacatgtagtcaagtagatccttggcaatttagagccgcgaatgatctagcatgtttagtatttggtatttcgcaaaatgccattcgcgcgttaaccctaatggatttgattcatacagatagtagaaattttgtcttacacaagctattgaccaccgaaggccaagaaatggtcttcacgggtgaaattattggtatcgttcaaccagaaacatcgagcttatctaaaacagtatgggcatcgttttgggcgaaaagaaagaacgacttattagtttgcgtttttgaaaaggtcccttgtgactatgtcgatgtgcttctaaatctggatgattttggtgtggaaaatattgtagacaaatgtgagttactatcagatggacatttattgtccccttcctcctctacaacaccttcgtctgcctcgctatccaagatggcctcatctccaattgctaataaacttgaatattccttggagagacaggttcttgaaaacagctctttgaagcctaatctagccagtcgcaatgaaactcaacttggtgactcacggtcaacaaagaaaagtgtaaagttcgctaatgatattcaagacgttaagaatataagtcagtcattagccaaattgatcgaggacgtaaggagtggcgtggtatttgatcgtgatgatgacctcttgcctatgcccattagagtttccagtcatattaacgaaacaagatattttactttaaaccatttgtcttgtaatattccgtgtgcggtctcctctactatcctggaaaatgagctaaaactgaagattcacagcttaccttaccaagctggtttgttcattgtggattctcatactttagatctgatcagttctaataaatccattatgaaaaatatgtttggttatcactttgcagagttggtcggaaaatccattactgaaatcatcccatcattcccaaaaattttacagttcatcaatgacaagtatcctgcattggatatcacacttcacaaaaacaaaggtttggtattaacggagcattttttcaggaaaatccaggcagagatgatgggtgatcgtaaacgcttttacacctcggtaggtatcgatgggcttcatagagatggttgtgaaatcaaaattgatttccagctacgtgtcatgaattctaaagtaactttactttgggtgacacattccagggatgtcgtatttgaagagtacaatacgaacccatcacaactgaagatgctaaaggagagtgaactaagtttgatgagcagtgcgagtagttctgccagttcctccaaaaaatcctcatctagaatatctacgggaacgctaaaggatttgagcaatatgtcaacctatgaggatttggaccaccgaactaataaactgaaatacgaaattgggggcgactccgcaaaccaatctgaatccactttatcggaacaggataaaggacccttggatgaggacaaggacagcagttcaataattgttggtgatcctgagattgaacacaaattagaactggccaaaatttactcaagagataaatcacaatttgtgaaagagggaaatttcaaagtcgatgaacttttgataataagtaaaatttcactatccccaagtgtagaatccttaacagctgagacagattctaaaggttctgtaaaaggactattgccgctcaaggagaacacgttggttgagaaaaatgccactgcaaacagtatcggagaattaggtacagatgaagacggtatcataatgactaggaaaaaatcagaactgcctataagtgtatttttgcatacccctgagaagaatattggtgctgagaagcatgtcaagaaatttacagatttcgtaagtttgcagaaaatgggtgaaggtgcgtacggtaaggtcgatctgtgtatccataagaaagaaaggtatattgtggtgattaaaatgattttcaaagaaagaattcttgtcgatacatgggtcagagacaggaagttaggtactataccttctgagatccagatcatggccacgttgaataaaaacccgcacgagaatattttgcggttactggatttctttgaagacgatgattattattatatcgaaacgcccgtgcatggtgaaacaggatgcatagatcttttcgatctgattgagttcaaaacaaacatgacagaatgcgaagccaagctaatagtcaaacaagttgtggcggggataaagcacttgcacgaccaaggcattgtccatagagatatcaaggacgaaaacgtgattgtggactctaaaggcttcgtcaagattatcgatttcgggtctgctgcatatgtcaagagtgggccgtttgatgtgtttgtgggtactatagattatgctgcacctgaagtcctgggggggaacccctacgagggcaagccacaggatatttgggctatcggcattctattgtataccgtggtcttcaaagaaaaccccttctataacatagatgaaatactggagggtgacttgaaatttaataacacggaggaagtcagtgaagattgtattgaattgatcaagagcattttgaatcgttgtgtaccgaagaggcccaccattgacgatataaacaatggtaagtggctggtgatttaa

SEQ ID NO: 54 - DNA, 1896 bp, Saccharomyces pastorianus
atgtctggagcaaaatcaacaacggtagctgcactgcccgcagcaacaacagcaacaacggcaagttctaaagaatctggcacagacgagggactgtaccccttggctatgcttatggacgagttaaagcatgacgatattgcgaacagagtggaggcaatgaagaagctagacactattgcgttggcgcttggtcctgaaagaacaagaaacgagctagttccctttttaactgaagtcgcccaggatgacgaagatgaggtgtttgctgtcctagctgaacaactcggcaagtttgttccctatattggtgggcctcaatacgccacggtcctattgccagtattagaaattttggcgtctgctgaagaaaccttggtcagagaaaaggccgtagactctttgaacaatgtggcccaagaactatctcaagagcagctattcaatgagtttgttcctttgattgagcatttggccactgcagattggttctcttcgaaagtttctgcatgtggacttttcaaatccgtcattgtccgcatcaaagacgattcattgaggaaaaacatcctggctttatatttacaactggcccaggatgacactccaatggtgaaaagagccgtcggtaaaaatttacccatcttaatcgatctgttgactcagaatttggggctatccacagatgaagattgggattatatctccaatatcttccaaaaaatcattaacgatactcaagattccgtcaagtttttggctgtggattgtttgatttcgatcttgaagtttttcaacgctaaaggtgacgagtcccatactcaagatttattaaattctgctgtaaaattaatcggtgatgaagcgtggagagtacgttacatggctgccgatagattctctgaactagcctcacaattcacttccaaccaagcatatattgacgaattaatacaaccatttttgaatctttgtgaagacaatgaaggcgatgtgagagaggccgtagccaaacaagtctctggcttcgccaaatttctaaatgatccttccgttattttgagtaagatcttacctgctgtacaaaatttaagtatggacgaaagcgaaacagtgagatctgcgttggcttccaagattacagacatcgtattgttgttaaataaagatcaagtgattaacagtttccttccgattttactaaatatgctaagagacgagttccccgatgttcgtctgaatatcattgccagcttgaaagttgtcaatgatgtaataggcatcgagctattatcagattctttgctacctgccataaccgagctagctaaagatgtgaactggagagttagaatggccataatcgaatatatccctatcctagcagaacaattgggtgtacaattctttgatcaacaactgagcgacttgtgtctttcatggttatgggataccgtttactccatcagagaggctgcagtgaataacttgaaaagattaacggaaatattcggatcagattggtgccgcgacgaaatcatttcaagactacttaaatttgatttacaattattggaaaattttgtctccaggttcacagtactatccgccttaaccactttggtgcccgtggtgtcattagatgtcgttaccgaacaattattaccctttatttcccacttggccgacgacggtgttccaaacatcagattcaatgtagctaagtcctacgctgtgatagttaaggccttgagtaaggatcaggccaaatatgatgcattaattaagaacacaattttaccctctttggaagcactatgtcaagatgaagatgttgatgtaaaatactttgctagtaaaagtttggcggagtgtcaagaaattttgaaaaactga

SEQ ID NO: 55 - DNA, 1191 bp, Saccharomyces pastorianus
atgcaaaaggtctgcccccccccatctatgactattttgaggaagagaccgctagtgaagacggaatcgaagtgttcccacaccaccagtgcgaaaaagaccaagatcaagcaggaagaggtcgtgccccaacccgtggatatcgactgggtcaaatcgttgccgaataagcaattcttcgaatggatcgtggccaggaacgggaatgtgcctaacaggtgggccaaaccactggatgcttcaatcctcttcacccccgccttgacaaaggtcccagacaagtttccggaaacgtacgctaggatgcgagtgttgaggtcccgaattctagcacctgttgatatcgtcggtggctcgtccatcccagtaaccgttgccttgaaatgcggtatctcgaaagaccagatatcacccagggattataggctgcaagtgctgctttgcgtgatgctatcgtcgcagacaaaggatgaagtcgccgctatggcaatgtataacatcgcacaatattgcatggacgaactgcattgcagacagggtatcacattagaggccattctgcgaactgaggagaccaaactagacgagctgattcattctgtcgggttccacacaagaaaggccaagtatatcttgtccacgtgccaaatcctgcaagaccagcatctgggtgatgtgccggctacgatagacgaactgttggtcctgcccggtgtggggcccaaaatggcttatttgacgttacaaaaggcatggggcaaaattgaaggtatatgcgttgacgtacatgtagatagattgaccaagatttggaaatgggtggacccacaaaaatgcaagaccccggaccaaacaagaattcaattgcaaaactggctacctagaggactctggacagaaatcaatgggttgcttgttgggtttggacaaataatcaccaagtcgagaaacgtgagagatttgttgaaattcctgccaccagaggaccctagaaattccctagattgggacttacagtctcagttatataaggagatccagcataacatcatgagttatcctaaatgggtcaaattcttagaggagagccccgaattaaacgcagatgctgcttctttggacgaagttgatgttaaacaagaggacaacccaagtgaacaagatgatattcgtgttaaagtagaagactga

SEQ ID NO: 56 - DNA, 756 bp, Saccharomyces pastorianus
atggacgtgttgaagctcggttacgaactggaccagctttctgatctggtcgaagaaagaacaaggcttgtgtccgtgctgggccttgcccccacggcgaacgacaatgttgccttgaaacggcaattgggctccatcctggagtcgatgcaggagtgtgcggctactgatgcgctggtgtcccggtacaataccatcctggacaagatccccgatccggggttggacagggagctgtacaggttccacaggccggtggttgccggtgctgaggaggtgtccaaagactctttaaagaaagtgcgattcaagaacgatgacgagcttacggttacctacagagacgacgacgacgatgacgacgagcaagatgaggagccgtttccctcgaagcatgctccttacaaggatgaaccctcgcagccgcagccgcagctgcaacccatggtttccaaccaggaacttttcatcgatcagcagcaacagctcctagagcaggactcccacttgggcacgttgtcccagtccatcgggaggacccatgacatttccatggacttgaatgacgagatcgtctcgcagaacgatacgctgctagtggatttggagaacctcatcgataataacggccggaacctgaatagggcttcccgctccatgcatggctttaacacctcccggttcaaggacaacgggaattgcgtcatcatcctcgtactgatactggtgctcctcttgcttctgctggtactataa

SEQ ID NO: 57 - DNA, 1185 bp, Saccharomyces pastorianus
atgactctacaagaaactgataaatttgctaccaaggccattcacgccggtgaacacgtcgacgttcacgggtccgtcatcgagcccatctcgttgtcgaccactttcaaacagtcgtctccagccaacccaatcggcacttacgaatactcgagatcccagaaccccaacagagagaacctggaaagagccgttgctgctttggaaaacgcgcaatacgggttggcattctcttctgggtctgccaccaccgctactatcctacaatcgctgccacagggctcacacgcggtgtccatcggtgacgtgtacggtggtacccacagatacttcaccaaggtcgccaacgcccacggcgtggagacctcgttcaccaacgacctgttgaaagacctacctcagttgcttaaggacaacaccaagttagtctggatcgaaaccccaaccaacccaactttgaaggtcaccgacatccagaaggtcgccgacgccatcaagaagcacgccgccagccaggacgtcatcctggtcgtcgacaacaccttcttgtcgccatacatctccaacccattgaacttcggtgccgacgtcgtcgtccactccgccaccaagtacatcaacggtcactccgacgtcgtgctaggtgtcctggccaccaacagcaagccgctatacgagcgtctgcaattcttgcagaacgccattggtgccatcccatctcctttcgacgcatggttgacccacagaggtttgaagaccctacatctgcgtgttagacaagctgccctcagcgccatcaaaattgctgagttcttggctgccgataaggaaaacatcgtcgccgtcaactacccaggtttgaaaacacaccccaactacgacgtcgttgtcaagcaacaccgtgacgcccttggtggtggtatgatctccttcagaatcaaaggtggtgccgaagccgcctccaagttcgcctcctccacaagactattcacattggccgagtcccttggtggtatcgagtctctattggaagtgcctgccgtgatgacccacggtggtattccaaaggaagccagagaggcctccggtgtctttgacgacctggtcagaatctccgttggtatcgaagacaccgacgatcttttggacgacatcaaacaagctttgaagcaggcaagcaactag

SEQ ID NO: 58 - DNA, 1482 bp, Saccharomyces pastorianus
atgctgccctatatggaacaggtgttacgggcattctatcagagtaccaattggaatacacaaaatagttacgaagatattacggctacttcgagaacattattggacttccaaattccttctgcaattcacttgcagatctccaacaagtctactcctaacacattcaactctttagatttctccacgaggtcaaggataaatggttccttgagttatttatattcagatgcacaggatttagagaagtttatgcgtagctctgccgatatcccattacaagatgccactgaaacatatagacatttacaaccgaatttgcacttcggcagcaatggtagcaacaccacgaagattggcgaagatgtaatcgaggttaataaaaaagcgttgcatgattcgaaatttgttaagaaatctctttattacggtagaatgtactatccaagctcagatttggaggcaatgataacaaaacgactcacccagcaaactcaattcatgcttaagggagtcagtagtttcagagagaacttaaacgttttaacatgctatttccaaagagattctcatcggaatctacaagagtggattttttctaccagtgatttattatgcggatatagagtattgcacaatttccttacaacgccgtccaaatttaacacttcattgtacaacaattcctcgttgtctcttggagctgaattttggttggggttggtcagtttaagtcccggttgttccacaactttaagatattatacacactctaccaatacgggacggcccttaactttgacagtttcttggaacccattattcggacacatatcttccacgtattcagccaagacaggaacaaactctacattttgtgctaaatacgacttcaatctctattccattgaatcaaatctttcatttggttgcgagttttggcaaaggaaacatcttttacctaagagcaaccacaataaaaagctcaatgacgtaccagagccgatggcccgtgactcagtggctgagagagggaataagagaacggcggcgctactacatgaaaatgtaccgaacctgaactcggttgacaacaaaaatgtatcttcatcggatataccagatcataagcaaaagttattgaatgacttgacttatgcattttcgtcatctttgagaaaaatagacgaagaaagatccactattgaaaaattcgataacaagataaacaattccatctttaccggtgtttggaaactaagtacgtcattacgcgataggactttaaagctattatgggaaggtaaatggaggggttttttgatatctgctgggacagaactagtatttactaaaggttctggaggggctttgcccaacggtgagaagaatggtggtgatgcagtagcgatacttgatacagaaaacaatattccgattcttcccgccaaatttggtatacaattccaatactccacatga

SEQ ID NO: 59 - DNA, 780 bp, Saccharomyces pastorianus
atggagccagagagcataggcgtcgtggggaacttcatccaggatgataatgatagtgcgatatccgggcctcgcaaacgttctggcagtaagacatctagtgcaaagaatacacggaactctagtaacatctccccagcatcaatgatcttcagaaacttgctgataatggaggacgatctaagacggcaagctcatgaacaaaaggtattgaaatggcagttcactttgtttctagcatctatggccggcgtgggtgcgttcaccttttacgaattgtacttcactacagattatatcaagggattccacagagttattttgcaattcactctagctttcatttccattaccgtagttctttttcacatcagtgggcaatataaaagaaccattgtaattccaagaaggtttttcacgtctactaataaggggattaggcaattcaatgtaaagctggttaaagtacagtctacatgggacgagaaatatacagattccgtgaggtttgtgagtcgaaccattgcgtatggcaacatttactgtttaaaaagatttgtgtggcttaaagacgataacaccatcgtgaaattttggaaaagtgtcacaatacaatcccaaccgagaattggagctgtggacgtaaaacttgtacttaatcccagagcattcagtgcagagattcgagaaggctgggaaatatatagagacgagttctgggccagagaaggagcaagaagacgcaaacaagcggatgaactccgacccaaatcagagtaa

SEQ ID NO: 60 - DNA, 606 bp, Saccharomyces pastorianus
atgagttcagcctttaatatgcataaactggtgtttcgtaatttgaatgctggaaagttcatgtttaagaacctccccttatggaggtctaaaactagtattaagctgggagtgccctttacccgctctattggactagccactgttggtgtcgctgctagtgggctgctattgatgaattaccaaccttcaaggttgatattcaatgattctttgagtggggctgcgaagcaagatagcattctagaaccctgggagcccaaggtagccaatgatgtggctatgacagaggagagaaggaacaaaataagtagcaacaagcagatgtttttaggatcattgtttggtgtagttttaggtgtcacagtggctaagatatctattttgtttatgtatgtgggtatcacaagtatgctactttgtgaatggttaaggtataaggggtggattcgaatcaatttgaaaaatatcaaatccgttattgttttaaaggacgtagatttgaagaaattgcttattgatgggttattaggtacagaatatttgggctttaaagttttctttacattgagttttgtactgtcaagcttaaacgccaataaataa

SEQ ID NO: 61 - DNA, 648 bp, Saccharomyces pastorianus
atgattaaatcttcaattgctctacctactttcttcgttgttttgattttggcgttggtcaattcggtgcatgcatcttccggttatgctccagttgctatcactttgcctgcattcagcaaggaatgcctgtactacgatatggcttccgaagacgactctctggccgtgggttaccaagtcctgactggtggtaatttcgagatcgattttgacatcactgctcctgacggatctgtgattactagcgaaaggcaaaagaaatattccgatttcctagtaaaatcatttggcgtgggccagtacagcttttgcttctccaataactacggtacagctttgaaaaaagtcgaaattacgttagagatggagaaatcactgactgatgcatccgcacctgaaatgaacaatgatgatattattgccaacaatgctgtagaggaaatcgacagaaacttgaacaggataaccaaggccctaaattatttgagagctagagaatggagaaacatgtctaccgtcaactcgaccgaatcgagattgacatggttgtctatactgattatgatcgtcgtcgtcgttataagtgttgctcaagtcctactcatccaatttctcttcactggtcgtcaaaaaaattacgtctaa

SEQ ID NO: 62 - DNA, 1938 bp, Saccharomyces pastorianus
atgtcaaaagctgtcggtattgatttaggtactacatattcgtgtgttgctcatttttcgaatgatcgtgttgatattattgccaacgaccaaggtaacagaactaccccatcttttgttgcgttcacagacactgaaagactgatcggtgatgccgccaagaaccaagctgctatgaacccttcgaacactgtgttcgatgccaagcgtttgatcggtagaaacttcaacgacccggaagtgcagggtgatatgaagcatttcccattcaagctgatcgatgttgatggtaagccacaagtccaggtggaattcaagggtgaaaccaagaagttcaccccagaacaaatctcttctatgattctaactaagatgaaggaaaccgcagaatcttacttgggtgctaaggtcaatgacgccgttgtcactgtcccagcttacttcaacgattctcaaagacaagctaccaaggatgctggtaccattgctggtttgaacgtcttgcgtatcattaacgaaccaactgccgctgccattgcctacggtttggacaagaagggtaaggaagaacacgtcttgattttcgatctaggtggtggtactttcgatgtctctttgttgtccattgaagacggtatcttcgaagttaaggccaccgctggtgacactcatttgggtggtgaagatttcgacaacagattggtcaaccatttcatccaagaattcaagagaaagaacaagaaggacttgtctaccaaccaaagagctttgagaagattgagaaccgcttgtgaaagagctaagagaactttgtcttcttctgctcaaacttccgttgaaatcgactccttgttcgaaggtgttgacttctacacctccattaccagagccagattcgaagaattgtgtgctgacttattcagatctactttggacccagtcgaaaaagtcttgagagatgctaagttggacaaatcacaagtcgatgaaatcgtcttggttggtggttccactagaattccaaaggtccaaaagttggtcaccgattactttaacggtaaggaaccaaacagatctatcaacccagatgaagccgttgcttacggtgctgctgtccaagctgctatcttgactggtgatcaatcctctaagactcaagatctattgttgttggatgttgctccattatccttgggtattgaaaccgctggtggtgtcatgaccaagttgattccaagaaactccactattccaaccaagaaatcagaaacattctctacttacgctgacaaccaaccaggtgtcttgattcaagtctttgaaggtgaaagagccaagacgaaggacaacaacttgttgggtaagttcgaattgagtggtattccaccagctccaagaggtgtcccacaaatcgaagttactttcgatgtcgactctaacggtatcctaaacgtctctgctgttgaaaagggtactggtaagtctagtaagattaccatcaccaacgacaagggtagattatccaaggaagatatcgaaagaatggtttctgaagctgaaaagttcaaggaagaagatgaaaaggaaactgaaagaatcgcttccaagaaccaattggaatccattgcttactctttgaagaacaccatttctgaatccggtgacaaattggaacaagctgacaaggacgccgtctccaagaaggccgaagaaaccattgcttggttagacagcaacaccactgctaccaaggaagaattcgatgaccaattgaaggaattgcaagacattgctaacccaatcatgtctaagttgtaccaagccggcggtgctccaggtgctgatgctggcgcaggtgctgctccaggtggcttcccaggtggtgcccctccaccagctgcaggtgctgaaggtccaactgttgaagaagttgattaa

SEQ ID NO: 63 - DNA, 1629 bp, Saccharomyces pastorianus
atgcatcgaaaatcatccagaagaaccagttcaaatatacgtatggctccgtaccgaaaacaaattatcagcaatgcacgtaataaaccagggcttctatccaaaataaaaacttttttcactcaaatcgatccaataaaagtaaattcagaaagtaaagttactaatgaaagagtcggcaataagctttctggaagaagagtcaccagtataccaggaggatattttcaaccagacgcattatcagattctagtttccaccgttctgaggcagccactactctgcaagagggtagaagttgccttggaaataaggaggaactctgtgatgaaaccgatgaatccaacgtctctaacgccaaactcgcaaatttctttagtagaaaaggtaatgaacctttatcagagattgaaatggaaggtgtgatgtcattgttacaaagatcaaacaaatcaatgattgcccccgaaagagaacagaaattatcggaaaatagtaatgtcggtcaatcgctagttttgaaagaatcaggaagtacgccaatcaacatatctaatacaccgactttcaatccaaaatatgattcttcagccgtttcgaatgcctcaatgaatacaactttaggaagcattggctcaagaaaatatagctttaactattctagtctcccttcaccatacaaaaccaccgtttatcggtacagcgcagcaaaaaagatgcccgatacatgcacagcaaatacatctgttcaaagcatagcatcggtaagatcagccagagctggcgtctcaaagccagctcctaccaagaaaataagtaacactgcagcagcattggtttctctactagacgaaaaagatatcaagaagaacaaccctgcttcacaacttgccaatccatactcatcatacgtaagccaaatacgcaaacataagaaggggtcctcaaattttgtaacaggccaagaaaagaatcaagaatcctcagttaaaactttaccatctgaaaaggctcttgaacaaagtgaagaattagtaaaccaatctaacaataccaaaatcgcaccacctgcaccaaataaggacacatttactaaatataagcctgcgagatcttcgtccttacgctcaaacgttgtagtagccgaaacatctcccgaaaagaaagaggctgccgctaaagctccatcttccacatttagcttttctttcaatggtgcaaaaaaagaggaaccttctaatggtgagcaaaaaagtgagaatgccccacctccgctagccaaagagttcgtttttaccaagttacagacaaacccattatttgaaaagccaaaagctgaaatggccaaggtagactcttctccgatagaaccaaacttttcagtaacacctcaaaaaaatgtatcgaatagctccgctttcaacagcgttcaaaagatgccaccattaaattttccacaacaaaaaggcggcgagcttgaaactactcagagcacaatagggaaagacattttaatgaaagaactgcaggaatttgatttcaacgttcctgtgacgtctaaatcactaggaaatggttcagttgatgaaaataaagttgaggcctttaaatctctttatactttttga

SEQ ID NO: 64 - DNA, 660 bp, Saccharomyces pastorianus
atgcttttaactgccctattgcagatttttgcctgctgcctagtcttgccagctcaagtttctgcgttctatttttataccactggtgctgagcgtaaatgtttccataaggaattatcgagaggtaccttgtttcaaggaacatataaagcacaaatatatgacgacgacttaaagggatacagagatgctggtgcgcaagatttcggtgtcgtaatcgatattgaagaaacatttgacgacgaccatttagttgttcatcaaaagggttcggcaagtggtgattacactttcattgcactagaatcaggtgaacataaggtttgcatccagcccgaagctggcggttggttgattaaggctaaaaccaagattgaagttaatttccaagttggtacagatgaaaaattagactctaaggggaaaaccactattgacatcttgcatgccaaagttaacgttttgaactccaagatcagtgaagtcagaagagagcagcaattgatgagagatcgtgaagctaccttcagagatgcgtcagaatccgtaaattctcgtgctatgtggtggattgtaattcaattgattgtccttacagttacctgcggctggcaaatgaaacacttgggtaaatttttcgttaaacaaaagattttatga

SEQ ID NO: 65 - DNA, 1866 bp, Saccharomyces pastorianus
atgagcagcattcaactttcgaagggagacttccacagcatcttcaccaacaagcagaggtacgataatcctaccggtggcgtttaccaggtttacaataccaggaagtcagatggtgccaatagcaacagaaagaacctgatcatgatttcagacggtgtctaccacatgaaggctcttttgagaaaccaggccgcgtccaaattccagtcgatggagctacaaaggggcgatatgattcgcgtgatagttgctgaacctgctattgtcagagaaaggaaaaagtacgttcttttggttgatgattttgagctaatccaatcccgtgcagaaatggtcaaccaggccagtacatttttagataattacttctcggagcactcaaatgagacattaaaggatgaagatataaccgataacggcaatgccgctaaccaagcaaacgccggcaatgccggagttccagatatgctccattcaaactcaaacctaaatgctaacgacaaaaagttctccaacgaaagctctggctctcaaaaatccaaaccgatttttgccattgaacaattgtctccataccaaaacgtttggacgatcaaggcaagagtttcctacaagggagaaatcaagacctggcacaatcaaagaggtgatgggaaattgttcaatgtcaattttttagacacctctggggaaatcagagccactgctttcaacgacttcgctaccaagtttaacgaaattttgcaagagggcaaagtatactacgtttcaaaggcaaagctgcaaccagctaagcctcagtttaccaacttgactcatccttatgagctcaatttggatagagacaccgtcgttgaagaatgttttgacgaaagcaatgttccaaagacccatttcaacttcatcaaattagatgctatccaaaaccaagaggtaaactccaacgtggatgttctgggcattatccaaactatcaacccacatttcgaactaacttccagagctggaaaaaaatttgatcgtcgcgatatcacaattgtcgacgattctgggttttctatctcagtcggtctgtggaatcagcaagcccttgacttcaacctccccgaaggttctgttgccgccatcaaaggtgttcgagtaacagattttggcggaaagtctttatctatggggttttcaagtactttaattcccaatccagaaattcctgaagcgtatgctctaaaggggtggtacgattctaagggacgtaatgccaacttcatcactttaaagcaagaacccgggatgggcggtcaatcagctgctggcttaacgaaatttattgctcaacgtataaacattgctagggctcaagccgaaaacttgggaagaagtgaaaaaggtgattttttcagtgttaaggctgctattagtttcttgaaggtcgacaattttgcatatcctgcctgttccaatgaaaactgtaacaagaaagtcttggaacaacctgatggtacttggagatgtgagaaatgtgataccaacaatgcaagccctaattggaggtacatattgacaatctcaatcattgacgaaactaaccaactatggctaactttgttcgatgaccaagctaaacaattgcttggagttgacgctaatggtttaatgtctttgaaggaggaggatcccaatgaatttacgaaaattacccaaagcatccaaatgaacgaatatgactttaggatcagagcacgcgaagatacatacaacgatcaaagcagaatcagatatactgttgccaacctacacagtttgaatcacaaggctgaagctgattatttggcagacgagttatccaaggctttgttggcttaa

SEQ ID NO: 66 - DNA, 921 bp, Saccharomyces pastorianus
atgtcaattacaaagactgatttggacggaatactgccattggtggccagaggtaaagttagagacatatacgaggtggacgctggtacgttgctgtttgtcgctacggaccgtatttctgcatacgatgttatcatggaaaacagcattccagaaaaggggattttgctgaccaagttatcggagttctggtttaagctgctctccaacgacgtacgcaaccatttggtggatatcgctccaggaaagaccattttcgactacttgcctaaacaattgagtgagcccaagtacaaaacccaactggaaggccgttctttgttggttcacaaacacaagctaattccattggaagtcattgtcagaggctacatcaccggatctgcttggaaggaatacgtaaaaactggcaccgtgcacagcttgaagcagcctcaggggctcaaggaatctcaagagttcccagaaccaattttcactccttcgaccaaagctgaacaaggtgagcatgacgaaaacatttctcccgcccaagctgctgaactggtgggtgaagatctgtcccacagggtggcagagctggccgtaagactatattccaagtgcaaagagtacgcaaaggaaaagggcattatcattgctgacaccaaatttgaattcggtattgacgaagagaccaacgaaatcatcctagtggacgaagtgttaaccccagactcttccagattctggaacggtgcctcctacaagctaggcgaatcccaagattcttacgacaaacaatttttaagagactggcttactgccaataagttgaacggtgttaacggtgtggaaatgcctcaagacatcgtcgacagaaccagggccaagtacatagaagcttacgaggcattgacgggctccaaatgggctcattaa

SEQ ID NO: 67 - DNA, 1317 bp, Saccharomyces pastorianus
atgcatagacgacagtttctccaagaatatcatagcccgcaacagcagcagcagcagcaagggaatccacctagatcggattatcaagttctcgaagaaatcgggagaggttcatttggatccgtacgaaaagtcatacacatacccaccaagaagcttttggttagaaaggacattaaatatggtcatatgaatagcaaagagagacagcaattgattgcggaatgtagcattttgtcacagctaaagcacgagaatattgtggagttctataattgggacttcgatgaacagagagaagtgttgtacctgtatatggagtactgttctagaggtgacctgtctcaaatgattaaacattacaaacaggaacacaaatacataccagagaagatcgtgtggggtatcttggcgcagctattgagcgcgctctataaatgtcattacggtatcgaattgccaaccttaaccacaatatatgatcggatgaaaccaccagtaaaggggaaaaacatcgtcatccatcgtgacttgaaaccgggcaatatattcctcagttatgatgacagtgataacagtcttaatgaggaagtcgatggccacggtgaagtgaacaataactactacagagaccgtagagtaaattcacgcaaaaaggggagtgctatggactacagccaagttgtggtgaaactaggtgactttgggctagccaagtccctcgaaaccagtatccagttcgcaactacatatgtgggcacgccgtactatatgtcacctgaagtgctgatggaccaaccgtactctccgctatccgatatttggtcattgggttgcgtaatattcgagatgtgttcgttacatcccccattccaagccaaaaattacctggagttacaaactaagatcaaaaatgggaaatgtgagactatccccgagtattactctaaagggcttaatgctataatccattcaatgatagaagtgaacctgagaaccaggccttccactttcgagctgctacaggatatccaaatacggaccgcaaggaaatctttacaacttgagagatttgaaagaaaactattggattacgaaaatgaactgacaaacatagagaaaattttagagaagcaagccatggaatacgaaagagaactgagccagttgaaggaacagtttacacacgccgtggaggaaagagccagagaagtagtgaacggtaaaaaaattggcaaagtcccagaatctattaacggatattacggtaaaaaattcaccaaacctgcataccactggcaaacgaggtaccgttga

SEQ ID NO: 68 - DNA, 2925 bp, Saccharomyces pastorianus
atgaacagcatggctgacactgatagagtcaacctgacgccaatccagagggcgtctgagaagtctgtgcagtaccatctcaagcaggtcattgggaggggctcgtacggcgtggtttacaaagccatcaacaaacacacggatcaggtcgtagccatcaaggagatcgtgtacgagaatgacgaggagctcaacgatataatggcggaaatcagccttttgaaaaacctgaacaataacaatattgtcaagtaccacggtttcatacgaaaaagctacgagctctatattctcctcgagtactgtgctaacggctcattaagaagactcgtctctagaagtcccactggcctgagcgaaaacgagtccaagacctacgtcacacagaccctttgggggctcaagtatctgcacggcgaaggtgtcatccacagagacatcaaggcagccaacatcctgctgagcgcagataacaccgtcaagctcgcagactttggtgtctccaccatcgtgaactccagtgcgttgaccctggcgggtacgctcaactggatggccccggaaattctgggcaatagaggcgcctccacgctcagcgatatatggtccctgggagccaccgtcgtcgagctgctcaccaagaacccgccataccataacctcacagacgctaacatctactacgcggtcgagaatgacacctactacccgcccactgcattctctgaatcgctgaaggactttttgtccaagtgcttcataaagaacatgtacaagagacccacagctgaccaactgctcaagcatgcgtggattacctccacggaaaatgtaaaggttgataagctcaacaagttcaaagaagacttttctgacgataactaccattgggattctgactttcaagaagaaaaactagacatatctccgtcaaaattcagttcggcggcggcccccgctgcctggacagaaaataatcaagaaatggagttagtcccccagactgagatccatttgttgggccaattgaagagcccgtccaagcctttgacggacttgcacgggcttttcagtgtttgctccctcgaaaacatcgcaaatacagtcatcgagtgtttatcccgtacgactgtcactgcacactcaataaccacatttggctccatcttcgcatatgacacagaaaataaccactctcgcttgcgactgaaattcatcgccatgggcggaatcccctcgataattaagtttgagtatctagtcaagtattttgtcaacgaccaccctcagaccctaattgaatgcggaataatgcatccggtaaattttgcatcgttgaaaacccctaaatgcgtcttggaactcgtttacaggtattatgacttgacttctactgccttttggtgttgctggtgttctcaacacctcagcttatcgctccttcttaataacatgcacgaaagaagagcacaatcaataattctaaaactatcatcgtacgcaccgtggtctttcgaaaaaatcctgccctctctgatcaactacaggctgaaaaaaaaaattctatccaaccctcaaaccacttacatagtcttcaagtcaataaattatatgataaccacaaacgacgataaaatccacaggtccaccgccccctcttcgtcctcgttaccattgtcctcttcgcccacaaaaaacacaccattgaactcggtaccgtctccctcgaggtctcccgttcactctttgatggcaacacgcccatcgtctccaactcgacacaggagcgtttcgaacttcccgcatttgaccatctcttcaaaatcaagacttcttatcgacttaccggagggctttttcacctggctaacttcattttttgttgacatgcttcaaatcaaagacgtttctgtttggaagtactttatcaaactttgctacctaacagtacatttaaacaaaacgctgttgaacgacctgctcgataacgatgcgtttttcgttttcattcagaacattgacaccatcaccacgtccgacgatggcaacaagaattcatccttcatttggaaacaaattacggccatatgcgttgatattagtttagacatggaccaaatgaacctctccttgttttcaacggcaatgggtttcattaaaagaagaaactacacatctattagcgggttggagatcgtattgaattgtttgcatttcacattacgcaatgcgtctaatgaagacacccctacggcgatcacagaaggctctcaaaattgtcttctcatcaaggttaaagataattctgccattgaactgccgattgatcaatttgttgccctattttatgaattaaatgacggtgatgttaatctcagtaaactaattagcattttcaccaagatatgttcactccccggttttgaaactcttgcaattgacatcatattacatccgaatttctatgacaagattgttctgttttttggtacttatttcaacagtctacttattcaaatcgatttattaaaattcgtgaaattgatatttacaaaatcgttgttgaagatgtatgattacacggggttgccagatccgataaagcaaacgaaatcgactcatcacagtaaagccactattttcaagcttcgttcaatactagtacaaataactgagtttttgaatagaaactgggacaagaaccatccaaaaaggaacgccaaccaggttggtggtgactcggttctgatctgccaactatgtgaagacattcgttcattatcaaaaaagggaagcttgcaaaaggtacccagcgtcacggcagcaattggcagttcgccaacaaaagacgaccacgcaaatccgcgatcttctagaccaaacagtgatggatattccgcaccttctatcacatcccaaacttaa

SEQ ID NO: 69 - DNA, 591 bp, Saccharomyces pastorianus
atggcggaaaacgaacgtacgtttactgcacctcagagcttactcgattccaaccttacctttctgaacgatgaaccgacacctactacaatcactctcacacgagaacgatgcgttgatccaagtttaataaactcatttctaaggattttaaggcatggtagtgatgatgtaataagacagaaattgaacaattacagaaaaccttcctctatcagcgaaaaaaagtgtgacgcatttttaaagcaggaactatatccaaattggcaaatacggagcagtataatttcattctgtgatcaagaagcaacgcaaatgaaagctgagacagaccgaaaattcagcaacactggatcgagtgccacaggaaccattactgatgctagaattgacccttacgcagcgagggaaaaactagaggatcaagaggctcgatatagggattggacaagagtaaaggaatgggtggcgaataacgaaaaaatagaacaaatcttaacttctacaacagataggattttaagacaaaattgcgagcaaaacaaaaattacttggaacagtttgcacagttctgtaaagacaacacctga

SEQ ID NO: 70 - DNA, 3033 bp, Saccharomyces pastorianus
atgtttagaaaaagcagacgtttaaaacatgtgtcaaatgcaatcaaatccgcaagagttcatgatgtctcaaatggtatcgactctaaagtttttgatgctaaaaggataactacgtatggtattaatggacggataattatgactacgtttgactatacccaaagtcttctggctgttgctactaccgcaggcgaaatacacatctatggccaaaaacaaatcgaagtggtattcacgctaaaaaatagggctcaaattaaggacatgaggtttgttaagggaatatatttgatagctgtagatgataaaaacaacgtattgattctttcagtatattccaaacaagttttgaccactgttttttgcccaaacaaaatcacctgtatcgaaacggatccatcgctagactggctgctgatcggtcttgaaactgggtcagtaatgatatatgatgtgaatagaaaccaaatgtccaaactgagaattgagaacttccaaaaaagtatgtttttaccaaaagagagactatcacccattgtgtctattcagtggaatcccagagatataggaacagtgttgatatcatatgagcatgtcaccgtcatatattcatttgtagatgctactattaaacaacatttctactatcaactagaaccatacgcaccaggcggtgacctatctacaaatatagaaaagagaaggacgccgaaggtcattcaatcactttaccacccaaattcgttacatattttaaccgtccatgaggataattctttagtgttttgggatgtcagcagtggtaaattggttcaagcgagaagtatattcgaaacacatgtgaatttcccaaattccacttcaaaagatgactccttgagagaaagtctagccattctcaaagttgcatggctttgccagcgtaatcctgaatatacatcattactgattgcaacaaaggctacaaacaatctcggctccccacaggggctaataatgatcgacttgggcggcacacctatgtattctattacatcgttcgatgcaatgagcaagtactatgctaaaccggtacagcaaaagctattctcatttgtcggcaaggcgccccttataaacttcctgcctttgcctaagggttcgccatattttggtggcggccatgatacaaatcttattctattgcttttggaagacggtgaacttgaaacattaatatatccaacaggatctttcagttctagggcctcgatatttccccgaagtttagcttgggtcagaccaacagttaccacctctgtagctgagtcagtcccaaagaaattgtggctaggaatgatgacaagcgcacaaagtgattcgtttctcaaaggcgggattcctgcgatgagacatatcagaaaccatgaaaccagatctgctttactgactggccatgttaatgggtcagttagaatatgggacgcttcacatagtgaagtaactgacaatgccgtgtttgaagtgagtactgctaaagtgctcaatagaggtgccactctggctatagagaatatttcattcgcaccagaaactttggaactagcggtagcatccgaagttggtgatgtgattcttttcaaattcgaaacaaatagattttacggacattcacacaggagtgacgccttggaattgaaattcagcagattttcactagatgattcgaacactattcttgtcgatgtcagagatagaggtccctcaaacgttaaacaagggtttatgccgagtacagtgattcatgctaaaaaaggcgtagtgtcaacggtcatgaatagtaacattggattcgttgctatcggttataatgaggggacttttatattactggacagaagaggccctgctattatatttaatgagaacattaggttaatatctaaagctggtagctcctacgtttctgcggttcacttctgtgtcatggaatatggaaacgatggctactctagtatcttgatgctttgcgggaccaatatcggagaaattttgactttcaagatactacctgcagttggtggtagattcgaggttcaatatattgatgcaatgaaaaccaataatcaaggcagaattgcgaagatcgactcttttgcgaaagaaactggatacagttgttgtgctaccattaagaagatgcaagatttaagtaagggggtcccaatacctggttttgccacatccagtggtgcagctgatattcgcctgatatcaccaggtaaatctaaagatactcatgtactgttcaagtgtcccattgcggccagtggattgtcgtttattcctattttaaatagtaagggagagagcaagctcgcaactattatgattgccttactagttaatggagatataaaaattttgacggtacctgagcttaaggaagtcaaaaacgcacactgcccaatccccgtaactgcccaatatattgaaaattcttctgtactgcaaaatggtgatatagtgattcgcaacggtaaattccaagcatctttaatttcagtaattgacgaaagcgccaccggaacaaactccaatattgatacttcacaatctacccctattgatactttatacaaccctgatctgaaaattagttacagaccccaagttaactctttacaatgggcaagaggaactgtttattgcactccatatcaacttgatgaactacttggcggtatcgaaaggcccgaatcaaaatatgaggagagtgctattgctcaaggaaccatatctgacggcagaaatagcaaaaccgaaaaatcgtttgtcgggaacggtgaacacatgtacgccaaacctgtgagaaataaggccaaaagcggtggatatggtgttcttaagagtgtaactagagcagttgaaacacgtctagacacagtggaaaccaccatcaatgattacgcaaccacgatgggccaaactatgaatgacgctatggaagaaacgggaagagacctcatgaagaatgccgtgggtttttag

SEQ ID NO: 71 - DNA, 3420 bp, Saccharomyces pastorianus
atgagtttttcacaactggagcaaaatatccagagaaagatagcagtcgaagagaatattattcggggagcttccgccctcaagaagaaaactgacaatgttatggtcattcaaaagtgtaacactaatattagagaggcacgtcaaaatcttgaatacttggaggataatttgaagaaattacgaatgaagactacccaagaacatcaaggtcaaaatgccgatgaaaataatgatcaaagaaattctaaagaatacggattccttgctaccatatctctggaagaacatatcttttctcgtttggatttagtgaagtatgattgtccttcgttagcgcaaaagattcagtatatgttacaacaattagaattcaagctgcaagtggaaaagcaataccaagaggctaacaccaagctgacaaaactgtaccaaattgatggtgatcagcgtagcagttctgcagcagaagggggtgccatggagtctaaatacagaatccaaatgttgaataaaattttaaaaaaatatcaagctattaatgttgatgttggccaatttaaacatcaaggcaacgacatgatcgataaccagcagccaaagtttagaagaaaacaattaacaggcgtcctgactatcggaataactgcaattagagacgttgatcatatacagtcgcctatgtttgccagaaaaccggaaagttatgttactgtaaagatcgacgatacaatcaaggccaggacaaagccttccagaaatgacagatggagtgaagacttccaaatttcagttgaaaaggggaatgaaattgaaatcaccgtttatgataaggtgaacgattcgttgattccagtcgcagtgatgtggttactgctttcagatattgctgaagaaattcgtaagaaaaaggctggacaaacaaatgggcaacagggctgggttaacgcatcaaatattaacagcagttcatctttaactaatgaggaggggagtactttaacgtccactaactccaactcggccattcagtcatccttgaccaaaaatgtacaggaagacaatgcactaactggccaaattagtacgaactcgtggtttgttttagagccatctggccaaatattattaacgttagggttccacaagtcttctcaaattgaaaaaaagcacttagtgggtggcctgcatcgtcatggtgctatcatcaacaggaaagaggagatatttgagcagcatggccatcatttcgtacaaaagtccttttacaacattatgtgctgcgcatattgcggggattttctacggtatactgggtttcaatgccaagactgtaaatttttatgtcataaaaaatgttacaccaatgttgtcactaagtgtattgctaaaacttctactgatacagatccagatgaagcaaaattaaatcatcgtattccacatagatttgtgccaacttcaaatcgtggtacgaagtggtgctgccactgtgggtatattttaccctggggtagacataaagtacgcaaatgttctgagtgtggtataatgtgccacgctcaatgtgctcacctagttcccgatttctgcggtatgtccatggaaatggccaataaaattttgaaaacaattcagaacacaaagcatagccaaaaaaaaaagaagaaaacagttccatcccataccggatcatcaccttctactgctactggaagcgatcgatctccaactaaatttatagatagaacaaacgctcccttaccgccccaaaaagcggaaagagactctccgacgagggagcgtgaacctattattgatgaacgaattccattaaaaacaggcggacatgataaattgaatagatttattgatgagaacgaggcttatttgaattttacagagggtgcccaacagtccgctgaacttttaccagaagaacaaactttagatccaacattgaacaaccgttttaccgaactcactgacttgtctatcgaacaaagccaaacgtgggaatccaaagatgaatcaatgagggatgaactcgaacagtggaaggcccaacgtgacgaaatggatcgcgaaataaataaagacaacagggacataccagaggacacggaagtcgatcatatagatctagaaactaaacagcaacttgattgggaggatagaaacgagtttcgcgatgcggacttgacaattgattcttcacacacaaatcctttccgcgatatgaatagcgagacttttcaaatcgaacaagaccatgtctctaaagaagtaatacaagaaactgtgtctttagctcctacaagtacccatgcctccagaactactgatcaccaatctcctcagaaatcacaagccagctctggcggcaaactgaaaaagaaagccgctaagcgccgtaaggtgtcattggataattttgtattattaaaagttttaggtaaaggtaattttggtaaggttatcttgtctaaatcaaaaaatactgacagaatatgtgctataaaagttttgaaaaaggacaacattattcaaaatcatgatatcgaaagtgccagagcggaaaaaaaggtgttcttattagctaccaagactaagcatccatttttgactaatctattctgttcctttcaaaccgagaaccgtatttattttgccatggaatttattgggggtggggatttgatgtggcacgttcaaaaccaaaggctttctgttagaagagccaagttttacgctgctgaagtgttattagctctgaaatattttcacgacaacggtgtgatatatcgtgatttgaaattggagaatattttgttgactccagaaggtcatataaagattgccgattatgggctatgtaaagatgaaatgtggtatggtaataagacttccacattttgtggtacaccggaattcatggcacctgaaatcttaaaggagcaggaatataccaaagctgtagattggtgggcatttggagtattactatatcaaatgctattgtgccaatcaccattttcaggcgatgatgaggatgaggttttcaatgccatcctaaccgatgaaccactatatccaatagatatggcaggtgagatagtacaaatatttcagggcctcttaactaaggatcctgaaaaaagactaggggctgggccaagagatgccgctgaagttatggaagaaccattcttccgcaacatcaattttgaagacatcttaaatcttcgtgtcaagccaccatacatcccggaaatcaaatcacccgaagacacatcatattttgaacaagagttcacctcggcaccgccaacacttacacccttgccatctgttttaaccactggccaacaagaggagtttagaggattttcctttatgccagatgatttggatttatga

SEQ ID NO: 72 - DNA, 648 bp, Saccharomyces pastorianus
atgagtgaagaacaaccttcaagccaggttaacggtctgcgtgactcgttgaatagatggaaccaaacaagacaacaaaattcgcaaggtttcaatgagtctgccaagacactgttttcgagctgggcggactccctgaacactaaggcccaggatatataccagacattgcctgtgtctagacaggatctggtgcaagatcaggagccgtcgtggttccagttgtcaagaacggaaagaatggtgctcttcgtgtgtttcctgctgggttcaactgcatgcttcactctttgcatctttctcttccccgttttagctaccaagccaagaaagtttggtctattgtggacgatgggttccttattgtttgtatttgcatttggggtgctgatggggccactggcttactttaagcatctgacttccaaggaaagattgccgtttgccgttttcttttttgccacttgctttatgacgatttattttgcagcctttgccaaaagcaccgcgctcactataacgtgtgccgttctggagctaattgctgtcatatattatgcaatttcttatttcccgtttggtgcaacaggtttgaggatgttgagctccgttggtgtcaactccgcgagaggtgtcctacgcatataa

SEQ ID NO: 73 - DNA, 3399 bp, Saccharomyces pastorianus
atgccttttatatcatcgagatcagtggcgaaaaattcctcgcactctttatcagaaacagatctgaaccattccaaaggacaactctctcaagcctcccccacagagaaatcagggtccatgcagcaacgaagaagatcctccaccatcaagcatgcgctgtcgtcgtttctcggtggtgcagccgctaatgccacctcaaattccatcttgcccaaaagtgtgaaaaacggcactaccaacttcaacatcagaagcagccatacagacgcccaactctcgggtaaaaagcagaacaaacagctaccccaagaagctagacgacatagcactaccgccgttacaggccctaacaatgataacggcaccacctctccgaggtcctcgacctcggacactaaccgccggtccctgggacggtcgtcggtagatcaggaccctcggaccgcaggcgttcgctattcgcagattgaagaggatagcgaggtcctggattccgacgatgaccacaattcatcggccgtggtgtcgagcgacctatcgtcggcttcctatacaagactgactagctcgaaaaaaaaattcaataagcaatttttgtcagaatatctaaccgctagaggtctattgagccccaaagcagttctttcgaatgacgacttgaaaatttccatctccacgagcggcgaaagcgttttcttaccaacgatatccacgaacgacgacgagtatttgactaggctcaacgggctcaatgacggagcagacgatgctgaagctgattttttcctggatggtcaggaccagccagacagcaatggttctgttcccacaaacaatgacctgcccgcgacgacggcggcacaggtcgcaggaagtggcgcggcaaatgccaatagggacacacttctgagagagaatacttcggaggagcgtccaaacttgacttctgattccacttcaaggtccgttgaaatcgacagctccatggtgtcgtatagcatagccgttataatatctgtcaagaaacaaaccagatttgccgacatacaactggaactatgttcgagggttaaggtgttttggaatacaggcgtgcccccaacaaagacatttaacgaagaattttataacgctgcatcgatgaaatggaacttgaacagcgaaaatttcaatttgtttgtaccgttaagcatctctccagatgaccagatgatcgaaaataacaccaacgatcgtcaaatgagacttttcaaaaacaaacccgtacaagaaagaacctacttggacaagacgaaaacgaaacaagacctcctaggcactatcgacaccaaaaaaaactacctgtaccaacctggtgattacgtgttcttggtaccggtcgtattctccaaccatgtcccggaaacgatttacttgccctctgcacgtgttgggtacagactgagacttgctacaaaggtagttaataaaaaaggcttctacaatcaagatcctaatccccctcaattagccgcatcgcctgattcttcttcgtcgctaagctctacttcctcttccttaaaactcaccgaaacggaatctgcccaagcacacaagaagatcggaaatgccctattccataaggtaaagaatcatttgcatatgagttcacatcaacttaaaagcgaaggagctggcgaggaggacgtttttgcagagtacccattcaaaatcatcagaacgccaccacccgttgcagtgtccactgcgaataaaccgatatatatcaatagggtctggacagattctttgtcatacgaaatctcctttgctcagaaatacgtgtcattagatagcgatgttcccataaagatcaaattggcaccaatttgcaaaaatgtttatgttaaacgtattcatgtcagtgtcactgaaaaagttacctttgtcagtaaaggttatgagtatgaatacgatcagacagatcctgtcgccaaagacccgtacaacccttattatttggattttgcctccaagagaaggaaggaaagaagtctatccttgtttgaaatcagaaccaaggaaaagggtggaagggcgctacgagaagaaattgtggagaatgcgttcaatgataatcttttatcttacagtcccatagatgacgacggcgatactaaaggcaaccaaagggaaagaattggcattacggagccaataattattgaaacaaatttgaagttccccaaatatgaagatttagataaaagaaccgctaagataataccaccttatggaattgatgcatatgcaagtattcccaatctcgaacatgctccaactaacggaccatctcatcgtcgtccaagcgtgataggatttttgtcaggtcataaaaactcaaagactcatgacgaaaatgcaaaaactgtttatgattcaaaattccacgaaacaagaatcaagaccaattccggcctgcctgtgaaatcacatacacggttaaacaagcccaaaagaggtttatatctggacagtttacatttcagtaacatctattgtagacacaagttagagatcatgctaaggataagtaagcctgaccctgaaaatccatccaaattaaggcactacgaagtactgatcgacacccctatattcctcgtatctgagctatgtaacagtggtaatatggaactacccacttatgacatggctacaatggacggccaaaataaccacactcctgctagtgtgaataatgatttttttggaaacacatgtccacctccaccaactttcgaagaagccatatctgttccagcttcccccatcgtttctccaatgggatcgcctaatatcatggcatcatatgaccctgatttactatccattcagcagttgaacttatcaagaactacgtctattagtgggccatcaggatccaatgacgagagtagtttaatgaacactaaccgtaacagtatttcgaacggtaatgcaatgaacggaaatattacaaattccgcgtttgcttctaacaacagcggccagggtgtcgccagggcaagagccacatcagtcaacgataggtcaagattcaacaacctcgatagattattgagcacaccatcacctatcaatgtgtcgaatgtctcttcaccagtaaacggctcatcacaagggtatggggatgccaccatacgaaattcaaactctttctctgaagagaaagctgacagttcgaacgcttttttcaaaaagggttacaccctatcaagtgtaaaagacgacgaagaaaaagatggaatagttagttcgagttcggcagaatcattaatttctcgtggtaacgagttattgaacgagccaccacgttatgaggagatagtgcctttgatgagcgacgaggagtag

SEQ ID NO: 74 - DNA, 669 bp, Saccharomyces pastorianus
atggcctcaagcgtagacgaaagcacgattccctcataccactattacgtggatccagaaacaacgtacacgtatcaacagccaaaccctctacaggacttgatatcggtgtacggcctggacgacatctccagacaagtggcaagaacgaacgtggacggcacgaaagccgtgaaactgagaaagtcttacaagaaccaaatagccgatctttcaggaaaattctccaccataccgaccagagaaaatggcaagggtggccaaatagcacatattcttttccaaaataaccctgacatgatgatacaaccatcccagcaggggccgggtcaaaacatgtcagaacagcagtggagcgagcagctgcgcaatagggacatcgcattattccagcctccaaatttcgattgggacctttgctcttcggtgctgtcgcagtttgagagatcatatccaagcgagtttgcgaaccaggctcagggtggcgctcaagcgcctttcgacatagatgacttggcattcgatctggacggtacgggcaaaagtcaatcgggttcaactgcgaacgccaataacaagaaaaggaaaaacaaatctagcggtagctcgatggctacaccaacacatagcgatagtcacgacgacatgaaaagaagaaggctggagtag

SEQ ID NO: 75 - DNA, 1269 bp, Saccharomyces pastorianus
atgtcagatggcaaagtagaaaatgctactgtatcagaattgaaggaattacatttagaaaatgaggctatcgagccgcaaggcgaaaccatagttgacgaatcaggcccaacggaaaataagaagaagaagaacaagaaaaagaagaagaagaagaagagcaatgtgaagaaaattgaattgctgttcccagatgggaagtatccagaaggtgagtggatggactaccaccaggatttcaatctagaaagaaccactgacgaagaatcccgttatttgaaaagagacttggaaagggccgaacattggaatgatgttagaaaaggtgctgaaatccatcgccgtgtgagaagagtcatcaaggacaagatagtcccagggatgaagttaatggatatcgccgatatgattgaaaattccaccagaaagtttaccggtgcagaagacttattagcgatggataatccaaaatctcaaggtatcgggttccctacaggcctttcccttaaccactgtgctgcacatttcacaccaaatgcaggcgacaagaccgtcttgaaatacgaagacgtgatgaaagtggactatggtgtacagataaacggtaacatcattgactccgcatttaccgttgcgtttgacccgcaatacgacaacttgctggctgccgtcaaggatgccacttacacgggtatcaaagaagccggtatcgatgtcagactgactgacattggtgaagctatccaagaagtcatggaatcctacgaagtggagatcaatggcgaaactttccaagtaaaaccctgtcgtaacctttgcgggcacaatatcggaccgtatagtatccatggtggtaagtccgtcccaattgtcaagaatggggacaccacaaagatggaggaaggtgaacatttcgccatcgaaacttttggctctactggtagaggttatgtcacttccggcggggaagtttcccactatgccagatctcgcgacgagcaacaagtaatgcccacattggacagtgccaaaaacttattgaaagtcatagaccgtaactttggaactttacccttctgccgtcgatatctggacagactgggccaagagaaatacttatttgcattgaataacttggtcagacacggtttagtgcaggactatcctccattaaacgatattccaggctcctacaccgcgcaattcgaacacactattctgttgcatgcgaacaagaaggaagtcgtctctaaaggtgatgactactaa

SEQ ID NO: 76 - DNA, 534 bp, Saccharomyces pastorianus
atgttgaggagctcgtgtaggctttcaaggtcctctttaagaagaaattttacaaccgcaggttttttgcgtcagcaaaactctgacatcgacagaattatattaaatccaatcaaactggctcaagggaacaagaacaatgatggccaagcttctaaactcaatagtaacagcgcagatatactatcgatggaaattccaatagatatgatgcagtcagcaggacgaatcaacaggagggagcttctatctgaggcagagattgctaggggtagtgtggaaaacgctcaaatgagattcaattcagggaaatcaataatcgtaaacaagaacaaccctgctgaatcattcaagaggttaaacagagttatgtttgaaaataacattcctggagataagaaaagtcaacgattttacatgaaaccaggaaaagtggctgagttgaagaagtctcaaagacatagaaaagagttcatgatggggttcaaaagattaattgatattgtgaaagacgccaagaggaaaggatactga

SEQ ID NO: 77 - DNA, 8370 bp, Saccharomyces pastorianus
atgaatgatcaccgaatcatggatgcattatacttgttatcctcgaccaaaataaaagaaagaaacaatgctttagacgagctaacaaccgttttgaaagaagatcctgaaaggataccgactaaagttttgccaactacagcggatgctctggtagagctacttgcatctgaacacacaaaatactgtgaaatccttcgaaacttgacggatctaacaaagaacaagttatcactaagtgaaagcagattatccacagtatcatatgttttaagattatttgtggagaagacatgcacacgatttaaagtgaaaacaattaagctgcttttgtcagtagtacctgaattgatggtcaaagagaactccaaaagtttattagatggtgtttcagtccacttgtcgtttgccctggataccttgatcaaaagtgaccctttcaaactaaaattcatggtacaccaatgggtgtctttggtggacaaagtttgtgaatatttcagccaccaaatgcaaatatctatagtcgataagacacttactaattttatatcgattcttctaaacttattaacattagatacagtcggcatttatcaggtgacaaagacaatcatttggagcgttatagactttctaaggctcaataaaaaggaaaatggtaatacaaggttgataatgtccttaatcaaccaattagttttgaggtgccactgcttaagtattattgatatactgatgctcattaaggaaacatggaattacaatctcacaatcggacatacttccaatgaatcagtacaagaccagttatcactgttcgatgttacttcgagtgaactaatgaaccaaaaactgccctatatgattggccaagagagctacaaagaagagcttcgttccgaatcatttctgtctctataccgcgaatacattcttttacgtttgagtgattacaaacctcaatcatttacattagactacattgaatgttcaagttttcgagattcagacgataaaaagtcgtggtttgaactgtgtgatttcaggcttaaggatagtaatggtacatctgtttggctaaaaatactaggaataacaaaatcactgttgacatattttgcactgaacagcaaacatgaaaatacatctttgttatttaaaaagaggagatgtgattcggatataacttctattctacgggtctcagacgatatggacacatttcttatccaccttttgcgggaagaaaactcacacaaattggaattgattgggctacagttgtgctcattttatggagcactaaaagatttcactcaaagttttactatgcagttgaaagaacttctcttttctaaattcgagaaagttcaatcatttaatttggtatgttttacattcatccctttgctatcccaacaaaaatgtaaaatcagtaatgatgatatgacgcgcttattcaaaatttgcttaccattagtgaaatcaaaagaatcatgccagattagctgtcttttgctagttaacgcaataaaattttcgaaacaacttttattagacgagaaaaccgttaatcaaatttatgatctttatgaattatctgacatttcaggacctatattaatctctaatgaatcgttcatgctatgggggtatcttcagcattttgggaaagattttcaatctataaatggttcgtcctcctctgatagaatctttgtgtggctaaaatcaaagtggaaccaattgcatgaaattgatgataggcaggatctgttccccaatttcatatcttggttaggcaacaaatatgatacaaaagatccatttaacgatagaaagtgcaggagaaaaaagccaattttaccattttgggatgaaagctgtcatatttggcagcactttcagaaacagcgggaatttcttcttggtataaaatctggtgaaaaactgaaaagttatgatacacccttctttaatataccaaaagtagccttgaaccttaccaggtacaacgaaattatttacaggctactggaaaatatcgaaaacgaaacatcgctgtcacctctacaaaggtttagatgggcggcaaaaatgctacaaattgtagacaatctctgtggagactctactttttctgagtttatatcagcgtataaaagaacaatttcattaactcttccacatctcactttcgataatcttgcctcttatggattattctttgaggaggttttgtcaatacacacggcaaatgtcaaccacttggtatttgataaaattgatatgaagggcattgttatcgatttcattagaatgcaaaaaagcaaatccaggacaggaacttctatcgttaatcattttcaagcctcctctgaagacggcacttgggatcttagcccggatgcgagaggacgtaagttccaaggacgttaccactcagatatggataaagcatttcaagcttatctttgggcttcagaggggagaaacgtttcggagcgtttggttgctatattggaattctctgactgtattacgaccgatatattcatgtcttgccttggcgctttttgccaatggctaaagcaacagattgcggatcattctccgtataataaagttttagaggaattcacagaagctctgggagaaaagttgctttgcaatcattatagttcttccaatcaggctatgtatttgcttacctcatatatcgacggaattagacagcagtggctatcataccctgacaaatccttgaattccgattgtaatgatattctcgactggataatatcaaggttcgaagataattcgttcactggtattgcacctacgattaacctgtccaaactactactcaacctacttcaataccacgatctttcccacggatcagtcagaggggggaagcaaagagtatttgctacatttaccaagtgcttacaaagggtagattcatgcgcaattattaacgaattggacatcatttcaaactacatggcccaggtgagctacaaaaatcaaagtataatattttctgaagtcaaaaacttgtttggttcccctcagcagagtcttgaaaaatcagccttttactcacttacaatgtctaaattatcattagtttcttacccaagcttggtattttctttggaagatatgatgacatattcaaactttaaccacacgcgcacgtttatcaaacaagcattgaaacaaatagcaagtgatttaaaccatcaagatcttatgcagctctttgagttctgcaagtttgatctaatcatgtactggtttaacaaaatcaaagttcctaatgccaaacttgaaacagaatgggatatatctctgtttgaatttgatgatatgcatcaatttttggcaaaatatcttgttgagatttctgcaatatatttttctcacggttttaatgaaagaaaagtcctgaaattattacatgaaatttccgaacatgacgatgcctacctggttgaaaatagctattatctatgcataccacttgcctttatcggtggcggtataaatgaactagtattcgatataatacctcaaatatcaggtaaaacaacggcaaaaaattaccaaaaataccgtttgttaatgctaaaatggatcataaggtttacagacctaggctcgctaacagaggttcggtcaatcattgaaaaactatatccagattcctaccttgccaaatatttgtttgagaattctactgcgtctatgaggtaccaatacccacttcatatacctttaattgccggaacaaacttaatccaaaaacacttttctaatgaagaaaattccgctcaagaattcaaactgttgtttctttcagttgtcaccgaccttgaagaagcgtcgactcatacaggaaaattacgaagtgtcagggaattgaagtatctctttgtgatatatgaaaatatacttttaaactcaacaatctcgaactttatcatagttcgactttcaaagtttttggttgatatacaaatccatgatgaaattatcacaattttcaactcaatttttaacctcgttgacaaaaatatgcttatggtagaacggtcgttgtccatcttcttttgcaaagttttcatatatttgagagagaacaataaagaactcaatccgtcctttaaaaaaactataaggcttatagagcactggaacctcatgaaaaaaaagacttggaaacactgccttgatgcgatactcggaaatatgattcaagatgacatatatgaaaacactgaggtattggaagcgagtgattgtgctacaaacgacgttatattactttctttacttttctcacacgctaggaaaccagtaacgtcaaagatagattatttcgtttctagtacatttgcgtgtaacattctaaaacatcatgttccgaaggaatatctcagtctaaacttcaaattgtggttcgcaaatctcgcgaataaattttcacaggaagaagtaaaagtaaatacttcatcagctctcagcagtgatagtcatctgaaaaattttgaggtcgtatttggtcatcctggtttaccgtacacaatatacggacgtctttcagcgtttaataaacaagccgaattatatagttctaccagaacattctttctttcggagtgtattatgacgtacttggtgggttattcaattgataatacaggaagcgagtttggcgttactggggaaattttagatgaaaacaaggacaaaattgctccattggataaggacgtgttgaacgctatgcacccattaactagtggagctcaaatggatacatttctacacaattgctatgcctcaccaaacgaaccatatggcagttggatagccaagtttgcttgtggtttagttcatcacatctcatttaatataccccacatagtgtgtttgtatcctttgtgcaaagaatcaagcactttttgtgaatcagtgcttcaagatttatttttcctttcgatgacatttgatccaaagagctgtttaaagtggattaaccagatattttcccaattatcaatactgctaaatgctaaagatttcaaaataaagttgaggttgctttttagtgtagtaaaaatgataagaatgggttcaagatataaagaaagaaactgtttgcgtgcttattcctgcttggatttagaaaatatttgtcaaatctctcttcaaatagaagaatttgaattcggttatttattatttgaggaaatgaacatgccaaagaccgaagagatgaatataaacacgcttcaaagaatttacgaatccataaatgataatgattttatagcaggtttgcccgttccacattcaatcaatggagttttaaactccattaatagaattgaatcaaatacatggaagcgttttctcttcaataacgctgactttgatgcaaactataccggttcatctaaagaagaaaaagggtcattaattaaggctacagaagagagcggtttctacggactaacaagtttattagaaagcagaaactcaggatccagtgatgtttataaatggagtttggaattaggagattggaaattgttgactccaaaactgattgattccaaagcaaaaggtttatacaacgccataaaaaacataccgcgagatattgactatgctgtaaagagtttagaggactccttattaacagtttttgactgtcgacaggacttccccaaccttgaggaatggatagatactttaaccgcaattattgaattcatgaaaatagcgtcaacttctcaacttggcacttctttcccacatacattgaaatctatcatgaatgctgacgaggcaaaactaaaaattacagatttccgtgatcacaaaataacattgaagagtagatacactttaatgaacgtgctttctaaaaataccctagagcagaacgcaaaactttcgaactacttacagcttggctctgttattcagcttgctaattacattcagatggcaatttctaacgatgcgtctcaagatgcgctacgaaacgctactttaatgaacaatatagtcaaaaatgctatacactcgtatgaagactcttctgtatcatcccaagtcgaaaggttggcaagttacgtgtctgctaatgccctttgggaatctcgcgagtataaaacacccgttatgataatgagagaccttttagattatgataagatggacattagtggaagcgaacaatacaacaattttaaatcacttctcgacatttcaatggatcaagttaaagctcacttagtcaagtggagttctgaatccagacttgaatcagctgccacgatatatgaagaaaatattgtgaattgggatataaacgtggacgaccatgaatcaagctccgatgtcttttatacacttggcagctttcttgatgaacaagcccaaaagttacgatcaaacggagagattgaagaaaaagaacgcagatcacatactgggaaggccaacctgaaagctttggaactaatatacaaaaacacgaaattaccagaaaatgaaagaaaagatgccaaaagacattaccatcgtgttgcaatacaatataatagagattctgagatattaaaaactttgcttcttcaaaaagagaagttcttatggcatgcgcttcacttttatctcaacaccttagttttcagtaataagtacgataatgacattattgataagttttgtggtttatggtttgaaaatgacgacaatagtaagatcaatcagttgctatataaagaaattggtacgataccaagttggaagtttttaccttgggtaaatcagattgcatcaaagatttcaatggaggataacgaatttcaaaagccattgcagctaactatgaaacgccttctctataaactaccatatgattctctctattcagtcatgagtatattactatatgacaaacaatctaataaagataccggcatatctcaaaaaatccaagctgtcaggaagattcttttagagctacagggatacgataaaggtgcttttgcaaaggagtatttacttcctgtacaagagttttgtgaaatgtctgtagaattagcaaattttaaatttgtgcagaatacaaagaagctacatttagctaatttgaaaattggacaatattggctgaatgagctgaaattagggaagtttcccttaccaactagtgaatttggtatcaggagttccgttgatggaaggaaagctcgcccttatatcgtatccgtcaatgaaaccgttaacatcactagtactggattatccttgccaaaaataatcaccttcaatatttctgatggaacaacacaaaaggtgttaatgaagggcagtaacgacgatttgcgacaagatgccattatggaacaagtattccaacaggttaacaaaattttaagaaatgacaaagtgctaagaaagttggacttaggtattagaacatacaaagtgattccgttagggccaaaggcgggaataattgaatttgtagcaaactctacatcattacatcagattttgagtacactacataaagatgataagataacattcgatcaagcaaggaaagctatgaaagcagtccaaacaaaatcgaacaaagagagactgaaaacttacttgaaagttactagcgagacaaaacctcaactaagaaatttcttttttgactcttttcctgatccaaatgactggtttgaagctaagaaaaagtacacaagaggtgttgccgcaagttctattgtcggatatatattgggtctaggtgatagacatttgaacaatattttactcgattgttcaacaggtgagcctattcatatagatctgggcatcgctttcgaccagggtagactgctacccattccagaattggttcccttcagattaaccagggatattatagacggatttggagtcacaggtgtagatggattatttagacggagttgtgaaagagtctatgccttactaagaaaggattacattaaggtgatgtgcgttttgaatatcttgaaatgggatccgctttattcatgggtaatgtcgccagtcaaaaagcatgaacacctattcgaagaagagagtgagattatttctacttttgataatgtcagtaaatttattaacatcagtgacaaaaacgaaaaccaagaatcttatagagctctgaaaggtgtggaggaaaaactaatgggtaatgggttaagcgtcgagtctagtgtacaggacttaattcagcaagcaacagatccgtcgaatttaagtgttatatacatgggatggtcaccattttattaa

SEQ ID NO: 78 - DNA, 2268 bp, Saccharomyces pastorianus
  modified_base (733)..(796): a, c, g, t, unknown, or other
atggcggtaaatccagaattagcaccgtttacactctcgagaggtattcccagttcggatgatcaagccttaaacaccatcatacagctgcaggactgtatacagcaggccatccagcagctgaactatagctctgcggagtttttagccgagttgctatacgctgaatgctctatattggacagatcaaatgtttactggtcagaggcagtttatctgtacgtgctttccctgtatttaaataaaaactatcatactgcatttcagatatccaaggaatttaaagagtaccatctcggtaccgctttcatattcggtcgttgcgctttacagctttcgcaaggactgaacgaagctatacttgcgattctatcgataacgaacgcattttcttcgaacactggtagcaataataacgcgcatgtaaatgctgtgctgaattctaatctcatcaatattcctgatttggccactttgaactgcttgctgggcaatctttacatgaaattagaccattccaaagaaagtgcgttttatcattctgaggcattagggataaacccttatctctgggagtcttatgaagctatctgtaagatgagagctaccatcgatctcaaaagagtgtttttcgacatcacaaagcaaagaaacaatagtcatagcaataacgctgcttcatcgttaccaaccacatcattatcgcattttgaacctcgttcacaaccaagcnnnnnnnnnnnnnnnnnnnnnnnnnnnnnnnnnnnnnnnnnnnnnnnnnnnnnnnnnnnnnnnnacaacactaataataacaataataatacaccatttcaatcttcaaattctcccccttctacatcagcatcttctttttcatcaattcagcatttctcaaggtcgcagcaacagcaacagcagttgaacccatcaataaggtcgtaccaaaacaaaaatattcagacgcctaaaaacccaacgaataataataaagcgtcctatgcgttaccaaataatatgtccatgaatttagcatctccctcctctaaacaacccactataagctcactggctaaagtttataacagaaataaacttttaacaactcctccatccaaattattgagtaacgacagaaactatcaaaataacaacaatataatgaacaaaacgactttcaaaacaccaagaaacttgtattcttcaactggcagattaaccgctacgaagaaaaattcaagatctttaataattagtaactcgattttgacaaatgattatccaattacgctgcctgaaattatgtataactttgccttgatattaagatcatcttcacaatataattcgtttaaagcaattagattgtttgagtcccagatcccttctcacattaaagacactatgccatggtgtttagtccaattagggaaactgcatttcgaaatcattaactatgacatgtctttaaaatatttcaacagattaaaagatctacaacctgcaagagtgagagatatggagatttattccacgttattatggcacttacacgataaagtaaagtcctccaatttggcaaacggcctgatggatacgatgcctaataaacctgagacttggtgttgtataggcaatttgctatccctacaaaaggaccatgatgctgcaataaaagctttcgaaaaagctactcaattagatccaaattttgcgtatgcttatactttgcaaggccatgagcattcttccaatgattcttcagattctgccaagacatgttatagaaaggcgctagcatgcgatcctcaacattataatgcttattatgggttgggtacaagttctatgaaattaggtcaatacgaagaagctttattatattttgaaaaagcaagatcaatcaatcctgtcaacgtagttttgatctgttgctgtggtggttctttagaaaaactaggttataaggaaaaggcattacagtattatgaactagcatgccagttacaaccgacctcctcgttatctaaatacaaaatgggtcagttgttatattccatgacgagatacaacgttgcattacaaacatttgaagaattggtgaaattagtccctgatgatgccactgctcattatttattggggcaaacatatagaatagttggtaggaaaaaagatgctgtaaaagaactaaccgtggctatgaatttggatccaaagggtaatcaagttgtcattgatgaattacaaaaatgtcacatgcaagaataa

SEQ ID NO: 79 - DNA, 3219 bp, Saccharomyces pastorianus
atgtcagagaataacactcatttctcatttccaaaggaggaagaaaaagttttagccctttgggatgaaattgatgctttccacacttcgttggagctaacaaaggataaaccagaattttctttttttgatggacccccatttgccactggtactccacattacggtcatattttggcctccactattaaagatatcgttccaagatatgctactatgactggtcaccatgtggaaagaagatttggttgggacactcacggtgttccaatcgaacatatcattgacaaaaaattaggaatcaagggtaaggatgatgtctttaagtatggtcttgagaactataacaacgaatgtagatctattgttatgacttatgctagtgactggagaaaaaccattggtcgtttgggtcgttggattgatttcgacaatgactacaagactatgtacccatcctttatggaatctacatggtgggctttcaagaaacttcacgaaaagggccaagtgtaccgtgggttcaaagttatgccttattctaccgggttgacgactccattgagtaacttcgaagctcagcaaaattataaagatgacaacgatccagccgtcactattgggtttaatgtggttggccaagaaaaaactcaattggtagcctggaccactacaccatggactttgccttctaacttatcattatgtgttaacgttgacttcgaatatgtcaagatttatgatgaaaccagagattgttatttcattttaatggagcctttgatcaaaactttatataagaagccaaagaacgaaaaatacaagatcgttgaaaaaattaagggttctgatttagtcggtttgaagtatgaaccattgttcccatattttgccgaggaattcgctgaaagagcctttaaagttatcgctgatgattacgtttccaatgattccggtaccggtattgttcacaatgctccagctttcggtgaagaggattacaatgcttgtttaaagaacggtatcatatctgaagattcaaagttaccaaaccctatcgatgaccttggtagattcaccgaggaagtcaccgattttgccggtatttacgttaaggatgctgataaactggtcatcaaatacctaactgcttctggcaatttgttaatggctactcaagttcgccattcatatcctttctgctggagatctgacaccccattactataccgttccgttccagcttggttcgttcgtgtcaagaacatcgttccaaagatgttggagtctgtcatggaatctcactgggttccaaacactatcaaggaaaaaagattcgccaactggattgcaaatgctcgtgactggaacatctccagaaacagatattggggtactccaatcccattatgggtttccgacgatttcgaagaaatcgtttgtgttggctctatcaaagaattggaagaattgactggtatctccgatattacagacttgcatcgtgatgtcattgataagatgactattccatctaaacaaggcaagggtgacttgaagagagtcgaagaagtctttgattgttggttcgaatctggttccatgccttacgcttctcaacattatccatttgagaatgttgaaaaatttgaacagagagttccagccaacttcatttctgagggtttagatcaaacaagaggttggttttacaccttaagtgtcttgggtacccatctgtttggcactgtcccttacaagaacgttatcgtttcaggtattgttttagcttccgatggtagaaaaatgtccaaatccttgaagaattaccccgatccactcattgttttagacaaatacggtgctgatgctctgagattgtatttaattaactcacctgtcttgaaagccgagagtttgaaattcaaggaagaaggtgttaaagaagttgtatctaaagtcctattaccatggtggaactctttcaaattcttggacggtcaaatttccttattgaaaaagacatatgacattgatttcaagtatgatccttctgtaaaaagtgacaacgttatggacagatggatcttggcttctatgcaatccctagttcaattcattcatgaagaaatgggccaatataaattatacactgttgttccaaaattattgaatttcattgatgagttgaccaactggtacattagattcaaccgtcgtcgtttgaagggtgaaaatggtgttgatgactgtctgaaggctttgaattctttgtttgatgctctcttcacatttgtccgtgccatggctccattcactccattcttatcagacagtatctatttgaaattaaaggagtacatcccagaatccgttttatcaaagtacggtaaagatggaagatcagtccatttcttgtcttacccagaagttagaaaagaatactttgatgaagccattgaaaccgctgtttccagaatgcaatctgttatcgacctgggtagaaacattcgtgaaaagaaaaccatttctttgaagaccccattaaagactttggtcatcttacacagtgatgaatcatacctgaaggatgttgaagctttgaagaactatatcatcgaagaattaaatgttcgtgatgttgttataacctcggatgaagccaaatatggtgttgagtacaaagcagtcgctgactggcctattttgggtaagaaattgaaaaaggacgctaagaaggtcaaggacgctttaccatcagtcacttccgatgaagtacgggaatacttggaaacaggtaagttagaagttgccggtattaaattagttaaaggtgacttaaacgccattagaggcttaccagaatctgcagttcaatctggtcaagaaaccagaaccgaccaaaaagttctaattatattggacaccaagatctattctgagttgaagactgaaggtctcgcaagagaactggtcaatagaatccaaaagttaagaaagaagtgtgggttggaagccactgacgacgttctagtggaatatgaactagttaaagacaccattgactttgaggccatcgtcaaggagcatttcgatatgctaagcaagacttgtagatccgatattgctaaatacgacggatccaagacggacccaattggtgatgaagaacaatcgattaacgacaccattttcaagctgaaggtgttcaaattatga

SEQ ID NO: 80 - DNA, 603 bp, Saccharomyces pastorianus
atgggtatttctcgtgattctcgtcacaaaagatccgctaccggtgccaagcgtgctcaattcagaaagaagagaaagtttgaattgggtcgtcaaccagccaacaccaagatcggtgctaagagaattcactctgttagaactagaggtggtaacaagaaatacagagctttgagaatcgaaaccggtaacttctcttgggcttccgaaggtatctccaagaagaccagaatcgctggtgtcgtttaccatccatcgaacaatgaattggtcagaaccaacactttgaccaaggctgccgttgttcaaattgatgctactccattcaagcaatggttcgaagcacattacggccaaacgttgggtaagaagaagaactccaaggaagaagaaactgttgtcaagaccaagaacgctgaaagaaagtgggctgctagagctgcttctgccaagatcgaatcttctgttgaatctcaattcagtgctggtagattatacgcttgtatctcttcaagaccaggccaatccggtagatgtgatggttacatcttggaaggtgaagaattagctttctacctaagaagattgactgctaagaaatag

SEQ ID NO: 81 - DNA, 249 bp, Saccharomyces pastorianus
atgtcgacgtatgacgagatcgaaattgaggatatgacctttgagccggaaaatcaaatgttcacgtacccctgtccctgtggagacaggttccaaatatacctggacgacctgtttgatggtgaaaaaatagctgtttgccctagttgctcgctgatgattgacgtcgtttttgaaaaggaagacctggctgagtactacgaagaagctggtatacaaccccctgaacccattgctgttgccgcttaa

SEQ ID NO: 82 - DNA, 1290 bp, Saccharomyces pastorianus
atggccaaaaatattctagcgaaccaggaccctaagctgcaggcgatgattgtggaacacacagcgcctgctcccaaggaaatacccatagacgtgccagttttgaaaagagttgctagaccgctgagacatgtcaagttcattccagtcaagtcgcttgctttccattccaaaacaggtcctatggagttttcatatgaaaagaagatcaaaactcctatccctaaaaacaaaattgtagttcgagtcagtaacgtgggcttgaaccctgtagacatgaaaatccgaaacggttacacatctgccctctacggtgagattggtttggggcgcgaatacagcggtgtcgtcactgaagtgggggagaacttgaattatgcttggcatgtgggcgatgaggtgtatggtatatactatcacccacatttagccgtgggctgtttgcagagttccatcttggtcgatccgaaagtggatccggtcttgttgagacccgattccatcactgccgaagaagccgctggatcgctatactgtctggcaaccgcgtacaacatcctaaacaaactgtccaagaacaagtatctgaaaccagagtcgaacatcctaatcaatggtgggacttcgtcagtcgggatgtttgccattcaattactgaaacatcattacaaagtgcagaaaaaactggttattgtaacatcggccaatggacctcaggtcttgaagaagaattttcctaatttggctgatgaaatgatttttatcgattacttaacctgcagaggtaaagccagtaaaccattaagaaaaatgcttgaagaaaagaagatctcccagttcgattcagtgacagatgcagaaaccatactcacatataatgagagtaagttcgatatcgtacttgacttcatcggcggttacgatattttgagtcattccagctcgctgattcatggtggcggtgcatacgttaccaccgtaggcgactacgttgccaattacaaagaagacatttttgattcatgggacaatccaagtgccaatgctagaaaaatgtttggttctatcatctggtcatacaattactcacactactatttttatccaaatgcaaagacttcttcccccggcaacgattggattgaacaatgtggcgattttttaaagaatggtactgtcaaatgtgtcatcgataaaacgttcgattggaaagaccataaagaagcattttcctacatggccacccagcgtgctcaaggaaagttgattatgaacgtcgaaaagttttag

SEQ ID NO: 83 - DNA, 786 bp, Saccharomyces pastorianus
atgttcggtagaatttgtaatgctcaattgaagaggaccgcgtggagcgtccccagacaggctcacttgcaatgtcagactatcaagacatttgccacagcacctattctgtgcaagcagtttaagcaaggtgatcagccaagattgagaataaactcggaggcccctaacttcgacgccgacacgacggctggcaaaatcaacttccatgactacctgggcgattcatggggggtcttgttctcgcaccccgcagatttcacacctgtatgcaccactgaagttggtgcttttgccaaattgaagccggagtttgacaagagaaatgtcaagttgattggtctttccgtggaagacgttgagtcccaccaaaagtggattcaagacgtcaaggaaatcgcaaaggtgaaaaacgtggggttccccattattggggacactttcaggaacgtggccttcttgtatgacatggtggacgccgatgggttcaagaacatcaacgacggctctttgaaaacagtaaggtccgtctttgtcatcgaccccaaaaagaagattagactgatctttacttacccctccacagtcgggagaaacacttctgaagtgttgagagtcattgacgctttgcaattgaccgataaggaaggtgtagtcacccccatcaattggcagccttcagatgatgtcatcatccctccctctgtctccaatgatgaagccaagactaaattcggtgatttcaatgaaatcaaaccttacttgagattcaccaagtcgaagtaa

SEQ ID NO: 84 - DNA, 3330 bp, Saccharomyces pastorianus
atggcccgctcttctttacccaaccgccgctccatgcttttcgaagcgaacaagagaaagactatagcgcatgccccatctcccactccttcgaatggaaagcatcctgttccgccgcccatctgtaacaatagtaatagtgatgccatttcagaatcgaacatccacgtatacgtaagatgcagatcgcgcaaccgaagagaaatagaagaaaaaagcagtgtagtactttctacgctgggaccccagggaaaggaaatcattctctctaacggctctcatcaatcatactcatcctccaagaagacttaccagttcgatcaggtattcggcgcggaatctgatcaggaaatggtgtttcatgcaacggcaaaaaactacatcagagaaatgctgcacggctacaattgtacgatattcgcatatggtcaaacggggactggtaaaacatataccatgtccggcgacataaacattctcggcgacgtacaatctactgagaatctgctactgggggaacatgcaggcatcataccgcgtgttctggtggaccttttcaaagaattgagctcgctaaacaaagaatattctgtcaaagtatcctttttagagttgtacaacgaaaatttgaaagatttgttgtctgacaatgaggacgatgattcagcggcaaacgactccaagaagcagattcgcattttcgataataataacaacaattcgtccatcatggtcaagggaatgcaagaaatcttcataaactcagcccatgaaggcttgaatctattaatgcagggctctttaaaaaggaaagtggccgctactaaatgtaatgatctctcttcaagatctcacacggtcttcaccatcaccacaaatataatagaacaggacagcaaggaacacgggcagaataaaaatttcgttaaaatcggtaagttgaatttggtggatttggctggcagtgagaacattaacagatcaggtgcggaaaacaaaagagctcaagaagctggactgattaacaaatcactgttgactttaggtcgtgtgattaacgcactcgtagatcattctaaccatatcccctatagggagtctaagctaacaagactgttacaggactctctaggtggtatgaccaaaacgtgcattattgccactgtatcgcctgccaaaatatccatggaagagaccgcaagcacgctggaatatgcaacaagagccaaatcaatcaaaaattctccgcaggtaaatcagtctttatcaaaggacacatgtctcaaagactatattcaagagattgaaaaattgagaaacgacttgaaaaattcaagaaacaaacagggcatattcatcactcaagaccaattggatctttacgaaagtaattccatactgattgatgaacagaatttgaaaatccacaatttacgggagcagattaaaaaatttaaagaaaaatacctaaatcagctggatattaataattttttacactcagaaaaggaaaaattggtaaatataatacgaaacttccatgtcgatttttccaatttcaatctggaaatccggaaaatccaccgttccaaccttgaagtaatgactgaaattacccaacaaagagatttatcacaggacaactctcaaaggcagtatactaccaaccaaaatttgcaactggaaatatccaaccaagtattacagactttaggcactttacaagattctttgatgaactataactcaaaattttcacaagttattagtggcgtcactaaagaattatccctgaacgtaaactctcataaagtgaaacatgattctacagtcgaatcattgttcaataccaccgctaacttattgacagtaaaaatgaacgatctagttaacagtgtttcacattcattggaaagtattcgaaatgattctttatcacactataataaagacttgaatgagatatatcaatcgcaccaacggtttttaagtaagttacaaaatgacatcaaaagctgtctggattcaataggcagctcaatcctaaatgccataaacgaaatatcagaaacttgcaccacaaacttgaatagtatgaacgacttaacaaaccaccatcaatcagtagcaacagagctgattgaaaagcagcatttacaaatcgaaaaattaaagaatgaattactcaatgagcgtaaaatttcgaaccactttaacaaacagtcaaccagattaaaggagtattttaaaaatcatgtatccaggacccgtactgaacttcatgatgaatttaacgaatttataagcagcttaaaggagaaacaatccaaattagatcaaaacatctggcaaaaggcagaatccattttcaatgaaaccggtgaagaagtcaatgcaattcattccagttcaataaacactttaacagaaaatgccgaaaccatcttacaaacggtctctcacaacagtacaattttcacgaagtatttaacttgtctatcagaagaaatgaacataaatatatcttccaaactgaagagcttacccattggtaaatttttaaataagatatctcaaactatttgcgaaagttgtggtaataattcgtcaacagccgacccgatactaatttctatcaaaaattttcaaaatgtaatactttcagatattgaactaacaaacgaaaagacgttatcgttgattaatgaaatattgtcgcaaacaaaaatcatatccgataaaaacaacgtcgatctagccatagtaaatgagaattttaattctttatgcagttttattttaaatgattacaaagagaacataatgcaaatctctaagacacaagacgatgtactttttggtcattgcgaaaatctgagatcggtaaacagacagggaatgaaaaccattactactcacaacatagaaaaacctgttaatatacatctacagcctgaatcaacagtgatcaaagttttgcctgtactggaatatccaaaacagtttcaaatttacagagacgctgaaggcaacaacagggacgatacaatgaagtcgcatttgaacgaaccaaactcttatgcaggagaagacctcgttgcatcacaggctagtccgaagactccagtccccgtgcctgaccaaactttaccaaaggtgctcgtaccaaaaagcataaactctacgaaatccaaaagatcaaaaactttatcaacttcagttgatactgaacaggagtcacggaataacttaaaaagaagattcaccatggaaccgatagtaaaagataaagaaattaaaaatgatggcactaagaaaatccatcaataa

SEQ ID NO: 85 - DNA, 1404 bp, Saccharomyces pastorianus
atgggtcaaatattgtccaatccaattatcgataaagagcatcattcgggcacagactgtttgacagcatttgggttgtgtgctatgcaagggtggcgtatgtcaatggaagacgctcacattgttgaacccaatcttttcgccgaatctgacgaagatcatttggcgttttatggtatattcgacggtcatggtggctcttctgtagctgaattttgtggttctaaattgatatctatactgaaggaacaagaaagtttcaagaagggtatattagaccagtgtttaatcgatacgtttttggctaccgatgttgagctgttgaaagatgaaaaaatgaaagacgatcatagtggttgcactgccacagtgattttgatatcccaattaaaaaagcttttggtctgtgctaattctggtgacagcaggactgttttgtctaccagcgggaacagcaaagcaatgtcttttgaccataaaccaacgttgataagtgaaaaatctcgtattatggctgctgatggttttgttgagatggatcgtgttaacggtaatttggccttatcaagagccatcggtgattttgaattcaaatcgaacactaagttaggacctcatgaacaagtggttacatgtgttcccgatatcatcaaacacaatttgaactatgatgaagacgaattcgttatcttagcctgtgatggtatctgggattgtttaacctctcaagagtgtgttgatttagttcattatggtataagccaaggtgatatgactttaagtgatatttcatccagaatcgtggatgtttgttgttcacccaccaccgagggctcaggtatcggttgtgataatatgagtatctccattgttgcgctactaaaggaagacgaatcagagactcaatggtttgaacgtataagatccaagaattacaatattcatacatcatttgttcaaagaaggaaaaacatcttcgatttccatgacttttcggataatgatgaggaggtatttgcggtcaccaccaagaaattgcaagaccgtctaaaccatcacagagataatgatgatatggagatcgacgatcttgataccgagttaggcagtagcgccgctccatcaaaattaactggtaaagataggtctggtcccattgatttattttcattagaagctctactagaagccgggatccaaataagacaaaggccaagctctgatagcgatggtaatgcttcatatttccatggtgcttctttatcagacatgttagcctccttgagcaatgctgctgctggagaaacaggtcctgaagacgctgatgaaaacgacgataacgacagcgaagacaataaaaatggaaatggaaagaagaattccaaatttgaagaaattgaatga

SEQ ID NO: 86 - DNA, 1602 bp, Saccharomyces pastorianus
atgactttaccaaaactcagtagtgtttctgtgtcgtcaggacacgtcagcgctagctcacacggtttctcaatactaagcaagcatcctcatcccaataatctcattcattctcattcgctttcccacccaaatgcaaagagtcacttgtccacagtgaacacgtgcaacaaagaaaacggtacgaacagcgacgaggcagagtcgctcaagaagaacaacccatcttcgtgggaccctaacgacgacatcaagcttcgtcacttgaaagagatcaagaacttgggttggaaggaaattgctcatcatttccccaacagaactcccaacgcttgccaattcagatggagaagattaaaatcgggaaacctgaaatcaaataagactgcagtgattgatattaacaagctgtttggtgtgtataccacgagtgttgccgccgtagctgcaggcgccactgctaccgcagcagcagcagcagcgcctgctgaagaggcgctcaaagaagaagctattgaggacgaagatatcacttcggggtctagcgccatcgatgacttcccaccagatttcaaaccaatagttaaggctaaatacatggacagaaaactagtggcgcaaaaatctgcatcaccgtttttggaccacgagtcacagcctgtcaaaccgagagaattgtttattaagccgaggtcgttctcccattccatgaccacaaatacgcccaatgtgaaggctactcaacagcctaacccaaatacttacaataccccttctactaagcctaacaggaacgttaatttcaacgactatgaaaatattggactcgtacccaagattatcattaggtctagaagaaactcgtttattccttccactcagattcctcatcctaccaccaagtccaggaagagctcacattctgtgatttcttctagaagatcatctttcaacatgatgcactcaaggagatcatcctttaattctcatgctcccacggaacctatttctaggcgtccatctttggtcgtcagcccgtatatgactcccagaagactgtcaacttcacaatctatccaacaccacccacaacagcagcaatatcacctaaatcctataacctctccgaactgcaagatagatcaatctactgataaaataacgcatacgagaactttcttagatatgcaaaaattcgcaaacaagcatccgtggtctagggaagatgatgaggttttactcaacaacacaatagacaaaaaaaaccatttatcaacactagaaatttccattgtcctacctaacaatagatccgaattggaaattcaacaaaggatcgattatttacagagaaggggacacactagtggcattcacagaactcaaggaaacagtgacgatgaagaggaagacatcgacccactacacaaggaagttgatgccaatgaaacgacgcagcgaacataccagtacaatggattagagcctggaaatggtaattcaaaggcaaggattctctcttccttgtcgaatgggaacgatgtacgcaaagagcaagatgaattgccgggtataaattcgatcttcaaaaatattttctaa

SEQ ID NO: 87 - DNA, 2538 bp, Saccharomyces pastorianus
atgtcaataacaataaatgacaaatcgccaaaacctaaaaaaaatgcattgttaaaaaatttagagattgacgacttagtacattcccaatttgttacaaggaatacaaatggacacagaactacaagacaacgatctaatcctaacaccaatggaactaatcgaataagaatctgctctctaccccataagaacaataatacaaagaagaaaaaagggtctgaaatttcccggcgcccagaagtccctgccaagaatatcatagattgggataatgacatgggtgcaataaattttcctataatgaagccaaatattgaagtgaatgaaaagttacagattaggattaagtacgaaccaattaacttcttcaattttgaacggttaatactaaaatcttcagctatagaaccactcgtaagcaaaaaaatcaacacgcctaacgtatccacgggatttcaaggaagaataaataggcttaggcagaaatggggtatagaaaccgacaatatatcacattcatcgccctctgatagtataccactggaagatagtgactcgtggcaatggcatgtaccatatggtggagcaataaaaaagccgaaagatttcagtacaaaaagaactttgccaacctgggaagataaggtaaggtttcttactcttctagaaagatccaaatcagcgacatttattaatagtaacgtaccgctttgtaatcattccgaatttgatcaagagaaagataacaagaaacgaaggaaaggtaaaaatctaaaaaaccaaaatagagtcggatcttcattgatagagtatattgttttccgagattacgaaatcaaaccctggtacacgtctccctttcccgaacaaataaaccagaataaaatggtttatatatgcgaatactgcttgaaatacatgacttcccggtatacttgtcttagacaccaactgaagtgtctaaccttcaggcccccaggaaatgaaatttaccgcgatggcaagctgtccgtttgggaaatcgatggacgagagaacgtcatatattgtcaaaatctctgcctactggccaagtgttttatcaattctaagactttgtattatgatgttgagccattcatattttatgtcttaacagagagggaggaaaaggaaaacaataactatcagacctcacctaaattccattttgtgggttatttttccaaggaaaaattcaattccaatgattacaatttaagctgtattttaactttgcccatatatcaaaggaaggggtacggtcagtttttaatggagttctcgtatttattatctagaaaagagtcaaagttaggaactcccgaaaaaccgttgtcggatttaggtttattaacttatagaacctattggaagattaagtgtgctgaagtactgttaacattaagagacaatgctaaaagcgaatcaagtcatgaagacaaaggcgccttccaacagttaacattgaacgatatagctaaattaacgggaatgatacctacagatgtagtgtttggattggaacagcttcaagttctctaccgccataaaacgcgttcgttgtcttctctgaatgatttcaattatattcttaaagttggttcctggaatgaaatcgaaaatgtctatagaagttggagttcaaaaaagtatcctgtagtcaaatacaataagctgctttgggaacctataatactcggaccttcatttggcataaacgggatgatgaacttagaacccaccgcattagcagatgaggctattgcagatgaagccatggctcctgtgatttcaaacaacgcccaaatagaaaactataacaacagtaggagtcaaagtcaaaggagccacggaaggagaaggggtggtcgcaagacacccaaacttaatgcgaacaataccatacaaccagaaatttctgtgagtgatttctttcaaaataccgtttcttctttaacagaatacatgtgcgaatataactccacaggcagtgatagactagctgatggtatagataaaagtgtgttgcaaaaaatccgtaaccgtgaaaagcttcttaggtcaaaatttgcttctgaatcatattgggaactctgtttcacactcaagaattcagaagtcccaccagaaagccacacaacgaagaacaataatattggaacagccagtatagaacaggaagaagtggaggacgaagcaccggagctaagtttaagcgcagatgttgaagaagacgaagattttacacttgatgatgtcgggggtgaaaaagagtccgaatataacgcatcaaataagacatctatcagtgaagacgacggggaaagtacatatggcgaggaggaaagcacatatgaagatggtgatgacgatgacagtgacggagaagacgaagacgaagacgaagacgaagacgaaggagaagacgacgacgacgatacagatagccatgaaaatcaaggaagggccagaacgaggcgaaaaattacattgatagaggatgatgaagaataa

SEQ ID NO: 88 - DNA, 2091 bp, Saccharomyces pastorianus
atggagaccggttcttttgaggattctccctctgcagtgatcagcaacattcaggacaacaatctgaatacggaggccaatgaacaggaaacgaatatgccagtttttgaaactagagacgtcattgacagagtgaatggtgaacaagaggaatttggtgaaaatgctgtcagaaatatggataatggaaatacttctaccgatttagttaattcctcgaacaatgctgctttggacgacgatgtcatcccaaacgccattgttatcaagaacatcccgttcgccatcaagaaagaacaactgttagatattatcgaagacatggatcttcccttgccatacgccttcaattaccattttgataatggcatcttcagagggttggcttttgcaaattttaccactcccgaagaaaccactcaagtgataacctctttgaatggcaaggaaattagtggaagaaagctaaaagtagaatataaaaaaatgctacctcaagctgaaagagaaagaattgaaagagaaaagagagagaaaagaggtcaattggaagaacagcacagatcctcatcgaacctttcactacattcattgtccaaaatgagcgcaaacacaaataataacgcttccaacaatcaattattttcgactttaatgaacggtattaatactaataccattataaacagcccaatcagtaacaccattaacaataacaccaacggcagcgcaagcaacagtaacatcaacaaaagtaacatcaataacaacaacaacaactccaacagtaacaatagcggtggtaatgccaacatgaaccaatcctcaatttctgctcagcatactacttcatcattgtaccaagcaatgaatgctaacaatcaaaaccagatatctaccgaaaggttttatgctcctttaccatcaacttcgactctgccactaccacctcaacagttagattttaatgatcctgatactttggagatctattcccaattgttattgttcaaagacagagaaaagtattattacgaattggcctaccctatgggtatatctgctgcacacaagagaatcatcaatgttttgtgctcatatttaggtctagtggaggtgtatgacccaagattcattataatcagaagaaaaattttggatcatgccaatctacaatcccatttgcaacaacaaggtcaaatgacatcggcacatccattacaaccaaactctaccggtgggtccatgaataggtcccaatcttatacaagtttgctgcaagctcatgctgctgccgcggcaaatagcgttagcaatcaatccgtcaacaactcatccaacaataacggcaacagcaccggcaacggcaacaacaacggtaataacacaagtaacaacaataacaatagcgctaacttaacaccaataatttcttcacaaggtcaattttcaatgcaagcggcactgagttcacccaaattgaatgttcaccataactctttatacaatcccgcagatcaacctcaacaacctcaaccacaggtacaacaaaatgcacaaacagctgcgcaacaacaacaatcatttttaagacaacaagctactctaacaccttcgtcaagaattccttctggttattcagccaatcattatcaaatgaattccgttaacccattgctaagaaattcacaaatctctccaccaaactcacaaactcaaatcaataaccaatctttatctcaagcacagccatcatcccaaactcaaacccaaacccagcaacgcgttccggtagcataccagaacggttcgttgtcttcacagcagttgtgtaaccttaatggttcatcctcgacaggaaatacacagtctcaactactaccacaacacacaaatgggtctgttcattcgaacttttcctaccaatcttaccacgacgaatcgatgttgtctgcgcacaatttgaatagcgcagatcttatctataaatcactaagccattccggactagatgatggtctagaacaaggcttaaaccgttctttaagtggtttggatttacaaaatcaaaacaagaagaatttgtggtag

SEQ ID NO: 89 - DNA, 417 bp, Saccharomyces pastorianus
atggggctgcgttattcgatatacattgaaaacccgctatcctccccatcatcctcatacaaatcaataagcgacccgttattccattcacagcatcgagcacaaagaaacacatgcttcatcacttacggttgtagacattgtaagacgcatctttctagctccttccaaatcatttccagagattatagaggcaggactggcactgcctacttaatgaacaaagttgtcaacgttgttgaaggaaaggtcgaacaacgaaaaatgctaactggcgactatttggtttgcgatatcctctgccattggtgtaaaaggaacgtcgggtggaagtacttgcaaagtagcaacgacgatcaacaatataaagaaggtaagttcattttagagttgaagaacatctgcaaatgtacttga

SEQ ID NO: 90 - DNA, 1920 bp, Saccharomyces pastorianus
atgccgctgtcagattctgaatttgataccgcatcaatgacaataaaaaacggcattgtgagcgccgaggacgacaagcaaacaaccaaggaattcgaagttgaggaagaactcaagacttcttccaagtccgtcgccagcatcatcgaaaagaaggaaaccgattcagaaaatgatacaaccgttatccaggacggcgaaaaagcctcctggttccaaaaaaccatcgagtttttggaagttaaacaagtttccaccgatcctgctgcacacaaggtggaaaaacctatcaagacattaaaggatttgcgcaaatccttactatccacatatctatacaacacagacttgaggcccgtggaggccaagagaagaacatggacttggaaacagtacattttcttttggatttccgggtccttcaatgttaacacatggcaaatctcagccaccggtcttcaactagggttgacctggtggcagacttggatatgtatttgggcaggatacacgtttgttgcatttttcttgattctgggatctaaagtcgggaacaactaccacatttctttccccatctcatcaagagtgtcctttggtatttatttctccatctggatcgtcatcaatcgtgtcgtgatggcgtgtgtctggaactccacgctggcttatatcgggagtcagtgtgtccaattgatgctgaaggccatcttcggtaccgatttaaacaccagaataaaagacaccataaaaagccctaacctgacgaacttcgagttcatgtgtttcatggtcttttgggtcgtatgtctgccattcttatggttcccgcctgataaattgcgtcacatttttgcactcaaatccgcaattaccccgttcgcggcatttggatttctaatttggaccctctgtaagtctaaaggtcatttggccttgggttcattaaacgacaacggtggtgccatcagtaagtccgtcttagcatggtctgtaatcagatccatcatgagtgccctagataatttttccactctgattttgaacgctcctgacttcaccagattcggtaagacttacaaatcatctatttactcacaattagtcgccctacccgtctgttttgccgtcatttccttgatcggtatcctatctgtctcggcagcttacacgttatacggggtgaactattggagtcctttagaaattctaaacagatacttagacaactacacctctgggaacagagccggtgttttcctcatctcgttcatttttgcatttgatcaattgggtgctaacttgtctggtaactccattcctgcaggtaccgatatgaccgcattgttgcccaagttcatcaacattagacgtggttcgtatatttgtgccttaatatcgttggccatttgcccctgggatttattatcatcatcatcgaagtttaccacggcgctagcagcatatgcagttttcctaagtgccatcgcaggtgtcatttctgctgattacttcatagtcagaaaaggctacgtcaacattttccactgttacaccaacaagccggactcctactacatgtataataaatacggcactaactggagagcagtagtagcataccttactggtattgctcctaattttgccggattcttgggttcagtgggcatttccgtacctattagcgctatgagagtgtactacctaaactatttcgtcggataccttgttgcagcattgagttactgtattttagtgcatttctacccaattagtggtgttccagggaacgcgaagttgaccgaccgtaaatggctcgaagaatgggtcgaggtcgaagaattcgaatccgaaagagaagtctttgaagaatacggtagtgtctccactggctatgaaaagatacggtatgtctaa

SEQ ID NO: 91 - DNA, 726 bp, Saccharomyces pastorianus
atgaccactatagcgtcggaatactcttcagaggtgtcgaacacccccgttgaacatcaattcaacccctacggtgataatggtggtaccattctaggtattgcaggcgaagatttcgcggtgttggcgggtgatacaagaaacatcactgattactcgatcaactctcgttatgagcccaaggtctttgactgtggtgacaaaatagtgatgtcggccaacgggtttgccgctgacggtgacgccttggtgaaaagattcaagaatagcgtgaaatggtaccatttcgaccacaacgataaaaagctatccataaactcagctgccaggaatatccaacatcttctatacgggaaaaggttcttcccctactacgttcacaccattattgctggtcttgacgaaaacggtaaaggtgccgtgtactcgttcgacccagtcggctcctacgagagagaacagtgcagagctggtggcgctgcagcttctttgatcatgccttttttggacaaccaagtcaatttcaaaaaccagtatgagccaggtaccgacggtagagtcaagaagcctttgaagtacctgtccgtggaagaagttatcaaattggtgagagactcattcacatctgctacagaaagacatattcaggttggtgacgggctggaaatcctcatcgtcaccaaggatggtgtaaggaaagaattttatgaactgaaaagagattaa

SEQ ID NO: 92 - DNA, 180 bp, Saccharomyces pastorianus
atgggattcttctatgataatccggtgatcgagttttttcacagaataacaagaaagccaagtactattgcaatgtgggtatttgccagtgtgatttgttcgagtacattttatttaatgtttatgtcatcgcctacaattgatttcaacccaaaatctgagggagataaggacaagtaa

SEQ ID NO: 93 - DNA, 1740 bp, Saccharomyces pastorianus
atgaagtacgttgttgtttcaggtggtgtcatttccggtatcggtaaaggtgttcttgcatcttcaactggtatgctattgaagacactcggcttaaaagtcacctcgattaaaattgatccttacatgaacatcgatgctggtactatgtctcctttagaacatggtgagtgtttcgtacttgatgatggtggtgaaaccgatttagatttgggtaattacgaaagataccttggtgtaacattgactaaagaccataacattaccaccggtaagatatactcgcatgttattgctagggaaaggaagggtgattatttgggtaagaccgtgcaaatcgttcctcacttaaccaatgctattcaagattggattgaacgtgtggccaagattcctgtcgatgatacaggaatggaaccagacgtctgtatcatcgaattgggtggcaccgttggtgacattgagagtgcgccttttgtagaagcactaagacaatttcaattcaaggttggtaaggaaaatttcgcattgattcacgtctctctagtgcccgtcatccatggcgaacaaaagactaagccaactcaagccgccatcaaaggtttgagatctcttggtttgatcccagacatgattgcctgcagatgctctgaaacattggacaagccaacaattgacaagattgcaatgttttgtcatgttgggcctgaacaagtggttaatgttcatgatgttaactctacttaccacgttccattattgctactcgaacaaagaatgatagactatttacacgccaggctaaagttagaagaaatcaccctaactgaagaagacaaacaaagaggtttagaattattgtccaaatggaaggctaccacaggtaactttgacgaatccatggacaccgttaagattgccttggttggtaaatacaccaacttgaaagactcttatttgtctgtcataaaagctttggaacattcatctatgaaatgtcgccgtaagttggaaattaaatgggtggaagctactgatttggaacctgaaacacaagatagcaataagcctaaattccacgaagactggaacatggttagtaccgcggacggtattttgattcctggtggtttcggtgttagaggtacagaaggtatgattttggctgctagatgggcccgtgaaaaccacattccatacttgggtgtttgtttgggtttacaaattgccactattgaatttgcacgtagtgtacttggaatgaaagacagtcactcagcagaattctacccagacatcgacgaaaagaatcatgtcgttgtcttcatgccggaaattgacaaggaaaccatgggtggttcgatgagactaggtttaagaccaacttatttccaaaacgacaccgagtggagtcaaatcaaaaagctatacggcgatgcttctgaaatccgcgaaagacaccgtcaccgttacgaaatcaaccctaatattgttgataaattggaaggcaatgggttgatctttgttggtaaggatgaaaccagcaaacgttgtgagattttggaattgaagaatcatccctactatatcgccactcagtaccacccagaatatacgtcaaaagtcttggaaccatccaaacctttcttgggtttggtggctgcctccgctggtatcctacaagatgtcattgacggtaagtatgatcttgaagctagcgaaaacaaattcaacttttaa

SEQ ID NO: 94 - DNA, 699 bp, Saccharomyces pastorianus
atgttaccgggcttaatgagaatgaatctctccgtaaggatgagcgatcttactgtcaagggtgcgtcaaactctctcttaaaaaatattaaccctattgctaagagattcaagcacgagtatgcgccaaggtttaaaatccaacaaaagaagcagaagggcagagtacccgttcgtaccggtggttctattaaaggatctactatacaattcggtaagtacgggctacgtttgaaaagtgaaggtatcaggataactgcacagcaactgaaagaagcagataacgctattatgagatacgtcagacctttgaccaatggtcatttgtggagacgtttatgtacaaacgttgccgtctgtgttaaaggtaacgaaacaagaatgggtaaaggtaaaggtggattcgatcattggatggtgagagtacccacagggaaagttctttttgagataaacggtgacgatttgcacgaaaaagtcgcacgtgaagcctttagaaaagctggtaccaaattgcctggggtatacgaatttatatctttggattcactggtaagagtcggattgcgtagctttaagaatcttaaagacgatcccgtgaagaatttctacgaagagaatgcaaagaaaccgtccaagaaatacttgaatgttttgaaatctcaagaaccacaatataaactcttcagaggacgttaa

SEQ ID NO: 95 - DNA, 3078 bp, Saccharomyces pastorianus
atggaacgcaagaagacgcttataaactcaagtgtttctaataataatagtgccattaagggtctgcagttattcatagctgatcttcgttcttcacaacaagcacaggagcaggaaaagagaatacattctgaaatcgttaaaattaagcagcatttcgatattgcaaagaaaaaacaaggcaatcacgacagattaggtggttatcaaaggaaaaagtatgttgccaaattggcgtacatttatatcacttccaatacgacaaagttgaatgaaattctattcgggctagaccagacggtagagctgttgaaatccaactcgttttccgagaaattcattggttacatgacccttgaattgctttatgaacataatgaaattgtaaaaagaattaatgatagggttaattaccaattgatcaaagacctctcttctcccgatgataattttgttgcactggctctaaattttgtcggtgtagtagggaaggtcacgaaccgcttggcgtacaacgatgacatcacaacgggtgtattcaaaatattaagatccccaacttcctccctttacgtaaagaaaaaatccgctttatcatttctagcactattaaaaagcaaccattccatattaaccgaggatttacagcgtaaacaattatggatacaaagaatattgagtttactggatgatacagaaaactatagactaactttggccactgtcccgctaatcgaatttattgcaaaatacattgatcctagttattgtacaagactattacctcaattgactgagattttgtacaactgtgtggttgttggtacctccaattctaatgacaatcagttcccgctggaatacaagtttgcgaatatgcctaacccttggttgataactaaggtggtatctttgttaagcattttaattgcttctccaacggaaagagattttggtgcgttattacaaaccaataatatagatgacgaaatcctaaataagcttcgaaaatgtgtctctgttgccatcgaattaggcactagacaaggtcaagatccaatggaacgtattgtccaaaacacagtgttgttttcattgataaattttgcctctaagttagaaccatcggatgaggccatcgggaattcagtgtcagcattatgctccctgctggcatcgaaagagatcaatattcggtatttaacattggactcattggttaaactatgctcttcaagcggtaagccagcaatcgatgcagttcgttataaaaatctggatatgattttccacctattgaacactgaaagagattcgtctattgttagaaaagtcgtcgacttgctatataccttcaccgatgcggaaaatgtcaaaattattgttgatggattgttgcagtatattttatctccaaaaaatcttgctgaaccacaaataaaatccgatattgctgttaagattgccatcctaaccgaaaaatatgctactgacattaattggtttgtaattatttcgttgaaattgttatcgttaacatcgaataccactattaatgatgacgagatctggcaacggttatgtcaaatcgtagtcaacaatccatctttgcacaagttgacatgcgagcaacttgtggattatttatgtaaaaagcaagcatcagaagctattatcaaagccgcagcattcctgttgggtgaatattccagcctcattattgataggatttcgggtgtaaatttatttagtttgtttgctgaaaagtattttagcgtgccaaacgtagctaaagcaatgatattaaccacaatgatcaagttgtacaaaacctctcccgaaataggctctaatgttataaaatttttccagttagagttgaattctctagatattgaactgcaaacaagatctttcgaataccttaatattatacaactggctaaagtaagcgggaatgccaacatgttacaaatcctgtttgagccaatgccaccattcaatagcaaatcaaacccattattgaagagattgggaacactacctacatcagcaggaagtgcgactttgataaacacttcttctgcagcctcttcttcaactcctgatttagtacccaagagagcaagctcaactcaatcgatcggggttccaatgcctcccccatcacgtagaaacacagtcatcgatggtaattctaaaattgatttatctgaagactcatcagggagggactcttattactcaagacagatcttggccccaaattggagagagggctttacgagaatgatttcacataaacagggtgtgctctatacatcctctttaatcaaggttttctatcgaatcacaacgcccgatccacaggaaccatatgcgtttcaagtatctcttgcctacattaacttgactgaatgggaaatcacaggactatccactcaagttatagcttcaaagacacaagataatcccgagtatgtgatcatgaacgtcaacgtgccctcggctgctacgatcaagccccataaaagggtggaacaaagttacgaagtttccgtaaggaaatcgtttgacgtggaagacagtccaattttggcaattcattttaagtgtggtggtagtacgaatactatcaatctgaaaacagctatcggtgtgaccacaacattagttagtagcgaaataaacccaagtatgcacttgaccttagcacaattcattggccgttggagaacattgagcgacgctctcggaaaagacggagaataccaaatatatggcataaagcttaacaaggacttcaagaaagttgaaactatcgacttagaagatggactagtattattaaggcaaatattgaaacggttgggttttgatatagttgaacaaactagtgttcatagcacactatttgtctcaggtattatccatacaaagagcgaggggaactttggttgcctaatgaaaatacaataccaagaaaatggtttggcaaatgttacctgtaagacaacgacagctggtcccctcgccaagtacattgtggagtgtatcagggatgtactaacgaagtga

SEQ ID NO: 96 - DNA, 774 bp, Saccharomyces pastorianus
atgtctacaaatattgcttatgatgatgacagaaaaacggaattgattgctcaatacgagtccattaggaaagaagtggaaacagaagcaagaaaggtttgtgatgataaaagtgcctctaaggtttctattttagctgtttcgaagttgaaaccggccagtgatataaaaatcctgtacgatcatggtgtaagagactttggggaaaattacgttcaagaattgatagaaaaatcaagcttattacctgatgatattgactggcattttgtcggtggtttgcaaacaaataaatgcaaagatttagcaaaagtaccaaatttgcgcattgttgaaacagtcgactccttgaaaaaagccaagaagctaaatgagtcaagggctaaatttcaacctgattgtgacccaatattgtgtcatgttcaaattaatacatcgcatgaagatcaaaaatcaggcctaagtggcgaaacggaaatattcgatgtgatttctttctttttgtctgacgagtgcaagcatatcaaactgaacgggttaatgactattggctcatggaatgtttcccatgaagatggtgaagaaaacaaggatttcaccacgctggttagttggaagcagaaaatcgatgctaaattcggaacatcattgaagttgtcgatggggatgagtgctgattttaagcaggccataaaacaaggagcatcagaagttagaattggaacagaaatttttggggcaagacctccaaaaaatgaagcaagaatcatttaa

SEQ ID NO: 97 - DNA, 2115 bp, Saccharomyces pastorianus
atgagcagatctattgatgtcatcacgcatttcggcccagaggctgataaaccagaaataattactgaattacagaacttaacgaaggtacacgcattgactgttgaggatttgtatattaaatgggagcagttctccaaccaaaagcgtcaaacgcacacagacttaacctccaagaatctagatgaatttaaacaattcttacaattacaaatggaaaagcgtgctacgcaaatctcttccaattccaagataaacccctcaatcaagaaacctctcataaataagagcttgaactcaagcccactgtttggtcttaatattcctaagactccaacgttaaagaaaagaaggctacatggaccttcttcactcagtgactctaagaaaccttatactgcgggttctgaggtagaaacaaatggtaacggtgacagctcattaaaattggaattcacaccaggtgtgccggaaggtaacgaggatacgaagtttcaaccatctgctaaaagcctcaatgtaaacacccccaatccatcaacattccaaactccaacaataaacaccccaaccgcgctgaaactgagtacaactggtggtaaaattttggattcccttaatcctgaaaacgttgaaatatctccaggtaattcaaatgtaggtttagattcaactgaagaattacctcctagtgaagttagagtcgaaccattctatgatgctaaaaagtatagatttagaacaatgagacaaaacttacaagaagcttccgacgttctcgacgatcagatcgactcatttaccagaattattcaggatcattacaagttgtccccgaatgattttgctgatccaaccatacaatctcagtctgagatttatgccgttggaagaattgttccagactcgcctacctatgacaagtttttaaacccagaatcacttgccttagaaacttctagaatgggcggtgttggtaggagagtaagactagacttatcccagatcaacgagctttctttttttttaggacaaatcgtagcattcaaaggcaaaaatgctaacggagattacttcaccgtcaattccaccttagcgctaccttacccaaattctcctgtgtctacgccagaagaacttcaagagtatcaagcaaatttagaaggttcgtctctaaaagttattgccacatgtggaccatactttgccgacgatagcttctccctggaactattggaggatttcattagtcgtatcaatactgaagtcaaaccacacgtcttgatattgtttggtccattcatagacatcactcaccccctaattgccagcggtaaactgccaaatttccctcaatttaaaacgcaaccaaaaacgctggatgaactgtttttaaagttattcacacctatcctaaaaacgatatcaccacacattcaagtcatactgataccttctacaagagatgctatctcaaatcatgctgcgtatccacaagcctctttgattagaaaagcattacaattacctaaaaaaaacttcaagtgtgtaacgaatccttcctccttccaaataaatgaaatatattttggctgctcaaatgtggatactttcaaagacttgaaagaagtcataaaaggtggtactacttcatcgagatatagactggaccgtgtttcggagcatatcttgcaacagcgcagatactatcctatatttccaggcagcattcgtacaagaataaaatctaacaacatacaagtgaagaaggaatccaacaacgtgaagggtaatgaagaaaaagtatatgaacatatatcaggtgccgacttggacgtaggttacctggggttgaccgaattcgctggcgggttcaccccagacataatgattataccaagtgacctacagtactttgcaagagtggttcaaaatgtggttgtgataaaccctggaagattcattagagcaaccggaaatagaggctcgtatgcacaaatcacggtaacttgtccggatcttgaagatgggaagttaacactcgtcgaaggtgaagagcctgtctatctccacaatgtatggaagcgtgctagagttgacttaattactagttga

SEQ ID NO: 98 - DNA, 1026 bp, Saccharomyces pastorianus
atgaccatggatagcagcaacagcagcagcaacgagatcagcagagataaaaacaacaacaacaacaacgagatcagcgacggcctacccttggtgcaatgtgtagcaagagcccgtatacctactacgcagggtccggatatcttcctgcatctatacagtaatgatcgcgacaacaaagagcacttggccatcgtatttggtgaggacatacggtcacgctcactgttccgcaggaggcctcacgagacgcagcaggatcggatgatcaggggcgcgtacatcggcaagctttaccctggcaggacggtggcggacgaggacgatagactcgggctggcactggagttcgacgagcgcacaggcgagttgctggcctccacggccacgacctgggaccctcaccatcatacgctagtccggatacactccgagtgctacactggcgaaaacgcctggagtgcccgttgcgactgtggagagcagttcgacagggccggcaggctcattgcatgcgaccgtgagccctcgagcaacattcaaggcggaaacggccacggcgtgatcgtgtacctcagacaagagggccgcggaatcgggttgggtgagaagctcaaggcatacaatctgcaggacttgggcgctgacacagtgcaggctaacctgatgctgaagcaccccgtggacgcccgagacttctcgctaggcaaggccatcctgctggacctgggcgttgcaaacatcagacttttaacaaacaacccggaaaagatcaaacaggtagaacacgtgccgctcctcaaatgcgttgagcgagtgcccatggtgcctatacactggacaaactctagtgagggcatagactccaaagaaatagagggctacctcagaactaagatagagagaatgggccacctactgacggagcccctgaaactccacacgaatcctcaacccactgagacaaaccaaaagcaaacccaaatgaactccgcattgtcatcgtcatccactttggcaatatag

SEQ ID NO: 99 - DNA, 1014 bp, Saccharomyces pastorianus
atgaatgataaacttcaaaaagaacataaaaaaaacgataacaccacgcaatttaatgattttacggccccgcatatgagtatagacttccattcaaataataatagcaatatcattgagactattggcgtttccaaacgactgggcaattcagtactgcacgaactggattccagagccacgtcgaagtttgaatttctaaaagaccaacagcagtacgacgaaaacagtaacagccaaccacaatcgagctcgcataatatcaatgagtttttccaaacaaaacatgattctcaatttggtcagatggagtcactagacactcattatatggtcttgcacacgccaaagaggaaatcccaacgtgctgtccctcaagactcatcggaatcaatgaagaggtcaaggccgtcacactcaattcaatacactacgccagtggtcaacgatatcacaagaagaatacgaagattgaagctgcggaactcactggtcaatgggaatgacatcgcagccagggcaaggtccatgcaagcaaactctaacgtaaactcaataaagaacacgccgttgtcaaagcccaaaccgttcatgcagaagccgaactttttaatgcccactacaaattctttgaacaagatcaaccccgtacatcctaatgctcaccgcaatgctcccttctctacgtctgcatcggtgcatccacgatctaaattgcccaaatctgcaccaataagagatttacattctaagaccaggccagcagaacgcacgccaactgcgccaggaacgagttctcagttgaagaattcagtttctgtttttgatagactttacaagcaaacaacgttctctaggtcatcgtctatgaacaatttatcattagacggttctgcaaagaccagcaatgcgaatgcgaagacccggatggtgaaaagtaagacgagtggctcgttgtccagccatctcaaacaagacgcgacctctaagaatgataggcctgtttggcgatga

SEQ ID NO: 100 - DNA, 957 bp, Saccharomyces pastorianus
atgtcttccaacgctcaaatcaacaccccactaccacccgccccagccccaaagaaggaatccaattttctgattgatttcctcatgggtggtgtcagtgccgccgtcgccaagaccgctgcttcccccattgaaagagtgaaacttttgattcaaaaccaagatgaaatgttgaagcaaggaactctagacagaaaatacggtggtatcatggaatgtttcaagagaaccgcccaacaagaaggtatcatctctttctggagaggtaacaccgctaacgttatccgttatttcccaactcaagctttgaatttcgctttcaaggacaaaatcaaggccatgttcggtttcaagaaagaagaaggttacggtaaatggttcgccggtaatttggcatccggtggtgctgccggtgctttgtcattgatgtttgtctactctttggattacgcaagaactagattggctgctgactctaaatcctccaagaagggtggtgctcgtcaattcaacgggttagtcgatgtttacaagaagactttgaaatctgatggtatcgctggtctttacagaggtttcttgccttctgttgttggtattgttgtttacagaggtctatactttggtttgtacgattccttgaagcctgtattgttgactggttctttggaaggttcgttcttggcttcattcttgttaggttgggttgttactactggtgcttccacatgttcttacccattggataccgttagaagaagaatgatgatgacttccggtcaagctattaagtacgacggtgcctttgactgtatgagaaagattatcgccgccgaaggtgtttcttctctattcaagggttgcggtgctaacatcttgagaggtgttgccggtgctggtgttatttcaatgtacgatcaactacaaatgattttgttcggtaagaaatttaaataa

SEQ ID NO: 101 - DNA, 285 bp, Saccharomyces pastorianus
atgtcgttcgtccccattgtatgtggtacgaggagtttcgactcttcatacgattctgtgcccgcacaccagaatctatactgtccgaactgccacaatttcagcgtgtgccctatcaagagaaaagagtttttcaccgtctggttcataccgctgcttcctgtgttctggggcaaacagctgcattgtcccatctgcaattggcgacaagacttcaaaaacgaagaacagctcaacaaagttatccaagagcaacagaacatgcgacaaaagcagcccagctaa

SEQ ID NO: 102 - DNA, 1161 bp, Saccharomyces pastorianus
  modified_base (220)..(315): a, c, g, t, unknown, or other
atgtgcgccaatattccagaatccgacttcttttacgaaaaagaaaatttgaaccacaacttggaatcccttacgcctttaaactgtgatgttaactcgccctttttccccataattaatagtgacgttaatatcaatgactacaatgatgaaaacgtgacttattctaattttttattgtcttataagaataagctccctactacaactaataacaatnnnnnnnnnnnnnnnnnnnnnnnnnnnnnnnnnnnnnnnnnnnnnnnnnnnnnnnnnnnnnnnnnnnnnnnnnnnnnnnnnnnnnnnnnnnnnnnnagtaacaatctactgggtaatgacataagccaaatagctttcttactagattacccttctactctcaatgaaccgcaatttgccgttagttgcaaggatatttacaaaaaggatatatccaccccttcttcgttggtatcgagcttaccatctgccaatttttcgttatctctatcaaattcaccctcccctccagcaccactatcttcctccttaaagcaggaaaaagcgtcagatcgtgacttcgaaacaaacagcgccatcttcgctgaccctgccgcatttgaaagggagacatttacgcaagaactaacgttggaaaacctaaataatcagctaaactatccggatttcaccataaacgccgttgagcaagatcccgttccttcttctttttcgtcgtcctcgtccgagtcttcagaatcgtcatcgtcttcctctaagaggaaaggaaaatcctgtcacgattcattctctcactcttcaccctcctcttcttctgagtctaagaaaatttcagactccagattatccgctgaaggtttggctaaagtgctaaacttggagtcccccgaagaagcgttgaaaagagaacgcttcatactgggcattttccagaatgaactcaattacccgctaggctacaagacatggattagagacactacaaaggaatacaggacaaaattaatcaatcaactgcatcaacgcgtaaaggtcaagtatccggaatacgaccaatccattttggaaactataattaggcggggtacctactacatgatgcagagtaggttaagaagggaaagaagaacgaaactaaaagaacgtaaaagaacaacctaa

SEQ ID NO: 103 - DNA, 321 bp, Saccharomyces pastorianus
atggccaaatcgatacgtgcaagcagtcatctaaatgccaagtctatcaagagacgtgcagttttccagaaagtagtggacgcacgtgaacaaagaatatctgacagattaaaggaagatatgctcaagcagaagctagcagacctaaagaagaaggaagagcaaggaatcgaaatcgaggtcgacgagaaaaaacctgaagaggaagcctccaaaaagaatgtaagcacttctggttggagagatggtagacatcacatctacaagaaagccaagctgacgaaaaaatccaagaagaagacatctttcactaggttttaa

SEQ ID NO: 104 - DNA, 438 bp, Saccharomyces pastorianus
atggatagaaatgtatatgaagcatgcagtaatataataaaggaatttggaacgcatacagtgagtgcagatgaagtactcgctgaaaaaatagataacgtggtccctataccattcaaaacaagagaagatttgaatactgatgcagagaaagatagaaacgaaggtgtctttgagggcaatatcgttcccgatatcgacttacgcgtggtacactactacgccacacagctgtgtctaagtaagtacccacatttaattaacgcctttgatgaaacaagtcttgtcacattgggcttgcttattgagaagtgggttaaagattatcttatttgcaccaatacagaagacactagtcaaaataaaaccatcggaaagggaccatgcgaatttatatcaaagcacatcgattatagacacgccccaggtagcatttga

SEQ ID NO: 105 - DNA, 2610 bp, Saccharomyces pastorianus
atgtctgataatagaagacgtagaagagaagaagatgattcagaatcagaaaatgaattgccgccctcttccccccagcaaccttttaggggaggtatcgacccgatttcttcgcccataggtgctccagatatgattaatcctgaaggtgacgataacgaagttgacgacgtgccagatattgatgaagtggaagaacaaatgaacgaagtggacttgatgggcgatgatatgtacggagattatgcgacggatcgaaacagagatatgtatgatgcaaatcaagttgatgataggcagcagcaagaactatctttgagcgagcgtcgtcgtattgacgcacaactgaatgaaagagacagactattaagaaatgttgcctacatggatgacgaggacgaagaacaggaaggtgctgcacaactagatgaaatgggtcttccagtgcaaagaagaagaagaagaagaaggcaatacgaagatttggagaatagcgatgatgatctgttaagtgatatggatattgatccattaagagaagaattgaccttagagtccttgagtaacgtcaaggccaatagttactcagaatggattacccaacccaacgtatcaagaactatcgccagggaactgaaatcgttcctgttagaatacacagatgaaactggtcgttccgtgtacggtgcacgtatcagaacgttaggtgaaatgaactctgaatctttggaggttaattatagacacttagcagaatctaaagctatcttggcgttatttttggccaaatgtcccgacgagatgttgaaaatattcgatttagtcgccatggaggcaaccgaattgcattatccagactatacccgtattcactccgaaattcatgtaagaatttctgattttccaacaatatacagtttgcgtgaattgcgtgaatccaatttgacctctttggtacgtgtcactggggtggtgacaagaagaacgggtgtcttccctcagttgaaatacgttaaattcaattgtttgaaatgtggctctatcttaggtccatttttccaggattctaatgaggaaattagaatatcattctgtacaaactgtaaatcaaaaggccctttcagggttaatggtgaaaaaacagtttatcgtaactatcaaagagttacacttcaagaagcaccaggtaccgttcctgcaggtcgtttaccaagacacagagaagttattttattggctgatttggtcgatgtatccaagccaggtgaggaagtggaagttacaggtatatataaaaataattacgacggtaacttgaacgcaaagaacgggttccccgtcttcgcaacggtgattgaggcaaattctgttaaaaggagggaaggtaatgccgctaatgatggagaagaaggtttggatgtctttagttggactgaagaagaagaacgtgagtttagaaaaatttctagagatcgtggtataattgataaaattatctcttcgatggcaccatccatatatggtcacaaggatatcaaaaccgctgtagcctgttcattgttcggtggtgtgcctaaaaacatcaatggtaaacattcaattcgtggtgacatcaacgtgttattattaggtgatccaggtactgccaaatctcaaatcttgaagtacgttgagaaaaccgcacatagagctgtctttgccactggtcaaggtgcttcagccgttggtttgaccgcatctgttaggaaagatcctattaccaaagaatggactttagagggtggtgcattagtgttagccgataaaggtgtctgtttgattgatgaatttgataaaatgaatgaccaagatcgtacatccattcatgaagctatggaacaacaaagtatctcgatttctaaagccggtattgttaccacattacaggcacgctgttcgattatcgctgcggcaaatccaaatggtggtagatacaactccacattacctctagctcaaaacgttagtttaactgaaccaatcctttcaagatttgacatattatgtgttgtcagagatcttgttgatgaggaggctgaccgaaggttggctacgtttgttgttgattctcatgtgagatctcatccagaaaacgatcaagatgaagaagataagctagccaaagaaaatggagagtcggtgatagaacaaggcgaagatgaaataaatgaacaactcaccgcaagacaaaagagacttcaaagacaaaggaaaaaggaagaagaaatttccccgatttcacaagaactactaatgaagtatattcactatgccagaaccaaggtctaccctaaattacatcaaatggatatggataaggttagtagagtatacgccgacctaagaagagaaagtatttctaccggttcattcccaattaccgtccgtcatttagaatccattttaagaatcgcagaatcctttgctaaaatgagattgtctgaattcgtgtcttcttatgatttggatagagctatcaaggtcgtggttgattcatttgttgatgctcaaaaggtcagtgttcgtcgccaactccgcagatctttctctatttataccttgggccattga

SEQ ID NO: 106 - DNA, 435 bp, Saccharomyces pastorianus
atgaacaccaacgaatctgaacacgtcagtacaagcccggaggacatccaggaaaacggcgggcacgcgagctcgagcggcagccaacagcagatctccacgttaagggagcaggaccgatggctgcccatcaacaacgtggcgcgactcatgaagaacacactgcccccgagtgccaaggtttcgaaggacgccaaggagtgcatgcaggagtgtgtaagcgagctcatctccttcgtgaccagcgaggccagcgatcggtgtgctgcggacaagaggaagacgataaatggcgaggacatcctgatatcactgcatgctctgggctttgagaactatgcagaggtgctgaagatctacctggccaagtacagacaacagcaggcgctgaagaaccagttgatgtacgagcaggacgacgaagaggcgccttga

SEQ ID NO: 107 - DNA, 1551 bp, Saccharomyces pastorianus
atgccacctagtggccaaatactacgcgatgaaaagcctgaaaatacgttaagatttctaaccttcaatgtcaatggtataaggactttttttcactatcaaccattttctcaaatgaatcaatcgcttggatctgttttcgagtattttcaagcagacataataacattccaagaactgaaaacagaaaaaaagtccatttttaaatgggggaaagttggtggtttctactcttttatctccatcccacaaataaaaaagggctattctggtgttggatgctggattagaataccagacagtaatcatccattatatcgtgcattgcaagtttgtaaggcagaagaaggtataacgggttacctgggagtgaaaaacggcaaacaaccagcagtttcttatagagacgatacgagtcaagggattggtggttacgattctttagattctgatctggatgagaaaactgctctagaactagactcagaaggaagatgtgttatggttgagctagcatgtggtatagttgtcatcagcgtatattgtcctgcaaattcgaatctatcagagaagggggaactgtttagaatgaggttcttaaggattttatttaggagaattagaaatttggacaaaatggggaaaaaaatagtattgatgggcgacctaaatgtttgtcgagatcttatagacagtgccgatacactggaacaactctcaatttcaatagtggacccgatgggtgggaaggagttagaagcgcagcgtaatgaagaagcaatgcgattcatcatcaacccagaaacacctcatcgaagaatattcaatcagattctggcagactcgcttttacccaacgcaagtaaggagggaatattgatagacacgacaagactagttcaaacaagaaaccggcttagaatgtatacagtgtggaatagtctcaaaaacttaaggccttcgaattatggctctagaattgactttatcttggtatcctcgaaacttgaaaagcttgtaagaggaggtgacatccttccagacgtattgggttctgaccattgtcctgtatactctgatttagctttagatgttttcgaagtgaaacctaacacggctaacgttgccatcccaaaattcgaagcaaggtacaaatacaatttaagaaaccatgatatcctagaaatgtttgccaaaaaagatcccggtaaaggacacaataaacaacaatctcgtataacgaaaggtgttagtacaaagagaaaaaatattagtgacagcaaaccactcgattcatttttccaaaaaaaagattcatcaatcaaaaagtcttcggaattaccagagccaaataaacaaacaagatcggcatcaaaatttacttttaaagacgcgtttggaaagccccctttatgcgaacatggggaagaatccatattgaagacatctaagaccttggccaatcctggtaaaaagttttggatttgtaagagatctcgaggtgattcaagcaataaggaatcatcttgtggtttcttccaatgggtttga

SEQ ID NO: 108 - DNA, 837 bp, Saccharomyces pastorianus
atgagtgatgaggaacgaatagaggcgacgataaatgaatctgatgttgggagtgacactagtgatgatttcgggaatttctcagatgcttcagtggaaaatgacctatataataccgtaacgatatcttcagaggccgtaatagacggttgcttagacaaaatcctgccagacgggaatttttctagtttagaaatggggactgtgaaaagcaactgttgtgagcttagtagattgattgaagatgaacgaccccatgtcatttatgaacagctagtacaactggattttgtattacagccattcgtatggaataaatcccacatacggaagaacttgctgcacattctaagattgtccgataacgatggctctgataatgcacatcttaagaagcaggaagagccactgaacgatgaattgttcaaaagaatatgcgatatagtagaaaaaaatgagcaaacagccactggtctatttctgagagataatttcaagatcgattacaccccacccatgactttgaaatctattcaagttgaagaggagcatgaacaagaacagcatataccgcaattgctagcggccgattatacggatatggatggagaagcattacgccgataccatgataggctgtgtcaatccattgactttctggtaagtaaatcgaaatcgctgaaaaagaagcagcaagatcttcttaatgataagacgacttttgaaaatgtggtaacgaacttgactgggcacactcaaaggctccagagagatgaaattgcattgtataataaaaagcgcagcaaaaagaagaggttcagttgggttggatactga

SEQ ID NO: 109 - DNA, 2040 bp, Saccharomyces pastorianus
atgagttttgatacgcctgcagattcgcagatactcggcactagatatcttgccctcgaggtagcagaaagtgatgatgctgatagcttattggcttcttcatccacaggtagtccagcagtggacccagcaaagagggtttacaagattccatcatacaagagttcgatagaagacgagaatcaatggtctcttggtcttgcgcgctctccagcatccaaggcaaggcctgcaggaagatccatagaaaacgaggaaaaccatagtaagcgatcttccacaggctcatctctcaagcaactcttcaataaaattgatatcaatgatactattcactcttcaaacaaagaaaacacctctcaagttcagctatcagaaaacagaattccgtctccttctaaaaggttattgaagcaaagtcatacgaaggtagcaaactccaagttccgcacaccattaaggcccatttcagatcaatcaactttatcaagggacgaaggaatcagggactttggtctgcttaactctcgaagtggagataattggcggagccccaacagtgacaagagggccagttctcatgtacactcgccaagtattacttctattgattcttttagttccagtgtgtcttcacccaagtggaaattctggaagaacgataacctattgtctaggtcattgtcgtcaagatccataaatgtccaagcttcagactctgcacgatcacagacaaccaatcagttgcagaaaaaatcttccatctcaagtttccagaattccatctttggcagtggaaatcacacccaaaagaaaagggattctggatttattatgcctgatcatcaaagcacgaaggaattgaaccataaacattcctcatctaatctttcttttagaagtttgaagcacaagacatcgcactcctccctaaataaacttaagataagacgtaaaggaaacacacaagaatcgaatggccaagcaaaatcagcctgccagatctcgctgcctgttccagatcaagtgtccagggacaagatgcaattgaaattaaaaaattccacgtcactggcatctttatcttcagagattactcctataaatactttagactacaacgattcaatcttacaacaaattttacagctttgcgacgtcagttatatattacatgacctatttgaagcccaatcattaaatttgattatgctaaacagtaattcagttcaactatctcgtaatttttggaaaacttattatagcgatacgcaagcttcaattatttgtaagaaaatcagtctcggcactttgagtgatctaaccacttcaaattttatatctctgcacgagttgaaatcacttcgattcttgcaaggaactactggggttgctcatttgttgcaagcgtatattatgccatcagatcagaataaaggtgaccaagccttggtatttttgtacttattcttcaaagaccatggaactcctctgtccagatgtcccaagattgattactgtcaagcgttgtccattttttggcaatgtgctagcattctgtacgttactgaatccaaatttcaatttgagcacagaaatttgaccttagaccatattttggtggatcctagagggaatgttactctgattgatctaaaatgctgccgttttgtaagtgtaaacaccaataaagcattttatacaagattagaccaccctttttttttccaaggacaaggaaacttacaatttgaaatgtacgaatccatgagaagtttgttatctcagccgacatcctgggctacttttgaaccaagaacaaacctattatggttgtattatgtcagtatcaacttgctaaagatgggcaggaaaagcggaggctcccacgtttcgaaccatgaagaaagtgtcttgattaaattggcacatttgctcgatccagctcgaagacaatccaagaaaatttttaagaaaaaagatctttctatcagaacatgcggtgatttattatcttccagacaagatatcatggaataa

SEQ ID NO: 110 - DNA, 3633 bp, Saccharomyces pastorianus
atgaccgtgtttctgggcatatacagggccatctatgactacgagccgcaaactccagaagaactggccatccaggaaaatgatctgttgtacctgctacaaaaatcagacatcgacgattggtggacggtaaagagaagagtcattggctccgacagtgacgagcccgtgggtctagtgccctccacttacatagaagaggctcccatcttaaagaaagtaagagccatttacgattacgaacaggtgcaaaatgcggacgaagaattgacttttcacgaaaatgatgttttcaatgtgctcgatgataaagacccggactggctgctggtgaaatctactgtctcgaacgagtttggtttcataccaggtaactacgttgaagtggcagacaacgctgctcccaagcaagaagcggccccaacgggagctcctgctgccgctcctgctgctgggctacccaccagctttttgccgccacctcaacatatagcacgtaagcaacaaattgaacaagaccaaactccagaagaggaggaagagggccctcctcctgccatgcccgcgagaccaagagccactactgaaactactgaaaccaccgctatggcaggtccagctcataacagattatcttatagcgatgacgataacaacgatgacgaagaagaagattatgactactataatagtaacaacaacagtaacagcggtgccaatcgcgaatacaacacagaataccattcttggaatgtcacagaaattgaaggcagaaaaaagaaaaaggccaagctatcaattggtaacaacaaaataaactttattcctcaaaagggcgctcctcatgagtggtccattgataagttggtctcttatgataacgagaagaaacacatgtttctagaatttgttgatccctatagaagtcttgagttacatactggtaacactaccacgtgtgaagaaatcatgagcatcattggtgagtataaaggtgcttctcgcgacccaggcttgaaagaagtcgaaatggcctccaaatccaaaaaaagaggtgtcgtgcaatacgatttcttggcagaatctcaagacgaattaaccataaagtcgggcgataaggtttatatcctagatgacaaaaaatcgtcagactggtggatgtgccaattaatcgattcgggcaagagtggtcttgttcctgcgcagtttgttgaacctgttcgtgataagaaacataccgaatctacagctagcggtataatcaaatccatcaagaaaaatttcaccaaatctccttcaagatcgagatccagatcaagatccaaatccaatgctaacgccagttggaaggacgatgaatctcaaaacgacgctgccctcagtactagcggtgcaagatcaagaaagggttcattgtcctctcacaagaaaaactcgtccacggcggggactaaagatttccccaatcctaagaaatcccgtttatgggttgacagaagtggtactttcaaagtagatgccgaattcattgggtgtgccaagggtaaaatccatttgcataaggctaatggtgtcaagattgctgtggccgctgataagttatgtaatgaggatctggcgtatgtggagaaaatcacgggattttcccttgaaaagtttaaaattcatgatggttctagttctcatggcactgattcaagggactctgaaagagaaagaagaagaagattgaaggaacaagaagaaaaggaacgtgatagaagattgaaggaacgcgaattgtatgagttaaagaaagccagagaactactggatgaagaaagagcaaggctgaaagaaaaggacctgcccccaataaaaccgccaagaccaacctcttctgtttccacttcaaacacaacttcccaatcgattacacaaaacaacaacagtaatggcaacaaatatgactggtttgaatttttcttgaactgcggtgtagacgtaagcaattgccaaagatacacaataaattttgatagagagcaaattactgaagatatgatgcccgatgtcgataattcaatgttaagaactttaggtctgcgtgaaggtgatattgttagagtaatgaaataccttgataagaagtttggaagagaaagtaatatagctgttccaacaaatatgacaggcaatatgttctcacaacctgatggttcattgaacccagccacaagtgctgaaacctctttacctcaacaactattaccgcaatcaacagcccctatagcaacagccccttctgcatcagcagagaccgatgatgcttggactgttaagccagcctctaaatctgaatccaatctactgtctaaaaaatctgaatttactggttccatgcaagatttgttggacctacaacctttagaacctaaaaagacttcgaccacgacaccagaaccaaatttgaaagacttgcaacctgtgaaaactggtggcactgctgctcctgttgccatttcatccgcccctactcccgctccattagatccattcaagactggtggtaataacatcttaccattgtccactggctacgtgatgatgcctatgatcaccgggggtgcaatgctacctatgcaaagaaccggtggcttcgttgtaccacaaaccacttttggtatgcagcaacaagtcactggaggtatattgcctgttcaaaagacaagtaatgggttaatcgccatctccaatactggaggtgctatgatgccacaaaccacttttggcacaacacccactattttacctttacagaagacgggaggtggtctaataccaattactacaggaggagcacaattgccacagacttcattcaacattcaaatgcaacaaccacttccaacaggcacaatattgcctgttcaaaaaacggctaacgggttaatttcaaccaatactgatatttcaatgccgcctttacaaaggactggtggtactatgatagcacaacctcaaattacgggtggtgctatgatgccacaaacatcatttggtgtttcgcaacaatttactggtaatgcaatgatggcccaacctcaaagaacaggtggtgccttaaatacattcaacaccggtggtgccttaaatacattcaacaccggtgctatgatgccacaaacatcattcaatgctcaacctcaaatcacaggtggattccagccccaatctcagttcggtttaacgttacagaaaacgggcggtattgcaccattaaaccagaatcaattcacaggtggagccatgagtactttcaacgtcggaggtgctatgcaacaacaaccacaacaaccccaaatgatgactactttcaataccggcaatgctatgcaacaaccccaaatgatgaacaccttcaatactggtggcgctatgcaacagccacaaatgatgaacactttcaataccggcggcgctatgcaacagccacaggtgatgagtacatttaacacgggaggtgctatgcaacaaccccaacagcaagcattacagaaccaacctactggatttgggtttggtaatggccctccacaatcaagacaagctaacatattcaatgcaactgcatcaaatccctttggattctaa

SEQ ID NO: 111 - DNA, 2889 bp, Saccharomyces pastorianus
atgaaggcgaaaaaaacaactagatcgaaagtttctaatgcatgtgtcaactgcagaaagagaaaaatcaaatgcacaggtaaacatccatgtacaaactgcatttcttataattgtaagtgcgtgtttttgaaaaagtacttgtccctagagagagatgctgctgttggcctgtcttctacgaatcctagtgtagatacctctgcaggtgtgcatcatcgtgacactacgactaaactagaacaccagaattacttcgaactaatgaacgagccaatacagactccagtctctccgagttctgcaagtgtcactaataataacgattacatcctttttaagggcgattctagttatcaatcccagctcactacgtatcagagtattctagcaaatttatattcgttgcccccttccaccgacactcaacttttaatcactaagaccaaggctcaactagacaacttaattaacaactggaaccctgagataaactatcccaagctttccaagctttcacctcctccacaaaagtccatagaaacttgtcttttagtgaataaatatagaagtaaggtttacatgacaaggttttcaatttggacggaccagatggtcaagaaccaaagttcagattcatttctggccactctcccgttagttgatgagatttttggtcttttctctccgctacaagctttttccttgaggggtataggttacttaatcaaaatcaatcttgataatgtaccttcaccaatgctgatagattcaaaggaaaccatttatttgatattaagactgtttgacttgtgttatgagcatctggttcagggttgtgtctctatagctaacccactagaaagttatcttcaaaggacaaaccaactctccgccacagcgacacctgttactttgtccacctcgccagcctctctgagtaatgatctggtcctctgtgtcatcaataaactacctcaaccgtttatccaaacaattacgggtttcacaactgctcaattgctcgcaaatttacacgacgcattttcaatgttccgcatcgtgacccaaatggcttccctccatcgaaagcgctttaaagaattcttaaatcaagagttctctttgccttatcaaaatcgtgatttgttttcatcattttgttcctctgaatatcttatatctacactttgttacgcatactataatgtcacgttataccacatgatagatataaatactttggattacctagaagatttggtgccccttctagaggttcaaaacgaaatcaacgatcattttggatttgaaaaaatgttagaagtcgcggtaatatgttgcatcaagatgggcttagctcgttgggagtactacgttggcatagatgaaactacggcagaaagaagaagaacggtttggtggaaaatctatcgcttggaaaagtatcatttagttgatcttggtgacctgtccctaattaacgaacatcaaattagttgccttttaccaaaggattttagggacatgggattcattaaccatagagaatttctatcaaaaatcggtacatcttctctatcatcatcgtctcctgaattaaaaaatttgtcattaaccagattgattgagtatggtcagctagcgatcgcccaaattgtgggagaatttttttcagagactctttacaatgaaaaatttacatctttagaaacatctgttaaaccaacactcataagacaaaagttattaaaagaggttttcgataatgttgaatcttttaggggtaaattggctaaaataaaatgtcatacgtcgaaggtcttcgaagtagcacaatctaattttccacaacatccaagaaatgacttgattgaagcagcaatattcacgagcttttataataatacgtggttttcaatcctgggtgccgtcagcaatctaattgctaggctatctgaagatcctgaagtgatgactgatcaatctttgaaatatggagaagaaatgtttcaagactggaaaaagaccaatgagtttttagcgaaagtagacactgatttcacggtttggagttgtttagattcctatgaattgatattcttcttgatggcttcaaaaatttacgtacaaagcccgagcgttactttagatgatgtcattagtactttaaaggtcttcaagaggattacgaaaatcatatatttttttaataacaatctagacgaaaaagattctgactgccaaactttcaaagaattttcgagaagctcgagcttaattgccatatcaattagaatcatttttatgagatattgctttgccgaaaaaatcgatagaactgaatttatcaaacgtttgaaacaagttgaaccaggtttaactaatcttttgaaggaattctttgacaatcgttcttttatttataaatatatgttgaaatcagtcgaaaaatcaggttttcatctaacaattaggcaaatgttggaaagtgactataaaatctcatacaaggacaaacaggccactggaaatatttcagaccaaagtaatttaaatagggcttctcacttaagcagcggcactaccccattctgtaaccactcttctacttccccagtaagctcacccttaaagctatcatctctgttgaactctggagaagtgccatatacccaagatgtgccaggaaatacttcaaatgatacgcctcatcaacaacaatcatcgcagcaagctaaaagacaacaatctgtgcctaatcaaatgaacaacaccgaaaataatatatacaatttgggcactttggaggaatttgttaacagcggtgatttaaccgatttatatcatactctctggaatgacaatatttcggatccctttctatga

SEQ ID NO: 112 - DNA, 7488 bp, Saccharomyces pastorianus
atggcaaaacaaaagcaaaccacaaaatcgtccaagcgatatagatattcctccttcaaggccaggatcgatgacttgaagattgaaccagctagaaacttggaaaaaagagttcatgattatgttgaatcatcacattttcttgcttcttttgatcagtggaaggaaatcaatttaagtgctaaatttacggaatttacaggggaaatagaacgtgatgttcaaacattaccccaaatattataccacgatgagaaaatttttaactctttagtttcatttatcgatatgcatgacgagttttctttgcagccgctattggacctcctagctcaattctgtcacgatttaggtcctgattttttgaaattttatgagaaagctatcgaaactctaataaatctgttagatgccgctatagaatttgagtcgtcgaatgtttttgaatggggttttaattgtttggcttacattttcaagtacctttcgaaatttttagttaagaaattagtattaacttgtgaccttttgattccattattatctcatactaaagagtacctttcaagattttcagcagaagcattatcctttctagtgagaaaggcccctgtccccaacttgagtgagtttgttagatctgtttttgggaaattagaaggagataatgaacaaactaatatttacgaaggtcttttgatattattcactgaatccatgacatctactcaagaaacgctacactctaaggccaaggtaatcatgggtgttttgctacaggaaggtttggcgaaatcatctacagaaagatctatttcattactgtcggatatttggatgaacattagtaaatatgcttccattgaaagtctgcttccagtctatgatgtcatgtttgagaagttcaactactcgcttgataccactaatatcgacagaatagtaaaagtattggcaacgatcattttttctgaaagtggtagaaaaattcccgattggaacagcgtcactagcttaattgaaaaattaatgaatgatgaaaacagttcttcgctctcacctgataacgtagcgttcctgtttgccgtgtttctccgtaatagtgatgttaaaactctaactcaatttcaccaaaaattgttcaattacgctttgacaaatatcgctgaccattttctcgaattctttaaatctgcattaaaactaaactatgaaagagtgctttcatttaatggtttgaaatttttgcagctatttttaaagtcaaactgggaatcacaaggaaagaaaatcgcactgttctttttagaaatagatgaaaagcctgaacttcaaaaaataatgagcgttactttcccagaagagctcatttcatccatcagagattatttcgtcaccgtagaagaaattaaagactcaaatgatctttttgaaatatattggagagccatcattttcaaattctcaaaattacaagattcagctgttatcacctctttacttgcacgtattttttcagcatttccaaccccagacaacttcaccaaagatacagttggtgccctattgagagtgtattccaagggagacgaagctctaggacaaaacttattaaaaaatattttggagaattacgaaaactataaggacagtttaggctttgtgagcggatggaatcagttattaagtaatctcgacccttcaaaaagcgtaacagacctactcccacagtatccagagctactgttaaacctaacagacaatctggtcttacccgatgggaaaatccgttacgaaactttcgaattgatgaaaacattaatggttttacaggatataccagtacctgatcttctttcttcatgtatgattatcgagcaaatacctcttacgttacaaaacgccagggatttgacaatcagaattaagaatgttggtgttgagtttggaaagactaaggtagataaactaacgtcctccttttttcttaagtacttgttcggtcttttaactgttaggttttctcctgcttggaccggtgtttttgataccctccctaatgtttacacaaaagaccaggctctcgtttggagccttgttttatcgtttatcaaatgtcctgaagaaaatagaaagttggactactacgagcctctacttgaagacggcccagacgcaattttgtgggactctagtgtagtaagattaagagatactattgattcgttctcgcaagcttggtacaaatattctacccagaatacaagcatcataagtacgactattgaaagacgggggaatatcgtttacccagccttaatcagaaatcaagctcttaaagttatgctatccattccccaagttgctgaagcgcactttgctgatatcgcaccttttgttttcactgatttcaagacctataaggatgaagaagacatggaagatggtactgaacgtgttattactggcgcatggatggaagcggataggaacttgtttttaaaaagtttaagcaaattcaaaaatataaagaatgttcacaacgcaaccgagttacacgaccatttgatggtgctactaggcagtcgtaatacggatgttcagaagcttgcattagacgctctcctcgcttacaagaatccgaccttaaataagtacagggacaatctaaggaatttgttagatgatactctatttaaagacgaaatcacaatgtttctaacagagaatggatctcaaactatcaagggcgatgatgagaaggtagtcatgccttatattcttaggattttctttggtcgagcgcaagttcctcctaccagcggacagaaacgaagccgtaaaattgccgtaatttctgttttgccaaacttcaaagaagtttatatcaatgactttttaactttggctagtgaaaggttggattgtaactactttttcaacaacaatcatcaaatagatagctcgaaggccattttaaaaactattagacgcatgactggttttattaacattttgaattctgcactatctgttttgagaacgaatttcccattacatactacatcagtgttacagccattaatctactcgatttctatggcatattacgttttggagactgagagcgcaacagaggtacatttaagaaaaatggcagcaaatttaaggcagcaaggtctaaaatgtttaagcaatatcttcgaatttgttggtactacgtttaattggcctgtagctatggacagtatttttgctgttgttgttaaaccacgtattccacatttttccgatgagaatttacaacaaccttcttctttgctacgaattttcctttattgggcaaataatccctccttgtacccatttttgtactacgatgaatttgcagctgctacagcattgatggacaccatctcaaacgaacacgtcaaggagactgtcattagccccattctcgaagcagcggatgcaattattagggcaccagtaaatgacgatcgttacgtggatttggtaactctgatttgctcatcttgtctgaaaatacttcctttgttatacactaaactttctgactccaactcaatttctatattcctggacttactaatcagtattattgagtcggacttcattcaagatgatgatgttagaagtcatttaattagctcattaacatccatactgaaaggaaagctaagaaaattgcacgaaaacgatacacagaaaattctgaagatattaaaacttttagtgtataactacgattgttgttggaatgatatcgaagagctctatagcaccatatcctctttgttcaaaactttcgatgagcggaacctgagagtttcattgacagagctcttcgtggaacttggcagaaaagtgccagaattagggaatatttcgaagttagttgccgaactaaattcgtattcttcatctcgtttgcatgagtatgatttccctaggattttatcctccttcaaaacgcttattgaaggtggctataaatcttatagtgagatggagtggttgcctcttttgtttacctgtttatattttatcaacgataaggaagagcttgcgctgagaacaaacgcatcgcacactatgatgaggtttgttgatttcattaatgagaagcctgattctgatgaagccaaaaaatcagtttctatgttaaaagatatccttttacccagcataagggctggtttaagacaacctgttgaagaagttcagagtgaatacatatcagttctatcatatatggtaagaaatgccaaatatttcacagacttcgaagatatgaccgttttgctttataatggtgatgaagaagcggatttctttacaaacatcaatcatgttcaattacatcgtcgtcaaagagccatcaaaaggttaggagaacatgcgtgccaactcaaagataacagtatatcccactatttaattccaatgattgaacattatgtattttcagatgacgaaaggtatagaaacatggggaatgaaacacaactagcaattggagatttggcacaacacatgagctggaaccagtacaaagctcttcttagaagatacatttctatgctgaagagcaaacccgaccaaatgaagcaagctgtactattaattgttcaactttcagttccgttaagggaaactcttcgtactgtaaaaggtgaggctgagtcaaagtttgctttgagcaaatttccttctaacttggaggagcccactaattttattacgcaagaattgtaccctactctttcaaagattttaggaacaagagacgatgaaaccattattgaaaggatgcctattgctgaggccctggtcaatactgtattggggctttcaaatgatgacattctcaattatcttccaagcattttaacaaatatttgccaagttctaagaagtaaatccgaagaattaagggacgccgtgagaactaccctgggtaaaatcagtattattctgggtgcggagtatcttgtttttatgataaaggagttaatggccacgctaaaacgtggttctcaaattcacgtattgagttacactgtccactacatattaaagagtttgcaaggagttttaaaacattctgacctggatccatcttccagcatggttgttaagatcatcatggagaatatttttggtttcgctggtgaagaaaaagattctgagaattaccacacaaaagtgaaagaaattaagagtaataaaagttacgatgccggtgaaattctagctgcaaatatcagcctgtcagagtttggtacattactttcccctgtgaaggctttattgatggtcagaattaatttgagaaatcaaaataaactgagcgagttattgagacgatacttgctgggtttgaatcataacagtgatgcagagtcagaagatattctcaagttctgtcaccaacttttccagcagtcagaggtgagtgaatctatacagaaaccgaagaggaaagtaagagcagaagtggacgaaaaagaggaatttttcttagtgaatttgaacgcgaagtcatataccatcaattcacacaattctctcttaggtagcactttacaaaaatttgctttagatttgctaagaggcgtactagcaagacatcgctcctttttgaccgtgtcccacttagaggcctttatcccatttttgagagattcgttactttcagaaaatgaaggtgtggtaattagcaccttgcgtattttggtcacattaatcaaattggaattttctgatgagtcgagcgaaatcttcaagaactgcgccagaaaggtattaaacattattcaggtttctccgtccacttcaagtgaattatgccaaatgggtttgaaattcctttctgctttcatacgtcacactgatgcaacattgaaggatactgccttgagttacgttttaggaagagtcttgccagatttgaacgaaccaagcagacaaggtcttgccttcaatttccttaaagcacttgtttcaaagcacgttatgctaccagaactttatgatatcatggataccacaagagaaatcatggtcacgaatcattcaaaagaaattagggatgtttctagaagtgtctactatcaatttttgatggaatacgatcaaagcaagggccgtttagaaaagcagtttaagttcatggtggacaatttacaatatcctacagaatccggtcgtcaatcggtaatggagttgattaatttgattatcacaaaagcaaatcctgctttgttgtcaagactatcatcttcgttttttttggcattagtcaacgtctccttcaacgatgatgcgccgagatgtcgtgaaatggcttcagttctactttctacaatgcttccaaaacttgaaaataaagacttagaaatcgttgaaaaatacgtaacagcctggttaaagcaagcagagaatgcgtcgttcttgaacctcgggctaagggtttataagatttatttgaaaagtgttggatttgagcataatgctgacctagacgaatttgctattaagcgtataagatatgtgctaaccgatacatctgtaggatcaaaacatgaatgggacttggtgtactcaagtctgaacacattctcgtcctatatagaagcgacagagggcgtgtacaagcaagatttcaaagacatatgggatggtgtcatcacatgtttgttgtatccgcactcttgggtccgtcaatctgcggcaaacctcgttcacttgttaataaacaataaagataagctggaggtaccattgaccgatttggaaattcaaattatcggcacaagaattcttcatcaactaggtgcaccttctatcccagagaaccttgctaatatttcaatgaaaacgttggttaatatttgtaccctatggaaagatggccacacgccattcgttatggatgcttcgaaggaaaatgaaggagagcccaggtacgctaccgcgattgattttatgattactcgaatcggtggtattattagatcagatgagcaccgtatggattcgtttatgtctaagaaggcatgcattcaactactggccttattcgttcaagtcctagacgaaaaggaagtaatcgatgaaggtgaaaagatattattacctttatatggttacttagagacttactattcaagggcagttgatgaagagcaagaagaactacgcactcttgccaacgaatgtttacaaattttagaaactaaactaccagtttttgagttcacaagaatatacactgctgtcaaaaagacagtattagaaagaagaaaggaaagaagatccaagagggcgattttagctgttaacgctccacaaatttccgctgataaaaagttaagaaaacatgcaagatccagagaaaagagaaaacatgaaaaggatgaaaacggattttaccaaagacgtaacaagaggaagagggcataa

SEQ ID NO: 113 - DNA, 399 bp, Saccharomyces pastorianus
atgtccggtggtaaaggtggtaaagctggttcagctgctaaggcttctcaatctagatctgctaaggctggtctaacattcccagtcggtagagtgcatagattactaagaagaggtaactacgcccaaagaattggttctggtgctccagtctacttgactgctgtcctagaatatttggctgccgaaatcttagaattggctggtaatgccgctagagataacaaaaagaccagaatcatcccaagacatttacaattggccatcagaaatgatgacgaattgaacaagttgttaggtaacgttaccattgctcaaggtggtgtcttgccaaacattcaccaaaacttgttgccaaagaagtctgccaaggctaccaaagcttctcaagaactataa

SEQ ID NO: 114 - DNA, 396 bp, Saccharomyces pastorianus
atgtcctctgctgccgaaaagaaacctgcctccaaagctccagctgaaaaaaagccagctgccaagaaaacttctacttctaccgatggtaagaagagaactaaggctagaaaggaaacttactcctcttacatttacaaagttttgaagcaaactcacccagacaccggtatttctcaaaaatccatgtctattctaaactcctttgttaacgatatctttgagagaattgctaccgaagcttctaaattggctgcttacaacaagaagtctactatttctgccagagaaattcaaaccgctgtaagattgatcttaccaggtgaactggctaaacatgctgtttctgaaggtactagagctgttaccaaatactcttcctctactcaagcttaa

SEQ ID NO: 115 - DNA, 315 bp, Saccharomyces pastorianus
atggccaagatcttttgtttagctgatgtttgtatggtacctgttggtaccaattctgccagtatatctgactttgttgcgttaattgaaaaaaagataagagaaagtccattaaaaagtactttacacagtgccggtaccacaatcgaagggccttgggatgaagtgatgggtttgatcggtgaaattcatgaatacggtcatgaaaaggggtacgtcagagttcacactgatattcgtgttggaactagaaatgataaacatcagactgcccaagataaaatcgatgttgttttaaaaaagatatctcaatga

SEQ ID NO: 116 - DNA, 2343 bp, Saccharomyces pastorianus
atggtagaattcttgccaaaagtcacagaaataaacccaccacccgatgtcgatgatggtgaggatgaggtggagcccctttcaaatggtcccgaacagcgatcattgaaagaagaggggcaacaaggtactagaaggcatcatcggcggttgtcctctatgcacgaatattttgacccattctgtaatgcagatgtctattacggtccggtaacagacccaagaaagcagccaaaacctcacagactaaacagaaccagaacgatgagtgttttcaataaagtttctgattttaagaacgacatgaaggattattccttgaaaagaaggggctccgaagacgatagttttcttagtagtcaacgcaatcgtaagttctttatcgataatgtggatatggctctagatgagttgctggccagtgaagatacagataggaactaccaaatcactatagaggatacaggtcccaaagtaatcaaagtcggaacagcaaattccaacggtttcaaacatgttaacatcagaggaacatatatgctttctaatctgttgcaagaactgaccatagcaaagagtttcggaagacaccagatatttttggatgaggcacgtataaacgaaaatcccgttaatagattgtcaaggttgataacgaatcagttttggaatagtctaacaagaagagtcgatttgtacaatattgcagaaattgctcgcgactcaaaaatagatacaccaggcgctaaaaatccaagaatttatgttccatataattgtcctgatcaatacgaattttacattcaagcatctcaaatgaatccgtctttaaagctcgaagtcgagtacttgccaaaacatatcaccccagaatacgtcaaatcattaaacgatacacccggtttgttggcattggccatggaggagcatgtcaatccatctactggtgaaagatccttggtcggctacccctatgcggtccctggtggtagattcaatgaattgtatggctgggactcgtatttgatggcattggggctcttagaaagtaacaaagttgatattgcaagaggtatggtagagcatttcatatttgaaattgaccactacgataagattttgaacgctaatagaagttattacctttgcagatcccaacccccgtttcttactgatatggccctgttgatctttgaaaaaatcggaggtaagaataacccaaacgctatacaatttctgaaacgcgcatttagggctgctattaaagaatataaaggcgtatggatgtcaacccctagattagatccaattactggactttcttgttaccaccctgatggtataggtatccccccagaaactgagcctgcccattttgatacgatattgttaccatacgctgaaaagtataatgtttctttggaaaaccttagaaagctttataatgacggtacaataaaggaaccaaagctggacgcctttttcttacacgatcgtgctgtgagagagtcgggacatgacacaacctatagatttgaaggtgtatgtgcatatttagcaacgattgatttgaactctttactttataagtacgaaatcgatattgctaatgttatcgaggaatactttgatgatgaatactttgatgagaatgatggaacggttactgatgctaagcattggcggaaattggccaaaactagaaaggatagtattaacaagtatatgtgggacgaaaaatctggattcttctttgattataatattaaacttaaatgcagaacttcctatgaatcagctacaacattttggagtctatgggctggtcttgctaccaatgagcaagcaaaaatcatagttgaaaaggcgctccctcaattggagatgcttggaggactagttgcatgcacagagaaatcaaggggccctatatccattgataggccaattagacaatgggactatccgtgcggttgggcaccacaccaaatattggcatggaaaggcttgtcctcatacggctatgaacaaatagcgacaagactagcttataggtggttgtacatgatcacaaaagctttcgttgattataacggaatggtagtagaaaaatatgatgtgacaaggggaactgacccgcatcgtgtcgatgcggaatatggtaatcaaggtgcagatttcaaaggtgttgctacagaaggttttggctgggtaaacacgagttacttgcttgggttaaaatacatgaataatcatgctagaagagctcttggtgcttgtagcccaccattacctttttttaatagtttaaaaccatctgaaaaaaaactatactacctttga

SEQ ID NO: 117 - DNA, 861 bp, Saccharomyces pastorianus
atggagacggttagcggtatacctggacactcgtttgtgcttaaatggactaaaaatattttctcgcgcacactgcgtgtgtctaattgtgtacctaaacatgttgggtttattatggatggaaacagaagatttgccaaaaaaaaagagatggctctcaaagagggtcacgaggccgggttcgtcagtatgagtaggatcctggaactatgctacgaggcaggagtagatacggctactgtgtttgcgttctctattgaaaatttcaaaagaagttcacgtgaggttgaatcattaatgactttagcgcacgaaagaatacgacaactcacagagcgtggagaattggcttgcaagtacggggtgcgcattaaagtcattggcgatctttcattattggataagtccttgttggaagatgttcaagtggctgtagacgccacgaagaacaacaagagagccacgttaaacatttgcttcccgtacacgggcagggatgaaattttacacgccatgaaagaaaccgttgccgaacataagaagggtgctattatagatgaaagtacgttagaatcgcatctctatactgcgggagttccacctttagacttgttgatcaggacgagtggtatttccagattgagtgactttttaatatggcagacatccaataagggcgtgcgcattgaactattagattgcctatggccagagttcgggcccatacggatggcatggatcctattaaagttctcattccacaaatcctttttaaacaaagaatatagattggaagaaggggattatgatggagaaacacccgaggactccgtcgacttgaaagaaaagaagttgaactag

SEQ ID NO: 118 - DNA, 1302 bp, Saccharomyces pastorianus
atgctagtaggcttaactctatattttgtactatttcgctcactgcagtacctgttagtattccttactccagtaaggcagttcgatacgtctacatcacttttattaaatgagctatgcacttctcctaatgagatcaacagttattggaacaaatttttttggaataagctgttatcctgggatgccgttttctttatcaagaatatgacttctaaagacgaaaagcctcaatttgagcacgaatacgcattttctcagctttgggcttccctaataagattgatcgtcaaaaataatgataaaaatatttatcatgttttcaaagttgcggtcgtaatggaaaatgtcttgttttactcatctgcaattgttctatatttcttaacgaaaagaacttttagccaaaataaaaagcattcacggtttgccaaaagtatcgctaaaaagacatctttattattttctctaactagtgccgctggatttttaactagtatatattctgaaccgttatcatttttcttagcatttgtcggtatctggtgtcgtgagtgcaccatctccatacctgtctccggtcaatttgattgtccatggaggaactggttttcctattccattatcagcatgtcctgtttcaccttagcatcactgaatcgttcaaactgtattttgctcgggatatatttcgtttttgacctaattgagctcacaaagaataggaaatttgtaaaagcaatttgctttccattgttgtcaggattactaatgttttccgccttaatatatcaacaatattacctaccgtacaataccttctgcccccaaagaggtgaatggtgtacatctcaattattaccaagattattcgttacaaagacttctctgtattcctatatccagggccattattggggagtcggatttttgaaatattggaccccaaataacattccaaattttttgttggctataccgaatattattattttgacatattcctccatatattttagcaaaatctacccatcctacaatttgaagcccctagtatggattaccagatccttggttatcatggtatgtctttttgctcacgtccaaattttaaaccgtatagcctcttttataccattacacctttggtacttggccgatagattggttaagacctcaggaccagaacaaatggacaatccaaagggtgacgataaaatagttaagctttacatatattggcttgcgttttggatacccttacaaacagtcttgttcgctgcattcttaccgcctgcctaa

SEQ ID NO: 119 - DNA, 1494 bp, Saccharomyces pastorianus
atgagcttgagcaagtattccaaaccaactttaaacgatcctaatttatttagagaatctgcatatgtcaacggtgaatggatcaaaggtacggacgagttttttgaggtggtagaccctgcatctggtgaaatcatagcaagggttcccgaacagccagtctctgtggttgaaaaagcgattgatgtggcttattctgccttcaaaacctacaaaaatacgtcaccaagagagagatccaagtggctcagaaaattgtacaatctaatgcttgataatttggatgatctagccacaatcattactttagaaaatggtaaggccctagaagaagctaagggagaagtcaaatacgcagcttcgtattttgaatggtatgccgaggaagcacctcgtttatatggtactaccattcaacccttgaaccccaacaatagagtttttactattaggcaacctgttggtgtatgcggtataatttgtccttggaatttcccaagcgctatgattacaagaaaggctgctgctgccttagctgttggttgcacagtggtcatcaagccagattcccaaacaccgctgtccgctttagcaatggcatacttggctgaaaaagctggctttcctaagggttcatttaacgttattctttctcatgctaacacgccgaagcttggtatgacattatgcgaatcaccaaaagtgaagaaagttaccttcactggttcgacgaatgttggaaaaatactgatgaaacagtcatcttctactttgaagaaactgtcttttgaattgggtgggaatgctccatttatcgtctttaaggatgctgatctggaccgagctgtggaacaagccatagtctgtaagtttagaggactgggtcaaacttgtgtatgcgcaaataggctatacgttcactcttccataattgatagatttgccaaatcattagcagatggagttaaaaaatttgtacttggtcatgggttggacccaaaaaccacacatggttgtgtcatcaattctgatgccattgagaaagttgaacgtcataagcaagacgccatttccaaaggagcgaaagttattcttgagggtggccgccttcctgatttaggacctaacttttatgctccagttatattgtcacatgtgccaccaacggccattgttgccaaagaagaaaccttcggtcctttatgtccaattttttcatttgacactatgaaggaagttgttgggtatgcaaatgacaccgagtttggtttggcagcttacgttttttccaaaaatgtcgacactctatatactgtgtctgaagcgttagaaactggtatggtttcatgtaatacaggtgtcttctcggactgttctctaccattcggtggtatcaaagaatcagggtttggaagagaaggctcgctacatggtgttgatgactataccgtcttgaagactgtcacaatcggtaaattgccagatagtatttag

SEQ ID NO: 120 - DNA, 2157 bp, Saccharomyces pastorianus
atgaatcaaaatataaaaaacacttctcgggcagatcgaataagtagcaaggatcaacaaaagaaaactagcttcgaggaagtttcacaaagccccccacgtaataatagctttgaatcatcaatggatacacggtttagctatgcaaattcaaataaaagcagcatttcctttgaatctactcagaccacagagaggcttctcgataagctcgaccttagtttagaagacgaacgcctactccaagaagctttgttagaagaggaaaatgcctctagaagctctcaattgtcacaaacaacagccggtcccacattatgtatgcctgcgtcggagtttccgtcattgaggtatagaagcagtccttccccaacatatgtgcaagctagggatcgctctcttataatcaacagtctaaaggagaaggattctacattgagaggcaaatattcttcttgcaaagtggaaaggcatttgccagcgaaatcaagatactcttatatcgtcgaagaagatcatgactccgaaacttcaaacggaatgaaccctccaacggacagaaataacaatcactacaaatatccaaatcctgataaaaatgataccgctacaaataccccgaatgctttaaactttgaaaagtatagaatagagaacacgaaactgcagcatttgtacccgatgttaatatctgataacaataacaaacccaagaataaagactggacaactgaaaaggagagctcccctaatgaatacacgtctatgcaaagaaacaaccacctttatcgaaatggaagttcgacaagcaccgatacttcgttttccgaagttgggcaattatccaaaccgaaaactcaatcctcttttgaaagtgagtcttcatcattttctaaactcagaataacgacaaacgatactactcctgttaaaacctctccgagacgatctggttcttctacttccacaataacaaaacccagtacgctgacagacgatgtttcagtacctccaacaccaccgtataaaactcataagaaaaaatcctcattgagctccctaaaaaaactgttcaaatctcccagagcaaggacaaagaacaaaaaagactttgattccgaaggctcgagcccaagtcactctacaacaaatttgttagacttttccggtgaaaatatccatttgcctcaaacctccgctagtactaatagttctaaccctcatttggctaaatacatcttccccccaaaccctgtcttccatttcaaaacatcatcatcagctcaacaaattgctgataacaaaataaacgataaactacggccaaataggactcatctgagaactttttcagactttcaaagaatggaaaagaattcaaaaacaactgatctaaatgctccgacatcacaatcaagtaaacttaattgttctagagtcagaagaagaacactttccctagacggcatggtaccaaataatccaactcaatacgccgacattcttaatcacaagaaacaagaatcaaacacaacagacactcgcgaaaaacttaaatttcatcaagaaccttttaatagtgatgagacttcacatatcgggttggcaattaccatgcgtcatcaaggcaaactagaagaatccgcccaacgcctgaaaaaagcctgcatgtgtggtaacaagacagcattcttgctttatgggctagctctacgacacggttgcggggtggataagaacttaaagctatcattaggctatttgatggctgccactgatataaaatcctttaccactgaagttcttaatttagatataaatccgttaaacataacttcgataaatgacattcctgatatagcgcctgaaccaacagcccccgccttgtatgaatgcggtatggcgtatttaaaaggtcttggagtagactacccagatgaaataaaaggtttaaaatttttagagaaagctgccatattgggccatgtagattctatgtgtttaagtggaacaatttggtccaagacttcaaatataaaaaaaaaaaatctcatgagagcagctgcatggtttagaatagctgataaaaagggtgcgaacttgttaggttcagatgggatttataaagaaaagtatatgaaacgatgtccagaataa

SEQ ID NO: 121 - DNA, 312 bp, Saccharomyces pastorianus
atgtccggtagaggtaaaggtggtaaaggtctaggtaaaggtggtgctaagcgtcacagaaagattctaagagataacattcaaggtatcactaagccagctatcagaagattggctagaagaggtggtgtcaagcgtatctccggtttaatctacgaagaagtcagagctgtcttgaagtccttcttggaatccgtcatcagagactctgttacttacactgaacacgccaagagaaagactgttacttctctagatgttgtttatgctttgaagagacaaggtagaaccttgtatggtttcggtggttaa

SEQ ID NO: 122 - DNA, 411 bp, Saccharomyces pastorianus
atggctagaaccaagcaaacagcaagaaagtctactggtggtaaggccccaagaaagcaattagcttctaaggctgccagaaaatctgccccatctaccggtggtgttaagaagcctcacagatataagccaggtaccgtcgccttgagagaaatcagaagatttcaaaaatctactgaattattgatcagaaagttgcctttccaaagactggtcagagaaatcgctcaagatttcaagactgatttgagattccaatcttctgctatcggtgccttgcaagaatccgtcgaagcctacttggtctctttgtttgaagacactaacttggctgccatccacgccaagcgtgttactatccaaaagaaggatatcaagttggccagaagattgagaggtgaaagatcatag

SEQ ID NO: 123 - DNA, 864 bp, Saccharomyces pastorianus
atgacttacactactagacaaattggtgccaagaacactctggaatacaaagtttatatcgaaaaggatggtaaaccagtctctgccttccacgatattcctttgtacgccgacaaggagaacaacattttcaacatggttgttgaaattccacgttggaccaacgcaaagttggaaatcaccaaagaagaaaccttgaacccaatcattcaagacaccaagaagggtaagttaagatttgttagaaattgtttccctcaccatggttacattcacaactacggtgctttaccacaaacctgggaagatccaaatgaaagccacccagaaaccaaagccgtcggtgacaacgatccaattgatgttttggaaatcggtgaaaccattgcttacactggtcaagtcaagcaagttaaagctttaggtgtcatggctttgttagatgaaggtgaaaccgactggaaagtcattgccattgatatcaacgatccattagctccaaagttgaacgacattgaggatgttgagaaatacttcccaggtctattgagagctaccaacgaatggttcagaatttacaaaattccagacggtaagccagaaaaccaatttgccttctctggtgaagccaagaacagaaagtacgctttggacatcatcaaggaaactcacgaatcttggaagcaattaattgccggcaagtcttctgacaacaagggtattgacttaaccaatgttactttggctgacaccccaacctactctgccagtgcctcttctgctattccaccagctgctccaaaggaagatgctccaattgacaaatctgtcgacaagtggttctttatctctggctctgtctaa

SEQ ID NO: 124 - DNA, 2754 bp, Saccharomyces pastorianus
atgggatctacatggaaacctgctgaagactatgtgttgcaattagcaacgcttcttcagaactgtatgtcaccaaatccagaagtccgtaataatgccatggaagctatggaaaacttccagctacaacccgaattcttcaattatctgtgttatatcctaattgaaggtgaatccaatgaagttttgaaacaacactattctccacaagatttacagaacaacagagctaccgctggtatgctgttgaaaaattccatgctaggggaaaacaatataattgaaaacaacagccatgatttagaatacgtcaaatcgaacatcattcacggcctctataactcaaacaataaccttgtttcgaatgtgacaggcattgtcatcactaccttattttctacttactatagacaacatagggatgatccaactggtcttcaaatactttatcaattattggagctaacttcaaatggaaacgaacctagtatcaaggctttatccaaaatcatggaagacagtgcccaatttttccaattggactggtcaggaaatgccaaacctatggaaaccctattggacagttttttcaagtttatttctgatccaagtttttcaccagtgattcgttcggaatcggtcaagtgtataaatacagtgattccgttacagactcaaagttttattgtaagattagataaatttttggagattattttccagttggcacaaaatgacgaaaacgacctagttagagcacaaatttgcataagtttcagtttcttactggaatttagacccgataaactggttgctcacttggatggtattgtgcaatttatgttgcatttaatcgccaatgtaaatgaagaaaaagtggctattgaggcctgtgaatttttgcatgcttttgcaacaagcccaaatattcctgaacatattttacaaccatatgttaagattattatacccatactattgtccaaaatggtatataacgaagaatccattattctcctagaagcctctaacgatgacgatgcgttcctggaggacaaagatgaggatattaagcctatcgccccccgtattgtgaaaaagaaagaggcagggaacggtgatgatgctgatgataacaacgaagatgatgaggacgaagatgaagatggcgatgtcgacactcagtggaatttgagaaaatgttccgccgcgacgctagatgtgatgacaaatattttaccgcatcaagtgatggacattgcatttccgtttttgagagaacacttgggttctgatagatggtttattagagaagctactatattagcattgggagccatggccgaaggtggtatgaaatactttaacgatggactgcctgcattgataccgtttttggtggaacagctgaacgacaagtgggcgcccgtgaggaaaatggcatgttggacattgagcaggttttcaccatggatactgcaagatcatactgaatttctaatgccagttttggagcccataatcaataccttattggataagaagaaagatgctcaagaagccgctattagtagtgtggctgtatttattgagaattgtgattccgagttggttgaaaccttattctatagccagttattgacgagttttgataaatgtttgaaatactacaagaagaagaacttgattatattgtacgatgccattggacggtttgccgagaaatgtgaattggacgaaacggcgatgcaaataatttttccacctttgatcggaaaatgggctctattgtcggatagcgataaggagttgtggccacttctagagtgtctttcgtgtgtggcatcgtctttaggagaaaggttcatgcccatggcacccgaagtatacaatagagcctttagaattttgtgtcattgtgtggaattggagaccaaatctcaccaagaccctacgatagtggtgcctgagaaggatttcataatcacgtcattagatttgatcgatgggctagtacagggccttggtgctcaatcgcaagatttgttgttccctcagggaactaaggatttgacgattttaaagatcatgttggaatgtctacaggattcggtccatgaagtgagacagagttgttttgccttgttaggagatattgtgtatttcttcaattcggaattagtaataggcaatttggaagaatttttgaagctgatcggtacggaaataatgcataacgacgacagtgacggggtccccgccgtgataaatgcgatctgggcgctcgggttaataagcgaacgtatagacctgaacacctacataattgatatgtccagaatcgttctagacctgtttaccaccactacacaaatcgtggacagttcggtgatggagaacttgtctgtgaccattggcaaaatggggctaacgcaccctgaggttttcagttctggcgcgttttccaccgattcaaactggaataaatggtgcctgtgtgtgaatgccttggccgatgtggaggaaaagagtagcgcttacatggggttcctgaagatcatcaacgttacccacacgggaaccgcgatgagcaatgacaccatcaaaaaggtcgtatcagggttgtcgaacaacgtagaggccaacgtgtttgcgcaggacatatatacttttttgatgaaccattccgcccaaatctccaacatcaatttcacgccggatgaaatttcattcttacagcagttcactaactag

SEQ ID NO: 125 - DNA, 1101 bp, Saccharomyces pastorianus
atgactgcccaacaatttgacttctcagatcattcccatagacgttacaacccattgaccgactcatggattttagtttctccacacagagctaagagaccttggttaggccaacaggaggctgcttgcaagccaaatgctccagcgtacgatccaaagtgctatttgtgtcctggtaacgaaagagctacaggtgttcaaaacccaaattatgaatcaacatacatcttccccaatgattatgctgctgttaaaattgaccaaccccctttaccacataatgatttaggtagggacactttaaaaaatagattattcaaagttcaatctgtgagaggtaactgtttcgtcatttgttttagtccaaaacataacttaaccattccccaaatgaaacaatcagatctggtccatgtcattaatgcttggcaaaagctttataacgaccttgctagagaagcaagggaagatcagaaacctttcaaatacgtgcaaatctttgaaaacaaagggactgccatgggttgttctaacttacatccacatggccaagcctggtgtttagaagccattcctagcgaagtttcccaagaactgaaatcttttggtaaatataaacacgagcacaacgctgacttatttgccgattatgttaagttagaattagaagaaaaaacaaggcttgtattggagaatgactctttcatgattgttgttccatactgggctgtttggccatttgagaccatagttgtttccaagaaaaagattgcctctattagccattttgaccaaaagcaaaaggaagatcttgcttcgataatgaagcagttaactaccaagtatgacaatctgtttgaaacaagtttcccatactctatgggtattcatcaggctcccttaaatgcgactggtgaagaactaaataacagttggtttcatatgcatttctatccaccattgttgagatcagctactgttcgaaaattcctggttggttttgaattactaggtgagcctcaaagagatttaactcccgaacaggctgcggaaagattaagaaaactagatggtaaagttcactatttagaaaaattgtga

SEQ ID NO: 126 - DNA, 2100 bp, Saccharomyces pastorianus
atgactgctcagttacaaacttcaggtaatgctaaaaccgttctggttacaggtggtgctggttacattggttcccacactgtggtggagctgattgaaaatggatacgaatgtgttgttgtcgataatctctcaaattcatcttacgattctgttgccaggttggaaattttgaccaagcatcatattccatttcacaaggtcgatctttgtgaccgggaaggtttggaaaaggttttcaaggaacatgaaatagattctgttattcacttcgccggtttgaaagctgtgggtgaatctacgcagattccattgagatactaccataataacatcttgggcactttagttttgctggaattaatgcaacaatacaaagtctctaaatttgtgttttcttcttctgctactgtttatggtgacgcgactagatttccggatatgattccgattccagaagagtgtcccttagggcccactaatccatatggtaacaccaaatatgccattgaaaagattttgaatgatctttacaacagtgacaaagcaagttggaagttttccatcttgcgttactttaacccgattggtgctcatccatctgggctaatcggtgaagatccacttggtattccaaacaatttgttaccatatatggctcaagtagccgtcggtagacgtgaaaagttgtacatctttggcgatgattatgactctagagatggtacaccaatcagagattacattcatgttgttgatttagccaagggccatattgccgctctgaaatatttagatgcttataaccaaaaggagggtttgtgccgtgagtggaacttaggttctggtaaaggttctacagtttttgaggtataccgtgcattctgtaaggcctcgggtattgatcttccatacgaagttactggtagaagggcaggtgatgtgttgaacttgacagctaagccagatagggccaagcgggagctgaaatggcaaacagagttgcaagtcgaggactcatgcaaagatttatggaaatgggccactgaaaatccgtttggctaccaattgaagggtgttgaagccaggtttgctaccgaagagatgagttacgatgcaagatttgtgactattggtgctggtactagatttcaagccacgattgctaatttgggcgctaccattgtagatttgaaggttgacgggcaatctgttgttcttggttatgagaatgagaaaggatatttgaatcctgatagttcttacattggtgccacgattggtagatacgcgaatcgtattgccaagggtaagttcaatttgggtggtaaagattatcagctaaccgttaacaacggcattaatgctaatcatggtagtattggttcttttcatgtgaaaagatttttaggcccaattgttcagaatccatcaaaggatgtctttaccgcagaatacatgctaatcgacaatggtaaggacactgaatttccaggtgatctactggtaactgtacagtatactttgaatgtcgccaaaaagagtttggaaatcgaatataagggtaagttgactgctggtgaagccacaccattaaatctaaccaaccatacttacttcaatctggataagcctcatagagacaccatcgacggtacagaaatcaaggtggtttctaataaatccgttgacgtcgacaaaaatgtcattcccacgggtaagatcgttgacagaaatattgctacctttaagagctcaaagccaactactttaggtcctaaagatcctctatatgactattgttttgtagtggacgaaaatgcgaagcacaaacaaatagatacctcaaagaatgaaccaacgcttgtcgccaaggctttccatccagactctaaaatcactttggaagtgttgagtacagaaccaacatatcaaatttacactggtgatttcttatctgccggttacacagcaagacaaggtttcgctgtcgaacctggtagatacgttgatgccatcaaccaaaaagaatggaaggattgtgttattttaagacacggcaaaacatacggctctaagattgtctacagattttcttga

SEQ ID NO: 127 - DNA, 1902 bp, Saccharomyces pastorianus
atgccggacgatttatcattacacttgagtggctcttcaaaaagactaaattctcgccaacctggacagtctcccaatggggactttgcaccaaatggtatggatttggaaaaagagtataaaacatctcaaagcaatgtaactaccgaggtttacgaggcatcgagcttagaagaaaagacaagttcaaaaaaaccacaatacagttccttttggaaaaagctgtactatgagcatctggtcgttgacaaatcaattctgggagtatctgttctagactcttttatgtacaaccaggacttgaaacccgttgaaaaagaaaggcgggtttggtcctggtataacttttgttacttctggcttgcagaatgcttcaatatcaacacctggcaaattgctgctaccggtttacaactgggtttgaactggtggcaatgttggataacaatttggattggttatgggtttgttggtgcttttgtcgttttggcttccagagtcggtaccgcctaccatttatccttccccatatcatctagggcatccttcggaatttttttctccttatggcctattattaacagagtagtcatggccattgtgtggtatagtgtccaagcttatattgcagcaaccccggtgtctttgatgctgaaatccatctttggtaaaaacttgcaagacagaataccagatcactttggttctccaaatgctaccacttacgagtttatgtgttttttcatcttttgggctgccagtcttccatttttgttagtaccacctcataaaattagacacttgtttactgtgaaagcagtcttagttccattcgcttcatttgggtttttaatttgggccattagaaaggcccatgggcgcatcgccttagggtctttgactgatgtgcaacctcatggctctgcattttcgtgggcatttttaagatctctaatgggctgtatggctaatttctcaacaatggtcattaatgccccagatttttcaagattttcaaaaagccgtaactctgctctgtggtcccaactagtgtgtattccatttttgttttccattacttgtttgattggtatcttagttactgcggccggttacgaaatatatggcgtcaattattggtcaccactggatgtgttagagaagtttttacaaaccagctataacaaaggcacaagagcgggagtctttctgatttcctttgtctttgcggtggcgcaattgggtactaacatatctgcaaactccttatcgtgtgggactgatatgtctgctattttccccaaatttattaatattaaacgtggttcattattctgtgccgctatggcgttgtgcatctgtccgtggaatttaatggcgacatcgagtaagtttacaatggccttgtccgcatatgccatctttttatccagtattgccggtgttgtttgctcggactactttgttgttagaagaggctacatcaagctaacacacatttactcccatcagaaaggttctttctatatgtatgggaatagatttggtattaactggagagcgttggctgcttatttgtgtggtatagctccttgtttgcctggttttatcgccgaagttggtgcgccagctataagtgtctcagatggcgctatgaaactatactacttaagttattgggtgggatacggcttaagtttttcaacttatactgcattgtgttatttctttcctgttcccggatgcccagtcaacaacattttaagggacaagggctggttccaaaggtgggccaacgttgatgattttgaagaagagtggaaagagacaatagagagaaatgacttggacgatgacgagatcagcgtctatgaacatgaaggcgaaaagacattcatttaa

SEQ ID NO: 128 - DNA, 534 bp, Saccharomyces pastorianus
atgtcaaatattacttatgtcaaaggtaacatcctaaaagcagctacgcgtcctaggatccttattcactcttgcaattgcaacggctcctggggcggtgggattgcttaccaacttgctttgaattatccaaaagcagaggaagattacatcaaagtatgcgatgaaaatggctctgctttattgggcaagtgcgtattacttcctagttacaaagactcggatctattaatttgctgtctgttcacatcatcgtttggtggttcaagtcatgcgggaaagcaaagcattctagagtatacaaaactgtctctagataaattgagggcctttagggcagcggaaggcaaaactaaattaagggatgacataattaacacttacgttgatgatcatatcaaatacccaatagaagaatataagctggaaatgccacaaattaacagcggtatatttggtgttccttggaaagaaacagaacacgttttggaagaattcagtgatagtatggattttacggtataccaactgtag

SEQ ID NO: 129 - DNA, 3507 bp, Saccharomyces pastorianus
atgaccggcttgacaggagatgattccgatgattactatctaaaccctaaccaagacgaggaatctttgcttagatccagacacagtgtcggttcgggagcacctcatagacaaggttctttagtgcggcctgaaagaagtcgactgaacaatcctgacaatccgcatttttattatgcgcaaaaaacacaggaacagatgaaccatttgaatgtgttgttatcaagtaccggtgtcgatccgaatacgatccgtcgaggcggctcgctgcgctctaaaggatcggtaagaagcaaagtcagcggccacgaaatggatggctacccgttacaagacatgaacactactgaaaggaaagattcagtcaaaatcagtgatgaaggtgaggttgatgatgagtttggcaaagatggcgaagaatatgaagtcgataatttcgaagaaagctccatgcggcctgtaaaaaagcctataaaaccgttaaggaaagatacgggcgattcattgtcattttggcagatgtattgttattttattacattttgggcacctgctcctattctttccttgtgtggaatgcccaaaaaggaaagacagatggcatggagggagaaagttgccttgatctctgtcattttgtacattggtgcaatcgttgcctttgtgacttttggttttaccaagacagtttgtagcagctctaagttacgtttgaaaaacaacgaagtatctacggaattcgtggtcattaacggtaaggcgtacgatctgaacacttcttcacgttctggtatacaggacgttgaagtggactcgaataccctatatgggccttggtcggatgctggtaaagacgcctcatttttgtttcaaaatgttaatggtaactgtcacgatcttataaccccaaagagcaactcttctattcctcatgatgacgacaataatttagcatggtatttcccatgtaggttgaaaaatcaagatggctcctcaaaaccaaattttacagttgaaaactacgcagggtggaattgccatacttctaaagatgatagagattccttttatggtttgaagtcaaaggcagacgtttacttcacttgggatggtataaagaactcctcaagaaatctaattgtttacaacggtgacgttttagatctagatattcttgactggttggaaaaggatgagctcgactaccccattgtatttgatgacctgaaaacttcaaatttacaaggttatgatctctcattgatcttatccaatggacacgaaagaaaagttgctagatgtttaagtgaaattatcaaagttggtgaagtggattctaaaactgttggttgtattgcgtctgatgttgtcctgtatgtttctctagtgttcatcctttcagtggtgataatcaaatttctaattgcctgctacttccgttggactgtggctaggaaacaaggtgcatacattgtggataataaaacaatggataaacatacaaacgacattgaggactggtctaataatattcaaacacaagctcccttaaaggaagtcgatcctcatttgaggccgatgaaatactctaaaaagtcattgatgcacaagcgtgcttcaacttttgacttgttgaaaaagcacagttctaaaatgctccaactgaatgaatctgtaatagacttgaacaccccaatgagcagctcgttacaatcgtctggttcattcagaggaatgacaacaatgactacgcaaaatgcctggaaattgtctactgcaaataaagccacacattctcgtaatccctccactctgttacccacatcttccatgttttggaacaaagctacttcatctcctgtaccaggaacatcgctaattcaaagtcttgattcatcgattatacacccggatattgttcaacaaccaccaatggacttcatgccatacgggtatccattaattcataccatttgctttgtgacatgttattcagaagatgaggaaggtctgagaacgactctagattctttgtctactactgactatcccaattctcataaattattgatggttgtttgtgatggtttgattaagggttcgggcaatgataagactacgccagagatagcattaggaatgatggatgactttgtcactccaccggacgaagttgagccctactcgtatgtggctgttgcttccggttctaagagacacaatatggccaaaatttatgcgggattttacaaatataacgattccactgtttcaccggaaaatcagcaacgtgttcctatgatcacaatcgtgaaatgtggtactccggcagaacaagggtccgccaaacctggtaatagaggtaagcgtgattctcagattattttaatgtcgtttttagaaaagattacatttgatgaaagaatgacacaattggaattccagcttttaaaaaatatctggcagattacagggttaatggccgacttttatgaaacagtgcttatggttgatgctgataccaaagtctttcccgatgctgtgactcacatggttgccgaaatggttaaagatccgttaataatgggcctctgcggtgagacgaagattgctaataaggcgcagtcttgggtaaccgcaattcaggtttttgaatattatatatcgcatcatcaagttaaggcatttgaatctgtctttggttcggtgacttgtttgcctggttgtttttcaatgtatcgtattaaatctcctaaaggttcagatggttattgggtccctgtattggcaaacccagatattgttgagagatattctgataatgttaccaacactctacacaaaaaaaacttattattactaggtgaagatagatttttatcatctttgatgttgaggactttccccaagagaaagcaagtgtttgttccaaaagctgcatgtaaaactattgctcctgatgaattcaaggttctactttctcaacgccgtagatggatcaactccaccgtgcacaacctttttgagttggttttgattagagatttatgtggtactttttgtttttcgatgcaatttgtgatcgggattgaattgattggtactttggtgctgcctttagctatttgctttacaatttacgtcgtcatttttgccattgtctctagacctactcctatcattactctagtcttactagcgattatccttggtttgcccggtttgattgtcgttgtcactgctacaagatggtcgtacctagggtggatgtgcgtgtatatttgtgctttacctatttggaattttttgctaccttcatatgcgtattggaaattcgacgatttctcatggggtgatacaagaaccatcgctggtgggaataagaaagcacaagacgaaaatgaaggtgaattcgatcactcgaagattaaaatgaggacttggcgagaatttgaaagagaagagattcttagccgaaaggaggaagctggctccttgattgcatag

SEQ ID NO: 130 - DNA, 1185 bp, Saccharomyces pastorianus
atgcctccaaagaagcaagtcgaagaaaaaaagatcttattaggtcgtcctggtaacaacttgaaagccggtattgtcggtttggctaatgttggtaagtctaccttcttccaagccatcaccagatgtccattgggtaacccagccaactatccattcgctaccattgacccagaagaagctcgtgtgactgttccatctacaagatttgaccagttgtgtgcagtctacaacaaaacagcttctgcggtcccagcccatttaacagtttacgatattgctggtttgactaagggtgcttccgccggtgaaggtttgggtaacgctttcttatctcacattagatcagttgattccatttatcaagtcgttcgttgtttcgacgatgctgaaattatccatattgaaggtgatgttgatccagttcgtgatttggaaattattaacgaagaattgagactaaaggatattgaattttcagaaaaggcacttgatggtgctgaaaaaattgccaagagaggtggtcaatctttggaagtcaagcaaaagaaggaagaaatggatttaatcaccagaattattgaattgttgaaatccggccaaagagttgctaaccaatcctggactccaaaggaagtcgaaatcattaactctatgttcttattaaccgctaagccatgtatctatttgatcaacttgtccgaaagagactacatcagaaagaagaacaagcatcttctaagaatcaaggaatggatagacaagtactccccaggtgatttgattattccattcagtgttcctttagaagaaagactttcccacatgtctgaagaggaagctgaagaagaattgaagaccctaaatactcaatcagccttaccaaagatcatcaccaccatgagaaagaagctagatttgatttctttctttacctgtggtccagatgaagttcgtgaatggactattagaaggggtaccaaggccccacaagcagccggtgtcattcacaatgacttaatgaatacttttattttggcccaagttatgaagtgtgaagatatccttgaatacaaggacgacgctgccatcaaagccgccggtaagttgatgcaaaagggtaaggaatacgttgtcgaagacggtgacgttatttacttcagatccggtgctggtaagaattga

SEQ ID NO: 131 - DNA, 1143 bp, Saccharomyces pastorianus
atgctaccaacgttaaagcgctttatgtcgtcctcaggtaatcagattcccagacagttcaaatcaatcatttactctactcatgaagtggaggactgcacgaaagtcttgtcggttaagaactatacccccaaacaagatttgtcccaatcaattgtgctaaaaactttggcttttcctataaacccctcggatatcaaccagttgcagggcgtgtatccatctcgtcctgaaaagacattcgattactctacagatgagccggccgctatcgctggcaacgaaggtgtgtttgaggttgtctctttacctttggatagttccaagggtggattgaagttgggtgaccgtgttatcccacttcaggcaaaccagggaacctggtcgaattacagagtcttctctgatagttctgaattgatcaaagtgaatgattttgatttgttttctgccgctactgtctcagttaatgggtgcaccggtttccaactggtttcggattttattgactggaacaagggtggtaatgagtggataatccaaaatgcaggcacatccggtgtttcaaagatcgtctcacaagtggcaaaggctaaaggaataaagaccctcagtgtcattcgtgaccgtgacaatttcgacgaggtagccaaagtattggaggataaatatggtgctaccaaagtcatttctgaatcgcaaaacaatgacaaggcatttgctaaagaagttttgtccaaggttttgggagaaaacgcaagagtaaaattagctttaaattctgtcggaggcaaatccagtgcttcaattgctcgtaagctggagaaaaacgctttgatgctcacttatggtggaatgtcaaaacagcctgtcactttaccaacgtcattacatatcttcaaaggcttgacttccaagggttactgggtcactgaaaagaacaaagaaaaccctcaatctaaaattgacactataaacgatttcatcaaattgtacaatgaaggaaaaattatttctccaaaggacgaaatccaaaccttgacttggaatattaatacaatgactgatgaacaattattggatatagttaaaaagggtataaccgacaaggggaagaaaaaattgattgttttggaatggtaa

SEQ ID NO: 132 - DNA, 1563 bp, Saccharomyces pastorianus
atgattttttcattggatgaggaacttcatcgtatgtcactagatgacaagaagaatgagatgagaatagattatccgacagcgttatatgatgataatgacagcagcgccatcgcagacggggatgataataatcatctcagtgtccattcaaactccattccgttcagcggttctacccataaaatgaggaggaggtcttctgcttattccaagttcccaattctcaccccacctcatacaagaaggttttccatcacaggttcagacggcacgccaaatggaatgcacaaattatctattacaccacagaatatgatttctcctaatattatcgaaaatgaagtgtcaagaaatctacatgattttaaacctgtaagagtattaggccaaggtgcttatggtaaagttattcttgtcaaggacacaaatacatccaaactctatgcgatgaagcaactacagaaagctgaaattttaatttctcctacaataacagattccaataaagaaaatgaagaaaataatagtgctggtaacaacgacaacgataacggattatcaaagaggctggagagaacttttgccgaacggtccattttatctgaaatagaacatcccaacattgttaaattattttattctttccacgataactccaaactatatttattgttacaatatattcccggaggtgaactattttaccatttaaaagaacatggaactctagatgaaacgacagtttcgttctacgcggctgagatcagttgtgctttgagatttctacacactaaaggtgttgtttatagagacctgaaacccgaaaattgcctattaaatcaaaatggccatttggtgttaacagattttggcctcagtaagaaaagtgccaatgattccatgactagtgaggaggatccagaaaacgtcaataccttacactcaattatcggtactccggaatattgtgctcctgagatattatcgggccaagcatatactcaaaactgcgactggtattccctgggatgtctgttatatgatatgctagtcggaaagcctccatacacaggtaataatcacaaggtgattattagtaaaatccaacaaaataagcaaggcccaaaaatccctttctatttaagcgaaggaatgaaagatatgttaaatgcactgttgaaaaaggaaaccactaagaggtggaatgttgataaatactgggccaaaattgagacgaataacaaaacaactaaatccaagaagaaaaaatcagggagtattagaacaagccccttcacggaccattttatctttaggaaaatagactggaaactactagaatccggacaatcacaaaaaactactctggggcccattgtccccatcattacaaatctagaactagcagaaaattttgacacagagttcacctcgatgtcatatgaagagaattatgctgacagcaaaccgattaatatcagctcggtgagcaagtctccagatatgttcaaggggtttagttataaggcaagtggtagctatttggagaaatacttttaa

SEQ ID NO: 133 - DNA, 1374 bp, Saccharomyces pastorianus
atgtcagacaaaccagagataaaacctcatggtaccagcaaagagattgtggactcagttactgacgccacctcaaatgccattaataaactccaagaagaactcaacaagaaccctagcgggtctgccacaccagcgactaaggaaaatgctgtggctgcaaaggaaagcaggaaatacaacttcttcattagaaccgtctggacgtttgttatgattagtggattttttatcacattagcctcaggccatgcgtggtgtatagtactgattctgggctgtcaaatcgctaccttcaaagagtgtattgctgtaacaagtgcgtctggtcgtgagaaaaacttgccactaacaaagacgttgaactggtacctccttttcaccaccatttattacctcgatgggaaatcgctttttaagttcttccaaacgactttttacgagtaccctgtattgaatttcatcgtaacaaaccacaagttcatctgttactgtctctacctttcgggattcgttttgttcgtctgtagtttgagaaaggggttcctgaagttccagtttggttcattatgtgctacccatatggttcttcttctagtggtatttcaagcccatctgatcatcaagaatgttcttaacgggctattttggttcctactaccatgtgggttggtcatcgttaatgatatcttcgcctacttatgcggtatcactttcggtaagactaaattaattgagatttctccaaaaaaaactttagaaggtttccttggcgcctggttcttcacagccttggcaagcattctattgacaagaattttaagtccatacacctacttgacctgccctgtggaagatcttaagacaaatttcttcaccaacttgacatgtgatttgaaccctgtgtttcttccacaagtttacaagctcccatctatcttcttcgatgtttttcaaatcacttctatcacagtcaagccaatatatttccatgccttaaacttagctacatttgcatctttatttgcgccatttgggggtttcttcgcatctggtctaaagagaacttttaaagtaaaagattttgggcactccatcccaggacacgggggtattacagatagagttgattgtcaattcataatgggttcgtttgccaacttatactatgaaacatttatcagtgaacatagaataacagtagacactgtactatccacaattttaatgaatttgaatgacaggcaaattttagaattgatcgatatattggttagattcttatctaaaaagggcataataacaccaaaaaattatgaaaagctggctgatatctttaacgtcactaagaaatctttggcaggtcgcgcttaa

SEQ ID NO: 134 - DNA, 1047 bp, Saccharomyces pastorianus
atgagtaagacagctgcaaatgattccgctacggaaaagaacaatctaagtgagactgaacaacactacttcaattcatacgaccactatggtattcacgaagaaatgcttcaagataccgttcgtaccttgtcttacagaaacgcaatcatccaaaataaggatctgttcaaggacaagattgttctagatgtcggttgtggtacaggtatcctatccatgtttgctgccaagcacggtgctaaacacgtcatcggtgtagatatgtccagtatcattgaaatggctaaagaacttgttgaactgaacgggttcagtgacaagattactctgctcagggggaagttggaagacgtccatatgccctttcctaaagtcgatattataatatctgaatggatgggttactttttgttgtacgagtccatgatggacacagtcctttatgccagagatcactatttggtggagggcggtttgatcttccctgataagtgttccatccatttggctggtttggaagactctcaatacaaagacgaaaagctaaattactggcaagacgtctacgggttcgattattctccattcgtcccattagtcttacacgaacccatcgtcgataccgtggaaagaaacaatgttaacaccacctcagatgagttgatcgagttcgatttgaatacagttaaactttcggacctagctttcaagagtaaattcaaattgactgccaaaaggcaggatatgatcaatggtgtggtcacttggttcgacatcgttttccctgctccaaagggtaaaagacctgttgaattttccactggacctcatgccccatacactcactggaagcaaacaatcttctatttccctgatgacttagatgctgaagctggtgacaccattgaaggtgagttgatttgttctccaaatgaaagaaacaacagggatttgaacatcaagctttcttacaagttcgaatccaacggcattgacggtaattcaagaaacaaaaagaacgaaggttcttacttgatgcattaa

SEQ ID NO: 135 - DNA, 687 bp, Saccharomyces pastorianus
atgactaaacaatccgaggagacccagaagccaattatcttcgcgcctgaaacgtaccaatatgacaaattcaccttgaatgaaaagcaactggccgaagaccccattgatctcttcaccaagtggtttgacgaagccaagaatgaccccagagaaacgttgccagaagcaatcactttctcctctgcggaattgcccagcggaagggtttcttccagaatacttcttttcaaggaactcgaccacagaggcttcaccatctattccaattgggggacctctaggaaggcccgtgatattgctacgaacccgaacgcggcaattgtgttcttctggaaggacctgcagagacaggtcagagtagaaggtaccaccgagcatgtgaacagagaaacttcggaaaggtattttaagacaagaccccgtggctctaagatcggtgcgtgggcctcacgtcaatcagacgtcatcaaggacagagaggaactggatgaattgacccagaaaaacaccgagcgttttaaggatgacgtagagattccgtgtccagattactggggtggcctaagagtcgtcccgctggaggtcgagttctggcaaggcaggcccagcagactgcatgatagatttgtttacaaaagaaaatcagaaaatgacccatggaaagtcgttagacttgcaccatga

SEQ ID NO: 136 - DNA, 1233 bp, Saccharomyces pastorianus
atgtctactactttactatggttttcgagcgtaataggctacgtgattcaaacgaaatgtctgtccaatatacaatctaggaaggaggtccccgtgggggccaacagcaccgttgcgacccccgaggctaacggtgacaatggcaacaacggctcgctgaccttctatctgaccttcatgtactttgcgtcgtggttgctcttggtacctgcatctcgactctggaagaacatgagaccgatgtttatctcagattcagaatcgaacagaaccctcgagctcaacggcactaataccgagtccgttatggacgacgacgtggatacgttctcacacgtactagatgaccctcaaccacgcattgccatccaacaacaaaaacaaaaaatcatatccgttgccagcatgaagtatttagctaagctgacagtgttggcctcaataatgattgtagcgaacctgacttacaacttagctttgtctttatcgccagcatttgatgttgctctgatacaaaacactgccattttcgaaattgtcactcttctctacggtgtttgcgggatctccaggaaaaactatgttttccgtaacttcctaattatgatgaatgccgtcattggcattttgatcatctcgtacacaaaggctacctgtgatatgctcgccggcaagctgtctgttaaccctaatacgggtgaacttacagaccccttcttgtttgacaggttgaaaggtgccttgatttgcggtctcggtgctttggttatgggcccattcgccgtgttatggaaccgttggttttgcagcaacatttctaagaatgacaactctgcagttgtcttggtcaagcaaagcactcatttggccctgatcggtgtcatcggtatgatcatgcttttgccattcattcctaaattcccctctcgcgggtctttggaatccatctccttgttgtacaatgacaagagcttctggttttcattgctcggcgcaattttctttggcacactaccaaacctggtttcggtactagagttgaaccgtaaagctcccgctgagtatttgactacatgtaatttaggggctattatattcatggggttggccgaatggatttgcgaacccacccagaccaccatcgttagatgggaggtcattggctacataatgttgactgtaagcttgttggtcttgtcagtgacactaggtgaaggtaaataccatcattag

SEQ ID NO: 137 - DNA, 909 bp, Saccharomyces pastorianus
atgcttaggttatcaagaagtatcgaccaaagactgcttcagtgcggtgccatgagacagctgcgggccgcgagcgtgggttgcagtggctctaaattgctcactcaaaggggattctccactagggcaggcctgtggcaaacaaacgacaagaaacccttgagtagagttcccgtgggcggcgcacccatcccaaaggaccacaagagggcgagcgagggttctattgagttttccacgggaaaggccattgccctgttcctcgcagtcggtggggcaatctcgtacttcttcaacagggaaaagaacagaatcgagactcaaaaggaggcagacgcgaatagagggtacgggaagccctctctgggtgggcccttccatctggaggacatgaacggtaatgagttcacagagaaagatcttctcggcaagttttccatattgtactttgggttcagcaactgtcccgacatctgtcccgatgagctggaccagctgggcgtgtggctaaacgacttgtcttctaagcacggtatcactctgcagcctctctttgtcacttgtgacccggcaagagactcgccagcggttttgaaggagtacttgagcgacttccatccctccatcttgggactgacgggcacgttcgacgaggtgaagaacgcatgcaagaagtacagggtgtacttctccacgccaccaaacgtcaagccaggccaggactacttggtggaccactccatcttcttctacctcatggaccccgagggccagtttgtagacgccctgggcaggaactacgacgagaagacgggcgttgacaagattgtgcagcatgtcaagagctacgtgcctgcagagcagcgcgccaagcagaaggaggcatggtactccttcctattcaaatag

SEQ ID NO: 138 - DNA, 936 bp, Saccharomyces pastorianus
atgttgtcaagaatcgtctctaacaatgcaatgcgttctgtgatgtgccatcaagcacaagcgggcattctctacaagactaatccagttagaacttatgctactttgaaagaagtggaaatgcgtttgaaatccattaaaaatatcgagaaaattacaaagactatgaagattgtcgcatctaccagattaagtaaagctgaaaaagctaaaatttctgccaagaagatggatgaagctgaacagttattttacaagaacgcggaaaccaagaatttggacgtcgaggccaccgaatccaccactcctaaagaattgattgttgctatcacctctgataagggattgtgtggttccatccactctcaattggctaaagctgtaagaagacatttgaataatcagccaaatgctgatatagttaccattggtgataaaatcaaaatgcaacttttgagaacaaatcctaacaacatcaagttgtctatcaacggtattggtaaggatgccccaactttccaagaatctgcattaattgctgataaattattgagtatattgaaagctggtacctatccaaagatctctattttctacaatgatccagtgtcttctatatcatttgaacctgccgaaaaaccgatcttcaacgcaaagaccattgaacagtctccatcatttggtaaatttgaaattgacgcagacgcaaacgtcccaacagatttattcgaatacactttggccaaccaaatgttgacagcaatggctcaaggttacgctgctgagatttctgcgagaagaaacgctatggataacgcttccaagaatgctggtgacatgatcaaccgttactctatcttgtataacagaacaagacaagctgtcattactaatgaattagttgatattattaccggtgcttcctctttgggctga

SEQ ID NO: 139 - DNA, 900 bp, Saccharomyces pastorianus
atggttgttatttcagtaatttggttctttaccaaacgtatgcccagaatatttgcattgatctttaacataatcacaatatttcttttgattttccttctaatcggttgctataatccgacaaacgtgtcaactttcttagtcaagtacacgtttgatgagagctcgcccttctattcaatcatcgaaaagtcatatgaaaaatcaaacacaacgttggggctggaaaacgtcattataagatccggctatatgggtgtttgtattgacaaaataccctcacaatatagtgcatacaataacatgaccacatcttccaatacaatctgttatccgagaaaagatttaagctccgttcctttgtataaagacttggaaatccaattatccaatattgcatcttccggttccaaatcacagtctagtgttgttttagatattttgaagttagcgcaactaacatccgttaacgttttacatccatatatcttgatggccactatagtcttaacgatcctgatgtttttattcattgtgtatgtaaccgttcctaagctaccattcaaattatgtgttaatagatttttgttgctgctaagcccggccttagtcttaacatggggacttggagctatgtggacacacgtgggtataaatggtagttatagattagttccctctgcaagcatgaatataattgatgttaaaaaaggtaagaaagcagcgacaatggcatggttcagttttgcattcttgttattggatagcactattttatggctaatatatctgagagataggaaaagcttaaaagaggagatcgacaacgtcccatgtgcacagaataggtacaacaattatacttcttcggattcgtctacgttgcactccaaggtatag

SEQ ID NO: 140 - DNA, 1005 bp, Saccharomyces pastorianus
atgtcgcgtgatataccagaaacacaaaaggttgttttgattgatggagttggtggttacgatgtcatcaagtatgaggattatcctgtaccattgatatcggataaagagttactgattaaaaacaagtacgccggcgttaactacattgagagttactttcggaaaggtctctatccttgcgaaaaaccttatgtgttaggtagggaagcaacaggtactgttgtagcaaaaggtaaagatgtaaacaattttcaaattggagaccaagttgcatatatatccaattcgactttcgcgcagtatacaaagttcccttccgagggaactattatgagattgccaaaatgcactagtgatgagaagatgaagttatatgcagcgggtctattacaagctctcactgctttgtcatttacaaacgaagcgtaccatgttaagaaaggtgactatatcttgatatatgccgctgcaggtggtgttggactgatcctaaatcaactggtaaagatgaaaggcgcacatgctattgcagttgcttcaacagatgagaagttggagacagcaaaaaaatacggtgcagagtatctgattaattcatccaaagaagatgttcttgcacgagttttagagatcacaaatggagaaggtgttgattcttgtttcgattcaattggtaaagacacttttgaaacgaccttggccgcattgaaaagaaaaggtgtgtttgtttcctttggtaatgcatccggtcttatcccaccgttatctataactaggctctcacccaaaaatatcacccttttgaggcctcaactttacgcctatatcactgatcatgaagaatgggtatattatactgacaagtttgtggacttggttgactcaaagaaattgaacatcaaaatctacaaaacgtacgctctaaaagactataaagttgccgctgctgatatagaaagcagaaaaactactggtaagctggttctggaaatacctcaataa

SEQ ID NO: 141 - DNA, 528 bp, Saccharomyces pastorianus
atgttgattaatcgcttgagtagggttcgatctgtaaggtatttttataatgctaaacccattctgtctaaagaggtttcacgacgagtgatcgttgcgccagcgtcgcacttcagaacctccagtccaaatctcaagagtaacatacccatccatgagtacaagcaactgccagaggactcgaattacattgaaaagcactacagagaattacaaatatttctgaatgagtttttaatgaagaaactaaacaaaacttatgccgatttcgaaggaaatccagatgaactggtgtttcagctcgaaaagttcattgaattagaagtcacatcgaaatgtacggatcacaccacctcagacagtcgtaagggaggattcaaatccatcggagacaggatagtcgttgatcgttatttggattttgttaaagatgtcaggctaacactgcttctaaatggaggacattccttcatatttgacgttatgctgcaagctaaagaggtatttgataaaatgcagaagcagtga

SEQ ID NO: 142 - DNA, 1014 bp, Saccharomyces pastorianus
atgacattgagtaattgtgcgtccctggataatttattctacgatccgccagaagaagaacagaacagcaagtttatcgaagctgtgagaatctcgatgagtaaaagcaatatgggtcctcctcctgttgagacgaacgggaagtactgtctaagaaaggtaaagtctttgagtgccaaacaatggaaaataaacaagaaaaaatatagttcactgccggcggccaccaggaagaagaagaatttcgatttctataaacagcgaaacttaatcttgaatttaaatttatggaaattcatcaagttcatcaattttaacggtaaaaataactacgataagaacaacaagcatgtgaagcacttgagtaagacagtaaaaaacgacggtatgtcaccttttcaaaaagccaagaaaatcgacaacgatagaagactggaaaatatttgctggaggagctggttcaaggcgcataaaaaaaaggacgctgcagactgccaacaggagagacacattaggttcaacgataacgttgaacagtgtatcatcaccaatgagcacttcatacaaaagctaccctccacacagttgaattcgtccgatgacgaagatccgggttttcaactcgggttcgaacccagctctggttatagcaatagtaagcgagtcttctacgactataaccgtgtctacattgccagtgatactgcgaccgctgtggctactgctattatcaatactagcaacgaagacccccagcacaagcacgatatccgtgacgtgccaagtaatatcttgctgcaagaagaagaagcagacctaagcagtgtgcttcgggtcgaccccaatctcaacttgtccaacataagccaccattcctccgcatcttcctcgtccagttcaggccattcgacgtttatcttcgagtcggaaactgaaacggatacagacacagacacggacacggacacggacacggacactacaaatgacacgatacccaccgtgctcttataa

SEQ ID NO: 143 - DNA, 639 bp, Saccharomyces pastorianus
atgccaaaagttgctatcttaatttactcagtggacgacacaattgctacgttagcagagaatgagaaaaagggtatcgagatagccggaggtaaggctgaaatctttcaagtgccagatgtaagcagcagcagcagcagcgataaagaacaagacgacgacgacgacgaggggaaagtcaaaaagacaaacgctgatttcagctacaagatcctaactagagaaacgttggttgaacacgattactacctgtttggaatccccgccaagttcggtaacttccccgtggagtggaaaaccttctgggactccaacacaggcggcctttgggccaagggctcgctccatggcaagatagccggcctgtttgtttcgggcgcaataagcggtaagggggacacagagatgtgcatcatgaacgcaatgagcaccctggtccaccacggtatcatctacgttccattgggatacaagaacgcgtacaaggaactaacagacactgatgatgtcaatgggtcgtgtgcttggggggctggatgcgtctctggcgtggacggtgacagacctcccagcgtgtcagagttaaaagttcatcaactccaagggagagcattctacgaaagaatcagagacttgtaa

SEQ ID NO: 144 - DNA, 1077 bp, Saccharomyces pastorianus
atgagtagcggtagtagttttgaagaggtcgcgttgggtggtttaaaaccttactttcaagtccctggggctatacacagtgaaggaataactttcgtgaaggaaaccaatacgttgttatgggtcgatatctttaaaagtgaggttcataaggtggaagacatcgaacaccccgagagtagccattcttccttttctgttacgcgggcgaactattccaaggactcgtcggttgagtatcctcccaatccggaagatttgaaggaatctgttggttgtatcttcccattattcggtggggcctcccaagataaaattgagcatgttttgtttggtagtaaattcggcatcggtcggttggactttaccaacggcgaatgggaatacctgattttgtattctcagtgttctgatttgagctcagacagagcatataagctaagatctaacgacgggaacgtttctccagacgggaaatatctgtatgtaggcctaatgagcgattttccatttaaattggagccgattgggtgcattctccgtgttgatctattggcccaggaggtagagatggtgtggaactgtatgttgattcccaatgccattcattgggataagagtgatgaaaagtcaatgtacgtgacggattctttgaacttcacgatttggaagtgccctggcggtgacttactaaaacgagaggaattgattgacgtaaagaactctaacaatcaatcatttgaatcgcctgagcccgatggaagcgctatttggttcagcaaagatggcaagcattccgggtacctgtttatcgccgtctggtccacttgtaaagtacagatgtttgacctggttaacgggaaactgcttaaggagttcattttgccaaagtcaacgccgagagtctcatgttgttgttttgtcggtaaagatctgtttgtgacgacagccaacgcaaaaatcaacgacgctgtgggcttcaatttcgataagatcggtggttgcatctatagaatccccaacgtgctagacgggaatgtccctttggagtctacaaagccgcaaccacgctactaa

SEQ ID NO: 145 - DNA, 1035 bp, Saccharomyces pastorianus
atgtctgattacgtcgaactattaaaaagaggtggtaacgaagccataaaaattaatcccccaaccggtgccgatttccacatcacgtcccgtggttcagattggttttttaccgtcttttgtattaatttactatttggaatagtcctaatcccactgatgttcaggaagccagttaaggatagattcgtatactataccgcgatcgccccaaatttattcatgtctgttgcttattttaccatggcttctaacttgggttggattccagttagagctaaatacaaccatgttcaaacttctactcaaaaggaacatccaggttacagacaaattttctatgctagatacgtcggttggtttttggcttttccatggccaattattcaaatgtctttgttaggtggtactccattatggcaaatcgcattcaatgttggtatgaccgaagtcttcaccgtctgttggttgattgccgcttgtgtccactccacttacaaatggggttactacactatcggccttggtgctgccattgtcgtttgtattagtttgatgaccactacgttcaacttggtcaaggctaagggtaaggatatcgccaatgttttcattacattcatgagtgttattatgcttttgtggttgattgcctacccaacctgtttcggtatcactgatggtggtaacgttttacaacctgattctgccggtgtctttttcggtattatcgacttattgattttatccgtcttgccagttcttttcatgccattggctagctatctgggtcttgaaagattaggtttaatcattgacgaagaagctgaacatgtcggcccagttgcagaaaggaaaatgccatccccagcttcattcaaatcatctgattctgactccagccttaaggaaaaattaaagctaaagaagaagcacaagaaggacaaaaagaaggctaagaaggccaagaaggccaaagaggccaagaaggtcgaagaagaggaggaagatgatgcagccactgattctgaatag

SEQ ID NO: 146 - DNA, 1506 bp, Saccharomyces pastorianus
atgttaagctcactaaaaaacaaatttgagcatttgaaggtttctgaaaagggaggcaaagaattctctacaaccttaccacaattaccatcctcgaaagacctcgataagtcgaccatttataagtaccgttacaattatggtgtaaatttgggtgcattgtttgtgttagagccatggatattttcaaaagaaactgtgtgcactgtggacaataaggaatatgactgtgaatttgacgcaatttctcaccacttgaaaaaacattccaaggaagatgttgcgaaaatattgagtgaacattataaaaagtacatcgatcgaattgactggaaatggctgtcagaagatgctcatctcacggcattaagaattccaattggatattggcacgtcgaaaacgggaaacatttagattcgttaccgttcgccccactgagaaatgtttatgaactagcaaaaccctgggagcaacttgctggattaatcgaaacggccaagaaacataacattggtgtgttaatcgatttacatggtctgccagggggtgcgaattgcgattcactcagtggctccaagaattgcgaagccggatttttccaaaaggaaaaatacatgaccaaaatgttcaaagatattctaccggcaatcgttgaaacgatgactttgcataatgagaatgttatcggtcttcaagtggttaatgaagcatgctttgataacaatgccaaaggtgaaaaattctactattcagaggccatcaacaccattgaaaagcttcagcctggtttacctgtggtgatatctgacggttggtggccccaacaatgggcagactgggttaaagaaaagaatttcagcgagacggtggtcatcgattctcatgtataccgctgcttttctgattctgataagtccaaggatgccaacacgattataaaagagttgcctaacactgtgaatttccctcgtgatgatgctgattataccgtcggtgaattttctggtgttcttgatggacaaacttgggacaaaacttcaggtgacagggactctacagtgcaaaagtacgtacaagctcaagcaagtgtcttttctcatgtggcgagttggggttggtttttttggacattacaattcgagtatggtgatgggggtgaatgggggttagctcccatgatgcaaagagggaatctaccaaaacgtcctcacgatgatgggttccaaatcgataaaaggaaaatagactctataattcaagaacatgagggttattgggatggtaagggtaagaacttcgaacactggagattcgaggatggtttaaatacggccgcgaacgacataattgctttcagaaaatttgacagttctttaattgggagatggcattcctggaaatcgcaaagaagagccgaatacatctctgccaagaaagacagtaaattcatgtgggagtgggatgaaggctaccaacgtggattagacgagttcaataggtattaa

SEQ ID NO: 147 - DNA, 243 bp, Saccharomyces pastorianus
atgacacaacacaaaaactcgatggtgcacatacccactacaaaggaagtcaaaagacgtagcgggaaatcaaatggcatactgaatgccatcgaagagttcatcgaaaagctttattggacttactacattcatttacccttttatttaatggcatcctttgactcattttgtcttcatgtcttttttctcacgattttcagcctaagtttcttcggtataattaaatactgcttcctttga

SEQ ID NO: 148 - DNA, 1866 bp, Saccharomyces pastorianus
atgctggatggagaagactttgtagaacatattgatatcttatcatcgccaacaaaaagcaggaatgccaccccaaaacggctggatatacatagggaagggccattgagaaagatatacgcatcaaagaagaatttgttggaaaggatctcgcttgcggataataaaactagtagtgtatcaccggatgagacacttgaacctagtacaccaagcaaagcacctcgtaaacgtggaaggccaaaaaaaatacaggagaacttggaccttggagttgtaaaagacgatggaggtactagtgtctctagaaagaggaagaaaccacacaaagatagattaagccataccgatgaggagagtgaaagttccaacactaaacaggtgatggaagaagaggaaggtgaagaggcagagaaggctgaaaaaatattcatgggcgtccaaccaacgcatgaggaaagcccgcttttacccagtggcagtggttctgcatcaaactcagtagagcctctagaacctgcaacaccatcgaagaaatccttcaccactaatcatgactttacctcacccctaaagcaaattataatgaacaatttaaaagagtataaagacatggcttccccaggcaaattaactttgagcaggaatttcactccaactcccgtaccgagaaataaaaaggtttaccagacttcggaaaccaaatcggcaagctcatttttagacacctttgaagggtacttcgaccaaagaaaagttgtcagaactggtgcaaagtcaaggcatacaatgtcaatggcacctgatgtcactagagaagagttttctttggtttcaaacttttttaatgacaactttcaaaagcattcaagatcaaaattattccaaattcaaaaaaaaatgtttcctcaatattggttcgaattaactcaagggttctcactactgttttatggtgtaggttctaagcgtgatttcttagaagagttcgccattgactacttgtctccaaaagttgcatactcgcaactagcatatgatgctgaatcgcagcaggacgaggcttcaaacgcgatcccatgccttatactaaatggttataatcctagctgtaattatcgtgacgtctttaaagagatcaccgatcttctggtacctgctgaattgacaagaagcgaaacaaaatactggggcaaccatgtgattctgcagattcaaaaaatgattgacttttacaaaaaccaacccctagatatcaaattgatccttgtggtgcacaaccttgacggccctagtataagaaaaaacactttccaaacgatgctgagttatctctctgtcattagacagattgccatagtggcgtctacagatcatatatacgccccattactctgggacaacatgaaggcccagaactataactttgtcttccacgacatctcgaattacgagccggctaccatcgagtccacatttcaagacgtgatgaagatgggcaagagtgataccagtagtggcgcggaaggtgccaaatatgttctgcaatcacttaccgtcaactccaagaaaatgtaccggctgctcattgaaacgcaaatgcaaaacatgggcaacctttccgctaccacgggcccaaaacgtggtactcaaagaaccggggtggaactcaaagtcttcaaccatttatgtgccgcagatttcatcgcttccaatgaaatagccctaagatcgatgctcagagaatttattgaacataaaatggccaacatcaccaagaacaattcggggatggaaataatttgggtgccctacacatacgcagaactggaaaaactgcttaaaaccgtcctaaatactttatag

SEQ ID NO: 149 - DNA, 933 bp, Saccharomyces pastorianus
atgggtaagggcagtaaagacaagagagatttatattacagaaaggcaaaagaacaaggttatagggctagatctgccttcaaactactacaactcaacgatcaatttcatttcttggatgatccgaatttgaaaagagttgtagatctatgtgctgcaccgggctcatggtcacaagttctctctaggaaactatttgatgagaatattgatacagatagcgaggagaagaaaatagttgccgttgatttacagccaatgtctcctatacctcatgtgacaactttacaagccgatatcacccaccctaaaacattggccagaatcttggacttatttggtaatgaaaaagctgattttgtttgcagtgacggtgcccctgatgtgactggattgcacgatcttgatgaatatgttcaacagcaattgatcatgagtgctctacaacttaccacatgcattttaaaaaaaggcggagtattcgtagcgaagatcttcagaggtcgtgatatagatatgttatactcccaattaggttatttatttgacaagatcgtttgcgcaaagccaaggtcatcgaggggtacttctctggaagcatttatcgtttgtttgggctataacccaccatctagctggatacccaaattggacgtcaatacgtccgttgatgagttttttcaaggctgttacttcaataggttggtcatatcagacaaactgtctcattggaatgaagaagaaagaagtatagccgagtttatggcttgtggcagtctcgagagttttgactcagatgcgacctaccacgacctgccttcttcgatcgcgaacactatttcgtctttggaccccgttcaaggtccaacaaatcctccttataagaaagctttagaattgaagaggagtggaaaacttacgagatctgtttaa

SEQ ID NO: 150 - DNA, 1095 bp, Saccharomyces pastorianus
atgaacgatgaaataaatgagctaccaccgaaaatttgtgagcaatgtttaggtgatgataccaacgtcagaatgacaaagattcctcaaggctctgaatgtaagatctgtactttaccattcaccttataccattttaaggcatcgaaaaggagcggccatattgtaaaaacattaatatgcggaaggtgtgctactcaaagaaatgtttgtcagtgttgtatgcttgatttgagatggcatatccccgtacaactgcgggatcatttgatatctatggttaacgaagaaaatgtcataacagaggaggcaaaaaacgacatgatgaaaagatttttatcattaaaggatgtgaagttagggggtgcccaaattacgagcgattcggcagaggctgacattatacttgataaattgaagagtatacttcaaaaagcgacatcagatagcgaaagttcacaattgcaaatacaaggagcagcggaatcggataaaaacaagcaagacaaggacacagagaaatacagatctgtagatgtttctcacatcttaaagaaaatacctttgagtgaatcttttacgagtgatgtttccagtaggtccttcttcctttacaatattgatgcttcaattcctgaatggaaaatagctgattcgatttcacagttgttaaatataaagaaatggagtgacggaaattcgttatcgctaataatcaatcataaagcaaagtgcggaggtgtacgattccagtcaagtatgctgggggaacagtttgctcgtaaagtacaggaaacaatcaccacacgaaagggcttagagaggggtgttctacgtattgatcgttccagaatatttgttattccttggacatccggattttcggctgcttcatttggtgccactactgcggaaaacataaagctaagtttaagtttgaacaaactgatgggattggagctgggttctgatgataaacagtttcgcgcaaaaagtttggataacatcaagaaaaataagcaaaatacatcaaaaaaagtacaaaaggccaagtcaaagaaatcaaaacctcgtgcaaacaacttaacattgtaa

SEQ ID NO: 151 - DNA, 663 bp, Saccharomyces pastorianus
atgtctataggttacaaggacaatttaatatcgaccattctagccaaggatgggaaatgcgactttccagtcaattttgactattcatcttctcagataaccttaatgcctgaaatgttttcgttcaataacgaaaggaaatatcaaactctgatacccttaatgaaaacatcacatctagttgatgatgatttgaaggataagctgaacaagtgcgctttggattttttttctggaaaacaatccaacagaacaagtgatataattatgtcgaaactaactgcgagcaaagaggcttcgccagaatcgccgttgcataatgttaacgtagtgaaaatggaaaatatcgatcatatccagccagacgtatatagttcggctaggataaaaaaatccaccaaagctgtaatgaaattaaaacccacaaaagctcattcgacaggacagagaacacgccatttttgtaagatctgctcgactgggtttaccacttctggccacctttcaagacataatagaatacatacaggcgagaaaaatcacatctgtccacacgagggctgcgggcaaaggtttagcaggcatgataattgtaaccaacattaccgtacccacgcgaataagaagaaacgaaactggaaacgaagggaaaccagcagttga

SEQ ID NO: 152 - DNA, 591 bp, Saccharomyces pastorianus
atgtctgtttctaaaatcgctttcgttttaaccgctattgcctcttttgccgccgctgaaaccgccggtcaaactgccgaattacaggcgattattggtgacattaactcccatctttccgactatttaggtttggaaacgggtaacagcggtttccaaatccctgctgatgtcttgagcgtctaccaacaagttatgacttacaccgatgactcttacactaccttgttcagtaaactggactacgatgccatcaccaagaccattgtcaaattaccatggtacaccactagattgagttccgaaatcgccgccgctgttgcctctgtttctccagcttcttcttcttctgctgccccatcctcttcctcttctgctgccccatcctcctcctcagcagcttcctcctcctcagcagcttcctcctctgttgctccatcctcttccaaggcagtttcttcttccgttgctccagccacttctaccgctagcacttctgttgtaactgcatccaacgctggtcaaagaatcaacgcaggcgctgcctctttcggtgctgttgttgccggcgcagctgctttgttgttgtag

SEQ ID NO: 153 - DNA, 1857 bp, Saccharomyces pastorianus
atgaacgacagtgacagtctctttgtcgacgagaccaatccagctccatatgcacatggtatgcacgagaaagggcatgtcgaaaaggagaaaaagggcttcacagtgactgaaaaccaagacgaaggatcggaacagcaagcgaaaccccaagggccgagtgggagatccaaactacaaaaggaatgcaaaaaattcttcgattctttcaaaaggcagcttccaccggaccataattctgaactagagtcacaagaaaagaacaacctgacaaagtccatcaaatcgcgtcatttgatcatgatcagtcttggtacaggtatcggtacggggctgctggtcgggaatggccaagtactcggaacggcgggacccgccgggttggtgctcggttatggtatcgcctctattatgctttactgtatcatccaagctgccggtgaactgggtctttgttatgccgggttaactggtaattataccaggtattcttccattttggtcgatccttcattggggtttgccgtttccgtggtttataccattcaatggttgaccgttctgccgttgcagttggtcacggcagcgatgactatcaaatactggaccaacgtgaacgcagatatctttgttaccgtggttttcctttttgtcattgtcatcaacttgtttgggtcccgaggctatgccgaagcagaattcatctttaatatctgtaaaattttgatggtaatcggattcgtgatcctggctattgtcatcaactgcggtggtgcaggggataagaagttcatcggtactaaatactggcacaatcctggtccatttgctcacggtttcaaaggtgtttgtactgttttttgttatgccgccttcagttatggtggtatcgaagtcctccttctatcagcagctgagcaagaaaatccaagaaaatccattccaaatgcctgcaaaaaagttgtgtatcgtatcttgttgatttacatgttaacaaccattttgatttgtttcctggttccatacaacagtgacgaattattaggctctgggagctcctctgggtcccatgcatctccatttgtcattgctgttgcgtcccacggtgtcaaagtcgttcctcacttcatcaatgctgtgattttgatctctgttatctctgtggccaactcttcgttatattctgcaccaaggttactgctatctttggcagaacaaggatttttacctaaatgcctggcgtatgttgatagaaacggcagacctttgctttgttttctaatttctcttatctttgggtgcatcggatttgttgccactagtgacgctgaagaagaggtttttacatggttattagccatttccagtctttcccaattgtttatttggatgtcgatgtccttgtcacatattagattcagagacgccatggccaagcaaggccgttcaatggacgaggtgggatacagagctcaaacaggctattggggctcttggcttgcagttattattgcgttatttttcctagtttgccagttttgggtcgccatcgcacccgttagtgaacatgggaaattgaatgctaaagtgttttttcagaattatctggcaatgcctattgtcttgtttgcctattttggccacaagatatactccaaatcgtggaggttttggattccagccgacaaaatcgatttggactcacacagaaccatatacgtcccgccatcacttatagagaccaacaagaatgaagacgatgttcttaaagaacatgaaacttcagagtcatcggaaaacctgaacggctcaagttcaagaaagtttttcaagagaatggtcaatttctggtgttaa

SEQ ID NO: 154 - DNA, 636 bp, Saccharomyces pastorianus
atgcttagacgctccaagaattccggttcaagctcgcacacagacgctaagaaaaggcagtctatgtttctagaatccaaaagttcgttgatgtcattgtctaacgagtttgctcaaggacattctaaaacaaagcagaaaacgcaagagggtgtctcctcctcatcgtcttcttctgcacacaaaaaatccacgtccagtcggtcaaagttgaaaagaagcagtttgttgctcgatgaaacacttctaaaggactaccattcggccataaaacacatgcaggtaaacgctcccagagaggagaagctactgctggttccgtctccaacgcagtcaacgagaagcgaatcagacaccagtctctcttccagtaagagttcgatatcttccatattctcccaggataaaaactattccattcacgacttgttatatgaagacatcgaagagatggataaaacagccaacggccccaaaattgatgacacaatagcaatagacgaatctaaagcactttttgtcttctgcacaaacgagtcctctatgaagctaccttataatgaaacactgcacgaactgaacttggacactccagtcatgggccccaacagaagaacatcgctaaatttcttttaa

SEQ ID NO: 155 - DNA, 645 bp, Saccharomyces pastorianus
atgtcattcaacagtccatttttcgatttctttgacaacatcaacaacgaagttgatgcctttaacagattgttaggtgaaggcggattaagaggctacgcgccaagacgccaattaacaactggtcctggtaaggattcgacaggtaaggaaattgctagaccaaataataatggtggtgctctttatgatccaagagatgacacattggatgattggtttgacaatgatttgtccttgctgccatccaatctcagcttccccagaagtgttgctgttccagttgatatcttggatcacgataacaattacgagttaaaggtggtggttcctggtgttaagagcaagaaggatatcgatatcgaataccatcaaaacaaaaatcagattttggtttctggtgaaatcccatcttctttaaatgaagaaagcaaggataaggtcaaggttaaggagagcaactctggtaaattcaagagagttatcactttaccagattacccaggtgtcgatgctgataacattaaggcagactatgcaagcggtgtgttgactttgactgttccgaagttgaagcctaaaaaggatggtaaaaaccacgtcaagaagatcgaagtctcgtctcaagagtcatggggtaattga

SEQ ID NO: 156 - DNA, 2898 bp, Saccharomyces pastorianus
atggctcctcctccattccgtcctgaaaatgctgttaagagagccgacgagcttatttctgtcggcgaaactcaagctgctttacaatctttacacgacttcataactgctagaagaatccgttgggccactccttccactgtcgaaccagtcgttttcaaattcttggaaatcggtgttgatctaaagaaaggtaagctgcttaaggatggtttgcaccaatacaaaaaactggttcaaggctctcctgaaggtttggcatctgtcggtgctgtcgctcgtaaatttattgatttagtcgaaacaaagattacctccgaacaaactagggctgatgaacttcaaaagcaagaaatcgatgacgatttggaaggtggtgtcactccagaaaacttgttagtttctgtttacgaacaagatcaatctgtcgctggtttcaatgacgaagctattacttcatggttaagattcacttgggaatcataccgtgctgttttagatttattgagaaacaacgctttgttagaaattacttattcaggtgtagtcaagaagaccatgcatttctgtttgaaatatcaacgtaagaacgaattcaagagattagctgaaatgttgcgtcagcatttagacgctgccaactaccaacaaagcaaatcaggtaacaacttagttgacttgagtgatgctgatactttgcaacgttatttggatcaacgtttccaacaagtcgacgtttctgtcaaattggaattgtggcacgaagcttataggtctattgaagatgttttccacttaatgaagacatgcaagcgtgcacctaagccttcaactttggctaattactacgaaaaccttgttaaggtcttctttgtttccggtgatccactgttacacaccactgcctggaagaaattttataaattgtattctaccaatccaagggctacggaagaagaatttaagacttattcttccacaattttcttgtccgccatttctattcaattggacgaaatcccatctattggttacgatcctcatttacgtatgtaccgtttattgaacttagaaactaagccaactagaaaggaaatgctggaatctattattgcagatgaatccatttatggtaaggttgacgaagaattaaaacaattgtacaacatcgttgaagccaacttcaatgtcgacacaatcaaacaagatttggaaagcttattgaccaaattagtctcaaagccttacttcagtcaatacattgtacagttaagagatgtcattatgagaagagtttttgtcgctgcctctcaaaaattcactacagtctctcaatctgaattgtatgaacttgccactctaccagctccactagacttgtctggctgggacattgaaaaggctttattacaagctgctattgaagattacgtctctatttccattgaccacgagtctgctaaagttattttcgcaaaagatccatttgacatttttgaatctaaggaaattcccgaagaagacagttcagaactggaaggtcaagaagaaaaagaggaagccgaagaagctcttgaaccacaagaagccgaagagactgaaccaaaggaggacggcgaagaaaaggaagaagaatccgatcccgttattatccgtaattcatatattcacaacaagttacttgaactgtccaacgtcttacatgatgttgacagtttcaataatgcttcttatatggagaaagttaagattgcccgtgaaactttgattcaaaagaacaagggcgatcttgaaaagatttccaagattgttgacgaacgtgctaaaagatctcaagaacaaaaacaaaagcacatggaacacgctgctataaatgccgaacaaaatgccgaagtcagacaacaacgtattctggaagaaaaagctgccattgaagctaaattggaagaagaatctcatcgtcgtttaatcgagaggaagaagcgtgaatttgaaatcatcaaggaaagagaaatcacaaaaatgattactgaggtaaacgctaagggccatgtttacatcgatcctaacgaagctaagagcttagaccttgacactatcaagcaagttattattgctgaagtgtctaagaacaagagtgaattagaaaaccgtatggactatgctatgagaaaattggaccataccgaaagagctttaagaaaggtagaattgccattgttgcaaaaggaagttgatgcgttacaagaaactgacactgccgactatgagatgatgaagaagaagattgtcgatgcggccaagggtgaacatgaagccagaatgactgaccataagaacttggccatggtctttgacgattacttgaaattgaaagaacgcttgtcaggtaccaaagaaagtgaagtagcccaactccgtaatcaaaagaaggctgaactagaagctgctaagaaagcaagaatcgaagaagttcgtcaacagcgttaccaagaggctatcgcaagacgtaaggaagaaattgccaatgctgaaagagaaaaacgtgcccaagaactcgcagaagctggccgtaaacaaagagaaatggaggaagctgccgctgctaagaaacctactccattcgctcctcgggccggaaacagagaacctccaagcacaccaagtctcttaccaaaggctactgtttccccagataaagctaagttagatttgatggctcagaagcaaagagagatggaagaagccattgaacaaagattggctggtagaggcgcaggtgggtccaccccagctactccagctaccccagctactccagcttcaacctctgctccaaagaaaatgaccatggccgaaaaattgagagccaagagattagccaaagaaggcagataa

SEQ ID NO: 157 - DNA, 2277 bp, Saccharomyces pastorianus
atgttcaagataccaggtttcggaaaagctgctgcaactcacgccccaccagatatgacaaacgtagatacccgtccacgccatttacaagtgtcaaattgccctaataactcctatgcactggccaacgttgccgctgtttcgcccaatgattttcctaacaatatctacatcatcatcgacaacttatttgttttcactactaggcactctaacgaggttccacctggaaccatcgggttcaacggtaatcagcgtacttggggtggttggtctctaaaccaagaggttcaagcaaaggcgtttgatttattcaagtattccagcaaacaatcgtatcttggttcgatagacatagatatttcattcagagctagaggaaaggcggtcaacacggtattcgatcaagatgagttagccaaacaattcgtccgctgttatgaatctcaaatattctctccaactcagtaccttattatggaattccagggtcatttctttgatcttaaggttagaaatgtccaagcaatcgatttgggagatattgaaccgacaaccgctgttgcaacagggatagagactaagggaattctgacaaaacaaacgcaaatcaatttttttaaaggaagagatggactagttaatttgaaatcatcgaactcattaagaccaaggtcaaatgctgttatcagaccagatttcaaatttgaagacttaggtgttggtggtttagataaagaattcaccaaaatttttaggagagcttttgcgagcagaatttttccaccttcagttattgaaaaattgggtatctctcacgttaaaggtttactattgtacggtcctccaggtactggtaaaacattaattgcaagaaaaatcggtacaatgctgaacgccaaagagccaaagattgttaacggtcctgaagttttaagtaagtatgttggttcctcagaagaaaacatccgtaatttattcaaagacgcagaagcagaatacaaggccaagggggatgaatcttccttacatatcatcatttttgatgaactggattctgttttcaagcagagaggttcaagaggtgatggtactggtgtaggtgacaatgtagttaatcaattgctggctaaaatggacggtgttgatcaactgaataatatattggtcattggtatgaccaaccgtaaagatttgatcgatattgctcttttacgtccaggtagattcgaagttcaggttgaaattcatttaccggacgaaaaaggtagactgcagatttttgaaattcagacaaaaaaaatgagagaaaacaatatgatgagcgacgatgttaacttggctgagttagcggctttaactaacaatttttccggtgctgaaattgaaggtttagtgaaaagtgcaagttcctttgccatcaacaaaaccgttaacattggaaaaggagcgacaaaactcaacacaaaggatatagcaaaacttaaagtaacaagagaagactttttaaatgctcttaatgatgtcactcctgcttttggtatcagtgaagaagatttaaaaacatgtgtagaaggtgggatgatgctttattccgaaagtgttagctcaattttaaagaatggggctcgttacgttcgtcaagttcgcgaaagtgagaaatctagattagtgtctctattaatacacggccctgcgggatctggtaagacagcattggccgctgaaattgctttaaagtccggattcccatttatcagattaatatcacctaatgagttatcaggtatgtcagaaagcgccaaaattgcctatatcgataacaccttcagagacgcatataaatctcctctaaacattctcgttatcgattcgttagagactctggttgattgggtgccaattggtccaagattttcaaataatattttacaaatgctgaaagtcgcactgaagcggaaaccccctcaagatggccgtttgctaattatgacaactacctcaacttattcagttctccaacaaatggatatcctgagctgttttgacaatgaaatagcagttccaaatatgacaaacctagatgaattgaataacgttatgatagaatctaaatttctcgatgacgctggtagggttaaagttatcaacgaattgtcacgcagttgtcctaactttaatgtcggtatcaagaagaccttaaccaatattgaaactgcaaggcatgatgaagatcctgttaatgagattgttgaattgatggcacaatctgcgtga

SEQ ID NO: 158 - DNA, 4131 bp, Saccharomyces pastorianus
atgactgaaaaaataccaataacgaactatcaaaggacaaatgccaaacctttactgaaattgactgaaaaactttttagaagaaacattttcgatctctatttgactgcccaacaattggttgttctcggatatttattggcaattccaagtgaagaagacaaactcaaagcatgggattatttcatgaaaggaaacataacgttaaacgtcgaaaaatcgttcccatcgactcaggaaaaggaacagggtagtataatatcctccactggtgatgctcaacctgacaatgtatcgtcggaaacagtagagataactacagaaaatcacaacaataataataatgatactaataataataatgataatagtaatagcaatagcgaaagtcaatgcgaagataaaggccctgaacccaacacaaacgatgaagataatgtcaataatgatgttgaagaagacttatttaagctggatttagaagacttgaaacagcaaataagtggtccaaagtttatcggaaatctgtctttgaaaatcaggtatgtcttatggcaatgtgctatagattatatgtatagtggccataacgaatttgatgatggtgatgaaatggaatatgccctactagatgttgaaaaggaagaggaagaggaagagaaagagaaagatgatgaaacggaagcaccgcaaaaccaagaaaatatccctaagtttaccgaagatgaaaattatgacgacgaagatgataactatgaggaagacaccacatttgaaaagaaagacgattttatagaaaatggcaatggtattcccttttctaatattgaaattgatgatgaacgacgcctgttgttgaacatttctatatcaaaggaaacattatcgaagttgaaaactagtaacgttgaagggattatgggaaactggaacaaaatttaccacagtcttgaatacgataaagaaactatgataaagcgcttaaggctggaggaaagtgataaaatgatagagaaaggaaagaggaaaagaagtcgaagcgatttggaaatagcttccgatgaagaaaacaataaaaatatagacagtaaaccagaaacaaacgatatactgtctgcaattgaaggcgagacatttagtgacactgggaataaacgtcccaaacagaataagttagatttaacagtcaatctagggatcgagaatttatcattaaagcaccttctgtcttcagttcaagaaaacaaatctcgcttaggtatatcagattacgaactgaaacaccttattatggatgttagaaaaaatcgatcgaaatggacatcagatgaaagaattggccaagaagaattatatgaagcctgcgaaaaggttgtattagaactaagaaactttactgagcactcaacaccatttctaaataaagtgagcaaaagggaagccccaaattatcaccagattataaaaaagtccatggatctcaatacagttttgaaaaaattgaaaagctttcagtatgactccaaacaagcatttgttgacgatgttatgctaatatggaaaaattgcctaacctataactcggacccttcacactttttgagggggcatgctattgctatgcaaaagaaatctcttcaattgatccctatgattccaaatatcacaatccgtaacagagcagacctagagaaagaaatcgaagacatggaaaaggacaaagactacgaagtggatgaagaggaagaagttgctggttctgggagaaaaggactgaatatgggtgctcatatgttagcaaaggagaatgacaaaggttccaaaaggggtacctctaaaaccaccgagaaggaaacttcaactgatattgacaaagcaacttcaacaattcttgaggggggagaagacgaactggactctccaaaagaagaaaaggaagatgaccaaaccgcttcacccaatgtaacttttagtgaaactggcggaaaaaatgaactcagggaaaatgagaaatatgacgaacatcaaagtgttgaagaaagtgaaaaagctgagggatgcgaaaaggagaacgaaaacggacgagatggggaagtttccaaaaatgacacagaaaacaagcgacaaagtaaagtcgacgagggaaatgaagtaagagaagagaatgatggagaaggagaaaaagtaaatgagaatgaagaagaagaggaagaggaagaagaagaagaagaagaagaagaagaagaagaagaagaagaggatgaggaggatatggccgactctcaatcctatttacttgaaaaagacgatgataaggacgacttggagatttctgtttggaaaactgtgactgctaaagttcgtgctgagatctgcttgaaaagagcgagttattttaaaaatggaaagttaaatatcgattcggaagcatacctaaaaaacccacaaagaatgaaaatgttcgatcagttgttctcagaatataaggaacagaaagctctggaatcatatcgtcagaaaatggagcaagactcaatcatgaaaaacggtttcgggacagttttgaagcaggaggacgacgatcaactgcaatttcataatgatcatcccttgaatgggaatgagggttttgaaaaacaacccaatgatattgaattggacgacaccagatttttgcaagagtatgacatcagtaacgctattcctgacatattgtatgaaggagtgaacacgaagacactggacaaaatggaagatatttctgtagaacgcatgcttcaaaacgggatgaccaggcaaagcctgtttttagctaacaaggatttgggtcttacacctcaaatgaaccaaaacatcacactcgtgcaacagattagacacatttgtcacaagatatctttgattagaatgctacaaagtccgttgtcagcccaaagctctagaaacaaccctaacgcctttcttaacagccacatctataactacaccgttattgatgattcacttgacattgacccagtatcgcaacttccaactcatgattacaagaacaacagggaacttatatggaaattcatgcataagaacatatctaaggtagctatagcaaatggatttgaaactgctcactcttccgcaataaatatgcttaccgaagttgcaggggattacttatccaatttgatcaagaccttaaaactacatcatgaaaccaattctttaaatagaggtacaaatgtagaaatgttacaaacaacactactggagaatgggatcaatagaccagatgacttgtattcctatgtcgaatcggagtttggcaaaaagacaaagaagcttcaagacattaagcacaagctagagaactttttaagggccttactaaggccaactctacaagaactatctgagagaaattttgaagatgagagccaaagtttctttactggtgattttgcaagtgaactaactggagaagatttctttggtttcaaagagcttggtctagaaaaggagtttggcgttttgagttcgtctgttccattgcaactgctgactacccaattccaaactgtcgatggggaaactaaagtgcaggataagaaaatccaacctgaagaatctgacagcatcacgtatagcaagattacaaaaggcctgcttgatgcgggttcgttctggaacactttacttccactgctaaggaaagattatgagcgctccaaagcatatatagcaaaacagagcaaatcctcagcaacaaatgatagaattctacctacttcgactgaggacaattcctttgctctcttagaagaagatcaatttatttcgaagaaatccgcatcaaaagcaaggttacctcctactggtaaaataagtactgcgtacaagaagaaaccaatttcaaatgccttcatacttccagaagaggacccagagaagagcgaaaaaggtgatccaaatacaactatacattctacagtgcatacagaaaatgaaatgggttcttccctatttttggaaacacctcaaccactggattctttgaacatggacgacccctttaatgattcaaacgtgggcaccaatagttcctttagtttgagccttccccgtttaaatcagtaa

SEQ ID NO: 159 - DNA, 1473 bp, Saccharomyces pastorianus
atgagtcttaaagtagatgactttggcacagactgctctagaagtatagaaacatacaatgacagaatctttgatgtgtacatacagaaggattcgtattcccagtcgggtctagatggcatgtttccagaacctggtattcggagcgatgcttgtgtgaaaaatgaagcggaagatggcatcgacctcgccaacgcgcctcctcagtttgaactggtcaatactgggctgggagctaaatcagatcgtctaaggtctccatcagtgaagggtgcgttcaccgataaacagaggaaaaatgaagtaccaagcatagctgttaacaattacttttctggacaaagtagcgaaaatacgtcaacaacggaatcttggggcatcggctgcgataagtggtccgaaaaagtggaagaagcattctttgaagctctcaaactgataatgaaaaacggtaccacgaaaataaaaataagaaacgccaatttcggaagaaatgaactcatttcattatacatcaagcatcaaaccaatgagttcagaaccaagaagcaaatttcttcacatatccaagtctggaaaaaaaccatacaaaacaaagttaaggactctttgactttgtcacagagagaggaggagctcttacatctcatcgagcatggtgcagaacaagcagcggaaacttctaatatgttttatgacatattcgaggaaattattgattcattaccttcaattaacgacgcaacgaattcaactcctaataatcttcacgccagtaacaccagtaacaccagtaacaatgaattatcagtacactcaaggttactaacgccaatcacagcttcaaacgagaagaagatagagaatttcatcaaacacaacgctgcatctcaagcgaagactcccttaatctacgctaaacacatttacgaaaacatggacggctataaatgtgtaccatctgaaagacaccttagacagctttctcccgcagaatctcatcacggaggcgttttcgacaaggataagatttcaagtaaggaagctatcttggaaacagccagaaatatcgaaatagagcagaggaagattatcaacaagtaccaaagactatcccgcatacaaggacaagagagtaatacagagttcagttccaattccaattccggttcggaatacgaatctgaagaggaagttgttccaaggtctgctgcagagccacagttacaaggtaggctagcaccatactacaagaacaacggcatgccatatcctctctccaaagtacgaaccaggccaatgtaccccagacctgctgaagacgtctataattcgaactatgctcaaggtctaccccagtaccaatcttcctacttttctcaacttctattatcatcaccccaacatttcgagcattccccacaccaaagaaactttacacagtccaaccaatcgcatgggaacttctattga

SEQ ID NO: 160 - DNA, 924 bp, Saccharomyces pastorianus
atgagtagtgacactaagcaacaagaatcgagctttgctattaatttcttaatgggtggtgtcagtgcggcagttgccaagaccgctgcctcacccattgagagagtcaagatcttgattcaaaaccaagatgaaatgataaagcaagggactctggaaacaaagtattccggtattgtagactgtttcaagagaaccgctaaacaagagggtatgatctcattttggagaggaaatactgcaaatgttattcgttatttccccacccaggctttaaattttgccttcaaagataaaattaaattaatgtttggtttcaaaaaagaggaaggttatggtaaatggtttgcaggtaatctagcctctggtggtgctgcgggtgccctttcgttactatttgtttattctttagatttcgccagaacaaggttggctgccgatgctaaatcatccaagaagggcagcacacgccaattcaacgggctggttgatgtttacaaaaaaactttaaaatctgacggtattgctggactgtacagagggttcatgccttcagtagttggtatcgttgtttatagagggttgtattttgggttattcgattctctcaagccactggtactaaccgggtcattagacggatcatttttagcttcgttcttattgggttgggtggttactacaggtgcttcaacatgttcatacccattggacacggtgagaagaagaatgatgatgacttccggtcaagccgtcaaatatgatggtgctatggattgcctaaggaagatcgtagcagccgaaggggtcggatcattattcaaaggctgcggtgccaatattctaaggagtgttgctggagcaggtgttatctccatgtatgatcaattgcagatgatattatttggtaagaaattcaagtag

SEQ ID NO: 161 - DNA, 258 bp, Saccharomyces pastorianus
atgtcatctgctctatacaaacaaaacacaaatttcactcattctacaggttctttcttacaaagtgcccctgttgagttgaccacagttagtggataccaagagtttttgaaaaagcaacaaaagaaaaataatgaaatccaaacagtcctgagcgaagacaagtcgcacggctatgtgctaatgggcggtgaagtcattgccaatattctaggtgaagctaaagattatctcttggatttggcgggtcaggcctaa

SEQ ID NO: 162 - DNA, 2811 bp, Saccharomyces pastorianus
atgtcgcagacaatcacatccttagatccgaactgtgttattgtattcaataagatttcaagcgctaacgagaaaagtttgcgtgcgaaatttaagcgtttgcatattgattctattatcaaacctggccatgatttgaagacaaattatgctttcattaagatccatcaggataaagccaagtcactgttttcatccctcaagaacttgggctttattgaatctatcataccatttcatgatactgaattgtccagtaatttgcataaacttgtttctaaagacaaaacaaaattactggaaactccaaaacagtacgaattatacaatttgtcgaatttgaccaacaaccccaaagaatccttatattttgcattcttacaaaactacataaaatggttgattccattttcgttttttggattatcgatccgattcttatccaatttcacatatgaattcaattccacttattcattgtttactatgatatggactctgttatttgcggctttctggctttataaatacgaactattttggtcggatagattgagtcaatacacctcattttcgaccattgagttccttcgcgacaaaaaaaacgttggaggaaattctggctcaactaccatgttgaaaaaatgttgttttataccagtggctttgctttttggtgttgtattggtatcattccagttgttttgttttgcattagaaatttttatcaagcaaatttataacggcccaatggtgtctgttttgtcattcttgcccacaatactaatttctgcgttcatcccagttttaactatggtctacaataaatattttgtggaaccaatgacaaattgggaaaaccataccagtgcaatgagtgcaaagaaatccaaagaggctaagaattttgtcattatctttttatctagttatgttccattgttgataactttattcctttatctgccaatgggccatctattaaccgccgaaataagagccaaatttttcagtactatctcgatcttagcttgtttgcctacgcatgattcagattttgttattgacacaaagcgttatgaagcccaatttttctactttatcgttatcaaccaagtgattcaattcagtctagaaaattttgttccaagccttgtcaatattgcaatgaacaaaatcaatggaccaaaccctgagcttgtgaaagccgaaaatgaaatcagtaaagaccaactgagcccatcagacatgagaatttggtcaaaggttaaatcgtacgagacagatccatggggagccacattcgacttggatgcaaatttcagaaagatcatattacagttcggttatcttgttatgttttctactatttggccattggccccattcatatgtttggtggtcaatttgatagtttatcaaatcgatttaaggaaagccgttctttacagcaaaccagagtatttcccattcccaattgacgatatgtcatcttctgtctctgttaccaaaaaattgactgttgctctatggaactctgttttggttattttcgcggtcgtaggttctgtcatcacagccactttaacttacatgtatgaagactgcaacttaccagatgtcggcgcacacacttcaatccatatgagtaagctttggtatttggcaaatccaatcaagcattcgtgggtgagtattgtactacatgccgttttaattgaacatgccagtgttgccgttttcttccttttctctaatattctaaaatcttcccgggataatgtttccaacggaatcgtgccaactaatataacgaagacggaaaaattatcaaaacaagaagattttgactacactcctgctgtcaaatccagtcctgataatgaaaatgagctgacccaaagaagaggacctacccaggattacgtgtcccatgaaatcaatgagaaacagcctatctctcttgcaaatggagttgaaagacggggtaccggccagtctaagaatggtccttccattcttcccccattaccaccttcttcttcttcttcgtcttcttcttccggtgcaggcgctgtcgattctggcaatagtgataaaattggagttactaatgaaaaatcagtggccatagaaaacaacgaaaaaggaaccgctttggctaaagtgccaactgttgggtcatacggtgttgcaggtgccactctacctgaaacaataccaacttcgaaaaactataatttaagatttgacgaagacggtaattccatcaaagatgggaaatttggtggggaaacctcgaacttaaccgacacgaacgcggtagacagcgagagcaaattcaatgcaaacggcaatgctcctgatgcattcagcagaaaaatcgatcaaatacccaaaattgctgttacgcatggtgaagataattctcaagttgaaaacgatgttgccatggctgacccggtaaatgccaatggggccatcaaaccggttctcagtacaggcgttactgatgaccattcgagggcttccgtgactaccgagcaaacgaagaattctatgttaaacaataagaatggcccagtaagatctatttctacgaaggaaaccaaagaatctacaagaccatcaaacaacagtgctactgatgccgctcaccaccatcaccatcaccgtcaccatcgcgatgctggagtgaagaacgccacgaacaattccaaggcagctgaatcttcatcttcttcatcagcgacaaaagaaaaaccaaaacgcaaaaaggggctgctgcataaattgaaaaagaaattatga

SEQ ID NO: 163 - DNA, 1065 bp, Saccharomyces pastorianus
atgtccttgtgggttgacaagtatagacctaagtcattaaatgcactttcacataatgaagaattgacgcattttttaaagtcactgtctgatcaacctcgcgatttacctcatcttttactatatggaccaaatggtgcaggtaagaagacgcgttgcatggcattactagagtctatatttggttcaggagtttatagattaaagattgatgttagacagtttgttaccgcctcgaacaagaaactagagttaaatgtggttagttcgccatatcatttggagatcacacccagtgatatgggcaacaatgatagaattgtcattcaagagctgttgaaagaagtggcacaaatggaacaagttgacttccacgattctaaagatgggttggctcatagatacaaatgtgttattatcaacgaggcaaattctttaacaaaggatgcccaggctgccttgaggcgcaccatggaaaaatactctaagaacattaggctgatcatgatttgcgattctatgtcgcctataattgctcccatcaaatcacgttgtcttttggttcgttgtcccgcaccaagtgataatgaaatctcaaatattttatctgatgtagcgacgaatgaaagaatacatttagaaacaaaggaaattttgctgaaaattgccagcgaatcgaatgggaatttacgagtctctctattgatgctcgaatctatggcattaaacaacgaactaacattgaaagtcagtagccctataataaagccggactggattatcgtaattcaaaagctagcgagaaaggtcgtcaaagaaagatctgttaactcattgatcgaatgtagagccgttctatacgacttgctggctcactgtatacctgcgaatgtaattttgaaggaactaacgtttgcgctgttaagcgtggaaaccttaaacactgtgcaaaaggcatccgttattgaaaattcaagtgttttcgatgaaagactatcactggggaataaggcgatcttccatttggaagggtttatagcaaaggtcatgtgcactttagattaa

SEQ ID NO: 164 - DNA, 777 bp, Saccharomyces pastorianus
atgttagaagctaaattcgaagaagcatcccttttcaaaagaatcatcgacggtttcaaagactgtgtccaattggtcaatttccaatgtaaggaagatggtatcattgcccaagccgtcgacgactcaagagttttgttggtctctttggagatcggtgtcgaagccttccaagaatatagatgtgatcatcctgtcacactgggtatggatttgacctcgctaagtaagattctacgttgcggtaacaacaccgacactttaacgttaattgctgacaacacaccggactccatcatcctattattcgaagatacaaaaaaggaccgtatagcggagtattccctgaaattgatggatatcgatgctgatttcttgaagattgaagagttacaatacgattcaaccttatccttaccatcatccgaattctccaagatcgttcgtgatttgtctcaactgagcgattctattaatatcatgatcactaaggaaacaatcaagttcgtagcggatggtgatatcggttcaggatccgtcataataaaaccatttgttgacatggaacatcctgaaacaagcatcaaattggaaatggaccaacccgtagatttgacattcggtgctaagtacttattagatatcatcaagggttcctccctttccgatagagtcggtatcagactatccagtgaagctcctgctttgttccaattcgatttgaagagtggattcctacaattcttcttggctcctaaatttaatgacgaagagtaa

SEQ ID NO: 165 - DNA, 300 bp, Saccharomyces pastorianus
atggccgcaactaaggaagcaaagcaaccaaaagaaccaaagaagagaaccaccagaagaaagaaggaccctaacgcccccaagagaggcttgtcggcctacatgttcttcgccaacgagaccagagatatcgttcgttccgagaaccctgacgtgacctttggccaagtgggaagaatactcggtgagaaatggaaggccttgaccgcggatgagaaggtgccttacgaaactaaggctcaggctgacaagaagagatatgagtccgaaaaggagttgtataacgctacacgtgcctga

SEQ ID NO: 166 - DNA, 1404 bp, Saccharomyces pastorianus
atgttcaagtctattgtttgttcagttttagccgcttctttagttaatgcaggtactattcctcttggcaagctagccgatgtcgccaagatcggtacccaagaagaaatcattccattcttgggtggtgcaggaccatacttctctttccctggcgactatggtatttctcgtgacttacctgaaggttgtgaaatgaagcaattgcaaatgctcggtagacacggtgaaagataccccacctatagtaaggctaagaccattaaaaaaacatggtacaagttgagcaactacactcgccaatttaacggctcattgacatttttgaacgatgattatgaatttttcatcactgatgataatgacttggaaatggaaaccacctttgccaactcagacgatgttttgaacccatatactggtgagatggacgctaagagacacgctcgtgagttcttgcaacaatacggctacatggtcgaaaacaagaccagtttccccatttttgccgccagttccgaaagagtccacgataccgctcaatactttattgatggtttgggtgacggcttcaacatttccttgcagaccgttagtgaagctatgtctgccggtgccaacactttgagtgctggtaatgcatgcccaggttgggatgaggatgccaacgatgacattttggacgaatatgataccacctatttggacgacattgccaagagattgaacaaagaaaacaagggcttgaacttgacctcaaccgatgccaacactttgttcgcatggtgtgcatacgaactgaactccagaggttacagtgatgtctgtgatatcttcagcaaagacgaattggtccgttactcttacggtcaagacctgacctcattttaccaagatggtccaggttacgatatgatcaaatctgtcggtgctaacttgttcaatgctactttgaaattgttaaagcaaagtgaaacccaagacctaaaggtctggttgagtttcacccacgatactgatattttgaactatttgacaaccatcggtataattgacgacaaaaacaacttgactgctgaatacgttccatttatgggcaacactttccacaaatcctggtatgttcctcaaggtgcccgtgtgtacactgaaaagttccaatgttctaacgacacctatgtcagatatgtcatcaacgatgctgtcgtcccacttgaaacctgttccaccggtccagggttctcttgtgaagtaaatgacttctacgactacgctgaaaagagagttgccggtactgacttcctaaaggtctgcaacgtcagcagcgtcagcaacgtcaccaaattgtccttctactgggactggaacaccacccactacaacgccactttactaaaacaatga

SEQ ID NO: 167 - DNA, 2250 bp, Saccharomyces pastorianus
atgcgtgttttgataactaacgatgacggtcccctgagtgatcaattttcaccatacatcagaccctttattcaatatattaagagatcttatcctgattgggaaattacaatctgcgtgccacacgttcaaaaatcatgggtcggcaaggctcatcttgctggtaagaacttgacggctcaatttatatattccaaagtcgacgctgaagataatactttctggggtccttttatccagccccaactaaagtcgaaccactccaaattgccttacgttttgaatgcagaaattccgaaagatgcgatcgagtgggtattgattgacggaaccccggcatcgtgtgtaaatatcgggttacatttactctctaacgatcaattcgatttagtgctgtcaggtccaaatgttggcagaaatacatctgcggcgtacattacatcatctggcacagtgggtggtgcaatggaatccgttatttcaggaaatacaaaggcaattgctatatcatgggcctactttaatgggttgaaggatgcttctcctgtactgatgcaaatggcctccaagagatccctagacgttatagatcatcttgtgaaaaactgggacccaaagaccgatctatatagtattaatatacctttagtggagactcttaatgacgataccaaggtatattatgcgccaatctgggaaaacagatggactccaatattcaacgggcctcatattaatttagagaataactttgctgagatcgaagatggtaacgaatcatcatcgatttcctttcactgggctccaaagtttggtgcacataatgattctatccactacaagaacgagtatagagataggactgctttaactgatgctgaagtcatagaatccaaaatgatcagtgttacgcctatgaaagccacgttcaagggtgttaatcatctacttggagagttaaagctgactcaaaaagaaaacggttcaccaaagataaatagccttgcagtggtgagtatcgatccaatggaatatatatataaacctttaacgagcgcattgaaaaaatacttgccacagttggatatcgtgccaagcttaccagaattcgagagtggtaaacacgaaaaccaaacgaagattttccactacggtgactatgagcaactagacatggacaaattaatggaactaccaaaaaattattacaccaactcttatatatacagaaaagcattgatcagaaagcactttctttcgcacactatccaaacgtatacagcaaaacatccagattcaattttgaagaaagcatatttagaatcgtttactattgatttagactatgctgaatttttagatgatgcattagacgaaaactgggagttacgtcaagaattggaaaacgaaagtaaaggcaaatggtggattgtgaaaccaagtatgagcgataaaggtcaaggtattagggtattcaagaccatacaagacctacaagccattttcgattcttttgatgacgaagatagcgaagcggaagagagtggaaatgacgacgacgcaaatgcagaattcatggataataacaaagtaaatatctcccaattgcgccactttatcatacaagaatattcaacgagcccattattgctatcatccatggataatagaaagtttcatataaggtgttatgttgtttgtaaaggggatttacaagtattcgtatacgataggatgctagcactatttgctgctaaaccgtttgtccctctagatcctaacacatattccgtaacagatttgaaagatttggagtgccatctgactaatacatgcttgcaaagcaagaagaaagataaagattcttctgttttggagtttgattccctagaagaaattccaaacgagaaaaagttgaaaattaaggaacagattcattgcataacaaatgacgttttcttagcggcagtaaatgtaaacaggctaaacttccaaccgttaccaaatgcgtttgagacctatggtgtagatttcttggtcgattcggattatgaagtcaagttattggagatcaatgctttcccagatttcaagcaaactggtaaagacttgaaggacctcattgatgaattgtttgacgatactgtcaagtattgtgttgccccaatctttaaaggtaacaacaagatcgaagatgaagaagatccaaactttgtaaaggttatcgactacacttcaaatgattggtga

SEQ ID NO: 168 - DNA, 693 bp, Saccharomyces pastorianus
atggttttctgcacaatcttaaaatggcttttcgctgcctacctactgtcttcatacaagtcactacctggtgcatatttttttagattttattactacgtgattcctattttatttttgcctattgtcacaggatcgaagaccaaaaatatcaagaaacttaaagaaaacgaatacggttgcttctcgtacaccaaactggacacatatgcctctccattcgaatgtgacttttactttcataaaagtaatagcacctattttgaagagttggatatttcaagaggcggcttgatgtgtaagatttttcagaagttgatgctcaattccaagcattacccatatattccagtcgcaaacgttttcaccaacttcttaaaggagatcaagcctttccaaaaatactctgttacatcgaggatcatttgttgggatgagaaatggatttatgttatgagcagattcaccatcaaaaacggcaccgttctatgctcactatcgctgacaaaatatgtcttgaaggagggcagaaagacaatcaagccaaaggatgcatttgaatactgtgacatatacaatgagaaggtcgccaaaatttctgaagaaaatctaaaacttttaacagagcattgtggttttcacgaaactgtaccgttagaaaacttggacctgagctactgttcccaaatttaa

SEQ ID NO: 169 - DNA, 2058 bp, Saccharomyces pastorianus
atgcgccaggagatagagtttatcgatgaagtggattcaaaaaacgatgccagtattcaaattctcgatggatcatctaacgttgaagtcattgctttatcagaatcagtggaccaagatgaggttaaaaggtcagcacatggcgaatatacaataccatcctcgccagagaacaaccctcttagtctgaatgatattgagattattgaaccaaacaaatctatagaactttctgcgccgttttatcaggatattagcacaagtaaactggatgactgtgtcatggactcgtcgttaaaagttgaagatcacacaagagggaagactaaaagacttttggatgatctcataaatgacgagtggtcagccgatgtcgagtcgagtgaaaggaaacaaagcaaacatcagttcaacttgaaaaacgttgcagagaaatggggagtacagccttgcaaaaattccggatcagttgttatcggtcatgaatatagagaaatccctgctgtccaaactaataacggtgatatcgatagccaaaaatcacaggtggaagcagccaatatattatttgacttcccattgtctccagtaaactacgatagcccatcaaaagaaaagccgtcatcgactgcgaaccacacttctctaccagaccgttatgtagaagcattggcagaaggcaatcaagatggcgttctgaaggtcacacaaaatagtgtacaccaaaaagatgaaggccagttgagatatattccaaaaaagaagaaaagaaccatcgcgttatcaagaacacaaaccaaaaacgttaaatcacctgatacagtggaattgaacctatctaaattccttgatgactcagataattgcagtgttgatattctttcaacgcctacaaaaaagttgaatatactaaggacatgtagtcaaccaattataggcaattctgaccgttcgcaagaagccaaacgctcgaaaactttagcaactgaaaacgtcaaaagcgtcaaaagcactgccagagaaatttctcagctggaaaattatataacttatggccagtattactccagagaagaatcaagaagcaaaatacgacatctattaacggagaataagaacgcgtttaaacaggtcaatcagatatatcgtgataatgtaaaagcgcgctctcaaataattatagagctttcaccgaacctttttcagttgtttcaaaagattgagagtaatctgcaacaacaagtggcaccggcgattatccaaccgagttatgacgattctatacctctcataaggtttcttcggaagtgcgacagtatttacgactttagtaacgacttctactacccttgtgatcctaaaattgtagaagaaaatgtttctattctatattacgatgcgcaggaattttttgaacaatatacatcacagaagaaggaattgtataggaagatacgttttttttcaaagaatggaaaacatgtgatacttgtattaagtgatttgaataaactcaagagggccattttccaattagaagataaaagatataaagctagggtagaacaacgattatcaggaaccgaagaagcactaaggcctaaaagcaaaaaatcaaatcaggttggagaactagggataaagaaattcgatttagaacaacggcttcgcttcattgatagagaatggaatgttaaaattcatactgcgaactcacacatggagtttattaattccttaccgaatttggtttcattggttggtaaacaacgtatggaccccgcaattagatatatgaaatacgcccatttgaacgtcaaatccgcgcaggatggtagagacacgttgagaaaaaccttccatcaaattgggaggatgcctgagttgaaagccaataatgctgtgggtttgtatcccagtttccaatcactattcgaagatatgcaaaaggggcgattacagtctgataatgaaggaaagtatttgatgactgaagcgatagagagaagactctacaaattgtttactagtactgaccccaatggtgttatcgaataa

SEQ ID NO: 170 - DNA, 2256 bp, Saccharomyces pastorianus
atggttgacttttctttgaagaaggccagaaacaattggaaaaatgcaaaaaaatctgcaaattctcctgcaaagcaaaaggcacctccatcgcctgccaagcccaagcaaaaaacgaaaaaaaatccatacagtgatctcaaggatcctgccaccagctatacgttgccaaccattgatgctagggagagaaacagggtagcaacttcaatgcaaagaaggctatcaattcataatacaaactatgctccaccaactctagattactcaatgcccttgcctgatatgacaagtatggcaataataaatgacaacatggagggcagccataataatagcagcttgacgacagagaacgaatcactaagttccaaaggtcttcaaaatagtttaaatccgcccgttgctgatagctctatgaacgagaacgtatataacaagttacctgctagatcggcaatgagaaatactatgatggtctccaacagtaacgatcttttccaaaatagcatgtcgctaaggaaagtgttggcaaatccgcgttttaatgccaaagatttcgtacatgataaactgagtaatgcaagtgccattactatcgacaaatttacttcaaatttaaccgatttatccatacaagttcaagaagaggtaaagttaaacattaataaatcttacaacgaaatcatgactgtgaacaatgacttaaatgttgccatgttggagttgaaaagggttagagaaaatataaatgacctaaacgagactttggaccagttcacaaaaatagcagcaaagaggctccaattacaaaaccaaattaacaaggagagacaagatgatgctaataatgtggaaagtcatagcccagagttactaccacctttgaaagcaggacagaatgaaaaaaccaggaggagagatagatcaagcgttttcatattagaaaaattttgggatacagaattagatcaattattcaaaaacgtcgaaggtgctcagaaatttgtcaattccacaaagggaagacacatcttaatgaacagcgcgaattggatggaattgaatacaaccaccggtaaacctttacaaatggtacaaatttttatcttgaatgatttagttcttattgccgacaaatcaagggacaaacagaatgactttacagtaagccaatgctatcctctaaaagacgttaccgtgacacgtgaggaattttccagtaaaaggcttcttttcaaatttagcaattcgaattcgagcttatatgaatgccgggaagcggacgaatgcgctaaaatgttggatgttataaggaaggctaaggatgatttatgtgacatttttcatgttgaagaagagaattctaaacgtatcagagaatcgtttagatacttgcagtctacacaacagacacctggtagagaaaataatagaagccctaaaaagaatcaaagacgtagtatgggtggttcaatcactcctggtaggaatataacaggtgcgatggaccaatatcttttgcaaaacctgacattatcaatgcattcgagaccaagatccagagatatgagttcatctgctcataggcttagatttctggatgaaggggtagaagagattgacattgaattatctaggctcagatttgaaactgctgtagatgtgttattggatattgaatcacaattgcaagacctcgcagaaaaaatctccgacgaagaactaatgctacataacttgatatccctgaaaatagaacagagacgagaagcaattgccagcaagctttctcagagtattctgtcgtctaacgaaataatgcgcttgaaaagcggtaccgagaatatgatcaaattgggattaccagagcaagcccttgatcttttcttacaaaacagatccagcttgatccaagatttgattttacagattgggtcggtagataatcccaccaactatttgactcagctagctgttattaggttccaaactataaaaaaaacggtagaggacttccaggacattttcaaaaggctcagcggtaaaatctcttcaatcctcgtggattggtgcagtgttgaagtagacaagcacttcaaattgatagataagcaactactgaacgacgaaatgctatcgccaagttctataaagtcatccagaaaacagatagatgggctgaaggctgtagggctcgatttcgtctacaaactggacgaattcatcaagaggaacagtgataaaatccgctaa

SEQ ID NO: 171 - DNA, 990 bp, Saccharomyces pastorianus
atgagcgaagaatttcctacgccggaactcctgtgtgagttggaagacccacaaaattctgctgtattggacagtaacaaagggctaagttccaatcgtgtgttgaaagatatttttgccggtaccgttggtggtgttgcacaagttcttgttggacaaccgtttgatacaacaaaagttcgacttcaaactgcgactacaaggacaacaacactggaggtattgcgtaaactcgttaagaatgaaggtgtgtttgcattttataaaggcgccttaacgccgttattgggggtaggtatatgtgtctcagtacaatttggtgtgaacgaggccatgaaaagatttttccatacctataatgcctccaagaacgcgaatataagctcccaaaacgttgacctctcgcgttcaaatacacttccactataccagtactacatttgtgggctgacaggtggtgtagtgaattcatttttggcctcgccgattgaacagattagaatccgtctacaaacacagacatcaaatggcggagacagagaatttaaaggaccctgggactgtatcaaaaaattgaaggcccaaggtgggttgatgagagggtggtttccaacaatgataagagccgggcacgggctagggacgtatttccttgtgtacgaggcattgatggctaaagaaatcagcaccggattaacaagaaacgaaattcctccttggaaactgtgtctatttggtgcattttccggcacaatgttgtggttgacggtgtatccattggatgtcgtgaaatctatcatacaaaacgatgatttacgaaaacccaaatacaagaattccatttcctacgtagcaaagacgatctacgccaaagaaggtatcagagctttctttaaagggttcgggcccacaatggttagatccgcacctgtaaatggtgctacgtttgtcacatttgaactagtcatgaggtttctcggagaagattag

SEQ ID NO: 172 - DNA, 1089 bp, Saccharomyces pastorianus
atgattaataatcctaaagtagacagtttggcggagaaatccaaggctaccgtttctaagcatccggagcaggtggctttgccggagccagctccggcaaagcctacgcctagacagcagtacccgatcacgttcaacctgacctctaactcgccattccgtctcgttgaccgccagcattatttgcaagaccaggacctttacaagtgcgcctccagggactcgttgtcctccttgcagcagctcgcccacacggccaacggttccatcaggaagaagtacatagttgaggaccagtccccgtactggcccgaagatcccgtcgcggcaatcccctctctcaaccacacgacctgcacgaactatttgaggccaaggatgcagttcacgggctaccagatttcgggctacaaaagataccaggttacggtgaacttgaaaacggtcgactttccaacaggccgcagcacgtcgttgtcgcctcacctatccgggtttttgtcaataagaggcctcaccaaccaacacccggagattagcacgtattttgaagcttacgcagtgactcacaaagagttagccttcttgtcttctagttggaaggaagagccagtgctaaacgaatacaaggctacggaccaaaccgacttggaacactggataaatttcccctctttcagacagcttttcctaatgagtcaaaagaataccgccaacccaactgacagcaacaccgcagaaaataccggtaagaaccagcaacaacaacagttacccactacatcgagcacggatgcaaataacatctcaagaattttcagccaagagaaacagttcggcgactacctagacgagagattcatattcatgaaatggaaggaaaaatttttggtcccggacgctttgttgatggaaggcgtagacggtgcgtcttacgatgggttttactacattgtccatgatcaagtcactggtaacattcaagggttctactatcaccaagacgcggaaaaattccagcaactggagctggtaccttcaatgaaaaacaaagtcgaatccagcgattgctcttttgaatttgcttga

SEQ ID NO: 173 - DNA, 567 bp, Saccharomyces pastorianus
atgaaccctcaaatcagtaacattatcatcatgttggtcatgatgcagctttctcgtcgcttagacatggaggacccaacaatcatcatgtacattagaatcttatactgttcctccattgctatcagctggatggtctaccaaatggccagaaagagaatcgtcgccaagaacgatatgactaccatgaagtatgtcgtgcctggcaacgccatgtccggcgagggtgaaaaactagaagtcaccactgtcaaggactacgatttgaaggaaacagatagtgctatcaagtcaatctacaccgggatggccatgatggggtttatgcatttgtatttgggatacaccaacccattgttcatgcaatccatctctcccgtcaagagcgctttggaacacaacgaagtgaagatccatcttttcggtaagcctgctgctggggacttgaagagacctttcaaggctgcctctttgttcggtggtatgggtcaatctggtccaaagaccgacaagaaatctatcgaagaagctgaaagagccggtaactctggtgtcaaggccgaatga

SEQ ID NO: 174 - DNA, 738 bp, Saccharomyces pastorianus
atgccttatacgtggaagtttttaggggccaacaaacaactctccttggaaaatgccataccgcagttgaaccaattgctgaacctagaagtggagtttgatgtcaaaaccattcaagtccccgatggggctgatgatgtgtccggtggcaacgagtacattcgttctgagttgagattagacacctccaacctggatgagaacacatattctaaattcatttttttggggaacgcaaatatggaagtaccgatgttcctgggctattgcgggaccaacaaccataacaaggttgtattacagtggctgaaggccgaatacggtatcataatgtggccgatcaactttgatcagacaatgatgataaagttggcagatgctagcatagtgcacgtaacaaaggaaaatgttgagcagatcacatggtttagctcaaaattctatttcgaaccaacaacacaagacaaaaacttaaagcaatttgatatagaaatacctagagaaagttgcgagggtttggctcttggccatggcaacactatgcgcccatacagcgatgcaattgtgccttacatctataacgaaacggggatggccgtgggaaaattgcccttggcttccattatattggcgggacacacgaagataatgagagagaccattgttacttcgacacgaaccctcagaaacagagttttaacggttttactacaatcgatacaatttacgagcgagtga

SEQ ID NO: 175 - DNA, 1350 bp, Saccharomyces pastorianus
atgtttgcggataccccccaatggttgctagttttagtagctgtatacctttccataccgttaatggtttattttattattccttacttatgctatggtaccaagtccaccaagaaaagggttattatatttgtgctcggtgatgtaggccattctccgagggtttgttaccacgcgttgagcttcagtaagttaggctggcaggtcgagttatgtggttacgtagatgacaccctacctaagaatatttctaatgatccgaatattactgttcatcatatatcaaacttaaacagaaagggaggtcaaacgtcggttttgtttatggccaaaaaggtgattcttcaaattctaagcattttcaagttgctttgggaactgagaggcagtaactatattttgatacaaaacccgccaagtatacctattcttccaattgctgtattttataggctgactggttgtaagctgattatcgattggcataatttggcatattctatattgcagctcaagttcaagggaaacttttatcatccgctagtgttgatatcttatatggtagagatgatatttagcaaattagccgattataatctgactgttactgaggccatgagaaagtacctgatccaaagctttcatctgaatccaaagagatgtgctgttctatatgatcgtccaggttctcaatttcaacctttcccaagtgatatctctcgccaagaaactataacaactgaaagttttatgaaggattacattcacagcgattttgatatagaaaaaggtgataaaatcattgtaacatcgacttcgtttactcctgatgaagatattggcattttattgggtgccttgaaaatatacgaaaattcgtacgtgaaatttgattcaactttacccaggatcttatgtttcataacaggtaaagggccgttaaaagagaaatacatgaagcaagtaaaggaatatgattggaagcgctgccaaatcgagttcgtatggttatcagcagaagattatccaaagttattacaattatgtgattacggggtatctttacatacttcaagttcaggactggatctgccaatgaaaatcctggatatgtttggttcaggtcttccagttattgcattaaactacccagttcttgatgaattagtacaacataatgttaatgggttaaaatttgttgatagaagagaactacatgaatctttgatctttgccatgaaggatgctgatgtatataaaaatttaaaggagaacatcattcaagagacccaaaacagatggcaagccaactgggaaaacacaatgagacaactgaagttgatccactga

SEQ ID NO: 176 - DNA, 4179 bp, Saccharomyces pastorianus
atgactaacgaaagtgtttggacagagaaattggacaatccaaccctttcagtgttaccacatgattttttacgcccacaacaagagccttatacaaagcaggccacatattccctacaagtccctcaactcgatgtacctcatgatggtttttccaacaaatacgccgttgctttaagtgtatgggctgccttgatatatagagtaactggtgatgatgacattgttctctacattgccaacaacaagatattaagatttaacattcaaccaacattattatttactgagttgtactctactataaccgatgagttaagtcagcttgagtccattgaagcagatttctctttcgatgatttggctgaaaaaattcagcgtaatcaagatttggagagaacacctcaattattccgtttggccgttttagagaaccaagatttcaaactagatcaatttaaacaccatttagtggactttgttttgaatttagaaactagcaataatacacatgtcataaacctgatttacaacagcttgctgtattcaagtgatagggtaagcatttttgcggaccaattcacccagtacttgactgccgctttaagtaacccatccgtttgcataactaagatttctttgatcactgcatcttctaaaaactgtttgcctgacccaacaaagaacttgggctggtgcgactttgtgggctgcattcatgatattttccaagataacgccgaagctttcccagaaagaacttgtgtggtagaaactccagcattaaagtcagacaagtcgcgctcttttacttatcaagatatcaaccgcacttctaatatagtcgctcattacttaatcgagacaggcatcaaaagaggtgatgtcgtgatgatttactcttcaagaggtgtcgatctaatggtatgtgtgatgggtgtcttgaaagctggtgcaactttctctgtcattgaccctgcataccccccagctagacaaacagtttacctaggtgtagctaaaccccgtgggttgattgttattagaagtgctggccaattggaccaatttgtggaggattacatcaaggatgaactggacatcgtgtctagaattgactctattgctattcaagagaatggtgccattgaaggtgggaaatttaatgagagtggagacgttttagccgcatacgaacatttaaaggataccagatcaggtgtggtggtaggtccagactccaacccaacattgtcctttacttcaggctctgaaggtattcctaaaggtgttcttggtagacatttctccttggcttactatttcaattggatgtccaaacagttcaacttatcacaaaacgataagtttacaatgttaagtggtattgcacatgatccaatccaaagagatatgtttaccccattatttttaggtgcccaattatatgttcctacgcaagacgatataggtacaccaggtcgtttagctgaatggatgggtaagtacggatgtactgtgacccatttgacaccagccatgggccaattgcttactgctcaggcaacaactttgttccccgaattgcatcacgcattttttgtcggtgacattttgacaaaacgtgattgtttgaggttacaaaccttggctgaaaattgtcgtattgttaatatgtatggtacaactgaaacgcagcgagctgtttcgtactttgaagtcaaatcaagaaatgatgatccaaactttttgaagaaattgaaagatgttatgccagcgggaaaaggtatgttaaatgtccaattattagttgtcaataggaacgatcgtactcaaatatgtggtattggtgaaattggtgaaatttatgttcgtgctggtggtctagctgaaggctatagaggtttgccagacttgaataaagaaaaatttgtggacaactggtttgttgagaaaaaccactggaacttcctagataagaatagtggtgaaccttggagacaattctggttgggcccaagagacagattatacagaaccggtgacttgggtcgttatttaccaaacggtgactgtgaatgttgcggcagagctgatgatcaagttaaaattcgtggatttagaattgaactaggagaaatagatacacatatctctcaacatcccttagtgagagaaaatattactttggttcgcaaaaatgcagataatgaaccaactttgattacatttatggtcccaagattcgataaaccagaagagctatctaaatttcaaagcgatattccaagccaagttgcatctgacccaatagttaaaggcttagttggttatcatctgttggccaaggatatcaagactttcttaaagaaaagacttgccagttacgctatgccttccctaattgttgtcttggatagtttaccattgaatccaaatggtaaagtggacaagcccaaacttcagttcccaacccctaaacaactaaattcggttgcagagaacactgtttctgaaattgatgactctgaatttaccgatgtagaacgtaaaattagagacttatggttggagatattacctaccaagccagcttctgtatcgcccgatgattcctttttcgacttgggtggccattctatcttggctactaagatgattttcaccttgaagaaaaagttgcagattgatttaccattggggacaatttttaaatatccaactataagggcttttgctgcagaaattagtagaatcaaaacatctgatgggtcatctcaagaagaaccaaaggcaaccgctactgcagattattcggaagatgctaaaaaattagttgaaactctaccaagctcttatccatcacgtgaaccttttattgaacctaataatgctgagggtaaaaccactattaatgtgttcgtaactggtgtaactggcttcttaggttcttatatcctagcagatttgctgaaccgttctttaaagagttataacttcagagtcttagctcatgtgagggctaaagatgagaagtcagcattcgaaagattacacaaagcaggtgtcacatacggaacctggaatgacaaattttcctccagtattgaaattgtgttaggtgatttatcaaaaaaacaattcggactttccgatgagaaatggacagatttggcaaacacagttgatgtaatcattcataatggtgctttagttcactgggtttatccatacgccaaactaagggacgctaatgtcatttccacgattaatgtgatgagtttagcggccgtcgggaagccaaagttttttgatttcgtttcttccacttccacgcttgatactgagtatttctacaagctttctgataaacttgtcagtcaaggaaaatctggtattttagaatcggatgatttgatggaatctgcaagtgggctcggtggtggatatggccaatctaaatgggctgcggaatacctcattagacgcgcaggtgaaagagggctacgtgggtgtattgtcagaccaggttacgtaacaggtgcatctacaaacggttcctcaaacacagatgatttcttattgagatttttgaaaggctcagttcaactgggcaagattccaaatatcagcaacaccgtaaatatggttccagtagatcatgtggcccgtgttgtcgttgccacttctttgaacccaccaaaggatagtgagttaactgtggcacaagtcacaggtcatccaagaatcttgttcaaagattacttatatactctgcacgattatggttatgatgttgatgttgaagactattctgactggaaaaagtcgttggaagcatctgttattgacagaaatgaagataatgcattgtatcctttgttacacatggtcttagacaaccttcctcaaagcaccaaggctccagaattggacgatagaaacgctgtggtatccttgaagaaagacatagcatgggcaggtgctgattggtctgatggaatgggaattacatcggaaaatgttggtatttacattgcatttttaaacgtagttggatttttacctccaccaactcacaacgacaaaatcccattaccaagtatagaactaactcaagcacaaatcagcctggtcgcttcaggggctggtgcacgtggaagttctgcagccgcttaa

SEQ ID NO: 177 - DNA, 2046 bp, Saccharomyces pastorianus
atggcacaattctccgatattgataaacttgctgtttccactttaagactactttccgtagaccaagtggagagcgcacaatccggtcatccaggtgcacctctggggttggcgcctgtggcccatgtaattttcaagcaacttcgttgtaaccctgacaaccagcactggatcaatagggacaggtttgtcctatcgaacggtcattcatgtgctcttctgtactctatgctgcacctcttaggatacgactacaccattgaagacttgaggaaattcagagaggtgaattcgaagactccaggacatcctgagtttcattcgcctggagtggaagtttcctctggacctttgggtcaaggtgtttctaacgctgttggtatggctattgcacaggctaacttcgcggctacctacaacgagcaaggcttccccatatccgattcgtatacgtttgcgattgtgggagacggttgcttacaggaaggtgttgcttcagaaacttcttccttagccggtcatttgaaactgggtaatctgattacgttttacgataacaatagcattaccattgacggtaagatttcttactctttcgacgaagacgttttgaaaagatacgaggcttatggttgggaggtcatggaagtcgacaagggtgatgacgacatggagtccatttccagcgctctggaaaaggcgaagctatctaaggataagcctactataatcaaagtcaccactacgattggatatgggtctttgcaacagggttccgaaagtgtccacggatctgccttgaaaccagatgatgttaaacaattgaagcaaaggtgggggttcgacccaagcaaatcgtttgtggtgccccaggaagtgtacgactactacaaaaagactatagtagagcctggtcaaaaactcaatgaagaatgggacaagatgtttgaagaatacaaaaccaaattccccgaaaagggtaaggaactgcaaaggagattggatggcgagttgccgcaaggttgggagaagcacttgcccagctttaccccgaatgatgaagccttggctacaagaaaggcatcccaacaggtattgactgacctagttcaagtgctacctgagctgattggtggttctgctgatttaacaccttcgaacctaacgagatgggaaggtgcggtagacttccagcctccaattacccaacttggtaattacgctgggaggtacataagatacggtgttagagagcacggtatgggcgccataatgaacggtatttccgcctttggtgctaactacaagccatacggtggcactttcttaaactttgtctcttatgctgccggtgccgttagattagccgccctgtctggtaatcctgttatttgggtggcaacgcatgattctattgggctgggtgaagacggtcccacccatcaacccattgaaaccctagcccacttgagagctattcccaacatgcatgtttggagaccagctgatggtaacgaaacttccgccgcatactattccgccatcaaatcgaagcgcacaccatctgtagtggccttgtcaagacaaactctcccccaattagaacattcctcttttgaaaaggctttgaagggtggttatgtggtccatgacattgaaaatccggatatcattctagcgtcaactggttcagaggtctccatctctatagacgcggctaagcaattatatgagactaaaaagattaaggcaagagttgtctccatgcctgacttttacacgtttgatagacagagcgaagaatatagattctctatcttgccagatggcgttccaattatgtcctttgaagtgctagccaccgcaagttgggggaagtatgcccatcaatccttcggtcttgatgagtttggccgttcgggtaaggggcctgatatctacaaactttttgattttacagcaactggtgttgcaaccagagctgaaaagacaatcaactactacaaaggaaaacaactactctcacccatgggtagagctttttaa

SEQ ID NO: 178 - DNA, 489 bp, Saccharomyces pastorianus
atgtcttcctctcaggcagtcagagattcggccaagaaattagttaatttactagagaaatatccaaaggatcgtatacctcatttagtcacattcaaggaggtacaggtatcgaggtttagacgtgtagcaggtctaccaagtgtggacgataagggaaaatctgtgaaagataagaagccgtcgctagatgaaataaaaagcattatcaatagaacttcggggccgctggggcttaataaagagacgttagccaggattcaaaatagcgtatccaatgaaaaatttacggaggaaagtatcaatcagcaaatccatgctctaagcactataatgagcaataagttcagaaactattataatgttggcgataaactctacaaacctgcgggcaatccccgttattatcagcggttgatagatgaaattgaaggtaagaaaaatgaaaatatttttactgcgatgagaactgtattatttggtaaatag

SEQ ID NO: 179 - DNA, 2004 bp, Saccharomyces pastorianus
atgagtgtggaagatattaaaaaggctagagccgctgttccattcagcagagaacagctcgaaagtattttgagagggagattcttttatgccccagcttttgacttgtacggtggtgtttccggtttgtacgactatggtccacctggttgtgctttccaaaacaatatcattgatgcgtggagaaagcactttatcctagaagaggacatgttagaagttgactgtactatgttgaccccatatgaagtgttgaagacatctggtcatgttgataagttttctgactggatgtgtagagatttaaagaccggtgaaatcttcagagctgaccatttggtggaagaggttttggaagcccgtttaaaaggtgatcaggaagctagaggcgtagtcgaagaccccaatgccgctgccaaggatgacgctgaaaagaagaaaagaaagaagaaggttaagcaaatcaaggctgttaaattagatgatgacgttgtcaaagaatacgaagaaactttggccaagattgacggttactctggtccagaattaggcgatttgatggaaaaatacgatattggtaacccagtcactggtgagactttagaaccaccaaaagctttcaacttgatgtttgaaactgctatcggcccatctgggcaattgaagggttacttgagaccagaaactgcccaaggtcaatttttgaatttcaacaaattgttagaatttaacaatagtaagactccttttgcatctgcttctatcggtaaatcattcagaaatgaaatttctccaagagctggtctattgagagtccgtgaatttttgatggctgaaatcgaacatttcgttgatccattggataaatcccatccaaaattcaatgaaatcaaagacattaagctttcctttttaccccgtgacgtccaagaagctggttctactgaaccaattgtaaagacaattggtgaagccgttgcttcaaggatggttgataatgaaactttgggttactttattgctagaatttaccaattcttaatgaaaattggtgttgacgactccaaattaagattccgtcaacatatgggcaatgaaatggcacattatgctgccgactgttgggatggtgaactgaaaacctcctacggctggattgaatgtgttggttgcgccgacagatctgcctatgatttgaccgttcactccaaaaagaccaaagaaaaaatggtcgttagacaaaaattagaaaacccaattgaagtcacaaaatgggagatcgatttgacaaaaaaactatttggtccaaaattcagaaaagatgcaccaaaggttgaatcacacttattgaatatgtcgcaagatgatctagccgccaaagctgcatctttaaaggccgatggtaagtttactgtaaaagtcgacggcgttgatggcgaagtcgagttggatgacaaattggttaagattgaacagagaacaaaggttgaacacgtcagagaatacgttccaagtgttattgagccatctttcggtattggccgtattatttactccgtttttgaacattctttctggaacagacctgaagacaatgccagaggtgtcctttctttcccacctttagttgcccctacaaaggtcttgctggttcccctatccaatcataaagatttagttcctgttaccaccgaagtttccaagattttgagaaaatctcaaattcctttcaagattgatgactctggtgtttccattggtaaaagatatgcccgtaacgatgaattaggtaccccattcggtgtcaccattgacttcgaatcagctaaggatcgttccgtcactttgagagaaagagattctaccaagcaagttagaggttctgttgaagatgtgattgaagccatccgtaatatcacttacaatggtatatcttgggaagaaggtaccaagaaattggctccttttgtatctcaagcagaacctgaaactgaaactgagtaa

SEQ ID NO: 180 - DNA, 1554 bp, Saccharomyces pastorianus
atggttttgtctgataaagagttgtttgacataaacaagagagctgtggagcaaggcttcaaagtgaaacctagattgaactataatacggtcagtggtgtgaacggtccattggtcattttggaaaaagtcaagttcccacgttacaatgaaattgtgaacttgacgttgcccgatgggaccgtcagacaaggtcaagtcctagaaatcagaggtgatagagccattgtgcaagttttcgaagggacttctggtattgatgtcaagaagactactgtggaattcaccggtgaaagtttgagaattcctgtgtctgaagacatgttgggtagaatctttgatgggtctggtagacccattgataatggtcctaaagtgtttgccgaggactatttggacattaacggttcccctatcaacccttatgcccgtatttacccagaagaaatgatttctactggtgtttctgccatcgataccatgaactctattgccagaggtcaaaagattccgattttctctgcatctggtttaccacataacgaaattgctgcgcaaatttgtagacaagctggcttggtgagacccaccaaggacgttcatgatggtcatgaagagaatttctccattgtgtttgctgctatgggtgtgaatttggaaaccgccagatttttcaaacaagatttcgaagaaaatggatctttggaaagaacttcgctgtttttgaatttggccaatgaccctaccatcgaaagaatcatcaccccaagattggccttgaccacggcagagtacttggcttaccaaacggaacgtcatgttttgaccatcctgactgatatgtcgtcgtacgcagacgcgcttagagaggtttccgctgctagagaggaagttccaggtagaagaggttatccaggttacatgtatacagatttgtccacgatttacgaaagagctggtagagtagagggccgtaacgggtccatcacccaaatacctatcttgacgatgcccaacgatgatatcacccatcctatcccggatttgacagggtacattactgaaggccaaatttttgttgatcgtcaactacacaacaagggtatctacccacctatcaacgtcttgccctcattgagtagattaatgaagtccgccatcggtgaaggtatgaccagaaaggatcacggtgacgtgtccaaccaattgtacgccaagtacgctatcggtaaggacgctgccgccatgaaggccgtcgtcggtgaggaagccctttccatcgaagacaaattgtccttggagttcttggaaaagttcgaaaaaactttcatctcgcaaagcgcctacgaggacagaactgttttcgaaagtttggaccaggcatggagtttgctaagaatctaccctaaggagatgttgaatagaatctcccccaagattctcgacgagttttacgatagagccagagacgaagcggacgaagacgaagaagacgcggacgcaagaagctccggtaagaagaaggacgccaacaaaggggaatctctgatctaa

SEQ ID NO: 181 - DNA, 1035 bp, Saccharomyces pastorianus
atgcattgtccgatttgtcatcatagagcgcatgtggtttattgtgcacattgtatcaatacgagccccagtttgctactaaggttaaaattggacttagtttccataaaggatagtaataaggtgctaagtgggaaagtcgaacatatactaaacgaggccatggactatggtcagttgggtactagaacgtcagaaaagaaaaaggatcctctggcgaatagtctcctgaagttggatattttacgaatgaaaaaaaataacaatcggatcaggcataagatcgaacagctaaatgagcgaatccatagtaagagagatcgcatcaacaaattgaaggtggaaatagacagtcacgggcacgccaaggctgaggttcgtgatgataaattgagagaacaagtggaaatcaatgatgctaagagcaagttgaaacagatttccaagatttgtgagtcgaccagagactacaaactgaatctgctaaacgactggtttgtgatccagaaactacaagacaattttcaaataccatttgctattgcgttccaaccgttgatatcattgaaaaactttcagattctacctcttgtggtaacgaatgattccattgataccatgtggaagtacgtcagttttctctccgatattcttttgatcaagctcccctattccaacgataatgaagcacaccccatgctggactcctctgataatatacggacggtagtgcaaagattgatcaggttgataataaatattttacaagtatgtagaaatttgaaactcgtgccctcgacacccatggatataccatggatcctagaccagtacgatgtggatgggctgttctacaacatggtgaagcgaaacaagatgaaatgtaggtccgtttcgctatattggacgtttggaatgctgtattccatggtcctggataacttaaacaggccggaaagaggatatcctacaagacgcaccgcaccggcgccggccctcacgggaccccacgaccgatggtacgtggtaggctaa

SEQ ID NO: 182 - DNA, 1788 bp, Saccharomyces pastorianus
atggccaaagaaggaatgtccgtcgattatgaaaacgacgatgattattttgaatgtagtaagaacaggttcaagacagcgattacgcgaatagacagcgcccagcctagtgaagggtggttggaccctgctcagtcactgaatcatgtaagcacgatacatgaagaaggagacgtacacgtgcatgaggatggaggaacctctactgatgaagattcgaggactcacttgctgttttcgacagaaactcgacgcaagttagagaatagacatgttcaatttattgctatttctggtgtcattggtacggcgctatttgtagccatcgggaaagctttataccgtggaggtcctgcctctttattactggcgtttgctctctggtgtgttcctatactttgcattacagtgtccacggcagaaatggtctgcttctttcctgtgagttctccctttttgaggctggctacgaaatgcggggacgaatcgttggctgtcatggctagttggaatttttggtttctagagtgcgtacagattccatttgaaattgtttctgttaatacgattatacattattggagagacgactattctgctggtatccctcttgccgttcaagtcgtattatacttacttatttctatatgtgcggtcaaatattacggtgaaatggaattttggttagcttcattcaaaatcattctcgctcttggtttatttgtgtttacgtttgttactatgttgggtggtaatcctaaacatgatcgttatgggttccgttattatggtgaaaatccatttaaacaatatttccccgatggtaaagatgtggggaaatcatcgggttatttccaagggtttttggcttgtttgatacaagcatcgtttaccatagcaggtggtgagtatatttccatgttagctggagaagttaaacgaccaagaaaggttttaccaaaggcattcaaacaagtgttcgtgagactaacttttctatttttgggcagttgtctttgcgttggtattgtttgttcaccaaatgatcccgatttaacggcagcaatcaatgaagcaagacctggtgctggttcttcaccttatgtcattgcgatgaataacatgagaattagaattttacctgatattgtcaatattgcgttgataacagcagcattttctgccggtaacgcttacacttactgttcatctagaacgttctacggtatggcattagacggttatgcaccaaagatttttactagatgtaacaagcatggtgtacccatttacgctgtcggtatatctttaatatgggctctagtgagtcttttacaactgaactctaatagtgctgttgtgttgaactggttgattaatttgattaccgcatctcagttaattaattttgtggtgctttgtatcatttacttatttttcagaagaacatacaacatccaacaagattcattgcccaaattgccttttcgttcatggggtcaaccgtacactgctatcattggactggtttcatgcttggcaatgattatgattcagggctataccgtcttctttcctaaattgtggaactcgcaagattttttgttttcatatctaatggtgttcattgatattggtatttatgtgggttataaatttatttggaagcgtggtaaagataaaatcaaggatccctataagattgatttttccaaagagttgatcgaaattgaaaaccatgaaattcaatattttttcgaaaaatttcagtattatactaaagcataa

SEQ ID NO: 183 - DNA, 2493 bp, Saccharomyces pastorianus
atgcatagcaacgtttttgtcggtgtcaaaccagggtttaatcacaaacagcacaataaaggctcacgttttctgggaaacgtaaccagccacacgtcagaagagcctagcaactacgattatgtgttacttcccataacaacgggtaggtacaaggagattgttgggcaggtttttaaagagttccaaaaacagtccaaacagcattggcagccgctccgggtccccgagccccagttgcaggatatctgtatccctcctttcaacgtcaacaagctggatgacgacgacacgccttcctacattggcctgctatcatcttggttggaattggagagtcccgatctagctgtaagagatcttggcctgaaggtccttctgaacgaatgtaaatacgcaaggtttgtcgggatcagaaagctgatattggcacctccgcgcgatctgtccaatctgcaactgtatggacagatgatttatagacttttacagaatcgcattatcttcaccgcgcctgcattgaccatatccatctctttgccgctttacgaggacagcgacccgctggccacttgggaattgtggaatactgtccggaagttgtgcgaataccattcatcattaactgtgtctttggctttgccgagaaccaagacaccttcctttgtgttaaacagatggctcgccgagcccgtttcgtgtcttttggtctcttcgtctattttcgccagtaatcagtatgactatcccgttttgcacaagttcaatcagaacttgattctaaaattccaaaaaattaatggagactcgcaaatcttgggaaatgaactatgcgtgatattacacgggatggagaaatatgccaacgatgtcaagggcggtgaatccgcttatttggagtatgtaaactttttattgaaaaagggcgacaaggccttgaacttcaagggtaaccgtcaactgatgctgcaggaagagtctaggataatgccgcctttgaaaccgcattcagacactctgttgaattccacgtatttgacttttgaaaaagacttggtgaaatacgacctttacgaatctgccatattagaagcgctccaagacctttcatcacgagcgacctttaagaggccattggtcgtcttggtggctggtgctggaagagggcctttggtggatcgaacttttaagaccttatcgatgctatccttggaaaacagggtttcaataattgccattgaaaaaaacccacaggcctatttatatttgcaaaagagaaatttcgattactgggataacaaggtggaattgatcaaggaagacatgaccaaatggcaaactaatgaaccgccggaaagacgtgtccaggtagacctgtgcataagtgaactattgggttcattcggttgtaatgaactatcacccgaatgtctttggtccattgagaaatatcattcccgtaatgatactgtctttataccaagatcatactcttcctatatagctcctgtttcgtcgccattgttctaccagaaactctcaaaagtgaatcggtccttggagtcgccttgggtagtccatagagttccatactgcatactttcgtctaagataaatgaagtttggcgattcgagcaccccatgttcgaaaaggatgttgaccaagtggaggatggcgatgacactgttcggttctctcaaagttcattgagcgagttcaaaatgaagcatcgcggtgaaattcatgggtttatcggattcttcacggtaaccctatataatgatatattcttgtcaactttgcccgatgacagtaccgttcgtttaaaatccaatgaagaaagttccaagtgtgccaggcaagatgaagatttacaactaattaaaaggtgtgatcatacgcccaatatgacctcgtggtctccaataattttccctctaaaacaacctttatcatttgtagacgattctgaactttctgtgttgatgtcacgaattcattcggatacagaacagaaagtttggtatgagtggtctttggaaagtttcatatacctcatgctatcaaattacggttcggcaactgcagcgacaaacatgaccaatcccagatccatagtgacagaaggtactaaaacgtcaaaccataaccgccatttttctgtaacgacgaatcaaaacctggataaccaaatcgatctcgatcaagacgtcgaaaacgaagaagaacaaggatttttgtccaacctggaaactggttggcaaagtgtgcaagatatacacggactcagcgagaccactaggccagatcagctaaactctaccaatagacccatgtttgatctaaaatccagccgcgtgctcgattccactagtggatcaccaagacatgaggatctagaagaggatgctcccgaggtccatgtcagagtcaagaccggtgtttccactctacataatgtttgcggtagggccttttccttaccgttgtaa

SEQ ID NO: 184 - DNA, 426 bp, Saccharomyces pastorianus
atgtaccatcactatcacactttccagggcagaaagctcactgaccaggaaagagctcgcgtgctggagttccaggactccatccactactccccgcggtactcggacgataattatgaatacaggcacgtgatgttgcccaaggccatgctcaaggtcactccatcggactattttaactcggaggtggggaccctgcgcatactgacggaggacgaatggaggggcctgggcataacccagtctttgggttgggagcactacgagtgccatgcgccagaaccgcacattttgctgttcaaaagaccgctgaactacgaggcggagctcagggcagctactgctgctgctcagcagcagcaacagcagcagcagcaagcacaatctatatcgaatgacatgcaggtttcttcacaaatctcctag

SEQ ID NO: 185 - DNA, 540 bp, Saccharomyces pastorianus
atggtcgttttagacagaaagctattagaaaggttaacttctcgtaaggttccattgcaagagctagaagatatggaaaaacgatgctttttagccacattctcacatcaagatgcctttgatttaggaagttatgtaagaaacgcagttaaagagaactttccagaaaagccagttgctattgatatctctctgccaaatggacattgcttatttcgtacagtaacatacggtgggagtgcattggataatgatttttggattcaaagaaagaaaaagacagcaattagattcggacattccagtttctacatgggttgcaagaaaggggataaaacacctgaagaaaaattctttgtagattcaaaggaatacgcctttcacgggggtgctgtcttgatacagtcagaaaaaagtgactacccctacgcctgcttaactattagcggattgaagcaagaagaagaccacctaatggcggttacctctctagttgctttcgccaatgaaagtttagaagaagatctaaatctggactaa

SEQ ID NO: 186 - DNA, 9321 bp, Saccharomyces pastorianus
  modified_base (1462)..(1513): a, c, g, t, unknown, or other
atgagtcaaagtgatccgaaaaataaaccatctcccatggaatgttccctaacgaaacatctttatttcgataggcttttacacattctccctattgaatctaaattgaagacatatgcagatgtggaggcagatcaggttttcaattcgtgtaggtccattattctaaatatagctataacgaaagatttgaatcctatcattaataacacacttaaagtgatcgacgtgattgttcaagatgaagagatcacctctgataacattaccgatgatattgcacactccgtattggttcttttaagactactaagtgatgtttttgagtattactgggaccagaacaacgactttaagaagatcagaaacgataactataaaccaggcttttctagccataggccgaacttccatacgtctagaccaaagcatgcaatgattgatccgactttagccatagcgttattatgccaagtttctaaactgaaattcaatacgagaaccctaaaagtcttgcagaatatgtctcatcatctttatggtaatgccaccattcaaagttctagcattttgcccagttcacaagattttttggaaaagaggaattatccagcatataccgataaaatagatttaacaatagattatattcagaggtttatatctgcttccaaccatgcagagtacactaactgtgtcaagacaaaagttgtagcacctttattaatatcacacacacttactgaattaggcgtcgtacagcacttggatctgtttggttgcacatacttgaccaacaaaaatttgttggcgtacttagatattttgcagcatctatcaagttatatgaaaagaaccatatttcactccctgttgttatattatgcctccaaagctttcctattttggataatggctaggccgaaagaatatgttaaaatctacactaatttagtgtcatccaatgacaataacgcaacatcttcagactcaggtactgagcattctggcttgaatacttccgataaaacatctatatcccaattagtttcacttttgtttgataacgtttactctacttttaatgtatcgtcattattaaccaacgtctacaatgatcatcaccaccatatccatcactcttcctcttcatcaaaaactaatagtaacaacactaacagtccaaactctgtatcaaaatcatcaacaaagcaatcgagtacgaacgtatctggtaatgtttctccgattccgtcatgcacacaaggaaatgatacctcacctacttctcccatggcaacactaagttcacccttgaatcagaatatcatggggtacccattgtctccaatagcctcagcattagtggacccaagcatcaacacatcgactacaactgcggtattaaatagaagtactgataccaccacagcaaacaatagtaataataataacaataacnnnnnnnnnnnnnnnnnnnnnnnnnnnnnnnnnnnnnnnnnnnnnnnnnnnntcaataatattccacaccacattttttccttagatgatatttcatcgttcaattcaagtagaaaatcgcttaatctcgacgacaacaactcctcttttctttgggataattcacaaaagttaaatgcattaatgggaaatacgaatgtacatccagctgtgaataatccacagtcttcgaacgcacattgttctttaaactatatggaaaatatcatggaattatattcaaattatacgggatcggaattgtcttctcatactgcagtattaaggtttctgattgtcctgactttattggacagtgaagtgtacgatgagatgaattcaaactcatatagaaaaatatcggaaccaattttaaatgctaattctaaggattccagtagttcaggctggggctcagcatcgaaaaatccaagtattaagcatcttactcatggtttaaagaaacttactttacaacaaggtaaaaaacgtaatgtcaagtttttgacatatttaatgaaaaatttgaatggcggacaattcgtttcagatgtatcgctaattgattctatcagatctgttttattcttgatgacaatgacttcttctatatcccaaattgactcaaatattagttccgtcgttttttcgaagaggctatttaacctgttgggtcaaaacttagaggttggttcaaattggaattctgcaacatcgaacactttcattacccactgtaccgaaaggaatcctgttattcataggcgtttacaattggagttttttgcaagtggtctacaattagatcctgatttatttttgagacatttacaattggaaaaggaactagctcatatagacctacctaaaatatcgttatacaccgaagggttcagggtgttttttcacctagtaagtaccaaaaaattacatgaagatattgcagaaaagacttctgctcctctgaaaaggttgttttgcatcatcgcggatattttgttgaaggcaaccccttattttgatgacaatgtgactagaattatcggttcaatcttagatggacatattttagatcaattcgatgctgctagaacacttaccaaggacgaccgtgtcagttatgatacttctgccagcattcagactgaaccatccaacattaatcatgatttgtcagatgtttcattggtctcttccctttcacaatcaccactatctttcaactcaggcactaatattgctaacgcacgatcctgggaaattcaatcaattttgccaactttatcaaacagatcaagcgcttctgatttaagtttgcctaatgttttgacaaattctttggaagctcaacaaagcaataatgcagttccgttatctcagaggctatctggagtgtctaccagtaagagatacgcttcgccaaacgattcagaaagatcacgacaaagtccatattcttctcccccgcaattacaacaaggtgatttgccttctcctctctcgattctttctactggagctggatttgcttcaagtcattcaatggcaacaactcccacgattttgaaaaacattaaatctccaaaacctaacaggtcaaagaaaattgcagatgataaacaattaaaacaacctatgcatactaaaatagtgcttagtgataatgatgaagcacgaagaattatgatgaatatttttagcatttttaaaagaatgacaaattggtttattcgtccaaatgctaacgctgaatttccaaagacctttacagacattataaagccactatttgtggctatactagattcaaatcaaagactacaagttactgcacaagcctttattgaaattccgttaagttatatagccgctttcgaagatatcgataatgagcttgacccaaaagtgttaaatgaccactacttgttatgtacatacgctataaccttattcgcatcctcgctatttgatctgaagctagaaaatggcaaaagagaaatgttactaggcattattgtcaaatttcaacaagttcgttcgtatctatcaaatttagcacaaaaacacaatttggtccaggcagttattacgacggaaagattaacgttgcccttactagttggtgctattggaagcggaatctttatttcactatattgtagtcgtggaaatacaccgcgtttattgaaggtatcgtgttgtgaatttttacactccctgagattttatcaaaaagttgtagggccattagacgagtactccatttacaatattgattttatagattctatggcccaagacaattttactgcctcagggtcagtcgctttccaacgtcgtttaaggaataacattttgacttacattaaaggatctgattcgatccttctggacgcgatggacgtaatttataagaaatggttttacttcagttgttcaaaagctcttacgcaggaagaattggttgatttcagaagccttgcaggcattttggcatcgatgtcaggcattctttctgacatgcgagagtttgagaaaaataaaaatgccacgactaataatgaaaccagatcatcatttgacttgcgaaatcctgtttatgatatacacaacgaacttaaatttgaacttaccaaaaaaatgaattactttgtttcaaaacaatgccaatggttgaataattcaaatttgttaacgagagaaaattcaagagatattttgagcactgaattgcatccgctttcttttgacttattatttgataatttgagagtaaagataaatgaattaacatcagttgatctttcgaagccttatgaggattcatctttcgtcttattagaacaaatcataatcataataagaacgatattaaagagggacgacgacgaaaaaacaatgctgctctttctcaacgacttacttgatgccgttactaaactaactgaaatagttgaaaaaatctcggtgctgtcatcaaagtattataaggggattattcaaatgtctaaaatgtttagagcatttgagcactctgaatcaaacttgggtatctcaaaccatttccacttgaagaatgagtggctgaaatcagttattggttggttcaaattgtccatcaacaaagactatgattttgagaatttgtcgaaaccactaagagagatggatctacaaaagagggatgaggattttctttatatcgacacctctatagaatccgcaaaagcattggcatatctgacacgtaacgttccgctagaagttccgccctcgagttcaaaagaagactggaatagatcctccacaatattatttggtaaccatttcactatactgttaaaaggtttagaaaaaagtgcagacctgaaccagtttccggtttcattgaggcataagataagtatacttaacgaaaatgtaatcattgctctaacaaacttatctaatgctaacgtcgatgtctccttaaagtttactttaccaatgggttattctacaaataaggatatcagaattgcttttttgagagttttcattgatattgtgtcaaattatccagttaaccccgagaagcatgaaatggacaagacactggcggtggacgatacgctgagatatgtgattaagaatccaatactcgcgttttttggcagtttagcttgtccacccgccgatgtagatctatacgctggggggttcttgaatgcttttgagacgcgaaatgcatcacatatcctcgtcaccgaacttcttagccaagaaattaaacgggccgcaaagtcagatgatatactgagaagaaacagttgtgcaaccagagtgttatcgctttatgccaggtctagaggtaacaagtatttgataaaaactttaagacctgtcctgcaagaaatagtcgaccataaggagtcgtttgaaattgaaaagatgaaagctgaatccaaaaactctgaggatatgttagatttgttcgaaaaaagtatgacaaaattaattgatgcaatcacaaattctatcggagatttcccgatagagttaatcgatgtctgtaaaactatttatgatgttacaagtgtcaatttccctgactacgcgtacattgcggtaggatcttttgtatttttgagatttatcgggcccgctttggtaagccctgattcagaaaatatcattattgtcacgcatgcccatgacaggaagccatttatcacattagctaaagttatccaaagtctagccaatggtagagaaaatatgtttaaaagtgatattttagcttcaaaagaggaatttttaaaggtctgtagtgataagatattcggattcttgtcaaaattatgcaagatacctactgataactttaccgttaatgtgagaaaagatcccacgccgataagttttgactattcttttctgcacaagttcctttatcttaacgatctcagcattcgaaaagaaatcatcaaagaatcaaatttacctggtgagttcaacttcttaaaggaaaccgctatattcaacaatagaatacttggagtaatgggccagccacagatggaaatcaaaaatgaaattccccctttcgtcgtcgaaaatcgagagaaataccccttattatatgaatttatgagtcggtatgcttttaaaaaagtggatttaaatgaagaagaagacgatgcaccatttgtgcatgaatcgatgacattggatggtatgcaaattatagttgtaacattcacaaattcccagtacaataatgtcgtgatggatttgctggtttataaagtattgcaaatatatgcgagaatgtggtcaacaaagcactatgtcattatcgattgtacgacgttttatagtggacaagctaattttcaaaagctaactacattattttttagtctaataccagaacaagcatcaaataactgtatgggatgctattatttcaatgtcaataaagtatttatggaccagtggaccgcatcgtatacggtagaaaacccctatttaatgggtgatattccccattgtttcatcaatagtagtagcgatcaaaatctgataaaatcattaggattgagtggaaaaagtactgaagttttaaaggatgtacgagttactttgcatgaaattactctttacgataaggaaaagaagaaattttgccctgtttcgttaaaaataggaaacaagtacttccaagtcctccacgaaattcctcagttgtacaaagctatggaccattcgttaagcgttaaatttaacaatgtttataagatatcagatttactttcagttgatgtctctagtactactggtgtttcttcagaatttactttaactttcgacaatgaagagaaattagtcttctgtagccccaagttcctagaaattgtgaaaatgttttactatgcccaattgaagatggaagaagaatttggcacagacttttcaaatgacgtatcactttcattgtcttcttctgcagttaacacttctgaccctaatgtgaaagaagtcggtgaaattatatcacatttatcactggtaatccttgtaggtctattcaacgaggacgatctcgtcaagaatatatcttacaatcttcttgtggcaacacaagaagcattcggcttggattttgggactagacttcacaaatccccagaaatatatgtgccagacgataccactacgttcttggctctaatattcaaagccttttcggaatcatcgaccgagttaactccatatatatggaagtatatgctggaaggtcttgaaaataatgtaattcctcaagaacatataccaacggttgtttcttcgctatcatattgggtgccaaacttatatgaacatgtatatttggcaaatgacgaagaaggtccagagacaatctcacgtataatttacagtttgatcagattgacggtaaaagagccaaattttacgacagcttaccttcagcaaatctggtttttactggctttggatggtcgtctcacaaatatcattgttgaagaaatagtaagccatgcgctggatagagattctgaaaacagggactggatgaaagccgtctcgatactaaccagttttccaacaacagagatagcttgccaagtgatagagaaattaatcgatatgatcaagtctttcttaccctctcttgtggtggaggcttcctcgcatagttggtcggagcttactattttatcgaaaatcagcgtttcgatatttttcgagtcaccgttactttcgcagatgtatttgccggaaattctttttgtcgtgtctttgttaatcgatgttggtcccactgaaatacgagtttcgttgtatgagctattgatgaatgtttgccactctttaaccaataatgaatcgttgcctgatggcaacagaaagaatctagatatggtctgcgcaacttttgcccgtcagaagttgaattttgtttctggttttagccaaggaaagggcaaaattttgccaaacttcaatgcctcctctttctcaagtaagttcgggacattagaccttttcacacaaaacattatgttactgatgaaatatggttctatttctgaaagcgcacaatgggaaactaagtataagaagtatttgatggattcgatttttggtcatcgatcgttcttctctgcgagagccatgatgattttgggtattatgagcaaatcgcacacatctctttttctttgtaaagaactcctggtggagactatgaaagttttcgcacagccaattgttgacgatgagcaaatgttcattattatagcgcatatcttcacatatagcaagatcgttgaaggactagatcccacttcagatttaatgaaagagctcttttggctggctaccatatgtgttgaatcttcccacccgttattatttgaaggaggtcttctgtttatggtgagctgtttgaagcaactgtatacaatacatttacaacttgattttaatggcaaatctttagcaaggaaattaatggaatcgagaaaatttgctgccactcttcttgtagagttagagtcatacaatggatgcatttggaacgaagacaattttccacatattatccttggattcattgcaaatggtttgtctatccctgttgtgaaagcagccgcgttagattgtttacaagttcttttcaagaatacatattatgaaagaaaatccgatccaaaatcttcagattatctttgttacctctttctgctgcatttggtattgagtcctgaacaactatctactttgctacttgaaatcggtttcgaagatgagttggtacctttaaataattcacttcaaatgccattaactttgatcaactggctaagctcagactcagagaagtctagtatagctttatatcaaggagctcttgtgtttagctgtgtcatgtcagatgagccatgcaagtatcgttttgccgtactgttaaagtacttactcaaagttaaccctgtttgtgtgttcagattttacacgttaacaaggaaagagcttagaaggctatcgacattagaacagtcgtcagacgcggtcgccctctctttcgaaatcatcagcctacttgtcacacatagcgagttcaactacctggaaaagtttaacgtcgaaatgacagacctcttgaaaaaaagaggtttgtcagttataaaaccgctcgatatttttgatcaagaacatgttgataagcttaagggagagggtgaacaccaagtggcaatttatgaaaggaaaagattagcaacgatgataatagcaagaatgacgtgcacctag

SEQ ID NO: 187 - DNA, 1014 bp, Saccharomyces pastorianus
atgcaatccaggagatcaaagagcatcactggcaagagaaagcaagtaggaaacagtgtggcgagggtgatcaagccgcaaaagacgagaaagataatacgaagattccaccatttaattaacaaacgagaatctatatgccagtttttatgtcttacggagggtttagatgaggccaatgagaagaaaaatgatacgattatcttagccagcactaagggtaatgcaaatctaagcaagtattatgaagacggcaaatcacaagccttcaatgaagttatggaagcacaactgttaaagttacattccttggtcaataatgaaacaaactcgaaagaggcatgtgatcttgctacaatgtacacattacttggttatataatgaatcaaatcgatgcgctgggcggattggaaacttatcaaattgccagtcaaaatggacagttgaagggacgtggaggagacacatccaaattactcgagaaatggacccgacccctgttaggaaaccgttctggggccatcgcgttggaaattggttcgctaagttcagaaaaccgtatatcacagtgtgggctctttcgagaggttgttcgtatagatttacaaaaccacgaaggcgttgcaaagcaagacttcatggaaagaccgctaccggaaagcgaaaacgatagattcgacttgatatcctgctccctagtcctgaattttgtcaagaaccacaaggaccgtggtgcgatgtgccaccgcatgattgagttcctgaagccacaaggctacatctttatcgttcttccacaagcctgcgtggcgcactcaaggtattgcaacgaatcactgctacagaagctcttcgcatcgattgggctcatactgctaaacagccaccagagcgacaaactatactattgcctgtaccagttgcagaaggctccatcacagctcaagggcttttcaaagagagttaaaatcaacgatggccctgggctgaacaattttggcattaccctctga

SEQ ID NO: 188 - DNA, 96 bp, Saccharomyces pastorianus
atgagcccaatcgatgcgaagagcttctgtagcagtgattcgttgcaataccttgagtgcgccacgcaggcttgtggaagaacgataaagatgtag

SEQ ID NO: 189 - DNA, 2379 bp, Saccharomyces pastorianus
atgggtaggaaaagactttctcaaaagaaaaagcctgctgcaaagccacaggaaatgatcgtagatgaatcaaaactaaattggaaacctgtagaagttccagatactctggatgattttggtgggttttatggcttagaagaaatcgatggtgtggatgtcaaaatagtcaacggtaaagtaaattttgtcgctagaaatgattcaaaagtggtcaaagataactctaaagaaaaaactgagactaaaaaggtaccagatgatactcaatctgtatcaagtcctgttttaagttcagattcagaatccgagctcctggaattcaagaacttggatgactttgaagaaggagagttgagtgcagcttcgtactcctcctctgacgaagatgaacaaaatgaagaaaaggatgctaattcaaatgatgacaacaaggacgaggatgaggataagaaggacgtggatgagaaggatgaggatgaagatgaggatgaagatgtcttgaaggaaaatgtcttcaaccaaaacattaatattgatgatatttctcctgtcaacctaccagaatggacaaagcttgctcctctatcaatgacgactttacagagtttacagaagttaaatttcctcagaccaacagaaattcaaaaaaaatctattccggtcattttgaaaggtaaagatgtcatgggtaaagcctctacaggttcaggtaagacattggcctatggtattccaattgtagagcaactggttactaatttttctcagaaaaacaaaaaacctatatcgttaatcttcacaccaacaagagaactagcgcatcaagtgactgaccacttgaagaaaatttctgaaccggtcctagaaaaatcccaatactctatattatctttaactggtggtctttctattcaaaagcaacagcgtctactaaagtacgacaatagtggtcaaattgttattgcaacgccaggtagatttttagaactgttggaaaaagacgccgacttaattaaaagattctcccaaattgacacattaattcttgatgaagctgataggttgttacaagacggtcattttgacgaattcgaaaaaattattaaatatttatcagtggaaaggaagaaaagcaaaataaaaaattctgaaaatgataacgtgttttggcaaactttaattttttctgcaactttctccatcgatctgttcgataaactatcttcgtctcataaggctagggaccagaaattcaaaaacaatgaagatgaattgaatgccgtaataaaccatttgatgaacaaagttcaattcaactcaaaaccagtgataatagacgcaaatccagagtcgaaggttagctcacaaatcaaagaatctctgattgaatgccctccgctagagcgtgacttgtattgttattactttttaacaatgtttccaggtacaaccttaatcttttgtagtgctattgattctgtgaagaaactgaccgtatacttaaacaatttaaggattccagctttccaaattcactcttcgatgactcaaaagaatcgtttgaaaaacttagaaaggtttaaactacagagtgctaaacaaaagacaataaatcattcaaatcctgattctgttcaactctccacagtgttgattgcaagtgatgttgctgcaagaggtctggacattcctggtgtccagcacgttatccattaccatttaccaagatctaccgatatttatattcatagatcgggcagaactgcaagagcgggctctgagggtgtttctataatgatttgttcaccacaagaatccatgggcccgttaagaaaactaagaaagacactggctgcaaaaaacggcgtttcagcagattttaatactaagccaacgagtagaaaggctatcaaatggcagaatactgtgcccttgttaccaatcgaaactgatattgtttcccaattaagagaaagaagtagattatctggtgaattggctgatcatgaaatagcgtcaaactccttgagaaaagatgacaattggttgaagaaagcggccgatgagttaggtattgatgtcgattctgatgatgatgacatatcaaaaagtaatacagactctttcttattaaagaataaaaataggaaaatacaaaagactataaataaggataaagtgagagcaatgaaagctgaattaaacgacatactatcagagcctatacgtaaagataggagacaaaaatatttaacaggtgggttagtaaatctggctgataatctggtcaaaaagagaggtcataatactatcattggctatgaaaggatggatgctttagaaacattaaaaaaaaagaaaaagggaaataattaa

SEQ ID NO: 190 - DNA, 1314 bp, Saccharomyces pastorianus
atggataacgaggttgagaaaaatattgaaatttggaaggtcaagaaattggttcaagctttagaaaaagctagaggtaatggtacttctatgatttctttggttattcctcctaaaggacaaatctcactttaccaaaaaatgttgacagatgaatacggtactgcgtcaaatattaaatccagagttaatcgtctttccgtcctatctgctattacttccactcaacaaaagttgaagctgtataacaccttacccaagaacggtctggttttgtattgtggtgacatgatcactgaagatggtaaagaaaagaaggttacttttgacattgaaccatacaaacctatcaacacaacattatatatgtgtgataataagtttcatacagaagttctttccgaattactgcaagcagatgataagtttggttttatagtaatggacggtcaaggtactttgtttggttccgtttctggtaacacgaggactgttttgcataaatttactgtcgatttgccaaaaaagcatggtagaggtggtcaatctgctcttcgttttgctcgtttaagagaagaaaagagacataactacgtcagaaaagtcgctgaagttgctgttcaaaatttcatcaccaatgacaaagttaacgtgaaaggtttaatcttggccggttccgccgatttcaaaaccgatttagccaaatccgaactatttgatccaagattggcgtgtaaagttatttccattgtagatgtttcgtatggtggtgaaaatggtttcaaccaagctatcgaactatctgcagaagctttagccaatgttaaatacgtccaagaaaagaaactactggaagcatactttgacgaaatttctcaagatacaggtaaattctgttacggtatagatgacactttaaaggctttagatttgggtgcagtggagaagctaattgttttcgaaaatttagaaactattagatacacattcaaagacgctgaagacaatgaggtcataaaatttgccgaaccagaagccaaggacaagtcgtacgccattgacaaagccacaggacaagaaatggatgctgtcactgaagaacctttgattgaatggctagctgctaactacaagagcttcggtgccactttagaatttatcacagataagtcttctgaaggtgcgcaattcgtgaccgggtttggtggtattggtgcaatgctacgttataaggttaactttgagcaactacttgatgaatctgaagatgaatattacgatgaagatgatggatctgattatgatttcatttaa

SEQ ID NO: 191 - DNA, 1056 bp, Saccharomyces pastorianus
atgtcttctcaacccatcccggaaacccaaaaggcaatcgttttttatgaaacagatggtaagctggaatacaaggacgttacagtcccagagcctaaggccaatgaaattctagttcacgtcaagtactccggtgtttgtcatagcgatttacacgcatggcacggcgattggccattccaattgaaatttccattgattggtgggcatgagggtgcgggtgttgttgttaagctgggctccaacgtcaagggctggaaagtcggtgatttggctggtatcaaatggttaaatggtacgtgtatgtcctgtgaatattgtgaagttggtaacgaatctcaatgtccccatttggatggtactggcttcactcacgatggtacttttcaagagtatgcaaccgccgatgctgttcaagctgctcacatcccaccgaacgttgacctagcggaagttgccccaattttgtgtgcagggattacagtatataaggcattgaaaagagccaatctaattcccggtcaatgggttactatttctggtgcttgcggaggattaggctctttggccatccaatatgctttggctatgggttacagggttattggtattgacggtggcgaagctaaacaacagctatttaaagaactaggtggagaaatatttatcgattttacaaaagaaaaggatatcgttggtgccgtcatcaaagccactgacggcggttcccatgggattattaacgtgtctgtttctgaagcagccatcgaagcttcaacgagatactgtagacccaatggtactgttgtcttggttggtatgccggctcatgcctattgcaaatctgacgtcttcaatcaagttgttaaatccatttccattgtcggatcttgcgttggtaacagagctgacacaagggaagctttggactttttcgccagaggattgattaaatctccaattcacttggctagcctatctgatgttccagagatttttgaaaagatggaaaagggtgaaatcgttggcagatatgttattgacacttctaaataa

SEQ ID NO: 192 - DNA, 837 bp, Saccharomyces pastorianus
atgttttcgaggcttgctttttttcgaagggcaactcttgctcctgcttctatgagaatgtgttttaggaccatatatcaaaaagcagagagtgacttgcccaagaggatcgtccccaaattgccaacattttactcggcgaaccctaaccatgaagaccgtattaatcgactggaaaggcttctgagaaaattcgtaaaattaccatctcagaacaacaatgaagtacaacaaacaaaagctccttggatttcttttgacgaatatgctctaataggtgggggtacgagattaaagcccacccaatacactcaattactgtacatgttgaacaagctacacaatgttgaccctcaactgactaatgaagaaatcacatccgaactgtcccaatattacaagaaaagctccatcctttcaaatcagatcaaggtaaaaaccttggatgagttcggaagaagtgtagccattgggaaaaggaaaagctctacttctaaagtctatgtcgttaggggaacaggtgagatattagtgaatagtcgtcaattaaacaattacttccttaagatgaaagatagagaatccatcatgtatccactccaagtgatcgaatccgtcgaaaagtacaacgtttttgcaacaacatctggaggcgggcctacggggcaagcagaatcgatcatgcatgccattgctaaagctttggtcgttttcaatccgttattgaagtcgagattacataaagctggtgttctatcaagggattacagacacgtggagagaaaaaaaccagggaaaaagaaggcaagaaaaatgccaacatgggtcaagagatag

SEQ ID NO: 193 - DNA, 924 bp, Saccharomyces pastorianus
atgcagctggttccaaccatttttaattctaagaatataagcggaattgcagggtccatatcgatatcctgctggattgttgtatttgtaccacaaatctatgaaaactttcgaaggaaatctgcagaaggattatcacttcttttcatcgtgttatggctattaggtgatatatttaacgtcatcggggctatgatgcagaacttgctgccaaccatgatagttttggccgcttattatacattagcagacttggttttactgatacagtgcatgtggtatgttaaggacaagaagggccttttagagcaagttaaaaaaaatgtcgatcctgtacatctatctccagcaaacccgatagacgagtctgttttacaagacgtttttaacgagtatgagccacttcttccaagaatagaggaagaggataatcaatcatacaactcgctcgagcttggggcagatatagttgcaaaaaaaaaagaaaatatttttaatgaccttctgattgtatcaggtgtaatatttgccgggtttttttcgtggtacatatcctactgttctgggctgactaaaggcccttccgaaaaggatcctaacttagcaaaaattaatctccctgcacaaattttgggatatttgagtgcggtactatacttgggctctagggttcctcaaattattctcaacttcaaaagaaaatcctgcgacggtgtgtcgtttctattctttttatttgcatgtttggggaatactgcattcataatatctgttatttcgatgtcagtagaccctaaataccttattttaaacgcatcttggcttatcggtagcgcaggtacgttgttgatggactttacggttttcatccagttcttcctttatgcaagacctaaatacgagaaactaactatagatgattaa

SEQ ID NO: 194 - DNA, 1845 bp, Saccharomyces pastorianus
atgtccaatttatctgatacagcgaatggtaacgataccaaacgcggcaggttttctaattttgctttcacatctgaaaacagtattctacaaaaaaacagcacgctaagaaactggtttctaaagccgacaaccgataacaaagaggcgtattgtggtaaaggtgaaagtaccatcaaagtcgcacaaccaaatgatacaaactcccaacactctgttgaggagaaaaaaattggaagaagagtcaaatccttttttaagcaggcgaattcaaatagatacggaaacatgtcggaggatgaagacgatgcttcgttttggaaaaggacagacagcaaaggcccaaagcaagaaaatacttttattaatggggagaagcaaaagggaagcttcaaaaagaaaatccggaatagttttttcaagggatctattgaaagcaacgagaaaacttacgctaatgagaaaaaaccttcacagattgaattctcgtcagatgatgaaaatgagtctcactttacagatgcaaactcacatgttatacaatccaagagccctgagaaaacttctcctggaaagcaatggccaactaaaagcattgattataaagatcacaatgtaggatctggtgaaaactctgaggaagaggatgaagatgacgatgaagatgaattttgcccactcactccaccagaaaatgttttagaaggtccatataaatttgtatttcaaaccccaaatacatttacatcccagccacacttatcgaccgaaaaagaataccataaaggcggaaaatacacgattgagtatctcagcaaaagcttaactactttgaacattgatattgattttggggcaaaggaggaacctgatttctattcagagaaagaaatacaaaaaaaaatcgaaagtattattcaaaacattgccgttgaaatgtcaaagaataaaatagccaataacaatgaacaaaatgagcttgaaaagttgaaaaaagaaaacactaaattgctaaagttcaaatatgaacattctatacagaagcaagaacttatctctctaaacactaggctcgaatctttaaataagaaaaacaaggatcttattatcgaagtgaaaaaattgaagaacaattcggaaaatgaggaaatgaaagaaagcacatttacggatgagaacgaaaatgaaagttttactaaatctaaaatagggccgggtgttttaacgttgaacgtcaatgaaactcgaaaagagccacaacaagctacaaccaaaccctcaaaatatcttccaagagaaataagaaacaatgagacaaaactaaagcacttagaaaagaaaatattcggcttagaaaaaactcttgaaaaaaaaagaaaacagatgaagactaacgaagttagattagatttgaataaatatactattgctcagtttttaaacttaatgaaaagtctcaacgcaattttacaattttacaatgtctatggaaacgatttgaaagattacaacgacaacatcatcagagtagaagcctgttgtagcgcccttaacacaatgcactctttcgaagaatcctcactgcgtctgcaagaacatagcttcatgagacaaatgagtccattgttcacaaacatcaacttctcgttaatcgaccaactaacaatgaacttcagattctacgaaagatctgccaacttccagaaggaaacaataagcggactaagaatgatactggaagagaaagatgattacattaaaacactgatgcaacatttgaaaaaaaggcagagcacaaaattgatagaagacgctcagaagggtgtttccgctatacaatcttag

SEQ ID NO: 195 - DNA, 1035 bp, Saccharomyces pastorianus
atgtcttctgctacagcttcaactgagagtattgtggaaaaaatgttgcatccaaagactacagaaatatattttgcgcttaacaatggggttcgtatcccagctttaggattgggtaccgcaaatcctcacgaaaaattagctgaaaccaaacaagccgtcaaggctgctatcaaggcaggttacagacacattgataccgcttgggcatacgaaacagagccatttgttggcgaggccatcaaagagctattgggagagggatctatcaaaagggaggatcttttcattactaccaaagtgtggccggtcttgtgggatgaagtggaaaggtcactgaatgaatctctaaaggcattgggtctggactacgtcgatttgtacttgcagcactggccattatgttttgaaaaggtcaaggatcctaaaggaatcagcggattagtgaaaactccagttaataagtccggtgaaacaatgcatgcttccaatggtgattggatggaaacttacaagcaattggaaagaatctaccttgaccctaacgatcaccgtattagagccattggtgtttccaatttttcaattgaatatttggagcgcctcgtcaaggagtgcagagtcaagccaactgtgaaccaagtggaaacgcatcctcatttaccacagatggaattgagaaagttctgctttatgcatgatattttattgacggcatattccccattaggttccaacggtgcgccaaacttgaagattccattagtgaagaagctagctaagaaatacaatgtgacagggaatgacttattgatttcttaccatatcagacaaggaactattgtaattccaagatctttgaatccagttagaatctcctctagtatagaatttgcctgtttaactaaggacgaattacaagaattaaacaagtttggtgaaaaataccctgtgagattcatcgatgagccatttgctgcgactcttccagaatttactggtaatgggccaaacttagaaaatttgaagtactag

SEQ ID NO: 196 - DNA, 951 bp, Saccharomyces pastorianus
atggctcttttgaacatatttaatagaaaaagcgctgatgaggcttcacaactgactacaaagggaaggcaggaaatatctcaagccatcacgatatgtaaaggcgacgatgccgccgaccaacaagactgttccggtgattgtaaagagaatattgaagacggggagcaagcatttgctaggctgaagatagagcacgaaactcccttgttgaattcttcaaagacaccgaaaatccattttgttgtgccgacatctcaaagcgactggcagcatgatgcttgctcagaggacgaaaaatctgtccagtacaaaatttcccagtggtgtgataagaactctagcaaattttcaagcgtgggtgcaggaaagacattaaattgtggggtttcatctttacctaaagatattatggacatcgaagttatgcggggaactaagaacaatgttcttgttctgccttattttatttggttgaatgatctcaggtcagataacgttgaagaaacactagatgatgtagttcccattttgttgaatggttctatttccagggataagttgctagaaacgcgacgggacataacagacgcacgggaacgtgcctttatattcttatgttctcacactacaagggacaaaaggtgtgggattacagccccgtacttaaagaaagttttcgataataaattgcaagagcatgcgctatatagagataattcagacttcagacctggcggcgtcaagattgcgtttgttaatcacgttggtggacataagtttgcatcaaatgttcaaatatttttgaagaatccgaacacgttaatctggctgggaagagtaacgccagttatggtaccttccattgtcgaacatctgataattcctgaaaaacctactcttccatatccggagaaggtgcgttgcataaaaaaatatgagaactggtaa

SEQ ID NO: 197 - DNA, 879 bp, Saccharomyces pastorianus
atgagttttaggcattttaaaaggagagctgttacgagctcagagaaagaaagctcttcagcggatgaacacgatttcgatgaggacattcatgtactgaagaagtcagtctctgtaaaagagaagtcttcaacagcagaaagtatagaagagacaccaaagaacgacacgaatcaggacgacgaagaatcaaacgatggtgaaaccgaagccggttctgaaagtgaggagagtagtgattgcagtagtactagtgaaaatggagatataattcctttacagagacctttgtttttgaaaaaagtaaacaaaaacaaacaacgagctcctacaatcgataaagatcaaaacgaaagtgatacgcatgctgagcagaaaaagaaatttactgtgatgaaaagaattgacaaagctaaccaagcggcacagaagcatgaaataatgaggctgcattttgacaccaattacagtaccaatgaggaattgatcaagcaatgtatgcttcttaatgataacgattatgtcgatccagaaaaagagagactcgcgtggctaaaaagacaagaggaacgtagtcaaagatataggaatgcccaacttgccaaacaacaacttctggaacagtatgaagcaaacaaattcgcctcaatgcaaaaagataaagacagacattccaggtttgaggtcgccacagacacaggcaaagagcaggtgactactatgaaacaaacgtcgactgagaaatctaaaaaatcatacgacaacaatcgctacaaagtcacaagagctaaaaatattgagttccgcaaaaatagtgcacatgaaaatgaaaatgacaaaaacgatgcagaatctgaatctgaatattctatcatataa

SEQ ID NO: 198 - DNA, 735 bp, Saccharomyces pastorianus
atgtctttagtaccattgtgttcggacctaccacaattcttgcaaggttacctaccaaatgccaccaaaaaagaaaccagcattcggcctttcattacgttgacgtatgcgcaatcgctggacgcgagaatatctaagggtcctggaataagaaccactatttcgcatcctgagacaaaaacaatgacacattatctacgatatcatcacgatggaatacttatcggaagtgggacagcactaattgatgatcctggattgaattgtaaatggggtcgagattcgcttgcaaattcaccaaggccaataattttagacacaaagcaaaaatggagattcggcggttcaaaaatgcaagaactttacaataagggattaggtaaaccaccgattgttgttgtcgcaaatgatccagcaataaaagagcaccatgttgagtatgcaatatgcccaatggataaagccacaaaacaaattgattgggagaagctgtttgaaaaattaaagaaagactttaatatacagtcagttatgattgaaggaggagccaaagtagtaaatcagttgttactaagaaatgacatcatcaatagtctcataataactattgggtcaacatttttgggcagatcaggtacggaagtgagtccgctacaatcagttaatttgaagggtataacatggtggaaaggtaccactgatgtagtgatgtgtgcgaaactagacaacgaatag

SEQ ID NO: 199 - DNA, 648 bp, Saccharomyces pastorianus
atggatcaagaaaatgaaagaaacatctcaagattatggagagcatttaaaacagtaaaagaaatggtcaaagacagaggctacttcatcacccaagaggaagttgaactgccattagatgattttaaagttaagtattgtgattccatgggtaggccacagcgtaaaatgatgtcattccaagcgaatccaactgaagaatctgttgcaaagttcccagaaatgggttccttatgggtagaattttgtgacgaaccttctgttggtgtaaagacaatgaagacctttgttatacatattcaagaaaaaaacttccaaacaggtatcttcatttaccaaaataatattaccccaagtgcaatgaaattagtaccttctataccacctgccactatagaaacatttaatgaagccgccttagtggtcaatataactcaccacgagttggttccacaacatatcagattaagcactgatgaaaaaagagaactattgaaaagatacagattaaaggaatctcaactaccaagaattcaaagagctgatcctgtagccttatacttaggtttgaaaagaggagaagtagtaaaaattataagaaagagtgaaacttctggtcgttatgccagttacagaatctgtatgtaa

SEQ ID NO: 200 - DNA, 897 bp, Saccharomyces pastorianus
atgagcggtgagttagcaaattataaaagacttgaaaaagttggtgaaggtacatacggtgttgtttataaagctttagatctgagaccaggacaaggtcaaagagtggtggcattgaagaaaatcagattggaaagcgaagatgaaggtgttcccagtaccgccatcagagaaatttcattgttgaaggaattgaaagacgaaaatattgtcagattatatgacatcgttcattctgatgcgcacaagctatatcttgtctttgagtttttagatttggacctgaaaagatatatggaaggtataccaaaaggatcagccactaggatccgatattgtcaaaaagttcatgatgcaactttgcaaggtattgcgtactgtcactcacatcgtatcctacatcgtgatctgaagcctcagaacttgctgatcaataaagatgggaatcttaaattaggtgatttcggtctagcacgtgcgtttggtgttccattaagagcctacacccatgaaatcgttactttgtggtacagagcgccagaggtcttactgggtgggaagcagtacagtacaggcgttgacacatggtccatcgggtgtatatttgccgagatgtgtaatagaaaaccaatattcagtggcgatagtgaaattgaccagatcttcaagatattcagagtgttggggacacccaacgagggcatatggccggacattgtctacttgcctgattttaaacagagctttcctcaatggcacaggaaggacctgtcgcaagtggtgccaagcctagatccacaaggtattgatctgttggacaagttactagcatacgaccctattaaccggatcagcgccagaagagcagccatccatccctactttcaagaatcataa

SEQ ID NO: 201 - DNA, 1380 bp, Saccharomyces pastorianus
atgttgcaaaagctttcaatcaccgcgttgattgggttgttgtcttcggcagcatctttcgccaacgccgattgtacttactctggtggtaattactactgtgctcaaaccgatgccatcgtttactctaacgttggtttatctgctacttaccaggatgtcaccaacatggatgaatcttcttgttcttgtacccaggccgactttacttcttccggcagtttggctccattcaacgaagagttatccgtccatttcagaggtccaattgaattattgcaattcggtgtttactatccaaacggagaatccaaagccttgaagaagagatccgaggcacagctaattgaatcttgtaacgagcaaggtgaagctgtcgtctccagacacaaacatcagcacaggagagacgttgctgtcgaatatgtccaagtcacttctaccgtttacgtcgatggtagcggtgaaaccgttactgctgactccaccaacactgttgtcggtcctgccgttccatctgcttacactcaagtttctaccgttttgtccaacaccgctcaaacgactgaaaccggtgcaagtccatcatctgcttcctcttccaagactaccaccaccacctcctcttctgctgctgctgctgcttcgtcttcttcatcttccaacaccaacggtgactggtcaaggggctcttactttgtcccaggctctaccagtaactgtactttcatgaacagccagggtggaagtgccggttctggtgtatggtctagttgtttcggtaactccatctcctttgctgcttctgacggtacttccggtgccgcttctcctcaagcccttggtgatgttaccttggcatccggtaatgaatttatgattttctctggtgatgaatgttctggcaacaatgctgaatgtggttactacagggaaggtatcccagcttaccgtgggtttggtggtgctgacaaaatctttgttttcgaattttccatgccaagtgacactagtggctctgcttacaaccaagacatgccagctatctggctgctgaacgccaaaatcccaagaactttgcaatacggtgatgcatcttgttcttgttggaagactggttgtggtgaaatggatctcttcgaaatcttaaccgctaattctgataaattgatctcccatattcacgacggtcaagacggtggtactcaagactatttcaacagaccaactgatggttctttgaaagctgctgtcattttcaactcaagtgatgaaactattcatattattgaagtcgatgagagtttcgatgaatctttgagcgatgatgtcgttgaccaatggttaagcaaagctggttcttctgccgctctgccatga

SEQ ID NO: 202 - DNA, 201 bp, Saccharomyces pastorianus
atggccgtacagataccaaaacaaagactggccaatgccaagttcaacaagaataacgaaaagtacagaaagtacggtaagaagaaggtagacaaggccgacaagaaggctgctcctttgatatccaagacctggttgggcatccttattttcctcctggtgggtggtggtgttttgcagctgatcagctatatcctatga

SEQ ID NO: 203 - DNA, 552 bp, Saccharomyces pastorianus
atgggtaacattttcagctcaatgttcgacaagctatggggctcgaacaaagaattacgtatactgattttgggtttggatggtgccggtaaaaccaccatcttatatcgtttacaaatcggtgaagtggtcaccacgaaaccaaccattggcttcaatgtggagacactaagctacaaaaacttgaaattgaatgtttgggatcttggtggccaaaccagtattcggccctattggaggtgctactatgcagatactgccgcagtcatatttgtggttgattcgactgataaagatcgtatgtctacagcctctaaagagttgcatttgatgttacaagaagaagaattacaagatgctgcgctgttagtcttcgccaataaacaagatcaacctggcgcattgagcgcaagcgaagtgtctaaagagttgaatctggtagaattgaaagatcgaagttggtctattgtagcttcaagtgccataaagggtgaaggtattacagaaggtttagattggttggttgatgttatcaaagagggacagttataa

SEQ ID NO: 204 - DNA, 828 bp, Saccharomyces pastorianus
atggcttactcattaaccagaaaattgcttaaggattggaaatatttgatgcgccatcctgaaaagactctgggcctatttcatgtaagaccacatgattcggacttacacctttggcatgtgttattttgtgagcccaggactagtttggagatgtacctgttgctttatattgctggtgatgaccaggatccgtatataatcatgaaatgtttgtctccaaattctcgtttccccattaacaggaccgtttcgatgacacatttgaattatctgttgttaagagagttggggtttcaagatttactttcccatatatggcaacccttttttcacattcaaccaatagacgattttcaattctccccctcaatggtaaaattcaacaaggcatggaatagaattatatataaagacttcaagtcttatttcccagagctaataggcaccttacaaccaggtgactatgctatagttaagagctacactaaaaatcataatatcagtaattgcaatagtaacactgttaatgagttcatatcattttataacgctcaaaatcacaattcccactgtcaggacaagaaaagctttagcagtaacagcataaatagtagcggcatatcatctactttcaacaacaatagcaataacaagaaaacacatacctacaaagcgatcgatttcatgggcaggaatctacttgcatgtgatgacgacagtatacacgcagtaataagtcccaaaagatcaagatcgtcgttatcctcggatggaatgagtgataatagtaacaatgggcattgcacgaagaggaaaagagtctaa

SEQ ID NO: 205 - DNA, 423 bp, Saccharomyces pastorianus
atggcaactaaagagagcaccaacggtcgtacgtctaagcgagtaagaaagcacccatcgttgaagactttaacacataagcaaatacacacaacaatcttcgttaagtcgacaacaccatatgtaagtgcactgaaaaggattaacaagtttctagatagtgcccataaacatggatcatcttatgtggtagttttgggcatgggcaaagctgtggaaaagacgctggcattgggctgccacttccaagatcagaagaataagaaaatagaagttttcaccaaaagcatagaagtcctggacgaagtaatagtagagcagcaagaaggtatcgaaattgagagcgatgtcgacgatgaagataaagaaacccaattgaagaaaagaattgtaagcggcatagagttgcgtatttatgtatag

SEQ ID NO: 206 - DNA, 1236 bp, Saccharomyces pastorianus
atggacacaaattctaaagccagtgttctcagtgaaaacaaaaaatttaaggcaaggtttattcataaccatggtcagaagccctcttttattcaaattactcctccgatgatatctagtgttctctttcacgcatatccactattgataataattgataatgcacttgccaatataatgtggttatctgacgataaatgtttgccatttatatacttgacgagcatatggctaatcataagttcgttcatcccgaccgaaataaatgctagtcgagtttcaccgtttaataaactcttgagtttatggttaggttttataagtggaatcttcctgtttctgtcattcatgtattatgttatttcattggtgacttctttaagagaagcagaacctcctacattggatgaaatcgttgtgttactagagtctgtactgggcaaactagaagtactaagagatgagctgaacgtttggaagaaactaaaaacttcattcaatggcgtcaataaaaagtgctctgataagaggctgtttttgaggttattcctatttggtacaatctttcaaactatcatcataagatacatatcggtgggggcttatgttagattttttattatcagtgctctggtataccattccactagctttcaagctactttaaggctattctggagatttaccctagttcgaaatttctatcacatgggaattaagaattttaaaatctcaaactggttatcaaattgtttgaggatgtatcaaatcatcattttaactgaaaactcttctattatagtacctttgaaagaatttttgccgatactactacaaaacaagaaagatgaggatcacattaaaattttacaactactaaatgaacaaaggaactttgaagaccgtgggctcaaaatattagaaattgaagtacacgaaaaccaaaggaaatggcgtcgaaataaacattggagtacattattactgccctatgaaagacaaaacttttcaatagaaatcaaaaatgctgatgggtcatcaactatgagaagctgtctatcaacgcatgaccttgacaaagaggaactgcccaatgattggcattggattaataatgactgggatggggccgattgggtatactcggattcatcttggaaagaaactggaagatacgattctttggaaagtttcacgaggtcaaggagatggagaagacgcctctttcatttgtaa

SEQ ID NO: 207 - DNA, 1743 bp, Saccharomyces pastorianus
atgcttatcagattcagatcgaaaaacggcattcatagagtctcctgcgaagatagcgagctttttggagcagtaattaaaagattgttgggtaatctggatgccaatgccgatgccaatacatttactgttagtgagaagcctgggcaggatgtccatactgtttctgaactggctaatcgaacagtggcagatctagggctgaagcatggtgacatgctgatatttagttattcgaatcagcccaacaccgagacaattgacaccagcgtcggaactggatccgtagacattggtgttaagaacggtcgtcagaaaagtttgggcccgttgaaaattaaagaacttgatgttgacgaggaactagagaaagagaaagggttaatacctcgccaaaaatcaaaattttgtaagcatggtgatagaggtatgtgcgaatattgctcgcctttacctccttgggacaaagaatatcacgaggcaaataaaatcaaacatatttcttttcattcttatttgaaaaaattgaatgagaatgccaataagaaggaaaacggtagctcttacattgcgccgctctcagaacctgactttaggattaacaagcattgtaataatggacatgaaccatggcctcgaggaatttgctctaaatgtcaaccatcggcaattactttacaacagcaagaatttagaatggtggatcacgtcgaattccagaaaagtgaattaattaatgagtttattcaagcgtggcggtgtacaggtatgcagagatttggctatatgtatggctcttatgctaaatacgataatacgcccttggggataaaggccgttgtggaagcaatatacgaaccacctcaacatgatgaacaagacgggttgaccatggatgttgaacaagtcaaggaggagatgctacagatcgatctacaggctcaagaaatggggctttcacgtattgggttaatatttacagatttgtctgatgcaggagctggagatgggtccgtctactgtaaaagacacaaagattcatttttcctttcatcaatagaagttatcatggctgctggacaccaaaccagatatcctaatgtgagcaagtttagtgaacaaggaatattttcttctaaatttgtcacctgtgtcatatcaggaaatttggaaggggaaattgatatatcgagttaccaagtatccactgatgctgaagcattagtcacggcagacatgataagtggatccacgtacccttcaatggcatatatcgatgacaccaccgatgaaagatatgtacctgaaatattttacatgaaatccaatgaatatggtataacagtaaaggagaatgccaaacctgcattccctgtggactatcttttagtaacgttgactcatgggtttcctaaaaataacacggataccaatccaaaattcgctacatcgactgagtttccgtgggccaacagacaagctctggggcaatctcaagattatcaagaactgaaaaaatatttgtttcaggtggcttcaagtggagttttcaatctcttacacgagaaaatctcgaattttcacttgttgatatatataaacactttgcaggtactttcacccgaggaatggaaattactgatagagtctgctataagaactgaatgggaagagcccctattgaaacttgtctcctcagctggttggcaaacactagtcatgatccttcaagaaagtggttaa

SEQ ID NO: 208 - DNA, 447 bp, Saccharomyces pastorianus
atgaacatcgtcccacaaggtaacttcaagtcccaggtctccacggatcaagataagaccactctttcctccgcggtgccctcacttccagacacgctacgccagcaagaaggtggtgcggtacccctttccacacagatgaacgacagacacccattggaatcaaagctgaagcattgggagaccacacagcgccagagacagatggagcagtaccgacagatattcggcatagccgagcccatgaagaggacgatggagctggaaatcgtcaatcgcactgatttcagtcctctctcagcggacagcagcatgcaccgcgatatattgcttaacaaggactgcagcattgattgggaggacgtctatcctggcaccggcttgcaatccggctctatggttggcgacgatctccacagcaaaatcgaaaaacaattgggcatttaa

SEQ ID NO: 209 - DNA, 939 bp, Saccharomyces pastorianus
atgaatatagcgaaaagatcattaggcgctttctccaaacgattttattcctcttcaaagatcgttccaaaacataatacgatccaggatattagagacaaatacaatgctggtactcctttgtccatgtgcacagcatatgacttcatcactgctacatgggtgaataaagctaattgcgatctactcttagtcggagattcattagcaatgacctccttggggtatgatagcacaattacgctctcattagatgagttcaaatatcacgttagctctgtgtgcagagctgaaggtccttctttggtagtcgcagatatgccatttggtacttttgaatctgatatttctgatggcttgaaaaatgccatagatattatgaaattgcatagcaaagttacctctatcaaagttgaagtgggttcgtacattaaagacaagtatgcaatgaggtttatccaagaactgtgctcaagaggtatccccgttatggcccatataggattaacaccgcaaaaagtacattcacttggaggttataaagttcaaggtaacaagagtctgttacaaatgcaagagttgttcgaaacagccaagcagttgcaaaaaattggttgctggtccattgttattgaatgtgtcccccacaaaatggctcaattcataacgtctaaactttccattccaacaataggtatcggtgctgggaatggcaccagcggtcaggttttagtgatatcggatcttttgggcatgcaaggtgaatccgttccaaaatttgtcaagcaaactgtaaatataagagatattgcgactaagggcttgaaagaatatattacaagtgtagaggatagaacgtttcccgaaaaagattctcacactttcaaagtcaaagacgatctgtggaatgaattcctttcgtcgactaaccacaaataa

SEQ ID NO: 210 - DNA, 1725 bp, Saccharomyces pastorianus
atggagggcagagattttcagaaaaataatttaggcttgcaaatcaattcacaagatagtggaacgagccgtacaaccttccattcactacaagacttaggagacgatataatgaatgaaagctgggatcgtgtaaatcagaagaagattagtgcaaaagatgatgttttccctgaaatacctcttccatcaccatctttatcggcagagaaggtaaatacaaaagaagaagaagaagaggtagtgatcaagtcatcaaattcacagtcaaaagaaccgtcacagaaacctccagtagatattccttacacatgttttaccaaggatcgaaggctagtcatttttggaattattatttttatagggtttttgggcccaatgtcaggaaacatatatattccagctctgccacttttgcaaagggaatttgatgtgagtgcaacgaccataaatgccacagtttctatttttatggcagtgttctcggttggaccactgttttggggcgcactcgcagattttggcggaagaaagtttttatatatggtatcattgtcattaatgttaaccgttaatataatactggctgctgtgccagcaaatattgccgcacttttcgtcttaagagtttttcaagcttttgcatcaagttctgttatttctttaggggctggtacagtaacagatgttgttcctccaaaacatagagggaaggcgattgcgtattttatgatgggcccgaacatgggaccaatcatagcaccaatagtggctggattgattttgatgaaaggaaattactggaggtggctctttggatttacttctataatggcgggaatagcattgatcttagtgagcgcgctacttccagaaacacttcgttgtatagttggaaatggggatcccaagtggtgtgaaaagaagaaggaagaaaaaggaacagtacccccatcctctcagagaaagggactatcgcgttggcatttgttcccagatatgggtatccgtaaaccagttactaatgaccctttcttccaacaaaaatttccaaaaccaccaaaagcaggctttacgctatactggaagatggttaaatgtcccccagtaataatcacatctattagcactgctctcttattttctagttattatgccttcagtgttacgttttcttactacctcgagaatgactaccattttaccatgctagaaatcggtgctgcttacgtctgcccaggagtagccatgctgttaggatctcaatctggtggtcatctctcagattatcttcgttcacgttggatcaaaagtcaccccgaaaagaaatttcctgcagagttccgtttaatactaaatctggtcggaattgtactaacactgggcggtacagttggatatggatggtccattttctttcatcaccactttgttgtgctcttggttttttcctcattgatggccttcggtatgacctggtgcagcaatacttccatgacatatttaactgagctattccctaaaagagctgctggaactgtcgcggtgagcagtttctttcgaaacattggtgcggctataagttccgctattatattgaagctttgcaaagcaatgggaacaggatggtgtttcacaggactggggttgtgtagtctgtttacgctaattggtatattatatctaatcatttttcagagaaagtatgttactgaagagttttga

SEQ ID NO: 211 - DNA, 861 bp, Saccharomyces pastorianus
atgaaacatattataaagaaggcatccgtacttactctgctaccacttatcgccgcagccgcagccgcagccacctcagctacctcagttgataatgcagagactcctgtggacactgaaggcccagcacatttaaaatcctttttaatgtccatttctatgattgggctttctgaaattggtgacaaaacctttttgattgcagctttgatggctatgcgtcatcaacgacttttggtgttttcagcagcagccacatctcttgcgataatgactgttttgtctggtgtagtgggccattccgttgttgcctttctctccgagcgctatacagcattcttggctggtatgctgtttctggtgttcggttataaattgaccatggaaggtttggaaatgtctaaggacgcaggagttgaagaagaaatggctgaagtcgaggaggaaattgcagtcaatgacatcaacaagggtatggacgatgttgaaaaaggtggtgaagctactcacgctaaacagttgaggaactcttcgacagttacaaaatttttacataaattccgtgagctagcatcgtttatgttttcaccagtttgggttcaaatatttttgatggtctttttgggagaactaggcgaccgttcacaaatcagtattattgccatggctactgacagtgactattggtttgttattgcaggtgccgttgttgggcatgctatttgcagtggtctagccgtggtaggtgggaaactattggctacaagaatcagcataagaactatcactcttgctagttcatttttgttcttcatttttgctcttctttatatttatcaagcattcacaatttcaaattga

SEQ ID NO: 212 - DNA, 1134 bp, Saccharomyces pastorianus
atgcctaaaaagtctattgaagaatgggaaggtgatgctatcgaatcggtcccttatttggcaagtgatgaaaagggttcaaactataaggaggccacacaaatcccattagatccaaaacaaattgaaattgaaaatcatccaacagtaaaaccatgggtacattttgttgctggcggtattgggggcatggcaggtgctgtggttacttgcccctttgatttggtgaaaactcgactacaaagtgatatatttctgaatgtgtacaagtcgcaggccgccaatataagtaaagtgtctactcgtccgaaaagtatcaattatgttattcaagctgggactcacttcaaagaaacactgggaatcattggcaatgtgtacaaacaggaaggtttcaggagcttgttcaaaggtttgggtcctaatttggttggggttattccagcgagaagtatcaatttctttacctacggtactaccaaagatatgtacgccaaagcgttcaataatggtcaagagactcctatggttcatctcatggctgctgcaacagcgggttgggcaacggcaacggcaaccaatcctatttggttgattaagactagagtacagcttgataaagccggaaaatcatcagttagacattacaaaaactcctgggattgtttgaagagtgttctcaaaaatgaaggtatcactggtttgtacaaaggtttaagtgcttcgtatttgggatctgttgaaggtatcctccaatggctgttatatgaacaaatgaagcacataataaaacaaagatctattgaaaaattcggatatcaatctgaaggtgcaaaaagcagatctgagaaaattaaggaatggtgccaaagatcaggaagtgctggtcttgcaaagtttgtagccagtatagctacgtacccacatgaagttgtaaggacaagattaaggcaaacacctaaggagaatggtaaacggaagtatacaggtctaatacaaagtttcaaaatcataatcaaagaggagggcctattttcaatgtacagtgggttgaccccacatttaatgagaacagttcccaacagtataataatgtttggcacatgggagattgttatacggttattgtcatga

SEQ ID NO: 213 - DNA, 1665 bp, Saccharomyces pastorianus
atgtccagtaactccttcactaacttcaaattggccactgaattatcagcttggtctaaattgcaaaaaatttacgaatcccaaggtaagactttgtctgtcaagcaagaattccaaaaggatgccaagcgtttcgaaaaactaaacaagactttcaccaactacgacggttctaagatcttgttcgacttctccaagaacttggtgaacgatgaaatcatcgctgccttgattgaattggctaaggaagccaacgtcaccggtttgagagacgctatgttcaagggtgaacacatcaactccaccgaagaccgtgccgtctaccacgttgctttgagaaacagagccaacaagccaatgtacgttgacggtgtcaacgtcgccccagaagtcgactccgtcttgcaacacatgaaggagttttctgaacaagtccgctctggtgcttggaagggttacactggtaagaagatcaccgacgttgttaacatcggtatcggtggttccgatttaggtccagtcatggtcactgaagctttgaagcactacgctggtgtcttggacgtccactttgtttccaacattgacggtactcacattgctgaaactttgaaggttgtcgacccagaaaccaccttgtttttgatcgcctccaagactttcaccaccgctgaaacaatcaccaacgctaacaccgctaagaactggtttttgtcaaagactggtaacgaaccatctcacattgccaagcatttcgccgctttgtccaccaacgaaagtgaagttgccaaattcggtattgacactaagaatatgttcggtttcgacagttgggtcggtggccgttactctgtctggtctgctattggtttatctgttgccctttacattggttacgacaactttgaagctttcttgaagggtgccgaagctgtcgacaatcacttcaccgaaaccccattggaagacaacattccattgttgggtggtttgttgtccgtctggtacaacaacttcttcggtgctcaaactcatttggttgctccattcgaccaatacttgcacagattcccagcttacttacaacaattgtccatggaatctaacggtaaatctgttaccagaggtaacgtcttcactgactactccaccggttccattttgttcggtgaaccagctactaacgctcaacattctttcttccaattggtccaccaaggtaccaagttgattccatccgatttccttttggccgctcaatcccacaacccaattgaaaacaaattacaccaaaagatgttggcttccaacttcttcgctcaagctgaagctttgatggttggtaaggacgaagaagaagtcaagtccgaaggtgccaccggtggtttggtcccacacaaggttttctctggtaacagaccaaccacctctatcttggctcaaaagattactccagccactttgggtgctttgattgcctattacgaacatgttactttcactgaaggtgctatctggaacatcaactctttcgaccaatggggtgttgaattaggtaagagtttggcaaaggtcattggtaaggaattagacaactcctccggtatctctacccacgatgcttctaccaacgggttgatcaaccaattcaaagaatggatgtaa

SEQ ID NO: 214 - DNA, 2403 bp, Saccharomyces pastorianus
atgtcacagaagcaaggtacgaatcagaaccggaatggcgctcaccagccacagcccgcaaagaaccagcgatctaataatgccgctggcgctaattccgcgcaaccgccacaacagcagagccaaggccagtcccagcagcaggggaaatccaatggcccgttttctgcctccgacttaaatagaattgttttggaatatttgaataaaaagggataccaccgcacagaggcaatgctgagagccgagagtggacgtacgttaacacctcataacaagccagcaaacactaaaacggggaaatttcctgaacaatcggtagcccccccaaacccgggaaagactgccaagcccataagtaatccaacaagtttatcatccaagagagatgcagaaggtgggatcgtctccaatgaacggctggaagggttcaatgcgcccgagaactacataagggcatactcaatgttgaaaaactgggtggattcatctttggaaatttataagccggaattgagctacatcatgtatccaatattcatttatttattcttaaatttagtggcaaagaatcccgtgtatgcccgtcgtttttttgacagattttctccagactttaaggatttccatggttcagaaatcaacagactctttagtgttaattctatagatcacatcgaggaaaatgaagtggctagcgcgttccaatcccataggtatagaatcaccatgtctaaaaccaccttaaatcttctcttgtattttctaaatgaaaacgagagtgtaggagggtcattaataatcagtgtcataaatcaacatctggacccgaatatcgtggaatctgtaactgcaagggaaaagttggccgacggtataaaagttctcagtgatggtgaaaacgggaatgggaaacaaaacctagaaatgaattctgtccctgtcaagctgggacctttccccaaagatgaagaattcgtaaaagaaatcgaaacagaattgaagattaaggatgatcaagagaaacaacaaaatcaacaaacctcggatgaaaataattccgaggcaaacagtaggactttattgcaagaatataaagccatgaataacgaaggatttgaagaatacgctggcgaagaggataaagataaagttaaagagaaaaccgccaaagacgaggagaagaaggaaattgagttgaaagtggacaataagaaaacagacagcaatttatattctcctgcaagagatatattacctcttcctccaaagacggcattagatttaaaactggagatccaaaaggtcaaagaatcccgtgacgctatcaaattagataatctgcaattggcattgcccagtgtatgcatgtacacctttcaaaatacaaataaggacatgtcatgtttagatttcagtgatgattgcagaatagcagccgccgggttccaagacagttacatcaagatctggtcacttgatggttcatctttaaacaatcctaacatcatgccgaacgataacaatagcgaacacagggatactgatgatccaacttgtaaaaccctagtcgggcatagcgggacagtgtatgccacgagttttagtcccgataataaatacttgctttcaggttccgaagacaaaaccgtcaggctatggtccatggacacacacactgcattagtaagttacaaaggccacaatcatcccgtttgggacgttaacttctctccgttgggccactatttcgccactgcgtcgcacgaccaaaccgcacggctatggtcatgtgatcacatatacccattaagaatatttgctggacatttaaatgatgttgactgtgtgtcattccatccaaatggttgttatgtatttaccgggtccagtgacaagacgtgtagaatgtgggacgtctccacgggtgactcggtcagattatttttgggccatactgcacctgtcatctgtatcgccgtttctccggatggcaggtggttatctacgggtagcgaagatggtattataaacatatgggacattggcacaggtaaaaggctgaagcaaatgcgtggacacggtaagaacgccatatattctctgtcttatagcaaagagggaaacgtactgatcagtggaggtgccgatcattcggtccgtgtatgggatttgaaaaaagccactaccgagccaagcgccgagccagatgagccattcatcgggtacttaggcgacgttaccgcgtcaataaaccaggatataaaggaatacggacgcagaaggacggtcatccccaccagcgatttagtggcatcgttctacaccaagaaaacacccgttttcaaagtcaaattcagcagaagcaatttggctcttgcggggggcgccttcagaccataa

SEQ ID NO: 215 - DNA, 1392 bp, Saccharomyces pastorianus
atgagatttttttcaaggagaatgctgaagactctgacttcaatgtgtattttgatattggttgtcgtgaccgttgcattctacataatatcctcgaacgaaaattattctcaagcggtcaaggatgctgcaaagtctcaatatgacactctgagggatagctacaatagcttaacaggtaacactggaaaccccacgaaattgcctgagcatgaatctgaggtggacgaaatattggaaagactacatgagcctctctatgccaaagactcttttgacgtaaatgatgtccttgctgaaaatattcaattttacgatgagattttatcccaagaaatttcagagcccaaagtagacaatttggtacgcagcggggatccactttcgggcaaggcaaaaggcacgattctaagtttggtgagaaacatagatttggaggacatcatatcatccgttcgacagttggaggaagagtataataagaactttggctacccctatacattcttgaacgatgaggaatttacggacgaattcaaagacgcaattaaaagaatattgcctaaggaccgtctagttgaatttggtaccatcgatcctggtaaatggaatattccggatagcattgacaaggataaatatcatgagaagagcgctgaaatggcaaaggaaggcattcacggcgctgaagcggtatcctatcataatatgtgccgtttctattccaaagaatattaccaccatcccctgctatctaagtataaatatgtgtggagattagaaccaaaagttagtttctactgcaaaattgaatacgatgttttccaattcatgagcatgaacgataagatttacgggtacgtcttgaatgtttatgaaagcccaaaaactatcaaaacgctatggacctctactatggattttgtcaaagaacatccaaactacttaaacgttaatggggctttcggatggctaaaggacaactctcaaaacccgcagaattatgaagatactcaagggtactctacttgccatttctggactaattttgaaatagtcgatctagactttttaagatcagaaccttatgaacaatacatgcaatatcttgaagagaaagggggattttattatgagagatggggtgacgcccctgtaagaagtttggcacttgccttgtttgcggacaagtcgcgcattcattggtttagggatataggttactaccacattccttacacaaactgtccaacctgtccaaaagattcggatagatgtaacggggactgtgtaccggggagattcagtatttggagtactttaaacgaccagaattgtcaggcaatatggatcaaacactctatgacagatgagcagttggatatgtattga

SEQ ID NO: 216 - DNA, 1659 bp, Saccharomyces pastorianus
atgttgaaaaactttaaactttctaaaagagatagtaatggatccaaaggcagaatcacatcggcagacatttccacgccttctcgtgataatggaggtgttatgaaacacattaaaacggtacctgttaggtacctttcttcatcctcttctactccagtaaaaagccagcgagattcttctccaacgaaaagacatgactctaaagatattacttctccagagaaagttataaaggccaaatttagttatcaggctcaaaccgcgaaggaattatcctttattgaaggagaatttttttacgtatccggagatgagaaggattggtataaagcttctaatccatctaccggaaagcaaggtgtagttcccaaaagctatttcgaagtatttgatagaactagaccttcatctgtaaacgggactaatagttcgagtcgaaaagttacaaatgaatcgttaaatatgggttcattatacgccattgttctttatgacttcaaagcagaaaaggcagatgaattaacaacttacgtgggagagaatctgttcatttgcgctcaccataattgcgaatggtttattgctaagccgattggccggcttggaggtcccgggcttgtccccgttggatttgttagtatcataaatattgccacaggttatgctacaggtaacgacgtgatagaagatatcaagtccgttaacctaccaacagtccaggaatggaaaagcaacattgcaaggtataaggcgagtaatattagccttggtagtgtggaacaacagcagctgcagtctactacaaaatctcctaatcagagcgcaaaactagtcgatagcgagctattattgaaagcctctgttgaatcattcggattagaagatgaaaagtactggtttttagtttgctgtgaattatccaacggtagaacgaggcaactgaaaagatactatcaggatttctacgatcttcaagttcaattattagatacgttcccggcagaagctggtaagttgagagatgcagatgggcaatggtccaaacgtataatgccctatatccccggacctgtaccatatgttaccaatagtataacgaaaaagaggaaagaggacttaaacatctatgttgcagacctggttaaccttccagattatatatctcgttcagaaatggttcattccttatttgttgttctgaataatggttatgacagagaatacgacaatgaagaaaattcaaataatattaaaacgttgcaagaaaacgatacagccacgtttgcaactgcatcgcaagcttctatgttagcttcaaacaatcaggataatacattgaccggtaaagatttgaagttaaatgtcaaactctcagaattgtctctttctgcttcccagcagccatccgtagcacaggtttcagattcgaaaacaacgaaaataaagttttattataaggatgatattttcgcgttgatgctgaagagtagcacaagctataaggaacttctcgataaaatcgctccaagaatcgacgcagatgactttaagctacaagtcaaactagcagatggtaacggggaggagataaaaacagattcacaggtaaacagtgttatccaggccaaactaaagatctcggtccatgacatttga

SEQ ID NO: 217 - DNA, 636 bp, Saccharomyces pastorianus
atggatgctgtaatactgaatatcctaggggatatccctgtggtgacgagattatggaccataggctgtctagtactgtccggtcttacaggtctccggatcataaacccaacaagcgtgctgtataattatgacttagtgttcaaaaagggacagtatggcagactaatttattcaatattcgattacggtgggttcaattggatatctatgctaaacatttttgttagcgccaatcacttgtcgatgctagagaactcgtttagtttgaaaaggaagttctgttggataatacttttactcttggtgatgctggtcaagatgacgagcattaaacagccagtcgcgtcgcttggggttcttttgcatgaaaacctggtatactatgaactcaaaaagaatggaaaccaaatgaatgtacggctctttggtggtatcgatatatcgccttccatatttcccatttatatgaatgcagtgatgtactttgtatataagcgggattggttagaaatcgcgatgaattttatgcccggccatttcatttactacatggacgacatagtaggaaaagtatacggcattgatttatgcaagtcgccttacgattggtttcgtaatggcgagacaccatag

SEQ ID NO: 218 - DNA, 2538 bp, Saccharomyces pastorianus
atgagtgcggcgcttccatcaatccagcttcctgtcgactataacaacttgttcaacgagatcggtgatttcttggtgactttcaagcacgacacgttatctgctcaggagccacaacatgatgatgaagacgaaaacatggatgctgaaaacattgagcaagatctattagaaaagggtcctaaatatatggccatgcttcagaaagtcgccaatagggaattgacttctgttgtcgtcgagttggacgatattttgcagtttcagaacgagaagtttctgcagggcacacaagcggacgatcttgtgtctgtcatccagcaaaacgccagccacttcactgagctattttgtcgcgccattgacgataacatgcccctgccaacaaaggaaatcgactacaaggacgatgttcttgatgttatcctgaaccaaagaagattgaggaacgagaaaacgctctcggacaggaccaatgaaatcagaaatgaaaaccttatggatacggcttcggatccaccttcctccatgaatgatgcgttgagggaagtcgtcgaggatgagactgaattgttccccccgaacttgactagacgctatttcttttatttcaaaccactgtcacaaaagtatgctcgtcgttacaggaagaaggcaattagctctaaaccactatctgtcaggcagatcaaaggtgacttcctaggtcaactgataaccgtcagaggtatcatcaccagagtgtcggatgtcaagccgtctgtcgaggttatcgcttatacgtgtgaccagtgtggctatgaagtgttccaagaggttaattcccgtactttcactccactgtccgaatgtacttctgaagaatgttcgcagaaccaaacaaagggccaactattcatgagcacaagagcttccaaatttagcgccttccaagagtgccggatccaggagttatcacaacaagtcccggtgggccacatccctagatccttaaacattcacgtcaacgggacactagtgagatcattatcgcctggtgatatcgtcgatgtcaccggtatcttcctacctgctccttacactggtttcaaagctttaaaagctggtctgttaacggaaacttacgtggaagcacaatttgttcgtcaacacaaaaagaaatttgcctctttcagtttgacctccgatgtggaggaaagagtgctggaactaattgcctctgggaatgtttataataggctggcgaaatctattgcaccagaaatttacggtaatttggatgtcaaaaaggcgttgcttctgttactagtggggggtgttgataaaagagtaggtgacggtatgaaaatcagaggtgatattaatgtctgtttaatgggtgatcccggtgttgctaaatcgcaattgttgaaagccatttgtaaaatatcaccaagaggtgtctataccaccggtaaaggttcttcaggggttggtctaaccgcggcggtcatgaaagatccagttacagatgaaatgatcctggaaggtggtgcgttagtgcttgccgataacggtatttgttgtattgacgaatttgacaagatggacgaaagtgacaggactgcaatccatgaagtcatggaacaacaaaccatctcgatttccaaggctggtatcaacacgactttgaatgcaagaacctcgatcctagcggcagccaatcctttatacggtagatacaatcccagactatcgccacttgataacatcaatttacccgctgctttgctttccagattcgatattctcttcctaatgttggacatacccagtagggatgatgatgaaaaattagccgagcatgtcacatacgtgcatatgcacaacaaacaacccgatttggactttactccagtcgaaccctccaagatgagagaatacatcgcctatgccaggaccaagagacccgtgatgagccaaagtgtaaacgattacgtggtgcaggcatacatcaggctaagacaagactccaaaagagagatggactctaagttctcattcggccaagccactccaagaactctgcttggtattattagactatctcaagctctggccaagttgagactggctgacatcgtagacatagatgatgtggaagaggccttgagattggtcagagtatcaaaagaatcattgtaccaagaaactaacaaatccaaagaagatgaaagccccaccacgaaaatcttcacaatcatcaaaaaaatgctacaagaaactggcaaaaacacactatcatatgaaaacattgttaagactataaggctaagaggattcaccatgttgcaattgagcaactgtattcaagaatattcgtacctaaacgtttggcatttgatcaacgagggtaataatttgaagttcgtggacgatggtaccatggacactgatcagggagattcagatatgggcacgccaaaactcgccccacaggcggccgcttccgccggcattaccgccccagattccgatatcgatctacaggatgcttaa

SEQ ID NO: 219 - DNA, 2775 bp, Saccharomyces pastorianus
atgacaagcgcctccgtgagactccagaacgtcaacattgagtctaacaactattctcgttacggtacctctgtctacgagaagctgtaccataatagaaacggtaatagcaataatgccggtaaaaacgttgctacgatttccaaactgccatcaatctcacaaaagtcgaggaacaggcaatacaatagttcaaattgctccaggtcgacgactcaatcgcccatatccacgttaaaatctccactttctaaccaaaatcaagctagcgctccagatgatctgggctgttcaggccaaagacgcagtgatgatgttgcctctttagataacgagactattgtgaccatgaactcaagaaaatccaggattaagaagaaatataagtctttaatttccacctcgtcaaagaaacttatgaacaaattgtacgaccatggtgcttcatctgattcattctccattttttctttgaaaacgtctcattctggtaaacatgaaaattccagacatgaaaagctaagaaaaagaaaataccatgtttttggcaaatttgctgatattaatgatttgccaatagagttagttgctaaaatactttctgaattggaattgggacatgatcaaaaaacgctggttagatgtctttatgtttcaaaaaaattctacaaggcgaccaagatcgttctgtatgaacagccttattttacttccacttatagagtggcacagtttgtcacctcgctaagatcgcaccccgaaaatggtgcatacgtaagagtattggatctgtcacttttgaaaccaggcataatcggtcaagatgcaaaggattctcaaggtctagatgaggatggtcactcgaggcgccatagacgccaccgccgcagatccactaacgcaagcttgaatttgcctcctactaccccgactactactatatccgacgacgacgatgctactaacgcattattaaaggacgacgtgtcaggtactggtggttttgaagacttggcattagccggttggagagattggagatatagaaatgagccgctttatagctctcccttgttgaacagcttcaaattgaaaaaagtcgtttctcgttcttcttccattacttccacgtcttctggaaactctaccggagtgcattccacaagaagacaacgttcaaatagttcggtcgcttccattacgaccagcattatgtcgtctatttacaatacttcccacgtctcactttcttcgacaacctcaaacaatagtaatggctatatgtctcccgggagtaatctatcgagagtctctaccgctagctcactaaaaaagtcctctgttaaatctaacatgtcatctccacagaagccaaaaccgatgtctgacataacttcgtcttcatggtttagaatgaaattgagttctagaaatagaaagacaagaacatcaactacaacagctggtctgaaaaactcaaagactaagacggttgatgttacaaagcaagattcggaacacccatctagttatcgtccttcaaagttgaaatttagtattgaacaaccatttagcacgcaccatccatatgccaacaaatttcttttgaaatatgctccttacagagatttacctttaggttatattctacatatgttgaatttatgtcctaatcttaacgagttgaacctatcaaatttggttatttgtacagatttcaagctaattaaccaaaaaaccgaaagaagaagactaacttcttcattgttacctgccgttcaagagtcgagtatttctgccggtccagaaagagacttggaaatcgtctatatgaccgattcaggcaaaggctacgaatattatgagggattgaataagcgacattcacgttcttcaagtttaggtaccaatcccaccagttggattgctgtacaggcaaactggggggattatccgcctcctattgatgcgcaaactaaaacaagagaagaacacaggcgtaactatactttgagcccaaacaaaaatgtcgaattacagaaactgaacccgctagagatttttgaactgatttgcaacagaaacgaaaagaaaagcggctacagcgccttgaccaaggtgaagatggacggcattgtttggtgtaggcaatacatggttaagtatttcgtattaaaaacattcagccagcatttgcattataaatctatggacaataattcctatgaacatcacatgttcagtttccgggactcaggattggatagaaacttttcctgggcttgtgatgctaaattgcatgaatttgttgccttgatgattatggatcatctctccaagctggacgacttgggtttagaagagcttttcaatatcaaatccgaaaagctatatattaaagattactgctctcgtgatcctgatattctcgaaatatcaaatttgtttgatatacagtatggcttaagatcagaatctgatgcaccctcagattccgattccgtaacagaatctttgcaatttaggctgaccgtattaaaatctgggaaaccaacatcattttggcttagaaaagtttccaagaattatgtttcgctggttgttaaattatgtgttgacgacaaccttgatatggacaaagctgaagtaggaaaaccaactttgaggatagatagcatcacacatgatttgatcagtaaattaaaggagttgagacgggttgatttgagaagaaatgttggggagaataactactacgccgaaagtatcatttaa

SEQ ID NO: 220 - DNA, 1215 bp, Saccharomyces pastorianus
atgtctgcgcaccacaagaagaagcttatgcccaagtcggcattgctgattagaaagtaccaaagggggatcagagcatccttcgtcgggttaatcctggtgttgtccattttgttcctgatgagtggctcgaactccccagaggcgctaataactcagggcactagcatgagccaagtggccaagaaggactacttgatgccgtttactgacaagtcacaaggtgttatccatcctctggacgacggcaaaaaggaaaaggccgtgatggtcacattggccagaaactctgacttatggaatttggtaaagtccatcagacatgttgaagatagatttaaccacaggtatcattacgattgggtgttcttaaatgacgagcgattcagcgatgagtttaagcgcgtgaccactgcgctggtttctggtaaaaccaagtatgggctgattccaaaagagcactggtccgttccatcttggatcgataccaaaaaatttgaagagaagagacacgaaatgggtaagtcggatattccgtacggtgattctgtgccttaccgacacatgtgtcgtttccaatctggattcatatggagacacccattgctagatgattacgaatggttttggagagtagacaccgatatcacattattctgtgacattcagtacgatatattcaagtttttgaaacaaaacaacaagaaatatgggttcattctttccgtaagcgaatacgaaggtacaattccaacattatgggaaacagtaaagacgtttgttaaaaaaaacccaaaattcttgaacaagaacaacctcatgaaattcatctccaatgatgatggtgagacatacaacatgtgccattattggaccaacttcgaaatcggctctttagacttcttcagatcggatgcgtacactaaatatttcgattacttggacgagtcaggaggattcttctacgaaagatggggcgatgccccagtgcattctatcgctgcctctttgtttttagacaaatcagagatccatttctttgacggtcttggattccaccatccagatttcatgtcttgtcccgtcgaacaggatattagactacaaaacaagtgtacttgtgaaccaggcaaagacgttacctggtaccctagctacttctgcactagaaagtacttttcggcagggaattacaagcttccccccggaatctga

SEQ ID NO: 221 - DNA, 1401 bp, Saccharomyces pastorianus
atgacttttgaaaactatttctcgttccagatattttttatcttcttaagggaatccttggaaatcgtcgttatcatatcgattttattgaccattgtcaagcaaggtctgtctgttgatgacgacagctcggttgatggaagctcttcgacggcgctcccaagtcctagtacaaatgtgaacgcagactcgaccactgcatttttacagcatggacacacaaacgctagtgtcgaagggacttctgccacaactcaaagcgacgataatgtcacgaagccacttaacgtggaagaagaagaggaaatttacgactatcccaatgagttaagagagcaagaccgggagcccaacgaacatattgctgataacgtgaaattatatcagaaattaaagatccagatccttgcgggtggtgcgtttggtttgttgctctgtatgctaatcggtggtgcatttgttagtatattctatcacataggtacggacttgtggaccttgagtgaacattattatgaaggtgtcttgagtcttgtcgcatctgttattatctctgttatggggctgttcttcttaagaatggggaagttgagagagaaattcagagtgaaactggcctctatcatttactcaaaggacaataaccttttggggagcaacgctacaaagagcgtcaaattcagtgaaaagtattcctttttcatattaccatttatcacgactttaagagaaggcttggaagctgttgtgttcatcggaggtatcggtattgatcaaccgttaacgtcaatccctctatccatgttgctcgccacagctatcagtactgttttcggtatttttttcttccagtactcgagctctctttcactaaagatatgtctggttgtcgccacatgcttcctttatttgatagcagctggtttattttctaaaggtgtttggcagcttgaattgcaagactatgttaacaaatgtaacggtcaagacatgagtgaagtgggaaatggacctggttcgtacgatatatcccgttccgtttggcatgtcaattgttgtaatggtgaaaaggatggaggttggatgattttcaccgctatttttggttggaccaacagtgctaccgttggctctgtaatcagctataatgtttactggttagtattaataggcgccttgaagctgctaatgatagaagaaaaatacggctacattccttacattcctgtcaactggcaaaagaaacgtattatgaaaagactaaacatagcaaaggcctcgctagctttaaaacaaaatgcttttgaaccaaactcaagtacgtcagatccagacagtcaaaggaagtccagagatagttcagtgcccttaatacttgagagtcatggctcaactaactga

SEQ ID NO: 222 - DNA, 825 bp, Saccharomyces pastorianus
atggtaaaatcgttgcaattagcgcaccagttaaaggacaagagaatacttttaatcggcggtggagaggtcggcttgacaagattatacaagctaatacccacaggttgcaagctgactttagtttctcctaccttacataaagccatcgttccgaagttcgggaaattcatcgacagggagaaccatcccgaatacagagaaaccgccaaacgcatcgtcaattccaactgggatttttccaagaacgaaatttacgagtatattcacgacgaattcaaagatgaatacctcgacctagaggaccatgacgacgcgtggtacataattatgacctgcataccggaccacccggaaagtacaagaatatacaacctcggcaaagaaaggttcggcaaccagcagctagtaaacgtggcagacaagccagagctatgtgacttctacttcggcgccaacctggagataggcgaccgtctgcagattcttatctcgaccaacggactttccccacgcttcggcgccctggtaagagacgagatcagcaacttgttctcacagatgggagacctagcgctagaagatgccgtggtaaagcttggcgaactgagaagaggcatcaggctcctagcgccaaacgacaaggacgtcaagtaccgtatggactgggctaaacgctgcacggacctcttcggaatccagcactgccacgaaatcgacgtccagcgcttgctaggcctcttcaagaccatgcttcaagaacagaaccgctcgctgcagttccctcccagagatcagatgctcagctattactgctcgtcctga

SEQ ID NO: 223 - DNA, 1587 bp, Saccharomyces pastorianus
atggcttctaccccgaacacgttccctccaagccagaacagttcctctggaaaccttcccacatctagacatgcgtctatcgtcgagatgctgtccactccaccattgctgccccaggtgcaggtgaacgaggcagacgacaaagagcagccggaagagctcacgccgccaaaggcagccggtgctcccggacctgctcctgctgccactcccgcacccctccgcgatgaaaagccccaattcaaactgtcagctgtgcccatgacacagactccatcgcaatgcctatcctctgtgcatgctcaaaagtggcagcacattcagctgtcgcaattgattgaacaaaacaagcttatttttgttccgggttccatatcagtagaggaagcctttaacactctgatcaagtaccacctgaactccattcccgtggagtccgttcctggcgacatggactgtttcacttttgactataatgacctgaattcgtacctgttgctggtcttgaacaagatcaccgtcagcaacaaaaagctcaccacagactgccaaaatggaaagcccgtccctgtgggcgagatggtcaaattgactcctaagaaccccttttataaactgccggaaaatgagagtttgtccacggtaatgggaattctcggttcaggtgtacaccgtgtagccatcacaaacgaagggatgaccaaggttaaaggtatcttgtcccagcgtcgtttgatcaagtacctctgggacaacgctaggtcgttcacgagtttggagcccttattgaactcctcgctacaagatttacatataggtgttcttaacatccagtccaagccaacttcaagacaatctcgtgttatctccattcaaggagaggagccgttgattatgggtctttacaaaatgcatgtagaaagaatatcatccattgccgtcatcgataaacaaggtaaccttttaggtaacatatcagtgactgacgtgaagcacgtcaccagaacatcccaatatccactattgcacaagacttgccgtcattttatttcggtcatcttgaactcaagaggactggaaacgggtaaagattccttcccaattttccacgtatacccctccagctctctagcaagaacactagcaaaactggtcgccacaaggtctcatagattatggattgtgcaaccgccagagtcgtccaattccgcatcggcatcctccacgaacttaaccgcatctaacaccgcagctaatgcagctaccggtaccgctcagtcgtcaactaatggtagcgcttccatgtcgaaatcatcttcttcggcatccatcaattctcactctcctttaatgacggcaatggaagatccgccatcgccacgttcctcggccatcgcgatcccaccaccaagtcccgtttcctcaacaagcactccaaacctatttgaaaaagaatacagaacaggaaaactgatcggtgtagtctcattgaccgatattatcaacttactgtcaagaaaacaaaccggaaacaaggcagtggatcctcaatccgcaagaagacaaagaggcagtattgccatgtga

SEQ ID NO: 224 - DNA, 582 bp, Saccharomyces pastorianus
atgagcagaattctagagagcgaaaatgaaacagaaagcgacgaaagctctattatatcgactaacaatggaacggccactgaaaggacaagaaatcatccagaaataaaatcatcgacacacacagttcaaaatagactagaactctttagtaggaggctatctcaactcggattagcaagtgatgcttctgtggaccaacaactggacagctcagctagtagcacttatgaacagaaggagatgaataagacaaatacatcgacagcagagcaaaagaatattgcaactgaacaaaagagtcgcagggaggagcaggatacgcaaaagatccagataaaatttcaaccaattgggtctattgcgcagttgaaaccatcggtttgtaaaatttcaatgtcacaaccttttgctatggtaattctatttctcaaaagacgactgaagatggattatgtttattgttatataaataattctttcgcacccaccccacagcaaaatatcggagaactttggacacagttcaaagttagcgacgaactaattgtaagttattgtgcatcggtagcatttggctaa

SEQ ID NO: 225 - DNA, 1680 bp, Saccharomyces pastorianus
atggaacctaagcgaaatagcgggtccctggccaagcatgacctgccacaattctatcttttgatcatgctatatctggttcaaggtatacctgtaggcttggcgtttggtacggtaccatttttactgaagtcgatggcaaaggagacgtcgttcacatcattgggcattttttctatggctacatatccatattctttgaagattctatggtcccctatagtggattcactgtataataaacgcatcggcagaagaaggtcatggatcatcccagtgcagttcgttagcggatttgtactatgggttttgggttggtgtatatcgcaaggcataatattcgatggggtggacgatgcgttccacggccgcgggaacggttctctgcatagcgttaacataaggaacttgacgtggtggtttgggctcttagttttcctatgcgccactcaagacattgcagttgatgggtgggccttgaccattctgtcgaaagagtctttatcttatgcttccactgcgcaaacgatgggtttgaacatcggctatttcatgtcattcaccattttcctatcgttgaactcgtctgattttgccaacaagtatttcaggaaacttccattggattacggatttatcagtttgggtggatacatgaaattctcggggatactgtacattgtgataaccgtatacatcatattttgcaccaaggaaaaaccgtatcaggagtacttgcccaaagtggagccagccaagtcggaaaatggcgaacctaaaatcctagctatcaaatacgacgatggcgatgtggtgtctgcccagaatactagtagtgtaaggtatatttatcattgtttcataaaagtgttgaagttgaaatccgtgagaagtttagcctttatccacatgatttccaaattcgccttccaatgtaatgaggcagctacgaatctgaaactactggagcaaggtttcaagagagaagacctggctgttacggtgctgatagacctgcctttcgaattaatattcggatattacgttgtcaagtggagttccaacaaggatccaattactcgtgacaacagaagactaagaaacacgggcactaataagtttgtcaagttcttggtgggggatgctggtgtgctgacgccgtggctgtgggggtttctgggtcgtttgattgcggcagtcttgggcagctacgtggtgaagcggttccccaagggcggcgagatctccaccaagtacttctgcctggtgatatttcagcacctgctgggctcatttatgaacaccgtccagttcatcgggatctcggcatttcacacacgagtcgcggaccctgttctgggcggtacgtatatgacgttgctgaacacgctaagcaatttcggcgggacatggccgcggctgatcataatggcgatgatcaaccacttcaccgtatacgagtgtgtcatcccggacactaacaaagtgtatgtgacccacggcggtaacatgcaagcgtgcaccgacgtcctgaaaggctccgtaaccgtcttgcgcgacggctaccacatcaccaacatcgtatgtatcacagttgggatcctcctgtactttggatacctgaagaaaaagatcctccacctgcaaagtctgccgatcagctcctggagatgtacgtaa

SEQ ID NO: 226 - DNA, 1095 bp, Saccharomyces pastorianus
atgttttctagattgccaacctatttggccagaaatgtctcacgtcgtgctccaacctcttttgttagaccctcagtagcagctttgaggttctcttctacaaagacaatgacggtcagagaggctttgaacacagccatggcggaagaattggaccgtgacgacgatgtcttcctcattggtgaagaggtcgcccaatataacggtgcttacaaagtgtctaaaggtttattggacagattcggtgagcgtcgtgtagttgatacacctattaccgaatacgggttgacaggtttggccgtgggtgctgctttgaaaggtttgaagccaattgtggagttcatgtcgttcaatttctctatgcaagccattgaccatgttattaactctgctgccaagactcactacatgtctggtggtactcagaagtgtcaaatggtctttagaggccctaacggtgctgctaagggtgtcggtgcccaacattcgcaggatttctctgcttggtatggttccatccccgggttgaaagtccttgttccttactctgctgaagatgccagaggtttgcttaaggccgccatcagagatccaaaccctgttgtctttttggaaaacgagttgttgtacggtgaatcctttgaaatctcagaagatgttttgtcgccagatttcactctgccatataaggctaaggtcgaaagagaaggtactgatatttctattgttacatacacaagaaacgttcaattctctttggaagccgccgaaatcttgcaaaaggagtacggtgtctctgcagaagtcgtcaacttgcgtgcaattagacctttggatactgaagccatcatcaaaacagtcaagaaaacaaaccacttgatcactgtggaatcgactttcccaaccttcggtgtcggtgctgagatcgtcgcccaagtcatggaatcagaagcgtttgattatttggatgctccaatccaaagagtcactggtgctgatgttcctacaccatatgccaaggaattggaagatttcgcctttccagatgctccaactattgttaaagcagttaaagaagtcttgtctatcgaataa

SEQ ID NO: 227 - DNA, 1632 bp, Saccharomyces pastorianus
atgtcaagtgccgctactgttactgcttcgtttaacgatactttcaaagtatccgacaacattgctgtcattgttcctgaaacggacacccaggtgacctaccgggacctgtcccatatggtaggccactttcagaccatgttcagtaacccttcttctccgctgtatggcacgatcttcaggcaggacactgtggcaatctccatgcgtaatgggctggagttcatcatcgccttccttggggccaccatggacgccaagatcggtgctcctttgaactccaactataaggaaaaggagttcaatttctatttaaacgacctgaagtctaaagctatctgcgttcctaagggcactacaaagttgcctgactccgagattttgaagtccgcctctacattcgggtgtttcatcgtggaattgagctttgatgcagccaggttcagggtagaatatgacatctactctccaaaggacaattacaagaacgttttttaccggtcgttgaacaatgccaagtttgtcaacacggaccccgtcagatttccagggtttgctcgttccagcgatgttgctctgattttgcataccagcggtaccacgtccactccaaagactgtacccttgttgcatctgaacattgtgagaagcacgttgaatatcgcaaacacttacaagttgacgcccttggaccggtcctacatcgtcatgcccctgttccacgttcacggattgatcggtgttttgctatctacctttagaactcaaggctcggtcgtggtgcctgacgggttccacccaaagctgttctgggatcaattcgtcaagtaccattgtaactggttcagttgtgtgcccacgataagcatgatcatgctgaacatgcccaagcccacgcctttcccccacattaggttcatcagatcgtgttcttctgcgttggcacctgcaacgttccacaagctggaaagggaattcaacgctcctgtcttggaggcctacgcaatgaccgaagcatcgcaccaaatgacctcgaacaacctgcccccgggaaagagaaagcctggcaccgtgggccaaccacagggcgtcattgttcttatcctggacgataaggacaacgttttgcccccaggcaaggtcggggaggtctccatcagaggcgaaaacgtcacactgggctatgccaacaacccaaaggccaacaaggagaactttaccaagagggagaactacttcagaaccggtgaccaaggctacttcgacccggagggtttcttggttctcacgggcagaattaaagagctgatcaacaggggtggtgaaaagatctcgcctattgaactggatggtatactgctgtcgcaccccaaaatcgacgaggccgtggcctttggtgttcccgacgacatgtacggccaggtggttcaagccgccgtcgtcttgaagaagaacgaaaagatgacctacgaagaacttgtttccttcctgaagaagcaccttgcagccttcaaaatccccaccaaggtgtattttgtcgacaagctgcccaagaccgccaccggtaagatccagagaagaatcatcgcggagaccttcaccaagagcagcaaaaacaagagtaagttgtga

SEQ ID NO: 228 - DNA, 2703 bp, Saccharomyces pastorianus
atgtgctccactaaggacgcaaagaatactgagaacaaaaatgataagagctcaacaagtgttcctagcaacaaatttgcaaatttaaaaccacatgattattgtacgggtccgggatcagtcaccactgaacacaaaaacaacgacaaagaaaaagggaagcaggaaaaggagaacaaagatggaacccctcattcaaatgcttctgcagaatcacgctctccgcaagtcagccatcattctgagaaattcccctcttttgattcacctttacattttccaagcctgaggctgccagatgacttgttatcaaacacgtcaagaagatcatcagattccacagcatcatcttctgtatccagactaaaacctgtccaaatttccaaagctgctttgcacccttgtcatataacgaataaactggacagtagagacggaactccggggtttgagtcgagggcaaacccctcatctgactcctctacacctcgattcatcgtatccaatatggtcgggaatggtcgtggaggaggcggcctacatggcgctacctcaaacgttgttcaaaaacttcactccaggaaaagatgggactggaacagcttgccaaactctgattcctctcttttaattagatcagcctcaggaaaccataatttcattaatatttgcatagacggtgaattcaaacaaataaagtacgatccgaatcataatgagctctttaatagaatggaccttttcctatcttttaatatggattcttcgccaaaagattcactaatttttgctaaaaaaaggttgaattcatacattgaatttttaacaacatacctaaagtccagaaaatacgcatttgagtgttatccatttaacattgaaagtatcataagcatcgaaactgaagttaaatctttcccgtcgtttgacccatcaaaggactattctgagattgaatcgcttattcaattatggctggcccaggcccagaagtttttattacaatcaaactcgttttttttttcatccgaagtggtacaggaattaatcaaaaggaaaccaactacaaggcaacattccaatcctataatcagttcgaccagcaataaactcagtgatcccacattatatattcaacaactagatatagagcaaaactccccgagaccagtattatcggatccattagatgaaattgacatcttgctaataagaccactgcataaaaccctggcaggttggcagctagcttacgacgagccaagcttaaacattgcggacttcccattggatttgtctcccttgatggttgacaatggcaacaaagatactcaaaacaacagaacagatgacaatagtgacctgcctgaagatttgacgaatttgcagaattatctccccaggaaaggctccaaagtaaaaattgtttccgatgagcgagaaatcattgagttaaactcttccaacgcttcagaatatatgtttgattgcatgaatagaaaattttttactaatgacgcaaaagagcgtattttgagaaacaactttaatcaaggcattgatgaagattactcaaatgatccatttgcttcaactagatctttatcattaccatcctcagcggcagaaataagcaagagaaagaaaagtcccgccaagggcaacaaaaaatcagggtttgttaatttttttaagagaaaacactcccaattcgcatcgacttcccatgctacgagtccttcaacttcgcctaacatatcttcttcttcttccccaaagatgcaaccacaatcacaccttcctagcaatttccgggcagacaaagtccatcataccaagtcaaccagtcaaacacttcagaacgaatggctagaaaactttttttgccgaaccttgaataactataaagaaattgatttgccaacacaatttatcctgccaaaggaaatcaagaatcctttgaattcacagccccaatcccaaggcgagtcacttatatcatcaccagcttctactgatacagaagacattgttccaaatgaaggattagatagagcaaagagtgcagccacctacggcaaagaatatctacaattaagattaccgttcgcttctgatactatacctgccgtaatatgcccttgggtttggacaagtttaagttattataaatggaaggctctactgagggagatatacaggtcaattattcctggcggttacgctcttgcaattgttccagacttaagaatatcgaatacctactataatgcaaatcctggcaatgacgacactaataatgctggagatgagtttttgacaacaaaagaaagagaaaagacattcgatgctatgtctattgatgcaatcaacaaaggccttcacattcatccaaccaagcacttaacgaaaacatttaaagacgtagggtttacagggattaaatcttcagttctaagcttaaaaactggtgaccttaaaacagatatggggtttttaaatgaactcaactcattaaatgcttgggatcatatgttaaggaagcaactgccagatagtagcactcctccaaaagataccgatccttccactctttttcaacgatatgtggaagaacatatgggaaaaattgacaacaattctggttgcttcagaaccttatacgttgtggcacaaaaaccaaagcagccatacacgaagtaa

SEQ ID NO: 229 - DNA, 1293 bp, Saccharomyces pastorianus
atgtccacagagactacaaaaccgcctctcactactactactacttcttctactgctgctgctgctgcagcagcagcagtgggtgccgccgtgctgaactcccccaacgttcttaaaagaaagaagggcgaagacaccaacgaggagcaactcgaggcagagatcaaacgggtggccctcgacgatgcggaggaccactcagacaccgataacgtccccttccacgtgcatttgcggatgctctgcctcgtgaaacacgcctcgctgatagtgggccacaaaggtgccacgatctccaagataaaaacagaaacctccgccagaataaacgtctcgaacaatatcaggggcgtcccagaaagaatcgtctacgtaagaggcacctgcgatgacgtggccaaggcctacggcatgatagtgagggcgctgcttgaagagcaggagcgcgaagacggagacagagacagagacaaggacgaggacgaggacgtcgaggtctccgtcaacctgttgatacctcaccatctgatgggctgcatcatcgggaagcgtgggtcccgcctaagggaaatcgaggacttgagcgctgccaagctgttcgcgtccccgaaccagctgctgctgtccaacgaccggatcctgaccatcaacggtgtgcccgatgccatccatatcgccaccttctacgtggggcaaacactgttgaacttccagatggagtctccacaaaagaaactgaaacgatccattttctaccagcccacccagttcaactctgtgttggtagaccatagccacccgaatgccgttctccaccagaggaatcaccagtaccacccaaacgataaaccgctttccagcagaccgaacagaaggatctccgtatcgtcaaccctgctgagcacgggccctccacagtataccactgccagcgcagcaaacgccacggcattccaaccgaacttcgtcatccctaacgtaaggatcctggacggccccgtcatcaacccaggcccgaacaatcatctgtcaatgagccttgtacagcaagaaatcttcatagacgagtctttcgtcgggaacgtcatcggcaaagacggcaagcacataaactcggtcaaggagtccacgggctgctcgatcatcatacaggacccggtggaaggctcccccgagagaagactgtccataaggggtaccttcatggcttcccaagctgctattatgctaatcagcaacaagattgaaattgatagattaaacgctgaacgcaaaagaagaacgcccctctaa

SEQ ID NO: 230 - DNA, 285 bp, Saccharomyces pastorianus
atggagcataccctttcgcccttacaacaggaagtgctaaacaaatacaagcagctttcgctggatctgaaagcgctggacgaaacaatcaagcagctaaaccactcgcagcaccgacaacagcacgaccaacagatcaccgtgtcgccagatgaaatattacaggaaatgagagaaatagaagtcaagattggtctggtgggaacactgctgaaaggtagcgtgtactcgctcattttgcagagaaaacaagaacaggaagctttgaatcgttctgatcgttga

SEQ ID NO: 231 - DNA, 1155 bp, Saccharomyces pastorianus
atgtcgttttccaattccaaagataaatcgattgttgccgtctacaaattagtcaaggcaccaatatattcccattgcttttcccaagataaatccatcttggccattacatgcgaaacggattgtttggtgtataaagtctcaggaagtcaacctcctgttttattcgccactttaaaagaccatgacaagaccatcaccgcagtggacatttctgttcatggccgtattgtgacctgttctcaagatcgtaatgcttacgtttgggagccattgagtaacgggacctacaaacccactttagtgcttctacgtatcaacagagccgctacttcagttacgtgggcatcaagtgggtacaagtttgctgtggggtccagtgctagagttattgccgtttgttattacgaacacgaaaataactggtgggtgtccaagcacatcaagaagcccatcaagtctaccgtcaactgtttgtcgtggcacgacaatggtgtactattggctgctggtggtactgatgggttcatgcctgttttcagtggattcatcaaaggtttggactccaaggaatccgtagccgggtctccctggggccaaaaatttccgtttggttccttgattaaggaatggtataatggtgcttacatccatgatgtggagtggagaagtcaaatggaaaggatcgcgtatgtagcgcacgatggtactttgaatgttgtcgattcccaatctgcagtacaatctgtcaatgctccagagggcctaccatacagatccttagtgtggatcaacgaccatgagattatttgtggggggtattcttgccacccggtcttgttcagcgaggcctctgaaggctggaagttcgccaagaacctagacaaagccgataatggcaagtcatctgccctgacaggagcaggtaacaacaacgagttggatggagacaacgaagagaacgcaacatttggtatctctgcgttgagaaagttcaaagagctggacctgaaaggtaaagtcagcactgatgttcaagaaagcgcacatgaaaatgctattgtggagttaagaccttttgcaggatccaatggccaagttacgcaagtttcttcgtgtgggctagacggtaagattgtcatttatacaatttag

SEQ ID NO: 232 - DNA, 3333 bp, Saccharomyces pastorianus
atggtcagcaggttttatcagattccaggtacacatcggcctgcatcggcagtgtcttcttcaaatgaatcatcgtctttgttgtcagcaaggcgaataagtcagacctactttaactatcaggctactcctgaatttcaaaaggtatcttctaagtatgatcccgataaccctaataaggataagttgggaacctacggtggtgtgtttgtacccacagcattgaatgttttatctattcttatgtttcttcggtttggctttattttaggtcaactcggtattatatgcactattggtcttttgctcctgagctatactattaatctcctcaccacacttagtatttccgctatatctaccaacgggactgtaaggggcggaggcgcttactacatgatttcaagaagtttggggcctgaattcggaggatctattggtcttgtgtttttcttgggccaggtattcaatgcaggtatgaacgccgtaggtatcattgagcctttgctctacaacttaggccattctgcacatggcgaacctccagcagctatgggagaactattaccaagaggacattggtacgagttcacatatgctacaataatcctttttctgtgcttttcagtggcattcgttggctcacaaaccgtgtctagagcagggaacatccttttcttaatattagcagcctctatattttccattcctctctctgcgcttataagatctccgtttgttgaaggtggaatcagttacacaggccccacatggcaaactttccgtgataatcttttcccccatttgactaaaggagctgcaggatcgttacttaagggcaaagaaacctttaatgatttatttggtgtcttctttcctgctaccgctggtatatttgccggcgcaggaatgtcgagtgaattaagaaagccctctaaatcaattccaaaaggcactttatgggggttactgtttacttttatctgttatgcgatcgttgttttctctatgggttgctccattccgagagcttcattacataatgaagtacaaattatccaaacaattagttcagcacaatgggttatattcatgggtgaaatggccacatctctattttctattattgtaggtatgctaggtgctgcttatgtgttggaagcaattgcaaaggataatatgattccaggtttagagatatttgctcataatccagtatactcattaattttcacttggcttttaactcaactgtgtttattttctgatgtcaataagattgccacatttatcaccatgacattcttattgacatttatagttatgaatttggcatgcttcttactgggcatttcttcagctcctaattttaggccttctttcaaatatttcaacaggtatactacggctgctggtgcattgctctctgtcgttgcgatgttaatcgtagacggtgtttctgcctccgttttatttttggctatgatcttactatttttatttattcactacttctcgcctccaaaatcttggggtgatgtatctcagagtctaatatatcatcaagtaagaaaatacctgctccgtttgcgtcaagacaacatcaaatattggagacctcagatattgttgtttgtagacaacccaaggacaagctggaacctgatacggttctgtaaccatctgaaaaaaggtggtttatatatcctaggccatgtagcagtaactgcggattttccaaagcaattaaatgagttgaaaacccaacagaaagcttggataaaaattagagatatggcagcaataaaggcgtttgttcaagtcggaaccggcccctctctcatatggggaatcagaaatgtttttattggttctgggttgggaggtatgaaaccaaatattaccgttgttggattttttgacttgaatacttataagaagcgtgtttcgcgaaataacgaaaacaatcaggagcgcctgcaagtaacagccaatttaccaggtagctcgtcttctgatataagaataaatgttccattgcctacggatgaatgcaaaaatgaaagcaaagttaatgttcaacaatgggttcaaattgtagaagacctgtcattaatgcaatccaatattgctatagctcacggcttcaaagtgttgaagataccaaataaaaaggaccgctgttctccaaggaaaacaatagatctttatcccattcagatgtgcggaaaagtccaggccacagatgatcagcctgcatcggtcactacgaattttgatacatatacacttatcttacaactggcagcaattctaataactgtgcctgagtggaaacatacacatgcgttacgagttatcttatttgtggaacaagaatatcatagaactgatgaagttcaacgaatgaaaaaactattgcaaattttaagaattgaagctgaagttctggtagtgtctttagatcagtttagggtatacaacactatcgtcaggggagattcaatcgtatttgattatgtaaacgcgaagctagccgataacgaatggtggcaagatttggtagaagctcgtgatactttgaaaccgaagcggagattttctaccattgaacctcaatcgatagcaaaacaattcatgcaatcaagaaagtacacttctcgagtccagaaactaggagtttcatttaccatgaatacaagtatgccaagcaaccggattgagaatccgtttgagagtgaagattctgatttagatacagatttaacatcaatccgcgatagcttctcaacgtctacgattgatccaggcagtaaggagccgacagtcaagtctaaggctggttctgatagaaccaatttatttgtaaaaaacttacaaaacaacgcttcaactcagtctttgagacctgtgttctcaagcaataccttaccaaggaccaaagtggtagaagacggaacgggtgaacagccaactttaatcccaattgtggaaccgaacctttcaaacgggaacgggaataaatcaaagagacctgttcttcccgaactttctccttgctgttcgaaagatagtttagttactgcaatgcaaaacttgggctttaacgatcttcctagtacagctcaacatttggttctaaatgatatgatgacacagatgtcaaagagttcagatttaatcttttcaactttaccaattccagcacttggaacacataaggatcatgaggcaagtctacaatatgttgaagacttagatatttggttggaaggtttgccgccatgtatgttaattaattcgcaaaccatgactgtaactactgcattatag

SEQ ID NO: 233 - DNA, 2553 bp, Saccharomyces pastorianus
atgaaaagtattggttcgacagaaaatagagagagggagtctctactcgaagaaaggagaaaaaaactagcaaaatggaaacaaaagaaagcacaatttgatgctcagaaagagaatcaaactctaaacagtaacattgttactaacagttcagagattaagcagaatgctggaaagtttgccgcaaggcaggaaaaggtgaaagaaaagcttcgaaaaaggaaaattgaactagagaaacctcatcagcgtctattggataaaccttcaaagaaaaagtctaagaaaaacaagaaaaaggacaaggtgtctttcgaattcagtgataatgaagaagcagtagcagtgaatgctttctcaatgaacgaagactttaaagacatagcggagcacgacgatgagaaggatccattagatgagtttatgacatcattgaaagctgaagagactagccgtaataaaatcttgtacgattcaggagtaatcctggacgcagatgatcaactggttgaattggaagaagctgatgacgaaaatattaacgacagcaccgataactctaacatatctaaaattgccaaactaaaagcgaaaaaacgtgtaaagcaaattaattatctgccggaagaactggagtcatttcaaaagaacttctatgtagaatctgaagcaatctcctcgatgactgagacggaagtagaagagctcagactgagcctggacaacatcacaataaagggaacagggtgtccaaagccggtaacgaagtggacacatttggggctatcaacagatactatgaatttaattaccaacaggttacgatttgactctttaaccccaattcaatcccaggcgctgccagccatcatgtcaggtcgtgatgtaattggaatatctaagacagggtccggtaaaaccatatcttatcttttaccattattaagacaagtgaaagctcaacggccattatctaagcatgaaacagggcctttgggtttgattttggcaccaacacgggagttagctctacagatacatgaagaagttaacaagttcacagaaacagacgcaagcataagatcggtatgctgtacgggtggctctgagatgaagaggcagatcactgatctcaaaagaggtgctgaaatagctgttgctacgcctggaagatttattgatatactaactttaaacgacggaaaattgctaagtaccaaaagaataacatttgtaataatggacgaagcagacagattattcgatttaggctttgagcctcaaatcacccaaattatgaaaacagttcggccggataaacaatttgttttgtttagtgcgactttcccaaataagttacgtagttttgcggtcagagttttgcgatctccaatatccattacaattaattcgaaaggtttggttaacgaaaacgttaagcaaaagtttaaaatatgtcaatcagaagatgaaaaatttgataacctgatacaaattgttcgtaagcgcaacgaattttttgatgaggctcaaaccgaagttgacggagacacgagtgatctcgaagaagttgattctaaagctattatatttgtgtcaagccaacagatttgcgatttaatttccaaaaaactgacaaacgtgggcgttgtgacctacgctattcatgcaggcaaaccgtatcaagaaagagtcatgaatttggaaaaattcaagagagagaaaaatagcattttgctttgtacagaagttctttcaagaggcctgaatgtgccggaagtgtcactggttatcatttataactccgttaagacatttgcgcaatatgttcacactaccggaagaaccgccaggggtagtcgttcgggtattgccataaccctcctgctaaatgatgagttgtctggggcttatatcctaagcaaagctatgcgtgataatgaactgaaagcttgtgatcctttgcaaaccaaggaactatatgaaatgagtgagaagtttgaatcgggtatgaaaaagggtaaatttaggttgtcgaaaggatttgggggcaaaggacttgaaaatatcaaaagcaaaagggaagaagcccaaatcaaggaattggaacccaagaaaggtcaaaagaacaacgatcaattggagaataaaagcgaccattcatctaatgagcacgctaatgaagcggaatcatctgcgcatattccaaaattggaatatcaaatcttcaaagagcctacattagagggatccattatcttttatgccaaagtttatattaacgacctgccccaaattgtaagatgggaagctacaaagaacacgacactgttatttataaagcacgaaactgggtgtagtataactaacaagggcagattttatccggaaggaaaggaaccgaaaaatgacacggatgaacccaaattatacttgttgatcgaaggtcaagatgagaaggacatacaattgagtatcgaattactagaacaaaaagtaaaggaaggggtcataaaggctgcaaatatatccttgaaaagtacaaagtattga

SEQ ID NO: 234 - DNA, 1584 bp, Saccharomyces pastorianus
atgtccacttcagatgacaacgactacaacacaccgcgtgctcgagatacacccgtagatataagcaggtccctcggggaaaaaaggaagaaaagaaagaacacaaatgtggcatgcgtgaactgttcaagactgcatgtctcgtgtgaagccaaacgaccatgtttgcgatgtatcagtaagggtctcacagccacttgtgtcgatgctccaagaaagaaaagcaaataccttgcagggattccgaataaagaacttccaatgaatatacggccggatcatcctcgcaagatcatgatacccatctataataattccaacaacagctccactggtataaacaacataggagagcaacagaagtttacgagcccacagcatatcgttcacaaagccaagttcatgtcgaacgctgctgactctgagtactccattctatcgaacataatctatcaagatacgttgtccaataagatccccatcgacattttatactccaacactaattctgcatccaactccaccatgggaaatagcagcaataacagtcccacggggacgaacacaagtcccgaagaaactgaaacggagaaaatccgccagctctacagcgaacagcgagcgaacatggcctcgcatccgtatccgtcttccaatcaaaatgtttattcaatattgttggggaccaattcagccaagatcgtggcctcgcatgttaatttgtttgcaaatcacttccctttggttcctgtagagccacttgatggttctttaaacttcaaaagattactaccgaaaagcccatccgaaaagggctcgcaaataaactgggatgcaagcataaaccagtactacttgaacagcgaaatagtgacgttccctgaattagccctacccttgaaaaagaaaaagaaccatttagtctctgtatcattggaaagctgttcgccggacgccacaaatataaagagtaatgtggaatgggaacactccttgagatattccacgccaatggaaatatacacttcgacaaacgcaccattctcacacactcccgggttccaccatcttttagtgtacttaaagcatcgattcaaccagcaggatctggtgaagatgtgtcggtccatcgccgagttccgacccattttcattgcgtgttcagtaacattaactgaagaggacatgattttcatggagcaatgctatcaacgaacgctattagaatacgtaaagtttataggacagatcggcacgccgacgtgcatttggcgaagaaacggccaaatctcttacgtcaacgaagaattcgaaatcttaagcggttggacgagagaagaattattaaacaagatgacgttcatcgtggagatcatggatgatgaaagtgtacgagattacttcaagacgctctccaaagtggcgtacagagactttaaaggttctgagaaaatgaaagtctgtagactcctgagccccatcaagggtaaggtgatccattgctgttgcatgtggacgcttaaaagagatgtctccggattgcccctgatgattcttggtaatttcatgcccatactcaattga

SEQ ID NO: 235 - DNA, 1356 bp, Saccharomyces pastorianus
atggtcaattgcaagaaacagcagcggaacaagaaggtaacgctatcctcgaagccctcccccaccaagggcagaacatttactggatgctgggcgtgcaggttcaagaagcgcaggtgcgacgagaacaggccgatctgctcgctgtgtgccaagcacggggacaggtgcagttacgatatcaggcttatgtggctggaggagaacatttacaaagtgcgcaagcatgcgctgatcaattccatgcaggccggcaaatcgaaaccactatgccagaagatctccaagagcaggttcaaggagatgacccatttcagacagctctcgcctccaacaagtgacagtgaagacaccacgcaggagcccagcaagaacaccgtgctccccaacgagaacacattcacgataagcgtccggcggttgaagatctacaacaacgcggtggcttctgtgttcggcagcctctccaacaggaactacaaccaaaagcacatagacaagaaattggaccagttgctggacatggtggaaagcgacatatccattgctaacccgagctgtgccaaacacggtccttactcggttttcaaagccaacccggatgcctccacgaccgccgccacgataacgctcacagatccgcttccgtcaccaggccactccctgtcttctgccgatgaggcgactgcaaacatcctgtcgtcgccggaggacaccacctcgctgatcgatatcatccagggcaagatcttcgggatcctgtggttcaactgttacgggaacatgatcttgaaccgacaggagtacacgacgtggttcatcaacaagatgaggaactcgctgaccacagaattcgtccgctttctggggaaaatcatagacgatccggacatcaacatggcttcgtgtctgttcaaagagtgcaccgctcgttgggactgcgtcgattggcagtccatagctataacaatgctggtcatcatccatggatacacctgccccaacctgacaaagctccttagagtgtggttcctccagcaactatccttgaagttctctatgtatccgctgatcaactttatcataaacaacacgcaggatttagacgttctgtaccactgcaacgaattgctgggcaatgcggagttgttcgaagacccttaccaggacgaactcacttccgaactgcatgtcttggtcacggagcgtctagtgaacaactggaaggacagaatactgcagcagctttgctcttgccaagacactacactttcatgttctcaattacggtattggcaactacaattaaaatgcaacgaacaattttataaagatgtctacgccatgcaggattag

SEQ ID NO: 236 - DNA, 1470 bp, Saccharomyces pastorianus
atgactgaaacggaaagactaatgcctagcagtggctctcagaacaggaagccgtcaattacaggccacttgatcctgagcatgatagtggcgtgcttggggtctgtccagtacggataccacatagcagagttgaatgcgccccagcagttcttatcgtgctccaagtttgactcccccgacgagaacatatcgtacggagacacctgggtgggccaacacggtctcaagcaatgtattgcgctgagcgattcccagttcggtgccgtaacgtccatacttagtattggtgggctgtttgggtcgtactacgcggggaactgggccaatcggtacgggaggaagtacgtcagcatgggcgcctcagccatgtgcatggtgtcgtctttgattctcttctactccaactcgtatctgcagctgctcttcggcaggtttctcgtgggcatgtcctgcggtaccgcgatcgtaatcacgccactgttcatcaatgagatcgcgcccgtggagtggaggggtgccatggggtccatgaatcaggtgtccatcaacctgggcatcctgctgacgcagaccctggcgctcaagtacgcggactcctacaactggagatggttgctgtttgccggctccgtcatagccttggcaaacattttgatatggctcagagtagatgagtcgcccagatggcttctgaacaaggggtttgttcctgaggcggagatggttttgttcaagctgcgtcccggcacgtaccagcaggcgaagcaagagatccaggactggcagcatgacgacgcacaggaccgcgactcggagtccggcgcaacagcaacacactcgggacccacactgtggcagtatgtgcgcgacccctcgtacaagaagccgcgcacggtcatcctgaccatcctgtcgtgccagcagttctgtggcatcaactcgattatcttctacggcgtgaaagtgatcggcaacctcctgccggactactcgatccagatcaacttcgcgatctccatcctgaacgtcgtggtgacgctgcttgcctcagcaatcatcgaccacgtcgggcgccgcccattgctgctcgcctccaccacggcgatgaccgccatgtcgctgctgatcagtctcagtctcaccatgggcgtgtccttcttgctagtcacggccacgttcgtgtacattgccgcgttcgcgatcggcctggggcccatcccgttcctgataatcggcgagctgtcgtacccgcaggatgctgccaccgcacagagcttcggtactgtgtgcaactggctggccaccttcatcaccggatacctcttccccatagcccacggcctaatgggcggctacgtgttcgcgaccttcgctgccatcgcggccctgtttgcaacgtacgtgtacaagagagtccccgagaccaaaggcaagactacgtacagcgaggtgtgggccggctactga

SEQ ID NO: 237 - DNA, 489 bp, Saccharomyces pastorianus
atgtctacctctttttatgacttagaatgcaaagacaagaaaggtgaaaccttcaagtttgaccaattgaagggcaaagtggtgctaatagttaacgttgcttctaaatgcggtttcactccacaatataaagaactagaggaattatataaaaagcatcaggataaagagtttgttatcttgggcttcccatgtaaccagttcggtaagcaggaacctggctctgatgaacaaattggcgaattctgccaattgaactatggtgttacattccccatcatgaaaaaaattgaagttaacggaaacggcgctgatcctgtttacaatttcttgaaaagccaaaagtcaggtttactgggctacaagggtattaaatggaactttgagaaatttttagtagatgctaatggtaaggttgtccaaagatattcttccttaacaaaaccaatgtccttagaccaagaaatccaaaacatggtaagcaaatga

SEQ ID NO: 238 - DNA, 1164 bp, Saccharomyces pastorianus
atggactccattcaagaatccgaggtacttaatgctgtaaaaacaaaattaccaccatgttgcttgagaatattcaagaataaggtaattctagtgggaacgtatgacttggataagtccacaggatatagatcaggatcactggatgccttcacaatggatcttaaacctttgtgctcctacaatacatatggagccattttagatttaaaactatctcccttcgatgatacattaatatgcacagcccactcaacaggtaatattatgctatggaggattgattgctcagaggtgggcgagagtgaagtagaggaaattaaaatatctgaaattgcaactttacagctattcgacaaggatgttctcatagcttcatgtcatttttctccactcgatcctaggcttttagtggtgacgaatacagtcggtgaagccgctaccattgatataataagactaaccgtaaaatttacagcatcagcggttaatcaaacgtactccaagttagataaaatagattatgaagttcaaggtgcaactcaaaaagtcattcaagttgaaccagagcaatttctaaaaccacatggtttagagtgctggacggcagagtttggttgtctacaacctttccaagatatagtattcacaggtggtgatgattctacaatcatggctcacgatttacgttcgaaagatttcgtttggagtaatggtcgcattcacgaagccggtgttgtcggtatcaaatgtagccgatctagctttcgaaacgataaaccaacttcgataataactggatcgtatgacgataccattcgttcactagatttaaggatgatgggagaatctatatatcctggtgagaatgtgccggtagtacgtaagttggagtgtaaccttggcggcggtgtttggaggttcgccgagcagcctattgattttagtagctctttccgtgatggacttgacagacttttggtctgctgcatgtatgacggtgccaaaatagtggcattaaacgataattcagatgaatatttccaaactcagcattacctaaagaagggacacgactcaatgtgttatggtggggactggtcaaaatcgttgattgcaacatgctcattttatgataactctctccaaacatggactgtttag

SEQ ID NO: 239 - DNA, 1443 bp, Saccharomyces pastorianus
atggcaagagcttcttcttctagaaacaaaaaacaaagacatgatccacttttaaaggatttggatgcagcccaaggtaccttgaaaaaagttaacaaatggaaagtagcaaaaactgaagctgctgaaaccgatgctggaaagggtgaagatggctatatagattccaaagcatcgagaaaaattctacagttggcaaaggaacaacaagatgagatcgaaggtgaagaacttgctgaatcagaaagaaataagcaactcgaagccagattcaccaccatgagttataacgacgaagatgacgatgacgatgaagaggaatttgaagaggatatatcagatttcgagccggaaggagattataaagaagaggaagaggttgttgagattgacgaagaagatgctgcgatgttcgaacaatacttcaagacatcaaatgactttaattctttaggtggtagctacaaccttgcggataagattatggcctctattaaagagaaggagagccaaattggagatatgcaagacgatgaacaagctgctaatgaacagggtacctcaagaggcaatatatcatccggtttgagaagcggagaaggtgttgcattaccggagaaggttattaaagcatatagcacggtcggtagtatcttgaagacctggactcacggtaaattaccaaagttattcaaggttatcccatctttacgaaattggcaagatgttttatatgttaccaacccggaggaatggtcaccacacgttgtttatgaggcaacaaaattatttgtatctaacttaacagccaaagagtctcagaaattcatcagtctaattctacttgaacgtttccgtgaaaacattgaaaccagtgaagaccactctttgaactatcacatataccgagccgtaaagaaatcgctttataaaccaagtgcctttttcaaaggctttttattcccgctggtcgaaacgggttgtaacgtacgtgaagccacaattgccggaagtgtgcttgctaaaatctctgttccagctttacattcttcagcagccttaagttatcttttaagattgcctttctctccacctacaaccgtattcattaaaattctacttgataagaaatatgcattaccataccaaacggtcgatgaatgtgtttattactttatgaggtttagaattgtggatgacggcagtaatggggaagattctacaagagtgctcccagtgatatggcacaaagctttcttgacgtttgcacagcgttacaagaacgatataacccaagaccaaagagatttcttattagagaccgtccgtcaaagaggtcacagggatattggtcctgaaattagaagagaactattggcaggtgctagtagagagtttgttcctcaaggagctaatgatgatttaatgatcgacgtcaattag

SEQ ID NO: 240 - DNA, 1113 bp, Saccharomyces pastorianus
atgagtgaatccccaatgttcggtgccaatggcactccaaacgtaaatgaagctgctgaagaagatgtcagaattttaggttacgacccattagcctctccagctctccttcaagtgcaaattccagctactcaaacttctttagaaacagccaagagaggtagaagagaagctatagatatcattaccggcaaagacgacagagttcttgtcatcgtcggtccatgttctattcacgatctaggtgctgcccaagaatatgctttgagattaaagaagcttgccgaagaattaaaaggtgatttatctattattatgagagcatacctggaaaagccaagaactacagtcggctggaaaggtctgatcaatgatcctgatgtcaacaacactttcaacattaacaagggtttgcaatccgccagacagttgttcgtcaacttgacaaatatcggtttaccaattggttctgaaatgctagataccatttctcctcaatacttggccgatttggtctccttcggtgccatcggtgccagaaccaccgaatctcaattgcacagggaattagcctccggtttatccttcccagtcggtttcaagaacggtaccgacggtactctgaacgtcgctgtggatgcttgtcaagccgccgcacattctcatcatttcatgggtgttactaagcatggtgttgctgctatcaccaccactaagggtaacgaacactgtttcgtcatcttgagaggtggtaagaaaggaaccaactacgatgccaaatccgttgctgaagctaaggctcaattgcctgctggctctaatggtttaatgatcgattactctcacggtaactccaacaaagattacagaaaccaaccaaaggttaacgatgtcgtctgtgaacaaatcgctaagggtgataacgccatcaccggtgtcatgattgaatccaacatcaacgaaggtaaccaaggtatccccaccgaaggtaaagctggtttgaagtacggtgtttctatcaccgatgcttgtataggctggagtactactgaagacgtcttgagaaaattggcttctgcggttagacaaagaagagaactcaacaagaaatag

SEQ ID NO: 241 - DNA, 924 bp, Saccharomyces pastorianus
atgtttaggaggcaattctcaactagtgttcgttacttacagcactatgacgagtcgctattgtcaaggtactatccagaaagtctactaaaatccataaagcttgctcaacaaacaattccacatgacaccaagttcaaaacctcccgtaatgtggagtttgcacccccatatttagatgatttcactaagatacatcctttctgggattacaagccgggaatgcctcatcttcacgcacaagaagaggaaaataactttaccacatttagatgggaccaagttcagcaaccgttgcctggcgaaggtaacattctacctgcgggagtcggtctgcccaatgatagcggtaggaagtcgaagaatgcggacgtggctgcagggctacacaagcaaacaggtgtggacccggattatattaccaggaaactaatcatgaaacccttggttatgaaaagggtatcgaatcagaccggtaagggtaaaattgcgtccttttatgccctggtcgttgttggagataagaatggtatggtaggtttgggagagggaaaatcccgtgaagaaatgtccaaggccatcttcaaggctcattgggatgcagtaaggaacctgaaggaaatacccagatacgaaaatagaaccatatacggtgatatagatttcagataccatggtgtaaaactacatttaagaagtgccaaacctggctttgggctacgtgtaaatcacgtcatttttgaaatttgtgaatgtgcaggtatcaaagatttgagtgggaaagtgtacaaatccagaaacgatatgaatattgccaaggggaccgttgaggcgttcgtcaaagctcagaagacactggacgaagttgcattgggtagaggcaagaagcttgttgatgtgagaaatgtctactattcaagctga

SEQ ID NO: 242 - DNA, 534 bp, Saccharomyces pastorianus
atgcctcagtattttgccattattggtaaaagggacaatccagtttatgaaatcgaattcaccaatgcgcaaaatccacacggctttccccaagatttgaaagagttgaatccgtttatattgcatgcatctttagatatcgttgaggacttacaatggcaaatcaacccggcgtcccaactaaataatggtggaaatggtgcgaacggatccaatggtgggggcggatttcttcgatctaggactgtaagcaataccgataattgttatttgggtaaggttgatcatttttatgggctagctataacagcttatataagttatggtggcatgaaatttgtcatgattcatggaaactcggcaaacagcagtgtggcaattgacgataataatgtaagaacgttttaccaagaagtacatgaactatacgtaaagacactgatgaacccgttttacaagatcaccgatcctatcacgagccctgcattcgattcgagggtaaagatgttggcgcataaatacctctccaaatga

SEQ ID NO: 243 - DNA, 2085 bp, Saccharomyces pastorianus
atgactctttcagacgagcattataatacagctaaacagcaagaaaataaaaataggaatgccacaacggcaatggtaaatccgcagaagataaaactagttaccaagcttcttattgataataaatttggattaatggacgacttgaattttagtaggccattaactgcttcttcggaaggtgtaccaatatctacaaagacatctgaaatgggtatggagtatctcaaaaaccggcaagaaaattcagtgagtccattgccccccatccctagaagtacaagaataaaagccgacagagtaagaatatacctggattactattacagtatactagaacgttgcatatcaatagataactcccagaatcatcatgaaggtgttgaaggtgtatacaatccattacaagtcattagaaatcgaaaattaaagaaaaagcatcatgaattacccacaagagagttttacaccacgaaacatcctgtcattgccatcaagcaatttacccacaaaactaatagaaaaatgccatggtttgtggacataaacgaaaaatatatggatttgacttggagaacttcacactgggaagaattaacagatcctcaaggcaaactttggtttcaattcagtagcccatctactgaatcgagcggatcatcatcgtctcgccagcatcataagcgtcatcggagccgcttaaggcatcactcgagggccccaacggcatcttcaaatactatattattacattcaaacactcaatcactagcgtcgaaaagagccgtaactaatgaagaaactaacaatagcaataacactacggttaaaaaaattctaacgactccagaagcacagatttcaaagaacaggaggtccgatccaaatttcaatcacatccgcttggaagtgccgataactaacactattacaaacaattcctcagatcaagggtcattgatcctcgaggtcaaaggcagtagtggtcgtggaaacactcggcgtggaagtaataatactagtgggagcggtgggaataaaagctctaagcattatcgttcgatatcagcaagctcttcagaaaacgaaaaatcaagactgaatggccttgaaaaaataatcagtaaaacatcgaaaggatgggccagatcaccgaagaaaaatacgcctactcttgaaaagcaggtccttttaacccccgttattagcaatggaggaacaagtagaaggagtagtaacaacggggcgagcatcagtactagtagtagtaagagcagtgtgggcatcacgtttggaaatggagaaagttacaagactccaatggataatggtaaagatgtcctaaaaagacagagtttgctgagcgaggtgcccgttcatactttgagaggaaagaacagtactaactcgttacttaacgagaatgaacaggttctcgaaagtgatcatgaaagcccgagtggtgctgataaaatatacgatggtgtgtctagggaaaagactgctagtgatggtagtgaaaatgcgggaatggtaagtgattctttacaggttgatgggcagctgcagaaatactggcacgatactaggtacattatgagcacagtagctatgatgcaacatagaagagagacgcatgacatagtgaaaaggagagaaattgttcgtaggaaccaaattgagatttcacaagatgtagatacgaacattaagaagacttcggaagcattagccgaatatgataatgaattgaataaagttcttaaattaggtaatgattggacatcaagattactgaacgattattcaatccgtgtagaaactctgatttcttcaagtgacagaattcttagtgatataaacacaacactgacattgaagctgaaactatttcaagaaaacactgaaagatatgttacagtgaaagttatgagagcccaaaagatgactaaaaccatatacgggctattagaatttggtatcgtaatagtcctttggacgatttggttttttttcagtatcttgagaagtatccgtttcagtattatattagtcttaaaaatgattaaagcattgatatggtag

SEQ ID NO: 244 - DNA, 717 bp, Saccharomyces pastorianus
atgttcactggtattgtggaatgcatgggaaccgttttgaagaataatccgtacgatgacactgaaagtggagggcagggtgtctctataaccatcggtgatgctggagatattctttctgattgtcacataggcgactcgatagccataaatgggatatgtctcactgccactgagtttgacactgagtcatttaaagtcggaatatcaccggaaacaataaagagaaccaatgtggcttcgtggacccagggagccaaagtcaacttggaaagagcagtgtctcaagacgtgaggtttggtggccattacgtacaaggccatgtagacaccgtcgccaaaatcgtctcaagaaaacctgaaggcaattccataatatttggattccagttgagggaccaagaatatttcaaatacatagtggaaaaagggtttatttgtatagatgggacttccctgactgtaacccacgtcgacgacctttcaaatggcggtgccttttatatcagtatgattaagcacacccaagacaatgttatcatgcctttgaagaaaataggtgacgaggtaaacattgaagttgacctaacggggaagattatcgagaaacaaataattttgactttagaaaatcaaatttcaaagcaagatagtactctgaacactatgattacaaaaatcattgaggataaggttaaaacctatttagataaatag

SEQ ID NO: 245 - DNA, 426 bp, Saccharomyces pastorianus
atggcgtatggtgtagaagatggtaaaaaactatcggacaaatacaagaaagaggggcattttgacaagctgaaaagagacatactatccaatacttggaacggcacagaggagggaaacgaatcgtttgaacagatgcttcgagacagagttgccagtgtggtgaaagaaatggtcaaagaagatgaaggtttgatattcaaaaaccgagggctgaccagtgcgttgatagaatcacagttagttaaagacaactactcaaaattaaataataaaaatgatgatgatgacaatgatgcgagaaagtttgaactagacgcatatatacactccaaactgcaagatcctaaactattagaaatgataaagaaacaacttagtgaagcagcaggctcgcagcaagaggaatcaaatggacgtacgtaa

SEQ ID NO: 246 - DNA, 1185 bp, Saccharomyces pastorianus
atgagtaacagtggtgtttatacgtgtaattcatgtgtgttgaagtttgatgcaagtgaggaacagcgggctcacatgaagtccgactggcatcgttacaatttgaaaagacgtgttgctcagttaccaccaataccgtttgagacattcgattcgaaagtgtctgctgcagctgctaatagcaatgaagtcgctgggaaagagaagcctgttaccaagaaggaactgaaaagaagagagaggcaggcgttgcttgaaaagaaaacgaaactactggagattgccagggctaatatgttggagaacatgcaaaagagtcaagacggagaggttcttggtatgagcaaactatctttgcaagaaaaagaagagactaaggaaaagaaggaagtcaaggaagatgaggagcctgaagaattgaccgaggaagaaatggcggaaagattgatggaacagaaactgcgtaataaagtggacatccccttagaacagtgtttgttctgcgaacataacaagaacttcgtcgacttcgaagagaatttggaacatatgttcaggacccatgggttttacattccagaacagaaatttttagtcaataaatcggggttggtgaagtacatgtccgagaagattggtcttggtaacgtttgtatcgtctgtaatttccaaggcagaacgttgactgcggtgagacaacatatgttggcaaagagacattgtaagatcccctacgaaattgaagacgaaaggctggaaatatccgagttttacgatttcacaagctcatatgcaagctacagtaacaacacagcagcgggcaacgaagaggactgggaagatgtgggcagtgacgaagccggcagcgacgatgatgaaccaccacaggagtacttatacaacgacggtacagaattgcatctaccgacaggcatcaaagtcggtcacaggtccttgcaaagatattacaagcaagacctgaagcccgaggtgatactgaccgaaggccaaggtactctggtcgctgcggagaccaggtccttcttgcccatattcgacaagctgggtgtgcagacacaacagcgtgtctggcaaaccgagaggttcgacaagaagagactggacaagagaagcgccaagttcgtcaacaaccaaccctactacagagaccaattgctgcaatga

SEQ ID NO: 247 - DNA, 318 bp, Saccharomyces pastorianus
atgttggcgcgtagtgtgggccgtagatggttatcgacgagtcgtgtcttttacaacaaacaagcggtcaaggtggttgcatcatcgtgccctgccggaacatcgctgaatctgaacatatggaaaagcggtaaggacgcccaagcactcgaagacaaggagtatccaagctggttgtggagcgtcttggatgccaagcaggccgtcgatcataccgctaaggatccggggggggaggccctgtcgcagagaaagaagaacatcaggaaggcaaacagacagcaaatcaaacaaaacaacttcctaagtcaactatga

SEQ ID NO: 248 - DNA, 1251 bp, Saccharomyces pastorianus
atgtttgaccctctggacctgtatactcctgacgaaattcagcctgaacctttgcaatccaatctggcaaagagcgaggcaaaagagttgctcgaagaacgacatgacgtgacatttgcgattgaggatgaaaataacagcgacgacgatgacagcgttatagataatctagatttgccctccgtaaggtatgctccgccggaagttatactatgcgtgctgttacttttaagacctgataagcaggtgaacttcaaccagggaacaagcaagagtgaatctgtgctcgagatgtgtgaaagtcatgggctgaaacctgatcagctaaaaagactcctaagttggtatacagaggaatggcctaacaaaagactaaacacgttagagaaggtgtgcagtaagatcccaacgctgcggtttatggtatccaaagaactgttattaggctactatactacaatattgaaaaaatacaataataatgacgacaccagcaatgaaaccgtccagcaacttcttagagagttaagctcaaggatatccgaaaactgcggcaggacagcacaaccttctattataagatattttgaactaaaaaatttaaacagtgccattccactctatgaaccatcattgacagccgataatcttggttggaaaacctgggggtcctctttgatactttcacaactagtagtagattacctacacaccacagacatgctaccattggcgaactgcggcaccaaaaggattaaagtcttagagttaggttctggcaccggtttagtgggactttcatgggctgccaagtggaaggaactctacggaattcacaacacagaaatctatgtgacagatttaccggagattgtaacgaacttggaaaagaacgtagtacttaataacttagaagattttgttcaggcagaggtactggattggactaatcctcaggatttcatcaatcaatttggtcatgaaaaggactttgatatcatatttgttgccgatccgatctattcacctcagcacccagaatgggtcgtcaacatgatatcgaagtttctggcaccatcggggacttgtcatttggagatacctttgagagcgaagtacgcaaaggaaagagaggttttgaaatctttactgaaggattatgatcttaaagtgattaaagaaagttgttccgaaggtatggatgattggggggtagtaaaatatttgtatagacagattgttcgcaactga

SEQ ID NO: 249 - DNA, 5658 bp, Saccharomyces pastorianus
atgtccaacgatttttcagataagaagaagcataccatagatcgaatcgatcagcacattcttcgaaggtctcaacaagatgcccattccagtgggaactctccatggatgaaggccaaattgccacctccgccttctccacaagcccatatgcacatacaaagcgacttatcaccaactccaaagagacgaaagctagtatttccaagtattaacgaaaacgatcagttgcatttgtcagaaagtcacgaacatataagcttagaatatacacaaagtaagctaatgcaaagtctacctgaaatatctgcttcaaacagtaacaacgtatctccagtgacaaaaagtgtagctttttctgatagaatagaatcgtcaccaattcaccacataccaggttcttcaccaaaaccttctccatcaagtaaaccgggcaaatcaattttaaggaacagaatgccgtcgacgagaactgtaagtgacctgagctacaacaaactccaacattctcagcaccagttgcacaacggtaacatttttacatcgccttataaggaaactactggaataaatcctcgtactttggattattgggttagcggcgaaatccatagtttaattgataacgaaagcgtttcagagtttaaggatataattgagggtggactgagcattctgcgccaggaatcggaagagtatgtggccagaagatttgaggtatatgcgacatttaacaatattatccccattttaacggcaaaaaatgttaacgaagttgatcagaaattcaacattctcatcattaatgtagaaactattatcgaaatatgcatgcctcatctacagatgactcaggacacattgctgagttttagtgaaaagaaaaatccattcgtaatcaggctgtatgttcaaatggtacggtttttcggggctattatgtccaatttcaaaatcatgaaatggctaatgaaaagaccagatctagtgaatcaactgaaagctatttacgaatggacaaataaagcactaaaaagtgaaaattcaaataagataataattactgctcaagtatctttcttaagagatgagaaattcggtacttttttcttaagtgatgaggaaatcaagccaatcattgacactttcactgaaataatagaaatcaatagcaacaacctaatatgcgaaaaactgctactcatcagaggatttttgagtaagtatccaaagttaatgattgaaacagtaacttcttggctaccaggtgaagtactacccagaattataattggggatgaggtttattctatgaagattctcatcacttccatagttgtgttgctggaactcctgaaaaagtgtctagacttcgtagaagaacatgaaaggatttaccaatgtgttatggtttcgcctgtaacagaaacaattaataaaaagtttttatctagattaccgttaaactcaaatgatgctggcgatcttgacaaaatcaaaataggccatctgctgacggagcaaataaaatattacattgtgaaaaaaaatgacaataaactagcaatggacttatggctttccatgactggactgctatacgataacgaaaagacagtatatgatttgatatcggaatccagcaaaacatggttcgatctaaatcatttgtgctttatgaacgagcaaccgaagacccgcttaatgtctattaaggtttggagaattattacttactgcatttgtacaaaaatatctttgaaaaatgaagaaaagaacgaaaggttactgtcactattacaaactccttttcagatgacattgccacacgtaaatgatccgagtgctagagaaggaatcatttaccattttctgggtgtcgtttacactgcattcacaagtaataaaaatttatccatggatatgttcaaccttttttgggacagtttaattgccccaatttatgaaaattttgttttcaactataactctattcaattacagaatgtgcccttaacagttttgcatttactaattgggggtaagaattctgatgttgtgttggagaggaaaaacaaaaagcatattcattctatgagtgtaatagcctcagaaggtgtgaaaatcaaagacatttcgagcttacctttatcaattatcaaatccgcatatgacaaaattatgaaggtcgtgtttcagggcgtaaagacagccatgtctaatgtcaacttagcccatgatttgattcttacatctttgaaacatctcccagaagatagaaaagatcagagccatttagaggctttcagtagtttgattttggaagttgcagaaaataacaaagataaaccaatttttcgtgaattttttggagctgtatgttcttcgtttgttcacgcatttttagacttgttcttaagaaagaatgattcatctttgataaacttcaatatccgattttcacaaatcggcagtccacaagaaaatataacacttaacctgttgaaagatgttattcggaaatctcggaacgagacatctgagtttgtgataatggaaaagtttctagagttaaaggataagaaaactgaaatatatgcccagaattgggtcggttcaatactgctagcgccgaacatatccttcaaggaattccaaagtttggcaggcattgtagatcaagttccaaacgaacactccattgaaaactttctggacctgtgtttgaagctctcttttccagttaacctttttgcattaattcatgtgtccaaatggtcaaacgataattttatttatttcattcaaagctacgtttcaaaaaataaaaataaactggatacggatctagtcgcgctattaaaaacctctttgccaggaaacactgagctattcgtgggtttgcttccatttttgatacaaaacaaattcatgagtatcttggaatactgtgtttgctctaatcctaatttattgagctatatttctgatgtcaattctgatttactactggaattattaccacgtagtaggacgtcctatttcgttgcaaatatacaatcattcaagcatgccgaacagctgatcataatctgttggttattggagggccaagaacttgatcagataaataaaaactttccagaaataaagaatatcttgttacacactccttccgatgaattggaaaaatcgaatataattagagaacttcttcaacaagctacgaaaaatccaattgaaccgttatttagcgagttattggacttctgcatagacaatagcacagtgaatattctggatgaattctgtgaaactatgaatgatgaaattcttttaaaaataaacccgaaactactgttgggactaataacgtatagaggcaagccaaatgaggctttgctaacagtacttgctgaaaatattgggagtgccgatagcgaatacaagttcgagttacttgaaaagatcattgcacgcaaggaactttcaattttggaaagattgaaagaatcatttttcattttcttgctggatccagttagtaggtcaaacaagcaaaaccatgacaatggtactaaaatgttttgcgaactggttctgctataccttaccaaacctctttcccggggtgctgctaagaaattcttttccatgcttattagcatattaccggcaaatcctgaccgtcaaagtatagatttggttcatttactagttgatattattaaatcacataatcggaagttcaaagataaaaggacttataatgcaacattaaaaacgatagaaaagtggatccatgattcagaagtagcaaatcaaagagaccctgataaggaggcagatgatacgcgcaatgatatctcaatacacacaccacaaggcttagagaatgataagagcgttccacaaaatttgcaaaaagcatcgaatattgaagaaattcaagttcccgctacacaaggtataaaggatcttccgtcctcatcacaattacttttacgggctgatgcagaagatttttacataagaaaggttaaaaacatcccaatcatgaagctcacacagcaggaaataccctctaaactgggaagatcatttactgacgagacattagaagaagtggataatgaaagcgtcgaagaaatagatcaacaggcaaaaagtacacaaataaataacgagactgttaaccataaagatatccaatacagtaagagtgatgatacggaagtaacaaaaaaagttattgacactaaatgcggtcaaaatgtacataccgatgactctctacagcgttctcccaaaataaattcagactctgaggctgagaaatcaaggtttcaggtaaacgaaattaagaaaagtaaaagggtggtgagtgtttcagcttctgaacacgaagcgatatcgcgtagtactaagagtatagatatcaacattaaaaatgtgattattcagccatcttcttcaacttcaaaggatattaaaaacatagggaccggttttagtcaagacttattaattgcccctttggattccaaagaacaactcatgggtaaggatgacgtaaaagaacaggaccggcaagactacaggcgagacgaacatggttttgctcgtgaagttaatagcaaattgctcacagaaagctggaacacacataagcaacttgtggataaaaaaacttcaaaagatgatgcaatgaaagacaaaagccaagtgtgtgccattggagaagctacatcaatcaataaaaaagatatgcataataaaattgggagcccaggtgaaattctactgccaaatacctttatgagaaaaggtgaaccgaaaactagtacgttgcattctagtgcaaatgaacatgatgcggtttcgggagaaaatctgagccatgaaataaatacaatgggcagtgagaagggaaataatgagaggacttgtaacatgcagggacagtgtactgtggaaaaagctagagaaactggaacaactaagcccaataaggagttgaatggccagcacaaaggtggaaaagaggtcaccgcgaaggacgacttcgttatagttgaagaccatggagacgatgaaggctttttaaaaacaatggaacaagaagcatcgagagaaacaagtctcacaaaagaagaatttgaagtagcagatacttcagtgctaccggagatacgtatacctattttcaaatccctaaaaatgcaagagccaaagagccagacagaccaaatgaaagcaaggttgaaaaaacatgaattgatgcctcccgattcacctccacgcttggctgcaaataccactattaaaaatgtaaatacccacttggttgcagttggaaaagcaccagaaggaaaacaagaaaatgatggtaaaattcatctgggccaagtgcaaagagatacagacggtgatccggcggacgggaacgaagacgctacttctagggaagctacgccttcattaagggtccacttttcctcaaaaaagtcaagaaaattagtgagcaggttaagaggttttacaccaggagatttgaacggaatatctctagaagaaaggagaaacttgaggatcgaattattggatttcatgatgaggctcgaatactattctaacagggacaatgacatgaactga

SEQ ID NO: 250 - DNA, 2412 bp, Saccharomyces pastorianus
atggttttggaagtgccctcgatcacgcctggtgagctgcacgacctcgtgcaactccaccagggtgctgaatggcctgaatgcaaagaaatgtttccttgggcccatgatatttcttttggtcagccgccagattttcctcactcgctggcgatagtcaaatcagaatctaatgtgaacggctctgcgctcttgcgtggttctcttgaagttaatgacatcttcctgccctggaaggtgcacacttctatgcatgttcattatgatgctcgcgaaagtgaaggtgaagtgaacggattcaactatcccagtagcagtaaggaactcctgaacttgttaaagtttcaggtacgccaactggaattgcaagtggatgacattgatttggaaaacgtcgctgccttttgtcataggcatagcgtcttaccatttttaaaagtggaccctcatggactatcattagaattaaaaaatgatcctagcaacaaagttggatccaatgttacgtttcaatcgagcaaaaaggacgtttggggtaggagaggtctgtttagaagatttgaccttcaatgtgctaagatggtagaaatggctgataatatagtaatttactgttcgcggaattacaaaaccatagacggcacaatgctgatgggcactcatgattgtgattgcccaaattgcacttcacttgcattacttttacaaatttgtctaatgtttgttcaaagtggttatgttgactgccaagaaccatgttacaaaacgagcctttttatttgcacctaccaaagctttaacacagatatacctaagagcttaattggcacacccttattagagaaggagtctaccagtaattgctcacctttaaacttatgttcgtcacccagtgaaataatatgctttaataactttgataggaacatggttttgtgtgagaagttggaattaaataagctcacttcagcaacaagattggacgaaacaggtttgatatgcggtaatactactgattggcaaaattatcaaattatcaaaaataaaaatttgtccctgtccaagtattcccaagaaaatacgagtatagtgtcattaagaaccttatcctatgatccagatgatcccgttgcttccatctctcaattatataatattccaaatacaaaagaagcatggaaactaattataaaatgtacatcgaagtcgtcgatgccatcattaacaaaaattcaatcatatctatgttcgttactcgacgagatacaaaaccctcaagaatatttgcatttaagtttccctgcctcaggtactataggtttgggaaacttgaacattcagtctgttgaaattcttttaaatgtttgttatctgatacaccaggtatcacaccttcaagggctattaacattcatgtattgtaatgatggatatacagaaacttcattactattagcagcatatattatatttcattttgatattccattgcaggaagcacttttaaagatacacccaagaccatttttcctgtttccatcagacttgcagattttgggtcacttgcagtctattttgcgtgagtttagccctcaaagagaagttaatgcaaaattattcactgatttagtgaaagacaaaactaaaagttttcaactgcgcatatcatcggaactttttagtaatatattcttcgtaaagattcccccggagtctaactatgtcaatttaaagggcccactaccatcacagattttgcagcatttgtatttggggtccctggatcatgctcaaaatcctgttttactcaagtccttaggaattacacacatagtttccgtgggtgaagtggtagcgtggacacaaaatatagaaaaggccgtttaccctgtgagatcacaccgtgctattaccttgacgaacacgaacggggccacaattaatactattggtactaaaagcaggcccagagctggtaccacgattgataacgatcaggataatgatagtaccgtagtgataaaggagaattccggttttcagatttgtcagatcgaaaatttagacgataatgggaaagacccgctttttcatcgattagacgacattttggagtttattaataattctgaaaggatgggggggaaggttttggtgcactgcatggtcggagtgtctagatccgcaacagtttgcattgccgaatgcatgagatggcttcactgtgatttggcaggcgcttacgtatttgtgagagtgagaaggttgaatgttattattcagccgagtttattctttgtatacgaactgttcaaatggtggaaaaaacacggtagccacaacaaggatagaattatagactggcacataatatgtagggagatagctgaagttaatatgaagtacacataa

SEQ ID NO: 251 - DNA, 2628 bp, Saccharomyces pastorianus
atgtataatagtagaggtgtagcattgcactctgaattgatccatagatggaatcacacattttccatcctatccattgttgcatttcccaaaaagagactactgtttgctgggagccaggattctaaaatcctggtatttgatcttcccacgtataatctaattcacacgattagactaggagaatcgcaagaagaaacgcacactaggtcatctgtgttgtgtttaacaagatctgaagatgaaaactttttattctctggtggtgcagattccttggtgagggtctggtccattggtgaaaaggctatcagagatgactttctgcttgttacggaaatagctacggtctattcagtgacagatattggcgatatcttctcattggcatatttggattcgttggaaactattttgtttggctgccaaaacgcaagcttactgtatgtggaaaacttgatgcagaaaattgagaaaacatcatctgatagagtagaaaatatcaataagctaccacatagaagatacgataagttttttgattcgttgggtccaactggatgtagcacaaattcgctctcccaatcttcattagcctctttacaggaaaactgtggcgccgccatcatcgaggtcccttcagaaaacattattaaatatgcgcattatgggtttgtttattccattaataagctgtgccccaggttcaaccaactattggagaaaaattctcagactttcggtttggaacatataatttcatctgctggtgatggtataagtaagctttgggagttttctagggacgagaagcacgatgttgttaaggtttctttggtaaacgataaaatcgacaacgaagatagtgtcatttcccaaaccatagaattcccattcttatattgcggtttaagtgatgggattttaaaaatttgggacttgaatactcagcaattaatatctactttaaaaacaaaggacgagtcggatatcatttctatatctgtttacatggatcatatttttgccattgatgaatcagggatcactcatttttaccagaatcaagttaatcactggaatccacaacagggcaaaatactaagctcagagatttttagcaaatcagcagaatctgttagtttgctaacgggtggaaacgatgggtcattaactctctgggacctgacgtcgttgctatctgcagttcctctctcggatgcttcgaaaatcaatgcatcctctacacgacgcacctccaatgcgtgggccgtttaccaaacggcttctttgaataatgaagaaatgctaaacacactaagagagctcatctcctatcaaacggtgtctcaaagtaaagacactgcaagtatgttgtcactaagacgttgcgcaatttatctacaacaattatttttgaaatttggagctacgaacgcccaattgtttcccttacctgatggcggtaatcctgttgtattcgcatatttccaaggtaatgggaaacaggaaaagggttctaagaaaaaacgtatactgtggtacggtcattacgacgtaatatcctctggagatacttttaattggaataccgacccatttactttaacttgcgaaaacggatatctaaaaggacgtggtgtgtcagataataaaggcccattggtaagtgctattcatagtgtggcacatctgtttcaacagggagagttagtcaatgacgttgtatttttagtggaaggaagtgaagaaattgggtccgccagtttgcaacaagtttgtaaaaaatatcatgatattattggcaaaaatattgattggatcctgttaagtaattccacttgggttgaccaagaacatccgtgtttgaactatggactaagaggagttatcaatgctcaaataaaaatctggagtgataggccagacggccactcaggccttaatggcggtgtctacgatgagccaatggttaacttggtcaacattgtatctaaactacaaaatgagcaaaaggaaattcagattcctaatttttactcaccattgaaagatttgactgacgatgaactccaaagattccagaaaatcactgagcttgcgaatatcgacgagagcatcactgttcaagatctgattacaaattggtcaaagccttcattatctatgacaactgtcaaattcagtggccctggtaatattacagtaatacccaagagtgtcactatgggcatctccattaggttggttccggagcaaagcgtcgagcaagtgaaacaagatcttaaggcatatttacatgagagtttcaagcagctaaactctcaaaaccacttagagataaaagttttgaatgaggcagaaggttggttgggcgacccaacaaatcatgcataccaagtgttaaaggatgaaattaccactacatgggatgcggaaccattactggtaagagaaggaggttctatttcctgtttgaggatgttggaaaggatattcgacgctccagcagttcaaataccatgtggtcaatctactgacaatggccatttagccaatgaaaatctaaggatcaaaaactggtccaatttaactgagattttgtctaaagtcttcaacaagctgtaa

SEQ ID NO: 252 - DNA, 441 bp, Saccharomyces pastorianus
atgaaaagctcacctattgtacaattcagtaagacctcctttaacgctcttactagaccttggaagaaatacagagatggtgaattgttttatggactatccaaagtcggaaataaaagagtaccgctgaccaccaaacaaggtaataagacaatgtataaggggaccaggtcgtcagggattggtagacatacaaaattcggtggttatatgataaactggaagaaagtcagaacctacgtaaccccagatatagtcaattttgagttgaagccctatgttaatgctaatgttccacctttgaagcacgacttcaaagggttcagtcgtggtcccttggatcctgaattacaactgttaaagctaaaggagtttattgcaaatggaaaagtacaaagtcaaggagccacagacacttcatgctataaggagcgtggttaa

SEQ ID NO: 253 - DNA, 1473 bp, Saccharomyces pastorianus
atgtctggttttcgtcttattgacatcgttaagcctatcttaccgatcttaccggaagtcgagttgccgtttgacaaattgccattcgatgataagatagtgtatactatttttgctgggctaatctaccttttcgcacagtttccactcgttggcttgcccaagtccgccacccccgctgttaatgacccaatctattttttgagaggtgtctttggctgtgagccaagaactcttttggagtttggccttttccctaatatttccagtgggttactgttacagttgttggcaggtttgaaagtaatcaaagttaattttaaagttcaaagtgatagagaattgtttcagactttgaccaaagtgtttgccattgctcaatatgtcattttgaccaacattttcatttttgcaggatactttggcgaagatctatccgtcgtccaaattggtttaatcaacttccaattagtcggtgcaggtttcttcaccactttgttagctgaagtcatcgacaaaggatttgggttctcttccggtgctatggtcatcaacactgtggtcattgctaccaacttggttgctgatacgtttggcgtttctcaaattaaggttggcgaaaatgaccaaactgaggctcaaggtgctctaatcaacctgattcaaggtttcagatccaagcatcacacttttgttggtggtatcatctctgccttcaacagagactacttgccaaacttgaccaccaccgttattgtcttggccattgccatttctgtctgttatttgcaaagtatccgtgtagaattaccaatcagatcaacaagagctcgtgggacaaacaacgtctacccaatcaagttactttacaccggttgtttgtctgttttgttctcttacactatcttgttctacatccatatcgcttcttttgttttgattcagttggtcgctaagaatgagccatcccacatcatttgcaaaataatgggtcattacgagaatgccaacaaccttttggcagtgccaactttcccattatctcttttgactccaccaacttcctttttcaacggtattactcaacaacctttgactttcatcacttactcagttttcgtattgatcaccgggatctggtttgctgataaatggcaagctatatctggttcatctgcccgggacgtggctttagagttcaaagatcaaggtatcaccttgatgggacgcagagaacaaaacgttgctaaagaattgaacaaagttatccctatcgcagctgtcacgggtgcatccgtcttagggttgatcactattctcggtgaatctttgggattaaaaggtaaagccgcaggtatagtcgtcgggattgctggagggttttccatgttagaaatcatcaccattgaataccaacaaagtggtggccaaagtgctctgaaccaagtcttgggtgttccaggtgctatgtaa

SEQ ID NO: 254 - DNA, 2397 bp, Saccharomyces pastorianus
atggtacggaaaaacaggtcgctgttctttgttgggtatgattcttatagtgagagtccctctgcttcaccaatacttctggacgacttagacgggaatgacgatacgccggatcaagttttggctttcgatgcgtgtgcagggatcaggtcgcaactgcaggagagaaactctcgagcactcaaactcaaaggtgccagtgctggaggtgacttgaatctagatgatcttgacatgattccattaaatacaaagttcgatgtgcaaatggagatgggctcgcccatggccatgccaccggaaacactgccacccatcaaacccttaacggcgaaagatcttgcatattcatccttggctcatctcccaagttacttctttgagcaaatacattttcacgtcgagcggaaatgcctattggatatgtgtaagttaaggcgaaactatctcactataagcaaacaggatgctttagcctgttctcagtcgcagagtgcaaaaccgtcccaaaagaatcttgggcgtataaaagatgaaactctgcgcacagctcaccttcttgacagcaacgaagaaaataatctaacatctccaagggatagtagctatattatccagctgtgtaatggtcacgtggatgtccccacttttatagagtatagacagaatttcgaacggtgcttgagaatcattcaggatagaagcttatcaaaatttagtgagaaaagattacaatatcttttgaataagttccccgtttttcagtatttaaactctaaaaaggaaatgagacagagtaaaaacgtcccacacaaagatttttacaactgtagaaaaattgatttgaatctcttattgagtggttgtttctcccagtggcaattgaccgagttcatctggtccaaactaaaaaaagaaccaaacaaaataatatatcaaacttccaatggtaggcacataacattgattcagctgttcaaagttgatttcgaggaggcgaacacattctctagtggtttgaaaatcatcgacgactcgtttttagaatggtataaagttatttatcttgccaaatatcacttgattaacagtgactctgaaacatttatagacccacgcgacaaacaattccgtcattatttgattgcaaaaacgtttttagaatttgataactgtatcaatggggaatatctctcggaattgctacagacgtttctaataaagccactagagacatccaagtaccagctgtgtcagctttcggtagactttcaattctatttccataacggaaactcggacgtggataattggtggatggtttttgccaattggttgaaccattacgatcttttttccaaaaatattcgctggaatgtcagaatctcaagaatatatccagcattgtaccacaccggtaaaatcaaaagtttccaagattatttagatttaatattcaaaccacttttcaacactaaaagctacattcacaaacctttgggacccattctttcaaagttcctttcacgtatagcttcattcgatctatgtattcaagattcagatgactatgtttggaagcaattcacaaacgttgattgtccacccgaaaactggacatccaacggtgataatccaaccatttcacaatacatgtattacgtttatgccaatctggcaaaacttaatcacattcgccatgcactccatcagaacacctttactttgaggagttcatgttcatccacgtcaatgaatcgaacttcgcaatttagtaatactctaaatttcacagaacacacagaatccaccttgaacaattttcttttgtccagtggaggctttttaaatgcagagaacctctggaacgcgccgccacccttggtgtatgttttctatttaagtcagattcccatggtcatggcgcctttaaattccattgtagattcaaaggccacaatagcccaagatcagtgccccgtggggctcgtgttagagcctccgaagccttacaaaatgaacccctttatgaaattcttcgaaatggggttcagaatatcgttaagctctgagtccattctgtataaccattcgtatactaaagagcctatcattgaagagtatagcgtggcagccagtatatatcgtttacattccgcagatctatgcgaattgttaagaaacagcgttatcactagcgggtttgctgacacgctcaagaataaatggctcggcacatcgctggtgtcccacaactacttcatggaaaacatcggatttgtggataactggtacgattgcaagccagacaccagtctggaccacaacgtgcccgcaattagacgtcaataccgtagcaagaccctcgcaggggagtggcaactcgtaatttcttga

SEQ ID NO: 255 - DNA, 438 bp, Saccharomyces pastorianus
atgactatattttctaagttttcgtatttcgagaacttcttctcattcaaaaagcaagaaccctcccccattgaaatcgtttactgcaatgagaccaacggatttgtaaacatcaaagccttggaaagcttcaccgatgatagcatggaggcagacatctctgatagagaaatggctacgattctgacccgaaacaaaaagagcctgggaaaagtggctattgataagaatagtagtaataaacaatgtataaatttaagcgagctaaaaacgggccatgctgccgccaccagacggaagttgagcggcaatgagtcatggccgaaccaggactcatatccgcctgaggacccctccgagttcaacaagtttgatgataaacataacagaatccaaaagtgtagcaccaggagaggttacttgtcgtacaagaaatag

SEQ ID NO: 256 - DNA, 1284 bp, Saccharomyces pastorianus
atggctgaaactttcagtttttcccacttggcttatttggtttttgagtctgttctacaggtcgtcatcattgctattgctgggttttggagtgctcattctggtctgctacccaaacaaagtcaaaaaatcatctcattactgaacgtggatctttttacaccatgtcttattttcagtaaactggccaagtcgctatccatggccaaaatctttgaaatagccattatacctatattttttggtttgaccactggtatttcatttatgtctggtaagttgatgggccgtgtcctgaaactggataaagacgaaacaaactttgtggttgcaaactccgttttcgggaacagtaactcactgccggtgtccttgacattatctttggcttatactctgcccaacttgacttgggatcaaattcccaacgataaccgagacaacgtcgcatcgagaggtattttatacttgcttatcttccaacagatcgggcaaatgctaagatggagttggggctacaataagctgatgaaatggtctggagagaacactcagcacatgcctccatcccaggtgcaatccctattggagagaacccccaatattgataatgaagaactggtcagtgaagaacaggaagaacaagaactagttgaccaagagcattctcgcttgaattcatccttcttgagttctagttccattagtgataagatctggcaaaaatcgtgtaccttattgcaaaagatcagggcaaacttgaaccccccattatattctatgattttcgctatcgttgtggcctctataagtccattacaaagagaattattcacggaagacagttttatcaataacacattttctgaagctgtcacgcagctgggttctgtatccatcccattgatcctagtggtccttggttctaatttgcatccatcggatgaagttttccccaagacagttaaccacaataaattgctgtttggatccatagtggggagaatgatcttaccttcatgctttcttttgcccatcattgccatcgccgttaaatacgtcaatgtgagtatattggatgacccaatcttccttgttgtaggtttcctattaacggtttcccctcctgccattcagttaactcaaattactcagttaaacgaatttttcgaagcagaaatggctgatatcctattttgggggtatgctgtgttgagtttgcccgtaagtatttttgttgtttcgggcgcaatctatgttttgcaatgggctaatccatcttaa

SEQ ID NO: 257 - DNA, 1455 bp, Saccharomyces pastorianus
atgtacttgtcgttttacattacagatgtacagaacaagctggttttccagtaccttttaggcgccacagcgccttcatttaaacacctttggacccgtgttcaatctgcatgccctcaattactagaagacagcggtagtgataactatttagatcaagcaatggtcgggaaggaccttgaggtatataagtacttttcggtcacaaataagctcaattattggtgcttagcctccacttccaaatcaaagggaccacttgattgttttagctttttggagactatagattgtatccttttagaatactttgacaaggataaattaagtattaagaagcttgttaataactacgatagaatcagtttaatcttcaattgttgtattgaagctggtgagcccaatgttaatgattttctctatgtcaataaaatcaaagaggctgttcctgaaaggtccgatttgtccaagtttataagctccacagcccataacttacaacaagctgtacaacttccacagcaaagacaacagcaactacaacagaatcaaatgtcccgtggtaacatttccattgcggaagatgaagagatcgttccttggagaacatcaaaggcgagcaaacatgagaataacgaactttacgtagatttgttggaatcgttccatgtagtactcgaaaagaaaaaatctcgtctaaggttggttaatggggacattcgcggggcagtagatgtaagatcttatttgaatgacaatcctttagtttcagtgaggttgaatacaatgggaaacgaaataggcatacccagtctacacgattgcgttgaaattaatgatgatggagaatttactccttctaatataaaatttataccaccggatgggaaattcagattaatggagtattccatagatttgaattctcaactacagaaaccaggaataaggatgaattctattggaatgatatcggtacattttcaaaatgggttgggcaaagattccgatgaatttgaactttcattaaacatcgaaagctctaaaaaggtgtcccaaattgaagacttaaagttagatttacaattcaatattgaagacgctggtgaaagtgacgtagcatataaggtaaaaatcttacgcaatactcatggtcgttttgaaaatagtgttactatggggcaaggacaatggatttttgataaagctactcctacgggaacaatacccgtattacgaggttgtattgaatatgaaagtgtacaacctaacagcacaagaaatatcgatttacacacagtctcattagattattcgtatatgggacaatcagccagtggcatttctgtggaagctattgatattttatccgggttgaccattggtagaaacaccaagttatacaaaggtgcaaaatataaaaccaaaacaggtgattttcaagtaaggctatag

SEQ ID NO: 258 - DNA, 978 bp, Saccharomyces pastorianus
atgccggatcaagaatctccgatagcacaggaaattaatacgctgcatgttggctcacttactgatggtacgaatattggaaatgtagagcgagctagagacacgctaaatgagcaaaccagcgaggaaggagaaacagagataggatccaggcaagaagaagacgacatagaggatgagggaagtagtagtggagaaaatagtgcgacggaaaggctagtgccacaccagctgagagagcaggccgctaggcatataggaagaataggaaggcatttcaatatacttgataggctttttaagaaacacacacaacagtcttcggatttacaacaaggggccatgtttgatggtgtgttcagtaatttgagtgcaaaaccagataccacgcaggccgagcatcgcagcgagcaagatataccacccacgtatgatgaggcggctactgatatggcgccctcttactatggaatggacttgaataattcggatatatactacgatgaaatatgcattgaggggctccctgtaggaaacatagccaatttactttggaacatcattgtgagtacgagtttccaattcattgggtttttgataacatatattttacacacatcacatgcggcgaaacaaggttcgagattcggactagggttaacgtttattgggtattgttattcgatgattcctaagaatgtcacctcaaaagtcggtaaaaataaaagtttaaatagaatggaattatcggatccaaacgaatttgataatgttcgtctaaattcacaatcaacgacgcaggataatttcgaatcacatctaaaccatggtttagatgaagaaaagcaaaacacgccgtggttggctgtccttgtaggacttctaggtgcattcattactcttaagagtatatatgactacattcaagttaaaaaaatggagagaaagtatctcaaccagggtcaaaaccaagcatag

SEQ ID NO: 259 - DNA, 1728 bp, Saccharomyces pastorianus
atggctttacatcagtttgattatatatttgccatagcaatgttatttgcatttttagatgcttttaacattggggcaaatgacgttacaaactcttttgcttcgtctgtttcgtcaaaatctctaaaatattggcaagctatggttttggcaggtctttgtgagtttttaggagctgttttggccggtgccagagtgtctggtactattaaaaatgacattattgacggcagtgtctatagtaaagatccagcagttttgatgctaactatgacaagtgctttgattggttcatcgtgttggttgacgtttgctacaatgatcggaatgccagtttcaaccactcactctatcgttggtggtacgattggggctgggatcgcagctggtggtgctaatggtgttgtttggggctgggacggtgttgcccaaattattgcttcatggttcatcgctccagttttagctggtttgattgccgctgtagtttttacaatctcaagactcactgttcttgaagtcaagtctgtggaaagatcaattaaaaatgctctactattggttggtcttttagttttcgctactttctccatattgacgatgttaattgtttggaagggttctccaaacctaaagttagataatctatctgaaactgaaactgcagtttcgattattcttacgggagcgattgctacgattatttactttatctttttctatccattctacaaaagaaaagtcttgaataaagattggacactaaaattggttgatattttcagaggtccatctttttacttcaaatctaccgatgatattcctccaatgcccgaaggccatcaactaactattgattattacgagggtagaagaaatcttggaaccaccatcgatgttgaagatgaagaaaacaagttagccgataactctagtgattctcctaccgacaaagataaggttattcaagaagtagacttggttaaaactgaaactgaaccgaaagaaaaattatcgacgaaacaatactggtggtcattattaaagatgggacccaaaaaatggccgttcttattttggttagtcatctctcatggttggactcaagacgttataagtgctcaggtcaatgatactgatatgttgtctggtgacttgaaaggcatgtacaaaagatctaaattctatgacaacagggttgaatatatttactcagttcttcaagcaattactgcagctactatgtctttcgctcacggtgccaacgatgttgccaatgctactggtcctttatctgctgtttatgagatctggcaaaaaaatgctattaaggaatcatccgatgttcctgtatgggttttagcctatggtggtgctgctttggttattggttgttggacttatggttacaatatcatgaaaaacttgggtaataagttaatcttacaatcaccctcaagaggtttctcgattgaattatctgctgctattacgacggtcatggcaacccaattaggtattccgacttcaactactcaaatcgctgttggtggtattgtcgctgttggtttgtgtaataaggacgtcaagtcggttaactggagaatggtcgcctggtgttattctggatggttcttgactttaccaattgccggtttaattgccggtatcataaacggtatcattttaaatgcacctcgttttggtggcgaatatcaaatgacatga

SEQ ID NO: 260 - DNA, 1086 bp, Saccharomyces pastorianus
atgtctatagtctacaacaaaacaccactattacgccaattcttccctggtaagtcgctggcacagttttttttgaagtacgaatgtcttcaaccaagtggctcttttaaaagtagaggtattggaaatttgatattgaagaacgccatccggattcaaaagaatggtaagagatcccctcaagtttttgctagttcgggcggtaatgcagggtttgccgctgccacagcatgccaaagactatctctaccttgcacagtggtggtgcccacagcaacaaaggaaagaatggtagagaagattaggaacactggtgctcaggttatcgtgaacggtgcgtattggaaagaagcagatacctttttgaaaacaaacgtcatgaatgcaatagactatcaagttgttgagccaatttatgttcatccctttgataatccggatatttgggagggacactcatctatggtagacgaaatcgtccaggacctgaaatctcagcatgtttccatggacaaagtcaaaggtatagtatgcagtgttggtggcggtggtttatataatggtattatccaaggtttggaaagtcatggtttagctgataaaatacccattgtgggagtggagacaagaggctgccacgtcttcaacacttctctaaggattggccaaccaattcagttcaagaagattacaagtatcgctacctcattagggaccgctaatatctctaatcaaacttttgaatacgcccgcaaatataacaccaagtctgttgtagtagaggacaaggacgtcatagagacctgtctgaagtattcacatcagtttaatatggttactgaaccggcatgtggtgcctcattgcatttgggttatcataccgagatactggaaagagctctaggctcaaaattaaccgcggatgacattgtgttgattattgcttgtggagggtcttctaacaccgtacaggatttggaagaaacattggaatgcatgaaaaaagaaggcgtccctgcaattgaattggctgataacttcatctttccggaaaagatcacttcaactattttaaaaagtgcttaa

SEQ ID NO: 261 - DNA, 3303 bp, Saccharomyces pastorianus
atggatgatgctttaaatgctctatcgtcgctgacttcgaaaaaaagagctaccacatacaagaaagtcgccagccctataccgggtgagaatgatgataccgatggtaatctcccaatccatgaaatggatgctccgcctgtattgatggggaacgggttcctgtttggcaatgccacattaaaccgtgttaagaacagattggaaggtaagagtgatataagacaagacgggcatgataaaaagaatgaagataaaaatattctctcgactcaattaattgctaatctttatgatggcggtgaagagttggagaagactaaaaataatgaaaacaaaaacgatcaaagagttaacgtgacctcatttacgcaaacgcaaaggataccagtcagcataactcaacaaaataatgaggttaatgtgcctatacattctatcaacgatggagaacccacccaaagagttaaaagcattatcacaacttcgcaaacacaagcaattccctttacaacagcggaaatcacacaaaaagctactcaatttatagataaccacggtgtaacttcgcaaacacagcaggttccgcccacaaaactaattgaagcacaaacccaagctggtgcagctacagccaatgattcggatattcagcctcagaaatttcctatagtggcaactagaacaagccccttatttcaaacagccccagaccaaggcccctcgactcaaatggacacaccaccgccaactgtgcatgtcgatataacccaaatggacactatgtcacagactatgcaagataaagtaccgcctgaacttaagattcatgaattacagagcgaattggcttcagaagactctagaaggaaaacagctcacaatattgaatataggaaactgcaaaagaccataccaatagtgaaaagtttttcaaaagaatcatttcttgctgatttcgataactcgtcctcagatgatgacacaaatgtcaaattggaaagttcacagccaaaaaaagaacagaatgggtatgaaatgatcgacatcgaccaatccgaaccacaattggttcagaaagaaaataaaaaagatatgaaagttcctctattaagtacttatgccaacaacttaaaacgggagattgattcatcaaaatatatcactttggacctcgacagcggcagtgaaaatgataacgatgaccacatggacgctggtaagttaatcgaagatgaaagtgctttgccaatatctcagttgtcaaaggccacaatattcaacttgaaggctagactatccaagcaaaatcaaaaactggctcaaggatccaacaaaaataaaggattcaagacagataacaacaaactgttcaacacgttaaggaaggctagcagaaaacagattttggatcatcaaagagaaatagttgaaacaaaggggttcaaattagaagatatggtcaaggaaaaggagattgtagaagacttgctagagcaagaaatcctcagaaataaaaaaatcagacaaaaggagaagaaaaaggaacaatcagaaaaaaacaactttgaattgaattcccatgattcaggctctgattctggatcagagtcttctaaatttgcattgagtgataatgaaattgctgattatgaattatctggtagtgaaaatgaaaaaagtgaagatgctgatgacggagaggaagaggatgataatatcacgaacaagaaaaagctgtaccgcacaaaacacatcttaaacgaatcggactctgaggtcgaagatgaacagaaaatggaagtcgaaaaaaaagctgaagacataccgaaaagaaacgccattgatttaggtcattatggtaataatatcgacgaagatggtagtagctcattccgagcagctattgttttagacacgcaacaagttgatgaaataatcactcaaacaaaatcgccaaaacatgaagataacgagggaaaggaagaaaaagaagaagagagtgaagagacgggcgacgacgatgacgacgacgatgacgacgacgacgatgacgatgacgacgttagtgaagcaatccgtcgtgaactgattgataaggaaaaattagaacggagacaaaaagaaaaggagcaagctactaaactaaaagaattgaagagcaagggtgttacaaacttttttgaaatggaagccgaagaatccgaagatgaatggcatggcgttggtggtgccgatggcgaagggtctgatgaatatgattctgatgtagaaaaaatgattgatgattattccaagaataagtttaattcgcatgaaattagagaaatgctggcggcagaaaataaggaaatggatgtaaaaatgataaacaaaatcctttatgacattaaaaatggagggttccgtaataaaagagccaaaaatagcttagagctggaattgagtgatgatgaagatgacgtgttacaacaatatcgtctcaagagaagagagttaatgaggaagagaaggttagaaattggcgatgacaccaagctcgttaaaaaccccaagtccaaagcattctttgaaagtatggtagaagatattatggagtttaagaacccatttggagcagagaaggaatccgatcaagatgtcactagtactgctacagattcgaatactcaagataacgatagcacaaaatctgataatagtacaagtaataatgaacacaataaacatgcaggtgataaaagtaagaaacttatcatatctgaggatttcgttcagaaaagtttatcttttttgaaaagcaacaattacgatgaatttgaaatggacaatgagctggcgaggatacagcatggaaacggcgaaggagatgttgcagatttgtttacattaaaacagcatagtctaataaaatcgttcacgaactcacaaacagattcattcagttctaggacaacgaacacagtaattaatttagaaacacatagagagggcaacgatgatggaggaaacggagatcaatcgttagttggcgggtttaagcatccatccgtaatcaaatcatttgcatccagaacagatatcaatgataaattcaaagaaggtaataaaacagtcaaaatttccaagtcttataagacagtagggagttcaaaggcttctatcacatatatggggaaaacaagaaaattaatggcaccaaaaaggaaaattgaggaggatcatcatcttcaccatactaaaaaattgaaaacgcaaaagagtaaactttttgaaaatgggcaagatagcttcgacagttag

SEQ ID NO: 262 - DNA, 951 bp, Saccharomyces pastorianus
atggtgtctacacataacagagataagccttgggataccgatgatgttgataagtgggcgatagaggagtttaaagaagaggacaatgcctctggtcagccttttgctgaagaatccagtttcatgactctattccctaaatacagagagaactatttgaaaaccatttggaacgatgtgacaagagccctggacaagcacaatatctcgtgtgttctggatttagtcgaaggttctatgaccgtaaagaccacaagaaagacctatgaccccgctattatcttgaaagccagagacttgatcaaattattagcccggtcagtcccattcccacaagctgttaagattttacaagatgatatggcttgtgacgttattaagatcggaaatttcgtcaccaacaaagagagatttgttaagagaagacagcgtcttgtggggcctaatggtaacacactaaaggctttggagcttctaaccaaatgttacattctggtacaaggtaacacggtaagtgccatgggccccttcaaaggcttaaaggaagtccgccgagtcgtggaagactgtatgaaaaatgttcaccccatctatcatatcaaagagctgatgatcaaaagagagttggcaaagagaccagaactggctaacgaagattggtcaagattcttgccgatgttcaagaagagaaacgttgccagaaagaagcctaagaagatcagaaacatcgaaaagaaagtctatactccattcccacctgctcaactacctagaaaggtcgatttggaaattgaaagtggtgagtatttcctaagtaagagagacaagcaaatgaagaaactaaatgaacaaaaggaaaaacaaatggaaagagaaatcgagaggcaggaagaaagagcaaaggattttgttgctccacaagaagaagcatacaaaccaaaccataactaa

SEQ ID NO: 263 - DNA, 288 bp, Saccharomyces pastorianus
atgtccgaacaagcacaagcaccagcgaaaagcacaccctccaacaactctaaagagaacggcagcgccgtgtccacagtccttgacgccaagtgggacatcgtcctgtccaatatgctggtcaaaactgccatggggttcggcatcggtgtgttcacttcagtgttgttctttaaacgccgtgctttccccgcatggctgggcattggattcggtgttggaagaggttacgctgaaggcgatgccatcttcaggtccagcgccgggctcagatcctcgaaggtttag

SEQ ID NO: 264 - DNA, 2130 bp, Saccharomyces pastorianus
atgcgcttgttgttatgcaagaactggtttacctcgcctgtcatcacaccgcttctgtacacccgttgtctatcctcaatgaccaccgctgctagcttccccactgctcctcaaaccccgcccagctggtcgtttactccccacgacataagcgggaggaccaaggaaattatagacaagagtaataagttttacgactccatgagccaggtggagagtcctgctgtgaccaattttgtggaaccgtttatgaagtttgaaaatgagttgggcccgatcatcaaccagctgactttcttgcagcatgtgtcgtccgacaaggagatcagagatgcgtcggtggactcctcgctgaaattggacgagttgaatatagacttatcgctgcgccatgacgttttcttgcagttcgctcgcgtctggcaagatgctcaatcacaggcggactccatcgaaagggagactttcaaatacattgagaagtcttacaaggactacattcattccggtctggaactggatgagcctgatcgtttgaagatcaaagagatcaaaaagaaaatctctgtcaactccatcaatttctccaaaaatctcggtgaacaaaaggaatacattaccttcaccaaagagcaactggaaggcgttcccgactccatcttgacgcagttcgaaacaatcgaatctggcagtgacacgttgtataaagttacttttaaatacccggatattttccctgtgatgaaactggcatcctcttcccagaccagaaagcaagcattcttggctgatcaaaataaagtccctgaaaatgaggccatactattagatactttaaaactgcgtgatgaagtggcatctttattgggctacgacacatatgctaactataacctatatgataaaatggccaaagacagcactactgtaatggattttttgaatgatttgaagaaaaagctaattccactgggcgaaaaggagcttcaaatcttgcaagatatgaagtccaaggacgtcaagaaacgcgaccaggacgaagatccaagctactacatctgggaccaccgttactacgataataaatatttgttagagaacttcaatgtggatttggagaagatttctgagtatttccccctggagactacaattactcgtatgttacaaatttatgaaactctgttcaacttgaaattcatcgaaactaaaaacgctcaagagaaatctgtctggcatgaagacgttaagcaattagccgtatggaatatggacgaccccaagtcaccaaggttcattggttggatttatttcgatttacatcctcgtgatggtaagtatggtcacgcagcaaactttggtttgtcctcatcatttatgatcaacgacactacaaggtcgtacccagtcactgcattagtctgtaacttttctaaatccacgaaggataaaccttctttgttgaaacataacgagatcgtaacgtttttccacgaattgggtcacggtattcatgacctagtgggccaaaacagggaatctagattcaatggtcccggatctgttccatgggattttgtggaagcaccttctcaaatgttggaattttggacctggaacagaaatgaattggtgcatctatcatcgcattataagacaggcgaaaaaattccagaacatttgatcgattcattgataaagaccaagcatgtcaacggtgccttattcactttaagacaactccattttgggctatttgatatgaaagtgcacacttgcaaagacttacaaaacttatcaatttgtgatacctggaatcaattaagacaagatatctctttgatgtccaatggcggtactttatccaagggttatgcttccttcggtcacatcatgtccgactcctactctgccggatattacggttacttgtgggcagaggtatttgctactgatatgtattatactaaattcgccaaggatcccctaaacacaaagaatggtatacaataccgtgatatcgtgttggcccgtggtggtcttcgtgatattaatgatagtttgaaagaatttttgggtagggaaccttccaaggatgcctttttaaaggaattgggattacaaaattaa

SEQ ID NO: 265 - DNA, 435 bp, Saccharomyces pastorianus
atggatcccaaggaaaacaccggtgaaatcggcagaagagacccctggacaaaagtttggaatggtgtaagctcgttgttagattttttcgcagtattggaaaacctgggcgtggtcgatgataacctatacttgagtgggatactaaggaaggtttggttatgttattcatggatctctgtgttcaggtgcgtatggagactgatcaagttgtgtagggtgaaattcaagattaacgaacggctgaatggccaggggaatgagctaataaaggaaaaattgataaattttggtaaaatgtataacgaccaaatcaaacaaatcacagccaatttagttcaagatttaagctatctgatggttttaatttatccaggaacgaggttatttaaaagactatcaaatgtaataacactttgtagaataattatataa

SEQ ID NO: 266 - DNA, 1005 bp, Saccharomyces pastorianus
atggcatttaatgatttaggttatgaccaagatagaagcatccacaacaacagtcatctgcaagagtccaatcaagaaaatacagaaatgaaatccaaacacgtatcgttcaaaccatcaagagacttccatacaaacgattattctaataactacattcacggcaactcgctaccacagcaaaatgtcactaatatcgagaacagagttgatgggtatccaaaactacagaaactgtttcaagcaaaagccaaacagattaatcagtttgccactacaccatttggttgtaaaatcggcatagattccatcgttccaacattaaaccattggatacagaatgagaacctaacattcgatgtggtgatgattggttgcctaacggaaaatcagtttatctacccgattttgactcaacttcccctggataaattaatctcgaaaccgggcttcctcttcatctgggctaattcccaaaaaattaacgagctgacgaaactcttgaacaacgaaatttgggccaaaaagtttagaagaagtgaagagttggtctttgtccctatagacaagaaatcgccattttatcctggtttagatcaagacgatgaaacattgatggaaaagatgcaatggcattgttggatgtgtattacaggtacagtaagaaggtctacggatggccatttaattcattgtaacgtggataccgatttgagtatcgaaacgaaggacaccactaacggcgctgtgccatcgcacctataccgtattgcagaaaatttctctactgccactagaagattgcatatcatccccgcaagaacgggatacgaaacccctgtgagagtaaggccaggttgggttattgtgagtccagacgttatgttagataatttttcacccaagagatacaaggaagaaatcgctaatctaggatctaacattccattaaaaaatgaaattgagttgttaaggccaagaagtccggtgcaaaaagcacaataa

SEQ ID NO: 267 - DNA, 1251 bp, Saccharomyces pastorianus
atggtaacaagacatagagtagccgtgctgtatgatgctcctgaagctattggaagccacatgagtcagaatgacactcatctaactgttcgaggtggtcctggtgtggtcttacaacagaggtggctattggaaagggtagaaagcttagacaaatctaccaagaggatcacttggaggcccagagaggacttagacagagatctaagtgttatcgagaatgaattgagcgccgggttttcggtttactcgaattcaactgacattccaggaagattcattagcaccccaatgtacaattcattccacagtgagaacttcgatatagagcaacatttgcttcttgaagtgaatctggatttgccatggaatccggaatatttcacctatgatataacagtggaacctgctcaaattcaaattgttgaatatcgacccttgaaacagggtgaagaatttacagttggcagagtaaaggacgagaaacttgaggcaggtgtgttcttcgtggatgctagtgatgaagttgacgttgatatcggcggaatacggtgtaattgggggatggatgatggcaagctagaacgatgccaaaagacctctctattatacaaacaaggccatattgccttcaaccgctcatcccaaacggcaccgttatacctagaacaacccattgggttgcatccaaaggtcttgattgatctcacagaatttgacgaacgcccacaatgtatgtatttaatgcacttgcaactaccgttggaattgtttgtcgataaatttcaagtttcacccttactactctttggtgaacacgatttagaattaccacaatactctcttcaagacaaagcatggggatccgagagcatatttgaattaaaagcaggcactgtaaatgaaataaccttgcattctaggtatatcaaaccgtccaataacagtgcgggcaaatttgaagtttcattcagtccagagattatactagcttgcgatacaggtgacgaaaaagtagcccgcaacccattctataagaagggtttaggatatgagtctctcttcacggacgacacttcgttccgtcatttgaacacaactacgctttctgtgccgatcccaagacctgatatgaatgattattccaagataaaatacggcactttgttgtgcctactcatctctatcgtgtaccttctctctaagatatttggtaacaataaaaaaaaggtgccagttaaacaggaatag

SEQ ID NO: 268 - DNA, 1767 bp, Saccharomyces pastorianus
atgcccaatacgcaacatgtgcaattatcagaacctaatcctatggataatttgtctacgccatcaaaaagaggtcatcgccatcgcaggtcattggccatatcaggggattttgattttttgaaccagtctgccacaattgcgaatttcccacttccacaatcacctgagaactgccctgcaaccgcccctactgccacatcgagtatgttgtcaccaacacgctacaacagatttcccttcaaaaccaatgaagatgctggaacgctagatttacctgaaccaaggttttatccgctatcaccaggagacaatttgcagactccgagtcctcggttttttataagtgaagaaccaagtttctcatcaccagttgaaggcgtccctgacgccattattaatctcgatgatgcgttgaagacaagacccaggtcattcaaatctcacagaagatccgaatccgctcctcctgacttgcaggttatgattggtgaaggtaactgtgtagctagctctaattccatgataaaagaagaagaagacttcccgattgattcggaatccaaaaatgacacacccaatcaagaactaccgacggaattactatccccactgcggccttccttttgtacatctgaacaggctattgaaatagatgattcagccctaaatggatccccaacgcattgtaatcatagcatgcaaaactttaatgcccacaatttcaacaagttcaattcattgaaaattaaaggccaaaagcaaaggtattatcactatacaaaacaactacctttaactgcgagttctgacacacaatccccaaaagaacagaagtcagccatttcaacaactatgaatcagacaatgacaccttcctctttggcctacactccttcaaaactggcgtttacaccagcaacaccaatatctttttatgataataatatagatatcactttgaacaacgaaaattataccactaacctaaaagacacgactgaaaatgtgaaaaataattacccaaaaaagagtgggagttcacaactcaaccgtggatgggatactgagaaaaggcaggattttagcggagaggcaagaagaagaagatcagggagccctatttcccatatacaacaccgcaacttaattgataatatgaaaggtaggcgaaatagtaacacgataaactcgacattcaactacaagagtaaaatttatgacatgccttatgatgacatgatgaaaaacgataacaataatggtcaatctctaccgttttcggtcaccggcgccaatgatgaaggatatgccggagaaaatatttcgaaagatagttatgtaccattgcaacactcatcagttaaatcctgcacgcctgatggcaaggaaggaatgcacgcatttgcaggtgatgagagcaacgaatacgctaaatttgaagggcaagtaaggatacattcacagcttagtaaagacattcttttgggtgaaccaggcgatatggttgatttgtcttcattagtaacctcaccgagaaaagcttccaacgagactggagatttggccttcaatttatctcaagatgataaatatgatgccaataacacgccaaaaacgatcggagcgggcaatagcgtagcaacaagtaatgaaagtcgatgcattagtgacagtgcattggaaaagaaaggacaaaataatgaagttagaaaaaaaagaaaatccaaattagggcttttcagacatattttttcaaggaaatag

SEQ ID NO: 269 - DNA, 966 bp, Saccharomyces pastorianus
atgagtatccctgctgacattgcatctttgattagtgacaagtacaagagtgccctcgacaatggtagcttaaagttcgtcaagactgaaagtaaaaaattaaaggatccaaatactggtatgccatacttgattagccacatgccaagtttgttagaaaagccagaacgcgaccaaactccagaaggcgaagatccgttgggccaagctgaggcggaattgacagttattccagaatttggtggtgccgataacaaagcgtacaaattactattaaacaaattccccgtaatccctgaacattctttattggtgacaaacgaattccatcaccaaaccgatgctttgtccccaactgacttattgactgcttataaattgctatgttctttggacgatgaagattccaacaagagacacatggtcttttacaattccggcccagccagtggttcttctttggaccacaagcatttgcagattctggaaatgcctaaaaaattcgttactttccaagataaactatctagtggtaaagaacatttcttgccaactttcaacgccgaaccattgcaagatgcgaaagtttcgtttgctcatttcgtcttgcctatgccagaatctgaagaagcgatcgatgaagacttattggccatgtgttacatttccatattacaaagagctttgacctttttccaggattggacgaacgataaaccagatctaaagaaatcttacaatcttatgttaactaaagaatggatttgtatcgttccacgttcaaaggccttttccgaccaaatgaaaataggtttcaactccaccggttactgcggtatgatcctaaccaaagacgatgaagttttctccaagattattgagaagcctgaattaattaacgatatcttattagaatgtggtttcaaaaacacttctggtcaaaaaccaaacgaatacaactactaa

SEQ ID NO: 270 - DNA, 777 bp, Saccharomyces pastorianus
atgaaaaaagtattcgaacagtttcgaaaaagtgaatcactattccaaattatcaaggggcctcagcacctagattctccaaaattatttgtccttgattcatcattcaatccaccacatctggctcacttccagctactatctcaaaccgttaagaatttcaagttaagtgacacccaatctcatgttctcttgcttctagcagtaaacaatgcggataagttacctaaaccagcgtccttcccacaccgtttagaaatgatgtgtttatttgctgattacttacaggagaaactacctcactctgtggtatctgttggactgactgtcttttcgaaattcattgacaaagacaaaatcttacacgaacagtttacccaaggtcgcaatacaaatataggttatctggtcgggtttgatacaattgctagaatctttgatgagaaatattaccaccccttaaaaattagcgatgtaatggagaatttcatgtcgagatgtcaattgtattgtttggccaggggggactgccatctaagtgcggaatcgcaattgaaatatgccaatgatatccttgaggggaaattcgaaccagtcatcccaaaggaatgggggtctcgaattcatgttatgcaaaatgattatccgtctttaagaaacgtttcctcatctgaaataagaaacaaattgaaaagcggtcaggtggataacttaaaggatgaactaccaccctgcatatacgattacgtgacgaaaaatgtgacaatatttgattga

SEQ ID NO: 271 - DNA, 2250 bp, Saccharomyces pastorianus
atgaagataacgtgtacggccctggtgtgtgtcttcatttcactttttctaaggacgagttgtgtccaagcagttttttcagatgatgcatttgtcacagattggcaattggctaacttgggcccctgggagaaaatcatccctgatgctcgagaccgcaaccggattctcattgtgtccaatcccacggagacttcttctttgctttcttctttcaatgtctcttccggacagattcttttcagaaacgttttgccctacaccgttgatgagatccaactagacgacgataaccacaacgttgtggtttgcgtggactcgtcaagccaaagttggcagaagtttgacctgcacgactggtttttactggacgaaggcgtaggtcacgcccctgcctcaaccgccttgtcccaatattcgtatccaaacgatcaagtagttattaagggcaacgaactgcacatcctcgacaacgagtcaagtttagcggaatggaaactggaactgccccacgggtttaacaaggtggaatatttccagcgtgaagaccccttggtcttggtgctgaacgtcaacaatactcaatatttagggttctccgtcaatggtacggaattggtgccagcttggcaacgggatgaatcgctgactaacgtggtagactatgctgtgttggatgttttcgactctaaagatttggaattgaataatgatatgatcgctgaacgtgattcttcttcactttggaacgcttactggctcagagtgacgactaattggaaccgcttcatgaatctattgaaagaaaaccatttttcacccggtcgtgtttttacaaggctcttagcgttggacaccaaagataccactacatcagacttaaaatttgggtttgcaaaaaccttaattgttttgacccgtaatgggatcatcggtggccttgatatggtcaataagggccaagttgtttggaaacttgatttgcaaattgatcaaggtattaaaatgttttggaaagacaacaaccataaggagcttattgttttctctcgtgatggtcactatttgacaatagatctcgttaatggtttaccggtgatcaaatcaaaagcttctttactaagcaaaggggctgttgaatcagttatcgaactagatgacaaccaatgtgaatacttgattaaatttgataatggaaaccaccaattgttgaagttggatcccctcgttgaccacacagactcctcaatattcatcactgaacatgactcgaatggcatatttggtcgcatgatagtgaatgatgaagttcaagacacttggcaaagaaccgtgaagccaacggaaaaaattgtggcatttaataaaagagatgaaacaaacttaaattctcttggtctaaccttgggtgataaatcagttctttacaaatatctatacccaaatttagcggcttacttagtcactaataaagaacatcacaccatcacttttaacctaattgataccataaccggtgaagtcttgatcactcaagaacacaaggattccccagatttcagattaccaacagatattgtgttcggtgaatattgggtcgtttattcctatttcagtttagaccctgttccagaacagaaactggtagtcgtagaattatacgaatcactaacgccagacgaacgtttctccaacacaagaagatcttacgatccattaactggtcaaactaacaagcttcaacatatcgctaaacagtatattttccccgaaataatcaaaagattggcaatctccaaaacaacaaatgacattaccacaaaggcaattgttatggagttagaaaatggtcaaatcacttatataccaaagctcgtattaaatgcaagaagtaaaccagaagatcaaatgactaatgaagataaaaaggaatttatggccgccccatatgcgccgatcgtcccaattaatgataatttcgtcattacacactatagaaatctaatactgggacccgattccaagttaatttccattccaacaaatttggaatctacaagtatcatctgcgatctgggccatgatgttttctgtacaagagtcacaccatcgggccagtttgatttaatgagtcctactttcgaaaagggtaaactactcattactatattaatcctgttggtgataacatattttatccgcccttctgtttcaaacaagaaattgaaatctcaatggttagttagatag

SEQ ID NO: 272 - DNA, 1242 bp, Saccharomyces pastorianus
atggctgtatacacgcccccctcagacaccaacagcaatcctgaccaccctcactcgcaagaggagcatgacaaagacgataatgacatcaagaaattttacctaaggccaagcttgggcctgaagctatgggggcccctggtgcccgcacccgacaacctgtcgggcctatacacgctagtcgccgtccagtccgcagtgggtatctttgccctctggagactcaagagactctacagactaccgccactgcgccgcaccgccactcacactaaatcggaattggcctttggcgagctgcccagtgaaatgatcgtcaagggcaagaccaccatcagaaaggacattgccgatttccccacgctgaaccgcttctccaccacccatggcgacatcgtgctcgctccaccccccatcatacctcgccagacccgcttcatcaccttcaggaaactcgtgtgggggttgtttggctcgctgctgttgtcccaatcccttctggaactgacccgcttgaacttcctcaaatacgacccttggtgcgacgaaatgaaatccgtgcgtgacaagaagttcttcaacaacatcgtcaagtactaccacgagggcatagaccccaccaagataaaggtcaaggacgccatgaacggcacgccgctgtcgacaaacatccccgaggtcaagcagagcgtcgccctcgctagagcccaagtggaggcacaaaaccccatcatcaggtggttcggacccttggaatacaagcctatgtccttcaacgagtacctcaatcgcatggaattccacttggacatgttcgagtttttccaaaacaaaagaaacatcagagaaaactctatcgagctgatcaactcgatatcccagtcctctgcaggcctggaagacctttccgagtgtaagaagctacatttacagaacgtcgaaaagagactgcatttcctggcatcctcgaaggatgccacccccgcgccagagaaaaggagaaccaacaccatgctttcacgaggagtcgtcttgccccacgacaccaacgctccgcaagatatagacctagatacaataagatcgctgtacgatccgtggatgactttggccttggaaacttctctaagcataaaattcatacccaccactatgccctcccacaccaagactcccaccacaaccgattctccaggtccaggccccacacctaaggccatcactaatgaaaagacacattaa

SEQ ID NO: 273 - DNA, 1503 bp, Saccharomyces pastorianus
atgtcttttgacgacctacacaaagccaccgagagagcggtcattcaggccgtggacaagatctgcgacgagttcgaagtcacccccgaaaaactggacgagctaaccgcctacttcatcgagcagatggaaaaaggcctaaccccgcccaaagaagcgcacgcactggcctcggacaagggcctgcccatgattccagccttcgtcaccggctcccctaacggaaccgagcgcggcgttctactagccgccgacctgggcggcaccaacttccgtatctgttccgtggatcttcacggagaccacacgtttggcatggaacagatgaagtccaagattccggatgatcttctggacgacgagagcgtcacgtccgacgacctgttcgggttcttggcccgccgtacgctggcattcatgaagaagtaccacccggacgagctggctcgcggcaaggacgccaagcccatgaagctcggattcacgttctcttaccctgtggaccagacgtcgttaaactccgggacactgatcaggtggaccaaggggttccgtatcgcggacaccgtggggaaggatgtggtacaactgtaccaggaacaattgcgcgctcagggtatgcccatgataaaggttgtggcgctgaccaatgataccgtcggtacgtacctctcgcattgttacacttccgataacacggactcgatgacttccggagaaatctcggagccggtcatcgggtgtattttcgggaccggtaccaacggctgctatatggaagagatcgaaaaaatcaccaagctgcccaaggagctgcgcgaaaagctggctcatgagggtaagacacacatgatcattaacgtggagtgggggtcgtttgacaacgagttgaaacacttgcccacgaccaagtacgacatcgtgattgaccagaaactgtccacgaacccgggcttccatctgttcgagaagcgtgtgtccggtatgttcctgggcgaggtgctgcggaacatccttgtggacctgcattcgcagggtctgctgctgcagcagtaccgctccaaggagcagctgccccgtcatctgacgacgccgttccagctgtcgagcgaggtgctatcgcacatcgagatcgacgattccacggggttgcgtgagacggagttgtcgttgctgcagagcctcagactgcccaccacgcccacggagcgcgtgcagatccagaagctggtgcgcgccatctctaggcgttccgcgtacctggctgcggttccgctggctgctatcttgatcaagaccaacgctttgaacaagaggtaccacggtgaggtggagatcgggtgtgacggctccgtcgtcgagtactacccgggcttccgctccatgctaagacacgctctggccctgtcgcccctgggcgcggagggtgagaggaaggtccacttgaagattgccaaggacggctccggtgtaggtgctgccctgtgtgcgctggttgcctga

SEQ ID NO: 274 - DNA, 2259 bp, Saccharomyces pastorianus
atgtcacagagcaacaagatcgcgtacgtgctgaactccgacacgcaggaggccggcgagtcggcctccgtcggctgcttcgacaagaagcagctggccaagctgctcgtccacacgctcaaggaattgggctacgactccgccgcggaccagctgctcctggagagcggcgggtaccagaacgagtcgaaccatatccagaccttcttcaggctcgtcaagaccggccagttcgacctcatcgactggcgcagcgtgtgttcgctgcccctcgcacatagctcgccgctcaggcctgcactgctgcaaacgctgctctcgcccgcagcgcccaccagcagcgccaccgggtcgctgtttgaccacatgcttcagcagctgcagggactgcagctgctgatggcgtctgtgggcccgtccacttgctcggacgccgaggtcaccacgctcaggaactacgtcgagatcatgatcctcgtcaacaggcagatcttcctcgagttcttccacccgcctgcagctgctgctgctgccgccgccccccacgcgggcccgcccaccacgctgcccgtcctgtacctgcgcaaggtcctcaagtgcttcatcgagatctgggacgcgctgttggtgtccaatgaccagttcctcaacgaggagaacatcttcaacccggaaacaaccttgagagagctctccacgtacctcacgaacccgaagctcacggcgcacttgaacctcgagcgcgaccacctgatcgacgccatctccaaatacatcgacccgaacgagctcgtgcccaagggccgcctcttgcacctcttgaagcaggccatcaagtaccagcagtcccaggacatcttcaacatcctcgacccggacgacgacgcccccttctcctccgagtcccaccgcatcaatctgctgcaggacaacatctcgcacgacttgactgtgaccttccaggactggaagaccatccaggacaccaccgacgagatctggttcctgactttctcccccgacggcaagtacctggcctccgccacctccgagtcctccaggggctacttcatcaccgtctatgacgtgcaacaagacttcaaaatccacaagacctgcgtgagcctgtcgcagtccgtgctctacctcatgttctcccccagcagccggtatctcgtcgcttgccccttcagcgaggacgtgaccatatacgacatgaacgcaatctctccgccggatgtctctgccacagactcgttcttaccgtactcttccaccaggctgtcacccatggactccttcaaactggacacctccccatacctcgacgacacggaatcctcagcgtcgtcctcatccaggcctgcaaacgcgacttccagccagtcccgggtgtggtgctgcgatgccttccacacagcgcagcacgaagactggatggtcgtcggatcgcccgacagagaagccatggtgcactctctcactacaaaggagtcgctcttcagcttgaaaggcaggacatgtatcgctctaggccacgacgaaaacgtctctggaagaaaactaatagacccggcaaaggtcctccatacggccaagacaagctgtggtggcagctggcagtacgtcgaggacgacgaagctttcccgcgcgtccacgacgtgaagatcagctacgacgacaactacgtgcttttaatgacccaccagggcattgtcgatgtctacgattttagcgggttcccctccagagaaatgctatccaagcaaacaatcgacttgaaggatttcttgattccaagagtcgcgagactggacattggcaaaaacatgacctgcatgtcactaccactgaacaccaccacccaccatcgccacagacatcaaataaccgaatctcaacatttggtcttggttagtttgcaagataacgaactacaaatgtgggactataaagagaatatcctcatacaaaagtatttcggccagaaacaacagcatttcataatcagatcttgtttcgcctacaacaacaagattgtcatgagcgggtccgaagacggcaagatttacatttgggatagaatcagaggtaatttgatctctgtgctctccggtcattccacactgatcaacaactcctcaaaacccgttgtgaaaaactgtaacgtggtcgcatcaaatcctgtcgataaagaaatgtttgtgtctggcggcgatgacggtaagataaaaatctggaaaatatcaagaaactaa

SEQ ID NO: 275 - DNA, 1587 bp, Saccharomyces pastorianus
atgagctatggaagtatacatgatatgaatgaaccggagaccaaccgtataataaaaaaaacccaaaacaacatcaagggatggtacttgtattcgttttctagtgagccgtttgtggtttctgcggtttcgacctatattcccttgttactgcaacaatttgccagtattaacggtgtaaaggtgcgcgaccatgccataccttgtctggctgaaaatggaagtgattcagataagtgtgttctcggcctatttaacaataggatatttgtggatacctcgagttttgctttgtatgtgttttccattagtgttttgttccaaactcttattgtgatatctgtttcagggatagtagatctttggggaagcgttaaattcaagggcagagttctggtttggtttagtataataggtgcatttgctactattgccatttcaaaattgaatgacacccaagtgtattctctagctgggctttatattatagctaatggttgttttggtgttattaatgtggtgggaaattcccttttacccacatttgtcaaggattcattgaaaagtcaaagtcaaggagtttatgaacctgatgatgtggattcacttacaacgctgatcagcggtagaggtgcttcgctaggttattcaagtgcattgattgttcagattgtgtctatgtttttggtctcattgaaaaagggcactaagcaagacattcaaatcgctgttcttttcttggggctttggtggtttgtgtggcaattacccatgatctggttgattgatgatgtaacgataccagctacaggggacgggtccactgtagcatctacccatagttcgtattatgatgagcaaagacgtacgggaacgctaagttggaaaacgtacctttcatatggttggctgtcgcttttccaatcgttcaaacacgccaagctattgaaggatgtaatgatcttccttgttgcgtggtttatcattagcgattccattaccacgataaactctacggcaattttattctccaagacagaactacatatgagcacccttaacctaatcatgataagtatcctgaccatggtaaatgccatgctaggcgcttttgtcattccgcagttcctggcgacaaaattccggtggtcatccaatcaaaccttgatgtacattattatttgggcaagtttcatcccattctacggtatactcggatttttctttgatgcgtttggtttgaaacataagttcgaaatgttcctattggccatttggtacggattatcattaggtgggttgtccgccgtttcaagatcagtctttagtttgattgtgcctcccggaaaagaatctacatttttcagtatgttcagcattacagataaaggttcatccattctggggccctttatcgttggtctactcactgacagaacgcataatattcgatattcgttttatttcttcttttttcttttaattctatcattgcccgtattgaactgtttggacgttaaaagaggcaggagagaggctgagcaattgagccaaatttctccagagactgaaagaagattggattga

SEQ ID NO: 276 - DNA, 1065 bp, Saccharomyces pastorianus
atggggtttcttacggatcatccacacaccgcaattaccgagacgatctttcggatcgtctcttcaagagactacacgctggaggtggagctagcacccttgatccagctgatcaaggctgaccacaacgactacaactacactatcaaccaggaggaggctgctcgggcactcagaaagaagatcaagtatggaaaccggctacaacagtccaggacgctggacctcctggacctgtttatttcgcagggtgtcaagttcaccgtgatgtacaacgatgacaaactgctgcagaggctgcagggcatggcaacaaactccgaaaccagcgggtccggagaaaagtacgagtcccggatcatcaagaagtgtgccggctatgttattgcgtgggcgaactacattgtgcagaatggtctggagcgtgccagagcctatgcgggtctttaccaaatgggcctgttggtcaagcagaagtactcaaaaaccagccgttccagccgtcgtagtgggcgttccggtggccgctcaaacttcatggatgatagtgccgacgacactttgtaccagtccggatcactaaccagtgccgataggctgtataggattccgcagatcaacatgaacaaggaggcacccaggatcaggctcatcatcagtgatgctctcgcgtctgctgtctccttgcaaaactcgctgatcgggttgcccaaggctaagtgctccacggacgacgaagaggctacgtccaagttcatccaggccagggccatcaggaggaaagttcttagatacctgcaactggtcaccgagggcgagtttcttggtagtttgattcatgccaacgatgagttggttgctgctttgactgcatatgacgagagaagtgctcaggatgacgccgccgacgaggatgaccatgactcgtacaacgatgacgtttacgatgaaaacgagcaggacaacagcaggtacatcgacagcgactcctcggaggaggagagcctatcctcgtgtcagccctccagcgcctcaaacccattcggcgatcataataagatttaa

SEQ ID NO: 277 - DNA, 1041 bp, Saccharomyces pastorianus
atggaggacgagaaacagaccatgagggagggctcgaacgatgtctcgcccggcctggacgtcaacgatacgatactaatgaataacgaagattattcgcaatggtcggtcgatgatgtggttacttggtgtatttccacactggaggtggaagaaacagatccgttatgtcagaaattacgggacaacgacatcgtgggtgatcttttgccggaattgtccttgcaggattgtcaagagttatgtgaagatgatttgaataaagctataaaactcaaaatattgatcaataagctgagggacgtcaagttggaatggaaggacgacaagactcaagaagacatggtgacggtcctgaagcatctgtacactacaacttctgctaaactacaagaattccaatcacagtatactaggctgaggatggatgtcttggaggtaatgaagaccagttcgaactcttcgcccatcaatacgcacggagccttgactgcagcgccttcgtcaagcaacacaattatacccacccatgacggggtgcccctaccacaaacggaatattttgacacagctcacaaccgacaatcgccatcaaggagagaatcaccggtaacggtatttagacagcccagtctctctcataccaaatcatcattcaaggatagcaagaacaaactaccgcaaatatctacaaaccaatttcactctggggcaacctccacatcaaacacaccaggaccgtcacccaatgaggcattaaagcaattgcgtgcttctaaagaggactcgtgtgaaagaatcttgaaaaatgcaatgaaaagacacaatttggctgatcaggattggaggcagtatgtcttggtcatctgctatggggatcaagagaggctgctggaactgaacgaaaagcctgtaatcatattcaagaatctaaagcaacagggtttgcacccagctattatgttaaggagacgaggcgattttgaagaagtggcaatgatgaacgggagcgataacgtcactcctggtgggagactctaa

SEQ ID NO: 278 - DNA, 894 bp, Saccharomyces pastorianus
atgggtaatgaagacatcaacaccatgaaaaatggatttatagtggtgccgttcagattaccagaccacaaggcattacccaaaagtaaagaagcttcattgcattatatgtttgccagaagacatcaaagctcgaacgccaatgaatcggattgtttgtttttggtcaatctaccattattatccaacatagagcacatgaaaaaatttgttggacagctttgcgagaaatacgatacagtatcacatgtggaggaattactatacaacgatgagtttggtttacacgaagtggacttatccgcgttgacctctgacttgatgtctactgctgacgttaacgaaaaaagatacactccaagaaatacagctctattgaaatttgtcgatgacgcaagtataaataattgttggaatgctctaaggaaatattccaatttccatgctaaacacccaaaggaactgtttgagtggacatataccaccccatctttcaccactttcattaatttctacaaaccactagatatcgattacttgaaagaagacattcacacgcatatgatggtgtttgaacagcgtgaagctcaagcacaagaggacgttcaaagctctatagtggatgaggatgggttcacactagttgtgggaaagaacaccaagtcgttgaattcgataagaaagaaaattctgaacaagaatccattatctaaacatgaaaacaaggctaagccagtttccaatattgacaagaaggcaaagcaagatttctacaggttccaagtcagagagcataaaaagcaggagatcaaccaattgttaagcaaattcaaggaagaccaagaaagaatcaaggtaatgaaagccaagagaaaattcaatccatacacttaa

SEQ ID NO: 279 - DNA, 2400 bp, Saccharomyces pastorianus
atggtgttaccaattctaccgttgattgatgacctggcctcatggggcaccaagaaggcatacgcttcccttgttggtcaagtgctcctggatggttcgagcctaaacaaagacgaggttctccaatttgccaaggaggaagaggtgcctttggtggccttgtccttgccaaatgccaagttcagtgatgatgatatcattgcctttttgaacaatggggtgtcttctcttttcattgcaagccaagatgctaagattgtcgatcacttggttgaagagttgaatgtgccaaagaaccgtatagtcgtggaagaaaatggtgtctttcacaatcaatttttagtgaaccaaaagttttcgcaagatagaatcgtgtccataaagaaattgaccaaggatttgttgattaaagaagtggtcgctgaagtacgcaccgatcgtcccgatggtttgttcaccacactggtggtcgaccaatacgagcgttgtttagggttagtatactcttcaaaggaatctatagcaaaagccattgacctaggtcgtggtgtttattattctcgttctagaaatgaaatctgggttaaaggtgagacttccggcaatggtcaaaaacttttgcaaatctctaccgattgcgattctgatgctttgaagtttattgttgagcaagaaaacgttggattttgccacttggagaccatgtcttgctttggcgaattcaagcatggtttggtcggattagagtctttactaaaacaaagattacaagacgctccaaaagaatcttatactagaaggttattcaacgatcccgcactattggatgccaagatcaaagaagaagccgaagaactgaccgaggcaaagggcaaacaagaaatatcttgggaagctgccgacttgttttactttgcattggccaaattagtaaccaataacgtttcattgaaggatgttgaaaataatttaaatatgaagcacttaaagattacaagaaggaaaggtgatgctaaaccaaagtttgtggcacaagccaaagctgaagaggaagcaccaaccggtccaattcacttacacgtggtaaatgcctctgacaaagaaggtatcaagaaggccttgagcagaccaatccaaaagacttctgaaattatgcatttagtcaatccaatcattgagaatgttagagatagaggtgactctgctctattagagtacactgaaaaattcgatggtgtcaaattgtctacacctgtgttgaatgcaccattcccagaagagtatttcgaaggcttaactgaggaaatgaaagacgctttggatttatccattgaaaatgttcgtaaatttcatgctgctcaactgcccaaggagactcttgaagtggaaacccaacccggtgttctatgttccagattccctcgtcctattgaaaaagtcggtttatatatcccaggtggtactgccatcttgccaagtactgccttaatgcttggtgttccagctcaagtagcccaatgtaaggaaattgtcttcgcttctccaccaagaaaatccgatggtaaggtttcacctgaagtcgtttatgttgcagaaaaggtcggtgctcgtatgattgtcctagccggtggtgctcaagccgttgctgctatggcatatggtactgaaaccattcctaaagtggacaaggttttgggtccaggtaatcaatttgtcactgctgccaagatgtatgttcaaaatgatacacaagctctatgttcgattgatatgcctgctggtccaagtgaagttctagtcattgctgatgaagatgcagatgcagattttgtggccagtgatttactatcacaagctgaacacggtattgactcccaagttatccttgttggtatcaagttgagcgaaaagaagatacaagaaattcaagatgccgtccacgatcaagctatgcaactgccacgtgtagatattgttcgcaaatgtatcgctcatagtacaatcattctttgcgatggttatgaggaagctctcgaaatgtccaacaaatatgcaccagaacatttgattcttcaaatcgccaatgctaacgactacgttaaactggttgacaacgcaggttccgtgttcgtgggtgcttacactccagaatcgtgtggtgattattcaagtggtactaaccacactttaccaacatacggttatgctagacaatacagtggtgccaacactgcaaccttccaaaaattcatcactgctcaaaacatcacacctgagggtctagaaaacatcggtagagctgtcatgtgtgttgccaagaaggaaggtttggatggtcacagaaacgctgtgaaaattagaatgagtaagcttgggttgatcccaaaggacttccagtag

SEQ ID NO: 280 - DNA, 1326 bp, Saccharomyces pastorianus
atggatagataccaaaggaaaataggatgtatcatacagatccccaacttggggaggggacagctgaagtacgtgggcccagtggacacgaaagctggaatgtttgccggtgtggatctgttggccaacattggtaagaatgacgggtctttcatggggaggaagtactttgacacagaatatcctcaaagtggactgtttattcaactgcaaaaagtggcatctctgatcgaaaaggcatcgatatcgcaaacttcaagaagaaccacgatggaaccgttatcgatacctaagaacagatccatcacaaggcttacgaaccagttttcgcccatggacgatcccaaatcccccacaccgatgaggagtttccggatcactagtcgaaacagtggcaaccaccaacagacgacggatcaagaggcgccggatcatcgccaacaggaacccattcacgataacggagatgacaggatggagatcgactctatcgtatcgtccgagagaaagaccccccataacaacggcaacgattggaaagcaagcaacagccatgtgaacgatcataatagcaacgaggttaccatagaattacgagaggctcaattgaccatcgaaaagttacagaggaaacaactgcactacaaaagactactagacgaccaaagaatggtccttgaagaagtacagccaacatttgatagatatgaagccacgatacaagatagagaaagagagatcgacgaactcaaacagcaattggagctcgaacacagacaacaagccaaacaaaagcagtttttcgacgctgagaatgagcaactgcttgctgtcgtaagccaactgcacgaagagatcaaagaaaatgaggaaagaaacattgcccacaaccaacccaccgacagcagcgaagatatcgaactcctgaagaggcaagtggagcagctacgtagtatagaagaccaattcgagttgcacaagacgaaatgggccaaggaacgcgagcaattgaaaatgcataacgactcattaagcaaagaataccaaaacttgagtaaggaattattctcgaccaaaccacaggactcctcctcttcggaagaggtggcagccttaacgaaaagtcttgaagaggccaacgaaaggatcaaacagttggaacaggctcaagaccatccaaccgtggaatccttacccattttcgatccccctgcaccggtggattccacggctggaagacaacagtggtgtgagcattgtgatacaatgggccatatgacagccgagtgcccccaccatgaccctgacaaccaacagttcttttaa

SEQ ID NO: 281 - DNA, 1197 bp, Saccharomyces pastorianus
atggatactgataagctaatctcggaggctgagtctcatttttcccaaggcaatcacgcagaagctgttgcgaagttaacctctgcagcacaatcgaaccccgatagccaacaaatgtcgactattgaatcactaattcagaaaattggtgggtatgtcatggagaaccgtagcggtggtgaagacgcctcacaagaccgtgctgttggcggtggctcgtcctttatgagcacgttgatgtcagactcgaagggttcttctcaatcccaactgggtaaactggctttgttggctactgtgatgacgcattcgtcaagcagcagcaattctagcagggggttcgacgtgggcaccgtgatgtcgatgttaagtggctccggtagtggaagccaaagcatgggtgcttctgggctggctctcttggcttcccagtttttcaagtcaggaaacagctcccaaagtcaaggtcaaggtcaaggtcaaggtcaaggtcaaggtcaaggtcaaggctctttcactggattggcgtctctagcctcatccttcatgaattccaacaatgggaagcaacaaggccaaagtcaagggtccggtggctcgtcatttggtgcgttggcctccatggcaacctctttcatgcattctgatagtaaccagaactccaacggtgcccagcaaggctacaaccaaactaaccagaacaataatcagaattccaactaccaaaacaatcaaggtcacaataaccaacagtaccaaggtggtaacggtggtcaacaacaacaaggccaatccggtactttttcctcattggcgtccatggctcaatcttacctaggtggacaaactcagtccaaccagcaacagtataaccagcaaggtcaaaatcaacagcagcaataccagcaacaaggtcaaaaccagcaatatcaacaacaaggccaacaacagcaacagggtcactcgggttcattctcggcgctggcttccatggctagttcctacttgggcaacaaccagaactctaactcgaactcgaactcgaactcgaactcgggtggccaacaccaatccaacgagtatgggagaccacaatacggtggcaaccagaactctaacggcaacggcaacgattctttcaacttctctggtaatttttcccaacagaaccacaatggtaaccagaaccgttattaa

SEQ ID NO: 282 - DNA, 582 bp, Saccharomyces pastorianus
atgtctgttgttggaacgtatttgaaaactttaacggctcgtcgtaccatctacgctttaaagccggaactacctggtgagatcaccattaaagacatccactctgttgttcagactatcatcaaagaaaccccaactgctttcaattcccagccaaaccgtgccatcattttaactggtgaagctcacagaaaggtctggggccaagtgaccgacggtatcgagagtcccgacggcaagaagagacctgcttcagcaagagacgaagccttcggttccgtgatattcttcaccgatgataaggtgactgaaaagttaaaggcggacttcccagcttacgcagctgcattcccaagtttcgccgaccacacttccggtgctgctcagatcaattcgtgggtcgctttggaagccatgggtttgggcggtcatctacaacactacaacggctacgtcaaggccgccttaccgggcaagatcccccaatcttggaccgtgcaagctcaattggtcttcggtactccagctgctcctcccgctgaaaagacctatatcaaaaacgatgttgaagtgttcaattag

SEQ ID NO: 283 - DNA, 1095 bp, Saccharomyces pastorianus
atgtctactactaagaaaatcgtcgttctgccaggtgaccatgttggtcaagaaatcactgaggaagccattaaggttctcaaagccatttctgacgttcgttccaatgttaaattcgatttcgaataccacttaattggtggtgctgctatcgacgccacaggtgtcccacttactgatgaggcgctagaagcttccaagaaggcagatgccgttttgttgggtgctgtgggtggtcctaaatgggggaccggtagtgttagacccgaacaaggtttactaaaaatccgtaaggaacttcaattgtacgccaatttgagaccatgtaactttgcatctgagtctctattagaattatctccaatcaagccacaatttgctagaggcactgacttcgttgttgttagagaactagtcggaggtatctacttcggtaagagaaaggaagacgatggtgacggtgttgcttgggacagtgaacaatacaccgtgcctgaagtgcaaagaattacaagaatggctgcgttcatggcactacaacaccaaccaccattacctatctggtccttggataaagccaatgttttggcctcatcaagactatggagaaagactgcagaggaaactatcaagaacgaattcccaacactaaaggtccaacatcaattgattgattctgctgccatgattttagtcaagaacccaactcaattgaatggtattataatcaccagtaacatgtttggtgatataatttccgatgaagcttcttgtattcctggttcattgggtttgttgccatctgcctccttagcttctttgccagacaagaacactgccttcggtttatatgaaccatgtcatggttcagccccagatttgccaaagaacaaagttaaccctattgccaccattttatctgctgctatgatgttgaaattatcactaaatatgtctgcagaaggtcaagccattgaagatgctgtcaaaaaggttctagatgctggaattagaactggtgatttgggtggttcaaacagtaccaccgaagtcggtgatgctgttgccaaagaagttaaaaagattcttgcctaa

SEQ ID NO: 284 - DNA, 1506 bp, Saccharomyces pastorianus
atgttgaaattatctactgcaaggtcggttacgagactatctcaactctataattttccggccgccacgtataggctaaagggttctgcctgtctggctaatatgaggttttattatccccccgcagcaggtgtaaatttggacgataccttttcactagaaacccatacggatatccaggctgctgcaaaggcacaggctagtgcccgtgctagtgcatcaggaaccactcctgatgccgtagtggcctctggaagtactgccatgagtcatgcttatcaagagaacactggatttggtacccgtcctatatatcttgacatgcaagccacaaccccaacagaccctagggttttagacaccattttaaagttctacacaggactttatggtaatcctcattccaacactcactcttacggttgggaaactaatactgccgttgagaacgctagagcccatgtggccaagatgattaacgctgaccccaaggaaataatattcacctcgggtgccaccgagtctaataacatggttcttaaaggtgttccaagattctataaaaagaccaagaaacacctcatcaccactagaacagaacacaagtgtgttttggaagctgcaagagccatgatgaaagaagggtttgaagtcacttacttgaacgtgaacgatcaagggcttatcgatttgaaggaattggaagctgctattagaccagatacatgccttgtctctgtgatggctgtcaataatgaaattggtgttattcaacccatcaaagaaatcggggccatctgtaggaagaacaagatctatttccacacggacgccgcacaggcttacggtaaaatcccaatggatgttaatgaaatgaacatcgatctattatccatttcgtcccataagatatatggtccaaaaggtatcggtgccatctatgtaagaagaagaccaagagttagactagaaccattgctatccggtggtggccaagaaagaggtttaagatcaggaactttagcacctccattggtagcggggttcggtgaagctgcaagactaatgaaagaggaatttgacaacgatcaagcacatatcaagaggttatctgacaaactagtcaacggtttgttatctgccgagcatactacattgaatggatctcccgatcatcgttatccaggttgtattaacgtttcatttgcctatgtggaaggtgagtctctattaatggcactaagagatatcgcattatcctcgggttcagcctgtacgtctgcttccttagaaccttcttatgttctacatgcattgggtaaggatgatgctttggctcattcttccatcaggtttggtatcggtagattcagtaccgaggaggaagtcgactatgtcgttaaggccgttgctgatagagtaaagtttttgagggaactttcaccattgtgggaaatggtccaagaaggtatcgatctaaattctattaaatggtcaggtcattga

SEQ ID NO: 285 - DNA, 1143 bp, Saccharomyces pastorianus
atgtccatcaacctacattccgcatccgagtacgacacgtcttacaaactgatccagttgacgccagaactgctagacatcattcaggatcccgcacaaaataaccaattaaggttcaagtcgctagacgaagacaagtcagaggtcgtgctgtgctcgcatgacaagacatgggtgctgaaacaacggaagcactcgaacacggttctgttgatgaaggagtttgttcctgaggaacccattagttttgacgaaacgcagctgtttggactgtccaagccgtacatggacatactaagttttgccaagaccgagtcggaattcgagaccagggaggcagagggccaattgaacctggatgcagtaccaatgtacgatggagagttagacttccgtgaaagggctatgaaaaagtcgtccacgaggattttcgaaacgctggaggaacttctagagaactcaccttgctctgcagtggagggcgtatcgaaatggcacaagatcggggggtctgtcaaggatggcgtgctatgtattctctcgcagaacttcctctccaaagccttacacgtgttgctgatgagtgtaatggcggaatcgctggatctgcaacgtttgcaaattgacgacacgtaccaggcagtgggaaaggacatcgagaacgaatttaatccatatacaaaagaaataatacggactgtgttaaataaatttgcagtccaggagcaacaatcccaggaggaaacgtggcgcttaaggataccctttattgcccagtggtacggcattcaggcgctacggaagtacgtttcagggacaagcatgccacttgatgagtttctcatcaagtggaaatcgctgttcccacctttctttccctgtgacatcgatgtcgagatgcttcgaggctaccacttcaagcccaccgacaagaccatacaatatgtagccagaagtaccctgccgacggacccaaaggagcggttcagagtcctattcaagttgcagtcccagtggaacttggaagacatcaagcctcttatcgaagagttgaatataagaggtatgaaaatagacagcttcatcatgaagtatgctcgcaggaaaagactgggcaagaaaactgtagtaaccagcaggtag

SEQ ID NO: 286 - DNA, 4881 bp, Saccharomyces pastorianus
atggagaaagacctctcgtctctttactcccaggaaaacggtggaggaaatcatgagacccacttcataaccaaattgttcaaatccgttctcgaggcctcgtcgaaggctggccattcgctactggatgagaacagatcgctctcgaaatggaccgatgatgtgtttactcgatcggtgatttatcgcggttcagatgacttgatatggggcgaattcttcatctgcgtgtataaaccatccagaagcactaagctaaatgctataatattcgataaattgggcacgtcatgttttcaatcagtggatatatctcccgattcacagtactatccggccattgagaatttgagtccaacagatcaggaaagtaatgtcaagaaatgtattgccgttgttctgctcaaacgctaccctttgctgtctcgatcagatttatcccgaattttgtccaacacttcaaaaaaatgtgactatgaccctactcatgcaggagatctggctagcagttgtcaactgataacagcagcccctccagaagatgtggggaagtggttgtttgcgtccggatttctgcaaaataaagtcatcaattcagctttgctggacgtcatctatgaaaacaatgagtctaccattgaactcaataacagactagtattccatttgggcgaacaacttgaacaacttttcaatccagttacagagtactcaccagaacaaacagagtatggctacaaagcaccagacgatgacaaggctaccgaatctgatgacgtccttgtgaaggccatttgcaacgagctgttgcaattacagacaaattttacctttaacttggtggaattcttacagaaatttttaattgttttaagagttaaagttctcaatgaagaggttgatgggttgtccactgccaaactgaaccgactctttcctcccaccatagatgaagttaccagaataaattgtattttcctggactctttgaaaacagcaaccccctacggatccctcgaagtgctcaaagcatgcagtataaccattccttatttttataaggcatacacaagacatgaggcagccaccaaaaatttcagcaaagatattaagttgttcgccagacatttcagcaaggtgattccagagagggatatttatacagaaatgaaaatcgaaaccataatcaagggtccccaggagaaattgttaaaattaaagctaattgtagaaaggttatggaaatccaaaaaattgaaacccgaaaaccaggaagtagccaagaaatattacgataatgttgttgatgtcattcattcgtttggtaatttagactctcccctgacttcatatagtacaagagtctttaccccctcaggaaaaattcttacggaattagccaaatgttggcctgtggaactacaatacaaatggctgaaaagaagagtcgttggtgtgtacgatgtagtggatataatcgatgaaaagaagaagaatttattagtcatatttagtgattatgttgtctttatcaatatactggaatcagaaagctattacgcatcagatggatcaaacaggcccttgatttcagatattttaatgaactcgttaatcaatgaagtaccgttaccctcaaagattccgaagttaaaagtagaacgtcattgctatatagacgagatattggtttctatattggacgagaattcattgcgctttgattgcttaaaggggaaagactccttttcagtcgtttgtaaattatcctcctcttttatctcttcctcgacagtggctgatttaattacgaaggctagaattttggagaaggataccgcattccatcttttcaaagctagtagaagtcatttcacattgtattccaccgcacatgagctttgtgcttacgatgcagagaaaattaaatcgaaatttgccttattcttaaatataccaccatcagaagaaatattggacatgaacaatcttcatttggctttctttgcaaaatttgccaaggaaggtgatagtaatagcctgatacgtttggacattctaactaaaaacgggaaaaagcatgttcaaattgcatccaataacatcgtttctaccataattaatcaactggctatcgagataccgatatgttactcttccttgaagtcacctttggtccaagatttacttttcgtaaatgtgaatttaatcgaaagtttggaacataaattgaaggaggccaagcgtaattcaccggatgcatccaaggatagtaatagtaaagcttctgatgtgggtaattttgacgccactcatgaaaagaaaagatcgtatggtacaataacaacatttagaagctatacgagtgacttaaaggacagttcggcagcaggtaatagtaaactcacaaaggaagctaagcaaatatcaccagtcaaaccaataaaaaaggcgagggaaattcccaaggaaacgaaaatagtgggaggtgattccaggagagacgatatagagaagcagcaaggtaaaaaaagcaaaggtttttttggtgcattgaaaagtgtatttggaaataagaaaaaaagtaaacctataccacctcaaaaggcacctcaaaaaagttcacagagactacctaagtcatcaacaaggaagcaaacggttacagaaaataagcttctctctaaacgagcaagcgttgttttgtcttctaaaaagaaaagcactccttgtctgacagaaaaatctcaagacactgaatcttctctggaagcggttgaatttaatccccatgaaccaattggaaaatatttcgatgttagaaacgatttgaaccctcaagatgacgcgagaatatcttcagtggtacggaatacaaaatatgtcacccacatgccctcacaaccgaatagcgacaggaaccaagaaagtgaagagtcaaaagaagatcaaaatgcaaagcaaggctctcccttcaacgttactgttgtgggaagattgccatctcttcgcccagaagaatcgaacgttgagagagagaatggaatagttgagaatgcgggacaagcatcgcaaattcctgaacagaaggtactatcagatcgtgttaaagcatcaatggccgaaagggtgaacactgtttcgacgaaggaacaagatagcgatactcaaaatgaagcctcaagtgctgaagaatttttgaactcggatgctaatgacgaacgcaaacagaatgaaagtaaagttttcaacgatgatttgtttggcgattttattcacaagcgttctgaaagtgcagaaaacagtatcaatggtttgaaccataagttccaacagagagaagttcttgacgaaaagagcgaaatgaataccaactccaacatctcttccaaaacggatgataacgcttccacattgatgcaaaaacctttttcacaagcaagtaaagtactgacagagaattctggagactcaataaatactcataatgaagcaaacggcacaacatcaaaaggtgattcaaaagatgcagcattaaaggaagaaacttttaaaggaaggacagaaaaacgagaaatttttcctagtattccaatgccagtacttcgagcctcagaaataagttttcaaaggtcgccatcatacattgaactgttccaaggcatgcgagtagttttggataaatacgatgctcattataattggaagcggttggctagtcaggtctccttgagtgatgggttgaaagtcaatacagaggaagaagcggtgaccgctaatactacttatggtggtgccaactcagagaggatgagcgcaatttctgaaatagttgataataaaattcagcaacccatcccaactcttctggcgaggtattcggatagttctagtaacgatgacgctggtgatgaatttttcgaaattgaagaggatctaaaagaaaagttgaagggtagtattgacattaatgaagttgataccaataagaactcattcaatcttgccccacgaattgaaaagccaccggcattcaaagttattagaacatcgcctgtacgaatcattggtaagacctttgaagacatcagaaaagatgaagagacttctccctctgatgcttcatttctttatgatgcacacaacgaggataaacccgacaaaaggttgatggagctgaagtttccatctcaagatgaagttcaggatgacaaattctatactccatctgaggagcccacaaccacatttcccgaaattaagatcccaaagagtccgggattagataacgttacaattaccaataataataatacgggtgatcagtttattaatgacactgcgcaaaacagaccggctgatttactggatgatttagaatttagttcattcgatattgcatttggaaattcttcgatgagtgcagatgacatcaaagtagcgtcaaattggaatcggaatttaaataaaacagtaccagctaaccctacaaaagttcaagagtctcccaggggcccattagtatatgttcttcccgaaggtagtggaaatcgtaaaggggatgggcgtcttcaaaatacagacaacgatgaacctatctgggtttcgcccagtaaaattgactttacggacttgagtaagaggactaaagcattgtcgccagaacgtaatgctgttcccttaaaaaatattaacatcaatggcaaatccaaaactaccagagaagaatctatcggcaatatgacgaacgcgttgttatctaaggatgtttcctatgcatatttgactgattttgtcactttaagtgatgatgaaggtgatggtaaaagtgaaaaggtgagttatacggcggacggccccgagaggctcgaattttattga

SEQ ID NO: 287 - DNA, 1302 bp, Saccharomyces pastorianus
atggaaagaagactaggaatgtacggaaatgatagaagcagatcgaggtcgcctgtgcgtcgtcgtttgagcgatgacagggaccggtatgatgattataacaacagtaatagtggtagtggcggtagcagtcgccatcaaaggcgtgaccgaggctcccgttttaacgatcgttacgaccagggatacggcggccgttaccacgatgacagagactggcctccccgccgagggggacgtggtggcagaggaggaagcggatcattcagaggcggacgtggcggtggcgccagtggcggtagaggtcgtagtttaggcccaattgttgaaagagacttagaaaagcaatttgacgctaccaaaagaaattttgaaaacagcattttcgtgagaaacttaaccttcgattgtacccctgaagacctgaaagagttgtttggcacagtgggtgaaatcgtggaggccgatattatcacatcaaagggccatcatcgtggtatgggaactgtagaattcaccaataacgaatctgttcaagacgctatatcaaaattcgatggtgctcttttcatggaccgtaaacttatggtaagacaagacaatcctccacctgaagcttccaaagagttttctaaaaaggctaccagagaggaagtagataacgggttcgaagtgttcatcattaatttaccgtattccataaattggcagtctttgaaggacatgttcaaagaatgtggacgcgttttacgcgccgatgttgaactggattttaacggattttccagagggtttggatccgttatttaccccacaaaggacgagatgatgagagccatcgacacattcaacggcatggaagtggaaggtagagtcttggaagttagagagggacgtttcaacaacagaagaaaggataacgaccgttataaccaagatccgcaagaccctgaagaagatataagagatgctgaaccagatcttgtgcaagatattaccgtgcacgttgatgaaacggcaacaaaatttactgaaggtgtcaacccaggtggagatagaaattgtttcattcattgtagcaatttaccattctcaacagcaagaagcgatttattcgacttattcggacccattggtaaaattaataacgcagaattaaaaccacaagaaaatggccaaccgacaggtgttgctgttgtagagtatgaaaatttagtagacgcagatttttgtattcaaaaattaaataattataattatggtggctgtagtttacaaatctcctacgctaaacgtgattaa

SEQ ID NO: 288 - DNA, 888 bp, Saccharomyces pastorianus
atggacggctattgggatgttgtggtgtcgtccttgcaagacatatacaatgccaacgaggtcatttccttcgatgacgatttgcaggcgaaaaaagtgagcttcatcaatctgtcagaagatcagctgcaattgcatctaaccacattccaggagcacatggaaaacatcaacagggcgcatcgtattctcgaaaacgtgcgctccaatctgtccttgatgctggacgagccgccggaggagaagaatgaggaaaacacagaagaggtagaagatgaagagaaagcggcaacgccctcgccacagggcaagaagacgccaggaaaggcaccaggcaaagcaccaggcaaagcaccagggaaggccccagggaaagcaccagggaaagcaccagggaaggctccgggaaaggctccgggaaaggctccgggaaaggccggcaggtcgtactggaccagcgagtacaacccaagtgctccgattttgttaggctcagaggtggcttacaagcccaggagaggcaatgccgatggcgaatggatccagtgtgaagtgctcaagataatagcagacggaacgaggtttgaagttagagaccctgagccagacgagtcgggcaattcgggcaaggttttcaagtgtaattggaaagagctgttactgattccgccaggcttccctactaaaaactatccgccaggcacgaaagtcttggcaaggtaccctgaaaccacgactttctatcctgcaatcgtcattggaaccaagagagacggcacttgcaggctgcggttcgatggggaggaagaggtagacaaggaaacggaagtaattcgccgtctggtgttgccgtcgccaatggtttcggcaaatccagcaaagaaatag

SEQ ID NO: 289 - DNA, 930 bp, Saccharomyces pastorianus
atgttgagatcgttgttgcaaagtggccaccgcagagtggctgcctcgtcgtgcgccactatggtgcgttgcagttcatcgtcgacctccgcgttggcgtataagcagatgcatagacacgccgcaagacccccattgcccaccttggacaccccttcgtggaacgccaacagtgccgtctcatccatcatctatgagaccccagccccctctcgtcagccaagaaaacagcacgtcttgaactgtttggtgcagaacgagcccggtgtcctgtccaggatctctgggactttggccgccagaggattcaacatcgactcgttggtcgtgtgcaacaccgaggtcaaggacctgagcagaatgaccatcgtcttgcaaggccaagatggtgtcatcgagcaagcacgcagacagatcgaggacctggtccccgtctacgccgtcctcgactacaccaactccgagatcatcaagagggagttggtcatggccagaatctccttgctaggtacagagtactttgaagacctgctgttgcaccaccacacttccaccagctccggtggcgccgacgccaacgagttagttgccgaaatcagagaaaagcaattccaccctgccaacttgcccgccagtgagatcttaaggttgaagcacgagcacttgaacgacgtcaccaatttgaccaacaacttcggtggtcgtgtcgtcgacatcagcgaaaccagctgtatcgtcgagctttccgccaagcccacccgtatttccgccttcttgaagctggttgagccattcggtgttctagagtgtgcaagaagcggtatgatggcactgccaagaactcctttaaagacaagcatcgaggaggccgccgacgaagacgagaagatcaacgaaatcgtcgacatctcccaattgccacctggttaa

SEQ ID NO: 290 - DNA, 771 bp, Saccharomyces pastorianus
atgtttgtaatagactggagcgtgcagctgtgcataggggtactggggcccgtgttccgtgctctcgtgcaattgcctctgtcgattttcatctggaatgggttccagctcgtggcattgcccgtcaatatcccactgaagctgattctgggcacgtcgctgtatcgtcttgttgctcacacgggtgccgtggactactacgtggtcttgacgctgttccagtacctggctgtgctttgcgcattcggtggcattatagggctcatctccggcttcgtgtttggcgtgttccattccatttgcggtgtgcccagtgtgtatgtcagtctcgagtggaagccatggtttgcaccggtacacaggttctttgagcgtgtctccactaccattatcaacatcatgcaaggccaaaccaccgctccgatacccatgtctatgcccatgcgcatgtcaagccttggtaagaagcaccccaacgagagggaagaggaagaaatcgatgatgcgactataacacacgaaaacaatggctacatgactccctgtcagacccccactaatgaaaaatttcagcattataataatgattcattcaatacgaccactacagacgatgaacccactgatatctgggatagatccgatacttaccaaaactcgtttgccaccaacgagaccctaatgtctctttccaatagagccaaccttcgaagaaatgtgagtgatgccgacatcgttaatatcaaggctttaagaagaaattcaagatga

(The sequence listing continues in the following parts.)
